United States Patent Application Publication US 2021/0180091 A1 - sequence listing, part 8

SEQ ID NO: 156731 - DNA, 20 bp, Artificial Sequence
  Synthetic oligonucleotide; GAG chr2 60451086 60451105 60451102 +
aagtcgtgagatctgtccca

SEQ ID NO: 156732 - DNA, 20 bp, Artificial Sequence
  Synthetic oligonucleotide; GAG chr2 60451088 60451107 60451104 +
gtcgtgagatctgtcccaga

SEQ ID NO: 156733 - DNA, 20 bp, Artificial Sequence
  Synthetic oligonucleotide; CAG chr2 60451091 60451110 60451107 +
gtgagatctgtcccagagag

SEQ ID NO: 156734 - DNA, 20 bp, Artificial Sequence
  Synthetic oligonucleotide; AGG chr2 60451092 60451111 60451108 +
tgagatctgtcccagagagc

SEQ ID NO: 156735 - DNA, 20 bp, Artificial Sequence
  Synthetic oligonucleotide; GAG chr2 60451108 60451127 60451124 +
gagcaggtgaaataatgcac

SEQ ID NO: 156736 - DNA, 20 bp, Artificial Sequence
  Synthetic oligonucleotide; CAG chr2 60451112 60451131 60451128 +
aggtgaaataatgcacgaga

SEQ ID NO: 156737 - DNA, 20 bp, Artificial Sequence
  Synthetic oligonucleotide; CAG chr2 60451124 60451143 60451140 +
gcacgagacagcactgtata

SEQ ID NO: 156738 - DNA, 20 bp, Artificial Sequence
  Synthetic oligonucleotide; AAG chr2 60451130 60451149 60451146 +
gacagcactgtatacagtat

SEQ ID NO: 156739 - DNA, 20 bp, Artificial Sequence
  Synthetic oligonucleotide; AGG chr2 60451131 60451150 60451147 +
acagcactgtatacagtata

SEQ ID NO: 156740 - DNA, 20 bp, Artificial Sequence
  Synthetic oligonucleotide; TAG chr2 60451134 60451153 60451150 +
gcactgtatacagtataagg

SEQ ID NO: 156741 - DNA, 20 bp, Artificial Sequence
  Synthetic oligonucleotide; TAG chr2 60451147 60451166 60451163 +
tataaggtagttcactactg

SEQ ID NO: 156742 - DNA, 20 bp, Artificial Sequence
  Synthetic oligonucleotide; CAG chr2 60451151 60451170 60451167 +
aggtagttcactactgtaga

SEQ ID NO: 156743 - DNA, 20 bp, Artificial Sequence
  Synthetic oligonucleotide; AAG chr2 60451172 60451191 60451188 +
agtcattatttattatgaat

SEQ ID NO: 156744 - DNA, 20 bp, Artificial Sequence
  Synthetic oligonucleotide; CAG chr2 60451175 60451194 60451191 +
cattatttattatgaataag

SEQ ID NO: 156745 - DNA, 20 bp, Artificial Sequence
  Synthetic oligonucleotide; AGG chr2 60451176 60451195 60451192 +
attatttattatgaataagc

SEQ ID NO: 156746 - DNA, 20 bp, Artificial Sequence
  Synthetic oligonucleotide; TGG chr2 60451202 60451221 60451218 +
taattcacatgccaattatt

SEQ ID NO: 156747 - DNA, 20 bp, Artificial Sequence
  Synthetic oligonucleotide; AAG chr2 60451218 60451237 60451234 +
tatttggctatcttttcact

SEQ ID NO: 156748 - DNA, 20 bp, Artificial Sequence
  Synthetic oligonucleotide; TAG chr2 60451222 60451241 60451238 +
tggctatcttttcactaagc

SEQ ID NO: 156749 - DNA, 20 bp, Artificial Sequence
  Synthetic oligonucleotide; AGG chr2 60451223 60451242 60451239 +
ggctatcttttcactaagct

SEQ ID NO: 156750 - DNA, 20 bp, Artificial Sequence
  Synthetic oligonucleotide; TAG chr2 60451231 60451250 60451247 +
tttcactaagctaggtaatc

SEQ ID NO: 156751 - DNA, 20 bp, Artificial Sequence
  Synthetic oligonucleotide; CAG chr2 60451235 60451254 60451251 +
actaagctaggtaatctagc

SEQ ID NO: 156752 - DNA, 20 bp, Artificial Sequence
  Synthetic oligonucleotide; AAG chr2 60451238 60451257 60451254 +
aagctaggtaatctagccag

SEQ ID NO: 156753 - DNA, 20 bp, Artificial Sequence
  Synthetic oligonucleotide; AGG chr2 60451239 60451258 60451255 +
agctaggtaatctagccaga

SEQ ID NO: 156754 - DNA, 20 bp, Artificial Sequence
  Synthetic oligonucleotide; TGG chr2 60451242 60451261 60451258 +
taggtaatctagccagaagg

SEQ ID NO: 156755 - DNA, 20 bp, Artificial Sequence
  Synthetic oligonucleotide; TAG chr2 60451246 60451265 60451262 +
taatctagccagaaggtgga

SEQ ID NO: 156756 - DNA, 20 bp, Artificial Sequence
  Synthetic oligonucleotide; AGG chr2 60451247 60451266 60451263 +
aatctagccagaaggtggat

SEQ ID NO: 156757 - DNA, 20 bp, Artificial Sequence
  Synthetic oligonucleotide; TAG chr2 60451250 60451269 60451266 +
ctagccagaaggtggatagg

SEQ ID NO: 156758 - DNA, 20 bp, Artificial Sequence
  Synthetic oligonucleotide; AGG chr2 60451251 60451270 60451267 +
tagccagaaggtggataggt

SEQ ID NO: 156759 - DNA, 20 bp, Artificial Sequence
  Synthetic oligonucleotide; TAG chr2 60451266 60451285 60451282 +
taggtaggattttccccact

SEQ ID NO: 156760 - DNA, 20 bp, Artificial Sequence
  Synthetic oligonucleotide; AGG chr2 60451267 60451286 60451283 +
aggtaggattttccccactt

SEQ ID NO: 156761 - DNA, 20 bp, Artificial Sequence
  Synthetic oligonucleotide; CGG chr2 60451274 60451293 60451290 +
attttccccacttaggttca

SEQ ID NO: 156762 - DNA, 20 bp, Artificial Sequence
  Synthetic oligonucleotide; CAG chr2 60451293 60451312 60451309 +
acggcctgtatgtgaatcta

SEQ ID NO: 156763 - DNA, 20 bp, Artificial Sequence
  Synthetic oligonucleotide; CAG chr2 60451300 60451319 60451316 +
gtatgtgaatctacagcaca

SEQ ID NO: 156764 - DNA, 20 bp, Artificial Sequence
  Synthetic oligonucleotide; AGG chr2 60451301 60451320 60451317 +
tatgtgaatctacagcacac

SEQ ID NO: 156765 - DNA, 20 bp, Artificial Sequence
  Synthetic oligonucleotide; GAG chr2 60451309 60451328 60451325 +
tctacagcacacaggtgtct

SEQ ID NO: 156766 - DNA, 20 bp, Artificial Sequence
  Synthetic oligonucleotide; TGG chr2 60451365 60451384 60451381 +
tgttgtttctaattctcttc

SEQ ID NO: 156767 - DNA, 20 bp, Artificial Sequence
  Synthetic oligonucleotide; AAG chr2 60451374 60451393 60451390 +
taattctcttctggatctcc

SEQ ID NO: 156768 - DNA, 20 bp, Artificial Sequence
  Synthetic oligonucleotide; CAG chr2 60451377 60451396 60451393 +
ttctcttctggatctccaag

SEQ ID NO: 156769 - DNA, 20 bp, Artificial Sequence
  Synthetic oligonucleotide; GAG chr2 60451396 60451415 60451412 +
gcagtaaaaaataccaaact

SEQ ID NO: 156770 - DNA, 20 bp, Artificial Sequence
  Synthetic oligonucleotide; AAG chr2 60451401 60451420 60451417 +
aaaaaataccaaactgagaa

SEQ ID NO: 156771 - DNA, 20 bp, Artificial Sequence
  Synthetic oligonucleotide; TGG chr2 60451420 60451439 60451436 +
aaagttctgtgcaaattaac

SEQ ID NO: 156772 - DNA, 20 bp, Artificial Sequence
  Synthetic oligonucleotide; GGG chr2 60451421 60451440 60451437 +
aagttctgtgcaaattaact

SEQ ID NO: 156773 - DNA, 20 bp, Artificial Sequence
  Synthetic oligonucleotide; CAG chr2 60451425 60451444 60451441 +
tctgtgcaaattaactgggc

SEQ ID NO: 156774 - DNA, 20 bp, Artificial Sequence
  Synthetic oligonucleotide; AAG chr2 60451429 60451448 60451445 +
tgcaaattaactgggccaga

SEQ ID NO: 156775 - DNA, 20 bp, Artificial Sequence
  Synthetic oligonucleotide; TAG chr2 60451451 60451470 60451467 +
gaatttttaccacctgtttg

SEQ ID NO: 156776 - DNA, 20 bp, Artificial Sequence
  Synthetic oligonucleotide; TGG chr2 60451468 60451487 60451484 +
ttgtagatgtaacttatttg

SEQ ID NO: 156777 - DNA, 20 bp, Artificial Sequence
  Synthetic oligonucleotide; AAG chr2 60451482 60451501 60451498 +
tatttgtggcactaatttct

SEQ ID NO: 156778 - DNA, 20 bp, Artificial Sequence
  Synthetic oligonucleotide; AGG chr2 60451483 60451502 60451499 +
atttgtggcactaatttcta

SEQ ID NO: 156779 - DNA, 20 bp, Artificial Sequence
  Synthetic oligonucleotide; TAG chr2 60451488 60451507 60451504 +
tggcactaatttctaaggaa

SEQ ID NO: 156780 - DNA, 20 bp, Artificial Sequence
  Synthetic oligonucleotide; GAG chr2 60451490 60451509 60451506 +
gcactaatttctaaggaata

SEQ ID NO: 156781 - DNA, 20 bp, Artificial Sequence
  Synthetic oligonucleotide; AAG chr2 60451578 60451597 60451594 +
tgccccaaatttcctgatgt

SEQ ID NO: 156782 - DNA, 20 bp, Artificial Sequence
  Synthetic oligonucleotide; AAG chr2 60451586 60451605 60451602 +
atttcctgatgtaagtacta

SEQ ID NO: 156783 - DNA, 20 bp, Artificial Sequence
  Synthetic oligonucleotide; AAG chr2 60451589 60451608 60451605 +
tcctgatgtaagtactaaag

SEQ ID NO: 156784 - DNA, 20 bp, Artificial Sequence
  Synthetic oligonucleotide; AAG chr2 60451615 60451634 60451631 +
tatgtttgtttgtctgcatt

SEQ ID NO: 156785 - DNA, 20 bp, Artificial Sequence
  Synthetic oligonucleotide; AAG chr2 60451630 60451649 60451646 +
gcattaagatatatttcctg

SEQ ID NO: 156786 - DNA, 20 bp, Artificial Sequence
  Synthetic oligonucleotide; AGG chr2 60451631 60451650 60451647 +
cattaagatatatttcctga

SEQ ID NO: 156787 - DNA, 20 bp, Artificial Sequence
  Synthetic oligonucleotide; TGG chr2 60451636 60451655 60451652 +
agatatatttcctgaaggtt

SEQ ID NO: 156788 - DNA, 20 bp, Artificial Sequence
  Synthetic oligonucleotide; GGG chr2 60451637 60451656 60451653 +
gatatatttcctgaaggttt

SEQ ID NO: 156789 - DNA, 20 bp, Artificial Sequence
  Synthetic oligonucleotide; TAG chr2 60451650 60451669 60451666 +
aaggtttgggaacctaaaat

SEQ ID NO: 156790 - DNA, 20 bp, Artificial Sequence
  Synthetic oligonucleotide; AAG chr2 60451663 60451682 60451679 +
ctaaaattagaatatttaat

SEQ ID NO: 156791 - DNA, 20 bp, Artificial Sequence
  Synthetic oligonucleotide; TAG chr2 60451692 60451711 60451708 +
ctgacatttatcaccttctt

SEQ ID NO: 156792 - DNA, 20 bp, Artificial Sequence
  Synthetic oligonucleotide; AGG chr2 60451693 60451712 60451709 +
tgacatttatcaccttcttt

SEQ ID NO: 156793 - DNA, 20 bp, Artificial Sequence
  Synthetic oligonucleotide; CAG chr2 60451710 60451729 60451726 +
tttaggatttaccgctcgcc

SEQ ID NO: 156794 - DNA, 20 bp, Artificial Sequence
  Synthetic oligonucleotide; AAG chr2 60451727 60451746 60451743 +
gcccagtgatgttctttcct

SEQ ID NO: 156795 - DNA, 20 bp, Artificial Sequence
  Synthetic oligonucleotide; AAG chr2 60451739 60451758 60451755 +
tctttcctaagctaaattaa

SEQ ID NO: 156796 - DNA, 20 bp, Artificial Sequence
  Synthetic oligonucleotide; TGG chr2 60451760 60451779 60451776 +
agacaaattcaaatcctgca

SEQ ID NO: 156797 - DNA, 20 bp, Artificial Sequence
  Synthetic oligonucleotide; TAG chr2 60451763 60451782 60451779 +
caaattcaaatcctgcatgg

SEQ ID NO: 156798 - DNA, 20 bp, Artificial Sequence
  Synthetic oligonucleotide; AAG chr2 60451773 60451792 60451789 +
tcctgcatggtagccaccaa

SEQ ID NO: 156799 - DNA, 20 bp, Artificial Sequence
  Synthetic oligonucleotide; CAG chr2 60451791 60451810 60451807 +
aaaagcatatatttgaaaaa

SEQ ID NO: 156800 - DNA, 20 bp, Artificial Sequence
  Synthetic oligonucleotide; AGG chr2 60451792 60451811 60451808 +
aaagcatatatttgaaaaac

SEQ ID NO: 156801 - DNA, 20 bp, Artificial Sequence
  Synthetic oligonucleotide; CGG chr2 60451798 60451817 60451814 +
tatatttgaaaaacaggatt

SEQ ID NO: 156802 - DNA, 20 bp, Artificial Sequence
  Synthetic oligonucleotide; TGG chr2 60451825 60451844 60451841 +
ccatattatgcattatttaa

SEQ ID NO: 156803 - DNA, 20 bp, Artificial Sequence
  Synthetic oligonucleotide; AAG chr2 60451840 60451859 60451856 +
tttaatggtatgcaaattat

SEQ ID NO: 156804 - DNA, 20 bp, Artificial Sequence
  Synthetic oligonucleotide; CAG chr2 60451844 60451863 60451860 +
atggtatgcaaattataagt

SEQ ID NO: 156805 - DNA, 20 bp, Artificial Sequence
  Synthetic oligonucleotide; CAG chr2 60451848 60451867 60451864 +
tatgcaaattataagtcaga

SEQ ID NO: 156806 - DNA, 20 bp, Artificial Sequence
  Synthetic oligonucleotide; TAG chr2 60451852 60451871 60451868 +
caaattataagtcagacagt

SEQ ID NO: 156807 - DNA, 20 bp, Artificial Sequence
  Synthetic oligonucleotide; AGG chr2 60451853 60451872 60451869 +
aaattataagtcagacagtt

SEQ ID NO: 156808 - DNA, 20 bp, Artificial Sequence
  Synthetic oligonucleotide; CAG chr2 60451868 60451887 60451884 +
cagttaggaaaaccacactt

SEQ ID NO: 156809 - DNA, 20 bp, Artificial Sequence
  Synthetic oligonucleotide; CAG chr2 60451881 60451900 60451897 +
cacacttcagcattaataaa

SEQ ID NO: 156810 - DNA, 20 bp, Artificial Sequence
  Synthetic oligonucleotide; AAG chr2 60451930 60451949 60451946 +
tattgctatgatttattccc

SEQ ID NO: 156811 - DNA, 20 bp, Artificial Sequence
  Synthetic oligonucleotide; AAG chr2 60451974 60451993 60451990 +
gaaaatttatgccatctgat

SEQ ID NO: 156812 - DNA, 20 bp, Artificial Sequence
  Synthetic oligonucleotide; CGG chr2 60451977 60451996 60451993 +
aatttatgccatctgataag

SEQ ID NO: 156813 - DNA, 20 bp, Artificial Sequence
  Synthetic oligonucleotide; TAG chr2 60451985 60452004 60452001 +
ccatctgataagcggtaacc

SEQ ID NO: 156814 - DNA, 20 bp, Artificial Sequence
  Synthetic oligonucleotide; TGG chr2 60452043 60452062 60452059 +
tgttcctcctacccacccga

SEQ ID NO: 156815 - DNA, 20 bp, Artificial Sequence
  Synthetic oligonucleotide; GGG chr2 60452044 60452063 60452060 +
gttcctcctacccacccgat

SEQ ID NO: 156816 - DNA, 20 bp, Artificial Sequence
  Synthetic oligonucleotide; TAG chr2 60452053 60452072 60452069 +
acccacccgatgggtgtctg

SEQ ID NO: 156817 - DNA, 20 bp, Artificial Sequence
  Synthetic oligonucleotide; AGG chr2 60452054 60452073 60452070 +
cccacccgatgggtgtctgt

SEQ ID NO: 156818 - DNA, 20 bp, Artificial Sequence
  Synthetic oligonucleotide; CAG chr2 60452060 60452079 60452076 +
cgatgggtgtctgtaggaaa

SEQ ID NO: 156819 - DNA, 20 bp, Artificial Sequence
  Synthetic oligonucleotide; AGG chr2 60452061 60452080 60452077 +
gatgggtgtctgtaggaaac

SEQ ID NO: 156820 - DNA, 20 bp, Artificial Sequence
  Synthetic oligonucleotide; CAG chr2 60452066 60452085 60452082 +
gtgtctgtaggaaacaggta

SEQ ID NO: 156821 - DNA, 20 bp, Artificial Sequence
  Synthetic oligonucleotide; AAG chr2 60452069 60452088 60452085 +
tctgtaggaaacaggtacag

SEQ ID NO: 156822 - DNA, 20 bp, Artificial Sequence
  Synthetic oligonucleotide; AAG chr2 60452083 60452102 60452099 +
gtacagaagtacaaaatcat

SEQ ID NO: 156823 - DNA, 20 bp, Artificial Sequence
  Synthetic oligonucleotide; CAG chr2 60452086 60452105 60452102 +
cagaagtacaaaatcataag

SEQ ID NO: 156824 - DNA, 20 bp, Artificial Sequence
  Synthetic oligonucleotide; AAG chr2 60452103 60452122 60452119 +
aagcagcctcattgtcttat

SEQ ID NO: 156825 - DNA, 20 bp, Artificial Sequence
  Synthetic oligonucleotide; AAG chr2 60452118 60452137 60452134 +
cttataagcattaaaaatta

SEQ ID NO: 156826 - DNA, 20 bp, Artificial Sequence
  Synthetic oligonucleotide; AAG chr2 60452124 60452143 60452140 +
agcattaaaaattaaagaac

SEQ ID NO: 156827 - DNA, 20 bp, Artificial Sequence
  Synthetic oligonucleotide; AAG chr2 60452140 60452159 60452156 +
gaacaagcaaacaccaccta

SEQ ID NO: 156828 - DNA, 20 bp, Artificial Sequence
  Synthetic oligonucleotide; AAG chr2 60452168 60452187 60452184 +
acatttattgtgtcaatgtt

SEQ ID NO: 156829 - DNA, 20 bp, Artificial Sequence
  Synthetic oligonucleotide; AAG chr2 60452183 60452202 60452199 +
atgttaagcacactttttaa

SEQ ID NO: 156830 - DNA, 20 bp, Artificial Sequence
  Synthetic oligonucleotide; TAG chr2 60452192 60452211 60452208 +
acactttttaaaagacaaca

SEQ ID NO: 156831 - DNA, 20 bp, Artificial Sequence
  Synthetic oligonucleotide; TAG chr2 60452201 60452220 60452217 +
aaaagacaacatagaatgta

SEQ ID NO: 156832 - DNA, 20 bp, Artificial Sequence
  Synthetic oligonucleotide; AAG chr2 60452208 60452227 60452224 +
aacatagaatgtatagaaac

SEQ ID NO: 156833 - DNA, 20 bp, Artificial Sequence
  Synthetic oligonucleotide; AGG chr2 60452209 60452228 60452225 +
acatagaatgtatagaaaca

SEQ ID NO: 156834 - DNA, 20 bp, Artificial Sequence
  Synthetic oligonucleotide; GGG chr2 60452210 60452229 60452226 +
catagaatgtatagaaacaa

SEQ ID NO: 156835 - DNA, 20 bp, Artificial Sequence
  Synthetic oligonucleotide; GGG chr2 60452211 60452230 60452227 +
atagaatgtatagaaacaag

SEQ ID NO: 156836 - DNA, 20 bp, Artificial Sequence
  Synthetic oligonucleotide; TGG chr2 60452215 60452234 60452231 +
aatgtatagaaacaaggggt

SEQ ID NO: 156837 - DNA, 20 bp, Artificial Sequence
  Synthetic oligonucleotide; GGG chr2 60452216 60452235 60452232 +
atgtatagaaacaaggggtt

SEQ ID NO: 156838 - DNA, 20 bp, Artificial Sequence
  Synthetic oligonucleotide; GGG chr2 60452217 60452236 60452233 +
tgtatagaaacaaggggttg

SEQ ID NO: 156839 - DNA, 20 bp, Artificial Sequence
  Synthetic oligonucleotide; CAG chr2 60452242 60452261 60452258 +
tcatgcgcatttccacaata

SEQ ID NO: 156840 - DNA, 20 bp, Artificial Sequence
  Synthetic oligonucleotide; AGG chr2 60452243 60452262 60452259 +
catgcgcatttccacaatac

SEQ ID NO: 156841 - DNA, 20 bp, Artificial Sequence
  Synthetic oligonucleotide; TAG chr2 60452250 60452269 60452266 +
atttccacaatacaggtaat

SEQ ID NO: 156842 - DNA, 20 bp, Artificial Sequence
  Synthetic oligonucleotide; AGG chr2 60452251 60452270 60452267 +
tttccacaatacaggtaatt

SEQ ID NO: 156843 - DNA, 20 bp, Artificial Sequence
  Synthetic oligonucleotide; TGG chr2 60452255 60452274 60452271 +
cacaatacaggtaattaggt

SEQ ID NO: 156844 - DNA, 20 bp, Artificial Sequence
  Synthetic oligonucleotide; TGG chr2 60452259 60452278 60452275 +
atacaggtaattaggttggc

SEQ ID NO: 156845 - DNA, 20 bp, Artificial Sequence
  Synthetic oligonucleotide; CAG chr2 60452265 60452284 60452281 +
gtaattaggttggctggttt

SEQ ID NO: 156846 - DNA, 20 bp, Artificial Sequence
  Synthetic oligonucleotide; AAG chr2 60452268 60452287 60452284 +
attaggttggctggtttcag

SEQ ID NO: 156847 - DNA, 20 bp, Artificial Sequence
  Synthetic oligonucleotide; AGG chr2 60452269 60452288 60452285 +
ttaggttggctggtttcaga

SEQ ID NO: 156848 - DNA, 20 bp, Artificial Sequence
  Synthetic oligonucleotide; GGG chr2 60452270 60452289 60452286 +
taggttggctggtttcagaa

SEQ ID NO: 156849 - DNA, 20 bp, Artificial Sequence
  Synthetic oligonucleotide; CAG chr2 60452274 60452293 60452290 +
ttggctggtttcagaagggc

SEQ ID NO: 156850 - DNA, 20 bp, Artificial Sequence
  Synthetic oligonucleotide; AGG chr2 60452275 60452294 60452291 +
tggctggtttcagaagggcc

SEQ ID NO: 156851 - DNA, 20 bp, Artificial Sequence
  Synthetic oligonucleotide; GGG chr2 60452276 60452295 60452292 +
ggctggtttcagaagggcca

SEQ ID NO: 156852 - DNA, 20 bp, Artificial Sequence
  Synthetic oligonucleotide; CAG chr2 60452291 60452310 60452307 +
ggccagggcatcactcatga

SEQ ID NO: 156853 - DNA, 20 bp, Artificial Sequence
  Synthetic oligonucleotide; TGG chr2 60452297 60452316 60452313 +
ggcatcactcatgacagcga

SEQ ID NO: 156854 - DNA, 20 bp, Artificial Sequence
  Synthetic oligonucleotide; CGG chr2 60452304 60452323 60452320 +
ctcatgacagcgatggtcca

SEQ ID NO: 156855 - DNA, 20 bp, Artificial Sequence
  Synthetic oligonucleotide; GGG chr2 60452305 60452324 60452321 +
tcatgacagcgatggtccac

SEQ ID NO: 156856 - DNA, 20 bp, Artificial Sequence
  Synthetic oligonucleotide; TGG chr2 60452317 60452336 60452333 +
tggtccacgggccctctcta

SEQ ID NO: 156857 - DNA, 20 bp, Artificial Sequence
  Synthetic oligonucleotide; GGG chr2 60452318 60452337 60452334 +
ggtccacgggccctctctat

SEQ ID NO: 156858 - DNA, 20 bp, Artificial Sequence
  Synthetic oligonucleotide; TGG chr2 60452341 60452360 60452357 +
actgattcactgttccaatg

SEQ ID NO: 156859 - DNA, 20 bp, Artificial Sequence
  Synthetic oligonucleotide; GGG chr2 60452342 60452361 60452358 +
ctgattcactgttccaatgt

SEQ ID NO: 156860 - DNA, 20 bp, Artificial Sequence
  Synthetic oligonucleotide; TGG chr2 60452389 60452408 60452405 +
attaaaaaatataaataaaa

SEQ ID NO: 156861 - DNA, 20 bp, Artificial Sequence
  Synthetic oligonucleotide; CAG chr2 60452397 60452416 60452413 +
atataaataaaatggcgctg

SEQ ID NO: 156862 - DNA, 20 bp, Artificial Sequence
  Synthetic oligonucleotide; AGG chr2 60452398 60452417 60452414 +
tataaataaaatggcgctgc

SEQ ID NO: 156863 - DNA, 20 bp, Artificial Sequence
  Synthetic oligonucleotide; TAG chr2 60452403 60452422 60452419 +
ataaaatggcgctgcaggcc

SEQ ID NO: 156864 - DNA, 20 bp, Artificial Sequence
  Synthetic oligonucleotide; AGG chr2 60452404 60452423 60452420 +
taaaatggcgctgcaggcct

SEQ ID NO: 156865 - DNA, 20 bp, Artificial Sequence
  Synthetic oligonucleotide; TGG chr2 60452408 60452427 60452424 +
atggcgctgcaggcctaggc

SEQ ID NO: 156866 - DNA, 20 bp, Artificial Sequence
  Synthetic oligonucleotide; AAG chr2 60452411 60452430 60452427 +
gcgctgcaggcctaggctgg

SEQ ID NO: 156867 - DNA, 20 bp, Artificial Sequence
  Synthetic oligonucleotide; AGG chr2 60452412 60452431 60452428 +
cgctgcaggcctaggctgga

SEQ ID NO: 156868 - DNA, 20 bp, Artificial Sequence
  Synthetic oligonucleotide; CAG chr2 60452421 60452440 60452437 +
cctaggctggaaggactctg

SEQ ID NO: 156869 - DNA, 20 bp, Artificial Sequence
  Synthetic oligonucleotide; AGG chr2 60452422 60452441 60452438 +
ctaggctggaaggactctgc

SEQ ID NO: 156870 - DNA, 20 bp, Artificial Sequence
  Synthetic oligonucleotide; CGG chr2 60452442 60452461 60452458 +
aggactctgtcttcgcacaa

SEQ ID NO: 156871 - DNA, 20 bp, Artificial Sequence
  Synthetic oligonucleotide; TGG chr2 60452450 60452469 60452466 +
gtcttcgcacaacggcttct

SEQ ID NO: 156872 - DNA, 20 bp, Artificial Sequence
  Synthetic oligonucleotide; GAG chr2 60452452 60452471 60452468 +
cttcgcacaacggcttcttg

SEQ ID NO: 156873 - DNA, 20 bp, Artificial Sequence
  Synthetic oligonucleotide; AGG chr2 60452453 60452472 60452469 +
ttcgcacaacggcttcttgg

SEQ ID NO: 156874 - DNA, 20 bp, Artificial Sequence
  Synthetic oligonucleotide; CAG chr2 60452463 60452482 60452479 +
ggcttcttggaggctactgt

SEQ ID NO: 156875 - DNA, 20 bp, Artificial Sequence
  Synthetic oligonucleotide; TAG chr2 60452480 60452499 60452496 +
tgtcagaaaacatcacaaac

SEQ ID NO: 156876 - DNA, 20 bp, Artificial Sequence
  Synthetic oligonucleotide; CAG chr2 60452483 60452502 60452499 +
cagaaaacatcacaaactag

SEQ ID NO: 156877 - DNA, 20 bp, Artificial Sequence
  Synthetic oligonucleotide; AGG chr2 60452484 60452503 60452500 +
agaaaacatcacaaactagc

SEQ ID NO: 156878 - DNA, 20 bp, Artificial Sequence
  Synthetic oligonucleotide; CAG chr2 60452491 60452510 60452507 +
atcacaaactagcaggatga

SEQ ID NO: 156879 - DNA, 20 bp, Artificial Sequence
  Synthetic oligonucleotide; TGG chr2 60452511 60452530 60452527 +
cagaccacgctgacgtcgac

SEQ ID NO: 156880 - DNA, 20 bp, Artificial Sequence
  Synthetic oligonucleotide; GGG chr2 60452512 60452531 60452528 +
agaccacgctgacgtcgact

SEQ ID NO: 156881 - DNA, 20 bp, Artificial Sequence
  Synthetic oligonucleotide; CGG chr2 60452515 60452534 60452531 +
ccacgctgacgtcgactggg

SEQ ID NO: 156882 - DNA, 20 bp, Artificial Sequence
  Synthetic oligonucleotide; TGG chr2 60452537 60452556 60452553 +
gcacgcgtccaccccacccc

SEQ ID NO: 156883 - DNA, 20 bp, Artificial Sequence
  Synthetic oligonucleotide; GGG chr2 60452538 60452557 60452554 +
cacgcgtccaccccacccct

SEQ ID NO: 156884 - DNA, 20 bp, Artificial Sequence
  Synthetic oligonucleotide; GGG chr2 60452539 60452558 60452555 +
acgcgtccaccccacccctg

SEQ ID NO: 156885 - DNA, 20 bp, Artificial Sequence
  Synthetic oligonucleotide; GGG chr2 60452540 60452559 60452556 +
cgcgtccaccccacccctgg

SEQ ID NO: 156886 - DNA, 20 bp, Artificial Sequence
  Synthetic oligonucleotide; CAG chr2 60452556 60452575 60452572 +
ctgggggcttcaaattttct

SEQ ID NO: 156887 - DNA, 20 bp, Artificial Sequence
  Synthetic oligonucleotide; AAG chr2 60452564 60452583 60452580 +
ttcaaattttctcagaactt

SEQ ID NO: 156888 - DNA, 20 bp, Artificial Sequence
  Synthetic oligonucleotide; AGG chr2 60452565 60452584 60452581 +
tcaaattttctcagaactta

SEQ ID NO: 156889 - DNA, 20 bp, Artificial Sequence
  Synthetic oligonucleotide; GGG chr2 60452566 60452585 60452582 +
caaattttctcagaacttaa

SEQ ID NO: 156890 - DNA, 20 bp, Artificial Sequence
  Synthetic oligonucleotide; GAG chr2 60452574 60452593 60452590 +
ctcagaacttaagggctctc

SEQ ID NO: 156891 - DNA, 20 bp, Artificial Sequence
  Synthetic oligonucleotide; GAG chr2 60452605 60452624 60452621 +
cgaaaactgccacacatctt

SEQ ID NO: 156892 - DNA, 20 bp, Artificial Sequence
  Synthetic oligonucleotide; TGG chr2 60452613 60452632 60452629 +
gccacacatcttgagctctc

SEQ ID NO: 156893 - DNA, 20 bp, Artificial Sequence
  Synthetic oligonucleotide; GGG chr2 60452614 60452633 60452630 +
ccacacatcttgagctctct

SEQ ID NO: 156894 - DNA, 20 bp, Artificial Sequence
  Synthetic oligonucleotide; TGG chr2 60452629 60452648 60452645 +
tctctgggtactacgccgaa

SEQ ID NO: 156895 - DNA, 20 bp, Artificial Sequence
  Synthetic oligonucleotide; GGG chr2 60452630 60452649 60452646 +
ctctgggtactacgccgaat

SEQ ID NO: 156896 - DNA, 20 bp, Artificial Sequence
  Synthetic oligonucleotide; GGG chr2 60452631 60452650 60452647 +
tctgggtactacgccgaatg

SEQ ID NO: 156897 - DNA, 20 bp, Artificial Sequence
  Synthetic oligonucleotide; GGG chr2 60452632 60452651 60452648 +
ctgggtactacgccgaatgg

SEQ ID NO: 156898 - DNA, 20 bp, Artificial Sequence
  Synthetic oligonucleotide; AAG chr2 60452641 60452660 60452657 +
acgccgaatgggggtgtgtg

SEQ ID NO: 156899 - DNA, 20 bp, Artificial Sequence
  Synthetic oligonucleotide; TAG chr2 60452648 60452667 60452664 +
atgggggtgtgtgaagaacc

SEQ ID NO: 156900 - DNA, 20 bp, Artificial Sequence
  Synthetic oligonucleotide; AAG chr2 60452652 60452671 60452668 +
gggtgtgtgaagaacctaga

SEQ ID NO: 156901 - DNA, 20 bp, Artificial Sequence
  Synthetic oligonucleotide; GAG chr2 60452654 60452673 60452670 +
gtgtgtgaagaacctagaaa

SEQ ID NO: 156902 - DNA, 20 bp, Artificial Sequence
  Synthetic oligonucleotide; AGG chr2 60452655 60452674 60452671 +
tgtgtgaagaacctagaaag

SEQ ID NO: 156903 - DNA, 20 bp, Artificial Sequence
  Synthetic oligonucleotide; TGG chr2 60452659 60452678 60452675 +
tgaagaacctagaaagaggt

SEQ ID NO: 156904 - DNA, 20 bp, Artificial Sequence
  Synthetic oligonucleotide; GAG chr2 60452661 60452680 60452677 +
aagaacctagaaagaggttg

SEQ ID NO: 156905 - DNA, 20 bp, Artificial Sequence
  Synthetic oligonucleotide; CAG chr2 60452665 60452684 60452681 +
acctagaaagaggttggaga

SEQ ID NO: 156906 - DNA, 20 bp, Artificial Sequence
  Synthetic oligonucleotide; GAG chr2 60452667 60452686 60452683 +
ctagaaagaggttggagaca

SEQ ID NO: 156907 - DNA, 20 bp, Artificial Sequence
  Synthetic oligonucleotide; AGG chr2 60452668 60452687 60452684 +
tagaaagaggttggagacag

SEQ ID NO: 156908 - DNA, 20 bp, Artificial Sequence
  Synthetic oligonucleotide; GAG chr2 60452670 60452689 60452686 +
gaaagaggttggagacagag

SEQ ID NO: 156909 - DNA, 20 bp, Artificial Sequence
  Synthetic oligonucleotide; AGG chr2 60452671 60452690 60452687 +
aaagaggttggagacagagg

SEQ ID NO: 156910 - DNA, 20 bp, Artificial Sequence
  Synthetic oligonucleotide; GGG chr2 60452672 60452691 60452688 +
aagaggttggagacagagga

SEQ ID NO: 156911 - DNA, 20 bp, Artificial Sequence
  Synthetic oligonucleotide; GGG chr2 60452673 60452692 60452689 +
agaggttggagacagaggag

SEQ ID NO: 156912 - DNA, 20 bp, Artificial Sequence
  Synthetic oligonucleotide; GGG chr2 60452674 60452693 60452690 +
gaggttggagacagaggagg

SEQ ID NO: 156913 - DNA, 20 bp, Artificial Sequence
  Synthetic oligonucleotide; AAG chr2 60452684 60452703 60452700 +
acagaggagggggaaaaaaa

SEQ ID NO: 156914 - DNA, 20 bp, Artificial Sequence
  Synthetic oligonucleotide; CAG chr2 60452689 60452708 60452705 +
ggagggggaaaaaaaaagta

SEQ ID NO: 156915 - DNA, 20 bp, Artificial Sequence
  Synthetic oligonucleotide; AGG chr2 60452690 60452709 60452706 +
gagggggaaaaaaaaagtac

SEQ ID NO: 156916 - DNA, 20 bp, Artificial Sequence
  Synthetic oligonucleotide; TGG chr2 60452700 60452719 60452716 +
aaaaaagtacaggtgtgact

SEQ ID NO: 156917 - DNA, 20 bp, Artificial Sequence
  Synthetic oligonucleotide; TAG chr2 60452727 60452746 60452743 +
atgattttctgttctctaac

SEQ ID NO: 156918 - DNA, 20 bp, Artificial Sequence
  Synthetic oligonucleotide; TAG chr2 60452742 60452761 60452758 +
ctaactagctttttaaaaat

SEQ ID NO: 156919 - DNA, 20 bp, Artificial Sequence
  Synthetic oligonucleotide; CAG chr2 60452760 60452779 60452776 +
attagaacttaaaccaacca

SEQ ID NO: 156920 - DNA, 20 bp, Artificial Sequence
  Synthetic oligonucleotide; AGG chr2 60452761 60452780 60452777 +
ttagaacttaaaccaaccac

SEQ ID NO: 156921 - DNA, 20 bp, Artificial Sequence
  Synthetic oligonucleotide; GAG chr2 60452766 60452785 60452782 +
acttaaaccaaccacaggtc

SEQ ID NO: 156922 - DNA, 20 bp, Artificial Sequence
  Synthetic oligonucleotide; TGG chr2 60452773 60452792 60452789 +
ccaaccacaggtcgagccac

SEQ ID NO: 156923 - DNA, 20 bp, Artificial Sequence
  Synthetic oligonucleotide; AAG chr2 60452782 60452801 60452798 +
ggtcgagccactggcatctt

SEQ ID NO: 156924 - DNA, 20 bp, Artificial Sequence
  Synthetic oligonucleotide; CAG chr2 60452799 60452818 60452815 +
cttaagcatgatttcaaact

SEQ ID NO: 156925 - DNA, 20 bp, Artificial Sequence
  Synthetic oligonucleotide; AAG chr2 60452814 60452833 60452830 +
aaactcagcctcccctcccc

SEQ ID NO: 156926 - DNA, 20 bp, Artificial Sequence
  Synthetic oligonucleotide; GAG chr2 60452831 60452850 60452847 +
cccaagtatctctgacctct

SEQ ID NO: 156927 - DNA, 20 bp, Artificial Sequence
  Synthetic oligonucleotide; AAG chr2 60452869 60452888 60452885 +
tccctcccttccgtcccccc

SEQ ID NO: 156928 - DNA, 20 bp, Artificial Sequence
  Synthetic oligonucleotide; AGG chr2 60452870 60452889 60452886 +
ccctcccttccgtcccccca

SEQ ID NO: 156929 - DNA, 20 bp, Artificial Sequence
  Synthetic oligonucleotide; GAG chr2 60452872 60452891 60452888 +
ctcccttccgtccccccaag

SEQ ID NO: 156930 - DNA, 20 bp, Artificial Sequence
  Synthetic oligonucleotide; AGG chr2 60452873 60452892 60452889 +
tcccttccgtccccccaagg

SEQ ID NO: 156931 - DNA, 20 bp, Artificial Sequence
  Synthetic oligonucleotide; CAG chr2 60452879 60452898 60452895 +
ccgtccccccaaggaggacc

SEQ ID NO: 156932 - DNA, 20 bp, Artificial Sequence
  Synthetic oligonucleotide; AGG chr2 60452880 60452899 60452896 +
cgtccccccaaggaggaccc

SEQ ID NO: 156933 - DNA, 20 bp, Artificial Sequence
  Synthetic oligonucleotide; TAG chr2 60452910 60452929 60452926 +
acccctgcccaattgtatga

SEQ ID NO: 156934 - DNA, 20 bp, Artificial Sequence
  Synthetic oligonucleotide; CGG chr2 60452925 60452944 60452941 +
tatgatagtcctaataaact

SEQ ID NO: 156935 - DNA, 20 bp, Artificial Sequence
  Synthetic oligonucleotide; GGG chr2 60452926 60452945 60452942 +
atgatagtcctaataaactc

SEQ ID NO: 156936 - DNA, 20 bp, Artificial Sequence
  Synthetic oligonucleotide; TGG chr2 60452936 60452955 60452952 +
taataaactcgggacacacc

SEQ ID NO: 156937 - DNA, 20 bp, Artificial Sequence
  Synthetic oligonucleotide; AAG chr2 60452939 60452958 60452955 +
taaactcgggacacacctgg

SEQ ID NO: 156938 - DNA, 20 bp, Artificial Sequence
  Synthetic oligonucleotide; AGG chr2 60452940 60452959 60452956 +
aaactcgggacacacctgga

SEQ ID NO: 156939 - DNA, 20 bp, Artificial Sequence
  Synthetic oligonucleotide; GAG chr2 60452963 60452982 60452979 +
aaacacttgcccttatgact

SEQ ID NO: 156940 - DNA, 20 bp, Artificial Sequence
  Synthetic oligonucleotide; TAG chr2 60452972 60452991 60452988 +
cccttatgactgagaaaact

SEQ ID NO: 156941 - DNA, 20 bp, Artificial Sequence
  Synthetic oligonucleotide; AAG chr2 60452976 60452995 60452992 +
tatgactgagaaaacttagt

SEQ ID NO: 156942 - DNA, 20 bp, Artificial Sequence
  Synthetic oligonucleotide; CAG chr2 60452982 60453001 60452998 +
tgagaaaacttagtaagaaa

SEQ ID NO: 156943 - DNA, 20 bp, Artificial Sequence
  Synthetic oligonucleotide; TGG chr2 60452990 60453009 60453006 +
cttagtaagaaacagtcctt

SEQ ID NO: 156944 - DNA, 20 bp, Artificial Sequence
  Synthetic oligonucleotide; GAG chr2 60452995 60453014 60453011 +
taagaaacagtcctttggtt

SEQ ID NO: 156945 - DNA, 20 bp, Artificial Sequence
  Synthetic oligonucleotide; AGG chr2 60452996 60453015 60453012 +
aagaaacagtcctttggttg

SEQ ID NO: 156946 - DNA, 20 bp, Artificial Sequence
  Synthetic oligonucleotide; GAG chr2 60452998 60453017 60453014 +
gaaacagtcctttggttgag

SEQ ID NO: 156947 - DNA, 20 bp, Artificial Sequence
  Synthetic oligonucleotide; GAG chr2 60453000 60453019 60453016 +
aacagtcctttggttgagga

SEQ ID NO: 156948 - DNA, 20 bp, Artificial Sequence
  Synthetic oligonucleotide; CGG chr2 60453003 60453022 60453019 +
agtcctttggttgaggagag

SEQ ID NO: 156949 - DNA, 20 bp, Artificial Sequence
  Synthetic oligonucleotide; GGG chr2 60453004 60453023 60453020 +
gtcctttggttgaggagagc

SEQ ID NO: 156950 - DNA, 20 bp, Artificial Sequence
  Synthetic oligonucleotide; GAG chr2 60453006 60453025 60453022 +
cctttggttgaggagagcgg

SEQ ID NO: 156951 - DNA, 20 bp, Artificial Sequence
  Synthetic oligonucleotide; GAG chr2 60453008 60453027 60453024 +
tttggttgaggagagcggga

SEQ ID NO: 156952 - DNA, 20 bp, Artificial Sequence
  Synthetic oligonucleotide; AGG chr2 60453009 60453028 60453025 +
ttggttgaggagagcgggag

SEQ ID NO: 156953 - DNA, 20 bp, Artificial Sequence
  Synthetic oligonucleotide; GGG chr2 60453010 60453029 60453026 +
tggttgaggagagcgggaga

SEQ ID NO: 156954 - DNA, 20 bp, Artificial Sequence
  Synthetic oligonucleotide; GAG chr2 60453012 60453031 60453028 +
gttgaggagagcgggagagg

SEQ ID NO: 156955 - DNA, 20 bp, Artificial Sequence
  Synthetic oligonucleotide; AGG chr2 60453013 60453032 60453029 +
ttgaggagagcgggagaggg

SEQ ID NO: 156956 - DNA, 20 bp, Artificial Sequence
  Synthetic oligonucleotide; GAG chr2 60453015 60453034 60453031 +
gaggagagcgggagagggag

SEQ ID NO: 156957 - DNA, 20 bp, Artificial Sequence
  Synthetic oligonucleotide; AGG chr2 60453016 60453035 60453032 +
aggagagcgggagagggagg

SEQ ID NO: 156958 - DNA, 20 bp, Artificial Sequence
  Synthetic oligonucleotide; GGG chr2 60453017 60453036 60453033 +
ggagagcgggagagggagga

SEQ ID NO: 156959 - DNA, 20 bp, Artificial Sequence
  Synthetic oligonucleotide; AAG chr2 60453021 60453040 60453037 +
agcgggagagggaggaggga

SEQ ID NO: 156960 - DNA, 20 bp, Artificial Sequence
  Synthetic oligonucleotide; AGG chr2 60453022 60453041 60453038 +
gcgggagagggaggagggaa

SEQ ID NO: 156961 - DNA, 20 bp, Artificial Sequence
  Synthetic oligonucleotide; GGG chr2 60453023 60453042 60453039 +
cgggagagggaggagggaaa

SEQ ID NO: 156962 - DNA, 20 bp, Artificial Sequence
  Synthetic oligonucleotide; GGG chr2 60453024 60453043 60453040 +
gggagagggaggagggaaag

SEQ ID NO: 156963 - DNA, 20 bp, Artificial Sequence
  Synthetic oligonucleotide; AAG chr2 60453057 60453076 60453073 +
aaaataataataaaattata

SEQ ID NO: 156964 - DNA, 20 bp, Artificial Sequence
  Synthetic oligonucleotide; AAG chr2 60453085 60453104 60453101 +
aaaaatcaaaactgatgtaa

SEQ ID NO: 156965 - DNA, 20 bp, Artificial Sequence
  Synthetic oligonucleotide; CAG chr2 60453088 60453107 60453104 +
aatcaaaactgatgtaaaag

SEQ ID NO: 156966 - DNA, 20 bp, Artificial Sequence
  Synthetic oligonucleotide; AAG chr2 60453116 60453135 60453132 +
cgaaaacatgaaatgtcatc

SEQ ID NO: 156967 - DNA, 20 bp, Artificial Sequence
  Synthetic oligonucleotide; AAG chr2 60453129 60453148 60453145 +
tgtcatcaagttcaacgtca

SEQ ID NO: 156968 - DNA, 20 bp, Artificial Sequence
  Synthetic oligonucleotide; CAG chr2 60453132 60453151 60453148 +
catcaagttcaacgtcaaag

SEQ ID NO: 156969 - DNA, 20 bp, Artificial Sequence
  Synthetic oligonucleotide; AAG chr2 60453147 60453166 60453163 +
caaagcagccaatgatttac

SEQ ID NO: 156970 - DNA, 20 bp, Artificial Sequence
  Synthetic oligonucleotide; GAG chr2 60453149 60453168 60453165 +
aagcagccaatgatttacaa

SEQ ID NO: 156971 - DNA, 20 bp, Artificial Sequence
  Synthetic oligonucleotide; AGG chr2 60453150 60453169 60453166 +
agcagccaatgatttacaag

SEQ ID NO: 156972 - DNA, 20 bp, Artificial Sequence
  Synthetic oligonucleotide; AAG chr2 60453167 60453186 60453183 +
aagaggcgaacaaatctctg

SEQ ID NO: 156973 - DNA, 20 bp, Artificial Sequence
  Synthetic oligonucleotide; GAG chr2 60453169 60453188 60453185 +
gaggcgaacaaatctctgaa

SEQ ID NO: 156974 - DNA, 20 bp, Artificial Sequence
  Synthetic oligonucleotide; CAG chr2 60453177 60453196 60453193 +
caaatctctgaagagaaaac

SEQ ID NO: 156975 - DNA, 20 bp, Artificial Sequence
  Synthetic oligonucleotide; AAG chr2 60453187 60453206 60453203 +
aagagaaaaccagaacccaa

SEQ ID NO: 156976 - DNA, 20 bp, Artificial Sequence
  Synthetic oligonucleotide; GAG chr2 60453189 60453208 60453205 +
gagaaaaccagaacccaaaa

SEQ ID NO: 156977 - DNA, 20 bp, Artificial Sequence
  Synthetic oligonucleotide; TAG chr2 60453222 60453241 60453238 +
attgcaccaaaaactgcctg

SEQ ID NO: 156978 - DNA, 20 bp, Artificial Sequence
  Synthetic oligonucleotide; CAG chr2 60453240 60453259 60453256 +
tgtagtttctttcaaacatg

SEQ ID NO: 156979 - DNA, 20 bp, Artificial Sequence
  Synthetic oligonucleotide; TGG chr2 60453258 60453277 60453274 +
tgcagttttcttttcttttt

SEQ ID NO: 156980 - DNA, 20 bp, Artificial Sequence
  Synthetic oligonucleotide; AAG chr2 60453261 60453280 60453277 +
agttttcttttcttttttgg

SEQ ID NO: 156981 - DNA, 20 bp, Artificial Sequence
  Synthetic oligonucleotide; AGG chr2 60453262 60453281 60453278 +
gttttcttttcttttttgga

SEQ ID NO: 156982 - DNA, 20 bp, Artificial Sequence
  Synthetic oligonucleotide; GGG chr2 60453263 60453282 60453279 +
ttttcttttcttttttggaa

SEQ ID NO: 156983 - DNA, 20 bp, Artificial Sequence
  Synthetic oligonucleotide; GGG chr2 60453264 60453283 60453280 +
tttcttttcttttttggaag

SEQ ID NO: 156984 - DNA, 20 bp, Artificial Sequence
  Synthetic oligonucleotide; GGG chr2 60453265 60453284 60453281 +
ttcttttcttttttggaagg

SEQ ID NO: 156985 - DNA, 20 bp, Artificial Sequence
  Synthetic oligonucleotide; AAG chr2 60453268 60453287 60453284 +
ttttcttttttggaaggggg

SEQ ID NO: 156986 - DNA, 20 bp, Artificial Sequence
  Synthetic oligonucleotide; AGG chr2 60453269 60453288 60453285 +
tttcttttttggaaggggga

SEQ ID NO: 156987 - DNA, 20 bp, Artificial Sequence
  Synthetic oligonucleotide; TGG chr2 60453275 60453294 60453291 +
ttttggaagggggaaggcaa

SEQ ID NO: 156988 - DNA, 20 bp, Artificial Sequence
  Synthetic oligonucleotide; AAG chr2 60453280 60453299 60453296 +
gaagggggaaggcaatggtg

SEQ ID NO: 156989 - DNA, 20 bp, Artificial Sequence
  Synthetic oligonucleotide; AGG chr2 60453281 60453300 60453297 +
aagggggaaggcaatggtga

SEQ ID NO: 156990 - DNA, 20 bp, Artificial Sequence
  Synthetic oligonucleotide; GGG chr2 60453282 60453301 60453298 +
agggggaaggcaatggtgaa

SEQ ID NO: 156991 - DNA, 20 bp, Artificial Sequence
  Synthetic oligonucleotide; AAG chr2 60453285 60453304 60453301 +
gggaaggcaatggtgaaggg

SEQ ID NO: 156992 - DNA, 20 bp, Artificial Sequence
  Synthetic oligonucleotide; AAG chr2 60453288 60453307 60453304 +
aaggcaatggtgaagggaag

SEQ ID NO: 156993 - DNA, 20 bp, Artificial Sequence
  Synthetic oligonucleotide; AGG chr2 60453289 60453308 60453305 +
aggcaatggtgaagggaaga

SEQ ID NO: 156994 - DNA, 20 bp, Artificial Sequence
  Synthetic oligonucleotide; GGG chr2 60453290 60453309 60453306 +
ggcaatggtgaagggaagaa

SEQ ID NO: 156995 - DNA, 20 bp, Artificial Sequence
  Synthetic oligonucleotide; GAG chr2 60453292 60453311 60453308 +
caatggtgaagggaagaagg

SEQ ID NO: 156996 - DNA, 20 bp, Artificial Sequence
  Synthetic oligonucleotide; TGG chr2 60453295 60453314 60453311 +
tggtgaagggaagaagggag

SEQ ID NO: 156997 - DNA, 20 bp, Artificial Sequence
  Synthetic oligonucleotide; CGG chr2 60453309 60453328 60453325 +
agggagtggttattttcctc

SEQ ID NO: 156998 - DNA, 20 bp, Artificial Sequence
  Synthetic oligonucleotide; GGG chr2 60453310 60453329 60453326 +
gggagtggttattttcctcc

SEQ ID NO: 156999 - DNA, 20 bp, Artificial Sequence
  Synthetic oligonucleotide; GGG chr2 60453311 60453330 60453327 +
ggagtggttattttcctccg

SEQ ID NO: 157000 - DNA, 20 bp, Artificial Sequence
  Synthetic oligonucleotide; TGG chr2 60453328 60453347 60453344 +
ccggggttcctcccttgctg

SEQ ID NO: 157001 - DNA, 20 bp, Artificial Sequence
  Synthetic oligonucleotide; AAG chr2 60453342 60453361 60453358 +
ttgctgtggacattgacttg

SEQ ID NO: 157002 - DNA, 20 bp, Artificial Sequence
  Synthetic oligonucleotide; CAG chr2 60453345 60453364 60453361 +
ctgtggacattgacttgaag

SEQ ID NO: 157003 - DNA, 20 bp, Artificial Sequence
  Synthetic oligonucleotide; CAG chr2 60453348 60453367 60453364 +
tggacattgacttgaagcag

SEQ ID NO: 157004 - DNA, 20 bp, Artificial Sequence
  Synthetic oligonucleotide; TGG chr2 60453354 60453373 60453370 +
ttgacttgaagcagcagaac

SEQ ID NO: 157005 - DNA, 20 bp, Artificial Sequence
  Synthetic oligonucleotide; GGG chr2 60453355 60453374 60453371 +
tgacttgaagcagcagaact

SEQ ID NO: 157006 - DNA, 20 bp, Artificial Sequence
  Synthetic oligonucleotide; GAG chr2 60453357 60453376 60453373 +
acttgaagcagcagaactgg

SEQ ID NO: 157007 - DNA, 20 bp, Artificial Sequence
  Synthetic oligonucleotide; CGG chr2 60453362 60453381 60453378 +
aagcagcagaactgggagtc

SEQ ID NO: 157008 - DNA, 20 bp, Artificial Sequence
  Synthetic oligonucleotide; GAG chr2 60453372 60453391 60453388 +
actgggagtccggatgtgcc

SEQ ID NO: 157009 - DNA, 20 bp, Artificial Sequence
  Synthetic oligonucleotide; AGG chr2 60453373 60453392 60453389 +
ctgggagtccggatgtgccg

SEQ ID NO: 157010 - DNA, 20 bp, Artificial Sequence
  Synthetic oligonucleotide; AAG chr2 60453376 60453395 60453392 +
ggagtccggatgtgccgagg

SEQ ID NO: 157011 - DNA, 20 bp, Artificial Sequence
  Synthetic oligonucleotide; GAG chr2 60453378 60453397 60453394 +
agtccggatgtgccgaggaa

SEQ ID NO: 157012 - DNA, 20 bp, Artificial Sequence
  Synthetic oligonucleotide; AGG chr2 60453379 60453398 60453395 +
gtccggatgtgccgaggaag

SEQ ID NO: 157013 - DNA, 20 bp, Artificial Sequence
  Synthetic oligonucleotide; GGG chr2 60453380 60453399 60453396 +
tccggatgtgccgaggaaga

SEQ ID NO: 157014 - DNA, 20 bp, Artificial Sequence
  Synthetic oligonucleotide; TGG chr2 60453392 60453411 60453408 +
gaggaagagggctaccactg

SEQ ID NO: 157015 - DNA, 20 bp, Artificial Sequence
  Synthetic oligonucleotide; CAG chr2 60453400 60453419 60453416 +
gggctaccactgtggcattc

SEQ ID NO: 157016 - DNA, 20 bp, Artificial Sequence
  Synthetic oligonucleotide; AGG chr2 60453401 60453420 60453417 +
ggctaccactgtggcattcc

SEQ ID NO: 157017 - DNA, 20 bp, Artificial Sequence
  Synthetic oligonucleotide; TGG chr2 60453415 60453434 60453431 +
cattccaggcctcgttgcca

SEQ ID NO: 157018 - DNA, 20 bp, Artificial Sequence
  Synthetic oligonucleotide; AAG chr2 60453425 60453444 60453441 +
ctcgttgccatggcgacccg

SEQ ID NO: 157019 - DNA, 20 bp, Artificial Sequence
  Synthetic oligonucleotide; CAG chr2 60453428 60453447 60453444 +
gttgccatggcgacccgaag

SEQ ID NO: 157020 - DNA, 20 bp, Artificial Sequence
  Synthetic oligonucleotide; AGG chr2 60453429 60453448 60453445 +
ttgccatggcgacccgaagc

SEQ ID NO: 157021 - DNA, 20 bp, Artificial Sequence
  Synthetic oligonucleotide; GGG chr2 60453430 60453449 60453446 +
tgccatggcgacccgaagca

SEQ ID NO: 157022 - DNA, 20 bp, Artificial Sequence
  Synthetic oligonucleotide; GGG chr2 60453431 60453450 60453447 +
gccatggcgacccgaagcag

SEQ ID NO: 157023 - DNA, 20 bp, Artificial Sequence
  Synthetic oligonucleotide; TGG chr2 60453436 60453455 60453452 +
ggcgacccgaagcaggggcc

SEQ ID NO: 157024 - DNA, 20 bp, Artificial Sequence
  Synthetic oligonucleotide; GGG chr2 60453437 60453456 60453453 +
gcgacccgaagcaggggcct

SEQ ID NO: 157025 - DNA, 20 bp, Artificial Sequence
  Synthetic oligonucleotide; GGG chr2 60453438 60453457 60453454 +
cgacccgaagcaggggcctg

SEQ ID NO: 157026 - DNA, 20 bp, Artificial Sequence
  Synthetic oligonucleotide; TGG chr2 60453458 60453477 60453474 +
gggcctcctctcccctgact

SEQ ID NO: 157027 - DNA, 20 bp, Artificial Sequence
  Synthetic oligonucleotide; CAG chr2 60453466 60453485 60453482 +
tctcccctgacttggcgccg

SEQ ID NO: 157028 - DNA, 20 bp, Artificial Sequence
  Synthetic oligonucleotide; AGG chr2 60453467 60453486 60453483 +
ctcccctgacttggcgccgc

SEQ ID NO: 157029 - DNA, 20 bp, Artificial Sequence
  Synthetic oligonucleotide; GAG chr2 60453469 60453488 60453485 +
cccctgacttggcgccgcag

SEQ ID NO: 157030 - DNA, 20 bp, Artificial Sequence
  Synthetic oligonucleotide; AGG chr2 60453470 60453489 60453486 +
ccctgacttggcgccgcagg

SEQ ID NO: 157031 - DNA, 20 bp, Artificial Sequence
  Synthetic oligonucleotide; CGG chr2 60453475 60453494 60453491 +
acttggcgccgcaggaggcc

SEQ ID NO: 157032 - DNA, 20 bp, Artificial Sequence
  Synthetic oligonucleotide; GGG chr2 60453476 60453495 60453492 +
cttggcgccgcaggaggccc

SEQ ID NO: 157033 - DNA, 20 bp, Artificial Sequence
  Synthetic oligonucleotide; GGG chr2 60453477 60453496 60453493 +
ttggcgccgcaggaggcccg

SEQ ID NO: 157034 - DNA, 20 bp, Artificial Sequence
  Synthetic oligonucleotide; TGG chr2 60453482 60453501 60453498 +
gccgcaggaggcccggggtc

SEQ ID NO: 157035 - DNA, 20 bp, Artificial Sequence
  Synthetic oligonucleotide; CAG chr2 60453489 60453508 60453505 +
gaggcccggggtctggatct

SEQ ID NO: 157036 - DNA, 20 bp, Artificial Sequence
  Synthetic oligonucleotide; GAG chr2 60453515 60453534 60453531 +
ctctcacgcatcccacccct

SEQ ID NO: 157037 - DNA, 20 bp, Artificial Sequence
  Synthetic oligonucleotide; CAG chr2 60453518 60453537 60453534 +
tcacgcatcccacccctgag

SEQ ID NO: 157038 - DNA, 20 bp, Artificial Sequence
  Synthetic oligonucleotide; GAG chr2 60453520 60453539 60453536 +
acgcatcccacccctgagca

SEQ ID NO: 157039 - DNA, 20 bp, Artificial Sequence
  Synthetic oligonucleotide; CAG chr2 60453523 60453542 60453539 +
catcccacccctgagcagag

SEQ ID NO: 157040 - DNA, 20 bp, Artificial Sequence
  Synthetic oligonucleotide; CGG chr2 60453526 60453545 60453542 +
cccacccctgagcagagcag

SEQ ID NO: 157041 - DNA, 20 bp, Artificial Sequence
  Synthetic oligonucleotide; GAG chr2 60453528 60453547 60453544 +
cacccctgagcagagcagcg

SEQ ID NO: 157042 - DNA, 20 bp, Artificial Sequence
  Synthetic oligonucleotide; TGG chr2 60453534 60453553 60453550 +
tgagcagagcagcggagacc

SEQ ID NO: 157043 - DNA, 20 bp, Artificial Sequence
  Synthetic oligonucleotide; GGG chr2 60453535 60453554 60453551 +
gagcagagcagcggagacct

SEQ ID NO: 157044 - DNA, 20 bp, Artificial Sequence
  Synthetic oligonucleotide; GAG chr2 60453540 60453559 60453556 +
gagcagcggagacctgggct

SEQ ID NO: 157045 - DNA, 20 bp, Artificial Sequence
  Synthetic oligonucleotide; AGG chr2 60453541 60453560 60453557 +
agcagcggagacctgggctg

SEQ ID NO: 157046 - DNA, 20 bp, Artificial Sequence
  Synthetic oligonucleotide; GGG chr2 60453542 60453561 60453558 +
gcagcggagacctgggctga

SEQ ID NO: 157047 - DNA, 20 bp, Artificial Sequence
  Synthetic oligonucleotide; GGG chr2 60453543 60453562 60453559 +
cagcggagacctgggctgag

SEQ ID NO: 157048 - DNA, 20 bp, Artificial Sequence
  Synthetic oligonucleotide; CAG chr2 60453557 60453576 60453573 +
gctgaggggcatgctgcgtc

SEQ ID NO: 157049 - DNA, 20 bp, Artificial Sequence
  Synthetic oligonucleotide; AGG chr2 60453558 60453577 60453574 +
ctgaggggcatgctgcgtcc

SEQ ID NO: 157050 - DNA, 20 bp, Artificial Sequence
  Synthetic oligonucleotide; TGG chr2 60453561 60453580 60453577 +
aggggcatgctgcgtccagg

SEQ ID NO: 157051 - DNA, 20 bp, Artificial Sequence
  Synthetic oligonucleotide; GGG chr2 60453562 60453581 60453578 +
ggggcatgctgcgtccaggt

SEQ ID NO: 157052 - DNA, 20 bp, Artificial Sequence
  Synthetic oligonucleotide; TGG chr2 60453568 60453587 60453584 +
tgctgcgtccaggtgggttc

SEQ ID NO: 157053 - DNA, 20 bp, Artificial Sequence
  Synthetic oligonucleotide; GGG chr2 60453569 60453588 60453585 +
gctgcgtccaggtgggttct

SEQ ID NO: 157054 - DNA, 20 bp, Artificial Sequence
  Synthetic oligonucleotide; GGG chr2 60453570 60453589 60453586 +
ctgcgtccaggtgggttctg

SEQ ID NO: 157055 - DNA, 20 bp, Artificial Sequence
  Synthetic oligonucleotide; CAG chr2 60453584 60453603 60453600 +
gttctggggaatcccattcc

SEQ ID NO: 157056 - DNA, 20 bp, Artificial Sequence
  Synthetic oligonucleotide; CAG chr2 60453589 60453608 60453605 +
ggggaatcccattcccagtc

SEQ ID NO: 157057 - DNA, 20 bp, Artificial Sequence
  Synthetic oligonucleotide; AAG chr2 60453596 60453615 60453612 +
cccattcccagtccagcgct

SEQ ID NO: 157058 - DNA, 20 bp, Artificial Sequence
  Synthetic oligonucleotide; GAG chr2 60453610 60453629 60453626 +
agcgctaagtcactgtcgtc

SEQ ID NO: 157059 - DNA, 20 bp, Artificial Sequence
  Synthetic oligonucleotide; AGG chr2 60453611 60453630 60453627 +
gcgctaagtcactgtcgtcg

SEQ ID NO: 157060 - DNA, 20 bp, Artificial Sequence
  Synthetic oligonucleotide; TAG chr2 60453620 60453639 60453636 +
cactgtcgtcgaggcccctt

SEQ ID NO: 157061 - DNA, 20 bp, Artificial Sequence
  Synthetic oligonucleotide; TAG chr2 60453678 60453697 60453694 +
taccaatattcaaattctaa

SEQ ID NO: 157062 - DNA, 20 bp, Artificial Sequence
  Synthetic oligonucleotide; AAG chr2 60453684 60453703 60453700 +
tattcaaattctaatagaca

SEQ ID NO: 157063 - DNA, 20 bp, Artificial Sequence
  Synthetic oligonucleotide; TGG chr2 60453694 60453713 60453710 +
ctaatagacaaagtatatca

SEQ ID NO: 157064 - DNA, 20 bp, Artificial Sequence
  Synthetic oligonucleotide; GGG chr2 60453695 60453714 60453711 +
taatagacaaagtatatcat

SEQ ID NO: 157065 - DNA, 20 bp, Artificial Sequence
  Synthetic oligonucleotide; CAG chr2 60453713 60453732 60453729 +
atgggcatgtaccacgttca

SEQ ID NO: 157066 - DNA, 20 bp, Artificial Sequence
  Synthetic oligonucleotide; AAG chr2 60453724 60453743 60453740 +
ccacgttcacagctatttaa

SEQ ID NO: 157067 - DNA, 20 bp, Artificial Sequence
  Synthetic oligonucleotide; CAG chr2 60453729 60453748 60453745 +
ttcacagctatttaaaagca

SEQ ID NO: 157068 - DNA, 20 bp, Artificial Sequence
  Synthetic oligonucleotide; TGG chr2 60453740 60453759 60453756 +
ttaaaagcacagccccccta

SEQ ID NO: 157069 - DNA, 20 bp, Artificial Sequence
  Synthetic oligonucleotide; GGG chr2 60453741 60453760 60453757 +
taaaagcacagcccccctat

SEQ ID NO: 157070 - DNA, 20 bp, Artificial Sequence
  Synthetic oligonucleotide; TAG chr2 60453746 60453765 60453762 +
gcacagcccccctatgggtt

SEQ ID NO: 157071 - DNA, 20 bp, Artificial Sequence
  Synthetic oligonucleotide; AGG chr2 60453747 60453766 60453763 +
cacagcccccctatgggttt

SEQ ID NO: 157072 - DNA, 20 bp, Artificial Sequence
  Synthetic oligonucleotide; GGG chr2 60453748 60453767 60453764 +
acagcccccctatgggttta

SEQ ID NO: 157073 - DNA, 20 bp, Artificial Sequence
  Synthetic oligonucleotide; GGG chr2 60453749 60453768 60453765 +
cagcccccctatgggtttag

SEQ ID NO: 157074 - DNA, 20 bp, Artificial Sequence
  Synthetic oligonucleotide; TAG chr2 60453761 60453780 60453777 +
gggtttaggggctcccgctt

SEQ ID NO: 157075 - DNA, 20 bp, Artificial Sequence
  Synthetic oligonucleotide; GAG chr2 60453763 60453782 60453779 +
gtttaggggctcccgcttta

SEQ ID NO: 157076 - DNA, 20 bp, Artificial Sequence
  Synthetic oligonucleotide; AGG chr2 60453764 60453783 60453780 +
tttaggggctcccgctttag

SEQ ID NO: 157077 - DNA, 20 bp, Artificial Sequence
  Synthetic oligonucleotide; TGG chr2 60453772 60453791 60453788 +
ctcccgctttagaggatact

SEQ ID NO: 157078 - DNA, 20 bp, Artificial Sequence
  Synthetic oligonucleotide; GGG chr2 60453773 60453792 60453789 +
tcccgctttagaggatactt

SEQ ID NO: 157079 - DNA, 20 bp, Artificial Sequence
  Synthetic oligonucleotide; GGG chr2 60453774 60453793 60453790 +
cccgctttagaggatacttg

SEQ ID NO: 157080 - DNA, 20 bp, Artificial Sequence
  Synthetic oligonucleotide; TGG chr2 60453780 60453799 60453796 +
ttagaggatacttggggaaa

SEQ ID NO: 157081 - DNA, 20 bp, Artificial Sequence
  Synthetic oligonucleotide; AAG chr2 60453813 60453832 60453829 +
cttttctaccatccctatga

SEQ ID NO: 157082 - DNA, 20 bp, Artificial Sequence
  Synthetic oligonucleotide; TAG chr2 60453841 60453860 60453857 +
atacacgtgctcccttgaaa

SEQ ID NO: 157083 - DNA, 20 bp, Artificial Sequence
  Synthetic oligonucleotide; CAG chr2 60453858 60453877 60453874 +
aaatagtttttgccacttta

SEQ ID NO: 157084 - DNA, 20 bp, Artificial Sequence
  Synthetic oligonucleotide; AAG chr2 60453862 60453881 60453878 +
agtttttgccactttacaga

SEQ ID NO: 157085 - DNA, 20 bp, Artificial Sequence
  Synthetic oligonucleotide; AGG chr2 60453863 60453882 60453879 +
gtttttgccactttacagaa

SEQ ID NO: 157086 - DNA, 20 bp, Artificial Sequence
  Synthetic oligonucleotide; TGG chr2 60453877 60453896 60453893 +
acagaaaggaaaaacgtatt

SEQ ID NO: 157087 - DNA, 20 bp, Artificial Sequence
  Synthetic oligonucleotide; GAG chr2 60453890 60453909 60453906 +
acgtatttggatcaaccatc

SEQ ID NO: 157088 - DNA, 20 bp, Artificial Sequence
  Synthetic oligonucleotide; CAG chr2 60453900 60453919 60453916 +
atcaaccatcgagctgtgtt

SEQ ID NO: 157089 - DNA, 20 bp, Artificial Sequence
  Synthetic oligonucleotide; AAG chr2 60453905 60453924 60453921 +
ccatcgagctgtgttcagcc

SEQ ID NO: 157090 - DNA, 20 bp, Artificial Sequence
  Synthetic oligonucleotide; TAG chr2 60453910 60453929 60453926 +
gagctgtgttcagccaagtt

SEQ ID NO: 157091 - DNA, 20 bp, Artificial Sequence
  Synthetic oligonucleotide; AGG chr2 60453911 60453930 60453927 +
agctgtgttcagccaagttt

SEQ ID NO: 157092 - DNA, 20 bp, Artificial Sequence
  Synthetic oligonucleotide; AAG chr2 60453919 60453938 60453935 +
tcagccaagtttaggttctc

SEQ ID NO: 157093 - DNA, 20 bp, Artificial Sequence
  Synthetic oligonucleotide; TGG chr2 60453941 60453960 60453957 +
gtacaatgacccgtgtgaac

SEQ ID NO: 157094 - DNA, 20 bp, Artificial Sequence
  Synthetic oligonucleotide; TGG chr2 60453946 60453965 60453962 +
atgacccgtgtgaactggat

SEQ ID NO: 157095 - DNA, 20 bp, Artificial Sequence
  Synthetic oligonucleotide; TGG chr2 60453962 60453981 60453978 +
ggattggtctctttcccatt

SEQ ID NO: 157096 - DNA, 20 bp, Artificial Sequence
  Synthetic oligonucleotide; AAG chr2 60453965 60453984 60453981 +
ttggtctctttcccatttgg

SEQ ID NO: 157097 - DNA, 20 bp, Artificial Sequence
  Synthetic oligonucleotide; AGG chr2 60453966 60453985 60453982 +
tggtctctttcccatttgga

SEQ ID NO: 157098 - DNA, 20 bp, Artificial Sequence
  Synthetic oligonucleotide; GGG chr2 60453967 60453986 60453983 +
ggtctctttcccatttggaa

SEQ ID NO: 157099 - DNA, 20 bp, Artificial Sequence
  Synthetic oligonucleotide; GAG chr2 60453969 60453988 60453985 +
tctctttcccatttggaagg

SEQ ID NO: 157100 - DNA, 20 bp, Artificial Sequence
  Synthetic oligonucleotide; AGG chr2 60453970 60453989 60453986 +
ctctttcccatttggaaggg

SEQ ID NO: 157101 - DNA, 20 bp, Artificial Sequence
  Synthetic oligonucleotide; TGG chr2 60453979 60453998 60453995 +
atttggaagggaggaattaa

SEQ ID NO: 157102 - DNA, 20 bp, Artificial Sequence
  Synthetic oligonucleotide; TAG chr2 60453995 60454014 60454011 +
ttaatggtatcccatgaccg

SEQ ID NO: 157103 - DNA, 20 bp, Artificial Sequence
  Synthetic oligonucleotide; TGG chr2 60454005 60454024 60454021 +
cccatgaccgtagatgacgc

SEQ ID NO: 157104 - DNA, 20 bp, Artificial Sequence
  Synthetic oligonucleotide; GGG chr2 60454006 60454025 60454022 +
ccatgaccgtagatgacgct

SEQ ID NO: 157105 - DNA, 20 bp, Artificial Sequence
  Synthetic oligonucleotide; TAG chr2 60454012 60454031 60454028 +
ccgtagatgacgctgggaaa

SEQ ID NO: 157106 - DNA, 20 bp, Artificial Sequence
  Synthetic oligonucleotide; GAG chr2 60454014 60454033 60454030 +
gtagatgacgctgggaaata

SEQ ID NO: 157107 - DNA, 20 bp, Artificial Sequence
  Synthetic oligonucleotide; GAG chr2 60454016 60454035 60454032 +
agatgacgctgggaaataga

SEQ ID NO: 157108 - DNA, 20 bp, Artificial Sequence
  Synthetic oligonucleotide; GAG chr2 60454018 60454037 60454034 +
atgacgctgggaaatagaga

SEQ ID NO: 157109 - DNA, 20 bp, Artificial Sequence
  Synthetic oligonucleotide; GAG chr2 60454020 60454039 60454036 +
gacgctgggaaatagagaga

SEQ ID NO: 157110 - DNA, 20 bp, Artificial Sequence
  Synthetic oligonucleotide; AAG chr2 60454024 60454043 60454040 +
ctgggaaatagagagagaga

SEQ ID NO: 157111 - DNA, 20 bp, Artificial Sequence
  Synthetic oligonucleotide; GAG chr2 60454026 60454045 60454042 +
gggaaatagagagagagaaa

SEQ ID NO: 157112 - DNA, 20 bp, Artificial Sequence
  Synthetic oligonucleotide; GAG chr2 60454028 60454047 60454044 +
gaaatagagagagagaaaga

SEQ ID NO: 157113 - DNA, 20 bp, Artificial Sequence
  Synthetic oligonucleotide; GAG chr2 60454030 60454049 60454046 +
aatagagagagagaaagaga

SEQ ID NO: 157114 - DNA, 20 bp, Artificial Sequence
  Synthetic oligonucleotide; GAG chr2 60454032 60454051 60454048 +
tagagagagagaaagagaga

SEQ ID NO: 157115 - DNA, 20 bp, Artificial Sequence
  Synthetic oligonucleotide; GAG chr2 60454034 60454053 60454050 +
gagagagagaaagagagaga

SEQ ID NO: 157116 - DNA, 20 bp, Artificial Sequence
  Synthetic oligonucleotide; GAG chr2 60454036 60454055 60454052 +
gagagagaaagagagagaga

SEQ ID NO: 157117 - DNA, 20 bp, Artificial Sequence
  Synthetic oligonucleotide; GAG chr2 60454038 60454057 60454054 +
gagagaaagagagagagaga

SEQ ID NO: 157118 - DNA, 20 bp, Artificial Sequence
  Synthetic oligonucleotide; GAG chr2 60454040 60454059 60454056 +
gagaaagagagagagagaga

SEQ ID NO: 157119 - DNA, 20 bp, Artificial Sequence
  Synthetic oligonucleotide; CAG chr2 60454046 60454065 60454062 +
gagagagagagagagagaaa

SEQ ID NO: 157120 - DNA, 20 bp, Artificial Sequence
  Synthetic oligonucleotide; AAG chr2 60454062 60454081 60454078 +
gaaacagccccattccccta

SEQ ID NO: 157121 - DNA, 20 bp, Artificial Sequence
  Synthetic oligonucleotide; AGG chr2 60454063 60454082 60454079 +
aaacagccccattcccctaa

SEQ ID NO: 157122 - DNA, 20 bp, Artificial Sequence
  Synthetic oligonucleotide; GAG chr2 60454068 60454087 60454084 +
gccccattcccctaaaggct

SEQ ID NO: 157123 - DNA, 20 bp, Artificial Sequence
  Synthetic oligonucleotide; TGG chr2 60454075 60454094 60454091 +
tcccctaaaggctgagtcac

SEQ ID NO: 157124 - DNA, 20 bp, Artificial Sequence
  Synthetic oligonucleotide; TAG chr2 60454092 60454111 60454108 +
cactggcctcgtgctgtatg

SEQ ID NO: 157125 - DNA, 20 bp, Artificial Sequence
  Synthetic oligonucleotide; CAG chr2 60454104 60454123 60454120 +
gctgtatgtagtaaattaaa

SEQ ID NO: 157126 - DNA, 20 bp, Artificial Sequence
  Synthetic oligonucleotide; CGG chr2 60454107 60454126 60454123 +
gtatgtagtaaattaaacag

SEQ ID NO: 157127 - DNA, 20 bp, Artificial Sequence
  Synthetic oligonucleotide; GGG chr2 60454108 60454127 60454124 +
tatgtagtaaattaaacagc

SEQ ID NO: 157128 - DNA, 20 bp, Artificial Sequence
  Synthetic oligonucleotide; TGG chr2 60454115 60454134 60454131 +
taaattaaacagcgggctaa

SEQ ID NO: 157129 - DNA, 20 bp, Artificial Sequence
  Synthetic oligonucleotide; GGG chr2 60454116 60454135 60454132 +
aaattaaacagcgggctaat

SEQ ID NO: 157130 - DNA, 20 bp, Artificial Sequence
  Synthetic oligonucleotide; GAG chr2 60454124 60454143 60454140 +
cagcgggctaatgggataac

SEQ ID NO: 157131 - DNA, 20 bp, Artificial Sequence
  Synthetic oligonucleotide; CAG chr2 60454131 60454150 60454147 +
ctaatgggataacgagatgc

SEQ ID NO: 157132 - DNA, 20 bp, Artificial Sequence
  Synthetic oligonucleotide; AAG chr2 60454135 60454154 60454151 +
tgggataacgagatgccagc

SEQ ID NO: 157133 - DNA, 20 bp, Artificial Sequence
  Synthetic oligonucleotide; CAG chr2 60454138 60454157 60454154 +
gataacgagatgccagcaag

SEQ ID NO: 157134 - DNA, 20 bp, Artificial Sequence
  Synthetic oligonucleotide; AAG chr2 60454141 60454160 60454157 +
aacgagatgccagcaagcag

SEQ ID NO: 157135 - DNA, 20 bp, Artificial Sequence
  Synthetic oligonucleotide; CAG chr2 60454146 60454165 60454162 +
gatgccagcaagcagaagtg

SEQ ID NO: 157136 - DNA, 20 bp, Artificial Sequence
  Synthetic oligonucleotide; CGG chr2 60454151 60454170 60454167 +
cagcaagcagaagtgcagac

SEQ ID NO: 157137 - DNA, 20 bp, Artificial Sequence
  Synthetic oligonucleotide; CAG chr2 60454168 60454187 60454184 +
gaccggacaacccatgtcca

SEQ ID NO: 157138 - DNA, 20 bp, Artificial Sequence
  Synthetic oligonucleotide; TAG chr2 60454175 60454194 60454191 +
caacccatgtccacagttca

SEQ ID NO: 157139 - DNA, 20 bp, Artificial Sequence
  Synthetic oligonucleotide; TAG chr2 60454181 60454200 60454197 +
atgtccacagttcatagcta

SEQ ID NO: 157140 - DNA, 20 bp, Artificial Sequence
  Synthetic oligonucleotide; CAG chr2 60454184 60454203 60454200 +
tccacagttcatagctatag

SEQ ID NO: 157141 - DNA, 20 bp, Artificial Sequence
  Synthetic oligonucleotide; TAG chr2 60454190 60454209 60454206 +
gttcatagctatagcagccc

SEQ ID NO: 157142 - DNA, 20 bp, Artificial Sequence
  Synthetic oligonucleotide; GAG chr2 60454192 60454211 60454208 +
tcatagctatagcagcccta

SEQ ID NO: 157143 - DNA, 20 bp, Artificial Sequence
  Synthetic oligonucleotide; TGG chr2 60454251 60454270 60454267 +
gatgtccatttctctaacaa

SEQ ID NO: 157144 - DNA, 20 bp, Artificial Sequence
  Synthetic oligonucleotide; GGG chr2 60454252 60454271 60454268 +
atgtccatttctctaacaat

SEQ ID NO: 157145 - DNA, 20 bp, Artificial Sequence
  Synthetic oligonucleotide; TGG chr2 60454271 60454290 60454287 +
tgggttcgtttattttctat

SEQ ID NO: 157146 - DNA, 20 bp, Artificial Sequence
  Synthetic oligonucleotide; GGG chr2 60454272 60454291 60454288 +
gggttcgtttattttctatt

SEQ ID NO: 157147 - DNA, 20 bp, Artificial Sequence
  Synthetic oligonucleotide; CAG chr2 60454282 60454301 60454298 +
attttctattgggaaatatg

SEQ ID NO: 157148 - DNA, 20 bp, Artificial Sequence
  Synthetic oligonucleotide; AGG chr2 60454283 60454302 60454299 +
ttttctattgggaaatatgc

SEQ ID NO: 157149 - DNA, 20 bp, Artificial Sequence
  Synthetic oligonucleotide; GGG chr2 60454284 60454303 60454300 +
tttctattgggaaatatgca

SEQ ID NO: 157150 - DNA, 20 bp, Artificial Sequence
  Synthetic oligonucleotide; TAG chr2 60454290 60454309 60454306 +
ttgggaaatatgcagggctt

SEQ ID NO: 157151 - DNA, 20 bp, Artificial Sequence
  Synthetic oligonucleotide; AGG chr2 60454291 60454310 60454307 +
tgggaaatatgcagggcttt

SEQ ID NO: 157152 - DNA, 20 bp, Artificial Sequence
  Synthetic oligonucleotide; GAG chr2 60454293 60454312 60454309 +
ggaaatatgcagggctttag

SEQ ID NO: 157153 - DNA, 20 bp, Artificial Sequence
  Synthetic oligonucleotide; TAG chr2 60454301 60454320 60454317 +
gcagggctttaggagacaac

SEQ ID NO: 157154 - DNA, 20 bp, Artificial Sequence
  Synthetic oligonucleotide; AGG chr2 60454302 60454321 60454318 +
cagggctttaggagacaact

SEQ ID NO: 157155 - DNA, 20 bp, Artificial Sequence
  Synthetic oligonucleotide; TAG chr2 60454314 60454333 60454330 +
agacaactaggaaaatctgc

SEQ ID NO: 157156 - DNA, 20 bp, Artificial Sequence
  Synthetic oligonucleotide; TGG chr2 60454318 60454337 60454334 +
aactaggaaaatctgctaga

SEQ ID NO: 157157 - DNA, 20 bp, Artificial Sequence
  Synthetic oligonucleotide; AAG chr2 60454335 60454354 60454351 +
agatggctcatgccttttaa

SEQ ID NO: 157158 - DNA, 20 bp, Artificial Sequence
  Synthetic oligonucleotide; TAG chr2 60454339 60454358 60454355 +
ggctcatgccttttaaaagt

SEQ ID NO: 157159 - DNA, 20 bp, Artificial Sequence
  Synthetic oligonucleotide; CAG chr2 60454342 60454361 60454358 +
tcatgccttttaaaagttag

SEQ ID NO: 157160 - DNA, 20 bp, Artificial Sequence
  Synthetic oligonucleotide; AAG chr2 60454351 60454370 60454367 +
ttaaaagttagcagtctttt

SEQ ID NO: 157161 - DNA, 20 bp, Artificial Sequence
  Synthetic oligonucleotide; AAG chr2 60454366 60454385 60454382 +
cttttaagaaacatttttcc

SEQ ID NO: 157162 - DNA, 20 bp, Artificial Sequence
  Synthetic oligonucleotide; CAG chr2 60454369 60454388 60454385 +
ttaagaaacatttttccaag

SEQ ID NO: 157163 - DNA, 20 bp, Artificial Sequence
  Synthetic oligonucleotide; AGG chr2 60454370 60454389 60454386 +
taagaaacatttttccaagc

SEQ ID NO: 157164 - DNA, 20 bp, Artificial Sequence
  Synthetic oligonucleotide; GAG chr2 60454375 60454394 60454391 +
aacatttttccaagcaggtt

SEQ ID NO: 157165 - DNA, 20 bp, Artificial Sequence
  Synthetic oligonucleotide; GAG chr2 60454377 60454396 60454393 +
catttttccaagcaggttga

SEQ ID NO: 157166 - DNA, 20 bp, Artificial Sequence
  Synthetic oligonucleotide; CGG chr2 60454405 60454424 60454421 +
tgccaatcccatcctcatat

SEQ ID NO: 157167 - DNA, 20 bp, Artificial Sequence
  Synthetic oligonucleotide; AAG chr2 60454410 60454429 60454426 +
atcccatcctcatatcggca

SEQ ID NO: 157168 - DNA, 20 bp, Artificial Sequence
  Synthetic oligonucleotide; TGG chr2 60454433 60454452 60454449 +
ttcccacaatttttttttta

SEQ ID NO: 157169 - DNA, 20 bp, Artificial Sequence
  Synthetic oligonucleotide; GGG chr2 60454434 60454453 60454450 +
tcccacaattttttttttat

SEQ ID NO: 157170 - DNA, 20 bp, Artificial Sequence
  Synthetic oligonucleotide; AAG chr2 60454437 60454456 60454453 +
cacaattttttttttatggg

SEQ ID NO: 157171 - DNA, 20 bp, Artificial Sequence
  Synthetic oligonucleotide; AAG chr2 60454452 60454471 60454468 +
atgggaagttgtctgaaaaa

SEQ ID NO: 157172 - DNA, 20 bp, Artificial Sequence
  Synthetic oligonucleotide; GAG chr2 60454454 60454473 60454470 +
gggaagttgtctgaaaaaaa

SEQ ID NO: 157173 - DNA, 20 bp, Artificial Sequence
  Synthetic oligonucleotide; TGG chr2 60454459 60454478 60454475 +
gttgtctgaaaaaaagagaa

SEQ ID NO: 157174 - DNA, 20 bp, Artificial Sequence
  Synthetic oligonucleotide; GGG chr2 60454460 60454479 60454476 +
ttgtctgaaaaaaagagaat

SEQ ID NO: 157175 - DNA, 20 bp, Artificial Sequence
  Synthetic oligonucleotide; TGG chr2 60454464 60454483 60454480 +
ctgaaaaaaagagaatggga

SEQ ID NO: 157176 - DNA, 20 bp, Artificial Sequence
  Synthetic oligonucleotide; GGG chr2 60454465 60454484 60454481 +
tgaaaaaaagagaatgggat

SEQ ID NO: 157177 - DNA, 20 bp, Artificial Sequence
  Synthetic oligonucleotide; CAG chr2 60454485 60454504 60454501 +
gggtacattcctgaacacac

SEQ ID NO: 157178 - DNA, 20 bp, Artificial Sequence
  Synthetic oligonucleotide; AGG chr2 60454486 60454505 60454502 +
ggtacattcctgaacacacc

SEQ ID NO: 157179 - DNA, 20 bp, Artificial Sequence
  Synthetic oligonucleotide; CAG chr2 60454491 60454510 60454507 +
attcctgaacacaccaggcc

SEQ ID NO: 157180 - DNA, 20 bp, Artificial Sequence
  Synthetic oligonucleotide; AGG chr2 60454492 60454511 60454508 +
ttcctgaacacaccaggccc

SEQ ID NO: 157181 - DNA, 20 bp, Artificial Sequence
  Synthetic oligonucleotide; GGG chr2 60454493 60454512 60454509 +
tcctgaacacaccaggccca

SEQ ID NO: 157182 - DNA, 20 bp, Artificial Sequence
  Synthetic oligonucleotide; TGG chr2 60454500 60454519 60454516 +
cacaccaggcccagggacaa

SEQ ID NO: 157183 - DNA, 20 bp, Artificial Sequence
  Synthetic oligonucleotide; GAG chr2 60454502 60454521 60454518 +
caccaggcccagggacaatg

SEQ ID NO: 157184 - DNA, 20 bp, Artificial Sequence
  Synthetic oligonucleotide; CAG chr2 60454508 60454527 60454524 +
gcccagggacaatggagtaa

SEQ ID NO: 157185 - DNA, 20 bp, Artificial Sequence
  Synthetic oligonucleotide; GAG chr2 60454520 60454539 60454536 +
tggagtaacagaatcgtaat

SEQ ID NO: 157186 - DNA, 20 bp, Artificial Sequence
  Synthetic oligonucleotide; AGG chr2 60454521 60454540 60454537 +
ggagtaacagaatcgtaatg

SEQ ID NO: 157187 - DNA, 20 bp, Artificial Sequence
  Synthetic oligonucleotide; CAG chr2 60454530 60454549 60454546 +
gaatcgtaatgaggaacaca

SEQ ID NO: 157188 - DNA, 20 bp, Artificial Sequence
  Synthetic oligonucleotide; CAG chr2 60454541 60454560 60454557 +
aggaacacacagttacaaca

SEQ ID NO: 157189 - DNA, 20 bp, Artificial Sequence
  Synthetic oligonucleotide; AAG chr2 60454548 60454567 60454564 +
cacagttacaacacagtcat

SEQ ID NO: 157190 - DNA, 20 bp, Artificial Sequence
  Synthetic oligonucleotide; AAG chr2 60454551 60454570 60454567 +
agttacaacacagtcataag

SEQ ID NO: 157191 - DNA, 20 bp, Artificial Sequence
  Synthetic oligonucleotide; CGG chr2 60454571 60454590 60454587 +
aagtcatgttcatgtgtgta

SEQ ID NO: 157192 - DNA, 20 bp, Artificial Sequence
  Synthetic oligonucleotide; GAG chr2 60454573 60454592 60454589 +
gtcatgttcatgtgtgtacg

SEQ ID NO: 157193 - DNA, 20 bp, Artificial Sequence
  Synthetic oligonucleotide; AGG chr2 60454574 60454593 60454590 +
tcatgttcatgtgtgtacgg

SEQ ID NO: 157194 - DNA, 20 bp, Artificial Sequence
  Synthetic oligonucleotide; GGG chr2 60454575 60454594 60454591 +
catgttcatgtgtgtacgga

SEQ ID NO: 157195 - DNA, 20 bp, Artificial Sequence
  Synthetic oligonucleotide; GGG chr2 60454576 60454595 60454592 +
atgttcatgtgtgtacggag

SEQ ID NO: 157196 - DNA, 20 bp, Artificial Sequence
  Synthetic oligonucleotide; GGG chr2 60454577 60454596 60454593 +
tgttcatgtgtgtacggagg

SEQ ID NO: 157197 - DNA, 20 bp, Artificial Sequence
  Synthetic oligonucleotide; AAG chr2 60454582 60454601 60454598 +
atgtgtgtacggagggggaa

SEQ ID NO: 157198 - DNA, 20 bp, Artificial Sequence
  Synthetic oligonucleotide; GAG chr2 60454584 60454603 60454600 +
gtgtgtacggagggggaaaa

SEQ ID NO: 157199 - DNA, 20 bp, Artificial Sequence
  Synthetic oligonucleotide; AGG chr2 60454585 60454604 60454601 +
tgtgtacggagggggaaaag

SEQ ID NO: 157200 - DNA, 20 bp, Artificial Sequence
  Synthetic oligonucleotide; AAG chr2 60454596 60454615 60454612 +
ggggaaaagaggcttaaaac

SEQ ID NO: 157201 - DNA, 20 bp, Artificial Sequence
  Synthetic oligonucleotide; CAG chr2 60454620 60454639 60454636 +
aaacactgtatttcctccct

SEQ ID NO: 157202 - DNA, 20 bp, Artificial Sequence
  Synthetic oligonucleotide; GAG chr2 60454630 60454649 60454646 +
tttcctccctcagtctctgt

SEQ ID NO: 157203 - DNA, 20 bp, Artificial Sequence
  Synthetic oligonucleotide; AAG chr2 60454635 60454654 60454651 +
tccctcagtctctgtgagca

SEQ ID NO: 157204 - DNA, 20 bp, Artificial Sequence
  Synthetic oligonucleotide; AAG chr2 60454644 60454663 60454660 +
ctctgtgagcaaagtactac

SEQ ID NO: 157205 - DNA, 20 bp, Artificial Sequence
  Synthetic oligonucleotide; CAG chr2 60454647 60454666 60454663 +
tgtgagcaaagtactacaag

SEQ ID NO: 157206 - DNA, 20 bp, Artificial Sequence
  Synthetic oligonucleotide; AGG chr2 60454648 60454667 60454664 +
gtgagcaaagtactacaagc

SEQ ID NO: 157207 - DNA, 20 bp, Artificial Sequence
  Synthetic oligonucleotide; GAG chr2 60454650 60454669 60454666 +
gagcaaagtactacaagcag

SEQ ID NO: 157208 - DNA, 20 bp, Artificial Sequence
  Synthetic oligonucleotide; GAG chr2 60454652 60454671 60454668 +
gcaaagtactacaagcagga

SEQ ID NO: 157209 - DNA, 20 bp, Artificial Sequence
  Synthetic oligonucleotide; AGG chr2 60454653 60454672 60454669 +
caaagtactacaagcaggag

SEQ ID NO: 157210 - DNA, 20 bp, Artificial Sequence
  Synthetic oligonucleotide; TGG chr2 60454657 60454676 60454673 +
gtactacaagcaggagagga

SEQ ID NO: 157211 - DNA, 20 bp, Artificial Sequence
  Synthetic oligonucleotide; GGG chr2 60454658 60454677 60454674 +
tactacaagcaggagaggat

SEQ ID NO: 157212 - DNA, 20 bp, Artificial Sequence
  Synthetic oligonucleotide; GGG chr2 60454659 60454678 60454675 +
actacaagcaggagaggatg

SEQ ID NO: 157213 - DNA, 20 bp, Artificial Sequence
  Synthetic oligonucleotide; GAG chr2 60454665 60454684 60454681 +
agcaggagaggatggggcct

SEQ ID NO: 157214 - DNA, 20 bp, Artificial Sequence
  Synthetic oligonucleotide; AGG chr2 60454666 60454685 60454682 +
gcaggagaggatggggcctg

SEQ ID NO: 157215 - DNA, 20 bp, Artificial Sequence
  Synthetic oligonucleotide; CAG chr2 60454685 60454704 60454701 +
gaggcttctcaactcctttt

SEQ ID NO: 157216 - DNA, 20 bp, Artificial Sequence
  Synthetic oligonucleotide; AGG chr2 60454686 60454705 60454702 +
aggcttctcaactccttttc

SEQ ID NO: 157217 - DNA, 20 bp, Artificial Sequence
  Synthetic oligonucleotide; AAG chr2 60454689 60454708 60454705 +
cttctcaactccttttcagg

SEQ ID NO: 157218 - DNA, 20 bp, Artificial Sequence
  Synthetic oligonucleotide; AGG chr2 60454690 60454709 60454706 +
ttctcaactccttttcagga

SEQ ID NO: 157219 - DNA, 20 bp, Artificial Sequence
  Synthetic oligonucleotide; CAG chr2 60454706 60454725 60454722 +
aggaaggcccgaaataatcc

SEQ ID NO: 157220 - DNA, 20 bp, Artificial Sequence
  Synthetic oligonucleotide; CAG chr2 60454716 60454735 60454732 +
gaaataatcccagtaccttt

SEQ ID NO: 157221 - DNA, 20 bp, Artificial Sequence
  Synthetic oligonucleotide; TGG chr2 60454766 60454785 60454782 +
catttccttatttctccaat

SEQ ID NO: 157222 - DNA, 20 bp, Artificial Sequence
  Synthetic oligonucleotide; AAG chr2 60454779 60454798 60454795 +
ctccaattggaattatacct

SEQ ID NO: 157223 - DNA, 20 bp, Artificial Sequence
  Synthetic oligonucleotide; AAG chr2 60454804 60454823 60454820 +
atctcccgccacttcctttc

SEQ ID NO: 157224 - DNA, 20 bp, Artificial Sequence
  Synthetic oligonucleotide; TAG chr2 60454817 60454836 60454833 +
tcctttcaagttctcacttc

SEQ ID NO: 157225 - DNA, 20 bp, Artificial Sequence
  Synthetic oligonucleotide; TGG chr2 60454863 60454882 60454879 +
acttattgcatatacaaaaa

SEQ ID NO: 157226 - DNA, 20 bp, Artificial Sequence
  Synthetic oligonucleotide; CAG chr2 60454878 60454897 60454894 +
aaaaatggtatttaaataaa

SEQ ID NO: 157227 - DNA, 20 bp, Artificial Sequence
  Synthetic oligonucleotide; CAG chr2 60454892 60454911 60454908 +
aataaacagttctatatcta

SEQ ID NO: 157228 - DNA, 20 bp, Artificial Sequence
  Synthetic oligonucleotide; TGG chr2 60454902 60454921 60454918 +
tctatatctacagaatgccc

SEQ ID NO: 157229 - DNA, 20 bp, Artificial Sequence
  Synthetic oligonucleotide; GGG chr2 60454903 60454922 60454919 +
ctatatctacagaatgccct

SEQ ID NO: 157230 - DNA, 20 bp, Artificial Sequence
  Synthetic oligonucleotide; TGG chr2 60454936 60454955 60454952 +
ctacttcacactttctgcca

SEQ ID NO: 157231 - DNA, 20 bp, Artificial Sequence
  Synthetic oligonucleotide; CAG chr2 60454940 60454959 60454956 +
ttcacactttctgccatggc

SEQ ID NO: 157232 - DNA, 20 bp, Artificial Sequence
  Synthetic oligonucleotide; AAG chr2 60454951 60454970 60454967 +
tgccatggccagtgcaaatg

SEQ ID NO: 157233 - DNA, 20 bp, Artificial Sequence
  Synthetic oligonucleotide; TAG chr2 60454975 60454994 60454991 +
actgtgttcacctcacttct

SEQ ID NO: 157234 - DNA, 20 bp, Artificial Sequence
  Synthetic oligonucleotide; TGG chr2 60454995 60455014 60455011 +
tagcaacctttgtaatgtgt

SEQ ID NO: 157235 - DNA, 20 bp, Artificial Sequence
  Synthetic oligonucleotide; CAG chr2 60455001 60455020 60455017 +
cctttgtaatgtgttggttc

SEQ ID NO: 157236 - DNA, 20 bp, Artificial Sequence
  Synthetic oligonucleotide; TAG chr2 60455012 60455031 60455028 +
tgttggttccagcctttttg

SEQ ID NO: 157237 - DNA, 20 bp, Artificial Sequence
  Synthetic oligonucleotide; AGG chr2 60455013 60455032 60455029 +
gttggttccagcctttttgt

SEQ ID NO: 157238 - DNA, 20 bp, Artificial Sequence
  Synthetic oligonucleotide; AAG chr2 60455025 60455044 60455041 +
ctttttgtaggtcctaaaca

SEQ ID NO: 157239 - DNA, 20 bp, Artificial Sequence
  Synthetic oligonucleotide; GAG chr2 60455027 60455046 60455043 +
ttttgtaggtcctaaacaaa

SEQ ID NO: 157240 - DNA, 20 bp, Artificial Sequence
  Synthetic oligonucleotide; GAG chr2 60455029 60455048 60455045 +
ttgtaggtcctaaacaaaga

SEQ ID NO: 157241 - DNA, 20 bp, Artificial Sequence
  Synthetic oligonucleotide; AGG chr2 60455030 60455049 60455046 +
tgtaggtcctaaacaaagag

SEQ ID NO: 157242 - DNA, 20 bp, Artificial Sequence
  Synthetic oligonucleotide; TAG chr2 60455034 60455053 60455050 +
ggtcctaaacaaagagagga

SEQ ID NO: 157243 - DNA, 20 bp, Artificial Sequence
  Synthetic oligonucleotide; TGG chr2 60455041 60455060 60455057 +
aacaaagagaggatagcaaa

SEQ ID NO: 157244 - DNA, 20 bp, Artificial Sequence
  Synthetic oligonucleotide; GGG chr2 60455042 60455061 60455058 +
acaaagagaggatagcaaat

SEQ ID NO: 157245 - DNA, 20 bp, Artificial Sequence
  Synthetic oligonucleotide; CAG chr2 60455047 60455066 60455063 +
gagaggatagcaaatgggtt

SEQ ID NO: 157246 - DNA, 20 bp, Artificial Sequence
  Synthetic oligonucleotide; AGG chr2 60455048 60455067 60455064 +
agaggatagcaaatgggttc

SEQ ID NO: 157247 - DNA, 20 bp, Artificial Sequence
  Synthetic oligonucleotide; AAG chr2 60455051 60455070 60455067 +
ggatagcaaatgggttcagg

SEQ ID NO: 157248 - DNA, 20 bp, Artificial Sequence
  Synthetic oligonucleotide; AGG chr2 60455052 60455071 60455068 +
gatagcaaatgggttcagga

SEQ ID NO: 157249 - DNA, 20 bp, Artificial Sequence
  Synthetic oligonucleotide; GAG chr2 60455054 60455073 60455070 +
tagcaaatgggttcaggaag

SEQ ID NO: 157250 - DNA, 20 bp, Artificial Sequence
  Synthetic oligonucleotide; AGG chr2 60455055 60455074 60455071 +
agcaaatgggttcaggaagg

SEQ ID NO: 157251 - DNA, 20 bp, Artificial Sequence
  Synthetic oligonucleotide; TAG chr2 60455063 60455082 60455079 +
ggttcaggaaggaggtaata

SEQ ID NO: 157252 - DNA, 20 bp, Artificial Sequence
  Synthetic oligonucleotide; AGG chr2 60455064 60455083 60455080 +
gttcaggaaggaggtaatat

SEQ ID NO: 157253 - DNA, 20 bp, Artificial Sequence
  Synthetic oligonucleotide; TGG chr2 60455070 60455089 60455086 +
gaaggaggtaatataggcac

SEQ ID NO: 157254 - DNA, 20 bp, Artificial Sequence
  Synthetic oligonucleotide; AAG chr2 60455073 60455092 60455089 +
ggaggtaatataggcactgg

SEQ ID NO: 157255 - DNA, 20 bp, Artificial Sequence
  Synthetic oligonucleotide; GAG chr2 60455075 60455094 60455091 +
aggtaatataggcactggaa

SEQ ID NO: 157256 - DNA, 20 bp, Artificial Sequence
  Synthetic oligonucleotide; TGG chr2 60455082 60455101 60455098 +
ataggcactggaagagtttc

SEQ ID NO: 157257 - DNA, 20 bp, Artificial Sequence
  Synthetic oligonucleotide; GAG chr2 60455097 60455116 60455113 +
gtttctggtttaaaatctgt

SEQ ID NO: 157258 - DNA, 20 bp, Artificial Sequence
  Synthetic oligonucleotide; TAG chr2 60455103 60455122 60455119 +
ggtttaaaatctgtgagaaa

SEQ ID NO: 157259 - DNA, 20 bp, Artificial Sequence
  Synthetic oligonucleotide; CGG chr2 60455112 60455131 60455128 +
tctgtgagaaatagaatttg

SEQ ID NO: 157260 - DNA, 20 bp, Artificial Sequence
  Synthetic oligonucleotide; AAG chr2 60455129 60455148 60455145 +
ttgcggtattcctgtttatt

SEQ ID NO: 157261 - DNA, 20 bp, Artificial Sequence
  Synthetic oligonucleotide; AAG chr2 60455145 60455164 60455161 +
tattaagttgttctcaaatg

SEQ ID NO: 157262 - DNA, 20 bp, Artificial Sequence
  Synthetic oligonucleotide; AAG chr2 60455154 60455173 60455170 +
gttctcaaatgaagattaaa

SEQ ID NO: 157263 - DNA, 20 bp, Artificial Sequence
  Synthetic oligonucleotide; AAG chr2 60455165 60455184 60455181 +
aagattaaaaagaacatttt

SEQ ID NO: 157264 - DNA, 20 bp, Artificial Sequence
  Synthetic oligonucleotide; CAG chr2 60455171 60455190 60455187 +
aaaaagaacattttaagcat

SEQ ID NO: 157265 - DNA, 20 bp, Artificial Sequence
  Synthetic oligonucleotide; CAG chr2 60455176 60455195 60455192 +
gaacattttaagcatcagtt

SEQ ID NO: 157266 - DNA, 20 bp, Artificial Sequence
  Synthetic oligonucleotide; AGG chr2 60455177 60455196 60455193 +
aacattttaagcatcagttc

SEQ ID NO: 157267 - DNA, 20 bp, Artificial Sequence
  Synthetic oligonucleotide; TAG chr2 60455184 60455203 60455200 +
taagcatcagttcaggtatg

SEQ ID NO: 157268 - DNA, 20 bp, Artificial Sequence
  Synthetic oligonucleotide; GAG chr2 60455186 60455205 60455202 +
agcatcagttcaggtatgta

SEQ ID NO: 157269 - DNA, 20 bp, Artificial Sequence
  Synthetic oligonucleotide; CAG chr2 60455199 60455218 60455215 +
gtatgtagagaacattccat

SEQ ID NO: 157270 - DNA, 20 bp, Artificial Sequence
  Synthetic oligonucleotide; AAG chr2 60455208 60455227 60455224 +
gaacattccatcagcacgtc

SEQ ID NO: 157271 - DNA, 20 bp, Artificial Sequence
  Synthetic oligonucleotide; GAG chr2 60455231 60455250 60455247 +
cctgttacaaaaacttactt

SEQ ID NO: 157272 - DNA, 20 bp, Artificial Sequence
  Synthetic oligonucleotide; AGG chr2 60455232 60455251 60455248 +
ctgttacaaaaacttacttg

SEQ ID NO: 157273 - DNA, 20 bp, Artificial Sequence
  Synthetic oligonucleotide; AAG chr2 60455240 60455259 60455256 +
aaaacttacttgaggatttt

SEQ ID NO: 157274 - DNA, 20 bp, Artificial Sequence
  Synthetic oligonucleotide; GAG chr2 60455242 60455261 60455258 +
aacttacttgaggattttaa

SEQ ID NO: 157275 - DNA, 20 bp, Artificial Sequence
  Synthetic oligonucleotide; TAG chr2 60455258 60455277 60455274 +
ttaagagacattaatgttct

SEQ ID NO: 157276 - DNA, 20 bp, Artificial Sequence
  Synthetic oligonucleotide; TAG chr2 60455261 60455280 60455277 +
agagacattaatgttcttag

SEQ ID NO: 157277 - DNA, 20 bp, Artificial Sequence
  Synthetic oligonucleotide; AAG chr2 60455282 60455301 60455298 +
agttcctcatttaaaaaaaa

SEQ ID NO: 157278 - DNA, 20 bp, Artificial Sequence
  Synthetic oligonucleotide; TGG chr2 60455306 60455325 60455322 +
tcatgaattcatcttactat

SEQ ID NO: 157279 - DNA, 20 bp, Artificial Sequence
  Synthetic oligonucleotide; AAG chr2 60455332 60455351 60455348 +
tgtgcatgttattttatatt

SEQ ID NO: 157280 - DNA, 20 bp, Artificial Sequence
  Synthetic oligonucleotide; TAG chr2 60455346 60455365 60455362 +
tatattaagattttaaattt

SEQ ID NO: 157281 - DNA, 20 bp, Artificial Sequence
  Synthetic oligonucleotide; GAG chr2 60455348 60455367 60455364 +
tattaagattttaaatttta

SEQ ID NO: 157282 - DNA, 20 bp, Artificial Sequence
  Synthetic oligonucleotide; TGG chr2 60455354 60455373 60455370 +
gattttaaattttagagttc

SEQ ID NO: 157283 - DNA, 20 bp, Artificial Sequence
  Synthetic oligonucleotide; AAG chr2 60455375 60455394 60455391 +
ggatacaaaatatcatttat

SEQ ID NO: 157284 - DNA, 20 bp, Artificial Sequence
  Synthetic oligonucleotide; TGG chr2 60455389 60455408 60455405 +
atttataagtgatatcatgt

SEQ ID NO: 157285 - DNA, 20 bp, Artificial Sequence
  Synthetic oligonucleotide; TAG chr2 60455393 60455412 60455409 +
ataagtgatatcatgttggc

SEQ ID NO: 157286 - DNA, 20 bp, Artificial Sequence
  Synthetic oligonucleotide; AGG chr2 60455394 60455413 60455410 +
taagtgatatcatgttggct

SEQ ID NO: 157287 - DNA, 20 bp, Artificial Sequence
  Synthetic oligonucleotide; CAG chr2 60455419 60455438 60455435 +
ctcatgtttctattgttcat

SEQ ID NO: 157288 - DNA, 20 bp, Artificial Sequence
  Synthetic oligonucleotide; CAG chr2 60455425 60455444 60455441 +
tttctattgttcatcagctt

SEQ ID NO: 157289 - DNA, 20 bp, Artificial Sequence
  Synthetic oligonucleotide; CAG chr2 60455442 60455461 60455458 +
cttcagaaataatattttat

SEQ ID NO: 157290 - DNA, 20 bp, Artificial Sequence
  Synthetic oligonucleotide; AAG chr2 60455445 60455464 60455461 +
cagaaataatattttatcag

SEQ ID NO: 157291 - DNA, 20 bp, Artificial Sequence
  Synthetic oligonucleotide; AGG chr2 60455446 60455465 60455462 +
agaaataatattttatcaga

SEQ ID NO: 157292 - DNA, 20 bp, Artificial Sequence
  Synthetic oligonucleotide; AAG chr2 60455456 60455475 60455472 +
ttttatcagaaggcgtcaat

SEQ ID NO: 157293 - DNA, 20 bp, Artificial Sequence
  Synthetic oligonucleotide; CAG chr2 60455460 60455479 60455476 +
atcagaaggcgtcaataagt

SEQ ID NO: 157294 - DNA, 20 bp, Artificial Sequence
  Synthetic oligonucleotide; AGG chr2 60455461 60455480 60455477 +
tcagaaggcgtcaataagtc

SEQ ID NO: 157295 - DNA, 20 bp, Artificial Sequence
  Synthetic oligonucleotide; GAG chr2 60455463 60455482 60455479 +
agaaggcgtcaataagtcag

SEQ ID NO: 157296 - DNA, 20 bp, Artificial Sequence
  Synthetic oligonucleotide; AAG chr2 60455469 60455488 60455485 +
cgtcaataagtcaggagact

SEQ ID NO: 157297 - DNA, 20 bp, Artificial Sequence
  Synthetic oligonucleotide; AAG chr2 60455479 60455498 60455495 +
tcaggagactaagtaacctg

SEQ ID NO: 157298 - DNA, 20 bp, Artificial Sequence
  Synthetic oligonucleotide; CAG chr2 60455493 60455512 60455509 +
aacctgaagaacccatctcc

SEQ ID NO: 157299 - DNA, 20 bp, Artificial Sequence
  Synthetic oligonucleotide; TGG chr2 60455512 60455531 60455528 +
ccagtaaatttatttaactt

SEQ ID NO: 157300 - DNA, 20 bp, Artificial Sequence
  Synthetic oligonucleotide; GGG chr2 60455513 60455532 60455529 +
cagtaaatttatttaacttt

SEQ ID NO: 157301 - DNA, 20 bp, Artificial Sequence
  Synthetic oligonucleotide; CAG chr2 60455551 60455570 60455567 +
cataatctgtgatttatcac

SEQ ID NO: 157302 - DNA, 20 bp, Artificial Sequence
  Synthetic oligonucleotide; AAG chr2 60455588 60455607 60455604 +
ccccattccccatttgattt

SEQ ID NO: 157303 - DNA, 20 bp, Artificial Sequence
  Synthetic oligonucleotide; CAG chr2 60455600 60455619 60455616 +
tttgatttaagaaatttgaa

SEQ ID NO: 157304 - DNA, 20 bp, Artificial Sequence
  Synthetic oligonucleotide; AAG chr2 60455605 60455624 60455621 +
tttaagaaatttgaacagac

SEQ ID NO: 157305 - DNA, 20 bp, Artificial Sequence
  Synthetic oligonucleotide; CAG chr2 60455612 60455631 60455628 +
aatttgaacagacaagtgta

SEQ ID NO: 157306 - DNA, 20 bp, Artificial Sequence
  Synthetic oligonucleotide; CAG chr2 60455638 60455657 60455654 +
ccaccattaattctgtctgt

SEQ ID NO: 157307 - DNA, 20 bp, Artificial Sequence
  Synthetic oligonucleotide; AGG chr2 60455639 60455658 60455655 +
caccattaattctgtctgtc

SEQ ID NO: 157308 - DNA, 20 bp, Artificial Sequence
  Synthetic oligonucleotide; AAG chr2 60455662 60455681 60455678 +
atgcaaaacctaattacgct

SEQ ID NO: 157309 - DNA, 20 bp, Artificial Sequence
  Synthetic oligonucleotide; GAG chr2 60455664 60455683 60455680 +
gcaaaacctaattacgctaa

SEQ ID NO: 157310 - DNA, 20 bp, Artificial Sequence
  Synthetic oligonucleotide; CAG chr2 60455667 60455686 60455683 +
aaacctaattacgctaagag

SEQ ID NO: 157311 - DNA, 20 bp, Artificial Sequence
  Synthetic oligonucleotide; GAG chr2 60455678 60455697 60455694 +
cgctaagagcagcatatact

SEQ ID NO: 157312 - DNA, 20 bp, Artificial Sequence
  Synthetic oligonucleotide; CAG chr2 60455714 60455733 60455730 +
tactgtatataaaacctaca

SEQ ID NO: 157313 - DNA, 20 bp, Artificial Sequence
  Synthetic oligonucleotide; TAG chr2 60455726 60455745 60455742 +
aacctacacagttgcactca

SEQ ID NO: 157314 - DNA, 20 bp, Artificial Sequence
  Synthetic oligonucleotide; AAG chr2 60455739 60455758 60455755 +
gcactcatagctcctaataa

SEQ ID NO: 157315 - DNA, 20 bp, Artificial Sequence
  Synthetic oligonucleotide; GAG chr2 60455741 60455760 60455757 +
actcatagctcctaataaaa

SEQ ID NO: 157316 - DNA, 20 bp, Artificial Sequence
  Synthetic oligonucleotide; TAG chr2 60455747 60455766 60455763 +
agctcctaataaaagagtaa

SEQ ID NO: 157317 - DNA, 20 bp, Artificial Sequence
  Synthetic oligonucleotide; AGG chr2 60455748 60455767 60455764 +
gctcctaataaaagagtaat

SEQ ID NO: 157318 - DNA, 20 bp, Artificial Sequence
  Synthetic oligonucleotide; GGG chr2 60455749 60455768 60455765 +
ctcctaataaaagagtaata

SEQ ID NO: 157319 - DNA, 20 bp, Artificial Sequence
  Synthetic oligonucleotide; CAG chr2 60455757 60455776 60455773 +
aaaagagtaatagggacaca

SEQ ID NO: 157320 - DNA, 20 bp, Artificial Sequence
  Synthetic oligonucleotide; GAG chr2 60455759 60455778 60455775 +
aagagtaatagggacacaca

SEQ ID NO: 157321 - DNA, 20 bp, Artificial Sequence
  Synthetic oligonucleotide; AGG chr2 60455760 60455779 60455776 +
agagtaatagggacacacag

SEQ ID NO: 157322 - DNA, 20 bp, Artificial Sequence
  Synthetic oligonucleotide; TGG chr2 60455768 60455787 60455784 +
agggacacacagaggtttta

SEQ ID NO: 157323 - DNA, 20 bp, Artificial Sequence
  Synthetic oligonucleotide; TAG chr2 60455779 60455798 60455795 +
gaggttttatggacatttaa

SEQ ID NO: 157324 - DNA, 20 bp, Artificial Sequence
  Synthetic oligonucleotide; AGG chr2 60455780 60455799 60455796 +
aggttttatggacatttaat

SEQ ID NO: 157325 - DNA, 20 bp, Artificial Sequence
  Synthetic oligonucleotide; GGG chr2 60455781 60455800 60455797 +
ggttttatggacatttaata

SEQ ID NO: 157326 - DNA, 20 bp, Artificial Sequence
  Synthetic oligonucleotide; TGG chr2 60455784 60455803 60455800 +
tttatggacatttaataggg

SEQ ID NO: 157327 - DNA, 20 bp, Artificial Sequence
  Synthetic oligonucleotide; GAG chr2 60455786 60455805 60455802 +
tatggacatttaatagggtg

SEQ ID NO: 157328 - DNA, 20 bp, Artificial Sequence
  Synthetic oligonucleotide; AAG chr2 60455792 60455811 60455808 +
catttaatagggtggagtcg

SEQ ID NO: 157329 - DNA, 20 bp, Artificial Sequence
  Synthetic oligonucleotide; AAG chr2 60455807 60455826 60455823 +
agtcgaagtcaccacatcta

SEQ ID NO: 157330 - DNA, 20 bp, Artificial Sequence
  Synthetic oligonucleotide; TGG chr2 60455811 60455830 60455827 +
gaagtcaccacatctaaagc

SEQ ID NO: 157331 - DNA, 20 bp, Artificial Sequence
  Synthetic oligonucleotide; TGG chr2 60455816 60455835 60455832 +
caccacatctaaagctggca

SEQ ID NO: 157332 - DNA, 20 bp, Artificial Sequence
  Synthetic oligonucleotide; TGG chr2 60455822 60455841 60455838 +
atctaaagctggcatggcac

SEQ ID NO: 157333 - DNA, 20 bp, Artificial Sequence
  Synthetic oligonucleotide; GGG chr2 60455823 60455842 60455839 +
tctaaagctggcatggcact

SEQ ID NO: 157334 - DNA, 20 bp, Artificial Sequence
  Synthetic oligonucleotide; GGG chr2 60455824 60455843 60455840 +
ctaaagctggcatggcactg

SEQ ID NO: 157335 - DNA, 20 bp, Artificial Sequence
  Synthetic oligonucleotide; GAG chr2 60455846 60455865 60455862 +
gaattatttctatctgtctt

SEQ ID NO: 157336 - DNA, 20 bp, Artificial Sequence
  Synthetic oligonucleotide; CAG chr2 60455849 60455868 60455865 +
ttatttctatctgtcttgag

SEQ ID NO: 157337 - DNA, 20 bp, Artificial Sequence
  Synthetic oligonucleotide; TGG chr2 60455857 60455876 60455873 +
atctgtcttgagcagcattt

SEQ ID NO: 157338 - DNA, 20 bp, Artificial Sequence
  Synthetic oligonucleotide; CAG chr2 60455863 60455882 60455879 +
cttgagcagcattttggatt

SEQ ID NO: 157339 - DNA, 20 bp, Artificial Sequence
  Synthetic oligonucleotide; TGG chr2 60455869 60455888 60455885 +
cagcattttggattcagttt

SEQ ID NO: 157340 - DNA, 20 bp, Artificial Sequence
  Synthetic oligonucleotide; GAG chr2 60455871 60455890 60455887 +
gcattttggattcagttttg

SEQ ID NO: 157341 - DNA, 20 bp, Artificial Sequence
  Synthetic oligonucleotide; CAG chr2 60455895 60455914 60455911 +
aacctaatccaaaacacata

SEQ ID NO: 157342 - DNA, 20 bp, Artificial Sequence
  Synthetic oligonucleotide; AAG chr2 60455910 60455929 60455926 +
acatacagtatatcttttct

SEQ ID NO: 157343 - DNA, 20 bp, Artificial Sequence
  Synthetic oligonucleotide; CAG chr2 60455915 60455934 60455931 +
cagtatatcttttctaagtt

SEQ ID NO: 157344 - DNA, 20 bp, Artificial Sequence
  Synthetic oligonucleotide; AAG chr2 60455929 60455948 60455945 +
taagttcagtgacaaacatc

SEQ ID NO: 157345 - DNA, 20 bp, Artificial Sequence
  Synthetic oligonucleotide; AAG chr2 60455937 60455956 60455953 +
gtgacaaacatcaagttctc

SEQ ID NO: 157346 - DNA, 20 bp, Artificial Sequence
  Synthetic oligonucleotide; AGG chr2 60455938 60455957 60455954 +
tgacaaacatcaagttctca

SEQ ID NO: 157347 - DNA, 20 bp, Artificial Sequence
  Synthetic oligonucleotide; CAG chr2 60455996 60456015 60456012 +
tattctccaacatcctttct

SEQ ID NO: 157348 - DNA, 20 bp, Artificial Sequence
  Synthetic oligonucleotide; TGG chr2 60455999 60456018 60456015 +
tctccaacatcctttctcag

SEQ ID NO: 157349 - DNA, 20 bp, Artificial Sequence
  Synthetic oligonucleotide; TAG chr2 60456009 60456028 60456025 +
cctttctcagtggattcctc

SEQ ID NO: 157350 - DNA, 20 bp, Artificial Sequence
  Synthetic oligonucleotide; TGG chr2 60456038 60456057 60456054 +
tctctccttcccacccaaac

SEQ ID NO: 157351 - DNA, 20 bp, Artificial Sequence
  Synthetic oligonucleotide; CAG chr2 60456046 60456065 60456062 +
tcccacccaaactggctttt

SEQ ID NO: 157352 - DNA, 20 bp, Artificial Sequence
  Synthetic oligonucleotide; TAG chr2 60456073 60456092 60456089 +
cattgactttctttatactt

SEQ ID NO: 157353 - DNA, 20 bp, Artificial Sequence
  Synthetic oligonucleotide; AAG chr2 60456077 60456096 60456093 +
gactttctttatactttaga

SEQ ID NO: 157354 - DNA, 20 bp, Artificial Sequence
  Synthetic oligonucleotide; CAG chr2 60456098 60456117 60456114 +
agataaaactattcttgcct

SEQ ID NO: 157355 - DNA, 20 bp, Artificial Sequence
  Synthetic oligonucleotide; AAG chr2 60456105 60456124 60456121 +
actattcttgcctcagataa

SEQ ID NO: 157356 - DNA, 20 bp, Artificial Sequence
  Synthetic oligonucleotide; AGG chr2 60456106 60456125 60456122 +
ctattcttgcctcagataaa

SEQ ID NO: 157357 - DNA, 20 bp, Artificial Sequence
  Synthetic oligonucleotide; AAG chr2 60456120 60456139 60456136 +
gataaaaggcatgacatgaa

SEQ ID NO: 157358 - DNA, 20 bp, Artificial Sequence
  Synthetic oligonucleotide; AGG chr2 60456121 60456140 60456137 +
ataaaaggcatgacatgaaa

SEQ ID NO: 157359 - DNA, 20 bp, Artificial Sequence
  Synthetic oligonucleotide; CAG chr2 60456132 60456151 60456148 +
gacatgaaaaggccacctca

SEQ ID NO: 157360 - DNA, 20 bp, Artificial Sequence
  Synthetic oligonucleotide; AGG chr2 60456133 60456152 60456149 +
acatgaaaaggccacctcac

SEQ ID NO: 157361 - DNA, 20 bp, Artificial Sequence
  Synthetic oligonucleotide; TAG chr2 60456139 60456158 60456155 +
aaaggccacctcacaggcac

SEQ ID NO: 157362 - DNA, 20 bp, Artificial Sequence
  Synthetic oligonucleotide; AGG chr2 60456140 60456159 60456156 +
aaggccacctcacaggcact

SEQ ID NO: 157363 - DNA, 20 bp, Artificial Sequence
  Synthetic oligonucleotide; GGG chr2 60456141 60456160 60456157 +
aggccacctcacaggcacta

SEQ ID NO: 157364 - DNA, 20 bp, Artificial Sequence
  Synthetic oligonucleotide; AAG chr2 60456147 60456166 60456163 +
cctcacaggcactagggcat

SEQ ID NO: 157365 - DNA, 20 bp, Artificial Sequence
  Synthetic oligonucleotide; GAG chr2 60456154 60456173 60456170 +
ggcactagggcataagaact

SEQ ID NO: 157366 - DNA, 20 bp, Artificial Sequence
  Synthetic oligonucleotide; AAG chr2 60456176 60456195 60456192 +
gcgacaaaaaatgctaccac

SEQ ID NO: 157367 - DNA, 20 bp, Artificial Sequence
  Synthetic oligonucleotide; AAG chr2 60456179 60456198 60456195 +
acaaaaaatgctaccacaag

SEQ ID NO: 157368 - DNA, 20 bp, Artificial Sequence
  Synthetic oligonucleotide; CAG chr2 60456186 60456205 60456202 +
atgctaccacaagaagacaa

SEQ ID NO: 157369 - DNA, 20 bp, Artificial Sequence
  Synthetic oligonucleotide; CGG chr2 60456191 60456210 60456207 +
accacaagaagacaacagaa

SEQ ID NO: 157370 - DNA, 20 bp, Artificial Sequence
  Synthetic oligonucleotide; TGG chr2 60456203 60456222 60456219 +
caacagaacggcttttgttt

SEQ ID NO: 157371 - DNA, 20 bp, Artificial Sequence
  Synthetic oligonucleotide; AAG chr2 60456220 60456239 60456236 +
ttttggttttttacaaaaat

SEQ ID NO: 157372 - DNA, 20 bp, Artificial Sequence
  Synthetic oligonucleotide; TGG chr2 60456250 60456269 60456266 +
tcgtattcattcatctacac

SEQ ID NO: 157373 - DNA, 20 bp, Artificial Sequence
  Synthetic oligonucleotide; GGG chr2 60456251 60456270 60456267 +
cgtattcattcatctacact

SEQ ID NO: 157374 - DNA, 20 bp, Artificial Sequence
  Synthetic oligonucleotide; CAG chr2 60456256 60456275 60456272 +
tcattcatctacactgggaa

SEQ ID NO: 157375 - DNA, 20 bp, Artificial Sequence
  Synthetic oligonucleotide; AGG chr2 60456257 60456276 60456273 +
cattcatctacactgggaac

SEQ ID NO: 157376 - DNA, 20 bp, Artificial Sequence
  Synthetic oligonucleotide; GGG chr2 60456258 60456277 60456274 +
attcatctacactgggaaca

SEQ ID NO: 157377 - DNA, 20 bp, Artificial Sequence
  Synthetic oligonucleotide; CAG chr2 60456272 60456291 60456288 +
ggaacagggacacgatatca

SEQ ID NO: 157378 - DNA, 20 bp, Artificial Sequence
  Synthetic oligonucleotide; GAG chr2 60456274 60456293 60456290 +
aacagggacacgatatcaca

SEQ ID NO: 157379 - DNA, 20 bp, Artificial Sequence
  Synthetic oligonucleotide; AGG chr2 60456275 60456294 60456291 +
acagggacacgatatcacag

SEQ ID NO: 157380 - DNA, 20 bp, Artificial Sequence
  Synthetic oligonucleotide; TAG chr2 60456286 60456305 60456302 +
atatcacagaggtatgtgtt

SEQ ID NO: 157381 - DNA, 20 bp, Artificial Sequence
  Synthetic oligonucleotide; AAG chr2 60456291 60456310 60456307 +
acagaggtatgtgtttagta

SEQ ID NO: 157382 - DNA, 20 bp, Artificial Sequence
  Synthetic oligonucleotide; TAG chr2 60456298 60456317 60456314 +
tatgtgtttagtaaagcaaa

SEQ ID NO: 157383 - DNA, 20 bp, Artificial Sequence
  Synthetic oligonucleotide; CAG chr2 60456314 60456333 60456330 +
caaatagatgctgcaacatg

SEQ ID NO: 157384 - DNA, 20 bp, Artificial Sequence
  Synthetic oligonucleotide; AAG chr2 60456326 60456345 60456342 +
gcaacatgcagtatttgtaa

SEQ ID NO: 157385 - DNA, 20 bp, Artificial Sequence
  Synthetic oligonucleotide; CAG chr2 60456337 60456356 60456353 +
tatttgtaaaagtgacaaca

SEQ ID NO: 157386 - DNA, 20 bp, Artificial Sequence
  Synthetic oligonucleotide; AAG chr2 60456346 60456365 60456362 +
aagtgacaacacagatttct

SEQ ID NO: 157387 - DNA, 20 bp, Artificial Sequence
  Synthetic oligonucleotide; AGG chr2 60456347 60456366 60456363 +
agtgacaacacagatttcta

SEQ ID NO: 157388 - DNA, 20 bp, Artificial Sequence
  Synthetic oligonucleotide; TAG chr2 60456360 60456379 60456376 +
atttctaaggatttttaaaa

SEQ ID NO: 157389 - DNA, 20 bp, Artificial Sequence
  Synthetic oligonucleotide; TGG chr2 60456370 60456389 60456386 +
atttttaaaatagacctaac

SEQ ID NO: 157390 - DNA, 20 bp, Artificial Sequence
  Synthetic oligonucleotide; TGG chr2 60456374 60456393 60456390 +
ttaaaatagacctaactggc

SEQ ID NO: 157391 - DNA, 20 bp, Artificial Sequence
  Synthetic oligonucleotide; CAG chr2 60456378 60456397 60456394 +
aatagacctaactggctggt

SEQ ID NO: 157392 - DNA, 20 bp, Artificial Sequence
  Synthetic oligonucleotide; AAG chr2 60456381 60456400 60456397 +
agacctaactggctggtcag

SEQ ID NO: 157393 - DNA, 20 bp, Artificial Sequence
  Synthetic oligonucleotide; AAG chr2 60456391 60456410 60456407 +
ggctggtcagaagataattg

SEQ ID NO: 157394 - DNA, 20 bp, Artificial Sequence
  Synthetic oligonucleotide; AGG chr2 60456392 60456411 60456408 +
gctggtcagaagataattga

SEQ ID NO: 157395 - DNA, 20 bp, Artificial Sequence
  Synthetic oligonucleotide; GGG chr2 60456393 60456412 60456409 +
ctggtcagaagataattgaa

SEQ ID NO: 157396 - DNA, 20 bp, Artificial Sequence
  Synthetic oligonucleotide; CAG chr2 60456422 60456441 60456438 +
cgcccttatttgctgtcatc

SEQ ID NO: 157397 - DNA, 20 bp, Artificial Sequence
  Synthetic oligonucleotide; AGG chr2 60456423 60456442 60456439 +
gcccttatttgctgtcatcc

SEQ ID NO: 157398 - DNA, 20 bp, Artificial Sequence
  Synthetic oligonucleotide; AAG chr2 60456426 60456445 60456442 +
cttatttgctgtcatccagg

SEQ ID NO: 157399 - DNA, 20 bp, Artificial Sequence
  Synthetic oligonucleotide; AAG chr2 60456447 60456466 60456463 +
agaccctatcaaaacaccta

SEQ ID NO: 157400 - DNA, 20 bp, Artificial Sequence
  Synthetic oligonucleotide; TAG chr2 60456457 60456476 60456473 +
aaaacacctaaagtaatctg

SEQ ID NO: 157401 - DNA, 20 bp, Artificial Sequence
  Synthetic oligonucleotide; TAG chr2 60456464 60456483 60456480 +
ctaaagtaatctgtagcatc

SEQ ID NO: 157402 - DNA, 20 bp, Artificial Sequence
  Synthetic oligonucleotide; AGG chr2 60456465 60456484 60456481 +
taaagtaatctgtagcatct

SEQ ID NO: 157403 - DNA, 20 bp, Artificial Sequence
  Synthetic oligonucleotide; GGG chr2 60456466 60456485 60456482 +
aaagtaatctgtagcatcta

SEQ ID NO: 157404 - DNA, 20 bp, Artificial Sequence
  Synthetic oligonucleotide; TGG chr2 60456473 60456492 60456489 +
tctgtagcatctagggttcc

SEQ ID NO: 157405 - DNA, 20 bp, Artificial Sequence
  Synthetic oligonucleotide; GGG chr2 60456474 60456493 60456490 +
ctgtagcatctagggttcct

SEQ ID NO: 157406 - DNA, 20 bp, Artificial Sequence
  Synthetic oligonucleotide; CAG chr2 60456481 60456500 60456497 +
atctagggttcctgggatct

SEQ ID NO: 157407 - DNA, 20 bp, Artificial Sequence
  Synthetic oligonucleotide; AAG chr2 60456490 60456509 60456506 +
tcctgggatctcagaaccac

SEQ ID NO: 157408 - DNA, 20 bp, Artificial Sequence
  Synthetic oligonucleotide; AGG chr2 60456491 60456510 60456507 +
cctgggatctcagaaccaca

SEQ ID NO: 157409 - DNA, 20 bp, Artificial Sequence
  Synthetic oligonucleotide; CAG chr2 60456511 60456530 60456527 +
aggcaaaccactatgcatct

SEQ ID NO: 157410 - DNA, 20 bp, Artificial Sequence
  Synthetic oligonucleotide; AGG chr2 60456512 60456531 60456528 +
ggcaaaccactatgcatctc

SEQ ID NO: 157411 - DNA, 20 bp, Artificial Sequence
  Synthetic oligonucleotide; CAG chr2 60456519 60456538 60456535 +
cactatgcatctcaggaaat

SEQ ID NO: 157412 - DNA, 20 bp, Artificial Sequence
  Synthetic oligonucleotide; TGG chr2 60456522 60456541 60456538 +
tatgcatctcaggaaatcag

SEQ ID NO: 157413 - DNA, 20 bp, Artificial Sequence
  Synthetic oligonucleotide; AAG chr2 60456534 60456553 60456550 +
gaaatcagtggctgattcca

SEQ ID NO: 157414 - DNA, 20 bp, Artificial Sequence
  Synthetic oligonucleotide; TGG chr2 60456550 60456569 60456566 +
tccaaagatttcactatgtc

SEQ ID NO: 157415 - DNA, 20 bp, Artificial Sequence
  Synthetic oligonucleotide; TAG chr2 60456562 60456581 60456578 +
actatgtctggctacacccc

SEQ ID NO: 157416 - DNA, 20 bp, Artificial Sequence
  Synthetic oligonucleotide; TGG chr2 60456565 60456584 60456581 +
atgtctggctacacccctag

SEQ ID NO: 157417 - DNA, 20 bp, Artificial Sequence
  Synthetic oligonucleotide; CAG chr2 60456659 60456678 60456675 +
aaacctgatgcctttgtttc

SEQ ID NO: 157418 - DNA, 20 bp, Artificial Sequence
  Synthetic oligonucleotide; TAG chr2 60456667 60456686 60456683 +
tgcctttgtttccagatttt

SEQ ID NO: 157419 - DNA, 20 bp, Artificial Sequence
  Synthetic oligonucleotide; AAG chr2 60456677 60456696 60456693 +
tccagatttttagatttcaa

SEQ ID NO: 157420 - DNA, 20 bp, Artificial Sequence
  Synthetic oligonucleotide; TGG chr2 60456680 60456699 60456696 +
agatttttagatttcaaaag

SEQ ID NO: 157421 - DNA, 20 bp, Artificial Sequence
  Synthetic oligonucleotide; GGG chr2 60456681 60456700 60456697 +
gatttttagatttcaaaagt

SEQ ID NO: 157422 - DNA, 20 bp, Artificial Sequence
  Synthetic oligonucleotide; GGG chr2 60456682 60456701 60456698 +
atttttagatttcaaaagtg

SEQ ID NO: 157423 - DNA, 20 bp, Artificial Sequence
  Synthetic oligonucleotide; GAG chr2 60456697 60456716 60456713 +
aagtggggttattttgttat

SEQ ID NO: 157424 - DNA, 20 bp, Artificial Sequence
  Synthetic oligonucleotide; AAG chr2 60456702 60456721 60456718 +
gggttattttgttatgagaa

SEQ ID NO: 157425 - DNA, 20 bp, Artificial Sequence
  Synthetic oligonucleotide; TGG chr2 60456714 60456733 60456730 +
tatgagaaaagactcttaca

SEQ ID NO: 157426 - DNA, 20 bp, Artificial Sequence
  Synthetic oligonucleotide; AAG chr2 60456723 60456742 60456739 +
agactcttacatggaaacca

SEQ ID NO: 157427 - DNA, 20 bp, Artificial Sequence
  Synthetic oligonucleotide; GAG chr2 60456725 60456744 60456741 +
actcttacatggaaaccaaa

SEQ ID NO: 157428 - DNA, 20 bp, Artificial Sequence
  Synthetic oligonucleotide; AAG chr2 60456767 60456786 60456783 +
tcttttttacattatgttct

SEQ ID NO: 157429 - DNA, 20 bp, Artificial Sequence
  Synthetic oligonucleotide; AAG chr2 60456773 60456792 60456789 +
ttacattatgttctaagata

SEQ ID NO: 157430 - DNA, 20 bp, Artificial Sequence
  Synthetic oligonucleotide; AAG chr2 60456777 60456796 60456793 +
attatgttctaagataaagc

SEQ ID NO: 157431 - DNA, 20 bp, Artificial Sequence
  Synthetic oligonucleotide; AGG chr2 60456778 60456797 60456794 +
ttatgttctaagataaagca

SEQ ID NO: 157432 - DNA, 20 bp, Artificial Sequence
  Synthetic oligonucleotide; TGG chr2 60456782 60456801 60456798 +
gttctaagataaagcaagga

SEQ ID NO: 157433 - DNA, 20 bp, Artificial Sequence
  Synthetic oligonucleotide; GGG chr2 60456783 60456802 60456799 +
ttctaagataaagcaaggat

SEQ ID NO: 157434 - DNA, 20 bp, Artificial Sequence
  Synthetic oligonucleotide; GAG chr2 60456785 60456804 60456801 +
ctaagataaagcaaggatgg

SEQ ID NO: 157435 - DNA, 20 bp, Artificial Sequence
  Synthetic oligonucleotide; TAG chr2 60456790 60456809 60456806 +
ataaagcaaggatgggagaa

SEQ ID NO: 157436 - DNA, 20 bp, Artificial Sequence
  Synthetic oligonucleotide; AAG chr2 60456795 60456814 60456811 +
gcaaggatgggagaatagaa

SEQ ID NO: 157437 - DNA, 20 bp, Artificial Sequence
  Synthetic oligonucleotide; TAG chr2 60456804 60456823 60456820 +
ggagaatagaaaagaacttt

SEQ ID NO: 157438 - DNA, 20 bp, Artificial Sequence
  Synthetic oligonucleotide; AAG chr2 60456812 60456831 60456828 +
gaaaagaacttttagacaac

SEQ ID NO: 157439 - DNA, 20 bp, Artificial Sequence
  Synthetic oligonucleotide; CAG chr2 60456817 60456836 60456833 +
gaacttttagacaacaagaa

SEQ ID NO: 157440 - DNA, 20 bp, Artificial Sequence
  Synthetic oligonucleotide; AAG chr2 60456831 60456850 60456847 +
caagaacagcaaaaaattta

SEQ ID NO: 157441 - DNA, 20 bp, Artificial Sequence
  Synthetic oligonucleotide; AGG chr2 60456832 60456851 60456848 +
aagaacagcaaaaaatttaa

SEQ ID NO: 157442 - DNA, 20 bp, Artificial Sequence
  Synthetic oligonucleotide; AAG chr2 60456841 60456860 60456857 +
aaaaaatttaaaggaaataa

SEQ ID NO: 157443 - DNA, 20 bp, Artificial Sequence
  Synthetic oligonucleotide; AAG chr2 60456847 60456866 60456863 +
tttaaaggaaataaaagttt

SEQ ID NO: 157444 - DNA, 20 bp, Artificial Sequence
  Synthetic oligonucleotide; CAG chr2 60456860 60456879 60456876 +
aaagtttaagatgctattac

SEQ ID NO: 157445 - DNA, 20 bp, Artificial Sequence
  Synthetic oligonucleotide; AAG chr2 60456864 60456883 60456880 +
tttaagatgctattaccagc

SEQ ID NO: 157446 - DNA, 20 bp, Artificial Sequence
  Synthetic oligonucleotide; TGG chr2 60456887 60456906 60456903 +
ttttttcacttatgtttgaa

SEQ ID NO: 157447 - DNA, 20 bp, Artificial Sequence
  Synthetic oligonucleotide; AAG chr2 60456899 60456918 60456915 +
tgtttgaatggatttctgct

SEQ ID NO: 157448 - DNA, 20 bp, Artificial Sequence
  Synthetic oligonucleotide; GAG chr2 60456901 60456920 60456917 +
tttgaatggatttctgctaa

SEQ ID NO: 157449 - DNA, 20 bp, Artificial Sequence
  Synthetic oligonucleotide; TGG chr2 60456905 60456924 60456921 +
aatggatttctgctaagaga

SEQ ID NO: 157450 - DNA, 20 bp, Artificial Sequence
  Synthetic oligonucleotide; GAG chr2 60456907 60456926 60456923 +
tggatttctgctaagagatg

SEQ ID NO: 157451 - DNA, 20 bp, Artificial Sequence
  Synthetic oligonucleotide; AAG chr2 60456911 60456930 60456927 +
tttctgctaagagatggagt

SEQ ID NO: 157452 - DNA, 20 bp, Artificial Sequence
  Synthetic oligonucleotide; CAG chr2 60456924 60456943 60456940 +
atggagtaagtttttaacat

SEQ ID NO: 157453 - DNA, 20 bp, Artificial Sequence
  Synthetic oligonucleotide; TGG chr2 60456966 60456985 60456982 +
tcttgaaaactattctaaac

SEQ ID NO: 157454 - DNA, 20 bp, Artificial Sequence
  Synthetic oligonucleotide; AAG chr2 60456970 60456989 60456986 +
gaaaactattctaaactgga

SEQ ID NO: 157455 - DNA, 20 bp, Artificial Sequence
  Synthetic oligonucleotide; CAG chr2 60456988 60457007 60457004 +
gaaagccttaaaactatgtc

SEQ ID NO: 157456 - DNA, 20 bp, Artificial Sequence
  Synthetic oligonucleotide; AGG chr2 60456989 60457008 60457005 +
aaagccttaaaactatgtcc

SEQ ID NO: 157457 - DNA, 20 bp, Artificial Sequence
  Synthetic oligonucleotide; GGG chr2 60456990 60457009 60457006 +
aagccttaaaactatgtcca

SEQ ID NO: 157458 - DNA, 20 bp, Artificial Sequence
  Synthetic oligonucleotide; GAG chr2 60456996 60457015 60457012 +
taaaactatgtccagggttt

SEQ ID NO: 157459 - DNA, 20 bp, Artificial Sequence
  Synthetic oligonucleotide; TAG chr2 60457016 60457035 60457032 +
gagatatgtctattttaata

SEQ ID NO: 157460 - DNA, 20 bp, Artificial Sequence
  Synthetic oligonucleotide; AAG chr2 60457020 60457039 60457036 +
tatgtctattttaatatagt

SEQ ID NO: 157461 - DNA, 20 bp, Artificial Sequence
  Synthetic oligonucleotide; TAG chr2 60457038 60457057 60457054 +
gtaagtactttatgttcctt

SEQ ID NO: 157462 - DNA, 20 bp, Artificial Sequence
  Synthetic oligonucleotide; AGG chr2 60457039 60457058 60457055 +
taagtactttatgttccttt

SEQ ID NO: 157463 - DNA, 20 bp, Artificial Sequence
  Synthetic oligonucleotide; GGG chr2 60457040 60457059 60457056 +
aagtactttatgttccttta

SEQ ID NO: 157464 - DNA, 20 bp, Artificial Sequence
  Synthetic oligonucleotide; CAG chr2 60457057 60457076 60457073 +
ttagggtataatacacgcat

SEQ ID NO: 157465 - DNA, 20 bp, Artificial Sequence
  Synthetic oligonucleotide; TAG chr2 60457068 60457087 60457084 +
tacacgcatcagaatgccca

SEQ ID NO: 157466 - DNA, 20 bp, Artificial Sequence
  Synthetic oligonucleotide; AAG chr2 60457085 60457104 60457101 +
ccatagaaataatcctgaaa

SEQ ID NO: 157467 - DNA, 20 bp, Artificial Sequence
  Synthetic oligonucleotide; TGG chr2 60457094 60457113 60457110 +
taatcctgaaaaagactgac

SEQ ID NO: 157468 - DNA, 20 bp, Artificial Sequence
  Synthetic oligonucleotide; AAG chr2 60457126 60457145 60457142 +
aaaacctgttattttcttgc

SEQ ID NO: 157469 - DNA, 20 bp, Artificial Sequence
  Synthetic oligonucleotide; CAG chr2 60457136 60457155 60457152 +
attttcttgcaagtaattta

SEQ ID NO: 157470 - DNA, 20 bp, Artificial Sequence
  Synthetic oligonucleotide; GAG chr2 60457138 60457157 60457154 +
tttcttgcaagtaatttaca

SEQ ID NO: 157471 - DNA, 20 bp, Artificial Sequence
  Synthetic oligonucleotide; GAG chr2 60457151 60457170 60457167 +
atttacagagtgtgtcaaat

SEQ ID NO: 157472 - DNA, 20 bp, Artificial Sequence
  Synthetic oligonucleotide; AGG chr2 60457152 60457171 60457168 +
tttacagagtgtgtcaaatg

SEQ ID NO: 157473 - DNA, 20 bp, Artificial Sequence
  Synthetic oligonucleotide; AAG chr2 60457159 60457178 60457175 +
agtgtgtcaaatgaggacac

SEQ ID NO: 157474 - DNA, 20 bp, Artificial Sequence
  Synthetic oligonucleotide; AAG chr2 60457162 60457181 60457178 +
gtgtcaaatgaggacacaag

SEQ ID NO: 157475 - DNA, 20 bp, Artificial Sequence
  Synthetic oligonucleotide; AAG chr2 60457204 60457223 60457220 +
ttttttttattttttcaata

SEQ ID NO: 157476 - DNA, 20 bp, Artificial Sequence
  Synthetic oligonucleotide; AGG chr2 60457205 60457224 60457221 +
tttttttattttttcaataa

SEQ ID NO: 157477 - DNA, 20 bp, Artificial Sequence
  Synthetic oligonucleotide; GGG chr2 60457206 60457225 60457222 +
ttttttattttttcaataaa

SEQ ID NO: 157478 - DNA, 20 bp, Artificial Sequence
  Synthetic oligonucleotide; TGG chr2 60457215 60457234 60457231 +
ttttcaataaagggacaaaa

SEQ ID NO: 157479 - DNA, 20 bp, Artificial Sequence
  Synthetic oligonucleotide; GGG chr2 60457216 60457235 60457232 +
tttcaataaagggacaaaat

SEQ ID NO: 157480 - DNA, 20 bp, Artificial Sequence
  Synthetic oligonucleotide; CAG chr2 60457227 60457246 60457243 +
ggacaaaatgggtgtatgaa

SEQ ID NO: 157481 - DNA, 20 bp, Artificial Sequence
  Synthetic oligonucleotide; AGG chr2 60457228 60457247 60457244 +
gacaaaatgggtgtatgaac

SEQ ID NO: 157482 - DNA, 20 bp, Artificial Sequence
  Synthetic oligonucleotide; CAG chr2 60457237 60457256 60457253 +
ggtgtatgaacaggttaatg

SEQ ID NO: 157483 - DNA, 20 bp, Artificial Sequence
  Synthetic oligonucleotide; CAG chr2 60457258 60457277 60457274 +
agacaactgccaaaaaaaca

SEQ ID NO: 157484 - DNA, 20 bp, Artificial Sequence
  Synthetic oligonucleotide; CAG chr2 60457262 60457281 60457278 +
aactgccaaaaaaacacaga

SEQ ID NO: 157485 - DNA, 20 bp, Artificial Sequence
  Synthetic oligonucleotide; TGG chr2 60457265 60457284 60457281 +
tgccaaaaaaacacagacag

SEQ ID NO: 157486 - DNA, 20 bp, Artificial Sequence
  Synthetic oligonucleotide; TAG chr2 60457277 60457296 60457293 +
acagacagtggtttttccaa

SEQ ID NO: 157487 - DNA, 20 bp, Artificial Sequence
  Synthetic oligonucleotide; AAG chr2 60457289 60457308 60457305 +
ttttccaatagaacttaaca

SEQ ID NO: 157488 - DNA, 20 bp, Artificial Sequence
  Synthetic oligonucleotide; CAG chr2 60457294 60457313 60457310 +
caatagaacttaacaaagac

SEQ ID NO: 157489 - DNA, 20 bp, Artificial Sequence
  Synthetic oligonucleotide; AAG chr2 60457313 60457332 60457329 +
ccagaaacaaatacaataaa

SEQ ID NO: 157490 - DNA, 20 bp, Artificial Sequence
  Synthetic oligonucleotide; CAG chr2 60457317 60457336 60457333 +
aaacaaatacaataaaaagc

SEQ ID NO: 157491 - DNA, 20 bp, Artificial Sequence
  Synthetic oligonucleotide; AGG chr2 60457318 60457337 60457334 +
aacaaatacaataaaaagcc

SEQ ID NO: 157492 - DNA, 20 bp, Artificial Sequence
  Synthetic oligonucleotide; TGG chr2 60457334 60457353 60457350 +
agccaggttgtaatgacctt

SEQ ID NO: 157493 - DNA, 20 bp, Artificial Sequence
  Synthetic oligonucleotide; AAG chr2 60457366 60457385 60457382 +
taaaaaaaaaaataaaaaca

SEQ ID NO: 157494 - DNA, 20 bp, Artificial Sequence
  Synthetic oligonucleotide; AAG chr2 60457377 60457396 60457393 +
ataaaaacaaagaaaaataa

SEQ ID NO: 157495 - DNA, 20 bp, Artificial Sequence
  Synthetic oligonucleotide; AAG chr2 60457388 60457407 60457404 +
gaaaaataaaagatcaaatt

SEQ ID NO: 157496 - DNA, 20 bp, Artificial Sequence
  Synthetic oligonucleotide; CAG chr2 60457406 60457425 60457422 +
ttaagtgcctctgttttgaa

SEQ ID NO: 157497 - DNA, 20 bp, Artificial Sequence
  Synthetic oligonucleotide; AGG chr2 60457407 60457426 60457423 +
taagtgcctctgttttgaac

SEQ ID NO: 157498 - DNA, 20 bp, Artificial Sequence
  Synthetic oligonucleotide; GGG chr2 60457408 60457427 60457424 +
aagtgcctctgttttgaaca

SEQ ID NO: 157499 - DNA, 20 bp, Artificial Sequence
  Synthetic oligonucleotide; AAG chr2 60457416 60457435 60457432 +
ctgttttgaacagggcacat

SEQ ID NO: 157500 - DNA, 20 bp, Artificial Sequence
  Synthetic oligonucleotide; TAG chr2 60457429 60457448 60457445 +
ggcacataagcaataataaa

SEQ ID NO: 157501 - DNA, 20 bp, Artificial Sequence
  Synthetic oligonucleotide; TAG chr2 60457441 60457460 60457457 +
ataataaatagtgactccca

SEQ ID NO: 157502 - DNA, 20 bp, Artificial Sequence
  Synthetic oligonucleotide; AAG chr2 60457447 60457466 60457463 +
aatagtgactcccatagtaa

SEQ ID NO: 157503 - DNA, 20 bp, Artificial Sequence
  Synthetic oligonucleotide; AAG chr2 60457460 60457479 60457476 +
atagtaaaagataaaatttc

SEQ ID NO: 157504 - DNA, 20 bp, Artificial Sequence
  Synthetic oligonucleotide; CAG chr2 60457473 60457492 60457489 +
aaatttcaagttacgacaaa

SEQ ID NO: 157505 - DNA, 20 bp, Artificial Sequence
  Synthetic oligonucleotide; CAG chr2 60457485 60457504 60457501 +
acgacaaacagctttcatta

SEQ ID NO: 157506 - DNA, 20 bp, Artificial Sequence
  Synthetic oligonucleotide; AGG chr2 60457486 60457505 60457502 +
cgacaaacagctttcattac

SEQ ID NO: 157507 - DNA, 20 bp, Artificial Sequence
  Synthetic oligonucleotide; TAG chr2 60457491 60457510 60457507 +
aacagctttcattacaggaa

SEQ ID NO: 157508 - DNA, 20 bp, Artificial Sequence
  Synthetic oligonucleotide; AAG chr2 60457496 60457515 60457512 +
ctttcattacaggaatagaa

SEQ ID NO: 157509 - DNA, 20 bp, Artificial Sequence
  Synthetic oligonucleotide; AGG chr2 60457497 60457516 60457513 +
tttcattacaggaatagaaa

SEQ ID NO: 157510 - DNA, 20 bp, Artificial Sequence
  Synthetic oligonucleotide; AAG chr2 60457536 60457555 60457552 +
ctgcattgccatttacaaaa

SEQ ID NO: 157511 - DNA, 20 bp, Artificial Sequence
  Synthetic oligonucleotide; AAG chr2 60457548 60457567 60457564 +
ttacaaaaaagtattgacta

SEQ ID NO: 157512 - DNA, 20 bp, Artificial Sequence
  Synthetic oligonucleotide; CGG chr2 60457551 60457570 60457567 +
caaaaaagtattgactaaag

SEQ ID NO: 157513 - DNA, 20 bp, Artificial Sequence
  Synthetic oligonucleotide; GGG chr2 60457552 60457571 60457568 +
aaaaaagtattgactaaagc

SEQ ID NO: 157514 - DNA, 20 bp, Artificial Sequence
  Synthetic oligonucleotide; AAG chr2 60457605 60457624 60457621 +
ttctttccaatctaaatata

SEQ ID NO: 157515 - DNA, 20 bp, Artificial Sequence
  Synthetic oligonucleotide; TAG chr2 60457615 60457634 60457631 +
tctaaatataaagcaccatt

SEQ ID NO: 157516 - DNA, 20 bp, Artificial Sequence
  Synthetic oligonucleotide; TGG chr2 60457622 60457641 60457638 +
ataaagcaccatttagtttt

SEQ ID NO: 157517 - DNA, 20 bp, Artificial Sequence
  Synthetic oligonucleotide; TGG chr2 60457648 60457667 60457664 +
tgaaaaaaactgcaaaacat

SEQ ID NO: 157518 - DNA, 20 bp, Artificial Sequence
  Synthetic oligonucleotide; AAG chr2 60457700 60457719 60457716 +
tctttcttttactgcatatg

SEQ ID NO: 157519 - DNA, 20 bp, Artificial Sequence
  Synthetic oligonucleotide; AGG chr2 60457701 60457720 60457717 +
ctttcttttactgcatatga

SEQ ID NO: 157520 - DNA, 20 bp, Artificial Sequence
  Synthetic oligonucleotide; AAG chr2 60457705 60457724 60457721 +
cttttactgcatatgaaggt

SEQ ID NO: 157521 - DNA, 20 bp, Artificial Sequence
  Synthetic oligonucleotide; TGG chr2 60457712 60457731 60457728 +
tgcatatgaaggtaagatgc

SEQ ID NO: 157522 - DNA, 20 bp, Artificial Sequence
  Synthetic oligonucleotide; TAG chr2 60457719 60457738 60457735 +
gaaggtaagatgctggaatg

SEQ ID NO: 157523 - DNA, 20 bp, Artificial Sequence
  Synthetic oligonucleotide; AGG chr2 60457720 60457739 60457736 +
aaggtaagatgctggaatgt

SEQ ID NO: 157524 - DNA, 20 bp, Artificial Sequence
  Synthetic oligonucleotide; GGG chr2 60457721 60457740 60457737 +
aggtaagatgctggaatgta

SEQ ID NO: 157525 - DNA, 20 bp, Artificial Sequence
  Synthetic oligonucleotide; TAG chr2 60457727 60457746 60457743 +
gatgctggaatgtagggtga

SEQ ID NO: 157526 - DNA, 20 bp, Artificial Sequence
  Synthetic oligonucleotide; AAG chr2 60457730 60457749 60457746 +
gctggaatgtagggtgatag

SEQ ID NO: 157527 - DNA, 20 bp, Artificial Sequence
  Synthetic oligonucleotide; AGG chr2 60457731 60457750 60457747 +
ctggaatgtagggtgataga

SEQ ID NO: 157528 - DNA, 20 bp, Artificial Sequence
  Synthetic oligonucleotide; AAG chr2 60457735 60457754 60457751 +
aatgtagggtgatagaagga

SEQ ID NO: 157529 - DNA, 20 bp, Artificial Sequence
  Synthetic oligonucleotide; AGG chr2 60457736 60457755 60457752 +
atgtagggtgatagaaggaa

SEQ ID NO: 157530 - DNA, 20 bp, Artificial Sequence
  Synthetic oligonucleotide; GGG chr2 60457737 60457756 60457753 +
tgtagggtgatagaaggaaa

SEQ ID NO: 157531 - DNA, 20 bp, Artificial Sequence
  Synthetic oligonucleotide; AAG chr2 60457745 60457764 60457761 +
gatagaaggaaagggacaaa

SEQ ID NO: 157532 - DNA, 20 bp, Artificial Sequence
  Synthetic oligonucleotide; TAG chr2 60457774 60457793 60457790 +
acataacaaaccaacgttat

SEQ ID NO: 157533 - DNA, 20 bp, Artificial Sequence
  Synthetic oligonucleotide; CAG chr2 60457781 60457800 60457797 +
aaaccaacgttattagcttg

SEQ ID NO: 157534 - DNA, 20 bp, Artificial Sequence
  Synthetic oligonucleotide; CAG chr2 60457793 60457812 60457809 +
ttagcttgcagtactgcata

SEQ ID NO: 157535 - DNA, 20 bp, Artificial Sequence
  Synthetic oligonucleotide; TGG chr2 60457798 60457817 60457814 +
ttgcagtactgcatacagta

SEQ ID NO: 157536 - DNA, 20 bp, Artificial Sequence
  Synthetic oligonucleotide; CAG chr2 60457801 60457820 60457817 +
cagtactgcatacagtatgg

SEQ ID NO: 157537 - DNA, 20 bp, Artificial Sequence
  Synthetic oligonucleotide; CAG chr2 60457804 60457823 60457820 +
tactgcatacagtatggcag

SEQ ID NO: 157538 - DNA, 20 bp, Artificial Sequence
  Synthetic oligonucleotide; AGG chr2 60457805 60457824 60457821 +
actgcatacagtatggcagc

SEQ ID NO: 157539 - DNA, 20 bp, Artificial Sequence
  Synthetic oligonucleotide; AAG chr2 60457811 60457830 60457827 +
tacagtatggcagcaggaaa

SEQ ID NO: 157540 - DNA, 20 bp, Artificial Sequence
  Synthetic oligonucleotide; AGG chr2 60457812 60457831 60457828 +
acagtatggcagcaggaaaa

SEQ ID NO: 157541 - DNA, 20 bp, Artificial Sequence
  Synthetic oligonucleotide; AAG chr2 60457822 60457841 60457838 +
agcaggaaaaaggaacaaaa

SEQ ID NO: 157542 - DNA, 20 bp, Artificial Sequence
  Synthetic oligonucleotide; AGG chr2 60457823 60457842 60457839 +
gcaggaaaaaggaacaaaaa

SEQ ID NO: 157543 - DNA, 20 bp, Artificial Sequence
  Synthetic oligonucleotide; CAG chr2 60457845 60457864 60457861 +
gatatgtacaacccctatga

SEQ ID NO: 157544 - DNA, 20 bp, Artificial Sequence
  Synthetic oligonucleotide; TAG chr2 60457865 60457884 60457881 +
cagccatccatgtgacattc

SEQ ID NO: 157545 - DNA, 20 bp, Artificial Sequence
  Synthetic oligonucleotide; CAG chr2 60457868 60457887 60457884 +
ccatccatgtgacattctag

SEQ ID NO: 157546 - DNA, 20 bp, Artificial Sequence
  Synthetic oligonucleotide; AGG chr2 60457869 60457888 60457885 +
catccatgtgacattctagc

SEQ ID NO: 157547 - DNA, 20 bp, Artificial Sequence
  Synthetic oligonucleotide; TGG chr2 60457893 60457912 60457909 +
tcccccaaaccgccattata

SEQ ID NO: 157548 - DNA, 20 bp, Artificial Sequence
  Synthetic oligonucleotide; AAG chr2 60457948 60457967 60457964 +
ctctcttttttttttttttg

SEQ ID NO: 157549 - DNA, 20 bp, Artificial Sequence
  Synthetic oligonucleotide; TGG chr2 60458002 60458021 60458018 +
caaattaaaaaaatatactg

SEQ ID NO: 157550 - DNA, 20 bp, Artificial Sequence
  Synthetic oligonucleotide; CAG chr2 60458005 60458024 60458021 +
attaaaaaaatatactgtgg

SEQ ID NO: 157551 - DNA, 20 bp, Artificial Sequence
  Synthetic oligonucleotide; AAG chr2 60458036 60458055 60458052 +
ttttttttccactaccaaaa

SEQ ID NO: 157552 - DNA, 20 bp, Artificial Sequence
  Synthetic oligonucleotide; AGG chr2 60458037 60458056 60458053 +
tttttttccactaccaaaaa

SEQ ID NO: 157553 - DNA, 20 bp, Artificial Sequence
  Synthetic oligonucleotide; AAG chr2 60458056 60458075 60458072 +
aaggtacattgatacctttt

SEQ ID NO: 157554 - DNA, 20 bp, Artificial Sequence
  Synthetic oligonucleotide; GAG chr2 60458058 60458077 60458074 +
ggtacattgataccttttaa

SEQ ID NO: 157555 - DNA, 20 bp, Artificial Sequence
  Synthetic oligonucleotide; AAG chr2 60458064 60458083 60458080 +
ttgataccttttaagagaac

SEQ ID NO: 157556 - DNA, 20 bp, Artificial Sequence
  Synthetic oligonucleotide; CAG chr2 60458070 60458089 60458086 +
ccttttaagagaacaagcaa

SEQ ID NO: 157557 - DNA, 20 bp, Artificial Sequence
  Synthetic oligonucleotide; AAG chr2 60458083 60458102 60458099 +
caagcaacagttaaaaatac

SEQ ID NO: 157558 - DNA, 20 bp, Artificial Sequence
  Synthetic oligonucleotide; TAG chr2 60458103 60458122 60458119 +
aagcttcaatataaatacta

SEQ ID NO: 157559 - DNA, 20 bp, Artificial Sequence
  Synthetic oligonucleotide; TAG chr2 60458116 60458135 60458132 +
aatactatagtgcctaacac

SEQ ID NO: 157560 - DNA, 20 bp, Artificial Sequence
  Synthetic oligonucleotide; TAG chr2 60458145 60458164 60458161 +
atttaattcaaataccattc

SEQ ID NO: 157561 - DNA, 20 bp, Artificial Sequence
  Synthetic oligonucleotide; CAG chr2 60458153 60458172 60458169 +
caaataccattctagaaata

SEQ ID NO: 157562 - DNA, 20 bp, Artificial Sequence
  Synthetic oligonucleotide; AAG chr2 60458160 60458179 60458176 +
cattctagaaatacagaaaa

SEQ ID NO: 157563 - DNA, 20 bp, Artificial Sequence
  Synthetic oligonucleotide; TAG chr2 60458178 60458197 60458194 +
aaaagaccataaatgtattt

SEQ ID NO: 157564 - DNA, 20 bp, Artificial Sequence
  Synthetic oligonucleotide; TAG chr2 60458183 60458202 60458199 +
accataaatgtattttagca

SEQ ID NO: 157565 - DNA, 20 bp, Artificial Sequence
  Synthetic oligonucleotide; AGG chr2 60458184 60458203 60458200 +
ccataaatgtattttagcat

SEQ ID NO: 157566 - DNA, 20 bp, Artificial Sequence
  Synthetic oligonucleotide; GAG chr2 60458196 60458215 60458212 +
tttagcataggaatcaacat

SEQ ID NO: 157567 - DNA, 20 bp, Artificial Sequence
  Synthetic oligonucleotide; AAG chr2 60458218 60458237 60458234 +
gtgtgcattttcctatattt

SEQ ID NO: 157568 - DNA, 20 bp, Artificial Sequence
  Synthetic oligonucleotide; AAG chr2 60458275 60458294 60458291 +
ttttttttttttacaacctg

SEQ ID NO: 157569 - DNA, 20 bp, Artificial Sequence
  Synthetic oligonucleotide; GAG chr2 60458277 60458296 60458293 +
ttttttttttacaacctgaa

SEQ ID NO: 157570 - DNA, 20 bp, Artificial Sequence
  Synthetic oligonucleotide; CGG chr2 60458280 60458299 60458296 +
tttttttacaacctgaagag

SEQ ID NO: 157571 - DNA, 20 bp, Artificial Sequence
  Synthetic oligonucleotide; AAG chr2 60458292 60458311 60458308 +
ctgaagagcggtgtgtatcc

SEQ ID NO: 157572 - DNA, 20 bp, Artificial Sequence
  Synthetic oligonucleotide; AGG chr2 60458293 60458312 60458309 +
tgaagagcggtgtgtatcca

SEQ ID NO: 157573 - DNA, 20 bp, Artificial Sequence
  Synthetic oligonucleotide; TAG chr2 60458298 60458317 60458314 +
agcggtgtgtatccaaggca

SEQ ID NO: 157574 - DNA, 20 bp, Artificial Sequence
  Synthetic oligonucleotide; TGG chr2 60458323 60458342 60458339 +
tttccactaccatttttaaa

SEQ ID NO: 157575 - DNA, 20 bp, Artificial Sequence
  Synthetic oligonucleotide; AAG chr2 60458331 60458350 60458347 +
accatttttaaatggataac

SEQ ID NO: 157576 - DNA, 20 bp, Artificial Sequence
  Synthetic oligonucleotide; AAG chr2 60458349 60458368 60458365 +
acaagtcttgtaacaccacc

SEQ ID NO: 157577 - DNA, 20 bp, Artificial Sequence
  Synthetic oligonucleotide; TGG chr2 60458356 60458375 60458372 +
ttgtaacaccaccaagacaa

SEQ ID NO: 157578 - DNA, 20 bp, Artificial Sequence
  Synthetic oligonucleotide; CAG chr2 60458371 60458390 60458387 +
gacaatggaaccctaaaatg

SEQ ID NO: 157579 - DNA, 20 bp, Artificial Sequence
  Synthetic oligonucleotide; AAG chr2 60458393 60458412 60458409 +
gttcccccctaaacataatg

SEQ ID NO: 157580 - DNA, 20 bp, Artificial Sequence
  Synthetic oligonucleotide; AAG chr2 60458437 60458456 60458453 +
cttaacatttatatttaaaa

SEQ ID NO: 157581 - DNA, 20 bp, Artificial Sequence
  Synthetic oligonucleotide; TAG chr2 60458466 60458485 60458482 +
acaaaaaaatccttgcactg

SEQ ID NO: 157582 - DNA, 20 bp, Artificial Sequence
  Synthetic oligonucleotide; AAG chr2 60458469 60458488 60458485 +
aaaaaatccttgcactgtag

SEQ ID NO: 157583 - DNA, 20 bp, Artificial Sequence
  Synthetic oligonucleotide; AAG chr2 60458475 60458494 60458491 +
tccttgcactgtagaagcga

SEQ ID NO: 157584 - DNA, 20 bp, Artificial Sequence
  Synthetic oligonucleotide; AAG chr2 60458498 60458517 60458514 +
caatcattcatttctatgtt

SEQ ID NO: 157585 - DNA, 20 bp, Artificial Sequence
  Synthetic oligonucleotide; CAG chr2 60458520 60458539 60458536 +
gtgtattctgtttccattca

SEQ ID NO: 157586 - DNA, 20 bp, Artificial Sequence
  Synthetic oligonucleotide; AAG chr2 60458542 60458561 60458558 +
gcgcttgcaatgttgcgtcc

SEQ ID NO: 157587 - DNA, 20 bp, Artificial Sequence
  Synthetic oligonucleotide; AAG chr2 60458546 60458565 60458562 +
ttgcaatgttgcgtccaagt

SEQ ID NO: 157588 - DNA, 20 bp, Artificial Sequence
  Synthetic oligonucleotide; AAG chr2 60458550 60458569 60458566 +
aatgttgcgtccaagtaagt

SEQ ID NO: 157589 - DNA, 20 bp, Artificial Sequence
  Synthetic oligonucleotide; TAG chr2 60458558 60458577 60458574 +
gtccaagtaagtaagctcaa

SEQ ID NO: 157590 - DNA, 20 bp, Artificial Sequence
  Synthetic oligonucleotide; AAG chr2 60458563 60458582 60458579 +
agtaagtaagctcaatagtc

SEQ ID NO: 157591 - DNA, 20 bp, Artificial Sequence
  Synthetic oligonucleotide; TGG chr2 60458570 60458589 60458586 +
aagctcaatagtcaagtaaa

SEQ ID NO: 157592 - DNA, 20 bp, Artificial Sequence
  Synthetic oligonucleotide; TGG chr2 60458574 60458593 60458590 +
tcaatagtcaagtaaatggc

SEQ ID NO: 157593 - DNA, 20 bp, Artificial Sequence
  Synthetic oligonucleotide; AAG chr2 60458579 60458598 60458595 +
agtcaagtaaatggctggca

SEQ ID NO: 157594 - DNA, 20 bp, Artificial Sequence
  Synthetic oligonucleotide; TAG chr2 60458594 60458613 60458610 +
tggcaaagtttttttttttt

SEQ ID NO: 157595 - DNA, 20 bp, Artificial Sequence
  Synthetic oligonucleotide; GAG chr2 60458619 60458638 60458635 +
tttaaaaaatgctcctcaat

SEQ ID NO: 157596 - DNA, 20 bp, Artificial Sequence
  Synthetic oligonucleotide; CAG chr2 60458641 60458660 60458657 +
gattgtgttcaatttttttt

SEQ ID NO: 157597 - DNA, 20 bp, Artificial Sequence
  Synthetic oligonucleotide; AAG chr2 60458665 60458684 60458681 +
attcttgcaacttttccctt

SEQ ID NO: 157598 - DNA, 20 bp, Artificial Sequence
  Synthetic oligonucleotide; TAG chr2 60458670 60458689 60458686 +
tgcaacttttcccttaagta

SEQ ID NO: 157599 - DNA, 20 bp, Artificial Sequence
  Synthetic oligonucleotide; TGG chr2 60458683 60458702 60458699 +
ttaagtatagacctgtaaac

SEQ ID NO: 157600 - DNA, 20 bp, Artificial Sequence
  Synthetic oligonucleotide; GGG chr2 60458684 60458703 60458700 +
taagtatagacctgtaaact

SEQ ID NO: 157601 - DNA, 20 bp, Artificial Sequence
  Synthetic oligonucleotide; CAG chr2 60458696 60458715 60458712 +
tgtaaactgggaaaattgta

SEQ ID NO: 157602 - DNA, 20 bp, Artificial Sequence
  Synthetic oligonucleotide; GAG chr2 60458719 60458738 60458735 +
tgcacttaattgtcctatct

SEQ ID NO: 157603 - DNA, 20 bp, Artificial Sequence
  Synthetic oligonucleotide; CAG chr2 60458722 60458741 60458738 +
acttaattgtcctatctgag

SEQ ID NO: 157604 - DNA, 20 bp, Artificial Sequence
  Synthetic oligonucleotide; AGG chr2 60458723 60458742 60458739 +
cttaattgtcctatctgagc

SEQ ID NO: 157605 - DNA, 20 bp, Artificial Sequence
  Synthetic oligonucleotide; TAG chr2 60458758 60458777 60458774 +
tcaacctctgtatctctgat

SEQ ID NO: 157606 - DNA, 20 bp, Artificial Sequence
  Synthetic oligonucleotide; GAG chr2 60458760 60458779 60458776 +
aacctctgtatctctgatta

SEQ ID NO: 157607 - DNA, 20 bp, Artificial Sequence
  Synthetic oligonucleotide; AAG chr2 60458765 60458784 60458781 +
ctgtatctctgattagagaa

SEQ ID NO: 157608 - DNA, 20 bp, Artificial Sequence
  Synthetic oligonucleotide; CAG chr2 60458771 60458790 60458787 +
ctctgattagagaaaagata

SEQ ID NO: 157609 - DNA, 20 bp, Artificial Sequence
  Synthetic oligonucleotide; CAG chr2 60458780 60458799 60458796 +
gagaaaagatacagatatca

SEQ ID NO: 157610 - DNA, 20 bp, Artificial Sequence
  Synthetic oligonucleotide; AGG chr2 60458781 60458800 60458797 +
agaaaagatacagatatcac

SEQ ID NO: 157611 - DNA, 20 bp, Artificial Sequence
  Synthetic oligonucleotide; CAG chr2 60458784 60458803 60458800 +
aaagatacagatatcacagg

SEQ ID NO: 157612 - DNA, 20 bp, Artificial Sequence
  Synthetic oligonucleotide; GAG chr2 60458786 60458805 60458802 +
agatacagatatcacaggca

SEQ ID NO: 157613 - DNA, 20 bp, Artificial Sequence
  Synthetic oligonucleotide; AAG chr2 60458791 60458810 60458807 +
cagatatcacaggcagagtc

SEQ ID NO: 157614 - DNA, 20 bp, Artificial Sequence
  Synthetic oligonucleotide; TGG chr2 60458812 60458831 60458828 +
agtgctatttgaacaccaac

SEQ ID NO: 157615 - DNA, 20 bp, Artificial Sequence
  Synthetic oligonucleotide; GGG chr2 60458813 60458832 60458829 +
gtgctatttgaacaccaact

SEQ ID NO: 157616 - DNA, 20 bp, Artificial Sequence
  Synthetic oligonucleotide; GGG chr2 60458814 60458833 60458830 +
tgctatttgaacaccaactg

SEQ ID NO: 157617 - DNA, 20 bp, Artificial Sequence
  Synthetic oligonucleotide; CAG chr2 60458817 60458836 60458833 +
tatttgaacaccaactgggg

SEQ ID NO: 157618 - DNA, 20 bp, Artificial Sequence
  Synthetic oligonucleotide; TAG chr2 60458824 60458843 60458840 +
acaccaactggggcagatgc

SEQ ID NO: 157619 - DNA, 20 bp, Artificial Sequence
  Synthetic oligonucleotide; AAG chr2 60458837 60458856 60458853 +
cagatgctagcttaataaaa

SEQ ID NO: 157620 - DNA, 20 bp, Artificial Sequence
  Synthetic oligonucleotide; TAG chr2 60458896 60458915 60458912 +
ctcttccatgttaacacaaa

SEQ ID NO: 157621 - DNA, 20 bp, Artificial Sequence
  Synthetic oligonucleotide; CAG chr2 60458903 60458922 60458919 +
atgttaacacaaatagcaca

SEQ ID NO: 157622 - DNA, 20 bp, Artificial Sequence
  Synthetic oligonucleotide; TGG chr2 60458910 60458929 60458926 +
cacaaatagcacacagtgta

SEQ ID NO: 157623 - DNA, 20 bp, Artificial Sequence
  Synthetic oligonucleotide; AAG chr2 60458915 60458934 60458931 +
atagcacacagtgtatggaa

SEQ ID NO: 157624 - DNA, 20 bp, Artificial Sequence
  Synthetic oligonucleotide; AAG chr2 60458923 60458942 60458939 +
cagtgtatggaaaagaaatg

SEQ ID NO: 157625 - DNA, 20 bp, Artificial Sequence
  Synthetic oligonucleotide; TAG chr2 60458935 60458954 60458951 +
aagaaatgaagtacaacttt

SEQ ID NO: 157626 - DNA, 20 bp, Artificial Sequence
  Synthetic oligonucleotide; AGG chr2 60458936 60458955 60458952 +
agaaatgaagtacaactttt

SEQ ID NO: 157627 - DNA, 20 bp, Artificial Sequence
  Synthetic oligonucleotide; GGG chr2 60458937 60458956 60458953 +
gaaatgaagtacaactttta

SEQ ID NO: 157628 - DNA, 20 bp, Artificial Sequence
  Synthetic oligonucleotide; GAG chr2 60458939 60458958 60458955 +
aatgaagtacaacttttagg

SEQ ID NO: 157629 - DNA, 20 bp, Artificial Sequence
  Synthetic oligonucleotide; CAG chr2 60458944 60458963 60458960 +
agtacaacttttagggagca

SEQ ID NO: 157630 - DNA, 20 bp, Artificial Sequence
  Synthetic oligonucleotide; AAG chr2 60458990 60459009 60459006 +
attctttctcttcttttttt

SEQ ID NO: 157631 - DNA, 20 bp, Artificial Sequence
  Synthetic oligonucleotide; AAG chr2 60459011 60459030 60459027 +
agaatgtcacatttaaatgc

SEQ ID NO: 157632 - DNA, 20 bp, Artificial Sequence
  Synthetic oligonucleotide; AAG chr2 60459018 60459037 60459034 +
cacatttaaatgcaagtctt

SEQ ID NO: 157633 - DNA, 20 bp, Artificial Sequence
  Synthetic oligonucleotide; TAG chr2 60459027 60459046 60459043 +
atgcaagtcttaagaattca

SEQ ID NO: 157634 - DNA, 20 bp, Artificial Sequence
  Synthetic oligonucleotide; TAG chr2 60459052 60459071 60459068 +
aatcatcattgtatcaatat

SEQ ID NO: 157635 - DNA, 20 bp, Artificial Sequence
  Synthetic oligonucleotide; TAG chr2 60459070 60459089 60459086 +
attagcttatatacctgttc

SEQ ID NO: 157636 - DNA, 20 bp, Artificial Sequence
  Synthetic oligonucleotide; TGG chr2 60459080 60459099 60459096 +
atacctgttctagttttaaa

SEQ ID NO: 157637 - DNA, 20 bp, Artificial Sequence
  Synthetic oligonucleotide; TAG chr2 60459087 60459106 60459103 +
ttctagttttaaatggcaaa

SEQ ID NO: 157638 - DNA, 20 bp, Artificial Sequence
  Synthetic oligonucleotide; CAG chr2 60459152 60459171 60459168 +
cctctgtcaaaccttattgt

SEQ ID NO: 157639 - DNA, 20 bp, Artificial Sequence
  Synthetic oligonucleotide; TGG chr2 60459171 60459190 60459187 +
tcagcctcttcctttcaata

SEQ ID NO: 157640 - DNA, 20 bp, Artificial Sequence
  Synthetic oligonucleotide; AAG chr2 60459179 60459198 60459195 +
ttcctttcaatatggtatac

SEQ ID NO: 157641 - DNA, 20 bp, Artificial Sequence
  Synthetic oligonucleotide; AGG chr2 60459180 60459199 60459196 +
tcctttcaatatggtataca

SEQ ID NO: 157642 - DNA, 20 bp, Artificial Sequence
  Synthetic oligonucleotide; AAG chr2 60459188 60459207 60459204 +
atatggtatacaaggtctta

SEQ ID NO: 157643 - DNA, 20 bp, Artificial Sequence
  Synthetic oligonucleotide; AAG chr2 60459220 60459239 60459236 +
tgattgtccacttgacaacc

SEQ ID NO: 157644 - DNA, 20 bp, Artificial Sequence
  Synthetic oligonucleotide; TAG chr2 60459223 60459242 60459239 +
ttgtccacttgacaaccaag

SEQ ID NO: 157645 - DNA, 20 bp, Artificial Sequence
  Synthetic oligonucleotide; TGG chr2 60459229 60459248 60459245 +
acttgacaaccaagtagatc

SEQ ID NO: 157646 - DNA, 20 bp, Artificial Sequence
  Synthetic oligonucleotide; TGG chr2 60459244 60459263 60459260 +
agatctggatctatttcttt

SEQ ID NO: 157647 - DNA, 20 bp, Artificial Sequence
  Synthetic oligonucleotide; CAG chr2 60459250 60459269 60459266 +
ggatctatttcttttggtgc

SEQ ID NO: 157648 - DNA, 20 bp, Artificial Sequence
  Synthetic oligonucleotide; AAG chr2 60459263 60459282 60459279 +
ttggtgccagtatttttaaa

SEQ ID NO: 157649 - DNA, 20 bp, Artificial Sequence
  Synthetic oligonucleotide; AAG chr2 60459275 60459294 60459291 +
tttttaaaaagacattatta

SEQ ID NO: 157650 - DNA, 20 bp, Artificial Sequence
  Synthetic oligonucleotide; TAG chr2 60459307 60459326 60459323 +
tcataaaatgaactccttac

SEQ ID NO: 157651 - DNA, 20 bp, Artificial Sequence
  Synthetic oligonucleotide; CAG chr2 60459327 60459346 60459343 +
tagtgtatttaattgcgttc

SEQ ID NO: 157652 - DNA, 20 bp, Artificial Sequence
  Synthetic oligonucleotide; AGG chr2 60459328 60459347 60459344 +
agtgtatttaattgcgttcc

SEQ ID NO: 157653 - DNA, 20 bp, Artificial Sequence
  Synthetic oligonucleotide; GGG chr2 60459329 60459348 60459345 +
gtgtatttaattgcgttcca

SEQ ID NO: 157654 - DNA, 20 bp, Artificial Sequence
  Synthetic oligonucleotide; TGG chr2 60459384 60459403 60459400 +
gtttaaaaaaaataaaactt

SEQ ID NO: 157655 - DNA, 20 bp, Artificial Sequence
  Synthetic oligonucleotide; GGG chr2 60459385 60459404 60459401 +
tttaaaaaaaataaaacttt

SEQ ID NO: 157656 - DNA, 20 bp, Artificial Sequence
  Synthetic oligonucleotide; CAG chr2 60459393 60459412 60459409 +
aaataaaactttgggcaaaa

SEQ ID NO: 157657 - DNA, 20 bp, Artificial Sequence
  Synthetic oligonucleotide; AAG chr2 60459408 60459427 60459424 +
caaaacagcccatttctttt

SEQ ID NO: 157658 - DNA, 20 bp, Artificial Sequence
  Synthetic oligonucleotide; CAG chr2 60459418 60459437 60459434 +
catttcttttaagctctcac

SEQ ID NO: 157659 - DNA, 20 bp, Artificial Sequence
  Synthetic oligonucleotide; AGG chr2 60459419 60459438 60459435 +
atttcttttaagctctcacc

SEQ ID NO: 157660 - DNA, 20 bp, Artificial Sequence
  Synthetic oligonucleotide; GAG chr2 60459421 60459440 60459437 +
ttcttttaagctctcaccag

SEQ ID NO: 157661 - DNA, 20 bp, Artificial Sequence
  Synthetic oligonucleotide; AAG chr2 60459426 60459445 60459442 +
ttaagctctcaccaggagca

SEQ ID NO: 157662 - DNA, 20 bp, Artificial Sequence
  Synthetic oligonucleotide; TAG chr2 60459429 60459448 60459445 +
agctctcaccaggagcaaag

SEQ ID NO: 157663 - DNA, 20 bp, Artificial Sequence
  Synthetic oligonucleotide; TGG chr2 60459441 60459460 60459457 +
gagcaaagtagcttttatac

SEQ ID NO: 157664 - DNA, 20 bp, Artificial Sequence
  Synthetic oligonucleotide; CAG chr2 60459450 60459469 60459466 +
agcttttatactggtataat

SEQ ID NO: 157665 - DNA, 20 bp, Artificial Sequence
  Synthetic oligonucleotide; AAG chr2 60459475 60459494 60459491 +
ttgtttataaaattaaacta

SEQ ID NO: 157666 - DNA, 20 bp, Artificial Sequence
  Synthetic oligonucleotide; AGG chr2 60459476 60459495 60459492 +
tgtttataaaattaaactaa

SEQ ID NO: 157667 - DNA, 20 bp, Artificial Sequence
  Synthetic oligonucleotide; TAG chr2 60459495 60459514 60459511 +
aaggaaaaatgatgattaac

SEQ ID NO: 157668 - DNA, 20 bp, Artificial Sequence
  Synthetic oligonucleotide; AGG chr2 60459496 60459515 60459512 +
aggaaaaatgatgattaact

SEQ ID NO: 157669 - DNA, 20 bp, Artificial Sequence
  Synthetic oligonucleotide; TGG chr2 60459505 60459524 60459521 +
gatgattaactaggacataa

SEQ ID NO: 157670 - DNA, 20 bp, Artificial Sequence
  Synthetic oligonucleotide; GGG chr2 60459506 60459525 60459522 +
atgattaactaggacataat

SEQ ID NO: 157671 - DNA, 20 bp, Artificial Sequence
  Synthetic oligonucleotide; TAG chr2 60459518 60459537 60459534 +
gacataatgggtcatctttt

SEQ ID NO: 157672 - DNA, 20 bp, Artificial Sequence
  Synthetic oligonucleotide; AGG chr2 60459519 60459538 60459535 +
acataatgggtcatcttttt

SEQ ID NO: 157673 - DNA, 20 bp, Artificial Sequence
  Synthetic oligonucleotide; TAG chr2 60459522 60459541 60459538 +
taatgggtcatctttttagg

SEQ ID NO: 157674 - DNA, 20 bp, Artificial Sequence
  Synthetic oligonucleotide; GAG chr2 60459535 60459554 60459551 +
ttttaggtagccattgttgt

SEQ ID NO: 157675 - DNA, 20 bp, Artificial Sequence
  Synthetic oligonucleotide; TAG chr2 60459548 60459567 60459564 +
ttgttgtgagaaatacaata

SEQ ID NO: 157676 - DNA, 20 bp, Artificial Sequence
  Synthetic oligonucleotide; TAG chr2 60459561 60459580 60459577 +
tacaatatagaattatatgc

SEQ ID NO: 157677 - DNA, 20 bp, Artificial Sequence
  Synthetic oligonucleotide; AAG chr2 60459569 60459588 60459585 +
agaattatatgctagttcct

SEQ ID NO: 157678 - DNA, 20 bp, Artificial Sequence
  Synthetic oligonucleotide; AGG chr2 60459570 60459589 60459586 +
gaattatatgctagttccta

SEQ ID NO: 157679 - DNA, 20 bp, Artificial Sequence
  Synthetic oligonucleotide; AAG chr2 60459599 60459618 60459615 +
acctcacccaatgctgaatt

SEQ ID NO: 157680 - DNA, 20 bp, Artificial Sequence
  Synthetic oligonucleotide; AAG chr2 60459606 60459625 60459622 +
ccaatgctgaattaagctac

SEQ ID NO: 157681 - DNA, 20 bp, Artificial Sequence
  Synthetic oligonucleotide; AAG chr2 60459617 60459636 60459633 +
ttaagctacaagtttataac

SEQ ID NO: 157682 - DNA, 20 bp, Artificial Sequence
  Synthetic oligonucleotide; TAG chr2 60459620 60459639 60459636 +
agctacaagtttataacaag

SEQ ID NO: 157683 - DNA, 20 bp, Artificial Sequence
  Synthetic oligonucleotide; AAG chr2 60459624 60459643 60459640 +
acaagtttataacaagtaga

SEQ ID NO: 157684 - DNA, 20 bp, Artificial Sequence
  Synthetic oligonucleotide; TGG chr2 60459638 60459657 60459654 +
agtagaaagaaccatcgatg

SEQ ID NO: 157685 - DNA, 20 bp, Artificial Sequence
  Synthetic oligonucleotide; TAG chr2 60459647 60459666 60459663 +
aaccatcgatgtggttttaa

SEQ ID NO: 157686 - DNA, 20 bp, Artificial Sequence
  Synthetic oligonucleotide; AAG chr2 60459654 60459673 60459670 +
gatgtggttttaatagatcc

SEQ ID NO: 157687 - DNA, 20 bp, Artificial Sequence
  Synthetic oligonucleotide; AGG chr2 60459655 60459674 60459671 +
atgtggttttaatagatcca

SEQ ID NO: 157688 - DNA, 20 bp, Artificial Sequence
  Synthetic oligonucleotide; TAG chr2 60459682 60459701 60459698 +
catattttaaaaccaaatga

SEQ ID NO: 157689 - DNA, 20 bp, Artificial Sequence
  Synthetic oligonucleotide; AAG chr2 60459723 60459742 60459739 +
ttctgttaatttgtcaattc

SEQ ID NO: 157690 - DNA, 20 bp, Artificial Sequence
  Synthetic oligonucleotide; AGG chr2 60459724 60459743 60459740 +
tctgttaatttgtcaattca

SEQ ID NO: 157691 - DNA, 20 bp, Artificial Sequence
  Synthetic oligonucleotide; TAG chr2 60459765 60459784 60459781 +
aattgatacatttaaccctt

SEQ ID NO: 157692 - DNA, 20 bp, Artificial Sequence
  Synthetic oligonucleotide; GAG chr2 60459767 60459786 60459783 +
ttgatacatttaacccttta

SEQ ID NO: 157693 - DNA, 20 bp, Artificial Sequence
  Synthetic oligonucleotide; CAG chr2 60459771 60459790 60459787 +
tacatttaaccctttagaga

SEQ ID NO: 157694 - DNA, 20 bp, Artificial Sequence
  Synthetic oligonucleotide; TAG chr2 60459779 60459798 60459795 +
accctttagagacagacatt

SEQ ID NO: 157695 - DNA, 20 bp, Artificial Sequence
  Synthetic oligonucleotide; TAG chr2 60459786 60459805 60459802 +
agagacagacatttagctca

SEQ ID NO: 157696 - DNA, 20 bp, Artificial Sequence
  Synthetic oligonucleotide; GAG chr2 60459788 60459807 60459804 +
agacagacatttagctcata

SEQ ID NO: 157697 - DNA, 20 bp, Artificial Sequence
  Synthetic oligonucleotide; CAG chr2 60459800 60459819 60459816 +
agctcatagagatttttttt

SEQ ID NO: 157698 - DNA, 20 bp, Artificial Sequence
  Synthetic oligonucleotide; TAG chr2 60459821 60459840 60459837 +
agtgctatctattctgtcta

SEQ ID NO: 157699 - DNA, 20 bp, Artificial Sequence
  Synthetic oligonucleotide; GAG chr2 60459823 60459842 60459839 +
tgctatctattctgtctata

SEQ ID NO: 157700 - DNA, 20 bp, Artificial Sequence
  Synthetic oligonucleotide; AGG chr2 60459824 60459843 60459840 +
gctatctattctgtctatag

SEQ ID NO: 157701 - DNA, 20 bp, Artificial Sequence
  Synthetic oligonucleotide; GGG chr2 60459825 60459844 60459841 +
ctatctattctgtctataga

SEQ ID NO: 157702 - DNA, 20 bp, Artificial Sequence
  Synthetic oligonucleotide; AAG chr2 60459836 60459855 60459852 +
gtctatagagggttaatcca

SEQ ID NO: 157703 - DNA, 20 bp, Artificial Sequence
  Synthetic oligonucleotide; CAG chr2 60459890 60459909 60459906 +
actgtacatgatatgtatta

SEQ ID NO: 157704 - DNA, 20 bp, Artificial Sequence
  Synthetic oligonucleotide; CAG chr2 60459901 60459920 60459917 +
tatgtattacagaatgtatg

SEQ ID NO: 157705 - DNA, 20 bp, Artificial Sequence
  Synthetic oligonucleotide; TGG chr2 60459906 60459925 60459922 +
attacagaatgtatgcagca

SEQ ID NO: 157706 - DNA, 20 bp, Artificial Sequence
  Synthetic oligonucleotide; CAG chr2 60459938 60459957 60459954 +
ctctctctctctttttctct

SEQ ID NO: 157707 - DNA, 20 bp, Artificial Sequence
  Synthetic oligonucleotide; CGG chr2 60459943 60459962 60459959 +
tctctctttttctctcagaa

SEQ ID NO: 157708 - DNA, 20 bp, Artificial Sequence
  Synthetic oligonucleotide; TGG chr2 60459949 60459968 60459965 +
tttttctctcagaacggaac

SEQ ID NO: 157709 - DNA, 20 bp, Artificial Sequence
  Synthetic oligonucleotide; CAG chr2 60459955 60459974 60459971 +
tctcagaacggaactggaaa

SEQ ID NO: 157710 - DNA, 20 bp, Artificial Sequence
  Synthetic oligonucleotide; CAG chr2 60459971 60459990 60459987 +
gaaacagcaacatgtttgct

SEQ ID NO: 157711 - DNA, 20 bp, Artificial Sequence
  Synthetic oligonucleotide; TAG chr2 60459982 60460001 60459998 +
atgtttgctcagcaacgaat

SEQ ID NO: 157712 - DNA, 20 bp, Artificial Sequence
  Synthetic oligonucleotide; AGG chr2 60459983 60460002 60459999 +
tgtttgctcagcaacgaatt

SEQ ID NO: 157713 - DNA, 20 bp, Artificial Sequence
  Synthetic oligonucleotide; GGG chr2 60459984 60460003 60460000 +
gtttgctcagcaacgaatta

SEQ ID NO: 157714 - DNA, 20 bp, Artificial Sequence
  Synthetic oligonucleotide; TAG chr2 60459998 60460017 60460014 +
gaattagggacaatttaaaa

SEQ ID NO: 157715 - DNA, 20 bp, Artificial Sequence
  Synthetic oligonucleotide; AAG chr2 60460026 60460045 60460042 +
acataccatacatgctgtct

SEQ ID NO: 157716 - DNA, 20 bp, Artificial Sequence
  Synthetic oligonucleotide; AAG chr2 60460067 60460086 60460083 +
caacatgtaaattattgcac

SEQ ID NO: 157717 - DNA, 20 bp, Artificial Sequence
  Synthetic oligonucleotide; GAG chr2 60460069 60460088 60460085 +
acatgtaaattattgcacaa

SEQ ID NO: 157718 - DNA, 20 bp, Artificial Sequence
  Synthetic oligonucleotide; AAG chr2 60460073 60460092 60460089 +
gtaaattattgcacaagaga

SEQ ID NO: 157719 - DNA, 20 bp, Artificial Sequence
  Synthetic oligonucleotide; AGG chr2 60460074 60460093 60460090 +
taaattattgcacaagagaa

SEQ ID NO: 157720 - DNA, 20 bp, Artificial Sequence
  Synthetic oligonucleotide; AAG chr2 60460081 60460100 60460097 +
ttgcacaagagaaaggctca

SEQ ID NO: 157721 - DNA, 20 bp, Artificial Sequence
  Synthetic oligonucleotide; TAG chr2 60460100 60460119 60460116 +
aaagtttgcgtaaaatgcaa

SEQ ID NO: 157722 - DNA, 20 bp, Artificial Sequence
  Synthetic oligonucleotide; CAG chr2 60460115 60460134 60460131 +
tgcaatagtattgccccata

SEQ ID NO: 157723 - DNA, 20 bp, Artificial Sequence
  Synthetic oligonucleotide; CGG chr2 60460132 60460151 60460148 +
atacagatcatgcattcaaa

SEQ ID NO: 157724 - DNA, 20 bp, Artificial Sequence
  Synthetic oligonucleotide; GAG chr2 60460136 60460155 60460152 +
agatcatgcattcaaacggt

SEQ ID NO: 157725 - DNA, 20 bp, Artificial Sequence
  Synthetic oligonucleotide; AAG chr2 60460145 60460164 60460161 +
attcaaacggtgagaacata

SEQ ID NO: 157726 - DNA, 20 bp, Artificial Sequence
  Synthetic oligonucleotide; AGG chr2 60460146 60460165 60460162 +
ttcaaacggtgagaacataa

SEQ ID NO: 157727 - DNA, 20 bp, Artificial Sequence
  Synthetic oligonucleotide; AAG chr2 60460161 60460180 60460177 +
cataaaggaaaaaaaaaaaa

SEQ ID NO: 157728 - DNA, 20 bp, Artificial Sequence
  Synthetic oligonucleotide; AGG chr2 60460162 60460181 60460178 +
ataaaggaaaaaaaaaaaaa

SEQ ID NO: 157729 - DNA, 20 bp, Artificial Sequence
  Synthetic oligonucleotide; AAG chr2 60460168 60460187 60460184 +
gaaaaaaaaaaaaaaggaaa

SEQ ID NO: 157730 - DNA, 20 bp, Artificial Sequence
  Synthetic oligonucleotide; AAG chr2 60460175 60460194 60460191 +
aaaaaaaaggaaaaagaaaa

SEQ ID NO: 157731 - DNA, 20 bp, Artificial Sequence
  Synthetic oligonucleotide; AAG chr2 60460181 60460200 60460197 +
aaggaaaaagaaaaaagaaa

SEQ ID NO: 157732 - DNA, 20 bp, Artificial Sequence
  Synthetic oligonucleotide; AAG chr2 60460187 60460206 60460203 +
aaagaaaaaagaaaaagaaa

SEQ ID NO: 157733 - DNA, 20 bp, Artificial Sequence
  Synthetic oligonucleotide; CAG chr2 60460198 60460217 60460214 +
aaaaagaaaaagaaaaaaaa

SEQ ID NO: 157734 - DNA, 20 bp, Artificial Sequence
  Synthetic oligonucleotide; AGG chr2 60460199 60460218 60460215 +
aaaagaaaaagaaaaaaaac

SEQ ID NO: 157735 - DNA, 20 bp, Artificial Sequence
  Synthetic oligonucleotide; TGG chr2 60460207 60460226 60460223 +
aagaaaaaaaacaggtgtgc

SEQ ID NO: 157736 - DNA, 20 bp, Artificial Sequence
  Synthetic oligonucleotide; AAG chr2 60460214 60460233 60460230 +
aaaacaggtgtgctggtgac

SEQ ID NO: 157737 - DNA, 20 bp, Artificial Sequence
  Synthetic oligonucleotide; TAG chr2 60460231 60460250 60460247 +
gacaagcactctcatattct

SEQ ID NO: 157738 - DNA, 20 bp, Artificial Sequence
  Synthetic oligonucleotide; TGG chr2 60460275 60460294 60460291 +
gtttgtttgtttaaatcaca

SEQ ID NO: 157739 - DNA, 20 bp, Artificial Sequence
  Synthetic oligonucleotide; GGG chr2 60460276 60460295 60460292 +
tttgtttgtttaaatcacat

SEQ ID NO: 157740 - DNA, 20 bp, Artificial Sequence
  Synthetic oligonucleotide; TAG chr2 60460281 60460300 60460297 +
ttgtttaaatcacatgggac

SEQ ID NO: 157741 - DNA, 20 bp, Artificial Sequence
  Synthetic oligonucleotide; CAG chr2 60460296 60460315 60460312 +
gggactagaaaaaaatccta

SEQ ID NO: 157742 - DNA, 20 bp, Artificial Sequence
  Synthetic oligonucleotide; AGG chr2 60460297 60460316 60460313 +
ggactagaaaaaaatcctac

SEQ ID NO: 157743 - DNA, 20 bp, Artificial Sequence
  Synthetic oligonucleotide; GGG chr2 60460298 60460317 60460314 +
gactagaaaaaaatcctaca

SEQ ID NO: 157744 - DNA, 20 bp, Artificial Sequence
  Synthetic oligonucleotide; GAG chr2 60460300 60460319 60460316 +
ctagaaaaaaatcctacagg

SEQ ID NO: 157745 - DNA, 20 bp, Artificial Sequence
  Synthetic oligonucleotide; TGG chr2 60460303 60460322 60460319 +
gaaaaaaatcctacagggag

SEQ ID NO: 157746 - DNA, 20 bp, Artificial Sequence
  Synthetic oligonucleotide; GGG chr2 60460304 60460323 60460320 +
aaaaaaatcctacagggagt

SEQ ID NO: 157747 - DNA, 20 bp, Artificial Sequence
  Synthetic oligonucleotide; GGG chr2 60460305 60460324 60460321 +
aaaaaatcctacagggagtg

SEQ ID NO: 157748 - DNA, 20 bp, Artificial Sequence
  Synthetic oligonucleotide; TGG chr2 60460309 60460328 60460325 +
aatcctacagggagtggggc

SEQ ID NO: 157749 - DNA, 20 bp, Artificial Sequence
  Synthetic oligonucleotide; GAG chr2 60460311 60460330 60460327 +
tcctacagggagtggggctg

SEQ ID NO: 157750 - DNA, 20 bp, Artificial Sequence
  Synthetic oligonucleotide; AGG chr2 60460312 60460331 60460328 +
cctacagggagtggggctgg

SEQ ID NO: 157751 - DNA, 20 bp, Artificial Sequence
  Synthetic oligonucleotide; GGG chr2 60460313 60460332 60460329 +
ctacagggagtggggctgga

SEQ ID NO: 157752 - DNA, 20 bp, Artificial Sequence
  Synthetic oligonucleotide; TGG chr2 60460319 60460338 60460335 +
ggagtggggctggagggcga

SEQ ID NO: 157753 - DNA, 20 bp, Artificial Sequence
  Synthetic oligonucleotide; GGG chr2 60460320 60460339 60460336 +
gagtggggctggagggcgat

SEQ ID NO: 157754 - DNA, 20 bp, Artificial Sequence
  Synthetic oligonucleotide; GGG chr2 60460321 60460340 60460337 +
agtggggctggagggcgatg

SEQ ID NO: 157755 - DNA, 20 bp, Artificial Sequence
  Synthetic oligonucleotide; AAG chr2 60460324 60460343 60460340 +
ggggctggagggcgatgggg

SEQ ID NO: 157756 - DNA, 20 bp, Artificial Sequence
  Synthetic oligonucleotide; AGG chr2 60460325 60460344 60460341 +
gggctggagggcgatgggga

SEQ ID NO: 157757 - DNA, 20 bp, Artificial Sequence
  Synthetic oligonucleotide; GGG chr2 60460326 60460345 60460342 +
ggctggagggcgatggggaa

SEQ ID NO: 157758 - DNA, 20 bp, Artificial Sequence
  Synthetic oligonucleotide; GGG chr2 60460327 60460346 60460343 +
gctggagggcgatggggaag

SEQ ID NO: 157759 - DNA, 20 bp, Artificial Sequence
  Synthetic oligonucleotide; GAG chr2 60460329 60460348 60460345 +
tggagggcgatggggaaggg

SEQ ID NO: 157760 - DNA, 20 bp, Artificial Sequence
  Synthetic oligonucleotide; TGG chr2 60460332 60460351 60460348 +
agggcgatggggaaggggag

SEQ ID NO: 157761 - DNA, 20 bp, Artificial Sequence
  Synthetic oligonucleotide; AAG chr2 60460340 60460359 60460356 +
ggggaaggggagtggtgaaa

SEQ ID NO: 157762 - DNA, 20 bp, Artificial Sequence
  Synthetic oligonucleotide; AGG chr2 60460341 60460360 60460357 +
gggaaggggagtggtgaaaa

SEQ ID NO: 157763 - DNA, 20 bp, Artificial Sequence
  Synthetic oligonucleotide; GGG chr2 60460342 60460361 60460358 +
ggaaggggagtggtgaaaaa

SEQ ID NO: 157764 - DNA, 20 bp, Artificial Sequence
  Synthetic oligonucleotide; GGG chr2 60460343 60460362 60460359 +
gaaggggagtggtgaaaaag

SEQ ID NO: 157765 - DNA, 20 bp, Artificial Sequence
  Synthetic oligonucleotide; GGG chr2 60460344 60460363 60460360 +
aaggggagtggtgaaaaagg

SEQ ID NO: 157766 - DNA, 20 bp, Artificial Sequence
  Synthetic oligonucleotide; CAG chr2 60460350 60460369 60460366 +
agtggtgaaaaagggggtgt

SEQ ID NO: 157767 - DNA, 20 bp, Artificial Sequence
  Synthetic oligonucleotide; AGG chr2 60460351 60460370 60460367 +
gtggtgaaaaagggggtgtc

SEQ ID NO: 157768 - DNA, 20 bp, Artificial Sequence
  Synthetic oligonucleotide; TGG chr2 60460354 60460373 60460370 +
gtgaaaaagggggtgtcagg

SEQ ID NO: 157769 - DNA, 20 bp, Artificial Sequence
  Synthetic oligonucleotide; GGG chr2 60460355 60460374 60460371 +
tgaaaaagggggtgtcaggt

SEQ ID NO: 157770 - DNA, 20 bp, Artificial Sequence
  Synthetic oligonucleotide; GAG chr2 60460357 60460376 60460373 +
aaaaagggggtgtcaggtgg

SEQ ID NO: 157771 - DNA, 20 bp, Artificial Sequence
  Synthetic oligonucleotide; GAG chr2 60460361 60460380 60460377 +
agggggtgtcaggtgggagt

SEQ ID NO: 157772 - DNA, 20 bp, Artificial Sequence
  Synthetic oligonucleotide; AGG chr2 60460362 60460381 60460378 +
gggggtgtcaggtgggagtg

SEQ ID NO: 157773 - DNA, 20 bp, Artificial Sequence
  Synthetic oligonucleotide; GGG chr2 60460363 60460382 60460379 +
ggggtgtcaggtgggagtga

SEQ ID NO: 157774 - DNA, 20 bp, Artificial Sequence
  Synthetic oligonucleotide; GAG chr2 60460365 60460384 60460381 +
ggtgtcaggtgggagtgagg

SEQ ID NO: 157775 - DNA, 20 bp, Artificial Sequence
  Synthetic oligonucleotide; AGG chr2 60460366 60460385 60460382 +
gtgtcaggtgggagtgaggg

SEQ ID NO: 157776 - DNA, 20 bp, Artificial Sequence
  Synthetic oligonucleotide; GGG chr2 60460367 60460386 60460383 +
tgtcaggtgggagtgaggga

SEQ ID NO: 157777 - DNA, 20 bp, Artificial Sequence
  Synthetic oligonucleotide; GGG chr2 60460368 60460387 60460384 +
gtcaggtgggagtgagggag

SEQ ID NO: 157778 - DNA, 20 bp, Artificial Sequence
  Synthetic oligonucleotide; CAG chr2 60460389 60460408 60460405 +
ggtattaatatacctctatt

SEQ ID NO: 157779 - DNA, 20 bp, Artificial Sequence
  Synthetic oligonucleotide; CAG chr2 60460447 60460466 60460463 +
cattttttcatgtgtttctc

SEQ ID NO: 157780 - DNA, 20 bp, Artificial Sequence
  Synthetic oligonucleotide; AGG chr2 60460448 60460467 60460464 +
attttttcatgtgtttctcc

SEQ ID NO: 157781 - DNA, 20 bp, Artificial Sequence
  Synthetic oligonucleotide; GGG chr2 60460449 60460468 60460465 +
ttttttcatgtgtttctcca

SEQ ID NO: 157782 - DNA, 20 bp, Artificial Sequence
  Synthetic oligonucleotide; AAG chr2 60460467 60460486 60460483 +
cagggtactgtacacgctaa

SEQ ID NO: 157783 - DNA, 20 bp, Artificial Sequence
  Synthetic oligonucleotide; AGG chr2 60460468 60460487 60460484 +
agggtactgtacacgctaaa

SEQ ID NO: 157784 - DNA, 20 bp, Artificial Sequence
  Synthetic oligonucleotide; TGG chr2 60460511 60460530 60460527 +
tgtaaacgtccttccccacc

SEQ ID NO: 157785 - DNA, 20 bp, Artificial Sequence
  Synthetic oligonucleotide; TGG chr2 60460533 60460552 60460549 +
gccatgcgttttcatgtgcc

SEQ ID NO: 157786 - DNA, 20 bp, Artificial Sequence
  Synthetic oligonucleotide; GAG chr2 60460537 60460556 60460553 +
tgcgttttcatgtgcctggt

SEQ ID NO: 157787 - DNA, 20 bp, Artificial Sequence
  Synthetic oligonucleotide; TGG chr2 60460550 60460569 60460566 +
gcctggtgagcttgctactc

SEQ ID NO: 157788 - DNA, 20 bp, Artificial Sequence
  Synthetic oligonucleotide; GGG chr2 60460551 60460570 60460567 +
cctggtgagcttgctactct

SEQ ID NO: 157789 - DNA, 20 bp, Artificial Sequence
  Synthetic oligonucleotide; CAG chr2 60460556 60460575 60460572 +
tgagcttgctactctgggca

SEQ ID NO: 157790 - DNA, 20 bp, Artificial Sequence
  Synthetic oligonucleotide; AGG chr2 60460557 60460576 60460573 +
gagcttgctactctgggcac

SEQ ID NO: 157791 - DNA, 20 bp, Artificial Sequence
  Synthetic oligonucleotide; TAG chr2 60460562 60460581 60460578 +
tgctactctgggcacaggca

SEQ ID NO: 157792 - DNA, 20 bp, Artificial Sequence
  Synthetic oligonucleotide; CAG chr2 60460570 60460589 60460586 +
tgggcacaggcatagttgca

SEQ ID NO: 157793 - DNA, 20 bp, Artificial Sequence
  Synthetic oligonucleotide; AAG chr2 60460584 60460603 60460600 +
gttgcacagctcgcatttat

SEQ ID NO: 157794 - DNA, 20 bp, Artificial Sequence
  Synthetic oligonucleotide; AGG chr2 60460585 60460604 60460601 +
ttgcacagctcgcatttata

SEQ ID NO: 157795 - DNA, 20 bp, Artificial Sequence
  Synthetic oligonucleotide; TGG chr2 60460601 60460620 60460617 +
tataaggcctttcgcccgtg

SEQ ID NO: 157796 - DNA, 20 bp, Artificial Sequence
  Synthetic oligonucleotide; TGG chr2 60460613 60460632 60460629 +
cgcccgtgtggcttctcctg

SEQ ID NO: 157797 - DNA, 20 bp, Artificial Sequence
  Synthetic oligonucleotide; CAG chr2 60460617 60460636 60460633 +
cgtgtggcttctcctgtgga

SEQ ID NO: 157798 - DNA, 20 bp, Artificial Sequence
  Synthetic oligonucleotide; GAG chr2 60460621 60460640 60460637 +
tggcttctcctgtggacagt

SEQ ID NO: 157799 - DNA, 20 bp, Artificial Sequence
  Synthetic oligonucleotide; CAG chr2 60460631 60460650 60460647 +
tgtggacagtgagattgcta

SEQ ID NO: 157800 - DNA, 20 bp, Artificial Sequence
  Synthetic oligonucleotide; AAG chr2 60460640 60460659 60460656 +
tgagattgctacagttcttg

SEQ ID NO: 157801 - DNA, 20 bp, Artificial Sequence
  Synthetic oligonucleotide; CAG chr2 60460652 60460671 60460668 +
agttcttgaagactttccca

SEQ ID NO: 157802 - DNA, 20 bp, Artificial Sequence
  Synthetic oligonucleotide; AAG chr2 60460662 60460681 60460678 +
gactttcccacagtactcac

SEQ ID NO: 157803 - DNA, 20 bp, Artificial Sequence
  Synthetic oligonucleotide; GAG chr2 60460688 60460707 60460704 +
cgctgcgtctgccctctttt

SEQ ID NO: 157804 - DNA, 20 bp, Artificial Sequence
  Synthetic oligonucleotide; TGG chr2 60460692 60460711 60460708 +
gcgtctgccctcttttgagc

SEQ ID NO: 157805 - DNA, 20 bp, Artificial Sequence
  Synthetic oligonucleotide; GGG chr2 60460693 60460712 60460709 +
cgtctgccctcttttgagct

SEQ ID NO: 157806 - DNA, 20 bp, Artificial Sequence
  Synthetic oligonucleotide; CGG chr2 60460702 60460721 60460718 +
tcttttgagctgggcctgcc

SEQ ID NO: 157807 - DNA, 20 bp, Artificial Sequence
  Synthetic oligonucleotide; GGG chr2 60460703 60460722 60460719 +
cttttgagctgggcctgccc

SEQ ID NO: 157808 - DNA, 20 bp, Artificial Sequence
  Synthetic oligonucleotide; CGG chr2 60460708 60460727 60460724 +
gagctgggcctgcccgggcc

SEQ ID NO: 157809 - DNA, 20 bp, Artificial Sequence
  Synthetic oligonucleotide; TGG chr2 60460721 60460740 60460737 +
ccgggcccggaccactaata

SEQ ID NO: 157810 - DNA, 20 bp, Artificial Sequence
  Synthetic oligonucleotide; GGG chr2 60460722 60460741 60460738 +
cgggcccggaccactaatat

SEQ ID NO: 157811 - DNA, 20 bp, Artificial Sequence
  Synthetic oligonucleotide; GGG chr2 60460723 60460742 60460739 +
gggcccggaccactaatatg

SEQ ID NO: 157812 - DNA, 20 bp, Artificial Sequence
  Synthetic oligonucleotide; GAG chr2 60460760 60460779 60460776 +
ttcccgtgccgctgcgcccc

SEQ ID NO: 157813 - DNA, 20 bp, Artificial Sequence
  Synthetic oligonucleotide; CAG chr2 60460774 60460793 60460790 +
cgccccgagatccctccgtc

SEQ ID NO: 157814 - DNA, 20 bp, Artificial Sequence
  Synthetic oligonucleotide; CGG chr2 60460782 60460801 60460798 +
gatccctccgtccagctccc

SEQ ID NO: 157815 - DNA, 20 bp, Artificial Sequence
  Synthetic oligonucleotide; GGG chr2 60460783 60460802 60460799 +
atccctccgtccagctcccc

SEQ ID NO: 157816 - DNA, 20 bp, Artificial Sequence
  Synthetic oligonucleotide; CGG chr2 60460786 60460805 60460802 +
cctccgtccagctccccggg

SEQ ID NO: 157817 - DNA, 20 bp, Artificial Sequence
  Synthetic oligonucleotide; TGG chr2 60460791 60460810 60460807 +
gtccagctccccgggcggtg

SEQ ID NO: 157818 - DNA, 20 bp, Artificial Sequence
  Synthetic oligonucleotide; GAG chr2 60460793 60460812 60460809 +
ccagctccccgggcggtgtg

SEQ ID NO: 157819 - DNA, 20 bp, Artificial Sequence
  Synthetic oligonucleotide; AAG chr2 60460796 60460815 60460812 +
gctccccgggcggtgtggag

SEQ ID NO: 157820 - DNA, 20 bp, Artificial Sequence
  Synthetic oligonucleotide; GAG chr2 60460817 60460836 60460833 +
agcgcaaactcccgttctcc

SEQ ID NO: 157821 - DNA, 20 bp, Artificial Sequence
  Synthetic oligonucleotide; AGG chr2 60460818 60460837 60460834 +
gcgcaaactcccgttctccg

SEQ ID NO: 157822 - DNA, 20 bp, Artificial Sequence
  Synthetic oligonucleotide; GAG chr2 60460820 60460839 60460836 +
gcaaactcccgttctccgag

SEQ ID NO: 157823 - DNA, 20 bp, Artificial Sequence
  Synthetic oligonucleotide; GAG chr2 60460832 60460851 60460848 +
tctccgaggagtgctccgac

SEQ ID NO: 157824 - DNA, 20 bp, Artificial Sequence
  Synthetic oligonucleotide; AGG chr2 60460833 60460852 60460849 +
ctccgaggagtgctccgacg

SEQ ID NO: 157825 - DNA, 20 bp, Artificial Sequence
  Synthetic oligonucleotide; GAG chr2 60460835 60460854 60460851 +
ccgaggagtgctccgacgag

SEQ ID NO: 157826 - DNA, 20 bp, Artificial Sequence
  Synthetic oligonucleotide; AGG chr2 60460836 60460855 60460852 +
cgaggagtgctccgacgagg

SEQ ID NO: 157827 - DNA, 20 bp, Artificial Sequence
  Synthetic oligonucleotide; AAG chr2 60460842 60460861 60460858 +
gtgctccgacgaggaggcaa

SEQ ID NO: 157828 - DNA, 20 bp, Artificial Sequence
  Synthetic oligonucleotide; AGG chr2 60460843 60460862 60460859 +
tgctccgacgaggaggcaaa

SEQ ID NO: 157829 - DNA, 20 bp, Artificial Sequence
  Synthetic oligonucleotide; TGG chr2 60460854 60460873 60460870 +
ggaggcaaaaggcgattgtc

SEQ ID NO: 157830 - DNA, 20 bp, Artificial Sequence
  Synthetic oligonucleotide; GAG chr2 60460856 60460875 60460872 +
aggcaaaaggcgattgtctg

SEQ ID NO: 157831 - DNA, 20 bp, Artificial Sequence
  Synthetic oligonucleotide; AAG chr2 60460865 60460884 60460881 +
gcgattgtctggagtctccg

SEQ ID NO: 157832 - DNA, 20 bp, Artificial Sequence
  Synthetic oligonucleotide; AAG chr2 60460870 60460889 60460886 +
tgtctggagtctccgaagct

SEQ ID NO: 157833 - DNA, 20 bp, Artificial Sequence
  Synthetic oligonucleotide; AGG chr2 60460871 60460890 60460887 +
gtctggagtctccgaagcta

SEQ ID NO: 157834 - DNA, 20 bp, Artificial Sequence
  Synthetic oligonucleotide; AAG chr2 60460874 60460893 60460890 +
tggagtctccgaagctaagg

SEQ ID NO: 157835 - DNA, 20 bp, Artificial Sequence
  Synthetic oligonucleotide; AGG chr2 60460875 60460894 60460891 +
ggagtctccgaagctaagga

SEQ ID NO: 157836 - DNA, 20 bp, Artificial Sequence
  Synthetic oligonucleotide; GGG chr2 60460876 60460895 60460892 +
gagtctccgaagctaaggaa

SEQ ID NO: 157837 - DNA, 20 bp, Artificial Sequence
  Synthetic oligonucleotide; GAG chr2 60460885 60460904 60460901 +
aagctaaggaagggatcttt

SEQ ID NO: 157838 - DNA, 20 bp, Artificial Sequence
  Synthetic oligonucleotide; TGG chr2 60460893 60460912 60460909 +
gaagggatctttgagctgcc

SEQ ID NO: 157839 - DNA, 20 bp, Artificial Sequence
  Synthetic oligonucleotide; GAG chr2 60460895 60460914 60460911 +
agggatctttgagctgcctg

SEQ ID NO: 157840 - DNA, 20 bp, Artificial Sequence
  Synthetic oligonucleotide; AGG chr2 60460896 60460915 60460912 +
gggatctttgagctgcctgg

SEQ ID NO: 157841 - DNA, 20 bp, Artificial Sequence
  Synthetic oligonucleotide; TAG chr2 60460904 60460923 60460920 +
tgagctgcctggaggccgcg

SEQ ID NO: 157842 - DNA, 20 bp, Artificial Sequence
  Synthetic oligonucleotide; CGG chr2 60460908 60460927 60460924 +
ctgcctggaggccgcgtagc

SEQ ID NO: 157843 - DNA, 20 bp, Artificial Sequence
  Synthetic oligonucleotide; GAG chr2 60460912 60460931 60460928 +
ctggaggccgcgtagccggc

SEQ ID NO: 157844 - DNA, 20 bp, Artificial Sequence
  Synthetic oligonucleotide; GAG chr2 60460922 60460941 60460938 +
cgtagccggcgagccactgc

SEQ ID NO: 157845 - DNA, 20 bp, Artificial Sequence
  Synthetic oligonucleotide; TGG chr2 60460941 60460960 60460957 +
cgagtacacgttctccgtgt

SEQ ID NO: 157846 - DNA, 20 bp, Artificial Sequence
  Synthetic oligonucleotide; GGG chr2 60460942 60460961 60460958 +
gagtacacgttctccgtgtt

SEQ ID NO: 157847 - DNA, 20 bp, Artificial Sequence
  Synthetic oligonucleotide; CGG chr2 60460950 60460969 60460966 +
gttctccgtgttgggcatcg

SEQ ID NO: 157848 - DNA, 20 bp, Artificial Sequence
  Synthetic oligonucleotide; CGG chr2 60460954 60460973 60460970 +
tccgtgttgggcatcgcggc

SEQ ID NO: 157849 - DNA, 20 bp, Artificial Sequence
  Synthetic oligonucleotide; GGG chr2 60460955 60460974 60460971 +
ccgtgttgggcatcgcggcc

SEQ ID NO: 157850 - DNA, 20 bp, Artificial Sequence
  Synthetic oligonucleotide; GGG chr2 60460956 60460975 60460972 +
cgtgttgggcatcgcggccg

SEQ ID NO: 157851 - DNA, 20 bp, Artificial Sequence
  Synthetic oligonucleotide; GGG chr2 60460957 60460976 60460973 +
gtgttgggcatcgcggccgg

SEQ ID NO: 157852 - DNA, 20 bp, Artificial Sequence
  Synthetic oligonucleotide; CAG chr2 60460960 60460979 60460976 +
ttgggcatcgcggccggggg

SEQ ID NO: 157853 - DNA, 20 bp, Artificial Sequence
  Synthetic oligonucleotide; AGG chr2 60460961 60460980 60460977 +
tgggcatcgcggccgggggc

SEQ ID NO: 157854 - DNA, 20 bp, Artificial Sequence
  Synthetic oligonucleotide; GAG chr2 60460978 60460997 60460994 +
ggcaggtcgaactccttctc

SEQ ID NO: 157855 - DNA, 20 bp, Artificial Sequence
  Synthetic oligonucleotide; TAG chr2 60460992 60461011 60461008 +
cttctcgagcttgatgcgct

SEQ ID NO: 157856 - DNA, 20 bp, Artificial Sequence
  Synthetic oligonucleotide; GAG chr2 60460994 60461013 60461010 +
tctcgagcttgatgcgctta

SEQ ID NO: 157857 - DNA, 20 bp, Artificial Sequence
  Synthetic oligonucleotide; AAG chr2 60460997 60461016 60461013 +
cgagcttgatgcgcttagag

SEQ ID NO: 157858 - DNA, 20 bp, Artificial Sequence
  Synthetic oligonucleotide; AGG chr2 60460998 60461017 60461014 +
gagcttgatgcgcttagaga

SEQ ID NO: 157859 - DNA, 20 bp, Artificial Sequence
  Synthetic oligonucleotide; GGG chr2 60460999 60461018 60461015 +
agcttgatgcgcttagagaa

SEQ ID NO: 157860 - DNA, 20 bp, Artificial Sequence
  Synthetic oligonucleotide; GGG chr2 60461000 60461019 60461016 +
gcttgatgcgcttagagaag

SEQ ID NO: 157861 - DNA, 20 bp, Artificial Sequence
  Synthetic oligonucleotide; CAG chr2 60461005 60461024 60461021 +
atgcgcttagagaaggggct

SEQ ID NO: 157862 - DNA, 20 bp, Artificial Sequence
  Synthetic oligonucleotide; GAG chr2 60461009 60461028 60461025 +
gcttagagaaggggctcagc

SEQ ID NO: 157863 - DNA, 20 bp, Artificial Sequence
  Synthetic oligonucleotide; TGG chr2 60461013 60461032 60461029 +
agagaaggggctcagcgagc

SEQ ID NO: 157864 - DNA, 20 bp, Artificial Sequence
  Synthetic oligonucleotide; GGG chr2 60461014 60461033 60461030 +
gagaaggggctcagcgagct

SEQ ID NO: 157865 - DNA, 20 bp, Artificial Sequence
  Synthetic oligonucleotide; GGG chr2 60461015 60461034 60461031 +
agaaggggctcagcgagctg

SEQ ID NO: 157866 - DNA, 20 bp, Artificial Sequence
  Synthetic oligonucleotide; CAG chr2 60461023 60461042 60461039 +
ctcagcgagctggggctgcc

SEQ ID NO: 157867 - DNA, 20 bp, Artificial Sequence
  Synthetic oligonucleotide; CAG chr2 60461026 60461045 60461042 +
agcgagctggggctgcccag

SEQ ID NO: 157868 - DNA, 20 bp, Artificial Sequence
  Synthetic oligonucleotide; CAG chr2 60461029 60461048 60461045 +
gagctggggctgcccagcag

SEQ ID NO: 157869 - DNA, 20 bp, Artificial Sequence
  Synthetic oligonucleotide; TGG chr2 60461037 60461056 60461053 +
gctgcccagcagcagctttt

SEQ ID NO: 157870 - DNA, 20 bp, Artificial Sequence
  Synthetic oligonucleotide; CAG chr2 60461041 60461060 60461057 +
cccagcagcagctttttgga

SEQ ID NO: 157871 - DNA, 20 bp, Artificial Sequence
  Synthetic oligonucleotide; AGG chr2 60461042 60461061 60461058 +
ccagcagcagctttttggac

SEQ ID NO: 157872 - DNA, 20 bp, Artificial Sequence
  Synthetic oligonucleotide; GAG chr2 60461051 60461070 60461067 +
gctttttggacaggcccccc

SEQ ID NO: 157873 - DNA, 20 bp, Artificial Sequence
  Synthetic oligonucleotide; AGG chr2 60461052 60461071 60461068 +
ctttttggacaggccccccg

SEQ ID NO: 157874 - DNA, 20 bp, Artificial Sequence
  Synthetic oligonucleotide; CGG chr2 60461065 60461084 60461081 +
ccccccgaggccgactcgcc

SEQ ID NO: 157875 - DNA, 20 bp, Artificial Sequence
  Synthetic oligonucleotide; GGG chr2 60461066 60461085 60461082 +
cccccgaggccgactcgccc

SEQ ID NO: 157876 - DNA, 20 bp, Artificial Sequence
  Synthetic oligonucleotide; GGG chr2 60461067 60461086 60461083 +
ccccgaggccgactcgcccg

SEQ ID NO: 157877 - DNA, 20 bp, Artificial Sequence
  Synthetic oligonucleotide; GAG chr2 60461069 60461088 60461085 +
ccgaggccgactcgcccggg

SEQ ID NO: 157878 - DNA, 20 bp, Artificial Sequence
  Synthetic oligonucleotide; CAG chr2 60461072 60461091 60461088 +
aggccgactcgcccggggag

SEQ ID NO: 157879 - DNA, 20 bp, Artificial Sequence
  Synthetic oligonucleotide; CGG chr2 60461078 60461097 60461094 +
actcgcccggggagcagccg

SEQ ID NO: 157880 - DNA, 20 bp, Artificial Sequence
  Synthetic oligonucleotide; CAG chr2 60461088 60461107 60461104 +
ggagcagccgcggccattaa

SEQ ID NO: 157881 - DNA, 20 bp, Artificial Sequence
  Synthetic oligonucleotide; CGG chr2 60461105 60461124 60461121 +
taacagtgccatcgtctatg

SEQ ID NO: 157882 - DNA, 20 bp, Artificial Sequence
  Synthetic oligonucleotide; CGG chr2 60461118 60461137 60461134 +
gtctatgcggtccgactcgc

SEQ ID NO: 157883 - DNA, 20 bp, Artificial Sequence
  Synthetic oligonucleotide; GAG chr2 60461126 60461145 60461142 +
ggtccgactcgccggccacc

SEQ ID NO: 157884 - DNA, 20 bp, Artificial Sequence
  Synthetic oligonucleotide; AAG chr2 60461139 60461158 60461155 +
ggccaccgagtcttcgtcgc

SEQ ID NO: 157885 - DNA, 20 bp, Artificial Sequence
  Synthetic oligonucleotide; TGG chr2 60461150 60461169 60461166 +
cttcgtcgcaagtgtccctg

SEQ ID NO: 157886 - DNA, 20 bp, Artificial Sequence
  Synthetic oligonucleotide; CGG chr2 60461157 60461176 60461173 +
gcaagtgtccctgtggccct

SEQ ID NO: 157887 - DNA, 20 bp, Artificial Sequence
  Synthetic oligonucleotide; CGG chr2 60461163 60461182 60461179 +
gtccctgtggccctcggcct

SEQ ID NO: 157888 - DNA, 20 bp, Artificial Sequence
  Synthetic oligonucleotide; CAG chr2 60461167 60461186 60461183 +
ctgtggccctcggcctcggc

SEQ ID NO: 157889 - DNA, 20 bp, Artificial Sequence
  Synthetic oligonucleotide; AGG chr2 60461168 60461187 60461184 +
tgtggccctcggcctcggcc

SEQ ID NO: 157890 - DNA, 20 bp, Artificial Sequence
  Synthetic oligonucleotide; TGG chr2 60461171 60461190 60461187 +
ggccctcggcctcggccagg

SEQ ID NO: 157891 - DNA, 20 bp, Artificial Sequence
  Synthetic oligonucleotide; CAG chr2 60461194 60461213 60461210 +
ccgcgcttatgcttctcgcc

SEQ ID NO: 157892 - DNA, 20 bp, Artificial Sequence
  Synthetic oligonucleotide; AGG chr2 60461195 60461214 60461211 +
cgcgcttatgcttctcgccc

SEQ ID NO: 157893 - DNA, 20 bp, Artificial Sequence
  Synthetic oligonucleotide; TGG chr2 60461201 60461220 60461217 +
tatgcttctcgcccaggacc

SEQ ID NO: 157894 - DNA, 20 bp, Artificial Sequence
  Synthetic oligonucleotide; TGG chr2 60461204 60461223 60461220 +
gcttctcgcccaggacctgg

SEQ ID NO: 157895 - DNA, 20 bp, Artificial Sequence
  Synthetic oligonucleotide; AAG chr2 60461207 60461226 60461223 +
tctcgcccaggacctggtgg

SEQ ID NO: 157896 - DNA, 20 bp, Artificial Sequence
  Synthetic oligonucleotide; AGG chr2 60461208 60461227 60461224 +
ctcgcccaggacctggtgga

SEQ ID NO: 157897 - DNA, 20 bp, Artificial Sequence
  Synthetic oligonucleotide; AAG chr2 60461219 60461238 60461235 +
cctggtggaaggcctcgctg

SEQ ID NO: 157898 - DNA, 20 bp, Artificial Sequence
  Synthetic oligonucleotide; TGG chr2 60461229 60461248 60461245 +
ggcctcgctgaagtgctgca

SEQ ID NO: 157899 - DNA, 20 bp, Artificial Sequence
  Synthetic oligonucleotide; GAG chr2 60461231 60461250 60461247 +
cctcgctgaagtgctgcatg

SEQ ID NO: 157900 - DNA, 20 bp, Artificial Sequence
  Synthetic oligonucleotide; GAG chr2 60461236 60461255 60461252 +
ctgaagtgctgcatggagct

SEQ ID NO: 157901 - DNA, 20 bp, Artificial Sequence
  Synthetic oligonucleotide; CGG chr2 60461259 60461278 60461275 +
caccatgccctgcatgacgt

SEQ ID NO: 157902 - DNA, 20 bp, Artificial Sequence
  Synthetic oligonucleotide; GGG chr2 60461260 60461279 60461276 +
accatgccctgcatgacgtc

SEQ ID NO: 157903 - DNA, 20 bp, Artificial Sequence
  Synthetic oligonucleotide; CAG chr2 60461263 60461282 60461279 +
atgccctgcatgacgtcggg

SEQ ID NO: 157904 - DNA, 20 bp, Artificial Sequence
  Synthetic oligonucleotide; AGG chr2 60461264 60461283 60461280 +
tgccctgcatgacgtcgggc

SEQ ID NO: 157905 - DNA, 20 bp, Artificial Sequence
  Synthetic oligonucleotide; GGG chr2 60461265 60461284 60461281 +
gccctgcatgacgtcgggca

SEQ ID NO: 157906 - DNA, 20 bp, Artificial Sequence
  Synthetic oligonucleotide; CGG chr2 60461270 60461289 60461286 +
gcatgacgtcgggcagggcg

SEQ ID NO: 157907 - DNA, 20 bp, Artificial Sequence
  Synthetic oligonucleotide; GAG chr2 60461306 60461325 60461322 +
cgcccacgaccgcgccccgc

SEQ ID NO: 157908 - DNA, 20 bp, Artificial Sequence
  Synthetic oligonucleotide; TGG chr2 60461318 60461337 60461334 +
cgccccgcgagctgttctcg

SEQ ID NO: 157909 - DNA, 20 bp, Artificial Sequence
  Synthetic oligonucleotide; TGG chr2 60461321 60461340 60461337 +
cccgcgagctgttctcgtgg

SEQ ID NO: 157910 - DNA, 20 bp, Artificial Sequence
  Synthetic oligonucleotide; CAG chr2 60461335 60461354 60461351 +
tcgtggtggcgcgccgcctc

SEQ ID NO: 157911 - DNA, 20 bp, Artificial Sequence
  Synthetic oligonucleotide; AGG chr2 60461336 60461355 60461352 +
cgtggtggcgcgccgcctcc

SEQ ID NO: 157912 - DNA, 20 bp, Artificial Sequence
  Synthetic oligonucleotide; CAG chr2 60461341 60461360 60461357 +
tggcgcgccgcctccaggct

SEQ ID NO: 157913 - DNA, 20 bp, Artificial Sequence
  Synthetic oligonucleotide; AAG chr2 60461348 60461367 60461364 +
ccgcctccaggctcagcccg

SEQ ID NO: 157914 - DNA, 20 bp, Artificial Sequence
  Synthetic oligonucleotide; TAG chr2 60461354 60461373 60461370 +
ccaggctcagcccgaagccg

SEQ ID NO: 157915 - DNA, 20 bp, Artificial Sequence
  Synthetic oligonucleotide; CAG chr2 60461377 60461396 60461393 +
tccaccctctcgctctccgt

SEQ ID NO: 157916 - DNA, 20 bp, Artificial Sequence
  Synthetic oligonucleotide; CGG chr2 60461452 60461471 60461468 +
tcctcctcgtccccgttctc

SEQ ID NO: 157917 - DNA, 20 bp, Artificial Sequence
  Synthetic oligonucleotide; GGG chr2 60461453 60461472 60461469 +
cctcctcgtccccgttctcc

SEQ ID NO: 157918 - DNA, 20 bp, Artificial Sequence
  Synthetic oligonucleotide; CAG chr2 60461458 60461477 60461474 +
tcgtccccgttctccgggat

SEQ ID NO: 157919 - DNA, 20 bp, Artificial Sequence
  Synthetic oligonucleotide; AGG chr2 60461459 60461478 60461475 +
cgtccccgttctccgggatc

SEQ ID NO: 157920 - DNA, 20 bp, Artificial Sequence
  Synthetic oligonucleotide; TGG chr2 60461463 60461482 60461479 +
cccgttctccgggatcaggt

SEQ ID NO: 157921 - DNA, 20 bp, Artificial Sequence
  Synthetic oligonucleotide; GGG chr2 60461464 60461483 60461480 +
ccgttctccgggatcaggtt

SEQ ID NO: 157922 - DNA, 20 bp, Artificial Sequence
  Synthetic oligonucleotide; GGG chr2 60461465 60461484 60461481 +
cgttctccgggatcaggttg

SEQ ID NO: 157923 - DNA, 20 bp, Artificial Sequence
  Synthetic oligonucleotide; TGG chr2 60461487 60461506 60461503 +
gtcgttctcgctcttgaact

SEQ ID NO: 157924 - DNA, 20 bp, Artificial Sequence
  Synthetic oligonucleotide; CGG chr2 60461496 60461515 60461512 +
gctcttgaacttggccacca

SEQ ID NO: 157925 - DNA, 20 bp, Artificial Sequence
  Synthetic oligonucleotide; GAG chr2 60461503 60461522 60461519 +
aacttggccaccacggactt

SEQ ID NO: 157926 - DNA, 20 bp, Artificial Sequence
  Synthetic oligonucleotide; TGG chr2 60461514 60461533 60461530 +
cacggacttgagcgcgctgc

SEQ ID NO: 157927 - DNA, 20 bp, Artificial Sequence
  Synthetic oligonucleotide; AAG chr2 60461528 60461547 60461544 +
cgctgctggcgctgcccacc

SEQ ID NO: 157928 - DNA, 20 bp, Artificial Sequence
  Synthetic oligonucleotide; TGG chr2 60461535 60461554 60461551 +
ggcgctgcccaccaagtcgc

SEQ ID NO: 157929 - DNA, 20 bp, Artificial Sequence
  Synthetic oligonucleotide; CGG chr2 60461541 60461560 60461557 +
gcccaccaagtcgctggtgc

SEQ ID NO: 157930 - DNA, 20 bp, Artificial Sequence
  Synthetic oligonucleotide; GGG chr2 60461542 60461561 60461558 +
cccaccaagtcgctggtgcc

SEQ ID NO: 157931 - DNA, 20 bp, Artificial Sequence
  Synthetic oligonucleotide; CGG chr2 60461548 60461567 60461564 +
aagtcgctggtgccgggttc

SEQ ID NO: 157932 - DNA, 20 bp, Artificial Sequence
  Synthetic oligonucleotide; GGG chr2 60461549 60461568 60461565 +
agtcgctggtgccgggttcc

SEQ ID NO: 157933 - DNA, 20 bp, Artificial Sequence
  Synthetic oligonucleotide; GGG chr2 60461550 60461569 60461566 +
gtcgctggtgccgggttccg

SEQ ID NO: 157934 - DNA, 20 bp, Artificial Sequence
  Synthetic oligonucleotide; GAG chr2 60461552 60461571 60461568 +
cgctggtgccgggttccggg

SEQ ID NO: 157935 - DNA, 20 bp, Artificial Sequence
  Synthetic oligonucleotide; TGG chr2 60461556 60461575 60461572 +
ggtgccgggttccggggagc

SEQ ID NO: 157936 - DNA, 20 bp, Artificial Sequence
  Synthetic oligonucleotide; CGG chr2 60461559 60461578 60461575 +
gccgggttccggggagctgg

SEQ ID NO: 157937 - DNA, 20 bp, Artificial Sequence
  Synthetic oligonucleotide; TGG chr2 60461562 60461581 60461578 +
gggttccggggagctggcgg

SEQ ID NO: 157938 - DNA, 20 bp, Artificial Sequence
  Synthetic oligonucleotide; GAG chr2 60461564 60461583 60461580 +
gttccggggagctggcggtg

SEQ ID NO: 157939 - DNA, 20 bp, Artificial Sequence
  Synthetic oligonucleotide; GAG chr2 60461566 60461585 60461582 +
tccggggagctggcggtgga

SEQ ID NO: 157940 - DNA, 20 bp, Artificial Sequence
  Synthetic oligonucleotide; CGG chr2 60461577 60461596 60461593 +
ggcggtggagagaccgtcgt

SEQ ID NO: 157941 - DNA, 20 bp, Artificial Sequence
  Synthetic oligonucleotide; TGG chr2 60461592 60461611 60461608 +
gtcgtcggacttgaccgtca

SEQ ID NO: 157942 - DNA, 20 bp, Artificial Sequence
  Synthetic oligonucleotide; GGG chr2 60461593 60461612 60461609 +
tcgtcggacttgaccgtcat

SEQ ID NO: 157943 - DNA, 20 bp, Artificial Sequence
  Synthetic oligonucleotide; GGG chr2 60461594 60461613 60461610 +
cgtcggacttgaccgtcatg

SEQ ID NO: 157944 - DNA, 20 bp, Artificial Sequence
  Synthetic oligonucleotide; GGG chr2 60461595 60461614 60461611 +
gtcggacttgaccgtcatgg

SEQ ID NO: 157945 - DNA, 20 bp, Artificial Sequence
  Synthetic oligonucleotide; TGG chr2 60461624 60461643 60461640 +
tgtgcatgtgcgtcttcatg

SEQ ID NO: 157946 - DNA, 20 bp, Artificial Sequence
  Synthetic oligonucleotide; CAG chr2 60461632 60461651 60461648 +
tgcgtcttcatgtggcgctt

SEQ ID NO: 157947 - DNA, 20 bp, Artificial Sequence
  Synthetic oligonucleotide; TGG chr2 60461640 60461659 60461656 +
catgtggcgcttcagcttgc

SEQ ID NO: 157948 - DNA, 20 bp, Artificial Sequence
  Synthetic oligonucleotide; TGG chr2 60461645 60461664 60461661 +
ggcgcttcagcttgctggcc

SEQ ID NO: 157949 - DNA, 20 bp, Artificial Sequence
  Synthetic oligonucleotide; GGG chr2 60461646 60461665 60461662 +
gcgcttcagcttgctggcct

SEQ ID NO: 157950 - DNA, 20 bp, Artificial Sequence
  Synthetic oligonucleotide; TGG chr2 60461657 60461676 60461673 +
tgctggcctgggtgcacgcg

SEQ ID NO: 157951 - DNA, 20 bp, Artificial Sequence
  Synthetic oligonucleotide; CAG chr2 60461665 60461684 60461681 +
tgggtgcacgcgtggtcgca

SEQ ID NO: 157952 - DNA, 20 bp, Artificial Sequence
  Synthetic oligonucleotide; AGG chr2 60461666 60461685 60461682 +
gggtgcacgcgtggtcgcac

SEQ ID NO: 157953 - DNA, 20 bp, Artificial Sequence
  Synthetic oligonucleotide; TAG chr2 60461678 60461697 60461694 +
ggtcgcacaggttgcacttg

SEQ ID NO: 157954 - DNA, 20 bp, Artificial Sequence
  Synthetic oligonucleotide; AGG chr2 60461679 60461698 60461695 +
gtcgcacaggttgcacttgt

SEQ ID NO: 157955 - DNA, 20 bp, Artificial Sequence
  Synthetic oligonucleotide; GGG chr2 60461680 60461699 60461696 +
tcgcacaggttgcacttgta

SEQ ID NO: 157956 - DNA, 20 bp, Artificial Sequence
  Synthetic oligonucleotide; TGG chr2 60461696 60461715 60461712 +
tgtagggcttctcgcccgtg

SEQ ID NO: 157957 - DNA, 20 bp, Artificial Sequence
  Synthetic oligonucleotide; CGG chr2 60461705 60461724 60461721 +
tctcgcccgtgtggctgcgc

SEQ ID NO: 157958 - DNA, 20 bp, Artificial Sequence
  Synthetic oligonucleotide; CAG chr2 60461716 60461735 60461732 +
tggctgcgccggtgcaccac

SEQ ID NO: 157959 - DNA, 20 bp, Artificial Sequence
  Synthetic oligonucleotide; AGG chr2 60461717 60461736 60461733 +
ggctgcgccggtgcaccacc

SEQ ID NO: 157960 - DNA, 20 bp, Artificial Sequence
  Synthetic oligonucleotide; CAG chr2 60461747 60461766 60461763 +
gaaatttgaacgtcttgccg

SEQ ID NO: 157961 - DNA, 20 bp, Artificial Sequence
  Synthetic oligonucleotide; TGG chr2 60461763 60461782 60461779 +
gccgcagaactcgcatgact

SEQ ID NO: 157962 - DNA, 20 bp, Artificial Sequence
  Synthetic oligonucleotide; CGG chr2 60461773 60461792 60461789 +
tcgcatgacttggacttgac

SEQ ID NO: 157963 - DNA, 20 bp, Artificial Sequence
  Synthetic oligonucleotide; GGG chr2 60461774 60461793 60461790 +
cgcatgacttggacttgacc

SEQ ID NO: 157964 - DNA, 20 bp, Artificial Sequence
  Synthetic oligonucleotide; GGG chr2 60461775 60461794 60461791 +
gcatgacttggacttgaccg

SEQ ID NO: 157965 - DNA, 20 bp, Artificial Sequence
  Synthetic oligonucleotide; GGG chr2 60461776 60461795 60461792 +
catgacttggacttgaccgg

SEQ ID NO: 157966 - DNA, 20 bp, Artificial Sequence
  Synthetic oligonucleotide; TGG chr2 60461780 60461799 60461796 +
acttggacttgaccgggggc

SEQ ID NO: 157967 - DNA, 20 bp, Artificial Sequence
  Synthetic oligonucleotide; GGG chr2 60461781 60461800 60461797 +
cttggacttgaccgggggct

SEQ ID NO: 157968 - DNA, 20 bp, Artificial Sequence
  Synthetic oligonucleotide; GAG chr2 60461783 60461802 60461799 +
tggacttgaccgggggctgg

SEQ ID NO: 157969 - DNA, 20 bp, Artificial Sequence
  Synthetic oligonucleotide; AGG chr2 60461784 60461803 60461800 +
ggacttgaccgggggctggg

SEQ ID NO: 157970 - DNA, 20 bp, Artificial Sequence
  Synthetic oligonucleotide; GGG chr2 60461785 60461804 60461801 +
gacttgaccgggggctggga

SEQ ID NO: 157971 - DNA, 20 bp, Artificial Sequence
  Synthetic oligonucleotide; GAG chr2 60461787 60461806 60461803 +
cttgaccgggggctgggagg

SEQ ID NO: 157972 - DNA, 20 bp, Artificial Sequence
  Synthetic oligonucleotide; AGG chr2 60461788 60461807 60461804 +
ttgaccgggggctgggaggg

SEQ ID NO: 157973 - DNA, 20 bp, Artificial Sequence
  Synthetic oligonucleotide; GAG chr2 60461790 60461809 60461806 +
gaccgggggctgggagggag

SEQ ID NO: 157974 - DNA, 20 bp, Artificial Sequence
  Synthetic oligonucleotide; AGG chr2 60461791 60461810 60461807 +
accgggggctgggagggagg

SEQ ID NO: 157975 - DNA, 20 bp, Artificial Sequence
  Synthetic oligonucleotide; GGG chr2 60461792 60461811 60461808 +
ccgggggctgggagggagga

SEQ ID NO: 157976 - DNA, 20 bp, Artificial Sequence
  Synthetic oligonucleotide; GGG chr2 60461793 60461812 60461809 +
cgggggctgggagggaggag

SEQ ID NO: 157977 - DNA, 20 bp, Artificial Sequence
  Synthetic oligonucleotide; CGG chr2 60461796 60461815 60461812 +
gggctgggagggaggagggg

SEQ ID NO: 157978 - DNA, 20 bp, Artificial Sequence
  Synthetic oligonucleotide; CAG chr2 60461803 60461822 60461819 +
gagggaggaggggcggattg

SEQ ID NO: 157979 - DNA, 20 bp, Artificial Sequence
  Synthetic oligonucleotide; GAG chr2 60461805 60461824 60461821 +
gggaggaggggcggattgca

SEQ ID NO: 157980 - DNA, 20 bp, Artificial Sequence
  Synthetic oligonucleotide; AGG chr2 60461806 60461825 60461822 +
ggaggaggggcggattgcag

SEQ ID NO: 157981 - DNA, 20 bp, Artificial Sequence
  Synthetic oligonucleotide; GAG chr2 60461808 60461827 60461824 +
aggaggggcggattgcagag

SEQ ID NO: 157982 - DNA, 20 bp, Artificial Sequence
  Synthetic oligonucleotide; AGG chr2 60461809 60461828 60461825 +
ggaggggcggattgcagagg

SEQ ID NO: 157983 - DNA, 20 bp, Artificial Sequence
  Synthetic oligonucleotide; GGG chr2 60461810 60461829 60461826 +
gaggggcggattgcagagga

SEQ ID NO: 157984 - DNA, 20 bp, Artificial Sequence
  Synthetic oligonucleotide; GAG chr2 60461812 60461831 60461828 +
ggggcggattgcagaggagg

SEQ ID NO: 157985 - DNA, 20 bp, Artificial Sequence
  Synthetic oligonucleotide; AGG chr2 60461813 60461832 60461829 +
gggcggattgcagaggaggg

SEQ ID NO: 157986 - DNA, 20 bp, Artificial Sequence
  Synthetic oligonucleotide; GGG chr2 60461814 60461833 60461830 +
ggcggattgcagaggaggga

SEQ ID NO: 157987 - DNA, 20 bp, Artificial Sequence
  Synthetic oligonucleotide; GGG chr2 60461815 60461834 60461831 +
gcggattgcagaggagggag

SEQ ID NO: 157988 - DNA, 20 bp, Artificial Sequence
  Synthetic oligonucleotide; GGG chr2 60461816 60461835 60461832 +
cggattgcagaggagggagg

SEQ ID NO: 157989 - DNA, 20 bp, Artificial Sequence
  Synthetic oligonucleotide; GGG chr2 60461817 60461836 60461833 +
ggattgcagaggagggaggg

SEQ ID NO: 157990 - DNA, 20 bp, Artificial Sequence
  Synthetic oligonucleotide; GGG chr2 60461818 60461837 60461834 +
gattgcagaggagggagggg

SEQ ID NO: 157991 - DNA, 20 bp, Artificial Sequence
  Synthetic oligonucleotide; CAG chr2 60461827 60461846 60461843 +
ggagggagggggggcgtcgc

SEQ ID NO: 157992 - DNA, 20 bp, Artificial Sequence
  Synthetic oligonucleotide; AGG chr2 60461828 60461847 60461844 +
gagggagggggggcgtcgcc

SEQ ID NO: 157993 - DNA, 20 bp, Artificial Sequence
  Synthetic oligonucleotide; AAG chr2 60461831 60461850 60461847 +
ggagggggggcgtcgccagg

SEQ ID NO: 157994 - DNA, 20 bp, Artificial Sequence
  Synthetic oligonucleotide; AGG chr2 60461832 60461851 60461848 +
gagggggggcgtcgccagga

SEQ ID NO: 157995 - DNA, 20 bp, Artificial Sequence
  Synthetic oligonucleotide; GGG chr2 60461833 60461852 60461849 +
agggggggcgtcgccaggaa

SEQ ID NO: 157996 - DNA, 20 bp, Artificial Sequence
  Synthetic oligonucleotide; CGG chr2 60461836 60461855 60461852 +
gggggcgtcgccaggaaggg

SEQ ID NO: 157997 - DNA, 20 bp, Artificial Sequence
  Synthetic oligonucleotide; TGG chr2 60461848 60461867 60461864 +
aggaagggcggcttgctacc

SEQ ID NO: 157998 - DNA, 20 bp, Artificial Sequence
  Synthetic oligonucleotide; TGG chr2 60461852 60461871 60461868 +
agggcggcttgctacctggc

SEQ ID NO: 157999 - DNA, 20 bp, Artificial Sequence
  Synthetic oligonucleotide; TGG chr2 60461857 60461876 60461873 +
ggcttgctacctggctggaa

SEQ ID NO: 158000 - DNA, 20 bp, Artificial Sequence
  Synthetic oligonucleotide; CAG chr2 60461863 60461882 60461879 +
ctacctggctggaatggttg

SEQ ID NO: 158001 - DNA, 20 bp, Artificial Sequence
  Synthetic oligonucleotide; TAG chr2 60461877 60461896 60461893 +
tggttgcagtaacctttgca

SEQ ID NO: 158002 - DNA, 20 bp, Artificial Sequence
  Synthetic oligonucleotide; AGG chr2 60461878 60461897 60461894 +
ggttgcagtaacctttgcat

SEQ ID NO: 158003 - DNA, 20 bp, Artificial Sequence
  Synthetic oligonucleotide; GGG chr2 60461879 60461898 60461895 +
gttgcagtaacctttgcata

SEQ ID NO: 158004 - DNA, 20 bp, Artificial Sequence
  Synthetic oligonucleotide; TGG chr2 60461883 60461902 60461899 +
cagtaacctttgcatagggc

SEQ ID NO: 158005 - DNA, 20 bp, Artificial Sequence
  Synthetic oligonucleotide; GGG chr2 60461884 60461903 60461900 +
agtaacctttgcatagggct

SEQ ID NO: 158006 - DNA, 20 bp, Artificial Sequence
  Synthetic oligonucleotide; CGG chr2 60461888 60461907 60461904 +
acctttgcatagggctgggc

SEQ ID NO: 158007 - DNA, 20 bp, Artificial Sequence
  Synthetic oligonucleotide; TGG chr2 60461893 60461912 60461909 +
tgcatagggctgggccggcc

SEQ ID NO: 158008 - DNA, 20 bp, Artificial Sequence
  Synthetic oligonucleotide; GGG chr2 60461894 60461913 60461910 +
gcatagggctgggccggcct

SEQ ID NO: 158009 - DNA, 20 bp, Artificial Sequence
  Synthetic oligonucleotide; GGG chr2 60461895 60461914 60461911 +
catagggctgggccggcctg

SEQ ID NO: 158010 - DNA, 20 bp, Artificial Sequence
  Synthetic oligonucleotide; CAG chr2 60461899 60461918 60461915 +
gggctgggccggcctgggga

SEQ ID NO: 158011 - DNA, 20 bp, Artificial Sequence
  Synthetic oligonucleotide; CGG chr2 60461902 60461921 60461918 +
ctgggccggcctggggacag

SEQ ID NO: 158012 - DNA, 20 bp, Artificial Sequence
  Synthetic oligonucleotide; TGG chr2 60461905 60461924 60461921 +
ggccggcctggggacagcgg

SEQ ID NO: 158013 - DNA, 20 bp, Artificial Sequence
  Synthetic oligonucleotide; GGG chr2 60461906 60461925 60461922 +
gccggcctggggacagcggt

SEQ ID NO: 158014 - DNA, 20 bp, Artificial Sequence
  Synthetic oligonucleotide; TAG chr2 60461910 60461929 60461926 +
gcctggggacagcggtgggc

SEQ ID NO: 158015 - DNA, 20 bp, Artificial Sequence
  Synthetic oligonucleotide; CAG chr2 60461926 60461945 60461942 +
gggctagacgtgttccctgc

SEQ ID NO: 158016 - DNA, 20 bp, Artificial Sequence
  Synthetic oligonucleotide; AAG chr2 60461935 60461954 60461951 +
gtgttccctgccagctctct

SEQ ID NO: 158017 - DNA, 20 bp, Artificial Sequence
  Synthetic oligonucleotide; TAG chr2 60461943 60461962 60461959 +
tgccagctctctaagtctcc

SEQ ID NO: 158018 - DNA, 20 bp, Artificial Sequence
  Synthetic oligonucleotide; GAG chr2 60461945 60461964 60461961 +
ccagctctctaagtctccta

SEQ ID NO: 158019 - DNA, 20 bp, Artificial Sequence
  Synthetic oligonucleotide; TGG chr2 60461955 60461974 60461971 +
aagtctcctagagaaatcca

SEQ ID NO: 158020 - DNA, 20 bp, Artificial Sequence
  Synthetic oligonucleotide; CGG chr2 60461958 60461977 60461974 +
tctcctagagaaatccatgg

SEQ ID NO: 158021 - DNA, 20 bp, Artificial Sequence
  Synthetic oligonucleotide; GGG chr2 60461959 60461978 60461975 +
ctcctagagaaatccatggc

SEQ ID NO: 158022 - DNA, 20 bp, Artificial Sequence
  Synthetic oligonucleotide; GAG chr2 60461961 60461980 60461977 +
cctagagaaatccatggcgg

SEQ ID NO: 158023 - DNA, 20 bp, Artificial Sequence
  Synthetic oligonucleotide; AGG chr2 60461962 60461981 60461978 +
ctagagaaatccatggcggg

SEQ ID NO: 158024 - DNA, 20 bp, Artificial Sequence
  Synthetic oligonucleotide; TAG chr2 60461970 60461989 60461986 +
atccatggcgggaggctcca

SEQ ID NO: 158025 - DNA, 20 bp, Artificial Sequence
  Synthetic oligonucleotide; TGG chr2 60461977 60461996 60461993 +
gcgggaggctccatagccat

SEQ ID NO: 158026 - DNA, 20 bp, Artificial Sequence
  Synthetic oligonucleotide; CAG chr2 60461989 60462008 60462005 +
atagccattggattcaaccg

SEQ ID NO: 158027 - DNA, 20 bp, Artificial Sequence
  Synthetic oligonucleotide; AAG chr2 60462002 60462021 60462018 +
tcaaccgcagcaccctgtca

SEQ ID NO: 158028 - DNA, 20 bp, Artificial Sequence
  Synthetic oligonucleotide; AGG chr2 60462003 60462022 60462019 +
caaccgcagcaccctgtcaa

SEQ ID NO: 158029 - DNA, 20 bp, Artificial Sequence
  Synthetic oligonucleotide; CGG chr2 60462010 60462029 60462026 +
agcaccctgtcaaaggcact

SEQ ID NO: 158030 - DNA, 20 bp, Artificial Sequence
  Synthetic oligonucleotide; GGG chr2 60462011 60462030 60462027 +
gcaccctgtcaaaggcactc

SEQ ID NO: 158031 - DNA, 20 bp, Artificial Sequence
  Synthetic oligonucleotide; TGG chr2 60462017 60462036 60462033 +
tgtcaaaggcactcgggtga

SEQ ID NO: 158032 - DNA, 20 bp, Artificial Sequence
  Synthetic oligonucleotide; GGG chr2 60462018 60462037 60462034 +
gtcaaaggcactcgggtgat

SEQ ID NO: 158033 - DNA, 20 bp, Artificial Sequence
  Synthetic oligonucleotide; TGG chr2 60462021 60462040 60462037 +
aaaggcactcgggtgatggg

SEQ ID NO: 158034 - DNA, 20 bp, Artificial Sequence
  Synthetic oligonucleotide; CAG chr2 60462025 60462044 60462041 +
gcactcgggtgatgggtggc

SEQ ID NO: 158035 - DNA, 20 bp, Artificial Sequence
  Synthetic oligonucleotide; AGG chr2 60462026 60462045 60462042 +
cactcgggtgatgggtggcc

SEQ ID NO: 158036 - DNA, 20 bp, Artificial Sequence
  Synthetic oligonucleotide; GGG chr2 60462027 60462046 60462043 +
actcgggtgatgggtggcca

SEQ ID NO: 158037 - DNA, 20 bp, Artificial Sequence
  Synthetic oligonucleotide; CAG chr2 60462046 60462065 60462062 +
agggccatctcttccgcccc

SEQ ID NO: 158038 - DNA, 20 bp, Artificial Sequence
  Synthetic oligonucleotide; AGG chr2 60462047 60462066 60462063 +
gggccatctcttccgccccc

SEQ ID NO: 158039 - DNA, 20 bp, Artificial Sequence
  Synthetic oligonucleotide; CGG chr2 60462059 60462078 60462075 +
ccgcccccaggcgctctatg

SEQ ID NO: 158040 - DNA, 20 bp, Artificial Sequence
  Synthetic oligonucleotide; TGG chr2 60462062 60462081 60462078 +
cccccaggcgctctatgcgg

SEQ ID NO: 158041 - DNA, 20 bp, Artificial Sequence
  Synthetic oligonucleotide; GGG chr2 60462063 60462082 60462079 +
ccccaggcgctctatgcggt

SEQ ID NO: 158042 - DNA, 20 bp, Artificial Sequence
  Synthetic oligonucleotide; GGG chr2 60462064 60462083 60462080 +
cccaggcgctctatgcggtg

SEQ ID NO: 158043 - DNA, 20 bp, Artificial Sequence
  Synthetic oligonucleotide; GGG chr2 60462065 60462084 60462081 +
ccaggcgctctatgcggtgg

SEQ ID NO: 158044 - DNA, 20 bp, Artificial Sequence
  Synthetic oligonucleotide; AAG chr2 60462071 60462090 60462087 +
gctctatgcggtgggggtcc

SEQ ID NO: 158045 - DNA, 20 bp, Artificial Sequence
  Synthetic oligonucleotide; CGG chr2 60462082 60462101 60462098 +
tgggggtccaagtgatgtct

SEQ ID NO: 158046 - DNA, 20 bp, Artificial Sequence
  Synthetic oligonucleotide; TGG chr2 60462085 60462104 60462101 +
gggtccaagtgatgtctcgg

SEQ ID NO: 158047 - DNA, 20 bp, Artificial Sequence
  Synthetic oligonucleotide; TGG chr2 60462088 60462107 60462104 +
tccaagtgatgtctcggtgg

SEQ ID NO: 158048 - DNA, 20 bp, Artificial Sequence
  Synthetic oligonucleotide; CAG chr2 60462097 60462116 60462113 +
tgtctcggtggtggactaaa

SEQ ID NO: 158049 - DNA, 20 bp, Artificial Sequence
  Synthetic oligonucleotide; AGG chr2 60462098 60462117 60462114 +
gtctcggtggtggactaaac

SEQ ID NO: 158050 - DNA, 20 bp, Artificial Sequence
  Synthetic oligonucleotide; GGG chr2 60462099 60462118 60462115 +
tctcggtggtggactaaaca

SEQ ID NO: 158051 - DNA, 20 bp, Artificial Sequence
  Synthetic oligonucleotide; GGG chr2 60462100 60462119 60462116 +
ctcggtggtggactaaacag

SEQ ID NO: 158052 - DNA, 20 bp, Artificial Sequence
  Synthetic oligonucleotide; GGG chr2 60462101 60462120 60462117 +
tcggtggtggactaaacagg

SEQ ID NO: 158053 - DNA, 20 bp, Artificial Sequence
  Synthetic oligonucleotide; GGG chr2 60462102 60462121 60462118 +
cggtggtggactaaacaggg

SEQ ID NO: 158054 - DNA, 20 bp, Artificial Sequence
  Synthetic oligonucleotide; GGG chr2 60462103 60462122 60462119 +
ggtggtggactaaacagggg

SEQ ID NO: 158055 - DNA, 20 bp, Artificial Sequence
  Synthetic oligonucleotide; GAG chr2 60462105 60462124 60462121 +
tggtggactaaacagggggg

SEQ ID NO: 158056 - DNA, 20 bp, Artificial Sequence
  Synthetic oligonucleotide; TGG chr2 60462108 60462127 60462124 +
tggactaaacagggggggag

SEQ ID NO: 158057 - DNA, 20 bp, Artificial Sequence
  Synthetic oligonucleotide; GGG chr2 60462109 60462128 60462125 +
ggactaaacagggggggagt

SEQ ID NO: 158058 - DNA, 20 bp, Artificial Sequence
  Synthetic oligonucleotide; TGG chr2 60462112 60462131 60462128 +
ctaaacagggggggagtggg

SEQ ID NO: 158059 - DNA, 20 bp, Artificial Sequence
  Synthetic oligonucleotide; AAG chr2 60462116 60462135 60462132 +
acagggggggagtgggtgga

SEQ ID NO: 158060 - DNA, 20 bp, Artificial Sequence
  Synthetic oligonucleotide; CAG chr2 60462130 60462149 60462146 +
ggtggaaagcgcccttctgc

SEQ ID NO: 158061 - DNA, 20 bp, Artificial Sequence
  Synthetic oligonucleotide; AGG chr2 60462131 60462150 60462147 +
gtggaaagcgcccttctgcc

SEQ ID NO: 158062 - DNA, 20 bp, Artificial Sequence
  Synthetic oligonucleotide; CGG chr2 60462135 60462154 60462151 +
aaagcgcccttctgccaggc

SEQ ID NO: 158063 - DNA, 20 bp, Artificial Sequence
  Synthetic oligonucleotide; AAG chr2 60462138 60462157 60462154 +
gcgcccttctgccaggccgg

SEQ ID NO: 158064 - DNA, 20 bp, Artificial Sequence
  Synthetic oligonucleotide; TGG chr2 60462160 60462179 60462176 +
gcctctctcgatactgatcc

SEQ ID NO: 158065 - DNA, 20 bp, Artificial Sequence
  Synthetic oligonucleotide; TAG chr2 60462169 60462188 60462185 +
gatactgatcctggtattct

SEQ ID NO: 158066 - DNA, 20 bp, Artificial Sequence
  Synthetic oligonucleotide; CAG chr2 60462172 60462191 60462188 +
actgatcctggtattcttag

SEQ ID NO: 158067 - DNA, 20 bp, Artificial Sequence
  Synthetic oligonucleotide; AGG chr2 60462173 60462192 60462189 +
ctgatcctggtattcttagc

SEQ ID NO: 158068 - DNA, 20 bp, Artificial Sequence
  Synthetic oligonucleotide; AAG chr2 60462179 60462198 60462195 +
ctggtattcttagcaggtta

SEQ ID NO: 158069 - DNA, 20 bp, Artificial Sequence
  Synthetic oligonucleotide; AGG chr2 60462180 60462199 60462196 +
tggtattcttagcaggttaa

SEQ ID NO: 158070 - DNA, 20 bp, Artificial Sequence
  Synthetic oligonucleotide; GGG chr2 60462181 60462200 60462197 +
ggtattcttagcaggttaaa

SEQ ID NO: 158071 - DNA, 20 bp, Artificial Sequence
  Synthetic oligonucleotide; GGG chr2 60462182 60462201 60462198 +
gtattcttagcaggttaaag

SEQ ID NO: 158072 - DNA, 20 bp, Artificial Sequence
  Synthetic oligonucleotide; TGG chr2 60462209 60462228 60462225 +
tgtctgcaatatgaatccca

SEQ ID NO: 158073 - DNA, 20 bp, Artificial Sequence
  Synthetic oligonucleotide; GAG chr2 60462211 60462230 60462227 +
tctgcaatatgaatcccatg

SEQ ID NO: 158074 - DNA, 20 bp, Artificial Sequence
  Synthetic oligonucleotide; GAG chr2 60462213 60462232 60462229 +
tgcaatatgaatcccatgga

SEQ ID NO: 158075 - DNA, 20 bp, Artificial Sequence
  Synthetic oligonucleotide; AGG chr2 60462214 60462233 60462230 +
gcaatatgaatcccatggag

SEQ ID NO: 158076 - DNA, 20 bp, Artificial Sequence
  Synthetic oligonucleotide; TGG chr2 60462217 60462236 60462233 +
atatgaatcccatggagagg

SEQ ID NO: 158077 - DNA, 20 bp, Artificial Sequence
  Synthetic oligonucleotide; TGG chr2 60462221 60462240 60462237 +
gaatcccatggagaggtggc

SEQ ID NO: 158078 - DNA, 20 bp, Artificial Sequence
  Synthetic oligonucleotide; GGG chr2 60462222 60462241 60462238 +
aatcccatggagaggtggct

SEQ ID NO: 158079 - DNA, 20 bp, Artificial Sequence
  Synthetic oligonucleotide; AAG chr2 60462225 60462244 60462241 +
cccatggagaggtggctggg

SEQ ID NO: 158080 - DNA, 20 bp, Artificial Sequence
  Synthetic oligonucleotide; AGG chr2 60462226 60462245 60462242 +
ccatggagaggtggctggga

SEQ ID NO: 158081 - DNA, 20 bp, Artificial Sequence
  Synthetic oligonucleotide; TAG chr2 60462241 60462260 60462257 +
tgggaaggacattctgcacc

SEQ ID NO: 158082 - DNA, 20 bp, Artificial Sequence
  Synthetic oligonucleotide; AAG chr2 60462249 60462268 60462265 +
acattctgcacctagtcctg

SEQ ID NO: 158083 - DNA, 20 bp, Artificial Sequence
  Synthetic oligonucleotide; AGG chr2 60462250 60462269 60462266 +
cattctgcacctagtcctga

SEQ ID NO: 158084 - DNA, 20 bp, Artificial Sequence
  Synthetic oligonucleotide; GGG chr2 60462251 60462270 60462267 +
attctgcacctagtcctgaa

SEQ ID NO: 158085 - DNA, 20 bp, Artificial Sequence
  Synthetic oligonucleotide; CGG chr2 60462265 60462284 60462281 +
cctgaagggataccaacccg

SEQ ID NO: 158086 - DNA, 20 bp, Artificial Sequence
  Synthetic oligonucleotide; GGG chr2 60462266 60462285 60462282 +
ctgaagggataccaacccgc

SEQ ID NO: 158087 - DNA, 20 bp, Artificial Sequence
  Synthetic oligonucleotide; GGG chr2 60462267 60462286 60462283 +
tgaagggataccaacccgcg

SEQ ID NO: 158088 - DNA, 20 bp, Artificial Sequence
  Synthetic oligonucleotide; CAG chr2 60462271 60462290 60462287 +
gggataccaacccgcggggt

SEQ ID NO: 158089 - DNA, 20 bp, Artificial Sequence
  Synthetic oligonucleotide; AGG chr2 60462272 60462291 60462288 +
ggataccaacccgcggggtc

SEQ ID NO: 158090 - DNA, 20 bp, Artificial Sequence
  Synthetic oligonucleotide; GGG chr2 60462273 60462292 60462289 +
gataccaacccgcggggtca

SEQ ID NO: 158091 - DNA, 20 bp, Artificial Sequence
  Synthetic oligonucleotide; GGG chr2 60462274 60462293 60462290 +
ataccaacccgcggggtcag

SEQ ID NO: 158092 - DNA, 20 bp, Artificial Sequence
  Synthetic oligonucleotide; AAG chr2 60462296 60462315 60462312 +
gacttccgtgttcgctttct

SEQ ID NO: 158093 - DNA, 20 bp, Artificial Sequence
  Synthetic oligonucleotide; TAG chr2 60462299 60462318 60462315 +
ttccgtgttcgctttctaag

SEQ ID NO: 158094 - DNA, 20 bp, Artificial Sequence
  Synthetic oligonucleotide; GAG chr2 60462315 60462334 60462331 +
taagtagattcttaatccat

SEQ ID NO: 158095 - DNA, 20 bp, Artificial Sequence
  Synthetic oligonucleotide; AAG chr2 60462335 60462354 60462351 +
gagtgttctgtgcgtgttgc

SEQ ID NO: 158096 - DNA, 20 bp, Artificial Sequence
  Synthetic oligonucleotide; GAG chr2 60462337 60462356 60462353 +
gtgttctgtgcgtgttgcaa

SEQ ID NO: 158097 - DNA, 20 bp, Artificial Sequence
  Synthetic oligonucleotide; TGG chr2 60462351 60462370 60462367 +
ttgcaagagaaaccatgcac

SEQ ID NO: 158098 - DNA, 20 bp, Artificial Sequence
  Synthetic oligonucleotide; TGG chr2 60462358 60462377 60462374 +
agaaaccatgcactggtgaa

SEQ ID NO: 158099 - DNA, 20 bp, Artificial Sequence
  Synthetic oligonucleotide; AAG chr2 60462369 60462388 60462385 +
actggtgaatggctgtttgc

SEQ ID NO: 158100 - DNA, 20 bp, Artificial Sequence
  Synthetic oligonucleotide; TAG chr2 60462383 60462402 60462399 +
gtttgcaagttgtacatgtg

SEQ ID NO: 158101 - DNA, 20 bp, Artificial Sequence
  Synthetic oligonucleotide; TGG chr2 60462390 60462409 60462406 +
agttgtacatgtgtagctgc

SEQ ID NO: 158102 - DNA, 20 bp, Artificial Sequence
  Synthetic oligonucleotide; GGG chr2 60462391 60462410 60462407 +
gttgtacatgtgtagctgct

SEQ ID NO: 158103 - DNA, 20 bp, Artificial Sequence
  Synthetic oligonucleotide; GAG chr2 60462445 60462464 60462461 +
aacatcaatgtttaatcact

SEQ ID NO: 158104 - DNA, 20 bp, Artificial Sequence
  Synthetic oligonucleotide; AGG chr2 60462446 60462465 60462462 +
acatcaatgtttaatcactg

SEQ ID NO: 158105 - DNA, 20 bp, Artificial Sequence
  Synthetic oligonucleotide; CGG chr2 60462449 60462468 60462465 +
tcaatgtttaatcactgagg

SEQ ID NO: 158106 - DNA, 20 bp, Artificial Sequence
  Synthetic oligonucleotide; GGG chr2 60462450 60462469 60462466 +
caatgtttaatcactgaggc

SEQ ID NO: 158107 - DNA, 20 bp, Artificial Sequence
  Synthetic oligonucleotide; CAG chr2 60462456 60462475 60462472 +
ttaatcactgaggcgggcat

SEQ ID NO: 158108 - DNA, 20 bp, Artificial Sequence
  Synthetic oligonucleotide; CAG chr2 60462484 60462503 60462500 +
gcttatttatgttccacctc

SEQ ID NO: 158109 - DNA, 20 bp, Artificial Sequence
  Synthetic oligonucleotide; AAG chr2 60462514 60462533 60462530 +
tgcccccacccctcaacccc

SEQ ID NO: 158110 - DNA, 20 bp, Artificial Sequence
  Synthetic oligonucleotide; AGG chr2 60462515 60462534 60462531 +
gcccccacccctcaacccca

SEQ ID NO: 158111 - DNA, 20 bp, Artificial Sequence
  Synthetic oligonucleotide; AAG chr2 60462521 60462540 60462537 +
acccctcaaccccaaggcct

SEQ ID NO: 158112 - DNA, 20 bp, Artificial Sequence
  Synthetic oligonucleotide; TGG chr2 60462549 60462568 60462565 +
actgacctaccccctgtgcc

SEQ ID NO: 158113 - DNA, 20 bp, Artificial Sequence
  Synthetic oligonucleotide; GAG chr2 60462559 60462578 60462575 +
cccctgtgcctggcacgtct

SEQ ID NO: 158114 - DNA, 20 bp, Artificial Sequence
  Synthetic oligonucleotide; TGG chr2 60462564 60462583 60462580 +
gtgcctggcacgtctgagca

SEQ ID NO: 158115 - DNA, 20 bp, Artificial Sequence
  Synthetic oligonucleotide; GGG chr2 60462565 60462584 60462581 +
tgcctggcacgtctgagcat

SEQ ID NO: 158116 - DNA, 20 bp, Artificial Sequence
  Synthetic oligonucleotide; CAG chr2 60462572 60462591 60462588 +
cacgtctgagcatgggtacc

SEQ ID NO: 158117 - DNA, 20 bp, Artificial Sequence
  Synthetic oligonucleotide; TGG chr2 60462582 60462601 60462598 +
catgggtacccagtaaatat

SEQ ID NO: 158118 - DNA, 20 bp, Artificial Sequence
  Synthetic oligonucleotide; CAG chr2 60462612 60462631 60462628 +
gatcttcctgccattaaact

SEQ ID NO: 158119 - DNA, 20 bp, Artificial Sequence
  Synthetic oligonucleotide; TAG chr2 60462618 60462637 60462634 +
cctgccattaaactcagttc

SEQ ID NO: 158120 - DNA, 20 bp, Artificial Sequence
  Synthetic oligonucleotide; AAG chr2 60462642 60462661 60462658 +
aattttatatccaatcccca

SEQ ID NO: 158121 - DNA, 20 bp, Artificial Sequence
  Synthetic oligonucleotide; CAG chr2 60462645 60462664 60462661 +
tttatatccaatccccaaag

SEQ ID NO: 158122 - DNA, 20 bp, Artificial Sequence
  Synthetic oligonucleotide; CAG chr2 60462660 60462679 60462676 +
caaagcagaaaaatcctgac

SEQ ID NO: 158123 - DNA, 20 bp, Artificial Sequence
  Synthetic oligonucleotide; TGG chr2 60462666 60462685 60462682 +
agaaaaatcctgaccagttc

SEQ ID NO: 158124 - DNA, 20 bp, Artificial Sequence
  Synthetic oligonucleotide; GAG chr2 60462672 60462691 60462688 +
atcctgaccagttctggctt

SEQ ID NO: 158125 - DNA, 20 bp, Artificial Sequence
  Synthetic oligonucleotide; AGG chr2 60462673 60462692 60462689 +
tcctgaccagttctggcttg

SEQ ID NO: 158126 - DNA, 20 bp, Artificial Sequence
  Synthetic oligonucleotide; AAG chr2 60462679 60462698 60462695 +
ccagttctggcttgaggatg

SEQ ID NO: 158127 - DNA, 20 bp, Artificial Sequence
  Synthetic oligonucleotide; AGG chr2 60462680 60462699 60462696 +
cagttctggcttgaggatga

SEQ ID NO: 158128 - DNA, 20 bp, Artificial Sequence
  Synthetic oligonucleotide; TAG chr2 60462694 60462713 60462710 +
ggatgaaggtccctacattc

SEQ ID NO: 158129 - DNA, 20 bp, Artificial Sequence
  Synthetic oligonucleotide; AGG chr2 60462695 60462714 60462711 +
gatgaaggtccctacattct

SEQ ID NO: 158130 - DNA, 20 bp, Artificial Sequence
  Synthetic oligonucleotide; CAG chr2 60462726 60462745 60462742 +
caaatgtcttctaaactttc

SEQ ID NO: 158131 - DNA, 20 bp, Artificial Sequence
  Synthetic oligonucleotide; CAG chr2 60462735 60462754 60462751 +
tctaaactttccagttccat

SEQ ID NO: 158132 - DNA, 20 bp, Artificial Sequence
  Synthetic oligonucleotide; TAG chr2 60462741 60462760 60462757 +
ctttccagttccatcagctg

SEQ ID NO: 158133 - DNA, 20 bp, Artificial Sequence
  Synthetic oligonucleotide; TGG chr2 60462746 60462765 60462762 +
cagttccatcagctgtagtt

SEQ ID NO: 158134 - DNA, 20 bp, Artificial Sequence
  Synthetic oligonucleotide; GGG chr2 60462747 60462766 60462763 +
agttccatcagctgtagttt

SEQ ID NO: 158135 - DNA, 20 bp, Artificial Sequence
  Synthetic oligonucleotide; GGG chr2 60462748 60462767 60462764 +
gttccatcagctgtagtttg

SEQ ID NO: 158136 - DNA, 20 bp, Artificial Sequence
  Synthetic oligonucleotide; AAG chr2 60462752 60462771 60462768 +
catcagctgtagtttggggc

SEQ ID NO: 158137 - DNA, 20 bp, Artificial Sequence
  Synthetic oligonucleotide; AAG chr2 60462792 60462811 60462808 +
gcctctgtttcctccttgtt

SEQ ID NO: 158138 - DNA, 20 bp, Artificial Sequence
  Synthetic oligonucleotide; GAG chr2 60462796 60462815 60462812 +
ctgtttcctccttgttaagt

SEQ ID NO: 158139 - DNA, 20 bp, Artificial Sequence
  Synthetic oligonucleotide; TGG chr2 60462804 60462823 60462820 +
tccttgttaagtgagaaact

SEQ ID NO: 158140 - DNA, 20 bp, Artificial Sequence
  Synthetic oligonucleotide; AAG chr2 60462809 60462828 60462825 +
gttaagtgagaaacttggac

SEQ ID NO: 158141 - DNA, 20 bp, Artificial Sequence
  Synthetic oligonucleotide; AGG chr2 60462810 60462829 60462826 +
ttaagtgagaaacttggaca

SEQ ID NO: 158142 - DNA, 20 bp, Artificial Sequence
  Synthetic oligonucleotide; AAG chr2 60462819 60462838 60462835 +
aaacttggacaaggtgaccc

SEQ ID NO: 158143 - DNA, 20 bp, Artificial Sequence
  Synthetic oligonucleotide; AGG chr2 60462820 60462839 60462836 +
aacttggacaaggtgaccca

SEQ ID NO: 158144 - DNA, 20 bp, Artificial Sequence
  Synthetic oligonucleotide; TGG chr2 60462831 60462850 60462847 +
ggtgacccaaggaaactttt

SEQ ID NO: 158145 - DNA, 20 bp, Artificial Sequence
  Synthetic oligonucleotide; CAG chr2 60462846 60462865 60462862 +
ctttttggcttcctaaatcc

SEQ ID NO: 158146 - DNA, 20 bp, Artificial Sequence
  Synthetic oligonucleotide; TGG chr2 60462864 60462883 60462880 +
cccagctttctattcccccc

SEQ ID NO: 158147 - DNA, 20 bp, Artificial Sequence
  Synthetic oligonucleotide; GGG chr2 60462865 60462884 60462881 +
ccagctttctattcccccct

SEQ ID NO: 158148 - DNA, 20 bp, Artificial Sequence
  Synthetic oligonucleotide; CAG chr2 60462871 60462890 60462887 +
ttctattcccccctgggtga

SEQ ID NO: 158149 - DNA, 20 bp, Artificial Sequence
  Synthetic oligonucleotide; AGG chr2 60462872 60462891 60462888 +
tctattcccccctgggtgac

SEQ ID NO: 158150 - DNA, 20 bp, Artificial Sequence
  Synthetic oligonucleotide; TAG chr2 60462888 60462907 60462904 +
tgacaggtgaactttctaaa

SEQ ID NO: 158151 - DNA, 20 bp, Artificial Sequence
  Synthetic oligonucleotide; AGG chr2 60462889 60462908 60462905 +
gacaggtgaactttctaaat

SEQ ID NO: 158152 - DNA, 20 bp, Artificial Sequence
  Synthetic oligonucleotide; TAG chr2 60462903 60462922 60462919 +
ctaaataggcaaacatttca

SEQ ID NO: 158153 - DNA, 20 bp, Artificial Sequence
  Synthetic oligonucleotide; GAG chr2 60462905 60462924 60462921 +
aaataggcaaacatttcata

SEQ ID NO: 158154 - DNA, 20 bp, Artificial Sequence
  Synthetic oligonucleotide; AGG chr2 60462906 60462925 60462922 +
aataggcaaacatttcatag

SEQ ID NO: 158155 - DNA, 20 bp, Artificial Sequence
  Synthetic oligonucleotide; AAG chr2 60462917 60462936 60462933 +
atttcatagaggtatcaaaa

SEQ ID NO: 158156 - DNA, 20 bp, Artificial Sequence
  Synthetic oligonucleotide; AGG chr2 60462918 60462937 60462934 +
tttcatagaggtatcaaaaa

SEQ ID NO: 158157 - DNA, 20 bp, Artificial Sequence
  Synthetic oligonucleotide; GGG chr2 60462919 60462938 60462935 +
ttcatagaggtatcaaaaaa

SEQ ID NO: 158158 - DNA, 20 bp, Artificial Sequence
  Synthetic oligonucleotide; GGG chr2 60462920 60462939 60462936 +
tcatagaggtatcaaaaaag

SEQ ID NO: 158159 - DNA, 20 bp, Artificial Sequence
  Synthetic oligonucleotide; AAG chr2 60462923 60462942 60462939 +
tagaggtatcaaaaaagggg

SEQ ID NO: 158160 - DNA, 20 bp, Artificial Sequence
  Synthetic oligonucleotide; AAG chr2 60462926 60462945 60462942 +
aggtatcaaaaaaggggaag

SEQ ID NO: 158161 - DNA, 20 bp, Artificial Sequence
  Synthetic oligonucleotide; AGG chr2 60462927 60462946 60462943 +
ggtatcaaaaaaggggaaga

SEQ ID NO: 158162 - DNA, 20 bp, Artificial Sequence
  Synthetic oligonucleotide; TGG chr2 60462951 60462970 60462967 +
caactcactacaatgttcta

SEQ ID NO: 158163 - DNA, 20 bp, Artificial Sequence
  Synthetic oligonucleotide; AAG chr2 60462959 60462978 60462975 +
tacaatgttctatggcccta

SEQ ID NO: 158164 - DNA, 20 bp, Artificial Sequence
  Synthetic oligonucleotide; CAG chr2 60462969 60462988 60462985 +
tatggccctaaagatgcttt

SEQ ID NO: 158165 - DNA, 20 bp, Artificial Sequence
  Synthetic oligonucleotide; TAG chr2 60462975 60462994 60462991 +
cctaaagatgctttcagcat

SEQ ID NO: 158166 - DNA, 20 bp, Artificial Sequence
  Synthetic oligonucleotide; GAG chr2 60463012 60463031 60463028 +
attgttgatattgttaaaat

SEQ ID NO: 158167 - DNA, 20 bp, Artificial Sequence
  Synthetic oligonucleotide; GAG chr2 60463014 60463033 60463030 +
tgttgatattgttaaaatga

SEQ ID NO: 158168 - DNA, 20 bp, Artificial Sequence
  Synthetic oligonucleotide; AGG chr2 60463015 60463034 60463031 +
gttgatattgttaaaatgag

SEQ ID NO: 158169 - DNA, 20 bp, Artificial Sequence
  Synthetic oligonucleotide; GGG chr2 60463016 60463035 60463032 +
ttgatattgttaaaatgaga

SEQ ID NO: 158170 - DNA, 20 bp, Artificial Sequence
  Synthetic oligonucleotide; TGG chr2 60463038 60463057 60463054 +
gtactcataaaatacttccg

SEQ ID NO: 158171 - DNA, 20 bp, Artificial Sequence
  Synthetic oligonucleotide; AAG chr2 60463045 60463064 60463061 +
taaaatacttccgtggaaaa

SEQ ID NO: 158172 - DNA, 20 bp, Artificial Sequence
  Synthetic oligonucleotide; TAG chr2 60463050 60463069 60463066 +
tacttccgtggaaaaaagac

SEQ ID NO: 158173 - DNA, 20 bp, Artificial Sequence
  Synthetic oligonucleotide; CAG chr2 60463069 60463088 60463085 +
ctagcaacattctcacaccc

SEQ ID NO: 158174 - DNA, 20 bp, Artificial Sequence
  Synthetic oligonucleotide; TGG chr2 60463076 60463095 60463092 +
cattctcacaccccagactg

SEQ ID NO: 158175 - DNA, 20 bp, Artificial Sequence
  Synthetic oligonucleotide; GGG chr2 60463077 60463096 60463093 +
attctcacaccccagactgt

SEQ ID NO: 158176 - DNA, 20 bp, Artificial Sequence
  Synthetic oligonucleotide; GAG chr2 60463079 60463098 60463095 +
tctcacaccccagactgtgg

SEQ ID NO: 158177 - DNA, 20 bp, Artificial Sequence
  Synthetic oligonucleotide; AGG chr2 60463080 60463099 60463096 +
ctcacaccccagactgtggg

SEQ ID NO: 158178 - DNA, 20 bp, Artificial Sequence
  Synthetic oligonucleotide; CAG chr2 60463085 60463104 60463101 +
accccagactgtgggaggat

SEQ ID NO: 158179 - DNA, 20 bp, Artificial Sequence
  Synthetic oligonucleotide; GAG chr2 60463089 60463108 60463105 +
cagactgtgggaggatcagt

SEQ ID NO: 158180 - DNA, 20 bp, Artificial Sequence
  Synthetic oligonucleotide; TGG chr2 60463101 60463120 60463117 +
ggatcagtgagtcccaattt

SEQ ID NO: 158181 - DNA, 20 bp, Artificial Sequence
  Synthetic oligonucleotide; TGG chr2 60463119 60463138 60463135 +
tttggttccacaacacccca

SEQ ID NO: 158182 - DNA, 20 bp, Artificial Sequence
  Synthetic oligonucleotide; GGG chr2 60463120 60463139 60463136 +
ttggttccacaacaccccat

SEQ ID NO: 158183 - DNA, 20 bp, Artificial Sequence
  Synthetic oligonucleotide; GGG chr2 60463121 60463140 60463137 +
tggttccacaacaccccatg

SEQ ID NO: 158184 - DNA, 20 bp, Artificial Sequence
  Synthetic oligonucleotide; AAG chr2 60463142 60463161 60463158 +
ggacgtccatttttatctca

SEQ ID NO: 158185 - DNA, 20 bp, Artificial Sequence
  Synthetic oligonucleotide; AAG chr2 60463163 60463182 60463179 +
agaatgtttaaaaaatctga

SEQ ID NO: 158186 - DNA, 20 bp, Artificial Sequence
  Synthetic oligonucleotide; CAG chr2 60463178 60463197 60463194 +
tctgaaagaaaaacttcatt

SEQ ID NO: 158187 - DNA, 20 bp, Artificial Sequence
  Synthetic oligonucleotide; CGG chr2 60463187 60463206 60463203 +
aaaacttcattcagatttaa

SEQ ID NO: 158188 - DNA, 20 bp, Artificial Sequence
  Synthetic oligonucleotide; TAG chr2 60463191 60463210 60463207 +
cttcattcagatttaacgga

SEQ ID NO: 158189 - DNA, 20 bp, Artificial Sequence
  Synthetic oligonucleotide; AGG chr2 60463192 60463211 60463208 +
ttcattcagatttaacggat

SEQ ID NO: 158190 - DNA, 20 bp, Artificial Sequence
  Synthetic oligonucleotide; TAG chr2 60463209 60463228 60463225 +
gataggctgtatccaatctt

SEQ ID NO: 158191 - DNA, 20 bp, Artificial Sequence
  Synthetic oligonucleotide; AGG chr2 60463210 60463229 60463226 +
ataggctgtatccaatcttt

SEQ ID NO: 158192 - DNA, 20 bp, Artificial Sequence
  Synthetic oligonucleotide; GAG chr2 60463212 60463231 60463228 +
aggctgtatccaatctttag

SEQ ID NO: 158193 - DNA, 20 bp, Artificial Sequence
  Synthetic oligonucleotide; CGG chr2 60463223 60463242 60463239 +
aatctttaggagttgtcccc

SEQ ID NO: 158194 - DNA, 20 bp, Artificial Sequence
  Synthetic oligonucleotide; CAG chr2 60463227 60463246 60463243 +
tttaggagttgtcccccggt

SEQ ID NO: 158195 - DNA, 20 bp, Artificial Sequence
  Synthetic oligonucleotide; AAG chr2 60463238 60463257 60463254 +
tcccccggtcagacaaatgc

SEQ ID NO: 158196 - DNA, 20 bp, Artificial Sequence
  Synthetic oligonucleotide; TGG chr2 60463243 60463262 60463259 +
cggtcagacaaatgcaagtc

SEQ ID NO: 158197 - DNA, 20 bp, Artificial Sequence
  Synthetic oligonucleotide; AAG chr2 60463248 60463267 60463264 +
agacaaatgcaagtctggaa

SEQ ID NO: 158198 - DNA, 20 bp, Artificial Sequence
  Synthetic oligonucleotide; TAG chr2 60463252 60463271 60463268 +
aaatgcaagtctggaaaagt

SEQ ID NO: 158199 - DNA, 20 bp, Artificial Sequence
  Synthetic oligonucleotide; AGG chr2 60463253 60463272 60463269 +
aatgcaagtctggaaaagtt

SEQ ID NO: 158200 - DNA, 20 bp, Artificial Sequence
  Synthetic oligonucleotide; GAG chr2 60463255 60463274 60463271 +
tgcaagtctggaaaagttag

SEQ ID NO: 158201 - DNA, 20 bp, Artificial Sequence
  Synthetic oligonucleotide; AGG chr2 60463256 60463275 60463272 +
gcaagtctggaaaagttagg

SEQ ID NO: 158202 - DNA, 20 bp, Artificial Sequence
  Synthetic oligonucleotide; GAG chr2 60463258 60463277 60463274 +
aagtctggaaaagttaggag

SEQ ID NO: 158203 - DNA, 20 bp, Artificial Sequence
  Synthetic oligonucleotide; TGG chr2 60463261 60463280 60463277 +
tctggaaaagttaggaggag

SEQ ID NO: 158204 - DNA, 20 bp, Artificial Sequence
  Synthetic oligonucleotide; TGG chr2 60463265 60463284 60463281 +
gaaaagttaggaggagtggc

SEQ ID NO: 158205 - DNA, 20 bp, Artificial Sequence
  Synthetic oligonucleotide; AAG chr2 60463277 60463296 60463293 +
ggagtggctggtgccgactt

SEQ ID NO: 158206 - DNA, 20 bp, Artificial Sequence
  Synthetic oligonucleotide; CAG chr2 60463280 60463299 60463296 +
gtggctggtgccgacttaag

SEQ ID NO: 158207 - DNA, 20 bp, Artificial Sequence
  Synthetic oligonucleotide; CAG chr2 60463286 60463305 60463302 +
ggtgccgacttaagcagaca

SEQ ID NO: 158208 - DNA, 20 bp, Artificial Sequence
  Synthetic oligonucleotide; TAG chr2 60463294 60463313 60463310 +
cttaagcagacacagcatcc

SEQ ID NO: 158209 - DNA, 20 bp, Artificial Sequence
  Synthetic oligonucleotide; AAG chr2 60463300 60463319 60463316 +
cagacacagcatcctagttt

SEQ ID NO: 158210 - DNA, 20 bp, Artificial Sequence
  Synthetic oligonucleotide; AGG chr2 60463301 60463320 60463317 +
agacacagcatcctagttta

SEQ ID NO: 158211 - DNA, 20 bp, Artificial Sequence
  Synthetic oligonucleotide; CAG chr2 60463306 60463325 60463322 +
cagcatcctagtttaaggaa

SEQ ID NO: 158212 - DNA, 20 bp, Artificial Sequence
  Synthetic oligonucleotide; CAG chr2 60463315 60463334 60463331 +
agtttaaggaacagttaaaa

SEQ ID NO: 158213 - DNA, 20 bp, Artificial Sequence
  Synthetic oligonucleotide; CAG chr2 60463319 60463338 60463335 +
taaggaacagttaaaacagc

SEQ ID NO: 158214 - DNA, 20 bp, Artificial Sequence
  Synthetic oligonucleotide; CAG chr2 60463330 60463349 60463346 +
taaaacagccagcgccatga

SEQ ID NO: 158215 - DNA, 20 bp, Artificial Sequence
  Synthetic oligonucleotide; AGG chr2 60463331 60463350 60463347 +
aaaacagccagcgccatgac

SEQ ID NO: 158216 - DNA, 20 bp, Artificial Sequence
  Synthetic oligonucleotide; CAG chr2 60463334 60463353 60463350 +
acagccagcgccatgacagg

SEQ ID NO: 158217 - DNA, 20 bp, Artificial Sequence
  Synthetic oligonucleotide; CAG chr2 60463337 60463356 60463353 +
gccagcgccatgacaggcag

SEQ ID NO: 158218 - DNA, 20 bp, Artificial Sequence
  Synthetic oligonucleotide; AGG chr2 60463338 60463357 60463354 +
ccagcgccatgacaggcagc

SEQ ID NO: 158219 - DNA, 20 bp, Artificial Sequence
  Synthetic oligonucleotide; GAG chr2 60463343 60463362 60463359 +
gccatgacaggcagcaggct

SEQ ID NO: 158220 - DNA, 20 bp, Artificial Sequence
  Synthetic oligonucleotide; GAG chr2 60463378 60463397 60463394 +
atcctcctcctcattgtttt

SEQ ID NO: 158221 - DNA, 20 bp, Artificial Sequence
  Synthetic oligonucleotide; GAG chr2 60463380 60463399 60463396 +
cctcctcctcattgttttga

SEQ ID NO: 158222 - DNA, 20 bp, Artificial Sequence
  Synthetic oligonucleotide; AGG chr2 60463381 60463400 60463397 +
ctcctcctcattgttttgag

SEQ ID NO: 158223 - DNA, 20 bp, Artificial Sequence
  Synthetic oligonucleotide; CGG chr2 60463423 60463442 60463439 +
tatacaacatcctgcgccct

SEQ ID NO: 158224 - DNA, 20 bp, Artificial Sequence
  Synthetic oligonucleotide; TGG chr2 60463427 60463446 60463443 +
caacatcctgcgccctcggc

SEQ ID NO: 158225 - DNA, 20 bp, Artificial Sequence
  Synthetic oligonucleotide; GGG chr2 60463428 60463447 60463444 +
aacatcctgcgccctcggct

SEQ ID NO: 158226 - DNA, 20 bp, Artificial Sequence
  Synthetic oligonucleotide; CAG chr2 60463434 60463453 60463450 +
ctgcgccctcggctgggact

SEQ ID NO: 158227 - DNA, 20 bp, Artificial Sequence
  Synthetic oligonucleotide; CAG chr2 60463440 60463459 60463456 +
cctcggctgggactcagctc

SEQ ID NO: 158228 - DNA, 20 bp, Artificial Sequence
  Synthetic oligonucleotide; GAG chr2 60463445 60463464 60463461 +
gctgggactcagctccagtt

SEQ ID NO: 158229 - DNA, 20 bp, Artificial Sequence
  Synthetic oligonucleotide; AAG chr2 60463449 60463468 60463465 +
ggactcagctccagttgaga

SEQ ID NO: 158230 - DNA, 20 bp, Artificial Sequence
  Synthetic oligonucleotide; CAG chr2 60463455 60463474 60463471 +
agctccagttgagaaagaaa

SEQ ID NO: 158231 - DNA, 20 bp, Artificial Sequence
  Synthetic oligonucleotide; AAG chr2 60463459 60463478 60463475 +
ccagttgagaaagaaacaga

SEQ ID NO: 158232 - DNA, 20 bp, Artificial Sequence
  Synthetic oligonucleotide; CAG chr2 60463465 60463484 60463481 +
gagaaagaaacagaaagata

SEQ ID NO: 158233 - DNA, 20 bp, Artificial Sequence
  Synthetic oligonucleotide; CAG chr2 60463470 60463489 60463486 +
agaaacagaaagatacagtt

SEQ ID NO: 158234 - DNA, 20 bp, Artificial Sequence
  Synthetic oligonucleotide; TAG chr2 60463474 60463493 60463490 +
acagaaagatacagttcagc

SEQ ID NO: 158235 - DNA, 20 bp, Artificial Sequence
  Synthetic oligonucleotide; TGG chr2 60463484 60463503 60463500 +
acagttcagctagtcaactc

SEQ ID NO: 158236 - DNA, 20 bp, Artificial Sequence
  Synthetic oligonucleotide; CAG chr2 60463488 60463507 60463504 +
ttcagctagtcaactctggc

SEQ ID NO: 158237 - DNA, 20 bp, Artificial Sequence
  Synthetic oligonucleotide; TAG chr2 60463491 60463510 60463507 +
agctagtcaactctggccag

SEQ ID NO: 158238 - DNA, 20 bp, Artificial Sequence
  Synthetic oligonucleotide; AAG chr2 60463496 60463515 60463512 +
gtcaactctggccagtagcc

SEQ ID NO: 158239 - DNA, 20 bp, Artificial Sequence
  Synthetic oligonucleotide; TGG chr2 60463504 60463523 60463520 +
tggccagtagccaagccgtc

SEQ ID NO: 158240 - DNA, 20 bp, Artificial Sequence
  Synthetic oligonucleotide; GAG chr2 60463506 60463525 60463522 +
gccagtagccaagccgtctg

SEQ ID NO: 158241 - DNA, 20 bp, Artificial Sequence
  Synthetic oligonucleotide; GAG chr2 60463508 60463527 60463524 +
cagtagccaagccgtctgga

SEQ ID NO: 158242 - DNA, 20 bp, Artificial Sequence
  Synthetic oligonucleotide; AGG chr2 60463509 60463528 60463525 +
agtagccaagccgtctggag

SEQ ID NO: 158243 - DNA, 20 bp, Artificial Sequence
  Synthetic oligonucleotide; GGG chr2 60463510 60463529 60463526 +
gtagccaagccgtctggaga

SEQ ID NO: 158244 - DNA, 20 bp, Artificial Sequence
  Synthetic oligonucleotide; GGG chr2 60463511 60463530 60463527 +
tagccaagccgtctggagag

SEQ ID NO: 158245 - DNA, 20 bp, Artificial Sequence
  Synthetic oligonucleotide; AAG chr2 60463522 60463541 60463538 +
tctggagaggggccctgctt

SEQ ID NO: 158246 - DNA, 20 bp, Artificial Sequence
  Synthetic oligonucleotide; AAG chr2 60463547 60463566 60463563 +
acattatttcccttgctgaa

SEQ ID NO: 158247 - DNA, 20 bp, Artificial Sequence
  Synthetic oligonucleotide; AAG chr2 60463555 60463574 60463571 +
tcccttgctgaaaagaaccc

SEQ ID NO: 158248 - DNA, 20 bp, Artificial Sequence
  Synthetic oligonucleotide; GAG chr2 60463557 60463576 60463573 +
ccttgctgaaaagaacccaa

SEQ ID NO: 158249 - DNA, 20 bp, Artificial Sequence
  Synthetic oligonucleotide; TGG chr2 60463560 60463579 60463576 +
tgctgaaaagaacccaagag

SEQ ID NO: 158250 - DNA, 20 bp, Artificial Sequence
  Synthetic oligonucleotide; TGG chr2 60463575 60463594 60463591 +
aagagtggtaaatgccactt

SEQ ID NO: 158251 - DNA, 20 bp, Artificial Sequence
  Synthetic oligonucleotide; AAG chr2 60463580 60463599 60463596 +
tggtaaatgccactttggca

SEQ ID NO: 158252 - DNA, 20 bp, Artificial Sequence
  Synthetic oligonucleotide; AAG chr2 60463583 60463602 60463599 +
taaatgccactttggcaaag

SEQ ID NO: 158253 - DNA, 20 bp, Artificial Sequence
  Synthetic oligonucleotide; AGG chr2 60463584 60463603 60463600 +
aaatgccactttggcaaaga

SEQ ID NO: 158254 - DNA, 20 bp, Artificial Sequence
  Synthetic oligonucleotide; GGG chr2 60463585 60463604 60463601 +
aatgccactttggcaaagaa

SEQ ID NO: 158255 - DNA, 20 bp, Artificial Sequence
  Synthetic oligonucleotide; CAG chr2 60463589 60463608 60463605 +
ccactttggcaaagaagggc

SEQ ID NO: 158256 - DNA, 20 bp, Artificial Sequence
  Synthetic oligonucleotide; TGG chr2 60463616 60463635 60463632 +
acttcacaaaatatttcatt

SEQ ID NO: 158257 - DNA, 20 bp, Artificial Sequence
  Synthetic oligonucleotide; GGG chr2 60463617 60463636 60463633 +
cttcacaaaatatttcattt

SEQ ID NO: 158258 - DNA, 20 bp, Artificial Sequence
  Synthetic oligonucleotide; GGG chr2 60463618 60463637 60463634 +
ttcacaaaatatttcatttg

SEQ ID NO: 158259 - DNA, 20 bp, Artificial Sequence
  Synthetic oligonucleotide; GAG chr2 60463620 60463639 60463636 +
cacaaaatatttcatttggg

SEQ ID NO: 158260 - DNA, 20 bp, Artificial Sequence
  Synthetic oligonucleotide; TGG chr2 60463624 60463643 60463640 +
aaatatttcatttggggaga

SEQ ID NO: 158261 - DNA, 20 bp, Artificial Sequence
  Synthetic oligonucleotide; TGG chr2 60463643 60463662 60463659 +
atggctaaattaaatatata

SEQ ID NO: 158262 - DNA, 20 bp, Artificial Sequence
  Synthetic oligonucleotide; GGG chr2 60463644 60463663 60463660 +
tggctaaattaaatatatat

SEQ ID NO: 158263 - DNA, 20 bp, Artificial Sequence
  Synthetic oligonucleotide; GGG chr2 60463645 60463664 60463661 +
ggctaaattaaatatatatg

SEQ ID NO: 158264 - DNA, 20 bp, Artificial Sequence
  Synthetic oligonucleotide; GAG chr2 60463647 60463666 60463663 +
ctaaattaaatatatatggg

SEQ ID NO: 158265 - DNA, 20 bp, Artificial Sequence
  Synthetic oligonucleotide; TAG chr2 60463651 60463670 60463667 +
attaaatatatatggggaga

SEQ ID NO: 158266 - DNA, 20 bp, Artificial Sequence
  Synthetic oligonucleotide; TGG chr2 60463676 60463695 60463692 +
acattaaatatatatatata

SEQ ID NO: 158267 - DNA, 20 bp, Artificial Sequence
  Synthetic oligonucleotide; CAG chr2 60463692 60463711 60463708 +
tatatggaataactgaccaa

SEQ ID NO: 158268 - DNA, 20 bp, Artificial Sequence
  Synthetic oligonucleotide; TAG chr2 60463700 60463719 60463716 +
ataactgaccaacagtttac

SEQ ID NO: 158269 - DNA, 20 bp, Artificial Sequence
  Synthetic oligonucleotide; AAG chr2 60463720 60463739 60463736 +
tagtcaactgcaacattaaa

SEQ ID NO: 158270 - DNA, 20 bp, Artificial Sequence
  Synthetic oligonucleotide; AGG chr2 60463721 60463740 60463737 +
agtcaactgcaacattaaaa

SEQ ID NO: 158271 - DNA, 20 bp, Artificial Sequence
  Synthetic oligonucleotide; GGG chr2 60463722 60463741 60463738 +
gtcaactgcaacattaaaaa

SEQ ID NO: 158272 - DNA, 20 bp, Artificial Sequence
  Synthetic oligonucleotide; CAG chr2 60463725 60463744 60463741 +
aactgcaacattaaaaaggg

SEQ ID NO: 158273 - DNA, 20 bp, Artificial Sequence
  Synthetic oligonucleotide; AAG chr2 60463728 60463747 60463744 +
tgcaacattaaaaagggcag

SEQ ID NO: 158274 - DNA, 20 bp, Artificial Sequence
  Synthetic oligonucleotide; TGG chr2 60463734 60463753 60463750 +
attaaaaagggcagaagtaa

SEQ ID NO: 158275 - DNA, 20 bp, Artificial Sequence
  Synthetic oligonucleotide; TAG chr2 60463737 60463756 60463753 +
aaaaagggcagaagtaatgg

SEQ ID NO: 158276 - DNA, 20 bp, Artificial Sequence
  Synthetic oligonucleotide; AAG chr2 60463743 60463762 60463759 +
ggcagaagtaatggtagcca

SEQ ID NO: 158277 - DNA, 20 bp, Artificial Sequence
  Synthetic oligonucleotide; AGG chr2 60463744 60463763 60463760 +
gcagaagtaatggtagccaa

SEQ ID NO: 158278 - DNA, 20 bp, Artificial Sequence
  Synthetic oligonucleotide; GAG chr2 60463749 60463768 60463765 +
agtaatggtagccaaaggac

SEQ ID NO: 158279 - DNA, 20 bp, Artificial Sequence
  Synthetic oligonucleotide; AGG chr2 60463750 60463769 60463766 +
gtaatggtagccaaaggacg

SEQ ID NO: 158280 - DNA, 20 bp, Artificial Sequence
  Synthetic oligonucleotide; GAG chr2 60463755 60463774 60463771 +
ggtagccaaaggacgaggat

SEQ ID NO: 158281 - DNA, 20 bp, Artificial Sequence
  Synthetic oligonucleotide; CAG chr2 60463773 60463792 60463789 +
atgagaaaaacaaaacttcc

SEQ ID NO: 158282 - DNA, 20 bp, Artificial Sequence
  Synthetic oligonucleotide; GAG chr2 60463775 60463794 60463791 +
gagaaaaacaaaacttccca

SEQ ID NO: 158283 - DNA, 20 bp, Artificial Sequence
  Synthetic oligonucleotide; AAG chr2 60463791 60463810 60463807 +
cccagagattctgaaaaaaa

SEQ ID NO: 158284 - DNA, 20 bp, Artificial Sequence
  Synthetic oligonucleotide; GAG chr2 60463809 60463828 60463825 +
aaaagccttaaaatataact

SEQ ID NO: 158285 - DNA, 20 bp, Artificial Sequence
  Synthetic oligonucleotide; AAG chr2 60463840 60463859 60463856 +
aacttttctccttcttttaa

SEQ ID NO: 158286 - DNA, 20 bp, Artificial Sequence
  Synthetic oligonucleotide; AAG chr2 60463843 60463862 60463859 +
ttttctccttcttttaaaag

SEQ ID NO: 158287 - DNA, 20 bp, Artificial Sequence
  Synthetic oligonucleotide; AGG chr2 60463844 60463863 60463860 +
tttctccttcttttaaaaga

SEQ ID NO: 158288 - DNA, 20 bp, Artificial Sequence
  Synthetic oligonucleotide; GGG chr2 60463845 60463864 60463861 +
ttctccttcttttaaaagaa

SEQ ID NO: 158289 - DNA, 20 bp, Artificial Sequence
  Synthetic oligonucleotide; AAG chr2 60463852 60463871 60463868 +
tcttttaaaagaagggctgc

SEQ ID NO: 158290 - DNA, 20 bp, Artificial Sequence
  Synthetic oligonucleotide; GAG chr2 60463854 60463873 60463870 +
ttttaaaagaagggctgcaa

SEQ ID NO: 158291 - DNA, 20 bp, Artificial Sequence
  Synthetic oligonucleotide; AAG chr2 60463863 60463882 60463879 +
aagggctgcaagagttcttt

SEQ ID NO: 158292 - DNA, 20 bp, Artificial Sequence
  Synthetic oligonucleotide; AGG chr2 60463864 60463883 60463880 +
agggctgcaagagttcttta

SEQ ID NO: 158293 - DNA, 20 bp, Artificial Sequence
  Synthetic oligonucleotide; CAG chr2 60463870 60463889 60463886 +
gcaagagttctttaaggcca

SEQ ID NO: 158294 - DNA, 20 bp, Artificial Sequence
  Synthetic oligonucleotide; TAG chr2 60463874 60463893 60463890 +
gagttctttaaggccacagc

SEQ ID NO: 158295 - DNA, 20 bp, Artificial Sequence
  Synthetic oligonucleotide; CAG chr2 60463884 60463903 60463900 +
aggccacagctagtatttgt

SEQ ID NO: 158296 - DNA, 20 bp, Artificial Sequence
  Synthetic oligonucleotide; AAG chr2 60463896 60463915 60463912 +
gtatttgtcagtaactttct

SEQ ID NO: 158297 - DNA, 20 bp, Artificial Sequence
  Synthetic oligonucleotide; AAG chr2 60463899 60463918 60463915 +
tttgtcagtaactttctaag

SEQ ID NO: 158298 - DNA, 20 bp, Artificial Sequence
  Synthetic oligonucleotide; AGG chr2 60463900 60463919 60463916 +
ttgtcagtaactttctaaga

SEQ ID NO: 158299 - DNA, 20 bp, Artificial Sequence
  Synthetic oligonucleotide; CAG chr2 60463922 60463941 60463938 +
gaaaaaaaaaaaaaatctac

SEQ ID NO: 158300 - DNA, 20 bp, Artificial Sequence
  Synthetic oligonucleotide; AGG chr2 60463923 60463942 60463939 +
aaaaaaaaaaaaaatctacc

SEQ ID NO: 158301 - DNA, 20 bp, Artificial Sequence
  Synthetic oligonucleotide; GGG chr2 60463924 60463943 60463940 +
aaaaaaaaaaaaatctacca

SEQ ID NO: 158302 - DNA, 20 bp, Artificial Sequence
  Synthetic oligonucleotide; GAG chr2 60463926 60463945 60463942 +
aaaaaaaaaaatctaccagg

SEQ ID NO: 158303 - DNA, 20 bp, Artificial Sequence
  Synthetic oligonucleotide; AGG chr2 60463927 60463946 60463943 +
aaaaaaaaaatctaccaggg

SEQ ID NO: 158304 - DNA, 20 bp, Artificial Sequence
  Synthetic oligonucleotide; AAG chr2 60463932 60463951 60463948 +
aaaaatctaccagggaggtt

SEQ ID NO: 158305 - DNA, 20 bp, Artificial Sequence
  Synthetic oligonucleotide; GAG chr2 60463934 60463953 60463950 +
aaatctaccagggaggttaa

SEQ ID NO: 158306 - DNA, 20 bp, Artificial Sequence
  Synthetic oligonucleotide; GAG chr2 60463938 60463957 60463954 +
ctaccagggaggttaagagt

SEQ ID NO: 158307 - DNA, 20 bp, Artificial Sequence
  Synthetic oligonucleotide; GAG chr2 60463944 60463963 60463960 +
gggaggttaagagtgagaat

SEQ ID NO: 158308 - DNA, 20 bp, Artificial Sequence
  Synthetic oligonucleotide; AGG chr2 60463945 60463964 60463961 +
ggaggttaagagtgagaatg

SEQ ID NO: 158309 - DNA, 20 bp, Artificial Sequence
  Synthetic oligonucleotide; TAG chr2 60463976 60463995 60463992 +
aattatatgatgcctccatt

SEQ ID NO: 158310 - DNA, 20 bp, Artificial Sequence
  Synthetic oligonucleotide; AAG chr2 60463980 60463999 60463996 +
atatgatgcctccatttagc

SEQ ID NO: 158311 - DNA, 20 bp, Artificial Sequence
  Synthetic oligonucleotide; CAG chr2 60463984 60464003 60464000 +
gatgcctccatttagcaagt

SEQ ID NO: 158312 - DNA, 20 bp, Artificial Sequence
  Synthetic oligonucleotide; AAG chr2 60463988 60464007 60464004 +
cctccatttagcaagtcaga

SEQ ID NO: 158313 - DNA, 20 bp, Artificial Sequence
  Synthetic oligonucleotide; AAG chr2 60463993 60464012 60464009 +
atttagcaagtcagaaagaa

SEQ ID NO: 158314 - DNA, 20 bp, Artificial Sequence
  Synthetic oligonucleotide; CGG chr2 60463997 60464016 60464013 +
agcaagtcagaaagaaaagc

SEQ ID NO: 158315 - DNA, 20 bp, Artificial Sequence
  Synthetic oligonucleotide; CAG chr2 60464000 60464019 60464016 +
aagtcagaaagaaaagccgg

SEQ ID NO: 158316 - DNA, 20 bp, Artificial Sequence
  Synthetic oligonucleotide; AGG chr2 60464001 60464020 60464017 +
agtcagaaagaaaagccggc

SEQ ID NO: 158317 - DNA, 20 bp, Artificial Sequence
  Synthetic oligonucleotide; GGG chr2 60464002 60464021 60464018 +
gtcagaaagaaaagccggca

SEQ ID NO: 158318 - DNA, 20 bp, Artificial Sequence
  Synthetic oligonucleotide; CAG chr2 60464011 60464030 60464027 +
aaaagccggcagggtcttct

SEQ ID NO: 158319 - DNA, 20 bp, Artificial Sequence
  Synthetic oligonucleotide; AGG chr2 60464012 60464031 60464028 +
aaagccggcagggtcttctc

SEQ ID NO: 158320 - DNA, 20 bp, Artificial Sequence
  Synthetic oligonucleotide; GAG chr2 60464014 60464033 60464030 +
agccggcagggtcttctcag

SEQ ID NO: 158321 - DNA, 20 bp, Artificial Sequence
  Synthetic oligonucleotide; TGG chr2 60464028 60464047 60464044 +
tctcaggagcccccaaacac

SEQ ID NO: 158322 - DNA, 20 bp, Artificial Sequence
  Synthetic oligonucleotide; AAG chr2 60464042 60464061 60464058 +
aaacactggtattccaaaat

SEQ ID NO: 158323 - DNA, 20 bp, Artificial Sequence
  Synthetic oligonucleotide; CAG chr2 60464046 60464065 60464062 +
actggtattccaaaataagc

SEQ ID NO: 158324 - DNA, 20 bp, Artificial Sequence
  Synthetic oligonucleotide; AAG chr2 60464057 60464076 60464073 +
aaaataagccagcctcgctc

SEQ ID NO: 158325 - DNA, 20 bp, Artificial Sequence
  Synthetic oligonucleotide; TGG chr2 60464075 60464094 60464091 +
tcaagcacttgtctaaataa

SEQ ID NO: 158326 - DNA, 20 bp, Artificial Sequence
  Synthetic oligonucleotide; TGG chr2 60464145 60464164 60464161 +
cactcaatatatctcactcc

SEQ ID NO: 158327 - DNA, 20 bp, Artificial Sequence
  Synthetic oligonucleotide; GGG chr2 60464146 60464165 60464162 +
actcaatatatctcactcct

SEQ ID NO: 158328 - DNA, 20 bp, Artificial Sequence
  Synthetic oligonucleotide; AAG chr2 60464163 60464182 60464179 +
cctgggtaaatctcttaaac

SEQ ID NO: 158329 - DNA, 20 bp, Artificial Sequence
  Synthetic oligonucleotide; TAG chr2 60464168 60464187 60464184 +
gtaaatctcttaaacaagat

SEQ ID NO: 158330 - DNA, 20 bp, Artificial Sequence
  Synthetic oligonucleotide; TGG chr2 60464172 60464191 60464188 +
atctcttaaacaagattaga

SEQ ID NO: 158331 - DNA, 20 bp, Artificial Sequence
  Synthetic oligonucleotide; AAG chr2 60464176 60464195 60464192 +
cttaaacaagattagatggt

SEQ ID NO: 158332 - DNA, 20 bp, Artificial Sequence
  Synthetic oligonucleotide; TAG chr2 60464189 60464208 60464205 +
agatggtaagataccaaaat

SEQ ID NO: 158333 - DNA, 20 bp, Artificial Sequence
  Synthetic oligonucleotide; AGG chr2 60464190 60464209 60464206 +
gatggtaagataccaaaatt

SEQ ID NO: 158334 - DNA, 20 bp, Artificial Sequence
  Synthetic oligonucleotide; TGG chr2 60464213 60464232 60464229 +
tttcaaacatttgtctaatg

SEQ ID NO: 158335 - DNA, 20 bp, Artificial Sequence
  Synthetic oligonucleotide; AAG chr2 60464216 60464235 60464232 +
caaacatttgtctaatgtgg

SEQ ID NO: 158336 - DNA, 20 bp, Artificial Sequence
  Synthetic oligonucleotide; AGG chr2 60464217 60464236 60464233 +
aaacatttgtctaatgtgga

SEQ ID NO: 158337 - DNA, 20 bp, Artificial Sequence
  Synthetic oligonucleotide; GGG chr2 60464218 60464237 60464234 +
aacatttgtctaatgtggaa

SEQ ID NO: 158338 - DNA, 20 bp, Artificial Sequence
  Synthetic oligonucleotide; GGG chr2 60464219 60464238 60464235 +
acatttgtctaatgtggaag

SEQ ID NO: 158339 - DNA, 20 bp, Artificial Sequence
  Synthetic oligonucleotide; GGG chr2 60464220 60464239 60464236 +
catttgtctaatgtggaagg

SEQ ID NO: 158340 - DNA, 20 bp, Artificial Sequence
  Synthetic oligonucleotide; AAG chr2 60464227 60464246 60464243 +
ctaatgtggaagggggaaaa

SEQ ID NO: 158341 - DNA, 20 bp, Artificial Sequence
  Synthetic oligonucleotide; AGG chr2 60464228 60464247 60464244 +
taatgtggaagggggaaaaa

SEQ ID NO: 158342 - DNA, 20 bp, Artificial Sequence
  Synthetic oligonucleotide; CAG chr2 60464231 60464250 60464247 +
tgtggaagggggaaaaaagg

SEQ ID NO: 158343 - DNA, 20 bp, Artificial Sequence
  Synthetic oligonucleotide; AAG chr2 60464235 60464254 60464251 +
gaagggggaaaaaaggcaga

SEQ ID NO: 158344 - DNA, 20 bp, Artificial Sequence
  Synthetic oligonucleotide; AAG chr2 60464245 60464264 60464261 +
aaaaggcagaaagattttga

SEQ ID NO: 158345 - DNA, 20 bp, Artificial Sequence
  Synthetic oligonucleotide; TAG chr2 60464261 60464280 60464277 +
ttgaaagaaaacgctgacat

SEQ ID NO: 158346 - DNA, 20 bp, Artificial Sequence
  Synthetic oligonucleotide; AAG chr2 60464305 60464324 60464321 +
ttgtttgcctcctctcttca

SEQ ID NO: 158347 - DNA, 20 bp, Artificial Sequence
  Synthetic oligonucleotide; AGG chr2 60464306 60464325 60464322 +
tgtttgcctcctctcttcaa

SEQ ID NO: 158348 - DNA, 20 bp, Artificial Sequence
  Synthetic oligonucleotide; GGG chr2 60464307 60464326 60464323 +
gtttgcctcctctcttcaaa

SEQ ID NO: 158349 - DNA, 20 bp, Artificial Sequence
  Synthetic oligonucleotide; AAG chr2 60464317 60464336 60464333 +
tctcttcaaagggaaataaa

SEQ ID NO: 158350 - DNA, 20 bp, Artificial Sequence
  Synthetic oligonucleotide; GAG chr2 60464327 60464346 60464343 +
gggaaataaaaagcttcatt

SEQ ID NO: 158351 - DNA, 20 bp, Artificial Sequence
  Synthetic oligonucleotide; TGG chr2 60464370 60464389 60464386 +
gttgttgttgaacaataact

SEQ ID NO: 158352 - DNA, 20 bp, Artificial Sequence
  Synthetic oligonucleotide; GGG chr2 60464371 60464390 60464387 +
ttgttgttgaacaataactt

SEQ ID NO: 158353 - DNA, 20 bp, Artificial Sequence
  Synthetic oligonucleotide; TAG chr2 60464381 60464400 60464397 +
acaataacttgggtcccaaa

SEQ ID NO: 158354 - DNA, 20 bp, Artificial Sequence
  Synthetic oligonucleotide; AGG chr2 60464382 60464401 60464398 +
caataacttgggtcccaaat

SEQ ID NO: 158355 - DNA, 20 bp, Artificial Sequence
  Synthetic oligonucleotide; TGG chr2 60464386 60464405 60464402 +
aacttgggtcccaaataggc

SEQ ID NO: 158356 - DNA, 20 bp, Artificial Sequence
  Synthetic oligonucleotide; TGG chr2 60464402 60464421 60464418 +
aggctggaaaaaaaactatc

SEQ ID NO: 158357 - DNA, 20 bp, Artificial Sequence
  Synthetic oligonucleotide; TGG chr2 60464426 60464445 60464442 +
tccaactacatgatcctctg

SEQ ID NO: 158358 - DNA, 20 bp, Artificial Sequence
  Synthetic oligonucleotide; TAG chr2 60464447 60464466 60464463 +
ggcttcctccttgtcctccc

SEQ ID NO: 158359 - DNA, 20 bp, Artificial Sequence
  Synthetic oligonucleotide; TGG chr2 60464455 60464474 60464471 +
ccttgtcctccctagatctc

SEQ ID NO: 158360 - DNA, 20 bp, Artificial Sequence
  Synthetic oligonucleotide; GGG chr2 60464456 60464475 60464472 +
cttgtcctccctagatctct

SEQ ID NO: 158361 - DNA, 20 bp, Artificial Sequence
  Synthetic oligonucleotide; TAG chr2 60464476 60464495 60464492 +
gggtgactatcattcctatt

SEQ ID NO: 158362 - DNA, 20 bp, Artificial Sequence
  Synthetic oligonucleotide; GAG chr2 60464490 60464509 60464506 +
cctatttagcctgacgatct

SEQ ID NO: 158363 - DNA, 20 bp, Artificial Sequence
  Synthetic oligonucleotide; TGG chr2 60464494 60464513 60464510 +
tttagcctgacgatctgagt

SEQ ID NO: 158364 - DNA, 20 bp, Artificial Sequence
  Synthetic oligonucleotide; GGG chr2 60464495 60464514 60464511 +
ttagcctgacgatctgagtt

SEQ ID NO: 158365 - DNA, 20 bp, Artificial Sequence
  Synthetic oligonucleotide; AAG chr2 60464499 60464518 60464515 +
cctgacgatctgagttgggc

SEQ ID NO: 158366 - DNA, 20 bp, Artificial Sequence
  Synthetic oligonucleotide; AAG chr2 60464506 60464525 60464522 +
atctgagttgggcaagtaaa

SEQ ID NO: 158367 - DNA, 20 bp, Artificial Sequence
  Synthetic oligonucleotide; AAG chr2 60464525 60464544 60464541 +
aaagatttgtctgataatcc

SEQ ID NO: 158368 - DNA, 20 bp, Artificial Sequence
  Synthetic oligonucleotide; CAG chr2 60464597 60464616 60464613 +
ataaaacatcgattgaaatc

SEQ ID NO: 158369 - DNA, 20 bp, Artificial Sequence
  Synthetic oligonucleotide; AGG chr2 60464598 60464617 60464614 +
taaaacatcgattgaaatcc

SEQ ID NO: 158370 - DNA, 20 bp, Artificial Sequence
  Synthetic oligonucleotide; TAG chr2 60464603 60464622 60464619 +
catcgattgaaatccaggac

SEQ ID NO: 158371 - DNA, 20 bp, Artificial Sequence
  Synthetic oligonucleotide; TAG chr2 60464615 60464634 60464631 +
tccaggactagactcataat

SEQ ID NO: 158372 - DNA, 20 bp, Artificial Sequence
  Synthetic oligonucleotide; TGG chr2 60464618 60464637 60464634 +
aggactagactcataattag

SEQ ID NO: 158373 - DNA, 20 bp, Artificial Sequence
  Synthetic oligonucleotide; TGG chr2 60464624 60464643 60464640 +
agactcataattagtggtgc

SEQ ID NO: 158374 - DNA, 20 bp, Artificial Sequence
  Synthetic oligonucleotide; TAG chr2 60464648 60464667 60464664 +
ttcacatgtgccatgaattg

SEQ ID NO: 158375 - DNA, 20 bp, Artificial Sequence
  Synthetic oligonucleotide; TGG chr2 60464674 60464693 60464690 +
ttgataaatgccaaaatctg

SEQ ID NO: 158376 - DNA, 20 bp, Artificial Sequence
  Synthetic oligonucleotide; CAG chr2 60464681 60464700 60464697 +
atgccaaaatctgtggcata

SEQ ID NO: 158377 - DNA, 20 bp, Artificial Sequence
  Synthetic oligonucleotide; AAG chr2 60464693 60464712 60464709 +
gtggcatacagcactacatc

SEQ ID NO: 158378 - DNA, 20 bp, Artificial Sequence
  Synthetic oligonucleotide; AGG chr2 60464694 60464713 60464710 +
tggcatacagcactacatca

SEQ ID NO: 158379 - DNA, 20 bp, Artificial Sequence
  Synthetic oligonucleotide; AAG chr2 60464719 60464738 60464735 +
ctcatttgtatcctttcaaa

SEQ ID NO: 158380 - DNA, 20 bp, Artificial Sequence
  Synthetic oligonucleotide; AGG chr2 60464720 60464739 60464736 +
tcatttgtatcctttcaaaa

SEQ ID NO: 158381 - DNA, 20 bp, Artificial Sequence
  Synthetic oligonucleotide; GAG chr2 60464730 60464749 60464746 +
cctttcaaaaaggcttaaat

SEQ ID NO: 158382 - DNA, 20 bp, Artificial Sequence
  Synthetic oligonucleotide; AAG chr2 60464735 60464754 60464751 +
caaaaaggcttaaatgagaa

SEQ ID NO: 158383 - DNA, 20 bp, Artificial Sequence
  Synthetic oligonucleotide; GAG chr2 60464759 60464778 60464775 +
ccattttattttgctgccct

SEQ ID NO: 158384 - DNA, 20 bp, Artificial Sequence
  Synthetic oligonucleotide; CAG chr2 60464779 60464798 60464795 +
gagcatcctaaacttttttt

SEQ ID NO: 158385 - DNA, 20 bp, Artificial Sequence
  Synthetic oligonucleotide; GAG chr2 60464781 60464800 60464797 +
gcatcctaaactttttttca

SEQ ID NO: 158386 - DNA, 20 bp, Artificial Sequence
  Synthetic oligonucleotide; CAG chr2 60464785 60464804 60464801 +
cctaaactttttttcagagc

SEQ ID NO: 158387 - DNA, 20 bp, Artificial Sequence
  Synthetic oligonucleotide; CAG chr2 60464804 60464823 60464820 +
ccagttatgtgatcatgcta

SEQ ID NO: 158388 - DNA, 20 bp, Artificial Sequence
  Synthetic oligonucleotide; CAG chr2 60464850 60464869 60464866 +
ctcccctctctctcatacat

SEQ ID NO: 158389 - DNA, 20 bp, Artificial Sequence
  Synthetic oligonucleotide; AGG chr2 60464851 60464870 60464867 +
tcccctctctctcatacatc

SEQ ID NO: 158390 - DNA, 20 bp, Artificial Sequence
  Synthetic oligonucleotide; CAG chr2 60464855 60464874 60464871 +
ctctctctcatacatcaggt

SEQ ID NO: 158391 - DNA, 20 bp, Artificial Sequence
  Synthetic oligonucleotide; GAG chr2 60464857 60464876 60464873 +
ctctctcatacatcaggtca

SEQ ID NO: 158392 - DNA, 20 bp, Artificial Sequence
  Synthetic oligonucleotide; TGG chr2 60464864 60464883 60464880 +
atacatcaggtcagagaaaa

SEQ ID NO: 158393 - DNA, 20 bp, Artificial Sequence
  Synthetic oligonucleotide; GAG chr2 60464883 60464902 60464899 +
atggcattttatcttataat

SEQ ID NO: 158394 - DNA, 20 bp, Artificial Sequence
  Synthetic oligonucleotide; CAG chr2 60464897 60464916 60464913 +
tataatgagcatacaacata

SEQ ID NO: 158395 - DNA, 20 bp, Artificial Sequence
  Synthetic oligonucleotide; TAG chr2 60464917 60464936 60464933 +
cagttttcactatcgcattt

SEQ ID NO: 158396 - DNA, 20 bp, Artificial Sequence
  Synthetic oligonucleotide; TAG chr2 60464933 60464952 60464949 +
attttagtattcccatcaac

SEQ ID NO: 158397 - DNA, 20 bp, Artificial Sequence
  Synthetic oligonucleotide; TAG chr2 60464942 60464961 60464958 +
ttcccatcaactagatattc

SEQ ID NO: 158398 - DNA, 20 bp, Artificial Sequence
  Synthetic oligonucleotide; GAG chr2 60464950 60464969 60464966 +
aactagatattctagatcat

SEQ ID NO: 158399 - DNA, 20 bp, Artificial Sequence
  Synthetic oligonucleotide; AGG chr2 60464951 60464970 60464967 +
actagatattctagatcatg

SEQ ID NO: 158400 - DNA, 20 bp, Artificial Sequence
  Synthetic oligonucleotide; GGG chr2 60464952 60464971 60464968 +
ctagatattctagatcatga

SEQ ID NO: 158401 - DNA, 20 bp, Artificial Sequence
  Synthetic oligonucleotide; CAG chr2 60464955 60464974 60464971 +
gatattctagatcatgaggg

SEQ ID NO: 158402 - DNA, 20 bp, Artificial Sequence
  Synthetic oligonucleotide; TAG chr2 60464959 60464978 60464975 +
ttctagatcatgagggcagc

SEQ ID NO: 158403 - DNA, 20 bp, Artificial Sequence
  Synthetic oligonucleotide; GAG chr2 60464980 60464999 60464996 +
agtgtaatcataatgtcaat

SEQ ID NO: 158404 - DNA, 20 bp, Artificial Sequence
  Synthetic oligonucleotide; AAG chr2 60464983 60465002 60464999 +
gtaatcataatgtcaatgag

SEQ ID NO: 158405 - DNA, 20 bp, Artificial Sequence
  Synthetic oligonucleotide; AGG chr2 60464984 60465003 60465000 +
taatcataatgtcaatgaga

SEQ ID NO: 158406 - DNA, 20 bp, Artificial Sequence
  Synthetic oligonucleotide; GGG chr2 60464985 60465004 60465001 +
aatcataatgtcaatgagaa

SEQ ID NO: 158407 - DNA, 20 bp, Artificial Sequence
  Synthetic oligonucleotide; GAG chr2 60464999 60465018 60465015 +
tgagaagggctgttacgatt

SEQ ID NO: 158408 - DNA, 20 bp, Artificial Sequence
  Synthetic oligonucleotide; AAG chr2 60465006 60465025 60465022 +
ggctgttacgattgagacta

SEQ ID NO: 158409 - DNA, 20 bp, Artificial Sequence
  Synthetic oligonucleotide; TGG chr2 60465015 60465034 60465031 +
gattgagactaaagattaca

SEQ ID NO: 158410 - DNA, 20 bp, Artificial Sequence
  Synthetic oligonucleotide; GAG chr2 60465017 60465036 60465033 +
ttgagactaaagattacatg

SEQ ID NO: 158411 - DNA, 20 bp, Artificial Sequence
  Synthetic oligonucleotide; GAG chr2 60465019 60465038 60465035 +
gagactaaagattacatgga

SEQ ID NO: 158412 - DNA, 20 bp, Artificial Sequence
  Synthetic oligonucleotide; GAG chr2 60465021 60465040 60465037 +
gactaaagattacatggaga

SEQ ID NO: 158413 - DNA, 20 bp, Artificial Sequence
  Synthetic oligonucleotide; TGG chr2 60465036 60465055 60465052 +
ggagagagctgctttgaaac

SEQ ID NO: 158414 - DNA, 20 bp, Artificial Sequence
  Synthetic oligonucleotide; CAG chr2 60465049 60465068 60465065 +
ttgaaactggtaattattac

SEQ ID NO: 158415 - DNA, 20 bp, Artificial Sequence
  Synthetic oligonucleotide; TAG chr2 60465060 60465079 60465076 +
aattattaccagtccactaa

SEQ ID NO: 158416 - DNA, 20 bp, Artificial Sequence
  Synthetic oligonucleotide; CAG chr2 60465106 60465125 60465122 +
catataatctgtatttcact

SEQ ID NO: 158417 - DNA, 20 bp, Artificial Sequence
  Synthetic oligonucleotide; CGG chr2 60465116 60465135 60465132 +
gtatttcactcagctcatgc

SEQ ID NO: 158418 - DNA, 20 bp, Artificial Sequence
  Synthetic oligonucleotide; CAG chr2 60465136 60465155 60465152 +
cggtgtaccatattatatta

SEQ ID NO: 158419 - DNA, 20 bp, Artificial Sequence
  Synthetic oligonucleotide; CAG chr2 60465145 60465164 60465161 +
atattatattacagtgctca

SEQ ID NO: 158420 - DNA, 20 bp, Artificial Sequence
  Synthetic oligonucleotide; CAG chr2 60465167 60465186 60465183 +
gattctaaattcctaaactg

SEQ ID NO: 158421 - DNA, 20 bp, Artificial Sequence
  Synthetic oligonucleotide; TAG chr2 60465236 60465255 60465252 +
tcataacatctttgatgatt

SEQ ID NO: 158422 - DNA, 20 bp, Artificial Sequence
  Synthetic oligonucleotide; AAG chr2 60465240 60465259 60465256 +
aacatctttgatgatttaga

SEQ ID NO: 158423 - DNA, 20 bp, Artificial Sequence
  Synthetic oligonucleotide; TGG chr2 60465245 60465264 60465261 +
ctttgatgatttagaaagac

SEQ ID NO: 158424 - DNA, 20 bp, Artificial Sequence
  Synthetic oligonucleotide; TGG chr2 60465263 60465282 60465279 +
actggaattgatttcctgtg

SEQ ID NO: 158425 - DNA, 20 bp, Artificial Sequence
  Synthetic oligonucleotide; TAG chr2 60465272 60465291 60465288 +
gatttcctgtgtggcaaaat

SEQ ID NO: 158426 - DNA, 20 bp, Artificial Sequence
  Synthetic oligonucleotide; AGG chr2 60465273 60465292 60465289 +
atttcctgtgtggcaaaatt

SEQ ID NO: 158427 - DNA, 20 bp, Artificial Sequence
  Synthetic oligonucleotide; GGG chr2 60465274 60465293 60465290 +
tttcctgtgtggcaaaatta

SEQ ID NO: 158428 - DNA, 20 bp, Artificial Sequence
  Synthetic oligonucleotide; GAG chr2 60465351 60465370 60465367 +
gaaaatcaacttctcaattt

SEQ ID NO: 158429 - DNA, 20 bp, Artificial Sequence
  Synthetic oligonucleotide; GAG chr2 60465353 60465372 60465369 +
aaatcaacttctcaatttga

SEQ ID NO: 158430 - DNA, 20 bp, Artificial Sequence
  Synthetic oligonucleotide; TGG chr2 60465362 60465381 60465378 +
tctcaatttgagagcctcat

SEQ ID NO: 158431 - DNA, 20 bp, Artificial Sequence
  Synthetic oligonucleotide; GGG chr2 60465363 60465382 60465379 +
ctcaatttgagagcctcatt

SEQ ID NO: 158432 - DNA, 20 bp, Artificial Sequence
  Synthetic oligonucleotide; CGG chr2 60465372 60465391 60465388 +
agagcctcattgggcattta

SEQ ID NO: 158433 - DNA, 20 bp, Artificial Sequence
  Synthetic oligonucleotide; GGG chr2 60465373 60465392 60465389 +
gagcctcattgggcatttac

SEQ ID NO: 158434 - DNA, 20 bp, Artificial Sequence
  Synthetic oligonucleotide; GGG chr2 60465374 60465393 60465390 +
agcctcattgggcatttacg

SEQ ID NO: 158435 - DNA, 20 bp, Artificial Sequence
  Synthetic oligonucleotide; TAG chr2 60465389 60465408 60465405 +
ttacggggattgttttgatt

SEQ ID NO: 158436 - DNA, 20 bp, Artificial Sequence
  Synthetic oligonucleotide; GAG chr2 60465391 60465410 60465407 +
acggggattgttttgattta

SEQ ID NO: 158437 - DNA, 20 bp, Artificial Sequence
  Synthetic oligonucleotide; TGG chr2 60465409 60465428 60465425 +
tagagcaataaactgacacc

SEQ ID NO: 158438 - DNA, 20 bp, Artificial Sequence
  Synthetic oligonucleotide; AAG chr2 60465417 60465436 60465433 +
taaactgacacctggcccct

SEQ ID NO: 158439 - DNA, 20 bp, Artificial Sequence
  Synthetic oligonucleotide; TAG chr2 60465422 60465441 60465438 +
tgacacctggcccctaagca

SEQ ID NO: 158440 - DNA, 20 bp, Artificial Sequence
  Synthetic oligonucleotide; AGG chr2 60465423 60465442 60465439 +
gacacctggcccctaagcat

SEQ ID NO: 158441 - DNA, 20 bp, Artificial Sequence
  Synthetic oligonucleotide; GAG chr2 60465431 60465450 60465447 +
gcccctaagcataggaactt

SEQ ID NO: 158442 - DNA, 20 bp, Artificial Sequence
  Synthetic oligonucleotide; AAG chr2 60465441 60465460 60465457 +
ataggaacttgagacatcaa

SEQ ID NO: 158443 - DNA, 20 bp, Artificial Sequence
  Synthetic oligonucleotide; AGG chr2 60465442 60465461 60465458 +
taggaacttgagacatcaaa

SEQ ID NO: 158444 - DNA, 20 bp, Artificial Sequence
  Synthetic oligonucleotide; GGG chr2 60465443 60465462 60465459 +
aggaacttgagacatcaaaa

SEQ ID NO: 158445 - DNA, 20 bp, Artificial Sequence
  Synthetic oligonucleotide; CAG chr2 60465453 60465472 60465469 +
gacatcaaaagggttaaaat

SEQ ID NO: 158446 - DNA, 20 bp, Artificial Sequence
  Synthetic oligonucleotide; TAG chr2 60465460 60465479 60465476 +
aaagggttaaaatcagctat

SEQ ID NO: 158447 - DNA, 20 bp, Artificial Sequence
  Synthetic oligonucleotide; TGG chr2 60465472 60465491 60465488 +
tcagctattagcccacctac

SEQ ID NO: 158448 - DNA, 20 bp, Artificial Sequence
  Synthetic oligonucleotide; TGG chr2 60465501 60465520 60465517 +
ttttatttcattttacttta

SEQ ID NO: 158449 - DNA, 20 bp, Artificial Sequence
  Synthetic oligonucleotide; GGG chr2 60465502 60465521 60465518 +
tttatttcattttactttat

SEQ ID NO: 158450 - DNA, 20 bp, Artificial Sequence
  Synthetic oligonucleotide; AAG chr2 60465505 60465524 60465521 +
atttcattttactttatggg

SEQ ID NO: 158451 - DNA, 20 bp, Artificial Sequence
  Synthetic oligonucleotide; AGG chr2 60465506 60465525 60465522 +
tttcattttactttatggga

SEQ ID NO: 158452 - DNA, 20 bp, Artificial Sequence
  Synthetic oligonucleotide; TAG chr2 60465524 60465543 60465540 +
gaaggaatgacccccatttc

SEQ ID NO: 158453 - DNA, 20 bp, Artificial Sequence
  Synthetic oligonucleotide; AAG chr2 60465545 60465564 60465561 +
agtatgtcaccaatgtgaaa

SEQ ID NO: 158454 - DNA, 20 bp, Artificial Sequence
  Synthetic oligonucleotide; AAG chr2 60465559 60465578 60465575 +
gtgaaaaagtcatgtgatct

SEQ ID NO: 158455 - DNA, 20 bp, Artificial Sequence
  Synthetic oligonucleotide; AAG chr2 60465566 60465585 60465582 +
agtcatgtgatctaagcctc

SEQ ID NO: 158456 - DNA, 20 bp, Artificial Sequence
  Synthetic oligonucleotide; CAG chr2 60465572 60465591 60465588 +
gtgatctaagcctcaagatt

SEQ ID NO: 158457 - DNA, 20 bp, Artificial Sequence
  Synthetic oligonucleotide; AAG chr2 60465575 60465594 60465591 +
atctaagcctcaagattcag

SEQ ID NO: 158458 - DNA, 20 bp, Artificial Sequence
  Synthetic oligonucleotide; AAG chr2 60465581 60465600 60465597 +
gcctcaagattcagaagaac

SEQ ID NO: 158459 - DNA, 20 bp, Artificial Sequence
  Synthetic oligonucleotide; AGG chr2 60465582 60465601 60465598 +
cctcaagattcagaagaaca

SEQ ID NO: 158460 - DNA, 20 bp, Artificial Sequence
  Synthetic oligonucleotide; GAG chr2 60465584 60465603 60465600 +
tcaagattcagaagaacaag

SEQ ID NO: 158461 - DNA, 20 bp, Artificial Sequence
  Synthetic oligonucleotide; AGG chr2 60465585 60465604 60465601 +
caagattcagaagaacaagg

SEQ ID NO: 158462 - DNA, 20 bp, Artificial Sequence
  Synthetic oligonucleotide; GAG chr2 60465591 60465610 60465607 +
tcagaagaacaaggaggtct

SEQ ID NO: 158463 - DNA, 20 bp, Artificial Sequence
  Synthetic oligonucleotide; TGG chr2 60465596 60465615 60465612 +
agaacaaggaggtctgagac

SEQ ID NO: 158464 - DNA, 20 bp, Artificial Sequence
  Synthetic oligonucleotide; GAG chr2 60465598 60465617 60465614 +
aacaaggaggtctgagactg

SEQ ID NO: 158465 - DNA, 20 bp, Artificial Sequence
  Synthetic oligonucleotide; AGG chr2 60465599 60465618 60465615 +
acaaggaggtctgagactgg

SEQ ID NO: 158466 - DNA, 20 bp, Artificial Sequence
  Synthetic oligonucleotide; TAG chr2 60465604 60465623 60465620 +
gaggtctgagactggaggcc

SEQ ID NO: 158467 - DNA, 20 bp, Artificial Sequence
  Synthetic oligonucleotide; TAG chr2 60465620 60465639 60465636 +
ggcctagctctattatccac

SEQ ID NO: 158468 - DNA, 20 bp, Artificial Sequence
  Synthetic oligonucleotide; TGG chr2 60465633 60465652 60465649 +
tatccactagattgtaactc

SEQ ID NO: 158469 - DNA, 20 bp, Artificial Sequence
  Synthetic oligonucleotide; GGG chr2 60465634 60465653 60465650 +
atccactagattgtaactct

SEQ ID NO: 158470 - DNA, 20 bp, Artificial Sequence
  Synthetic oligonucleotide; TAG chr2 60465638 60465657 60465654 +
actagattgtaactctggga

SEQ ID NO: 158471 - DNA, 20 bp, Artificial Sequence
  Synthetic oligonucleotide; GAG chr2 60465656 60465675 60465672 +
gatagtcatttgatttctct

SEQ ID NO: 158472 - DNA, 20 bp, Artificial Sequence
  Synthetic oligonucleotide; TGG chr2 60465662 60465681 60465678 +
catttgatttctctgagtct

SEQ ID NO: 158473 - DNA, 20 bp, Artificial Sequence
  Synthetic oligonucleotide; GAG chr2 60465683 60465702 60465699 +
ggaattcctatctgtaaaat

SEQ ID NO: 158474 - DNA, 20 bp, Artificial Sequence
  Synthetic oligonucleotide; CAG chr2 60465694 60465713 60465710 +
ctgtaaaatgagcataaaaa

SEQ ID NO: 158475 - DNA, 20 bp, Artificial Sequence
  Synthetic oligonucleotide; AAG chr2 60465704 60465723 60465720 +
agcataaaaacagtacctgt

SEQ ID NO: 158476 - DNA, 20 bp, Artificial Sequence
  Synthetic oligonucleotide; TGG chr2 60465713 60465732 60465729 +
acagtacctgtaagaattgt

SEQ ID NO: 158477 - DNA, 20 bp, Artificial Sequence
  Synthetic oligonucleotide; GGG chr2 60465714 60465733 60465730 +
cagtacctgtaagaattgtt

SEQ ID NO: 158478 - DNA, 20 bp, Artificial Sequence
  Synthetic oligonucleotide; AAG chr2 60465717 60465736 60465733 +
tacctgtaagaattgttggg

SEQ ID NO: 158479 - DNA, 20 bp, Artificial Sequence
  Synthetic oligonucleotide; CAG chr2 60465729 60465748 60465745 +
ttgttgggaagttcaaatga

SEQ ID NO: 158480 - DNA, 20 bp, Artificial Sequence
  Synthetic oligonucleotide; AAG chr2 60465732 60465751 60465748 +
ttgggaagttcaaatgacag

SEQ ID NO: 158481 - DNA, 20 bp, Artificial Sequence
  Synthetic oligonucleotide; AAG chr2 60465742 60465761 60465758 +
caaatgacagaagtatataa

SEQ ID NO: 158482 - DNA, 20 bp, Artificial Sequence
  Synthetic oligonucleotide; CAG chr2 60465760 60465779 60465776 +
aaaagccctctgtaaactat

SEQ ID NO: 158483 - DNA, 20 bp, Artificial Sequence
  Synthetic oligonucleotide; AGG chr2 60465761 60465780 60465777 +
aaagccctctgtaaactatc

SEQ ID NO: 158484 - DNA, 20 bp, Artificial Sequence
  Synthetic oligonucleotide; GAG chr2 60465778 60465797 60465794 +
atcaggtcgaatgtgaatgt

SEQ ID NO: 158485 - DNA, 20 bp, Artificial Sequence
  Synthetic oligonucleotide; CAG chr2 60465794 60465813 60465810 +
atgtgagttttcattactac

SEQ ID NO: 158486 - DNA, 20 bp, Artificial Sequence
  Synthetic oligonucleotide; AGG chr2 60465795 60465814 60465811 +
tgtgagttttcattactacc

SEQ ID NO: 158487 - DNA, 20 bp, Artificial Sequence
  Synthetic oligonucleotide; GGG chr2 60465796 60465815 60465812 +
gtgagttttcattactacca

SEQ ID NO: 158488 - DNA, 20 bp, Artificial Sequence
  Synthetic oligonucleotide; GGG chr2 60465797 60465816 60465813 +
tgagttttcattactaccag

SEQ ID NO: 158489 - DNA, 20 bp, Artificial Sequence
  Synthetic oligonucleotide; GAG chr2 60465812 60465831 60465828 +
accaggggtgattaattact

SEQ ID NO: 158490 - DNA, 20 bp, Artificial Sequence
  Synthetic oligonucleotide; AGG chr2 60465813 60465832 60465829 +
ccaggggtgattaattactg

SEQ ID NO: 158491 - DNA, 20 bp, Artificial Sequence
  Synthetic oligonucleotide; GGG chr2 60465814 60465833 60465830 +
caggggtgattaattactga

SEQ ID NO: 158492 - DNA, 20 bp, Artificial Sequence
  Synthetic oligonucleotide; CGG chr2 60465846 60465865 60465862 +
accacattacacaccccgaa

SEQ ID NO: 158493 - DNA, 20 bp, Artificial Sequence
  Synthetic oligonucleotide; CAG chr2 60465853 60465872 60465869 +
tacacaccccgaacggcttc

SEQ ID NO: 158494 - DNA, 20 bp, Artificial Sequence
  Synthetic oligonucleotide; GAG chr2 60465855 60465874 60465871 +
cacaccccgaacggcttcca

SEQ ID NO: 158495 - DNA, 20 bp, Artificial Sequence
  Synthetic oligonucleotide; AGG chr2 60465856 60465875 60465872 +
acaccccgaacggcttccag

SEQ ID NO: 158496 - DNA, 20 bp, Artificial Sequence
  Synthetic oligonucleotide; AAG chr2 60465859 60465878 60465875 +
ccccgaacggcttccagagg

SEQ ID NO: 158497 - DNA, 20 bp, Artificial Sequence
  Synthetic oligonucleotide; AGG chr2 60465860 60465879 60465876 +
cccgaacggcttccagagga

SEQ ID NO: 158498 - DNA, 20 bp, Artificial Sequence
  Synthetic oligonucleotide; CAG chr2 60465866 60465885 60465882 +
cggcttccagaggaaggtcc

SEQ ID NO: 158499 - DNA, 20 bp, Artificial Sequence
  Synthetic oligonucleotide; CAG chr2 60465871 60465890 60465887 +
tccagaggaaggtcccagtc

SEQ ID NO: 158500 - DNA, 20 bp, Artificial Sequence
  Synthetic oligonucleotide; AGG chr2 60465872 60465891 60465888 +
ccagaggaaggtcccagtcc

SEQ ID NO: 158501 - DNA, 20 bp, Artificial Sequence
  Synthetic oligonucleotide; CAG chr2 60465883 60465902 60465899 +
tcccagtccaggccttaacc

SEQ ID NO: 158502 - DNA, 20 bp, Artificial Sequence
  Synthetic oligonucleotide; AGG chr2 60465884 60465903 60465900 +
cccagtccaggccttaaccc

SEQ ID NO: 158503 - DNA, 20 bp, Artificial Sequence
  Synthetic oligonucleotide; AAG chr2 60465891 60465910 60465907 +
caggccttaacccaggccaa

SEQ ID NO: 158504 - DNA, 20 bp, Artificial Sequence
  Synthetic oligonucleotide; AGG chr2 60465892 60465911 60465908 +
aggccttaacccaggccaaa

SEQ ID NO: 158505 - DNA, 20 bp, Artificial Sequence
  Synthetic oligonucleotide; GAG chr2 60465894 60465913 60465910 +
gccttaacccaggccaaaag

SEQ ID NO: 158506 - DNA, 20 bp, Artificial Sequence
  Synthetic oligonucleotide; AGG chr2 60465895 60465914 60465911 +
ccttaacccaggccaaaagg

SEQ ID NO: 158507 - DNA, 20 bp, Artificial Sequence
  Synthetic oligonucleotide; TAG chr2 60465901 60465920 60465917 +
cccaggccaaaaggaggctc

SEQ ID NO: 158508 - DNA, 20 bp, Artificial Sequence
  Synthetic oligonucleotide; AAG chr2 60465907 60465926 60465923 +
ccaaaaggaggctctagtta

SEQ ID NO: 158509 - DNA, 20 bp, Artificial Sequence
  Synthetic oligonucleotide; GAG chr2 60465909 60465928 60465925 +
aaaaggaggctctagttaaa

SEQ ID NO: 158510 - DNA, 20 bp, Artificial Sequence
  Synthetic oligonucleotide; CAG chr2 60465912 60465931 60465928 +
aggaggctctagttaaagag

SEQ ID NO: 158511 - DNA, 20 bp, Artificial Sequence
  Synthetic oligonucleotide; AGG chr2 60465913 60465932 60465929 +
ggaggctctagttaaagagc

SEQ ID NO: 158512 - DNA, 20 bp, Artificial Sequence
  Synthetic oligonucleotide; GGG chr2 60465914 60465933 60465930 +
gaggctctagttaaagagca

SEQ ID NO: 158513 - DNA, 20 bp, Artificial Sequence
  Synthetic oligonucleotide; GGG chr2 60465915 60465934 60465931 +
aggctctagttaaagagcag

SEQ ID NO: 158514 - DNA, 20 bp, Artificial Sequence
  Synthetic oligonucleotide; TGG chr2 60465922 60465941 60465938 +
agttaaagagcaggggtgac

SEQ ID NO: 158515 - DNA, 20 bp, Artificial Sequence
  Synthetic oligonucleotide; CAG chr2 60465929 60465948 60465945 +
gagcaggggtgactggcaca

SEQ ID NO: 158516 - DNA, 20 bp, Artificial Sequence
  Synthetic oligonucleotide; CAG chr2 60465932 60465951 60465948 +
caggggtgactggcacacag

SEQ ID NO: 158517 - DNA, 20 bp, Artificial Sequence
  Synthetic oligonucleotide; GAG chr2 60465934 60465953 60465950 +
ggggtgactggcacacagca

SEQ ID NO: 158518 - DNA, 20 bp, Artificial Sequence
  Synthetic oligonucleotide; TGG chr2 60465937 60465956 60465953 +
gtgactggcacacagcagag

SEQ ID NO: 158519 - DNA, 20 bp, Artificial Sequence
  Synthetic oligonucleotide; CAG chr2 60465943 60465962 60465959 +
ggcacacagcagagtggcca

SEQ ID NO: 158520 - DNA, 20 bp, Artificial Sequence
  Synthetic oligonucleotide; AGG chr2 60465944 60465963 60465960 +
gcacacagcagagtggccac

SEQ ID NO: 158521 - DNA, 20 bp, Artificial Sequence
  Synthetic oligonucleotide; GGG chr2 60465945 60465964 60465961 +
cacacagcagagtggccaca

SEQ ID NO: 158522 - DNA, 20 bp, Artificial Sequence
  Synthetic oligonucleotide; AAG chr2 60465948 60465967 60465964 +
acagcagagtggccacaggg

SEQ ID NO: 158523 - DNA, 20 bp, Artificial Sequence
  Synthetic oligonucleotide; GAG chr2 60465957 60465976 60465973 +
tggccacagggaagtgctat

SEQ ID NO: 158524 - DNA, 20 bp, Artificial Sequence
  Synthetic oligonucleotide; TGG chr2 60465963 60465982 60465979 +
cagggaagtgctatgagctc

SEQ ID NO: 158525 - DNA, 20 bp, Artificial Sequence
  Synthetic oligonucleotide; AAG chr2 60465966 60465985 60465982 +
ggaagtgctatgagctctgg

SEQ ID NO: 158526 - DNA, 20 bp, Artificial Sequence
  Synthetic oligonucleotide; CAG chr2 60465970 60465989 60465986 +
gtgctatgagctctggaagc

SEQ ID NO: 158527 - DNA, 20 bp, Artificial Sequence
  Synthetic oligonucleotide; AGG chr2 60465971 60465990 60465987 +
tgctatgagctctggaagcc

SEQ ID NO: 158528 - DNA, 20 bp, Artificial Sequence
  Synthetic oligonucleotide; GGG chr2 60465972 60465991 60465988 +
gctatgagctctggaagcca

SEQ ID NO: 158529 - DNA, 20 bp, Artificial Sequence
  Synthetic oligonucleotide; GGG chr2 60465973 60465992 60465989 +
ctatgagctctggaagccag

SEQ ID NO: 158530 - DNA, 20 bp, Artificial Sequence
  Synthetic oligonucleotide; CAG chr2 60465976 60465995 60465992 +
tgagctctggaagccagggg

SEQ ID NO: 158531 - DNA, 20 bp, Artificial Sequence
  Synthetic oligonucleotide; CAG chr2 60465979 60465998 60465995 +
gctctggaagccaggggcag

SEQ ID NO: 158532 - DNA, 20 bp, Artificial Sequence
  Synthetic oligonucleotide; AGG chr2 60465980 60465999 60465996 +
ctctggaagccaggggcagc

SEQ ID NO: 158533 - DNA, 20 bp, Artificial Sequence
  Synthetic oligonucleotide; AAG chr2 60465994 60466013 60466010 +
ggcagcaggttaatgccgcc

SEQ ID NO: 158534 - DNA, 20 bp, Artificial Sequence
  Synthetic oligonucleotide; TGG chr2 60465997 60466016 60466013 +
agcaggttaatgccgccaag

SEQ ID NO: 158535 - DNA, 20 bp, Artificial Sequence
  Synthetic oligonucleotide; TGG chr2 60466002 60466021 60466018 +
gttaatgccgccaagtggaa

SEQ ID NO: 158536 - DNA, 20 bp, Artificial Sequence
  Synthetic oligonucleotide; GGG chr2 60466003 60466022 60466019 +
ttaatgccgccaagtggaat

SEQ ID NO: 158537 - DNA, 20 bp, Artificial Sequence
  Synthetic oligonucleotide; CAG chr2 60466009 60466028 60466025 +
ccgccaagtggaatgggcat

SEQ ID NO: 158538 - DNA, 20 bp, Artificial Sequence
  Synthetic oligonucleotide; AGG chr2 60466010 60466029 60466026 +
cgccaagtggaatgggcatc

SEQ ID NO: 158539 - DNA, 20 bp, Artificial Sequence
  Synthetic oligonucleotide; TAG chr2 60466020 60466039 60466036 +
aatgggcatcaggtttgttc

SEQ ID NO: 158540 - DNA, 20 bp, Artificial Sequence
  Synthetic oligonucleotide; GAG chr2 60466022 60466041 60466038 +
tgggcatcaggtttgttcta

SEQ ID NO: 158541 - DNA, 20 bp, Artificial Sequence
  Synthetic oligonucleotide; TGG chr2 60466030 60466049 60466046 +
aggtttgttctagagctttc

SEQ ID NO: 158542 - DNA, 20 bp, Artificial Sequence
  Synthetic oligonucleotide; TGG chr2 60466065 60466084 60466081 +
cacttccacataccttgttc

SEQ ID NO: 158543 - DNA, 20 bp, Artificial Sequence
  Synthetic oligonucleotide; TGG chr2 60466080 60466099 60466096 +
tgttctggtcactcctaaat

SEQ ID NO: 158544 - DNA, 20 bp, Artificial Sequence
  Synthetic oligonucleotide; CAG chr2 60466089 60466108 60466105 +
cactcctaaattggtcctgc

SEQ ID NO: 158545 - DNA, 20 bp, Artificial Sequence
  Synthetic oligonucleotide; CAG chr2 60466092 60466111 60466108 +
tcctaaattggtcctgccag

SEQ ID NO: 158546 - DNA, 20 bp, Artificial Sequence
  Synthetic oligonucleotide; AGG chr2 60466093 60466112 60466109 +
cctaaattggtcctgccagc

SEQ ID NO: 158547 - DNA, 20 bp, Artificial Sequence
  Synthetic oligonucleotide; GGG chr2 60466094 60466113 60466110 +
ctaaattggtcctgccagca

SEQ ID NO: 158548 - DNA, 20 bp, Artificial Sequence
  Synthetic oligonucleotide; GGG chr2 60466095 60466114 60466111 +
taaattggtcctgccagcag

SEQ ID NO: 158549 - DNA, 20 bp, Artificial Sequence
  Synthetic oligonucleotide; CAG chr2 60466101 60466120 60466117 +
ggtcctgccagcaggggcac

SEQ ID NO: 158550 - DNA, 20 bp, Artificial Sequence
  Synthetic oligonucleotide; TGG chr2 60466126 60466145 60466142 +
aactatgtaccctccctttg

SEQ ID NO: 158551 - DNA, 20 bp, Artificial Sequence
  Synthetic oligonucleotide; GGG chr2 60466127 60466146 60466143 +
actatgtaccctccctttgt

SEQ ID NO: 158552 - DNA, 20 bp, Artificial Sequence
  Synthetic oligonucleotide; AAG chr2 60466130 60466149 60466146 +
atgtaccctccctttgtggg

SEQ ID NO: 158553 - DNA, 20 bp, Artificial Sequence
  Synthetic oligonucleotide; AGG chr2 60466131 60466150 60466147 +
tgtaccctccctttgtggga

SEQ ID NO: 158554 - DNA, 20 bp, Artificial Sequence
  Synthetic oligonucleotide; TGG chr2 60466134 60466153 60466150 +
accctccctttgtgggaagg

SEQ ID NO: 158555 - DNA, 20 bp, Artificial Sequence
  Synthetic oligonucleotide; GGG chr2 60466135 60466154 60466151 +
ccctccctttgtgggaaggt

SEQ ID NO: 158556 - DNA, 20 bp, Artificial Sequence
  Synthetic oligonucleotide; GAG chr2 60466137 60466156 60466153 +
ctccctttgtgggaaggtgg

SEQ ID NO: 158557 - DNA, 20 bp, Artificial Sequence
  Synthetic oligonucleotide; GAG chr2 60466139 60466158 60466155 +
ccctttgtgggaaggtggga

SEQ ID NO: 158558 - DNA, 20 bp, Artificial Sequence
  Synthetic oligonucleotide; AGG chr2 60466140 60466159 60466156 +
cctttgtgggaaggtgggag

SEQ ID NO: 158559 - DNA, 20 bp, Artificial Sequence
  Synthetic oligonucleotide; CAG chr2 60466144 60466163 60466160 +
tgtgggaaggtgggagagga

SEQ ID NO: 158560 - DNA, 20 bp, Artificial Sequence
  Synthetic oligonucleotide; AGG chr2 60466145 60466164 60466161 +
gtgggaaggtgggagaggac

SEQ ID NO: 158561 - DNA, 20 bp, Artificial Sequence
  Synthetic oligonucleotide; GGG chr2 60466146 60466165 60466162 +
tgggaaggtgggagaggaca

SEQ ID NO: 158562 - DNA, 20 bp, Artificial Sequence
  Synthetic oligonucleotide; GGG chr2 60466147 60466166 60466163 +
gggaaggtgggagaggacag

SEQ ID NO: 158563 - DNA, 20 bp, Artificial Sequence
  Synthetic oligonucleotide; AAG chr2 60466159 60466178 60466175 +
gaggacaggggttccctatc

SEQ ID NO: 158564 - DNA, 20 bp, Artificial Sequence
  Synthetic oligonucleotide; CAG chr2 60466164 60466183 60466180 +
caggggttccctatcaagct

SEQ ID NO: 158565 - DNA, 20 bp, Artificial Sequence
  Synthetic oligonucleotide; CAG chr2 60466177 60466196 60466193 +
tcaagctcagactttcctac

SEQ ID NO: 158566 - DNA, 20 bp, Artificial Sequence
  Synthetic oligonucleotide; CAG chr2 60466194 60466213 60466210 +
taccagtcaaatcaaactcc

SEQ ID NO: 158567 - DNA, 20 bp, Artificial Sequence
  Synthetic oligonucleotide; CAG chr2 60466201 60466220 60466217 +
caaatcaaactcccagccct

SEQ ID NO: 158568 - DNA, 20 bp, Artificial Sequence
  Synthetic oligonucleotide; AGG chr2 60466202 60466221 60466218 +
aaatcaaactcccagccctc

SEQ ID NO: 158569 - DNA, 20 bp, Artificial Sequence
  Synthetic oligonucleotide; AAG chr2 60466205 60466224 60466221 +
tcaaactcccagccctcagg

SEQ ID NO: 158570 - DNA, 20 bp, Artificial Sequence
  Synthetic oligonucleotide; CAG chr2 60466210 60466229 60466226 +
ctcccagccctcaggaagac

SEQ ID NO: 158571 - DNA, 20 bp, Artificial Sequence
  Synthetic oligonucleotide; AGG chr2 60466211 60466230 60466227 +
tcccagccctcaggaagacc

SEQ ID NO: 158572 - DNA, 20 bp, Artificial Sequence
  Synthetic oligonucleotide; AAG chr2 60466217 60466236 60466233 +
ccctcaggaagaccaggctg

SEQ ID NO: 158573 - DNA, 20 bp, Artificial Sequence
  Synthetic oligonucleotide; GAG chr2 60466223 60466242 60466239 +
ggaagaccaggctgaagacc

SEQ ID NO: 158574 - DNA, 20 bp, Artificial Sequence
  Synthetic oligonucleotide; TGG chr2 60466239 60466258 60466255 +
gaccgagaactatgtttccc

SEQ ID NO: 158575 - DNA, 20 bp, Artificial Sequence
  Synthetic oligonucleotide; CAG chr2 60466245 60466264 60466261 +
gaactatgtttccctggcaa

SEQ ID NO: 158576 - DNA, 20 bp, Artificial Sequence
  Synthetic oligonucleotide; TGG chr2 60466252 60466271 60466268 +
gtttccctggcaacagccct

SEQ ID NO: 158577 - DNA, 20 bp, Artificial Sequence
  Synthetic oligonucleotide; AAG chr2 60466312 60466331 60466328 +
cttctatcccttccctccaa

SEQ ID NO: 158578 - DNA, 20 bp, Artificial Sequence
  Synthetic oligonucleotide; TGG chr2 60466315 60466334 60466331 +
ctatcccttccctccaaaag

SEQ ID NO: 158579 - DNA, 20 bp, Artificial Sequence
  Synthetic oligonucleotide; CAG chr2 60466329 60466348 60466345 +
caaaagtggctccgtttcca

SEQ ID NO: 158580 - DNA, 20 bp, Artificial Sequence
  Synthetic oligonucleotide; CAG chr2 60466339 60466358 60466355 +
tccgtttccacagccccatg

SEQ ID NO: 158581 - DNA, 20 bp, Artificial Sequence
  Synthetic oligonucleotide; AGG chr2 60466340 60466359 60466356 +
ccgtttccacagccccatgc

SEQ ID NO: 158582 - DNA, 20 bp, Artificial Sequence
  Synthetic oligonucleotide; CAG chr2 60466346 60466365 60466362 +
ccacagccccatgcaggccc

SEQ ID NO: 158583 - DNA, 20 bp, Artificial Sequence
  Synthetic oligonucleotide; CAG chr2 60466356 60466375 60466372 +
atgcaggccccagatgcccc

SEQ ID NO: 158584 - DNA, 20 bp, Artificial Sequence
  Synthetic oligonucleotide; CAG chr2 60466362 60466381 60466378 +
gccccagatgcccccagcaa

SEQ ID NO: 158585 - DNA, 20 bp, Artificial Sequence
  Synthetic oligonucleotide; AGG chr2 60466363 60466382 60466379 +
ccccagatgcccccagcaac

SEQ ID NO: 158586 - DNA, 20 bp, Artificial Sequence
  Synthetic oligonucleotide; GAG chr2 60466365 60466384 60466381 +
ccagatgcccccagcaacag

SEQ ID NO: 158587 - DNA, 20 bp, Artificial Sequence
  Synthetic oligonucleotide; GAG chr2 60466367 60466386 60466383 +
agatgcccccagcaacagga

SEQ ID NO: 158588 - DNA, 20 bp, Artificial Sequence
  Synthetic oligonucleotide; CAG chr2 60466381 60466400 60466397 +
acaggagagctctccccacc

SEQ ID NO: 158589 - DNA, 20 bp, Artificial Sequence
  Synthetic oligonucleotide; CAG chr2 60466385 60466404 60466401 +
gagagctctccccacccagc

SEQ ID NO: 158590 - DNA, 20 bp, Artificial Sequence
  Synthetic oligonucleotide; CAG chr2 60466392 60466411 60466408 +
ctccccacccagccagcatg

SEQ ID NO: 158591 - DNA, 20 bp, Artificial Sequence
  Synthetic oligonucleotide; AGG chr2 60466393 60466412 60466409 +
tccccacccagccagcatgc

SEQ ID NO: 158592 - DNA, 20 bp, Artificial Sequence
  Synthetic oligonucleotide; GGG chr2 60466394 60466413 60466410 +
ccccacccagccagcatgca

SEQ ID NO: 158593 - DNA, 20 bp, Artificial Sequence
  Synthetic oligonucleotide; TAG chr2 60466399 60466418 60466415 +
cccagccagcatgcagggac

SEQ ID NO: 158594 - DNA, 20 bp, Artificial Sequence
  Synthetic oligonucleotide; GAG chr2 60466409 60466428 60466425 +
atgcagggactagaaaccgt

SEQ ID NO: 158595 - DNA, 20 bp, Artificial Sequence
  Synthetic oligonucleotide; CAG chr2 60466450 60466469 60466466 +
ctgcaatctgtgacctaacc

SEQ ID NO: 158596 - DNA, 20 bp, Artificial Sequence
  Synthetic oligonucleotide; AGG chr2 60466451 60466470 60466467 +
tgcaatctgtgacctaaccc

SEQ ID NO: 158597 - DNA, 20 bp, Artificial Sequence
  Synthetic oligonucleotide; TAG chr2 60466456 60466475 60466472 +
tctgtgacctaacccaggct

SEQ ID NO: 158598 - DNA, 20 bp, Artificial Sequence
  Synthetic oligonucleotide; AGG chr2 60466457 60466476 60466473 +
ctgtgacctaacccaggctt

SEQ ID NO: 158599 - DNA, 20 bp, Artificial Sequence
  Synthetic oligonucleotide; CAG chr2 60466462 60466481 60466478 +
acctaacccaggcttaggcc

SEQ ID NO: 158600 - DNA, 20 bp, Artificial Sequence
  Synthetic oligonucleotide; TGG chr2 60466467 60466486 60466483 +
acccaggcttaggcccagct

SEQ ID NO: 158601 - DNA, 20 bp, Artificial Sequence
  Synthetic oligonucleotide; GGG chr2 60466468 60466487 60466484 +
cccaggcttaggcccagctt

SEQ ID NO: 158602 - DNA, 20 bp, Artificial Sequence
  Synthetic oligonucleotide; GGG chr2 60466469 60466488 60466485 +
ccaggcttaggcccagcttg

SEQ ID NO: 158603 - DNA, 20 bp, Artificial Sequence
  Synthetic oligonucleotide; GGG chr2 60466470 60466489 60466486 +
caggcttaggcccagcttgg

SEQ ID NO: 158604 - DNA, 20 bp, Artificial Sequence
  Synthetic oligonucleotide; AAG chr2 60466473 60466492 60466489 +
gcttaggcccagcttggggg

SEQ ID NO: 158605 - DNA, 20 bp, Artificial Sequence
  Synthetic oligonucleotide; AGG chr2 60466474 60466493 60466490 +
cttaggcccagcttggggga

SEQ ID NO: 158606 - DNA, 20 bp, Artificial Sequence
  Synthetic oligonucleotide; GGG chr2 60466475 60466494 60466491 +
ttaggcccagcttgggggaa

SEQ ID NO: 158607 - DNA, 20 bp, Artificial Sequence
  Synthetic oligonucleotide; GAG chr2 60466477 60466496 60466493 +
aggcccagcttgggggaagg

SEQ ID NO: 158608 - DNA, 20 bp, Artificial Sequence
  Synthetic oligonucleotide; CAG chr2 60466480 60466499 60466496 +
cccagcttgggggaagggag

SEQ ID NO: 158609 - DNA, 20 bp, Artificial Sequence
  Synthetic oligonucleotide; GAG chr2 60466485 60466504 60466501 +
cttgggggaagggagcagat

SEQ ID NO: 158610 - DNA, 20 bp, Artificial Sequence
  Synthetic oligonucleotide; AGG chr2 60466486 60466505 60466502 +
ttgggggaagggagcagatg

SEQ ID NO: 158611 - DNA, 20 bp, Artificial Sequence
  Synthetic oligonucleotide; CAG chr2 60466511 60466530 60466527 +
cttttaacccctgaaccacc

SEQ ID NO: 158612 - DNA, 20 bp, Artificial Sequence
  Synthetic oligonucleotide; CAG chr2 60466518 60466537 60466534 +
cccctgaaccacccagccct

SEQ ID NO: 158613 - DNA, 20 bp, Artificial Sequence
  Synthetic oligonucleotide; AGG chr2 60466519 60466538 60466535 +
ccctgaaccacccagccctc

SEQ ID NO: 158614 - DNA, 20 bp, Artificial Sequence
  Synthetic oligonucleotide; GAG chr2 60466526 60466545 60466542 +
ccacccagccctcaggacct

SEQ ID NO: 158615 - DNA, 20 bp, Artificial Sequence
  Synthetic oligonucleotide; AGG chr2 60466527 60466546 60466543 +
cacccagccctcaggacctg

SEQ ID NO: 158616 - DNA, 20 bp, Artificial Sequence
  Synthetic oligonucleotide; GGG chr2 60466528 60466547 60466544 +
acccagccctcaggacctga

SEQ ID NO: 158617 - DNA, 20 bp, Artificial Sequence
  Synthetic oligonucleotide; TAG chr2 60466564 60466583 60466580 +
cacaataactctttgttacc

SEQ ID NO: 158618 - DNA, 20 bp, Artificial Sequence
  Synthetic oligonucleotide; AGG chr2 60466565 60466584 60466581 +
acaataactctttgttacct

SEQ ID NO: 158619 - DNA, 20 bp, Artificial Sequence
  Synthetic oligonucleotide; TAG chr2 60466574 60466593 60466590 +
ctttgttacctaggattacc

SEQ ID NO: 158620 - DNA, 20 bp, Artificial Sequence
  Synthetic oligonucleotide; AGG chr2 60466575 60466594 60466591 +
tttgttacctaggattacct

SEQ ID NO: 158621 - DNA, 20 bp, Artificial Sequence
  Synthetic oligonucleotide; GAG chr2 60466577 60466596 60466593 +
tgttacctaggattacctag

SEQ ID NO: 158622 - DNA, 20 bp, Artificial Sequence
  Synthetic oligonucleotide; TGG chr2 60466598 60466617 60466614 +
agttaacaaaaataaacaac

SEQ ID NO: 158623 - DNA, 20 bp, Artificial Sequence
  Synthetic oligonucleotide; TGG chr2 60466610 60466629 60466626 +
taaacaactggctttgaatc

SEQ ID NO: 158624 - DNA, 20 bp, Artificial Sequence
  Synthetic oligonucleotide; CAG chr2 60466616 60466635 60466632 +
actggctttgaatctggtct

SEQ ID NO: 158625 - DNA, 20 bp, Artificial Sequence
  Synthetic oligonucleotide; AGG chr2 60466617 60466636 60466633 +
ctggctttgaatctggtctc

SEQ ID NO: 158626 - DNA, 20 bp, Artificial Sequence
  Synthetic oligonucleotide; GGG chr2 60466618 60466637 60466634 +
tggctttgaatctggtctca

SEQ ID NO: 158627 - DNA, 20 bp, Artificial Sequence
  Synthetic oligonucleotide; CAG chr2 60466637 60466656 60466653 +
agggtgcatgccctgctctt

SEQ ID NO: 158628 - DNA, 20 bp, Artificial Sequence
  Synthetic oligonucleotide; AAG chr2 60466651 60466670 60466667 +
gctcttcagataccatttac

SEQ ID NO: 158629 - DNA, 20 bp, Artificial Sequence
  Synthetic oligonucleotide; TGG chr2 60466655 60466674 60466671 +
ttcagataccatttacaaga

SEQ ID NO: 158630 - DNA, 20 bp, Artificial Sequence
  Synthetic oligonucleotide; GGG chr2 60466656 60466675 60466672 +
tcagataccatttacaagat

SEQ ID NO: 158631 - DNA, 20 bp, Artificial Sequence
  Synthetic oligonucleotide; AAG chr2 60466660 60466679 60466676 +
ataccatttacaagatgggt

SEQ ID NO: 158632 - DNA, 20 bp, Artificial Sequence
  Synthetic oligonucleotide; CAG chr2 60466687 60466706 60466703 +
atctccctcccatctaaaaa

SEQ ID NO: 158633 - DNA, 20 bp, Artificial Sequence
  Synthetic oligonucleotide; TAG chr2 60466697 60466716 60466713 +
catctaaaaacagtccccct

SEQ ID NO: 158634 - DNA, 20 bp, Artificial Sequence
  Synthetic oligonucleotide; GAG chr2 60466699 60466718 60466715 +
tctaaaaacagtccccctta

SEQ ID NO: 158635 - DNA, 20 bp, Artificial Sequence
  Synthetic oligonucleotide; TGG chr2 60466711 60466730 60466727 +
cccccttagagccttaactc

SEQ ID NO: 158636 - DNA, 20 bp, Artificial Sequence
  Synthetic oligonucleotide; CAG chr2 60466775 60466794 60466791 +
tttctttttttttctttcca

SEQ ID NO: 158637 - DNA, 20 bp, Artificial Sequence
  Synthetic oligonucleotide; CAG chr2 60466778 60466797 60466794 +
ctttttttttctttccacag

SEQ ID NO: 158638 - DNA, 20 bp, Artificial Sequence
  Synthetic oligonucleotide; AGG chr2 60466779 60466798 60466795 +
tttttttttctttccacagc

SEQ ID NO: 158639 - DNA, 20 bp, Artificial Sequence
  Synthetic oligonucleotide; TAG chr2 60466811 60466830 60466827 +
atttactttcaaataaaaat

SEQ ID NO: 158640 - DNA, 20 bp, Artificial Sequence
  Synthetic oligonucleotide; TAG chr2 60466855 60466874 60466871 +
tgaacctgcttttttgtgtt

SEQ ID NO: 158641 - DNA, 20 bp, Artificial Sequence
  Synthetic oligonucleotide; AGG chr2 60466856 60466875 60466872 +
gaacctgcttttttgtgttt

SEQ ID NO: 158642 - DNA, 20 bp, Artificial Sequence
  Synthetic oligonucleotide; GGG chr2 60466857 60466876 60466873 +
aacctgcttttttgtgttta

SEQ ID NO: 158643 - DNA, 20 bp, Artificial Sequence
  Synthetic oligonucleotide; TGG chr2 60466860 60466879 60466876 +
ctgcttttttgtgtttaggg

SEQ ID NO: 158644 - DNA, 20 bp, Artificial Sequence
  Synthetic oligonucleotide; TAG chr2 60466888 60466907 60466904 +
ctgcccaccccctaaccttt

SEQ ID NO: 158645 - DNA, 20 bp, Artificial Sequence
  Synthetic oligonucleotide; CAG chr2 60466922 60466941 60466938 +
tcataccatgtgttcctaca

SEQ ID NO: 158646 - DNA, 20 bp, Artificial Sequence
  Synthetic oligonucleotide; GAG chr2 60466924 60466943 60466940 +
ataccatgtgttcctacaca

SEQ ID NO: 158647 - DNA, 20 bp, Artificial Sequence
  Synthetic oligonucleotide; AAG chr2 60466927 60466946 60466943 +
ccatgtgttcctacacagag

SEQ ID NO: 158648 - DNA, 20 bp, Artificial Sequence
  Synthetic oligonucleotide; CAG chr2 60466952 60466971 60466968 +
aactgtattattttctaaaa

SEQ ID NO: 158649 - DNA, 20 bp, Artificial Sequence
  Synthetic oligonucleotide; CAG chr2 60466962 60466981 60466978 +
ttttctaaaacagtatcttt

SEQ ID NO: 158650 - DNA, 20 bp, Artificial Sequence
  Synthetic oligonucleotide; TGG chr2 60466981 60467000 60466997 +
tcagaaaacatttgtataaa

SEQ ID NO: 158651 - DNA, 20 bp, Artificial Sequence
  Synthetic oligonucleotide; AAG chr2 60466992 60467011 60467008 +
ttgtataaatggacaaattt

SEQ ID NO: 158652 - DNA, 20 bp, Artificial Sequence
  Synthetic oligonucleotide; TGG chr2 60467005 60467024 60467021 +
caaatttaagtttcataaaa

SEQ ID NO: 158653 - DNA, 20 bp, Artificial Sequence
  Synthetic oligonucleotide; AAG chr2 60467020 60467039 60467036 +
taaaatggtccctactataa

SEQ ID NO: 158654 - DNA, 20 bp, Artificial Sequence
  Synthetic oligonucleotide; AAG chr2 60467034 60467053 60467050 +
ctataaaagctcacttgaac

SEQ ID NO: 158655 - DNA, 20 bp, Artificial Sequence
  Synthetic oligonucleotide; TGG chr2 60467041 60467060 60467057 +
agctcacttgaacaagtaaa

SEQ ID NO: 158656 - DNA, 20 bp, Artificial Sequence
  Synthetic oligonucleotide; TGG chr2 60467044 60467063 60467060 +
tcacttgaacaagtaaatgg

SEQ ID NO: 158657 - DNA, 20 bp, Artificial Sequence
  Synthetic oligonucleotide; TGG chr2 60467047 60467066 60467063 +
cttgaacaagtaaatggtgg

SEQ ID NO: 158658 - DNA, 20 bp, Artificial Sequence
  Synthetic oligonucleotide; CAG chr2 60467050 60467069 60467066 +
gaacaagtaaatggtggtgg

SEQ ID NO: 158659 - DNA, 20 bp, Artificial Sequence
  Synthetic oligonucleotide; TGG chr2 60467053 60467072 60467069 +
caagtaaatggtggtggcag

SEQ ID NO: 158660 - DNA, 20 bp, Artificial Sequence
  Synthetic oligonucleotide; TGG chr2 60467056 60467075 60467072 +
gtaaatggtggtggcagtgg

SEQ ID NO: 158661 - DNA, 20 bp, Artificial Sequence
  Synthetic oligonucleotide; TGG chr2 60467059 60467078 60467075 +
aatggtggtggcagtggtgg

SEQ ID NO: 158662 - DNA, 20 bp, Artificial Sequence
  Synthetic oligonucleotide; TGG chr2 60467062 60467081 60467078 +
ggtggtggcagtggtggtgg

SEQ ID NO: 158663 - DNA, 20 bp, Artificial Sequence
  Synthetic oligonucleotide; TGG chr2 60467065 60467084 60467081 +
ggtggcagtggtggtggtgg

SEQ ID NO: 158664 - DNA, 20 bp, Artificial Sequence
  Synthetic oligonucleotide; TGG chr2 60467068 60467087 60467084 +
ggcagtggtggtggtggtgg

SEQ ID NO: 158665 - DNA, 20 bp, Artificial Sequence
  Synthetic oligonucleotide; TGG chr2 60467071 60467090 60467087 +
agtggtggtggtggtggtgg

SEQ ID NO: 158666 - DNA, 20 bp, Artificial Sequence
  Synthetic oligonucleotide; TGG chr2 60467080 60467099 60467096 +
ggtggtggtggtggtgatga

SEQ ID NO: 158667 - DNA, 20 bp, Artificial Sequence
  Synthetic oligonucleotide; TGG chr2 60467083 60467102 60467099 +
ggtggtggtggtgatgatgg

SEQ ID NO: 158668 - DNA, 20 bp, Artificial Sequence
  Synthetic oligonucleotide; TGG chr2 60467086 60467105 60467102 +
ggtggtggtgatgatggtgg

SEQ ID NO: 158669 - DNA, 20 bp, Artificial Sequence
  Synthetic oligonucleotide; TAG chr2 60467089 60467108 60467105 +
ggtggtgatgatggtggtgg

SEQ ID NO: 158670 - DNA, 20 bp, Artificial Sequence
  Synthetic oligonucleotide; TGG chr2 60467092 60467111 60467108 +
ggtgatgatggtggtggtag

SEQ ID NO: 158671 - DNA, 20 bp, Artificial Sequence
  Synthetic oligonucleotide; TGG chr2 60467095 60467114 60467111 +
gatgatggtggtggtagtgg

SEQ ID NO: 158672 - DNA, 20 bp, Artificial Sequence
  Synthetic oligonucleotide; TGG chr2 60467098 60467117 60467114 +
gatggtggtggtagtggtgg

SEQ ID NO: 158673 - DNA, 20 bp, Artificial Sequence
  Synthetic oligonucleotide; TGG chr2 60467101 60467120 60467117 +
ggtggtggtagtggtggtgg

SEQ ID NO: 158674 - DNA, 20 bp, Artificial Sequence
  Synthetic oligonucleotide; TGG chr2 60467104 60467123 60467120 +
ggtggtagtggtggtggtgg

SEQ ID NO: 158675 - DNA, 20 bp, Artificial Sequence
  Synthetic oligonucleotide; TGG chr2 60467110 60467129 60467126 +
agtggtggtggtggtggtga

SEQ ID NO: 158676 - DNA, 20 bp, Artificial Sequence
  Synthetic oligonucleotide; TGG chr2 60467113 60467132 60467129 +
ggtggtggtggtggtgatgg

SEQ ID NO: 158677 - DNA, 20 bp, Artificial Sequence
  Synthetic oligonucleotide; TGG chr2 60467119 60467138 60467135 +
ggtggtggtgatggtggtgt

SEQ ID NO: 158678 - DNA, 20 bp, Artificial Sequence
  Synthetic oligonucleotide; TGG chr2 60467122 60467141 60467138 +
ggtggtgatggtggtgttgg

SEQ ID NO: 158679 - DNA, 20 bp, Artificial Sequence
  Synthetic oligonucleotide; TGG chr2 60467128 60467147 60467144 +
gatggtggtgttggtggtga

SEQ ID NO: 158680 - DNA, 20 bp, Artificial Sequence
  Synthetic oligonucleotide; TGG chr2 60467131 60467150 60467147 +
ggtggtgttggtggtgatgg

SEQ ID NO: 158681 - DNA, 20 bp, Artificial Sequence
  Synthetic oligonucleotide; TGG chr2 60467134 60467153 60467150 +
ggtgttggtggtgatggtgg

SEQ ID NO: 158682 - DNA, 20 bp, Artificial Sequence
  Synthetic oligonucleotide; TGG chr2 60467137 60467156 60467153 +
gttggtggtgatggtggtgg

SEQ ID NO: 158683 - DNA, 20 bp, Artificial Sequence
  Synthetic oligonucleotide; TGG chr2 60467140 60467159 60467156 +
ggtggtgatggtggtggtgg

SEQ ID NO: 158684 - DNA, 20 bp, Artificial Sequence
  Synthetic oligonucleotide; TGG chr2 60467143 60467162 60467159 +
ggtgatggtggtggtggtgg

SEQ ID NO: 158685 - DNA, 20 bp, Artificial Sequence
  Synthetic oligonucleotide; TGG chr2 60467149 60467168 60467165 +
ggtggtggtggtggtggtga

SEQ ID NO: 158686 - DNA, 20 bp, Artificial Sequence
  Synthetic oligonucleotide; TGG chr2 60467152 60467171 60467168 +
ggtggtggtggtggtgatgg

SEQ ID NO: 158687 - DNA, 20 bp, Artificial Sequence
  Synthetic oligonucleotide; TGG chr2 60467155 60467174 60467171 +
ggtggtggtggtgatggtgg

SEQ ID NO: 158688 - DNA, 20 bp, Artificial Sequence
  Synthetic oligonucleotide; TGG chr2 60467158 60467177 60467174 +
ggtggtggtgatggtggtgg

SEQ ID NO: 158689 - DNA, 20 bp, Artificial Sequence
  Synthetic oligonucleotide; TGG chr2 60467161 60467180 60467177 +
ggtggtgatggtggtggtgg

SEQ ID NO: 158690 - DNA, 20 bp, Artificial Sequence
  Synthetic oligonucleotide; TGG chr2 60467164 60467183 60467180 +
ggtgatggtggtggtggtgg

SEQ ID NO: 158691 - DNA, 20 bp, Artificial Sequence
  Synthetic oligonucleotide; TGG chr2 60467170 60467189 60467186 +
ggtggtggtggtggtggtga

SEQ ID NO: 158692 - DNA, 20 bp, Artificial Sequence
  Synthetic oligonucleotide; TGG chr2 60467173 60467192 60467189 +
ggtggtggtggtggtgatgg

SEQ ID NO: 158693 - DNA, 20 bp, Artificial Sequence
  Synthetic oligonucleotide; TGG chr2 60467176 60467195 60467192 +
ggtggtggtggtgatggtgg

SEQ ID NO: 158694 - DNA, 20 bp, Artificial Sequence
  Synthetic oligonucleotide; TGG chr2 60467182 60467201 60467198 +
ggtggtgatggtggtggtga

SEQ ID NO: 158695 - DNA, 20 bp, Artificial Sequence
  Synthetic oligonucleotide; CGG chr2 60467185 60467204 60467201 +
ggtgatggtggtggtgatgg

SEQ ID NO: 158696 - DNA, 20 bp, Artificial Sequence
  Synthetic oligonucleotide; TGG chr2 60467191 60467210 60467207 +
ggtggtggtgatggcggtga

SEQ ID NO: 158697 - DNA, 20 bp, Artificial Sequence
  Synthetic oligonucleotide; TGG chr2 60467197 60467216 60467213 +
ggtgatggcggtgatggtac

SEQ ID NO: 158698 - DNA, 20 bp, Artificial Sequence
  Synthetic oligonucleotide; TGG chr2 60467203 60467222 60467219 +
ggcggtgatggtactggtga

SEQ ID NO: 158699 - DNA, 20 bp, Artificial Sequence
  Synthetic oligonucleotide; TGG chr2 60467206 60467225 60467222 +
ggtgatggtactggtgatgg

SEQ ID NO: 158700 - DNA, 20 bp, Artificial Sequence
  Synthetic oligonucleotide; TGG chr2 60467209 60467228 60467225 +
gatggtactggtgatggtgg

SEQ ID NO: 158701 - DNA, 20 bp, Artificial Sequence
  Synthetic oligonucleotide; TGG chr2 60467212 60467231 60467228 +
ggtactggtgatggtggtgg

SEQ ID NO: 158702 - DNA, 20 bp, Artificial Sequence
  Synthetic oligonucleotide; TAG chr2 60467215 60467234 60467231 +
actggtgatggtggtggtgg

SEQ ID NO: 158703 - DNA, 20 bp, Artificial Sequence
  Synthetic oligonucleotide; TGG chr2 60467221 60467240 60467237 +
gatggtggtggtggtagtga

SEQ ID NO: 158704 - DNA, 20 bp, Artificial Sequence
  Synthetic oligonucleotide; TGG chr2 60467224 60467243 60467240 +
ggtggtggtggtagtgatgg

SEQ ID NO: 158705 - DNA, 20 bp, Artificial Sequence
  Synthetic oligonucleotide; TGG chr2 60467227 60467246 60467243 +
ggtggtggtagtgatggtgg

SEQ ID NO: 158706 - DNA, 20 bp, Artificial Sequence
  Synthetic oligonucleotide; TGG chr2 60467233 60467252 60467249 +
ggtagtgatggtggtggtaa

SEQ ID NO: 158707 - DNA, 20 bp, Artificial Sequence
  Synthetic oligonucleotide; TGG chr2 60467236 60467255 60467252 +
agtgatggtggtggtaatgg

SEQ ID NO: 158708 - DNA, 20 bp, Artificial Sequence
  Synthetic oligonucleotide; TGG chr2 60467239 60467258 60467255 +
gatggtggtggtaatggtgg

SEQ ID NO: 158709 - DNA, 20 bp, Artificial Sequence
  Synthetic oligonucleotide; TGG chr2 60467242 60467261 60467258 +
ggtggtggtaatggtggtgg

SEQ ID NO: 158710 - DNA, 20 bp, Artificial Sequence
  Synthetic oligonucleotide; TGG chr2 60467248 60467267 60467264 +
ggtaatggtggtggtggtga

SEQ ID NO: 158711 - DNA, 20 bp, Artificial Sequence
  Synthetic oligonucleotide; TGG chr2 60467251 60467270 60467267 +
aatggtggtggtggtgatgg

SEQ ID NO: 158712 - DNA, 20 bp, Artificial Sequence
  Synthetic oligonucleotide; TGG chr2 60467254 60467273 60467270 +
ggtggtggtggtgatggtgg

SEQ ID NO: 158713 - DNA, 20 bp, Artificial Sequence
  Synthetic oligonucleotide; TGG chr2 60467257 60467276 60467273 +
ggtggtggtgatggtggtgg

SEQ ID NO: 158714 - DNA, 20 bp, Artificial Sequence
  Synthetic oligonucleotide; TGG chr2 60467260 60467279 60467276 +
ggtggtgatggtggtggtgg

SEQ ID NO: 158715 - DNA, 20 bp, Artificial Sequence
  Synthetic oligonucleotide; TAG chr2 60467263 60467282 60467279 +
ggtgatggtggtggtggtgg

SEQ ID NO: 158716 - DNA, 20 bp, Artificial Sequence
  Synthetic oligonucleotide; TGG chr2 60467269 60467288 60467285 +
ggtggtggtggtggtagtga

SEQ ID NO: 158717 - DNA, 20 bp, Artificial Sequence
  Synthetic oligonucleotide; TGG chr2 60467272 60467291 60467288 +
ggtggtggtggtagtgatgg

SEQ ID NO: 158718 - DNA, 20 bp, Artificial Sequence
  Synthetic oligonucleotide; TGG chr2 60467275 60467294 60467291 +
ggtggtggtagtgatggtgg

SEQ ID NO: 158719 - DNA, 20 bp, Artificial Sequence
  Synthetic oligonucleotide; TGG chr2 60467281 60467300 60467297 +
ggtagtgatggtggtggtaa

SEQ ID NO: 158720 - DNA, 20 bp, Artificial Sequence
  Synthetic oligonucleotide; TGG chr2 60467284 60467303 60467300 +
agtgatggtggtggtaatgg

SEQ ID NO: 158721 - DNA, 20 bp, Artificial Sequence
  Synthetic oligonucleotide; TGG chr2 60467287 60467306 60467303 +
gatggtggtggtaatggtgg

SEQ ID NO: 158722 - DNA, 20 bp, Artificial Sequence
  Synthetic oligonucleotide; TGG chr2 60467290 60467309 60467306 +
ggtggtggtaatggtggtgg

SEQ ID NO: 158723 - DNA, 20 bp, Artificial Sequence
  Synthetic oligonucleotide; TGG chr2 60467296 60467315 60467312 +
ggtaatggtggtggtggtga

SEQ ID NO: 158724 - DNA, 20 bp, Artificial Sequence
  Synthetic oligonucleotide; TGG chr2 60467299 60467318 60467315 +
aatggtggtggtggtgatgg

SEQ ID NO: 158725 - DNA, 20 bp, Artificial Sequence
  Synthetic oligonucleotide; TGG chr2 60467302 60467321 60467318 +
ggtggtggtggtgatggtgg

SEQ ID NO: 158726 - DNA, 20 bp, Artificial Sequence
  Synthetic oligonucleotide; TGG chr2 60467305 60467324 60467321 +
ggtggtggtgatggtggtgg

SEQ ID NO: 158727 - DNA, 20 bp, Artificial Sequence
  Synthetic oligonucleotide; TGG chr2 60467308 60467327 60467324 +
ggtggtgatggtggtggtgg

SEQ ID NO: 158728 - DNA, 20 bp, Artificial Sequence
  Synthetic oligonucleotide; TAG chr2 60467311 60467330 60467327 +
ggtgatggtggtggtggtgg

SEQ ID NO: 158729 - DNA, 20 bp, Artificial Sequence
  Synthetic oligonucleotide; TGG chr2 60467317 60467336 60467333 +
ggtggtggtggtggtagtga

SEQ ID NO: 158730 - DNA, 20 bp, Artificial Sequence
  Synthetic oligonucleotide; TGG chr2 60467320 60467339 60467336 +
ggtggtggtggtagtgatgg

SEQ ID NO: 158731 - DNA, 20 bp, Artificial Sequence
  Synthetic oligonucleotide; TGG chr2 60467323 60467342 60467339 +
ggtggtggtagtgatggtgg

SEQ ID NO: 158732 - DNA, 20 bp, Artificial Sequence
  Synthetic oligonucleotide; TGG chr2 60467329 60467348 60467345 +
ggtagtgatggtggtggtaa

SEQ ID NO: 158733 - DNA, 20 bp, Artificial Sequence
  Synthetic oligonucleotide; TGG chr2 60467332 60467351 60467348 +
agtgatggtggtggtaatgg

SEQ ID NO: 158734 - DNA, 20 bp, Artificial Sequence
  Synthetic oligonucleotide; TGG chr2 60467335 60467354 60467351 +
gatggtggtggtaatggtgg

SEQ ID NO: 158735 - DNA, 20 bp, Artificial Sequence
  Synthetic oligonucleotide; TGG chr2 60467338 60467357 60467354 +
ggtggtggtaatggtggtgg

SEQ ID NO: 158736 - DNA, 20 bp, Artificial Sequence
  Synthetic oligonucleotide; TGG chr2 60467344 60467363 60467360 +
ggtaatggtggtggtggtga

SEQ ID NO: 158737 - DNA, 20 bp, Artificial Sequence
  Synthetic oligonucleotide; TGG chr2 60467347 60467366 60467363 +
aatggtggtggtggtgatgg

SEQ ID NO: 158738 - DNA, 20 bp, Artificial Sequence
  Synthetic oligonucleotide; TGG chr2 60467356 60467375 60467372 +
ggtggtgatggtggtgatga

SEQ ID NO: 158739 - DNA, 20 bp, Artificial Sequence
  Synthetic oligonucleotide; TGG chr2 60467362 60467381 60467378 +
gatggtggtgatgatggtga

SEQ ID NO: 158740 - DNA, 20 bp, Artificial Sequence
  Synthetic oligonucleotide; TGG chr2 60467368 60467387 60467384 +
ggtgatgatggtgatggtac

SEQ ID NO: 158741 - DNA, 20 bp, Artificial Sequence
  Synthetic oligonucleotide; TGG chr2 60467371 60467390 60467387 +
gatgatggtgatggtactgg

SEQ ID NO: 158742 - DNA, 20 bp, Artificial Sequence
  Synthetic oligonucleotide; TGG chr2 60467377 60467396 60467393 +
ggtgatggtactggtggtga

SEQ ID NO: 158743 - DNA, 20 bp, Artificial Sequence
  Synthetic oligonucleotide; TGG chr2 60467383 60467402 60467399 +
ggtactggtggtgatggtga

SEQ ID NO: 158744 - DNA, 20 bp, Artificial Sequence
  Synthetic oligonucleotide; TGG chr2 60467389 60467408 60467405 +
ggtggtgatggtgatggtga

SEQ ID NO: 158745 - DNA, 20 bp, Artificial Sequence
  Synthetic oligonucleotide; TGG chr2 60467395 60467414 60467411 +
gatggtgatggtgatggtac

SEQ ID NO: 158746 - DNA, 20 bp, Artificial Sequence
  Synthetic oligonucleotide; TGG chr2 60467401 60467420 60467417 +
gatggtgatggtactggtga

SEQ ID NO: 158747 - DNA, 20 bp, Artificial Sequence
  Synthetic oligonucleotide; TGG chr2 60467404 60467423 60467420 +
ggtgatggtactggtgatgg

SEQ ID NO: 158748 - DNA, 20 bp, Artificial Sequence
  Synthetic oligonucleotide; TGG chr2 60467407 60467426 60467423 +
gatggtactggtgatggtgg

SEQ ID NO: 158749 - DNA, 20 bp, Artificial Sequence
  Synthetic oligonucleotide; TGG chr2 60467410 60467429 60467426 +
ggtactggtgatggtggtgg

SEQ ID NO: 158750 - DNA, 20 bp, Artificial Sequence
  Synthetic oligonucleotide; TAG chr2 60467413 60467432 60467429 +
actggtgatggtggtggtgg

SEQ ID NO: 158751 - DNA, 20 bp, Artificial Sequence
  Synthetic oligonucleotide; TGG chr2 60467419 60467438 60467435 +
gatggtggtggtggtagtga

SEQ ID NO: 158752 - DNA, 20 bp, Artificial Sequence
  Synthetic oligonucleotide; TGG chr2 60467422 60467441 60467438 +
ggtggtggtggtagtgatgg

SEQ ID NO: 158753 - DNA, 20 bp, Artificial Sequence
  Synthetic oligonucleotide; TGG chr2 60467425 60467444 60467441 +
ggtggtggtagtgatggtgg

SEQ ID NO: 158754 - DNA, 20 bp, Artificial Sequence
  Synthetic oligonucleotide; TGG chr2 60467431 60467450 60467447 +
ggtagtgatggtggtggtaa

SEQ ID NO: 158755 - DNA, 20 bp, Artificial Sequence
  Synthetic oligonucleotide; TGG chr2 60467434 60467453 60467450 +
agtgatggtggtggtaatgg

SEQ ID NO: 158756 - DNA, 20 bp, Artificial Sequence
  Synthetic oligonucleotide; TGG chr2 60467437 60467456 60467453 +
gatggtggtggtaatggtgg

SEQ ID NO: 158757 - DNA, 20 bp, Artificial Sequence
  Synthetic oligonucleotide; TGG chr2 60467440 60467459 60467456 +
ggtggtggtaatggtggtgg

SEQ ID NO: 158758 - DNA, 20 bp, Artificial Sequence
  Synthetic oligonucleotide; TGG chr2 60467446 60467465 60467462 +
ggtaatggtggtggtggtga

SEQ ID NO: 158759 - DNA, 20 bp, Artificial Sequence
  Synthetic oligonucleotide; TGG chr2 60467449 60467468 60467465 +
aatggtggtggtggtgatgg

SEQ ID NO: 158760 - DNA, 20 bp, Artificial Sequence
  Synthetic oligonucleotide; TGG chr2 60467452 60467471 60467468 +
ggtggtggtggtgatggtgg

SEQ ID NO: 158761 - DNA, 20 bp, Artificial Sequence
  Synthetic oligonucleotide; TGG chr2 60467458 60467477 60467474 +
ggtggtgatggtggtggtaa

SEQ ID NO: 158762 - DNA, 20 bp, Artificial Sequence
  Synthetic oligonucleotide; TGG chr2 60467461 60467480 60467477 +
ggtgatggtggtggtaatgg

SEQ ID NO: 158763 - DNA, 20 bp, Artificial Sequence
  Synthetic oligonucleotide; TGG chr2 60467464 60467483 60467480 +
gatggtggtggtaatggtgg

SEQ ID NO: 158764 - DNA, 20 bp, Artificial Sequence
  Synthetic oligonucleotide; TGG chr2 60467467 60467486 60467483 +
ggtggtggtaatggtggtgg

SEQ ID NO: 158765 - DNA, 20 bp, Artificial Sequence
  Synthetic oligonucleotide; TGG chr2 60467473 60467492 60467489 +
ggtaatggtggtggtggtga

SEQ ID NO: 158766 - DNA, 20 bp, Artificial Sequence
  Synthetic oligonucleotide; TGG chr2 60467476 60467495 60467492 +
aatggtggtggtggtgatgg

SEQ ID NO: 158767 - DNA, 20 bp, Artificial Sequence
  Synthetic oligonucleotide; TGG chr2 60467485 60467504 60467501 +
ggtggtgatggtggtgatga

SEQ ID NO: 158768 - DNA, 20 bp, Artificial Sequence
  Synthetic oligonucleotide; TGG chr2 60467491 60467510 60467507 +
gatggtggtgatgatggtga

SEQ ID NO: 158769 - DNA, 20 bp, Artificial Sequence
  Synthetic oligonucleotide; TGG chr2 60467497 60467516 60467513 +
ggtgatgatggtgatggtac

SEQ ID NO: 158770 - DNA, 20 bp, Artificial Sequence
  Synthetic oligonucleotide; TGG chr2 60467500 60467519 60467516 +
gatgatggtgatggtactgg

SEQ ID NO: 158771 - DNA, 20 bp, Artificial Sequence
  Synthetic oligonucleotide; TGG chr2 60467506 60467525 60467522 +
ggtgatggtactggtggtga

SEQ ID NO: 158772 - DNA, 20 bp, Artificial Sequence
  Synthetic oligonucleotide; TGG chr2 60467512 60467531 60467528 +
ggtactggtggtgatggtga

SEQ ID NO: 158773 - DNA, 20 bp, Artificial Sequence
  Synthetic oligonucleotide; TGG chr2 60467518 60467537 60467534 +
ggtggtgatggtgatggtga

SEQ ID NO: 158774 - DNA, 20 bp, Artificial Sequence
  Synthetic oligonucleotide; TGG chr2 60467524 60467543 60467540 +
gatggtgatggtgatggtac

SEQ ID NO: 158775 - DNA, 20 bp, Artificial Sequence
  Synthetic oligonucleotide; TGG chr2 60467530 60467549 60467546 +
gatggtgatggtactggtga

SEQ ID NO: 158776 - DNA, 20 bp, Artificial Sequence
  Synthetic oligonucleotide; TGG chr2 60467533 60467552 60467549 +
ggtgatggtactggtgatgg

SEQ ID NO: 158777 - DNA, 20 bp, Artificial Sequence
  Synthetic oligonucleotide; TGG chr2 60467536 60467555 60467552 +
gatggtactggtgatggtgg

SEQ ID NO: 158778 - DNA, 20 bp, Artificial Sequence
  Synthetic oligonucleotide; TGG chr2 60467539 60467558 60467555 +
ggtactggtgatggtggtgg

SEQ ID NO: 158779 - DNA, 20 bp, Artificial Sequence
  Synthetic oligonucleotide; TAG chr2 60467542 60467561 60467558 +
actggtgatggtggtggtgg

SEQ ID NO: 158780 - DNA, 20 bp, Artificial Sequence
  Synthetic oligonucleotide; TGG chr2 60467548 60467567 60467564 +
gatggtggtggtggtagtga

SEQ ID NO: 158781 - DNA, 20 bp, Artificial Sequence
  Synthetic oligonucleotide; TGG chr2 60467551 60467570 60467567 +
ggtggtggtggtagtgatgg

SEQ ID NO: 158782 - DNA, 20 bp, Artificial Sequence
  Synthetic oligonucleotide; TGG chr2 60467554 60467573 60467570 +
ggtggtggtagtgatggtgg

SEQ ID NO: 158783 - DNA, 20 bp, Artificial Sequence
  Synthetic oligonucleotide; TGG chr2 60467560 60467579 60467576 +
ggtagtgatggtggtggtaa

SEQ ID NO: 158784 - DNA, 20 bp, Artificial Sequence
  Synthetic oligonucleotide; TGG chr2 60467563 60467582 60467579 +
agtgatggtggtggtaatgg

SEQ ID NO: 158785 - DNA, 20 bp, Artificial Sequence
  Synthetic oligonucleotide; TGG chr2 60467566 60467585 60467582 +
gatggtggtggtaatggtgg

SEQ ID NO: 158786 - DNA, 20 bp, Artificial Sequence
  Synthetic oligonucleotide; TGG chr2 60467569 60467588 60467585 +
ggtggtggtaatggtggtgg

SEQ ID NO: 158787 - DNA, 20 bp, Artificial Sequence
  Synthetic oligonucleotide; TGG chr2 60467575 60467594 60467591 +
ggtaatggtggtggtggtga

SEQ ID NO: 158788 - DNA, 20 bp, Artificial Sequence
  Synthetic oligonucleotide; TGG chr2 60467578 60467597 60467594 +
aatggtggtggtggtgatgg

SEQ ID NO: 158789 - DNA, 20 bp, Artificial Sequence
  Synthetic oligonucleotide; TGG chr2 60467581 60467600 60467597 +
ggtggtggtggtgatggtgg

SEQ ID NO: 158790 - DNA, 20 bp, Artificial Sequence
  Synthetic oligonucleotide; TGG chr2 60467584 60467603 60467600 +
ggtggtggtgatggtggtgg

SEQ ID NO: 158791 - DNA, 20 bp, Artificial Sequence
  Synthetic oligonucleotide; TGG chr2 60467587 60467606 60467603 +
ggtggtgatggtggtggtgg

SEQ ID NO: 158792 - DNA, 20 bp, Artificial Sequence
  Synthetic oligonucleotide; TAG chr2 60467590 60467609 60467606 +
ggtgatggtggtggtggtgg

SEQ ID NO: 158793 - DNA, 20 bp, Artificial Sequence
  Synthetic oligonucleotide; TGG chr2 60467596 60467615 60467612 +
ggtggtggtggtggtagtga

SEQ ID NO: 158794 - DNA, 20 bp, Artificial Sequence
  Synthetic oligonucleotide; TGG chr2 60467599 60467618 60467615 +
ggtggtggtggtagtgatgg

SEQ ID NO: 158795 - DNA, 20 bp, Artificial Sequence
  Synthetic oligonucleotide; TGG chr2 60467602 60467621 60467618 +
ggtggtggtagtgatggtgg

SEQ ID NO: 158796 - DNA, 20 bp, Artificial Sequence
  Synthetic oligonucleotide; TGG chr2 60467608 60467627 60467624 +
ggtagtgatggtggtggtaa

SEQ ID NO: 158797 - DNA, 20 bp, Artificial Sequence
  Synthetic oligonucleotide; TGG chr2 60467611 60467630 60467627 +
agtgatggtggtggtaatgg

SEQ ID NO: 158798 - DNA, 20 bp, Artificial Sequence
  Synthetic oligonucleotide; TGG chr2 60467614 60467633 60467630 +
gatggtggtggtaatggtgg

SEQ ID NO: 158799 - DNA, 20 bp, Artificial Sequence
  Synthetic oligonucleotide; TGG chr2 60467617 60467636 60467633 +
ggtggtggtaatggtggtgg

SEQ ID NO: 158800 - DNA, 20 bp, Artificial Sequence
  Synthetic oligonucleotide; TGG chr2 60467623 60467642 60467639 +
ggtaatggtggtggtggtga

SEQ ID NO: 158801 - DNA, 20 bp, Artificial Sequence
  Synthetic oligonucleotide; TGG chr2 60467626 60467645 60467642 +
aatggtggtggtggtgatgg

SEQ ID NO: 158802 - DNA, 20 bp, Artificial Sequence
  Synthetic oligonucleotide; TGG chr2 60467635 60467654 60467651 +
ggtggtgatggtggtgatga

SEQ ID NO: 158803 - DNA, 20 bp, Artificial Sequence
  Synthetic oligonucleotide; TGG chr2 60467641 60467660 60467657 +
gatggtggtgatgatggtga

SEQ ID NO: 158804 - DNA, 20 bp, Artificial Sequence
  Synthetic oligonucleotide; TGG chr2 60467647 60467666 60467663 +
ggtgatgatggtgatggtac

SEQ ID NO: 158805 - DNA, 20 bp, Artificial Sequence
  Synthetic oligonucleotide; TGG chr2 60467650 60467669 60467666 +
gatgatggtgatggtactgg

SEQ ID NO: 158806 - DNA, 20 bp, Artificial Sequence
  Synthetic oligonucleotide; TGG chr2 60467656 60467675 60467672 +
ggtgatggtactggtggtga

SEQ ID NO: 158807 - DNA, 20 bp, Artificial Sequence
  Synthetic oligonucleotide; TGG chr2 60467662 60467681 60467678 +
ggtactggtggtgatggtga

SEQ ID NO: 158808 - DNA, 20 bp, Artificial Sequence
  Synthetic oligonucleotide; TGG chr2 60467665 60467684 60467681 +
actggtggtgatggtgatgg

SEQ ID NO: 158809 - DNA, 20 bp, Artificial Sequence
  Synthetic oligonucleotide; TGG chr2 60467668 60467687 60467684 +
ggtggtgatggtgatggtgg

SEQ ID NO: 158810 - DNA, 20 bp, Artificial Sequence
  Synthetic oligonucleotide; TGG chr2 60467671 60467690 60467687 +
ggtgatggtgatggtggtgg

SEQ ID NO: 158811 - DNA, 20 bp, Artificial Sequence
  Synthetic oligonucleotide; TGG chr2 60467674 60467693 60467690 +
gatggtgatggtggtggtgg

SEQ ID NO: 158812 - DNA, 20 bp, Artificial Sequence
  Synthetic oligonucleotide; TGG chr2 60467680 60467699 60467696 +
gatggtggtggtggtggtga

SEQ ID NO: 158813 - DNA, 20 bp, Artificial Sequence
  Synthetic oligonucleotide; TGG chr2 60467686 60467705 60467702 +
ggtggtggtggtgatggtac

SEQ ID NO: 158814 - DNA, 20 bp, Artificial Sequence
  Synthetic oligonucleotide; TGG chr2 60467689 60467708 60467705 +
ggtggtggtgatggtactgg

SEQ ID NO: 158815 - DNA, 20 bp, Artificial Sequence
  Synthetic oligonucleotide; TGG chr2 60467695 60467714 60467711 +
ggtgatggtactggtggtga

SEQ ID NO: 158816 - DNA, 20 bp, Artificial Sequence
  Synthetic oligonucleotide; TGG chr2 60467701 60467720 60467717 +
ggtactggtggtgatggtac

SEQ ID NO: 158817 - DNA, 20 bp, Artificial Sequence
  Synthetic oligonucleotide; TGG chr2 60467704 60467723 60467720 +
actggtggtgatggtactgg

SEQ ID NO: 158818 - DNA, 20 bp, Artificial Sequence
  Synthetic oligonucleotide; TGG chr2 60467710 60467729 60467726 +
ggtgatggtactggtggtga

SEQ ID NO: 158819 - DNA, 20 bp, Artificial Sequence
  Synthetic oligonucleotide; TGG chr2 60467713 60467732 60467729 +
gatggtactggtggtgatgg

SEQ ID NO: 158820 - DNA, 20 bp, Artificial Sequence
  Synthetic oligonucleotide; TGG chr2 60467716 60467735 60467732 +
ggtactggtggtgatggtgg

SEQ ID NO: 158821 - DNA, 20 bp, Artificial Sequence
  Synthetic oligonucleotide; TGG chr2 60467719 60467738 60467735 +
actggtggtgatggtggtgg

SEQ ID NO: 158822 - DNA, 20 bp, Artificial Sequence
  Synthetic oligonucleotide; TAG chr2 60467722 60467741 60467738 +
ggtggtgatggtggtggtgg

SEQ ID NO: 158823 - DNA, 20 bp, Artificial Sequence
  Synthetic oligonucleotide; TGG chr2 60467728 60467747 60467744 +
gatggtggtggtggtagtga

SEQ ID NO: 158824 - DNA, 20 bp, Artificial Sequence
  Synthetic oligonucleotide; TGG chr2 60467731 60467750 60467747 +
ggtggtggtggtagtgatgg

SEQ ID NO: 158825 - DNA, 20 bp, Artificial Sequence
  Synthetic oligonucleotide; TGG chr2 60467734 60467753 60467750 +
ggtggtggtagtgatggtgg

SEQ ID NO: 158826 - DNA, 20 bp, Artificial Sequence
  Synthetic oligonucleotide; TGG chr2 60467740 60467759 60467756 +
ggtagtgatggtggtggtaa

SEQ ID NO: 158827 - DNA, 20 bp, Artificial Sequence
  Synthetic oligonucleotide; TGG chr2 60467743 60467762 60467759 +
agtgatggtggtggtaatgg

SEQ ID NO: 158828 - DNA, 20 bp, Artificial Sequence
  Synthetic oligonucleotide; TGG chr2 60467746 60467765 60467762 +
gatggtggtggtaatggtgg

SEQ ID NO: 158829 - DNA, 20 bp, Artificial Sequence
  Synthetic oligonucleotide; TGG chr2 60467749 60467768 60467765 +
ggtggtggtaatggtggtgg

SEQ ID NO: 158830 - DNA, 20 bp, Artificial Sequence
  Synthetic oligonucleotide; GAG chr2 60467751 60467770 60467767 +
tggtggtaatggtggtggtg

SEQ ID NO: 158831 - DNA, 20 bp, Artificial Sequence
  Synthetic oligonucleotide; TGG chr2 60467755 60467774 60467771 +
ggtaatggtggtggtggaga

SEQ ID NO: 158832 - DNA, 20 bp, Artificial Sequence
  Synthetic oligonucleotide; TGG chr2 60467758 60467777 60467774 +
aatggtggtggtggagatgg

SEQ ID NO: 158833 - DNA, 20 bp, Artificial Sequence
  Synthetic oligonucleotide; TGG chr2 60467767 60467786 60467783 +
ggtggagatggtggtgttga

SEQ ID NO: 158834 - DNA, 20 bp, Artificial Sequence
  Synthetic oligonucleotide; TGG chr2 60467773 60467792 60467789 +
gatggtggtgttgatggtga

SEQ ID NO: 158835 - DNA, 20 bp, Artificial Sequence
  Synthetic oligonucleotide; TGG chr2 60467779 60467798 60467795 +
ggtgttgatggtgatggtac

SEQ ID NO: 158836 - DNA, 20 bp, Artificial Sequence
  Synthetic oligonucleotide; TGG chr2 60467782 60467801 60467798 +
gttgatggtgatggtactgg

SEQ ID NO: 158837 - DNA, 20 bp, Artificial Sequence
  Synthetic oligonucleotide; TGG chr2 60467788 60467807 60467804 +
ggtgatggtactggtggtga

SEQ ID NO: 158838 - DNA, 20 bp, Artificial Sequence
  Synthetic oligonucleotide; TGG chr2 60467794 60467813 60467810 +
ggtactggtggtgatggtac

SEQ ID NO: 158839 - DNA, 20 bp, Artificial Sequence
  Synthetic oligonucleotide; TGG chr2 60467797 60467816 60467813 +
actggtggtgatggtactgg

SEQ ID NO: 158840 - DNA, 20 bp, Artificial Sequence
  Synthetic oligonucleotide; TGG chr2 60467803 60467822 60467819 +
ggtgatggtactggtggtga

SEQ ID NO: 158841 - DNA, 20 bp, Artificial Sequence
  Synthetic oligonucleotide; TGG chr2 60467809 60467828 60467825 +
ggtactggtggtgatggtga

SEQ ID NO: 158842 - DNA, 20 bp, Artificial Sequence
  Synthetic oligonucleotide; TGG chr2 60467812 60467831 60467828 +
actggtggtgatggtgatgg

SEQ ID NO: 158843 - DNA, 20 bp, Artificial Sequence
  Synthetic oligonucleotide; TGG chr2 60467815 60467834 60467831 +
ggtggtgatggtgatggtgg

SEQ ID NO: 158844 - DNA, 20 bp, Artificial Sequence
  Synthetic oligonucleotide; TGG chr2 60467818 60467837 60467834 +
ggtgatggtgatggtggtgg

SEQ ID NO: 158845 - DNA, 20 bp, Artificial Sequence
  Synthetic oligonucleotide; TGG chr2 60467821 60467840 60467837 +
gatggtgatggtggtggtgg

SEQ ID NO: 158846 - DNA, 20 bp, Artificial Sequence
  Synthetic oligonucleotide; TGG chr2 60467833 60467852 60467849 +
ggtggtggtggtgatgctac

SEQ ID NO: 158847 - DNA, 20 bp, Artificial Sequence
  Synthetic oligonucleotide; TGG chr2 60467836 60467855 60467852 +
ggtggtggtgatgctactgg

SEQ ID NO: 158848 - DNA, 20 bp, Artificial Sequence
  Synthetic oligonucleotide; TGG chr2 60467842 60467861 60467858 +
ggtgatgctactggtggtga

SEQ ID NO: 158849 - DNA, 20 bp, Artificial Sequence
  Synthetic oligonucleotide; TGG chr2 60467848 60467867 60467864 +
gctactggtggtgatggtac

SEQ ID NO: 158850 - DNA, 20 bp, Artificial Sequence
  Synthetic oligonucleotide; TGG chr2 60467851 60467870 60467867 +
actggtggtgatggtactgg

SEQ ID NO: 158851 - DNA, 20 bp, Artificial Sequence
  Synthetic oligonucleotide; TGG chr2 60467857 60467876 60467873 +
ggtgatggtactggtggtga

SEQ ID NO: 158852 - DNA, 20 bp, Artificial Sequence
  Synthetic oligonucleotide; TGG chr2 60467860 60467879 60467876 +
gatggtactggtggtgatgg

SEQ ID NO: 158853 - DNA, 20 bp, Artificial Sequence
  Synthetic oligonucleotide; TGG chr2 60467863 60467882 60467879 +
ggtactggtggtgatggtgg

SEQ ID NO: 158854 - DNA, 20 bp, Artificial Sequence
  Synthetic oligonucleotide; TGG chr2 60467866 60467885 60467882 +
actggtggtgatggtggtgg

SEQ ID NO: 158855 - DNA, 20 bp, Artificial Sequence
  Synthetic oligonucleotide; TAG chr2 60467869 60467888 60467885 +
ggtggtgatggtggtggtgg

SEQ ID NO: 158856 - DNA, 20 bp, Artificial Sequence
  Synthetic oligonucleotide; TGG chr2 60467875 60467894 60467891 +
gatggtggtggtggtagtga

SEQ ID NO: 158857 - DNA, 20 bp, Artificial Sequence
  Synthetic oligonucleotide; TGG chr2 60467878 60467897 60467894 +
ggtggtggtggtagtgatgg

SEQ ID NO: 158858 - DNA, 20 bp, Artificial Sequence
  Synthetic oligonucleotide; TGG chr2 60467881 60467900 60467897 +
ggtggtggtagtgatggtgg

SEQ ID NO: 158859 - DNA, 20 bp, Artificial Sequence
  Synthetic oligonucleotide; TGG chr2 60467887 60467906 60467903 +
ggtagtgatggtggtggtaa

SEQ ID NO: 158860 - DNA, 20 bp, Artificial Sequence
  Synthetic oligonucleotide; TGG chr2 60467890 60467909 60467906 +
agtgatggtggtggtaatgg

SEQ ID NO: 158861 - DNA, 20 bp, Artificial Sequence
  Synthetic oligonucleotide; TGG chr2 60467893 60467912 60467909 +
gatggtggtggtaatggtgg

SEQ ID NO: 158862 - DNA, 20 bp, Artificial Sequence
  Synthetic oligonucleotide; TGG chr2 60467896 60467915 60467912 +
ggtggtggtaatggtggtgg

SEQ ID NO: 158863 - DNA, 20 bp, Artificial Sequence
  Synthetic oligonucleotide; TGG chr2 60467899 60467918 60467915 +
ggtggtaatggtggtggtgg

SEQ ID NO: 158864 - DNA, 20 bp, Artificial Sequence
  Synthetic oligonucleotide; TGG chr2 60467902 60467921 60467918 +
ggtaatggtggtggtggtgg

SEQ ID NO: 158865 - DNA, 20 bp, Artificial Sequence
  Synthetic oligonucleotide; TGG chr2 60467905 60467924 60467921 +
aatggtggtggtggtggtgg

SEQ ID NO: 158866 - DNA, 20 bp, Artificial Sequence
  Synthetic oligonucleotide; TAG chr2 60467908 60467927 60467924 +
ggtggtggtggtggtggtgg

SEQ ID NO: 158867 - DNA, 20 bp, Artificial Sequence
  Synthetic oligonucleotide; TGG chr2 60467914 60467933 60467930 +
ggtggtggtggtggtagtga

SEQ ID NO: 158868 - DNA, 20 bp, Artificial Sequence
  Synthetic oligonucleotide; TGG chr2 60467917 60467936 60467933 +
ggtggtggtggtagtgatgg

SEQ ID NO: 158869 - DNA, 20 bp, Artificial Sequence
  Synthetic oligonucleotide; TGG chr2 60467920 60467939 60467936 +
ggtggtggtagtgatggtgg

SEQ ID NO: 158870 - DNA, 20 bp, Artificial Sequence
  Synthetic oligonucleotide; TGG chr2 60467923 60467942 60467939 +
ggtggtagtgatggtggtgg

SEQ ID NO: 158871 - DNA, 20 bp, Artificial Sequence
  Synthetic oligonucleotide; TGG chr2 60467929 60467948 60467945 +
agtgatggtggtggtggtga

SEQ ID NO: 158872 - DNA, 20 bp, Artificial Sequence
  Synthetic oligonucleotide; TGG chr2 60467935 60467954 60467951 +
ggtggtggtggtgatggtac

SEQ ID NO: 158873 - DNA, 20 bp, Artificial Sequence
  Synthetic oligonucleotide; TGG chr2 60467938 60467957 60467954 +
ggtggtggtgatggtactgg

SEQ ID NO: 158874 - DNA, 20 bp, Artificial Sequence
  Synthetic oligonucleotide; TGG chr2 60467944 60467963 60467960 +
ggtgatggtactggtggtga

SEQ ID NO: 158875 - DNA, 20 bp, Artificial Sequence
  Synthetic oligonucleotide; TGG chr2 60467947 60467966 60467963 +
gatggtactggtggtgatgg

SEQ ID NO: 158876 - DNA, 20 bp, Artificial Sequence
  Synthetic oligonucleotide; TGG chr2 60467950 60467969 60467966 +
ggtactggtggtgatggtgg

SEQ ID NO: 158877 - DNA, 20 bp, Artificial Sequence
  Synthetic oligonucleotide; TGG chr2 60467953 60467972 60467969 +
actggtggtgatggtggtgg

SEQ ID NO: 158878 - DNA, 20 bp, Artificial Sequence
  Synthetic oligonucleotide; TAG chr2 60467956 60467975 60467972 +
ggtggtgatggtggtggtgg

SEQ ID NO: 158879 - DNA, 20 bp, Artificial Sequence
  Synthetic oligonucleotide; TGG chr2 60467962 60467981 60467978 +
gatggtggtggtggtagtga

SEQ ID NO: 158880 - DNA, 20 bp, Artificial Sequence
  Synthetic oligonucleotide; TGG chr2 60467965 60467984 60467981 +
ggtggtggtggtagtgatgg

SEQ ID NO: 158881 - DNA, 20 bp, Artificial Sequence
  Synthetic oligonucleotide; TGG chr2 60467968 60467987 60467984 +
ggtggtggtagtgatggtgg

SEQ ID NO: 158882 - DNA, 20 bp, Artificial Sequence
  Synthetic oligonucleotide; TGG chr2 60467974 60467993 60467990 +
ggtagtgatggtggtggtaa

SEQ ID NO: 158883 - DNA, 20 bp, Artificial Sequence
  Synthetic oligonucleotide; TGG chr2 60467977 60467996 60467993 +
agtgatggtggtggtaatgg

SEQ ID NO: 158884 - DNA, 20 bp, Artificial Sequence
  Synthetic oligonucleotide; TGG chr2 60467980 60467999 60467996 +
gatggtggtggtaatggtgg

SEQ ID NO: 158885 - DNA, 20 bp, Artificial Sequence
  Synthetic oligonucleotide; TGG chr2 60467983 60468002 60467999 +
ggtggtggtaatggtggtgg

SEQ ID NO: 158886 - DNA, 20 bp, Artificial Sequence
  Synthetic oligonucleotide; TGG chr2 60467989 60468008 60468005 +
ggtaatggtggtggtggtga

SEQ ID NO: 158887 - DNA, 20 bp, Artificial Sequence
  Synthetic oligonucleotide; TGG chr2 60467992 60468011 60468008 +
aatggtggtggtggtgatgg

SEQ ID NO: 158888 - DNA, 20 bp, Artificial Sequence
  Synthetic oligonucleotide; TGG chr2 60467995 60468014 60468011 +
ggtggtggtggtgatggtgg

SEQ ID NO: 158889 - DNA, 20 bp, Artificial Sequence
  Synthetic oligonucleotide; TGG chr2 60467998 60468017 60468014 +
ggtggtggtgatggtggtgg

SEQ ID NO: 158890 - DNA, 20 bp, Artificial Sequence
  Synthetic oligonucleotide; TGG chr2 60468001 60468020 60468017 +
ggtggtgatggtggtggtgg

SEQ ID NO: 158891 - DNA, 20 bp, Artificial Sequence
  Synthetic oligonucleotide; TAG chr2 60468004 60468023 60468020 +
ggtgatggtggtggtggtgg

SEQ ID NO: 158892 - DNA, 20 bp, Artificial Sequence
  Synthetic oligonucleotide; TGG chr2 60468007 60468026 60468023 +
gatggtggtggtggtggtag

SEQ ID NO: 158893 - DNA, 20 bp, Artificial Sequence
  Synthetic oligonucleotide; TGG chr2 60468010 60468029 60468026 +
ggtggtggtggtggtagtgg

SEQ ID NO: 158894 - DNA, 20 bp, Artificial Sequence
  Synthetic oligonucleotide; TGG chr2 60468016 60468035 60468032 +
ggtggtggtagtggtggtga

SEQ ID NO: 158895 - DNA, 20 bp, Artificial Sequence
  Synthetic oligonucleotide; TGG chr2 60468019 60468038 60468035 +
ggtggtagtggtggtgatgg

SEQ ID NO: 158896 - DNA, 20 bp, Artificial Sequence
  Synthetic oligonucleotide; TGG chr2 60468025 60468044 60468041 +
agtggtggtgatggtggtga

SEQ ID NO: 158897 - DNA, 20 bp, Artificial Sequence
  Synthetic oligonucleotide; TGG chr2 60468031 60468050 60468047 +
ggtgatggtggtgatggtac

SEQ ID NO: 158898 - DNA, 20 bp, Artificial Sequence
  Synthetic oligonucleotide; TGG chr2 60468034 60468053 60468050 +
gatggtggtgatggtactgg

SEQ ID NO: 158899 - DNA, 20 bp, Artificial Sequence
  Synthetic oligonucleotide; TGG chr2 60468040 60468059 60468056 +
ggtgatggtactggtggtga

SEQ ID NO: 158900 - DNA, 20 bp, Artificial Sequence
  Synthetic oligonucleotide; TGG chr2 60468043 60468062 60468059 +
gatggtactggtggtgatgg

SEQ ID NO: 158901 - DNA, 20 bp, Artificial Sequence
  Synthetic oligonucleotide; TGG chr2 60468046 60468065 60468062 +
ggtactggtggtgatggtgg

SEQ ID NO: 158902 - DNA, 20 bp, Artificial Sequence
  Synthetic oligonucleotide; TGG chr2 60468049 60468068 60468065 +
actggtggtgatggtggtgg

SEQ ID NO: 158903 - DNA, 20 bp, Artificial Sequence
  Synthetic oligonucleotide; TAG chr2 60468052 60468071 60468068 +
ggtggtgatggtggtggtgg

SEQ ID NO: 158904 - DNA, 20 bp, Artificial Sequence
  Synthetic oligonucleotide; TGG chr2 60468058 60468077 60468074 +
gatggtggtggtggtagtga

SEQ ID NO: 158905 - DNA, 20 bp, Artificial Sequence
  Synthetic oligonucleotide; TGG chr2 60468061 60468080 60468077 +
ggtggtggtggtagtgatgg

SEQ ID NO: 158906 - DNA, 20 bp, Artificial Sequence
  Synthetic oligonucleotide; TGG chr2 60468064 60468083 60468080 +
ggtggtggtagtgatggtgg

SEQ ID NO: 158907 - DNA, 20 bp, Artificial Sequence
  Synthetic oligonucleotide; TGG chr2 60468070 60468089 60468086 +
ggtagtgatggtggtggttg

SEQ ID NO: 158908 - DNA, 20 bp, Artificial Sequence
  Synthetic oligonucleotide; TGG chr2 60468073 60468092 60468089 +
agtgatggtggtggttgtgg

SEQ ID NO: 158909 - DNA, 20 bp, Artificial Sequence
  Synthetic oligonucleotide; TGG chr2 60468076 60468095 60468092 +
gatggtggtggttgtggtgg

SEQ ID NO: 158910 - DNA, 20 bp, Artificial Sequence
  Synthetic oligonucleotide; TGG chr2 60468079 60468098 60468095 +
ggtggtggttgtggtggtgg

SEQ ID NO: 158911 - DNA, 20 bp, Artificial Sequence
  Synthetic oligonucleotide; TGG chr2 60468085 60468104 60468101 +
ggttgtggtggtggtggtga

SEQ ID NO: 158912 - DNA, 20 bp, Artificial Sequence
  Synthetic oligonucleotide; TGG chr2 60468088 60468107 60468104 +
tgtggtggtggtggtgatgg

SEQ ID NO: 158913 - DNA, 20 bp, Artificial Sequence
  Synthetic oligonucleotide; CAG chr2 60468091 60468110 60468107 +
ggtggtggtggtgatggtgg

SEQ ID NO: 158914 - DNA, 20 bp, Artificial Sequence
  Synthetic oligonucleotide; TGG chr2 60468094 60468113 60468110 +
ggtggtggtgatggtggcag

SEQ ID NO: 158915 - DNA, 20 bp, Artificial Sequence
  Synthetic oligonucleotide; TGG chr2 60468097 60468116 60468113 +
ggtggtgatggtggcagtgg

SEQ ID NO: 158916 - DNA, 20 bp, Artificial Sequence
  Synthetic oligonucleotide; TGG chr2 60468103 60468122 60468119 +
gatggtggcagtggtggttg

SEQ ID NO: 158917 - DNA, 20 bp, Artificial Sequence
  Synthetic oligonucleotide; TGG chr2 60468106 60468125 60468122 +
ggtggcagtggtggttgtgg

SEQ ID NO: 158918 - DNA, 20 bp, Artificial Sequence
  Synthetic oligonucleotide; TGG chr2 60468109 60468128 60468125 +
ggcagtggtggttgtggtgg

SEQ ID NO: 158919 - DNA, 20 bp, Artificial Sequence
  Synthetic oligonucleotide; TGG chr2 60468112 60468131 60468128 +
agtggtggttgtggtggtgg

SEQ ID NO: 158920 - DNA, 20 bp, Artificial Sequence
  Synthetic oligonucleotide; TGG chr2 60468118 60468137 60468134 +
ggttgtggtggtggtggtga

SEQ ID NO: 158921 - DNA, 20 bp, Artificial Sequence
  Synthetic oligonucleotide; TGG chr2 60468121 60468140 60468137 +
tgtggtggtggtggtgatgg

SEQ ID NO: 158922 - DNA, 20 bp, Artificial Sequence
  Synthetic oligonucleotide; TGG chr2 60468124 60468143 60468140 +
ggtggtggtggtgatggtgg

SEQ ID NO: 158923 - DNA, 20 bp, Artificial Sequence
  Synthetic oligonucleotide; TGG chr2 60468127 60468146 60468143 +
ggtggtggtgatggtggtgg

SEQ ID NO: 158924 - DNA, 20 bp, Artificial Sequence
  Synthetic oligonucleotide; TGG chr2 60468130 60468149 60468146 +
ggtggtgatggtggtggtgg

SEQ ID NO: 158925 - DNA, 20 bp, Artificial Sequence
  Synthetic oligonucleotide; TGG chr2 60468133 60468152 60468149 +
ggtgatggtggtggtggtgg

SEQ ID NO: 158926 - DNA, 20 bp, Artificial Sequence
  Synthetic oligonucleotide; TAG chr2 60468139 60468158 60468155 +
ggtggtggtggtggtggtga

SEQ ID NO: 158927 - DNA, 20 bp, Artificial Sequence
  Synthetic oligonucleotide; TAG chr2 60468142 60468161 60468158 +
ggtggtggtggtggtgatag

SEQ ID NO: 158928 - DNA, 20 bp, Artificial Sequence
  Synthetic oligonucleotide; GAG chr2 60468144 60468163 60468160 +
tggtggtggtggtgatagta

SEQ ID NO: 158929 - DNA, 20 bp, Artificial Sequence
  Synthetic oligonucleotide; CAG chr2 60468190 60468209 60468206 +
tgtgcatttttctctaaaac

SEQ ID NO: 158930 - DNA, 20 bp, Artificial Sequence
  Synthetic oligonucleotide; AGG chr2 60468191 60468210 60468207 +
gtgcatttttctctaaaacc

SEQ ID NO: 158931 - DNA, 20 bp, Artificial Sequence
  Synthetic oligonucleotide; GAG chr2 60468193 60468212 60468209 +
gcatttttctctaaaaccag

SEQ ID NO: 158932 - DNA, 20 bp, Artificial Sequence
  Synthetic oligonucleotide; TAG chr2 60468202 60468221 60468218 +
tctaaaaccaggagaaaaat

SEQ ID NO: 158933 - DNA, 20 bp, Artificial Sequence
  Synthetic oligonucleotide; TGG chr2 60468218 60468237 60468234 +
aaattagtcaaaattatgtg

SEQ ID NO: 158934 - DNA, 20 bp, Artificial Sequence
  Synthetic oligonucleotide; GGG chr2 60468219 60468238 60468235 +
aattagtcaaaattatgtgt

SEQ ID NO: 158935 - DNA, 20 bp, Artificial Sequence
  Synthetic oligonucleotide; AAG chr2 60468269 60468288 60468285 +
aaatacacatgtaaatacat

SEQ ID NO: 158936 - DNA, 20 bp, Artificial Sequence
  Synthetic oligonucleotide; AGG chr2 60468270 60468289 60468286 +
aatacacatgtaaatacata

SEQ ID NO: 158937 - DNA, 20 bp, Artificial Sequence
  Synthetic oligonucleotide; TGG chr2 60468282 60468301 60468298 +
aatacataaggaatatgcat

SEQ ID NO: 158938 - DNA, 20 bp, Artificial Sequence
  Synthetic oligonucleotide; TGG chr2 60468293 60468312 60468309 +
aatatgcattggaataactc

SEQ ID NO: 158939 - DNA, 20 bp, Artificial Sequence
  Synthetic oligonucleotide; TGG chr2 60468325 60468344 60468341 +
aaactgactccttttgattc

SEQ ID NO: 158940 - DNA, 20 bp, Artificial Sequence
  Synthetic oligonucleotide; TGG chr2 60468331 60468350 60468347 +
actccttttgattctggcct

SEQ ID NO: 158941 - DNA, 20 bp, Artificial Sequence
  Synthetic oligonucleotide; AAG chr2 60468337 60468356 60468353 +
tttgattctggccttggcta

SEQ ID NO: 158942 - DNA, 20 bp, Artificial Sequence
  Synthetic oligonucleotide; TGG chr2 60468350 60468369 60468366 +
ttggctaaagatgtgtgcca

SEQ ID NO: 158943 - DNA, 20 bp, Artificial Sequence
  Synthetic oligonucleotide; AAG chr2 60468363 60468382 60468379 +
tgtgccatggactataccca

SEQ ID NO: 158944 - DNA, 20 bp, Artificial Sequence
  Synthetic oligonucleotide; GAG chr2 60468374 60468393 60468390 +
ctatacccaaagtcctaaat

SEQ ID NO: 158945 - DNA, 20 bp, Artificial Sequence
  Synthetic oligonucleotide; AGG chr2 60468375 60468394 60468391 +
tatacccaaagtcctaaatg

SEQ ID NO: 158946 - DNA, 20 bp, Artificial Sequence
  Synthetic oligonucleotide; CAG chr2 60468381 60468400 60468397 +
caaagtcctaaatgaggcca

SEQ ID NO: 158947 - DNA, 20 bp, Artificial Sequence
  Synthetic oligonucleotide; AGG chr2 60468382 60468401 60468398 +
aaagtcctaaatgaggccac

SEQ ID NO: 158948 - DNA, 20 bp, Artificial Sequence
  Synthetic oligonucleotide; GAG chr2 60468384 60468403 60468400 +
agtcctaaatgaggccacag

SEQ ID NO: 158949 - DNA, 20 bp, Artificial Sequence
  Synthetic oligonucleotide; CAG chr2 60468395 60468414 60468411 +
aggccacaggagtgaatgtc

SEQ ID NO: 158950 - DNA, 20 bp, Artificial Sequence
  Synthetic oligonucleotide; TGG chr2 60468406 60468425 60468422 +
gtgaatgtccagtaataaaa

SEQ ID NO: 158951 - DNA, 20 bp, Artificial Sequence
  Synthetic oligonucleotide; GGG chr2 60468407 60468426 60468423 +
tgaatgtccagtaataaaat

SEQ ID NO: 158952 - DNA, 20 bp, Artificial Sequence
  Synthetic oligonucleotide; CAG chr2 60468413 60468432 60468429 +
tccagtaataaaatgggctc

SEQ ID NO: 158953 - DNA, 20 bp, Artificial Sequence
  Synthetic oligonucleotide; GAG chr2 60468415 60468434 60468431 +
cagtaataaaatgggctcca

SEQ ID NO: 158954 - DNA, 20 bp, Artificial Sequence
  Synthetic oligonucleotide; AGG chr2 60468416 60468435 60468432 +
agtaataaaatgggctccag

SEQ ID NO: 158955 - DNA, 20 bp, Artificial Sequence
  Synthetic oligonucleotide; CAG chr2 60468421 60468440 60468437 +
taaaatgggctccagaggca

SEQ ID NO: 158956 - DNA, 20 bp, Artificial Sequence
  Synthetic oligonucleotide; AGG chr2 60468422 60468441 60468438 +
aaaatgggctccagaggcac

SEQ ID NO: 158957 - DNA, 20 bp, Artificial Sequence
  Synthetic oligonucleotide; TAG chr2 60468438 60468457 60468454 +
gcacaggcatcttcaatcac

SEQ ID NO: 158958 - DNA, 20 bp, Artificial Sequence
  Synthetic oligonucleotide; CGG chr2 60468444 60468463 60468460 +
gcatcttcaatcactagcca

SEQ ID NO: 158959 - DNA, 20 bp, Artificial Sequence
  Synthetic oligonucleotide; GAG chr2 60468446 60468465 60468462 +
atcttcaatcactagccacg

SEQ ID NO: 158960 - DNA, 20 bp, Artificial Sequence
  Synthetic oligonucleotide; AAG chr2 60468450 60468469 60468466 +
tcaatcactagccacggagc

SEQ ID NO: 158961 - DNA, 20 bp, Artificial Sequence
  Synthetic oligonucleotide; AAG chr2 60468455 60468474 60468471 +
cactagccacggagcaagac

SEQ ID NO: 158962 - DNA, 20 bp, Artificial Sequence
  Synthetic oligonucleotide; TGG chr2 60468462 60468481 60468478 +
cacggagcaagacaagaccc

SEQ ID NO: 158963 - DNA, 20 bp, Artificial Sequence
  Synthetic oligonucleotide; GGG chr2 60468463 60468482 60468479 +
acggagcaagacaagaccct

SEQ ID NO: 158964 - DNA, 20 bp, Artificial Sequence
  Synthetic oligonucleotide; GGG chr2 60468464 60468483 60468480 +
cggagcaagacaagaccctg

SEQ ID NO: 158965 - DNA, 20 bp, Artificial Sequence
  Synthetic oligonucleotide; GAG chr2 60468466 60468485 60468482 +
gagcaagacaagaccctggg

SEQ ID NO: 158966 - DNA, 20 bp, Artificial Sequence
  Synthetic oligonucleotide; AAG chr2 60468469 60468488 60468485 +
caagacaagaccctggggag

SEQ ID NO: 158967 - DNA, 20 bp, Artificial Sequence
  Synthetic oligonucleotide; CAG chr2 60468477 60468496 60468493 +
gaccctggggagaagaccca

SEQ ID NO: 158968 - DNA, 20 bp, Artificial Sequence
  Synthetic oligonucleotide; AGG chr2 60468478 60468497 60468494 +
accctggggagaagacccac

SEQ ID NO: 158969 - DNA, 20 bp, Artificial Sequence
  Synthetic oligonucleotide; GGG chr2 60468479 60468498 60468495 +
ccctggggagaagacccaca

SEQ ID NO: 158970 - DNA, 20 bp, Artificial Sequence
  Synthetic oligonucleotide; GAG chr2 60468484 60468503 60468500 +
gggagaagacccacagggat

SEQ ID NO: 158971 - DNA, 20 bp, Artificial Sequence
  Synthetic oligonucleotide; CAG chr2 60468494 60468513 60468510 +
ccacagggatgagctactat

SEQ ID NO: 158972 - DNA, 20 bp, Artificial Sequence
  Synthetic oligonucleotide; CAG chr2 60468501 60468520 60468517 +
gatgagctactatcagctcc

SEQ ID NO: 158973 - DNA, 20 bp, Artificial Sequence
  Synthetic oligonucleotide; CAG chr2 60468508 60468527 60468524 +
tactatcagctcccagcctc

SEQ ID NO: 158974 - DNA, 20 bp, Artificial Sequence
  Synthetic oligonucleotide; GAG chr2 60468512 60468531 60468528 +
atcagctcccagcctccagt

SEQ ID NO: 158975 - DNA, 20 bp, Artificial Sequence
  Synthetic oligonucleotide; AGG chr2 60468513 60468532 60468529 +
tcagctcccagcctccagtg

SEQ ID NO: 158976 - DNA, 20 bp, Artificial Sequence
  Synthetic oligonucleotide; AAG chr2 60468517 60468536 60468533 +
ctcccagcctccagtgagga

SEQ ID NO: 158977 - DNA, 20 bp, Artificial Sequence
  Synthetic oligonucleotide; AAG chr2 60468523 60468542 60468539 +
gcctccagtgaggaaagaaa

SEQ ID NO: 158978 - DNA, 20 bp, Artificial Sequence
  Synthetic oligonucleotide; AGG chr2 60468524 60468543 60468540 +
cctccagtgaggaaagaaaa

SEQ ID NO: 158979 - DNA, 20 bp, Artificial Sequence
  Synthetic oligonucleotide; GGG chr2 60468525 60468544 60468541 +
ctccagtgaggaaagaaaaa

SEQ ID NO: 158980 - DNA, 20 bp, Artificial Sequence
  Synthetic oligonucleotide; GGG chr2 60468526 60468545 60468542 +
tccagtgaggaaagaaaaag

SEQ ID NO: 158981 - DNA, 20 bp, Artificial Sequence
  Synthetic oligonucleotide; GAG chr2 60468528 60468547 60468544 +
cagtgaggaaagaaaaaggg

SEQ ID NO: 158982 - DNA, 20 bp, Artificial Sequence
  Synthetic oligonucleotide; AGG chr2 60468529 60468548 60468545 +
agtgaggaaagaaaaagggg

SEQ ID NO: 158983 - DNA, 20 bp, Artificial Sequence
  Synthetic oligonucleotide; GGG chr2 60468530 60468549 60468546 +
gtgaggaaagaaaaagggga

SEQ ID NO: 158984 - DNA, 20 bp, Artificial Sequence
  Synthetic oligonucleotide; AAG chr2 60468533 60468552 60468549 +
aggaaagaaaaaggggaggg

SEQ ID NO: 158985 - DNA, 20 bp, Artificial Sequence
  Synthetic oligonucleotide; AAG chr2 60468536 60468555 60468552 +
aaagaaaaaggggagggaag

SEQ ID NO: 158986 - DNA, 20 bp, Artificial Sequence
  Synthetic oligonucleotide; TGG chr2 60468545 60468564 60468561 +
ggggagggaagaagtccctc

SEQ ID NO: 158987 - DNA, 20 bp, Artificial Sequence
  Synthetic oligonucleotide; GGG chr2 60468546 60468565 60468562 +
gggagggaagaagtccctct

SEQ ID NO: 158988 - DNA, 20 bp, Artificial Sequence
  Synthetic oligonucleotide; GGG chr2 60468547 60468566 60468563 +
ggagggaagaagtccctctg

SEQ ID NO: 158989 - DNA, 20 bp, Artificial Sequence
  Synthetic oligonucleotide; GAG chr2 60468552 60468571 60468568 +
gaagaagtccctctggggct

SEQ ID NO: 158990 - DNA, 20 bp, Artificial Sequence
  Synthetic oligonucleotide; TGG chr2 60468555 60468574 60468571 +
gaagtccctctggggctgag

SEQ ID NO: 158991 - DNA, 20 bp, Artificial Sequence
  Synthetic oligonucleotide; GAG chr2 60468557 60468576 60468573 +
agtccctctggggctgagtg

SEQ ID NO: 158992 - DNA, 20 bp, Artificial Sequence
  Synthetic oligonucleotide; TGG chr2 60468560 60468579 60468576 +
ccctctggggctgagtggag

SEQ ID NO: 158993 - DNA, 20 bp, Artificial Sequence
  Synthetic oligonucleotide; GGG chr2 60468561 60468580 60468577 +
cctctggggctgagtggagt

SEQ ID NO: 158994 - DNA, 20 bp, Artificial Sequence
  Synthetic oligonucleotide; GGG chr2 60468562 60468581 60468578 +
ctctggggctgagtggagtg

SEQ ID NO: 158995 - DNA, 20 bp, Artificial Sequence
  Synthetic oligonucleotide; GAG chr2 60468564 60468583 60468580 +
ctggggctgagtggagtggg

SEQ ID NO: 158996 - DNA, 20 bp, Artificial Sequence
  Synthetic oligonucleotide; CGG chr2 60468567 60468586 60468583 +
gggctgagtggagtggggag

SEQ ID NO: 158997 - DNA, 20 bp, Artificial Sequence
  Synthetic oligonucleotide; AAG chr2 60468575 60468594 60468591 +
tggagtggggagcggctgcc

SEQ ID NO: 158998 - DNA, 20 bp, Artificial Sequence
  Synthetic oligonucleotide; GAG chr2 60468579 60468598 60468595 +
gtggggagcggctgccaagt

SEQ ID NO: 158999 - DNA, 20 bp, Artificial Sequence
  Synthetic oligonucleotide; TGG chr2 60468585 60468604 60468601 +
agcggctgccaagtgagtaa

SEQ ID NO: 159000 - DNA, 20 bp, Artificial Sequence
  Synthetic oligonucleotide; TGG chr2 60468612 60468631 60468628 +
atacatatgacaatctattt

SEQ ID NO: 159001 - DNA, 20 bp, Artificial Sequence
  Synthetic oligonucleotide; AAG chr2 60468615 60468634 60468631 +
catatgacaatctattttgg

SEQ ID NO: 159002 - DNA, 20 bp, Artificial Sequence
  Synthetic oligonucleotide; CAG chr2 60468627 60468646 60468643 +
tattttggaagtaactcctt

SEQ ID NO: 159003 - DNA, 20 bp, Artificial Sequence
  Synthetic oligonucleotide; AAG chr2 60468638 60468657 60468654 +
taactccttcagtacttaaa

SEQ ID NO: 159004 - DNA, 20 bp, Artificial Sequence
  Synthetic oligonucleotide; AAG chr2 60468642 60468661 60468658 +
tccttcagtacttaaaaagt

SEQ ID NO: 159005 - DNA, 20 bp, Artificial Sequence
  Synthetic oligonucleotide; AGG chr2 60468643 60468662 60468659 +
ccttcagtacttaaaaagta

SEQ ID NO: 159006 - DNA, 20 bp, Artificial Sequence
  Synthetic oligonucleotide; GGG chr2 60468644 60468663 60468660 +
cttcagtacttaaaaagtaa

SEQ ID NO: 159007 - DNA, 20 bp, Artificial Sequence
  Synthetic oligonucleotide; CAG chr2 60468654 60468673 60468670 +
taaaaagtaagggcaatttc

SEQ ID NO: 159008 - DNA, 20 bp, Artificial Sequence
  Synthetic oligonucleotide; TGG chr2 60468678 60468697 60468694 +
aattctcatctctatacaca

SEQ ID NO: 159009 - DNA, 20 bp, Artificial Sequence
  Synthetic oligonucleotide; TAG chr2 60468688 60468707 60468704 +
tctatacacatggacatttg

SEQ ID NO: 159010 - DNA, 20 bp, Artificial Sequence
  Synthetic oligonucleotide; AAG chr2 60468691 60468710 60468707 +
atacacatggacatttgtag

SEQ ID NO: 159011 - DNA, 20 bp, Artificial Sequence
  Synthetic oligonucleotide; AAG chr2 60468698 60468717 60468714 +
tggacatttgtagaagaaat

SEQ ID NO: 159012 - DNA, 20 bp, Artificial Sequence
  Synthetic oligonucleotide; AGG chr2 60468699 60468718 60468715 +
ggacatttgtagaagaaata

SEQ ID NO: 159013 - DNA, 20 bp, Artificial Sequence
  Synthetic oligonucleotide; CGG chr2 60468722 60468741 60468738 +
ctcaacttacaaataccctg

SEQ ID NO: 159014 - DNA, 20 bp, Artificial Sequence
  Synthetic oligonucleotide; GGG chr2 60468723 60468742 60468739 +
tcaacttacaaataccctgc

SEQ ID NO: 159015 - DNA, 20 bp, Artificial Sequence
  Synthetic oligonucleotide; GGG chr2 60468724 60468743 60468740 +
caacttacaaataccctgcg

SEQ ID NO: 159016 - DNA, 20 bp, Artificial Sequence
  Synthetic oligonucleotide; CAG chr2 60468745 60468764 60468761 +
ggcatattctgcactcatcc

SEQ ID NO: 159017 - DNA, 20 bp, Artificial Sequence
  Synthetic oligonucleotide; AGG chr2 60468746 60468765 60468762 +
gcatattctgcactcatccc

SEQ ID NO: 159018 - DNA, 20 bp, Artificial Sequence
  Synthetic oligonucleotide; TGG chr2 60468751 60468770 60468767 +
ttctgcactcatcccaggcg

SEQ ID NO: 159019 - DNA, 20 bp, Artificial Sequence
  Synthetic oligonucleotide; GGG chr2 60468752 60468771 60468768 +
tctgcactcatcccaggcgt

SEQ ID NO: 159020 - DNA, 20 bp, Artificial Sequence
  Synthetic oligonucleotide; GGG chr2 60468753 60468772 60468769 +
ctgcactcatcccaggcgtg

SEQ ID NO: 159021 - DNA, 20 bp, Artificial Sequence
  Synthetic oligonucleotide; TAG chr2 60468758 60468777 60468774 +
ctcatcccaggcgtggggat

SEQ ID NO: 159022 - DNA, 20 bp, Artificial Sequence
  Synthetic oligonucleotide; GAG chr2 60468760 60468779 60468776 +
catcccaggcgtggggatta

SEQ ID NO: 159023 - DNA, 20 bp, Artificial Sequence
  Synthetic oligonucleotide; CAG chr2 60468772 60468791 60468788 +
ggggattagagctccatgtg

SEQ ID NO: 159024 - DNA, 20 bp, Artificial Sequence
  Synthetic oligonucleotide; GAG chr2 60468778 60468797 60468794 +
tagagctccatgtgcagaac

SEQ ID NO: 159025 - DNA, 20 bp, Artificial Sequence
  Synthetic oligonucleotide; AGG chr2 60468779 60468798 60468795 +
agagctccatgtgcagaacg

SEQ ID NO: 159026 - DNA, 20 bp, Artificial Sequence
  Synthetic oligonucleotide; GGG chr2 60468780 60468799 60468796 +
gagctccatgtgcagaacga

SEQ ID NO: 159027 - DNA, 20 bp, Artificial Sequence
  Synthetic oligonucleotide; GGG chr2 60468781 60468800 60468797 +
agctccatgtgcagaacgag

SEQ ID NO: 159028 - DNA, 20 bp, Artificial Sequence
  Synthetic oligonucleotide; GAG chr2 60468783 60468802 60468799 +
ctccatgtgcagaacgaggg

SEQ ID NO: 159029 - DNA, 20 bp, Artificial Sequence
  Synthetic oligonucleotide; AGG chr2 60468784 60468803 60468800 +
tccatgtgcagaacgagggg

SEQ ID NO: 159030 - DNA, 20 bp, Artificial Sequence
  Synthetic oligonucleotide; GAG chr2 60468786 60468805 60468802 +
catgtgcagaacgaggggag

SEQ ID NO: 159031 - DNA, 20 bp, Artificial Sequence
  Synthetic oligonucleotide; GAG chr2 60468788 60468807 60468804 +
tgtgcagaacgaggggagga

SEQ ID NO: 159032 - DNA, 20 bp, Artificial Sequence
  Synthetic oligonucleotide; AGG chr2 60468789 60468808 60468805 +
gtgcagaacgaggggaggag

SEQ ID NO: 159033 - DNA, 20 bp, Artificial Sequence
  Synthetic oligonucleotide; CAG chr2 60468798 60468817 60468814 +
gaggggaggagaggcccctc

SEQ ID NO: 159034 - DNA, 20 bp, Artificial Sequence
  Synthetic oligonucleotide; CAG chr2 60468803 60468822 60468819 +
gaggagaggcccctccagtg

SEQ ID NO: 159035 - DNA, 20 bp, Artificial Sequence
  Synthetic oligonucleotide; AAG chr2 60468806 60468825 60468822 +
gagaggcccctccagtgcag

SEQ ID NO: 159036 - DNA, 20 bp, Artificial Sequence
  Synthetic oligonucleotide; AAG chr2 60468820 60468839 60468836 +
gtgcagaagtttatctgtga

SEQ ID NO: 159037 - DNA, 20 bp, Artificial Sequence
  Synthetic oligonucleotide; AAG chr2 60468835 60468854 60468851 +
tgtgaaagaaacccaaaatc

SEQ ID NO: 159038 - DNA, 20 bp, Artificial Sequence
  Synthetic oligonucleotide; CAG chr2 60468843 60468862 60468859 +
aaacccaaaatcaagcacta

SEQ ID NO: 159039 - DNA, 20 bp, Artificial Sequence
  Synthetic oligonucleotide; CAG chr2 60468872 60468891 60468888 +
acaacgtgcatcataaacca

SEQ ID NO: 159040 - DNA, 20 bp, Artificial Sequence
  Synthetic oligonucleotide; AGG chr2 60468873 60468892 60468889 +
caacgtgcatcataaaccac

SEQ ID NO: 159041 - DNA, 20 bp, Artificial Sequence
  Synthetic oligonucleotide; TAG chr2 60468901 60468920 60468917 +
acatttcaattccattaaaa

SEQ ID NO: 159042 - DNA, 20 bp, Artificial Sequence
  Synthetic oligonucleotide; CAG chr2 60468922 60468941 60468938 +
agattacaacatcattacaa

SEQ ID NO: 159043 - DNA, 20 bp, Artificial Sequence
  Synthetic oligonucleotide; CAG chr2 60468930 60468949 60468946 +
acatcattacaacagccttg

SEQ ID NO: 159044 - DNA, 20 bp, Artificial Sequence
  Synthetic oligonucleotide; TAG chr2 60468934 60468953 60468950 +
cattacaacagccttgcaga

SEQ ID NO: 159045 - DNA, 20 bp, Artificial Sequence
  Synthetic oligonucleotide; CAG chr2 60468941 60468960 60468957 +
acagccttgcagatagttaa

SEQ ID NO: 159046 - DNA, 20 bp, Artificial Sequence
  Synthetic oligonucleotide; AGG chr2 60468942 60468961 60468958 +
cagccttgcagatagttaac

SEQ ID NO: 159047 - DNA, 20 bp, Artificial Sequence
  Synthetic oligonucleotide; AAG chr2 60468948 60468967 60468964 +
tgcagatagttaacaggccc

SEQ ID NO: 159048 - DNA, 20 bp, Artificial Sequence
  Synthetic oligonucleotide; AGG chr2 60468949 60468968 60468965 +
gcagatagttaacaggccca

SEQ ID NO: 159049 - DNA, 20 bp, Artificial Sequence
  Synthetic oligonucleotide; AAG chr2 60468962 60468981 60468978 +
aggcccaaggcctgaaacaa

SEQ ID NO: 159050 - DNA, 20 bp, Artificial Sequence
  Synthetic oligonucleotide; AAG chr2 60468965 60468984 60468981 +
cccaaggcctgaaacaaaag

SEQ ID NO: 159051 - DNA, 20 bp, Artificial Sequence
  Synthetic oligonucleotide; GAG chr2 60468967 60468986 60468983 +
caaggcctgaaacaaaagaa

SEQ ID NO: 159052 - DNA, 20 bp, Artificial Sequence
  Synthetic oligonucleotide; TGG chr2 60468970 60468989 60468986 +
ggcctgaaacaaaagaagag

SEQ ID NO: 159053 - DNA, 20 bp, Artificial Sequence
  Synthetic oligonucleotide; GAG chr2 60468974 60468993 60468990 +
tgaaacaaaagaagagtggt

SEQ ID NO: 159054 - DNA, 20 bp, Artificial Sequence
  Synthetic oligonucleotide; CAG chr2 60468985 60469004 60469001 +
aagagtggtgagttatttcc

SEQ ID NO: 159055 - DNA, 20 bp, Artificial Sequence
  Synthetic oligonucleotide; GAG chr2 60468987 60469006 60469003 +
gagtggtgagttatttccca

SEQ ID NO: 159056 - DNA, 20 bp, Artificial Sequence
  Synthetic oligonucleotide; CGG chr2 60469011 60469030 60469027 +
ttctgttttgttttcaattt

SEQ ID NO: 159057 - DNA, 20 bp, Artificial Sequence
  Synthetic oligonucleotide; AAG chr2 60469026 60469045 60469042 +
aatttcggtctttttgacaa

SEQ ID NO: 159058 - DNA, 20 bp, Artificial Sequence
  Synthetic oligonucleotide; AAG chr2 60469032 60469051 60469048 +
ggtctttttgacaaaagtga

SEQ ID NO: 159059 - DNA, 20 bp, Artificial Sequence
  Synthetic oligonucleotide; AGG chr2 60469033 60469052 60469049 +
gtctttttgacaaaagtgaa

SEQ ID NO: 159060 - DNA, 20 bp, Artificial Sequence
  Synthetic oligonucleotide; GGG chr2 60469034 60469053 60469050 +
tctttttgacaaaagtgaaa

SEQ ID NO: 159061 - DNA, 20 bp, Artificial Sequence
  Synthetic oligonucleotide; TAG chr2 60469044 60469063 60469060 +
aaaagtgaaagggtttgttt

SEQ ID NO: 159062 - DNA, 20 bp, Artificial Sequence
  Synthetic oligonucleotide; AGG chr2 60469045 60469064 60469061 +
aaagtgaaagggtttgtttt

SEQ ID NO: 159063 - DNA, 20 bp, Artificial Sequence
  Synthetic oligonucleotide; AAG chr2 60469049 60469068 60469065 +
tgaaagggtttgttttagga

SEQ ID NO: 159064 - DNA, 20 bp, Artificial Sequence
  Synthetic oligonucleotide; AGG chr2 60469050 60469069 60469066 +
gaaagggtttgttttaggaa

SEQ ID NO: 159065 - DNA, 20 bp, Artificial Sequence
  Synthetic oligonucleotide; GGG chr2 60469051 60469070 60469067 +
aaagggtttgttttaggaaa

SEQ ID NO: 159066 - DNA, 20 bp, Artificial Sequence
  Synthetic oligonucleotide; GGG chr2 60469052 60469071 60469068 +
aagggtttgttttaggaaag

SEQ ID NO: 159067 - DNA, 20 bp, Artificial Sequence
  Synthetic oligonucleotide; GAG chr2 60469054 60469073 60469070 +
gggtttgttttaggaaaggg

SEQ ID NO: 159068 - DNA, 20 bp, Artificial Sequence
  Synthetic oligonucleotide; GAG chr2 60469056 60469075 60469072 +
gtttgttttaggaaagggga

SEQ ID NO: 159069 - DNA, 20 bp, Artificial Sequence
  Synthetic oligonucleotide; AGG chr2 60469057 60469076 60469073 +
tttgttttaggaaaggggag

SEQ ID NO: 159070 - DNA, 20 bp, Artificial Sequence
  Synthetic oligonucleotide; TGG chr2 60469060 60469079 60469076 +
gttttaggaaaggggagagg

SEQ ID NO: 159071 - DNA, 20 bp, Artificial Sequence
  Synthetic oligonucleotide; TGG chr2 60469067 60469086 60469083 +
gaaaggggagaggtggtctt

SEQ ID NO: 159072 - DNA, 20 bp, Artificial Sequence
  Synthetic oligonucleotide; TGG chr2 60469112 60469131 60469128 +
gttgtttgattattgtcttg

SEQ ID NO: 159073 - DNA, 20 bp, Artificial Sequence
  Synthetic oligonucleotide; AAG chr2 60469116 60469135 60469132 +
tttgattattgtcttgtgga

SEQ ID NO: 159074 - DNA, 20 bp, Artificial Sequence
  Synthetic oligonucleotide; AAG chr2 60469119 60469138 60469135 +
gattattgtcttgtggaaag

SEQ ID NO: 159075 - DNA, 20 bp, Artificial Sequence
  Synthetic oligonucleotide; AAG chr2 60469128 60469147 60469144 +
cttgtggaaagaagatgtgt

SEQ ID NO: 159076 - DNA, 20 bp, Artificial Sequence
  Synthetic oligonucleotide; CAG chr2 60469131 60469150 60469147 +
gtggaaagaagatgtgtaag

SEQ ID NO: 159077 - DNA, 20 bp, Artificial Sequence
  Synthetic oligonucleotide; AAG chr2 60469135 60469154 60469151 +
aaagaagatgtgtaagcagc

SEQ ID NO: 159078 - DNA, 20 bp, Artificial Sequence
  Synthetic oligonucleotide; AGG chr2 60469136 60469155 60469152 +
aagaagatgtgtaagcagca

SEQ ID NO: 159079 - DNA, 20 bp, Artificial Sequence
  Synthetic oligonucleotide; GGG chr2 60469137 60469156 60469153 +
agaagatgtgtaagcagcaa

SEQ ID NO: 159080 - DNA, 20 bp, Artificial Sequence
  Synthetic oligonucleotide; GGG chr2 60469138 60469157 60469154 +
gaagatgtgtaagcagcaag

SEQ ID NO: 159081 - DNA, 20 bp, Artificial Sequence
  Synthetic oligonucleotide; TGG chr2 60469146 60469165 60469162 +
gtaagcagcaaggggaaaac

SEQ ID NO: 159082 - DNA, 20 bp, Artificial Sequence
  Synthetic oligonucleotide; TGG chr2 60469157 60469176 60469173 +
ggggaaaactggtaatattg

SEQ ID NO: 159083 - DNA, 20 bp, Artificial Sequence
  Synthetic oligonucleotide; GGG chr2 60469158 60469177 60469174 +
gggaaaactggtaatattgt

SEQ ID NO: 159084 - DNA, 20 bp, Artificial Sequence
  Synthetic oligonucleotide; TAG chr2 60469161 60469180 60469177 +
aaaactggtaatattgtggg

SEQ ID NO: 159085 - DNA, 20 bp, Artificial Sequence
  Synthetic oligonucleotide; TGG chr2 60469166 60469185 60469182 +
tggtaatattgtgggtagcc

SEQ ID NO: 159086 - DNA, 20 bp, Artificial Sequence
  Synthetic oligonucleotide; TGG chr2 60469174 60469193 60469190 +
ttgtgggtagcctggaaaca

SEQ ID NO: 159087 - DNA, 20 bp, Artificial Sequence
  Synthetic oligonucleotide; GGG chr2 60469175 60469194 60469191 +
tgtgggtagcctggaaacat

SEQ ID NO: 159088 - DNA, 20 bp, Artificial Sequence
  Synthetic oligonucleotide; GGG chr2 60469176 60469195 60469192 +
gtgggtagcctggaaacatg

SEQ ID NO: 159089 - DNA, 20 bp, Artificial Sequence
  Synthetic oligonucleotide; GGG chr2 60469177 60469196 60469193 +
tgggtagcctggaaacatgg

SEQ ID NO: 159090 - DNA, 20 bp, Artificial Sequence
  Synthetic oligonucleotide; GGG chr2 60469178 60469197 60469194 +
gggtagcctggaaacatggg

SEQ ID NO: 159091 - DNA, 20 bp, Artificial Sequence
  Synthetic oligonucleotide; AAG chr2 60469192 60469211 60469208 +
catggggggattttatctgc

SEQ ID NO: 159092 - DNA, 20 bp, Artificial Sequence
  Synthetic oligonucleotide; AGG chr2 60469193 60469212 60469209 +
atggggggattttatctgca

SEQ ID NO: 159093 - DNA, 20 bp, Artificial Sequence
  Synthetic oligonucleotide; TGG chr2 60469197 60469216 60469213 +
ggggattttatctgcaaggc

SEQ ID NO: 159094 - DNA, 20 bp, Artificial Sequence
  Synthetic oligonucleotide; TAG chr2 60469228 60469247 60469244 +
catacattaactttacttta

SEQ ID NO: 159095 - DNA, 20 bp, Artificial Sequence
  Synthetic oligonucleotide; AAG chr2 60469239 60469258 60469255 +
tttactttatagacaaaccc

SEQ ID NO: 159096 - DNA, 20 bp, Artificial Sequence
  Synthetic oligonucleotide; AAG chr2 60469246 60469265 60469262 +
tatagacaaacccaagcaaa

SEQ ID NO: 159097 - DNA, 20 bp, Artificial Sequence
  Synthetic oligonucleotide; TAG chr2 60469260 60469279 60469276 +
agcaaaaagcaaaatgctga

SEQ ID NO: 159098 - DNA, 20 bp, Artificial Sequence
  Synthetic oligonucleotide; AGG chr2 60469261 60469280 60469277 +
gcaaaaagcaaaatgctgat

SEQ ID NO: 159099 - DNA, 20 bp, Artificial Sequence
  Synthetic oligonucleotide; GAG chr2 60469268 60469287 60469284 +
gcaaaatgctgataggaaat

SEQ ID NO: 159100 - DNA, 20 bp, Artificial Sequence
  Synthetic oligonucleotide; TAG chr2 60469271 60469290 60469287 +
aaatgctgataggaaatgag

SEQ ID NO: 159101 - DNA, 20 bp, Artificial Sequence
  Synthetic oligonucleotide; TGG chr2 60469293 60469312 60469309 +
gatttgtgaatcgtttttta

SEQ ID NO: 159102 - DNA, 20 bp, Artificial Sequence
  Synthetic oligonucleotide; GGG chr2 60469294 60469313 60469310 +
atttgtgaatcgttttttat

SEQ ID NO: 159103 - DNA, 20 bp, Artificial Sequence
  Synthetic oligonucleotide; CAG chr2 60469298 60469317 60469314 +
gtgaatcgttttttatggga

SEQ ID NO: 159104 - DNA, 20 bp, Artificial Sequence
  Synthetic oligonucleotide; GAG chr2 60469300 60469319 60469316 +
gaatcgttttttatgggaca

SEQ ID NO: 159105 - DNA, 20 bp, Artificial Sequence
  Synthetic oligonucleotide; TAG chr2 60469358 60469377 60469374 +
ttcccatgctatatttatga

SEQ ID NO: 159106 - DNA, 20 bp, Artificial Sequence
  Synthetic oligonucleotide; CAG chr2 60469367 60469386 60469383 +
tatatttatgatagcgcctt

SEQ ID NO: 159107 - DNA, 20 bp, Artificial Sequence
  Synthetic oligonucleotide; TAG chr2 60469373 60469392 60469389 +
tatgatagcgccttcagtga

SEQ ID NO: 159108 - DNA, 20 bp, Artificial Sequence
  Synthetic oligonucleotide; AGG chr2 60469374 60469393 60469390 +
atgatagcgccttcagtgat

SEQ ID NO: 159109 - DNA, 20 bp, Artificial Sequence
  Synthetic oligonucleotide; GGG chr2 60469375 60469394 60469391 +
tgatagcgccttcagtgata

SEQ ID NO: 159110 - DNA, 20 bp, Artificial Sequence
  Synthetic oligonucleotide; GGG chr2 60469376 60469395 60469392 +
gatagcgccttcagtgatag

SEQ ID NO: 159111 - DNA, 20 bp, Artificial Sequence
  Synthetic oligonucleotide; TGG chr2 60469384 60469403 60469400 +
cttcagtgataggggaaacc

SEQ ID NO: 159112 - DNA, 20 bp, Artificial Sequence
  Synthetic oligonucleotide; GGG chr2 60469385 60469404 60469401 +
ttcagtgataggggaaacct

SEQ ID NO: 159113 - DNA, 20 bp, Artificial Sequence
  Synthetic oligonucleotide; TGG chr2 60469394 60469413 60469410 +
aggggaaacctgggcatttc

SEQ ID NO: 159114 - DNA, 20 bp, Artificial Sequence
  Synthetic oligonucleotide; GAG chr2 60469400 60469419 60469416 +
aacctgggcatttctggact

SEQ ID NO: 159115 - DNA, 20 bp, Artificial Sequence
  Synthetic oligonucleotide; TGG chr2 60469404 60469423 60469420 +
tgggcatttctggactgagc

SEQ ID NO: 159116 - DNA, 20 bp, Artificial Sequence
  Synthetic oligonucleotide; GGG chr2 60469405 60469424 60469421 +
gggcatttctggactgagct

SEQ ID NO: 159117 - DNA, 20 bp, Artificial Sequence
  Synthetic oligonucleotide; TAG chr2 60469416 60469435 60469432 +
gactgagctgggccatactc

SEQ ID NO: 159118 - DNA, 20 bp, Artificial Sequence
  Synthetic oligonucleotide; TGG chr2 60469431 60469450 60469447 +
tactctagaatcctgtcaac

SEQ ID NO: 159119 - DNA, 20 bp, Artificial Sequence
  Synthetic oligonucleotide; CAG chr2 60469444 60469463 60469460 +
tgtcaactggaaaccttaca

SEQ ID NO: 159120 - DNA, 20 bp, Artificial Sequence
  Synthetic oligonucleotide; TGG chr2 60469450 60469469 60469466 +
ctggaaaccttacacagatg

SEQ ID NO: 159121 - DNA, 20 bp, Artificial Sequence
  Synthetic oligonucleotide; AAG chr2 60469467 60469486 60469483 +
atgtggcttctcacaataca

SEQ ID NO: 159122 - DNA, 20 bp, Artificial Sequence
  Synthetic oligonucleotide; TGG chr2 60469473 60469492 60469489 +
cttctcacaatacaaagcaa

SEQ ID NO: 159123 - DNA, 20 bp, Artificial Sequence
  Synthetic oligonucleotide; AAG chr2 60469476 60469495 60469492 +
ctcacaatacaaagcaatgg

SEQ ID NO: 159124 - DNA, 20 bp, Artificial Sequence
  Synthetic oligonucleotide; AAG chr2 60469482 60469501 60469498 +
atacaaagcaatggaagata

SEQ ID NO: 159125 - DNA, 20 bp, Artificial Sequence
  Synthetic oligonucleotide; TAG chr2 60469487 60469506 60469503 +
aagcaatggaagataaagat

SEQ ID NO: 159126 - DNA, 20 bp, Artificial Sequence
  Synthetic oligonucleotide; TGG chr2 60469495 60469514 60469511 +
gaagataaagattagacttc

SEQ ID NO: 159127 - DNA, 20 bp, Artificial Sequence
  Synthetic oligonucleotide; GGG chr2 60469496 60469515 60469512 +
aagataaagattagacttct

SEQ ID NO: 159128 - DNA, 20 bp, Artificial Sequence
  Synthetic oligonucleotide; GGG chr2 60469497 60469516 60469513 +
agataaagattagacttctg

SEQ ID NO: 159129 - DNA, 20 bp, Artificial Sequence
  Synthetic oligonucleotide; AAG chr2 60469527 60469546 60469543 +
aactttgaccattaaatgac

SEQ ID NO: 159130 - DNA, 20 bp, Artificial Sequence
  Synthetic oligonucleotide; AGG chr2 60469528 60469547 60469544 +
actttgaccattaaatgaca

SEQ ID NO: 159131 - DNA, 20 bp, Artificial Sequence
  Synthetic oligonucleotide; AAG chr2 60469532 60469551 60469548 +
tgaccattaaatgacaagga

SEQ ID NO: 159132 - DNA, 20 bp, Artificial Sequence
  Synthetic oligonucleotide; CAG chr2 60469538 60469557 60469554 +
ttaaatgacaaggaaagaac

SEQ ID NO: 159133 - DNA, 20 bp, Artificial Sequence
  Synthetic oligonucleotide; CAG chr2 60469555 60469574 60469571 +
aaccagcattccaataatgc

SEQ ID NO: 159134 - DNA, 20 bp, Artificial Sequence
  Synthetic oligonucleotide; CAG chr2 60469562 60469581 60469578 +
attccaataatgccagcacc

SEQ ID NO: 159135 - DNA, 20 bp, Artificial Sequence
  Synthetic oligonucleotide; TGG chr2 60469610 60469629 60469626 +
tactgcactttgttgtactc

SEQ ID NO: 159136 - DNA, 20 bp, Artificial Sequence
  Synthetic oligonucleotide; AAG chr2 60469615 60469634 60469631 +
cactttgttgtactctggtg

SEQ ID NO: 159137 - DNA, 20 bp, Artificial Sequence
  Synthetic oligonucleotide; AAG chr2 60469620 60469639 60469636 +
tgttgtactctggtgaagac

SEQ ID NO: 159138 - DNA, 20 bp, Artificial Sequence
  Synthetic oligonucleotide; TAG chr2 60469653 60469672 60469669 +
cactaataaaatgaatctaa

SEQ ID NO: 159139 - DNA, 20 bp, Artificial Sequence
  Synthetic oligonucleotide; TAG chr2 60469671 60469690 60469687 +
aatagtcaatgaaacatttg

SEQ ID NO: 159140 - DNA, 20 bp, Artificial Sequence
  Synthetic oligonucleotide; GAG chr2 60469678 60469697 60469694 +
aatgaaacatttgtagcact

SEQ ID NO: 159141 - DNA, 20 bp, Artificial Sequence
  Synthetic oligonucleotide; GAG chr2 60469689 60469708 60469705 +
tgtagcactgagattttttt

SEQ ID NO: 159142 - DNA, 20 bp, Artificial Sequence
  Synthetic oligonucleotide; AAG chr2 60469692 60469711 60469708 +
agcactgagatttttttgag

SEQ ID NO: 159143 - DNA, 20 bp, Artificial Sequence
  Synthetic oligonucleotide; GAG chr2 60469694 60469713 60469710 +
cactgagatttttttgagaa

SEQ ID NO: 159144 - DNA, 20 bp, Artificial Sequence
  Synthetic oligonucleotide; AGG chr2 60469695 60469714 60469711 +
actgagatttttttgagaag

SEQ ID NO: 159145 - DNA, 20 bp, Artificial Sequence
  Synthetic oligonucleotide; TGG chr2 60469704 60469723 60469720 +
tttttgagaagaggaaaatt

SEQ ID NO: 159146 - DNA, 20 bp, Artificial Sequence
  Synthetic oligonucleotide; TGG chr2 60469718 60469737 60469734 +
aaaatttggtttgtgcaatc

SEQ ID NO: 159147 - DNA, 20 bp, Artificial Sequence
  Synthetic oligonucleotide; GGG chr2 60469719 60469738 60469735 +
aaatttggtttgtgcaatct

SEQ ID NO: 159148 - DNA, 20 bp, Artificial Sequence
  Synthetic oligonucleotide; GGG chr2 60469720 60469739 60469736 +
aatttggtttgtgcaatctg

SEQ ID NO: 159149 - DNA, 20 bp, Artificial Sequence
  Synthetic oligonucleotide; CGG chr2 60469729 60469748 60469745 +
tgtgcaatctggggatttta

SEQ ID NO: 159150 - DNA, 20 bp, Artificial Sequence
  Synthetic oligonucleotide; TGG chr2 60469738 60469757 60469754 +
tggggattttacggtttatg

SEQ ID NO: 159151 - DNA, 20 bp, Artificial Sequence
  Synthetic oligonucleotide; AAG chr2 60469742 60469761 60469758 +
gattttacggtttatgtggt

SEQ ID NO: 159152 - DNA, 20 bp, Artificial Sequence
  Synthetic oligonucleotide; TAG chr2 60469749 60469768 60469765 +
cggtttatgtggtaagtgcc

SEQ ID NO: 159153 - DNA, 20 bp, Artificial Sequence
  Synthetic oligonucleotide; AAG chr2 60469759 60469778 60469775 +
ggtaagtgcctagcttttcc

SEQ ID NO: 159154 - DNA, 20 bp, Artificial Sequence
  Synthetic oligonucleotide; TAG chr2 60469770 60469789 60469786 +
agcttttccaagtcctcctc

SEQ ID NO: 159155 - DNA, 20 bp, Artificial Sequence
  Synthetic oligonucleotide; TAG chr2 60469786 60469805 60469802 +
cctctagctaactaaccatg

SEQ ID NO: 159156 - DNA, 20 bp, Artificial Sequence
  Synthetic oligonucleotide; GAG chr2 60469800 60469819 60469816 +
accatgtagctgtccatctt

SEQ ID NO: 159157 - DNA, 20 bp, Artificial Sequence
  Synthetic oligonucleotide; CAG chr2 60469804 60469823 60469820 +
tgtagctgtccatcttgaga

SEQ ID NO: 159158 - DNA, 20 bp, Artificial Sequence
  Synthetic oligonucleotide; TGG chr2 60469809 60469828 60469825 +
ctgtccatcttgagacagac

SEQ ID NO: 159159 - DNA, 20 bp, Artificial Sequence
  Synthetic oligonucleotide; GAG chr2 60469811 60469830 60469827 +
gtccatcttgagacagactg

SEQ ID NO: 159160 - DNA, 20 bp, Artificial Sequence
  Synthetic oligonucleotide; AGG chr2 60469812 60469831 60469828 +
tccatcttgagacagactgg

SEQ ID NO: 159161 - DNA, 20 bp, Artificial Sequence
  Synthetic oligonucleotide; TAG chr2 60469816 60469835 60469832 +
tcttgagacagactggagga

SEQ ID NO: 159162 - DNA, 20 bp, Artificial Sequence
  Synthetic oligonucleotide; TGG chr2 60469820 60469839 60469836 +
gagacagactggaggataga

SEQ ID NO: 159163 - DNA, 20 bp, Artificial Sequence
  Synthetic oligonucleotide; CAG chr2 60469825 60469844 60469841 +
agactggaggatagatggtg

SEQ ID NO: 159164 - DNA, 20 bp, Artificial Sequence
  Synthetic oligonucleotide; AGG chr2 60469826 60469845 60469842 +
gactggaggatagatggtgc

SEQ ID NO: 159165 - DNA, 20 bp, Artificial Sequence
  Synthetic oligonucleotide; GAG chr2 60469828 60469847 60469844 +
ctggaggatagatggtgcag

SEQ ID NO: 159166 - DNA, 20 bp, Artificial Sequence
  Synthetic oligonucleotide; TAG chr2 60469846 60469865 60469862 +
aggagacgctctgtgtgttc

SEQ ID NO: 159167 - DNA, 20 bp, Artificial Sequence
  Synthetic oligonucleotide; GAG chr2 60469848 60469867 60469864 +
gagacgctctgtgtgttcta

SEQ ID NO: 159168 - DNA, 20 bp, Artificial Sequence
  Synthetic oligonucleotide; AGG chr2 60469849 60469868 60469865 +
agacgctctgtgtgttctag

SEQ ID NO: 159169 - DNA, 20 bp, Artificial Sequence
  Synthetic oligonucleotide; TGG chr2 60469854 60469873 60469870 +
ctctgtgtgttctagaggtt

SEQ ID NO: 159170 - DNA, 20 bp, Artificial Sequence
  Synthetic oligonucleotide; GAG chr2 60469856 60469875 60469872 +
ctgtgtgttctagaggtttg

SEQ ID NO: 159171 - DNA, 20 bp, Artificial Sequence
  Synthetic oligonucleotide; TGG chr2 60469870 60469889 60469886 +
ggtttggagttcatgatgat

SEQ ID NO: 159172 - DNA, 20 bp, Artificial Sequence
  Synthetic oligonucleotide; GGG chr2 60469871 60469890 60469887 +
gtttggagttcatgatgatt

SEQ ID NO: 159173 - DNA, 20 bp, Artificial Sequence
  Synthetic oligonucleotide; GGG chr2 60469872 60469891 60469888 +
tttggagttcatgatgattg

SEQ ID NO: 159174 - DNA, 20 bp, Artificial Sequence
  Synthetic oligonucleotide; GAG chr2 60469874 60469893 60469890 +
tggagttcatgatgattggg

SEQ ID NO: 159175 - DNA, 20 bp, Artificial Sequence
  Synthetic oligonucleotide; AGG chr2 60469875 60469894 60469891 +
ggagttcatgatgattgggg

SEQ ID NO: 159176 - DNA, 20 bp, Artificial Sequence
  Synthetic oligonucleotide; GGG chr2 60469876 60469895 60469892 +
gagttcatgatgattgggga

SEQ ID NO: 159177 - DNA, 20 bp, Artificial Sequence
  Synthetic oligonucleotide; CGG chr2 60469879 60469898 60469895 +
ttcatgatgattggggaggg

SEQ ID NO: 159178 - DNA, 20 bp, Artificial Sequence
  Synthetic oligonucleotide; GGG chr2 60469880 60469899 60469896 +
tcatgatgattggggagggc

SEQ ID NO: 159179 - DNA, 20 bp, Artificial Sequence
  Synthetic oligonucleotide; GAG chr2 60469882 60469901 60469898 +
atgatgattggggagggcgg

SEQ ID NO: 159180 - DNA, 20 bp, Artificial Sequence
  Synthetic oligonucleotide; AAG chr2 60469887 60469906 60469903 +
gattggggagggcgggagac

SEQ ID NO: 159181 - DNA, 20 bp, Artificial Sequence
  Synthetic oligonucleotide; CAG chr2 60469895 60469914 60469911 +
agggcgggagacaagaaaaa

SEQ ID NO: 159182 - DNA, 20 bp, Artificial Sequence
  Synthetic oligonucleotide; TGG chr2 60469905 60469924 60469921 +
acaagaaaaacagactttga

SEQ ID NO: 159183 - DNA, 20 bp, Artificial Sequence
  Synthetic oligonucleotide; CAG chr2 60469916 60469935 60469932 +
agactttgatggtgaacaaa

SEQ ID NO: 159184 - DNA, 20 bp, Artificial Sequence
  Synthetic oligonucleotide; TAG chr2 60469931 60469950 60469947 +
acaaacagtatgttttccat

SEQ ID NO: 159185 - DNA, 20 bp, Artificial Sequence
  Synthetic oligonucleotide; AAG chr2 60469943 60469962 60469959 +
ttttccattagcttaatatt

SEQ ID NO: 159186 - DNA, 20 bp, Artificial Sequence
  Synthetic oligonucleotide; GAG chr2 60469945 60469964 60469961 +
ttccattagcttaatattaa

SEQ ID NO: 159187 - DNA, 20 bp, Artificial Sequence
  Synthetic oligonucleotide; TAG chr2 60469952 60469971 60469968 +
agcttaatattaagagcact

SEQ ID NO: 159188 - DNA, 20 bp, Artificial Sequence
  Synthetic oligonucleotide; AAG chr2 60469955 60469974 60469971 +
ttaatattaagagcacttag

SEQ ID NO: 159189 - DNA, 20 bp, Artificial Sequence
  Synthetic oligonucleotide; TAG chr2 60469974 60469993 60469990 +
gaagtgttgttgttgtactc

SEQ ID NO: 159190 - DNA, 20 bp, Artificial Sequence
  Synthetic oligonucleotide; AGG chr2 60469975 60469994 60469991 +
aagtgttgttgttgtactct

SEQ ID NO: 159191 - DNA, 20 bp, Artificial Sequence
  Synthetic oligonucleotide; TAG chr2 60469979 60469998 60469995 +
gttgttgttgtactctagga

SEQ ID NO: 159192 - DNA, 20 bp, Artificial Sequence
  Synthetic oligonucleotide; CAG chr2 60469982 60470001 60469998 +
gttgttgtactctaggatag

SEQ ID NO: 159193 - DNA, 20 bp, Artificial Sequence
  Synthetic oligonucleotide; AGG chr2 60469983 60470002 60469999 +
ttgttgtactctaggatagc

SEQ ID NO: 159194 - DNA, 20 bp, Artificial Sequence
  Synthetic oligonucleotide; AAG chr2 60469990 60470009 60470006 +
actctaggatagcaggtctc

SEQ ID NO: 159195 - DNA, 20 bp, Artificial Sequence
  Synthetic oligonucleotide; TAG chr2 60470020 60470039 60470036 +
tacatcctgttctccttata

SEQ ID NO: 159196 - DNA, 20 bp, Artificial Sequence
  Synthetic oligonucleotide; GAG chr2 60470022 60470041 60470038 +
catcctgttctccttatata

SEQ ID NO: 159197 - DNA, 20 bp, Artificial Sequence
  Synthetic oligonucleotide; AAG chr2 60470034 60470053 60470050 +
cttatatagagcacactgcc

SEQ ID NO: 159198 - DNA, 20 bp, Artificial Sequence
  Synthetic oligonucleotide; CAG chr2 60470039 60470058 60470055 +
atagagcacactgccaagca

SEQ ID NO: 159199 - DNA, 20 bp, Artificial Sequence
  Synthetic oligonucleotide; AAG chr2 60470044 60470063 60470060 +
gcacactgccaagcacagcc

SEQ ID NO: 159200 - DNA, 20 bp, Artificial Sequence
  Synthetic oligonucleotide; AGG chr2 60470045 60470064 60470061 +
cacactgccaagcacagcca

SEQ ID NO: 159201 - DNA, 20 bp, Artificial Sequence
  Synthetic oligonucleotide; CAG chr2 60470048 60470067 60470064 +
actgccaagcacagccaagg

SEQ ID NO: 159202 - DNA, 20 bp, Artificial Sequence
  Synthetic oligonucleotide; TGG chr2 60470052 60470071 60470068 +
ccaagcacagccaaggcagt

SEQ ID NO: 159203 - DNA, 20 bp, Artificial Sequence
  Synthetic oligonucleotide; GGG chr2 60470053 60470072 60470069 +
caagcacagccaaggcagtt

SEQ ID NO: 159204 - DNA, 20 bp, Artificial Sequence
  Synthetic oligonucleotide; AAG chr2 60470058 60470077 60470074 +
acagccaaggcagttgggac

SEQ ID NO: 159205 - DNA, 20 bp, Artificial Sequence
  Synthetic oligonucleotide; AAG chr2 60470073 60470092 60470089 +
gggacaagatttcctttcgc

SEQ ID NO: 159206 - DNA, 20 bp, Artificial Sequence
  Synthetic oligonucleotide; AGG chr2 60470074 60470093 60470090 +
ggacaagatttcctttcgca

SEQ ID NO: 159207 - DNA, 20 bp, Artificial Sequence
  Synthetic oligonucleotide; GAG chr2 60470076 60470095 60470092 +
acaagatttcctttcgcaag

SEQ ID NO: 159208 - DNA, 20 bp, Artificial Sequence
  Synthetic oligonucleotide; TGG chr2 60470081 60470100 60470097 +
atttcctttcgcaaggagcc

SEQ ID NO: 159209 - DNA, 20 bp, Artificial Sequence
  Synthetic oligonucleotide; TGG chr2 60470084 60470103 60470100 +
tcctttcgcaaggagcctgg

SEQ ID NO: 159210 - DNA, 20 bp, Artificial Sequence
  Synthetic oligonucleotide; GGG chr2 60470085 60470104 60470101 +
cctttcgcaaggagcctggt

SEQ ID NO: 159211 - DNA, 20 bp, Artificial Sequence
  Synthetic oligonucleotide; TGG chr2 60470094 60470113 60470110 +
aggagcctggtgggtaacga

SEQ ID NO: 159212 - DNA, 20 bp, Artificial Sequence
  Synthetic oligonucleotide; GAG chr2 60470106 60470125 60470122 +
ggtaacgatggtgtgctgct

SEQ ID NO: 159213 - DNA, 20 bp, Artificial Sequence
  Synthetic oligonucleotide; AAG chr2 60470109 60470128 60470125 +
aacgatggtgtgctgctgag

SEQ ID NO: 159214 - DNA, 20 bp, Artificial Sequence
  Synthetic oligonucleotide; AGG chr2 60470110 60470129 60470126 +
acgatggtgtgctgctgaga

SEQ ID NO: 159215 - DNA, 20 bp, Artificial Sequence
  Synthetic oligonucleotide; CAG chr2 60470121 60470140 60470137 +
ctgctgagaaggctcttaca

SEQ ID NO: 159216 - DNA, 20 bp, Artificial Sequence
  Synthetic oligonucleotide; CAG chr2 60470125 60470144 60470141 +
tgagaaggctcttacacaga

SEQ ID NO: 159217 - DNA, 20 bp, Artificial Sequence
  Synthetic oligonucleotide; TAG chr2 60470130 60470149 60470146 +
aggctcttacacagacagca

SEQ ID NO: 159218 - DNA, 20 bp, Artificial Sequence
  Synthetic oligonucleotide; AGG chr2 60470131 60470150 60470147 +
ggctcttacacagacagcat

SEQ ID NO: 159219 - DNA, 20 bp, Artificial Sequence
  Synthetic oligonucleotide; CAG chr2 60470145 60470164 60470161 +
cagcataggtctgctgttac

SEQ ID NO: 159220 - DNA, 20 bp, Artificial Sequence
  Synthetic oligonucleotide; AGG chr2 60470146 60470165 60470162 +
agcataggtctgctgttacc

SEQ ID NO: 159221 - DNA, 20 bp, Artificial Sequence
  Synthetic oligonucleotide; CAG chr2 60470153 60470172 60470169 +
gtctgctgttaccaggcctg

SEQ ID NO: 159222 - DNA, 20 bp, Artificial Sequence
  Synthetic oligonucleotide; GAG chr2 60470155 60470174 60470171 +
ctgctgttaccaggcctgca

SEQ ID NO: 159223 - DNA, 20 bp, Artificial Sequence
  Synthetic oligonucleotide; AGG chr2 60470156 60470175 60470172 +
tgctgttaccaggcctgcag

SEQ ID NO: 159224 - DNA, 20 bp, Artificial Sequence
  Synthetic oligonucleotide; GGG chr2 60470157 60470176 60470173 +
gctgttaccaggcctgcaga

SEQ ID NO: 159225 - DNA, 20 bp, Artificial Sequence
  Synthetic oligonucleotide; AAG chr2 60470160 60470179 60470176 +
gttaccaggcctgcagaggg

SEQ ID NO: 159226 - DNA, 20 bp, Artificial Sequence
  Synthetic oligonucleotide; TGG chr2 60470166 60470185 60470182 +
aggcctgcagagggaagccc

SEQ ID NO: 159227 - DNA, 20 bp, Artificial Sequence
  Synthetic oligonucleotide; TGG chr2 60470169 60470188 60470185 +
cctgcagagggaagccctgg

SEQ ID NO: 159228 - DNA, 20 bp, Artificial Sequence
  Synthetic oligonucleotide; AAG chr2 60470172 60470191 60470188 +
gcagagggaagccctggtgg

SEQ ID NO: 159229 - DNA, 20 bp, Artificial Sequence
  Synthetic oligonucleotide; TAG chr2 60470182 60470201 60470198 +
gccctggtggaagcaccacc

SEQ ID NO: 159230 - DNA, 20 bp, Artificial Sequence
  Synthetic oligonucleotide; GAG chr2 60470188 60470207 60470204 +
gtggaagcaccacctagcct

SEQ ID NO: 159231 - DNA, 20 bp, Artificial Sequence
  Synthetic oligonucleotide; CAG chr2 60470199 60470218 60470215 +
acctagcctgagaacatcta

SEQ ID NO: 159232 - DNA, 20 bp, Artificial Sequence
  Synthetic oligonucleotide; GAG chr2 60470201 60470220 60470217 +
ctagcctgagaacatctaca

SEQ ID NO: 159233 - DNA, 20 bp, Artificial Sequence
  Synthetic oligonucleotide; AAG chr2 60470245 60470264 60470261 +
aaaacaaaataaacaccaca

SEQ ID NO: 159234 - DNA, 20 bp, Artificial Sequence
  Synthetic oligonucleotide; AAG chr2 60470259 60470278 60470275 +
accacaaagtgaaccaacac

SEQ ID NO: 159235 - DNA, 20 bp, Artificial Sequence
  Synthetic oligonucleotide; CAG chr2 60470262 60470281 60470278 +
acaaagtgaaccaacacaag

SEQ ID NO: 159236 - DNA, 20 bp, Artificial Sequence
  Synthetic oligonucleotide; AGG chr2 60470263 60470282 60470279 +
caaagtgaaccaacacaagc

SEQ ID NO: 159237 - DNA, 20 bp, Artificial Sequence
  Synthetic oligonucleotide; AAG chr2 60470266 60470285 60470282 +
agtgaaccaacacaagcagg

SEQ ID NO: 159238 - DNA, 20 bp, Artificial Sequence
  Synthetic oligonucleotide; CGG chr2 60470271 60470290 60470287 +
accaacacaagcaggaagac

SEQ ID NO: 159239 - DNA, 20 bp, Artificial Sequence
  Synthetic oligonucleotide; AAG chr2 60470285 60470304 60470301 +
gaagaccggacttaacaaac

SEQ ID NO: 159240 - DNA, 20 bp, Artificial Sequence
  Synthetic oligonucleotide; AAG chr2 60470314 60470333 60470330 +
tacatttgactgtttacgtc

SEQ ID NO: 159241 - DNA, 20 bp, Artificial Sequence
  Synthetic oligonucleotide; GAG chr2 60470323 60470342 60470339 +
ctgtttacgtcaagtgaatt

SEQ ID NO: 159242 - DNA, 20 bp, Artificial Sequence
  Synthetic oligonucleotide; GAG chr2 60470325 60470344 60470341 +
gtttacgtcaagtgaattga

SEQ ID NO: 159243 - DNA, 20 bp, Artificial Sequence
  Synthetic oligonucleotide; TGG chr2 60470330 60470349 60470346 +
cgtcaagtgaattgagagtg

SEQ ID NO: 159244 - DNA, 20 bp, Artificial Sequence
  Synthetic oligonucleotide; CAG chr2 60470346 60470365 60470362 +
agtgtggcgtaaaattacta

SEQ ID NO: 159245 - DNA, 20 bp, Artificial Sequence
  Synthetic oligonucleotide; TGG chr2 60470358 60470377 60470374 +
aattactacagattttgtca

SEQ ID NO: 159246 - DNA, 20 bp, Artificial Sequence
  Synthetic oligonucleotide; GAG chr2 60470372 60470391 60470388 +
ttgtcatggtatttttcaat

SEQ ID NO: 159247 - DNA, 20 bp, Artificial Sequence
  Synthetic oligonucleotide; GAG chr2 60470381 60470400 60470397 +
tatttttcaatgagaaatct

SEQ ID NO: 159248 - DNA, 20 bp, Artificial Sequence
  Synthetic oligonucleotide; CAG chr2 60470411 60470430 60470427 +
ctttgcacttgtttttgcct

SEQ ID NO: 159249 - DNA, 20 bp, Artificial Sequence
  Synthetic oligonucleotide; AAG chr2 60470423 60470442 60470439 +
ttttgcctcagccgttcact

SEQ ID NO: 159250 - DNA, 20 bp, Artificial Sequence
  Synthetic oligonucleotide; CAG chr2 60470439 60470458 60470455 +
cactaagtttgctgccaaaa

SEQ ID NO: 159251 - DNA, 20 bp, Artificial Sequence
  Synthetic oligonucleotide; TAG chr2 60470454 60470473 60470470 +
caaaacagacatccttttct

SEQ ID NO: 159252 - DNA, 20 bp, Artificial Sequence
  Synthetic oligonucleotide; AGG chr2 60470455 60470474 60470471 +
aaaacagacatccttttctt

SEQ ID NO: 159253 - DNA, 20 bp, Artificial Sequence
  Synthetic oligonucleotide; CAG chr2 60470463 60470482 60470479 +
catccttttcttaggaaaca

SEQ ID NO: 159254 - DNA, 20 bp, Artificial Sequence
  Synthetic oligonucleotide; AGG chr2 60470464 60470483 60470480 +
atccttttcttaggaaacac

SEQ ID NO: 159255 - DNA, 20 bp, Artificial Sequence
  Synthetic oligonucleotide; CAG chr2 60470472 60470491 60470488 +
cttaggaaacacaggcaacc

SEQ ID NO: 159256 - DNA, 20 bp, Artificial Sequence
  Synthetic oligonucleotide; AGG chr2 60470473 60470492 60470489 +
ttaggaaacacaggcaaccc

SEQ ID NO: 159257 - DNA, 20 bp, Artificial Sequence
  Synthetic oligonucleotide; CAG chr2 60470490 60470509 60470506 +
cccaggtatctctgtgatcc

SEQ ID NO: 159258 - DNA, 20 bp, Artificial Sequence
  Synthetic oligonucleotide; CAG chr2 60470504 60470523 60470520 +
tgatcccagcataaacgcaa

SEQ ID NO: 159259 - DNA, 20 bp, Artificial Sequence
  Synthetic oligonucleotide; AGG chr2 60470505 60470524 60470521 +
gatcccagcataaacgcaac

SEQ ID NO: 159260 - DNA, 20 bp, Artificial Sequence
  Synthetic oligonucleotide; TGG chr2 60470512 60470531 60470528 +
gcataaacgcaacaggtact

SEQ ID NO: 159261 - DNA, 20 bp, Artificial Sequence
  Synthetic oligonucleotide; TGG chr2 60470524 60470543 60470540 +
caggtacttggatccttgta

SEQ ID NO: 159262 - DNA, 20 bp, Artificial Sequence
  Synthetic oligonucleotide; GGG chr2 60470525 60470544 60470541 +
aggtacttggatccttgtat

SEQ ID NO: 159263 - DNA, 20 bp, Artificial Sequence
  Synthetic oligonucleotide; GGG chr2 60470526 60470545 60470542 +
ggtacttggatccttgtatg

SEQ ID NO: 159264 - DNA, 20 bp, Artificial Sequence
  Synthetic oligonucleotide; GAG chr2 60470528 60470547 60470544 +
tacttggatccttgtatggg

SEQ ID NO: 159265 - DNA, 20 bp, Artificial Sequence
  Synthetic oligonucleotide; TGG chr2 60470562 60470581 60470578 +
aaattctctgccacttactc

SEQ ID NO: 159266 - DNA, 20 bp, Artificial Sequence
  Synthetic oligonucleotide; GGG chr2 60470563 60470582 60470579 +
aattctctgccacttactct

SEQ ID NO: 159267 - DNA, 20 bp, Artificial Sequence
  Synthetic oligonucleotide; AAG chr2 60470566 60470585 60470582 +
tctctgccacttactctggg

SEQ ID NO: 159268 - DNA, 20 bp, Artificial Sequence
  Synthetic oligonucleotide; GAG chr2 60470568 60470587 60470584 +
tctgccacttactctgggaa

SEQ ID NO: 159269 - DNA, 20 bp, Artificial Sequence
  Synthetic oligonucleotide; AAG chr2 60470577 60470596 60470593 +
tactctgggaagagaccctg

SEQ ID NO: 159270 - DNA, 20 bp, Artificial Sequence
  Synthetic oligonucleotide; CAG chr2 60470585 60470604 60470601 +
gaagagaccctgaagtgctt

SEQ ID NO: 159271 - DNA, 20 bp, Artificial Sequence
  Synthetic oligonucleotide; CAG chr2 60470588 60470607 60470604 +
gagaccctgaagtgcttcag

SEQ ID NO: 159272 - DNA, 20 bp, Artificial Sequence
  Synthetic oligonucleotide; AGG chr2 60470589 60470608 60470605 +
agaccctgaagtgcttcagc

SEQ ID NO: 159273 - DNA, 20 bp, Artificial Sequence
  Synthetic oligonucleotide; CAG chr2 60470596 60470615 60470612 +
gaagtgcttcagcaggcctc

SEQ ID NO: 159274 - DNA, 20 bp, Artificial Sequence
  Synthetic oligonucleotide; AAG chr2 60470600 60470619 60470616 +
tgcttcagcaggcctccagc

SEQ ID NO: 159275 - DNA, 20 bp, Artificial Sequence
  Synthetic oligonucleotide; TGG chr2 60470606 60470625 60470622 +
agcaggcctccagcaagaaa

SEQ ID NO: 159276 - DNA, 20 bp, Artificial Sequence
  Synthetic oligonucleotide; GGG chr2 60470607 60470626 60470623 +
gcaggcctccagcaagaaat

SEQ ID NO: 159277 - DNA, 20 bp, Artificial Sequence
  Synthetic oligonucleotide; GAG chr2 60470609 60470628 60470625 +
aggcctccagcaagaaatgg

SEQ ID NO: 159278 - DNA, 20 bp, Artificial Sequence
  Synthetic oligonucleotide; TAG chr2 60470634 60470653 60470650 +
ctgctaacctaatccatgcc

SEQ ID NO: 159279 - DNA, 20 bp, Artificial Sequence
  Synthetic oligonucleotide; TGG chr2 60470658 60470677 60470674 +
ccctcgcatgaatctcttgt

SEQ ID NO: 159280 - DNA, 20 bp, Artificial Sequence
  Synthetic oligonucleotide; TAG chr2 60470682 60470701 60470698 +
aaacttgtctacaaacccat

SEQ ID NO: 159281 - DNA, 20 bp, Artificial Sequence
  Synthetic oligonucleotide; AAG chr2 60470693 60470712 60470709 +
caaacccattagccctaaac

SEQ ID NO: 159282 - DNA, 20 bp, Artificial Sequence
  Synthetic oligonucleotide; CGG chr2 60470700 60470719 60470716 +
attagccctaaacaagctga

SEQ ID NO: 159283 - DNA, 20 bp, Artificial Sequence
  Synthetic oligonucleotide; CAG chr2 60470703 60470722 60470719 +
agccctaaacaagctgacgg

SEQ ID NO: 159284 - DNA, 20 bp, Artificial Sequence
  Synthetic oligonucleotide; AGG chr2 60470704 60470723 60470720 +
gccctaaacaagctgacggc

SEQ ID NO: 159285 - DNA, 20 bp, Artificial Sequence
  Synthetic oligonucleotide; CAG chr2 60470709 60470728 60470725 +
aaacaagctgacggcaggac

SEQ ID NO: 159286 - DNA, 20 bp, Artificial Sequence
  Synthetic oligonucleotide; CAG chr2 60470719 60470738 60470735 +
acggcaggaccagatctcta

SEQ ID NO: 159287 - DNA, 20 bp, Artificial Sequence
  Synthetic oligonucleotide; TGG chr2 60470726 60470745 60470742 +
gaccagatctctacagtgtc

SEQ ID NO: 159288 - DNA, 20 bp, Artificial Sequence
  Synthetic oligonucleotide; TGG chr2 60470734 60470753 60470750 +
ctctacagtgtctggccgtg

SEQ ID NO: 159289 - DNA, 20 bp, Artificial Sequence
  Synthetic oligonucleotide; AAG chr2 60470739 60470758 60470755 +
cagtgtctggccgtgtggca

SEQ ID NO: 159290 - DNA, 20 bp, Artificial Sequence
  Synthetic oligonucleotide; GAG chr2 60470743 60470762 60470759 +
gtctggccgtgtggcaaagt

SEQ ID NO: 159291 - DNA, 20 bp, Artificial Sequence
  Synthetic oligonucleotide; AGG chr2 60470744 60470763 60470760 +
tctggccgtgtggcaaagtg

SEQ ID NO: 159292 - DNA, 20 bp, Artificial Sequence
  Synthetic oligonucleotide; TGG chr2 60470762 60470781 60470778 +
tgaggtctcatctgactatc

SEQ ID NO: 159293 - DNA, 20 bp, Artificial Sequence
  Synthetic oligonucleotide; CAG chr2 60470765 60470784 60470781 +
ggtctcatctgactatctgg

SEQ ID NO: 159294 - DNA, 20 bp, Artificial Sequence
  Synthetic oligonucleotide; TAG chr2 60470770 60470789 60470786 +
catctgactatctggcagca

SEQ ID NO: 159295 - DNA, 20 bp, Artificial Sequence
  Synthetic oligonucleotide; AAG chr2 60470807 60470826 60470823 +
tgtttttgtttttgttttct

SEQ ID NO: 159296 - DNA, 20 bp, Artificial Sequence
  Synthetic oligonucleotide; TAG chr2 60470823 60470842 60470839 +
ttctaagttgtaaaaaaccc

SEQ ID NO: 159297 - DNA, 20 bp, Artificial Sequence
  Synthetic oligonucleotide; AAG chr2 60470834 60470853 60470850 +
aaaaaaccctagctatcatc

SEQ ID NO: 159298 - DNA, 20 bp, Artificial Sequence
  Synthetic oligonucleotide; CAG chr2 60470854 60470873 60470870 +
aagtctgtcccttcatttta

SEQ ID NO: 159299 - DNA, 20 bp, Artificial Sequence
  Synthetic oligonucleotide; TGG chr2 60470858 60470877 60470874 +
ctgtcccttcattttacaga

SEQ ID NO: 159300 - DNA, 20 bp, Artificial Sequence
  Synthetic oligonucleotide; GGG chr2 60470859 60470878 60470875 +
tgtcccttcattttacagat

SEQ ID NO: 159301 - DNA, 20 bp, Artificial Sequence
  Synthetic oligonucleotide; GGG chr2 60470860 60470879 60470876 +
gtcccttcattttacagatg

SEQ ID NO: 159302 - DNA, 20 bp, Artificial Sequence
  Synthetic oligonucleotide; GAG chr2 60470868 60470887 60470884 +
attttacagatggggaaact

SEQ ID NO: 159303 - DNA, 20 bp, Artificial Sequence
  Synthetic oligonucleotide; AGG chr2 60470869 60470888 60470885 +
ttttacagatggggaaactg

SEQ ID NO: 159304 - DNA, 20 bp, Artificial Sequence
  Synthetic oligonucleotide; GAG chr2 60470876 60470895 60470892 +
gatggggaaactgaggccat

SEQ ID NO: 159305 - DNA, 20 bp, Artificial Sequence
  Synthetic oligonucleotide; AAG chr2 60470884 60470903 60470900 +
aactgaggccatgagaaatt

SEQ ID NO: 159306 - DNA, 20 bp, Artificial Sequence
  Synthetic oligonucleotide; TGG chr2 60470898 60470917 60470914 +
gaaattaagtgacttgccca

SEQ ID NO: 159307 - DNA, 20 bp, Artificial Sequence
  Synthetic oligonucleotide; AAG chr2 60470927 60470946 60470943 +
tgatgattaaccacaatgtg

SEQ ID NO: 159308 - DNA, 20 bp, Artificial Sequence
  Synthetic oligonucleotide; TAG chr2 60470932 60470951 60470948 +
attaaccacaatgtgaagat

SEQ ID NO: 159309 - DNA, 20 bp, Artificial Sequence
  Synthetic oligonucleotide; CAG chr2 60470958 60470977 60470974 +
taatctcctgactcctgatc

SEQ ID NO: 159310 - DNA, 20 bp, Artificial Sequence
  Synthetic oligonucleotide; TGG chr2 60470961 60470980 60470977 +
tctcctgactcctgatccag

SEQ ID NO: 159311 - DNA, 20 bp, Artificial Sequence
  Synthetic oligonucleotide; TGG chr2 60470971 60470990 60470987 +
cctgatccagtggtctttcc

SEQ ID NO: 159312 - DNA, 20 bp, Artificial Sequence
  Synthetic oligonucleotide; GGG chr2 60470972 60470991 60470988 +
ctgatccagtggtctttcct

SEQ ID NO: 159313 - DNA, 20 bp, Artificial Sequence
  Synthetic oligonucleotide; TGG chr2 60471007 60471026 60471023 +
cccccctgctgctcctgccg

SEQ ID NO: 159314 - DNA, 20 bp, Artificial Sequence
  Synthetic oligonucleotide; AAG chr2 60471025 60471044 60471041 +
cgtggtcttcactgcccaac

SEQ ID NO: 159315 - DNA, 20 bp, Artificial Sequence
  Synthetic oligonucleotide; AAG chr2 60471028 60471047 60471044 +
ggtcttcactgcccaacaag

SEQ ID NO: 159316 - DNA, 20 bp, Artificial Sequence
  Synthetic oligonucleotide; AGG chr2 60471029 60471048 60471045 +
gtcttcactgcccaacaaga

SEQ ID NO: 159317 - DNA, 20 bp, Artificial Sequence
  Synthetic oligonucleotide; AAG chr2 60471053 60471072 60471069 +
cctgtttctactgatccatt

SEQ ID NO: 159318 - DNA, 20 bp, Artificial Sequence
  Synthetic oligonucleotide; CAG chr2 60471056 60471075 60471072 +
gtttctactgatccattaag

SEQ ID NO: 159319 - DNA, 20 bp, Artificial Sequence
  Synthetic oligonucleotide; TGG chr2 60471072 60471091 60471088 +
taagcagtacttaaccgtct

SEQ ID NO: 159320 - DNA, 20 bp, Artificial Sequence
  Synthetic oligonucleotide; GGG chr2 60471073 60471092 60471089 +
aagcagtacttaaccgtctt

SEQ ID NO: 159321 - DNA, 20 bp, Artificial Sequence
  Synthetic oligonucleotide; GGG chr2 60471074 60471093 60471090 +
agcagtacttaaccgtcttg

SEQ ID NO: 159322 - DNA, 20 bp, Artificial Sequence
  Synthetic oligonucleotide; GGG chr2 60471075 60471094 60471091 +
gcagtacttaaccgtcttgg

SEQ ID NO: 159323 - DNA, 20 bp, Artificial Sequence
  Synthetic oligonucleotide; GAG chr2 60471077 60471096 60471093 +
agtacttaaccgtcttgggg

SEQ ID NO: 159324 - DNA, 20 bp, Artificial Sequence
  Synthetic oligonucleotide; AGG chr2 60471078 60471097 60471094 +
gtacttaaccgtcttggggg

SEQ ID NO: 159325 - DNA, 20 bp, Artificial Sequence
  Synthetic oligonucleotide; GGG chr2 60471079 60471098 60471095 +
tacttaaccgtcttggggga

SEQ ID NO: 159326 - DNA, 20 bp, Artificial Sequence
  Synthetic oligonucleotide; CAG chr2 60471084 60471103 60471100 +
aaccgtcttgggggagggtc

SEQ ID NO: 159327 - DNA, 20 bp, Artificial Sequence
  Synthetic oligonucleotide; CAG chr2 60471089 60471108 60471105 +
tcttgggggagggtccagcc

SEQ ID NO: 159328 - DNA, 20 bp, Artificial Sequence
  Synthetic oligonucleotide; CAG chr2 60471092 60471111 60471108 +
tgggggagggtccagcccag

SEQ ID NO: 159329 - DNA, 20 bp, Artificial Sequence
  Synthetic oligonucleotide; TGG chr2 60471102 60471121 60471118 +
tccagcccagcagcgctaca

SEQ ID NO: 159330 - DNA, 20 bp, Artificial Sequence
  Synthetic oligonucleotide; GGG chr2 60471103 60471122 60471119 +
ccagcccagcagcgctacat

SEQ ID NO: 159331 - DNA, 20 bp, Artificial Sequence
  Synthetic oligonucleotide; GGG chr2 60471104 60471123 60471120 +
cagcccagcagcgctacatg

SEQ ID NO: 159332 - DNA, 20 bp, Artificial Sequence
  Synthetic oligonucleotide; AAG chr2 60471114 60471133 60471130 +
gcgctacatggggctttcga

SEQ ID NO: 159333 - DNA, 20 bp, Artificial Sequence
  Synthetic oligonucleotide; AGG chr2 60471115 60471134 60471131 +
cgctacatggggctttcgaa

SEQ ID NO: 159334 - DNA, 20 bp, Artificial Sequence
  Synthetic oligonucleotide; TGG chr2 60471134 60471153 60471150 +
aaggtgccaatgaactgact

SEQ ID NO: 159335 - DNA, 20 bp, Artificial Sequence
  Synthetic oligonucleotide; TGG chr2 60471146 60471165 60471162 +
aactgacttggtctcacaat

SEQ ID NO: 159336 - DNA, 20 bp, Artificial Sequence
  Synthetic oligonucleotide; AAG chr2 60471154 60471173 60471170 +
tggtctcacaattggaaaac

SEQ ID NO: 159337 - DNA, 20 bp, Artificial Sequence
  Synthetic oligonucleotide; AGG chr2 60471155 60471174 60471171 +
ggtctcacaattggaaaaca

SEQ ID NO: 159338 - DNA, 20 bp, Artificial Sequence
  Synthetic oligonucleotide; TGG chr2 60471172 60471191 60471188 +
acaaggcctgctctgctgcc

SEQ ID NO: 159339 - DNA, 20 bp, Artificial Sequence
  Synthetic oligonucleotide; GGG chr2 60471173 60471192 60471189 +
caaggcctgctctgctgcct

SEQ ID NO: 159340 - DNA, 20 bp, Artificial Sequence
  Synthetic oligonucleotide; TGG chr2 60471181 60471200 60471197 +
gctctgctgcctgggcctcc

SEQ ID NO: 159341 - DNA, 20 bp, Artificial Sequence
  Synthetic oligonucleotide; CAG chr2 60471226 60471245 60471242 +
ctctacctctgcttcccctg

SEQ ID NO: 159342 - DNA, 20 bp, Artificial Sequence
  Synthetic oligonucleotide; TAG chr2 60471232 60471251 60471248 +
ctctgcttcccctgcagaat

SEQ ID NO: 159343 - DNA, 20 bp, Artificial Sequence
  Synthetic oligonucleotide; CAG chr2 60471236 60471255 60471252 +
gcttcccctgcagaattaga

SEQ ID NO: 159344 - DNA, 20 bp, Artificial Sequence
  Synthetic oligonucleotide; CAG chr2 60471255 60471274 60471271 +
acagctaaaaacatttctat

SEQ ID NO: 159345 - DNA, 20 bp, Artificial Sequence
  Synthetic oligonucleotide; AAG chr2 60471261 60471280 60471277 +
aaaaacatttctatcagcct

SEQ ID NO: 159346 - DNA, 20 bp, Artificial Sequence
  Synthetic oligonucleotide; AAG chr2 60471264 60471283 60471280 +
aacatttctatcagcctaag

SEQ ID NO: 159347 - DNA, 20 bp, Artificial Sequence
  Synthetic oligonucleotide; TAG chr2 60471277 60471296 60471293 +
gcctaagaagctatttactt

SEQ ID NO: 159348 - DNA, 20 bp, Artificial Sequence
  Synthetic oligonucleotide; AAG chr2 60471285 60471304 60471301 +
agctatttactttagaaaaa

SEQ ID NO: 159349 - DNA, 20 bp, Artificial Sequence
  Synthetic oligonucleotide; GAG chr2 60471302 60471321 60471318 +
aaaaagcacactgtctttgt

SEQ ID NO: 159350 - DNA, 20 bp, Artificial Sequence
  Synthetic oligonucleotide; CAG chr2 60471330 60471349 60471346 +
cccttgcatttatcttcctt

SEQ ID NO: 159351 - DNA, 20 bp, Artificial Sequence
  Synthetic oligonucleotide; AGG chr2 60471331 60471350 60471347 +
ccttgcatttatcttccttc

SEQ ID NO: 159352 - DNA, 20 bp, Artificial Sequence
  Synthetic oligonucleotide; AAG chr2 60471334 60471353 60471350 +
tgcatttatcttccttcagg

SEQ ID NO: 159353 - DNA, 20 bp, Artificial Sequence
  Synthetic oligonucleotide; GAG chr2 60471336 60471355 60471352 +
catttatcttccttcaggaa

SEQ ID NO: 159354 - DNA, 20 bp, Artificial Sequence
  Synthetic oligonucleotide; AGG chr2 60471337 60471356 60471353 +
atttatcttccttcaggaag

SEQ ID NO: 159355 - DNA, 20 bp, Artificial Sequence
  Synthetic oligonucleotide; GGG chr2 60471338 60471357 60471354 +
tttatcttccttcaggaaga

SEQ ID NO: 159356 - DNA, 20 bp, Artificial Sequence
  Synthetic oligonucleotide; AAG chr2 60471344 60471363 60471360 +
ttccttcaggaagagggtca

SEQ ID NO: 159357 - DNA, 20 bp, Artificial Sequence
  Synthetic oligonucleotide; AAG chr2 60471349 60471368 60471365 +
tcaggaagagggtcaaagca

SEQ ID NO: 159358 - DNA, 20 bp, Artificial Sequence
  Synthetic oligonucleotide; TGG chr2 60471357 60471376 60471373 +
agggtcaaagcaaagccaac

SEQ ID NO: 159359 - DNA, 20 bp, Artificial Sequence
  Synthetic oligonucleotide; GGG chr2 60471358 60471377 60471374 +
gggtcaaagcaaagccaact

SEQ ID NO: 159360 - DNA, 20 bp, Artificial Sequence
  Synthetic oligonucleotide; GGG chr2 60471359 60471378 60471375 +
ggtcaaagcaaagccaactg

SEQ ID NO: 159361 - DNA, 20 bp, Artificial Sequence
  Synthetic oligonucleotide; CAG chr2 60471366 60471385 60471382 +
gcaaagccaactggggaccc

SEQ ID NO: 159362 - DNA, 20 bp, Artificial Sequence
  Synthetic oligonucleotide; TGG chr2 60471415 60471434 60471431 +
cacatccataatattctctt

SEQ ID NO: 159363 - DNA, 20 bp, Artificial Sequence
  Synthetic oligonucleotide; AAG chr2 60471419 60471438 60471435 +
tccataatattctctttggt

SEQ ID NO: 159364 - DNA, 20 bp, Artificial Sequence
  Synthetic oligonucleotide; TGG chr2 60471446 60471465 60471462 +
atcgacattcccacatgaac

SEQ ID NO: 159365 - DNA, 20 bp, Artificial Sequence
  Synthetic oligonucleotide; TAG chr2 60471466 60471485 60471482 +
tggaaatgctaaattgttaa

SEQ ID NO: 159366 - DNA, 20 bp, Artificial Sequence
  Synthetic oligonucleotide; TAG chr2 60471475 60471494 60471491 +
taaattgttaatagcctccc

SEQ ID NO: 159367 - DNA, 20 bp, Artificial Sequence
  Synthetic oligonucleotide; AGG chr2 60471476 60471495 60471492 +
aaattgttaatagcctccct

SEQ ID NO: 159368 - DNA, 20 bp, Artificial Sequence
  Synthetic oligonucleotide; GGG chr2 60471477 60471496 60471493 +
aattgttaatagcctcccta

SEQ ID NO: 159369 - DNA, 20 bp, Artificial Sequence
  Synthetic oligonucleotide; CGG chr2 60471518 60471537 60471534 +
tgccttcaattatttcatca

SEQ ID NO: 159370 - DNA, 20 bp, Artificial Sequence
  Synthetic oligonucleotide; TAG chr2 60471523 60471542 60471539 +
tcaattatttcatcacggct

SEQ ID NO: 159371 - DNA, 20 bp, Artificial Sequence
  Synthetic oligonucleotide; AGG chr2 60471524 60471543 60471540 +
caattatttcatcacggctt

SEQ ID NO: 159372 - DNA, 20 bp, Artificial Sequence
  Synthetic oligonucleotide; AAG chr2 60471529 60471548 60471545 +
atttcatcacggcttaggca

SEQ ID NO: 159373 - DNA, 20 bp, Artificial Sequence
  Synthetic oligonucleotide; AAG chr2 60471534 60471553 60471550 +
atcacggcttaggcaaagta

SEQ ID NO: 159374 - DNA, 20 bp, Artificial Sequence
  Synthetic oligonucleotide; GAG chr2 60471556 60471575 60471572 +
gtatcacaattaatgcttct

SEQ ID NO: 159375 - DNA, 20 bp, Artificial Sequence
  Synthetic oligonucleotide; GAG chr2 60471569 60471588 60471585 +
tgcttctgagcgtcaaactc

SEQ ID NO: 159376 - DNA, 20 bp, Artificial Sequence
  Synthetic oligonucleotide; AGG chr2 60471570 60471589 60471586 +
gcttctgagcgtcaaactcg

SEQ ID NO: 159377 - DNA, 20 bp, Artificial Sequence
  Synthetic oligonucleotide; GAG chr2 60471572 60471591 60471588 +
ttctgagcgtcaaactcgag

SEQ ID NO: 159378 - DNA, 20 bp, Artificial Sequence
  Synthetic oligonucleotide; CAG chr2 60471575 60471594 60471591 +
tgagcgtcaaactcgaggag

SEQ ID NO: 159379 - DNA, 20 bp, Artificial Sequence
  Synthetic oligonucleotide; CAG chr2 60471589 60471608 60471605 +
gaggagcagctctgccttcc

SEQ ID NO: 159380 - DNA, 20 bp, Artificial Sequence
  Synthetic oligonucleotide; AGG chr2 60471590 60471609 60471606 +
aggagcagctctgccttccc

SEQ ID NO: 159381 - DNA, 20 bp, Artificial Sequence
  Synthetic oligonucleotide; AAG chr2 60471595 60471614 60471611 +
cagctctgccttcccaggcc

SEQ ID NO: 159382 - DNA, 20 bp, Artificial Sequence
  Synthetic oligonucleotide; AGG chr2 60471596 60471615 60471612 +
agctctgccttcccaggcca

SEQ ID NO: 159383 - DNA, 20 bp, Artificial Sequence
  Synthetic oligonucleotide; TGG chr2 60471599 60471618 60471615 +
tctgccttcccaggccaagg

SEQ ID NO: 159384 - DNA, 20 bp, Artificial Sequence
  Synthetic oligonucleotide; GGG chr2 60471600 60471619 60471616 +
ctgccttcccaggccaaggt

SEQ ID NO: 159385 - DNA, 20 bp, Artificial Sequence
  Synthetic oligonucleotide; GGG chr2 60471601 60471620 60471617 +
tgccttcccaggccaaggtg

SEQ ID NO: 159386 - DNA, 20 bp, Artificial Sequence
  Synthetic oligonucleotide; AAG chr2 60471606 60471625 60471622 +
tcccaggccaaggtggggaa

SEQ ID NO: 159387 - DNA, 20 bp, Artificial Sequence
  Synthetic oligonucleotide; AGG chr2 60471607 60471626 60471623 +
cccaggccaaggtggggaaa

SEQ ID NO: 159388 - DNA, 20 bp, Artificial Sequence
  Synthetic oligonucleotide; GAG chr2 60471609 60471628 60471625 +
caggccaaggtggggaaaag

SEQ ID NO: 159389 - DNA, 20 bp, Artificial Sequence
  Synthetic oligonucleotide; TGG chr2 60471619 60471638 60471635 +
tggggaaaaggagctgcccc

SEQ ID NO: 159390 - DNA, 20 bp, Artificial Sequence
  Synthetic oligonucleotide; GAG chr2 60471624 60471643 60471640 +
aaaaggagctgcccctggtt

SEQ ID NO: 159391 - DNA, 20 bp, Artificial Sequence
  Synthetic oligonucleotide; AGG chr2 60471625 60471644 60471641 +
aaaggagctgcccctggttg

SEQ ID NO: 159392 - DNA, 20 bp, Artificial Sequence
  Synthetic oligonucleotide; GGG chr2 60471626 60471645 60471642 +
aaggagctgcccctggttga

SEQ ID NO: 159393 - DNA, 20 bp, Artificial Sequence
  Synthetic oligonucleotide; CAG chr2 60471663 60471682 60471679 +
accttcgctttcattctccc

SEQ ID NO: 159394 - DNA, 20 bp, Artificial Sequence
  Synthetic oligonucleotide; CAG chr2 60471667 60471686 60471683 +
tcgctttcattctccccagc

SEQ ID NO: 159395 - DNA, 20 bp, Artificial Sequence
  Synthetic oligonucleotide; GAG chr2 60471669 60471688 60471685 +
gctttcattctccccagcca

SEQ ID NO: 159396 - DNA, 20 bp, Artificial Sequence
  Synthetic oligonucleotide; TGG chr2 60471673 60471692 60471689 +
tcattctccccagccagaga

SEQ ID NO: 159397 - DNA, 20 bp, Artificial Sequence
  Synthetic oligonucleotide; GGG chr2 60471674 60471693 60471690 +
cattctccccagccagagat

SEQ ID NO: 159398 - DNA, 20 bp, Artificial Sequence
  Synthetic oligonucleotide; TGG chr2 60471680 60471699 60471696 +
ccccagccagagatgggctc

SEQ ID NO: 159399 - DNA, 20 bp, Artificial Sequence
  Synthetic oligonucleotide; TGG chr2 60471687 60471706 60471703 +
cagagatgggctctggttgc

SEQ ID NO: 159400 - DNA, 20 bp, Artificial Sequence
  Synthetic oligonucleotide; TAG chr2 60471691 60471710 60471707 +
gatgggctctggttgctggc

SEQ ID NO: 159401 - DNA, 20 bp, Artificial Sequence
  Synthetic oligonucleotide; AGG chr2 60471692 60471711 60471708 +
atgggctctggttgctggct

SEQ ID NO: 159402 - DNA, 20 bp, Artificial Sequence
  Synthetic oligonucleotide; AAG chr2 60471695 60471714 60471711 +
ggctctggttgctggctagg

SEQ ID NO: 159403 - DNA, 20 bp, Artificial Sequence
  Synthetic oligonucleotide; TGG chr2 60471698 60471717 60471714 +
tctggttgctggctaggaag

SEQ ID NO: 159404 - DNA, 20 bp, Artificial Sequence
  Synthetic oligonucleotide; GGG chr2 60471699 60471718 60471715 +
ctggttgctggctaggaagt

SEQ ID NO: 159405 - DNA, 20 bp, Artificial Sequence
  Synthetic oligonucleotide; TAG chr2 60471707 60471726 60471723 +
tggctaggaagtgggtgatc

SEQ ID NO: 159406 - DNA, 20 bp, Artificial Sequence
  Synthetic oligonucleotide; TAG chr2 60471733 60471752 60471749 +
tgtcctctttttttctttgt

SEQ ID NO: 159407 - DNA, 20 bp, Artificial Sequence
  Synthetic oligonucleotide; TAG chr2 60471742 60471761 60471758 +
tttttctttgttagtgctct

SEQ ID NO: 159408 - DNA, 20 bp, Artificial Sequence
  Synthetic oligonucleotide; AGG chr2 60471743 60471762 60471759 +
ttttctttgttagtgctctt

SEQ ID NO: 159409 - DNA, 20 bp, Artificial Sequence
  Synthetic oligonucleotide; AAG chr2 60471747 60471766 60471763 +
ctttgttagtgctcttaggc

SEQ ID NO: 159410 - DNA, 20 bp, Artificial Sequence
  Synthetic oligonucleotide; CAG chr2 60471759 60471778 60471775 +
tcttaggcaagtgattctca

SEQ ID NO: 159411 - DNA, 20 bp, Artificial Sequence
  Synthetic oligonucleotide; CAG chr2 60471764 60471783 60471780 +
ggcaagtgattctcacagcg

SEQ ID NO: 159412 - DNA, 20 bp, Artificial Sequence
  Synthetic oligonucleotide; CAG chr2 60471770 60471789 60471786 +
tgattctcacagcgcagacc

SEQ ID NO: 159413 - DNA, 20 bp, Artificial Sequence
  Synthetic oligonucleotide; AGG chr2 60471771 60471790 60471787 +
gattctcacagcgcagaccc

SEQ ID NO: 159414 - DNA, 20 bp, Artificial Sequence
  Synthetic oligonucleotide; CAG chr2 60471786 60471805 60471802 +
gacccaggcccacccccgat

SEQ ID NO: 159415 - DNA, 20 bp, Artificial Sequence
  Synthetic oligonucleotide; TGG chr2 60471796 60471815 60471812 +
cacccccgatcagcatcacc

SEQ ID NO: 159416 - DNA, 20 bp, Artificial Sequence
  Synthetic oligonucleotide; GGG chr2 60471797 60471816 60471813 +
acccccgatcagcatcacct

SEQ ID NO: 159417 - DNA, 20 bp, Artificial Sequence
  Synthetic oligonucleotide; GAG chr2 60471799 60471818 60471815 +
ccccgatcagcatcacctgg

SEQ ID NO: 159418 - DNA, 20 bp, Artificial Sequence
  Synthetic oligonucleotide; TGG chr2 60471823 60471842 60471839 +
ttgttcaaaatgcaaattct

SEQ ID NO: 159419 - DNA, 20 bp, Artificial Sequence
  Synthetic oligonucleotide; GGG chr2 60471824 60471843 60471840 +
tgttcaaaatgcaaattctt

SEQ ID NO: 159420 - DNA, 20 bp, Artificial Sequence
  Synthetic oligonucleotide; CAG chr2 60471835 60471854 60471851 +
caaattcttgggcaccacct

SEQ ID NO: 159421 - DNA, 20 bp, Artificial Sequence
  Synthetic oligonucleotide; CAG chr2 60471849 60471868 60471865 +
ccacctcagacttactgaat

SEQ ID NO: 159422 - DNA, 20 bp, Artificial Sequence
  Synthetic oligonucleotide; GAG chr2 60471857 60471876 60471873 +
gacttactgaatcagaaatt

SEQ ID NO: 159423 - DNA, 20 bp, Artificial Sequence
  Synthetic oligonucleotide; AGG chr2 60471858 60471877 60471874 +
acttactgaatcagaaattg

SEQ ID NO: 159424 - DNA, 20 bp, Artificial Sequence
  Synthetic oligonucleotide; GGG chr2 60471859 60471878 60471875 +
cttactgaatcagaaattga

SEQ ID NO: 159425 - DNA, 20 bp, Artificial Sequence
  Synthetic oligonucleotide; TGG chr2 60471862 60471881 60471878 +
actgaatcagaaattgaggg

SEQ ID NO: 159426 - DNA, 20 bp, Artificial Sequence
  Synthetic oligonucleotide; GGG chr2 60471863 60471882 60471879 +
ctgaatcagaaattgagggt

SEQ ID NO: 159427 - DNA, 20 bp, Artificial Sequence
  Synthetic oligonucleotide; GGG chr2 60471864 60471883 60471880 +
tgaatcagaaattgagggtg

SEQ ID NO: 159428 - DNA, 20 bp, Artificial Sequence
  Synthetic oligonucleotide; AAG chr2 60471867 60471886 60471883 +
atcagaaattgagggtgggg

SEQ ID NO: 159429 - DNA, 20 bp, Artificial Sequence
  Synthetic oligonucleotide; CAG chr2 60471870 60471889 60471886 +
agaaattgagggtggggaag

SEQ ID NO: 159430 - DNA, 20 bp, Artificial Sequence
  Synthetic oligonucleotide; CAG chr2 60471896 60471915 60471912 +
tctatgttgaataaattctc

SEQ ID NO: 159431 - DNA, 20 bp, Artificial Sequence
  Synthetic oligonucleotide; AGG chr2 60471897 60471916 60471913 +
ctatgttgaataaattctcc

SEQ ID NO: 159432 - DNA, 20 bp, Artificial Sequence
  Synthetic oligonucleotide; AAG chr2 60471918 60471937 60471934 +
ggtgattctcatgcacactc

SEQ ID NO: 159433 - DNA, 20 bp, Artificial Sequence
  Synthetic oligonucleotide; CAG chr2 60471927 60471946 60471943 +
catgcacactcaagctgaat

SEQ ID NO: 159434 - DNA, 20 bp, Artificial Sequence
  Synthetic oligonucleotide; TAG chr2 60471941 60471960 60471957 +
ctgaatcagcactgctgtct

SEQ ID NO: 159435 - DNA, 20 bp, Artificial Sequence
  Synthetic oligonucleotide; AGG chr2 60471942 60471961 60471958 +
tgaatcagcactgctgtctt

SEQ ID NO: 159436 - DNA, 20 bp, Artificial Sequence
  Synthetic oligonucleotide; GGG chr2 60471943 60471962 60471959 +
gaatcagcactgctgtctta

SEQ ID NO: 159437 - DNA, 20 bp, Artificial Sequence
  Synthetic oligonucleotide; AAG chr2 60471947 60471966 60471963 +
cagcactgctgtcttagggt

SEQ ID NO: 159438 - DNA, 20 bp, Artificial Sequence
  Synthetic oligonucleotide; AGG chr2 60471948 60471967 60471964 +
agcactgctgtcttagggta

SEQ ID NO: 159439 - DNA, 20 bp, Artificial Sequence
  Synthetic oligonucleotide; GGG chr2 60471949 60471968 60471965 +
gcactgctgtcttagggtaa

SEQ ID NO: 159440 - DNA, 20 bp, Artificial Sequence
  Synthetic oligonucleotide; AAG chr2 60471952 60471971 60471968 +
ctgctgtcttagggtaaggg

SEQ ID NO: 159441 - DNA, 20 bp, Artificial Sequence
  Synthetic oligonucleotide; TGG chr2 60471964 60471983 60471980 +
ggtaagggaagtatgaacgc

SEQ ID NO: 159442 - DNA, 20 bp, Artificial Sequence
  Synthetic oligonucleotide; AAG chr2 60471967 60471986 60471983 +
aagggaagtatgaacgctgg

SEQ ID NO: 159443 - DNA, 20 bp, Artificial Sequence
  Synthetic oligonucleotide; TGG chr2 60471983 60472002 60471999 +
ctggaagctttgaaattccc

SEQ ID NO: 159444 - DNA, 20 bp, Artificial Sequence
  Synthetic oligonucleotide; GGG chr2 60471984 60472003 60472000 +
tggaagctttgaaattccct

SEQ ID NO: 159445 - DNA, 20 bp, Artificial Sequence
  Synthetic oligonucleotide; CAG chr2 60471987 60472006 60472003 +
aagctttgaaattccctggg

SEQ ID NO: 159446 - DNA, 20 bp, Artificial Sequence
  Synthetic oligonucleotide; GAG chr2 60471989 60472008 60472005 +
gctttgaaattccctgggca

SEQ ID NO: 159447 - DNA, 20 bp, Artificial Sequence
  Synthetic oligonucleotide; TGG chr2 60471997 60472016 60472013 +
attccctgggcagagaccca

SEQ ID NO: 159448 - DNA, 20 bp, Artificial Sequence
  Synthetic oligonucleotide; GGG chr2 60471998 60472017 60472014 +
ttccctgggcagagacccat

SEQ ID NO: 159449 - DNA, 20 bp, Artificial Sequence
  Synthetic oligonucleotide; GAG chr2 60472005 60472024 60472021 +
ggcagagacccatgggccat

SEQ ID NO: 159450 - DNA, 20 bp, Artificial Sequence
  Synthetic oligonucleotide; AGG chr2 60472006 60472025 60472022 +
gcagagacccatgggccatg

SEQ ID NO: 159451 - DNA, 20 bp, Artificial Sequence
  Synthetic oligonucleotide; CAG chr2 60472026 60472045 60472042 +
aggctgttttccctcctgtc

SEQ ID NO: 159452 - DNA, 20 bp, Artificial Sequence
  Synthetic oligonucleotide; AGG chr2 60472027 60472046 60472043 +
ggctgttttccctcctgtcc

SEQ ID NO: 159453 - DNA, 20 bp, Artificial Sequence
  Synthetic oligonucleotide; TAG chr2 60472042 60472061 60472058 +
tgtccaggacccacctcctt

SEQ ID NO: 159454 - DNA, 20 bp, Artificial Sequence
  Synthetic oligonucleotide; AGG chr2 60472043 60472062 60472059 +
gtccaggacccacctccttt

SEQ ID NO: 159455 - DNA, 20 bp, Artificial Sequence
  Synthetic oligonucleotide; TGG chr2 60472048 60472067 60472064 +
ggacccacctcctttaggac

SEQ ID NO: 159456 - DNA, 20 bp, Artificial Sequence
  Synthetic oligonucleotide; CAG chr2 60472053 60472072 60472069 +
cacctcctttaggactggaa

SEQ ID NO: 159457 - DNA, 20 bp, Artificial Sequence
  Synthetic oligonucleotide; AAG chr2 60472069 60472088 60472085 +
ggaacagtcaaaaacaaatt

SEQ ID NO: 159458 - DNA, 20 bp, Artificial Sequence
  Synthetic oligonucleotide; TAG chr2 60472074 60472093 60472090 +
agtcaaaaacaaattaagct

SEQ ID NO: 159459 - DNA, 20 bp, Artificial Sequence
  Synthetic oligonucleotide; AGG chr2 60472075 60472094 60472091 +
gtcaaaaacaaattaagctt

SEQ ID NO: 159460 - DNA, 20 bp, Artificial Sequence
  Synthetic oligonucleotide; GGG chr2 60472076 60472095 60472092 +
tcaaaaacaaattaagctta

SEQ ID NO: 159461 - DNA, 20 bp, Artificial Sequence
  Synthetic oligonucleotide; AAG chr2 60472086 60472105 60472102 +
attaagcttagggaatccct

SEQ ID NO: 159462 - DNA, 20 bp, Artificial Sequence
  Synthetic oligonucleotide; AGG chr2 60472087 60472106 60472103 +
ttaagcttagggaatcccta

SEQ ID NO: 159463 - DNA, 20 bp, Artificial Sequence
  Synthetic oligonucleotide; TAG chr2 60472100 60472119 60472116 +
atccctaaggatccctccat

SEQ ID NO: 159464 - DNA, 20 bp, Artificial Sequence
  Synthetic oligonucleotide; AGG chr2 60472101 60472120 60472117 +
tccctaaggatccctccatt

SEQ ID NO: 159465 - DNA, 20 bp, Artificial Sequence
  Synthetic oligonucleotide; CAG chr2 60472109 60472128 60472125 +
gatccctccattaggaaatt

SEQ ID NO: 159466 - DNA, 20 bp, Artificial Sequence
  Synthetic oligonucleotide; AGG chr2 60472110 60472129 60472126 +
atccctccattaggaaattc

SEQ ID NO: 159467 - DNA, 20 bp, Artificial Sequence
  Synthetic oligonucleotide; AAG chr2 60472137 60472156 60472153 +
accctccgtctgtcattgat

SEQ ID NO: 159468 - DNA, 20 bp, Artificial Sequence
  Synthetic oligonucleotide; AGG chr2 60472138 60472157 60472154 +
ccctccgtctgtcattgata

SEQ ID NO: 159469 - DNA, 20 bp, Artificial Sequence
  Synthetic oligonucleotide; CAG chr2 60472142 60472161 60472158 +
ccgtctgtcattgataagga

SEQ ID NO: 159470 - DNA, 20 bp, Artificial Sequence
  Synthetic oligonucleotide; AGG chr2 60472143 60472162 60472159 +
cgtctgtcattgataaggac

SEQ ID NO: 159471 - DNA, 20 bp, Artificial Sequence
  Synthetic oligonucleotide; GGG chr2 60472144 60472163 60472160 +
gtctgtcattgataaggaca

SEQ ID NO: 159472 - DNA, 20 bp, Artificial Sequence
  Synthetic oligonucleotide; CAG chr2 60472149 60472168 60472165 +
tcattgataaggacagggaa

SEQ ID NO: 159473 - DNA, 20 bp, Artificial Sequence
  Synthetic oligonucleotide; AGG chr2 60472150 60472169 60472166 +
cattgataaggacagggaac

SEQ ID NO: 159474 - DNA, 20 bp, Artificial Sequence
  Synthetic oligonucleotide; CAG chr2 60472155 60472174 60472171 +
ataaggacagggaacaggtc

SEQ ID NO: 159475 - DNA, 20 bp, Artificial Sequence
  Synthetic oligonucleotide; AGG chr2 60472156 60472175 60472172 +
taaggacagggaacaggtcc

SEQ ID NO: 159476 - DNA, 20 bp, Artificial Sequence
  Synthetic oligonucleotide; CAG chr2 60472167 60472186 60472183 +
aacaggtccaggctctccat

SEQ ID NO: 159477 - DNA, 20 bp, Artificial Sequence
  Synthetic oligonucleotide; AGG chr2 60472168 60472187 60472184 +
acaggtccaggctctccatc

SEQ ID NO: 159478 - DNA, 20 bp, Artificial Sequence
  Synthetic oligonucleotide; CAG chr2 60472173 60472192 60472189 +
tccaggctctccatcaggtc

SEQ ID NO: 159479 - DNA, 20 bp, Artificial Sequence
  Synthetic oligonucleotide; AGG chr2 60472174 60472193 60472190 +
ccaggctctccatcaggtcc

SEQ ID NO: 159480 - DNA, 20 bp, Artificial Sequence
  Synthetic oligonucleotide; GGG chr2 60472175 60472194 60472191 +
caggctctccatcaggtcca

SEQ ID NO: 159481 - DNA, 20 bp, Artificial Sequence
  Synthetic oligonucleotide; TAG chr2 60472184 60472203 60472200 +
catcaggtccagggccttct

SEQ ID NO: 159482 - DNA, 20 bp, Artificial Sequence
  Synthetic oligonucleotide; GAG chr2 60472190 60472209 60472206 +
gtccagggccttcttagcat

SEQ ID NO: 159483 - DNA, 20 bp, Artificial Sequence
  Synthetic oligonucleotide; CAG chr2 60472206 60472225 60472222 +
gcatgagacaacacccaaac

SEQ ID NO: 159484 - DNA, 20 bp, Artificial Sequence
  Synthetic oligonucleotide; CAG chr2 60472216 60472235 60472232 +
acacccaaaccagcttgtgc

SEQ ID NO: 159485 - DNA, 20 bp, Artificial Sequence
  Synthetic oligonucleotide; CAG chr2 60472220 60472239 60472236 +
ccaaaccagcttgtgccaga

SEQ ID NO: 159486 - DNA, 20 bp, Artificial Sequence
  Synthetic oligonucleotide; AAG chr2 60472247 60472266 60472263 +
tgtcctcactgcttccatta

SEQ ID NO: 159487 - DNA, 20 bp, Artificial Sequence
  Synthetic oligonucleotide; CAG chr2 60472259 60472278 60472275 +
ttccattaaagccgacatgt

SEQ ID NO: 159488 - DNA, 20 bp, Artificial Sequence
  Synthetic oligonucleotide; CAG chr2 60472268 60472287 60472284 +
agccgacatgtcagcgaacg

SEQ ID NO: 159489 - DNA, 20 bp, Artificial Sequence
  Synthetic oligonucleotide; TGG chr2 60472274 60472293 60472290 +
catgtcagcgaacgcagctg

SEQ ID NO: 159490 - DNA, 20 bp, Artificial Sequence
  Synthetic oligonucleotide; CGG chr2 60472285 60472304 60472301 +
acgcagctgtggcaactgca

SEQ ID NO: 159491 - DNA, 20 bp, Artificial Sequence
  Synthetic oligonucleotide; CAG chr2 60472291 60472310 60472307 +
ctgtggcaactgcacggaca

SEQ ID NO: 159492 - DNA, 20 bp, Artificial Sequence
  Synthetic oligonucleotide; CAG chr2 60472294 60472313 60472310 +
tggcaactgcacggacacag

SEQ ID NO: 159493 - DNA, 20 bp, Artificial Sequence
  Synthetic oligonucleotide; AGG chr2 60472295 60472314 60472311 +
ggcaactgcacggacacagc

SEQ ID NO: 159494 - DNA, 20 bp, Artificial Sequence
  Synthetic oligonucleotide; TGG chr2 60472301 60472320 60472317 +
tgcacggacacagcaggaac

SEQ ID NO: 159495 - DNA, 20 bp, Artificial Sequence
  Synthetic oligonucleotide; TGG chr2 60472321 60472340 60472337 +
tggactcttgtttccctttc

SEQ ID NO: 159496 - DNA, 20 bp, Artificial Sequence
  Synthetic oligonucleotide; TGG chr2 60472333 60472352 60472349 +
tccctttctggtctctcaaa

SEQ ID NO: 159497 - DNA, 20 bp, Artificial Sequence
  Synthetic oligonucleotide; GGG chr2 60472334 60472353 60472350 +
ccctttctggtctctcaaat

SEQ ID NO: 159498 - DNA, 20 bp, Artificial Sequence
  Synthetic oligonucleotide; TGG chr2 60472388 60472407 60472404 +
tcaaatgtcttacacttttc

SEQ ID NO: 159499 - DNA, 20 bp, Artificial Sequence
  Synthetic oligonucleotide; TGG chr2 60472391 60472410 60472407 +
aatgtcttacacttttctgg

SEQ ID NO: 159500 - DNA, 20 bp, Artificial Sequence
  Synthetic oligonucleotide; AAG chr2 60472394 60472413 60472410 +
gtcttacacttttctggtgg

SEQ ID NO: 159501 - DNA, 20 bp, Artificial Sequence
  Synthetic oligonucleotide; AGG chr2 60472395 60472414 60472411 +
tcttacacttttctggtgga

SEQ ID NO: 159502 - DNA, 20 bp, Artificial Sequence
  Synthetic oligonucleotide; AAG chr2 60472422 60472441 60472438 +
tcaacctgttctatttcata

SEQ ID NO: 159503 - DNA, 20 bp, Artificial Sequence
  Synthetic oligonucleotide; AGG chr2 60472423 60472442 60472439 +
caacctgttctatttcataa

SEQ ID NO: 159504 - DNA, 20 bp, Artificial Sequence
  Synthetic oligonucleotide; TAG chr2 60472432 60472451 60472448 +
ctatttcataaaggtctctc

SEQ ID NO: 159505 - DNA, 20 bp, Artificial Sequence
  Synthetic oligonucleotide; CAG chr2 60472438 60472457 60472454 +
cataaaggtctctctagacc

SEQ ID NO: 159506 - DNA, 20 bp, Artificial Sequence
  Synthetic oligonucleotide; TGG chr2 60472451 60472470 60472467 +
ctagacccagtatttccact

SEQ ID NO: 159507 - DNA, 20 bp, Artificial Sequence
  Synthetic oligonucleotide; GGG chr2 60472452 60472471 60472468 +
tagacccagtatttccactt

SEQ ID NO: 159508 - DNA, 20 bp, Artificial Sequence
  Synthetic oligonucleotide; GGG chr2 60472453 60472472 60472469 +
agacccagtatttccacttg

SEQ ID NO: 159509 - DNA, 20 bp, Artificial Sequence
  Synthetic oligonucleotide; CAG chr2 60472459 60472478 60472475 +
agtatttccacttggggcct

SEQ ID NO: 159510 - DNA, 20 bp, Artificial Sequence
  Synthetic oligonucleotide; TAG chr2 60472480 60472499 60472496 +
agaaatgccttacacattat

SEQ ID NO: 159511 - DNA, 20 bp, Artificial Sequence
  Synthetic oligonucleotide; AGG chr2 60472481 60472500 60472497 +
gaaatgccttacacattatt

SEQ ID NO: 159512 - DNA, 20 bp, Artificial Sequence
  Synthetic oligonucleotide; AAG chr2 60472489 60472508 60472505 +
ttacacattattaggttgca

SEQ ID NO: 159513 - DNA, 20 bp, Artificial Sequence
  Synthetic oligonucleotide; TGG chr2 60472500 60472519 60472516 +
taggttgcaaagtttcctta

SEQ ID NO: 159514 - DNA, 20 bp, Artificial Sequence
  Synthetic oligonucleotide; TAG chr2 60472516 60472535 60472532 +
cttatggctgaatttaaaaa

SEQ ID NO: 159515 - DNA, 20 bp, Artificial Sequence
  Synthetic oligonucleotide; CAG chr2 60472533 60472552 60472549 +
aaatagtgactcttattttt

SEQ ID NO: 159516 - DNA, 20 bp, Artificial Sequence
  Synthetic oligonucleotide; AGG chr2 60472534 60472553 60472550 +
aatagtgactcttatttttc

SEQ ID NO: 159517 - DNA, 20 bp, Artificial Sequence
  Synthetic oligonucleotide; CAG chr2 60472554 60472573 60472570 +
aggtttcattaaaaaatatg

SEQ ID NO: 159518 - DNA, 20 bp, Artificial Sequence
  Synthetic oligonucleotide; TGG chr2 60472562 60472581 60472578 +
ttaaaaaatatgcagcaaac

SEQ ID NO: 159519 - DNA, 20 bp, Artificial Sequence
  Synthetic oligonucleotide; GGG chr2 60472563 60472582 60472579 +
taaaaaatatgcagcaaact

SEQ ID NO: 159520 - DNA, 20 bp, Artificial Sequence
  Synthetic oligonucleotide; TGG chr2 60472568 60472587 60472584 +
aatatgcagcaaactgggaa

SEQ ID NO: 159521 - DNA, 20 bp, Artificial Sequence
  Synthetic oligonucleotide; TGG chr2 60472593 60472612 60472609 +
ttgatttaatgttatacatt

SEQ ID NO: 159522 - DNA, 20 bp, Artificial Sequence
  Synthetic oligonucleotide; TGG chr2 60472619 60472638 60472635 +
ctttacatttctacatatat

SEQ ID NO: 159523 - DNA, 20 bp, Artificial Sequence
  Synthetic oligonucleotide; GGG chr2 60472620 60472639 60472636 +
tttacatttctacatatatt

SEQ ID NO: 159524 - DNA, 20 bp, Artificial Sequence
  Synthetic oligonucleotide; AAG chr2 60472638 60472657 60472654 +
ttgggtaccaacttttgaca

SEQ ID NO: 159525 - DNA, 20 bp, Artificial Sequence
  Synthetic oligonucleotide; GAG chr2 60472640 60472659 60472656 +
gggtaccaacttttgacaaa

SEQ ID NO: 159526 - DNA, 20 bp, Artificial Sequence
  Synthetic oligonucleotide; AAG chr2 60472647 60472666 60472663 +
aacttttgacaaagagctct

SEQ ID NO: 159527 - DNA, 20 bp, Artificial Sequence
  Synthetic oligonucleotide; CAG chr2 60472652 60472671 60472668 +
ttgacaaagagctctaagcc

SEQ ID NO: 159528 - DNA, 20 bp, Artificial Sequence
  Synthetic oligonucleotide; TGG chr2 60472655 60472674 60472671 +
acaaagagctctaagcccag

SEQ ID NO: 159529 - DNA, 20 bp, Artificial Sequence
  Synthetic oligonucleotide; GGG chr2 60472656 60472675 60472672 +
caaagagctctaagcccagt

SEQ ID NO: 159530 - DNA, 20 bp, Artificial Sequence
  Synthetic oligonucleotide; TGG chr2 60472666 60472685 60472682 +
taagcccagtgggatgttcc

SEQ ID NO: 159531 - DNA, 20 bp, Artificial Sequence
  Synthetic oligonucleotide; AAG chr2 60472674 60472693 60472690 +
gtgggatgttcctggaattt

SEQ ID NO: 159532 - DNA, 20 bp, Artificial Sequence
  Synthetic oligonucleotide; AAG chr2 60472687 60472706 60472703 +
ggaatttaagtcattaaatc

SEQ ID NO: 159533 - DNA, 20 bp, Artificial Sequence
  Synthetic oligonucleotide; TGG chr2 60472695 60472714 60472711 +
agtcattaaatcaagttttt

SEQ ID NO: 159534 - DNA, 20 bp, Artificial Sequence
  Synthetic oligonucleotide; AAG chr2 60472705 60472724 60472721 +
tcaagttttttggtttcctc

SEQ ID NO: 159535 - DNA, 20 bp, Artificial Sequence
  Synthetic oligonucleotide; AAG chr2 60472717 60472736 60472733 +
gtttcctcaagaacatctca

SEQ ID NO: 159536 - DNA, 20 bp, Artificial Sequence
  Synthetic oligonucleotide; TGG chr2 60472764 60472783 60472780 +
ttgtttctgaaactaatcac

SEQ ID NO: 159537 - DNA, 20 bp, Artificial Sequence
  Synthetic oligonucleotide; GGG chr2 60472765 60472784 60472781 +
tgtttctgaaactaatcact

SEQ ID NO: 159538 - DNA, 20 bp, Artificial Sequence
  Synthetic oligonucleotide; CAG chr2 60472777 60472796 60472793 +
taatcactgggtgtgtaata

SEQ ID NO: 159539 - DNA, 20 bp, Artificial Sequence
  Synthetic oligonucleotide; CAG chr2 60472803 60472822 60472819 +
cattactgtctactaatcaa

SEQ ID NO: 159540 - DNA, 20 bp, Artificial Sequence
  Synthetic oligonucleotide; AGG chr2 60472804 60472823 60472820 +
attactgtctactaatcaac

SEQ ID NO: 159541 - DNA, 20 bp, Artificial Sequence
  Synthetic oligonucleotide; CAG chr2 60472815 60472834 60472831 +
ctaatcaacaggtaatactg

SEQ ID NO: 159542 - DNA, 20 bp, Artificial Sequence
  Synthetic oligonucleotide; CAG chr2 60472837 60472856 60472853 +
gatttccaaatgtgccaaaa

SEQ ID NO: 159543 - DNA, 20 bp, Artificial Sequence
  Synthetic oligonucleotide; AAG chr2 60472842 60472861 60472858 +
ccaaatgtgccaaaacagct

SEQ ID NO: 159544 - DNA, 20 bp, Artificial Sequence
  Synthetic oligonucleotide; AAG chr2 60472849 60472868 60472865 +
tgccaaaacagctaagcaaa

SEQ ID NO: 159545 - DNA, 20 bp, Artificial Sequence
  Synthetic oligonucleotide; TGG chr2 60472881 60472900 60472897 +
aacacgtttaatgactgctt

SEQ ID NO: 159546 - DNA, 20 bp, Artificial Sequence
  Synthetic oligonucleotide; GGG chr2 60472882 60472901 60472898 +
acacgtttaatgactgcttt

SEQ ID NO: 159547 - DNA, 20 bp, Artificial Sequence
  Synthetic oligonucleotide; GAG chr2 60472884 60472903 60472900 +
acgtttaatgactgctttgg

SEQ ID NO: 159548 - DNA, 20 bp, Artificial Sequence
  Synthetic oligonucleotide; CAG chr2 60472898 60472917 60472914 +
ctttgggagcccaactttaa

SEQ ID NO: 159549 - DNA, 20 bp, Artificial Sequence
  Synthetic oligonucleotide; AGG chr2 60472899 60472918 60472915 +
tttgggagcccaactttaac

SEQ ID NO: 159550 - DNA, 20 bp, Artificial Sequence
  Synthetic oligonucleotide; CAG chr2 60472913 60472932 60472929 +
tttaacaggtattaaaacca

SEQ ID NO: 159551 - DNA, 20 bp, Artificial Sequence
  Synthetic oligonucleotide; AGG chr2 60472914 60472933 60472930 +
ttaacaggtattaaaaccac

SEQ ID NO: 159552 - DNA, 20 bp, Artificial Sequence
  Synthetic oligonucleotide; CAG chr2 60472925 60472944 60472941 +
taaaaccacaggactctcca

SEQ ID NO: 159553 - DNA, 20 bp, Artificial Sequence
  Synthetic oligonucleotide; AGG chr2 60472926 60472945 60472942 +
aaaaccacaggactctccac

SEQ ID NO: 159554 - DNA, 20 bp, Artificial Sequence
  Synthetic oligonucleotide; GAG chr2 60472928 60472947 60472944 +
aaccacaggactctccacag

SEQ ID NO: 159555 - DNA, 20 bp, Artificial Sequence
  Synthetic oligonucleotide; TAG chr2 60472935 60472954 60472951 +
ggactctccacaggagtaca

SEQ ID NO: 159556 - DNA, 20 bp, Artificial Sequence
  Synthetic oligonucleotide; AAG chr2 60472979 60472998 60472995 +
gtacgtgtgtgtgtgtttgc

SEQ ID NO: 159557 - DNA, 20 bp, Artificial Sequence
  Synthetic oligonucleotide; TAG chr2 60473005 60473024 60473021 +
ttatgtgtacatatgtgtgt

SEQ ID NO: 159558 - DNA, 20 bp, Artificial Sequence
  Synthetic oligonucleotide; GAG chr2 60473031 60473050 60473047 +
gtgcatgcatatgtgtttgt

SEQ ID NO: 159559 - DNA, 20 bp, Artificial Sequence
  Synthetic oligonucleotide; TAG chr2 60473092 60473111 60473108 +
gtgtatgcttgtgcatgtgt

SEQ ID NO: 159560 - DNA, 20 bp, Artificial Sequence
  Synthetic oligonucleotide; TAG chr2 60473116 60473135 60473132 +
atgtgcatgcacatgtgtgt

SEQ ID NO: 159561 - DNA, 20 bp, Artificial Sequence
  Synthetic oligonucleotide; GAG chr2 60473142 60473161 60473158 +
gttcatgtgtgtgtatatgt

SEQ ID NO: 159562 - DNA, 20 bp, Artificial Sequence
  Synthetic oligonucleotide; TAG chr2 60473206 60473225 60473222 +
atttcctaaacatatgtttt

SEQ ID NO: 159563 - DNA, 20 bp, Artificial Sequence
  Synthetic oligonucleotide; CAG chr2 60473236 60473255 60473252 +
ccctgttttttttttttttt

SEQ ID NO: 159564 - DNA, 20 bp, Artificial Sequence
  Synthetic oligonucleotide; GAG chr2 60473240 60473259 60473256 +
gtttttttttttttttcagt

SEQ ID NO: 159565 - DNA, 20 bp, Artificial Sequence
  Synthetic oligonucleotide; CAG chr2 60473244 60473263 60473260 +
ttttttttttttcagtgaga

SEQ ID NO: 159566 - DNA, 20 bp, Artificial Sequence
  Synthetic oligonucleotide; AGG chr2 60473245 60473264 60473261 +
tttttttttttcagtgagac

SEQ ID NO: 159567 - DNA, 20 bp, Artificial Sequence
  Synthetic oligonucleotide; AAG chr2 60473253 60473272 60473269 +
tttcagtgagacaggcacaa

SEQ ID NO: 159568 - DNA, 20 bp, Artificial Sequence
  Synthetic oligonucleotide; CAG chr2 60473256 60473275 60473272 +
cagtgagacaggcacaaaag

SEQ ID NO: 159569 - DNA, 20 bp, Artificial Sequence
  Synthetic oligonucleotide; TAG chr2 60473259 60473278 60473275 +
tgagacaggcacaaaagcag

SEQ ID NO: 159570 - DNA, 20 bp, Artificial Sequence
  Synthetic oligonucleotide; GAG chr2 60473261 60473280 60473277 +
agacaggcacaaaagcagta

SEQ ID NO: 159571 - DNA, 20 bp, Artificial Sequence
  Synthetic oligonucleotide; TGG chr2 60473274 60473293 60473290 +
agcagtagagctgtcccacg

SEQ ID NO: 159572 - DNA, 20 bp, Artificial Sequence
  Synthetic oligonucleotide; TGG chr2 60473279 60473298 60473295 +
tagagctgtcccacgtggaa

SEQ ID NO: 159573 - DNA, 20 bp, Artificial Sequence
  Synthetic oligonucleotide; GGG chr2 60473280 60473299 60473296 +
agagctgtcccacgtggaat

SEQ ID NO: 159574 - DNA, 20 bp, Artificial Sequence
  Synthetic oligonucleotide; TGG chr2 60473319 60473338 60473335 +
tgaccccctttctttcaccc

SEQ ID NO: 159575 - DNA, 20 bp, Artificial Sequence
  Synthetic oligonucleotide; GGG chr2 60473320 60473339 60473336 +
gaccccctttctttcaccct

SEQ ID NO: 159576 - DNA, 20 bp, Artificial Sequence
  Synthetic oligonucleotide; AAG chr2 60473331 60473350 60473347 +
tttcaccctgggtcttcaaa

SEQ ID NO: 159577 - DNA, 20 bp, Artificial Sequence
  Synthetic oligonucleotide; GAG chr2 60473333 60473352 60473349 +
tcaccctgggtcttcaaaaa

SEQ ID NO: 159578 - DNA, 20 bp, Artificial Sequence
  Synthetic oligonucleotide; TGG chr2 60473338 60473357 60473354 +
ctgggtcttcaaaaagagaa

SEQ ID NO: 159579 - DNA, 20 bp, Artificial Sequence
  Synthetic oligonucleotide; GAG chr2 60473354 60473373 60473370 +
agaatggatgacactatgat

SEQ ID NO: 159580 - DNA, 20 bp, Artificial Sequence
  Synthetic oligonucleotide; AGG chr2 60473355 60473374 60473371 +
gaatggatgacactatgatg

SEQ ID NO: 159581 - DNA, 20 bp, Artificial Sequence
  Synthetic oligonucleotide; GAG chr2 60473357 60473376 60473373 +
atggatgacactatgatgag

SEQ ID NO: 159582 - DNA, 20 bp, Artificial Sequence
  Synthetic oligonucleotide; AGG chr2 60473358 60473377 60473374 +
tggatgacactatgatgagg

SEQ ID NO: 159583 - DNA, 20 bp, Artificial Sequence
  Synthetic oligonucleotide; GGG chr2 60473359 60473378 60473375 +
ggatgacactatgatgagga

SEQ ID NO: 159584 - DNA, 20 bp, Artificial Sequence
  Synthetic oligonucleotide; GGG chr2 60473360 60473379 60473376 +
gatgacactatgatgaggag

SEQ ID NO: 159585 - DNA, 20 bp, Artificial Sequence
  Synthetic oligonucleotide; TGG chr2 60473372 60473391 60473388 +
atgaggaggggtctctatat

SEQ ID NO: 159586 - DNA, 20 bp, Artificial Sequence
  Synthetic oligonucleotide; CAG chr2 60473378 60473397 60473394 +
aggggtctctatattggtga

SEQ ID NO: 159587 - DNA, 20 bp, Artificial Sequence
  Synthetic oligonucleotide; AGG chr2 60473379 60473398 60473395 +
ggggtctctatattggtgac

SEQ ID NO: 159588 - DNA, 20 bp, Artificial Sequence
  Synthetic oligonucleotide; CAG chr2 60473390 60473409 60473406 +
attggtgacaggccaaaata

SEQ ID NO: 159589 - DNA, 20 bp, Artificial Sequence
  Synthetic oligonucleotide; AGG chr2 60473391 60473410 60473407 +
ttggtgacaggccaaaatac

SEQ ID NO: 159590 - DNA, 20 bp, Artificial Sequence
  Synthetic oligonucleotide; CAG chr2 60473402 60473421 60473418 +
ccaaaatacaggactaccta

SEQ ID NO: 159591 - DNA, 20 bp, Artificial Sequence
  Synthetic oligonucleotide; CAG chr2 60473413 60473432 60473429 +
gactacctacagtcctttcg

SEQ ID NO: 159592 - DNA, 20 bp, Artificial Sequence
  Synthetic oligonucleotide; AAG chr2 60473428 60473447 60473444 +
tttcgcagtccataatcctc

SEQ ID NO: 159593 - DNA, 20 bp, Artificial Sequence
  Synthetic oligonucleotide; CAG chr2 60473436 60473455 60473452 +
tccataatcctcaagtccct

SEQ ID NO: 159594 - DNA, 20 bp, Artificial Sequence
  Synthetic oligonucleotide; TAG chr2 60473459 60473478 60473475 +
ctcttccatgtaccaccttc

SEQ ID NO: 159595 - DNA, 20 bp, Artificial Sequence
  Synthetic oligonucleotide; AAG chr2 60473494 60473513 60473510 +
atgcatcctgaacgtttgta

SEQ ID NO: 159596 - DNA, 20 bp, Artificial Sequence
  Synthetic oligonucleotide; AAG chr2 60473504 60473523 60473520 +
aacgtttgtaaagtaccctg

SEQ ID NO: 159597 - DNA, 20 bp, Artificial Sequence
  Synthetic oligonucleotide; AGG chr2 60473505 60473524 60473521 +
acgtttgtaaagtaccctga

SEQ ID NO: 159598 - DNA, 20 bp, Artificial Sequence
  Synthetic oligonucleotide; CAG chr2 60473517 60473536 60473533 +
taccctgaaggaacccattc

SEQ ID NO: 159599 - DNA, 20 bp, Artificial Sequence
  Synthetic oligonucleotide; TAG chr2 60473536 60473555 60473552 +
ccagttctgaatccgattac

SEQ ID NO: 159600 - DNA, 20 bp, Artificial Sequence
  Synthetic oligonucleotide; AGG chr2 60473537 60473556 60473553 +
cagttctgaatccgattact

SEQ ID NO: 159601 - DNA, 20 bp, Artificial Sequence
  Synthetic oligonucleotide; AAG chr2 60473543 60473562 60473559 +
tgaatccgattactaggttc

SEQ ID NO: 159602 - DNA, 20 bp, Artificial Sequence
  Synthetic oligonucleotide; CAG chr2 60473561 60473580 60473577 +
tcaagccacacaaataacaa

SEQ ID NO: 159603 - DNA, 20 bp, Artificial Sequence
  Synthetic oligonucleotide; CAG chr2 60473566 60473585 60473582 +
ccacacaaataacaacagtg

SEQ ID NO: 159604 - DNA, 20 bp, Artificial Sequence
  Synthetic oligonucleotide; TAG chr2 60473570 60473589 60473586 +
acaaataacaacagtgcagc

SEQ ID NO: 159605 - DNA, 20 bp, Artificial Sequence
  Synthetic oligonucleotide; GAG chr2 60473576 60473595 60473592 +
aacaacagtgcagctagtct

SEQ ID NO: 159606 - DNA, 20 bp, Artificial Sequence
  Synthetic oligonucleotide; TAG chr2 60473580 60473599 60473596 +
acagtgcagctagtctgagc

SEQ ID NO: 159607 - DNA, 20 bp, Artificial Sequence
  Synthetic oligonucleotide; GAG chr2 60473582 60473601 60473598 +
agtgcagctagtctgagcta

SEQ ID NO: 159608 - DNA, 20 bp, Artificial Sequence
  Synthetic oligonucleotide; AGG chr2 60473583 60473602 60473599 +
gtgcagctagtctgagctag

SEQ ID NO: 159609 - DNA, 20 bp, Artificial Sequence
  Synthetic oligonucleotide; AAG chr2 60473604 60473623 60473620 +
ggcttctttacctaactgca

SEQ ID NO: 159610 - DNA, 20 bp, Artificial Sequence
  Synthetic oligonucleotide; CAG chr2 60473624 60473643 60473640 +
aagtaaatgtcctttctatt

SEQ ID NO: 159611 - DNA, 20 bp, Artificial Sequence
  Synthetic oligonucleotide; TAG chr2 60473634 60473653 60473650 +
cctttctattcagccgcatc

SEQ ID NO: 159612 - DNA, 20 bp, Artificial Sequence
  Synthetic oligonucleotide; TAG chr2 60473658 60473677 60473674 +
tcttgaccctatgtttacca

SEQ ID NO: 159613 - DNA, 20 bp, Artificial Sequence
  Synthetic oligonucleotide; CAG chr2 60473665 60473684 60473681 +
cctatgtttaccatagatac

SEQ ID NO: 159614 - DNA, 20 bp, Artificial Sequence
  Synthetic oligonucleotide; TAG chr2 60473679 60473698 60473695 +
agataccagttcttctcact

SEQ ID NO: 159615 - DNA, 20 bp, Artificial Sequence
  Synthetic oligonucleotide; CAG chr2 60473696 60473715 60473712 +
acttagattctctgacttat

SEQ ID NO: 159616 - DNA, 20 bp, Artificial Sequence
  Synthetic oligonucleotide; GAG chr2 60473698 60473717 60473714 +
ttagattctctgacttatca

SEQ ID NO: 159617 - DNA, 20 bp, Artificial Sequence
  Synthetic oligonucleotide; TAG chr2 60473706 60473725 60473722 +
tctgacttatcagagtatta

SEQ ID NO: 159618 - DNA, 20 bp, Artificial Sequence
  Synthetic oligonucleotide; GAG chr2 60473708 60473727 60473724 +
tgacttatcagagtattata

SEQ ID NO: 159619 - DNA, 20 bp, Artificial Sequence
  Synthetic oligonucleotide; TAG chr2 60473718 60473737 60473734 +
gagtattatagagcaaacat

SEQ ID NO: 159620 - DNA, 20 bp, Artificial Sequence
  Synthetic oligonucleotide; GAG chr2 60473736 60473755 60473752 +
attagctatgcctgtgactt

SEQ ID NO: 159621 - DNA, 20 bp, Artificial Sequence
  Synthetic oligonucleotide; CAG chr2 60473766 60473785 60473782 +
aatctgtaatgaaaatgtgc

SEQ ID NO: 159622 - DNA, 20 bp, Artificial Sequence
  Synthetic oligonucleotide; CAG chr2 60473784 60473803 60473800 +
gccagctttatcatcactca

SEQ ID NO: 159623 - DNA, 20 bp, Artificial Sequence
  Synthetic oligonucleotide; TAG chr2 60473837 60473856 60473853 +
aatcgcactctcttttgttc

SEQ ID NO: 159624 - DNA, 20 bp, Artificial Sequence
  Synthetic oligonucleotide; GAG chr2 60473844 60473863 60473860 +
ctctcttttgttctagaaat

SEQ ID NO: 159625 - DNA, 20 bp, Artificial Sequence
  Synthetic oligonucleotide; TGG chr2 60473887 60473906 60473903 +
ttccttcattgcttttttac

SEQ ID NO: 159626 - DNA, 20 bp, Artificial Sequence
  Synthetic oligonucleotide; AAG chr2 60473920 60473939 60473936 +
aaatcctgatgttctttaaa

SEQ ID NO: 159627 - DNA, 20 bp, Artificial Sequence
  Synthetic oligonucleotide; AAG chr2 60473941 60473960 60473957 +
agtgtattctgcaaaaacaa

SEQ ID NO: 159628 - DNA, 20 bp, Artificial Sequence
  Synthetic oligonucleotide; AAG chr2 60473945 60473964 60473961 +
tattctgcaaaaacaaaaga

SEQ ID NO: 159629 - DNA, 20 bp, Artificial Sequence
  Synthetic oligonucleotide; TAG chr2 60473957 60473976 60473973 +
acaaaagaaagcaataatta

SEQ ID NO: 159630 - DNA, 20 bp, Artificial Sequence
  Synthetic oligonucleotide; TAG chr2 60473971 60473990 60473987 +
taattatagacactacaata

SEQ ID NO: 159631 - DNA, 20 bp, Artificial Sequence
  Synthetic oligonucleotide; TGG chr2 60473998 60474017 60474014 +
tcttccctgaaactctctca

SEQ ID NO: 159632 - DNA, 20 bp, Artificial Sequence
  Synthetic oligonucleotide; TAG chr2 60474005 60474024 60474021 +
tgaaactctctcatggtcct

SEQ ID NO: 159633 - DNA, 20 bp, Artificial Sequence
  Synthetic oligonucleotide; CAG chr2 60474025 60474044 60474041 +
tagattccttgatacttcac

SEQ ID NO: 159634 - DNA, 20 bp, Artificial Sequence
  Synthetic oligonucleotide; TAG chr2 60474087 60474106 60474103 +
tttgatcaatgctatcctct

SEQ ID NO: 159635 - DNA, 20 bp, Artificial Sequence
  Synthetic oligonucleotide; GAG chr2 60474089 60474108 60474105 +
tgatcaatgctatcctctta

SEQ ID NO: 159636 - DNA, 20 bp, Artificial Sequence
  Synthetic oligonucleotide; CAG chr2 60474110 60474129 60474126 +
agccttgattactcaaacaa

SEQ ID NO: 159637 - DNA, 20 bp, Artificial Sequence
  Synthetic oligonucleotide; AGG chr2 60474111 60474130 60474127 +
gccttgattactcaaacaac

SEQ ID NO: 159638 - DNA, 20 bp, Artificial Sequence
  Synthetic oligonucleotide; AAG chr2 60474132 60474151 60474148 +
ggttactaacttcacctttt

SEQ ID NO: 159639 - DNA, 20 bp, Artificial Sequence
  Synthetic oligonucleotide; GAG chr2 60474134 60474153 60474150 +
ttactaacttcaccttttaa

SEQ ID NO: 159640 - DNA, 20 bp, Artificial Sequence
  Synthetic oligonucleotide; TAG chr2 60474146 60474165 60474162 +
ccttttaagagttctcctcc

SEQ ID NO: 159641 - DNA, 20 bp, Artificial Sequence
  Synthetic oligonucleotide; AGG chr2 60474147 60474166 60474163 +
cttttaagagttctcctcct

SEQ ID NO: 159642 - DNA, 20 bp, Artificial Sequence
  Synthetic oligonucleotide; AAG chr2 60474163 60474182 60474179 +
tcctaggctttttctcaata

SEQ ID NO: 159643 - DNA, 20 bp, Artificial Sequence
  Synthetic oligonucleotide; AGG chr2 60474164 60474183 60474180 +
cctaggctttttctcaataa

SEQ ID NO: 159644 - DNA, 20 bp, Artificial Sequence
  Synthetic oligonucleotide; GGG chr2 60474165 60474184 60474181 +
ctaggctttttctcaataaa

SEQ ID NO: 159645 - DNA, 20 bp, Artificial Sequence
  Synthetic oligonucleotide; GAG chr2 60474167 60474186 60474183 +
aggctttttctcaataaagg

SEQ ID NO: 159646 - DNA, 20 bp, Artificial Sequence
  Synthetic oligonucleotide; AGG chr2 60474168 60474187 60474184 +
ggctttttctcaataaaggg

SEQ ID NO: 159647 - DNA, 20 bp, Artificial Sequence
  Synthetic oligonucleotide; AAG chr2 60474171 60474190 60474187 +
tttttctcaataaagggagg

SEQ ID NO: 159648 - DNA, 20 bp, Artificial Sequence
  Synthetic oligonucleotide; TAG chr2 60474174 60474193 60474190 +
ttctcaataaagggaggaag

SEQ ID NO: 159649 - DNA, 20 bp, Artificial Sequence
  Synthetic oligonucleotide; GAG chr2 60474176 60474195 60474192 +
ctcaataaagggaggaagta

SEQ ID NO: 159650 - DNA, 20 bp, Artificial Sequence
  Synthetic oligonucleotide; CAG chr2 60474215 60474234 60474231 +
ccctttatctataaaaatgc

SEQ ID NO: 159651 - DNA, 20 bp, Artificial Sequence
  Synthetic oligonucleotide; CAG chr2 60474230 60474249 60474246 +
aatgccagccaccaatctgt

SEQ ID NO: 159652 - DNA, 20 bp, Artificial Sequence
  Synthetic oligonucleotide; AGG chr2 60474231 60474250 60474247 +
atgccagccaccaatctgtc

SEQ ID NO: 159653 - DNA, 20 bp, Artificial Sequence
  Synthetic oligonucleotide; AAG chr2 60474254 60474273 60474270 +
cctaaacaaaatttttctgc

SEQ ID NO: 159654 - DNA, 20 bp, Artificial Sequence
  Synthetic oligonucleotide; AAG chr2 60474272 60474291 60474288 +
gcaagctgtgtctttaacat

SEQ ID NO: 159655 - DNA, 20 bp, Artificial Sequence
  Synthetic oligonucleotide; AAG chr2 60474277 60474296 60474293 +
ctgtgtctttaacataagca

SEQ ID NO: 159656 - DNA, 20 bp, Artificial Sequence
  Synthetic oligonucleotide; AAG chr2 60474318 60474337 60474334 +
aaaaatcttgcttttctgaa

SEQ ID NO: 159657 - DNA, 20 bp, Artificial Sequence
  Synthetic oligonucleotide; AAG chr2 60474326 60474345 60474342 +
tgcttttctgaaaagcaact

SEQ ID NO: 159658 - DNA, 20 bp, Artificial Sequence
  Synthetic oligonucleotide; AAG chr2 60474332 60474351 60474348 +
tctgaaaagcaactaagcca

SEQ ID NO: 159659 - DNA, 20 bp, Artificial Sequence
  Synthetic oligonucleotide; CAG chr2 60474364 60474383 60474380 +
tccatctttgtgttgaaatg

SEQ ID NO: 159660 - DNA, 20 bp, Artificial Sequence
  Synthetic oligonucleotide; AAG chr2 60474379 60474398 60474395 +
aaatgcagatttcccactaa

SEQ ID NO: 159661 - DNA, 20 bp, Artificial Sequence
  Synthetic oligonucleotide; AGG chr2 60474380 60474399 60474396 +
aatgcagatttcccactaaa

SEQ ID NO: 159662 - DNA, 20 bp, Artificial Sequence
  Synthetic oligonucleotide; AAG chr2 60474400 60474419 60474416 +
aggcaaatccttcatttcaa

SEQ ID NO: 159663 - DNA, 20 bp, Artificial Sequence
  Synthetic oligonucleotide; AGG chr2 60474401 60474420 60474417 +
ggcaaatccttcatttcaaa

SEQ ID NO: 159664 - DNA, 20 bp, Artificial Sequence
  Synthetic oligonucleotide; TAG chr2 60474409 60474428 60474425 +
cttcatttcaaaaggttgaa

SEQ ID NO: 159665 - DNA, 20 bp, Artificial Sequence
  Synthetic oligonucleotide; AGG chr2 60474410 60474429 60474426 +
ttcatttcaaaaggttgaat

SEQ ID NO: 159666 - DNA, 20 bp, Artificial Sequence
  Synthetic oligonucleotide; TGG chr2 60474414 60474433 60474430 +
tttcaaaaggttgaatagga

SEQ ID NO: 159667 - DNA, 20 bp, Artificial Sequence
  Synthetic oligonucleotide; AAG chr2 60474427 60474446 60474443 +
aataggatggtacttaaaaa

SEQ ID NO: 159668 - DNA, 20 bp, Artificial Sequence
  Synthetic oligonucleotide; CAG chr2 60474435 60474454 60474451 +
ggtacttaaaaaaagaattc

SEQ ID NO: 159669 - DNA, 20 bp, Artificial Sequence
  Synthetic oligonucleotide; TGG chr2 60474439 60474458 60474455 +
cttaaaaaaagaattccagc

SEQ ID NO: 159670 - DNA, 20 bp, Artificial Sequence
  Synthetic oligonucleotide; TAG chr2 60474449 60474468 60474465 +
gaattccagctggttaaatt

SEQ ID NO: 159671 - DNA, 20 bp, Artificial Sequence
  Synthetic oligonucleotide; AGG chr2 60474450 60474469 60474466 +
aattccagctggttaaattt

SEQ ID NO: 159672 - DNA, 20 bp, Artificial Sequence
  Synthetic oligonucleotide; GGG chr2 60474451 60474470 60474467 +
attccagctggttaaattta

SEQ ID NO: 159673 - DNA, 20 bp, Artificial Sequence
  Synthetic oligonucleotide; AAG chr2 60474463 60474482 60474479 +
taaatttagggtgttaaaaa

SEQ ID NO: 159674 - DNA, 20 bp, Artificial Sequence
  Synthetic oligonucleotide; TGG chr2 60474486 60474505 60474502 +
ttcactccaataatattctt

SEQ ID NO: 159675 - DNA, 20 bp, Artificial Sequence
  Synthetic oligonucleotide; TGG chr2 60474492 60474511 60474508 +
ccaataatattctttggctc

SEQ ID NO: 159676 - DNA, 20 bp, Artificial Sequence
  Synthetic oligonucleotide; GGG chr2 60474493 60474512 60474509 +
caataatattctttggctct

SEQ ID NO: 159677 - DNA, 20 bp, Artificial Sequence
  Synthetic oligonucleotide; AAG chr2 60474500 60474519 60474516 +
attctttggctctgggccca

SEQ ID NO: 159678 - DNA, 20 bp, Artificial Sequence
  Synthetic oligonucleotide; TAG chr2 60474524 60474543 60474540 +
attttcacttgatcgtgaat

SEQ ID NO: 159679 - DNA, 20 bp, Artificial Sequence
  Synthetic oligonucleotide; AAG chr2 60474547 60474566 60474563 +
ataaatttttattacacttt

SEQ ID NO: 159680 - DNA, 20 bp, Artificial Sequence
  Synthetic oligonucleotide; TAG chr2 60474559 60474578 60474575 +
tacactttaagcttttgcct

SEQ ID NO: 159681 - DNA, 20 bp, Artificial Sequence
  Synthetic oligonucleotide; TGG chr2 60474564 60474583 60474580 +
tttaagcttttgccttagaa

SEQ ID NO: 159682 - DNA, 20 bp, Artificial Sequence
  Synthetic oligonucleotide; CGG chr2 60474567 60474586 60474583 +
aagcttttgccttagaatgg

SEQ ID NO: 159683 - DNA, 20 bp, Artificial Sequence
  Synthetic oligonucleotide; TAG chr2 60474578 60474597 60474594 +
ttagaatggcggaacttatc

SEQ ID NO: 159684 - DNA, 20 bp, Artificial Sequence
  Synthetic oligonucleotide; AGG chr2 60474579 60474598 60474595 +
tagaatggcggaacttatct

SEQ ID NO: 159685 - DNA, 20 bp, Artificial Sequence
  Synthetic oligonucleotide; GAG chr2 60474581 60474600 60474597 +
gaatggcggaacttatctag

SEQ ID NO: 159686 - DNA, 20 bp, Artificial Sequence
  Synthetic oligonucleotide; GAG chr2 60474587 60474606 60474603 +
cggaacttatctaggagact

SEQ ID NO: 159687 - DNA, 20 bp, Artificial Sequence
  Synthetic oligonucleotide; GAG chr2 60474589 60474608 60474605 +
gaacttatctaggagactga

SEQ ID NO: 159688 - DNA, 20 bp, Artificial Sequence
  Synthetic oligonucleotide; AGG chr2 60474590 60474609 60474606 +
aacttatctaggagactgag

SEQ ID NO: 159689 - DNA, 20 bp, Artificial Sequence
  Synthetic oligonucleotide; GGG chr2 60474591 60474610 60474607 +
acttatctaggagactgaga

SEQ ID NO: 159690 - DNA, 20 bp, Artificial Sequence
  Synthetic oligonucleotide; CAG chr2 60474594 60474613 60474610 +
tatctaggagactgagaggg

SEQ ID NO: 159691 - DNA, 20 bp, Artificial Sequence
  Synthetic oligonucleotide; AAG chr2 60474606 60474625 60474622 +
tgagagggcagctgcataaa

SEQ ID NO: 159692 - DNA, 20 bp, Artificial Sequence
  Synthetic oligonucleotide; TAG chr2 60474620 60474639 60474636 +
cataaaaagacaaattgtct

SEQ ID NO: 159693 - DNA, 20 bp, Artificial Sequence
  Synthetic oligonucleotide; AGG chr2 60474621 60474640 60474637 +
ataaaaagacaaattgtctt

SEQ ID NO: 159694 - DNA, 20 bp, Artificial Sequence
  Synthetic oligonucleotide; CAG chr2 60474679 60474698 60474695 +
ctatgcaaaatgtgtgttcc

SEQ ID NO: 159695 - DNA, 20 bp, Artificial Sequence
  Synthetic oligonucleotide; AGG chr2 60474680 60474699 60474696 +
tatgcaaaatgtgtgttccc

SEQ ID NO: 159696 - DNA, 20 bp, Artificial Sequence
  Synthetic oligonucleotide; GAG chr2 60474754 60474773 60474770 +
tcattcaacaaatatttacc

SEQ ID NO: 159697 - DNA, 20 bp, Artificial Sequence
  Synthetic oligonucleotide; AAG chr2 60474772 60474791 60474788 +
ccgagtgcctacaatgccca

SEQ ID NO: 159698 - DNA, 20 bp, Artificial Sequence
  Synthetic oligonucleotide; TGG chr2 60474778 60474797 60474794 +
gcctacaatgcccaaagcaa

SEQ ID NO: 159699 - DNA, 20 bp, Artificial Sequence
  Synthetic oligonucleotide; GGG chr2 60474779 60474798 60474795 +
cctacaatgcccaaagcaat

SEQ ID NO: 159700 - DNA, 20 bp, Artificial Sequence
  Synthetic oligonucleotide; TAG chr2 60474783 60474802 60474799 +
caatgcccaaagcaatgggc

SEQ ID NO: 159701 - DNA, 20 bp, Artificial Sequence
  Synthetic oligonucleotide; TGG chr2 60474792 60474811 60474808 +
aagcaatgggctagccgctg

SEQ ID NO: 159702 - DNA, 20 bp, Artificial Sequence
  Synthetic oligonucleotide; GGG chr2 60474793 60474812 60474809 +
agcaatgggctagccgctgt

SEQ ID NO: 159703 - DNA, 20 bp, Artificial Sequence
  Synthetic oligonucleotide; CAG chr2 60474796 60474815 60474812 +
aatgggctagccgctgtggg

SEQ ID NO: 159704 - DNA, 20 bp, Artificial Sequence
  Synthetic oligonucleotide; AAG chr2 60474803 60474822 60474819 +
tagccgctgtgggcagtaca

SEQ ID NO: 159705 - DNA, 20 bp, Artificial Sequence
  Synthetic oligonucleotide; CGG chr2 60474812 60474831 60474828 +
tgggcagtacaaagaaaaca

SEQ ID NO: 159706 - DNA, 20 bp, Artificial Sequence
  Synthetic oligonucleotide; CAG chr2 60474818 60474837 60474834 +
gtacaaagaaaacacggaca

SEQ ID NO: 159707 - DNA, 20 bp, Artificial Sequence
  Synthetic oligonucleotide; CAG chr2 60474831 60474850 60474847 +
acggacacagatttctccca

SEQ ID NO: 159708 - DNA, 20 bp, Artificial Sequence
  Synthetic oligonucleotide; CAG chr2 60474834 60474853 60474850 +
gacacagatttctcccacag

SEQ ID NO: 159709 - DNA, 20 bp, Artificial Sequence
  Synthetic oligonucleotide; AGG chr2 60474835 60474854 60474851 +
acacagatttctcccacagc

SEQ ID NO: 159710 - DNA, 20 bp, Artificial Sequence
  Synthetic oligonucleotide; TAG chr2 60474845 60474864 60474861 +
ctcccacagcaggcttcatt

SEQ ID NO: 159711 - DNA, 20 bp, Artificial Sequence
  Synthetic oligonucleotide; TAG chr2 60474848 60474867 60474864 +
ccacagcaggcttcatttag

SEQ ID NO: 159712 - DNA, 20 bp, Artificial Sequence
  Synthetic oligonucleotide; AAG chr2 60474853 60474872 60474869 +
gcaggcttcatttagtagaa

SEQ ID NO: 159713 - DNA, 20 bp, Artificial Sequence
  Synthetic oligonucleotide; AGG chr2 60474854 60474873 60474870 +
caggcttcatttagtagaaa

SEQ ID NO: 159714 - DNA, 20 bp, Artificial Sequence
  Synthetic oligonucleotide; AAG chr2 60474858 60474877 60474874 +
cttcatttagtagaaaaggt

SEQ ID NO: 159715 - DNA, 20 bp, Artificial Sequence
  Synthetic oligonucleotide; AGG chr2 60474859 60474878 60474875 +
ttcatttagtagaaaaggta

SEQ ID NO: 159716 - DNA, 20 bp, Artificial Sequence
  Synthetic oligonucleotide; CAG chr2 60474868 60474887 60474884 +
tagaaaaggtaaggcctgca

SEQ ID NO: 159717 - DNA, 20 bp, Artificial Sequence
  Synthetic oligonucleotide; TAG chr2 60474890 60474909 60474906 +
gaaattgctctacccccatg

SEQ ID NO: 159718 - DNA, 20 bp, Artificial Sequence
  Synthetic oligonucleotide; AAG chr2 60474894 60474913 60474910 +
ttgctctacccccatgtaga

SEQ ID NO: 159719 - DNA, 20 bp, Artificial Sequence
  Synthetic oligonucleotide; GAG chr2 60474905 60474924 60474921 +
ccatgtagaaagtgtgtcat

SEQ ID NO: 159720 - DNA, 20 bp, Artificial Sequence
  Synthetic oligonucleotide; GAG chr2 60474907 60474926 60474923 +
atgtagaaagtgtgtcatga

SEQ ID NO: 159721 - DNA, 20 bp, Artificial Sequence
  Synthetic oligonucleotide; GAG chr2 60474909 60474928 60474925 +
gtagaaagtgtgtcatgaga

SEQ ID NO: 159722 - DNA, 20 bp, Artificial Sequence
  Synthetic oligonucleotide; AGG chr2 60474910 60474929 60474926 +
tagaaagtgtgtcatgagag

SEQ ID NO: 159723 - DNA, 20 bp, Artificial Sequence
  Synthetic oligonucleotide; CAG chr2 60474915 60474934 60474931 +
agtgtgtcatgagagaggta

SEQ ID NO: 159724 - DNA, 20 bp, Artificial Sequence
  Synthetic oligonucleotide; GAG chr2 60474920 60474939 60474936 +
gtcatgagagaggtacagat

SEQ ID NO: 159725 - DNA, 20 bp, Artificial Sequence
  Synthetic oligonucleotide; TGG chr2 60474929 60474948 60474945 +
gaggtacagatgagctgcta

SEQ ID NO: 159726 - DNA, 20 bp, Artificial Sequence
  Synthetic oligonucleotide; AAG chr2 60474939 60474958 60474955 +
tgagctgctatggaaattca

SEQ ID NO: 159727 - DNA, 20 bp, Artificial Sequence
  Synthetic oligonucleotide; AGG chr2 60474940 60474959 60474956 +
gagctgctatggaaattcaa

SEQ ID NO: 159728 - DNA, 20 bp, Artificial Sequence
  Synthetic oligonucleotide; AAG chr2 60474943 60474962 60474959 +
ctgctatggaaattcaaagg

SEQ ID NO: 159729 - DNA, 20 bp, Artificial Sequence
  Synthetic oligonucleotide; GAG chr2 60474945 60474964 60474961 +
gctatggaaattcaaaggaa

SEQ ID NO: 159730 - DNA, 20 bp, Artificial Sequence
  Synthetic oligonucleotide; TGG chr2 60474962 60474981 60474978 +
gaagagaaattatttccatt

SEQ ID NO: 159731 - DNA, 20 bp, Artificial Sequence
  Synthetic oligonucleotide; AAG chr2 60474965 60474984 60474981 +
gagaaattatttccatttgg

SEQ ID NO: 159732 - DNA, 20 bp, Artificial Sequence
  Synthetic oligonucleotide; AGG chr2 60474966 60474985 60474982 +
agaaattatttccatttgga

SEQ ID NO: 159733 - DNA, 20 bp, Artificial Sequence
  Synthetic oligonucleotide; GGG chr2 60474967 60474986 60474983 +
gaaattatttccatttggaa

SEQ ID NO: 159734 - DNA, 20 bp, Artificial Sequence
  Synthetic oligonucleotide; GAG chr2 60474969 60474988 60474985 +
aattatttccatttggaagg

SEQ ID NO: 159735 - DNA, 20 bp, Artificial Sequence
  Synthetic oligonucleotide; AGG chr2 60474970 60474989 60474986 +
attatttccatttggaaggg

SEQ ID NO: 159736 - DNA, 20 bp, Artificial Sequence
  Synthetic oligonucleotide; GGG chr2 60474971 60474990 60474987 +
ttatttccatttggaaggga

SEQ ID NO: 159737 - DNA, 20 bp, Artificial Sequence
  Synthetic oligonucleotide; GAG chr2 60474973 60474992 60474989 +
atttccatttggaagggagg

SEQ ID NO: 159738 - DNA, 20 bp, Artificial Sequence
  Synthetic oligonucleotide; GAG chr2 60474975 60474994 60474991 +
ttccatttggaagggaggga

SEQ ID NO: 159739 - DNA, 20 bp, Artificial Sequence
  Synthetic oligonucleotide; GAG chr2 60474977 60474996 60474993 +
ccatttggaagggagggaga

SEQ ID NO: 159740 - DNA, 20 bp, Artificial Sequence
  Synthetic oligonucleotide; AGG chr2 60474978 60474997 60474994 +
catttggaagggagggagag

SEQ ID NO: 159741 - DNA, 20 bp, Artificial Sequence
  Synthetic oligonucleotide; TGG chr2 60474984 60475003 60475000 +
gaagggagggagagaggctt

SEQ ID NO: 159742 - DNA, 20 bp, Artificial Sequence
  Synthetic oligonucleotide; GGG chr2 60474985 60475004 60475001 +
aagggagggagagaggcttt

SEQ ID NO: 159743 - DNA, 20 bp, Artificial Sequence
  Synthetic oligonucleotide; AAG chr2 60474989 60475008 60475005 +
gagggagagaggctttggga

SEQ ID NO: 159744 - DNA, 20 bp, Artificial Sequence
  Synthetic oligonucleotide; GAG chr2 60474991 60475010 60475007 +
gggagagaggctttgggaaa

SEQ ID NO: 159745 - DNA, 20 bp, Artificial Sequence
  Synthetic oligonucleotide; AGG chr2 60474992 60475011 60475008 +
ggagagaggctttgggaaag

SEQ ID NO: 159746 - DNA, 20 bp, Artificial Sequence
  Synthetic oligonucleotide; GAG chr2 60475004 60475023 60475020 +
tgggaaagaggaaaacttat

SEQ ID NO: 159747 - DNA, 20 bp, Artificial Sequence
  Synthetic oligonucleotide; TGG chr2 60475014 60475033 60475030 +
gaaaacttatgagttaaacc

SEQ ID NO: 159748 - DNA, 20 bp, Artificial Sequence
  Synthetic oligonucleotide; GAG chr2 60475016 60475035 60475032 +
aaacttatgagttaaacctg

SEQ ID NO: 159749 - DNA, 20 bp, Artificial Sequence
  Synthetic oligonucleotide; GAG chr2 60475018 60475037 60475034 +
acttatgagttaaacctgga

SEQ ID NO: 159750 - DNA, 20 bp, Artificial Sequence
  Synthetic oligonucleotide; AAG chr2 60475023 60475042 60475039 +
tgagttaaacctggagagcc

SEQ ID NO: 159751 - DNA, 20 bp, Artificial Sequence
  Synthetic oligonucleotide; GAG chr2 60475025 60475044 60475041 +
agttaaacctggagagccaa

SEQ ID NO: 159752 - DNA, 20 bp, Artificial Sequence
  Synthetic oligonucleotide; AAG chr2 60475029 60475048 60475045 +
aaacctggagagccaagaga

SEQ ID NO: 159753 - DNA, 20 bp, Artificial Sequence
  Synthetic oligonucleotide; AGG chr2 60475030 60475049 60475046 +
aacctggagagccaagagaa

SEQ ID NO: 159754 - DNA, 20 bp, Artificial Sequence
  Synthetic oligonucleotide; TAG chr2 60475039 60475058 60475055 +
agccaagagaaaggatatcc

SEQ ID NO: 159755 - DNA, 20 bp, Artificial Sequence
  Synthetic oligonucleotide; AAG chr2 60475047 60475066 60475063 +
gaaaggatatcctagataaa

SEQ ID NO: 159756 - DNA, 20 bp, Artificial Sequence
  Synthetic oligonucleotide; AAG chr2 60475053 60475072 60475069 +
atatcctagataaaaagaaa

SEQ ID NO: 159757 - DNA, 20 bp, Artificial Sequence
  Synthetic oligonucleotide; CAG chr2 60475056 60475075 60475072 +
tcctagataaaaagaaaaag

SEQ ID NO: 159758 - DNA, 20 bp, Artificial Sequence
  Synthetic oligonucleotide; AGG chr2 60475057 60475076 60475073 +
cctagataaaaagaaaaagc

SEQ ID NO: 159759 - DNA, 20 bp, Artificial Sequence
  Synthetic oligonucleotide; AAG chr2 60475062 60475081 60475078 +
ataaaaagaaaaagcaggta

SEQ ID NO: 159760 - DNA, 20 bp, Artificial Sequence
  Synthetic oligonucleotide; TAG chr2 60475070 60475089 60475086 +
aaaaagcaggtaaagatgct

SEQ ID NO: 159761 - DNA, 20 bp, Artificial Sequence
  Synthetic oligonucleotide; GAG chr2 60475072 60475091 60475088 +
aaagcaggtaaagatgctta

SEQ ID NO: 159762 - DNA, 20 bp, Artificial Sequence
  Synthetic oligonucleotide; GAG chr2 60475074 60475093 60475090 +
agcaggtaaagatgcttaga

SEQ ID NO: 159763 - DNA, 20 bp, Artificial Sequence
  Synthetic oligonucleotide; AAG chr2 60475077 60475096 60475093 +
aggtaaagatgcttagagag

SEQ ID NO: 159764 - DNA, 20 bp, Artificial Sequence
  Synthetic oligonucleotide; AAG chr2 60475082 60475101 60475098 +
aagatgcttagagagaagca

SEQ ID NO: 159765 - DNA, 20 bp, Artificial Sequence
  Synthetic oligonucleotide; AAG chr2 60475088 60475107 60475104 +
cttagagagaagcaaagccc

SEQ ID NO: 159766 - DNA, 20 bp, Artificial Sequence
  Synthetic oligonucleotide; AGG chr2 60475089 60475108 60475105 +
ttagagagaagcaaagccca

SEQ ID NO: 159767 - DNA, 20 bp, Artificial Sequence
  Synthetic oligonucleotide; TGG chr2 60475092 60475111 60475108 +
gagagaagcaaagcccaagg

SEQ ID NO: 159768 - DNA, 20 bp, Artificial Sequence
  Synthetic oligonucleotide; GGG chr2 60475093 60475112 60475109 +
agagaagcaaagcccaaggt

SEQ ID NO: 159769 - DNA, 20 bp, Artificial Sequence
  Synthetic oligonucleotide; CAG chr2 60475098 60475117 60475114 +
agcaaagcccaaggtgggca

SEQ ID NO: 159770 - DNA, 20 bp, Artificial Sequence
  Synthetic oligonucleotide; GAG chr2 60475100 60475119 60475116 +
caaagcccaaggtgggcaca

SEQ ID NO: 159771 - DNA, 20 bp, Artificial Sequence
  Synthetic oligonucleotide; TGG chr2 60475107 60475126 60475123 +
caaggtgggcacagagtaaa

SEQ ID NO: 159772 - DNA, 20 bp, Artificial Sequence
  Synthetic oligonucleotide; GGG chr2 60475108 60475127 60475124 +
aaggtgggcacagagtaaat

SEQ ID NO: 159773 - DNA, 20 bp, Artificial Sequence
  Synthetic oligonucleotide; GGG chr2 60475109 60475128 60475125 +
aggtgggcacagagtaaatg

SEQ ID NO: 159774 - DNA, 20 bp, Artificial Sequence
  Synthetic oligonucleotide; TAG chr2 60475117 60475136 60475133 +
acagagtaaatggggcccaa

SEQ ID NO: 159775 - DNA, 20 bp, Artificial Sequence
  Synthetic oligonucleotide; AGG chr2 60475118 60475137 60475134 +
cagagtaaatggggcccaat

SEQ ID NO: 159776 - DNA, 20 bp, Artificial Sequence
  Synthetic oligonucleotide; CGG chr2 60475121 60475140 60475137 +
agtaaatggggcccaatagg

SEQ ID NO: 159777 - DNA, 20 bp, Artificial Sequence
  Synthetic oligonucleotide; CAG chr2 60475160 60475179 60475176 +
atattgcacactgattcatc

SEQ ID NO: 159778 - DNA, 20 bp, Artificial Sequence
  Synthetic oligonucleotide; CAG chr2 60475167 60475186 60475183 +
acactgattcatccagttga

SEQ ID NO: 159779 - DNA, 20 bp, Artificial Sequence
  Synthetic oligonucleotide; CGG chr2 60475170 60475189 60475186 +
ctgattcatccagttgacag

SEQ ID NO: 159780 - DNA, 20 bp, Artificial Sequence
  Synthetic oligonucleotide; GAG chr2 60475172 60475191 60475188 +
gattcatccagttgacagcg

SEQ ID NO: 159781 - DNA, 20 bp, Artificial Sequence
  Synthetic oligonucleotide; AGG chr2 60475173 60475192 60475189 +
attcatccagttgacagcgg

SEQ ID NO: 159782 - DNA, 20 bp, Artificial Sequence
  Synthetic oligonucleotide; AAG chr2 60475202 60475221 60475218 +
ccatctaaataaatcctctg

SEQ ID NO: 159783 - DNA, 20 bp, Artificial Sequence
  Synthetic oligonucleotide; CAG chr2 60475221 60475240 60475237 +
gaagatttctgtgacatctt

SEQ ID NO: 159784 - DNA, 20 bp, Artificial Sequence
  Synthetic oligonucleotide; AAG chr2 60475231 60475250 60475247 +
gtgacatcttcagctttcac

SEQ ID NO: 159785 - DNA, 20 bp, Artificial Sequence
  Synthetic oligonucleotide; AAG chr2 60475267 60475286 60475283 +
atttcacattttctgaaaat

SEQ ID NO: 159786 - DNA, 20 bp, Artificial Sequence
  Synthetic oligonucleotide; AGG chr2 60475268 60475287 60475284 +
tttcacattttctgaaaata

SEQ ID NO: 159787 - DNA, 20 bp, Artificial Sequence
  Synthetic oligonucleotide; GGG chr2 60475269 60475288 60475285 +
ttcacattttctgaaaataa

SEQ ID NO: 159788 - DNA, 20 bp, Artificial Sequence
  Synthetic oligonucleotide; TGG chr2 60475283 60475302 60475299 +
aaataagggacacaaccatg

SEQ ID NO: 159789 - DNA, 20 bp, Artificial Sequence
  Synthetic oligonucleotide; AAG chr2 60475305 60475324 60475321 +
gactcttgtgaaactccatg

SEQ ID NO: 159790 - DNA, 20 bp, Artificial Sequence
  Synthetic oligonucleotide; AGG chr2 60475306 60475325 60475322 +
actcttgtgaaactccatga

SEQ ID NO: 159791 - DNA, 20 bp, Artificial Sequence
  Synthetic oligonucleotide; TGG chr2 60475361 60475380 60475377 +
gtttcttcccccaatgaatg

SEQ ID NO: 159792 - DNA, 20 bp, Artificial Sequence
  Synthetic oligonucleotide; GGG chr2 60475362 60475381 60475378 +
tttcttcccccaatgaatgt

SEQ ID NO: 159793 - DNA, 20 bp, Artificial Sequence
  Synthetic oligonucleotide; TGG chr2 60475365 60475384 60475381 +
cttcccccaatgaatgtggg

SEQ ID NO: 159794 - DNA, 20 bp, Artificial Sequence
  Synthetic oligonucleotide; AAG chr2 60475374 60475393 60475390 +
atgaatgtgggtggcccgct

SEQ ID NO: 159795 - DNA, 20 bp, Artificial Sequence
  Synthetic oligonucleotide; AGG chr2 60475375 60475394 60475391 +
tgaatgtgggtggcccgcta

SEQ ID NO: 159796 - DNA, 20 bp, Artificial Sequence
  Synthetic oligonucleotide; GAG chr2 60475404 60475423 60475420 +
ttactatgttttattcctct

SEQ ID NO: 159797 - DNA, 20 bp, Artificial Sequence
  Synthetic oligonucleotide; CAG chr2 60475408 60475427 60475424 +
tatgttttattcctctgagt

SEQ ID NO: 159798 - DNA, 20 bp, Artificial Sequence
  Synthetic oligonucleotide; AAG chr2 60475417 60475436 60475433 +
ttcctctgagtcagacaaac

SEQ ID NO: 159799 - DNA, 20 bp, Artificial Sequence
  Synthetic oligonucleotide; TAG chr2 60475426 60475445 60475442 +
gtcagacaaacaagtgttga

SEQ ID NO: 159800 - DNA, 20 bp, Artificial Sequence
  Synthetic oligonucleotide; TGG chr2 60475458 60475477 60475474 +
tccttgcaatactgcctccc

SEQ ID NO: 159801 - DNA, 20 bp, Artificial Sequence
  Synthetic oligonucleotide; CAG chr2 60475477 60475496 60475493 +
ctggcttaaataatctattt

SEQ ID NO: 159802 - DNA, 20 bp, Artificial Sequence
  Synthetic oligonucleotide; CAG chr2 60475492 60475511 60475508 +
tatttcagatgtctcattgc

SEQ ID NO: 159803 - DNA, 20 bp, Artificial Sequence
  Synthetic oligonucleotide; AAG chr2 60475498 60475517 60475514 +
agatgtctcattgccagttt

SEQ ID NO: 159804 - DNA, 20 bp, Artificial Sequence
  Synthetic oligonucleotide; TGG chr2 60475502 60475521 60475518 +
gtctcattgccagtttaaga

SEQ ID NO: 159805 - DNA, 20 bp, Artificial Sequence
  Synthetic oligonucleotide; GGG chr2 60475503 60475522 60475519 +
tctcattgccagtttaagat

SEQ ID NO: 159806 - DNA, 20 bp, Artificial Sequence
  Synthetic oligonucleotide; AAG chr2 60475544 60475563 60475560 +
ttttcaacaaatgactgtgc

SEQ ID NO: 159807 - DNA, 20 bp, Artificial Sequence
  Synthetic oligonucleotide; GAG chr2 60475554 60475573 60475570 +
atgactgtgcaagaaacatt

SEQ ID NO: 159808 - DNA, 20 bp, Artificial Sequence
  Synthetic oligonucleotide; AAG chr2 60475632 60475651 60475648 +
tcccctctttcttcttttca

SEQ ID NO: 159809 - DNA, 20 bp, Artificial Sequence
  Synthetic oligonucleotide; TGG chr2 60475638 60475657 60475654 +
ctttcttcttttcaaagcca

SEQ ID NO: 159810 - DNA, 20 bp, Artificial Sequence
  Synthetic oligonucleotide; GGG chr2 60475639 60475658 60475655 +
tttcttcttttcaaagccat

SEQ ID NO: 159811 - DNA, 20 bp, Artificial Sequence
  Synthetic oligonucleotide; GGG chr2 60475640 60475659 60475656 +
ttcttcttttcaaagccatg

SEQ ID NO: 159812 - DNA, 20 bp, Artificial Sequence
  Synthetic oligonucleotide; GAG chr2 60475642 60475661 60475658 +
cttcttttcaaagccatggg

SEQ ID NO: 159813 - DNA, 20 bp, Artificial Sequence
  Synthetic oligonucleotide; AGG chr2 60475643 60475662 60475659 +
ttcttttcaaagccatgggg

SEQ ID NO: 159814 - DNA, 20 bp, Artificial Sequence
  Synthetic oligonucleotide; TAG chr2 60475647 60475666 60475663 +
tttcaaagccatggggagga

SEQ ID NO: 159815 - DNA, 20 bp, Artificial Sequence
  Synthetic oligonucleotide; AGG chr2 60475648 60475667 60475664 +
ttcaaagccatggggaggat

SEQ ID NO: 159816 - DNA, 20 bp, Artificial Sequence
  Synthetic oligonucleotide; GGG chr2 60475649 60475668 60475665 +
tcaaagccatggggaggata

SEQ ID NO: 159817 - DNA, 20 bp, Artificial Sequence
  Synthetic oligonucleotide; GGG chr2 60475650 60475669 60475666 +
caaagccatggggaggatag

SEQ ID NO: 159818 - DNA, 20 bp, Artificial Sequence
  Synthetic oligonucleotide; GAG chr2 60475671 60475690 60475687 +
ggtgcccttactcctgctct

SEQ ID NO: 159819 - DNA, 20 bp, Artificial Sequence
  Synthetic oligonucleotide; CAG chr2 60475678 60475697 60475694 +
ttactcctgctctgagtcct

SEQ ID NO: 159820 - DNA, 20 bp, Artificial Sequence
  Synthetic oligonucleotide; GAG chr2 60475683 60475702 60475699 +
cctgctctgagtcctcagct

SEQ ID NO: 159821 - DNA, 20 bp, Artificial Sequence
  Synthetic oligonucleotide; AGG chr2 60475684 60475703 60475700 +
ctgctctgagtcctcagctg

SEQ ID NO: 159822 - DNA, 20 bp, Artificial Sequence
  Synthetic oligonucleotide; TAG chr2 60475701 60475720 60475717 +
ctgaggatcttgtttgtgtg

SEQ ID NO: 159823 - DNA, 20 bp, Artificial Sequence
  Synthetic oligonucleotide; TGG chr2 60475704 60475723 60475720 +
aggatcttgtttgtgtgtag

SEQ ID NO: 159824 - DNA, 20 bp, Artificial Sequence
  Synthetic oligonucleotide; GGG chr2 60475705 60475724 60475721 +
ggatcttgtttgtgtgtagt

SEQ ID NO: 159825 - DNA, 20 bp, Artificial Sequence
  Synthetic oligonucleotide; GGG chr2 60475706 60475725 60475722 +
gatcttgtttgtgtgtagtg

SEQ ID NO: 159826 - DNA, 20 bp, Artificial Sequence
  Synthetic oligonucleotide; GGG chr2 60475707 60475726 60475723 +
atcttgtttgtgtgtagtgg

SEQ ID NO: 159827 - DNA, 20 bp, Artificial Sequence
  Synthetic oligonucleotide; CAG chr2 60475710 60475729 60475726 +
ttgtttgtgtgtagtggggg

SEQ ID NO: 159828 - DNA, 20 bp, Artificial Sequence
  Synthetic oligonucleotide; AGG chr2 60475711 60475730 60475727 +
tgtttgtgtgtagtgggggc

SEQ ID NO: 159829 - DNA, 20 bp, Artificial Sequence
  Synthetic oligonucleotide; GGG chr2 60475712 60475731 60475728 +
gtttgtgtgtagtgggggca

SEQ ID NO: 159830 - DNA, 20 bp, Artificial Sequence
  Synthetic oligonucleotide; GGG chr2 60475713 60475732 60475729 +
tttgtgtgtagtgggggcag

SEQ ID NO: 159831 - DNA, 20 bp, Artificial Sequence
  Synthetic oligonucleotide; GGG chr2 60475714 60475733 60475730 +
ttgtgtgtagtgggggcagg

SEQ ID NO: 159832 - DNA, 20 bp, Artificial Sequence
  Synthetic oligonucleotide; GAG chr2 60475716 60475735 60475732 +
gtgtgtagtgggggcagggg

SEQ ID NO: 159833 - DNA, 20 bp, Artificial Sequence
  Synthetic oligonucleotide; AGG chr2 60475717 60475736 60475733 +
tgtgtagtgggggcaggggg

SEQ ID NO: 159834 - DNA, 20 bp, Artificial Sequence
  Synthetic oligonucleotide; GGG chr2 60475718 60475737 60475734 +
gtgtagtgggggcaggggga

SEQ ID NO: 159835 - DNA, 20 bp, Artificial Sequence
  Synthetic oligonucleotide; GGG chr2 60475719 60475738 60475735 +
tgtagtgggggcagggggag

SEQ ID NO: 159836 - DNA, 20 bp, Artificial Sequence
  Synthetic oligonucleotide; TAG chr2 60475724 60475743 60475740 +
tgggggcagggggaggggtg

SEQ ID NO: 159837 - DNA, 20 bp, Artificial Sequence
  Synthetic oligonucleotide; GAG chr2 60475741 60475760 60475757 +
gtgtagccttgcctctatcc

SEQ ID NO: 159838 - DNA, 20 bp, Artificial Sequence
  Synthetic oligonucleotide; AGG chr2 60475742 60475761 60475758 +
tgtagccttgcctctatccg

SEQ ID NO: 159839 - DNA, 20 bp, Artificial Sequence
  Synthetic oligonucleotide; CAG chr2 60475752 60475771 60475768 +
cctctatccgaggtatttat

SEQ ID NO: 159840 - DNA, 20 bp, Artificial Sequence
  Synthetic oligonucleotide; AGG chr2 60475753 60475772 60475769 +
ctctatccgaggtatttatc

SEQ ID NO: 159841 - DNA, 20 bp, Artificial Sequence
  Synthetic oligonucleotide; TGG chr2 60475761 60475780 60475777 +
gaggtatttatcaggttatt

SEQ ID NO: 159842 - DNA, 20 bp, Artificial Sequence
  Synthetic oligonucleotide; GGG chr2 60475762 60475781 60475778 +
aggtatttatcaggttattt

SEQ ID NO: 159843 - DNA, 20 bp, Artificial Sequence
  Synthetic oligonucleotide; GAG chr2 60475764 60475783 60475780 +
gtatttatcaggttatttgg

SEQ ID NO: 159844 - DNA, 20 bp, Artificial Sequence
  Synthetic oligonucleotide; CAG chr2 60475774 60475793 60475790 +
ggttatttgggagctacttt

SEQ ID NO: 159845 - DNA, 20 bp, Artificial Sequence
  Synthetic oligonucleotide; GAG chr2 60475776 60475795 60475792 +
ttatttgggagctactttca

SEQ ID NO: 159846 - DNA, 20 bp, Artificial Sequence
  Synthetic oligonucleotide; CGG chr2 60475817 60475836 60475833 +
ttcccactgccaccactccc

SEQ ID NO: 159847 - DNA, 20 bp, Artificial Sequence
  Synthetic oligonucleotide; TAG chr2 60475835 60475854 60475851 +
cccggattcttttcttcctt

SEQ ID NO: 159848 - DNA, 20 bp, Artificial Sequence
  Synthetic oligonucleotide; AGG chr2 60475836 60475855 60475852 +
ccggattcttttcttccttt

SEQ ID NO: 159849 - DNA, 20 bp, Artificial Sequence
  Synthetic oligonucleotide; AAG chr2 60475839 60475858 60475855 +
gattcttttcttcctttagg

SEQ ID NO: 159850 - DNA, 20 bp, Artificial Sequence
  Synthetic oligonucleotide; CAG chr2 60475842 60475861 60475858 +
tcttttcttcctttaggaag

SEQ ID NO: 159851 - DNA, 20 bp, Artificial Sequence
  Synthetic oligonucleotide; AGG chr2 60475843 60475862 60475859 +
cttttcttcctttaggaagc

SEQ ID NO: 159852 - DNA, 20 bp, Artificial Sequence
  Synthetic oligonucleotide; GGG chr2 60475844 60475863 60475860 +
ttttcttcctttaggaagca

SEQ ID NO: 159853 - DNA, 20 bp, Artificial Sequence
  Synthetic oligonucleotide; TGG chr2 60475858 60475877 60475874 +
gaagcagggacttgttcctc

SEQ ID NO: 159854 - DNA, 20 bp, Artificial Sequence
  Synthetic oligonucleotide; GAG chr2 60475860 60475879 60475876 +
agcagggacttgttcctctg

SEQ ID NO: 159855 - DNA, 20 bp, Artificial Sequence
  Synthetic oligonucleotide; GAG chr2 60475862 60475881 60475878 +
cagggacttgttcctctgga

SEQ ID NO: 159856 - DNA, 20 bp, Artificial Sequence
  Synthetic oligonucleotide; TAG chr2 60475870 60475889 60475886 +
tgttcctctggagagactgc

SEQ ID NO: 159857 - DNA, 20 bp, Artificial Sequence
  Synthetic oligonucleotide; GAG chr2 60475872 60475891 60475888 +
ttcctctggagagactgcta

SEQ ID NO: 159858 - DNA, 20 bp, Artificial Sequence
  Synthetic oligonucleotide; AGG chr2 60475873 60475892 60475889 +
tcctctggagagactgctag

SEQ ID NO: 159859 - DNA, 20 bp, Artificial Sequence
  Synthetic oligonucleotide; AAG chr2 60475877 60475896 60475893 +
ctggagagactgctagagga

SEQ ID NO: 159860 - DNA, 20 bp, Artificial Sequence
  Synthetic oligonucleotide; CAG chr2 60475881 60475900 60475897 +
agagactgctagaggaaagt

SEQ ID NO: 159861 - DNA, 20 bp, Artificial Sequence
  Synthetic oligonucleotide; AGG chr2 60475882 60475901 60475898 +
gagactgctagaggaaagtc

SEQ ID NO: 159862 - DNA, 20 bp, Artificial Sequence
  Synthetic oligonucleotide; AAG chr2 60475890 60475909 60475906 +
tagaggaaagtcaggaacct

SEQ ID NO: 159863 - DNA, 20 bp, Artificial Sequence
  Synthetic oligonucleotide; CAG chr2 60475920 60475939 60475936 +
accccaactctgccactcac

SEQ ID NO: 159864 - DNA, 20 bp, Artificial Sequence
  Synthetic oligonucleotide; TGG chr2 60475956 60475975 60475972 +
ttgaataaatcctttctttc

SEQ ID NO: 159865 - DNA, 20 bp, Artificial Sequence
  Synthetic oligonucleotide; AAG chr2 60475963 60475982 60475979 +
aatcctttctttctggccct

SEQ ID NO: 159866 - DNA, 20 bp, Artificial Sequence
  Synthetic oligonucleotide; AAG chr2 60475981 60476000 60475997 +
ctaagtgtttccatctttaa

SEQ ID NO: 159867 - DNA, 20 bp, Artificial Sequence
  Synthetic oligonucleotide; AGG chr2 60475982 60476001 60475998 +
taagtgtttccatctttaaa

SEQ ID NO: 159868 - DNA, 20 bp, Artificial Sequence
  Synthetic oligonucleotide; GAG chr2 60475984 60476003 60476000 +
agtgtttccatctttaaaag

SEQ ID NO: 159869 - DNA, 20 bp, Artificial Sequence
  Synthetic oligonucleotide; AAG chr2 60475987 60476006 60476003 +
gtttccatctttaaaaggag

SEQ ID NO: 159870 - DNA, 20 bp, Artificial Sequence
  Synthetic oligonucleotide; TGG chr2 60475992 60476011 60476008 +
catctttaaaaggagaagac

SEQ ID NO: 159871 - DNA, 20 bp, Artificial Sequence
  Synthetic oligonucleotide; TAG chr2 60475997 60476016 60476013 +
ttaaaaggagaagactggat

SEQ ID NO: 159872 - DNA, 20 bp, Artificial Sequence
  Synthetic oligonucleotide; TGG chr2 60476001 60476020 60476017 +
aaggagaagactggattaga

SEQ ID NO: 159873 - DNA, 20 bp, Artificial Sequence
  Synthetic oligonucleotide; GGG chr2 60476002 60476021 60476018 +
aggagaagactggattagat

SEQ ID NO: 159874 - DNA, 20 bp, Artificial Sequence
  Synthetic oligonucleotide; GGG chr2 60476003 60476022 60476019 +
ggagaagactggattagatg

SEQ ID NO: 159875 - DNA, 20 bp, Artificial Sequence
  Synthetic oligonucleotide; TGG chr2 60476006 60476025 60476022 +
gaagactggattagatgggg

SEQ ID NO: 159876 - DNA, 20 bp, Artificial Sequence
  Synthetic oligonucleotide; AAG chr2 60476032 60476051 60476048 +
ctctctcctgcctcccatgc

SEQ ID NO: 159877 - DNA, 20 bp, Artificial Sequence
  Synthetic oligonucleotide; CAG chr2 60476037 60476056 60476053 +
tcctgcctcccatgcaagtc

SEQ ID NO: 159878 - DNA, 20 bp, Artificial Sequence
  Synthetic oligonucleotide; AGG chr2 60476038 60476057 60476054 +
cctgcctcccatgcaagtcc

SEQ ID NO: 159879 - DNA, 20 bp, Artificial Sequence
  Synthetic oligonucleotide; TGG chr2 60476048 60476067 60476064 +
atgcaagtccaggcctcctt

SEQ ID NO: 159880 - DNA, 20 bp, Artificial Sequence
  Synthetic oligonucleotide; AAG chr2 60476058 60476077 60476074 +
aggcctcctttggaccaacc

SEQ ID NO: 159881 - DNA, 20 bp, Artificial Sequence
  Synthetic oligonucleotide; GAG chr2 60476060 60476079 60476076 +
gcctcctttggaccaaccaa

SEQ ID NO: 159882 - DNA, 20 bp, Artificial Sequence
  Synthetic oligonucleotide; TAG chr2 60476071 60476090 60476087 +
accaaccaagagacctacta

SEQ ID NO: 159883 - DNA, 20 bp, Artificial Sequence
  Synthetic oligonucleotide; AGG chr2 60476072 60476091 60476088 +
ccaaccaagagacctactat

SEQ ID NO: 159884 - DNA, 20 bp, Artificial Sequence
  Synthetic oligonucleotide; TAG chr2 60476081 60476100 60476097 +
agacctactataggccgtgc

SEQ ID NO: 159885 - DNA, 20 bp, Artificial Sequence
  Synthetic oligonucleotide; AAG chr2 60476084 60476103 60476100 +
cctactataggccgtgctag

SEQ ID NO: 159886 - DNA, 20 bp, Artificial Sequence
  Synthetic oligonucleotide; TGG chr2 60476088 60476107 60476104 +
ctataggccgtgctagaagc

SEQ ID NO: 159887 - DNA, 20 bp, Artificial Sequence
  Synthetic oligonucleotide; CAG chr2 60476092 60476111 60476108 +
aggccgtgctagaagctggc

SEQ ID NO: 159888 - DNA, 20 bp, Artificial Sequence
  Synthetic oligonucleotide; AGG chr2 60476093 60476112 60476109 +
ggccgtgctagaagctggcc

SEQ ID NO: 159889 - DNA, 20 bp, Artificial Sequence
  Synthetic oligonucleotide; TGG chr2 60476125 60476144 60476141 +
ttcccctcatgaccttgacc

SEQ ID NO: 159890 - DNA, 20 bp, Artificial Sequence
  Synthetic oligonucleotide; GAG chr2 60476130 60476149 60476146 +
ctcatgaccttgacctggat

SEQ ID NO: 159891 - DNA, 20 bp, Artificial Sequence
  Synthetic oligonucleotide; AGG chr2 60476131 60476150 60476147 +
tcatgaccttgacctggatg

SEQ ID NO: 159892 - DNA, 20 bp, Artificial Sequence
  Synthetic oligonucleotide; GAG chr2 60476133 60476152 60476149 +
atgaccttgacctggatgag

SEQ ID NO: 159893 - DNA, 20 bp, Artificial Sequence
  Synthetic oligonucleotide; AGG chr2 60476134 60476153 60476150 +
tgaccttgacctggatgagg

SEQ ID NO: 159894 - DNA, 20 bp, Artificial Sequence
  Synthetic oligonucleotide; GGG chr2 60476135 60476154 60476151 +
gaccttgacctggatgagga

SEQ ID NO: 159895 - DNA, 20 bp, Artificial Sequence
  Synthetic oligonucleotide; TAG chr2 60476143 60476162 60476159 +
cctggatgaggagggcctta

SEQ ID NO: 159896 - DNA, 20 bp, Artificial Sequence
  Synthetic oligonucleotide; AGG chr2 60476144 60476163 60476160 +
ctggatgaggagggccttat

SEQ ID NO: 159897 - DNA, 20 bp, Artificial Sequence
  Synthetic oligonucleotide; GAG chr2 60476146 60476165 60476162 +
ggatgaggagggccttatag

SEQ ID NO: 159898 - DNA, 20 bp, Artificial Sequence
  Synthetic oligonucleotide; GAG chr2 60476148 60476167 60476164 +
atgaggagggccttatagga

SEQ ID NO: 159899 - DNA, 20 bp, Artificial Sequence
  Synthetic oligonucleotide; CAG chr2 60476153 60476172 60476169 +
gagggccttataggagagtt

SEQ ID NO: 159900 - DNA, 20 bp, Artificial Sequence
  Synthetic oligonucleotide; AGG chr2 60476154 60476173 60476170 +
agggccttataggagagttc

SEQ ID NO: 159901 - DNA, 20 bp, Artificial Sequence
  Synthetic oligonucleotide; GGG chr2 60476155 60476174 60476171 +
gggccttataggagagttca

SEQ ID NO: 159902 - DNA, 20 bp, Artificial Sequence
  Synthetic oligonucleotide; TGG chr2 60476159 60476178 60476175 +
cttataggagagttcagggc

SEQ ID NO: 159903 - DNA, 20 bp, Artificial Sequence
  Synthetic oligonucleotide; GGG chr2 60476160 60476179 60476176 +
ttataggagagttcagggct

SEQ ID NO: 159904 - DNA, 20 bp, Artificial Sequence
  Synthetic oligonucleotide; TGG chr2 60476165 60476184 60476181 +
ggagagttcagggctgggct

SEQ ID NO: 159905 - DNA, 20 bp, Artificial Sequence
  Synthetic oligonucleotide; CAG chr2 60476172 60476191 60476188 +
tcagggctgggcttggtccc

SEQ ID NO: 159906 - DNA, 20 bp, Artificial Sequence
  Synthetic oligonucleotide; AGG chr2 60476173 60476192 60476189 +
cagggctgggcttggtcccc

SEQ ID NO: 159907 - DNA, 20 bp, Artificial Sequence
  Synthetic oligonucleotide; TAG chr2 60476184 60476203 60476200 +
ttggtccccaggctaatcct

SEQ ID NO: 159908 - DNA, 20 bp, Artificial Sequence
  Synthetic oligonucleotide; AGG chr2 60476185 60476204 60476201 +
tggtccccaggctaatcctt

SEQ ID NO: 159909 - DNA, 20 bp, Artificial Sequence
  Synthetic oligonucleotide; TAG chr2 60476190 60476209 60476206 +
cccaggctaatccttaggct

SEQ ID NO: 159910 - DNA, 20 bp, Artificial Sequence
  Synthetic oligonucleotide; GAG chr2 60476192 60476211 60476208 +
caggctaatccttaggctta

SEQ ID NO: 159911 - DNA, 20 bp, Artificial Sequence
  Synthetic oligonucleotide; GAG chr2 60476194 60476213 60476210 +
ggctaatccttaggcttaga

SEQ ID NO: 159912 - DNA, 20 bp, Artificial Sequence
  Synthetic oligonucleotide; GAG chr2 60476198 60476217 60476214 +
aatccttaggcttagagagt

SEQ ID NO: 159913 - DNA, 20 bp, Artificial Sequence
  Synthetic oligonucleotide; TGG chr2 60476209 60476228 60476225 +
ttagagagtgagcctgatga

SEQ ID NO: 159914 - DNA, 20 bp, Artificial Sequence
  Synthetic oligonucleotide; TGG chr2 60476224 60476243 60476240 +
gatgatggatttcaacctcc

SEQ ID NO: 159915 - DNA, 20 bp, Artificial Sequence
  Synthetic oligonucleotide; GGG chr2 60476225 60476244 60476241 +
atgatggatttcaacctcct

SEQ ID NO: 159916 - DNA, 20 bp, Artificial Sequence
  Synthetic oligonucleotide; CAG chr2 60476231 60476250 60476247 +
gatttcaacctcctgggaca

SEQ ID NO: 159917 - DNA, 20 bp, Artificial Sequence
  Synthetic oligonucleotide; AAG chr2 60476241 60476260 60476257 +
tcctgggacacagtcttgca

SEQ ID NO: 159918 - DNA, 20 bp, Artificial Sequence
  Synthetic oligonucleotide; GAG chr2 60476255 60476274 60476271 +
cttgcaaagtttacatgtct

SEQ ID NO: 159919 - DNA, 20 bp, Artificial Sequence
  Synthetic oligonucleotide; AAG chr2 60476262 60476281 60476278 +
agtttacatgtctgagcttc

SEQ ID NO: 159920 - DNA, 20 bp, Artificial Sequence
  Synthetic oligonucleotide; AGG chr2 60476263 60476282 60476279 +
gtttacatgtctgagcttca

SEQ ID NO: 159921 - DNA, 20 bp, Artificial Sequence
  Synthetic oligonucleotide; GAG chr2 60476265 60476284 60476281 +
ttacatgtctgagcttcaag

SEQ ID NO: 159922 - DNA, 20 bp, Artificial Sequence
  Synthetic oligonucleotide; AGG chr2 60476266 60476285 60476282 +
tacatgtctgagcttcaagg

SEQ ID NO: 159923 - DNA, 20 bp, Artificial Sequence
  Synthetic oligonucleotide; TAG chr2 60476274 60476293 60476290 +
tgagcttcaaggaggaaacc

SEQ ID NO: 159924 - DNA, 20 bp, Artificial Sequence
  Synthetic oligonucleotide; AGG chr2 60476275 60476294 60476291 +
gagcttcaaggaggaaacct

SEQ ID NO: 159925 - DNA, 20 bp, Artificial Sequence
  Synthetic oligonucleotide; GAG chr2 60476286 60476305 60476302 +
aggaaacctaggtgtgtcct

SEQ ID NO: 159926 - DNA, 20 bp, Artificial Sequence
  Synthetic oligonucleotide; GAG chr2 60476294 60476313 60476310 +
taggtgtgtcctgagccaat

SEQ ID NO: 159927 - DNA, 20 bp, Artificial Sequence
  Synthetic oligonucleotide; AAG chr2 60476301 60476320 60476317 +
gtcctgagccaatgagactg

SEQ ID NO: 159928 - DNA, 20 bp, Artificial Sequence
  Synthetic oligonucleotide; AGG chr2 60476302 60476321 60476318 +
tcctgagccaatgagactga

SEQ ID NO: 159929 - DNA, 20 bp, Artificial Sequence
  Synthetic oligonucleotide; CAG chr2 60476306 60476325 60476322 +
gagccaatgagactgaaggt

SEQ ID NO: 159930 - DNA, 20 bp, Artificial Sequence
  Synthetic oligonucleotide; GAG chr2 60476308 60476327 60476324 +
gccaatgagactgaaggtca

SEQ ID NO: 159931 - DNA, 20 bp, Artificial Sequence
  Synthetic oligonucleotide; CAG chr2 60476314 60476333 60476330 +
gagactgaaggtcagagaac

SEQ ID NO: 159932 - DNA, 20 bp, Artificial Sequence
  Synthetic oligonucleotide; AGG chr2 60476315 60476334 60476331 +
agactgaaggtcagagaacc

SEQ ID NO: 159933 - DNA, 20 bp, Artificial Sequence
  Synthetic oligonucleotide; AAG chr2 60476318 60476337 60476334 +
ctgaaggtcagagaaccagg

SEQ ID NO: 159934 - DNA, 20 bp, Artificial Sequence
  Synthetic oligonucleotide; CAG chr2 60476336 60476355 60476352 +
ggaagaaacttccccaaacc

SEQ ID NO: 159935 - DNA, 20 bp, Artificial Sequence
  Synthetic oligonucleotide; AGG chr2 60476337 60476356 60476353 +
gaagaaacttccccaaaccc

SEQ ID NO: 159936 - DNA, 20 bp, Artificial Sequence
  Synthetic oligonucleotide; AAG chr2 60476349 60476368 60476365 +
ccaaacccaggctaaatgtc

SEQ ID NO: 159937 - DNA, 20 bp, Artificial Sequence
  Synthetic oligonucleotide; AGG chr2 60476350 60476369 60476366 +
caaacccaggctaaatgtca

SEQ ID NO: 159938 - DNA, 20 bp, Artificial Sequence
  Synthetic oligonucleotide; GGG chr2 60476351 60476370 60476367 +
aaacccaggctaaatgtcaa

SEQ ID NO: 159939 - DNA, 20 bp, Artificial Sequence
  Synthetic oligonucleotide; AAG chr2 60476356 60476375 60476372 +
caggctaaatgtcaagggaa

SEQ ID NO: 159940 - DNA, 20 bp, Artificial Sequence
  Synthetic oligonucleotide; AGG chr2 60476357 60476376 60476373 +
aggctaaatgtcaagggaaa

SEQ ID NO: 159941 - DNA, 20 bp, Artificial Sequence
  Synthetic oligonucleotide; CAG chr2 60476363 60476382 60476379 +
aatgtcaagggaaaaggtct

SEQ ID NO: 159942 - DNA, 20 bp, Artificial Sequence
  Synthetic oligonucleotide; TGG chr2 60476366 60476385 60476382 +
gtcaagggaaaaggtctcag

SEQ ID NO: 159943 - DNA, 20 bp, Artificial Sequence
  Synthetic oligonucleotide; CAG chr2 60476376 60476395 60476392 +
aaggtctcagtggctcatgc

SEQ ID NO: 159944 - DNA, 20 bp, Artificial Sequence
  Synthetic oligonucleotide; AAG chr2 60476379 60476398 60476395 +
gtctcagtggctcatgccag

SEQ ID NO: 159945 - DNA, 20 bp, Artificial Sequence
  Synthetic oligonucleotide; CAG chr2 60476384 60476403 60476400 +
agtggctcatgccagaagtc

SEQ ID NO: 159946 - DNA, 20 bp, Artificial Sequence
  Synthetic oligonucleotide; TAG chr2 60476387 60476406 60476403 +
ggctcatgccagaagtccag

SEQ ID NO: 159947 - DNA, 20 bp, Artificial Sequence
  Synthetic oligonucleotide; AAG chr2 60476392 60476411 60476408 +
atgccagaagtccagtagca

SEQ ID NO: 159948 - DNA, 20 bp, Artificial Sequence
  Synthetic oligonucleotide; CGG chr2 60476397 60476416 60476413 +
agaagtccagtagcaaagct

SEQ ID NO: 159949 - DNA, 20 bp, Artificial Sequence
  Synthetic oligonucleotide; CAG chr2 60476408 60476427 60476424 +
agcaaagctcggcctcatgc

SEQ ID NO: 159950 - DNA, 20 bp, Artificial Sequence
  Synthetic oligonucleotide; GAG chr2 60476410 60476429 60476426 +
caaagctcggcctcatgcca

SEQ ID NO: 159951 - DNA, 20 bp, Artificial Sequence
  Synthetic oligonucleotide; TGG chr2 60476415 60476434 60476431 +
ctcggcctcatgccagagcc

SEQ ID NO: 159952 - DNA, 20 bp, Artificial Sequence
  Synthetic oligonucleotide; AAG chr2 60476433 60476452 60476449 +
cctggcacccattgctcaca

SEQ ID NO: 159953 - DNA, 20 bp, Artificial Sequence
  Synthetic oligonucleotide; AGG chr2 60476434 60476453 60476450 +
ctggcacccattgctcacaa

SEQ ID NO: 159954 - DNA, 20 bp, Artificial Sequence
  Synthetic oligonucleotide; CAG chr2 60476443 60476462 60476459 +
attgctcacaaaggcacaca

SEQ ID NO: 159955 - DNA, 20 bp, Artificial Sequence
  Synthetic oligonucleotide; AGG chr2 60476444 60476463 60476460 +
ttgctcacaaaggcacacac

SEQ ID NO: 159956 - DNA, 20 bp, Artificial Sequence
  Synthetic oligonucleotide; AAG chr2 60476452 60476471 60476468 +
aaaggcacacacaggactct

SEQ ID NO: 159957 - DNA, 20 bp, Artificial Sequence
  Synthetic oligonucleotide; AAG chr2 60476457 60476476 60476473 +
cacacacaggactctaagaa

SEQ ID NO: 159958 - DNA, 20 bp, Artificial Sequence
  Synthetic oligonucleotide; AGG chr2 60476458 60476477 60476474 +
acacacaggactctaagaaa

SEQ ID NO: 159959 - DNA, 20 bp, Artificial Sequence
  Synthetic oligonucleotide; GGG chr2 60476459 60476478 60476475 +
cacacaggactctaagaaaa

SEQ ID NO: 159960 - DNA, 20 bp, Artificial Sequence
  Synthetic oligonucleotide; GAG chr2 60476461 60476480 60476477 +
cacaggactctaagaaaagg

SEQ ID NO: 159961 - DNA, 20 bp, Artificial Sequence
  Synthetic oligonucleotide; CAG chr2 60476473 60476492 60476489 +
agaaaagggagtcctctccc

SEQ ID NO: 159962 - DNA, 20 bp, Artificial Sequence
  Synthetic oligonucleotide; CAG chr2 60476487 60476506 60476503 +
tctccccagccaccacaaac

SEQ ID NO: 159963 - DNA, 20 bp, Artificial Sequence
  Synthetic oligonucleotide; AGG chr2 60476488 60476507 60476504 +
ctccccagccaccacaaacc

SEQ ID NO: 159964 - DNA, 20 bp, Artificial Sequence
  Synthetic oligonucleotide; CAG chr2 60476492 60476511 60476508 +
ccagccaccacaaaccagga

SEQ ID NO: 159965 - DNA, 20 bp, Artificial Sequence
  Synthetic oligonucleotide; AAG chr2 60476497 60476516 60476513 +
caccacaaaccaggacagca

SEQ ID NO: 159966 - DNA, 20 bp, Artificial Sequence
  Synthetic oligonucleotide; CAG chr2 60476502 60476521 60476518 +
caaaccaggacagcaaagcc

SEQ ID NO: 159967 - DNA, 20 bp, Artificial Sequence
  Synthetic oligonucleotide; TGG chr2 60476512 60476531 60476528 +
cagcaaagcccagcaccctg

SEQ ID NO: 159968 - DNA, 20 bp, Artificial Sequence
  Synthetic oligonucleotide; CAG chr2 60476540 60476559 60476556 +
gacctcccaccacaccccat

SEQ ID NO: 159969 - DNA, 20 bp, Artificial Sequence
  Synthetic oligonucleotide; TGG chr2 60476545 60476564 60476561 +
cccaccacaccccatcagca

SEQ ID NO: 159970 - DNA, 20 bp, Artificial Sequence
  Synthetic oligonucleotide; GAG chr2 60476547 60476566 60476563 +
caccacaccccatcagcatg

SEQ ID NO: 159971 - DNA, 20 bp, Artificial Sequence
  Synthetic oligonucleotide; AGG chr2 60476548 60476567 60476564 +
accacaccccatcagcatgg

SEQ ID NO: 159972 - DNA, 20 bp, Artificial Sequence
  Synthetic oligonucleotide; GGG chr2 60476549 60476568 60476565 +
ccacaccccatcagcatgga

SEQ ID NO: 159973 - DNA, 20 bp, Artificial Sequence
  Synthetic oligonucleotide; TGG chr2 60476556 60476575 60476572 +
ccatcagcatggagggttct

SEQ ID NO: 159974 - DNA, 20 bp, Artificial Sequence
  Synthetic oligonucleotide; AAG chr2 60476560 60476579 60476576 +
cagcatggagggttcttgga

SEQ ID NO: 159975 - DNA, 20 bp, Artificial Sequence
  Synthetic oligonucleotide; CAG chr2 60476619 60476638 60476635 +
tttgctaaccaacataattt

SEQ ID NO: 159976 - DNA, 20 bp, Artificial Sequence
  Synthetic oligonucleotide; GAG chr2 60476621 60476640 60476637 +
tgctaaccaacataatttca

SEQ ID NO: 159977 - DNA, 20 bp, Artificial Sequence
  Synthetic oligonucleotide; CAG chr2 60476641 60476660 60476657 +
gagatgtttcgtcacccttc

SEQ ID NO: 159978 - DNA, 20 bp, Artificial Sequence
  Synthetic oligonucleotide; AGG chr2 60476642 60476661 60476658 +
agatgtttcgtcacccttcc

SEQ ID NO: 159979 - DNA, 20 bp, Artificial Sequence
  Synthetic oligonucleotide; TGG chr2 60476657 60476676 60476673 +
cttccaggctcattgaaaat

SEQ ID NO: 159980 - DNA, 20 bp, Artificial Sequence
  Synthetic oligonucleotide; CAG chr2 60476660 60476679 60476676 +
ccaggctcattgaaaattgg

SEQ ID NO: 159981 - DNA, 20 bp, Artificial Sequence
  Synthetic oligonucleotide; AGG chr2 60476661 60476680 60476677 +
caggctcattgaaaattggc

SEQ ID NO: 159982 - DNA, 20 bp, Artificial Sequence
  Synthetic oligonucleotide; GGG chr2 60476662 60476681 60476678 +
aggctcattgaaaattggca

SEQ ID NO: 159983 - DNA, 20 bp, Artificial Sequence
  Synthetic oligonucleotide; AAG chr2 60476685 60476704 60476701 +
cttctaacattttacctttt

SEQ ID NO: 159984 - DNA, 20 bp, Artificial Sequence
  Synthetic oligonucleotide; AAG chr2 60476727 60476746 60476743 +
cccccaatatcctctctgtc

SEQ ID NO: 159985 - DNA, 20 bp, Artificial Sequence
  Synthetic oligonucleotide; TAG chr2 60476730 60476749 60476746 +
ccaatatcctctctgtcaag

SEQ ID NO: 159986 - DNA, 20 bp, Artificial Sequence
  Synthetic oligonucleotide; CAG chr2 60476763 60476782 60476779 +
gtaaacaaacactttaaatt

SEQ ID NO: 159987 - DNA, 20 bp, Artificial Sequence
  Synthetic oligonucleotide; TGG chr2 60476766 60476785 60476782 +
aacaaacactttaaattcag

SEQ ID NO: 159988 - DNA, 20 bp, Artificial Sequence
  Synthetic oligonucleotide; GGG chr2 60476767 60476786 60476783 +
acaaacactttaaattcagt

SEQ ID NO: 159989 - DNA, 20 bp, Artificial Sequence
  Synthetic oligonucleotide; GGG chr2 60476768 60476787 60476784 +
caaacactttaaattcagtg

SEQ ID NO: 159990 - DNA, 20 bp, Artificial Sequence
  Synthetic oligonucleotide; GGG chr2 60476769 60476788 60476785 +
aaacactttaaattcagtgg

SEQ ID NO: 159991 - DNA, 20 bp, Artificial Sequence
  Synthetic oligonucleotide; GAG chr2 60476771 60476790 60476787 +
acactttaaattcagtgggg

SEQ ID NO: 159992 - DNA, 20 bp, Artificial Sequence
  Synthetic oligonucleotide; AAG chr2 60476785 60476804 60476801 +
gtgggggagctcactattta

SEQ ID NO: 159993 - DNA, 20 bp, Artificial Sequence
  Synthetic oligonucleotide; TGG chr2 60476796 60476815 60476812 +
cactatttaaagaaaccctg

SEQ ID NO: 159994 - DNA, 20 bp, Artificial Sequence
  Synthetic oligonucleotide; AAG chr2 60476813 60476832 60476829 +
ctgtggtgaaaccttttgaa

SEQ ID NO: 159995 - DNA, 20 bp, Artificial Sequence
  Synthetic oligonucleotide; CAG chr2 60476859 60476878 60476875 +
aaaatcactctctaatttat

SEQ ID NO: 159996 - DNA, 20 bp, Artificial Sequence
  Synthetic oligonucleotide; GAG chr2 60476873 60476892 60476889 +
atttatcagtttccattaat

SEQ ID NO: 159997 - DNA, 20 bp, Artificial Sequence
  Synthetic oligonucleotide; TGG chr2 60476890 60476909 60476906 +
aatgagatttttgtgtgtat

SEQ ID NO: 159998 - DNA, 20 bp, Artificial Sequence
  Synthetic oligonucleotide; GGG chr2 60476891 60476910 60476907 +
atgagatttttgtgtgtatt

SEQ ID NO: 159999 - DNA, 20 bp, Artificial Sequence
  Synthetic oligonucleotide; AAG chr2 60476902 60476921 60476918 +
gtgtgtattgggccttctga

SEQ ID NO: 160000 - DNA, 20 bp, Artificial Sequence
  Synthetic oligonucleotide; TGG chr2 60476905 60476924 60476921 +
tgtattgggccttctgaaag

SEQ ID NO: 160001 - DNA, 20 bp, Artificial Sequence
  Synthetic oligonucleotide; GGG chr2 60476906 60476925 60476922 +
gtattgggccttctgaaagt

SEQ ID NO: 160002 - DNA, 20 bp, Artificial Sequence
  Synthetic oligonucleotide; GGG chr2 60476907 60476926 60476923 +
tattgggccttctgaaagtg

SEQ ID NO: 160003 - DNA, 20 bp, Artificial Sequence
  Synthetic oligonucleotide; TAG chr2 60476933 60476952 60476949 +
aactgcaatccatgcctttg

SEQ ID NO: 160004 - DNA, 20 bp, Artificial Sequence
  Synthetic oligonucleotide; TAG chr2 60476937 60476956 60476953 +
gcaatccatgcctttgtagt

SEQ ID NO: 160005 - DNA, 20 bp, Artificial Sequence
  Synthetic oligonucleotide; AAG chr2 60476940 60476959 60476956 +
atccatgcctttgtagttag

SEQ ID NO: 160006 - DNA, 20 bp, Artificial Sequence
  Synthetic oligonucleotide; AGG chr2 60476941 60476960 60476957 +
tccatgcctttgtagttaga

SEQ ID NO: 160007 - DNA, 20 bp, Artificial Sequence
  Synthetic oligonucleotide; GGG chr2 60476942 60476961 60476958 +
ccatgcctttgtagttagaa

SEQ ID NO: 160008 - DNA, 20 bp, Artificial Sequence
  Synthetic oligonucleotide; AAG chr2 60476952 60476971 60476968 +
gtagttagaagggacgataa

SEQ ID NO: 160009 - DNA, 20 bp, Artificial Sequence
  Synthetic oligonucleotide; CAG chr2 60476992 60477011 60477008 +
tttctgtcacccgaattgtc

SEQ ID NO: 160010 - DNA, 20 bp, Artificial Sequence
  Synthetic oligonucleotide; GAG chr2 60477043 60477062 60477059 +
gatgcctccctgccccactc

SEQ ID NO: 160011 - DNA, 20 bp, Artificial Sequence
  Synthetic oligonucleotide; AAG chr2 60477051 60477070 60477067 +
cctgccccactcgagaaatg

SEQ ID NO: 160012 - DNA, 20 bp, Artificial Sequence
  Synthetic oligonucleotide; AAG chr2 60477056 60477075 60477072 +
cccactcgagaaatgaagaa

SEQ ID NO: 160013 - DNA, 20 bp, Artificial Sequence
  Synthetic oligonucleotide; AGG chr2 60477057 60477076 60477073 +
ccactcgagaaatgaagaaa

SEQ ID NO: 160014 - DNA, 20 bp, Artificial Sequence
  Synthetic oligonucleotide; TGG chr2 60477061 60477080 60477077 +
tcgagaaatgaagaaaagga

SEQ ID NO: 160015 - DNA, 20 bp, Artificial Sequence
  Synthetic oligonucleotide; GGG chr2 60477062 60477081 60477078 +
cgagaaatgaagaaaaggat

SEQ ID NO: 160016 - DNA, 20 bp, Artificial Sequence
  Synthetic oligonucleotide; TGG chr2 60477076 60477095 60477092 +
aaggatgggaaatcatcatt

SEQ ID NO: 160017 - DNA, 20 bp, Artificial Sequence
  Synthetic oligonucleotide; TGG chr2 60477084 60477103 60477100 +
gaaatcatcatttggacacc

SEQ ID NO: 160018 - DNA, 20 bp, Artificial Sequence
  Synthetic oligonucleotide; AAG chr2 60477088 60477107 60477104 +
tcatcatttggacacctgga

SEQ ID NO: 160019 - DNA, 20 bp, Artificial Sequence
  Synthetic oligonucleotide; CAG chr2 60477118 60477137 60477134 +
aaccacacttgcgtttctcc

SEQ ID NO: 160020 - DNA, 20 bp, Artificial Sequence
  Synthetic oligonucleotide; AGG chr2 60477119 60477138 60477135 +
accacacttgcgtttctccc

SEQ ID NO: 160021 - DNA, 20 bp, Artificial Sequence
  Synthetic oligonucleotide; AAG chr2 60477124 60477143 60477140 +
acttgcgtttctcccaggtt

SEQ ID NO: 160022 - DNA, 20 bp, Artificial Sequence
  Synthetic oligonucleotide; TAG chr2 60477130 60477149 60477146 +
gtttctcccaggttaagtat

SEQ ID NO: 160023 - DNA, 20 bp, Artificial Sequence
  Synthetic oligonucleotide; GAG chr2 60477139 60477158 60477155 +
aggttaagtattagatacct

SEQ ID NO: 160024 - DNA, 20 bp, Artificial Sequence
  Synthetic oligonucleotide; AGG chr2 60477140 60477159 60477156 +
ggttaagtattagatacctg

SEQ ID NO: 160025 - DNA, 20 bp, Artificial Sequence
  Synthetic oligonucleotide; AAG chr2 60477143 60477162 60477159 +
taagtattagatacctgagg

SEQ ID NO: 160026 - DNA, 20 bp, Artificial Sequence
  Synthetic oligonucleotide; AGG chr2 60477144 60477163 60477160 +
aagtattagatacctgagga

SEQ ID NO: 160027 - DNA, 20 bp, Artificial Sequence
  Synthetic oligonucleotide; GAG chr2 60477167 60477186 60477183 +
tgaaatacgcattttcaact

SEQ ID NO: 160028 - DNA, 20 bp, Artificial Sequence
  Synthetic oligonucleotide; CAG chr2 60477174 60477193 60477190 +
cgcattttcaactgagcatt

SEQ ID NO: 160029 - DNA, 20 bp, Artificial Sequence
  Synthetic oligonucleotide; AGG chr2 60477175 60477194 60477191 +
gcattttcaactgagcattc

SEQ ID NO: 160030 - DNA, 20 bp, Artificial Sequence
  Synthetic oligonucleotide; AAG chr2 60477178 60477197 60477194 +
ttttcaactgagcattcagg

SEQ ID NO: 160031 - DNA, 20 bp, Artificial Sequence
  Synthetic oligonucleotide; GAG chr2 60477180 60477199 60477196 +
ttcaactgagcattcaggaa

SEQ ID NO: 160032 - DNA, 20 bp, Artificial Sequence
  Synthetic oligonucleotide; AGG chr2 60477181 60477200 60477197 +
tcaactgagcattcaggaag

SEQ ID NO: 160033 - DNA, 20 bp, Artificial Sequence
  Synthetic oligonucleotide; TGG chr2 60477186 60477205 60477202 +
tgagcattcaggaagaggca

SEQ ID NO: 160034 - DNA, 20 bp, Artificial Sequence
  Synthetic oligonucleotide; GGG chr2 60477187 60477206 60477203 +
gagcattcaggaagaggcat

SEQ ID NO: 160035 - DNA, 20 bp, Artificial Sequence
  Synthetic oligonucleotide; GGG chr2 60477188 60477207 60477204 +
agcattcaggaagaggcatg

SEQ ID NO: 160036 - DNA, 20 bp, Artificial Sequence
  Synthetic oligonucleotide; AAG chr2 60477196 60477215 60477212 +
ggaagaggcatggggctgtg

SEQ ID NO: 160037 - DNA, 20 bp, Artificial Sequence
  Synthetic oligonucleotide; TGG chr2 60477200 60477219 60477216 +
gaggcatggggctgtgaaga

SEQ ID NO: 160038 - DNA, 20 bp, Artificial Sequence
  Synthetic oligonucleotide; GAG chr2 60477210 60477229 60477226 +
gctgtgaagatggatgcgat

SEQ ID NO: 160039 - DNA, 20 bp, Artificial Sequence
  Synthetic oligonucleotide; CAG chr2 60477252 60477271 60477268 +
ttgattctgataacacctgc

SEQ ID NO: 160040 - DNA, 20 bp, Artificial Sequence
  Synthetic oligonucleotide; GAG chr2 60477254 60477273 60477270 +
gattctgataacacctgcca

SEQ ID NO: 160041 - DNA, 20 bp, Artificial Sequence
  Synthetic oligonucleotide; CAG chr2 60477257 60477276 60477273 +
tctgataacacctgccagag

SEQ ID NO: 160042 - DNA, 20 bp, Artificial Sequence
  Synthetic oligonucleotide; GAG chr2 60477259 60477278 60477275 +
tgataacacctgccagagca

SEQ ID NO: 160043 - DNA, 20 bp, Artificial Sequence
  Synthetic oligonucleotide; AAG chr2 60477262 60477281 60477278 +
taacacctgccagagcagag

SEQ ID NO: 160044 - DNA, 20 bp, Artificial Sequence
  Synthetic oligonucleotide; AGG chr2 60477263 60477282 60477279 +
aacacctgccagagcagaga

SEQ ID NO: 160045 - DNA, 20 bp, Artificial Sequence
  Synthetic oligonucleotide; GGG chr2 60477264 60477283 60477280 +
acacctgccagagcagagaa

SEQ ID NO: 160046 - DNA, 20 bp, Artificial Sequence
  Synthetic oligonucleotide; AAG chr2 60477278 60477297 60477294 +
agagaagggcttgtctatca

SEQ ID NO: 160047 - DNA, 20 bp, Artificial Sequence
  Synthetic oligonucleotide; CAG chr2 60477282 60477301 60477298 +
aagggcttgtctatcaaagc

SEQ ID NO: 160048 - DNA, 20 bp, Artificial Sequence
  Synthetic oligonucleotide; CAG chr2 60477285 60477304 60477301 +
ggcttgtctatcaaagccag

SEQ ID NO: 160049 - DNA, 20 bp, Artificial Sequence
  Synthetic oligonucleotide; AAG chr2 60477313 60477332 60477329 +
acaactcccaaattactctg

SEQ ID NO: 160050 - DNA, 20 bp, Artificial Sequence
  Synthetic oligonucleotide; AAG chr2 60477324 60477343 60477340 +
attactctgaagaccacccc

SEQ ID NO: 160051 - DNA, 20 bp, Artificial Sequence
  Synthetic oligonucleotide; CGG chr2 60477388 60477407 60477404 +
ctctatattatcatttcgat

SEQ ID NO: 160052 - DNA, 20 bp, Artificial Sequence
  Synthetic oligonucleotide; GAG chr2 60477395 60477414 60477411 +
ttatcatttcgatcggtctt

SEQ ID NO: 160053 - DNA, 20 bp, Artificial Sequence
  Synthetic oligonucleotide; TAG chr2 60477405 60477424 60477421 +
gatcggtcttgagaaaatac

SEQ ID NO: 160054 - DNA, 20 bp, Artificial Sequence
  Synthetic oligonucleotide; AAG chr2 60477411 60477430 60477427 +
tcttgagaaaatactagaat

SEQ ID NO: 160055 - DNA, 20 bp, Artificial Sequence
  Synthetic oligonucleotide; AAG chr2 60477417 60477436 60477433 +
gaaaatactagaataagcta

SEQ ID NO: 160056 - DNA, 20 bp, Artificial Sequence
  Synthetic oligonucleotide; TGG chr2 60477431 60477450 60477447 +
aagctaaagaaaaccaaaca

SEQ ID NO: 160057 - DNA, 20 bp, Artificial Sequence
  Synthetic oligonucleotide; GGG chr2 60477432 60477451 60477448 +
agctaaagaaaaccaaacat

SEQ ID NO: 160058 - DNA, 20 bp, Artificial Sequence
  Synthetic oligonucleotide; TGG chr2 60477435 60477454 60477451 +
taaagaaaaccaaacatggg

SEQ ID NO: 160059 - DNA, 20 bp, Artificial Sequence
  Synthetic oligonucleotide; GAG chr2 60477437 60477456 60477453 +
aagaaaaccaaacatgggtg

SEQ ID NO: 160060 - DNA, 20 bp, Artificial Sequence
  Synthetic oligonucleotide; AGG chr2 60477438 60477457 60477454 +
agaaaaccaaacatgggtgg

SEQ ID NO: 160061 - DNA, 20 bp, Artificial Sequence
  Synthetic oligonucleotide; GGG chr2 60477439 60477458 60477455 +
gaaaaccaaacatgggtgga

SEQ ID NO: 160062 - DNA, 20 bp, Artificial Sequence
  Synthetic oligonucleotide; GGG chr2 60477440 60477459 60477456 +
aaaaccaaacatgggtggag

SEQ ID NO: 160063 - DNA, 20 bp, Artificial Sequence
  Synthetic oligonucleotide; AAG chr2 60477444 60477463 60477460 +
ccaaacatgggtggaggggc

SEQ ID NO: 160064 - DNA, 20 bp, Artificial Sequence
  Synthetic oligonucleotide; AGG chr2 60477445 60477464 60477461 +
caaacatgggtggaggggca

SEQ ID NO: 160065 - DNA, 20 bp, Artificial Sequence
  Synthetic oligonucleotide; GGG chr2 60477446 60477465 60477462 +
aaacatgggtggaggggcaa

SEQ ID NO: 160066 - DNA, 20 bp, Artificial Sequence
  Synthetic oligonucleotide; GGG chr2 60477447 60477466 60477463 +
aacatgggtggaggggcaag

SEQ ID NO: 160067 - DNA, 20 bp, Artificial Sequence
  Synthetic oligonucleotide; GAG chr2 60477449 60477468 60477465 +
catgggtggaggggcaaggg

SEQ ID NO: 160068 - DNA, 20 bp, Artificial Sequence
  Synthetic oligonucleotide; AGG chr2 60477450 60477469 60477466 +
atgggtggaggggcaagggg

SEQ ID NO: 160069 - DNA, 20 bp, Artificial Sequence
  Synthetic oligonucleotide; GGG chr2 60477451 60477470 60477467 +
tgggtggaggggcaagggga

SEQ ID NO: 160070 - DNA, 20 bp, Artificial Sequence
  Synthetic oligonucleotide; TAG chr2 60477455 60477474 60477471 +
tggaggggcaaggggaggga

SEQ ID NO: 160071 - DNA, 20 bp, Artificial Sequence
  Synthetic oligonucleotide; TAG chr2 60477461 60477480 60477477 +
ggcaaggggagggatagcat

SEQ ID NO: 160072 - DNA, 20 bp, Artificial Sequence
  Synthetic oligonucleotide; AGG chr2 60477462 60477481 60477478 +
gcaaggggagggatagcatt

SEQ ID NO: 160073 - DNA, 20 bp, Artificial Sequence
  Synthetic oligonucleotide; GAG chr2 60477464 60477483 60477480 +
aaggggagggatagcattag

SEQ ID NO: 160074 - DNA, 20 bp, Artificial Sequence
  Synthetic oligonucleotide; TAG chr2 60477479 60477498 60477495 +
attaggagaaatgcctaatg

SEQ ID NO: 160075 - DNA, 20 bp, Artificial Sequence
  Synthetic oligonucleotide; TGG chr2 60477486 60477505 60477502 +
gaaatgcctaatgtagatga

SEQ ID NO: 160076 - DNA, 20 bp, Artificial Sequence
  Synthetic oligonucleotide; GGG chr2 60477487 60477506 60477503 +
aaatgcctaatgtagatgat

SEQ ID NO: 160077 - DNA, 20 bp, Artificial Sequence
  Synthetic oligonucleotide; TAG chr2 60477494 60477513 60477510 +
taatgtagatgatgggttga

SEQ ID NO: 160078 - DNA, 20 bp, Artificial Sequence
  Synthetic oligonucleotide; AGG chr2 60477495 60477514 60477511 +
aatgtagatgatgggttgat

SEQ ID NO: 160079 - DNA, 20 bp, Artificial Sequence
  Synthetic oligonucleotide; CAG chr2 60477500 60477519 60477516 +
agatgatgggttgataggtg

SEQ ID NO: 160080 - DNA, 20 bp, Artificial Sequence
  Synthetic oligonucleotide; TGG chr2 60477513 60477532 60477529 +
ataggtgcagcaaaccacca

SEQ ID NO: 160081 - DNA, 20 bp, Artificial Sequence
  Synthetic oligonucleotide; CAG chr2 60477563 60477582 60477579 +
cacattctgcacatgtatcc

SEQ ID NO: 160082 - DNA, 20 bp, Artificial Sequence
  Synthetic oligonucleotide; TAG chr2 60477570 60477589 60477586 +
tgcacatgtatcccagaact

SEQ ID NO: 160083 - DNA, 20 bp, Artificial Sequence
  Synthetic oligonucleotide; GAG chr2 60477572 60477591 60477588 +
cacatgtatcccagaactta

SEQ ID NO: 160084 - DNA, 20 bp, Artificial Sequence
  Synthetic oligonucleotide; AAG chr2 60477586 60477605 60477602 +
aacttagagtaaaataaata

SEQ ID NO: 160085 - DNA, 20 bp, Artificial Sequence
  Synthetic oligonucleotide; AAG chr2 60477590 60477609 60477606 +
tagagtaaaataaataaaga

SEQ ID NO: 160086 - DNA, 20 bp, Artificial Sequence
  Synthetic oligonucleotide; AAG chr2 60477594 60477613 60477610 +
gtaaaataaataaagaaaga

SEQ ID NO: 160087 - DNA, 20 bp, Artificial Sequence
  Synthetic oligonucleotide; AAG chr2 60477598 60477617 60477614 +
aataaataaagaaagaaaga

SEQ ID NO: 160088 - DNA, 20 bp, Artificial Sequence
  Synthetic oligonucleotide; AAG chr2 60477602 60477621 60477618 +
aataaagaaagaaagaaaga

SEQ ID NO: 160089 - DNA, 20 bp, Artificial Sequence
  Synthetic oligonucleotide; TGG chr2 60477618 60477637 60477634 +
aagaaagaaataatcaaaca

SEQ ID NO: 160090 - DNA, 20 bp, Artificial Sequence
  Synthetic oligonucleotide; AAG chr2 60477628 60477647 60477644 +
taatcaaacatggtgtttcc

SEQ ID NO: 160091 - DNA, 20 bp, Artificial Sequence
  Synthetic oligonucleotide; GAG chr2 60477630 60477649 60477646 +
atcaaacatggtgtttccaa

SEQ ID NO: 160092 - DNA, 20 bp, Artificial Sequence
  Synthetic oligonucleotide; TGG chr2 60477652 60477671 60477668 +
gactcctgatgttttgttcg

SEQ ID NO: 160093 - DNA, 20 bp, Artificial Sequence
  Synthetic oligonucleotide; GGG chr2 60477653 60477672 60477669 +
actcctgatgttttgttcgt

SEQ ID NO: 160094 - DNA, 20 bp, Artificial Sequence
  Synthetic oligonucleotide; TGG chr2 60477661 60477680 60477677 +
tgttttgttcgtgggcactg

SEQ ID NO: 160095 - DNA, 20 bp, Artificial Sequence
  Synthetic oligonucleotide; CAG chr2 60477667 60477686 60477683 +
gttcgtgggcactgtggaaa

SEQ ID NO: 160096 - DNA, 20 bp, Artificial Sequence
  Synthetic oligonucleotide; AGG chr2 60477668 60477687 60477684 +
ttcgtgggcactgtggaaac

SEQ ID NO: 160097 - DNA, 20 bp, Artificial Sequence
  Synthetic oligonucleotide; GGG chr2 60477669 60477688 60477685 +
tcgtgggcactgtggaaaca

SEQ ID NO: 160098 - DNA, 20 bp, Artificial Sequence
  Synthetic oligonucleotide; GGG chr2 60477670 60477689 60477686 +
cgtgggcactgtggaaacag

SEQ ID NO: 160099 - DNA, 20 bp, Artificial Sequence
  Synthetic oligonucleotide; CAG chr2 60477673 60477692 60477689 +
gggcactgtggaaacagggg

SEQ ID NO: 160100 - DNA, 20 bp, Artificial Sequence
  Synthetic oligonucleotide; TGG chr2 60477676 60477695 60477692 +
cactgtggaaacaggggcag

SEQ ID NO: 160101 - DNA, 20 bp, Artificial Sequence
  Synthetic oligonucleotide; GAG chr2 60477685 60477704 60477701 +
aacaggggcagtggtgctgt

SEQ ID NO: 160102 - DNA, 20 bp, Artificial Sequence
  Synthetic oligonucleotide; GAG chr2 60477687 60477706 60477703 +
caggggcagtggtgctgtga

SEQ ID NO: 160103 - DNA, 20 bp, Artificial Sequence
  Synthetic oligonucleotide; AAG chr2 60477692 60477711 60477708 +
gcagtggtgctgtgagagac

SEQ ID NO: 160104 - DNA, 20 bp, Artificial Sequence
  Synthetic oligonucleotide; AGG chr2 60477693 60477712 60477709 +
cagtggtgctgtgagagaca

SEQ ID NO: 160105 - DNA, 20 bp, Artificial Sequence
  Synthetic oligonucleotide; GGG chr2 60477694 60477713 60477710 +
agtggtgctgtgagagacaa

SEQ ID NO: 160106 - DNA, 20 bp, Artificial Sequence
  Synthetic oligonucleotide; GAG chr2 60477696 60477715 60477712 +
tggtgctgtgagagacaagg

SEQ ID NO: 160107 - DNA, 20 bp, Artificial Sequence
  Synthetic oligonucleotide; TGG chr2 60477699 60477718 60477715 +
tgctgtgagagacaagggag

SEQ ID NO: 160108 - DNA, 20 bp, Artificial Sequence
  Synthetic oligonucleotide; GGG chr2 60477700 60477719 60477716 +
gctgtgagagacaagggagt

SEQ ID NO: 160109 - DNA, 20 bp, Artificial Sequence
  Synthetic oligonucleotide; GGG chr2 60477701 60477720 60477717 +
ctgtgagagacaagggagtg

SEQ ID NO: 160110 - DNA, 20 bp, Artificial Sequence
  Synthetic oligonucleotide; GAG chr2 60477703 60477722 60477719 +
gtgagagacaagggagtggg

SEQ ID NO: 160111 - DNA, 20 bp, Artificial Sequence
  Synthetic oligonucleotide; TGG chr2 60477709 60477728 60477725 +
gacaagggagtggggagcca

SEQ ID NO: 160112 - DNA, 20 bp, Artificial Sequence
  Synthetic oligonucleotide; CAG chr2 60477713 60477732 60477729 +
agggagtggggagccatggt

SEQ ID NO: 160113 - DNA, 20 bp, Artificial Sequence
  Synthetic oligonucleotide; AAG chr2 60477717 60477736 60477733 +
agtggggagccatggtcagc

SEQ ID NO: 160114 - DNA, 20 bp, Artificial Sequence
  Synthetic oligonucleotide; TGG chr2 60477722 60477741 60477738 +
ggagccatggtcagcaagtg

SEQ ID NO: 160115 - DNA, 20 bp, Artificial Sequence
  Synthetic oligonucleotide; GGG chr2 60477723 60477742 60477739 +
gagccatggtcagcaagtgt

SEQ ID NO: 160116 - DNA, 20 bp, Artificial Sequence
  Synthetic oligonucleotide; CAG chr2 60477726 60477745 60477742 +
ccatggtcagcaagtgtggg

SEQ ID NO: 160117 - DNA, 20 bp, Artificial Sequence
  Synthetic oligonucleotide; CAG chr2 60477732 60477751 60477748 +
tcagcaagtgtgggcagccc

SEQ ID NO: 160118 - DNA, 20 bp, Artificial Sequence
  Synthetic oligonucleotide; CAG chr2 60477743 60477762 60477759 +
gggcagccccagcgacactg

SEQ ID NO: 160119 - DNA, 20 bp, Artificial Sequence
  Synthetic oligonucleotide; CGG chr2 60477748 60477767 60477764 +
gccccagcgacactgcagcc

SEQ ID NO: 160120 - DNA, 20 bp, Artificial Sequence
  Synthetic oligonucleotide; CAG chr2 60477752 60477771 60477768 +
cagcgacactgcagcccggc

SEQ ID NO: 160121 - DNA, 20 bp, Artificial Sequence
  Synthetic oligonucleotide; AGG chr2 60477753 60477772 60477769 +
agcgacactgcagcccggcc

SEQ ID NO: 160122 - DNA, 20 bp, Artificial Sequence
  Synthetic oligonucleotide; TGG chr2 60477756 60477775 60477772 +
gacactgcagcccggccagg

SEQ ID NO: 160123 - DNA, 20 bp, Artificial Sequence
  Synthetic oligonucleotide; GAG chr2 60477758 60477777 60477774 +
cactgcagcccggccaggtg

SEQ ID NO: 160124 - DNA, 20 bp, Artificial Sequence
  Synthetic oligonucleotide; AGG chr2 60477759 60477778 60477775 +
actgcagcccggccaggtgg

SEQ ID NO: 160125 - DNA, 20 bp, Artificial Sequence
  Synthetic oligonucleotide; GGG chr2 60477760 60477779 60477776 +
ctgcagcccggccaggtgga

SEQ ID NO: 160126 - DNA, 20 bp, Artificial Sequence
  Synthetic oligonucleotide; AAG chr2 60477782 60477801 60477798 +
gctttcctgacttatcatcc

SEQ ID NO: 160127 - DNA, 20 bp, Artificial Sequence
  Synthetic oligonucleotide; TGG chr2 60477787 60477806 60477803 +
cctgacttatcatccaagac

SEQ ID NO: 160128 - DNA, 20 bp, Artificial Sequence
  Synthetic oligonucleotide; CGG chr2 60477798 60477817 60477814 +
atccaagactggtctgtgca

SEQ ID NO: 160129 - DNA, 20 bp, Artificial Sequence
  Synthetic oligonucleotide; GAG chr2 60477800 60477819 60477816 +
ccaagactggtctgtgcacg

SEQ ID NO: 160130 - DNA, 20 bp, Artificial Sequence
  Synthetic oligonucleotide; AAG chr2 60477803 60477822 60477819 +
agactggtctgtgcacggag

SEQ ID NO: 160131 - DNA, 20 bp, Artificial Sequence
  Synthetic oligonucleotide; AGG chr2 60477804 60477823 60477820 +
gactggtctgtgcacggaga

SEQ ID NO: 160132 - DNA, 20 bp, Artificial Sequence
  Synthetic oligonucleotide; GGG chr2 60477805 60477824 60477821 +
actggtctgtgcacggagaa

SEQ ID NO: 160133 - DNA, 20 bp, Artificial Sequence
  Synthetic oligonucleotide; GGG chr2 60477806 60477825 60477822 +
ctggtctgtgcacggagaag

SEQ ID NO: 160134 - DNA, 20 bp, Artificial Sequence
  Synthetic oligonucleotide; CAG chr2 60477810 60477829 60477826 +
tctgtgcacggagaaggggc

SEQ ID NO: 160135 - DNA, 20 bp, Artificial Sequence
  Synthetic oligonucleotide; AAG chr2 60477813 60477832 60477829 +
gtgcacggagaaggggccag

SEQ ID NO: 160136 - DNA, 20 bp, Artificial Sequence
  Synthetic oligonucleotide; CAG chr2 60477818 60477837 60477834 +
cggagaaggggccagaagaa

SEQ ID NO: 160137 - DNA, 20 bp, Artificial Sequence
  Synthetic oligonucleotide; AGG chr2 60477819 60477838 60477835 +
ggagaaggggccagaagaac

SEQ ID NO: 160138 - DNA, 20 bp, Artificial Sequence
  Synthetic oligonucleotide; CAG chr2 60477822 60477841 60477838 +
gaaggggccagaagaacagg

SEQ ID NO: 160139 - DNA, 20 bp, Artificial Sequence
  Synthetic oligonucleotide; CAG chr2 60477828 60477847 60477844 +
gccagaagaacaggcagccc

SEQ ID NO: 160140 - DNA, 20 bp, Artificial Sequence
  Synthetic oligonucleotide; AGG chr2 60477829 60477848 60477845 +
ccagaagaacaggcagcccc

SEQ ID NO: 160141 - DNA, 20 bp, Artificial Sequence
  Synthetic oligonucleotide; AAG chr2 60477832 60477851 60477848 +
gaagaacaggcagccccagg

SEQ ID NO: 160142 - DNA, 20 bp, Artificial Sequence
  Synthetic oligonucleotide; AGG chr2 60477833 60477852 60477849 +
aagaacaggcagccccagga

SEQ ID NO: 160143 - DNA, 20 bp, Artificial Sequence
  Synthetic oligonucleotide; CAG chr2 60477842 60477861 60477858 +
cagccccaggaaggctctgt

SEQ ID NO: 160144 - DNA, 20 bp, Artificial Sequence
  Synthetic oligonucleotide; AGG chr2 60477843 60477862 60477859 +
agccccaggaaggctctgtc

SEQ ID NO: 160145 - DNA, 20 bp, Artificial Sequence
  Synthetic oligonucleotide; AAG chr2 60477854 60477873 60477870 +
ggctctgtcaggcctccccc

SEQ ID NO: 160146 - DNA, 20 bp, Artificial Sequence
  Synthetic oligonucleotide; AGG chr2 60477855 60477874 60477871 +
gctctgtcaggcctccccca

SEQ ID NO: 160147 - DNA, 20 bp, Artificial Sequence
  Synthetic oligonucleotide; AAG chr2 60477863 60477882 60477879 +
aggcctcccccaaggccaac

SEQ ID NO: 160148 - DNA, 20 bp, Artificial Sequence
  Synthetic oligonucleotide; CAG chr2 60477868 60477887 60477884 +
tcccccaaggccaacaagcc

SEQ ID NO: 160149 - DNA, 20 bp, Artificial Sequence
  Synthetic oligonucleotide; GAG chr2 60477870 60477889 60477886 +
ccccaaggccaacaagccca

SEQ ID NO: 160150 - DNA, 20 bp, Artificial Sequence
  Synthetic oligonucleotide; AGG chr2 60477871 60477890 60477887 +
cccaaggccaacaagcccag

SEQ ID NO: 160151 - DNA, 20 bp, Artificial Sequence
  Synthetic oligonucleotide; GAG chr2 60477873 60477892 60477889 +
caaggccaacaagcccagag

SEQ ID NO: 160152 - DNA, 20 bp, Artificial Sequence
  Synthetic oligonucleotide; AGG chr2 60477874 60477893 60477890 +
aaggccaacaagcccagagg

SEQ ID NO: 160153 - DNA, 20 bp, Artificial Sequence
  Synthetic oligonucleotide; GGG chr2 60477875 60477894 60477891 +
aggccaacaagcccagagga

SEQ ID NO: 160154 - DNA, 20 bp, Artificial Sequence
  Synthetic oligonucleotide; AAG chr2 60477879 60477898 60477895 +
caacaagcccagaggagggc

SEQ ID NO: 160155 - DNA, 20 bp, Artificial Sequence
  Synthetic oligonucleotide; AGG chr2 60477880 60477899 60477896 +
aacaagcccagaggagggca

SEQ ID NO: 160156 - DNA, 20 bp, Artificial Sequence
  Synthetic oligonucleotide; TAG chr2 60477893 60477912 60477909 +
gagggcaaggcctccaactc

SEQ ID NO: 160157 - DNA, 20 bp, Artificial Sequence
  Synthetic oligonucleotide; AAG chr2 60477904 60477923 60477920 +
ctccaactctagcccttctt

SEQ ID NO: 160158 - DNA, 20 bp, Artificial Sequence
  Synthetic oligonucleotide; AGG chr2 60477905 60477924 60477921 +
tccaactctagcccttctta

SEQ ID NO: 160159 - DNA, 20 bp, Artificial Sequence
  Synthetic oligonucleotide; AAG chr2 60477908 60477927 60477924 +
aactctagcccttcttaagg

SEQ ID NO: 160160 - DNA, 20 bp, Artificial Sequence
  Synthetic oligonucleotide; TGG chr2 60477922 60477941 60477938 +
ttaaggaagcacatctgtcc

SEQ ID NO: 160161 - DNA, 20 bp, Artificial Sequence
  Synthetic oligonucleotide; TGG chr2 60477931 60477950 60477947 +
cacatctgtcctggccttta

SEQ ID NO: 160162 - DNA, 20 bp, Artificial Sequence
  Synthetic oligonucleotide; AAG chr2 60477935 60477954 60477951 +
tctgtcctggcctttatgga

SEQ ID NO: 160163 - DNA, 20 bp, Artificial Sequence
  Synthetic oligonucleotide; GAG chr2 60477961 60477980 60477977 +
ttttttttttttttttaatt

SEQ ID NO: 160164 - DNA, 20 bp, Artificial Sequence
  Synthetic oligonucleotide; TGG chr2 60477967 60477986 60477983 +
ttttttttttaattgagaca

SEQ ID NO: 160165 - DNA, 20 bp, Artificial Sequence
  Synthetic oligonucleotide; CAG chr2 60477985 60478004 60478001 +
catggtctcactctgttgcc

SEQ ID NO: 160166 - DNA, 20 bp, Artificial Sequence
  Synthetic oligonucleotide; AGG chr2 60477986 60478005 60478002 +
atggtctcactctgttgccc

SEQ ID NO: 160167 - DNA, 20 bp, Artificial Sequence
  Synthetic oligonucleotide; TGG chr2 60477990 60478009 60478006 +
tctcactctgttgcccaggc

SEQ ID NO: 160168 - DNA, 20 bp, Artificial Sequence
  Synthetic oligonucleotide; GAG chr2 60477992 60478011 60478008 +
tcactctgttgcccaggctg

SEQ ID NO: 160169 - DNA, 20 bp, Artificial Sequence
  Synthetic oligonucleotide; CAG chr2 60477997 60478016 60478013 +
ctgttgcccaggctggagtg

SEQ ID NO: 160170 - DNA, 20 bp, Artificial Sequence
  Synthetic oligonucleotide; TGG chr2 60478000 60478019 60478016 +
ttgcccaggctggagtgcag

SEQ ID NO: 160171 - DNA, 20 bp, Artificial Sequence
  Synthetic oligonucleotide; TGG chr2 60478011 60478030 60478027 +
ggagtgcagtggtgcaatct

SEQ ID NO: 160172 - DNA, 20 bp, Artificial Sequence
  Synthetic oligonucleotide; GAG chr2 60478036 60478055 60478052 +
cactgcaacctccgcctccc

SEQ ID NO: 160173 - DNA, 20 bp, Artificial Sequence
  Synthetic oligonucleotide; AAG chr2 60478042 60478061 60478058 +
aacctccgcctcccgagttc

SEQ ID NO: 160174 - DNA, 20 bp, Artificial Sequence
  Synthetic oligonucleotide; CAG chr2 60478045 60478064 60478061 +
ctccgcctcccgagttcaag

SEQ ID NO: 160175 - DNA, 20 bp, Artificial Sequence
  Synthetic oligonucleotide; CAG chr2 60478059 60478078 60478075 +
ttcaagcagtcctcctgcct

SEQ ID NO: 160176 - DNA, 20 bp, Artificial Sequence
  Synthetic oligonucleotide; AAG chr2 60478067 60478086 60478083 +
gtcctcctgcctcagctctc

SEQ ID NO: 160177 - DNA, 20 bp, Artificial Sequence
  Synthetic oligonucleotide; TAG chr2 60478070 60478089 60478086 +
ctcctgcctcagctctcaag

SEQ ID NO: 160178 - DNA, 20 bp, Artificial Sequence
  Synthetic oligonucleotide; TAG chr2 60478074 60478093 60478090 +
tgcctcagctctcaagtagc

SEQ ID NO: 160179 - DNA, 20 bp, Artificial Sequence
  Synthetic oligonucleotide; AGG chr2 60478075 60478094 60478091 +
gcctcagctctcaagtagct

SEQ ID NO: 160180 - DNA, 20 bp, Artificial Sequence
  Synthetic oligonucleotide; CAG chr2 60478082 60478101 60478098 +
ctctcaagtagctaggacta

SEQ ID NO: 160181 - DNA, 20 bp, Artificial Sequence
  Synthetic oligonucleotide; AGG chr2 60478083 60478102 60478099 +
tctcaagtagctaggactac

SEQ ID NO: 160182 - DNA, 20 bp, Artificial Sequence
  Synthetic oligonucleotide; TGG chr2 60478105 60478124 60478121 +
gcatgcgccaccaccacacc

SEQ ID NO: 160183 - DNA, 20 bp, Artificial Sequence
  Synthetic oligonucleotide; TAG chr2 60478127 60478146 60478143 +
gctaatttttgtattttttg

SEQ ID NO: 160184 - DNA, 20 bp, Artificial Sequence
  Synthetic oligonucleotide; GAG chr2 60478129 60478148 60478145 +
taatttttgtattttttgta

SEQ ID NO: 160185 - DNA, 20 bp, Artificial Sequence
  Synthetic oligonucleotide; TGG chr2 60478133 60478152 60478149 +
ttttgtattttttgtagaga

SEQ ID NO: 160186 - DNA, 20 bp, Artificial Sequence
  Synthetic oligonucleotide; GGG chr2 60478134 60478153 60478150 +
tttgtattttttgtagagat

SEQ ID NO: 160187 - DNA, 20 bp, Artificial Sequence
  Synthetic oligonucleotide; CAG chr2 60478153 60478172 60478169 +
tgggatctcaccatgttgcc

SEQ ID NO: 160188 - DNA, 20 bp, Artificial Sequence
  Synthetic oligonucleotide; AGG chr2 60478154 60478173 60478170 +
gggatctcaccatgttgccc

SEQ ID NO: 160189 - DNA, 20 bp, Artificial Sequence
  Synthetic oligonucleotide; TGG chr2 60478158 60478177 60478174 +
tctcaccatgttgcccaggc

SEQ ID NO: 160190 - DNA, 20 bp, Artificial Sequence
  Synthetic oligonucleotide; GGG chr2 60478159 60478178 60478175 +
ctcaccatgttgcccaggct

SEQ ID NO: 160191 - DNA, 20 bp, Artificial Sequence
  Synthetic oligonucleotide; TGG chr2 60478162 60478181 60478178 +
accatgttgcccaggctggg

SEQ ID NO: 160192 - DNA, 20 bp, Artificial Sequence
  Synthetic oligonucleotide; AAG chr2 60478166 60478185 60478182 +
tgttgcccaggctgggtgga

SEQ ID NO: 160193 - DNA, 20 bp, Artificial Sequence
  Synthetic oligonucleotide; AAG chr2 60478185 60478204 60478201 +
aaagtgttatgttcttccca

SEQ ID NO: 160194 - DNA, 20 bp, Artificial Sequence
  Synthetic oligonucleotide; CAG chr2 60478212 60478231 60478228 +
ctcctcacatcctgccccaa

SEQ ID NO: 160195 - DNA, 20 bp, Artificial Sequence
  Synthetic oligonucleotide; TGG chr2 60478223 60478242 60478239 +
ctgccccaacagtcgccctg

SEQ ID NO: 160196 - DNA, 20 bp, Artificial Sequence
  Synthetic oligonucleotide; GAG chr2 60478229 60478248 60478245 +
caacagtcgccctgtggaat

SEQ ID NO: 160197 - DNA, 20 bp, Artificial Sequence
  Synthetic oligonucleotide; AGG chr2 60478230 60478249 60478246 +
aacagtcgccctgtggaatg

SEQ ID NO: 160198 - DNA, 20 bp, Artificial Sequence
  Synthetic oligonucleotide; GGG chr2 60478231 60478250 60478247 +
acagtcgccctgtggaatga

SEQ ID NO: 160199 - DNA, 20 bp, Artificial Sequence
  Synthetic oligonucleotide; AAG chr2 60478234 60478253 60478250 +
gtcgccctgtggaatgaggg

SEQ ID NO: 160200 - DNA, 20 bp, Artificial Sequence
  Synthetic oligonucleotide; AGG chr2 60478235 60478254 60478251 +
tcgccctgtggaatgaggga

SEQ ID NO: 160201 - DNA, 20 bp, Artificial Sequence
  Synthetic oligonucleotide; TAG chr2 60478241 60478260 60478257 +
tgtggaatgagggaaggtat

SEQ ID NO: 160202 - DNA, 20 bp, Artificial Sequence
  Synthetic oligonucleotide; CAG chr2 60478254 60478273 60478270 +
aaggtattagcctcacctcc

SEQ ID NO: 160203 - DNA, 20 bp, Artificial Sequence
  Synthetic oligonucleotide; GAG chr2 60478258 60478277 60478274 +
tattagcctcacctcccagt

SEQ ID NO: 160204 - DNA, 20 bp, Artificial Sequence
  Synthetic oligonucleotide; AGG chr2 60478259 60478278 60478275 +
attagcctcacctcccagtg

SEQ ID NO: 160205 - DNA, 20 bp, Artificial Sequence
  Synthetic oligonucleotide; AAG chr2 60478268 60478287 60478284 +
acctcccagtgaggaactcg

SEQ ID NO: 160206 - DNA, 20 bp, Artificial Sequence
  Synthetic oligonucleotide; CAG chr2 60478275 60478294 60478291 +
agtgaggaactcgaagatct

SEQ ID NO: 160207 - DNA, 20 bp, Artificial Sequence
  Synthetic oligonucleotide; AAG chr2 60478278 60478297 60478294 +
gaggaactcgaagatctcag

SEQ ID NO: 160208 - DNA, 20 bp, Artificial Sequence
  Synthetic oligonucleotide; TGG chr2 60478291 60478310 60478307 +
atctcagaagtgtcctgctg

SEQ ID NO: 160209 - DNA, 20 bp, Artificial Sequence
  Synthetic oligonucleotide; CAG chr2 60478295 60478314 60478311 +
cagaagtgtcctgctgtgga

SEQ ID NO: 160210 - DNA, 20 bp, Artificial Sequence
  Synthetic oligonucleotide; AGG chr2 60478296 60478315 60478312 +
agaagtgtcctgctgtggac

SEQ ID NO: 160211 - DNA, 20 bp, Artificial Sequence
  Synthetic oligonucleotide; GGG chr2 60478297 60478316 60478313 +
gaagtgtcctgctgtggaca

SEQ ID NO: 160212 - DNA, 20 bp, Artificial Sequence
  Synthetic oligonucleotide; GAG chr2 60478299 60478318 60478315 +
agtgtcctgctgtggacagg

SEQ ID NO: 160213 - DNA, 20 bp, Artificial Sequence
  Synthetic oligonucleotide; AGG chr2 60478300 60478319 60478316 +
gtgtcctgctgtggacaggg

SEQ ID NO: 160214 - DNA, 20 bp, Artificial Sequence
  Synthetic oligonucleotide; CAG chr2 60478304 60478323 60478320 +
cctgctgtggacagggagga

SEQ ID NO: 160215 - DNA, 20 bp, Artificial Sequence
  Synthetic oligonucleotide; AGG chr2 60478305 60478324 60478321 +
ctgctgtggacagggaggac

SEQ ID NO: 160216 - DNA, 20 bp, Artificial Sequence
  Synthetic oligonucleotide; GGG chr2 60478306 60478325 60478322 +
tgctgtggacagggaggaca

SEQ ID NO: 160217 - DNA, 20 bp, Artificial Sequence
  Synthetic oligonucleotide; TGG chr2 60478310 60478329 60478326 +
gtggacagggaggacagggc

SEQ ID NO: 160218 - DNA, 20 bp, Artificial Sequence
  Synthetic oligonucleotide; GGG chr2 60478311 60478330 60478327 +
tggacagggaggacagggct

SEQ ID NO: 160219 - DNA, 20 bp, Artificial Sequence
  Synthetic oligonucleotide; CAG chr2 60478317 60478336 60478333 +
gggaggacagggctgggctt

SEQ ID NO: 160220 - DNA, 20 bp, Artificial Sequence
  Synthetic oligonucleotide; AGG chr2 60478318 60478337 60478334 +
ggaggacagggctgggcttc

SEQ ID NO: 160221 - DNA, 20 bp, Artificial Sequence
  Synthetic oligonucleotide; CAG chr2 60478361 60478380 60478377 +
aacccctcccactgccacct

SEQ ID NO: 160222 - DNA, 20 bp, Artificial Sequence
  Synthetic oligonucleotide; AGG chr2 60478362 60478381 60478378 +
acccctcccactgccacctc

SEQ ID NO: 160223 - DNA, 20 bp, Artificial Sequence
  Synthetic oligonucleotide; GGG chr2 60478363 60478382 60478379 +
cccctcccactgccacctca

SEQ ID NO: 160224 - DNA, 20 bp, Artificial Sequence
  Synthetic oligonucleotide; CGG chr2 60478369 60478388 60478385 +
ccactgccacctcagggccg

SEQ ID NO: 160225 - DNA, 20 bp, Artificial Sequence
  Synthetic oligonucleotide; CAG chr2 60478372 60478391 60478388 +
ctgccacctcagggccgcgg

SEQ ID NO: 160226 - DNA, 20 bp, Artificial Sequence
  Synthetic oligonucleotide; TGG chr2 60478387 60478406 60478403 +
cgcggcagaaacctgtcgtc

SEQ ID NO: 160227 - DNA, 20 bp, Artificial Sequence
  Synthetic oligonucleotide; TGG chr2 60478394 60478413 60478410 +
gaaacctgtcgtctggacac

SEQ ID NO: 160228 - DNA, 20 bp, Artificial Sequence
  Synthetic oligonucleotide; CAG chr2 60478402 60478421 60478418 +
tcgtctggacactggtcata

SEQ ID NO: 160229 - DNA, 20 bp, Artificial Sequence
  Synthetic oligonucleotide; CAG chr2 60478412 60478431 60478428 +
actggtcatacagccccttt

SEQ ID NO: 160230 - DNA, 20 bp, Artificial Sequence
  Synthetic oligonucleotide; AGG chr2 60478413 60478432 60478429 +
ctggtcatacagcccctttc

SEQ ID NO: 160231 - DNA, 20 bp, Artificial Sequence
  Synthetic oligonucleotide; TGG chr2 60478437 60478456 60478453 +
aatctcctcacttgcctttc

SEQ ID NO: 160232 - DNA, 20 bp, Artificial Sequence
  Synthetic oligonucleotide; GAG chr2 60478447 60478466 60478463 +
cttgcctttctggcactatt

SEQ ID NO: 160233 - DNA, 20 bp, Artificial Sequence
  Synthetic oligonucleotide; TGG chr2 60478454 60478473 60478470 +
ttctggcactattgagtgac

SEQ ID NO: 160234 - DNA, 20 bp, Artificial Sequence
  Synthetic oligonucleotide; TGG chr2 60478461 60478480 60478477 +
actattgagtgactggtgtg

SEQ ID NO: 160235 - DNA, 20 bp, Artificial Sequence
  Synthetic oligonucleotide; CAG chr2 60478468 60478487 60478484 +
agtgactggtgtgtggactt

SEQ ID NO: 160236 - DNA, 20 bp, Artificial Sequence
  Synthetic oligonucleotide; AGG chr2 60478469 60478488 60478485 +
gtgactggtgtgtggacttc

SEQ ID NO: 160237 - DNA, 20 bp, Artificial Sequence
  Synthetic oligonucleotide; GGG chr2 60478470 60478489 60478486 +
tgactggtgtgtggacttca

SEQ ID NO: 160238 - DNA, 20 bp, Artificial Sequence
  Synthetic oligonucleotide; GGG chr2 60478471 60478490 60478487 +
gactggtgtgtggacttcag

SEQ ID NO: 160239 - DNA, 20 bp, Artificial Sequence
  Synthetic oligonucleotide; AAG chr2 60478474 60478493 60478490 +
tggtgtgtggacttcagggg

SEQ ID NO: 160240 - DNA, 20 bp, Artificial Sequence
  Synthetic oligonucleotide; TGG chr2 60478479 60478498 60478495 +
tgtggacttcaggggaagcg

SEQ ID NO: 160241 - DNA, 20 bp, Artificial Sequence
  Synthetic oligonucleotide; AAG chr2 60478482 60478501 60478498 +
ggacttcaggggaagcgtgg

SEQ ID NO: 160242 - DNA, 20 bp, Artificial Sequence
  Synthetic oligonucleotide; AGG chr2 60478483 60478502 60478499 +
gacttcaggggaagcgtgga

SEQ ID NO: 160243 - DNA, 20 bp, Artificial Sequence
  Synthetic oligonucleotide; CAG chr2 60478493 60478512 60478509 +
gaagcgtggaaggcacttca

SEQ ID NO: 160244 - DNA, 20 bp, Artificial Sequence
  Synthetic oligonucleotide; AGG chr2 60478494 60478513 60478510 +
aagcgtggaaggcacttcac

SEQ ID NO: 160245 - DNA, 20 bp, Artificial Sequence
  Synthetic oligonucleotide; CAG chr2 60478512 60478531 60478528 +
acaggcctaatactctgtga

SEQ ID NO: 160246 - DNA, 20 bp, Artificial Sequence
  Synthetic oligonucleotide; TGG chr2 60478518 60478537 60478534 +
ctaatactctgtgacagtct

SEQ ID NO: 160247 - DNA, 20 bp, Artificial Sequence
  Synthetic oligonucleotide; AAG chr2 60478523 60478542 60478539 +
actctgtgacagtcttggcc

SEQ ID NO: 160248 - DNA, 20 bp, Artificial Sequence
  Synthetic oligonucleotide; GAG chr2 60478525 60478544 60478541 +
tctgtgacagtcttggccaa

SEQ ID NO: 160249 - DNA, 20 bp, Artificial Sequence
  Synthetic oligonucleotide; GAG chr2 60478533 60478552 60478549 +
agtcttggccaagagattct

SEQ ID NO: 160250 - DNA, 20 bp, Artificial Sequence
  Synthetic oligonucleotide; CAG chr2 60478539 60478558 60478555 +
ggccaagagattctgagaac

SEQ ID NO: 160251 - DNA, 20 bp, Artificial Sequence
  Synthetic oligonucleotide; TGG chr2 60478545 60478564 60478561 +
gagattctgagaaccagaac

SEQ ID NO: 160252 - DNA, 20 bp, Artificial Sequence
  Synthetic oligonucleotide; CAG chr2 60478556 60478575 60478572 +
aaccagaactggccattctc

SEQ ID NO: 160253 - DNA, 20 bp, Artificial Sequence
  Synthetic oligonucleotide; TGG chr2 60478581 60478600 60478597 +
ttaaaacctattatgtccta

SEQ ID NO: 160254 - DNA, 20 bp, Artificial Sequence
  Synthetic oligonucleotide; CAG chr2 60478590 60478609 60478606 +
attatgtcctatggttaaca

SEQ ID NO: 160255 - DNA, 20 bp, Artificial Sequence
  Synthetic oligonucleotide; GAG chr2 60478592 60478611 60478608 +
tatgtcctatggttaacaca

SEQ ID NO: 160256 - DNA, 20 bp, Artificial Sequence
  Synthetic oligonucleotide; CAG chr2 60478600 60478619 60478616 +
atggttaacacagagctgct

SEQ ID NO: 160257 - DNA, 20 bp, Artificial Sequence
  Synthetic oligonucleotide; GAG chr2 60478610 60478629 60478626 +
cagagctgctcagaaattat

SEQ ID NO: 160258 - DNA, 20 bp, Artificial Sequence
  Synthetic oligonucleotide; AAG chr2 60478622 60478641 60478638 +
gaaattatgagaactaattt

SEQ ID NO: 160259 - DNA, 20 bp, Artificial Sequence
  Synthetic oligonucleotide; AGG chr2 60478623 60478642 60478639 +
aaattatgagaactaattta

SEQ ID NO: 160260 - DNA, 20 bp, Artificial Sequence
  Synthetic oligonucleotide; AAG chr2 60478631 60478650 60478647 +
agaactaatttaaggcttca

SEQ ID NO: 160261 - DNA, 20 bp, Artificial Sequence
  Synthetic oligonucleotide; TGG chr2 60478649 60478668 60478665 +
caaagctctaccaaaaaaaa

SEQ ID NO: 160262 - DNA, 20 bp, Artificial Sequence
  Synthetic oligonucleotide; TAG chr2 60478654 60478673 60478670 +
ctctaccaaaaaaaatggtc

SEQ ID NO: 160263 - DNA, 20 bp, Artificial Sequence
  Synthetic oligonucleotide; CAG chr2 60478657 60478676 60478673 +
taccaaaaaaaatggtctag

SEQ ID NO: 160264 - DNA, 20 bp, Artificial Sequence
  Synthetic oligonucleotide; AGG chr2 60478658 60478677 60478674 +
accaaaaaaaatggtctagc

SEQ ID NO: 160265 - DNA, 20 bp, Artificial Sequence
  Synthetic oligonucleotide; CAG chr2 60478662 60478681 60478678 +
aaaaaaatggtctagcaggt

SEQ ID NO: 160266 - DNA, 20 bp, Artificial Sequence
  Synthetic oligonucleotide; AGG chr2 60478663 60478682 60478679 +
aaaaaatggtctagcaggtc

SEQ ID NO: 160267 - DNA, 20 bp, Artificial Sequence
  Synthetic oligonucleotide; CAG chr2 60478680 60478699 60478696 +
gtcaggctctaacatttctt

SEQ ID NO: 160268 - DNA, 20 bp, Artificial Sequence
  Synthetic oligonucleotide; AGG chr2 60478681 60478700 60478697 +
tcaggctctaacatttcttc

SEQ ID NO: 160269 - DNA, 20 bp, Artificial Sequence
  Synthetic oligonucleotide; TAG chr2 60478692 60478711 60478708 +
catttcttcaggaataaaac

SEQ ID NO: 160270 - DNA, 20 bp, Artificial Sequence
  Synthetic oligonucleotide; AGG chr2 60478693 60478712 60478709 +
atttcttcaggaataaaact

SEQ ID NO: 160271 - DNA, 20 bp, Artificial Sequence
  Synthetic oligonucleotide; GAG chr2 60478710 60478729 60478726 +
actaggctgccctctcgcct

SEQ ID NO: 160272 - DNA, 20 bp, Artificial Sequence
  Synthetic oligonucleotide; AGG chr2 60478711 60478730 60478727 +
ctaggctgccctctcgcctg

SEQ ID NO: 160273 - DNA, 20 bp, Artificial Sequence
  Synthetic oligonucleotide; GAG chr2 60478715 60478734 60478731 +
gctgccctctcgcctgaggt

SEQ ID NO: 160274 - DNA, 20 bp, Artificial Sequence
  Synthetic oligonucleotide; AGG chr2 60478716 60478735 60478732 +
ctgccctctcgcctgaggtg

SEQ ID NO: 160275 - DNA, 20 bp, Artificial Sequence
  Synthetic oligonucleotide; AAG chr2 60478726 60478745 60478742 +
gcctgaggtgaggctgaatg

SEQ ID NO: 160276 - DNA, 20 bp, Artificial Sequence
  Synthetic oligonucleotide; AGG chr2 60478727 60478746 60478743 +
cctgaggtgaggctgaatga

SEQ ID NO: 160277 - DNA, 20 bp, Artificial Sequence
  Synthetic oligonucleotide; GAG chr2 60478729 60478748 60478745 +
tgaggtgaggctgaatgaag

SEQ ID NO: 160278 - DNA, 20 bp, Artificial Sequence
  Synthetic oligonucleotide; TGG chr2 60478737 60478756 60478753 +
ggctgaatgaaggagcgctc

SEQ ID NO: 160279 - DNA, 20 bp, Artificial Sequence
  Synthetic oligonucleotide; GAG chr2 60478746 60478765 60478762 +
aaggagcgctctggtgctgc

SEQ ID NO: 160280 - DNA, 20 bp, Artificial Sequence
  Synthetic oligonucleotide; AGG chr2 60478747 60478766 60478763 +
aggagcgctctggtgctgcg

SEQ ID NO: 160281 - DNA, 20 bp, Artificial Sequence
  Synthetic oligonucleotide; CAG chr2 60478751 60478770 60478767 +
gcgctctggtgctgcgaggc

SEQ ID NO: 160282 - DNA, 20 bp, Artificial Sequence
  Synthetic oligonucleotide; AGG chr2 60478752 60478771 60478768 +
cgctctggtgctgcgaggcc

SEQ ID NO: 160283 - DNA, 20 bp, Artificial Sequence
  Synthetic oligonucleotide; CGG chr2 60478768 60478787 60478784 +
ggccaggcctcctcccatga

SEQ ID NO: 160284 - DNA, 20 bp, Artificial Sequence
  Synthetic oligonucleotide; AAG chr2 60478772 60478791 60478788 +
aggcctcctcccatgacggc

SEQ ID NO: 160285 - DNA, 20 bp, Artificial Sequence
  Synthetic oligonucleotide; CAG chr2 60478784 60478803 60478800 +
atgacggcaagtccttcttt

SEQ ID NO: 160286 - DNA, 20 bp, Artificial Sequence
  Synthetic oligonucleotide; CAG chr2 60478791 60478810 60478807 +
caagtccttctttcagaaaa

SEQ ID NO: 160287 - DNA, 20 bp, Artificial Sequence
  Synthetic oligonucleotide; AGG chr2 60478792 60478811 60478808 +
aagtccttctttcagaaaac

SEQ ID NO: 160288 - DNA, 20 bp, Artificial Sequence
  Synthetic oligonucleotide; CGG chr2 60478803 60478822 60478819 +
tcagaaaacaggcctctgcc

SEQ ID NO: 160289 - DNA, 20 bp, Artificial Sequence
  Synthetic oligonucleotide; GGG chr2 60478804 60478823 60478820 +
cagaaaacaggcctctgccc

SEQ ID NO: 160290 - DNA, 20 bp, Artificial Sequence
  Synthetic oligonucleotide; GGG chr2 60478805 60478824 60478821 +
agaaaacaggcctctgcccg

SEQ ID NO: 160291 - DNA, 20 bp, Artificial Sequence
  Synthetic oligonucleotide; CAG chr2 60478815 60478834 60478831 +
cctctgcccggggcatgctg

SEQ ID NO: 160292 - DNA, 20 bp, Artificial Sequence
  Synthetic oligonucleotide; CAG chr2 60478829 60478848 60478845 +
atgctgcagctgcttctctg

SEQ ID NO: 160293 - DNA, 20 bp, Artificial Sequence
  Synthetic oligonucleotide; CAG chr2 60478837 60478856 60478853 +
gctgcttctctgcagtgcct

SEQ ID NO: 160294 - DNA, 20 bp, Artificial Sequence
  Synthetic oligonucleotide; CAG chr2 60478855 60478874 60478871 +
ctcagcaccttcccgcctcc

SEQ ID NO: 160295 - DNA, 20 bp, Artificial Sequence
  Synthetic oligonucleotide; AGG chr2 60478856 60478875 60478872 +
tcagcaccttcccgcctccc

SEQ ID NO: 160296 - DNA, 20 bp, Artificial Sequence
  Synthetic oligonucleotide; CAG chr2 60478863 60478882 60478879 +
cttcccgcctcccaggcaca

SEQ ID NO: 160297 - DNA, 20 bp, Artificial Sequence
  Synthetic oligonucleotide; CAG chr2 60478866 60478885 60478882 +
cccgcctcccaggcacacag

SEQ ID NO: 160298 - DNA, 20 bp, Artificial Sequence
  Synthetic oligonucleotide; CAG chr2 60478871 60478890 60478887 +
ctcccaggcacacagcagcc

SEQ ID NO: 160299 - DNA, 20 bp, Artificial Sequence
  Synthetic oligonucleotide; CAG chr2 60478877 60478896 60478893 +
ggcacacagcagcccagcct

SEQ ID NO: 160300 - DNA, 20 bp, Artificial Sequence
  Synthetic oligonucleotide; TGG chr2 60478892 60478911 60478908 +
agcctcagtcctcatctctc

SEQ ID NO: 160301 - DNA, 20 bp, Artificial Sequence
  Synthetic oligonucleotide; AAG chr2 60478897 60478916 60478913 +
cagtcctcatctctctggca

SEQ ID NO: 160302 - DNA, 20 bp, Artificial Sequence
  Synthetic oligonucleotide; CAG chr2 60478905 60478924 60478921 +
atctctctggcaaagtccca

SEQ ID NO: 160303 - DNA, 20 bp, Artificial Sequence
  Synthetic oligonucleotide; CAG chr2 60478917 60478936 60478933 +
aagtcccacagaacaaaaca

SEQ ID NO: 160304 - DNA, 20 bp, Artificial Sequence
  Synthetic oligonucleotide; AGG chr2 60478918 60478937 60478934 +
agtcccacagaacaaaacac

SEQ ID NO: 160305 - DNA, 20 bp, Artificial Sequence
  Synthetic oligonucleotide; TGG chr2 60478924 60478943 60478940 +
acagaacaaaacacaggcct

SEQ ID NO: 160306 - DNA, 20 bp, Artificial Sequence
  Synthetic oligonucleotide; TGG chr2 60478971 60478990 60478987 +
ttttttttttccctcctccc

SEQ ID NO: 160307 - DNA, 20 bp, Artificial Sequence
  Synthetic oligonucleotide; TGG chr2 60479020 60479039 60479036 +
atttataccactgaccaatc

SEQ ID NO: 160308 - DNA, 20 bp, Artificial Sequence
  Synthetic oligonucleotide; AAG chr2 60479024 60479043 60479040 +
ataccactgaccaatctgga

SEQ ID NO: 160309 - DNA, 20 bp, Artificial Sequence
  Synthetic oligonucleotide; GAG chr2 60479026 60479045 60479042 +
accactgaccaatctggaaa

SEQ ID NO: 160310 - DNA, 20 bp, Artificial Sequence
  Synthetic oligonucleotide; GAG chr2 60479035 60479054 60479051 +
caatctggaaagagttccct

SEQ ID NO: 160311 - DNA, 20 bp, Artificial Sequence
  Synthetic oligonucleotide; TGG chr2 60479043 60479062 60479059 +
aaagagttccctgagcaaat

SEQ ID NO: 160312 - DNA, 20 bp, Artificial Sequence
  Synthetic oligonucleotide; GAG chr2 60479045 60479064 60479061 +
agagttccctgagcaaattg

SEQ ID NO: 160313 - DNA, 20 bp, Artificial Sequence
  Synthetic oligonucleotide; CAG chr2 60479055 60479074 60479071 +
gagcaaattggagatgcccg

SEQ ID NO: 160314 - DNA, 20 bp, Artificial Sequence
  Synthetic oligonucleotide; TGG chr2 60479075 60479094 60479091 +
cagatacaacctgccatcat

SEQ ID NO: 160315 - DNA, 20 bp, Artificial Sequence
  Synthetic oligonucleotide; GAG chr2 60479077 60479096 60479093 +
gatacaacctgccatcattg

SEQ ID NO: 160316 - DNA, 20 bp, Artificial Sequence
  Synthetic oligonucleotide; CAG chr2 60479080 60479099 60479096 +
acaacctgccatcattggag

SEQ ID NO: 160317 - DNA, 20 bp, Artificial Sequence
  Synthetic oligonucleotide; CAG chr2 60479086 60479105 60479102 +
tgccatcattggagcagcct

SEQ ID NO: 160318 - DNA, 20 bp, Artificial Sequence
  Synthetic oligonucleotide; CAG chr2 60479091 60479110 60479107 +
tcattggagcagcctcagtc

SEQ ID NO: 160319 - DNA, 20 bp, Artificial Sequence
  Synthetic oligonucleotide; TGG chr2 60479097 60479116 60479113 +
gagcagcctcagtccagcca

SEQ ID NO: 160320 - DNA, 20 bp, Artificial Sequence
  Synthetic oligonucleotide; GGG chr2 60479098 60479117 60479114 +
agcagcctcagtccagccat

SEQ ID NO: 160321 - DNA, 20 bp, Artificial Sequence
  Synthetic oligonucleotide; GGG chr2 60479099 60479118 60479115 +
gcagcctcagtccagccatg

SEQ ID NO: 160322 - DNA, 20 bp, Artificial Sequence
  Synthetic oligonucleotide; TGG chr2 60479104 60479123 60479120 +
ctcagtccagccatggggtg

SEQ ID NO: 160323 - DNA, 20 bp, Artificial Sequence
  Synthetic oligonucleotide; TGG chr2 60479123 60479142 60479139 +
gtggcactgccgtctgttct

SEQ ID NO: 160324 - DNA, 20 bp, Artificial Sequence
  Synthetic oligonucleotide; GAG chr2 60479152 60479171 60479168 +
taattctgctgattccatat

SEQ ID NO: 160325 - DNA, 20 bp, Artificial Sequence
  Synthetic oligonucleotide; CAG chr2 60479171 60479190 60479187 +
tgagtaacatccaatgttcc

SEQ ID NO: 160326 - DNA, 20 bp, Artificial Sequence
  Synthetic oligonucleotide; AAG chr2 60479182 60479201 60479198 +
caatgttcccagacacctcc

SEQ ID NO: 160327 - DNA, 20 bp, Artificial Sequence
  Synthetic oligonucleotide; CAG chr2 60479198 60479217 60479214 +
ctccaagctcctccaaccaa

SEQ ID NO: 160328 - DNA, 20 bp, Artificial Sequence
  Synthetic oligonucleotide; TAG chr2 60479231 60479250 60479247 +
tcaactcctttctacccacc

SEQ ID NO: 160329 - DNA, 20 bp, Artificial Sequence
  Synthetic oligonucleotide; CAG chr2 60479234 60479253 60479250 +
actcctttctacccacctag

SEQ ID NO: 160330 - DNA, 20 bp, Artificial Sequence
  Synthetic oligonucleotide; AGG chr2 60479235 60479254 60479251 +
ctcctttctacccacctagc

SEQ ID NO: 160331 - DNA, 20 bp, Artificial Sequence
  Synthetic oligonucleotide; TGG chr2 60479244 60479263 60479260 +
acccacctagcaggtccacg

SEQ ID NO: 160332 - DNA, 20 bp, Artificial Sequence
  Synthetic oligonucleotide; GGG chr2 60479245 60479264 60479261 +
cccacctagcaggtccacgt

SEQ ID NO: 160333 - DNA, 20 bp, Artificial Sequence
  Synthetic oligonucleotide; GGG chr2 60479246 60479265 60479262 +
ccacctagcaggtccacgtg

SEQ ID NO: 160334 - DNA, 20 bp, Artificial Sequence
  Synthetic oligonucleotide; CAG chr2 60479252 60479271 60479268 +
agcaggtccacgtggggact

SEQ ID NO: 160335 - DNA, 20 bp, Artificial Sequence
  Synthetic oligonucleotide; TGG chr2 60479259 60479278 60479275 +
ccacgtggggactcagccta

SEQ ID NO: 160336 - DNA, 20 bp, Artificial Sequence
  Synthetic oligonucleotide; TGG chr2 60479267 60479286 60479283 +
ggactcagcctatggacacc

SEQ ID NO: 160337 - DNA, 20 bp, Artificial Sequence
  Synthetic oligonucleotide; CGG chr2 60479276 60479295 60479292 +
ctatggacacctggcctctg

SEQ ID NO: 160338 - DNA, 20 bp, Artificial Sequence
  Synthetic oligonucleotide; GGG chr2 60479277 60479296 60479293 +
tatggacacctggcctctgc

SEQ ID NO: 160339 - DNA, 20 bp, Artificial Sequence
  Synthetic oligonucleotide; CAG chr2 60479282 60479301 60479298 +
acacctggcctctgcgggca

SEQ ID NO: 160340 - DNA, 20 bp, Artificial Sequence
  Synthetic oligonucleotide; CGG chr2 60479285 60479304 60479301 +
cctggcctctgcgggcacag

SEQ ID NO: 160341 - DNA, 20 bp, Artificial Sequence
  Synthetic oligonucleotide; CGG chr2 60479298 60479317 60479314 +
ggcacagcggccacacacca

SEQ ID NO: 160342 - DNA, 20 bp, Artificial Sequence
  Synthetic oligonucleotide; TGG chr2 60479301 60479320 60479317 +
acagcggccacacaccacgg

SEQ ID NO: 160343 - DNA, 20 bp, Artificial Sequence
  Synthetic oligonucleotide; GGG chr2 60479302 60479321 60479318 +
cagcggccacacaccacggt

SEQ ID NO: 160344 - DNA, 20 bp, Artificial Sequence
  Synthetic oligonucleotide; CGG chr2 60479308 60479327 60479324 +
ccacacaccacggtgggacc

SEQ ID NO: 160345 - DNA, 20 bp, Artificial Sequence
  Synthetic oligonucleotide; GAG chr2 60479310 60479329 60479326 +
acacaccacggtgggacccg

SEQ ID NO: 160346 - DNA, 20 bp, Artificial Sequence
  Synthetic oligonucleotide; GAG chr2 60479328 60479347 60479344 +
cggagaccattttttgtttt

SEQ ID NO: 160347 - DNA, 20 bp, Artificial Sequence
  Synthetic oligonucleotide; AAG chr2 60479338 60479357 60479354 +
tttttgttttgagtctctct

SEQ ID NO: 160348 - DNA, 20 bp, Artificial Sequence
  Synthetic oligonucleotide; TGG chr2 60479347 60479366 60479363 +
tgagtctctctaagactgct

SEQ ID NO: 160349 - DNA, 20 bp, Artificial Sequence
  Synthetic oligonucleotide; GGG chr2 60479348 60479367 60479364 +
gagtctctctaagactgctt

SEQ ID NO: 160350 - DNA, 20 bp, Artificial Sequence
  Synthetic oligonucleotide; GAG chr2 60479355 60479374 60479371 +
tctaagactgcttgggaaat

SEQ ID NO: 160351 - DNA, 20 bp, Artificial Sequence
  Synthetic oligonucleotide; AGG chr2 60479356 60479375 60479372 +
ctaagactgcttgggaaatg

SEQ ID NO: 160352 - DNA, 20 bp, Artificial Sequence
  Synthetic oligonucleotide; CAG chr2 60479364 60479383 60479380 +
gcttgggaaatgaggtctct

SEQ ID NO: 160353 - DNA, 20 bp, Artificial Sequence
  Synthetic oligonucleotide; AGG chr2 60479365 60479384 60479381 +
cttgggaaatgaggtctctc

SEQ ID NO: 160354 - DNA, 20 bp, Artificial Sequence
  Synthetic oligonucleotide; TAG chr2 60479370 60479389 60479386 +
gaaatgaggtctctcaggtc

SEQ ID NO: 160355 - DNA, 20 bp, Artificial Sequence
  Synthetic oligonucleotide; CAG chr2 60479383 60479402 60479399 +
tcaggtctagcatttccacg

SEQ ID NO: 160356 - DNA, 20 bp, Artificial Sequence
  Synthetic oligonucleotide; GAG chr2 60479396 60479415 60479412 +
ttccacgcagtcccaaccat

SEQ ID NO: 160357 - DNA, 20 bp, Artificial Sequence
  Synthetic oligonucleotide; AGG chr2 60479397 60479416 60479413 +
tccacgcagtcccaaccatg

SEQ ID NO: 160358 - DNA, 20 bp, Artificial Sequence
  Synthetic oligonucleotide; CAG chr2 60479405 60479424 60479421 +
gtcccaaccatgaggctgac

SEQ ID NO: 160359 - DNA, 20 bp, Artificial Sequence
  Synthetic oligonucleotide; GAG chr2 60479407 60479426 60479423 +
cccaaccatgaggctgacca

SEQ ID NO: 160360 - DNA, 20 bp, Artificial Sequence
  Synthetic oligonucleotide; AGG chr2 60479408 60479427 60479424 +
ccaaccatgaggctgaccag

SEQ ID NO: 160361 - DNA, 20 bp, Artificial Sequence
  Synthetic oligonucleotide; AAG chr2 60479422 60479441 60479438 +
gaccagaggccaccaacgtc

SEQ ID NO: 160362 - DNA, 20 bp, Artificial Sequence
  Synthetic oligonucleotide; CAG chr2 60479431 60479450 60479447 +
ccaccaacgtcaagctctct

SEQ ID NO: 160363 - DNA, 20 bp, Artificial Sequence
  Synthetic oligonucleotide; AGG chr2 60479432 60479451 60479448 +
caccaacgtcaagctctctc

SEQ ID NO: 160364 - DNA, 20 bp, Artificial Sequence
  Synthetic oligonucleotide; TAG chr2 60479440 60479459 60479456 +
tcaagctctctcaggtctac

SEQ ID NO: 160365 - DNA, 20 bp, Artificial Sequence
  Synthetic oligonucleotide; AGG chr2 60479441 60479460 60479457 +
caagctctctcaggtctact

SEQ ID NO: 160366 - DNA, 20 bp, Artificial Sequence
  Synthetic oligonucleotide; CAG chr2 60479446 60479465 60479462 +
tctctcaggtctactaggaa

SEQ ID NO: 160367 - DNA, 20 bp, Artificial Sequence
  Synthetic oligonucleotide; AGG chr2 60479447 60479466 60479463 +
ctctcaggtctactaggaac

SEQ ID NO: 160368 - DNA, 20 bp, Artificial Sequence
  Synthetic oligonucleotide; AAG chr2 60479451 60479470 60479467 +
caggtctactaggaacagga

SEQ ID NO: 160369 - DNA, 20 bp, Artificial Sequence
  Synthetic oligonucleotide; AAG chr2 60479471 60479490 60479487 +
aagaataactctcccttaac

SEQ ID NO: 160370 - DNA, 20 bp, Artificial Sequence
  Synthetic oligonucleotide; CAG chr2 60479479 60479498 60479495 +
ctctcccttaacaagcccct

SEQ ID NO: 160371 - DNA, 20 bp, Artificial Sequence
  Synthetic oligonucleotide; AGG chr2 60479480 60479499 60479496 +
tctcccttaacaagcccctc

SEQ ID NO: 160372 - DNA, 20 bp, Artificial Sequence
  Synthetic oligonucleotide; CAG chr2 60479501 60479520 60479517 +
ggctgaaatccttttgcttc

SEQ ID NO: 160373 - DNA, 20 bp, Artificial Sequence
  Synthetic oligonucleotide; AGG chr2 60479502 60479521 60479518 +
gctgaaatccttttgcttcc

SEQ ID NO: 160374 - DNA, 20 bp, Artificial Sequence
  Synthetic oligonucleotide; GGG chr2 60479503 60479522 60479519 +
ctgaaatccttttgcttcca

SEQ ID NO: 160375 - DNA, 20 bp, Artificial Sequence
  Synthetic oligonucleotide; TGG chr2 60479523 60479542 60479539 +
gggcctcaaccttctactgc

SEQ ID NO: 160376 - DNA, 20 bp, Artificial Sequence
  Synthetic oligonucleotide; GGG chr2 60479524 60479543 60479540 +
ggcctcaaccttctactgct

SEQ ID NO: 160377 - DNA, 20 bp, Artificial Sequence
  Synthetic oligonucleotide; TAG chr2 60479527 60479546 60479543 +
ctcaaccttctactgctggg

SEQ ID NO: 160378 - DNA, 20 bp, Artificial Sequence
  Synthetic oligonucleotide; AAG chr2 60479531 60479550 60479547 +
accttctactgctgggtaga

SEQ ID NO: 160379 - DNA, 20 bp, Artificial Sequence
  Synthetic oligonucleotide; CGG chr2 60479547 60479566 60479563 +
tagaaagccccctctgtcac

SEQ ID NO: 160380 - DNA, 20 bp, Artificial Sequence
  Synthetic oligonucleotide; CAG chr2 60479554 60479573 60479570 +
ccccctctgtcaccggccca

SEQ ID NO: 160381 - DNA, 20 bp, Artificial Sequence
  Synthetic oligonucleotide; CAG chr2 60479561 60479580 60479577 +
tgtcaccggcccacagatct

SEQ ID NO: 160382 - DNA, 20 bp, Artificial Sequence
  Synthetic oligonucleotide; CAG chr2 60479587 60479606 60479603 +
ccatcgcactcaaaccctgt

SEQ ID NO: 160383 - DNA, 20 bp, Artificial Sequence
  Synthetic oligonucleotide; AGG chr2 60479588 60479607 60479604 +
catcgcactcaaaccctgtc

SEQ ID NO: 160384 - DNA, 20 bp, Artificial Sequence
  Synthetic oligonucleotide; CGG chr2 60479591 60479610 60479607 +
cgcactcaaaccctgtcagg

SEQ ID NO: 160385 - DNA, 20 bp, Artificial Sequence
  Synthetic oligonucleotide; TGG chr2 60479594 60479613 60479610 +
actcaaaccctgtcaggcgg

SEQ ID NO: 160386 - DNA, 20 bp, Artificial Sequence
  Synthetic oligonucleotide; GAG chr2 60479596 60479615 60479612 +
tcaaaccctgtcaggcggtg

SEQ ID NO: 160387 - DNA, 20 bp, Artificial Sequence
  Synthetic oligonucleotide; GAG chr2 60479598 60479617 60479614 +
aaaccctgtcaggcggtgga

SEQ ID NO: 160388 - DNA, 20 bp, Artificial Sequence
  Synthetic oligonucleotide; TGG chr2 60479603 60479622 60479619 +
ctgtcaggcggtggagagtg

SEQ ID NO: 160389 - DNA, 20 bp, Artificial Sequence
  Synthetic oligonucleotide; CGG chr2 60479607 60479626 60479623 +
caggcggtggagagtgtgga

SEQ ID NO: 160390 - DNA, 20 bp, Artificial Sequence
  Synthetic oligonucleotide; CAG chr2 60479610 60479629 60479626 +
gcggtggagagtgtggacgg

SEQ ID NO: 160391 - DNA, 20 bp, Artificial Sequence
  Synthetic oligonucleotide; AGG chr2 60479611 60479630 60479627 +
cggtggagagtgtggacggc

SEQ ID NO: 160392 - DNA, 20 bp, Artificial Sequence
  Synthetic oligonucleotide; CGG chr2 60479620 60479639 60479636 +
gtgtggacggcaggctgacg

SEQ ID NO: 160393 - DNA, 20 bp, Artificial Sequence
  Synthetic oligonucleotide; AAG chr2 60479628 60479647 60479644 +
ggcaggctgacgcggtttca

SEQ ID NO: 160394 - DNA, 20 bp, Artificial Sequence
  Synthetic oligonucleotide; GAG chr2 60479630 60479649 60479646 +
caggctgacgcggtttcaaa

SEQ ID NO: 160395 - DNA, 20 bp, Artificial Sequence
  Synthetic oligonucleotide; AGG chr2 60479631 60479650 60479647 +
aggctgacgcggtttcaaag

SEQ ID NO: 160396 - DNA, 20 bp, Artificial Sequence
  Synthetic oligonucleotide; CAG chr2 60479639 60479658 60479655 +
gcggtttcaaagaggccgac

SEQ ID NO: 160397 - DNA, 20 bp, Artificial Sequence
  Synthetic oligonucleotide; AGG chr2 60479640 60479659 60479656 +
cggtttcaaagaggccgacc

SEQ ID NO: 160398 - DNA, 20 bp, Artificial Sequence
  Synthetic oligonucleotide; AAG chr2 60479644 60479663 60479660 +
ttcaaagaggccgaccaggc

SEQ ID NO: 160399 - DNA, 20 bp, Artificial Sequence
  Synthetic oligonucleotide; CAG chr2 60479668 60479687 60479684 +
accgtcctgtactcctgccc

SEQ ID NO: 160400 - DNA, 20 bp, Artificial Sequence
  Synthetic oligonucleotide; AAG chr2 60479708 60479727 60479724 +
gtcttttatcaatgtaattc

SEQ ID NO: 160401 - DNA, 20 bp, Artificial Sequence
  Synthetic oligonucleotide; AGG chr2 60479709 60479728 60479725 +
tcttttatcaatgtaattca

SEQ ID NO: 160402 - DNA, 20 bp, Artificial Sequence
  Synthetic oligonucleotide; AAG chr2 60479714 60479733 60479730 +
tatcaatgtaattcaaggca

SEQ ID NO: 160403 - DNA, 20 bp, Artificial Sequence
  Synthetic oligonucleotide; GAG chr2 60479716 60479735 60479732 +
tcaatgtaattcaaggcaaa

SEQ ID NO: 160404 - DNA, 20 bp, Artificial Sequence
  Synthetic oligonucleotide; AAG chr2 60479721 60479740 60479737 +
gtaattcaaggcaaagagtc

SEQ ID NO: 160405 - DNA, 20 bp, Artificial Sequence
  Synthetic oligonucleotide; AGG chr2 60479722 60479741 60479738 +
taattcaaggcaaagagtca

SEQ ID NO: 160406 - DNA, 20 bp, Artificial Sequence
  Synthetic oligonucleotide; GGG chr2 60479723 60479742 60479739 +
aattcaaggcaaagagtcaa

SEQ ID NO: 160407 - DNA, 20 bp, Artificial Sequence
  Synthetic oligonucleotide; AAG chr2 60479741 60479760 60479757 +
aagggtctgtcaccatttta

SEQ ID NO: 160408 - DNA, 20 bp, Artificial Sequence
  Synthetic oligonucleotide; GAG chr2 60479743 60479762 60479759 +
gggtctgtcaccattttaaa

SEQ ID NO: 160409 - DNA, 20 bp, Artificial Sequence
  Synthetic oligonucleotide; AGG chr2 60479744 60479763 60479760 +
ggtctgtcaccattttaaag

SEQ ID NO: 160410 - DNA, 20 bp, Artificial Sequence
  Synthetic oligonucleotide; TGG chr2 60479756 60479775 60479772 +
ttttaaagaggcttattaca

SEQ ID NO: 160411 - DNA, 20 bp, Artificial Sequence
  Synthetic oligonucleotide; CAG chr2 60479775 60479794 60479791 +
atggccacaaaaatttgcct

SEQ ID NO: 160412 - DNA, 20 bp, Artificial Sequence
  Synthetic oligonucleotide; AGG chr2 60479776 60479795 60479792 +
tggccacaaaaatttgcctc

SEQ ID NO: 160413 - DNA, 20 bp, Artificial Sequence
  Synthetic oligonucleotide; TGG chr2 60479787 60479806 60479803 +
atttgcctcaggctcaaacc

SEQ ID NO: 160414 - DNA, 20 bp, Artificial Sequence
  Synthetic oligonucleotide; AAG chr2 60479795 60479814 60479811 +
caggctcaaacctggcatgt

SEQ ID NO: 160415 - DNA, 20 bp, Artificial Sequence
  Synthetic oligonucleotide; AGG chr2 60479796 60479815 60479812 +
aggctcaaacctggcatgta

SEQ ID NO: 160416 - DNA, 20 bp, Artificial Sequence
  Synthetic oligonucleotide; CAG chr2 60479802 60479821 60479818 +
aaacctggcatgtaaggtat

SEQ ID NO: 160417 - DNA, 20 bp, Artificial Sequence
  Synthetic oligonucleotide; TGG chr2 60479807 60479826 60479823 +
tggcatgtaaggtatcagcg

SEQ ID NO: 160418 - DNA, 20 bp, Artificial Sequence
  Synthetic oligonucleotide; GGG chr2 60479808 60479827 60479824 +
ggcatgtaaggtatcagcgt

SEQ ID NO: 160419 - DNA, 20 bp, Artificial Sequence
  Synthetic oligonucleotide; CAG chr2 60479812 60479831 60479828 +
tgtaaggtatcagcgtggga

SEQ ID NO: 160420 - DNA, 20 bp, Artificial Sequence
  Synthetic oligonucleotide; AGG chr2 60479813 60479832 60479829 +
gtaaggtatcagcgtgggac

SEQ ID NO: 160421 - DNA, 20 bp, Artificial Sequence
  Synthetic oligonucleotide; TGG chr2 60479901 60479920 60479917 +
accaaccgttttttgattta

SEQ ID NO: 160422 - DNA, 20 bp, Artificial Sequence
  Synthetic oligonucleotide; GGG chr2 60479902 60479921 60479918 +
ccaaccgttttttgatttat

SEQ ID NO: 160423 - DNA, 20 bp, Artificial Sequence
  Synthetic oligonucleotide; GGG chr2 60479903 60479922 60479919 +
caaccgttttttgatttatg

SEQ ID NO: 160424 - DNA, 20 bp, Artificial Sequence
  Synthetic oligonucleotide; GAG chr2 60479905 60479924 60479921 +
accgttttttgatttatggg

SEQ ID NO: 160425 - DNA, 20 bp, Artificial Sequence
  Synthetic oligonucleotide; AGG chr2 60479906 60479925 60479922 +
ccgttttttgatttatgggg

SEQ ID NO: 160426 - DNA, 20 bp, Artificial Sequence
  Synthetic oligonucleotide; GAG chr2 60479908 60479927 60479924 +
gttttttgatttatggggag

SEQ ID NO: 160427 - DNA, 20 bp, Artificial Sequence
  Synthetic oligonucleotide; AGG chr2 60479909 60479928 60479925 +
ttttttgatttatggggagg

SEQ ID NO: 160428 - DNA, 20 bp, Artificial Sequence
  Synthetic oligonucleotide; AAG chr2 60479913 60479932 60479929 +
ttgatttatggggaggagga

SEQ ID NO: 160429 - DNA, 20 bp, Artificial Sequence
  Synthetic oligonucleotide; AAG chr2 60479923 60479942 60479939 +
gggaggaggaaagaaatctg

SEQ ID NO: 160430 - DNA, 20 bp, Artificial Sequence
  Synthetic oligonucleotide; CAG chr2 60479930 60479949 60479946 +
ggaaagaaatctgaagttga

SEQ ID NO: 160431 - DNA, 20 bp, Artificial Sequence
  Synthetic oligonucleotide; AGG chr2 60479931 60479950 60479947 +
gaaagaaatctgaagttgac

SEQ ID NO: 160432 - DNA, 20 bp, Artificial Sequence
  Synthetic oligonucleotide; TGG chr2 60479935 60479954 60479951 +
gaaatctgaagttgacaggt

SEQ ID NO: 160433 - DNA, 20 bp, Artificial Sequence
  Synthetic oligonucleotide; GGG chr2 60479936 60479955 60479952 +
aaatctgaagttgacaggtt

SEQ ID NO: 160434 - DNA, 20 bp, Artificial Sequence
  Synthetic oligonucleotide; CAG chr2 60479950 60479969 60479966 +
caggttgggacaactccact

SEQ ID NO: 160435 - DNA, 20 bp, Artificial Sequence
  Synthetic oligonucleotide; AAG chr2 60479966 60479985 60479982 +
cactcagctttctcactcaa

SEQ ID NO: 160436 - DNA, 20 bp, Artificial Sequence
  Synthetic oligonucleotide; TGG chr2 60479999 60480018 60480015 +
taaatcatactttgcattta

SEQ ID NO: 160437 - DNA, 20 bp, Artificial Sequence
  Synthetic oligonucleotide; CGG chr2 60480006 60480025 60480022 +
tactttgcatttatggcctg

SEQ ID NO: 160438 - DNA, 20 bp, Artificial Sequence
  Synthetic oligonucleotide; TGG chr2 60480013 60480032 60480029 +
catttatggcctgcggctct

SEQ ID NO: 160439 - DNA, 20 bp, Artificial Sequence
  Synthetic oligonucleotide; TGG chr2 60480023 60480042 60480039 +
ctgcggctcttggctgactt

SEQ ID NO: 160440 - DNA, 20 bp, Artificial Sequence
  Synthetic oligonucleotide; CGG chr2 60480026 60480045 60480042 +
cggctcttggctgactttgg

SEQ ID NO: 160441 - DNA, 20 bp, Artificial Sequence
  Synthetic oligonucleotide; CGG chr2 60480035 60480054 60480051 +
gctgactttggcggctcctc

SEQ ID NO: 160442 - DNA, 20 bp, Artificial Sequence
  Synthetic oligonucleotide; TGG chr2 60480040 60480059 60480056 +
ctttggcggctcctccggtg

SEQ ID NO: 160443 - DNA, 20 bp, Artificial Sequence
  Synthetic oligonucleotide; GAG chr2 60480042 60480061 60480058 +
ttggcggctcctccggtgtg

SEQ ID NO: 160444 - DNA, 20 bp, Artificial Sequence
  Synthetic oligonucleotide; AAG chr2 60480046 60480065 60480062 +
cggctcctccggtgtggagc

SEQ ID NO: 160445 - DNA, 20 bp, Artificial Sequence
  Synthetic oligonucleotide; TGG chr2 60480052 60480071 60480068 +
ctccggtgtggagcaagctg

SEQ ID NO: 160446 - DNA, 20 bp, Artificial Sequence
  Synthetic oligonucleotide; CGG chr2 60480062 60480081 60480078 +
gagcaagctgtggacttccc

SEQ ID NO: 160447 - DNA, 20 bp, Artificial Sequence
  Synthetic oligonucleotide; GGG chr2 60480063 60480082 60480079 +
agcaagctgtggacttcccc

SEQ ID NO: 160448 - DNA, 20 bp, Artificial Sequence
  Synthetic oligonucleotide; GAG chr2 60480065 60480084 60480081 +
caagctgtggacttccccgg

SEQ ID NO: 160449 - DNA, 20 bp, Artificial Sequence
  Synthetic oligonucleotide; AGG chr2 60480066 60480085 60480082 +
aagctgtggacttccccggg

SEQ ID NO: 160450 - DNA, 20 bp, Artificial Sequence
  Synthetic oligonucleotide; GAG chr2 60480068 60480087 60480084 +
gctgtggacttccccgggag

SEQ ID NO: 160451 - DNA, 20 bp, Artificial Sequence
  Synthetic oligonucleotide; AGG chr2 60480069 60480088 60480085 +
ctgtggacttccccgggagg

SEQ ID NO: 160452 - DNA, 20 bp, Artificial Sequence
  Synthetic oligonucleotide; GAG chr2 60480079 60480098 60480095 +
ccccgggaggaggccccact

SEQ ID NO: 160453 - DNA, 20 bp, Artificial Sequence
  Synthetic oligonucleotide; AAG chr2 60480103 60480122 60480119 +
tgactgccccactctgcacc

SEQ ID NO: 160454 - DNA, 20 bp, Artificial Sequence
  Synthetic oligonucleotide; AGG chr2 60480104 60480123 60480120 +
gactgccccactctgcacca

SEQ ID NO: 160455 - DNA, 20 bp, Artificial Sequence
  Synthetic oligonucleotide; CAG chr2 60480108 60480127 60480124 +
gccccactctgcaccaagga

SEQ ID NO: 160456 - DNA, 20 bp, Artificial Sequence
  Synthetic oligonucleotide; GAG chr2 60480112 60480131 60480128 +
cactctgcaccaaggacagc

SEQ ID NO: 160457 - DNA, 20 bp, Artificial Sequence
  Synthetic oligonucleotide; AGG chr2 60480113 60480132 60480129 +
actctgcaccaaggacagcg

SEQ ID NO: 160458 - DNA, 20 bp, Artificial Sequence
  Synthetic oligonucleotide; GAG chr2 60480115 60480134 60480131 +
tctgcaccaaggacagcgag

SEQ ID NO: 160459 - DNA, 20 bp, Artificial Sequence
  Synthetic oligonucleotide; AGG chr2 60480116 60480135 60480132 +
ctgcaccaaggacagcgagg

SEQ ID NO: 160460 - DNA, 20 bp, Artificial Sequence
  Synthetic oligonucleotide; GGG chr2 60480117 60480136 60480133 +
tgcaccaaggacagcgagga

SEQ ID NO: 160461 - DNA, 20 bp, Artificial Sequence
  Synthetic oligonucleotide; GGG chr2 60480118 60480137 60480134 +
gcaccaaggacagcgaggag

SEQ ID NO: 160462 - DNA, 20 bp, Artificial Sequence
  Synthetic oligonucleotide; GGG chr2 60480119 60480138 60480135 +
caccaaggacagcgaggagg

SEQ ID NO: 160463 - DNA, 20 bp, Artificial Sequence
  Synthetic oligonucleotide; GGG chr2 60480120 60480139 60480136 +
accaaggacagcgaggaggg

SEQ ID NO: 160464 - DNA, 20 bp, Artificial Sequence
  Synthetic oligonucleotide; AAG chr2 60480123 60480142 60480139 +
aaggacagcgaggagggggg

SEQ ID NO: 160465 - DNA, 20 bp, Artificial Sequence
  Synthetic oligonucleotide; AGG chr2 60480124 60480143 60480140 +
aggacagcgaggagggggga

SEQ ID NO: 160466 - DNA, 20 bp, Artificial Sequence
  Synthetic oligonucleotide; TGG chr2 60480127 60480146 60480143 +
acagcgaggaggggggaagg

SEQ ID NO: 160467 - DNA, 20 bp, Artificial Sequence
  Synthetic oligonucleotide; GGG chr2 60480128 60480147 60480144 +
cagcgaggaggggggaaggt

SEQ ID NO: 160468 - DNA, 20 bp, Artificial Sequence
  Synthetic oligonucleotide; GGG chr2 60480129 60480148 60480145 +
agcgaggaggggggaaggtg

SEQ ID NO: 160469 - DNA, 20 bp, Artificial Sequence
  Synthetic oligonucleotide; GGG chr2 60480130 60480149 60480146 +
gcgaggaggggggaaggtgg

SEQ ID NO: 160470 - DNA, 20 bp, Artificial Sequence
  Synthetic oligonucleotide; TGG chr2 60480133 60480152 60480149 +
aggaggggggaaggtggggg

SEQ ID NO: 160471 - DNA, 20 bp, Artificial Sequence
  Synthetic oligonucleotide; GAG chr2 60480135 60480154 60480151 +
gaggggggaaggtgggggtg

SEQ ID NO: 160472 - DNA, 20 bp, Artificial Sequence
  Synthetic oligonucleotide; AGG chr2 60480136 60480155 60480152 +
aggggggaaggtgggggtgg

SEQ ID NO: 160473 - DNA, 20 bp, Artificial Sequence
  Synthetic oligonucleotide; GAG chr2 60480138 60480157 60480154 +
gggggaaggtgggggtggag

SEQ ID NO: 160474 - DNA, 20 bp, Artificial Sequence
  Synthetic oligonucleotide; TGG chr2 60480142 60480161 60480158 +
gaaggtgggggtggaggagc

SEQ ID NO: 160475 - DNA, 20 bp, Artificial Sequence
  Synthetic oligonucleotide; GAG chr2 60480144 60480163 60480160 +
aggtgggggtggaggagctg

SEQ ID NO: 160476 - DNA, 20 bp, Artificial Sequence
  Synthetic oligonucleotide; AGG chr2 60480145 60480164 60480161 +
ggtgggggtggaggagctgg

SEQ ID NO: 160477 - DNA, 20 bp, Artificial Sequence
  Synthetic oligonucleotide; CAG chr2 60480149 60480168 60480165 +
ggggtggaggagctggaggc

SEQ ID NO: 160478 - DNA, 20 bp, Artificial Sequence
  Synthetic oligonucleotide; AGG chr2 60480150 60480169 60480166 +
gggtggaggagctggaggcc

SEQ ID NO: 160479 - DNA, 20 bp, Artificial Sequence
  Synthetic oligonucleotide; GGG chr2 60480151 60480170 60480167 +
ggtggaggagctggaggcca

SEQ ID NO: 160480 - DNA, 20 bp, Artificial Sequence
  Synthetic oligonucleotide; GGG chr2 60480152 60480171 60480168 +
gtggaggagctggaggccag

SEQ ID NO: 160481 - DNA, 20 bp, Artificial Sequence
  Synthetic oligonucleotide; GGG chr2 60480153 60480172 60480169 +
tggaggagctggaggccagg

SEQ ID NO: 160482 - DNA, 20 bp, Artificial Sequence
  Synthetic oligonucleotide; TGG chr2 60480157 60480176 60480173 +
ggagctggaggccagggggc

SEQ ID NO: 160483 - DNA, 20 bp, Artificial Sequence
  Synthetic oligonucleotide; GGG chr2 60480158 60480177 60480174 +
gagctggaggccagggggct

SEQ ID NO: 160484 - DNA, 20 bp, Artificial Sequence
  Synthetic oligonucleotide; GGG chr2 60480159 60480178 60480175 +
agctggaggccagggggctg

SEQ ID NO: 160485 - DNA, 20 bp, Artificial Sequence
  Synthetic oligonucleotide; AAG chr2 60480167 60480186 60480183 +
gccagggggctggggacatg

SEQ ID NO: 160486 - DNA, 20 bp, Artificial Sequence
  Synthetic oligonucleotide; AGG chr2 60480168 60480187 60480184 +
ccagggggctggggacatga

SEQ ID NO: 160487 - DNA, 20 bp, Artificial Sequence
  Synthetic oligonucleotide; TGG chr2 60480174 60480193 60480190 +
ggctggggacatgaaggcac

SEQ ID NO: 160488 - DNA, 20 bp, Artificial Sequence
  Synthetic oligonucleotide; TAG chr2 60480178 60480197 60480194 +
ggggacatgaaggcactggc

SEQ ID NO: 160489 - DNA, 20 bp, Artificial Sequence
  Synthetic oligonucleotide; AGG chr2 60480179 60480198 60480195 +
gggacatgaaggcactggct

SEQ ID NO: 160490 - DNA, 20 bp, Artificial Sequence
  Synthetic oligonucleotide; AAG chr2 60480189 60480208 60480205 +
ggcactggctaggtaacaca

SEQ ID NO: 160491 - DNA, 20 bp, Artificial Sequence
  Synthetic oligonucleotide; AGG chr2 60480190 60480209 60480206 +
gcactggctaggtaacacaa

SEQ ID NO: 160492 - DNA, 20 bp, Artificial Sequence
  Synthetic oligonucleotide; AAG chr2 60480199 60480218 60480215 +
aggtaacacaaaggcctgta

SEQ ID NO: 160493 - DNA, 20 bp, Artificial Sequence
  Synthetic oligonucleotide; AGG chr2 60480200 60480219 60480216 +
ggtaacacaaaggcctgtaa

SEQ ID NO: 160494 - DNA, 20 bp, Artificial Sequence
  Synthetic oligonucleotide; TGG chr2 60480223 60480242 60480239 +
atatgtctctcttctgaacc

SEQ ID NO: 160495 - DNA, 20 bp, Artificial Sequence
  Synthetic oligonucleotide; TGG chr2 60480245 60480264 60480261 +
gctctccactccatttctcc

SEQ ID NO: 160496 - DNA, 20 bp, Artificial Sequence
  Synthetic oligonucleotide; AAG chr2 60480252 60480271 60480268 +
actccatttctcctggatcc

SEQ ID NO: 160497 - DNA, 20 bp, Artificial Sequence
  Synthetic oligonucleotide; CAG chr2 60480267 60480286 60480283 +
gatccaagtctccctgtaat

SEQ ID NO: 160498 - DNA, 20 bp, Artificial Sequence
  Synthetic oligonucleotide; TGG chr2 60480284 60480303 60480300 +
aatcagcatgtatctaccac

SEQ ID NO: 160499 - DNA, 20 bp, Artificial Sequence
  Synthetic oligonucleotide; AAG chr2 60480299 60480318 60480315 +
accactggttctccaactaa

SEQ ID NO: 160500 - DNA, 20 bp, Artificial Sequence
  Synthetic oligonucleotide; AAG chr2 60480305 60480324 60480321 +
ggttctccaactaaaagttc

SEQ ID NO: 160501 - DNA, 20 bp, Artificial Sequence
  Synthetic oligonucleotide; AGG chr2 60480306 60480325 60480322 +
gttctccaactaaaagttca

SEQ ID NO: 160502 - DNA, 20 bp, Artificial Sequence
  Synthetic oligonucleotide; AAG chr2 60480314 60480333 60480330 +
actaaaagttcaaggcttct

SEQ ID NO: 160503 - DNA, 20 bp, Artificial Sequence
  Synthetic oligonucleotide; AAG chr2 60480321 60480340 60480337 +
gttcaaggcttctaagaacc

SEQ ID NO: 160504 - DNA, 20 bp, Artificial Sequence
  Synthetic oligonucleotide; CAG chr2 60480327 60480346 60480343 +
ggcttctaagaaccaagact

SEQ ID NO: 160505 - DNA, 20 bp, Artificial Sequence
  Synthetic oligonucleotide; TGG chr2 60480330 60480349 60480346 +
ttctaagaaccaagactcag

SEQ ID NO: 160506 - DNA, 20 bp, Artificial Sequence
  Synthetic oligonucleotide; CAG chr2 60480349 60480368 60480365 +
gtggtctacctctgactgtc

SEQ ID NO: 160507 - DNA, 20 bp, Artificial Sequence
  Synthetic oligonucleotide; TGG chr2 60480360 60480379 60480376 +
ctgactgtccagcaccatgc

SEQ ID NO: 160508 - DNA, 20 bp, Artificial Sequence
  Synthetic oligonucleotide; GGG chr2 60480361 60480380 60480377 +
tgactgtccagcaccatgct

SEQ ID NO: 160509 - DNA, 20 bp, Artificial Sequence
  Synthetic oligonucleotide; AAG chr2 60480366 60480385 60480382 +
gtccagcaccatgctgggca

SEQ ID NO: 160510 - DNA, 20 bp, Artificial Sequence
  Synthetic oligonucleotide; AAG chr2 60480369 60480388 60480385 +
cagcaccatgctgggcaaag

SEQ ID NO: 160511 - DNA, 20 bp, Artificial Sequence
  Synthetic oligonucleotide; GAG chr2 60480371 60480390 60480387 +
gcaccatgctgggcaaagaa

SEQ ID NO: 160512 - DNA, 20 bp, Artificial Sequence
  Synthetic oligonucleotide; TAG chr2 60480390 60480409 60480406 +
agagcccctcaataaataat

SEQ ID NO: 160513 - DNA, 20 bp, Artificial Sequence
  Synthetic oligonucleotide; AGG chr2 60480391 60480410 60480407 +
gagcccctcaataaataatt

SEQ ID NO: 160514 - DNA, 20 bp, Artificial Sequence
  Synthetic oligonucleotide; AAG chr2 60480398 60480417 60480414 +
tcaataaataattaggattc

SEQ ID NO: 160515 - DNA, 20 bp, Artificial Sequence
  Synthetic oligonucleotide; CAG chr2 60480408 60480427 60480424 +
attaggattcaagcgctgtg

SEQ ID NO: 160516 - DNA, 20 bp, Artificial Sequence
  Synthetic oligonucleotide; TGG chr2 60480428 60480447 60480444 +
cagtgaacttttcttcctgt

SEQ ID NO: 160517 - DNA, 20 bp, Artificial Sequence
  Synthetic oligonucleotide; GAG chr2 60480430 60480449 60480446 +
gtgaacttttcttcctgttg

SEQ ID NO: 160518 - DNA, 20 bp, Artificial Sequence
  Synthetic oligonucleotide; GAG chr2 60480432 60480451 60480448 +
gaacttttcttcctgttgga

SEQ ID NO: 160519 - DNA, 20 bp, Artificial Sequence
  Synthetic oligonucleotide; TGG chr2 60480450 60480469 60480466 +
gagagccattctaaatgacc

SEQ ID NO: 160520 - DNA, 20 bp, Artificial Sequence
  Synthetic oligonucleotide; TGG chr2 60480454 60480473 60480470 +
gccattctaaatgacctggc

SEQ ID NO: 160521 - DNA, 20 bp, Artificial Sequence
  Synthetic oligonucleotide; AAG chr2 60480457 60480476 60480473 +
attctaaatgacctggctgg

SEQ ID NO: 160522 - DNA, 20 bp, Artificial Sequence
  Synthetic oligonucleotide; AGG chr2 60480458 60480477 60480474 +
ttctaaatgacctggctgga

SEQ ID NO: 160523 - DNA, 20 bp, Artificial Sequence
  Synthetic oligonucleotide; CAG chr2 60480463 60480482 60480479 +
aatgacctggctggaaggac

SEQ ID NO: 160524 - DNA, 20 bp, Artificial Sequence
  Synthetic oligonucleotide; AGG chr2 60480464 60480483 60480480 +
atgacctggctggaaggacc

SEQ ID NO: 160525 - DNA, 20 bp, Artificial Sequence
  Synthetic oligonucleotide; TGG chr2 60480470 60480489 60480486 +
tggctggaaggaccaggcca

SEQ ID NO: 160526 - DNA, 20 bp, Artificial Sequence
  Synthetic oligonucleotide; GAG chr2 60480472 60480491 60480488 +
gctggaaggaccaggccatg

SEQ ID NO: 160527 - DNA, 20 bp, Artificial Sequence
  Synthetic oligonucleotide; CAG chr2 60480476 60480495 60480492 +
gaaggaccaggccatggagc

SEQ ID NO: 160528 - DNA, 20 bp, Artificial Sequence
  Synthetic oligonucleotide; CAG chr2 60480479 60480498 60480495 +
ggaccaggccatggagccag

SEQ ID NO: 160529 - DNA, 20 bp, Artificial Sequence
  Synthetic oligonucleotide; CAG chr2 60480486 60480505 60480502 +
gccatggagccagcagtgac

SEQ ID NO: 160530 - DNA, 20 bp, Artificial Sequence
  Synthetic oligonucleotide; AGG chr2 60480487 60480506 60480503 +
ccatggagccagcagtgacc

SEQ ID NO: 160531 - DNA, 20 bp, Artificial Sequence
  Synthetic oligonucleotide; GGG chr2 60480488 60480507 60480504 +
catggagccagcagtgacca

SEQ ID NO: 160532 - DNA, 20 bp, Artificial Sequence
  Synthetic oligonucleotide; GGG chr2 60480489 60480508 60480505 +
atggagccagcagtgaccag

SEQ ID NO: 160533 - DNA, 20 bp, Artificial Sequence
  Synthetic oligonucleotide; TAG chr2 60480502 60480521 60480518 +
tgaccaggggaaaccttccc

SEQ ID NO: 160534 - DNA, 20 bp, Artificial Sequence
  Synthetic oligonucleotide; AAG chr2 60480522 60480541 60480538 +
tagtaaatgattcactaacc

SEQ ID NO: 160535 - DNA, 20 bp, Artificial Sequence
  Synthetic oligonucleotide; AGG chr2 60480523 60480542 60480539 +
agtaaatgattcactaacca

SEQ ID NO: 160536 - DNA, 20 bp, Artificial Sequence
  Synthetic oligonucleotide; GAG chr2 60480525 60480544 60480541 +
taaatgattcactaaccaag

SEQ ID NO: 160537 - DNA, 20 bp, Artificial Sequence
  Synthetic oligonucleotide; TGG chr2 60480532 60480551 60480548 +
ttcactaaccaaggagcctc

SEQ ID NO: 160538 - DNA, 20 bp, Artificial Sequence
  Synthetic oligonucleotide; GGG chr2 60480533 60480552 60480549 +
tcactaaccaaggagcctct

SEQ ID NO: 160539 - DNA, 20 bp, Artificial Sequence
  Synthetic oligonucleotide; CAG chr2 60480537 60480556 60480553 +
taaccaaggagcctctgggt

SEQ ID NO: 160540 - DNA, 20 bp, Artificial Sequence
  Synthetic oligonucleotide; CAG chr2 60480548 60480567 60480564 +
cctctgggtcagccttgacc

SEQ ID NO: 160541 - DNA, 20 bp, Artificial Sequence
  Synthetic oligonucleotide; AGG chr2 60480549 60480568 60480565 +
ctctgggtcagccttgaccc

SEQ ID NO: 160542 - DNA, 20 bp, Artificial Sequence
  Synthetic oligonucleotide; GAG chr2 60480551 60480570 60480567 +
ctgggtcagccttgacccag

SEQ ID NO: 160543 - DNA, 20 bp, Artificial Sequence
  Synthetic oligonucleotide; GAG chr2 60480553 60480572 60480569 +
gggtcagccttgacccagga

SEQ ID NO: 160544 - DNA, 20 bp, Artificial Sequence
  Synthetic oligonucleotide; AGG chr2 60480554 60480573 60480570 +
ggtcagccttgacccaggag

SEQ ID NO: 160545 - DNA, 20 bp, Artificial Sequence
  Synthetic oligonucleotide; CAG chr2 60480561 60480580 60480577 +
cttgacccaggagaggatta

SEQ ID NO: 160546 - DNA, 20 bp, Artificial Sequence
  Synthetic oligonucleotide; AAG chr2 60480572 60480591 60480588 +
agaggattacagccccttga

SEQ ID NO: 160547 - DNA, 20 bp, Artificial Sequence
  Synthetic oligonucleotide; TGG chr2 60480575 60480594 60480591 +
ggattacagccccttgaaag

SEQ ID NO: 160548 - DNA, 20 bp, Artificial Sequence
  Synthetic oligonucleotide; TGG chr2 60480582 60480601 60480598 +
agccccttgaaagtggctgc

SEQ ID NO: 160549 - DNA, 20 bp, Artificial Sequence
  Synthetic oligonucleotide; TGG chr2 60480608 60480627 60480624 +
atcgcttcactgtactattt

SEQ ID NO: 160550 - DNA, 20 bp, Artificial Sequence
  Synthetic oligonucleotide; TAG chr2 60480621 60480640 60480637 +
actattttggcaatctgtaa

SEQ ID NO: 160551 - DNA, 20 bp, Artificial Sequence
  Synthetic oligonucleotide; TGG chr2 60480637 60480656 60480653 +
gtaatagtgtatttactcaa

SEQ ID NO: 160552 - DNA, 20 bp, Artificial Sequence
  Synthetic oligonucleotide; TGG chr2 60480646 60480665 60480662 +
tatttactcaatggttgtta

SEQ ID NO: 160553 - DNA, 20 bp, Artificial Sequence
  Synthetic oligonucleotide; CAG chr2 60480654 60480673 60480670 +
caatggttgttatggacaat

SEQ ID NO: 160554 - DNA, 20 bp, Artificial Sequence
  Synthetic oligonucleotide; AGG chr2 60480655 60480674 60480671 +
aatggttgttatggacaatc

SEQ ID NO: 160555 - DNA, 20 bp, Artificial Sequence
  Synthetic oligonucleotide; CAG chr2 60480693 60480712 60480709 +
ccaaatgctgtgtaattaca

SEQ ID NO: 160556 - DNA, 20 bp, Artificial Sequence
  Synthetic oligonucleotide; AAG chr2 60480700 60480719 60480716 +
ctgtgtaattacacagttaa

SEQ ID NO: 160557 - DNA, 20 bp, Artificial Sequence
  Synthetic oligonucleotide; GAG chr2 60480702 60480721 60480718 +
gtgtaattacacagttaaaa

SEQ ID NO: 160558 - DNA, 20 bp, Artificial Sequence
  Synthetic oligonucleotide; CAG chr2 60480708 60480727 60480724 +
ttacacagttaaaagagcta

SEQ ID NO: 160559 - DNA, 20 bp, Artificial Sequence
  Synthetic oligonucleotide; CGG chr2 60480711 60480730 60480727 +
cacagttaaaagagctacag

SEQ ID NO: 160560 - DNA, 20 bp, Artificial Sequence
  Synthetic oligonucleotide; AAG chr2 60480729 60480748 60480745 +
agcggatgtcaaatttcctt

SEQ ID NO: 160561 - DNA, 20 bp, Artificial Sequence
  Synthetic oligonucleotide; TGG chr2 60480737 60480756 60480753 +
tcaaatttccttaagtcttc

SEQ ID NO: 160562 - DNA, 20 bp, Artificial Sequence
  Synthetic oligonucleotide; TGG chr2 60480745 60480764 60480761 +
ccttaagtcttctggtgaat

SEQ ID NO: 160563 - DNA, 20 bp, Artificial Sequence
  Synthetic oligonucleotide; TAG chr2 60480758 60480777 60480774 +
ggtgaattggtctcaattac

SEQ ID NO: 160564 - DNA, 20 bp, Artificial Sequence
  Synthetic oligonucleotide; TGG chr2 60480763 60480782 60480779 +
attggtctcaattactagtc

SEQ ID NO: 160565 - DNA, 20 bp, Artificial Sequence
  Synthetic oligonucleotide; GGG chr2 60480764 60480783 60480780 +
ttggtctcaattactagtct

SEQ ID NO: 160566 - DNA, 20 bp, Artificial Sequence
  Synthetic oligonucleotide; TAG chr2 60480798 60480817 60480814 +
cttcctctctcaatttgttt

SEQ ID NO: 160567 - DNA, 20 bp, Artificial Sequence
  Synthetic oligonucleotide; AAG chr2 60480858 60480877 60480874 +
tgcacccccatctctgtccc

SEQ ID NO: 160568 - DNA, 20 bp, Artificial Sequence
  Synthetic oligonucleotide; GAG chr2 60480860 60480879 60480876 +
cacccccatctctgtcccaa

SEQ ID NO: 160569 - DNA, 20 bp, Artificial Sequence
  Synthetic oligonucleotide; AAG chr2 60480864 60480883 60480880 +
cccatctctgtcccaagaga

SEQ ID NO: 160570 - DNA, 20 bp, Artificial Sequence
  Synthetic oligonucleotide; CAG chr2 60480869 60480888 60480885 +
ctctgtcccaagagaaagaa

SEQ ID NO: 160571 - DNA, 20 bp, Artificial Sequence
  Synthetic oligonucleotide; AAG chr2 60480876 60480895 60480892 +
ccaagagaaagaacagtgtg

SEQ ID NO: 160572 - DNA, 20 bp, Artificial Sequence
  Synthetic oligonucleotide; TAG chr2 60480913 60480932 60480929 +
taatcctatttttgaactca

SEQ ID NO: 160573 - DNA, 20 bp, Artificial Sequence
  Synthetic oligonucleotide; TAG chr2 60480923 60480942 60480939 +
tttgaactcatagttctaaa

SEQ ID NO: 160574 - DNA, 20 bp, Artificial Sequence
  Synthetic oligonucleotide; AAG chr2 60480941 60480960 60480957 +
aatagtttttgctccactaa

SEQ ID NO: 160575 - DNA, 20 bp, Artificial Sequence
  Synthetic oligonucleotide; AGG chr2 60480942 60480961 60480958 +
atagtttttgctccactaaa

SEQ ID NO: 160576 - DNA, 20 bp, Artificial Sequence
  Synthetic oligonucleotide; GGG chr2 60480943 60480962 60480959 +
tagtttttgctccactaaaa

SEQ ID NO: 160577 - DNA, 20 bp, Artificial Sequence
  Synthetic oligonucleotide; AAG chr2 60480955 60480974 60480971 +
cactaaaagggcttaaaaat

SEQ ID NO: 160578 - DNA, 20 bp, Artificial Sequence
  Synthetic oligonucleotide; AGG chr2 60480956 60480975 60480972 +
actaaaagggcttaaaaata

SEQ ID NO: 160579 - DNA, 20 bp, Artificial Sequence
  Synthetic oligonucleotide; TAG chr2 60480960 60480979 60480976 +
aaagggcttaaaaataaggc

SEQ ID NO: 160580 - DNA, 20 bp, Artificial Sequence
  Synthetic oligonucleotide; AGG chr2 60480961 60480980 60480977 +
aagggcttaaaaataaggct

SEQ ID NO: 160581 - DNA, 20 bp, Artificial Sequence
  Synthetic oligonucleotide; AAG chr2 60480964 60480983 60480980 +
ggcttaaaaataaggctagg

SEQ ID NO: 160582 - DNA, 20 bp, Artificial Sequence
  Synthetic oligonucleotide; TAG chr2 60480968 60480987 60480984 +
taaaaataaggctaggaagc

SEQ ID NO: 160583 - DNA, 20 bp, Artificial Sequence
  Synthetic oligonucleotide; TGG chr2 60480974 60480993 60480990 +
taaggctaggaagctagacc

SEQ ID NO: 160584 - DNA, 20 bp, Artificial Sequence
  Synthetic oligonucleotide; GGG chr2 60480975 60480994 60480991 +
aaggctaggaagctagacct

SEQ ID NO: 160585 - DNA, 20 bp, Artificial Sequence
  Synthetic oligonucleotide; GAG chr2 60480977 60480996 60480993 +
ggctaggaagctagacctgg

SEQ ID NO: 160586 - DNA, 20 bp, Artificial Sequence
  Synthetic oligonucleotide; AGG chr2 60480978 60480997 60480994 +
gctaggaagctagacctggg

SEQ ID NO: 160587 - DNA, 20 bp, Artificial Sequence
  Synthetic oligonucleotide; GGG chr2 60480979 60480998 60480995 +
ctaggaagctagacctggga

SEQ ID NO: 160588 - DNA, 20 bp, Artificial Sequence
  Synthetic oligonucleotide; GGG chr2 60480980 60480999 60480996 +
taggaagctagacctgggag

SEQ ID NO: 160589 - DNA, 20 bp, Artificial Sequence
  Synthetic oligonucleotide; CAG chr2 60480988 60481007 60481004 +
tagacctgggaggggcatta

SEQ ID NO: 160590 - DNA, 20 bp, Artificial Sequence
  Synthetic oligonucleotide; AGG chr2 60480989 60481008 60481005 +
agacctgggaggggcattac

SEQ ID NO: 160591 - DNA, 20 bp, Artificial Sequence
  Synthetic oligonucleotide; TGG chr2 60480993 60481012 60481009 +
ctgggaggggcattacaggc

SEQ ID NO: 160592 - DNA, 20 bp, Artificial Sequence
  Synthetic oligonucleotide; TGG chr2 60480997 60481016 60481013 +
gaggggcattacaggctggc

SEQ ID NO: 160593 - DNA, 20 bp, Artificial Sequence
  Synthetic oligonucleotide; AAG chr2 60481000 60481019 60481016 +
gggcattacaggctggctgg

SEQ ID NO: 160594 - DNA, 20 bp, Artificial Sequence
  Synthetic oligonucleotide; CAG chr2 60481007 60481026 60481023 +
acaggctggctggaagcccc

SEQ ID NO: 160595 - DNA, 20 bp, Artificial Sequence
  Synthetic oligonucleotide; CAG chr2 60481024 60481043 60481040 +
ccccagctgcctccctgcct

SEQ ID NO: 160596 - DNA, 20 bp, Artificial Sequence
  Synthetic oligonucleotide; CAG chr2 60481030 60481049 60481046 +
ctgcctccctgcctcagatg

SEQ ID NO: 160597 - DNA, 20 bp, Artificial Sequence
  Synthetic oligonucleotide; AGG chr2 60481031 60481050 60481047 +
tgcctccctgcctcagatgc

SEQ ID NO: 160598 - DNA, 20 bp, Artificial Sequence
  Synthetic oligonucleotide; GGG chr2 60481032 60481051 60481048 +
gcctccctgcctcagatgca

SEQ ID NO: 160599 - DNA, 20 bp, Artificial Sequence
  Synthetic oligonucleotide; GAG chr2 60481034 60481053 60481050 +
ctccctgcctcagatgcagg

SEQ ID NO: 160600 - DNA, 20 bp, Artificial Sequence
  Synthetic oligonucleotide; CAG chr2 60481045 60481064 60481061 +
agatgcagggagaacacctg

SEQ ID NO: 160601 - DNA, 20 bp, Artificial Sequence
  Synthetic oligonucleotide; AAG chr2 60481068 60481087 60481084 +
ccacccacaccttgtcaccc

SEQ ID NO: 160602 - DNA, 20 bp, Artificial Sequence
  Synthetic oligonucleotide; TAG chr2 60481077 60481096 60481093 +
ccttgtcacccaagttgcac

SEQ ID NO: 160603 - DNA, 20 bp, Artificial Sequence
  Synthetic oligonucleotide; TGG chr2 60481084 60481103 60481100 +
acccaagttgcactagatcc

SEQ ID NO: 160604 - DNA, 20 bp, Artificial Sequence
  Synthetic oligonucleotide; CAG chr2 60481089 60481108 60481105 +
agttgcactagatcctggta

SEQ ID NO: 160605 - DNA, 20 bp, Artificial Sequence
  Synthetic oligonucleotide; CAG chr2 60481094 60481113 60481110 +
cactagatcctggtacagcc

SEQ ID NO: 160606 - DNA, 20 bp, Artificial Sequence
  Synthetic oligonucleotide; TGG chr2 60481097 60481116 60481113 +
tagatcctggtacagcccag

SEQ ID NO: 160607 - DNA, 20 bp, Artificial Sequence
  Synthetic oligonucleotide; TGG chr2 60481100 60481119 60481116 +
atcctggtacagcccagtgg

SEQ ID NO: 160608 - DNA, 20 bp, Artificial Sequence
  Synthetic oligonucleotide; CAG chr2 60481106 60481125 60481122 +
gtacagcccagtggtggccg

SEQ ID NO: 160609 - DNA, 20 bp, Artificial Sequence
  Synthetic oligonucleotide; CAG chr2 60481111 60481130 60481127 +
gcccagtggtggccgcagct

SEQ ID NO: 160610 - DNA, 20 bp, Artificial Sequence
  Synthetic oligonucleotide; AGG chr2 60481112 60481131 60481128 +
cccagtggtggccgcagctc

SEQ ID NO: 160611 - DNA, 20 bp, Artificial Sequence
  Synthetic oligonucleotide; GGG chr2 60481113 60481132 60481129 +
ccagtggtggccgcagctca

SEQ ID NO: 160612 - DNA, 20 bp, Artificial Sequence
  Synthetic oligonucleotide; AAG chr2 60481116 60481135 60481132 +
gtggtggccgcagctcaggg

SEQ ID NO: 160613 - DNA, 20 bp, Artificial Sequence
  Synthetic oligonucleotide; AAG chr2 60481120 60481139 60481136 +
tggccgcagctcagggaaga

SEQ ID NO: 160614 - DNA, 20 bp, Artificial Sequence
  Synthetic oligonucleotide; AAG chr2 60481123 60481142 60481139 +
ccgcagctcagggaagaaag

SEQ ID NO: 160615 - DNA, 20 bp, Artificial Sequence
  Synthetic oligonucleotide; AGG chr2 60481124 60481143 60481140 +
cgcagctcagggaagaaaga

SEQ ID NO: 160616 - DNA, 20 bp, Artificial Sequence
  Synthetic oligonucleotide; AAG chr2 60481129 60481148 60481145 +
ctcagggaagaaagaaggca

SEQ ID NO: 160617 - DNA, 20 bp, Artificial Sequence
  Synthetic oligonucleotide; AAG chr2 60481145 60481164 60481161 +
ggcaaagccctgctgtgctc

SEQ ID NO: 160618 - DNA, 20 bp, Artificial Sequence
  Synthetic oligonucleotide; AGG chr2 60481146 60481165 60481162 +
gcaaagccctgctgtgctca

SEQ ID NO: 160619 - DNA, 20 bp, Artificial Sequence
  Synthetic oligonucleotide; GAG chr2 60481148 60481167 60481164 +
aaagccctgctgtgctcaag

SEQ ID NO: 160620 - DNA, 20 bp, Artificial Sequence
  Synthetic oligonucleotide; GAG chr2 60481154 60481173 60481170 +
ctgctgtgctcaaggagatt

SEQ ID NO: 160621 - DNA, 20 bp, Artificial Sequence
  Synthetic oligonucleotide; AGG chr2 60481155 60481174 60481171 +
tgctgtgctcaaggagattg

SEQ ID NO: 160622 - DNA, 20 bp, Artificial Sequence
  Synthetic oligonucleotide; CAG chr2 60481163 60481182 60481179 +
tcaaggagattgaggcttcc

SEQ ID NO: 160623 - DNA, 20 bp, Artificial Sequence
  Synthetic oligonucleotide; TGG chr2 60481175 60481194 60481191 +
aggcttcccagccccaaaac

SEQ ID NO: 160624 - DNA, 20 bp, Artificial Sequence
  Synthetic oligonucleotide; GGG chr2 60481176 60481195 60481192 +
ggcttcccagccccaaaact

SEQ ID NO: 160625 - DNA, 20 bp, Artificial Sequence
  Synthetic oligonucleotide; AAG chr2 60481179 60481198 60481195 +
ttcccagccccaaaactggg

SEQ ID NO: 160626 - DNA, 20 bp, Artificial Sequence
  Synthetic oligonucleotide; AGG chr2 60481180 60481199 60481196 +
tcccagccccaaaactggga

SEQ ID NO: 160627 - DNA, 20 bp, Artificial Sequence
  Synthetic oligonucleotide; GGG chr2 60481181 60481200 60481197 +
cccagccccaaaactgggaa

SEQ ID NO: 160628 - DNA, 20 bp, Artificial Sequence
  Synthetic oligonucleotide; TGG chr2 60481187 60481206 60481203 +
cccaaaactgggaagggccc

SEQ ID NO: 160629 - DNA, 20 bp, Artificial Sequence
  Synthetic oligonucleotide; TGG chr2 60481192 60481211 60481208 +
aactgggaagggccctggaa

SEQ ID NO: 160630 - DNA, 20 bp, Artificial Sequence
  Synthetic oligonucleotide; GGG chr2 60481193 60481212 60481209 +
actgggaagggccctggaat

SEQ ID NO: 160631 - DNA, 20 bp, Artificial Sequence
  Synthetic oligonucleotide; CAG chr2 60481212 60481231 60481228 +
tgggatatcccctcccctcc

SEQ ID NO: 160632 - DNA, 20 bp, Artificial Sequence
  Synthetic oligonucleotide; TAG chr2 60481232 60481251 60481248 +
cagcaccccattcccaaacc

SEQ ID NO: 160633 - DNA, 20 bp, Artificial Sequence
  Synthetic oligonucleotide; TGG chr2 60481250 60481269 60481266 +
cctagccacccatctctgct

SEQ ID NO: 160634 - DNA, 20 bp, Artificial Sequence
  Synthetic oligonucleotide; GGG chr2 60481251 60481270 60481267 +
ctagccacccatctctgctt

SEQ ID NO: 160635 - DNA, 20 bp, Artificial Sequence
  Synthetic oligonucleotide; TGG chr2 60481260 60481279 60481276 +
catctctgcttgggacatgc

SEQ ID NO: 160636 - DNA, 20 bp, Artificial Sequence
  Synthetic oligonucleotide; AAG chr2 60481263 60481282 60481279 +
ctctgcttgggacatgctgg

SEQ ID NO: 160637 - DNA, 20 bp, Artificial Sequence
  Synthetic oligonucleotide; AGG chr2 60481264 60481283 60481280 +
tctgcttgggacatgctgga

SEQ ID NO: 160638 - DNA, 20 bp, Artificial Sequence
  Synthetic oligonucleotide; AAG chr2 60481268 60481287 60481284 +
cttgggacatgctggaaggc

SEQ ID NO: 160639 - DNA, 20 bp, Artificial Sequence
  Synthetic oligonucleotide; AAG chr2 60481271 60481290 60481287 +
gggacatgctggaaggcaag

SEQ ID NO: 160640 - DNA, 20 bp, Artificial Sequence
  Synthetic oligonucleotide; GAG chr2 60481273 60481292 60481289 +
gacatgctggaaggcaagaa

SEQ ID NO: 160641 - DNA, 20 bp, Artificial Sequence
  Synthetic oligonucleotide; GAG chr2 60481275 60481294 60481291 +
catgctggaaggcaagaaga

SEQ ID NO: 160642 - DNA, 20 bp, Artificial Sequence
  Synthetic oligonucleotide; AAG chr2 60481282 60481301 60481298 +
gaaggcaagaagagagaaac

SEQ ID NO: 160643 - DNA, 20 bp, Artificial Sequence
  Synthetic oligonucleotide; AAG chr2 60481307 60481326 60481323 +
actccttgaaaacaaaaatg

SEQ ID NO: 160644 - DNA, 20 bp, Artificial Sequence
  Synthetic oligonucleotide; CAG chr2 60481310 60481329 60481326 +
ccttgaaaacaaaaatgaag

SEQ ID NO: 160645 - DNA, 20 bp, Artificial Sequence
  Synthetic oligonucleotide; AGG chr2 60481311 60481330 60481327 +
cttgaaaacaaaaatgaagc

SEQ ID NO: 160646 - DNA, 20 bp, Artificial Sequence
  Synthetic oligonucleotide; GGG chr2 60481312 60481331 60481328 +
ttgaaaacaaaaatgaagca

SEQ ID NO: 160647 - DNA, 20 bp, Artificial Sequence
  Synthetic oligonucleotide; TAG chr2 60481319 60481338 60481335 +
caaaaatgaagcagggatcc

SEQ ID NO: 160648 - DNA, 20 bp, Artificial Sequence
  Synthetic oligonucleotide; AGG chr2 60481320 60481339 60481336 +
aaaaatgaagcagggatcct

SEQ ID NO: 160649 - DNA, 20 bp, Artificial Sequence
  Synthetic oligonucleotide; AAG chr2 60481325 60481344 60481341 +
tgaagcagggatcctaggaa

SEQ ID NO: 160650 - DNA, 20 bp, Artificial Sequence
  Synthetic oligonucleotide; CAG chr2 60481338 60481357 60481354 +
ctaggaaaagtaaaaacatt

SEQ ID NO: 160651 - DNA, 20 bp, Artificial Sequence
  Synthetic oligonucleotide; CAG chr2 60481345 60481364 60481361 +
aagtaaaaacattcagaacc

SEQ ID NO: 160652 - DNA, 20 bp, Artificial Sequence
  Synthetic oligonucleotide; AGG chr2 60481346 60481365 60481362 +
agtaaaaacattcagaaccc

SEQ ID NO: 160653 - DNA, 20 bp, Artificial Sequence
  Synthetic oligonucleotide; GGG chr2 60481347 60481366 60481363 +
gtaaaaacattcagaaccca

SEQ ID NO: 160654 - DNA, 20 bp, Artificial Sequence
  Synthetic oligonucleotide; CAG chr2 60481378 60481397 60481394 +
ctgtctcccacgacctacac

SEQ ID NO: 160655 - DNA, 20 bp, Artificial Sequence
  Synthetic oligonucleotide; AGG chr2 60481379 60481398 60481395 +
tgtctcccacgacctacacc

SEQ ID NO: 160656 - DNA, 20 bp, Artificial Sequence
  Synthetic oligonucleotide; CGG chr2 60481402 60481421 60481418 +
cccttcgcacctctgctttg

SEQ ID NO: 160657 - DNA, 20 bp, Artificial Sequence
  Synthetic oligonucleotide; AAG chr2 60481433 60481452 60481449 +
cactacaccccacccaccac

SEQ ID NO: 160658 - DNA, 20 bp, Artificial Sequence
  Synthetic oligonucleotide; CAG chr2 60481452 60481471 60481468 +
caagcacatacacatgctct

SEQ ID NO: 160659 - DNA, 20 bp, Artificial Sequence
  Synthetic oligonucleotide; AGG chr2 60481453 60481472 60481469 +
aagcacatacacatgctctc

SEQ ID NO: 160660 - DNA, 20 bp, Artificial Sequence
  Synthetic oligonucleotide; GAG chr2 60481455 60481474 60481471 +
gcacatacacatgctctcag

SEQ ID NO: 160661 - DNA, 20 bp, Artificial Sequence
  Synthetic oligonucleotide; CAG chr2 60481459 60481478 60481475 +
atacacatgctctcaggagt

SEQ ID NO: 160662 - DNA, 20 bp, Artificial Sequence
  Synthetic oligonucleotide; GAG chr2 60481461 60481480 60481477 +
acacatgctctcaggagtca

SEQ ID NO: 160663 - DNA, 20 bp, Artificial Sequence
  Synthetic oligonucleotide; AGG chr2 60481462 60481481 60481478 +
cacatgctctcaggagtcag

SEQ ID NO: 160664 - DNA, 20 bp, Artificial Sequence
  Synthetic oligonucleotide; GGG chr2 60481463 60481482 60481479 +
acatgctctcaggagtcaga

SEQ ID NO: 160665 - DNA, 20 bp, Artificial Sequence
  Synthetic oligonucleotide; CAG chr2 60481471 60481490 60481487 +
tcaggagtcagagggtcacc

SEQ ID NO: 160666 - DNA, 20 bp, Artificial Sequence
  Synthetic oligonucleotide; AGG chr2 60481472 60481491 60481488 +
caggagtcagagggtcaccc

SEQ ID NO: 160667 - DNA, 20 bp, Artificial Sequence
  Synthetic oligonucleotide; GGG chr2 60481473 60481492 60481489 +
aggagtcagagggtcaccca

SEQ ID NO: 160668 - DNA, 20 bp, Artificial Sequence
  Synthetic oligonucleotide; TAG chr2 60481477 60481496 60481493 +
gtcagagggtcacccagggc

SEQ ID NO: 160669 - DNA, 20 bp, Artificial Sequence
  Synthetic oligonucleotide; AAG chr2 60481485 60481504 60481501 +
gtcacccagggctagaactt

SEQ ID NO: 160670 - DNA, 20 bp, Artificial Sequence
  Synthetic oligonucleotide; CAG chr2 60481493 60481512 60481509 +
gggctagaacttaagccacc

SEQ ID NO: 160671 - DNA, 20 bp, Artificial Sequence
  Synthetic oligonucleotide; AAG chr2 60481501 60481520 60481517 +
acttaagccacccagcccac

SEQ ID NO: 160672 - DNA, 20 bp, Artificial Sequence
  Synthetic oligonucleotide; TGG chr2 60481505 60481524 60481521 +
aagccacccagcccacaagc

SEQ ID NO: 160673 - DNA, 20 bp, Artificial Sequence
  Synthetic oligonucleotide; CAG chr2 60481508 60481527 60481524 +
ccacccagcccacaagctgg

SEQ ID NO: 160674 - DNA, 20 bp, Artificial Sequence
  Synthetic oligonucleotide; AGG chr2 60481509 60481528 60481525 +
cacccagcccacaagctggc

SEQ ID NO: 160675 - DNA, 20 bp, Artificial Sequence
  Synthetic oligonucleotide; AAG chr2 60481514 60481533 60481530 +
agcccacaagctggcaggtg

SEQ ID NO: 160676 - DNA, 20 bp, Artificial Sequence
  Synthetic oligonucleotide; AGG chr2 60481515 60481534 60481531 +
gcccacaagctggcaggtga

SEQ ID NO: 160677 - DNA, 20 bp, Artificial Sequence
  Synthetic oligonucleotide; GAG chr2 60481517 60481536 60481533 +
ccacaagctggcaggtgaag

SEQ ID NO: 160678 - DNA, 20 bp, Artificial Sequence
  Synthetic oligonucleotide; AGG chr2 60481518 60481537 60481534 +
cacaagctggcaggtgaagg

SEQ ID NO: 160679 - DNA, 20 bp, Artificial Sequence
  Synthetic oligonucleotide; CAG chr2 60481522 60481541 60481538 +
agctggcaggtgaaggagga

SEQ ID NO: 160680 - DNA, 20 bp, Artificial Sequence
  Synthetic oligonucleotide; AGG chr2 60481523 60481542 60481539 +
gctggcaggtgaaggaggac

SEQ ID NO: 160681 - DNA, 20 bp, Artificial Sequence
  Synthetic oligonucleotide; GGG chr2 60481524 60481543 60481540 +
ctggcaggtgaaggaggaca

SEQ ID NO: 160682 - DNA, 20 bp, Artificial Sequence
  Synthetic oligonucleotide; AAG chr2 60481530 60481549 60481546 +
ggtgaaggaggacagggatc

SEQ ID NO: 160683 - DNA, 20 bp, Artificial Sequence
  Synthetic oligonucleotide; AGG chr2 60481531 60481550 60481547 +
gtgaaggaggacagggatca

SEQ ID NO: 160684 - DNA, 20 bp, Artificial Sequence
  Synthetic oligonucleotide; CAG chr2 60481537 60481556 60481553 +
gaggacagggatcaaggtga

SEQ ID NO: 160685 - DNA, 20 bp, Artificial Sequence
  Synthetic oligonucleotide; TGG chr2 60481552 60481571 60481568 +
ggtgacagtgctgtccacgc

SEQ ID NO: 160686 - DNA, 20 bp, Artificial Sequence
  Synthetic oligonucleotide; TGG chr2 60481559 60481578 60481575 +
gtgctgtccacgctggcccc

SEQ ID NO: 160687 - DNA, 20 bp, Artificial Sequence
  Synthetic oligonucleotide; AAG chr2 60481564 60481583 60481580 +
gtccacgctggcccctggct

SEQ ID NO: 160688 - DNA, 20 bp, Artificial Sequence
  Synthetic oligonucleotide; GAG chr2 60481566 60481585 60481582 +
ccacgctggcccctggctaa

SEQ ID NO: 160689 - DNA, 20 bp, Artificial Sequence
  Synthetic oligonucleotide; CAG chr2 60481575 60481594 60481591 +
cccctggctaagagcaactg

SEQ ID NO: 160690 - DNA, 20 bp, Artificial Sequence
  Synthetic oligonucleotide; CAG chr2 60481578 60481597 60481594 +
ctggctaagagcaactgcag

SEQ ID NO: 160691 - DNA, 20 bp, Artificial Sequence
  Synthetic oligonucleotide; CAG chr2 60481584 60481603 60481600 +
aagagcaactgcagcagaaa

SEQ ID NO: 160692 - DNA, 20 bp, Artificial Sequence
  Synthetic oligonucleotide; TGG chr2 60481606 60481625 60481622 +
gtgtttcttctccatttcca

SEQ ID NO: 160693 - DNA, 20 bp, Artificial Sequence
  Synthetic oligonucleotide; CAG chr2 60481678 60481697 60481694 +
tttcttttccccacatgctc

SEQ ID NO: 160694 - DNA, 20 bp, Artificial Sequence
  Synthetic oligonucleotide; CAG chr2 60481692 60481711 60481708 +
atgctccagcacatacaact

SEQ ID NO: 160695 - DNA, 20 bp, Artificial Sequence
  Synthetic oligonucleotide; AGG chr2 60481693 60481712 60481709 +
tgctccagcacatacaactc

SEQ ID NO: 160696 - DNA, 20 bp, Artificial Sequence
  Synthetic oligonucleotide; GGG chr2 60481694 60481713 60481710 +
gctccagcacatacaactca

SEQ ID NO: 160697 - DNA, 20 bp, Artificial Sequence
  Synthetic oligonucleotide; CAG chr2 60481700 60481719 60481716 +
gcacatacaactcagggctc

SEQ ID NO: 160698 - DNA, 20 bp, Artificial Sequence
  Synthetic oligonucleotide; AAG chr2 60481709 60481728 60481725 +
actcagggctccagtgtttt

SEQ ID NO: 160699 - DNA, 20 bp, Artificial Sequence
  Synthetic oligonucleotide; AGG chr2 60481710 60481729 60481726 +
ctcagggctccagtgtttta

SEQ ID NO: 160700 - DNA, 20 bp, Artificial Sequence
  Synthetic oligonucleotide; GGG chr2 60481711 60481730 60481727 +
tcagggctccagtgttttaa

SEQ ID NO: 160701 - DNA, 20 bp, Artificial Sequence
  Synthetic oligonucleotide; AAG chr2 60481728 60481747 60481744 +
taagggcattttttttccac

SEQ ID NO: 160702 - DNA, 20 bp, Artificial Sequence
  Synthetic oligonucleotide; GAG chr2 60481732 60481751 60481748 +
ggcattttttttccacaagt

SEQ ID NO: 160703 - DNA, 20 bp, Artificial Sequence
  Synthetic oligonucleotide; CAG chr2 60481748 60481767 60481764 +
aagtgagattaattttctaa

SEQ ID NO: 160704 - DNA, 20 bp, Artificial Sequence
  Synthetic oligonucleotide; TAG chr2 60481756 60481775 60481772 +
ttaattttctaacagaaccc

SEQ ID NO: 160705 - DNA, 20 bp, Artificial Sequence
  Synthetic oligonucleotide; TGG chr2 60481773 60481792 60481789 +
ccctagtacattctgtgtga

SEQ ID NO: 160706 - DNA, 20 bp, Artificial Sequence
  Synthetic oligonucleotide; TGG chr2 60481776 60481795 60481792 +
tagtacattctgtgtgatgg

SEQ ID NO: 160707 - DNA, 20 bp, Artificial Sequence
  Synthetic oligonucleotide; GGG chr2 60481777 60481796 60481793 +
agtacattctgtgtgatggt

SEQ ID NO: 160708 - DNA, 20 bp, Artificial Sequence
  Synthetic oligonucleotide; GAG chr2 60481779 60481798 60481795 +
tacattctgtgtgatggtgg

SEQ ID NO: 160709 - DNA, 20 bp, Artificial Sequence
  Synthetic oligonucleotide; GAG chr2 60481781 60481800 60481797 +
cattctgtgtgatggtggga

SEQ ID NO: 160710 - DNA, 20 bp, Artificial Sequence
  Synthetic oligonucleotide; CAG chr2 60481798 60481817 60481814 +
ggagagccttttgaccatca

SEQ ID NO: 160711 - DNA, 20 bp, Artificial Sequence
  Synthetic oligonucleotide; TGG chr2 60481806 60481825 60481822 +
ttttgaccatcacagtgtcc

SEQ ID NO: 160712 - DNA, 20 bp, Artificial Sequence
  Synthetic oligonucleotide; GAG chr2 60481812 60481831 60481828 +
ccatcacagtgtcctggaat

SEQ ID NO: 160713 - DNA, 20 bp, Artificial Sequence
  Synthetic oligonucleotide; CAG chr2 60481817 60481836 60481833 +
acagtgtcctggaatgagct

SEQ ID NO: 160714 - DNA, 20 bp, Artificial Sequence
  Synthetic oligonucleotide; TGG chr2 60481829 60481848 60481845 +
aatgagctcagcatgctctc

SEQ ID NO: 160715 - DNA, 20 bp, Artificial Sequence
  Synthetic oligonucleotide; GGG chr2 60481830 60481849 60481846 +
atgagctcagcatgctctct

SEQ ID NO: 160716 - DNA, 20 bp, Artificial Sequence
  Synthetic oligonucleotide; AAG chr2 60481833 60481852 60481849 +
agctcagcatgctctctggg

SEQ ID NO: 160717 - DNA, 20 bp, Artificial Sequence
  Synthetic oligonucleotide; TGG chr2 60481841 60481860 60481857 +
atgctctctgggaagtgaat

SEQ ID NO: 160718 - DNA, 20 bp, Artificial Sequence
  Synthetic oligonucleotide; GGG chr2 60481842 60481861 60481858 +
tgctctctgggaagtgaatt

SEQ ID NO: 160719 - DNA, 20 bp, Artificial Sequence
  Synthetic oligonucleotide; AAG chr2 60481846 60481865 60481862 +
ctctgggaagtgaattggga

SEQ ID NO: 160720 - DNA, 20 bp, Artificial Sequence
  Synthetic oligonucleotide; TGG chr2 60481853 60481872 60481869 +
aagtgaattgggaaagtgaa

SEQ ID NO: 160721 - DNA, 20 bp, Artificial Sequence
  Synthetic oligonucleotide; GGG chr2 60481854 60481873 60481870 +
agtgaattgggaaagtgaat

SEQ ID NO: 160722 - DNA, 20 bp, Artificial Sequence
  Synthetic oligonucleotide; GGG chr2 60481855 60481874 60481871 +
gtgaattgggaaagtgaatg

SEQ ID NO: 160723 - DNA, 20 bp, Artificial Sequence
  Synthetic oligonucleotide; AAG chr2 60481860 60481879 60481876 +
ttgggaaagtgaatggggaa

SEQ ID NO: 160724 - DNA, 20 bp, Artificial Sequence
  Synthetic oligonucleotide; CAG chr2 60481873 60481892 60481889 +
tggggaaaagcctcaacaca

SEQ ID NO: 160725 - DNA, 20 bp, Artificial Sequence
  Synthetic oligonucleotide; CAG chr2 60481877 60481896 60481893 +
gaaaagcctcaacacacaga

SEQ ID NO: 160726 - DNA, 20 bp, Artificial Sequence
  Synthetic oligonucleotide; TGG chr2 60481885 60481904 60481901 +
tcaacacacagacagcccca

SEQ ID NO: 160727 - DNA, 20 bp, Artificial Sequence
  Synthetic oligonucleotide; CAG chr2 60481897 60481916 60481913 +
cagccccatggaaaattctc

SEQ ID NO: 160728 - DNA, 20 bp, Artificial Sequence
  Synthetic oligonucleotide; CAG chr2 60481902 60481921 60481918 +
ccatggaaaattctccagct

SEQ ID NO: 160729 - DNA, 20 bp, Artificial Sequence
  Synthetic oligonucleotide; AGG chr2 60481903 60481922 60481919 +
catggaaaattctccagctc

SEQ ID NO: 160730 - DNA, 20 bp, Artificial Sequence
  Synthetic oligonucleotide; TAG chr2 60481915 60481934 60481931 +
tccagctcaggaaacccacc

SEQ ID NO: 160731 - DNA, 20 bp, Artificial Sequence
  Synthetic oligonucleotide; AGG chr2 60481916 60481935 60481932 +
ccagctcaggaaacccacct

SEQ ID NO: 160732 - DNA, 20 bp, Artificial Sequence
  Synthetic oligonucleotide; TAG chr2 60481921 60481940 60481937 +
tcaggaaacccacctaggta

SEQ ID NO: 160733 - DNA, 20 bp, Artificial Sequence
  Synthetic oligonucleotide; GAG chr2 60481923 60481942 60481939 +
aggaaacccacctaggtata

SEQ ID NO: 160734 - DNA, 20 bp, Artificial Sequence
  Synthetic oligonucleotide; CGG chr2 60481934 60481953 60481950 +
ctaggtatagagaccttctc

SEQ ID NO: 160735 - DNA, 20 bp, Artificial Sequence
  Synthetic oligonucleotide; TGG chr2 60481943 60481962 60481959 +
gagaccttctccggaacctc

SEQ ID NO: 160736 - DNA, 20 bp, Artificial Sequence
  Synthetic oligonucleotide; TAG chr2 60481953 60481972 60481969 +
ccggaacctctggtctgttc

SEQ ID NO: 160737 - DNA, 20 bp, Artificial Sequence
  Synthetic oligonucleotide; AAG chr2 60481968 60481987 60481984 +
tgttctagtcctgctgtcaa

SEQ ID NO: 160738 - DNA, 20 bp, Artificial Sequence
  Synthetic oligonucleotide; AAG chr2 60481972 60481991 60481988 +
ctagtcctgctgtcaaaaga

SEQ ID NO: 160739 - DNA, 20 bp, Artificial Sequence
  Synthetic oligonucleotide; AGG chr2 60481973 60481992 60481989 +
tagtcctgctgtcaaaagaa

SEQ ID NO: 160740 - DNA, 20 bp, Artificial Sequence
  Synthetic oligonucleotide; GGG chr2 60481974 60481993 60481990 +
agtcctgctgtcaaaagaaa

SEQ ID NO: 160741 - DNA, 20 bp, Artificial Sequence
  Synthetic oligonucleotide; GGG chr2 60481975 60481994 60481991 +
gtcctgctgtcaaaagaaag

SEQ ID NO: 160742 - DNA, 20 bp, Artificial Sequence
  Synthetic oligonucleotide; TGG chr2 60481979 60481998 60481995 +
tgctgtcaaaagaaaggggt

SEQ ID NO: 160743 - DNA, 20 bp, Artificial Sequence
  Synthetic oligonucleotide; CAG chr2 60481994 60482013 60482010 +
ggggttggactgatgtttcc

SEQ ID NO: 160744 - DNA, 20 bp, Artificial Sequence
  Synthetic oligonucleotide; TGG chr2 60481997 60482016 60482013 +
gttggactgatgtttcccag

SEQ ID NO: 160745 - DNA, 20 bp, Artificial Sequence
  Synthetic oligonucleotide; GAG chr2 60481999 60482018 60482015 +
tggactgatgtttcccagtg

SEQ ID NO: 160746 - DNA, 20 bp, Artificial Sequence
  Synthetic oligonucleotide; AGG chr2 60482000 60482019 60482016 +
ggactgatgtttcccagtgg

SEQ ID NO: 160747 - DNA, 20 bp, Artificial Sequence
  Synthetic oligonucleotide; GGG chr2 60482001 60482020 60482017 +
gactgatgtttcccagtgga

SEQ ID NO: 160748 - DNA, 20 bp, Artificial Sequence
  Synthetic oligonucleotide; TGG chr2 60482019 60482038 60482035 +
gagggcttgtttgtcatttt

SEQ ID NO: 160749 - DNA, 20 bp, Artificial Sequence
  Synthetic oligonucleotide; CAG chr2 60482032 60482051 60482048 +
tcatttttggacctaacatc

SEQ ID NO: 160750 - DNA, 20 bp, Artificial Sequence
  Synthetic oligonucleotide; AAG chr2 60482041 60482060 60482057 +
gacctaacatccagttcatc

SEQ ID NO: 160751 - DNA, 20 bp, Artificial Sequence
  Synthetic oligonucleotide; AGG chr2 60482042 60482061 60482058 +
acctaacatccagttcatca

SEQ ID NO: 160752 - DNA, 20 bp, Artificial Sequence
  Synthetic oligonucleotide; CAG chr2 60482059 60482078 60482075 +
tcaaggtcacttctgactcc

SEQ ID NO: 160753 - DNA, 20 bp, Artificial Sequence
  Synthetic oligonucleotide; AGG chr2 60482060 60482079 60482076 +
caaggtcacttctgactccc

SEQ ID NO: 160754 - DNA, 20 bp, Artificial Sequence
  Synthetic oligonucleotide; AAG chr2 60482063 60482082 60482079 +
ggtcacttctgactcccagg

SEQ ID NO: 160755 - DNA, 20 bp, Artificial Sequence
  Synthetic oligonucleotide; GAG chr2 60482065 60482084 60482081 +
tcacttctgactcccaggaa

SEQ ID NO: 160756 - DNA, 20 bp, Artificial Sequence
  Synthetic oligonucleotide; GAG chr2 60482067 60482086 60482083 +
acttctgactcccaggaaga

SEQ ID NO: 160757 - DNA, 20 bp, Artificial Sequence
  Synthetic oligonucleotide; AGG chr2 60482068 60482087 60482084 +
cttctgactcccaggaagag

SEQ ID NO: 160758 - DNA, 20 bp, Artificial Sequence
  Synthetic oligonucleotide; CAG chr2 60482071 60482090 60482087 +
ctgactcccaggaagagagg

SEQ ID NO: 160759 - DNA, 20 bp, Artificial Sequence
  Synthetic oligonucleotide; AAG chr2 60482081 60482100 60482097 +
ggaagagaggcagacctgtt

SEQ ID NO: 160760 - DNA, 20 bp, Artificial Sequence
  Synthetic oligonucleotide; AGG chr2 60482082 60482101 60482098 +
gaagagaggcagacctgtta

SEQ ID NO: 160761 - DNA, 20 bp, Artificial Sequence
  Synthetic oligonucleotide; GGG chr2 60482083 60482102 60482099 +
aagagaggcagacctgttaa

SEQ ID NO: 160762 - DNA, 20 bp, Artificial Sequence
  Synthetic oligonucleotide; GGG chr2 60482084 60482103 60482100 +
agagaggcagacctgttaag

SEQ ID NO: 160763 - DNA, 20 bp, Artificial Sequence
  Synthetic oligonucleotide; CGG chr2 60482087 60482106 60482103 +
gaggcagacctgttaagggg

SEQ ID NO: 160764 - DNA, 20 bp, Artificial Sequence
  Synthetic oligonucleotide; GGG chr2 60482088 60482107 60482104 +
aggcagacctgttaaggggc

SEQ ID NO: 160765 - DNA, 20 bp, Artificial Sequence
  Synthetic oligonucleotide; TGG chr2 60482091 60482110 60482107 +
cagacctgttaaggggcggg

SEQ ID NO: 160766 - DNA, 20 bp, Artificial Sequence
  Synthetic oligonucleotide; GAG chr2 60482097 60482116 60482113 +
tgttaaggggcgggtggttt

SEQ ID NO: 160767 - DNA, 20 bp, Artificial Sequence
  Synthetic oligonucleotide; TAG chr2 60482105 60482124 60482121 +
ggcgggtggtttgagccact

SEQ ID NO: 160768 - DNA, 20 bp, Artificial Sequence
  Synthetic oligonucleotide; AGG chr2 60482106 60482125 60482122 +
gcgggtggtttgagccactt

SEQ ID NO: 160769 - DNA, 20 bp, Artificial Sequence
  Synthetic oligonucleotide; TGG chr2 60482115 60482134 60482131 +
ttgagccacttaggacattt

SEQ ID NO: 160770 - DNA, 20 bp, Artificial Sequence
  Synthetic oligonucleotide; GAG chr2 60482147 60482166 60482163 +
atctctcatgattctatctt

SEQ ID NO: 160771 - DNA, 20 bp, Artificial Sequence
  Synthetic oligonucleotide; GAG chr2 60482149 60482168 60482165 +
ctctcatgattctatcttga

SEQ ID NO: 160772 - DNA, 20 bp, Artificial Sequence
  Synthetic oligonucleotide; TAG chr2 60482154 60482173 60482170 +
atgattctatcttgagagtt

SEQ ID NO: 160773 - DNA, 20 bp, Artificial Sequence
  Synthetic oligonucleotide; TGG chr2 60482159 60482178 60482175 +
tctatcttgagagtttagtt

SEQ ID NO: 160774 - DNA, 20 bp, Artificial Sequence
  Synthetic oligonucleotide; TGG chr2 60482163 60482182 60482179 +
tcttgagagtttagtttggt

SEQ ID NO: 160775 - DNA, 20 bp, Artificial Sequence
  Synthetic oligonucleotide; GAG chr2 60482165 60482184 60482181 +
ttgagagtttagtttggttg

SEQ ID NO: 160776 - DNA, 20 bp, Artificial Sequence
  Synthetic oligonucleotide; TAG chr2 60482170 60482189 60482186 +
agtttagtttggttggagtt

SEQ ID NO: 160777 - DNA, 20 bp, Artificial Sequence
  Synthetic oligonucleotide; GAG chr2 60482178 60482197 60482194 +
ttggttggagtttagttttt

SEQ ID NO: 160778 - DNA, 20 bp, Artificial Sequence
  Synthetic oligonucleotide; CGG chr2 60482190 60482209 60482206 +
tagtttttgagttttttgtt

SEQ ID NO: 160779 - DNA, 20 bp, Artificial Sequence
  Synthetic oligonucleotide; GGG chr2 60482191 60482210 60482207 +
agtttttgagttttttgttc

SEQ ID NO: 160780 - DNA, 20 bp, Artificial Sequence
  Synthetic oligonucleotide; TGG chr2 60482197 60482216 60482213 +
tgagttttttgttcgggttg

SEQ ID NO: 160781 - DNA, 20 bp, Artificial Sequence
  Synthetic oligonucleotide; TGG chr2 60482228 60482247 60482244 +
cctccattaaaaaaaaaaat

SEQ ID NO: 160782 - DNA, 20 bp, Artificial Sequence
  Synthetic oligonucleotide; GAG chr2 60482230 60482249 60482246 +
tccattaaaaaaaaaaattg

SEQ ID NO: 160783 - DNA, 20 bp, Artificial Sequence
  Synthetic oligonucleotide; CGG chr2 60482255 60482274 60482271 +
gtatttctgtttcctgttca

SEQ ID NO: 160784 - DNA, 20 bp, Artificial Sequence
  Synthetic oligonucleotide; GAG chr2 60482257 60482276 60482273 +
atttctgtttcctgttcacg

SEQ ID NO: 160785 - DNA, 20 bp, Artificial Sequence
  Synthetic oligonucleotide; CGG chr2 60482260 60482279 60482276 +
tctgtttcctgttcacggag

SEQ ID NO: 160786 - DNA, 20 bp, Artificial Sequence
  Synthetic oligonucleotide; CAG chr2 60482264 60482283 60482280 +
tttcctgttcacggagcgga

SEQ ID NO: 160787 - DNA, 20 bp, Artificial Sequence
  Synthetic oligonucleotide; AAG chr2 60482267 60482286 60482283 +
cctgttcacggagcggacag

SEQ ID NO: 160788 - DNA, 20 bp, Artificial Sequence
  Synthetic oligonucleotide; AGG chr2 60482268 60482287 60482284 +
ctgttcacggagcggacaga

SEQ ID NO: 160789 - DNA, 20 bp, Artificial Sequence
  Synthetic oligonucleotide; GAG chr2 60482270 60482289 60482286 +
gttcacggagcggacagaag

SEQ ID NO: 160790 - DNA, 20 bp, Artificial Sequence
  Synthetic oligonucleotide; AGG chr2 60482271 60482290 60482287 +
ttcacggagcggacagaagg

SEQ ID NO: 160791 - DNA, 20 bp, Artificial Sequence
  Synthetic oligonucleotide; GGG chr2 60482272 60482291 60482288 +
tcacggagcggacagaagga

SEQ ID NO: 160792 - DNA, 20 bp, Artificial Sequence
  Synthetic oligonucleotide; CAG chr2 60482279 60482298 60482295 +
gcggacagaaggagggtgtg

SEQ ID NO: 160793 - DNA, 20 bp, Artificial Sequence
  Synthetic oligonucleotide; TGG chr2 60482282 60482301 60482298 +
gacagaaggagggtgtgcag

SEQ ID NO: 160794 - DNA, 20 bp, Artificial Sequence
  Synthetic oligonucleotide; GAG chr2 60482284 60482303 60482300 +
cagaaggagggtgtgcagtg

SEQ ID NO: 160795 - DNA, 20 bp, Artificial Sequence
  Synthetic oligonucleotide; AGG chr2 60482285 60482304 60482301 +
agaaggagggtgtgcagtgg

SEQ ID NO: 160796 - DNA, 20 bp, Artificial Sequence
  Synthetic oligonucleotide; GAG chr2 60482287 60482306 60482303 +
aaggagggtgtgcagtggag

SEQ ID NO: 160797 - DNA, 20 bp, Artificial Sequence
  Synthetic oligonucleotide; AGG chr2 60482288 60482307 60482304 +
aggagggtgtgcagtggagg

SEQ ID NO: 160798 - DNA, 20 bp, Artificial Sequence
  Synthetic oligonucleotide; TGG chr2 60482295 60482314 60482311 +
tgtgcagtggaggaggtgtg

SEQ ID NO: 160799 - DNA, 20 bp, Artificial Sequence
  Synthetic oligonucleotide; GGG chr2 60482296 60482315 60482312 +
gtgcagtggaggaggtgtgt

SEQ ID NO: 160800 - DNA, 20 bp, Artificial Sequence
  Synthetic oligonucleotide; GGG chr2 60482297 60482316 60482313 +
tgcagtggaggaggtgtgtg

SEQ ID NO: 160801 - DNA, 20 bp, Artificial Sequence
  Synthetic oligonucleotide; GAG chr2 60482299 60482318 60482315 +
cagtggaggaggtgtgtggg

SEQ ID NO: 160802 - DNA, 20 bp, Artificial Sequence
  Synthetic oligonucleotide; AGG chr2 60482300 60482319 60482316 +
agtggaggaggtgtgtgggg

SEQ ID NO: 160803 - DNA, 20 bp, Artificial Sequence
  Synthetic oligonucleotide; GAG chr2 60482302 60482321 60482318 +
tggaggaggtgtgtggggag

SEQ ID NO: 160804 - DNA, 20 bp, Artificial Sequence
  Synthetic oligonucleotide; AGG chr2 60482303 60482322 60482319 +
ggaggaggtgtgtggggagg

SEQ ID NO: 160805 - DNA, 20 bp, Artificial Sequence
  Synthetic oligonucleotide; TGG chr2 60482314 60482333 60482330 +
gtggggaggaggctgataca

SEQ ID NO: 160806 - DNA, 20 bp, Artificial Sequence
  Synthetic oligonucleotide; GAG chr2 60482316 60482335 60482332 +
ggggaggaggctgatacatg

SEQ ID NO: 160807 - DNA, 20 bp, Artificial Sequence
  Synthetic oligonucleotide; CAG chr2 60482319 60482338 60482335 +
gaggaggctgatacatggag

SEQ ID NO: 160808 - DNA, 20 bp, Artificial Sequence
  Synthetic oligonucleotide; GAG chr2 60482321 60482340 60482337 +
ggaggctgatacatggagca

SEQ ID NO: 160809 - DNA, 20 bp, Artificial Sequence
  Synthetic oligonucleotide; GAG chr2 60482326 60482345 60482342 +
ctgatacatggagcagagcc

SEQ ID NO: 160810 - DNA, 20 bp, Artificial Sequence
  Synthetic oligonucleotide; CGG chr2 60482335 60482354 60482351 +
ggagcagagccgagaatatc

SEQ ID NO: 160811 - DNA, 20 bp, Artificial Sequence
  Synthetic oligonucleotide; TGG chr2 60482341 60482360 60482357 +
gagccgagaatatccggaac

SEQ ID NO: 160812 - DNA, 20 bp, Artificial Sequence
  Synthetic oligonucleotide; GAG chr2 60482343 60482362 60482359 +
gccgagaatatccggaactg

SEQ ID NO: 160813 - DNA, 20 bp, Artificial Sequence
  Synthetic oligonucleotide; AAG chr2 60482348 60482367 60482364 +
gaatatccggaactggagaa

SEQ ID NO: 160814 - DNA, 20 bp, Artificial Sequence
  Synthetic oligonucleotide; GAG chr2 60482352 60482371 60482368 +
atccggaactggagaaaagt

SEQ ID NO: 160815 - DNA, 20 bp, Artificial Sequence
  Synthetic oligonucleotide; TGG chr2 60482358 60482377 60482374 +
aactggagaaaagtgagaaa

SEQ ID NO: 160816 - DNA, 20 bp, Artificial Sequence
  Synthetic oligonucleotide; GAG chr2 60482360 60482379 60482376 +
ctggagaaaagtgagaaatg

SEQ ID NO: 160817 - DNA, 20 bp, Artificial Sequence
  Synthetic oligonucleotide; TGG chr2 60482372 60482391 60482388 +
gagaaatggagcttttttct

SEQ ID NO: 160818 - DNA, 20 bp, Artificial Sequence
  Synthetic oligonucleotide; CAG chr2 60482383 60482402 60482399 +
cttttttcttggcttccaaa

SEQ ID NO: 160819 - DNA, 20 bp, Artificial Sequence
  Synthetic oligonucleotide; TAG chr2 60482409 60482428 60482425 +
taatttccactgccactgct

SEQ ID NO: 160820 - DNA, 20 bp, Artificial Sequence
  Synthetic oligonucleotide; TGG chr2 60482416 60482435 60482432 +
cactgccactgcttagttcc

SEQ ID NO: 160821 - DNA, 20 bp, Artificial Sequence
  Synthetic oligonucleotide; GGG chr2 60482417 60482436 60482433 +
actgccactgcttagttcct

SEQ ID NO: 160822 - DNA, 20 bp, Artificial Sequence
  Synthetic oligonucleotide; CAG chr2 60482423 60482442 60482439 +
actgcttagttcctgggcac

SEQ ID NO: 160823 - DNA, 20 bp, Artificial Sequence
  Synthetic oligonucleotide; AGG chr2 60482424 60482443 60482440 +
ctgcttagttcctgggcacc

SEQ ID NO: 160824 - DNA, 20 bp, Artificial Sequence
  Synthetic oligonucleotide; CAG chr2 60482431 60482450 60482447 +
gttcctgggcaccaggcata

SEQ ID NO: 160825 - DNA, 20 bp, Artificial Sequence
  Synthetic oligonucleotide; GAG chr2 60482433 60482452 60482449 +
tcctgggcaccaggcataca

SEQ ID NO: 160826 - DNA, 20 bp, Artificial Sequence
  Synthetic oligonucleotide; TGG chr2 60482436 60482455 60482452 +
tgggcaccaggcatacagag

SEQ ID NO: 160827 - DNA, 20 bp, Artificial Sequence
  Synthetic oligonucleotide; GGG chr2 60482437 60482456 60482453 +
gggcaccaggcatacagagt

SEQ ID NO: 160828 - DNA, 20 bp, Artificial Sequence
  Synthetic oligonucleotide; AAG chr2 60482441 60482460 60482457 +
accaggcatacagagtggga

SEQ ID NO: 160829 - DNA, 20 bp, Artificial Sequence
  Synthetic oligonucleotide; AGG chr2 60482442 60482461 60482458 +
ccaggcatacagagtgggaa

SEQ ID NO: 160830 - DNA, 20 bp, Artificial Sequence
  Synthetic oligonucleotide; GGG chr2 60482443 60482462 60482459 +
caggcatacagagtgggaaa

SEQ ID NO: 160831 - DNA, 20 bp, Artificial Sequence
  Synthetic oligonucleotide; GGG chr2 60482444 60482463 60482460 +
aggcatacagagtgggaaag

SEQ ID NO: 160832 - DNA, 20 bp, Artificial Sequence
  Synthetic oligonucleotide; CAG chr2 60482470 60482489 60482486 +
gtgacaactttgccacaaat

SEQ ID NO: 160833 - DNA, 20 bp, Artificial Sequence
  Synthetic oligonucleotide; AGG chr2 60482471 60482490 60482487 +
tgacaactttgccacaaatc

SEQ ID NO: 160834 - DNA, 20 bp, Artificial Sequence
  Synthetic oligonucleotide; TGG chr2 60482477 60482496 60482493 +
ctttgccacaaatcaggatt

SEQ ID NO: 160835 - DNA, 20 bp, Artificial Sequence
  Synthetic oligonucleotide; CAG chr2 60482492 60482511 60482508 +
ggatttggcatttaaatcca

SEQ ID NO: 160836 - DNA, 20 bp, Artificial Sequence
  Synthetic oligonucleotide; AGG chr2 60482493 60482512 60482509 +
gatttggcatttaaatccac

SEQ ID NO: 160837 - DNA, 20 bp, Artificial Sequence
  Synthetic oligonucleotide; AAG chr2 60482496 60482515 60482512 +
ttggcatttaaatccacagg

SEQ ID NO: 160838 - DNA, 20 bp, Artificial Sequence
  Synthetic oligonucleotide; AAG chr2 60482500 60482519 60482516 +
catttaaatccacaggaagc

SEQ ID NO: 160839 - DNA, 20 bp, Artificial Sequence
  Synthetic oligonucleotide; AAG chr2 60482503 60482522 60482519 +
ttaaatccacaggaagcaag

SEQ ID NO: 160840 - DNA, 20 bp, Artificial Sequence
  Synthetic oligonucleotide; TAG chr2 60482508 60482527 60482524 +
tccacaggaagcaagaagaa

SEQ ID NO: 160841 - DNA, 20 bp, Artificial Sequence
  Synthetic oligonucleotide; GAG chr2 60482510 60482529 60482526 +
cacaggaagcaagaagaata

SEQ ID NO: 160842 - DNA, 20 bp, Artificial Sequence
  Synthetic oligonucleotide; AGG chr2 60482511 60482530 60482527 +
acaggaagcaagaagaatag

SEQ ID NO: 160843 - DNA, 20 bp, Artificial Sequence
  Synthetic oligonucleotide; GGG chr2 60482512 60482531 60482528 +
caggaagcaagaagaataga

SEQ ID NO: 160844 - DNA, 20 bp, Artificial Sequence
  Synthetic oligonucleotide; TAG chr2 60482527 60482546 60482543 +
atagagggactgcttattta

SEQ ID NO: 160845 - DNA, 20 bp, Artificial Sequence
  Synthetic oligonucleotide; CAG chr2 60482535 60482554 60482551 +
actgcttatttatagatttg

SEQ ID NO: 160846 - DNA, 20 bp, Artificial Sequence
  Synthetic oligonucleotide; GAG chr2 60482544 60482563 60482560 +
ttatagatttgcagatgaat

SEQ ID NO: 160847 - DNA, 20 bp, Artificial Sequence
  Synthetic oligonucleotide; AAG chr2 60482576 60482595 60482592 +
atgcacttctcgcgtatgtg

SEQ ID NO: 160848 - DNA, 20 bp, Artificial Sequence
  Synthetic oligonucleotide; AGG chr2 60482577 60482596 60482593 +
tgcacttctcgcgtatgtga

SEQ ID NO: 160849 - DNA, 20 bp, Artificial Sequence
  Synthetic oligonucleotide; GAG chr2 60482579 60482598 60482595 +
cacttctcgcgtatgtgaag

SEQ ID NO: 160850 - DNA, 20 bp, Artificial Sequence
  Synthetic oligonucleotide; CAG chr2 60482594 60482613 60482610 +
tgaaggagcaattccatttt

SEQ ID NO: 160851 - DNA, 20 bp, Artificial Sequence
  Synthetic oligonucleotide; TGG chr2 60482600 60482619 60482616 +
agcaattccattttcagact

SEQ ID NO: 160852 - DNA, 20 bp, Artificial Sequence
  Synthetic oligonucleotide; AAG chr2 60482604 60482623 60482620 +
attccattttcagacttgga

SEQ ID NO: 160853 - DNA, 20 bp, Artificial Sequence
  Synthetic oligonucleotide; AAG chr2 60482619 60482638 60482635 +
ttggaaagttctccataatt

SEQ ID NO: 160854 - DNA, 20 bp, Artificial Sequence
  Synthetic oligonucleotide; AAG chr2 60482638 60482657 60482654 +
taagtatcacccaaccctga

SEQ ID NO: 160855 - DNA, 20 bp, Artificial Sequence
  Synthetic oligonucleotide; AAG chr2 60482654 60482673 60482670 +
ctgaaagcacactgcatccc

SEQ ID NO: 160856 - DNA, 20 bp, Artificial Sequence
  Synthetic oligonucleotide; AGG chr2 60482655 60482674 60482671 +
tgaaagcacactgcatccca

SEQ ID NO: 160857 - DNA, 20 bp, Artificial Sequence
  Synthetic oligonucleotide; AAG chr2 60482660 60482679 60482676 +
gcacactgcatcccaaggtt

SEQ ID NO: 160858 - DNA, 20 bp, Artificial Sequence
  Synthetic oligonucleotide; CAG chr2 60482665 60482684 60482681 +
ctgcatcccaaggttaagat

SEQ ID NO: 160859 - DNA, 20 bp, Artificial Sequence
  Synthetic oligonucleotide; CAG chr2 60482679 60482698 60482695 +
taagatcagcttcctgaaaa

SEQ ID NO: 160860 - DNA, 20 bp, Artificial Sequence
  Synthetic oligonucleotide; AGG chr2 60482680 60482699 60482696 +
aagatcagcttcctgaaaac

SEQ ID NO: 160861 - DNA, 20 bp, Artificial Sequence
  Synthetic oligonucleotide; GGG chr2 60482681 60482700 60482697 +
agatcagcttcctgaaaaca

SEQ ID NO: 160862 - DNA, 20 bp, Artificial Sequence
  Synthetic oligonucleotide; CAG chr2 60482684 60482703 60482700 +
tcagcttcctgaaaacaggg

SEQ ID NO: 160863 - DNA, 20 bp, Artificial Sequence
  Synthetic oligonucleotide; AAG chr2 60482687 60482706 60482703 +
gcttcctgaaaacagggcag

SEQ ID NO: 160864 - DNA, 20 bp, Artificial Sequence
  Synthetic oligonucleotide; CAG chr2 60482700 60482719 60482716 +
agggcagaagactgctgctt

SEQ ID NO: 160865 - DNA, 20 bp, Artificial Sequence
  Synthetic oligonucleotide; TGG chr2 60482703 60482722 60482719 +
gcagaagactgctgcttcag

SEQ ID NO: 160866 - DNA, 20 bp, Artificial Sequence
  Synthetic oligonucleotide; TAG chr2 60482706 60482725 60482722 +
gaagactgctgcttcagtgg

SEQ ID NO: 160867 - DNA, 20 bp, Artificial Sequence
  Synthetic oligonucleotide; AAG chr2 60482727 60482746 60482743 +
agctcaaaaattctattttg

SEQ ID NO: 160868 - DNA, 20 bp, Artificial Sequence
  Synthetic oligonucleotide; AGG chr2 60482728 60482747 60482744 +
gctcaaaaattctattttga

SEQ ID NO: 160869 - DNA, 20 bp, Artificial Sequence
  Synthetic oligonucleotide; CAG chr2 60482732 60482751 60482748 +
aaaaattctattttgaagga

SEQ ID NO: 160870 - DNA, 20 bp, Artificial Sequence
  Synthetic oligonucleotide; AGG chr2 60482733 60482752 60482749 +
aaaattctattttgaaggac

SEQ ID NO: 160871 - DNA, 20 bp, Artificial Sequence
  Synthetic oligonucleotide; TAG chr2 60482737 60482756 60482753 +
ttctattttgaaggacaggt

SEQ ID NO: 160872 - DNA, 20 bp, Artificial Sequence
  Synthetic oligonucleotide; TGG chr2 60482758 60482777 60482774 +
agtaccacactacatttaac

SEQ ID NO: 160873 - DNA, 20 bp, Artificial Sequence
  Synthetic oligonucleotide; CAG chr2 60482764 60482783 60482780 +
acactacatttaactggatt

SEQ ID NO: 160874 - DNA, 20 bp, Artificial Sequence
  Synthetic oligonucleotide; CAG chr2 60482781 60482800 60482797 +
attcagttcatgtgattata

SEQ ID NO: 160875 - DNA, 20 bp, Artificial Sequence
  Synthetic oligonucleotide; TAG chr2 60482796 60482815 60482812 +
ttatacagtgccttgctttc

SEQ ID NO: 160876 - DNA, 20 bp, Artificial Sequence
  Synthetic oligonucleotide; TAG chr2 60482842 60482861 60482858 +
tgacattttaaatatccaac

SEQ ID NO: 160877 - DNA, 20 bp, Artificial Sequence
  Synthetic oligonucleotide; CAG chr2 60482856 60482875 60482872 +
tccaactagacaaataattg

SEQ ID NO: 160878 - DNA, 20 bp, Artificial Sequence
  Synthetic oligonucleotide; TAG chr2 60482869 60482888 60482885 +
ataattgcagcaataattga

SEQ ID NO: 160879 - DNA, 20 bp, Artificial Sequence
  Synthetic oligonucleotide; CAG chr2 60482872 60482891 60482888 +
attgcagcaataattgatag

SEQ ID NO: 160880 - DNA, 20 bp, Artificial Sequence
  Synthetic oligonucleotide; GAG chr2 60482874 60482893 60482890 +
tgcagcaataattgatagca

SEQ ID NO: 160881 - DNA, 20 bp, Artificial Sequence
  Synthetic oligonucleotide; AAG chr2 60482879 60482898 60482895 +
caataattgatagcagagtc

SEQ ID NO: 160882 - DNA, 20 bp, Artificial Sequence
  Synthetic oligonucleotide; TGG chr2 60482883 60482902 60482899 +
aattgatagcagagtcaagc

SEQ ID NO: 160883 - DNA, 20 bp, Artificial Sequence
  Synthetic oligonucleotide; AAG chr2 60482886 60482905 60482902 +
tgatagcagagtcaagctgg

SEQ ID NO: 160884 - DNA, 20 bp, Artificial Sequence
  Synthetic oligonucleotide; TGG chr2 60482898 60482917 60482914 +
caagctggaagatcattgat

SEQ ID NO: 160885 - DNA, 20 bp, Artificial Sequence
  Synthetic oligonucleotide; CAG chr2 60482901 60482920 60482917 +
gctggaagatcattgattgg

SEQ ID NO: 160886 - DNA, 20 bp, Artificial Sequence
  Synthetic oligonucleotide; GAG chr2 60482903 60482922 60482919 +
tggaagatcattgattggca

SEQ ID NO: 160887 - DNA, 20 bp, Artificial Sequence
  Synthetic oligonucleotide; CAG chr2 60482940 60482959 60482956 +
aatctttctttcaaacatta

SEQ ID NO: 160888 - DNA, 20 bp, Artificial Sequence
  Synthetic oligonucleotide; AAG chr2 60482957 60482976 60482973 +
ttacagaaatgatgatgttt

SEQ ID NO: 160889 - DNA, 20 bp, Artificial Sequence
  Synthetic oligonucleotide; AAG chr2 60483003 60483022 60483019 +
caaaatctgatttactgata

SEQ ID NO: 160890 - DNA, 20 bp, Artificial Sequence
  Synthetic oligonucleotide; AGG chr2 60483004 60483023 60483020 +
aaaatctgatttactgataa

SEQ ID NO: 160891 - DNA, 20 bp, Artificial Sequence
  Synthetic oligonucleotide; AAG chr2 60483013 60483032 60483029 +
tttactgataaaggcactgc

SEQ ID NO: 160892 - DNA, 20 bp, Artificial Sequence
  Synthetic oligonucleotide; CAG chr2 60483029 60483048 60483045 +
ctgcaagaaaacctgcactt

SEQ ID NO: 160893 - DNA, 20 bp, Artificial Sequence
  Synthetic oligonucleotide; GAG chr2 60483048 60483067 60483064 +
tcagcccatgattactttgc

SEQ ID NO: 160894 - DNA, 20 bp, Artificial Sequence
  Synthetic oligonucleotide; GAG chr2 60483057 60483076 60483073 +
gattactttgcgagatgttt

SEQ ID NO: 160895 - DNA, 20 bp, Artificial Sequence
  Synthetic oligonucleotide; AAG chr2 60483060 60483079 60483076 +
tactttgcgagatgtttgag

SEQ ID NO: 160896 - DNA, 20 bp, Artificial Sequence
  Synthetic oligonucleotide; CAG chr2 60483066 60483085 60483082 +
gcgagatgtttgagaagaat

SEQ ID NO: 160897 - DNA, 20 bp, Artificial Sequence
  Synthetic oligonucleotide; AGG chr2 60483067 60483086 60483083 +
cgagatgtttgagaagaatc

SEQ ID NO: 160898 - DNA, 20 bp, Artificial Sequence
  Synthetic oligonucleotide; CAG chr2 60483070 60483089 60483086 +
gatgtttgagaagaatcagg

SEQ ID NO: 160899 - DNA, 20 bp, Artificial Sequence
  Synthetic oligonucleotide; AAG chr2 60483105 60483124 60483121 +
tatttcccatgaataactgc

SEQ ID NO: 160900 - DNA, 20 bp, Artificial Sequence
  Synthetic oligonucleotide; AGG chr2 60483106 60483125 60483122 +
atttcccatgaataactgca

SEQ ID NO: 160901 - DNA, 20 bp, Artificial Sequence
  Synthetic oligonucleotide; TAG chr2 60483110 60483129 60483126 +
cccatgaataactgcaagga

SEQ ID NO: 160902 - DNA, 20 bp, Artificial Sequence
  Synthetic oligonucleotide; TGG chr2 60483115 60483134 60483131 +
gaataactgcaaggatagtg

SEQ ID NO: 160903 - DNA, 20 bp, Artificial Sequence
  Synthetic oligonucleotide; GGG chr2 60483116 60483135 60483132 +
aataactgcaaggatagtgt

SEQ ID NO: 160904 - DNA, 20 bp, Artificial Sequence
  Synthetic oligonucleotide; TAG chr2 60483119 60483138 60483135 +
aactgcaaggatagtgtggg

SEQ ID NO: 160905 - DNA, 20 bp, Artificial Sequence
  Synthetic oligonucleotide; TGG chr2 60483123 60483142 60483139 +
gcaaggatagtgtgggtagt

SEQ ID NO: 160906 - DNA, 20 bp, Artificial Sequence
  Synthetic oligonucleotide; GAG chr2 60483125 60483144 60483141 +
aaggatagtgtgggtagttg

SEQ ID NO: 160907 - DNA, 20 bp, Artificial Sequence
  Synthetic oligonucleotide; AGG chr2 60483126 60483145 60483142 +
aggatagtgtgggtagttgg

SEQ ID NO: 160908 - DNA, 20 bp, Artificial Sequence
  Synthetic oligonucleotide; GAG chr2 60483128 60483147 60483144 +
gatagtgtgggtagttggag

SEQ ID NO: 160909 - DNA, 20 bp, Artificial Sequence
  Synthetic oligonucleotide; CAG chr2 60483139 60483158 60483155 +
tagttggaggagaatcaaca

SEQ ID NO: 160910 - DNA, 20 bp, Artificial Sequence
  Synthetic oligonucleotide; AGG chr2 60483140 60483159 60483156 +
agttggaggagaatcaacac

SEQ ID NO: 160911 - DNA, 20 bp, Artificial Sequence
  Synthetic oligonucleotide; GAG chr2 60483144 60483163 60483160 +
ggaggagaatcaacacaggc

SEQ ID NO: 160912 - DNA, 20 bp, Artificial Sequence
  Synthetic oligonucleotide; GAG chr2 60483146 60483165 60483162 +
aggagaatcaacacaggcga

SEQ ID NO: 160913 - DNA, 20 bp, Artificial Sequence
  Synthetic oligonucleotide; AAG chr2 60483149 60483168 60483165 +
agaatcaacacaggcgagag

SEQ ID NO: 160914 - DNA, 20 bp, Artificial Sequence
  Synthetic oligonucleotide; TAG chr2 60483187 60483206 60483203 +
ctacacttcctgaacaatgc

SEQ ID NO: 160915 - DNA, 20 bp, Artificial Sequence
  Synthetic oligonucleotide; CAG chr2 60483198 60483217 60483214 +
gaacaatgctagccaacaat

SEQ ID NO: 160916 - DNA, 20 bp, Artificial Sequence
  Synthetic oligonucleotide; AGG chr2 60483199 60483218 60483215 +
aacaatgctagccaacaatc

SEQ ID NO: 160917 - DNA, 20 bp, Artificial Sequence
  Synthetic oligonucleotide; GGG chr2 60483200 60483219 60483216 +
acaatgctagccaacaatca

SEQ ID NO: 160918 - DNA, 20 bp, Artificial Sequence
  Synthetic oligonucleotide; CAG chr2 60483207 60483226 60483223 +
tagccaacaatcagggttta

SEQ ID NO: 160919 - DNA, 20 bp, Artificial Sequence
  Synthetic oligonucleotide; TGG chr2 60483237 60483256 60483253 +
cccctctaatatatatcccg

SEQ ID NO: 160920 - DNA, 20 bp, Artificial Sequence
  Synthetic oligonucleotide; TAG chr2 60483240 60483259 60483256 +
ctctaatatatatcccgtgg

SEQ ID NO: 160921 - DNA, 20 bp, Artificial Sequence
  Synthetic oligonucleotide; GAG chr2 60483242 60483261 60483258 +
ctaatatatatcccgtggta

SEQ ID NO: 160922 - DNA, 20 bp, Artificial Sequence
  Synthetic oligonucleotide; TGG chr2 60483248 60483267 60483264 +
tatatcccgtggtagagaaa

SEQ ID NO: 160923 - DNA, 20 bp, Artificial Sequence
  Synthetic oligonucleotide; AAG chr2 60483258 60483277 60483274 +
ggtagagaaatggtcttgac

SEQ ID NO: 160924 - DNA, 20 bp, Artificial Sequence
  Synthetic oligonucleotide; AGG chr2 60483259 60483278 60483275 +
gtagagaaatggtcttgaca

SEQ ID NO: 160925 - DNA, 20 bp, Artificial Sequence
  Synthetic oligonucleotide; GGG chr2 60483260 60483279 60483276 +
tagagaaatggtcttgacaa

SEQ ID NO: 160926 - DNA, 20 bp, Artificial Sequence
  Synthetic oligonucleotide; GGG chr2 60483261 60483280 60483277 +
agagaaatggtcttgacaag

SEQ ID NO: 160927 - DNA, 20 bp, Artificial Sequence
  Synthetic oligonucleotide; AAG chr2 60483264 60483283 60483280 +
gaaatggtcttgacaagggg

SEQ ID NO: 160928 - DNA, 20 bp, Artificial Sequence
  Synthetic oligonucleotide; CAG chr2 60483269 60483288 60483285 +
ggtcttgacaaggggaagac

SEQ ID NO: 160929 - DNA, 20 bp, Artificial Sequence
  Synthetic oligonucleotide; AGG chr2 60483270 60483289 60483286 +
gtcttgacaaggggaagacc

SEQ ID NO: 160930 - DNA, 20 bp, Artificial Sequence
  Synthetic oligonucleotide; AAG chr2 60483275 60483294 60483291 +
gacaaggggaagaccaggaa

SEQ ID NO: 160931 - DNA, 20 bp, Artificial Sequence
  Synthetic oligonucleotide; AAG chr2 60483278 60483297 60483294 +
aaggggaagaccaggaaaag

SEQ ID NO: 160932 - DNA, 20 bp, Artificial Sequence
  Synthetic oligonucleotide; CAG chr2 60483294 60483313 60483310 +
aaagaagacacacaaataat

SEQ ID NO: 160933 - DNA, 20 bp, Artificial Sequence
  Synthetic oligonucleotide; CAG chr2 60483304 60483323 60483320 +
cacaaataatcagctccatt

SEQ ID NO: 160934 - DNA, 20 bp, Artificial Sequence
  Synthetic oligonucleotide; AGG chr2 60483305 60483324 60483321 +
acaaataatcagctccattc

SEQ ID NO: 160935 - DNA, 20 bp, Artificial Sequence
  Synthetic oligonucleotide; AAG chr2 60483316 60483335 60483332 +
gctccattcaggcctttgaa

SEQ ID NO: 160936 - DNA, 20 bp, Artificial Sequence
  Synthetic oligonucleotide; TGG chr2 60483319 60483338 60483335 +
ccattcaggcctttgaaaag

SEQ ID NO: 160937 - DNA, 20 bp, Artificial Sequence
  Synthetic oligonucleotide; TGG chr2 60483342 60483361 60483358 +
tttaaatcgatgcctcaaat

SEQ ID NO: 160938 - DNA, 20 bp, Artificial Sequence
  Synthetic oligonucleotide; GGG chr2 60483343 60483362 60483359 +
ttaaatcgatgcctcaaatt

SEQ ID NO: 160939 - DNA, 20 bp, Artificial Sequence
  Synthetic oligonucleotide; CAG chr2 60483363 60483382 60483379 +
gggactcaaattcccctgcc

SEQ ID NO: 160940 - DNA, 20 bp, Artificial Sequence
  Synthetic oligonucleotide; AAG chr2 60483370 60483389 60483386 +
aaattcccctgcccagtgca

SEQ ID NO: 160941 - DNA, 20 bp, Artificial Sequence
  Synthetic oligonucleotide; TGG chr2 60483378 60483397 60483394 +
ctgcccagtgcaaagatccc

SEQ ID NO: 160942 - DNA, 20 bp, Artificial Sequence
  Synthetic oligonucleotide; AAG chr2 60483383 60483402 60483399 +
cagtgcaaagatccctggcc

SEQ ID NO: 160943 - DNA, 20 bp, Artificial Sequence
  Synthetic oligonucleotide; AGG chr2 60483384 60483403 60483400 +
agtgcaaagatccctggcca

SEQ ID NO: 160944 - DNA, 20 bp, Artificial Sequence
  Synthetic oligonucleotide; CAG chr2 60483388 60483407 60483404 +
caaagatccctggccaaggt

SEQ ID NO: 160945 - DNA, 20 bp, Artificial Sequence
  Synthetic oligonucleotide; AAG chr2 60483391 60483410 60483407 +
agatccctggccaaggtcag

SEQ ID NO: 160946 - DNA, 20 bp, Artificial Sequence
  Synthetic oligonucleotide; GAG chr2 60483398 60483417 60483414 +
tggccaaggtcagaagactt

SEQ ID NO: 160947 - DNA, 20 bp, Artificial Sequence
  Synthetic oligonucleotide; CAG chr2 60483403 60483422 60483419 +
aaggtcagaagacttgagac

SEQ ID NO: 160948 - DNA, 20 bp, Artificial Sequence
  Synthetic oligonucleotide; AGG chr2 60483404 60483423 60483420 +
aggtcagaagacttgagacc

SEQ ID NO: 160949 - DNA, 20 bp, Artificial Sequence
  Synthetic oligonucleotide; AAG chr2 60483408 60483427 60483424 +
cagaagacttgagaccaggc

SEQ ID NO: 160950 - DNA, 20 bp, Artificial Sequence
  Synthetic oligonucleotide; CAG chr2 60483414 60483433 60483430 +
acttgagaccaggcaagtcc

SEQ ID NO: 160951 - DNA, 20 bp, Artificial Sequence
  Synthetic oligonucleotide; CAG chr2 60483424 60483443 60483440 +
aggcaagtcccagatgatct

SEQ ID NO: 160952 - DNA, 20 bp, Artificial Sequence
  Synthetic oligonucleotide; AGG chr2 60483425 60483444 60483441 +
ggcaagtcccagatgatctc

SEQ ID NO: 160953 - DNA, 20 bp, Artificial Sequence
  Synthetic oligonucleotide; AAG chr2 60483429 60483448 60483445 +
agtcccagatgatctcaggc

SEQ ID NO: 160954 - DNA, 20 bp, Artificial Sequence
  Synthetic oligonucleotide; CAG chr2 60483436 60483455 60483452 +
gatgatctcaggcaagtccc

SEQ ID NO: 160955 - DNA, 20 bp, Artificial Sequence
  Synthetic oligonucleotide; AGG chr2 60483437 60483456 60483453 +
atgatctcaggcaagtcccc

SEQ ID NO: 160956 - DNA, 20 bp, Artificial Sequence
  Synthetic oligonucleotide; TAG chr2 60483442 60483461 60483458 +
ctcaggcaagtccccaggta

SEQ ID NO: 160957 - DNA, 20 bp, Artificial Sequence
  Synthetic oligonucleotide; CAG chr2 60483448 60483467 60483464 +
caagtccccaggtatagctg

SEQ ID NO: 160958 - DNA, 20 bp, Artificial Sequence
  Synthetic oligonucleotide; TAG chr2 60483457 60483476 60483473 +
aggtatagctgcagtccctt

SEQ ID NO: 160959 - DNA, 20 bp, Artificial Sequence
  Synthetic oligonucleotide; CAG chr2 60483463 60483482 60483479 +
agctgcagtccctttagccc

SEQ ID NO: 160960 - DNA, 20 bp, Artificial Sequence
  Synthetic oligonucleotide; AAG chr2 60483481 60483500 60483497 +
cccagtctgtttctctgtcc

SEQ ID NO: 160961 - DNA, 20 bp, Artificial Sequence
  Synthetic oligonucleotide; AGG chr2 60483482 60483501 60483498 +
ccagtctgtttctctgtcca

SEQ ID NO: 160962 - DNA, 20 bp, Artificial Sequence
  Synthetic oligonucleotide; CAG chr2 60483485 60483504 60483501 +
gtctgtttctctgtccaagg

SEQ ID NO: 160963 - DNA, 20 bp, Artificial Sequence
  Synthetic oligonucleotide; AAG chr2 60483536 60483555 60483552 +
gtgttttgattgtaatattt

SEQ ID NO: 160964 - DNA, 20 bp, Artificial Sequence
  Synthetic oligonucleotide; TAG chr2 60483540 60483559 60483556 +
tttgattgtaatatttaagt

SEQ ID NO: 160965 - DNA, 20 bp, Artificial Sequence
  Synthetic oligonucleotide; AGG chr2 60483541 60483560 60483557 +
ttgattgtaatatttaagtt

SEQ ID NO: 160966 - DNA, 20 bp, Artificial Sequence
  Synthetic oligonucleotide; GGG chr2 60483542 60483561 60483558 +
tgattgtaatatttaagtta

SEQ ID NO: 160967 - DNA, 20 bp, Artificial Sequence
  Synthetic oligonucleotide; CAG chr2 60483562 60483581 60483578 +
gggcactgtgttcaacaact

SEQ ID NO: 160968 - DNA, 20 bp, Artificial Sequence
  Synthetic oligonucleotide; TGG chr2 60483571 60483590 60483587 +
gttcaacaactcagaccctg

SEQ ID NO: 160969 - DNA, 20 bp, Artificial Sequence
  Synthetic oligonucleotide; CAG chr2 60483581 60483600 60483597 +
tcagaccctgtggaatgctg

SEQ ID NO: 160970 - DNA, 20 bp, Artificial Sequence
  Synthetic oligonucleotide; CAG chr2 60483588 60483607 60483604 +
ctgtggaatgctgcagttgt

SEQ ID NO: 160971 - DNA, 20 bp, Artificial Sequence
  Synthetic oligonucleotide; AAG chr2 60483600 60483619 60483616 +
gcagttgtcagaaataactc

SEQ ID NO: 160972 - DNA, 20 bp, Artificial Sequence
  Synthetic oligonucleotide; GAG chr2 60483602 60483621 60483618 +
agttgtcagaaataactcaa

SEQ ID NO: 160973 - DNA, 20 bp, Artificial Sequence
  Synthetic oligonucleotide; GAG chr2 60483604 60483623 60483620 +
ttgtcagaaataactcaaga

SEQ ID NO: 160974 - DNA, 20 bp, Artificial Sequence
  Synthetic oligonucleotide; AGG chr2 60483605 60483624 60483621 +
tgtcagaaataactcaagag

SEQ ID NO: 160975 - DNA, 20 bp, Artificial Sequence
  Synthetic oligonucleotide; CAG chr2 60483619 60483638 60483635 +
caagagaggatgctcgtccc

SEQ ID NO: 160976 - DNA, 20 bp, Artificial Sequence
  Synthetic oligonucleotide; AGG chr2 60483620 60483639 60483636 +
aagagaggatgctcgtcccc

SEQ ID NO: 160977 - DNA, 20 bp, Artificial Sequence
  Synthetic oligonucleotide; GAG chr2 60483638 60483657 60483654 +
ccaggaaacatcaaatgaat

SEQ ID NO: 160978 - DNA, 20 bp, Artificial Sequence
  Synthetic oligonucleotide; TGG chr2 60483642 60483661 60483658 +
gaaacatcaaatgaatgagc

SEQ ID NO: 160979 - DNA, 20 bp, Artificial Sequence
  Synthetic oligonucleotide; TAG chr2 60483650 60483669 60483666 +
aaatgaatgagctggcatat

SEQ ID NO: 160980 - DNA, 20 bp, Artificial Sequence
  Synthetic oligonucleotide; CAG chr2 60483653 60483672 60483669 +
tgaatgagctggcatattag

SEQ ID NO: 160981 - DNA, 20 bp, Artificial Sequence
  Synthetic oligonucleotide; TGG chr2 60483659 60483678 60483675 +
agctggcatattagcagacg

SEQ ID NO: 160982 - DNA, 20 bp, Artificial Sequence
  Synthetic oligonucleotide; CAG chr2 60483666 60483685 60483682 +
atattagcagacgtggatta

SEQ ID NO: 160983 - DNA, 20 bp, Artificial Sequence
  Synthetic oligonucleotide; AAG chr2 60483670 60483689 60483686 +
tagcagacgtggattacagt

SEQ ID NO: 160984 - DNA, 20 bp, Artificial Sequence
  Synthetic oligonucleotide; AGG chr2 60483671 60483690 60483687 +
agcagacgtggattacagta

SEQ ID NO: 160985 - DNA, 20 bp, Artificial Sequence
  Synthetic oligonucleotide; CAG chr2 60483685 60483704 60483701 +
acagtaaggaaaatctaaaa

SEQ ID NO: 160986 - DNA, 20 bp, Artificial Sequence
  Synthetic oligonucleotide; AAG chr2 60483688 60483707 60483704 +
gtaaggaaaatctaaaacag

SEQ ID NO: 160987 - DNA, 20 bp, Artificial Sequence
  Synthetic oligonucleotide; TGG chr2 60483698 60483717 60483714 +
tctaaaacagaagatgtatc

SEQ ID NO: 160988 - DNA, 20 bp, Artificial Sequence
  Synthetic oligonucleotide; CAG chr2 60483707 60483726 60483723 +
gaagatgtatctggatgctt

SEQ ID NO: 160989 - DNA, 20 bp, Artificial Sequence
  Synthetic oligonucleotide; CAG chr2 60483710 60483729 60483726 +
gatgtatctggatgcttcag

SEQ ID NO: 160990 - DNA, 20 bp, Artificial Sequence
  Synthetic oligonucleotide; AAG chr2 60483719 60483738 60483735 +
ggatgcttcagcagacaaca

SEQ ID NO: 160991 - DNA, 20 bp, Artificial Sequence
  Synthetic oligonucleotide; AGG chr2 60483720 60483739 60483736 +
gatgcttcagcagacaacaa

SEQ ID NO: 160992 - DNA, 20 bp, Artificial Sequence
  Synthetic oligonucleotide; AAG chr2 60483723 60483742 60483739 +
gcttcagcagacaacaaagg

SEQ ID NO: 160993 - DNA, 20 bp, Artificial Sequence
  Synthetic oligonucleotide; TGG chr2 60483730 60483749 60483746 +
cagacaacaaaggaagaatt

SEQ ID NO: 160994 - DNA, 20 bp, Artificial Sequence
  Synthetic oligonucleotide; GGG chr2 60483731 60483750 60483747 +
agacaacaaaggaagaattt

SEQ ID NO: 160995 - DNA, 20 bp, Artificial Sequence
  Synthetic oligonucleotide; GGG chr2 60483732 60483751 60483748 +
gacaacaaaggaagaatttg

SEQ ID NO: 160996 - DNA, 20 bp, Artificial Sequence
  Synthetic oligonucleotide; TGG chr2 60483737 60483756 60483753 +
caaaggaagaatttggggac

SEQ ID NO: 160997 - DNA, 20 bp, Artificial Sequence
  Synthetic oligonucleotide; GGG chr2 60483738 60483757 60483754 +
aaaggaagaatttggggact

SEQ ID NO: 160998 - DNA, 20 bp, Artificial Sequence
  Synthetic oligonucleotide; AAG chr2 60483744 60483763 60483760 +
agaatttggggactgggtct

SEQ ID NO: 160999 - DNA, 20 bp, Artificial Sequence
  Synthetic oligonucleotide; AAG chr2 60483757 60483776 60483773 +
tgggtctaagcactcgccca

SEQ ID NO: 161000 - DNA, 20 bp, Artificial Sequence
  Synthetic oligonucleotide; TAG chr2 60483763 60483782 60483779 +
taagcactcgcccaaagcac

SEQ ID NO: 161001 - DNA, 20 bp, Artificial Sequence
  Synthetic oligonucleotide; AAG chr2 60483766 60483785 60483782 +
gcactcgcccaaagcactag

SEQ ID NO: 161002 - DNA, 20 bp, Artificial Sequence
  Synthetic oligonucleotide; AGG chr2 60483767 60483786 60483783 +
cactcgcccaaagcactaga

SEQ ID NO: 161003 - DNA, 20 bp, Artificial Sequence
  Synthetic oligonucleotide; GAG chr2 60483769 60483788 60483785 +
ctcgcccaaagcactagaag

SEQ ID NO: 161004 - DNA, 20 bp, Artificial Sequence
  Synthetic oligonucleotide; AGG chr2 60483770 60483789 60483786 +
tcgcccaaagcactagaagg

SEQ ID NO: 161005 - DNA, 20 bp, Artificial Sequence
  Synthetic oligonucleotide; TGG chr2 60483809 60483828 60483825 +
ctttcctatttttgttcttc

SEQ ID NO: 161006 - DNA, 20 bp, Artificial Sequence
  Synthetic oligonucleotide; TGG chr2 60483866 60483885 60483882 +
ctttccttctttttctttct

SEQ ID NO: 161007 - DNA, 20 bp, Artificial Sequence
  Synthetic oligonucleotide; GAG chr2 60483909 60483928 60483925 +
gaaactgaaccattataaat

SEQ ID NO: 161008 - DNA, 20 bp, Artificial Sequence
  Synthetic oligonucleotide; TGG chr2 60483913 60483932 60483929 +
ctgaaccattataaatgagt

SEQ ID NO: 161009 - DNA, 20 bp, Artificial Sequence
  Synthetic oligonucleotide; TAG chr2 60483921 60483940 60483937 +
ttataaatgagttggtctca

SEQ ID NO: 161010 - DNA, 20 bp, Artificial Sequence
  Synthetic oligonucleotide; CAG chr2 60483938 60483957 60483954 +
tcatagcttctgttaaaaat

SEQ ID NO: 161011 - DNA, 20 bp, Artificial Sequence
  Synthetic oligonucleotide; AAG chr2 60483941 60483960 60483957 +
tagcttctgttaaaaatcag

SEQ ID NO: 161012 - DNA, 20 bp, Artificial Sequence
  Synthetic oligonucleotide; TAG chr2 60483949 60483968 60483965 +
gttaaaaatcagaagcttgt

SEQ ID NO: 161013 - DNA, 20 bp, Artificial Sequence
  Synthetic oligonucleotide; GAG chr2 60483990 60484009 60484006 +
ttgtgacacttaccgcgtat

SEQ ID NO: 161014 - DNA, 20 bp, Artificial Sequence
  Synthetic oligonucleotide; AGG chr2 60483991 60484010 60484007 +
tgtgacacttaccgcgtatg

SEQ ID NO: 161015 - DNA, 20 bp, Artificial Sequence
  Synthetic oligonucleotide; GGG chr2 60483992 60484011 60484008 +
gtgacacttaccgcgtatga

SEQ ID NO: 161016 - DNA, 20 bp, Artificial Sequence
  Synthetic oligonucleotide; GGG chr2 60483993 60484012 60484009 +
tgacacttaccgcgtatgag

SEQ ID NO: 161017 - DNA, 20 bp, Artificial Sequence
  Synthetic oligonucleotide; CAG chr2 60484006 60484025 60484022 +
gtatgaggggtcttgtcgaa

SEQ ID NO: 161018 - DNA, 20 bp, Artificial Sequence
  Synthetic oligonucleotide; TAG chr2 60484022 60484041 60484038 +
cgaacagctttactctaatt

SEQ ID NO: 161019 - DNA, 20 bp, Artificial Sequence
  Synthetic oligonucleotide; GAG chr2 60484024 60484043 60484040 +
aacagctttactctaattta

SEQ ID NO: 161020 - DNA, 20 bp, Artificial Sequence
  Synthetic oligonucleotide; TAG chr2 60484040 60484059 60484056 +
tttagagctcctctgttaat

SEQ ID NO: 161021 - DNA, 20 bp, Artificial Sequence
  Synthetic oligonucleotide; AAG chr2 60484044 60484063 60484060 +
gagctcctctgttaattaga

SEQ ID NO: 161022 - DNA, 20 bp, Artificial Sequence
  Synthetic oligonucleotide; CAG chr2 60484051 60484070 60484067 +
tctgttaattagaaagccct

SEQ ID NO: 161023 - DNA, 20 bp, Artificial Sequence
  Synthetic oligonucleotide; CAG chr2 60484068 60484087 60484084 +
cctcagattttctgcaaatg

SEQ ID NO: 161024 - DNA, 20 bp, Artificial Sequence
  Synthetic oligonucleotide; AGG chr2 60484069 60484088 60484085 +
ctcagattttctgcaaatgc

SEQ ID NO: 161025 - DNA, 20 bp, Artificial Sequence
  Synthetic oligonucleotide; CAG chr2 60484082 60484101 60484098 +
caaatgcaggtcactatcga

SEQ ID NO: 161026 - DNA, 20 bp, Artificial Sequence
  Synthetic oligonucleotide; CAG chr2 60484112 60484131 60484128 +
ttttgatgcttcgtctgtga

SEQ ID NO: 161027 - DNA, 20 bp, Artificial Sequence
  Synthetic oligonucleotide; TGG chr2 60484119 60484138 60484135 +
gcttcgtctgtgacagttgt

SEQ ID NO: 161028 - DNA, 20 bp, Artificial Sequence
  Synthetic oligonucleotide; GGG chr2 60484120 60484139 60484136 +
cttcgtctgtgacagttgtt

SEQ ID NO: 161029 - DNA, 20 bp, Artificial Sequence
  Synthetic oligonucleotide; TAG chr2 60484132 60484151 60484148 +
cagttgttgggttgcccttc

SEQ ID NO: 161030 - DNA, 20 bp, Artificial Sequence
  Synthetic oligonucleotide; AGG chr2 60484133 60484152 60484149 +
agttgttgggttgcccttct

SEQ ID NO: 161031 - DNA, 20 bp, Artificial Sequence
  Synthetic oligonucleotide; GAG chr2 60484135 60484154 60484151 +
ttgttgggttgcccttctag

SEQ ID NO: 161032 - DNA, 20 bp, Artificial Sequence
  Synthetic oligonucleotide; TGG chr2 60484139 60484158 60484155 +
tgggttgcccttctaggagc

SEQ ID NO: 161033 - DNA, 20 bp, Artificial Sequence
  Synthetic oligonucleotide; CAG chr2 60484142 60484161 60484158 +
gttgcccttctaggagctgg

SEQ ID NO: 161034 - DNA, 20 bp, Artificial Sequence
  Synthetic oligonucleotide; AGG chr2 60484143 60484162 60484159 +
ttgcccttctaggagctggc

SEQ ID NO: 161035 - DNA, 20 bp, Artificial Sequence
  Synthetic oligonucleotide; GGG chr2 60484144 60484163 60484160 +
tgcccttctaggagctggca

SEQ ID NO: 161036 - DNA, 20 bp, Artificial Sequence
  Synthetic oligonucleotide; CAG chr2 60484152 60484171 60484168 +
taggagctggcagggttgtc

SEQ ID NO: 161037 - DNA, 20 bp, Artificial Sequence
  Synthetic oligonucleotide; CAG chr2 60484162 60484181 60484178 +
cagggttgtccagactctga

SEQ ID NO: 161038 - DNA, 20 bp, Artificial Sequence
  Synthetic oligonucleotide; CAG chr2 60484168 60484187 60484184 +
tgtccagactctgacagtgt

SEQ ID NO: 161039 - DNA, 20 bp, Artificial Sequence
  Synthetic oligonucleotide; CAG chr2 60484177 60484196 60484193 +
tctgacagtgtcagaaaatg

SEQ ID NO: 161040 - DNA, 20 bp, Artificial Sequence
  Synthetic oligonucleotide; CGG chr2 60484186 60484205 60484202 +
gtcagaaaatgcagtcacca

SEQ ID NO: 161041 - DNA, 20 bp, Artificial Sequence
  Synthetic oligonucleotide; CAG chr2 60484197 60484216 60484213 +
cagtcaccacggctgcttca

SEQ ID NO: 161042 - DNA, 20 bp, Artificial Sequence
  Synthetic oligonucleotide; AGG chr2 60484198 60484217 60484214 +
agtcaccacggctgcttcac

SEQ ID NO: 161043 - DNA, 20 bp, Artificial Sequence
  Synthetic oligonucleotide; AAG chr2 60484201 60484220 60484217 +
caccacggctgcttcacagg

SEQ ID NO: 161044 - DNA, 20 bp, Artificial Sequence
  Synthetic oligonucleotide; AAG chr2 60484212 60484231 60484228 +
cttcacaggaagttacacgc

SEQ ID NO: 161045 - DNA, 20 bp, Artificial Sequence
  Synthetic oligonucleotide; AGG chr2 60484213 60484232 60484229 +
ttcacaggaagttacacgca

SEQ ID NO: 161046 - DNA, 20 bp, Artificial Sequence
  Synthetic oligonucleotide; CAG chr2 60484224 60484243 60484240 +
ttacacgcaaggtccgcaca

SEQ ID NO: 161047 - DNA, 20 bp, Artificial Sequence
  Synthetic oligonucleotide; CAG chr2 60484228 60484247 60484244 +
acgcaaggtccgcacacagt

SEQ ID NO: 161048 - DNA, 20 bp, Artificial Sequence
  Synthetic oligonucleotide; TAG chr2 60484239 60484258 60484255 +
gcacacagtcagtttccctg

SEQ ID NO: 161049 - DNA, 20 bp, Artificial Sequence
  Synthetic oligonucleotide; CAG chr2 60484244 60484263 60484260 +
cagtcagtttccctgtagcc

SEQ ID NO: 161050 - DNA, 20 bp, Artificial Sequence
  Synthetic oligonucleotide; AAG chr2 60484247 60484266 60484263 +
tcagtttccctgtagcccag

SEQ ID NO: 161051 - DNA, 20 bp, Artificial Sequence
  Synthetic oligonucleotide; CAG chr2 60484274 60484293 60484290 +
atgaaatctgcactcacatt

SEQ ID NO: 161052 - DNA, 20 bp, Artificial Sequence
  Synthetic oligonucleotide; TAG chr2 60484284 60484303 60484300 +
cactcacattcagctgaaaa

SEQ ID NO: 161053 - DNA, 20 bp, Artificial Sequence
  Synthetic oligonucleotide; CAG chr2 60484377 60484396 60484393 +
ctttctccaacctctgtttc

SEQ ID NO: 161054 - DNA, 20 bp, Artificial Sequence
  Synthetic oligonucleotide; TAG chr2 60484407 60484426 60484423 +
tttctcatcttctctctctt

SEQ ID NO: 161055 - DNA, 20 bp, Artificial Sequence
  Synthetic oligonucleotide; TGG chr2 60484421 60484440 60484437 +
tctctttagtcctcaacaac

SEQ ID NO: 161056 - DNA, 20 bp, Artificial Sequence
  Synthetic oligonucleotide; GGG chr2 60484422 60484441 60484438 +
ctctttagtcctcaacaact

SEQ ID NO: 161057 - DNA, 20 bp, Artificial Sequence
  Synthetic oligonucleotide; GGG chr2 60484423 60484442 60484439 +
tctttagtcctcaacaactg

SEQ ID NO: 161058 - DNA, 20 bp, Artificial Sequence
  Synthetic oligonucleotide; CAG chr2 60484443 60484462 60484459 +
gggtcctctgctgtcaaaaa

SEQ ID NO: 161059 - DNA, 20 bp, Artificial Sequence
  Synthetic oligonucleotide; CAG chr2 60484456 60484475 60484472 +
tcaaaaacagccacattcac

SEQ ID NO: 161060 - DNA, 20 bp, Artificial Sequence
  Synthetic oligonucleotide; AAG chr2 60484460 60484479 60484476 +
aaacagccacattcaccaga

SEQ ID NO: 161061 - DNA, 20 bp, Artificial Sequence
  Synthetic oligonucleotide; AGG chr2 60484461 60484480 60484477 +
aacagccacattcaccagaa

SEQ ID NO: 161062 - DNA, 20 bp, Artificial Sequence
  Synthetic oligonucleotide; GGG chr2 60484462 60484481 60484478 +
acagccacattcaccagaaa

SEQ ID NO: 161063 - DNA, 20 bp, Artificial Sequence
  Synthetic oligonucleotide; AAG chr2 60484465 60484484 60484481 +
gccacattcaccagaaaggg

SEQ ID NO: 161064 - DNA, 20 bp, Artificial Sequence
  Synthetic oligonucleotide; TAG chr2 60484468 60484487 60484484 +
acattcaccagaaagggaag

SEQ ID NO: 161065 - DNA, 20 bp, Artificial Sequence
  Synthetic oligonucleotide; AGG chr2 60484469 60484488 60484485 +
cattcaccagaaagggaagt

SEQ ID NO: 161066 - DNA, 20 bp, Artificial Sequence
  Synthetic oligonucleotide; CAG chr2 60484477 60484496 60484493 +
agaaagggaagtaggtttta

SEQ ID NO: 161067 - DNA, 20 bp, Artificial Sequence
  Synthetic oligonucleotide; CGG chr2 60484486 60484505 60484502 +
agtaggttttacagataaac

SEQ ID NO: 161068 - DNA, 20 bp, Artificial Sequence
  Synthetic oligonucleotide; GGG chr2 60484487 60484506 60484503 +
gtaggttttacagataaacc

SEQ ID NO: 161069 - DNA, 20 bp, Artificial Sequence
  Synthetic oligonucleotide; CAG chr2 60484506 60484525 60484522 +
cgggttgcttttcactgaaa

SEQ ID NO: 161070 - DNA, 20 bp, Artificial Sequence
  Synthetic oligonucleotide; CAG chr2 60484509 60484528 60484525 +
gttgcttttcactgaaacag

SEQ ID NO: 161071 - DNA, 20 bp, Artificial Sequence
  Synthetic oligonucleotide; TGG chr2 60484518 60484537 60484534 +
cactgaaacagcagtgattg

SEQ ID NO: 161072 - DNA, 20 bp, Artificial Sequence
  Synthetic oligonucleotide; CAG chr2 60484523 60484542 60484539 +
aaacagcagtgattgtggaa

SEQ ID NO: 161073 - DNA, 20 bp, Artificial Sequence
  Synthetic oligonucleotide; CGG chr2 60484575 60484594 60484591 +
tatttcctatttttttgcac

SEQ ID NO: 161074 - DNA, 20 bp, Artificial Sequence
  Synthetic oligonucleotide; CAG chr2 60484579 60484598 60484595 +
tcctatttttttgcaccggt

SEQ ID NO: 161075 - DNA, 20 bp, Artificial Sequence
  Synthetic oligonucleotide; CAG chr2 60484582 60484601 60484598 +
tatttttttgcaccggtcag

SEQ ID NO: 161076 - DNA, 20 bp, Artificial Sequence
  Synthetic oligonucleotide; TGG chr2 60484592 60484611 60484608 +
caccggtcagcagccgcacc

SEQ ID NO: 161077 - DNA, 20 bp, Artificial Sequence
  Synthetic oligonucleotide; GAG chr2 60484596 60484615 60484612 +
ggtcagcagccgcacctggt

SEQ ID NO: 161078 - DNA, 20 bp, Artificial Sequence
  Synthetic oligonucleotide; AGG chr2 60484597 60484616 60484613 +
gtcagcagccgcacctggtg

SEQ ID NO: 161079 - DNA, 20 bp, Artificial Sequence
  Synthetic oligonucleotide; GAG chr2 60484602 60484621 60484618 +
cagccgcacctggtgaggct

SEQ ID NO: 161080 - DNA, 20 bp, Artificial Sequence
  Synthetic oligonucleotide; AGG chr2 60484603 60484622 60484619 +
agccgcacctggtgaggctg

SEQ ID NO: 161081 - DNA, 20 bp, Artificial Sequence
  Synthetic oligonucleotide; AAG chr2 60484608 60484627 60484624 +
cacctggtgaggctgaggtc

SEQ ID NO: 161082 - DNA, 20 bp, Artificial Sequence
  Synthetic oligonucleotide; AGG chr2 60484609 60484628 60484625 +
acctggtgaggctgaggtca

SEQ ID NO: 161083 - DNA, 20 bp, Artificial Sequence
  Synthetic oligonucleotide; TGG chr2 60484626 60484645 60484642 +
tcaaggctgtacttccaaca

SEQ ID NO: 161084 - DNA, 20 bp, Artificial Sequence
  Synthetic oligonucleotide; AAG chr2 60484646 60484665 60484662 +
tggctcacgtgttttttctt

SEQ ID NO: 161085 - DNA, 20 bp, Artificial Sequence
  Synthetic oligonucleotide; GAG chr2 60484648 60484667 60484664 +
gctcacgtgttttttcttaa

SEQ ID NO: 161086 - DNA, 20 bp, Artificial Sequence
  Synthetic oligonucleotide; AAG chr2 60484651 60484670 60484667 +
cacgtgttttttcttaagag

SEQ ID NO: 161087 - DNA, 20 bp, Artificial Sequence
  Synthetic oligonucleotide; AGG chr2 60484652 60484671 60484668 +
acgtgttttttcttaagaga

SEQ ID NO: 161088 - DNA, 20 bp, Artificial Sequence
  Synthetic oligonucleotide; GGG chr2 60484653 60484672 60484669 +
cgtgttttttcttaagagaa

SEQ ID NO: 161089 - DNA, 20 bp, Artificial Sequence
  Synthetic oligonucleotide; GGG chr2 60484654 60484673 60484670 +
gtgttttttcttaagagaag

SEQ ID NO: 161090 - DNA, 20 bp, Artificial Sequence
  Synthetic oligonucleotide; GGG chr2 60484655 60484674 60484671 +
tgttttttcttaagagaagg

SEQ ID NO: 161091 - DNA, 20 bp, Artificial Sequence
  Synthetic oligonucleotide; TGG chr2 60484662 60484681 60484678 +
tcttaagagaagggggaatt

SEQ ID NO: 161092 - DNA, 20 bp, Artificial Sequence
  Synthetic oligonucleotide; GAG chr2 60484664 60484683 60484680 +
ttaagagaagggggaatttg

SEQ ID NO: 161093 - DNA, 20 bp, Artificial Sequence
  Synthetic oligonucleotide; AGG chr2 60484665 60484684 60484681 +
taagagaagggggaatttgg

SEQ ID NO: 161094 - DNA, 20 bp, Artificial Sequence
  Synthetic oligonucleotide; GGG chr2 60484666 60484685 60484682 +
aagagaagggggaatttgga

SEQ ID NO: 161095 - DNA, 20 bp, Artificial Sequence
  Synthetic oligonucleotide; GGG chr2 60484667 60484686 60484683 +
agagaagggggaatttggag

SEQ ID NO: 161096 - DNA, 20 bp, Artificial Sequence
  Synthetic oligonucleotide; GGG chr2 60484668 60484687 60484684 +
gagaagggggaatttggagg

SEQ ID NO: 161097 - DNA, 20 bp, Artificial Sequence
  Synthetic oligonucleotide; GGG chr2 60484669 60484688 60484685 +
agaagggggaatttggaggg

SEQ ID NO: 161098 - DNA, 20 bp, Artificial Sequence
  Synthetic oligonucleotide; AAG chr2 60484678 60484697 60484694 +
aatttggaggggggcaaaaa

SEQ ID NO: 161099 - DNA, 20 bp, Artificial Sequence
  Synthetic oligonucleotide; AAG chr2 60484681 60484700 60484697 +
ttggaggggggcaaaaaaag

SEQ ID NO: 161100 - DNA, 20 bp, Artificial Sequence
  Synthetic oligonucleotide; AGG chr2 60484682 60484701 60484698 +
tggaggggggcaaaaaaaga

SEQ ID NO: 161101 - DNA, 20 bp, Artificial Sequence
  Synthetic oligonucleotide; GAG chr2 60484684 60484703 60484700 +
gaggggggcaaaaaaagaag

SEQ ID NO: 161102 - DNA, 20 bp, Artificial Sequence
  Synthetic oligonucleotide; AAG chr2 60484688 60484707 60484704 +
ggggcaaaaaaagaaggaga

SEQ ID NO: 161103 - DNA, 20 bp, Artificial Sequence
  Synthetic oligonucleotide; GAG chr2 60484690 60484709 60484706 +
ggcaaaaaaagaaggagaaa

SEQ ID NO: 161104 - DNA, 20 bp, Artificial Sequence
  Synthetic oligonucleotide; GAG chr2 60484692 60484711 60484708 +
caaaaaaagaaggagaaaga

SEQ ID NO: 161105 - DNA, 20 bp, Artificial Sequence
  Synthetic oligonucleotide; AGG chr2 60484693 60484712 60484709 +
aaaaaaagaaggagaaagag

SEQ ID NO: 161106 - DNA, 20 bp, Artificial Sequence
  Synthetic oligonucleotide; AAG chr2 60484697 60484716 60484713 +
aaagaaggagaaagagagga

SEQ ID NO: 161107 - DNA, 20 bp, Artificial Sequence
  Synthetic oligonucleotide; AGG chr2 60484698 60484717 60484714 +
aagaaggagaaagagaggaa

SEQ ID NO: 161108 - DNA, 20 bp, Artificial Sequence
  Synthetic oligonucleotide; GAG chr2 60484711 60484730 60484727 +
agaggaaaggttaaccactc

SEQ ID NO: 161109 - DNA, 20 bp, Artificial Sequence
  Synthetic oligonucleotide; TGG chr2 60484726 60484745 60484742 +
cactcgagaaaaaatgcaca

SEQ ID NO: 161110 - DNA, 20 bp, Artificial Sequence
  Synthetic oligonucleotide; GGG chr2 60484727 60484746 60484743 +
actcgagaaaaaatgcacat

SEQ ID NO: 161111 - DNA, 20 bp, Artificial Sequence
  Synthetic oligonucleotide; GAG chr2 60484732 60484751 60484748 +
agaaaaaatgcacatgggct

SEQ ID NO: 161112 - DNA, 20 bp, Artificial Sequence
  Synthetic oligonucleotide; AGG chr2 60484733 60484752 60484749 +
gaaaaaatgcacatgggctg

SEQ ID NO: 161113 - DNA, 20 bp, Artificial Sequence
  Synthetic oligonucleotide; CAG chr2 60484758 60484777 60484774 +
tcctgcccttatcaccattc

SEQ ID NO: 161114 - DNA, 20 bp, Artificial Sequence
  Synthetic oligonucleotide; TGG chr2 60484778 60484797 60484794 +
cagtataaaacctcaaatta

SEQ ID NO: 161115 - DNA, 20 bp, Artificial Sequence
  Synthetic oligonucleotide; GGG chr2 60484779 60484798 60484795 +
agtataaaacctcaaattat

SEQ ID NO: 161116 - DNA, 20 bp, Artificial Sequence
  Synthetic oligonucleotide; TAG chr2 60484792 60484811 60484808 +
aaattatgggaattctcact

SEQ ID NO: 161117 - DNA, 20 bp, Artificial Sequence
  Synthetic oligonucleotide; AGG chr2 60484793 60484812 60484809 +
aattatgggaattctcactt

SEQ ID NO: 161118 - DNA, 20 bp, Artificial Sequence
  Synthetic oligonucleotide; TGG chr2 60484808 60484827 60484824 +
cacttaggaacacctcatta

SEQ ID NO: 161119 - DNA, 20 bp, Artificial Sequence
  Synthetic oligonucleotide; TGG chr2 60484822 60484841 60484838 +
tcattatggaacatatgtgc

SEQ ID NO: 161120 - DNA, 20 bp, Artificial Sequence
  Synthetic oligonucleotide; GGG chr2 60484823 60484842 60484839 +
cattatggaacatatgtgct

SEQ ID NO: 161121 - DNA, 20 bp, Artificial Sequence
  Synthetic oligonucleotide; GGG chr2 60484824 60484843 60484840 +
attatggaacatatgtgctg

SEQ ID NO: 161122 - DNA, 20 bp, Artificial Sequence
  Synthetic oligonucleotide; GGG chr2 60484825 60484844 60484841 +
ttatggaacatatgtgctgg

SEQ ID NO: 161123 - DNA, 20 bp, Artificial Sequence
  Synthetic oligonucleotide; TGG chr2 60484830 60484849 60484846 +
gaacatatgtgctgggggtc

SEQ ID NO: 161124 - DNA, 20 bp, Artificial Sequence
  Synthetic oligonucleotide; GGG chr2 60484831 60484850 60484847 +
aacatatgtgctgggggtct

SEQ ID NO: 161125 - DNA, 20 bp, Artificial Sequence
  Synthetic oligonucleotide; GGG chr2 60484832 60484851 60484848 +
acatatgtgctgggggtctg

SEQ ID NO: 161126 - DNA, 20 bp, Artificial Sequence
  Synthetic oligonucleotide; GAG chr2 60484834 60484853 60484850 +
atatgtgctgggggtctggg

SEQ ID NO: 161127 - DNA, 20 bp, Artificial Sequence
  Synthetic oligonucleotide; TGG chr2 60484838 60484857 60484854 +
gtgctgggggtctggggaga

SEQ ID NO: 161128 - DNA, 20 bp, Artificial Sequence
  Synthetic oligonucleotide; GGG chr2 60484839 60484858 60484855 +
tgctgggggtctggggagat

SEQ ID NO: 161129 - DNA, 20 bp, Artificial Sequence
  Synthetic oligonucleotide; GAG chr2 60484841 60484860 60484857 +
ctgggggtctggggagatgg

SEQ ID NO: 161130 - DNA, 20 bp, Artificial Sequence
  Synthetic oligonucleotide; AAG chr2 60484844 60484863 60484860 +
ggggtctggggagatgggag

SEQ ID NO: 161131 - DNA, 20 bp, Artificial Sequence
  Synthetic oligonucleotide; AGG chr2 60484845 60484864 60484861 +
gggtctggggagatgggaga

SEQ ID NO: 161132 - DNA, 20 bp, Artificial Sequence
  Synthetic oligonucleotide; GGG chr2 60484846 60484865 60484862 +
ggtctggggagatgggagaa

SEQ ID NO: 161133 - DNA, 20 bp, Artificial Sequence
  Synthetic oligonucleotide; GGG chr2 60484847 60484866 60484863 +
gtctggggagatgggagaag

SEQ ID NO: 161134 - DNA, 20 bp, Artificial Sequence
  Synthetic oligonucleotide; AAG chr2 60484898 60484917 60484914 +
tgtgtgctccaaattttatc

SEQ ID NO: 161135 - DNA, 20 bp, Artificial Sequence
  Synthetic oligonucleotide; AAG chr2 60484904 60484923 60484920 +
ctccaaattttatcaagttc

SEQ ID NO: 161136 - DNA, 20 bp, Artificial Sequence
  Synthetic oligonucleotide; AAG chr2 60484912 60484931 60484928 +
tttatcaagttcaagccaaa

SEQ ID NO: 161137 - DNA, 20 bp, Artificial Sequence
  Synthetic oligonucleotide; TGG chr2 60484925 60484944 60484941 +
agccaaaaagaaatcctctg

SEQ ID NO: 161138 - DNA, 20 bp, Artificial Sequence
  Synthetic oligonucleotide; TAG chr2 60484936 60484955 60484952 +
aatcctctgtggcacttgtt

SEQ ID NO: 161139 - DNA, 20 bp, Artificial Sequence
  Synthetic oligonucleotide; AGG chr2 60484937 60484956 60484953 +
atcctctgtggcacttgttt

SEQ ID NO: 161140 - DNA, 20 bp, Artificial Sequence
  Synthetic oligonucleotide; CAG chr2 60484982 60485001 60484998 +
ccaaccaaccaaacaaaaaa

SEQ ID NO: 161141 - DNA, 20 bp, Artificial Sequence
  Synthetic oligonucleotide; TAG chr2 60484999 60485018 60485015 +
aaacagtatttaaatcaaaa

SEQ ID NO: 161142 - DNA, 20 bp, Artificial Sequence
  Synthetic oligonucleotide; AGG chr2 60485000 60485019 60485016 +
aacagtatttaaatcaaaat

SEQ ID NO: 161143 - DNA, 20 bp, Artificial Sequence
  Synthetic oligonucleotide; AAG chr2 60485043 60485062 60485059 +
acaccctcaccaccaccacc

SEQ ID NO: 161144 - DNA, 20 bp, Artificial Sequence
  Synthetic oligonucleotide; AGG chr2 60485044 60485063 60485060 +
caccctcaccaccaccacca

SEQ ID NO: 161145 - DNA, 20 bp, Artificial Sequence
  Synthetic oligonucleotide; TAG chr2 60485049 60485068 60485065 +
tcaccaccaccaccaaggca

SEQ ID NO: 161146 - DNA, 20 bp, Artificial Sequence
  Synthetic oligonucleotide; TGG chr2 60485055 60485074 60485071 +
ccaccaccaaggcatagcct

SEQ ID NO: 161147 - DNA, 20 bp, Artificial Sequence
  Synthetic oligonucleotide; AAG chr2 60485058 60485077 60485074 +
ccaccaaggcatagccttgg

SEQ ID NO: 161148 - DNA, 20 bp, Artificial Sequence
  Synthetic oligonucleotide; AAG chr2 60485064 60485083 60485080 +
aggcatagccttggaagaaa

SEQ ID NO: 161149 - DNA, 20 bp, Artificial Sequence
  Synthetic oligonucleotide; AGG chr2 60485065 60485084 60485081 +
ggcatagccttggaagaaaa

SEQ ID NO: 161150 - DNA, 20 bp, Artificial Sequence
  Synthetic oligonucleotide; CAG chr2 60485077 60485096 60485093 +
gaagaaaaaggcatcccttg

SEQ ID NO: 161151 - DNA, 20 bp, Artificial Sequence
  Synthetic oligonucleotide; AAG chr2 60485092 60485111 60485108 +
ccttgcagccacaatttcgc

SEQ ID NO: 161152 - DNA, 20 bp, Artificial Sequence
  Synthetic oligonucleotide; CAG chr2 60485108 60485127 60485124 +
tcgcaagttgaccttttcac

SEQ ID NO: 161153 - DNA, 20 bp, Artificial Sequence
  Synthetic oligonucleotide; AGG chr2 60485109 60485128 60485125 +
cgcaagttgaccttttcacc

SEQ ID NO: 161154 - DNA, 20 bp, Artificial Sequence
  Synthetic oligonucleotide; CAG chr2 60485113 60485132 60485129 +
agttgaccttttcaccaggc

SEQ ID NO: 161155 - DNA, 20 bp, Artificial Sequence
  Synthetic oligonucleotide; CAG chr2 60485132 60485151 60485148 +
ccagtgcctaatttcctaaa

SEQ ID NO: 161156 - DNA, 20 bp, Artificial Sequence
  Synthetic oligonucleotide; AGG chr2 60485133 60485152 60485149 +
cagtgcctaatttcctaaac

SEQ ID NO: 161157 - DNA, 20 bp, Artificial Sequence
  Synthetic oligonucleotide; AAG chr2 60485150 60485169 60485166 +
aacaggccccttcttccttg

SEQ ID NO: 161158 - DNA, 20 bp, Artificial Sequence
  Synthetic oligonucleotide; CAG chr2 60485169 60485188 60485185 +
gaagtcactgcaaataaatg

SEQ ID NO: 161159 - DNA, 20 bp, Artificial Sequence
  Synthetic oligonucleotide; CAG chr2 60485177 60485196 60485193 +
tgcaaataaatgcagtcatc

SEQ ID NO: 161160 - DNA, 20 bp, Artificial Sequence
  Synthetic oligonucleotide; GAG chr2 60485179 60485198 60485195 +
caaataaatgcagtcatcca

SEQ ID NO: 161161 - DNA, 20 bp, Artificial Sequence
  Synthetic oligonucleotide; TGG chr2 60485187 60485206 60485203 +
tgcagtcatccagagtgtaa

SEQ ID NO: 161162 - DNA, 20 bp, Artificial Sequence
  Synthetic oligonucleotide; AAG chr2 60485190 60485209 60485206 +
agtcatccagagtgtaatgg

SEQ ID NO: 161163 - DNA, 20 bp, Artificial Sequence
  Synthetic oligonucleotide; TGG chr2 60485195 60485214 60485211 +
tccagagtgtaatggaagtc

SEQ ID NO: 161164 - DNA, 20 bp, Artificial Sequence
  Synthetic oligonucleotide; TGG chr2 60485201 60485220 60485217 +
gtgtaatggaagtctggcct

SEQ ID NO: 161165 - DNA, 20 bp, Artificial Sequence
  Synthetic oligonucleotide; GAG chr2 60485203 60485222 60485219 +
gtaatggaagtctggccttg

SEQ ID NO: 161166 - DNA, 20 bp, Artificial Sequence
  Synthetic oligonucleotide; TGG chr2 60485210 60485229 60485226 +
aagtctggccttggagttac

SEQ ID NO: 161167 - DNA, 20 bp, Artificial Sequence
  Synthetic oligonucleotide; TGG chr2 60485227 60485246 60485243 +
tactggcttatgaaatgcaa

SEQ ID NO: 161168 - DNA, 20 bp, Artificial Sequence
  Synthetic oligonucleotide; GGG chr2 60485228 60485247 60485244 +
actggcttatgaaatgcaat

SEQ ID NO: 161169 - DNA, 20 bp, Artificial Sequence
  Synthetic oligonucleotide; GAG chr2 60485233 60485252 60485249 +
cttatgaaatgcaatgggat

SEQ ID NO: 161170 - DNA, 20 bp, Artificial Sequence
  Synthetic oligonucleotide; AGG chr2 60485234 60485253 60485250 +
ttatgaaatgcaatgggatg

SEQ ID NO: 161171 - DNA, 20 bp, Artificial Sequence
  Synthetic oligonucleotide; TGG chr2 60485237 60485256 60485253 +
tgaaatgcaatgggatgagg

SEQ ID NO: 161172 - DNA, 20 bp, Artificial Sequence
  Synthetic oligonucleotide; GGG chr2 60485238 60485257 60485254 +
gaaatgcaatgggatgaggt

SEQ ID NO: 161173 - DNA, 20 bp, Artificial Sequence
  Synthetic oligonucleotide; GGG chr2 60485239 60485258 60485255 +
aaatgcaatgggatgaggtg

SEQ ID NO: 161174 - DNA, 20 bp, Artificial Sequence
  Synthetic oligonucleotide; GAG chr2 60485243 60485262 60485259 +
gcaatgggatgaggtggggt

SEQ ID NO: 161175 - DNA, 20 bp, Artificial Sequence
  Synthetic oligonucleotide; GAG chr2 60485245 60485264 60485261 +
aatgggatgaggtggggtga

SEQ ID NO: 161176 - DNA, 20 bp, Artificial Sequence
  Synthetic oligonucleotide; AGG chr2 60485246 60485265 60485262 +
atgggatgaggtggggtgag

SEQ ID NO: 161177 - DNA, 20 bp, Artificial Sequence
  Synthetic oligonucleotide; TAG chr2 60485252 60485271 60485268 +
tgaggtggggtgagaggcca

SEQ ID NO: 161178 - DNA, 20 bp, Artificial Sequence
  Synthetic oligonucleotide; CAG chr2 60485257 60485276 60485273 +
tggggtgagaggccatagcc

SEQ ID NO: 161179 - DNA, 20 bp, Artificial Sequence
  Synthetic oligonucleotide; CGG chr2 60485266 60485285 60485282 +
aggccatagcccagactgaa

SEQ ID NO: 161180 - DNA, 20 bp, Artificial Sequence
  Synthetic oligonucleotide; CAG chr2 60485271 60485290 60485287 +
atagcccagactgaacggca

SEQ ID NO: 161181 - DNA, 20 bp, Artificial Sequence
  Synthetic oligonucleotide; CAG chr2 60485278 60485297 60485294 +
agactgaacggcacagtgac

SEQ ID NO: 161182 - DNA, 20 bp, Artificial Sequence
  Synthetic oligonucleotide; AGG chr2 60485279 60485298 60485295 +
gactgaacggcacagtgacc

SEQ ID NO: 161183 - DNA, 20 bp, Artificial Sequence
  Synthetic oligonucleotide; TAG chr2 60485282 60485301 60485298 +
tgaacggcacagtgaccagg

SEQ ID NO: 161184 - DNA, 20 bp, Artificial Sequence
  Synthetic oligonucleotide; AGG chr2 60485283 60485302 60485299 +
gaacggcacagtgaccaggt

SEQ ID NO: 161185 - DNA, 20 bp, Artificial Sequence
  Synthetic oligonucleotide; GGG chr2 60485284 60485303 60485300 +
aacggcacagtgaccaggta

SEQ ID NO: 161186 - DNA, 20 bp, Artificial Sequence
  Synthetic oligonucleotide; TGG chr2 60485287 60485306 60485303 +
ggcacagtgaccaggtaggg

SEQ ID NO: 161187 - DNA, 20 bp, Artificial Sequence
  Synthetic oligonucleotide; GAG chr2 60485289 60485308 60485305 +
cacagtgaccaggtagggtg

SEQ ID NO: 161188 - DNA, 20 bp, Artificial Sequence
  Synthetic oligonucleotide; AAG chr2 60485293 60485312 60485309 +
gtgaccaggtagggtggagc

SEQ ID NO: 161189 - DNA, 20 bp, Artificial Sequence
  Synthetic oligonucleotide; AGG chr2 60485294 60485313 60485310 +
tgaccaggtagggtggagca

SEQ ID NO: 161190 - DNA, 20 bp, Artificial Sequence
  Synthetic oligonucleotide; CAG chr2 60485303 60485322 60485319 +
agggtggagcaaggccactc

SEQ ID NO: 161191 - DNA, 20 bp, Artificial Sequence
  Synthetic oligonucleotide; AAG chr2 60485307 60485326 60485323 +
tggagcaaggccactccagc

SEQ ID NO: 161192 - DNA, 20 bp, Artificial Sequence
  Synthetic oligonucleotide; AAG chr2 60485316 60485335 60485332 +
gccactccagcaagaatgcc

SEQ ID NO: 161193 - DNA, 20 bp, Artificial Sequence
  Synthetic oligonucleotide; AGG chr2 60485317 60485336 60485333 +
ccactccagcaagaatgcca

SEQ ID NO: 161194 - DNA, 20 bp, Artificial Sequence
  Synthetic oligonucleotide; TAG chr2 60485321 60485340 60485337 +
tccagcaagaatgccaagga

SEQ ID NO: 161195 - DNA, 20 bp, Artificial Sequence
  Synthetic oligonucleotide; CAG chr2 60485328 60485347 60485344 +
agaatgccaaggatagcctg

SEQ ID NO: 161196 - DNA, 20 bp, Artificial Sequence
  Synthetic oligonucleotide; TGG chr2 60485331 60485350 60485347 +
atgccaaggatagcctgcag

SEQ ID NO: 161197 - DNA, 20 bp, Artificial Sequence
  Synthetic oligonucleotide; GGG chr2 60485332 60485351 60485348 +
tgccaaggatagcctgcagt

SEQ ID NO: 161198 - DNA, 20 bp, Artificial Sequence
  Synthetic oligonucleotide; TAG chr2 60485339 60485358 60485355 +
gatagcctgcagtgggttat

SEQ ID NO: 161199 - DNA, 20 bp, Artificial Sequence
  Synthetic oligonucleotide; CAG chr2 60485345 60485364 60485361 +
ctgcagtgggttattagccc

SEQ ID NO: 161200 - DNA, 20 bp, Artificial Sequence
  Synthetic oligonucleotide; CAG chr2 60485348 60485367 60485364 +
cagtgggttattagccccag

SEQ ID NO: 161201 - DNA, 20 bp, Artificial Sequence
  Synthetic oligonucleotide; AGG chr2 60485349 60485368 60485365 +
agtgggttattagccccagc

SEQ ID NO: 161202 - DNA, 20 bp, Artificial Sequence
  Synthetic oligonucleotide; GGG chr2 60485350 60485369 60485366 +
gtgggttattagccccagca

SEQ ID NO: 161203 - DNA, 20 bp, Artificial Sequence
  Synthetic oligonucleotide; CGG chr2 60485365 60485384 60485381 +
cagcagggcccatgcctcta

SEQ ID NO: 161204 - DNA, 20 bp, Artificial Sequence
  Synthetic oligonucleotide; TGG chr2 60485392 60485411 60485408 +
gttgctgtcatcttcgttct

SEQ ID NO: 161205 - DNA, 20 bp, Artificial Sequence
  Synthetic oligonucleotide; TAG chr2 60485396 60485415 60485412 +
ctgtcatcttcgttcttggc

SEQ ID NO: 161206 - DNA, 20 bp, Artificial Sequence
  Synthetic oligonucleotide; CAG chr2 60485399 60485418 60485415 +
tcatcttcgttcttggctag

SEQ ID NO: 161207 - DNA, 20 bp, Artificial Sequence
  Synthetic oligonucleotide; TAG chr2 60485406 60485425 60485422 +
cgttcttggctagcagatgc

SEQ ID NO: 161208 - DNA, 20 bp, Artificial Sequence
  Synthetic oligonucleotide; CAG chr2 60485412 60485431 60485428 +
tggctagcagatgctagtcc

SEQ ID NO: 161209 - DNA, 20 bp, Artificial Sequence
  Synthetic oligonucleotide; AGG chr2 60485413 60485432 60485429 +
ggctagcagatgctagtccc

SEQ ID NO: 161210 - DNA, 20 bp, Artificial Sequence
  Synthetic oligonucleotide; AAG chr2 60485434 60485453 60485450 +
ggaatgtcctccatgccttt

SEQ ID NO: 161211 - DNA, 20 bp, Artificial Sequence
  Synthetic oligonucleotide; CAG chr2 60485450 60485469 60485466 +
ctttaagctaactgcaaaaa

SEQ ID NO: 161212 - DNA, 20 bp, Artificial Sequence
  Synthetic oligonucleotide; CGG chr2 60485455 60485474 60485471 +
agctaactgcaaaaacagaa

SEQ ID NO: 161213 - DNA, 20 bp, Artificial Sequence
  Synthetic oligonucleotide; GAG chr2 60485461 60485480 60485477 +
ctgcaaaaacagaacggtgt

SEQ ID NO: 161214 - DNA, 20 bp, Artificial Sequence
  Synthetic oligonucleotide; CAG chr2 60485465 60485484 60485481 +
aaaaacagaacggtgtgagc

SEQ ID NO: 161215 - DNA, 20 bp, Artificial Sequence
  Synthetic oligonucleotide; AGG chr2 60485466 60485485 60485482 +
aaaacagaacggtgtgagcc

SEQ ID NO: 161216 - DNA, 20 bp, Artificial Sequence
  Synthetic oligonucleotide; GGG chr2 60485467 60485486 60485483 +
aaacagaacggtgtgagcca

SEQ ID NO: 161217 - DNA, 20 bp, Artificial Sequence
  Synthetic oligonucleotide; CAG chr2 60485470 60485489 60485486 +
cagaacggtgtgagccaggg

SEQ ID NO: 161218 - DNA, 20 bp, Artificial Sequence
  Synthetic oligonucleotide; AAG chr2 60485501 60485520 60485517 +
ctcttttatattctacctat

SEQ ID NO: 161219 - DNA, 20 bp, Artificial Sequence
  Synthetic oligonucleotide; AGG chr2 60485502 60485521 60485518 +
tcttttatattctacctata

SEQ ID NO: 161220 - DNA, 20 bp, Artificial Sequence
  Synthetic oligonucleotide; GGG chr2 60485503 60485522 60485519 +
cttttatattctacctataa

SEQ ID NO: 161221 - DNA, 20 bp, Artificial Sequence
  Synthetic oligonucleotide; TAG chr2 60485517 60485536 60485533 +
ctataagggaaaaataaacc

SEQ ID NO: 161222 - DNA, 20 bp, Artificial Sequence
  Synthetic oligonucleotide; TGG chr2 60485523 60485542 60485539 +
gggaaaaataaacctagacc

SEQ ID NO: 161223 - DNA, 20 bp, Artificial Sequence
  Synthetic oligonucleotide; AAG chr2 60485539 60485558 60485555 +
gacctggaaaacaatgtgta

SEQ ID NO: 161224 - DNA, 20 bp, Artificial Sequence
  Synthetic oligonucleotide; TGG chr2 60485542 60485561 60485558 +
ctggaaaacaatgtgtaaag

SEQ ID NO: 161225 - DNA, 20 bp, Artificial Sequence
  Synthetic oligonucleotide; AAG chr2 60485548 60485567 60485564 +
aacaatgtgtaaagtggcaa

SEQ ID NO: 161226 - DNA, 20 bp, Artificial Sequence
  Synthetic oligonucleotide; AAG chr2 60485569 60485588 60485585 +
agccaatcaactcatttaaa

SEQ ID NO: 161227 - DNA, 20 bp, Artificial Sequence
  Synthetic oligonucleotide; AAG chr2 60485596 60485615 60485612 +
accctccatccaacgtcacg

SEQ ID NO: 161228 - DNA, 20 bp, Artificial Sequence
  Synthetic oligonucleotide; TAG chr2 60485610 60485629 60485626 +
gtcacgaagctgctgaatat

SEQ ID NO: 161229 - DNA, 20 bp, Artificial Sequence
  Synthetic oligonucleotide; AGG chr2 60485611 60485630 60485627 +
tcacgaagctgctgaatatt

SEQ ID NO: 161230 - DNA, 20 bp, Artificial Sequence
  Synthetic oligonucleotide; TGG chr2 60485618 60485637 60485634 +
gctgctgaatattaggttcc

SEQ ID NO: 161231 - DNA, 20 bp, Artificial Sequence
  Synthetic oligonucleotide; GGG chr2 60485619 60485638 60485635 +
ctgctgaatattaggttcct

SEQ ID NO: 161232 - DNA, 20 bp, Artificial Sequence
  Synthetic oligonucleotide; AAG chr2 60485622 60485641 60485638 +
ctgaatattaggttcctggg

SEQ ID NO: 161233 - DNA, 20 bp, Artificial Sequence
  Synthetic oligonucleotide; CAG chr2 60485631 60485650 60485647 +
aggttcctgggaagctgtcc

SEQ ID NO: 161234 - DNA, 20 bp, Artificial Sequence
  Synthetic oligonucleotide; TAG chr2 60485639 60485658 60485655 +
gggaagctgtcccagcaacc

SEQ ID NO: 161235 - DNA, 20 bp, Artificial Sequence
  Synthetic oligonucleotide; GAG chr2 60485646 60485665 60485662 +
tgtcccagcaacctagatat

SEQ ID NO: 161236 - DNA, 20 bp, Artificial Sequence
  Synthetic oligonucleotide; TGG chr2 60485667 60485686 60485683 +
agaaacaacgcttgctattc

SEQ ID NO: 161237 - DNA, 20 bp, Artificial Sequence
  Synthetic oligonucleotide; GGG chr2 60485668 60485687 60485684 +
gaaacaacgcttgctattct

SEQ ID NO: 161238 - DNA, 20 bp, Artificial Sequence
  Synthetic oligonucleotide; GGG chr2 60485669 60485688 60485685 +
aaacaacgcttgctattctg

SEQ ID NO: 161239 - DNA, 20 bp, Artificial Sequence
  Synthetic oligonucleotide; GAG chr2 60485673 60485692 60485689 +
aacgcttgctattctggggt

SEQ ID NO: 161240 - DNA, 20 bp, Artificial Sequence
  Synthetic oligonucleotide; AAG chr2 60485676 60485695 60485692 +
gcttgctattctggggtgag

SEQ ID NO: 161241 - DNA, 20 bp, Artificial Sequence
  Synthetic oligonucleotide; AAG chr2 60485681 60485700 60485697 +
ctattctggggtgagaagtg

SEQ ID NO: 161242 - DNA, 20 bp, Artificial Sequence
  Synthetic oligonucleotide; CGG chr2 60485696 60485715 60485712 +
aagtgaagttgcctttcact

SEQ ID NO: 161243 - DNA, 20 bp, Artificial Sequence
  Synthetic oligonucleotide; GGG chr2 60485697 60485716 60485713 +
agtgaagttgcctttcactc

SEQ ID NO: 161244 - DNA, 20 bp, Artificial Sequence
  Synthetic oligonucleotide; CAG chr2 60485711 60485730 60485727 +
tcactcgggactgtcaaaca

SEQ ID NO: 161245 - DNA, 20 bp, Artificial Sequence
  Synthetic oligonucleotide; CAG chr2 60485725 60485744 60485741 +
caaacacagtctataaatac

SEQ ID NO: 161246 - DNA, 20 bp, Artificial Sequence
  Synthetic oligonucleotide; CGG chr2 60485747 60485766 60485763 +
gcaatgccccttgtgaacta

SEQ ID NO: 161247 - DNA, 20 bp, Artificial Sequence
  Synthetic oligonucleotide; GGG chr2 60485748 60485767 60485764 +
caatgccccttgtgaactac

SEQ ID NO: 161248 - DNA, 20 bp, Artificial Sequence
  Synthetic oligonucleotide; GAG chr2 60485753 60485772 60485769 +
ccccttgtgaactacgggct

SEQ ID NO: 161249 - DNA, 20 bp, Artificial Sequence
  Synthetic oligonucleotide; CAG chr2 60485763 60485782 60485779 +
actacgggctgagctcaacc

SEQ ID NO: 161250 - DNA, 20 bp, Artificial Sequence
  Synthetic oligonucleotide; GAG chr2 60485765 60485784 60485781 +
tacgggctgagctcaaccca

SEQ ID NO: 161251 - DNA, 20 bp, Artificial Sequence
  Synthetic oligonucleotide; AAG chr2 60485768 60485787 60485784 +
gggctgagctcaacccagag

SEQ ID NO: 161252 - DNA, 20 bp, Artificial Sequence
  Synthetic oligonucleotide; AGG chr2 60485769 60485788 60485785 +
ggctgagctcaacccagaga

SEQ ID NO: 161253 - DNA, 20 bp, Artificial Sequence
  Synthetic oligonucleotide; AAG chr2 60485773 60485792 60485789 +
gagctcaacccagagaaggc

SEQ ID NO: 161254 - DNA, 20 bp, Artificial Sequence
  Synthetic oligonucleotide; AAG chr2 60485785 60485804 60485801 +
gagaaggcaagtgtttccca

SEQ ID NO: 161255 - DNA, 20 bp, Artificial Sequence
  Synthetic oligonucleotide; AGG chr2 60485786 60485805 60485802 +
agaaggcaagtgtttcccaa

SEQ ID NO: 161256 - DNA, 20 bp, Artificial Sequence
  Synthetic oligonucleotide; CAG chr2 60485794 60485813 60485810 +
agtgtttcccaaaggtcaca

SEQ ID NO: 161257 - DNA, 20 bp, Artificial Sequence
  Synthetic oligonucleotide; CAG chr2 60485803 60485822 60485819 +
caaaggtcacacagcaattc

SEQ ID NO: 161258 - DNA, 20 bp, Artificial Sequence
  Synthetic oligonucleotide; AGG chr2 60485804 60485823 60485820 +
aaaggtcacacagcaattcc

SEQ ID NO: 161259 - DNA, 20 bp, Artificial Sequence
  Synthetic oligonucleotide; CAG chr2 60485812 60485831 60485828 +
cacagcaattccaggtcccc

SEQ ID NO: 161260 - DNA, 20 bp, Artificial Sequence
  Synthetic oligonucleotide; AAG chr2 60485815 60485834 60485831 +
agcaattccaggtcccccag

SEQ ID NO: 161261 - DNA, 20 bp, Artificial Sequence
  Synthetic oligonucleotide; TAG chr2 60485818 60485837 60485834 +
aattccaggtcccccagaag

SEQ ID NO: 161262 - DNA, 20 bp, Artificial Sequence
  Synthetic oligonucleotide; CAG chr2 60485829 60485848 60485845 +
ccccagaagtagcccttcac

SEQ ID NO: 161263 - DNA, 20 bp, Artificial Sequence
  Synthetic oligonucleotide; TGG chr2 60485833 60485852 60485849 +
agaagtagcccttcaccaga

SEQ ID NO: 161264 - DNA, 20 bp, Artificial Sequence
  Synthetic oligonucleotide; CAG chr2 60485846 60485865 60485862 +
caccagatggatcccatcac

SEQ ID NO: 161265 - DNA, 20 bp, Artificial Sequence
  Synthetic oligonucleotide; TAG chr2 60485850 60485869 60485866 +
agatggatcccatcaccaga

SEQ ID NO: 161266 - DNA, 20 bp, Artificial Sequence
  Synthetic oligonucleotide; TGG chr2 60485857 60485876 60485873 +
tcccatcaccagatagctct

SEQ ID NO: 161267 - DNA, 20 bp, Artificial Sequence
  Synthetic oligonucleotide; AAG chr2 60485897 60485916 60485913 +
atctgattctcattttcaac

SEQ ID NO: 161268 - DNA, 20 bp, Artificial Sequence
  Synthetic oligonucleotide; AAG chr2 60485900 60485919 60485916 +
tgattctcattttcaacaag

SEQ ID NO: 161269 - DNA, 20 bp, Artificial Sequence
  Synthetic oligonucleotide; AGG chr2 60485901 60485920 60485917 +
gattctcattttcaacaaga

SEQ ID NO: 161270 - DNA, 20 bp, Artificial Sequence
  Synthetic oligonucleotide; GAG chr2 60485906 60485925 60485922 +
tcattttcaacaagaaggct

SEQ ID NO: 161271 - DNA, 20 bp, Artificial Sequence
  Synthetic oligonucleotide; AGG chr2 60485907 60485926 60485923 +
cattttcaacaagaaggctg

SEQ ID NO: 161272 - DNA, 20 bp, Artificial Sequence
  Synthetic oligonucleotide; GAG chr2 60485913 60485932 60485929 +
caacaagaaggctgaggaat

SEQ ID NO: 161273 - DNA, 20 bp, Artificial Sequence
  Synthetic oligonucleotide; TAG chr2 60485927 60485946 60485943 +
aggaatgagattgcacattt

SEQ ID NO: 161274 - DNA, 20 bp, Artificial Sequence
  Synthetic oligonucleotide; TGG chr2 60485967 60485986 60485983 +
ctttctccaaccttctgctc

SEQ ID NO: 161275 - DNA, 20 bp, Artificial Sequence
  Synthetic oligonucleotide; TAG chr2 60486009 60486028 60486025 +
acgtacaaaaaaaatctttt

SEQ ID NO: 161276 - DNA, 20 bp, Artificial Sequence
  Synthetic oligonucleotide; TAG chr2 60486018 60486037 60486034 +
aaaaatctttttagtatgtt

SEQ ID NO: 161277 - DNA, 20 bp, Artificial Sequence
  Synthetic oligonucleotide; AGG chr2 60486019 60486038 60486035 +
aaaatctttttagtatgttt

SEQ ID NO: 161278 - DNA, 20 bp, Artificial Sequence
  Synthetic oligonucleotide; GGG chr2 60486020 60486039 60486036 +
aaatctttttagtatgttta

SEQ ID NO: 161279 - DNA, 20 bp, Artificial Sequence
  Synthetic oligonucleotide; AAG chr2 60486052 60486071 60486068 +
catatctacccaaaatctcc

SEQ ID NO: 161280 - DNA, 20 bp, Artificial Sequence
  Synthetic oligonucleotide; CAG chr2 60486068 60486087 60486084 +
ctccaagccccttgttctat

SEQ ID NO: 161281 - DNA, 20 bp, Artificial Sequence
  Synthetic oligonucleotide; CAG chr2 60486071 60486090 60486087 +
caagccccttgttctatcag

SEQ ID NO: 161282 - DNA, 20 bp, Artificial Sequence
  Synthetic oligonucleotide; AGG chr2 60486072 60486091 60486088 +
aagccccttgttctatcagc

SEQ ID NO: 161283 - DNA, 20 bp, Artificial Sequence
  Synthetic oligonucleotide; AAG chr2 60486077 60486096 60486093 +
ccttgttctatcagcaggtc

SEQ ID NO: 161284 - DNA, 20 bp, Artificial Sequence
  Synthetic oligonucleotide; GAG chr2 60486079 60486098 60486095 +
ttgttctatcagcaggtcaa

SEQ ID NO: 161285 - DNA, 20 bp, Artificial Sequence
  Synthetic oligonucleotide; TAG chr2 60486082 60486101 60486098 +
ttctatcagcaggtcaagag

SEQ ID NO: 161286 - DNA, 20 bp, Artificial Sequence
  Synthetic oligonucleotide; GAG chr2 60486084 60486103 60486100 +
ctatcagcaggtcaagagta

SEQ ID NO: 161287 - DNA, 20 bp, Artificial Sequence
  Synthetic oligonucleotide; AAG chr2 60486096 60486115 60486112 +
caagagtagagaactgtgac

SEQ ID NO: 161288 - DNA, 20 bp, Artificial Sequence
  Synthetic oligonucleotide; TGG chr2 60486117 60486136 60486133 +
agctgttctccattctgaaa

SEQ ID NO: 161289 - DNA, 20 bp, Artificial Sequence
  Synthetic oligonucleotide; CAG chr2 60486131 60486150 60486147 +
ctgaaatggatttgactgaa

SEQ ID NO: 161290 - DNA, 20 bp, Artificial Sequence
  Synthetic oligonucleotide; AAG chr2 60486141 60486160 60486157 +
tttgactgaacagctgctga

SEQ ID NO: 161291 - DNA, 20 bp, Artificial Sequence
  Synthetic oligonucleotide; AGG chr2 60486142 60486161 60486158 +
ttgactgaacagctgctgaa

SEQ ID NO: 161292 - DNA, 20 bp, Artificial Sequence
  Synthetic oligonucleotide; AAG chr2 60486146 60486165 60486162 +
ctgaacagctgctgaaaggc

SEQ ID NO: 161293 - DNA, 20 bp, Artificial Sequence
  Synthetic oligonucleotide; TAG chr2 60486155 60486174 60486171 +
tgctgaaaggcaagacatcc

SEQ ID NO: 161294 - DNA, 20 bp, Artificial Sequence
  Synthetic oligonucleotide; AGG chr2 60486156 60486175 60486172 +
gctgaaaggcaagacatcct

SEQ ID NO: 161295 - DNA, 20 bp, Artificial Sequence
  Synthetic oligonucleotide; GGG chr2 60486157 60486176 60486173 +
ctgaaaggcaagacatccta

SEQ ID NO: 161296 - DNA, 20 bp, Artificial Sequence
  Synthetic oligonucleotide; GAG chr2 60486159 60486178 60486175 +
gaaaggcaagacatcctagg

SEQ ID NO: 161297 - DNA, 20 bp, Artificial Sequence
  Synthetic oligonucleotide; TGG chr2 60486164 60486183 60486180 +
gcaagacatcctagggagac

SEQ ID NO: 161298 - DNA, 20 bp, Artificial Sequence
  Synthetic oligonucleotide; TGG chr2 60486170 60486189 60486186 +
catcctagggagactggtac

SEQ ID NO: 161299 - DNA, 20 bp, Artificial Sequence
  Synthetic oligonucleotide; GGG chr2 60486171 60486190 60486187 +
atcctagggagactggtact

SEQ ID NO: 161300 - DNA, 20 bp, Artificial Sequence
  Synthetic oligonucleotide; GGG chr2 60486172 60486191 60486188 +
tcctagggagactggtactg

SEQ ID NO: 161301 - DNA, 20 bp, Artificial Sequence
  Synthetic oligonucleotide; CAG chr2 60486179 60486198 60486195 +
gagactggtactggggattt

SEQ ID NO: 161302 - DNA, 20 bp, Artificial Sequence
  Synthetic oligonucleotide; AGG chr2 60486180 60486199 60486196 +
agactggtactggggatttc

SEQ ID NO: 161303 - DNA, 20 bp, Artificial Sequence
  Synthetic oligonucleotide; GGG chr2 60486181 60486200 60486197 +
gactggtactggggatttca

SEQ ID NO: 161304 - DNA, 20 bp, Artificial Sequence
  Synthetic oligonucleotide; TGG chr2 60486195 60486214 60486211 +
atttcagggtccttgttctg

SEQ ID NO: 161305 - DNA, 20 bp, Artificial Sequence
  Synthetic oligonucleotide; GGG chr2 60486196 60486215 60486212 +
tttcagggtccttgttctgt

SEQ ID NO: 161306 - DNA, 20 bp, Artificial Sequence
  Synthetic oligonucleotide; TGG chr2 60486199 60486218 60486215 +
cagggtccttgttctgtggg

SEQ ID NO: 161307 - DNA, 20 bp, Artificial Sequence
  Synthetic oligonucleotide; TGG chr2 60486206 60486225 60486222 +
cttgttctgtgggtggacca

SEQ ID NO: 161308 - DNA, 20 bp, Artificial Sequence
  Synthetic oligonucleotide; CAG chr2 60486217 60486236 60486233 +
ggtggaccatggctcctttc

SEQ ID NO: 161309 - DNA, 20 bp, Artificial Sequence
  Synthetic oligonucleotide; GAG chr2 60486219 60486238 60486235 +
tggaccatggctcctttcca

SEQ ID NO: 161310 - DNA, 20 bp, Artificial Sequence
  Synthetic oligonucleotide; AAG chr2 60486257 60486276 60486273 +
gttctctctcctacacatca

SEQ ID NO: 161311 - DNA, 20 bp, Artificial Sequence
  Synthetic oligonucleotide; GAG chr2 60486261 60486280 60486277 +
tctctcctacacatcaaagt

SEQ ID NO: 161312 - DNA, 20 bp, Artificial Sequence
  Synthetic oligonucleotide; CAG chr2 60486274 60486293 60486290 +
tcaaagtgagacaccaatca

SEQ ID NO: 161313 - DNA, 20 bp, Artificial Sequence
  Synthetic oligonucleotide; TGG chr2 60486283 60486302 60486299 +
gacaccaatcacagctctac

SEQ ID NO: 161314 - DNA, 20 bp, Artificial Sequence
  Synthetic oligonucleotide; TGG chr2 60486309 60486328 60486325 +
accttgccccacctccaatt

SEQ ID NO: 161315 - DNA, 20 bp, Artificial Sequence
  Synthetic oligonucleotide; GAG chr2 60486337 60486356 60486353 +
ttgcctccttctcacacaat

SEQ ID NO: 161316 - DNA, 20 bp, Artificial Sequence
  Synthetic oligonucleotide; AAG chr2 60486341 60486360 60486357 +
ctccttctcacacaatgaga

SEQ ID NO: 161317 - DNA, 20 bp, Artificial Sequence
  Synthetic oligonucleotide; CGG chr2 60486346 60486365 60486362 +
tctcacacaatgagaaagaa

SEQ ID NO: 161318 - DNA, 20 bp, Artificial Sequence
  Synthetic oligonucleotide; TAG chr2 60486350 60486369 60486366 +
acacaatgagaaagaacgga

SEQ ID NO: 161319 - DNA, 20 bp, Artificial Sequence
  Synthetic oligonucleotide; AAG chr2 60486362 60486381 60486378 +
agaacggatagccaaattct

SEQ ID NO: 161320 - DNA, 20 bp, Artificial Sequence
  Synthetic oligonucleotide; GAG chr2 60486364 60486383 60486380 +
aacggatagccaaattctaa

SEQ ID NO: 161321 - DNA, 20 bp, Artificial Sequence
  Synthetic oligonucleotide; TAG chr2 60486388 60486407 60486404 +
tcactttctgcacatatgtg

SEQ ID NO: 161322 - DNA, 20 bp, Artificial Sequence
  Synthetic oligonucleotide; AAG chr2 60486393 60486412 60486409 +
ttctgcacatatgtgtagtt

SEQ ID NO: 161323 - DNA, 20 bp, Artificial Sequence
  Synthetic oligonucleotide; AAG chr2 60486401 60486420 60486417 +
atatgtgtagttaagtactg

SEQ ID NO: 161324 - DNA, 20 bp, Artificial Sequence
  Synthetic oligonucleotide; GAG chr2 60486405 60486424 60486421 +
gtgtagttaagtactgaagt

SEQ ID NO: 161325 - DNA, 20 bp, Artificial Sequence
  Synthetic oligonucleotide; AAG chr2 60486414 60486433 60486430 +
agtactgaagtgagaaattc

SEQ ID NO: 161326 - DNA, 20 bp, Artificial Sequence
  Synthetic oligonucleotide; TAG chr2 60486428 60486447 60486444 +
aaattcaagaaaactatact

SEQ ID NO: 161327 - DNA, 20 bp, Artificial Sequence
  Synthetic oligonucleotide; AGG chr2 60486429 60486448 60486445 +
aattcaagaaaactatactt

SEQ ID NO: 161328 - DNA, 20 bp, Artificial Sequence
  Synthetic oligonucleotide; GAG chr2 60486450 60486469 60486466 +
ggcacacacacacacatttt

SEQ ID NO: 161329 - DNA, 20 bp, Artificial Sequence
  Synthetic oligonucleotide; GAG chr2 60486452 60486471 60486468 +
cacacacacacacattttga

SEQ ID NO: 161330 - DNA, 20 bp, Artificial Sequence
  Synthetic oligonucleotide; AAG chr2 60486465 60486484 60486481 +
attttgagagataatttcta

SEQ ID NO: 161331 - DNA, 20 bp, Artificial Sequence
  Synthetic oligonucleotide; AAG chr2 60486480 60486499 60486496 +
ttctaaagacctaccaatct

SEQ ID NO: 161332 - DNA, 20 bp, Artificial Sequence
  Synthetic oligonucleotide; AAG chr2 60486490 60486509 60486506 +
ctaccaatctaagatactga

SEQ ID NO: 161333 - DNA, 20 bp, Artificial Sequence
  Synthetic oligonucleotide; TGG chr2 60486497 60486516 60486513 +
tctaagatactgaaagaaaa

SEQ ID NO: 161334 - DNA, 20 bp, Artificial Sequence
  Synthetic oligonucleotide; CAG chr2 60486506 60486525 60486522 +
ctgaaagaaaatggctacat

SEQ ID NO: 161335 - DNA, 20 bp, Artificial Sequence
  Synthetic oligonucleotide; AGG chr2 60486507 60486526 60486523 +
tgaaagaaaatggctacatc

SEQ ID NO: 161336 - DNA, 20 bp, Artificial Sequence
  Synthetic oligonucleotide; CAG chr2 60486512 60486531 60486528 +
gaaaatggctacatcaggcc

SEQ ID NO: 161337 - DNA, 20 bp, Artificial Sequence
  Synthetic oligonucleotide; AAG chr2 60486517 60486536 60486533 +
tggctacatcaggcccagaa

SEQ ID NO: 161338 - DNA, 20 bp, Artificial Sequence
  Synthetic oligonucleotide; CAG chr2 60486541 60486560 60486557 +
cttgaaattttccctatcca

SEQ ID NO: 161339 - DNA, 20 bp, Artificial Sequence
  Synthetic oligonucleotide; CAG chr2 60486548 60486567 60486564 +
ttttccctatccacagacca

SEQ ID NO: 161340 - DNA, 20 bp, Artificial Sequence
  Synthetic oligonucleotide; TGG chr2 60486559 60486578 60486575 +
cacagaccacagccctgtga

SEQ ID NO: 161341 - DNA, 20 bp, Artificial Sequence
  Synthetic oligonucleotide; GAG chr2 60486566 60486585 60486582 +
cacagccctgtgatggacat

SEQ ID NO: 161342 - DNA, 20 bp, Artificial Sequence
  Synthetic oligonucleotide; TGG chr2 60486575 60486594 60486591 +
gtgatggacatgagatcctc

SEQ ID NO: 161343 - DNA, 20 bp, Artificial Sequence
  Synthetic oligonucleotide; GAG chr2 60486582 60486601 60486598 +
acatgagatcctctggcttt

SEQ ID NO: 161344 - DNA, 20 bp, Artificial Sequence
  Synthetic oligonucleotide; CAG chr2 60486597 60486616 60486613 +
gctttgagatgaataatgca

SEQ ID NO: 161345 - DNA, 20 bp, Artificial Sequence
  Synthetic oligonucleotide; GAG chr2 60486604 60486623 60486620 +
gatgaataatgcacagaaat

SEQ ID NO: 161346 - DNA, 20 bp, Artificial Sequence
  Synthetic oligonucleotide; CAG chr2 60486607 60486626 60486623 +
gaataatgcacagaaatgag

SEQ ID NO: 161347 - DNA, 20 bp, Artificial Sequence
  Synthetic oligonucleotide; TGG chr2 60486615 60486634 60486631 +
cacagaaatgagcagcatga

SEQ ID NO: 161348 - DNA, 20 bp, Artificial Sequence
  Synthetic oligonucleotide; TAG chr2 60486620 60486639 60486636 +
aaatgagcagcatgatggat

SEQ ID NO: 161349 - DNA, 20 bp, Artificial Sequence
  Synthetic oligonucleotide; TGG chr2 60486624 60486643 60486640 +
gagcagcatgatggattagc

SEQ ID NO: 161350 - DNA, 20 bp, Artificial Sequence
  Synthetic oligonucleotide; CAG chr2 60486627 60486646 60486643 +
cagcatgatggattagctgg

SEQ ID NO: 161351 - DNA, 20 bp, Artificial Sequence
  Synthetic oligonucleotide; CAG chr2 60486638 60486657 60486654 +
attagctggcagattattac

SEQ ID NO: 161352 - DNA, 20 bp, Artificial Sequence
  Synthetic oligonucleotide; CAG chr2 60486666 60486685 60486682 +
tgaacatgccaactcaacat

SEQ ID NO: 161353 - DNA, 20 bp, Artificial Sequence
  Synthetic oligonucleotide; AGG chr2 60486667 60486686 60486683 +
gaacatgccaactcaacatc

SEQ ID NO: 161354 - DNA, 20 bp, Artificial Sequence
  Synthetic oligonucleotide; TGG chr2 60486672 60486691 60486688 +
tgccaactcaacatcaggat

SEQ ID NO: 161355 - DNA, 20 bp, Artificial Sequence
  Synthetic oligonucleotide; GGG chr2 60486673 60486692 60486689 +
gccaactcaacatcaggatt

SEQ ID NO: 161356 - DNA, 20 bp, Artificial Sequence
  Synthetic oligonucleotide; CAG chr2 60486690 60486709 60486706 +
attgggcctgaaacttctct

SEQ ID NO: 161357 - DNA, 20 bp, Artificial Sequence
  Synthetic oligonucleotide; AGG chr2 60486691 60486710 60486707 +
ttgggcctgaaacttctctc

SEQ ID NO: 161358 - DNA, 20 bp, Artificial Sequence
  Synthetic oligonucleotide; AAG chr2 60486694 60486713 60486710 +
ggcctgaaacttctctcagg

SEQ ID NO: 161359 - DNA, 20 bp, Artificial Sequence
  Synthetic oligonucleotide; AGG chr2 60486695 60486714 60486711 +
gcctgaaacttctctcagga

SEQ ID NO: 161360 - DNA, 20 bp, Artificial Sequence
  Synthetic oligonucleotide; TAG chr2 60486704 60486723 60486720 +
ttctctcaggaaggccttga

SEQ ID NO: 161361 - DNA, 20 bp, Artificial Sequence
  Synthetic oligonucleotide; TAG chr2 60486710 60486729 60486726 +
caggaaggccttgatagcat

SEQ ID NO: 161362 - DNA, 20 bp, Artificial Sequence
  Synthetic oligonucleotide; TGG chr2 60486714 60486733 60486730 +
aaggccttgatagcattaga

SEQ ID NO: 161363 - DNA, 20 bp, Artificial Sequence
  Synthetic oligonucleotide; CAG chr2 60486721 60486740 60486737 +
tgatagcattagatggttga

SEQ ID NO: 161364 - DNA, 20 bp, Artificial Sequence
  Synthetic oligonucleotide; GAG chr2 60486723 60486742 60486739 +
atagcattagatggttgaca

SEQ ID NO: 161365 - DNA, 20 bp, Artificial Sequence
  Synthetic oligonucleotide; AGG chr2 60486724 60486743 60486740 +
tagcattagatggttgacag

SEQ ID NO: 161366 - DNA, 20 bp, Artificial Sequence
  Synthetic oligonucleotide; CAG chr2 60486732 60486751 60486748 +
gatggttgacagaggtatta

SEQ ID NO: 161367 - DNA, 20 bp, Artificial Sequence
  Synthetic oligonucleotide; CAG chr2 60486740 60486759 60486756 +
acagaggtattacagtgtga

SEQ ID NO: 161368 - DNA, 20 bp, Artificial Sequence
  Synthetic oligonucleotide; GAG chr2 60486742 60486761 60486758 +
agaggtattacagtgtgaca

SEQ ID NO: 161369 - DNA, 20 bp, Artificial Sequence
  Synthetic oligonucleotide; GAG chr2 60486748 60486767 60486764 +
attacagtgtgacagagtct

SEQ ID NO: 161370 - DNA, 20 bp, Artificial Sequence
  Synthetic oligonucleotide; CAG chr2 60486755 60486774 60486771 +
tgtgacagagtctgagccca

SEQ ID NO: 161371 - DNA, 20 bp, Artificial Sequence
  Synthetic oligonucleotide; GAG chr2 60486761 60486780 60486777 +
agagtctgagcccacagtct

SEQ ID NO: 161372 - DNA, 20 bp, Artificial Sequence
  Synthetic oligonucleotide; CAG chr2 60486782 60486801 60486798 +
agaatgaccacatcccttcc

SEQ ID NO: 161373 - DNA, 20 bp, Artificial Sequence
  Synthetic oligonucleotide; AGG chr2 60486783 60486802 60486799 +
gaatgaccacatcccttccc

SEQ ID NO: 161374 - DNA, 20 bp, Artificial Sequence
  Synthetic oligonucleotide; GGG chr2 60486784 60486803 60486800 +
aatgaccacatcccttccca

SEQ ID NO: 161375 - DNA, 20 bp, Artificial Sequence
  Synthetic oligonucleotide; GAG chr2 60486786 60486805 60486802 +
tgaccacatcccttcccagg

SEQ ID NO: 161376 - DNA, 20 bp, Artificial Sequence
  Synthetic oligonucleotide; TGG chr2 60486808 60486827 60486824 +
gacgttcccactcaacaccc

SEQ ID NO: 161377 - DNA, 20 bp, Artificial Sequence
  Synthetic oligonucleotide; GGG chr2 60486809 60486828 60486825 +
acgttcccactcaacaccct

SEQ ID NO: 161378 - DNA, 20 bp, Artificial Sequence
  Synthetic oligonucleotide; AAG chr2 60486812 60486831 60486828 +
ttcccactcaacaccctggg

SEQ ID NO: 161379 - DNA, 20 bp, Artificial Sequence
  Synthetic oligonucleotide; TGG chr2 60486845 60486864 60486861 +
atcactctgtctctcaaacc

SEQ ID NO: 161380 - DNA, 20 bp, Artificial Sequence
  Synthetic oligonucleotide; TGG chr2 60486851 60486870 60486867 +
ctgtctctcaaacctggcca

SEQ ID NO: 161381 - DNA, 20 bp, Artificial Sequence
  Synthetic oligonucleotide; CAG chr2 60486856 60486875 60486872 +
tctcaaacctggccatggct

SEQ ID NO: 161382 - DNA, 20 bp, Artificial Sequence
  Synthetic oligonucleotide; CAG chr2 60486897 60486916 60486913 +
tttgcccttttccctgctaa

SEQ ID NO: 161383 - DNA, 20 bp, Artificial Sequence
  Synthetic oligonucleotide; TGG chr2 60486903 60486922 60486919 +
cttttccctgctaacagaaa

SEQ ID NO: 161384 - DNA, 20 bp, Artificial Sequence
  Synthetic oligonucleotide; CAG chr2 60486909 60486928 60486925 +
cctgctaacagaaatggaat

SEQ ID NO: 161385 - DNA, 20 bp, Artificial Sequence
  Synthetic oligonucleotide; AAG chr2 60486933 60486952 60486949 +
acaaattaatatttaatttt

SEQ ID NO: 161386 - DNA, 20 bp, Artificial Sequence
  Synthetic oligonucleotide; CAG chr2 60486949 60486968 60486965 +
ttttaagattactattctat

SEQ ID NO: 161387 - DNA, 20 bp, Artificial Sequence
  Synthetic oligonucleotide; AAG chr2 60486959 60486978 60486975 +
actattctatcagaataaaa

SEQ ID NO: 161388 - DNA, 20 bp, Artificial Sequence
  Synthetic oligonucleotide; CGG chr2 60486965 60486984 60486981 +
ctatcagaataaaaaagact

SEQ ID NO: 161389 - DNA, 20 bp, Artificial Sequence
  Synthetic oligonucleotide; GGG chr2 60486966 60486985 60486982 +
tatcagaataaaaaagactc

SEQ ID NO: 161390 - DNA, 20 bp, Artificial Sequence
  Synthetic oligonucleotide; GAG chr2 60486968 60486987 60486984 +
tcagaataaaaaagactcgg

SEQ ID NO: 161391 - DNA, 20 bp, Artificial Sequence
  Synthetic oligonucleotide; AAG chr2 60486976 60486995 60486992 +
aaaaagactcgggagattca

SEQ ID NO: 161392 - DNA, 20 bp, Artificial Sequence
  Synthetic oligonucleotide; AAG chr2 60486981 60487000 60486997 +
gactcgggagattcaaagcg

SEQ ID NO: 161393 - DNA, 20 bp, Artificial Sequence
  Synthetic oligonucleotide; AGG chr2 60486982 60487001 60486998 +
actcgggagattcaaagcga

SEQ ID NO: 161394 - DNA, 20 bp, Artificial Sequence
  Synthetic oligonucleotide; AAG chr2 60487001 60487020 60487017 +
aaggcaaatgcccctccttt

SEQ ID NO: 161395 - DNA, 20 bp, Artificial Sequence
  Synthetic oligonucleotide; CAG chr2 60487019 60487038 60487035 +
ttaagtctaacgttgctatt

SEQ ID NO: 161396 - DNA, 20 bp, Artificial Sequence
  Synthetic oligonucleotide; AGG chr2 60487020 60487039 60487036 +
taagtctaacgttgctattc

SEQ ID NO: 161397 - DNA, 20 bp, Artificial Sequence
  Synthetic oligonucleotide; TAG chr2 60487027 60487046 60487043 +
aacgttgctattcaggcatt

SEQ ID NO: 161398 - DNA, 20 bp, Artificial Sequence
  Synthetic oligonucleotide; AGG chr2 60487028 60487047 60487044 +
acgttgctattcaggcattt

SEQ ID NO: 161399 - DNA, 20 bp, Artificial Sequence
  Synthetic oligonucleotide; GAG chr2 60487030 60487049 60487046 +
gttgctattcaggcatttag

SEQ ID NO: 161400 - DNA, 20 bp, Artificial Sequence
  Synthetic oligonucleotide; TAG chr2 60487036 60487055 60487052 +
attcaggcatttaggagcgc

SEQ ID NO: 161401 - DNA, 20 bp, Artificial Sequence
  Synthetic oligonucleotide; CAG chr2 60487042 60487061 60487058 +
gcatttaggagcgctagaca

SEQ ID NO: 161402 - DNA, 20 bp, Artificial Sequence
  Synthetic oligonucleotide; GAG chr2 60487046 60487065 60487062 +
ttaggagcgctagacacagt

SEQ ID NO: 161403 - DNA, 20 bp, Artificial Sequence
  Synthetic oligonucleotide; AAG chr2 60487079 60487098 60487095 +
tccaacctgtgatttgccac

SEQ ID NO: 161404 - DNA, 20 bp, Artificial Sequence
  Synthetic oligonucleotide; AGG chr2 60487080 60487099 60487096 +
ccaacctgtgatttgccaca

SEQ ID NO: 161405 - DNA, 20 bp, Artificial Sequence
  Synthetic oligonucleotide; CAG chr2 60487083 60487102 60487099 +
acctgtgatttgccacaagg

SEQ ID NO: 161406 - DNA, 20 bp, Artificial Sequence
  Synthetic oligonucleotide; AGG chr2 60487084 60487103 60487100 +
cctgtgatttgccacaaggc

SEQ ID NO: 161407 - DNA, 20 bp, Artificial Sequence
  Synthetic oligonucleotide; AAG chr2 60487087 60487106 60487103 +
gtgatttgccacaaggcagg

SEQ ID NO: 161408 - DNA, 20 bp, Artificial Sequence
  Synthetic oligonucleotide; AGG chr2 60487088 60487107 60487104 +
tgatttgccacaaggcagga

SEQ ID NO: 161409 - DNA, 20 bp, Artificial Sequence
  Synthetic oligonucleotide; GGG chr2 60487089 60487108 60487105 +
gatttgccacaaggcaggaa

SEQ ID NO: 161410 - DNA, 20 bp, Artificial Sequence
  Synthetic oligonucleotide; GGG chr2 60487090 60487109 60487106 +
atttgccacaaggcaggaag

SEQ ID NO: 161411 - DNA, 20 bp, Artificial Sequence
  Synthetic oligonucleotide; AAG chr2 60487093 60487112 60487109 +
tgccacaaggcaggaagggg

SEQ ID NO: 161412 - DNA, 20 bp, Artificial Sequence
  Synthetic oligonucleotide; AGG chr2 60487094 60487113 60487110 +
gccacaaggcaggaagggga

SEQ ID NO: 161413 - DNA, 20 bp, Artificial Sequence
  Synthetic oligonucleotide; TAG chr2 60487098 60487117 60487114 +
caaggcaggaaggggaagga

SEQ ID NO: 161414 - DNA, 20 bp, Artificial Sequence
  Synthetic oligonucleotide; AAG chr2 60487113 60487132 60487129 +
aaggatagtgcaacacccct

SEQ ID NO: 161415 - DNA, 20 bp, Artificial Sequence
  Synthetic oligonucleotide; AAG chr2 60487122 60487141 60487138 +
gcaacacccctaagtgtgtg

SEQ ID NO: 161416 - DNA, 20 bp, Artificial Sequence
  Synthetic oligonucleotide; TAG chr2 60487152 60487171 60487168 +
cttttacccatgtaatgatc

SEQ ID NO: 161417 - DNA, 20 bp, Artificial Sequence
  Synthetic oligonucleotide; AAG chr2 60487185 60487204 60487201 +
attttgcctttaatcaatga

SEQ ID NO: 161418 - DNA, 20 bp, Artificial Sequence
  Synthetic oligonucleotide; GAG chr2 60487187 60487206 60487203 +
tttgcctttaatcaatgaaa

SEQ ID NO: 161419 - DNA, 20 bp, Artificial Sequence
  Synthetic oligonucleotide; AAG chr2 60487191 60487210 60487207 +
cctttaatcaatgaaagagt

SEQ ID NO: 161420 - DNA, 20 bp, Artificial Sequence
  Synthetic oligonucleotide; AAG chr2 60487235 60487254 60487251 +
ctccctaacctatattttgc

SEQ ID NO: 161421 - DNA, 20 bp, Artificial Sequence
  Synthetic oligonucleotide; TAG chr2 60487243 60487262 60487259 +
cctatattttgcaagtcgat

SEQ ID NO: 161422 - DNA, 20 bp, Artificial Sequence
  Synthetic oligonucleotide; AAG chr2 60487248 60487267 60487264 +
attttgcaagtcgattagct

SEQ ID NO: 161423 - DNA, 20 bp, Artificial Sequence
  Synthetic oligonucleotide; CAG chr2 60487267 60487286 60487283 +
taagctcttcatgctaatgt

SEQ ID NO: 161424 - DNA, 20 bp, Artificial Sequence
  Synthetic oligonucleotide; CAG chr2 60487270 60487289 60487286 +
gctcttcatgctaatgtcag

SEQ ID NO: 161425 - DNA, 20 bp, Artificial Sequence
  Synthetic oligonucleotide; GAG chr2 60487272 60487291 60487288 +
tcttcatgctaatgtcagca

SEQ ID NO: 161426 - DNA, 20 bp, Artificial Sequence
  Synthetic oligonucleotide; CAG chr2 60487290 60487309 60487306 +
cagagcccatgttacatctc

SEQ ID NO: 161427 - DNA, 20 bp, Artificial Sequence
  Synthetic oligonucleotide; CAG chr2 60487294 60487313 60487310 +
gcccatgttacatctccagt

SEQ ID NO: 161428 - DNA, 20 bp, Artificial Sequence
  Synthetic oligonucleotide; AGG chr2 60487295 60487314 60487311 +
cccatgttacatctccagtc

SEQ ID NO: 161429 - DNA, 20 bp, Artificial Sequence
  Synthetic oligonucleotide; CAG chr2 60487302 60487321 60487318 +
tacatctccagtcaggcttt

SEQ ID NO: 161430 - DNA, 20 bp, Artificial Sequence
  Synthetic oligonucleotide; AGG chr2 60487303 60487322 60487319 +
acatctccagtcaggctttc

SEQ ID NO: 161431 - DNA, 20 bp, Artificial Sequence
  Synthetic oligonucleotide; GAG chr2 60487333 60487352 60487349 +
accccacaatgccacacacc

SEQ ID NO: 161432 - DNA, 20 bp, Artificial Sequence
  Synthetic oligonucleotide; GAG chr2 60487335 60487354 60487351 +
cccacaatgccacacaccga

SEQ ID NO: 161433 - DNA, 20 bp, Artificial Sequence
  Synthetic oligonucleotide; TGG chr2 60487338 60487357 60487354 +
acaatgccacacaccgagag

SEQ ID NO: 161434 - DNA, 20 bp, Artificial Sequence
  Synthetic oligonucleotide; AAG chr2 60487344 60487363 60487360 +
ccacacaccgagagtggaaa

SEQ ID NO: 161435 - DNA, 20 bp, Artificial Sequence
  Synthetic oligonucleotide; CAG chr2 60487353 60487372 60487369 +
gagagtggaaaaagaaaatt

SEQ ID NO: 161436 - DNA, 20 bp, Artificial Sequence
  Synthetic oligonucleotide; CAG chr2 60487356 60487375 60487372 +
agtggaaaaagaaaattcag

SEQ ID NO: 161437 - DNA, 20 bp, Artificial Sequence
  Synthetic oligonucleotide; AGG chr2 60487357 60487376 60487373 +
gtggaaaaagaaaattcagc

SEQ ID NO: 161438 - DNA, 20 bp, Artificial Sequence
  Synthetic oligonucleotide; GGG chr2 60487358 60487377 60487374 +
tggaaaaagaaaattcagca

SEQ ID NO: 161439 - DNA, 20 bp, Artificial Sequence
  Synthetic oligonucleotide; GGG chr2 60487359 60487378 60487375 +
ggaaaaagaaaattcagcag

SEQ ID NO: 161440 - DNA, 20 bp, Artificial Sequence
  Synthetic oligonucleotide; GGG chr2 60487360 60487379 60487376 +
gaaaaagaaaattcagcagg

SEQ ID NO: 161441 - DNA, 20 bp, Artificial Sequence
  Synthetic oligonucleotide; GAG chr2 60487362 60487381 60487378 +
aaaagaaaattcagcagggg

SEQ ID NO: 161442 - DNA, 20 bp, Artificial Sequence
  Synthetic oligonucleotide; CAG chr2 60487365 60487384 60487381 +
agaaaattcagcagggggag

SEQ ID NO: 161443 - DNA, 20 bp, Artificial Sequence
  Synthetic oligonucleotide; TAG chr2 60487370 60487389 60487386 +
attcagcagggggagcagtg

SEQ ID NO: 161444 - DNA, 20 bp, Artificial Sequence
  Synthetic oligonucleotide; TGG chr2 60487373 60487392 60487389 +
cagcagggggagcagtgtag

SEQ ID NO: 161445 - DNA, 20 bp, Artificial Sequence
  Synthetic oligonucleotide; GGG chr2 60487374 60487393 60487390 +
agcagggggagcagtgtagt

SEQ ID NO: 161446 - DNA, 20 bp, Artificial Sequence
  Synthetic oligonucleotide; CAG chr2 60487377 60487396 60487393 +
agggggagcagtgtagtggg

SEQ ID NO: 161447 - DNA, 20 bp, Artificial Sequence
  Synthetic oligonucleotide; TGG chr2 60487400 60487419 60487416 +
ttacgttttcgtcatctgta

SEQ ID NO: 161448 - DNA, 20 bp, Artificial Sequence
  Synthetic oligonucleotide; TGG chr2 60487407 60487426 60487423 +
ttcgtcatctgtatggaaat

SEQ ID NO: 161449 - DNA, 20 bp, Artificial Sequence
  Synthetic oligonucleotide; GGG chr2 60487408 60487427 60487424 +
tcgtcatctgtatggaaatt

SEQ ID NO: 161450 - DNA, 20 bp, Artificial Sequence
  Synthetic oligonucleotide; TAG chr2 60487429 60487448 60487445 +
ggaaatcgtcttctcaaatg

SEQ ID NO: 161451 - DNA, 20 bp, Artificial Sequence
  Synthetic oligonucleotide; TGG chr2 60487444 60487463 60487460 +
aaatgtagattatcttccct

SEQ ID NO: 161452 - DNA, 20 bp, Artificial Sequence
  Synthetic oligonucleotide; GGG chr2 60487445 60487464 60487461 +
aatgtagattatcttccctt

SEQ ID NO: 161453 - DNA, 20 bp, Artificial Sequence
  Synthetic oligonucleotide; TGG chr2 60487455 60487474 60487471 +
atcttcccttgggatccttc

SEQ ID NO: 161454 - DNA, 20 bp, Artificial Sequence
  Synthetic oligonucleotide; GAG chr2 60487457 60487476 60487473 +
cttcccttgggatccttctg

SEQ ID NO: 161455 - DNA, 20 bp, Artificial Sequence
  Synthetic oligonucleotide; AGG chr2 60487458 60487477 60487474 +
ttcccttgggatccttctgg

SEQ ID NO: 161456 - DNA, 20 bp, Artificial Sequence
  Synthetic oligonucleotide; GGG chr2 60487459 60487478 60487475 +
tcccttgggatccttctgga

SEQ ID NO: 161457 - DNA, 20 bp, Artificial Sequence
  Synthetic oligonucleotide; TAG chr2 60487472 60487491 60487488 +
ttctggagggctataaataa

SEQ ID NO: 161458 - DNA, 20 bp, Artificial Sequence
  Synthetic oligonucleotide; TAG chr2 60487492 60487511 60487508 +
tagaacatactaatcaacat

SEQ ID NO: 161459 - DNA, 20 bp, Artificial Sequence
  Synthetic oligonucleotide; CAG chr2 60487512 60487531 60487528 +
tagatatttaaaaatgaata

SEQ ID NO: 161460 - DNA, 20 bp, Artificial Sequence
  Synthetic oligonucleotide; CAG chr2 60487518 60487537 60487534 +
tttaaaaatgaatacagatt

SEQ ID NO: 161461 - DNA, 20 bp, Artificial Sequence
  Synthetic oligonucleotide; AAG chr2 60487524 60487543 60487540 +
aatgaatacagattcagatt

SEQ ID NO: 161462 - DNA, 20 bp, Artificial Sequence
  Synthetic oligonucleotide; AGG chr2 60487525 60487544 60487541 +
atgaatacagattcagatta

SEQ ID NO: 161463 - DNA, 20 bp, Artificial Sequence
  Synthetic oligonucleotide; GGG chr2 60487526 60487545 60487542 +
tgaatacagattcagattaa

SEQ ID NO: 161464 - DNA, 20 bp, Artificial Sequence
  Synthetic oligonucleotide; CAG chr2 60487556 60487575 60487572 +
aatgatgcctttataaaatc

SEQ ID NO: 161465 - DNA, 20 bp, Artificial Sequence
  Synthetic oligonucleotide; AAG chr2 60487577 60487596 60487593 +
agaacaaaacaaaacaaaaa

SEQ ID NO: 161466 - DNA, 20 bp, Artificial Sequence
  Synthetic oligonucleotide; AGG chr2 60487578 60487597 60487594 +
gaacaaaacaaaacaaaaaa

SEQ ID NO: 161467 - DNA, 20 bp, Artificial Sequence
  Synthetic oligonucleotide; AAG chr2 60487588 60487607 60487604 +
aaacaaaaaaaggcatgaaa

SEQ ID NO: 161468 - DNA, 20 bp, Artificial Sequence
  Synthetic oligonucleotide; AAG chr2 60487591 60487610 60487607 +
caaaaaaaggcatgaaaaag

SEQ ID NO: 161469 - DNA, 20 bp, Artificial Sequence
  Synthetic oligonucleotide; AGG chr2 60487592 60487611 60487608 +
aaaaaaaggcatgaaaaaga

SEQ ID NO: 161470 - DNA, 20 bp, Artificial Sequence
  Synthetic oligonucleotide; TAG chr2 60487597 60487616 60487613 +
aaggcatgaaaaagaaggct

SEQ ID NO: 161471 - DNA, 20 bp, Artificial Sequence
  Synthetic oligonucleotide; CGG chr2 60487600 60487619 60487616 +
gcatgaaaaagaaggcttag

SEQ ID NO: 161472 - DNA, 20 bp, Artificial Sequence
  Synthetic oligonucleotide; AAG chr2 60487612 60487631 60487628 +
aggcttagcggatccccctt

SEQ ID NO: 161473 - DNA, 20 bp, Artificial Sequence
  Synthetic oligonucleotide; TAG chr2 60487616 60487635 60487632 +
ttagcggatcccccttaagt

SEQ ID NO: 161474 - DNA, 20 bp, Artificial Sequence
  Synthetic oligonucleotide; TGG chr2 60487629 60487648 60487645 +
cttaagttagccctattctc

SEQ ID NO: 161475 - DNA, 20 bp, Artificial Sequence
  Synthetic oligonucleotide; CAG chr2 60487641 60487660 60487657 +
ctattctctggcaaccacac

SEQ ID NO: 161476 - DNA, 20 bp, Artificial Sequence
  Synthetic oligonucleotide; GAG chr2 60487652 60487671 60487668 +
caaccacaccagcctttaac

SEQ ID NO: 161477 - DNA, 20 bp, Artificial Sequence
  Synthetic oligonucleotide; AGG chr2 60487653 60487672 60487669 +
aaccacaccagcctttaacg

SEQ ID NO: 161478 - DNA, 20 bp, Artificial Sequence
  Synthetic oligonucleotide; GGG chr2 60487654 60487673 60487670 +
accacaccagcctttaacga

SEQ ID NO: 161479 - DNA, 20 bp, Artificial Sequence
  Synthetic oligonucleotide; AAG chr2 60487663 60487682 60487679 +
gcctttaacgagggtgttca

SEQ ID NO: 161480 - DNA, 20 bp, Artificial Sequence
  Synthetic oligonucleotide; GAG chr2 60487692 60487711 60487708 +
tttcccactcccttatttat

SEQ ID NO: 161481 - DNA, 20 bp, Artificial Sequence
  Synthetic oligonucleotide; CAG chr2 60487695 60487714 60487711 +
cccactcccttatttatgag

SEQ ID NO: 161482 - DNA, 20 bp, Artificial Sequence
  Synthetic oligonucleotide; CAG chr2 60487698 60487717 60487714 +
actcccttatttatgagcag

SEQ ID NO: 161483 - DNA, 20 bp, Artificial Sequence
  Synthetic oligonucleotide; AAG chr2 60487709 60487728 60487725 +
tatgagcagcagaatgtaaa

SEQ ID NO: 161484 - DNA, 20 bp, Artificial Sequence
  Synthetic oligonucleotide; AAG chr2 60487713 60487732 60487729 +
agcagcagaatgtaaaaagc

SEQ ID NO: 161485 - DNA, 20 bp, Artificial Sequence
  Synthetic oligonucleotide; GAG chr2 60487715 60487734 60487731 +
cagcagaatgtaaaaagcaa

SEQ ID NO: 161486 - DNA, 20 bp, Artificial Sequence
  Synthetic oligonucleotide; AGG chr2 60487716 60487735 60487732 +
agcagaatgtaaaaagcaag

SEQ ID NO: 161487 - DNA, 20 bp, Artificial Sequence
  Synthetic oligonucleotide; CGG chr2 60487732 60487751 60487748 +
caagaggcttaattttaatg

SEQ ID NO: 161488 - DNA, 20 bp, Artificial Sequence
  Synthetic oligonucleotide; AAG chr2 60487761 60487780 60487777 +
tctcatcaaccattctatct

SEQ ID NO: 161489 - DNA, 20 bp, Artificial Sequence
  Synthetic oligonucleotide; AGG chr2 60487762 60487781 60487778 +
ctcatcaaccattctatcta

SEQ ID NO: 161490 - DNA, 20 bp, Artificial Sequence
  Synthetic oligonucleotide; AAG chr2 60487765 60487784 60487781 +
atcaaccattctatctaagg

SEQ ID NO: 161491 - DNA, 20 bp, Artificial Sequence
  Synthetic oligonucleotide; CAG chr2 60487771 60487790 60487787 +
cattctatctaaggaagctg

SEQ ID NO: 161492 - DNA, 20 bp, Artificial Sequence
  Synthetic oligonucleotide; AAG chr2 60487775 60487794 60487791 +
ctatctaaggaagctgcaga

SEQ ID NO: 161493 - DNA, 20 bp, Artificial Sequence
  Synthetic oligonucleotide; AGG chr2 60487776 60487795 60487792 +
tatctaaggaagctgcagaa

SEQ ID NO: 161494 - DNA, 20 bp, Artificial Sequence
  Synthetic oligonucleotide; TGG chr2 60487786 60487805 60487802 +
agctgcagaaaggtgaaaac

SEQ ID NO: 161495 - DNA, 20 bp, Artificial Sequence
  Synthetic oligonucleotide; TGG chr2 60487807 60487826 60487823 +
ggaaatttatgaacctttaa

SEQ ID NO: 161496 - DNA, 20 bp, Artificial Sequence
  Synthetic oligonucleotide; GGG chr2 60487808 60487827 60487824 +
gaaatttatgaacctttaat

SEQ ID NO: 161497 - DNA, 20 bp, Artificial Sequence
  Synthetic oligonucleotide; TGG chr2 60487816 60487835 60487832 +
tgaacctttaatgggaaatc

SEQ ID NO: 161498 - DNA, 20 bp, Artificial Sequence
  Synthetic oligonucleotide; AAG chr2 60487821 60487840 60487837 +
ctttaatgggaaatctggat

SEQ ID NO: 161499 - DNA, 20 bp, Artificial Sequence
  Synthetic oligonucleotide; TGG chr2 60487828 60487847 60487844 +
gggaaatctggataagaatt

SEQ ID NO: 161500 - DNA, 20 bp, Artificial Sequence
  Synthetic oligonucleotide; AAG chr2 60487843 60487862 60487859 +
gaatttggtctaaatatatg

SEQ ID NO: 161501 - DNA, 20 bp, Artificial Sequence
  Synthetic oligonucleotide; GAG chr2 60487845 60487864 60487861 +
atttggtctaaatatatgaa

SEQ ID NO: 161502 - DNA, 20 bp, Artificial Sequence
  Synthetic oligonucleotide; AGG chr2 60487846 60487865 60487862 +
tttggtctaaatatatgaag

SEQ ID NO: 161503 - DNA, 20 bp, Artificial Sequence
  Synthetic oligonucleotide; TGG chr2 60487853 60487872 60487869 +
taaatatatgaagaggaaca

SEQ ID NO: 161504 - DNA, 20 bp, Artificial Sequence
  Synthetic oligonucleotide; CAG chr2 60487857 60487876 60487873 +
tatatgaagaggaacatgga

SEQ ID NO: 161505 - DNA, 20 bp, Artificial Sequence
  Synthetic oligonucleotide; TGG chr2 60487861 60487880 60487877 +
tgaagaggaacatggacagc

SEQ ID NO: 161506 - DNA, 20 bp, Artificial Sequence
  Synthetic oligonucleotide; AAG chr2 60487880 60487899 60487896 +
ctggcacaaacacaaaatgc

SEQ ID NO: 161507 - DNA, 20 bp, Artificial Sequence
  Synthetic oligonucleotide; CAG chr2 60487894 60487913 60487910 +
aaatgcaagtactccaactc

SEQ ID NO: 161508 - DNA, 20 bp, Artificial Sequence
  Synthetic oligonucleotide; AAG chr2 60487920 60487939 60487936 +
cctgataacatctgccacta

SEQ ID NO: 161509 - DNA, 20 bp, Artificial Sequence
  Synthetic oligonucleotide; AGG chr2 60487921 60487940 60487937 +
ctgataacatctgccactaa

SEQ ID NO: 161510 - DNA, 20 bp, Artificial Sequence
  Synthetic oligonucleotide; TGG chr2 60487934 60487953 60487950 +
ccactaaaggtttactgact

SEQ ID NO: 161511 - DNA, 20 bp, Artificial Sequence
  Synthetic oligonucleotide; TAG chr2 60487949 60487968 60487965 +
tgacttggttttcccaactc

SEQ ID NO: 161512 - DNA, 20 bp, Artificial Sequence
  Synthetic oligonucleotide; TGG chr2 60487954 60487973 60487970 +
tggttttcccaactctagaa

SEQ ID NO: 161513 - DNA, 20 bp, Artificial Sequence
  Synthetic oligonucleotide; GAG chr2 60487956 60487975 60487972 +
gttttcccaactctagaatg

SEQ ID NO: 161514 - DNA, 20 bp, Artificial Sequence
  Synthetic oligonucleotide; TGG chr2 60487973 60487992 60487989 +
atggagccctcatctaaacc

SEQ ID NO: 161515 - DNA, 20 bp, Artificial Sequence
  Synthetic oligonucleotide; GGG chr2 60487974 60487993 60487990 +
tggagccctcatctaaacct

SEQ ID NO: 161516 - DNA, 20 bp, Artificial Sequence
  Synthetic oligonucleotide; GGG chr2 60487975 60487994 60487991 +
ggagccctcatctaaacctg

SEQ ID NO: 161517 - DNA, 20 bp, Artificial Sequence
  Synthetic oligonucleotide; AAG chr2 60487978 60487997 60487994 +
gccctcatctaaacctgggg

SEQ ID NO: 161518 - DNA, 20 bp, Artificial Sequence
  Synthetic oligonucleotide; TAG chr2 60487996 60488015 60488012 +
ggaagcaatatatgaacaat

SEQ ID NO: 161519 - DNA, 20 bp, Artificial Sequence
  Synthetic oligonucleotide; TAG chr2 60488013 60488032 60488029 +
aattagatattaaatgctta

SEQ ID NO: 161520 - DNA, 20 bp, Artificial Sequence
  Synthetic oligonucleotide; TGG chr2 60488044 60488063 60488060 +
ctgtgctattacttttgacc

SEQ ID NO: 161521 - DNA, 20 bp, Artificial Sequence
  Synthetic oligonucleotide; GGG chr2 60488045 60488064 60488061 +
tgtgctattacttttgacct

SEQ ID NO: 161522 - DNA, 20 bp, Artificial Sequence
  Synthetic oligonucleotide; CAG chr2 60488059 60488078 60488075 +
tgacctgggttttaaaaaca

SEQ ID NO: 161523 - DNA, 20 bp, Artificial Sequence
  Synthetic oligonucleotide; TAG chr2 60488089 60488108 60488105 +
tacaatttattctcattatg

SEQ ID NO: 161524 - DNA, 20 bp, Artificial Sequence
  Synthetic oligonucleotide; TGG chr2 60488109 60488128 60488125 +
tagaaacatttaaattatcc

SEQ ID NO: 161525 - DNA, 20 bp, Artificial Sequence
  Synthetic oligonucleotide; AAG chr2 60488112 60488131 60488128 +
aaacatttaaattatcctgg

SEQ ID NO: 161526 - DNA, 20 bp, Artificial Sequence
  Synthetic oligonucleotide; GAG chr2 60488114 60488133 60488130 +
acatttaaattatcctggaa

SEQ ID NO: 161527 - DNA, 20 bp, Artificial Sequence
  Synthetic oligonucleotide; CGG chr2 60488126 60488145 60488142 +
tcctggaagagtttgtctca

SEQ ID NO: 161528 - DNA, 20 bp, Artificial Sequence
  Synthetic oligonucleotide; GGG chr2 60488127 60488146 60488143 +
cctggaagagtttgtctcac

SEQ ID NO: 161529 - DNA, 20 bp, Artificial Sequence
  Synthetic oligonucleotide; AAG chr2 60488137 60488156 60488153 +
tttgtctcacgggctgttca

SEQ ID NO: 161530 - DNA, 20 bp, Artificial Sequence
  Synthetic oligonucleotide; GAG chr2 60488139 60488158 60488155 +
tgtctcacgggctgttcaaa

SEQ ID NO: 161531 - DNA, 20 bp, Artificial Sequence
  Synthetic oligonucleotide; TAG chr2 60488160 60488179 60488176 +
agtgtttcttcctttccttc

SEQ ID NO: 161532 - DNA, 20 bp, Artificial Sequence
  Synthetic oligonucleotide; AGG chr2 60488161 60488180 60488177 +
gtgtttcttcctttccttct

SEQ ID NO: 161533 - DNA, 20 bp, Artificial Sequence
  Synthetic oligonucleotide; GAG chr2 60488169 60488188 60488185 +
tcctttccttctaggaacat

SEQ ID NO: 161534 - DNA, 20 bp, Artificial Sequence
  Synthetic oligonucleotide; AGG chr2 60488170 60488189 60488186 +
cctttccttctaggaacatg

SEQ ID NO: 161535 - DNA, 20 bp, Artificial Sequence
  Synthetic oligonucleotide; GAG chr2 60488172 60488191 60488188 +
tttccttctaggaacatgag

SEQ ID NO: 161536 - DNA, 20 bp, Artificial Sequence
  Synthetic oligonucleotide; AAG chr2 60488195 60488214 60488211 +
tgaatctgactatttcatca

SEQ ID NO: 161537 - DNA, 20 bp, Artificial Sequence
  Synthetic oligonucleotide; AAG chr2 60488205 60488224 60488221 +
tatttcatcaaagcctgtaa

SEQ ID NO: 161538 - DNA, 20 bp, Artificial Sequence
  Synthetic oligonucleotide; GAG chr2 60488214 60488233 60488230 +
aaagcctgtaaaagatacct

SEQ ID NO: 161539 - DNA, 20 bp, Artificial Sequence
  Synthetic oligonucleotide; AAG chr2 60488244 60488263 60488260 +
tttaactgaacaatgtctcc

SEQ ID NO: 161540 - DNA, 20 bp, Artificial Sequence
  Synthetic oligonucleotide; CAG chr2 60488251 60488270 60488267 +
gaacaatgtctccaagaatt

SEQ ID NO: 161541 - DNA, 20 bp, Artificial Sequence
  Synthetic oligonucleotide; GAG chr2 60488259 60488278 60488275 +
tctccaagaattcagactgt

SEQ ID NO: 161542 - DNA, 20 bp, Artificial Sequence
  Synthetic oligonucleotide; GAG chr2 60488261 60488280 60488277 +
tccaagaattcagactgtga

SEQ ID NO: 161543 - DNA, 20 bp, Artificial Sequence
  Synthetic oligonucleotide; AGG chr2 60488262 60488281 60488278 +
ccaagaattcagactgtgag

SEQ ID NO: 161544 - DNA, 20 bp, Artificial Sequence
  Synthetic oligonucleotide; GGG chr2 60488263 60488282 60488279 +
caagaattcagactgtgaga

SEQ ID NO: 161545 - DNA, 20 bp, Artificial Sequence
  Synthetic oligonucleotide; GGG chr2 60488264 60488283 60488280 +
aagaattcagactgtgagag

SEQ ID NO: 161546 - DNA, 20 bp, Artificial Sequence
  Synthetic oligonucleotide; GGG chr2 60488265 60488284 60488281 +
agaattcagactgtgagagg

SEQ ID NO: 161547 - DNA, 20 bp, Artificial Sequence
  Synthetic oligonucleotide; AAG chr2 60488268 60488287 60488284 +
attcagactgtgagaggggg

SEQ ID NO: 161548 - DNA, 20 bp, Artificial Sequence
  Synthetic oligonucleotide; AAG chr2 60488271 60488290 60488287 +
cagactgtgagagggggaag

SEQ ID NO: 161549 - DNA, 20 bp, Artificial Sequence
  Synthetic oligonucleotide; TGG chr2 60488284 60488303 60488300 +
ggggaagaagaccgtctctt

SEQ ID NO: 161550 - DNA, 20 bp, Artificial Sequence
  Synthetic oligonucleotide; CAG chr2 60488289 60488308 60488305 +
agaagaccgtctctttggtg

SEQ ID NO: 161551 - DNA, 20 bp, Artificial Sequence
  Synthetic oligonucleotide; TGG chr2 60488292 60488311 60488308 +
agaccgtctctttggtgcag

SEQ ID NO: 161552 - DNA, 20 bp, Artificial Sequence
  Synthetic oligonucleotide; GGG chr2 60488293 60488312 60488309 +
gaccgtctctttggtgcagt

SEQ ID NO: 161553 - DNA, 20 bp, Artificial Sequence
  Synthetic oligonucleotide; TGG chr2 60488316 60488335 60488332 +
aattgccattgtgtcctccc

SEQ ID NO: 161554 - DNA, 20 bp, Artificial Sequence
  Synthetic oligonucleotide; TGG chr2 60488336 60488355 60488352 +
tggttcctctcctctgtcct

SEQ ID NO: 161555 - DNA, 20 bp, Artificial Sequence
  Synthetic oligonucleotide; CAG chr2 60488344 60488363 60488360 +
ctcctctgtccttggcaatc

SEQ ID NO: 161556 - DNA, 20 bp, Artificial Sequence
  Synthetic oligonucleotide; CAG chr2 60488358 60488377 60488374 +
gcaatccagttacaatttga

SEQ ID NO: 161557 - DNA, 20 bp, Artificial Sequence
  Synthetic oligonucleotide; AAG chr2 60488367 60488386 60488383 +
ttacaatttgacagcattta

SEQ ID NO: 161558 - DNA, 20 bp, Artificial Sequence
  Synthetic oligonucleotide; CAG chr2 60488374 60488393 60488390 +
ttgacagcatttaaagatga

SEQ ID NO: 161559 - DNA, 20 bp, Artificial Sequence
  Synthetic oligonucleotide; GAG chr2 60488382 60488401 60488398 +
atttaaagatgacagtactt

SEQ ID NO: 161560 - DNA, 20 bp, Artificial Sequence
  Synthetic oligonucleotide; TAG chr2 60488389 60488408 60488405 +
gatgacagtacttgagataa

SEQ ID NO: 161561 - DNA, 20 bp, Artificial Sequence
  Synthetic oligonucleotide; AGG chr2 60488390 60488409 60488406 +
atgacagtacttgagataat

SEQ ID NO: 161562 - DNA, 20 bp, Artificial Sequence
  Synthetic oligonucleotide; CAG chr2 60488405 60488424 60488421 +
ataataggacaatgccataa

SEQ ID NO: 161563 - DNA, 20 bp, Artificial Sequence
  Synthetic oligonucleotide; AGG chr2 60488406 60488425 60488422 +
taataggacaatgccataac

SEQ ID NO: 161564 - DNA, 20 bp, Artificial Sequence
  Synthetic oligonucleotide; CAG chr2 60488413 60488432 60488429 +
acaatgccataacaggatta

SEQ ID NO: 161565 - DNA, 20 bp, Artificial Sequence
  Synthetic oligonucleotide; AAG chr2 60488425 60488444 60488441 +
caggattacagcaaatgtga

SEQ ID NO: 161566 - DNA, 20 bp, Artificial Sequence
  Synthetic oligonucleotide; AAG chr2 60488429 60488448 60488445 +
attacagcaaatgtgaaaga

SEQ ID NO: 161567 - DNA, 20 bp, Artificial Sequence
  Synthetic oligonucleotide; AGG chr2 60488430 60488449 60488446 +
ttacagcaaatgtgaaagaa

SEQ ID NO: 161568 - DNA, 20 bp, Artificial Sequence
  Synthetic oligonucleotide; TAG chr2 60488440 60488459 60488456 +
tgtgaaagaaaggacacacg

SEQ ID NO: 161569 - DNA, 20 bp, Artificial Sequence
  Synthetic oligonucleotide; AGG chr2 60488441 60488460 60488457 +
gtgaaagaaaggacacacgt

SEQ ID NO: 161570 - DNA, 20 bp, Artificial Sequence
  Synthetic oligonucleotide; TAG chr2 60488454 60488473 60488470 +
cacacgtaggtactgtcatt

SEQ ID NO: 161571 - DNA, 20 bp, Artificial Sequence
  Synthetic oligonucleotide; AGG chr2 60488455 60488474 60488471 +
acacgtaggtactgtcattt

SEQ ID NO: 161572 - DNA, 20 bp, Artificial Sequence
  Synthetic oligonucleotide; CAG chr2 60488474 60488493 60488490 +
taggtaatgtcatctatgat

SEQ ID NO: 161573 - DNA, 20 bp, Artificial Sequence
  Synthetic oligonucleotide; CAG chr2 60488501 60488520 60488517 +
tgtttcattttttgctgaca

SEQ ID NO: 161574 - DNA, 20 bp, Artificial Sequence
  Synthetic oligonucleotide; CAG chr2 60488508 60488527 60488524 +
ttttttgctgacacagaact

SEQ ID NO: 161575 - DNA, 20 bp, Artificial Sequence
  Synthetic oligonucleotide; TGG chr2 60488530 60488549 60488546 +
gtgctacttatacaattcac

SEQ ID NO: 161576 - DNA, 20 bp, Artificial Sequence
  Synthetic oligonucleotide; TGG chr2 60488544 60488563 60488560 +
attcactggaaaccctgtta

SEQ ID NO: 161577 - DNA, 20 bp, Artificial Sequence
  Synthetic oligonucleotide; TAG chr2 60488554 60488573 60488570 +
aaccctgttatggctgtaaa

SEQ ID NO: 161578 - DNA, 20 bp, Artificial Sequence
  Synthetic oligonucleotide; AAG chr2 60488574 60488593 60488590 +
tagtttgcttcccccaatga

SEQ ID NO: 161579 - DNA, 20 bp, Artificial Sequence
  Synthetic oligonucleotide; CAG chr2 60488595 60488614 60488611 +
agaaaatacttactgtactg

SEQ ID NO: 161580 - DNA, 20 bp, Artificial Sequence
  Synthetic oligonucleotide; AGG chr2 60488596 60488615 60488612 +
gaaaatacttactgtactgc

SEQ ID NO: 161581 - DNA, 20 bp, Artificial Sequence
  Synthetic oligonucleotide; GGG chr2 60488597 60488616 60488613 +
aaaatacttactgtactgca

SEQ ID NO: 161582 - DNA, 20 bp, Artificial Sequence
  Synthetic oligonucleotide; GGG chr2 60488598 60488617 60488614 +
aaatacttactgtactgcag

SEQ ID NO: 161583 - DNA, 20 bp, Artificial Sequence
  Synthetic oligonucleotide; CGG chr2 60488605 60488624 60488621 +
tactgtactgcaggggaatt

SEQ ID NO: 161584 - DNA, 20 bp, Artificial Sequence
  Synthetic oligonucleotide; TAG chr2 60488618 60488637 60488634 +
gggaattcggtaaaactttc

SEQ ID NO: 161585 - DNA, 20 bp, Artificial Sequence
  Synthetic oligonucleotide; CAG chr2 60488660 60488679 60488676 +
aataacaaaaaatttcaaat

SEQ ID NO: 161586 - DNA, 20 bp, Artificial Sequence
  Synthetic oligonucleotide; TAG chr2 60488669 60488688 60488685 +
aaatttcaaatcagtatcaa

SEQ ID NO: 161587 - DNA, 20 bp, Artificial Sequence
  Synthetic oligonucleotide; AAG chr2 60488675 60488694 60488691 +
caaatcagtatcaatagcca

SEQ ID NO: 161588 - DNA, 20 bp, Artificial Sequence
  Synthetic oligonucleotide; CAG chr2 60488687 60488706 60488703 +
aatagccaaagatccaaaaa

SEQ ID NO: 161589 - DNA, 20 bp, Artificial Sequence
  Synthetic oligonucleotide; AAG chr2 60488694 60488713 60488710 +
aaagatccaaaaacagccta

SEQ ID NO: 161590 - DNA, 20 bp, Artificial Sequence
  Synthetic oligonucleotide; GAG chr2 60488757 60488776 60488773 +
tttgtttgttttttgtttct

SEQ ID NO: 161591 - DNA, 20 bp, Artificial Sequence
  Synthetic oligonucleotide; AGG chr2 60488758 60488777 60488774 +
ttgtttgttttttgtttctg

SEQ ID NO: 161592 - DNA, 20 bp, Artificial Sequence
  Synthetic oligonucleotide; TGG chr2 60488761 60488780 60488777 +
tttgttttttgtttctgagg

SEQ ID NO: 161593 - DNA, 20 bp, Artificial Sequence
  Synthetic oligonucleotide; GAG chr2 60488763 60488782 60488779 +
tgttttttgtttctgaggtg

SEQ ID NO: 161594 - DNA, 20 bp, Artificial Sequence
  Synthetic oligonucleotide; CGG chr2 60488782 60488801 60488798 +
ggagtttcgctcttgttgcc

SEQ ID NO: 161595 - DNA, 20 bp, Artificial Sequence
  Synthetic oligonucleotide; GGG chr2 60488783 60488802 60488799 +
gagtttcgctcttgttgccc

SEQ ID NO: 161596 - DNA, 20 bp, Artificial Sequence
  Synthetic oligonucleotide; TGG chr2 60488787 60488806 60488803 +
ttcgctcttgttgcccgggc

SEQ ID NO: 161597 - DNA, 20 bp, Artificial Sequence
  Synthetic oligonucleotide; GAG chr2 60488789 60488808 60488805 +
cgctcttgttgcccgggctg

SEQ ID NO: 161598 - DNA, 20 bp, Artificial Sequence
  Synthetic oligonucleotide; TGG chr2 60488797 60488816 60488813 +
ttgcccgggctggagtgcaa

SEQ ID NO: 161599 - DNA, 20 bp, Artificial Sequence
  Synthetic oligonucleotide; CGG chr2 60488808 60488827 60488824 +
ggagtgcaatggcgcaatct

SEQ ID NO: 161600 - DNA, 20 bp, Artificial Sequence
  Synthetic oligonucleotide; CGG chr2 60488832 60488851 60488848 +
tcaccgcaatctccgcctcc

SEQ ID NO: 161601 - DNA, 20 bp, Artificial Sequence
  Synthetic oligonucleotide; GGG chr2 60488833 60488852 60488849 +
caccgcaatctccgcctccc

SEQ ID NO: 161602 - DNA, 20 bp, Artificial Sequence
  Synthetic oligonucleotide; AAG chr2 60488839 60488858 60488855 +
aatctccgcctcccgggttc

SEQ ID NO: 161603 - DNA, 20 bp, Artificial Sequence
  Synthetic oligonucleotide; CAG chr2 60488856 60488875 60488872 +
ttcaagcgattctcctgcct

SEQ ID NO: 161604 - DNA, 20 bp, Artificial Sequence
  Synthetic oligonucleotide; AAG chr2 60488865 60488884 60488881 +
ttctcctgcctcagcctccc

SEQ ID NO: 161605 - DNA, 20 bp, Artificial Sequence
  Synthetic oligonucleotide; TAG chr2 60488868 60488887 60488884 +
tcctgcctcagcctcccaag

SEQ ID NO: 161606 - DNA, 20 bp, Artificial Sequence
  Synthetic oligonucleotide; TGG chr2 60488872 60488891 60488888 +
gcctcagcctcccaagtagc

SEQ ID NO: 161607 - DNA, 20 bp, Artificial Sequence
  Synthetic oligonucleotide; GGG chr2 60488873 60488892 60488889 +
cctcagcctcccaagtagct

SEQ ID NO: 161608 - DNA, 20 bp, Artificial Sequence
  Synthetic oligonucleotide; TAG chr2 60488880 60488899 60488896 +
ctcccaagtagctgggatta

SEQ ID NO: 161609 - DNA, 20 bp, Artificial Sequence
  Synthetic oligonucleotide; AGG chr2 60488881 60488900 60488897 +
tcccaagtagctgggattat

SEQ ID NO: 161610 - DNA, 20 bp, Artificial Sequence
  Synthetic oligonucleotide; CGG chr2 60488900 60488919 60488916 +
taggcatgcgccaccacacg

SEQ ID NO: 161611 - DNA, 20 bp, Artificial Sequence
  Synthetic oligonucleotide; TGG chr2 60488919 60488938 60488935 +
gcggctaatttctgtatttt

SEQ ID NO: 161612 - DNA, 20 bp, Artificial Sequence
  Synthetic oligonucleotide; TAG chr2 60488922 60488941 60488938 +
gctaatttctgtatttttgg

SEQ ID NO: 161613 - DNA, 20 bp, Artificial Sequence
  Synthetic oligonucleotide; GAG chr2 60488924 60488943 60488940 +
taatttctgtatttttggta

SEQ ID NO: 161614 - DNA, 20 bp, Artificial Sequence
  Synthetic oligonucleotide; CGG chr2 60488928 60488947 60488944 +
ttctgtatttttggtagaga

SEQ ID NO: 161615 - DNA, 20 bp, Artificial Sequence
  Synthetic oligonucleotide; GGG chr2 60488929 60488948 60488945 +
tctgtatttttggtagagac

SEQ ID NO: 161616 - DNA, 20 bp, Artificial Sequence
  Synthetic oligonucleotide; GGG chr2 60488930 60488949 60488946 +
ctgtatttttggtagagacg

SEQ ID NO: 161617 - DNA, 20 bp, Artificial Sequence
  Synthetic oligonucleotide; TGG chr2 60488944 60488963 60488960 +
gagacggggtttctccatgt

SEQ ID NO: 161618 - DNA, 20 bp, Artificial Sequence
  Synthetic oligonucleotide; CAG chr2 60488948 60488967 60488964 +
cggggtttctccatgttggt

SEQ ID NO: 161619 - DNA, 20 bp, Artificial Sequence
  Synthetic oligonucleotide; AGG chr2 60488949 60488968 60488965 +
ggggtttctccatgttggtc

SEQ ID NO: 161620 - DNA, 20 bp, Artificial Sequence
  Synthetic oligonucleotide; TGG chr2 60488953 60488972 60488969 +
tttctccatgttggtcaggc

SEQ ID NO: 161621 - DNA, 20 bp, Artificial Sequence
  Synthetic oligonucleotide; TAG chr2 60488973 60488992 60488989 +
tggtctcaaactcccgacct

SEQ ID NO: 161622 - DNA, 20 bp, Artificial Sequence
  Synthetic oligonucleotide; AGG chr2 60488974 60488993 60488990 +
ggtctcaaactcccgacctt

SEQ ID NO: 161623 - DNA, 20 bp, Artificial Sequence
  Synthetic oligonucleotide; CAG chr2 60488991 60489010 60489007 +
cttaggtgatccacccacct

SEQ ID NO: 161624 - DNA, 20 bp, Artificial Sequence
  Synthetic oligonucleotide; AAG chr2 60489001 60489020 60489017 +
ccacccacctcagcctccca

SEQ ID NO: 161625 - DNA, 20 bp, Artificial Sequence
  Synthetic oligonucleotide; TGG chr2 60489007 60489026 60489023 +
acctcagcctcccaaagtgc

SEQ ID NO: 161626 - DNA, 20 bp, Artificial Sequence
  Synthetic oligonucleotide; GGG chr2 60489008 60489027 60489024 +
cctcagcctcccaaagtgct

SEQ ID NO: 161627 - DNA, 20 bp, Artificial Sequence
  Synthetic oligonucleotide; TAG chr2 60489015 60489034 60489031 +
ctcccaaagtgctgggatta

SEQ ID NO: 161628 - DNA, 20 bp, Artificial Sequence
  Synthetic oligonucleotide; AGG chr2 60489016 60489035 60489032 +
tcccaaagtgctgggattat

SEQ ID NO: 161629 - DNA, 20 bp, Artificial Sequence
  Synthetic oligonucleotide; AAG chr2 60489022 60489041 60489038 +
agtgctgggattataggcat

SEQ ID NO: 161630 - DNA, 20 bp, Artificial Sequence
  Synthetic oligonucleotide; CAG chr2 60489035 60489054 60489051 +
taggcataagctaccacacc

SEQ ID NO: 161631 - DNA, 20 bp, Artificial Sequence
  Synthetic oligonucleotide; AAG chr2 60489064 60489083 60489080 +
ccaaaacaaatttatcttca

SEQ ID NO: 161632 - DNA, 20 bp, Artificial Sequence
  Synthetic oligonucleotide; TAG chr2 60489094 60489113 60489110 +
atgctgtgtgtcctaaataa

SEQ ID NO: 161633 - DNA, 20 bp, Artificial Sequence
  Synthetic oligonucleotide; AGG chr2 60489095 60489114 60489111 +
tgctgtgtgtcctaaataat

SEQ ID NO: 161634 - DNA, 20 bp, Artificial Sequence
  Synthetic oligonucleotide; TGG chr2 60489098 60489117 60489114 +
tgtgtgtcctaaataatagg

SEQ ID NO: 161635 - DNA, 20 bp, Artificial Sequence
  Synthetic oligonucleotide; AAG chr2 60489115 60489134 60489131 +
aggtggtcaaaatgtttcta

SEQ ID NO: 161636 - DNA, 20 bp, Artificial Sequence
  Synthetic oligonucleotide; AGG chr2 60489116 60489135 60489132 +
ggtggtcaaaatgtttctaa

SEQ ID NO: 161637 - DNA, 20 bp, Artificial Sequence
  Synthetic oligonucleotide; GGG chr2 60489117 60489136 60489133 +
gtggtcaaaatgtttctaaa

SEQ ID NO: 161638 - DNA, 20 bp, Artificial Sequence
  Synthetic oligonucleotide; TAG chr2 60489125 60489144 60489141 +
aatgtttctaaagggtacct

SEQ ID NO: 161639 - DNA, 20 bp, Artificial Sequence
  Synthetic oligonucleotide; TAG chr2 60489149 60489168 60489165 +
ccccaattaaactgttgctt

SEQ ID NO: 161640 - DNA, 20 bp, Artificial Sequence
  Synthetic oligonucleotide; GAG chr2 60489151 60489170 60489167 +
ccaattaaactgttgcttta

SEQ ID NO: 161641 - DNA, 20 bp, Artificial Sequence
  Synthetic oligonucleotide; TGG chr2 60489156 60489175 60489172 +
taaactgttgctttagagtt

SEQ ID NO: 161642 - DNA, 20 bp, Artificial Sequence
  Synthetic oligonucleotide; GGG chr2 60489157 60489176 60489173 +
aaactgttgctttagagttt

SEQ ID NO: 161643 - DNA, 20 bp, Artificial Sequence
  Synthetic oligonucleotide; GGG chr2 60489158 60489177 60489174 +
aactgttgctttagagtttg

SEQ ID NO: 161644 - DNA, 20 bp, Artificial Sequence
  Synthetic oligonucleotide; AAG chr2 60489167 60489186 60489183 +
tttagagtttggggaaaata

SEQ ID NO: 161645 - DNA, 20 bp, Artificial Sequence
  Synthetic oligonucleotide; TGG chr2 60489170 60489189 60489186 +
agagtttggggaaaataaag

SEQ ID NO: 161646 - DNA, 20 bp, Artificial Sequence
  Synthetic oligonucleotide; GAG chr2 60489198 60489217 60489214 +
cctaactaaattcacactgt

SEQ ID NO: 161647 - DNA, 20 bp, Artificial Sequence
  Synthetic oligonucleotide; GAG chr2 60489200 60489219 60489216 +
taactaaattcacactgtga

SEQ ID NO: 161648 - DNA, 20 bp, Artificial Sequence
  Synthetic oligonucleotide; CAG chr2 60489204 60489223 60489220 +
taaattcacactgtgagagc

SEQ ID NO: 161649 - DNA, 20 bp, Artificial Sequence
  Synthetic oligonucleotide; TAG chr2 60489214 60489233 60489230 +
ctgtgagagccagtcaacac

SEQ ID NO: 161650 - DNA, 20 bp, Artificial Sequence
  Synthetic oligonucleotide; TGG chr2 60489229 60489248 60489245 +
aacactagcccacatgccaa

SEQ ID NO: 161651 - DNA, 20 bp, Artificial Sequence
  Synthetic oligonucleotide; GGG chr2 60489230 60489249 60489246 +
acactagcccacatgccaat

SEQ ID NO: 161652 - DNA, 20 bp, Artificial Sequence
  Synthetic oligonucleotide; GGG chr2 60489231 60489250 60489247 +
cactagcccacatgccaatg

SEQ ID NO: 161653 - DNA, 20 bp, Artificial Sequence
  Synthetic oligonucleotide; CAG chr2 60489241 60489260 60489257 +
catgccaatggggtccttgt

SEQ ID NO: 161654 - DNA, 20 bp, Artificial Sequence
  Synthetic oligonucleotide; TAG chr2 60489313 60489332 60489329 +
acatatccaaattcatacaa

SEQ ID NO: 161655 - DNA, 20 bp, Artificial Sequence
  Synthetic oligonucleotide; GAG chr2 60489315 60489334 60489331 +
atatccaaattcatacaata

SEQ ID NO: 161656 - DNA, 20 bp, Artificial Sequence
  Synthetic oligonucleotide; AGG chr2 60489316 60489335 60489332 +
tatccaaattcatacaatag

SEQ ID NO: 161657 - DNA, 20 bp, Artificial Sequence
  Synthetic oligonucleotide; TGG chr2 60489323 60489342 60489339 +
attcatacaatagaggcatt

SEQ ID NO: 161658 - DNA, 20 bp, Artificial Sequence
  Synthetic oligonucleotide; CAG chr2 60489330 60489349 60489346 +
caatagaggcatttggaacc

SEQ ID NO: 161659 - DNA, 20 bp, Artificial Sequence
  Synthetic oligonucleotide; TGG chr2 60489365 60489384 60489381 +
tcctaactaatttctgccgc

SEQ ID NO: 161660 - DNA, 20 bp, Artificial Sequence
  Synthetic oligonucleotide; AAG chr2 60489368 60489387 60489384 +
taactaatttctgccgctgg

SEQ ID NO: 161661 - DNA, 20 bp, Artificial Sequence
  Synthetic oligonucleotide; AAG chr2 60489381 60489400 60489397 +
ccgctggaagtttgttccta

SEQ ID NO: 161662 - DNA, 20 bp, Artificial Sequence
  Synthetic oligonucleotide; AAG chr2 60489389 60489408 60489405 +
agtttgttcctaaagccacc

SEQ ID NO: 161663 - DNA, 20 bp, Artificial Sequence
  Synthetic oligonucleotide; TAG chr2 60489397 60489416 60489413 +
cctaaagccaccaagtctcc

SEQ ID NO: 161664 - DNA, 20 bp, Artificial Sequence
  Synthetic oligonucleotide; AAG chr2 60489400 60489419 60489416 +
aaagccaccaagtctcctag

SEQ ID NO: 161665 - DNA, 20 bp, Artificial Sequence
  Synthetic oligonucleotide; TGG chr2 60489414 60489433 60489430 +
tcctagaagcccttatttct

SEQ ID NO: 161666 - DNA, 20 bp, Artificial Sequence
  Synthetic oligonucleotide; CAG chr2 60489417 60489436 60489433 +
tagaagcccttatttcttgg

SEQ ID NO: 161667 - DNA, 20 bp, Artificial Sequence
  Synthetic oligonucleotide; CGG chr2 60489428 60489447 60489444 +
atttcttggcagtaaacaca

SEQ ID NO: 161668 - DNA, 20 bp, Artificial Sequence
  Synthetic oligonucleotide; CGG chr2 60489431 60489450 60489447 +
tcttggcagtaaacacacgg

SEQ ID NO: 161669 - DNA, 20 bp, Artificial Sequence
  Synthetic oligonucleotide; TAG chr2 60489452 60489471 60489468 +
ggccctgcgtgccattaaaa

SEQ ID NO: 161670 - DNA, 20 bp, Artificial Sequence
  Synthetic oligonucleotide; CAG chr2 60489468 60489487 60489484 +
aaaatagctgcctcatcatc

SEQ ID NO: 161671 - DNA, 20 bp, Artificial Sequence
  Synthetic oligonucleotide; AGG chr2 60489469 60489488 60489485 +
aaatagctgcctcatcatcc

SEQ ID NO: 161672 - DNA, 20 bp, Artificial Sequence
  Synthetic oligonucleotide; CAG chr2 60489480 60489499 60489496 +
tcatcatccaggatgacaaa

SEQ ID NO: 161673 - DNA, 20 bp, Artificial Sequence
  Synthetic oligonucleotide; AAG chr2 60489497 60489516 60489513 +
aaacagccacactgtgtgcc

SEQ ID NO: 161674 - DNA, 20 bp, Artificial Sequence
  Synthetic oligonucleotide; CAG chr2 60489504 60489523 60489520 +
cacactgtgtgccaagtgac

SEQ ID NO: 161675 - DNA, 20 bp, Artificial Sequence
  Synthetic oligonucleotide; AAG chr2 60489517 60489536 60489533 +
aagtgaccagccacaaacaa

SEQ ID NO: 161676 - DNA, 20 bp, Artificial Sequence
  Synthetic oligonucleotide; CAG chr2 60489530 60489549 60489546 +
caaacaaaagcttgtttgac

SEQ ID NO: 161677 - DNA, 20 bp, Artificial Sequence
  Synthetic oligonucleotide; AAG chr2 60489545 60489564 60489561 +
ttgaccagcacctatctcaa

SEQ ID NO: 161678 - DNA, 20 bp, Artificial Sequence
  Synthetic oligonucleotide; GAG chr2 60489556 60489575 60489572 +
ctatctcaaaagaaaattct

SEQ ID NO: 161679 - DNA, 20 bp, Artificial Sequence
  Synthetic oligonucleotide; TAG chr2 60489559 60489578 60489575 +
tctcaaaagaaaattctgag

SEQ ID NO: 161680 - DNA, 20 bp, Artificial Sequence
  Synthetic oligonucleotide; AAG chr2 60489562 60489581 60489578 +
caaaagaaaattctgagtag

SEQ ID NO: 161681 - DNA, 20 bp, Artificial Sequence
  Synthetic oligonucleotide; GAG chr2 60489564 60489583 60489580 +
aaagaaaattctgagtagaa

SEQ ID NO: 161682 - DNA, 20 bp, Artificial Sequence
  Synthetic oligonucleotide; AGG chr2 60489565 60489584 60489581 +
aagaaaattctgagtagaag

SEQ ID NO: 161683 - DNA, 20 bp, Artificial Sequence
  Synthetic oligonucleotide; AAG chr2 60489568 60489587 60489584 +
aaaattctgagtagaagagg

SEQ ID NO: 161684 - DNA, 20 bp, Artificial Sequence
  Synthetic oligonucleotide; AAG chr2 60489577 60489596 60489593 +
agtagaagaggaagcacctg

SEQ ID NO: 161685 - DNA, 20 bp, Artificial Sequence
  Synthetic oligonucleotide; AGG chr2 60489578 60489597 60489594 +
gtagaagaggaagcacctga

SEQ ID NO: 161686 - DNA, 20 bp, Artificial Sequence
  Synthetic oligonucleotide; AAG chr2 60489581 60489600 60489597 +
gaagaggaagcacctgaagg

SEQ ID NO: 161687 - DNA, 20 bp, Artificial Sequence
  Synthetic oligonucleotide; AAG chr2 60489589 60489608 60489605 +
agcacctgaaggaagctgaa

SEQ ID NO: 161688 - DNA, 20 bp, Artificial Sequence
  Synthetic oligonucleotide; AAG chr2 60489593 60489612 60489609 +
cctgaaggaagctgaaaaga

SEQ ID NO: 161689 - DNA, 20 bp, Artificial Sequence
  Synthetic oligonucleotide; CAG chr2 60489616 60489635 60489632 +
tctgacatttgaaattctaa

SEQ ID NO: 161690 - DNA, 20 bp, Artificial Sequence
  Synthetic oligonucleotide; GAG chr2 60489618 60489637 60489634 +
tgacatttgaaattctaaca

SEQ ID NO: 161691 - DNA, 20 bp, Artificial Sequence
  Synthetic oligonucleotide; AGG chr2 60489619 60489638 60489635 +
gacatttgaaattctaacag

SEQ ID NO: 161692 - DNA, 20 bp, Artificial Sequence
  Synthetic oligonucleotide; TAG chr2 60489634 60489653 60489650 +
aacagaggttctttcccctc

SEQ ID NO: 161693 - DNA, 20 bp, Artificial Sequence
  Synthetic oligonucleotide; AGG chr2 60489635 60489654 60489651 +
acagaggttctttcccctct

SEQ ID NO: 161694 - DNA, 20 bp, Artificial Sequence
  Synthetic oligonucleotide; TGG chr2 60489644 60489663 60489660 +
ctttcccctctaggacactc

SEQ ID NO: 161695 - DNA, 20 bp, Artificial Sequence
  Synthetic oligonucleotide; GGG chr2 60489645 60489664 60489661 +
tttcccctctaggacactct

SEQ ID NO: 161696 - DNA, 20 bp, Artificial Sequence
  Synthetic oligonucleotide; TAG chr2 60489652 60489671 60489668 +
tctaggacactctgggtcac

SEQ ID NO: 161697 - DNA, 20 bp, Artificial Sequence
  Synthetic oligonucleotide; TGG chr2 60489677 60489696 60489693 +
tctctgctttccttgttccc

SEQ ID NO: 161698 - DNA, 20 bp, Artificial Sequence
  Synthetic oligonucleotide; GAG chr2 60489690 60489709 60489706 +
tgttccctggctcatctcct

SEQ ID NO: 161699 - DNA, 20 bp, Artificial Sequence
  Synthetic oligonucleotide; CGG chr2 60489697 60489716 60489713 +
tggctcatctcctgagcccc

SEQ ID NO: 161700 - DNA, 20 bp, Artificial Sequence
  Synthetic oligonucleotide; GGG chr2 60489698 60489717 60489714 +
ggctcatctcctgagccccc

SEQ ID NO: 161701 - DNA, 20 bp, Artificial Sequence
  Synthetic oligonucleotide; CAG chr2 60489742 60489761 60489758 +
tatttactaaccacttttat

SEQ ID NO: 161702 - DNA, 20 bp, Artificial Sequence
  Synthetic oligonucleotide; AAG chr2 60489778 60489797 60489794 +
ccatccaaaaatgtttactc

SEQ ID NO: 161703 - DNA, 20 bp, Artificial Sequence
  Synthetic oligonucleotide; CAG chr2 60489783 60489802 60489799 +
caaaaatgtttactcaagtt

SEQ ID NO: 161704 - DNA, 20 bp, Artificial Sequence
  Synthetic oligonucleotide; AGG chr2 60489784 60489803 60489800 +
aaaaatgtttactcaagttc

SEQ ID NO: 161705 - DNA, 20 bp, Artificial Sequence
  Synthetic oligonucleotide; TAG chr2 60489788 60489807 60489804 +
atgtttactcaagttcaggc

SEQ ID NO: 161706 - DNA, 20 bp, Artificial Sequence
  Synthetic oligonucleotide; AAG chr2 60489805 60489824 60489821 +
ggctagcttaataaccccca

SEQ ID NO: 161707 - DNA, 20 bp, Artificial Sequence
  Synthetic oligonucleotide; CAG chr2 60489808 60489827 60489824 +
tagcttaataacccccaaag

SEQ ID NO: 161708 - DNA, 20 bp, Artificial Sequence
  Synthetic oligonucleotide; AGG chr2 60489809 60489828 60489825 +
agcttaataacccccaaagc

SEQ ID NO: 161709 - DNA, 20 bp, Artificial Sequence
  Synthetic oligonucleotide; GAG chr2 60489811 60489830 60489827 +
cttaataacccccaaagcag

SEQ ID NO: 161710 - DNA, 20 bp, Artificial Sequence
  Synthetic oligonucleotide; AGG chr2 60489812 60489831 60489828 +
ttaataacccccaaagcagg

SEQ ID NO: 161711 - DNA, 20 bp, Artificial Sequence
  Synthetic oligonucleotide; AAG chr2 60489824 60489843 60489840 +
aaagcaggaggacactatta

SEQ ID NO: 161712 - DNA, 20 bp, Artificial Sequence
  Synthetic oligonucleotide; GAG chr2 60489826 60489845 60489842 +
agcaggaggacactattaaa

SEQ ID NO: 161713 - DNA, 20 bp, Artificial Sequence
  Synthetic oligonucleotide; GAG chr2 60489828 60489847 60489844 +
caggaggacactattaaaga

SEQ ID NO: 161714 - DNA, 20 bp, Artificial Sequence
  Synthetic oligonucleotide; CAG chr2 60489835 60489854 60489851 +
acactattaaagagagatca

SEQ ID NO: 161715 - DNA, 20 bp, Artificial Sequence
  Synthetic oligonucleotide; AGG chr2 60489836 60489855 60489852 +
cactattaaagagagatcac

SEQ ID NO: 161716 - DNA, 20 bp, Artificial Sequence
  Synthetic oligonucleotide; GGG chr2 60489837 60489856 60489853 +
actattaaagagagatcaca

SEQ ID NO: 161717 - DNA, 20 bp, Artificial Sequence
  Synthetic oligonucleotide; GAG chr2 60489920 60489939 60489936 +
tgaaacaccatccatgccct

SEQ ID NO: 161718 - DNA, 20 bp, Artificial Sequence
  Synthetic oligonucleotide; TGG chr2 60489933 60489952 60489949 +
atgccctgagtatcccaaca

SEQ ID NO: 161719 - DNA, 20 bp, Artificial Sequence
  Synthetic oligonucleotide; TGG chr2 60489937 60489956 60489953 +
cctgagtatcccaacatgga

SEQ ID NO: 161720 - DNA, 20 bp, Artificial Sequence
  Synthetic oligonucleotide; TGG chr2 60489942 60489961 60489958 +
gtatcccaacatggatggac

SEQ ID NO: 161721 - DNA, 20 bp, Artificial Sequence
  Synthetic oligonucleotide; GAG chr2 60489944 60489963 60489960 +
atcccaacatggatggactg

SEQ ID NO: 161722 - DNA, 20 bp, Artificial Sequence
  Synthetic oligonucleotide; AGG chr2 60489945 60489964 60489961 +
tcccaacatggatggactgg

SEQ ID NO: 161723 - DNA, 20 bp, Artificial Sequence
  Synthetic oligonucleotide; GAG chr2 60489947 60489966 60489963 +
ccaacatggatggactggag

SEQ ID NO: 161724 - DNA, 20 bp, Artificial Sequence
  Synthetic oligonucleotide; GAG chr2 60489949 60489968 60489965 +
aacatggatggactggagga

SEQ ID NO: 161725 - DNA, 20 bp, Artificial Sequence
  Synthetic oligonucleotide; AGG chr2 60489950 60489969 60489966 +
acatggatggactggaggag

SEQ ID NO: 161726 - DNA, 20 bp, Artificial Sequence
  Synthetic oligonucleotide; GGG chr2 60489951 60489970 60489967 +
catggatggactggaggaga

SEQ ID NO: 161727 - DNA, 20 bp, Artificial Sequence
  Synthetic oligonucleotide; AAG chr2 60489956 60489975 60489972 +
atggactggaggagagggac

SEQ ID NO: 161728 - DNA, 20 bp, Artificial Sequence
  Synthetic oligonucleotide; AGG chr2 60489957 60489976 60489973 +
tggactggaggagagggaca

SEQ ID NO: 161729 - DNA, 20 bp, Artificial Sequence
  Synthetic oligonucleotide; GGG chr2 60489958 60489977 60489974 +
ggactggaggagagggacaa

SEQ ID NO: 161730 - DNA, 20 bp, Artificial Sequence
  Synthetic oligonucleotide; CAG chr2 60489968 60489987 60489984 +
agagggacaagggaccaata

SEQ ID NO: 161731 - DNA, 20 bp, Artificial Sequence
  Synthetic oligonucleotide; TGG chr2 60489978 60489997 60489994 +
gggaccaatacagaccctga

SEQ ID NO: 161732 - DNA, 20 bp, Artificial Sequence
  Synthetic oligonucleotide; GGG chr2 60489979 60489998 60489995 +
ggaccaatacagaccctgat

SEQ ID NO: 161733 - DNA, 20 bp, Artificial Sequence
  Synthetic oligonucleotide; TGG chr2 60490025 60490044 60490041 +
tgcccactccccatctgcaa

SEQ ID NO: 161734 - DNA, 20 bp, Artificial Sequence
  Synthetic oligonucleotide; GGG chr2 60490026 60490045 60490042 +
gcccactccccatctgcaat

SEQ ID NO: 161735 - DNA, 20 bp, Artificial Sequence
  Synthetic oligonucleotide; GGG chr2 60490027 60490046 60490043 +
cccactccccatctgcaatg

SEQ ID NO: 161736 - DNA, 20 bp, Artificial Sequence
  Synthetic oligonucleotide; GGG chr2 60490028 60490047 60490044 +
ccactccccatctgcaatgg

SEQ ID NO: 161737 - DNA, 20 bp, Artificial Sequence
  Synthetic oligonucleotide; AAG chr2 60490033 60490052 60490049 +
ccccatctgcaatgggggca

SEQ ID NO: 161738 - DNA, 20 bp, Artificial Sequence
  Synthetic oligonucleotide; AGG chr2 60490034 60490053 60490050 +
cccatctgcaatgggggcaa

SEQ ID NO: 161739 - DNA, 20 bp, Artificial Sequence
  Synthetic oligonucleotide; AAG chr2 60490040 60490059 60490056 +
tgcaatgggggcaaaggcaa

SEQ ID NO: 161740 - DNA, 20 bp, Artificial Sequence
  Synthetic oligonucleotide; AGG chr2 60490041 60490060 60490057 +
gcaatgggggcaaaggcaaa

SEQ ID NO: 161741 - DNA, 20 bp, Artificial Sequence
  Synthetic oligonucleotide; AAG chr2 60490045 60490064 60490061 +
tgggggcaaaggcaaaagga

SEQ ID NO: 161742 - DNA, 20 bp, Artificial Sequence
  Synthetic oligonucleotide; AAG chr2 60490054 60490073 60490070 +
aggcaaaaggaaagctttcc

SEQ ID NO: 161743 - DNA, 20 bp, Artificial Sequence
  Synthetic oligonucleotide; CAG chr2 60490064 60490083 60490080 +
aaagctttccaagatttaaa

SEQ ID NO: 161744 - DNA, 20 bp, Artificial Sequence
  Synthetic oligonucleotide; TAG chr2 60490077 60490096 60490093 +
atttaaacagtcctctatat

SEQ ID NO: 161745 - DNA, 20 bp, Artificial Sequence
  Synthetic oligonucleotide; CAG chr2 60490083 60490102 60490099 +
acagtcctctatattagtaa

SEQ ID NO: 161746 - DNA, 20 bp, Artificial Sequence
  Synthetic oligonucleotide; TAG chr2 60490096 60490115 60490112 +
ttagtaacagacccatgtgc

SEQ ID NO: 161747 - DNA, 20 bp, Artificial Sequence
  Synthetic oligonucleotide; AGG chr2 60490097 60490116 60490113 +
tagtaacagacccatgtgct

SEQ ID NO: 161748 - DNA, 20 bp, Artificial Sequence
  Synthetic oligonucleotide; TGG chr2 60490113 60490132 60490129 +
tgctaggctcctacaatatc

SEQ ID NO: 161749 - DNA, 20 bp, Artificial Sequence
  Synthetic oligonucleotide; TAG chr2 60490127 60490146 60490143 +
aatatctggttccattctgc

SEQ ID NO: 161750 - DNA, 20 bp, Artificial Sequence
  Synthetic oligonucleotide; AAG chr2 60490133 60490152 60490149 +
tggttccattctgctagtga

SEQ ID NO: 161751 - DNA, 20 bp, Artificial Sequence
  Synthetic oligonucleotide; AGG chr2 60490134 60490153 60490150 +
ggttccattctgctagtgaa

SEQ ID NO: 161752 - DNA, 20 bp, Artificial Sequence
  Synthetic oligonucleotide; CGG chr2 60490145 60490164 60490161 +
gctagtgaaaggaaacccta

SEQ ID NO: 161753 - DNA, 20 bp, Artificial Sequence
  Synthetic oligonucleotide; TAG chr2 60490166 60490185 60490182 +
ggtcaaccaactccatcctc

SEQ ID NO: 161754 - DNA, 20 bp, Artificial Sequence
  Synthetic oligonucleotide; AAG chr2 60490176 60490195 60490192 +
ctccatcctctagaacatat

SEQ ID NO: 161755 - DNA, 20 bp, Artificial Sequence
  Synthetic oligonucleotide; CAG chr2 60490183 60490202 60490199 +
ctctagaacatataagtcaa

SEQ ID NO: 161756 - DNA, 20 bp, Artificial Sequence
  Synthetic oligonucleotide; AGG chr2 60490184 60490203 60490200 +
tctagaacatataagtcaac

SEQ ID NO: 161757 - DNA, 20 bp, Artificial Sequence
  Synthetic oligonucleotide; GGG chr2 60490185 60490204 60490201 +
ctagaacatataagtcaaca

SEQ ID NO: 161758 - DNA, 20 bp, Artificial Sequence
  Synthetic oligonucleotide; GGG chr2 60490186 60490205 60490202 +
tagaacatataagtcaacag

SEQ ID NO: 161759 - DNA, 20 bp, Artificial Sequence
  Synthetic oligonucleotide; GAG chr2 60490188 60490207 60490204 +
gaacatataagtcaacaggg

SEQ ID NO: 161760 - DNA, 20 bp, Artificial Sequence
  Synthetic oligonucleotide; CGG chr2 60490195 60490214 60490211 +
taagtcaacaggggagaact

SEQ ID NO: 161761 - DNA, 20 bp, Artificial Sequence
  Synthetic oligonucleotide; AAG chr2 60490202 60490221 60490218 +
acaggggagaactcggcatg

SEQ ID NO: 161762 - DNA, 20 bp, Artificial Sequence
  Synthetic oligonucleotide; AGG chr2 60490203 60490222 60490219 +
caggggagaactcggcatga

SEQ ID NO: 161763 - DNA, 20 bp, Artificial Sequence
  Synthetic oligonucleotide; GGG chr2 60490204 60490223 60490220 +
aggggagaactcggcatgaa

SEQ ID NO: 161764 - DNA, 20 bp, Artificial Sequence
  Synthetic oligonucleotide; CAG chr2 60490212 60490231 60490228 +
actcggcatgaagggtataa

SEQ ID NO: 161765 - DNA, 20 bp, Artificial Sequence
  Synthetic oligonucleotide; GAG chr2 60490214 60490233 60490230 +
tcggcatgaagggtataaca

SEQ ID NO: 161766 - DNA, 20 bp, Artificial Sequence
  Synthetic oligonucleotide; CAG chr2 60490245 60490264 60490261 +
caactcatccaccccctttg

SEQ ID NO: 161767 - DNA, 20 bp, Artificial Sequence
  Synthetic oligonucleotide; GAG chr2 60490247 60490266 60490263 +
actcatccaccccctttgca

SEQ ID NO: 161768 - DNA, 20 bp, Artificial Sequence
  Synthetic oligonucleotide; TAG chr2 60490268 60490287 60490284 +
agtcctcacttaacatcccc

SEQ ID NO: 161769 - DNA, 20 bp, Artificial Sequence
  Synthetic oligonucleotide; CAG chr2 60490293 60490312 60490309 +
tgctgcctttgtcttctgat

SEQ ID NO: 161770 - DNA, 20 bp, Artificial Sequence
  Synthetic oligonucleotide; GAG chr2 60490295 60490314 60490311 +
ctgcctttgtcttctgatca

SEQ ID NO: 161771 - DNA, 20 bp, Artificial Sequence
  Synthetic oligonucleotide; CAG chr2 60490303 60490322 60490319 +
gtcttctgatcagagtattt

SEQ ID NO: 161772 - DNA, 20 bp, Artificial Sequence
  Synthetic oligonucleotide; CAG chr2 60490306 60490325 60490322 +
ttctgatcagagtatttcag

SEQ ID NO: 161773 - DNA, 20 bp, Artificial Sequence
  Synthetic oligonucleotide; TAG chr2 60490323 60490342 60490339 +
cagcagccctctgtgatcta

SEQ ID NO: 161774 - DNA, 20 bp, Artificial Sequence
  Synthetic oligonucleotide; AGG chr2 60490324 60490343 60490340 +
agcagccctctgtgatctat

SEQ ID NO: 161775 - DNA, 20 bp, Artificial Sequence
  Synthetic oligonucleotide; TGG chr2 60490330 60490349 60490346 +
cctctgtgatctataggata

SEQ ID NO: 161776 - DNA, 20 bp, Artificial Sequence
  Synthetic oligonucleotide; AAG chr2 60490344 60490363 60490360 +
aggatatggtccaactcctt

SEQ ID NO: 161777 - DNA, 20 bp, Artificial Sequence
  Synthetic oligonucleotide; CAG chr2 60490356 60490375 60490372 +
aactccttaagccatcattc

SEQ ID NO: 161778 - DNA, 20 bp, Artificial Sequence
  Synthetic oligonucleotide; GAG chr2 60490358 60490377 60490374 +
ctccttaagccatcattcca

SEQ ID NO: 161779 - DNA, 20 bp, Artificial Sequence
  Synthetic oligonucleotide; CAG chr2 60490390 60490409 60490406 +
ccaactccaattttctattc

SEQ ID NO: 161780 - DNA, 20 bp, Artificial Sequence
  Synthetic oligonucleotide; TAG chr2 60490396 60490415 60490412 +
ccaattttctattccagtct

SEQ ID NO: 161781 - DNA, 20 bp, Artificial Sequence
  Synthetic oligonucleotide; AAG chr2 60490414 60490433 60490430 +
cttagttccccgtacccatc

SEQ ID NO: 161782 - DNA, 20 bp, Artificial Sequence
  Synthetic oligonucleotide; AGG chr2 60490415 60490434 60490431 +
ttagttccccgtacccatca

SEQ ID NO: 161783 - DNA, 20 bp, Artificial Sequence
  Synthetic oligonucleotide; AAG chr2 60490432 60490451 60490448 +
tcaaggaaaatattctgccc

SEQ ID NO: 161784 - DNA, 20 bp, Artificial Sequence
  Synthetic oligonucleotide; TGG chr2 60490465 60490484 60490481 +
ttccgttctcatttccttcc

SEQ ID NO: 161785 - DNA, 20 bp, Artificial Sequence
  Synthetic oligonucleotide; TGG chr2 60490493 60490512 60490509 +
cttcttcttctcttacctcc

SEQ ID NO: 161786 - DNA, 20 bp, Artificial Sequence
  Synthetic oligonucleotide; AAG chr2 60490513 60490532 60490529 +
tggaatcctgctcatacttc

SEQ ID NO: 161787 - DNA, 20 bp, Artificial Sequence
  Synthetic oligonucleotide; AGG chr2 60490514 60490533 60490530 +
ggaatcctgctcatacttca

SEQ ID NO: 161788 - DNA, 20 bp, Artificial Sequence
  Synthetic oligonucleotide; AAG chr2 60490525 60490544 60490541 +
catacttcaaggcctcaatg

SEQ ID NO: 161789 - DNA, 20 bp, Artificial Sequence
  Synthetic oligonucleotide; AGG chr2 60490526 60490545 60490542 +
atacttcaaggcctcaatga

SEQ ID NO: 161790 - DNA, 20 bp, Artificial Sequence
  Synthetic oligonucleotide; TAG chr2 60490535 60490554 60490551 +
ggcctcaatgaaggtctacc

SEQ ID NO: 161791 - DNA, 20 bp, Artificial Sequence
  Synthetic oligonucleotide; TAG chr2 60490544 60490563 60490560 +
gaaggtctacctagtcacct

SEQ ID NO: 161792 - DNA, 20 bp, Artificial Sequence
  Synthetic oligonucleotide; AAG chr2 60490548 60490567 60490564 +
gtctacctagtcaccttagc

SEQ ID NO: 161793 - DNA, 20 bp, Artificial Sequence
  Synthetic oligonucleotide; AAG chr2 60490551 60490570 60490567 +
tacctagtcaccttagcaag

SEQ ID NO: 161794 - DNA, 20 bp, Artificial Sequence
  Synthetic oligonucleotide; TAG chr2 60490581 60490600 60490597 +
ctcatccttctccaacctca

SEQ ID NO: 161795 - DNA, 20 bp, Artificial Sequence
  Synthetic oligonucleotide; TAG chr2 60490620 60490639 60490636 +
accactccctgactcatatc

SEQ ID NO: 161796 - DNA, 20 bp, Artificial Sequence
  Synthetic oligonucleotide; AGG chr2 60490621 60490640 60490637 +
ccactccctgactcatatct

SEQ ID NO: 161797 - DNA, 20 bp, Artificial Sequence
  Synthetic oligonucleotide; TGG chr2 60490635 60490654 60490651 +
atatctaggccttacattgc

SEQ ID NO: 161798 - DNA, 20 bp, Artificial Sequence
  Synthetic oligonucleotide; GAG chr2 60490679 60490698 60490695 +
taatttcatgtgttcccaat

SEQ ID NO: 161799 - DNA, 20 bp, Artificial Sequence
  Synthetic oligonucleotide; CAG chr2 60490693 60490712 60490709 +
cccaatgagtttcttcaata

SEQ ID NO: 161800 - DNA, 20 bp, Artificial Sequence
  Synthetic oligonucleotide; AGG chr2 60490694 60490713 60490710 +
ccaatgagtttcttcaatac

SEQ ID NO: 161801 - DNA, 20 bp, Artificial Sequence
  Synthetic oligonucleotide; GGG chr2 60490695 60490714 60490711 +
caatgagtttcttcaataca

SEQ ID NO: 161802 - DNA, 20 bp, Artificial Sequence
  Synthetic oligonucleotide; AAG chr2 60490731 60490750 60490747 +
cttgcttctattatatttga

SEQ ID NO: 161803 - DNA, 20 bp, Artificial Sequence
  Synthetic oligonucleotide; CAG chr2 60490737 60490756 60490753 +
tctattatatttgaaagtac

SEQ ID NO: 161804 - DNA, 20 bp, Artificial Sequence
  Synthetic oligonucleotide; CAG chr2 60490742 60490761 60490758 +
tatatttgaaagtaccagca

SEQ ID NO: 161805 - DNA, 20 bp, Artificial Sequence
  Synthetic oligonucleotide; TAG chr2 60490770 60490789 60490786 +
gacatgatattcatatattc

SEQ ID NO: 161806 - DNA, 20 bp, Artificial Sequence
  Synthetic oligonucleotide; AGG chr2 60490771 60490790 60490787 +
acatgatattcatatattct

SEQ ID NO: 161807 - DNA, 20 bp, Artificial Sequence
  Synthetic oligonucleotide; TAG chr2 60490785 60490804 60490801 +
tattctaggaattcaacaaa

SEQ ID NO: 161808 - DNA, 20 bp, Artificial Sequence
  Synthetic oligonucleotide; AAG chr2 60490816 60490835 60490832 +
tgactgatttaccttcctaa

SEQ ID NO: 161809 - DNA, 20 bp, Artificial Sequence
  Synthetic oligonucleotide; AGG chr2 60490817 60490836 60490833 +
gactgatttaccttcctaaa

SEQ ID NO: 161810 - DNA, 20 bp, Artificial Sequence
  Synthetic oligonucleotide; GGG chr2 60490818 60490837 60490834 +
actgatttaccttcctaaaa

SEQ ID NO: 161811 - DNA, 20 bp, Artificial Sequence
  Synthetic oligonucleotide; AAG chr2 60490821 60490840 60490837 +
gatttaccttcctaaaaggg

SEQ ID NO: 161812 - DNA, 20 bp, Artificial Sequence
  Synthetic oligonucleotide; TGG chr2 60490855 60490874 60490871 +
aatatcatttctgttcaaaa

SEQ ID NO: 161813 - DNA, 20 bp, Artificial Sequence
  Synthetic oligonucleotide; TAG chr2 60490873 60490892 60490889 +
aatggtaattttaaccttct

SEQ ID NO: 161814 - DNA, 20 bp, Artificial Sequence
  Synthetic oligonucleotide; CAG chr2 60490916 60490935 60490932 +
ctgatatctacttgaacttt

SEQ ID NO: 161815 - DNA, 20 bp, Artificial Sequence
  Synthetic oligonucleotide; AAG chr2 60490931 60490950 60490947 +
actttcagataaaaaaaaaa

SEQ ID NO: 161816 - DNA, 20 bp, Artificial Sequence
  Synthetic oligonucleotide; AAG chr2 60490935 60490954 60490951 +
tcagataaaaaaaaaaaagc

SEQ ID NO: 161817 - DNA, 20 bp, Artificial Sequence
  Synthetic oligonucleotide; CAG chr2 60490941 60490960 60490957 +
aaaaaaaaaaaagcaagttg

SEQ ID NO: 161818 - DNA, 20 bp, Artificial Sequence
  Synthetic oligonucleotide; AAG chr2 60490963 60490982 60490979 +
gtaacatgttatgctacaca

SEQ ID NO: 161819 - DNA, 20 bp, Artificial Sequence
  Synthetic oligonucleotide; TAG chr2 60490968 60490987 60490984 +
atgttatgctacacaaagat

SEQ ID NO: 161820 - DNA, 20 bp, Artificial Sequence
  Synthetic oligonucleotide; CAG chr2 60490994 60491013 60491010 +
gaatatccaccctctttaaa

SEQ ID NO: 161821 - DNA, 20 bp, Artificial Sequence
  Synthetic oligonucleotide; TGG chr2 60491010 60491029 60491026 +
taaacagccaccccacaccc

SEQ ID NO: 161822 - DNA, 20 bp, Artificial Sequence
  Synthetic oligonucleotide; GAG chr2 60491012 60491031 60491028 +
aacagccaccccacaccctg

SEQ ID NO: 161823 - DNA, 20 bp, Artificial Sequence
  Synthetic oligonucleotide; AAG chr2 60491015 60491034 60491031 +
agccaccccacaccctggag

SEQ ID NO: 161824 - DNA, 20 bp, Artificial Sequence
  Synthetic oligonucleotide; GAG chr2 60491017 60491036 60491033 +
ccaccccacaccctggagaa

SEQ ID NO: 161825 - DNA, 20 bp, Artificial Sequence
  Synthetic oligonucleotide; AAG chr2 60491028 60491047 60491044 +
cctggagaagagcaaatgtg

SEQ ID NO: 161826 - DNA, 20 bp, Artificial Sequence
  Synthetic oligonucleotide; CAG chr2 60491044 60491063 60491060 +
tgtgaagtttatgtgccaac

SEQ ID NO: 161827 - DNA, 20 bp, Artificial Sequence
  Synthetic oligonucleotide; CAG chr2 60491056 60491075 60491072 +
gtgccaaccagactgtgcgc

SEQ ID NO: 161828 - DNA, 20 bp, Artificial Sequence
  Synthetic oligonucleotide; AGG chr2 60491057 60491076 60491073 +
tgccaaccagactgtgcgcc

SEQ ID NO: 161829 - DNA, 20 bp, Artificial Sequence
  Synthetic oligonucleotide; TGG chr2 60491061 60491080 60491077 +
aaccagactgtgcgccaggt

SEQ ID NO: 161830 - DNA, 20 bp, Artificial Sequence
  Synthetic oligonucleotide; AAG chr2 60491066 60491085 60491082 +
gactgtgcgccaggttggta

SEQ ID NO: 161831 - DNA, 20 bp, Artificial Sequence
  Synthetic oligonucleotide; CAG chr2 60491074 60491093 60491090 +
gccaggttggtaaagtctga

SEQ ID NO: 161832 - DNA, 20 bp, Artificial Sequence
  Synthetic oligonucleotide; GAG chr2 60491076 60491095 60491092 +
caggttggtaaagtctgaca

SEQ ID NO: 161833 - DNA, 20 bp, Artificial Sequence
  Synthetic oligonucleotide; AAG chr2 60491111 60491130 60491127 +
gacaacatcttctatatgtg

SEQ ID NO: 161834 - DNA, 20 bp, Artificial Sequence
  Synthetic oligonucleotide; TGG chr2 60491124 60491143 60491140 +
atatgtgaagcccaactacg

SEQ ID NO: 161835 - DNA, 20 bp, Artificial Sequence
  Synthetic oligonucleotide; TAG chr2 60491140 60491159 60491156 +
tacgtggttgtgcaactcta

SEQ ID NO: 161836 - DNA, 20 bp, Artificial Sequence
  Synthetic oligonucleotide; TGG chr2 60491157 60491176 60491173 +
ctatagctgactttcaacca

SEQ ID NO: 161837 - DNA, 20 bp, Artificial Sequence
  Synthetic oligonucleotide; AAG chr2 60491169 60491188 60491185 +
ttcaaccatggtcatctgca

SEQ ID NO: 161838 - DNA, 20 bp, Artificial Sequence
  Synthetic oligonucleotide; AAG chr2 60491172 60491191 60491188 +
aaccatggtcatctgcaaag

SEQ ID NO: 161839 - DNA, 20 bp, Artificial Sequence
  Synthetic oligonucleotide; TAG chr2 60491176 60491195 60491192 +
atggtcatctgcaaagaagt

SEQ ID NO: 161840 - DNA, 20 bp, Artificial Sequence
  Synthetic oligonucleotide; CAG chr2 60491182 60491201 60491198 +
atctgcaaagaagttagtct

SEQ ID NO: 161841 - DNA, 20 bp, Artificial Sequence
  Synthetic oligonucleotide; AAG chr2 60491209 60491228 60491225 +
ctgcgcatcctcaatgcaaa

SEQ ID NO: 161842 - DNA, 20 bp, Artificial Sequence
  Synthetic oligonucleotide; AAG chr2 60491214 60491233 60491230 +
catcctcaatgcaaaaagct

SEQ ID NO: 161843 - DNA, 20 bp, Artificial Sequence
  Synthetic oligonucleotide; CAG chr2 60491251 60491270 60491267 +
tcttaatgctgttttaaatg

SEQ ID NO: 161844 - DNA, 20 bp, Artificial Sequence
  Synthetic oligonucleotide; AAG chr2 60491264 60491283 60491280 +
ttaaatgcagcactactaaa

SEQ ID NO: 161845 - DNA, 20 bp, Artificial Sequence
  Synthetic oligonucleotide; AGG chr2 60491265 60491284 60491281 +
taaatgcagcactactaaaa

SEQ ID NO: 161846 - DNA, 20 bp, Artificial Sequence
  Synthetic oligonucleotide; CAG chr2 60491283 60491302 60491299 +
aaaggacctcattttgatgc

SEQ ID NO: 161847 - DNA, 20 bp, Artificial Sequence
  Synthetic oligonucleotide; GAG chr2 60491285 60491304 60491301 +
aggacctcattttgatgcca

SEQ ID NO: 161848 - DNA, 20 bp, Artificial Sequence
  Synthetic oligonucleotide; AGG chr2 60491286 60491305 60491302 +
ggacctcattttgatgccag

SEQ ID NO: 161849 - DNA, 20 bp, Artificial Sequence
  Synthetic oligonucleotide; GGG chr2 60491287 60491306 60491303 +
gacctcattttgatgccaga

SEQ ID NO: 161850 - DNA, 20 bp, Artificial Sequence
  Synthetic oligonucleotide; CAG chr2 60491290 60491309 60491306 +
ctcattttgatgccagaggg

SEQ ID NO: 161851 - DNA, 20 bp, Artificial Sequence
  Synthetic oligonucleotide; TGG chr2 60491299 60491318 60491315 +
atgccagagggcagcaaaca

SEQ ID NO: 161852 - DNA, 20 bp, Artificial Sequence
  Synthetic oligonucleotide; TGG chr2 60491309 60491328 60491325 +
gcagcaaacatggacacttt

SEQ ID NO: 161853 - DNA, 20 bp, Artificial Sequence
  Synthetic oligonucleotide; CAG chr2 60491319 60491338 60491335 +
tggacacttttggccccctt

SEQ ID NO: 161854 - DNA, 20 bp, Artificial Sequence
  Synthetic oligonucleotide; AAG chr2 60491327 60491346 60491343 +
tttggcccccttcagctatt

SEQ ID NO: 161855 - DNA, 20 bp, Artificial Sequence
  Synthetic oligonucleotide; CAG chr2 60491332 60491351 60491348 +
cccccttcagctattaagta

SEQ ID NO: 161856 - DNA, 20 bp, Artificial Sequence
  Synthetic oligonucleotide; AAG chr2 60491338 60491357 60491354 +
tcagctattaagtacagtaa

SEQ ID NO: 161857 - DNA, 20 bp, Artificial Sequence
  Synthetic oligonucleotide; AGG chr2 60491339 60491358 60491355 +
cagctattaagtacagtaaa

SEQ ID NO: 161858 - DNA, 20 bp, Artificial Sequence
  Synthetic oligonucleotide; AAG chr2 60491342 60491361 60491358 +
ctattaagtacagtaaaagg

SEQ ID NO: 161859 - DNA, 20 bp, Artificial Sequence
  Synthetic oligonucleotide; CGG chr2 60491370 60491389 60491386 +
actatcatttgaaatgctcc

SEQ ID NO: 161860 - DNA, 20 bp, Artificial Sequence
  Synthetic oligonucleotide; CAG chr2 60491374 60491393 60491390 +
tcatttgaaatgctcccggc

SEQ ID NO: 161861 - DNA, 20 bp, Artificial Sequence
  Synthetic oligonucleotide; AGG chr2 60491375 60491394 60491391 +
catttgaaatgctcccggcc

SEQ ID NO: 161862 - DNA, 20 bp, Artificial Sequence
  Synthetic oligonucleotide; TGG chr2 60491383 60491402 60491399 +
atgctcccggccaggcgctg

SEQ ID NO: 161863 - DNA, 20 bp, Artificial Sequence
  Synthetic oligonucleotide; CAG chr2 60491402 60491421 60491418 +
gtggctcacacctgtaatcc

SEQ ID NO: 161864 - DNA, 20 bp, Artificial Sequence
  Synthetic oligonucleotide; TGG chr2 60491410 60491429 60491426 +
cacctgtaatcccagcactt

SEQ ID NO: 161865 - DNA, 20 bp, Artificial Sequence
  Synthetic oligonucleotide; GGG chr2 60491411 60491430 60491427 +
acctgtaatcccagcacttt

SEQ ID NO: 161866 - DNA, 20 bp, Artificial Sequence
  Synthetic oligonucleotide; GAG chr2 60491413 60491432 60491429 +
ctgtaatcccagcactttgg

SEQ ID NO: 161867 - DNA, 20 bp, Artificial Sequence
  Synthetic oligonucleotide; AGG chr2 60491414 60491433 60491430 +
tgtaatcccagcactttggg

SEQ ID NO: 161868 - DNA, 20 bp, Artificial Sequence
  Synthetic oligonucleotide; CGG chr2 60491418 60491437 60491434 +
atcccagcactttgggaggc

SEQ ID NO: 161869 - DNA, 20 bp, Artificial Sequence
  Synthetic oligonucleotide; GGG chr2 60491419 60491438 60491435 +
tcccagcactttgggaggcc

SEQ ID NO: 161870 - DNA, 20 bp, Artificial Sequence
  Synthetic oligonucleotide; GGG chr2 60491420 60491439 60491436 +
cccagcactttgggaggccg

SEQ ID NO: 161871 - DNA, 20 bp, Artificial Sequence
  Synthetic oligonucleotide; CAG chr2 60491423 60491442 60491439 +
agcactttgggaggccgggg

SEQ ID NO: 161872 - DNA, 20 bp, Artificial Sequence
  Synthetic oligonucleotide; AGG chr2 60491424 60491443 60491440 +
gcactttgggaggccggggc

SEQ ID NO: 161873 - DNA, 20 bp, Artificial Sequence
  Synthetic oligonucleotide; GAG chr2 60491426 60491445 60491442 +
actttgggaggccggggcag

SEQ ID NO: 161874 - DNA, 20 bp, Artificial Sequence
  Synthetic oligonucleotide; AGG chr2 60491427 60491446 60491443 +
ctttgggaggccggggcagg

SEQ ID NO: 161875 - DNA, 20 bp, Artificial Sequence
  Synthetic oligonucleotide; GAG chr2 60491437 60491456 60491453 +
ccggggcaggaggatcacct

SEQ ID NO: 161876 - DNA, 20 bp, Artificial Sequence
  Synthetic oligonucleotide; AGG chr2 60491438 60491457 60491454 +
cggggcaggaggatcacctg

SEQ ID NO: 161877 - DNA, 20 bp, Artificial Sequence
  Synthetic oligonucleotide; CAG chr2 60491442 60491461 60491458 +
gcaggaggatcacctgaggt

SEQ ID NO: 161878 - DNA, 20 bp, Artificial Sequence
  Synthetic oligonucleotide; AGG chr2 60491443 60491462 60491459 +
caggaggatcacctgaggtc

SEQ ID NO: 161879 - DNA, 20 bp, Artificial Sequence
  Synthetic oligonucleotide; GAG chr2 60491445 60491464 60491461 +
ggaggatcacctgaggtcag

SEQ ID NO: 161880 - DNA, 20 bp, Artificial Sequence
  Synthetic oligonucleotide; AAG chr2 60491451 60491470 60491467 +
tcacctgaggtcaggagttc

SEQ ID NO: 161881 - DNA, 20 bp, Artificial Sequence
  Synthetic oligonucleotide; CAG chr2 60491456 60491475 60491472 +
tgaggtcaggagttcaagat

SEQ ID NO: 161882 - DNA, 20 bp, Artificial Sequence
  Synthetic oligonucleotide; TGG chr2 60491461 60491480 60491477 +
tcaggagttcaagatcagtt

SEQ ID NO: 161883 - DNA, 20 bp, Artificial Sequence
  Synthetic oligonucleotide; CAG chr2 60491470 60491489 60491486 +
caagatcagtttggacaaca

SEQ ID NO: 161884 - DNA, 20 bp, Artificial Sequence
  Synthetic oligonucleotide; TAG chr2 60491504 60491523 60491520 +
ctctactaaaaatacaaaat

SEQ ID NO: 161885 - DNA, 20 bp, Artificial Sequence
  Synthetic oligonucleotide; CGG chr2 60491508 60491527 60491524 +
actaaaaatacaaaattagc

SEQ ID NO: 161886 - DNA, 20 bp, Artificial Sequence
  Synthetic oligonucleotide; GGG chr2 60491509 60491528 60491525 +
ctaaaaatacaaaattagcc

SEQ ID NO: 161887 - DNA, 20 bp, Artificial Sequence
  Synthetic oligonucleotide; TGG chr2 60491514 60491533 60491530 +
aatacaaaattagccgggca

SEQ ID NO: 161888 - DNA, 20 bp, Artificial Sequence
  Synthetic oligonucleotide; CAG chr2 60491536 60491555 60491552 +
gtaatacatgcctgtaatct

SEQ ID NO: 161889 - DNA, 20 bp, Artificial Sequence
  Synthetic oligonucleotide; CGG chr2 60491544 60491563 60491560 +
tgcctgtaatctcagctact

SEQ ID NO: 161890 - DNA, 20 bp, Artificial Sequence
  Synthetic oligonucleotide; GGG chr2 60491545 60491564 60491561 +
gcctgtaatctcagctactc

SEQ ID NO: 161891 - DNA, 20 bp, Artificial Sequence
  Synthetic oligonucleotide; GAG chr2 60491547 60491566 60491563 +
ctgtaatctcagctactcgg

SEQ ID NO: 161892 - DNA, 20 bp, Artificial Sequence
  Synthetic oligonucleotide; AGG chr2 60491548 60491567 60491564 +
tgtaatctcagctactcggg

SEQ ID NO: 161893 - DNA, 20 bp, Artificial Sequence
  Synthetic oligonucleotide; GAG chr2 60491553 60491572 60491569 +
tctcagctactcgggaggct

SEQ ID NO: 161894 - DNA, 20 bp, Artificial Sequence
  Synthetic oligonucleotide; AGG chr2 60491554 60491573 60491570 +
ctcagctactcgggaggctg

SEQ ID NO: 161895 - DNA, 20 bp, Artificial Sequence
  Synthetic oligonucleotide; CAG chr2 60491557 60491576 60491573 +
agctactcgggaggctgagg

SEQ ID NO: 161896 - DNA, 20 bp, Artificial Sequence
  Synthetic oligonucleotide; AGG chr2 60491558 60491577 60491574 +
gctactcgggaggctgaggc

SEQ ID NO: 161897 - DNA, 20 bp, Artificial Sequence
  Synthetic oligonucleotide; GAG chr2 60491560 60491579 60491576 +
tactcgggaggctgaggcag

SEQ ID NO: 161898 - DNA, 20 bp, Artificial Sequence
  Synthetic oligonucleotide; TGG chr2 60491575 60491594 60491591 +
ggcaggagatcgcttgaacc

SEQ ID NO: 161899 - DNA, 20 bp, Artificial Sequence
  Synthetic oligonucleotide; GGG chr2 60491576 60491595 60491592 +
gcaggagatcgcttgaacct

SEQ ID NO: 161900 - DNA, 20 bp, Artificial Sequence
  Synthetic oligonucleotide; GAG chr2 60491578 60491597 60491594 +
aggagatcgcttgaacctgg

SEQ ID NO: 161901 - DNA, 20 bp, Artificial Sequence
  Synthetic oligonucleotide; AGG chr2 60491579 60491598 60491595 +
ggagatcgcttgaacctggg

SEQ ID NO: 161902 - DNA, 20 bp, Artificial Sequence
  Synthetic oligonucleotide; CAG chr2 60491582 60491601 60491598 +
gatcgcttgaacctgggagg

SEQ ID NO: 161903 - DNA, 20 bp, Artificial Sequence
  Synthetic oligonucleotide; AAG chr2 60491585 60491604 60491601 +
cgcttgaacctgggaggcag

SEQ ID NO: 161904 - DNA, 20 bp, Artificial Sequence
  Synthetic oligonucleotide; CAG chr2 60491591 60491610 60491607 +
aacctgggaggcagaagatg

SEQ ID NO: 161905 - DNA, 20 bp, Artificial Sequence
  Synthetic oligonucleotide; GAG chr2 60491595 60491614 60491611 +
tgggaggcagaagatgcagt

SEQ ID NO: 161906 - DNA, 20 bp, Artificial Sequence
  Synthetic oligonucleotide; GAG chr2 60491600 60491619 60491616 +
ggcagaagatgcagtgagcc

SEQ ID NO: 161907 - DNA, 20 bp, Artificial Sequence
  Synthetic oligonucleotide; CAG chr2 60491620 60491639 60491636 +
gagatcgcgccattgcattc

SEQ ID NO: 161908 - DNA, 20 bp, Artificial Sequence
  Synthetic oligonucleotide; CGG chr2 60491625 60491644 60491641 +
cgcgccattgcattccagcc

SEQ ID NO: 161909 - DNA, 20 bp, Artificial Sequence
  Synthetic oligonucleotide; GGG chr2 60491626 60491645 60491642 +
gcgccattgcattccagccc

SEQ ID NO: 161910 - DNA, 20 bp, Artificial Sequence
  Synthetic oligonucleotide; AAG chr2 60491633 60491652 60491649 +
tgcattccagcccgggcaac

SEQ ID NO: 161911 - DNA, 20 bp, Artificial Sequence
  Synthetic oligonucleotide; GAG chr2 60491635 60491654 60491651 +
cattccagcccgggcaacaa

SEQ ID NO: 161912 - DNA, 20 bp, Artificial Sequence
  Synthetic oligonucleotide; AAG chr2 60491660 60491679 60491676 +
aatctccgtctcaccaaaaa

SEQ ID NO: 161913 - DNA, 20 bp, Artificial Sequence
  Synthetic oligonucleotide; AAG chr2 60491667 60491686 60491683 +
gtctcaccaaaaaaagaaaa

SEQ ID NO: 161914 - DNA, 20 bp, Artificial Sequence
  Synthetic oligonucleotide; AAG chr2 60491682 60491701 60491698 +
gaaaaaagaaaaaaaaaaaa

SEQ ID NO: 161915 - DNA, 20 bp, Artificial Sequence
  Synthetic oligonucleotide; AAG chr2 60491686 60491705 60491702 +
aaagaaaaaaaaaaaaaaga

SEQ ID NO: 161916 - DNA, 20 bp, Artificial Sequence
  Synthetic oligonucleotide; CAG chr2 60491701 60491720 60491717 +
aaagaaagaaatgctcccct

SEQ ID NO: 161917 - DNA, 20 bp, Artificial Sequence
  Synthetic oligonucleotide; CAG chr2 60491709 60491728 60491725 +
aaatgctcccctcagttctc

SEQ ID NO: 161918 - DNA, 20 bp, Artificial Sequence
  Synthetic oligonucleotide; AGG chr2 60491710 60491729 60491726 +
aatgctcccctcagttctcc

SEQ ID NO: 161919 - DNA, 20 bp, Artificial Sequence
  Synthetic oligonucleotide; TGG chr2 60491714 60491733 60491730 +
ctcccctcagttctccaggc

SEQ ID NO: 161920 - DNA, 20 bp, Artificial Sequence
  Synthetic oligonucleotide; GGG chr2 60491715 60491734 60491731 +
tcccctcagttctccaggct

SEQ ID NO: 161921 - DNA, 20 bp, Artificial Sequence
  Synthetic oligonucleotide; TAG chr2 60491742 60491761 60491758 +
ctgcccacgtcaaaacaccc

SEQ ID NO: 161922 - DNA, 20 bp, Artificial Sequence
  Synthetic oligonucleotide; AGG chr2 60491743 60491762 60491759 +
tgcccacgtcaaaacaccct

SEQ ID NO: 161923 - DNA, 20 bp, Artificial Sequence
  Synthetic oligonucleotide; GAG chr2 60491763 60491782 60491779 +
aggcatcatcactccgtgtt

SEQ ID NO: 161924 - DNA, 20 bp, Artificial Sequence
  Synthetic oligonucleotide; GAG chr2 60491765 60491784 60491781 +
gcatcatcactccgtgttga

SEQ ID NO: 161925 - DNA, 20 bp, Artificial Sequence
  Synthetic oligonucleotide; AAG chr2 60491770 60491789 60491786 +
atcactccgtgttgagagcc

SEQ ID NO: 161926 - DNA, 20 bp, Artificial Sequence
  Synthetic oligonucleotide; TGG chr2 60491773 60491792 60491789 +
actccgtgttgagagccaag

SEQ ID NO: 161927 - DNA, 20 bp, Artificial Sequence
  Synthetic oligonucleotide; CAG chr2 60491777 60491796 60491793 +
cgtgttgagagccaagtggc

SEQ ID NO: 161928 - DNA, 20 bp, Artificial Sequence
  Synthetic oligonucleotide; AGG chr2 60491778 60491797 60491794 +
gtgttgagagccaagtggcc

SEQ ID NO: 161929 - DNA, 20 bp, Artificial Sequence
  Synthetic oligonucleotide; TAG chr2 60491781 60491800 60491797 +
ttgagagccaagtggccagg

SEQ ID NO: 161930 - DNA, 20 bp, Artificial Sequence
  Synthetic oligonucleotide; AGG chr2 60491782 60491801 60491798 +
tgagagccaagtggccaggt

SEQ ID NO: 161931 - DNA, 20 bp, Artificial Sequence
  Synthetic oligonucleotide; CAG chr2 60491798 60491817 60491814 +
aggtaggacccaacactacg

SEQ ID NO: 161932 - DNA, 20 bp, Artificial Sequence
  Synthetic oligonucleotide; AGG chr2 60491799 60491818 60491815 +
ggtaggacccaacactacgc

SEQ ID NO: 161933 - DNA, 20 bp, Artificial Sequence
  Synthetic oligonucleotide; CAG chr2 60491804 60491823 60491820 +
gacccaacactacgcaggca

SEQ ID NO: 161934 - DNA, 20 bp, Artificial Sequence
  Synthetic oligonucleotide; AAG chr2 60491821 60491840 60491837 +
gcacagacgttttccatgtt

SEQ ID NO: 161935 - DNA, 20 bp, Artificial Sequence
  Synthetic oligonucleotide; CAG chr2 60491838 60491857 60491854 +
gttaagaacccaaatccata

SEQ ID NO: 161936 - DNA, 20 bp, Artificial Sequence
  Synthetic oligonucleotide; TAG chr2 60491845 60491864 60491861 +
acccaaatccatacagtcct

SEQ ID NO: 161937 - DNA, 20 bp, Artificial Sequence
  Synthetic oligonucleotide; TAG chr2 60491856 60491875 60491872 +
tacagtccttagcacccaaa

SEQ ID NO: 161938 - DNA, 20 bp, Artificial Sequence
  Synthetic oligonucleotide; AGG chr2 60491857 60491876 60491873 +
acagtccttagcacccaaat

SEQ ID NO: 161939 - DNA, 20 bp, Artificial Sequence
  Synthetic oligonucleotide; CAG chr2 60491862 60491881 60491878 +
ccttagcacccaaataggtt

SEQ ID NO: 161940 - DNA, 20 bp, Artificial Sequence
  Synthetic oligonucleotide; AAG chr2 60491867 60491886 60491883 +
gcacccaaataggttcagaa

SEQ ID NO: 161941 - DNA, 20 bp, Artificial Sequence
  Synthetic oligonucleotide; AGG chr2 60491868 60491887 60491884 +
cacccaaataggttcagaaa

SEQ ID NO: 161942 - DNA, 20 bp, Artificial Sequence
  Synthetic oligonucleotide; CAG chr2 60491871 60491890 60491887 +
ccaaataggttcagaaaagg

SEQ ID NO: 161943 - DNA, 20 bp, Artificial Sequence
  Synthetic oligonucleotide; AAG chr2 60491899 60491918 60491915 +
acaaatctgccaaataaatg

SEQ ID NO: 161944 - DNA, 20 bp, Artificial Sequence
  Synthetic oligonucleotide; CAG chr2 60491904 60491923 60491920 +
tctgccaaataaatgaagtt

SEQ ID NO: 161945 - DNA, 20 bp, Artificial Sequence
  Synthetic oligonucleotide; TGG chr2 60491931 60491950 60491947 +
tgcatttacgctaaatacct

SEQ ID NO: 161946 - DNA, 20 bp, Artificial Sequence
  Synthetic oligonucleotide; GAG chr2 60491939 60491958 60491955 +
cgctaaataccttggaaatt

SEQ ID NO: 161947 - DNA, 20 bp, Artificial Sequence
  Synthetic oligonucleotide; GAG chr2 60491941 60491960 60491957 +
ctaaataccttggaaattga

SEQ ID NO: 161948 - DNA, 20 bp, Artificial Sequence
  Synthetic oligonucleotide; AGG chr2 60491942 60491961 60491958 +
taaataccttggaaattgag

SEQ ID NO: 161949 - DNA, 20 bp, Artificial Sequence
  Synthetic oligonucleotide; GGG chr2 60491943 60491962 60491959 +
aaataccttggaaattgaga

SEQ ID NO: 161950 - DNA, 20 bp, Artificial Sequence
  Synthetic oligonucleotide; TGG chr2 60491950 60491969 60491966 +
ttggaaattgagagggaatc

SEQ ID NO: 161951 - DNA, 20 bp, Artificial Sequence
  Synthetic oligonucleotide; GAG chr2 60491952 60491971 60491968 +
ggaaattgagagggaatctg

SEQ ID NO: 161952 - DNA, 20 bp, Artificial Sequence
  Synthetic oligonucleotide; GAG chr2 60491954 60491973 60491970 +
aaattgagagggaatctgga

SEQ ID NO: 161953 - DNA, 20 bp, Artificial Sequence
  Synthetic oligonucleotide; AGG chr2 60491955 60491974 60491971 +
aattgagagggaatctggag

SEQ ID NO: 161954 - DNA, 20 bp, Artificial Sequence
  Synthetic oligonucleotide; AAG chr2 60491958 60491977 60491974 +
tgagagggaatctggagagg

SEQ ID NO: 161955 - DNA, 20 bp, Artificial Sequence
  Synthetic oligonucleotide; TGG chr2 60491962 60491981 60491978 +
agggaatctggagaggaaga

SEQ ID NO: 161956 - DNA, 20 bp, Artificial Sequence
  Synthetic oligonucleotide; TAG chr2 60491968 60491987 60491984 +
tctggagaggaagatggatg

SEQ ID NO: 161957 - DNA, 20 bp, Artificial Sequence
  Synthetic oligonucleotide; AGG chr2 60491969 60491988 60491985 +
ctggagaggaagatggatgt

SEQ ID NO: 161958 - DNA, 20 bp, Artificial Sequence
  Synthetic oligonucleotide; CAG chr2 60491994 60492013 60492010 +
aaacaaaaaccctcacttta

SEQ ID NO: 161959 - DNA, 20 bp, Artificial Sequence
  Synthetic oligonucleotide; AGG chr2 60491995 60492014 60492011 +
aacaaaaaccctcactttac

SEQ ID NO: 161960 - DNA, 20 bp, Artificial Sequence
  Synthetic oligonucleotide; CAG chr2 60492002 60492021 60492018 +
accctcactttacaggaatt

SEQ ID NO: 161961 - DNA, 20 bp, Artificial Sequence
  Synthetic oligonucleotide; CAG chr2 60492007 60492026 60492023 +
cactttacaggaattcagca

SEQ ID NO: 161962 - DNA, 20 bp, Artificial Sequence
  Synthetic oligonucleotide; AGG chr2 60492008 60492027 60492024 +
actttacaggaattcagcac

SEQ ID NO: 161963 - DNA, 20 bp, Artificial Sequence
  Synthetic oligonucleotide; GAG chr2 60492010 60492029 60492026 +
tttacaggaattcagcacag

SEQ ID NO: 161964 - DNA, 20 bp, Artificial Sequence
  Synthetic oligonucleotide; TAG chr2 60492025 60492044 60492041 +
cacaggagatgctacattgt

SEQ ID NO: 161965 - DNA, 20 bp, Artificial Sequence
  Synthetic oligonucleotide; AAG chr2 60492039 60492058 60492055 +
cattgttagcatctccgctt

SEQ ID NO: 161966 - DNA, 20 bp, Artificial Sequence
  Synthetic oligonucleotide; AGG chr2 60492040 60492059 60492056 +
attgttagcatctccgctta

SEQ ID NO: 161967 - DNA, 20 bp, Artificial Sequence
  Synthetic oligonucleotide; GAG chr2 60492042 60492061 60492058 +
tgttagcatctccgcttaag

SEQ ID NO: 161968 - DNA, 20 bp, Artificial Sequence
  Synthetic oligonucleotide; AAG chr2 60492045 60492064 60492061 +
tagcatctccgcttaaggag

SEQ ID NO: 161969 - DNA, 20 bp, Artificial Sequence
  Synthetic oligonucleotide; AAG chr2 60492062 60492081 60492078 +
gagaagacatactgatgaat

SEQ ID NO: 161970 - DNA, 20 bp, Artificial Sequence
  Synthetic oligonucleotide; GAG chr2 60492068 60492087 60492084 +
acatactgatgaataagact

SEQ ID NO: 161971 - DNA, 20 bp, Artificial Sequence
  Synthetic oligonucleotide; TGG chr2 60492072 60492091 60492088 +
actgatgaataagactgagt

SEQ ID NO: 161972 - DNA, 20 bp, Artificial Sequence
  Synthetic oligonucleotide; CAG chr2 60492078 60492097 60492094 +
gaataagactgagttggtga

SEQ ID NO: 161973 - DNA, 20 bp, Artificial Sequence
  Synthetic oligonucleotide; AGG chr2 60492079 60492098 60492095 +
aataagactgagttggtgac

SEQ ID NO: 161974 - DNA, 20 bp, Artificial Sequence
  Synthetic oligonucleotide; CAG chr2 60492084 60492103 60492100 +
gactgagttggtgacaggca

SEQ ID NO: 161975 - DNA, 20 bp, Artificial Sequence
  Synthetic oligonucleotide; TGG chr2 60492087 60492106 60492103 +
tgagttggtgacaggcacag

SEQ ID NO: 161976 - DNA, 20 bp, Artificial Sequence
  Synthetic oligonucleotide; CAG chr2 60492106 60492125 60492122 +
gtggctctcgcctgtaatcc

SEQ ID NO: 161977 - DNA, 20 bp, Artificial Sequence
  Synthetic oligonucleotide; TGG chr2 60492114 60492133 60492130 +
cgcctgtaatcccagcactt

SEQ ID NO: 161978 - DNA, 20 bp, Artificial Sequence
  Synthetic oligonucleotide; GGG chr2 60492115 60492134 60492131 +
gcctgtaatcccagcacttt

SEQ ID NO: 161979 - DNA, 20 bp, Artificial Sequence
  Synthetic oligonucleotide; GAG chr2 60492117 60492136 60492133 +
ctgtaatcccagcactttgg

SEQ ID NO: 161980 - DNA, 20 bp, Artificial Sequence
  Synthetic oligonucleotide; AGG chr2 60492118 60492137 60492134 +
tgtaatcccagcactttggg

SEQ ID NO: 161981 - DNA, 20 bp, Artificial Sequence
  Synthetic oligonucleotide; AAG chr2 60492123 60492142 60492139 +
tcccagcactttgggaggtc

SEQ ID NO: 161982 - DNA, 20 bp, Artificial Sequence
  Synthetic oligonucleotide; AGG chr2 60492124 60492143 60492140 +
cccagcactttgggaggtca

SEQ ID NO: 161983 - DNA, 20 bp, Artificial Sequence
  Synthetic oligonucleotide; CAG chr2 60492127 60492146 60492143 +
agcactttgggaggtcaagg

SEQ ID NO: 161984 - DNA, 20 bp, Artificial Sequence
  Synthetic oligonucleotide; AGG chr2 60492128 60492147 60492144 +
gcactttgggaggtcaaggc

SEQ ID NO: 161985 - DNA, 20 bp, Artificial Sequence
  Synthetic oligonucleotide; GAG chr2 60492130 60492149 60492146 +
actttgggaggtcaaggcag

SEQ ID NO: 161986 - DNA, 20 bp, Artificial Sequence
  Synthetic oligonucleotide; AGG chr2 60492131 60492150 60492147 +
ctttgggaggtcaaggcagg

SEQ ID NO: 161987 - DNA, 20 bp, Artificial Sequence
  Synthetic oligonucleotide; TGG chr2 60492139 60492158 60492155 +
ggtcaaggcaggaggatcac

SEQ ID NO: 161988 - DNA, 20 bp, Artificial Sequence
  Synthetic oligonucleotide; GAG chr2 60492141 60492160 60492157 +
tcaaggcaggaggatcactg

SEQ ID NO: 161989 - DNA, 20 bp, Artificial Sequence
  Synthetic oligonucleotide; CAG chr2 60492146 60492165 60492162 +
gcaggaggatcactggagcc

SEQ ID NO: 161990 - DNA, 20 bp, Artificial Sequence
  Synthetic oligonucleotide; AGG chr2 60492147 60492166 60492163 +
caggaggatcactggagccc

SEQ ID NO: 161991 - DNA, 20 bp, Artificial Sequence
  Synthetic oligonucleotide; GAG chr2 60492149 60492168 60492165 +
ggaggatcactggagcccag

SEQ ID NO: 161992 - DNA, 20 bp, Artificial Sequence
  Synthetic oligonucleotide; AAG chr2 60492155 60492174 60492171 +
tcactggagcccaggagttc

SEQ ID NO: 161993 - DNA, 20 bp, Artificial Sequence
  Synthetic oligonucleotide; CAG chr2 60492160 60492179 60492176 +
ggagcccaggagttcaagac

SEQ ID NO: 161994 - DNA, 20 bp, Artificial Sequence
  Synthetic oligonucleotide; TGG chr2 60492165 60492184 60492181 +
ccaggagttcaagaccagcc

SEQ ID NO: 161995 - DNA, 20 bp, Artificial Sequence
  Synthetic oligonucleotide; GGG chr2 60492166 60492185 60492182 +
caggagttcaagaccagcct

SEQ ID NO: 161996 - DNA, 20 bp, Artificial Sequence
  Synthetic oligonucleotide; CAG chr2 60492172 60492191 60492188 +
ttcaagaccagcctgggcaa

SEQ ID NO: 161997 - DNA, 20 bp, Artificial Sequence
  Synthetic oligonucleotide; AGG chr2 60492173 60492192 60492189 +
tcaagaccagcctgggcaac

SEQ ID NO: 161998 - DNA, 20 bp, Artificial Sequence
  Synthetic oligonucleotide; GGG chr2 60492174 60492193 60492190 +
caagaccagcctgggcaaca

SEQ ID NO: 161999 - DNA, 20 bp, Artificial Sequence
  Synthetic oligonucleotide; GAG chr2 60492176 60492195 60492192 +
agaccagcctgggcaacagg

SEQ ID NO: 162000 - DNA, 20 bp, Artificial Sequence
  Synthetic oligonucleotide; TAG chr2 60492199 60492218 60492215 +
aaactccatctctacaaaat

SEQ ID NO: 162001 - DNA, 20 bp, Artificial Sequence
  Synthetic oligonucleotide; CAG chr2 60492203 60492222 60492219 +
tccatctctacaaaattagc

SEQ ID NO: 162002 - DNA, 20 bp, Artificial Sequence
  Synthetic oligonucleotide; AGG chr2 60492204 60492223 60492220 +
ccatctctacaaaattagcc

SEQ ID NO: 162003 - DNA, 20 bp, Artificial Sequence
  Synthetic oligonucleotide; TGG chr2 60492209 60492228 60492225 +
tctacaaaattagccaggca

SEQ ID NO: 162004 - DNA, 20 bp, Artificial Sequence
  Synthetic oligonucleotide; TGG chr2 60492212 60492231 60492228 +
acaaaattagccaggcatgg

SEQ ID NO: 162005 - DNA, 20 bp, Artificial Sequence
  Synthetic oligonucleotide; CAG chr2 60492231 60492250 60492247 +
gtggcatgcacctgtcgtcc

SEQ ID NO: 162006 - DNA, 20 bp, Artificial Sequence
  Synthetic oligonucleotide; CAG chr2 60492239 60492258 60492255 +
cacctgtcgtcccagctact

SEQ ID NO: 162007 - DNA, 20 bp, Artificial Sequence
  Synthetic oligonucleotide; AGG chr2 60492240 60492259 60492256 +
acctgtcgtcccagctactc

SEQ ID NO: 162008 - DNA, 20 bp, Artificial Sequence
  Synthetic oligonucleotide; GAG chr2 60492242 60492261 60492258 +
ctgtcgtcccagctactcag

SEQ ID NO: 162009 - DNA, 20 bp, Artificial Sequence
  Synthetic oligonucleotide; AGG chr2 60492243 60492262 60492259 +
tgtcgtcccagctactcagg

SEQ ID NO: 162010 - DNA, 20 bp, Artificial Sequence
  Synthetic oligonucleotide; GAG chr2 60492248 60492267 60492264 +
tcccagctactcaggaggct

SEQ ID NO: 162011 - DNA, 20 bp, Artificial Sequence
  Synthetic oligonucleotide; AGG chr2 60492249 60492268 60492265 +
cccagctactcaggaggctg

SEQ ID NO: 162012 - DNA, 20 bp, Artificial Sequence
  Synthetic oligonucleotide; CAG chr2 60492255 60492274 60492271 +
tactcaggaggctgaggtga

SEQ ID NO: 162013 - DNA, 20 bp, Artificial Sequence
  Synthetic oligonucleotide; AGG chr2 60492256 60492275 60492272 +
actcaggaggctgaggtgac

SEQ ID NO: 162014 - DNA, 20 bp, Artificial Sequence
  Synthetic oligonucleotide; TGG chr2 60492260 60492279 60492276 +
aggaggctgaggtgacagga

SEQ ID NO: 162015 - DNA, 20 bp, Artificial Sequence
  Synthetic oligonucleotide; GAG chr2 60492266 60492285 60492282 +
ctgaggtgacaggatggctt

SEQ ID NO: 162016 - DNA, 20 bp, Artificial Sequence
  Synthetic oligonucleotide; TAG chr2 60492271 60492290 60492287 +
gtgacaggatggcttgagcc

SEQ ID NO: 162017 - DNA, 20 bp, Artificial Sequence
  Synthetic oligonucleotide; AGG chr2 60492272 60492291 60492288 +
tgacaggatggcttgagcct

SEQ ID NO: 162018 - DNA, 20 bp, Artificial Sequence
  Synthetic oligonucleotide; GAG chr2 60492274 60492293 60492290 +
acaggatggcttgagcctag

SEQ ID NO: 162019 - DNA, 20 bp, Artificial Sequence
  Synthetic oligonucleotide; AAG chr2 60492280 60492299 60492296 +
tggcttgagcctaggagatc

SEQ ID NO: 162020 - DNA, 20 bp, Artificial Sequence
  Synthetic oligonucleotide; AGG chr2 60492281 60492300 60492297 +
ggcttgagcctaggagatca

SEQ ID NO: 162021 - DNA, 20 bp, Artificial Sequence
  Synthetic oligonucleotide; CAG chr2 60492287 60492306 60492303 +
agcctaggagatcaaggctg

SEQ ID NO: 162022 - DNA, 20 bp, Artificial Sequence
  Synthetic oligonucleotide; GAG chr2 60492291 60492310 60492307 +
taggagatcaaggctgcagt

SEQ ID NO: 162023 - DNA, 20 bp, Artificial Sequence
  Synthetic oligonucleotide; TAG chr2 60492316 60492335 60492332 +
atgaacatgccactacactc

SEQ ID NO: 162024 - DNA, 20 bp, Artificial Sequence
  Synthetic oligonucleotide; TAG chr2 60492321 60492340 60492337 +
catgccactacactctagcc

SEQ ID NO: 162025 - DNA, 20 bp, Artificial Sequence
  Synthetic oligonucleotide; AGG chr2 60492322 60492341 60492338 +
atgccactacactctagcct

SEQ ID NO: 162026 - DNA, 20 bp, Artificial Sequence
  Synthetic oligonucleotide; CAG chr2 60492330 60492349 60492346 +
acactctagcctaggcaaca

SEQ ID NO: 162027 - DNA, 20 bp, Artificial Sequence
  Synthetic oligonucleotide; GAG chr2 60492334 60492353 60492350 +
tctagcctaggcaacacagc

SEQ ID NO: 162028 - DNA, 20 bp, Artificial Sequence
  Synthetic oligonucleotide; AAG chr2 60492371 60492390 60492387 +
acaaacaaacaaacaaacaa

SEQ ID NO: 162029 - DNA, 20 bp, Artificial Sequence
  Synthetic oligonucleotide; TGG chr2 60492383 60492402 60492399 +
acaaacaaaagacaactaat

SEQ ID NO: 162030 - DNA, 20 bp, Artificial Sequence
  Synthetic oligonucleotide; GGG chr2 60492384 60492403 60492400 +
caaacaaaagacaactaatt

SEQ ID NO: 162031 - DNA, 20 bp, Artificial Sequence
  Synthetic oligonucleotide; TAG chr2 60492395 60492414 60492411 +
caactaattgggctaatgtt

SEQ ID NO: 162032 - DNA, 20 bp, Artificial Sequence
  Synthetic oligonucleotide; TAG chr2 60492412 60492431 60492428 +
gtttagaataaatgtatttc

SEQ ID NO: 162033 - DNA, 20 bp, Artificial Sequence
  Synthetic oligonucleotide; AGG chr2 60492413 60492432 60492429 +
tttagaataaatgtatttct

SEQ ID NO: 162034 - DNA, 20 bp, Artificial Sequence
  Synthetic oligonucleotide; GGG chr2 60492414 60492433 60492430 +
ttagaataaatgtatttcta

SEQ ID NO: 162035 - DNA, 20 bp, Artificial Sequence
  Synthetic oligonucleotide; AAG chr2 60492417 60492436 60492433 +
gaataaatgtatttctaggg

SEQ ID NO: 162036 - DNA, 20 bp, Artificial Sequence
  Synthetic oligonucleotide; TAG chr2 60492429 60492448 60492445 +
ttctagggaagaaaaaaact

SEQ ID NO: 162037 - DNA, 20 bp, Artificial Sequence
  Synthetic oligonucleotide; TGG chr2 60492433 60492452 60492449 +
agggaagaaaaaaacttagt

SEQ ID NO: 162038 - DNA, 20 bp, Artificial Sequence
  Synthetic oligonucleotide; GGG chr2 60492434 60492453 60492450 +
gggaagaaaaaaacttagtt

SEQ ID NO: 162039 - DNA, 20 bp, Artificial Sequence
  Synthetic oligonucleotide; AAG chr2 60492462 60492481 60492478 +
cctcccctttttactttttg

SEQ ID NO: 162040 - DNA, 20 bp, Artificial Sequence
  Synthetic oligonucleotide; TGG chr2 60492470 60492489 60492486 +
ttttactttttgaagcctgc

SEQ ID NO: 162041 - DNA, 20 bp, Artificial Sequence
  Synthetic oligonucleotide; TAG chr2 60492478 60492497 60492494 +
tttgaagcctgctggaattc

SEQ ID NO: 162042 - DNA, 20 bp, Artificial Sequence
  Synthetic oligonucleotide; AGG chr2 60492479 60492498 60492495 +
ttgaagcctgctggaattct

SEQ ID NO: 162043 - DNA, 20 bp, Artificial Sequence
  Synthetic oligonucleotide; CAG chr2 60492486 60492505 60492502 +
ctgctggaattctaggaaaa

SEQ ID NO: 162044 - DNA, 20 bp, Artificial Sequence
  Synthetic oligonucleotide; CAG chr2 60492527 60492546 60492543 +
ctccttcctcacatactcac

SEQ ID NO: 162045 - DNA, 20 bp, Artificial Sequence
  Synthetic oligonucleotide; CAG chr2 60492545 60492564 60492561 +
accagtactcatgcgcttct

SEQ ID NO: 162046 - DNA, 20 bp, Artificial Sequence
  Synthetic oligonucleotide; TGG chr2 60492566 60492585 60492582 +
agacccaaatgctctgctta

SEQ ID NO: 162047 - DNA, 20 bp, Artificial Sequence
  Synthetic oligonucleotide; TGG chr2 60492569 60492588 60492585 +
cccaaatgctctgcttatgg

SEQ ID NO: 162048 - DNA, 20 bp, Artificial Sequence
  Synthetic oligonucleotide; CAG chr2 60492584 60492603 60492600 +
tatggtggataaccccatct

SEQ ID NO: 162049 - DNA, 20 bp, Artificial Sequence
  Synthetic oligonucleotide; TGG chr2 60492587 60492606 60492603 +
ggtggataaccccatctcag

SEQ ID NO: 162050 - DNA, 20 bp, Artificial Sequence
  Synthetic oligonucleotide; GGG chr2 60492588 60492607 60492604 +
gtggataaccccatctcagt

SEQ ID NO: 162051 - DNA, 20 bp, Artificial Sequence
  Synthetic oligonucleotide; CAG chr2 60492649 60492668 60492665 +
taccaacttctataaaatct

SEQ ID NO: 162052 - DNA, 20 bp, Artificial Sequence
  Synthetic oligonucleotide; AAG chr2 60492658 60492677 60492674 +
ctataaaatctcagaataca

SEQ ID NO: 162053 - DNA, 20 bp, Artificial Sequence
  Synthetic oligonucleotide; AGG chr2 60492659 60492678 60492675 +
tataaaatctcagaatacaa

SEQ ID NO: 162054 - DNA, 20 bp, Artificial Sequence
  Synthetic oligonucleotide; GGG chr2 60492660 60492679 60492676 +
ataaaatctcagaatacaaa

SEQ ID NO: 162055 - DNA, 20 bp, Artificial Sequence
  Synthetic oligonucleotide; TGG chr2 60492689 60492708 60492705 +
catttccctgaaatgtactt

SEQ ID NO: 162056 - DNA, 20 bp, Artificial Sequence
  Synthetic oligonucleotide; AAG chr2 60492703 60492722 60492719 +
gtactttggtgctaccctga

SEQ ID NO: 162057 - DNA, 20 bp, Artificial Sequence
  Synthetic oligonucleotide; CGG chr2 60492707 60492726 60492723 +
tttggtgctaccctgaaaga

SEQ ID NO: 162058 - DNA, 20 bp, Artificial Sequence
  Synthetic oligonucleotide; TAG chr2 60492711 60492730 60492727 +
gtgctaccctgaaagacggc

SEQ ID NO: 162059 - DNA, 20 bp, Artificial Sequence
  Synthetic oligonucleotide; GAG chr2 60492713 60492732 60492729 +
gctaccctgaaagacggcta

SEQ ID NO: 162060 - DNA, 20 bp, Artificial Sequence
  Synthetic oligonucleotide; GAG chr2 60492720 60492739 60492736 +
tgaaagacggctagagtctt

SEQ ID NO: 162061 - DNA, 20 bp, Artificial Sequence
  Synthetic oligonucleotide; AGG chr2 60492721 60492740 60492737 +
gaaagacggctagagtcttg

SEQ ID NO: 162062 - DNA, 20 bp, Artificial Sequence
  Synthetic oligonucleotide; GAG chr2 60492723 60492742 60492739 +
aagacggctagagtcttgag

SEQ ID NO: 162063 - DNA, 20 bp, Artificial Sequence
  Synthetic oligonucleotide; CAG chr2 60492733 60492752 60492749 +
gagtcttgaggagacccaaa

SEQ ID NO: 162064 - DNA, 20 bp, Artificial Sequence
  Synthetic oligonucleotide; AAG chr2 60492739 60492758 60492755 +
tgaggagacccaaacagtta

SEQ ID NO: 162065 - DNA, 20 bp, Artificial Sequence
  Synthetic oligonucleotide; AGG chr2 60492740 60492759 60492756 +
gaggagacccaaacagttaa

SEQ ID NO: 162066 - DNA, 20 bp, Artificial Sequence
  Synthetic oligonucleotide; CAG chr2 60492746 60492765 60492762 +
acccaaacagttaaaggtta

SEQ ID NO: 162067 - DNA, 20 bp, Artificial Sequence
  Synthetic oligonucleotide; CAG chr2 60492750 60492769 60492766 +
aaacagttaaaggttacaga

SEQ ID NO: 162068 - DNA, 20 bp, Artificial Sequence
  Synthetic oligonucleotide; TGG chr2 60492756 60492775 60492772 +
ttaaaggttacagacagact

SEQ ID NO: 162069 - DNA, 20 bp, Artificial Sequence
  Synthetic oligonucleotide; CAG chr2 60492767 60492786 60492783 +
agacagacttggttccactc

SEQ ID NO: 162070 - DNA, 20 bp, Artificial Sequence
  Synthetic oligonucleotide; TGG chr2 60492770 60492789 60492786 +
cagacttggttccactccag

SEQ ID NO: 162071 - DNA, 20 bp, Artificial Sequence
  Synthetic oligonucleotide; TGG chr2 60492773 60492792 60492789 +
acttggttccactccagtgg

SEQ ID NO: 162072 - DNA, 20 bp, Artificial Sequence
  Synthetic oligonucleotide; GGG chr2 60492774 60492793 60492790 +
cttggttccactccagtggt

SEQ ID NO: 162073 - DNA, 20 bp, Artificial Sequence
  Synthetic oligonucleotide; TAG chr2 60492797 60492816 60492813 +
tgttttgttttgtttcgctt

SEQ ID NO: 162074 - DNA, 20 bp, Artificial Sequence
  Synthetic oligonucleotide; AAG chr2 60492807 60492826 60492823 +
tgtttcgctttagctttatt

SEQ ID NO: 162075 - DNA, 20 bp, Artificial Sequence
  Synthetic oligonucleotide; AGG chr2 60492808 60492827 60492824 +
gtttcgctttagctttatta

SEQ ID NO: 162076 - DNA, 20 bp, Artificial Sequence
  Synthetic oligonucleotide; AAG chr2 60492830 60492849 60492846 +
gtatactttacatacaacaa

SEQ ID NO: 162077 - DNA, 20 bp, Artificial Sequence
  Synthetic oligonucleotide; AAG chr2 60492844 60492863 60492860 +
caacaaaagtcattcatttt

SEQ ID NO: 162078 - DNA, 20 bp, Artificial Sequence
  Synthetic oligonucleotide; CAG chr2 60492851 60492870 60492867 +
agtcattcattttaagtgta

SEQ ID NO: 162079 - DNA, 20 bp, Artificial Sequence
  Synthetic oligonucleotide; TGG chr2 60492855 60492874 60492871 +
attcattttaagtgtacagt

SEQ ID NO: 162080 - DNA, 20 bp, Artificial Sequence
  Synthetic oligonucleotide; CAG chr2 60492869 60492888 60492885 +
tacagttggattcaatttgc

SEQ ID NO: 162081 - DNA, 20 bp, Artificial Sequence
  Synthetic oligonucleotide; CAG chr2 60492879 60492898 60492895 +
ttcaatttgccagttgtata

SEQ ID NO: 162082 - DNA, 20 bp, Artificial Sequence
  Synthetic oligonucleotide; TGG chr2 60492887 60492906 60492903 +
gccagttgtatacagctgtg

SEQ ID NO: 162083 - DNA, 20 bp, Artificial Sequence
  Synthetic oligonucleotide; AAG chr2 60492904 60492923 60492920 +
gtgtggcctccaccaaaatc

SEQ ID NO: 162084 - DNA, 20 bp, Artificial Sequence
  Synthetic oligonucleotide; CAG chr2 60492910 60492929 60492926 +
cctccaccaaaatcaagata

SEQ ID NO: 162085 - DNA, 20 bp, Artificial Sequence
  Synthetic oligonucleotide; CAG chr2 60492924 60492943 60492940 +
aagatacagaacacgtccac

SEQ ID NO: 162086 - DNA, 20 bp, Artificial Sequence
  Synthetic oligonucleotide; TAG chr2 60492929 60492948 60492945 +
acagaacacgtccaccagtc

SEQ ID NO: 162087 - DNA, 20 bp, Artificial Sequence
  Synthetic oligonucleotide; AAG chr2 60492933 60492952 60492949 +
aacacgtccaccagtctaga

SEQ ID NO: 162088 - DNA, 20 bp, Artificial Sequence
  Synthetic oligonucleotide; CAG chr2 60493020 60493039 60493036 +
tgaacccccacctaccacca

SEQ ID NO: 162089 - DNA, 20 bp, Artificial Sequence
  Synthetic oligonucleotide; GAG chr2 60493027 60493046 60493043 +
ccacctaccaccacagtgtt

SEQ ID NO: 162090 - DNA, 20 bp, Artificial Sequence
  Synthetic oligonucleotide; TAG chr2 60493035 60493054 60493051 +
caccacagtgttgagaattc

SEQ ID NO: 162091 - DNA, 20 bp, Artificial Sequence
  Synthetic oligonucleotide; TGG chr2 60493051 60493070 60493067 +
attctagaatttgttacaaa

SEQ ID NO: 162092 - DNA, 20 bp, Artificial Sequence
  Synthetic oligonucleotide; CAG chr2 60493061 60493080 60493077 +
ttgttacaaatggactcata

SEQ ID NO: 162093 - DNA, 20 bp, Artificial Sequence
  Synthetic oligonucleotide; AGG chr2 60493062 60493081 60493078 +
tgttacaaatggactcatac

SEQ ID NO: 162094 - DNA, 20 bp, Artificial Sequence
  Synthetic oligonucleotide; CAG chr2 60493094 60493113 60493110 +
tttgtgtttaatttcttcca

SEQ ID NO: 162095 - DNA, 20 bp, Artificial Sequence
  Synthetic oligonucleotide; GAG chr2 60493096 60493115 60493112 +
tgtgtttaatttcttccaca

SEQ ID NO: 162096 - DNA, 20 bp, Artificial Sequence
  Synthetic oligonucleotide; CAG chr2 60493099 60493118 60493115 +
gtttaatttcttccacagag

SEQ ID NO: 162097 - DNA, 20 bp, Artificial Sequence
  Synthetic oligonucleotide; TGG chr2 60493110 60493129 60493126 +
tccacagagcagaatgattc

SEQ ID NO: 162098 - DNA, 20 bp, Artificial Sequence
  Synthetic oligonucleotide; GGG chr2 60493111 60493130 60493127 +
ccacagagcagaatgattct

SEQ ID NO: 162099 - DNA, 20 bp, Artificial Sequence
  Synthetic oligonucleotide; TGG chr2 60493123 60493142 60493139 +
atgattctgggattcatcca

SEQ ID NO: 162100 - DNA, 20 bp, Artificial Sequence
  Synthetic oligonucleotide; TGG chr2 60493128 60493147 60493144 +
tctgggattcatccatggtg

SEQ ID NO: 162101 - DNA, 20 bp, Artificial Sequence
  Synthetic oligonucleotide; GAG chr2 60493130 60493149 60493146 +
tgggattcatccatggtgtg

SEQ ID NO: 162102 - DNA, 20 bp, Artificial Sequence
  Synthetic oligonucleotide; GAG chr2 60493161 60493180 60493177 +
tctttcattcttctactgtt

SEQ ID NO: 162103 - DNA, 20 bp, Artificial Sequence
  Synthetic oligonucleotide; TAG chr2 60493177 60493196 60493193 +
tgttgagttgtattccacca

SEQ ID NO: 162104 - DNA, 20 bp, Artificial Sequence
  Synthetic oligonucleotide; AGG chr2 60493178 60493197 60493194 +
gttgagttgtattccaccat

SEQ ID NO: 162105 - DNA, 20 bp, Artificial Sequence
  Synthetic oligonucleotide; GGG chr2 60493179 60493198 60493195 +
ttgagttgtattccaccata

SEQ ID NO: 162106 - DNA, 20 bp, Artificial Sequence
  Synthetic oligonucleotide; TGG chr2 60493202 60493221 60493218 +
cgtttatccattcaacctat

SEQ ID NO: 162107 - DNA, 20 bp, Artificial Sequence
  Synthetic oligonucleotide; TGG chr2 60493213 60493232 60493229 +
tcaacctattggttgccatg

SEQ ID NO: 162108 - DNA, 20 bp, Artificial Sequence
  Synthetic oligonucleotide; GGG chr2 60493214 60493233 60493230 +
caacctattggttgccatgt

SEQ ID NO: 162109 - DNA, 20 bp, Artificial Sequence
  Synthetic oligonucleotide; CAG chr2 60493244 60493263 60493260 +
cactttttgaccactatgaa

SEQ ID NO: 162110 - DNA, 20 bp, Artificial Sequence
  Synthetic oligonucleotide; TGG chr2 60493255 60493274 60493271 +
cactatgaacagtgctacaa

SEQ ID NO: 162111 - DNA, 20 bp, Artificial Sequence
  Synthetic oligonucleotide; TAG chr2 60493266 60493285 60493282 +
gtgctacaatggacactgtg

SEQ ID NO: 162112 - DNA, 20 bp, Artificial Sequence
  Synthetic oligonucleotide; TAG chr2 60493278 60493297 60493294 +
acactgtgtagatgtgttta

SEQ ID NO: 162113 - DNA, 20 bp, Artificial Sequence
  Synthetic oligonucleotide; AGG chr2 60493279 60493298 60493295 +
cactgtgtagatgtgtttat

SEQ ID NO: 162114 - DNA, 20 bp, Artificial Sequence
  Synthetic oligonucleotide; TAG chr2 60493303 60493322 60493319 +
atgtatgtctacatttctct

SEQ ID NO: 162115 - DNA, 20 bp, Artificial Sequence
  Synthetic oligonucleotide; AGG chr2 60493304 60493323 60493320 +
tgtatgtctacatttctctt

SEQ ID NO: 162116 - DNA, 20 bp, Artificial Sequence
  Synthetic oligonucleotide; AAG chr2 60493316 60493335 60493332 +
tttctcttaggtaaacatct

SEQ ID NO: 162117 - DNA, 20 bp, Artificial Sequence
  Synthetic oligonucleotide; AGG chr2 60493317 60493336 60493333 +
ttctcttaggtaaacatcta

SEQ ID NO: 162118 - DNA, 20 bp, Artificial Sequence
  Synthetic oligonucleotide; GAG chr2 60493326 60493345 60493342 +
gtaaacatctaaggcatttc

SEQ ID NO: 162119 - DNA, 20 bp, Artificial Sequence
  Synthetic oligonucleotide; CAG chr2 60493333 60493352 60493349 +
tctaaggcatttcgagaaca

SEQ ID NO: 162120 - DNA, 20 bp, Artificial Sequence
  Synthetic oligonucleotide; AAG chr2 60493338 60493357 60493354 +
ggcatttcgagaacacagaa

SEQ ID NO: 162121 - DNA, 20 bp, Artificial Sequence
  Synthetic oligonucleotide; AGG chr2 60493339 60493358 60493355 +
gcatttcgagaacacagaaa

SEQ ID NO: 162122 - DNA, 20 bp, Artificial Sequence
  Synthetic oligonucleotide; GAG chr2 60493346 60493365 60493362 +
gagaacacagaaaaggtttt

SEQ ID NO: 162123 - DNA, 20 bp, Artificial Sequence
  Synthetic oligonucleotide; GAG chr2 60493352 60493371 60493368 +
acagaaaaggttttgagttt

SEQ ID NO: 162124 - DNA, 20 bp, Artificial Sequence
  Synthetic oligonucleotide; CAG chr2 60493357 60493376 60493373 +
aaaggttttgagtttgagtc

SEQ ID NO: 162125 - DNA, 20 bp, Artificial Sequence
  Synthetic oligonucleotide; AGG chr2 60493358 60493377 60493374 +
aaggttttgagtttgagtcc

SEQ ID NO: 162126 - DNA, 20 bp, Artificial Sequence
  Synthetic oligonucleotide; GGG chr2 60493359 60493378 60493375 +
aggttttgagtttgagtcca

SEQ ID NO: 162127 - DNA, 20 bp, Artificial Sequence
  Synthetic oligonucleotide; GAG chr2 60493361 60493380 60493377 +
gttttgagtttgagtccagg

SEQ ID NO: 162128 - DNA, 20 bp, Artificial Sequence
  Synthetic oligonucleotide; CAG chr2 60493383 60493402 60493399 +
gccctcattttgtcatcctc

SEQ ID NO: 162129 - DNA, 20 bp, Artificial Sequence
  Synthetic oligonucleotide; AGG chr2 60493384 60493403 60493400 +
ccctcattttgtcatcctcc

SEQ ID NO: 162130 - DNA, 20 bp, Artificial Sequence
  Synthetic oligonucleotide; TGG chr2 60493411 60493430 60493427 +
ccccctcccaccccattccc

SEQ ID NO: 162131 - DNA, 20 bp, Artificial Sequence
  Synthetic oligonucleotide; GAG chr2 60493413 60493432 60493429 +
ccctcccaccccattccctg

SEQ ID NO: 162132 - DNA, 20 bp, Artificial Sequence
  Synthetic oligonucleotide; GAG chr2 60493415 60493434 60493431 +
ctcccaccccattccctgga

SEQ ID NO: 162133 - DNA, 20 bp, Artificial Sequence
  Synthetic oligonucleotide; CAG chr2 60493440 60493459 60493456 +
caactccaaaccctatatcc

SEQ ID NO: 162134 - DNA, 20 bp, Artificial Sequence
  Synthetic oligonucleotide; TGG chr2 60493452 60493471 60493468 +
ctatatcccagctatctgtt

SEQ ID NO: 162135 - DNA, 20 bp, Artificial Sequence
  Synthetic oligonucleotide; CAG chr2 60493457 60493476 60493473 +
tcccagctatctgtttggct

SEQ ID NO: 162136 - DNA, 20 bp, Artificial Sequence
  Synthetic oligonucleotide; TAG chr2 60493485 60493504 60493501 +
aaatgtcatcctattccgaa

SEQ ID NO: 162137 - DNA, 20 bp, Artificial Sequence
  Synthetic oligonucleotide; AAG chr2 60493506 60493525 60493522 +
agaaacctctccactacact

SEQ ID NO: 162138 - DNA, 20 bp, Artificial Sequence
  Synthetic oligonucleotide; AGG chr2 60493507 60493526 60493523 +
gaaacctctccactacacta

SEQ ID NO: 162139 - DNA, 20 bp, Artificial Sequence
  Synthetic oligonucleotide; TGG chr2 60493516 60493535 60493532 +
ccactacactaaggaaatga

SEQ ID NO: 162140 - DNA, 20 bp, Artificial Sequence
  Synthetic oligonucleotide; GGG chr2 60493517 60493536 60493533 +
cactacactaaggaaatgat

SEQ ID NO: 162141 - DNA, 20 bp, Artificial Sequence
  Synthetic oligonucleotide; AAG chr2 60493520 60493539 60493536 +
tacactaaggaaatgatggg

SEQ ID NO: 162142 - DNA, 20 bp, Artificial Sequence
  Synthetic oligonucleotide; GAG chr2 60493522 60493541 60493538 +
cactaaggaaatgatgggaa

SEQ ID NO: 162143 - DNA, 20 bp, Artificial Sequence
  Synthetic oligonucleotide; TGG chr2 60493545 60493564 60493561 +
accccaaaacattcttaaaa

SEQ ID NO: 162144 - DNA, 20 bp, Artificial Sequence
  Synthetic oligonucleotide; GGG chr2 60493546 60493565 60493562 +
ccccaaaacattcttaaaat

SEQ ID NO: 162145 - DNA, 20 bp, Artificial Sequence
  Synthetic oligonucleotide; CAG chr2 60493562 60493581 60493578 +
aaatgggcattcatttgaat

SEQ ID NO: 162146 - DNA, 20 bp, Artificial Sequence
  Synthetic oligonucleotide; AGG chr2 60493563 60493582 60493579 +
aatgggcattcatttgaatc

SEQ ID NO: 162147 - DNA, 20 bp, Artificial Sequence
  Synthetic oligonucleotide; TGG chr2 60493576 60493595 60493592 +
ttgaatcaggccaaataaat

SEQ ID NO: 162148 - DNA, 20 bp, Artificial Sequence
  Synthetic oligonucleotide; TGG chr2 60493583 60493602 60493599 +
aggccaaataaattggactc

SEQ ID NO: 162149 - DNA, 20 bp, Artificial Sequence
  Synthetic oligonucleotide; GGG chr2 60493584 60493603 60493600 +
ggccaaataaattggactct

SEQ ID NO: 162150 - DNA, 20 bp, Artificial Sequence
  Synthetic oligonucleotide; CAG chr2 60493588 60493607 60493604 +
aaataaattggactctgggt

SEQ ID NO: 162151 - DNA, 20 bp, Artificial Sequence
  Synthetic oligonucleotide; GAG chr2 60493590 60493609 60493606 +
ataaattggactctgggtca

SEQ ID NO: 162152 - DNA, 20 bp, Artificial Sequence
  Synthetic oligonucleotide; AAG chr2 60493600 60493619 60493616 +
ctctgggtcagagataactt

SEQ ID NO: 162153 - DNA, 20 bp, Artificial Sequence
  Synthetic oligonucleotide; TGG chr2 60493605 60493624 60493621 +
ggtcagagataacttaagtg

SEQ ID NO: 162154 - DNA, 20 bp, Artificial Sequence
  Synthetic oligonucleotide; CGG chr2 60493612 60493631 60493628 +
gataacttaagtgtggtgtt

SEQ ID NO: 162155 - DNA, 20 bp, Artificial Sequence
  Synthetic oligonucleotide; GAG chr2 60493614 60493633 60493630 +
taacttaagtgtggtgttcg

SEQ ID NO: 162156 - DNA, 20 bp, Artificial Sequence
  Synthetic oligonucleotide; AAG chr2 60493621 60493640 60493637 +
agtgtggtgttcggagtcct

SEQ ID NO: 162157 - DNA, 20 bp, Artificial Sequence
  Synthetic oligonucleotide; GAG chr2 60493623 60493642 60493639 +
tgtggtgttcggagtcctaa

SEQ ID NO: 162158 - DNA, 20 bp, Artificial Sequence
  Synthetic oligonucleotide; TAG chr2 60493633 60493652 60493649 +
ggagtcctaagagcccccac

SEQ ID NO: 162159 - DNA, 20 bp, Artificial Sequence
  Synthetic oligonucleotide; CAG chr2 60493638 60493657 60493654 +
cctaagagcccccactagct

SEQ ID NO: 162160 - DNA, 20 bp, Artificial Sequence
  Synthetic oligonucleotide; TGG chr2 60493644 60493663 60493660 +
agcccccactagctcagaaa

SEQ ID NO: 162161 - DNA, 20 bp, Artificial Sequence
  Synthetic oligonucleotide; TAG chr2 60493650 60493669 60493666 +
cactagctcagaaatggact

SEQ ID NO: 162162 - DNA, 20 bp, Artificial Sequence
  Synthetic oligonucleotide; TAG chr2 60493667 60493686 60493683 +
acttagttgacctcccccat

SEQ ID NO: 162163 - DNA, 20 bp, Artificial Sequence
  Synthetic oligonucleotide; CAG chr2 60493670 60493689 60493686 +
tagttgacctcccccattag

SEQ ID NO: 162164 - DNA, 20 bp, Artificial Sequence
  Synthetic oligonucleotide; TGG chr2 60493675 60493694 60493691 +
gacctcccccattagcagca

SEQ ID NO: 162165 - DNA, 20 bp, Artificial Sequence
  Synthetic oligonucleotide; GAG chr2 60493677 60493696 60493693 +
cctcccccattagcagcatg

SEQ ID NO: 162166 - DNA, 20 bp, Artificial Sequence
  Synthetic oligonucleotide; GAG chr2 60493679 60493698 60493695 +
tcccccattagcagcatgga

SEQ ID NO: 162167 - DNA, 20 bp, Artificial Sequence
  Synthetic oligonucleotide; AAG chr2 60493684 60493703 60493700 +
cattagcagcatggagagtc

SEQ ID NO: 162168 - DNA, 20 bp, Artificial Sequence
  Synthetic oligonucleotide; AGG chr2 60493685 60493704 60493701 +
attagcagcatggagagtca

SEQ ID NO: 162169 - DNA, 20 bp, Artificial Sequence
  Synthetic oligonucleotide; GAG chr2 60493687 60493706 60493703 +
tagcagcatggagagtcaag

SEQ ID NO: 162170 - DNA, 20 bp, Artificial Sequence
  Synthetic oligonucleotide; AAG chr2 60493708 60493727 60493724 +
agatgacttctaccttgcca

SEQ ID NO: 162171 - DNA, 20 bp, Artificial Sequence
  Synthetic oligonucleotide; AGG chr2 60493709 60493728 60493725 +
gatgacttctaccttgccaa

SEQ ID NO: 162172 - DNA, 20 bp, Artificial Sequence
  Synthetic oligonucleotide; TGG chr2 60493715 60493734 60493731 +
ttctaccttgccaaaggcct

SEQ ID NO: 162173 - DNA, 20 bp, Artificial Sequence
  Synthetic oligonucleotide; GGG chr2 60493716 60493735 60493732 +
tctaccttgccaaaggcctt

SEQ ID NO: 162174 - DNA, 20 bp, Artificial Sequence
  Synthetic oligonucleotide; AAG chr2 60493719 60493738 60493735 +
accttgccaaaggccttggg

SEQ ID NO: 162175 - DNA, 20 bp, Artificial Sequence
  Synthetic oligonucleotide; AAG chr2 60493723 60493742 60493739 +
tgccaaaggccttgggaaga

SEQ ID NO: 162176 - DNA, 20 bp, Artificial Sequence
  Synthetic oligonucleotide; CAG chr2 60493727 60493746 60493743 +
aaaggccttgggaagaaaga

SEQ ID NO: 162177 - DNA, 20 bp, Artificial Sequence
  Synthetic oligonucleotide; AAG chr2 60493734 60493753 60493750 +
ttgggaagaaagacagcatc

SEQ ID NO: 162178 - DNA, 20 bp, Artificial Sequence
  Synthetic oligonucleotide; AGG chr2 60493735 60493754 60493751 +
tgggaagaaagacagcatca

SEQ ID NO: 162179 - DNA, 20 bp, Artificial Sequence
  Synthetic oligonucleotide; CAG chr2 60493753 60493772 60493769 +
caaggtctcacacaacactc

SEQ ID NO: 162180 - DNA, 20 bp, Artificial Sequence
  Synthetic oligonucleotide; AGG chr2 60493754 60493773 60493770 +
aaggtctcacacaacactcc

SEQ ID NO: 162181 - DNA, 20 bp, Artificial Sequence
  Synthetic oligonucleotide; GGG chr2 60493755 60493774 60493771 +
aggtctcacacaacactcca

SEQ ID NO: 162182 - DNA, 20 bp, Artificial Sequence
  Synthetic oligonucleotide; GAG chr2 60493757 60493776 60493773 +
gtctcacacaacactccagg

SEQ ID NO: 162183 - DNA, 20 bp, Artificial Sequence
  Synthetic oligonucleotide; AGG chr2 60493758 60493777 60493774 +
tctcacacaacactccaggg

SEQ ID NO: 162184 - DNA, 20 bp, Artificial Sequence
  Synthetic oligonucleotide; CAG chr2 60493761 60493780 60493777 +
cacacaacactccagggagg

SEQ ID NO: 162185 - DNA, 20 bp, Artificial Sequence
  Synthetic oligonucleotide; CAG chr2 60493772 60493791 60493788 +
ccagggaggcagctgctgcc

SEQ ID NO: 162186 - DNA, 20 bp, Artificial Sequence
  Synthetic oligonucleotide; TGG chr2 60493780 60493799 60493796 +
gcagctgctgcccagtgctg

SEQ ID NO: 162187 - DNA, 20 bp, Artificial Sequence
  Synthetic oligonucleotide; CAG chr2 60493784 60493803 60493800 +
ctgctgcccagtgctgtgga

SEQ ID NO: 162188 - DNA, 20 bp, Artificial Sequence
  Synthetic oligonucleotide; AAG chr2 60493789 60493808 60493805 +
gcccagtgctgtggacagca

SEQ ID NO: 162189 - DNA, 20 bp, Artificial Sequence
  Synthetic oligonucleotide; CAG chr2 60493795 60493814 60493811 +
tgctgtggacagcaaagctt

SEQ ID NO: 162190 - DNA, 20 bp, Artificial Sequence
  Synthetic oligonucleotide; CAG chr2 60493800 60493819 60493816 +
tggacagcaaagcttcagtg

SEQ ID NO: 162191 - DNA, 20 bp, Artificial Sequence
  Synthetic oligonucleotide; AGG chr2 60493801 60493820 60493817 +
ggacagcaaagcttcagtgc

SEQ ID NO: 162192 - DNA, 20 bp, Artificial Sequence
  Synthetic oligonucleotide; AAG chr2 60493809 60493828 60493825 +
aagcttcagtgcaggaaatt

SEQ ID NO: 162193 - DNA, 20 bp, Artificial Sequence
  Synthetic oligonucleotide; CAG chr2 60493844 60493863 60493860 +
tccccctcccccatcctcat

SEQ ID NO: 162194 - DNA, 20 bp, Artificial Sequence
  Synthetic oligonucleotide; TGG chr2 60493849 60493868 60493865 +
ctcccccatcctcatcagct

SEQ ID NO: 162195 - DNA, 20 bp, Artificial Sequence
  Synthetic oligonucleotide; TGG chr2 60493855 60493874 60493871 +
catcctcatcagcttggcca

SEQ ID NO: 162196 - DNA, 20 bp, Artificial Sequence
  Synthetic oligonucleotide; CAG chr2 60493858 60493877 60493874 +
cctcatcagcttggccatgg

SEQ ID NO: 162197 - DNA, 20 bp, Artificial Sequence
  Synthetic oligonucleotide; AGG chr2 60493859 60493878 60493875 +
ctcatcagcttggccatggc

SEQ ID NO: 162198 - DNA, 20 bp, Artificial Sequence
  Synthetic oligonucleotide; GGG chr2 60493860 60493879 60493876 +
tcatcagcttggccatggca

SEQ ID NO: 162199 - DNA, 20 bp, Artificial Sequence
  Synthetic oligonucleotide; TGG chr2 60493864 60493883 60493880 +
cagcttggccatggcagggc

SEQ ID NO: 162200 - DNA, 20 bp, Artificial Sequence
  Synthetic oligonucleotide; GGG chr2 60493865 60493884 60493881 +
agcttggccatggcagggct

SEQ ID NO: 162201 - DNA, 20 bp, Artificial Sequence
  Synthetic oligonucleotide; GGG chr2 60493866 60493885 60493882 +
gcttggccatggcagggctg

SEQ ID NO: 162202 - DNA, 20 bp, Artificial Sequence
  Synthetic oligonucleotide; GGG chr2 60493867 60493886 60493883 +
cttggccatggcagggctgg

SEQ ID NO: 162203 - DNA, 20 bp, Artificial Sequence
  Synthetic oligonucleotide; CAG chr2 60493872 60493891 60493888 +
ccatggcagggctgggggat

SEQ ID NO: 162204 - DNA, 20 bp, Artificial Sequence
  Synthetic oligonucleotide; GAG chr2 60493874 60493893 60493890 +
atggcagggctgggggatca

SEQ ID NO: 162205 - DNA, 20 bp, Artificial Sequence
  Synthetic oligonucleotide; AGG chr2 60493875 60493894 60493891 +
tggcagggctgggggatcag

SEQ ID NO: 162206 - DNA, 20 bp, Artificial Sequence
  Synthetic oligonucleotide; CAG chr2 60493882 60493901 60493898 +
gctgggggatcagaggtgaa

SEQ ID NO: 162207 - DNA, 20 bp, Artificial Sequence
  Synthetic oligonucleotide; AGG chr2 60493883 60493902 60493899 +
ctgggggatcagaggtgaac

SEQ ID NO: 162208 - DNA, 20 bp, Artificial Sequence
  Synthetic oligonucleotide; AAG chr2 60493886 60493905 60493902 +
ggggatcagaggtgaacagg

SEQ ID NO: 162209 - DNA, 20 bp, Artificial Sequence
  Synthetic oligonucleotide; CAG chr2 60493889 60493908 60493905 +
gatcagaggtgaacaggaag

SEQ ID NO: 162210 - DNA, 20 bp, Artificial Sequence
  Synthetic oligonucleotide; AAG chr2 60493892 60493911 60493908 +
cagaggtgaacaggaagcag

SEQ ID NO: 162211 - DNA, 20 bp, Artificial Sequence
  Synthetic oligonucleotide; AGG chr2 60493893 60493912 60493909 +
agaggtgaacaggaagcaga

SEQ ID NO: 162212 - DNA, 20 bp, Artificial Sequence
  Synthetic oligonucleotide; TGG chr2 60493901 60493920 60493917 +
acaggaagcagaaggacccc

SEQ ID NO: 162213 - DNA, 20 bp, Artificial Sequence
  Synthetic oligonucleotide; GGG chr2 60493902 60493921 60493918 +
caggaagcagaaggacccct

SEQ ID NO: 162214 - DNA, 20 bp, Artificial Sequence
  Synthetic oligonucleotide; GGG chr2 60493903 60493922 60493919 +
aggaagcagaaggacccctg

SEQ ID NO: 162215 - DNA, 20 bp, Artificial Sequence
  Synthetic oligonucleotide; GGG chr2 60493904 60493923 60493920 +
ggaagcagaaggacccctgg

SEQ ID NO: 162216 - DNA, 20 bp, Artificial Sequence
  Synthetic oligonucleotide; GAG chr2 60493906 60493925 60493922 +
aagcagaaggacccctgggg

SEQ ID NO: 162217 - DNA, 20 bp, Artificial Sequence
  Synthetic oligonucleotide; CAG chr2 60493910 60493929 60493926 +
agaaggacccctgggggaga

SEQ ID NO: 162218 - DNA, 20 bp, Artificial Sequence
  Synthetic oligonucleotide; AGG chr2 60493911 60493930 60493927 +
gaaggacccctgggggagac

SEQ ID NO: 162219 - DNA, 20 bp, Artificial Sequence
  Synthetic oligonucleotide; GGG chr2 60493912 60493931 60493928 +
aaggacccctgggggagaca

SEQ ID NO: 162220 - DNA, 20 bp, Artificial Sequence
  Synthetic oligonucleotide; CAG chr2 60493919 60493938 60493935 +
cctgggggagacagggcctc

SEQ ID NO: 162221 - DNA, 20 bp, Artificial Sequence
  Synthetic oligonucleotide; TGG chr2 60493922 60493941 60493938 +
gggggagacagggcctccag

SEQ ID NO: 162222 - DNA, 20 bp, Artificial Sequence
  Synthetic oligonucleotide; GGG chr2 60493923 60493942 60493939 +
ggggagacagggcctccagt

SEQ ID NO: 162223 - DNA, 20 bp, Artificial Sequence
  Synthetic oligonucleotide; CAG chr2 60493928 60493947 60493944 +
gacagggcctccagtgggac

SEQ ID NO: 162224 - DNA, 20 bp, Artificial Sequence
  Synthetic oligonucleotide; GAG chr2 60493930 60493949 60493946 +
cagggcctccagtgggacca

SEQ ID NO: 162225 - DNA, 20 bp, Artificial Sequence
  Synthetic oligonucleotide; GAG chr2 60493935 60493954 60493951 +
cctccagtgggaccagagct

SEQ ID NO: 162226 - DNA, 20 bp, Artificial Sequence
  Synthetic oligonucleotide; TGG chr2 60493938 60493957 60493954 +
ccagtgggaccagagctgag

SEQ ID NO: 162227 - DNA, 20 bp, Artificial Sequence
  Synthetic oligonucleotide; CAG chr2 60493944 60493963 60493960 +
ggaccagagctgagtggcct

SEQ ID NO: 162228 - DNA, 20 bp, Artificial Sequence
  Synthetic oligonucleotide; AGG chr2 60493945 60493964 60493961 +
gaccagagctgagtggcctc

SEQ ID NO: 162229 - DNA, 20 bp, Artificial Sequence
  Synthetic oligonucleotide; CAG chr2 60493948 60493967 60493964 +
cagagctgagtggcctcagg

SEQ ID NO: 162230 - DNA, 20 bp, Artificial Sequence
  Synthetic oligonucleotide; TGG chr2 60493951 60493970 60493967 +
agctgagtggcctcaggcag

SEQ ID NO: 162231 - DNA, 20 bp, Artificial Sequence
  Synthetic oligonucleotide; CGG chr2 60493954 60493973 60493970 +
tgagtggcctcaggcagtgg

SEQ ID NO: 162232 - DNA, 20 bp, Artificial Sequence
  Synthetic oligonucleotide; AAG chr2 60493957 60493976 60493973 +
gtggcctcaggcagtggcgg

SEQ ID NO: 162233 - DNA, 20 bp, Artificial Sequence
  Synthetic oligonucleotide; AAG chr2 60493967 60493986 60493983 +
gcagtggcggaagctgatta

SEQ ID NO: 162234 - DNA, 20 bp, Artificial Sequence
  Synthetic oligonucleotide; AGG chr2 60493968 60493987 60493984 +
cagtggcggaagctgattaa

SEQ ID NO: 162235 - DNA, 20 bp, Artificial Sequence
  Synthetic oligonucleotide; AAG chr2 60493971 60493990 60493987 +
tggcggaagctgattaaagg

SEQ ID NO: 162236 - DNA, 20 bp, Artificial Sequence
  Synthetic oligonucleotide; AGG chr2 60493972 60493991 60493988 +
ggcggaagctgattaaagga

SEQ ID NO: 162237 - DNA, 20 bp, Artificial Sequence
  Synthetic oligonucleotide; CGG chr2 60493977 60493996 60493993 +
aagctgattaaaggaaggta

SEQ ID NO: 162238 - DNA, 20 bp, Artificial Sequence
  Synthetic oligonucleotide; GGG chr2 60493978 60493997 60493994 +
agctgattaaaggaaggtac

SEQ ID NO: 162239 - DNA, 20 bp, Artificial Sequence
  Synthetic oligonucleotide; GGG chr2 60493979 60493998 60493995 +
gctgattaaaggaaggtacg

SEQ ID NO: 162240 - DNA, 20 bp, Artificial Sequence
  Synthetic oligonucleotide; GAG chr2 60493981 60494000 60493997 +
tgattaaaggaaggtacggg

SEQ ID NO: 162241 - DNA, 20 bp, Artificial Sequence
  Synthetic oligonucleotide; TGG chr2 60493984 60494003 60494000 +
ttaaaggaaggtacggggag

SEQ ID NO: 162242 - DNA, 20 bp, Artificial Sequence
  Synthetic oligonucleotide; GAG chr2 60493986 60494005 60494002 +
aaaggaaggtacggggagtg

SEQ ID NO: 162243 - DNA, 20 bp, Artificial Sequence
  Synthetic oligonucleotide; AGG chr2 60493987 60494006 60494003 +
aaggaaggtacggggagtgg

SEQ ID NO: 162244 - DNA, 20 bp, Artificial Sequence
  Synthetic oligonucleotide; GGG chr2 60493988 60494007 60494004 +
aggaaggtacggggagtgga

SEQ ID NO: 162245 - DNA, 20 bp, Artificial Sequence
  Synthetic oligonucleotide; GGG chr2 60493989 60494008 60494005 +
ggaaggtacggggagtggag

SEQ ID NO: 162246 - DNA, 20 bp, Artificial Sequence
  Synthetic oligonucleotide; AAG chr2 60493992 60494011 60494008 +
aggtacggggagtggagggg

SEQ ID NO: 162247 - DNA, 20 bp, Artificial Sequence
  Synthetic oligonucleotide; TGG chr2 60493995 60494014 60494011 +
tacggggagtggaggggaag

SEQ ID NO: 162248 - DNA, 20 bp, Artificial Sequence
  Synthetic oligonucleotide; AAG chr2 60494002 60494021 60494018 +
agtggaggggaagtggacaa

SEQ ID NO: 162249 - DNA, 20 bp, Artificial Sequence
  Synthetic oligonucleotide; CAG chr2 60494006 60494025 60494022 +
gaggggaagtggacaaaaga

SEQ ID NO: 162250 - DNA, 20 bp, Artificial Sequence
  Synthetic oligonucleotide; AGG chr2 60494007 60494026 60494023 +
aggggaagtggacaaaagac

SEQ ID NO: 162251 - DNA, 20 bp, Artificial Sequence
  Synthetic oligonucleotide; CAG chr2 60494011 60494030 60494027 +
gaagtggacaaaagacagga

SEQ ID NO: 162252 - DNA, 20 bp, Artificial Sequence
  Synthetic oligonucleotide; TAG chr2 60494020 60494039 60494036 +
aaaagacaggacagccatct

SEQ ID NO: 162253 - DNA, 20 bp, Artificial Sequence
  Synthetic oligonucleotide; AAG chr2 60494033 60494052 60494049 +
gccatcttagacaacaatgc

SEQ ID NO: 162254 - DNA, 20 bp, Artificial Sequence
  Synthetic oligonucleotide; AGG chr2 60494034 60494053 60494050 +
ccatcttagacaacaatgca

SEQ ID NO: 162255 - DNA, 20 bp, Artificial Sequence
  Synthetic oligonucleotide; GGG chr2 60494035 60494054 60494051 +
catcttagacaacaatgcaa

SEQ ID NO: 162256 - DNA, 20 bp, Artificial Sequence
  Synthetic oligonucleotide; GGG chr2 60494036 60494055 60494052 +
atcttagacaacaatgcaag

SEQ ID NO: 162257 - DNA, 20 bp, Artificial Sequence
  Synthetic oligonucleotide; GGG chr2 60494037 60494056 60494053 +
tcttagacaacaatgcaagg

SEQ ID NO: 162258 - DNA, 20 bp, Artificial Sequence
  Synthetic oligonucleotide; GAG chr2 60494039 60494058 60494055 +
ttagacaacaatgcaagggg

SEQ ID NO: 162259 - DNA, 20 bp, Artificial Sequence
  Synthetic oligonucleotide; AAG chr2 60494048 60494067 60494064 +
aatgcaagggggagaaactg

SEQ ID NO: 162260 - DNA, 20 bp, Artificial Sequence
  Synthetic oligonucleotide; CAG chr2 60494055 60494074 60494071 +
gggggagaaactgaagaaaa

SEQ ID NO: 162261 - DNA, 20 bp, Artificial Sequence
  Synthetic oligonucleotide; CAG chr2 60494060 60494079 60494076 +
agaaactgaagaaaacagaa

SEQ ID NO: 162262 - DNA, 20 bp, Artificial Sequence
  Synthetic oligonucleotide; GAG chr2 60494062 60494081 60494078 +
aaactgaagaaaacagaaca

SEQ ID NO: 162263 - DNA, 20 bp, Artificial Sequence
  Synthetic oligonucleotide; TGG chr2 60494073 60494092 60494089 +
aacagaacagagaccactac

SEQ ID NO: 162264 - DNA, 20 bp, Artificial Sequence
  Synthetic oligonucleotide; CAG chr2 60494083 60494102 60494099 +
agaccactactggcaataaa

SEQ ID NO: 162265 - DNA, 20 bp, Artificial Sequence
  Synthetic oligonucleotide; GAG chr2 60494085 60494104 60494101 +
accactactggcaataaaca

SEQ ID NO: 162266 - DNA, 20 bp, Artificial Sequence
  Synthetic oligonucleotide; GAG chr2 60494087 60494106 60494103 +
cactactggcaataaacaga

SEQ ID NO: 162267 - DNA, 20 bp, Artificial Sequence
  Synthetic oligonucleotide; AAG chr2 60494091 60494110 60494107 +
actggcaataaacagagaga

SEQ ID NO: 162268 - DNA, 20 bp, Artificial Sequence
  Synthetic oligonucleotide; AAG chr2 60494096 60494115 60494112 +
caataaacagagagaaagtg

SEQ ID NO: 162269 - DNA, 20 bp, Artificial Sequence
  Synthetic oligonucleotide; TGG chr2 60494104 60494123 60494120 +
agagagaaagtgaagcccca

SEQ ID NO: 162270 - DNA, 20 bp, Artificial Sequence
  Synthetic oligonucleotide; GGG chr2 60494105 60494124 60494121 +
gagagaaagtgaagccccat

SEQ ID NO: 162271 - DNA, 20 bp, Artificial Sequence
  Synthetic oligonucleotide; GAG chr2 60494109 60494128 60494125 +
gaaagtgaagccccatgggt

SEQ ID NO: 162272 - DNA, 20 bp, Artificial Sequence
  Synthetic oligonucleotide; AGG chr2 60494110 60494129 60494126 +
aaagtgaagccccatgggtg

SEQ ID NO: 162273 - DNA, 20 bp, Artificial Sequence
  Synthetic oligonucleotide; AAG chr2 60494129 60494148 60494145 +
gaggcacacctacattactt

SEQ ID NO: 162274 - DNA, 20 bp, Artificial Sequence
  Synthetic oligonucleotide; GAG chr2 60494138 60494157 60494154 +
ctacattacttaagaaacct

SEQ ID NO: 162275 - DNA, 20 bp, Artificial Sequence
  Synthetic oligonucleotide; TAG chr2 60494155 60494174 60494171 +
cctgagcacattcttacgcc

SEQ ID NO: 162276 - DNA, 20 bp, Artificial Sequence
  Synthetic oligonucleotide; AGG chr2 60494156 60494175 60494172 +
ctgagcacattcttacgcct

SEQ ID NO: 162277 - DNA, 20 bp, Artificial Sequence
  Synthetic oligonucleotide; GGG chr2 60494157 60494176 60494173 +
tgagcacattcttacgccta

SEQ ID NO: 162278 - DNA, 20 bp, Artificial Sequence
  Synthetic oligonucleotide; GAG chr2 60494176 60494195 60494192 +
agggcaataaatacatcctt

SEQ ID NO: 162279 - DNA, 20 bp, Artificial Sequence
  Synthetic oligonucleotide; CAG chr2 60494184 60494203 60494200 +
aaatacatccttgagctaca

SEQ ID NO: 162280 - DNA, 20 bp, Artificial Sequence
  Synthetic oligonucleotide; AGG chr2 60494185 60494204 60494201 +
aatacatccttgagctacac

SEQ ID NO: 162281 - DNA, 20 bp, Artificial Sequence
  Synthetic oligonucleotide; AAG chr2 60494190 60494209 60494206 +
atccttgagctacacaggct

SEQ ID NO: 162282 - DNA, 20 bp, Artificial Sequence
  Synthetic oligonucleotide; AAG chr2 60494194 60494213 60494210 +
ttgagctacacaggctaagc

SEQ ID NO: 162283 - DNA, 20 bp, Artificial Sequence
  Synthetic oligonucleotide; GAG chr2 60494196 60494215 60494212 +
gagctacacaggctaagcaa

SEQ ID NO: 162284 - DNA, 20 bp, Artificial Sequence
  Synthetic oligonucleotide; GAG chr2 60494200 60494219 60494216 +
tacacaggctaagcaagagt

SEQ ID NO: 162285 - DNA, 20 bp, Artificial Sequence
  Synthetic oligonucleotide; GAG chr2 60494202 60494221 60494218 +
cacaggctaagcaagagtga

SEQ ID NO: 162286 - DNA, 20 bp, Artificial Sequence
  Synthetic oligonucleotide; GAG chr2 60494204 60494223 60494220 +
caggctaagcaagagtgaga

SEQ ID NO: 162287 - DNA, 20 bp, Artificial Sequence
  Synthetic oligonucleotide; AGG chr2 60494205 60494224 60494221 +
aggctaagcaagagtgagag

SEQ ID NO: 162288 - DNA, 20 bp, Artificial Sequence
  Synthetic oligonucleotide; GGG chr2 60494206 60494225 60494222 +
ggctaagcaagagtgagaga

SEQ ID NO: 162289 - DNA, 20 bp, Artificial Sequence
  Synthetic oligonucleotide; CAG chr2 60494218 60494237 60494234 +
gtgagagagggtgatgctga

SEQ ID NO: 162290 - DNA, 20 bp, Artificial Sequence
  Synthetic oligonucleotide; AGG chr2 60494219 60494238 60494235 +
tgagagagggtgatgctgac

SEQ ID NO: 162291 - DNA, 20 bp, Artificial Sequence
  Synthetic oligonucleotide; TGG chr2 60494227 60494246 60494243 +
ggtgatgctgacaggccaca

SEQ ID NO: 162292 - DNA, 20 bp, Artificial Sequence
  Synthetic oligonucleotide; GGG chr2 60494228 60494247 60494244 +
gtgatgctgacaggccacat

SEQ ID NO: 162293 - DNA, 20 bp, Artificial Sequence
  Synthetic oligonucleotide; GAG chr2 60494230 60494249 60494246 +
gatgctgacaggccacatgg

SEQ ID NO: 162294 - DNA, 20 bp, Artificial Sequence
  Synthetic oligonucleotide; GAG chr2 60494232 60494251 60494248 +
tgctgacaggccacatggga

SEQ ID NO: 162295 - DNA, 20 bp, Artificial Sequence
  Synthetic oligonucleotide; TGG chr2 60494235 60494254 60494251 +
tgacaggccacatgggagag

SEQ ID NO: 162296 - DNA, 20 bp, Artificial Sequence
  Synthetic oligonucleotide; GGG chr2 60494236 60494255 60494252 +
gacaggccacatgggagagt

SEQ ID NO: 162297 - DNA, 20 bp, Artificial Sequence
  Synthetic oligonucleotide; AAG chr2 60494239 60494258 60494255 +
aggccacatgggagagtggg

SEQ ID NO: 162298 - DNA, 20 bp, Artificial Sequence
  Synthetic oligonucleotide; TGG chr2 60494245 60494264 60494261 +
catgggagagtgggaagacg

SEQ ID NO: 162299 - DNA, 20 bp, Artificial Sequence
  Synthetic oligonucleotide; GGG chr2 60494246 60494265 60494262 +
atgggagagtgggaagacgt

SEQ ID NO: 162300 - DNA, 20 bp, Artificial Sequence
  Synthetic oligonucleotide; TGG chr2 60494250 60494269 60494266 +
gagagtgggaagacgtgggc

SEQ ID NO: 162301 - DNA, 20 bp, Artificial Sequence
  Synthetic oligonucleotide; GGG chr2 60494251 60494270 60494267 +
agagtgggaagacgtgggct

SEQ ID NO: 162302 - DNA, 20 bp, Artificial Sequence
  Synthetic oligonucleotide; GAG chr2 60494253 60494272 60494269 +
agtgggaagacgtgggctgg

SEQ ID NO: 162303 - DNA, 20 bp, Artificial Sequence
  Synthetic oligonucleotide; TGG chr2 60494257 60494276 60494273 +
ggaagacgtgggctgggagc

SEQ ID NO: 162304 - DNA, 20 bp, Artificial Sequence
  Synthetic oligonucleotide; GGG chr2 60494258 60494277 60494274 +
gaagacgtgggctgggagct

SEQ ID NO: 162305 - DNA, 20 bp, Artificial Sequence
  Synthetic oligonucleotide; GAG chr2 60494260 60494279 60494276 +
agacgtgggctgggagctgg

SEQ ID NO: 162306 - DNA, 20 bp, Artificial Sequence
  Synthetic oligonucleotide; TGG chr2 60494265 60494284 60494281 +
tgggctgggagctgggagtt

SEQ ID NO: 162307 - DNA, 20 bp, Artificial Sequence
  Synthetic oligonucleotide; TGG chr2 60494283 60494302 60494299 +
tttggcttctcatctgtgca

SEQ ID NO: 162308 - DNA, 20 bp, Artificial Sequence
  Synthetic oligonucleotide; TGG chr2 60494295 60494314 60494311 +
tctgtgcatggcctctaaac

SEQ ID NO: 162309 - DNA, 20 bp, Artificial Sequence
  Synthetic oligonucleotide; GGG chr2 60494296 60494315 60494312 +
ctgtgcatggcctctaaact

SEQ ID NO: 162310 - DNA, 20 bp, Artificial Sequence
  Synthetic oligonucleotide; CAG chr2 60494299 60494318 60494315 +
tgcatggcctctaaactggg

SEQ ID NO: 162311 - DNA, 20 bp, Artificial Sequence
  Synthetic oligonucleotide; TGG chr2 60494308 60494327 60494324 +
tctaaactgggcagtgacca

SEQ ID NO: 162312 - DNA, 20 bp, Artificial Sequence
  Synthetic oligonucleotide; TGG chr2 60494313 60494332 60494329 +
actgggcagtgaccatggcc

SEQ ID NO: 162313 - DNA, 20 bp, Artificial Sequence
  Synthetic oligonucleotide; TGG chr2 60494330 60494349 60494346 +
gcctggtcacctccccactc

SEQ ID NO: 162314 - DNA, 20 bp, Artificial Sequence
  Synthetic oligonucleotide; TGG chr2 60494336 60494355 60494352 +
tcacctccccactctggacc

SEQ ID NO: 162315 - DNA, 20 bp, Artificial Sequence
  Synthetic oligonucleotide; GGG chr2 60494337 60494356 60494353 +
cacctccccactctggacct

SEQ ID NO: 162316 - DNA, 20 bp, Artificial Sequence
  Synthetic oligonucleotide; AAG chr2 60494356 60494375 60494372 +
tgggttgcccctctgtaaac

SEQ ID NO: 162317 - DNA, 20 bp, Artificial Sequence
  Synthetic oligonucleotide; AGG chr2 60494357 60494376 60494373 +
gggttgcccctctgtaaaca

SEQ ID NO: 162318 - DNA, 20 bp, Artificial Sequence
  Synthetic oligonucleotide; GAG chr2 60494359 60494378 60494375 +
gttgcccctctgtaaacaag

SEQ ID NO: 162319 - DNA, 20 bp, Artificial Sequence
  Synthetic oligonucleotide; AGG chr2 60494360 60494379 60494376 +
ttgcccctctgtaaacaagg

SEQ ID NO: 162320 - DNA, 20 bp, Artificial Sequence
  Synthetic oligonucleotide; AAG chr2 60494420 60494439 60494436 +
aatcttatgcaatttttgcc

SEQ ID NO: 162321 - DNA, 20 bp, Artificial Sequence
  Synthetic oligonucleotide; TGG chr2 60494424 60494443 60494440 +
ttatgcaatttttgccaaga

SEQ ID NO: 162322 - DNA, 20 bp, Artificial Sequence
  Synthetic oligonucleotide; GGG chr2 60494425 60494444 60494441 +
tatgcaatttttgccaagat

SEQ ID NO: 162323 - DNA, 20 bp, Artificial Sequence
  Synthetic oligonucleotide; GAG chr2 60494427 60494446 60494443 +
tgcaatttttgccaagatgg

SEQ ID NO: 162324 - DNA, 20 bp, Artificial Sequence
  Synthetic oligonucleotide; TGG chr2 60494432 60494451 60494448 +
tttttgccaagatgggagta

SEQ ID NO: 162325 - DNA, 20 bp, Artificial Sequence
  Synthetic oligonucleotide; GGG chr2 60494433 60494452 60494449 +
ttttgccaagatgggagtat

SEQ ID NO: 162326 - DNA, 20 bp, Artificial Sequence
  Synthetic oligonucleotide; GGG chr2 60494434 60494453 60494450 +
tttgccaagatgggagtatg

SEQ ID NO: 162327 - DNA, 20 bp, Artificial Sequence
  Synthetic oligonucleotide; GAG chr2 60494436 60494455 60494452 +
tgccaagatgggagtatggg

SEQ ID NO: 162328 - DNA, 20 bp, Artificial Sequence
  Synthetic oligonucleotide; GAG chr2 60494438 60494457 60494454 +
ccaagatgggagtatgggga

SEQ ID NO: 162329 - DNA, 20 bp, Artificial Sequence
  Synthetic oligonucleotide; AAG chr2 60494441 60494460 60494457 +
agatgggagtatggggagag

SEQ ID NO: 162330 - DNA, 20 bp, Artificial Sequence
  Synthetic oligonucleotide; GAG chr2 60494443 60494462 60494459 +
atgggagtatggggagagaa

SEQ ID NO: 162331 - DNA, 20 bp, Artificial Sequence
  Synthetic oligonucleotide; TGG chr2 60494446 60494465 60494462 +
ggagtatggggagagaagag

SEQ ID NO: 162332 - DNA, 20 bp, Artificial Sequence
  Synthetic oligonucleotide; CGG chr2 60494452 60494471 60494468 +
tggggagagaagagtggaaa

SEQ ID NO: 162333 - DNA, 20 bp, Artificial Sequence
  Synthetic oligonucleotide; CAG chr2 60494457 60494476 60494473 +
agagaagagtggaaacggcc

SEQ ID NO: 162334 - DNA, 20 bp, Artificial Sequence
  Synthetic oligonucleotide; GAG chr2 60494459 60494478 60494475 +
agaagagtggaaacggccca

SEQ ID NO: 162335 - DNA, 20 bp, Artificial Sequence
  Synthetic oligonucleotide; CAG chr2 60494464 60494483 60494480 +
agtggaaacggcccagagct

SEQ ID NO: 162336 - DNA, 20 bp, Artificial Sequence
  Synthetic oligonucleotide; GAG chr2 60494468 60494487 60494484 +
gaaacggcccagagctcagt

SEQ ID NO: 162337 - DNA, 20 bp, Artificial Sequence
  Synthetic oligonucleotide; GAG chr2 60494473 60494492 60494489 +
ggcccagagctcagtgagat

SEQ ID NO: 162338 - DNA, 20 bp, Artificial Sequence
  Synthetic oligonucleotide; AAG chr2 60494482 60494501 60494498 +
ctcagtgagatgagatatca

SEQ ID NO: 162339 - DNA, 20 bp, Artificial Sequence
  Synthetic oligonucleotide; AGG chr2 60494483 60494502 60494499 +
tcagtgagatgagatatcaa

SEQ ID NO: 162340 - DNA, 20 bp, Artificial Sequence
  Synthetic oligonucleotide; GGG chr2 60494484 60494503 60494500 +
cagtgagatgagatatcaaa

SEQ ID NO: 162341 - DNA, 20 bp, Artificial Sequence
  Synthetic oligonucleotide; GGG chr2 60494485 60494504 60494501 +
agtgagatgagatatcaaag

SEQ ID NO: 162342 - DNA, 20 bp, Artificial Sequence
  Synthetic oligonucleotide; AAG chr2 60494493 60494512 60494509 +
gagatatcaaaggggacgaa

SEQ ID NO: 162343 - DNA, 20 bp, Artificial Sequence
  Synthetic oligonucleotide; TGG chr2 60494524 60494543 60494540 +
ccatctccctaatctccaat

SEQ ID NO: 162344 - DNA, 20 bp, Artificial Sequence
  Synthetic oligonucleotide; AAG chr2 60494529 60494548 60494545 +
tccctaatctccaattggca

SEQ ID NO: 162345 - DNA, 20 bp, Artificial Sequence
  Synthetic oligonucleotide; CAG chr2 60494533 60494552 60494549 +
taatctccaattggcaaagc

SEQ ID NO: 162346 - DNA, 20 bp, Artificial Sequence
  Synthetic oligonucleotide; TGG chr2 60494539 60494558 60494555 +
ccaattggcaaagccagact

SEQ ID NO: 162347 - DNA, 20 bp, Artificial Sequence
  Synthetic oligonucleotide; GGG chr2 60494540 60494559 60494556 +
caattggcaaagccagactt

SEQ ID NO: 162348 - DNA, 20 bp, Artificial Sequence
  Synthetic oligonucleotide; GGG chr2 60494541 60494560 60494557 +
aattggcaaagccagacttg

SEQ ID NO: 162349 - DNA, 20 bp, Artificial Sequence
  Synthetic oligonucleotide; CAG chr2 60494549 60494568 60494565 +
aagccagacttggggcaata

SEQ ID NO: 162350 - DNA, 20 bp, Artificial Sequence
  Synthetic oligonucleotide; TGG chr2 60494554 60494573 60494570 +
agacttggggcaatacagac

SEQ ID NO: 162351 - DNA, 20 bp, Artificial Sequence
  Synthetic oligonucleotide; TAG chr2 60494579 60494598 60494595 +
ctgtgatgacaaataactcc

SEQ ID NO: 162352 - DNA, 20 bp, Artificial Sequence
  Synthetic oligonucleotide; CAG chr2 60494619 60494638 60494635 +
atcaccaaatgttctttctt

SEQ ID NO: 162353 - DNA, 20 bp, Artificial Sequence
  Synthetic oligonucleotide; TGG chr2 60494623 60494642 60494639 +
ccaaatgttctttcttcagc

SEQ ID NO: 162354 - DNA, 20 bp, Artificial Sequence
  Synthetic oligonucleotide; TGG chr2 60494637 60494656 60494653 +
ttcagctggaatttaaaata

SEQ ID NO: 162355 - DNA, 20 bp, Artificial Sequence
  Synthetic oligonucleotide; TAG chr2 60494654 60494673 60494670 +
atatggactcatccgtaaaa

SEQ ID NO: 162356 - DNA, 20 bp, Artificial Sequence
  Synthetic oligonucleotide; AGG chr2 60494655 60494674 60494671 +
tatggactcatccgtaaaat

SEQ ID NO: 162357 - DNA, 20 bp, Artificial Sequence
  Synthetic oligonucleotide; TAG chr2 60494666 60494685 60494682 +
ccgtaaaataggaataataa

SEQ ID NO: 162358 - DNA, 20 bp, Artificial Sequence
  Synthetic oligonucleotide; TAG chr2 60494680 60494699 60494696 +
taataatagtatatgcttca

SEQ ID NO: 162359 - DNA, 20 bp, Artificial Sequence
  Synthetic oligonucleotide; AGG chr2 60494681 60494700 60494697 +
aataatagtatatgcttcat

SEQ ID NO: 162360 - DNA, 20 bp, Artificial Sequence
  Synthetic oligonucleotide; GGG chr2 60494682 60494701 60494698 +
ataatagtatatgcttcata

SEQ ID NO: 162361 - DNA, 20 bp, Artificial Sequence
  Synthetic oligonucleotide; GAG chr2 60494703 60494722 60494719 +
ggtttgtatgaaaataaaat

SEQ ID NO: 162362 - DNA, 20 bp, Artificial Sequence
  Synthetic oligonucleotide; AAG chr2 60494718 60494737 60494734 +
aaaatgagtgcgtatttgta

SEQ ID NO: 162363 - DNA, 20 bp, Artificial Sequence
  Synthetic oligonucleotide; TAG chr2 60494725 60494744 60494741 +
gtgcgtatttgtaaagttcc

SEQ ID NO: 162364 - DNA, 20 bp, Artificial Sequence
  Synthetic oligonucleotide; GAG chr2 60494727 60494746 60494743 +
gcgtatttgtaaagttccta

SEQ ID NO: 162365 - DNA, 20 bp, Artificial Sequence
  Synthetic oligonucleotide; CAG chr2 60494730 60494749 60494746 +
tatttgtaaagttcctagag

SEQ ID NO: 162366 - DNA, 20 bp, Artificial Sequence
  Synthetic oligonucleotide; GAG chr2 60494732 60494751 60494748 +
tttgtaaagttcctagagca

SEQ ID NO: 162367 - DNA, 20 bp, Artificial Sequence
  Synthetic oligonucleotide; AAG chr2 60494736 60494755 60494752 +
taaagttcctagagcagagt

SEQ ID NO: 162368 - DNA, 20 bp, Artificial Sequence
  Synthetic oligonucleotide; GAG chr2 60494745 60494764 60494761 +
tagagcagagtaagtgctcc

SEQ ID NO: 162369 - DNA, 20 bp, Artificial Sequence
  Synthetic oligonucleotide; TGG chr2 60494772 60494791 60494788 +
tgaactaaaatgctgcctcc

SEQ ID NO: 162370 - DNA, 20 bp, Artificial Sequence
  Synthetic oligonucleotide; TAG chr2 60494782 60494801 60494798 +
tgctgcctcctggtatttat

SEQ ID NO: 162371 - DNA, 20 bp, Artificial Sequence
  Synthetic oligonucleotide; CAG chr2 60494793 60494812 60494809 +
ggtatttattagttacacct

SEQ ID NO: 162372 - DNA, 20 bp, Artificial Sequence
  Synthetic oligonucleotide; CAG chr2 60494796 60494815 60494812 +
atttattagttacacctcag

SEQ ID NO: 162373 - DNA, 20 bp, Artificial Sequence
  Synthetic oligonucleotide; AAG chr2 60494804 60494823 60494820 +
gttacacctcagcagaaaca

SEQ ID NO: 162374 - DNA, 20 bp, Artificial Sequence
  Synthetic oligonucleotide; CAG chr2 60494811 60494830 60494827 +
ctcagcagaaacaaagttat

SEQ ID NO: 162375 - DNA, 20 bp, Artificial Sequence
  Synthetic oligonucleotide; AGG chr2 60494812 60494831 60494828 +
tcagcagaaacaaagttatc

SEQ ID NO: 162376 - DNA, 20 bp, Artificial Sequence
  Synthetic oligonucleotide; TAG chr2 60494831 60494850 60494847 +
caggccctttccccaattcc

SEQ ID NO: 162377 - DNA, 20 bp, Artificial Sequence
  Synthetic oligonucleotide; TGG chr2 60494836 60494855 60494852 +
cctttccccaattcctagtt

SEQ ID NO: 162378 - DNA, 20 bp, Artificial Sequence
  Synthetic oligonucleotide; GGG chr2 60494837 60494856 60494853 +
ctttccccaattcctagttt

SEQ ID NO: 162379 - DNA, 20 bp, Artificial Sequence
  Synthetic oligonucleotide; CAG chr2 60494841 60494860 60494857 +
ccccaattcctagtttgggt

SEQ ID NO: 162380 - DNA, 20 bp, Artificial Sequence
  Synthetic oligonucleotide; AAG chr2 60494844 60494863 60494860 +
caattcctagtttgggtcag

SEQ ID NO: 162381 - DNA, 20 bp, Artificial Sequence
  Synthetic oligonucleotide; AAG chr2 60494849 60494868 60494865 +
cctagtttgggtcagaagaa

SEQ ID NO: 162382 - DNA, 20 bp, Artificial Sequence
  Synthetic oligonucleotide; AGG chr2 60494850 60494869 60494866 +
ctagtttgggtcagaagaaa

SEQ ID NO: 162383 - DNA, 20 bp, Artificial Sequence
  Synthetic oligonucleotide; GGG chr2 60494851 60494870 60494867 +
tagtttgggtcagaagaaaa

SEQ ID NO: 162384 - DNA, 20 bp, Artificial Sequence
  Synthetic oligonucleotide; AAG chr2 60494856 60494875 60494872 +
tgggtcagaagaaaagggaa

SEQ ID NO: 162385 - DNA, 20 bp, Artificial Sequence
  Synthetic oligonucleotide; AGG chr2 60494857 60494876 60494873 +
gggtcagaagaaaagggaaa

SEQ ID NO: 162386 - DNA, 20 bp, Artificial Sequence
  Synthetic oligonucleotide; GGG chr2 60494858 60494877 60494874 +
ggtcagaagaaaagggaaaa

SEQ ID NO: 162387 - DNA, 20 bp, Artificial Sequence
  Synthetic oligonucleotide; GAG chr2 60494860 60494879 60494876 +
tcagaagaaaagggaaaagg

SEQ ID NO: 162388 - DNA, 20 bp, Artificial Sequence
  Synthetic oligonucleotide; GAG chr2 60494862 60494881 60494878 +
agaagaaaagggaaaaggga

SEQ ID NO: 162389 - DNA, 20 bp, Artificial Sequence
  Synthetic oligonucleotide; AGG chr2 60494863 60494882 60494879 +
gaagaaaagggaaaagggag

SEQ ID NO: 162390 - DNA, 20 bp, Artificial Sequence
  Synthetic oligonucleotide; AAG chr2 60494869 60494888 60494885 +
aagggaaaagggagaggaaa

SEQ ID NO: 162391 - DNA, 20 bp, Artificial Sequence
  Synthetic oligonucleotide; AGG chr2 60494870 60494889 60494886 +
agggaaaagggagaggaaaa

SEQ ID NO: 162392 - DNA, 20 bp, Artificial Sequence
  Synthetic oligonucleotide; AAG chr2 60494875 60494894 60494891 +
aaagggagaggaaaaaggaa

SEQ ID NO: 162393 - DNA, 20 bp, Artificial Sequence
  Synthetic oligonucleotide; CAG chr2 60494888 60494907 60494904 +
aaaggaaaagaatatgacgt

SEQ ID NO: 162394 - DNA, 20 bp, Artificial Sequence
  Synthetic oligonucleotide; AGG chr2 60494889 60494908 60494905 +
aaggaaaagaatatgacgtc

SEQ ID NO: 162395 - DNA, 20 bp, Artificial Sequence
  Synthetic oligonucleotide; GGG chr2 60494890 60494909 60494906 +
aggaaaagaatatgacgtca

SEQ ID NO: 162396 - DNA, 20 bp, Artificial Sequence
  Synthetic oligonucleotide; GGG chr2 60494891 60494910 60494907 +
ggaaaagaatatgacgtcag

SEQ ID NO: 162397 - DNA, 20 bp, Artificial Sequence
  Synthetic oligonucleotide; GGG chr2 60494892 60494911 60494908 +
gaaaagaatatgacgtcagg

SEQ ID NO: 162398 - DNA, 20 bp, Artificial Sequence
  Synthetic oligonucleotide; GAG chr2 60494894 60494913 60494910 +
aaagaatatgacgtcagggg

SEQ ID NO: 162399 - DNA, 20 bp, Artificial Sequence
  Synthetic oligonucleotide; AGG chr2 60494895 60494914 60494911 +
aagaatatgacgtcaggggg

SEQ ID NO: 162400 - DNA, 20 bp, Artificial Sequence
  Synthetic oligonucleotide; AAG chr2 60494899 60494918 60494915 +
atatgacgtcagggggaggc

SEQ ID NO: 162401 - DNA, 20 bp, Artificial Sequence
  Synthetic oligonucleotide; CAG chr2 60494903 60494922 60494919 +
gacgtcagggggaggcaagt

SEQ ID NO: 162402 - DNA, 20 bp, Artificial Sequence
  Synthetic oligonucleotide; TGG chr2 60494907 60494926 60494923 +
tcagggggaggcaagtcagt

SEQ ID NO: 162403 - DNA, 20 bp, Artificial Sequence
  Synthetic oligonucleotide; GGG chr2 60494908 60494927 60494924 +
cagggggaggcaagtcagtt

SEQ ID NO: 162404 - DNA, 20 bp, Artificial Sequence
  Synthetic oligonucleotide; CAG chr2 60494915 60494934 60494931 +
aggcaagtcagttgggaaca

SEQ ID NO: 162405 - DNA, 20 bp, Artificial Sequence
  Synthetic oligonucleotide; CAG chr2 60494927 60494946 60494943 +
tgggaacacagatcctaaca

SEQ ID NO: 162406 - DNA, 20 bp, Artificial Sequence
  Synthetic oligonucleotide; TAG chr2 60494930 60494949 60494946 +
gaacacagatcctaacacag

SEQ ID NO: 162407 - DNA, 20 bp, Artificial Sequence
  Synthetic oligonucleotide; TGG chr2 60494934 60494953 60494950 +
acagatcctaacacagtagc

SEQ ID NO: 162408 - DNA, 20 bp, Artificial Sequence
  Synthetic oligonucleotide; TAG chr2 60494944 60494963 60494960 +
acacagtagctggtacctga

SEQ ID NO: 162409 - DNA, 20 bp, Artificial Sequence
  Synthetic oligonucleotide; AGG chr2 60494945 60494964 60494961 +
cacagtagctggtacctgat

SEQ ID NO: 162410 - DNA, 20 bp, Artificial Sequence
  Synthetic oligonucleotide; TGG chr2 60494961 60494980 60494977 +
tgataggtgcctatatgtga

SEQ ID NO: 162411 - DNA, 20 bp, Artificial Sequence
  Synthetic oligonucleotide; TGG chr2 60494965 60494984 60494981 +
aggtgcctatatgtgatgga

SEQ ID NO: 162412 - DNA, 20 bp, Artificial Sequence
  Synthetic oligonucleotide; GGG chr2 60494966 60494985 60494982 +
ggtgcctatatgtgatggat

SEQ ID NO: 162413 - DNA, 20 bp, Artificial Sequence
  Synthetic oligonucleotide; TGG chr2 60494969 60494988 60494985 +
gcctatatgtgatggatggg

SEQ ID NO: 162414 - DNA, 20 bp, Artificial Sequence
  Synthetic oligonucleotide; CAG chr2 60494973 60494992 60494989 +
atatgtgatggatgggtgga

SEQ ID NO: 162415 - DNA, 20 bp, Artificial Sequence
  Synthetic oligonucleotide; CAG chr2 60494981 60495000 60494997 +
tggatgggtggacagcccga

SEQ ID NO: 162416 - DNA, 20 bp, Artificial Sequence
  Synthetic oligonucleotide; TGG chr2 60494992 60495011 60495008 +
acagcccgacagatgaaaaa

SEQ ID NO: 162417 - DNA, 20 bp, Artificial Sequence
  Synthetic oligonucleotide; GAG chr2 60495003 60495022 60495019 +
gatgaaaaatggacaattat

SEQ ID NO: 162418 - DNA, 20 bp, Artificial Sequence
  Synthetic oligonucleotide; AGG chr2 60495004 60495023 60495020 +
atgaaaaatggacaattatg

SEQ ID NO: 162419 - DNA, 20 bp, Artificial Sequence
  Synthetic oligonucleotide; GAG chr2 60495006 60495025 60495022 +
gaaaaatggacaattatgag

SEQ ID NO: 162420 - DNA, 20 bp, Artificial Sequence
  Synthetic oligonucleotide; AGG chr2 60495007 60495026 60495023 +
aaaaatggacaattatgagg

SEQ ID NO: 162421 - DNA, 20 bp, Artificial Sequence
  Synthetic oligonucleotide; GGG chr2 60495008 60495027 60495024 +
aaaatggacaattatgagga

SEQ ID NO: 162422 - DNA, 20 bp, Artificial Sequence
  Synthetic oligonucleotide; GGG chr2 60495009 60495028 60495025 +
aaatggacaattatgaggag

SEQ ID NO: 162423 - DNA, 20 bp, Artificial Sequence
  Synthetic oligonucleotide; GAG chr2 60495011 60495030 60495027 +
atggacaattatgaggaggg

SEQ ID NO: 162424 - DNA, 20 bp, Artificial Sequence
  Synthetic oligonucleotide; GAG chr2 60495013 60495032 60495029 +
ggacaattatgaggagggga

SEQ ID NO: 162425 - DNA, 20 bp, Artificial Sequence
  Synthetic oligonucleotide; CAG chr2 60495018 60495037 60495034 +
attatgaggaggggagagtg

SEQ ID NO: 162426 - DNA, 20 bp, Artificial Sequence
  Synthetic oligonucleotide; CAG chr2 60495022 60495041 60495038 +
tgaggaggggagagtgcaga

SEQ ID NO: 162427 - DNA, 20 bp, Artificial Sequence
  Synthetic oligonucleotide; AGG chr2 60495023 60495042 60495039 +
gaggaggggagagtgcagac

SEQ ID NO: 162428 - DNA, 20 bp, Artificial Sequence
  Synthetic oligonucleotide; GGG chr2 60495024 60495043 60495040 +
aggaggggagagtgcagaca

SEQ ID NO: 162429 - DNA, 20 bp, Artificial Sequence
  Synthetic oligonucleotide; GGG chr2 60495025 60495044 60495041 +
ggaggggagagtgcagacag

SEQ ID NO: 162430 - DNA, 20 bp, Artificial Sequence
  Synthetic oligonucleotide; AAG chr2 60495028 60495047 60495044 +
ggggagagtgcagacagggg

SEQ ID NO: 162431 - DNA, 20 bp, Artificial Sequence
  Synthetic oligonucleotide; TGG chr2 60495051 60495070 60495067 +
cttcacctcctttacaattt

SEQ ID NO: 162432 - DNA, 20 bp, Artificial Sequence
  Synthetic oligonucleotide; GGG chr2 60495052 60495071 60495068 +
ttcacctcctttacaatttt

SEQ ID NO: 162433 - DNA, 20 bp, Artificial Sequence
  Synthetic oligonucleotide; GAG chr2 60495054 60495073 60495070 +
cacctcctttacaattttgg

SEQ ID NO: 162434 - DNA, 20 bp, Artificial Sequence
  Synthetic oligonucleotide; CGG chr2 60495063 60495082 60495079 +
tacaattttgggagtccaca

SEQ ID NO: 162435 - DNA, 20 bp, Artificial Sequence
  Synthetic oligonucleotide; TGG chr2 60495068 60495087 60495084 +
ttttgggagtccacacggca

SEQ ID NO: 162436 - DNA, 20 bp, Artificial Sequence
  Synthetic oligonucleotide; GAG chr2 60495095 60495114 60495111 +
caaattatttcattcccatt

SEQ ID NO: 162437 - DNA, 20 bp, Artificial Sequence
  Synthetic oligonucleotide; AAG chr2 60495123 60495142 60495139 +
aaatccaattctccatcacc

SEQ ID NO: 162438 - DNA, 20 bp, Artificial Sequence
  Synthetic oligonucleotide; GAG chr2 60495125 60495144 60495141 +
atccaattctccatcaccaa

SEQ ID NO: 162439 - DNA, 20 bp, Artificial Sequence
  Synthetic oligonucleotide; GAG chr2 60495127 60495146 60495143 +
ccaattctccatcaccaaga

SEQ ID NO: 162440 - DNA, 20 bp, Artificial Sequence
  Synthetic oligonucleotide; AAG chr2 60495138 60495157 60495154 +
tcaccaagagagccttccga

SEQ ID NO: 162441 - DNA, 20 bp, Artificial Sequence
  Synthetic oligonucleotide; GAG chr2 60495140 60495159 60495156 +
accaagagagccttccgaaa

SEQ ID NO: 162442 - DNA, 20 bp, Artificial Sequence
  Synthetic oligonucleotide; AGG chr2 60495141 60495160 60495157 +
ccaagagagccttccgaaag

SEQ ID NO: 162443 - DNA, 20 bp, Artificial Sequence
  Synthetic oligonucleotide; TGG chr2 60495150 60495169 60495166 +
ccttccgaaagaggcccccc

SEQ ID NO: 162444 - DNA, 20 bp, Artificial Sequence
  Synthetic oligonucleotide; GGG chr2 60495151 60495170 60495167 +
cttccgaaagaggcccccct

SEQ ID NO: 162445 - DNA, 20 bp, Artificial Sequence
  Synthetic oligonucleotide; CGG chr2 60495158 60495177 60495174 +
aagaggcccccctgggcaaa

SEQ ID NO: 162446 - DNA, 20 bp, Artificial Sequence
  Synthetic oligonucleotide; TGG chr2 60495168 60495187 60495184 +
cctgggcaaacggccaccga

SEQ ID NO: 162447 - DNA, 20 bp, Artificial Sequence
  Synthetic oligonucleotide; GAG chr2 60495170 60495189 60495186 +
tgggcaaacggccaccgatg

SEQ ID NO: 162448 - DNA, 20 bp, Artificial Sequence
  Synthetic oligonucleotide; GAG chr2 60495172 60495191 60495188 +
ggcaaacggccaccgatgga

SEQ ID NO: 162449 - DNA, 20 bp, Artificial Sequence
  Synthetic oligonucleotide; AGG chr2 60495173 60495192 60495189 +
gcaaacggccaccgatggag

SEQ ID NO: 162450 - DNA, 20 bp, Artificial Sequence
  Synthetic oligonucleotide; CAG chr2 60495181 60495200 60495197 +
ccaccgatggagaggtctgc

SEQ ID NO: 162451 - DNA, 20 bp, Artificial Sequence
  Synthetic oligonucleotide; CAG chr2 60495218 60495237 60495234 +
acccacgcccccaccctaat

SEQ ID NO: 162452 - DNA, 20 bp, Artificial Sequence
  Synthetic oligonucleotide; GAG chr2 60495220 60495239 60495236 +
ccacgcccccaccctaatca

SEQ ID NO: 162453 - DNA, 20 bp, Artificial Sequence
  Synthetic oligonucleotide; AGG chr2 60495221 60495240 60495237 +
cacgcccccaccctaatcag

SEQ ID NO: 162454 - DNA, 20 bp, Artificial Sequence
  Synthetic oligonucleotide; TGG chr2 60495236 60495255 60495252 +
atcagaggccaaacccttcc

SEQ ID NO: 162455 - DNA, 20 bp, Artificial Sequence
  Synthetic oligonucleotide; GAG chr2 60495238 60495257 60495254 +
cagaggccaaacccttcctg

SEQ ID NO: 162456 - DNA, 20 bp, Artificial Sequence
  Synthetic oligonucleotide; AAG chr2 60495251 60495270 60495267 +
cttcctggagcctgtgataa

SEQ ID NO: 162457 - DNA, 20 bp, Artificial Sequence
  Synthetic oligonucleotide; TAG chr2 60495261 60495280 60495277 +
cctgtgataaaagcaactgt

SEQ ID NO: 162458 - DNA, 20 bp, Artificial Sequence
  Synthetic oligonucleotide; TAG chr2 60495271 60495290 60495287 +
aagcaactgttagcttgcac

SEQ ID NO: 162459 - DNA, 20 bp, Artificial Sequence
  Synthetic oligonucleotide; TAG chr2 60495276 60495295 60495292 +
actgttagcttgcactagac

SEQ ID NO: 162460 - DNA, 20 bp, Artificial Sequence
  Synthetic oligonucleotide; AAG chr2 60495284 60495303 60495300 +
cttgcactagactagcttca

SEQ ID NO: 162461 - DNA, 20 bp, Artificial Sequence
  Synthetic oligonucleotide; TGG chr2 60495299 60495318 60495315 +
cttcaaagttgtattgaccc

SEQ ID NO: 162462 - DNA, 20 bp, Artificial Sequence
  Synthetic oligonucleotide; AAG chr2 60495314 60495333 60495330 +
gaccctggtgtgttatgtct

SEQ ID NO: 162463 - DNA, 20 bp, Artificial Sequence
  Synthetic oligonucleotide; GAG chr2 60495316 60495335 60495332 +
ccctggtgtgttatgtctaa

SEQ ID NO: 162464 - DNA, 20 bp, Artificial Sequence
  Synthetic oligonucleotide; TAG chr2 60495319 60495338 60495335 +
tggtgtgttatgtctaagag

SEQ ID NO: 162465 - DNA, 20 bp, Artificial Sequence
  Synthetic oligonucleotide; TGG chr2 60495339 60495358 60495355 +
tagatgccatatctcttttc

SEQ ID NO: 162466 - DNA, 20 bp, Artificial Sequence
  Synthetic oligonucleotide; TGG chr2 60495360 60495379 60495376 +
ggcctatgttattacctgta

SEQ ID NO: 162467 - DNA, 20 bp, Artificial Sequence
  Synthetic oligonucleotide; TGG chr2 60495372 60495391 60495388 +
tacctgtatggactttgcac

SEQ ID NO: 162468 - DNA, 20 bp, Artificial Sequence
  Synthetic oligonucleotide; CAG chr2 60495378 60495397 60495394 +
tatggactttgcactggaat

SEQ ID NO: 162469 - DNA, 20 bp, Artificial Sequence
  Synthetic oligonucleotide; TGG chr2 60495406 60495425 60495422 +
tgctcttacttatgcacacc

SEQ ID NO: 162470 - DNA, 20 bp, Artificial Sequence
  Synthetic oligonucleotide; GGG chr2 60495407 60495426 60495423 +
gctcttacttatgcacacct

SEQ ID NO: 162471 - DNA, 20 bp, Artificial Sequence
  Synthetic oligonucleotide; GGG chr2 60495408 60495427 60495424 +
ctcttacttatgcacacctg

SEQ ID NO: 162472 - DNA, 20 bp, Artificial Sequence
  Synthetic oligonucleotide; TAG chr2 60495413 60495432 60495429 +
acttatgcacacctggggca

SEQ ID NO: 162473 - DNA, 20 bp, Artificial Sequence
  Synthetic oligonucleotide; GAG chr2 60495415 60495434 60495431 +
ttatgcacacctggggcata

SEQ ID NO: 162474 - DNA, 20 bp, Artificial Sequence
  Synthetic oligonucleotide; CAG chr2 60495419 60495438 60495435 +
gcacacctggggcatagagc

SEQ ID NO: 162475 - DNA, 20 bp, Artificial Sequence
  Synthetic oligonucleotide; CAG chr2 60495437 60495456 60495453 +
gccagccctgtatcgctttt

SEQ ID NO: 162476 - DNA, 20 bp, Artificial Sequence
  Synthetic oligonucleotide; CAG chr2 60495451 60495470 60495467 +
gcttttcagccatctcacta

SEQ ID NO: 162477 - DNA, 20 bp, Artificial Sequence
  Synthetic oligonucleotide; AAG chr2 60495463 60495482 60495479 +
tctcactacagataactccc

SEQ ID NO: 162478 - DNA, 20 bp, Artificial Sequence
  Synthetic oligonucleotide; TAG chr2 60495473 60495492 60495489 +
gataactcccaagtcctgtc

SEQ ID NO: 162479 - DNA, 20 bp, Artificial Sequence
  Synthetic oligonucleotide; CAG chr2 60495491 60495510 60495507 +
tctagctgccttccttatca

SEQ ID NO: 162480 - DNA, 20 bp, Artificial Sequence
  Synthetic oligonucleotide; AGG chr2 60495492 60495511 60495508 +
ctagctgccttccttatcac

SEQ ID NO: 162481 - DNA, 20 bp, Artificial Sequence
  Synthetic oligonucleotide; TAG chr2 60495497 60495516 60495513 +
tgccttccttatcacaggaa

SEQ ID NO: 162482 - DNA, 20 bp, Artificial Sequence
  Synthetic oligonucleotide; AAG chr2 60495505 60495524 60495521 +
ttatcacaggaatagcaccc

SEQ ID NO: 162483 - DNA, 20 bp, Artificial Sequence
  Synthetic oligonucleotide; AGG chr2 60495506 60495525 60495522 +
tatcacaggaatagcaccca

SEQ ID NO: 162484 - DNA, 20 bp, Artificial Sequence
  Synthetic oligonucleotide; CAG chr2 60495514 60495533 60495530 +
gaatagcacccaaggtccat

SEQ ID NO: 162485 - DNA, 20 bp, Artificial Sequence
  Synthetic oligonucleotide; CAG chr2 60495522 60495541 60495538 +
cccaaggtccatcagtacct

SEQ ID NO: 162486 - DNA, 20 bp, Artificial Sequence
  Synthetic oligonucleotide; GAG chr2 60495524 60495543 60495540 +
caaggtccatcagtacctca

SEQ ID NO: 162487 - DNA, 20 bp, Artificial Sequence
  Synthetic oligonucleotide; TAG chr2 60495527 60495546 60495543 +
ggtccatcagtacctcagag

SEQ ID NO: 162488 - DNA, 20 bp, Artificial Sequence
  Synthetic oligonucleotide; TAG chr2 60495544 60495563 60495560 +
gagtagaaccccctataaac

SEQ ID NO: 162489 - DNA, 20 bp, Artificial Sequence
  Synthetic oligonucleotide; TGG chr2 60495549 60495568 60495565 +
gaaccccctataaactagtc

SEQ ID NO: 162490 - DNA, 20 bp, Artificial Sequence
  Synthetic oligonucleotide; TGG chr2 60495560 60495579 60495576 +
aaactagtctggtttgccca

SEQ ID NO: 162491 - DNA, 20 bp, Artificial Sequence
  Synthetic oligonucleotide; GGG chr2 60495561 60495580 60495577 +
aactagtctggtttgcccat

SEQ ID NO: 162492 - DNA, 20 bp, Artificial Sequence
  Synthetic oligonucleotide; GGG chr2 60495562 60495581 60495578 +
actagtctggtttgcccatg

SEQ ID NO: 162493 - DNA, 20 bp, Artificial Sequence
  Synthetic oligonucleotide; CAG chr2 60495567 60495586 60495583 +
tctggtttgcccatggggca

SEQ ID NO: 162494 - DNA, 20 bp, Artificial Sequence
  Synthetic oligonucleotide; CAG chr2 60495571 60495590 60495587 +
gtttgcccatggggcacagt

SEQ ID NO: 162495 - DNA, 20 bp, Artificial Sequence
  Synthetic oligonucleotide; AGG chr2 60495572 60495591 60495588 +
tttgcccatggggcacagtc

SEQ ID NO: 162496 - DNA, 20 bp, Artificial Sequence
  Synthetic oligonucleotide; CAG chr2 60495583 60495602 60495599 +
ggcacagtcaggctgttttc

SEQ ID NO: 162497 - DNA, 20 bp, Artificial Sequence
  Synthetic oligonucleotide; AGG chr2 60495584 60495603 60495600 +
gcacagtcaggctgttttcc

SEQ ID NO: 162498 - DNA, 20 bp, Artificial Sequence
  Synthetic oligonucleotide; GGG chr2 60495585 60495604 60495601 +
cacagtcaggctgttttcca

SEQ ID NO: 162499 - DNA, 20 bp, Artificial Sequence
  Synthetic oligonucleotide; TGG chr2 60495588 60495607 60495604 +
agtcaggctgttttccaggg

SEQ ID NO: 162500 - DNA, 20 bp, Artificial Sequence
  Synthetic oligonucleotide; GGG chr2 60495589 60495608 60495605 +
gtcaggctgttttccagggt

SEQ ID NO: 162501 - DNA, 20 bp, Artificial Sequence
  Synthetic oligonucleotide; GGG chr2 60495590 60495609 60495606 +
tcaggctgttttccagggtg

SEQ ID NO: 162502 - DNA, 20 bp, Artificial Sequence
  Synthetic oligonucleotide; CAG chr2 60495595 60495614 60495611 +
ctgttttccagggtggggtg

SEQ ID NO: 162503 - DNA, 20 bp, Artificial Sequence
  Synthetic oligonucleotide; CAG chr2 60495639 60495658 60495655 +
gcttacatataacgtcataa

SEQ ID NO: 162504 - DNA, 20 bp, Artificial Sequence
  Synthetic oligonucleotide; TGG chr2 60495667 60495686 60495683 +
cgtatgtgttgtgatccctg

SEQ ID NO: 162505 - DNA, 20 bp, Artificial Sequence
  Synthetic oligonucleotide; GAG chr2 60495673 60495692 60495689 +
tgttgtgatccctgtggttt

SEQ ID NO: 162506 - DNA, 20 bp, Artificial Sequence
  Synthetic oligonucleotide; GAG chr2 60495675 60495694 60495691 +
ttgtgatccctgtggtttga

SEQ ID NO: 162507 - DNA, 20 bp, Artificial Sequence
  Synthetic oligonucleotide; TGG chr2 60495680 60495699 60495696 +
atccctgtggtttgagagtt

SEQ ID NO: 162508 - DNA, 20 bp, Artificial Sequence
  Synthetic oligonucleotide; GAG chr2 60495682 60495701 60495698 +
ccctgtggtttgagagtttg

SEQ ID NO: 162509 - DNA, 20 bp, Artificial Sequence
  Synthetic oligonucleotide; AAG chr2 60495694 60495713 60495710 +
agagtttggagcttccctaa

SEQ ID NO: 162510 - DNA, 20 bp, Artificial Sequence
  Synthetic oligonucleotide; TGG chr2 60495712 60495731 60495728 +
aaaagtcaaaatattctcaa

SEQ ID NO: 162511 - DNA, 20 bp, Artificial Sequence
  Synthetic oligonucleotide; GGG chr2 60495713 60495732 60495729 +
aaagtcaaaatattctcaat

SEQ ID NO: 162512 - DNA, 20 bp, Artificial Sequence
  Synthetic oligonucleotide; CAG chr2 60495724 60495743 60495740 +
attctcaatgggccctcaat

SEQ ID NO: 162513 - DNA, 20 bp, Artificial Sequence
  Synthetic oligonucleotide; AAG chr2 60495740 60495759 60495756 +
caatcagcacatacacacaa

SEQ ID NO: 162514 - DNA, 20 bp, Artificial Sequence
  Synthetic oligonucleotide; AGG chr2 60495741 60495760 60495757 +
aatcagcacatacacacaaa

SEQ ID NO: 162515 - DNA, 20 bp, Artificial Sequence
  Synthetic oligonucleotide; TGG chr2 60495748 60495767 60495764 +
acatacacacaaaaggtacc

SEQ ID NO: 162516 - DNA, 20 bp, Artificial Sequence
  Synthetic oligonucleotide; AAG chr2 60495776 60495795 60495792 +
tgtaattcttttcctgctca

SEQ ID NO: 162517 - DNA, 20 bp, Artificial Sequence
  Synthetic oligonucleotide; CAG chr2 60495780 60495799 60495796 +
attcttttcctgctcaaaga

SEQ ID NO: 162518 - DNA, 20 bp, Artificial Sequence
  Synthetic oligonucleotide; AGG chr2 60495781 60495800 60495797 +
ttcttttcctgctcaaagac

SEQ ID NO: 162519 - DNA, 20 bp, Artificial Sequence
  Synthetic oligonucleotide; TGG chr2 60495826 60495845 60495842 +
accaaaaacccttgccacca

SEQ ID NO: 162520 - DNA, 20 bp, Artificial Sequence
  Synthetic oligonucleotide; GGG chr2 60495827 60495846 60495843 +
ccaaaaacccttgccaccat

SEQ ID NO: 162521 - DNA, 20 bp, Artificial Sequence
  Synthetic oligonucleotide; GAG chr2 60495829 60495848 60495845 +
aaaaacccttgccaccatgg

SEQ ID NO: 162522 - DNA, 20 bp, Artificial Sequence
  Synthetic oligonucleotide; TGG chr2 60495834 60495853 60495850 +
cccttgccaccatgggagcc

SEQ ID NO: 162523 - DNA, 20 bp, Artificial Sequence
  Synthetic oligonucleotide; GGG chr2 60495835 60495854 60495851 +
ccttgccaccatgggagcct

SEQ ID NO: 162524 - DNA, 20 bp, Artificial Sequence
  Synthetic oligonucleotide; GGG chr2 60495836 60495855 60495852 +
cttgccaccatgggagcctg

SEQ ID NO: 162525 - DNA, 20 bp, Artificial Sequence
  Synthetic oligonucleotide; CAG chr2 60495839 60495858 60495855 +
gccaccatgggagcctgggg

SEQ ID NO: 162526 - DNA, 20 bp, Artificial Sequence
  Synthetic oligonucleotide; GAG chr2 60495841 60495860 60495857 +
caccatgggagcctggggca

SEQ ID NO: 162527 - DNA, 20 bp, Artificial Sequence
  Synthetic oligonucleotide; AAG chr2 60495844 60495863 60495860 +
catgggagcctggggcagag

SEQ ID NO: 162528 - DNA, 20 bp, Artificial Sequence
  Synthetic oligonucleotide; AGG chr2 60495845 60495864 60495861 +
atgggagcctggggcagaga

SEQ ID NO: 162529 - DNA, 20 bp, Artificial Sequence
  Synthetic oligonucleotide; CAG chr2 60495850 60495869 60495866 +
agcctggggcagagaaggca

SEQ ID NO: 162530 - DNA, 20 bp, Artificial Sequence
  Synthetic oligonucleotide; AAG chr2 60495855 60495874 60495871 +
ggggcagagaaggcacagtg

SEQ ID NO: 162531 - DNA, 20 bp, Artificial Sequence
  Synthetic oligonucleotide; CAG chr2 60495872 60495891 60495888 +
gtgaagtcaaactgtaattc

SEQ ID NO: 162532 - DNA, 20 bp, Artificial Sequence
  Synthetic oligonucleotide; AGG chr2 60495873 60495892 60495889 +
tgaagtcaaactgtaattcc

SEQ ID NO: 162533 - DNA, 20 bp, Artificial Sequence
  Synthetic oligonucleotide; TGG chr2 60495883 60495902 60495899 +
ctgtaattccaggctctaaa

SEQ ID NO: 162534 - DNA, 20 bp, Artificial Sequence
  Synthetic oligonucleotide; GAG chr2 60495901 60495920 60495917 +
aatggtgctgtcatttttct

SEQ ID NO: 162535 - DNA, 20 bp, Artificial Sequence
  Synthetic oligonucleotide; GAG chr2 60495903 60495922 60495919 +
tggtgctgtcatttttctga

SEQ ID NO: 162536 - DNA, 20 bp, Artificial Sequence
  Synthetic oligonucleotide; AAG chr2 60495918 60495937 60495934 +
tctgagagtctctaaattac

SEQ ID NO: 162537 - DNA, 20 bp, Artificial Sequence
  Synthetic oligonucleotide; AGG chr2 60495919 60495938 60495935 +
ctgagagtctctaaattaca

SEQ ID NO: 162538 - DNA, 20 bp, Artificial Sequence
  Synthetic oligonucleotide; GGG chr2 60495920 60495939 60495936 +
tgagagtctctaaattacaa

SEQ ID NO: 162539 - DNA, 20 bp, Artificial Sequence
  Synthetic oligonucleotide; TAG chr2 60495938 60495957 60495954 +
aagggtgttttcactattct

SEQ ID NO: 162540 - DNA, 20 bp, Artificial Sequence
  Synthetic oligonucleotide; AAG chr2 60495959 60495978 60495975 +
agctattttttaaaacacct

SEQ ID NO: 162541 - DNA, 20 bp, Artificial Sequence
  Synthetic oligonucleotide; CAG chr2 60495972 60495991 60495988 +
aacacctaagaaacatactg

SEQ ID NO: 162542 - DNA, 20 bp, Artificial Sequence
  Synthetic oligonucleotide; TGG chr2 60495978 60495997 60495994 +
taagaaacatactgcagctc

SEQ ID NO: 162543 - DNA, 20 bp, Artificial Sequence
  Synthetic oligonucleotide; AAG chr2 60495983 60496002 60495999 +
aacatactgcagctctggaa

SEQ ID NO: 162544 - DNA, 20 bp, Artificial Sequence
  Synthetic oligonucleotide; GAG chr2 60495985 60496004 60496001 +
catactgcagctctggaaaa

SEQ ID NO: 162545 - DNA, 20 bp, Artificial Sequence
  Synthetic oligonucleotide; AAG chr2 60496001 60496020 60496017 +
aaaagagaacaaacaaacca

SEQ ID NO: 162546 - DNA, 20 bp, Artificial Sequence
  Synthetic oligonucleotide; GAG chr2 60496003 60496022 60496019 +
aagagaacaaacaaaccaaa

SEQ ID NO: 162547 - DNA, 20 bp, Artificial Sequence
  Synthetic oligonucleotide; AAG chr2 60496006 60496025 60496022 +
agaacaaacaaaccaaagag

SEQ ID NO: 162548 - DNA, 20 bp, Artificial Sequence
  Synthetic oligonucleotide; AGG chr2 60496007 60496026 60496023 +
gaacaaacaaaccaaagaga

SEQ ID NO: 162549 - DNA, 20 bp, Artificial Sequence
  Synthetic oligonucleotide; GGG chr2 60496008 60496027 60496024 +
aacaaacaaaccaaagagaa

SEQ ID NO: 162550 - DNA, 20 bp, Artificial Sequence
  Synthetic oligonucleotide; CAG chr2 60496014 60496033 60496030 +
caaaccaaagagaagggatc

SEQ ID NO: 162551 - DNA, 20 bp, Artificial Sequence
  Synthetic oligonucleotide; GAG chr2 60496016 60496035 60496032 +
aaccaaagagaagggatcca

SEQ ID NO: 162552 - DNA, 20 bp, Artificial Sequence
  Synthetic oligonucleotide; AGG chr2 60496017 60496036 60496033 +
accaaagagaagggatccag

SEQ ID NO: 162553 - DNA, 20 bp, Artificial Sequence
  Synthetic oligonucleotide; AAG chr2 60496037 60496056 60496053 +
aggtcaccctcatatgtgaa

SEQ ID NO: 162554 - DNA, 20 bp, Artificial Sequence
  Synthetic oligonucleotide; AAG chr2 60496053 60496072 60496069 +
tgaaaagtcaattgataatg

SEQ ID NO: 162555 - DNA, 20 bp, Artificial Sequence
  Synthetic oligonucleotide; AGG chr2 60496054 60496073 60496070 +
gaaaagtcaattgataatga

SEQ ID NO: 162556 - DNA, 20 bp, Artificial Sequence
  Synthetic oligonucleotide; TAG chr2 60496060 60496079 60496076 +
tcaattgataatgaaggctt

SEQ ID NO: 162557 - DNA, 20 bp, Artificial Sequence
  Synthetic oligonucleotide; AGG chr2 60496061 60496080 60496077 +
caattgataatgaaggcttt

SEQ ID NO: 162558 - DNA, 20 bp, Artificial Sequence
  Synthetic oligonucleotide; CGG chr2 60496069 60496088 60496085 +
aatgaaggctttaggataac

SEQ ID NO: 162559 - DNA, 20 bp, Artificial Sequence
  Synthetic oligonucleotide; GAG chr2 60496071 60496090 60496087 +
tgaaggctttaggataaccg

SEQ ID NO: 162560 - DNA, 20 bp, Artificial Sequence
  Synthetic oligonucleotide; AGG chr2 60496072 60496091 60496088 +
gaaggctttaggataaccgg

SEQ ID NO: 162561 - DNA, 20 bp, Artificial Sequence
  Synthetic oligonucleotide; GGG chr2 60496073 60496092 60496089 +
aaggctttaggataaccgga

SEQ ID NO: 162562 - DNA, 20 bp, Artificial Sequence
  Synthetic oligonucleotide; GGG chr2 60496074 60496093 60496090 +
aggctttaggataaccggag

SEQ ID NO: 162563 - DNA, 20 bp, Artificial Sequence
  Synthetic oligonucleotide; GAG chr2 60496076 60496095 60496092 +
gctttaggataaccggaggg

SEQ ID NO: 162564 - DNA, 20 bp, Artificial Sequence
  Synthetic oligonucleotide; AAG chr2 60496087 60496106 60496103 +
accggaggggagatgattga

SEQ ID NO: 162565 - DNA, 20 bp, Artificial Sequence
  Synthetic oligonucleotide; CAG chr2 60496103 60496122 60496119 +
ttgaaagcaatgcacctgtg

SEQ ID NO: 162566 - DNA, 20 bp, Artificial Sequence
  Synthetic oligonucleotide; AGG chr2 60496104 60496123 60496120 +
tgaaagcaatgcacctgtgc

SEQ ID NO: 162567 - DNA, 20 bp, Artificial Sequence
  Synthetic oligonucleotide; TGG chr2 60496110 60496129 60496126 +
caatgcacctgtgcaggaaa

SEQ ID NO: 162568 - DNA, 20 bp, Artificial Sequence
  Synthetic oligonucleotide; CGG chr2 60496117 60496136 60496133 +
cctgtgcaggaaatggatta

SEQ ID NO: 162569 - DNA, 20 bp, Artificial Sequence
  Synthetic oligonucleotide; CAG chr2 60496123 60496142 60496139 +
caggaaatggattacggaaa

SEQ ID NO: 162570 - DNA, 20 bp, Artificial Sequence
  Synthetic oligonucleotide; AGG chr2 60496124 60496143 60496140 +
aggaaatggattacggaaac

SEQ ID NO: 162571 - DNA, 20 bp, Artificial Sequence
  Synthetic oligonucleotide; GGG chr2 60496125 60496144 60496141 +
ggaaatggattacggaaaca

SEQ ID NO: 162572 - DNA, 20 bp, Artificial Sequence
  Synthetic oligonucleotide; CAG chr2 60496145 60496164 60496161 +
gggaattgttcatgaaatcc

SEQ ID NO: 162573 - DNA, 20 bp, Artificial Sequence
  Synthetic oligonucleotide; CAG chr2 60496153 60496172 60496169 +
ttcatgaaatcccagaaaac

SEQ ID NO: 162574 - DNA, 20 bp, Artificial Sequence
  Synthetic oligonucleotide; CGG chr2 60496159 60496178 60496175 +
aaatcccagaaaaccagaac

SEQ ID NO: 162575 - DNA, 20 bp, Artificial Sequence
  Synthetic oligonucleotide; GGG chr2 60496160 60496179 60496176 +
aatcccagaaaaccagaacc

SEQ ID NO: 162576 - DNA, 20 bp, Artificial Sequence
  Synthetic oligonucleotide; AAG chr2 60496164 60496183 60496180 +
ccagaaaaccagaaccggga

SEQ ID NO: 162577 - DNA, 20 bp, Artificial Sequence
  Synthetic oligonucleotide; TGG chr2 60496170 60496189 60496186 +
aaccagaaccgggaaagttc

SEQ ID NO: 162578 - DNA, 20 bp, Artificial Sequence
  Synthetic oligonucleotide; AAG chr2 60496173 60496192 60496189 +
cagaaccgggaaagttctgg

SEQ ID NO: 162579 - DNA, 20 bp, Artificial Sequence
  Synthetic oligonucleotide; CGG chr2 60496177 60496196 60496193 +
accgggaaagttctggaagt

SEQ ID NO: 162580 - DNA, 20 bp, Artificial Sequence
  Synthetic oligonucleotide; AAG chr2 60496198 60496217 60496214 +
ggaaaaacaaatcatgactt

SEQ ID NO: 162581 - DNA, 20 bp, Artificial Sequence
  Synthetic oligonucleotide; TGG chr2 60496204 60496223 60496220 +
acaaatcatgacttaagcaa

SEQ ID NO: 162582 - DNA, 20 bp, Artificial Sequence
  Synthetic oligonucleotide; AAG chr2 60496207 60496226 60496223 +
aatcatgacttaagcaatgg

SEQ ID NO: 162583 - DNA, 20 bp, Artificial Sequence
  Synthetic oligonucleotide; CAG chr2 60496225 60496244 60496241 +
ggaagtccaatacacgttta

SEQ ID NO: 162584 - DNA, 20 bp, Artificial Sequence
  Synthetic oligonucleotide; GAG chr2 60496243 60496262 60496259 +
tacagaatgccttgtcccac

SEQ ID NO: 162585 - DNA, 20 bp, Artificial Sequence
  Synthetic oligonucleotide; AGG chr2 60496244 60496263 60496260 +
acagaatgccttgtcccacg

SEQ ID NO: 162586 - DNA, 20 bp, Artificial Sequence
  Synthetic oligonucleotide; CAG chr2 60496252 60496271 60496268 +
ccttgtcccacgaggcaaca

SEQ ID NO: 162587 - DNA, 20 bp, Artificial Sequence
  Synthetic oligonucleotide; AGG chr2 60496253 60496272 60496269 +
cttgtcccacgaggcaacac

SEQ ID NO: 162588 - DNA, 20 bp, Artificial Sequence
  Synthetic oligonucleotide; CAG chr2 60496262 60496281 60496278 +
cgaggcaacacaggctacca

SEQ ID NO: 162589 - DNA, 20 bp, Artificial Sequence
  Synthetic oligonucleotide; TGG chr2 60496266 60496285 60496282 +
gcaacacaggctaccacaga

SEQ ID NO: 162590 - DNA, 20 bp, Artificial Sequence
  Synthetic oligonucleotide; GGG chr2 60496267 60496286 60496283 +
caacacaggctaccacagat

SEQ ID NO: 162591 - DNA, 20 bp, Artificial Sequence
  Synthetic oligonucleotide; GGG chr2 60496268 60496287 60496284 +
aacacaggctaccacagatg

SEQ ID NO: 162592 - DNA, 20 bp, Artificial Sequence
  Synthetic oligonucleotide; GGG chr2 60496269 60496288 60496285 +
acacaggctaccacagatgg

SEQ ID NO: 162593 - DNA, 20 bp, Artificial Sequence
  Synthetic oligonucleotide; CAG chr2 60496273 60496292 60496289 +
aggctaccacagatggggga

SEQ ID NO: 162594 - DNA, 20 bp, Artificial Sequence
  Synthetic oligonucleotide; AGG chr2 60496274 60496293 60496290 +
ggctaccacagatgggggac

SEQ ID NO: 162595 - DNA, 20 bp, Artificial Sequence
  Synthetic oligonucleotide; GGG chr2 60496275 60496294 60496291 +
gctaccacagatgggggaca

SEQ ID NO: 162596 - DNA, 20 bp, Artificial Sequence
  Synthetic oligonucleotide; TGG chr2 60496278 60496297 60496294 +
accacagatgggggacaggg

SEQ ID NO: 162597 - DNA, 20 bp, Artificial Sequence
  Synthetic oligonucleotide; GGG chr2 60496279 60496298 60496295 +
ccacagatgggggacagggt

SEQ ID NO: 162598 - DNA, 20 bp, Artificial Sequence
  Synthetic oligonucleotide; GAG chr2 60496281 60496300 60496297 +
acagatgggggacagggtgg

SEQ ID NO: 162599 - DNA, 20 bp, Artificial Sequence
  Synthetic oligonucleotide; TGG chr2 60496284 60496303 60496300 +
gatgggggacagggtgggag

SEQ ID NO: 162600 - DNA, 20 bp, Artificial Sequence
  Synthetic oligonucleotide; CAG chr2 60496294 60496313 60496310 +
agggtgggagtggaccatcc

SEQ ID NO: 162601 - DNA, 20 bp, Artificial Sequence
  Synthetic oligonucleotide; TGG chr2 60496297 60496316 60496313 +
gtgggagtggaccatcccag

SEQ ID NO: 162602 - DNA, 20 bp, Artificial Sequence
  Synthetic oligonucleotide; GAG chr2 60496307 60496326 60496323 +
accatcccagtggtgttact

SEQ ID NO: 162603 - DNA, 20 bp, Artificial Sequence
  Synthetic oligonucleotide; AGG chr2 60496308 60496327 60496324 +
ccatcccagtggtgttactg

SEQ ID NO: 162604 - DNA, 20 bp, Artificial Sequence
  Synthetic oligonucleotide; GGG chr2 60496309 60496328 60496325 +
catcccagtggtgttactga

SEQ ID NO: 162605 - DNA, 20 bp, Artificial Sequence
  Synthetic oligonucleotide; GGG chr2 60496310 60496329 60496326 +
atcccagtggtgttactgag

SEQ ID NO: 162606 - DNA, 20 bp, Artificial Sequence
  Synthetic oligonucleotide; AAG chr2 60496315 60496334 60496331 +
agtggtgttactgaggggca

SEQ ID NO: 162607 - DNA, 20 bp, Artificial Sequence
  Synthetic oligonucleotide; AGG chr2 60496316 60496335 60496332 +
gtggtgttactgaggggcaa

SEQ ID NO: 162608 - DNA, 20 bp, Artificial Sequence
  Synthetic oligonucleotide; GGG chr2 60496317 60496336 60496333 +
tggtgttactgaggggcaaa

SEQ ID NO: 162609 - DNA, 20 bp, Artificial Sequence
  Synthetic oligonucleotide; TAG chr2 60496321 60496340 60496337 +
gttactgaggggcaaaggga

SEQ ID NO: 162610 - DNA, 20 bp, Artificial Sequence
  Synthetic oligonucleotide; GAG chr2 60496330 60496349 60496346 +
gggcaaagggatagccctat

SEQ ID NO: 162611 - DNA, 20 bp, Artificial Sequence
  Synthetic oligonucleotide; AGG chr2 60496331 60496350 60496347 +
ggcaaagggatagccctatg

SEQ ID NO: 162612 - DNA, 20 bp, Artificial Sequence
  Synthetic oligonucleotide; AAG chr2 60496335 60496354 60496351 +
aagggatagccctatgaggc

SEQ ID NO: 162613 - DNA, 20 bp, Artificial Sequence
  Synthetic oligonucleotide; CAG chr2 60496342 60496361 60496358 +
agccctatgaggcaagtgtc

SEQ ID NO: 162614 - DNA, 20 bp, Artificial Sequence
  Synthetic oligonucleotide; AGG chr2 60496343 60496362 60496359 +
gccctatgaggcaagtgtcc

SEQ ID NO: 162615 - DNA, 20 bp, Artificial Sequence
  Synthetic oligonucleotide; GGG chr2 60496344 60496363 60496360 +
ccctatgaggcaagtgtcca

SEQ ID NO: 162616 - DNA, 20 bp, Artificial Sequence
  Synthetic oligonucleotide; CAG chr2 60496347 60496366 60496363 +
tatgaggcaagtgtccaggg

SEQ ID NO: 162617 - DNA, 20 bp, Artificial Sequence
  Synthetic oligonucleotide; TGG chr2 60496353 60496372 60496369 +
gcaagtgtccagggcagaac

SEQ ID NO: 162618 - DNA, 20 bp, Artificial Sequence
  Synthetic oligonucleotide; GAG chr2 60496355 60496374 60496371 +
aagtgtccagggcagaactg

SEQ ID NO: 162619 - DNA, 20 bp, Artificial Sequence
  Synthetic oligonucleotide; CAG chr2 60496376 60496395 60496392 +
agctttgtgaaaccatttcc

SEQ ID NO: 162620 - DNA, 20 bp, Artificial Sequence
  Synthetic oligonucleotide; AGG chr2 60496377 60496396 60496393 +
gctttgtgaaaccatttccc

SEQ ID NO: 162621 - DNA, 20 bp, Artificial Sequence
  Synthetic oligonucleotide; CAG chr2 60496380 60496399 60496396 +
ttgtgaaaccatttcccagg

SEQ ID NO: 162622 - DNA, 20 bp, Artificial Sequence
  Synthetic oligonucleotide; GAG chr2 60496382 60496401 60496398 +
gtgaaaccatttcccaggca

SEQ ID NO: 162623 - DNA, 20 bp, Artificial Sequence
  Synthetic oligonucleotide; CAG chr2 60496386 60496405 60496402 +
aaccatttcccaggcagaga

SEQ ID NO: 162624 - DNA, 20 bp, Artificial Sequence
  Synthetic oligonucleotide; GAG chr2 60496388 60496407 60496404 +
ccatttcccaggcagagaca

SEQ ID NO: 162625 - DNA, 20 bp, Artificial Sequence
  Synthetic oligonucleotide; TAG chr2 60496394 60496413 60496410 +
cccaggcagagacagagcac

SEQ ID NO: 162626 - DNA, 20 bp, Artificial Sequence
  Synthetic oligonucleotide; AGG chr2 60496395 60496414 60496411 +
ccaggcagagacagagcact

SEQ ID NO: 162627 - DNA, 20 bp, Artificial Sequence
  Synthetic oligonucleotide; TGG chr2 60496399 60496418 60496415 +
gcagagacagagcactaggc

SEQ ID NO: 162628 - DNA, 20 bp, Artificial Sequence
  Synthetic oligonucleotide; CAG chr2 60496408 60496427 60496424 +
gagcactaggctggtgctgc

SEQ ID NO: 162629 - DNA, 20 bp, Artificial Sequence
  Synthetic oligonucleotide; AAG chr2 60496420 60496439 60496436 +
ggtgctgccagtctgacaat

SEQ ID NO: 162630 - DNA, 20 bp, Artificial Sequence
  Synthetic oligonucleotide; TGG chr2 60496438 60496457 60496454 +
ataagtctgccattgtcctc

SEQ ID NO: 162631 - DNA, 20 bp, Artificial Sequence
  Synthetic oligonucleotide; CAG chr2 60496442 60496461 60496458 +
gtctgccattgtcctctggt

SEQ ID NO: 162632 - DNA, 20 bp, Artificial Sequence
  Synthetic oligonucleotide; TGG chr2 60496448 60496467 60496464 +
cattgtcctctggtcagctc

SEQ ID NO: 162633 - DNA, 20 bp, Artificial Sequence
  Synthetic oligonucleotide; CAG chr2 60496456 60496475 60496472 +
tctggtcagctctggacaca

SEQ ID NO: 162634 - DNA, 20 bp, Artificial Sequence
  Synthetic oligonucleotide; AAG chr2 60496462 60496481 60496478 +
cagctctggacacacagcaa

SEQ ID NO: 162635 - DNA, 20 bp, Artificial Sequence
  Synthetic oligonucleotide; GAG chr2 60496466 60496485 60496482 +
tctggacacacagcaaaagt

SEQ ID NO: 162636 - DNA, 20 bp, Artificial Sequence
  Synthetic oligonucleotide; CAG chr2 60496471 60496490 60496487 +
acacacagcaaaagtgagtt

SEQ ID NO: 162637 - DNA, 20 bp, Artificial Sequence
  Synthetic oligonucleotide; GAG chr2 60496473 60496492 60496489 +
acacagcaaaagtgagttca

SEQ ID NO: 162638 - DNA, 20 bp, Artificial Sequence
  Synthetic oligonucleotide; TAG chr2 60496476 60496495 60496492 +
cagcaaaagtgagttcagag

SEQ ID NO: 162639 - DNA, 20 bp, Artificial Sequence
  Synthetic oligonucleotide; AAG chr2 60496483 60496502 60496499 +
agtgagttcagagtagcctg

SEQ ID NO: 162640 - DNA, 20 bp, Artificial Sequence
  Synthetic oligonucleotide; CAG chr2 60496486 60496505 60496502 +
gagttcagagtagcctgaag

SEQ ID NO: 162641 - DNA, 20 bp, Artificial Sequence
  Synthetic oligonucleotide; AGG chr2 60496487 60496506 60496503 +
agttcagagtagcctgaagc

SEQ ID NO: 162642 - DNA, 20 bp, Artificial Sequence
  Synthetic oligonucleotide; AAG chr2 60496491 60496510 60496507 +
cagagtagcctgaagcagga

SEQ ID NO: 162643 - DNA, 20 bp, Artificial Sequence
  Synthetic oligonucleotide; GAG chr2 60496493 60496512 60496509 +
gagtagcctgaagcaggaaa

SEQ ID NO: 162644 - DNA, 20 bp, Artificial Sequence
  Synthetic oligonucleotide; AGG chr2 60496494 60496513 60496510 +
agtagcctgaagcaggaaag

SEQ ID NO: 162645 - DNA, 20 bp, Artificial Sequence
  Synthetic oligonucleotide; GGG chr2 60496495 60496514 60496511 +
gtagcctgaagcaggaaaga

SEQ ID NO: 162646 - DNA, 20 bp, Artificial Sequence
  Synthetic oligonucleotide; AAG chr2 60496498 60496517 60496514 +
gcctgaagcaggaaagaggg

SEQ ID NO: 162647 - DNA, 20 bp, Artificial Sequence
  Synthetic oligonucleotide; GAG chr2 60496500 60496519 60496516 +
ctgaagcaggaaagagggaa

SEQ ID NO: 162648 - DNA, 20 bp, Artificial Sequence
  Synthetic oligonucleotide; GAG chr2 60496502 60496521 60496518 +
gaagcaggaaagagggaaga

SEQ ID NO: 162649 - DNA, 20 bp, Artificial Sequence
  Synthetic oligonucleotide; AGG chr2 60496503 60496522 60496519 +
aagcaggaaagagggaagag

SEQ ID NO: 162650 - DNA, 20 bp, Artificial Sequence
  Synthetic oligonucleotide; GAG chr2 60496505 60496524 60496521 +
gcaggaaagagggaagagag

SEQ ID NO: 162651 - DNA, 20 bp, Artificial Sequence
  Synthetic oligonucleotide; AGG chr2 60496506 60496525 60496522 +
caggaaagagggaagagagg

SEQ ID NO: 162652 - DNA, 20 bp, Artificial Sequence
  Synthetic oligonucleotide; CAG chr2 60496534 60496553 60496550 +
acctatcttccactttgctg

SEQ ID NO: 162653 - DNA, 20 bp, Artificial Sequence
  Synthetic oligonucleotide; AGG chr2 60496535 60496554 60496551 +
cctatcttccactttgctgc

SEQ ID NO: 162654 - DNA, 20 bp, Artificial Sequence
  Synthetic oligonucleotide; AAG chr2 60496541 60496560 60496557 +
ttccactttgctgcaggttc

SEQ ID NO: 162655 - DNA, 20 bp, Artificial Sequence
  Synthetic oligonucleotide; AGG chr2 60496542 60496561 60496558 +
tccactttgctgcaggttca

SEQ ID NO: 162656 - DNA, 20 bp, Artificial Sequence
  Synthetic oligonucleotide; AAG chr2 60496546 60496565 60496562 +
ctttgctgcaggttcaaggc

SEQ ID NO: 162657 - DNA, 20 bp, Artificial Sequence
  Synthetic oligonucleotide; AGG chr2 60496547 60496566 60496563 +
tttgctgcaggttcaaggca

SEQ ID NO: 162658 - DNA, 20 bp, Artificial Sequence
  Synthetic oligonucleotide; GAG chr2 60496554 60496573 60496570 +
caggttcaaggcaaggattt

SEQ ID NO: 162659 - DNA, 20 bp, Artificial Sequence
  Synthetic oligonucleotide; CAG chr2 60496558 60496577 60496574 +
ttcaaggcaaggatttgaga

SEQ ID NO: 162660 - DNA, 20 bp, Artificial Sequence
  Synthetic oligonucleotide; TGG chr2 60496571 60496590 60496587 +
tttgagacagttaccccttc

SEQ ID NO: 162661 - DNA, 20 bp, Artificial Sequence
  Synthetic oligonucleotide; AAG chr2 60496574 60496593 60496590 +
gagacagttaccccttctgg

SEQ ID NO: 162662 - DNA, 20 bp, Artificial Sequence
  Synthetic oligonucleotide; GAG chr2 60496576 60496595 60496592 +
gacagttaccccttctggaa

SEQ ID NO: 162663 - DNA, 20 bp, Artificial Sequence
  Synthetic oligonucleotide; TGG chr2 60496581 60496600 60496597 +
ttaccccttctggaagagcc

SEQ ID NO: 162664 - DNA, 20 bp, Artificial Sequence
  Synthetic oligonucleotide; GAG chr2 60496585 60496604 60496601 +
cccttctggaagagcctggt

SEQ ID NO: 162665 - DNA, 20 bp, Artificial Sequence
  Synthetic oligonucleotide; CAG chr2 60496638 60496657 60496654 +
tcctcaccgactttctctcc

SEQ ID NO: 162666 - DNA, 20 bp, Artificial Sequence
  Synthetic oligonucleotide; CAG chr2 60496641 60496660 60496657 +
tcaccgactttctctcccag

SEQ ID NO: 162667 - DNA, 20 bp, Artificial Sequence
  Synthetic oligonucleotide; CAG chr2 60496645 60496664 60496661 +
cgactttctctcccagcagc

SEQ ID NO: 162668 - DNA, 20 bp, Artificial Sequence
  Synthetic oligonucleotide; CAG chr2 60496648 60496667 60496664 +
ctttctctcccagcagccag

SEQ ID NO: 162669 - DNA, 20 bp, Artificial Sequence
  Synthetic oligonucleotide; AGG chr2 60496649 60496668 60496665 +
tttctctcccagcagccagc

SEQ ID NO: 162670 - DNA, 20 bp, Artificial Sequence
  Synthetic oligonucleotide; GGG chr2 60496650 60496669 60496666 +
ttctctcccagcagccagca

SEQ ID NO: 162671 - DNA, 20 bp, Artificial Sequence
  Synthetic oligonucleotide; GGG chr2 60496651 60496670 60496667 +
tctctcccagcagccagcag

SEQ ID NO: 162672 - DNA, 20 bp, Artificial Sequence
  Synthetic oligonucleotide; TGG chr2 60496656 60496675 60496672 +
cccagcagccagcaggggcc

SEQ ID NO: 162673 - DNA, 20 bp, Artificial Sequence
  Synthetic oligonucleotide; GGG chr2 60496657 60496676 60496673 +
ccagcagccagcaggggcct

SEQ ID NO: 162674 - DNA, 20 bp, Artificial Sequence
  Synthetic oligonucleotide; TGG chr2 60496667 60496686 60496683 +
gcaggggcctgggccattta

SEQ ID NO: 162675 - DNA, 20 bp, Artificial Sequence
  Synthetic oligonucleotide; AAG chr2 60496675 60496694 60496691 +
ctgggccatttatggaatgc

SEQ ID NO: 162676 - DNA, 20 bp, Artificial Sequence
  Synthetic oligonucleotide; CAG chr2 60496689 60496708 60496705 +
gaatgcaagccctgaccaca

SEQ ID NO: 162677 - DNA, 20 bp, Artificial Sequence
  Synthetic oligonucleotide; CAG chr2 60496706 60496725 60496722 +
acacagacttacttacatgc

SEQ ID NO: 162678 - DNA, 20 bp, Artificial Sequence
  Synthetic oligonucleotide; AGG chr2 60496707 60496726 60496723 +
cacagacttacttacatgcc

SEQ ID NO: 162679 - DNA, 20 bp, Artificial Sequence
  Synthetic oligonucleotide; CAG chr2 60496711 60496730 60496727 +
gacttacttacatgccagga

SEQ ID NO: 162680 - DNA, 20 bp, Artificial Sequence
  Synthetic oligonucleotide; CAG chr2 60496718 60496737 60496734 +
ttacatgccaggacagccac

SEQ ID NO: 162681 - DNA, 20 bp, Artificial Sequence
  Synthetic oligonucleotide; AGG chr2 60496719 60496738 60496735 +
tacatgccaggacagccacc

SEQ ID NO: 162682 - DNA, 20 bp, Artificial Sequence
  Synthetic oligonucleotide; TAG chr2 60496722 60496741 60496738 +
atgccaggacagccaccagg

SEQ ID NO: 162683 - DNA, 20 bp, Artificial Sequence
  Synthetic oligonucleotide; TAG chr2 60496737 60496756 60496753 +
ccaggtagcctttcccactc

SEQ ID NO: 162684 - DNA, 20 bp, Artificial Sequence
  Synthetic oligonucleotide; AGG chr2 60496738 60496757 60496754 +
caggtagcctttcccactct

SEQ ID NO: 162685 - DNA, 20 bp, Artificial Sequence
  Synthetic oligonucleotide; GAG chr2 60496750 60496769 60496766 +
cccactctaggttccactgt

SEQ ID NO: 162686 - DNA, 20 bp, Artificial Sequence
  Synthetic oligonucleotide; AAG chr2 60496787 60496806 60496803 +
ctctctctcactatgctccc

SEQ ID NO: 162687 - DNA, 20 bp, Artificial Sequence
  Synthetic oligonucleotide; GAG chr2 60496789 60496808 60496805 +
ctctctcactatgctcccaa

SEQ ID NO: 162688 - DNA, 20 bp, Artificial Sequence
  Synthetic oligonucleotide; AGG chr2 60496790 60496809 60496806 +
tctctcactatgctcccaag

SEQ ID NO: 162689 - DNA, 20 bp, Artificial Sequence
  Synthetic oligonucleotide; GAG chr2 60496792 60496811 60496808 +
tctcactatgctcccaagag

SEQ ID NO: 162690 - DNA, 20 bp, Artificial Sequence
  Synthetic oligonucleotide; TGG chr2 60496829 60496848 60496845 +
cttcctcaaatctccctcac

SEQ ID NO: 162691 - DNA, 20 bp, Artificial Sequence
  Synthetic oligonucleotide; CAG chr2 60496838 60496857 60496854 +
atctccctcactggatgtca

SEQ ID NO: 162692 - DNA, 20 bp, Artificial Sequence
  Synthetic oligonucleotide; TAG chr2 60496844 60496863 60496860 +
ctcactggatgtcacagtca

SEQ ID NO: 162693 - DNA, 20 bp, Artificial Sequence
  Synthetic oligonucleotide; AGG chr2 60496845 60496864 60496861 +
tcactggatgtcacagtcat

SEQ ID NO: 162694 - DNA, 20 bp, Artificial Sequence
  Synthetic oligonucleotide; AAG chr2 60496854 60496873 60496870 +
gtcacagtcataggcctgaa

SEQ ID NO: 162695 - DNA, 20 bp, Artificial Sequence
  Synthetic oligonucleotide; CAG chr2 60496857 60496876 60496873 +
acagtcataggcctgaaaag

SEQ ID NO: 162696 - DNA, 20 bp, Artificial Sequence
  Synthetic oligonucleotide; AAG chr2 60496881 60496900 60496897 +
atgcaaactgaatttttgta

SEQ ID NO: 162697 - DNA, 20 bp, Artificial Sequence
  Synthetic oligonucleotide; CAG chr2 60496884 60496903 60496900 +
caaactgaatttttgtaaag

SEQ ID NO: 162698 - DNA, 20 bp, Artificial Sequence
  Synthetic oligonucleotide; AGG chr2 60496885 60496904 60496901 +
aaactgaatttttgtaaagc

SEQ ID NO: 162699 - DNA, 20 bp, Artificial Sequence
  Synthetic oligonucleotide; TGG chr2 60496901 60496920 60496917 +
aagcaggacccatttcccca

SEQ ID NO: 162700 - DNA, 20 bp, Artificial Sequence
  Synthetic oligonucleotide; CAG chr2 60496905 60496924 60496921 +
aggacccatttccccatgga

SEQ ID NO: 162701 - DNA, 20 bp, Artificial Sequence
  Synthetic oligonucleotide; AAG chr2 60496912 60496931 60496928 +
atttccccatggacagtcat

SEQ ID NO: 162702 - DNA, 20 bp, Artificial Sequence
  Synthetic oligonucleotide; GAG chr2 60496914 60496933 60496930 +
ttccccatggacagtcataa

SEQ ID NO: 162703 - DNA, 20 bp, Artificial Sequence
  Synthetic oligonucleotide; GAG chr2 60496919 60496938 60496935 +
catggacagtcataagagat

SEQ ID NO: 162704 - DNA, 20 bp, Artificial Sequence
  Synthetic oligonucleotide; TAG chr2 60496933 60496952 60496949 +
agagatgagtgaacacaatg

SEQ ID NO: 162705 - DNA, 20 bp, Artificial Sequence
  Synthetic oligonucleotide; TGG chr2 60496975 60496994 60496991 +
cgattacttcacgataaatc

SEQ ID NO: 162706 - DNA, 20 bp, Artificial Sequence
  Synthetic oligonucleotide; AAG chr2 60496984 60497003 60497000 +
cacgataaatctggattcca

SEQ ID NO: 162707 - DNA, 20 bp, Artificial Sequence
  Synthetic oligonucleotide; AGG chr2 60496985 60497004 60497001 +
acgataaatctggattccaa

SEQ ID NO: 162708 - DNA, 20 bp, Artificial Sequence
  Synthetic oligonucleotide; GGG chr2 60496986 60497005 60497002 +
cgataaatctggattccaaa

SEQ ID NO: 162709 - DNA, 20 bp, Artificial Sequence
  Synthetic oligonucleotide; AAG chr2 60496994 60497013 60497010 +
ctggattccaaagggactat

SEQ ID NO: 162710 - DNA, 20 bp, Artificial Sequence
  Synthetic oligonucleotide; TGG chr2 60497005 60497024 60497021 +
agggactataagctctcaca

SEQ ID NO: 162711 - DNA, 20 bp, Artificial Sequence
  Synthetic oligonucleotide; AAG chr2 60497008 60497027 60497024 +
gactataagctctcacatgg

SEQ ID NO: 162712 - DNA, 20 bp, Artificial Sequence
  Synthetic oligonucleotide; AGG chr2 60497009 60497028 60497025 +
actataagctctcacatgga

SEQ ID NO: 162713 - DNA, 20 bp, Artificial Sequence
  Synthetic oligonucleotide; AAG chr2 60497012 60497031 60497028 +
ataagctctcacatggaagg

SEQ ID NO: 162714 - DNA, 20 bp, Artificial Sequence
  Synthetic oligonucleotide; AAG chr2 60497016 60497035 60497032 +
gctctcacatggaaggaagc

SEQ ID NO: 162715 - DNA, 20 bp, Artificial Sequence
  Synthetic oligonucleotide; CAG chr2 60497035 60497054 60497051 +
caagatctctactcctcccc

SEQ ID NO: 162716 - DNA, 20 bp, Artificial Sequence
  Synthetic oligonucleotide; GAG chr2 60497042 60497061 60497058 +
tctactcctcccccagtgtt

SEQ ID NO: 162717 - DNA, 20 bp, Artificial Sequence
  Synthetic oligonucleotide; TGG chr2 60497045 60497064 60497061 +
actcctcccccagtgttgag

SEQ ID NO: 162718 - DNA, 20 bp, Artificial Sequence
  Synthetic oligonucleotide; CAG chr2 60497049 60497068 60497065 +
ctcccccagtgttgagtgga

SEQ ID NO: 162719 - DNA, 20 bp, Artificial Sequence
  Synthetic oligonucleotide; AGG chr2 60497050 60497069 60497066 +
tcccccagtgttgagtggac

SEQ ID NO: 162720 - DNA, 20 bp, Artificial Sequence
  Synthetic oligonucleotide; GGG chr2 60497051 60497070 60497067 +
cccccagtgttgagtggaca

SEQ ID NO: 162721 - DNA, 20 bp, Artificial Sequence
  Synthetic oligonucleotide; GAG chr2 60497053 60497072 60497069 +
cccagtgttgagtggacagg

SEQ ID NO: 162722 - DNA, 20 bp, Artificial Sequence
  Synthetic oligonucleotide; CAG chr2 60497063 60497082 60497079 +
agtggacagggagtacaccg

SEQ ID NO: 162723 - DNA, 20 bp, Artificial Sequence
  Synthetic oligonucleotide; TGG chr2 60497074 60497093 60497090 +
agtacaccgcagacacctgt

SEQ ID NO: 162724 - DNA, 20 bp, Artificial Sequence
  Synthetic oligonucleotide; TAG chr2 60497098 60497117 60497114 +
caaccaattctaattccctt

SEQ ID NO: 162725 - DNA, 20 bp, Artificial Sequence
  Synthetic oligonucleotide; TAG chr2 60497102 60497121 60497118 +
caattctaattccctttagc

SEQ ID NO: 162726 - DNA, 20 bp, Artificial Sequence
  Synthetic oligonucleotide; AAG chr2 60497113 60497132 60497129 +
ccctttagctagcatcccct

SEQ ID NO: 162727 - DNA, 20 bp, Artificial Sequence
  Synthetic oligonucleotide; TAG chr2 60497117 60497136 60497133 +
ttagctagcatcccctaagc

SEQ ID NO: 162728 - DNA, 20 bp, Artificial Sequence
  Synthetic oligonucleotide; GAG chr2 60497119 60497138 60497135 +
agctagcatcccctaagcta

SEQ ID NO: 162729 - DNA, 20 bp, Artificial Sequence
  Synthetic oligonucleotide; TAG chr2 60497123 60497142 60497139 +
agcatcccctaagctagagc

SEQ ID NO: 162730 - DNA, 20 bp, Artificial Sequence
  Synthetic oligonucleotide; GAG chr2 60497125 60497144 60497141 +
catcccctaagctagagcta

SEQ ID NO: 162731 - DNA, 20 bp, Artificial Sequence
  Synthetic oligonucleotide; TAG chr2 60497129 60497148 60497145 +
ccctaagctagagctagagc

SEQ ID NO: 162732 - DNA, 20 bp, Artificial Sequence
  Synthetic oligonucleotide; GAG chr2 60497131 60497150 60497147 +
ctaagctagagctagagcta

SEQ ID NO: 162733 - DNA, 20 bp, Artificial Sequence
  Synthetic oligonucleotide; CAG chr2 60497145 60497164 60497161 +
gagctagagctatttccttg

SEQ ID NO: 162734 - DNA, 20 bp, Artificial Sequence
  Synthetic oligonucleotide; TAG chr2 60497161 60497180 60497177 +
cttgcagccttccttttctc

SEQ ID NO: 162735 - DNA, 20 bp, Artificial Sequence
  Synthetic oligonucleotide; AAG chr2 60497166 60497185 60497182 +
agccttccttttctctagca

SEQ ID NO: 162736 - DNA, 20 bp, Artificial Sequence
  Synthetic oligonucleotide; CAG chr2 60497179 60497198 60497195 +
tctagcaaagtccttccatg

SEQ ID NO: 162737 - DNA, 20 bp, Artificial Sequence
  Synthetic oligonucleotide; TAG chr2 60497182 60497201 60497198 +
agcaaagtccttccatgcag

SEQ ID NO: 162738 - DNA, 20 bp, Artificial Sequence
  Synthetic oligonucleotide; GAG chr2 60497208 60497227 60497224 +
atgacctgtaaacacttaat

SEQ ID NO: 162739 - DNA, 20 bp, Artificial Sequence
  Synthetic oligonucleotide; TAG chr2 60497212 60497231 60497228 +
cctgtaaacacttaatgagc

SEQ ID NO: 162740 - DNA, 20 bp, Artificial Sequence
  Synthetic oligonucleotide; GAG chr2 60497214 60497233 60497230 +
tgtaaacacttaatgagcta

SEQ ID NO: 162741 - DNA, 20 bp, Artificial Sequence
  Synthetic oligonucleotide; AAG chr2 60497231 60497250 60497247 +
ctagagaaacattccattga

SEQ ID NO: 162742 - DNA, 20 bp, Artificial Sequence
  Synthetic oligonucleotide; AGG chr2 60497232 60497251 60497248 +
tagagaaacattccattgaa

SEQ ID NO: 162743 - DNA, 20 bp, Artificial Sequence
  Synthetic oligonucleotide; AAG chr2 60497259 60497278 60497275 +
ccactgtgcatccttttgta

SEQ ID NO: 162744 - DNA, 20 bp, Artificial Sequence
  Synthetic oligonucleotide; GAG chr2 60497261 60497280 60497277 +
actgtgcatccttttgtaaa

SEQ ID NO: 162745 - DNA, 20 bp, Artificial Sequence
  Synthetic oligonucleotide; AGG chr2 60497262 60497281 60497278 +
ctgtgcatccttttgtaaag

SEQ ID NO: 162746 - DNA, 20 bp, Artificial Sequence
  Synthetic oligonucleotide; GGG chr2 60497263 60497282 60497279 +
tgtgcatccttttgtaaaga

SEQ ID NO: 162747 - DNA, 20 bp, Artificial Sequence
  Synthetic oligonucleotide; GGG chr2 60497264 60497283 60497280 +
gtgcatccttttgtaaagag

SEQ ID NO: 162748 - DNA, 20 bp, Artificial Sequence
  Synthetic oligonucleotide; GGG chr2 60497265 60497284 60497281 +
tgcatccttttgtaaagagg

SEQ ID NO: 162749 - DNA, 20 bp, Artificial Sequence
  Synthetic oligonucleotide; GGG chr2 60497266 60497285 60497282 +
gcatccttttgtaaagaggg

SEQ ID NO: 162750 - DNA, 20 bp, Artificial Sequence
  Synthetic oligonucleotide; AAG chr2 60497287 60497306 60497303 +
ggaaaatcttttgtaaaacg

SEQ ID NO: 162751 - DNA, 20 bp, Artificial Sequence
  Synthetic oligonucleotide; AAG chr2 60497317 60497336 60497333 +
tttaactgctctgtttgatc

SEQ ID NO: 162752 - DNA, 20 bp, Artificial Sequence
  Synthetic oligonucleotide; CAG chr2 60497321 60497340 60497337 +
actgctctgtttgatcaagt

SEQ ID NO: 162753 - DNA, 20 bp, Artificial Sequence
  Synthetic oligonucleotide; CAG chr2 60497330 60497349 60497346 +
tttgatcaagtcagattttt

SEQ ID NO: 162754 - DNA, 20 bp, Artificial Sequence
  Synthetic oligonucleotide; TAG chr2 60497341 60497360 60497357 +
cagatttttcagaatatgaa

SEQ ID NO: 162755 - DNA, 20 bp, Artificial Sequence
  Synthetic oligonucleotide; TAG chr2 60497345 60497364 60497361 +
tttttcagaatatgaatagc

SEQ ID NO: 162756 - DNA, 20 bp, Artificial Sequence
  Synthetic oligonucleotide; AAG chr2 60497353 60497372 60497369 +
aatatgaatagctagtattc

SEQ ID NO: 162757 - DNA, 20 bp, Artificial Sequence
  Synthetic oligonucleotide; AAG chr2 60497374 60497393 60497390 +
agcatatatgaactgtcttt

SEQ ID NO: 162758 - DNA, 20 bp, Artificial Sequence
  Synthetic oligonucleotide; TAG chr2 60497389 60497408 60497405 +
tctttaagttaatcaatccc

SEQ ID NO: 162759 - DNA, 20 bp, Artificial Sequence
  Synthetic oligonucleotide; TAG chr2 60497396 60497415 60497412 +
gttaatcaatccctagaaac

SEQ ID NO: 162760 - DNA, 20 bp, Artificial Sequence
  Synthetic oligonucleotide; CAG chr2 60497403 60497422 60497419 +
aatccctagaaactagccct

SEQ ID NO: 162761 - DNA, 20 bp, Artificial Sequence
  Synthetic oligonucleotide; AGG chr2 60497404 60497423 60497420 +
atccctagaaactagccctc

SEQ ID NO: 162762 - DNA, 20 bp, Artificial Sequence
  Synthetic oligonucleotide; TAG chr2 60497408 60497427 60497424 +
ctagaaactagccctcaggt

SEQ ID NO: 162763 - DNA, 20 bp, Artificial Sequence
  Synthetic oligonucleotide; CAG chr2 60497411 60497430 60497427 +
gaaactagccctcaggttag

SEQ ID NO: 162764 - DNA, 20 bp, Artificial Sequence
  Synthetic oligonucleotide; AGG chr2 60497412 60497431 60497428 +
aaactagccctcaggttagc

SEQ ID NO: 162765 - DNA, 20 bp, Artificial Sequence
  Synthetic oligonucleotide; AAG chr2 60497417 60497436 60497433 +
agccctcaggttagcaggcc

SEQ ID NO: 162766 - DNA, 20 bp, Artificial Sequence
  Synthetic oligonucleotide; AGG chr2 60497418 60497437 60497434 +
gccctcaggttagcaggcca

SEQ ID NO: 162767 - DNA, 20 bp, Artificial Sequence
  Synthetic oligonucleotide; GAG chr2 60497427 60497446 60497443 +
ttagcaggccaaggatatat

SEQ ID NO: 162768 - DNA, 20 bp, Artificial Sequence
  Synthetic oligonucleotide; GAG chr2 60497429 60497448 60497445 +
agcaggccaaggatatatga

SEQ ID NO: 162769 - DNA, 20 bp, Artificial Sequence
  Synthetic oligonucleotide; AAG chr2 60497439 60497458 60497455 +
ggatatatgagagtgctttg

SEQ ID NO: 162770 - DNA, 20 bp, Artificial Sequence
  Synthetic oligonucleotide; TAG chr2 60497444 60497463 60497460 +
tatgagagtgctttgaagtc

SEQ ID NO: 162771 - DNA, 20 bp, Artificial Sequence
  Synthetic oligonucleotide; TAG chr2 60497474 60497493 60497490 +
ctgccgctcctgaattgaat

SEQ ID NO: 162772 - DNA, 20 bp, Artificial Sequence
  Synthetic oligonucleotide; CAG chr2 60497484 60497503 60497500 +
tgaattgaattagaacattc

SEQ ID NO: 162773 - DNA, 20 bp, Artificial Sequence
  Synthetic oligonucleotide; AGG chr2 60497485 60497504 60497501 +
gaattgaattagaacattcc

SEQ ID NO: 162774 - DNA, 20 bp, Artificial Sequence
  Synthetic oligonucleotide; TAG chr2 60497488 60497507 60497504 +
ttgaattagaacattccagg

SEQ ID NO: 162775 - DNA, 20 bp, Artificial Sequence
  Synthetic oligonucleotide; CAG chr2 60497492 60497511 60497508 +
attagaacattccaggtaga

SEQ ID NO: 162776 - DNA, 20 bp, Artificial Sequence
  Synthetic oligonucleotide; TGG chr2 60497500 60497519 60497516 +
attccaggtagacagattca

SEQ ID NO: 162777 - DNA, 20 bp, Artificial Sequence
  Synthetic oligonucleotide; CAG chr2 60497513 60497532 60497529 +
agattcatggcccctaacat

SEQ ID NO: 162778 - DNA, 20 bp, Artificial Sequence
  Synthetic oligonucleotide; AGG chr2 60497514 60497533 60497530 +
gattcatggcccctaacatc

SEQ ID NO: 162779 - DNA, 20 bp, Artificial Sequence
  Synthetic oligonucleotide; CAG chr2 60497520 60497539 60497536 +
tggcccctaacatcaggaat

SEQ ID NO: 162780 - DNA, 20 bp, Artificial Sequence
  Synthetic oligonucleotide; TAG chr2 60497524 60497543 60497540 +
ccctaacatcaggaatcagc

SEQ ID NO: 162781 - DNA, 20 bp, Artificial Sequence
  Synthetic oligonucleotide; CGG chr2 60497536 60497555 60497552 +
gaatcagctagaaactcaat

SEQ ID NO: 162782 - DNA, 20 bp, Artificial Sequence
  Synthetic oligonucleotide; CAG chr2 60497546 60497565 60497562 +
gaaactcaatcggctcttac

SEQ ID NO: 162783 - DNA, 20 bp, Artificial Sequence
  Synthetic oligonucleotide; CAG chr2 60497562 60497581 60497578 +
ttaccagtcactacctacgt

SEQ ID NO: 162784 - DNA, 20 bp, Artificial Sequence
  Synthetic oligonucleotide; TGG chr2 60497580 60497599 60497596 +
gtcagtgccatatcctataa

SEQ ID NO: 162785 - DNA, 20 bp, Artificial Sequence
  Synthetic oligonucleotide; TAG chr2 60497622 60497641 60497638 +
gatgatgataataataataa

SEQ ID NO: 162786 - DNA, 20 bp, Artificial Sequence
  Synthetic oligonucleotide; TGG chr2 60497632 60497651 60497648 +
ataataataatagcttccac

SEQ ID NO: 162787 - DNA, 20 bp, Artificial Sequence
  Synthetic oligonucleotide; TGG chr2 60497636 60497655 60497652 +
taataatagcttccactgga

SEQ ID NO: 162788 - DNA, 20 bp, Artificial Sequence
  Synthetic oligonucleotide; CAG chr2 60497653 60497672 60497669 +
ggatggcactttgcaccttc

SEQ ID NO: 162789 - DNA, 20 bp, Artificial Sequence
  Synthetic oligonucleotide; GAG chr2 60497655 60497674 60497671 +
atggcactttgcaccttcca

SEQ ID NO: 162790 - DNA, 20 bp, Artificial Sequence
  Synthetic oligonucleotide; TGG chr2 60497682 60497701 60497698 +
ttaacatcctttactttttt

SEQ ID NO: 162791 - DNA, 20 bp, Artificial Sequence
  Synthetic oligonucleotide; AAG chr2 60497685 60497704 60497701 +
acatcctttactttttttgg

SEQ ID NO: 162792 - DNA, 20 bp, Artificial Sequence
  Synthetic oligonucleotide; AGG chr2 60497686 60497705 60497702 +
catcctttactttttttgga

SEQ ID NO: 162793 - DNA, 20 bp, Artificial Sequence
  Synthetic oligonucleotide; CAG chr2 60497693 60497712 60497709 +
tactttttttggaaggcctt

SEQ ID NO: 162794 - DNA, 20 bp, Artificial Sequence
  Synthetic oligonucleotide; AGG chr2 60497694 60497713 60497710 +
actttttttggaaggccttc

SEQ ID NO: 162795 - DNA, 20 bp, Artificial Sequence
  Synthetic oligonucleotide; CAG chr2 60497699 60497718 60497715 +
ttttggaaggccttcaggtc

SEQ ID NO: 162796 - DNA, 20 bp, Artificial Sequence
  Synthetic oligonucleotide; TAG chr2 60497741 60497760 60497757 +
tctgaactatcaccttacta

SEQ ID NO: 162797 - DNA, 20 bp, Artificial Sequence
  Synthetic oligonucleotide; AGG chr2 60497742 60497761 60497758 +
ctgaactatcaccttactat

SEQ ID NO: 162798 - DNA, 20 bp, Artificial Sequence
  Synthetic oligonucleotide; AAG chr2 60497760 60497779 60497776 +
ataggcacatatttccccca

SEQ ID NO: 162799 - DNA, 20 bp, Artificial Sequence
  Synthetic oligonucleotide; AGG chr2 60497761 60497780 60497777 +
taggcacatatttcccccaa

SEQ ID NO: 162800 - DNA, 20 bp, Artificial Sequence
  Synthetic oligonucleotide; CAG chr2 60497767 60497786 60497783 +
catatttcccccaaaggact

SEQ ID NO: 162801 - DNA, 20 bp, Artificial Sequence
  Synthetic oligonucleotide; TGG chr2 60497770 60497789 60497786 +
atttcccccaaaggactcag

SEQ ID NO: 162802 - DNA, 20 bp, Artificial Sequence
  Synthetic oligonucleotide; CAG chr2 60497808 60497827 60497824 +
ttctccctttgctgatgatc

SEQ ID NO: 162803 - DNA, 20 bp, Artificial Sequence
  Synthetic oligonucleotide; TAG chr2 60497811 60497830 60497827 +
tccctttgctgatgatccag

SEQ ID NO: 162804 - DNA, 20 bp, Artificial Sequence
  Synthetic oligonucleotide; GAG chr2 60497813 60497832 60497829 +
cctttgctgatgatccagta

SEQ ID NO: 162805 - DNA, 20 bp, Artificial Sequence
  Synthetic oligonucleotide; AAG chr2 60497826 60497845 60497842 +
tccagtagagaaatgatcaa

SEQ ID NO: 162806 - DNA, 20 bp, Artificial Sequence
  Synthetic oligonucleotide; AGG chr2 60497827 60497846 60497843 +
ccagtagagaaatgatcaaa

SEQ ID NO: 162807 - DNA, 20 bp, Artificial Sequence
  Synthetic oligonucleotide; AAG chr2 60497857 60497876 60497873 +
acattgtcctaaatgaaacc

SEQ ID NO: 162808 - DNA, 20 bp, Artificial Sequence
  Synthetic oligonucleotide; CAG chr2 60497869 60497888 60497885 +
atgaaaccaagcttcctctg

SEQ ID NO: 162809 - DNA, 20 bp, Artificial Sequence
  Synthetic oligonucleotide; AGG chr2 60497870 60497889 60497886 +
tgaaaccaagcttcctctgc

SEQ ID NO: 162810 - DNA, 20 bp, Artificial Sequence
  Synthetic oligonucleotide; TGG chr2 60497874 60497893 60497890 +
accaagcttcctctgcagga

SEQ ID NO: 162811 - DNA, 20 bp, Artificial Sequence
  Synthetic oligonucleotide; AAG chr2 60497877 60497896 60497893 +
aagcttcctctgcaggatgg

SEQ ID NO: 162812 - DNA, 20 bp, Artificial Sequence
  Synthetic oligonucleotide; GAG chr2 60497881 60497900 60497897 +
ttcctctgcaggatggaagt

SEQ ID NO: 162813 - DNA, 20 bp, Artificial Sequence
  Synthetic oligonucleotide; CAG chr2 60497885 60497904 60497901 +
tctgcaggatggaagtgagc

SEQ ID NO: 162814 - DNA, 20 bp, Artificial Sequence
  Synthetic oligonucleotide; AGG chr2 60497886 60497905 60497902 +
ctgcaggatggaagtgagcc

SEQ ID NO: 162815 - DNA, 20 bp, Artificial Sequence
  Synthetic oligonucleotide; TAG chr2 60497892 60497911 60497908 +
gatggaagtgagccaggtga

SEQ ID NO: 162816 - DNA, 20 bp, Artificial Sequence
  Synthetic oligonucleotide; AAG chr2 60497895 60497914 60497911 +
ggaagtgagccaggtgatag

SEQ ID NO: 162817 - DNA, 20 bp, Artificial Sequence
  Synthetic oligonucleotide; AGG chr2 60497896 60497915 60497912 +
gaagtgagccaggtgataga

SEQ ID NO: 162818 - DNA, 20 bp, Artificial Sequence
  Synthetic oligonucleotide; GGG chr2 60497897 60497916 60497913 +
aagtgagccaggtgatagaa

SEQ ID NO: 162819 - DNA, 20 bp, Artificial Sequence
  Synthetic oligonucleotide; GGG chr2 60497898 60497917 60497914 +
agtgagccaggtgatagaag

SEQ ID NO: 162820 - DNA, 20 bp, Artificial Sequence
  Synthetic oligonucleotide; GGG chr2 60497899 60497918 60497915 +
gtgagccaggtgatagaagg

SEQ ID NO: 162821 - DNA, 20 bp, Artificial Sequence
  Synthetic oligonucleotide; GAG chr2 60497901 60497920 60497917 +
gagccaggtgatagaagggg

SEQ ID NO: 162822 - DNA, 20 bp, Artificial Sequence
  Synthetic oligonucleotide; TGG chr2 60497906 60497925 60497922 +
aggtgatagaagggggagcc

SEQ ID NO: 162823 - DNA, 20 bp, Artificial Sequence
  Synthetic oligonucleotide; TGG chr2 60497923 60497942 60497939 +
gcctggacccaccgcttcat

SEQ ID NO: 162824 - DNA, 20 bp, Artificial Sequence
  Synthetic oligonucleotide; GAG chr2 60497928 60497947 60497944 +
gacccaccgcttcattggcc

SEQ ID NO: 162825 - DNA, 20 bp, Artificial Sequence
  Synthetic oligonucleotide; AGG chr2 60497929 60497948 60497945 +
acccaccgcttcattggccg

SEQ ID NO: 162826 - DNA, 20 bp, Artificial Sequence
  Synthetic oligonucleotide; AAG chr2 60497943 60497962 60497959 +
tggccgaggatgaccccata

SEQ ID NO: 162827 - DNA, 20 bp, Artificial Sequence
  Synthetic oligonucleotide; AGG chr2 60497944 60497963 60497960 +
ggccgaggatgaccccataa

SEQ ID NO: 162828 - DNA, 20 bp, Artificial Sequence
  Synthetic oligonucleotide; CAG chr2 60497948 60497967 60497964 +
gaggatgaccccataaaggt

SEQ ID NO: 162829 - DNA, 20 bp, Artificial Sequence
  Synthetic oligonucleotide; AGG chr2 60497949 60497968 60497965 +
aggatgaccccataaaggtc

SEQ ID NO: 162830 - DNA, 20 bp, Artificial Sequence
  Synthetic oligonucleotide; GGG chr2 60497950 60497969 60497966 +
ggatgaccccataaaggtca

SEQ ID NO: 162831 - DNA, 20 bp, Artificial Sequence
  Synthetic oligonucleotide; CAG chr2 60497958 60497977 60497974 +
ccataaaggtcagggtgttg

SEQ ID NO: 162832 - DNA, 20 bp, Artificial Sequence
  Synthetic oligonucleotide; GAG chr2 60497960 60497979 60497976 +
ataaaggtcagggtgttgca

SEQ ID NO: 162833 - DNA, 20 bp, Artificial Sequence
  Synthetic oligonucleotide; AAG chr2 60497982 60498001 60497998 +
gattgctatgcacaaaatcc

SEQ ID NO: 162834 - DNA, 20 bp, Artificial Sequence
  Synthetic oligonucleotide; GAG chr2 60497984 60498003 60498000 +
ttgctatgcacaaaatccaa

SEQ ID NO: 162835 - DNA, 20 bp, Artificial Sequence
  Synthetic oligonucleotide; AGG chr2 60497985 60498004 60498001 +
tgctatgcacaaaatccaag

SEQ ID NO: 162836 - DNA, 20 bp, Artificial Sequence
  Synthetic oligonucleotide; TGG chr2 60497992 60498011 60498008 +
cacaaaatccaagaggccca

SEQ ID NO: 162837 - DNA, 20 bp, Artificial Sequence
  Synthetic oligonucleotide; GAG chr2 60497994 60498013 60498010 +
caaaatccaagaggcccatg

SEQ ID NO: 162838 - DNA, 20 bp, Artificial Sequence
  Synthetic oligonucleotide; AGG chr2 60497995 60498014 60498011 +
aaaatccaagaggcccatgg

SEQ ID NO: 162839 - DNA, 20 bp, Artificial Sequence
  Synthetic oligonucleotide; TGG chr2 60497998 60498017 60498014 +
atccaagaggcccatggagg

SEQ ID NO: 162840 - DNA, 20 bp, Artificial Sequence
  Synthetic oligonucleotide; GGG chr2 60497999 60498018 60498015 +
tccaagaggcccatggaggt

SEQ ID NO: 162841 - DNA, 20 bp, Artificial Sequence
  Synthetic oligonucleotide; GGG chr2 60498000 60498019 60498016 +
ccaagaggcccatggaggtg

SEQ ID NO: 162842 - DNA, 20 bp, Artificial Sequence
  Synthetic oligonucleotide; GAG chr2 60498002 60498021 60498018 +
aagaggcccatggaggtggg

SEQ ID NO: 162843 - DNA, 20 bp, Artificial Sequence
  Synthetic oligonucleotide; GAG chr2 60498007 60498026 60498023 +
gcccatggaggtggggagat

SEQ ID NO: 162844 - DNA, 20 bp, Artificial Sequence
  Synthetic oligonucleotide; AGG chr2 60498008 60498027 60498024 +
cccatggaggtggggagatg

SEQ ID NO: 162845 - DNA, 20 bp, Artificial Sequence
  Synthetic oligonucleotide; GGG chr2 60498009 60498028 60498025 +
ccatggaggtggggagatga

SEQ ID NO: 162846 - DNA, 20 bp, Artificial Sequence
  Synthetic oligonucleotide; TGG chr2 60498019 60498038 60498035 +
ggggagatgagggacccacc

SEQ ID NO: 162847 - DNA, 20 bp, Artificial Sequence
  Synthetic oligonucleotide; CAG chr2 60498022 60498041 60498038 +
gagatgagggacccacctgg

SEQ ID NO: 162848 - DNA, 20 bp, Artificial Sequence
  Synthetic oligonucleotide; AAG chr2 60498031 60498050 60498047 +
gacccacctggcagaccctc

SEQ ID NO: 162849 - DNA, 20 bp, Artificial Sequence
  Synthetic oligonucleotide; GAG chr2 60498033 60498052 60498049 +
cccacctggcagaccctcaa

SEQ ID NO: 162850 - DNA, 20 bp, Artificial Sequence
  Synthetic oligonucleotide; CAG chr2 60498036 60498055 60498052 +
acctggcagaccctcaagag

SEQ ID NO: 162851 - DNA, 20 bp, Artificial Sequence
  Synthetic oligonucleotide; AGG chr2 60498037 60498056 60498053 +
cctggcagaccctcaagagc

SEQ ID NO: 162852 - DNA, 20 bp, Artificial Sequence
  Synthetic oligonucleotide; GGG chr2 60498038 60498057 60498054 +
ctggcagaccctcaagagca

SEQ ID NO: 162853 - DNA, 20 bp, Artificial Sequence
  Synthetic oligonucleotide; GGG chr2 60498039 60498058 60498055 +
tggcagaccctcaagagcag

SEQ ID NO: 162854 - DNA, 20 bp, Artificial Sequence
  Synthetic oligonucleotide; TGG chr2 60498051 60498070 60498067 +
aagagcaggggtcttctctt

SEQ ID NO: 162855 - DNA, 20 bp, Artificial Sequence
  Synthetic oligonucleotide; GGG chr2 60498052 60498071 60498068 +
agagcaggggtcttctcttt

SEQ ID NO: 162856 - DNA, 20 bp, Artificial Sequence
  Synthetic oligonucleotide; GGG chr2 60498053 60498072 60498069 +
gagcaggggtcttctctttg

SEQ ID NO: 162857 - DNA, 20 bp, Artificial Sequence
  Synthetic oligonucleotide; GGG chr2 60498054 60498073 60498070 +
agcaggggtcttctctttgg

SEQ ID NO: 162858 - DNA, 20 bp, Artificial Sequence
  Synthetic oligonucleotide; GAG chr2 60498056 60498075 60498072 +
caggggtcttctctttgggg

SEQ ID NO: 162859 - DNA, 20 bp, Artificial Sequence
  Synthetic oligonucleotide; AGG chr2 60498057 60498076 60498073 +
aggggtcttctctttggggg

SEQ ID NO: 162860 - DNA, 20 bp, Artificial Sequence
  Synthetic oligonucleotide; TAG chr2 60498070 60498089 60498086 +
ttgggggaggacatcactct

SEQ ID NO: 162861 - DNA, 20 bp, Artificial Sequence
  Synthetic oligonucleotide; CAG chr2 60498073 60498092 60498089 +
ggggaggacatcactcttag

SEQ ID NO: 162862 - DNA, 20 bp, Artificial Sequence
  Synthetic oligonucleotide; AGG chr2 60498074 60498093 60498090 +
gggaggacatcactcttagc

SEQ ID NO: 162863 - DNA, 20 bp, Artificial Sequence
  Synthetic oligonucleotide; GGG chr2 60498075 60498094 60498091 +
ggaggacatcactcttagca

SEQ ID NO: 162864 - DNA, 20 bp, Artificial Sequence
  Synthetic oligonucleotide; TGG chr2 60498079 60498098 60498095 +
gacatcactcttagcagggc

SEQ ID NO: 162865 - DNA, 20 bp, Artificial Sequence
  Synthetic oligonucleotide; GGG chr2 60498080 60498099 60498096 +
acatcactcttagcagggct

SEQ ID NO: 162866 - DNA, 20 bp, Artificial Sequence
  Synthetic oligonucleotide; GGG chr2 60498081 60498100 60498097 +
catcactcttagcagggctg

SEQ ID NO: 162867 - DNA, 20 bp, Artificial Sequence
  Synthetic oligonucleotide; GAG chr2 60498085 60498104 60498101 +
actcttagcagggctggggt

SEQ ID NO: 162868 - DNA, 20 bp, Artificial Sequence
  Synthetic oligonucleotide; AAG chr2 60498092 60498111 60498108 +
gcagggctggggtgagtcaa

SEQ ID NO: 162869 - DNA, 20 bp, Artificial Sequence
  Synthetic oligonucleotide; TGG chr2 60498097 60498116 60498113 +
gctggggtgagtcaaaagtc

SEQ ID NO: 162870 - DNA, 20 bp, Artificial Sequence
  Synthetic oligonucleotide; GGG chr2 60498098 60498117 60498114 +
ctggggtgagtcaaaagtct

SEQ ID NO: 162871 - DNA, 20 bp, Artificial Sequence
  Synthetic oligonucleotide; GAG chr2 60498100 60498119 60498116 +
ggggtgagtcaaaagtctgg

SEQ ID NO: 162872 - DNA, 20 bp, Artificial Sequence
  Synthetic oligonucleotide; TGG chr2 60498105 60498124 60498121 +
gagtcaaaagtctgggagaa

SEQ ID NO: 162873 - DNA, 20 bp, Artificial Sequence
  Synthetic oligonucleotide; GAG chr2 60498107 60498126 60498123 +
gtcaaaagtctgggagaatg

SEQ ID NO: 162874 - DNA, 20 bp, Artificial Sequence
  Synthetic oligonucleotide; AGG chr2 60498108 60498127 60498124 +
tcaaaagtctgggagaatgg

SEQ ID NO: 162875 - DNA, 20 bp, Artificial Sequence
  Synthetic oligonucleotide; TGG chr2 60498113 60498132 60498129 +
agtctgggagaatggaggtg

SEQ ID NO: 162876 - DNA, 20 bp, Artificial Sequence
  Synthetic oligonucleotide; GAG chr2 60498115 60498134 60498131 +
tctgggagaatggaggtgtg

SEQ ID NO: 162877 - DNA, 20 bp, Artificial Sequence
  Synthetic oligonucleotide; AGG chr2 60498116 60498135 60498132 +
ctgggagaatggaggtgtgg

SEQ ID NO: 162878 - DNA, 20 bp, Artificial Sequence
  Synthetic oligonucleotide; GGG chr2 60498117 60498136 60498133 +
tgggagaatggaggtgtgga

SEQ ID NO: 162879 - DNA, 20 bp, Artificial Sequence
  Synthetic oligonucleotide; GGG chr2 60498118 60498137 60498134 +
gggagaatggaggtgtggag

SEQ ID NO: 162880 - DNA, 20 bp, Artificial Sequence
  Synthetic oligonucleotide; TGG chr2 60498126 60498145 60498142 +
ggaggtgtggaggggataac

SEQ ID NO: 162881 - DNA, 20 bp, Artificial Sequence
  Synthetic oligonucleotide; GGG chr2 60498127 60498146 60498143 +
gaggtgtggaggggataact

SEQ ID NO: 162882 - DNA, 20 bp, Artificial Sequence
  Synthetic oligonucleotide; CAG chr2 60498131 60498150 60498147 +
tgtggaggggataactgggt

SEQ ID NO: 162883 - DNA, 20 bp, Artificial Sequence
  Synthetic oligonucleotide; AAG chr2 60498139 60498158 60498155 +
ggataactgggtcagacccc

SEQ ID NO: 162884 - DNA, 20 bp, Artificial Sequence
  Synthetic oligonucleotide; CAG chr2 60498142 60498161 60498158 +
taactgggtcagaccccaag

SEQ ID NO: 162885 - DNA, 20 bp, Artificial Sequence
  Synthetic oligonucleotide; AGG chr2 60498143 60498162 60498159 +
aactgggtcagaccccaagc

SEQ ID NO: 162886 - DNA, 20 bp, Artificial Sequence
  Synthetic oligonucleotide; AAG chr2 60498146 60498165 60498162 +
tgggtcagaccccaagcagg

SEQ ID NO: 162887 - DNA, 20 bp, Artificial Sequence
  Synthetic oligonucleotide; AGG chr2 60498147 60498166 60498163 +
gggtcagaccccaagcagga

SEQ ID NO: 162888 - DNA, 20 bp, Artificial Sequence
  Synthetic oligonucleotide; GGG chr2 60498148 60498167 60498164 +
ggtcagaccccaagcaggaa

SEQ ID NO: 162889 - DNA, 20 bp, Artificial Sequence
  Synthetic oligonucleotide; TAG chr2 60498159 60498178 60498175 +
aagcaggaagggcctctatg

SEQ ID NO: 162890 - DNA, 20 bp, Artificial Sequence
  Synthetic oligonucleotide; CGG chr2 60498163 60498182 60498179 +
aggaagggcctctatgtaga

SEQ ID NO: 162891 - DNA, 20 bp, Artificial Sequence
  Synthetic oligonucleotide; GGG chr2 60498164 60498183 60498180 +
ggaagggcctctatgtagac

SEQ ID NO: 162892 - DNA, 20 bp, Artificial Sequence
  Synthetic oligonucleotide; TGG chr2 60498171 60498190 60498187 +
cctctatgtagacgggtgtg

SEQ ID NO: 162893 - DNA, 20 bp, Artificial Sequence
  Synthetic oligonucleotide; AAG chr2 60498180 60498199 60498196 +
agacgggtgtgtggctcctt

SEQ ID NO: 162894 - DNA, 20 bp, Artificial Sequence
  Synthetic oligonucleotide; AGG chr2 60498181 60498200 60498197 +
gacgggtgtgtggctcctta

SEQ ID NO: 162895 - DNA, 20 bp, Artificial Sequence
  Synthetic oligonucleotide; CAG chr2 60498189 60498208 60498205 +
tgtggctccttaaggtgacc

SEQ ID NO: 162896 - DNA, 20 bp, Artificial Sequence
  Synthetic oligonucleotide; CAG chr2 60498192 60498211 60498208 +
ggctccttaaggtgacccag

SEQ ID NO: 162897 - DNA, 20 bp, Artificial Sequence
  Synthetic oligonucleotide; TGG chr2 60498198 60498217 60498214 +
ttaaggtgacccagcagccc

SEQ ID NO: 162898 - DNA, 20 bp, Artificial Sequence
  Synthetic oligonucleotide; GGG chr2 60498199 60498218 60498215 +
taaggtgacccagcagccct

SEQ ID NO: 162899 - DNA, 20 bp, Artificial Sequence
  Synthetic oligonucleotide; CAG chr2 60498204 60498223 60498220 +
tgacccagcagccctgggca

SEQ ID NO: 162900 - DNA, 20 bp, Artificial Sequence
  Synthetic oligonucleotide; AAG chr2 60498207 60498226 60498223 +
cccagcagccctgggcacag

SEQ ID NO: 162901 - DNA, 20 bp, Artificial Sequence
  Synthetic oligonucleotide; TGG chr2 60498210 60498229 60498226 +
agcagccctgggcacagaag

SEQ ID NO: 162902 - DNA, 20 bp, Artificial Sequence
  Synthetic oligonucleotide; TGG chr2 60498217 60498236 60498233 +
ctgggcacagaagtggtgcg

SEQ ID NO: 162903 - DNA, 20 bp, Artificial Sequence
  Synthetic oligonucleotide; GAG chr2 60498219 60498238 60498235 +
gggcacagaagtggtgcgtg

SEQ ID NO: 162904 - DNA, 20 bp, Artificial Sequence
  Synthetic oligonucleotide; CAG chr2 60498232 60498251 60498248 +
gtgcgtggagataatgccaa

SEQ ID NO: 162905 - DNA, 20 bp, Artificial Sequence
  Synthetic oligonucleotide; CAG chr2 60498242 60498261 60498258 +
ataatgccaacagtgataac

SEQ ID NO: 162906 - DNA, 20 bp, Artificial Sequence
  Synthetic oligonucleotide; CAG chr2 60498245 60498264 60498261 +
atgccaacagtgataaccag

SEQ ID NO: 162907 - DNA, 20 bp, Artificial Sequence
  Synthetic oligonucleotide; AGG chr2 60498246 60498265 60498262 +
tgccaacagtgataaccagc

SEQ ID NO: 162908 - DNA, 20 bp, Artificial Sequence
  Synthetic oligonucleotide; GGG chr2 60498247 60498266 60498263 +
gccaacagtgataaccagca

SEQ ID NO: 162909 - DNA, 20 bp, Artificial Sequence
  Synthetic oligonucleotide; CAG chr2 60498255 60498274 60498271 +
tgataaccagcagggcctgt

SEQ ID NO: 162910 - DNA, 20 bp, Artificial Sequence
  Synthetic oligonucleotide; AAG chr2 60498258 60498277 60498274 +
taaccagcagggcctgtcag

SEQ ID NO: 162911 - DNA, 20 bp, Artificial Sequence
  Synthetic oligonucleotide; GAG chr2 60498260 60498279 60498276 +
accagcagggcctgtcagaa

SEQ ID NO: 162912 - DNA, 20 bp, Artificial Sequence
  Synthetic oligonucleotide; AGG chr2 60498261 60498280 60498277 +
ccagcagggcctgtcagaag

SEQ ID NO: 162913 - DNA, 20 bp, Artificial Sequence
  Synthetic oligonucleotide; TGG chr2 60498267 60498286 60498283 +
gggcctgtcagaagaggccc

SEQ ID NO: 162914 - DNA, 20 bp, Artificial Sequence
  Synthetic oligonucleotide; AAG chr2 60498276 60498295 60498292 +
agaagaggccctggacactg

SEQ ID NO: 162915 - DNA, 20 bp, Artificial Sequence
  Synthetic oligonucleotide; AGG chr2 60498277 60498296 60498293 +
gaagaggccctggacactga

SEQ ID NO: 162916 - DNA, 20 bp, Artificial Sequence
  Synthetic oligonucleotide; TGG chr2 60498281 60498300 60498297 +
aggccctggacactgaaggc

SEQ ID NO: 162917 - DNA, 20 bp, Artificial Sequence
  Synthetic oligonucleotide; GGG chr2 60498282 60498301 60498298 +
ggccctggacactgaaggct

SEQ ID NO: 162918 - DNA, 20 bp, Artificial Sequence
  Synthetic oligonucleotide; CAG chr2 60498287 60498306 60498303 +
tggacactgaaggctgggca

SEQ ID NO: 162919 - DNA, 20 bp, Artificial Sequence
  Synthetic oligonucleotide; TGG chr2 60498293 60498312 60498309 +
ctgaaggctgggcacagcct

SEQ ID NO: 162920 - DNA, 20 bp, Artificial Sequence
  Synthetic oligonucleotide; GGG chr2 60498294 60498313 60498310 +
tgaaggctgggcacagcctt

SEQ ID NO: 162921 - DNA, 20 bp, Artificial Sequence
  Synthetic oligonucleotide; GGG chr2 60498295 60498314 60498311 +
gaaggctgggcacagccttg

SEQ ID NO: 162922 - DNA, 20 bp, Artificial Sequence
  Synthetic oligonucleotide; CAG chr2 60498306 60498325 60498322 +
acagccttggggaccgctca

SEQ ID NO: 162923 - DNA, 20 bp, Artificial Sequence
  Synthetic oligonucleotide; AGG chr2 60498307 60498326 60498323 +
cagccttggggaccgctcac

SEQ ID NO: 162924 - DNA, 20 bp, Artificial Sequence
  Synthetic oligonucleotide; CAG chr2 60498315 60498334 60498331 +
gggaccgctcacaggacatg

SEQ ID NO: 162925 - DNA, 20 bp, Artificial Sequence
  Synthetic oligonucleotide; CAG chr2 60498318 60498337 60498334 +
accgctcacaggacatgcag

SEQ ID NO: 162926 - DNA, 20 bp, Artificial Sequence
  Synthetic oligonucleotide; CAG chr2 60498354 60498373 60498370 +
ctccctaccgcgacccctat

SEQ ID NO: 162927 - DNA, 20 bp, Artificial Sequence
  Synthetic oligonucleotide; AAG chr2 60498365 60498384 60498381 +
gacccctatcagtgccgacc

SEQ ID NO: 162928 - DNA, 20 bp, Artificial Sequence
  Synthetic oligonucleotide; AAG chr2 60498373 60498392 60498389 +
tcagtgccgaccaagcacac

SEQ ID NO: 162929 - DNA, 20 bp, Artificial Sequence
  Synthetic oligonucleotide; CAG chr2 60498385 60498404 60498401 +
aagcacacaagatgcacacc

SEQ ID NO: 162930 - DNA, 20 bp, Artificial Sequence
  Synthetic oligonucleotide; AGG chr2 60498386 60498405 60498402 +
agcacacaagatgcacaccc

SEQ ID NO: 162931 - DNA, 20 bp, Artificial Sequence
  Synthetic oligonucleotide; TGG chr2 60498390 60498409 60498406 +
cacaagatgcacacccaggc

SEQ ID NO: 162932 - DNA, 20 bp, Artificial Sequence
  Synthetic oligonucleotide; GGG chr2 60498391 60498410 60498407 +
acaagatgcacacccaggct

SEQ ID NO: 162933 - DNA, 20 bp, Artificial Sequence
  Synthetic oligonucleotide; TGG chr2 60498395 60498414 60498411 +
gatgcacacccaggctgggc

SEQ ID NO: 162934 - DNA, 20 bp, Artificial Sequence
  Synthetic oligonucleotide; CAG chr2 60498399 60498418 60498415 +
cacacccaggctgggctgga

SEQ ID NO: 162935 - DNA, 20 bp, Artificial Sequence
  Synthetic oligonucleotide; GAG chr2 60498401 60498420 60498417 +
cacccaggctgggctggaca

SEQ ID NO: 162936 - DNA, 20 bp, Artificial Sequence
  Synthetic oligonucleotide; AGG chr2 60498402 60498421 60498418 +
acccaggctgggctggacag

SEQ ID NO: 162937 - DNA, 20 bp, Artificial Sequence
  Synthetic oligonucleotide; GGG chr2 60498403 60498422 60498419 +
cccaggctgggctggacaga

SEQ ID NO: 162938 - DNA, 20 bp, Artificial Sequence
  Synthetic oligonucleotide; GGG chr2 60498404 60498423 60498420 +
ccaggctgggctggacagag

SEQ ID NO: 162939 - DNA, 20 bp, Artificial Sequence
  Synthetic oligonucleotide; AAG chr2 60498413 60498432 60498429 +
gctggacagaggggtcccac

SEQ ID NO: 162940 - DNA, 20 bp, Artificial Sequence
  Synthetic oligonucleotide; CAG chr2 60498420 60498439 60498436 +
agaggggtcccacaagatca

SEQ ID NO: 162941 - DNA, 20 bp, Artificial Sequence
  Synthetic oligonucleotide; AGG chr2 60498421 60498440 60498437 +
gaggggtcccacaagatcac

SEQ ID NO: 162942 - DNA, 20 bp, Artificial Sequence
  Synthetic oligonucleotide; GGG chr2 60498422 60498441 60498438 +
aggggtcccacaagatcaca

SEQ ID NO: 162943 - DNA, 20 bp, Artificial Sequence
  Synthetic oligonucleotide; GAG chr2 60498433 60498452 60498449 +
aagatcacagggtgtgccct

SEQ ID NO: 162944 - DNA, 20 bp, Artificial Sequence
  Synthetic oligonucleotide; AAG chr2 60498436 60498455 60498452 +
atcacagggtgtgccctgag

SEQ ID NO: 162945 - DNA, 20 bp, Artificial Sequence
  Synthetic oligonucleotide; AGG chr2 60498437 60498456 60498453 +
tcacagggtgtgccctgaga

SEQ ID NO: 162946 - DNA, 20 bp, Artificial Sequence
  Synthetic oligonucleotide; TGG chr2 60498440 60498459 60498456 +
cagggtgtgccctgagaagg

SEQ ID NO: 162947 - DNA, 20 bp, Artificial Sequence
  Synthetic oligonucleotide; GGG chr2 60498441 60498460 60498457 +
agggtgtgccctgagaaggt

SEQ ID NO: 162948 - DNA, 20 bp, Artificial Sequence
  Synthetic oligonucleotide; GGG chr2 60498442 60498461 60498458 +
gggtgtgccctgagaaggtg

SEQ ID NO: 162949 - DNA, 20 bp, Artificial Sequence
  Synthetic oligonucleotide; GAG chr2 60498444 60498463 60498460 +
gtgtgccctgagaaggtggg

SEQ ID NO: 162950 - DNA, 20 bp, Artificial Sequence
  Synthetic oligonucleotide; CAG chr2 60498451 60498470 60498467 +
ctgagaaggtggggagctca

SEQ ID NO: 162951 - DNA, 20 bp, Artificial Sequence
  Synthetic oligonucleotide; AAG chr2 60498459 60498478 60498475 +
gtggggagctcacagcctcc

SEQ ID NO: 162952 - DNA, 20 bp, Artificial Sequence
  Synthetic oligonucleotide; TGG chr2 60498475 60498494 60498491 +
ctccaagcattgcatcatcc

SEQ ID NO: 162953 - DNA, 20 bp, Artificial Sequence
  Synthetic oligonucleotide; CAG chr2 60498481 60498500 60498497 +
gcattgcatcatcctggtac

SEQ ID NO: 162954 - DNA, 20 bp, Artificial Sequence
  Synthetic oligonucleotide; AGG chr2 60498482 60498501 60498498 +
cattgcatcatcctggtacc

SEQ ID NO: 162955 - DNA, 20 bp, Artificial Sequence
  Synthetic oligonucleotide; AAG chr2 60498485 60498504 60498501 +
tgcatcatcctggtaccagg

SEQ ID NO: 162956 - DNA, 20 bp, Artificial Sequence
  Synthetic oligonucleotide; AGG chr2 60498486 60498505 60498502 +
gcatcatcctggtaccagga

SEQ ID NO: 162957 - DNA, 20 bp, Artificial Sequence
  Synthetic oligonucleotide; TGG chr2 60498492 60498511 60498508 +
tcctggtaccaggaaggcaa

SEQ ID NO: 162958 - DNA, 20 bp, Artificial Sequence
  Synthetic oligonucleotide; GGG chr2 60498493 60498512 60498509 +
cctggtaccaggaaggcaat

SEQ ID NO: 162959 - DNA, 20 bp, Artificial Sequence
  Synthetic oligonucleotide; TAG chr2 60498520 60498539 60498536 +
cccatacccacttcccttcc

SEQ ID NO: 162960 - DNA, 20 bp, Artificial Sequence
  Synthetic oligonucleotide; TGG chr2 60498526 60498545 60498542 +
cccacttcccttcctagaat

SEQ ID NO: 162961 - DNA, 20 bp, Artificial Sequence
  Synthetic oligonucleotide; TGG chr2 60498531 60498550 60498547 +
ttcccttcctagaattggcc

SEQ ID NO: 162962 - DNA, 20 bp, Artificial Sequence
  Synthetic oligonucleotide; GGG chr2 60498532 60498551 60498548 +
tcccttcctagaattggcct

SEQ ID NO: 162963 - DNA, 20 bp, Artificial Sequence
  Synthetic oligonucleotide; TAG chr2 60498547 60498566 60498563 +
ggcctgggacattcattatt

SEQ ID NO: 162964 - DNA, 20 bp, Artificial Sequence
  Synthetic oligonucleotide; TGG chr2 60498557 60498576 60498573 +
attcattatttagccacctc

SEQ ID NO: 162965 - DNA, 20 bp, Artificial Sequence
  Synthetic oligonucleotide; TAG chr2 60498587 60498606 60498603 +
atttgtttttcaaattttaa

SEQ ID NO: 162966 - DNA, 20 bp, Artificial Sequence
  Synthetic oligonucleotide; TAG chr2 60498594 60498613 60498610 +
tttcaaattttaatagcaaa

SEQ ID NO: 162967 - DNA, 20 bp, Artificial Sequence
  Synthetic oligonucleotide; AGG chr2 60498595 60498614 60498611 +
ttcaaattttaatagcaaat

SEQ ID NO: 162968 - DNA, 20 bp, Artificial Sequence
  Synthetic oligonucleotide; TAG chr2 60498600 60498619 60498616 +
attttaatagcaaataggct

SEQ ID NO: 162969 - DNA, 20 bp, Artificial Sequence
  Synthetic oligonucleotide; TGG chr2 60498608 60498627 60498624 +
agcaaataggcttagtgtgc

SEQ ID NO: 162970 - DNA, 20 bp, Artificial Sequence
  Synthetic oligonucleotide; GGG chr2 60498609 60498628 60498625 +
gcaaataggcttagtgtgct

SEQ ID NO: 162971 - DNA, 20 bp, Artificial Sequence
  Synthetic oligonucleotide; CAG chr2 60498612 60498631 60498628 +
aataggcttagtgtgctggg

SEQ ID NO: 162972 - DNA, 20 bp, Artificial Sequence
  Synthetic oligonucleotide; GAG chr2 60498614 60498633 60498630 +
taggcttagtgtgctgggca

SEQ ID NO: 162973 - DNA, 20 bp, Artificial Sequence
  Synthetic oligonucleotide; GAG chr2 60498619 60498638 60498635 +
ttagtgtgctgggcagagct

SEQ ID NO: 162974 - DNA, 20 bp, Artificial Sequence
  Synthetic oligonucleotide; CAG chr2 60498622 60498641 60498638 +
gtgtgctgggcagagctgag

SEQ ID NO: 162975 - DNA, 20 bp, Artificial Sequence
  Synthetic oligonucleotide; GAG chr2 60498624 60498643 60498640 +
gtgctgggcagagctgagca

SEQ ID NO: 162976 - DNA, 20 bp, Artificial Sequence
  Synthetic oligonucleotide; AGG chr2 60498625 60498644 60498641 +
tgctgggcagagctgagcag

SEQ ID NO: 162977 - DNA, 20 bp, Artificial Sequence
  Synthetic oligonucleotide; AAG chr2 60498655 60498674 60498671 +
acccctctacctactcacat

SEQ ID NO: 162978 - DNA, 20 bp, Artificial Sequence
  Synthetic oligonucleotide; CAG chr2 60498660 60498679 60498676 +
tctacctactcacataagat

SEQ ID NO: 162979 - DNA, 20 bp, Artificial Sequence
  Synthetic oligonucleotide; AAG chr2 60498665 60498684 60498681 +
ctactcacataagatcagta

SEQ ID NO: 162980 - DNA, 20 bp, Artificial Sequence
  Synthetic oligonucleotide; GAG chr2 60498667 60498686 60498683 +
actcacataagatcagtaaa

SEQ ID NO: 162981 - DNA, 20 bp, Artificial Sequence
  Synthetic oligonucleotide; AAG chr2 60498670 60498689 60498686 +
cacataagatcagtaaagag

SEQ ID NO: 162982 - DNA, 20 bp, Artificial Sequence
  Synthetic oligonucleotide; AGG chr2 60498671 60498690 60498687 +
acataagatcagtaaagaga

SEQ ID NO: 162983 - DNA, 20 bp, Artificial Sequence
  Synthetic oligonucleotide; AAG chr2 60498674 60498693 60498690 +
taagatcagtaaagagaagg

SEQ ID NO: 162984 - DNA, 20 bp, Artificial Sequence
  Synthetic oligonucleotide; CAG chr2 60498677 60498696 60498693 +
gatcagtaaagagaaggaag

SEQ ID NO: 162985 - DNA, 20 bp, Artificial Sequence
  Synthetic oligonucleotide; AGG chr2 60498678 60498697 60498694 +
atcagtaaagagaaggaagc

SEQ ID NO: 162986 - DNA, 20 bp, Artificial Sequence
  Synthetic oligonucleotide; CAG chr2 60498681 60498700 60498697 +
agtaaagagaaggaagcagg

SEQ ID NO: 162987 - DNA, 20 bp, Artificial Sequence
  Synthetic oligonucleotide; GAG chr2 60498686 60498705 60498702 +
agagaaggaagcaggcagat

SEQ ID NO: 162988 - DNA, 20 bp, Artificial Sequence
  Synthetic oligonucleotide; AGG chr2 60498687 60498706 60498703 +
gagaaggaagcaggcagatg

SEQ ID NO: 162989 - DNA, 20 bp, Artificial Sequence
  Synthetic oligonucleotide; AAG chr2 60498694 60498713 60498710 +
aagcaggcagatgaggtgac

SEQ ID NO: 162990 - DNA, 20 bp, Artificial Sequence
  Synthetic oligonucleotide; AGG chr2 60498695 60498714 60498711 +
agcaggcagatgaggtgaca

SEQ ID NO: 162991 - DNA, 20 bp, Artificial Sequence
  Synthetic oligonucleotide; GGG chr2 60498696 60498715 60498712 +
gcaggcagatgaggtgacaa

SEQ ID NO: 162992 - DNA, 20 bp, Artificial Sequence
  Synthetic oligonucleotide; GGG chr2 60498697 60498716 60498713 +
caggcagatgaggtgacaag

SEQ ID NO: 162993 - DNA, 20 bp, Artificial Sequence
  Synthetic oligonucleotide; GAG chr2 60498699 60498718 60498715 +
ggcagatgaggtgacaaggg

SEQ ID NO: 162994 - DNA, 20 bp, Artificial Sequence
  Synthetic oligonucleotide; CAG chr2 60498706 60498725 60498722 +
gaggtgacaaggggagaaac

SEQ ID NO: 162995 - DNA, 20 bp, Artificial Sequence
  Synthetic oligonucleotide; GAG chr2 60498710 60498729 60498726 +
tgacaaggggagaaaccagt

SEQ ID NO: 162996 - DNA, 20 bp, Artificial Sequence
  Synthetic oligonucleotide; AGG chr2 60498711 60498730 60498727 +
gacaaggggagaaaccagtg

SEQ ID NO: 162997 - DNA, 20 bp, Artificial Sequence
  Synthetic oligonucleotide; TAG chr2 60498721 60498740 60498737 +
gaaaccagtgaggtcatcta

SEQ ID NO: 162998 - DNA, 20 bp, Artificial Sequence
  Synthetic oligonucleotide; AGG chr2 60498722 60498741 60498738 +
aaaccagtgaggtcatctat

SEQ ID NO: 162999 - DNA, 20 bp, Artificial Sequence
  Synthetic oligonucleotide; AAG chr2 60498728 60498747 60498744 +
gtgaggtcatctataggtcc

SEQ ID NO: 163000 - DNA, 20 bp, Artificial Sequence
  Synthetic oligonucleotide; CAG chr2 60498737 60498756 60498753 +
tctataggtccaagttcgta

SEQ ID NO: 163001 - DNA, 20 bp, Artificial Sequence
  Synthetic oligonucleotide; CAG chr2 60498743 60498762 60498759 +
ggtccaagttcgtacagacc

SEQ ID NO: 163002 - DNA, 20 bp, Artificial Sequence
  Synthetic oligonucleotide; CAG chr2 60498747 60498766 60498763 +
caagttcgtacagacccagc

SEQ ID NO: 163003 - DNA, 20 bp, Artificial Sequence
  Synthetic oligonucleotide; CAG chr2 60498755 60498774 60498771 +
tacagacccagccagactgc

SEQ ID NO: 163004 - DNA, 20 bp, Artificial Sequence
  Synthetic oligonucleotide; GAG chr2 60498764 60498783 60498780 +
agccagactgccagttctct

SEQ ID NO: 163005 - DNA, 20 bp, Artificial Sequence
  Synthetic oligonucleotide; AGG chr2 60498765 60498784 60498781 +
gccagactgccagttctctg

SEQ ID NO: 163006 - DNA, 20 bp, Artificial Sequence
  Synthetic oligonucleotide; GAG chr2 60498767 60498786 60498783 +
cagactgccagttctctgag

SEQ ID NO: 163007 - DNA, 20 bp, Artificial Sequence
  Synthetic oligonucleotide; TAG chr2 60498771 60498790 60498787 +
ctgccagttctctgaggagc

SEQ ID NO: 163008 - DNA, 20 bp, Artificial Sequence
  Synthetic oligonucleotide; GAG chr2 60498773 60498792 60498789 +
gccagttctctgaggagcta

SEQ ID NO: 163009 - DNA, 20 bp, Artificial Sequence
  Synthetic oligonucleotide; TGG chr2 60498781 60498800 60498797 +
tctgaggagctagagacttg

SEQ ID NO: 163010 - DNA, 20 bp, Artificial Sequence
  Synthetic oligonucleotide; AAG chr2 60498787 60498806 60498803 +
gagctagagacttgtggctt

SEQ ID NO: 163011 - DNA, 20 bp, Artificial Sequence
  Synthetic oligonucleotide; AGG chr2 60498788 60498807 60498804 +
agctagagacttgtggctta

SEQ ID NO: 163012 - DNA, 20 bp, Artificial Sequence
  Synthetic oligonucleotide; AAG chr2 60498791 60498810 60498807 +
tagagacttgtggcttaagg

SEQ ID NO: 163013 - DNA, 20 bp, Artificial Sequence
  Synthetic oligonucleotide; TGG chr2 60498803 60498822 60498819 +
gcttaaggaagcctctctga

SEQ ID NO: 163014 - DNA, 20 bp, Artificial Sequence
  Synthetic oligonucleotide; CAG chr2 60498868 60498887 60498884 +
ctgtaaatcttgatcaaact

SEQ ID NO: 163015 - DNA, 20 bp, Artificial Sequence
  Synthetic oligonucleotide; CAG chr2 60498889 60498908 60498905 +
agatgactgtccaactcatc

SEQ ID NO: 163016 - DNA, 20 bp, Artificial Sequence
  Synthetic oligonucleotide; TAG chr2 60498909 60498928 60498925 +
cagaaactacgtttgtctaa

SEQ ID NO: 163017 - DNA, 20 bp, Artificial Sequence
  Synthetic oligonucleotide; CAG chr2 60498914 60498933 60498930 +
actacgtttgtctaatagaa

SEQ ID NO: 163018 - DNA, 20 bp, Artificial Sequence
  Synthetic oligonucleotide; AGG chr2 60498915 60498934 60498931 +
ctacgtttgtctaatagaac

SEQ ID NO: 163019 - DNA, 20 bp, Artificial Sequence
  Synthetic oligonucleotide; AAG chr2 60498918 60498937 60498934 +
cgtttgtctaatagaacagg

SEQ ID NO: 163020 - DNA, 20 bp, Artificial Sequence
  Synthetic oligonucleotide; CAG chr2 60498921 60498940 60498937 +
ttgtctaatagaacaggaag

SEQ ID NO: 163021 - DNA, 20 bp, Artificial Sequence
  Synthetic oligonucleotide; AGG chr2 60498922 60498941 60498938 +
tgtctaatagaacaggaagc

SEQ ID NO: 163022 - DNA, 20 bp, Artificial Sequence
  Synthetic oligonucleotide; TGG chr2 60498925 60498944 60498941 +
ctaatagaacaggaagcagg

SEQ ID NO: 163023 - DNA, 20 bp, Artificial Sequence
  Synthetic oligonucleotide; TGG chr2 60498928 60498947 60498944 +
atagaacaggaagcaggtgg

SEQ ID NO: 163024 - DNA, 20 bp, Artificial Sequence
  Synthetic oligonucleotide; TGG chr2 60498931 60498950 60498947 +
gaacaggaagcaggtggtgg

SEQ ID NO: 163025 - DNA, 20 bp, Artificial Sequence
  Synthetic oligonucleotide; TGG chr2 60498934 60498953 60498950 +
caggaagcaggtggtggtgg

SEQ ID NO: 163026 - DNA, 20 bp, Artificial Sequence
  Synthetic oligonucleotide; GGG chr2 60498935 60498954 60498951 +
aggaagcaggtggtggtggt

SEQ ID NO: 163027 - DNA, 20 bp, Artificial Sequence
  Synthetic oligonucleotide; TGG chr2 60498938 60498957 60498954 +
aagcaggtggtggtggtggg

SEQ ID NO: 163028 - DNA, 20 bp, Artificial Sequence
  Synthetic oligonucleotide; TGG chr2 60498941 60498960 60498957 +
caggtggtggtggtgggtgg

SEQ ID NO: 163029 - DNA, 20 bp, Artificial Sequence
  Synthetic oligonucleotide; GGG chr2 60498942 60498961 60498958 +
aggtggtggtggtgggtggt

SEQ ID NO: 163030 - DNA, 20 bp, Artificial Sequence
  Synthetic oligonucleotide; GGG chr2 60498943 60498962 60498959 +
ggtggtggtggtgggtggtg

SEQ ID NO: 163031 - DNA, 20 bp, Artificial Sequence
  Synthetic oligonucleotide; GGG chr2 60498944 60498963 60498960 +
gtggtggtggtgggtggtgg

SEQ ID NO: 163032 - DNA, 20 bp, Artificial Sequence
  Synthetic oligonucleotide; GGG chr2 60498945 60498964 60498961 +
tggtggtggtgggtggtggg

SEQ ID NO: 163033 - DNA, 20 bp, Artificial Sequence
  Synthetic oligonucleotide; GGG chr2 60498946 60498965 60498962 +
ggtggtggtgggtggtgggg

SEQ ID NO: 163034 - DNA, 20 bp, Artificial Sequence
  Synthetic oligonucleotide; GAG chr2 60498956 60498975 60498972 +
ggtggtgggggggcattgat

SEQ ID NO: 163035 - DNA, 20 bp, Artificial Sequence
  Synthetic oligonucleotide; GAG chr2 60498958 60498977 60498974 +
tggtgggggggcattgatga

SEQ ID NO: 163036 - DNA, 20 bp, Artificial Sequence
  Synthetic oligonucleotide; AGG chr2 60498959 60498978 60498975 +
ggtgggggggcattgatgag

SEQ ID NO: 163037 - DNA, 20 bp, Artificial Sequence
  Synthetic oligonucleotide; CAG chr2 60498962 60498981 60498978 +
gggggggcattgatgagagg

SEQ ID NO: 163038 - DNA, 20 bp, Artificial Sequence
  Synthetic oligonucleotide; AGG chr2 60498963 60498982 60498979 +
ggggggcattgatgagaggc

SEQ ID NO: 163039 - DNA, 20 bp, Artificial Sequence
  Synthetic oligonucleotide; GGG chr2 60498964 60498983 60498980 +
gggggcattgatgagaggca

SEQ ID NO: 163040 - DNA, 20 bp, Artificial Sequence
  Synthetic oligonucleotide; CAG chr2 60498968 60498987 60498984 +
gcattgatgagaggcagggc

SEQ ID NO: 163041 - DNA, 20 bp, Artificial Sequence
  Synthetic oligonucleotide; CAG chr2 60499013 60499032 60499029 +
ccactgattctgtccccaca

SEQ ID NO: 163042 - DNA, 20 bp, Artificial Sequence
  Synthetic oligonucleotide; AGG chr2 60499014 60499033 60499030 +
cactgattctgtccccacac

SEQ ID NO: 163043 - DNA, 20 bp, Artificial Sequence
  Synthetic oligonucleotide; AAG chr2 60499023 60499042 60499039 +
tgtccccacacaggcatcca

SEQ ID NO: 163044 - DNA, 20 bp, Artificial Sequence
  Synthetic oligonucleotide; AGG chr2 60499024 60499043 60499040 +
gtccccacacaggcatccaa

SEQ ID NO: 163045 - DNA, 20 bp, Artificial Sequence
  Synthetic oligonucleotide; GGG chr2 60499025 60499044 60499041 +
tccccacacaggcatccaaa

SEQ ID NO: 163046 - DNA, 20 bp, Artificial Sequence
  Synthetic oligonucleotide; AAG chr2 60499028 60499047 60499044 +
ccacacaggcatccaaaggg

SEQ ID NO: 163047 - DNA, 20 bp, Artificial Sequence
  Synthetic oligonucleotide; CAG chr2 60499038 60499057 60499054 +
atccaaagggaagaatgcta

SEQ ID NO: 163048 - DNA, 20 bp, Artificial Sequence
  Synthetic oligonucleotide; CAG chr2 60499044 60499063 60499060 +
agggaagaatgctacagcta

SEQ ID NO: 163049 - DNA, 20 bp, Artificial Sequence
  Synthetic oligonucleotide; TGG chr2 60499059 60499078 60499075 +
agctacagtccatttctcgc

SEQ ID NO: 163050 - DNA, 20 bp, Artificial Sequence
  Synthetic oligonucleotide; TGG chr2 60499068 60499087 60499084 +
ccatttctcgctggcttttc

SEQ ID NO: 163051 - DNA, 20 bp, Artificial Sequence
  Synthetic oligonucleotide; GGG chr2 60499069 60499088 60499085 +
catttctcgctggcttttct

SEQ ID NO: 163052 - DNA, 20 bp, Artificial Sequence
  Synthetic oligonucleotide; GAG chr2 60499071 60499090 60499087 +
tttctcgctggcttttctgg

SEQ ID NO: 163053 - DNA, 20 bp, Artificial Sequence
  Synthetic oligonucleotide; CAG chr2 60499095 60499114 60499111 +
tcaccctacaatgtgttccc

SEQ ID NO: 163054 - DNA, 20 bp, Artificial Sequence
  Synthetic oligonucleotide; CAG chr2 60499102 60499121 60499118 +
acaatgtgttccccagtatt

SEQ ID NO: 163055 - DNA, 20 bp, Artificial Sequence
  Synthetic oligonucleotide; AGG chr2 60499103 60499122 60499119 +
caatgtgttccccagtattc

SEQ ID NO: 163056 - DNA, 20 bp, Artificial Sequence
  Synthetic oligonucleotide; TGG chr2 60499110 60499129 60499126 +
ttccccagtattcaggtttc

SEQ ID NO: 163057 - DNA, 20 bp, Artificial Sequence
  Synthetic oligonucleotide; GGG chr2 60499111 60499130 60499127 +
tccccagtattcaggtttct

SEQ ID NO: 163058 - DNA, 20 bp, Artificial Sequence
  Synthetic oligonucleotide; TGG chr2 60499130 60499149 60499146 +
tgggctgccattatcttctc

SEQ ID NO: 163059 - DNA, 20 bp, Artificial Sequence
  Synthetic oligonucleotide; CGG chr2 60499136 60499155 60499152 +
gccattatcttctctggtct

SEQ ID NO: 163060 - DNA, 20 bp, Artificial Sequence
  Synthetic oligonucleotide; GGG chr2 60499137 60499156 60499153 +
ccattatcttctctggtctc

SEQ ID NO: 163061 - DNA, 20 bp, Artificial Sequence
  Synthetic oligonucleotide; GGG chr2 60499138 60499157 60499154 +
cattatcttctctggtctcg

SEQ ID NO: 163062 - DNA, 20 bp, Artificial Sequence
  Synthetic oligonucleotide; AAG chr2 60499144 60499163 60499160 +
cttctctggtctcggggccc

SEQ ID NO: 163063 - DNA, 20 bp, Artificial Sequence
  Synthetic oligonucleotide; AAG chr2 60499150 60499169 60499166 +
tggtctcggggcccaagcca

SEQ ID NO: 163064 - DNA, 20 bp, Artificial Sequence
  Synthetic oligonucleotide; GAG chr2 60499152 60499171 60499168 +
gtctcggggcccaagccaaa

SEQ ID NO: 163065 - DNA, 20 bp, Artificial Sequence
  Synthetic oligonucleotide; TGG chr2 60499156 60499175 60499172 +
cggggcccaagccaaagagc

SEQ ID NO: 163066 - DNA, 20 bp, Artificial Sequence
  Synthetic oligonucleotide; GAG chr2 60499158 60499177 60499174 +
gggcccaagccaaagagctg

SEQ ID NO: 163067 - DNA, 20 bp, Artificial Sequence
  Synthetic oligonucleotide; CAG chr2 60499163 60499182 60499179 +
caagccaaagagctggagaa

SEQ ID NO: 163068 - DNA, 20 bp, Artificial Sequence
  Synthetic oligonucleotide; TGG chr2 60499170 60499189 60499186 +
aagagctggagaacagtatc

SEQ ID NO: 163069 - DNA, 20 bp, Artificial Sequence
  Synthetic oligonucleotide; CAG chr2 60499176 60499195 60499192 +
tggagaacagtatctggcca

SEQ ID NO: 163070 - DNA, 20 bp, Artificial Sequence
  Synthetic oligonucleotide; AAG chr2 60499184 60499203 60499200 +
agtatctggccacagaacct

SEQ ID NO: 163071 - DNA, 20 bp, Artificial Sequence
  Synthetic oligonucleotide; AGG chr2 60499185 60499204 60499201 +
gtatctggccacagaaccta

SEQ ID NO: 163072 - DNA, 20 bp, Artificial Sequence
  Synthetic oligonucleotide; TGG chr2 60499190 60499209 60499206 +
tggccacagaacctaaggcc

SEQ ID NO: 163073 - DNA, 20 bp, Artificial Sequence
  Synthetic oligonucleotide; TAG chr2 60499193 60499212 60499209 +
ccacagaacctaaggcctgg

SEQ ID NO: 163074 - DNA, 20 bp, Artificial Sequence
  Synthetic oligonucleotide; GAG chr2 60499195 60499214 60499211 +
acagaacctaaggcctggta

SEQ ID NO: 163075 - DNA, 20 bp, Artificial Sequence
  Synthetic oligonucleotide; AAG chr2 60499199 60499218 60499215 +
aacctaaggcctggtagagc

SEQ ID NO: 163076 - DNA, 20 bp, Artificial Sequence
  Synthetic oligonucleotide; CAG chr2 60499203 60499222 60499219 +
taaggcctggtagagcaaga

SEQ ID NO: 163077 - DNA, 20 bp, Artificial Sequence
  Synthetic oligonucleotide; AAG chr2 60499214 60499233 60499230 +
agagcaagacagccatgtgc

SEQ ID NO: 163078 - DNA, 20 bp, Artificial Sequence
  Synthetic oligonucleotide; AGG chr2 60499215 60499234 60499231 +
gagcaagacagccatgtgca

SEQ ID NO: 163079 - DNA, 20 bp, Artificial Sequence
  Synthetic oligonucleotide; GAG chr2 60499219 60499238 60499235 +
aagacagccatgtgcaaggc

SEQ ID NO: 163080 - DNA, 20 bp, Artificial Sequence
  Synthetic oligonucleotide; TGG chr2 60499222 60499241 60499238 +
acagccatgtgcaaggcgag

SEQ ID NO: 163081 - DNA, 20 bp, Artificial Sequence
  Synthetic oligonucleotide; TAG chr2 60499226 60499245 60499242 +
ccatgtgcaaggcgagtgga

SEQ ID NO: 163082 - DNA, 20 bp, Artificial Sequence
  Synthetic oligonucleotide; CAG chr2 60499248 60499267 60499264 +
gcgcccttccgtcactccca

SEQ ID NO: 163083 - DNA, 20 bp, Artificial Sequence
  Synthetic oligonucleotide; GAG chr2 60499250 60499269 60499266 +
gcccttccgtcactcccaca

SEQ ID NO: 163084 - DNA, 20 bp, Artificial Sequence
  Synthetic oligonucleotide; CAG chr2 60499256 60499275 60499272 +
ccgtcactcccacagagctg

SEQ ID NO: 163085 - DNA, 20 bp, Artificial Sequence
  Synthetic oligonucleotide; AGG chr2 60499257 60499276 60499273 +
cgtcactcccacagagctgc

SEQ ID NO: 163086 - DNA, 20 bp, Artificial Sequence
  Synthetic oligonucleotide; GGG chr2 60499258 60499277 60499274 +
gtcactcccacagagctgca

SEQ ID NO: 163087 - DNA, 20 bp, Artificial Sequence
  Synthetic oligonucleotide; GGG chr2 60499259 60499278 60499275 +
tcactcccacagagctgcag

SEQ ID NO: 163088 - DNA, 20 bp, Artificial Sequence
  Synthetic oligonucleotide; CAG chr2 60499277 60499296 60499293 +
aggggtgtgacgcccctgcc

SEQ ID NO: 163089 - DNA, 20 bp, Artificial Sequence
  Synthetic oligonucleotide; TGG chr2 60499291 60499310 60499307 +
cctgcccagccatacccttc

SEQ ID NO: 163090 - DNA, 20 bp, Artificial Sequence
  Synthetic oligonucleotide; GGG chr2 60499292 60499311 60499308 +
ctgcccagccatacccttct

SEQ ID NO: 163091 - DNA, 20 bp, Artificial Sequence
  Synthetic oligonucleotide; CAG chr2 60499298 60499317 60499314 +
agccatacccttctgggcca

SEQ ID NO: 163092 - DNA, 20 bp, Artificial Sequence
  Synthetic oligonucleotide; TGG chr2 60499304 60499323 60499320 +
acccttctgggccacagtgc

SEQ ID NO: 163093 - DNA, 20 bp, Artificial Sequence
  Synthetic oligonucleotide; GAG chr2 60499306 60499325 60499322 +
ccttctgggccacagtgctg

SEQ ID NO: 163094 - DNA, 20 bp, Artificial Sequence
  Synthetic oligonucleotide; AGG chr2 60499307 60499326 60499323 +
cttctgggccacagtgctgg

SEQ ID NO: 163095 - DNA, 20 bp, Artificial Sequence
  Synthetic oligonucleotide; AAG chr2 60499313 60499332 60499329 +
ggccacagtgctggaggctg

SEQ ID NO: 163096 - DNA, 20 bp, Artificial Sequence
  Synthetic oligonucleotide; AAG chr2 60499319 60499338 60499335 +
agtgctggaggctgaagtca

SEQ ID NO: 163097 - DNA, 20 bp, Artificial Sequence
  Synthetic oligonucleotide; CAG chr2 60499342 60499361 60499358 +
cccatcgtgccttattcctt

SEQ ID NO: 163098 - DNA, 20 bp, Artificial Sequence
  Synthetic oligonucleotide; AGG chr2 60499343 60499362 60499359 +
ccatcgtgccttattccttc

SEQ ID NO: 163099 - DNA, 20 bp, Artificial Sequence
  Synthetic oligonucleotide; GAG chr2 60499345 60499364 60499361 +
atcgtgccttattccttcag

SEQ ID NO: 163100 - DNA, 20 bp, Artificial Sequence
  Synthetic oligonucleotide; TGG chr2 60499357 60499376 60499373 +
tccttcaggagcaatactcc

SEQ ID NO: 163101 - DNA, 20 bp, Artificial Sequence
  Synthetic oligonucleotide; GGG chr2 60499358 60499377 60499374 +
ccttcaggagcaatactcct

SEQ ID NO: 163102 - DNA, 20 bp, Artificial Sequence
  Synthetic oligonucleotide; AAG chr2 60499362 60499381 60499378 +
caggagcaatactcctggga

SEQ ID NO: 163103 - DNA, 20 bp, Artificial Sequence
  Synthetic oligonucleotide; AGG chr2 60499363 60499382 60499379 +
aggagcaatactcctgggaa

SEQ ID NO: 163104 - DNA, 20 bp, Artificial Sequence
  Synthetic oligonucleotide; AAG chr2 60499388 60499407 60499404 +
gcacattctgtaactcctct

SEQ ID NO: 163105 - DNA, 20 bp, Artificial Sequence
  Synthetic oligonucleotide; CAG chr2 60499404 60499423 60499420 +
ctctaagtgatatttcttcc

SEQ ID NO: 163106 - DNA, 20 bp, Artificial Sequence
  Synthetic oligonucleotide; AGG chr2 60499405 60499424 60499421 +
tctaagtgatatttcttccc

SEQ ID NO: 163107 - DNA, 20 bp, Artificial Sequence
  Synthetic oligonucleotide; GGG chr2 60499406 60499425 60499422 +
ctaagtgatatttcttccca

SEQ ID NO: 163108 - DNA, 20 bp, Artificial Sequence
  Synthetic oligonucleotide; GGG chr2 60499407 60499426 60499423 +
taagtgatatttcttcccag

SEQ ID NO: 163109 - DNA, 20 bp, Artificial Sequence
  Synthetic oligonucleotide; AAG chr2 60499415 60499434 60499431 +
atttcttcccaggggcaaaa

SEQ ID NO: 163110 - DNA, 20 bp, Artificial Sequence
  Synthetic oligonucleotide; AGG chr2 60499416 60499435 60499432 +
tttcttcccaggggcaaaaa

SEQ ID NO: 163111 - DNA, 20 bp, Artificial Sequence
  Synthetic oligonucleotide; TAG chr2 60499423 60499442 60499439 +
ccaggggcaaaaaaggaaat

SEQ ID NO: 163112 - DNA, 20 bp, Artificial Sequence
  Synthetic oligonucleotide; TAG chr2 60499436 60499455 60499452 +
aggaaattagccccatttta

SEQ ID NO: 163113 - DNA, 20 bp, Artificial Sequence
  Synthetic oligonucleotide; AAG chr2 60499442 60499461 60499458 +
ttagccccattttatagata

SEQ ID NO: 163114 - DNA, 20 bp, Artificial Sequence
  Synthetic oligonucleotide; GAG chr2 60499444 60499463 60499460 +
agccccattttatagataaa

SEQ ID NO: 163115 - DNA, 20 bp, Artificial Sequence
  Synthetic oligonucleotide; GAG chr2 60499450 60499469 60499466 +
attttatagataaagagcct

SEQ ID NO: 163116 - DNA, 20 bp, Artificial Sequence
  Synthetic oligonucleotide; AGG chr2 60499451 60499470 60499467 +
ttttatagataaagagcctg

SEQ ID NO: 163117 - DNA, 20 bp, Artificial Sequence
  Synthetic oligonucleotide; TAG chr2 60499459 60499478 60499475 +
ataaagagcctgaggcccaa

SEQ ID NO: 163118 - DNA, 20 bp, Artificial Sequence
  Synthetic oligonucleotide; AGG chr2 60499460 60499479 60499476 +
taaagagcctgaggcccaat

SEQ ID NO: 163119 - DNA, 20 bp, Artificial Sequence
  Synthetic oligonucleotide; CGG chr2 60499477 60499496 60499493 +
aataggctgattgacttgtc

SEQ ID NO: 163120 - DNA, 20 bp, Artificial Sequence
  Synthetic oligonucleotide; GGG chr2 60499478 60499497 60499494 +
ataggctgattgacttgtcc

SEQ ID NO: 163121 - DNA, 20 bp, Artificial Sequence
  Synthetic oligonucleotide; GGG chr2 60499479 60499498 60499495 +
taggctgattgacttgtccg

SEQ ID NO: 163122 - DNA, 20 bp, Artificial Sequence
  Synthetic oligonucleotide; TAG chr2 60499487 60499506 60499503 +
ttgacttgtccggggccacc

SEQ ID NO: 163123 - DNA, 20 bp, Artificial Sequence
  Synthetic oligonucleotide; CAG chr2 60499491 60499510 60499507 +
cttgtccggggccacctagc

SEQ ID NO: 163124 - DNA, 20 bp, Artificial Sequence
  Synthetic oligonucleotide; CAG chr2 60499494 60499513 60499510 +
gtccggggccacctagccag

SEQ ID NO: 163125 - DNA, 20 bp, Artificial Sequence
  Synthetic oligonucleotide; AGG chr2 60499495 60499514 60499511 +
tccggggccacctagccagc

SEQ ID NO: 163126 - DNA, 20 bp, Artificial Sequence
  Synthetic oligonucleotide; AAG chr2 60499502 60499521 60499518 +
ccacctagccagcaggtgaa

SEQ ID NO: 163127 - DNA, 20 bp, Artificial Sequence
  Synthetic oligonucleotide; TAG chr2 60499514 60499533 60499530 +
caggtgaaaagactcatgtg

SEQ ID NO: 163128 - DNA, 20 bp, Artificial Sequence
  Synthetic oligonucleotide; TAG chr2 60499524 60499543 60499540 +
gactcatgtgtagctgactt

SEQ ID NO: 163129 - DNA, 20 bp, Artificial Sequence
  Synthetic oligonucleotide; GAG chr2 60499526 60499545 60499542 +
ctcatgtgtagctgacttta

SEQ ID NO: 163130 - DNA, 20 bp, Artificial Sequence
  Synthetic oligonucleotide; AAG chr2 60499532 60499551 60499548 +
tgtagctgactttagagtcc

SEQ ID NO: 163131 - DNA, 20 bp, Artificial Sequence
  Synthetic oligonucleotide; AAG chr2 60499558 60499577 60499574 +
cttcaacgtcccactttctc

SEQ ID NO: 163132 - DNA, 20 bp, Artificial Sequence
  Synthetic oligonucleotide; CAG chr2 60499562 60499581 60499578 +
aacgtcccactttctcaaga

SEQ ID NO: 163133 - DNA, 20 bp, Artificial Sequence
  Synthetic oligonucleotide; CGG chr2 60499574 60499593 60499590 +
tctcaagacagtgtttgcca

SEQ ID NO: 163134 - DNA, 20 bp, Artificial Sequence
  Synthetic oligonucleotide; GGG chr2 60499575 60499594 60499591 +
ctcaagacagtgtttgccac

SEQ ID NO: 163135 - DNA, 20 bp, Artificial Sequence
  Synthetic oligonucleotide; CAG chr2 60499579 60499598 60499595 +
agacagtgtttgccacgggc

SEQ ID NO: 163136 - DNA, 20 bp, Artificial Sequence
  Synthetic oligonucleotide; AGG chr2 60499580 60499599 60499596 +
gacagtgtttgccacgggcc

SEQ ID NO: 163137 - DNA, 20 bp, Artificial Sequence
  Synthetic oligonucleotide; GGG chr2 60499581 60499600 60499597 +
acagtgtttgccacgggcca

SEQ ID NO: 163138 - DNA, 20 bp, Artificial Sequence
  Synthetic oligonucleotide; TAG chr2 60499585 60499604 60499601 +
tgtttgccacgggccagggc

SEQ ID NO: 163139 - DNA, 20 bp, Artificial Sequence
  Synthetic oligonucleotide; AAG chr2 60499592 60499611 60499608 +
cacgggccagggctagcaaa

SEQ ID NO: 163140 - DNA, 20 bp, Artificial Sequence
  Synthetic oligonucleotide; CAG chr2 60499633 60499652 60499649 +
acctccccaccaaccccatg

SEQ ID NO: 163141 - DNA, 20 bp, Artificial Sequence
  Synthetic oligonucleotide; AGG chr2 60499634 60499653 60499650 +
cctccccaccaaccccatgc

SEQ ID NO: 163142 - DNA, 20 bp, Artificial Sequence
  Synthetic oligonucleotide; CAG chr2 60499640 60499659 60499656 +
caccaaccccatgcaggtgt

SEQ ID NO: 163143 - DNA, 20 bp, Artificial Sequence
  Synthetic oligonucleotide; GAG chr2 60499644 60499663 60499660 +
aaccccatgcaggtgtcagt

SEQ ID NO: 163144 - DNA, 20 bp, Artificial Sequence
  Synthetic oligonucleotide; AGG chr2 60499645 60499664 60499661 +
accccatgcaggtgtcagtg

SEQ ID NO: 163145 - DNA, 20 bp, Artificial Sequence
  Synthetic oligonucleotide; CAG chr2 60499650 60499669 60499666 +
atgcaggtgtcagtgaggcc

SEQ ID NO: 163146 - DNA, 20 bp, Artificial Sequence
  Synthetic oligonucleotide; AGG chr2 60499651 60499670 60499667 +
tgcaggtgtcagtgaggccc

SEQ ID NO: 163147 - DNA, 20 bp, Artificial Sequence
  Synthetic oligonucleotide; AAG chr2 60499660 60499679 60499676 +
cagtgaggcccaggaacatg

SEQ ID NO: 163148 - DNA, 20 bp, Artificial Sequence
  Synthetic oligonucleotide; CGG chr2 60499668 60499687 60499684 +
cccaggaacatgaagctccc

SEQ ID NO: 163149 - DNA, 20 bp, Artificial Sequence
  Synthetic oligonucleotide; AAG chr2 60499675 60499694 60499691 +
acatgaagctccccggacca

SEQ ID NO: 163150 - DNA, 20 bp, Artificial Sequence
  Synthetic oligonucleotide; AGG chr2 60499676 60499695 60499692 +
catgaagctccccggaccaa

SEQ ID NO: 163151 - DNA, 20 bp, Artificial Sequence
  Synthetic oligonucleotide; GGG chr2 60499677 60499696 60499693 +
atgaagctccccggaccaaa

SEQ ID NO: 163152 - DNA, 20 bp, Artificial Sequence
  Synthetic oligonucleotide; GGG chr2 60499678 60499697 60499694 +
tgaagctccccggaccaaag

SEQ ID NO: 163153 - DNA, 20 bp, Artificial Sequence
  Synthetic oligonucleotide; TGG chr2 60499681 60499700 60499697 +
agctccccggaccaaagggg

SEQ ID NO: 163154 - DNA, 20 bp, Artificial Sequence
  Synthetic oligonucleotide; CAG chr2 60499685 60499704 60499701 +
ccccggaccaaaggggtgga

SEQ ID NO: 163155 - DNA, 20 bp, Artificial Sequence
  Synthetic oligonucleotide; AAG chr2 60499693 60499712 60499709 +
caaaggggtggacagcactg

SEQ ID NO: 163156 - DNA, 20 bp, Artificial Sequence
  Synthetic oligonucleotide; AGG chr2 60499694 60499713 60499710 +
aaaggggtggacagcactga

SEQ ID NO: 163157 - DNA, 20 bp, Artificial Sequence
  Synthetic oligonucleotide; GAG chr2 60499712 60499731 60499728 +
gaaggaaaccgctcaacctt

SEQ ID NO: 163158 - DNA, 20 bp, Artificial Sequence
  Synthetic oligonucleotide; TGG chr2 60499715 60499734 60499731 +
ggaaaccgctcaaccttgag

SEQ ID NO: 163159 - DNA, 20 bp, Artificial Sequence
  Synthetic oligonucleotide; GAG chr2 60499717 60499736 60499733 +
aaaccgctcaaccttgagtg

SEQ ID NO: 163160 - DNA, 20 bp, Artificial Sequence
  Synthetic oligonucleotide; GAG chr2 60499719 60499738 60499735 +
accgctcaaccttgagtgga

SEQ ID NO: 163161 - DNA, 20 bp, Artificial Sequence
  Synthetic oligonucleotide; AGG chr2 60499720 60499739 60499736 +
ccgctcaaccttgagtggag

SEQ ID NO: 163162 - DNA, 20 bp, Artificial Sequence
  Synthetic oligonucleotide; CAG chr2 60499734 60499753 60499750 +
gtggagaggctgctgtgaaa

SEQ ID NO: 163163 - DNA, 20 bp, Artificial Sequence
  Synthetic oligonucleotide; TGG chr2 60499740 60499759 60499756 +
aggctgctgtgaaacagctc

SEQ ID NO: 163164 - DNA, 20 bp, Artificial Sequence
  Synthetic oligonucleotide; GGG chr2 60499741 60499760 60499757 +
ggctgctgtgaaacagctct

SEQ ID NO: 163165 - DNA, 20 bp, Artificial Sequence
  Synthetic oligonucleotide; CAG chr2 60499744 60499763 60499760 +
tgctgtgaaacagctctggg

SEQ ID NO: 163166 - DNA, 20 bp, Artificial Sequence
  Synthetic oligonucleotide; TGG chr2 60499751 60499770 60499767 +
aaacagctctgggcagcacc

SEQ ID NO: 163167 - DNA, 20 bp, Artificial Sequence
  Synthetic oligonucleotide; GGG chr2 60499752 60499771 60499768 +
aacagctctgggcagcacct

SEQ ID NO: 163168 - DNA, 20 bp, Artificial Sequence
  Synthetic oligonucleotide; CAG chr2 60499758 60499777 60499774 +
tctgggcagcacctgggcca

SEQ ID NO: 163169 - DNA, 20 bp, Artificial Sequence
  Synthetic oligonucleotide; TGG chr2 60499765 60499784 60499781 +
agcacctgggccacagcatg

SEQ ID NO: 163170 - DNA, 20 bp, Artificial Sequence
  Synthetic oligonucleotide; AAG chr2 60499768 60499787 60499784 +
acctgggccacagcatgtgg

SEQ ID NO: 163171 - DNA, 20 bp, Artificial Sequence
  Synthetic oligonucleotide; AGG chr2 60499769 60499788 60499785 +
cctgggccacagcatgtgga

SEQ ID NO: 163172 - DNA, 20 bp, Artificial Sequence
  Synthetic oligonucleotide; GAG chr2 60499771 60499790 60499787 +
tgggccacagcatgtggaag

SEQ ID NO: 163173 - DNA, 20 bp, Artificial Sequence
  Synthetic oligonucleotide; AAG chr2 60499784 60499803 60499800 +
gtggaaggagacatgttcct

SEQ ID NO: 163174 - DNA, 20 bp, Artificial Sequence
  Synthetic oligonucleotide; TGG chr2 60499792 60499811 60499808 +
agacatgttcctaagctgcc

SEQ ID NO: 163175 - DNA, 20 bp, Artificial Sequence
  Synthetic oligonucleotide; AAG chr2 60499831 60499850 60499847 +
ttctcttcctcctaatccat

SEQ ID NO: 163176 - DNA, 20 bp, Artificial Sequence
  Synthetic oligonucleotide; CAG chr2 60499837 60499856 60499853 +
tcctcctaatccataagcac

SEQ ID NO: 163177 - DNA, 20 bp, Artificial Sequence
  Synthetic oligonucleotide; AAG chr2 60499845 60499864 60499861 +
atccataagcaccagacctc

SEQ ID NO: 163178 - DNA, 20 bp, Artificial Sequence
  Synthetic oligonucleotide; CAG chr2 60499857 60499876 60499873 +
cagacctcaagccccatgtg

SEQ ID NO: 163179 - DNA, 20 bp, Artificial Sequence
  Synthetic oligonucleotide; CGG chr2 60499863 60499882 60499879 +
tcaagccccatgtgcagctc

SEQ ID NO: 163180 - DNA, 20 bp, Artificial Sequence
  Synthetic oligonucleotide; AAG chr2 60499866 60499885 60499882 +
agccccatgtgcagctccgg

SEQ ID NO: 163181 - DNA, 20 bp, Artificial Sequence
  Synthetic oligonucleotide; TAG chr2 60499873 60499892 60499889 +
tgtgcagctccggaagctgc

SEQ ID NO: 163182 - DNA, 20 bp, Artificial Sequence
  Synthetic oligonucleotide; AAG chr2 60499881 60499900 60499897 +
tccggaagctgctagacctc

SEQ ID NO: 163183 - DNA, 20 bp, Artificial Sequence
  Synthetic oligonucleotide; CAG chr2 60499884 60499903 60499900 +
ggaagctgctagacctcaag

SEQ ID NO: 163184 - DNA, 20 bp, Artificial Sequence
  Synthetic oligonucleotide; AGG chr2 60499885 60499904 60499901 +
gaagctgctagacctcaagc

SEQ ID NO: 163185 - DNA, 20 bp, Artificial Sequence
  Synthetic oligonucleotide; AAG chr2 60499891 60499910 60499907 +
gctagacctcaagcaggact

SEQ ID NO: 163186 - DNA, 20 bp, Artificial Sequence
  Synthetic oligonucleotide; CGG chr2 60499897 60499916 60499913 +
cctcaagcaggactaagatt

SEQ ID NO: 163187 - DNA, 20 bp, Artificial Sequence
  Synthetic oligonucleotide; GAG chr2 60499899 60499918 60499915 +
tcaagcaggactaagattcg

SEQ ID NO: 163188 - DNA, 20 bp, Artificial Sequence
  Synthetic oligonucleotide; GAG chr2 60499901 60499920 60499917 +
aagcaggactaagattcgga

SEQ ID NO: 163189 - DNA, 20 bp, Artificial Sequence
  Synthetic oligonucleotide; GAG chr2 60499903 60499922 60499919 +
gcaggactaagattcggaga

SEQ ID NO: 163190 - DNA, 20 bp, Artificial Sequence
  Synthetic oligonucleotide; CAG chr2 60499906 60499925 60499922 +
ggactaagattcggagagag

SEQ ID NO: 163191 - DNA, 20 bp, Artificial Sequence
  Synthetic oligonucleotide; TGG chr2 60499918 60499937 60499934 +
ggagagagcagccaccgacc

SEQ ID NO: 163192 - DNA, 20 bp, Artificial Sequence
  Synthetic oligonucleotide; CAG chr2 60499928 60499947 60499944 +
gccaccgacctggctcctcc

SEQ ID NO: 163193 - DNA, 20 bp, Artificial Sequence
  Synthetic oligonucleotide; AGG chr2 60499929 60499948 60499945 +
ccaccgacctggctcctccc

SEQ ID NO: 163194 - DNA, 20 bp, Artificial Sequence
  Synthetic oligonucleotide; CAG chr2 60499932 60499951 60499948 +
ccgacctggctcctcccagg

SEQ ID NO: 163195 - DNA, 20 bp, Artificial Sequence
  Synthetic oligonucleotide; AGG chr2 60499933 60499952 60499949 +
cgacctggctcctcccaggc

SEQ ID NO: 163196 - DNA, 20 bp, Artificial Sequence
  Synthetic oligonucleotide; CAG chr2 60499937 60499956 60499953 +
ctggctcctcccaggcaggc

SEQ ID NO: 163197 - DNA, 20 bp, Artificial Sequence
  Synthetic oligonucleotide; CAG chr2 60499942 60499961 60499958 +
tcctcccaggcaggccagcc

SEQ ID NO: 163198 - DNA, 20 bp, Artificial Sequence
  Synthetic oligonucleotide; AGG chr2 60499943 60499962 60499959 +
cctcccaggcaggccagccc

SEQ ID NO: 163199 - DNA, 20 bp, Artificial Sequence
  Synthetic oligonucleotide; GAG chr2 60499947 60499966 60499963 +
ccaggcaggccagcccaggt

SEQ ID NO: 163200 - DNA, 20 bp, Artificial Sequence
  Synthetic oligonucleotide; CAG chr2 60499956 60499975 60499972 +
ccagcccaggtgagcccctc

SEQ ID NO: 163201 - DNA, 20 bp, Artificial Sequence
  Synthetic oligonucleotide; CAG chr2 60499960 60499979 60499976 +
cccaggtgagcccctccagc

SEQ ID NO: 163202 - DNA, 20 bp, Artificial Sequence
  Synthetic oligonucleotide; AGG chr2 60499961 60499980 60499977 +
ccaggtgagcccctccagcc

SEQ ID NO: 163203 - DNA, 20 bp, Artificial Sequence
  Synthetic oligonucleotide; CAG chr2 60499979 60499998 60499995 +
ccaggcactcaccccactgc

SEQ ID NO: 163204 - DNA, 20 bp, Artificial Sequence
  Synthetic oligonucleotide; AGG chr2 60499980 60499999 60499996 +
caggcactcaccccactgcc

SEQ ID NO: 163205 - DNA, 20 bp, Artificial Sequence
  Synthetic oligonucleotide; TAG chr2 60499994 60500013 60500010 +
actgccaggctgtttactct

SEQ ID NO: 163206 - DNA, 20 bp, Artificial Sequence
  Synthetic oligonucleotide; TGG chr2 60499998 60500017 60500014 +
ccaggctgtttactcttagc

SEQ ID NO: 163207 - DNA, 20 bp, Artificial Sequence
  Synthetic oligonucleotide; TAG chr2 60500026 60500045 60500042 +
gtctcctgtctgctctactg

SEQ ID NO: 163208 - DNA, 20 bp, Artificial Sequence
  Synthetic oligonucleotide; CGG chr2 60500052 60500071 60500068 +
cctccctcctctcctccttt

SEQ ID NO: 163209 - DNA, 20 bp, Artificial Sequence
  Synthetic oligonucleotide; CAG chr2 60500064 60500083 60500080 +
cctcctttcggtcctctgcc

SEQ ID NO: 163210 - DNA, 20 bp, Artificial Sequence
  Synthetic oligonucleotide; AGG chr2 60500065 60500084 60500081 +
ctcctttcggtcctctgccc

SEQ ID NO: 163211 - DNA, 20 bp, Artificial Sequence
  Synthetic oligonucleotide; GAG chr2 60500075 60500094 60500091 +
tcctctgcccaggcctgcct

SEQ ID NO: 163212 - DNA, 20 bp, Artificial Sequence
  Synthetic oligonucleotide; AGG chr2 60500076 60500095 60500092 +
cctctgcccaggcctgcctg

SEQ ID NO: 163213 - DNA, 20 bp, Artificial Sequence
  Synthetic oligonucleotide; CAG chr2 60500087 60500106 60500103 +
gcctgcctgaggctgcctgc

SEQ ID NO: 163214 - DNA, 20 bp, Artificial Sequence
  Synthetic oligonucleotide; GAG chr2 60500091 60500110 60500107 +
gcctgaggctgcctgccagt

SEQ ID NO: 163215 - DNA, 20 bp, Artificial Sequence
  Synthetic oligonucleotide; CAG chr2 60500103 60500122 60500119 +
ctgccagtgagattgcatgt

SEQ ID NO: 163216 - DNA, 20 bp, Artificial Sequence
  Synthetic oligonucleotide; AGG chr2 60500104 60500123 60500120 +
tgccagtgagattgcatgtc

SEQ ID NO: 163217 - DNA, 20 bp, Artificial Sequence
  Synthetic oligonucleotide; GGG chr2 60500105 60500124 60500121 +
gccagtgagattgcatgtca

SEQ ID NO: 163218 - DNA, 20 bp, Artificial Sequence
  Synthetic oligonucleotide; TGG chr2 60500116 60500135 60500132 +
tgcatgtcagggctttgccc

SEQ ID NO: 163219 - DNA, 20 bp, Artificial Sequence
  Synthetic oligonucleotide; GGG chr2 60500117 60500136 60500133 +
gcatgtcagggctttgccct

SEQ ID NO: 163220 - DNA, 20 bp, Artificial Sequence
  Synthetic oligonucleotide; GAG chr2 60500124 60500143 60500140 +
agggctttgccctgggcact

SEQ ID NO: 163221 - DNA, 20 bp, Artificial Sequence
  Synthetic oligonucleotide; AGG chr2 60500125 60500144 60500141 +
gggctttgccctgggcactg

SEQ ID NO: 163222 - DNA, 20 bp, Artificial Sequence
  Synthetic oligonucleotide; GGG chr2 60500126 60500145 60500142 +
ggctttgccctgggcactga

SEQ ID NO: 163223 - DNA, 20 bp, Artificial Sequence
  Synthetic oligonucleotide; TAG chr2 60500130 60500149 60500146 +
ttgccctgggcactgagggc

SEQ ID NO: 163224 - DNA, 20 bp, Artificial Sequence
  Synthetic oligonucleotide; AGG chr2 60500131 60500150 60500147 +
tgccctgggcactgagggct

SEQ ID NO: 163225 - DNA, 20 bp, Artificial Sequence
  Synthetic oligonucleotide; GGG chr2 60500132 60500151 60500148 +
gccctgggcactgagggcta

SEQ ID NO: 163226 - DNA, 20 bp, Artificial Sequence
  Synthetic oligonucleotide; CAG chr2 60500139 60500158 60500155 +
gcactgagggctagggtgcc

SEQ ID NO: 163227 - DNA, 20 bp, Artificial Sequence
  Synthetic oligonucleotide; GAG chr2 60500141 60500160 60500157 +
actgagggctagggtgccca

SEQ ID NO: 163228 - DNA, 20 bp, Artificial Sequence
  Synthetic oligonucleotide; AGG chr2 60500142 60500161 60500158 +
ctgagggctagggtgcccag

SEQ ID NO: 163229 - DNA, 20 bp, Artificial Sequence
  Synthetic oligonucleotide; CGG chr2 60500149 60500168 60500165 +
ctagggtgcccagaggcctg

SEQ ID NO: 163230 - DNA, 20 bp, Artificial Sequence
  Synthetic oligonucleotide; TGG chr2 60500160 60500179 60500176 +
agaggcctgcggctgtgccc

SEQ ID NO: 163231 - DNA, 20 bp, Artificial Sequence
  Synthetic oligonucleotide; TGG chr2 60500164 60500183 60500180 +
gcctgcggctgtgccctgga

SEQ ID NO: 163232 - DNA, 20 bp, Artificial Sequence
  Synthetic oligonucleotide; CAG chr2 60500172 60500191 60500188 +
ctgtgccctggatggaaaac

SEQ ID NO: 163233 - DNA, 20 bp, Artificial Sequence
  Synthetic oligonucleotide; CAG chr2 60500175 60500194 60500191 +
tgccctggatggaaaaccag

SEQ ID NO: 163234 - DNA, 20 bp, Artificial Sequence
  Synthetic oligonucleotide; AAG chr2 60500184 60500203 60500200 +
tggaaaaccagcagcctgca

SEQ ID NO: 163235 - DNA, 20 bp, Artificial Sequence
  Synthetic oligonucleotide; TGG chr2 60500190 60500209 60500206 +
accagcagcctgcaaagctg

SEQ ID NO: 163236 - DNA, 20 bp, Artificial Sequence
  Synthetic oligonucleotide; GGG chr2 60500191 60500210 60500207 +
ccagcagcctgcaaagctgt

SEQ ID NO: 163237 - DNA, 20 bp, Artificial Sequence
  Synthetic oligonucleotide; GGG chr2 60500192 60500211 60500208 +
cagcagcctgcaaagctgtg

SEQ ID NO: 163238 - DNA, 20 bp, Artificial Sequence
  Synthetic oligonucleotide; GGG chr2 60500193 60500212 60500209 +
agcagcctgcaaagctgtgg

SEQ ID NO: 163239 - DNA, 20 bp, Artificial Sequence
  Synthetic oligonucleotide; CAG chr2 60500196 60500215 60500212 +
agcctgcaaagctgtggggg

SEQ ID NO: 163240 - DNA, 20 bp, Artificial Sequence
  Synthetic oligonucleotide; CAG chr2 60500201 60500220 60500217 +
gcaaagctgtgggggcagca

SEQ ID NO: 163241 - DNA, 20 bp, Artificial Sequence
  Synthetic oligonucleotide; AGG chr2 60500202 60500221 60500218 +
caaagctgtgggggcagcac

SEQ ID NO: 163242 - DNA, 20 bp, Artificial Sequence
  Synthetic oligonucleotide; GAG chr2 60500215 60500234 60500231 +
gcagcacaggacctgtgtgt

SEQ ID NO: 163243 - DNA, 20 bp, Artificial Sequence
  Synthetic oligonucleotide; GAG chr2 60500217 60500236 60500233 +
agcacaggacctgtgtgtga

SEQ ID NO: 163244 - DNA, 20 bp, Artificial Sequence
  Synthetic oligonucleotide; CGG chr2 60500220 60500239 60500236 +
acaggacctgtgtgtgagag

SEQ ID NO: 163245 - DNA, 20 bp, Artificial Sequence
  Synthetic oligonucleotide; TGG chr2 60500223 60500242 60500239 +
ggacctgtgtgtgagagcgg

SEQ ID NO: 163246 - DNA, 20 bp, Artificial Sequence
  Synthetic oligonucleotide; GAG chr2 60500230 60500249 60500246 +
tgtgtgagagcggtggtctt

SEQ ID NO: 163247 - DNA, 20 bp, Artificial Sequence
  Synthetic oligonucleotide; GAG chr2 60500232 60500251 60500248 +
tgtgagagcggtggtcttga

SEQ ID NO: 163248 - DNA, 20 bp, Artificial Sequence
  Synthetic oligonucleotide; AAG chr2 60500238 60500257 60500254 +
agcggtggtcttgagagtga

SEQ ID NO: 163249 - DNA, 20 bp, Artificial Sequence
  Synthetic oligonucleotide; TGG chr2 60500241 60500260 60500257 +
ggtggtcttgagagtgaaag

SEQ ID NO: 163250 - DNA, 20 bp, Artificial Sequence
  Synthetic oligonucleotide; AAG chr2 60500246 60500265 60500262 +
tcttgagagtgaaagtggac

SEQ ID NO: 163251 - DNA, 20 bp, Artificial Sequence
  Synthetic oligonucleotide; AAG chr2 60500251 60500270 60500267 +
agagtgaaagtggacaagtc

SEQ ID NO: 163252 - DNA, 20 bp, Artificial Sequence
  Synthetic oligonucleotide; CAG chr2 60500256 60500275 60500272 +
gaaagtggacaagtcaagcc

SEQ ID NO: 163253 - DNA, 20 bp, Artificial Sequence
  Synthetic oligonucleotide; AGG chr2 60500257 60500276 60500273 +
aaagtggacaagtcaagccc

SEQ ID NO: 163254 - DNA, 20 bp, Artificial Sequence
  Synthetic oligonucleotide; CGG chr2 60500260 60500279 60500276 +
gtggacaagtcaagcccagg

SEQ ID NO: 163255 - DNA, 20 bp, Artificial Sequence
  Synthetic oligonucleotide; GGG chr2 60500261 60500280 60500277 +
tggacaagtcaagcccaggc

SEQ ID NO: 163256 - DNA, 20 bp, Artificial Sequence
  Synthetic oligonucleotide; GGG chr2 60500262 60500281 60500278 +
ggacaagtcaagcccaggcg

SEQ ID NO: 163257 - DNA, 20 bp, Artificial Sequence
  Synthetic oligonucleotide; GAG chr2 60500264 60500283 60500280 +
acaagtcaagcccaggcggg

SEQ ID NO: 163258 - DNA, 20 bp, Artificial Sequence
  Synthetic oligonucleotide; AGG chr2 60500265 60500284 60500281 +
caagtcaagcccaggcgggg

SEQ ID NO: 163259 - DNA, 20 bp, Artificial Sequence
  Synthetic oligonucleotide; GGG chr2 60500266 60500285 60500282 +
aagtcaagcccaggcgggga

SEQ ID NO: 163260 - DNA, 20 bp, Artificial Sequence
  Synthetic oligonucleotide; GGG chr2 60500267 60500286 60500283 +
agtcaagcccaggcggggag

SEQ ID NO: 163261 - DNA, 20 bp, Artificial Sequence
  Synthetic oligonucleotide; CAG chr2 60500271 60500290 60500287 +
aagcccaggcggggagggga

SEQ ID NO: 163262 - DNA, 20 bp, Artificial Sequence
  Synthetic oligonucleotide; AGG chr2 60500272 60500291 60500288 +
agcccaggcggggaggggac

SEQ ID NO: 163263 - DNA, 20 bp, Artificial Sequence
  Synthetic oligonucleotide; GGG chr2 60500273 60500292 60500289 +
gcccaggcggggaggggaca

SEQ ID NO: 163264 - DNA, 20 bp, Artificial Sequence
  Synthetic oligonucleotide; GGG chr2 60500274 60500293 60500290 +
cccaggcggggaggggacag

SEQ ID NO: 163265 - DNA, 20 bp, Artificial Sequence
  Synthetic oligonucleotide; GGG chr2 60500275 60500294 60500291 +
ccaggcggggaggggacagg

SEQ ID NO: 163266 - DNA, 20 bp, Artificial Sequence
  Synthetic oligonucleotide; CAG chr2 60500278 60500297 60500294 +
ggcggggaggggacaggggg

SEQ ID NO: 163267 - DNA, 20 bp, Artificial Sequence
  Synthetic oligonucleotide; AGG chr2 60500279 60500298 60500295 +
gcggggaggggacagggggc

SEQ ID NO: 163268 - DNA, 20 bp, Artificial Sequence
  Synthetic oligonucleotide; TAG chr2 60500282 60500301 60500298 +
gggaggggacagggggcagg

SEQ ID NO: 163269 - DNA, 20 bp, Artificial Sequence
  Synthetic oligonucleotide; AGG chr2 60500283 60500302 60500299 +
ggaggggacagggggcaggt

SEQ ID NO: 163270 - DNA, 20 bp, Artificial Sequence
  Synthetic oligonucleotide; GGG chr2 60500284 60500303 60500300 +
gaggggacagggggcaggta

SEQ ID NO: 163271 - DNA, 20 bp, Artificial Sequence
  Synthetic oligonucleotide; TAG chr2 60500288 60500307 60500304 +
ggacagggggcaggtaggga

SEQ ID NO: 163272 - DNA, 20 bp, Artificial Sequence
  Synthetic oligonucleotide; AGG chr2 60500289 60500308 60500305 +
gacagggggcaggtagggat

SEQ ID NO: 163273 - DNA, 20 bp, Artificial Sequence
  Synthetic oligonucleotide; GGG chr2 60500290 60500309 60500306 +
acagggggcaggtagggata

SEQ ID NO: 163274 - DNA, 20 bp, Artificial Sequence
  Synthetic oligonucleotide; CAG chr2 60500293 60500312 60500309 +
gggggcaggtagggataggg

SEQ ID NO: 163275 - DNA, 20 bp, Artificial Sequence
  Synthetic oligonucleotide; AGG chr2 60500294 60500313 60500310 +
ggggcaggtagggatagggc

SEQ ID NO: 163276 - DNA, 20 bp, Artificial Sequence
  Synthetic oligonucleotide; GAG chr2 60500298 60500317 60500314 +
caggtagggatagggcaggt

SEQ ID NO: 163277 - DNA, 20 bp, Artificial Sequence
  Synthetic oligonucleotide; AGG chr2 60500299 60500318 60500315 +
aggtagggatagggcaggtg

SEQ ID NO: 163278 - DNA, 20 bp, Artificial Sequence
  Synthetic oligonucleotide; CGG chr2 60500306 60500325 60500322 +
gatagggcaggtgaggttcc

SEQ ID NO: 163279 - DNA, 20 bp, Artificial Sequence
  Synthetic oligonucleotide; GGG chr2 60500307 60500326 60500323 +
atagggcaggtgaggttccc

SEQ ID NO: 163280 - DNA, 20 bp, Artificial Sequence
  Synthetic oligonucleotide; GGG chr2 60500308 60500327 60500324 +
tagggcaggtgaggttcccg

SEQ ID NO: 163281 - DNA, 20 bp, Artificial Sequence
  Synthetic oligonucleotide; CAG chr2 60500312 60500331 60500328 +
gcaggtgaggttcccggggc

SEQ ID NO: 163282 - DNA, 20 bp, Artificial Sequence
  Synthetic oligonucleotide; TGG chr2 60500368 60500387 60500384 +
caccattaaccgtgcctctg

SEQ ID NO: 163283 - DNA, 20 bp, Artificial Sequence
  Synthetic oligonucleotide; GGG chr2 60500369 60500388 60500385 +
accattaaccgtgcctctgt

SEQ ID NO: 163284 - DNA, 20 bp, Artificial Sequence
  Synthetic oligonucleotide; CAG chr2 60500376 60500395 60500392 +
accgtgcctctgtgggctga

SEQ ID NO: 163285 - DNA, 20 bp, Artificial Sequence
  Synthetic oligonucleotide; CAG chr2 60500388 60500407 60500404 +
tgggctgacagatgtgcctt

SEQ ID NO: 163286 - DNA, 20 bp, Artificial Sequence
  Synthetic oligonucleotide; GAG chr2 60500390 60500409 60500406 +
ggctgacagatgtgccttca

SEQ ID NO: 163287 - DNA, 20 bp, Artificial Sequence
  Synthetic oligonucleotide; AAG chr2 60500393 60500412 60500409 +
tgacagatgtgccttcagag

SEQ ID NO: 163288 - DNA, 20 bp, Artificial Sequence
  Synthetic oligonucleotide; AGG chr2 60500394 60500413 60500410 +
gacagatgtgccttcagaga

SEQ ID NO: 163289 - DNA, 20 bp, Artificial Sequence
  Synthetic oligonucleotide; GGG chr2 60500395 60500414 60500411 +
acagatgtgccttcagagaa

SEQ ID NO: 163290 - DNA, 20 bp, Artificial Sequence
  Synthetic oligonucleotide; CAG chr2 60500398 60500417 60500414 +
gatgtgccttcagagaaggg

SEQ ID NO: 163291 - DNA, 20 bp, Artificial Sequence
  Synthetic oligonucleotide; AGG chr2 60500399 60500418 60500415 +
atgtgccttcagagaagggc

SEQ ID NO: 163292 - DNA, 20 bp, Artificial Sequence
  Synthetic oligonucleotide; GGG chr2 60500400 60500419 60500416 +
tgtgccttcagagaagggca

SEQ ID NO: 163293 - DNA, 20 bp, Artificial Sequence
  Synthetic oligonucleotide; GAG chr2 60500402 60500421 60500418 +
tgccttcagagaagggcagg

SEQ ID NO: 163294 - DNA, 20 bp, Artificial Sequence
  Synthetic oligonucleotide; CAG chr2 60500405 60500424 60500421 +
cttcagagaagggcagggag

SEQ ID NO: 163295 - DNA, 20 bp, Artificial Sequence
  Synthetic oligonucleotide; TGG chr2 60500409 60500428 60500425 +
agagaagggcagggagcagc

SEQ ID NO: 163296 - DNA, 20 bp, Artificial Sequence
  Synthetic oligonucleotide; GGG chr2 60500410 60500429 60500426 +
gagaagggcagggagcagct

SEQ ID NO: 163297 - DNA, 20 bp, Artificial Sequence
  Synthetic oligonucleotide; GGG chr2 60500411 60500430 60500427 +
agaagggcagggagcagctg

SEQ ID NO: 163298 - DNA, 20 bp, Artificial Sequence
  Synthetic oligonucleotide; GGG chr2 60500412 60500431 60500428 +
gaagggcagggagcagctgg

SEQ ID NO: 163299 - DNA, 20 bp, Artificial Sequence
  Synthetic oligonucleotide; TGG chr2 60500417 60500436 60500433 +
gcagggagcagctgggggcc

SEQ ID NO: 163300 - DNA, 20 bp, Artificial Sequence
  Synthetic oligonucleotide; CAG chr2 60500421 60500440 60500437 +
ggagcagctgggggcctggc

SEQ ID NO: 163301 - DNA, 20 bp, Artificial Sequence
  Synthetic oligonucleotide; GAG chr2 60500423 60500442 60500439 +
agcagctgggggcctggcca

SEQ ID NO: 163302 - DNA, 20 bp, Artificial Sequence
  Synthetic oligonucleotide; CAG chr2 60500435 60500454 60500451 +
cctggccagagcaatcatcc

SEQ ID NO: 163303 - DNA, 20 bp, Artificial Sequence
  Synthetic oligonucleotide; CAG chr2 60500438 60500457 60500454 +
ggccagagcaatcatcccag

SEQ ID NO: 163304 - DNA, 20 bp, Artificial Sequence
  Synthetic oligonucleotide; AGG chr2 60500439 60500458 60500455 +
gccagagcaatcatcccagc

SEQ ID NO: 163305 - DNA, 20 bp, Artificial Sequence
  Synthetic oligonucleotide; CAG chr2 60500451 60500470 60500467 +
atcccagcaggaacttacat

SEQ ID NO: 163306 - DNA, 20 bp, Artificial Sequence
  Synthetic oligonucleotide; GAG chr2 60500453 60500472 60500469 +
cccagcaggaacttacatca

SEQ ID NO: 163307 - DNA, 20 bp, Artificial Sequence
  Synthetic oligonucleotide; CAG chr2 60500456 60500475 60500472 +
agcaggaacttacatcagag

SEQ ID NO: 163308 - DNA, 20 bp, Artificial Sequence
  Synthetic oligonucleotide; AGG chr2 60500457 60500476 60500473 +
gcaggaacttacatcagagc

SEQ ID NO: 163309 - DNA, 20 bp, Artificial Sequence
  Synthetic oligonucleotide; CAG chr2 60500460 60500479 60500476 +
ggaacttacatcagagcagg

SEQ ID NO: 163310 - DNA, 20 bp, Artificial Sequence
  Synthetic oligonucleotide; AAG chr2 60500470 60500489 60500486 +
tcagagcaggcagcctaccc

SEQ ID NO: 163311 - DNA, 20 bp, Artificial Sequence
  Synthetic oligonucleotide; GAG chr2 60500472 60500491 60500488 +
agagcaggcagcctacccaa

SEQ ID NO: 163312 - DNA, 20 bp, Artificial Sequence
  Synthetic oligonucleotide; CAG chr2 60500476 60500495 60500492 +
caggcagcctacccaagagc

SEQ ID NO: 163313 - DNA, 20 bp, Artificial Sequence
  Synthetic oligonucleotide; AGG chr2 60500477 60500496 60500493 +
aggcagcctacccaagagcc

SEQ ID NO: 163314 - DNA, 20 bp, Artificial Sequence
  Synthetic oligonucleotide; GGG chr2 60500478 60500497 60500494 +
ggcagcctacccaagagcca

SEQ ID NO: 163315 - DNA, 20 bp, Artificial Sequence
  Synthetic oligonucleotide; AAG chr2 60500481 60500500 60500497 +
agcctacccaagagccaggg

SEQ ID NO: 163316 - DNA, 20 bp, Artificial Sequence
  Synthetic oligonucleotide; AGG chr2 60500482 60500501 60500498 +
gcctacccaagagccaggga

SEQ ID NO: 163317 - DNA, 20 bp, Artificial Sequence
  Synthetic oligonucleotide; AAG chr2 60500485 60500504 60500501 +
tacccaagagccagggaagg

SEQ ID NO: 163318 - DNA, 20 bp, Artificial Sequence
  Synthetic oligonucleotide; AGG chr2 60500486 60500505 60500502 +
acccaagagccagggaagga

SEQ ID NO: 163319 - DNA, 20 bp, Artificial Sequence
  Synthetic oligonucleotide; GAG chr2 60500488 60500507 60500504 +
ccaagagccagggaaggaag

SEQ ID NO: 163320 - DNA, 20 bp, Artificial Sequence
  Synthetic oligonucleotide; GAG chr2 60500490 60500509 60500506 +
aagagccagggaaggaagga

SEQ ID NO: 163321 - DNA, 20 bp, Artificial Sequence
  Synthetic oligonucleotide; GAG chr2 60500498 60500517 60500514 +
gggaaggaaggagagcccct

SEQ ID NO: 163322 - DNA, 20 bp, Artificial Sequence
  Synthetic oligonucleotide; TGG chr2 60500507 60500526 60500523 +
ggagagcccctgagaaaaaa

SEQ ID NO: 163323 - DNA, 20 bp, Artificial Sequence
  Synthetic oligonucleotide; CAG chr2 60500510 60500529 60500526 +
gagcccctgagaaaaaatgg

SEQ ID NO: 163324 - DNA, 20 bp, Artificial Sequence
  Synthetic oligonucleotide; AAG chr2 60500513 60500532 60500529 +
cccctgagaaaaaatggcag

SEQ ID NO: 163325 - DNA, 20 bp, Artificial Sequence
  Synthetic oligonucleotide; TGG chr2 60500518 60500537 60500534 +
gagaaaaaatggcagaagaa

SEQ ID NO: 163326 - DNA, 20 bp, Artificial Sequence
  Synthetic oligonucleotide; AAG chr2 60500521 60500540 60500537 +
aaaaaatggcagaagaatgg

SEQ ID NO: 163327 - DNA, 20 bp, Artificial Sequence
  Synthetic oligonucleotide; AGG chr2 60500522 60500541 60500538 +
aaaaatggcagaagaatgga

SEQ ID NO: 163328 - DNA, 20 bp, Artificial Sequence
  Synthetic oligonucleotide; GGG chr2 60500523 60500542 60500539 +
aaaatggcagaagaatggaa

SEQ ID NO: 163329 - DNA, 20 bp, Artificial Sequence
  Synthetic oligonucleotide; TGG chr2 60500540 60500559 60500556 +
gaagggactacgtgtattga

SEQ ID NO: 163330 - DNA, 20 bp, Artificial Sequence
  Synthetic oligonucleotide; CAG chr2 60500550 60500569 60500566 +
cgtgtattgatggaataaac

SEQ ID NO: 163331 - DNA, 20 bp, Artificial Sequence
  Synthetic oligonucleotide; CAG chr2 60500576 60500595 60500592 +
ccccacacttcccaactcct

SEQ ID NO: 163332 - DNA, 20 bp, Artificial Sequence
  Synthetic oligonucleotide; AGG chr2 60500577 60500596 60500593 +
cccacacttcccaactcctc

SEQ ID NO: 163333 - DNA, 20 bp, Artificial Sequence
  Synthetic oligonucleotide; CAG chr2 60500581 60500600 60500597 +
cacttcccaactcctcagga

SEQ ID NO: 163334 - DNA, 20 bp, Artificial Sequence
  Synthetic oligonucleotide; AGG chr2 60500582 60500601 60500598 +
acttcccaactcctcaggac

SEQ ID NO: 163335 - DNA, 20 bp, Artificial Sequence
  Synthetic oligonucleotide; GGG chr2 60500583 60500602 60500599 +
cttcccaactcctcaggaca

SEQ ID NO: 163336 - DNA, 20 bp, Artificial Sequence
  Synthetic oligonucleotide; CAG chr2 60500588 60500607 60500604 +
caactcctcaggacagggtt

SEQ ID NO: 163337 - DNA, 20 bp, Artificial Sequence
  Synthetic oligonucleotide; GAG chr2 60500590 60500609 60500606 +
actcctcaggacagggttca

SEQ ID NO: 163338 - DNA, 20 bp, Artificial Sequence
  Synthetic oligonucleotide; TAG chr2 60500594 60500613 60500610 +
ctcaggacagggttcagagc

SEQ ID NO: 163339 - DNA, 20 bp, Artificial Sequence
  Synthetic oligonucleotide; AGG chr2 60500595 60500614 60500611 +
tcaggacagggttcagagct

SEQ ID NO: 163340 - DNA, 20 bp, Artificial Sequence
  Synthetic oligonucleotide; TGG chr2 60500599 60500618 60500615 +
gacagggttcagagctaggc

SEQ ID NO: 163341 - DNA, 20 bp, Artificial Sequence
  Synthetic oligonucleotide; TGG chr2 60500602 60500621 60500618 +
agggttcagagctaggctgg

SEQ ID NO: 163342 - DNA, 20 bp, Artificial Sequence
  Synthetic oligonucleotide; CAG chr2 60500613 60500632 60500629 +
ctaggctggtggctgctaca

SEQ ID NO: 163343 - DNA, 20 bp, Artificial Sequence
  Synthetic oligonucleotide; GAG chr2 60500615 60500634 60500631 +
aggctggtggctgctacaca

SEQ ID NO: 163344 - DNA, 20 bp, Artificial Sequence
  Synthetic oligonucleotide; CAG chr2 60500619 60500638 60500635 +
tggtggctgctacacagaga

SEQ ID NO: 163345 - DNA, 20 bp, Artificial Sequence
  Synthetic oligonucleotide; CAG chr2 60500632 60500651 60500648 +
acagagacagcaccctccac

SEQ ID NO: 163346 - DNA, 20 bp, Artificial Sequence
  Synthetic oligonucleotide; AAG chr2 60500637 60500656 60500653 +
gacagcaccctccaccagtt

SEQ ID NO: 163347 - DNA, 20 bp, Artificial Sequence
  Synthetic oligonucleotide; AGG chr2 60500638 60500657 60500654 +
acagcaccctccaccagtta

SEQ ID NO: 163348 - DNA, 20 bp, Artificial Sequence
  Synthetic oligonucleotide; AAG chr2 60500644 60500663 60500660 +
ccctccaccagttaaggtat

SEQ ID NO: 163349 - DNA, 20 bp, Artificial Sequence
  Synthetic oligonucleotide; AAG chr2 60500649 60500668 60500665 +
caccagttaaggtataagac

SEQ ID NO: 163350 - DNA, 20 bp, Artificial Sequence
  Synthetic oligonucleotide; AGG chr2 60500650 60500669 60500666 +
accagttaaggtataagaca

SEQ ID NO: 163351 - DNA, 20 bp, Artificial Sequence
  Synthetic oligonucleotide; AAG chr2 60500656 60500675 60500672 +
taaggtataagacaaggtat

SEQ ID NO: 163352 - DNA, 20 bp, Artificial Sequence
  Synthetic oligonucleotide; AGG chr2 60500657 60500676 60500673 +
aaggtataagacaaggtata

SEQ ID NO: 163353 - DNA, 20 bp, Artificial Sequence
  Synthetic oligonucleotide; TGG chr2 60500664 60500683 60500680 +
aagacaaggtataaggctga

SEQ ID NO: 163354 - DNA, 20 bp, Artificial Sequence
  Synthetic oligonucleotide; GGG chr2 60500665 60500684 60500681 +
agacaaggtataaggctgat

SEQ ID NO: 163355 - DNA, 20 bp, Artificial Sequence
  Synthetic oligonucleotide; TAG chr2 60500671 60500690 60500687 +
ggtataaggctgatgggctg

SEQ ID NO: 163356 - DNA, 20 bp, Artificial Sequence
  Synthetic oligonucleotide; AGG chr2 60500672 60500691 60500688 +
gtataaggctgatgggctgt

SEQ ID NO: 163357 - DNA, 20 bp, Artificial Sequence
  Synthetic oligonucleotide; TGG chr2 60500684 60500703 60500700 +
tgggctgtaggcatcaaacc

SEQ ID NO: 163358 - DNA, 20 bp, Artificial Sequence
  Synthetic oligonucleotide; CAG chr2 60500693 60500712 60500709 +
ggcatcaaacctggaactca

SEQ ID NO: 163359 - DNA, 20 bp, Artificial Sequence
  Synthetic oligonucleotide; CGG chr2 60500697 60500716 60500713 +
tcaaacctggaactcacagt

SEQ ID NO: 163360 - DNA, 20 bp, Artificial Sequence
  Synthetic oligonucleotide; GGG chr2 60500698 60500717 60500714 +
caaacctggaactcacagtc

SEQ ID NO: 163361 - DNA, 20 bp, Artificial Sequence
  Synthetic oligonucleotide; GGG chr2 60500699 60500718 60500715 +
aaacctggaactcacagtcg

SEQ ID NO: 163362 - DNA, 20 bp, Artificial Sequence
  Synthetic oligonucleotide; AAG chr2 60500713 60500732 60500729 +
cagtcggggcacctcacttc

SEQ ID NO: 163363 - DNA, 20 bp, Artificial Sequence
  Synthetic oligonucleotide; TGG chr2 60500719 60500738 60500735 +
gggcacctcacttcaagcct

SEQ ID NO: 163364 - DNA, 20 bp, Artificial Sequence
  Synthetic oligonucleotide; TGG chr2 60500722 60500741 60500738 +
cacctcacttcaagccttgg

SEQ ID NO: 163365 - DNA, 20 bp, Artificial Sequence
  Synthetic oligonucleotide; TAG chr2 60500726 60500745 60500742 +
tcacttcaagccttggtgga

SEQ ID NO: 163366 - DNA, 20 bp, Artificial Sequence
  Synthetic oligonucleotide; AGG chr2 60500727 60500746 60500743 +
cacttcaagccttggtggat

SEQ ID NO: 163367 - DNA, 20 bp, Artificial Sequence
  Synthetic oligonucleotide; AAG chr2 60500731 60500750 60500747 +
tcaagccttggtggataggt

SEQ ID NO: 163368 - DNA, 20 bp, Artificial Sequence
  Synthetic oligonucleotide; CAG chr2 60500743 60500762 60500759 +
ggataggtaagatgaacact

SEQ ID NO: 163369 - DNA, 20 bp, Artificial Sequence
  Synthetic oligonucleotide; AGG chr2 60500744 60500763 60500760 +
gataggtaagatgaacactc

SEQ ID NO: 163370 - DNA, 20 bp, Artificial Sequence
  Synthetic oligonucleotide; AAG chr2 60500752 60500771 60500768 +
agatgaacactcaggctccc

SEQ ID NO: 163371 - DNA, 20 bp, Artificial Sequence
  Synthetic oligonucleotide; TAG chr2 60500756 60500775 60500772 +
gaacactcaggctcccaagt

SEQ ID NO: 163372 - DNA, 20 bp, Artificial Sequence
  Synthetic oligonucleotide; CAG chr2 60500760 60500779 60500776 +
actcaggctcccaagttaga

SEQ ID NO: 163373 - DNA, 20 bp, Artificial Sequence
  Synthetic oligonucleotide; GAG chr2 60500765 60500784 60500781 +
ggctcccaagttagacagat

SEQ ID NO: 163374 - DNA, 20 bp, Artificial Sequence
  Synthetic oligonucleotide; TGG chr2 60500769 60500788 60500785 +
cccaagttagacagatgagc

SEQ ID NO: 163375 - DNA, 20 bp, Artificial Sequence
  Synthetic oligonucleotide; TGG chr2 60500796 60500815 60500812 +
ttcatctaccaccaatttcc

SEQ ID NO: 163376 - DNA, 20 bp, Artificial Sequence
  Synthetic oligonucleotide; TGG chr2 60500808 60500827 60500824 +
caatttcctggctgtgtgtc

SEQ ID NO: 163377 - DNA, 20 bp, Artificial Sequence
  Synthetic oligonucleotide; GGG chr2 60500809 60500828 60500825 +
aatttcctggctgtgtgtct

SEQ ID NO: 163378 - DNA, 20 bp, Artificial Sequence
  Synthetic oligonucleotide; GAG chr2 60500811 60500830 60500827 +
tttcctggctgtgtgtctgg

SEQ ID NO: 163379 - DNA, 20 bp, Artificial Sequence
  Synthetic oligonucleotide; CAG chr2 60500814 60500833 60500830 +
cctggctgtgtgtctgggag

SEQ ID NO: 163380 - DNA, 20 bp, Artificial Sequence
  Synthetic oligonucleotide; AAG chr2 60500832 60500851 60500848 +
agcagctctttaacctctcc

SEQ ID NO: 163381 - DNA, 20 bp, Artificial Sequence
  Synthetic oligonucleotide; CAG chr2 60500838 60500857 60500854 +
tctttaacctctccaagcct

SEQ ID NO: 163382 - DNA, 20 bp, Artificial Sequence
  Synthetic oligonucleotide; TGG chr2 60500850 60500869 60500866 +
ccaagcctcagtttcttcac

SEQ ID NO: 163383 - DNA, 20 bp, Artificial Sequence
  Synthetic oligonucleotide; TGG chr2 60500877 60500896 60500893 +
atgtgtatgatgacattgta

SEQ ID NO: 163384 - DNA, 20 bp, Artificial Sequence
  Synthetic oligonucleotide; TGG chr2 60500886 60500905 60500902 +
atgacattgtatggccaacc

SEQ ID NO: 163385 - DNA, 20 bp, Artificial Sequence
  Synthetic oligonucleotide; GGG chr2 60500887 60500906 60500903 +
tgacattgtatggccaacct

SEQ ID NO: 163386 - DNA, 20 bp, Artificial Sequence
  Synthetic oligonucleotide; GGG chr2 60500888 60500907 60500904 +
gacattgtatggccaacctg

SEQ ID NO: 163387 - DNA, 20 bp, Artificial Sequence
  Synthetic oligonucleotide; TGG chr2 60500898 60500917 60500914 +
ggccaacctggggttgctga

SEQ ID NO: 163388 - DNA, 20 bp, Artificial Sequence
  Synthetic oligonucleotide; TAG chr2 60500904 60500923 60500920 +
cctggggttgctgatggaac

SEQ ID NO: 163389 - DNA, 20 bp, Artificial Sequence
  Synthetic oligonucleotide; AAG chr2 60500911 60500930 60500927 +
ttgctgatggaactagttaa

SEQ ID NO: 163390 - DNA, 20 bp, Artificial Sequence
  Synthetic oligonucleotide; GAG chr2 60500913 60500932 60500929 +
gctgatggaactagttaaaa

SEQ ID NO: 163391 - DNA, 20 bp, Artificial Sequence
  Synthetic oligonucleotide; AAG chr2 60500924 60500943 60500940 +
tagttaaaagagtgtctgtg

SEQ ID NO: 163392 - DNA, 20 bp, Artificial Sequence
  Synthetic oligonucleotide; AAG chr2 60500928 60500947 60500944 +
taaaagagtgtctgtgaagc

SEQ ID NO: 163393 - DNA, 20 bp, Artificial Sequence
  Synthetic oligonucleotide; TAG chr2 60500933 60500952 60500949 +
gagtgtctgtgaagcaagcc

SEQ ID NO: 163394 - DNA, 20 bp, Artificial Sequence
  Synthetic oligonucleotide; TGG chr2 60500937 60500956 60500953 +
gtctgtgaagcaagcctagc

SEQ ID NO: 163395 - DNA, 20 bp, Artificial Sequence
  Synthetic oligonucleotide; GGG chr2 60500938 60500957 60500954 +
tctgtgaagcaagcctagct

SEQ ID NO: 163396 - DNA, 20 bp, Artificial Sequence
  Synthetic oligonucleotide; TGG chr2 60500941 60500960 60500957 +
gtgaagcaagcctagctggg

SEQ ID NO: 163397 - DNA, 20 bp, Artificial Sequence
  Synthetic oligonucleotide; GGG chr2 60500942 60500961 60500958 +
tgaagcaagcctagctgggt

SEQ ID NO: 163398 - DNA, 20 bp, Artificial Sequence
  Synthetic oligonucleotide; AAG chr2 60500950 60500969 60500966 +
gcctagctgggtgggcttgc

SEQ ID NO: 163399 - DNA, 20 bp, Artificial Sequence
  Synthetic oligonucleotide; TGG chr2 60500959 60500978 60500975 +
ggtgggcttgcaagcatttc

SEQ ID NO: 163400 - DNA, 20 bp, Artificial Sequence
  Synthetic oligonucleotide; GGG chr2 60500960 60500979 60500976 +
gtgggcttgcaagcatttct

SEQ ID NO: 163401 - DNA, 20 bp, Artificial Sequence
  Synthetic oligonucleotide; TGG chr2 60500986 60501005 60501002 +
ctgcatcctcctctgtaaaa

SEQ ID NO: 163402 - DNA, 20 bp, Artificial Sequence
  Synthetic oligonucleotide; GGG chr2 60500987 60501006 60501003 +
tgcatcctcctctgtaaaat

SEQ ID NO: 163403 - DNA, 20 bp, Artificial Sequence
  Synthetic oligonucleotide; GAG chr2 60500989 60501008 60501005 +
catcctcctctgtaaaatgg

SEQ ID NO: 163404 - DNA, 20 bp, Artificial Sequence
  Synthetic oligonucleotide; CAG chr2 60501006 60501025 60501022 +
tgggagaaccctgaactgct

SEQ ID NO: 163405 - DNA, 20 bp, Artificial Sequence
  Synthetic oligonucleotide; TGG chr2 60501018 60501037 60501034 +
gaactgctcagccgacctca

SEQ ID NO: 163406 - DNA, 20 bp, Artificial Sequence
  Synthetic oligonucleotide; CAG chr2 60501031 60501050 60501047 +
gacctcatggttgactcact

SEQ ID NO: 163407 - DNA, 20 bp, Artificial Sequence
  Synthetic oligonucleotide; CAG chr2 60501037 60501056 60501053 +
atggttgactcactcagcaa

SEQ ID NO: 163408 - DNA, 20 bp, Artificial Sequence
  Synthetic oligonucleotide; GAG chr2 60501039 60501058 60501055 +
ggttgactcactcagcaaca

SEQ ID NO: 163409 - DNA, 20 bp, Artificial Sequence
  Synthetic oligonucleotide; AGG chr2 60501040 60501059 60501056 +
gttgactcactcagcaacag

SEQ ID NO: 163410 - DNA, 20 bp, Artificial Sequence
  Synthetic oligonucleotide; CAG chr2 60501049 60501068 60501065 +
ctcagcaacagaggtctcca

SEQ ID NO: 163411 - DNA, 20 bp, Artificial Sequence
  Synthetic oligonucleotide; AGG chr2 60501050 60501069 60501066 +
tcagcaacagaggtctccac

SEQ ID NO: 163412 - DNA, 20 bp, Artificial Sequence
  Synthetic oligonucleotide; GAG chr2 60501052 60501071 60501068 +
agcaacagaggtctccacag

SEQ ID NO: 163413 - DNA, 20 bp, Artificial Sequence
  Synthetic oligonucleotide; GAG chr2 60501067 60501086 60501083 +
cacaggagccctgcccacat

SEQ ID NO: 163414 - DNA, 20 bp, Artificial Sequence
  Synthetic oligonucleotide; TGG chr2 60501077 60501096 60501093 +
ctgcccacatgagacatctt

SEQ ID NO: 163415 - DNA, 20 bp, Artificial Sequence
  Synthetic oligonucleotide; AAG chr2 60501095 60501114 60501111 +
tttggcacatcttctgaaac

SEQ ID NO: 163416 - DNA, 20 bp, Artificial Sequence
  Synthetic oligonucleotide; TGG chr2 60501107 60501126 60501123 +
tctgaaacaagacctgtttc

SEQ ID NO: 163417 - DNA, 20 bp, Artificial Sequence
  Synthetic oligonucleotide; AAG chr2 60501111 60501130 60501127 +
aaacaagacctgtttctgga

SEQ ID NO: 163418 - DNA, 20 bp, Artificial Sequence
  Synthetic oligonucleotide; TGG chr2 60501118 60501137 60501134 +
acctgtttctggaaagttgt

SEQ ID NO: 163419 - DNA, 20 bp, Artificial Sequence
  Synthetic oligonucleotide; CAG chr2 60501158 60501177 60501174 +
acttatttatattattgttt

SEQ ID NO: 163420 - DNA, 20 bp, Artificial Sequence
  Synthetic oligonucleotide; TGG chr2 60501191 60501210 60501207 +
ttcattctgctttgattcaa

SEQ ID NO: 163421 - DNA, 20 bp, Artificial Sequence
  Synthetic oligonucleotide; CAG chr2 60501194 60501213 60501210 +
attctgctttgattcaatgg

SEQ ID NO: 163422 - DNA, 20 bp, Artificial Sequence
  Synthetic oligonucleotide; TGG chr2 60501212 60501231 60501228 +
ggcagccaatttaattcatt

SEQ ID NO: 163423 - DNA, 20 bp, Artificial Sequence
  Synthetic oligonucleotide; TAG chr2 60501225 60501244 60501241 +
attcatttggtccaaacctg

SEQ ID NO: 163424 - DNA, 20 bp, Artificial Sequence
  Synthetic oligonucleotide; CAG chr2 60501238 60501257 60501254 +
aaacctgtagtgctacttgc

SEQ ID NO: 163425 - DNA, 20 bp, Artificial Sequence
  Synthetic oligonucleotide; TGG chr2 60501248 60501267 60501264 +
tgctacttgccagaacaaaa

SEQ ID NO: 163426 - DNA, 20 bp, Artificial Sequence
  Synthetic oligonucleotide; GAG chr2 60501254 60501273 60501270 +
ttgccagaacaaaatggaat

SEQ ID NO: 163427 - DNA, 20 bp, Artificial Sequence
  Synthetic oligonucleotide; AAG chr2 60501274 60501293 60501290 +
gagcctcattccctgccctc

SEQ ID NO: 163428 - DNA, 20 bp, Artificial Sequence
  Synthetic oligonucleotide; AGG chr2 60501275 60501294 60501291 +
agcctcattccctgccctca

SEQ ID NO: 163429 - DNA, 20 bp, Artificial Sequence
  Synthetic oligonucleotide; GAG chr2 60501277 60501296 60501293 +
cctcattccctgccctcaag

SEQ ID NO: 163430 - DNA, 20 bp, Artificial Sequence
  Synthetic oligonucleotide; CAG chr2 60501284 60501303 60501300 +
ccctgccctcaaggagctca

SEQ ID NO: 163431 - DNA, 20 bp, Artificial Sequence
  Synthetic oligonucleotide; CAG chr2 60501289 60501308 60501305 +
ccctcaaggagctcacagtc

SEQ ID NO: 163432 - DNA, 20 bp, Artificial Sequence
  Synthetic oligonucleotide; TGG chr2 60501292 60501311 60501308 +
tcaaggagctcacagtccag

SEQ ID NO: 163433 - DNA, 20 bp, Artificial Sequence
  Synthetic oligonucleotide; AAG chr2 60501314 60501333 60501330 +
gctctgtctttaatatctat

SEQ ID NO: 163434 - DNA, 20 bp, Artificial Sequence
  Synthetic oligonucleotide; GAG chr2 60501316 60501335 60501332 +
tctgtctttaatatctataa

SEQ ID NO: 163435 - DNA, 20 bp, Artificial Sequence
  Synthetic oligonucleotide; CAG chr2 60501321 60501340 60501337 +
ctttaatatctataagagca

SEQ ID NO: 163436 - DNA, 20 bp, Artificial Sequence
  Synthetic oligonucleotide; AGG chr2 60501322 60501341 60501338 +
tttaatatctataagagcac

SEQ ID NO: 163437 - DNA, 20 bp, Artificial Sequence
  Synthetic oligonucleotide; AAG chr2 60501326 60501345 60501342 +
atatctataagagcacaggt

SEQ ID NO: 163438 - DNA, 20 bp, Artificial Sequence
  Synthetic oligonucleotide; CAG chr2 60501334 60501353 60501350 +
aagagcacaggtaagtgtca

SEQ ID NO: 163439 - DNA, 20 bp, Artificial Sequence
  Synthetic oligonucleotide; AGG chr2 60501335 60501354 60501351 +
agagcacaggtaagtgtcac

SEQ ID NO: 163440 - DNA, 20 bp, Artificial Sequence
  Synthetic oligonucleotide; AAG chr2 60501338 60501357 60501354 +
gcacaggtaagtgtcacagg

SEQ ID NO: 163441 - DNA, 20 bp, Artificial Sequence
  Synthetic oligonucleotide; TGG chr2 60501344 60501363 60501360 +
gtaagtgtcacaggaagcca

SEQ ID NO: 163442 - DNA, 20 bp, Artificial Sequence
  Synthetic oligonucleotide; TGG chr2 60501352 60501371 60501368 +
cacaggaagccatggtcctt

SEQ ID NO: 163443 - DNA, 20 bp, Artificial Sequence
  Synthetic oligonucleotide; GGG chr2 60501353 60501372 60501369 +
acaggaagccatggtccttt

SEQ ID NO: 163444 - DNA, 20 bp, Artificial Sequence
  Synthetic oligonucleotide; GGG chr2 60501354 60501373 60501370 +
caggaagccatggtcctttg

SEQ ID NO: 163445 - DNA, 20 bp, Artificial Sequence
  Synthetic oligonucleotide; GGG chr2 60501355 60501374 60501371 +
aggaagccatggtcctttgg

SEQ ID NO: 163446 - DNA, 20 bp, Artificial Sequence
  Synthetic oligonucleotide; AAG chr2 60501363 60501382 60501379 +
atggtcctttgggggaaatg

SEQ ID NO: 163447 - DNA, 20 bp, Artificial Sequence
  Synthetic oligonucleotide; TGG chr2 60501408 60501427 60501424 +
tcacttccaaatactttacc

SEQ ID NO: 163448 - DNA, 20 bp, Artificial Sequence
  Synthetic oligonucleotide; AAG chr2 60501416 60501435 60501432 +
aaatactttacctggtttgt

SEQ ID NO: 163449 - DNA, 20 bp, Artificial Sequence
  Synthetic oligonucleotide; CGG chr2 60501427 60501446 60501443 +
ctggtttgtaagttctcttt

SEQ ID NO: 163450 - DNA, 20 bp, Artificial Sequence
  Synthetic oligonucleotide; GGG chr2 60501428 60501447 60501444 +
tggtttgtaagttctctttc

SEQ ID NO: 163451 - DNA, 20 bp, Artificial Sequence
  Synthetic oligonucleotide; GAG chr2 60501440 60501459 60501456 +
tctctttcgggtgcttccct

SEQ ID NO: 163452 - DNA, 20 bp, Artificial Sequence
  Synthetic oligonucleotide; TGG chr2 60501443 60501462 60501459 +
ctttcgggtgcttccctgag

SEQ ID NO: 163453 - DNA, 20 bp, Artificial Sequence
  Synthetic oligonucleotide; AAG chr2 60501447 60501466 60501463 +
cgggtgcttccctgagtggc

SEQ ID NO: 163454 - DNA, 20 bp, Artificial Sequence
  Synthetic oligonucleotide; GAG chr2 60501449 60501468 60501465 +
ggtgcttccctgagtggcaa

SEQ ID NO: 163455 - DNA, 20 bp, Artificial Sequence
  Synthetic oligonucleotide; AGG chr2 60501450 60501469 60501466 +
gtgcttccctgagtggcaag

SEQ ID NO: 163456 - DNA, 20 bp, Artificial Sequence
  Synthetic oligonucleotide; GGG chr2 60501451 60501470 60501467 +
tgcttccctgagtggcaaga

SEQ ID NO: 163457 - DNA, 20 bp, Artificial Sequence
  Synthetic oligonucleotide; AAG chr2 60501455 60501474 60501471 +
tccctgagtggcaagaggga

SEQ ID NO: 163458 - DNA, 20 bp, Artificial Sequence
  Synthetic oligonucleotide; AGG chr2 60501456 60501475 60501472 +
ccctgagtggcaagagggaa

SEQ ID NO: 163459 - DNA, 20 bp, Artificial Sequence
  Synthetic oligonucleotide; AAG chr2 60501467 60501486 60501483 +
aagagggaaaggccttttgc

SEQ ID NO: 163460 - DNA, 20 bp, Artificial Sequence
  Synthetic oligonucleotide; GAG chr2 60501507 60501526 60501523 +
tttttttttttttttttttt

SEQ ID NO: 163461 - DNA, 20 bp, Artificial Sequence
  Synthetic oligonucleotide; CAG chr2 60501511 60501530 60501527 +
ttttttttttttttttgaga

SEQ ID NO: 163462 - DNA, 20 bp, Artificial Sequence
  Synthetic oligonucleotide; GAG chr2 60501513 60501532 60501529 +
ttttttttttttttgagaca

SEQ ID NO: 163463 - DNA, 20 bp, Artificial Sequence
  Synthetic oligonucleotide; CAG chr2 60501532 60501551 60501548 +
agagtttcgctcttgttgcc

SEQ ID NO: 163464 - DNA, 20 bp, Artificial Sequence
  Synthetic oligonucleotide; AGG chr2 60501533 60501552 60501549 +
gagtttcgctcttgttgccc

SEQ ID NO: 163465 - DNA, 20 bp, Artificial Sequence
  Synthetic oligonucleotide; TGG chr2 60501537 60501556 60501553 +
ttcgctcttgttgcccaggc

SEQ ID NO: 163466 - DNA, 20 bp, Artificial Sequence
  Synthetic oligonucleotide; GGG chr2 60501538 60501557 60501554 +
tcgctcttgttgcccaggct

SEQ ID NO: 163467 - DNA, 20 bp, Artificial Sequence
  Synthetic oligonucleotide; GGG chr2 60501539 60501558 60501555 +
cgctcttgttgcccaggctg

SEQ ID NO: 163468 - DNA, 20 bp, Artificial Sequence
  Synthetic oligonucleotide; TGG chr2 60501547 60501566 60501563 +
ttgcccaggctggggtgcaa

SEQ ID NO: 163469 - DNA, 20 bp, Artificial Sequence
  Synthetic oligonucleotide; CGG chr2 60501558 60501577 60501574 +
ggggtgcaatggtgtgatct

SEQ ID NO: 163470 - DNA, 20 bp, Artificial Sequence
  Synthetic oligonucleotide; TGG chr2 60501579 60501598 60501595 +
ggctcaccacctctgcctcc

SEQ ID NO: 163471 - DNA, 20 bp, Artificial Sequence
  Synthetic oligonucleotide; GGG chr2 60501580 60501599 60501596 +
gctcaccacctctgcctcct

SEQ ID NO: 163472 - DNA, 20 bp, Artificial Sequence
  Synthetic oligonucleotide; AAG chr2 60501586 60501605 60501602 +
cacctctgcctcctgggttc

SEQ ID NO: 163473 - DNA, 20 bp, Artificial Sequence
  Synthetic oligonucleotide; CAG chr2 60501603 60501622 60501619 +
ttcaagcaattctcctccct

SEQ ID NO: 163474 - DNA, 20 bp, Artificial Sequence
  Synthetic oligonucleotide; GAG chr2 60501612 60501631 60501628 +
ttctcctccctcagcctcct

SEQ ID NO: 163475 - DNA, 20 bp, Artificial Sequence
  Synthetic oligonucleotide; TAG chr2 60501615 60501634 60501631 +
tcctccctcagcctcctgag

SEQ ID NO: 163476 - DNA, 20 bp, Artificial Sequence
  Synthetic oligonucleotide; TGG chr2 60501619 60501638 60501635 +
ccctcagcctcctgagtagc

SEQ ID NO: 163477 - DNA, 20 bp, Artificial Sequence
  Synthetic oligonucleotide; GGG chr2 60501620 60501639 60501636 +
cctcagcctcctgagtagct

SEQ ID NO: 163478 - DNA, 20 bp, Artificial Sequence
  Synthetic oligonucleotide; CAG chr2 60501627 60501646 60501643 +
ctcctgagtagctgggatta

SEQ ID NO: 163479 - DNA, 20 bp, Artificial Sequence
  Synthetic oligonucleotide; AGG chr2 60501628 60501647 60501644 +
tcctgagtagctgggattac

SEQ ID NO: 163480 - DNA, 20 bp, Artificial Sequence
  Synthetic oligonucleotide; TGG chr2 60501647 60501666 60501663 +
caggcatgtgcgaccatgcc

SEQ ID NO: 163481 - DNA, 20 bp, Artificial Sequence
  Synthetic oligonucleotide; AAG chr2 60501652 60501671 60501668 +
atgtgcgaccatgcctggct

SEQ ID NO: 163482 - DNA, 20 bp, Artificial Sequence
  Synthetic oligonucleotide; TAG chr2 60501668 60501687 60501684 +
ggctaagtttatatttttaa

SEQ ID NO: 163483 - DNA, 20 bp, Artificial Sequence
  Synthetic oligonucleotide; GAG chr2 60501670 60501689 60501686 +
ctaagtttatatttttaata

SEQ ID NO: 163484 - DNA, 20 bp, Artificial Sequence
  Synthetic oligonucleotide; GAG chr2 60501675 60501694 60501691 +
tttatatttttaatagagat

SEQ ID NO: 163485 - DNA, 20 bp, Artificial Sequence
  Synthetic oligonucleotide; AGG chr2 60501676 60501695 60501692 +
ttatatttttaatagagatg

SEQ ID NO: 163486 - DNA, 20 bp, Artificial Sequence
  Synthetic oligonucleotide; TGG chr2 60501690 60501709 60501706 +
gagatgaggtttctccatgt

SEQ ID NO: 163487 - DNA, 20 bp, Artificial Sequence
  Synthetic oligonucleotide; CAG chr2 60501694 60501713 60501710 +
tgaggtttctccatgttggt

SEQ ID NO: 163488 - DNA, 20 bp, Artificial Sequence
  Synthetic oligonucleotide; AGG chr2 60501695 60501714 60501711 +
gaggtttctccatgttggtc

SEQ ID NO: 163489 - DNA, 20 bp, Artificial Sequence
  Synthetic oligonucleotide; TGG chr2 60501699 60501718 60501715 +
tttctccatgttggtcaggc

SEQ ID NO: 163490 - DNA, 20 bp, Artificial Sequence
  Synthetic oligonucleotide; CAG chr2 60501719 60501738 60501735 +
tggtctcaaactcttgacct

SEQ ID NO: 163491 - DNA, 20 bp, Artificial Sequence
  Synthetic oligonucleotide; AGG chr2 60501720 60501739 60501736 +
ggtctcaaactcttgacctc

SEQ ID NO: 163492 - DNA, 20 bp, Artificial Sequence
  Synthetic oligonucleotide; CGG chr2 60501737 60501756 60501753 +
ctcaggtgatctacccacct

SEQ ID NO: 163493 - DNA, 20 bp, Artificial Sequence
  Synthetic oligonucleotide; AAG chr2 60501747 60501766 60501763 +
ctacccacctcggcctccca

SEQ ID NO: 163494 - DNA, 20 bp, Artificial Sequence
  Synthetic oligonucleotide; TGG chr2 60501753 60501772 60501769 +
acctcggcctcccaaagtgc

SEQ ID NO: 163495 - DNA, 20 bp, Artificial Sequence
  Synthetic oligonucleotide; CAG chr2 60501761 60501780 60501777 +
ctcccaaagtgctggaatta

SEQ ID NO: 163496 - DNA, 20 bp, Artificial Sequence
  Synthetic oligonucleotide; GAG chr2 60501768 60501787 60501784 +
agtgctggaattacagacgt

SEQ ID NO: 163497 - DNA, 20 bp, Artificial Sequence
  Synthetic oligonucleotide; CAG chr2 60501781 60501800 60501797 +
cagacgtgagccactgcgcc

SEQ ID NO: 163498 - DNA, 20 bp, Artificial Sequence
  Synthetic oligonucleotide; CAG chr2 60501806 60501825 60501822 +
ttacactgctttcttaatta

SEQ ID NO: 163499 - DNA, 20 bp, Artificial Sequence
  Synthetic oligonucleotide; CAG chr2 60501809 60501828 60501825 +
cactgctttcttaattacag

SEQ ID NO: 163500 - DNA, 20 bp, Artificial Sequence
  Synthetic oligonucleotide; AAG chr2 60501836 60501855 60501852 +
ctcatctcacataaaaattt

SEQ ID NO: 163501 - DNA, 20 bp, Artificial Sequence
  Synthetic oligonucleotide; CGG chr2 60501840 60501859 60501856 +
tctcacataaaaatttaaga

SEQ ID NO: 163502 - DNA, 20 bp, Artificial Sequence
  Synthetic oligonucleotide; GGG chr2 60501841 60501860 60501857 +
ctcacataaaaatttaagac

SEQ ID NO: 163503 - DNA, 20 bp, Artificial Sequence
  Synthetic oligonucleotide; CAG chr2 60501848 60501867 60501864 +
aaaaatttaagacgggaaaa

SEQ ID NO: 163504 - DNA, 20 bp, Artificial Sequence
  Synthetic oligonucleotide; AGG chr2 60501849 60501868 60501865 +
aaaatttaagacgggaaaac

SEQ ID NO: 163505 - DNA, 20 bp, Artificial Sequence
  Synthetic oligonucleotide; AAG chr2 60501852 60501871 60501868 +
atttaagacgggaaaacagg

SEQ ID NO: 163506 - DNA, 20 bp, Artificial Sequence
  Synthetic oligonucleotide; GAG chr2 60501864 60501883 60501880 +
aaaacaggaagatgcattct

SEQ ID NO: 163507 - DNA, 20 bp, Artificial Sequence
  Synthetic oligonucleotide; AAG chr2 60501867 60501886 60501883 +
acaggaagatgcattctgag

SEQ ID NO: 163508 - DNA, 20 bp, Artificial Sequence
  Synthetic oligonucleotide; CAG chr2 60501876 60501895 60501892 +
tgcattctgagaagttatat

SEQ ID NO: 163509 - DNA, 20 bp, Artificial Sequence
  Synthetic oligonucleotide; CAG chr2 60501905 60501924 60501921 +
tgcctctctacattccaaaa

SEQ ID NO: 163510 - DNA, 20 bp, Artificial Sequence
  Synthetic oligonucleotide; TAG chr2 60501930 60501949 60501946 +
ttttattctaattattttac

SEQ ID NO: 163511 - DNA, 20 bp, Artificial Sequence
  Synthetic oligonucleotide; TGG chr2 60501940 60501959 60501956 +
attattttactagtgaatta

SEQ ID NO: 163512 - DNA, 20 bp, Artificial Sequence
  Synthetic oligonucleotide; AAG chr2 60501947 60501966 60501963 +
tactagtgaattatggaata

SEQ ID NO: 163513 - DNA, 20 bp, Artificial Sequence
  Synthetic oligonucleotide; TAG chr2 60501950 60501969 60501966 +
tagtgaattatggaataaag

SEQ ID NO: 163514 - DNA, 20 bp, Artificial Sequence
  Synthetic oligonucleotide; TAG chr2 60501987 60502006 60502003 +
ctacacaacttgtgttgcac

SEQ ID NO: 163515 - DNA, 20 bp, Artificial Sequence
  Synthetic oligonucleotide; AGG chr2 60501988 60502007 60502004 +
tacacaacttgtgttgcact

SEQ ID NO: 163516 - DNA, 20 bp, Artificial Sequence
  Synthetic oligonucleotide; CAG chr2 60501999 60502018 60502015 +
tgttgcactaggtgaaatct

SEQ ID NO: 163517 - DNA, 20 bp, Artificial Sequence
  Synthetic oligonucleotide; AGG chr2 60502000 60502019 60502016 +
gttgcactaggtgaaatctc

SEQ ID NO: 163518 - DNA, 20 bp, Artificial Sequence
  Synthetic oligonucleotide; CAG chr2 60502007 60502026 60502023 +
taggtgaaatctcaggctaa

SEQ ID NO: 163519 - DNA, 20 bp, Artificial Sequence
  Synthetic oligonucleotide; GAG chr2 60502009 60502028 60502025 +
ggtgaaatctcaggctaaca

SEQ ID NO: 163520 - DNA, 20 bp, Artificial Sequence
  Synthetic oligonucleotide; CAG chr2 60502015 60502034 60502031 +
atctcaggctaacagagctt

SEQ ID NO: 163521 - DNA, 20 bp, Artificial Sequence
  Synthetic oligonucleotide; AGG chr2 60502016 60502035 60502032 +
tctcaggctaacagagcttc

SEQ ID NO: 163522 - DNA, 20 bp, Artificial Sequence
  Synthetic oligonucleotide; GGG chr2 60502017 60502036 60502033 +
ctcaggctaacagagcttca

SEQ ID NO: 163523 - DNA, 20 bp, Artificial Sequence
  Synthetic oligonucleotide; GAG chr2 60502019 60502038 60502035 +
caggctaacagagcttcagg

SEQ ID NO: 163524 - DNA, 20 bp, Artificial Sequence
  Synthetic oligonucleotide; AGG chr2 60502020 60502039 60502036 +
aggctaacagagcttcaggg

SEQ ID NO: 163525 - DNA, 20 bp, Artificial Sequence
  Synthetic oligonucleotide; AAG chr2 60502024 60502043 60502040 +
taacagagcttcagggagga

SEQ ID NO: 163526 - DNA, 20 bp, Artificial Sequence
  Synthetic oligonucleotide; AGG chr2 60502025 60502044 60502041 +
aacagagcttcagggaggaa

SEQ ID NO: 163527 - DNA, 20 bp, Artificial Sequence
  Synthetic oligonucleotide; CAG chr2 60502029 60502048 60502045 +
gagcttcagggaggaaaggc

SEQ ID NO: 163528 - DNA, 20 bp, Artificial Sequence
  Synthetic oligonucleotide; CAG chr2 60502054 60502073 60502070 +
caaaaatatgcctcactcca

SEQ ID NO: 163529 - DNA, 20 bp, Artificial Sequence
  Synthetic oligonucleotide; GAG chr2 60502056 60502075 60502072 +
aaaatatgcctcactccaca

SEQ ID NO: 163530 - DNA, 20 bp, Artificial Sequence
  Synthetic oligonucleotide; AAG chr2 60502059 60502078 60502075 +
atatgcctcactccacagag

SEQ ID NO: 163531 - DNA, 20 bp, Artificial Sequence
  Synthetic oligonucleotide; CAG chr2 60502071 60502090 60502087 +
ccacagagaagctgtaccac

SEQ ID NO: 163532 - DNA, 20 bp, Artificial Sequence
  Synthetic oligonucleotide; AAG chr2 60502074 60502093 60502090 +
cagagaagctgtaccaccag

SEQ ID NO: 163533 - DNA, 20 bp, Artificial Sequence
  Synthetic oligonucleotide; TGG chr2 60502080 60502099 60502096 +
agctgtaccaccagaagtcc

SEQ ID NO: 163534 - DNA, 20 bp, Artificial Sequence
  Synthetic oligonucleotide; GAG chr2 60502089 60502108 60502105 +
accagaagtcctggaaaact

SEQ ID NO: 163535 - DNA, 20 bp, Artificial Sequence
  Synthetic oligonucleotide; GAG chr2 60502091 60502110 60502107 +
cagaagtcctggaaaactga

SEQ ID NO: 163536 - DNA, 20 bp, Artificial Sequence
  Synthetic oligonucleotide; AGG chr2 60502092 60502111 60502108 +
agaagtcctggaaaactgag

SEQ ID NO: 163537 - DNA, 20 bp, Artificial Sequence
  Synthetic oligonucleotide; AAG chr2 60502120 60502139 60502136 +
atgttgtaacaatgcaactc

SEQ ID NO: 163538 - DNA, 20 bp, Artificial Sequence
  Synthetic oligonucleotide; CAG chr2 60502128 60502147 60502144 +
acaatgcaactcaagactat

SEQ ID NO: 163539 - DNA, 20 bp, Artificial Sequence
  Synthetic oligonucleotide; TAG chr2 60502150 60502169 60502166 +
gaatgatatgaatatttgta

SEQ ID NO: 163540 - DNA, 20 bp, Artificial Sequence
  Synthetic oligonucleotide; AAG chr2 60502163 60502182 60502179 +
atttgtatagatacttatca

SEQ ID NO: 163541 - DNA, 20 bp, Artificial Sequence
  Synthetic oligonucleotide; CAG chr2 60502173 60502192 60502189 +
atacttatcaaagcaacaat

SEQ ID NO: 163542 - DNA, 20 bp, Artificial Sequence
  Synthetic oligonucleotide; GAG chr2 60502175 60502194 60502191 +
acttatcaaagcaacaatca

SEQ ID NO: 163543 - DNA, 20 bp, Artificial Sequence
  Synthetic oligonucleotide; CAG chr2 60502180 60502199 60502196 +
tcaaagcaacaatcagagat

SEQ ID NO: 163544 - DNA, 20 bp, Artificial Sequence
  Synthetic oligonucleotide; AGG chr2 60502181 60502200 60502197 +
caaagcaacaatcagagatc

SEQ ID NO: 163545 - DNA, 20 bp, Artificial Sequence
  Synthetic oligonucleotide; GAG chr2 60502195 60502214 60502211 +
gagatcaggtccctccaaat

SEQ ID NO: 163546 - DNA, 20 bp, Artificial Sequence
  Synthetic oligonucleotide; CAG chr2 60502202 60502221 60502218 +
ggtccctccaaatgagctta

SEQ ID NO: 163547 - DNA, 20 bp, Artificial Sequence
  Synthetic oligonucleotide; AAG chr2 60502225 60502244 60502241 +
tttatgatcctgctttgtaa

SEQ ID NO: 163548 - DNA, 20 bp, Artificial Sequence
  Synthetic oligonucleotide; TGG chr2 60502229 60502248 60502245 +
tgatcctgctttgtaaaagc

SEQ ID NO: 163549 - DNA, 20 bp, Artificial Sequence
  Synthetic oligonucleotide; TGG chr2 60502245 60502264 60502261 +
aagctggtgaaacaaaatga

SEQ ID NO: 163550 - DNA, 20 bp, Artificial Sequence
  Synthetic oligonucleotide; TAG chr2 60502249 60502268 60502265 +
tggtgaaacaaaatgatgga

SEQ ID NO: 163551 - DNA, 20 bp, Artificial Sequence
  Synthetic oligonucleotide; CAG chr2 60502252 60502271 60502268 +
tgaaacaaaatgatggatag

SEQ ID NO: 163552 - DNA, 20 bp, Artificial Sequence
  Synthetic oligonucleotide; GAG chr2 60502262 60502281 60502278 +
tgatggatagcagatttgct

SEQ ID NO: 163553 - DNA, 20 bp, Artificial Sequence
  Synthetic oligonucleotide; AAG chr2 60502270 60502289 60502286 +
agcagatttgctgagctcca

SEQ ID NO: 163554 - DNA, 20 bp, Artificial Sequence
  Synthetic oligonucleotide; CAG chr2 60502274 60502293 60502290 +
gatttgctgagctccaaagt

SEQ ID NO: 163555 - DNA, 20 bp, Artificial Sequence
  Synthetic oligonucleotide; AGG chr2 60502275 60502294 60502291 +
atttgctgagctccaaagtc

SEQ ID NO: 163556 - DNA, 20 bp, Artificial Sequence
  Synthetic oligonucleotide; GGG chr2 60502276 60502295 60502292 +
tttgctgagctccaaagtca

SEQ ID NO: 163557 - DNA, 20 bp, Artificial Sequence
  Synthetic oligonucleotide; GAG chr2 60502278 60502297 60502294 +
tgctgagctccaaagtcagg

SEQ ID NO: 163558 - DNA, 20 bp, Artificial Sequence
  Synthetic oligonucleotide; TAG chr2 60502281 60502300 60502297 +
tgagctccaaagtcagggag

SEQ ID NO: 163559 - DNA, 20 bp, Artificial Sequence
  Synthetic oligonucleotide; AGG chr2 60502282 60502301 60502298 +
gagctccaaagtcagggagt

SEQ ID NO: 163560 - DNA, 20 bp, Artificial Sequence
  Synthetic oligonucleotide; CAG chr2 60502289 60502308 60502305 +
aaagtcagggagtaggtaaa

SEQ ID NO: 163561 - DNA, 20 bp, Artificial Sequence
  Synthetic oligonucleotide; CAG chr2 60502303 60502322 60502319 +
ggtaaacagtgtgaacgtgt

SEQ ID NO: 163562 - DNA, 20 bp, Artificial Sequence
  Synthetic oligonucleotide; TGG chr2 60502314 60502333 60502330 +
tgaacgtgtcagctccctcc

SEQ ID NO: 163563 - DNA, 20 bp, Artificial Sequence
  Synthetic oligonucleotide; GAG chr2 60502335 60502354 60502351 +
ggctctcctctacattctgt

SEQ ID NO: 163564 - DNA, 20 bp, Artificial Sequence
  Synthetic oligonucleotide; CGG chr2 60502342 60502361 60502358 +
ctctacattctgtgagcaaa

SEQ ID NO: 163565 - DNA, 20 bp, Artificial Sequence
  Synthetic oligonucleotide; CGG chr2 60502358 60502377 60502374 +
caaacggaaaaataaaccat

SEQ ID NO: 163566 - DNA, 20 bp, Artificial Sequence
  Synthetic oligonucleotide; AAG chr2 60502364 60502383 60502380 +
gaaaaataaaccatcggaaa

SEQ ID NO: 163567 - DNA, 20 bp, Artificial Sequence
  Synthetic oligonucleotide; CAG chr2 60502370 60502389 60502386 +
taaaccatcggaaaaagtct

SEQ ID NO: 163568 - DNA, 20 bp, Artificial Sequence
  Synthetic oligonucleotide; CAG chr2 60502388 60502407 60502404 +
ctcagcctaataaaactgca

SEQ ID NO: 163569 - DNA, 20 bp, Artificial Sequence
  Synthetic oligonucleotide; CAG chr2 60502392 60502411 60502408 +
gcctaataaaactgcacaga

SEQ ID NO: 163570 - DNA, 20 bp, Artificial Sequence
  Synthetic oligonucleotide; CAG chr2 60502409 60502428 60502425 +
agacagaataacttcttcat

SEQ ID NO: 163571 - DNA, 20 bp, Artificial Sequence
  Synthetic oligonucleotide; CAG chr2 60502415 60502434 60502431 +
aataacttcttcatcagatt

SEQ ID NO: 163572 - DNA, 20 bp, Artificial Sequence
  Synthetic oligonucleotide; AAG chr2 60502418 60502437 60502434 +
aacttcttcatcagattcag

SEQ ID NO: 163573 - DNA, 20 bp, Artificial Sequence
  Synthetic oligonucleotide; GAG chr2 60502420 60502439 60502436 +
cttcttcatcagattcagaa

SEQ ID NO: 163574 - DNA, 20 bp, Artificial Sequence
  Synthetic oligonucleotide; TAG chr2 60502423 60502442 60502439 +
cttcatcagattcagaagag

SEQ ID NO: 163575 - DNA, 20 bp, Artificial Sequence
  Synthetic oligonucleotide; CAG chr2 60502426 60502445 60502442 +
catcagattcagaagagtag

SEQ ID NO: 163576 - DNA, 20 bp, Artificial Sequence
  Synthetic oligonucleotide; AGG chr2 60502427 60502446 60502443 +
atcagattcagaagagtagc

SEQ ID NO: 163577 - DNA, 20 bp, Artificial Sequence
  Synthetic oligonucleotide; GGG chr2 60502428 60502447 60502444 +
tcagattcagaagagtagca

SEQ ID NO: 163578 - DNA, 20 bp, Artificial Sequence
  Synthetic oligonucleotide; GGG chr2 60502429 60502448 60502445 +
cagattcagaagagtagcag

SEQ ID NO: 163579 - DNA, 20 bp, Artificial Sequence
  Synthetic oligonucleotide; GGG chr2 60502430 60502449 60502446 +
agattcagaagagtagcagg

SEQ ID NO: 163580 - DNA, 20 bp, Artificial Sequence
  Synthetic oligonucleotide; TAG chr2 60502441 60502460 60502457 +
agtagcagggggtttctcgc

SEQ ID NO: 163581 - DNA, 20 bp, Artificial Sequence
  Synthetic oligonucleotide; CAG chr2 60502446 60502465 60502462 +
cagggggtttctcgctagca

SEQ ID NO: 163582 - DNA, 20 bp, Artificial Sequence
  Synthetic oligonucleotide; GAG chr2 60502453 60502472 60502469 +
tttctcgctagcacagattt

SEQ ID NO: 163583 - DNA, 20 bp, Artificial Sequence
  Synthetic oligonucleotide; TGG chr2 60502488 60502507 60502504 +
acactttgtacatacaattc

SEQ ID NO: 163584 - DNA, 20 bp, Artificial Sequence
  Synthetic oligonucleotide; GGG chr2 60502489 60502508 60502505 +
cactttgtacatacaattct

SEQ ID NO: 163585 - DNA, 20 bp, Artificial Sequence
  Synthetic oligonucleotide; CAG chr2 60502496 60502515 60502512 +
tacatacaattctgggatct

SEQ ID NO: 163586 - DNA, 20 bp, Artificial Sequence
  Synthetic oligonucleotide; AGG chr2 60502497 60502516 60502513 +
acatacaattctgggatctc

SEQ ID NO: 163587 - DNA, 20 bp, Artificial Sequence
  Synthetic oligonucleotide; AAG chr2 60502511 60502530 60502527 +
gatctcaggtattgctccta

SEQ ID NO: 163588 - DNA, 20 bp, Artificial Sequence
  Synthetic oligonucleotide; AAG chr2 60502515 60502534 60502531 +
tcaggtattgctcctaaaga

SEQ ID NO: 163589 - DNA, 20 bp, Artificial Sequence
  Synthetic oligonucleotide; GAG chr2 60502517 60502536 60502533 +
aggtattgctcctaaagaaa

SEQ ID NO: 163590 - DNA, 20 bp, Artificial Sequence
  Synthetic oligonucleotide; CAG chr2 60502521 60502540 60502537 +
attgctcctaaagaaagagc

SEQ ID NO: 163591 - DNA, 20 bp, Artificial Sequence
  Synthetic oligonucleotide; AAG chr2 60502555 60502574 60502571 +
tatcttcctccaacatccaa

SEQ ID NO: 163592 - DNA, 20 bp, Artificial Sequence
  Synthetic oligonucleotide; CAG chr2 60502558 60502577 60502574 +
cttcctccaacatccaaaag

SEQ ID NO: 163593 - DNA, 20 bp, Artificial Sequence
  Synthetic oligonucleotide; AAG chr2 60502606 60502625 60502622 +
taatattaaaatatgaattt

SEQ ID NO: 163594 - DNA, 20 bp, Artificial Sequence
  Synthetic oligonucleotide; CAG chr2 60502615 60502634 60502631 +
aatatgaatttaagaaatac

SEQ ID NO: 163595 - DNA, 20 bp, Artificial Sequence
  Synthetic oligonucleotide; AAG chr2 60502622 60502641 60502638 +
atttaagaaataccagtgaa

SEQ ID NO: 163596 - DNA, 20 bp, Artificial Sequence
  Synthetic oligonucleotide; GAG chr2 60502624 60502643 60502640 +
ttaagaaataccagtgaaaa

SEQ ID NO: 163597 - DNA, 20 bp, Artificial Sequence
  Synthetic oligonucleotide; CAG chr2 60502638 60502657 60502654 +
tgaaaagagattttttaaac

SEQ ID NO: 163598 - DNA, 20 bp, Artificial Sequence
  Synthetic oligonucleotide; CAG chr2 60502698 60502717 60502714 +
aaactgttttcaatcatcat

SEQ ID NO: 163599 - DNA, 20 bp, Artificial Sequence
  Synthetic oligonucleotide; GAG chr2 60502700 60502719 60502716 +
actgttttcaatcatcatca

SEQ ID NO: 163600 - DNA, 20 bp, Artificial Sequence
  Synthetic oligonucleotide; TGG chr2 60502726 60502745 60502742 +
aacaaatttacctctgatca

SEQ ID NO: 163601 - DNA, 20 bp, Artificial Sequence
  Synthetic oligonucleotide; TAG chr2 60502729 60502748 60502745 +
aaatttacctctgatcatgg

SEQ ID NO: 163602 - DNA, 20 bp, Artificial Sequence
  Synthetic oligonucleotide; CAG chr2 60502734 60502753 60502750 +
tacctctgatcatggtagca

SEQ ID NO: 163603 - DNA, 20 bp, Artificial Sequence
  Synthetic oligonucleotide; TAG chr2 60502737 60502756 60502753 +
ctctgatcatggtagcacag

SEQ ID NO: 163604 - DNA, 20 bp, Artificial Sequence
  Synthetic oligonucleotide; GAG chr2 60502739 60502758 60502755 +
ctgatcatggtagcacagta

SEQ ID NO: 163605 - DNA, 20 bp, Artificial Sequence
  Synthetic oligonucleotide; CAG chr2 60502742 60502761 60502758 +
atcatggtagcacagtagag

SEQ ID NO: 163606 - DNA, 20 bp, Artificial Sequence
  Synthetic oligonucleotide; AAG chr2 60502746 60502765 60502762 +
tggtagcacagtagagcaga

SEQ ID NO: 163607 - DNA, 20 bp, Artificial Sequence
  Synthetic oligonucleotide; GAG chr2 60502748 60502767 60502764 +
gtagcacagtagagcagaaa

SEQ ID NO: 163608 - DNA, 20 bp, Artificial Sequence
  Synthetic oligonucleotide; TGG chr2 60502759 60502778 60502775 +
gagcagaaagagcactcaat

SEQ ID NO: 163609 - DNA, 20 bp, Artificial Sequence
  Synthetic oligonucleotide; AAG chr2 60502769 60502788 60502785 +
agcactcaattggtgatcaa

SEQ ID NO: 163610 - DNA, 20 bp, Artificial Sequence
  Synthetic oligonucleotide; TAG chr2 60502782 60502801 60502798 +
tgatcaaaagaaataaattc

SEQ ID NO: 163611 - DNA, 20 bp, Artificial Sequence
  Synthetic oligonucleotide; CAG chr2 60502795 60502814 60502811 +
taaattctagtcctgtcacc

SEQ ID NO: 163612 - DNA, 20 bp, Artificial Sequence
  Synthetic oligonucleotide; CAG chr2 60502810 60502829 60502826 +
tcacccagaaactatgtgac

SEQ ID NO: 163613 - DNA, 20 bp, Artificial Sequence
  Synthetic oligonucleotide; AGG chr2 60502811 60502830 60502827 +
cacccagaaactatgtgacc

SEQ ID NO: 163614 - DNA, 20 bp, Artificial Sequence
  Synthetic oligonucleotide; GGG chr2 60502812 60502831 60502828 +
acccagaaactatgtgacca

SEQ ID NO: 163615 - DNA, 20 bp, Artificial Sequence
  Synthetic oligonucleotide; GGG chr2 60502813 60502832 60502829 +
cccagaaactatgtgaccag

SEQ ID NO: 163616 - DNA, 20 bp, Artificial Sequence
  Synthetic oligonucleotide; GAG chr2 60502815 60502834 60502831 +
cagaaactatgtgaccaggg

SEQ ID NO: 163617 - DNA, 20 bp, Artificial Sequence
  Synthetic oligonucleotide; AGG chr2 60502816 60502835 60502832 +
agaaactatgtgaccagggg

SEQ ID NO: 163618 - DNA, 20 bp, Artificial Sequence
  Synthetic oligonucleotide; AAG chr2 60502831 60502850 60502847 +
aggggaggtacttaatctct

SEQ ID NO: 163619 - DNA, 20 bp, Artificial Sequence
  Synthetic oligonucleotide; GAG chr2 60502833 60502852 60502849 +
gggaggtacttaatctctaa

SEQ ID NO: 163620 - DNA, 20 bp, Artificial Sequence
  Synthetic oligonucleotide; AAG chr2 60502840 60502859 60502856 +
acttaatctctaagagaatc

SEQ ID NO: 163621 - DNA, 20 bp, Artificial Sequence
  Synthetic oligonucleotide; GAG chr2 60502847 60502866 60502863 +
ctctaagagaatcaagtctc

SEQ ID NO: 163622 - DNA, 20 bp, Artificial Sequence
  Synthetic oligonucleotide; TGG chr2 60502850 60502869 60502866 +
taagagaatcaagtctcgag

SEQ ID NO: 163623 - DNA, 20 bp, Artificial Sequence
  Synthetic oligonucleotide; GGG chr2 60502851 60502870 60502867 +
aagagaatcaagtctcgagt

SEQ ID NO: 163624 - DNA, 20 bp, Artificial Sequence
  Synthetic oligonucleotide; GAG chr2 60502860 60502879 60502876 +
aagtctcgagtgggtaaaat

SEQ ID NO: 163625 - DNA, 20 bp, Artificial Sequence
  Synthetic oligonucleotide; TGG chr2 60502864 60502883 60502880 +
ctcgagtgggtaaaatgagc

SEQ ID NO: 163626 - DNA, 20 bp, Artificial Sequence
  Synthetic oligonucleotide; GGG chr2 60502865 60502884 60502881 +
tcgagtgggtaaaatgagct

SEQ ID NO: 163627 - DNA, 20 bp, Artificial Sequence
  Synthetic oligonucleotide; GGG chr2 60502866 60502885 60502882 +
cgagtgggtaaaatgagctg

SEQ ID NO: 163628 - DNA, 20 bp, Artificial Sequence
  Synthetic oligonucleotide; AAG chr2 60502869 60502888 60502885 +
gtgggtaaaatgagctgggg

SEQ ID NO: 163629 - DNA, 20 bp, Artificial Sequence
  Synthetic oligonucleotide; AGG chr2 60502870 60502889 60502886 +
tgggtaaaatgagctgggga

SEQ ID NO: 163630 - DNA, 20 bp, Artificial Sequence
  Synthetic oligonucleotide; GAG chr2 60502872 60502891 60502888 +
ggtaaaatgagctggggaag

SEQ ID NO: 163631 - DNA, 20 bp, Artificial Sequence
  Synthetic oligonucleotide; CAG chr2 60502880 60502899 60502896 +
gagctggggaaggagtgaac

SEQ ID NO: 163632 - DNA, 20 bp, Artificial Sequence
  Synthetic oligonucleotide; GAG chr2 60502884 60502903 60502900 +
tggggaaggagtgaaccagt

SEQ ID NO: 163633 - DNA, 20 bp, Artificial Sequence
  Synthetic oligonucleotide; AAG chr2 60502888 60502907 60502904 +
gaaggagtgaaccagtgaga

SEQ ID NO: 163634 - DNA, 20 bp, Artificial Sequence
  Synthetic oligonucleotide; TGG chr2 60502896 60502915 60502912 +
gaaccagtgagaaagaacac

SEQ ID NO: 163635 - DNA, 20 bp, Artificial Sequence
  Synthetic oligonucleotide; TGG chr2 60502905 60502924 60502921 +
agaaagaacactggtctgtc

SEQ ID NO: 163636 - DNA, 20 bp, Artificial Sequence
  Synthetic oligonucleotide; GGG chr2 60502906 60502925 60502922 +
gaaagaacactggtctgtct

SEQ ID NO: 163637 - DNA, 20 bp, Artificial Sequence
  Synthetic oligonucleotide; GGG chr2 60502907 60502926 60502923 +
aaagaacactggtctgtctg

SEQ ID NO: 163638 - DNA, 20 bp, Artificial Sequence
  Synthetic oligonucleotide; CAG chr2 60502914 60502933 60502930 +
actggtctgtctggggctcc

SEQ ID NO: 163639 - DNA, 20 bp, Artificial Sequence
  Synthetic oligonucleotide; AAG chr2 60502917 60502936 60502933 +
ggtctgtctggggctcccag

SEQ ID NO: 163640 - DNA, 20 bp, Artificial Sequence
  Synthetic oligonucleotide; CAG chr2 60502923 60502942 60502939 +
tctggggctcccagaagaca

SEQ ID NO: 163641 - DNA, 20 bp, Artificial Sequence
  Synthetic oligonucleotide; CAG chr2 60502927 60502946 60502943 +
gggctcccagaagacacagc

SEQ ID NO: 163642 - DNA, 20 bp, Artificial Sequence
  Synthetic oligonucleotide; AAG chr2 60502970 60502989 60502986 +
caaacacctccttgtctttt

SEQ ID NO: 163643 - DNA, 20 bp, Artificial Sequence
  Synthetic oligonucleotide; AGG chr2 60502971 60502990 60502987 +
aaacacctccttgtctttta

SEQ ID NO: 163644 - DNA, 20 bp, Artificial Sequence
  Synthetic oligonucleotide; TGG chr2 60502976 60502995 60502992 +
cctccttgtcttttaaggcc

SEQ ID NO: 163645 - DNA, 20 bp, Artificial Sequence
  Synthetic oligonucleotide; GGG chr2 60502977 60502996 60502993 +
ctccttgtcttttaaggcct

SEQ ID NO: 163646 - DNA, 20 bp, Artificial Sequence
  Synthetic oligonucleotide; TAG chr2 60502985 60503004 60503001 +
cttttaaggcctgggctgtc

SEQ ID NO: 163647 - DNA, 20 bp, Artificial Sequence
  Synthetic oligonucleotide; AGG chr2 60502986 60503005 60503002 +
ttttaaggcctgggctgtct

SEQ ID NO: 163648 - DNA, 20 bp, Artificial Sequence
  Synthetic oligonucleotide; GGG chr2 60502987 60503006 60503003 +
tttaaggcctgggctgtcta

SEQ ID NO: 163649 - DNA, 20 bp, Artificial Sequence
  Synthetic oligonucleotide; GGG chr2 60502988 60503007 60503004 +
ttaaggcctgggctgtctag

SEQ ID NO: 163650 - DNA, 20 bp, Artificial Sequence
  Synthetic oligonucleotide; GGG chr2 60502989 60503008 60503005 +
taaggcctgggctgtctagg

SEQ ID NO: 163651 - DNA, 20 bp, Artificial Sequence
  Synthetic oligonucleotide; TGG chr2 60502993 60503012 60503009 +
gcctgggctgtctaggggga

SEQ ID NO: 163652 - DNA, 20 bp, Artificial Sequence
  Synthetic oligonucleotide; TGG chr2 60503000 60503019 60503016 +
ctgtctagggggatggctac

SEQ ID NO: 163653 - DNA, 20 bp, Artificial Sequence
  Synthetic oligonucleotide; TGG chr2 60503005 60503024 60503021 +
tagggggatggctactggct

SEQ ID NO: 163654 - DNA, 20 bp, Artificial Sequence
  Synthetic oligonucleotide; GAG chr2 60503007 60503026 60503023 +
gggggatggctactggcttg

SEQ ID NO: 163655 - DNA, 20 bp, Artificial Sequence
  Synthetic oligonucleotide; CGG chr2 60503042 60503061 60503058 +
gtctgtcatcttaatacaca

SEQ ID NO: 163656 - DNA, 20 bp, Artificial Sequence
  Synthetic oligonucleotide; AAG chr2 60503059 60503078 60503075 +
acacggaatgtgttgaaatg

SEQ ID NO: 163657 - DNA, 20 bp, Artificial Sequence
  Synthetic oligonucleotide; AGG chr2 60503060 60503079 60503076 +
cacggaatgtgttgaaatga

SEQ ID NO: 163658 - DNA, 20 bp, Artificial Sequence
  Synthetic oligonucleotide; TGG chr2 60503071 60503090 60503087 +
ttgaaatgaaggtgtctgtg

SEQ ID NO: 163659 - DNA, 20 bp, Artificial Sequence
  Synthetic oligonucleotide; AAG chr2 60503074 60503093 60503090 +
aaatgaaggtgtctgtgtgg

SEQ ID NO: 163660 - DNA, 20 bp, Artificial Sequence
  Synthetic oligonucleotide; AGG chr2 60503075 60503094 60503091 +
aatgaaggtgtctgtgtgga

SEQ ID NO: 163661 - DNA, 20 bp, Artificial Sequence
  Synthetic oligonucleotide; GGG chr2 60503076 60503095 60503092 +
atgaaggtgtctgtgtggaa

SEQ ID NO: 163662 - DNA, 20 bp, Artificial Sequence
  Synthetic oligonucleotide; CAG chr2 60503080 60503099 60503096 +
aggtgtctgtgtggaaggga

SEQ ID NO: 163663 - DNA, 20 bp, Artificial Sequence
  Synthetic oligonucleotide; CAG chr2 60503086 60503105 60503102 +
ctgtgtggaagggacagacc

SEQ ID NO: 163664 - DNA, 20 bp, Artificial Sequence
  Synthetic oligonucleotide; TGG chr2 60503108 60503127 60503124 +
gatccactctgcatttgtcc

SEQ ID NO: 163665 - DNA, 20 bp, Artificial Sequence
  Synthetic oligonucleotide; TGG chr2 60503114 60503133 60503130 +
ctctgcatttgtcctggcaa

SEQ ID NO: 163666 - DNA, 20 bp, Artificial Sequence
  Synthetic oligonucleotide; GGG chr2 60503115 60503134 60503131 +
tctgcatttgtcctggcaat

SEQ ID NO: 163667 - DNA, 20 bp, Artificial Sequence
  Synthetic oligonucleotide; GAG chr2 60503117 60503136 60503133 +
tgcatttgtcctggcaatgg

SEQ ID NO: 163668 - DNA, 20 bp, Artificial Sequence
  Synthetic oligonucleotide; CAG chr2 60503120 60503139 60503136 +
atttgtcctggcaatgggag

SEQ ID NO: 163669 - DNA, 20 bp, Artificial Sequence
  Synthetic oligonucleotide; AGG chr2 60503121 60503140 60503137 +
tttgtcctggcaatgggagc

SEQ ID NO: 163670 - DNA, 20 bp, Artificial Sequence
  Synthetic oligonucleotide; GAG chr2 60503127 60503146 60503143 +
ctggcaatgggagcaggaat

SEQ ID NO: 163671 - DNA, 20 bp, Artificial Sequence
  Synthetic oligonucleotide; TGG chr2 60503147 60503166 60503163 +
gagtccaccttctctaaacc

SEQ ID NO: 163672 - DNA, 20 bp, Artificial Sequence
  Synthetic oligonucleotide; TAG chr2 60503157 60503176 60503173 +
tctctaaacctggtcactcc

SEQ ID NO: 163673 - DNA, 20 bp, Artificial Sequence
  Synthetic oligonucleotide; AAG chr2 60503164 60503183 60503180 +
acctggtcactcctagtccc

SEQ ID NO: 163674 - DNA, 20 bp, Artificial Sequence
  Synthetic oligonucleotide; TGG chr2 60503168 60503187 60503184 +
ggtcactcctagtcccaaga

SEQ ID NO: 163675 - DNA, 20 bp, Artificial Sequence
  Synthetic oligonucleotide; GAG chr2 60503170 60503189 60503186 +
tcactcctagtcccaagatg

SEQ ID NO: 163676 - DNA, 20 bp, Artificial Sequence
  Synthetic oligonucleotide; AAG chr2 60503173 60503192 60503189 +
ctcctagtcccaagatggag

SEQ ID NO: 163677 - DNA, 20 bp, Artificial Sequence
  Synthetic oligonucleotide; TAG chr2 60503197 60503216 60503213 +
cacatcacccttgatcatgt

SEQ ID NO: 163678 - DNA, 20 bp, Artificial Sequence
  Synthetic oligonucleotide; CAG chr2 60503210 60503229 60503226 +
atcatgttagccccattctg

SEQ ID NO: 163679 - DNA, 20 bp, Artificial Sequence
  Synthetic oligonucleotide; CAG chr2 60503216 60503235 60503232 +
ttagccccattctgcagcct

SEQ ID NO: 163680 - DNA, 20 bp, Artificial Sequence
  Synthetic oligonucleotide; AGG chr2 60503217 60503236 60503233 +
tagccccattctgcagcctc

SEQ ID NO: 163681 - DNA, 20 bp, Artificial Sequence
  Synthetic oligonucleotide; GAG chr2 60503219 60503238 60503235 +
gccccattctgcagcctcag

SEQ ID NO: 163682 - DNA, 20 bp, Artificial Sequence
  Synthetic oligonucleotide; AGG chr2 60503220 60503239 60503236 +
ccccattctgcagcctcagg

SEQ ID NO: 163683 - DNA, 20 bp, Artificial Sequence
  Synthetic oligonucleotide; CAG chr2 60503230 60503249 60503246 +
cagcctcaggaggctctgac

SEQ ID NO: 163684 - DNA, 20 bp, Artificial Sequence
  Synthetic oligonucleotide; AGG chr2 60503231 60503250 60503247 +
agcctcaggaggctctgacc

SEQ ID NO: 163685 - DNA, 20 bp, Artificial Sequence
  Synthetic oligonucleotide; TGG chr2 60503234 60503253 60503250 +
ctcaggaggctctgaccagg

SEQ ID NO: 163686 - DNA, 20 bp, Artificial Sequence
  Synthetic oligonucleotide; AAG chr2 60503238 60503257 60503254 +
ggaggctctgaccaggtgga

SEQ ID NO: 163687 - DNA, 20 bp, Artificial Sequence
  Synthetic oligonucleotide; CAG chr2 60503242 60503261 60503258 +
gctctgaccaggtggaaagc

SEQ ID NO: 163688 - DNA, 20 bp, Artificial Sequence
  Synthetic oligonucleotide; TGG chr2 60503247 60503266 60503263 +
gaccaggtggaaagccagaa

SEQ ID NO: 163689 - DNA, 20 bp, Artificial Sequence
  Synthetic oligonucleotide; GGG chr2 60503248 60503267 60503264 +
accaggtggaaagccagaat

SEQ ID NO: 163690 - DNA, 20 bp, Artificial Sequence
  Synthetic oligonucleotide; GGG chr2 60503249 60503268 60503265 +
ccaggtggaaagccagaatg

SEQ ID NO: 163691 - DNA, 20 bp, Artificial Sequence
  Synthetic oligonucleotide; CAG chr2 60503258 60503277 60503274 +
aagccagaatggggtccaac

SEQ ID NO: 163692 - DNA, 20 bp, Artificial Sequence
  Synthetic oligonucleotide; AGG chr2 60503259 60503278 60503275 +
agccagaatggggtccaacc

SEQ ID NO: 163693 - DNA, 20 bp, Artificial Sequence
  Synthetic oligonucleotide; GAG chr2 60503261 60503280 60503277 +
ccagaatggggtccaaccag

SEQ ID NO: 163694 - DNA, 20 bp, Artificial Sequence
  Synthetic oligonucleotide; AAG chr2 60503268 60503287 60503284 +
ggggtccaaccaggagaccc

SEQ ID NO: 163695 - DNA, 20 bp, Artificial Sequence
  Synthetic oligonucleotide; CAG chr2 60503272 60503291 60503288 +
tccaaccaggagacccaaga

SEQ ID NO: 163696 - DNA, 20 bp, Artificial Sequence
  Synthetic oligonucleotide; AAG chr2 60503277 60503296 60503293 +
ccaggagacccaagacagaa

SEQ ID NO: 163697 - DNA, 20 bp, Artificial Sequence
  Synthetic oligonucleotide; AGG chr2 60503278 60503297 60503294 +
caggagacccaagacagaaa

SEQ ID NO: 163698 - DNA, 20 bp, Artificial Sequence
  Synthetic oligonucleotide; CAG chr2 60503281 60503300 60503297 +
gagacccaagacagaaaagg

SEQ ID NO: 163699 - DNA, 20 bp, Artificial Sequence
  Synthetic oligonucleotide; AGG chr2 60503282 60503301 60503298 +
agacccaagacagaaaaggc

SEQ ID NO: 163700 - DNA, 20 bp, Artificial Sequence
  Synthetic oligonucleotide; TGG chr2 60503285 60503304 60503301 +
cccaagacagaaaaggcagg

SEQ ID NO: 163701 - DNA, 20 bp, Artificial Sequence
  Synthetic oligonucleotide; AAG chr2 60503292 60503311 60503308 +
cagaaaaggcaggtggctgc

SEQ ID NO: 163702 - DNA, 20 bp, Artificial Sequence
  Synthetic oligonucleotide; AGG chr2 60503293 60503312 60503309 +
agaaaaggcaggtggctgca

SEQ ID NO: 163703 - DNA, 20 bp, Artificial Sequence
  Synthetic oligonucleotide; GAG chr2 60503295 60503314 60503311 +
aaaaggcaggtggctgcaag

SEQ ID NO: 163704 - DNA, 20 bp, Artificial Sequence
  Synthetic oligonucleotide; CAG chr2 60503309 60503328 60503325 +
tgcaaggagcctcacttctc

SEQ ID NO: 163705 - DNA, 20 bp, Artificial Sequence
  Synthetic oligonucleotide; AGG chr2 60503310 60503329 60503326 +
gcaaggagcctcacttctcc

SEQ ID NO: 163706 - DNA, 20 bp, Artificial Sequence
  Synthetic oligonucleotide; CAG chr2 60503357 60503376 60503373 +
cttacccatgccacccaccg

SEQ ID NO: 163707 - DNA, 20 bp, Artificial Sequence
  Synthetic oligonucleotide; TGG chr2 60503362 60503381 60503378 +
ccatgccacccaccgcagcc

SEQ ID NO: 163708 - DNA, 20 bp, Artificial Sequence
  Synthetic oligonucleotide; CAG chr2 60503366 60503385 60503382 +
gccacccaccgcagcctgga

SEQ ID NO: 163709 - DNA, 20 bp, Artificial Sequence
  Synthetic oligonucleotide; AGG chr2 60503367 60503386 60503383 +
ccacccaccgcagcctggac

SEQ ID NO: 163710 - DNA, 20 bp, Artificial Sequence
  Synthetic oligonucleotide; CAG chr2 60503375 60503394 60503391 +
cgcagcctggacaggcattc

SEQ ID NO: 163711 - DNA, 20 bp, Artificial Sequence
  Synthetic oligonucleotide; AGG chr2 60503376 60503395 60503392 +
gcagcctggacaggcattcc

SEQ ID NO: 163712 - DNA, 20 bp, Artificial Sequence
  Synthetic oligonucleotide; GAG chr2 60503378 60503397 60503394 +
agcctggacaggcattccag

SEQ ID NO: 163713 - DNA, 20 bp, Artificial Sequence
  Synthetic oligonucleotide; CAG chr2 60503382 60503401 60503398 +
tggacaggcattccaggagc

SEQ ID NO: 163714 - DNA, 20 bp, Artificial Sequence
  Synthetic oligonucleotide; TGG chr2 60503394 60503413 60503410 +
ccaggagccagacatgtccc

SEQ ID NO: 163715 - DNA, 20 bp, Artificial Sequence
  Synthetic oligonucleotide; AAG chr2 60503397 60503416 60503413 +
ggagccagacatgtccctgg

SEQ ID NO: 163716 - DNA, 20 bp, Artificial Sequence
  Synthetic oligonucleotide; CAG chr2 60503401 60503420 60503417 +
ccagacatgtccctggaaga

SEQ ID NO: 163717 - DNA, 20 bp, Artificial Sequence
  Synthetic oligonucleotide; TAG chr2 60503404 60503423 60503420 +
gacatgtccctggaagacag

SEQ ID NO: 163718 - DNA, 20 bp, Artificial Sequence
  Synthetic oligonucleotide; AGG chr2 60503405 60503424 60503421 +
acatgtccctggaagacagt

SEQ ID NO: 163719 - DNA, 20 bp, Artificial Sequence
  Synthetic oligonucleotide; GAG chr2 60503422 60503441 60503438 +
agtaggctattgcttcctct

SEQ ID NO: 163720 - DNA, 20 bp, Artificial Sequence
  Synthetic oligonucleotide; TGG chr2 60503443 60503462 60503459 +
agcactgcaacaattttctc

SEQ ID NO: 163721 - DNA, 20 bp, Artificial Sequence
  Synthetic oligonucleotide; CAG chr2 60503467 60503486 60503483 +
ccctctcctccacctattca

SEQ ID NO: 163722 - DNA, 20 bp, Artificial Sequence
  Synthetic oligonucleotide; TGG chr2 60503471 60503490 60503487 +
ctcctccacctattcacaga

SEQ ID NO: 163723 - DNA, 20 bp, Artificial Sequence
  Synthetic oligonucleotide; GGG chr2 60503472 60503491 60503488 +
tcctccacctattcacagat

SEQ ID NO: 163724 - DNA, 20 bp, Artificial Sequence
  Synthetic oligonucleotide; GGG chr2 60503473 60503492 60503489 +
cctccacctattcacagatg

SEQ ID NO: 163725 - DNA, 20 bp, Artificial Sequence
  Synthetic oligonucleotide; TAG chr2 60503498 60503517 60503514 +
taaccctccctcctatccat

SEQ ID NO: 163726 - DNA, 20 bp, Artificial Sequence
  Synthetic oligonucleotide; TGG chr2 60503513 60503532 60503529 +
tccattagattgcccaaatc

SEQ ID NO: 163727 - DNA, 20 bp, Artificial Sequence
  Synthetic oligonucleotide; GGG chr2 60503514 60503533 60503530 +
ccattagattgcccaaatct

SEQ ID NO: 163728 - DNA, 20 bp, Artificial Sequence
  Synthetic oligonucleotide; TGG chr2 60503528 60503547 60503544 +
aaatctgggaaaataatgtg

SEQ ID NO: 163729 - DNA, 20 bp, Artificial Sequence
  Synthetic oligonucleotide; CAG chr2 60503535 60503554 60503551 +
ggaaaataatgtgtggcgct

SEQ ID NO: 163730 - DNA, 20 bp, Artificial Sequence
  Synthetic oligonucleotide; AGG chr2 60503536 60503555 60503552 +
gaaaataatgtgtggcgctc

SEQ ID NO: 163731 - DNA, 20 bp, Artificial Sequence
  Synthetic oligonucleotide; GAG chr2 60503542 60503561 60503558 +
aatgtgtggcgctcaggtct

SEQ ID NO: 163732 - DNA, 20 bp, Artificial Sequence
  Synthetic oligonucleotide; CAG chr2 60503547 60503566 60503563 +
gtggcgctcaggtctgagtg

SEQ ID NO: 163733 - DNA, 20 bp, Artificial Sequence
  Synthetic oligonucleotide; AAG chr2 60503553 60503572 60503569 +
ctcaggtctgagtgcagacc

SEQ ID NO: 163734 - DNA, 20 bp, Artificial Sequence
  Synthetic oligonucleotide; CAG chr2 60503566 60503585 60503582 +
gcagaccaagctcccaatac

SEQ ID NO: 163735 - DNA, 20 bp, Artificial Sequence
  Synthetic oligonucleotide; TGG chr2 60503569 60503588 60503585 +
gaccaagctcccaataccag

SEQ ID NO: 163736 - DNA, 20 bp, Artificial Sequence
  Synthetic oligonucleotide; CAG chr2 60503578 60503597 60503594 +
cccaataccagtggctcttt

SEQ ID NO: 163737 - DNA, 20 bp, Artificial Sequence
  Synthetic oligonucleotide; AGG chr2 60503579 60503598 60503595 +
ccaataccagtggctctttc

SEQ ID NO: 163738 - DNA, 20 bp, Artificial Sequence
  Synthetic oligonucleotide; AAG chr2 60503588 60503607 60503604 +
gtggctctttcaggcttaca

SEQ ID NO: 163739 - DNA, 20 bp, Artificial Sequence
  Synthetic oligonucleotide; TGG chr2 60503594 60503613 60503610 +
ctttcaggcttacaaagcct

SEQ ID NO: 163740 - DNA, 20 bp, Artificial Sequence
  Synthetic oligonucleotide; TGG chr2 60503597 60503616 60503613 +
tcaggcttacaaagccttgg

SEQ ID NO: 163741 - DNA, 20 bp, Artificial Sequence
  Synthetic oligonucleotide; CAG chr2 60503610 60503629 60503626 +
gccttggtggtttccacacc

SEQ ID NO: 163742 - DNA, 20 bp, Artificial Sequence
  Synthetic oligonucleotide; CAG chr2 60503613 60503632 60503629 +
ttggtggtttccacacccag

SEQ ID NO: 163743 - DNA, 20 bp, Artificial Sequence
  Synthetic oligonucleotide; CAG chr2 60503624 60503643 60503640 +
cacacccagcagttcctacc

SEQ ID NO: 163744 - DNA, 20 bp, Artificial Sequence
  Synthetic oligonucleotide; AGG chr2 60503625 60503644 60503641 +
acacccagcagttcctaccc

SEQ ID NO: 163745 - DNA, 20 bp, Artificial Sequence
  Synthetic oligonucleotide; GAG chr2 60503631 60503650 60503647 +
agcagttcctacccaggact

SEQ ID NO: 163746 - DNA, 20 bp, Artificial Sequence
  Synthetic oligonucleotide; AAG chr2 60503634 60503653 60503650 +
agttcctacccaggactgag

SEQ ID NO: 163747 - DNA, 20 bp, Artificial Sequence
  Synthetic oligonucleotide; CAG chr2 60503641 60503660 60503657 +
acccaggactgagaagccct

SEQ ID NO: 163748 - DNA, 20 bp, Artificial Sequence
  Synthetic oligonucleotide; CAG chr2 60503652 60503671 60503668 +
agaagccctcagcaaacacc

SEQ ID NO: 163749 - DNA, 20 bp, Artificial Sequence
  Synthetic oligonucleotide; TGG chr2 60503656 60503675 60503672 +
gccctcagcaaacacccaga

SEQ ID NO: 163750 - DNA, 20 bp, Artificial Sequence
  Synthetic oligonucleotide; TGG chr2 60503675 60503694 60503691 +
atggcccttgttcaccctcc

SEQ ID NO: 163751 - DNA, 20 bp, Artificial Sequence
  Synthetic oligonucleotide; TAG chr2 60503685 60503704 60503701 +
ttcaccctcctggaaaccta

SEQ ID NO: 163752 - DNA, 20 bp, Artificial Sequence
  Synthetic oligonucleotide; CAG chr2 60503692 60503711 60503708 +
tcctggaaacctatagctgc

SEQ ID NO: 163753 - DNA, 20 bp, Artificial Sequence
  Synthetic oligonucleotide; AGG chr2 60503693 60503712 60503709 +
cctggaaacctatagctgcc

SEQ ID NO: 163754 - DNA, 20 bp, Artificial Sequence
  Synthetic oligonucleotide; GGG chr2 60503694 60503713 60503710 +
ctggaaacctatagctgcca

SEQ ID NO: 163755 - DNA, 20 bp, Artificial Sequence
  Synthetic oligonucleotide; GAG chr2 60503713 60503732 60503729 +
agggaaatgtgacattttgt

SEQ ID NO: 163756 - DNA, 20 bp, Artificial Sequence
  Synthetic oligonucleotide; AGG chr2 60503714 60503733 60503730 +
gggaaatgtgacattttgtg

SEQ ID NO: 163757 - DNA, 20 bp, Artificial Sequence
  Synthetic oligonucleotide; TAG chr2 60503733 60503752 60503749 +
gaggactaatttaacccgcc

SEQ ID NO: 163758 - DNA, 20 bp, Artificial Sequence
  Synthetic oligonucleotide; AAG chr2 60503736 60503755 60503752 +
gactaatttaacccgcctag

SEQ ID NO: 163759 - DNA, 20 bp, Artificial Sequence
  Synthetic oligonucleotide; TAG chr2 60503742 60503761 60503758 +
tttaacccgcctagaagatt

SEQ ID NO: 163760 - DNA, 20 bp, Artificial Sequence
  Synthetic oligonucleotide; AGG chr2 60503743 60503762 60503759 +
ttaacccgcctagaagattt

SEQ ID NO: 163761 - DNA, 20 bp, Artificial Sequence
  Synthetic oligonucleotide; GAG chr2 60503745 60503764 60503761 +
aacccgcctagaagatttag

SEQ ID NO: 163762 - DNA, 20 bp, Artificial Sequence
  Synthetic oligonucleotide; AAG chr2 60503750 60503769 60503766 +
gcctagaagatttaggagcc

SEQ ID NO: 163763 - DNA, 20 bp, Artificial Sequence
  Synthetic oligonucleotide; AAG chr2 60503764 60503783 60503780 +
ggagccaagatgcaacccta

SEQ ID NO: 163764 - DNA, 20 bp, Artificial Sequence
  Synthetic oligonucleotide; AAG chr2 60503775 60503794 60503791 +
gcaaccctaaagcccactgc

SEQ ID NO: 163765 - DNA, 20 bp, Artificial Sequence
  Synthetic oligonucleotide; AGG chr2 60503776 60503795 60503792 +
caaccctaaagcccactgca

SEQ ID NO: 163766 - DNA, 20 bp, Artificial Sequence
  Synthetic oligonucleotide; GGG chr2 60503777 60503796 60503793 +
aaccctaaagcccactgcaa

SEQ ID NO: 163767 - DNA, 20 bp, Artificial Sequence
  Synthetic oligonucleotide; TGG chr2 60503789 60503808 60503805 +
cactgcaagggacaatattc

SEQ ID NO: 163768 - DNA, 20 bp, Artificial Sequence
  Synthetic oligonucleotide; CAG chr2 60503801 60503820 60503817 +
caatattctggatcttttgt

SEQ ID NO: 163769 - DNA, 20 bp, Artificial Sequence
  Synthetic oligonucleotide; GAG chr2 60503803 60503822 60503819 +
atattctggatcttttgtca

SEQ ID NO: 163770 - DNA, 20 bp, Artificial Sequence
  Synthetic oligonucleotide; CAG chr2 60503838 60503857 60503854 +
aataaaatttttatattaaa

SEQ ID NO: 163771 - DNA, 20 bp, Artificial Sequence
  Synthetic oligonucleotide; TGG chr2 60503872 60503891 60503888 +
catctaaacctcctgaaaat

SEQ ID NO: 163772 - DNA, 20 bp, Artificial Sequence
  Synthetic oligonucleotide; TGG chr2 60503879 60503898 60503895 +
acctcctgaaaattggttat

SEQ ID NO: 163773 - DNA, 20 bp, Artificial Sequence
  Synthetic oligonucleotide; TAG chr2 60503897 60503916 60503913 +
attggctgcttcgttgattc

SEQ ID NO: 163774 - DNA, 20 bp, Artificial Sequence
  Synthetic oligonucleotide; AAG chr2 60503906 60503925 60503922 +
ttcgttgattctagaaaaaa

SEQ ID NO: 163775 - DNA, 20 bp, Artificial Sequence
  Synthetic oligonucleotide; AAG chr2 60503910 60503929 60503926 +
ttgattctagaaaaaaaaga

SEQ ID NO: 163776 - DNA, 20 bp, Artificial Sequence
  Synthetic oligonucleotide; AAG chr2 60503914 60503933 60503930 +
ttctagaaaaaaaagaaagc

SEQ ID NO: 163777 - DNA, 20 bp, Artificial Sequence
  Synthetic oligonucleotide; CAG chr2 60503922 60503941 60503938 +
aaaaaagaaagcaagaaatg

SEQ ID NO: 163778 - DNA, 20 bp, Artificial Sequence
  Synthetic oligonucleotide; AGG chr2 60503923 60503942 60503939 +
aaaaagaaagcaagaaatgc

SEQ ID NO: 163779 - DNA, 20 bp, Artificial Sequence
  Synthetic oligonucleotide; AAG chr2 60503927 60503946 60503943 +
agaaagcaagaaatgcagga

SEQ ID NO: 163780 - DNA, 20 bp, Artificial Sequence
  Synthetic oligonucleotide; AGG chr2 60503928 60503947 60503944 +
gaaagcaagaaatgcaggaa

SEQ ID NO: 163781 - DNA, 20 bp, Artificial Sequence
  Synthetic oligonucleotide; GAG chr2 60503934 60503953 60503950 +
aagaaatgcaggaaaggaac

SEQ ID NO: 163782 - DNA, 20 bp, Artificial Sequence
  Synthetic oligonucleotide; AGG chr2 60503935 60503954 60503951 +
agaaatgcaggaaaggaacg

SEQ ID NO: 163783 - DNA, 20 bp, Artificial Sequence
  Synthetic oligonucleotide; GGG chr2 60503936 60503955 60503952 +
gaaatgcaggaaaggaacga

SEQ ID NO: 163784 - DNA, 20 bp, Artificial Sequence
  Synthetic oligonucleotide; GGG chr2 60503937 60503956 60503953 +
aaatgcaggaaaggaacgag

SEQ ID NO: 163785 - DNA, 20 bp, Artificial Sequence
  Synthetic oligonucleotide; GGG chr2 60503938 60503957 60503954 +
aatgcaggaaaggaacgagg

SEQ ID NO: 163786 - DNA, 20 bp, Artificial Sequence
  Synthetic oligonucleotide; CAG chr2 60503941 60503960 60503957 +
gcaggaaaggaacgaggggg

SEQ ID NO: 163787 - DNA, 20 bp, Artificial Sequence
  Synthetic oligonucleotide; GAG chr2 60503943 60503962 60503959 +
aggaaaggaacgagggggca

SEQ ID NO: 163788 - DNA, 20 bp, Artificial Sequence
  Synthetic oligonucleotide; GAG chr2 60503945 60503964 60503961 +
gaaaggaacgagggggcaga

SEQ ID NO: 163789 - DNA, 20 bp, Artificial Sequence
  Synthetic oligonucleotide; AGG chr2 60503946 60503965 60503962 +
aaaggaacgagggggcagag

SEQ ID NO: 163790 - DNA, 20 bp, Artificial Sequence
  Synthetic oligonucleotide; GGG chr2 60503947 60503966 60503963 +
aaggaacgagggggcagaga

SEQ ID NO: 163791 - DNA, 20 bp, Artificial Sequence
  Synthetic oligonucleotide; AAG chr2 60503955 60503974 60503971 +
agggggcagagagggaatga

SEQ ID NO: 163792 - DNA, 20 bp, Artificial Sequence
  Synthetic oligonucleotide; GAG chr2 60503963 60503982 60503979 +
gagagggaatgaaagacact

SEQ ID NO: 163793 - DNA, 20 bp, Artificial Sequence
  Synthetic oligonucleotide; AAG chr2 60503970 60503989 60503986 +
aatgaaagacactgagtatt

SEQ ID NO: 163794 - DNA, 20 bp, Artificial Sequence
  Synthetic oligonucleotide; AGG chr2 60503971 60503990 60503987 +
atgaaagacactgagtatta

SEQ ID NO: 163795 - DNA, 20 bp, Artificial Sequence
  Synthetic oligonucleotide; CAG chr2 60503981 60504000 60503997 +
ctgagtattaaggcccaacc

SEQ ID NO: 163796 - DNA, 20 bp, Artificial Sequence
  Synthetic oligonucleotide; TAG chr2 60504000 60504019 60504016 +
ccagccaaaaccccatctgc

SEQ ID NO: 163797 - DNA, 20 bp, Artificial Sequence
  Synthetic oligonucleotide; AAG chr2 60504003 60504022 60504019 +
gccaaaaccccatctgctag

SEQ ID NO: 163798 - DNA, 20 bp, Artificial Sequence
  Synthetic oligonucleotide; TGG chr2 60504011 60504030 60504027 +
cccatctgctagaagcctgc

SEQ ID NO: 163799 - DNA, 20 bp, Artificial Sequence
  Synthetic oligonucleotide; AAG chr2 60504014 60504033 60504030 +
atctgctagaagcctgctgg

SEQ ID NO: 163800 - DNA, 20 bp, Artificial Sequence
  Synthetic oligonucleotide; TGG chr2 60504023 60504042 60504039 +
aagcctgctggaagcctaca

SEQ ID NO: 163801 - DNA, 20 bp, Artificial Sequence
  Synthetic oligonucleotide; GAG chr2 60504030 60504049 60504046 +
ctggaagcctacatggcttc

SEQ ID NO: 163802 - DNA, 20 bp, Artificial Sequence
  Synthetic oligonucleotide; CGG chr2 60504033 60504052 60504049 +
gaagcctacatggcttcgag

SEQ ID NO: 163803 - DNA, 20 bp, Artificial Sequence
  Synthetic oligonucleotide; GAG chr2 60504044 60504063 60504060 +
ggcttcgagcggcacattct

SEQ ID NO: 163804 - DNA, 20 bp, Artificial Sequence
  Synthetic oligonucleotide; AAG chr2 60504054 60504073 60504070 +
ggcacattctgagaactctg

SEQ ID NO: 163805 - DNA, 20 bp, Artificial Sequence
  Synthetic oligonucleotide; GAG chr2 60504056 60504075 60504072 +
cacattctgagaactctgaa

SEQ ID NO: 163806 - DNA, 20 bp, Artificial Sequence
  Synthetic oligonucleotide; CAG chr2 60504066 60504085 60504082 +
gaactctgaagagtaccact

SEQ ID NO: 163807 - DNA, 20 bp, Artificial Sequence
  Synthetic oligonucleotide; TAG chr2 60504089 60504108 60504105 +
ccgacactgcccccatgaca

SEQ ID NO: 163808 - DNA, 20 bp, Artificial Sequence
  Synthetic oligonucleotide; AGG chr2 60504090 60504109 60504106 +
cgacactgcccccatgacat

SEQ ID NO: 163809 - DNA, 20 bp, Artificial Sequence
  Synthetic oligonucleotide; GGG chr2 60504091 60504110 60504107 +
gacactgcccccatgacata

SEQ ID NO: 163810 - DNA, 20 bp, Artificial Sequence
  Synthetic oligonucleotide; TGG chr2 60504097 60504116 60504113 +
gcccccatgacatagggccc

SEQ ID NO: 163811 - DNA, 20 bp, Artificial Sequence
  Synthetic oligonucleotide; TGG chr2 60504124 60504143 60504140 +
ctctttgactcacacttgcc

SEQ ID NO: 163812 - DNA, 20 bp, Artificial Sequence
  Synthetic oligonucleotide; CAG chr2 60504127 60504146 60504143 +
tttgactcacacttgcctgg

SEQ ID NO: 163813 - DNA, 20 bp, Artificial Sequence
  Synthetic oligonucleotide; AGG chr2 60504128 60504147 60504144 +
ttgactcacacttgcctggc

SEQ ID NO: 163814 - DNA, 20 bp, Artificial Sequence
  Synthetic oligonucleotide; CAG chr2 60504141 60504160 60504157 +
gcctggcaggactccccaaa

SEQ ID NO: 163815 - DNA, 20 bp, Artificial Sequence
  Synthetic oligonucleotide; CAG chr2 60504146 60504165 60504162 +
gcaggactccccaaacagaa

SEQ ID NO: 163816 - DNA, 20 bp, Artificial Sequence
  Synthetic oligonucleotide; GAG chr2 60504148 60504167 60504164 +
aggactccccaaacagaaca

SEQ ID NO: 163817 - DNA, 20 bp, Artificial Sequence
  Synthetic oligonucleotide; CAG chr2 60504156 60504175 60504172 +
ccaaacagaacagagatgct

SEQ ID NO: 163818 - DNA, 20 bp, Artificial Sequence
  Synthetic oligonucleotide; CGG chr2 60504160 60504179 60504176 +
acagaacagagatgctcagc

SEQ ID NO: 163819 - DNA, 20 bp, Artificial Sequence
  Synthetic oligonucleotide; GGG chr2 60504161 60504180 60504177 +
cagaacagagatgctcagcc

SEQ ID NO: 163820 - DNA, 20 bp, Artificial Sequence
  Synthetic oligonucleotide; AAG chr2 60504167 60504186 60504183 +
agagatgctcagccgggcac

SEQ ID NO: 163821 - DNA, 20 bp, Artificial Sequence
  Synthetic oligonucleotide; GAG chr2 60504169 60504188 60504185 +
agatgctcagccgggcacaa

SEQ ID NO: 163822 - DNA, 20 bp, Artificial Sequence
  Synthetic oligonucleotide; GAG chr2 60504171 60504190 60504187 +
atgctcagccgggcacaaga

SEQ ID NO: 163823 - DNA, 20 bp, Artificial Sequence
  Synthetic oligonucleotide; CAG chr2 60504174 60504193 60504190 +
ctcagccgggcacaagagag

SEQ ID NO: 163824 - DNA, 20 bp, Artificial Sequence
  Synthetic oligonucleotide; AGG chr2 60504175 60504194 60504191 +
tcagccgggcacaagagagc

SEQ ID NO: 163825 - DNA, 20 bp, Artificial Sequence
  Synthetic oligonucleotide; CAG chr2 60504181 60504200 60504197 +
gggcacaagagagcaggccc

SEQ ID NO: 163826 - DNA, 20 bp, Artificial Sequence
  Synthetic oligonucleotide; AGG chr2 60504182 60504201 60504198 +
ggcacaagagagcaggcccc

SEQ ID NO: 163827 - DNA, 20 bp, Artificial Sequence
  Synthetic oligonucleotide; GGG chr2 60504183 60504202 60504199 +
gcacaagagagcaggcccca

SEQ ID NO: 163828 - DNA, 20 bp, Artificial Sequence
  Synthetic oligonucleotide; TGG chr2 60504200 60504219 60504216 +
ccagggctcatgctgcactg

SEQ ID NO: 163829 - DNA, 20 bp, Artificial Sequence
  Synthetic oligonucleotide; CAG chr2 60504209 60504228 60504225 +
atgctgcactgtggtttccc

SEQ ID NO: 163830 - DNA, 20 bp, Artificial Sequence
  Synthetic oligonucleotide; CAG chr2 60504218 60504237 60504234 +
tgtggtttccccagcaattc

SEQ ID NO: 163831 - DNA, 20 bp, Artificial Sequence
  Synthetic oligonucleotide; CGG chr2 60504234 60504253 60504250 +
attccagaactgctgcctac

SEQ ID NO: 163832 - DNA, 20 bp, Artificial Sequence
  Synthetic oligonucleotide; CAG chr2 60504245 60504264 60504261 +
gctgcctaccggcacgcatg

SEQ ID NO: 163833 - DNA, 20 bp, Artificial Sequence
  Synthetic oligonucleotide; AGG chr2 60504246 60504265 60504262 +
ctgcctaccggcacgcatgc

SEQ ID NO: 163834 - DNA, 20 bp, Artificial Sequence
  Synthetic oligonucleotide; AAG chr2 60504259 60504278 60504275 +
cgcatgcaggatcaatgatg

SEQ ID NO: 163835 - DNA, 20 bp, Artificial Sequence
  Synthetic oligonucleotide; CAG chr2 60504265 60504284 60504281 +
caggatcaatgatgaagatg

SEQ ID NO: 163836 - DNA, 20 bp, Artificial Sequence
  Synthetic oligonucleotide; TGG chr2 60504275 60504294 60504291 +
gatgaagatgcagtaccttc

SEQ ID NO: 163837 - DNA, 20 bp, Artificial Sequence
  Synthetic oligonucleotide; GGG chr2 60504276 60504295 60504292 +
atgaagatgcagtaccttct

SEQ ID NO: 163838 - DNA, 20 bp, Artificial Sequence
  Synthetic oligonucleotide; TGG chr2 60504285 60504304 60504301 +
cagtaccttctgggtctgcc

SEQ ID NO: 163839 - DNA, 20 bp, Artificial Sequence
  Synthetic oligonucleotide; GGG chr2 60504286 60504305 60504302 +
agtaccttctgggtctgcct

SEQ ID NO: 163840 - DNA, 20 bp, Artificial Sequence
  Synthetic oligonucleotide; TAG chr2 60504305 60504324 60504321 +
tgggtccacccttcctttct

SEQ ID NO: 163841 - DNA, 20 bp, Artificial Sequence
  Synthetic oligonucleotide; AAG chr2 60504315 60504334 60504331 +
cttcctttcttagtcactgc

SEQ ID NO: 163842 - DNA, 20 bp, Artificial Sequence
  Synthetic oligonucleotide; CAG chr2 60504326 60504345 60504342 +
agtcactgcaagatttcacc

SEQ ID NO: 163843 - DNA, 20 bp, Artificial Sequence
  Synthetic oligonucleotide; CAG chr2 60504331 60504350 60504347 +
ctgcaagatttcacccagcc

SEQ ID NO: 163844 - DNA, 20 bp, Artificial Sequence
  Synthetic oligonucleotide; AAG chr2 60504346 60504365 60504362 +
cagcccagccacccactgaa

SEQ ID NO: 163845 - DNA, 20 bp, Artificial Sequence
  Synthetic oligonucleotide; AGG chr2 60504347 60504366 60504363 +
agcccagccacccactgaaa

SEQ ID NO: 163846 - DNA, 20 bp, Artificial Sequence
  Synthetic oligonucleotide; CAG chr2 60504350 60504369 60504366 +
ccagccacccactgaaaagg

SEQ ID NO: 163847 - DNA, 20 bp, Artificial Sequence
  Synthetic oligonucleotide; GAG chr2 60504352 60504371 60504368 +
agccacccactgaaaaggca

SEQ ID NO: 163848 - DNA, 20 bp, Artificial Sequence
  Synthetic oligonucleotide; AGG chr2 60504353 60504372 60504369 +
gccacccactgaaaaggcag

SEQ ID NO: 163849 - DNA, 20 bp, Artificial Sequence
  Synthetic oligonucleotide; GAG chr2 60504355 60504374 60504371 +
cacccactgaaaaggcagag

SEQ ID NO: 163850 - DNA, 20 bp, Artificial Sequence
  Synthetic oligonucleotide; AGG chr2 60504356 60504375 60504372 +
acccactgaaaaggcagagg

SEQ ID NO: 163851 - DNA, 20 bp, Artificial Sequence
  Synthetic oligonucleotide; TAG chr2 60504375 60504394 60504391 +
gaggccacctatctgaatgc

SEQ ID NO: 163852 - DNA, 20 bp, Artificial Sequence
  Synthetic oligonucleotide; AGG chr2 60504376 60504395 60504392 +
aggccacctatctgaatgct

SEQ ID NO: 163853 - DNA, 20 bp, Artificial Sequence
  Synthetic oligonucleotide; TGG chr2 60504404 60504423 60504420 +
acacacttgaaccttcctcc

SEQ ID NO: 163854 - DNA, 20 bp, Artificial Sequence
  Synthetic oligonucleotide; CAG chr2 60504408 60504427 60504424 +
acttgaaccttcctcctggc

SEQ ID NO: 163855 - DNA, 20 bp, Artificial Sequence
  Synthetic oligonucleotide; AAG chr2 60504423 60504442 60504439 +
ctggccagcctgctctccca

SEQ ID NO: 163856 - DNA, 20 bp, Artificial Sequence
  Synthetic oligonucleotide; AAG chr2 60504426 60504445 60504442 +
gccagcctgctctcccaaag

SEQ ID NO: 163857 - DNA, 20 bp, Artificial Sequence
  Synthetic oligonucleotide; AGG chr2 60504427 60504446 60504443 +
ccagcctgctctcccaaaga

SEQ ID NO: 163858 - DNA, 20 bp, Artificial Sequence
  Synthetic oligonucleotide; CAG chr2 60504435 60504454 60504451 +
ctctcccaaagaaggaataa

SEQ ID NO: 163859 - DNA, 20 bp, Artificial Sequence
  Synthetic oligonucleotide; AAG chr2 60504445 60504464 60504461 +
gaaggaataacagaacaaaa

SEQ ID NO: 163860 - DNA, 20 bp, Artificial Sequence
  Synthetic oligonucleotide; TGG chr2 60504466 60504485 60504482 +
agtcaacctctgactacttc

SEQ ID NO: 163861 - DNA, 20 bp, Artificial Sequence
  Synthetic oligonucleotide; AAG chr2 60504498 60504517 60504514 +
ttataccaatgttcttcttg

SEQ ID NO: 163862 - DNA, 20 bp, Artificial Sequence
  Synthetic oligonucleotide; TGG chr2 60504501 60504520 60504517 +
taccaatgttcttcttgaag

SEQ ID NO: 163863 - DNA, 20 bp, Artificial Sequence
  Synthetic oligonucleotide; GGG chr2 60504502 60504521 60504518 +
accaatgttcttcttgaagt

SEQ ID NO: 163864 - DNA, 20 bp, Artificial Sequence
  Synthetic oligonucleotide; GAG chr2 60504504 60504523 60504520 +
caatgttcttcttgaagtgg

SEQ ID NO: 163865 - DNA, 20 bp, Artificial Sequence
  Synthetic oligonucleotide; CAG chr2 60504509 60504528 60504525 +
ttcttcttgaagtgggagct

SEQ ID NO: 163866 - DNA, 20 bp, Artificial Sequence
  Synthetic oligonucleotide; CGG chr2 60504515 60504534 60504531 +
ttgaagtgggagctcagcat

SEQ ID NO: 163867 - DNA, 20 bp, Artificial Sequence
  Synthetic oligonucleotide; GGG chr2 60504516 60504535 60504532 +
tgaagtgggagctcagcatc

SEQ ID NO: 163868 - DNA, 20 bp, Artificial Sequence
  Synthetic oligonucleotide; CAG chr2 60504524 60504543 60504540 +
gagctcagcatcgggacacc

SEQ ID NO: 163869 - DNA, 20 bp, Artificial Sequence
  Synthetic oligonucleotide; AAG chr2 60504541 60504560 60504557 +
acccagaaaaaataatctcc

SEQ ID NO: 163870 - DNA, 20 bp, Artificial Sequence
  Synthetic oligonucleotide; AGG chr2 60504542 60504561 60504558 +
cccagaaaaaataatctcca

SEQ ID NO: 163871 - DNA, 20 bp, Artificial Sequence
  Synthetic oligonucleotide; AAG chr2 60504549 60504568 60504565 +
aaaataatctccaaggcaaa

SEQ ID NO: 163872 - DNA, 20 bp, Artificial Sequence
  Synthetic oligonucleotide; TAG chr2 60504556 60504575 60504572 +
tctccaaggcaaaaagcaaa

SEQ ID NO: 163873 - DNA, 20 bp, Artificial Sequence
  Synthetic oligonucleotide; CAG chr2 60504559 60504578 60504575 +
ccaaggcaaaaagcaaatag

SEQ ID NO: 163874 - DNA, 20 bp, Artificial Sequence
  Synthetic oligonucleotide; GAG chr2 60504565 60504584 60504581 +
caaaaagcaaatagcagaat

SEQ ID NO: 163875 - DNA, 20 bp, Artificial Sequence
  Synthetic oligonucleotide; CAG chr2 60504578 60504597 60504594 +
gcagaatgagtctgctgaaa

SEQ ID NO: 163876 - DNA, 20 bp, Artificial Sequence
  Synthetic oligonucleotide; AAG chr2 60504604 60504623 60504620 +
actctgtctctgtctccccc

SEQ ID NO: 163877 - DNA, 20 bp, Artificial Sequence
  Synthetic oligonucleotide; TAG chr2 60504613 60504632 60504629 +
ctgtctcccccaagccctcc

SEQ ID NO: 163878 - DNA, 20 bp, Artificial Sequence
  Synthetic oligonucleotide; CAG chr2 60504617 60504636 60504633 +
ctcccccaagccctcctagt

SEQ ID NO: 163879 - DNA, 20 bp, Artificial Sequence
  Synthetic oligonucleotide; CAG chr2 60504630 60504649 60504646 +
tcctagtcagaacgttctct

SEQ ID NO: 163880 - DNA, 20 bp, Artificial Sequence
  Synthetic oligonucleotide; CAG chr2 60504638 60504657 60504654 +
agaacgttctctcagcattt

SEQ ID NO: 163881 - DNA, 20 bp, Artificial Sequence
  Synthetic oligonucleotide; CAG chr2 60504641 60504660 60504657 +
acgttctctcagcatttcag

SEQ ID NO: 163882 - DNA, 20 bp, Artificial Sequence
  Synthetic oligonucleotide; AGG chr2 60504642 60504661 60504658 +
cgttctctcagcatttcagc

SEQ ID NO: 163883 - DNA, 20 bp, Artificial Sequence
  Synthetic oligonucleotide; TGG chr2 60504656 60504675 60504672 +
ttcagcaggtactgctcacc

SEQ ID NO: 163884 - DNA, 20 bp, Artificial Sequence
  Synthetic oligonucleotide; CAG chr2 60504664 60504683 60504680 +
gtactgctcacctggaaata

SEQ ID NO: 163885 - DNA, 20 bp, Artificial Sequence
  Synthetic oligonucleotide; GAG chr2 60504681 60504700 60504697 +
atacagctgatgtatttact

SEQ ID NO: 163886 - DNA, 20 bp, Artificial Sequence
  Synthetic oligonucleotide; AAG chr2 60504684 60504703 60504700 +
cagctgatgtatttactgag

SEQ ID NO: 163887 - DNA, 20 bp, Artificial Sequence
  Synthetic oligonucleotide; AAG chr2 60504694 60504713 60504710 +
atttactgagaagcttcttc

SEQ ID NO: 163888 - DNA, 20 bp, Artificial Sequence
  Synthetic oligonucleotide; TGG chr2 60504705 60504724 60504721 +
agcttcttcaagctttctac

SEQ ID NO: 163889 - DNA, 20 bp, Artificial Sequence
  Synthetic oligonucleotide; TAG chr2 60504712 60504731 60504728 +
tcaagctttctactggtgct

SEQ ID NO: 163890 - DNA, 20 bp, Artificial Sequence
  Synthetic oligonucleotide; AGG chr2 60504713 60504732 60504729 +
caagctttctactggtgctt

SEQ ID NO: 163891 - DNA, 20 bp, Artificial Sequence
  Synthetic oligonucleotide; GGG chr2 60504714 60504733 60504730 +
aagctttctactggtgctta

SEQ ID NO: 163892 - DNA, 20 bp, Artificial Sequence
  Synthetic oligonucleotide; AAG chr2 60504729 60504748 60504745 +
gcttagggacaatgccaatc

SEQ ID NO: 163893 - DNA, 20 bp, Artificial Sequence
  Synthetic oligonucleotide; TAG chr2 60504745 60504764 60504761 +
aatcaagtcttgaaattata

SEQ ID NO: 163894 - DNA, 20 bp, Artificial Sequence
  Synthetic oligonucleotide; GAG chr2 60504747 60504766 60504763 +
tcaagtcttgaaattatata

SEQ ID NO: 163895 - DNA, 20 bp, Artificial Sequence
  Synthetic oligonucleotide; GAG chr2 60504749 60504768 60504765 +
aagtcttgaaattatataga

SEQ ID NO: 163896 - DNA, 20 bp, Artificial Sequence
  Synthetic oligonucleotide; AGG chr2 60504750 60504769 60504766 +
agtcttgaaattatatagag

SEQ ID NO: 163897 - DNA, 20 bp, Artificial Sequence
  Synthetic oligonucleotide; TGG chr2 60504753 60504772 60504769 +
cttgaaattatatagagagg

SEQ ID NO: 163898 - DNA, 20 bp, Artificial Sequence
  Synthetic oligonucleotide; CAG chr2 60504761 60504780 60504777 +
tatatagagaggtggaatat

SEQ ID NO: 163899 - DNA, 20 bp, Artificial Sequence
  Synthetic oligonucleotide; AGG chr2 60504762 60504781 60504778 +
atatagagaggtggaatatc

SEQ ID NO: 163900 - DNA, 20 bp, Artificial Sequence
  Synthetic oligonucleotide; AAG chr2 60504792 60504811 60504808 +
ctgtccctgaaaatgcttaa

SEQ ID NO: 163901 - DNA, 20 bp, Artificial Sequence
  Synthetic oligonucleotide; CAG chr2 60504828 60504847 60504844 +
ctatcacatgcctcccctac

SEQ ID NO: 163902 - DNA, 20 bp, Artificial Sequence
  Synthetic oligonucleotide; GAG chr2 60504832 60504851 60504848 +
cacatgcctcccctaccagt

SEQ ID NO: 163903 - DNA, 20 bp, Artificial Sequence
  Synthetic oligonucleotide; TAG chr2 60504845 60504864 60504861 +
taccagtgagcgcccaccac

SEQ ID NO: 163904 - DNA, 20 bp, Artificial Sequence
  Synthetic oligonucleotide; CAG chr2 60504872 60504891 60504888 +
cttgctccaaactattaaaa

SEQ ID NO: 163905 - DNA, 20 bp, Artificial Sequence
  Synthetic oligonucleotide; GAG chr2 60504874 60504893 60504890 +
tgctccaaactattaaaaca

SEQ ID NO: 163906 - DNA, 20 bp, Artificial Sequence
  Synthetic oligonucleotide; CAG chr2 60504893 60504912 60504909 +
agagcgtccccccaaaaaaa

SEQ ID NO: 163907 - DNA, 20 bp, Artificial Sequence
  Synthetic oligonucleotide; AAG chr2 60504904 60504923 60504920 +
ccaaaaaaacagccttctgc

SEQ ID NO: 163908 - DNA, 20 bp, Artificial Sequence
  Synthetic oligonucleotide; CAG chr2 60504930 60504949 60504946 +
caacttccctaccctgtgtg

SEQ ID NO: 163909 - DNA, 20 bp, Artificial Sequence
  Synthetic oligonucleotide; AGG chr2 60504931 60504950 60504947 +
aacttccctaccctgtgtgc

SEQ ID NO: 163910 - DNA, 20 bp, Artificial Sequence
  Synthetic oligonucleotide; TGG chr2 60504937 60504956 60504953 +
cctaccctgtgtgcaggctg

SEQ ID NO: 163911 - DNA, 20 bp, Artificial Sequence
  Synthetic oligonucleotide; AAG chr2 60504940 60504959 60504956 +
accctgtgtgcaggctgtgg

SEQ ID NO: 163912 - DNA, 20 bp, Artificial Sequence
  Synthetic oligonucleotide; TGG chr2 60504945 60504964 60504961 +
gtgtgcaggctgtggaagcg

SEQ ID NO: 163913 - DNA, 20 bp, Artificial Sequence
  Synthetic oligonucleotide; GGG chr2 60504946 60504965 60504962 +
tgtgcaggctgtggaagcgt

SEQ ID NO: 163914 - DNA, 20 bp, Artificial Sequence
  Synthetic oligonucleotide; GGG chr2 60504947 60504966 60504963 +
gtgcaggctgtggaagcgtg

SEQ ID NO: 163915 - DNA, 20 bp, Artificial Sequence
  Synthetic oligonucleotide; TGG chr2 60504950 60504969 60504966 +
caggctgtggaagcgtgggg

SEQ ID NO: 163916 - DNA, 20 bp, Artificial Sequence
  Synthetic oligonucleotide; CAG chr2 60504956 60504975 60504972 +
gtggaagcgtggggtggacc

SEQ ID NO: 163917 - DNA, 20 bp, Artificial Sequence
  Synthetic oligonucleotide; AAG chr2 60504959 60504978 60504975 +
gaagcgtggggtggacccag

SEQ ID NO: 163918 - DNA, 20 bp, Artificial Sequence
  Synthetic oligonucleotide; AAG chr2 60504965 60504984 60504981 +
tggggtggacccagaagtat

SEQ ID NO: 163919 - DNA, 20 bp, Artificial Sequence
  Synthetic oligonucleotide; AGG chr2 60504966 60504985 60504982 +
ggggtggacccagaagtata

SEQ ID NO: 163920 - DNA, 20 bp, Artificial Sequence
  Synthetic oligonucleotide; GAG chr2 60504968 60504987 60504984 +
ggtggacccagaagtataag

SEQ ID NO: 163921 - DNA, 20 bp, Artificial Sequence
  Synthetic oligonucleotide; TGG chr2 60504974 60504993 60504990 +
cccagaagtataaggagttc

SEQ ID NO: 163922 - DNA, 20 bp, Artificial Sequence
  Synthetic oligonucleotide; CAG chr2 60504979 60504998 60504995 +
aagtataaggagttctggat

SEQ ID NO: 163923 - DNA, 20 bp, Artificial Sequence
  Synthetic oligonucleotide; TAG chr2 60504988 60505007 60505004 +
gagttctggatcagaatccc

SEQ ID NO: 163924 - DNA, 20 bp, Artificial Sequence
  Synthetic oligonucleotide; CGG chr2 60505001 60505020 60505017 +
gaatccctagtctacccctg

SEQ ID NO: 163925 - DNA, 20 bp, Artificial Sequence
  Synthetic oligonucleotide; GAG chr2 60505010 60505029 60505026 +
gtctacccctgcggctgcat

SEQ ID NO: 163926 - DNA, 20 bp, Artificial Sequence
  Synthetic oligonucleotide; CAG chr2 60505015 60505034 60505031 +
cccctgcggctgcatgagac

SEQ ID NO: 163927 - DNA, 20 bp, Artificial Sequence
  Synthetic oligonucleotide; AAG chr2 60505038 60505057 60505054 +
acctgccatttaacctctct

SEQ ID NO: 163928 - DNA, 20 bp, Artificial Sequence
  Synthetic oligonucleotide; CAG chr2 60505070 60505089 60505086 +
ccctttctcctgcctcttca

SEQ ID NO: 163929 - DNA, 20 bp, Artificial Sequence
  Synthetic oligonucleotide; AGG chr2 60505071 60505090 60505087 +
cctttctcctgcctcttcac

SEQ ID NO: 163930 - DNA, 20 bp, Artificial Sequence
  Synthetic oligonucleotide; GGG chr2 60505072 60505091 60505088 +
ctttctcctgcctcttcaca

SEQ ID NO: 163931 - DNA, 20 bp, Artificial Sequence
  Synthetic oligonucleotide; GAG chr2 60505083 60505102 60505099 +
ctcttcacagggttactcat

SEQ ID NO: 163932 - DNA, 20 bp, Artificial Sequence
  Synthetic oligonucleotide; AGG chr2 60505084 60505103 60505100 +
tcttcacagggttactcatg

SEQ ID NO: 163933 - DNA, 20 bp, Artificial Sequence
  Synthetic oligonucleotide; GAG chr2 60505088 60505107 60505104 +
cacagggttactcatgaggt

SEQ ID NO: 163934 - DNA, 20 bp, Artificial Sequence
  Synthetic oligonucleotide; AAG chr2 60505114 60505133 60505130 +
caatttgacaatactcctca

SEQ ID NO: 163935 - DNA, 20 bp, Artificial Sequence
  Synthetic oligonucleotide; AGG chr2 60505115 60505134 60505131 +
aatttgacaatactcctcaa

SEQ ID NO: 163936 - DNA, 20 bp, Artificial Sequence
  Synthetic oligonucleotide; GGG chr2 60505116 60505135 60505132 +
atttgacaatactcctcaaa

SEQ ID NO: 163937 - DNA, 20 bp, Artificial Sequence
  Synthetic oligonucleotide; CAG chr2 60505165 60505184 60505181 +
atccgtatcctcattactaa

SEQ ID NO: 163938 - DNA, 20 bp, Artificial Sequence
  Synthetic oligonucleotide; TGG chr2 60505173 60505192 60505189 +
cctcattactaacagcacaa

SEQ ID NO: 163939 - DNA, 20 bp, Artificial Sequence
  Synthetic oligonucleotide; AAG chr2 60505184 60505203 60505200 +
acagcacaatggacattcga

SEQ ID NO: 163940 - DNA, 20 bp, Artificial Sequence
  Synthetic oligonucleotide; AGG chr2 60505185 60505204 60505201 +
cagcacaatggacattcgaa

SEQ ID NO: 163941 - DNA, 20 bp, Artificial Sequence
  Synthetic oligonucleotide; GGG chr2 60505186 60505205 60505202 +
agcacaatggacattcgaaa

SEQ ID NO: 163942 - DNA, 20 bp, Artificial Sequence
  Synthetic oligonucleotide; TGG chr2 60505190 60505209 60505206 +
caatggacattcgaaaggga

SEQ ID NO: 163943 - DNA, 20 bp, Artificial Sequence
  Synthetic oligonucleotide; GGG chr2 60505191 60505210 60505207 +
aatggacattcgaaagggat

SEQ ID NO: 163944 - DNA, 20 bp, Artificial Sequence
  Synthetic oligonucleotide; AAG chr2 60505207 60505226 60505223 +
ggatgggcccaatttttcat

SEQ ID NO: 163945 - DNA, 20 bp, Artificial Sequence
  Synthetic oligonucleotide; AAG chr2 60505216 60505235 60505232 +
caatttttcataagccaaaa

SEQ ID NO: 163946 - DNA, 20 bp, Artificial Sequence
  Synthetic oligonucleotide; TAG chr2 60505220 60505239 60505236 +
ttttcataagccaaaaaagc

SEQ ID NO: 163947 - DNA, 20 bp, Artificial Sequence
  Synthetic oligonucleotide; GAG chr2 60505222 60505241 60505238 +
ttcataagccaaaaaagcta

SEQ ID NO: 163948 - DNA, 20 bp, Artificial Sequence
  Synthetic oligonucleotide; AGG chr2 60505223 60505242 60505239 +
tcataagccaaaaaagctag

SEQ ID NO: 163949 - DNA, 20 bp, Artificial Sequence
  Synthetic oligonucleotide; CGG chr2 60505228 60505247 60505244 +
agccaaaaaagctagaggat

SEQ ID NO: 163950 - DNA, 20 bp, Artificial Sequence
  Synthetic oligonucleotide; GAG chr2 60505230 60505249 60505246 +
ccaaaaaagctagaggatcg

SEQ ID NO: 163951 - DNA, 20 bp, Artificial Sequence
  Synthetic oligonucleotide; GAG chr2 60505232 60505251 60505248 +
aaaaaagctagaggatcgga

SEQ ID NO: 163952 - DNA, 20 bp, Artificial Sequence
  Synthetic oligonucleotide; AAG chr2 60505237 60505256 60505253 +
agctagaggatcggagagaa

SEQ ID NO: 163953 - DNA, 20 bp, Artificial Sequence
  Synthetic oligonucleotide; AAG chr2 60505240 60505259 60505256 +
tagaggatcggagagaaaag

SEQ ID NO: 163954 - DNA, 20 bp, Artificial Sequence
  Synthetic oligonucleotide; AGG chr2 60505241 60505260 60505257 +
agaggatcggagagaaaaga

SEQ ID NO: 163955 - DNA, 20 bp, Artificial Sequence
  Synthetic oligonucleotide; GGG chr2 60505242 60505261 60505258 +
gaggatcggagagaaaagaa

SEQ ID NO: 163956 - DNA, 20 bp, Artificial Sequence
  Synthetic oligonucleotide; CGG chr2 60505246 60505265 60505262 +
atcggagagaaaagaaggga

SEQ ID NO: 163957 - DNA, 20 bp, Artificial Sequence
  Synthetic oligonucleotide; CAG chr2 60505254 60505273 60505270 +
gaaaagaagggacggatact

SEQ ID NO: 163958 - DNA, 20 bp, Artificial Sequence
  Synthetic oligonucleotide; CGG chr2 60505260 60505279 60505276 +
aagggacggatactcagaaa

SEQ ID NO: 163959 - DNA, 20 bp, Artificial Sequence
  Synthetic oligonucleotide; AAG chr2 60505267 60505286 60505283 +
ggatactcagaaacggcttc

SEQ ID NO: 163960 - DNA, 20 bp, Artificial Sequence
  Synthetic oligonucleotide; AGG chr2 60505268 60505287 60505284 +
gatactcagaaacggcttca

SEQ ID NO: 163961 - DNA, 20 bp, Artificial Sequence
  Synthetic oligonucleotide; GGG chr2 60505269 60505288 60505285 +
atactcagaaacggcttcaa

SEQ ID NO: 163962 - DNA, 20 bp, Artificial Sequence
  Synthetic oligonucleotide; TGG chr2 60505279 60505298 60505295 +
acggcttcaagggtgtcctt

SEQ ID NO: 163963 - DNA, 20 bp, Artificial Sequence
  Synthetic oligonucleotide; CAG chr2 60505295 60505314 60505311 +
cctttggcaccccattcttc

SEQ ID NO: 163964 - DNA, 20 bp, Artificial Sequence
  Synthetic oligonucleotide; CAG chr2 60505318 60505337 60505334 +
attgttccaaatgcctgctg

SEQ ID NO: 163965 - DNA, 20 bp, Artificial Sequence
  Synthetic oligonucleotide; CAG chr2 60505327 60505346 60505343 +
aatgcctgctgcagtaataa

SEQ ID NO: 163966 - DNA, 20 bp, Artificial Sequence
  Synthetic oligonucleotide; AAG chr2 60505336 60505355 60505352 +
tgcagtaataacagccccaa

SEQ ID NO: 163967 - DNA, 20 bp, Artificial Sequence
  Synthetic oligonucleotide; CAG chr2 60505354 60505373 60505370 +
aaaagaacacaccactttgt

SEQ ID NO: 163968 - DNA, 20 bp, Artificial Sequence
  Synthetic oligonucleotide; AGG chr2 60505355 60505374 60505371 +
aaagaacacaccactttgtc

SEQ ID NO: 163969 - DNA, 20 bp, Artificial Sequence
  Synthetic oligonucleotide; TAG chr2 60505363 60505382 60505379 +
caccactttgtcaggacttg

SEQ ID NO: 163970 - DNA, 20 bp, Artificial Sequence
  Synthetic oligonucleotide; AGG chr2 60505364 60505383 60505380 +
accactttgtcaggacttgt

SEQ ID NO: 163971 - DNA, 20 bp, Artificial Sequence
  Synthetic oligonucleotide; TGG chr2 60505377 60505396 60505393 +
gacttgtaggtgaaatgtgt

SEQ ID NO: 163972 - DNA, 20 bp, Artificial Sequence
  Synthetic oligonucleotide; GAG chr2 60505379 60505398 60505395 +
cttgtaggtgaaatgtgttg

SEQ ID NO: 163973 - DNA, 20 bp, Artificial Sequence
  Synthetic oligonucleotide; CAG chr2 60505382 60505401 60505398 +
gtaggtgaaatgtgttggag

SEQ ID NO: 163974 - DNA, 20 bp, Artificial Sequence
  Synthetic oligonucleotide; CAG chr2 60505389 60505408 60505405 +
aaatgtgttggagcagctgt

SEQ ID NO: 163975 - DNA, 20 bp, Artificial Sequence
  Synthetic oligonucleotide; TGG chr2 60505394 60505413 60505410 +
tgttggagcagctgtcagct

SEQ ID NO: 163976 - DNA, 20 bp, Artificial Sequence
  Synthetic oligonucleotide; GGG chr2 60505395 60505414 60505411 +
gttggagcagctgtcagctt

SEQ ID NO: 163977 - DNA, 20 bp, Artificial Sequence
  Synthetic oligonucleotide; GGG chr2 60505396 60505415 60505412 +
ttggagcagctgtcagcttg

SEQ ID NO: 163978 - DNA, 20 bp, Artificial Sequence
  Synthetic oligonucleotide; CAG chr2 60505411 60505430 60505427 +
gcttggggaaaatcactcat

SEQ ID NO: 163979 - DNA, 20 bp, Artificial Sequence
  Synthetic oligonucleotide; AGG chr2 60505412 60505431 60505428 +
cttggggaaaatcactcatc

SEQ ID NO: 163980 - DNA, 20 bp, Artificial Sequence
  Synthetic oligonucleotide; TAG chr2 60505415 60505434 60505431 +
ggggaaaatcactcatcagg

SEQ ID NO: 163981 - DNA, 20 bp, Artificial Sequence
  Synthetic oligonucleotide; CAG chr2 60505419 60505438 60505435 +
aaaatcactcatcaggtagt

SEQ ID NO: 163982 - DNA, 20 bp, Artificial Sequence
  Synthetic oligonucleotide; GAG chr2 60505424 60505443 60505440 +
cactcatcaggtagtcagcc

SEQ ID NO: 163983 - DNA, 20 bp, Artificial Sequence
  Synthetic oligonucleotide; GAG chr2 60505428 60505447 60505444 +
catcaggtagtcagccgagt

SEQ ID NO: 163984 - DNA, 20 bp, Artificial Sequence
  Synthetic oligonucleotide; AGG chr2 60505429 60505448 60505445 +
atcaggtagtcagccgagtg

SEQ ID NO: 163985 - DNA, 20 bp, Artificial Sequence
  Synthetic oligonucleotide; CAG chr2 60505439 60505458 60505455 +
cagccgagtgaggctgcctt

SEQ ID NO: 163986 - DNA, 20 bp, Artificial Sequence
  Synthetic oligonucleotide; TGG chr2 60505443 60505462 60505459 +
cgagtgaggctgccttcagc

SEQ ID NO: 163987 - DNA, 20 bp, Artificial Sequence
  Synthetic oligonucleotide; CAG chr2 60505464 60505483 60505480 +
ggacaaacactgcatccaca

SEQ ID NO: 163988 - DNA, 20 bp, Artificial Sequence
  Synthetic oligonucleotide; AGG chr2 60505465 60505484 60505481 +
gacaaacactgcatccacac

SEQ ID NO: 163989 - DNA, 20 bp, Artificial Sequence
  Synthetic oligonucleotide; GGG chr2 60505466 60505485 60505482 +
acaaacactgcatccacaca

SEQ ID NO: 163990 - DNA, 20 bp, Artificial Sequence
  Synthetic oligonucleotide; AAG chr2 60505472 60505491 60505488 +
actgcatccacacagggaac

SEQ ID NO: 163991 - DNA, 20 bp, Artificial Sequence
  Synthetic oligonucleotide; CGG chr2 60505475 60505494 60505491 +
gcatccacacagggaacaag

SEQ ID NO: 163992 - DNA, 20 bp, Artificial Sequence
  Synthetic oligonucleotide; GGG chr2 60505476 60505495 60505492 +
catccacacagggaacaagc

SEQ ID NO: 163993 - DNA, 20 bp, Artificial Sequence
  Synthetic oligonucleotide; TAG chr2 60505498 60505517 60505514 +
gtgctttcctgtccttccct

SEQ ID NO: 163994 - DNA, 20 bp, Artificial Sequence
  Synthetic oligonucleotide; AGG chr2 60505499 60505518 60505515 +
tgctttcctgtccttccctt

SEQ ID NO: 163995 - DNA, 20 bp, Artificial Sequence
  Synthetic oligonucleotide; GGG chr2 60505500 60505519 60505516 +
gctttcctgtccttccctta

SEQ ID NO: 163996 - DNA, 20 bp, Artificial Sequence
  Synthetic oligonucleotide; GGG chr2 60505501 60505520 60505517 +
ctttcctgtccttcccttag

SEQ ID NO: 163997 - DNA, 20 bp, Artificial Sequence
  Synthetic oligonucleotide; CAG chr2 60505510 60505529 60505526 +
ccttcccttaggggccaaac

SEQ ID NO: 163998 - DNA, 20 bp, Artificial Sequence
  Synthetic oligonucleotide; CAG chr2 60505538 60505557 60505554 +
ttttaccttcttgtccaacc

SEQ ID NO: 163999 - DNA, 20 bp, Artificial Sequence
  Synthetic oligonucleotide; TGG chr2 60505541 60505560 60505557 +
taccttcttgtccaacccag

SEQ ID NO: 164000 - DNA, 20 bp, Artificial Sequence
  Synthetic oligonucleotide; GGG chr2 60505542 60505561 60505558 +
accttcttgtccaacccagt

SEQ ID NO: 164001 - DNA, 20 bp, Artificial Sequence
  Synthetic oligonucleotide; CAG chr2 60505583 60505602 60505599 +
atacctccttctctttcctc

SEQ ID NO: 164002 - DNA, 20 bp, Artificial Sequence
  Synthetic oligonucleotide; AAG chr2 60505592 60505611 60505608 +
tctctttcctccagctccct

SEQ ID NO: 164003 - DNA, 20 bp, Artificial Sequence
  Synthetic oligonucleotide; CAG chr2 60505603 60505622 60505619 +
cagctccctaagctgttgtt

SEQ ID NO: 164004 - DNA, 20 bp, Artificial Sequence
  Synthetic oligonucleotide; AGG chr2 60505604 60505623 60505620 +
agctccctaagctgttgttc

SEQ ID NO: 164005 - DNA, 20 bp, Artificial Sequence
  Synthetic oligonucleotide; GGG chr2 60505605 60505624 60505621 +
gctccctaagctgttgttca

SEQ ID NO: 164006 - DNA, 20 bp, Artificial Sequence
  Synthetic oligonucleotide; CAG chr2 60505610 60505629 60505626 +
ctaagctgttgttcagggca

SEQ ID NO: 164007 - DNA, 20 bp, Artificial Sequence
  Synthetic oligonucleotide; CAG chr2 60505614 60505633 60505630 +
gctgttgttcagggcacaga

SEQ ID NO: 164008 - DNA, 20 bp, Artificial Sequence
  Synthetic oligonucleotide; CAG chr2 60505622 60505641 60505638 +
tcagggcacagacagctctt

SEQ ID NO: 164009 - DNA, 20 bp, Artificial Sequence
  Synthetic oligonucleotide; AGG chr2 60505623 60505642 60505639 +
cagggcacagacagctcttc

SEQ ID NO: 164010 - DNA, 20 bp, Artificial Sequence
  Synthetic oligonucleotide; CAG chr2 60505630 60505649 60505646 +
cagacagctcttcaggctgc

SEQ ID NO: 164011 - DNA, 20 bp, Artificial Sequence
  Synthetic oligonucleotide; GAG chr2 60505632 60505651 60505648 +
gacagctcttcaggctgcca

SEQ ID NO: 164012 - DNA, 20 bp, Artificial Sequence
  Synthetic oligonucleotide; AAG chr2 60505636 60505655 60505652 +
gctcttcaggctgccagagc

SEQ ID NO: 164013 - DNA, 20 bp, Artificial Sequence
  Synthetic oligonucleotide; GAG chr2 60505638 60505657 60505654 +
tcttcaggctgccagagcaa

SEQ ID NO: 164014 - DNA, 20 bp, Artificial Sequence
  Synthetic oligonucleotide; GAG chr2 60505640 60505659 60505656 +
ttcaggctgccagagcaaga

SEQ ID NO: 164015 - DNA, 20 bp, Artificial Sequence
  Synthetic oligonucleotide; TAG chr2 60505644 60505663 60505660 +
ggctgccagagcaagagagt

SEQ ID NO: 164016 - DNA, 20 bp, Artificial Sequence
  Synthetic oligonucleotide; AGG chr2 60505645 60505664 60505661 +
gctgccagagcaagagagtt

SEQ ID NO: 164017 - DNA, 20 bp, Artificial Sequence
  Synthetic oligonucleotide; CGG chr2 60505682 60505701 60505698 +
ccacatgcattcccacctcc

SEQ ID NO: 164018 - DNA, 20 bp, Artificial Sequence
  Synthetic oligonucleotide; AAG chr2 60505685 60505704 60505701 +
catgcattcccacctcccgg

SEQ ID NO: 164019 - DNA, 20 bp, Artificial Sequence
  Synthetic oligonucleotide; CAG chr2 60505688 60505707 60505704 +
gcattcccacctcccggaag

SEQ ID NO: 164020 - DNA, 20 bp, Artificial Sequence
  Synthetic oligonucleotide; AGG chr2 60505689 60505708 60505705 +
cattcccacctcccggaagc

SEQ ID NO: 164021 - DNA, 20 bp, Artificial Sequence
  Synthetic oligonucleotide; GGG chr2 60505690 60505709 60505706 +
attcccacctcccggaagca

SEQ ID NO: 164022 - DNA, 20 bp, Artificial Sequence
  Synthetic oligonucleotide; GGG chr2 60505691 60505710 60505707 +
ttcccacctcccggaagcag

SEQ ID NO: 164023 - DNA, 20 bp, Artificial Sequence
  Synthetic oligonucleotide; CAG chr2 60505697 60505716 60505713 +
cctcccggaagcaggggaca

SEQ ID NO: 164024 - DNA, 20 bp, Artificial Sequence
  Synthetic oligonucleotide; TGG chr2 60505701 60505720 60505717 +
ccggaagcaggggacacagc

SEQ ID NO: 164025 - DNA, 20 bp, Artificial Sequence
  Synthetic oligonucleotide; CGG chr2 60505715 60505734 60505731 +
cacagctggccactctgtga

SEQ ID NO: 164026 - DNA, 20 bp, Artificial Sequence
  Synthetic oligonucleotide; GAG chr2 60505717 60505736 60505733 +
cagctggccactctgtgacg

SEQ ID NO: 164027 - DNA, 20 bp, Artificial Sequence
  Synthetic oligonucleotide; AGG chr2 60505718 60505737 60505734 +
agctggccactctgtgacgg

SEQ ID NO: 164028 - DNA, 20 bp, Artificial Sequence
  Synthetic oligonucleotide; GGG chr2 60505719 60505738 60505735 +
gctggccactctgtgacgga

SEQ ID NO: 164029 - DNA, 20 bp, Artificial Sequence
  Synthetic oligonucleotide; TGG chr2 60505722 60505741 60505738 +
ggccactctgtgacggaggg

SEQ ID NO: 164030 - DNA, 20 bp, Artificial Sequence
  Synthetic oligonucleotide; GGG chr2 60505723 60505742 60505739 +
gccactctgtgacggagggt

SEQ ID NO: 164031 - DNA, 20 bp, Artificial Sequence
  Synthetic oligonucleotide; TGG chr2 60505739 60505758 60505755 +
gggtgggtaacctctctacc

SEQ ID NO: 164032 - DNA, 20 bp, Artificial Sequence
  Synthetic oligonucleotide; GGG chr2 60505740 60505759 60505756 +
ggtgggtaacctctctacct

SEQ ID NO: 164033 - DNA, 20 bp, Artificial Sequence
  Synthetic oligonucleotide; TAG chr2 60505753 60505772 60505769 +
tctacctgggtctatcattt

SEQ ID NO: 164034 - DNA, 20 bp, Artificial Sequence
  Synthetic oligonucleotide; TGG chr2 60505769 60505788 60505785 +
attttagaataaatcattcg

SEQ ID NO: 164035 - DNA, 20 bp, Artificial Sequence
  Synthetic oligonucleotide; TGG chr2 60505784 60505803 60505800 +
attcgtggctgactcttaaa

SEQ ID NO: 164036 - DNA, 20 bp, Artificial Sequence
  Synthetic oligonucleotide; GGG chr2 60505785 60505804 60505801 +
ttcgtggctgactcttaaat

SEQ ID NO: 164037 - DNA, 20 bp, Artificial Sequence
  Synthetic oligonucleotide; AAG chr2 60505788 60505807 60505804 +
gtggctgactcttaaatggg

SEQ ID NO: 164038 - DNA, 20 bp, Artificial Sequence
  Synthetic oligonucleotide; AGG chr2 60505789 60505808 60505805 +
tggctgactcttaaatggga

SEQ ID NO: 164039 - DNA, 20 bp, Artificial Sequence
  Synthetic oligonucleotide; GGG chr2 60505790 60505809 60505806 +
ggctgactcttaaatgggaa

SEQ ID NO: 164040 - DNA, 20 bp, Artificial Sequence
  Synthetic oligonucleotide; CAG chr2 60505800 60505819 60505816 +
taaatgggaagggccaatta

SEQ ID NO: 164041 - DNA, 20 bp, Artificial Sequence
  Synthetic oligonucleotide; GAG chr2 60505811 60505830 60505827 +
ggccaattacagatatctct

SEQ ID NO: 164042 - DNA, 20 bp, Artificial Sequence
  Synthetic oligonucleotide; GAG chr2 60505827 60505846 60505843 +
ctctgagaacaactctacct

SEQ ID NO: 164043 - DNA, 20 bp, Artificial Sequence
  Synthetic oligonucleotide; AGG chr2 60505828 60505847 60505844 +
tctgagaacaactctacctg

SEQ ID NO: 164044 - DNA, 20 bp, Artificial Sequence
  Synthetic oligonucleotide; GGG chr2 60505829 60505848 60505845 +
ctgagaacaactctacctga

SEQ ID NO: 164045 - DNA, 20 bp, Artificial Sequence
  Synthetic oligonucleotide; GAG chr2 60505831 60505850 60505847 +
gagaacaactctacctgagg

SEQ ID NO: 164046 - DNA, 20 bp, Artificial Sequence
  Synthetic oligonucleotide; AGG chr2 60505832 60505851 60505848 +
agaacaactctacctgaggg

SEQ ID NO: 164047 - DNA, 20 bp, Artificial Sequence
  Synthetic oligonucleotide; GGG chr2 60505833 60505852 60505849 +
gaacaactctacctgaggga

SEQ ID NO: 164048 - DNA, 20 bp, Artificial Sequence
  Synthetic oligonucleotide; GGG chr2 60505834 60505853 60505850 +
aacaactctacctgagggag

SEQ ID NO: 164049 - DNA, 20 bp, Artificial Sequence
  Synthetic oligonucleotide; GGG chr2 60505835 60505854 60505851 +
acaactctacctgagggagg

SEQ ID NO: 164050 - DNA, 20 bp, Artificial Sequence
  Synthetic oligonucleotide; CGG chr2 60505856 60505875 60505872 +
ggaaatccctcccaaaacaa

SEQ ID NO: 164051 - DNA, 20 bp, Artificial Sequence
  Synthetic oligonucleotide; TGG chr2 60505859 60505878 60505875 +
aatccctcccaaaacaacgg

SEQ ID NO: 164052 - DNA, 20 bp, Artificial Sequence
  Synthetic oligonucleotide; GGG chr2 60505860 60505879 60505876 +
atccctcccaaaacaacggt

SEQ ID NO: 164053 - DNA, 20 bp, Artificial Sequence
  Synthetic oligonucleotide; CAG chr2 60505863 60505882 60505879 +
cctcccaaaacaacggtggg

SEQ ID NO: 164054 - DNA, 20 bp, Artificial Sequence
  Synthetic oligonucleotide; CAG chr2 60505890 60505909 60505906 +
atctgcatcccgtaaatacc

SEQ ID NO: 164055 - DNA, 20 bp, Artificial Sequence
  Synthetic oligonucleotide; AAG chr2 60505893 60505912 60505909 +
tgcatcccgtaaatacccag

SEQ ID NO: 164056 - DNA, 20 bp, Artificial Sequence
  Synthetic oligonucleotide; TAG chr2 60505899 60505918 60505915 +
ccgtaaatacccagaagcaa

SEQ ID NO: 164057 - DNA, 20 bp, Artificial Sequence
  Synthetic oligonucleotide; CAG chr2 60505902 60505921 60505918 +
taaatacccagaagcaatag

SEQ ID NO: 164058 - DNA, 20 bp, Artificial Sequence
  Synthetic oligonucleotide; TGG chr2 60505912 60505931 60505928 +
gaagcaatagcagccccacc

SEQ ID NO: 164059 - DNA, 20 bp, Artificial Sequence
  Synthetic oligonucleotide; CAG chr2 60505924 60505943 60505940 +
gccccacctggttcgtctgc

SEQ ID NO: 164060 - DNA, 20 bp, Artificial Sequence
  Synthetic oligonucleotide; TGG chr2 60505933 60505952 60505949 +
ggttcgtctgccagatgctg

SEQ ID NO: 164061 - DNA, 20 bp, Artificial Sequence
  Synthetic oligonucleotide; GAG chr2 60505935 60505954 60505951 +
ttcgtctgccagatgctgtg

SEQ ID NO: 164062 - DNA, 20 bp, Artificial Sequence
  Synthetic oligonucleotide; TGG chr2 60505939 60505958 60505955 +
tctgccagatgctgtggaga

SEQ ID NO: 164063 - DNA, 20 bp, Artificial Sequence
  Synthetic oligonucleotide; TGG chr2 60505944 60505963 60505960 +
cagatgctgtggagatggca

SEQ ID NO: 164064 - DNA, 20 bp, Artificial Sequence
  Synthetic oligonucleotide; TGG chr2 60505947 60505966 60505963 +
atgctgtggagatggcatgg

SEQ ID NO: 164065 - DNA, 20 bp, Artificial Sequence
  Synthetic oligonucleotide; TGG chr2 60505954 60505973 60505970 +
ggagatggcatggtggcatt

SEQ ID NO: 164066 - DNA, 20 bp, Artificial Sequence
  Synthetic oligonucleotide; TAG chr2 60505970 60505989 60505986 +
catttggtaaataacccaaa

SEQ ID NO: 164067 - DNA, 20 bp, Artificial Sequence
  Synthetic oligonucleotide; AGG chr2 60505971 60505990 60505987 +
atttggtaaataacccaaat

SEQ ID NO: 164068 - DNA, 20 bp, Artificial Sequence
  Synthetic oligonucleotide; GGG chr2 60505972 60505991 60505988 +
tttggtaaataacccaaata

SEQ ID NO: 164069 - DNA, 20 bp, Artificial Sequence
  Synthetic oligonucleotide; CAG chr2 60505980 60505999 60505996 +
ataacccaaatagggctttg

SEQ ID NO: 164070 - DNA, 20 bp, Artificial Sequence
  Synthetic oligonucleotide; AGG chr2 60505981 60506000 60505997 +
taacccaaatagggctttgc

SEQ ID NO: 164071 - DNA, 20 bp, Artificial Sequence
  Synthetic oligonucleotide; GGG chr2 60505982 60506001 60505998 +
aacccaaatagggctttgca

SEQ ID NO: 164072 - DNA, 20 bp, Artificial Sequence
  Synthetic oligonucleotide; TGG chr2 60505987 60506006 60506003 +
aaatagggctttgcagggta

SEQ ID NO: 164073 - DNA, 20 bp, Artificial Sequence
  Synthetic oligonucleotide; GGG chr2 60505988 60506007 60506004 +
aatagggctttgcagggtat

SEQ ID NO: 164074 - DNA, 20 bp, Artificial Sequence
  Synthetic oligonucleotide; TAG chr2 60506000 60506019 60506016 +
cagggtatgggacaccacac

SEQ ID NO: 164075 - DNA, 20 bp, Artificial Sequence
  Synthetic oligonucleotide; AGG chr2 60506001 60506020 60506017 +
agggtatgggacaccacact

SEQ ID NO: 164076 - DNA, 20 bp, Artificial Sequence
  Synthetic oligonucleotide; CAG chr2 60506009 60506028 60506025 +
ggacaccacactaggctttg

SEQ ID NO: 164077 - DNA, 20 bp, Artificial Sequence
  Synthetic oligonucleotide; CGG chr2 60506014 60506033 60506030 +
ccacactaggctttgcagcc

SEQ ID NO: 164078 - DNA, 20 bp, Artificial Sequence
  Synthetic oligonucleotide; GGG chr2 60506015 60506034 60506031 +
cacactaggctttgcagccc

SEQ ID NO: 164079 - DNA, 20 bp, Artificial Sequence
  Synthetic oligonucleotide; CAG chr2 60506024 60506043 60506040 +
ctttgcagcccgggtgaaac

SEQ ID NO: 164080 - DNA, 20 bp, Artificial Sequence
  Synthetic oligonucleotide; TGG chr2 60506028 60506047 60506044 +
gcagcccgggtgaaaccaga

SEQ ID NO: 164081 - DNA, 20 bp, Artificial Sequence
  Synthetic oligonucleotide; GAG chr2 60506034 60506053 60506050 +
cgggtgaaaccagatggtgc

SEQ ID NO: 164082 - DNA, 20 bp, Artificial Sequence
  Synthetic oligonucleotide; AAG chr2 60506037 60506056 60506053 +
gtgaaaccagatggtgcgag

SEQ ID NO: 164083 - DNA, 20 bp, Artificial Sequence
  Synthetic oligonucleotide; TAG chr2 60506041 60506060 60506057 +
aaccagatggtgcgagaaga

SEQ ID NO: 164084 - DNA, 20 bp, Artificial Sequence
  Synthetic oligonucleotide; TAG chr2 60506055 60506074 60506071 +
agaagatagtgaatcactca

SEQ ID NO: 164085 - DNA, 20 bp, Artificial Sequence
  Synthetic oligonucleotide; AGG chr2 60506056 60506075 60506072 +
gaagatagtgaatcactcat

SEQ ID NO: 164086 - DNA, 20 bp, Artificial Sequence
  Synthetic oligonucleotide; AAG chr2 60506060 60506079 60506076 +
atagtgaatcactcataggc

SEQ ID NO: 164087 - DNA, 20 bp, Artificial Sequence
  Synthetic oligonucleotide; AGG chr2 60506061 60506080 60506077 +
tagtgaatcactcataggca

SEQ ID NO: 164088 - DNA, 20 bp, Artificial Sequence
  Synthetic oligonucleotide; GGG chr2 60506062 60506081 60506078 +
agtgaatcactcataggcaa

SEQ ID NO: 164089 - DNA, 20 bp, Artificial Sequence
  Synthetic oligonucleotide; TAG chr2 60506069 60506088 60506085 +
cactcataggcaagggatgt

SEQ ID NO: 164090 - DNA, 20 bp, Artificial Sequence
  Synthetic oligonucleotide; CAG chr2 60506094 60506113 60506110 +
cacctaaaaatcccctttcc

SEQ ID NO: 164091 - DNA, 20 bp, Artificial Sequence
  Synthetic oligonucleotide; TAG chr2 60506117 60506136 60506133 +
ccatcctttgacacccacca

SEQ ID NO: 164092 - DNA, 20 bp, Artificial Sequence
  Synthetic oligonucleotide; CAG chr2 60506126 60506145 60506142 +
gacacccaccatagaaatca

SEQ ID NO: 164093 - DNA, 20 bp, Artificial Sequence
  Synthetic oligonucleotide; GAG chr2 60506128 60506147 60506144 +
cacccaccatagaaatcaca

SEQ ID NO: 164094 - DNA, 20 bp, Artificial Sequence
  Synthetic oligonucleotide; GAG chr2 60506130 60506149 60506146 +
cccaccatagaaatcacaga

SEQ ID NO: 164095 - DNA, 20 bp, Artificial Sequence
  Synthetic oligonucleotide; AGG chr2 60506131 60506150 60506147 +
ccaccatagaaatcacagag

SEQ ID NO: 164096 - DNA, 20 bp, Artificial Sequence
  Synthetic oligonucleotide; CAG chr2 60506135 60506154 60506151 +
catagaaatcacagagaggt

SEQ ID NO: 164097 - DNA, 20 bp, Artificial Sequence
  Synthetic oligonucleotide; AAG chr2 60506139 60506158 60506155 +
gaaatcacagagaggtcaga

SEQ ID NO: 164098 - DNA, 20 bp, Artificial Sequence
  Synthetic oligonucleotide; TGG chr2 60506148 60506167 60506164 +
gagaggtcagaaagaacacc

SEQ ID NO: 164099 - DNA, 20 bp, Artificial Sequence
  Synthetic oligonucleotide; GGG chr2 60506149 60506168 60506165 +
agaggtcagaaagaacacct

SEQ ID NO: 164100 - DNA, 20 bp, Artificial Sequence
  Synthetic oligonucleotide; TAG chr2 60506159 60506178 60506175 +
aagaacacctgggcccaaaa

SEQ ID NO: 164101 - DNA, 20 bp, Artificial Sequence
  Synthetic oligonucleotide; TAG chr2 60506172 60506191 60506188 +
cccaaaatagcctgtcctgt

SEQ ID NO: 164102 - DNA, 20 bp, Artificial Sequence
  Synthetic oligonucleotide; CAG chr2 60506183 60506202 60506199 +
ctgtcctgttagccaaatgc

SEQ ID NO: 164103 - DNA, 20 bp, Artificial Sequence
  Synthetic oligonucleotide; GAG chr2 60506202 60506221 60506218 +
ccagcactcccactttctct

SEQ ID NO: 164104 - DNA, 20 bp, Artificial Sequence
  Synthetic oligonucleotide; AGG chr2 60506203 60506222 60506219 +
cagcactcccactttctctg

SEQ ID NO: 164105 - DNA, 20 bp, Artificial Sequence
  Synthetic oligonucleotide; GGG chr2 60506204 60506223 60506220 +
agcactcccactttctctga

SEQ ID NO: 164106 - DNA, 20 bp, Artificial Sequence
  Synthetic oligonucleotide; TGG chr2 60506209 60506228 60506225 +
tcccactttctctgagggca

SEQ ID NO: 164107 - DNA, 20 bp, Artificial Sequence
  Synthetic oligonucleotide; GAG chr2 60506211 60506230 60506227 +
ccactttctctgagggcatg

SEQ ID NO: 164108 - DNA, 20 bp, Artificial Sequence
  Synthetic oligonucleotide; AGG chr2 60506212 60506231 60506228 +
cactttctctgagggcatgg

SEQ ID NO: 164109 - DNA, 20 bp, Artificial Sequence
  Synthetic oligonucleotide; GGG chr2 60506213 60506232 60506229 +
actttctctgagggcatgga

SEQ ID NO: 164110 - DNA, 20 bp, Artificial Sequence
  Synthetic oligonucleotide; GGG chr2 60506214 60506233 60506230 +
ctttctctgagggcatggag

SEQ ID NO: 164111 - DNA, 20 bp, Artificial Sequence
  Synthetic oligonucleotide; GAG chr2 60506216 60506235 60506232 +
ttctctgagggcatggaggg

SEQ ID NO: 164112 - DNA, 20 bp, Artificial Sequence
  Synthetic oligonucleotide; AGG chr2 60506217 60506236 60506233 +
tctctgagggcatggagggg

SEQ ID NO: 164113 - DNA, 20 bp, Artificial Sequence
  Synthetic oligonucleotide; CAG chr2 60506220 60506239 60506236 +
ctgagggcatggaggggagg

SEQ ID NO: 164114 - DNA, 20 bp, Artificial Sequence
  Synthetic oligonucleotide; CAG chr2 60506223 60506242 60506239 +
agggcatggaggggaggcag

SEQ ID NO: 164115 - DNA, 20 bp, Artificial Sequence
  Synthetic oligonucleotide; TAG chr2 60506227 60506246 60506243 +
catggaggggaggcagcagc

SEQ ID NO: 164116 - DNA, 20 bp, Artificial Sequence
  Synthetic oligonucleotide; AGG chr2 60506228 60506247 60506244 +
atggaggggaggcagcagct

SEQ ID NO: 164117 - DNA, 20 bp, Artificial Sequence
  Synthetic oligonucleotide; GGG chr2 60506229 60506248 60506245 +
tggaggggaggcagcagcta

SEQ ID NO: 164118 - DNA, 20 bp, Artificial Sequence
  Synthetic oligonucleotide; TGG chr2 60506235 60506254 60506251 +
ggaggcagcagctagggctc

SEQ ID NO: 164119 - DNA, 20 bp, Artificial Sequence
  Synthetic oligonucleotide; CAG chr2 60506263 60506282 60506279 +
tcatttaattctctctgcat

SEQ ID NO: 164120 - DNA, 20 bp, Artificial Sequence
  Synthetic oligonucleotide; GAG chr2 60506265 60506284 60506281 +
atttaattctctctgcatca

SEQ ID NO: 164121 - DNA, 20 bp, Artificial Sequence
  Synthetic oligonucleotide; AGG chr2 60506266 60506285 60506282 +
tttaattctctctgcatcag

SEQ ID NO: 164122 - DNA, 20 bp, Artificial Sequence
  Synthetic oligonucleotide; AAG chr2 60506269 60506288 60506285 +
aattctctctgcatcagagg

SEQ ID NO: 164123 - DNA, 20 bp, Artificial Sequence
  Synthetic oligonucleotide; GAG chr2 60506271 60506290 60506287 +
ttctctctgcatcagaggaa

SEQ ID NO: 164124 - DNA, 20 bp, Artificial Sequence
  Synthetic oligonucleotide; CAG chr2 60506283 60506302 60506299 +
cagaggaagagtcaccttca

SEQ ID NO: 164125 - DNA, 20 bp, Artificial Sequence
  Synthetic oligonucleotide; AGG chr2 60506284 60506303 60506300 +
agaggaagagtcaccttcac

SEQ ID NO: 164126 - DNA, 20 bp, Artificial Sequence
  Synthetic oligonucleotide; CAG chr2 60506288 60506307 60506304 +
gaagagtcaccttcacaggc

SEQ ID NO: 164127 - DNA, 20 bp, Artificial Sequence
  Synthetic oligonucleotide; TGG chr2 60506294 60506313 60506310 +
tcaccttcacaggccagctg

SEQ ID NO: 164128 - DNA, 20 bp, Artificial Sequence
  Synthetic oligonucleotide; CAG chr2 60506322 60506341 60506338 +
cttgccacatctaatgccac

SEQ ID NO: 164129 - DNA, 20 bp, Artificial Sequence
  Synthetic oligonucleotide; AGG chr2 60506323 60506342 60506339 +
ttgccacatctaatgccacc

SEQ ID NO: 164130 - DNA, 20 bp, Artificial Sequence
  Synthetic oligonucleotide; CAG chr2 60506332 60506351 60506348 +
ctaatgccaccaggccctgc

SEQ ID NO: 164131 - DNA, 20 bp, Artificial Sequence
  Synthetic oligonucleotide; CGG chr2 60506335 60506354 60506351 +
atgccaccaggccctgccag

SEQ ID NO: 164132 - DNA, 20 bp, Artificial Sequence
  Synthetic oligonucleotide; TGG chr2 60506347 60506366 60506363 +
cctgccagcggcccccattc

SEQ ID NO: 164133 - DNA, 20 bp, Artificial Sequence
  Synthetic oligonucleotide; TGG chr2 60506363 60506382 60506379 +
attctggtctgtcaaacccc

SEQ ID NO: 164134 - DNA, 20 bp, Artificial Sequence
  Synthetic oligonucleotide; CAG chr2 60506373 60506392 60506389 +
gtcaaacccctggaaaactt

SEQ ID NO: 164135 - DNA, 20 bp, Artificial Sequence
  Synthetic oligonucleotide; CAG chr2 60506377 60506396 60506393 +
aacccctggaaaacttcaga

SEQ ID NO: 164136 - DNA, 20 bp, Artificial Sequence
  Synthetic oligonucleotide; CAG chr2 60506387 60506406 60506403 +
aaacttcagacagtgttcct

SEQ ID NO: 164137 - DNA, 20 bp, Artificial Sequence
  Synthetic oligonucleotide; CAG chr2 60506393 60506412 60506409 +
cagacagtgttcctcagatc

SEQ ID NO: 164138 - DNA, 20 bp, Artificial Sequence
  Synthetic oligonucleotide; AGG chr2 60506394 60506413 60506410 +
agacagtgttcctcagatcc

SEQ ID NO: 164139 - DNA, 20 bp, Artificial Sequence
  Synthetic oligonucleotide; CAG chr2 60506398 60506417 60506414 +
agtgttcctcagatccagga

SEQ ID NO: 164140 - DNA, 20 bp, Artificial Sequence
  Synthetic oligonucleotide; GAG chr2 60506400 60506419 60506416 +
tgttcctcagatccaggaca

SEQ ID NO: 164141 - DNA, 20 bp, Artificial Sequence
  Synthetic oligonucleotide; TGG chr2 60506404 60506423 60506420 +
cctcagatccaggacagagc

SEQ ID NO: 164142 - DNA, 20 bp, Artificial Sequence
  Synthetic oligonucleotide; CAG chr2 60506409 60506428 60506425 +
gatccaggacagagctggct

SEQ ID NO: 164143 - DNA, 20 bp, Artificial Sequence
  Synthetic oligonucleotide; AGG chr2 60506410 60506429 60506426 +
atccaggacagagctggctc

SEQ ID NO: 164144 - DNA, 20 bp, Artificial Sequence
  Synthetic oligonucleotide; TGG chr2 60506421 60506440 60506437 +
agctggctcaggacgccaca

SEQ ID NO: 164145 - DNA, 20 bp, Artificial Sequence
  Synthetic oligonucleotide; GGG chr2 60506422 60506441 60506438 +
gctggctcaggacgccacat

SEQ ID NO: 164146 - DNA, 20 bp, Artificial Sequence
  Synthetic oligonucleotide; GAG chr2 60506432 60506451 60506448 +
gacgccacatgggtcaaccc

SEQ ID NO: 164147 - DNA, 20 bp, Artificial Sequence
  Synthetic oligonucleotide; CAG chr2 60506440 60506459 60506456 +
atgggtcaacccgagcgcac

SEQ ID NO: 164148 - DNA, 20 bp, Artificial Sequence
  Synthetic oligonucleotide; CAG chr2 60506447 60506466 60506463 +
aacccgagcgcaccagtcct

SEQ ID NO: 164149 - DNA, 20 bp, Artificial Sequence
  Synthetic oligonucleotide; AAG chr2 60506457 60506476 60506473 +
caccagtcctcagaccctcc

SEQ ID NO: 164150 - DNA, 20 bp, Artificial Sequence
  Synthetic oligonucleotide; AGG chr2 60506458 60506477 60506474 +
accagtcctcagaccctcca

SEQ ID NO: 164151 - DNA, 20 bp, Artificial Sequence
  Synthetic oligonucleotide; AAG chr2 60506466 60506485 60506482 +
tcagaccctccaaggtgaca

SEQ ID NO: 164152 - DNA, 20 bp, Artificial Sequence
  Synthetic oligonucleotide; TAG chr2 60506476 60506495 60506492 +
caaggtgacaaagacctcac

SEQ ID NO: 164153 - DNA, 20 bp, Artificial Sequence
  Synthetic oligonucleotide; CAG chr2 60506496 60506515 60506512 +
tagactgtatctcatttttc

SEQ ID NO: 164154 - DNA, 20 bp, Artificial Sequence
  Synthetic oligonucleotide; CAG chr2 60506502 60506521 60506518 +
gtatctcatttttccagcct

SEQ ID NO: 164155 - DNA, 20 bp, Artificial Sequence
  Synthetic oligonucleotide; GAG chr2 60506506 60506525 60506522 +
ctcatttttccagcctcagt

SEQ ID NO: 164156 - DNA, 20 bp, Artificial Sequence
  Synthetic oligonucleotide; CGG chr2 60506510 60506529 60506526 +
tttttccagcctcagtgagc

SEQ ID NO: 164157 - DNA, 20 bp, Artificial Sequence
  Synthetic oligonucleotide; CAG chr2 60506516 60506535 60506532 +
cagcctcagtgagccggccc

SEQ ID NO: 164158 - DNA, 20 bp, Artificial Sequence
  Synthetic oligonucleotide; TGG chr2 60506520 60506539 60506536 +
ctcagtgagccggccccagc

SEQ ID NO: 164159 - DNA, 20 bp, Artificial Sequence
  Synthetic oligonucleotide; GAG chr2 60506529 60506548 60506545 +
ccggccccagctggcatgct

SEQ ID NO: 164160 - DNA, 20 bp, Artificial Sequence
  Synthetic oligonucleotide; CAG chr2 60506534 60506553 60506550 +
cccagctggcatgctgagtc

SEQ ID NO: 164161 - DNA, 20 bp, Artificial Sequence
  Synthetic oligonucleotide; AGG chr2 60506535 60506554 60506551 +
ccagctggcatgctgagtcc

SEQ ID NO: 164162 - DNA, 20 bp, Artificial Sequence
  Synthetic oligonucleotide; AAG chr2 60506539 60506558 60506555 +
ctggcatgctgagtccagga

SEQ ID NO: 164163 - DNA, 20 bp, Artificial Sequence
  Synthetic oligonucleotide; TGG chr2 60506545 60506564 60506561 +
tgctgagtccaggaaagccc

SEQ ID NO: 164164 - DNA, 20 bp, Artificial Sequence
  Synthetic oligonucleotide; CAG chr2 60506560 60506579 60506576 +
agccctggctatacaaaaca

SEQ ID NO: 164165 - DNA, 20 bp, Artificial Sequence
  Synthetic oligonucleotide; TGG chr2 60506583 60506602 60506599 +
cacccacgtgcctttgtgca

SEQ ID NO: 164166 - DNA, 20 bp, Artificial Sequence
  Synthetic oligonucleotide; TAG chr2 60506591 60506610 60506607 +
tgcctttgtgcatggctgct

SEQ ID NO: 164167 - DNA, 20 bp, Artificial Sequence
  Synthetic oligonucleotide; GAG chr2 60506593 60506612 60506609 +
cctttgtgcatggctgctta

SEQ ID NO: 164168 - DNA, 20 bp, Artificial Sequence
  Synthetic oligonucleotide; AGG chr2 60506594 60506613 60506610 +
ctttgtgcatggctgcttag

SEQ ID NO: 164169 - DNA, 20 bp, Artificial Sequence
  Synthetic oligonucleotide; GGG chr2 60506595 60506614 60506611 +
tttgtgcatggctgcttaga

SEQ ID NO: 164170 - DNA, 20 bp, Artificial Sequence
  Synthetic oligonucleotide; AAG chr2 60506607 60506626 60506623 +
tgcttagagggctaatgata

SEQ ID NO: 164171 - DNA, 20 bp, Artificial Sequence
  Synthetic oligonucleotide; AGG chr2 60506608 60506627 60506624 +
gcttagagggctaatgataa

SEQ ID NO: 164172 - DNA, 20 bp, Artificial Sequence
  Synthetic oligonucleotide; CAG chr2 60506611 60506630 60506627 +
tagagggctaatgataaagg

SEQ ID NO: 164173 - DNA, 20 bp, Artificial Sequence
  Synthetic oligonucleotide; AAG chr2 60506620 60506639 60506636 +
aatgataaaggcagctcact

SEQ ID NO: 164174 - DNA, 20 bp, Artificial Sequence
  Synthetic oligonucleotide; CAG chr2 60506637 60506656 60506653 +
actaagaaaacgaccgtgcc

SEQ ID NO: 164175 - DNA, 20 bp, Artificial Sequence
  Synthetic oligonucleotide; CAG chr2 60506640 60506659 60506656 +
aagaaaacgaccgtgcccag

SEQ ID NO: 164176 - DNA, 20 bp, Artificial Sequence
  Synthetic oligonucleotide; TGG chr2 60506652 60506671 60506668 +
gtgcccagcagtctcctaaa

SEQ ID NO: 164177 - DNA, 20 bp, Artificial Sequence
  Synthetic oligonucleotide; AAG chr2 60506657 60506676 60506673 +
cagcagtctcctaaatggcg

SEQ ID NO: 164178 - DNA, 20 bp, Artificial Sequence
  Synthetic oligonucleotide; AGG chr2 60506658 60506677 60506674 +
agcagtctcctaaatggcga

SEQ ID NO: 164179 - DNA, 20 bp, Artificial Sequence
  Synthetic oligonucleotide; CAG chr2 60506661 60506680 60506677 +
agtctcctaaatggcgaagg

SEQ ID NO: 164180 - DNA, 20 bp, Artificial Sequence
  Synthetic oligonucleotide; CAG chr2 60506680 60506699 60506696 +
gcagcatttaccactgatga

SEQ ID NO: 164181 - DNA, 20 bp, Artificial Sequence
  Synthetic oligonucleotide; CAG chr2 60506732 60506751 60506748 +
atatatatccatttttctgt

SEQ ID NO: 164182 - DNA, 20 bp, Artificial Sequence
  Synthetic oligonucleotide; GAG chr2 60506761 60506780 60506777 +
caaataatgtctataatgct

SEQ ID NO: 164183 - DNA, 20 bp, Artificial Sequence
  Synthetic oligonucleotide; TGG chr2 60506773 60506792 60506789 +
ataatgctgagatttataca

SEQ ID NO: 164184 - DNA, 20 bp, Artificial Sequence
  Synthetic oligonucleotide; GGG chr2 60506774 60506793 60506790 +
taatgctgagatttatacat

SEQ ID NO: 164185 - DNA, 20 bp, Artificial Sequence
  Synthetic oligonucleotide; TAG chr2 60506800 60506819 60506816 +
ttataaatgtgatttcatta

SEQ ID NO: 164186 - DNA, 20 bp, Artificial Sequence
  Synthetic oligonucleotide; TGG chr2 60506863 60506882 60506879 +
gtaattaaattgctacctga

SEQ ID NO: 164187 - DNA, 20 bp, Artificial Sequence
  Synthetic oligonucleotide; TGG chr2 60506883 60506902 60506899 +
tggcattatctaatttaact

SEQ ID NO: 164188 - DNA, 20 bp, Artificial Sequence
  Synthetic oligonucleotide; GGG chr2 60506884 60506903 60506900 +
ggcattatctaatttaactt

SEQ ID NO: 164189 - DNA, 20 bp, Artificial Sequence
  Synthetic oligonucleotide; AAG chr2 60506902 60506921 60506918 +
ttgggatccaaactattgaa

SEQ ID NO: 164190 - DNA, 20 bp, Artificial Sequence
  Synthetic oligonucleotide; TGG chr2 60506928 60506947 60506944 +
gtgccttttaacaccctgac

SEQ ID NO: 164191 - DNA, 20 bp, Artificial Sequence
  Synthetic oligonucleotide; AAG chr2 60506932 60506951 60506948 +
cttttaacaccctgactggt

SEQ ID NO: 164192 - DNA, 20 bp, Artificial Sequence
  Synthetic oligonucleotide; AGG chr2 60506933 60506952 60506949 +
ttttaacaccctgactggta

SEQ ID NO: 164193 - DNA, 20 bp, Artificial Sequence
  Synthetic oligonucleotide; CAG chr2 60506947 60506966 60506963 +
ctggtaaggcatgtgatgaa

SEQ ID NO: 164194 - DNA, 20 bp, Artificial Sequence
  Synthetic oligonucleotide; GAG chr2 60506949 60506968 60506965 +
ggtaaggcatgtgatgaaca

SEQ ID NO: 164195 - DNA, 20 bp, Artificial Sequence
  Synthetic oligonucleotide; TGG chr2 60506964 60506983 60506980 +
gaacagagctataaacatgt

SEQ ID NO: 164196 - DNA, 20 bp, Artificial Sequence
  Synthetic oligonucleotide; GAG chr2 60506974 60506993 60506990 +
ataaacatgttggcgtaact

SEQ ID NO: 164197 - DNA, 20 bp, Artificial Sequence
  Synthetic oligonucleotide; TAG chr2 60506993 60507012 60507009 +
tgagctgtttaaaaataaat

SEQ ID NO: 164198 - DNA, 20 bp, Artificial Sequence
  Synthetic oligonucleotide; CAG chr2 60507013 60507032 60507029 +
tagcaaactataaaaataaa

SEQ ID NO: 164199 - DNA, 20 bp, Artificial Sequence
  Synthetic oligonucleotide; TAG chr2 60507082 60507101 60507098 +
tgaaatactgtctttgacct

SEQ ID NO: 164200 - DNA, 20 bp, Artificial Sequence
  Synthetic oligonucleotide; AAG chr2 60507093 60507112 60507109 +
ctttgaccttagtcataaac

SEQ ID NO: 164201 - DNA, 20 bp, Artificial Sequence
  Synthetic oligonucleotide; CAG chr2 60507123 60507142 60507139 +
aaaaaaacataatatcccaa

SEQ ID NO: 164202 - DNA, 20 bp, Artificial Sequence
  Synthetic oligonucleotide; CAG chr2 60507127 60507146 60507143 +
aaacataatatcccaacaga

SEQ ID NO: 164203 - DNA, 20 bp, Artificial Sequence
  Synthetic oligonucleotide; GAG chr2 60507129 60507148 60507145 +
acataatatcccaacagaca

SEQ ID NO: 164204 - DNA, 20 bp, Artificial Sequence
  Synthetic oligonucleotide; AGG chr2 60507130 60507149 60507146 +
cataatatcccaacagacag

SEQ ID NO: 164205 - DNA, 20 bp, Artificial Sequence
  Synthetic oligonucleotide; GGG chr2 60507131 60507150 60507147 +
ataatatcccaacagacaga

SEQ ID NO: 164206 - DNA, 20 bp, Artificial Sequence
  Synthetic oligonucleotide; AAG chr2 60507136 60507155 60507152 +
atcccaacagacagagggcc

SEQ ID NO: 164207 - DNA, 20 bp, Artificial Sequence
  Synthetic oligonucleotide; AGG chr2 60507137 60507156 60507153 +
tcccaacagacagagggcca

SEQ ID NO: 164208 - DNA, 20 bp, Artificial Sequence
  Synthetic oligonucleotide; TAG chr2 60507154 60507173 60507170 +
ccaaggattaaatgctcttc

SEQ ID NO: 164209 - DNA, 20 bp, Artificial Sequence
  Synthetic oligonucleotide; CAG chr2 60507162 60507181 60507178 +
taaatgctcttctagctctg

SEQ ID NO: 164210 - DNA, 20 bp, Artificial Sequence
  Synthetic oligonucleotide; AAG chr2 60507171 60507190 60507187 +
ttctagctctgcagaatgca

SEQ ID NO: 164211 - DNA, 20 bp, Artificial Sequence
  Synthetic oligonucleotide; AAG chr2 60507175 60507194 60507191 +
agctctgcagaatgcaaagc

SEQ ID NO: 164212 - DNA, 20 bp, Artificial Sequence
  Synthetic oligonucleotide; AAG chr2 60507180 60507199 60507196 +
tgcagaatgcaaagcaagac

SEQ ID NO: 164213 - DNA, 20 bp, Artificial Sequence
  Synthetic oligonucleotide; AGG chr2 60507181 60507200 60507197 +
gcagaatgcaaagcaagaca

SEQ ID NO: 164214 - DNA, 20 bp, Artificial Sequence
  Synthetic oligonucleotide; AAG chr2 60507184 60507203 60507200 +
gaatgcaaagcaagacaagg

SEQ ID NO: 164215 - DNA, 20 bp, Artificial Sequence
  Synthetic oligonucleotide; AAG chr2 60507188 60507207 60507204 +
gcaaagcaagacaaggaaga

SEQ ID NO: 164216 - DNA, 20 bp, Artificial Sequence
  Synthetic oligonucleotide; AGG chr2 60507189 60507208 60507205 +
caaagcaagacaaggaagaa

SEQ ID NO: 164217 - DNA, 20 bp, Artificial Sequence
  Synthetic oligonucleotide; AAG chr2 60507192 60507211 60507208 +
agcaagacaaggaagaaagg

SEQ ID NO: 164218 - DNA, 20 bp, Artificial Sequence
  Synthetic oligonucleotide; AGG chr2 60507193 60507212 60507209 +
gcaagacaaggaagaaagga

SEQ ID NO: 164219 - DNA, 20 bp, Artificial Sequence
  Synthetic oligonucleotide; AAG chr2 60507196 60507215 60507212 +
agacaaggaagaaaggaagg

SEQ ID NO: 164220 - DNA, 20 bp, Artificial Sequence
  Synthetic oligonucleotide; AGG chr2 60507197 60507216 60507213 +
gacaaggaagaaaggaagga

SEQ ID NO: 164221 - DNA, 20 bp, Artificial Sequence
  Synthetic oligonucleotide; AAG chr2 60507200 60507219 60507216 +
aaggaagaaaggaaggaagg

SEQ ID NO: 164222 - DNA, 20 bp, Artificial Sequence
  Synthetic oligonucleotide; AGG chr2 60507201 60507220 60507217 +
aggaagaaaggaaggaagga

SEQ ID NO: 164223 - DNA, 20 bp, Artificial Sequence
  Synthetic oligonucleotide; AAG chr2 60507204 60507223 60507220 +
aagaaaggaaggaaggaagg

SEQ ID NO: 164224 - DNA, 20 bp, Artificial Sequence
  Synthetic oligonucleotide; AGG chr2 60507205 60507224 60507221 +
agaaaggaaggaaggaagga

SEQ ID NO: 164225 - DNA, 20 bp, Artificial Sequence
  Synthetic oligonucleotide; AAG chr2 60507208 60507227 60507224 +
aaggaaggaaggaaggaagg

SEQ ID NO: 164226 - DNA, 20 bp, Artificial Sequence
  Synthetic oligonucleotide; AGG chr2 60507209 60507228 60507225 +
aggaaggaaggaaggaagga

SEQ ID NO: 164227 - DNA, 20 bp, Artificial Sequence
  Synthetic oligonucleotide; AAG chr2 60507212 60507231 60507228 +
aaggaaggaaggaaggaagg

SEQ ID NO: 164228 - DNA, 20 bp, Artificial Sequence
  Synthetic oligonucleotide; AGG chr2 60507213 60507232 60507229 +
aggaaggaaggaaggaagga

SEQ ID NO: 164229 - DNA, 20 bp, Artificial Sequence
  Synthetic oligonucleotide; GGG chr2 60507214 60507233 60507230 +
ggaaggaaggaaggaaggaa

SEQ ID NO: 164230 - DNA, 20 bp, Artificial Sequence
  Synthetic oligonucleotide; GAG chr2 60507216 60507235 60507232 +
aaggaaggaaggaaggaagg

SEQ ID NO: 164231 - DNA, 20 bp, Artificial Sequence
  Synthetic oligonucleotide; AGG chr2 60507217 60507236 60507233 +
aggaaggaaggaaggaaggg

SEQ ID NO: 164232 - DNA, 20 bp, Artificial Sequence
  Synthetic oligonucleotide; GGG chr2 60507218 60507237 60507234 +
ggaaggaaggaaggaaggga

SEQ ID NO: 164233 - DNA, 20 bp, Artificial Sequence
  Synthetic oligonucleotide; GAG chr2 60507220 60507239 60507236 +
aaggaaggaaggaagggagg

SEQ ID NO: 164234 - DNA, 20 bp, Artificial Sequence
  Synthetic oligonucleotide; AGG chr2 60507221 60507240 60507237 +
aggaaggaaggaagggaggg

SEQ ID NO: 164235 - DNA, 20 bp, Artificial Sequence
  Synthetic oligonucleotide; GGG chr2 60507222 60507241 60507238 +
ggaaggaaggaagggaggga

SEQ ID NO: 164236 - DNA, 20 bp, Artificial Sequence
  Synthetic oligonucleotide; GAG chr2 60507224 60507243 60507240 +
aaggaaggaagggagggagg

SEQ ID NO: 164237 - DNA, 20 bp, Artificial Sequence
  Synthetic oligonucleotide; AGG chr2 60507225 60507244 60507241 +
aggaaggaagggagggaggg

SEQ ID NO: 164238 - DNA, 20 bp, Artificial Sequence
  Synthetic oligonucleotide; GGG chr2 60507226 60507245 60507242 +
ggaaggaagggagggaggga

SEQ ID NO: 164239 - DNA, 20 bp, Artificial Sequence
  Synthetic oligonucleotide; GGG chr2 60507227 60507246 60507243 +
gaaggaagggagggagggag

SEQ ID NO: 164240 - DNA, 20 bp, Artificial Sequence
  Synthetic oligonucleotide; GAG chr2 60507229 60507248 60507245 +
aggaagggagggagggaggg

SEQ ID NO: 164241 - DNA, 20 bp, Artificial Sequence
  Synthetic oligonucleotide; AGG chr2 60507230 60507249 60507246 +
ggaagggagggagggagggg

SEQ ID NO: 164242 - DNA, 20 bp, Artificial Sequence
  Synthetic oligonucleotide; GGG chr2 60507231 60507250 60507247 +
gaagggagggagggagggga

SEQ ID NO: 164243 - DNA, 20 bp, Artificial Sequence
  Synthetic oligonucleotide; GGG chr2 60507232 60507251 60507248 +
aagggagggagggaggggag

SEQ ID NO: 164244 - DNA, 20 bp, Artificial Sequence
  Synthetic oligonucleotide; GAG chr2 60507234 60507253 60507250 +
gggagggagggaggggaggg

SEQ ID NO: 164245 - DNA, 20 bp, Artificial Sequence
  Synthetic oligonucleotide; AGG chr2 60507235 60507254 60507251 +
ggagggagggaggggagggg

SEQ ID NO: 164246 - DNA, 20 bp, Artificial Sequence
  Synthetic oligonucleotide; GGG chr2 60507236 60507255 60507252 +
gagggagggaggggagggga

SEQ ID NO: 164247 - DNA, 20 bp, Artificial Sequence
  Synthetic oligonucleotide; GGG chr2 60507237 60507256 60507253 +
agggagggaggggaggggag

SEQ ID NO: 164248 - DNA, 20 bp, Artificial Sequence
  Synthetic oligonucleotide; GAG chr2 60507239 60507258 60507255 +
ggagggaggggaggggaggg

SEQ ID NO: 164249 - DNA, 20 bp, Artificial Sequence
  Synthetic oligonucleotide; AGG chr2 60507240 60507259 60507256 +
gagggaggggaggggagggg

SEQ ID NO: 164250 - DNA, 20 bp, Artificial Sequence
  Synthetic oligonucleotide; GGG chr2 60507241 60507260 60507257 +
agggaggggaggggagggga

SEQ ID NO: 164251 - DNA, 20 bp, Artificial Sequence
  Synthetic oligonucleotide; GGG chr2 60507242 60507261 60507258 +
gggaggggaggggaggggag

SEQ ID NO: 164252 - DNA, 20 bp, Artificial Sequence
  Synthetic oligonucleotide; GAG chr2 60507244 60507263 60507260 +
gaggggaggggaggggaggg

SEQ ID NO: 164253 - DNA, 20 bp, Artificial Sequence
  Synthetic oligonucleotide; AGG chr2 60507245 60507264 60507261 +
aggggaggggaggggagggg

SEQ ID NO: 164254 - DNA, 20 bp, Artificial Sequence
  Synthetic oligonucleotide; GGG chr2 60507246 60507265 60507262 +
ggggaggggaggggagggga

SEQ ID NO: 164255 - DNA, 20 bp, Artificial Sequence
  Synthetic oligonucleotide; GGG chr2 60507247 60507266 60507263 +
gggaggggaggggaggggag

SEQ ID NO: 164256 - DNA, 20 bp, Artificial Sequence
  Synthetic oligonucleotide; GAG chr2 60507249 60507268 60507265 +
gaggggaggggaggggaggg

SEQ ID NO: 164257 - DNA, 20 bp, Artificial Sequence
  Synthetic oligonucleotide; AGG chr2 60507250 60507269 60507266 +
aggggaggggaggggagggg

SEQ ID NO: 164258 - DNA, 20 bp, Artificial Sequence
  Synthetic oligonucleotide; GGG chr2 60507251 60507270 60507267 +
ggggaggggaggggagggga

SEQ ID NO: 164259 - DNA, 20 bp, Artificial Sequence
  Synthetic oligonucleotide; GGG chr2 60507252 60507271 60507268 +
gggaggggaggggaggggag

SEQ ID NO: 164260 - DNA, 20 bp, Artificial Sequence
  Synthetic oligonucleotide; GAG chr2 60507254 60507273 60507270 +
gaggggaggggaggggaggg

SEQ ID NO: 164261 - DNA, 20 bp, Artificial Sequence
  Synthetic oligonucleotide; AGG chr2 60507255 60507274 60507271 +
aggggaggggaggggagggg

SEQ ID NO: 164262 - DNA, 20 bp, Artificial Sequence
  Synthetic oligonucleotide; GGG chr2 60507256 60507275 60507272 +
ggggaggggaggggagggga

SEQ ID NO: 164263 - DNA, 20 bp, Artificial Sequence
  Synthetic oligonucleotide; GGG chr2 60507257 60507276 60507273 +
gggaggggaggggaggggag

SEQ ID NO: 164264 - DNA, 20 bp, Artificial Sequence
  Synthetic oligonucleotide; GAG chr2 60507259 60507278 60507275 +
gaggggaggggaggggaggg

SEQ ID NO: 164265 - DNA, 20 bp, Artificial Sequence
  Synthetic oligonucleotide; AGG chr2 60507260 60507279 60507276 +
aggggaggggaggggagggg

SEQ ID NO: 164266 - DNA, 20 bp, Artificial Sequence
  Synthetic oligonucleotide; GGG chr2 60507261 60507280 60507277 +
ggggaggggaggggagggga

SEQ ID NO: 164267 - DNA, 20 bp, Artificial Sequence
  Synthetic oligonucleotide; GGG chr2 60507262 60507281 60507278 +
gggaggggaggggaggggag

SEQ ID NO: 164268 - DNA, 20 bp, Artificial Sequence
  Synthetic oligonucleotide; GAG chr2 60507264 60507283 60507280 +
gaggggaggggaggggaggg

SEQ ID NO: 164269 - DNA, 20 bp, Artificial Sequence
  Synthetic oligonucleotide; AGG chr2 60507265 60507284 60507281 +
aggggaggggaggggagggg

SEQ ID NO: 164270 - DNA, 20 bp, Artificial Sequence
  Synthetic oligonucleotide; GGG chr2 60507266 60507285 60507282 +
ggggaggggaggggagggga

SEQ ID NO: 164271 - DNA, 20 bp, Artificial Sequence
  Synthetic oligonucleotide; GGG chr2 60507267 60507286 60507283 +
gggaggggaggggaggggag

SEQ ID NO: 164272 - DNA, 20 bp, Artificial Sequence
  Synthetic oligonucleotide; GAG chr2 60507269 60507288 60507285 +
gaggggaggggaggggaggg

SEQ ID NO: 164273 - DNA, 20 bp, Artificial Sequence
  Synthetic oligonucleotide; AGG chr2 60507270 60507289 60507286 +
aggggaggggaggggagggg

SEQ ID NO: 164274 - DNA, 20 bp, Artificial Sequence
  Synthetic oligonucleotide; GGG chr2 60507271 60507290 60507287 +
ggggaggggaggggagggga

SEQ ID NO: 164275 - DNA, 20 bp, Artificial Sequence
  Synthetic oligonucleotide; GGG chr2 60507272 60507291 60507288 +
gggaggggaggggaggggag

SEQ ID NO: 164276 - DNA, 20 bp, Artificial Sequence
  Synthetic oligonucleotide; GAG chr2 60507274 60507293 60507290 +
gaggggaggggaggggaggg

SEQ ID NO: 164277 - DNA, 20 bp, Artificial Sequence
  Synthetic oligonucleotide; AGG chr2 60507275 60507294 60507291 +
aggggaggggaggggagggg

SEQ ID NO: 164278 - DNA, 20 bp, Artificial Sequence
  Synthetic oligonucleotide; GGG chr2 60507276 60507295 60507292 +
ggggaggggaggggagggga

SEQ ID NO: 164279 - DNA, 20 bp, Artificial Sequence
  Synthetic oligonucleotide; GGG chr2 60507277 60507296 60507293 +
gggaggggaggggaggggag

SEQ ID NO: 164280 - DNA, 20 bp, Artificial Sequence
  Synthetic oligonucleotide; GAG chr2 60507279 60507298 60507295 +
gaggggaggggaggggaggg

SEQ ID NO: 164281 - DNA, 20 bp, Artificial Sequence
  Synthetic oligonucleotide; AGG chr2 60507280 60507299 60507296 +
aggggaggggaggggagggg

SEQ ID NO: 164282 - DNA, 20 bp, Artificial Sequence
  Synthetic oligonucleotide; GGG chr2 60507281 60507300 60507297 +
ggggaggggaggggagggga

SEQ ID NO: 164283 - DNA, 20 bp, Artificial Sequence
  Synthetic oligonucleotide; GGG chr2 60507282 60507301 60507298 +
gggaggggaggggaggggag

SEQ ID NO: 164284 - DNA, 20 bp, Artificial Sequence
  Synthetic oligonucleotide; GAG chr2 60507284 60507303 60507300 +
gaggggaggggaggggaggg

SEQ ID NO: 164285 - DNA, 20 bp, Artificial Sequence
  Synthetic oligonucleotide; AGG chr2 60507285 60507304 60507301 +
aggggaggggaggggagggg

SEQ ID NO: 164286 - DNA, 20 bp, Artificial Sequence
  Synthetic oligonucleotide; GGG chr2 60507286 60507305 60507302 +
ggggaggggaggggagggga

SEQ ID NO: 164287 - DNA, 20 bp, Artificial Sequence
  Synthetic oligonucleotide; GGG chr2 60507287 60507306 60507303 +
gggaggggaggggaggggag

SEQ ID NO: 164288 - DNA, 20 bp, Artificial Sequence
  Synthetic oligonucleotide; GAG chr2 60507289 60507308 60507305 +
gaggggaggggaggggaggg

SEQ ID NO: 164289 - DNA, 20 bp, Artificial Sequence
  Synthetic oligonucleotide; AGG chr2 60507290 60507309 60507306 +
aggggaggggaggggagggg

SEQ ID NO: 164290 - DNA, 20 bp, Artificial Sequence
  Synthetic oligonucleotide; GGG chr2 60507291 60507310 60507307 +
ggggaggggaggggagggga

SEQ ID NO: 164291 - DNA, 20 bp, Artificial Sequence
  Synthetic oligonucleotide; GGG chr2 60507292 60507311 60507308 +
gggaggggaggggaggggag

SEQ ID NO: 164292 - DNA, 20 bp, Artificial Sequence
  Synthetic oligonucleotide; GAG chr2 60507294 60507313 60507310 +
gaggggaggggaggggaggg

SEQ ID NO: 164293 - DNA, 20 bp, Artificial Sequence
  Synthetic oligonucleotide; AGG chr2 60507295 60507314 60507311 +
aggggaggggaggggagggg

SEQ ID NO: 164294 - DNA, 20 bp, Artificial Sequence
  Synthetic oligonucleotide; GGG chr2 60507296 60507315 60507312 +
ggggaggggaggggagggga

SEQ ID NO: 164295 - DNA, 20 bp, Artificial Sequence
  Synthetic oligonucleotide; GGG chr2 60507297 60507316 60507313 +
gggaggggaggggaggggag

SEQ ID NO: 164296 - DNA, 20 bp, Artificial Sequence
  Synthetic oligonucleotide; AAG chr2 60507300 60507319 60507316 +
aggggaggggaggggagggg

SEQ ID NO: 164297 - DNA, 20 bp, Artificial Sequence
  Synthetic oligonucleotide; AGG chr2 60507301 60507320 60507317 +
ggggaggggaggggagggga

SEQ ID NO: 164298 - DNA, 20 bp, Artificial Sequence
  Synthetic oligonucleotide; GGG chr2 60507302 60507321 60507318 +
gggaggggaggggaggggaa

SEQ ID NO: 164299 - DNA, 20 bp, Artificial Sequence
  Synthetic oligonucleotide; AAG chr2 60507305 60507324 60507321 +
aggggaggggaggggaaggg

SEQ ID NO: 164300 - DNA, 20 bp, Artificial Sequence
  Synthetic oligonucleotide; AGG chr2 60507306 60507325 60507322 +
ggggaggggaggggaaggga

SEQ ID NO: 164301 - DNA, 20 bp, Artificial Sequence
  Synthetic oligonucleotide; GGG chr2 60507307 60507326 60507323 +
gggaggggaggggaagggaa

SEQ ID NO: 164302 - DNA, 20 bp, Artificial Sequence
  Synthetic oligonucleotide; AAG chr2 60507310 60507329 60507326 +
aggggaggggaagggaaggg

SEQ ID NO: 164303 - DNA, 20 bp, Artificial Sequence
  Synthetic oligonucleotide; AGG chr2 60507311 60507330 60507327 +
ggggaggggaagggaaggga

SEQ ID NO: 164304 - DNA, 20 bp, Artificial Sequence
  Synthetic oligonucleotide; GGG chr2 60507312 60507331 60507328 +
gggaggggaagggaagggaa

SEQ ID NO: 164305 - DNA, 20 bp, Artificial Sequence
  Synthetic oligonucleotide; AAG chr2 60507315 60507334 60507331 +
aggggaagggaagggaaggg

SEQ ID NO: 164306 - DNA, 20 bp, Artificial Sequence
  Synthetic oligonucleotide; AGG chr2 60507316 60507335 60507332 +
ggggaagggaagggaaggga

SEQ ID NO: 164307 - DNA, 20 bp, Artificial Sequence
  Synthetic oligonucleotide; GGG chr2 60507317 60507336 60507333 +
gggaagggaagggaagggaa

SEQ ID NO: 164308 - DNA, 20 bp, Artificial Sequence
  Synthetic oligonucleotide; AAG chr2 60507320 60507339 60507336 +
aagggaagggaagggaaggg

SEQ ID NO: 164309 - DNA, 20 bp, Artificial Sequence
  Synthetic oligonucleotide; AGG chr2 60507321 60507340 60507337 +
agggaagggaagggaaggga

SEQ ID NO: 164310 - DNA, 20 bp, Artificial Sequence
  Synthetic oligonucleotide; GGG chr2 60507322 60507341 60507338 +
gggaagggaagggaagggaa

SEQ ID NO: 164311 - DNA, 20 bp, Artificial Sequence
  Synthetic oligonucleotide; AAG chr2 60507325 60507344 60507341 +
aagggaagggaagggaaggg

SEQ ID NO: 164312 - DNA, 20 bp, Artificial Sequence
  Synthetic oligonucleotide; AGG chr2 60507326 60507345 60507342 +
agggaagggaagggaaggga

SEQ ID NO: 164313 - DNA, 20 bp, Artificial Sequence
  Synthetic oligonucleotide; GGG chr2 60507327 60507346 60507343 +
gggaagggaagggaagggaa

SEQ ID NO: 164314 - DNA, 20 bp, Artificial Sequence
  Synthetic oligonucleotide; AAG chr2 60507330 60507349 60507346 +
aagggaagggaagggaaggg

SEQ ID NO: 164315 - DNA, 20 bp, Artificial Sequence
  Synthetic oligonucleotide; AGG chr2 60507331 60507350 60507347 +
agggaagggaagggaaggga

SEQ ID NO: 164316 - DNA, 20 bp, Artificial Sequence
  Synthetic oligonucleotide; GGG chr2 60507332 60507351 60507348 +
gggaagggaagggaagggaa

SEQ ID NO: 164317 - DNA, 20 bp, Artificial Sequence
  Synthetic oligonucleotide; AAG chr2 60507335 60507354 60507351 +
aagggaagggaagggaaggg

SEQ ID NO: 164318 - DNA, 20 bp, Artificial Sequence
  Synthetic oligonucleotide; AGG chr2 60507336 60507355 60507352 +
agggaagggaagggaaggga

SEQ ID NO: 164319 - DNA, 20 bp, Artificial Sequence
  Synthetic oligonucleotide; GGG chr2 60507337 60507356 60507353 +
gggaagggaagggaagggaa

SEQ ID NO: 164320 - DNA, 20 bp, Artificial Sequence
  Synthetic oligonucleotide; AAG chr2 60507340 60507359 60507356 +
aagggaagggaagggaaggg

SEQ ID NO: 164321 - DNA, 20 bp, Artificial Sequence
  Synthetic oligonucleotide; AGG chr2 60507341 60507360 60507357 +
agggaagggaagggaaggga

SEQ ID NO: 164322 - DNA, 20 bp, Artificial Sequence
  Synthetic oligonucleotide; GGG chr2 60507342 60507361 60507358 +
gggaagggaagggaagggaa

SEQ ID NO: 164323 - DNA, 20 bp, Artificial Sequence
  Synthetic oligonucleotide; AAG chr2 60507345 60507364 60507361 +
aagggaagggaagggaaggg

SEQ ID NO: 164324 - DNA, 20 bp, Artificial Sequence
  Synthetic oligonucleotide; AGG chr2 60507346 60507365 60507362 +
agggaagggaagggaaggga

SEQ ID NO: 164325 - DNA, 20 bp, Artificial Sequence
  Synthetic oligonucleotide; GGG chr2 60507347 60507366 60507363 +
gggaagggaagggaagggaa

SEQ ID NO: 164326 - DNA, 20 bp, Artificial Sequence
  Synthetic oligonucleotide; AAG chr2 60507350 60507369 60507366 +
aagggaagggaagggaaggg

SEQ ID NO: 164327 - DNA, 20 bp, Artificial Sequence
  Synthetic oligonucleotide; AGG chr2 60507351 60507370 60507367 +
agggaagggaagggaaggga

SEQ ID NO: 164328 - DNA, 20 bp, Artificial Sequence
  Synthetic oligonucleotide; GGG chr2 60507352 60507371 60507368 +
gggaagggaagggaagggaa

SEQ ID NO: 164329 - DNA, 20 bp, Artificial Sequence
  Synthetic oligonucleotide; AAG chr2 60507355 60507374 60507371 +
aagggaagggaagggaaggg

SEQ ID NO: 164330 - DNA, 20 bp, Artificial Sequence
  Synthetic oligonucleotide; AGG chr2 60507356 60507375 60507372 +
agggaagggaagggaaggga

SEQ ID NO: 164331 - DNA, 20 bp, Artificial Sequence
  Synthetic oligonucleotide; GGG chr2 60507357 60507376 60507373 +
gggaagggaagggaagggaa

SEQ ID NO: 164332 - DNA, 20 bp, Artificial Sequence
  Synthetic oligonucleotide; GAG chr2 60507359 60507378 60507375 +
gaagggaagggaagggaagg

SEQ ID NO: 164333 - DNA, 20 bp, Artificial Sequence
  Synthetic oligonucleotide; AGG chr2 60507360 60507379 60507376 +
aagggaagggaagggaaggg

SEQ ID NO: 164334 - DNA, 20 bp, Artificial Sequence
  Synthetic oligonucleotide; GGG chr2 60507361 60507380 60507377 +
agggaagggaagggaaggga

SEQ ID NO: 164335 - DNA, 20 bp, Artificial Sequence
  Synthetic oligonucleotide; GAG chr2 60507363 60507382 60507379 +
ggaagggaagggaagggagg

SEQ ID NO: 164336 - DNA, 20 bp, Artificial Sequence
  Synthetic oligonucleotide; AGG chr2 60507364 60507383 60507380 +
gaagggaagggaagggaggg

SEQ ID NO: 164337 - DNA, 20 bp, Artificial Sequence
  Synthetic oligonucleotide; GGG chr2 60507365 60507384 60507381 +
aagggaagggaagggaggga

SEQ ID NO: 164338 - DNA, 20 bp, Artificial Sequence
  Synthetic oligonucleotide; AAG chr2 60507368 60507387 60507384 +
ggaagggaagggagggaggg

SEQ ID NO: 164339 - DNA, 20 bp, Artificial Sequence
  Synthetic oligonucleotide; AGG chr2 60507369 60507388 60507385 +
gaagggaagggagggaggga

SEQ ID NO: 164340 - DNA, 20 bp, Artificial Sequence
  Synthetic oligonucleotide; GAG chr2 60507371 60507390 60507387 +
agggaagggagggagggaag

SEQ ID NO: 164341 - DNA, 20 bp, Artificial Sequence
  Synthetic oligonucleotide; AGG chr2 60507372 60507391 60507388 +
gggaagggagggagggaagg

SEQ ID NO: 164342 - DNA, 20 bp, Artificial Sequence
  Synthetic oligonucleotide; GGG chr2 60507373 60507392 60507389 +
ggaagggagggagggaagga

SEQ ID NO: 164343 - DNA, 20 bp, Artificial Sequence
  Synthetic oligonucleotide; AAG chr2 60507393 60507412 60507409 +
gggcccttgcctttcttgaa

SEQ ID NO: 164344 - DNA, 20 bp, Artificial Sequence
  Synthetic oligonucleotide; TAG chr2 60507397 60507416 60507413 +
ccttgcctttcttgaaaagc

SEQ ID NO: 164345 - DNA, 20 bp, Artificial Sequence
  Synthetic oligonucleotide; AAG chr2 60507422 60507441 60507438 +
aactgtgtccaaaacctaca

SEQ ID NO: 164346 - DNA, 20 bp, Artificial Sequence
  Synthetic oligonucleotide; AAG chr2 60507448 60507467 60507464 +
attgtgctcttgttgacttg

SEQ ID NO: 164347 - DNA, 20 bp, Artificial Sequence
  Synthetic oligonucleotide; AAG chr2 60507463 60507482 60507479 +
acttgaagctgcttccgttc

SEQ ID NO: 164348 - DNA, 20 bp, Artificial Sequence
  Synthetic oligonucleotide; CAG chr2 60507467 60507486 60507483 +
gaagctgcttccgttcaagc

SEQ ID NO: 164349 - DNA, 20 bp, Artificial Sequence
  Synthetic oligonucleotide; AAG chr2 60507472 60507491 60507488 +
tgcttccgttcaagccagaa

SEQ ID NO: 164350 - DNA, 20 bp, Artificial Sequence
  Synthetic oligonucleotide; AAG chr2 60507488 60507507 60507504 +
agaaaagttaaaaccttgtg

SEQ ID NO: 164351 - DNA, 20 bp, Artificial Sequence
  Synthetic oligonucleotide; CAG chr2 60507505 60507524 60507521 +
gtgaagtgcttttacatttt

SEQ ID NO: 164352 - DNA, 20 bp, Artificial Sequence
  Synthetic oligonucleotide; TGG chr2 60507514 60507533 60507530 +
ttttacattttcagatgttt

SEQ ID NO: 164353 - DNA, 20 bp, Artificial Sequence
  Synthetic oligonucleotide; GAG chr2 60507516 60507535 60507532 +
ttacattttcagatgttttg

SEQ ID NO: 164354 - DNA, 20 bp, Artificial Sequence
  Synthetic oligonucleotide; AAG chr2 60507525 60507544 60507541 +
cagatgttttggagtctctc

SEQ ID NO: 164355 - DNA, 20 bp, Artificial Sequence
  Synthetic oligonucleotide; GAG chr2 60507532 60507551 60507548 +
tttggagtctctcaagaaat

SEQ ID NO: 164356 - DNA, 20 bp, Artificial Sequence
  Synthetic oligonucleotide; AGG chr2 60507533 60507552 60507549 +
ttggagtctctcaagaaatg

SEQ ID NO: 164357 - DNA, 20 bp, Artificial Sequence
  Synthetic oligonucleotide; CAG chr2 60507537 60507556 60507553 +
agtctctcaagaaatgagga

SEQ ID NO: 164358 - DNA, 20 bp, Artificial Sequence
  Synthetic oligonucleotide; AGG chr2 60507538 60507557 60507554 +
gtctctcaagaaatgaggac

SEQ ID NO: 164359 - DNA, 20 bp, Artificial Sequence
  Synthetic oligonucleotide; AAG chr2 60507542 60507561 60507558 +
ctcaagaaatgaggacaggc

SEQ ID NO: 164360 - DNA, 20 bp, Artificial Sequence
  Synthetic oligonucleotide; AGG chr2 60507543 60507562 60507559 +
tcaagaaatgaggacaggca

SEQ ID NO: 164361 - DNA, 20 bp, Artificial Sequence
  Synthetic oligonucleotide; GGG chr2 60507544 60507563 60507560 +
caagaaatgaggacaggcaa

SEQ ID NO: 164362 - DNA, 20 bp, Artificial Sequence
  Synthetic oligonucleotide; GGG chr2 60507545 60507564 60507561 +
aagaaatgaggacaggcaag

SEQ ID NO: 164363 - DNA, 20 bp, Artificial Sequence
  Synthetic oligonucleotide; AAG chr2 60507548 60507567 60507564 +
aaatgaggacaggcaagggg

SEQ ID NO: 164364 - DNA, 20 bp, Artificial Sequence
  Synthetic oligonucleotide; CAG chr2 60507566 60507585 60507582 +
ggaagaactgtttccacatg

SEQ ID NO: 164365 - DNA, 20 bp, Artificial Sequence
  Synthetic oligonucleotide; CAG chr2 60507578 60507597 60507594 +
tccacatgcagctgtttcaa

SEQ ID NO: 164366 - DNA, 20 bp, Artificial Sequence
  Synthetic oligonucleotide; CAG chr2 60507593 60507612 60507609 +
ttcaacagctcactgcataa

SEQ ID NO: 164367 - DNA, 20 bp, Artificial Sequence
  Synthetic oligonucleotide; GAG chr2 60507595 60507614 60507611 +
caacagctcactgcataaca

SEQ ID NO: 164368 - DNA, 20 bp, Artificial Sequence
  Synthetic oligonucleotide; CAG chr2 60507607 60507626 60507623 +
gcataacagagtctcttaca

SEQ ID NO: 164369 - DNA, 20 bp, Artificial Sequence
  Synthetic oligonucleotide; AGG chr2 60507608 60507627 60507624 +
cataacagagtctcttacac

SEQ ID NO: 164370 - DNA, 20 bp, Artificial Sequence
  Synthetic oligonucleotide; GGG chr2 60507609 60507628 60507625 +
ataacagagtctcttacaca

SEQ ID NO: 164371 - DNA, 20 bp, Artificial Sequence
  Synthetic oligonucleotide; GAG chr2 60507626 60507645 60507642 +
acagggctgcctccgcacct

SEQ ID NO: 164372 - DNA, 20 bp, Artificial Sequence
  Synthetic oligonucleotide; GAG chr2 60507631 60507650 60507647 +
gctgcctccgcacctgagct

SEQ ID NO: 164373 - DNA, 20 bp, Artificial Sequence
  Synthetic oligonucleotide; AAG chr2 60507645 60507664 60507661 +
tgagctgagcttgctgtcct

SEQ ID NO: 164374 - DNA, 20 bp, Artificial Sequence
  Synthetic oligonucleotide; CGG chr2 60507649 60507668 60507665 +
ctgagcttgctgtcctaagt

SEQ ID NO: 164375 - DNA, 20 bp, Artificial Sequence
  Synthetic oligonucleotide; AAG chr2 60507663 60507682 60507679 +
ctaagtcggctactgcttct

SEQ ID NO: 164376 - DNA, 20 bp, Artificial Sequence
  Synthetic oligonucleotide; CAG chr2 60507670 60507689 60507686 +
ggctactgcttctaagtccc

SEQ ID NO: 164377 - DNA, 20 bp, Artificial Sequence
  Synthetic oligonucleotide; AAG chr2 60507680 60507699 60507696 +
tctaagtccccagcttttct

SEQ ID NO: 164378 - DNA, 20 bp, Artificial Sequence
  Synthetic oligonucleotide; TGG chr2 60507688 60507707 60507704 +
cccagcttttctaagacata

SEQ ID NO: 164379 - DNA, 20 bp, Artificial Sequence
  Synthetic oligonucleotide; CAG chr2 60507691 60507710 60507707 +
agcttttctaagacatatgg

SEQ ID NO: 164380 - DNA, 20 bp, Artificial Sequence
  Synthetic oligonucleotide; TGG chr2 60507699 60507718 60507715 +
taagacatatggcagaaatg

SEQ ID NO: 164381 - DNA, 20 bp, Artificial Sequence
  Synthetic oligonucleotide; CAG chr2 60507717 60507736 60507733 +
tgtggaaattgtcttccaaa

SEQ ID NO: 164382 - DNA, 20 bp, Artificial Sequence
  Synthetic oligonucleotide; AAG chr2 60507723 60507742 60507739 +
aattgtcttccaaacagcac

SEQ ID NO: 164383 - DNA, 20 bp, Artificial Sequence
  Synthetic oligonucleotide; CAG chr2 60507727 60507746 60507743 +
gtcttccaaacagcacaaga

SEQ ID NO: 164384 - DNA, 20 bp, Artificial Sequence
  Synthetic oligonucleotide; AAG chr2 60507731 60507750 60507747 +
tccaaacagcacaagacaga

SEQ ID NO: 164385 - DNA, 20 bp, Artificial Sequence
  Synthetic oligonucleotide; CGG chr2 60507734 60507753 60507750 +
aaacagcacaagacagaaag

SEQ ID NO: 164386 - DNA, 20 bp, Artificial Sequence
  Synthetic oligonucleotide; GGG chr2 60507735 60507754 60507751 +
aacagcacaagacagaaagc

SEQ ID NO: 164387 - DNA, 20 bp, Artificial Sequence
  Synthetic oligonucleotide; TGG chr2 60507738 60507757 60507754 +
agcacaagacagaaagcggg

SEQ ID NO: 164388 - DNA, 20 bp, Artificial Sequence
  Synthetic oligonucleotide; GGG chr2 60507739 60507758 60507755 +
gcacaagacagaaagcgggt

SEQ ID NO: 164389 - DNA, 20 bp, Artificial Sequence
  Synthetic oligonucleotide; GGG chr2 60507740 60507759 60507756 +
cacaagacagaaagcgggtg

SEQ ID NO: 164390 - DNA, 20 bp, Artificial Sequence
  Synthetic oligonucleotide; TGG chr2 60507743 60507762 60507759 +
aagacagaaagcgggtgggg

SEQ ID NO: 164391 - DNA, 20 bp, Artificial Sequence
  Synthetic oligonucleotide; GGG chr2 60507744 60507763 60507760 +
agacagaaagcgggtggggt

SEQ ID NO: 164392 - DNA, 20 bp, Artificial Sequence
  Synthetic oligonucleotide; GGG chr2 60507745 60507764 60507761 +
gacagaaagcgggtggggtg

SEQ ID NO: 164393 - DNA, 20 bp, Artificial Sequence
  Synthetic oligonucleotide; GGG chr2 60507746 60507765 60507762 +
acagaaagcgggtggggtgg

SEQ ID NO: 164394 - DNA, 20 bp, Artificial Sequence
  Synthetic oligonucleotide; GGG chr2 60507747 60507766 60507763 +
cagaaagcgggtggggtggg

SEQ ID NO: 164395 - DNA, 20 bp, Artificial Sequence
  Synthetic oligonucleotide; CGG chr2 60507753 60507772 60507769 +
gcgggtggggtggggggcga

SEQ ID NO: 164396 - DNA, 20 bp, Artificial Sequence
  Synthetic oligonucleotide; GGG chr2 60507754 60507773 60507770 +
cgggtggggtggggggcgac

SEQ ID NO: 164397 - DNA, 20 bp, Artificial Sequence
  Synthetic oligonucleotide; CGG chr2 60507759 60507778 60507775 +
ggggtggggggcgacgggtg

SEQ ID NO: 164398 - DNA, 20 bp, Artificial Sequence
  Synthetic oligonucleotide; GGG chr2 60507760 60507779 60507776 +
gggtggggggcgacgggtgc

SEQ ID NO: 164399 - DNA, 20 bp, Artificial Sequence
  Synthetic oligonucleotide; GGG chr2 60507761 60507780 60507777 +
ggtggggggcgacgggtgcg

SEQ ID NO: 164400 - DNA, 20 bp, Artificial Sequence
  Synthetic oligonucleotide; GAG chr2 60507763 60507782 60507779 +
tggggggcgacgggtgcggg

SEQ ID NO: 164401 - DNA, 20 bp, Artificial Sequence
  Synthetic oligonucleotide; AAG chr2 60507766 60507785 60507782 +
ggggcgacgggtgcggggag

SEQ ID NO: 164402 - DNA, 20 bp, Artificial Sequence
  Synthetic oligonucleotide; AGG chr2 60507767 60507786 60507783 +
gggcgacgggtgcggggaga

SEQ ID NO: 164403 - DNA, 20 bp, Artificial Sequence
  Synthetic oligonucleotide; GGG chr2 60507768 60507787 60507784 +
ggcgacgggtgcggggagaa

SEQ ID NO: 164404 - DNA, 20 bp, Artificial Sequence
  Synthetic oligonucleotide; AAG chr2 60507771 60507790 60507787 +
gacgggtgcggggagaaggg

SEQ ID NO: 164405 - DNA, 20 bp, Artificial Sequence
  Synthetic oligonucleotide; AAG chr2 60507774 60507793 60507790 +
gggtgcggggagaagggaag

SEQ ID NO: 164406 - DNA, 20 bp, Artificial Sequence
  Synthetic oligonucleotide; AAG chr2 60507784 60507803 60507800 +
agaagggaagaagtaaaaac

SEQ ID NO: 164407 - DNA, 20 bp, Artificial Sequence
  Synthetic oligonucleotide; CAG chr2 60507803 60507822 60507819 +
caagctgttgaaactgtata

SEQ ID NO: 164408 - DNA, 20 bp, Artificial Sequence
  Synthetic oligonucleotide; AGG chr2 60507804 60507823 60507820 +
aagctgttgaaactgtatac

SEQ ID NO: 164409 - DNA, 20 bp, Artificial Sequence
  Synthetic oligonucleotide; CAG chr2 60507818 60507837 60507834 +
gtatacaggacacgtcttca

SEQ ID NO: 164410 - DNA, 20 bp, Artificial Sequence
  Synthetic oligonucleotide; AAG chr2 60507842 60507861 60507858 +
aatccaatgctcctgtaaca

SEQ ID NO: 164411 - DNA, 20 bp, Artificial Sequence
  Synthetic oligonucleotide; AGG chr2 60507843 60507862 60507859 +
atccaatgctcctgtaacaa

SEQ ID NO: 164412 - DNA, 20 bp, Artificial Sequence
  Synthetic oligonucleotide; CAG chr2 60507847 60507866 60507863 +
aatgctcctgtaacaaagga

SEQ ID NO: 164413 - DNA, 20 bp, Artificial Sequence
  Synthetic oligonucleotide; TGG chr2 60507857 60507876 60507873 +
taacaaaggacagcatacta

SEQ ID NO: 164414 - DNA, 20 bp, Artificial Sequence
  Synthetic oligonucleotide; GGG chr2 60507858 60507877 60507874 +
aacaaaggacagcatactat

SEQ ID NO: 164415 - DNA, 20 bp, Artificial Sequence
  Synthetic oligonucleotide; TGG chr2 60507871 60507890 60507887 +
atactatgggataattacta

SEQ ID NO: 164416 - DNA, 20 bp, Artificial Sequence
  Synthetic oligonucleotide; CAG chr2 60507884 60507903 60507900 +
attactatggattattatta

SEQ ID NO: 164417 - DNA, 20 bp, Artificial Sequence
  Synthetic oligonucleotide; AAG chr2 60507893 60507912 60507909 +
gattattattacagtttcta

SEQ ID NO: 164418 - DNA, 20 bp, Artificial Sequence
  Synthetic oligonucleotide; AAG chr2 60507899 60507918 60507915 +
tattacagtttctaaagcaa

SEQ ID NO: 164419 - DNA, 20 bp, Artificial Sequence
  Synthetic oligonucleotide; AAG chr2 60507921 60507940 60507937 +
gaacaaaaaaaaattcacaa

SEQ ID NO: 164420 - DNA, 20 bp, Artificial Sequence
  Synthetic oligonucleotide; CAG chr2 60507938 60507957 60507954 +
caaaagacatattacacacg

SEQ ID NO: 164421 - DNA, 20 bp, Artificial Sequence
  Synthetic oligonucleotide; AAG chr2 60507948 60507967 60507964 +
attacacacgcagatttcta

SEQ ID NO: 164422 - DNA, 20 bp, Artificial Sequence
  Synthetic oligonucleotide; TGG chr2 60507964 60507983 60507980 +
tctaaagctttaaaatcata

SEQ ID NO: 164423 - DNA, 20 bp, Artificial Sequence
  Synthetic oligonucleotide; CGG chr2 60507971 60507990 60507987 +
ctttaaaatcatatggtctt

SEQ ID NO: 164424 - DNA, 20 bp, Artificial Sequence
  Synthetic oligonucleotide; TGG chr2 60507977 60507996 60507993 +
aatcatatggtcttcggtgt

SEQ ID NO: 164425 - DNA, 20 bp, Artificial Sequence
  Synthetic oligonucleotide; TGG chr2 60507986 60508005 60508002 +
gtcttcggtgttggttccta

SEQ ID NO: 164426 - DNA, 20 bp, Artificial Sequence
  Synthetic oligonucleotide; GGG chr2 60507987 60508006 60508003 +
tcttcggtgttggttcctat

SEQ ID NO: 164427 - DNA, 20 bp, Artificial Sequence
  Synthetic oligonucleotide; GGG chr2 60507988 60508007 60508004 +
cttcggtgttggttcctatg

SEQ ID NO: 164428 - DNA, 20 bp, Artificial Sequence
  Synthetic oligonucleotide; CGG chr2 60507994 60508013 60508010 +
tgttggttcctatggggtta

SEQ ID NO: 164429 - DNA, 20 bp, Artificial Sequence
  Synthetic oligonucleotide; GAG chr2 60508011 60508030 60508027 +
ttacggataatgccctaact

SEQ ID NO: 164430 - DNA, 20 bp, Artificial Sequence
  Synthetic oligonucleotide; CAG chr2 60508019 60508038 60508035 +
aatgccctaactgagcacga

SEQ ID NO: 164431 - DNA, 20 bp, Artificial Sequence
  Synthetic oligonucleotide; AAG chr2 60508036 60508055 60508052 +
cgacagatgcaaacacaaaa

SEQ ID NO: 164432 - DNA, 20 bp, Artificial Sequence
  Synthetic oligonucleotide; TGG chr2 60508072 60508091 60508088 +
cctgaaattctctcatgtca

SEQ ID NO: 164433 - DNA, 20 bp, Artificial Sequence
  Synthetic oligonucleotide; AAG chr2 60508103 60508122 60508119 +
gccctttctttcacaaacaa

SEQ ID NO: 164434 - DNA, 20 bp, Artificial Sequence
  Synthetic oligonucleotide; TAG chr2 60508106 60508125 60508122 +
ctttctttcacaaacaaaag

SEQ ID NO: 164435 - DNA, 20 bp, Artificial Sequence
  Synthetic oligonucleotide; GAG chr2 60508111 60508130 60508127 +
tttcacaaacaaaagtagtt

SEQ ID NO: 164436 - DNA, 20 bp, Artificial Sequence
  Synthetic oligonucleotide; CAG chr2 60508117 60508136 60508133 +
aaacaaaagtagttgagcaa

SEQ ID NO: 164437 - DNA, 20 bp, Artificial Sequence
  Synthetic oligonucleotide; AAG chr2 60508122 60508141 60508138 +
aaagtagttgagcaacagct

SEQ ID NO: 164438 - DNA, 20 bp, Artificial Sequence
  Synthetic oligonucleotide; TAG chr2 60508125 60508144 60508141 +
gtagttgagcaacagctaag

SEQ ID NO: 164439 - DNA, 20 bp, Artificial Sequence
  Synthetic oligonucleotide; AAG chr2 60508140 60508159 60508156 +
ctaagtagttattcatctca

SEQ ID NO: 164440 - DNA, 20 bp, Artificial Sequence
  Synthetic oligonucleotide; CAG chr2 60508162 60508181 60508178 +
gaaccaacctaaaattctga

SEQ ID NO: 164441 - DNA, 20 bp, Artificial Sequence
  Synthetic oligonucleotide; AGG chr2 60508163 60508182 60508179 +
aaccaacctaaaattctgac

SEQ ID NO: 164442 - DNA, 20 bp, Artificial Sequence
  Synthetic oligonucleotide; CAG chr2 60508168 60508187 60508184 +
acctaaaattctgacaggcc

SEQ ID NO: 164443 - DNA, 20 bp, Artificial Sequence
  Synthetic oligonucleotide; TAG chr2 60508229 60508248 60508245 +
caaattacacaaataaaaac

SEQ ID NO: 164444 - DNA, 20 bp, Artificial Sequence
  Synthetic oligonucleotide; AGG chr2 60508230 60508249 60508246 +
aaattacacaaataaaaact

SEQ ID NO: 164445 - DNA, 20 bp, Artificial Sequence
  Synthetic oligonucleotide; GAG chr2 60508232 60508251 60508248 +
attacacaaataaaaactag

SEQ ID NO: 164446 - DNA, 20 bp, Artificial Sequence
  Synthetic oligonucleotide; AGG chr2 60508233 60508252 60508249 +
ttacacaaataaaaactagg

SEQ ID NO: 164447 - DNA, 20 bp, Artificial Sequence
  Synthetic oligonucleotide; AAG chr2 60508236 60508255 60508252 +
cacaaataaaaactaggagg

SEQ ID NO: 164448 - DNA, 20 bp, Artificial Sequence
  Synthetic oligonucleotide; TGG chr2 60508257 60508276 60508273 +
agctcaaactcatccacact

SEQ ID NO: 164449 - DNA, 20 bp, Artificial Sequence
  Synthetic oligonucleotide; CAG chr2 60508262 60508281 60508278 +
aaactcatccacacttggtt

SEQ ID NO: 164450 - DNA, 20 bp, Artificial Sequence
  Synthetic oligonucleotide; AGG chr2 60508263 60508282 60508279 +
aactcatccacacttggttc

SEQ ID NO: 164451 - DNA, 20 bp, Artificial Sequence
  Synthetic oligonucleotide; CAG chr2 60508269 60508288 60508285 +
tccacacttggttcaggaca

SEQ ID NO: 164452 - DNA, 20 bp, Artificial Sequence
  Synthetic oligonucleotide; AGG chr2 60508270 60508289 60508286 +
ccacacttggttcaggacac

SEQ ID NO: 164453 - DNA, 20 bp, Artificial Sequence
  Synthetic oligonucleotide; GGG chr2 60508271 60508290 60508287 +
cacacttggttcaggacaca

SEQ ID NO: 164454 - DNA, 20 bp, Artificial Sequence
  Synthetic oligonucleotide; AAG chr2 60508274 60508293 60508290 +
acttggttcaggacacaggg

SEQ ID NO: 164455 - DNA, 20 bp, Artificial Sequence
  Synthetic oligonucleotide; AGG chr2 60508275 60508294 60508291 +
cttggttcaggacacaggga

SEQ ID NO: 164456 - DNA, 20 bp, Artificial Sequence
  Synthetic oligonucleotide; AAG chr2 60508288 60508307 60508304 +
acagggaaggcctgatgtga

SEQ ID NO: 164457 - DNA, 20 bp, Artificial Sequence
  Synthetic oligonucleotide; GAG chr2 60508290 60508309 60508306 +
agggaaggcctgatgtgaaa

SEQ ID NO: 164458 - DNA, 20 bp, Artificial Sequence
  Synthetic oligonucleotide; AGG chr2 60508291 60508310 60508307 +
gggaaggcctgatgtgaaag

SEQ ID NO: 164459 - DNA, 20 bp, Artificial Sequence
  Synthetic oligonucleotide; GAG chr2 60508293 60508312 60508309 +
gaaggcctgatgtgaaagag

SEQ ID NO: 164460 - DNA, 20 bp, Artificial Sequence
  Synthetic oligonucleotide; CAG chr2 60508297 60508316 60508313 +
gcctgatgtgaaagaggaga

SEQ ID NO: 164461 - DNA, 20 bp, Artificial Sequence
  Synthetic oligonucleotide; GAG chr2 60508299 60508318 60508315 +
ctgatgtgaaagaggagaca

SEQ ID NO: 164462 - DNA, 20 bp, Artificial Sequence
  Synthetic oligonucleotide; AAG chr2 60508302 60508321 60508318 +
atgtgaaagaggagacagag

SEQ ID NO: 164463 - DNA, 20 bp, Artificial Sequence
  Synthetic oligonucleotide; TGG chr2 60508310 60508329 60508326 +
gaggagacagagaagcttcc

SEQ ID NO: 164464 - DNA, 20 bp, Artificial Sequence
  Synthetic oligonucleotide; GGG chr2 60508311 60508330 60508327 +
aggagacagagaagcttcct

SEQ ID NO: 164465 - DNA, 20 bp, Artificial Sequence
  Synthetic oligonucleotide; CAG chr2 60508318 60508337 60508334 +
agagaagcttcctgggtgtg

SEQ ID NO: 164466 - DNA, 20 bp, Artificial Sequence
  Synthetic oligonucleotide; CAG chr2 60508331 60508350 60508347 +
gggtgtgcagaattacaccc

SEQ ID NO: 164467 - DNA, 20 bp, Artificial Sequence
  Synthetic oligonucleotide; AGG chr2 60508332 60508351 60508348 +
ggtgtgcagaattacacccc

SEQ ID NO: 164468 - DNA, 20 bp, Artificial Sequence
  Synthetic oligonucleotide; CAG chr2 60508347 60508366 60508363 +
accccaggccacactccctg

SEQ ID NO: 164469 - DNA, 20 bp, Artificial Sequence
  Synthetic oligonucleotide; AGG chr2 60508348 60508367 60508364 +
ccccaggccacactccctgc

SEQ ID NO: 164470 - DNA, 20 bp, Artificial Sequence
  Synthetic oligonucleotide; GGG chr2 60508349 60508368 60508365 +
cccaggccacactccctgca

SEQ ID NO: 164471 - DNA, 20 bp, Artificial Sequence
  Synthetic oligonucleotide; GGG chr2 60508350 60508369 60508366 +
ccaggccacactccctgcag

SEQ ID NO: 164472 - DNA, 20 bp, Artificial Sequence
  Synthetic oligonucleotide; CAG chr2 60508356 60508375 60508372 +
cacactccctgcaggggcca

SEQ ID NO: 164473 - DNA, 20 bp, Artificial Sequence
  Synthetic oligonucleotide; AGG chr2 60508357 60508376 60508373 +
acactccctgcaggggccac

SEQ ID NO: 164474 - DNA, 20 bp, Artificial Sequence
  Synthetic oligonucleotide; GAG chr2 60508359 60508378 60508375 +
actccctgcaggggccacag

SEQ ID NO: 164475 - DNA, 20 bp, Artificial Sequence
  Synthetic oligonucleotide; AAG chr2 60508363 60508382 60508379 +
cctgcaggggccacaggagc

SEQ ID NO: 164476 - DNA, 20 bp, Artificial Sequence
  Synthetic oligonucleotide; CAG chr2 60508371 60508390 60508387 +
ggccacaggagcaagcactg

SEQ ID NO: 164477 - DNA, 20 bp, Artificial Sequence
  Synthetic oligonucleotide; CGG chr2 60508375 60508394 60508391 +
acaggagcaagcactgcagc

SEQ ID NO: 164478 - DNA, 20 bp, Artificial Sequence
  Synthetic oligonucleotide; GGG chr2 60508376 60508395 60508392 +
caggagcaagcactgcagcc

SEQ ID NO: 164479 - DNA, 20 bp, Artificial Sequence
  Synthetic oligonucleotide; GAG chr2 60508384 60508403 60508400 +
agcactgcagccgggtccct

SEQ ID NO: 164480 - DNA, 20 bp, Artificial Sequence
  Synthetic oligonucleotide; CAG chr2 60508404 60508423 60508420 +
gagtctgacttttacccaaa

SEQ ID NO: 164481 - DNA, 20 bp, Artificial Sequence
  Synthetic oligonucleotide; AGG chr2 60508405 60508424 60508421 +
agtctgacttttacccaaac

SEQ ID NO: 164482 - DNA, 20 bp, Artificial Sequence
  Synthetic oligonucleotide; GGG chr2 60508406 60508425 60508422 +
gtctgacttttacccaaaca

SEQ ID NO: 164483 - DNA, 20 bp, Artificial Sequence
  Synthetic oligonucleotide; GGG chr2 60508407 60508426 60508423 +
tctgacttttacccaaacag

SEQ ID NO: 164484 - DNA, 20 bp, Artificial Sequence
  Synthetic oligonucleotide; GGG chr2 60508408 60508427 60508424 +
ctgacttttacccaaacagg

SEQ ID NO: 164485 - DNA, 20 bp, Artificial Sequence
  Synthetic oligonucleotide; CAG chr2 60508415 60508434 60508431 +
ttacccaaacagggggttgc

SEQ ID NO: 164486 - DNA, 20 bp, Artificial Sequence
  Synthetic oligonucleotide; GAG chr2 60508425 60508444 60508441 +
agggggttgccagttgctgc

SEQ ID NO: 164487 - DNA, 20 bp, Artificial Sequence
  Synthetic oligonucleotide; TAG chr2 60508439 60508458 60508455 +
tgctgcgagacaaatatccc

SEQ ID NO: 164488 - DNA, 20 bp, Artificial Sequence
  Synthetic oligonucleotide; TAG chr2 60508451 60508470 60508467 +
aatatccctagcacattacc

SEQ ID NO: 164489 - DNA, 20 bp, Artificial Sequence
  Synthetic oligonucleotide; TGG chr2 60508455 60508474 60508471 +
tccctagcacattacctagt

SEQ ID NO: 164490 - DNA, 20 bp, Artificial Sequence
  Synthetic oligonucleotide; AAG chr2 60508460 60508479 60508476 +
agcacattacctagttggca

SEQ ID NO: 164491 - DNA, 20 bp, Artificial Sequence
  Synthetic oligonucleotide; AGG chr2 60508461 60508480 60508477 +
gcacattacctagttggcaa

SEQ ID NO: 164492 - DNA, 20 bp, Artificial Sequence
  Synthetic oligonucleotide; TGG chr2 60508472 60508491 60508488 +
agttggcaaaggaatgcaac

SEQ ID NO: 164493 - DNA, 20 bp, Artificial Sequence
  Synthetic oligonucleotide; GGG chr2 60508473 60508492 60508489 +
gttggcaaaggaatgcaact

SEQ ID NO: 164494 - DNA, 20 bp, Artificial Sequence
  Synthetic oligonucleotide; GAG chr2 60508475 60508494 60508491 +
tggcaaaggaatgcaactgg

SEQ ID NO: 164495 - DNA, 20 bp, Artificial Sequence
  Synthetic oligonucleotide; AGG chr2 60508476 60508495 60508492 +
ggcaaaggaatgcaactggg

SEQ ID NO: 164496 - DNA, 20 bp, Artificial Sequence
  Synthetic oligonucleotide; TGG chr2 60508482 60508501 60508498 +
ggaatgcaactgggaggttc

SEQ ID NO: 164497 - DNA, 20 bp, Artificial Sequence
  Synthetic oligonucleotide; TAG chr2 60508487 60508506 60508503 +
gcaactgggaggttctggaa

SEQ ID NO: 164498 - DNA, 20 bp, Artificial Sequence
  Synthetic oligonucleotide; CAG chr2 60508492 60508511 60508508 +
tgggaggttctggaatagca

SEQ ID NO: 164499 - DNA, 20 bp, Artificial Sequence
  Synthetic oligonucleotide; TGG chr2 60508497 60508516 60508513 +
ggttctggaatagcacagtg

SEQ ID NO: 164500 - DNA, 20 bp, Artificial Sequence
  Synthetic oligonucleotide; TGG chr2 60508508 60508527 60508524 +
agcacagtgtggaactgcac

SEQ ID NO: 164501 - DNA, 20 bp, Artificial Sequence
  Synthetic oligonucleotide; AAG chr2 60508526 60508545 60508542 +
actggacttttcctgttctg

SEQ ID NO: 164502 - DNA, 20 bp, Artificial Sequence
  Synthetic oligonucleotide; GAG chr2 60508528 60508547 60508544 +
tggacttttcctgttctgaa

SEQ ID NO: 164503 - DNA, 20 bp, Artificial Sequence
  Synthetic oligonucleotide; AGG chr2 60508529 60508548 60508545 +
ggacttttcctgttctgaag

SEQ ID NO: 164504 - DNA, 20 bp, Artificial Sequence
  Synthetic oligonucleotide; CGG chr2 60508546 60508565 60508562 +
aagaggactttgctttcctc

SEQ ID NO: 164505 - DNA, 20 bp, Artificial Sequence
  Synthetic oligonucleotide; GGG chr2 60508547 60508566 60508563 +
agaggactttgctttcctcc

SEQ ID NO: 164506 - DNA, 20 bp, Artificial Sequence
  Synthetic oligonucleotide; AAG chr2 60508555 60508574 60508571 +
ttgctttcctccgggatgta

SEQ ID NO: 164507 - DNA, 20 bp, Artificial Sequence
  Synthetic oligonucleotide; TGG chr2 60508562 60508581 60508578 +
cctccgggatgtaaagcatt

SEQ ID NO: 164508 - DNA, 20 bp, Artificial Sequence
  Synthetic oligonucleotide; CAG chr2 60508565 60508584 60508581 +
ccgggatgtaaagcatttgg

SEQ ID NO: 164509 - DNA, 20 bp, Artificial Sequence
  Synthetic oligonucleotide; AGG chr2 60508566 60508585 60508582 +
cgggatgtaaagcatttggc

SEQ ID NO: 164510 - DNA, 20 bp, Artificial Sequence
  Synthetic oligonucleotide; AAG chr2 60508571 60508590 60508587 +
tgtaaagcatttggcaggca

SEQ ID NO: 164511 - DNA, 20 bp, Artificial Sequence
  Synthetic oligonucleotide; AGG chr2 60508572 60508591 60508588 +
gtaaagcatttggcaggcaa

SEQ ID NO: 164512 - DNA, 20 bp, Artificial Sequence
  Synthetic oligonucleotide; CAG chr2 60508588 60508607 60508604 +
gcaaaggacaaaacttacct

SEQ ID NO: 164513 - DNA, 20 bp, Artificial Sequence
  Synthetic oligonucleotide; AGG chr2 60508589 60508608 60508605 +
caaaggacaaaacttacctc

SEQ ID NO: 164514 - DNA, 20 bp, Artificial Sequence
  Synthetic oligonucleotide; TGG chr2 60508597 60508616 60508613 +
aaaacttacctcaggtacta

SEQ ID NO: 164515 - DNA, 20 bp, Artificial Sequence
  Synthetic oligonucleotide; TGG chr2 60508605 60508624 60508621 +
cctcaggtactatggcaaac

SEQ ID NO: 164516 - DNA, 20 bp, Artificial Sequence
  Synthetic oligonucleotide; AAG chr2 60508611 60508630 60508627 +
gtactatggcaaactggcca

SEQ ID NO: 164517 - DNA, 20 bp, Artificial Sequence
  Synthetic oligonucleotide; GAG chr2 60508613 60508632 60508629 +
actatggcaaactggccaaa

SEQ ID NO: 164518 - DNA, 20 bp, Artificial Sequence
  Synthetic oligonucleotide; AAG chr2 60508616 60508635 60508632 +
atggcaaactggccaaagag

SEQ ID NO: 164519 - DNA, 20 bp, Artificial Sequence
  Synthetic oligonucleotide; TAG chr2 60508625 60508644 60508641 +
tggccaaagagaagcgttgc

SEQ ID NO: 164520 - DNA, 20 bp, Artificial Sequence
  Synthetic oligonucleotide; AGG chr2 60508626 60508645 60508642 +
ggccaaagagaagcgttgct

SEQ ID NO: 164521 - DNA, 20 bp, Artificial Sequence
  Synthetic oligonucleotide; GAG chr2 60508628 60508647 60508644 +
ccaaagagaagcgttgctag

SEQ ID NO: 164522 - DNA, 20 bp, Artificial Sequence
  Synthetic oligonucleotide; TGG chr2 60508633 60508652 60508649 +
gagaagcgttgctaggagaa

SEQ ID NO: 164523 - DNA, 20 bp, Artificial Sequence
  Synthetic oligonucleotide; CGG chr2 60508639 60508658 60508655 +
cgttgctaggagaatggaca

SEQ ID NO: 164524 - DNA, 20 bp, Artificial Sequence
  Synthetic oligonucleotide; CAG chr2 60508642 60508661 60508658 +
tgctaggagaatggacacgg

SEQ ID NO: 164525 - DNA, 20 bp, Artificial Sequence
  Synthetic oligonucleotide; AGG chr2 60508643 60508662 60508659 +
gctaggagaatggacacggc

SEQ ID NO: 164526 - DNA, 20 bp, Artificial Sequence
  Synthetic oligonucleotide; CAG chr2 60508649 60508668 60508665 +
agaatggacacggcaggaaa

SEQ ID NO: 164527 - DNA, 20 bp, Artificial Sequence
  Synthetic oligonucleotide; CAG chr2 60508655 60508674 60508671 +
gacacggcaggaaacagcct

SEQ ID NO: 164528 - DNA, 20 bp, Artificial Sequence
  Synthetic oligonucleotide; TGG chr2 60508660 60508679 60508676 +
ggcaggaaacagcctcagct

SEQ ID NO: 164529 - DNA, 20 bp, Artificial Sequence
  Synthetic oligonucleotide; CAG chr2 60508665 60508684 60508681 +
gaaacagcctcagcttggcc

SEQ ID NO: 164530 - DNA, 20 bp, Artificial Sequence
  Synthetic oligonucleotide; AGG chr2 60508666 60508685 60508682 +
aaacagcctcagcttggccc

SEQ ID NO: 164531 - DNA, 20 bp, Artificial Sequence
  Synthetic oligonucleotide; AAG chr2 60508669 60508688 60508685 +
cagcctcagcttggcccagg

SEQ ID NO: 164532 - DNA, 20 bp, Artificial Sequence
  Synthetic oligonucleotide; AAG chr2 60508672 60508691 60508688 +
cctcagcttggcccaggaag

SEQ ID NO: 164533 - DNA, 20 bp, Artificial Sequence
  Synthetic oligonucleotide; TGG chr2 60508676 60508695 60508692 +
agcttggcccaggaagaagc

SEQ ID NO: 164534 - DNA, 20 bp, Artificial Sequence
  Synthetic oligonucleotide; CAG chr2 60508683 60508702 60508699 +
cccaggaagaagctggcgct

SEQ ID NO: 164535 - DNA, 20 bp, Artificial Sequence
  Synthetic oligonucleotide; CAG chr2 60508689 60508708 60508705 +
aagaagctggcgctcagcta

SEQ ID NO: 164536 - DNA, 20 bp, Artificial Sequence
  Synthetic oligonucleotide; AGG chr2 60508690 60508709 60508706 +
agaagctggcgctcagctac

SEQ ID NO: 164537 - DNA, 20 bp, Artificial Sequence
  Synthetic oligonucleotide; GGG chr2 60508691 60508710 60508707 +
gaagctggcgctcagctaca

SEQ ID NO: 164538 - DNA, 20 bp, Artificial Sequence
  Synthetic oligonucleotide; GGG chr2 60508692 60508711 60508708 +
aagctggcgctcagctacag

SEQ ID NO: 164539 - DNA, 20 bp, Artificial Sequence
  Synthetic oligonucleotide; TGG chr2 60508698 60508717 60508714 +
gcgctcagctacaggggccg

SEQ ID NO: 164540 - DNA, 20 bp, Artificial Sequence
  Synthetic oligonucleotide; GGG chr2 60508699 60508718 60508715 +
cgctcagctacaggggccgt

SEQ ID NO: 164541 - DNA, 20 bp, Artificial Sequence
  Synthetic oligonucleotide; TAG chr2 60508704 60508723 60508720 +
agctacaggggccgtgggaa

SEQ ID NO: 164542 - DNA, 20 bp, Artificial Sequence
  Synthetic oligonucleotide; TGG chr2 60508708 60508727 60508724 +
acaggggccgtgggaatagc

SEQ ID NO: 164543 - DNA, 20 bp, Artificial Sequence
  Synthetic oligonucleotide; GAG chr2 60508710 60508729 60508726 +
aggggccgtgggaatagctg

SEQ ID NO: 164544 - DNA, 20 bp, Artificial Sequence
  Synthetic oligonucleotide; AGG chr2 60508711 60508730 60508727 +
ggggccgtgggaatagctgg

SEQ ID NO: 164545 - DNA, 20 bp, Artificial Sequence
  Synthetic oligonucleotide; GAG chr2 60508729 60508748 60508745 +
ggaggcctgtgcatttccct

SEQ ID NO: 164546 - DNA, 20 bp, Artificial Sequence
  Synthetic oligonucleotide; AGG chr2 60508730 60508749 60508746 +
gaggcctgtgcatttccctg

SEQ ID NO: 164547 - DNA, 20 bp, Artificial Sequence
  Synthetic oligonucleotide; GGG chr2 60508731 60508750 60508747 +
aggcctgtgcatttccctga

SEQ ID NO: 164548 - DNA, 20 bp, Artificial Sequence
  Synthetic oligonucleotide; TGG chr2 60508740 60508759 60508756 +
catttccctgagggtctcct

SEQ ID NO: 164549 - DNA, 20 bp, Artificial Sequence
  Synthetic oligonucleotide; CAG chr2 60508746 60508765 60508762 +
cctgagggtctccttggcga

SEQ ID NO: 164550 - DNA, 20 bp, Artificial Sequence
  Synthetic oligonucleotide; AGG chr2 60508747 60508766 60508763 +
ctgagggtctccttggcgac

SEQ ID NO: 164551 - DNA, 20 bp, Artificial Sequence
  Synthetic oligonucleotide; GGG chr2 60508748 60508767 60508764 +
tgagggtctccttggcgaca

SEQ ID NO: 164552 - DNA, 20 bp, Artificial Sequence
  Synthetic oligonucleotide; TGG chr2 60508752 60508771 60508768 +
ggtctccttggcgacagggc

SEQ ID NO: 164553 - DNA, 20 bp, Artificial Sequence
  Synthetic oligonucleotide; TGG chr2 60508765 60508784 60508781 +
acagggctggacctttgcac

SEQ ID NO: 164554 - DNA, 20 bp, Artificial Sequence
  Synthetic oligonucleotide; CAG chr2 60508768 60508787 60508784 +
gggctggacctttgcactgg

SEQ ID NO: 164555 - DNA, 20 bp, Artificial Sequence
  Synthetic oligonucleotide; TGG chr2 60508773 60508792 60508789 +
ggacctttgcactggcagcc

SEQ ID NO: 164556 - DNA, 20 bp, Artificial Sequence
  Synthetic oligonucleotide; GAG chr2 60508786 60508805 60508802 +
ggcagcctggactcttctct

SEQ ID NO: 164557 - DNA, 20 bp, Artificial Sequence
  Synthetic oligonucleotide; TGG chr2 60508797 60508816 60508813 +
ctcttctctgagctccccct

SEQ ID NO: 164558 - DNA, 20 bp, Artificial Sequence
  Synthetic oligonucleotide; GGG chr2 60508798 60508817 60508814 +
tcttctctgagctccccctt

SEQ ID NO: 164559 - DNA, 20 bp, Artificial Sequence
  Synthetic oligonucleotide; CAG chr2 60508814 60508833 60508830 +
ccttgggttacctatgattc

SEQ ID NO: 164560 - DNA, 20 bp, Artificial Sequence
  Synthetic oligonucleotide; AAG chr2 60508817 60508836 60508833 +
tgggttacctatgattccag

SEQ ID NO: 164561 - DNA, 20 bp, Artificial Sequence
  Synthetic oligonucleotide; GAG chr2 60508819 60508838 60508835 +
ggttacctatgattccagaa

SEQ ID NO: 164562 - DNA, 20 bp, Artificial Sequence
  Synthetic oligonucleotide; TGG chr2 60508835 60508854 60508851 +
agaagagtttgttctacatg

SEQ ID NO: 164563 - DNA, 20 bp, Artificial Sequence
  Synthetic oligonucleotide; AAG chr2 60508840 60508859 60508856 +
agtttgttctacatgtggca

SEQ ID NO: 164564 - DNA, 20 bp, Artificial Sequence
  Synthetic oligonucleotide; CAG chr2 60508844 60508863 60508860 +
tgttctacatgtggcaaagc

SEQ ID NO: 164565 - DNA, 20 bp, Artificial Sequence
  Synthetic oligonucleotide; TAG chr2 60508852 60508871 60508868 +
atgtggcaaagccagcacca

SEQ ID NO: 164566 - DNA, 20 bp, Artificial Sequence
  Synthetic oligonucleotide; GAG chr2 60508854 60508873 60508870 +
gtggcaaagccagcaccata

SEQ ID NO: 164567 - DNA, 20 bp, Artificial Sequence
  Synthetic oligonucleotide; AGG chr2 60508855 60508874 60508871 +
tggcaaagccagcaccatag

SEQ ID NO: 164568 - DNA, 20 bp, Artificial Sequence
  Synthetic oligonucleotide; GGG chr2 60508856 60508875 60508872 +
ggcaaagccagcaccataga

SEQ ID NO: 164569 - DNA, 20 bp, Artificial Sequence
  Synthetic oligonucleotide; GGG chr2 60508857 60508876 60508873 +
gcaaagccagcaccatagag

SEQ ID NO: 164570 - DNA, 20 bp, Artificial Sequence
  Synthetic oligonucleotide; CAG chr2 60508861 60508880 60508877 +
agccagcaccatagagggga

SEQ ID NO: 164571 - DNA, 20 bp, Artificial Sequence
  Synthetic oligonucleotide; GAG chr2 60508863 60508882 60508879 +
ccagcaccatagaggggaca

SEQ ID NO: 164572 - DNA, 20 bp, Artificial Sequence
  Synthetic oligonucleotide; AGG chr2 60508864 60508883 60508880 +
cagcaccatagaggggacag

SEQ ID NO: 164573 - DNA, 20 bp, Artificial Sequence
  Synthetic oligonucleotide; GGG chr2 60508865 60508884 60508881 +
agcaccatagaggggacaga

SEQ ID NO: 164574 - DNA, 20 bp, Artificial Sequence
  Synthetic oligonucleotide; AAG chr2 60508874 60508893 60508890 +
gaggggacagagggaaacct

SEQ ID NO: 164575 - DNA, 20 bp, Artificial Sequence
  Synthetic oligonucleotide; AGG chr2 60508875 60508894 60508891 +
aggggacagagggaaaccta

SEQ ID NO: 164576 - DNA, 20 bp, Artificial Sequence
  Synthetic oligonucleotide; GAG chr2 60508886 60508905 60508902 +
ggaaacctaaggcctacctt

SEQ ID NO: 164577 - DNA, 20 bp, Artificial Sequence
  Synthetic oligonucleotide; AGG chr2 60508887 60508906 60508903 +
gaaacctaaggcctaccttg

SEQ ID NO: 164578 - DNA, 20 bp, Artificial Sequence
  Synthetic oligonucleotide; GGG chr2 60508888 60508907 60508904 +
aaacctaaggcctaccttga

SEQ ID NO: 164579 - DNA, 20 bp, Artificial Sequence
  Synthetic oligonucleotide; AAG chr2 60508923 60508942 60508939 +
cgccctacccactgctactt

SEQ ID NO: 164580 - DNA, 20 bp, Artificial Sequence
  Synthetic oligonucleotide; AGG chr2 60508924 60508943 60508940 +
gccctacccactgctactta

SEQ ID NO: 164581 - DNA, 20 bp, Artificial Sequence
  Synthetic oligonucleotide; GAG chr2 60508942 60508961 60508958 +
taaggtgtcttttgaatcct

SEQ ID NO: 164582 - DNA, 20 bp, Artificial Sequence
  Synthetic oligonucleotide; AGG chr2 60508943 60508962 60508959 +
aaggtgtcttttgaatcctg

SEQ ID NO: 164583 - DNA, 20 bp, Artificial Sequence
  Synthetic oligonucleotide; AAG chr2 60508949 60508968 60508965 +
tcttttgaatcctgaggacc

SEQ ID NO: 164584 - DNA, 20 bp, Artificial Sequence
  Synthetic oligonucleotide; AGG chr2 60508950 60508969 60508966 +
cttttgaatcctgaggacca

SEQ ID NO: 164585 - DNA, 20 bp, Artificial Sequence
  Synthetic oligonucleotide; GAG chr2 60508952 60508971 60508968 +
tttgaatcctgaggaccaag

SEQ ID NO: 164586 - DNA, 20 bp, Artificial Sequence
  Synthetic oligonucleotide; AAG chr2 60508967 60508986 60508983 +
ccaaggagctctcctatgac

SEQ ID NO: 164587 - DNA, 20 bp, Artificial Sequence
  Synthetic oligonucleotide; AGG chr2 60508968 60508987 60508984 +
caaggagctctcctatgaca

SEQ ID NO: 164588 - DNA, 20 bp, Artificial Sequence
  Synthetic oligonucleotide; TGG chr2 60508981 60509000 60508997 +
tatgacaaggaacctgtcac

SEQ ID NO: 164589 - DNA, 20 bp, Artificial Sequence
  Synthetic oligonucleotide; AAG chr2 60509001 60509020 60509017 +
tggttcttctgtgattgcta

SEQ ID NO: 164590 - DNA, 20 bp, Artificial Sequence
  Synthetic oligonucleotide; TAG chr2 60509006 60509025 60509022 +
cttctgtgattgctaaagcc

SEQ ID NO: 164591 - DNA, 20 bp, Artificial Sequence
  Synthetic oligonucleotide; GAG chr2 60509008 60509027 60509024 +
tctgtgattgctaaagccta

SEQ ID NO: 164592 - DNA, 20 bp, Artificial Sequence
  Synthetic oligonucleotide; AGG chr2 60509009 60509028 60509025 +
ctgtgattgctaaagcctag

SEQ ID NO: 164593 - DNA, 20 bp, Artificial Sequence
  Synthetic oligonucleotide; AAG chr2 60509022 60509041 60509038 +
agcctagaggacctcctcca

SEQ ID NO: 164594 - DNA, 20 bp, Artificial Sequence
  Synthetic oligonucleotide; AAG chr2 60509027 60509046 60509043 +
agaggacctcctccaaagaa

SEQ ID NO: 164595 - DNA, 20 bp, Artificial Sequence
  Synthetic oligonucleotide; TGG chr2 60509030 60509049 60509046 +
ggacctcctccaaagaaaag

SEQ ID NO: 164596 - DNA, 20 bp, Artificial Sequence
  Synthetic oligonucleotide; CAG chr2 60509035 60509054 60509051 +
tcctccaaagaaaagtggct

SEQ ID NO: 164597 - DNA, 20 bp, Artificial Sequence
  Synthetic oligonucleotide; CAG chr2 60509039 60509058 60509055 +
ccaaagaaaagtggctcaga

SEQ ID NO: 164598 - DNA, 20 bp, Artificial Sequence
  Synthetic oligonucleotide; CAG chr2 60509065 60509084 60509081 +
cactgactcttatttctcat

SEQ ID NO: 164599 - DNA, 20 bp, Artificial Sequence
  Synthetic oligonucleotide; CAG chr2 60509080 60509099 60509096 +
ctcatcagactccgaaatca

SEQ ID NO: 164600 - DNA, 20 bp, Artificial Sequence
  Synthetic oligonucleotide; AGG chr2 60509081 60509100 60509097 +
tcatcagactccgaaatcac

SEQ ID NO: 164601 - DNA, 20 bp, Artificial Sequence
  Synthetic oligonucleotide; TGG chr2 60509088 60509107 60509104 +
actccgaaatcacaggcttc

SEQ ID NO: 164602 - DNA, 20 bp, Artificial Sequence
  Synthetic oligonucleotide; AAG chr2 60509095 60509114 60509111 +
aatcacaggcttctggtcta

SEQ ID NO: 164603 - DNA, 20 bp, Artificial Sequence
  Synthetic oligonucleotide; AAG chr2 60509102 60509121 60509118 +
ggcttctggtctaaagattc

SEQ ID NO: 164604 - DNA, 20 bp, Artificial Sequence
  Synthetic oligonucleotide; GAG chr2 60509107 60509126 60509123 +
ctggtctaaagattcaagct

SEQ ID NO: 164605 - DNA, 20 bp, Artificial Sequence
  Synthetic oligonucleotide; AAG chr2 60509114 60509133 60509130 +
aaagattcaagctgagaaac

SEQ ID NO: 164606 - DNA, 20 bp, Artificial Sequence
  Synthetic oligonucleotide; AAG chr2 60509118 60509137 60509134 +
attcaagctgagaaacaaga

SEQ ID NO: 164607 - DNA, 20 bp, Artificial Sequence
  Synthetic oligonucleotide; CAG chr2 60509135 60509154 60509151 +
agaaagcaatttgtttgatt

SEQ ID NO: 164608 - DNA, 20 bp, Artificial Sequence
  Synthetic oligonucleotide; AGG chr2 60509136 60509155 60509152 +
gaaagcaatttgtttgattc

SEQ ID NO: 164609 - DNA, 20 bp, Artificial Sequence
  Synthetic oligonucleotide; TGG chr2 60509169 60509188 60509185 +
ttaccccccaataatttact

SEQ ID NO: 164610 - DNA, 20 bp, Artificial Sequence
  Synthetic oligonucleotide; CAG chr2 60509175 60509194 60509191 +
cccaataatttacttggtct

SEQ ID NO: 164611 - DNA, 20 bp, Artificial Sequence
  Synthetic oligonucleotide; TGG chr2 60509181 60509200 60509197 +
aatttacttggtctcagctt

SEQ ID NO: 164612 - DNA, 20 bp, Artificial Sequence
  Synthetic oligonucleotide; TGG chr2 60509185 60509204 60509201 +
tacttggtctcagctttggc

SEQ ID NO: 164613 - DNA, 20 bp, Artificial Sequence
  Synthetic oligonucleotide; TGG chr2 60509190 60509209 60509206 +
ggtctcagctttggctggct

SEQ ID NO: 164614 - DNA, 20 bp, Artificial Sequence
  Synthetic oligonucleotide; GAG chr2 60509200 60509219 60509216 +
ttggctggcttggatgttat

SEQ ID NO: 164615 - DNA, 20 bp, Artificial Sequence
  Synthetic oligonucleotide; AGG chr2 60509201 60509220 60509217 +
tggctggcttggatgttatg

SEQ ID NO: 164616 - DNA, 20 bp, Artificial Sequence
  Synthetic oligonucleotide; AAG chr2 60509209 60509228 60509225 +
ttggatgttatgaggattcc

SEQ ID NO: 164617 - DNA, 20 bp, Artificial Sequence
  Synthetic oligonucleotide; TAG chr2 60509231 60509250 60509247 +
gaatttttttacttttccat

SEQ ID NO: 164618 - DNA, 20 bp, Artificial Sequence
  Synthetic oligonucleotide; GAG chr2 60509233 60509252 60509249 +
atttttttacttttccatta

SEQ ID NO: 164619 - DNA, 20 bp, Artificial Sequence
  Synthetic oligonucleotide; AGG chr2 60509234 60509253 60509250 +
tttttttacttttccattag

SEQ ID NO: 164620 - DNA, 20 bp, Artificial Sequence
  Synthetic oligonucleotide; GGG chr2 60509235 60509254 60509251 +
ttttttacttttccattaga

SEQ ID NO: 164621 - DNA, 20 bp, Artificial Sequence
  Synthetic oligonucleotide; AAG chr2 60509255 60509274 60509271 +
gggctctgcactctcctttc

SEQ ID NO: 164622 - DNA, 20 bp, Artificial Sequence
  Synthetic oligonucleotide; AGG chr2 60509256 60509275 60509272 +
ggctctgcactctcctttca

SEQ ID NO: 164623 - DNA, 20 bp, Artificial Sequence
  Synthetic oligonucleotide; AAG chr2 60509262 60509281 60509278 +
gcactctcctttcaaggaaa

SEQ ID NO: 164624 - DNA, 20 bp, Artificial Sequence
  Synthetic oligonucleotide; AGG chr2 60509263 60509282 60509279 +
cactctcctttcaaggaaaa

SEQ ID NO: 164625 - DNA, 20 bp, Artificial Sequence
  Synthetic oligonucleotide; CAG chr2 60509276 60509295 60509292 +
aggaaaaaggctctatgtgc

SEQ ID NO: 164626 - DNA, 20 bp, Artificial Sequence
  Synthetic oligonucleotide; CAG chr2 60509291 60509310 60509307 +
tgtgccagcccacttctttc

SEQ ID NO: 164627 - DNA, 20 bp, Artificial Sequence
  Synthetic oligonucleotide; TGG chr2 60509297 60509316 60509313 +
agcccacttctttccagaaa

SEQ ID NO: 164628 - DNA, 20 bp, Artificial Sequence
  Synthetic oligonucleotide; GGG chr2 60509298 60509317 60509314 +
gcccacttctttccagaaat

SEQ ID NO: 164629 - DNA, 20 bp, Artificial Sequence
  Synthetic oligonucleotide; GGG chr2 60509299 60509318 60509315 +
cccacttctttccagaaatg

SEQ ID NO: 164630 - DNA, 20 bp, Artificial Sequence
  Synthetic oligonucleotide; AAG chr2 60509303 60509322 60509319 +
cttctttccagaaatgggga

SEQ ID NO: 164631 - DNA, 20 bp, Artificial Sequence
  Synthetic oligonucleotide; AGG chr2 60509304 60509323 60509320 +
ttctttccagaaatggggaa

SEQ ID NO: 164632 - DNA, 20 bp, Artificial Sequence
  Synthetic oligonucleotide; GGG chr2 60509305 60509324 60509321 +
tctttccagaaatggggaaa

SEQ ID NO: 164633 - DNA, 20 bp, Artificial Sequence
  Synthetic oligonucleotide; GAG chr2 60509307 60509326 60509323 +
tttccagaaatggggaaagg

SEQ ID NO: 164634 - DNA, 20 bp, Artificial Sequence
  Synthetic oligonucleotide; AGG chr2 60509308 60509327 60509324 +
ttccagaaatggggaaaggg

SEQ ID NO: 164635 - DNA, 20 bp, Artificial Sequence
  Synthetic oligonucleotide; GAG chr2 60509310 60509329 60509326 +
ccagaaatggggaaagggag

SEQ ID NO: 164636 - DNA, 20 bp, Artificial Sequence
  Synthetic oligonucleotide; AGG chr2 60509311 60509330 60509327 +
cagaaatggggaaagggagg

SEQ ID NO: 164637 - DNA, 20 bp, Artificial Sequence
  Synthetic oligonucleotide; GAG chr2 60509313 60509332 60509329 +
gaaatggggaaagggaggag

SEQ ID NO: 164638 - DNA, 20 bp, Artificial Sequence
  Synthetic oligonucleotide; TGG chr2 60509322 60509341 60509338 +
aaagggaggaggagaacctg

SEQ ID NO: 164639 - DNA, 20 bp, Artificial Sequence
  Synthetic oligonucleotide; AAG chr2 60509327 60509346 60509343 +
gaggaggagaacctgtggaa

SEQ ID NO: 164640 - DNA, 20 bp, Artificial Sequence
  Synthetic oligonucleotide; GAG chr2 60509329 60509348 60509345 +
ggaggagaacctgtggaaaa

SEQ ID NO: 164641 - DNA, 20 bp, Artificial Sequence
  Synthetic oligonucleotide; AGG chr2 60509330 60509349 60509346 +
gaggagaacctgtggaaaag

SEQ ID NO: 164642 - DNA, 20 bp, Artificial Sequence
  Synthetic oligonucleotide; CGG chr2 60509337 60509356 60509353 +
acctgtggaaaagaggacaa

SEQ ID NO: 164643 - DNA, 20 bp, Artificial Sequence
  Synthetic oligonucleotide; CGG chr2 60509345 60509364 60509361 +
aaaagaggacaacggatttc

SEQ ID NO: 164644 - DNA, 20 bp, Artificial Sequence
  Synthetic oligonucleotide; AAG chr2 60509348 60509367 60509364 +
agaggacaacggatttccgg

SEQ ID NO: 164645 - DNA, 20 bp, Artificial Sequence
  Synthetic oligonucleotide; AAG chr2 60509358 60509377 60509374 +
ggatttccggaagaaattcc

SEQ ID NO: 164646 - DNA, 20 bp, Artificial Sequence
  Synthetic oligonucleotide; CAG chr2 60509362 60509381 60509378 +
ttccggaagaaattccaagc

SEQ ID NO: 164647 - DNA, 20 bp, Artificial Sequence
  Synthetic oligonucleotide; AGG chr2 60509363 60509382 60509379 +
tccggaagaaattccaagcc

SEQ ID NO: 164648 - DNA, 20 bp, Artificial Sequence
  Synthetic oligonucleotide; GGG chr2 60509364 60509383 60509380 +
ccggaagaaattccaagcca

SEQ ID NO: 164649 - DNA, 20 bp, Artificial Sequence
  Synthetic oligonucleotide; GGG chr2 60509365 60509384 60509381 +
cggaagaaattccaagccag

SEQ ID NO: 164650 - DNA, 20 bp, Artificial Sequence
  Synthetic oligonucleotide; TGG chr2 60509375 60509394 60509391 +
tccaagccaggggctaaccg

SEQ ID NO: 164651 - DNA, 20 bp, Artificial Sequence
  Synthetic oligonucleotide; GAG chr2 60509382 60509401 60509398 +
caggggctaaccgtggacct

SEQ ID NO: 164652 - DNA, 20 bp, Artificial Sequence
  Synthetic oligonucleotide; CAG chr2 60509387 60509406 60509403 +
gctaaccgtggacctgagca

SEQ ID NO: 164653 - DNA, 20 bp, Artificial Sequence
  Synthetic oligonucleotide; CAG chr2 60509390 60509409 60509406 +
aaccgtggacctgagcacag

SEQ ID NO: 164654 - DNA, 20 bp, Artificial Sequence
  Synthetic oligonucleotide; GAG chr2 60509392 60509411 60509408 +
ccgtggacctgagcacagca

SEQ ID NO: 164655 - DNA, 20 bp, Artificial Sequence
  Synthetic oligonucleotide; CGG chr2 60509400 60509419 60509416 +
ctgagcacagcagagccaca

SEQ ID NO: 164656 - DNA, 20 bp, Artificial Sequence
  Synthetic oligonucleotide; CAG chr2 60509409 60509428 60509425 +
gcagagccacacggacgtct

SEQ ID NO: 164657 - DNA, 20 bp, Artificial Sequence
  Synthetic oligonucleotide; CGG chr2 60509416 60509435 60509432 +
cacacggacgtctcagaaaa

SEQ ID NO: 164658 - DNA, 20 bp, Artificial Sequence
  Synthetic oligonucleotide; TGG chr2 60509424 60509443 60509440 +
cgtctcagaaaacggttctg

SEQ ID NO: 164659 - DNA, 20 bp, Artificial Sequence
  Synthetic oligonucleotide; AAG chr2 60509427 60509446 60509443 +
ctcagaaaacggttctgtgg

SEQ ID NO: 164660 - DNA, 20 bp, Artificial Sequence
  Synthetic oligonucleotide; AAG chr2 60509433 60509452 60509449 +
aaacggttctgtggaagcac

SEQ ID NO: 164661 - DNA, 20 bp, Artificial Sequence
  Synthetic oligonucleotide; TGG chr2 60509441 60509460 60509457 +
ctgtggaagcacaagacacg

SEQ ID NO: 164662 - DNA, 20 bp, Artificial Sequence
  Synthetic oligonucleotide; CAG chr2 60509444 60509463 60509460 +
tggaagcacaagacacgtgg

SEQ ID NO: 164663 - DNA, 20 bp, Artificial Sequence
  Synthetic oligonucleotide; GAG chr2 60509448 60509467 60509464 +
agcacaagacacgtggcagt

SEQ ID NO: 164664 - DNA, 20 bp, Artificial Sequence
  Synthetic oligonucleotide; GAG chr2 60509450 60509469 60509466 +
cacaagacacgtggcagtga

SEQ ID NO: 164665 - DNA, 20 bp, Artificial Sequence
  Synthetic oligonucleotide; GAG chr2 60509457 60509476 60509473 +
cacgtggcagtgagagtcct

SEQ ID NO: 164666 - DNA, 20 bp, Artificial Sequence
  Synthetic oligonucleotide; AAG chr2 60509460 60509479 60509476 +
gtggcagtgagagtcctgag

SEQ ID NO: 164667 - DNA, 20 bp, Artificial Sequence
  Synthetic oligonucleotide; CAG chr2 60509465 60509484 60509481 +
agtgagagtcctgagaagtc

SEQ ID NO: 164668 - DNA, 20 bp, Artificial Sequence
  Synthetic oligonucleotide; AGG chr2 60509466 60509485 60509482 +
gtgagagtcctgagaagtcc

SEQ ID NO: 164669 - DNA, 20 bp, Artificial Sequence
  Synthetic oligonucleotide; AAG chr2 60509471 60509490 60509487 +
agtcctgagaagtccaggaa

SEQ ID NO: 164670 - DNA, 20 bp, Artificial Sequence
  Synthetic oligonucleotide; CAG chr2 60509477 60509496 60509493 +
gagaagtccaggaaaagatg

SEQ ID NO: 164671 - DNA, 20 bp, Artificial Sequence
  Synthetic oligonucleotide; CAG chr2 60509512 60509531 60509528 +
tcctaaatatcaccaattaa

SEQ ID NO: 164672 - DNA, 20 bp, Artificial Sequence
  Synthetic oligonucleotide; CAG chr2 60509515 60509534 60509531 +
taaatatcaccaattaacag

SEQ ID NO: 164673 - DNA, 20 bp, Artificial Sequence
  Synthetic oligonucleotide; TGG chr2 60509523 60509542 60509539 +
accaattaacagcagctcga

SEQ ID NO: 164674 - DNA, 20 bp, Artificial Sequence
  Synthetic oligonucleotide; GAG chr2 60509533 60509552 60509549 +
agcagctcgatggtctacct

SEQ ID NO: 164675 - DNA, 20 bp, Artificial Sequence
  Synthetic oligonucleotide; GAG chr2 60509540 60509559 60509556 +
cgatggtctacctgagacct

SEQ ID NO: 164676 - DNA, 20 bp, Artificial Sequence
  Synthetic oligonucleotide; AAG chr2 60509553 60509572 60509569 +
gagacctgagaaaacaaacg

SEQ ID NO: 164677 - DNA, 20 bp, Artificial Sequence
  Synthetic oligonucleotide; AGG chr2 60509554 60509573 60509570 +
agacctgagaaaacaaacga

SEQ ID NO: 164678 - DNA, 20 bp, Artificial Sequence
  Synthetic oligonucleotide; GGG chr2 60509555 60509574 60509571 +
gacctgagaaaacaaacgaa

SEQ ID NO: 164679 - DNA, 20 bp, Artificial Sequence
  Synthetic oligonucleotide; AAG chr2 60509559 60509578 60509575 +
tgagaaaacaaacgaaggga

SEQ ID NO: 164680 - DNA, 20 bp, Artificial Sequence
  Synthetic oligonucleotide; AAG chr2 60509568 60509587 60509584 +
aaacgaagggaaagaaatgc

SEQ ID NO: 164681 - DNA, 20 bp, Artificial Sequence
  Synthetic oligonucleotide; AAG chr2 60509576 60509595 60509592 +
ggaaagaaatgcaagaaaca

SEQ ID NO: 164682 - DNA, 20 bp, Artificial Sequence
  Synthetic oligonucleotide; TGG chr2 60509589 60509608 60509605 +
agaaacaaagcgcatctttc

SEQ ID NO: 164683 - DNA, 20 bp, Artificial Sequence
  Synthetic oligonucleotide; AAG chr2 60509597 60509616 60509613 +
agcgcatctttctggatcaa

SEQ ID NO: 164684 - DNA, 20 bp, Artificial Sequence
  Synthetic oligonucleotide; AAG chr2 60509603 60509622 60509619 +
tctttctggatcaaaagatc

SEQ ID NO: 164685 - DNA, 20 bp, Artificial Sequence
  Synthetic oligonucleotide; TGG chr2 60509613 60509632 60509629 +
tcaaaagatcaagttgtctt

SEQ ID NO: 164686 - DNA, 20 bp, Artificial Sequence
  Synthetic oligonucleotide; TAG chr2 60509616 60509635 60509632 +
aaagatcaagttgtctttgg

SEQ ID NO: 164687 - DNA, 20 bp, Artificial Sequence
  Synthetic oligonucleotide; AAG chr2 60509622 60509641 60509638 +
caagttgtctttggtagcta

SEQ ID NO: 164688 - DNA, 20 bp, Artificial Sequence
  Synthetic oligonucleotide; CAG chr2 60509630 60509649 60509646 +
ctttggtagctaaagaacaa

SEQ ID NO: 164689 - DNA, 20 bp, Artificial Sequence
  Synthetic oligonucleotide; GAG chr2 60509632 60509651 60509648 +
ttggtagctaaagaacaaca

SEQ ID NO: 164690 - DNA, 20 bp, Artificial Sequence
  Synthetic oligonucleotide; AAG chr2 60509635 60509654 60509651 +
gtagctaaagaacaacagag

SEQ ID NO: 164691 - DNA, 20 bp, Artificial Sequence
  Synthetic oligonucleotide; AGG chr2 60509636 60509655 60509652 +
tagctaaagaacaacagaga

SEQ ID NO: 164692 - DNA, 20 bp, Artificial Sequence
  Synthetic oligonucleotide; AAG chr2 60509642 60509661 60509658 +
aagaacaacagagaaggaaa

SEQ ID NO: 164693 - DNA, 20 bp, Artificial Sequence
  Synthetic oligonucleotide; AAG chr2 60509651 60509670 60509667 +
agagaaggaaaaagaacaaa

SEQ ID NO: 164694 - DNA, 20 bp, Artificial Sequence
  Synthetic oligonucleotide; TAG chr2 60509656 60509675 60509672 +
aggaaaaagaacaaaaagat

SEQ ID NO: 164695 - DNA, 20 bp, Artificial Sequence
  Synthetic oligonucleotide; AGG chr2 60509657 60509676 60509673 +
ggaaaaagaacaaaaagatt

SEQ ID NO: 164696 - DNA, 20 bp, Artificial Sequence
  Synthetic oligonucleotide; GAG chr2 60509659 60509678 60509675 +
aaaaagaacaaaaagattag

SEQ ID NO: 164697 - DNA, 20 bp, Artificial Sequence
  Synthetic oligonucleotide; AGG chr2 60509660 60509679 60509676 +
aaaagaacaaaaagattagg

SEQ ID NO: 164698 - DNA, 20 bp, Artificial Sequence
  Synthetic oligonucleotide; GAG chr2 60509662 60509681 60509678 +
aagaacaaaaagattaggag

SEQ ID NO: 164699 - DNA, 20 bp, Artificial Sequence
  Synthetic oligonucleotide; AGG chr2 60509663 60509682 60509679 +
agaacaaaaagattaggagg

SEQ ID NO: 164700 - DNA, 20 bp, Artificial Sequence
  Synthetic oligonucleotide; GAG chr2 60509665 60509684 60509681 +
aacaaaaagattaggaggag

SEQ ID NO: 164701 - DNA, 20 bp, Artificial Sequence
  Synthetic oligonucleotide; TGG chr2 60509677 60509696 60509693 +
aggaggaggagaaaaacacc

SEQ ID NO: 164702 - DNA, 20 bp, Artificial Sequence
  Synthetic oligonucleotide; AAG chr2 60509689 60509708 60509705 +
aaaacacctggccctcccca

SEQ ID NO: 164703 - DNA, 20 bp, Artificial Sequence
  Synthetic oligonucleotide; CAG chr2 60509711 60509730 60509727 +
gaactcgacttaaatcatct

SEQ ID NO: 164704 - DNA, 20 bp, Artificial Sequence
  Synthetic oligonucleotide; TAG chr2 60509717 60509736 60509733 +
gacttaaatcatctcagcta

SEQ ID NO: 164705 - DNA, 20 bp, Artificial Sequence
  Synthetic oligonucleotide; AGG chr2 60509718 60509737 60509734 +
acttaaatcatctcagctat

SEQ ID NO: 164706 - DNA, 20 bp, Artificial Sequence
  Synthetic oligonucleotide; CAG chr2 60509721 60509740 60509737 +
taaatcatctcagctatagg

SEQ ID NO: 164707 - DNA, 20 bp, Artificial Sequence
  Synthetic oligonucleotide; TGG chr2 60509729 60509748 60509745 +
ctcagctataggcagtcaac

SEQ ID NO: 164708 - DNA, 20 bp, Artificial Sequence
  Synthetic oligonucleotide; GGG chr2 60509730 60509749 60509746 +
tcagctataggcagtcaact

SEQ ID NO: 164709 - DNA, 20 bp, Artificial Sequence
  Synthetic oligonucleotide; GGG chr2 60509731 60509750 60509747 +
cagctataggcagtcaactg

SEQ ID NO: 164710 - DNA, 20 bp, Artificial Sequence
  Synthetic oligonucleotide; CAG chr2 60509743 60509762 60509759 +
gtcaactggggctctccgaa

SEQ ID NO: 164711 - DNA, 20 bp, Artificial Sequence
  Synthetic oligonucleotide; CGG chr2 60509753 60509772 60509769 +
gctctccgaacagccacaat

SEQ ID NO: 164712 - DNA, 20 bp, Artificial Sequence
  Synthetic oligonucleotide; GGG chr2 60509754 60509773 60509770 +
ctctccgaacagccacaatc

SEQ ID NO: 164713 - DNA, 20 bp, Artificial Sequence
  Synthetic oligonucleotide; GGG chr2 60509755 60509774 60509771 +
tctccgaacagccacaatcg

SEQ ID NO: 164714 - DNA, 20 bp, Artificial Sequence
  Synthetic oligonucleotide; GGG chr2 60509756 60509775 60509772 +
ctccgaacagccacaatcgg

SEQ ID NO: 164715 - DNA, 20 bp, Artificial Sequence
  Synthetic oligonucleotide; GGG chr2 60509757 60509776 60509773 +
tccgaacagccacaatcggg

SEQ ID NO: 164716 - DNA, 20 bp, Artificial Sequence
  Synthetic oligonucleotide; CAG chr2 60509791 60509810 60509807 +
cccctcacgatcttcctgaa

SEQ ID NO: 164717 - DNA, 20 bp, Artificial Sequence
  Synthetic oligonucleotide; AGG chr2 60509792 60509811 60509808 +
ccctcacgatcttcctgaac

SEQ ID NO: 164718 - DNA, 20 bp, Artificial Sequence
  Synthetic oligonucleotide; GGG chr2 60509793 60509812 60509809 +
cctcacgatcttcctgaaca

SEQ ID NO: 164719 - DNA, 20 bp, Artificial Sequence
  Synthetic oligonucleotide; CAG chr2 60509796 60509815 60509812 +
cacgatcttcctgaacaggg

SEQ ID NO: 164720 - DNA, 20 bp, Artificial Sequence
  Synthetic oligonucleotide; TAG chr2 60509799 60509818 60509815 +
gatcttcctgaacagggcag

SEQ ID NO: 164721 - DNA, 20 bp, Artificial Sequence
  Synthetic oligonucleotide; TAG chr2 60509804 60509823 60509820 +
tcctgaacagggcagtagtc

SEQ ID NO: 164722 - DNA, 20 bp, Artificial Sequence
  Synthetic oligonucleotide; AAG chr2 60509816 60509835 60509832 +
cagtagtctagcatccactg

SEQ ID NO: 164723 - DNA, 20 bp, Artificial Sequence
  Synthetic oligonucleotide; AAG chr2 60509824 60509843 60509840 +
tagcatccactgaagtcctg

SEQ ID NO: 164724 - DNA, 20 bp, Artificial Sequence
  Synthetic oligonucleotide; TGG chr2 60509827 60509846 60509843 +
catccactgaagtcctgaag

SEQ ID NO: 164725 - DNA, 20 bp, Artificial Sequence
  Synthetic oligonucleotide; AAG chr2 60509832 60509851 60509848 +
actgaagtcctgaagtggtg

SEQ ID NO: 164726 - DNA, 20 bp, Artificial Sequence
  Synthetic oligonucleotide; AGG chr2 60509833 60509852 60509849 +
ctgaagtcctgaagtggtga

SEQ ID NO: 164727 - DNA, 20 bp, Artificial Sequence
  Synthetic oligonucleotide; GAG chr2 60509835 60509854 60509851 +
gaagtcctgaagtggtgaag

SEQ ID NO: 164728 - DNA, 20 bp, Artificial Sequence
  Synthetic oligonucleotide; CAG chr2 60509841 60509860 60509857 +
ctgaagtggtgaaggagccc

SEQ ID NO: 164729 - DNA, 20 bp, Artificial Sequence
  Synthetic oligonucleotide; GAG chr2 60509859 60509878 60509875 +
cccagacacacccatcctct

SEQ ID NO: 164730 - DNA, 20 bp, Artificial Sequence
  Synthetic oligonucleotide; CAG chr2 60509870 60509889 60509886 +
ccatcctctgagcacctcca

SEQ ID NO: 164731 - DNA, 20 bp, Artificial Sequence
  Synthetic oligonucleotide; TGG chr2 60509879 60509898 60509895 +
gagcacctccacagcctttc

SEQ ID NO: 164732 - DNA, 20 bp, Artificial Sequence
  Synthetic oligonucleotide; CAG chr2 60509896 60509915 60509912 +
ttctggcccatcccaataaa

SEQ ID NO: 164733 - DNA, 20 bp, Artificial Sequence
  Synthetic oligonucleotide; CAG chr2 60509913 60509932 60509929 +
aaacagcaattctattctcc

SEQ ID NO: 164734 - DNA, 20 bp, Artificial Sequence
  Synthetic oligonucleotide; GAG chr2 60509921 60509940 60509937 +
attctattctcccagtcacc

SEQ ID NO: 164735 - DNA, 20 bp, Artificial Sequence
  Synthetic oligonucleotide; TGG chr2 60509934 60509953 60509950 +
agtcaccgagccacacattt

SEQ ID NO: 164736 - DNA, 20 bp, Artificial Sequence
  Synthetic oligonucleotide; GGG chr2 60509935 60509954 60509951 +
gtcaccgagccacacatttt

SEQ ID NO: 164737 - DNA, 20 bp, Artificial Sequence
  Synthetic oligonucleotide; GGG chr2 60509936 60509955 60509952 +
tcaccgagccacacattttg

SEQ ID NO: 164738 - DNA, 20 bp, Artificial Sequence
  Synthetic oligonucleotide; CAG chr2 60509981 60510000 60509997 +
tttcatacaacccatcccac

SEQ ID NO: 164739 - DNA, 20 bp, Artificial Sequence
  Synthetic oligonucleotide; CAG chr2 60509985 60510004 60510001 +
atacaacccatcccaccagt

SEQ ID NO: 164740 - DNA, 20 bp, Artificial Sequence
  Synthetic oligonucleotide; CGG chr2 60509998 60510017 60510014 +
caccagtcagcaaatcctgc

SEQ ID NO: 164741 - DNA, 20 bp, Artificial Sequence
  Synthetic oligonucleotide; AAG chr2 60510012 60510031 60510028 +
tcctgccggttttcccttcg

SEQ ID NO: 164742 - DNA, 20 bp, Artificial Sequence
  Synthetic oligonucleotide; CAG chr2 60510021 60510040 60510037 +
ttttcccttcgaagtatgtc

SEQ ID NO: 164743 - DNA, 20 bp, Artificial Sequence
  Synthetic oligonucleotide; CAG chr2 60510028 60510047 60510044 +
ttcgaagtatgtccagaatc

SEQ ID NO: 164744 - DNA, 20 bp, Artificial Sequence
  Synthetic oligonucleotide; TGG chr2 60510055 60510074 60510071 +
ttctcacgtccccaccaccc

SEQ ID NO: 164745 - DNA, 20 bp, Artificial Sequence
  Synthetic oligonucleotide; GAG chr2 60510123 60510142 60510139 +
tgcctcactttcccatgctt

SEQ ID NO: 164746 - DNA, 20 bp, Artificial Sequence
  Synthetic oligonucleotide; CGG chr2 60510136 60510155 60510152 +
catgcttgagtctcaaaatg

SEQ ID NO: 164747 - DNA, 20 bp, Artificial Sequence
  Synthetic oligonucleotide; AAG chr2 60510142 60510161 60510158 +
tgagtctcaaaatgcggccc

SEQ ID NO: 164748 - DNA, 20 bp, Artificial Sequence
  Synthetic oligonucleotide; GAG chr2 60510144 60510163 60510160 +
agtctcaaaatgcggcccaa

SEQ ID NO: 164749 - DNA, 20 bp, Artificial Sequence
  Synthetic oligonucleotide; TGG chr2 60510153 60510172 60510169 +
atgcggcccaagagactctc

SEQ ID NO: 164750 - DNA, 20 bp, Artificial Sequence
  Synthetic oligonucleotide; AAG chr2 60510156 60510175 60510172 +
cggcccaagagactctctgg

SEQ ID NO: 164751 - DNA, 20 bp, Artificial Sequence
  Synthetic oligonucleotide; AAG chr2 60510162 60510181 60510178 +
aagagactctctggaagcgc

SEQ ID NO: 164752 - DNA, 20 bp, Artificial Sequence
  Synthetic oligonucleotide; CAG chr2 60510184 60510203 60510200 +
gtcatatgacatcactcctc

SEQ ID NO: 164753 - DNA, 20 bp, Artificial Sequence
  Synthetic oligonucleotide; TGG chr2 60510187 60510206 60510203 +
atatgacatcactcctccag

SEQ ID NO: 164754 - DNA, 20 bp, Artificial Sequence
  Synthetic oligonucleotide; TGG chr2 60510203 60510222 60510219 +
ccagtggcttccatctccct

SEQ ID NO: 164755 - DNA, 20 bp, Artificial Sequence
  Synthetic oligonucleotide; GAG chr2 60510205 60510224 60510221 +
agtggcttccatctcccttg

SEQ ID NO: 164756 - DNA, 20 bp, Artificial Sequence
  Synthetic oligonucleotide; CAG chr2 60510209 60510228 60510225 +
gcttccatctcccttggagt

SEQ ID NO: 164757 - DNA, 20 bp, Artificial Sequence
  Synthetic oligonucleotide; GAG chr2 60510211 60510230 60510227 +
ttccatctcccttggagtca

SEQ ID NO: 164758 - DNA, 20 bp, Artificial Sequence
  Synthetic oligonucleotide; AAG chr2 60510240 60510259 60510256 +
atccctgctctacgtccttc

SEQ ID NO: 164759 - DNA, 20 bp, Artificial Sequence
  Synthetic oligonucleotide; AGG chr2 60510241 60510260 60510257 +
tccctgctctacgtccttca

SEQ ID NO: 164760 - DNA, 20 bp, Artificial Sequence
  Synthetic oligonucleotide; GAG chr2 60510243 60510262 60510259 +
cctgctctacgtccttcaag

SEQ ID NO: 164761 - DNA, 20 bp, Artificial Sequence
  Synthetic oligonucleotide; CAG chr2 60510247 60510266 60510263 +
ctctacgtccttcaaggagc

SEQ ID NO: 164762 - DNA, 20 bp, Artificial Sequence
  Synthetic oligonucleotide; TGG chr2 60510251 60510270 60510267 +
acgtccttcaaggagccagc

SEQ ID NO: 164763 - DNA, 20 bp, Artificial Sequence
  Synthetic oligonucleotide; CAG chr2 60510295 60510314 60510311 +
cactctttccactctgacct

SEQ ID NO: 164764 - DNA, 20 bp, Artificial Sequence
  Synthetic oligonucleotide; AGG chr2 60510296 60510315 60510312 +
actctttccactctgacctc

SEQ ID NO: 164765 - DNA, 20 bp, Artificial Sequence
  Synthetic oligonucleotide; GGG chr2 60510297 60510316 60510313 +
ctctttccactctgacctca

SEQ ID NO: 164766 - DNA, 20 bp, Artificial Sequence
  Synthetic oligonucleotide; CAG chr2 60510316 60510335 60510332 +
agggccccttgctcctcctc

SEQ ID NO: 164767 - DNA, 20 bp, Artificial Sequence
  Synthetic oligonucleotide; TAG chr2 60510319 60510338 60510335 +
gccccttgctcctcctccag

SEQ ID NO: 164768 - DNA, 20 bp, Artificial Sequence
  Synthetic oligonucleotide; CAG chr2 60510323 60510342 60510339 +
cttgctcctcctccagtagc

SEQ ID NO: 164769 - DNA, 20 bp, Artificial Sequence
  Synthetic oligonucleotide; AGG chr2 60510324 60510343 60510340 +
ttgctcctcctccagtagcc

SEQ ID NO: 164770 - DNA, 20 bp, Artificial Sequence
  Synthetic oligonucleotide; AAG chr2 60510339 60510358 60510355 +
tagccaggcgtattacacac

SEQ ID NO: 164771 - DNA, 20 bp, Artificial Sequence
  Synthetic oligonucleotide; AGG chr2 60510340 60510359 60510356 +
agccaggcgtattacacaca

SEQ ID NO: 164772 - DNA, 20 bp, Artificial Sequence
  Synthetic oligonucleotide; TGG chr2 60510367 60510386 60510383 +
tgctctctacacactcttcc

SEQ ID NO: 164773 - DNA, 20 bp, Artificial Sequence
  Synthetic oligonucleotide; TGG chr2 60510392 60510411 60510408 +
ccatcttctcaaaattctca

SEQ ID NO: 164774 - DNA, 20 bp, Artificial Sequence
  Synthetic oligonucleotide; TGG chr2 60510413 60510432 60510429 +
ggccaacttcctcacctctt

SEQ ID NO: 164775 - DNA, 20 bp, Artificial Sequence
  Synthetic oligonucleotide; GAG chr2 60510415 60510434 60510431 +
ccaacttcctcacctctttg

SEQ ID NO: 164776 - DNA, 20 bp, Artificial Sequence
  Synthetic oligonucleotide; TGG chr2 60510432 60510451 60510448 +
ttggagcctttgcttctcat

SEQ ID NO: 164777 - DNA, 20 bp, Artificial Sequence
  Synthetic oligonucleotide; GGG chr2 60510433 60510452 60510449 +
tggagcctttgcttctcatt

SEQ ID NO: 164778 - DNA, 20 bp, Artificial Sequence
  Synthetic oligonucleotide; AAG chr2 60510459 60510478 60510475 +
tccctaattatcctatttaa

SEQ ID NO: 164779 - DNA, 20 bp, Artificial Sequence
  Synthetic oligonucleotide; TGG chr2 60510464 60510483 60510480 +
aattatcctatttaaaagcc

SEQ ID NO: 164780 - DNA, 20 bp, Artificial Sequence
  Synthetic oligonucleotide; CAG chr2 60510510 60510529 60510526 +
ttccccaccttattttcgtg

SEQ ID NO: 164781 - DNA, 20 bp, Artificial Sequence
  Synthetic oligonucleotide; AGG chr2 60510511 60510530 60510527 +
tccccaccttattttcgtgc

SEQ ID NO: 164782 - DNA, 20 bp, Artificial Sequence
  Synthetic oligonucleotide; CAG chr2 60510514 60510533 60510530 +
ccaccttattttcgtgcagg

SEQ ID NO: 164783 - DNA, 20 bp, Artificial Sequence
  Synthetic oligonucleotide; TGG chr2 60510558 60510577 60510574 +
tatataattcacatatttat

SEQ ID NO: 164784 - DNA, 20 bp, Artificial Sequence
  Synthetic oligonucleotide; CAG chr2 60510580 60510599 60510596 +
gtgcatcttctgtctctccc

SEQ ID NO: 164785 - DNA, 20 bp, Artificial Sequence
  Synthetic oligonucleotide; TAG chr2 60510584 60510603 60510600 +
atcttctgtctctccccagc

SEQ ID NO: 164786 - DNA, 20 bp, Artificial Sequence
  Synthetic oligonucleotide; AAG chr2 60510588 60510607 60510604 +
tctgtctctccccagctaga

SEQ ID NO: 164787 - DNA, 20 bp, Artificial Sequence
  Synthetic oligonucleotide; AGG chr2 60510589 60510608 60510605 +
ctgtctctccccagctagaa

SEQ ID NO: 164788 - DNA, 20 bp, Artificial Sequence
  Synthetic oligonucleotide; GGG chr2 60510590 60510609 60510606 +
tgtctctccccagctagaaa

SEQ ID NO: 164789 - DNA, 20 bp, Artificial Sequence
  Synthetic oligonucleotide; GGG chr2 60510591 60510610 60510607 +
gtctctccccagctagaaag

SEQ ID NO: 164790 - DNA, 20 bp, Artificial Sequence
  Synthetic oligonucleotide; GGG chr2 60510592 60510611 60510608 +
tctctccccagctagaaagg

SEQ ID NO: 164791 - DNA, 20 bp, Artificial Sequence
  Synthetic oligonucleotide; AAG chr2 60510601 60510620 60510617 +
agctagaaagggggtgccac

SEQ ID NO: 164792 - DNA, 20 bp, Artificial Sequence
  Synthetic oligonucleotide; GAG chr2 60510603 60510622 60510619 +
ctagaaagggggtgccacaa

SEQ ID NO: 164793 - DNA, 20 bp, Artificial Sequence
  Synthetic oligonucleotide; CAG chr2 60510606 60510625 60510622 +
gaaagggggtgccacaagag

SEQ ID NO: 164794 - DNA, 20 bp, Artificial Sequence
  Synthetic oligonucleotide; AGG chr2 60510607 60510626 60510623 +
aaagggggtgccacaagagc

SEQ ID NO: 164795 - DNA, 20 bp, Artificial Sequence
  Synthetic oligonucleotide; GGG chr2 60510608 60510627 60510624 +
aagggggtgccacaagagca

SEQ ID NO: 164796 - DNA, 20 bp, Artificial Sequence
  Synthetic oligonucleotide; GAG chr2 60510610 60510629 60510626 +
gggggtgccacaagagcagg

SEQ ID NO: 164797 - DNA, 20 bp, Artificial Sequence
  Synthetic oligonucleotide; AAG chr2 60510618 60510637 60510634 +
cacaagagcagggagttttt

SEQ ID NO: 164798 - DNA, 20 bp, Artificial Sequence
  Synthetic oligonucleotide; AGG chr2 60510619 60510638 60510635 +
acaagagcagggagttttta

SEQ ID NO: 164799 - DNA, 20 bp, Artificial Sequence
  Synthetic oligonucleotide; AAG chr2 60510640 60510659 60510656 +
ggctttctatgcccaacacc

SEQ ID NO: 164800 - DNA, 20 bp, Artificial Sequence
  Synthetic oligonucleotide; CAG chr2 60510652 60510671 60510668 +
ccaacaccaagaaccgttcc

SEQ ID NO: 164801 - DNA, 20 bp, Artificial Sequence
  Synthetic oligonucleotide; TGG chr2 60510659 60510678 60510675 +
caagaaccgttcccagcatg

SEQ ID NO: 164802 - DNA, 20 bp, Artificial Sequence
  Synthetic oligonucleotide; CAG chr2 60510662 60510681 60510678 +
gaaccgttcccagcatgtgg

SEQ ID NO: 164803 - DNA, 20 bp, Artificial Sequence
  Synthetic oligonucleotide; AGG chr2 60510663 60510682 60510679 +
aaccgttcccagcatgtggc

SEQ ID NO: 164804 - DNA, 20 bp, Artificial Sequence
  Synthetic oligonucleotide; GAG chr2 60510694 60510713 60510710 +
atatttgttgaaaaatgaat

SEQ ID NO: 164805 - DNA, 20 bp, Artificial Sequence
  Synthetic oligonucleotide; CAG chr2 60510721 60510740 60510737 +
ccttcacaattccaaactgc

SEQ ID NO: 164806 - DNA, 20 bp, Artificial Sequence
  Synthetic oligonucleotide; AGG chr2 60510722 60510741 60510738 +
cttcacaattccaaactgcc

SEQ ID NO: 164807 - DNA, 20 bp, Artificial Sequence
  Synthetic oligonucleotide; GAG chr2 60510724 60510743 60510740 +
tcacaattccaaactgccag

SEQ ID NO: 164808 - DNA, 20 bp, Artificial Sequence
  Synthetic oligonucleotide; AGG chr2 60510725 60510744 60510741 +
cacaattccaaactgccagg

SEQ ID NO: 164809 - DNA, 20 bp, Artificial Sequence
  Synthetic oligonucleotide; CAG chr2 60510756 60510775 60510772 +
tgccatatctataaaactgt

SEQ ID NO: 164810 - DNA, 20 bp, Artificial Sequence
  Synthetic oligonucleotide; AGG chr2 60510757 60510776 60510773 +
gccatatctataaaactgtc

SEQ ID NO: 164811 - DNA, 20 bp, Artificial Sequence
  Synthetic oligonucleotide; CAG chr2 60510760 60510779 60510776 +
atatctataaaactgtcagg

SEQ ID NO: 164812 - DNA, 20 bp, Artificial Sequence
  Synthetic oligonucleotide; TGG chr2 60510770 60510789 60510786 +
aactgtcaggcagcccaacc

SEQ ID NO: 164813 - DNA, 20 bp, Artificial Sequence
  Synthetic oligonucleotide; GGG chr2 60510771 60510790 60510787 +
actgtcaggcagcccaacct

SEQ ID NO: 164814 - DNA, 20 bp, Artificial Sequence
  Synthetic oligonucleotide; GGG chr2 60510772 60510791 60510788 +
ctgtcaggcagcccaacctg

SEQ ID NO: 164815 - DNA, 20 bp, Artificial Sequence
  Synthetic oligonucleotide; GGG chr2 60510773 60510792 60510789 +
tgtcaggcagcccaacctgg

SEQ ID NO: 164816 - DNA, 20 bp, Artificial Sequence
  Synthetic oligonucleotide; TAG chr2 60510781 60510800 60510797 +
agcccaacctgggggcactt

SEQ ID NO: 164817 - DNA, 20 bp, Artificial Sequence
  Synthetic oligonucleotide; TGG chr2 60510787 60510806 60510803 +
acctgggggcactttagctt

SEQ ID NO: 164818 - DNA, 20 bp, Artificial Sequence
  Synthetic oligonucleotide; TGG chr2 60510794 60510813 60510810 +
ggcactttagctttggatct

SEQ ID NO: 164819 - DNA, 20 bp, Artificial Sequence
  Synthetic oligonucleotide; GGG chr2 60510795 60510814 60510811 +
gcactttagctttggatctt

SEQ ID NO: 164820 - DNA, 20 bp, Artificial Sequence
  Synthetic oligonucleotide; GAG chr2 60510801 60510820 60510817 +
tagctttggatcttgggttt

SEQ ID NO: 164821 - DNA, 20 bp, Artificial Sequence
  Synthetic oligonucleotide; CAG chr2 60510805 60510824 60510821 +
tttggatcttgggtttgagc

SEQ ID NO: 164822 - DNA, 20 bp, Artificial Sequence
  Synthetic oligonucleotide; CAG chr2 60510823 60510842 60510839 +
gccagattccattttcccca

SEQ ID NO: 164823 - DNA, 20 bp, Artificial Sequence
  Synthetic oligonucleotide; AGG chr2 60510824 60510843 60510840 +
ccagattccattttccccac

SEQ ID NO: 164824 - DNA, 20 bp, Artificial Sequence
  Synthetic oligonucleotide; GAG chr2 60510831 60510850 60510847 +
ccattttccccacaggccct

SEQ ID NO: 164825 - DNA, 20 bp, Artificial Sequence
  Synthetic oligonucleotide; CAG chr2 60510839 60510858 60510855 +
cccacaggccctgagaccca

SEQ ID NO: 164826 - DNA, 20 bp, Artificial Sequence
  Synthetic oligonucleotide; AGG chr2 60510840 60510859 60510856 +
ccacaggccctgagacccac

SEQ ID NO: 164827 - DNA, 20 bp, Artificial Sequence
  Synthetic oligonucleotide; GGG chr2 60510841 60510860 60510857 +
cacaggccctgagacccaca

SEQ ID NO: 164828 - DNA, 20 bp, Artificial Sequence
  Synthetic oligonucleotide; AAG chr2 60510844 60510863 60510860 +
aggccctgagacccacaggg

SEQ ID NO: 164829 - DNA, 20 bp, Artificial Sequence
  Synthetic oligonucleotide; GAG chr2 60510846 60510865 60510862 +
gccctgagacccacagggaa

SEQ ID NO: 164830 - DNA, 20 bp, Artificial Sequence
  Synthetic oligonucleotide; TGG chr2 60510869 60510888 60510885 +
cttttgcattataatgtaaa

SEQ ID NO: 164831 - DNA, 20 bp, Artificial Sequence
  Synthetic oligonucleotide; GAG chr2 60510871 60510890 60510887 +
tttgcattataatgtaaatg

SEQ ID NO: 164832 - DNA, 20 bp, Artificial Sequence
  Synthetic oligonucleotide; AGG chr2 60510872 60510891 60510888 +
ttgcattataatgtaaatgg

SEQ ID NO: 164833 - DNA, 20 bp, Artificial Sequence
  Synthetic oligonucleotide; GGG chr2 60510873 60510892 60510889 +
tgcattataatgtaaatgga

SEQ ID NO: 164834 - DNA, 20 bp, Artificial Sequence
  Synthetic oligonucleotide; GGG chr2 60510874 60510893 60510890 +
gcattataatgtaaatggag

SEQ ID NO: 164835 - DNA, 20 bp, Artificial Sequence
  Synthetic oligonucleotide; GAG chr2 60510879 60510898 60510895 +
ataatgtaaatggaggggtt

SEQ ID NO: 164836 - DNA, 20 bp, Artificial Sequence
  Synthetic oligonucleotide; TGG chr2 60510883 60510902 60510899 +
tgtaaatggaggggttgagc

SEQ ID NO: 164837 - DNA, 20 bp, Artificial Sequence
  Synthetic oligonucleotide; TGG chr2 60510888 60510907 60510904 +
atggaggggttgagctggtt

SEQ ID NO: 164838 - DNA, 20 bp, Artificial Sequence
  Synthetic oligonucleotide; GGG chr2 60510889 60510908 60510905 +
tggaggggttgagctggttt

SEQ ID NO: 164839 - DNA, 20 bp, Artificial Sequence
  Synthetic oligonucleotide; GGG chr2 60510890 60510909 60510906 +
ggaggggttgagctggtttg

SEQ ID NO: 164840 - DNA, 20 bp, Artificial Sequence
  Synthetic oligonucleotide; GGG chr2 60510891 60510910 60510907 +
gaggggttgagctggtttgg

SEQ ID NO: 164841 - DNA, 20 bp, Artificial Sequence
  Synthetic oligonucleotide; CAG chr2 60510903 60510922 60510919 +
tggtttgggggaacccttga

SEQ ID NO: 164842 - DNA, 20 bp, Artificial Sequence
  Synthetic oligonucleotide; AGG chr2 60510904 60510923 60510920 +
ggtttgggggaacccttgac

SEQ ID NO: 164843 - DNA, 20 bp, Artificial Sequence
  Synthetic oligonucleotide; GAG chr2 60510906 60510925 60510922 +
tttgggggaacccttgacag

SEQ ID NO: 164844 - DNA, 20 bp, Artificial Sequence
  Synthetic oligonucleotide; CAG chr2 60510910 60510929 60510926 +
ggggaacccttgacaggagc

SEQ ID NO: 164845 - DNA, 20 bp, Artificial Sequence
  Synthetic oligonucleotide; AAG chr2 60510927 60510946 60510943 +
agccagttaaaaccaaacga

SEQ ID NO: 164846 - DNA, 20 bp, Artificial Sequence
  Synthetic oligonucleotide; AAG chr2 60510938 60510957 60510954 +
accaaacgaaagtctttcct

SEQ ID NO: 164847 - DNA, 20 bp, Artificial Sequence
  Synthetic oligonucleotide; AGG chr2 60510939 60510958 60510955 +
ccaaacgaaagtctttccta

SEQ ID NO: 164848 - DNA, 20 bp, Artificial Sequence
  Synthetic oligonucleotide; TAG chr2 60510944 60510963 60510960 +
cgaaagtctttcctaaggct

SEQ ID NO: 164849 - DNA, 20 bp, Artificial Sequence
  Synthetic oligonucleotide; AGG chr2 60510945 60510964 60510961 +
gaaagtctttcctaaggctt

SEQ ID NO: 164850 - DNA, 20 bp, Artificial Sequence
  Synthetic oligonucleotide; TGG chr2 60510948 60510967 60510964 +
agtctttcctaaggcttagg

SEQ ID NO: 164851 - DNA, 20 bp, Artificial Sequence
  Synthetic oligonucleotide; GAG chr2 60510950 60510969 60510966 +
tctttcctaaggcttaggtg

SEQ ID NO: 164852 - DNA, 20 bp, Artificial Sequence
  Synthetic oligonucleotide; TAG chr2 60510957 60510976 60510973 +
taaggcttaggtggagcctc

SEQ ID NO: 164853 - DNA, 20 bp, Artificial Sequence
  Synthetic oligonucleotide; AAG chr2 60510961 60510980 60510977 +
gcttaggtggagcctctaga

SEQ ID NO: 164854 - DNA, 20 bp, Artificial Sequence
  Synthetic oligonucleotide; GAG chr2 60510963 60510982 60510979 +
ttaggtggagcctctagaaa

SEQ ID NO: 164855 - DNA, 20 bp, Artificial Sequence
  Synthetic oligonucleotide; AGG chr2 60510964 60510983 60510980 +
taggtggagcctctagaaag

SEQ ID NO: 164856 - DNA, 20 bp, Artificial Sequence
  Synthetic oligonucleotide; GGG chr2 60510965 60510984 60510981 +
aggtggagcctctagaaaga

SEQ ID NO: 164857 - DNA, 20 bp, Artificial Sequence
  Synthetic oligonucleotide; GGG chr2 60510966 60510985 60510982 +
ggtggagcctctagaaagag

SEQ ID NO: 164858 - DNA, 20 bp, Artificial Sequence
  Synthetic oligonucleotide; GAG chr2 60510971 60510990 60510987 +
agcctctagaaagaggggct

SEQ ID NO: 164859 - DNA, 20 bp, Artificial Sequence
  Synthetic oligonucleotide; GAG chr2 60510973 60510992 60510989 +
cctctagaaagaggggctga

SEQ ID NO: 164860 - DNA, 20 bp, Artificial Sequence
  Synthetic oligonucleotide; TGG chr2 60510978 60510997 60510994 +
agaaagaggggctgagagcc

SEQ ID NO: 164861 - DNA, 20 bp, Artificial Sequence
  Synthetic oligonucleotide; GGG chr2 60510979 60510998 60510995 +
gaaagaggggctgagagcct

SEQ ID NO: 164862 - DNA, 20 bp, Artificial Sequence
  Synthetic oligonucleotide; GGG chr2 60510980 60510999 60510996 +
aaagaggggctgagagcctg

SEQ ID NO: 164863 - DNA, 20 bp, Artificial Sequence
  Synthetic oligonucleotide; AAG chr2 60510983 60511002 60510999 +
gaggggctgagagcctgggg

SEQ ID NO: 164864 - DNA, 20 bp, Artificial Sequence
  Synthetic oligonucleotide; GAG chr2 60510985 60511004 60511001 +
ggggctgagagcctggggaa

SEQ ID NO: 164865 - DNA, 20 bp, Artificial Sequence
  Synthetic oligonucleotide; CAG chr2 60510996 60511015 60511012 +
cctggggaagagccaaccac

SEQ ID NO: 164866 - DNA, 20 bp, Artificial Sequence
  Synthetic oligonucleotide; CAG chr2 60510999 60511018 60511015 +
ggggaagagccaaccaccag

SEQ ID NO: 164867 - DNA, 20 bp, Artificial Sequence
  Synthetic oligonucleotide; CAG chr2 60511007 60511026 60511023 +
gccaaccaccagcagttcct

SEQ ID NO: 164868 - DNA, 20 bp, Artificial Sequence
  Synthetic oligonucleotide; GAG chr2 60511009 60511028 60511025 +
caaccaccagcagttcctca

SEQ ID NO: 164869 - DNA, 20 bp, Artificial Sequence
  Synthetic oligonucleotide; TGG chr2 60511022 60511041 60511038 +
ttcctcagagttcttcccac

SEQ ID NO: 164870 - DNA, 20 bp, Artificial Sequence
  Synthetic oligonucleotide; GGG chr2 60511023 60511042 60511039 +
tcctcagagttcttcccact

SEQ ID NO: 164871 - DNA, 20 bp, Artificial Sequence
  Synthetic oligonucleotide; GGG chr2 60511024 60511043 60511040 +
cctcagagttcttcccactg

SEQ ID NO: 164872 - DNA, 20 bp, Artificial Sequence
  Synthetic oligonucleotide; CAG chr2 60511032 60511051 60511048 +
ttcttcccactggggctgtg

SEQ ID NO: 164873 - DNA, 20 bp, Artificial Sequence
  Synthetic oligonucleotide; CAG chr2 60511048 60511067 60511064 +
tgtgcagccaactgcgtttc

SEQ ID NO: 164874 - DNA, 20 bp, Artificial Sequence
  Synthetic oligonucleotide; AGG chr2 60511049 60511068 60511065 +
gtgcagccaactgcgtttcc

SEQ ID NO: 164875 - DNA, 20 bp, Artificial Sequence
  Synthetic oligonucleotide; GAG chr2 60511058 60511077 60511074 +
actgcgtttccaggcacact

SEQ ID NO: 164876 - DNA, 20 bp, Artificial Sequence
  Synthetic oligonucleotide; CAG chr2 60511088 60511107 60511104 +
tactcatatccaatactgtg

SEQ ID NO: 164877 - DNA, 20 bp, Artificial Sequence
  Synthetic oligonucleotide; AGG chr2 60511089 60511108 60511105 +
actcatatccaatactgtgc

SEQ ID NO: 164878 - DNA, 20 bp, Artificial Sequence
  Synthetic oligonucleotide; GGG chr2 60511090 60511109 60511106 +
ctcatatccaatactgtgca

SEQ ID NO: 164879 - DNA, 20 bp, Artificial Sequence
  Synthetic oligonucleotide; GGG chr2 60511091 60511110 60511107 +
tcatatccaatactgtgcag

SEQ ID NO: 164880 - DNA, 20 bp, Artificial Sequence
  Synthetic oligonucleotide; TGG chr2 60511097 60511116 60511113 +
ccaatactgtgcaggggcac

SEQ ID NO: 164881 - DNA, 20 bp, Artificial Sequence
  Synthetic oligonucleotide; CAG chr2 60511101 60511120 60511117 +
tactgtgcaggggcactggc

SEQ ID NO: 164882 - DNA, 20 bp, Artificial Sequence
  Synthetic oligonucleotide; AGG chr2 60511102 60511121 60511118 +
actgtgcaggggcactggcc

SEQ ID NO: 164883 - DNA, 20 bp, Artificial Sequence
  Synthetic oligonucleotide; CAG chr2 60511114 60511133 60511130 +
cactggccaggcacaaatcc

SEQ ID NO: 164884 - DNA, 20 bp, Artificial Sequence
  Synthetic oligonucleotide; CGG chr2 60511126 60511145 60511142 +
acaaatcccagctgcctcca

SEQ ID NO: 164885 - DNA, 20 bp, Artificial Sequence
  Synthetic oligonucleotide; CAG chr2 60511155 60511174 60511171 +
tctccctccattcttgcttt

SEQ ID NO: 164886 - DNA, 20 bp, Artificial Sequence
  Synthetic oligonucleotide; TGG chr2 60511172 60511191 60511188 +
tttcagattctccctcctcc

SEQ ID NO: 164887 - DNA, 20 bp, Artificial Sequence
  Synthetic oligonucleotide; CAG chr2 60511175 60511194 60511191 +
cagattctccctcctcctgg

SEQ ID NO: 164888 - DNA, 20 bp, Artificial Sequence
  Synthetic oligonucleotide; AGG chr2 60511176 60511195 60511192 +
agattctccctcctcctggc

SEQ ID NO: 164889 - DNA, 20 bp, Artificial Sequence
  Synthetic oligonucleotide; GGG chr2 60511177 60511196 60511193 +
gattctccctcctcctggca

SEQ ID NO: 164890 - DNA, 20 bp, Artificial Sequence
  Synthetic oligonucleotide; GGG chr2 60511178 60511197 60511194 +
attctccctcctcctggcag

SEQ ID NO: 164891 - DNA, 20 bp, Artificial Sequence
  Synthetic oligonucleotide; TGG chr2 60511184 60511203 60511200 +
cctcctcctggcaggggcac

SEQ ID NO: 164892 - DNA, 20 bp, Artificial Sequence
  Synthetic oligonucleotide; GGG chr2 60511185 60511204 60511201 +
ctcctcctggcaggggcact

SEQ ID NO: 164893 - DNA, 20 bp, Artificial Sequence
  Synthetic oligonucleotide; GGG chr2 60511186 60511205 60511202 +
tcctcctggcaggggcactg

SEQ ID NO: 164894 - DNA, 20 bp, Artificial Sequence
  Synthetic oligonucleotide; GAG chr2 60511188 60511207 60511204 +
ctcctggcaggggcactggg

SEQ ID NO: 164895 - DNA, 20 bp, Artificial Sequence
  Synthetic oligonucleotide; AGG chr2 60511189 60511208 60511205 +
tcctggcaggggcactgggg

SEQ ID NO: 164896 - DNA, 20 bp, Artificial Sequence
  Synthetic oligonucleotide; GGG chr2 60511190 60511209 60511206 +
cctggcaggggcactgggga

SEQ ID NO: 164897 - DNA, 20 bp, Artificial Sequence
  Synthetic oligonucleotide; CAG chr2 60511193 60511212 60511209 +
ggcaggggcactggggaggg

SEQ ID NO: 164898 - DNA, 20 bp, Artificial Sequence
  Synthetic oligonucleotide; AGG chr2 60511194 60511213 60511210 +
gcaggggcactggggagggc

SEQ ID NO: 164899 - DNA, 20 bp, Artificial Sequence
  Synthetic oligonucleotide; GAG chr2 60511196 60511215 60511212 +
aggggcactggggagggcag

SEQ ID NO: 164900 - DNA, 20 bp, Artificial Sequence
  Synthetic oligonucleotide; GAG chr2 60511198 60511217 60511214 +
gggcactggggagggcagga

SEQ ID NO: 164901 - DNA, 20 bp, Artificial Sequence
  Synthetic oligonucleotide; AAG chr2 60511201 60511220 60511217 +
cactggggagggcaggagag

SEQ ID NO: 164902 - DNA, 20 bp, Artificial Sequence
  Synthetic oligonucleotide; AGG chr2 60511202 60511221 60511218 +
actggggagggcaggagaga

SEQ ID NO: 164903 - DNA, 20 bp, Artificial Sequence
  Synthetic oligonucleotide; GAG chr2 60511204 60511223 60511220 +
tggggagggcaggagagaag

SEQ ID NO: 164904 - DNA, 20 bp, Artificial Sequence
  Synthetic oligonucleotide; AGG chr2 60511205 60511224 60511221 +
ggggagggcaggagagaagg

SEQ ID NO: 164905 - DNA, 20 bp, Artificial Sequence
  Synthetic oligonucleotide; TGG chr2 60511211 60511230 60511227 +
ggcaggagagaaggaggcca

SEQ ID NO: 164906 - DNA, 20 bp, Artificial Sequence
  Synthetic oligonucleotide; AAG chr2 60511216 60511235 60511232 +
gagagaaggaggccatggca

SEQ ID NO: 164907 - DNA, 20 bp, Artificial Sequence
  Synthetic oligonucleotide; AGG chr2 60511217 60511236 60511233 +
agagaaggaggccatggcaa

SEQ ID NO: 164908 - DNA, 20 bp, Artificial Sequence
  Synthetic oligonucleotide; GGG chr2 60511218 60511237 60511234 +
gagaaggaggccatggcaaa

SEQ ID NO: 164909 - DNA, 20 bp, Artificial Sequence
  Synthetic oligonucleotide; GAG chr2 60511238 60511257 60511254 +
gggacaaatcccttctacct

SEQ ID NO: 164910 - DNA, 20 bp, Artificial Sequence
  Synthetic oligonucleotide; GAG chr2 60511240 60511259 60511256 +
gacaaatcccttctacctga

SEQ ID NO: 164911 - DNA, 20 bp, Artificial Sequence
  Synthetic oligonucleotide; CGG chr2 60511245 60511264 60511261 +
atcccttctacctgagagcc

SEQ ID NO: 164912 - DNA, 20 bp, Artificial Sequence
  Synthetic oligonucleotide; GGG chr2 60511246 60511265 60511262 +
tcccttctacctgagagccc

SEQ ID NO: 164913 - DNA, 20 bp, Artificial Sequence
  Synthetic oligonucleotide; CAG chr2 60511252 60511271 60511268 +
ctacctgagagcccgggatg

SEQ ID NO: 164914 - DNA, 20 bp, Artificial Sequence
  Synthetic oligonucleotide; CAG chr2 60511256 60511275 60511272 +
ctgagagcccgggatgcagc

SEQ ID NO: 164915 - DNA, 20 bp, Artificial Sequence
  Synthetic oligonucleotide; AAG chr2 60511261 60511280 60511277 +
agcccgggatgcagccagaa

SEQ ID NO: 164916 - DNA, 20 bp, Artificial Sequence
  Synthetic oligonucleotide; TAG chr2 60511285 60511304 60511301 +
taaaataccctttcccaccc

SEQ ID NO: 164917 - DNA, 20 bp, Artificial Sequence
  Synthetic oligonucleotide; CAG chr2 60511300 60511319 60511316 +
caccctagcatacaatttga

SEQ ID NO: 164918 - DNA, 20 bp, Artificial Sequence
  Synthetic oligonucleotide; AGG chr2 60511301 60511320 60511317 +
accctagcatacaatttgac

SEQ ID NO: 164919 - DNA, 20 bp, Artificial Sequence
  Synthetic oligonucleotide; AAG chr2 60511309 60511328 60511325 +
atacaatttgacaggtgaat

SEQ ID NO: 164920 - DNA, 20 bp, Artificial Sequence
  Synthetic oligonucleotide; CAG chr2 60511319 60511338 60511335 +
acaggtgaataagtgctccc

SEQ ID NO: 164921 - DNA, 20 bp, Artificial Sequence
  Synthetic oligonucleotide; TAG chr2 60511322 60511341 60511338 +
ggtgaataagtgctccccag

SEQ ID NO: 164922 - DNA, 20 bp, Artificial Sequence
  Synthetic oligonucleotide; AGG chr2 60511323 60511342 60511339 +
gtgaataagtgctccccagt

SEQ ID NO: 164923 - DNA, 20 bp, Artificial Sequence
  Synthetic oligonucleotide; AAG chr2 60511333 60511352 60511349 +
gctccccagtaggcaataac

SEQ ID NO: 164924 - DNA, 20 bp, Artificial Sequence
  Synthetic oligonucleotide; AGG chr2 60511334 60511353 60511350 +
ctccccagtaggcaataaca

SEQ ID NO: 164925 - DNA, 20 bp, Artificial Sequence
  Synthetic oligonucleotide; GAG chr2 60511336 60511355 60511352 +
ccccagtaggcaataacaag

SEQ ID NO: 164926 - DNA, 20 bp, Artificial Sequence
  Synthetic oligonucleotide; AAG chr2 60511339 60511358 60511355 +
cagtaggcaataacaaggag

SEQ ID NO: 164927 - DNA, 20 bp, Artificial Sequence
  Synthetic oligonucleotide; AAG chr2 60511352 60511371 60511368 +
caaggagaagtctgaattaa

SEQ ID NO: 164928 - DNA, 20 bp, Artificial Sequence
  Synthetic oligonucleotide; TGG chr2 60511367 60511386 60511383 +
attaaaagaactcgccaatt

SEQ ID NO: 164929 - DNA, 20 bp, Artificial Sequence
  Synthetic oligonucleotide; GGG chr2 60511368 60511387 60511384 +
ttaaaagaactcgccaattt

SEQ ID NO: 164930 - DNA, 20 bp, Artificial Sequence
  Synthetic oligonucleotide; AAG chr2 60511371 60511390 60511387 +
aaagaactcgccaatttggg

SEQ ID NO: 164931 - DNA, 20 bp, Artificial Sequence
  Synthetic oligonucleotide; AAG chr2 60511425 60511444 60511441 +
cgttaccaataaaacactta

SEQ ID NO: 164932 - DNA, 20 bp, Artificial Sequence
  Synthetic oligonucleotide; CAG chr2 60511440 60511459 60511456 +
acttaaagatgctattcatg

SEQ ID NO: 164933 - DNA, 20 bp, Artificial Sequence
  Synthetic oligonucleotide; AAG chr2 60511448 60511467 60511464 +
atgctattcatgcagacata

SEQ ID NO: 164934 - DNA, 20 bp, Artificial Sequence
  Synthetic oligonucleotide; TGG chr2 60511457 60511476 60511473 +
atgcagacataaagtgctaa

SEQ ID NO: 164935 - DNA, 20 bp, Artificial Sequence
  Synthetic oligonucleotide; CAG chr2 60511509 60511528 60511525 +
tatttccctctgatttctga

SEQ ID NO: 164936 - DNA, 20 bp, Artificial Sequence
  Synthetic oligonucleotide; TGG chr2 60511537 60511556 60511553 +
tttttttccttcttcttttt

SEQ ID NO: 164937 - DNA, 20 bp, Artificial Sequence
  Synthetic oligonucleotide; GGG chr2 60511538 60511557 60511554 +
ttttttccttcttctttttt

SEQ ID NO: 164938 - DNA, 20 bp, Artificial Sequence
  Synthetic oligonucleotide; GGG chr2 60511539 60511558 60511555 +
tttttccttcttcttttttg

SEQ ID NO: 164939 - DNA, 20 bp, Artificial Sequence
  Synthetic oligonucleotide; AAG chr2 60511549 60511568 60511565 +
ttcttttttggggctatttt

SEQ ID NO: 164940 - DNA, 20 bp, Artificial Sequence
  Synthetic oligonucleotide; CAG chr2 60511556 60511575 60511572 +
ttggggctattttaagttaa

SEQ ID NO: 164941 - DNA, 20 bp, Artificial Sequence
  Synthetic oligonucleotide; GAG chr2 60511558 60511577 60511574 +
ggggctattttaagttaaca

SEQ ID NO: 164942 - DNA, 20 bp, Artificial Sequence
  Synthetic oligonucleotide; AAG chr2 60511582 60511601 60511598 +
gctaatctgattcaaaactg

SEQ ID NO: 164943 - DNA, 20 bp, Artificial Sequence
  Synthetic oligonucleotide; AAG chr2 60511590 60511609 60511606 +
gattcaaaactgaagactca

SEQ ID NO: 164944 - DNA, 20 bp, Artificial Sequence
  Synthetic oligonucleotide; GAG chr2 60511592 60511611 60511608 +
ttcaaaactgaagactcaaa

SEQ ID NO: 164945 - DNA, 20 bp, Artificial Sequence
  Synthetic oligonucleotide; CAG chr2 60511673 60511692 60511689 +
tcatgaaaacaatcatcact

SEQ ID NO: 164946 - DNA, 20 bp, Artificial Sequence
  Synthetic oligonucleotide; AAG chr2 60511690 60511709 60511706 +
actcagtcaacgtattttcc

SEQ ID NO: 164947 - DNA, 20 bp, Artificial Sequence
  Synthetic oligonucleotide; CAG chr2 60511696 60511715 60511712 +
tcaacgtattttccaagcca

SEQ ID NO: 164948 - DNA, 20 bp, Artificial Sequence
  Synthetic oligonucleotide; AAG chr2 60511704 60511723 60511720 +
ttttccaagccacagaaaat

SEQ ID NO: 164949 - DNA, 20 bp, Artificial Sequence
  Synthetic oligonucleotide; AAG chr2 60511714 60511733 60511730 +
cacagaaaataagttgaaat

SEQ ID NO: 164950 - DNA, 20 bp, Artificial Sequence
  Synthetic oligonucleotide; CAG chr2 60511726 60511745 60511742 +
gttgaaataagttgaaaatg

SEQ ID NO: 164951 - DNA, 20 bp, Artificial Sequence
  Synthetic oligonucleotide; TAG chr2 60511729 60511748 60511745 +
gaaataagttgaaaatgcag

SEQ ID NO: 164952 - DNA, 20 bp, Artificial Sequence
  Synthetic oligonucleotide; AGG chr2 60511730 60511749 60511746 +
aaataagttgaaaatgcagt

SEQ ID NO: 164953 - DNA, 20 bp, Artificial Sequence
  Synthetic oligonucleotide; AAG chr2 60511735 60511754 60511751 +
agttgaaaatgcagtaggca

SEQ ID NO: 164954 - DNA, 20 bp, Artificial Sequence
  Synthetic oligonucleotide; AAG chr2 60511738 60511757 60511754 +
tgaaaatgcagtaggcaaag

SEQ ID NO: 164955 - DNA, 20 bp, Artificial Sequence
  Synthetic oligonucleotide; CAG chr2 60511741 60511760 60511757 +
aaatgcagtaggcaaagaag

SEQ ID NO: 164956 - DNA, 20 bp, Artificial Sequence
  Synthetic oligonucleotide; TAG chr2 60511745 60511764 60511761 +
gcagtaggcaaagaagcagc

SEQ ID NO: 164957 - DNA, 20 bp, Artificial Sequence
  Synthetic oligonucleotide; AAG chr2 60511754 60511773 60511770 +
aaagaagcagctagtcatgt

SEQ ID NO: 164958 - DNA, 20 bp, Artificial Sequence
  Synthetic oligonucleotide; AAG chr2 60511762 60511781 60511778 +
agctagtcatgtaagacact

SEQ ID NO: 164959 - DNA, 20 bp, Artificial Sequence
  Synthetic oligonucleotide; AGG chr2 60511763 60511782 60511779 +
gctagtcatgtaagacacta

SEQ ID NO: 164960 - DNA, 20 bp, Artificial Sequence
  Synthetic oligonucleotide; GGG chr2 60511764 60511783 60511780 +
ctagtcatgtaagacactaa

SEQ ID NO: 164961 - DNA, 20 bp, Artificial Sequence
  Synthetic oligonucleotide; GGG chr2 60511765 60511784 60511781 +
tagtcatgtaagacactaag

SEQ ID NO: 164962 - DNA, 20 bp, Artificial Sequence
  Synthetic oligonucleotide; CAG chr2 60511768 60511787 60511784 +
tcatgtaagacactaagggg

SEQ ID NO: 164963 - DNA, 20 bp, Artificial Sequence
  Synthetic oligonucleotide; AGG chr2 60511769 60511788 60511785 +
catgtaagacactaaggggc

SEQ ID NO: 164964 - DNA, 20 bp, Artificial Sequence
  Synthetic oligonucleotide; GGG chr2 60511770 60511789 60511786 +
atgtaagacactaaggggca

SEQ ID NO: 164965 - DNA, 20 bp, Artificial Sequence
  Synthetic oligonucleotide; GGG chr2 60511771 60511790 60511787 +
tgtaagacactaaggggcag

SEQ ID NO: 164966 - DNA, 20 bp, Artificial Sequence
  Synthetic oligonucleotide; GAG chr2 60511773 60511792 60511789 +
taagacactaaggggcaggg

SEQ ID NO: 164967 - DNA, 20 bp, Artificial Sequence
  Synthetic oligonucleotide; AAG chr2 60511792 60511811 60511808 +
ggagtcattaattcttctcc

SEQ ID NO: 164968 - DNA, 20 bp, Artificial Sequence
  Synthetic oligonucleotide; AAG chr2 60511817 60511836 60511833 +
ttcaacactctgtttctatg

SEQ ID NO: 164969 - DNA, 20 bp, Artificial Sequence
  Synthetic oligonucleotide; AGG chr2 60511818 60511837 60511834 +
tcaacactctgtttctatga

SEQ ID NO: 164970 - DNA, 20 bp, Artificial Sequence
  Synthetic oligonucleotide; AAG chr2 60511822 60511841 60511838 +
cactctgtttctatgaaggc

SEQ ID NO: 164971 - DNA, 20 bp, Artificial Sequence
  Synthetic oligonucleotide; AGG chr2 60511823 60511842 60511839 +
actctgtttctatgaaggca

SEQ ID NO: 164972 - DNA, 20 bp, Artificial Sequence
  Synthetic oligonucleotide; GGG chr2 60511824 60511843 60511840 +
ctctgtttctatgaaggcaa

SEQ ID NO: 164973 - DNA, 20 bp, Artificial Sequence
  Synthetic oligonucleotide; TGG chr2 60511828 60511847 60511844 +
gtttctatgaaggcaagggt

SEQ ID NO: 164974 - DNA, 20 bp, Artificial Sequence
  Synthetic oligonucleotide; GAG chr2 60511830 60511849 60511846 +
ttctatgaaggcaagggttg

SEQ ID NO: 164975 - DNA, 20 bp, Artificial Sequence
  Synthetic oligonucleotide; AGG chr2 60511831 60511850 60511847 +
tctatgaaggcaagggttgg

SEQ ID NO: 164976 - DNA, 20 bp, Artificial Sequence
  Synthetic oligonucleotide; GGG chr2 60511832 60511851 60511848 +
ctatgaaggcaagggttgga

SEQ ID NO: 164977 - DNA, 20 bp, Artificial Sequence
  Synthetic oligonucleotide; GAG chr2 60511834 60511853 60511850 +
atgaaggcaagggttggagg

SEQ ID NO: 164978 - DNA, 20 bp, Artificial Sequence
  Synthetic oligonucleotide; CAG chr2 60511857 60511876 60511873 +
cttttttctttcaaataaat

SEQ ID NO: 164979 - DNA, 20 bp, Artificial Sequence
  Synthetic oligonucleotide; GAG chr2 60511869 60511888 60511885 +
aaataaatcagtaaaatgat

SEQ ID NO: 164980 - DNA, 20 bp, Artificial Sequence
  Synthetic oligonucleotide; AGG chr2 60511870 60511889 60511886 +
aataaatcagtaaaatgatg

SEQ ID NO: 164981 - DNA, 20 bp, Artificial Sequence
  Synthetic oligonucleotide; CAG chr2 60511891 60511910 60511907 +
ggtgcttcctctgctacgcc

SEQ ID NO: 164982 - DNA, 20 bp, Artificial Sequence
  Synthetic oligonucleotide; TGG chr2 60511894 60511913 60511910 +
gcttcctctgctacgcccag

SEQ ID NO: 164983 - DNA, 20 bp, Artificial Sequence
  Synthetic oligonucleotide; CAG chr2 60511899 60511918 60511915 +
ctctgctacgcccagtggcc

SEQ ID NO: 164984 - DNA, 20 bp, Artificial Sequence
  Synthetic oligonucleotide; AGG chr2 60511900 60511919 60511916 +
tctgctacgcccagtggccc

SEQ ID NO: 164985 - DNA, 20 bp, Artificial Sequence
  Synthetic oligonucleotide; AAG chr2 60511913 60511932 60511929 +
gtggcccaggcactctcact

SEQ ID NO: 164986 - DNA, 20 bp, Artificial Sequence
  Synthetic oligonucleotide; AGG chr2 60511914 60511933 60511930 +
tggcccaggcactctcacta

SEQ ID NO: 164987 - DNA, 20 bp, Artificial Sequence
  Synthetic oligonucleotide; CAG chr2 60511925 60511944 60511941 +
ctctcactaaggtatcctcc

SEQ ID NO: 164988 - DNA, 20 bp, Artificial Sequence
  Synthetic oligonucleotide; TAG chr2 60511933 60511952 60511949 +
aaggtatcctcccagcaatg

SEQ ID NO: 164989 - DNA, 20 bp, Artificial Sequence
  Synthetic oligonucleotide; AGG chr2 60511934 60511953 60511950 +
aggtatcctcccagcaatgt

SEQ ID NO: 164990 - DNA, 20 bp, Artificial Sequence
  Synthetic oligonucleotide; AAG chr2 60511943 60511962 60511959 +
cccagcaatgtaggtgttca

SEQ ID NO: 164991 - DNA, 20 bp, Artificial Sequence
  Synthetic oligonucleotide; AGG chr2 60511944 60511963 60511960 +
ccagcaatgtaggtgttcaa

SEQ ID NO: 164992 - DNA, 20 bp, Artificial Sequence
  Synthetic oligonucleotide; AAG chr2 60511950 60511969 60511966 +
atgtaggtgttcaaaggcaa

SEQ ID NO: 164993 - DNA, 20 bp, Artificial Sequence
  Synthetic oligonucleotide; AAG chr2 60511954 60511973 60511970 +
aggtgttcaaaggcaaaaga

SEQ ID NO: 164994 - DNA, 20 bp, Artificial Sequence
  Synthetic oligonucleotide; AGG chr2 60511955 60511974 60511971 +
ggtgttcaaaggcaaaagaa

SEQ ID NO: 164995 - DNA, 20 bp, Artificial Sequence
  Synthetic oligonucleotide; GGG chr2 60511956 60511975 60511972 +
gtgttcaaaggcaaaagaaa

SEQ ID NO: 164996 - DNA, 20 bp, Artificial Sequence
  Synthetic oligonucleotide; CAG chr2 60511962 60511981 60511978 +
aaaggcaaaagaaagggaac

SEQ ID NO: 164997 - DNA, 20 bp, Artificial Sequence
  Synthetic oligonucleotide; TGG chr2 60511969 60511988 60511985 +
aaagaaagggaaccagctca

SEQ ID NO: 164998 - DNA, 20 bp, Artificial Sequence
  Synthetic oligonucleotide; CGG chr2 60511985 60512004 60512001 +
ctcatggcgtaatacttgct

SEQ ID NO: 164999 - DNA, 20 bp, Artificial Sequence
  Synthetic oligonucleotide; AAG chr2 60511991 60512010 60512007 +
gcgtaatacttgctcggcca

SEQ ID NO: 165000 - DNA, 20 bp, Artificial Sequence
  Synthetic oligonucleotide; TAG chr2 60511997 60512016 60512013 +
tacttgctcggccaaagaca

SEQ ID NO: 165001 - DNA, 20 bp, Artificial Sequence
  Synthetic oligonucleotide; CAG chr2 60512010 60512029 60512026 +
aaagacatagtaacgcttcc

SEQ ID NO: 165002 - DNA, 20 bp, Artificial Sequence
  Synthetic oligonucleotide; AGG chr2 60512011 60512030 60512027 +
aagacatagtaacgcttccc

SEQ ID NO: 165003 - DNA, 20 bp, Artificial Sequence
  Synthetic oligonucleotide; AAG chr2 60512020 60512039 60512036 +
taacgcttcccaggaaatac

SEQ ID NO: 165004 - DNA, 20 bp, Artificial Sequence
  Synthetic oligonucleotide; CAG chr2 60512028 60512047 60512044 +
cccaggaaatacaagtgtca

SEQ ID NO: 165005 - DNA, 20 bp, Artificial Sequence
  Synthetic oligonucleotide; CAG chr2 60512054 60512073 60512070 +
ctccaaaatgaatatgtgtg

SEQ ID NO: 165006 - DNA, 20 bp, Artificial Sequence
  Synthetic oligonucleotide; TGG chr2 60512062 60512081 60512078 +
tgaatatgtgtgcagccacc

SEQ ID NO: 165007 - DNA, 20 bp, Artificial Sequence
  Synthetic oligonucleotide; GGG chr2 60512063 60512082 60512079 +
gaatatgtgtgcagccacct

SEQ ID NO: 165008 - DNA, 20 bp, Artificial Sequence
  Synthetic oligonucleotide; TGG chr2 60512089 60512108 60512105 +
gcaacttaattcaaacaact

SEQ ID NO: 165009 - DNA, 20 bp, Artificial Sequence
  Synthetic oligonucleotide; AAG chr2 60512092 60512111 60512108 +
acttaattcaaacaacttgg

SEQ ID NO: 165010 - DNA, 20 bp, Artificial Sequence
  Synthetic oligonucleotide; AGG chr2 60512093 60512112 60512109 +
cttaattcaaacaacttgga

SEQ ID NO: 165011 - DNA, 20 bp, Artificial Sequence
  Synthetic oligonucleotide; AAG chr2 60512098 60512117 60512114 +
ttcaaacaacttggaaggct

SEQ ID NO: 165012 - DNA, 20 bp, Artificial Sequence
  Synthetic oligonucleotide; AGG chr2 60512099 60512118 60512115 +
tcaaacaacttggaaggcta

SEQ ID NO: 165013 - DNA, 20 bp, Artificial Sequence
  Synthetic oligonucleotide; GAG chr2 60512101 60512120 60512117 +
aaacaacttggaaggctaag

SEQ ID NO: 165014 - DNA, 20 bp, Artificial Sequence
  Synthetic oligonucleotide; TGG chr2 60512107 60512126 60512123 +
cttggaaggctaaggagcac

SEQ ID NO: 165015 - DNA, 20 bp, Artificial Sequence
  Synthetic oligonucleotide; GAG chr2 60512109 60512128 60512125 +
tggaaggctaaggagcactg

SEQ ID NO: 165016 - DNA, 20 bp, Artificial Sequence
  Synthetic oligonucleotide; TGG chr2 60512113 60512132 60512129 +
aggctaaggagcactggagc

SEQ ID NO: 165017 - DNA, 20 bp, Artificial Sequence
  Synthetic oligonucleotide; GGG chr2 60512114 60512133 60512130 +
ggctaaggagcactggagct

SEQ ID NO: 165018 - DNA, 20 bp, Artificial Sequence
  Synthetic oligonucleotide; GGG chr2 60512115 60512134 60512131 +
gctaaggagcactggagctg

SEQ ID NO: 165019 - DNA, 20 bp, Artificial Sequence
  Synthetic oligonucleotide; GAG chr2 60512117 60512136 60512133 +
taaggagcactggagctggg

SEQ ID NO: 165020 - DNA, 20 bp, Artificial Sequence
  Synthetic oligonucleotide; CAG chr2 60512123 60512142 60512139 +
gcactggagctggggagctg

SEQ ID NO: 165021 - DNA, 20 bp, Artificial Sequence
  Synthetic oligonucleotide; TGG chr2 60512150 60512169 60512166 +
acccctgtgctcaccacccc

SEQ ID NO: 165022 - DNA, 20 bp, Artificial Sequence
  Synthetic oligonucleotide; GAG chr2 60512152 60512171 60512168 +
ccctgtgctcaccacccctg

SEQ ID NO: 165023 - DNA, 20 bp, Artificial Sequence
  Synthetic oligonucleotide; GAG chr2 60512154 60512173 60512170 +
ctgtgctcaccacccctgga

SEQ ID NO: 165024 - DNA, 20 bp, Artificial Sequence
  Synthetic oligonucleotide; CAG chr2 60512157 60512176 60512173 +
tgctcaccacccctggagag

SEQ ID NO: 165025 - DNA, 20 bp, Artificial Sequence
  Synthetic oligonucleotide; CAG chr2 60512161 60512180 60512177 +
caccacccctggagagcagt

SEQ ID NO: 165026 - DNA, 20 bp, Artificial Sequence
  Synthetic oligonucleotide; GAG chr2 60512163 60512182 60512179 +
ccacccctggagagcagtca

SEQ ID NO: 165027 - DNA, 20 bp, Artificial Sequence
  Synthetic oligonucleotide; GAG chr2 60512165 60512184 60512181 +
acccctggagagcagtcaga

SEQ ID NO: 165028 - DNA, 20 bp, Artificial Sequence
  Synthetic oligonucleotide; AGG chr2 60512166 60512185 60512182 +
cccctggagagcagtcagag

SEQ ID NO: 165029 - DNA, 20 bp, Artificial Sequence
  Synthetic oligonucleotide; AAG chr2 60512169 60512188 60512185 +
ctggagagcagtcagagagg

SEQ ID NO: 165030 - DNA, 20 bp, Artificial Sequence
  Synthetic oligonucleotide; CAG chr2 60512183 60512202 60512199 +
gagaggaagcctgctttcct

SEQ ID NO: 165031 - DNA, 20 bp, Artificial Sequence
  Synthetic oligonucleotide; AAG chr2 60512194 60512213 60512210 +
tgctttcctcagatgtttta

SEQ ID NO: 165032 - DNA, 20 bp, Artificial Sequence
  Synthetic oligonucleotide; AGG chr2 60512195 60512214 60512211 +
gctttcctcagatgttttaa

SEQ ID NO: 165033 - DNA, 20 bp, Artificial Sequence
  Synthetic oligonucleotide; AAG chr2 60512198 60512217 60512214 +
ttcctcagatgttttaaagg

SEQ ID NO: 165034 - DNA, 20 bp, Artificial Sequence
  Synthetic oligonucleotide; TAG chr2 60512206 60512225 60512222 +
atgttttaaaggaagccacc

SEQ ID NO: 165035 - DNA, 20 bp, Artificial Sequence
  Synthetic oligonucleotide; GAG chr2 60512208 60512227 60512224 +
gttttaaaggaagccaccta

SEQ ID NO: 165036 - DNA, 20 bp, Artificial Sequence
  Synthetic oligonucleotide; TGG chr2 60512226 60512245 60512242 +
tagagccccacctgtcactg

SEQ ID NO: 165037 - DNA, 20 bp, Artificial Sequence
  Synthetic oligonucleotide; TGG chr2 60512238 60512257 60512254 +
tgtcactgtggaactgctca

SEQ ID NO: 165038 - DNA, 20 bp, Artificial Sequence
  Synthetic oligonucleotide; TGG chr2 60512241 60512260 60512257 +
cactgtggaactgctcatgg

SEQ ID NO: 165039 - DNA, 20 bp, Artificial Sequence
  Synthetic oligonucleotide; TGG chr2 60512262 60512281 60512278 +
ggctgcccgatgcgctgatg

SEQ ID NO: 165040 - DNA, 20 bp, Artificial Sequence
  Synthetic oligonucleotide; CAG chr2 60512269 60512288 60512285 +
cgatgcgctgatgtggaact

SEQ ID NO: 165041 - DNA, 20 bp, Artificial Sequence
  Synthetic oligonucleotide; TGG chr2 60512283 60512302 60512299 +
ggaactcagaatcattcatt

SEQ ID NO: 165042 - DNA, 20 bp, Artificial Sequence
  Synthetic oligonucleotide; GGG chr2 60512284 60512303 60512300 +
gaactcagaatcattcattt

SEQ ID NO: 165043 - DNA, 20 bp, Artificial Sequence
  Synthetic oligonucleotide; TGG chr2 60512291 60512310 60512307 +
gaatcattcatttgggcttg

SEQ ID NO: 165044 - DNA, 20 bp, Artificial Sequence
  Synthetic oligonucleotide; GAG chr2 60512296 60512315 60512312 +
attcatttgggcttgtggct

SEQ ID NO: 165045 - DNA, 20 bp, Artificial Sequence
  Synthetic oligonucleotide; TAG chr2 60512305 60512324 60512321 +
ggcttgtggctgagctgtgc

SEQ ID NO: 165046 - DNA, 20 bp, Artificial Sequence
  Synthetic oligonucleotide; AGG chr2 60512306 60512325 60512322 +
gcttgtggctgagctgtgct

SEQ ID NO: 165047 - DNA, 20 bp, Artificial Sequence
  Synthetic oligonucleotide; TGG chr2 60512313 60512332 60512329 +
gctgagctgtgctaggtaac

SEQ ID NO: 165048 - DNA, 20 bp, Artificial Sequence
  Synthetic oligonucleotide; GGG chr2 60512314 60512333 60512330 +
ctgagctgtgctaggtaact

SEQ ID NO: 165049 - DNA, 20 bp, Artificial Sequence
  Synthetic oligonucleotide; TGG chr2 60512317 60512336 60512333 +
agctgtgctaggtaactggg

SEQ ID NO: 165050 - DNA, 20 bp, Artificial Sequence
  Synthetic oligonucleotide; TGG chr2 60512322 60512341 60512338 +
tgctaggtaactgggtggcc

SEQ ID NO: 165051 - DNA, 20 bp, Artificial Sequence
  Synthetic oligonucleotide; GGG chr2 60512323 60512342 60512339 +
gctaggtaactgggtggcct

SEQ ID NO: 165052 - DNA, 20 bp, Artificial Sequence
  Synthetic oligonucleotide; AAG chr2 60512327 60512346 60512343 +
ggtaactgggtggcctgggc

SEQ ID NO: 165053 - DNA, 20 bp, Artificial Sequence
  Synthetic oligonucleotide; TGG chr2 60512345 60512364 60512361 +
gcaagtcacttcacctccct

SEQ ID NO: 165054 - DNA, 20 bp, Artificial Sequence
  Synthetic oligonucleotide; GAG chr2 60512359 60512378 60512375 +
ctcccttggcctgtgtcctt

SEQ ID NO: 165055 - DNA, 20 bp, Artificial Sequence
  Synthetic oligonucleotide; TGG chr2 60512368 60512387 60512384 +
cctgtgtccttgagctttcc

SEQ ID NO: 165056 - DNA, 20 bp, Artificial Sequence
  Synthetic oligonucleotide; CAG chr2 60512387 60512406 60512403 +
ctggctgcacatcttgctct

SEQ ID NO: 165057 - DNA, 20 bp, Artificial Sequence
  Synthetic oligonucleotide; AGG chr2 60512388 60512407 60512404 +
tggctgcacatcttgctctc

SEQ ID NO: 165058 - DNA, 20 bp, Artificial Sequence
  Synthetic oligonucleotide; AAG chr2 60512395 60512414 60512411 +
acatcttgctctcaggtata

SEQ ID NO: 165059 - DNA, 20 bp, Artificial Sequence
  Synthetic oligonucleotide; AGG chr2 60512396 60512415 60512412 +
catcttgctctcaggtataa

SEQ ID NO: 165060 - DNA, 20 bp, Artificial Sequence
  Synthetic oligonucleotide; GAG chr2 60512449 60512468 60512465 +
cacacactcgcctctcaaat

SEQ ID NO: 165061 - DNA, 20 bp, Artificial Sequence
  Synthetic oligonucleotide; AAG chr2 60512453 60512472 60512469 +
cactcgcctctcaaatgaga

SEQ ID NO: 165062 - DNA, 20 bp, Artificial Sequence
  Synthetic oligonucleotide; AGG chr2 60512454 60512473 60512470 +
actcgcctctcaaatgagaa

SEQ ID NO: 165063 - DNA, 20 bp, Artificial Sequence
  Synthetic oligonucleotide; CAG chr2 60512457 60512476 60512473 +
cgcctctcaaatgagaaagg

SEQ ID NO: 165064 - DNA, 20 bp, Artificial Sequence
  Synthetic oligonucleotide; GAG chr2 60512464 60512483 60512480 +
caaatgagaaaggcagcttt

SEQ ID NO: 165065 - DNA, 20 bp, Artificial Sequence
  Synthetic oligonucleotide; GAG chr2 60512466 60512485 60512482 +
aatgagaaaggcagctttga

SEQ ID NO: 165066 - DNA, 20 bp, Artificial Sequence
  Synthetic oligonucleotide; GAG chr2 60512468 60512487 60512484 +
tgagaaaggcagctttgaga

SEQ ID NO: 165067 - DNA, 20 bp, Artificial Sequence
  Synthetic oligonucleotide; AGG chr2 60512469 60512488 60512485 +
gagaaaggcagctttgagag

SEQ ID NO: 165068 - DNA, 20 bp, Artificial Sequence
  Synthetic oligonucleotide; CGG chr2 60512485 60512504 60512501 +
agagaggatgcttgccttcc

SEQ ID NO: 165069 - DNA, 20 bp, Artificial Sequence
  Synthetic oligonucleotide; CAG chr2 60512502 60512521 60512518 +
tcccggctcccctcccaacc

SEQ ID NO: 165070 - DNA, 20 bp, Artificial Sequence
  Synthetic oligonucleotide; CAG chr2 60512524 60512543 60512540 +
gaacctatcacaatgctctg

SEQ ID NO: 165071 - DNA, 20 bp, Artificial Sequence
  Synthetic oligonucleotide; GAG chr2 60512526 60512545 60512542 +
acctatcacaatgctctgca

SEQ ID NO: 165072 - DNA, 20 bp, Artificial Sequence
  Synthetic oligonucleotide; GAG chr2 60512528 60512547 60512544 +
ctatcacaatgctctgcaga

SEQ ID NO: 165073 - DNA, 20 bp, Artificial Sequence
  Synthetic oligonucleotide; AAG chr2 60512565 60512584 60512581 +
atccaatgctaaattgtaaa

SEQ ID NO: 165074 - DNA, 20 bp, Artificial Sequence
  Synthetic oligonucleotide; GAG chr2 60512569 60512588 60512585 +
aatgctaaattgtaaaaagt

SEQ ID NO: 165075 - DNA, 20 bp, Artificial Sequence
  Synthetic oligonucleotide; TAG chr2 60512574 60512593 60512590 +
taaattgtaaaaagtgagac

SEQ ID NO: 165076 - DNA, 20 bp, Artificial Sequence
  Synthetic oligonucleotide; TGG chr2 60512578 60512597 60512594 +
ttgtaaaaagtgagactaga

SEQ ID NO: 165077 - DNA, 20 bp, Artificial Sequence
  Synthetic oligonucleotide; CAG chr2 60512597 60512616 60512613 +
atggtatctgcctctcctct

SEQ ID NO: 165078 - DNA, 20 bp, Artificial Sequence
  Synthetic oligonucleotide; TGG chr2 60512612 60512631 60512628 +
cctctcagctctaaattatt

SEQ ID NO: 165079 - DNA, 20 bp, Artificial Sequence
  Synthetic oligonucleotide; AAG chr2 60512619 60512638 60512635 +
gctctaaattatttggtcta

SEQ ID NO: 165080 - DNA, 20 bp, Artificial Sequence
  Synthetic oligonucleotide; AAG chr2 60512629 60512648 60512645 +
atttggtctaaagaaaactg

SEQ ID NO: 165081 - DNA, 20 bp, Artificial Sequence
  Synthetic oligonucleotide; CAG chr2 60512636 60512655 60512652 +
ctaaagaaaactgaagcccc

SEQ ID NO: 165082 - DNA, 20 bp, Artificial Sequence
  Synthetic oligonucleotide; TGG chr2 60512662 60512681 60512678 +
ctccattttgcatatctaat

SEQ ID NO: 165083 - DNA, 20 bp, Artificial Sequence
  Synthetic oligonucleotide; GAG chr2 60512664 60512683 60512680 +
ccattttgcatatctaattg

SEQ ID NO: 165084 - DNA, 20 bp, Artificial Sequence
  Synthetic oligonucleotide; TGG chr2 60512668 60512687 60512684 +
tttgcatatctaattggaga

SEQ ID NO: 165085 - DNA, 20 bp, Artificial Sequence
  Synthetic oligonucleotide; AAG chr2 60512690 60512709 60512706 +
gtttcaataatataattatc

SEQ ID NO: 165086 - DNA, 20 bp, Artificial Sequence
  Synthetic oligonucleotide; AGG chr2 60512691 60512710 60512707 +
tttcaataatataattatca

SEQ ID NO: 165087 - DNA, 20 bp, Artificial Sequence
  Synthetic oligonucleotide; AAG chr2 60512711 60512730 60512727 +
aggcatccctacgttacttg

SEQ ID NO: 165088 - DNA, 20 bp, Artificial Sequence
  Synthetic oligonucleotide; TGG chr2 60512715 60512734 60512731 +
atccctacgttacttgaagt

SEQ ID NO: 165089 - DNA, 20 bp, Artificial Sequence
  Synthetic oligonucleotide; TGG chr2 60512727 60512746 60512743 +
cttgaagttggttcataatc

SEQ ID NO: 165090 - DNA, 20 bp, Artificial Sequence
  Synthetic oligonucleotide; CAG chr2 60512739 60512758 60512755 +
tcataatctggcgacgttca

SEQ ID NO: 165091 - DNA, 20 bp, Artificial Sequence
  Synthetic oligonucleotide; AAG chr2 60512749 60512768 60512765 +
gcgacgttcacagccttatg

SEQ ID NO: 165092 - DNA, 20 bp, Artificial Sequence
  Synthetic oligonucleotide; CAG chr2 60512753 60512772 60512769 +
cgttcacagccttatgaaga

SEQ ID NO: 165093 - DNA, 20 bp, Artificial Sequence
  Synthetic oligonucleotide; TAG chr2 60512768 60512787 60512784 +
gaagacagtttattctcttt

SEQ ID NO: 165094 - DNA, 20 bp, Artificial Sequence
  Synthetic oligonucleotide; AAG chr2 60512777 60512796 60512793 +
ttattctcttttagtgtctc

SEQ ID NO: 165095 - DNA, 20 bp, Artificial Sequence
  Synthetic oligonucleotide; GAG chr2 60512783 60512802 60512799 +
tcttttagtgtctcaagtat

SEQ ID NO: 165096 - DNA, 20 bp, Artificial Sequence
  Synthetic oligonucleotide; CGG chr2 60512799 60512818 60512815 +
gtatgagtcacctctgatga

SEQ ID NO: 165097 - DNA, 20 bp, Artificial Sequence
  Synthetic oligonucleotide; TAG chr2 60512803 60512822 60512819 +
gagtcacctctgatgacgga

SEQ ID NO: 165098 - DNA, 20 bp, Artificial Sequence
  Synthetic oligonucleotide; AGG chr2 60512804 60512823 60512820 +
agtcacctctgatgacggat

SEQ ID NO: 165099 - DNA, 20 bp, Artificial Sequence
  Synthetic oligonucleotide; GAG chr2 60512806 60512825 60512822 +
tcacctctgatgacggatag

SEQ ID NO: 165100 - DNA, 20 bp, Artificial Sequence
  Synthetic oligonucleotide; AAG chr2 60512812 60512831 60512828 +
ctgatgacggataggagaac

SEQ ID NO: 165101 - DNA, 20 bp, Artificial Sequence
  Synthetic oligonucleotide; CAG chr2 60512815 60512834 60512831 +
atgacggataggagaacaag

SEQ ID NO: 165102 - DNA, 20 bp, Artificial Sequence
  Synthetic oligonucleotide; AGG chr2 60512816 60512835 60512832 +
tgacggataggagaacaagc

SEQ ID NO: 165103 - DNA, 20 bp, Artificial Sequence
  Synthetic oligonucleotide; AAG chr2 60512840 60512859 60512856 +
tttactacaatacacaccta

SEQ ID NO: 165104 - DNA, 20 bp, Artificial Sequence
  Synthetic oligonucleotide; TGG chr2 60512878 60512897 60512894 +
aaccactttgcccacccaca

SEQ ID NO: 165105 - DNA, 20 bp, Artificial Sequence
  Synthetic oligonucleotide; TGG chr2 60512889 60512908 60512905 +
ccacccacatggcatccatt

SEQ ID NO: 165106 - DNA, 20 bp, Artificial Sequence
  Synthetic oligonucleotide; GAG chr2 60512891 60512910 60512907 +
acccacatggcatccatttg

SEQ ID NO: 165107 - DNA, 20 bp, Artificial Sequence
  Synthetic oligonucleotide; AGG chr2 60512892 60512911 60512908 +
cccacatggcatccatttgg

SEQ ID NO: 165108 - DNA, 20 bp, Artificial Sequence
  Synthetic oligonucleotide; GAG chr2 60512894 60512913 60512910 +
cacatggcatccatttggag

SEQ ID NO: 165109 - DNA, 20 bp, Artificial Sequence
  Synthetic oligonucleotide; CAG chr2 60512900 60512919 60512916 +
gcatccatttggaggagaca

SEQ ID NO: 165110 - DNA, 20 bp, Artificial Sequence
  Synthetic oligonucleotide; GAG chr2 60512902 60512921 60512918 +
atccatttggaggagacaca

SEQ ID NO: 165111 - DNA, 20 bp, Artificial Sequence
  Synthetic oligonucleotide; AAG chr2 60512906 60512925 60512922 +
atttggaggagacacagaga

SEQ ID NO: 165112 - DNA, 20 bp, Artificial Sequence
  Synthetic oligonucleotide; AGG chr2 60512907 60512926 60512923 +
tttggaggagacacagagaa

SEQ ID NO: 165113 - DNA, 20 bp, Artificial Sequence
  Synthetic oligonucleotide; GAG chr2 60512909 60512928 60512925 +
tggaggagacacagagaaag

SEQ ID NO: 165114 - DNA, 20 bp, Artificial Sequence
  Synthetic oligonucleotide; TAG chr2 60512922 60512941 60512938 +
gagaaaggagtttcacctct

SEQ ID NO: 165115 - DNA, 20 bp, Artificial Sequence
  Synthetic oligonucleotide; CAG chr2 60512931 60512950 60512947 +
gtttcacctcttagacgtct

SEQ ID NO: 165116 - DNA, 20 bp, Artificial Sequence
  Synthetic oligonucleotide; GAG chr2 60512933 60512952 60512949 +
ttcacctcttagacgtctca

SEQ ID NO: 165117 - DNA, 20 bp, Artificial Sequence
  Synthetic oligonucleotide; CAG chr2 60512963 60512982 60512979 +
ttttctcaaaaatgaacaca

SEQ ID NO: 165118 - DNA, 20 bp, Artificial Sequence
  Synthetic oligonucleotide; GAG chr2 60512965 60512984 60512981 +
ttctcaaaaatgaacacaca

SEQ ID NO: 165119 - DNA, 20 bp, Artificial Sequence
  Synthetic oligonucleotide; CAG chr2 60512971 60512990 60512987 +
aaaatgaacacacagagcaa

SEQ ID NO: 165120 - DNA, 20 bp, Artificial Sequence
  Synthetic oligonucleotide; GAG chr2 60512979 60512998 60512995 +
cacacagagcaacagctgac

SEQ ID NO: 165121 - DNA, 20 bp, Artificial Sequence
  Synthetic oligonucleotide; CAG chr2 60512985 60513004 60513001 +
gagcaacagctgacgagtca

SEQ ID NO: 165122 - DNA, 20 bp, Artificial Sequence
  Synthetic oligonucleotide; TGG chr2 60512988 60513007 60513004 +
caacagctgacgagtcacag

SEQ ID NO: 165123 - DNA, 20 bp, Artificial Sequence
  Synthetic oligonucleotide; TGG chr2 60513007 60513026 60513023 +
gtggaccacaccaccacctc

SEQ ID NO: 165124 - DNA, 20 bp, Artificial Sequence
  Synthetic oligonucleotide; GAG chr2 60513019 60513038 60513035 +
accacctctggttaccccct

SEQ ID NO: 165125 - DNA, 20 bp, Artificial Sequence
  Synthetic oligonucleotide; AAG chr2 60513023 60513042 60513039 +
cctctggttaccccctgaga

SEQ ID NO: 165126 - DNA, 20 bp, Artificial Sequence
  Synthetic oligonucleotide; AGG chr2 60513024 60513043 60513040 +
ctctggttaccccctgagaa

SEQ ID NO: 165127 - DNA, 20 bp, Artificial Sequence
  Synthetic oligonucleotide; CAG chr2 60513027 60513046 60513043 +
tggttaccccctgagaaagg

SEQ ID NO: 165128 - DNA, 20 bp, Artificial Sequence
  Synthetic oligonucleotide; GAG chr2 60513029 60513048 60513045 +
gttaccccctgagaaaggca

SEQ ID NO: 165129 - DNA, 20 bp, Artificial Sequence
  Synthetic oligonucleotide; AAG chr2 60513033 60513052 60513049 +
ccccctgagaaaggcagaga

SEQ ID NO: 165130 - DNA, 20 bp, Artificial Sequence
  Synthetic oligonucleotide; AGG chr2 60513034 60513053 60513050 +
cccctgagaaaggcagagaa

SEQ ID NO: 165131 - DNA, 20 bp, Artificial Sequence
  Synthetic oligonucleotide; CAG chr2 60513042 60513061 60513058 +
aaaggcagagaaaggacccc

SEQ ID NO: 165132 - DNA, 20 bp, Artificial Sequence
  Synthetic oligonucleotide; CAG chr2 60513047 60513066 60513063 +
cagagaaaggacccccagaa

SEQ ID NO: 165133 - DNA, 20 bp, Artificial Sequence
  Synthetic oligonucleotide; GAG chr2 60513059 60513078 60513075 +
ccccagaacagtcaccattt

SEQ ID NO: 165134 - DNA, 20 bp, Artificial Sequence
  Synthetic oligonucleotide; AGG chr2 60513060 60513079 60513076 +
cccagaacagtcaccatttg

SEQ ID NO: 165135 - DNA, 20 bp, Artificial Sequence
  Synthetic oligonucleotide; GAG chr2 60513062 60513081 60513078 +
cagaacagtcaccatttgag

SEQ ID NO: 165136 - DNA, 20 bp, Artificial Sequence
  Synthetic oligonucleotide; GAG chr2 60513064 60513083 60513080 +
gaacagtcaccatttgagga

SEQ ID NO: 165137 - DNA, 20 bp, Artificial Sequence
  Synthetic oligonucleotide; AGG chr2 60513065 60513084 60513081 +
aacagtcaccatttgaggag

SEQ ID NO: 165138 - DNA, 20 bp, Artificial Sequence
  Synthetic oligonucleotide; CAG chr2 60513070 60513089 60513086 +
tcaccatttgaggagaggtt

SEQ ID NO: 165139 - DNA, 20 bp, Artificial Sequence
  Synthetic oligonucleotide; AGG chr2 60513071 60513090 60513087 +
caccatttgaggagaggttc

SEQ ID NO: 165140 - DNA, 20 bp, Artificial Sequence
  Synthetic oligonucleotide; GGG chr2 60513072 60513091 60513088 +
accatttgaggagaggttca

SEQ ID NO: 165141 - DNA, 20 bp, Artificial Sequence
  Synthetic oligonucleotide; GAG chr2 60513080 60513099 60513096 +
aggagaggttcagggatcat

SEQ ID NO: 165142 - DNA, 20 bp, Artificial Sequence
  Synthetic oligonucleotide; AGG chr2 60513081 60513100 60513097 +
ggagaggttcagggatcatg

SEQ ID NO: 165143 - DNA, 20 bp, Artificial Sequence
  Synthetic oligonucleotide; TGG chr2 60513107 60513126 60513123 +
caccaccccactgaaatcca

SEQ ID NO: 165144 - DNA, 20 bp, Artificial Sequence
  Synthetic oligonucleotide; TAG chr2 60513111 60513130 60513127 +
accccactgaaatccatgga

SEQ ID NO: 165145 - DNA, 20 bp, Artificial Sequence
  Synthetic oligonucleotide; TAG chr2 60513116 60513135 60513132 +
actgaaatccatggatagtc

SEQ ID NO: 165146 - DNA, 20 bp, Artificial Sequence
  Synthetic oligonucleotide; GAG chr2 60513124 60513143 60513140 +
ccatggatagtctagcctgt

SEQ ID NO: 165147 - DNA, 20 bp, Artificial Sequence
  Synthetic oligonucleotide; AGG chr2 60513125 60513144 60513141 +
catggatagtctagcctgtg

SEQ ID NO: 165148 - DNA, 20 bp, Artificial Sequence
  Synthetic oligonucleotide; GGG chr2 60513126 60513145 60513142 +
atggatagtctagcctgtga

SEQ ID NO: 165149 - DNA, 20 bp, Artificial Sequence
  Synthetic oligonucleotide; GGG chr2 60513127 60513146 60513143 +
tggatagtctagcctgtgag

SEQ ID NO: 165150 - DNA, 20 bp, Artificial Sequence
  Synthetic oligonucleotide; TGG chr2 60513131 60513150 60513147 +
tagtctagcctgtgaggggt

SEQ ID NO: 165151 - DNA, 20 bp, Artificial Sequence
  Synthetic oligonucleotide; GGG chr2 60513132 60513151 60513148 +
agtctagcctgtgaggggtt

SEQ ID NO: 165152 - DNA, 20 bp, Artificial Sequence
  Synthetic oligonucleotide; GGG chr2 60513133 60513152 60513149 +
gtctagcctgtgaggggttg

SEQ ID NO: 165153 - DNA, 20 bp, Artificial Sequence
  Synthetic oligonucleotide; GGG chr2 60513134 60513153 60513150 +
tctagcctgtgaggggttgg

SEQ ID NO: 165154 - DNA, 20 bp, Artificial Sequence
  Synthetic oligonucleotide; TGG chr2 60513137 60513156 60513153 +
agcctgtgaggggttggggg

SEQ ID NO: 165155 - DNA, 20 bp, Artificial Sequence
  Synthetic oligonucleotide; GAG chr2 60513166 60513185 60513182 +
actttatctttctcatcttt

SEQ ID NO: 165156 - DNA, 20 bp, Artificial Sequence
  Synthetic oligonucleotide; CGG chr2 60513169 60513188 60513185 +
ttatctttctcatctttgag

SEQ ID NO: 165157 - DNA, 20 bp, Artificial Sequence
  Synthetic oligonucleotide; CAG chr2 60513180 60513199 60513196 +
atctttgagcggctcttccc

SEQ ID NO: 165158 - DNA, 20 bp, Artificial Sequence
  Synthetic oligonucleotide; GAG chr2 60513182 60513201 60513198 +
ctttgagcggctcttcccca

SEQ ID NO: 165159 - DNA, 20 bp, Artificial Sequence
  Synthetic oligonucleotide; CAG chr2 60513186 60513205 60513202 +
gagcggctcttccccagagt

SEQ ID NO: 165160 - DNA, 20 bp, Artificial Sequence
  Synthetic oligonucleotide; AGG chr2 60513187 60513206 60513203 +
agcggctcttccccagagtc

SEQ ID NO: 165161 - DNA, 20 bp, Artificial Sequence
  Synthetic oligonucleotide; TAG chr2 60513201 60513220 60513217 +
agagtcaggatgactctcac

SEQ ID NO: 165162 - DNA, 20 bp, Artificial Sequence
  Synthetic oligonucleotide; AGG chr2 60513202 60513221 60513218 +
gagtcaggatgactctcact

SEQ ID NO: 165163 - DNA, 20 bp, Artificial Sequence
  Synthetic oligonucleotide; CAG chr2 60513208 60513227 60513224 +
ggatgactctcactaggttt

SEQ ID NO: 165164 - DNA, 20 bp, Artificial Sequence
  Synthetic oligonucleotide; AGG chr2 60513209 60513228 60513225 +
gatgactctcactaggtttc

SEQ ID NO: 165165 - DNA, 20 bp, Artificial Sequence
  Synthetic oligonucleotide; CGG chr2 60513230 60513249 60513246 +
ggtacatccccatcatgccc

SEQ ID NO: 165166 - DNA, 20 bp, Artificial Sequence
  Synthetic oligonucleotide; CAG chr2 60513237 60513256 60513253 +
ccccatcatgccccggactc

SEQ ID NO: 165167 - DNA, 20 bp, Artificial Sequence
  Synthetic oligonucleotide; CAG chr2 60513246 60513265 60513262 +
gccccggactccagtctctg

SEQ ID NO: 165168 - DNA, 20 bp, Artificial Sequence
  Synthetic oligonucleotide; CGG chr2 60513255 60513274 60513271 +
tccagtctctgcagctgaca

SEQ ID NO: 165169 - DNA, 20 bp, Artificial Sequence
  Synthetic oligonucleotide; AAG chr2 60513262 60513281 60513278 +
tctgcagctgacacggctcc

SEQ ID NO: 165170 - DNA, 20 bp, Artificial Sequence
  Synthetic oligonucleotide; GAG chr2 60513276 60513295 60513292 +
ggctccaagatgctaaatat

SEQ ID NO: 165171 - DNA, 20 bp, Artificial Sequence
  Synthetic oligonucleotide; AAG chr2 60513281 60513300 60513297 +
caagatgctaaatatgagac

SEQ ID NO: 165172 - DNA, 20 bp, Artificial Sequence
  Synthetic oligonucleotide; AGG chr2 60513282 60513301 60513298 +
aagatgctaaatatgagaca

SEQ ID NO: 165173 - DNA, 20 bp, Artificial Sequence
  Synthetic oligonucleotide; GAG chr2 60513284 60513303 60513300 +
gatgctaaatatgagacaag

SEQ ID NO: 165174 - DNA, 20 bp, Artificial Sequence
  Synthetic oligonucleotide; AGG chr2 60513285 60513304 60513301 +
atgctaaatatgagacaagg

SEQ ID NO: 165175 - DNA, 20 bp, Artificial Sequence
  Synthetic oligonucleotide; GGG chr2 60513286 60513305 60513302 +
tgctaaatatgagacaagga

SEQ ID NO: 165176 - DNA, 20 bp, Artificial Sequence
  Synthetic oligonucleotide; GGG chr2 60513287 60513306 60513303 +
gctaaatatgagacaaggag

SEQ ID NO: 165177 - DNA, 20 bp, Artificial Sequence
  Synthetic oligonucleotide; AAG chr2 60513292 60513311 60513308 +
atatgagacaaggaggggac

SEQ ID NO: 165178 - DNA, 20 bp, Artificial Sequence
  Synthetic oligonucleotide; AGG chr2 60513293 60513312 60513309 +
tatgagacaaggaggggaca

SEQ ID NO: 165179 - DNA, 20 bp, Artificial Sequence
  Synthetic oligonucleotide; TAG chr2 60513300 60513319 60513316 +
caaggaggggacaaggaatt

SEQ ID NO: 165180 - DNA, 20 bp, Artificial Sequence
  Synthetic oligonucleotide; CAG chr2 60513306 60513325 60513322 +
ggggacaaggaatttagtcc

SEQ ID NO: 165181 - DNA, 20 bp, Artificial Sequence
  Synthetic oligonucleotide; AGG chr2 60513307 60513326 60513323 +
gggacaaggaatttagtccc

SEQ ID NO: 165182 - DNA, 20 bp, Artificial Sequence
  Synthetic oligonucleotide; GAG chr2 60513309 60513328 60513325 +
gacaaggaatttagtcccag

SEQ ID NO: 165183 - DNA, 20 bp, Artificial Sequence
  Synthetic oligonucleotide; TGG chr2 60513312 60513331 60513328 +
aaggaatttagtcccaggag

SEQ ID NO: 165184 - DNA, 20 bp, Artificial Sequence
  Synthetic oligonucleotide; TAG chr2 60513318 60513337 60513334 +
tttagtcccaggagtggcac

SEQ ID NO: 165185 - DNA, 20 bp, Artificial Sequence
  Synthetic oligonucleotide; AAG chr2 60513321 60513340 60513337 +
agtcccaggagtggcactag

SEQ ID NO: 165186 - DNA, 20 bp, Artificial Sequence
  Synthetic oligonucleotide; AGG chr2 60513322 60513341 60513338 +
gtcccaggagtggcactaga

SEQ ID NO: 165187 - DNA, 20 bp, Artificial Sequence
  Synthetic oligonucleotide; GAG chr2 60513324 60513343 60513340 +
cccaggagtggcactagaag

SEQ ID NO: 165188 - DNA, 20 bp, Artificial Sequence
  Synthetic oligonucleotide; CAG chr2 60513339 60513358 60513355 +
agaaggagtccctgctccct

SEQ ID NO: 165189 - DNA, 20 bp, Artificial Sequence
  Synthetic oligonucleotide; AGG chr2 60513340 60513359 60513356 +
gaaggagtccctgctccctc

SEQ ID NO: 165190 - DNA, 20 bp, Artificial Sequence
  Synthetic oligonucleotide; GAG chr2 60513342 60513361 60513358 +
aggagtccctgctccctcag

SEQ ID NO: 165191 - DNA, 20 bp, Artificial Sequence
  Synthetic oligonucleotide; CGG chr2 60513353 60513372 60513369 +
ctccctcaggagccatctgc

SEQ ID NO: 165192 - DNA, 20 bp, Artificial Sequence
  Synthetic oligonucleotide; GGG chr2 60513354 60513373 60513370 +
tccctcaggagccatctgcc

SEQ ID NO: 165193 - DNA, 20 bp, Artificial Sequence
  Synthetic oligonucleotide; TGG chr2 60513363 60513382 60513379 +
agccatctgccgggtgcttc

SEQ ID NO: 165194 - DNA, 20 bp, Artificial Sequence
  Synthetic oligonucleotide; GAG chr2 60513365 60513384 60513381 +
ccatctgccgggtgcttctg

SEQ ID NO: 165195 - DNA, 20 bp, Artificial Sequence
  Synthetic oligonucleotide; GAG chr2 60513390 60513409 60513406 +
gctgcctccacgccccactt

SEQ ID NO: 165196 - DNA, 20 bp, Artificial Sequence
  Synthetic oligonucleotide; AGG chr2 60513391 60513410 60513407 +
ctgcctccacgccccacttg

SEQ ID NO: 165197 - DNA, 20 bp, Artificial Sequence
  Synthetic oligonucleotide; CAG chr2 60513401 60513420 60513417 +
gccccacttgaggctgtcca

SEQ ID NO: 165198 - DNA, 20 bp, Artificial Sequence
  Synthetic oligonucleotide; CAG chr2 60513404 60513423 60513420 +
ccacttgaggctgtccacag

SEQ ID NO: 165199 - DNA, 20 bp, Artificial Sequence
  Synthetic oligonucleotide; CAG chr2 60513411 60513430 60513427 +
aggctgtccacagcagaaac

SEQ ID NO: 165200 - DNA, 20 bp, Artificial Sequence
  Synthetic oligonucleotide; CAG chr2 60513418 60513437 60513434 +
ccacagcagaaaccagcgcc

SEQ ID NO: 165201 - DNA, 20 bp, Artificial Sequence
  Synthetic oligonucleotide; AAG chr2 60513429 60513448 60513445 +
accagcgcccagatcccctc

SEQ ID NO: 165202 - DNA, 20 bp, Artificial Sequence
  Synthetic oligonucleotide; CAG chr2 60513433 60513452 60513449 +
gcgcccagatcccctcaagc

SEQ ID NO: 165203 - DNA, 20 bp, Artificial Sequence
  Synthetic oligonucleotide; TGG chr2 60513444 60513463 60513460 +
ccctcaagccagccacccca

SEQ ID NO: 165204 - DNA, 20 bp, Artificial Sequence
  Synthetic oligonucleotide; GGG chr2 60513445 60513464 60513461 +
cctcaagccagccaccccat

SEQ ID NO: 165205 - DNA, 20 bp, Artificial Sequence
  Synthetic oligonucleotide; TGG chr2 60513456 60513475 60513472 +
ccaccccatgggaacccctt

SEQ ID NO: 165206 - DNA, 20 bp, Artificial Sequence
  Synthetic oligonucleotide; CAG chr2 60513459 60513478 60513475 +
ccccatgggaacccctttgg

SEQ ID NO: 165207 - DNA, 20 bp, Artificial Sequence
  Synthetic oligonucleotide; AGG chr2 60513460 60513479 60513476 +
cccatgggaacccctttggc

SEQ ID NO: 165208 - DNA, 20 bp, Artificial Sequence
  Synthetic oligonucleotide; TGG chr2 60513465 60513484 60513481 +
gggaacccctttggcaggtg

SEQ ID NO: 165209 - DNA, 20 bp, Artificial Sequence
  Synthetic oligonucleotide; GGG chr2 60513466 60513485 60513482 +
ggaacccctttggcaggtgt

SEQ ID NO: 165210 - DNA, 20 bp, Artificial Sequence
  Synthetic oligonucleotide; TGG chr2 60513472 60513491 60513488 +
cctttggcaggtgtgggtgt

SEQ ID NO: 165211 - DNA, 20 bp, Artificial Sequence
  Synthetic oligonucleotide; GGG chr2 60513473 60513492 60513489 +
ctttggcaggtgtgggtgtt

SEQ ID NO: 165212 - DNA, 20 bp, Artificial Sequence
  Synthetic oligonucleotide; TAG chr2 60513477 60513496 60513493 +
ggcaggtgtgggtgttgggt

SEQ ID NO: 165213 - DNA, 20 bp, Artificial Sequence
  Synthetic oligonucleotide; TAG chr2 60513484 60513503 60513500 +
gtgggtgttgggttagcctc

SEQ ID NO: 165214 - DNA, 20 bp, Artificial Sequence
  Synthetic oligonucleotide; CAG chr2 60513488 60513507 60513504 +
gtgttgggttagcctctagc

SEQ ID NO: 165215 - DNA, 20 bp, Artificial Sequence
  Synthetic oligonucleotide; TGG chr2 60513514 60513533 60513530 +
tcctgctgcttctctctttg

SEQ ID NO: 165216 - DNA, 20 bp, Artificial Sequence
  Synthetic oligonucleotide; GAG chr2 60513516 60513535 60513532 +
ctgctgcttctctctttgtg

SEQ ID NO: 165217 - DNA, 20 bp, Artificial Sequence
  Synthetic oligonucleotide; TGG chr2 60513538 60513557 60513554 +
gcaaatcttcatgtcctgtc

SEQ ID NO: 165218 - DNA, 20 bp, Artificial Sequence
  Synthetic oligonucleotide; CAG chr2 60513548 60513567 60513564 +
atgtcctgtctggatcttcc

SEQ ID NO: 165219 - DNA, 20 bp, Artificial Sequence
  Synthetic oligonucleotide; AAG chr2 60513587 60513606 60513603 +
ctgaatcttcccacccttcc

SEQ ID NO: 165220 - DNA, 20 bp, Artificial Sequence
  Synthetic oligonucleotide; AGG chr2 60513588 60513607 60513604 +
tgaatcttcccacccttcca

SEQ ID NO: 165221 - DNA, 20 bp, Artificial Sequence
  Synthetic oligonucleotide; GGG chr2 60513589 60513608 60513605 +
gaatcttcccacccttccaa

SEQ ID NO: 165222 - DNA, 20 bp, Artificial Sequence
  Synthetic oligonucleotide; AAG chr2 60513627 60513646 60513643 +
atctccccactcacacgcta

SEQ ID NO: 165223 - DNA, 20 bp, Artificial Sequence
  Synthetic oligonucleotide; CAG chr2 60513647 60513666 60513663 +
aagtaaatgaataaacccaa

SEQ ID NO: 165224 - DNA, 20 bp, Artificial Sequence
  Synthetic oligonucleotide; CGG chr2 60513652 60513671 60513668 +
aatgaataaacccaacagca

SEQ ID NO: 165225 - DNA, 20 bp, Artificial Sequence
  Synthetic oligonucleotide; CAG chr2 60513668 60513687 60513684 +
agcacggactcatccctgat

SEQ ID NO: 165226 - DNA, 20 bp, Artificial Sequence
  Synthetic oligonucleotide; AGG chr2 60513669 60513688 60513685 +
gcacggactcatccctgatc

SEQ ID NO: 165227 - DNA, 20 bp, Artificial Sequence
  Synthetic oligonucleotide; AAG chr2 60513680 60513699 60513696 +
tccctgatcaggactgaaaa

SEQ ID NO: 165228 - DNA, 20 bp, Artificial Sequence
  Synthetic oligonucleotide; AAG chr2 60513686 60513705 60513702 +
atcaggactgaaaaaagaaa

SEQ ID NO: 165229 - DNA, 20 bp, Artificial Sequence
  Synthetic oligonucleotide; TAG chr2 60513692 60513711 60513708 +
actgaaaaaagaaaaagaaa

SEQ ID NO: 165230 - DNA, 20 bp, Artificial Sequence
  Synthetic oligonucleotide; TGG chr2 60513715 60513734 60513731 +
cctcccatcacaccactctc

SEQ ID NO: 165231 - DNA, 20 bp, Artificial Sequence
  Synthetic oligonucleotide; GGG chr2 60513716 60513735 60513732 +
ctcccatcacaccactctct

SEQ ID NO: 165232 - DNA, 20 bp, Artificial Sequence
  Synthetic oligonucleotide; TAG chr2 60513723 60513742 60513739 +
cacaccactctctgggaaaa

SEQ ID NO: 165233 - DNA, 20 bp, Artificial Sequence
  Synthetic oligonucleotide; GAG chr2 60513730 60513749 60513746 +
ctctctgggaaaatagaact

SEQ ID NO: 165234 - DNA, 20 bp, Artificial Sequence
  Synthetic oligonucleotide; TAG chr2 60513736 60513755 60513752 +
gggaaaatagaactgagtcc

SEQ ID NO: 165235 - DNA, 20 bp, Artificial Sequence
  Synthetic oligonucleotide; TAG chr2 60513742 60513761 60513758 +
atagaactgagtcctagctc

SEQ ID NO: 165236 - DNA, 20 bp, Artificial Sequence
  Synthetic oligonucleotide; TGG chr2 60513748 60513767 60513764 +
ctgagtcctagctctagcac

SEQ ID NO: 165237 - DNA, 20 bp, Artificial Sequence
  Synthetic oligonucleotide; GGG chr2 60513749 60513768 60513765 +
tgagtcctagctctagcact

SEQ ID NO: 165238 - DNA, 20 bp, Artificial Sequence
  Synthetic oligonucleotide; CAG chr2 60513754 60513773 60513770 +
cctagctctagcactgggca

SEQ ID NO: 165239 - DNA, 20 bp, Artificial Sequence
  Synthetic oligonucleotide; TGG chr2 60513758 60513777 60513774 +
gctctagcactgggcacagc

SEQ ID NO: 165240 - DNA, 20 bp, Artificial Sequence
  Synthetic oligonucleotide; GGG chr2 60513759 60513778 60513775 +
ctctagcactgggcacagct

SEQ ID NO: 165241 - DNA, 20 bp, Artificial Sequence
  Synthetic oligonucleotide; CAG chr2 60513763 60513782 60513779 +
agcactgggcacagctgggt

SEQ ID NO: 165242 - DNA, 20 bp, Artificial Sequence
  Synthetic oligonucleotide; AAG chr2 60513774 60513793 60513790 +
cagctgggtcagcacctacg

SEQ ID NO: 165243 - DNA, 20 bp, Artificial Sequence
  Synthetic oligonucleotide; AGG chr2 60513775 60513794 60513791 +
agctgggtcagcacctacga

SEQ ID NO: 165244 - DNA, 20 bp, Artificial Sequence
  Synthetic oligonucleotide; GGG chr2 60513776 60513795 60513792 +
gctgggtcagcacctacgaa

SEQ ID NO: 165245 - DNA, 20 bp, Artificial Sequence
  Synthetic oligonucleotide; CAG chr2 60513786 60513805 60513802 +
cacctacgaagggtcctatg

SEQ ID NO: 165246 - DNA, 20 bp, Artificial Sequence
  Synthetic oligonucleotide; CAG chr2 60513800 60513819 60513816 +
cctatgcagtgaacaccttg

SEQ ID NO: 165247 - DNA, 20 bp, Artificial Sequence
  Synthetic oligonucleotide; AAG chr2 60513807 60513826 60513823 +
agtgaacaccttgcagtctg

SEQ ID NO: 165248 - DNA, 20 bp, Artificial Sequence
  Synthetic oligonucleotide; AGG chr2 60513808 60513827 60513824 +
gtgaacaccttgcagtctga

SEQ ID NO: 165249 - DNA, 20 bp, Artificial Sequence
  Synthetic oligonucleotide; GGG chr2 60513809 60513828 60513825 +
tgaacaccttgcagtctgaa

SEQ ID NO: 165250 - DNA, 20 bp, Artificial Sequence
  Synthetic oligonucleotide; CAG chr2 60513812 60513831 60513828 +
acaccttgcagtctgaaggg

SEQ ID NO: 165251 - DNA, 20 bp, Artificial Sequence
  Synthetic oligonucleotide; AAG chr2 60513831 60513850 60513847 +
gcagactctctcttctcaac

SEQ ID NO: 165252 - DNA, 20 bp, Artificial Sequence
  Synthetic oligonucleotide; CAG chr2 60513835 60513854 60513851 +
actctctcttctcaacaagc

SEQ ID NO: 165253 - DNA, 20 bp, Artificial Sequence
  Synthetic oligonucleotide; GAG chr2 60513837 60513856 60513853 +
tctctcttctcaacaagcca

SEQ ID NO: 165254 - DNA, 20 bp, Artificial Sequence
  Synthetic oligonucleotide; CAG chr2 60513853 60513872 60513869 +
gccagagattctctgccttc

SEQ ID NO: 165255 - DNA, 20 bp, Artificial Sequence
  Synthetic oligonucleotide; CAG chr2 60513857 60513876 60513873 +
gagattctctgccttccaga

SEQ ID NO: 165256 - DNA, 20 bp, Artificial Sequence
  Synthetic oligonucleotide; AGG chr2 60513858 60513877 60513874 +
agattctctgccttccagac

SEQ ID NO: 165257 - DNA, 20 bp, Artificial Sequence
  Synthetic oligonucleotide; AAG chr2 60513871 60513890 60513887 +
tccagacaggcacctccatg

SEQ ID NO: 165258 - DNA, 20 bp, Artificial Sequence
  Synthetic oligonucleotide; GAG chr2 60513873 60513892 60513889 +
cagacaggcacctccatgaa

SEQ ID NO: 165259 - DNA, 20 bp, Artificial Sequence
  Synthetic oligonucleotide; AAG chr2 60513876 60513895 60513892 +
acaggcacctccatgaagag

SEQ ID NO: 165260 - DNA, 20 bp, Artificial Sequence
  Synthetic oligonucleotide; TGG chr2 60513886 60513905 60513902 +
ccatgaagagaagctgttcc

SEQ ID NO: 165261 - DNA, 20 bp, Artificial Sequence
  Synthetic oligonucleotide; TGG chr2 60513893 60513912 60513909 +
gagaagctgttcctggcttg

SEQ ID NO: 165262 - DNA, 20 bp, Artificial Sequence
  Synthetic oligonucleotide; GAG chr2 60513897 60513916 60513913 +
agctgttcctggcttgtggt

SEQ ID NO: 165263 - DNA, 20 bp, Artificial Sequence
  Synthetic oligonucleotide; TGG chr2 60513910 60513929 60513926 +
ttgtggtgagcaaaactccc

SEQ ID NO: 165264 - DNA, 20 bp, Artificial Sequence
  Synthetic oligonucleotide; GAG chr2 60513916 60513935 60513932 +
tgagcaaaactccctggatt

SEQ ID NO: 165265 - DNA, 20 bp, Artificial Sequence
  Synthetic oligonucleotide; GAG chr2 60513921 60513940 60513937 +
aaaactccctggattgagtc

SEQ ID NO: 165266 - DNA, 20 bp, Artificial Sequence
  Synthetic oligonucleotide; TGG chr2 60513927 60513946 60513943 +
ccctggattgagtcgagacc

SEQ ID NO: 165267 - DNA, 20 bp, Artificial Sequence
  Synthetic oligonucleotide; TAG chr2 60513934 60513953 60513950 +
ttgagtcgagacctggattc

SEQ ID NO: 165268 - DNA, 20 bp, Artificial Sequence
  Synthetic oligonucleotide; TAG chr2 60513957 60513976 60513973 +
ttccactactttgaattctc

SEQ ID NO: 165269 - DNA, 20 bp, Artificial Sequence
  Synthetic oligonucleotide; AGG chr2 60513958 60513977 60513974 +
tccactactttgaattctct

SEQ ID NO: 165270 - DNA, 20 bp, Artificial Sequence
  Synthetic oligonucleotide; CAG chr2 60513965 60513984 60513981 +
ctttgaattctctaggttca

SEQ ID NO: 165271 - DNA, 20 bp, Artificial Sequence
  Synthetic oligonucleotide; CAG chr2 60513979 60513998 60513995 +
ggttcacagtcctaaatcct

SEQ ID NO: 165272 - DNA, 20 bp, Artificial Sequence
  Synthetic oligonucleotide; GAG chr2 60513981 60514000 60513997 +
ttcacagtcctaaatcctca

SEQ ID NO: 165273 - DNA, 20 bp, Artificial Sequence
  Synthetic oligonucleotide; AAG chr2 60513984 60514003 60514000 +
acagtcctaaatcctcagag

SEQ ID NO: 165274 - DNA, 20 bp, Artificial Sequence
  Synthetic oligonucleotide; AGG chr2 60513985 60514004 60514001 +
cagtcctaaatcctcagaga

SEQ ID NO: 165275 - DNA, 20 bp, Artificial Sequence
  Synthetic oligonucleotide; CAG chr2 60513989 60514008 60514005 +
cctaaatcctcagagaagga

SEQ ID NO: 165276 - DNA, 20 bp, Artificial Sequence
  Synthetic oligonucleotide; GAG chr2 60513996 60514015 60514012 +
cctcagagaaggacagactt

SEQ ID NO: 165277 - DNA, 20 bp, Artificial Sequence
  Synthetic oligonucleotide; AGG chr2 60513997 60514016 60514013 +
ctcagagaaggacagacttg

SEQ ID NO: 165278 - DNA, 20 bp, Artificial Sequence
  Synthetic oligonucleotide; GGG chr2 60513998 60514017 60514014 +
tcagagaaggacagacttga

SEQ ID NO: 165279 - DNA, 20 bp, Artificial Sequence
  Synthetic oligonucleotide; CAG chr2 60514001 60514020 60514017 +
gagaaggacagacttgaggg

SEQ ID NO: 165280 - DNA, 20 bp, Artificial Sequence
  Synthetic oligonucleotide; CAG chr2 60514005 60514024 60514021 +
aggacagacttgagggcaga

SEQ ID NO: 165281 - DNA, 20 bp, Artificial Sequence
  Synthetic oligonucleotide; CAG chr2 60514011 60514030 60514027 +
gacttgagggcagacagcca

SEQ ID NO: 165282 - DNA, 20 bp, Artificial Sequence
  Synthetic oligonucleotide; AGG chr2 60514012 60514031 60514028 +
acttgagggcagacagccac

SEQ ID NO: 165283 - DNA, 20 bp, Artificial Sequence
  Synthetic oligonucleotide; TGG chr2 60514015 60514034 60514031 +
tgagggcagacagccacagg

SEQ ID NO: 165284 - DNA, 20 bp, Artificial Sequence
  Synthetic oligonucleotide; TGG chr2 60514020 60514039 60514036 +
gcagacagccacaggtggcc

SEQ ID NO: 165285 - DNA, 20 bp, Artificial Sequence
  Synthetic oligonucleotide; TGG chr2 60514025 60514044 60514041 +
cagccacaggtggcctggca

SEQ ID NO: 165286 - DNA, 20 bp, Artificial Sequence
  Synthetic oligonucleotide; GGG chr2 60514026 60514045 60514042 +
agccacaggtggcctggcat

SEQ ID NO: 165287 - DNA, 20 bp, Artificial Sequence
  Synthetic oligonucleotide; GAG chr2 60514031 60514050 60514047 +
caggtggcctggcatgggct

SEQ ID NO: 165288 - DNA, 20 bp, Artificial Sequence
  Synthetic oligonucleotide; AGG chr2 60514032 60514051 60514048 +
aggtggcctggcatgggctg

SEQ ID NO: 165289 - DNA, 20 bp, Artificial Sequence
  Synthetic oligonucleotide; CAG chr2 60514035 60514054 60514051 +
tggcctggcatgggctgagg

SEQ ID NO: 165290 - DNA, 20 bp, Artificial Sequence
  Synthetic oligonucleotide; AAG chr2 60514043 60514062 60514059 +
catgggctgaggcagcacac

SEQ ID NO: 165291 - DNA, 20 bp, Artificial Sequence
  Synthetic oligonucleotide; AGG chr2 60514044 60514063 60514060 +
atgggctgaggcagcacaca

SEQ ID NO: 165292 - DNA, 20 bp, Artificial Sequence
  Synthetic oligonucleotide; GAG chr2 60514052 60514071 60514068 +
aggcagcacacaaggactct

SEQ ID NO: 165293 - DNA, 20 bp, Artificial Sequence
  Synthetic oligonucleotide; CAG chr2 60514061 60514080 60514077 +
acaaggactctgagccacac

SEQ ID NO: 165294 - DNA, 20 bp, Artificial Sequence
  Synthetic oligonucleotide; TGG chr2 60514075 60514094 60514091 +
ccacaccagccatctccttg

SEQ ID NO: 165295 - DNA, 20 bp, Artificial Sequence
  Synthetic oligonucleotide; GAG chr2 60514086 60514105 60514102 +
atctccttgtggactttcct

SEQ ID NO: 165296 - DNA, 20 bp, Artificial Sequence
  Synthetic oligonucleotide; GAG chr2 60514088 60514107 60514104 +
ctccttgtggactttcctga

SEQ ID NO: 165297 - DNA, 20 bp, Artificial Sequence
  Synthetic oligonucleotide; CAG chr2 60514097 60514116 60514113 +
gactttcctgagagcacgtg

SEQ ID NO: 165298 - DNA, 20 bp, Artificial Sequence
  Synthetic oligonucleotide; TAG chr2 60514101 60514120 60514117 +
ttcctgagagcacgtgcagc

SEQ ID NO: 165299 - DNA, 20 bp, Artificial Sequence
  Synthetic oligonucleotide; CAG chr2 60514104 60514123 60514120 +
ctgagagcacgtgcagctag

SEQ ID NO: 165300 - DNA, 20 bp, Artificial Sequence
  Synthetic oligonucleotide; AAG chr2 60514113 60514132 60514129 +
cgtgcagctagcagtgctcc

SEQ ID NO: 165301 - DNA, 20 bp, Artificial Sequence
  Synthetic oligonucleotide; GAG chr2 60514124 60514143 60514140 +
cagtgctccaagcactctct

SEQ ID NO: 165302 - DNA, 20 bp, Artificial Sequence
  Synthetic oligonucleotide; GAG chr2 60514126 60514145 60514142 +
gtgctccaagcactctctga

SEQ ID NO: 165303 - DNA, 20 bp, Artificial Sequence
  Synthetic oligonucleotide; AGG chr2 60514127 60514146 60514143 +
tgctccaagcactctctgag

SEQ ID NO: 165304 - DNA, 20 bp, Artificial Sequence
  Synthetic oligonucleotide; CAG chr2 60514134 60514153 60514150 +
agcactctctgagaggcttc

SEQ ID NO: 165305 - DNA, 20 bp, Artificial Sequence
  Synthetic oligonucleotide; AGG chr2 60514135 60514154 60514151 +
gcactctctgagaggcttcc

SEQ ID NO: 165306 - DNA, 20 bp, Artificial Sequence
  Synthetic oligonucleotide; TGG chr2 60514139 60514158 60514155 +
tctctgagaggcttccaggc

SEQ ID NO: 165307 - DNA, 20 bp, Artificial Sequence
  Synthetic oligonucleotide; GAG chr2 60514141 60514160 60514157 +
tctgagaggcttccaggctg

SEQ ID NO: 165308 - DNA, 20 bp, Artificial Sequence
  Synthetic oligonucleotide; GAG chr2 60514148 60514167 60514164 +
ggcttccaggctggagctct

SEQ ID NO: 165309 - DNA, 20 bp, Artificial Sequence
  Synthetic oligonucleotide; GAG chr2 60514150 60514169 60514166 +
cttccaggctggagctctga

SEQ ID NO: 165310 - DNA, 20 bp, Artificial Sequence
  Synthetic oligonucleotide; AGG chr2 60514151 60514170 60514167 +
ttccaggctggagctctgag

SEQ ID NO: 165311 - DNA, 20 bp, Artificial Sequence
  Synthetic oligonucleotide; CAG chr2 60514158 60514177 60514174 +
ctggagctctgagaggcttc

SEQ ID NO: 165312 - DNA, 20 bp, Artificial Sequence
  Synthetic oligonucleotide; AGG chr2 60514159 60514178 60514175 +
tggagctctgagaggcttcc

SEQ ID NO: 165313 - DNA, 20 bp, Artificial Sequence
  Synthetic oligonucleotide; TGG chr2 60514163 60514182 60514179 +
gctctgagaggcttccaggc

SEQ ID NO: 165314 - DNA, 20 bp, Artificial Sequence
  Synthetic oligonucleotide; GGG chr2 60514164 60514183 60514180 +
ctctgagaggcttccaggct

SEQ ID NO: 165315 - DNA, 20 bp, Artificial Sequence
  Synthetic oligonucleotide; CAG chr2 60514174 60514193 60514190 +
cttccaggctgggctacctc

SEQ ID NO: 165316 - DNA, 20 bp, Artificial Sequence
  Synthetic oligonucleotide; TGG chr2 60514182 60514201 60514198 +
ctgggctacctccagccatg

SEQ ID NO: 165317 - DNA, 20 bp, Artificial Sequence
  Synthetic oligonucleotide; TGG chr2 60514185 60514204 60514201 +
ggctacctccagccatgtgg

SEQ ID NO: 165318 - DNA, 20 bp, Artificial Sequence
  Synthetic oligonucleotide; TGG chr2 60514192 60514211 60514208 +
tccagccatgtggtggaaac

SEQ ID NO: 165319 - DNA, 20 bp, Artificial Sequence
  Synthetic oligonucleotide; TAG chr2 60514195 60514214 60514211 +
agccatgtggtggaaactgg

SEQ ID NO: 165320 - DNA, 20 bp, Artificial Sequence
  Synthetic oligonucleotide; AAG chr2 60514200 60514219 60514216 +
tgtggtggaaactggtagca

SEQ ID NO: 165321 - DNA, 20 bp, Artificial Sequence
  Synthetic oligonucleotide; AGG chr2 60514201 60514220 60514217 +
gtggtggaaactggtagcaa

SEQ ID NO: 165322 - DNA, 20 bp, Artificial Sequence
  Synthetic oligonucleotide; AAG chr2 60514204 60514223 60514220 +
gtggaaactggtagcaaagg

SEQ ID NO: 165323 - DNA, 20 bp, Artificial Sequence
  Synthetic oligonucleotide; CAG chr2 60514209 60514228 60514225 +
aactggtagcaaaggaagcc

SEQ ID NO: 165324 - DNA, 20 bp, Artificial Sequence
  Synthetic oligonucleotide; AAG chr2 60514212 60514231 60514228 +
tggtagcaaaggaagcccag

SEQ ID NO: 165325 - DNA, 20 bp, Artificial Sequence
  Synthetic oligonucleotide; AGG chr2 60514213 60514232 60514229 +
ggtagcaaaggaagcccaga

SEQ ID NO: 165326 - DNA, 20 bp, Artificial Sequence
  Synthetic oligonucleotide; GGG chr2 60514214 60514233 60514230 +
gtagcaaaggaagcccagaa

SEQ ID NO: 165327 - DNA, 20 bp, Artificial Sequence
  Synthetic oligonucleotide; TAG chr2 60514229 60514248 60514245 +
cagaagggccacaactgaac

SEQ ID NO: 165328 - DNA, 20 bp, Artificial Sequence
  Synthetic oligonucleotide; AAG chr2 60514232 60514251 60514248 +
aagggccacaactgaactag

SEQ ID NO: 165329 - DNA, 20 bp, Artificial Sequence
  Synthetic oligonucleotide; AGG chr2 60514233 60514252 60514249 +
agggccacaactgaactaga

SEQ ID NO: 165330 - DNA, 20 bp, Artificial Sequence
  Synthetic oligonucleotide; AAG chr2 60514238 60514257 60514254 +
cacaactgaactagaaggct

SEQ ID NO: 165331 - DNA, 20 bp, Artificial Sequence
  Synthetic oligonucleotide; AGG chr2 60514239 60514258 60514255 +
acaactgaactagaaggcta

SEQ ID NO: 165332 - DNA, 20 bp, Artificial Sequence
  Synthetic oligonucleotide; CGG chr2 60514249 60514268 60514265 +
tagaaggctaaggaacaccc

SEQ ID NO: 165333 - DNA, 20 bp, Artificial Sequence
  Synthetic oligonucleotide; TGG chr2 60514256 60514275 60514272 +
ctaaggaacaccccggccac

SEQ ID NO: 165334 - DNA, 20 bp, Artificial Sequence
  Synthetic oligonucleotide; TGG chr2 60514259 60514278 60514275 +
aggaacaccccggccactgg

SEQ ID NO: 165335 - DNA, 20 bp, Artificial Sequence
  Synthetic oligonucleotide; GGG chr2 60514260 60514279 60514276 +
ggaacaccccggccactggt

SEQ ID NO: 165336 - DNA, 20 bp, Artificial Sequence
  Synthetic oligonucleotide; CAG chr2 60514267 60514286 60514283 +
cccggccactggtgggatcg

SEQ ID NO: 165337 - DNA, 20 bp, Artificial Sequence
  Synthetic oligonucleotide; GAG chr2 60514274 60514293 60514290 +
actggtgggatcgcagtgct

SEQ ID NO: 165338 - DNA, 20 bp, Artificial Sequence
  Synthetic oligonucleotide; GAG chr2 60514281 60514300 60514297 +
ggatcgcagtgctgagccat

SEQ ID NO: 165339 - DNA, 20 bp, Artificial Sequence
  Synthetic oligonucleotide; CAG chr2 60514290 60514309 60514306 +
tgctgagccatgagccctac

SEQ ID NO: 165340 - DNA, 20 bp, Artificial Sequence
  Synthetic oligonucleotide; AGG chr2 60514291 60514310 60514307 +
gctgagccatgagccctacc

SEQ ID NO: 165341 - DNA, 20 bp, Artificial Sequence
  Synthetic oligonucleotide; TGG chr2 60514305 60514324 60514321 +
cctaccaggcaacccatttc

SEQ ID NO: 165342 - DNA, 20 bp, Artificial Sequence
  Synthetic oligonucleotide; GGG chr2 60514306 60514325 60514322 +
ctaccaggcaacccatttct

SEQ ID NO: 165343 - DNA, 20 bp, Artificial Sequence
  Synthetic oligonucleotide; CAG chr2 60514309 60514328 60514325 +
ccaggcaacccatttctggg

SEQ ID NO: 165344 - DNA, 20 bp, Artificial Sequence
  Synthetic oligonucleotide; AAG chr2 60514316 60514335 60514332 +
acccatttctgggcagtccc

SEQ ID NO: 165345 - DNA, 20 bp, Artificial Sequence
  Synthetic oligonucleotide; TGG chr2 60514322 60514341 60514338 +
ttctgggcagtcccaagact

SEQ ID NO: 165346 - DNA, 20 bp, Artificial Sequence
  Synthetic oligonucleotide; GAG chr2 60514324 60514343 60514340 +
ctgggcagtcccaagacttg

SEQ ID NO: 165347 - DNA, 20 bp, Artificial Sequence
  Synthetic oligonucleotide; AAG chr2 60514330 60514349 60514346 +
agtcccaagacttggagaac

SEQ ID NO: 165348 - DNA, 20 bp, Artificial Sequence
  Synthetic oligonucleotide; TAG chr2 60514344 60514363 60514360 +
gagaacaagccatctgaaaa

SEQ ID NO: 165349 - DNA, 20 bp, Artificial Sequence
  Synthetic oligonucleotide; TAG chr2 60514354 60514373 60514370 +
catctgaaaatagaattaaa

SEQ ID NO: 165350 - DNA, 20 bp, Artificial Sequence
  Synthetic oligonucleotide; CAG chr2 60514358 60514377 60514374 +
tgaaaatagaattaaatagc

SEQ ID NO: 165351 - DNA, 20 bp, Artificial Sequence
  Synthetic oligonucleotide; AGG chr2 60514359 60514378 60514375 +
gaaaatagaattaaatagcc

SEQ ID NO: 165352 - DNA, 20 bp, Artificial Sequence
  Synthetic oligonucleotide; CGG chr2 60514364 60514383 60514380 +
tagaattaaatagccaggtg

SEQ ID NO: 165353 - DNA, 20 bp, Artificial Sequence
  Synthetic oligonucleotide; TGG chr2 60514367 60514386 60514383 +
aattaaatagccaggtgcgg

SEQ ID NO: 165354 - DNA, 20 bp, Artificial Sequence
  Synthetic oligonucleotide; CAG chr2 60514386 60514405 60514402 +
gtggctcacacctgtaatct

SEQ ID NO: 165355 - DNA, 20 bp, Artificial Sequence
  Synthetic oligonucleotide; TGG chr2 60514394 60514413 60514410 +
cacctgtaatctcagcattt

SEQ ID NO: 165356 - DNA, 20 bp, Artificial Sequence
  Synthetic oligonucleotide; GGG chr2 60514395 60514414 60514411 +
acctgtaatctcagcatttt

SEQ ID NO: 165357 - DNA, 20 bp, Artificial Sequence
  Synthetic oligonucleotide; GAG chr2 60514397 60514416 60514413 +
ctgtaatctcagcattttgg

SEQ ID NO: 165358 - DNA, 20 bp, Artificial Sequence
  Synthetic oligonucleotide; AGG chr2 60514398 60514417 60514414 +
tgtaatctcagcattttggg

SEQ ID NO: 165359 - DNA, 20 bp, Artificial Sequence
  Synthetic oligonucleotide; GAG chr2 60514403 60514422 60514419 +
tctcagcattttgggaggcc

SEQ ID NO: 165360 - DNA, 20 bp, Artificial Sequence
  Synthetic oligonucleotide; AGG chr2 60514404 60514423 60514420 +
ctcagcattttgggaggccg

SEQ ID NO: 165361 - DNA, 20 bp, Artificial Sequence
  Synthetic oligonucleotide; TGG chr2 60514411 60514430 60514427 +
ttttgggaggccgaggcgtg

SEQ ID NO: 165362 - DNA, 20 bp, Artificial Sequence
  Synthetic oligonucleotide; GGG chr2 60514412 60514431 60514428 +
tttgggaggccgaggcgtgt

SEQ ID NO: 165363 - DNA, 20 bp, Artificial Sequence
  Synthetic oligonucleotide; GAG chr2 60514421 60514440 60514437 +
ccgaggcgtgtgggtcacct

SEQ ID NO: 165364 - DNA, 20 bp, Artificial Sequence
  Synthetic oligonucleotide; AGG chr2 60514422 60514441 60514438 +
cgaggcgtgtgggtcacctg

SEQ ID NO: 165365 - DNA, 20 bp, Artificial Sequence
  Synthetic oligonucleotide; CAG chr2 60514426 60514445 60514442 +
gcgtgtgggtcacctgaggt

SEQ ID NO: 165366 - DNA, 20 bp, Artificial Sequence
  Synthetic oligonucleotide; AGG chr2 60514427 60514446 60514443 +
cgtgtgggtcacctgaggtc

SEQ ID NO: 165367 - DNA, 20 bp, Artificial Sequence
  Synthetic oligonucleotide; GAG chr2 60514429 60514448 60514445 +
tgtgggtcacctgaggtcag

SEQ ID NO: 165368 - DNA, 20 bp, Artificial Sequence
  Synthetic oligonucleotide; AAG chr2 60514435 60514454 60514451 +
tcacctgaggtcaggagttc

SEQ ID NO: 165369 - DNA, 20 bp, Artificial Sequence
  Synthetic oligonucleotide; CAG chr2 60514440 60514459 60514456 +
tgaggtcaggagttcaagac

SEQ ID NO: 165370 - DNA, 20 bp, Artificial Sequence
  Synthetic oligonucleotide; TAG chr2 60514445 60514464 60514461 +
tcaggagttcaagaccagcc

SEQ ID NO: 165371 - DNA, 20 bp, Artificial Sequence
  Synthetic oligonucleotide; TGG chr2 60514454 60514473 60514470 +
caagaccagcctagccaaca

SEQ ID NO: 165372 - DNA, 20 bp, Artificial Sequence
  Synthetic oligonucleotide; CAG chr2 60514500 60514519 60514516 +
aaaaaaaaaaaaaaaaaaat

SEQ ID NO: 165373 - DNA, 20 bp, Artificial Sequence
  Synthetic oligonucleotide; CAG chr2 60514504 60514523 60514520 +
aaaaaaaaaaaaaaatcagc

SEQ ID NO: 165374 - DNA, 20 bp, Artificial Sequence
  Synthetic oligonucleotide; AGG chr2 60514505 60514524 60514521 +
aaaaaaaaaaaaaatcagcc

SEQ ID NO: 165375 - DNA, 20 bp, Artificial Sequence
  Synthetic oligonucleotide; TGG chr2 60514513 60514532 60514529 +
aaaaaatcagccaggtgtga

SEQ ID NO: 165376 - DNA, 20 bp, Artificial Sequence
  Synthetic oligonucleotide; CAG chr2 60514532 60514551 60514548 +
atggcatgcacctataatcc

SEQ ID NO: 165377 - DNA, 20 bp, Artificial Sequence
  Synthetic oligonucleotide; TGG chr2 60514540 60514559 60514556 +
cacctataatcccagctact

SEQ ID NO: 165378 - DNA, 20 bp, Artificial Sequence
  Synthetic oligonucleotide; GGG chr2 60514541 60514560 60514557 +
acctataatcccagctactt

SEQ ID NO: 165379 - DNA, 20 bp, Artificial Sequence
  Synthetic oligonucleotide; GAG chr2 60514543 60514562 60514559 +
ctataatcccagctacttgg

SEQ ID NO: 165380 - DNA, 20 bp, Artificial Sequence
  Synthetic oligonucleotide; AGG chr2 60514544 60514563 60514560 +
tataatcccagctacttggg

SEQ ID NO: 165381 - DNA, 20 bp, Artificial Sequence
  Synthetic oligonucleotide; GAG chr2 60514549 60514568 60514565 +
tcccagctacttgggaggct

SEQ ID NO: 165382 - DNA, 20 bp, Artificial Sequence
  Synthetic oligonucleotide; AGG chr2 60514550 60514569 60514566 +
cccagctacttgggaggctg

SEQ ID NO: 165383 - DNA, 20 bp, Artificial Sequence
  Synthetic oligonucleotide; CAG chr2 60514553 60514572 60514569 +
agctacttgggaggctgagg

SEQ ID NO: 165384 - DNA, 20 bp, Artificial Sequence
  Synthetic oligonucleotide; AGG chr2 60514554 60514573 60514570 +
gctacttgggaggctgaggc

SEQ ID NO: 165385 - DNA, 20 bp, Artificial Sequence
  Synthetic oligonucleotide; GAG chr2 60514556 60514575 60514572 +
tacttgggaggctgaggcag

SEQ ID NO: 165386 - DNA, 20 bp, Artificial Sequence
  Synthetic oligonucleotide; TGG chr2 60514572 60514591 60514588 +
gcaggagaatcacttgaacc

SEQ ID NO: 165387 - DNA, 20 bp, Artificial Sequence
  Synthetic oligonucleotide; GGG chr2 60514573 60514592 60514589 +
caggagaatcacttgaacct

SEQ ID NO: 165388 - DNA, 20 bp, Artificial Sequence
  Synthetic oligonucleotide; GAG chr2 60514575 60514594 60514591 +
ggagaatcacttgaacctgg

SEQ ID NO: 165389 - DNA, 20 bp, Artificial Sequence
  Synthetic oligonucleotide; AGG chr2 60514576 60514595 60514592 +
gagaatcacttgaacctggg

SEQ ID NO: 165390 - DNA, 20 bp, Artificial Sequence
  Synthetic oligonucleotide; CGG chr2 60514579 60514598 60514595 +
aatcacttgaacctgggagg

SEQ ID NO: 165391 - DNA, 20 bp, Artificial Sequence
  Synthetic oligonucleotide; GAG chr2 60514581 60514600 60514597 +
tcacttgaacctgggaggcg

SEQ ID NO: 165392 - DNA, 20 bp, Artificial Sequence
  Synthetic oligonucleotide; AGG chr2 60514582 60514601 60514598 +
cacttgaacctgggaggcgg

SEQ ID NO: 165393 - DNA, 20 bp, Artificial Sequence
  Synthetic oligonucleotide; GAG chr2 60514592 60514611 60514608 +
tgggaggcggaggctgcaat

SEQ ID NO: 165394 - DNA, 20 bp, Artificial Sequence
  Synthetic oligonucleotide; GAG chr2 60514597 60514616 60514613 +
ggcggaggctgcaatgagcc

SEQ ID NO: 165395 - DNA, 20 bp, Artificial Sequence
  Synthetic oligonucleotide; TAG chr2 60514604 60514623 60514620 +
gctgcaatgagccgagatcg

SEQ ID NO: 165396 - DNA, 20 bp, Artificial Sequence
  Synthetic oligonucleotide; CAG chr2 60514617 60514636 60514633 +
gagatcgtagcactgcactc

SEQ ID NO: 165397 - DNA, 20 bp, Artificial Sequence
  Synthetic oligonucleotide; TGG chr2 60514622 60514641 60514638 +
cgtagcactgcactccagcc

SEQ ID NO: 165398 - DNA, 20 bp, Artificial Sequence
  Synthetic oligonucleotide; GGG chr2 60514623 60514642 60514639 +
gtagcactgcactccagcct

SEQ ID NO: 165399 - DNA, 20 bp, Artificial Sequence
  Synthetic oligonucleotide; CAG chr2 60514629 60514648 60514645 +
ctgcactccagcctgggcga

SEQ ID NO: 165400 - DNA, 20 bp, Artificial Sequence
  Synthetic oligonucleotide; GAG chr2 60514631 60514650 60514647 +
gcactccagcctgggcgaca

SEQ ID NO: 165401 - DNA, 20 bp, Artificial Sequence
  Synthetic oligonucleotide; GAG chr2 60514635 60514654 60514651 +
tccagcctgggcgacagagc

SEQ ID NO: 165402 - DNA, 20 bp, Artificial Sequence
  Synthetic oligonucleotide; TGG chr2 60514669 60514688 60514685 +
aaaaaaaaaaaaaattaaat

SEQ ID NO: 165403 - DNA, 20 bp, Artificial Sequence
  Synthetic oligonucleotide; GGG chr2 60514670 60514689 60514686 +
aaaaaaaaaaaaattaaatt

SEQ ID NO: 165404 - DNA, 20 bp, Artificial Sequence
  Synthetic oligonucleotide; TGG chr2 60514673 60514692 60514689 +
aaaaaaaaaattaaattggg

SEQ ID NO: 165405 - DNA, 20 bp, Artificial Sequence
  Synthetic oligonucleotide; GGG chr2 60514674 60514693 60514690 +
aaaaaaaaattaaattgggt

SEQ ID NO: 165406 - DNA, 20 bp, Artificial Sequence
  Synthetic oligonucleotide; GGG chr2 60514675 60514694 60514691 +
aaaaaaaattaaattgggtg

SEQ ID NO: 165407 - DNA, 20 bp, Artificial Sequence
  Synthetic oligonucleotide; GGG chr2 60514676 60514695 60514692 +
aaaaaaattaaattgggtgg

SEQ ID NO: 165408 - DNA, 20 bp, Artificial Sequence
  Synthetic oligonucleotide; GAG chr2 60514678 60514697 60514694 +
aaaaattaaattgggtgggg

SEQ ID NO: 165409 - DNA, 20 bp, Artificial Sequence
  Synthetic oligonucleotide; TAG chr2 60514686 60514705 60514702 +
aattgggtgggggagtttct

SEQ ID NO: 165410 - DNA, 20 bp, Artificial Sequence
  Synthetic oligonucleotide; AGG chr2 60514687 60514706 60514703 +
attgggtgggggagtttctt

SEQ ID NO: 165411 - DNA, 20 bp, Artificial Sequence
  Synthetic oligonucleotide; CAG chr2 60514698 60514717 60514714 +
gagtttcttaggaaaaaaat

SEQ ID NO: 165412 - DNA, 20 bp, Artificial Sequence
  Synthetic oligonucleotide; GAG chr2 60514700 60514719 60514716 +
gtttcttaggaaaaaaatca

SEQ ID NO: 165413 - DNA, 20 bp, Artificial Sequence
  Synthetic oligonucleotide; TAG chr2 60514718 60514737 60514734 +
cagagttgtgcaaataaatc

SEQ ID NO: 165414 - DNA, 20 bp, Artificial Sequence
  Synthetic oligonucleotide; TGG chr2 60514722 60514741 60514738 +
gttgtgcaaataaatctagt

SEQ ID NO: 165415 - DNA, 20 bp, Artificial Sequence
  Synthetic oligonucleotide; AAG chr2 60514750 60514769 60514766 +
ctgtctttacaacacaatga

SEQ ID NO: 165416 - DNA, 20 bp, Artificial Sequence
  Synthetic oligonucleotide; AGG chr2 60514751 60514770 60514767 +
tgtctttacaacacaatgaa

SEQ ID NO: 165417 - DNA, 20 bp, Artificial Sequence
  Synthetic oligonucleotide; GGG chr2 60514752 60514771 60514768 +
gtctttacaacacaatgaaa

SEQ ID NO: 165418 - DNA, 20 bp, Artificial Sequence
  Synthetic oligonucleotide; AAG chr2 60514756 60514775 60514772 +
ttacaacacaatgaaagggt

SEQ ID NO: 165419 - DNA, 20 bp, Artificial Sequence
  Synthetic oligonucleotide; AGG chr2 60514757 60514776 60514773 +
tacaacacaatgaaagggta

SEQ ID NO: 165420 - DNA, 20 bp, Artificial Sequence
  Synthetic oligonucleotide; AAG chr2 60514766 60514785 60514782 +
atgaaagggtaaggcaccat

SEQ ID NO: 165421 - DNA, 20 bp, Artificial Sequence
  Synthetic oligonucleotide; GAG chr2 60514768 60514787 60514784 +
gaaagggtaaggcaccataa

SEQ ID NO: 165422 - DNA, 20 bp, Artificial Sequence
  Synthetic oligonucleotide; AGG chr2 60514769 60514788 60514785 +
aaagggtaaggcaccataag

SEQ ID NO: 165423 - DNA, 20 bp, Artificial Sequence
  Synthetic oligonucleotide; AAG chr2 60514789 60514808 60514805 +
aggctgtgaattccattgat

SEQ ID NO: 165424 - DNA, 20 bp, Artificial Sequence
  Synthetic oligonucleotide; GAG chr2 60514791 60514810 60514807 +
gctgtgaattccattgataa

SEQ ID NO: 165425 - DNA, 20 bp, Artificial Sequence
  Synthetic oligonucleotide; GAG chr2 60514793 60514812 60514809 +
tgtgaattccattgataaga

SEQ ID NO: 165426 - DNA, 20 bp, Artificial Sequence
  Synthetic oligonucleotide; AGG chr2 60514794 60514813 60514810 +
gtgaattccattgataagag

SEQ ID NO: 165427 - DNA, 20 bp, Artificial Sequence
  Synthetic oligonucleotide; AAG chr2 60514817 60514836 60514833 +
atttccctactcaaatatca

SEQ ID NO: 165428 - DNA, 20 bp, Artificial Sequence
  Synthetic oligonucleotide; AGG chr2 60514818 60514837 60514834 +
tttccctactcaaatatcaa

SEQ ID NO: 165429 - DNA, 20 bp, Artificial Sequence
  Synthetic oligonucleotide; CAG chr2 60514844 60514863 60514860 +
tgcatacacatacactaaaa

SEQ ID NO: 165430 - DNA, 20 bp, Artificial Sequence
  Synthetic oligonucleotide; AAG chr2 60514851 60514870 60514867 +
acatacactaaaacagaaaa

SEQ ID NO: 165431 - DNA, 20 bp, Artificial Sequence
  Synthetic oligonucleotide; AAG chr2 60514865 60514884 60514881 +
agaaaaaagaaaaaaaaaaa

SEQ ID NO: 165432 - DNA, 20 bp, Artificial Sequence
  Synthetic oligonucleotide; AAG chr2 60514870 60514889 60514886 +
aaagaaaaaaaaaaaaagaa

SEQ ID NO: 165433 - DNA, 20 bp, Artificial Sequence
  Synthetic oligonucleotide; GAG chr2 60514872 60514891 60514888 +
agaaaaaaaaaaaaagaaaa

SEQ ID NO: 165434 - DNA, 20 bp, Artificial Sequence
  Synthetic oligonucleotide; GAG chr2 60514874 60514893 60514890 +
aaaaaaaaaaaaagaaaaga

SEQ ID NO: 165435 - DNA, 20 bp, Artificial Sequence
  Synthetic oligonucleotide; CAG chr2 60514878 60514897 60514894 +
aaaaaaaaagaaaagagaga

SEQ ID NO: 165436 - DNA, 20 bp, Artificial Sequence
  Synthetic oligonucleotide; GAG chr2 60514880 60514899 60514896 +
aaaaaaagaaaagagagaca

SEQ ID NO: 165437 - DNA, 20 bp, Artificial Sequence
  Synthetic oligonucleotide; GAG chr2 60514882 60514901 60514898 +
aaaaagaaaagagagacaga

SEQ ID NO: 165438 - DNA, 20 bp, Artificial Sequence
  Synthetic oligonucleotide; GAG chr2 60514884 60514903 60514900 +
aaagaaaagagagacagaga

SEQ ID NO: 165439 - DNA, 20 bp, Artificial Sequence
  Synthetic oligonucleotide; GAG chr2 60514886 60514905 60514902 +
agaaaagagagacagagaga

SEQ ID NO: 165440 - DNA, 20 bp, Artificial Sequence
  Synthetic oligonucleotide; GAG chr2 60514888 60514907 60514904 +
aaaagagagacagagagaga

SEQ ID NO: 165441 - DNA, 20 bp, Artificial Sequence
  Synthetic oligonucleotide; GAG chr2 60514890 60514909 60514906 +
aagagagacagagagagaga

SEQ ID NO: 165442 - DNA, 20 bp, Artificial Sequence
  Synthetic oligonucleotide; AAG chr2 60514914 60514933 60514930 +
atcaccttttaaactcatcc

SEQ ID NO: 165443 - DNA, 20 bp, Artificial Sequence
  Synthetic oligonucleotide; GAG chr2 60514916 60514935 60514932 +
caccttttaaactcatccaa

SEQ ID NO: 165444 - DNA, 20 bp, Artificial Sequence
  Synthetic oligonucleotide; CAG chr2 60514920 60514939 60514936 +
ttttaaactcatccaagagc

SEQ ID NO: 165445 - DNA, 20 bp, Artificial Sequence
  Synthetic oligonucleotide; AAG chr2 60514926 60514945 60514942 +
actcatccaagagccagtca

SEQ ID NO: 165446 - DNA, 20 bp, Artificial Sequence
  Synthetic oligonucleotide; AAG chr2 60514936 60514955 60514952 +
gagccagtcaaagccaccca

SEQ ID NO: 165447 - DNA, 20 bp, Artificial Sequence
  Synthetic oligonucleotide; AGG chr2 60514937 60514956 60514953 +
agccagtcaaagccacccaa

SEQ ID NO: 165448 - DNA, 20 bp, Artificial Sequence
  Synthetic oligonucleotide; AAG chr2 60514941 60514960 60514957 +
agtcaaagccacccaaagga

SEQ ID NO: 165449 - DNA, 20 bp, Artificial Sequence
  Synthetic oligonucleotide; CAG chr2 60514944 60514963 60514960 +
caaagccacccaaaggaaag

SEQ ID NO: 165450 - DNA, 20 bp, Artificial Sequence
  Synthetic oligonucleotide; AGG chr2 60514945 60514964 60514961 +
aaagccacccaaaggaaagc

SEQ ID NO: 165451 - DNA, 20 bp, Artificial Sequence
  Synthetic oligonucleotide; CAG chr2 60514951 60514970 60514967 +
acccaaaggaaagcaggccc

SEQ ID NO: 165452 - DNA, 20 bp, Artificial Sequence
  Synthetic oligonucleotide; CAG chr2 60514967 60514986 60514983 +
gccccagtcccttccgaact

SEQ ID NO: 165453 - DNA, 20 bp, Artificial Sequence
  Synthetic oligonucleotide; TGG chr2 60514982 60515001 60514998 +
gaactcagccgttctccctc

SEQ ID NO: 165454 - DNA, 20 bp, Artificial Sequence
  Synthetic oligonucleotide; GAG chr2 60514986 60515005 60515002 +
tcagccgttctccctctggt

SEQ ID NO: 165455 - DNA, 20 bp, Artificial Sequence
  Synthetic oligonucleotide; CAG chr2 60514990 60515009 60515006 +
ccgttctccctctggtgaga

SEQ ID NO: 165456 - DNA, 20 bp, Artificial Sequence
  Synthetic oligonucleotide; AGG chr2 60514991 60515010 60515007 +
cgttctccctctggtgagac

SEQ ID NO: 165457 - DNA, 20 bp, Artificial Sequence
  Synthetic oligonucleotide; TAG chr2 60514997 60515016 60515013 +
ccctctggtgagacaggctc

SEQ ID NO: 165458 - DNA, 20 bp, Artificial Sequence
  Synthetic oligonucleotide; CAG chr2 60515008 60515027 60515024 +
gacaggctctagcttgtttc

SEQ ID NO: 165459 - DNA, 20 bp, Artificial Sequence
  Synthetic oligonucleotide; CAG chr2 60515022 60515041 60515038 +
tgtttccagaatgccactac

SEQ ID NO: 165460 - DNA, 20 bp, Artificial Sequence
  Synthetic oligonucleotide; CAG chr2 60515038 60515057 60515054 +
ctaccagcttcccacacctc

SEQ ID NO: 165461 - DNA, 20 bp, Artificial Sequence
  Synthetic oligonucleotide; AGG chr2 60515039 60515058 60515055 +
taccagcttcccacacctcc

SEQ ID NO: 165462 - DNA, 20 bp, Artificial Sequence
  Synthetic oligonucleotide; GGG chr2 60515040 60515059 60515056 +
accagcttcccacacctcca

SEQ ID NO: 165463 - DNA, 20 bp, Artificial Sequence
  Synthetic oligonucleotide; GGG chr2 60515041 60515060 60515057 +
ccagcttcccacacctccag

SEQ ID NO: 165464 - DNA, 20 bp, Artificial Sequence
  Synthetic oligonucleotide; AAG chr2 60515058 60515077 60515074 +
caggggaccccctaactcca

SEQ ID NO: 165465 - DNA, 20 bp, Artificial Sequence
  Synthetic oligonucleotide; CAG chr2 60515068 60515087 60515084 +
cctaactccaaagtgttgcc

SEQ ID NO: 165466 - DNA, 20 bp, Artificial Sequence
  Synthetic oligonucleotide; AAG chr2 60515075 60515094 60515091 +
ccaaagtgttgcccagacct

SEQ ID NO: 165467 - DNA, 20 bp, Artificial Sequence
  Synthetic oligonucleotide; AGG chr2 60515076 60515095 60515092 +
caaagtgttgcccagaccta

SEQ ID NO: 165468 - DNA, 20 bp, Artificial Sequence
  Synthetic oligonucleotide; TGG chr2 60515109 60515128 60515125 +
acgtgctccttccccaacac

SEQ ID NO: 165469 - DNA, 20 bp, Artificial Sequence
  Synthetic oligonucleotide; CAG chr2 60515116 60515135 60515132 +
ccttccccaacactggcttc

SEQ ID NO: 165470 - DNA, 20 bp, Artificial Sequence
  Synthetic oligonucleotide; AGG chr2 60515117 60515136 60515133 +
cttccccaacactggcttcc

SEQ ID NO: 165471 - DNA, 20 bp, Artificial Sequence
  Synthetic oligonucleotide; GAG chr2 60515121 60515140 60515137 +
cccaacactggcttccaggt

SEQ ID NO: 165472 - DNA, 20 bp, Artificial Sequence
  Synthetic oligonucleotide; GAG chr2 60515125 60515144 60515141 +
acactggcttccaggtgagc

SEQ ID NO: 165473 - DNA, 20 bp, Artificial Sequence
  Synthetic oligonucleotide; CAG chr2 60515129 60515148 60515145 +
tggcttccaggtgagcgaga

SEQ ID NO: 165474 - DNA, 20 bp, Artificial Sequence
  Synthetic oligonucleotide; AAG chr2 60515139 60515158 60515155 +
gtgagcgagacagaatctgc

SEQ ID NO: 165475 - DNA, 20 bp, Artificial Sequence
  Synthetic oligonucleotide; CAG chr2 60515142 60515161 60515158 +
agcgagacagaatctgcaag

SEQ ID NO: 165476 - DNA, 20 bp, Artificial Sequence
  Synthetic oligonucleotide; GAG chr2 60515144 60515163 60515160 +
cgagacagaatctgcaagca

SEQ ID NO: 165477 - DNA, 20 bp, Artificial Sequence
  Synthetic oligonucleotide; TGG chr2 60515162 60515181 60515178 +
cagagttcactgcttgacca

SEQ ID NO: 165478 - DNA, 20 bp, Artificial Sequence
  Synthetic oligonucleotide; GGG chr2 60515163 60515182 60515179 +
agagttcactgcttgaccat

SEQ ID NO: 165479 - DNA, 20 bp, Artificial Sequence
  Synthetic oligonucleotide; GGG chr2 60515164 60515183 60515180 +
gagttcactgcttgaccatg

SEQ ID NO: 165480 - DNA, 20 bp, Artificial Sequence
  Synthetic oligonucleotide; AAG chr2 60515170 60515189 60515186 +
actgcttgaccatggggtga

SEQ ID NO: 165481 - DNA, 20 bp, Artificial Sequence
  Synthetic oligonucleotide; AAG chr2 60515178 60515197 60515194 +
accatggggtgaaagccaca

SEQ ID NO: 165482 - DNA, 20 bp, Artificial Sequence
  Synthetic oligonucleotide; CAG chr2 60515188 60515207 60515204 +
gaaagccacaaagacaccac

SEQ ID NO: 165483 - DNA, 20 bp, Artificial Sequence
  Synthetic oligonucleotide; CAG chr2 60515203 60515222 60515219 +
accaccagctatcccaaccc

SEQ ID NO: 165484 - DNA, 20 bp, Artificial Sequence
  Synthetic oligonucleotide; CAG chr2 60515231 60515250 60515247 +
tcactttttcactttctccc

SEQ ID NO: 165485 - DNA, 20 bp, Artificial Sequence
  Synthetic oligonucleotide; AGG chr2 60515232 60515251 60515248 +
cactttttcactttctcccc

SEQ ID NO: 165486 - DNA, 20 bp, Artificial Sequence
  Synthetic oligonucleotide; GGG chr2 60515233 60515252 60515249 +
actttttcactttctcccca

SEQ ID NO: 165487 - DNA, 20 bp, Artificial Sequence
  Synthetic oligonucleotide; GAG chr2 60515235 60515254 60515251 +
tttttcactttctccccagg

SEQ ID NO: 165488 - DNA, 20 bp, Artificial Sequence
  Synthetic oligonucleotide; AGG chr2 60515236 60515255 60515252 +
ttttcactttctccccaggg

SEQ ID NO: 165489 - DNA, 20 bp, Artificial Sequence
  Synthetic oligonucleotide; AAG chr2 60515239 60515258 60515255 +
tcactttctccccagggagg

SEQ ID NO: 165490 - DNA, 20 bp, Artificial Sequence
  Synthetic oligonucleotide; AGG chr2 60515240 60515259 60515256 +
cactttctccccagggagga

SEQ ID NO: 165491 - DNA, 20 bp, Artificial Sequence
  Synthetic oligonucleotide; GGG chr2 60515241 60515260 60515257 +
actttctccccagggaggaa

SEQ ID NO: 165492 - DNA, 20 bp, Artificial Sequence
  Synthetic oligonucleotide; GGG chr2 60515242 60515261 60515258 +
ctttctccccagggaggaag

SEQ ID NO: 165493 - DNA, 20 bp, Artificial Sequence
  Synthetic oligonucleotide; GGG chr2 60515243 60515262 60515259 +
tttctccccagggaggaagg

SEQ ID NO: 165494 - DNA, 20 bp, Artificial Sequence
  Synthetic oligonucleotide; CAG chr2 60515259 60515278 60515275 +
aagggggaaataaacttgcc

SEQ ID NO: 165495 - DNA, 20 bp, Artificial Sequence
  Synthetic oligonucleotide; TGG chr2 60515276 60515295 60515292 +
gcccagcctcacaccttccc

SEQ ID NO: 165496 - DNA, 20 bp, Artificial Sequence
  Synthetic oligonucleotide; CAG chr2 60515280 60515299 60515296 +
agcctcacaccttccctgga

SEQ ID NO: 165497 - DNA, 20 bp, Artificial Sequence
  Synthetic oligonucleotide; AGG chr2 60515281 60515300 60515297 +
gcctcacaccttccctggac

SEQ ID NO: 165498 - DNA, 20 bp, Artificial Sequence
  Synthetic oligonucleotide; GGG chr2 60515282 60515301 60515298 +
cctcacaccttccctggaca

SEQ ID NO: 165499 - DNA, 20 bp, Artificial Sequence
  Synthetic oligonucleotide; GAG chr2 60515284 60515303 60515300 +
tcacaccttccctggacagg

SEQ ID NO: 165500 - DNA, 20 bp, Artificial Sequence
  Synthetic oligonucleotide; TGG chr2 60515288 60515307 60515304 +
accttccctggacagggagc

SEQ ID NO: 165501 - DNA, 20 bp, Artificial Sequence
  Synthetic oligonucleotide; GGG chr2 60515289 60515308 60515305 +
ccttccctggacagggagct

SEQ ID NO: 165502 - DNA, 20 bp, Artificial Sequence
  Synthetic oligonucleotide; GGG chr2 60515290 60515309 60515306 +
cttccctggacagggagctg

SEQ ID NO: 165503 - DNA, 20 bp, Artificial Sequence
  Synthetic oligonucleotide; AAG chr2 60515302 60515321 60515318 +
gggagctggggatccattca

SEQ ID NO: 165504 - DNA, 20 bp, Artificial Sequence
  Synthetic oligonucleotide; CGG chr2 60515307 60515326 60515323 +
ctggggatccattcaaagcc

SEQ ID NO: 165505 - DNA, 20 bp, Artificial Sequence
  Synthetic oligonucleotide; AAG chr2 60515327 60515346 60515343 +
cggtctttctctgttcaatc

SEQ ID NO: 165506 - DNA, 20 bp, Artificial Sequence
  Synthetic oligonucleotide; CAG chr2 60515330 60515349 60515346 +
tctttctctgttcaatcaag

SEQ ID NO: 165507 - DNA, 20 bp, Artificial Sequence
  Synthetic oligonucleotide; GAG chr2 60515336 60515355 60515352 +
tctgttcaatcaagcagcgt

SEQ ID NO: 165508 - DNA, 20 bp, Artificial Sequence
  Synthetic oligonucleotide; AAG chr2 60515341 60515360 60515357 +
tcaatcaagcagcgtgagca

SEQ ID NO: 165509 - DNA, 20 bp, Artificial Sequence
  Synthetic oligonucleotide; CAG chr2 60515346 60515365 60515362 +
caagcagcgtgagcaaagta

SEQ ID NO: 165510 - DNA, 20 bp, Artificial Sequence
  Synthetic oligonucleotide; CAG chr2 60515369 60515388 60515385 +
attaaatactacatatgaac

SEQ ID NO: 165511 - DNA, 20 bp, Artificial Sequence
  Synthetic oligonucleotide; TAG chr2 60515380 60515399 60515396 +
catatgaaccagcattatgt

SEQ ID NO: 165512 - DNA, 20 bp, Artificial Sequence
  Synthetic oligonucleotide; AGG chr2 60515381 60515400 60515397 +
atatgaaccagcattatgtt

SEQ ID NO: 165513 - DNA, 20 bp, Artificial Sequence
  Synthetic oligonucleotide; AAG chr2 60515388 60515407 60515404 +
ccagcattatgttaggcacc

SEQ ID NO: 165514 - DNA, 20 bp, Artificial Sequence
  Synthetic oligonucleotide; AAG chr2 60515391 60515410 60515407 +
gcattatgttaggcaccaag

SEQ ID NO: 165515 - DNA, 20 bp, Artificial Sequence
  Synthetic oligonucleotide; AGG chr2 60515392 60515411 60515408 +
cattatgttaggcaccaaga

SEQ ID NO: 165516 - DNA, 20 bp, Artificial Sequence
  Synthetic oligonucleotide; AAG chr2 60515428 60515447 60515444 +
acatgactcctgccctccaa

SEQ ID NO: 165517 - DNA, 20 bp, Artificial Sequence
  Synthetic oligonucleotide; AGG chr2 60515429 60515448 60515445 +
catgactcctgccctccaaa

SEQ ID NO: 165518 - DNA, 20 bp, Artificial Sequence
  Synthetic oligonucleotide; GAG chr2 60515441 60515460 60515457 +
cctccaaaaggttataattt

SEQ ID NO: 165519 - DNA, 20 bp, Artificial Sequence
  Synthetic oligonucleotide; AGG chr2 60515442 60515461 60515458 +
ctccaaaaggttataatttg

SEQ ID NO: 165520 - DNA, 20 bp, Artificial Sequence
  Synthetic oligonucleotide; GAG chr2 60515444 60515463 60515460 +
ccaaaaggttataatttgag

SEQ ID NO: 165521 - DNA, 20 bp, Artificial Sequence
  Synthetic oligonucleotide; AGG chr2 60515445 60515464 60515461 +
caaaaggttataatttgagg

SEQ ID NO: 165522 - DNA, 20 bp, Artificial Sequence
  Synthetic oligonucleotide; GAG chr2 60515447 60515466 60515463 +
aaaggttataatttgaggag

SEQ ID NO: 165523 - DNA, 20 bp, Artificial Sequence
  Synthetic oligonucleotide; GAG chr2 60515463 60515482 60515479 +
ggaggagaaaatacacccac

SEQ ID NO: 165524 - DNA, 20 bp, Artificial Sequence
  Synthetic oligonucleotide; CAG chr2 60515503 60515522 60515519 +
gatccccttttaactaatcc

SEQ ID NO: 165525 - DNA, 20 bp, Artificial Sequence
  Synthetic oligonucleotide; GAG chr2 60515505 60515524 60515521 +
tccccttttaactaatccca

SEQ ID NO: 165526 - DNA, 20 bp, Artificial Sequence
  Synthetic oligonucleotide; AAG chr2 60515522 60515541 60515538 +
ccagagtgacacctcctcca

SEQ ID NO: 165527 - DNA, 20 bp, Artificial Sequence
  Synthetic oligonucleotide; AAG chr2 60515526 60515545 60515542 +
agtgacacctcctccaaaga

SEQ ID NO: 165528 - DNA, 20 bp, Artificial Sequence
  Synthetic oligonucleotide; AAG chr2 60515531 60515550 60515547 +
cacctcctccaaagaaagcc

SEQ ID NO: 165529 - DNA, 20 bp, Artificial Sequence
  Synthetic oligonucleotide; CAG chr2 60515541 60515560 60515557 +
aaagaaagccaagttgctga

SEQ ID NO: 165530 - DNA, 20 bp, Artificial Sequence
  Synthetic oligonucleotide; GAG chr2 60515543 60515562 60515559 +
agaaagccaagttgctgaca

SEQ ID NO: 165531 - DNA, 20 bp, Artificial Sequence
  Synthetic oligonucleotide; CAG chr2 60515547 60515566 60515563 +
agccaagttgctgacagagt

SEQ ID NO: 165532 - DNA, 20 bp, Artificial Sequence
  Synthetic oligonucleotide; AGG chr2 60515548 60515567 60515564 +
gccaagttgctgacagagtc

SEQ ID NO: 165533 - DNA, 20 bp, Artificial Sequence
  Synthetic oligonucleotide; TAG chr2 60515557 60515576 60515573 +
ctgacagagtcaggccttcc

SEQ ID NO: 165534 - DNA, 20 bp, Artificial Sequence
  Synthetic oligonucleotide; TAG chr2 60515565 60515584 60515581 +
gtcaggccttcctagttacc

SEQ ID NO: 165535 - DNA, 20 bp, Artificial Sequence
  Synthetic oligonucleotide; TGG chr2 60515573 60515592 60515589 +
ttcctagttacctagaaaaa

SEQ ID NO: 165536 - DNA, 20 bp, Artificial Sequence
  Synthetic oligonucleotide; TGG chr2 60515578 60515597 60515594 +
agttacctagaaaaatggcc

SEQ ID NO: 165537 - DNA, 20 bp, Artificial Sequence
  Synthetic oligonucleotide; GGG chr2 60515579 60515598 60515595 +
gttacctagaaaaatggcct

SEQ ID NO: 165538 - DNA, 20 bp, Artificial Sequence
  Synthetic oligonucleotide; GGG chr2 60515580 60515599 60515596 +
ttacctagaaaaatggcctg

SEQ ID NO: 165539 - DNA, 20 bp, Artificial Sequence
  Synthetic oligonucleotide; GAG chr2 60515582 60515601 60515598 +
acctagaaaaatggcctggg

SEQ ID NO: 165540 - DNA, 20 bp, Artificial Sequence
  Synthetic oligonucleotide; AGG chr2 60515583 60515602 60515599 +
cctagaaaaatggcctgggg

SEQ ID NO: 165541 - DNA, 20 bp, Artificial Sequence
  Synthetic oligonucleotide; CAG chr2 60515588 60515607 60515604 +
aaaaatggcctggggaggtc

SEQ ID NO: 165542 - DNA, 20 bp, Artificial Sequence
  Synthetic oligonucleotide; TAG chr2 60515596 60515615 60515612 +
cctggggaggtccagcccac

SEQ ID NO: 165543 - DNA, 20 bp, Artificial Sequence
  Synthetic oligonucleotide; AAG chr2 60515599 60515618 60515615 +
ggggaggtccagcccactag

SEQ ID NO: 165544 - DNA, 20 bp, Artificial Sequence
  Synthetic oligonucleotide; AGG chr2 60515600 60515619 60515616 +
gggaggtccagcccactaga

SEQ ID NO: 165545 - DNA, 20 bp, Artificial Sequence
  Synthetic oligonucleotide; GAG chr2 60515602 60515621 60515618 +
gaggtccagcccactagaag

SEQ ID NO: 165546 - DNA, 20 bp, Artificial Sequence
  Synthetic oligonucleotide; CAG chr2 60515608 60515627 60515624 +
cagcccactagaaggagata

SEQ ID NO: 165547 - DNA, 20 bp, Artificial Sequence
  Synthetic oligonucleotide; AAG chr2 60515615 60515634 60515631 +
ctagaaggagatacagaaac

SEQ ID NO: 165548 - DNA, 20 bp, Artificial Sequence
  Synthetic oligonucleotide; TGG chr2 60515635 60515654 60515651 +
aagccctccataaatatctg

SEQ ID NO: 165549 - DNA, 20 bp, Artificial Sequence
  Synthetic oligonucleotide; GGG chr2 60515636 60515655 60515652 +
agccctccataaatatctgt

SEQ ID NO: 165550 - DNA, 20 bp, Artificial Sequence
  Synthetic oligonucleotide; CAG chr2 60515642 60515661 60515658 +
ccataaatatctgtgggacc

SEQ ID NO: 165551 - DNA, 20 bp, Artificial Sequence
  Synthetic oligonucleotide; CAG chr2 60515661 60515680 60515677 +
ccagctacctctctgaaaca

SEQ ID NO: 165552 - DNA, 20 bp, Artificial Sequence
  Synthetic oligonucleotide; CAG chr2 60515666 60515685 60515682 +
tacctctctgaaacacagcc

SEQ ID NO: 165553 - DNA, 20 bp, Artificial Sequence
  Synthetic oligonucleotide; CAG chr2 60515675 60515694 60515691 +
gaaacacagcccagtgcttt

SEQ ID NO: 165554 - DNA, 20 bp, Artificial Sequence
  Synthetic oligonucleotide; AGG chr2 60515676 60515695 60515692 +
aaacacagcccagtgctttc

SEQ ID NO: 165555 - DNA, 20 bp, Artificial Sequence
  Synthetic oligonucleotide; CAG chr2 60515679 60515698 60515695 +
cacagcccagtgctttcagg

SEQ ID NO: 165556 - DNA, 20 bp, Artificial Sequence
  Synthetic oligonucleotide; AGG chr2 60515680 60515699 60515696 +
acagcccagtgctttcaggc

SEQ ID NO: 165557 - DNA, 20 bp, Artificial Sequence
  Synthetic oligonucleotide; GGG chr2 60515681 60515700 60515697 +
cagcccagtgctttcaggca

SEQ ID NO: 165558 - DNA, 20 bp, Artificial Sequence
  Synthetic oligonucleotide; GAG chr2 60515683 60515702 60515699 +
gcccagtgctttcaggcagg

SEQ ID NO: 165559 - DNA, 20 bp, Artificial Sequence
  Synthetic oligonucleotide; AAG chr2 60515687 60515706 60515703 +
agtgctttcaggcagggaga

SEQ ID NO: 165560 - DNA, 20 bp, Artificial Sequence
  Synthetic oligonucleotide; TGG chr2 60515690 60515709 60515706 +
gctttcaggcagggagaaag

SEQ ID NO: 165561 - DNA, 20 bp, Artificial Sequence
  Synthetic oligonucleotide; TGG chr2 60515693 60515712 60515709 +
ttcaggcagggagaaagtgg

SEQ ID NO: 165562 - DNA, 20 bp, Artificial Sequence
  Synthetic oligonucleotide; TGG chr2 60515696 60515715 60515712 +
aggcagggagaaagtggtgg

SEQ ID NO: 165563 - DNA, 20 bp, Artificial Sequence
  Synthetic oligonucleotide; GGG chr2 60515697 60515716 60515713 +
ggcagggagaaagtggtggt

SEQ ID NO: 165564 - DNA, 20 bp, Artificial Sequence
  Synthetic oligonucleotide; TGG chr2 60515700 60515719 60515716 +
agggagaaagtggtggtggg

SEQ ID NO: 165565 - DNA, 20 bp, Artificial Sequence
  Synthetic oligonucleotide; CGG chr2 60515703 60515722 60515719 +
gagaaagtggtggtgggtgg

SEQ ID NO: 165566 - DNA, 20 bp, Artificial Sequence
  Synthetic oligonucleotide; CAG chr2 60515707 60515726 60515723 +
aagtggtggtgggtggcgga

SEQ ID NO: 165567 - DNA, 20 bp, Artificial Sequence
  Synthetic oligonucleotide; GAG chr2 60515709 60515728 60515725 +
gtggtggtgggtggcggaca

SEQ ID NO: 165568 - DNA, 20 bp, Artificial Sequence
  Synthetic oligonucleotide; GAG chr2 60515716 60515735 60515732 +
tgggtggcggacagagatgt

SEQ ID NO: 165569 - DNA, 20 bp, Artificial Sequence
  Synthetic oligonucleotide; TGG chr2 60515719 60515738 60515735 +
gtggcggacagagatgtgag

SEQ ID NO: 165570 - DNA, 20 bp, Artificial Sequence
  Synthetic oligonucleotide; CAG chr2 60515729 60515748 60515745 +
gagatgtgagtggactgaca

SEQ ID NO: 165571 - DNA, 20 bp, Artificial Sequence
  Synthetic oligonucleotide; TGG chr2 60515735 60515754 60515751 +
tgagtggactgacacagaca

SEQ ID NO: 165572 - DNA, 20 bp, Artificial Sequence
  Synthetic oligonucleotide; GGG chr2 60515736 60515755 60515752 +
gagtggactgacacagacat

SEQ ID NO: 165573 - DNA, 20 bp, Artificial Sequence
  Synthetic oligonucleotide; GGG chr2 60515737 60515756 60515753 +
agtggactgacacagacatg

SEQ ID NO: 165574 - DNA, 20 bp, Artificial Sequence
  Synthetic oligonucleotide; GGG chr2 60515738 60515757 60515754 +
gtggactgacacagacatgg

SEQ ID NO: 165575 - DNA, 20 bp, Artificial Sequence
  Synthetic oligonucleotide; CAG chr2 60515772 60515791 60515788 +
ctcttgatcacccaactttc

SEQ ID NO: 165576 - DNA, 20 bp, Artificial Sequence
  Synthetic oligonucleotide; GAG chr2 60515799 60515818 60515815 +
cccatttctgcccctgactt

SEQ ID NO: 165577 - DNA, 20 bp, Artificial Sequence
  Synthetic oligonucleotide; CAG chr2 60515806 60515825 60515822 +
ctgcccctgacttgagctcc

SEQ ID NO: 165578 - DNA, 20 bp, Artificial Sequence
  Synthetic oligonucleotide; AGG chr2 60515807 60515826 60515823 +
tgcccctgacttgagctccc

SEQ ID NO: 165579 - DNA, 20 bp, Artificial Sequence
  Synthetic oligonucleotide; GAG chr2 60515826 60515845 60515842 +
caggccactcaacccactgt

SEQ ID NO: 165580 - DNA, 20 bp, Artificial Sequence
  Synthetic oligonucleotide; AGG chr2 60515827 60515846 60515843 +
aggccactcaacccactgtg

SEQ ID NO: 165581 - DNA, 20 bp, Artificial Sequence
  Synthetic oligonucleotide; TGG chr2 60515838 60515857 60515854 +
cccactgtgaggtcttactg

SEQ ID NO: 165582 - DNA, 20 bp, Artificial Sequence
  Synthetic oligonucleotide; GGG chr2 60515839 60515858 60515855 +
ccactgtgaggtcttactgt

SEQ ID NO: 165583 - DNA, 20 bp, Artificial Sequence
  Synthetic oligonucleotide; GGG chr2 60515840 60515859 60515856 +
cactgtgaggtcttactgtg

SEQ ID NO: 165584 - DNA, 20 bp, Artificial Sequence
  Synthetic oligonucleotide; GAG chr2 60515849 60515868 60515865 +
gtcttactgtggggattacc

SEQ ID NO: 165585 - DNA, 20 bp, Artificial Sequence
  Synthetic oligonucleotide; CAG chr2 60515859 60515878 60515875 +
ggggattaccgagtcaccac

SEQ ID NO: 165586 - DNA, 20 bp, Artificial Sequence
  Synthetic oligonucleotide; AGG chr2 60515860 60515879 60515876 +
gggattaccgagtcaccacc

SEQ ID NO: 165587 - DNA, 20 bp, Artificial Sequence
  Synthetic oligonucleotide; CAG chr2 60515873 60515892 60515889 +
caccaccaggctgcgctgaa

SEQ ID NO: 165588 - DNA, 20 bp, Artificial Sequence
  Synthetic oligonucleotide; AGG chr2 60515874 60515893 60515890 +
accaccaggctgcgctgaac

SEQ ID NO: 165589 - DNA, 20 bp, Artificial Sequence
  Synthetic oligonucleotide; AAG chr2 60515877 60515896 60515893 +
accaggctgcgctgaacagg

SEQ ID NO: 165590 - DNA, 20 bp, Artificial Sequence
  Synthetic oligonucleotide; AAG chr2 60515885 60515904 60515901 +
gcgctgaacaggaagtgaac

SEQ ID NO: 165591 - DNA, 20 bp, Artificial Sequence
  Synthetic oligonucleotide; GAG chr2 60515895 60515914 60515911 +
ggaagtgaacaagtcaattc

SEQ ID NO: 165592 - DNA, 20 bp, Artificial Sequence
  Synthetic oligonucleotide; AAG chr2 60515899 60515918 60515915 +
gtgaacaagtcaattcgaga

SEQ ID NO: 165593 - DNA, 20 bp, Artificial Sequence
  Synthetic oligonucleotide; AAG chr2 60515909 60515928 60515925 +
caattcgagaaagatccaat

SEQ ID NO: 165594 - DNA, 20 bp, Artificial Sequence
  Synthetic oligonucleotide; AGG chr2 60515910 60515929 60515926 +
aattcgagaaagatccaata

SEQ ID NO: 165595 - DNA, 20 bp, Artificial Sequence
  Synthetic oligonucleotide; GGG chr2 60515911 60515930 60515927 +
attcgagaaagatccaataa

SEQ ID NO: 165596 - DNA, 20 bp, Artificial Sequence
  Synthetic oligonucleotide; TGG chr2 60515923 60515942 60515939 +
tccaataagggaatattctc

SEQ ID NO: 165597 - DNA, 20 bp, Artificial Sequence
  Synthetic oligonucleotide; GGG chr2 60515924 60515943 60515940 +
ccaataagggaatattctct

SEQ ID NO: 165598 - DNA, 20 bp, Artificial Sequence
  Synthetic oligonucleotide; TGG chr2 60515933 60515952 60515949 +
gaatattctctgggcaccgc

SEQ ID NO: 165599 - DNA, 20 bp, Artificial Sequence
  Synthetic oligonucleotide; GGG chr2 60515934 60515953 60515950 +
aatattctctgggcaccgct

SEQ ID NO: 165600 - DNA, 20 bp, Artificial Sequence
  Synthetic oligonucleotide; CGG chr2 60515947 60515966 60515963 +
caccgctgggccaacaccca

SEQ ID NO: 165601 - DNA, 20 bp, Artificial Sequence
  Synthetic oligonucleotide; GAG chr2 60515949 60515968 60515965 +
ccgctgggccaacacccacg

SEQ ID NO: 165602 - DNA, 20 bp, Artificial Sequence
  Synthetic oligonucleotide; AGG chr2 60515950 60515969 60515966 +
cgctgggccaacacccacgg

SEQ ID NO: 165603 - DNA, 20 bp, Artificial Sequence
  Synthetic oligonucleotide; GGG chr2 60515951 60515970 60515967 +
gctgggccaacacccacgga

SEQ ID NO: 165604 - DNA, 20 bp, Artificial Sequence
  Synthetic oligonucleotide; GGG chr2 60515952 60515971 60515968 +
ctgggccaacacccacggag

SEQ ID NO: 165605 - DNA, 20 bp, Artificial Sequence
  Synthetic oligonucleotide; TGG chr2 60515958 60515977 60515974 +
caacacccacggaggggtcc

SEQ ID NO: 165606 - DNA, 20 bp, Artificial Sequence
  Synthetic oligonucleotide; TGG chr2 60515974 60515993 60515990 +
gtcctggaatacaaataccc

SEQ ID NO: 165607 - DNA, 20 bp, Artificial Sequence
  Synthetic oligonucleotide; GAG chr2 60515976 60515995 60515992 +
cctggaatacaaataccctg

SEQ ID NO: 165608 - DNA, 20 bp, Artificial Sequence
  Synthetic oligonucleotide; AAG chr2 60515983 60516002 60515999 +
tacaaataccctggagtctg

SEQ ID NO: 165609 - DNA, 20 bp, Artificial Sequence
  Synthetic oligonucleotide; AGG chr2 60515984 60516003 60516000 +
acaaataccctggagtctga

SEQ ID NO: 165610 - DNA, 20 bp, Artificial Sequence
  Synthetic oligonucleotide; GGG chr2 60515985 60516004 60516001 +
caaataccctggagtctgaa

SEQ ID NO: 165611 - DNA, 20 bp, Artificial Sequence
  Synthetic oligonucleotide; CGG chr2 60515988 60516007 60516004 +
ataccctggagtctgaaggg

SEQ ID NO: 165612 - DNA, 20 bp, Artificial Sequence
  Synthetic oligonucleotide; TGG chr2 60515991 60516010 60516007 +
ccctggagtctgaagggcgg

SEQ ID NO: 165613 - DNA, 20 bp, Artificial Sequence
  Synthetic oligonucleotide; TGG chr2 60516032 60516051 60516048 +
caattatgtcttcattgaac

SEQ ID NO: 165614 - DNA, 20 bp, Artificial Sequence
  Synthetic oligonucleotide; GGG chr2 60516033 60516052 60516049 +
aattatgtcttcattgaact

SEQ ID NO: 165615 - DNA, 20 bp, Artificial Sequence
  Synthetic oligonucleotide; AAG chr2 60516044 60516063 60516060 +
cattgaactgggttatgaaa

SEQ ID NO: 165616 - DNA, 20 bp, Artificial Sequence
  Synthetic oligonucleotide; AGG chr2 60516045 60516064 60516061 +
attgaactgggttatgaaaa

SEQ ID NO: 165617 - DNA, 20 bp, Artificial Sequence
  Synthetic oligonucleotide; GGG chr2 60516046 60516065 60516062 +
ttgaactgggttatgaaaaa

SEQ ID NO: 165618 - DNA, 20 bp, Artificial Sequence
  Synthetic oligonucleotide; AAG chr2 60516049 60516068 60516065 +
aactgggttatgaaaaaggg

SEQ ID NO: 165619 - DNA, 20 bp, Artificial Sequence
  Synthetic oligonucleotide; CAG chr2 60516052 60516071 60516068 +
tgggttatgaaaaagggaag

SEQ ID NO: 165620 - DNA, 20 bp, Artificial Sequence
  Synthetic oligonucleotide; AGG chr2 60516053 60516072 60516069 +
gggttatgaaaaagggaagc

SEQ ID NO: 165621 - DNA, 20 bp, Artificial Sequence
  Synthetic oligonucleotide; GGG chr2 60516054 60516073 60516070 +
ggttatgaaaaagggaagca

SEQ ID NO: 165622 - DNA, 20 bp, Artificial Sequence
  Synthetic oligonucleotide; TAG chr2 60516067 60516086 60516083 +
ggaagcagggattgaaaatc

SEQ ID NO: 165623 - DNA, 20 bp, Artificial Sequence
  Synthetic oligonucleotide; TGG chr2 60516075 60516094 60516091 +
ggattgaaaatctagccttg

SEQ ID NO: 165624 - DNA, 20 bp, Artificial Sequence
  Synthetic oligonucleotide; AAG chr2 60516082 60516101 60516098 +
aaatctagccttgtggccat

SEQ ID NO: 165625 - DNA, 20 bp, Artificial Sequence
  Synthetic oligonucleotide; CAG chr2 60516102 60516121 60516118 +
aagcctgtgatgactcatgc

SEQ ID NO: 165626 - DNA, 20 bp, Artificial Sequence
  Synthetic oligonucleotide; TGG chr2 60516108 60516127 60516124 +
gtgatgactcatgccagctt

SEQ ID NO: 165627 - DNA, 20 bp, Artificial Sequence
  Synthetic oligonucleotide; GGG chr2 60516109 60516128 60516125 +
tgatgactcatgccagcttt

SEQ ID NO: 165628 - DNA, 20 bp, Artificial Sequence
  Synthetic oligonucleotide; AAG chr2 60516118 60516137 60516134 +
atgccagctttgggtgctct

SEQ ID NO: 165629 - DNA, 20 bp, Artificial Sequence
  Synthetic oligonucleotide; CAG chr2 60516187 60516206 60516203 +
actgtcacctctcctcaccc

SEQ ID NO: 165630 - DNA, 20 bp, Artificial Sequence
  Synthetic oligonucleotide; CAG chr2 60516194 60516213 60516210 +
cctctcctcaccccagcaca

SEQ ID NO: 165631 - DNA, 20 bp, Artificial Sequence
  Synthetic oligonucleotide; AAG chr2 60516199 60516218 60516215 +
cctcaccccagcacacagaa

SEQ ID NO: 165632 - DNA, 20 bp, Artificial Sequence
  Synthetic oligonucleotide; TAG chr2 60516222 60516241 60516238 +
atgtgcttattatgtgcact

SEQ ID NO: 165633 - DNA, 20 bp, Artificial Sequence
  Synthetic oligonucleotide; AGG chr2 60516223 60516242 60516239 +
tgtgcttattatgtgcactt

SEQ ID NO: 165634 - DNA, 20 bp, Artificial Sequence
  Synthetic oligonucleotide; CAG chr2 60516273 60516292 60516289 +
ccactcctattattaaaaca

SEQ ID NO: 165635 - DNA, 20 bp, Artificial Sequence
  Synthetic oligonucleotide; AGG chr2 60516274 60516293 60516290 +
cactcctattattaaaacac

SEQ ID NO: 165636 - DNA, 20 bp, Artificial Sequence
  Synthetic oligonucleotide; TGG chr2 60516283 60516302 60516299 +
tattaaaacacaggttttgc

SEQ ID NO: 165637 - DNA, 20 bp, Artificial Sequence
  Synthetic oligonucleotide; AAG chr2 60516296 60516315 60516312 +
gttttgctggaaactcaaaa

SEQ ID NO: 165638 - DNA, 20 bp, Artificial Sequence
  Synthetic oligonucleotide; TGG chr2 60516302 60516321 60516318 +
ctggaaactcaaaaaagact

SEQ ID NO: 165639 - DNA, 20 bp, Artificial Sequence
  Synthetic oligonucleotide; TGG chr2 60516311 60516330 60516327 +
caaaaaagacttggctctgc

SEQ ID NO: 165640 - DNA, 20 bp, Artificial Sequence
  Synthetic oligonucleotide; CAG chr2 60516318 60516337 60516334 +
gacttggctctgctggctca

SEQ ID NO: 165641 - DNA, 20 bp, Artificial Sequence
  Synthetic oligonucleotide; AGG chr2 60516319 60516338 60516335 +
acttggctctgctggctcac

SEQ ID NO: 165642 - DNA, 20 bp, Artificial Sequence
  Synthetic oligonucleotide; GGG chr2 60516320 60516339 60516336 +
cttggctctgctggctcaca

SEQ ID NO: 165643 - DNA, 20 bp, Artificial Sequence
  Synthetic oligonucleotide; TGG chr2 60516327 60516346 60516343 +
ctgctggctcacagggaatc

SEQ ID NO: 165644 - DNA, 20 bp, Artificial Sequence
  Synthetic oligonucleotide; GGG chr2 60516328 60516347 60516344 +
tgctggctcacagggaatct

SEQ ID NO: 165645 - DNA, 20 bp, Artificial Sequence
  Synthetic oligonucleotide; CAG chr2 60516358 60516377 60516374 +
cttccaaaacctttgttctc

SEQ ID NO: 165646 - DNA, 20 bp, Artificial Sequence
  Synthetic oligonucleotide; CAG chr2 60516365 60516384 60516381 +
aacctttgttctccagatgt

SEQ ID NO: 165647 - DNA, 20 bp, Artificial Sequence
  Synthetic oligonucleotide; AAG chr2 60516372 60516391 60516388 +
gttctccagatgtcagtgca

SEQ ID NO: 165648 - DNA, 20 bp, Artificial Sequence
  Synthetic oligonucleotide; CAG chr2 60516382 60516401 60516398 +
tgtcagtgcaaagttatgaa

SEQ ID NO: 165649 - DNA, 20 bp, Artificial Sequence
  Synthetic oligonucleotide; GAG chr2 60516395 60516414 60516411 +
ttatgaacagctctccccct

SEQ ID NO: 165650 - DNA, 20 bp, Artificial Sequence
  Synthetic oligonucleotide; GAG chr2 60516408 60516427 60516424 +
tccccctgagctaacttacc

SEQ ID NO: 165651 - DNA, 20 bp, Artificial Sequence
  Synthetic oligonucleotide; CAG chr2 60516411 60516430 60516427 +
ccctgagctaacttaccgag

SEQ ID NO: 165652 - DNA, 20 bp, Artificial Sequence
  Synthetic oligonucleotide; AAG chr2 60516415 60516434 60516431 +
gagctaacttaccgagcagt

SEQ ID NO: 165653 - DNA, 20 bp, Artificial Sequence
  Synthetic oligonucleotide; GAG chr2 60516419 60516438 60516435 +
taacttaccgagcagtaagt

SEQ ID NO: 165654 - DNA, 20 bp, Artificial Sequence
  Synthetic oligonucleotide; AGG chr2 60516420 60516439 60516436 +
aacttaccgagcagtaagtg

SEQ ID NO: 165655 - DNA, 20 bp, Artificial Sequence
  Synthetic oligonucleotide; AAG chr2 60516424 60516443 60516440 +
taccgagcagtaagtgaggc

SEQ ID NO: 165656 - DNA, 20 bp, Artificial Sequence
  Synthetic oligonucleotide; AAG chr2 60516428 60516447 60516444 +
gagcagtaagtgaggcaaga

SEQ ID NO: 165657 - DNA, 20 bp, Artificial Sequence
  Synthetic oligonucleotide; AGG chr2 60516429 60516448 60516445 +
agcagtaagtgaggcaagaa

SEQ ID NO: 165658 - DNA, 20 bp, Artificial Sequence
  Synthetic oligonucleotide; CAG chr2 60516449 60516468 60516465 +
aggccactcactatatttct

SEQ ID NO: 165659 - DNA, 20 bp, Artificial Sequence
  Synthetic oligonucleotide; AAG chr2 60516460 60516479 60516476 +
tatatttctcagcctccatg

SEQ ID NO: 165660 - DNA, 20 bp, Artificial Sequence
  Synthetic oligonucleotide; TGG chr2 60516470 60516489 60516486 +
agcctccatgaagtcgtcac

SEQ ID NO: 165661 - DNA, 20 bp, Artificial Sequence
  Synthetic oligonucleotide; GGG chr2 60516471 60516490 60516487 +
gcctccatgaagtcgtcact

SEQ ID NO: 165662 - DNA, 20 bp, Artificial Sequence
  Synthetic oligonucleotide; GAG chr2 60516473 60516492 60516489 +
ctccatgaagtcgtcactgg

SEQ ID NO: 165663 - DNA, 20 bp, Artificial Sequence
  Synthetic oligonucleotide; GAG chr2 60516475 60516494 60516491 +
ccatgaagtcgtcactggga

SEQ ID NO: 165664 - DNA, 20 bp, Artificial Sequence
  Synthetic oligonucleotide; AGG chr2 60516476 60516495 60516492 +
catgaagtcgtcactgggag

SEQ ID NO: 165665 - DNA, 20 bp, Artificial Sequence
  Synthetic oligonucleotide; GAG chr2 60516478 60516497 60516494 +
tgaagtcgtcactgggagag

SEQ ID NO: 165666 - DNA, 20 bp, Artificial Sequence
  Synthetic oligonucleotide; AAG chr2 60516483 60516502 60516499 +
tcgtcactgggagaggagcc

SEQ ID NO: 165667 - DNA, 20 bp, Artificial Sequence
  Synthetic oligonucleotide; GAG chr2 60516485 60516504 60516501 +
gtcactgggagaggagccaa

SEQ ID NO: 165668 - DNA, 20 bp, Artificial Sequence
  Synthetic oligonucleotide; AGG chr2 60516486 60516505 60516502 +
tcactgggagaggagccaag

SEQ ID NO: 165669 - DNA, 20 bp, Artificial Sequence
  Synthetic oligonucleotide; GGG chr2 60516487 60516506 60516503 +
cactgggagaggagccaaga

SEQ ID NO: 165670 - DNA, 20 bp, Artificial Sequence
  Synthetic oligonucleotide; GAG chr2 60516489 60516508 60516505 +
ctgggagaggagccaagagg

SEQ ID NO: 165671 - DNA, 20 bp, Artificial Sequence
  Synthetic oligonucleotide; AGG chr2 60516490 60516509 60516506 +
tgggagaggagccaagaggg

SEQ ID NO: 165672 - DNA, 20 bp, Artificial Sequence
  Synthetic oligonucleotide; GGG chr2 60516491 60516510 60516507 +
gggagaggagccaagaggga

SEQ ID NO: 165673 - DNA, 20 bp, Artificial Sequence
  Synthetic oligonucleotide; GGG chr2 60516492 60516511 60516508 +
ggagaggagccaagagggag

SEQ ID NO: 165674 - DNA, 20 bp, Artificial Sequence
  Synthetic oligonucleotide; GGG chr2 60516493 60516512 60516509 +
gagaggagccaagagggagg

SEQ ID NO: 165675 - DNA, 20 bp, Artificial Sequence
  Synthetic oligonucleotide; TAG chr2 60516501 60516520 60516517 +
ccaagagggagggggcacct

SEQ ID NO: 165676 - DNA, 20 bp, Artificial Sequence
  Synthetic oligonucleotide; AGG chr2 60516502 60516521 60516518 +
caagagggagggggcacctt

SEQ ID NO: 165677 - DNA, 20 bp, Artificial Sequence
  Synthetic oligonucleotide; GAG chr2 60516504 60516523 60516520 +
agagggagggggcaccttag

SEQ ID NO: 165678 - DNA, 20 bp, Artificial Sequence
  Synthetic oligonucleotide; AAG chr2 60516509 60516528 60516525 +
gagggggcaccttaggagac

SEQ ID NO: 165679 - DNA, 20 bp, Artificial Sequence
  Synthetic oligonucleotide; CGG chr2 60516531 60516550 60516547 +
gatcgtaactcaccgtcatc

SEQ ID NO: 165680 - DNA, 20 bp, Artificial Sequence
  Synthetic oligonucleotide; GGG chr2 60516532 60516551 60516548 +
atcgtaactcaccgtcatcc

SEQ ID NO: 165681 - DNA, 20 bp, Artificial Sequence
  Synthetic oligonucleotide; GGG chr2 60516533 60516552 60516549 +
tcgtaactcaccgtcatccg

SEQ ID NO: 165682 - DNA, 20 bp, Artificial Sequence
  Synthetic oligonucleotide; AAG chr2 60516536 60516555 60516552 +
taactcaccgtcatccgggg

SEQ ID NO: 165683 - DNA, 20 bp, Artificial Sequence
  Synthetic oligonucleotide; TGG chr2 60516539 60516558 60516555 +
ctcaccgtcatccggggaag

SEQ ID NO: 165684 - DNA, 20 bp, Artificial Sequence
  Synthetic oligonucleotide; GAG chr2 60516541 60516560 60516557 +
caccgtcatccggggaagtg

SEQ ID NO: 165685 - DNA, 20 bp, Artificial Sequence
  Synthetic oligonucleotide; GAG chr2 60516543 60516562 60516559 +
ccgtcatccggggaagtgga

SEQ ID NO: 165686 - DNA, 20 bp, Artificial Sequence
  Synthetic oligonucleotide; AGG chr2 60516544 60516563 60516560 +
cgtcatccggggaagtggag

SEQ ID NO: 165687 - DNA, 20 bp, Artificial Sequence
  Synthetic oligonucleotide; AAG chr2 60516547 60516566 60516563 +
catccggggaagtggagagg

SEQ ID NO: 165688 - DNA, 20 bp, Artificial Sequence
  Synthetic oligonucleotide; CAG chr2 60516551 60516570 60516567 +
cggggaagtggagaggaagt

SEQ ID NO: 165689 - DNA, 20 bp, Artificial Sequence
  Synthetic oligonucleotide; AGG chr2 60516552 60516571 60516568 +
ggggaagtggagaggaagtc

SEQ ID NO: 165690 - DNA, 20 bp, Artificial Sequence
  Synthetic oligonucleotide; GGG chr2 60516553 60516572 60516569 +
gggaagtggagaggaagtca

SEQ ID NO: 165691 - DNA, 20 bp, Artificial Sequence
  Synthetic oligonucleotide; CAG chr2 60516565 60516584 60516581 +
ggaagtcagggaactcgtgt

SEQ ID NO: 165692 - DNA, 20 bp, Artificial Sequence
  Synthetic oligonucleotide; AGG chr2 60516566 60516585 60516582 +
gaagtcagggaactcgtgtc

SEQ ID NO: 165693 - DNA, 20 bp, Artificial Sequence
  Synthetic oligonucleotide; GAG chr2 60516568 60516587 60516584 +
agtcagggaactcgtgtcag

SEQ ID NO: 165694 - DNA, 20 bp, Artificial Sequence
  Synthetic oligonucleotide; TGG chr2 60516571 60516590 60516587 +
cagggaactcgtgtcaggag

SEQ ID NO: 165695 - DNA, 20 bp, Artificial Sequence
  Synthetic oligonucleotide; GAG chr2 60516573 60516592 60516589 +
gggaactcgtgtcaggagtg

SEQ ID NO: 165696 - DNA, 20 bp, Artificial Sequence
  Synthetic oligonucleotide; GAG chr2 60516575 60516594 60516591 +
gaactcgtgtcaggagtgga

SEQ ID NO: 165697 - DNA, 20 bp, Artificial Sequence
  Synthetic oligonucleotide; AAG chr2 60516580 60516599 60516596 +
cgtgtcaggagtggagagct

SEQ ID NO: 165698 - DNA, 20 bp, Artificial Sequence
  Synthetic oligonucleotide; TGG chr2 60516590 60516609 60516606 +
gtggagagctaagctcaata

SEQ ID NO: 165699 - DNA, 20 bp, Artificial Sequence
  Synthetic oligonucleotide; AAG chr2 60516595 60516614 60516611 +
gagctaagctcaatatggac

SEQ ID NO: 165700 - DNA, 20 bp, Artificial Sequence
  Synthetic oligonucleotide; AGG chr2 60516596 60516615 60516612 +
agctaagctcaatatggaca

SEQ ID NO: 165701 - DNA, 20 bp, Artificial Sequence
  Synthetic oligonucleotide; CAG chr2 60516600 60516619 60516616 +
aagctcaatatggacaagga

SEQ ID NO: 165702 - DNA, 20 bp, Artificial Sequence
  Synthetic oligonucleotide; GAG chr2 60516602 60516621 60516618 +
gctcaatatggacaaggaca

SEQ ID NO: 165703 - DNA, 20 bp, Artificial Sequence
  Synthetic oligonucleotide; GAG chr2 60516604 60516623 60516620 +
tcaatatggacaaggacaga

SEQ ID NO: 165704 - DNA, 20 bp, Artificial Sequence
  Synthetic oligonucleotide; AGG chr2 60516605 60516624 60516621 +
caatatggacaaggacagag

SEQ ID NO: 165705 - DNA, 20 bp, Artificial Sequence
  Synthetic oligonucleotide; GGG chr2 60516606 60516625 60516622 +
aatatggacaaggacagaga

SEQ ID NO: 165706 - DNA, 20 bp, Artificial Sequence
  Synthetic oligonucleotide; GGG chr2 60516607 60516626 60516623 +
atatggacaaggacagagag

SEQ ID NO: 165707 - DNA, 20 bp, Artificial Sequence
  Synthetic oligonucleotide; TGG chr2 60516614 60516633 60516630 +
caaggacagagaggggcacc

SEQ ID NO: 165708 - DNA, 20 bp, Artificial Sequence
  Synthetic oligonucleotide; GGG chr2 60516615 60516634 60516631 +
aaggacagagaggggcacct

SEQ ID NO: 165709 - DNA, 20 bp, Artificial Sequence
  Synthetic oligonucleotide; TGG chr2 60516619 60516638 60516635 +
acagagaggggcacctggga

SEQ ID NO: 165710 - DNA, 20 bp, Artificial Sequence
  Synthetic oligonucleotide; GGG chr2 60516620 60516639 60516636 +
cagagaggggcacctgggat

SEQ ID NO: 165711 - DNA, 20 bp, Artificial Sequence
  Synthetic oligonucleotide; GAG chr2 60516622 60516641 60516638 +
gagaggggcacctgggatgg

SEQ ID NO: 165712 - DNA, 20 bp, Artificial Sequence
  Synthetic oligonucleotide; TGG chr2 60516630 60516649 60516646 +
cacctgggatgggagaaatg

SEQ ID NO: 165713 - DNA, 20 bp, Artificial Sequence
  Synthetic oligonucleotide; CAG chr2 60516636 60516655 60516652 +
ggatgggagaaatgtggcat

SEQ ID NO: 165714 - DNA, 20 bp, Artificial Sequence
  Synthetic oligonucleotide; AGG chr2 60516637 60516656 60516653 +
gatgggagaaatgtggcatc

SEQ ID NO: 165715 - DNA, 20 bp, Artificial Sequence
  Synthetic oligonucleotide; TGG chr2 60516645 60516664 60516661 +
aaatgtggcatcaggacaac

SEQ ID NO: 165716 - DNA, 20 bp, Artificial Sequence
  Synthetic oligonucleotide; GGG chr2 60516646 60516665 60516662 +
aatgtggcatcaggacaact

SEQ ID NO: 165717 - DNA, 20 bp, Artificial Sequence
  Synthetic oligonucleotide; GAG chr2 60516648 60516667 60516664 +
tgtggcatcaggacaactgg

SEQ ID NO: 165718 - DNA, 20 bp, Artificial Sequence
  Synthetic oligonucleotide; AAG chr2 60516654 60516673 60516670 +
atcaggacaactgggagtga

SEQ ID NO: 165719 - DNA, 20 bp, Artificial Sequence
  Synthetic oligonucleotide; AAG chr2 60516671 60516690 60516687 +
tgaaagtttaactgccctca

SEQ ID NO: 165720 - DNA, 20 bp, Artificial Sequence
  Synthetic oligonucleotide; TGG chr2 60516675 60516694 60516691 +
agtttaactgccctcaaaga

SEQ ID NO: 165721 - DNA, 20 bp, Artificial Sequence
  Synthetic oligonucleotide; AAG chr2 60516684 60516703 60516700 +
gccctcaaagatggctgaca

SEQ ID NO: 165722 - DNA, 20 bp, Artificial Sequence
  Synthetic oligonucleotide; TAG chr2 60516690 60516709 60516706 +
aaagatggctgacaaagatc

SEQ ID NO: 165723 - DNA, 20 bp, Artificial Sequence
  Synthetic oligonucleotide; TAG chr2 60516699 60516718 60516715 +
tgacaaagatctagcattcc

SEQ ID NO: 165724 - DNA, 20 bp, Artificial Sequence
  Synthetic oligonucleotide; TGG chr2 60516702 60516721 60516718 +
caaagatctagcattcctag

SEQ ID NO: 165725 - DNA, 20 bp, Artificial Sequence
  Synthetic oligonucleotide; AAG chr2 60516710 60516729 60516726 +
tagcattcctagtggacacc

SEQ ID NO: 165726 - DNA, 20 bp, Artificial Sequence
  Synthetic oligonucleotide; GAG chr2 60516715 60516734 60516731 +
ttcctagtggacaccaagct

SEQ ID NO: 165727 - DNA, 20 bp, Artificial Sequence
  Synthetic oligonucleotide; GAG chr2 60516721 60516740 60516737 +
gtggacaccaagctgagcat

SEQ ID NO: 165728 - DNA, 20 bp, Artificial Sequence
  Synthetic oligonucleotide; AAG chr2 60516733 60516752 60516749 +
ctgagcatgagtcatcaatg

SEQ ID NO: 165729 - DNA, 20 bp, Artificial Sequence
  Synthetic oligonucleotide; TGG chr2 60516739 60516758 60516755 +
atgagtcatcaatgaagcac

SEQ ID NO: 165730 - DNA, 20 bp, Artificial Sequence
  Synthetic oligonucleotide; AAG chr2 60516751 60516770 60516767 +
tgaagcactggtttttaaaa

SEQ ID NO: 165731 - DNA, 20 bp, Artificial Sequence
  Synthetic oligonucleotide; AAG chr2 60516755 60516774 60516771 +
gcactggtttttaaaaaagc

SEQ ID NO: 165732 - DNA, 20 bp, Artificial Sequence
  Synthetic oligonucleotide; CAG chr2 60516758 60516777 60516774 +
ctggtttttaaaaaagcaag

SEQ ID NO: 165733 - DNA, 20 bp, Artificial Sequence
  Synthetic oligonucleotide; AGG chr2 60516759 60516778 60516775 +
tggtttttaaaaaagcaagc

SEQ ID NO: 165734 - DNA, 20 bp, Artificial Sequence
  Synthetic oligonucleotide; AAG chr2 60516766 60516785 60516782 +
taaaaaagcaagcaggacat

SEQ ID NO: 165735 - DNA, 20 bp, Artificial Sequence
  Synthetic oligonucleotide; GAG chr2 60516768 60516787 60516784 +
aaaaagcaagcaggacataa

SEQ ID NO: 165736 - DNA, 20 bp, Artificial Sequence
  Synthetic oligonucleotide; CAG chr2 60516773 60516792 60516789 +
gcaagcaggacataagagtg

SEQ ID NO: 165737 - DNA, 20 bp, Artificial Sequence
  Synthetic oligonucleotide; AAG chr2 60516780 60516799 60516796 +
ggacataagagtgcagacat

SEQ ID NO: 165738 - DNA, 20 bp, Artificial Sequence
  Synthetic oligonucleotide; AAG chr2 60516787 60516806 60516803 +
agagtgcagacataagacta

SEQ ID NO: 165739 - DNA, 20 bp, Artificial Sequence
  Synthetic oligonucleotide; TGG chr2 60516794 60516813 60516810 +
agacataagactaaagaatg

SEQ ID NO: 165740 - DNA, 20 bp, Artificial Sequence
  Synthetic oligonucleotide; AAG chr2 60516805 60516824 60516821 +
taaagaatgtggaaaacact

SEQ ID NO: 165741 - DNA, 20 bp, Artificial Sequence
  Synthetic oligonucleotide; TGG chr2 60516820 60516839 60516836 +
acactaagatatcttgccat

SEQ ID NO: 165742 - DNA, 20 bp, Artificial Sequence
  Synthetic oligonucleotide; TAG chr2 60516829 60516848 60516845 +
tatcttgccattggactctg

SEQ ID NO: 165743 - DNA, 20 bp, Artificial Sequence
  Synthetic oligonucleotide; CAG chr2 60516836 60516855 60516852 +
ccattggactctgtagttat

SEQ ID NO: 165744 - DNA, 20 bp, Artificial Sequence
  Synthetic oligonucleotide; GAG chr2 60516849 60516868 60516865 +
tagttatcagactaatgttt

SEQ ID NO: 165745 - DNA, 20 bp, Artificial Sequence
  Synthetic oligonucleotide; AAG chr2 60516855 60516874 60516871 +
tcagactaatgtttgagtaa

SEQ ID NO: 165746 - DNA, 20 bp, Artificial Sequence
  Synthetic oligonucleotide; GAG chr2 60516857 60516876 60516873 +
agactaatgtttgagtaaaa

SEQ ID NO: 165747 - DNA, 20 bp, Artificial Sequence
  Synthetic oligonucleotide; TGG chr2 60516861 60516880 60516877 +
taatgtttgagtaaaagagc

SEQ ID NO: 165748 - DNA, 20 bp, Artificial Sequence
  Synthetic oligonucleotide; CAG chr2 60516869 60516888 60516885 +
gagtaaaagagctggaaaac

SEQ ID NO: 165749 - DNA, 20 bp, Artificial Sequence
  Synthetic oligonucleotide; CAG chr2 60516872 60516891 60516888 +
taaaagagctggaaaaccag

SEQ ID NO: 165750 - DNA, 20 bp, Artificial Sequence
  Synthetic oligonucleotide; AAG chr2 60516881 60516900 60516897 +
tggaaaaccagcagattcta

SEQ ID NO: 165751 - DNA, 20 bp, Artificial Sequence
  Synthetic oligonucleotide; GAG chr2 60516883 60516902 60516899 +
gaaaaccagcagattctaaa

SEQ ID NO: 165752 - DNA, 20 bp, Artificial Sequence
  Synthetic oligonucleotide; GAG chr2 60516885 60516904 60516901 +
aaaccagcagattctaaaga

SEQ ID NO: 165753 - DNA, 20 bp, Artificial Sequence
  Synthetic oligonucleotide; AGG chr2 60516886 60516905 60516902 +
aaccagcagattctaaagag

SEQ ID NO: 165754 - DNA, 20 bp, Artificial Sequence
  Synthetic oligonucleotide; TAG chr2 60516891 60516910 60516907 +
gcagattctaaagagaggca

SEQ ID NO: 165755 - DNA, 20 bp, Artificial Sequence
  Synthetic oligonucleotide; TGG chr2 60516904 60516923 60516920 +
agaggcatagaaacaataaa

SEQ ID NO: 165756 - DNA, 20 bp, Artificial Sequence
  Synthetic oligonucleotide; GGG chr2 60516905 60516924 60516921 +
gaggcatagaaacaataaat

SEQ ID NO: 165757 - DNA, 20 bp, Artificial Sequence
  Synthetic oligonucleotide; AAG chr2 60516912 60516931 60516928 +
agaaacaataaatgggttac

SEQ ID NO: 165758 - DNA, 20 bp, Artificial Sequence
  Synthetic oligonucleotide; TAG chr2 60516919 60516938 60516935 +
ataaatgggttacaagataa

SEQ ID NO: 165759 - DNA, 20 bp, Artificial Sequence
  Synthetic oligonucleotide; GAG chr2 60516928 60516947 60516944 +
ttacaagataatagatccat

SEQ ID NO: 165760 - DNA, 20 bp, Artificial Sequence
  Synthetic oligonucleotide; CAG chr2 60516933 60516952 60516949 +
agataatagatccatgagtt

SEQ ID NO: 165761 - DNA, 20 bp, Artificial Sequence
  Synthetic oligonucleotide; AGG chr2 60516934 60516953 60516950 +
gataatagatccatgagttc

SEQ ID NO: 165762 - DNA, 20 bp, Artificial Sequence
  Synthetic oligonucleotide; CAG chr2 60516939 60516958 60516955 +
tagatccatgagttcaggtt

SEQ ID NO: 165763 - DNA, 20 bp, Artificial Sequence
  Synthetic oligonucleotide; AGG chr2 60516940 60516959 60516956 +
agatccatgagttcaggttc

SEQ ID NO: 165764 - DNA, 20 bp, Artificial Sequence
  Synthetic oligonucleotide; AAG chr2 60516944 60516963 60516960 +
ccatgagttcaggttcagga

SEQ ID NO: 165765 - DNA, 20 bp, Artificial Sequence
  Synthetic oligonucleotide; GAG chr2 60516946 60516965 60516962 +
atgagttcaggttcaggaaa

SEQ ID NO: 165766 - DNA, 20 bp, Artificial Sequence
  Synthetic oligonucleotide; TAG chr2 60516955 60516974 60516971 +
ggttcaggaaagagattatt

SEQ ID NO: 165767 - DNA, 20 bp, Artificial Sequence
  Synthetic oligonucleotide; AGG chr2 60516956 60516975 60516972 +
gttcaggaaagagattattt

SEQ ID NO: 165768 - DNA, 20 bp, Artificial Sequence
  Synthetic oligonucleotide; AAG chr2 60516959 60516978 60516975 +
caggaaagagattatttagg

SEQ ID NO: 165769 - DNA, 20 bp, Artificial Sequence
  Synthetic oligonucleotide; AAG chr2 60516962 60516981 60516978 +
gaaagagattatttaggaag

SEQ ID NO: 165770 - DNA, 20 bp, Artificial Sequence
  Synthetic oligonucleotide; AAG chr2 60516965 60516984 60516981 +
agagattatttaggaagaag

SEQ ID NO: 165771 - DNA, 20 bp, Artificial Sequence
  Synthetic oligonucleotide; TGG chr2 60516968 60516987 60516984 +
gattatttaggaagaagaag

SEQ ID NO: 165772 - DNA, 20 bp, Artificial Sequence
  Synthetic oligonucleotide; CGG chr2 60516971 60516990 60516987 +
tatttaggaagaagaagtgg

SEQ ID NO: 165773 - DNA, 20 bp, Artificial Sequence
  Synthetic oligonucleotide; GAG chr2 60516973 60516992 60516989 +
tttaggaagaagaagtggcg

SEQ ID NO: 165774 - DNA, 20 bp, Artificial Sequence
  Synthetic oligonucleotide; TGG chr2 60516978 60516997 60516994 +
gaagaagaagtggcggagaa

SEQ ID NO: 165775 - DNA, 20 bp, Artificial Sequence
  Synthetic oligonucleotide; AAG chr2 60516985 60517004 60517001 +
aagtggcggagaatggaatg

SEQ ID NO: 165776 - DNA, 20 bp, Artificial Sequence
  Synthetic oligonucleotide; AAG chr2 60517001 60517020 60517017 +
aatgaagaatgtaaaatatg

SEQ ID NO: 165777 - DNA, 20 bp, Artificial Sequence
  Synthetic oligonucleotide; CAG chr2 60517009 60517028 60517025 +
atgtaaaatatgaagcattt

SEQ ID NO: 165778 - DNA, 20 bp, Artificial Sequence
  Synthetic oligonucleotide; AAG chr2 60517016 60517035 60517032 +
atatgaagcatttcagccca

SEQ ID NO: 165779 - DNA, 20 bp, Artificial Sequence
  Synthetic oligonucleotide; TGG chr2 60517020 60517039 60517036 +
gaagcatttcagcccaaagc

SEQ ID NO: 165780 - DNA, 20 bp, Artificial Sequence
  Synthetic oligonucleotide; GAG chr2 60517027 60517046 60517043 +
ttcagcccaaagctggtgat

SEQ ID NO: 165781 - DNA, 20 bp, Artificial Sequence
  Synthetic oligonucleotide; TGG chr2 60517045 60517064 60517061 +
atgagatactttgtcgtctc

SEQ ID NO: 165782 - DNA, 20 bp, Artificial Sequence
  Synthetic oligonucleotide; AAG chr2 60517052 60517071 60517068 +
actttgtcgtctctggaatg

SEQ ID NO: 165783 - DNA, 20 bp, Artificial Sequence
  Synthetic oligonucleotide; GAG chr2 60517054 60517073 60517070 +
tttgtcgtctctggaatgaa

SEQ ID NO: 165784 - DNA, 20 bp, Artificial Sequence
  Synthetic oligonucleotide; AGG chr2 60517055 60517074 60517071 +
ttgtcgtctctggaatgaag

SEQ ID NO: 165785 - DNA, 20 bp, Artificial Sequence
  Synthetic oligonucleotide; TGG chr2 60517061 60517080 60517077 +
tctctggaatgaagaggaaa

SEQ ID NO: 165786 - DNA, 20 bp, Artificial Sequence
  Synthetic oligonucleotide; GGG chr2 60517062 60517081 60517078 +
ctctggaatgaagaggaaat

SEQ ID NO: 165787 - DNA, 20 bp, Artificial Sequence
  Synthetic oligonucleotide; AAG chr2 60517074 60517093 60517090 +
gaggaaatgggtttaaaatg

SEQ ID NO: 165788 - DNA, 20 bp, Artificial Sequence
  Synthetic oligonucleotide; AAG chr2 60517080 60517099 60517096 +
atgggtttaaaatgaagcat

SEQ ID NO: 165789 - DNA, 20 bp, Artificial Sequence
  Synthetic oligonucleotide; AGG chr2 60517081 60517100 60517097 +
tgggtttaaaatgaagcata

SEQ ID NO: 165790 - DNA, 20 bp, Artificial Sequence
  Synthetic oligonucleotide; GGG chr2 60517082 60517101 60517098 +
gggtttaaaatgaagcataa

SEQ ID NO: 165791 - DNA, 20 bp, Artificial Sequence
  Synthetic oligonucleotide; AAG chr2 60517089 60517108 60517105 +
aaatgaagcataagggatcg

SEQ ID NO: 165792 - DNA, 20 bp, Artificial Sequence
  Synthetic oligonucleotide; AGG chr2 60517090 60517109 60517106 +
aatgaagcataagggatcga

SEQ ID NO: 165793 - DNA, 20 bp, Artificial Sequence
  Synthetic oligonucleotide; TAG chr2 60517093 60517112 60517109 +
gaagcataagggatcgaagg

SEQ ID NO: 165794 - DNA, 20 bp, Artificial Sequence
  Synthetic oligonucleotide; AAG chr2 60517100 60517119 60517116 +
aagggatcgaaggtagacaa

SEQ ID NO: 165795 - DNA, 20 bp, Artificial Sequence
  Synthetic oligonucleotide; AGG chr2 60517101 60517120 60517117 +
agggatcgaaggtagacaaa

SEQ ID NO: 165796 - DNA, 20 bp, Artificial Sequence
  Synthetic oligonucleotide; AAG chr2 60517104 60517123 60517120 +
gatcgaaggtagacaaaagg

SEQ ID NO: 165797 - DNA, 20 bp, Artificial Sequence
  Synthetic oligonucleotide; AGG chr2 60517105 60517124 60517121 +
atcgaaggtagacaaaagga

SEQ ID NO: 165798 - DNA, 20 bp, Artificial Sequence
  Synthetic oligonucleotide; GAG chr2 60517121 60517140 60517137 +
aggaaggatttcctgcgatt

SEQ ID NO: 165799 - DNA, 20 bp, Artificial Sequence
  Synthetic oligonucleotide; GAG chr2 60517123 60517142 60517139 +
gaaggatttcctgcgattga

SEQ ID NO: 165800 - DNA, 20 bp, Artificial Sequence
  Synthetic oligonucleotide; AGG chr2 60517124 60517143 60517140 +
aaggatttcctgcgattgag

SEQ ID NO: 165801 - DNA, 20 bp, Artificial Sequence
  Synthetic oligonucleotide; TAG chr2 60517139 60517158 60517155 +
ttgagaggtgtctttaaaaa

SEQ ID NO: 165802 - DNA, 20 bp, Artificial Sequence
  Synthetic oligonucleotide; TAG chr2 60517145 60517164 60517161 +
ggtgtctttaaaaatagaac

SEQ ID NO: 165803 - DNA, 20 bp, Artificial Sequence
  Synthetic oligonucleotide; AGG chr2 60517146 60517165 60517162 +
gtgtctttaaaaatagaact

SEQ ID NO: 165804 - DNA, 20 bp, Artificial Sequence
  Synthetic oligonucleotide; GGG chr2 60517147 60517166 60517163 +
tgtctttaaaaatagaacta

SEQ ID NO: 165805 - DNA, 20 bp, Artificial Sequence
  Synthetic oligonucleotide; TGG chr2 60517150 60517169 60517166 +
ctttaaaaatagaactaggg

SEQ ID NO: 165806 - DNA, 20 bp, Artificial Sequence
  Synthetic oligonucleotide; GAG chr2 60517154 60517173 60517170 +
aaaaatagaactagggtggt

SEQ ID NO: 165807 - DNA, 20 bp, Artificial Sequence
  Synthetic oligonucleotide; AGG chr2 60517155 60517174 60517171 +
aaaatagaactagggtggtg

SEQ ID NO: 165808 - DNA, 20 bp, Artificial Sequence
  Synthetic oligonucleotide; AAG chr2 60517158 60517177 60517174 +
atagaactagggtggtgagg

SEQ ID NO: 165809 - DNA, 20 bp, Artificial Sequence
  Synthetic oligonucleotide; GAG chr2 60517160 60517179 60517176 +
agaactagggtggtgaggaa

SEQ ID NO: 165810 - DNA, 20 bp, Artificial Sequence
  Synthetic oligonucleotide; AGG chr2 60517161 60517180 60517177 +
gaactagggtggtgaggaag

SEQ ID NO: 165811 - DNA, 20 bp, Artificial Sequence
  Synthetic oligonucleotide; TGG chr2 60517165 60517184 60517181 +
tagggtggtgaggaagaggt

SEQ ID NO: 165812 - DNA, 20 bp, Artificial Sequence
  Synthetic oligonucleotide; GGG chr2 60517166 60517185 60517182 +
agggtggtgaggaagaggtt

SEQ ID NO: 165813 - DNA, 20 bp, Artificial Sequence
  Synthetic oligonucleotide; TGG chr2 60517170 60517189 60517186 +
tggtgaggaagaggttgggc

SEQ ID NO: 165814 - DNA, 20 bp, Artificial Sequence
  Synthetic oligonucleotide; TGG chr2 60517180 60517199 60517196 +
gaggttgggctggccaattc

SEQ ID NO: 165815 - DNA, 20 bp, Artificial Sequence
  Synthetic oligonucleotide; GAG chr2 60517182 60517201 60517198 +
ggttgggctggccaattctg

SEQ ID NO: 165816 - DNA, 20 bp, Artificial Sequence
  Synthetic oligonucleotide; AGG chr2 60517183 60517202 60517199 +
gttgggctggccaattctgg

SEQ ID NO: 165817 - DNA, 20 bp, Artificial Sequence
  Synthetic oligonucleotide; GGG chr2 60517184 60517203 60517200 +
ttgggctggccaattctgga

SEQ ID NO: 165818 - DNA, 20 bp, Artificial Sequence
  Synthetic oligonucleotide; GAG chr2 60517199 60517218 60517215 +
ctggagggccatctgcccct

SEQ ID NO: 165819 - DNA, 20 bp, Artificial Sequence
  Synthetic oligonucleotide; GAG chr2 60517201 60517220 60517217 +
ggagggccatctgcccctga

SEQ ID NO: 165820 - DNA, 20 bp, Artificial Sequence
  Synthetic oligonucleotide; AGG chr2 60517202 60517221 60517218 +
gagggccatctgcccctgag

SEQ ID NO: 165821 - DNA, 20 bp, Artificial Sequence
  Synthetic oligonucleotide; GGG chr2 60517203 60517222 60517219 +
agggccatctgcccctgaga

SEQ ID NO: 165822 - DNA, 20 bp, Artificial Sequence
  Synthetic oligonucleotide; CAG chr2 60517250 60517269 60517266 +
tccatctactccattatctc

SEQ ID NO: 165823 - DNA, 20 bp, Artificial Sequence
  Synthetic oligonucleotide; AAG chr2 60517267 60517286 60517283 +
ctccagttatctgaataaaa

SEQ ID NO: 165824 - DNA, 20 bp, Artificial Sequence
  Synthetic oligonucleotide; AAG chr2 60517272 60517291 60517288 +
gttatctgaataaaaaagcc

SEQ ID NO: 165825 - DNA, 20 bp, Artificial Sequence
  Synthetic oligonucleotide; TGG chr2 60517283 60517302 60517299 +
aaaaaagccaagctattccc

SEQ ID NO: 165826 - DNA, 20 bp, Artificial Sequence
  Synthetic oligonucleotide; GGG chr2 60517284 60517303 60517300 +
aaaaagccaagctattccct

SEQ ID NO: 165827 - DNA, 20 bp, Artificial Sequence
  Synthetic oligonucleotide; CAG chr2 60517303 60517322 60517319 +
tgggcacaccatgtaaaccc

SEQ ID NO: 165828 - DNA, 20 bp, Artificial Sequence
  Synthetic oligonucleotide; AAG chr2 60517306 60517325 60517322 +
gcacaccatgtaaaccccag

SEQ ID NO: 165829 - DNA, 20 bp, Artificial Sequence
  Synthetic oligonucleotide; AGG chr2 60517307 60517326 60517323 +
cacaccatgtaaaccccaga

SEQ ID NO: 165830 - DNA, 20 bp, Artificial Sequence
  Synthetic oligonucleotide; GGG chr2 60517308 60517327 60517324 +
acaccatgtaaaccccagaa

SEQ ID NO: 165831 - DNA, 20 bp, Artificial Sequence
  Synthetic oligonucleotide; TGG chr2 60517319 60517338 60517335 +
accccagaagggccacactt

SEQ ID NO: 165832 - DNA, 20 bp, Artificial Sequence
  Synthetic oligonucleotide; GGG chr2 60517320 60517339 60517336 +
ccccagaagggccacacttt

SEQ ID NO: 165833 - DNA, 20 bp, Artificial Sequence
  Synthetic oligonucleotide; GAG chr2 60517322 60517341 60517338 +
ccagaagggccacactttgg

SEQ ID NO: 165834 - DNA, 20 bp, Artificial Sequence
  Synthetic oligonucleotide; TAG chr2 60517328 60517347 60517344 +
gggccacactttgggagccc

SEQ ID NO: 165835 - DNA, 20 bp, Artificial Sequence
  Synthetic oligonucleotide; CAG chr2 60517331 60517350 60517347 +
ccacactttgggagccctag

SEQ ID NO: 165836 - DNA, 20 bp, Artificial Sequence
  Synthetic oligonucleotide; AGG chr2 60517332 60517351 60517348 +
cacactttgggagccctagc

SEQ ID NO: 165837 - DNA, 20 bp, Artificial Sequence
  Synthetic oligonucleotide; AAG chr2 60517336 60517355 60517352 +
ctttgggagccctagcagga

SEQ ID NO: 165838 - DNA, 20 bp, Artificial Sequence
  Synthetic oligonucleotide; AGG chr2 60517337 60517356 60517353 +
tttgggagccctagcaggaa

SEQ ID NO: 165839 - DNA, 20 bp, Artificial Sequence
  Synthetic oligonucleotide; TGG chr2 60517340 60517359 60517356 +
gggagccctagcaggaaagg

SEQ ID NO: 165840 - DNA, 20 bp, Artificial Sequence
  Synthetic oligonucleotide; TAG chr2 60517343 60517362 60517359 +
agccctagcaggaaaggtgg

SEQ ID NO: 165841 - DNA, 20 bp, Artificial Sequence
  Synthetic oligonucleotide; AGG chr2 60517344 60517363 60517360 +
gccctagcaggaaaggtggt

SEQ ID NO: 165842 - DNA, 20 bp, Artificial Sequence
  Synthetic oligonucleotide; AAG chr2 60517347 60517366 60517363 +
ctagcaggaaaggtggtagg

SEQ ID NO: 165843 - DNA, 20 bp, Artificial Sequence
  Synthetic oligonucleotide; CAG chr2 60517352 60517371 60517368 +
aggaaaggtggtaggaagac

SEQ ID NO: 165844 - DNA, 20 bp, Artificial Sequence
  Synthetic oligonucleotide; AAG chr2 60517363 60517382 60517379 +
taggaagaccagccccgaaa

SEQ ID NO: 165845 - DNA, 20 bp, Artificial Sequence
  Synthetic oligonucleotide; AGG chr2 60517364 60517383 60517380 +
aggaagaccagccccgaaaa

SEQ ID NO: 165846 - DNA, 20 bp, Artificial Sequence
  Synthetic oligonucleotide; GGG chr2 60517365 60517384 60517381 +
ggaagaccagccccgaaaaa

SEQ ID NO: 165847 - DNA, 20 bp, Artificial Sequence
  Synthetic oligonucleotide; CAG chr2 60517368 60517387 60517384 +
agaccagccccgaaaaaggg

SEQ ID NO: 165848 - DNA, 20 bp, Artificial Sequence
  Synthetic oligonucleotide; GAG chr2 60517370 60517389 60517386 +
accagccccgaaaaagggca

SEQ ID NO: 165849 - DNA, 20 bp, Artificial Sequence
  Synthetic oligonucleotide; CAG chr2 60517377 60517396 60517393 +
ccgaaaaagggcagagaaaa

SEQ ID NO: 165850 - DNA, 20 bp, Artificial Sequence
  Synthetic oligonucleotide; AGG chr2 60517378 60517397 60517394 +
cgaaaaagggcagagaaaac

SEQ ID NO: 165851 - DNA, 20 bp, Artificial Sequence
  Synthetic oligonucleotide; GGG chr2 60517379 60517398 60517395 +
gaaaaagggcagagaaaaca

SEQ ID NO: 165852 - DNA, 20 bp, Artificial Sequence
  Synthetic oligonucleotide; AAG chr2 60517383 60517402 60517399 +
aagggcagagaaaacaggga

SEQ ID NO: 165853 - DNA, 20 bp, Artificial Sequence
  Synthetic oligonucleotide; AGG chr2 60517384 60517403 60517400 +
agggcagagaaaacagggaa

SEQ ID NO: 165854 - DNA, 20 bp, Artificial Sequence
  Synthetic oligonucleotide; AAG chr2 60517390 60517409 60517406 +
gagaaaacagggaaaggaac

SEQ ID NO: 165855 - DNA, 20 bp, Artificial Sequence
  Synthetic oligonucleotide; AGG chr2 60517391 60517410 60517407 +
agaaaacagggaaaggaaca

SEQ ID NO: 165856 - DNA, 20 bp, Artificial Sequence
  Synthetic oligonucleotide; AAG chr2 60517395 60517414 60517411 +
aacagggaaaggaacaaggc

SEQ ID NO: 165857 - DNA, 20 bp, Artificial Sequence
  Synthetic oligonucleotide; AAG chr2 60517398 60517417 60517414 +
agggaaaggaacaaggcaag

SEQ ID NO: 165858 - DNA, 20 bp, Artificial Sequence
  Synthetic oligonucleotide; AAG chr2 60517402 60517421 60517418 +
aaaggaacaaggcaagaaga

SEQ ID NO: 165859 - DNA, 20 bp, Artificial Sequence
  Synthetic oligonucleotide; AGG chr2 60517403 60517422 60517419 +
aaggaacaaggcaagaagaa

SEQ ID NO: 165860 - DNA, 20 bp, Artificial Sequence
  Synthetic oligonucleotide; GGG chr2 60517404 60517423 60517420 +
aggaacaaggcaagaagaaa

SEQ ID NO: 165861 - DNA, 20 bp, Artificial Sequence
  Synthetic oligonucleotide; AAG chr2 60517409 60517428 60517425 +
caaggcaagaagaaagggca

SEQ ID NO: 165862 - DNA, 20 bp, Artificial Sequence
  Synthetic oligonucleotide; AGG chr2 60517410 60517429 60517426 +
aaggcaagaagaaagggcaa

SEQ ID NO: 165863 - DNA, 20 bp, Artificial Sequence
  Synthetic oligonucleotide; CAG chr2 60517427 60517446 60517443 +
caaaggaccattctctgcaa

SEQ ID NO: 165864 - DNA, 20 bp, Artificial Sequence
  Synthetic oligonucleotide; CAG chr2 60517432 60517451 60517448 +
gaccattctctgcaacagca

SEQ ID NO: 165865 - DNA, 20 bp, Artificial Sequence
  Synthetic oligonucleotide; AGG chr2 60517433 60517452 60517449 +
accattctctgcaacagcac

SEQ ID NO: 165866 - DNA, 20 bp, Artificial Sequence
  Synthetic oligonucleotide; TGG chr2 60517440 60517459 60517456 +
tctgcaacagcacaggtgat

SEQ ID NO: 165867 - DNA, 20 bp, Artificial Sequence
  Synthetic oligonucleotide; GGG chr2 60517441 60517460 60517457 +
ctgcaacagcacaggtgatt

SEQ ID NO: 165868 - DNA, 20 bp, Artificial Sequence
  Synthetic oligonucleotide; TGG chr2 60517444 60517463 60517460 +
caacagcacaggtgattggg

SEQ ID NO: 165869 - DNA, 20 bp, Artificial Sequence
  Synthetic oligonucleotide; TGG chr2 60517447 60517466 60517463 +
cagcacaggtgattgggtgg

SEQ ID NO: 165870 - DNA, 20 bp, Artificial Sequence
  Synthetic oligonucleotide; TGG chr2 60517460 60517479 60517476 +
tgggtggtggttttgttgct

SEQ ID NO: 165871 - DNA, 20 bp, Artificial Sequence
  Synthetic oligonucleotide; GGG chr2 60517461 60517480 60517477 +
gggtggtggttttgttgctt

SEQ ID NO: 165872 - DNA, 20 bp, Artificial Sequence
  Synthetic oligonucleotide; TGG chr2 60517472 60517491 60517488 +
ttgttgcttgggttttacca

SEQ ID NO: 165873 - DNA, 20 bp, Artificial Sequence
  Synthetic oligonucleotide; GGG chr2 60517473 60517492 60517489 +
tgttgcttgggttttaccat

SEQ ID NO: 165874 - DNA, 20 bp, Artificial Sequence
  Synthetic oligonucleotide; CAG chr2 60517481 60517500 60517497 +
gggttttaccatgggctccc

SEQ ID NO: 165875 - DNA, 20 bp, Artificial Sequence
  Synthetic oligonucleotide; AGG chr2 60517482 60517501 60517498 +
ggttttaccatgggctcccc

SEQ ID NO: 165876 - DNA, 20 bp, Artificial Sequence
  Synthetic oligonucleotide; TAG chr2 60517486 60517505 60517502 +
ttaccatgggctccccaggt

SEQ ID NO: 165877 - DNA, 20 bp, Artificial Sequence
  Synthetic oligonucleotide; AAG chr2 60517500 60517519 60517516 +
ccaggttagcactgccacaa

SEQ ID NO: 165878 - DNA, 20 bp, Artificial Sequence
  Synthetic oligonucleotide; CAG chr2 60517506 60517525 60517522 +
tagcactgccacaaaagcac

SEQ ID NO: 165879 - DNA, 20 bp, Artificial Sequence
  Synthetic oligonucleotide; AGG chr2 60517507 60517526 60517523 +
agcactgccacaaaagcacc

SEQ ID NO: 165880 - DNA, 20 bp, Artificial Sequence
  Synthetic oligonucleotide; AAG chr2 60517520 60517539 60517536 +
aagcaccaggctcttcaaca

SEQ ID NO: 165881 - DNA, 20 bp, Artificial Sequence
  Synthetic oligonucleotide; CAG chr2 60517526 60517545 60517542 +
caggctcttcaacaaagctc

SEQ ID NO: 165882 - DNA, 20 bp, Artificial Sequence
  Synthetic oligonucleotide; AAG chr2 60517531 60517550 60517547 +
tcttcaacaaagctccagtt

SEQ ID NO: 165883 - DNA, 20 bp, Artificial Sequence
  Synthetic oligonucleotide; AAG chr2 60517536 60517555 60517552 +
aacaaagctccagttaagaa

SEQ ID NO: 165884 - DNA, 20 bp, Artificial Sequence
  Synthetic oligonucleotide; CAG chr2 60517544 60517563 60517560 +
tccagttaagaaaagcattc

SEQ ID NO: 165885 - DNA, 20 bp, Artificial Sequence
  Synthetic oligonucleotide; AAG chr2 60517560 60517579 60517576 +
attccagccatcaccgataa

SEQ ID NO: 165886 - DNA, 20 bp, Artificial Sequence
  Synthetic oligonucleotide; TGG chr2 60517565 60517584 60517581 +
agccatcaccgataaaagcg

SEQ ID NO: 165887 - DNA, 20 bp, Artificial Sequence
  Synthetic oligonucleotide; GGG chr2 60517566 60517585 60517582 +
gccatcaccgataaaagcgt

SEQ ID NO: 165888 - DNA, 20 bp, Artificial Sequence
  Synthetic oligonucleotide; AAG chr2 60517572 60517591 60517588 +
accgataaaagcgtgggtgc

SEQ ID NO: 165889 - DNA, 20 bp, Artificial Sequence
  Synthetic oligonucleotide; AAG chr2 60517585 60517604 60517601 +
tgggtgcaagttcctctgca

SEQ ID NO: 165890 - DNA, 20 bp, Artificial Sequence
  Synthetic oligonucleotide; CGG chr2 60517594 60517613 60517610 +
gttcctctgcaaagcacatg

SEQ ID NO: 165891 - DNA, 20 bp, Artificial Sequence
  Synthetic oligonucleotide; GGG chr2 60517595 60517614 60517611 +
ttcctctgcaaagcacatgc

SEQ ID NO: 165892 - DNA, 20 bp, Artificial Sequence
  Synthetic oligonucleotide; TGG chr2 60517605 60517624 60517621 +
aagcacatgcgggccacctc

SEQ ID NO: 165893 - DNA, 20 bp, Artificial Sequence
  Synthetic oligonucleotide; TGG chr2 60517615 60517634 60517631 +
gggccacctctggctcctgc

SEQ ID NO: 165894 - DNA, 20 bp, Artificial Sequence
  Synthetic oligonucleotide; TGG chr2 60517621 60517640 60517637 +
cctctggctcctgctggcca

SEQ ID NO: 165895 - DNA, 20 bp, Artificial Sequence
  Synthetic oligonucleotide; GAG chr2 60517623 60517642 60517639 +
tctggctcctgctggccatg

SEQ ID NO: 165896 - DNA, 20 bp, Artificial Sequence
  Synthetic oligonucleotide; GAG chr2 60517625 60517644 60517641 +
tggctcctgctggccatgga

SEQ ID NO: 165897 - DNA, 20 bp, Artificial Sequence
  Synthetic oligonucleotide; AGG chr2 60517626 60517645 60517642 +
ggctcctgctggccatggag

SEQ ID NO: 165898 - DNA, 20 bp, Artificial Sequence
  Synthetic oligonucleotide; TGG chr2 60517640 60517659 60517656 +
atggagaggccatgtgcgat

SEQ ID NO: 165899 - DNA, 20 bp, Artificial Sequence
  Synthetic oligonucleotide; CAG chr2 60517645 60517664 60517661 +
gaggccatgtgcgattggta

SEQ ID NO: 165900 - DNA, 20 bp, Artificial Sequence
  Synthetic oligonucleotide; CAG chr2 60517649 60517668 60517665 +
ccatgtgcgattggtacagt

SEQ ID NO: 165901 - DNA, 20 bp, Artificial Sequence
  Synthetic oligonucleotide; CAG chr2 60517653 60517672 60517669 +
gtgcgattggtacagtcagc

SEQ ID NO: 165902 - DNA, 20 bp, Artificial Sequence
  Synthetic oligonucleotide; AGG chr2 60517654 60517673 60517670 +
tgcgattggtacagtcagcc

SEQ ID NO: 165903 - DNA, 20 bp, Artificial Sequence
  Synthetic oligonucleotide; AAG chr2 60517662 60517681 60517678 +
gtacagtcagccaggaatga

SEQ ID NO: 165904 - DNA, 20 bp, Artificial Sequence
  Synthetic oligonucleotide; TGG chr2 60517665 60517684 60517681 +
cagtcagccaggaatgaaag

SEQ ID NO: 165905 - DNA, 20 bp, Artificial Sequence
  Synthetic oligonucleotide; GGG chr2 60517666 60517685 60517682 +
agtcagccaggaatgaaagt

SEQ ID NO: 165906 - DNA, 20 bp, Artificial Sequence
  Synthetic oligonucleotide; AAG chr2 60517669 60517688 60517685 +
cagccaggaatgaaagtggg

SEQ ID NO: 165907 - DNA, 20 bp, Artificial Sequence
  Synthetic oligonucleotide; CAG chr2 60517675 60517694 60517691 +
ggaatgaaagtgggaagccc

SEQ ID NO: 165908 - DNA, 20 bp, Artificial Sequence
  Synthetic oligonucleotide; AGG chr2 60517676 60517695 60517692 +
gaatgaaagtgggaagcccc

SEQ ID NO: 165909 - DNA, 20 bp, Artificial Sequence
  Synthetic oligonucleotide; TGG chr2 60517682 60517701 60517698 +
aagtgggaagccccaggctc

SEQ ID NO: 165910 - DNA, 20 bp, Artificial Sequence
  Synthetic oligonucleotide; GGG chr2 60517683 60517702 60517699 +
agtgggaagccccaggctct

SEQ ID NO: 165911 - DNA, 20 bp, Artificial Sequence
  Synthetic oligonucleotide; AAG chr2 60517688 60517707 60517704 +
gaagccccaggctctgggcc

SEQ ID NO: 165912 - DNA, 20 bp, Artificial Sequence
  Synthetic oligonucleotide; TAG chr2 60517703 60517722 60517719 +
gggccaagtctaccactgcc

SEQ ID NO: 165913 - DNA, 20 bp, Artificial Sequence
  Synthetic oligonucleotide; AAG chr2 60517707 60517726 60517723 +
caagtctaccactgcctagc

SEQ ID NO: 165914 - DNA, 20 bp, Artificial Sequence
  Synthetic oligonucleotide; TAG chr2 60517710 60517729 60517726 +
gtctaccactgcctagcaag

SEQ ID NO: 165915 - DNA, 20 bp, Artificial Sequence
  Synthetic oligonucleotide; TGG chr2 60517717 60517736 60517733 +
actgcctagcaagtagactc

SEQ ID NO: 165916 - DNA, 20 bp, Artificial Sequence
  Synthetic oligonucleotide; TAG chr2 60517735 60517754 60517751 +
tctggcactcactcccctct

SEQ ID NO: 165917 - DNA, 20 bp, Artificial Sequence
  Synthetic oligonucleotide; CAG chr2 60517765 60517784 60517781 +
ctttctcatctgtaaaatga

SEQ ID NO: 165918 - DNA, 20 bp, Artificial Sequence
  Synthetic oligonucleotide; AGG chr2 60517766 60517785 60517782 +
tttctcatctgtaaaatgac

SEQ ID NO: 165919 - DNA, 20 bp, Artificial Sequence
  Synthetic oligonucleotide; GGG chr2 60517767 60517786 60517783 +
ttctcatctgtaaaatgaca

SEQ ID NO: 165920 - DNA, 20 bp, Artificial Sequence
  Synthetic oligonucleotide; AAG chr2 60517788 60517807 60517804 +
ggttaatgatatgacttcac

SEQ ID NO: 165921 - DNA, 20 bp, Artificial Sequence
  Synthetic oligonucleotide; TAG chr2 60517803 60517822 60517819 +
ttcacaagtctatgtctaca

SEQ ID NO: 165922 - DNA, 20 bp, Artificial Sequence
  Synthetic oligonucleotide; AAG chr2 60517806 60517825 60517822 +
acaagtctatgtctacatag

SEQ ID NO: 165923 - DNA, 20 bp, Artificial Sequence
  Synthetic oligonucleotide; AAG chr2 60517818 60517837 60517834 +
ctacatagaagatgctcaat

SEQ ID NO: 165924 - DNA, 20 bp, Artificial Sequence
  Synthetic oligonucleotide; TGG chr2 60517830 60517849 60517846 +
tgctcaataagtattcactt

SEQ ID NO: 165925 - DNA, 20 bp, Artificial Sequence
  Synthetic oligonucleotide; AAG chr2 60517842 60517861 60517858 +
attcactttggctttccacg

SEQ ID NO: 165926 - DNA, 20 bp, Artificial Sequence
  Synthetic oligonucleotide; AGG chr2 60517843 60517862 60517859 +
ttcactttggctttccacga

SEQ ID NO: 165927 - DNA, 20 bp, Artificial Sequence
  Synthetic oligonucleotide; AAG chr2 60517862 60517881 60517878 +
aaggaaactatctatgctca

SEQ ID NO: 165928 - DNA, 20 bp, Artificial Sequence
  Synthetic oligonucleotide; GAG chr2 60517864 60517883 60517880 +
ggaaactatctatgctcaaa

SEQ ID NO: 165929 - DNA, 20 bp, Artificial Sequence
  Synthetic oligonucleotide; CAG chr2 60517890 60517909 60517906 +
tgctttcttctatgattcct

SEQ ID NO: 165930 - DNA, 20 bp, Artificial Sequence
  Synthetic oligonucleotide; TAG chr2 60517907 60517926 60517923 +
cctcagaaactcttgtcgac

SEQ ID NO: 165931 - DNA, 20 bp, Artificial Sequence
  Synthetic oligonucleotide; GAG chr2 60517909 60517928 60517925 +
tcagaaactcttgtcgacta

SEQ ID NO: 165932 - DNA, 20 bp, Artificial Sequence
  Synthetic oligonucleotide; AGG chr2 60517910 60517929 60517926 +
cagaaactcttgtcgactag

SEQ ID NO: 165933 - DNA, 20 bp, Artificial Sequence
  Synthetic oligonucleotide; AAG chr2 60517916 60517935 60517932 +
ctcttgtcgactagaggaac

SEQ ID NO: 165934 - DNA, 20 bp, Artificial Sequence
  Synthetic oligonucleotide; TAG chr2 60517942 60517961 60517958 +
cttactctaaaacccaattt

SEQ ID NO: 165935 - DNA, 20 bp, Artificial Sequence
  Synthetic oligonucleotide; AGG chr2 60517943 60517962 60517959 +
ttactctaaaacccaatttt

SEQ ID NO: 165936 - DNA, 20 bp, Artificial Sequence
  Synthetic oligonucleotide; GGG chr2 60517944 60517963 60517960 +
tactctaaaacccaatttta

SEQ ID NO: 165937 - DNA, 20 bp, Artificial Sequence
  Synthetic oligonucleotide; GGG chr2 60517945 60517964 60517961 +
actctaaaacccaattttag

SEQ ID NO: 165938 - DNA, 20 bp, Artificial Sequence
  Synthetic oligonucleotide; GAG chr2 60517947 60517966 60517963 +
tctaaaacccaattttaggg

SEQ ID NO: 165939 - DNA, 20 bp, Artificial Sequence
  Synthetic oligonucleotide; AGG chr2 60517948 60517967 60517964 +
ctaaaacccaattttagggg

SEQ ID NO: 165940 - DNA, 20 bp, Artificial Sequence
  Synthetic oligonucleotide; GAG chr2 60517950 60517969 60517966 +
aaaacccaattttaggggag

SEQ ID NO: 165941 - DNA, 20 bp, Artificial Sequence
  Synthetic oligonucleotide; GAG chr2 60517952 60517971 60517968 +
aacccaattttaggggagga

SEQ ID NO: 165942 - DNA, 20 bp, Artificial Sequence
  Synthetic oligonucleotide; AAG chr2 60517966 60517985 60517982 +
ggaggagagaaaatttttaa

SEQ ID NO: 165943 - DNA, 20 bp, Artificial Sequence
  Synthetic oligonucleotide; AAG chr2 60517988 60518007 60518004 +
gactttaaattaattacttg

SEQ ID NO: 165944 - DNA, 20 bp, Artificial Sequence
  Synthetic oligonucleotide; AGG chr2 60517989 60518008 60518005 +
actttaaattaattacttga

SEQ ID NO: 165945 - DNA, 20 bp, Artificial Sequence
  Synthetic oligonucleotide; CAG chr2 60517993 60518012 60518009 +
taaattaattacttgaaggc

SEQ ID NO: 165946 - DNA, 20 bp, Artificial Sequence
  Synthetic oligonucleotide; GAG chr2 60517995 60518014 60518011 +
aattaattacttgaaggcca

SEQ ID NO: 165947 - DNA, 20 bp, Artificial Sequence
  Synthetic oligonucleotide; AGG chr2 60517996 60518015 60518012 +
attaattacttgaaggccag

SEQ ID NO: 165948 - DNA, 20 bp, Artificial Sequence
  Synthetic oligonucleotide; CAG chr2 60518021 60518040 60518037 +
tttgcttatgcctataatct

SEQ ID NO: 165949 - DNA, 20 bp, Artificial Sequence
  Synthetic oligonucleotide; TGG chr2 60518029 60518048 60518045 +
tgcctataatctcagaaatt

SEQ ID NO: 165950 - DNA, 20 bp, Artificial Sequence
  Synthetic oligonucleotide; AAG chr2 60518032 60518051 60518048 +
ctataatctcagaaatttgg

SEQ ID NO: 165951 - DNA, 20 bp, Artificial Sequence
  Synthetic oligonucleotide; AGG chr2 60518033 60518052 60518049 +
tataatctcagaaatttgga

SEQ ID NO: 165952 - DNA, 20 bp, Artificial Sequence
  Synthetic oligonucleotide; CAG chr2 60518039 60518058 60518055 +
ctcagaaatttggaaggcca

SEQ ID NO: 165953 - DNA, 20 bp, Artificial Sequence
  Synthetic oligonucleotide; GAG chr2 60518041 60518060 60518057 +
cagaaatttggaaggccaca

SEQ ID NO: 165954 - DNA, 20 bp, Artificial Sequence
  Synthetic oligonucleotide; AGG chr2 60518042 60518061 60518058 +
agaaatttggaaggccacag

SEQ ID NO: 165955 - DNA, 20 bp, Artificial Sequence
  Synthetic oligonucleotide; GGG chr2 60518043 60518062 60518059 +
gaaatttggaaggccacaga

SEQ ID NO: 165956 - DNA, 20 bp, Artificial Sequence
  Synthetic oligonucleotide; AAG chr2 60518046 60518065 60518062 +
atttggaaggccacagaggg

SEQ ID NO: 165957 - DNA, 20 bp, Artificial Sequence
  Synthetic oligonucleotide; AAG chr2 60518057 60518076 60518073 +
cacagagggaagattgcttg

SEQ ID NO: 165958 - DNA, 20 bp, Artificial Sequence
  Synthetic oligonucleotide; TAG chr2 60518061 60518080 60518077 +
gagggaagattgcttgaagc

SEQ ID NO: 165959 - DNA, 20 bp, Artificial Sequence
  Synthetic oligonucleotide; AGG chr2 60518062 60518081 60518078 +
agggaagattgcttgaagct

SEQ ID NO: 165960 - DNA, 20 bp, Artificial Sequence
  Synthetic oligonucleotide; GAG chr2 60518064 60518083 60518080 +
ggaagattgcttgaagctag

SEQ ID NO: 165961 - DNA, 20 bp, Artificial Sequence
  Synthetic oligonucleotide; AAG chr2 60518070 60518089 60518086 +
ttgcttgaagctaggagttc

SEQ ID NO: 165962 - DNA, 20 bp, Artificial Sequence
  Synthetic oligonucleotide; CAG chr2 60518075 60518094 60518091 +
tgaagctaggagttcaagac

SEQ ID NO: 165963 - DNA, 20 bp, Artificial Sequence
  Synthetic oligonucleotide; TGG chr2 60518080 60518099 60518096 +
ctaggagttcaagaccagcc

SEQ ID NO: 165964 - DNA, 20 bp, Artificial Sequence
  Synthetic oligonucleotide; GGG chr2 60518081 60518100 60518097 +
taggagttcaagaccagcct

SEQ ID NO: 165965 - DNA, 20 bp, Artificial Sequence
  Synthetic oligonucleotide; TAG chr2 60518089 60518108 60518105 +
caagaccagcctgggcaaca

SEQ ID NO: 165966 - DNA, 20 bp, Artificial Sequence
  Synthetic oligonucleotide; AAG chr2 60518112 60518131 60518128 +
caaaaccctgtctctacaaa

SEQ ID NO: 165967 - DNA, 20 bp, Artificial Sequence
  Synthetic oligonucleotide; GAG chr2 60518142 60518161 60518158 +
aataaaataaaataattgct

SEQ ID NO: 165968 - DNA, 20 bp, Artificial Sequence
  Synthetic oligonucleotide; TAG chr2 60518148 60518167 60518164 +
ataaaataattgctgagatt

SEQ ID NO: 165969 - DNA, 20 bp, Artificial Sequence
  Synthetic oligonucleotide; AAG chr2 60518162 60518181 60518178 +
gagatttagctatcttttca

SEQ ID NO: 165970 - DNA, 20 bp, Artificial Sequence
  Synthetic oligonucleotide; TGG chr2 60518178 60518197 60518194 +
ttcaaagaaaatataaaatt

SEQ ID NO: 165971 - DNA, 20 bp, Artificial Sequence
  Synthetic oligonucleotide; CAG chr2 60518183 60518202 60518199 +
agaaaatataaaatttggcc

SEQ ID NO: 165972 - DNA, 20 bp, Artificial Sequence
  Synthetic oligonucleotide; TAG chr2 60518204 60518223 60518220 +
agttttttatctatcaaacc

SEQ ID NO: 165973 - DNA, 20 bp, Artificial Sequence
  Synthetic oligonucleotide; GAG chr2 60518249 60518268 60518265 +
tccctctgtcaacatctgct

SEQ ID NO: 165974 - DNA, 20 bp, Artificial Sequence
  Synthetic oligonucleotide; TAG chr2 60518275 60518294 60518291 +
tcataatacataaaacatca

SEQ ID NO: 165975 - DNA, 20 bp, Artificial Sequence
  Synthetic oligonucleotide; AAG chr2 60518281 60518300 60518297 +
tacataaaacatcatagata

SEQ ID NO: 165976 - DNA, 20 bp, Artificial Sequence
  Synthetic oligonucleotide; AGG chr2 60518282 60518301 60518298 +
acataaaacatcatagataa

SEQ ID NO: 165977 - DNA, 20 bp, Artificial Sequence
  Synthetic oligonucleotide; GAG chr2 60518284 60518303 60518300 +
ataaaacatcatagataaag

SEQ ID NO: 165978 - DNA, 20 bp, Artificial Sequence
  Synthetic oligonucleotide; CAG chr2 60518290 60518309 60518306 +
catcatagataaaggagtca

SEQ ID NO: 165979 - DNA, 20 bp, Artificial Sequence
  Synthetic oligonucleotide; AGG chr2 60518291 60518310 60518307 +
atcatagataaaggagtcac

SEQ ID NO: 165980 - DNA, 20 bp, Artificial Sequence
  Synthetic oligonucleotide; TAG chr2 60518296 60518315 60518312 +
agataaaggagtcacaggat

SEQ ID NO: 165981 - DNA, 20 bp, Artificial Sequence
  Synthetic oligonucleotide; CAG chr2 60518315 60518334 60518331 +
ttagacctaccgttccatac

SEQ ID NO: 165982 - DNA, 20 bp, Artificial Sequence
  Synthetic oligonucleotide; CAG chr2 60518325 60518344 60518341 +
cgttccataccagtgtgtta

SEQ ID NO: 165983 - DNA, 20 bp, Artificial Sequence
  Synthetic oligonucleotide; AAG chr2 60518337 60518356 60518353 +
gtgtgttacagcctgtcatg

SEQ ID NO: 165984 - DNA, 20 bp, Artificial Sequence
  Synthetic oligonucleotide; CAG chr2 60518340 60518359 60518356 +
tgttacagcctgtcatgaag

SEQ ID NO: 165985 - DNA, 20 bp, Artificial Sequence
  Synthetic oligonucleotide; CAG chr2 60518346 60518365 60518362 +
agcctgtcatgaagcagact

SEQ ID NO: 165986 - DNA, 20 bp, Artificial Sequence
  Synthetic oligonucleotide; GAG chr2 60518348 60518367 60518364 +
cctgtcatgaagcagactca

SEQ ID NO: 165987 - DNA, 20 bp, Artificial Sequence
  Synthetic oligonucleotide; TGG chr2 60518355 60518374 60518371 +
tgaagcagactcagagaatt

SEQ ID NO: 165988 - DNA, 20 bp, Artificial Sequence
  Synthetic oligonucleotide; TAG chr2 60518366 60518385 60518382 +
cagagaatttggctactact

SEQ ID NO: 165989 - DNA, 20 bp, Artificial Sequence
  Synthetic oligonucleotide; TAG chr2 60518384 60518403 60518400 +
cttagtactaacatttaatt

SEQ ID NO: 165990 - DNA, 20 bp, Artificial Sequence
  Synthetic oligonucleotide; TAG chr2 60518404 60518423 60518420 +
tagttttaaaatgtctgcga

SEQ ID NO: 165991 - DNA, 20 bp, Artificial Sequence
  Synthetic oligonucleotide; GAG chr2 60518406 60518425 60518422 +
gttttaaaatgtctgcgata

SEQ ID NO: 165992 - DNA, 20 bp, Artificial Sequence
  Synthetic oligonucleotide; CAG chr2 60518409 60518428 60518425 +
ttaaaatgtctgcgatagag

SEQ ID NO: 165993 - DNA, 20 bp, Artificial Sequence
  Synthetic oligonucleotide; CAG chr2 60518415 60518434 60518431 +
tgtctgcgatagagcagatt

SEQ ID NO: 165994 - DNA, 20 bp, Artificial Sequence
  Synthetic oligonucleotide; AGG chr2 60518416 60518435 60518432 +
gtctgcgatagagcagattc

SEQ ID NO: 165995 - DNA, 20 bp, Artificial Sequence
  Synthetic oligonucleotide; AAG chr2 60518430 60518449 60518446 +
agattcaggattatgcctgt

SEQ ID NO: 165996 - DNA, 20 bp, Artificial Sequence
  Synthetic oligonucleotide; AAG chr2 60518469 60518488 60518485 +
cctgcatttaaatatgaata

SEQ ID NO: 165997 - DNA, 20 bp, Artificial Sequence
  Synthetic oligonucleotide; GAG chr2 60518471 60518490 60518487 +
tgcatttaaatatgaataaa

SEQ ID NO: 165998 - DNA, 20 bp, Artificial Sequence
  Synthetic oligonucleotide; GAG chr2 60518475 60518494 60518491 +
tttaaatatgaataaagagt

SEQ ID NO: 165999 - DNA, 20 bp, Artificial Sequence
  Synthetic oligonucleotide; CAG chr2 60518478 60518497 60518494 +
aaatatgaataaagagtgag

SEQ ID NO: 166000 - DNA, 20 bp, Artificial Sequence
  Synthetic oligonucleotide; AAG chr2 60518481 60518500 60518497 +
tatgaataaagagtgagcag

SEQ ID NO: 166001 - DNA, 20 bp, Artificial Sequence
  Synthetic oligonucleotide; AGG chr2 60518482 60518501 60518498 +
atgaataaagagtgagcaga

SEQ ID NO: 166002 - DNA, 20 bp, Artificial Sequence
  Synthetic oligonucleotide; GGG chr2 60518483 60518502 60518499 +
tgaataaagagtgagcagaa

SEQ ID NO: 166003 - DNA, 20 bp, Artificial Sequence
  Synthetic oligonucleotide; CAG chr2 60518488 60518507 60518504 +
aaagagtgagcagaagggac

SEQ ID NO: 166004 - DNA, 20 bp, Artificial Sequence
  Synthetic oligonucleotide; AGG chr2 60518489 60518508 60518505 +
aagagtgagcagaagggacc

SEQ ID NO: 166005 - DNA, 20 bp, Artificial Sequence
  Synthetic oligonucleotide; TGG chr2 60518498 60518517 60518514 +
cagaagggaccaggtaaaaa

SEQ ID NO: 166006 - DNA, 20 bp, Artificial Sequence
  Synthetic oligonucleotide; TGG chr2 60518505 60518524 60518521 +
gaccaggtaaaaatggcaca

SEQ ID NO: 166007 - DNA, 20 bp, Artificial Sequence
  Synthetic oligonucleotide; GGG chr2 60518506 60518525 60518522 +
accaggtaaaaatggcacat

SEQ ID NO: 166008 - DNA, 20 bp, Artificial Sequence
  Synthetic oligonucleotide; GAG chr2 60518508 60518527 60518524 +
caggtaaaaatggcacatgg

SEQ ID NO: 166009 - DNA, 20 bp, Artificial Sequence
  Synthetic oligonucleotide; AGG chr2 60518509 60518528 60518525 +
aggtaaaaatggcacatggg

SEQ ID NO: 166010 - DNA, 20 bp, Artificial Sequence
  Synthetic oligonucleotide; GGG chr2 60518510 60518529 60518526 +
ggtaaaaatggcacatggga

SEQ ID NO: 166011 - DNA, 20 bp, Artificial Sequence
  Synthetic oligonucleotide; TAG chr2 60518531 60518550 60518547 +
ggcatcgcacatgtgaattt

SEQ ID NO: 166012 - DNA, 20 bp, Artificial Sequence
  Synthetic oligonucleotide; AAG chr2 60518547 60518566 60518563 +
attttagcttcccacacgca

SEQ ID NO: 166013 - DNA, 20 bp, Artificial Sequence
  Synthetic oligonucleotide; AGG chr2 60518548 60518567 60518564 +
ttttagcttcccacacgcaa

SEQ ID NO: 166014 - DNA, 20 bp, Artificial Sequence
  Synthetic oligonucleotide; TGG chr2 60518553 60518572 60518569 +
gcttcccacacgcaaaggca

SEQ ID NO: 166015 - DNA, 20 bp, Artificial Sequence
  Synthetic oligonucleotide; GGG chr2 60518554 60518573 60518570 +
cttcccacacgcaaaggcat

SEQ ID NO: 166016 - DNA, 20 bp, Artificial Sequence
  Synthetic oligonucleotide; GGG chr2 60518555 60518574 60518571 +
ttcccacacgcaaaggcatg

SEQ ID NO: 166017 - DNA, 20 bp, Artificial Sequence
  Synthetic oligonucleotide; GGG chr2 60518556 60518575 60518572 +
tcccacacgcaaaggcatgg

SEQ ID NO: 166018 - DNA, 20 bp, Artificial Sequence
  Synthetic oligonucleotide; GGG chr2 60518557 60518576 60518573 +
cccacacgcaaaggcatggg

SEQ ID NO: 166019 - DNA, 20 bp, Artificial Sequence
  Synthetic oligonucleotide; AAG chr2 60518562 60518581 60518578 +
acgcaaaggcatggggggac

SEQ ID NO: 166020 - DNA, 20 bp, Artificial Sequence
  Synthetic oligonucleotide; AGG chr2 60518563 60518582 60518579 +
cgcaaaggcatggggggaca

SEQ ID NO: 166021 - DNA, 20 bp, Artificial Sequence
  Synthetic oligonucleotide; CAG chr2 60518566 60518585 60518582 +
aaaggcatggggggacaagg

SEQ ID NO: 166022 - DNA, 20 bp, Artificial Sequence
  Synthetic oligonucleotide; AGG chr2 60518567 60518586 60518583 +
aaggcatggggggacaaggc

SEQ ID NO: 166023 - DNA, 20 bp, Artificial Sequence
  Synthetic oligonucleotide; AAG chr2 60518570 60518589 60518586 +
gcatggggggacaaggcagg

SEQ ID NO: 166024 - DNA, 20 bp, Artificial Sequence
  Synthetic oligonucleotide; TAG chr2 60518581 60518600 60518597 +
caaggcaggaagcattgctc

SEQ ID NO: 166025 - DNA, 20 bp, Artificial Sequence
  Synthetic oligonucleotide; GAG chr2 60518588 60518607 60518604 +
ggaagcattgctctagatct

SEQ ID NO: 166026 - DNA, 20 bp, Artificial Sequence
  Synthetic oligonucleotide; CAG chr2 60518604 60518623 60518620 +
atctgagaatcaccacacac

SEQ ID NO: 166027 - DNA, 20 bp, Artificial Sequence
  Synthetic oligonucleotide; GAG chr2 60518606 60518625 60518622 +
ctgagaatcaccacacacca

SEQ ID NO: 166028 - DNA, 20 bp, Artificial Sequence
  Synthetic oligonucleotide; GAG chr2 60518608 60518627 60518624 +
gagaatcaccacacaccaga

SEQ ID NO: 166029 - DNA, 20 bp, Artificial Sequence
  Synthetic oligonucleotide; AGG chr2 60518609 60518628 60518625 +
agaatcaccacacaccagag

SEQ ID NO: 166030 - DNA, 20 bp, Artificial Sequence
  Synthetic oligonucleotide; GGG chr2 60518610 60518629 60518626 +
gaatcaccacacaccagaga

SEQ ID NO: 166031 - DNA, 20 bp, Artificial Sequence
  Synthetic oligonucleotide; TGG chr2 60518615 60518634 60518631 +
accacacaccagagagggca

SEQ ID NO: 166032 - DNA, 20 bp, Artificial Sequence
  Synthetic oligonucleotide; GGG chr2 60518616 60518635 60518632 +
ccacacaccagagagggcat

SEQ ID NO: 166033 - DNA, 20 bp, Artificial Sequence
  Synthetic oligonucleotide; GAG chr2 60518618 60518637 60518634 +
acacaccagagagggcatgg

SEQ ID NO: 166034 - DNA, 20 bp, Artificial Sequence
  Synthetic oligonucleotide; AGG chr2 60518619 60518638 60518635 +
cacaccagagagggcatggg

SEQ ID NO: 166035 - DNA, 20 bp, Artificial Sequence
  Synthetic oligonucleotide; CAG chr2 60518635 60518654 60518651 +
tgggaggtgacacacaaacc

SEQ ID NO: 166036 - DNA, 20 bp, Artificial Sequence
  Synthetic oligonucleotide; CAG chr2 60518638 60518657 60518654 +
gaggtgacacacaaacccag

SEQ ID NO: 166037 - DNA, 20 bp, Artificial Sequence
  Synthetic oligonucleotide; GAG chr2 60518640 60518659 60518656 +
ggtgacacacaaacccagca

SEQ ID NO: 166038 - DNA, 20 bp, Artificial Sequence
  Synthetic oligonucleotide; GAG chr2 60518649 60518668 60518665 +
caaacccagcagagaacgtt

SEQ ID NO: 166039 - DNA, 20 bp, Artificial Sequence
  Synthetic oligonucleotide; AAG chr2 60518653 60518672 60518669 +
cccagcagagaacgttgaga

SEQ ID NO: 166040 - DNA, 20 bp, Artificial Sequence
  Synthetic oligonucleotide; GAG chr2 60518655 60518674 60518671 +
cagcagagaacgttgagaaa

SEQ ID NO: 166041 - DNA, 20 bp, Artificial Sequence
  Synthetic oligonucleotide; AAG chr2 60518662 60518681 60518678 +
gaacgttgagaaagagtttt

SEQ ID NO: 166042 - DNA, 20 bp, Artificial Sequence
  Synthetic oligonucleotide; GAG chr2 60518664 60518683 60518680 +
acgttgagaaagagttttaa

SEQ ID NO: 166043 - DNA, 20 bp, Artificial Sequence
  Synthetic oligonucleotide; CAG chr2 60518679 60518698 60518695 +
tttaagagcctactcatcat

SEQ ID NO: 166044 - DNA, 20 bp, Artificial Sequence
  Synthetic oligonucleotide; GAG chr2 60518681 60518700 60518697 +
taagagcctactcatcatca

SEQ ID NO: 166045 - DNA, 20 bp, Artificial Sequence
  Synthetic oligonucleotide; AAG chr2 60518693 60518712 60518709 +
catcatcagagttcacttaa

SEQ ID NO: 166046 - DNA, 20 bp, Artificial Sequence
  Synthetic oligonucleotide; CAG chr2 60518702 60518721 60518718 +
agttcacttaaaagtccatc

SEQ ID NO: 166047 - DNA, 20 bp, Artificial Sequence
  Synthetic oligonucleotide; CAG chr2 60518708 60518727 60518724 +
cttaaaagtccatccagaat

SEQ ID NO: 166048 - DNA, 20 bp, Artificial Sequence
  Synthetic oligonucleotide; TGG chr2 60518715 60518734 60518731 +
gtccatccagaatcagaacg

SEQ ID NO: 166049 - DNA, 20 bp, Artificial Sequence
  Synthetic oligonucleotide; GGG chr2 60518716 60518735 60518732 +
tccatccagaatcagaacgt

SEQ ID NO: 166050 - DNA, 20 bp, Artificial Sequence
  Synthetic oligonucleotide; TGG chr2 60518720 60518739 60518736 +
tccagaatcagaacgtggga

SEQ ID NO: 166051 - DNA, 20 bp, Artificial Sequence
  Synthetic oligonucleotide; GGG chr2 60518721 60518740 60518737 +
ccagaatcagaacgtgggat

SEQ ID NO: 166052 - DNA, 20 bp, Artificial Sequence
  Synthetic oligonucleotide; GGG chr2 60518722 60518741 60518738 +
cagaatcagaacgtgggatg

SEQ ID NO: 166053 - DNA, 20 bp, Artificial Sequence
  Synthetic oligonucleotide; AAG chr2 60518731 60518750 60518747 +
aacgtgggatggggtgcccc

SEQ ID NO: 166054 - DNA, 20 bp, Artificial Sequence
  Synthetic oligonucleotide; AGG chr2 60518732 60518751 60518748 +
acgtgggatggggtgcccca

SEQ ID NO: 166055 - DNA, 20 bp, Artificial Sequence
  Synthetic oligonucleotide; TGG chr2 60518741 60518760 60518757 +
ggggtgccccaaggcattcc

SEQ ID NO: 166056 - DNA, 20 bp, Artificial Sequence
  Synthetic oligonucleotide; GGG chr2 60518742 60518761 60518758 +
gggtgccccaaggcattcct

SEQ ID NO: 166057 - DNA, 20 bp, Artificial Sequence
  Synthetic oligonucleotide; GGG chr2 60518743 60518762 60518759 +
ggtgccccaaggcattcctg

SEQ ID NO: 166058 - DNA, 20 bp, Artificial Sequence
  Synthetic oligonucleotide; GGG chr2 60518744 60518763 60518760 +
gtgccccaaggcattcctgg

SEQ ID NO: 166059 - DNA, 20 bp, Artificial Sequence
  Synthetic oligonucleotide; CGG chr2 60518748 60518767 60518764 +
cccaaggcattcctgggggc

SEQ ID NO: 166060 - DNA, 20 bp, Artificial Sequence
  Synthetic oligonucleotide; GGG chr2 60518749 60518768 60518765 +
ccaaggcattcctgggggcc

SEQ ID NO: 166061 - DNA, 20 bp, Artificial Sequence
  Synthetic oligonucleotide; TGG chr2 60518754 60518773 60518770 +
gcattcctgggggccgggcg

SEQ ID NO: 166062 - DNA, 20 bp, Artificial Sequence
  Synthetic oligonucleotide; AAG chr2 60518762 60518781 60518778 +
gggggccgggcgtggatttt

SEQ ID NO: 166063 - DNA, 20 bp, Artificial Sequence
  Synthetic oligonucleotide; AGG chr2 60518763 60518782 60518779 +
ggggccgggcgtggatttta

SEQ ID NO: 166064 - DNA, 20 bp, Artificial Sequence
  Synthetic oligonucleotide; AAG chr2 60518784 60518803 60518800 +
ggactcatcaattactgttc

SEQ ID NO: 166065 - DNA, 20 bp, Artificial Sequence
  Synthetic oligonucleotide; CAG chr2 60518789 60518808 60518805 +
catcaattactgttcaagtt

SEQ ID NO: 166066 - DNA, 20 bp, Artificial Sequence
  Synthetic oligonucleotide; AGG chr2 60518790 60518809 60518806 +
atcaattactgttcaagttc

SEQ ID NO: 166067 - DNA, 20 bp, Artificial Sequence
  Synthetic oligonucleotide; AAG chr2 60518795 60518814 60518811 +
ttactgttcaagttcaggtc

SEQ ID NO: 166068 - DNA, 20 bp, Artificial Sequence
  Synthetic oligonucleotide; TGG chr2 60518799 60518818 60518815 +
tgttcaagttcaggtcaagc

SEQ ID NO: 166069 - DNA, 20 bp, Artificial Sequence
  Synthetic oligonucleotide; TGG chr2 60518803 60518822 60518819 +
caagttcaggtcaagctgga

SEQ ID NO: 166070 - DNA, 20 bp, Artificial Sequence
  Synthetic oligonucleotide; TGG chr2 60518818 60518837 60518834 +
ctggatggacaccatccaca

SEQ ID NO: 166071 - DNA, 20 bp, Artificial Sequence
  Synthetic oligonucleotide; TGG chr2 60518831 60518850 60518847 +
atccacatggtgttgctcga

SEQ ID NO: 166072 - DNA, 20 bp, Artificial Sequence
  Synthetic oligonucleotide; GGG chr2 60518832 60518851 60518848 +
tccacatggtgttgctcgat

SEQ ID NO: 166073 - DNA, 20 bp, Artificial Sequence
  Synthetic oligonucleotide; AAG chr2 60518837 60518856 60518853 +
atggtgttgctcgatgggca

SEQ ID NO: 166074 - DNA, 20 bp, Artificial Sequence
  Synthetic oligonucleotide; AAG chr2 60518843 60518862 60518859 +
ttgctcgatgggcaaagatc

SEQ ID NO: 166075 - DNA, 20 bp, Artificial Sequence
  Synthetic oligonucleotide; GAG chr2 60518845 60518864 60518861 +
gctcgatgggcaaagatcaa

SEQ ID NO: 166076 - DNA, 20 bp, Artificial Sequence
  Synthetic oligonucleotide; AGG chr2 60518846 60518865 60518862 +
ctcgatgggcaaagatcaag

SEQ ID NO: 166077 - DNA, 20 bp, Artificial Sequence
  Synthetic oligonucleotide; CAG chr2 60518849 60518868 60518865 +
gatgggcaaagatcaagagg

SEQ ID NO: 166078 - DNA, 20 bp, Artificial Sequence
  Synthetic oligonucleotide; CAG chr2 60518863 60518882 60518879 +
aagaggcagtcgttcaccac

SEQ ID NO: 166079 - DNA, 20 bp, Artificial Sequence
  Synthetic oligonucleotide; TGG chr2 60518876 60518895 60518892 +
tcaccaccagccgtatttcc

SEQ ID NO: 166080 - DNA, 20 bp, Artificial Sequence
  Synthetic oligonucleotide; GGG chr2 60518877 60518896 60518893 +
caccaccagccgtatttcct

SEQ ID NO: 166081 - DNA, 20 bp, Artificial Sequence
  Synthetic oligonucleotide; GGG chr2 60518878 60518897 60518894 +
accaccagccgtatttcctg

SEQ ID NO: 166082 - DNA, 20 bp, Artificial Sequence
  Synthetic oligonucleotide; AAG chr2 60518908 60518927 60518924 +
ttactgacattctgtcattc

SEQ ID NO: 166083 - DNA, 20 bp, Artificial Sequence
  Synthetic oligonucleotide; AGG chr2 60518909 60518928 60518925 +
tactgacattctgtcattca

SEQ ID NO: 166084 - DNA, 20 bp, Artificial Sequence
  Synthetic oligonucleotide; TGG chr2 60518912 60518931 60518928 +
tgacattctgtcattcaagg

SEQ ID NO: 166085 - DNA, 20 bp, Artificial Sequence
  Synthetic oligonucleotide; GGG chr2 60518913 60518932 60518929 +
gacattctgtcattcaaggt

SEQ ID NO: 166086 - DNA, 20 bp, Artificial Sequence
  Synthetic oligonucleotide; AAG chr2 60518921 60518940 60518937 +
gtcattcaaggtgggtcctg

SEQ ID NO: 166087 - DNA, 20 bp, Artificial Sequence
  Synthetic oligonucleotide; CAG chr2 60518927 60518946 60518943 +
caaggtgggtcctgaagcca

SEQ ID NO: 166088 - DNA, 20 bp, Artificial Sequence
  Synthetic oligonucleotide; AAG chr2 60518931 60518950 60518947 +
gtgggtcctgaagccacagt

SEQ ID NO: 166089 - DNA, 20 bp, Artificial Sequence
  Synthetic oligonucleotide; CAG chr2 60518959 60518978 60518975 +
aatctgctccctacaatcca

SEQ ID NO: 166090 - DNA, 20 bp, Artificial Sequence
  Synthetic oligonucleotide; AAG chr2 60518965 60518984 60518981 +
ctccctacaatccacagcaa

SEQ ID NO: 166091 - DNA, 20 bp, Artificial Sequence
  Synthetic oligonucleotide; AGG chr2 60518966 60518985 60518982 +
tccctacaatccacagcaaa

SEQ ID NO: 166092 - DNA, 20 bp, Artificial Sequence
  Synthetic oligonucleotide; GAG chr2 60518968 60518987 60518984 +
cctacaatccacagcaaaag

SEQ ID NO: 166093 - DNA, 20 bp, Artificial Sequence
  Synthetic oligonucleotide; GAG chr2 60518970 60518989 60518986 +
tacaatccacagcaaaagga

SEQ ID NO: 166094 - DNA, 20 bp, Artificial Sequence
  Synthetic oligonucleotide; AAG chr2 60518985 60519004 60519001 +
aaggagagttccttctttta

SEQ ID NO: 166095 - DNA, 20 bp, Artificial Sequence
  Synthetic oligonucleotide; GAG chr2 60518987 60519006 60519003 +
ggagagttccttcttttaaa

SEQ ID NO: 166096 - DNA, 20 bp, Artificial Sequence
  Synthetic oligonucleotide; TGG chr2 60518993 60519012 60519009 +
ttccttcttttaaagagcga

SEQ ID NO: 166097 - DNA, 20 bp, Artificial Sequence
  Synthetic oligonucleotide; GAG chr2 60519015 60519034 60519031 +
gcacacatctctcaactctt

SEQ ID NO: 166098 - DNA, 20 bp, Artificial Sequence
  Synthetic oligonucleotide; GAG chr2 60519017 60519036 60519033 +
acacatctctcaactcttga

SEQ ID NO: 166099 - DNA, 20 bp, Artificial Sequence
  Synthetic oligonucleotide; TGG chr2 60519024 60519043 60519040 +
tctcaactcttgagagaaaa

SEQ ID NO: 166100 - DNA, 20 bp, Artificial Sequence
  Synthetic oligonucleotide; CAG chr2 60519028 60519047 60519044 +
aactcttgagagaaaatgga

SEQ ID NO: 166101 - DNA, 20 bp, Artificial Sequence
  Synthetic oligonucleotide; AAG chr2 60519031 60519050 60519047 +
tcttgagagaaaatggacag

SEQ ID NO: 166102 - DNA, 20 bp, Artificial Sequence
  Synthetic oligonucleotide; TGG chr2 60519034 60519053 60519050 +
tgagagaaaatggacagaag

SEQ ID NO: 166103 - DNA, 20 bp, Artificial Sequence
  Synthetic oligonucleotide; GGG chr2 60519035 60519054 60519051 +
gagagaaaatggacagaagt

SEQ ID NO: 166104 - DNA, 20 bp, Artificial Sequence
  Synthetic oligonucleotide; CAG chr2 60519056 60519075 60519072 +
ggatttttcaatcctgatac

SEQ ID NO: 166105 - DNA, 20 bp, Artificial Sequence
  Synthetic oligonucleotide; CAG chr2 60519059 60519078 60519075 +
tttttcaatcctgataccag

SEQ ID NO: 166106 - DNA, 20 bp, Artificial Sequence
  Synthetic oligonucleotide; AGG chr2 60519060 60519079 60519076 +
ttttcaatcctgataccagc

SEQ ID NO: 166107 - DNA, 20 bp, Artificial Sequence
  Synthetic oligonucleotide; CAG chr2 60519066 60519085 60519082 +
atcctgataccagcaggaaa

SEQ ID NO: 166108 - DNA, 20 bp, Artificial Sequence
  Synthetic oligonucleotide; AGG chr2 60519067 60519086 60519083 +
tcctgataccagcaggaaac

SEQ ID NO: 166109 - DNA, 20 bp, Artificial Sequence
  Synthetic oligonucleotide; GGG chr2 60519068 60519087 60519084 +
cctgataccagcaggaaaca

SEQ ID NO: 166110 - DNA, 20 bp, Artificial Sequence
  Synthetic oligonucleotide; GAG chr2 60519070 60519089 60519086 +
tgataccagcaggaaacagg

SEQ ID NO: 166111 - DNA, 20 bp, Artificial Sequence
  Synthetic oligonucleotide; TGG chr2 60519077 60519096 60519093 +
agcaggaaacagggagtctc

SEQ ID NO: 166112 - DNA, 20 bp, Artificial Sequence
  Synthetic oligonucleotide; TAG chr2 60519080 60519099 60519096 +
aggaaacagggagtctctgg

SEQ ID NO: 166113 - DNA, 20 bp, Artificial Sequence
  Synthetic oligonucleotide; AGG chr2 60519081 60519100 60519097 +
ggaaacagggagtctctggt

SEQ ID NO: 166114 - DNA, 20 bp, Artificial Sequence
  Synthetic oligonucleotide; AAG chr2 60519096 60519115 60519112 +
ctggtaggtactaccaaacc

SEQ ID NO: 166115 - DNA, 20 bp, Artificial Sequence
  Synthetic oligonucleotide; AAG chr2 60519099 60519118 60519115 +
gtaggtactaccaaaccaag

SEQ ID NO: 166116 - DNA, 20 bp, Artificial Sequence
  Synthetic oligonucleotide; AAG chr2 60519115 60519134 60519131 +
caagaagcttcttttctccc

SEQ ID NO: 166117 - DNA, 20 bp, Artificial Sequence
  Synthetic oligonucleotide; CAG chr2 60519123 60519142 60519139 +
ttcttttctcccaagtacac

SEQ ID NO: 166118 - DNA, 20 bp, Artificial Sequence
  Synthetic oligonucleotide; AGG chr2 60519124 60519143 60519140 +
tcttttctcccaagtacacc

SEQ ID NO: 166119 - DNA, 20 bp, Artificial Sequence
  Synthetic oligonucleotide; CAG chr2 60519142 60519161 60519158 +
ccaggaacccctttcaaata

SEQ ID NO: 166120 - DNA, 20 bp, Artificial Sequence
  Synthetic oligonucleotide; AGG chr2 60519143 60519162 60519159 +
caggaacccctttcaaatac

SEQ ID NO: 166121 - DNA, 20 bp, Artificial Sequence
  Synthetic oligonucleotide; AAG chr2 60519157 60519176 60519173 +
aaatacaggcgctacaaaaa

SEQ ID NO: 166122 - DNA, 20 bp, Artificial Sequence
  Synthetic oligonucleotide; TAG chr2 60519163 60519182 60519179 +
aggcgctacaaaaaaagaaa

SEQ ID NO: 166123 - DNA, 20 bp, Artificial Sequence
  Synthetic oligonucleotide; AGG chr2 60519164 60519183 60519180 +
ggcgctacaaaaaaagaaat

SEQ ID NO: 166124 - DNA, 20 bp, Artificial Sequence
  Synthetic oligonucleotide; AAG chr2 60519172 60519191 60519188 +
aaaaaaagaaataggtgtga

SEQ ID NO: 166125 - DNA, 20 bp, Artificial Sequence
  Synthetic oligonucleotide; CGG chr2 60519175 60519194 60519191 +
aaaagaaataggtgtgaaag

SEQ ID NO: 166126 - DNA, 20 bp, Artificial Sequence
  Synthetic oligonucleotide; GGG chr2 60519176 60519195 60519192 +
aaagaaataggtgtgaaagc

SEQ ID NO: 166127 - DNA, 20 bp, Artificial Sequence
  Synthetic oligonucleotide; GGG chr2 60519177 60519196 60519193 +
aagaaataggtgtgaaagcg

SEQ ID NO: 166128 - DNA, 20 bp, Artificial Sequence
  Synthetic oligonucleotide; AAG chr2 60519181 60519200 60519197 +
aataggtgtgaaagcggggc

SEQ ID NO: 166129 - DNA, 20 bp, Artificial Sequence
  Synthetic oligonucleotide; AAG chr2 60519185 60519204 60519201 +
ggtgtgaaagcggggcaaga

SEQ ID NO: 166130 - DNA, 20 bp, Artificial Sequence
  Synthetic oligonucleotide; AGG chr2 60519186 60519205 60519202 +
gtgtgaaagcggggcaagaa

SEQ ID NO: 166131 - DNA, 20 bp, Artificial Sequence
  Synthetic oligonucleotide; GGG chr2 60519187 60519206 60519203 +
tgtgaaagcggggcaagaaa

SEQ ID NO: 166132 - DNA, 20 bp, Artificial Sequence
  Synthetic oligonucleotide; GAG chr2 60519195 60519214 60519211 +
cggggcaagaaagggaacct

SEQ ID NO: 166133 - DNA, 20 bp, Artificial Sequence
  Synthetic oligonucleotide; AGG chr2 60519196 60519215 60519212 +
ggggcaagaaagggaacctg

SEQ ID NO: 166134 - DNA, 20 bp, Artificial Sequence
  Synthetic oligonucleotide; TGG chr2 60519218 60519237 60519234 +
gactatgcatgctctgtcta

SEQ ID NO: 166135 - DNA, 20 bp, Artificial Sequence
  Synthetic oligonucleotide; GGG chr2 60519219 60519238 60519235 +
actatgcatgctctgtctat

SEQ ID NO: 166136 - DNA, 20 bp, Artificial Sequence
  Synthetic oligonucleotide; AAG chr2 60519235 60519254 60519251 +
ctatgggtatcaacaccttt

SEQ ID NO: 166137 - DNA, 20 bp, Artificial Sequence
  Synthetic oligonucleotide; AGG chr2 60519236 60519255 60519252 +
tatgggtatcaacaccttta

SEQ ID NO: 166138 - DNA, 20 bp, Artificial Sequence
  Synthetic oligonucleotide; CGG chr2 60519246 60519265 60519262 +
aacacctttaaggcattttg

SEQ ID NO: 166139 - DNA, 20 bp, Artificial Sequence
  Synthetic oligonucleotide; GAG chr2 60519276 60519295 60519292 +
gattctataacctccatatt

SEQ ID NO: 166140 - DNA, 20 bp, Artificial Sequence
  Synthetic oligonucleotide; GAG chr2 60519278 60519297 60519294 +
ttctataacctccatattga

SEQ ID NO: 166141 - DNA, 20 bp, Artificial Sequence
  Synthetic oligonucleotide; CAG chr2 60519291 60519310 60519307 +
atattgagagacataaaaca

SEQ ID NO: 166142 - DNA, 20 bp, Artificial Sequence
  Synthetic oligonucleotide; CAG chr2 60519308 60519327 60519324 +
acacagaacattacacctgt

SEQ ID NO: 166143 - DNA, 20 bp, Artificial Sequence
  Synthetic oligonucleotide; AGG chr2 60519309 60519328 60519325 +
cacagaacattacacctgtc

SEQ ID NO: 166144 - DNA, 20 bp, Artificial Sequence
  Synthetic oligonucleotide; TGG chr2 60519315 60519334 60519331 +
acattacacctgtcaggtgc

SEQ ID NO: 166145 - DNA, 20 bp, Artificial Sequence
  Synthetic oligonucleotide; GGG chr2 60519316 60519335 60519332 +
cattacacctgtcaggtgct

SEQ ID NO: 166146 - DNA, 20 bp, Artificial Sequence
  Synthetic oligonucleotide; CAG chr2 60519333 60519352 60519349 +
gctgggccctgaactatctc

SEQ ID NO: 166147 - DNA, 20 bp, Artificial Sequence
  Synthetic oligonucleotide; AGG chr2 60519334 60519353 60519350 +
ctgggccctgaactatctcc

SEQ ID NO: 166148 - DNA, 20 bp, Artificial Sequence
  Synthetic oligonucleotide; CAG chr2 60519337 60519356 60519353 +
ggccctgaactatctccagg

SEQ ID NO: 166149 - DNA, 20 bp, Artificial Sequence
  Synthetic oligonucleotide; AAG chr2 60519344 60519363 60519360 +
aactatctccaggcagctga

SEQ ID NO: 166150 - DNA, 20 bp, Artificial Sequence
  Synthetic oligonucleotide; CAG chr2 60519348 60519367 60519364 +
atctccaggcagctgaaagt

SEQ ID NO: 166151 - DNA, 20 bp, Artificial Sequence
  Synthetic oligonucleotide; CAG chr2 60519356 60519375 60519372 +
gcagctgaaagtcagtacat

SEQ ID NO: 166152 - DNA, 20 bp, Artificial Sequence
  Synthetic oligonucleotide; AAG chr2 60519375 60519394 60519391 +
tcagctttttaatgatgtga

SEQ ID NO: 166153 - DNA, 20 bp, Artificial Sequence
  Synthetic oligonucleotide; AAG chr2 60519381 60519400 60519397 +
ttttaatgatgtgaaagtta

SEQ ID NO: 166154 - DNA, 20 bp, Artificial Sequence
  Synthetic oligonucleotide; TGG chr2 60519397 60519416 60519413 +
gttaaagattaaaaacatgt

SEQ ID NO: 166155 - DNA, 20 bp, Artificial Sequence
  Synthetic oligonucleotide; CAG chr2 60519415 60519434 60519431 +
gttggaacgcttactttatg

SEQ ID NO: 166156 - DNA, 20 bp, Artificial Sequence
  Synthetic oligonucleotide; AAG chr2 60519443 60519462 60519459 +
aaaatgtgtctataacctgt

SEQ ID NO: 166157 - DNA, 20 bp, Artificial Sequence
  Synthetic oligonucleotide; AGG chr2 60519444 60519463 60519460 +
aaatgtgtctataacctgta

SEQ ID NO: 166158 - DNA, 20 bp, Artificial Sequence
  Synthetic oligonucleotide; GAG chr2 60519446 60519465 60519462 +
atgtgtctataacctgtaag

SEQ ID NO: 166159 - DNA, 20 bp, Artificial Sequence
  Synthetic oligonucleotide; GAG chr2 60519448 60519467 60519464 +
gtgtctataacctgtaagga

SEQ ID NO: 166160 - DNA, 20 bp, Artificial Sequence
  Synthetic oligonucleotide; TGG chr2 60519452 60519471 60519468 +
ctataacctgtaaggagaga

SEQ ID NO: 166161 - DNA, 20 bp, Artificial Sequence
  Synthetic oligonucleotide; GGG chr2 60519453 60519472 60519469 +
tataacctgtaaggagagat

SEQ ID NO: 166162 - DNA, 20 bp, Artificial Sequence
  Synthetic oligonucleotide; TGG chr2 60519458 60519477 60519474 +
cctgtaaggagagatgggtg

SEQ ID NO: 166163 - DNA, 20 bp, Artificial Sequence
  Synthetic oligonucleotide; TAG chr2 60519468 60519487 60519484 +
gagatgggtgtggaacatcg

SEQ ID NO: 166164 - DNA, 20 bp, Artificial Sequence
  Synthetic oligonucleotide; AGG chr2 60519469 60519488 60519485 +
agatgggtgtggaacatcgt

SEQ ID NO: 166165 - DNA, 20 bp, Artificial Sequence
  Synthetic oligonucleotide; AAG chr2 60519475 60519494 60519491 +
gtgtggaacatcgtaggaaa

SEQ ID NO: 166166 - DNA, 20 bp, Artificial Sequence
  Synthetic oligonucleotide; AGG chr2 60519476 60519495 60519492 +
tgtggaacatcgtaggaaaa

SEQ ID NO: 166167 - DNA, 20 bp, Artificial Sequence
  Synthetic oligonucleotide; CAG chr2 60519496 60519515 60519512 +
aggtgactgcactcatgctg

SEQ ID NO: 166168 - DNA, 20 bp, Artificial Sequence
  Synthetic oligonucleotide; GAG chr2 60519498 60519517 60519514 +
gtgactgcactcatgctgca

SEQ ID NO: 166169 - DNA, 20 bp, Artificial Sequence
  Synthetic oligonucleotide; AAG chr2 60519508 60519527 60519524 +
tcatgctgcagagaaaaaat

SEQ ID NO: 166170 - DNA, 20 bp, Artificial Sequence
  Synthetic oligonucleotide; AGG chr2 60519509 60519528 60519525 +
catgctgcagagaaaaaata

SEQ ID NO: 166171 - DNA, 20 bp, Artificial Sequence
  Synthetic oligonucleotide; AAG chr2 60519576 60519595 60519592 +
tgcctgccttctttccttac

SEQ ID NO: 166172 - DNA, 20 bp, Artificial Sequence
  Synthetic oligonucleotide; GAG chr2 60519578 60519597 60519594 +
cctgccttctttccttacaa

SEQ ID NO: 166173 - DNA, 20 bp, Artificial Sequence
  Synthetic oligonucleotide; CAG chr2 60519613 60519632 60519629 +
aaatctgacgtgctttgcaa

SEQ ID NO: 166174 - DNA, 20 bp, Artificial Sequence
  Synthetic oligonucleotide; CAG chr2 60519616 60519635 60519632 +
tctgacgtgctttgcaacag

SEQ ID NO: 166175 - DNA, 20 bp, Artificial Sequence
  Synthetic oligonucleotide; AAG chr2 60519620 60519639 60519636 +
acgtgctttgcaacagcagt

SEQ ID NO: 166176 - DNA, 20 bp, Artificial Sequence
  Synthetic oligonucleotide; TGG chr2 60519631 60519650 60519647 +
aacagcagtaagttgaccac

SEQ ID NO: 166177 - DNA, 20 bp, Artificial Sequence
  Synthetic oligonucleotide; GAG chr2 60519633 60519652 60519649 +
cagcagtaagttgaccactg

SEQ ID NO: 166178 - DNA, 20 bp, Artificial Sequence
  Synthetic oligonucleotide; AAG chr2 60519637 60519656 60519653 +
agtaagttgaccactggaga

SEQ ID NO: 166179 - DNA, 20 bp, Artificial Sequence
  Synthetic oligonucleotide; GAG chr2 60519641 60519660 60519657 +
agttgaccactggagaaagt

SEQ ID NO: 166180 - DNA, 20 bp, Artificial Sequence
  Synthetic oligonucleotide; AGG chr2 60519642 60519661 60519658 +
gttgaccactggagaaagtg

SEQ ID NO: 166181 - DNA, 20 bp, Artificial Sequence
  Synthetic oligonucleotide; TGG chr2 60519646 60519665 60519662 +
accactggagaaagtgaggc

SEQ ID NO: 166182 - DNA, 20 bp, Artificial Sequence
  Synthetic oligonucleotide; TGG chr2 60519655 60519674 60519671 +
gaaagtgaggctggaaccac

SEQ ID NO: 166183 - DNA, 20 bp, Artificial Sequence
  Synthetic oligonucleotide; TAG chr2 60519665 60519684 60519681 +
ctggaaccactggaatcttg

SEQ ID NO: 166184 - DNA, 20 bp, Artificial Sequence
  Synthetic oligonucleotide; GAG chr2 60519674 60519693 60519690 +
ctggaatcttgtagatttct

SEQ ID NO: 166185 - DNA, 20 bp, Artificial Sequence
  Synthetic oligonucleotide; AGG chr2 60519675 60519694 60519691 +
tggaatcttgtagatttctg

SEQ ID NO: 166186 - DNA, 20 bp, Artificial Sequence
  Synthetic oligonucleotide; CAG chr2 60519679 60519698 60519695 +
atcttgtagatttctgaggc

SEQ ID NO: 166187 - DNA, 20 bp, Artificial Sequence
  Synthetic oligonucleotide; CAG chr2 60519699 60519718 60519715 +
cagttctgttctgacacatg

SEQ ID NO: 166188 - DNA, 20 bp, Artificial Sequence
  Synthetic oligonucleotide; TGG chr2 60519703 60519722 60519719 +
tctgttctgacacatgcagc

SEQ ID NO: 166189 - DNA, 20 bp, Artificial Sequence
  Synthetic oligonucleotide; GGG chr2 60519704 60519723 60519720 +
ctgttctgacacatgcagct

SEQ ID NO: 166190 - DNA, 20 bp, Artificial Sequence
  Synthetic oligonucleotide; GAG chr2 60519706 60519725 60519722 +
gttctgacacatgcagctgg

SEQ ID NO: 166191 - DNA, 20 bp, Artificial Sequence
  Synthetic oligonucleotide; TGG chr2 60519713 60519732 60519729 +
cacatgcagctgggagccac

SEQ ID NO: 166192 - DNA, 20 bp, Artificial Sequence
  Synthetic oligonucleotide; TAG chr2 60519718 60519737 60519734 +
gcagctgggagccactggtt

SEQ ID NO: 166193 - DNA, 20 bp, Artificial Sequence
  Synthetic oligonucleotide; AGG chr2 60519719 60519738 60519735 +
cagctgggagccactggttt

SEQ ID NO: 166194 - DNA, 20 bp, Artificial Sequence
  Synthetic oligonucleotide; TGG chr2 60519730 60519749 60519746 +
cactggtttaggaattcacg

SEQ ID NO: 166195 - DNA, 20 bp, Artificial Sequence
  Synthetic oligonucleotide; GGG chr2 60519731 60519750 60519747 +
actggtttaggaattcacgt

SEQ ID NO: 166196 - DNA, 20 bp, Artificial Sequence
  Synthetic oligonucleotide; TGG chr2 60519736 60519755 60519752 +
tttaggaattcacgtgggca

SEQ ID NO: 166197 - DNA, 20 bp, Artificial Sequence
  Synthetic oligonucleotide; GGG chr2 60519737 60519756 60519753 +
ttaggaattcacgtgggcat

SEQ ID NO: 166198 - DNA, 20 bp, Artificial Sequence
  Synthetic oligonucleotide; CAG chr2 60519752 60519771 60519768 +
ggcatgggactgtgcttatt

SEQ ID NO: 166199 - DNA, 20 bp, Artificial Sequence
  Synthetic oligonucleotide; AAG chr2 60519756 60519775 60519772 +
tgggactgtgcttattcaga

SEQ ID NO: 166200 - DNA, 20 bp, Artificial Sequence
  Synthetic oligonucleotide; AGG chr2 60519757 60519776 60519773 +
gggactgtgcttattcagaa

SEQ ID NO: 166201 - DNA, 20 bp, Artificial Sequence
  Synthetic oligonucleotide; GGG chr2 60519758 60519777 60519774 +
ggactgtgcttattcagaaa

SEQ ID NO: 166202 - DNA, 20 bp, Artificial Sequence
  Synthetic oligonucleotide; CAG chr2 60519765 60519784 60519781 +
gcttattcagaaagggctcc

SEQ ID NO: 166203 - DNA, 20 bp, Artificial Sequence
  Synthetic oligonucleotide; AAG chr2 60519804 60519823 60519820 +
cctaaattactccaatgaca

SEQ ID NO: 166204 - DNA, 20 bp, Artificial Sequence
  Synthetic oligonucleotide; CAG chr2 60519813 60519832 60519829 +
ctccaatgacaaagaaaact

SEQ ID NO: 166205 - DNA, 20 bp, Artificial Sequence
  Synthetic oligonucleotide; AAG chr2 60519818 60519837 60519834 +
atgacaaagaaaactcagtg

SEQ ID NO: 166206 - DNA, 20 bp, Artificial Sequence
  Synthetic oligonucleotide; AAG chr2 60519824 60519843 60519840 +
aagaaaactcagtgaagaca

SEQ ID NO: 166207 - DNA, 20 bp, Artificial Sequence
  Synthetic oligonucleotide; GAG chr2 60519826 60519845 60519842 +
gaaaactcagtgaagacaaa

SEQ ID NO: 166208 - DNA, 20 bp, Artificial Sequence
  Synthetic oligonucleotide; TAG chr2 60519839 60519858 60519855 +
agacaaagagatcgttttca

SEQ ID NO: 166209 - DNA, 20 bp, Artificial Sequence
  Synthetic oligonucleotide; AGG chr2 60519840 60519859 60519856 +
gacaaagagatcgttttcat

SEQ ID NO: 166210 - DNA, 20 bp, Artificial Sequence
  Synthetic oligonucleotide; CAG chr2 60519868 60519887 60519884 +
tcatttgccaatccataact

SEQ ID NO: 166211 - DNA, 20 bp, Artificial Sequence
  Synthetic oligonucleotide; AGG chr2 60519869 60519888 60519885 +
catttgccaatccataactc

SEQ ID NO: 166212 - DNA, 20 bp, Artificial Sequence
  Synthetic oligonucleotide; TGG chr2 60519878 60519897 60519894 +
atccataactcaggaattca

SEQ ID NO: 166213 - DNA, 20 bp, Artificial Sequence
  Synthetic oligonucleotide; TGG chr2 60519888 60519907 60519904 +
caggaattcatggctatgct

SEQ ID NO: 166214 - DNA, 20 bp, Artificial Sequence
  Synthetic oligonucleotide; TAG chr2 60519902 60519921 60519918 +
tatgcttggataattctctc

SEQ ID NO: 166215 - DNA, 20 bp, Artificial Sequence
  Synthetic oligonucleotide; TGG chr2 60519908 60519927 60519924 +
tggataattctctctagact

SEQ ID NO: 166216 - DNA, 20 bp, Artificial Sequence
  Synthetic oligonucleotide; GAG chr2 60519910 60519929 60519926 +
gataattctctctagacttg

SEQ ID NO: 166217 - DNA, 20 bp, Artificial Sequence
  Synthetic oligonucleotide; AAG chr2 60519919 60519938 60519935 +
ctctagacttggagtgttaa

SEQ ID NO: 166218 - DNA, 20 bp, Artificial Sequence
  Synthetic oligonucleotide; TAG chr2 60519930 60519949 60519946 +
gagtgttaaaagtttgcacc

SEQ ID NO: 166219 - DNA, 20 bp, Artificial Sequence
  Synthetic oligonucleotide; TGG chr2 60519950 60519969 60519966 +
tagttattctcccctctctc

SEQ ID NO: 166220 - DNA, 20 bp, Artificial Sequence
  Synthetic oligonucleotide; CAG chr2 60519953 60519972 60519969 +
ttattctcccctctctctgg

SEQ ID NO: 166221 - DNA, 20 bp, Artificial Sequence
  Synthetic oligonucleotide; AGG chr2 60519954 60519973 60519970 +
tattctcccctctctctggc

SEQ ID NO: 166222 - DNA, 20 bp, Artificial Sequence
  Synthetic oligonucleotide; GAG chr2 60519956 60519975 60519972 +
ttctcccctctctctggcag

SEQ ID NO: 166223 - DNA, 20 bp, Artificial Sequence
  Synthetic oligonucleotide; TGG chr2 60519970 60519989 60519986 +
tggcaggagaatcatgtcac

SEQ ID NO: 166224 - DNA, 20 bp, Artificial Sequence
  Synthetic oligonucleotide; AAG chr2 60519974 60519993 60519990 +
aggagaatcatgtcactggc

SEQ ID NO: 166225 - DNA, 20 bp, Artificial Sequence
  Synthetic oligonucleotide; CGG chr2 60520004 60520023 60520020 +
tgtatcctcttcaaataatt

SEQ ID NO: 166226 - DNA, 20 bp, Artificial Sequence
  Synthetic oligonucleotide; TAG chr2 60520058 60520077 60520074 +
gcacaaatgtgtgtatgata

SEQ ID NO: 166227 - DNA, 20 bp, Artificial Sequence
  Synthetic oligonucleotide; TGG chr2 60520066 60520085 60520082 +
gtgtgtatgatatagtatta

SEQ ID NO: 166228 - DNA, 20 bp, Artificial Sequence
  Synthetic oligonucleotide; CAG chr2 60520095 60520114 60520111 +
tttctgaaaattgaaaaatt

SEQ ID NO: 166229 - DNA, 20 bp, Artificial Sequence
  Synthetic oligonucleotide; AAG chr2 60520099 60520118 60520115 +
tgaaaattgaaaaattcaga

SEQ ID NO: 166230 - DNA, 20 bp, Artificial Sequence
  Synthetic oligonucleotide; AAG chr2 60520105 60520124 60520121 +
ttgaaaaattcagaaagcca

SEQ ID NO: 166231 - DNA, 20 bp, Artificial Sequence
  Synthetic oligonucleotide; TAG chr2 60520112 60520131 60520128 +
attcagaaagccaaagataa

SEQ ID NO: 166232 - DNA, 20 bp, Artificial Sequence
  Synthetic oligonucleotide; TGG chr2 60520128 60520147 60520144 +
ataatagaatataccttgcg

SEQ ID NO: 166233 - DNA, 20 bp, Artificial Sequence
  Synthetic oligonucleotide; AAG chr2 60520132 60520151 60520148 +
tagaatataccttgcgtggc

SEQ ID NO: 166234 - DNA, 20 bp, Artificial Sequence
  Synthetic oligonucleotide; AGG chr2 60520133 60520152 60520149 +
agaatataccttgcgtggca

SEQ ID NO: 166235 - DNA, 20 bp, Artificial Sequence
  Synthetic oligonucleotide; TAG chr2 60520145 60520164 60520161 +
gcgtggcaaggtatattgat

SEQ ID NO: 166236 - DNA, 20 bp, Artificial Sequence
  Synthetic oligonucleotide; AGG chr2 60520146 60520165 60520162 +
cgtggcaaggtatattgatt

SEQ ID NO: 166237 - DNA, 20 bp, Artificial Sequence
  Synthetic oligonucleotide; TAG chr2 60520149 60520168 60520165 +
ggcaaggtatattgattagg

SEQ ID NO: 166238 - DNA, 20 bp, Artificial Sequence
  Synthetic oligonucleotide; AGG chr2 60520150 60520169 60520166 +
gcaaggtatattgattaggt

SEQ ID NO: 166239 - DNA, 20 bp, Artificial Sequence
  Synthetic oligonucleotide; CAG chr2 60520182 60520201 60520198 +
taattgcaaaattatttatg

SEQ ID NO: 166240 - DNA, 20 bp, Artificial Sequence
  Synthetic oligonucleotide; AGG chr2 60520183 60520202 60520199 +
aattgcaaaattatttatgc

SEQ ID NO: 166241 - DNA, 20 bp, Artificial Sequence
  Synthetic oligonucleotide; GAG chr2 60520185 60520204 60520201 +
ttgcaaaattatttatgcag

SEQ ID NO: 166242 - DNA, 20 bp, Artificial Sequence
  Synthetic oligonucleotide; AAG chr2 60520206 60520225 60520222 +
agtattaaaattttcctcaa

SEQ ID NO: 166243 - DNA, 20 bp, Artificial Sequence
  Synthetic oligonucleotide; CAG chr2 60520213 60520232 60520229 +
aaattttcctcaaaagttcc

SEQ ID NO: 166244 - DNA, 20 bp, Artificial Sequence
  Synthetic oligonucleotide; AGG chr2 60520214 60520233 60520230 +
aattttcctcaaaagttccc

SEQ ID NO: 166245 - DNA, 20 bp, Artificial Sequence
  Synthetic oligonucleotide; TGG chr2 60520221 60520240 60520237 +
ctcaaaagttcccaggcaaa

SEQ ID NO: 166246 - DNA, 20 bp, Artificial Sequence
  Synthetic oligonucleotide; GGG chr2 60520222 60520241 60520238 +
tcaaaagttcccaggcaaat

SEQ ID NO: 166247 - DNA, 20 bp, Artificial Sequence
  Synthetic oligonucleotide; CAG chr2 60520263 60520282 60520279 +
ccttacaataaactcttctg

SEQ ID NO: 166248 - DNA, 20 bp, Artificial Sequence
  Synthetic oligonucleotide; AGG chr2 60520264 60520283 60520280 +
cttacaataaactcttctgc

SEQ ID NO: 166249 - DNA, 20 bp, Artificial Sequence
  Synthetic oligonucleotide; GAG chr2 60520280 60520299 60520296 +
ctgcaggttttgtttatttt

SEQ ID NO: 166250 - DNA, 20 bp, Artificial Sequence
  Synthetic oligonucleotide; AGG chr2 60520281 60520300 60520297 +
tgcaggttttgtttattttg

SEQ ID NO: 166251 - DNA, 20 bp, Artificial Sequence
  Synthetic oligonucleotide; AAG chr2 60520305 60520324 60520321 +
aacatttcactttttttttc

SEQ ID NO: 166252 - DNA, 20 bp, Artificial Sequence
  Synthetic oligonucleotide; GAG chr2 60520312 60520331 60520328 +
cactttttttttcaagacat

SEQ ID NO: 166253 - DNA, 20 bp, Artificial Sequence
  Synthetic oligonucleotide; AGG chr2 60520313 60520332 60520329 +
actttttttttcaagacatg

SEQ ID NO: 166254 - DNA, 20 bp, Artificial Sequence
  Synthetic oligonucleotide; CAG chr2 60520332 60520351 60520348 +
gaggtgtgaatgatgcaaaa

SEQ ID NO: 166255 - DNA, 20 bp, Artificial Sequence
  Synthetic oligonucleotide; TGG chr2 60520339 60520358 60520355 +
gaatgatgcaaaacagtatt

SEQ ID NO: 166256 - DNA, 20 bp, Artificial Sequence
  Synthetic oligonucleotide; CAG chr2 60520380 60520399 60520396 +
ttgcataatgcattactaat

SEQ ID NO: 166257 - DNA, 20 bp, Artificial Sequence
  Synthetic oligonucleotide; GAG chr2 60520384 60520403 60520400 +
ataatgcattactaatcagt

SEQ ID NO: 166258 - DNA, 20 bp, Artificial Sequence
  Synthetic oligonucleotide; TGG chr2 60520396 60520415 60520412 +
taatcagtgagtataaattc

SEQ ID NO: 166259 - DNA, 20 bp, Artificial Sequence
  Synthetic oligonucleotide; GAG chr2 60520398 60520417 60520414 +
atcagtgagtataaattctg

SEQ ID NO: 166260 - DNA, 20 bp, Artificial Sequence
  Synthetic oligonucleotide; GAG chr2 60520404 60520423 60520420 +
gagtataaattctggagtct

SEQ ID NO: 166261 - DNA, 20 bp, Artificial Sequence
  Synthetic oligonucleotide; AGG chr2 60520405 60520424 60520421 +
agtataaattctggagtctg

SEQ ID NO: 166262 - DNA, 20 bp, Artificial Sequence
  Synthetic oligonucleotide; AAG chr2 60520418 60520437 60520434 +
gagtctgaggacctgaaatc

SEQ ID NO: 166263 - DNA, 20 bp, Artificial Sequence
  Synthetic oligonucleotide; TAG chr2 60520443 60520462 60520459 +
ccaccaaattttttaaaatc

SEQ ID NO: 166264 - DNA, 20 bp, Artificial Sequence
  Synthetic oligonucleotide; AAG chr2 60520453 60520472 60520469 +
ttttaaaatctagattataa

SEQ ID NO: 166265 - DNA, 20 bp, Artificial Sequence
  Synthetic oligonucleotide; AAG chr2 60520458 60520477 60520474 +
aaatctagattataaaagta

SEQ ID NO: 166266 - DNA, 20 bp, Artificial Sequence
  Synthetic oligonucleotide; GAG chr2 60520460 60520479 60520476 +
atctagattataaaagtaaa

SEQ ID NO: 166267 - DNA, 20 bp, Artificial Sequence
  Synthetic oligonucleotide; CGG chr2 60520473 60520492 60520489 +
aagtaaagagcatcaccctt

SEQ ID NO: 166268 - DNA, 20 bp, Artificial Sequence
  Synthetic oligonucleotide; TGG chr2 60520476 60520495 60520492 +
taaagagcatcacccttcgg

SEQ ID NO: 166269 - DNA, 20 bp, Artificial Sequence
  Synthetic oligonucleotide; GGG chr2 60520477 60520496 60520493 +
aaagagcatcacccttcggt

SEQ ID NO: 166270 - DNA, 20 bp, Artificial Sequence
  Synthetic oligonucleotide; AAG chr2 60520520 60520539 60520536 +
cacattcgcattccgtttat

SEQ ID NO: 166271 - DNA, 20 bp, Artificial Sequence
  Synthetic oligonucleotide; AAG chr2 60520523 60520542 60520539 +
attcgcattccgtttataag

SEQ ID NO: 166272 - DNA, 20 bp, Artificial Sequence
  Synthetic oligonucleotide; AGG chr2 60520524 60520543 60520540 +
ttcgcattccgtttataaga

SEQ ID NO: 166273 - DNA, 20 bp, Artificial Sequence
  Synthetic oligonucleotide; GAG chr2 60520526 60520545 60520542 +
cgcattccgtttataagaag

SEQ ID NO: 166274 - DNA, 20 bp, Artificial Sequence
  Synthetic oligonucleotide; CAG chr2 60520541 60520560 60520557 +
agaaggagaaattatcctca

SEQ ID NO: 166275 - DNA, 20 bp, Artificial Sequence
  Synthetic oligonucleotide; GAG chr2 60520543 60520562 60520559 +
aaggagaaattatcctcaca

SEQ ID NO: 166276 - DNA, 20 bp, Artificial Sequence
  Synthetic oligonucleotide; GAG chr2 60520552 60520571 60520568 +
ttatcctcacagagttttct

SEQ ID NO: 166277 - DNA, 20 bp, Artificial Sequence
  Synthetic oligonucleotide; AGG chr2 60520553 60520572 60520569 +
tatcctcacagagttttctg

SEQ ID NO: 166278 - DNA, 20 bp, Artificial Sequence
  Synthetic oligonucleotide; AAG chr2 60520566 60520585 60520582 +
ttttctgaggaaaattaaat

SEQ ID NO: 166279 - DNA, 20 bp, Artificial Sequence
  Synthetic oligonucleotide; TGG chr2 60520569 60520588 60520585 +
tctgaggaaaattaaataag

SEQ ID NO: 166280 - DNA, 20 bp, Artificial Sequence
  Synthetic oligonucleotide; GAG chr2 60520610 60520629 60520626 +
ttgctctgactcaacactat

SEQ ID NO: 166281 - DNA, 20 bp, Artificial Sequence
  Synthetic oligonucleotide; AGG chr2 60520611 60520630 60520627 +
tgctctgactcaacactatg

SEQ ID NO: 166282 - DNA, 20 bp, Artificial Sequence
  Synthetic oligonucleotide; AAG chr2 60520617 60520636 60520633 +
gactcaacactatgaggcat

SEQ ID NO: 166283 - DNA, 20 bp, Artificial Sequence
  Synthetic oligonucleotide; AGG chr2 60520618 60520637 60520634 +
actcaacactatgaggcata

SEQ ID NO: 166284 - DNA, 20 bp, Artificial Sequence
  Synthetic oligonucleotide; TAG chr2 60520632 60520651 60520648 +
ggcataaggtcctaaattca

SEQ ID NO: 166285 - DNA, 20 bp, Artificial Sequence
  Synthetic oligonucleotide; AGG chr2 60520633 60520652 60520649 +
gcataaggtcctaaattcat

SEQ ID NO: 166286 - DNA, 20 bp, Artificial Sequence
  Synthetic oligonucleotide; CAG chr2 60520644 60520663 60520660 +
taaattcataggcacaacca

SEQ ID NO: 166287 - DNA, 20 bp, Artificial Sequence
  Synthetic oligonucleotide; AAG chr2 60520647 60520666 60520663 +
attcataggcacaaccacag

SEQ ID NO: 166288 - DNA, 20 bp, Artificial Sequence
  Synthetic oligonucleotide; AAG chr2 60520654 60520673 60520670 +
ggcacaaccacagaagcacc

SEQ ID NO: 166289 - DNA, 20 bp, Artificial Sequence
  Synthetic oligonucleotide; AGG chr2 60520655 60520674 60520671 +
gcacaaccacagaagcacca

SEQ ID NO: 166290 - DNA, 20 bp, Artificial Sequence
  Synthetic oligonucleotide; GAG chr2 60520657 60520676 60520673 +
acaaccacagaagcaccaag

SEQ ID NO: 166291 - DNA, 20 bp, Artificial Sequence
  Synthetic oligonucleotide; GAG chr2 60520659 60520678 60520675 +
aaccacagaagcaccaagga

SEQ ID NO: 166292 - DNA, 20 bp, Artificial Sequence
  Synthetic oligonucleotide; AAG chr2 60520664 60520683 60520680 +
cagaagcaccaaggagagtg

SEQ ID NO: 166293 - DNA, 20 bp, Artificial Sequence
  Synthetic oligonucleotide; AAG chr2 60520681 60520700 60520697 +
gtgaagatatttgcatcaaa

SEQ ID NO: 166294 - DNA, 20 bp, Artificial Sequence
  Synthetic oligonucleotide; GAG chr2 60520683 60520702 60520699 +
gaagatatttgcatcaaaaa

SEQ ID NO: 166295 - DNA, 20 bp, Artificial Sequence
  Synthetic oligonucleotide; CAG chr2 60520686 60520705 60520702 +
gatatttgcatcaaaaagag

SEQ ID NO: 166296 - DNA, 20 bp, Artificial Sequence
  Synthetic oligonucleotide; CAG chr2 60520690 60520709 60520706 +
tttgcatcaaaaagagcaga

SEQ ID NO: 166297 - DNA, 20 bp, Artificial Sequence
  Synthetic oligonucleotide; TGG chr2 60520714 60520733 60520730 +
cccccacccccaccccatgt

SEQ ID NO: 166298 - DNA, 20 bp, Artificial Sequence
  Synthetic oligonucleotide; CGG chr2 60520724 60520743 60520740 +
caccccatgttggtcgccta

SEQ ID NO: 166299 - DNA, 20 bp, Artificial Sequence
  Synthetic oligonucleotide; CAG chr2 60520733 60520752 60520749 +
ttggtcgcctacggaatcta

SEQ ID NO: 166300 - DNA, 20 bp, Artificial Sequence
  Synthetic oligonucleotide; AGG chr2 60520734 60520753 60520750 +
tggtcgcctacggaatctac

SEQ ID NO: 166301 - DNA, 20 bp, Artificial Sequence
  Synthetic oligonucleotide; AAG chr2 60520743 60520762 60520759 +
acggaatctacaggaatctg

SEQ ID NO: 166302 - DNA, 20 bp, Artificial Sequence
  Synthetic oligonucleotide; AGG chr2 60520744 60520763 60520760 +
cggaatctacaggaatctga

SEQ ID NO: 166303 - DNA, 20 bp, Artificial Sequence
  Synthetic oligonucleotide; GGG chr2 60520745 60520764 60520761 +
ggaatctacaggaatctgaa

SEQ ID NO: 166304 - DNA, 20 bp, Artificial Sequence
  Synthetic oligonucleotide; GGG chr2 60520746 60520765 60520762 +
gaatctacaggaatctgaag

SEQ ID NO: 166305 - DNA, 20 bp, Artificial Sequence
  Synthetic oligonucleotide; CAG chr2 60520749 60520768 60520765 +
tctacaggaatctgaagggg

SEQ ID NO: 166306 - DNA, 20 bp, Artificial Sequence
  Synthetic oligonucleotide; CAG chr2 60520753 60520772 60520769 +
caggaatctgaaggggcagc

SEQ ID NO: 166307 - DNA, 20 bp, Artificial Sequence
  Synthetic oligonucleotide; CAG chr2 60520778 60520797 60520794 +
attctgcctataccacccat

SEQ ID NO: 166308 - DNA, 20 bp, Artificial Sequence
  Synthetic oligonucleotide; CAG chr2 60520783 60520802 60520799 +
gcctataccacccatcagat

SEQ ID NO: 166309 - DNA, 20 bp, Artificial Sequence
  Synthetic oligonucleotide; CAG chr2 60520822 60520841 60520838 +
aaaccacccatgcccttctc

SEQ ID NO: 166310 - DNA, 20 bp, Artificial Sequence
  Synthetic oligonucleotide; TGG chr2 60520825 60520844 60520841 +
ccacccatgcccttctccag

SEQ ID NO: 166311 - DNA, 20 bp, Artificial Sequence
  Synthetic oligonucleotide; GGG chr2 60520826 60520845 60520842 +
cacccatgcccttctccagt

SEQ ID NO: 166312 - DNA, 20 bp, Artificial Sequence
  Synthetic oligonucleotide; CGG chr2 60520836 60520855 60520852 +
cttctccagtgggttcccac

SEQ ID NO: 166313 - DNA, 20 bp, Artificial Sequence
  Synthetic oligonucleotide; AAG chr2 60520850 60520869 60520866 +
tcccaccggtgttttcgtgc

SEQ ID NO: 166314 - DNA, 20 bp, Artificial Sequence
  Synthetic oligonucleotide; TAG chr2 60520855 60520874 60520871 +
ccggtgttttcgtgcaagct

SEQ ID NO: 166315 - DNA, 20 bp, Artificial Sequence
  Synthetic oligonucleotide; CAG chr2 60520869 60520888 60520885 +
caagcttagccccttctttg

SEQ ID NO: 166316 - DNA, 20 bp, Artificial Sequence
  Synthetic oligonucleotide; AAG chr2 60520877 60520896 60520893 +
gccccttctttgcagaaaaa

SEQ ID NO: 166317 - DNA, 20 bp, Artificial Sequence
  Synthetic oligonucleotide; CAG chr2 60520895 60520914 60520911 +
aaaagatattgatgtgccaa

SEQ ID NO: 166318 - DNA, 20 bp, Artificial Sequence
  Synthetic oligonucleotide; TAG chr2 60520898 60520917 60520914 +
agatattgatgtgccaacag

SEQ ID NO: 166319 - DNA, 20 bp, Artificial Sequence
  Synthetic oligonucleotide; AAG chr2 60520902 60520921 60520918 +
attgatgtgccaacagtaga

SEQ ID NO: 166320 - DNA, 20 bp, Artificial Sequence
  Synthetic oligonucleotide; AAG chr2 60520905 60520924 60520921 +
gatgtgccaacagtagaaag

SEQ ID NO: 166321 - DNA, 20 bp, Artificial Sequence
  Synthetic oligonucleotide; CAG chr2 60520920 60520939 60520936 +
gaaagaagaaaaaattattc

SEQ ID NO: 166322 - DNA, 20 bp, Artificial Sequence
  Synthetic oligonucleotide; CAG chr2 60520947 60520966 60520963 +
gtacacaacctttgtcaacc

SEQ ID NO: 166323 - DNA, 20 bp, Artificial Sequence
  Synthetic oligonucleotide; AAG chr2 60520962 60520981 60520978 +
caacccagcatgataaaacc

SEQ ID NO: 166324 - DNA, 20 bp, Artificial Sequence
  Synthetic oligonucleotide; TGG chr2 60520967 60520986 60520983 +
cagcatgataaaaccaagtc

SEQ ID NO: 166325 - DNA, 20 bp, Artificial Sequence
  Synthetic oligonucleotide; GGG chr2 60520968 60520987 60520984 +
agcatgataaaaccaagtct

SEQ ID NO: 166326 - DNA, 20 bp, Artificial Sequence
  Synthetic oligonucleotide; TGG chr2 60520994 60521013 60521010 +
ctatttgtctaaacactttt

SEQ ID NO: 166327 - DNA, 20 bp, Artificial Sequence
  Synthetic oligonucleotide; AAG chr2 60520998 60521017 60521014 +
ttgtctaaacactttttgga

SEQ ID NO: 166328 - DNA, 20 bp, Artificial Sequence
  Synthetic oligonucleotide; AGG chr2 60520999 60521018 60521015 +
tgtctaaacactttttggaa

SEQ ID NO: 166329 - DNA, 20 bp, Artificial Sequence
  Synthetic oligonucleotide; GGG chr2 60521000 60521019 60521016 +
gtctaaacactttttggaaa

SEQ ID NO: 166330 - DNA, 20 bp, Artificial Sequence
  Synthetic oligonucleotide; TGG chr2 60521009 60521028 60521025 +
ctttttggaaagggatgaaa

SEQ ID NO: 166331 - DNA, 20 bp, Artificial Sequence
  Synthetic oligonucleotide; GAG chr2 60521011 60521030 60521027 +
ttttggaaagggatgaaatg

SEQ ID NO: 166332 - DNA, 20 bp, Artificial Sequence
  Synthetic oligonucleotide; GAG chr2 60521013 60521032 60521029 +
ttggaaagggatgaaatgga

SEQ ID NO: 166333 - DNA, 20 bp, Artificial Sequence
  Synthetic oligonucleotide; AGG chr2 60521014 60521033 60521030 +
tggaaagggatgaaatggag

SEQ ID NO: 166334 - DNA, 20 bp, Artificial Sequence
  Synthetic oligonucleotide; AAG chr2 60521018 60521037 60521034 +
aagggatgaaatggagagga

SEQ ID NO: 166335 - DNA, 20 bp, Artificial Sequence
  Synthetic oligonucleotide; AGG chr2 60521019 60521038 60521035 +
agggatgaaatggagaggaa

SEQ ID NO: 166336 - DNA, 20 bp, Artificial Sequence
  Synthetic oligonucleotide; AAG chr2 60521024 60521043 60521040 +
tgaaatggagaggaaaggaa

SEQ ID NO: 166337 - DNA, 20 bp, Artificial Sequence
  Synthetic oligonucleotide; AGG chr2 60521025 60521044 60521041 +
gaaatggagaggaaaggaaa

SEQ ID NO: 166338 - DNA, 20 bp, Artificial Sequence
  Synthetic oligonucleotide; AAG chr2 60521028 60521047 60521044 +
atggagaggaaaggaaaagg

SEQ ID NO: 166339 - DNA, 20 bp, Artificial Sequence
  Synthetic oligonucleotide; TAG chr2 60521033 60521052 60521049 +
gaggaaaggaaaaggaagtg

SEQ ID NO: 166340 - DNA, 20 bp, Artificial Sequence
  Synthetic oligonucleotide; TAG chr2 60521038 60521057 60521054 +
aaggaaaaggaagtgtagcc

SEQ ID NO: 166341 - DNA, 20 bp, Artificial Sequence
  Synthetic oligonucleotide; TGG chr2 60521041 60521060 60521057 +
gaaaaggaagtgtagcctag

SEQ ID NO: 166342 - DNA, 20 bp, Artificial Sequence
  Synthetic oligonucleotide; CAG chr2 60521045 60521064 60521061 +
aggaagtgtagcctagtggt

SEQ ID NO: 166343 - DNA, 20 bp, Artificial Sequence
  Synthetic oligonucleotide; GAG chr2 60521119 60521138 60521135 +
acacactcacacaaatcctt

SEQ ID NO: 166344 - DNA, 20 bp, Artificial Sequence
  Synthetic oligonucleotide; AGG chr2 60521120 60521139 60521136 +
cacactcacacaaatccttg

SEQ ID NO: 166345 - DNA, 20 bp, Artificial Sequence
  Synthetic oligonucleotide; GGG chr2 60521121 60521140 60521137 +
acactcacacaaatccttga

SEQ ID NO: 166346 - DNA, 20 bp, Artificial Sequence
  Synthetic oligonucleotide; CAG chr2 60521127 60521146 60521143 +
acacaaatccttgagggtgc

SEQ ID NO: 166347 - DNA, 20 bp, Artificial Sequence
  Synthetic oligonucleotide; AGG chr2 60521128 60521147 60521144 +
cacaaatccttgagggtgcc

SEQ ID NO: 166348 - DNA, 20 bp, Artificial Sequence
  Synthetic oligonucleotide; CAG chr2 60521145 60521164 60521161 +
gccaggttacatttctacaa

SEQ ID NO: 166349 - DNA, 20 bp, Artificial Sequence
  Synthetic oligonucleotide; CAG chr2 60521169 60521188 60521185 +
tgccttccattgtctactgc

SEQ ID NO: 166350 - DNA, 20 bp, Artificial Sequence
  Synthetic oligonucleotide; AAG chr2 60521174 60521193 60521190 +
tccattgtctactgccagtg

SEQ ID NO: 166351 - DNA, 20 bp, Artificial Sequence
  Synthetic oligonucleotide; CAG chr2 60521183 60521202 60521199 +
tactgccagtgaagccaaac

SEQ ID NO: 166352 - DNA, 20 bp, Artificial Sequence
  Synthetic oligonucleotide; AAG chr2 60521217 60521236 60521233 +
atttaatctgctgtaaaccc

SEQ ID NO: 166353 - DNA, 20 bp, Artificial Sequence
  Synthetic oligonucleotide; CAG chr2 60521223 60521242 60521239 +
tctgctgtaaacccaagtat

SEQ ID NO: 166354 - DNA, 20 bp, Artificial Sequence
  Synthetic oligonucleotide; AGG chr2 60521224 60521243 60521240 +
ctgctgtaaacccaagtatc

SEQ ID NO: 166355 - DNA, 20 bp, Artificial Sequence
  Synthetic oligonucleotide; TAG chr2 60521231 60521250 60521247 +
aaacccaagtatcaggcact

SEQ ID NO: 166356 - DNA, 20 bp, Artificial Sequence
  Synthetic oligonucleotide; TGG chr2 60521235 60521254 60521251 +
ccaagtatcaggcacttaga

SEQ ID NO: 166357 - DNA, 20 bp, Artificial Sequence
  Synthetic oligonucleotide; CAG chr2 60521238 60521257 60521254 +
agtatcaggcacttagatgg

SEQ ID NO: 166358 - DNA, 20 bp, Artificial Sequence
  Synthetic oligonucleotide; AAG chr2 60521245 60521264 60521261 +
ggcacttagatggcagctaa

SEQ ID NO: 166359 - DNA, 20 bp, Artificial Sequence
  Synthetic oligonucleotide; CAG chr2 60521257 60521276 60521273 +
gcagctaaaagcgccactct

SEQ ID NO: 166360 - DNA, 20 bp, Artificial Sequence
  Synthetic oligonucleotide; GAG chr2 60521266 60521285 60521282 +
agcgccactctcagataact

SEQ ID NO: 166361 - DNA, 20 bp, Artificial Sequence
  Synthetic oligonucleotide; TAG chr2 60521285 60521304 60521301 +
tgagtgacacttgctaataa

SEQ ID NO: 166362 - DNA, 20 bp, Artificial Sequence
  Synthetic oligonucleotide; AAG chr2 60521298 60521317 60521314 +
ctaataatagcctctgtgtg

SEQ ID NO: 166363 - DNA, 20 bp, Artificial Sequence
  Synthetic oligonucleotide; GAG chr2 60521302 60521321 60521318 +
taatagcctctgtgtgaagc

SEQ ID NO: 166364 - DNA, 20 bp, Artificial Sequence
  Synthetic oligonucleotide; GAG chr2 60521304 60521323 60521320 +
atagcctctgtgtgaagcga

SEQ ID NO: 166365 - DNA, 20 bp, Artificial Sequence
  Synthetic oligonucleotide; GAG chr2 60521306 60521325 60521322 +
agcctctgtgtgaagcgaga

SEQ ID NO: 166366 - DNA, 20 bp, Artificial Sequence
  Synthetic oligonucleotide; GAG chr2 60521308 60521327 60521324 +
cctctgtgtgaagcgagaga

SEQ ID NO: 166367 - DNA, 20 bp, Artificial Sequence
  Synthetic oligonucleotide; CGG chr2 60521311 60521330 60521327 +
ctgtgtgaagcgagagagag

SEQ ID NO: 166368 - DNA, 20 bp, Artificial Sequence
  Synthetic oligonucleotide; CAG chr2 60521328 60521347 60521344 +
gagcggacattttgtaaaac

SEQ ID NO: 166369 - DNA, 20 bp, Artificial Sequence
  Synthetic oligonucleotide; GAG chr2 60521330 60521349 60521346 +
gcggacattttgtaaaacca

SEQ ID NO: 166370 - DNA, 20 bp, Artificial Sequence
  Synthetic oligonucleotide; AGG chr2 60521331 60521350 60521347 +
cggacattttgtaaaaccag

SEQ ID NO: 166371 - DNA, 20 bp, Artificial Sequence
  Synthetic oligonucleotide; GGG chr2 60521332 60521351 60521348 +
ggacattttgtaaaaccaga

SEQ ID NO: 166372 - DNA, 20 bp, Artificial Sequence
  Synthetic oligonucleotide; CGG chr2 60521338 60521357 60521354 +
tttgtaaaaccagagggacc

SEQ ID NO: 166373 - DNA, 20 bp, Artificial Sequence
  Synthetic oligonucleotide; GGG chr2 60521339 60521358 60521355 +
ttgtaaaaccagagggaccc

SEQ ID NO: 166374 - DNA, 20 bp, Artificial Sequence
  Synthetic oligonucleotide; TGG chr2 60521344 60521363 60521360 +
aaaccagagggacccgggcc

SEQ ID NO: 166375 - DNA, 20 bp, Artificial Sequence
  Synthetic oligonucleotide; GGG chr2 60521345 60521364 60521361 +
aaccagagggacccgggcct

SEQ ID NO: 166376 - DNA, 20 bp, Artificial Sequence
  Synthetic oligonucleotide; TGG chr2 60521350 60521369 60521366 +
gagggacccgggcctgggcc

SEQ ID NO: 166377 - DNA, 20 bp, Artificial Sequence
  Synthetic oligonucleotide; GGG chr2 60521351 60521370 60521367 +
agggacccgggcctgggcct

SEQ ID NO: 166378 - DNA, 20 bp, Artificial Sequence
  Synthetic oligonucleotide; TGG chr2 60521356 60521375 60521372 +
cccgggcctgggcctgggcc

SEQ ID NO: 166379 - DNA, 20 bp, Artificial Sequence
  Synthetic oligonucleotide; GGG chr2 60521357 60521376 60521373 +
ccgggcctgggcctgggcct

SEQ ID NO: 166380 - DNA, 20 bp, Artificial Sequence
  Synthetic oligonucleotide; TGG chr2 60521362 60521381 60521378 +
cctgggcctgggcctgggtc

SEQ ID NO: 166381 - DNA, 20 bp, Artificial Sequence
  Synthetic oligonucleotide; GGG chr2 60521363 60521382 60521379 +
ctgggcctgggcctgggtct

SEQ ID NO: 166382 - DNA, 20 bp, Artificial Sequence
  Synthetic oligonucleotide; TGG chr2 60521368 60521387 60521384 +
cctgggcctgggtctgggaa

SEQ ID NO: 166383 - DNA, 20 bp, Artificial Sequence
  Synthetic oligonucleotide; TGG chr2 60521378 60521397 60521394 +
ggtctgggaatggtgtgatg

SEQ ID NO: 166384 - DNA, 20 bp, Artificial Sequence
  Synthetic oligonucleotide; TAG chr2 60521382 60521401 60521398 +
tgggaatggtgtgatgtggt

SEQ ID NO: 166385 - DNA, 20 bp, Artificial Sequence
  Synthetic oligonucleotide; AGG chr2 60521383 60521402 60521399 +
gggaatggtgtgatgtggtt

SEQ ID NO: 166386 - DNA, 20 bp, Artificial Sequence
  Synthetic oligonucleotide; CAG chr2 60521387 60521406 60521403 +
atggtgtgatgtggttaggc

SEQ ID NO: 166387 - DNA, 20 bp, Artificial Sequence
  Synthetic oligonucleotide; CAG chr2 60521393 60521412 60521409 +
tgatgtggttaggccagtct

SEQ ID NO: 166388 - DNA, 20 bp, Artificial Sequence
  Synthetic oligonucleotide; CAG chr2 60521400 60521419 60521416 +
gttaggccagtctcagcttc

SEQ ID NO: 166389 - DNA, 20 bp, Artificial Sequence
  Synthetic oligonucleotide; AGG chr2 60521401 60521420 60521417 +
ttaggccagtctcagcttcc

SEQ ID NO: 166390 - DNA, 20 bp, Artificial Sequence
  Synthetic oligonucleotide; CAG chr2 60521404 60521423 60521420 +
ggccagtctcagcttccagg

SEQ ID NO: 166391 - DNA, 20 bp, Artificial Sequence
  Synthetic oligonucleotide; CAG chr2 60521407 60521426 60521423 +
cagtctcagcttccaggcag

SEQ ID NO: 166392 - DNA, 20 bp, Artificial Sequence
  Synthetic oligonucleotide; CGG chr2 60521413 60521432 60521429 +
cagcttccaggcagcagata

SEQ ID NO: 166393 - DNA, 20 bp, Artificial Sequence
  Synthetic oligonucleotide; CAG chr2 60521416 60521435 60521432 +
cttccaggcagcagatacgg

SEQ ID NO: 166394 - DNA, 20 bp, Artificial Sequence
  Synthetic oligonucleotide; GAG chr2 60521418 60521437 60521434 +
tccaggcagcagatacggca

SEQ ID NO: 166395 - DNA, 20 bp, Artificial Sequence
  Synthetic oligonucleotide; GAG chr2 60521423 60521442 60521439 +
gcagcagatacggcagagac

SEQ ID NO: 166396 - DNA, 20 bp, Artificial Sequence
  Synthetic oligonucleotide; AGG chr2 60521424 60521443 60521440 +
cagcagatacggcagagacg

SEQ ID NO: 166397 - DNA, 20 bp, Artificial Sequence
  Synthetic oligonucleotide; TGG chr2 60521434 60521453 60521450 +
ggcagagacgaggcccacca

SEQ ID NO: 166398 - DNA, 20 bp, Artificial Sequence
  Synthetic oligonucleotide; CGG chr2 60521448 60521467 60521464 +
ccaccatggctcccctgtga

SEQ ID NO: 166399 - DNA, 20 bp, Artificial Sequence
  Synthetic oligonucleotide; GGG chr2 60521449 60521468 60521465 +
caccatggctcccctgtgac

SEQ ID NO: 166400 - DNA, 20 bp, Artificial Sequence
  Synthetic oligonucleotide; AAG chr2 60521459 60521478 60521475 +
cccctgtgacgggctgcacg

SEQ ID NO: 166401 - DNA, 20 bp, Artificial Sequence
  Synthetic oligonucleotide; CAG chr2 60521467 60521486 60521483 +
acgggctgcacgaagcccac

SEQ ID NO: 166402 - DNA, 20 bp, Artificial Sequence
  Synthetic oligonucleotide; TAG chr2 60521475 60521494 60521491 +
cacgaagcccaccagtgacc

SEQ ID NO: 166403 - DNA, 20 bp, Artificial Sequence
  Synthetic oligonucleotide; AAG chr2 60521483 60521502 60521499 +
ccaccagtgacctagctttc

SEQ ID NO: 166404 - DNA, 20 bp, Artificial Sequence
  Synthetic oligonucleotide; CAG chr2 60521491 60521510 60521507 +
gacctagctttcaagtcaca

SEQ ID NO: 166405 - DNA, 20 bp, Artificial Sequence
  Synthetic oligonucleotide; CAG chr2 60521497 60521516 60521513 +
gctttcaagtcacacagcga

SEQ ID NO: 166406 - DNA, 20 bp, Artificial Sequence
  Synthetic oligonucleotide; TGG chr2 60521503 60521522 60521519 +
aagtcacacagcgacagtcc

SEQ ID NO: 166407 - DNA, 20 bp, Artificial Sequence
  Synthetic oligonucleotide; TAG chr2 60521517 60521536 60521533 +
cagtcctggcttttgctatc

SEQ ID NO: 166408 - DNA, 20 bp, Artificial Sequence
  Synthetic oligonucleotide; AAG chr2 60521520 60521539 60521536 +
tcctggcttttgctatctag

SEQ ID NO: 166409 - DNA, 20 bp, Artificial Sequence
  Synthetic oligonucleotide; CAG chr2 60521540 60521559 60521556 +
aagaacaaaattcccctttc

SEQ ID NO: 166410 - DNA, 20 bp, Artificial Sequence
  Synthetic oligonucleotide; CAG chr2 60521589 60521608 60521605 +
tcatcttccatcttgtgccc

SEQ ID NO: 166411 - DNA, 20 bp, Artificial Sequence
  Synthetic oligonucleotide; AAG chr2 60521602 60521621 60521618 +
tgtgccccagtcctccctta

SEQ ID NO: 166412 - DNA, 20 bp, Artificial Sequence
  Synthetic oligonucleotide; AGG chr2 60521603 60521622 60521619 +
gtgccccagtcctcccttaa

SEQ ID NO: 166413 - DNA, 20 bp, Artificial Sequence
  Synthetic oligonucleotide; GGG chr2 60521604 60521623 60521620 +
tgccccagtcctcccttaaa

SEQ ID NO: 166414 - DNA, 20 bp, Artificial Sequence
  Synthetic oligonucleotide; AAG chr2 60521607 60521626 60521623 +
cccagtcctcccttaaaggg

SEQ ID NO: 166415 - DNA, 20 bp, Artificial Sequence
  Synthetic oligonucleotide; AGG chr2 60521608 60521627 60521624 +
ccagtcctcccttaaaggga

SEQ ID NO: 166416 - DNA, 20 bp, Artificial Sequence
  Synthetic oligonucleotide; GAG chr2 60521650 60521669 60521666 +
ttctttgtccccttctttct

SEQ ID NO: 166417 - DNA, 20 bp, Artificial Sequence
  Synthetic oligonucleotide; GAG chr2 60521652 60521671 60521668 +
ctttgtccccttctttctga

SEQ ID NO: 166418 - DNA, 20 bp, Artificial Sequence
  Synthetic oligonucleotide; TGG chr2 60521657 60521676 60521673 +
tccccttctttctgagagtg

SEQ ID NO: 166419 - DNA, 20 bp, Artificial Sequence
  Synthetic oligonucleotide; CAG chr2 60521672 60521691 60521688 +
gagtgtggtcaatctcctct

SEQ ID NO: 166420 - DNA, 20 bp, Artificial Sequence
  Synthetic oligonucleotide; AGG chr2 60521673 60521692 60521689 +
agtgtggtcaatctcctctc

SEQ ID NO: 166421 - DNA, 20 bp, Artificial Sequence
  Synthetic oligonucleotide; TAG chr2 60521694 60521713 60521710 +
ggcaaatcatctttctctaa

SEQ ID NO: 166422 - DNA, 20 bp, Artificial Sequence
  Synthetic oligonucleotide; CAG chr2 60521698 60521717 60521714 +
aatcatctttctctaatagc

SEQ ID NO: 166423 - DNA, 20 bp, Artificial Sequence
  Synthetic oligonucleotide; AGG chr2 60521699 60521718 60521715 +
atcatctttctctaatagcc

SEQ ID NO: 166424 - DNA, 20 bp, Artificial Sequence
  Synthetic oligonucleotide; GGG chr2 60521700 60521719 60521716 +
tcatctttctctaatagcca

SEQ ID NO: 166425 - DNA, 20 bp, Artificial Sequence
  Synthetic oligonucleotide; TGG chr2 60521709 60521728 60521725 +
tctaatagccagggctcaaa

SEQ ID NO: 166426 - DNA, 20 bp, Artificial Sequence
  Synthetic oligonucleotide; AAG chr2 60521715 60521734 60521731 +
agccagggctcaaatggcca

SEQ ID NO: 166427 - DNA, 20 bp, Artificial Sequence
  Synthetic oligonucleotide; AAG chr2 60521719 60521738 60521735 +
agggctcaaatggccaaaga

SEQ ID NO: 166428 - DNA, 20 bp, Artificial Sequence
  Synthetic oligonucleotide; AGG chr2 60521720 60521739 60521736 +
gggctcaaatggccaaagaa

SEQ ID NO: 166429 - DNA, 20 bp, Artificial Sequence
  Synthetic oligonucleotide; AAG chr2 60521728 60521747 60521744 +
atggccaaagaaaggtccca

SEQ ID NO: 166430 - DNA, 20 bp, Artificial Sequence
  Synthetic oligonucleotide; CAG chr2 60521751 60521770 60521767 +
ccttgtcttcataacactac

SEQ ID NO: 166431 - DNA, 20 bp, Artificial Sequence
  Synthetic oligonucleotide; GAG chr2 60521760 60521779 60521776 +
cataacactaccagccacgt

SEQ ID NO: 166432 - DNA, 20 bp, Artificial Sequence
  Synthetic oligonucleotide; CAG chr2 60521770 60521789 60521786 +
ccagccacgtgagcacgtcc

SEQ ID NO: 166433 - DNA, 20 bp, Artificial Sequence
  Synthetic oligonucleotide; GAG chr2 60521797 60521816 60521813 +
ttcttcctgaccctcaccac

SEQ ID NO: 166434 - DNA, 20 bp, Artificial Sequence
  Synthetic oligonucleotide; AGG chr2 60521798 60521817 60521814 +
tcttcctgaccctcaccacg

SEQ ID NO: 166435 - DNA, 20 bp, Artificial Sequence
  Synthetic oligonucleotide; CAG chr2 60521803 60521822 60521819 +
ctgaccctcaccacgaggca

SEQ ID NO: 166436 - DNA, 20 bp, Artificial Sequence
  Synthetic oligonucleotide; GAG chr2 60521805 60521824 60521821 +
gaccctcaccacgaggcaca

SEQ ID NO: 166437 - DNA, 20 bp, Artificial Sequence
  Synthetic oligonucleotide; AGG chr2 60521806 60521825 60521822 +
accctcaccacgaggcacag

SEQ ID NO: 166438 - DNA, 20 bp, Artificial Sequence
  Synthetic oligonucleotide; AAG chr2 60521826 60521845 60521842 +
aggcacctgtgctgaaactc

SEQ ID NO: 166439 - DNA, 20 bp, Artificial Sequence
  Synthetic oligonucleotide; AAG chr2 60521865 60521884 60521881 +
ctctgcctcatgcactgaaa

SEQ ID NO: 166440 - DNA, 20 bp, Artificial Sequence
  Synthetic oligonucleotide; AAG chr2 60521870 60521889 60521886 +
cctcatgcactgaaaaagac

SEQ ID NO: 166441 - DNA, 20 bp, Artificial Sequence
  Synthetic oligonucleotide; AGG chr2 60521871 60521890 60521887 +
ctcatgcactgaaaaagaca

SEQ ID NO: 166442 - DNA, 20 bp, Artificial Sequence
  Synthetic oligonucleotide; GGG chr2 60521872 60521891 60521888 +
tcatgcactgaaaaagacaa

SEQ ID NO: 166443 - DNA, 20 bp, Artificial Sequence
  Synthetic oligonucleotide; CAG chr2 60521888 60521907 60521904 +
acaagggatctctgttcttc

SEQ ID NO: 166444 - DNA, 20 bp, Artificial Sequence
  Synthetic oligonucleotide; AGG chr2 60521889 60521908 60521905 +
caagggatctctgttcttcc

SEQ ID NO: 166445 - DNA, 20 bp, Artificial Sequence
  Synthetic oligonucleotide; GAG chr2 60521891 60521910 60521907 +
agggatctctgttcttccag

SEQ ID NO: 166446 - DNA, 20 bp, Artificial Sequence
  Synthetic oligonucleotide; TGG chr2 60521896 60521915 60521912 +
tctctgttcttccaggagaa

SEQ ID NO: 166447 - DNA, 20 bp, Artificial Sequence
  Synthetic oligonucleotide; GGG chr2 60521897 60521916 60521913 +
ctctgttcttccaggagaat

SEQ ID NO: 166448 - DNA, 20 bp, Artificial Sequence
  Synthetic oligonucleotide; GGG chr2 60521898 60521917 60521914 +
tctgttcttccaggagaatg

SEQ ID NO: 166449 - DNA, 20 bp, Artificial Sequence
  Synthetic oligonucleotide; GGG chr2 60521899 60521918 60521915 +
ctgttcttccaggagaatgg

SEQ ID NO: 166450 - DNA, 20 bp, Artificial Sequence
  Synthetic oligonucleotide; CAG chr2 60521903 60521922 60521919 +
tcttccaggagaatggggga

SEQ ID NO: 166451 - DNA, 20 bp, Artificial Sequence
  Synthetic oligonucleotide; CAG chr2 60521910 60521929 60521926 +
ggagaatgggggacagtgca

SEQ ID NO: 166452 - DNA, 20 bp, Artificial Sequence
  Synthetic oligonucleotide; CAG chr2 60521915 60521934 60521931 +
atgggggacagtgcacagta

SEQ ID NO: 166453 - DNA, 20 bp, Artificial Sequence
  Synthetic oligonucleotide; CAG chr2 60521950 60521969 60521966 +
ccccttcacaatgaacttcc

SEQ ID NO: 166454 - DNA, 20 bp, Artificial Sequence
  Synthetic oligonucleotide; AAG chr2 60521957 60521976 60521973 +
acaatgaacttcccagatac

SEQ ID NO: 166455 - DNA, 20 bp, Artificial Sequence
  Synthetic oligonucleotide; GAG chr2 60521964 60521983 60521980 +
acttcccagatacaagactt

SEQ ID NO: 166456 - DNA, 20 bp, Artificial Sequence
  Synthetic oligonucleotide; CAG chr2 60521971 60521990 60521987 +
agatacaagacttgagctca

SEQ ID NO: 166457 - DNA, 20 bp, Artificial Sequence
  Synthetic oligonucleotide; AGG chr2 60521972 60521991 60521988 +
gatacaagacttgagctcac

SEQ ID NO: 166458 - DNA, 20 bp, Artificial Sequence
  Synthetic oligonucleotide; TAG chr2 60521989 60522008 60522005 +
cacaggtactttcttgccca

SEQ ID NO: 166459 - DNA, 20 bp, Artificial Sequence
  Synthetic oligonucleotide; AGG chr2 60521990 60522009 60522006 +
acaggtactttcttgcccat

SEQ ID NO: 166460 - DNA, 20 bp, Artificial Sequence
  Synthetic oligonucleotide; GAG chr2 60522016 60522035 60522032 +
cttgtccccttgctacctct

SEQ ID NO: 166461 - DNA, 20 bp, Artificial Sequence
  Synthetic oligonucleotide; TGG chr2 60522028 60522047 60522044 +
ctacctctgagccaaaccct

SEQ ID NO: 166462 - DNA, 20 bp, Artificial Sequence
  Synthetic oligonucleotide; AAG chr2 60522033 60522052 60522049 +
tctgagccaaacccttggtg

SEQ ID NO: 166463 - DNA, 20 bp, Artificial Sequence
  Synthetic oligonucleotide; AAG chr2 60522054 60522073 60522070 +
agaaacaacaccgactaaac

SEQ ID NO: 166464 - DNA, 20 bp, Artificial Sequence
  Synthetic oligonucleotide; AGG chr2 60522055 60522074 60522071 +
gaaacaacaccgactaaaca

SEQ ID NO: 166465 - DNA, 20 bp, Artificial Sequence
  Synthetic oligonucleotide; CAG chr2 60522074 60522093 60522090 +
aaggccatactgctctccac

SEQ ID NO: 166466 - DNA, 20 bp, Artificial Sequence
  Synthetic oligonucleotide; CAG chr2 60522078 60522097 60522094 +
ccatactgctctccaccagt

SEQ ID NO: 166467 - DNA, 20 bp, Artificial Sequence
  Synthetic oligonucleotide; AGG chr2 60522079 60522098 60522095 +
catactgctctccaccagtc

SEQ ID NO: 166468 - DNA, 20 bp, Artificial Sequence
  Synthetic oligonucleotide; TGG chr2 60522098 60522117 60522114 +
caggcaatacctttattttc

SEQ ID NO: 166469 - DNA, 20 bp, Artificial Sequence
  Synthetic oligonucleotide; AAG chr2 60522121 60522140 60522137 +
aaaaatctcaaatactacaa

SEQ ID NO: 166470 - DNA, 20 bp, Artificial Sequence
  Synthetic oligonucleotide; TAG chr2 60522124 60522143 60522140 +
aatctcaaatactacaaaag

SEQ ID NO: 166471 - DNA, 20 bp, Artificial Sequence
  Synthetic oligonucleotide; GAG chr2 60522126 60522145 60522142 +
tctcaaatactacaaaagta

SEQ ID NO: 166472 - DNA, 20 bp, Artificial Sequence
  Synthetic oligonucleotide; GAG chr2 60522128 60522147 60522144 +
tcaaatactacaaaagtaga

SEQ ID NO: 166473 - DNA, 20 bp, Artificial Sequence
  Synthetic oligonucleotide; CAG chr2 60522143 60522162 60522159 +
gtagagagaatgttataaat

SEQ ID NO: 166474 - DNA, 20 bp, Artificial Sequence
  Synthetic oligonucleotide; AAG chr2 60522151 60522170 60522167 +
aatgttataaatcagtcccc

SEQ ID NO: 166475 - DNA, 20 bp, Artificial Sequence
  Synthetic oligonucleotide; CAG chr2 60522165 60522184 60522181 +
gtccccaagtccacatcttc

SEQ ID NO: 166476 - DNA, 20 bp, Artificial Sequence
  Synthetic oligonucleotide; CAG chr2 60522180 60522199 60522196 +
tcttccagctccaaccacca

SEQ ID NO: 166477 - DNA, 20 bp, Artificial Sequence
  Synthetic oligonucleotide; CAG chr2 60522187 60522206 60522203 +
gctccaaccaccacagctca

SEQ ID NO: 166478 - DNA, 20 bp, Artificial Sequence
  Synthetic oligonucleotide; TAG chr2 60522223 60522242 60522239 +
ctgtaaccctatcgcctccc

SEQ ID NO: 166479 - DNA, 20 bp, Artificial Sequence
  Synthetic oligonucleotide; AAG chr2 60522241 60522260 60522257 +
cctagcccattttattattt

SEQ ID NO: 166480 - DNA, 20 bp, Artificial Sequence
  Synthetic oligonucleotide; CAG chr2 60522251 60522270 60522267 +
tttattatttaagttgatcc

SEQ ID NO: 166481 - DNA, 20 bp, Artificial Sequence
  Synthetic oligonucleotide; CAG chr2 60522271 60522290 60522287 +
cagacgtcatatcatttcat

SEQ ID NO: 166482 - DNA, 20 bp, Artificial Sequence
  Synthetic oligonucleotide; TAG chr2 60522303 60522322 60522319 +
ctgtatgtattttttaaaca

SEQ ID NO: 166483 - DNA, 20 bp, Artificial Sequence
  Synthetic oligonucleotide; AGG chr2 60522304 60522323 60522320 +
tgtatgtattttttaaacat

SEQ ID NO: 166484 - DNA, 20 bp, Artificial Sequence
  Synthetic oligonucleotide; AAG chr2 60522366 60522385 60522382 +
tatcacacctaaaaataata

SEQ ID NO: 166485 - DNA, 20 bp, Artificial Sequence
  Synthetic oligonucleotide; AAG chr2 60522378 60522397 60522394 +
aaataataaagtcacaaata

SEQ ID NO: 166486 - DNA, 20 bp, Artificial Sequence
  Synthetic oligonucleotide; TAG chr2 60522396 60522415 60522412 +
taaagtcccgtattaccaaa

SEQ ID NO: 166487 - DNA, 20 bp, Artificial Sequence
  Synthetic oligonucleotide; AGG chr2 60522397 60522416 60522413 +
aaagtcccgtattaccaaat

SEQ ID NO: 166488 - DNA, 20 bp, Artificial Sequence
  Synthetic oligonucleotide; GGG chr2 60522398 60522417 60522414 +
aagtcccgtattaccaaata

SEQ ID NO: 166489 - DNA, 20 bp, Artificial Sequence
  Synthetic oligonucleotide; GGG chr2 60522399 60522418 60522415 +
agtcccgtattaccaaatag

SEQ ID NO: 166490 - DNA, 20 bp, Artificial Sequence
  Synthetic oligonucleotide; GAG chr2 60522401 60522420 60522417 +
tcccgtattaccaaataggg

SEQ ID NO: 166491 - DNA, 20 bp, Artificial Sequence
  Synthetic oligonucleotide; CAG chr2 60522416 60522435 60522432 +
taggggagttattttaaact

SEQ ID NO: 166492 - DNA, 20 bp, Artificial Sequence
  Synthetic oligonucleotide; TGG chr2 60522436 60522455 60522452 +
cagaaatacttctttccatc

SEQ ID NO: 166493 - DNA, 20 bp, Artificial Sequence
  Synthetic oligonucleotide; GGG chr2 60522437 60522456 60522453 +
agaaatacttctttccatct

SEQ ID NO: 166494 - DNA, 20 bp, Artificial Sequence
  Synthetic oligonucleotide; TGG chr2 60522448 60522467 60522464 +
tttccatctgggtcatgttt

SEQ ID NO: 166495 - DNA, 20 bp, Artificial Sequence
  Synthetic oligonucleotide; GAG chr2 60522450 60522469 60522466 +
tccatctgggtcatgttttg

SEQ ID NO: 166496 - DNA, 20 bp, Artificial Sequence
  Synthetic oligonucleotide; AGG chr2 60522451 60522470 60522467 +
ccatctgggtcatgttttgg

SEQ ID NO: 166497 - DNA, 20 bp, Artificial Sequence
  Synthetic oligonucleotide; CAG chr2 60522462 60522481 60522478 +
atgttttggaggatcccttc

SEQ ID NO: 166498 - DNA, 20 bp, Artificial Sequence
  Synthetic oligonucleotide; GAG chr2 60522466 60522485 60522482 +
tttggaggatcccttccagt

SEQ ID NO: 166499 - DNA, 20 bp, Artificial Sequence
  Synthetic oligonucleotide; AGG chr2 60522467 60522486 60522483 +
ttggaggatcccttccagtg

SEQ ID NO: 166500 - DNA, 20 bp, Artificial Sequence
  Synthetic oligonucleotide; AAG chr2 60522473 60522492 60522489 +
gatcccttccagtgaggttc

SEQ ID NO: 166501 - DNA, 20 bp, Artificial Sequence
  Synthetic oligonucleotide; AAG chr2 60522480 60522499 60522496 +
tccagtgaggttcaagactg

SEQ ID NO: 166502 - DNA, 20 bp, Artificial Sequence
  Synthetic oligonucleotide; AAG chr2 60522488 60522507 60522504 +
ggttcaagactgaagctgcc

SEQ ID NO: 166503 - DNA, 20 bp, Artificial Sequence
  Synthetic oligonucleotide; AAG chr2 60522493 60522512 60522509 +
aagactgaagctgccaagaa

SEQ ID NO: 166504 - DNA, 20 bp, Artificial Sequence
  Synthetic oligonucleotide; CAG chr2 60522499 60522518 60522515 +
gaagctgccaagaaaagctt

SEQ ID NO: 166505 - DNA, 20 bp, Artificial Sequence
  Synthetic oligonucleotide; GAG chr2 60522501 60522520 60522517 +
agctgccaagaaaagcttca

SEQ ID NO: 166506 - DNA, 20 bp, Artificial Sequence
  Synthetic oligonucleotide; AAG chr2 60522520 60522539 60522536 +
agagaatcacactctctaaa

SEQ ID NO: 166507 - DNA, 20 bp, Artificial Sequence
  Synthetic oligonucleotide; AGG chr2 60522521 60522540 60522537 +
gagaatcacactctctaaaa

SEQ ID NO: 166508 - DNA, 20 bp, Artificial Sequence
  Synthetic oligonucleotide; GGG chr2 60522522 60522541 60522538 +
agaatcacactctctaaaaa

SEQ ID NO: 166509 - DNA, 20 bp, Artificial Sequence
  Synthetic oligonucleotide; AAG chr2 60522534 60522553 60522550 +
tctaaaaagggccttgtgta

SEQ ID NO: 166510 - DNA, 20 bp, Artificial Sequence
  Synthetic oligonucleotide; CAG chr2 60522550 60522569 60522566 +
tgtaaagccaccttgcatgt

SEQ ID NO: 166511 - DNA, 20 bp, Artificial Sequence
  Synthetic oligonucleotide; AAG chr2 60522556 60522575 60522572 +
gccaccttgcatgtcagccc

SEQ ID NO: 166512 - DNA, 20 bp, Artificial Sequence
  Synthetic oligonucleotide; CAG chr2 60522572 60522591 60522588 +
gcccaagctcctgccccttg

SEQ ID NO: 166513 - DNA, 20 bp, Artificial Sequence
  Synthetic oligonucleotide; CAG chr2 60522589 60522608 60522605 +
ttgcagtcctttgccctgtt

SEQ ID NO: 166514 - DNA, 20 bp, Artificial Sequence
  Synthetic oligonucleotide; AGG chr2 60522590 60522609 60522606 +
tgcagtcctttgccctgttc

SEQ ID NO: 166515 - DNA, 20 bp, Artificial Sequence
  Synthetic oligonucleotide; GGG chr2 60522591 60522610 60522607 +
gcagtcctttgccctgttca

SEQ ID NO: 166516 - DNA, 20 bp, Artificial Sequence
  Synthetic oligonucleotide; GAG chr2 60522609 60522628 60522625 +
cagggctgaatgcaccctct

SEQ ID NO: 166517 - DNA, 20 bp, Artificial Sequence
  Synthetic oligonucleotide; GAG chr2 60522611 60522630 60522627 +
gggctgaatgcaccctctga

SEQ ID NO: 166518 - DNA, 20 bp, Artificial Sequence
  Synthetic oligonucleotide; CAG chr2 60522623 60522642 60522639 +
ccctctgagagtctctgtga

SEQ ID NO: 166519 - DNA, 20 bp, Artificial Sequence
  Synthetic oligonucleotide; CAG chr2 60522648 60522667 60522664 +
ctcccacatcgactgcccca

SEQ ID NO: 166520 - DNA, 20 bp, Artificial Sequence
  Synthetic oligonucleotide; AGG chr2 60522649 60522668 60522665 +
tcccacatcgactgccccac

SEQ ID NO: 166521 - DNA, 20 bp, Artificial Sequence
  Synthetic oligonucleotide; GAG chr2 60522656 60522675 60522672 +
tcgactgccccacaggccct

SEQ ID NO: 166522 - DNA, 20 bp, Artificial Sequence
  Synthetic oligonucleotide; TGG chr2 60522680 60522699 60522696 +
ctccctcactccccaccatg

SEQ ID NO: 166523 - DNA, 20 bp, Artificial Sequence
  Synthetic oligonucleotide; AAG chr2 60522701 60522720 60522717 +
ggcccatcaccacatccgac

SEQ ID NO: 166524 - DNA, 20 bp, Artificial Sequence
  Synthetic oligonucleotide; CAG chr2 60522704 60522723 60522720 +
ccatcaccacatccgacaag

SEQ ID NO: 166525 - DNA, 20 bp, Artificial Sequence
  Synthetic oligonucleotide; AGG chr2 60522705 60522724 60522721 +
catcaccacatccgacaagc

SEQ ID NO: 166526 - DNA, 20 bp, Artificial Sequence
  Synthetic oligonucleotide; CAG chr2 60522716 60522735 60522732 +
ccgacaagcaggtgcactcc

SEQ ID NO: 166527 - DNA, 20 bp, Artificial Sequence
  Synthetic oligonucleotide; CAG chr2 60522723 60522742 60522739 +
gcaggtgcactcccagtgtt

SEQ ID NO: 166528 - DNA, 20 bp, Artificial Sequence
  Synthetic oligonucleotide; TGG chr2 60522729 60522748 60522745 +
gcactcccagtgttcagaac

SEQ ID NO: 166529 - DNA, 20 bp, Artificial Sequence
  Synthetic oligonucleotide; TGG chr2 60522745 60522764 60522761 +
gaactggaattcatttgtct

SEQ ID NO: 166530 - DNA, 20 bp, Artificial Sequence
  Synthetic oligonucleotide; AAG chr2 60522748 60522767 60522764 +
ctggaattcatttgtcttgg

SEQ ID NO: 166531 - DNA, 20 bp, Artificial Sequence
  Synthetic oligonucleotide; AAG chr2 60522752 60522771 60522768 +
aattcatttgtcttggaaga

SEQ ID NO: 166532 - DNA, 20 bp, Artificial Sequence
  Synthetic oligonucleotide; TGG chr2 60522763 60522782 60522779 +
cttggaagaaagtgttctcc

SEQ ID NO: 166533 - DNA, 20 bp, Artificial Sequence
  Synthetic oligonucleotide; CGG chr2 60522767 60522786 60522783 +
gaagaaagtgttctcctgga

SEQ ID NO: 166534 - DNA, 20 bp, Artificial Sequence
  Synthetic oligonucleotide; CAG chr2 60522777 60522796 60522793 +
ttctcctggacggttctgca

SEQ ID NO: 166535 - DNA, 20 bp, Artificial Sequence
  Synthetic oligonucleotide; CAG chr2 60522790 60522809 60522806 +
ttctgcacagaattcattca

SEQ ID NO: 166536 - DNA, 20 bp, Artificial Sequence
  Synthetic oligonucleotide; GAG chr2 60522792 60522811 60522808 +
ctgcacagaattcattcaca

SEQ ID NO: 166537 - DNA, 20 bp, Artificial Sequence
  Synthetic oligonucleotide; TGG chr2 60522802 60522821 60522818 +
ttcattcacagagcatgtct

SEQ ID NO: 166538 - DNA, 20 bp, Artificial Sequence
  Synthetic oligonucleotide; CAG chr2 60522810 60522829 60522826 +
cagagcatgtcttggatata

SEQ ID NO: 166539 - DNA, 20 bp, Artificial Sequence
  Synthetic oligonucleotide; TAG chr2 60522818 60522837 60522834 +
gtcttggatatacagctgac

SEQ ID NO: 166540 - DNA, 20 bp, Artificial Sequence
  Synthetic oligonucleotide; CAG chr2 60522827 60522846 60522843 +
atacagctgactagatatgt

SEQ ID NO: 166541 - DNA, 20 bp, Artificial Sequence
  Synthetic oligonucleotide; TGG chr2 60522842 60522861 60522858 +
tatgtcagttatgttccaaa

SEQ ID NO: 166542 - DNA, 20 bp, Artificial Sequence
  Synthetic oligonucleotide; GGG chr2 60522843 60522862 60522859 +
atgtcagttatgttccaaat

SEQ ID NO: 166543 - DNA, 20 bp, Artificial Sequence
  Synthetic oligonucleotide; CAG chr2 60522852 60522871 60522868 +
atgttccaaatgggttttca

SEQ ID NO: 166544 - DNA, 20 bp, Artificial Sequence
  Synthetic oligonucleotide; AGG chr2 60522853 60522872 60522869 +
tgttccaaatgggttttcac

SEQ ID NO: 166545 - DNA, 20 bp, Artificial Sequence
  Synthetic oligonucleotide; AAG chr2 60522858 60522877 60522874 +
caaatgggttttcacaggtc

SEQ ID NO: 166546 - DNA, 20 bp, Artificial Sequence
  Synthetic oligonucleotide; AGG chr2 60522859 60522878 60522875 +
aaatgggttttcacaggtca

SEQ ID NO: 166547 - DNA, 20 bp, Artificial Sequence
  Synthetic oligonucleotide; CAG chr2 60522867 60522886 60522883 +
tttcacaggtcaaggttctg

SEQ ID NO: 166548 - DNA, 20 bp, Artificial Sequence
  Synthetic oligonucleotide; AGG chr2 60522868 60522887 60522884 +
ttcacaggtcaaggttctgc

SEQ ID NO: 166549 - DNA, 20 bp, Artificial Sequence
  Synthetic oligonucleotide; AAG chr2 60522872 60522891 60522888 +
caggtcaaggttctgcaggc

SEQ ID NO: 166550 - DNA, 20 bp, Artificial Sequence
  Synthetic oligonucleotide; GAG chr2 60522874 60522893 60522890 +
ggtcaaggttctgcaggcaa

SEQ ID NO: 166551 - DNA, 20 bp, Artificial Sequence
  Synthetic oligonucleotide; TAG chr2 60522890 60522909 60522906 +
gcaagagcaaatactatttt

SEQ ID NO: 166552 - DNA, 20 bp, Artificial Sequence
  Synthetic oligonucleotide; CAG chr2 60522894 60522913 60522910 +
gagcaaatactatttttaga

SEQ ID NO: 166553 - DNA, 20 bp, Artificial Sequence
  Synthetic oligonucleotide; AGG chr2 60522895 60522914 60522911 +
agcaaatactatttttagac

SEQ ID NO: 166554 - DNA, 20 bp, Artificial Sequence
  Synthetic oligonucleotide; AAG chr2 60522900 60522919 60522916 +
atactatttttagacaggat

SEQ ID NO: 166555 - DNA, 20 bp, Artificial Sequence
  Synthetic oligonucleotide; AGG chr2 60522901 60522920 60522917 +
tactatttttagacaggata

SEQ ID NO: 166556 - DNA, 20 bp, Artificial Sequence
  Synthetic oligonucleotide; TAG chr2 60522916 60522935 60522932 +
ggataaggtcaaaatgcttt

SEQ ID NO: 166557 - DNA, 20 bp, Artificial Sequence
  Synthetic oligonucleotide; GAG chr2 60522918 60522937 60522934 +
ataaggtcaaaatgctttta

SEQ ID NO: 166558 - DNA, 20 bp, Artificial Sequence
  Synthetic oligonucleotide; CAG chr2 60522922 60522941 60522938 +
ggtcaaaatgcttttagaga

SEQ ID NO: 166559 - DNA, 20 bp, Artificial Sequence
  Synthetic oligonucleotide; GAG chr2 60522926 60522945 60522942 +
aaaatgcttttagagacagt

SEQ ID NO: 166560 - DNA, 20 bp, Artificial Sequence
  Synthetic oligonucleotide; AGG chr2 60522927 60522946 60522943 +
aaatgcttttagagacagtg

SEQ ID NO: 166561 - DNA, 20 bp, Artificial Sequence
  Synthetic oligonucleotide; CAG chr2 60522951 60522970 60522967 +
ctacaataaaacctattgat

SEQ ID NO: 166562 - DNA, 20 bp, Artificial Sequence
  Synthetic oligonucleotide; TGG chr2 60522958 60522977 60522974 +
aaaacctattgatcagcctc

SEQ ID NO: 166563 - DNA, 20 bp, Artificial Sequence
  Synthetic oligonucleotide; TAG chr2 60522964 60522983 60522980 +
tattgatcagcctctggaac

SEQ ID NO: 166564 - DNA, 20 bp, Artificial Sequence
  Synthetic oligonucleotide; CAG chr2 60522972 60522991 60522988 +
agcctctggaactagtgctc

SEQ ID NO: 166565 - DNA, 20 bp, Artificial Sequence
  Synthetic oligonucleotide; GAG chr2 60522974 60522993 60522990 +
cctctggaactagtgctcca

SEQ ID NO: 166566 - DNA, 20 bp, Artificial Sequence
  Synthetic oligonucleotide; GAG chr2 60522976 60522995 60522992 +
tctggaactagtgctccaga

SEQ ID NO: 166567 - DNA, 20 bp, Artificial Sequence
  Synthetic oligonucleotide; CAG chr2 60522982 60523001 60522998 +
actagtgctccagagagaca

SEQ ID NO: 166568 - DNA, 20 bp, Artificial Sequence
  Synthetic oligonucleotide; GAG chr2 60522984 60523003 60523000 +
tagtgctccagagagacaca

SEQ ID NO: 166569 - DNA, 20 bp, Artificial Sequence
  Synthetic oligonucleotide; TGG chr2 60523005 60523024 60523021 +
agattgaaacaaaaattgcc

SEQ ID NO: 166570 - DNA, 20 bp, Artificial Sequence
  Synthetic oligonucleotide; TAG chr2 60523020 60523039 60523036 +
ttgcctggccgttttctctg

SEQ ID NO: 166571 - DNA, 20 bp, Artificial Sequence
  Synthetic oligonucleotide; TGG chr2 60523029 60523048 60523045 +
cgttttctctgtagactctg

SEQ ID NO: 166572 - DNA, 20 bp, Artificial Sequence
  Synthetic oligonucleotide; GGG chr2 60523030 60523049 60523046 +
gttttctctgtagactctgt

SEQ ID NO: 166573 - DNA, 20 bp, Artificial Sequence
  Synthetic oligonucleotide; AAG chr2 60523036 60523055 60523052 +
tctgtagactctgtgggtaa

SEQ ID NO: 166574 - DNA, 20 bp, Artificial Sequence
  Synthetic oligonucleotide; TGG chr2 60523044 60523063 60523060 +
ctctgtgggtaaaagcttgt

SEQ ID NO: 166575 - DNA, 20 bp, Artificial Sequence
  Synthetic oligonucleotide; CAG chr2 60523060 60523079 60523076 +
ttgttggacttaatatcttt

SEQ ID NO: 166576 - DNA, 20 bp, Artificial Sequence
  Synthetic oligonucleotide; AGG chr2 60523061 60523080 60523077 +
tgttggacttaatatctttc

SEQ ID NO: 166577 - DNA, 20 bp, Artificial Sequence
  Synthetic oligonucleotide; AAG chr2 60523073 60523092 60523089 +
tatctttcaggatataaaat

SEQ ID NO: 166578 - DNA, 20 bp, Artificial Sequence
  Synthetic oligonucleotide; AAG chr2 60523077 60523096 60523093 +
tttcaggatataaaataagt

SEQ ID NO: 166579 - DNA, 20 bp, Artificial Sequence
  Synthetic oligonucleotide; AAG chr2 60523080 60523099 60523096 +
caggatataaaataagtaag

SEQ ID NO: 166580 - DNA, 20 bp, Artificial Sequence
  Synthetic oligonucleotide; CAG chr2 60523093 60523112 60523109 +
aagtaagaagtaactgtgta

SEQ ID NO: 166581 - DNA, 20 bp, Artificial Sequence
  Synthetic oligonucleotide; AAG chr2 60523103 60523122 60523119 +
taactgtgtacagattactg

SEQ ID NO: 166582 - DNA, 20 bp, Artificial Sequence
  Synthetic oligonucleotide; CAG chr2 60523116 60523135 60523132 +
attactgaagtccatttaac

SEQ ID NO: 166583 - DNA, 20 bp, Artificial Sequence
  Synthetic oligonucleotide; CAG chr2 60523122 60523141 60523138 +
gaagtccatttaaccagatg

SEQ ID NO: 166584 - DNA, 20 bp, Artificial Sequence
  Synthetic oligonucleotide; GAG chr2 60523124 60523143 60523140 +
agtccatttaaccagatgca

SEQ ID NO: 166585 - DNA, 20 bp, Artificial Sequence
  Synthetic oligonucleotide; AGG chr2 60523125 60523144 60523141 +
gtccatttaaccagatgcag

SEQ ID NO: 166586 - DNA, 20 bp, Artificial Sequence
  Synthetic oligonucleotide; CAG chr2 60523128 60523147 60523144 +
catttaaccagatgcagagg

SEQ ID NO: 166587 - DNA, 20 bp, Artificial Sequence
  Synthetic oligonucleotide; AGG chr2 60523129 60523148 60523145 +
atttaaccagatgcagaggc

SEQ ID NO: 166588 - DNA, 20 bp, Artificial Sequence
  Synthetic oligonucleotide; CAG chr2 60523135 60523154 60523151 +
ccagatgcagaggcaggtca

SEQ ID NO: 166589 - DNA, 20 bp, Artificial Sequence
  Synthetic oligonucleotide; TGG chr2 60523150 60523169 60523166 +
ggtcacagaaaatacactca

SEQ ID NO: 166590 - DNA, 20 bp, Artificial Sequence
  Synthetic oligonucleotide; CAG chr2 60523153 60523172 60523169 +
cacagaaaatacactcatgg

SEQ ID NO: 166591 - DNA, 20 bp, Artificial Sequence
  Synthetic oligonucleotide; AAG chr2 60523163 60523182 60523179 +
acactcatggcagaaccgta

SEQ ID NO: 166592 - DNA, 20 bp, Artificial Sequence
  Synthetic oligonucleotide; AAG chr2 60523166 60523185 60523182 +
ctcatggcagaaccgtaaag

SEQ ID NO: 166593 - DNA, 20 bp, Artificial Sequence
  Synthetic oligonucleotide; AGG chr2 60523167 60523186 60523183 +
tcatggcagaaccgtaaaga

SEQ ID NO: 166594 - DNA, 20 bp, Artificial Sequence
  Synthetic oligonucleotide; GGG chr2 60523168 60523187 60523184 +
catggcagaaccgtaaagaa

SEQ ID NO: 166595 - DNA, 20 bp, Artificial Sequence
  Synthetic oligonucleotide; GAG chr2 60523170 60523189 60523186 +
tggcagaaccgtaaagaagg

SEQ ID NO: 166596 - DNA, 20 bp, Artificial Sequence
  Synthetic oligonucleotide; AAG chr2 60523178 60523197 60523194 +
ccgtaaagaagggagatttc

SEQ ID NO: 166597 - DNA, 20 bp, Artificial Sequence
  Synthetic oligonucleotide; AGG chr2 60523179 60523198 60523195 +
cgtaaagaagggagatttca

SEQ ID NO: 166598 - DNA, 20 bp, Artificial Sequence
  Synthetic oligonucleotide; TAG chr2 60523199 60523218 60523215 +
aggcaacacgtgttgcaacc

SEQ ID NO: 166599 - DNA, 20 bp, Artificial Sequence
  Synthetic oligonucleotide; GAG chr2 60523201 60523220 60523217 +
gcaacacgtgttgcaaccta

SEQ ID NO: 166600 - DNA, 20 bp, Artificial Sequence
  Synthetic oligonucleotide; AAG chr2 60523205 60523224 60523221 +
cacgtgttgcaacctagaga

SEQ ID NO: 166601 - DNA, 20 bp, Artificial Sequence
  Synthetic oligonucleotide; CAG chr2 60523217 60523236 60523233 +
cctagagaaagaataaacac

SEQ ID NO: 166602 - DNA, 20 bp, Artificial Sequence
  Synthetic oligonucleotide; CAG chr2 60523231 60523250 60523247 +
aaacaccagtcttctcaact

SEQ ID NO: 166603 - DNA, 20 bp, Artificial Sequence
  Synthetic oligonucleotide; AGG chr2 60523232 60523251 60523248 +
aacaccagtcttctcaactc

SEQ ID NO: 166604 - DNA, 20 bp, Artificial Sequence
  Synthetic oligonucleotide; GGG chr2 60523233 60523252 60523249 +
acaccagtcttctcaactca

SEQ ID NO: 166605 - DNA, 20 bp, Artificial Sequence
  Synthetic oligonucleotide; GGG chr2 60523234 60523253 60523250 +
caccagtcttctcaactcag

SEQ ID NO: 166606 - DNA, 20 bp, Artificial Sequence
  Synthetic oligonucleotide; GAG chr2 60523236 60523255 60523252 +
ccagtcttctcaactcaggg

SEQ ID NO: 166607 - DNA, 20 bp, Artificial Sequence
  Synthetic oligonucleotide; AGG chr2 60523237 60523256 60523253 +
cagtcttctcaactcagggg

SEQ ID NO: 166608 - DNA, 20 bp, Artificial Sequence
  Synthetic oligonucleotide; AAG chr2 60523244 60523263 60523260 +
ctcaactcaggggaggcaca

SEQ ID NO: 166609 - DNA, 20 bp, Artificial Sequence
  Synthetic oligonucleotide; AGG chr2 60523245 60523264 60523261 +
tcaactcaggggaggcacaa

SEQ ID NO: 166610 - DNA, 20 bp, Artificial Sequence
  Synthetic oligonucleotide; CAG chr2 60523249 60523268 60523265 +
ctcaggggaggcacaaagga

SEQ ID NO: 166611 - DNA, 20 bp, Artificial Sequence
  Synthetic oligonucleotide; CAG chr2 60523261 60523280 60523277 +
acaaaggacagcctgccatc

SEQ ID NO: 166612 - DNA, 20 bp, Artificial Sequence
  Synthetic oligonucleotide; AGG chr2 60523262 60523281 60523278 +
caaaggacagcctgccatcc

SEQ ID NO: 166613 - DNA, 20 bp, Artificial Sequence
  Synthetic oligonucleotide; TGG chr2 60523274 60523293 60523290 +
tgccatccaggattcctgct

SEQ ID NO: 166614 - DNA, 20 bp, Artificial Sequence
  Synthetic oligonucleotide; GGG chr2 60523275 60523294 60523291 +
gccatccaggattcctgctt

SEQ ID NO: 166615 - DNA, 20 bp, Artificial Sequence
  Synthetic oligonucleotide; CAG chr2 60523315 60523334 60523331 +
tgccactatgatcctcaatc

SEQ ID NO: 166616 - DNA, 20 bp, Artificial Sequence
  Synthetic oligonucleotide; CAG chr2 60523332 60523351 60523348 +
atccagcgctatgtgaacaa

SEQ ID NO: 166617 - DNA, 20 bp, Artificial Sequence
  Synthetic oligonucleotide; CAG chr2 60523340 60523359 60523356 +
ctatgtgaacaacagacttt

SEQ ID NO: 166618 - DNA, 20 bp, Artificial Sequence
  Synthetic oligonucleotide; TAG chr2 60523348 60523367 60523364 +
acaacagactttcagataaa

SEQ ID NO: 166619 - DNA, 20 bp, Artificial Sequence
  Synthetic oligonucleotide; TGG chr2 60523353 60523372 60523369 +
agactttcagataaatagta

SEQ ID NO: 166620 - DNA, 20 bp, Artificial Sequence
  Synthetic oligonucleotide; GAG chr2 60523355 60523374 60523371 +
actttcagataaatagtatg

SEQ ID NO: 166621 - DNA, 20 bp, Artificial Sequence
  Synthetic oligonucleotide; AAG chr2 60523369 60523388 60523385 +
agtatggagataatttgctt

SEQ ID NO: 166622 - DNA, 20 bp, Artificial Sequence
  Synthetic oligonucleotide; CAG chr2 60523373 60523392 60523389 +
tggagataatttgcttaagt

SEQ ID NO: 166623 - DNA, 20 bp, Artificial Sequence
  Synthetic oligonucleotide; AAG chr2 60523387 60523406 60523403 +
ttaagtcagattttgatgaa

SEQ ID NO: 166624 - DNA, 20 bp, Artificial Sequence
  Synthetic oligonucleotide; TGG chr2 60523390 60523409 60523406 +
agtcagattttgatgaaaag

SEQ ID NO: 166625 - DNA, 20 bp, Artificial Sequence
  Synthetic oligonucleotide; TGG chr2 60523401 60523420 60523417 +
gatgaaaagtggtttctaca

SEQ ID NO: 166626 - DNA, 20 bp, Artificial Sequence
  Synthetic oligonucleotide; TAG chr2 60523405 60523424 60523421 +
aaaagtggtttctacatgga

SEQ ID NO: 166627 - DNA, 20 bp, Artificial Sequence
  Synthetic oligonucleotide; TGG chr2 60523435 60523454 60523451 +
aaacttctatattgatttga

SEQ ID NO: 166628 - DNA, 20 bp, Artificial Sequence
  Synthetic oligonucleotide; TGG chr2 60523443 60523462 60523459 +
atattgatttgatggaatca

SEQ ID NO: 166629 - DNA, 20 bp, Artificial Sequence
  Synthetic oligonucleotide; AAG chr2 60523455 60523474 60523471 +
tggaatcatggtgaattcta

SEQ ID NO: 166630 - DNA, 20 bp, Artificial Sequence
  Synthetic oligonucleotide; CAG chr2 60523496 60523515 60523512 +
tctccctttctacacacaca

SEQ ID NO: 166631 - DNA, 20 bp, Artificial Sequence
  Synthetic oligonucleotide; AGG chr2 60523497 60523516 60523513 +
ctccctttctacacacacac

SEQ ID NO: 166632 - DNA, 20 bp, Artificial Sequence
  Synthetic oligonucleotide; TAG chr2 60523548 60523567 60523564 +
catatacgtatgtatatatg

SEQ ID NO: 166633 - DNA, 20 bp, Artificial Sequence
  Synthetic oligonucleotide; TAG chr2 60523575 60523594 60523591 +
tacatatgtatgtgtgtata

SEQ ID NO: 166634 - DNA, 20 bp, Artificial Sequence
  Synthetic oligonucleotide; CAG chr2 60523611 60523630 60523627 +
tatgctttatcttatgatga

SEQ ID NO: 166635 - DNA, 20 bp, Artificial Sequence
  Synthetic oligonucleotide; TGG chr2 60523626 60523645 60523642 +
gatgacagtgttgatgtgtt

SEQ ID NO: 166636 - DNA, 20 bp, Artificial Sequence
  Synthetic oligonucleotide; GGG chr2 60523627 60523646 60523643 +
atgacagtgttgatgtgttt

SEQ ID NO: 166637 - DNA, 20 bp, Artificial Sequence
  Synthetic oligonucleotide; GGG chr2 60523628 60523647 60523644 +
tgacagtgttgatgtgtttg

SEQ ID NO: 166638 - DNA, 20 bp, Artificial Sequence
  Synthetic oligonucleotide; AAG chr2 60523649 60523668 60523665 +
ggatttttttttttttcaaa

SEQ ID NO: 166639 - DNA, 20 bp, Artificial Sequence
  Synthetic oligonucleotide; GAG chr2 60523651 60523670 60523667 +
atttttttttttttcaaaaa

SEQ ID NO: 166640 - DNA, 20 bp, Artificial Sequence
  Synthetic oligonucleotide; AAG chr2 60523659 60523678 60523675 +
ttttttcaaaaagagttaat

SEQ ID NO: 166641 - DNA, 20 bp, Artificial Sequence
  Synthetic oligonucleotide; TAG chr2 60523669 60523688 60523685 +
aagagttaataagcctttta

SEQ ID NO: 166642 - DNA, 20 bp, Artificial Sequence
  Synthetic oligonucleotide; AGG chr2 60523670 60523689 60523686 +
agagttaataagccttttat

SEQ ID NO: 166643 - DNA, 20 bp, Artificial Sequence
  Synthetic oligonucleotide; AAG chr2 60523683 60523702 60523699 +
cttttataggtgtaccacac

SEQ ID NO: 166644 - DNA, 20 bp, Artificial Sequence
  Synthetic oligonucleotide; CAG chr2 60523690 60523709 60523706 +
aggtgtaccacacaagactc

SEQ ID NO: 166645 - DNA, 20 bp, Artificial Sequence
  Synthetic oligonucleotide; AAG chr2 60523694 60523713 60523710 +
gtaccacacaagactccagt

SEQ ID NO: 166646 - DNA, 20 bp, Artificial Sequence
  Synthetic oligonucleotide; CAG chr2 60523713 60523732 60523729 +
taagcaaaatcattcattgc

SEQ ID NO: 166647 - DNA, 20 bp, Artificial Sequence
  Synthetic oligonucleotide; AGG chr2 60523714 60523733 60523730 +
aagcaaaatcattcattgcc

SEQ ID NO: 166648 - DNA, 20 bp, Artificial Sequence
  Synthetic oligonucleotide; GAG chr2 60523725 60523744 60523741 +
ttcattgccaggcaaaactt

SEQ ID NO: 166649 - DNA, 20 bp, Artificial Sequence
  Synthetic oligonucleotide; TAG chr2 60523737 60523756 60523753 +
caaaacttgagaaatacatt

SEQ ID NO: 166650 - DNA, 20 bp, Artificial Sequence
  Synthetic oligonucleotide; GAG chr2 60523749 60523768 60523765 +
aatacatttagaaatcatac

SEQ ID NO: 166651 - DNA, 20 bp, Artificial Sequence
  Synthetic oligonucleotide; CAG chr2 60523756 60523775 60523772 +
ttagaaatcatacgagcaca

SEQ ID NO: 166652 - DNA, 20 bp, Artificial Sequence
  Synthetic oligonucleotide; AGG chr2 60523757 60523776 60523773 +
tagaaatcatacgagcacac

SEQ ID NO: 166653 - DNA, 20 bp, Artificial Sequence
  Synthetic oligonucleotide; GAG chr2 60523759 60523778 60523775 +
gaaatcatacgagcacacag

SEQ ID NO: 166654 - DNA, 20 bp, Artificial Sequence
  Synthetic oligonucleotide; AAG chr2 60523769 60523788 60523785 +
gagcacacaggagctcaatc

SEQ ID NO: 166655 - DNA, 20 bp, Artificial Sequence
  Synthetic oligonucleotide; AAG chr2 60523785 60523804 60523801 +
aatcaagtaaatgaatcacc

SEQ ID NO: 166656 - DNA, 20 bp, Artificial Sequence
  Synthetic oligonucleotide; AGG chr2 60523786 60523805 60523802 +
atcaagtaaatgaatcacca

SEQ ID NO: 166657 - DNA, 20 bp, Artificial Sequence
  Synthetic oligonucleotide; CAG chr2 60523791 60523810 60523807 +
gtaaatgaatcaccaaggca

SEQ ID NO: 166658 - DNA, 20 bp, Artificial Sequence
  Synthetic oligonucleotide; AAG chr2 60523795 60523814 60523811 +
atgaatcaccaaggcacaga

SEQ ID NO: 166659 - DNA, 20 bp, Artificial Sequence
  Synthetic oligonucleotide; TGG chr2 60523802 60523821 60523818 +
accaaggcacagaaagtcac

SEQ ID NO: 166660 - DNA, 20 bp, Artificial Sequence
  Synthetic oligonucleotide; TAG chr2 60523818 60523837 60523834 +
tcactggaaaattacttaac

SEQ ID NO: 166661 - DNA, 20 bp, Artificial Sequence
  Synthetic oligonucleotide; AAG chr2 60523832 60523851 60523848 +
cttaactagcccaaacgttc

SEQ ID NO: 166662 - DNA, 20 bp, Artificial Sequence
  Synthetic oligonucleotide; AAG chr2 60523843 60523862 60523859 +
caaacgttcaagaattgacc

SEQ ID NO: 166663 - DNA, 20 bp, Artificial Sequence
  Synthetic oligonucleotide; AGG chr2 60523844 60523863 60523860 +
aaacgttcaagaattgacca

SEQ ID NO: 166664 - DNA, 20 bp, Artificial Sequence
  Synthetic oligonucleotide; AAG chr2 60523850 60523869 60523866 +
tcaagaattgaccaaggttt

SEQ ID NO: 166665 - DNA, 20 bp, Artificial Sequence
  Synthetic oligonucleotide; CAG chr2 60523853 60523872 60523869 +
agaattgaccaaggtttaag

SEQ ID NO: 166666 - DNA, 20 bp, Artificial Sequence
  Synthetic oligonucleotide; AAG chr2 60523877 60523896 60523893 +
aaaccctaaataatttattt

SEQ ID NO: 166667 - DNA, 20 bp, Artificial Sequence
  Synthetic oligonucleotide; TAG chr2 60523885 60523904 60523901 +
aataatttatttaagccaaa

SEQ ID NO: 166668 - DNA, 20 bp, Artificial Sequence
  Synthetic oligonucleotide; AGG chr2 60523886 60523905 60523902 +
ataatttatttaagccaaat

SEQ ID NO: 166669 - DNA, 20 bp, Artificial Sequence
  Synthetic oligonucleotide; GAG chr2 60523888 60523907 60523904 +
aatttatttaagccaaatag

SEQ ID NO: 166670 - DNA, 20 bp, Artificial Sequence
  Synthetic oligonucleotide; AAG chr2 60523895 60523914 60523911 +
ttaagccaaataggagcttt

SEQ ID NO: 166671 - DNA, 20 bp, Artificial Sequence
  Synthetic oligonucleotide; CAG chr2 60523900 60523919 60523916 +
ccaaataggagctttaagca

SEQ ID NO: 166672 - DNA, 20 bp, Artificial Sequence
  Synthetic oligonucleotide; TGG chr2 60523915 60523934 60523931 +
aagcacagacattaatgtaa

SEQ ID NO: 166673 - DNA, 20 bp, Artificial Sequence
  Synthetic oligonucleotide; CAG chr2 60523937 60523956 60523953 +
gactatcccatcttaaactt

SEQ ID NO: 166674 - DNA, 20 bp, Artificial Sequence
  Synthetic oligonucleotide; CAG chr2 60523941 60523960 60523957 +
atcccatcttaaacttcagc

SEQ ID NO: 166675 - DNA, 20 bp, Artificial Sequence
  Synthetic oligonucleotide; GAG chr2 60523943 60523962 60523959 +
cccatcttaaacttcagcca

SEQ ID NO: 166676 - DNA, 20 bp, Artificial Sequence
  Synthetic oligonucleotide; AAG chr2 60523959 60523978 60523975 +
gccagagatctaaaactttg

SEQ ID NO: 166677 - DNA, 20 bp, Artificial Sequence
  Synthetic oligonucleotide; CAG chr2 60523995 60524014 60524011 +
cataaatacctctccattat

SEQ ID NO: 166678 - DNA, 20 bp, Artificial Sequence
  Synthetic oligonucleotide; AGG chr2 60523996 60524015 60524012 +
ataaatacctctccattatc

SEQ ID NO: 166679 - DNA, 20 bp, Artificial Sequence
  Synthetic oligonucleotide; GGG chr2 60523997 60524016 60524013 +
taaatacctctccattatca

SEQ ID NO: 166680 - DNA, 20 bp, Artificial Sequence
  Synthetic oligonucleotide; GGG chr2 60523998 60524017 60524014 +
aaatacctctccattatcag

SEQ ID NO: 166681 - DNA, 20 bp, Artificial Sequence
  Synthetic oligonucleotide; GAG chr2 60524014 60524033 60524030 +
tcaggggtgctttattgttt

SEQ ID NO: 166682 - DNA, 20 bp, Artificial Sequence
  Synthetic oligonucleotide; GAG chr2 60524016 60524035 60524032 +
aggggtgctttattgtttga

SEQ ID NO: 166683 - DNA, 20 bp, Artificial Sequence
  Synthetic oligonucleotide; CGG chr2 60524023 60524042 60524039 +
ctttattgtttgagagactc

SEQ ID NO: 166684 - DNA, 20 bp, Artificial Sequence
  Synthetic oligonucleotide; CAG chr2 60524030 60524049 60524046 +
gtttgagagactccggacca

SEQ ID NO: 166685 - DNA, 20 bp, Artificial Sequence
  Synthetic oligonucleotide; AGG chr2 60524031 60524050 60524047 +
tttgagagactccggaccac

SEQ ID NO: 166686 - DNA, 20 bp, Artificial Sequence
  Synthetic oligonucleotide; TAG chr2 60524037 60524056 60524053 +
agactccggaccacaggaac

SEQ ID NO: 166687 - DNA, 20 bp, Artificial Sequence
  Synthetic oligonucleotide; TGG chr2 60524049 60524068 60524065 +
acaggaactagtgtgaaaac

SEQ ID NO: 166688 - DNA, 20 bp, Artificial Sequence
  Synthetic oligonucleotide; GAG chr2 60524051 60524070 60524067 +
aggaactagtgtgaaaactg

SEQ ID NO: 166689 - DNA, 20 bp, Artificial Sequence
  Synthetic oligonucleotide; AGG chr2 60524052 60524071 60524068 +
ggaactagtgtgaaaactgg

SEQ ID NO: 166690 - DNA, 20 bp, Artificial Sequence
  Synthetic oligonucleotide; GGG chr2 60524053 60524072 60524069 +
gaactagtgtgaaaactgga

SEQ ID NO: 166691 - DNA, 20 bp, Artificial Sequence
  Synthetic oligonucleotide; TGG chr2 60524102 60524121 60524118 +
ttcgcaaacaaaatatgcca

SEQ ID NO: 166692 - DNA, 20 bp, Artificial Sequence
  Synthetic oligonucleotide; CAG chr2 60524135 60524154 60524151 +
ctatatatcacattgtgaca

SEQ ID NO: 166693 - DNA, 20 bp, Artificial Sequence
  Synthetic oligonucleotide; TAG chr2 60524148 60524167 60524164 +
tgtgacacagctgaccgcat

SEQ ID NO: 166694 - DNA, 20 bp, Artificial Sequence
  Synthetic oligonucleotide; GAG chr2 60524152 60524171 60524168 +
acacagctgaccgcattagt

SEQ ID NO: 166695 - DNA, 20 bp, Artificial Sequence
  Synthetic oligonucleotide; AAG chr2 60524157 60524176 60524173 +
gctgaccgcattagtgagcc

SEQ ID NO: 166696 - DNA, 20 bp, Artificial Sequence
  Synthetic oligonucleotide; TAG chr2 60524167 60524186 60524183 +
ttagtgagccaagactgtcc

SEQ ID NO: 166697 - DNA, 20 bp, Artificial Sequence
  Synthetic oligonucleotide; CGG chr2 60524170 60524189 60524186 +
gtgagccaagactgtcctag

SEQ ID NO: 166698 - DNA, 20 bp, Artificial Sequence
  Synthetic oligonucleotide; CAG chr2 60524173 60524192 60524189 +
agccaagactgtcctagcgg

SEQ ID NO: 166699 - DNA, 20 bp, Artificial Sequence
  Synthetic oligonucleotide; CGG chr2 60524202 60524221 60524218 +
atcatgcattaacaatacaa

SEQ ID NO: 166700 - DNA, 20 bp, Artificial Sequence
  Synthetic oligonucleotide; AAG chr2 60524228 60524247 60524244 +
atacatttgcacaacacaat

SEQ ID NO: 166701 - DNA, 20 bp, Artificial Sequence
  Synthetic oligonucleotide; GAG chr2 60524230 60524249 60524246 +
acatttgcacaacacaataa

SEQ ID NO: 166702 - DNA, 20 bp, Artificial Sequence
  Synthetic oligonucleotide; AGG chr2 60524231 60524250 60524247 +
catttgcacaacacaataag

SEQ ID NO: 166703 - DNA, 20 bp, Artificial Sequence
  Synthetic oligonucleotide; TGG chr2 60524234 60524253 60524250 +
ttgcacaacacaataagagg

SEQ ID NO: 166704 - DNA, 20 bp, Artificial Sequence
  Synthetic oligonucleotide; GGG chr2 60524235 60524254 60524251 +
tgcacaacacaataagaggt

SEQ ID NO: 166705 - DNA, 20 bp, Artificial Sequence
  Synthetic oligonucleotide; GGG chr2 60524236 60524255 60524252 +
gcacaacacaataagaggtg

SEQ ID NO: 166706 - DNA, 20 bp, Artificial Sequence
  Synthetic oligonucleotide; GGG chr2 60524237 60524256 60524253 +
cacaacacaataagaggtgg

SEQ ID NO: 166707 - DNA, 20 bp, Artificial Sequence
  Synthetic oligonucleotide; GAG chr2 60524239 60524258 60524255 +
caacacaataagaggtgggg

SEQ ID NO: 166708 - DNA, 20 bp, Artificial Sequence
  Synthetic oligonucleotide; AAG chr2 60524242 60524261 60524258 +
cacaataagaggtgggggag

SEQ ID NO: 166709 - DNA, 20 bp, Artificial Sequence
  Synthetic oligonucleotide; GAG chr2 60524244 60524263 60524260 +
caataagaggtgggggagaa

SEQ ID NO: 166710 - DNA, 20 bp, Artificial Sequence
  Synthetic oligonucleotide; GAG chr2 60524246 60524265 60524262 +
ataagaggtgggggagaaga

SEQ ID NO: 166711 - DNA, 20 bp, Artificial Sequence
  Synthetic oligonucleotide; TGG chr2 60524254 60524273 60524270 +
tgggggagaagagagaacat

SEQ ID NO: 166712 - DNA, 20 bp, Artificial Sequence
  Synthetic oligonucleotide; GGG chr2 60524255 60524274 60524271 +
gggggagaagagagaacatt

SEQ ID NO: 166713 - DNA, 20 bp, Artificial Sequence
  Synthetic oligonucleotide; TGG chr2 60524309 60524328 60524325 +
ataattttgtcacctatctc

SEQ ID NO: 166714 - DNA, 20 bp, Artificial Sequence
  Synthetic oligonucleotide; CAG chr2 60524337 60524356 60524353 +
atgttatcatgcttttattt

SEQ ID NO: 166715 - DNA, 20 bp, Artificial Sequence
  Synthetic oligonucleotide; AGG chr2 60524338 60524357 60524354 +
tgttatcatgcttttatttc

SEQ ID NO: 166716 - DNA, 20 bp, Artificial Sequence
  Synthetic oligonucleotide; TGG chr2 60524347 60524366 60524363 +
gcttttatttcaggtaataa

SEQ ID NO: 166717 - DNA, 20 bp, Artificial Sequence
  Synthetic oligonucleotide; AAG chr2 60524350 60524369 60524366 +
tttatttcaggtaataatgg

SEQ ID NO: 166718 - DNA, 20 bp, Artificial Sequence
  Synthetic oligonucleotide; AGG chr2 60524351 60524370 60524367 +
ttatttcaggtaataatgga

SEQ ID NO: 166719 - DNA, 20 bp, Artificial Sequence
  Synthetic oligonucleotide; GGG chr2 60524352 60524371 60524368 +
tatttcaggtaataatggaa

SEQ ID NO: 166720 - DNA, 20 bp, Artificial Sequence
  Synthetic oligonucleotide; GGG chr2 60524353 60524372 60524369 +
atttcaggtaataatggaag

SEQ ID NO: 166721 - DNA, 20 bp, Artificial Sequence
  Synthetic oligonucleotide; AAG chr2 60524357 60524376 60524373 +
caggtaataatggaagggga

SEQ ID NO: 166722 - DNA, 20 bp, Artificial Sequence
  Synthetic oligonucleotide; TAG chr2 60524360 60524379 60524376 +
gtaataatggaaggggaaag

SEQ ID NO: 166723 - DNA, 20 bp, Artificial Sequence
  Synthetic oligonucleotide; GAG chr2 60524362 60524381 60524378 +
aataatggaaggggaaagta

SEQ ID NO: 166724 - DNA, 20 bp, Artificial Sequence
  Synthetic oligonucleotide; TGG chr2 60524369 60524388 60524385 +
gaaggggaaagtagagcctc

SEQ ID NO: 166725 - DNA, 20 bp, Artificial Sequence
  Synthetic oligonucleotide; GGG chr2 60524370 60524389 60524386 +
aaggggaaagtagagcctct

SEQ ID NO: 166726 - DNA, 20 bp, Artificial Sequence
  Synthetic oligonucleotide; GGG chr2 60524371 60524390 60524387 +
aggggaaagtagagcctctg

SEQ ID NO: 166727 - DNA, 20 bp, Artificial Sequence
  Synthetic oligonucleotide; GGG chr2 60524372 60524391 60524388 +
ggggaaagtagagcctctgg

SEQ ID NO: 166728 - DNA, 20 bp, Artificial Sequence
  Synthetic oligonucleotide; GGG chr2 60524373 60524392 60524389 +
gggaaagtagagcctctggg

SEQ ID NO: 166729 - DNA, 20 bp, Artificial Sequence
  Synthetic oligonucleotide; CGG chr2 60524388 60524407 60524404 +
ctggggggctgccattcatt

SEQ ID NO: 166730 - DNA, 20 bp, Artificial Sequence
  Synthetic oligonucleotide; TGG chr2 60524406 60524425 60524422 +
ttcggcctgttatttgcttt

SEQ ID NO: 166731 - DNA, 20 bp, Artificial Sequence
  Synthetic oligonucleotide; GGG chr2 60524407 60524426 60524423 +
tcggcctgttatttgctttt

SEQ ID NO: 166732 - DNA, 20 bp, Artificial Sequence
  Synthetic oligonucleotide; TGG chr2 60524411 60524430 60524427 +
cctgttatttgcttttgggt

SEQ ID NO: 166733 - DNA, 20 bp, Artificial Sequence
  Synthetic oligonucleotide; GGG chr2 60524412 60524431 60524428 +
ctgttatttgcttttgggtt

SEQ ID NO: 166734 - DNA, 20 bp, Artificial Sequence
  Synthetic oligonucleotide; TAG chr2 60524416 60524435 60524432 +
tatttgcttttgggttgggt

SEQ ID NO: 166735 - DNA, 20 bp, Artificial Sequence
  Synthetic oligonucleotide; AGG chr2 60524417 60524436 60524433 +
atttgcttttgggttgggtt

SEQ ID NO: 166736 - DNA, 20 bp, Artificial Sequence
  Synthetic oligonucleotide; GGG chr2 60524418 60524437 60524434 +
tttgcttttgggttgggtta

SEQ ID NO: 166737 - DNA, 20 bp, Artificial Sequence
  Synthetic oligonucleotide; AAG chr2 60524478 60524497 60524494 +
tttcttttttcttgtttttt

SEQ ID NO: 166738 - DNA, 20 bp, Artificial Sequence
  Synthetic oligonucleotide; CAG chr2 60524496 60524515 60524512 +
ttaagattttattttgttac

SEQ ID NO: 166739 - DNA, 20 bp, Artificial Sequence
  Synthetic oligonucleotide; GAG chr2 60524498 60524517 60524514 +
aagattttattttgttacca

SEQ ID NO: 166740 - DNA, 20 bp, Artificial Sequence
  Synthetic oligonucleotide; TAG chr2 60524502 60524521 60524518 +
ttttattttgttaccagaga

SEQ ID NO: 166741 - DNA, 20 bp, Artificial Sequence
  Synthetic oligonucleotide; AAG chr2 60524505 60524524 60524521 +
tattttgttaccagagatag

SEQ ID NO: 166742 - DNA, 20 bp, Artificial Sequence
  Synthetic oligonucleotide; GAG chr2 60524507 60524526 60524523 +
ttttgttaccagagatagaa

SEQ ID NO: 166743 - DNA, 20 bp, Artificial Sequence
  Synthetic oligonucleotide; CAG chr2 60524520 60524539 60524536 +
gatagaagagcatgcaaaat

SEQ ID NO: 166744 - DNA, 20 bp, Artificial Sequence
  Synthetic oligonucleotide; CAG chr2 60524526 60524545 60524542 +
agagcatgcaaaatcagaaa

SEQ ID NO: 166745 - DNA, 20 bp, Artificial Sequence
  Synthetic oligonucleotide; CAG chr2 60524537 60524556 60524553 +
aatcagaaacagctgattac

SEQ ID NO: 166746 - DNA, 20 bp, Artificial Sequence
  Synthetic oligonucleotide; CAG chr2 60524548 60524567 60524564 +
gctgattaccagtgccctta

SEQ ID NO: 166747 - DNA, 20 bp, Artificial Sequence
  Synthetic oligonucleotide; GAG chr2 60524550 60524569 60524566 +
tgattaccagtgcccttaca

SEQ ID NO: 166748 - DNA, 20 bp, Artificial Sequence
  Synthetic oligonucleotide; AAG chr2 60524589 60524608 60524605 +
ccccaaaacattataaatta

SEQ ID NO: 166749 - DNA, 20 bp, Artificial Sequence
  Synthetic oligonucleotide; GAG chr2 60524591 60524610 60524607 +
ccaaaacattataaattaaa

SEQ ID NO: 166750 - DNA, 20 bp, Artificial Sequence
  Synthetic oligonucleotide; AGG chr2 60524592 60524611 60524608 +
caaaacattataaattaaag

SEQ ID NO: 166751 - DNA, 20 bp, Artificial Sequence
  Synthetic oligonucleotide; CAG chr2 60524595 60524614 60524611 +
aacattataaattaaagagg

SEQ ID NO: 166752 - DNA, 20 bp, Artificial Sequence
  Synthetic oligonucleotide; AAG chr2 60524625 60524644 60524641 +
aataaattacctttttattg

SEQ ID NO: 166753 - DNA, 20 bp, Artificial Sequence
  Synthetic oligonucleotide; TAG chr2 60524631 60524650 60524647 +
ttacctttttattgaagcta

SEQ ID NO: 166754 - DNA, 20 bp, Artificial Sequence
  Synthetic oligonucleotide; AAG chr2 60524639 60524658 60524655 +
ttattgaagctatagatctc

SEQ ID NO: 166755 - DNA, 20 bp, Artificial Sequence
  Synthetic oligonucleotide; GAG chr2 60524641 60524660 60524657 +
attgaagctatagatctcaa

SEQ ID NO: 166756 - DNA, 20 bp, Artificial Sequence
  Synthetic oligonucleotide; AAG chr2 60524658 60524677 60524674 +
caagagtgcctgtgtcctac

SEQ ID NO: 166757 - DNA, 20 bp, Artificial Sequence
  Synthetic oligonucleotide; AGG chr2 60524659 60524678 60524675 +
aagagtgcctgtgtcctaca

SEQ ID NO: 166758 - DNA, 20 bp, Artificial Sequence
  Synthetic oligonucleotide; GAG chr2 60524701 60524720 60524717 +
attcatttgccccttactct

SEQ ID NO: 166759 - DNA, 20 bp, Artificial Sequence
  Synthetic oligonucleotide; TGG chr2 60524708 60524727 60524724 +
tgccccttactctgagcaca

SEQ ID NO: 166760 - DNA, 20 bp, Artificial Sequence
  Synthetic oligonucleotide; GGG chr2 60524709 60524728 60524725 +
gccccttactctgagcacat

SEQ ID NO: 166761 - DNA, 20 bp, Artificial Sequence
  Synthetic oligonucleotide; AAG chr2 60524719 60524738 60524735 +
ctgagcacatgggataataa

SEQ ID NO: 166762 - DNA, 20 bp, Artificial Sequence
  Synthetic oligonucleotide; AAG chr2 60524723 60524742 60524739 +
gcacatgggataataaaaga

SEQ ID NO: 166763 - DNA, 20 bp, Artificial Sequence
  Synthetic oligonucleotide; TAG chr2 60524729 60524748 60524745 +
gggataataaaagaaagttt

SEQ ID NO: 166764 - DNA, 20 bp, Artificial Sequence
  Synthetic oligonucleotide; AAG chr2 60524746 60524765 60524762 +
ttttagatcatcattatcca

SEQ ID NO: 166765 - DNA, 20 bp, Artificial Sequence
  Synthetic oligonucleotide; AGG chr2 60524747 60524766 60524763 +
tttagatcatcattatccaa

SEQ ID NO: 166766 - DNA, 20 bp, Artificial Sequence
  Synthetic oligonucleotide; CAG chr2 60524771 60524790 60524787 +
taactttgaatgcccttttt

SEQ ID NO: 166767 - DNA, 20 bp, Artificial Sequence
  Synthetic oligonucleotide; TGG chr2 60524820 60524839 60524836 +
cattcaatgccacatataaa

SEQ ID NO: 166768 - DNA, 20 bp, Artificial Sequence
  Synthetic oligonucleotide; TGG chr2 60524830 60524849 60524846 +
cacatataaatggtatttgc

SEQ ID NO: 166769 - DNA, 20 bp, Artificial Sequence
  Synthetic oligonucleotide; CAG chr2 60524834 60524853 60524850 +
tataaatggtatttgctgga

SEQ ID NO: 166770 - DNA, 20 bp, Artificial Sequence
  Synthetic oligonucleotide; TGG chr2 60524839 60524858 60524855 +
atggtatttgctggacagtg

SEQ ID NO: 166771 - DNA, 20 bp, Artificial Sequence
  Synthetic oligonucleotide; CAG chr2 60524846 60524865 60524862 +
ttgctggacagtgtggaaaa

SEQ ID NO: 166772 - DNA, 20 bp, Artificial Sequence
  Synthetic oligonucleotide; AAG chr2 60524864 60524883 60524880 +
aacagaaacatccgtgctaa

SEQ ID NO: 166773 - DNA, 20 bp, Artificial Sequence
  Synthetic oligonucleotide; TGG chr2 60524871 60524890 60524887 +
acatccgtgctaaaagccaa

SEQ ID NO: 166774 - DNA, 20 bp, Artificial Sequence
  Synthetic oligonucleotide; AAG chr2 60524882 60524901 60524898 +
aaaagccaatggtaaacacc

SEQ ID NO: 166775 - DNA, 20 bp, Artificial Sequence
  Synthetic oligonucleotide; TGG chr2 60524894 60524913 60524910 +
taaacaccaagtttaaaaaa

SEQ ID NO: 166776 - DNA, 20 bp, Artificial Sequence
  Synthetic oligonucleotide; AAG chr2 60524903 60524922 60524919 +
agtttaaaaaatggattgca

SEQ ID NO: 166777 - DNA, 20 bp, Artificial Sequence
  Synthetic oligonucleotide; CAG chr2 60524917 60524936 60524933 +
attgcaaagatcgcatgtcc

SEQ ID NO: 166778 - DNA, 20 bp, Artificial Sequence
  Synthetic oligonucleotide; CAG chr2 60524922 60524941 60524938 +
aaagatcgcatgtcccagaa

SEQ ID NO: 166779 - DNA, 20 bp, Artificial Sequence
  Synthetic oligonucleotide; AGG chr2 60524923 60524942 60524939 +
aagatcgcatgtcccagaac

SEQ ID NO: 166780 - DNA, 20 bp, Artificial Sequence
  Synthetic oligonucleotide; AAG chr2 60524958 60524977 60524974 +
acctacatgatgaataaaaa

SEQ ID NO: 166781 - DNA, 20 bp, Artificial Sequence
  Synthetic oligonucleotide; CAG chr2 60524998 60525017 60525014 +
tatgctgtcttcaacactaa

SEQ ID NO: 166782 - DNA, 20 bp, Artificial Sequence
  Synthetic oligonucleotide; GAG chr2 60525000 60525019 60525016 +
tgctgtcttcaacactaaca

SEQ ID NO: 166783 - DNA, 20 bp, Artificial Sequence
  Synthetic oligonucleotide; AGG chr2 60525001 60525020 60525017 +
gctgtcttcaacactaacag

SEQ ID NO: 166784 - DNA, 20 bp, Artificial Sequence
  Synthetic oligonucleotide; GGG chr2 60525002 60525021 60525018 +
ctgtcttcaacactaacaga

SEQ ID NO: 166785 - DNA, 20 bp, Artificial Sequence
  Synthetic oligonucleotide; GAG chr2 60525004 60525023 60525020 +
gtcttcaacactaacagagg

SEQ ID NO: 166786 - DNA, 20 bp, Artificial Sequence
  Synthetic oligonucleotide; GAG chr2 60525006 60525025 60525022 +
cttcaacactaacagaggga

SEQ ID NO: 166787 - DNA, 20 bp, Artificial Sequence
  Synthetic oligonucleotide; CGG chr2 60525029 60525048 60525045 +
ttcttctaaacatgttgcat

SEQ ID NO: 166788 - DNA, 20 bp, Artificial Sequence
  Synthetic oligonucleotide; AAG chr2 60525043 60525062 60525059 +
ttgcatcggatgcctttaac

SEQ ID NO: 166789 - DNA, 20 bp, Artificial Sequence
  Synthetic oligonucleotide; CAG chr2 60525062 60525081 60525078 +
caagcaaaaattcctaactc

SEQ ID NO: 166790 - DNA, 20 bp, Artificial Sequence
  Synthetic oligonucleotide; AGG chr2 60525063 60525082 60525079 +
aagcaaaaattcctaactcc

SEQ ID NO: 166791 - DNA, 20 bp, Artificial Sequence
  Synthetic oligonucleotide; GGG chr2 60525064 60525083 60525080 +
agcaaaaattcctaactcca

SEQ ID NO: 166792 - DNA, 20 bp, Artificial Sequence
  Synthetic oligonucleotide; CAG chr2 60525070 60525089 60525086 +
aattcctaactccagggact

SEQ ID NO: 166793 - DNA, 20 bp, Artificial Sequence
  Synthetic oligonucleotide; TAG chr2 60525079 60525098 60525095 +
ctccagggactcagcatatg

SEQ ID NO: 166794 - DNA, 20 bp, Artificial Sequence
  Synthetic oligonucleotide; AGG chr2 60525080 60525099 60525096 +
tccagggactcagcatatgt

SEQ ID NO: 166795 - DNA, 20 bp, Artificial Sequence
  Synthetic oligonucleotide; CAG chr2 60525094 60525113 60525110 +
atatgtaggctatgtccata

SEQ ID NO: 166796 - DNA, 20 bp, Artificial Sequence
  Synthetic oligonucleotide; GAG chr2 60525096 60525115 60525112 +
atgtaggctatgtccataca

SEQ ID NO: 166797 - DNA, 20 bp, Artificial Sequence
  Synthetic oligonucleotide; CAG chr2 60525103 60525122 60525119 +
ctatgtccatacagagaaac

SEQ ID NO: 166798 - DNA, 20 bp, Artificial Sequence
  Synthetic oligonucleotide; TGG chr2 60525110 60525129 60525126 +
catacagagaaaccagcttt

SEQ ID NO: 166799 - DNA, 20 bp, Artificial Sequence
  Synthetic oligonucleotide; GGG chr2 60525111 60525130 60525127 +
atacagagaaaccagctttt

SEQ ID NO: 166800 - DNA, 20 bp, Artificial Sequence
  Synthetic oligonucleotide; GAG chr2 60525113 60525132 60525129 +
acagagaaaccagcttttgg

SEQ ID NO: 166801 - DNA, 20 bp, Artificial Sequence
  Synthetic oligonucleotide; AGG chr2 60525114 60525133 60525130 +
cagagaaaccagcttttggg

SEQ ID NO: 166802 - DNA, 20 bp, Artificial Sequence
  Synthetic oligonucleotide; GAG chr2 60525116 60525135 60525132 +
gagaaaccagcttttgggag

SEQ ID NO: 166803 - DNA, 20 bp, Artificial Sequence
  Synthetic oligonucleotide; AGG chr2 60525117 60525136 60525133 +
agaaaccagcttttgggagg

SEQ ID NO: 166804 - DNA, 20 bp, Artificial Sequence
  Synthetic oligonucleotide; AAG chr2 60525120 60525139 60525136 +
aaccagcttttgggaggagg

SEQ ID NO: 166805 - DNA, 20 bp, Artificial Sequence
  Synthetic oligonucleotide; AGG chr2 60525121 60525140 60525137 +
accagcttttgggaggagga

SEQ ID NO: 166806 - DNA, 20 bp, Artificial Sequence
  Synthetic oligonucleotide; GAG chr2 60525123 60525142 60525139 +
cagcttttgggaggaggaag

SEQ ID NO: 166807 - DNA, 20 bp, Artificial Sequence
  Synthetic oligonucleotide; AGG chr2 60525124 60525143 60525140 +
agcttttgggaggaggaagg

SEQ ID NO: 166808 - DNA, 20 bp, Artificial Sequence
  Synthetic oligonucleotide; CAG chr2 60525143 60525162 60525159 +
gaggaaaatatcactgaatt

SEQ ID NO: 166809 - DNA, 20 bp, Artificial Sequence
  Synthetic oligonucleotide; CAG chr2 60525147 60525166 60525163 +
aaaatatcactgaattcagt

SEQ ID NO: 166810 - DNA, 20 bp, Artificial Sequence
  Synthetic oligonucleotide; TGG chr2 60525170 60525189 60525186 +
ttaattgaatttaaaatacc

SEQ ID NO: 166811 - DNA, 20 bp, Artificial Sequence
  Synthetic oligonucleotide; TAG chr2 60525223 60525242 60525239 +
aacgtacttctattttgatg

SEQ ID NO: 166812 - DNA, 20 bp, Artificial Sequence
  Synthetic oligonucleotide; AAG chr2 60525242 60525261 60525258 +
gtagttacatttgcccaaaa

SEQ ID NO: 166813 - DNA, 20 bp, Artificial Sequence
  Synthetic oligonucleotide; TGG chr2 60525251 60525270 60525267 +
tttgcccaaaaaagcaaact

SEQ ID NO: 166814 - DNA, 20 bp, Artificial Sequence
  Synthetic oligonucleotide; GAG chr2 60525253 60525272 60525269 +
tgcccaaaaaagcaaacttg

SEQ ID NO: 166815 - DNA, 20 bp, Artificial Sequence
  Synthetic oligonucleotide; TGG chr2 60525276 60525295 60525292 +
aaaatacacattacattctt

SEQ ID NO: 166816 - DNA, 20 bp, Artificial Sequence
  Synthetic oligonucleotide; GAG chr2 60525278 60525297 60525294 +
aatacacattacattctttg

SEQ ID NO: 166817 - DNA, 20 bp, Artificial Sequence
  Synthetic oligonucleotide; CAG chr2 60525295 60525314 60525311 +
ttggagtttttcaaaaaaaa

SEQ ID NO: 166818 - DNA, 20 bp, Artificial Sequence
  Synthetic oligonucleotide; AAG chr2 60525312 60525331 60525328 +
aaacagcttgcaacaattaa

SEQ ID NO: 166819 - DNA, 20 bp, Artificial Sequence
  Synthetic oligonucleotide; TGG chr2 60525316 60525335 60525332 +
agcttgcaacaattaaaaga

SEQ ID NO: 166820 - DNA, 20 bp, Artificial Sequence
  Synthetic oligonucleotide; GAG chr2 60525318 60525337 60525334 +
cttgcaacaattaaaagatg

SEQ ID NO: 166821 - DNA, 20 bp, Artificial Sequence
  Synthetic oligonucleotide; AAG chr2 60525330 60525349 60525346 +
aaaagatggagaaatcttat

SEQ ID NO: 166822 - DNA, 20 bp, Artificial Sequence
  Synthetic oligonucleotide; AGG chr2 60525331 60525350 60525347 +
aaagatggagaaatcttata

SEQ ID NO: 166823 - DNA, 20 bp, Artificial Sequence
  Synthetic oligonucleotide; TGG chr2 60525335 60525354 60525351 +
atggagaaatcttataaggc

SEQ ID NO: 166824 - DNA, 20 bp, Artificial Sequence
  Synthetic oligonucleotide; CAG chr2 60525390 60525409 60525406 +
ctgcacttcaattttgcttc

SEQ ID NO: 166825 - DNA, 20 bp, Artificial Sequence
  Synthetic oligonucleotide; AAG chr2 60525401 60525420 60525417 +
ttttgcttccagcaatttga

SEQ ID NO: 166826 - DNA, 20 bp, Artificial Sequence
  Synthetic oligonucleotide; AAG chr2 60525412 60525431 60525428 +
gcaatttgaaagatgccttt

SEQ ID NO: 166827 - DNA, 20 bp, Artificial Sequence
  Synthetic oligonucleotide; TGG chr2 60525423 60525442 60525439 +
gatgcctttaagctttctgt

SEQ ID NO: 166828 - DNA, 20 bp, Artificial Sequence
  Synthetic oligonucleotide; GGG chr2 60525424 60525443 60525440 +
atgcctttaagctttctgtt

SEQ ID NO: 166829 - DNA, 20 bp, Artificial Sequence
  Synthetic oligonucleotide; GGG chr2 60525425 60525444 60525441 +
tgcctttaagctttctgttg

SEQ ID NO: 166830 - DNA, 20 bp, Artificial Sequence
  Synthetic oligonucleotide; AAG chr2 60525440 60525459 60525456 +
tgttggggaatcacgaatcc

SEQ ID NO: 166831 - DNA, 20 bp, Artificial Sequence
  Synthetic oligonucleotide; TAG chr2 60525458 60525477 60525474 +
ccaagccttaatctccacca

SEQ ID NO: 166832 - DNA, 20 bp, Artificial Sequence
  Synthetic oligonucleotide; GAG chr2 60525472 60525491 60525488 +
ccaccatagcttccatcttt

SEQ ID NO: 166833 - DNA, 20 bp, Artificial Sequence
  Synthetic oligonucleotide; AGG chr2 60525473 60525492 60525489 +
caccatagcttccatctttg

SEQ ID NO: 166834 - DNA, 20 bp, Artificial Sequence
  Synthetic oligonucleotide; AAG chr2 60525482 60525501 60525498 +
ttccatctttgaggcaaatc

SEQ ID NO: 166835 - DNA, 20 bp, Artificial Sequence
  Synthetic oligonucleotide; CAG chr2 60525508 60525527 60525524 +
ataatattctgctgtctttg

SEQ ID NO: 166836 - DNA, 20 bp, Artificial Sequence
  Synthetic oligonucleotide; AGG chr2 60525509 60525528 60525525 +
taatattctgctgtctttgc

SEQ ID NO: 166837 - DNA, 20 bp, Artificial Sequence
  Synthetic oligonucleotide; GAG chr2 60525513 60525532 60525529 +
attctgctgtctttgcaggt

SEQ ID NO: 166838 - DNA, 20 bp, Artificial Sequence
  Synthetic oligonucleotide; CAG chr2 60525523 60525542 60525539 +
ctttgcaggtgagccccatt

SEQ ID NO: 166839 - DNA, 20 bp, Artificial Sequence
  Synthetic oligonucleotide; TAG chr2 60525530 60525549 60525546 +
ggtgagccccattcagcaac

SEQ ID NO: 166840 - DNA, 20 bp, Artificial Sequence
  Synthetic oligonucleotide; TAG chr2 60525544 60525563 60525560 +
agcaactagattccaaaaaa

SEQ ID NO: 166841 - DNA, 20 bp, Artificial Sequence
  Synthetic oligonucleotide; CAG chr2 60525547 60525566 60525563 +
aactagattccaaaaaatag

SEQ ID NO: 166842 - DNA, 20 bp, Artificial Sequence
  Synthetic oligonucleotide; AGG chr2 60525548 60525567 60525564 +
actagattccaaaaaatagc

SEQ ID NO: 166843 - DNA, 20 bp, Artificial Sequence
  Synthetic oligonucleotide; GGG chr2 60525549 60525568 60525565 +
ctagattccaaaaaatagca

SEQ ID NO: 166844 - DNA, 20 bp, Artificial Sequence
  Synthetic oligonucleotide; GAG chr2 60525551 60525570 60525567 +
agattccaaaaaatagcagg

SEQ ID NO: 166845 - DNA, 20 bp, Artificial Sequence
  Synthetic oligonucleotide; TGG chr2 60525559 60525578 60525575 +
aaaaatagcagggagaaaac

SEQ ID NO: 166846 - DNA, 20 bp, Artificial Sequence
  Synthetic oligonucleotide; CAG chr2 60525563 60525582 60525579 +
atagcagggagaaaactggt

SEQ ID NO: 166847 - DNA, 20 bp, Artificial Sequence
  Synthetic oligonucleotide; TGG chr2 60525566 60525585 60525582 +
gcagggagaaaactggtcag

SEQ ID NO: 166848 - DNA, 20 bp, Artificial Sequence
  Synthetic oligonucleotide; TAG chr2 60525583 60525602 60525599 +
cagtggtgttcatactatgc

SEQ ID NO: 166849 - DNA, 20 bp, Artificial Sequence
  Synthetic oligonucleotide; TGG chr2 60525593 60525612 60525609 +
catactatgctagaacatca

SEQ ID NO: 166850 - DNA, 20 bp, Artificial Sequence
  Synthetic oligonucleotide; GGG chr2 60525594 60525613 60525610 +
atactatgctagaacatcat

SEQ ID NO: 166851 - DNA, 20 bp, Artificial Sequence
  Synthetic oligonucleotide; GGG chr2 60525595 60525614 60525611 +
tactatgctagaacatcatg

SEQ ID NO: 166852 - DNA, 20 bp, Artificial Sequence
  Synthetic oligonucleotide; TAG chr2 60525601 60525620 60525617 +
gctagaacatcatggggact

SEQ ID NO: 166853 - DNA, 20 bp, Artificial Sequence
  Synthetic oligonucleotide; GAG chr2 60525603 60525622 60525619 +
tagaacatcatggggactta

SEQ ID NO: 166854 - DNA, 20 bp, Artificial Sequence
  Synthetic oligonucleotide; CAG chr2 60525613 60525632 60525629 +
tggggacttagagacccacc

SEQ ID NO: 166855 - DNA, 20 bp, Artificial Sequence
  Synthetic oligonucleotide; AAG chr2 60525644 60525663 60525660 +
atctattttacctactttac

SEQ ID NO: 166856 - DNA, 20 bp, Artificial Sequence
  Synthetic oligonucleotide; AAG chr2 60525649 60525668 60525665 +
ttttacctactttacaagac

SEQ ID NO: 166857 - DNA, 20 bp, Artificial Sequence
  Synthetic oligonucleotide; AGG chr2 60525650 60525669 60525666 +
tttacctactttacaagaca

SEQ ID NO: 166858 - DNA, 20 bp, Artificial Sequence
  Synthetic oligonucleotide; CAG chr2 60525666 60525685 60525682 +
gacaaggaaacaaatgctaa

SEQ ID NO: 166859 - DNA, 20 bp, Artificial Sequence
  Synthetic oligonucleotide; AGG chr2 60525667 60525686 60525683 +
acaaggaaacaaatgctaac

SEQ ID NO: 166860 - DNA, 20 bp, Artificial Sequence
  Synthetic oligonucleotide; AAG chr2 60525672 60525691 60525688 +
gaaacaaatgctaacaggtg

SEQ ID NO: 166861 - DNA, 20 bp, Artificial Sequence
  Synthetic oligonucleotide; AGG chr2 60525673 60525692 60525689 +
aaacaaatgctaacaggtga

SEQ ID NO: 166862 - DNA, 20 bp, Artificial Sequence
  Synthetic oligonucleotide; GGG chr2 60525674 60525693 60525690 +
aacaaatgctaacaggtgaa

SEQ ID NO: 166863 - DNA, 20 bp, Artificial Sequence
  Synthetic oligonucleotide; GAG chr2 60525676 60525695 60525692 +
caaatgctaacaggtgaagg

SEQ ID NO: 166864 - DNA, 20 bp, Artificial Sequence
  Synthetic oligonucleotide; CAG chr2 60525691 60525710 60525707 +
gaagggagcccaaaatctca

SEQ ID NO: 166865 - DNA, 20 bp, Artificial Sequence
  Synthetic oligonucleotide; AAG chr2 60525705 60525724 60525721 +
atctcacagcatgatacaat

SEQ ID NO: 166866 - DNA, 20 bp, Artificial Sequence
  Synthetic oligonucleotide; AGG chr2 60525706 60525725 60525722 +
tctcacagcatgatacaata

SEQ ID NO: 166867 - DNA, 20 bp, Artificial Sequence
  Synthetic oligonucleotide; GGG chr2 60525707 60525726 60525723 +
ctcacagcatgatacaataa

SEQ ID NO: 166868 - DNA, 20 bp, Artificial Sequence
  Synthetic oligonucleotide; CAG chr2 60525711 60525730 60525727 +
cagcatgatacaataagggt

SEQ ID NO: 166869 - DNA, 20 bp, Artificial Sequence
  Synthetic oligonucleotide; CAG chr2 60525718 60525737 60525734 +
atacaataagggtcagaacc

SEQ ID NO: 166870 - DNA, 20 bp, Artificial Sequence
  Synthetic oligonucleotide; AGG chr2 60525719 60525738 60525735 +
tacaataagggtcagaaccc

SEQ ID NO: 166871 - DNA, 20 bp, Artificial Sequence
  Synthetic oligonucleotide; TGG chr2 60525727 60525746 60525743 +
gggtcagaacccaggtgtcc

SEQ ID NO: 166872 - DNA, 20 bp, Artificial Sequence
  Synthetic oligonucleotide; CAG chr2 60525734 60525753 60525750 +
aacccaggtgtcctggtttt

SEQ ID NO: 166873 - DNA, 20 bp, Artificial Sequence
  Synthetic oligonucleotide; CAG chr2 60525739 60525758 60525755 +
aggtgtcctggttttcagat

SEQ ID NO: 166874 - DNA, 20 bp, Artificial Sequence
  Synthetic oligonucleotide; AAG chr2 60525762 60525781 60525778 +
tgtctctctgttaacactaa

SEQ ID NO: 166875 - DNA, 20 bp, Artificial Sequence
  Synthetic oligonucleotide; AAG chr2 60525768 60525787 60525784 +
tctgttaacactaaaagtca

SEQ ID NO: 166876 - DNA, 20 bp, Artificial Sequence
  Synthetic oligonucleotide; TGG chr2 60525773 60525792 60525789 +
taacactaaaagtcaaagtt

SEQ ID NO: 166877 - DNA, 20 bp, Artificial Sequence
  Synthetic oligonucleotide; TGG chr2 60525779 60525798 60525795 +
taaaagtcaaagtttggttc

SEQ ID NO: 166878 - DNA, 20 bp, Artificial Sequence
  Synthetic oligonucleotide; AAG chr2 60525800 60525819 60525816 +
ggaaaatctgtaatgcccaa

SEQ ID NO: 166879 - DNA, 20 bp, Artificial Sequence
  Synthetic oligonucleotide; CAG chr2 60525827 60525846 60525843 +
taaatgccctccccccaaac

SEQ ID NO: 166880 - DNA, 20 bp, Artificial Sequence
  Synthetic oligonucleotide; TGG chr2 60525833 60525852 60525849 +
ccctccccccaaaccagtct

SEQ ID NO: 166881 - DNA, 20 bp, Artificial Sequence
  Synthetic oligonucleotide; TGG chr2 60525847 60525866 60525863 +
cagtcttggtaatttctcca

SEQ ID NO: 166882 - DNA, 20 bp, Artificial Sequence
  Synthetic oligonucleotide; CAG chr2 60525856 60525875 60525872 +
taatttctccatggctttca

SEQ ID NO: 166883 - DNA, 20 bp, Artificial Sequence
  Synthetic oligonucleotide; AAG chr2 60525859 60525878 60525875 +
tttctccatggctttcacag

SEQ ID NO: 166884 - DNA, 20 bp, Artificial Sequence
  Synthetic oligonucleotide; AGG chr2 60525860 60525879 60525876 +
ttctccatggctttcacaga

SEQ ID NO: 166885 - DNA, 20 bp, Artificial Sequence
  Synthetic oligonucleotide; GGG chr2 60525861 60525880 60525877 +
tctccatggctttcacagaa

SEQ ID NO: 166886 - DNA, 20 bp, Artificial Sequence
  Synthetic oligonucleotide; TGG chr2 60525876 60525895 60525892 +
cagaagggtaaatgtctact

SEQ ID NO: 166887 - DNA, 20 bp, Artificial Sequence
  Synthetic oligonucleotide; AAG chr2 60525879 60525898 60525895 +
aagggtaaatgtctacttgg

SEQ ID NO: 166888 - DNA, 20 bp, Artificial Sequence
  Synthetic oligonucleotide; AGG chr2 60525880 60525899 60525896 +
agggtaaatgtctacttgga

SEQ ID NO: 166889 - DNA, 20 bp, Artificial Sequence
  Synthetic oligonucleotide; TGG chr2 60525925 60525944 60525941 +
cttcttccttcattcgtgtt

SEQ ID NO: 166890 - DNA, 20 bp, Artificial Sequence
  Synthetic oligonucleotide; TAG chr2 60525938 60525957 60525954 +
tcgtgtttggtaatcaaaaa

SEQ ID NO: 166891 - DNA, 20 bp, Artificial Sequence
  Synthetic oligonucleotide; TGG chr2 60525961 60525980 60525977 +
tttatcataatgctctcaat

SEQ ID NO: 166892 - DNA, 20 bp, Artificial Sequence
  Synthetic oligonucleotide; AAG chr2 60525964 60525983 60525980 +
atcataatgctctcaattgg

SEQ ID NO: 166893 - DNA, 20 bp, Artificial Sequence
  Synthetic oligonucleotide; AGG chr2 60525965 60525984 60525981 +
tcataatgctctcaattgga

SEQ ID NO: 166894 - DNA, 20 bp, Artificial Sequence
  Synthetic oligonucleotide; CAG chr2 60525979 60525998 60525995 +
attggaaggtcttcatacta

SEQ ID NO: 166895 - DNA, 20 bp, Artificial Sequence
  Synthetic oligonucleotide; AGG chr2 60525980 60525999 60525996 +
ttggaaggtcttcatactac

SEQ ID NO: 166896 - DNA, 20 bp, Artificial Sequence
  Synthetic oligonucleotide; CAG chr2 60525983 60526002 60525999 +
gaaggtcttcatactacagg

SEQ ID NO: 166897 - DNA, 20 bp, Artificial Sequence
  Synthetic oligonucleotide; TGG chr2 60526000 60526019 60526016 +
aggcagatactgttattttc

SEQ ID NO: 166898 - DNA, 20 bp, Artificial Sequence
  Synthetic oligonucleotide; TAG chr2 60526003 60526022 60526019 +
cagatactgttattttctgg

SEQ ID NO: 166899 - DNA, 20 bp, Artificial Sequence
  Synthetic oligonucleotide; GAG chr2 60526005 60526024 60526021 +
gatactgttattttctggta

SEQ ID NO: 166900 - DNA, 20 bp, Artificial Sequence
  Synthetic oligonucleotide; AGG chr2 60526006 60526025 60526022 +
atactgttattttctggtag

SEQ ID NO: 166901 - DNA, 20 bp, Artificial Sequence
  Synthetic oligonucleotide; TGG chr2 60526010 60526029 60526026 +
tgttattttctggtagagga

SEQ ID NO: 166902 - DNA, 20 bp, Artificial Sequence
  Synthetic oligonucleotide; CAG chr2 60526013 60526032 60526029 +
tattttctggtagaggatgg

SEQ ID NO: 166903 - DNA, 20 bp, Artificial Sequence
  Synthetic oligonucleotide; CAG chr2 60526016 60526035 60526032 +
tttctggtagaggatggcag

SEQ ID NO: 166904 - DNA, 20 bp, Artificial Sequence
  Synthetic oligonucleotide; AGG chr2 60526017 60526036 60526033 +
ttctggtagaggatggcagc

SEQ ID NO: 166905 - DNA, 20 bp, Artificial Sequence
  Synthetic oligonucleotide; GGG chr2 60526018 60526037 60526034 +
tctggtagaggatggcagca

SEQ ID NO: 166906 - DNA, 20 bp, Artificial Sequence
  Synthetic oligonucleotide; TGG chr2 60526022 60526041 60526038 +
gtagaggatggcagcagggc

SEQ ID NO: 166907 - DNA, 20 bp, Artificial Sequence
  Synthetic oligonucleotide; GGG chr2 60526023 60526042 60526039 +
tagaggatggcagcagggct

SEQ ID NO: 166908 - DNA, 20 bp, Artificial Sequence
  Synthetic oligonucleotide; AAG chr2 60526030 60526049 60526046 +
tggcagcagggctgggaaaa

SEQ ID NO: 166909 - DNA, 20 bp, Artificial Sequence
  Synthetic oligonucleotide; TGG chr2 60526037 60526056 60526053 +
agggctgggaaaaaagaatg

SEQ ID NO: 166910 - DNA, 20 bp, Artificial Sequence
  Synthetic oligonucleotide; CAG chr2 60526054 60526073 60526070 +
atgtggtttttttctaacca

SEQ ID NO: 166911 - DNA, 20 bp, Artificial Sequence
  Synthetic oligonucleotide; TAG chr2 60526057 60526076 60526073 +
tggtttttttctaaccacag

SEQ ID NO: 166912 - DNA, 20 bp, Artificial Sequence
  Synthetic oligonucleotide; AGG chr2 60526058 60526077 60526074 +
ggtttttttctaaccacagt

SEQ ID NO: 166913 - DNA, 20 bp, Artificial Sequence
  Synthetic oligonucleotide; TAG chr2 60526089 60526108 60526105 +
ataacaatgatttcactttc

SEQ ID NO: 166914 - DNA, 20 bp, Artificial Sequence
  Synthetic oligonucleotide; CAG chr2 60526100 60526119 60526116 +
ttcactttctagatataaaa

SEQ ID NO: 166915 - DNA, 20 bp, Artificial Sequence
  Synthetic oligonucleotide; AGG chr2 60526101 60526120 60526117 +
tcactttctagatataaaac

SEQ ID NO: 166916 - DNA, 20 bp, Artificial Sequence
  Synthetic oligonucleotide; TGG chr2 60526106 60526125 60526122 +
ttctagatataaaacaggca

SEQ ID NO: 166917 - DNA, 20 bp, Artificial Sequence
  Synthetic oligonucleotide; TAG chr2 60526138 60526157 60526154 +
ccctgaacttctgcaaaatc

SEQ ID NO: 166918 - DNA, 20 bp, Artificial Sequence
  Synthetic oligonucleotide; CAG chr2 60526154 60526173 60526170 +
aatctagatttgatcaaatt

SEQ ID NO: 166919 - DNA, 20 bp, Artificial Sequence
  Synthetic oligonucleotide; TGG chr2 60526161 60526180 60526177 +
atttgatcaaattcagaaac

SEQ ID NO: 166920 - DNA, 20 bp, Artificial Sequence
  Synthetic oligonucleotide; CAG chr2 60526179 60526198 60526195 +
actggtgatttgatcaaatt

SEQ ID NO: 166921 - DNA, 20 bp, Artificial Sequence
  Synthetic oligonucleotide; TGG chr2 60526194 60526213 60526210 +
aaattcagaatcccatattt

SEQ ID NO: 166922 - DNA, 20 bp, Artificial Sequence
  Synthetic oligonucleotide; GGG chr2 60526195 60526214 60526211 +
aattcagaatcccatatttt

SEQ ID NO: 166923 - DNA, 20 bp, Artificial Sequence
  Synthetic oligonucleotide; TAG chr2 60526209 60526228 60526225 +
tattttgggatgatgtgttc

SEQ ID NO: 166924 - DNA, 20 bp, Artificial Sequence
  Synthetic oligonucleotide; CAG chr2 60526212 60526231 60526228 +
tttgggatgatgtgttctag

SEQ ID NO: 166925 - DNA, 20 bp, Artificial Sequence
  Synthetic oligonucleotide; AAG chr2 60526216 60526235 60526232 +
ggatgatgtgttctagcaga

SEQ ID NO: 166926 - DNA, 20 bp, Artificial Sequence
  Synthetic oligonucleotide; TGG chr2 60526223 60526242 60526239 +
gtgttctagcagaaagctat

SEQ ID NO: 166927 - DNA, 20 bp, Artificial Sequence
  Synthetic oligonucleotide; TGG chr2 60526227 60526246 60526243 +
tctagcagaaagctattggt

SEQ ID NO: 166928 - DNA, 20 bp, Artificial Sequence
  Synthetic oligonucleotide; AAG chr2 60526255 60526274 60526271 +
ttttgctctttcttccccaa

SEQ ID NO: 166929 - DNA, 20 bp, Artificial Sequence
  Synthetic oligonucleotide; TAG chr2 60526267 60526286 60526283 +
ttccccaaaagatttttaaa

SEQ ID NO: 166930 - DNA, 20 bp, Artificial Sequence
  Synthetic oligonucleotide; AAG chr2 60526283 60526302 60526299 +
taaatagttttcatctttaa

SEQ ID NO: 166931 - DNA, 20 bp, Artificial Sequence
  Synthetic oligonucleotide; AGG chr2 60526284 60526303 60526300 +
aaatagttttcatctttaaa

SEQ ID NO: 166932 - DNA, 20 bp, Artificial Sequence
  Synthetic oligonucleotide; CAG chr2 60526297 60526316 60526313 +
ctttaaaaggatttcaactt

SEQ ID NO: 166933 - DNA, 20 bp, Artificial Sequence
  Synthetic oligonucleotide; AAG chr2 60526315 60526334 60526331 +
ttcagattgtgcccacgcca

SEQ ID NO: 166934 - DNA, 20 bp, Artificial Sequence
  Synthetic oligonucleotide; AAG chr2 60526346 60526365 60526362 +
catctaatcaataaataaat

SEQ ID NO: 166935 - DNA, 20 bp, Artificial Sequence
  Synthetic oligonucleotide; AAG chr2 60526356 60526375 60526372 +
ataaataaataagacaaaca

SEQ ID NO: 166936 - DNA, 20 bp, Artificial Sequence
  Synthetic oligonucleotide; CAG chr2 60526359 60526378 60526375 +
aataaataagacaaacaaag

SEQ ID NO: 166937 - DNA, 20 bp, Artificial Sequence
  Synthetic oligonucleotide; TGG chr2 60526384 60526403 60526400 +
tatgtttatcctttaccatt

SEQ ID NO: 166938 - DNA, 20 bp, Artificial Sequence
  Synthetic oligonucleotide; GGG chr2 60526385 60526404 60526401 +
atgtttatcctttaccattt

SEQ ID NO: 166939 - DNA, 20 bp, Artificial Sequence
  Synthetic oligonucleotide; AAG chr2 60526388 60526407 60526404 +
tttatcctttaccatttggg

SEQ ID NO: 166940 - DNA, 20 bp, Artificial Sequence
  Synthetic oligonucleotide; CAG chr2 60526407 60526426 60526423 +
gaagtgtacattaattactg

SEQ ID NO: 166941 - DNA, 20 bp, Artificial Sequence
  Synthetic oligonucleotide; CAG chr2 60526449 60526468 60526465 +
cccccaccccctctgcatcg

SEQ ID NO: 166942 - DNA, 20 bp, Artificial Sequence
  Synthetic oligonucleotide; CAG chr2 60526453 60526472 60526469 +
caccccctctgcatcgcaga

SEQ ID NO: 166943 - DNA, 20 bp, Artificial Sequence
  Synthetic oligonucleotide; CAG chr2 60526456 60526475 60526472 +
cccctctgcatcgcagacag

SEQ ID NO: 166944 - DNA, 20 bp, Artificial Sequence
  Synthetic oligonucleotide; AAG chr2 60526466 60526485 60526482 +
tcgcagacagcagtgctcaa

SEQ ID NO: 166945 - DNA, 20 bp, Artificial Sequence
  Synthetic oligonucleotide; AGG chr2 60526467 60526486 60526483 +
cgcagacagcagtgctcaaa

SEQ ID NO: 166946 - DNA, 20 bp, Artificial Sequence
  Synthetic oligonucleotide; GGG chr2 60526468 60526487 60526484 +
gcagacagcagtgctcaaaa

SEQ ID NO: 166947 - DNA, 20 bp, Artificial Sequence
  Synthetic oligonucleotide; CGG chr2 60526491 60526510 60526507 +
tccgcaaaataaaaatgtgt

SEQ ID NO: 166948 - DNA, 20 bp, Artificial Sequence
  Synthetic oligonucleotide; GGG chr2 60526492 60526511 60526508 +
ccgcaaaataaaaatgtgtc

SEQ ID NO: 166949 - DNA, 20 bp, Artificial Sequence
  Synthetic oligonucleotide; TGG chr2 60526503 60526522 60526519 +
aaatgtgtcgggtaattaaa

SEQ ID NO: 166950 - DNA, 20 bp, Artificial Sequence
  Synthetic oligonucleotide; GGG chr2 60526504 60526523 60526520 +
aatgtgtcgggtaattaaat

SEQ ID NO: 166951 - DNA, 20 bp, Artificial Sequence
  Synthetic oligonucleotide; TAG chr2 60526517 60526536 60526533 +
attaaatgggtatttataat

SEQ ID NO: 166952 - DNA, 20 bp, Artificial Sequence
  Synthetic oligonucleotide; CAG chr2 60526537 60526556 60526553 +
tagaacttaataatttgcat

SEQ ID NO: 166953 - DNA, 20 bp, Artificial Sequence
  Synthetic oligonucleotide; AGG chr2 60526538 60526557 60526554 +
agaacttaataatttgcatc

SEQ ID NO: 166954 - DNA, 20 bp, Artificial Sequence
  Synthetic oligonucleotide; GGG chr2 60526539 60526558 60526555 +
gaacttaataatttgcatca

SEQ ID NO: 166955 - DNA, 20 bp, Artificial Sequence
  Synthetic oligonucleotide; GAG chr2 60526548 60526567 60526564 +
aatttgcatcagggacaaat

SEQ ID NO: 166956 - DNA, 20 bp, Artificial Sequence
  Synthetic oligonucleotide; CAG chr2 60526567 60526586 60526583 +
tgagctctgattttaatctg

SEQ ID NO: 166957 - DNA, 20 bp, Artificial Sequence
  Synthetic oligonucleotide; TAG chr2 60526576 60526595 60526592 +
attttaatctgcagcgcatt

SEQ ID NO: 166958 - DNA, 20 bp, Artificial Sequence
  Synthetic oligonucleotide; TAG chr2 60526581 60526600 60526597 +
aatctgcagcgcatttagat

SEQ ID NO: 166959 - DNA, 20 bp, Artificial Sequence
  Synthetic oligonucleotide; AAG chr2 60526588 60526607 60526604 +
agcgcatttagattagccca

SEQ ID NO: 166960 - DNA, 20 bp, Artificial Sequence
  Synthetic oligonucleotide; TAG chr2 60526592 60526611 60526608 +
catttagattagcccaaaga

SEQ ID NO: 166961 - DNA, 20 bp, Artificial Sequence
  Synthetic oligonucleotide; TGG chr2 60526605 60526624 60526621 +
ccaaagatagtgtaatttga

SEQ ID NO: 166962 - DNA, 20 bp, Artificial Sequence
  Synthetic oligonucleotide; TAG chr2 60526612 60526631 60526628 +
tagtgtaatttgatggttta

SEQ ID NO: 166963 - DNA, 20 bp, Artificial Sequence
  Synthetic oligonucleotide; AGG chr2 60526613 60526632 60526629 +
agtgtaatttgatggtttat

SEQ ID NO: 166964 - DNA, 20 bp, Artificial Sequence
  Synthetic oligonucleotide; CGG chr2 60526624 60526643 60526640 +
atggtttataggcctcctct

SEQ ID NO: 166965 - DNA, 20 bp, Artificial Sequence
  Synthetic oligonucleotide; AAG chr2 60526643 60526662 60526659 +
tcggattatgaaacaatacc

SEQ ID NO: 166966 - DNA, 20 bp, Artificial Sequence
  Synthetic oligonucleotide; AAG chr2 60526651 60526670 60526667 +
tgaaacaataccaagccttc

SEQ ID NO: 166967 - DNA, 20 bp, Artificial Sequence
  Synthetic oligonucleotide; CAG chr2 60526656 60526675 60526672 +
caataccaagccttcaagtg

SEQ ID NO: 166968 - DNA, 20 bp, Artificial Sequence
  Synthetic oligonucleotide; CAG chr2 60526670 60526689 60526686 +
caagtgcagtgtgtctatgt

SEQ ID NO: 166969 - DNA, 20 bp, Artificial Sequence
  Synthetic oligonucleotide; AGG chr2 60526671 60526690 60526687 +
aagtgcagtgtgtctatgtc

SEQ ID NO: 166970 - DNA, 20 bp, Artificial Sequence
  Synthetic oligonucleotide; GAG chr2 60526673 60526692 60526689 +
gtgcagtgtgtctatgtcag

SEQ ID NO: 166971 - DNA, 20 bp, Artificial Sequence
  Synthetic oligonucleotide; AGG chr2 60526674 60526693 60526690 +
tgcagtgtgtctatgtcagg

SEQ ID NO: 166972 - DNA, 20 bp, Artificial Sequence
  Synthetic oligonucleotide; GGG chr2 60526675 60526694 60526691 +
gcagtgtgtctatgtcagga

SEQ ID NO: 166973 - DNA, 20 bp, Artificial Sequence
  Synthetic oligonucleotide; AAG chr2 60526683 60526702 60526699 +
tctatgtcaggagggtgtta

SEQ ID NO: 166974 - DNA, 20 bp, Artificial Sequence
  Synthetic oligonucleotide; AAG chr2 60526686 60526705 60526702 +
atgtcaggagggtgttaaag

SEQ ID NO: 166975 - DNA, 20 bp, Artificial Sequence
  Synthetic oligonucleotide; AAG chr2 60526689 60526708 60526705 +
tcaggagggtgttaaagaag

SEQ ID NO: 166976 - DNA, 20 bp, Artificial Sequence
  Synthetic oligonucleotide; AAG chr2 60526719 60526738 60526735 +
gaaaatgtttgacaacgtga

SEQ ID NO: 166977 - DNA, 20 bp, Artificial Sequence
  Synthetic oligonucleotide; CAG chr2 60526722 60526741 60526738 +
aatgtttgacaacgtgaaag

SEQ ID NO: 166978 - DNA, 20 bp, Artificial Sequence
  Synthetic oligonucleotide; AAG chr2 60526751 60526770 60526767 +
attacatgacaactgtgtaa

SEQ ID NO: 166979 - DNA, 20 bp, Artificial Sequence
  Synthetic oligonucleotide; AAG chr2 60526771 60526790 60526787 +
aagtcatgatgaaacaaata

SEQ ID NO: 166980 - DNA, 20 bp, Artificial Sequence
  Synthetic oligonucleotide; AGG chr2 60526772 60526791 60526788 +
agtcatgatgaaacaaataa

SEQ ID NO: 166981 - DNA, 20 bp, Artificial Sequence
  Synthetic oligonucleotide; GGG chr2 60526773 60526792 60526789 +
gtcatgatgaaacaaataaa

SEQ ID NO: 166982 - DNA, 20 bp, Artificial Sequence
  Synthetic oligonucleotide; CAG chr2 60526836 60526855 60526852 +
tccctgcgctaatctctgcc

SEQ ID NO: 166983 - DNA, 20 bp, Artificial Sequence
  Synthetic oligonucleotide; AAG chr2 60526852 60526871 60526868 +
tgcccagccaacgcattctt

SEQ ID NO: 166984 - DNA, 20 bp, Artificial Sequence
  Synthetic oligonucleotide; CGG chr2 60526855 60526874 60526871 +
ccagccaacgcattcttaag

SEQ ID NO: 166985 - DNA, 20 bp, Artificial Sequence
  Synthetic oligonucleotide; GGG chr2 60526856 60526875 60526872 +
cagccaacgcattcttaagc

SEQ ID NO: 166986 - DNA, 20 bp, Artificial Sequence
  Synthetic oligonucleotide; GGG chr2 60526857 60526876 60526873 +
agccaacgcattcttaagcg

SEQ ID NO: 166987 - DNA, 20 bp, Artificial Sequence
  Synthetic oligonucleotide; TAG chr2 60526867 60526886 60526883 +
ttcttaagcggggaactact

SEQ ID NO: 166988 - DNA, 20 bp, Artificial Sequence
  Synthetic oligonucleotide; CAG chr2 60526873 60526892 60526889 +
agcggggaactacttagcac

SEQ ID NO: 166989 - DNA, 20 bp, Artificial Sequence
  Synthetic oligonucleotide; AGG chr2 60526874 60526893 60526890 +
gcggggaactacttagcacc

SEQ ID NO: 166990 - DNA, 20 bp, Artificial Sequence
  Synthetic oligonucleotide; TAG chr2 60526895 60526914 60526911 +
ggaacgttgtaaattatcac

SEQ ID NO: 166991 - DNA, 20 bp, Artificial Sequence
  Synthetic oligonucleotide; CAG chr2 60526902 60526921 60526918 +
tgtaaattatcactagtcaa

SEQ ID NO: 166992 - DNA, 20 bp, Artificial Sequence
  Synthetic oligonucleotide; TAG chr2 60526915 60526934 60526931 +
tagtcaacagcattgatttt

SEQ ID NO: 166993 - DNA, 20 bp, Artificial Sequence
  Synthetic oligonucleotide; CAG chr2 60526931 60526950 60526947 +
tttttagtcgacatttcaat

SEQ ID NO: 166994 - DNA, 20 bp, Artificial Sequence
  Synthetic oligonucleotide; AGG chr2 60526932 60526951 60526948 +
ttttagtcgacatttcaatc

SEQ ID NO: 166995 - DNA, 20 bp, Artificial Sequence
  Synthetic oligonucleotide; AAG chr2 60526938 60526957 60526954 +
tcgacatttcaatcaggttg

SEQ ID NO: 166996 - DNA, 20 bp, Artificial Sequence
  Synthetic oligonucleotide; TAG chr2 60526941 60526960 60526957 +
acatttcaatcaggttgaag

SEQ ID NO: 166997 - DNA, 20 bp, Artificial Sequence
  Synthetic oligonucleotide; CGG chr2 60526954 60526973 60526970 +
gttgaagtagaaatactacc

SEQ ID NO: 166998 - DNA, 20 bp, Artificial Sequence
  Synthetic oligonucleotide; CAG chr2 60526966 60526985 60526982 +
atactacccggctcatccaa

SEQ ID NO: 166999 - DNA, 20 bp, Artificial Sequence
  Synthetic oligonucleotide; CAG chr2 60526978 60526997 60526994 +
tcatccaacagcctcttaac

SEQ ID NO: 167000 - DNA, 20 bp, Artificial Sequence
  Synthetic oligonucleotide; GAG chr2 60526995 60527014 60527011 +
aaccagtccactgcccctct

SEQ ID NO: 167001 - DNA, 20 bp, Artificial Sequence
  Synthetic oligonucleotide; AGG chr2 60526996 60527015 60527012 +
accagtccactgcccctctg

SEQ ID NO: 167002 - DNA, 20 bp, Artificial Sequence
  Synthetic oligonucleotide; CGG chr2 60527005 60527024 60527021 +
ctgcccctctgaggtctccc

SEQ ID NO: 167003 - DNA, 20 bp, Artificial Sequence
  Synthetic oligonucleotide; TGG chr2 60527011 60527030 60527027 +
ctctgaggtctccccggtta

SEQ ID NO: 167004 - DNA, 20 bp, Artificial Sequence
  Synthetic oligonucleotide; TAG chr2 60527056 60527075 60527072 +
tcaccattcgatatttattg

SEQ ID NO: 167005 - DNA, 20 bp, Artificial Sequence
  Synthetic oligonucleotide; CAG chr2 60527071 60527090 60527087 +
tattgtagctttgccacatc

SEQ ID NO: 167006 - DNA, 20 bp, Artificial Sequence
  Synthetic oligonucleotide; AGG chr2 60527072 60527091 60527088 +
attgtagctttgccacatcc

SEQ ID NO: 167007 - DNA, 20 bp, Artificial Sequence
  Synthetic oligonucleotide; TGG chr2 60527079 60527098 60527095 +
ctttgccacatccaggcact

SEQ ID NO: 167008 - DNA, 20 bp, Artificial Sequence
  Synthetic oligonucleotide; AAG chr2 60527086 60527105 60527102 +
acatccaggcacttggcctg

SEQ ID NO: 167009 - DNA, 20 bp, Artificial Sequence
  Synthetic oligonucleotide; AGG chr2 60527087 60527106 60527103 +
catccaggcacttggcctga

SEQ ID NO: 167010 - DNA, 20 bp, Artificial Sequence
  Synthetic oligonucleotide; GGG chr2 60527088 60527107 60527104 +
atccaggcacttggcctgaa

SEQ ID NO: 167011 - DNA, 20 bp, Artificial Sequence
  Synthetic oligonucleotide; CGG chr2 60527095 60527114 60527111 +
cacttggcctgaagggtcac

SEQ ID NO: 167012 - DNA, 20 bp, Artificial Sequence
  Synthetic oligonucleotide; TGG chr2 60527107 60527126 60527123 +
agggtcaccggcctgcctct

SEQ ID NO: 167013 - DNA, 20 bp, Artificial Sequence
  Synthetic oligonucleotide; GGG chr2 60527108 60527127 60527124 +
gggtcaccggcctgcctctt

SEQ ID NO: 167014 - DNA, 20 bp, Artificial Sequence
  Synthetic oligonucleotide; AAG chr2 60527136 60527155 60527152 +
aaatttgtgcttacctaacg

SEQ ID NO: 167015 - DNA, 20 bp, Artificial Sequence
  Synthetic oligonucleotide; AGG chr2 60527137 60527156 60527153 +
aatttgtgcttacctaacga

SEQ ID NO: 167016 - DNA, 20 bp, Artificial Sequence
  Synthetic oligonucleotide; CAG chr2 60527140 60527159 60527156 +
ttgtgcttacctaacgaagg

SEQ ID NO: 167017 - DNA, 20 bp, Artificial Sequence
  Synthetic oligonucleotide; CAG chr2 60527146 60527165 60527162 +
ttacctaacgaaggcagaaa

SEQ ID NO: 167018 - DNA, 20 bp, Artificial Sequence
  Synthetic oligonucleotide; AAG chr2 60527152 60527171 60527168 +
aacgaaggcagaaacagaaa

SEQ ID NO: 167019 - DNA, 20 bp, Artificial Sequence
  Synthetic oligonucleotide; AAG chr2 60527158 60527177 60527174 +
ggcagaaacagaaaaagaaa

SEQ ID NO: 167020 - DNA, 20 bp, Artificial Sequence
  Synthetic oligonucleotide; AAG chr2 60527167 60527186 60527183 +
agaaaaagaaaaagaaacaa

SEQ ID NO: 167021 - DNA, 20 bp, Artificial Sequence
  Synthetic oligonucleotide; AGG chr2 60527168 60527187 60527184 +
gaaaaagaaaaagaaacaaa

SEQ ID NO: 167022 - DNA, 20 bp, Artificial Sequence
  Synthetic oligonucleotide; CAG chr2 60527178 60527197 60527194 +
aagaaacaaaaggccatcat

SEQ ID NO: 167023 - DNA, 20 bp, Artificial Sequence
  Synthetic oligonucleotide; GAG chr2 60527180 60527199 60527196 +
gaaacaaaaggccatcatca

SEQ ID NO: 167024 - DNA, 20 bp, Artificial Sequence
  Synthetic oligonucleotide; TGG chr2 60527186 60527205 60527202 +
aaaggccatcatcagagatg

SEQ ID NO: 167025 - DNA, 20 bp, Artificial Sequence
  Synthetic oligonucleotide; AAG chr2 60527209 60527228 60527225 +
cctgattttcactgattttc

SEQ ID NO: 167026 - DNA, 20 bp, Artificial Sequence
  Synthetic oligonucleotide; AGG chr2 60527210 60527229 60527226 +
ctgattttcactgattttca

SEQ ID NO: 167027 - DNA, 20 bp, Artificial Sequence
  Synthetic oligonucleotide; GGG chr2 60527211 60527230 60527227 +
tgattttcactgattttcaa

SEQ ID NO: 167028 - DNA, 20 bp, Artificial Sequence
  Synthetic oligonucleotide; AAG chr2 60527214 60527233 60527230 +
ttttcactgattttcaaggg

SEQ ID NO: 167029 - DNA, 20 bp, Artificial Sequence
  Synthetic oligonucleotide; GAG chr2 60527216 60527235 60527232 +
ttcactgattttcaagggaa

SEQ ID NO: 167030 - DNA, 20 bp, Artificial Sequence
  Synthetic oligonucleotide; AAG chr2 60527219 60527238 60527235 +
actgattttcaagggaagag

SEQ ID NO: 167031 - DNA, 20 bp, Artificial Sequence
  Synthetic oligonucleotide; AGG chr2 60527220 60527239 60527236 +
ctgattttcaagggaagaga

SEQ ID NO: 167032 - DNA, 20 bp, Artificial Sequence
  Synthetic oligonucleotide; TAG chr2 60527228 60527247 60527244 +
caagggaagagaaggaaaac

SEQ ID NO: 167033 - DNA, 20 bp, Artificial Sequence
  Synthetic oligonucleotide; AGG chr2 60527229 60527248 60527245 +
aagggaagagaaggaaaact

SEQ ID NO: 167034 - DNA, 20 bp, Artificial Sequence
  Synthetic oligonucleotide; GGG chr2 60527230 60527249 60527246 +
agggaagagaaggaaaacta

SEQ ID NO: 167035 - DNA, 20 bp, Artificial Sequence
  Synthetic oligonucleotide; GGG chr2 60527231 60527250 60527247 +
gggaagagaaggaaaactag

SEQ ID NO: 167036 - DNA, 20 bp, Artificial Sequence
  Synthetic oligonucleotide; GGG chr2 60527232 60527251 60527248 +
ggaagagaaggaaaactagg

SEQ ID NO: 167037 - DNA, 20 bp, Artificial Sequence
  Synthetic oligonucleotide; GAG chr2 60527238 60527257 60527254 +
gaaggaaaactagggggtgc

SEQ ID NO: 167038 - DNA, 20 bp, Artificial Sequence
  Synthetic oligonucleotide; GAG chr2 60527242 60527261 60527258 +
gaaaactagggggtgcgagc

SEQ ID NO: 167039 - DNA, 20 bp, Artificial Sequence
  Synthetic oligonucleotide; AGG chr2 60527243 60527262 60527259 +
aaaactagggggtgcgagcg

SEQ ID NO: 167040 - DNA, 20 bp, Artificial Sequence
  Synthetic oligonucleotide; GGG chr2 60527244 60527263 60527260 +
aaactagggggtgcgagcga

SEQ ID NO: 167041 - DNA, 20 bp, Artificial Sequence
  Synthetic oligonucleotide; AAG chr2 60527251 60527270 60527267 +
ggggtgcgagcgagggaaat

SEQ ID NO: 167042 - DNA, 20 bp, Artificial Sequence
  Synthetic oligonucleotide; AAG chr2 60527254 60527273 60527270 +
gtgcgagcgagggaaataag

SEQ ID NO: 167043 - DNA, 20 bp, Artificial Sequence
  Synthetic oligonucleotide; AGG chr2 60527255 60527274 60527271 +
tgcgagcgagggaaataaga

SEQ ID NO: 167044 - DNA, 20 bp, Artificial Sequence
  Synthetic oligonucleotide; GGG chr2 60527256 60527275 60527272 +
gcgagcgagggaaataagaa

SEQ ID NO: 167045 - DNA, 20 bp, Artificial Sequence
  Synthetic oligonucleotide; AAG chr2 60527264 60527283 60527280 +
gggaaataagaagggttcta

SEQ ID NO: 167046 - DNA, 20 bp, Artificial Sequence
  Synthetic oligonucleotide; CAG chr2 60527290 60527309 60527306 +
tgatacgccttttatcattt

SEQ ID NO: 167047 - DNA, 20 bp, Artificial Sequence
  Synthetic oligonucleotide; CAG chr2 60527304 60527323 60527320 +
tcatttcagctttatcattt

SEQ ID NO: 167048 - DNA, 20 bp, Artificial Sequence
  Synthetic oligonucleotide; TAG chr2 60527309 60527328 60527325 +
tcagctttatcatttcagtc

SEQ ID NO: 167049 - DNA, 20 bp, Artificial Sequence
  Synthetic oligonucleotide; AGG chr2 60527310 60527329 60527326 +
cagctttatcatttcagtct

SEQ ID NO: 167050 - DNA, 20 bp, Artificial Sequence
  Synthetic oligonucleotide; GAG chr2 60527312 60527331 60527328 +
gctttatcatttcagtctag

SEQ ID NO: 167051 - DNA, 20 bp, Artificial Sequence
  Synthetic oligonucleotide; CAG chr2 60527318 60527337 60527334 +
tcatttcagtctaggagacc

SEQ ID NO: 167052 - DNA, 20 bp, Artificial Sequence
  Synthetic oligonucleotide; AAG chr2 60527332 60527351 60527348 +
gagacccagcaaataaaact

SEQ ID NO: 167053 - DNA, 20 bp, Artificial Sequence
  Synthetic oligonucleotide; GAG chr2 60527334 60527353 60527350 +
gacccagcaaataaaactaa

SEQ ID NO: 167054 - DNA, 20 bp, Artificial Sequence
  Synthetic oligonucleotide; CAG chr2 60527346 60527365 60527362 +
aaaactaagagcttctcttc

SEQ ID NO: 167055 - DNA, 20 bp, Artificial Sequence
  Synthetic oligonucleotide; AGG chr2 60527347 60527366 60527363 +
aaactaagagcttctcttcc

SEQ ID NO: 167056 - DNA, 20 bp, Artificial Sequence
  Synthetic oligonucleotide; GGG chr2 60527348 60527367 60527364 +
aactaagagcttctcttcca

SEQ ID NO: 167057 - DNA, 20 bp, Artificial Sequence
  Synthetic oligonucleotide; AAG chr2 60527355 60527374 60527371 +
agcttctcttccagggtgac

SEQ ID NO: 167058 - DNA, 20 bp, Artificial Sequence
  Synthetic oligonucleotide; AGG chr2 60527356 60527375 60527372 +
gcttctcttccagggtgaca

SEQ ID NO: 167059 - DNA, 20 bp, Artificial Sequence
  Synthetic oligonucleotide; GGG chr2 60527357 60527376 60527373 +
cttctcttccagggtgacaa

SEQ ID NO: 167060 - DNA, 20 bp, Artificial Sequence
  Synthetic oligonucleotide; GAG chr2 60527359 60527378 60527375 +
tctcttccagggtgacaagg

SEQ ID NO: 167061 - DNA, 20 bp, Artificial Sequence
  Synthetic oligonucleotide; AAG chr2 60527382 60527401 60527398 +
aaccactacactcttgaccc

SEQ ID NO: 167062 - DNA, 20 bp, Artificial Sequence
  Synthetic oligonucleotide; AGG chr2 60527383 60527402 60527399 +
accactacactcttgaccca

SEQ ID NO: 167063 - DNA, 20 bp, Artificial Sequence
  Synthetic oligonucleotide; GGG chr2 60527384 60527403 60527400 +
ccactacactcttgacccaa

SEQ ID NO: 167064 - DNA, 20 bp, Artificial Sequence
  Synthetic oligonucleotide; TAG chr2 60527391 60527410 60527407 +
actcttgacccaagggtatg

SEQ ID NO: 167065 - DNA, 20 bp, Artificial Sequence
  Synthetic oligonucleotide; GAG chr2 60527393 60527412 60527409 +
tcttgacccaagggtatgta

SEQ ID NO: 167066 - DNA, 20 bp, Artificial Sequence
  Synthetic oligonucleotide; AAG chr2 60527402 60527421 60527418 +
aagggtatgtagagacaatg

SEQ ID NO: 167067 - DNA, 20 bp, Artificial Sequence
  Synthetic oligonucleotide; GAG chr2 60527404 60527423 60527420 +
gggtatgtagagacaatgaa

SEQ ID NO: 167068 - DNA, 20 bp, Artificial Sequence
  Synthetic oligonucleotide; AGG chr2 60527405 60527424 60527421 +
ggtatgtagagacaatgaag

SEQ ID NO: 167069 - DNA, 20 bp, Artificial Sequence
  Synthetic oligonucleotide; GGG chr2 60527406 60527425 60527422 +
gtatgtagagacaatgaaga

SEQ ID NO: 167070 - DNA, 20 bp, Artificial Sequence
  Synthetic oligonucleotide; AAG chr2 60527411 60527430 60527427 +
tagagacaatgaagagggcc

SEQ ID NO: 167071 - DNA, 20 bp, Artificial Sequence
  Synthetic oligonucleotide; GAG chr2 60527413 60527432 60527429 +
gagacaatgaagagggccaa

SEQ ID NO: 167072 - DNA, 20 bp, Artificial Sequence
  Synthetic oligonucleotide; AAG chr2 60527416 60527435 60527432 +
acaatgaagagggccaagag

SEQ ID NO: 167073 - DNA, 20 bp, Artificial Sequence
  Synthetic oligonucleotide; AGG chr2 60527417 60527436 60527433 +
caatgaagagggccaagaga

SEQ ID NO: 167074 - DNA, 20 bp, Artificial Sequence
  Synthetic oligonucleotide; GGG chr2 60527418 60527437 60527434 +
aatgaagagggccaagagaa

SEQ ID NO: 167075 - DNA, 20 bp, Artificial Sequence
  Synthetic oligonucleotide; GGG chr2 60527419 60527438 60527435 +
atgaagagggccaagagaag

SEQ ID NO: 167076 - DNA, 20 bp, Artificial Sequence
  Synthetic oligonucleotide; GAG chr2 60527423 60527442 60527439 +
agagggccaagagaaggggt

SEQ ID NO: 167077 - DNA, 20 bp, Artificial Sequence
  Synthetic oligonucleotide; AGG chr2 60527424 60527443 60527440 +
gagggccaagagaaggggtg

SEQ ID NO: 167078 - DNA, 20 bp, Artificial Sequence
  Synthetic oligonucleotide; GGG chr2 60527425 60527444 60527441 +
agggccaagagaaggggtga

SEQ ID NO: 167079 - DNA, 20 bp, Artificial Sequence
  Synthetic oligonucleotide; GGG chr2 60527426 60527445 60527442 +
gggccaagagaaggggtgag

SEQ ID NO: 167080 - DNA, 20 bp, Artificial Sequence
  Synthetic oligonucleotide; GGG chr2 60527427 60527446 60527443 +
ggccaagagaaggggtgagg

SEQ ID NO: 167081 - DNA, 20 bp, Artificial Sequence
  Synthetic oligonucleotide; AAG chr2 60527430 60527449 60527446 +
caagagaaggggtgaggggg

SEQ ID NO: 167082 - DNA, 20 bp, Artificial Sequence
  Synthetic oligonucleotide; AGG chr2 60527431 60527450 60527447 +
aagagaaggggtgaggggga

SEQ ID NO: 167083 - DNA, 20 bp, Artificial Sequence
  Synthetic oligonucleotide; GGG chr2 60527432 60527451 60527448 +
agagaaggggtgagggggaa

SEQ ID NO: 167084 - DNA, 20 bp, Artificial Sequence
  Synthetic oligonucleotide; GAG chr2 60527452 60527471 60527468 +
gggcttgcatgacctccatt

SEQ ID NO: 167085 - DNA, 20 bp, Artificial Sequence
  Synthetic oligonucleotide; AGG chr2 60527453 60527472 60527469 +
ggcttgcatgacctccattg

SEQ ID NO: 167086 - DNA, 20 bp, Artificial Sequence
  Synthetic oligonucleotide; CGG chr2 60527468 60527487 60527484 +
cattgaggacgtccatgccc

SEQ ID NO: 167087 - DNA, 20 bp, Artificial Sequence
  Synthetic oligonucleotide; GGG chr2 60527469 60527488 60527485 +
attgaggacgtccatgcccc

SEQ ID NO: 167088 - DNA, 20 bp, Artificial Sequence
  Synthetic oligonucleotide; CAG chr2 60527473 60527492 60527489 +
aggacgtccatgccccggga

SEQ ID NO: 167089 - DNA, 20 bp, Artificial Sequence
  Synthetic oligonucleotide; GAG chr2 60527475 60527494 60527491 +
gacgtccatgccccgggaca

SEQ ID NO: 167090 - DNA, 20 bp, Artificial Sequence
  Synthetic oligonucleotide; AAG chr2 60527482 60527501 60527498 +
atgccccgggacagagtgcg

SEQ ID NO: 167091 - DNA, 20 bp, Artificial Sequence
  Synthetic oligonucleotide; AAG chr2 60527488 60527507 60527504 +
cgggacagagtgcgaagtaa

SEQ ID NO: 167092 - DNA, 20 bp, Artificial Sequence
  Synthetic oligonucleotide; AAG chr2 60527493 60527512 60527509 +
cagagtgcgaagtaaaagtg

SEQ ID NO: 167093 - DNA, 20 bp, Artificial Sequence
  Synthetic oligonucleotide; TGG chr2 60527499 60527518 60527515 +
gcgaagtaaaagtgaagctt

SEQ ID NO: 167094 - DNA, 20 bp, Artificial Sequence
  Synthetic oligonucleotide; GAG chr2 60527501 60527520 60527517 +
gaagtaaaagtgaagctttg

SEQ ID NO: 167095 - DNA, 20 bp, Artificial Sequence
  Synthetic oligonucleotide; TGG chr2 60527517 60527536 60527533 +
tttggagctcttgacccaca

SEQ ID NO: 167096 - DNA, 20 bp, Artificial Sequence
  Synthetic oligonucleotide; CAG chr2 60527525 60527544 60527541 +
tcttgacccacatggattct

SEQ ID NO: 167097 - DNA, 20 bp, Artificial Sequence
  Synthetic oligonucleotide; CAG chr2 60527528 60527547 60527544 +
tgacccacatggattctcag

SEQ ID NO: 167098 - DNA, 20 bp, Artificial Sequence
  Synthetic oligonucleotide; CAG chr2 60527554 60527573 60527570 +
cctccatcccacctcaaact

SEQ ID NO: 167099 - DNA, 20 bp, Artificial Sequence
  Synthetic oligonucleotide; AAG chr2 60527557 60527576 60527573 +
ccatcccacctcaaactcag

SEQ ID NO: 167100 - DNA, 20 bp, Artificial Sequence
  Synthetic oligonucleotide; TGG chr2 60527566 60527585 60527582 +
ctcaaactcagaagacaacc

SEQ ID NO: 167101 - DNA, 20 bp, Artificial Sequence
  Synthetic oligonucleotide; TGG chr2 60527593 60527612 60527609 +
gaccgacaacttctttgtga

SEQ ID NO: 167102 - DNA, 20 bp, Artificial Sequence
  Synthetic oligonucleotide; CAG chr2 60527603 60527622 60527619 +
ttctttgtgatggatctgaa

SEQ ID NO: 167103 - DNA, 20 bp, Artificial Sequence
  Synthetic oligonucleotide; TGG chr2 60527613 60527632 60527629 +
tggatctgaacagcctccct

SEQ ID NO: 167104 - DNA, 20 bp, Artificial Sequence
  Synthetic oligonucleotide; TAG chr2 60527619 60527638 60527635 +
tgaacagcctcccttggttc

SEQ ID NO: 167105 - DNA, 20 bp, Artificial Sequence
  Synthetic oligonucleotide; CAG chr2 60527622 60527641 60527638 +
acagcctcccttggttctag

SEQ ID NO: 167106 - DNA, 20 bp, Artificial Sequence
  Synthetic oligonucleotide; AAG chr2 60527625 60527644 60527641 +
gcctcccttggttctagcag

SEQ ID NO: 167107 - DNA, 20 bp, Artificial Sequence
  Synthetic oligonucleotide; AGG chr2 60527626 60527645 60527642 +
cctcccttggttctagcaga

SEQ ID NO: 167108 - DNA, 20 bp, Artificial Sequence
  Synthetic oligonucleotide; AAG chr2 60527636 60527655 60527652 +
ttctagcagaaggacttacc

SEQ ID NO: 167109 - DNA, 20 bp, Artificial Sequence
  Synthetic oligonucleotide; GAG chr2 60527640 60527659 60527656 +
agcagaaggacttaccaagt

SEQ ID NO: 167110 - DNA, 20 bp, Artificial Sequence
  Synthetic oligonucleotide; CAG chr2 60527643 60527662 60527659 +
agaaggacttaccaagtgag

SEQ ID NO: 167111 - DNA, 20 bp, Artificial Sequence
  Synthetic oligonucleotide; GAG chr2 60527645 60527664 60527661 +
aaggacttaccaagtgagca

SEQ ID NO: 167112 - DNA, 20 bp, Artificial Sequence
  Synthetic oligonucleotide; CAG chr2 60527666 60527685 60527682 +
agctcccatccgatactcgc

SEQ ID NO: 167113 - DNA, 20 bp, Artificial Sequence
  Synthetic oligonucleotide; GAG chr2 60527673 60527692 60527689 +
atccgatactcgccagtgct

SEQ ID NO: 167114 - DNA, 20 bp, Artificial Sequence
  Synthetic oligonucleotide; AGG chr2 60527674 60527693 60527690 +
tccgatactcgccagtgctg

SEQ ID NO: 167115 - DNA, 20 bp, Artificial Sequence
  Synthetic oligonucleotide; CGG chr2 60527698 60527717 60527714 +
caactcttccactcctccca

SEQ ID NO: 167116 - DNA, 20 bp, Artificial Sequence
  Synthetic oligonucleotide; GGG chr2 60527699 60527718 60527715 +
aactcttccactcctcccac

SEQ ID NO: 167117 - DNA, 20 bp, Artificial Sequence
  Synthetic oligonucleotide; GGG chr2 60527700 60527719 60527716 +
actcttccactcctcccacg

SEQ ID NO: 167118 - DNA, 20 bp, Artificial Sequence
  Synthetic oligonucleotide; AAG chr2 60527713 60527732 60527729 +
tcccacggggcctccgcatg

SEQ ID NO: 167119 - DNA, 20 bp, Artificial Sequence
  Synthetic oligonucleotide; TAG chr2 60527716 60527735 60527732 +
cacggggcctccgcatgaag

SEQ ID NO: 167120 - DNA, 20 bp, Artificial Sequence
  Synthetic oligonucleotide; AGG chr2 60527717 60527736 60527733 +
acggggcctccgcatgaagt

SEQ ID NO: 167121 - DNA, 20 bp, Artificial Sequence
  Synthetic oligonucleotide; CAG chr2 60527755 60527774 60527771 +
aaatgattctgaaattctct

SEQ ID NO: 167122 - DNA, 20 bp, Artificial Sequence
  Synthetic oligonucleotide; TGG chr2 60527758 60527777 60527774 +
tgattctgaaattctctcag

SEQ ID NO: 167123 - DNA, 20 bp, Artificial Sequence
  Synthetic oligonucleotide; GAG chr2 60527760 60527779 60527776 +
attctgaaattctctcagtg

SEQ ID NO: 167124 - DNA, 20 bp, Artificial Sequence
  Synthetic oligonucleotide; AGG chr2 60527761 60527780 60527777 +
ttctgaaattctctcagtgg

SEQ ID NO: 167125 - DNA, 20 bp, Artificial Sequence
  Synthetic oligonucleotide; TAG chr2 60527771 60527790 60527787 +
ctctcagtggaggtctatgt

SEQ ID NO: 167126 - DNA, 20 bp, Artificial Sequence
  Synthetic oligonucleotide; TGG chr2 60527776 60527795 60527792 +
agtggaggtctatgttagcc

SEQ ID NO: 167127 - DNA, 20 bp, Artificial Sequence
  Synthetic oligonucleotide; AAG chr2 60527788 60527807 60527804 +
tgttagcctggccaatttga

SEQ ID NO: 167128 - DNA, 20 bp, Artificial Sequence
  Synthetic oligonucleotide; AGG chr2 60527789 60527808 60527805 +
gttagcctggccaatttgaa

SEQ ID NO: 167129 - DNA, 20 bp, Artificial Sequence
  Synthetic oligonucleotide; TGG chr2 60527793 60527812 60527809 +
gcctggccaatttgaaagga

SEQ ID NO: 167130 - DNA, 20 bp, Artificial Sequence
  Synthetic oligonucleotide; GAG chr2 60527795 60527814 60527811 +
ctggccaatttgaaaggatg

SEQ ID NO: 167131 - DNA, 20 bp, Artificial Sequence
  Synthetic oligonucleotide; CAG chr2 60527802 60527821 60527818 +
atttgaaaggatggagaata

SEQ ID NO: 167132 - DNA, 20 bp, Artificial Sequence
  Synthetic oligonucleotide; AGG chr2 60527803 60527822 60527819 +
tttgaaaggatggagaatac

SEQ ID NO: 167133 - DNA, 20 bp, Artificial Sequence
  Synthetic oligonucleotide; CAG chr2 60527810 60527829 60527826 +
ggatggagaatacaggaaaa

SEQ ID NO: 167134 - DNA, 20 bp, Artificial Sequence
  Synthetic oligonucleotide; TGG chr2 60527820 60527839 60527836 +
tacaggaaaacagtaacatt

SEQ ID NO: 167135 - DNA, 20 bp, Artificial Sequence
  Synthetic oligonucleotide; TGG chr2 60527826 60527845 60527842 +
aaaacagtaacatttggttt

SEQ ID NO: 167136 - DNA, 20 bp, Artificial Sequence
  Synthetic oligonucleotide; CAG chr2 60527861 60527880 60527877 +
aatccatctgcaacgaacct

SEQ ID NO: 167137 - DNA, 20 bp, Artificial Sequence
  Synthetic oligonucleotide; AGG chr2 60527862 60527881 60527878 +
atccatctgcaacgaacctc

SEQ ID NO: 167138 - DNA, 20 bp, Artificial Sequence
  Synthetic oligonucleotide; CAG chr2 60527873 60527892 60527889 +
acgaacctcaggtcttgctt

SEQ ID NO: 167139 - DNA, 20 bp, Artificial Sequence
  Synthetic oligonucleotide; TAG chr2 60527886 60527905 60527902 +
cttgcttcagcaaatattaa

SEQ ID NO: 167140 - DNA, 20 bp, Artificial Sequence
  Synthetic oligonucleotide; CAG chr2 60527892 60527911 60527908 +
tcagcaaatattaatagcgt

SEQ ID NO: 167141 - DNA, 20 bp, Artificial Sequence
  Synthetic oligonucleotide; AGG chr2 60527893 60527912 60527909 +
cagcaaatattaatagcgtc

SEQ ID NO: 167142 - DNA, 20 bp, Artificial Sequence
  Synthetic oligonucleotide; GGG chr2 60527894 60527913 60527910 +
agcaaatattaatagcgtca

SEQ ID NO: 167143 - DNA, 20 bp, Artificial Sequence
  Synthetic oligonucleotide; CAG chr2 60527897 60527916 60527913 +
aaatattaatagcgtcaggg

SEQ ID NO: 167144 - DNA, 20 bp, Artificial Sequence
  Synthetic oligonucleotide; TGG chr2 60527904 60527923 60527920 +
aatagcgtcagggcagcctg

SEQ ID NO: 167145 - DNA, 20 bp, Artificial Sequence
  Synthetic oligonucleotide; GAG chr2 60527906 60527925 60527922 +
tagcgtcagggcagcctgtg

SEQ ID NO: 167146 - DNA, 20 bp, Artificial Sequence
  Synthetic oligonucleotide; TGG chr2 60527913 60527932 60527929 +
agggcagcctgtggagtgac

SEQ ID NO: 167147 - DNA, 20 bp, Artificial Sequence
  Synthetic oligonucleotide; GGG chr2 60527914 60527933 60527930 +
gggcagcctgtggagtgact

SEQ ID NO: 167148 - DNA, 20 bp, Artificial Sequence
  Synthetic oligonucleotide; GAG chr2 60527916 60527935 60527932 +
gcagcctgtggagtgactgg

SEQ ID NO: 167149 - DNA, 20 bp, Artificial Sequence
  Synthetic oligonucleotide; GAG chr2 60527918 60527937 60527934 +
agcctgtggagtgactggga

SEQ ID NO: 167150 - DNA, 20 bp, Artificial Sequence
  Synthetic oligonucleotide; AGG chr2 60527919 60527938 60527935 +
gcctgtggagtgactgggag

SEQ ID NO: 167151 - DNA, 20 bp, Artificial Sequence
  Synthetic oligonucleotide; CAG chr2 60527930 60527949 60527946 +
gactgggagaggccaccacg

SEQ ID NO: 167152 - DNA, 20 bp, Artificial Sequence
  Synthetic oligonucleotide; TGG chr2 60527948 60527967 60527964 +
cgcagctgaaaacttgcctc

SEQ ID NO: 167153 - DNA, 20 bp, Artificial Sequence
  Synthetic oligonucleotide; GGG chr2 60527949 60527968 60527965 +
gcagctgaaaacttgcctct

SEQ ID NO: 167154 - DNA, 20 bp, Artificial Sequence
  Synthetic oligonucleotide; GGG chr2 60527950 60527969 60527966 +
cagctgaaaacttgcctctg

SEQ ID NO: 167155 - DNA, 20 bp, Artificial Sequence
  Synthetic oligonucleotide; AAG chr2 60527953 60527972 60527969 +
ctgaaaacttgcctctgggg

SEQ ID NO: 167156 - DNA, 20 bp, Artificial Sequence
  Synthetic oligonucleotide; CGG chr2 60527963 60527982 60527979 +
gcctctggggaagccacatg

SEQ ID NO: 167157 - DNA, 20 bp, Artificial Sequence
  Synthetic oligonucleotide; TGG chr2 60527972 60527991 60527988 +
gaagccacatgcggatcata

SEQ ID NO: 167158 - DNA, 20 bp, Artificial Sequence
  Synthetic oligonucleotide; GAG chr2 60527974 60527993 60527990 +
agccacatgcggatcatatg

SEQ ID NO: 167159 - DNA, 20 bp, Artificial Sequence
  Synthetic oligonucleotide; CAG chr2 60527987 60528006 60528003 +
tcatatggagctgttgactg

SEQ ID NO: 167160 - DNA, 20 bp, Artificial Sequence
  Synthetic oligonucleotide; AAG chr2 60528011 60528030 60528027 +
ttccattcaaaacttccctc

SEQ ID NO: 167161 - DNA, 20 bp, Artificial Sequence
  Synthetic oligonucleotide; CAG chr2 60528018 60528037 60528034 +
caaaacttccctcaagtttc

SEQ ID NO: 167162 - DNA, 20 bp, Artificial Sequence
  Synthetic oligonucleotide; CGG chr2 60528030 60528049 60528046 +
caagtttccagcatgccttc

SEQ ID NO: 167163 - DNA, 20 bp, Artificial Sequence
  Synthetic oligonucleotide; CAG chr2 60528046 60528065 60528062 +
cttccggacttgccttacca

SEQ ID NO: 167164 - DNA, 20 bp, Artificial Sequence
  Synthetic oligonucleotide; CAG chr2 60528056 60528075 60528072 +
tgccttaccacagccttgtt

SEQ ID NO: 167165 - DNA, 20 bp, Artificial Sequence
  Synthetic oligonucleotide; CAG chr2 60528060 60528079 60528076 +
ttaccacagccttgttcagc

SEQ ID NO: 167166 - DNA, 20 bp, Artificial Sequence
  Synthetic oligonucleotide; AAG chr2 60528080 60528099 60528096 +
cagaaatgaaaacctcctcg

SEQ ID NO: 167167 - DNA, 20 bp, Artificial Sequence
  Synthetic oligonucleotide; CAG chr2 60528083 60528102 60528099 +
aaatgaaaacctcctcgaag

SEQ ID NO: 167168 - DNA, 20 bp, Artificial Sequence
  Synthetic oligonucleotide; CAG chr2 60528098 60528117 60528114 +
cgaagcagattatgaccccc

SEQ ID NO: 167169 - DNA, 20 bp, Artificial Sequence
  Synthetic oligonucleotide; AAG chr2 60528114 60528133 60528130 +
cccccagaacccatcgtcct

SEQ ID NO: 167170 - DNA, 20 bp, Artificial Sequence
  Synthetic oligonucleotide; CAG chr2 60528149 60528168 60528165 +
cacgcacactcactcacact

SEQ ID NO: 167171 - DNA, 20 bp, Artificial Sequence
  Synthetic oligonucleotide; CAG chr2 60528184 60528203 60528200 +
tgtataattctgattctccc

SEQ ID NO: 167172 - DNA, 20 bp, Artificial Sequence
  Synthetic oligonucleotide; AAG chr2 60528193 60528212 60528209 +
ctgattctccccagcctttg

SEQ ID NO: 167173 - DNA, 20 bp, Artificial Sequence
  Synthetic oligonucleotide; AGG chr2 60528194 60528213 60528210 +
tgattctccccagcctttga

SEQ ID NO: 167174 - DNA, 20 bp, Artificial Sequence
  Synthetic oligonucleotide; GAG chr2 60528205 60528224 60528221 +
agcctttgaaggtacgatcc

SEQ ID NO: 167175 - DNA, 20 bp, Artificial Sequence
  Synthetic oligonucleotide; AAG chr2 60528208 60528227 60528224 +
ctttgaaggtacgatccgag

SEQ ID NO: 167176 - DNA, 20 bp, Artificial Sequence
  Synthetic oligonucleotide; CAG chr2 60528220 60528239 60528236 +
gatccgagaagtaaatgcca

SEQ ID NO: 167177 - DNA, 20 bp, Artificial Sequence
  Synthetic oligonucleotide; GAG chr2 60528222 60528241 60528238 +
tccgagaagtaaatgccaca

SEQ ID NO: 167178 - DNA, 20 bp, Artificial Sequence
  Synthetic oligonucleotide; CAG chr2 60528233 60528252 60528249 +
aatgccacagagacaacaca

SEQ ID NO: 167179 - DNA, 20 bp, Artificial Sequence
  Synthetic oligonucleotide; CAG chr2 60528244 60528263 60528260 +
gacaacacacagaactgctg

SEQ ID NO: 167180 - DNA, 20 bp, Artificial Sequence
  Synthetic oligonucleotide; AGG chr2 60528245 60528264 60528261 +
acaacacacagaactgctgc

SEQ ID NO: 167181 - DNA, 20 bp, Artificial Sequence
  Synthetic oligonucleotide; AAG chr2 60528250 60528269 60528266 +
acacagaactgctgcaggcc

SEQ ID NO: 167182 - DNA, 20 bp, Artificial Sequence
  Synthetic oligonucleotide; AAG chr2 60528269 60528288 60528285 +
caagcctcaccacttcttaa

SEQ ID NO: 167183 - DNA, 20 bp, Artificial Sequence
  Synthetic oligonucleotide; GAG chr2 60528275 60528294 60528291 +
tcaccacttcttaaaagtcc

SEQ ID NO: 167184 - DNA, 20 bp, Artificial Sequence
  Synthetic oligonucleotide; TAG chr2 60528280 60528299 60528296 +
acttcttaaaagtccgagct

SEQ ID NO: 167185 - DNA, 20 bp, Artificial Sequence
  Synthetic oligonucleotide; CAG chr2 60528292 60528311 60528308 +
tccgagcttagtttctcatt

SEQ ID NO: 167186 - DNA, 20 bp, Artificial Sequence
  Synthetic oligonucleotide; CAG chr2 60528302 60528321 60528318 +
gtttctcattcagcccactg

SEQ ID NO: 167187 - DNA, 20 bp, Artificial Sequence
  Synthetic oligonucleotide; AAG chr2 60528315 60528334 60528331 +
cccactgcagtctcctgacc

SEQ ID NO: 167188 - DNA, 20 bp, Artificial Sequence
  Synthetic oligonucleotide; CAG chr2 60528329 60528348 60528345 +
ctgaccaagccacacacaaa

SEQ ID NO: 167189 - DNA, 20 bp, Artificial Sequence
  Synthetic oligonucleotide; CAG chr2 60528355 60528374 60528371 +
aacctcctccctctgtttct

SEQ ID NO: 167190 - DNA, 20 bp, Artificial Sequence
  Synthetic oligonucleotide; AGG chr2 60528356 60528375 60528372 +
acctcctccctctgtttctc

SEQ ID NO: 167191 - DNA, 20 bp, Artificial Sequence
  Synthetic oligonucleotide; CAG chr2 60528374 60528393 60528390 +
tcaggaccctcacttgattt

SEQ ID NO: 167192 - DNA, 20 bp, Artificial Sequence
  Synthetic oligonucleotide; AGG chr2 60528375 60528394 60528391 +
caggaccctcacttgatttc

SEQ ID NO: 167193 - DNA, 20 bp, Artificial Sequence
  Synthetic oligonucleotide; TGG chr2 60528385 60528404 60528401 +
acttgatttcaggctcattc

SEQ ID NO: 167194 - DNA, 20 bp, Artificial Sequence
  Synthetic oligonucleotide; CAG chr2 60528389 60528408 60528405 +
gatttcaggctcattctgga

SEQ ID NO: 167195 - DNA, 20 bp, Artificial Sequence
  Synthetic oligonucleotide; TGG chr2 60528393 60528412 60528409 +
tcaggctcattctggacaga

SEQ ID NO: 167196 - DNA, 20 bp, Artificial Sequence
  Synthetic oligonucleotide; GGG chr2 60528394 60528413 60528410 +
caggctcattctggacagat

SEQ ID NO: 167197 - DNA, 20 bp, Artificial Sequence
  Synthetic oligonucleotide; GGG chr2 60528395 60528414 60528411 +
aggctcattctggacagatg

SEQ ID NO: 167198 - DNA, 20 bp, Artificial Sequence
  Synthetic oligonucleotide; AAG chr2 60528413 60528432 60528429 +
tggggaaatgactacttgca

SEQ ID NO: 167199 - DNA, 20 bp, Artificial Sequence
  Synthetic oligonucleotide; CAG chr2 60528416 60528435 60528432 +
ggaaatgactacttgcaaag

SEQ ID NO: 167200 - DNA, 20 bp, Artificial Sequence
  Synthetic oligonucleotide; AGG chr2 60528417 60528436 60528433 +
gaaatgactacttgcaaagc

SEQ ID NO: 167201 - DNA, 20 bp, Artificial Sequence
  Synthetic oligonucleotide; CAG chr2 60528446 60528465 60528462 +
tacattgcaacttttcccaa

SEQ ID NO: 167202 - DNA, 20 bp, Artificial Sequence
  Synthetic oligonucleotide; CAG chr2 60528471 60528490 60528487 +
ccgtgctccttcaatatgcc

SEQ ID NO: 167203 - DNA, 20 bp, Artificial Sequence
  Synthetic oligonucleotide; TGG chr2 60528477 60528496 60528493 +
tccttcaatatgcccagaac

SEQ ID NO: 167204 - DNA, 20 bp, Artificial Sequence
  Synthetic oligonucleotide; GAG chr2 60528479 60528498 60528495 +
cttcaatatgcccagaactg

SEQ ID NO: 167205 - DNA, 20 bp, Artificial Sequence
  Synthetic oligonucleotide; AGG chr2 60528480 60528499 60528496 +
ttcaatatgcccagaactgg

SEQ ID NO: 167206 - DNA, 20 bp, Artificial Sequence
  Synthetic oligonucleotide; GGG chr2 60528481 60528500 60528497 +
tcaatatgcccagaactgga

SEQ ID NO: 167207 - DNA, 20 bp, Artificial Sequence
  Synthetic oligonucleotide; GGG chr2 60528482 60528501 60528498 +
caatatgcccagaactggag

SEQ ID NO: 167208 - DNA, 20 bp, Artificial Sequence
  Synthetic oligonucleotide; CAG chr2 60528502 60528521 60528518 +
gggaacattcttctctttcc

SEQ ID NO: 167209 - DNA, 20 bp, Artificial Sequence
  Synthetic oligonucleotide; AAG chr2 60528505 60528524 60528521 +
aacattcttctctttcccag

SEQ ID NO: 167210 - DNA, 20 bp, Artificial Sequence
  Synthetic oligonucleotide; CAG chr2 60528525 60528544 60528541 +
aagattgaaaaacttgacca

SEQ ID NO: 167211 - DNA, 20 bp, Artificial Sequence
  Synthetic oligonucleotide; TGG chr2 60528534 60528553 60528550 +
aaacttgaccacagaaccca

SEQ ID NO: 167212 - DNA, 20 bp, Artificial Sequence
  Synthetic oligonucleotide; GGG chr2 60528535 60528554 60528551 +
aacttgaccacagaacccat

SEQ ID NO: 167213 - DNA, 20 bp, Artificial Sequence
  Synthetic oligonucleotide; GAG chr2 60528537 60528556 60528553 +
cttgaccacagaacccatgg

SEQ ID NO: 167214 - DNA, 20 bp, Artificial Sequence
  Synthetic oligonucleotide; AGG chr2 60528538 60528557 60528554 +
ttgaccacagaacccatggg

SEQ ID NO: 167215 - DNA, 20 bp, Artificial Sequence
  Synthetic oligonucleotide; GGG chr2 60528539 60528558 60528555 +
tgaccacagaacccatggga

SEQ ID NO: 167216 - DNA, 20 bp, Artificial Sequence
  Synthetic oligonucleotide; CAG chr2 60528551 60528570 60528567 +
ccatgggagggacaactgtc

SEQ ID NO: 167217 - DNA, 20 bp, Artificial Sequence
  Synthetic oligonucleotide; CAG chr2 60528557 60528576 60528573 +
gagggacaactgtccagcac

SEQ ID NO: 167218 - DNA, 20 bp, Artificial Sequence
  Synthetic oligonucleotide; GAG chr2 60528559 60528578 60528575 +
gggacaactgtccagcacca

SEQ ID NO: 167219 - DNA, 20 bp, Artificial Sequence
  Synthetic oligonucleotide; CAG chr2 60528571 60528590 60528587 +
cagcaccagagcttcctgcc

SEQ ID NO: 167220 - DNA, 20 bp, Artificial Sequence
  Synthetic oligonucleotide; TGG chr2 60528582 60528601 60528598 +
cttcctgcccagttgttgcc

SEQ ID NO: 167221 - DNA, 20 bp, Artificial Sequence
  Synthetic oligonucleotide; AAG chr2 60528593 60528612 60528609 +
gttgttgcctggcaccgctg

SEQ ID NO: 167222 - DNA, 20 bp, Artificial Sequence
  Synthetic oligonucleotide; AAG chr2 60528597 60528616 60528613 +
ttgcctggcaccgctgaaga

SEQ ID NO: 167223 - DNA, 20 bp, Artificial Sequence
  Synthetic oligonucleotide; AAG chr2 60528614 60528633 60528630 +
agaaagctgcaaacgtactg

SEQ ID NO: 167224 - DNA, 20 bp, Artificial Sequence
  Synthetic oligonucleotide; GAG chr2 60528616 60528635 60528632 +
aaagctgcaaacgtactgaa

SEQ ID NO: 167225 - DNA, 20 bp, Artificial Sequence
  Synthetic oligonucleotide; AGG chr2 60528617 60528636 60528633 +
aagctgcaaacgtactgaag

SEQ ID NO: 167226 - DNA, 20 bp, Artificial Sequence
  Synthetic oligonucleotide; TAG chr2 60528620 60528639 60528636 +
ctgcaaacgtactgaagagg

SEQ ID NO: 167227 - DNA, 20 bp, Artificial Sequence
  Synthetic oligonucleotide; CAG chr2 60528623 60528642 60528639 +
caaacgtactgaagaggtag

SEQ ID NO: 167228 - DNA, 20 bp, Artificial Sequence
  Synthetic oligonucleotide; GAG chr2 60528625 60528644 60528641 +
aacgtactgaagaggtagca

SEQ ID NO: 167229 - DNA, 20 bp, Artificial Sequence
  Synthetic oligonucleotide; AGG chr2 60528626 60528645 60528642 +
acgtactgaagaggtagcag

SEQ ID NO: 167230 - DNA, 20 bp, Artificial Sequence
  Synthetic oligonucleotide; GGG chr2 60528627 60528646 60528643 +
cgtactgaagaggtagcaga

SEQ ID NO: 167231 - DNA, 20 bp, Artificial Sequence
  Synthetic oligonucleotide; TGG chr2 60528630 60528649 60528646 +
actgaagaggtagcagaggg

SEQ ID NO: 167232 - DNA, 20 bp, Artificial Sequence
  Synthetic oligonucleotide; CGG chr2 60528633 60528652 60528649 +
gaagaggtagcagagggtgg

SEQ ID NO: 167233 - DNA, 20 bp, Artificial Sequence
  Synthetic oligonucleotide; CAG chr2 60528639 60528658 60528655 +
gtagcagagggtggcggccg

SEQ ID NO: 167234 - DNA, 20 bp, Artificial Sequence
  Synthetic oligonucleotide; AGG chr2 60528640 60528659 60528656 +
tagcagagggtggcggccgc

SEQ ID NO: 167235 - DNA, 20 bp, Artificial Sequence
  Synthetic oligonucleotide; AAG chr2 60528646 60528665 60528662 +
agggtggcggccgcaggcca

SEQ ID NO: 167236 - DNA, 20 bp, Artificial Sequence
  Synthetic oligonucleotide; AGG chr2 60528647 60528666 60528663 +
gggtggcggccgcaggccaa

SEQ ID NO: 167237 - DNA, 20 bp, Artificial Sequence
  Synthetic oligonucleotide; TGG chr2 60528662 60528681 60528678 +
gccaaaggattgaacaactg

SEQ ID NO: 167238 - DNA, 20 bp, Artificial Sequence
  Synthetic oligonucleotide; CAG chr2 60528670 60528689 60528686 +
attgaacaactgtggaccct

SEQ ID NO: 167239 - DNA, 20 bp, Artificial Sequence
  Synthetic oligonucleotide; AGG chr2 60528671 60528690 60528687 +
ttgaacaactgtggaccctc

SEQ ID NO: 167240 - DNA, 20 bp, Artificial Sequence
  Synthetic oligonucleotide; GGG chr2 60528672 60528691 60528688 +
tgaacaactgtggaccctca

SEQ ID NO: 167241 - DNA, 20 bp, Artificial Sequence
  Synthetic oligonucleotide; AAG chr2 60528675 60528694 60528691 +
acaactgtggaccctcaggg

SEQ ID NO: 167242 - DNA, 20 bp, Artificial Sequence
  Synthetic oligonucleotide; GAG chr2 60528721 60528740 60528737 +
aatttcctcctctaccaaat

SEQ ID NO: 167243 - DNA, 20 bp, Artificial Sequence
  Synthetic oligonucleotide; AGG chr2 60528722 60528741 60528738 +
atttcctcctctaccaaatg

SEQ ID NO: 167244 - DNA, 20 bp, Artificial Sequence
  Synthetic oligonucleotide; TGG chr2 60528729 60528748 60528745 +
cctctaccaaatgaggctaa

SEQ ID NO: 167245 - DNA, 20 bp, Artificial Sequence
  Synthetic oligonucleotide; GGG chr2 60528730 60528749 60528746 +
ctctaccaaatgaggctaat

SEQ ID NO: 167246 - DNA, 20 bp, Artificial Sequence
  Synthetic oligonucleotide; GAG chr2 60528732 60528751 60528748 +
ctaccaaatgaggctaatgg

SEQ ID NO: 167247 - DNA, 20 bp, Artificial Sequence
  Synthetic oligonucleotide; GAG chr2 60528747 60528766 60528763 +
aatgggagtgtttcctttcc

SEQ ID NO: 167248 - DNA, 20 bp, Artificial Sequence
  Synthetic oligonucleotide; AGG chr2 60528748 60528767 60528764 +
atgggagtgtttcctttccg

SEQ ID NO: 167249 - DNA, 20 bp, Artificial Sequence
  Synthetic oligonucleotide; TGG chr2 60528757 60528776 60528773 +
tttcctttccgaggttgttg

SEQ ID NO: 167250 - DNA, 20 bp, Artificial Sequence
  Synthetic oligonucleotide; GGG chr2 60528758 60528777 60528774 +
ttcctttccgaggttgttgt

SEQ ID NO: 167251 - DNA, 20 bp, Artificial Sequence
  Synthetic oligonucleotide; TGG chr2 60528762 60528781 60528778 +
tttccgaggttgttgtggga

SEQ ID NO: 167252 - DNA, 20 bp, Artificial Sequence
  Synthetic oligonucleotide; CAG chr2 60528778 60528797 60528794 +
gggatggaatatcaatgtgt

SEQ ID NO: 167253 - DNA, 20 bp, Artificial Sequence
  Synthetic oligonucleotide; TGG chr2 60528786 60528805 60528802 +
atatcaatgtgtcagacaca

SEQ ID NO: 167254 - DNA, 20 bp, Artificial Sequence
  Synthetic oligonucleotide; CAG chr2 60528801 60528820 60528817 +
acacatggtaataatgacaa

SEQ ID NO: 167255 - DNA, 20 bp, Artificial Sequence
  Synthetic oligonucleotide; TGG chr2 60528810 60528829 60528826 +
aataatgacaacagcaattc

SEQ ID NO: 167256 - DNA, 20 bp, Artificial Sequence
  Synthetic oligonucleotide; GAG chr2 60528812 60528831 60528828 +
taatgacaacagcaattctg

SEQ ID NO: 167257 - DNA, 20 bp, Artificial Sequence
  Synthetic oligonucleotide; AGG chr2 60528813 60528832 60528829 +
aatgacaacagcaattctgg

SEQ ID NO: 167258 - DNA, 20 bp, Artificial Sequence
  Synthetic oligonucleotide; CAG chr2 60528818 60528837 60528834 +
caacagcaattctggaggtg

SEQ ID NO: 167259 - DNA, 20 bp, Artificial Sequence
  Synthetic oligonucleotide; CGG chr2 60528825 60528844 60528841 +
aattctggaggtgcagcccc

SEQ ID NO: 167260 - DNA, 20 bp, Artificial Sequence
  Synthetic oligonucleotide; GAG chr2 60528827 60528846 60528843 +
ttctggaggtgcagcccccg

SEQ ID NO: 167261 - DNA, 20 bp, Artificial Sequence
  Synthetic oligonucleotide; GAG chr2 60528831 60528850 60528847 +
ggaggtgcagcccccggagc

SEQ ID NO: 167262 - DNA, 20 bp, Artificial Sequence
  Synthetic oligonucleotide; TGG chr2 60528868 60528887 60528884 +
tccctcatttacttctcaca

SEQ ID NO: 167263 - DNA, 20 bp, Artificial Sequence
  Synthetic oligonucleotide; GAG chr2 60528878 60528897 60528894 +
acttctcacatggactctat

SEQ ID NO: 167264 - DNA, 20 bp, Artificial Sequence
  Synthetic oligonucleotide; AGG chr2 60528879 60528898 60528895 +
cttctcacatggactctatg

SEQ ID NO: 167265 - DNA, 20 bp, Artificial Sequence
  Synthetic oligonucleotide; AAG chr2 60528883 60528902 60528899 +
tcacatggactctatgaggt

SEQ ID NO: 167266 - DNA, 20 bp, Artificial Sequence
  Synthetic oligonucleotide; AGG chr2 60528884 60528903 60528900 +
cacatggactctatgaggta

SEQ ID NO: 167267 - DNA, 20 bp, Artificial Sequence
  Synthetic oligonucleotide; GGG chr2 60528885 60528904 60528901 +
acatggactctatgaggtaa

SEQ ID NO: 167268 - DNA, 20 bp, Artificial Sequence
  Synthetic oligonucleotide; GAG chr2 60528893 60528912 60528909 +
tctatgaggtaagggacctt

SEQ ID NO: 167269 - DNA, 20 bp, Artificial Sequence
  Synthetic oligonucleotide; CAG chr2 60528910 60528929 60528926 +
cttgagttatctccatttca

SEQ ID NO: 167270 - DNA, 20 bp, Artificial Sequence
  Synthetic oligonucleotide; GAG chr2 60528912 60528931 60528928 +
tgagttatctccatttcaca

SEQ ID NO: 167271 - DNA, 20 bp, Artificial Sequence
  Synthetic oligonucleotide; GAG chr2 60528914 60528933 60528930 +
agttatctccatttcacaga

SEQ ID NO: 167272 - DNA, 20 bp, Artificial Sequence
  Synthetic oligonucleotide; AGG chr2 60528915 60528934 60528931 +
gttatctccatttcacagag

SEQ ID NO: 167273 - DNA, 20 bp, Artificial Sequence
  Synthetic oligonucleotide; CAG chr2 60528932 60528951 60528948 +
gagaggtgaaatgattccct

SEQ ID NO: 167274 - DNA, 20 bp, Artificial Sequence
  Synthetic oligonucleotide; CAG chr2 60528946 60528965 60528962 +
ttccctcagactctcccaac

SEQ ID NO: 167275 - DNA, 20 bp, Artificial Sequence
  Synthetic oligonucleotide; TAG chr2 60528950 60528969 60528966 +
ctcagactctcccaaccagc

SEQ ID NO: 167276 - DNA, 20 bp, Artificial Sequence
  Synthetic oligonucleotide; CAG chr2 60528953 60528972 60528969 +
agactctcccaaccagctag

SEQ ID NO: 167277 - DNA, 20 bp, Artificial Sequence
  Synthetic oligonucleotide; TAG chr2 60528961 60528980 60528977 +
ccaaccagctagcagtaaca

SEQ ID NO: 167278 - DNA, 20 bp, Artificial Sequence
  Synthetic oligonucleotide; CAG chr2 60528975 60528994 60528991 +
gtaacatagaaatctgaacc

SEQ ID NO: 167279 - DNA, 20 bp, Artificial Sequence
  Synthetic oligonucleotide; GAG chr2 60528977 60528996 60528993 +
aacatagaaatctgaaccca

SEQ ID NO: 167280 - DNA, 20 bp, Artificial Sequence
  Synthetic oligonucleotide; CAG chr2 60528997 60529016 60529013 +
gagtaactgtgtcacacacc

SEQ ID NO: 167281 - DNA, 20 bp, Artificial Sequence
  Synthetic oligonucleotide; AGG chr2 60528998 60529017 60529014 +
agtaactgtgtcacacaccc

SEQ ID NO: 167282 - DNA, 20 bp, Artificial Sequence
  Synthetic oligonucleotide; CAG chr2 60529001 60529020 60529017 +
aactgtgtcacacacccagg

SEQ ID NO: 167283 - DNA, 20 bp, Artificial Sequence
  Synthetic oligonucleotide; AGG chr2 60529002 60529021 60529018 +
actgtgtcacacacccaggc

SEQ ID NO: 167284 - DNA, 20 bp, Artificial Sequence
  Synthetic oligonucleotide; AAG chr2 60529008 60529027 60529024 +
tcacacacccaggcaggcac

SEQ ID NO: 167285 - DNA, 20 bp, Artificial Sequence
  Synthetic oligonucleotide; AAG chr2 60529019 60529038 60529035 +
ggcaggcacaagcctctcgt

SEQ ID NO: 167286 - DNA, 20 bp, Artificial Sequence
  Synthetic oligonucleotide; AGG chr2 60529020 60529039 60529036 +
gcaggcacaagcctctcgta

SEQ ID NO: 167287 - DNA, 20 bp, Artificial Sequence
  Synthetic oligonucleotide; TGG chr2 60529036 60529055 60529052 +
cgtaaggcaacacacgtcta

SEQ ID NO: 167288 - DNA, 20 bp, Artificial Sequence
  Synthetic oligonucleotide; GGG chr2 60529037 60529056 60529053 +
gtaaggcaacacacgtctat

SEQ ID NO: 167289 - DNA, 20 bp, Artificial Sequence
  Synthetic oligonucleotide; GGG chr2 60529038 60529057 60529054 +
taaggcaacacacgtctatg

SEQ ID NO: 167290 - DNA, 20 bp, Artificial Sequence
  Synthetic oligonucleotide; GAG chr2 60529040 60529059 60529056 +
aggcaacacacgtctatggg

SEQ ID NO: 167291 - DNA, 20 bp, Artificial Sequence
  Synthetic oligonucleotide; GAG chr2 60529042 60529061 60529058 +
gcaacacacgtctatgggga

SEQ ID NO: 167292 - DNA, 20 bp, Artificial Sequence
  Synthetic oligonucleotide; AGG chr2 60529043 60529062 60529059 +
caacacacgtctatggggag

SEQ ID NO: 167293 - DNA, 20 bp, Artificial Sequence
  Synthetic oligonucleotide; GGG chr2 60529044 60529063 60529060 +
aacacacgtctatggggaga

SEQ ID NO: 167294 - DNA, 20 bp, Artificial Sequence
  Synthetic oligonucleotide; GGG chr2 60529045 60529064 60529061 +
acacacgtctatggggagag

SEQ ID NO: 167295 - DNA, 20 bp, Artificial Sequence
  Synthetic oligonucleotide; GAG chr2 60529060 60529079 60529076 +
gagaggggactcccacccac

SEQ ID NO: 167296 - DNA, 20 bp, Artificial Sequence
  Synthetic oligonucleotide; AGG chr2 60529061 60529080 60529077 +
agaggggactcccacccacg

SEQ ID NO: 167297 - DNA, 20 bp, Artificial Sequence
  Synthetic oligonucleotide; GGG chr2 60529062 60529081 60529078 +
gaggggactcccacccacga

SEQ ID NO: 167298 - DNA, 20 bp, Artificial Sequence
  Synthetic oligonucleotide; GAG chr2 60529064 60529083 60529080 +
ggggactcccacccacgagg

SEQ ID NO: 167299 - DNA, 20 bp, Artificial Sequence
  Synthetic oligonucleotide; CAG chr2 60529074 60529093 60529090 +
acccacgagggagctgccac

SEQ ID NO: 167300 - DNA, 20 bp, Artificial Sequence
  Synthetic oligonucleotide; GAG chr2 60529086 60529105 60529102 +
gctgccaccagaaacataat

SEQ ID NO: 167301 - DNA, 20 bp, Artificial Sequence
  Synthetic oligonucleotide; GAG chr2 60529094 60529113 60529110 +
cagaaacataatgagaccct

SEQ ID NO: 167302 - DNA, 20 bp, Artificial Sequence
  Synthetic oligonucleotide; TAG chr2 60529102 60529121 60529118 +
taatgagaccctgagctctt

SEQ ID NO: 167303 - DNA, 20 bp, Artificial Sequence
  Synthetic oligonucleotide; TGG chr2 60529154 60529173 60529170 +
ccaacctgctcaccccataa

SEQ ID NO: 167304 - DNA, 20 bp, Artificial Sequence
  Synthetic oligonucleotide; GGG chr2 60529155 60529174 60529171 +
caacctgctcaccccataat

SEQ ID NO: 167305 - DNA, 20 bp, Artificial Sequence
  Synthetic oligonucleotide; GGG chr2 60529156 60529175 60529172 +
aacctgctcaccccataatg

SEQ ID NO: 167306 - DNA, 20 bp, Artificial Sequence
  Synthetic oligonucleotide; GGG chr2 60529157 60529176 60529173 +
acctgctcaccccataatgg

SEQ ID NO: 167307 - DNA, 20 bp, Artificial Sequence
  Synthetic oligonucleotide; GAG chr2 60529169 60529188 60529185 +
cataatgggggaactacttt

SEQ ID NO: 167308 - DNA, 20 bp, Artificial Sequence
  Synthetic oligonucleotide; CAG chr2 60529176 60529195 60529192 +
ggggaactactttgagaccc

SEQ ID NO: 167309 - DNA, 20 bp, Artificial Sequence
  Synthetic oligonucleotide; AGG chr2 60529177 60529196 60529193 +
gggaactactttgagacccc

SEQ ID NO: 167310 - DNA, 20 bp, Artificial Sequence
  Synthetic oligonucleotide; GAG chr2 60529179 60529198 60529195 +
gaactactttgagaccccag

SEQ ID NO: 167311 - DNA, 20 bp, Artificial Sequence
  Synthetic oligonucleotide; CAG chr2 60529186 60529205 60529202 +
tttgagaccccaggagcaca

SEQ ID NO: 167312 - DNA, 20 bp, Artificial Sequence
  Synthetic oligonucleotide; AAG chr2 60529193 60529212 60529209 +
ccccaggagcacacagttcc

SEQ ID NO: 167313 - DNA, 20 bp, Artificial Sequence
  Synthetic oligonucleotide; GAG chr2 60529200 60529219 60529216 +
agcacacagttccaagccat

SEQ ID NO: 167314 - DNA, 20 bp, Artificial Sequence
  Synthetic oligonucleotide; TAG chr2 60529215 60529234 60529231 +
gccatgagtcataaccgtaa

SEQ ID NO: 167315 - DNA, 20 bp, Artificial Sequence
  Synthetic oligonucleotide; GAG chr2 60529222 60529241 60529238 +
gtcataaccgtaatagtaat

SEQ ID NO: 167316 - DNA, 20 bp, Artificial Sequence
  Synthetic oligonucleotide; CAG chr2 60529252 60529271 60529268 +
gacatgttttaccatgtgcc

SEQ ID NO: 167317 - DNA, 20 bp, Artificial Sequence
  Synthetic oligonucleotide; GAG chr2 60529259 60529278 60529275 +
tttaccatgtgcccagcact

SEQ ID NO: 167318 - DNA, 20 bp, Artificial Sequence
  Synthetic oligonucleotide; CAG chr2 60529264 60529283 60529280 +
catgtgcccagcactgagcc

SEQ ID NO: 167319 - DNA, 20 bp, Artificial Sequence
  Synthetic oligonucleotide; TAG chr2 60529285 60529304 60529301 +
agcgcccccacatgctctca

SEQ ID NO: 167320 - DNA, 20 bp, Artificial Sequence
  Synthetic oligonucleotide; AGG chr2 60529286 60529305 60529302 +
gcgcccccacatgctctcat

SEQ ID NO: 167321 - DNA, 20 bp, Artificial Sequence
  Synthetic oligonucleotide; AAG chr2 60529296 60529315 60529312 +
atgctctcataggatgctca

SEQ ID NO: 167322 - DNA, 20 bp, Artificial Sequence
  Synthetic oligonucleotide; AGG chr2 60529297 60529316 60529313 +
tgctctcataggatgctcaa

SEQ ID NO: 167323 - DNA, 20 bp, Artificial Sequence
  Synthetic oligonucleotide; GAG chr2 60529306 60529325 60529322 +
aggatgctcaaaggccctat

SEQ ID NO: 167324 - DNA, 20 bp, Artificial Sequence
  Synthetic oligonucleotide; AGG chr2 60529307 60529326 60529323 +
ggatgctcaaaggccctatg

SEQ ID NO: 167325 - DNA, 20 bp, Artificial Sequence
  Synthetic oligonucleotide; AAG chr2 60529311 60529330 60529327 +
gctcaaaggccctatgaggc

SEQ ID NO: 167326 - DNA, 20 bp, Artificial Sequence
  Synthetic oligonucleotide; CAG chr2 60529336 60529355 60529352 +
ccgtgattctccccacttta

SEQ ID NO: 167327 - DNA, 20 bp, Artificial Sequence
  Synthetic oligonucleotide; GAG chr2 60529342 60529361 60529358 +
ttctccccactttacagatt

SEQ ID NO: 167328 - DNA, 20 bp, Artificial Sequence
  Synthetic oligonucleotide; AGG chr2 60529343 60529362 60529359 +
tctccccactttacagattg

SEQ ID NO: 167329 - DNA, 20 bp, Artificial Sequence
  Synthetic oligonucleotide; AAG chr2 60529346 60529365 60529362 +
ccccactttacagattgagg

SEQ ID NO: 167330 - DNA, 20 bp, Artificial Sequence
  Synthetic oligonucleotide; CGG chr2 60529349 60529368 60529365 +
cactttacagattgaggaag

SEQ ID NO: 167331 - DNA, 20 bp, Artificial Sequence
  Synthetic oligonucleotide; GAG chr2 60529351 60529370 60529367 +
ctttacagattgaggaagcg

SEQ ID NO: 167332 - DNA, 20 bp, Artificial Sequence
  Synthetic oligonucleotide; AGG chr2 60529352 60529371 60529368 +
tttacagattgaggaagcgg

SEQ ID NO: 167333 - DNA, 20 bp, Artificial Sequence
  Synthetic oligonucleotide; TAG chr2 60529357 60529376 60529373 +
agattgaggaagcggaggct

SEQ ID NO: 167334 - DNA, 20 bp, Artificial Sequence
  Synthetic oligonucleotide; AGG chr2 60529358 60529377 60529374 +
gattgaggaagcggaggctt

SEQ ID NO: 167335 - DNA, 20 bp, Artificial Sequence
  Synthetic oligonucleotide; GGG chr2 60529359 60529378 60529375 +
attgaggaagcggaggctta

SEQ ID NO: 167336 - DNA, 20 bp, Artificial Sequence
  Synthetic oligonucleotide; AAG chr2 60529376 60529395 60529392 +
ttagggaatgaaatctgccc

SEQ ID NO: 167337 - DNA, 20 bp, Artificial Sequence
  Synthetic oligonucleotide; AGG chr2 60529377 60529396 60529393 +
tagggaatgaaatctgccca

SEQ ID NO: 167338 - DNA, 20 bp, Artificial Sequence
  Synthetic oligonucleotide; TAG chr2 60529389 60529408 60529405 +
tctgcccaaggttgcacaac

SEQ ID NO: 167339 - DNA, 20 bp, Artificial Sequence
  Synthetic oligonucleotide; TGG chr2 60529395 60529414 60529411 +
caaggttgcacaactagaaa

SEQ ID NO: 167340 - DNA, 20 bp, Artificial Sequence
  Synthetic oligonucleotide; CAG chr2 60529415 60529434 60529431 +
tggtattacttctttaccct

SEQ ID NO: 167341 - DNA, 20 bp, Artificial Sequence
  Synthetic oligonucleotide; AAG chr2 60529445 60529464 60529461 +
cattttatttcgtgtaatca

SEQ ID NO: 167342 - DNA, 20 bp, Artificial Sequence
  Synthetic oligonucleotide; GAG chr2 60529447 60529466 60529463 +
ttttatttcgtgtaatcaaa

SEQ ID NO: 167343 - DNA, 20 bp, Artificial Sequence
  Synthetic oligonucleotide; AAG chr2 60529450 60529469 60529466 +
tatttcgtgtaatcaaagag

SEQ ID NO: 167344 - DNA, 20 bp, Artificial Sequence
  Synthetic oligonucleotide; AAG chr2 60529453 60529472 60529469 +
ttcgtgtaatcaaagagaag

SEQ ID NO: 167345 - DNA, 20 bp, Artificial Sequence
  Synthetic oligonucleotide; AAG chr2 60529458 60529477 60529474 +
gtaatcaaagagaagaagaa

SEQ ID NO: 167346 - DNA, 20 bp, Artificial Sequence
  Synthetic oligonucleotide; AAG chr2 60529462 60529481 60529478 +
tcaaagagaagaagaaaaga

SEQ ID NO: 167347 - DNA, 20 bp, Artificial Sequence
  Synthetic oligonucleotide; AAG chr2 60529465 60529484 60529481 +
aagagaagaagaaaagaaag

SEQ ID NO: 167348 - DNA, 20 bp, Artificial Sequence
  Synthetic oligonucleotide; AAG chr2 60529482 60529501 60529498 +
aagaagatacatcatatgtc

SEQ ID NO: 167349 - DNA, 20 bp, Artificial Sequence
  Synthetic oligonucleotide; AGG chr2 60529483 60529502 60529499 +
agaagatacatcatatgtca

SEQ ID NO: 167350 - DNA, 20 bp, Artificial Sequence
  Synthetic oligonucleotide; GGG chr2 60529484 60529503 60529500 +
gaagatacatcatatgtcaa

SEQ ID NO: 167351 - DNA, 20 bp, Artificial Sequence
  Synthetic oligonucleotide; CAG chr2 60529525 60529544 60529541 +
gtccctcctccctttcttac

SEQ ID NO: 167352 - DNA, 20 bp, Artificial Sequence
  Synthetic oligonucleotide; CAG chr2 60529530 60529549 60529546 +
tcctccctttcttaccagct

SEQ ID NO: 167353 - DNA, 20 bp, Artificial Sequence
  Synthetic oligonucleotide; AGG chr2 60529531 60529550 60529547 +
cctccctttcttaccagctc

SEQ ID NO: 167354 - DNA, 20 bp, Artificial Sequence
  Synthetic oligonucleotide; AAG chr2 60529539 60529558 60529555 +
tcttaccagctcaggttaca

SEQ ID NO: 167355 - DNA, 20 bp, Artificial Sequence
  Synthetic oligonucleotide; TAG chr2 60529547 60529566 60529563 +
gctcaggttacaaagacatc

SEQ ID NO: 167356 - DNA, 20 bp, Artificial Sequence
  Synthetic oligonucleotide; AGG chr2 60529548 60529567 60529564 +
ctcaggttacaaagacatct

SEQ ID NO: 167357 - DNA, 20 bp, Artificial Sequence
  Synthetic oligonucleotide; TGG chr2 60529551 60529570 60529567 +
aggttacaaagacatctagg

SEQ ID NO: 167358 - DNA, 20 bp, Artificial Sequence
  Synthetic oligonucleotide; GGG chr2 60529552 60529571 60529568 +
ggttacaaagacatctaggt

SEQ ID NO: 167359 - DNA, 20 bp, Artificial Sequence
  Synthetic oligonucleotide; GAG chr2 60529554 60529573 60529570 +
ttacaaagacatctaggtgg

SEQ ID NO: 167360 - DNA, 20 bp, Artificial Sequence
  Synthetic oligonucleotide; GAG chr2 60529556 60529575 60529572 +
acaaagacatctaggtggga

SEQ ID NO: 167361 - DNA, 20 bp, Artificial Sequence
  Synthetic oligonucleotide; AAG chr2 60529559 60529578 60529575 +
aagacatctaggtgggagag

SEQ ID NO: 167362 - DNA, 20 bp, Artificial Sequence
  Synthetic oligonucleotide; AAG chr2 60529571 60529590 60529587 +
tgggagagaagactgcctct

SEQ ID NO: 167363 - DNA, 20 bp, Artificial Sequence
  Synthetic oligonucleotide; AGG chr2 60529572 60529591 60529588 +
gggagagaagactgcctcta

SEQ ID NO: 167364 - DNA, 20 bp, Artificial Sequence
  Synthetic oligonucleotide; GGG chr2 60529573 60529592 60529589 +
ggagagaagactgcctctaa

SEQ ID NO: 167365 - DNA, 20 bp, Artificial Sequence
  Synthetic oligonucleotide; TGG chr2 60529578 60529597 60529594 +
gaagactgcctctaagggct

SEQ ID NO: 167366 - DNA, 20 bp, Artificial Sequence
  Synthetic oligonucleotide; GAG chr2 60529583 60529602 60529599 +
ctgcctctaagggcttggct

SEQ ID NO: 167367 - DNA, 20 bp, Artificial Sequence
  Synthetic oligonucleotide; TGG chr2 60529587 60529606 60529603 +
ctctaagggcttggctgagt

SEQ ID NO: 167368 - DNA, 20 bp, Artificial Sequence
  Synthetic oligonucleotide; CGG chr2 60529590 60529609 60529606 +
taagggcttggctgagttgg

SEQ ID NO: 167369 - DNA, 20 bp, Artificial Sequence
  Synthetic oligonucleotide; GGG chr2 60529591 60529610 60529607 +
aagggcttggctgagttggc

SEQ ID NO: 167370 - DNA, 20 bp, Artificial Sequence
  Synthetic oligonucleotide; CGG chr2 60529594 60529613 60529610 +
ggcttggctgagttggcggg

SEQ ID NO: 167371 - DNA, 20 bp, Artificial Sequence
  Synthetic oligonucleotide; GGG chr2 60529595 60529614 60529611 +
gcttggctgagttggcgggc

SEQ ID NO: 167372 - DNA, 20 bp, Artificial Sequence
  Synthetic oligonucleotide; GAG chr2 60529597 60529616 60529613 +
ttggctgagttggcgggcgg

SEQ ID NO: 167373 - DNA, 20 bp, Artificial Sequence
  Synthetic oligonucleotide; CGG chr2 60529600 60529619 60529616 +
gctgagttggcgggcgggag

SEQ ID NO: 167374 - DNA, 20 bp, Artificial Sequence
  Synthetic oligonucleotide; GGG chr2 60529601 60529620 60529617 +
ctgagttggcgggcgggagc

SEQ ID NO: 167375 - DNA, 20 bp, Artificial Sequence
  Synthetic oligonucleotide; GGG chr2 60529602 60529621 60529618 +
tgagttggcgggcgggagcg

SEQ ID NO: 167376 - DNA, 20 bp, Artificial Sequence
  Synthetic oligonucleotide; GGG chr2 60529603 60529622 60529619 +
gagttggcgggcgggagcgg

SEQ ID NO: 167377 - DNA, 20 bp, Artificial Sequence
  Synthetic oligonucleotide; CAG chr2 60529606 60529625 60529622 +
ttggcgggcgggagcggggg

SEQ ID NO: 167378 - DNA, 20 bp, Artificial Sequence
  Synthetic oligonucleotide; AGG chr2 60529607 60529626 60529623 +
tggcgggcgggagcgggggc

SEQ ID NO: 167379 - DNA, 20 bp, Artificial Sequence
  Synthetic oligonucleotide; TGG chr2 60529616 60529635 60529632 +
ggagcgggggcaggtatcca

SEQ ID NO: 167380 - DNA, 20 bp, Artificial Sequence
  Synthetic oligonucleotide; GGG chr2 60529617 60529636 60529633 +
gagcgggggcaggtatccat

SEQ ID NO: 167381 - DNA, 20 bp, Artificial Sequence
  Synthetic oligonucleotide; CAG chr2 60529627 60529646 60529643 +
aggtatccatgggataaacc

SEQ ID NO: 167382 - DNA, 20 bp, Artificial Sequence
  Synthetic oligonucleotide; GAG chr2 60529629 60529648 60529645 +
gtatccatgggataaaccca

SEQ ID NO: 167383 - DNA, 20 bp, Artificial Sequence
  Synthetic oligonucleotide; AGG chr2 60529630 60529649 60529646 +
tatccatgggataaacccag

SEQ ID NO: 167384 - DNA, 20 bp, Artificial Sequence
  Synthetic oligonucleotide; CAG chr2 60529647 60529666 60529663 +
cagaggcccccaaattttcc

SEQ ID NO: 167385 - DNA, 20 bp, Artificial Sequence
  Synthetic oligonucleotide; TAG chr2 60529664 60529683 60529680 +
tcccagtttttatttgctac

SEQ ID NO: 167386 - DNA, 20 bp, Artificial Sequence
  Synthetic oligonucleotide; AAG chr2 60529669 60529688 60529685 +
gtttttatttgctactagaa

SEQ ID NO: 167387 - DNA, 20 bp, Artificial Sequence
  Synthetic oligonucleotide; AGG chr2 60529670 60529689 60529686 +
tttttatttgctactagaaa

SEQ ID NO: 167388 - DNA, 20 bp, Artificial Sequence
  Synthetic oligonucleotide; GAG chr2 60529672 60529691 60529688 +
tttatttgctactagaaaag

SEQ ID NO: 167389 - DNA, 20 bp, Artificial Sequence
  Synthetic oligonucleotide; AAG chr2 60529675 60529694 60529691 +
atttgctactagaaaaggag

SEQ ID NO: 167390 - DNA, 20 bp, Artificial Sequence
  Synthetic oligonucleotide; AGG chr2 60529676 60529695 60529692 +
tttgctactagaaaaggaga

SEQ ID NO: 167391 - DNA, 20 bp, Artificial Sequence
  Synthetic oligonucleotide; GAG chr2 60529697 60529716 60529713 +
ggaaatcctgcctcccttat

SEQ ID NO: 167392 - DNA, 20 bp, Artificial Sequence
  Synthetic oligonucleotide; AGG chr2 60529698 60529717 60529714 +
gaaatcctgcctcccttatg

SEQ ID NO: 167393 - DNA, 20 bp, Artificial Sequence
  Synthetic oligonucleotide; TAG chr2 60529703 60529722 60529719 +
cctgcctcccttatgaggcc

SEQ ID NO: 167394 - DNA, 20 bp, Artificial Sequence
  Synthetic oligonucleotide; CAG chr2 60529707 60529726 60529723 +
cctcccttatgaggcctagc

SEQ ID NO: 167395 - DNA, 20 bp, Artificial Sequence
  Synthetic oligonucleotide; AGG chr2 60529708 60529727 60529724 +
ctcccttatgaggcctagcc

SEQ ID NO: 167396 - DNA, 20 bp, Artificial Sequence
  Synthetic oligonucleotide; GGG chr2 60529709 60529728 60529725 +
tcccttatgaggcctagcca

SEQ ID NO: 167397 - DNA, 20 bp, Artificial Sequence
  Synthetic oligonucleotide; GGG chr2 60529710 60529729 60529726 +
cccttatgaggcctagccag

SEQ ID NO: 167398 - DNA, 20 bp, Artificial Sequence
  Synthetic oligonucleotide; AAG chr2 60529713 60529732 60529729 +
ttatgaggcctagccagggg

SEQ ID NO: 167399 - DNA, 20 bp, Artificial Sequence
  Synthetic oligonucleotide; TAG chr2 60529742 60529761 60529758 +
tgattttatcacattttata

SEQ ID NO: 167400 - DNA, 20 bp, Artificial Sequence
  Synthetic oligonucleotide; TGG chr2 60529755 60529774 60529771 +
ttttatatagatgtgcacaa

SEQ ID NO: 167401 - DNA, 20 bp, Artificial Sequence
  Synthetic oligonucleotide; AAG chr2 60529767 60529786 60529783 +
gtgcacaatggtgccttttc

SEQ ID NO: 167402 - DNA, 20 bp, Artificial Sequence
  Synthetic oligonucleotide; TGG chr2 60529777 60529796 60529793 +
gtgccttttcaagtctatga

SEQ ID NO: 167403 - DNA, 20 bp, Artificial Sequence
  Synthetic oligonucleotide; GGG chr2 60529778 60529797 60529794 +
tgccttttcaagtctatgat

SEQ ID NO: 167404 - DNA, 20 bp, Artificial Sequence
  Synthetic oligonucleotide; CAG chr2 60529812 60529831 60529828 +
ttattgtgtgaatatcattt

SEQ ID NO: 167405 - DNA, 20 bp, Artificial Sequence
  Synthetic oligonucleotide; CAG chr2 60529816 60529835 60529832 +
tgtgtgaatatcatttcaga

SEQ ID NO: 167406 - DNA, 20 bp, Artificial Sequence
  Synthetic oligonucleotide; AGG chr2 60529817 60529836 60529833 +
gtgtgaatatcatttcagac

SEQ ID NO: 167407 - DNA, 20 bp, Artificial Sequence
  Synthetic oligonucleotide; AAG chr2 60529836 60529855 60529852 +
caggtccccaaaccacttga

SEQ ID NO: 167408 - DNA, 20 bp, Artificial Sequence
  Synthetic oligonucleotide; TGG chr2 60529842 60529861 60529858 +
cccaaaccacttgaaagccc

SEQ ID NO: 167409 - DNA, 20 bp, Artificial Sequence
  Synthetic oligonucleotide; TAG chr2 60529852 60529871 60529868 +
ttgaaagccctggtgtcccc

SEQ ID NO: 167410 - DNA, 20 bp, Artificial Sequence
  Synthetic oligonucleotide; AGG chr2 60529853 60529872 60529869 +
tgaaagccctggtgtcccct

SEQ ID NO: 167411 - DNA, 20 bp, Artificial Sequence
  Synthetic oligonucleotide; TGG chr2 60529856 60529875 60529872 +
aagccctggtgtcccctagg

SEQ ID NO: 167412 - DNA, 20 bp, Artificial Sequence
  Synthetic oligonucleotide; GGG chr2 60529857 60529876 60529873 +
agccctggtgtcccctaggt

SEQ ID NO: 167413 - DNA, 20 bp, Artificial Sequence
  Synthetic oligonucleotide; CAG chr2 60529872 60529891 60529888 +
taggtgggattctatgaacc

SEQ ID NO: 167414 - DNA, 20 bp, Artificial Sequence
  Synthetic oligonucleotide; TAG chr2 60529878 60529897 60529894 +
ggattctatgaacccagctt

SEQ ID NO: 167415 - DNA, 20 bp, Artificial Sequence
  Synthetic oligonucleotide; CAG chr2 60529884 60529903 60529900 +
tatgaacccagctttagccc

SEQ ID NO: 167416 - DNA, 20 bp, Artificial Sequence
  Synthetic oligonucleotide; CAG chr2 60529887 60529906 60529903 +
gaacccagctttagccccag

SEQ ID NO: 167417 - DNA, 20 bp, Artificial Sequence
  Synthetic oligonucleotide; TGG chr2 60529896 60529915 60529912 +
tttagccccagcagctcctc

SEQ ID NO: 167418 - DNA, 20 bp, Artificial Sequence
  Synthetic oligonucleotide; TGG chr2 60529899 60529918 60529915 +
agccccagcagctcctctgg

SEQ ID NO: 167419 - DNA, 20 bp, Artificial Sequence
  Synthetic oligonucleotide; GGG chr2 60529900 60529919 60529916 +
gccccagcagctcctctggt

SEQ ID NO: 167420 - DNA, 20 bp, Artificial Sequence
  Synthetic oligonucleotide; TAG chr2 60529906 60529925 60529922 +
gcagctcctctggtgggaac

SEQ ID NO: 167421 - DNA, 20 bp, Artificial Sequence
  Synthetic oligonucleotide; CAG chr2 60529923 60529942 60529939 +
aactagaacatgcctcctgc

SEQ ID NO: 167422 - DNA, 20 bp, Artificial Sequence
  Synthetic oligonucleotide; TAG chr2 60529927 60529946 60529943 +
agaacatgcctcctgccagt

SEQ ID NO: 167423 - DNA, 20 bp, Artificial Sequence
  Synthetic oligonucleotide; CAG chr2 60529933 60529952 60529949 +
tgcctcctgccagttagtaa

SEQ ID NO: 167424 - DNA, 20 bp, Artificial Sequence
  Synthetic oligonucleotide; AGG chr2 60529934 60529953 60529950 +
gcctcctgccagttagtaac

SEQ ID NO: 167425 - DNA, 20 bp, Artificial Sequence
  Synthetic oligonucleotide; GGG chr2 60529935 60529954 60529951 +
cctcctgccagttagtaaca

SEQ ID NO: 167426 - DNA, 20 bp, Artificial Sequence
  Synthetic oligonucleotide; TGG chr2 60529961 60529980 60529977 +
ttcaattacttcgccacttg

SEQ ID NO: 167427 - DNA, 20 bp, Artificial Sequence
  Synthetic oligonucleotide; CAG chr2 60529964 60529983 60529980 +
aattacttcgccacttgtgg

SEQ ID NO: 167428 - DNA, 20 bp, Artificial Sequence
  Synthetic oligonucleotide; AGG chr2 60529965 60529984 60529981 +
attacttcgccacttgtggc

SEQ ID NO: 167429 - DNA, 20 bp, Artificial Sequence
  Synthetic oligonucleotide; GAG chr2 60529967 60529986 60529983 +
tacttcgccacttgtggcag

SEQ ID NO: 167430 - DNA, 20 bp, Artificial Sequence
  Synthetic oligonucleotide; AGG chr2 60529968 60529987 60529984 +
acttcgccacttgtggcagg

SEQ ID NO: 167431 - DNA, 20 bp, Artificial Sequence
  Synthetic oligonucleotide; GGG chr2 60529969 60529988 60529985 +
cttcgccacttgtggcagga

SEQ ID NO: 167432 - DNA, 20 bp, Artificial Sequence
  Synthetic oligonucleotide; AAG chr2 60529974 60529993 60529990 +
ccacttgtggcaggagggca

SEQ ID NO: 167433 - DNA, 20 bp, Artificial Sequence
  Synthetic oligonucleotide; AAG chr2 60529989 60530008 60530005 +
gggcaaagactgcacattaa

SEQ ID NO: 167434 - DNA, 20 bp, Artificial Sequence
  Synthetic oligonucleotide; GAG chr2 60529991 60530010 60530007 +
gcaaagactgcacattaaaa

SEQ ID NO: 167435 - DNA, 20 bp, Artificial Sequence
  Synthetic oligonucleotide; CAG chr2 60530004 60530023 60530020 +
attaaaagagctaaaaatgt

SEQ ID NO: 167436 - DNA, 20 bp, Artificial Sequence
  Synthetic oligonucleotide; AGG chr2 60530005 60530024 60530021 +
ttaaaagagctaaaaatgtc

SEQ ID NO: 167437 - DNA, 20 bp, Artificial Sequence
  Synthetic oligonucleotide; AAG chr2 60530008 60530027 60530024 +
aaagagctaaaaatgtcagg

SEQ ID NO: 167438 - DNA, 20 bp, Artificial Sequence
  Synthetic oligonucleotide; TGG chr2 60530015 60530034 60530031 +
taaaaatgtcaggaagttat

SEQ ID NO: 167439 - DNA, 20 bp, Artificial Sequence
  Synthetic oligonucleotide; GGG chr2 60530016 60530035 60530032 +
aaaaatgtcaggaagttatt

SEQ ID NO: 167440 - DNA, 20 bp, Artificial Sequence
  Synthetic oligonucleotide; CAG chr2 60530083 60530102 60530099 +
tcacaataaactaaaaaaca

SEQ ID NO: 167441 - DNA, 20 bp, Artificial Sequence
  Synthetic oligonucleotide; AGG chr2 60530084 60530103 60530100 +
cacaataaactaaaaaacac

SEQ ID NO: 167442 - DNA, 20 bp, Artificial Sequence
  Synthetic oligonucleotide; AAG chr2 60530087 60530106 60530103 +
aataaactaaaaaacacagg

SEQ ID NO: 167443 - DNA, 20 bp, Artificial Sequence
  Synthetic oligonucleotide; GAG chr2 60530089 60530108 60530105 +
taaactaaaaaacacaggaa

SEQ ID NO: 167444 - DNA, 20 bp, Artificial Sequence
  Synthetic oligonucleotide; AGG chr2 60530090 60530109 60530106 +
aaactaaaaaacacaggaag

SEQ ID NO: 167445 - DNA, 20 bp, Artificial Sequence
  Synthetic oligonucleotide; AAG chr2 60530095 60530114 60530111 +
aaaaaacacaggaagaggcc

SEQ ID NO: 167446 - DNA, 20 bp, Artificial Sequence
  Synthetic oligonucleotide; AAG chr2 60530098 60530117 60530114 +
aaacacaggaagaggccaag

SEQ ID NO: 167447 - DNA, 20 bp, Artificial Sequence
  Synthetic oligonucleotide; AAG chr2 60530103 60530122 60530119 +
caggaagaggccaagaagat

SEQ ID NO: 167448 - DNA, 20 bp, Artificial Sequence
  Synthetic oligonucleotide; GAG chr2 60530112 60530131 60530128 +
gccaagaagataagaaaatc

SEQ ID NO: 167449 - DNA, 20 bp, Artificial Sequence
  Synthetic oligonucleotide; AAG chr2 60530123 60530142 60530139 +
aagaaaatcgagaacaaaac

SEQ ID NO: 167450 - DNA, 20 bp, Artificial Sequence
  Synthetic oligonucleotide; TGG chr2 60530136 60530155 60530152 +
acaaaacaagcccaaacaca

SEQ ID NO: 167451 - DNA, 20 bp, Artificial Sequence
  Synthetic oligonucleotide; GGG chr2 60530137 60530156 60530153 +
caaaacaagcccaaacacat

SEQ ID NO: 167452 - DNA, 20 bp, Artificial Sequence
  Synthetic oligonucleotide; CGG chr2 60530148 60530167 60530164 +
caaacacatgggtttgccat

SEQ ID NO: 167453 - DNA, 20 bp, Artificial Sequence
  Synthetic oligonucleotide; TGG chr2 60530154 60530173 60530170 +
catgggtttgccatcggtcc

SEQ ID NO: 167454 - DNA, 20 bp, Artificial Sequence
  Synthetic oligonucleotide; GGG chr2 60530155 60530174 60530171 +
atgggtttgccatcggtcct

SEQ ID NO: 167455 - DNA, 20 bp, Artificial Sequence
  Synthetic oligonucleotide; CAG chr2 60530165 60530184 60530181 +
catcggtcctgggtcctgcc

SEQ ID NO: 167456 - DNA, 20 bp, Artificial Sequence
  Synthetic oligonucleotide; AGG chr2 60530166 60530185 60530182 +
atcggtcctgggtcctgccc

SEQ ID NO: 167457 - DNA, 20 bp, Artificial Sequence
  Synthetic oligonucleotide; AAG chr2 60530170 60530189 60530186 +
gtcctgggtcctgcccagga

SEQ ID NO: 167458 - DNA, 20 bp, Artificial Sequence
  Synthetic oligonucleotide; AGG chr2 60530171 60530190 60530187 +
tcctgggtcctgcccaggaa

SEQ ID NO: 167459 - DNA, 20 bp, Artificial Sequence
  Synthetic oligonucleotide; AAG chr2 60530187 60530206 60530203 +
ggaaaggctgcgcctctaac

SEQ ID NO: 167460 - DNA, 20 bp, Artificial Sequence
  Synthetic oligonucleotide; GAG chr2 60530189 60530208 60530205 +
aaaggctgcgcctctaacaa

SEQ ID NO: 167461 - DNA, 20 bp, Artificial Sequence
  Synthetic oligonucleotide; TGG chr2 60530209 60530228 60530225 +
gagcaccttttccccacccc

SEQ ID NO: 167462 - DNA, 20 bp, Artificial Sequence
  Synthetic oligonucleotide; GAG chr2 60530220 60530239 60530236 +
ccccacccctggcctttctt

SEQ ID NO: 167463 - DNA, 20 bp, Artificial Sequence
  Synthetic oligonucleotide; GAG chr2 60530231 60530250 60530247 +
gcctttcttgagccttcctt

SEQ ID NO: 167464 - DNA, 20 bp, Artificial Sequence
  Synthetic oligonucleotide; CAG chr2 60530257 60530276 60530273 +
tccttgcatattatcgttct

SEQ ID NO: 167465 - DNA, 20 bp, Artificial Sequence
  Synthetic oligonucleotide; CAG chr2 60530267 60530286 60530283 +
ttatcgttctcagccaccga

SEQ ID NO: 167466 - DNA, 20 bp, Artificial Sequence
  Synthetic oligonucleotide; CAG chr2 60530279 60530298 60530295 +
gccaccgacagcttaattca

SEQ ID NO: 167467 - DNA, 20 bp, Artificial Sequence
  Synthetic oligonucleotide; AGG chr2 60530280 60530299 60530296 +
ccaccgacagcttaattcac

SEQ ID NO: 167468 - DNA, 20 bp, Artificial Sequence
  Synthetic oligonucleotide; AAG chr2 60530293 60530312 60530309 +
aattcacaggcccttccaac

SEQ ID NO: 167469 - DNA, 20 bp, Artificial Sequence
  Synthetic oligonucleotide; CAG chr2 60530304 60530323 60530320 +
ccttccaacaagttaaactt

SEQ ID NO: 167470 - DNA, 20 bp, Artificial Sequence
  Synthetic oligonucleotide; AAG chr2 60530329 60530348 60530345 +
atttaaaaaaaaaaaaaaaa

SEQ ID NO: 167471 - DNA, 20 bp, Artificial Sequence
  Synthetic oligonucleotide; GAG chr2 60530331 60530350 60530347 +
ttaaaaaaaaaaaaaaaaaa

SEQ ID NO: 167472 - DNA, 20 bp, Artificial Sequence
  Synthetic oligonucleotide; CAG chr2 60530361 60530380 60530377 +
tgatttcttacctgcacacg

SEQ ID NO: 167473 - DNA, 20 bp, Artificial Sequence
  Synthetic oligonucleotide; AGG chr2 60530362 60530381 60530378 +
gatttcttacctgcacacgc

SEQ ID NO: 167474 - DNA, 20 bp, Artificial Sequence
  Synthetic oligonucleotide; CGG chr2 60530370 60530389 60530386 +
acctgcacacgcaggcacgc

SEQ ID NO: 167475 - DNA, 20 bp, Artificial Sequence
  Synthetic oligonucleotide; GAG chr2 60530397 60530416 60530413 +
gccccaccccactgcaccac

SEQ ID NO: 167476 - DNA, 20 bp, Artificial Sequence
  Synthetic oligonucleotide; TGG chr2 60530410 60530429 60530426 +
gcaccacgagctctcacacc

SEQ ID NO: 167477 - DNA, 20 bp, Artificial Sequence
  Synthetic oligonucleotide; TGG chr2 60530443 60530462 60530459 +
acaaccaaacccttcccatc

SEQ ID NO: 167478 - DNA, 20 bp, Artificial Sequence
  Synthetic oligonucleotide; CGG chr2 60530450 60530469 60530466 +
aacccttcccatctggccct

SEQ ID NO: 167479 - DNA, 20 bp, Artificial Sequence
  Synthetic oligonucleotide; GGG chr2 60530451 60530470 60530467 +
acccttcccatctggccctc

SEQ ID NO: 167480 - DNA, 20 bp, Artificial Sequence
  Synthetic oligonucleotide; TGG chr2 60530458 60530477 60530474 +
ccatctggccctcgggttac

SEQ ID NO: 167481 - DNA, 20 bp, Artificial Sequence
  Synthetic oligonucleotide; CGG chr2 60530485 60530504 60530501 +
atcacaactttttttcccaa

SEQ ID NO: 167482 - DNA, 20 bp, Artificial Sequence
  Synthetic oligonucleotide; AAG chr2 60530489 60530508 60530505 +
caactttttttcccaacggc

SEQ ID NO: 167483 - DNA, 20 bp, Artificial Sequence
  Synthetic oligonucleotide; CAG chr2 60530493 60530512 60530509 +
tttttttcccaacggcaagc

SEQ ID NO: 167484 - DNA, 20 bp, Artificial Sequence
  Synthetic oligonucleotide; AGG chr2 60530494 60530513 60530510 +
ttttttcccaacggcaagcc

SEQ ID NO: 167485 - DNA, 20 bp, Artificial Sequence
  Synthetic oligonucleotide; AAG chr2 60530498 60530517 60530514 +
ttcccaacggcaagccagga

SEQ ID NO: 167486 - DNA, 20 bp, Artificial Sequence
  Synthetic oligonucleotide; TAG chr2 60530505 60530524 60530521 +
cggcaagccaggaaagatga

SEQ ID NO: 167487 - DNA, 20 bp, Artificial Sequence
  Synthetic oligonucleotide; TAG chr2 60530520 60530539 60530536 +
gatgatagaacccgcatatg

SEQ ID NO: 167488 - DNA, 20 bp, Artificial Sequence
  Synthetic oligonucleotide; AAG chr2 60530527 60530546 60530543 +
gaacccgcatatgtagccaa

SEQ ID NO: 167489 - DNA, 20 bp, Artificial Sequence
  Synthetic oligonucleotide; TGG chr2 60530532 60530551 60530548 +
cgcatatgtagccaaaagac

SEQ ID NO: 167490 - DNA, 20 bp, Artificial Sequence
  Synthetic oligonucleotide; TGG chr2 60530542 60530561 60530558 +
gccaaaagactggcctcaac

SEQ ID NO: 167491 - DNA, 20 bp, Artificial Sequence
  Synthetic oligonucleotide; CAG chr2 60530547 60530566 60530563 +
aagactggcctcaactggtt

SEQ ID NO: 167492 - DNA, 20 bp, Artificial Sequence
  Synthetic oligonucleotide; GAG chr2 60530549 60530568 60530565 +
gactggcctcaactggttca

SEQ ID NO: 167493 - DNA, 20 bp, Artificial Sequence
  Synthetic oligonucleotide; AGG chr2 60530550 60530569 60530566 +
actggcctcaactggttcag

SEQ ID NO: 167494 - DNA, 20 bp, Artificial Sequence
  Synthetic oligonucleotide; GAG chr2 60530552 60530571 60530568 +
tggcctcaactggttcagag

SEQ ID NO: 167495 - DNA, 20 bp, Artificial Sequence
  Synthetic oligonucleotide; AGG chr2 60530553 60530572 60530569 +
ggcctcaactggttcagagg

SEQ ID NO: 167496 - DNA, 20 bp, Artificial Sequence
  Synthetic oligonucleotide; GGG chr2 60530554 60530573 60530570 +
gcctcaactggttcagagga

SEQ ID NO: 167497 - DNA, 20 bp, Artificial Sequence
  Synthetic oligonucleotide; GAG chr2 60530565 60530584 60530581 +
ttcagaggagggaaaaaatt

SEQ ID NO: 167498 - DNA, 20 bp, Artificial Sequence
  Synthetic oligonucleotide; TAG chr2 60530610 60530629 60530626 +
attttttatttttttgcctt

SEQ ID NO: 167499 - DNA, 20 bp, Artificial Sequence
  Synthetic oligonucleotide; AAG chr2 60530617 60530636 60530633 +
atttttttgcctttagccaa

SEQ ID NO: 167500 - DNA, 20 bp, Artificial Sequence
  Synthetic oligonucleotide; CAG chr2 60530622 60530641 60530638 +
tttgcctttagccaaaagac

SEQ ID NO: 167501 - DNA, 20 bp, Artificial Sequence
  Synthetic oligonucleotide; AGG chr2 60530623 60530642 60530639 +
ttgcctttagccaaaagacc

SEQ ID NO: 167502 - DNA, 20 bp, Artificial Sequence
  Synthetic oligonucleotide; GGG chr2 60530624 60530643 60530640 +
tgcctttagccaaaagacca

SEQ ID NO: 167503 - DNA, 20 bp, Artificial Sequence
  Synthetic oligonucleotide; GAG chr2 60530626 60530645 60530642 +
cctttagccaaaagaccagg

SEQ ID NO: 167504 - DNA, 20 bp, Artificial Sequence
  Synthetic oligonucleotide; CAG chr2 60530640 60530659 60530656 +
accagggagcatttgatgta

SEQ ID NO: 167505 - DNA, 20 bp, Artificial Sequence
  Synthetic oligonucleotide; CAG chr2 60530644 60530663 60530660 +
gggagcatttgatgtacagt

SEQ ID NO: 167506 - DNA, 20 bp, Artificial Sequence
  Synthetic oligonucleotide; CAG chr2 60530647 60530666 60530663 +
agcatttgatgtacagtcag

SEQ ID NO: 167507 - DNA, 20 bp, Artificial Sequence
  Synthetic oligonucleotide; AGG chr2 60530648 60530667 60530664 +
gcatttgatgtacagtcagc

SEQ ID NO: 167508 - DNA, 20 bp, Artificial Sequence
  Synthetic oligonucleotide; AAG chr2 60530660 60530679 60530676 +
cagtcagcaggtatttaaaa

SEQ ID NO: 167509 - DNA, 20 bp, Artificial Sequence
  Synthetic oligonucleotide; AAG chr2 60530664 60530683 60530680 +
cagcaggtatttaaaaaaga

SEQ ID NO: 167510 - DNA, 20 bp, Artificial Sequence
  Synthetic oligonucleotide; AAG chr2 60530668 60530687 60530684 +
aggtatttaaaaaagaaaga

SEQ ID NO: 167511 - DNA, 20 bp, Artificial Sequence
  Synthetic oligonucleotide; AAG chr2 60530674 60530693 60530690 +
ttaaaaaagaaagaaagaaa

SEQ ID NO: 167512 - DNA, 20 bp, Artificial Sequence
  Synthetic oligonucleotide; AGG chr2 60530675 60530694 60530691 +
taaaaaagaaagaaagaaaa

SEQ ID NO: 167513 - DNA, 20 bp, Artificial Sequence
  Synthetic oligonucleotide; AAG chr2 60530695 60530714 60530711 +
aggaaaaaaaaaacactgaa

SEQ ID NO: 167514 - DNA, 20 bp, Artificial Sequence
  Synthetic oligonucleotide; AGG chr2 60530696 60530715 60530712 +
ggaaaaaaaaaacactgaaa

SEQ ID NO: 167515 - DNA, 20 bp, Artificial Sequence
  Synthetic oligonucleotide; TGG chr2 60530701 60530720 60530717 +
aaaaaaacactgaaaaggct

SEQ ID NO: 167516 - DNA, 20 bp, Artificial Sequence
  Synthetic oligonucleotide; TGG chr2 60530710 60530729 60530726 +
ctgaaaaggcttggctgcac

SEQ ID NO: 167517 - DNA, 20 bp, Artificial Sequence
  Synthetic oligonucleotide; GGG chr2 60530711 60530730 60530727 +
tgaaaaggcttggctgcact

SEQ ID NO: 167518 - DNA, 20 bp, Artificial Sequence
  Synthetic oligonucleotide; GGG chr2 60530712 60530731 60530728 +
gaaaaggcttggctgcactg

SEQ ID NO: 167519 - DNA, 20 bp, Artificial Sequence
  Synthetic oligonucleotide; AAG chr2 60530735 60530754 60530751 +
ccctgacacgctctcatcta

SEQ ID NO: 167520 - DNA, 20 bp, Artificial Sequence
  Synthetic oligonucleotide; TGG chr2 60530740 60530759 60530756 +
acacgctctcatctaaagcc

SEQ ID NO: 167521 - DNA, 20 bp, Artificial Sequence
  Synthetic oligonucleotide; CGG chr2 60530747 60530766 60530763 +
ctcatctaaagcctggccct

SEQ ID NO: 167522 - DNA, 20 bp, Artificial Sequence
  Synthetic oligonucleotide; AAG chr2 60530752 60530771 60530768 +
ctaaagcctggccctcggcc

SEQ ID NO: 167523 - DNA, 20 bp, Artificial Sequence
  Synthetic oligonucleotide; TGG chr2 60530767 60530786 60530783 +
cggccaagttcatctgttaa

SEQ ID NO: 167524 - DNA, 20 bp, Artificial Sequence
  Synthetic oligonucleotide; CAG chr2 60530781 60530800 60530797 +
tgttaatggacaaccacaac

SEQ ID NO: 167525 - DNA, 20 bp, Artificial Sequence
  Synthetic oligonucleotide; AGG chr2 60530782 60530801 60530798 +
gttaatggacaaccacaacc

SEQ ID NO: 167526 - DNA, 20 bp, Artificial Sequence
  Synthetic oligonucleotide; GGG chr2 60530783 60530802 60530799 +
ttaatggacaaccacaacca

SEQ ID NO: 167527 - DNA, 20 bp, Artificial Sequence
  Synthetic oligonucleotide; GAG chr2 60530819 60530838 60530835 +
cacctcccactacccctcct

SEQ ID NO: 167528 - DNA, 20 bp, Artificial Sequence
  Synthetic oligonucleotide; GAG chr2 60530847 60530866 60530863 +
tctgttctcctacctctttc

SEQ ID NO: 167529 - DNA, 20 bp, Artificial Sequence
  Synthetic oligonucleotide; TAG chr2 60530861 60530880 60530877 +
tctttcgagctcctaaaaac

SEQ ID NO: 167530 - DNA, 20 bp, Artificial Sequence
  Synthetic oligonucleotide; AAG chr2 60530899 60530918 60530915 +
gcgcttttccctttctattc

SEQ ID NO: 167531 - DNA, 20 bp, Artificial Sequence
  Synthetic oligonucleotide; AAG chr2 60530909 60530928 60530925 +
ctttctattcaagataaaca

SEQ ID NO: 167532 - DNA, 20 bp, Artificial Sequence
  Synthetic oligonucleotide; AAG chr2 60530918 60530937 60530934 +
caagataaacaaagtgcttc

SEQ ID NO: 167533 - DNA, 20 bp, Artificial Sequence
  Synthetic oligonucleotide; CAG chr2 60530923 60530942 60530939 +
taaacaaagtgcttcaagtt

SEQ ID NO: 167534 - DNA, 20 bp, Artificial Sequence
  Synthetic oligonucleotide; AGG chr2 60530924 60530943 60530940 +
aaacaaagtgcttcaagttc

SEQ ID NO: 167535 - DNA, 20 bp, Artificial Sequence
  Synthetic oligonucleotide; GGG chr2 60530925 60530944 60530941 +
aacaaagtgcttcaagttca

SEQ ID NO: 167536 - DNA, 20 bp, Artificial Sequence
  Synthetic oligonucleotide; TGG chr2 60530935 60530954 60530951 +
ttcaagttcagggcgcaccc

SEQ ID NO: 167537 - DNA, 20 bp, Artificial Sequence
  Synthetic oligonucleotide; GGG chr2 60530936 60530955 60530952 +
tcaagttcagggcgcaccct

SEQ ID NO: 167538 - DNA, 20 bp, Artificial Sequence
  Synthetic oligonucleotide; CAG chr2 60530977 60530996 60530993 +
tatcattctgtctgctaaac

SEQ ID NO: 167539 - DNA, 20 bp, Artificial Sequence
  Synthetic oligonucleotide; TGG chr2 60530982 60531001 60530998 +
ttctgtctgctaaaccagtc

SEQ ID NO: 167540 - DNA, 20 bp, Artificial Sequence
  Synthetic oligonucleotide; TGG chr2 60530993 60531012 60531009 +
aaaccagtctggctacacca

SEQ ID NO: 167541 - DNA, 20 bp, Artificial Sequence
  Synthetic oligonucleotide; CAG chr2 60530997 60531016 60531013 +
cagtctggctacaccatggc

SEQ ID NO: 167542 - DNA, 20 bp, Artificial Sequence
  Synthetic oligonucleotide; AGG chr2 60530998 60531017 60531014 +
agtctggctacaccatggcc

SEQ ID NO: 167543 - DNA, 20 bp, Artificial Sequence
  Synthetic oligonucleotide; GGG chr2 60530999 60531018 60531015 +
gtctggctacaccatggcca

SEQ ID NO: 167544 - DNA, 20 bp, Artificial Sequence
  Synthetic oligonucleotide; GAG chr2 60531001 60531020 60531017 +
ctggctacaccatggccagg

SEQ ID NO: 167545 - DNA, 20 bp, Artificial Sequence
  Synthetic oligonucleotide; GAG chr2 60531003 60531022 60531019 +
ggctacaccatggccaggga

SEQ ID NO: 167546 - DNA, 20 bp, Artificial Sequence
  Synthetic oligonucleotide; CGG chr2 60531082 60531101 60531098 +
cttttctttaccaccttctc

SEQ ID NO: 167547 - DNA, 20 bp, Artificial Sequence
  Synthetic oligonucleotide; GAG chr2 60531084 60531103 60531100 +
tttctttaccaccttctccg

SEQ ID NO: 167548 - DNA, 20 bp, Artificial Sequence
  Synthetic oligonucleotide; CAG chr2 60531087 60531106 60531103 +
ctttaccaccttctccggag

SEQ ID NO: 167549 - DNA, 20 bp, Artificial Sequence
  Synthetic oligonucleotide; TGG chr2 60531091 60531110 60531107 +
accaccttctccggagcaga

SEQ ID NO: 167550 - DNA, 20 bp, Artificial Sequence
  Synthetic oligonucleotide; AAG chr2 60531111 60531130 60531127 +
tggacttgaccactttgctt

SEQ ID NO: 167551 - DNA, 20 bp, Artificial Sequence
  Synthetic oligonucleotide; TGG chr2 60531121 60531140 60531137 +
cactttgcttaagcccctcc

SEQ ID NO: 167552 - DNA, 20 bp, Artificial Sequence
  Synthetic oligonucleotide; CAG chr2 60531130 60531149 60531146 +
taagcccctcctggcaacct

SEQ ID NO: 167553 - DNA, 20 bp, Artificial Sequence
  Synthetic oligonucleotide; TAG chr2 60531137 60531156 60531153 +
ctcctggcaacctcagaaat

SEQ ID NO: 167554 - DNA, 20 bp, Artificial Sequence
  Synthetic oligonucleotide; GAG chr2 60531139 60531158 60531155 +
cctggcaacctcagaaatta

SEQ ID NO: 167555 - DNA, 20 bp, Artificial Sequence
  Synthetic oligonucleotide; AAG chr2 60531153 60531172 60531169 +
aaattagagaaaaaaaaaaa

SEQ ID NO: 167556 - DNA, 20 bp, Artificial Sequence
  Synthetic oligonucleotide; GAG chr2 60531155 60531174 60531171 +
attagagaaaaaaaaaaaaa

SEQ ID NO: 167557 - DNA, 20 bp, Artificial Sequence
  Synthetic oligonucleotide; TGG chr2 60531162 60531181 60531178 +
aaaaaaaaaaaaagagctcc

SEQ ID NO: 167558 - DNA, 20 bp, Artificial Sequence
  Synthetic oligonucleotide; CGG chr2 60531176 60531195 60531192 +
agctcctggctaccctactc

SEQ ID NO: 167559 - DNA, 20 bp, Artificial Sequence
  Synthetic oligonucleotide; CAG chr2 60531181 60531200 60531197 +
ctggctaccctactccggtc

SEQ ID NO: 167560 - DNA, 20 bp, Artificial Sequence
  Synthetic oligonucleotide; AGG chr2 60531182 60531201 60531198 +
tggctaccctactccggtcc

SEQ ID NO: 167561 - DNA, 20 bp, Artificial Sequence
  Synthetic oligonucleotide; CGG chr2 60531212 60531231 60531228 +
cctccctctgtgttgcccga

SEQ ID NO: 167562 - DNA, 20 bp, Artificial Sequence
  Synthetic oligonucleotide; CAG chr2 60531226 60531245 60531242 +
gcccgacggtcctgcacaca

SEQ ID NO: 167563 - DNA, 20 bp, Artificial Sequence
  Synthetic oligonucleotide; TGG chr2 60531242 60531261 60531258 +
cacacagacacaaatcccgt

SEQ ID NO: 167564 - DNA, 20 bp, Artificial Sequence
  Synthetic oligonucleotide; CAG chr2 60531250 60531269 60531266 +
cacaaatcccgttggaccca

SEQ ID NO: 167565 - DNA, 20 bp, Artificial Sequence
  Synthetic oligonucleotide; CAG chr2 60531286 60531305 60531302 +
ctctcacactaacactaaac

SEQ ID NO: 167566 - DNA, 20 bp, Artificial Sequence
  Synthetic oligonucleotide; TGG chr2 60531305 60531324 60531321 +
ccagaaaataaattaaatac

SEQ ID NO: 167567 - DNA, 20 bp, Artificial Sequence
  Synthetic oligonucleotide; GGG chr2 60531306 60531325 60531322 +
cagaaaataaattaaatact

SEQ ID NO: 167568 - DNA, 20 bp, Artificial Sequence
  Synthetic oligonucleotide; AAG chr2 60531333 60531352 60531349 +
ccccctcctttgcgttctgc

SEQ ID NO: 167569 - DNA, 20 bp, Artificial Sequence
  Synthetic oligonucleotide; AAG chr2 60531344 60531363 60531360 +
gcgttctgcaagaatatttt

SEQ ID NO: 167570 - DNA, 20 bp, Artificial Sequence
  Synthetic oligonucleotide; GAG chr2 60531348 60531367 60531364 +
tctgcaagaatattttaagt

SEQ ID NO: 167571 - DNA, 20 bp, Artificial Sequence
  Synthetic oligonucleotide; AAG chr2 60531401 60531420 60531417 +
cctgacttgcaattaaatgc

SEQ ID NO: 167572 - DNA, 20 bp, Artificial Sequence
  Synthetic oligonucleotide; CAG chr2 60531419 60531438 60531435 +
gcaagcacactttttacaac

SEQ ID NO: 167573 - DNA, 20 bp, Artificial Sequence
  Synthetic oligonucleotide; CGG chr2 60531424 60531443 60531440 +
cacactttttacaaccagta

SEQ ID NO: 167574 - DNA, 20 bp, Artificial Sequence
  Synthetic oligonucleotide; TGG chr2 60531450 60531469 60531466 +
gcattaattataactacaaa

SEQ ID NO: 167575 - DNA, 20 bp, Artificial Sequence
  Synthetic oligonucleotide; GAG chr2 60531459 60531478 60531475 +
ataactacaaatggtcaaat

SEQ ID NO: 167576 - DNA, 20 bp, Artificial Sequence
  Synthetic oligonucleotide; GAG chr2 60531461 60531480 60531477 +
aactacaaatggtcaaatga

SEQ ID NO: 167577 - DNA, 20 bp, Artificial Sequence
  Synthetic oligonucleotide; AAG chr2 60531465 60531484 60531481 +
acaaatggtcaaatgagagc

SEQ ID NO: 167578 - DNA, 20 bp, Artificial Sequence
  Synthetic oligonucleotide; AGG chr2 60531466 60531485 60531482 +
caaatggtcaaatgagagca

SEQ ID NO: 167579 - DNA, 20 bp, Artificial Sequence
  Synthetic oligonucleotide; TAG chr2 60531524 60531543 60531540 +
taatattaatgaaacaaaaa

SEQ ID NO: 167580 - DNA, 20 bp, Artificial Sequence
  Synthetic oligonucleotide; AAG chr2 60531533 60531552 60531549 +
tgaaacaaaaatagattcat

SEQ ID NO: 167581 - DNA, 20 bp, Artificial Sequence
  Synthetic oligonucleotide; TGG chr2 60531539 60531558 60531555 +
aaaaatagattcataagcct

SEQ ID NO: 167582 - DNA, 20 bp, Artificial Sequence
  Synthetic oligonucleotide; CAG chr2 60531543 60531562 60531559 +
atagattcataagccttggc

SEQ ID NO: 167583 - DNA, 20 bp, Artificial Sequence
  Synthetic oligonucleotide; AGG chr2 60531544 60531563 60531560 +
tagattcataagccttggcc

SEQ ID NO: 167584 - DNA, 20 bp, Artificial Sequence
  Synthetic oligonucleotide; GGG chr2 60531545 60531564 60531561 +
agattcataagccttggcca

SEQ ID NO: 167585 - DNA, 20 bp, Artificial Sequence
  Synthetic oligonucleotide; AAG chr2 60531565 60531584 60531581 +
gggcttttattatttcatgc

SEQ ID NO: 167586 - DNA, 20 bp, Artificial Sequence
  Synthetic oligonucleotide; AGG chr2 60531566 60531585 60531582 +
ggcttttattatttcatgca

SEQ ID NO: 167587 - DNA, 20 bp, Artificial Sequence
  Synthetic oligonucleotide; GGG chr2 60531567 60531586 60531583 +
gcttttattatttcatgcaa

SEQ ID NO: 167588 - DNA, 20 bp, Artificial Sequence
  Synthetic oligonucleotide; GGG chr2 60531568 60531587 60531584 +
cttttattatttcatgcaag

SEQ ID NO: 167589 - DNA, 20 bp, Artificial Sequence
  Synthetic oligonucleotide; AAG chr2 60531572 60531591 60531588 +
tattatttcatgcaagggga

SEQ ID NO: 167590 - DNA, 20 bp, Artificial Sequence
  Synthetic oligonucleotide; CAG chr2 60531577 60531596 60531593 +
tttcatgcaaggggaaagtc

SEQ ID NO: 167591 - DNA, 20 bp, Artificial Sequence
  Synthetic oligonucleotide; TGG chr2 60531605 60531624 60531621 +
gaaacttgctccatacactt

SEQ ID NO: 167592 - DNA, 20 bp, Artificial Sequence
  Synthetic oligonucleotide; CAG chr2 60531608 60531627 60531624 +
acttgctccatacactttgg

SEQ ID NO: 167593 - DNA, 20 bp, Artificial Sequence
  Synthetic oligonucleotide; AGG chr2 60531609 60531628 60531625 +
cttgctccatacactttggc

SEQ ID NO: 167594 - DNA, 20 bp, Artificial Sequence
  Synthetic oligonucleotide; CAG chr2 60531615 60531634 60531631 +
ccatacactttggcaggact

SEQ ID NO: 167595 - DNA, 20 bp, Artificial Sequence
  Synthetic oligonucleotide; AAG chr2 60531640 60531659 60531656 +
caaccactaccattaaactc

SEQ ID NO: 167596 - DNA, 20 bp, Artificial Sequence
  Synthetic oligonucleotide; GAG chr2 60531642 60531661 60531658 +
accactaccattaaactcaa

SEQ ID NO: 167597 - DNA, 20 bp, Artificial Sequence
  Synthetic oligonucleotide; TGG chr2 60531652 60531671 60531668 +
ttaaactcaagagcgtgttt

SEQ ID NO: 167598 - DNA, 20 bp, Artificial Sequence
  Synthetic oligonucleotide; CAG chr2 60531655 60531674 60531671 +
aactcaagagcgtgttttgg

SEQ ID NO: 167599 - DNA, 20 bp, Artificial Sequence
  Synthetic oligonucleotide; TGG chr2 60531663 60531682 60531679 +
agcgtgttttggcagtgccc

SEQ ID NO: 167600 - DNA, 20 bp, Artificial Sequence
  Synthetic oligonucleotide; TGG chr2 60531669 60531688 60531685 +
ttttggcagtgccctggcat

SEQ ID NO: 167601 - DNA, 20 bp, Artificial Sequence
  Synthetic oligonucleotide; GGG chr2 60531670 60531689 60531686 +
tttggcagtgccctggcatt

SEQ ID NO: 167602 - DNA, 20 bp, Artificial Sequence
  Synthetic oligonucleotide; GGG chr2 60531671 60531690 60531687 +
ttggcagtgccctggcattg

SEQ ID NO: 167603 - DNA, 20 bp, Artificial Sequence
  Synthetic oligonucleotide; GGG chr2 60531672 60531691 60531688 +
tggcagtgccctggcattgg

SEQ ID NO: 167604 - DNA, 20 bp, Artificial Sequence
  Synthetic oligonucleotide; GGG chr2 60531673 60531692 60531689 +
ggcagtgccctggcattggg

SEQ ID NO: 167605 - DNA, 20 bp, Artificial Sequence
  Synthetic oligonucleotide; CAG chr2 60531683 60531702 60531699 +
tggcattggggggccctgtg

SEQ ID NO: 167606 - DNA, 20 bp, Artificial Sequence
  Synthetic oligonucleotide; CAG chr2 60531693 60531712 60531709 +
gggccctgtgcagacaccac

SEQ ID NO: 167607 - DNA, 20 bp, Artificial Sequence
  Synthetic oligonucleotide; AGG chr2 60531694 60531713 60531710 +
ggccctgtgcagacaccacc

SEQ ID NO: 167608 - DNA, 20 bp, Artificial Sequence
  Synthetic oligonucleotide; GAG chr2 60531696 60531715 60531712 +
ccctgtgcagacaccaccag

SEQ ID NO: 167609 - DNA, 20 bp, Artificial Sequence
  Synthetic oligonucleotide; CAG chr2 60531709 60531728 60531725 +
ccaccaggagacgctgaccc

SEQ ID NO: 167610 - DNA, 20 bp, Artificial Sequence
  Synthetic oligonucleotide; AAG chr2 60531717 60531736 60531733 +
agacgctgaccccagtaccc

SEQ ID NO: 167611 - DNA, 20 bp, Artificial Sequence
  Synthetic oligonucleotide; AGG chr2 60531718 60531737 60531734 +
gacgctgaccccagtaccca

SEQ ID NO: 167612 - DNA, 20 bp, Artificial Sequence
  Synthetic oligonucleotide; CAG chr2 60531721 60531740 60531737 +
gctgaccccagtacccaagg

SEQ ID NO: 167613 - DNA, 20 bp, Artificial Sequence
  Synthetic oligonucleotide; AGG chr2 60531722 60531741 60531738 +
ctgaccccagtacccaaggc

SEQ ID NO: 167614 - DNA, 20 bp, Artificial Sequence
  Synthetic oligonucleotide; GGG chr2 60531723 60531742 60531739 +
tgaccccagtacccaaggca

SEQ ID NO: 167615 - DNA, 20 bp, Artificial Sequence
  Synthetic oligonucleotide; CAG chr2 60531742 60531761 60531758 +
agggtccataacgtcttatt

SEQ ID NO: 167616 - DNA, 20 bp, Artificial Sequence
  Synthetic oligonucleotide; TGG chr2 60531755 60531774 60531771 +
tcttattcagcctttccatg

SEQ ID NO: 167617 - DNA, 20 bp, Artificial Sequence
  Synthetic oligonucleotide; CGG chr2 60531759 60531778 60531775 +
attcagcctttccatgtggt

SEQ ID NO: 167618 - DNA, 20 bp, Artificial Sequence
  Synthetic oligonucleotide; GGG chr2 60531760 60531779 60531776 +
ttcagcctttccatgtggtc

SEQ ID NO: 167619 - DNA, 20 bp, Artificial Sequence
  Synthetic oligonucleotide; AAG chr2 60531763 60531782 60531779 +
agcctttccatgtggtcggg

SEQ ID NO: 167620 - DNA, 20 bp, Artificial Sequence
  Synthetic oligonucleotide; CAG chr2 60531773 60531792 60531789 +
tgtggtcgggaagttaccca

SEQ ID NO: 167621 - DNA, 20 bp, Artificial Sequence
  Synthetic oligonucleotide; AGG chr2 60531774 60531793 60531790 +
gtggtcgggaagttacccac

SEQ ID NO: 167622 - DNA, 20 bp, Artificial Sequence
  Synthetic oligonucleotide; CGG chr2 60531808 60531827 60531824 +
ttcctaaccaccctctctgc

SEQ ID NO: 167623 - DNA, 20 bp, Artificial Sequence
  Synthetic oligonucleotide; CAG chr2 60531814 60531833 60531830 +
accaccctctctgccggccg

SEQ ID NO: 167624 - DNA, 20 bp, Artificial Sequence
  Synthetic oligonucleotide; CAG chr2 60531826 60531845 60531842 +
gccggccgcagctgttctgt

SEQ ID NO: 167625 - DNA, 20 bp, Artificial Sequence
  Synthetic oligonucleotide; AAG chr2 60531847 60531866 60531863 +
agtgtccaccctgcccctca

SEQ ID NO: 167626 - DNA, 20 bp, Artificial Sequence
  Synthetic oligonucleotide; AGG chr2 60531848 60531867 60531864 +
gtgtccaccctgcccctcaa

SEQ ID NO: 167627 - DNA, 20 bp, Artificial Sequence
  Synthetic oligonucleotide; CAG chr2 60531866 60531885 60531882 +
aaaggacaaatgaaatcccc

SEQ ID NO: 167628 - DNA, 20 bp, Artificial Sequence
  Synthetic oligonucleotide; CAG chr2 60531872 60531891 60531888 +
caaatgaaatcccccagacc

SEQ ID NO: 167629 - DNA, 20 bp, Artificial Sequence
  Synthetic oligonucleotide; TGG chr2 60531875 60531894 60531891 +
atgaaatcccccagacccag

SEQ ID NO: 167630 - DNA, 20 bp, Artificial Sequence
  Synthetic oligonucleotide; GGG chr2 60531876 60531895 60531892 +
tgaaatcccccagacccagt

SEQ ID NO: 167631 - DNA, 20 bp, Artificial Sequence
  Synthetic oligonucleotide; AAG chr2 60531883 60531902 60531899 +
ccccagacccagtgggaaat

SEQ ID NO: 167632 - DNA, 20 bp, Artificial Sequence
  Synthetic oligonucleotide; AAG chr2 60531898 60531917 60531914 +
gaaataagcccacctaaatg

SEQ ID NO: 167633 - DNA, 20 bp, Artificial Sequence
  Synthetic oligonucleotide; AAG chr2 60531906 60531925 60531922 +
cccacctaaatgaagaactc

SEQ ID NO: 167634 - DNA, 20 bp, Artificial Sequence
  Synthetic oligonucleotide; TAG chr2 60531911 60531930 60531927 +
ctaaatgaagaactcaagac

SEQ ID NO: 167635 - DNA, 20 bp, Artificial Sequence
  Synthetic oligonucleotide; AGG chr2 60531912 60531931 60531928 +
taaatgaagaactcaagact

SEQ ID NO: 167636 - DNA, 20 bp, Artificial Sequence
  Synthetic oligonucleotide; GGG chr2 60531913 60531932 60531929 +
aaatgaagaactcaagacta

SEQ ID NO: 167637 - DNA, 20 bp, Artificial Sequence
  Synthetic oligonucleotide; GAG chr2 60531922 60531941 60531938 +
actcaagactagggcaccat

SEQ ID NO: 167638 - DNA, 20 bp, Artificial Sequence
  Synthetic oligonucleotide; TGG chr2 60531929 60531948 60531945 +
actagggcaccatgagcatc

SEQ ID NO: 167639 - DNA, 20 bp, Artificial Sequence
  Synthetic oligonucleotide; GGG chr2 60531930 60531949 60531946 +
ctagggcaccatgagcatct

SEQ ID NO: 167640 - DNA, 20 bp, Artificial Sequence
  Synthetic oligonucleotide; AAG chr2 60531935 60531954 60531951 +
gcaccatgagcatctgggtt

SEQ ID NO: 167641 - DNA, 20 bp, Artificial Sequence
  Synthetic oligonucleotide; AGG chr2 60531936 60531955 60531952 +
caccatgagcatctgggtta

SEQ ID NO: 167642 - DNA, 20 bp, Artificial Sequence
  Synthetic oligonucleotide; CGG chr2 60531941 60531960 60531957 +
tgagcatctgggttaaggct

SEQ ID NO: 167643 - DNA, 20 bp, Artificial Sequence
  Synthetic oligonucleotide; CAG chr2 60531954 60531973 60531970 +
taaggctcggaatcctgcac

SEQ ID NO: 167644 - DNA, 20 bp, Artificial Sequence
  Synthetic oligonucleotide; TGG chr2 60531960 60531979 60531976 +
tcggaatcctgcaccagcgt

SEQ ID NO: 167645 - DNA, 20 bp, Artificial Sequence
  Synthetic oligonucleotide; AAG chr2 60531963 60531982 60531979 +
gaatcctgcaccagcgttgg

SEQ ID NO: 167646 - DNA, 20 bp, Artificial Sequence
  Synthetic oligonucleotide; CGG chr2 60531990 60532009 60532006 +
ctttgttcctgccacaccgc

SEQ ID NO: 167647 - DNA, 20 bp, Artificial Sequence
  Synthetic oligonucleotide; GGG chr2 60531991 60532010 60532007 +
tttgttcctgccacaccgcc

SEQ ID NO: 167648 - DNA, 20 bp, Artificial Sequence
  Synthetic oligonucleotide; CAG chr2 60532021 60532040 60532037 +
taacctgtctccacaacact

SEQ ID NO: 167649 - DNA, 20 bp, Artificial Sequence
  Synthetic oligonucleotide; CAG chr2 60532039 60532058 60532055 +
ctcagcctcacgcctcaccc

SEQ ID NO: 167650 - DNA, 20 bp, Artificial Sequence
  Synthetic oligonucleotide; AAG chr2 60532104 60532123 60532120 +
ccgcacaatcgaatctaatt

SEQ ID NO: 167651 - DNA, 20 bp, Artificial Sequence
  Synthetic oligonucleotide; CAG chr2 60532109 60532128 60532125 +
caatcgaatctaattaagat

SEQ ID NO: 167652 - DNA, 20 bp, Artificial Sequence
  Synthetic oligonucleotide; AGG chr2 60532110 60532129 60532126 +
aatcgaatctaattaagatc

SEQ ID NO: 167653 - DNA, 20 bp, Artificial Sequence
  Synthetic oligonucleotide; AAG chr2 60532113 60532132 60532129 +
cgaatctaattaagatcagg

SEQ ID NO: 167654 - DNA, 20 bp, Artificial Sequence
  Synthetic oligonucleotide; CAG chr2 60532145 60532164 60532161 +
ttttcttttcactgtacccc

SEQ ID NO: 167655 - DNA, 20 bp, Artificial Sequence
  Synthetic oligonucleotide; CAG chr2 60532154 60532173 60532170 +
cactgtacccccagtaatca

SEQ ID NO: 167656 - DNA, 20 bp, Artificial Sequence
  Synthetic oligonucleotide; AAG chr2 60532157 60532176 60532173 +
tgtacccccagtaatcacag

SEQ ID NO: 167657 - DNA, 20 bp, Artificial Sequence
  Synthetic oligonucleotide; GAG chr2 60532173 60532192 60532189 +
acagaagttcttcaaatttt

SEQ ID NO: 167658 - DNA, 20 bp, Artificial Sequence
  Synthetic oligonucleotide; AAG chr2 60532218 60532237 60532234 +
tttccctcattttgcatttc

SEQ ID NO: 167659 - DNA, 20 bp, Artificial Sequence
  Synthetic oligonucleotide; AGG chr2 60532219 60532238 60532235 +
ttccctcattttgcatttca

SEQ ID NO: 167660 - DNA, 20 bp, Artificial Sequence
  Synthetic oligonucleotide; AAG chr2 60532226 60532245 60532242 +
attttgcatttcaaggcaca

SEQ ID NO: 167661 - DNA, 20 bp, Artificial Sequence
  Synthetic oligonucleotide; CAG chr2 60532230 60532249 60532246 +
tgcatttcaaggcacaaaga

SEQ ID NO: 167662 - DNA, 20 bp, Artificial Sequence
  Synthetic oligonucleotide; TGG chr2 60532243 60532262 60532259 +
acaaagacagtctatctcac

SEQ ID NO: 167663 - DNA, 20 bp, Artificial Sequence
  Synthetic oligonucleotide; TGG chr2 60532246 60532265 60532262 +
aagacagtctatctcactgg

SEQ ID NO: 167664 - DNA, 20 bp, Artificial Sequence
  Synthetic oligonucleotide; TAG chr2 60532257 60532276 60532273 +
tctcactggtggtctattaa

SEQ ID NO: 167665 - DNA, 20 bp, Artificial Sequence
  Synthetic oligonucleotide; AAG chr2 60532264 60532283 60532280 +
ggtggtctattaatagtttg

SEQ ID NO: 167666 - DNA, 20 bp, Artificial Sequence
  Synthetic oligonucleotide; GAG chr2 60532271 60532290 60532287 +
tattaatagtttgaagtttt

SEQ ID NO: 167667 - DNA, 20 bp, Artificial Sequence
  Synthetic oligonucleotide; CAG chr2 60532277 60532296 60532293 +
tagtttgaagttttgagcgt

SEQ ID NO: 167668 - DNA, 20 bp, Artificial Sequence
  Synthetic oligonucleotide; AAG chr2 60532280 60532299 60532296 +
tttgaagttttgagcgtcag

SEQ ID NO: 167669 - DNA, 20 bp, Artificial Sequence
  Synthetic oligonucleotide; AGG chr2 60532281 60532300 60532297 +
ttgaagttttgagcgtcaga

SEQ ID NO: 167670 - DNA, 20 bp, Artificial Sequence
  Synthetic oligonucleotide; TGG chr2 60532284 60532303 60532300 +
aagttttgagcgtcagaagg

SEQ ID NO: 167671 - DNA, 20 bp, Artificial Sequence
  Synthetic oligonucleotide; TGG chr2 60532298 60532317 60532314 +
agaaggtggttgttgctttt

SEQ ID NO: 167672 - DNA, 20 bp, Artificial Sequence
  Synthetic oligonucleotide; TGG chr2 60532305 60532324 60532321 +
ggttgttgctttttggtttt

SEQ ID NO: 167673 - DNA, 20 bp, Artificial Sequence
  Synthetic oligonucleotide; GGG chr2 60532306 60532325 60532322 +
gttgttgctttttggttttt

SEQ ID NO: 167674 - DNA, 20 bp, Artificial Sequence
  Synthetic oligonucleotide; CAG chr2 60532347 60532366 60532363 +
taaaactattctgtcatttc

SEQ ID NO: 167675 - DNA, 20 bp, Artificial Sequence
  Synthetic oligonucleotide; AAG chr2 60532359 60532378 60532375 +
gtcatttccagttttttaaa

SEQ ID NO: 167676 - DNA, 20 bp, Artificial Sequence
  Synthetic oligonucleotide; AGG chr2 60532360 60532379 60532376 +
tcatttccagttttttaaaa

SEQ ID NO: 167677 - DNA, 20 bp, Artificial Sequence
  Synthetic oligonucleotide; TGG chr2 60532410 60532429 60532426 +
tttttttgtttttctttttt

SEQ ID NO: 167678 - DNA, 20 bp, Artificial Sequence
  Synthetic oligonucleotide; TGG chr2 60532413 60532432 60532429 +
ttttgtttttctttttttgg

SEQ ID NO: 167679 - DNA, 20 bp, Artificial Sequence
  Synthetic oligonucleotide; TGG chr2 60532416 60532435 60532432 +
tgtttttctttttttggtgg

SEQ ID NO: 167680 - DNA, 20 bp, Artificial Sequence
  Synthetic oligonucleotide; TGG chr2 60532419 60532438 60532435 +
ttttctttttttggtggtgg

SEQ ID NO: 167681 - DNA, 20 bp, Artificial Sequence
  Synthetic oligonucleotide; CAG chr2 60532436 60532455 60532452 +
tggtggcgttaatgtttctt

SEQ ID NO: 167682 - DNA, 20 bp, Artificial Sequence
  Synthetic oligonucleotide; AAG chr2 60532440 60532459 60532456 +
ggcgttaatgtttcttcaga

SEQ ID NO: 167683 - DNA, 20 bp, Artificial Sequence
  Synthetic oligonucleotide; CAG chr2 60532444 60532463 60532460 +
ttaatgtttcttcagaaaga

SEQ ID NO: 167684 - DNA, 20 bp, Artificial Sequence
  Synthetic oligonucleotide; TGG chr2 60532451 60532470 60532467 +
ttcttcagaaagacagcttc

SEQ ID NO: 167685 - DNA, 20 bp, Artificial Sequence
  Synthetic oligonucleotide; GGG chr2 60532452 60532471 60532468 +
tcttcagaaagacagcttct

SEQ ID NO: 167686 - DNA, 20 bp, Artificial Sequence
  Synthetic oligonucleotide; TGG chr2 60532461 60532480 60532477 +
agacagcttctgggccactc

SEQ ID NO: 167687 - DNA, 20 bp, Artificial Sequence
  Synthetic oligonucleotide; GGG chr2 60532462 60532481 60532478 +
gacagcttctgggccactct

SEQ ID NO: 167688 - DNA, 20 bp, Artificial Sequence
  Synthetic oligonucleotide; TGG chr2 60532475 60532494 60532491 +
ccactctgggtattatgatt

SEQ ID NO: 167689 - DNA, 20 bp, Artificial Sequence
  Synthetic oligonucleotide; TAG chr2 60532492 60532511 60532508 +
atttggtttcccccttacaa

SEQ ID NO: 167690 - DNA, 20 bp, Artificial Sequence
  Synthetic oligonucleotide; TGG chr2 60532507 60532526 60532523 +
tacaatagttactctctgcc

SEQ ID NO: 167691 - DNA, 20 bp, Artificial Sequence
  Synthetic oligonucleotide; CAG chr2 60532522 60532541 60532538 +
ctgcctggtttactgattta

SEQ ID NO: 167692 - DNA, 20 bp, Artificial Sequence
  Synthetic oligonucleotide; TGG chr2 60532530 60532549 60532546 +
tttactgatttacagaacct

SEQ ID NO: 167693 - DNA, 20 bp, Artificial Sequence
  Synthetic oligonucleotide; TGG chr2 60532541 60532560 60532557 +
acagaaccttggtatgtgaa

SEQ ID NO: 167694 - DNA, 20 bp, Artificial Sequence
  Synthetic oligonucleotide; AAG chr2 60532549 60532568 60532565 +
ttggtatgtgaatggcgaaa

SEQ ID NO: 167695 - DNA, 20 bp, Artificial Sequence
  Synthetic oligonucleotide; AAG chr2 60532558 60532577 60532574 +
gaatggcgaaaaagaaaaaa

SEQ ID NO: 167696 - DNA, 20 bp, Artificial Sequence
  Synthetic oligonucleotide; AGG chr2 60532559 60532578 60532575 +
aatggcgaaaaagaaaaaaa

SEQ ID NO: 167697 - DNA, 20 bp, Artificial Sequence
  Synthetic oligonucleotide; AAG chr2 60532563 60532582 60532579 +
gcgaaaaagaaaaaaaagga

SEQ ID NO: 167698 - DNA, 20 bp, Artificial Sequence
  Synthetic oligonucleotide; AAG chr2 60532571 60532590 60532587 +
gaaaaaaaaggaaagaaaaa

SEQ ID NO: 167699 - DNA, 20 bp, Artificial Sequence
  Synthetic oligonucleotide; TGG chr2 60532583 60532602 60532599 +
aagaaaaaaagaaaattcct

SEQ ID NO: 167700 - DNA, 20 bp, Artificial Sequence
  Synthetic oligonucleotide; AAG chr2 60532589 60532608 60532605 +
aaaagaaaattccttggcat

SEQ ID NO: 167701 - DNA, 20 bp, Artificial Sequence
  Synthetic oligonucleotide; AGG chr2 60532590 60532609 60532606 +
aaagaaaattccttggcata

SEQ ID NO: 167702 - DNA, 20 bp, Artificial Sequence
  Synthetic oligonucleotide; CAG chr2 60532614 60532633 60532630 +
tatgtttgctgatcaaattt

SEQ ID NO: 167703 - DNA, 20 bp, Artificial Sequence
  Synthetic oligonucleotide; CAG chr2 60532655 60532674 60532671 +
ttatgactttacttgaaaaa

SEQ ID NO: 167704 - DNA, 20 bp, Artificial Sequence
  Synthetic oligonucleotide; CAG chr2 60532665 60532684 60532681 +
acttgaaaaacagtttgcca

SEQ ID NO: 167705 - DNA, 20 bp, Artificial Sequence
  Synthetic oligonucleotide; GAG chr2 60532669 60532688 60532685 +
gaaaaacagtttgccacagt

SEQ ID NO: 167706 - DNA, 20 bp, Artificial Sequence
  Synthetic oligonucleotide; TGG chr2 60532673 60532692 60532689 +
aacagtttgccacagtgaga

SEQ ID NO: 167707 - DNA, 20 bp, Artificial Sequence
  Synthetic oligonucleotide; AAG chr2 60532712 60532731 60532728 +
tctacccctccactcccttt

SEQ ID NO: 167708 - DNA, 20 bp, Artificial Sequence
  Synthetic oligonucleotide; CAG chr2 60532727 60532746 60532743 +
cctttaagtacttcgaaaaa

SEQ ID NO: 167709 - DNA, 20 bp, Artificial Sequence
  Synthetic oligonucleotide; AAG chr2 60532743 60532762 60532759 +
aaaacagtacaattttttta

SEQ ID NO: 167710 - DNA, 20 bp, Artificial Sequence
  Synthetic oligonucleotide; AGG chr2 60532744 60532763 60532760 +
aaacagtacaatttttttaa

SEQ ID NO: 167711 - DNA, 20 bp, Artificial Sequence
  Synthetic oligonucleotide; TAG chr2 60532747 60532766 60532763 +
cagtacaatttttttaaagg

SEQ ID NO: 167712 - DNA, 20 bp, Artificial Sequence
  Synthetic oligonucleotide; AAG chr2 60532755 60532774 60532771 +
tttttttaaaggtagattta

SEQ ID NO: 167713 - DNA, 20 bp, Artificial Sequence
  Synthetic oligonucleotide; TGG chr2 60532765 60532784 60532781 +
ggtagatttaaagcattaac

SEQ ID NO: 167714 - DNA, 20 bp, Artificial Sequence
  Synthetic oligonucleotide; TGG chr2 60532770 60532789 60532786 +
atttaaagcattaactggtt

SEQ ID NO: 167715 - DNA, 20 bp, Artificial Sequence
  Synthetic oligonucleotide; AAG chr2 60532823 60532842 60532839 +
ccctgaaaatacattttcaa

SEQ ID NO: 167716 - DNA, 20 bp, Artificial Sequence
  Synthetic oligonucleotide; AAG chr2 60532835 60532854 60532851 +
attttcaaaagacttatgca

SEQ ID NO: 167717 - DNA, 20 bp, Artificial Sequence
  Synthetic oligonucleotide; AAG chr2 60532851 60532870 60532867 +
tgcaaagccacatgattttg

SEQ ID NO: 167718 - DNA, 20 bp, Artificial Sequence
  Synthetic oligonucleotide; AGG chr2 60532852 60532871 60532868 +
gcaaagccacatgattttga

SEQ ID NO: 167719 - DNA, 20 bp, Artificial Sequence
  Synthetic oligonucleotide; GAG chr2 60532854 60532873 60532870 +
aaagccacatgattttgaag

SEQ ID NO: 167720 - DNA, 20 bp, Artificial Sequence
  Synthetic oligonucleotide; GAG chr2 60532862 60532881 60532878 +
atgattttgaaggagctaat

SEQ ID NO: 167721 - DNA, 20 bp, Artificial Sequence
  Synthetic oligonucleotide; TGG chr2 60532888 60532907 60532904 +
gtcccaccaccaaaatttaa

SEQ ID NO: 167722 - DNA, 20 bp, Artificial Sequence
  Synthetic oligonucleotide; AAG chr2 60532897 60532916 60532913 +
ccaaaatttaatggtgactt

SEQ ID NO: 167723 - DNA, 20 bp, Artificial Sequence
  Synthetic oligonucleotide; TAG chr2 60532929 60532948 60532945 +
tactttttatttacttcctg

SEQ ID NO: 167724 - DNA, 20 bp, Artificial Sequence
  Synthetic oligonucleotide; CAG chr2 60532958 60532977 60532974 +
ttgtgtacttgacatttata

SEQ ID NO: 167725 - DNA, 20 bp, Artificial Sequence
  Synthetic oligonucleotide; TGG chr2 60532987 60533006 60533003 +
cattatataacaatctaccc

SEQ ID NO: 167726 - DNA, 20 bp, Artificial Sequence
  Synthetic oligonucleotide; GGG chr2 60532988 60533007 60533004 +
attatataacaatctaccct

SEQ ID NO: 167727 - DNA, 20 bp, Artificial Sequence
  Synthetic oligonucleotide; TAG chr2 60532996 60533015 60533012 +
acaatctaccctgggtacac

SEQ ID NO: 167728 - DNA, 20 bp, Artificial Sequence
  Synthetic oligonucleotide; TAG chr2 60533014 60533033 60533030 +
actagattatgccaatctat

SEQ ID NO: 167729 - DNA, 20 bp, Artificial Sequence
  Synthetic oligonucleotide; AAG chr2 60533038 60533057 60533054 +
atgaaatttgtactccatat

SEQ ID NO: 167730 - DNA, 20 bp, Artificial Sequence
  Synthetic oligonucleotide; CAG chr2 60533041 60533060 60533057 +
aaatttgtactccatataag

SEQ ID NO: 167731 - DNA, 20 bp, Artificial Sequence
  Synthetic oligonucleotide; AAG chr2 60533044 60533063 60533060 +
tttgtactccatataagcag

SEQ ID NO: 167732 - DNA, 20 bp, Artificial Sequence
  Synthetic oligonucleotide; CAG chr2 60533051 60533070 60533067 +
tccatataagcagaagtttc

SEQ ID NO: 167733 - DNA, 20 bp, Artificial Sequence
  Synthetic oligonucleotide; AAG chr2 60533086 60533105 60533102 +
taccattatgtttcaatgta

SEQ ID NO: 167734 - DNA, 20 bp, Artificial Sequence
  Synthetic oligonucleotide; TAG chr2 60533097 60533116 60533113 +
ttcaatgtaaagtgttatta

SEQ ID NO: 167735 - DNA, 20 bp, Artificial Sequence
  Synthetic oligonucleotide; CAG chr2 60533100 60533119 60533116 +
aatgtaaagtgttattatag

SEQ ID NO: 167736 - DNA, 20 bp, Artificial Sequence
  Synthetic oligonucleotide; GAG chr2 60533102 60533121 60533118 +
tgtaaagtgttattatagca

SEQ ID NO: 167737 - DNA, 20 bp, Artificial Sequence
  Synthetic oligonucleotide; AAG chr2 60533109 60533128 60533125 +
tgttattatagcagagtata

SEQ ID NO: 167738 - DNA, 20 bp, Artificial Sequence
  Synthetic oligonucleotide; CAG chr2 60533114 60533133 60533130 +
ttatagcagagtataaagca

SEQ ID NO: 167739 - DNA, 20 bp, Artificial Sequence
  Synthetic oligonucleotide; TAG chr2 60533170 60533189 60533186 +
gtaatctttcttgctgcttc

SEQ ID NO: 167740 - DNA, 20 bp, Artificial Sequence
  Synthetic oligonucleotide; AGG chr2 60533171 60533190 60533187 +
taatctttcttgctgcttct

SEQ ID NO: 167741 - DNA, 20 bp, Artificial Sequence
  Synthetic oligonucleotide; GGG chr2 60533172 60533191 60533188 +
aatctttcttgctgcttcta

SEQ ID NO: 167742 - DNA, 20 bp, Artificial Sequence
  Synthetic oligonucleotide; CAG chr2 60533181 60533200 60533197 +
tgctgcttctagggctgtgt

SEQ ID NO: 167743 - DNA, 20 bp, Artificial Sequence
  Synthetic oligonucleotide; TGG chr2 60533196 60533215 60533212 +
tgtgtcagtgtttacattcc

SEQ ID NO: 167744 - DNA, 20 bp, Artificial Sequence
  Synthetic oligonucleotide; AAG chr2 60533199 60533218 60533215 +
gtcagtgtttacattcctgg

SEQ ID NO: 167745 - DNA, 20 bp, Artificial Sequence
  Synthetic oligonucleotide; TGG chr2 60533217 60533236 60533233 +
ggaagttaaataaaccgaca

SEQ ID NO: 167746 - DNA, 20 bp, Artificial Sequence
  Synthetic oligonucleotide; TGG chr2 60533229 60533248 60533245 +
aaccgacatggcaaaactcc

SEQ ID NO: 167747 - DNA, 20 bp, Artificial Sequence
  Synthetic oligonucleotide; TAG chr2 60533233 60533252 60533249 +
gacatggcaaaactcctgga

SEQ ID NO: 167748 - DNA, 20 bp, Artificial Sequence
  Synthetic oligonucleotide; AAG chr2 60533246 60533265 60533262 +
tcctggatagactgaataat

SEQ ID NO: 167749 - DNA, 20 bp, Artificial Sequence
  Synthetic oligonucleotide; AGG chr2 60533247 60533266 60533263 +
cctggatagactgaataata

SEQ ID NO: 167750 - DNA, 20 bp, Artificial Sequence
  Synthetic oligonucleotide; TAG chr2 60533285 60533304 60533301 +
ttgtttactttttaccttgt

SEQ ID NO: 167751 - DNA, 20 bp, Artificial Sequence
  Synthetic oligonucleotide; AGG chr2 60533286 60533305 60533302 +
tgtttactttttaccttgtt

SEQ ID NO: 167752 - DNA, 20 bp, Artificial Sequence
  Synthetic oligonucleotide; AAG chr2 60533303 60533322 60533319 +
gttaggatccctttcttgta

SEQ ID NO: 167753 - DNA, 20 bp, Artificial Sequence
  Synthetic oligonucleotide; TGG chr2 60533308 60533327 60533324 +
gatccctttcttgtaaagtt

SEQ ID NO: 167754 - DNA, 20 bp, Artificial Sequence
  Synthetic oligonucleotide; GGG chr2 60533309 60533328 60533325 +
atccctttcttgtaaagttt

SEQ ID NO: 167755 - DNA, 20 bp, Artificial Sequence
  Synthetic oligonucleotide; GGG chr2 60533310 60533329 60533326 +
tccctttcttgtaaagtttg

SEQ ID NO: 167756 - DNA, 20 bp, Artificial Sequence
  Synthetic oligonucleotide; GGG chr2 60533311 60533330 60533327 +
ccctttcttgtaaagtttgg

SEQ ID NO: 167757 - DNA, 20 bp, Artificial Sequence
  Synthetic oligonucleotide; GAG chr2 60533313 60533332 60533329 +
ctttcttgtaaagtttgggg

SEQ ID NO: 167758 - DNA, 20 bp, Artificial Sequence
  Synthetic oligonucleotide; GAG chr2 60533315 60533334 60533331 +
ttcttgtaaagtttggggga

SEQ ID NO: 167759 - DNA, 20 bp, Artificial Sequence
  Synthetic oligonucleotide; GAG chr2 60533317 60533336 60533333 +
cttgtaaagtttgggggaga

SEQ ID NO: 167760 - DNA, 20 bp, Artificial Sequence
  Synthetic oligonucleotide; GAG chr2 60533319 60533338 60533335 +
tgtaaagtttgggggagaga

SEQ ID NO: 167761 - DNA, 20 bp, Artificial Sequence
  Synthetic oligonucleotide; GAG chr2 60533321 60533340 60533337 +
taaagtttgggggagagaga

SEQ ID NO: 167762 - DNA, 20 bp, Artificial Sequence
  Synthetic oligonucleotide; AGG chr2 60533322 60533341 60533338 +
aaagtttgggggagagagag

SEQ ID NO: 167763 - DNA, 20 bp, Artificial Sequence
  Synthetic oligonucleotide; GAG chr2 60533324 60533343 60533340 +
agtttgggggagagagagag

SEQ ID NO: 167764 - DNA, 20 bp, Artificial Sequence
  Synthetic oligonucleotide; GAG chr2 60533326 60533345 60533342 +
tttgggggagagagagagga

SEQ ID NO: 167765 - DNA, 20 bp, Artificial Sequence
  Synthetic oligonucleotide; AAG chr2 60533330 60533349 60533346 +
ggggagagagagaggagaga

SEQ ID NO: 167766 - DNA, 20 bp, Artificial Sequence
  Synthetic oligonucleotide; GAG chr2 60533332 60533351 60533348 +
ggagagagagaggagagaaa

SEQ ID NO: 167767 - DNA, 20 bp, Artificial Sequence
  Synthetic oligonucleotide; GAG chr2 60533334 60533353 60533350 +
agagagagaggagagaaaga

SEQ ID NO: 167768 - DNA, 20 bp, Artificial Sequence
  Synthetic oligonucleotide; AAG chr2 60533337 60533356 60533353 +
gagagaggagagaaagagag

SEQ ID NO: 167769 - DNA, 20 bp, Artificial Sequence
  Synthetic oligonucleotide; AGG chr2 60533338 60533357 60533354 +
agagaggagagaaagagaga

SEQ ID NO: 167770 - DNA, 20 bp, Artificial Sequence
  Synthetic oligonucleotide; AAG chr2 60533345 60533364 60533361 +
agagaaagagagaaggaatg

SEQ ID NO: 167771 - DNA, 20 bp, Artificial Sequence
  Synthetic oligonucleotide; AGG chr2 60533346 60533365 60533362 +
gagaaagagagaaggaatga

SEQ ID NO: 167772 - DNA, 20 bp, Artificial Sequence
  Synthetic oligonucleotide; GGG chr2 60533347 60533366 60533363 +
agaaagagagaaggaatgaa

SEQ ID NO: 167773 - DNA, 20 bp, Artificial Sequence
  Synthetic oligonucleotide; GGG chr2 60533348 60533367 60533364 +
gaaagagagaaggaatgaag

SEQ ID NO: 167774 - DNA, 20 bp, Artificial Sequence
  Synthetic oligonucleotide; GGG chr2 60533349 60533368 60533365 +
aaagagagaaggaatgaagg

SEQ ID NO: 167775 - DNA, 20 bp, Artificial Sequence
  Synthetic oligonucleotide; AAG chr2 60533358 60533377 60533374 +
aggaatgaagggggtgatgc

SEQ ID NO: 167776 - DNA, 20 bp, Artificial Sequence
  Synthetic oligonucleotide; TAG chr2 60533362 60533381 60533378 +
atgaagggggtgatgcaaga

SEQ ID NO: 167777 - DNA, 20 bp, Artificial Sequence
  Synthetic oligonucleotide; AAG chr2 60533365 60533384 60533381 +
aagggggtgatgcaagatag

SEQ ID NO: 167778 - DNA, 20 bp, Artificial Sequence
  Synthetic oligonucleotide; AGG chr2 60533366 60533385 60533382 +
agggggtgatgcaagataga

SEQ ID NO: 167779 - DNA, 20 bp, Artificial Sequence
  Synthetic oligonucleotide; GAG chr2 60533368 60533387 60533384 +
ggggtgatgcaagatagaag

SEQ ID NO: 167780 - DNA, 20 bp, Artificial Sequence
  Synthetic oligonucleotide; GAG chr2 60533370 60533389 60533386 +
ggtgatgcaagatagaagga

SEQ ID NO: 167781 - DNA, 20 bp, Artificial Sequence
  Synthetic oligonucleotide; GAG chr2 60533372 60533391 60533388 +
tgatgcaagatagaaggaga

SEQ ID NO: 167782 - DNA, 20 bp, Artificial Sequence
  Synthetic oligonucleotide; TGG chr2 60533385 60533404 60533401 +
aaggagagagatttatacac

SEQ ID NO: 167783 - DNA, 20 bp, Artificial Sequence
  Synthetic oligonucleotide; AAG chr2 60533403 60533422 60533419 +
actggcttccatatgtcaca

SEQ ID NO: 167784 - DNA, 20 bp, Artificial Sequence
  Synthetic oligonucleotide; CAG chr2 60533419 60533438 60533435 +
cacaaagaccttcctatcca

SEQ ID NO: 167785 - DNA, 20 bp, Artificial Sequence
  Synthetic oligonucleotide; AAG chr2 60533434 60533453 60533450 +
atccacagccaacgcgactg

SEQ ID NO: 167786 - DNA, 20 bp, Artificial Sequence
  Synthetic oligonucleotide; CAG chr2 60533437 60533456 60533453 +
cacagccaacgcgactgaag

SEQ ID NO: 167787 - DNA, 20 bp, Artificial Sequence
  Synthetic oligonucleotide; AAG chr2 60533447 60533466 60533463 +
gcgactgaagcagcatgcat

SEQ ID NO: 167788 - DNA, 20 bp, Artificial Sequence
  Synthetic oligonucleotide; TAG chr2 60533451 60533470 60533467 +
ctgaagcagcatgcataagt

SEQ ID NO: 167789 - DNA, 20 bp, Artificial Sequence
  Synthetic oligonucleotide; CGG chr2 60533481 60533500 60533497 +
tgttttgttttcttaaatac

SEQ ID NO: 167790 - DNA, 20 bp, Artificial Sequence
  Synthetic oligonucleotide; GGG chr2 60533482 60533501 60533498 +
gttttgttttcttaaatacc

SEQ ID NO: 167791 - DNA, 20 bp, Artificial Sequence
  Synthetic oligonucleotide; CAG chr2 60533486 60533505 60533502 +
tgttttcttaaataccgggt

SEQ ID NO: 167792 - DNA, 20 bp, Artificial Sequence
  Synthetic oligonucleotide; CAG chr2 60533517 60533536 60533533 +
ccctttctccactgcccact

SEQ ID NO: 167793 - DNA, 20 bp, Artificial Sequence
  Synthetic oligonucleotide; AAG chr2 60533529 60533548 60533545 +
tgcccactcagccccacata

SEQ ID NO: 167794 - DNA, 20 bp, Artificial Sequence
  Synthetic oligonucleotide; AAG chr2 60533536 60533555 60533552 +
tcagccccacataaagtatg

SEQ ID NO: 167795 - DNA, 20 bp, Artificial Sequence
  Synthetic oligonucleotide; TAG chr2 60533561 60533580 60533577 +
tttttttgaccattttcaaa

SEQ ID NO: 167796 - DNA, 20 bp, Artificial Sequence
  Synthetic oligonucleotide; TAG chr2 60533576 60533595 60533592 +
tcaaatagcaaattatccat

SEQ ID NO: 167797 - DNA, 20 bp, Artificial Sequence
  Synthetic oligonucleotide; TAG chr2 60533593 60533612 60533609 +
cattagatttcatcatatct

SEQ ID NO: 167798 - DNA, 20 bp, Artificial Sequence
  Synthetic oligonucleotide; AAG chr2 60533598 60533617 60533614 +
gatttcatcatatcttagta

SEQ ID NO: 167799 - DNA, 20 bp, Artificial Sequence
  Synthetic oligonucleotide; AAG chr2 60533611 60533630 60533627 +
cttagtaaagcaattacatc

SEQ ID NO: 167800 - DNA, 20 bp, Artificial Sequence
  Synthetic oligonucleotide; TAG chr2 60533621 60533640 60533637 +
caattacatcaagaaaatga

SEQ ID NO: 167801 - DNA, 20 bp, Artificial Sequence
  Synthetic oligonucleotide; TGG chr2 60533630 60533649 60533646 +
caagaaaatgatagtgcgtg

SEQ ID NO: 167802 - DNA, 20 bp, Artificial Sequence
  Synthetic oligonucleotide; CAG chr2 60533648 60533667 60533664 +
tgtggaatcaattatgcatg

SEQ ID NO: 167803 - DNA, 20 bp, Artificial Sequence
  Synthetic oligonucleotide; TGG chr2 60533652 60533671 60533668 +
gaatcaattatgcatgcagt

SEQ ID NO: 167804 - DNA, 20 bp, Artificial Sequence
  Synthetic oligonucleotide; CGG chr2 60533656 60533675 60533672 +
caattatgcatgcagttggc

SEQ ID NO: 167805 - DNA, 20 bp, Artificial Sequence
  Synthetic oligonucleotide; GAG chr2 60533658 60533677 60533674 +
attatgcatgcagttggccg

SEQ ID NO: 167806 - DNA, 20 bp, Artificial Sequence
  Synthetic oligonucleotide; AAG chr2 60533665 60533684 60533681 +
atgcagttggccggagacca

SEQ ID NO: 167807 - DNA, 20 bp, Artificial Sequence
  Synthetic oligonucleotide; AGG chr2 60533666 60533685 60533682 +
tgcagttggccggagaccaa

SEQ ID NO: 167808 - DNA, 20 bp, Artificial Sequence
  Synthetic oligonucleotide; AAG chr2 60533674 60533693 60533690 +
gccggagaccaaaggctgtg

SEQ ID NO: 167809 - DNA, 20 bp, Artificial Sequence
  Synthetic oligonucleotide; CGG chr2 60533678 60533697 60533694 +
gagaccaaaggctgtgaagt

SEQ ID NO: 167810 - DNA, 20 bp, Artificial Sequence
  Synthetic oligonucleotide; GAG chr2 60533680 60533699 60533696 +
gaccaaaggctgtgaagtcg

SEQ ID NO: 167811 - DNA, 20 bp, Artificial Sequence
  Synthetic oligonucleotide; GAG chr2 60533682 60533701 60533698 +
ccaaaggctgtgaagtcgga

SEQ ID NO: 167812 - DNA, 20 bp, Artificial Sequence
  Synthetic oligonucleotide; AGG chr2 60533683 60533702 60533699 +
caaaggctgtgaagtcggag

SEQ ID NO: 167813 - DNA, 20 bp, Artificial Sequence
  Synthetic oligonucleotide; GGG chr2 60533684 60533703 60533700 +
aaaggctgtgaagtcggaga

SEQ ID NO: 167814 - DNA, 20 bp, Artificial Sequence
  Synthetic oligonucleotide; CAG chr2 60533687 60533706 60533703 +
ggctgtgaagtcggagaggg

SEQ ID NO: 167815 - DNA, 20 bp, Artificial Sequence
  Synthetic oligonucleotide; AAG chr2 60533714 60533733 60533730 +
gctcgacacacacaaataaa

SEQ ID NO: 167816 - DNA, 20 bp, Artificial Sequence
  Synthetic oligonucleotide; TGG chr2 60533721 60533740 60533737 +
acacacaaataaaaagcccc

SEQ ID NO: 167817 - DNA, 20 bp, Artificial Sequence
  Synthetic oligonucleotide; CAG chr2 60533730 60533749 60533746 +
taaaaagcccctggatctca

SEQ ID NO: 167818 - DNA, 20 bp, Artificial Sequence
  Synthetic oligonucleotide; TGG chr2 60533734 60533753 60533750 +
aagcccctggatctcacaga

SEQ ID NO: 167819 - DNA, 20 bp, Artificial Sequence
  Synthetic oligonucleotide; CAG chr2 60533744 60533763 60533760 +
atctcacagatggaccccat

SEQ ID NO: 167820 - DNA, 20 bp, Artificial Sequence
  Synthetic oligonucleotide; AAG chr2 60533765 60533784 60533781 +
agttcatcttactgcctaaa

SEQ ID NO: 167821 - DNA, 20 bp, Artificial Sequence
  Synthetic oligonucleotide; TGG chr2 60533797 60533816 60533813 +
ttaataatttatttgtgttc

SEQ ID NO: 167822 - DNA, 20 bp, Artificial Sequence
  Synthetic oligonucleotide; CAG chr2 60533811 60533830 60533827 +
gtgttctggatactgtttcc

SEQ ID NO: 167823 - DNA, 20 bp, Artificial Sequence
  Synthetic oligonucleotide; AAG chr2 60533838 60533857 60533854 +
atattaacaactttaaactg

SEQ ID NO: 167824 - DNA, 20 bp, Artificial Sequence
  Synthetic oligonucleotide; TAG chr2 60533849 60533868 60533865 +
tttaaactgaagcatgcttt

SEQ ID NO: 167825 - DNA, 20 bp, Artificial Sequence
  Synthetic oligonucleotide; TGG chr2 60533854 60533873 60533870 +
actgaagcatgcttttagca

SEQ ID NO: 167826 - DNA, 20 bp, Artificial Sequence
  Synthetic oligonucleotide; TGG chr2 60533859 60533878 60533875 +
agcatgcttttagcatggta

SEQ ID NO: 167827 - DNA, 20 bp, Artificial Sequence
  Synthetic oligonucleotide; TGG chr2 60533863 60533882 60533879 +
tgcttttagcatggtatgga

SEQ ID NO: 167828 - DNA, 20 bp, Artificial Sequence
  Synthetic oligonucleotide; AAG chr2 60533866 60533885 60533882 +
ttttagcatggtatggatgg

SEQ ID NO: 167829 - DNA, 20 bp, Artificial Sequence
  Synthetic oligonucleotide; CGG chr2 60533872 60533891 60533888 +
catggtatggatggaagtca

SEQ ID NO: 167830 - DNA, 20 bp, Artificial Sequence
  Synthetic oligonucleotide; TAG chr2 60533875 60533894 60533891 +
ggtatggatggaagtcacgg

SEQ ID NO: 167831 - DNA, 20 bp, Artificial Sequence
  Synthetic oligonucleotide; AGG chr2 60533876 60533895 60533892 +
gtatggatggaagtcacggt

SEQ ID NO: 167832 - DNA, 20 bp, Artificial Sequence
  Synthetic oligonucleotide; GGG chr2 60533877 60533896 60533893 +
tatggatggaagtcacggta

SEQ ID NO: 167833 - DNA, 20 bp, Artificial Sequence
  Synthetic oligonucleotide; CAG chr2 60533880 60533899 60533896 +
ggatggaagtcacggtaggg

SEQ ID NO: 167834 - DNA, 20 bp, Artificial Sequence
  Synthetic oligonucleotide; TAG chr2 60533886 60533905 60533902 +
aagtcacggtagggcagtgc

SEQ ID NO: 167835 - DNA, 20 bp, Artificial Sequence
  Synthetic oligonucleotide; AGG chr2 60533887 60533906 60533903 +
agtcacggtagggcagtgct

SEQ ID NO: 167836 - DNA, 20 bp, Artificial Sequence
  Synthetic oligonucleotide; CGG chr2 60533895 60533914 60533911 +
tagggcagtgctaggtccct

SEQ ID NO: 167837 - DNA, 20 bp, Artificial Sequence
  Synthetic oligonucleotide; GAG chr2 60533897 60533916 60533913 +
gggcagtgctaggtccctcg

SEQ ID NO: 167838 - DNA, 20 bp, Artificial Sequence
  Synthetic oligonucleotide; AGG chr2 60533898 60533917 60533914 +
ggcagtgctaggtccctcgg

SEQ ID NO: 167839 - DNA, 20 bp, Artificial Sequence
  Synthetic oligonucleotide; TAG chr2 60533910 60533929 60533926 +
tccctcggaggttaaaatta

SEQ ID NO: 167840 - DNA, 20 bp, Artificial Sequence
  Synthetic oligonucleotide; CAG chr2 60533981 60534000 60533997 +
cattaaacattcgttttaat

SEQ ID NO: 167841 - DNA, 20 bp, Artificial Sequence
  Synthetic oligonucleotide; CAG chr2 60533989 60534008 60534005 +
attcgttttaatcagaatat

SEQ ID NO: 167842 - DNA, 20 bp, Artificial Sequence
  Synthetic oligonucleotide; CAG chr2 60534020 60534039 60534036 +
ttctgattctgcttgttaac

SEQ ID NO: 167843 - DNA, 20 bp, Artificial Sequence
  Synthetic oligonucleotide; AAG chr2 60534041 60534060 60534057 +
agtgataaactcataaacca

SEQ ID NO: 167844 - DNA, 20 bp, Artificial Sequence
  Synthetic oligonucleotide; CAG chr2 60534060 60534079 60534076 +
aaagatgaacatcaataata

SEQ ID NO: 167845 - DNA, 20 bp, Artificial Sequence
  Synthetic oligonucleotide; CAG chr2 60534065 60534084 60534081 +
tgaacatcaataatacagca

SEQ ID NO: 167846 - DNA, 20 bp, Artificial Sequence
  Synthetic oligonucleotide; AGG chr2 60534066 60534085 60534082 +
gaacatcaataatacagcac

SEQ ID NO: 167847 - DNA, 20 bp, Artificial Sequence
  Synthetic oligonucleotide; CAG chr2 60534077 60534096 60534093 +
atacagcacaggttattcaa

SEQ ID NO: 167848 - DNA, 20 bp, Artificial Sequence
  Synthetic oligonucleotide; AAG chr2 60534082 60534101 60534098 +
gcacaggttattcaacagca

SEQ ID NO: 167849 - DNA, 20 bp, Artificial Sequence
  Synthetic oligonucleotide; AGG chr2 60534083 60534102 60534099 +
cacaggttattcaacagcaa

SEQ ID NO: 167850 - DNA, 20 bp, Artificial Sequence
  Synthetic oligonucleotide; CAG chr2 60534101 60534120 60534117 +
aaaggcaaacaccaaaatca

SEQ ID NO: 167851 - DNA, 20 bp, Artificial Sequence
  Synthetic oligonucleotide; AGG chr2 60534102 60534121 60534118 +
aaggcaaacaccaaaatcac

SEQ ID NO: 167852 - DNA, 20 bp, Artificial Sequence
  Synthetic oligonucleotide; CGG chr2 60534116 60534135 60534132 +
aatcacaggctctcaaaaat

SEQ ID NO: 167853 - DNA, 20 bp, Artificial Sequence
  Synthetic oligonucleotide; TAG chr2 60534126 60534145 60534142 +
tctcaaaaatcggaaaccgt

SEQ ID NO: 167854 - DNA, 20 bp, Artificial Sequence
  Synthetic oligonucleotide; TAG chr2 60534130 60534149 60534146 +
aaaaatcggaaaccgttagt

SEQ ID NO: 167855 - DNA, 20 bp, Artificial Sequence
  Synthetic oligonucleotide; CAG chr2 60534150 60534169 60534166 +
tagcaccttgttttcaccac

SEQ ID NO: 167856 - DNA, 20 bp, Artificial Sequence
  Synthetic oligonucleotide; AGG chr2 60534151 60534170 60534167 +
agcaccttgttttcaccacc

SEQ ID NO: 167857 - DNA, 20 bp, Artificial Sequence
  Synthetic oligonucleotide; GGG chr2 60534152 60534171 60534168 +
gcaccttgttttcaccacca

SEQ ID NO: 167858 - DNA, 20 bp, Artificial Sequence
  Synthetic oligonucleotide; GAG chr2 60534169 60534188 60534185 +
ccagggcactcgtgtacctt

SEQ ID NO: 167859 - DNA, 20 bp, Artificial Sequence
  Synthetic oligonucleotide; AGG chr2 60534170 60534189 60534186 +
cagggcactcgtgtaccttg

SEQ ID NO: 167860 - DNA, 20 bp, Artificial Sequence
  Synthetic oligonucleotide; GGG chr2 60534171 60534190 60534187 +
agggcactcgtgtaccttga

SEQ ID NO: 167861 - DNA, 20 bp, Artificial Sequence
  Synthetic oligonucleotide; GAG chr2 60534173 60534192 60534189 +
ggcactcgtgtaccttgagg

SEQ ID NO: 167862 - DNA, 20 bp, Artificial Sequence
  Synthetic oligonucleotide; TGG chr2 60534180 60534199 60534196 +
gtgtaccttgagggagacac

SEQ ID NO: 167863 - DNA, 20 bp, Artificial Sequence
  Synthetic oligonucleotide; GGG chr2 60534181 60534200 60534197 +
tgtaccttgagggagacact

SEQ ID NO: 167864 - DNA, 20 bp, Artificial Sequence
  Synthetic oligonucleotide; GAG chr2 60534183 60534202 60534199 +
taccttgagggagacactgg

SEQ ID NO: 167865 - DNA, 20 bp, Artificial Sequence
  Synthetic oligonucleotide; CAG chr2 60534188 60534207 60534204 +
tgagggagacactgggagcc

SEQ ID NO: 167866 - DNA, 20 bp, Artificial Sequence
  Synthetic oligonucleotide; AGG chr2 60534189 60534208 60534205 +
gagggagacactgggagccc

SEQ ID NO: 167867 - DNA, 20 bp, Artificial Sequence
  Synthetic oligonucleotide; GGG chr2 60534190 60534209 60534206 +
agggagacactgggagccca

SEQ ID NO: 167868 - DNA, 20 bp, Artificial Sequence
  Synthetic oligonucleotide; GAG chr2 60534192 60534211 60534208 +
ggagacactgggagcccagg

SEQ ID NO: 167869 - DNA, 20 bp, Artificial Sequence
  Synthetic oligonucleotide; TGG chr2 60534197 60534216 60534213 +
cactgggagcccagggagcc

SEQ ID NO: 167870 - DNA, 20 bp, Artificial Sequence
  Synthetic oligonucleotide; GAG chr2 60534199 60534218 60534215 +
ctgggagcccagggagcctg

SEQ ID NO: 167871 - DNA, 20 bp, Artificial Sequence
  Synthetic oligonucleotide; CAG chr2 60534204 60534223 60534220 +
agcccagggagcctggagac

SEQ ID NO: 167872 - DNA, 20 bp, Artificial Sequence
  Synthetic oligonucleotide; AGG chr2 60534205 60534224 60534221 +
gcccagggagcctggagacc

SEQ ID NO: 167873 - DNA, 20 bp, Artificial Sequence
  Synthetic oligonucleotide; TGG chr2 60534216 60534235 60534232 +
ctggagaccaggatatactt

SEQ ID NO: 167874 - DNA, 20 bp, Artificial Sequence
  Synthetic oligonucleotide; GAG chr2 60534223 60534242 60534239 +
ccaggatatactttggtgat

SEQ ID NO: 167875 - DNA, 20 bp, Artificial Sequence
  Synthetic oligonucleotide; AGG chr2 60534224 60534243 60534240 +
caggatatactttggtgatg

SEQ ID NO: 167876 - DNA, 20 bp, Artificial Sequence
  Synthetic oligonucleotide; GGG chr2 60534225 60534244 60534241 +
aggatatactttggtgatga

SEQ ID NO: 167877 - DNA, 20 bp, Artificial Sequence
  Synthetic oligonucleotide; GGG chr2 60534226 60534245 60534242 +
ggatatactttggtgatgag

SEQ ID NO: 167878 - DNA, 20 bp, Artificial Sequence
  Synthetic oligonucleotide; GAG chr2 60534228 60534247 60534244 +
atatactttggtgatgaggg

SEQ ID NO: 167879 - DNA, 20 bp, Artificial Sequence
  Synthetic oligonucleotide; AGG chr2 60534229 60534248 60534245 +
tatactttggtgatgagggg

SEQ ID NO: 167880 - DNA, 20 bp, Artificial Sequence
  Synthetic oligonucleotide; TAG chr2 60534240 60534259 60534256 +
gatgaggggaggacacattg

SEQ ID NO: 167881 - DNA, 20 bp, Artificial Sequence
  Synthetic oligonucleotide; CAG chr2 60534245 60534264 60534261 +
ggggaggacacattgtagct

SEQ ID NO: 167882 - DNA, 20 bp, Artificial Sequence
  Synthetic oligonucleotide; GAG chr2 60534247 60534266 60534263 +
ggaggacacattgtagctca

SEQ ID NO: 167883 - DNA, 20 bp, Artificial Sequence
  Synthetic oligonucleotide; CAG chr2 60534250 60534269 60534266 +
ggacacattgtagctcagag

SEQ ID NO: 167884 - DNA, 20 bp, Artificial Sequence
  Synthetic oligonucleotide; CAG chr2 60534253 60534272 60534269 +
cacattgtagctcagagcag

SEQ ID NO: 167885 - DNA, 20 bp, Artificial Sequence
  Synthetic oligonucleotide; GAG chr2 60534262 60534281 60534278 +
gctcagagcagcagctgaat

SEQ ID NO: 167886 - DNA, 20 bp, Artificial Sequence
  Synthetic oligonucleotide; AAG chr2 60534283 60534302 60534299 +
agaaaacttacttgatctaa

SEQ ID NO: 167887 - DNA, 20 bp, Artificial Sequence
  Synthetic oligonucleotide; AAG chr2 60534290 60534309 60534306 +
ttacttgatctaaaagataa

SEQ ID NO: 167888 - DNA, 20 bp, Artificial Sequence
  Synthetic oligonucleotide; GAG chr2 60534292 60534311 60534308 +
acttgatctaaaagataaaa

SEQ ID NO: 167889 - DNA, 20 bp, Artificial Sequence
  Synthetic oligonucleotide; CAG chr2 60534296 60534315 60534312 +
gatctaaaagataaaagagt

SEQ ID NO: 167890 - DNA, 20 bp, Artificial Sequence
  Synthetic oligonucleotide; CAG chr2 60534306 60534325 60534322 +
ataaaagagtcagccaaacc

SEQ ID NO: 167891 - DNA, 20 bp, Artificial Sequence
  Synthetic oligonucleotide; AGG chr2 60534307 60534326 60534323 +
taaaagagtcagccaaaccc

SEQ ID NO: 167892 - DNA, 20 bp, Artificial Sequence
  Synthetic oligonucleotide; AAG chr2 60534313 60534332 60534329 +
agtcagccaaacccaggccc

SEQ ID NO: 167893 - DNA, 20 bp, Artificial Sequence
  Synthetic oligonucleotide; TAG chr2 60534321 60534340 60534337 +
aaacccaggcccaagtcctt

SEQ ID NO: 167894 - DNA, 20 bp, Artificial Sequence
  Synthetic oligonucleotide; AGG chr2 60534322 60534341 60534338 +
aacccaggcccaagtccttt

SEQ ID NO: 167895 - DNA, 20 bp, Artificial Sequence
  Synthetic oligonucleotide; CAG chr2 60534328 60534347 60534344 +
ggcccaagtcctttaggtgc

SEQ ID NO: 167896 - DNA, 20 bp, Artificial Sequence
  Synthetic oligonucleotide; AAG chr2 60534342 60534361 60534358 +
aggtgccagccatctatcta

SEQ ID NO: 167897 - DNA, 20 bp, Artificial Sequence
  Synthetic oligonucleotide; AAG chr2 60534345 60534364 60534361 +
tgccagccatctatctaaag

SEQ ID NO: 167898 - DNA, 20 bp, Artificial Sequence
  Synthetic oligonucleotide; AAG chr2 60534355 60534374 60534371 +
ctatctaaagaagaaaccta

SEQ ID NO: 167899 - DNA, 20 bp, Artificial Sequence
  Synthetic oligonucleotide; TAG chr2 60534364 60534383 60534380 +
gaagaaacctaaagcattgt

SEQ ID NO: 167900 - DNA, 20 bp, Artificial Sequence
  Synthetic oligonucleotide; AAG chr2 60534368 60534387 60534384 +
aaacctaaagcattgttaga

SEQ ID NO: 167901 - DNA, 20 bp, Artificial Sequence
  Synthetic oligonucleotide; AGG chr2 60534369 60534388 60534385 +
aacctaaagcattgttagaa

SEQ ID NO: 167902 - DNA, 20 bp, Artificial Sequence
  Synthetic oligonucleotide; TAG chr2 60534376 60534395 60534392 +
agcattgttagaaaggtttg

SEQ ID NO: 167903 - DNA, 20 bp, Artificial Sequence
  Synthetic oligonucleotide; TAG chr2 60534384 60534403 60534400 +
tagaaaggtttgtagttctg

SEQ ID NO: 167904 - DNA, 20 bp, Artificial Sequence
  Synthetic oligonucleotide; AAG chr2 60534401 60534420 60534417 +
ctgtagccttccctcctcca

SEQ ID NO: 167905 - DNA, 20 bp, Artificial Sequence
  Synthetic oligonucleotide; AGG chr2 60534402 60534421 60534418 +
tgtagccttccctcctccaa

SEQ ID NO: 167906 - DNA, 20 bp, Artificial Sequence
  Synthetic oligonucleotide; GAG chr2 60534404 60534423 60534420 +
tagccttccctcctccaaag

SEQ ID NO: 167907 - DNA, 20 bp, Artificial Sequence
  Synthetic oligonucleotide; AGG chr2 60534405 60534424 60534421 +
agccttccctcctccaaagg

SEQ ID NO: 167908 - DNA, 20 bp, Artificial Sequence
  Synthetic oligonucleotide; TAG chr2 60534433 60534452 60534449 +
gatgtcttaatacactataa

SEQ ID NO: 167909 - DNA, 20 bp, Artificial Sequence
  Synthetic oligonucleotide; AAG chr2 60534438 60534457 60534454 +
cttaatacactataatagcc

SEQ ID NO: 167910 - DNA, 20 bp, Artificial Sequence
  Synthetic oligonucleotide; AGG chr2 60534439 60534458 60534455 +
ttaatacactataatagcca

SEQ ID NO: 167911 - DNA, 20 bp, Artificial Sequence
  Synthetic oligonucleotide; TGG chr2 60534489 60534508 60534505 +
aaactgccctgcaatgttcg

SEQ ID NO: 167912 - DNA, 20 bp, Artificial Sequence
  Synthetic oligonucleotide; GGG chr2 60534490 60534509 60534506 +
aactgccctgcaatgttcgt

SEQ ID NO: 167913 - DNA, 20 bp, Artificial Sequence
  Synthetic oligonucleotide; GGG chr2 60534491 60534510 60534507 +
actgccctgcaatgttcgtg

SEQ ID NO: 167914 - DNA, 20 bp, Artificial Sequence
  Synthetic oligonucleotide; CAG chr2 60534496 60534515 60534512 +
cctgcaatgttcgtggggaa

SEQ ID NO: 167915 - DNA, 20 bp, Artificial Sequence
  Synthetic oligonucleotide; CAG chr2 60534502 60534521 60534518 +
atgttcgtggggaacagaaa

SEQ ID NO: 167916 - DNA, 20 bp, Artificial Sequence
  Synthetic oligonucleotide; AGG chr2 60534503 60534522 60534519 +
tgttcgtggggaacagaaac

SEQ ID NO: 167917 - DNA, 20 bp, Artificial Sequence
  Synthetic oligonucleotide; TGG chr2 60534529 60534548 60534545 +
tacatatttctctatgtatc

SEQ ID NO: 167918 - DNA, 20 bp, Artificial Sequence
  Synthetic oligonucleotide; AAG chr2 60534532 60534551 60534548 +
atatttctctatgtatctgg

SEQ ID NO: 167919 - DNA, 20 bp, Artificial Sequence
  Synthetic oligonucleotide; CAG chr2 60534561 60534580 60534577 +
aatcatatacttaaatttta

SEQ ID NO: 167920 - DNA, 20 bp, Artificial Sequence
  Synthetic oligonucleotide; GAG chr2 60534578 60534597 60534594 +
ttacagtcttctccccaaat

SEQ ID NO: 167921 - DNA, 20 bp, Artificial Sequence
  Synthetic oligonucleotide; CAG chr2 60534590 60534609 60534606 +
ccccaaatgagaacgatttc

SEQ ID NO: 167922 - DNA, 20 bp, Artificial Sequence
  Synthetic oligonucleotide; AAG chr2 60534625 60534644 60534641 +
caaactgtacttaacgttaa

SEQ ID NO: 167923 - DNA, 20 bp, Artificial Sequence
  Synthetic oligonucleotide; CGG chr2 60534632 60534651 60534648 +
tacttaacgttaaaagaaaa

SEQ ID NO: 167924 - DNA, 20 bp, Artificial Sequence
  Synthetic oligonucleotide; AAG chr2 60534656 60534675 60534672 +
taaaacatatgtaattactc

SEQ ID NO: 167925 - DNA, 20 bp, Artificial Sequence
  Synthetic oligonucleotide; AGG chr2 60534657 60534676 60534673 +
aaaacatatgtaattactca

SEQ ID NO: 167926 - DNA, 20 bp, Artificial Sequence
  Synthetic oligonucleotide; TAG chr2 60534661 60534680 60534677 +
catatgtaattactcaaggt

SEQ ID NO: 167927 - DNA, 20 bp, Artificial Sequence
  Synthetic oligonucleotide; AAG chr2 60534687 60534706 60534703 +
tctaattcctcaattcacta

SEQ ID NO: 167928 - DNA, 20 bp, Artificial Sequence
  Synthetic oligonucleotide; AGG chr2 60534688 60534707 60534704 +
ctaattcctcaattcactaa

SEQ ID NO: 167929 - DNA, 20 bp, Artificial Sequence
  Synthetic oligonucleotide; TGG chr2 60534696 60534715 60534712 +
tcaattcactaaaggaaact

SEQ ID NO: 167930 - DNA, 20 bp, Artificial Sequence
  Synthetic oligonucleotide; AAG chr2 60534700 60534719 60534716 +
ttcactaaaggaaacttggc

SEQ ID NO: 167931 - DNA, 20 bp, Artificial Sequence
  Synthetic oligonucleotide; AAG chr2 60534703 60534722 60534719 +
actaaaggaaacttggcaag

SEQ ID NO: 167932 - DNA, 20 bp, Artificial Sequence
  Synthetic oligonucleotide; TGG chr2 60534730 60534749 60534746 +
atcattttgctcctttctac

SEQ ID NO: 167933 - DNA, 20 bp, Artificial Sequence
  Synthetic oligonucleotide; GGG chr2 60534731 60534750 60534747 +
tcattttgctcctttctact

SEQ ID NO: 167934 - DNA, 20 bp, Artificial Sequence
  Synthetic oligonucleotide; GGG chr2 60534732 60534751 60534748 +
cattttgctcctttctactg

SEQ ID NO: 167935 - DNA, 20 bp, Artificial Sequence
  Synthetic oligonucleotide; GAG chr2 60534740 60534759 60534756 +
tcctttctactggggcatct

SEQ ID NO: 167936 - DNA, 20 bp, Artificial Sequence
  Synthetic oligonucleotide; AGG chr2 60534741 60534760 60534757 +
cctttctactggggcatctg

SEQ ID NO: 167937 - DNA, 20 bp, Artificial Sequence
  Synthetic oligonucleotide; GAG chr2 60534743 60534762 60534759 +
tttctactggggcatctgag

SEQ ID NO: 167938 - DNA, 20 bp, Artificial Sequence
  Synthetic oligonucleotide; AGG chr2 60534744 60534763 60534760 +
ttctactggggcatctgagg

SEQ ID NO: 167939 - DNA, 20 bp, Artificial Sequence
  Synthetic oligonucleotide; GAG chr2 60534746 60534765 60534762 +
ctactggggcatctgaggag

SEQ ID NO: 167940 - DNA, 20 bp, Artificial Sequence
  Synthetic oligonucleotide; GAG chr2 60534748 60534767 60534764 +
actggggcatctgaggagga

SEQ ID NO: 167941 - DNA, 20 bp, Artificial Sequence
  Synthetic oligonucleotide; GAG chr2 60534756 60534775 60534772 +
atctgaggaggagagccact

SEQ ID NO: 167942 - DNA, 20 bp, Artificial Sequence
  Synthetic oligonucleotide; AGG chr2 60534757 60534776 60534773 +
tctgaggaggagagccactg

SEQ ID NO: 167943 - DNA, 20 bp, Artificial Sequence
  Synthetic oligonucleotide; CAG chr2 60534760 60534779 60534776 +
gaggaggagagccactgagg

SEQ ID NO: 167944 - DNA, 20 bp, Artificial Sequence
  Synthetic oligonucleotide; AAG chr2 60534785 60534804 60534801 +
aatacacaaaacatgatcaa

SEQ ID NO: 167945 - DNA, 20 bp, Artificial Sequence
  Synthetic oligonucleotide; CAG chr2 60534798 60534817 60534814 +
tgatcaaaagtgattaacaa

SEQ ID NO: 167946 - DNA, 20 bp, Artificial Sequence
  Synthetic oligonucleotide; AAG chr2 60534825 60534844 60534841 +
atatgcaaattacattaatg

SEQ ID NO: 167947 - DNA, 20 bp, Artificial Sequence
  Synthetic oligonucleotide; AGG chr2 60534826 60534845 60534842 +
tatgcaaattacattaatga

SEQ ID NO: 167948 - DNA, 20 bp, Artificial Sequence
  Synthetic oligonucleotide; GAG chr2 60534828 60534847 60534844 +
tgcaaattacattaatgaag

SEQ ID NO: 167949 - DNA, 20 bp, Artificial Sequence
  Synthetic oligonucleotide; AAG chr2 60534835 60534854 60534851 +
tacattaatgaaggagtgca

SEQ ID NO: 167950 - DNA, 20 bp, Artificial Sequence
  Synthetic oligonucleotide; TGG chr2 60534869 60534888 60534885 +
attaaatatgtcaaatctct

SEQ ID NO: 167951 - DNA, 20 bp, Artificial Sequence
  Synthetic oligonucleotide; GAG chr2 60534887 60534906 60534903 +
cttggtgaacttttaatctt

SEQ ID NO: 167952 - DNA, 20 bp, Artificial Sequence
  Synthetic oligonucleotide; AAG chr2 60534890 60534909 60534906 +
ggtgaacttttaatcttgag

SEQ ID NO: 167953 - DNA, 20 bp, Artificial Sequence
  Synthetic oligonucleotide; AAG chr2 60534933 60534952 60534949 +
ttttacatcatcaattttgc

SEQ ID NO: 167954 - DNA, 20 bp, Artificial Sequence
  Synthetic oligonucleotide; AAG chr2 60534947 60534966 60534963 +
ttttgcaagattgaaaatct

SEQ ID NO: 167955 - DNA, 20 bp, Artificial Sequence
  Synthetic oligonucleotide; TGG chr2 60534955 60534974 60534971 +
gattgaaaatctaagaatct

SEQ ID NO: 167956 - DNA, 20 bp, Artificial Sequence
  Synthetic oligonucleotide; CAG chr2 60534992 60535011 60535008 +
ttcaccttttttttctcctt

SEQ ID NO: 167957 - DNA, 20 bp, Artificial Sequence
  Synthetic oligonucleotide; CAG chr2 60534995 60535014 60535011 +
accttttttttctccttcag

SEQ ID NO: 167958 - DNA, 20 bp, Artificial Sequence
  Synthetic oligonucleotide; AGG chr2 60534996 60535015 60535012 +
ccttttttttctccttcagc

SEQ ID NO: 167959 - DNA, 20 bp, Artificial Sequence
  Synthetic oligonucleotide; CAG chr2 60535003 60535022 60535019 +
tttctccttcagcaggctga

SEQ ID NO: 167960 - DNA, 20 bp, Artificial Sequence
  Synthetic oligonucleotide; AGG chr2 60535004 60535023 60535020 +
ttctccttcagcaggctgac

SEQ ID NO: 167961 - DNA, 20 bp, Artificial Sequence
  Synthetic oligonucleotide; CAG chr2 60535008 60535027 60535024 +
ccttcagcaggctgacaggc

SEQ ID NO: 167962 - DNA, 20 bp, Artificial Sequence
  Synthetic oligonucleotide; TAG chr2 60535039 60535058 60535055 +
gcaccgaatgtacatgttaa

SEQ ID NO: 167963 - DNA, 20 bp, Artificial Sequence
  Synthetic oligonucleotide; AGG chr2 60535040 60535059 60535056 +
caccgaatgtacatgttaat

SEQ ID NO: 167964 - DNA, 20 bp, Artificial Sequence
  Synthetic oligonucleotide; TGG chr2 60535075 60535094 60535091 +
gcaaaacaattcgcaattac

SEQ ID NO: 167965 - DNA, 20 bp, Artificial Sequence
  Synthetic oligonucleotide; AAG chr2 60535078 60535097 60535094 +
aaacaattcgcaattactgg

SEQ ID NO: 167966 - DNA, 20 bp, Artificial Sequence
  Synthetic oligonucleotide; AGG chr2 60535079 60535098 60535095 +
aacaattcgcaattactgga

SEQ ID NO: 167967 - DNA, 20 bp, Artificial Sequence
  Synthetic oligonucleotide; TGG chr2 60535088 60535107 60535104 +
caattactggaaggacctaa

SEQ ID NO: 167968 - DNA, 20 bp, Artificial Sequence
  Synthetic oligonucleotide; TAG chr2 60535095 60535114 60535111 +
tggaaggacctaatggtcat

SEQ ID NO: 167969 - DNA, 20 bp, Artificial Sequence
  Synthetic oligonucleotide; TAG chr2 60535108 60535127 60535124 +
tggtcattagaatttacaac

SEQ ID NO: 167970 - DNA, 20 bp, Artificial Sequence
  Synthetic oligonucleotide; AGG chr2 60535109 60535128 60535125 +
ggtcattagaatttacaact

SEQ ID NO: 167971 - DNA, 20 bp, Artificial Sequence
  Synthetic oligonucleotide; AAG chr2 60535122 60535141 60535138 +
tacaactaggtaatgaactg

SEQ ID NO: 167972 - DNA, 20 bp, Artificial Sequence
  Synthetic oligonucleotide; AAG chr2 60535150 60535169 60535166 +
ccacaccatgcatattcata

SEQ ID NO: 167973 - DNA, 20 bp, Artificial Sequence
  Synthetic oligonucleotide; TAG chr2 60535158 60535177 60535174 +
tgcatattcataaagcaatt

SEQ ID NO: 167974 - DNA, 20 bp, Artificial Sequence
  Synthetic oligonucleotide; AAG chr2 60535167 60535186 60535183 +
ataaagcaatttagcctttg

SEQ ID NO: 167975 - DNA, 20 bp, Artificial Sequence
  Synthetic oligonucleotide; AAG chr2 60535174 60535193 60535190 +
aatttagcctttgaagatta

SEQ ID NO: 167976 - DNA, 20 bp, Artificial Sequence
  Synthetic oligonucleotide; AAG chr2 60535177 60535196 60535193 +
ttagcctttgaagattaaag

SEQ ID NO: 167977 - DNA, 20 bp, Artificial Sequence
  Synthetic oligonucleotide; GAG chr2 60535196 60535215 60535212 +
gaagtgcttaaaattcaaat

SEQ ID NO: 167978 - DNA, 20 bp, Artificial Sequence
  Synthetic oligonucleotide; TAG chr2 60535202 60535221 60535218 +
cttaaaattcaaatgagctt

SEQ ID NO: 167979 - DNA, 20 bp, Artificial Sequence
  Synthetic oligonucleotide; CAG chr2 60535213 60535232 60535229 +
aatgagctttagcaaattat

SEQ ID NO: 167980 - DNA, 20 bp, Artificial Sequence
  Synthetic oligonucleotide; AAG chr2 60535217 60535236 60535233 +
agctttagcaaattatcagt

SEQ ID NO: 167981 - DNA, 20 bp, Artificial Sequence
  Synthetic oligonucleotide; AAG chr2 60535231 60535250 60535247 +
atcagtaagattcatccaaa

SEQ ID NO: 167982 - DNA, 20 bp, Artificial Sequence
  Synthetic oligonucleotide; AAG chr2 60535236 60535255 60535252 +
taagattcatccaaaaagca

SEQ ID NO: 167983 - DNA, 20 bp, Artificial Sequence
  Synthetic oligonucleotide; AGG chr2 60535237 60535256 60535253 +
aagattcatccaaaaagcaa

SEQ ID NO: 167984 - DNA, 20 bp, Artificial Sequence
  Synthetic oligonucleotide; GGG chr2 60535238 60535257 60535254 +
agattcatccaaaaagcaaa

SEQ ID NO: 167985 - DNA, 20 bp, Artificial Sequence
  Synthetic oligonucleotide; CAG chr2 60535293 60535312 60535309 +
tgcaaaattgtaatatcttc

SEQ ID NO: 167986 - DNA, 20 bp, Artificial Sequence
  Synthetic oligonucleotide; GAG chr2 60535299 60535318 60535315 +
attgtaatatcttccagact

SEQ ID NO: 167987 - DNA, 20 bp, Artificial Sequence
  Synthetic oligonucleotide; TAG chr2 60535315 60535334 60535331 +
gactgagcttaaactaaaca

SEQ ID NO: 167988 - DNA, 20 bp, Artificial Sequence
  Synthetic oligonucleotide; GAG chr2 60535317 60535336 60535333 +
ctgagcttaaactaaacata

SEQ ID NO: 167989 - DNA, 20 bp, Artificial Sequence
  Synthetic oligonucleotide; TAG chr2 60535324 60535343 60535340 +
taaactaaacatagagcttc

SEQ ID NO: 167990 - DNA, 20 bp, Artificial Sequence
  Synthetic oligonucleotide; AAG chr2 60535329 60535348 60535345 +
taaacatagagcttctagtc

SEQ ID NO: 167991 - DNA, 20 bp, Artificial Sequence
  Synthetic oligonucleotide; AAG chr2 60535335 60535354 60535351 +
tagagcttctagtcaagcca

SEQ ID NO: 167992 - DNA, 20 bp, Artificial Sequence
  Synthetic oligonucleotide; AGG chr2 60535336 60535355 60535352 +
agagcttctagtcaagccaa

SEQ ID NO: 167993 - DNA, 20 bp, Artificial Sequence
  Synthetic oligonucleotide; GGG chr2 60535337 60535356 60535353 +
gagcttctagtcaagccaaa

SEQ ID NO: 167994 - DNA, 20 bp, Artificial Sequence
  Synthetic oligonucleotide; GGG chr2 60535338 60535357 60535354 +
agcttctagtcaagccaaag

SEQ ID NO: 167995 - DNA, 20 bp, Artificial Sequence
  Synthetic oligonucleotide; AAG chr2 60535343 60535362 60535359 +
ctagtcaagccaaaggggct

SEQ ID NO: 167996 - DNA, 20 bp, Artificial Sequence
  Synthetic oligonucleotide; CAG chr2 60535353 60535372 60535369 +
caaaggggctaagatacaaa

SEQ ID NO: 167997 - DNA, 20 bp, Artificial Sequence
  Synthetic oligonucleotide; GAG chr2 60535355 60535374 60535371 +
aaggggctaagatacaaaca

SEQ ID NO: 167998 - DNA, 20 bp, Artificial Sequence
  Synthetic oligonucleotide; AGG chr2 60535356 60535375 60535372 +
aggggctaagatacaaacag

SEQ ID NO: 167999 - DNA, 20 bp, Artificial Sequence
  Synthetic oligonucleotide; CGG chr2 60535374 60535393 60535390 +
agaggctgcaaacatcgtca

SEQ ID NO: 168000 - DNA, 20 bp, Artificial Sequence
  Synthetic oligonucleotide; AAG chr2 60535394 60535413 60535410 +
cggactttgttcataaaact

SEQ ID NO: 168001 - DNA, 20 bp, Artificial Sequence
  Synthetic oligonucleotide; AAG chr2 60535402 60535421 60535418 +
gttcataaaactaagccctt

SEQ ID NO: 168002 - DNA, 20 bp, Artificial Sequence
  Synthetic oligonucleotide; GAG chr2 60535404 60535423 60535420 +
tcataaaactaagcccttaa

SEQ ID NO: 168003 - DNA, 20 bp, Artificial Sequence
  Synthetic oligonucleotide; TGG chr2 60535426 60535445 60535442 +
gccaaacctatctctaaaca

SEQ ID NO: 168004 - DNA, 20 bp, Artificial Sequence
  Synthetic oligonucleotide; CAG chr2 60535443 60535462 60535459 +
acatggtaatttatcaaaaa

SEQ ID NO: 168005 - DNA, 20 bp, Artificial Sequence
  Synthetic oligonucleotide; CAG chr2 60535448 60535467 60535464 +
gtaatttatcaaaaacagcc

SEQ ID NO: 168006 - DNA, 20 bp, Artificial Sequence
  Synthetic oligonucleotide; GAG chr2 60535450 60535469 60535466 +
aatttatcaaaaacagccca

SEQ ID NO: 168007 - DNA, 20 bp, Artificial Sequence
  Synthetic oligonucleotide; TAG chr2 60535460 60535479 60535476 +
aaacagcccagagtcgctca

SEQ ID NO: 168008 - DNA, 20 bp, Artificial Sequence
  Synthetic oligonucleotide; AGG chr2 60535461 60535480 60535477 +
aacagcccagagtcgctcat

SEQ ID NO: 168009 - DNA, 20 bp, Artificial Sequence
  Synthetic oligonucleotide; TAG chr2 60535474 60535493 60535490 +
cgctcataggcaatactgca

SEQ ID NO: 168010 - DNA, 20 bp, Artificial Sequence
  Synthetic oligonucleotide; CAG chr2 60535485 60535504 60535501 +
aatactgcatagtcctccaa

SEQ ID NO: 168011 - DNA, 20 bp, Artificial Sequence
  Synthetic oligonucleotide; CAG chr2 60535490 60535509 60535506 +
tgcatagtcctccaacagaa

SEQ ID NO: 168012 - DNA, 20 bp, Artificial Sequence
  Synthetic oligonucleotide; GAG chr2 60535501 60535520 60535517 +
ccaacagaacagattaacac

SEQ ID NO: 168013 - DNA, 20 bp, Artificial Sequence
  Synthetic oligonucleotide; AAG chr2 60535522 60535541 60535538 +
agtccctccacccttccaaa

SEQ ID NO: 168014 - DNA, 20 bp, Artificial Sequence
  Synthetic oligonucleotide; AAG chr2 60535538 60535557 60535554 +
caaaaagccttttccccctc

SEQ ID NO: 168015 - DNA, 20 bp, Artificial Sequence
  Synthetic oligonucleotide; TGG chr2 60535568 60535587 60535584 +
tcctgtgtaaacatccactg

SEQ ID NO: 168016 - DNA, 20 bp, Artificial Sequence
  Synthetic oligonucleotide; CAG chr2 60535579 60535598 60535595 +
catccactgtggtataaaaa

SEQ ID NO: 168017 - DNA, 20 bp, Artificial Sequence
  Synthetic oligonucleotide; TGG chr2 60535591 60535610 60535607 +
tataaaaacagctttttcat

SEQ ID NO: 168018 - DNA, 20 bp, Artificial Sequence
  Synthetic oligonucleotide; TGG chr2 60535596 60535615 60535612 +
aaacagctttttcattggct

SEQ ID NO: 168019 - DNA, 20 bp, Artificial Sequence
  Synthetic oligonucleotide; GAG chr2 60535598 60535617 60535614 +
acagctttttcattggcttg

SEQ ID NO: 168020 - DNA, 20 bp, Artificial Sequence
  Synthetic oligonucleotide; TGG chr2 60535601 60535620 60535617 +
gctttttcattggcttggag

SEQ ID NO: 168021 - DNA, 20 bp, Artificial Sequence
  Synthetic oligonucleotide; TAG chr2 60535613 60535632 60535629 +
gcttggagtggcattaattt

SEQ ID NO: 168022 - DNA, 20 bp, Artificial Sequence
  Synthetic oligonucleotide; AAG chr2 60535616 60535635 60535632 +
tggagtggcattaattttag

SEQ ID NO: 168023 - DNA, 20 bp, Artificial Sequence
  Synthetic oligonucleotide; AAG chr2 60535631 60535650 60535647 +
tttagaagtttctgcttcca

SEQ ID NO: 168024 - DNA, 20 bp, Artificial Sequence
  Synthetic oligonucleotide; AGG chr2 60535632 60535651 60535648 +
ttagaagtttctgcttccaa

SEQ ID NO: 168025 - DNA, 20 bp, Artificial Sequence
  Synthetic oligonucleotide; GGG chr2 60535633 60535652 60535649 +
tagaagtttctgcttccaaa

SEQ ID NO: 168026 - DNA, 20 bp, Artificial Sequence
  Synthetic oligonucleotide; CAG chr2 60535640 60535659 60535656 +
ttctgcttccaaagggaaac

SEQ ID NO: 168027 - DNA, 20 bp, Artificial Sequence
  Synthetic oligonucleotide; AAG chr2 60535644 60535663 60535660 +
gcttccaaagggaaaccagc

SEQ ID NO: 168028 - DNA, 20 bp, Artificial Sequence
  Synthetic oligonucleotide; AAG chr2 60535648 60535667 60535664 +
ccaaagggaaaccagcaaga

SEQ ID NO: 168029 - DNA, 20 bp, Artificial Sequence
  Synthetic oligonucleotide; AGG chr2 60535649 60535668 60535665 +
caaagggaaaccagcaagaa

SEQ ID NO: 168030 - DNA, 20 bp, Artificial Sequence
  Synthetic oligonucleotide; GAG chr2 60535651 60535670 60535667 +
aagggaaaccagcaagaaag

SEQ ID NO: 168031 - DNA, 20 bp, Artificial Sequence
  Synthetic oligonucleotide; AAG chr2 60535654 60535673 60535670 +
ggaaaccagcaagaaaggag

SEQ ID NO: 168032 - DNA, 20 bp, Artificial Sequence
  Synthetic oligonucleotide; CAG chr2 60535659 60535678 60535675 +
ccagcaagaaaggagaagca

SEQ ID NO: 168033 - DNA, 20 bp, Artificial Sequence
  Synthetic oligonucleotide; AGG chr2 60535660 60535679 60535676 +
cagcaagaaaggagaagcac

SEQ ID NO: 168034 - DNA, 20 bp, Artificial Sequence
  Synthetic oligonucleotide; GAG chr2 60535662 60535681 60535678 +
gcaagaaaggagaagcacag

SEQ ID NO: 168035 - DNA, 20 bp, Artificial Sequence
  Synthetic oligonucleotide; AGG chr2 60535663 60535682 60535679 +
caagaaaggagaagcacagg

SEQ ID NO: 168036 - DNA, 20 bp, Artificial Sequence
  Synthetic oligonucleotide; GGG chr2 60535664 60535683 60535680 +
aagaaaggagaagcacagga

SEQ ID NO: 168037 - DNA, 20 bp, Artificial Sequence
  Synthetic oligonucleotide; GAG chr2 60535666 60535685 60535682 +
gaaaggagaagcacaggagg

SEQ ID NO: 168038 - DNA, 20 bp, Artificial Sequence
  Synthetic oligonucleotide; GAG chr2 60535668 60535687 60535684 +
aaggagaagcacaggaggga

SEQ ID NO: 168039 - DNA, 20 bp, Artificial Sequence
  Synthetic oligonucleotide; AGG chr2 60535669 60535688 60535685 +
aggagaagcacaggagggag

SEQ ID NO: 168040 - DNA, 20 bp, Artificial Sequence
  Synthetic oligonucleotide; GAG chr2 60535671 60535690 60535687 +
gagaagcacaggagggagag

SEQ ID NO: 168041 - DNA, 20 bp, Artificial Sequence
  Synthetic oligonucleotide; AAG chr2 60535675 60535694 60535691 +
agcacaggagggagaggagc

SEQ ID NO: 168042 - DNA, 20 bp, Artificial Sequence
  Synthetic oligonucleotide; AGG chr2 60535676 60535695 60535692 +
gcacaggagggagaggagca

SEQ ID NO: 168043 - DNA, 20 bp, Artificial Sequence
  Synthetic oligonucleotide; TGG chr2 60535681 60535700 60535697 +
ggagggagaggagcaaggtc

SEQ ID NO: 168044 - DNA, 20 bp, Artificial Sequence
  Synthetic oligonucleotide; GAG chr2 60535693 60535712 60535709 +
gcaaggtctggtttacttct

SEQ ID NO: 168045 - DNA, 20 bp, Artificial Sequence
  Synthetic oligonucleotide; AGG chr2 60535694 60535713 60535710 +
caaggtctggtttacttctg

SEQ ID NO: 168046 - DNA, 20 bp, Artificial Sequence
  Synthetic oligonucleotide; GAG chr2 60535696 60535715 60535712 +
aggtctggtttacttctgag

SEQ ID NO: 168047 - DNA, 20 bp, Artificial Sequence
  Synthetic oligonucleotide; GAG chr2 60535716 60535735 60535732 +
gagtgcaaatcctgttgctt

SEQ ID NO: 168048 - DNA, 20 bp, Artificial Sequence
  Synthetic oligonucleotide; CGG chr2 60535744 60535763 60535760 +
cctttctgatttcctccatt

SEQ ID NO: 168049 - DNA, 20 bp, Artificial Sequence
  Synthetic oligonucleotide; CAG chr2 60535750 60535769 60535766 +
tgatttcctccattcggcac

SEQ ID NO: 168050 - DNA, 20 bp, Artificial Sequence
  Synthetic oligonucleotide; TGG chr2 60535767 60535786 60535783 +
caccagccgcatttaatcca

SEQ ID NO: 168051 - DNA, 20 bp, Artificial Sequence
  Synthetic oligonucleotide; CGG chr2 60535774 60535793 60535790 +
cgcatttaatccatggtgaa

SEQ ID NO: 168052 - DNA, 20 bp, Artificial Sequence
  Synthetic oligonucleotide; GGG chr2 60535775 60535794 60535791 +
gcatttaatccatggtgaac

SEQ ID NO: 168053 - DNA, 20 bp, Artificial Sequence
  Synthetic oligonucleotide; CAG chr2 60535783 60535802 60535799 +
tccatggtgaacgggtcatg

SEQ ID NO: 168054 - DNA, 20 bp, Artificial Sequence
  Synthetic oligonucleotide; CAG chr2 60535790 60535809 60535806 +
tgaacgggtcatgcagacat

SEQ ID NO: 168055 - DNA, 20 bp, Artificial Sequence
  Synthetic oligonucleotide; CAG chr2 60535801 60535820 60535817 +
tgcagacatcagctgacatt

SEQ ID NO: 168056 - DNA, 20 bp, Artificial Sequence
  Synthetic oligonucleotide; AAG chr2 60535805 60535824 60535821 +
gacatcagctgacattcaga

SEQ ID NO: 168057 - DNA, 20 bp, Artificial Sequence
  Synthetic oligonucleotide; TGG chr2 60535811 60535830 60535827 +
agctgacattcagaaagttg

SEQ ID NO: 168058 - DNA, 20 bp, Artificial Sequence
  Synthetic oligonucleotide; CAG chr2 60535841 60535860 60535857 +
ccaccaccaccatcccaccc

SEQ ID NO: 168059 - DNA, 20 bp, Artificial Sequence
  Synthetic oligonucleotide; TAG chr2 60535848 60535867 60535864 +
caccatcccaccccagttat

SEQ ID NO: 168060 - DNA, 20 bp, Artificial Sequence
  Synthetic oligonucleotide; GAG chr2 60535850 60535869 60535866 +
ccatcccaccccagttatta

SEQ ID NO: 168061 - DNA, 20 bp, Artificial Sequence
  Synthetic oligonucleotide; GAG chr2 60535852 60535871 60535868 +
atcccaccccagttattaga

SEQ ID NO: 168062 - DNA, 20 bp, Artificial Sequence
  Synthetic oligonucleotide; TGG chr2 60535860 60535879 60535876 +
ccagttattagagagtatcg

SEQ ID NO: 168063 - DNA, 20 bp, Artificial Sequence
  Synthetic oligonucleotide; GGG chr2 60535861 60535880 60535877 +
cagttattagagagtatcgt

SEQ ID NO: 168064 - DNA, 20 bp, Artificial Sequence
  Synthetic oligonucleotide; TGG chr2 60535868 60535887 60535884 +
tagagagtatcgtgggaacc

SEQ ID NO: 168065 - DNA, 20 bp, Artificial Sequence
  Synthetic oligonucleotide; CAG chr2 60535876 60535895 60535892 +
atcgtgggaacctggatttg

SEQ ID NO: 168066 - DNA, 20 bp, Artificial Sequence
  Synthetic oligonucleotide; AGG chr2 60535877 60535896 60535893 +
tcgtgggaacctggatttgc

SEQ ID NO: 168067 - DNA, 20 bp, Artificial Sequence
  Synthetic oligonucleotide; TAG chr2 60535892 60535911 60535908 +
tttgcaggctttccaattac

SEQ ID NO: 168068 - DNA, 20 bp, Artificial Sequence
  Synthetic oligonucleotide; TGG chr2 60535897 60535916 60535913 +
aggctttccaattactagtc

SEQ ID NO: 168069 - DNA, 20 bp, Artificial Sequence
  Synthetic oligonucleotide; GAG chr2 60535899 60535918 60535915 +
gctttccaattactagtctg

SEQ ID NO: 168070 - DNA, 20 bp, Artificial Sequence
  Synthetic oligonucleotide; AAG chr2 60535902 60535921 60535918 +
ttccaattactagtctggag

SEQ ID NO: 168071 - DNA, 20 bp, Artificial Sequence
  Synthetic oligonucleotide; TAG chr2 60535963 60535982 60535979 +
tcctgacatttaaaaaattc

SEQ ID NO: 168072 - DNA, 20 bp, Artificial Sequence
  Synthetic oligonucleotide; CAG chr2 60535969 60535988 60535985 +
catttaaaaaattctagtga

SEQ ID NO: 168073 - DNA, 20 bp, Artificial Sequence
  Synthetic oligonucleotide; CAG chr2 60536021 60536040 60536037 +
caaccccaacctctccaacc

SEQ ID NO: 168074 - DNA, 20 bp, Artificial Sequence
  Synthetic oligonucleotide; AGG chr2 60536022 60536041 60536038 +
aaccccaacctctccaaccc

SEQ ID NO: 168075 - DNA, 20 bp, Artificial Sequence
  Synthetic oligonucleotide; AAG chr2 60536028 60536047 60536044 +
aacctctccaacccaggtga

SEQ ID NO: 168076 - DNA, 20 bp, Artificial Sequence
  Synthetic oligonucleotide; AAG chr2 60536032 60536051 60536048 +
tctccaacccaggtgaaagc

SEQ ID NO: 168077 - DNA, 20 bp, Artificial Sequence
  Synthetic oligonucleotide; AAG chr2 60536036 60536055 60536052 +
caacccaggtgaaagcaaga

SEQ ID NO: 168078 - DNA, 20 bp, Artificial Sequence
  Synthetic oligonucleotide; AAG chr2 60536047 60536066 60536063 +
aaagcaagaaagtatatgtt

SEQ ID NO: 168079 - DNA, 20 bp, Artificial Sequence
  Synthetic oligonucleotide; CAG chr2 60536058 60536077 60536074 +
gtatatgttaagtcctatct

SEQ ID NO: 168080 - DNA, 20 bp, Artificial Sequence
  Synthetic oligonucleotide; TGG chr2 60536062 60536081 60536078 +
atgttaagtcctatctcagc

SEQ ID NO: 168081 - DNA, 20 bp, Artificial Sequence
  Synthetic oligonucleotide; AAG chr2 60536070 60536089 60536086 +
tcctatctcagctggtgtgc

SEQ ID NO: 168082 - DNA, 20 bp, Artificial Sequence
  Synthetic oligonucleotide; CAG chr2 60536074 60536093 60536090 +
atctcagctggtgtgcaagt

SEQ ID NO: 168083 - DNA, 20 bp, Artificial Sequence
  Synthetic oligonucleotide; GAG chr2 60536080 60536099 60536096 +
gctggtgtgcaagtcagact

SEQ ID NO: 168084 - DNA, 20 bp, Artificial Sequence
  Synthetic oligonucleotide; CAG chr2 60536088 60536107 60536104 +
gcaagtcagactgagaataa

SEQ ID NO: 168085 - DNA, 20 bp, Artificial Sequence
  Synthetic oligonucleotide; AAG chr2 60536097 60536116 60536113 +
actgagaataacagcttcga

SEQ ID NO: 168086 - DNA, 20 bp, Artificial Sequence
  Synthetic oligonucleotide; AGG chr2 60536098 60536117 60536114 +
ctgagaataacagcttcgaa

SEQ ID NO: 168087 - DNA, 20 bp, Artificial Sequence
  Synthetic oligonucleotide; CAG chr2 60536111 60536130 60536127 +
cttcgaaaggccacgtgtcc

SEQ ID NO: 168088 - DNA, 20 bp, Artificial Sequence
  Synthetic oligonucleotide; TAG chr2 60536130 60536149 60536146 +
ccagcttaccgctccactgc

SEQ ID NO: 168089 - DNA, 20 bp, Artificial Sequence
  Synthetic oligonucleotide; AAG chr2 60536139 60536158 60536155 +
cgctccactgctagacccaa

SEQ ID NO: 168090 - DNA, 20 bp, Artificial Sequence
  Synthetic oligonucleotide; TGG chr2 60536152 60536171 60536168 +
gacccaaaagctctctgctg

SEQ ID NO: 168091 - DNA, 20 bp, Artificial Sequence
  Synthetic oligonucleotide; GGG chr2 60536153 60536172 60536169 +
acccaaaagctctctgctgt

SEQ ID NO: 168092 - DNA, 20 bp, Artificial Sequence
  Synthetic oligonucleotide; GGG chr2 60536154 60536173 60536170 +
cccaaaagctctctgctgtg

SEQ ID NO: 168093 - DNA, 20 bp, Artificial Sequence
  Synthetic oligonucleotide; AAG chr2 60536178 60536197 60536194 +
tttcatttgaactgctatcg

SEQ ID NO: 168094 - DNA, 20 bp, Artificial Sequence
  Synthetic oligonucleotide; AAG chr2 60536189 60536208 60536205 +
ctgctatcgaagaatattcc

SEQ ID NO: 168095 - DNA, 20 bp, Artificial Sequence
  Synthetic oligonucleotide; CAG chr2 60536227 60536246 60536243 +
ccttctccccctctctcccc

SEQ ID NO: 168096 - DNA, 20 bp, Artificial Sequence
  Synthetic oligonucleotide; CAG chr2 60536233 60536252 60536249 +
ccccctctctcccccagcct

SEQ ID NO: 168097 - DNA, 20 bp, Artificial Sequence
  Synthetic oligonucleotide; TAG chr2 60536245 60536264 60536261 +
cccagcctcagactttctcc

SEQ ID NO: 168098 - DNA, 20 bp, Artificial Sequence
  Synthetic oligonucleotide; GAG chr2 60536247 60536266 60536263 +
cagcctcagactttctccta

SEQ ID NO: 168099 - DNA, 20 bp, Artificial Sequence
  Synthetic oligonucleotide; CGG chr2 60536260 60536279 60536276 +
tctcctagagttgatcttac

SEQ ID NO: 168100 - DNA, 20 bp, Artificial Sequence
  Synthetic oligonucleotide; TGG chr2 60536268 60536287 60536284 +
agttgatcttaccggaaatg

SEQ ID NO: 168101 - DNA, 20 bp, Artificial Sequence
  Synthetic oligonucleotide; AAG chr2 60536279 60536298 60536295 +
ccggaaatgtggatgttatc

SEQ ID NO: 168102 - DNA, 20 bp, Artificial Sequence
  Synthetic oligonucleotide; AGG chr2 60536280 60536299 60536296 +
cggaaatgtggatgttatca

SEQ ID NO: 168103 - DNA, 20 bp, Artificial Sequence
  Synthetic oligonucleotide; CGG chr2 60536287 60536306 60536303 +
gtggatgttatcaaggaaat

SEQ ID NO: 168104 - DNA, 20 bp, Artificial Sequence
  Synthetic oligonucleotide; AAG chr2 60536291 60536310 60536307 +
atgttatcaaggaaatcgga

SEQ ID NO: 168105 - DNA, 20 bp, Artificial Sequence
  Synthetic oligonucleotide; GAG chr2 60536293 60536312 60536309 +
gttatcaaggaaatcggaaa

SEQ ID NO: 168106 - DNA, 20 bp, Artificial Sequence
  Synthetic oligonucleotide; AAG chr2 60536296 60536315 60536312 +
atcaaggaaatcggaaagag

SEQ ID NO: 168107 - DNA, 20 bp, Artificial Sequence
  Synthetic oligonucleotide; AGG chr2 60536297 60536316 60536313 +
tcaaggaaatcggaaagaga

SEQ ID NO: 168108 - DNA, 20 bp, Artificial Sequence
  Synthetic oligonucleotide; GGG chr2 60536298 60536317 60536314 +
caaggaaatcggaaagagaa

SEQ ID NO: 168109 - DNA, 20 bp, Artificial Sequence
  Synthetic oligonucleotide; GAG chr2 60536300 60536319 60536316 +
aggaaatcggaaagagaagg

SEQ ID NO: 168110 - DNA, 20 bp, Artificial Sequence
  Synthetic oligonucleotide; CAG chr2 60536311 60536330 60536327 +
aagagaagggagaaaaatct

SEQ ID NO: 168111 - DNA, 20 bp, Artificial Sequence
  Synthetic oligonucleotide; AGG chr2 60536312 60536331 60536328 +
agagaagggagaaaaatctc

SEQ ID NO: 168112 - DNA, 20 bp, Artificial Sequence
  Synthetic oligonucleotide; TGG chr2 60536348 60536367 60536364 +
tttcttaactctcttatcct

SEQ ID NO: 168113 - DNA, 20 bp, Artificial Sequence
  Synthetic oligonucleotide; GGG chr2 60536349 60536368 60536365 +
ttcttaactctcttatcctt

SEQ ID NO: 168114 - DNA, 20 bp, Artificial Sequence
  Synthetic oligonucleotide; CAG chr2 60536359 60536378 60536375 +
tcttatccttgggccctgct

SEQ ID NO: 168115 - DNA, 20 bp, Artificial Sequence
  Synthetic oligonucleotide; TAG chr2 60536387 60536406 60536403 +
tgccacattttaacatttat

SEQ ID NO: 168116 - DNA, 20 bp, Artificial Sequence
  Synthetic oligonucleotide; AAG chr2 60536391 60536410 60536407 +
acattttaacatttattaga

SEQ ID NO: 168117 - DNA, 20 bp, Artificial Sequence
  Synthetic oligonucleotide; AGG chr2 60536392 60536411 60536408 +
cattttaacatttattagaa

SEQ ID NO: 168118 - DNA, 20 bp, Artificial Sequence
  Synthetic oligonucleotide; TAG chr2 60536396 60536415 60536412 +
ttaacatttattagaaagga

SEQ ID NO: 168119 - DNA, 20 bp, Artificial Sequence
  Synthetic oligonucleotide; AGG chr2 60536397 60536416 60536413 +
taacatttattagaaaggat

SEQ ID NO: 168120 - DNA, 20 bp, Artificial Sequence
  Synthetic oligonucleotide; CAG chr2 60536403 60536422 60536419 +
ttattagaaaggataggatg

SEQ ID NO: 168121 - DNA, 20 bp, Artificial Sequence
  Synthetic oligonucleotide; GAG chr2 60536405 60536424 60536421 +
attagaaaggataggatgca

SEQ ID NO: 168122 - DNA, 20 bp, Artificial Sequence
  Synthetic oligonucleotide; TGG chr2 60536413 60536432 60536429 +
ggataggatgcagagctgca

SEQ ID NO: 168123 - DNA, 20 bp, Artificial Sequence
  Synthetic oligonucleotide; GAG chr2 60536441 60536460 60536457 +
acatccacaaccatctgtat

SEQ ID NO: 168124 - DNA, 20 bp, Artificial Sequence
  Synthetic oligonucleotide; CAG chr2 60536447 60536466 60536463 +
acaaccatctgtatgagcca

SEQ ID NO: 168125 - DNA, 20 bp, Artificial Sequence
  Synthetic oligonucleotide; AGG chr2 60536448 60536467 60536464 +
caaccatctgtatgagccac

SEQ ID NO: 168126 - DNA, 20 bp, Artificial Sequence
  Synthetic oligonucleotide; CAG chr2 60536455 60536474 60536471 +
ctgtatgagccacaggtcca

SEQ ID NO: 168127 - DNA, 20 bp, Artificial Sequence
  Synthetic oligonucleotide; GAG chr2 60536497 60536516 60536513 +
acactaatgttactctacat

SEQ ID NO: 168128 - DNA, 20 bp, Artificial Sequence
  Synthetic oligonucleotide; TAG chr2 60536500 60536519 60536516 +
ctaatgttactctacatgag

SEQ ID NO: 168129 - DNA, 20 bp, Artificial Sequence
  Synthetic oligonucleotide; GAG chr2 60536502 60536521 60536518 +
aatgttactctacatgagta

SEQ ID NO: 168130 - DNA, 20 bp, Artificial Sequence
  Synthetic oligonucleotide; GAG chr2 60536511 60536530 60536527 +
ctacatgagtagagttcaat

SEQ ID NO: 168131 - DNA, 20 bp, Artificial Sequence
  Synthetic oligonucleotide; AGG chr2 60536512 60536531 60536528 +
tacatgagtagagttcaatg

SEQ ID NO: 168132 - DNA, 20 bp, Artificial Sequence
  Synthetic oligonucleotide; GGG chr2 60536513 60536532 60536529 +
acatgagtagagttcaatga

SEQ ID NO: 168133 - DNA, 20 bp, Artificial Sequence
  Synthetic oligonucleotide; TGG chr2 60536522 60536541 60536538 +
gagttcaatgagggttgata

SEQ ID NO: 168134 - DNA, 20 bp, Artificial Sequence
  Synthetic oligonucleotide; GGG chr2 60536523 60536542 60536539 +
agttcaatgagggttgatat

SEQ ID NO: 168135 - DNA, 20 bp, Artificial Sequence
  Synthetic oligonucleotide; CAG chr2 60536532 60536551 60536548 +
agggttgatatgggatgtga

SEQ ID NO: 168136 - DNA, 20 bp, Artificial Sequence
  Synthetic oligonucleotide; AGG chr2 60536533 60536552 60536549 +
gggttgatatgggatgtgac

SEQ ID NO: 168137 - DNA, 20 bp, Artificial Sequence
  Synthetic oligonucleotide; GGG chr2 60536534 60536553 60536550 +
ggttgatatgggatgtgaca

SEQ ID NO: 168138 - DNA, 20 bp, Artificial Sequence
  Synthetic oligonucleotide; CAG chr2 60536542 60536561 60536558 +
tgggatgtgacagggcaaat

SEQ ID NO: 168139 - DNA, 20 bp, Artificial Sequence
  Synthetic oligonucleotide; TAG chr2 60536548 60536567 60536564 +
gtgacagggcaaatcagaat

SEQ ID NO: 168140 - DNA, 20 bp, Artificial Sequence
  Synthetic oligonucleotide; AAG chr2 60536562 60536581 60536578 +
cagaattagattaaaaacaa

SEQ ID NO: 168141 - DNA, 20 bp, Artificial Sequence
  Synthetic oligonucleotide; TAG chr2 60536567 60536586 60536583 +
ttagattaaaaacaaaagtt

SEQ ID NO: 168142 - DNA, 20 bp, Artificial Sequence
  Synthetic oligonucleotide; CAG chr2 60536587 60536606 60536603 +
tagaaaccaatgctacacta

SEQ ID NO: 168143 - DNA, 20 bp, Artificial Sequence
  Synthetic oligonucleotide; GAG chr2 60536589 60536608 60536605 +
gaaaccaatgctacactaca

SEQ ID NO: 168144 - DNA, 20 bp, Artificial Sequence
  Synthetic oligonucleotide; TGG chr2 60536596 60536615 60536612 +
atgctacactacagagcaaa

SEQ ID NO: 168145 - DNA, 20 bp, Artificial Sequence
  Synthetic oligonucleotide; GGG chr2 60536597 60536616 60536613 +
tgctacactacagagcaaat

SEQ ID NO: 168146 - DNA, 20 bp, Artificial Sequence
  Synthetic oligonucleotide; AAG chr2 60536605 60536624 60536621 +
tacagagcaaatgggacttg

SEQ ID NO: 168147 - DNA, 20 bp, Artificial Sequence
  Synthetic oligonucleotide; AGG chr2 60536606 60536625 60536622 +
acagagcaaatgggacttga

SEQ ID NO: 168148 - DNA, 20 bp, Artificial Sequence
  Synthetic oligonucleotide; AAG chr2 60536632 60536651 60536648 +
aatttcccctaactgccttc

SEQ ID NO: 168149 - DNA, 20 bp, Artificial Sequence
  Synthetic oligonucleotide; TAG chr2 60536648 60536667 60536664 +
cttcaagtgattttccctat

SEQ ID NO: 168150 - DNA, 20 bp, Artificial Sequence
  Synthetic oligonucleotide; GAG chr2 60536650 60536669 60536666 +
tcaagtgattttccctatta

SEQ ID NO: 168151 - DNA, 20 bp, Artificial Sequence
  Synthetic oligonucleotide; TGG chr2 60536675 60536694 60536691 +
tttgcctgccacccccctgc

SEQ ID NO: 168152 - DNA, 20 bp, Artificial Sequence
  Synthetic oligonucleotide; CAG chr2 60536695 60536714 60536711 +
tggcaacaccgcaatcacat

SEQ ID NO: 168153 - DNA, 20 bp, Artificial Sequence
  Synthetic oligonucleotide; AAG chr2 60536699 60536718 60536715 +
aacaccgcaatcacatcaga

SEQ ID NO: 168154 - DNA, 20 bp, Artificial Sequence
  Synthetic oligonucleotide; AAG chr2 60536704 60536723 60536720 +
cgcaatcacatcagaaagta

SEQ ID NO: 168155 - DNA, 20 bp, Artificial Sequence
  Synthetic oligonucleotide; TGG chr2 60536707 60536726 60536723 +
aatcacatcagaaagtaaag

SEQ ID NO: 168156 - DNA, 20 bp, Artificial Sequence
  Synthetic oligonucleotide; TAG chr2 60536718 60536737 60536734 +
aaagtaaagtggaatgcata

SEQ ID NO: 168157 - DNA, 20 bp, Artificial Sequence
  Synthetic oligonucleotide; AGG chr2 60536719 60536738 60536735 +
aagtaaagtggaatgcatat

SEQ ID NO: 168158 - DNA, 20 bp, Artificial Sequence
  Synthetic oligonucleotide; AAG chr2 60536722 60536741 60536738 +
taaagtggaatgcatatagg

SEQ ID NO: 168159 - DNA, 20 bp, Artificial Sequence
  Synthetic oligonucleotide; GAG chr2 60536729 60536748 60536745 +
gaatgcatataggaagcctt

SEQ ID NO: 168160 - DNA, 20 bp, Artificial Sequence
  Synthetic oligonucleotide; TAG chr2 60536771 60536790 60536787 +
atacctatatacttaatata

SEQ ID NO: 168161 - DNA, 20 bp, Artificial Sequence
  Synthetic oligonucleotide; TGG chr2 60536785 60536804 60536801 +
aatatatagcaattaacttc

SEQ ID NO: 168162 - DNA, 20 bp, Artificial Sequence
  Synthetic oligonucleotide; CAG chr2 60536789 60536808 60536805 +
tatagcaattaacttctggt

SEQ ID NO: 168163 - DNA, 20 bp, Artificial Sequence
  Synthetic oligonucleotide; CAG chr2 60536792 60536811 60536808 +
agcaattaacttctggtcag

SEQ ID NO: 168164 - DNA, 20 bp, Artificial Sequence
  Synthetic oligonucleotide; CAG chr2 60536799 60536818 60536815 +
aacttctggtcagcagtgtg

SEQ ID NO: 168165 - DNA, 20 bp, Artificial Sequence
  Synthetic oligonucleotide; AGG chr2 60536800 60536819 60536816 +
acttctggtcagcagtgtgc

SEQ ID NO: 168166 - DNA, 20 bp, Artificial Sequence
  Synthetic oligonucleotide; CAG chr2 60536803 60536822 60536819 +
tctggtcagcagtgtgcagg

SEQ ID NO: 168167 - DNA, 20 bp, Artificial Sequence
  Synthetic oligonucleotide; CAG chr2 60536806 60536825 60536822 +
ggtcagcagtgtgcaggcag

SEQ ID NO: 168168 - DNA, 20 bp, Artificial Sequence
  Synthetic oligonucleotide; AGG chr2 60536807 60536826 60536823 +
gtcagcagtgtgcaggcagc

SEQ ID NO: 168169 - DNA, 20 bp, Artificial Sequence
  Synthetic oligonucleotide; AAG chr2 60536817 60536836 60536833 +
tgcaggcagcaggctgcccc

SEQ ID NO: 168170 - DNA, 20 bp, Artificial Sequence
  Synthetic oligonucleotide; CAG chr2 60536820 60536839 60536836 +
aggcagcaggctgccccaag

SEQ ID NO: 168171 - DNA, 20 bp, Artificial Sequence
  Synthetic oligonucleotide; TAG chr2 60536824 60536843 60536840 +
agcaggctgccccaagcaga

SEQ ID NO: 168172 - DNA, 20 bp, Artificial Sequence
  Synthetic oligonucleotide; AGG chr2 60536825 60536844 60536841 +
gcaggctgccccaagcagat

SEQ ID NO: 168173 - DNA, 20 bp, Artificial Sequence
  Synthetic oligonucleotide; GAG chr2 60536827 60536846 60536843 +
aggctgccccaagcagatag

SEQ ID NO: 168174 - DNA, 20 bp, Artificial Sequence
  Synthetic oligonucleotide; AGG chr2 60536828 60536847 60536844 +
ggctgccccaagcagatagg

SEQ ID NO: 168175 - DNA, 20 bp, Artificial Sequence
  Synthetic oligonucleotide; GGG chr2 60536829 60536848 60536845 +
gctgccccaagcagatagga

SEQ ID NO: 168176 - DNA, 20 bp, Artificial Sequence
  Synthetic oligonucleotide; GGG chr2 60536830 60536849 60536846 +
ctgccccaagcagataggag

SEQ ID NO: 168177 - DNA, 20 bp, Artificial Sequence
  Synthetic oligonucleotide; GAG chr2 60536832 60536851 60536848 +
gccccaagcagataggaggg

SEQ ID NO: 168178 - DNA, 20 bp, Artificial Sequence
  Synthetic oligonucleotide; AGG chr2 60536833 60536852 60536849 +
ccccaagcagataggagggg

SEQ ID NO: 168179 - DNA, 20 bp, Artificial Sequence
  Synthetic oligonucleotide; GGG chr2 60536834 60536853 60536850 +
cccaagcagataggagggga

SEQ ID NO: 168180 - DNA, 20 bp, Artificial Sequence
  Synthetic oligonucleotide; GGG chr2 60536835 60536854 60536851 +
ccaagcagataggaggggag

SEQ ID NO: 168181 - DNA, 20 bp, Artificial Sequence
  Synthetic oligonucleotide; GGG chr2 60536836 60536855 60536852 +
caagcagataggaggggagg

SEQ ID NO: 168182 - DNA, 20 bp, Artificial Sequence
  Synthetic oligonucleotide; CAG chr2 60536842 60536861 60536858 +
gataggaggggagggggacc

SEQ ID NO: 168183 - DNA, 20 bp, Artificial Sequence
  Synthetic oligonucleotide; GAG chr2 60536844 60536863 60536860 +
taggaggggagggggaccca

SEQ ID NO: 168184 - DNA, 20 bp, Artificial Sequence
  Synthetic oligonucleotide; TGG chr2 60536848 60536867 60536864 +
aggggagggggacccagagc

SEQ ID NO: 168185 - DNA, 20 bp, Artificial Sequence
  Synthetic oligonucleotide; GGG chr2 60536849 60536868 60536865 +
ggggagggggacccagagct

SEQ ID NO: 168186 - DNA, 20 bp, Artificial Sequence
  Synthetic oligonucleotide; AAG chr2 60536854 60536873 60536870 +
gggggacccagagctgggac

SEQ ID NO: 168187 - DNA, 20 bp, Artificial Sequence
  Synthetic oligonucleotide; AAG chr2 60536862 60536881 60536878 +
cagagctgggacaagcacaa

SEQ ID NO: 168188 - DNA, 20 bp, Artificial Sequence
  Synthetic oligonucleotide; CAG chr2 60536866 60536885 60536882 +
gctgggacaagcacaaaaga

SEQ ID NO: 168189 - DNA, 20 bp, Artificial Sequence
  Synthetic oligonucleotide; AGG chr2 60536867 60536886 60536883 +
ctgggacaagcacaaaagac

SEQ ID NO: 168190 - DNA, 20 bp, Artificial Sequence
  Synthetic oligonucleotide; CAG chr2 60536891 60536910 60536907 +
ccaacaacaatgcctgctgt

SEQ ID NO: 168191 - DNA, 20 bp, Artificial Sequence
  Synthetic oligonucleotide; CAG chr2 60536894 60536913 60536910 +
acaacaatgcctgctgtcag

SEQ ID NO: 168192 - DNA, 20 bp, Artificial Sequence
  Synthetic oligonucleotide; CAG chr2 60536913 60536932 60536929 +
gcagctgaattatttttata

SEQ ID NO: 168193 - DNA, 20 bp, Artificial Sequence
  Synthetic oligonucleotide; AGG chr2 60536914 60536933 60536930 +
cagctgaattatttttatac

SEQ ID NO: 168194 - DNA, 20 bp, Artificial Sequence
  Synthetic oligonucleotide; AAG chr2 60536941 60536960 60536957 +
tttatctctattgtacaaac

SEQ ID NO: 168195 - DNA, 20 bp, Artificial Sequence
  Synthetic oligonucleotide; AAG chr2 60536966 60536985 60536982 +
cgtgtctgtgctgacttgtt

SEQ ID NO: 168196 - DNA, 20 bp, Artificial Sequence
  Synthetic oligonucleotide; TAG chr2 60536984 60537003 60537000 +
ttaagcaatccacttgtatg

SEQ ID NO: 168197 - DNA, 20 bp, Artificial Sequence
  Synthetic oligonucleotide; AAG chr2 60536990 60537009 60537006 +
aatccacttgtatgtagaat

SEQ ID NO: 168198 - DNA, 20 bp, Artificial Sequence
  Synthetic oligonucleotide; CAG chr2 60537014 60537033 60537030 +
ttttttttctttcttgctac

SEQ ID NO: 168199 - DNA, 20 bp, Artificial Sequence
  Synthetic oligonucleotide; CAG chr2 60537022 60537041 60537038 +
ctttcttgctaccagtcaca

SEQ ID NO: 168200 - DNA, 20 bp, Artificial Sequence
  Synthetic oligonucleotide; AAG chr2 60537029 60537048 60537045 +
gctaccagtcacacagctcc

SEQ ID NO: 168201 - DNA, 20 bp, Artificial Sequence
  Synthetic oligonucleotide; CAG chr2 60537034 60537053 60537050 +
cagtcacacagctccaagat

SEQ ID NO: 168202 - DNA, 20 bp, Artificial Sequence
  Synthetic oligonucleotide; AAG chr2 60537037 60537056 60537053 +
tcacacagctccaagatcag

SEQ ID NO: 168203 - DNA, 20 bp, Artificial Sequence
  Synthetic oligonucleotide; TAG chr2 60537047 60537066 60537063 +
ccaagatcagaagaaataca

SEQ ID NO: 168204 - DNA, 20 bp, Artificial Sequence
  Synthetic oligonucleotide; AAG chr2 60537056 60537075 60537072 +
gaagaaatacatagtctttg

SEQ ID NO: 168205 - DNA, 20 bp, Artificial Sequence
  Synthetic oligonucleotide; TAG chr2 60537073 60537092 60537089 +
ttgaagctgctcaaatgttt

SEQ ID NO: 168206 - DNA, 20 bp, Artificial Sequence
  Synthetic oligonucleotide; AAG chr2 60537080 60537099 60537096 +
tgctcaaatgttttagttaa

SEQ ID NO: 168207 - DNA, 20 bp, Artificial Sequence
  Synthetic oligonucleotide; AGG chr2 60537081 60537100 60537097 +
gctcaaatgttttagttaaa

SEQ ID NO: 168208 - DNA, 20 bp, Artificial Sequence
  Synthetic oligonucleotide; CAG chr2 60537085 60537104 60537101 +
aaatgttttagttaaaagga

SEQ ID NO: 168209 - DNA, 20 bp, Artificial Sequence
  Synthetic oligonucleotide; CAG chr2 60537088 60537107 60537104 +
tgttttagttaaaaggacag

SEQ ID NO: 168210 - DNA, 20 bp, Artificial Sequence
  Synthetic oligonucleotide; AAG chr2 60537100 60537119 60537116 +
aaggacagcagttgttttca

SEQ ID NO: 168211 - DNA, 20 bp, Artificial Sequence
  Synthetic oligonucleotide; AAG chr2 60537107 60537126 60537123 +
gcagttgttttcaaagatcc

SEQ ID NO: 168212 - DNA, 20 bp, Artificial Sequence
  Synthetic oligonucleotide; GAG chr2 60537109 60537128 60537125 +
agttgttttcaaagatccaa

SEQ ID NO: 168213 - DNA, 20 bp, Artificial Sequence
  Synthetic oligonucleotide; CAG chr2 60537121 60537140 60537137 +
agatccaagagtatctttat

SEQ ID NO: 168214 - DNA, 20 bp, Artificial Sequence
  Synthetic oligonucleotide; GAG chr2 60537179 60537198 60537195 +
acataacaaaaacataacat

SEQ ID NO: 168215 - DNA, 20 bp, Artificial Sequence
  Synthetic oligonucleotide; AAG chr2 60537182 60537201 60537198 +
taacaaaaacataacatgag

SEQ ID NO: 168216 - DNA, 20 bp, Artificial Sequence
  Synthetic oligonucleotide; AGG chr2 60537183 60537202 60537199 +
aacaaaaacataacatgaga

SEQ ID NO: 168217 - DNA, 20 bp, Artificial Sequence
  Synthetic oligonucleotide; CAG chr2 60537212 60537231 60537228 +
tttattattaaaattttttt

SEQ ID NO: 168218 - DNA, 20 bp, Artificial Sequence
  Synthetic oligonucleotide; CAG chr2 60537231 60537250 60537247 +
tcagcctttaaatcattctt

SEQ ID NO: 168219 - DNA, 20 bp, Artificial Sequence
  Synthetic oligonucleotide; TAG chr2 60537234 60537253 60537250 +
gcctttaaatcattcttcag

SEQ ID NO: 168220 - DNA, 20 bp, Artificial Sequence
  Synthetic oligonucleotide; CAG chr2 60537245 60537264 60537261 +
attcttcagtagccaatgtt

SEQ ID NO: 168221 - DNA, 20 bp, Artificial Sequence
  Synthetic oligonucleotide; AAG chr2 60537259 60537278 60537275 +
aatgttcagttttaaatgta

SEQ ID NO: 168222 - DNA, 20 bp, Artificial Sequence
  Synthetic oligonucleotide; AGG chr2 60537260 60537279 60537276 +
atgttcagttttaaatgtaa

SEQ ID NO: 168223 - DNA, 20 bp, Artificial Sequence
  Synthetic oligonucleotide; TAG chr2 60537282 60537301 60537298 +
gaataatttttttaaaatat

SEQ ID NO: 168224 - DNA, 20 bp, Artificial Sequence
  Synthetic oligonucleotide; AGG chr2 60537283 60537302 60537299 +
aataatttttttaaaatatt

SEQ ID NO: 168225 - DNA, 20 bp, Artificial Sequence
  Synthetic oligonucleotide; GGG chr2 60537284 60537303 60537300 +
ataatttttttaaaatatta

SEQ ID NO: 168226 - DNA, 20 bp, Artificial Sequence
  Synthetic oligonucleotide; TGG chr2 60537292 60537311 60537308 +
tttaaaatattagggtgtga

SEQ ID NO: 168227 - DNA, 20 bp, Artificial Sequence
  Synthetic oligonucleotide; GAG chr2 60537294 60537313 60537310 +
taaaatattagggtgtgatg

SEQ ID NO: 168228 - DNA, 20 bp, Artificial Sequence
  Synthetic oligonucleotide; GAG chr2 60537296 60537315 60537312 +
aaatattagggtgtgatgga

SEQ ID NO: 168229 - DNA, 20 bp, Artificial Sequence
  Synthetic oligonucleotide; GAG chr2 60537307 60537326 60537323 +
tgtgatggagagaaactcac

SEQ ID NO: 168230 - DNA, 20 bp, Artificial Sequence
  Synthetic oligonucleotide; AAG chr2 60537314 60537333 60537330 +
gagagaaactcacgagattt

SEQ ID NO: 168231 - DNA, 20 bp, Artificial Sequence
  Synthetic oligonucleotide; TGG chr2 60537326 60537345 60537342 +
cgagatttaagatttaacat

SEQ ID NO: 168232 - DNA, 20 bp, Artificial Sequence
  Synthetic oligonucleotide; TGG chr2 60537347 60537366 60537363 +
ggttaatgcattgttttaac

SEQ ID NO: 168233 - DNA, 20 bp, Artificial Sequence
  Synthetic oligonucleotide; AAG chr2 60537357 60537376 60537373 +
ttgttttaactggaaactga

SEQ ID NO: 168234 - DNA, 20 bp, Artificial Sequence
  Synthetic oligonucleotide; AGG chr2 60537358 60537377 60537374 +
tgttttaactggaaactgaa

SEQ ID NO: 168235 - DNA, 20 bp, Artificial Sequence
  Synthetic oligonucleotide; CGG chr2 60537363 60537382 60537379 +
taactggaaactgaaaggat

SEQ ID NO: 168236 - DNA, 20 bp, Artificial Sequence
  Synthetic oligonucleotide; GGG chr2 60537364 60537383 60537380 +
aactggaaactgaaaggatc

SEQ ID NO: 168237 - DNA, 20 bp, Artificial Sequence
  Synthetic oligonucleotide; GGG chr2 60537365 60537384 60537381 +
actggaaactgaaaggatcg

SEQ ID NO: 168238 - DNA, 20 bp, Artificial Sequence
  Synthetic oligonucleotide; CAG chr2 60537368 60537387 60537384 +
ggaaactgaaaggatcgggg

SEQ ID NO: 168239 - DNA, 20 bp, Artificial Sequence
  Synthetic oligonucleotide; AGG chr2 60537369 60537388 60537385 +
gaaactgaaaggatcggggc

SEQ ID NO: 168240 - DNA, 20 bp, Artificial Sequence
  Synthetic oligonucleotide; GGG chr2 60537370 60537389 60537386 +
aaactgaaaggatcggggca

SEQ ID NO: 168241 - DNA, 20 bp, Artificial Sequence
  Synthetic oligonucleotide; GGG chr2 60537371 60537390 60537387 +
aactgaaaggatcggggcag

SEQ ID NO: 168242 - DNA, 20 bp, Artificial Sequence
  Synthetic oligonucleotide; GAG chr2 60537373 60537392 60537389 +
ctgaaaggatcggggcaggg

SEQ ID NO: 168243 - DNA, 20 bp, Artificial Sequence
  Synthetic oligonucleotide; TGG chr2 60537382 60537401 60537398 +
tcggggcaggggagttaaaa

SEQ ID NO: 168244 - DNA, 20 bp, Artificial Sequence
  Synthetic oligonucleotide; GGG chr2 60537383 60537402 60537399 +
cggggcaggggagttaaaat

SEQ ID NO: 168245 - DNA, 20 bp, Artificial Sequence
  Synthetic oligonucleotide; GGG chr2 60537384 60537403 60537400 +
ggggcaggggagttaaaatg

SEQ ID NO: 168246 - DNA, 20 bp, Artificial Sequence
  Synthetic oligonucleotide; GAG chr2 60537386 60537405 60537402 +
ggcaggggagttaaaatggg

SEQ ID NO: 168247 - DNA, 20 bp, Artificial Sequence
  Synthetic oligonucleotide; TGG chr2 60537393 60537412 60537409 +
gagttaaaatggggagtaaa

SEQ ID NO: 168248 - DNA, 20 bp, Artificial Sequence
  Synthetic oligonucleotide; GAG chr2 60537402 60537421 60537418 +
tggggagtaaatggttcact

SEQ ID NO: 168249 - DNA, 20 bp, Artificial Sequence
  Synthetic oligonucleotide; AGG chr2 60537403 60537422 60537419 +
ggggagtaaatggttcactg

SEQ ID NO: 168250 - DNA, 20 bp, Artificial Sequence
  Synthetic oligonucleotide; GGG chr2 60537404 60537423 60537420 +
gggagtaaatggttcactga

SEQ ID NO: 168251 - DNA, 20 bp, Artificial Sequence
  Synthetic oligonucleotide; GGG chr2 60537405 60537424 60537421 +
ggagtaaatggttcactgag

SEQ ID NO: 168252 - DNA, 20 bp, Artificial Sequence
  Synthetic oligonucleotide; TGG chr2 60537441 60537460 60537457 +
gtaaataaatcataaaatca

SEQ ID NO: 168253 - DNA, 20 bp, Artificial Sequence
  Synthetic oligonucleotide; GAG chr2 60537452 60537471 60537468 +
ataaaatcatggtatacctt

SEQ ID NO: 168254 - DNA, 20 bp, Artificial Sequence
  Synthetic oligonucleotide; TGG chr2 60537456 60537475 60537472 +
aatcatggtataccttgagt

SEQ ID NO: 168255 - DNA, 20 bp, Artificial Sequence
  Synthetic oligonucleotide; AAG chr2 60537461 60537480 60537477 +
tggtataccttgagttggtg

SEQ ID NO: 168256 - DNA, 20 bp, Artificial Sequence
  Synthetic oligonucleotide; AGG chr2 60537462 60537481 60537478 +
ggtataccttgagttggtga

SEQ ID NO: 168257 - DNA, 20 bp, Artificial Sequence
  Synthetic oligonucleotide; GAG chr2 60537464 60537483 60537480 +
tataccttgagttggtgaag

SEQ ID NO: 168258 - DNA, 20 bp, Artificial Sequence
  Synthetic oligonucleotide; CAG chr2 60537474 60537493 60537490 +
gttggtgaaggagaatactt

SEQ ID NO: 168259 - DNA, 20 bp, Artificial Sequence
  Synthetic oligonucleotide; AGG chr2 60537475 60537494 60537491 +
ttggtgaaggagaatacttc

SEQ ID NO: 168260 - DNA, 20 bp, Artificial Sequence
  Synthetic oligonucleotide; TGG chr2 60537480 60537499 60537496 +
gaaggagaatacttcaggtt

SEQ ID NO: 168261 - DNA, 20 bp, Artificial Sequence
  Synthetic oligonucleotide; TAG chr2 60537489 60537508 60537505 +
tacttcaggtttggttctct

SEQ ID NO: 168262 - DNA, 20 bp, Artificial Sequence
  Synthetic oligonucleotide; GAG chr2 60537498 60537517 60537514 +
tttggttctcttagtttttt

SEQ ID NO: 168263 - DNA, 20 bp, Artificial Sequence
  Synthetic oligonucleotide; AGG chr2 60537499 60537518 60537515 +
ttggttctcttagttttttg

SEQ ID NO: 168264 - DNA, 20 bp, Artificial Sequence
  Synthetic oligonucleotide; GAG chr2 60537515 60537534 60537531 +
tttgaggtttgtttttgttt

SEQ ID NO: 168265 - DNA, 20 bp, Artificial Sequence
  Synthetic oligonucleotide; AGG chr2 60537516 60537535 60537532 +
ttgaggtttgtttttgtttg

SEQ ID NO: 168266 - DNA, 20 bp, Artificial Sequence
  Synthetic oligonucleotide; GAG chr2 60537518 60537537 60537534 +
gaggtttgtttttgtttgag

SEQ ID NO: 168267 - DNA, 20 bp, Artificial Sequence
  Synthetic oligonucleotide; AGG chr2 60537519 60537538 60537535 +
aggtttgtttttgtttgagg

SEQ ID NO: 168268 - DNA, 20 bp, Artificial Sequence
  Synthetic oligonucleotide; CAG chr2 60537524 60537543 60537540 +
tgtttttgtttgaggaggtg

SEQ ID NO: 168269 - DNA, 20 bp, Artificial Sequence
  Synthetic oligonucleotide; AGG chr2 60537525 60537544 60537541 +
gtttttgtttgaggaggtgc

SEQ ID NO: 168270 - DNA, 20 bp, Artificial Sequence
  Synthetic oligonucleotide; GGG chr2 60537526 60537545 60537542 +
tttttgtttgaggaggtgca

SEQ ID NO: 168271 - DNA, 20 bp, Artificial Sequence
  Synthetic oligonucleotide; TGG chr2 60537531 60537550 60537547 +
gtttgaggaggtgcagggat

SEQ ID NO: 168272 - DNA, 20 bp, Artificial Sequence
  Synthetic oligonucleotide; CAG chr2 60537565 60537584 60537581 +
aactctatatttaaaatgta

SEQ ID NO: 168273 - DNA, 20 bp, Artificial Sequence
  Synthetic oligonucleotide; AGG chr2 60537566 60537585 60537582 +
actctatatttaaaatgtac

SEQ ID NO: 168274 - DNA, 20 bp, Artificial Sequence
  Synthetic oligonucleotide; CAG chr2 60537571 60537590 60537587 +
atatttaaaatgtacaggaa

SEQ ID NO: 168275 - DNA, 20 bp, Artificial Sequence
  Synthetic oligonucleotide; TGG chr2 60537577 60537596 60537593 +
aaaatgtacaggaacagact

SEQ ID NO: 168276 - DNA, 20 bp, Artificial Sequence
  Synthetic oligonucleotide; TAG chr2 60537584 60537603 60537600 +
acaggaacagacttggcaca

SEQ ID NO: 168277 - DNA, 20 bp, Artificial Sequence
  Synthetic oligonucleotide; AAG chr2 60537605 60537624 60537621 +
agtgctttgtgctccaacat

SEQ ID NO: 168278 - DNA, 20 bp, Artificial Sequence
  Synthetic oligonucleotide; AAG chr2 60537613 60537632 60537629 +
gtgctccaacataagaatcc

SEQ ID NO: 168279 - DNA, 20 bp, Artificial Sequence
  Synthetic oligonucleotide; CAG chr2 60537642 60537661 60537658 +
tttatttccctaaaaattaa

SEQ ID NO: 168280 - DNA, 20 bp, Artificial Sequence
  Synthetic oligonucleotide; CAG chr2 60537659 60537678 60537675 +
taacagatgtgatttccttg

SEQ ID NO: 168281 - DNA, 20 bp, Artificial Sequence
  Synthetic oligonucleotide; AAG chr2 60537686 60537705 60537702 +
tttatgcatcattacatatt

SEQ ID NO: 168282 - DNA, 20 bp, Artificial Sequence
  Synthetic oligonucleotide; TAG chr2 60537732 60537751 60537748 +
aatttaaatgccctgatgct

SEQ ID NO: 168283 - DNA, 20 bp, Artificial Sequence
  Synthetic oligonucleotide; AAG chr2 60537739 60537758 60537755 +
atgccctgatgcttagcaaa

SEQ ID NO: 168284 - DNA, 20 bp, Artificial Sequence
  Synthetic oligonucleotide; TAG chr2 60537757 60537776 60537773 +
aaaagcttccttgtgttttt

SEQ ID NO: 168285 - DNA, 20 bp, Artificial Sequence
  Synthetic oligonucleotide; AAG chr2 60537761 60537780 60537777 +
gcttccttgtgttttttaga

SEQ ID NO: 168286 - DNA, 20 bp, Artificial Sequence
  Synthetic oligonucleotide; AAG chr2 60537770 60537789 60537786 +
tgttttttagaaagttcaaa

SEQ ID NO: 168287 - DNA, 20 bp, Artificial Sequence
  Synthetic oligonucleotide; TAG chr2 60537777 60537796 60537793 +
tagaaagttcaaaaagcaaa

SEQ ID NO: 168288 - DNA, 20 bp, Artificial Sequence
  Synthetic oligonucleotide; AAG chr2 60537781 60537800 60537797 +
aagttcaaaaagcaaataga

SEQ ID NO: 168289 - DNA, 20 bp, Artificial Sequence
  Synthetic oligonucleotide; AGG chr2 60537782 60537801 60537798 +
agttcaaaaagcaaatagaa

SEQ ID NO: 168290 - DNA, 20 bp, Artificial Sequence
  Synthetic oligonucleotide; GAG chr2 60537786 60537805 60537802 +
caaaaagcaaatagaaaggc

SEQ ID NO: 168291 - DNA, 20 bp, Artificial Sequence
  Synthetic oligonucleotide; AGG chr2 60537787 60537806 60537803 +
aaaaagcaaatagaaaggcg

SEQ ID NO: 168292 - DNA, 20 bp, Artificial Sequence
  Synthetic oligonucleotide; TAG chr2 60537790 60537809 60537806 +
aagcaaatagaaaggcgagg

SEQ ID NO: 168293 - DNA, 20 bp, Artificial Sequence
  Synthetic oligonucleotide; AGG chr2 60537791 60537810 60537807 +
agcaaatagaaaggcgaggt

SEQ ID NO: 168294 - DNA, 20 bp, Artificial Sequence
  Synthetic oligonucleotide; CAG chr2 60537801 60537820 60537817 +
aaggcgaggtaggtatacaa

SEQ ID NO: 168295 - DNA, 20 bp, Artificial Sequence
  Synthetic oligonucleotide; TGG chr2 60537807 60537826 60537823 +
aggtaggtatacaacagcac

SEQ ID NO: 168296 - DNA, 20 bp, Artificial Sequence
  Synthetic oligonucleotide; AAG chr2 60537821 60537840 60537837 +
cagcactggttttctttttg

SEQ ID NO: 168297 - DNA, 20 bp, Artificial Sequence
  Synthetic oligonucleotide; AGG chr2 60537822 60537841 60537838 +
agcactggttttctttttga

SEQ ID NO: 168298 - DNA, 20 bp, Artificial Sequence
  Synthetic oligonucleotide; CAG chr2 60537833 60537852 60537849 +
tctttttgaaggcacccttg

SEQ ID NO: 168299 - DNA, 20 bp, Artificial Sequence
  Synthetic oligonucleotide; AGG chr2 60537834 60537853 60537850 +
ctttttgaaggcacccttgc

SEQ ID NO: 168300 - DNA, 20 bp, Artificial Sequence
  Synthetic oligonucleotide; TGG chr2 60537866 60537885 60537882 +
aattccattctttattttaa

SEQ ID NO: 168301 - DNA, 20 bp, Artificial Sequence
  Synthetic oligonucleotide; GGG chr2 60537867 60537886 60537883 +
attccattctttattttaat

SEQ ID NO: 168302 - DNA, 20 bp, Artificial Sequence
  Synthetic oligonucleotide; GAG chr2 60537869 60537888 60537885 +
tccattctttattttaatgg

SEQ ID NO: 168303 - DNA, 20 bp, Artificial Sequence
  Synthetic oligonucleotide; CAG chr2 60537880 60537899 60537896 +
ttttaatgggagtttttaat

SEQ ID NO: 168304 - DNA, 20 bp, Artificial Sequence
  Synthetic oligonucleotide; TGG chr2 60537883 60537902 60537899 +
taatgggagtttttaatcag

SEQ ID NO: 168305 - DNA, 20 bp, Artificial Sequence
  Synthetic oligonucleotide; TAG chr2 60537918 60537937 60537934 +
ctaaaactaaaatcaaattg

SEQ ID NO: 168306 - DNA, 20 bp, Artificial Sequence
  Synthetic oligonucleotide; AGG chr2 60537919 60537938 60537935 +
taaaactaaaatcaaattgt

SEQ ID NO: 168307 - DNA, 20 bp, Artificial Sequence
  Synthetic oligonucleotide; TGG chr2 60537935 60537954 60537951 +
ttgtaggtgcaattgttcat

SEQ ID NO: 168308 - DNA, 20 bp, Artificial Sequence
  Synthetic oligonucleotide; CAG chr2 60537950 60537969 60537966 +
ttcattggcaatgctaacaa

SEQ ID NO: 168309 - DNA, 20 bp, Artificial Sequence
  Synthetic oligonucleotide; GAG chr2 60537954 60537973 60537970 +
ttggcaatgctaacaacagt

SEQ ID NO: 168310 - DNA, 20 bp, Artificial Sequence
  Synthetic oligonucleotide; GAG chr2 60537979 60537998 60537995 +
tacaaacaaaaactcattgt

SEQ ID NO: 168311 - DNA, 20 bp, Artificial Sequence
  Synthetic oligonucleotide; AAG chr2 60537988 60538007 60538004 +
aaactcattgtgagtgacca

SEQ ID NO: 168312 - DNA, 20 bp, Artificial Sequence
  Synthetic oligonucleotide; AGG chr2 60537989 60538008 60538005 +
aactcattgtgagtgaccaa

SEQ ID NO: 168313 - DNA, 20 bp, Artificial Sequence
  Synthetic oligonucleotide; CAG chr2 60537996 60538015 60538012 +
tgtgagtgaccaaaggtccc

SEQ ID NO: 168314 - DNA, 20 bp, Artificial Sequence
  Synthetic oligonucleotide; AGG chr2 60537997 60538016 60538013 +
gtgagtgaccaaaggtcccc

SEQ ID NO: 168315 - DNA, 20 bp, Artificial Sequence
  Synthetic oligonucleotide; CAG chr2 60538026 60538045 60538042 +
cttcatcaacatacctgctc

SEQ ID NO: 168316 - DNA, 20 bp, Artificial Sequence
  Synthetic oligonucleotide; AGG chr2 60538027 60538046 60538043 +
ttcatcaacatacctgctcc

SEQ ID NO: 168317 - DNA, 20 bp, Artificial Sequence
  Synthetic oligonucleotide; TGG chr2 60538037 60538056 60538053 +
tacctgctccaggttcccac

SEQ ID NO: 168318 - DNA, 20 bp, Artificial Sequence
  Synthetic oligonucleotide; GGG chr2 60538038 60538057 60538054 +
acctgctccaggttcccact

SEQ ID NO: 168319 - DNA, 20 bp, Artificial Sequence
  Synthetic oligonucleotide; TGG chr2 60538048 60538067 60538064 +
ggttcccactgggaattctc

SEQ ID NO: 168320 - DNA, 20 bp, Artificial Sequence
  Synthetic oligonucleotide; CAG chr2 60538051 60538070 60538067 +
tcccactgggaattctctgg

SEQ ID NO: 168321 - DNA, 20 bp, Artificial Sequence
  Synthetic oligonucleotide; GAG chr2 60538053 60538072 60538069 +
ccactgggaattctctggca

SEQ ID NO: 168322 - DNA, 20 bp, Artificial Sequence
  Synthetic oligonucleotide; CAG chr2 60538063 60538082 60538079 +
ttctctggcagagactgatt

SEQ ID NO: 168323 - DNA, 20 bp, Artificial Sequence
  Synthetic oligonucleotide; CAG chr2 60538084 60538103 60538100 +
agttctgaataacatgctgc

SEQ ID NO: 168324 - DNA, 20 bp, Artificial Sequence
  Synthetic oligonucleotide; TGG chr2 60538094 60538113 60538110 +
aacatgctgccagccctatc

SEQ ID NO: 168325 - DNA, 20 bp, Artificial Sequence
  Synthetic oligonucleotide; AAG chr2 60538099 60538118 60538115 +
gctgccagccctatctggaa

SEQ ID NO: 168326 - DNA, 20 bp, Artificial Sequence
  Synthetic oligonucleotide; AGG chr2 60538100 60538119 60538116 +
ctgccagccctatctggaaa

SEQ ID NO: 168327 - DNA, 20 bp, Artificial Sequence
  Synthetic oligonucleotide; GGG chr2 60538101 60538120 60538117 +
tgccagccctatctggaaaa

SEQ ID NO: 168328 - DNA, 20 bp, Artificial Sequence
  Synthetic oligonucleotide; AAG chr2 60538109 60538128 60538125 +
ctatctggaaaagggtgtgc

SEQ ID NO: 168329 - DNA, 20 bp, Artificial Sequence
  Synthetic oligonucleotide; AGG chr2 60538110 60538129 60538126 +
tatctggaaaagggtgtgca

SEQ ID NO: 168330 - DNA, 20 bp, Artificial Sequence
  Synthetic oligonucleotide; CAG chr2 60538132 60538151 60538148 +
gcgccttctcgcctctttta

SEQ ID NO: 168331 - DNA, 20 bp, Artificial Sequence
  Synthetic oligonucleotide; AGG chr2 60538133 60538152 60538149 +
cgccttctcgcctcttttac

SEQ ID NO: 168332 - DNA, 20 bp, Artificial Sequence
  Synthetic oligonucleotide; AAG chr2 60538136 60538155 60538152 +
cttctcgcctcttttacagg

SEQ ID NO: 168333 - DNA, 20 bp, Artificial Sequence
  Synthetic oligonucleotide; TAG chr2 60538162 60538181 60538178 +
aaacctgatcatctcacctt

SEQ ID NO: 168334 - DNA, 20 bp, Artificial Sequence
  Synthetic oligonucleotide; AGG chr2 60538163 60538182 60538179 +
aacctgatcatctcaccttt

SEQ ID NO: 168335 - DNA, 20 bp, Artificial Sequence
  Synthetic oligonucleotide; TAG chr2 60538184 60538203 60538200 +
ggtatatataatttgttgtt

SEQ ID NO: 168336 - DNA, 20 bp, Artificial Sequence
  Synthetic oligonucleotide; GAG chr2 60538193 60538212 60538209 +
aatttgttgtttagcactct

SEQ ID NO: 168337 - DNA, 20 bp, Artificial Sequence
  Synthetic oligonucleotide; TGG chr2 60538200 60538219 60538216 +
tgtttagcactctgagaact

SEQ ID NO: 168338 - DNA, 20 bp, Artificial Sequence
  Synthetic oligonucleotide; AAG chr2 60538218 60538237 60538234 +
cttggtattttatctatcta

SEQ ID NO: 168339 - DNA, 20 bp, Artificial Sequence
  Synthetic oligonucleotide; GAG chr2 60538220 60538239 60538236 +
tggtattttatctatctaaa

SEQ ID NO: 168340 - DNA, 20 bp, Artificial Sequence
  Synthetic oligonucleotide; AAG chr2 60538229 60538248 60538245 +
atctatctaaagagatcaaa

SEQ ID NO: 168341 - DNA, 20 bp, Artificial Sequence
  Synthetic oligonucleotide; AGG chr2 60538230 60538249 60538246 +
tctatctaaagagatcaaaa

SEQ ID NO: 168342 - DNA, 20 bp, Artificial Sequence
  Synthetic oligonucleotide; GGG chr2 60538231 60538250 60538247 +
ctatctaaagagatcaaaaa

SEQ ID NO: 168343 - DNA, 20 bp, Artificial Sequence
  Synthetic oligonucleotide; AAG chr2 60538237 60538256 60538253 +
aaagagatcaaaaagggcaa

SEQ ID NO: 168344 - DNA, 20 bp, Artificial Sequence
  Synthetic oligonucleotide; TGG chr2 60538241 60538260 60538257 +
agatcaaaaagggcaaaaga

SEQ ID NO: 168345 - DNA, 20 bp, Artificial Sequence
  Synthetic oligonucleotide; GAG chr2 60538243 60538262 60538259 +
atcaaaaagggcaaaagatg

SEQ ID NO: 168346 - DNA, 20 bp, Artificial Sequence
  Synthetic oligonucleotide; GAG chr2 60538247 60538266 60538263 +
aaaagggcaaaagatggagc

SEQ ID NO: 168347 - DNA, 20 bp, Artificial Sequence
  Synthetic oligonucleotide; GAG chr2 60538252 60538271 60538268 +
ggcaaaagatggagcgagct

SEQ ID NO: 168348 - DNA, 20 bp, Artificial Sequence
  Synthetic oligonucleotide; AGG chr2 60538253 60538272 60538269 +
gcaaaagatggagcgagctg

SEQ ID NO: 168349 - DNA, 20 bp, Artificial Sequence
  Synthetic oligonucleotide; CAG chr2 60538258 60538277 60538274 +
agatggagcgagctgaggcc

SEQ ID NO: 168350 - DNA, 20 bp, Artificial Sequence
  Synthetic oligonucleotide; TAG chr2 60538263 60538282 60538279 +
gagcgagctgaggcccagcc

SEQ ID NO: 168351 - DNA, 20 bp, Artificial Sequence
  Synthetic oligonucleotide; TGG chr2 60538269 60538288 60538285 +
gctgaggcccagcctagctc

SEQ ID NO: 168352 - DNA, 20 bp, Artificial Sequence
  Synthetic oligonucleotide; TAG chr2 60538304 60538323 60538320 +
tcgtgcactgcgcgttgcct

SEQ ID NO: 168353 - DNA, 20 bp, Artificial Sequence
  Synthetic oligonucleotide; GAG chr2 60538306 60538325 60538322 +
gtgcactgcgcgttgcctta

SEQ ID NO: 168354 - DNA, 20 bp, Artificial Sequence
  Synthetic oligonucleotide; AGG chr2 60538307 60538326 60538323 +
tgcactgcgcgttgccttag

SEQ ID NO: 168355 - DNA, 20 bp, Artificial Sequence
  Synthetic oligonucleotide; GAG chr2 60538309 60538328 60538325 +
cactgcgcgttgccttagag

SEQ ID NO: 168356 - DNA, 20 bp, Artificial Sequence
  Synthetic oligonucleotide; CAG chr2 60538321 60538340 60538337 +
ccttagaggagcaacctgtg

SEQ ID NO: 168357 - DNA, 20 bp, Artificial Sequence
  Synthetic oligonucleotide; AGG chr2 60538322 60538341 60538338 +
cttagaggagcaacctgtgc

SEQ ID NO: 168358 - DNA, 20 bp, Artificial Sequence
  Synthetic oligonucleotide; CAG chr2 60538334 60538353 60538350 +
acctgtgcaggtaaatcttc

SEQ ID NO: 168359 - DNA, 20 bp, Artificial Sequence
  Synthetic oligonucleotide; CAG chr2 60538337 60538356 60538353 +
tgtgcaggtaaatcttccag

SEQ ID NO: 168360 - DNA, 20 bp, Artificial Sequence
  Synthetic oligonucleotide; CAG chr2 60538348 60538367 60538364 +
atcttccagcagcattgcat

SEQ ID NO: 168361 - DNA, 20 bp, Artificial Sequence
  Synthetic oligonucleotide; CAG chr2 60538363 60538382 60538379 +
tgcatcagatccactcacat

SEQ ID NO: 168362 - DNA, 20 bp, Artificial Sequence
  Synthetic oligonucleotide; CAG chr2 60538370 60538389 60538386 +
gatccactcacatcagtctc

SEQ ID NO: 168363 - DNA, 20 bp, Artificial Sequence
  Synthetic oligonucleotide; AGG chr2 60538371 60538390 60538387 +
atccactcacatcagtctcc

SEQ ID NO: 168364 - DNA, 20 bp, Artificial Sequence
  Synthetic oligonucleotide; GGG chr2 60538372 60538391 60538388 +
tccactcacatcagtctcca

SEQ ID NO: 168365 - DNA, 20 bp, Artificial Sequence
  Synthetic oligonucleotide; AAG chr2 60538381 60538400 60538397 +
atcagtctccagggtgaacc

SEQ ID NO: 168366 - DNA, 20 bp, Artificial Sequence
  Synthetic oligonucleotide; GAG chr2 60538383 60538402 60538399 +
cagtctccagggtgaaccaa

SEQ ID NO: 168367 - DNA, 20 bp, Artificial Sequence
  Synthetic oligonucleotide; CAG chr2 60538395 60538414 60538411 +
tgaaccaagagatgacactt

SEQ ID NO: 168368 - DNA, 20 bp, Artificial Sequence
  Synthetic oligonucleotide; CAG chr2 60538425 60538444 60538441 +
tctgcaaacttctaattcgc

SEQ ID NO: 168369 - DNA, 20 bp, Artificial Sequence
  Synthetic oligonucleotide; TAG chr2 60538432 60538451 60538448 +
acttctaattcgccagttct

SEQ ID NO: 168370 - DNA, 20 bp, Artificial Sequence
  Synthetic oligonucleotide; CAG chr2 60538435 60538454 60538451 +
tctaattcgccagttcttag

SEQ ID NO: 168371 - DNA, 20 bp, Artificial Sequence
  Synthetic oligonucleotide; AAG chr2 60538449 60538468 60538465 +
tcttagcagcttatttttcc

SEQ ID NO: 168372 - DNA, 20 bp, Artificial Sequence
  Synthetic oligonucleotide; CAG chr2 60538462 60538481 60538478 +
tttttccaagtgttttgttt

SEQ ID NO: 168373 - DNA, 20 bp, Artificial Sequence
  Synthetic oligonucleotide; AGG chr2 60538463 60538482 60538479 +
ttttccaagtgttttgtttc

SEQ ID NO: 168374 - DNA, 20 bp, Artificial Sequence
  Synthetic oligonucleotide; TGG chr2 60538494 60538513 60538510 +
atttttctttatacgttttg

SEQ ID NO: 168375 - DNA, 20 bp, Artificial Sequence
  Synthetic oligonucleotide; CAG chr2 60538518 60538537 60538534 +
tctaccacaactgcttctga

SEQ ID NO: 168376 - DNA, 20 bp, Artificial Sequence
  Synthetic oligonucleotide; AAG chr2 60538536 60538555 60538552 +
gacagctgttgattctgtta

SEQ ID NO: 168377 - DNA, 20 bp, Artificial Sequence
  Synthetic oligonucleotide; AGG chr2 60538537 60538556 60538553 +
acagctgttgattctgttaa

SEQ ID NO: 168378 - DNA, 20 bp, Artificial Sequence
  Synthetic oligonucleotide; AAG chr2 60538571 60538590 60538587 +
aaaatcttctttaaaacctc

SEQ ID NO: 168379 - DNA, 20 bp, Artificial Sequence
  Synthetic oligonucleotide; TGG chr2 60538579 60538598 60538595 +
ctttaaaacctcaagcaatg

SEQ ID NO: 168380 - DNA, 20 bp, Artificial Sequence
  Synthetic oligonucleotide; TGG chr2 60538596 60538615 60538612 +
atgtggactcaaaaatataa

SEQ ID NO: 168381 - DNA, 20 bp, Artificial Sequence
  Synthetic oligonucleotide; TGG chr2 60538612 60538631 60538628 +
ataatggtgaaatattttaa

SEQ ID NO: 168382 - DNA, 20 bp, Artificial Sequence
  Synthetic oligonucleotide; CAG chr2 60538620 60538639 60538636 +
gaaatattttaatggaattc

SEQ ID NO: 168383 - DNA, 20 bp, Artificial Sequence
  Synthetic oligonucleotide; AAG chr2 60538627 60538646 60538643 +
tttaatggaattccagttga

SEQ ID NO: 168384 - DNA, 20 bp, Artificial Sequence
  Synthetic oligonucleotide; AAG chr2 60538644 60538663 60538660 +
tgaaagttgttttttaaaaa

SEQ ID NO: 168385 - DNA, 20 bp, Artificial Sequence
  Synthetic oligonucleotide; AAG chr2 60538655 60538674 60538671 +
ttttaaaaaaagtacaaatg

SEQ ID NO: 168386 - DNA, 20 bp, Artificial Sequence
  Synthetic oligonucleotide; AGG chr2 60538656 60538675 60538672 +
tttaaaaaaagtacaaatga

SEQ ID NO: 168387 - DNA, 20 bp, Artificial Sequence
  Synthetic oligonucleotide; CAG chr2 60538661 60538680 60538677 +
aaaaagtacaaatgaaggta

SEQ ID NO: 168388 - DNA, 20 bp, Artificial Sequence
  Synthetic oligonucleotide; AAG chr2 60538664 60538683 60538680 +
aagtacaaatgaaggtacag

SEQ ID NO: 168389 - DNA, 20 bp, Artificial Sequence
  Synthetic oligonucleotide; TAG chr2 60538672 60538691 60538688 +
atgaaggtacagaagtcctt

SEQ ID NO: 168390 - DNA, 20 bp, Artificial Sequence
  Synthetic oligonucleotide; CAG chr2 60538677 60538696 60538693 +
ggtacagaagtcctttagat

SEQ ID NO: 168391 - DNA, 20 bp, Artificial Sequence
  Synthetic oligonucleotide; TAG chr2 60538683 60538702 60538699 +
gaagtcctttagatcagtac

SEQ ID NO: 168392 - DNA, 20 bp, Artificial Sequence
  Synthetic oligonucleotide; TGG chr2 60538767 60538786 60538783 +
gtgtgtgtgtgtgtgtgtaa

SEQ ID NO: 168393 - DNA, 20 bp, Artificial Sequence
  Synthetic oligonucleotide; GGG chr2 60538768 60538787 60538784 +
tgtgtgtgtgtgtgtgtaat

SEQ ID NO: 168394 - DNA, 20 bp, Artificial Sequence
  Synthetic oligonucleotide; GGG chr2 60538769 60538788 60538785 +
gtgtgtgtgtgtgtgtaatg

SEQ ID NO: 168395 - DNA, 20 bp, Artificial Sequence
  Synthetic oligonucleotide; AAG chr2 60538773 60538792 60538789 +
gtgtgtgtgtgtaatgggga

SEQ ID NO: 168396 - DNA, 20 bp, Artificial Sequence
  Synthetic oligonucleotide; GAG chr2 60538775 60538794 60538791 +
gtgtgtgtgtaatggggaaa

SEQ ID NO: 168397 - DNA, 20 bp, Artificial Sequence
  Synthetic oligonucleotide; AGG chr2 60538776 60538795 60538792 +
tgtgtgtgtaatggggaaag

SEQ ID NO: 168398 - DNA, 20 bp, Artificial Sequence
  Synthetic oligonucleotide; GGG chr2 60538777 60538796 60538793 +
gtgtgtgtaatggggaaaga

SEQ ID NO: 168399 - DNA, 20 bp, Artificial Sequence
  Synthetic oligonucleotide; GGG chr2 60538778 60538797 60538794 +
tgtgtgtaatggggaaagag

SEQ ID NO: 168400 - DNA, 20 bp, Artificial Sequence
  Synthetic oligonucleotide; CGG chr2 60538842 60538861 60538858 +
ttcaaatcacatacttttaa

SEQ ID NO: 168401 - DNA, 20 bp, Artificial Sequence
  Synthetic oligonucleotide; GGG chr2 60538843 60538862 60538859 +
tcaaatcacatacttttaac

SEQ ID NO: 168402 - DNA, 20 bp, Artificial Sequence
  Synthetic oligonucleotide; AAG chr2 60538848 60538867 60538864 +
tcacatacttttaacgggaa

SEQ ID NO: 168403 - DNA, 20 bp, Artificial Sequence
  Synthetic oligonucleotide; TGG chr2 60538852 60538871 60538868 +
atacttttaacgggaaaagc

SEQ ID NO: 168404 - DNA, 20 bp, Artificial Sequence
  Synthetic oligonucleotide; TGG chr2 60538860 60538879 60538876 +
aacgggaaaagctggaactg

SEQ ID NO: 168405 - DNA, 20 bp, Artificial Sequence
  Synthetic oligonucleotide; CAG chr2 60538936 60538955 60538952 +
tatgttgcatttctccatac

SEQ ID NO: 168406 - DNA, 20 bp, Artificial Sequence
  Synthetic oligonucleotide; TGG chr2 60538956 60538975 60538972 +
cagcacatgcaaaaaaattc

SEQ ID NO: 168407 - DNA, 20 bp, Artificial Sequence
  Synthetic oligonucleotide; TGG chr2 60538959 60538978 60538975 +
cacatgcaaaaaaattctgg

SEQ ID NO: 168408 - DNA, 20 bp, Artificial Sequence
  Synthetic oligonucleotide; TGG chr2 60538967 60538986 60538983 +
aaaaaattctggtggtgaat

SEQ ID NO: 168409 - DNA, 20 bp, Artificial Sequence
  Synthetic oligonucleotide; GGG chr2 60538968 60538987 60538984 +
aaaaattctggtggtgaatt

SEQ ID NO: 168410 - DNA, 20 bp, Artificial Sequence
  Synthetic oligonucleotide; GAG chr2 60538970 60538989 60538986 +
aaattctggtggtgaattgg

SEQ ID NO: 168411 - DNA, 20 bp, Artificial Sequence
  Synthetic oligonucleotide; AGG chr2 60538971 60538990 60538987 +
aattctggtggtgaattggg

SEQ ID NO: 168412 - DNA, 20 bp, Artificial Sequence
  Synthetic oligonucleotide; TGG chr2 60538974 60538993 60538990 +
tctggtggtgaattgggagg

SEQ ID NO: 168413 - DNA, 20 bp, Artificial Sequence
  Synthetic oligonucleotide; CAG chr2 60538977 60538996 60538993 +
ggtggtgaattgggaggtgg

SEQ ID NO: 168414 - DNA, 20 bp, Artificial Sequence
  Synthetic oligonucleotide; GAG chr2 60538979 60538998 60538995 +
tggtgaattgggaggtggca

SEQ ID NO: 168415 - DNA, 20 bp, Artificial Sequence
  Synthetic oligonucleotide; TGG chr2 60538983 60539002 60538999 +
gaattgggaggtggcagagt

SEQ ID NO: 168416 - DNA, 20 bp, Artificial Sequence
  Synthetic oligonucleotide; GGG chr2 60538984 60539003 60539000 +
aattgggaggtggcagagtt

SEQ ID NO: 168417 - DNA, 20 bp, Artificial Sequence
  Synthetic oligonucleotide; GGG chr2 60538985 60539004 60539001 +
attgggaggtggcagagttg

SEQ ID NO: 168418 - DNA, 20 bp, Artificial Sequence
  Synthetic oligonucleotide; GAG chr2 60538987 60539006 60539003 +
tgggaggtggcagagttggg

SEQ ID NO: 168419 - DNA, 20 bp, Artificial Sequence
  Synthetic oligonucleotide; AAG chr2 60538998 60539017 60539014 +
agagttggggagacaactcc

SEQ ID NO: 168420 - DNA, 20 bp, Artificial Sequence
  Synthetic oligonucleotide; GAG chr2 60539000 60539019 60539016 +
agttggggagacaactccaa

SEQ ID NO: 168421 - DNA, 20 bp, Artificial Sequence
  Synthetic oligonucleotide; AAG chr2 60539003 60539022 60539019 +
tggggagacaactccaagag

SEQ ID NO: 168422 - DNA, 20 bp, Artificial Sequence
  Synthetic oligonucleotide; AAG chr2 60539008 60539027 60539024 +
agacaactccaagagaagaa

SEQ ID NO: 168423 - DNA, 20 bp, Artificial Sequence
  Synthetic oligonucleotide; AGG chr2 60539009 60539028 60539025 +
gacaactccaagagaagaaa

SEQ ID NO: 168424 - DNA, 20 bp, Artificial Sequence
  Synthetic oligonucleotide; TAG chr2 60539032 60539051 60539048 +
atgatgttttcatttcgcta

SEQ ID NO: 168425 - DNA, 20 bp, Artificial Sequence
  Synthetic oligonucleotide; AAG chr2 60539039 60539058 60539055 +
tttcatttcgctatagatca

SEQ ID NO: 168426 - DNA, 20 bp, Artificial Sequence
  Synthetic oligonucleotide; AGG chr2 60539040 60539059 60539056 +
ttcatttcgctatagatcaa

SEQ ID NO: 168427 - DNA, 20 bp, Artificial Sequence
  Synthetic oligonucleotide; GAG chr2 60539042 60539061 60539058 +
catttcgctatagatcaaag

SEQ ID NO: 168428 - DNA, 20 bp, Artificial Sequence
  Synthetic oligonucleotide; AAG chr2 60539048 60539067 60539064 +
gctatagatcaaaggagaac

SEQ ID NO: 168429 - DNA, 20 bp, Artificial Sequence
  Synthetic oligonucleotide; TGG chr2 60539053 60539072 60539069 +
agatcaaaggagaacaagaa

SEQ ID NO: 168430 - DNA, 20 bp, Artificial Sequence
  Synthetic oligonucleotide; TGG chr2 60539062 60539081 60539078 +
gagaacaagaatggaaactg

SEQ ID NO: 168431 - DNA, 20 bp, Artificial Sequence
  Synthetic oligonucleotide; GAG chr2 60539071 60539090 60539087 +
aatggaaactgtggcatatc

SEQ ID NO: 168432 - DNA, 20 bp, Artificial Sequence
  Synthetic oligonucleotide; TGG chr2 60539100 60539119 60539116 +
tccattgctgtctttcacac

SEQ ID NO: 168433 - DNA, 20 bp, Artificial Sequence
  Synthetic oligonucleotide; GGG chr2 60539101 60539120 60539117 +
ccattgctgtctttcacact

SEQ ID NO: 168434 - DNA, 20 bp, Artificial Sequence
  Synthetic oligonucleotide; AAG chr2 60539110 60539129 60539126 +
tctttcacactgggctatct

SEQ ID NO: 168435 - DNA, 20 bp, Artificial Sequence
  Synthetic oligonucleotide; CAG chr2 60539127 60539146 60539143 +
tctaagtttatacaattccc

SEQ ID NO: 168436 - DNA, 20 bp, Artificial Sequence
  Synthetic oligonucleotide; TAG chr2 60539132 60539151 60539148 +
gtttatacaattccccagac

SEQ ID NO: 168437 - DNA, 20 bp, Artificial Sequence
  Synthetic oligonucleotide; AAG chr2 60539144 60539163 60539160 +
ccccagactagctgcatatt

SEQ ID NO: 168438 - DNA, 20 bp, Artificial Sequence
  Synthetic oligonucleotide; CAG chr2 60539158 60539177 60539174 +
catattaagcttgctgtgta

SEQ ID NO: 168439 - DNA, 20 bp, Artificial Sequence
  Synthetic oligonucleotide; TGG chr2 60539169 60539188 60539185 +
tgctgtgtacagctttatta

SEQ ID NO: 168440 - DNA, 20 bp, Artificial Sequence
  Synthetic oligonucleotide; TGG chr2 60539174 60539193 60539190 +
tgtacagctttattatggtg

SEQ ID NO: 168441 - DNA, 20 bp, Artificial Sequence
  Synthetic oligonucleotide; TGG chr2 60539177 60539196 60539193 +
acagctttattatggtgtgg

SEQ ID NO: 168442 - DNA, 20 bp, Artificial Sequence
  Synthetic oligonucleotide; TGG chr2 60539180 60539199 60539196 +
gctttattatggtgtggtgg

SEQ ID NO: 168443 - DNA, 20 bp, Artificial Sequence
  Synthetic oligonucleotide; AAG chr2 60539183 60539202 60539199 +
ttattatggtgtggtggtgg

SEQ ID NO: 168444 - DNA, 20 bp, Artificial Sequence
  Synthetic oligonucleotide; AAG chr2 60539186 60539205 60539202 +
ttatggtgtggtggtggaag

SEQ ID NO: 168445 - DNA, 20 bp, Artificial Sequence
  Synthetic oligonucleotide; CAG chr2 60539200 60539219 60539216 +
tggaagaagcattaatattc

SEQ ID NO: 168446 - DNA, 20 bp, Artificial Sequence
  Synthetic oligonucleotide; CAG chr2 60539215 60539234 60539231 +
tattccagctccgcatctga

SEQ ID NO: 168447 - DNA, 20 bp, Artificial Sequence
  Synthetic oligonucleotide; AGG chr2 60539216 60539235 60539232 +
attccagctccgcatctgac

SEQ ID NO: 168448 - DNA, 20 bp, Artificial Sequence
  Synthetic oligonucleotide; GGG chr2 60539217 60539236 60539233 +
ttccagctccgcatctgaca

SEQ ID NO: 168449 - DNA, 20 bp, Artificial Sequence
  Synthetic oligonucleotide; GAG chr2 60539239 60539258 60539255 +
gcatttacatgcgcccatct

SEQ ID NO: 168450 - DNA, 20 bp, Artificial Sequence
  Synthetic oligonucleotide; CGG chr2 60539242 60539261 60539258 +
tttacatgcgcccatctgag

SEQ ID NO: 168451 - DNA, 20 bp, Artificial Sequence
  Synthetic oligonucleotide; GAG chr2 60539250 60539269 60539266 +
cgcccatctgagcggcacct

SEQ ID NO: 168452 - DNA, 20 bp, Artificial Sequence
  Synthetic oligonucleotide; GAG chr2 60539252 60539271 60539268 +
cccatctgagcggcacctga

SEQ ID NO: 168453 - DNA, 20 bp, Artificial Sequence
  Synthetic oligonucleotide; AAG chr2 60539262 60539281 60539278 +
cggcacctgagagctcctcc

SEQ ID NO: 168454 - DNA, 20 bp, Artificial Sequence
  Synthetic oligonucleotide; AGG chr2 60539263 60539282 60539279 +
ggcacctgagagctcctcca

SEQ ID NO: 168455 - DNA, 20 bp, Artificial Sequence
  Synthetic oligonucleotide; CAG chr2 60539268 60539287 60539284 +
ctgagagctcctccaaggtg

SEQ ID NO: 168456 - DNA, 20 bp, Artificial Sequence
  Synthetic oligonucleotide; AAG chr2 60539290 60539309 60539306 +
gtaactgtgcgcctattgta

SEQ ID NO: 168457 - DNA, 20 bp, Artificial Sequence
  Synthetic oligonucleotide; AGG chr2 60539291 60539310 60539307 +
taactgtgcgcctattgtaa

SEQ ID NO: 168458 - DNA, 20 bp, Artificial Sequence
  Synthetic oligonucleotide; AAG chr2 60539300 60539319 60539316 +
gcctattgtaaaggcaaatg

SEQ ID NO: 168459 - DNA, 20 bp, Artificial Sequence
  Synthetic oligonucleotide; TGG chr2 60539319 60539338 60539335 +
gaagctcacctattccctgc

SEQ ID NO: 168460 - DNA, 20 bp, Artificial Sequence
  Synthetic oligonucleotide; GGG chr2 60539320 60539339 60539336 +
aagctcacctattccctgct

SEQ ID NO: 168461 - DNA, 20 bp, Artificial Sequence
  Synthetic oligonucleotide; CAG chr2 60539325 60539344 60539341 +
cacctattccctgctgggat

SEQ ID NO: 168462 - DNA, 20 bp, Artificial Sequence
  Synthetic oligonucleotide; AAG chr2 60539328 60539347 60539344 +
ctattccctgctgggatcag

SEQ ID NO: 168463 - DNA, 20 bp, Artificial Sequence
  Synthetic oligonucleotide; CAG chr2 60539391 60539410 60539407 +
aacctaactcaatgccattg

SEQ ID NO: 168464 - DNA, 20 bp, Artificial Sequence
  Synthetic oligonucleotide; GAG chr2 60539404 60539423 60539420 +
gccattgcagaatgacgaat

SEQ ID NO: 168465 - DNA, 20 bp, Artificial Sequence
  Synthetic oligonucleotide; CAG chr2 60539409 60539428 60539425 +
tgcagaatgacgaatgagct

SEQ ID NO: 168466 - DNA, 20 bp, Artificial Sequence
  Synthetic oligonucleotide; TAG chr2 60539415 60539434 60539431 +
atgacgaatgagctcagaaa

SEQ ID NO: 168467 - DNA, 20 bp, Artificial Sequence
  Synthetic oligonucleotide; AAG chr2 60539423 60539442 60539439 +
tgagctcagaaatagacccc

SEQ ID NO: 168468 - DNA, 20 bp, Artificial Sequence
  Synthetic oligonucleotide; AAG chr2 60539440 60539459 60539456 +
cccaagttactaaccctgct

SEQ ID NO: 168469 - DNA, 20 bp, Artificial Sequence
  Synthetic oligonucleotide; CAG chr2 60539445 60539464 60539461 +
gttactaaccctgctaagaa

SEQ ID NO: 168470 - DNA, 20 bp, Artificial Sequence
  Synthetic oligonucleotide; AAG chr2 60539451 60539470 60539467 +
aaccctgctaagaacagcaa

SEQ ID NO: 168471 - DNA, 20 bp, Artificial Sequence
  Synthetic oligonucleotide; TAG chr2 60539481 60539500 60539497 +
tgaaatgttttaaaaatgca

SEQ ID NO: 168472 - DNA, 20 bp, Artificial Sequence
  Synthetic oligonucleotide; AGG chr2 60539482 60539501 60539498 +
gaaatgttttaaaaatgcat

SEQ ID NO: 168473 - DNA, 20 bp, Artificial Sequence
  Synthetic oligonucleotide; GGG chr2 60539483 60539502 60539499 +
aaatgttttaaaaatgcata

SEQ ID NO: 168474 - DNA, 20 bp, Artificial Sequence
  Synthetic oligonucleotide; GAG chr2 60539485 60539504 60539501 +
atgttttaaaaatgcatagg

SEQ ID NO: 168475 - DNA, 20 bp, Artificial Sequence
  Synthetic oligonucleotide; CAG chr2 60539490 60539509 60539506 +
ttaaaaatgcatagggagtg

SEQ ID NO: 168476 - DNA, 20 bp, Artificial Sequence
  Synthetic oligonucleotide; TGG chr2 60539494 60539513 60539510 +
aaatgcatagggagtgcagc

SEQ ID NO: 168477 - DNA, 20 bp, Artificial Sequence
  Synthetic oligonucleotide; CAG chr2 60539498 60539517 60539514 +
gcatagggagtgcagctggc

SEQ ID NO: 168478 - DNA, 20 bp, Artificial Sequence
  Synthetic oligonucleotide; AAG chr2 60539505 60539524 60539521 +
gagtgcagctggccagtaaa

SEQ ID NO: 168479 - DNA, 20 bp, Artificial Sequence
  Synthetic oligonucleotide; CAG chr2 60539508 60539527 60539524 +
tgcagctggccagtaaaaag

SEQ ID NO: 168480 - DNA, 20 bp, Artificial Sequence
  Synthetic oligonucleotide; AGG chr2 60539509 60539528 60539525 +
gcagctggccagtaaaaagc

SEQ ID NO: 168481 - DNA, 20 bp, Artificial Sequence
  Synthetic oligonucleotide; GGG chr2 60539510 60539529 60539526 +
cagctggccagtaaaaagca

SEQ ID NO: 168482 - DNA, 20 bp, Artificial Sequence
  Synthetic oligonucleotide; GAG chr2 60539512 60539531 60539528 +
gctggccagtaaaaagcagg

SEQ ID NO: 168483 - DNA, 20 bp, Artificial Sequence
  Synthetic oligonucleotide; TGG chr2 60539537 60539556 60539553 +
aaattccaatgaacccaata

SEQ ID NO: 168484 - DNA, 20 bp, Artificial Sequence
  Synthetic oligonucleotide; AAG chr2 60539543 60539562 60539559 +
caatgaacccaatatggaat

SEQ ID NO: 168485 - DNA, 20 bp, Artificial Sequence
  Synthetic oligonucleotide; TAG chr2 60539564 60539583 60539580 +
agttacattttaaaactgat

SEQ ID NO: 168486 - DNA, 20 bp, Artificial Sequence
  Synthetic oligonucleotide; CAG chr2 60539572 60539591 60539588 +
tttaaaactgattagaaata

SEQ ID NO: 168487 - DNA, 20 bp, Artificial Sequence
  Synthetic oligonucleotide; TGG chr2 60539587 60539606 60539603 +
aaatacagtctgatgtttac

SEQ ID NO: 168488 - DNA, 20 bp, Artificial Sequence
  Synthetic oligonucleotide; GAG chr2 60539599 60539618 60539615 +
atgtttactggcttcaaatt

SEQ ID NO: 168489 - DNA, 20 bp, Artificial Sequence
  Synthetic oligonucleotide; TGG chr2 60539604 60539623 60539620 +
tactggcttcaaattgagtt

SEQ ID NO: 168490 - DNA, 20 bp, Artificial Sequence
  Synthetic oligonucleotide; AAG chr2 60539611 60539630 60539627 +
ttcaaattgagtttggcatc

SEQ ID NO: 168491 - DNA, 20 bp, Artificial Sequence
  Synthetic oligonucleotide; TGG chr2 60539619 60539638 60539635 +
gagtttggcatcaagtatac

SEQ ID NO: 168492 - DNA, 20 bp, Artificial Sequence
  Synthetic oligonucleotide; TGG chr2 60539634 60539653 60539650 +
tatactggctttaataatgc

SEQ ID NO: 168493 - DNA, 20 bp, Artificial Sequence
  Synthetic oligonucleotide; TGG chr2 60539672 60539691 60539688 +
tattattttaaatctgcctt

SEQ ID NO: 168494 - DNA, 20 bp, Artificial Sequence
  Synthetic oligonucleotide; TAG chr2 60539679 60539698 60539695 +
ttaaatctgcctttggtctc

SEQ ID NO: 168495 - DNA, 20 bp, Artificial Sequence
  Synthetic oligonucleotide; AGG chr2 60539680 60539699 60539696 +
taaatctgcctttggtctct

SEQ ID NO: 168496 - DNA, 20 bp, Artificial Sequence
  Synthetic oligonucleotide; GAG chr2 60539682 60539701 60539698 +
aatctgcctttggtctctag

SEQ ID NO: 168497 - DNA, 20 bp, Artificial Sequence
  Synthetic oligonucleotide; TAG chr2 60539691 60539710 60539707 +
ttggtctctaggagcacatg

SEQ ID NO: 168498 - DNA, 20 bp, Artificial Sequence
  Synthetic oligonucleotide; GAG chr2 60539693 60539712 60539709 +
ggtctctaggagcacatgta

SEQ ID NO: 168499 - DNA, 20 bp, Artificial Sequence
  Synthetic oligonucleotide; GAG chr2 60539695 60539714 60539711 +
tctctaggagcacatgtaga

SEQ ID NO: 168500 - DNA, 20 bp, Artificial Sequence
  Synthetic oligonucleotide; AAG chr2 60539701 60539720 60539717 +
ggagcacatgtagagagcta

SEQ ID NO: 168501 - DNA, 20 bp, Artificial Sequence
  Synthetic oligonucleotide; CAG chr2 60539717 60539736 60539733 +
gctaaagaattcttatttgt

SEQ ID NO: 168502 - DNA, 20 bp, Artificial Sequence
  Synthetic oligonucleotide; AGG chr2 60539718 60539737 60539734 +
ctaaagaattcttatttgtc

SEQ ID NO: 168503 - DNA, 20 bp, Artificial Sequence
  Synthetic oligonucleotide; TGG chr2 60539731 60539750 60539747 +
atttgtcaggttacatttcc

SEQ ID NO: 168504 - DNA, 20 bp, Artificial Sequence
  Synthetic oligonucleotide; AAG chr2 60539739 60539758 60539755 +
ggttacatttcctggaaatt

SEQ ID NO: 168505 - DNA, 20 bp, Artificial Sequence
  Synthetic oligonucleotide; CAG chr2 60539749 60539768 60539765 +
cctggaaattaagtttgtga

SEQ ID NO: 168506 - DNA, 20 bp, Artificial Sequence
  Synthetic oligonucleotide; CAG chr2 60539762 60539781 60539778 +
tttgtgacagaaaatgactc

SEQ ID NO: 168507 - DNA, 20 bp, Artificial Sequence
  Synthetic oligonucleotide; TAG chr2 60539765 60539784 60539781 +
gtgacagaaaatgactccag

SEQ ID NO: 168508 - DNA, 20 bp, Artificial Sequence
  Synthetic oligonucleotide; TGG chr2 60539776 60539795 60539792 +
tgactccagtagcaataata

SEQ ID NO: 168509 - DNA, 20 bp, Artificial Sequence
  Synthetic oligonucleotide; TAG chr2 60539796 60539815 60539812 +
tggttcgtgctcaaattaat

SEQ ID NO: 168510 - DNA, 20 bp, Artificial Sequence
  Synthetic oligonucleotide; AGG chr2 60539797 60539816 60539813 +
ggttcgtgctcaaattaatt

SEQ ID NO: 168511 - DNA, 20 bp, Artificial Sequence
  Synthetic oligonucleotide; TGG chr2 60539819 60539838 60539835 +
gtcatgttgtaaaaactacg

SEQ ID NO: 168512 - DNA, 20 bp, Artificial Sequence
  Synthetic oligonucleotide; AAG chr2 60539831 60539850 60539847 +
aaactacgtggcaaattaca

SEQ ID NO: 168513 - DNA, 20 bp, Artificial Sequence
  Synthetic oligonucleotide; AGG chr2 60539832 60539851 60539848 +
aactacgtggcaaattacaa

SEQ ID NO: 168514 - DNA, 20 bp, Artificial Sequence
  Synthetic oligonucleotide; TGG chr2 60539850 60539869 60539866 +
aaaggtaaatttactgatat

SEQ ID NO: 168515 - DNA, 20 bp, Artificial Sequence
  Synthetic oligonucleotide; CAG chr2 60539854 60539873 60539870 +
gtaaatttactgatattggc

SEQ ID NO: 168516 - DNA, 20 bp, Artificial Sequence
  Synthetic oligonucleotide; TGG chr2 60539869 60539888 60539885 +
ttggccagtgctctataccc

SEQ ID NO: 168517 - DNA, 20 bp, Artificial Sequence
  Synthetic oligonucleotide; AAG chr2 60539877 60539896 60539893 +
tgctctataccctggtcgta

SEQ ID NO: 168518 - DNA, 20 bp, Artificial Sequence
  Synthetic oligonucleotide; AGG chr2 60539878 60539897 60539894 +
gctctataccctggtcgtaa

SEQ ID NO: 168519 - DNA, 20 bp, Artificial Sequence
  Synthetic oligonucleotide; GGG chr2 60539879 60539898 60539895 +
ctctataccctggtcgtaaa

SEQ ID NO: 168520 - DNA, 20 bp, Artificial Sequence
  Synthetic oligonucleotide; GGG chr2 60539880 60539899 60539896 +
tctataccctggtcgtaaag

SEQ ID NO: 168521 - DNA, 20 bp, Artificial Sequence
  Synthetic oligonucleotide; GAG chr2 60539882 60539901 60539898 +
tataccctggtcgtaaaggg

SEQ ID NO: 168522 - DNA, 20 bp, Artificial Sequence
  Synthetic oligonucleotide; AAG chr2 60539885 60539904 60539901 +
accctggtcgtaaaggggag

SEQ ID NO: 168523 - DNA, 20 bp, Artificial Sequence
  Synthetic oligonucleotide; AAG chr2 60539894 60539913 60539910 +
gtaaaggggagaagctgttt

SEQ ID NO: 168524 - DNA, 20 bp, Artificial Sequence
  Synthetic oligonucleotide; AGG chr2 60539895 60539914 60539911 +
taaaggggagaagctgttta

SEQ ID NO: 168525 - DNA, 20 bp, Artificial Sequence
  Synthetic oligonucleotide; TAG chr2 60539911 60539930 60539927 +
tttaaggatgcccatttacc

SEQ ID NO: 168526 - DNA, 20 bp, Artificial Sequence
  Synthetic oligonucleotide; AGG chr2 60539912 60539931 60539928 +
ttaaggatgcccatttacct

SEQ ID NO: 168527 - DNA, 20 bp, Artificial Sequence
  Synthetic oligonucleotide; TAG chr2 60539915 60539934 60539931 +
aggatgcccatttacctagg

SEQ ID NO: 168528 - DNA, 20 bp, Artificial Sequence
  Synthetic oligonucleotide; AGG chr2 60539916 60539935 60539932 +
ggatgcccatttacctaggt

SEQ ID NO: 168529 - DNA, 20 bp, Artificial Sequence
  Synthetic oligonucleotide; GAG chr2 60539918 60539937 60539934 +
atgcccatttacctaggtag

SEQ ID NO: 168530 - DNA, 20 bp, Artificial Sequence
  Synthetic oligonucleotide; AAG chr2 60539923 60539942 60539939 +
catttacctaggtaggagaa

SEQ ID NO: 168531 - DNA, 20 bp, Artificial Sequence
  Synthetic oligonucleotide; AAG chr2 60539930 60539949 60539946 +
ctaggtaggagaaaagaacc

SEQ ID NO: 168532 - DNA, 20 bp, Artificial Sequence
  Synthetic oligonucleotide; AGG chr2 60539931 60539950 60539947 +
taggtaggagaaaagaacca

SEQ ID NO: 168533 - DNA, 20 bp, Artificial Sequence
  Synthetic oligonucleotide; GAG chr2 60539933 60539952 60539949 +
ggtaggagaaaagaaccaag

SEQ ID NO: 168534 - DNA, 20 bp, Artificial Sequence
  Synthetic oligonucleotide; AGG chr2 60539934 60539953 60539950 +
gtaggagaaaagaaccaagg

SEQ ID NO: 168535 - DNA, 20 bp, Artificial Sequence
  Synthetic oligonucleotide; GGG chr2 60539935 60539954 60539951 +
taggagaaaagaaccaagga

SEQ ID NO: 168536 - DNA, 20 bp, Artificial Sequence
  Synthetic oligonucleotide; GAG chr2 60539937 60539956 60539953 +
ggagaaaagaaccaaggagg

SEQ ID NO: 168537 - DNA, 20 bp, Artificial Sequence
  Synthetic oligonucleotide; AGG chr2 60539938 60539957 60539954 +
gagaaaagaaccaaggaggg

SEQ ID NO: 168538 - DNA, 20 bp, Artificial Sequence
  Synthetic oligonucleotide; GGG chr2 60539939 60539958 60539955 +
agaaaagaaccaaggaggga

SEQ ID NO: 168539 - DNA, 20 bp, Artificial Sequence
  Synthetic oligonucleotide; GAG chr2 60539941 60539960 60539957 +
aaaagaaccaaggagggagg

SEQ ID NO: 168540 - DNA, 20 bp, Artificial Sequence
  Synthetic oligonucleotide; CAG chr2 60539948 60539967 60539964 +
ccaaggagggagggagacaa

SEQ ID NO: 168541 - DNA, 20 bp, Artificial Sequence
  Synthetic oligonucleotide; TAG chr2 60539981 60540000 60539997 +
atttgtattacaaataaaaa

SEQ ID NO: 168542 - DNA, 20 bp, Artificial Sequence
  Synthetic oligonucleotide; TAG chr2 60539984 60540003 60540000 +
tgtattacaaataaaaatag

SEQ ID NO: 168543 - DNA, 20 bp, Artificial Sequence
  Synthetic oligonucleotide; TAG chr2 60540007 60540026 60540023 +
tcattatccattaaattata

SEQ ID NO: 168544 - DNA, 20 bp, Artificial Sequence
  Synthetic oligonucleotide; AAG chr2 60540093 60540112 60540109 +
ttgatttgaaataatgttaa

SEQ ID NO: 168545 - DNA, 20 bp, Artificial Sequence
  Synthetic oligonucleotide; TGG chr2 60540096 60540115 60540112 +
atttgaaataatgttaaaag

SEQ ID NO: 168546 - DNA, 20 bp, Artificial Sequence
  Synthetic oligonucleotide; GGG chr2 60540097 60540116 60540113 +
tttgaaataatgttaaaagt

SEQ ID NO: 168547 - DNA, 20 bp, Artificial Sequence
  Synthetic oligonucleotide; AAG chr2 60540104 60540123 60540120 +
taatgttaaaagtgggctct

SEQ ID NO: 168548 - DNA, 20 bp, Artificial Sequence
  Synthetic oligonucleotide; TAG chr2 60540108 60540127 60540124 +
gttaaaagtgggctctaagt

SEQ ID NO: 168549 - DNA, 20 bp, Artificial Sequence
  Synthetic oligonucleotide; TAG chr2 60540152 60540171 60540168 +
aaataacaacactgctgaca

SEQ ID NO: 168550 - DNA, 20 bp, Artificial Sequence
  Synthetic oligonucleotide; AAG chr2 60540179 60540198 60540195 +
gacccaaatgaaatctgaac

SEQ ID NO: 168551 - DNA, 20 bp, Artificial Sequence
  Synthetic oligonucleotide; CAG chr2 60540182 60540201 60540198 +
ccaaatgaaatctgaacaag

SEQ ID NO: 168552 - DNA, 20 bp, Artificial Sequence
  Synthetic oligonucleotide; AAG chr2 60540186 60540205 60540202 +
atgaaatctgaacaagcaga

SEQ ID NO: 168553 - DNA, 20 bp, Artificial Sequence
  Synthetic oligonucleotide; AGG chr2 60540187 60540206 60540203 +
tgaaatctgaacaagcagaa

SEQ ID NO: 168554 - DNA, 20 bp, Artificial Sequence
  Synthetic oligonucleotide; AAG chr2 60540195 60540214 60540211 +
gaacaagcagaaaggtacta

SEQ ID NO: 168555 - DNA, 20 bp, Artificial Sequence
  Synthetic oligonucleotide; TGG chr2 60540203 60540222 60540219 +
agaaaggtactaaagatgct

SEQ ID NO: 168556 - DNA, 20 bp, Artificial Sequence
  Synthetic oligonucleotide; AAG chr2 60540227 60540246 60540243 +
gattaaatctcatgctaaaa

SEQ ID NO: 168557 - DNA, 20 bp, Artificial Sequence
  Synthetic oligonucleotide; TGG chr2 60540230 60540249 60540246 +
taaatctcatgctaaaaaag

SEQ ID NO: 168558 - DNA, 20 bp, Artificial Sequence
  Synthetic oligonucleotide; AAG chr2 60540234 60540253 60540250 +
tctcatgctaaaaaagtggc

SEQ ID NO: 168559 - DNA, 20 bp, Artificial Sequence
  Synthetic oligonucleotide; AGG chr2 60540235 60540254 60540251 +
ctcatgctaaaaaagtggca

SEQ ID NO: 168560 - DNA, 20 bp, Artificial Sequence
  Synthetic oligonucleotide; CAG chr2 60540241 60540260 60540257 +
ctaaaaaagtggcaaggtgc

SEQ ID NO: 168561 - DNA, 20 bp, Artificial Sequence
  Synthetic oligonucleotide; AGG chr2 60540242 60540261 60540258 +
taaaaaagtggcaaggtgcc

SEQ ID NO: 168562 - DNA, 20 bp, Artificial Sequence
  Synthetic oligonucleotide; TGG chr2 60540246 60540265 60540262 +
aaagtggcaaggtgccaggc

SEQ ID NO: 168563 - DNA, 20 bp, Artificial Sequence
  Synthetic oligonucleotide; GGG chr2 60540247 60540266 60540263 +
aagtggcaaggtgccaggct

SEQ ID NO: 168564 - DNA, 20 bp, Artificial Sequence
  Synthetic oligonucleotide; CAG chr2 60540252 60540271 60540268 +
gcaaggtgccaggctgggtc

SEQ ID NO: 168565 - DNA, 20 bp, Artificial Sequence
  Synthetic oligonucleotide; AAG chr2 60540264 60540283 60540280 +
gctgggtccagcttgatgct

SEQ ID NO: 168566 - DNA, 20 bp, Artificial Sequence
  Synthetic oligonucleotide; AAG chr2 60540283 60540302 60540299 +
taagtgctttttattgcaca

SEQ ID NO: 168567 - DNA, 20 bp, Artificial Sequence
  Synthetic oligonucleotide; TGG chr2 60540287 60540306 60540303 +
tgctttttattgcacaaagc

SEQ ID NO: 168568 - DNA, 20 bp, Artificial Sequence
  Synthetic oligonucleotide; CAG chr2 60540308 60540327 60540324 +
ggtactactgtatgtaaaaa

SEQ ID NO: 168569 - DNA, 20 bp, Artificial Sequence
  Synthetic oligonucleotide; TGG chr2 60540314 60540333 60540330 +
actgtatgtaaaaacagact

SEQ ID NO: 168570 - DNA, 20 bp, Artificial Sequence
  Synthetic oligonucleotide; GGG chr2 60540315 60540334 60540331 +
ctgtatgtaaaaacagactt

SEQ ID NO: 168571 - DNA, 20 bp, Artificial Sequence
  Synthetic oligonucleotide; TGG chr2 60540320 60540339 60540336 +
tgtaaaaacagacttgggct

SEQ ID NO: 168572 - DNA, 20 bp, Artificial Sequence
  Synthetic oligonucleotide; GGG chr2 60540321 60540340 60540337 +
gtaaaaacagacttgggctt

SEQ ID NO: 168573 - DNA, 20 bp, Artificial Sequence
  Synthetic oligonucleotide; GGG chr2 60540322 60540341 60540338 +
taaaaacagacttgggcttg

SEQ ID NO: 168574 - DNA, 20 bp, Artificial Sequence
  Synthetic oligonucleotide; AAG chr2 60540357 60540376 60540373 +
aatgacttctttgtgcaata

SEQ ID NO: 168575 - DNA, 20 bp, Artificial Sequence
  Synthetic oligonucleotide; AGG chr2 60540358 60540377 60540374 +
atgacttctttgtgcaataa

SEQ ID NO: 168576 - DNA, 20 bp, Artificial Sequence
  Synthetic oligonucleotide; GGG chr2 60540359 60540378 60540375 +
tgacttctttgtgcaataaa

SEQ ID NO: 168577 - DNA, 20 bp, Artificial Sequence
  Synthetic oligonucleotide; CAG chr2 60540368 60540387 60540384 +
tgtgcaataaagggtgtgaa

SEQ ID NO: 168578 - DNA, 20 bp, Artificial Sequence
  Synthetic oligonucleotide; AAG chr2 60540379 60540398 60540395 +
gggtgtgaacagaccaacca

SEQ ID NO: 168579 - DNA, 20 bp, Artificial Sequence
  Synthetic oligonucleotide; TAG chr2 60540382 60540401 60540398 +
tgtgaacagaccaaccaaag

SEQ ID NO: 168580 - DNA, 20 bp, Artificial Sequence
  Synthetic oligonucleotide; CAG chr2 60540399 60540418 60540415 +
aagtagattaaattaacatc

SEQ ID NO: 168581 - DNA, 20 bp, Artificial Sequence
  Synthetic oligonucleotide; TGG chr2 60540413 60540432 60540429 +
aacatccagtgacgcaatct

SEQ ID NO: 168582 - DNA, 20 bp, Artificial Sequence
  Synthetic oligonucleotide; TAG chr2 60540426 60540445 60540442 +
gcaatcttggtgcatctccc

SEQ ID NO: 168583 - DNA, 20 bp, Artificial Sequence
  Synthetic oligonucleotide; CGG chr2 60540444 60540463 60540460 +
cctagctgtgctttctactt

SEQ ID NO: 168584 - DNA, 20 bp, Artificial Sequence
  Synthetic oligonucleotide; AAG chr2 60540469 60540488 60540485 +
aaatttaatatttcccccca

SEQ ID NO: 168585 - DNA, 20 bp, Artificial Sequence
  Synthetic oligonucleotide; AGG chr2 60540470 60540489 60540486 +
aatttaatatttccccccaa

SEQ ID NO: 168586 - DNA, 20 bp, Artificial Sequence
  Synthetic oligonucleotide; AAG chr2 60540474 60540493 60540490 +
taatatttccccccaaagga

SEQ ID NO: 168587 - DNA, 20 bp, Artificial Sequence
  Synthetic oligonucleotide; CAG chr2 60540504 60540523 60540520 +
ttgtttcctttcttactgac

SEQ ID NO: 168588 - DNA, 20 bp, Artificial Sequence
  Synthetic oligonucleotide; AAG chr2 60540513 60540532 60540529 +
ttcttactgaccagcacgca

SEQ ID NO: 168589 - DNA, 20 bp, Artificial Sequence
  Synthetic oligonucleotide; GAG chr2 60540555 60540574 60540571 +
ctttattaaacattttcatt

SEQ ID NO: 168590 - DNA, 20 bp, Artificial Sequence
  Synthetic oligonucleotide; TAG chr2 60540587 60540606 60540603 +
aaatctaaaaaatgtttccc

SEQ ID NO: 168591 - DNA, 20 bp, Artificial Sequence
  Synthetic oligonucleotide; AGG chr2 60540588 60540607 60540604 +
aatctaaaaaatgtttccct

SEQ ID NO: 168592 - DNA, 20 bp, Artificial Sequence
  Synthetic oligonucleotide; TAG chr2 60540619 60540638 60540635 +
gttttttatgtaccccaatt

SEQ ID NO: 168593 - DNA, 20 bp, Artificial Sequence
  Synthetic oligonucleotide; TAG chr2 60540633 60540652 60540649 +
ccaatttagtactcccacat

SEQ ID NO: 168594 - DNA, 20 bp, Artificial Sequence
  Synthetic oligonucleotide; TGG chr2 60540646 60540665 60540662 +
cccacattagccaaactaca

SEQ ID NO: 168595 - DNA, 20 bp, Artificial Sequence
  Synthetic oligonucleotide; AAG chr2 60540649 60540668 60540665 +
acattagccaaactacatgg

SEQ ID NO: 168596 - DNA, 20 bp, Artificial Sequence
  Synthetic oligonucleotide; CAG chr2 60540655 60540674 60540671 +
gccaaactacatggaagctg

SEQ ID NO: 168597 - DNA, 20 bp, Artificial Sequence
  Synthetic oligonucleotide; CAG chr2 60540677 60540696 60540693 +
gtgtgaaattaatgattttc

SEQ ID NO: 168598 - DNA, 20 bp, Artificial Sequence
  Synthetic oligonucleotide; AGG chr2 60540678 60540697 60540694 +
tgtgaaattaatgattttcc

SEQ ID NO: 168599 - DNA, 20 bp, Artificial Sequence
  Synthetic oligonucleotide; AAG chr2 60540688 60540707 60540704 +
atgattttccaggactctaa

SEQ ID NO: 168600 - DNA, 20 bp, Artificial Sequence
  Synthetic oligonucleotide; AAG chr2 60540702 60540721 60540718 +
ctctaaaagatgccattaat

SEQ ID NO: 168601 - DNA, 20 bp, Artificial Sequence
  Synthetic oligonucleotide; GAG chr2 60540726 60540745 60540742 +
atccaactcgcctcctccct

SEQ ID NO: 168602 - DNA, 20 bp, Artificial Sequence
  Synthetic oligonucleotide; AAG chr2 60540732 60540751 60540748 +
ctcgcctcctccctgagctg

SEQ ID NO: 168603 - DNA, 20 bp, Artificial Sequence
  Synthetic oligonucleotide; AGG chr2 60540733 60540752 60540749 +
tcgcctcctccctgagctga

SEQ ID NO: 168604 - DNA, 20 bp, Artificial Sequence
  Synthetic oligonucleotide; CAG chr2 60540772 60540791 60540788 +
tgcctgcacgtttctacacc

SEQ ID NO: 168605 - DNA, 20 bp, Artificial Sequence
  Synthetic oligonucleotide; CAG chr2 60540785 60540804 60540801 +
ctacacccagttgcattttc

SEQ ID NO: 168606 - DNA, 20 bp, Artificial Sequence
  Synthetic oligonucleotide; CAG chr2 60540796 60540815 60540812 +
tgcattttccagcccatgtg

SEQ ID NO: 168607 - DNA, 20 bp, Artificial Sequence
  Synthetic oligonucleotide; AAG chr2 60540825 60540844 60540841 +
aattatatgccacattcact

SEQ ID NO: 168608 - DNA, 20 bp, Artificial Sequence
  Synthetic oligonucleotide; GAG chr2 60540827 60540846 60540843 +
ttatatgccacattcactaa

SEQ ID NO: 168609 - DNA, 20 bp, Artificial Sequence
  Synthetic oligonucleotide; AAG chr2 60540831 60540850 60540847 +
atgccacattcactaagaga

SEQ ID NO: 168610 - DNA, 20 bp, Artificial Sequence
  Synthetic oligonucleotide; AGG chr2 60540832 60540851 60540848 +
tgccacattcactaagagaa

SEQ ID NO: 168611 - DNA, 20 bp, Artificial Sequence
  Synthetic oligonucleotide; CAG chr2 60540851 60540870 60540867 +
aaggtgtgcaaaacatattt

SEQ ID NO: 168612 - DNA, 20 bp, Artificial Sequence
  Synthetic oligonucleotide; TAG chr2 60540862 60540881 60540878 +
aacatatttcagatccttta

SEQ ID NO: 168613 - DNA, 20 bp, Artificial Sequence
  Synthetic oligonucleotide; AAG chr2 60540867 60540886 60540883 +
atttcagatcctttatagta

SEQ ID NO: 168614 - DNA, 20 bp, Artificial Sequence
  Synthetic oligonucleotide; AGG chr2 60540868 60540887 60540884 +
tttcagatcctttatagtaa

SEQ ID NO: 168615 - DNA, 20 bp, Artificial Sequence
  Synthetic oligonucleotide; AAG chr2 60540889 60540908 60540905 +
ggcacaacttgcaacacaac

SEQ ID NO: 168616 - DNA, 20 bp, Artificial Sequence
  Synthetic oligonucleotide; AGG chr2 60540890 60540909 60540906 +
gcacaacttgcaacacaaca

SEQ ID NO: 168617 - DNA, 20 bp, Artificial Sequence
  Synthetic oligonucleotide; TGG chr2 60540895 60540914 60540911 +
acttgcaacacaacaaggaa

SEQ ID NO: 168618 - DNA, 20 bp, Artificial Sequence
  Synthetic oligonucleotide; GGG chr2 60540896 60540915 60540912 +
cttgcaacacaacaaggaat

SEQ ID NO: 168619 - DNA, 20 bp, Artificial Sequence
  Synthetic oligonucleotide; GGG chr2 60540897 60540916 60540913 +
ttgcaacacaacaaggaatg

SEQ ID NO: 168620 - DNA, 20 bp, Artificial Sequence
  Synthetic oligonucleotide; AAG chr2 60540906 60540925 60540922 +
aacaaggaatggggtgattt

SEQ ID NO: 168621 - DNA, 20 bp, Artificial Sequence
  Synthetic oligonucleotide; CAG chr2 60540915 60540934 60540931 +
tggggtgatttaagaaatta

SEQ ID NO: 168622 - DNA, 20 bp, Artificial Sequence
  Synthetic oligonucleotide; TGG chr2 60540921 60540940 60540937 +
gatttaagaaattacagcac

SEQ ID NO: 168623 - DNA, 20 bp, Artificial Sequence
  Synthetic oligonucleotide; TGG chr2 60540971 60540990 60540987 +
tgtgtgtgtgtgtgtgtgtg

SEQ ID NO: 168624 - DNA, 20 bp, Artificial Sequence
  Synthetic oligonucleotide; AAG chr2 60540997 60541016 60541013 +
ttttgtttttttgttttttt

SEQ ID NO: 168625 - DNA, 20 bp, Artificial Sequence
  Synthetic oligonucleotide; CAG chr2 60541006 60541025 60541022 +
tttgtttttttaagctttca

SEQ ID NO: 168626 - DNA, 20 bp, Artificial Sequence
  Synthetic oligonucleotide; CAG chr2 60541017 60541036 60541033 +
aagctttcacagaataaaca

SEQ ID NO: 168627 - DNA, 20 bp, Artificial Sequence
  Synthetic oligonucleotide; GAG chr2 60541019 60541038 60541035 +
gctttcacagaataaacaca

SEQ ID NO: 168628 - DNA, 20 bp, Artificial Sequence
  Synthetic oligonucleotide; CGG chr2 60541024 60541043 60541040 +
cacagaataaacacagagaa

SEQ ID NO: 168629 - DNA, 20 bp, Artificial Sequence
  Synthetic oligonucleotide; GGG chr2 60541025 60541044 60541041 +
acagaataaacacagagaac

SEQ ID NO: 168630 - DNA, 20 bp, Artificial Sequence
  Synthetic oligonucleotide; GAG chr2 60541027 60541046 60541043 +
agaataaacacagagaacgg

SEQ ID NO: 168631 - DNA, 20 bp, Artificial Sequence
  Synthetic oligonucleotide; AGG chr2 60541028 60541047 60541044 +
gaataaacacagagaacggg

SEQ ID NO: 168632 - DNA, 20 bp, Artificial Sequence
  Synthetic oligonucleotide; GGG chr2 60541029 60541048 60541045 +
aataaacacagagaacggga

SEQ ID NO: 168633 - DNA, 20 bp, Artificial Sequence
  Synthetic oligonucleotide; AAG chr2 60541062 60541081 60541078 +
cccctctgctcctgttcttg

SEQ ID NO: 168634 - DNA, 20 bp, Artificial Sequence
  Synthetic oligonucleotide; AAG chr2 60541091 60541110 60541107 +
catatttgtgtttccaataa

SEQ ID NO: 168635 - DNA, 20 bp, Artificial Sequence
  Synthetic oligonucleotide; AGG chr2 60541092 60541111 60541108 +
atatttgtgtttccaataaa

SEQ ID NO: 168636 - DNA, 20 bp, Artificial Sequence
  Synthetic oligonucleotide; CAG chr2 60541120 60541139 60541136 +
tttacattaactgtctgtaa

SEQ ID NO: 168637 - DNA, 20 bp, Artificial Sequence
  Synthetic oligonucleotide; CAG chr2 60541123 60541142 60541139 +
acattaactgtctgtaacag

SEQ ID NO: 168638 - DNA, 20 bp, Artificial Sequence
  Synthetic oligonucleotide; AGG chr2 60541124 60541143 60541140 +
cattaactgtctgtaacagc

SEQ ID NO: 168639 - DNA, 20 bp, Artificial Sequence
  Synthetic oligonucleotide; GAG chr2 60541126 60541145 60541142 +
ttaactgtctgtaacagcag

SEQ ID NO: 168640 - DNA, 20 bp, Artificial Sequence
  Synthetic oligonucleotide; CAG chr2 60541130 60541149 60541146 +
ctgtctgtaacagcaggaga

SEQ ID NO: 168641 - DNA, 20 bp, Artificial Sequence
  Synthetic oligonucleotide; CAG chr2 60541162 60541181 60541178 +
cacaatctccacatcacaca

SEQ ID NO: 168642 - DNA, 20 bp, Artificial Sequence
  Synthetic oligonucleotide; AGG chr2 60541163 60541182 60541179 +
acaatctccacatcacacac

SEQ ID NO: 168643 - DNA, 20 bp, Artificial Sequence
  Synthetic oligonucleotide; TGG chr2 60541183 60541202 60541199 +
aggatgatcttcatatcacg

SEQ ID NO: 168644 - DNA, 20 bp, Artificial Sequence
  Synthetic oligonucleotide; AAG chr2 60541212 60541231 60541228 +
tctcaaaacattatttataa

SEQ ID NO: 168645 - DNA, 20 bp, Artificial Sequence
  Synthetic oligonucleotide; TAG chr2 60541220 60541239 60541236 +
cattatttataaaagatgac

SEQ ID NO: 168646 - DNA, 20 bp, Artificial Sequence
  Synthetic oligonucleotide; AGG chr2 60541221 60541240 60541237 +
attatttataaaagatgact

SEQ ID NO: 168647 - DNA, 20 bp, Artificial Sequence
  Synthetic oligonucleotide; AAG chr2 60541257 60541276 60541273 +
catcttttctgtgtcaccac

SEQ ID NO: 168648 - DNA, 20 bp, Artificial Sequence
  Synthetic oligonucleotide; AGG chr2 60541258 60541277 60541274 +
atcttttctgtgtcaccaca

SEQ ID NO: 168649 - DNA, 20 bp, Artificial Sequence
  Synthetic oligonucleotide; GGG chr2 60541259 60541278 60541275 +
tcttttctgtgtcaccacaa

SEQ ID NO: 168650 - DNA, 20 bp, Artificial Sequence
  Synthetic oligonucleotide; AAG chr2 60541271 60541290 60541287 +
caccacaagggtaatgtctg

SEQ ID NO: 168651 - DNA, 20 bp, Artificial Sequence
  Synthetic oligonucleotide; AAG chr2 60541274 60541293 60541290 +
cacaagggtaatgtctgaag

SEQ ID NO: 168652 - DNA, 20 bp, Artificial Sequence
  Synthetic oligonucleotide; TGG chr2 60541279 60541298 60541295 +
gggtaatgtctgaagaagtt

SEQ ID NO: 168653 - DNA, 20 bp, Artificial Sequence
  Synthetic oligonucleotide; GGG chr2 60541280 60541299 60541296 +
ggtaatgtctgaagaagttt

SEQ ID NO: 168654 - DNA, 20 bp, Artificial Sequence
  Synthetic oligonucleotide; TAG chr2 60541288 60541307 60541304 +
ctgaagaagtttgggatctt

SEQ ID NO: 168655 - DNA, 20 bp, Artificial Sequence
  Synthetic oligonucleotide; AGG chr2 60541289 60541308 60541305 +
tgaagaagtttgggatcttt

SEQ ID NO: 168656 - DNA, 20 bp, Artificial Sequence
  Synthetic oligonucleotide; TAG chr2 60541305 60541324 60541321 +
ctttaggatcttctacattt

SEQ ID NO: 168657 - DNA, 20 bp, Artificial Sequence
  Synthetic oligonucleotide; TGG chr2 60541328 60541347 60541344 +
atatattttttttttccttt

SEQ ID NO: 168658 - DNA, 20 bp, Artificial Sequence
  Synthetic oligonucleotide; TAG chr2 60541338 60541357 60541354 +
tttttccttttggctttcct

SEQ ID NO: 168659 - DNA, 20 bp, Artificial Sequence
  Synthetic oligonucleotide; AAG chr2 60541342 60541361 60541358 +
tccttttggctttccttagt

SEQ ID NO: 168660 - DNA, 20 bp, Artificial Sequence
  Synthetic oligonucleotide; TAG chr2 60541347 60541366 60541363 +
ttggctttccttagtaagtt

SEQ ID NO: 168661 - DNA, 20 bp, Artificial Sequence
  Synthetic oligonucleotide; CAG chr2 60541350 60541369 60541366 +
gctttccttagtaagtttag

SEQ ID NO: 168662 - DNA, 20 bp, Artificial Sequence
  Synthetic oligonucleotide; CGG chr2 60541358 60541377 60541374 +
tagtaagtttagcagccatg

SEQ ID NO: 168663 - DNA, 20 bp, Artificial Sequence
  Synthetic oligonucleotide; GGG chr2 60541359 60541378 60541375 +
agtaagtttagcagccatgc

SEQ ID NO: 168664 - DNA, 20 bp, Artificial Sequence
  Synthetic oligonucleotide; AAG chr2 60541377 60541396 60541393 +
gcgggccactgtgtttaatt

SEQ ID NO: 168665 - DNA, 20 bp, Artificial Sequence
  Synthetic oligonucleotide; AAG chr2 60541387 60541406 60541403 +
gtgtttaattaagctttcaa

SEQ ID NO: 168666 - DNA, 20 bp, Artificial Sequence
  Synthetic oligonucleotide; TAG chr2 60541411 60541430 60541427 +
cctgacaatgccaacaattg

SEQ ID NO: 168667 - DNA, 20 bp, Artificial Sequence
  Synthetic oligonucleotide; AGG chr2 60541412 60541431 60541428 +
ctgacaatgccaacaattgt

SEQ ID NO: 168668 - DNA, 20 bp, Artificial Sequence
  Synthetic oligonucleotide; CGG chr2 60541424 60541443 60541440 +
acaattgtaggacacttctg

SEQ ID NO: 168669 - DNA, 20 bp, Artificial Sequence
  Synthetic oligonucleotide; CAG chr2 60541449 60541468 60541465 +
caatcatgcaatcactgtga

SEQ ID NO: 168670 - DNA, 20 bp, Artificial Sequence
  Synthetic oligonucleotide; TAG chr2 60541471 60541490 60541487 +
gttctatttacaatttgtct

SEQ ID NO: 168671 - DNA, 20 bp, Artificial Sequence
  Synthetic oligonucleotide; AAG chr2 60541475 60541494 60541491 +
tatttacaatttgtcttaga

SEQ ID NO: 168672 - DNA, 20 bp, Artificial Sequence
  Synthetic oligonucleotide; GAG chr2 60541477 60541496 60541493 +
tttacaatttgtcttagaaa

SEQ ID NO: 168673 - DNA, 20 bp, Artificial Sequence
  Synthetic oligonucleotide; AAG chr2 60541512 60541531 60541528 +
tgtactttgacaaaacatcc

SEQ ID NO: 168674 - DNA, 20 bp, Artificial Sequence
  Synthetic oligonucleotide; CAG chr2 60541519 60541538 60541535 +
tgacaaaacatccaagctgc

SEQ ID NO: 168675 - DNA, 20 bp, Artificial Sequence
  Synthetic oligonucleotide; CAG chr2 60541554 60541573 60541570 +
ctctgtcttatttacaaata

SEQ ID NO: 168676 - DNA, 20 bp, Artificial Sequence
  Synthetic oligonucleotide; TAG chr2 60541565 60541584 60541581 +
ttacaaatacagcttgtata

SEQ ID NO: 168677 - DNA, 20 bp, Artificial Sequence
  Synthetic oligonucleotide; AGG chr2 60541566 60541585 60541582 +
tacaaatacagcttgtatat

SEQ ID NO: 168678 - DNA, 20 bp, Artificial Sequence
  Synthetic oligonucleotide; CAG chr2 60541574 60541593 60541590 +
cagcttgtatataggactcc

SEQ ID NO: 168679 - DNA, 20 bp, Artificial Sequence
  Synthetic oligonucleotide; TAG chr2 60541589 60541608 60541605 +
actcccagtttcatgaacat

SEQ ID NO: 168680 - DNA, 20 bp, Artificial Sequence
  Synthetic oligonucleotide; TGG chr2 60541596 60541615 60541612 +
gtttcatgaacattagtctt

SEQ ID NO: 168681 - DNA, 20 bp, Artificial Sequence
  Synthetic oligonucleotide; TAG chr2 60541600 60541619 60541616 +
catgaacattagtctttgga

SEQ ID NO: 168682 - DNA, 20 bp, Artificial Sequence
  Synthetic oligonucleotide; TGG chr2 60541603 60541622 60541619 +
gaacattagtctttggatag

SEQ ID NO: 168683 - DNA, 20 bp, Artificial Sequence
  Synthetic oligonucleotide; TAG chr2 60541617 60541636 60541633 +
ggatagtggcctcacaaaca

SEQ ID NO: 168684 - DNA, 20 bp, Artificial Sequence
  Synthetic oligonucleotide; AGG chr2 60541618 60541637 60541634 +
gatagtggcctcacaaacat

SEQ ID NO: 168685 - DNA, 20 bp, Artificial Sequence
  Synthetic oligonucleotide; TAG chr2 60541637 60541656 60541653 +
taggctccctatgaaaatcc

SEQ ID NO: 168686 - DNA, 20 bp, Artificial Sequence
  Synthetic oligonucleotide; AGG chr2 60541638 60541657 60541654 +
aggctccctatgaaaatcct

SEQ ID NO: 168687 - DNA, 20 bp, Artificial Sequence
  Synthetic oligonucleotide; TAG chr2 60541648 60541667 60541664 +
tgaaaatcctaggtacttat

SEQ ID NO: 168688 - DNA, 20 bp, Artificial Sequence
  Synthetic oligonucleotide; TGG chr2 60541672 60541691 60541688 +
aaacaatattctctactctc

SEQ ID NO: 168689 - DNA, 20 bp, Artificial Sequence
  Synthetic oligonucleotide; AAG chr2 60541681 60541700 60541697 +
tctctactctctggattttg

SEQ ID NO: 168690 - DNA, 20 bp, Artificial Sequence
  Synthetic oligonucleotide; AGG chr2 60541682 60541701 60541698 +
ctctactctctggattttga

SEQ ID NO: 168691 - DNA, 20 bp, Artificial Sequence
  Synthetic oligonucleotide; AAG chr2 60541686 60541705 60541702 +
actctctggattttgaaggt

SEQ ID NO: 168692 - DNA, 20 bp, Artificial Sequence
  Synthetic oligonucleotide; CAG chr2 60541701 60541720 60541717 +
aaggtaagtaaaatgttcac

SEQ ID NO: 168693 - DNA, 20 bp, Artificial Sequence
  Synthetic oligonucleotide; TGG chr2 60541718 60541737 60541734 +
caccagtatattgttttttg

SEQ ID NO: 168694 - DNA, 20 bp, Artificial Sequence
  Synthetic oligonucleotide; TAG chr2 60541721 60541740 60541737 +
cagtatattgttttttgtgg

SEQ ID NO: 168695 - DNA, 20 bp, Artificial Sequence
  Synthetic oligonucleotide; TGG chr2 60541724 60541743 60541740 +
tatattgttttttgtggtag

SEQ ID NO: 168696 - DNA, 20 bp, Artificial Sequence
  Synthetic oligonucleotide; CAG chr2 60541765 60541784 60541781 +
gccatgctgaaaattcactt

SEQ ID NO: 168697 - DNA, 20 bp, Artificial Sequence
  Synthetic oligonucleotide; AAG chr2 60541768 60541787 60541784 +
atgctgaaaattcacttcag

SEQ ID NO: 168698 - DNA, 20 bp, Artificial Sequence
  Synthetic oligonucleotide; CAG chr2 60541772 60541791 60541788 +
tgaaaattcacttcagaagt

SEQ ID NO: 168699 - DNA, 20 bp, Artificial Sequence
  Synthetic oligonucleotide; CAG chr2 60541786 60541805 60541802 +
agaagtcagtcgtttttatt

SEQ ID NO: 168700 - DNA, 20 bp, Artificial Sequence
  Synthetic oligonucleotide; AAG chr2 60541802 60541821 60541818 +
tattcagaatcacataaata

SEQ ID NO: 168701 - DNA, 20 bp, Artificial Sequence
  Synthetic oligonucleotide; GAG chr2 60541804 60541823 60541820 +
ttcagaatcacataaataaa

SEQ ID NO: 168702 - DNA, 20 bp, Artificial Sequence
  Synthetic oligonucleotide; AAG chr2 60541809 60541828 60541825 +
aatcacataaataaagagaa

SEQ ID NO: 168703 - DNA, 20 bp, Artificial Sequence
  Synthetic oligonucleotide; AAG chr2 60541818 60541837 60541834 +
aataaagagaaaagaaaaat

SEQ ID NO: 168704 - DNA, 20 bp, Artificial Sequence
  Synthetic oligonucleotide; TAG chr2 60541821 60541840 60541837 +
aaagagaaaagaaaaataag

SEQ ID NO: 168705 - DNA, 20 bp, Artificial Sequence
  Synthetic oligonucleotide; TAG chr2 60541830 60541849 60541846 +
agaaaaataagtagtcataa

SEQ ID NO: 168706 - DNA, 20 bp, Artificial Sequence
  Synthetic oligonucleotide; TAG chr2 60541847 60541866 60541863 +
taatagcatactataattta

SEQ ID NO: 168707 - DNA, 20 bp, Artificial Sequence
  Synthetic oligonucleotide; AAG chr2 60541871 60541890 60541887 +
ctcatttacaattacaccat

SEQ ID NO: 168708 - DNA, 20 bp, Artificial Sequence
  Synthetic oligonucleotide; AGG chr2 60541872 60541891 60541888 +
tcatttacaattacaccata

SEQ ID NO: 168709 - DNA, 20 bp, Artificial Sequence
  Synthetic oligonucleotide; CAG chr2 60541892 60541911 60541908 +
aggtacacaaatacatcctc

SEQ ID NO: 168710 - DNA, 20 bp, Artificial Sequence
  Synthetic oligonucleotide; CAG chr2 60541897 60541916 60541913 +
cacaaatacatcctccagtt

SEQ ID NO: 168711 - DNA, 20 bp, Artificial Sequence
  Synthetic oligonucleotide; GAG chr2 60541903 60541922 60541919 +
tacatcctccagttcagtct

SEQ ID NO: 168712 - DNA, 20 bp, Artificial Sequence
  Synthetic oligonucleotide; TAG chr2 60541907 60541926 60541923 +
tcctccagttcagtctgagc

SEQ ID NO: 168713 - DNA, 20 bp, Artificial Sequence
  Synthetic oligonucleotide; AGG chr2 60541908 60541927 60541924 +
cctccagttcagtctgagct

SEQ ID NO: 168714 - DNA, 20 bp, Artificial Sequence
  Synthetic oligonucleotide; GAG chr2 60541910 60541929 60541926 +
tccagttcagtctgagctag

SEQ ID NO: 168715 - DNA, 20 bp, Artificial Sequence
  Synthetic oligonucleotide; GAG chr2 60541912 60541931 60541928 +
cagttcagtctgagctagga

SEQ ID NO: 168716 - DNA, 20 bp, Artificial Sequence
  Synthetic oligonucleotide; CAG chr2 60541918 60541937 60541934 +
agtctgagctaggagagaat

SEQ ID NO: 168717 - DNA, 20 bp, Artificial Sequence
  Synthetic oligonucleotide; TGG chr2 60541923 60541942 60541939 +
gagctaggagagaatcagaa

SEQ ID NO: 168718 - DNA, 20 bp, Artificial Sequence
  Synthetic oligonucleotide; AAG chr2 60541933 60541952 60541949 +
agaatcagaatggatacaaa

SEQ ID NO: 168719 - DNA, 20 bp, Artificial Sequence
  Synthetic oligonucleotide; AAG chr2 60541938 60541957 60541954 +
cagaatggatacaaaaagaa

SEQ ID NO: 168720 - DNA, 20 bp, Artificial Sequence
  Synthetic oligonucleotide; AGG chr2 60541939 60541958 60541955 +
agaatggatacaaaaagaaa

SEQ ID NO: 168721 - DNA, 20 bp, Artificial Sequence
  Synthetic oligonucleotide; AAG chr2 60541943 60541962 60541959 +
tggatacaaaaagaaaaggt

SEQ ID NO: 168722 - DNA, 20 bp, Artificial Sequence
  Synthetic oligonucleotide; AAG chr2 60541966 60541985 60541982 +
ttcattttctaaattctgaa

SEQ ID NO: 168723 - DNA, 20 bp, Artificial Sequence
  Synthetic oligonucleotide; AAG chr2 60541992 60542011 60542008 +
attgtatttgatttactttt

SEQ ID NO: 168724 - DNA, 20 bp, Artificial Sequence
  Synthetic oligonucleotide; GAG chr2 60541994 60542013 60542010 +
tgtatttgatttacttttaa

SEQ ID NO: 168725 - DNA, 20 bp, Artificial Sequence
  Synthetic oligonucleotide; TAG chr2 60542041 60542060 60542057 +
attactatatctcccttctt

SEQ ID NO: 168726 - DNA, 20 bp, Artificial Sequence
  Synthetic oligonucleotide; GAG chr2 60542043 60542062 60542059 +
tactatatctcccttcttta

SEQ ID NO: 168727 - DNA, 20 bp, Artificial Sequence
  Synthetic oligonucleotide; CAG chr2 60542076 60542095 60542092 +
atatatcattatctaaatac

SEQ ID NO: 168728 - DNA, 20 bp, Artificial Sequence
  Synthetic oligonucleotide; TAG chr2 60542089 60542108 60542105 +
taaataccagctatactgtc

SEQ ID NO: 168729 - DNA, 20 bp, Artificial Sequence
  Synthetic oligonucleotide; AGG chr2 60542090 60542109 60542106 +
aaataccagctatactgtct

SEQ ID NO: 168730 - DNA, 20 bp, Artificial Sequence
  Synthetic oligonucleotide; AAG chr2 60542141 60542160 60542157 +
tgtctatgttcatgatttta

SEQ ID NO: 168731 - DNA, 20 bp, Artificial Sequence
  Synthetic oligonucleotide; GAG chr2 60542143 60542162 60542159 +
tctatgttcatgattttaaa

SEQ ID NO: 168732 - DNA, 20 bp, Artificial Sequence
  Synthetic oligonucleotide; CAG chr2 60542165 60542184 60542181 +
gaaaaaatgttatatatcaa

SEQ ID NO: 168733 - DNA, 20 bp, Artificial Sequence
  Synthetic oligonucleotide; AGG chr2 60542166 60542185 60542182 +
aaaaaatgttatatatcaac

SEQ ID NO: 168734 - DNA, 20 bp, Artificial Sequence
  Synthetic oligonucleotide; GAG chr2 60542168 60542187 60542184 +
aaaatgttatatatcaacag

SEQ ID NO: 168735 - DNA, 20 bp, Artificial Sequence
  Synthetic oligonucleotide; CAG chr2 60542171 60542190 60542187 +
atgttatatatcaacaggag

SEQ ID NO: 168736 - DNA, 20 bp, Artificial Sequence
  Synthetic oligonucleotide; TAG chr2 60542190 60542209 60542206 +
gcagactttactacatttta

SEQ ID NO: 168737 - DNA, 20 bp, Artificial Sequence
  Synthetic oligonucleotide; AGG chr2 60542191 60542210 60542207 +
cagactttactacattttat

SEQ ID NO: 168738 - DNA, 20 bp, Artificial Sequence
  Synthetic oligonucleotide; TAG chr2 60542213 60542232 60542229 +
gacttgtcatattttttctc

SEQ ID NO: 168739 - DNA, 20 bp, Artificial Sequence
  Synthetic oligonucleotide; AAG chr2 60542225 60542244 60542241 +
tttttctctagtctctcaaa

SEQ ID NO: 168740 - DNA, 20 bp, Artificial Sequence
  Synthetic oligonucleotide; CAG chr2 60542240 60542259 60542256 +
tcaaaaagctaactttatga

SEQ ID NO: 168741 - DNA, 20 bp, Artificial Sequence
  Synthetic oligonucleotide; AAG chr2 60542258 60542277 60542274 +
gacagcccaaacctaattta

SEQ ID NO: 168742 - DNA, 20 bp, Artificial Sequence
  Synthetic oligonucleotide; AAG chr2 60542276 60542295 60542292 +
taaagattcctatgtgcaat

SEQ ID NO: 168743 - DNA, 20 bp, Artificial Sequence
  Synthetic oligonucleotide; TGG chr2 60542302 60542321 60542318 +
aaacctcaaatctgacatga

SEQ ID NO: 168744 - DNA, 20 bp, Artificial Sequence
  Synthetic oligonucleotide; GGG chr2 60542303 60542322 60542319 +
aacctcaaatctgacatgat

SEQ ID NO: 168745 - DNA, 20 bp, Artificial Sequence
  Synthetic oligonucleotide; TGG chr2 60542314 60542333 60542330 +
tgacatgatgggataatgtt

SEQ ID NO: 168746 - DNA, 20 bp, Artificial Sequence
  Synthetic oligonucleotide; GGG chr2 60542315 60542334 60542331 +
gacatgatgggataatgttt

SEQ ID NO: 168747 - DNA, 20 bp, Artificial Sequence
  Synthetic oligonucleotide; AAG chr2 60542328 60542347 60542344 +
aatgtttgggtcttttctat

SEQ ID NO: 168748 - DNA, 20 bp, Artificial Sequence
  Synthetic oligonucleotide; AGG chr2 60542329 60542348 60542345 +
atgtttgggtcttttctata

SEQ ID NO: 168749 - DNA, 20 bp, Artificial Sequence
  Synthetic oligonucleotide; GGG chr2 60542330 60542349 60542346 +
tgtttgggtcttttctataa

SEQ ID NO: 168750 - DNA, 20 bp, Artificial Sequence
  Synthetic oligonucleotide; CAG chr2 60542335 60542354 60542351 +
gggtcttttctataagggaa

SEQ ID NO: 168751 - DNA, 20 bp, Artificial Sequence
  Synthetic oligonucleotide; CAG chr2 60542338 60542357 60542354 +
tcttttctataagggaacag

SEQ ID NO: 168752 - DNA, 20 bp, Artificial Sequence
  Synthetic oligonucleotide; CAG chr2 60542350 60542369 60542366 +
gggaacagcagtttcacatt

SEQ ID NO: 168753 - DNA, 20 bp, Artificial Sequence
  Synthetic oligonucleotide; GAG chr2 60542390 60542409 60542406 +
ttccccccatcataaaatat

SEQ ID NO: 168754 - DNA, 20 bp, Artificial Sequence
  Synthetic oligonucleotide; AAG chr2 60542403 60542422 60542419 +
aaaatatgagactaaaaaaa

SEQ ID NO: 168755 - DNA, 20 bp, Artificial Sequence
  Synthetic oligonucleotide; AAG chr2 60542435 60542454 60542451 +
caaaacaaaacccctattga

SEQ ID NO: 168756 - DNA, 20 bp, Artificial Sequence
  Synthetic oligonucleotide; AAG chr2 60542448 60542467 60542464 +
ctattgaaagctctgactgc

SEQ ID NO: 168757 - DNA, 20 bp, Artificial Sequence
  Synthetic oligonucleotide; AAG chr2 60542454 60542473 60542470 +
aaagctctgactgcaagtca

SEQ ID NO: 168758 - DNA, 20 bp, Artificial Sequence
  Synthetic oligonucleotide; AGG chr2 60542455 60542474 60542471 +
aagctctgactgcaagtcaa

SEQ ID NO: 168759 - DNA, 20 bp, Artificial Sequence
  Synthetic oligonucleotide; GAG chr2 60542470 60542489 60542486 +
gtcaaaggctgctgatatct

SEQ ID NO: 168760 - DNA, 20 bp, Artificial Sequence
  Synthetic oligonucleotide; AGG chr2 60542471 60542490 60542487 +
tcaaaggctgctgatatctg

SEQ ID NO: 168761 - DNA, 20 bp, Artificial Sequence
  Synthetic oligonucleotide; GGG chr2 60542472 60542491 60542488 +
caaaggctgctgatatctga

SEQ ID NO: 168762 - DNA, 20 bp, Artificial Sequence
  Synthetic oligonucleotide; TGG chr2 60542475 60542494 60542491 +
aggctgctgatatctgaggg

SEQ ID NO: 168763 - DNA, 20 bp, Artificial Sequence
  Synthetic oligonucleotide; TGG chr2 60542503 60542522 60542519 +
tgacacacatattgatgaac

SEQ ID NO: 168764 - DNA, 20 bp, Artificial Sequence
  Synthetic oligonucleotide; GGG chr2 60542504 60542523 60542520 +
gacacacatattgatgaact

SEQ ID NO: 168765 - DNA, 20 bp, Artificial Sequence
  Synthetic oligonucleotide; AAG chr2 60542519 60542538 60542535 +
gaactgggcccacacaacat

SEQ ID NO: 168766 - DNA, 20 bp, Artificial Sequence
  Synthetic oligonucleotide; CAG chr2 60542533 60542552 60542549 +
caacataagctgctaattcc

SEQ ID NO: 168767 - DNA, 20 bp, Artificial Sequence
  Synthetic oligonucleotide; TGG chr2 60542565 60542584 60542581 +
tactacttcaatgatctcaa

SEQ ID NO: 168768 - DNA, 20 bp, Artificial Sequence
  Synthetic oligonucleotide; AAG chr2 60542611 60542630 60542627 +
atatttaaataaaatgaaaa

SEQ ID NO: 168769 - DNA, 20 bp, Artificial Sequence
  Synthetic oligonucleotide; CAG chr2 60542638 60542657 60542654 +
ctgattaacatctatgtgta

SEQ ID NO: 168770 - DNA, 20 bp, Artificial Sequence
  Synthetic oligonucleotide; TGG chr2 60542655 60542674 60542671 +
gtacagctcatatgtgtacg

SEQ ID NO: 168771 - DNA, 20 bp, Artificial Sequence
  Synthetic oligonucleotide; AAG chr2 60542661 60542680 60542677 +
ctcatatgtgtacgtggatg

SEQ ID NO: 168772 - DNA, 20 bp, Artificial Sequence
  Synthetic oligonucleotide; TGG chr2 60542664 60542683 60542680 +
atatgtgtacgtggatgaag

SEQ ID NO: 168773 - DNA, 20 bp, Artificial Sequence
  Synthetic oligonucleotide; GGG chr2 60542665 60542684 60542681 +
tatgtgtacgtggatgaagt

SEQ ID NO: 168774 - DNA, 20 bp, Artificial Sequence
  Synthetic oligonucleotide; GGG chr2 60542666 60542685 60542682 +
atgtgtacgtggatgaagtg

SEQ ID NO: 168775 - DNA, 20 bp, Artificial Sequence
  Synthetic oligonucleotide; GGG chr2 60542667 60542686 60542683 +
tgtgtacgtggatgaagtgg

SEQ ID NO: 168776 - DNA, 20 bp, Artificial Sequence
  Synthetic oligonucleotide; GAG chr2 60542669 60542688 60542685 +
tgtacgtggatgaagtgggg

SEQ ID NO: 168777 - DNA, 20 bp, Artificial Sequence
  Synthetic oligonucleotide; CAG chr2 60542691 60542710 60542707 +
gcacatacccatctattcac

SEQ ID NO: 168778 - DNA, 20 bp, Artificial Sequence
  Synthetic oligonucleotide; AGG chr2 60542692 60542711 60542708 +
cacatacccatctattcacc

SEQ ID NO: 168779 - DNA, 20 bp, Artificial Sequence
  Synthetic oligonucleotide; AAG chr2 60542699 60542718 60542715 +
ccatctattcaccaggtaaa

SEQ ID NO: 168780 - DNA, 20 bp, Artificial Sequence
  Synthetic oligonucleotide; CAG chr2 60542720 60542739 60542736 +
agaatcctctaaaaaatact

SEQ ID NO: 168781 - DNA, 20 bp, Artificial Sequence
  Synthetic oligonucleotide; TGG chr2 60542725 60542744 60542741 +
cctctaaaaaatactcagtt

SEQ ID NO: 168782 - DNA, 20 bp, Artificial Sequence
  Synthetic oligonucleotide; GGG chr2 60542726 60542745 60542742 +
ctctaaaaaatactcagttt

SEQ ID NO: 168783 - DNA, 20 bp, Artificial Sequence
  Synthetic oligonucleotide; CAG chr2 60542730 60542749 60542746 +
aaaaaatactcagtttgggc

SEQ ID NO: 168784 - DNA, 20 bp, Artificial Sequence
  Synthetic oligonucleotide; AGG chr2 60542731 60542750 60542747 +
aaaaatactcagtttgggcc

SEQ ID NO: 168785 - DNA, 20 bp, Artificial Sequence
  Synthetic oligonucleotide; CGG chr2 60542736 60542755 60542752 +
tactcagtttgggccaggtg

SEQ ID NO: 168786 - DNA, 20 bp, Artificial Sequence
  Synthetic oligonucleotide; AAG chr2 60542745 60542764 60542761 +
tgggccaggtgcggtcgctc

SEQ ID NO: 168787 - DNA, 20 bp, Artificial Sequence
  Synthetic oligonucleotide; CAG chr2 60542758 60542777 60542774 +
gtcgctcaagcctgtaatcc

SEQ ID NO: 168788 - DNA, 20 bp, Artificial Sequence
  Synthetic oligonucleotide; TGG chr2 60542766 60542785 60542782 +
agcctgtaatcccagcactt

SEQ ID NO: 168789 - DNA, 20 bp, Artificial Sequence
  Synthetic oligonucleotide; GGG chr2 60542767 60542786 60542783 +
gcctgtaatcccagcacttt

SEQ ID NO: 168790 - DNA, 20 bp, Artificial Sequence
  Synthetic oligonucleotide; GAG chr2 60542769 60542788 60542785 +
ctgtaatcccagcactttgg

SEQ ID NO: 168791 - DNA, 20 bp, Artificial Sequence
  Synthetic oligonucleotide; AGG chr2 60542770 60542789 60542786 +
tgtaatcccagcactttggg

SEQ ID NO: 168792 - DNA, 20 bp, Artificial Sequence
  Synthetic oligonucleotide; AAG chr2 60542775 60542794 60542791 +
tcccagcactttgggaggcc

SEQ ID NO: 168793 - DNA, 20 bp, Artificial Sequence
  Synthetic oligonucleotide; CAG chr2 60542779 60542798 60542795 +
agcactttgggaggccaagc

SEQ ID NO: 168794 - DNA, 20 bp, Artificial Sequence
  Synthetic oligonucleotide; AGG chr2 60542780 60542799 60542796 +
gcactttgggaggccaagcc

SEQ ID NO: 168795 - DNA, 20 bp, Artificial Sequence
  Synthetic oligonucleotide; TGG chr2 60542783 60542802 60542799 +
ctttgggaggccaagccagg

SEQ ID NO: 168796 - DNA, 20 bp, Artificial Sequence
  Synthetic oligonucleotide; GAG chr2 60542793 60542812 60542809 +
ccaagccaggtggatcacct

SEQ ID NO: 168797 - DNA, 20 bp, Artificial Sequence
  Synthetic oligonucleotide; AGG chr2 60542794 60542813 60542810 +
caagccaggtggatcacctg

SEQ ID NO: 168798 - DNA, 20 bp, Artificial Sequence
  Synthetic oligonucleotide; CAG chr2 60542798 60542817 60542814 +
ccaggtggatcacctgaggt

SEQ ID NO: 168799 - DNA, 20 bp, Artificial Sequence
  Synthetic oligonucleotide; AGG chr2 60542799 60542818 60542815 +
caggtggatcacctgaggtc

SEQ ID NO: 168800 - DNA, 20 bp, Artificial Sequence
  Synthetic oligonucleotide; GAG chr2 60542801 60542820 60542817 +
ggtggatcacctgaggtcag

SEQ ID NO: 168801 - DNA, 20 bp, Artificial Sequence
  Synthetic oligonucleotide; AAG chr2 60542807 60542826 60542823 +
tcacctgaggtcaggagttc

SEQ ID NO: 168802 - DNA, 20 bp, Artificial Sequence
  Synthetic oligonucleotide; CAG chr2 60542812 60542831 60542828 +
tgaggtcaggagttcaagac

SEQ ID NO: 168803 - DNA, 20 bp, Artificial Sequence
  Synthetic oligonucleotide; TGG chr2 60542817 60542836 60542833 +
tcaggagttcaagaccagcc

SEQ ID NO: 168804 - DNA, 20 bp, Artificial Sequence
  Synthetic oligonucleotide; TGG chr2 60542826 60542845 60542842 +
caagaccagcctggccaaca

SEQ ID NO: 168805 - DNA, 20 bp, Artificial Sequence
  Synthetic oligonucleotide; TAG chr2 60542862 60542881 60542878 +
ctactgaaaatacaaaaaac

SEQ ID NO: 168806 - DNA, 20 bp, Artificial Sequence
  Synthetic oligonucleotide; TGG chr2 60542866 60542885 60542882 +
tgaaaatacaaaaaactagc

SEQ ID NO: 168807 - DNA, 20 bp, Artificial Sequence
  Synthetic oligonucleotide; GGG chr2 60542867 60542886 60542883 +
gaaaatacaaaaaactagct

SEQ ID NO: 168808 - DNA, 20 bp, Artificial Sequence
  Synthetic oligonucleotide; TAG chr2 60542872 60542891 60542888 +
tacaaaaaactagctgggcg

SEQ ID NO: 168809 - DNA, 20 bp, Artificial Sequence
  Synthetic oligonucleotide; TGG chr2 60542875 60542894 60542891 +
aaaaaactagctgggcgtag

SEQ ID NO: 168810 - DNA, 20 bp, Artificial Sequence
  Synthetic oligonucleotide; CAG chr2 60542894 60542913 60542910 +
gtggcacacgcctgtaatcc

SEQ ID NO: 168811 - DNA, 20 bp, Artificial Sequence
  Synthetic oligonucleotide; TGG chr2 60542902 60542921 60542918 +
cgcctgtaatcccagctact

SEQ ID NO: 168812 - DNA, 20 bp, Artificial Sequence
  Synthetic oligonucleotide; GGG chr2 60542903 60542922 60542919 +
gcctgtaatcccagctactt

SEQ ID NO: 168813 - DNA, 20 bp, Artificial Sequence
  Synthetic oligonucleotide; GAG chr2 60542905 60542924 60542921 +
ctgtaatcccagctacttgg

SEQ ID NO: 168814 - DNA, 20 bp, Artificial Sequence
  Synthetic oligonucleotide; AGG chr2 60542906 60542925 60542922 +
tgtaatcccagctacttggg

SEQ ID NO: 168815 - DNA, 20 bp, Artificial Sequence
  Synthetic oligonucleotide; GAG chr2 60542911 60542930 60542927 +
tcccagctacttgggaggct

SEQ ID NO: 168816 - DNA, 20 bp, Artificial Sequence
  Synthetic oligonucleotide; AGG chr2 60542912 60542931 60542928 +
cccagctacttgggaggctg

SEQ ID NO: 168817 - DNA, 20 bp, Artificial Sequence
  Synthetic oligonucleotide; CAG chr2 60542915 60542934 60542931 +
agctacttgggaggctgagg

SEQ ID NO: 168818 - DNA, 20 bp, Artificial Sequence
  Synthetic oligonucleotide; AGG chr2 60542916 60542935 60542932 +
gctacttgggaggctgaggc

SEQ ID NO: 168819 - DNA, 20 bp, Artificial Sequence
  Synthetic oligonucleotide; GAG chr2 60542918 60542937 60542934 +
tacttgggaggctgaggcag

SEQ ID NO: 168820 - DNA, 20 bp, Artificial Sequence
  Synthetic oligonucleotide; TAG chr2 60542934 60542953 60542950 +
gcaggagaatcgcttgaacc

SEQ ID NO: 168821 - DNA, 20 bp, Artificial Sequence
  Synthetic oligonucleotide; AGG chr2 60542935 60542954 60542951 +
caggagaatcgcttgaacct

SEQ ID NO: 168822 - DNA, 20 bp, Artificial Sequence
  Synthetic oligonucleotide; GAG chr2 60542937 60542956 60542953 +
ggagaatcgcttgaacctag

SEQ ID NO: 168823 - DNA, 20 bp, Artificial Sequence
  Synthetic oligonucleotide; AGG chr2 60542938 60542957 60542954 +
gagaatcgcttgaacctagg

SEQ ID NO: 168824 - DNA, 20 bp, Artificial Sequence
  Synthetic oligonucleotide; CAG chr2 60542941 60542960 60542957 +
aatcgcttgaacctaggagg

SEQ ID NO: 168825 - DNA, 20 bp, Artificial Sequence
  Synthetic oligonucleotide; GAG chr2 60542943 60542962 60542959 +
tcgcttgaacctaggaggca

SEQ ID NO: 168826 - DNA, 20 bp, Artificial Sequence
  Synthetic oligonucleotide; AGG chr2 60542944 60542963 60542960 +
cgcttgaacctaggaggcag

SEQ ID NO: 168827 - DNA, 20 bp, Artificial Sequence
  Synthetic oligonucleotide; CAG chr2 60542950 60542969 60542966 +
aacctaggaggcagaggttg

SEQ ID NO: 168828 - DNA, 20 bp, Artificial Sequence
  Synthetic oligonucleotide; GAG chr2 60542954 60542973 60542970 +
taggaggcagaggttgcagt

SEQ ID NO: 168829 - DNA, 20 bp, Artificial Sequence
  Synthetic oligonucleotide; CAG chr2 60542979 60542998 60542995 +
aaaatcatgccactgcactc

SEQ ID NO: 168830 - DNA, 20 bp, Artificial Sequence
  Synthetic oligonucleotide; TGG chr2 60542984 60543003 60543000 +
catgccactgcactccagcc

SEQ ID NO: 168831 - DNA, 20 bp, Artificial Sequence
  Synthetic oligonucleotide; GGG chr2 60542985 60543004 60543001 +
atgccactgcactccagcct

SEQ ID NO: 168832 - DNA, 20 bp, Artificial Sequence
  Synthetic oligonucleotide; AAG chr2 60542992 60543011 60543008 +
tgcactccagcctgggcaac

SEQ ID NO: 168833 - DNA, 20 bp, Artificial Sequence
  Synthetic oligonucleotide; GAG chr2 60542994 60543013 60543010 +
cactccagcctgggcaacaa

SEQ ID NO: 168834 - DNA, 20 bp, Artificial Sequence
  Synthetic oligonucleotide; CAG chr2 60543036 60543055 60543052 +
aaaaaaaaaaaaaaaaaact

SEQ ID NO: 168835 - DNA, 20 bp, Artificial Sequence
  Synthetic oligonucleotide; TGG chr2 60543041 60543060 60543057 +
aaaaaaaaaaaaactcagct

SEQ ID NO: 168836 - DNA, 20 bp, Artificial Sequence
  Synthetic oligonucleotide; GAG chr2 60543043 60543062 60543059 +
aaaaaaaaaaactcagcttg

SEQ ID NO: 168837 - DNA, 20 bp, Artificial Sequence
  Synthetic oligonucleotide; GAG chr2 60543045 60543064 60543061 +
aaaaaaaaactcagcttgga

SEQ ID NO: 168838 - DNA, 20 bp, Artificial Sequence
  Synthetic oligonucleotide; AGG chr2 60543046 60543065 60543062 +
aaaaaaaactcagcttggag

SEQ ID NO: 168839 - DNA, 20 bp, Artificial Sequence
  Synthetic oligonucleotide; GAG chr2 60543052 60543071 60543068 +
aactcagcttggagaggcct

SEQ ID NO: 168840 - DNA, 20 bp, Artificial Sequence
  Synthetic oligonucleotide; CAG chr2 60543057 60543076 60543073 +
agcttggagaggcctgagta

SEQ ID NO: 168841 - DNA, 20 bp, Artificial Sequence
  Synthetic oligonucleotide; AAG chr2 60543083 60543102 60543099 +
aaatgcataccattttactc

SEQ ID NO: 168842 - DNA, 20 bp, Artificial Sequence
  Synthetic oligonucleotide; AAG chr2 60543091 60543110 60543107 +
accattttactcaagattta

SEQ ID NO: 168843 - DNA, 20 bp, Artificial Sequence
  Synthetic oligonucleotide; AAG chr2 60543119 60543138 60543135 +
tgccttattctcctatctga

SEQ ID NO: 168844 - DNA, 20 bp, Artificial Sequence
  Synthetic oligonucleotide; AAG chr2 60543133 60543152 60543149 +
atctgaaagtcccgaattct

SEQ ID NO: 168845 - DNA, 20 bp, Artificial Sequence
  Synthetic oligonucleotide; TAG chr2 60543148 60543167 60543164 +
attctaagctttatttatct

SEQ ID NO: 168846 - DNA, 20 bp, Artificial Sequence
  Synthetic oligonucleotide; AGG chr2 60543149 60543168 60543165 +
ttctaagctttatttatctt

SEQ ID NO: 168847 - DNA, 20 bp, Artificial Sequence
  Synthetic oligonucleotide; AAG chr2 60543152 60543171 60543168 +
taagctttatttatcttagg

SEQ ID NO: 168848 - DNA, 20 bp, Artificial Sequence
  Synthetic oligonucleotide; AAG chr2 60543155 60543174 60543171 +
gctttatttatcttaggaag

SEQ ID NO: 168849 - DNA, 20 bp, Artificial Sequence
  Synthetic oligonucleotide; TAG chr2 60543196 60543215 60543212 +
cttgcttcctgcctataaaa

SEQ ID NO: 168850 - DNA, 20 bp, Artificial Sequence
  Synthetic oligonucleotide; CAG chr2 60543201 60543220 60543217 +
ttcctgcctataaaatagta

SEQ ID NO: 168851 - DNA, 20 bp, Artificial Sequence
  Synthetic oligonucleotide; AGG chr2 60543202 60543221 60543218 +
tcctgcctataaaatagtac

SEQ ID NO: 168852 - DNA, 20 bp, Artificial Sequence
  Synthetic oligonucleotide; CAG chr2 60543209 60543228 60543225 +
tataaaatagtacaggctca

SEQ ID NO: 168853 - DNA, 20 bp, Artificial Sequence
  Synthetic oligonucleotide; AAG chr2 60543244 60543263 60543260 +
caacttacatcactttaata

SEQ ID NO: 168854 - DNA, 20 bp, Artificial Sequence
  Synthetic oligonucleotide; CAG chr2 60543258 60543277 60543274 +
ttaataaagcctttcctacc

SEQ ID NO: 168855 - DNA, 20 bp, Artificial Sequence
  Synthetic oligonucleotide; TGG chr2 60543286 60543305 60543302 +
ttaaatgactaccttttatg

SEQ ID NO: 168856 - DNA, 20 bp, Artificial Sequence
  Synthetic oligonucleotide; TAG chr2 60543307 60543326 60543323 +
ggttgccaaacacattcttc

SEQ ID NO: 168857 - DNA, 20 bp, Artificial Sequence
  Synthetic oligonucleotide; GAG chr2 60543309 60543328 60543325 +
ttgccaaacacattcttcta

SEQ ID NO: 168858 - DNA, 20 bp, Artificial Sequence
  Synthetic oligonucleotide; AAG chr2 60543341 60543360 60543357 +
tatatctctttccttaatac

SEQ ID NO: 168859 - DNA, 20 bp, Artificial Sequence
  Synthetic oligonucleotide; AGG chr2 60543342 60543361 60543358 +
atatctctttccttaataca

SEQ ID NO: 168860 - DNA, 20 bp, Artificial Sequence
  Synthetic oligonucleotide; AAG chr2 60543426 60543445 60543442 +
gtttccttcctcatcataaa

SEQ ID NO: 168861 - DNA, 20 bp, Artificial Sequence
  Synthetic oligonucleotide; AAG chr2 60543431 60543450 60543447 +
cttcctcatcataaaaagaa

SEQ ID NO: 168862 - DNA, 20 bp, Artificial Sequence
  Synthetic oligonucleotide; CAG chr2 60543434 60543453 60543450 +
cctcatcataaaaagaaaag

SEQ ID NO: 168863 - DNA, 20 bp, Artificial Sequence
  Synthetic oligonucleotide; TGG chr2 60543440 60543459 60543456 +
cataaaaagaaaagcagact

SEQ ID NO: 168864 - DNA, 20 bp, Artificial Sequence
  Synthetic oligonucleotide; CAG chr2 60543450 60543469 60543466 +
aaagcagacttggaattgtg

SEQ ID NO: 168865 - DNA, 20 bp, Artificial Sequence
  Synthetic oligonucleotide; TAG chr2 60543461 60543480 60543477 +
ggaattgtgcagacgtgctt

SEQ ID NO: 168866 - DNA, 20 bp, Artificial Sequence
  Synthetic oligonucleotide; GAG chr2 60543463 60543482 60543479 +
aattgtgcagacgtgcttta

SEQ ID NO: 168867 - DNA, 20 bp, Artificial Sequence
  Synthetic oligonucleotide; TGG chr2 60543469 60543488 60543485 +
gcagacgtgctttagagaaa

SEQ ID NO: 168868 - DNA, 20 bp, Artificial Sequence
  Synthetic oligonucleotide; GGG chr2 60543470 60543489 60543486 +
cagacgtgctttagagaaat

SEQ ID NO: 168869 - DNA, 20 bp, Artificial Sequence
  Synthetic oligonucleotide; TGG chr2 60543474 60543493 60543490 +
cgtgctttagagaaatgggc

SEQ ID NO: 168870 - DNA, 20 bp, Artificial Sequence
  Synthetic oligonucleotide; GGG chr2 60543475 60543494 60543491 +
gtgctttagagaaatgggct

SEQ ID NO: 168871 - DNA, 20 bp, Artificial Sequence
  Synthetic oligonucleotide; GGG chr2 60543476 60543495 60543492 +
tgctttagagaaatgggctg

SEQ ID NO: 168872 - DNA, 20 bp, Artificial Sequence
  Synthetic oligonucleotide; GGG chr2 60543477 60543496 60543493 +
gctttagagaaatgggctgg

SEQ ID NO: 168873 - DNA, 20 bp, Artificial Sequence
  Synthetic oligonucleotide; CAG chr2 60543488 60543507 60543504 +
atgggctgggggtacacaca

SEQ ID NO: 168874 - DNA, 20 bp, Artificial Sequence
  Synthetic oligonucleotide; CAG chr2 60543499 60543518 60543515 +
gtacacacacagccgtcttc

SEQ ID NO: 168875 - DNA, 20 bp, Artificial Sequence
  Synthetic oligonucleotide; CAG chr2 60543512 60543531 60543528 +
cgtcttccagaacttcgctt

SEQ ID NO: 168876 - DNA, 20 bp, Artificial Sequence
  Synthetic oligonucleotide; AGG chr2 60543513 60543532 60543529 +
gtcttccagaacttcgcttc

SEQ ID NO: 168877 - DNA, 20 bp, Artificial Sequence
  Synthetic oligonucleotide; GGG chr2 60543514 60543533 60543530 +
tcttccagaacttcgcttca

SEQ ID NO: 168878 - DNA, 20 bp, Artificial Sequence
  Synthetic oligonucleotide; GGG chr2 60543515 60543534 60543531 +
cttccagaacttcgcttcag

SEQ ID NO: 168879 - DNA, 20 bp, Artificial Sequence
  Synthetic oligonucleotide; GAG chr2 60543523 60543542 60543539 +
acttcgcttcaggggcacct

SEQ ID NO: 168880 - DNA, 20 bp, Artificial Sequence
  Synthetic oligonucleotide; AGG chr2 60543524 60543543 60543540 +
cttcgcttcaggggcacctg

SEQ ID NO: 168881 - DNA, 20 bp, Artificial Sequence
  Synthetic oligonucleotide; GGG chr2 60543525 60543544 60543541 +
ttcgcttcaggggcacctga

SEQ ID NO: 168882 - DNA, 20 bp, Artificial Sequence
  Synthetic oligonucleotide; CAG chr2 60543529 60543548 60543545 +
cttcaggggcacctgagggc

SEQ ID NO: 168883 - DNA, 20 bp, Artificial Sequence
  Synthetic oligonucleotide; GAG chr2 60543531 60543550 60543547 +
tcaggggcacctgagggcca

SEQ ID NO: 168884 - DNA, 20 bp, Artificial Sequence
  Synthetic oligonucleotide; CGG chr2 60543537 60543556 60543553 +
gcacctgagggccagagcgt

SEQ ID NO: 168885 - DNA, 20 bp, Artificial Sequence
  Synthetic oligonucleotide; TGG chr2 60543553 60543572 60543569 +
gcgtcggaatttatgtgcaa

SEQ ID NO: 168886 - DNA, 20 bp, Artificial Sequence
  Synthetic oligonucleotide; TAG chr2 60543556 60543575 60543572 +
tcggaatttatgtgcaatgg

SEQ ID NO: 168887 - DNA, 20 bp, Artificial Sequence
  Synthetic oligonucleotide; TAG chr2 60543575 60543594 60543591 +
gtagaatgttaacttcacca

SEQ ID NO: 168888 - DNA, 20 bp, Artificial Sequence
  Synthetic oligonucleotide; AGG chr2 60543576 60543595 60543592 +
tagaatgttaacttcaccat

SEQ ID NO: 168889 - DNA, 20 bp, Artificial Sequence
  Synthetic oligonucleotide; GAG chr2 60543607 60543626 60543623 +
aattcattactgtgaattat

SEQ ID NO: 168890 - DNA, 20 bp, Artificial Sequence
  Synthetic oligonucleotide; AAG chr2 60543610 60543629 60543626 +
tcattactgtgaattatgag

SEQ ID NO: 168891 - DNA, 20 bp, Artificial Sequence
  Synthetic oligonucleotide; TAG chr2 60543622 60543641 60543638 +
attatgagaagtcgtgattc

SEQ ID NO: 168892 - DNA, 20 bp, Artificial Sequence
  Synthetic oligonucleotide; GAG chr2 60543643 60543662 60543659 +
agttactgacatctcacttt

SEQ ID NO: 168893 - DNA, 20 bp, Artificial Sequence
  Synthetic oligonucleotide; CAG chr2 60543668 60543687 60543684 +
gtgaccacactatttatgtt

SEQ ID NO: 168894 - DNA, 20 bp, Artificial Sequence
  Synthetic oligonucleotide; CAG chr2 60543672 60543691 60543688 +
ccacactatttatgttcagc

SEQ ID NO: 168895 - DNA, 20 bp, Artificial Sequence
  Synthetic oligonucleotide; CAG chr2 60543678 60543697 60543694 +
tatttatgttcagccagttc

SEQ ID NO: 168896 - DNA, 20 bp, Artificial Sequence
  Synthetic oligonucleotide; AGG chr2 60543679 60543698 60543695 +
atttatgttcagccagttcc

SEQ ID NO: 168897 - DNA, 20 bp, Artificial Sequence
  Synthetic oligonucleotide; GGG chr2 60543680 60543699 60543696 +
tttatgttcagccagttcca

SEQ ID NO: 168898 - DNA, 20 bp, Artificial Sequence
  Synthetic oligonucleotide; TGG chr2 60543683 60543702 60543699 +
atgttcagccagttccaggg

SEQ ID NO: 168899 - DNA, 20 bp, Artificial Sequence
  Synthetic oligonucleotide; GGG chr2 60543684 60543703 60543700 +
tgttcagccagttccagggt

SEQ ID NO: 168900 - DNA, 20 bp, Artificial Sequence
  Synthetic oligonucleotide; CAG chr2 60543689 60543708 60543705 +
agccagttccagggtgggaa

SEQ ID NO: 168901 - DNA, 20 bp, Artificial Sequence
  Synthetic oligonucleotide; AGG chr2 60543690 60543709 60543706 +
gccagttccagggtgggaac

SEQ ID NO: 168902 - DNA, 20 bp, Artificial Sequence
  Synthetic oligonucleotide; AAG chr2 60543709 60543728 60543725 +
caggtgattaaacacaatga

SEQ ID NO: 168903 - DNA, 20 bp, Artificial Sequence
  Synthetic oligonucleotide; AAG chr2 60543717 60543736 60543733 +
taaacacaatgaaagaaatc

SEQ ID NO: 168904 - DNA, 20 bp, Artificial Sequence
  Synthetic oligonucleotide; AAG chr2 60543743 60543762 60543759 +
ttgtaattattcatgcacga

SEQ ID NO: 168905 - DNA, 20 bp, Artificial Sequence
  Synthetic oligonucleotide; AGG chr2 60543744 60543763 60543760 +
tgtaattattcatgcacgaa

SEQ ID NO: 168906 - DNA, 20 bp, Artificial Sequence
  Synthetic oligonucleotide; TGG chr2 60543758 60543777 60543774 +
cacgaaaggtttacctcacc

SEQ ID NO: 168907 - DNA, 20 bp, Artificial Sequence
  Synthetic oligonucleotide; GGG chr2 60543759 60543778 60543775 +
acgaaaggtttacctcacct

SEQ ID NO: 168908 - DNA, 20 bp, Artificial Sequence
  Synthetic oligonucleotide; CAG chr2 60543765 60543784 60543781 +
ggtttacctcacctgggtca

SEQ ID NO: 168909 - DNA, 20 bp, Artificial Sequence
  Synthetic oligonucleotide; TAG chr2 60543795 60543814 60543811 +
tgtgcgcccattgaatatct

SEQ ID NO: 168910 - DNA, 20 bp, Artificial Sequence
  Synthetic oligonucleotide; TAG chr2 60543804 60543823 60543820 +
attgaatatcttagacatct

SEQ ID NO: 168911 - DNA, 20 bp, Artificial Sequence
  Synthetic oligonucleotide; GAG chr2 60543806 60543825 60543822 +
tgaatatcttagacatctta

SEQ ID NO: 168912 - DNA, 20 bp, Artificial Sequence
  Synthetic oligonucleotide; GAG chr2 60543808 60543827 60543824 +
aatatcttagacatcttaga

SEQ ID NO: 168913 - DNA, 20 bp, Artificial Sequence
  Synthetic oligonucleotide; CAG chr2 60543821 60543840 60543837 +
tcttagagagcttttcgtct

SEQ ID NO: 168914 - DNA, 20 bp, Artificial Sequence
  Synthetic oligonucleotide; TAG chr2 60543840 60543859 60543856 +
tcagttaaatgattgattat

SEQ ID NO: 168915 - DNA, 20 bp, Artificial Sequence
  Synthetic oligonucleotide; TGG chr2 60543872 60543891 60543888 +
atatattttaaatttgcttt

SEQ ID NO: 168916 - DNA, 20 bp, Artificial Sequence
  Synthetic oligonucleotide; TGG chr2 60543878 60543897 60543894 +
tttaaatttgcttttggttt

SEQ ID NO: 168917 - DNA, 20 bp, Artificial Sequence
  Synthetic oligonucleotide; TAG chr2 60543887 60543906 60543903 +
gcttttggttttggcttctc

SEQ ID NO: 168918 - DNA, 20 bp, Artificial Sequence
  Synthetic oligonucleotide; AGG chr2 60543888 60543907 60543904 +
cttttggttttggcttctct

SEQ ID NO: 168919 - DNA, 20 bp, Artificial Sequence
  Synthetic oligonucleotide; CAG chr2 60543927 60543946 60543943 +
gttctttaaaaaaataataa

SEQ ID NO: 168920 - DNA, 20 bp, Artificial Sequence
  Synthetic oligonucleotide; TAG chr2 60543936 60543955 60543952 +
aaaaataataacagaacctt

SEQ ID NO: 168921 - DNA, 20 bp, Artificial Sequence
  Synthetic oligonucleotide; CAG chr2 60543944 60543963 60543960 +
taacagaacctttagacaac

SEQ ID NO: 168922 - DNA, 20 bp, Artificial Sequence
  Synthetic oligonucleotide; AGG chr2 60543945 60543964 60543961 +
aacagaacctttagacaacc

SEQ ID NO: 168923 - DNA, 20 bp, Artificial Sequence
  Synthetic oligonucleotide; GGG chr2 60543946 60543965 60543962 +
acagaacctttagacaacca

SEQ ID NO: 168924 - DNA, 20 bp, Artificial Sequence
  Synthetic oligonucleotide; GAG chr2 60543948 60543967 60543964 +
agaacctttagacaaccagg

SEQ ID NO: 168925 - DNA, 20 bp, Artificial Sequence
  Synthetic oligonucleotide; AAG chr2 60543954 60543973 60543970 +
tttagacaaccagggagttc

SEQ ID NO: 168926 - DNA, 20 bp, Artificial Sequence
  Synthetic oligonucleotide; TAG chr2 60543980 60543999 60543996 +
atatctcttatttccctaca

SEQ ID NO: 168927 - DNA, 20 bp, Artificial Sequence
  Synthetic oligonucleotide; TAG chr2 60543994 60544013 60544010 +
cctacatagattcacaacta

SEQ ID NO: 168928 - DNA, 20 bp, Artificial Sequence
  Synthetic oligonucleotide; CAG chr2 60543997 60544016 60544013 +
acatagattcacaactatag

SEQ ID NO: 168929 - DNA, 20 bp, Artificial Sequence
  Synthetic oligonucleotide; AAG chr2 60544003 60544022 60544019 +
attcacaactatagcagtaa

SEQ ID NO: 168930 - DNA, 20 bp, Artificial Sequence
  Synthetic oligonucleotide; AAG chr2 60544020 60544039 60544036 +
taaaagtcttaactatatgt

SEQ ID NO: 168931 - DNA, 20 bp, Artificial Sequence
  Synthetic oligonucleotide; AGG chr2 60544021 60544040 60544037 +
aaaagtcttaactatatgta

SEQ ID NO: 168932 - DNA, 20 bp, Artificial Sequence
  Synthetic oligonucleotide; CAG chr2 60544033 60544052 60544049 +
tatatgtaaggccttccccc

SEQ ID NO: 168933 - DNA, 20 bp, Artificial Sequence
  Synthetic oligonucleotide; TAG chr2 60544040 60544059 60544056 +
aaggccttccccccagcatt

SEQ ID NO: 168934 - DNA, 20 bp, Artificial Sequence
  Synthetic oligonucleotide; CAG chr2 60544059 60544078 60544075 +
ttagattcctcctctaaata

SEQ ID NO: 168935 - DNA, 20 bp, Artificial Sequence
  Synthetic oligonucleotide; GAG chr2 60544061 60544080 60544077 +
agattcctcctctaaataca

SEQ ID NO: 168936 - DNA, 20 bp, Artificial Sequence
  Synthetic oligonucleotide; AGG chr2 60544062 60544081 60544078 +
gattcctcctctaaatacag

SEQ ID NO: 168937 - DNA, 20 bp, Artificial Sequence
  Synthetic oligonucleotide; CAG chr2 60544067 60544086 60544083 +
ctcctctaaatacagaggca

SEQ ID NO: 168938 - DNA, 20 bp, Artificial Sequence
  Synthetic oligonucleotide; GAG chr2 60544077 60544096 60544093 +
tacagaggcacagaattttt

SEQ ID NO: 168939 - DNA, 20 bp, Artificial Sequence
  Synthetic oligonucleotide; TGG chr2 60544081 60544100 60544097 +
gaggcacagaatttttgagc

SEQ ID NO: 168940 - DNA, 20 bp, Artificial Sequence
  Synthetic oligonucleotide; AAG chr2 60544091 60544110 60544107 +
atttttgagctggttaatct

SEQ ID NO: 168941 - DNA, 20 bp, Artificial Sequence
  Synthetic oligonucleotide; TGG chr2 60544109 60544128 60544125 +
ctaagactgaataacctatt

SEQ ID NO: 168942 - DNA, 20 bp, Artificial Sequence
  Synthetic oligonucleotide; GGG chr2 60544110 60544129 60544126 +
taagactgaataacctattt

SEQ ID NO: 168943 - DNA, 20 bp, Artificial Sequence
  Synthetic oligonucleotide; CAG chr2 60544117 60544136 60544133 +
gaataacctatttgggacct

SEQ ID NO: 168944 - DNA, 20 bp, Artificial Sequence
  Synthetic oligonucleotide; AAG chr2 60544121 60544140 60544137 +
aacctatttgggacctcagt

SEQ ID NO: 168945 - DNA, 20 bp, Artificial Sequence
  Synthetic oligonucleotide; AAG chr2 60544124 60544143 60544140 +
ctatttgggacctcagtaag

SEQ ID NO: 168946 - DNA, 20 bp, Artificial Sequence
  Synthetic oligonucleotide; TGG chr2 60544129 60544148 60544145 +
tgggacctcagtaagaagtg

SEQ ID NO: 168947 - DNA, 20 bp, Artificial Sequence
  Synthetic oligonucleotide; CAG chr2 60544149 60544168 60544165 +
tggttttaattcttgcttga

SEQ ID NO: 168948 - DNA, 20 bp, Artificial Sequence
  Synthetic oligonucleotide; GAG chr2 60544175 60544194 60544191 +
ctgtgttttgtcttttaaac

SEQ ID NO: 168949 - DNA, 20 bp, Artificial Sequence
  Synthetic oligonucleotide; CAG chr2 60544178 60544197 60544194 +
tgttttgtcttttaaacgag

SEQ ID NO: 168950 - DNA, 20 bp, Artificial Sequence
  Synthetic oligonucleotide; AAG chr2 60544212 60544231 60544228 +
aatacgatgttacatcacgc

SEQ ID NO: 168951 - DNA, 20 bp, Artificial Sequence
  Synthetic oligonucleotide; TGG chr2 60544229 60544248 60544245 +
cgcaagtgttactccatatt

SEQ ID NO: 168952 - DNA, 20 bp, Artificial Sequence
  Synthetic oligonucleotide; TAG chr2 60544237 60544256 60544253 +
ttactccatatttggtgatt

SEQ ID NO: 168953 - DNA, 20 bp, Artificial Sequence
  Synthetic oligonucleotide; AAG chr2 60544241 60544260 60544257 +
tccatatttggtgatttagc

SEQ ID NO: 168954 - DNA, 20 bp, Artificial Sequence
  Synthetic oligonucleotide; AGG chr2 60544242 60544261 60544258 +
ccatatttggtgatttagca

SEQ ID NO: 168955 - DNA, 20 bp, Artificial Sequence
  Synthetic oligonucleotide; TGG chr2 60544248 60544267 60544264 +
ttggtgatttagcaaggctt

SEQ ID NO: 168956 - DNA, 20 bp, Artificial Sequence
  Synthetic oligonucleotide; AAG chr2 60544258 60544277 60544274 +
agcaaggctttggatctccg

SEQ ID NO: 168957 - DNA, 20 bp, Artificial Sequence
  Synthetic oligonucleotide; CAG chr2 60544329 60544348 60544345 +
acttctgttcattttccttc

SEQ ID NO: 168958 - DNA, 20 bp, Artificial Sequence
  Synthetic oligonucleotide; AAG chr2 60544336 60544355 60544352 +
ttcattttccttccagtcac

SEQ ID NO: 168959 - DNA, 20 bp, Artificial Sequence
  Synthetic oligonucleotide; TGG chr2 60544347 60544366 60544363 +
tccagtcacaagacaacaca

SEQ ID NO: 168960 - DNA, 20 bp, Artificial Sequence
  Synthetic oligonucleotide; TGG chr2 60544353 60544372 60544369 +
cacaagacaacacatggaaa

SEQ ID NO: 168961 - DNA, 20 bp, Artificial Sequence
  Synthetic oligonucleotide; TGG chr2 60544373 60544392 60544389 +
tggtcattcccacatcctgc

SEQ ID NO: 168962 - DNA, 20 bp, Artificial Sequence
  Synthetic oligonucleotide; GGG chr2 60544374 60544393 60544390 +
ggtcattcccacatcctgct

SEQ ID NO: 168963 - DNA, 20 bp, Artificial Sequence
  Synthetic oligonucleotide; GGG chr2 60544375 60544394 60544391 +
gtcattcccacatcctgctg

SEQ ID NO: 168964 - DNA, 20 bp, Artificial Sequence
  Synthetic oligonucleotide; GGG chr2 60544376 60544395 60544392 +
tcattcccacatcctgctgg

SEQ ID NO: 168965 - DNA, 20 bp, Artificial Sequence
  Synthetic oligonucleotide; GGG chr2 60544377 60544396 60544393 +
cattcccacatcctgctggg

SEQ ID NO: 168966 - DNA, 20 bp, Artificial Sequence
  Synthetic oligonucleotide; TAG chr2 60544380 60544399 60544396 +
tcccacatcctgctgggggg

SEQ ID NO: 168967 - DNA, 20 bp, Artificial Sequence
  Synthetic oligonucleotide; AGG chr2 60544381 60544400 60544397 +
cccacatcctgctggggggt

SEQ ID NO: 168968 - DNA, 20 bp, Artificial Sequence
  Synthetic oligonucleotide; GGG chr2 60544382 60544401 60544398 +
ccacatcctgctggggggta

SEQ ID NO: 168969 - DNA, 20 bp, Artificial Sequence
  Synthetic oligonucleotide; GGG chr2 60544383 60544402 60544399 +
cacatcctgctggggggtag

SEQ ID NO: 168970 - DNA, 20 bp, Artificial Sequence
  Synthetic oligonucleotide; GAG chr2 60544385 60544404 60544401 +
catcctgctggggggtaggg

SEQ ID NO: 168971 - DNA, 20 bp, Artificial Sequence
  Synthetic oligonucleotide; AAG chr2 60544414 60544433 60544430 +
tcttcacctacatgtcacat

SEQ ID NO: 168972 - DNA, 20 bp, Artificial Sequence
  Synthetic oligonucleotide; AGG chr2 60544415 60544434 60544431 +
cttcacctacatgtcacata

SEQ ID NO: 168973 - DNA, 20 bp, Artificial Sequence
  Synthetic oligonucleotide; TGG chr2 60544424 60544443 60544440 +
catgtcacataaggtaaatg

SEQ ID NO: 168974 - DNA, 20 bp, Artificial Sequence
  Synthetic oligonucleotide; TGG chr2 60544427 60544446 60544443 +
gtcacataaggtaaatgtgg

SEQ ID NO: 168975 - DNA, 20 bp, Artificial Sequence
  Synthetic oligonucleotide; AAG chr2 60544434 60544453 60544450 +
aaggtaaatgtggtggattc

SEQ ID NO: 168976 - DNA, 20 bp, Artificial Sequence
  Synthetic oligonucleotide; CAG chr2 60544455 60544474 60544471 +
agaaatacactccacaaatg

SEQ ID NO: 168977 - DNA, 20 bp, Artificial Sequence
  Synthetic oligonucleotide; TAG chr2 60544464 60544483 60544480 +
ctccacaaatgcagcttccc

SEQ ID NO: 168978 - DNA, 20 bp, Artificial Sequence
  Synthetic oligonucleotide; CAG chr2 60544467 60544486 60544483 +
cacaaatgcagcttccctag

SEQ ID NO: 168979 - DNA, 20 bp, Artificial Sequence
  Synthetic oligonucleotide; CAG chr2 60544470 60544489 60544486 +
aaatgcagcttccctagcag

SEQ ID NO: 168980 - DNA, 20 bp, Artificial Sequence
  Synthetic oligonucleotide; AAG chr2 60544489 60544508 60544505 +
gcagatttcccatttcacta

SEQ ID NO: 168981 - DNA, 20 bp, Artificial Sequence
  Synthetic oligonucleotide; AGG chr2 60544490 60544509 60544506 +
cagatttcccatttcactaa

SEQ ID NO: 168982 - DNA, 20 bp, Artificial Sequence
  Synthetic oligonucleotide; GGG chr2 60544491 60544510 60544507 +
agatttcccatttcactaaa

SEQ ID NO: 168983 - DNA, 20 bp, Artificial Sequence
  Synthetic oligonucleotide; AAG chr2 60544495 60544514 60544511 +
ttcccatttcactaaaggga

SEQ ID NO: 168984 - DNA, 20 bp, Artificial Sequence
  Synthetic oligonucleotide; GAG chr2 60544503 60544522 60544519 +
tcactaaagggaaagtatct

SEQ ID NO: 168985 - DNA, 20 bp, Artificial Sequence
  Synthetic oligonucleotide; CAG chr2 60544514 60544533 60544530 +
aaagtatctgagtgctatca

SEQ ID NO: 168986 - DNA, 20 bp, Artificial Sequence
  Synthetic oligonucleotide; AAG chr2 60544518 60544537 60544534 +
tatctgagtgctatcacaga

SEQ ID NO: 168987 - DNA, 20 bp, Artificial Sequence
  Synthetic oligonucleotide; AAG chr2 60544530 60544549 60544546 +
atcacagaaagcactaaaaa

SEQ ID NO: 168988 - DNA, 20 bp, Artificial Sequence
  Synthetic oligonucleotide; AAG chr2 60544534 60544553 60544550 +
cagaaagcactaaaaaaaga

SEQ ID NO: 168989 - DNA, 20 bp, Artificial Sequence
  Synthetic oligonucleotide; TGG chr2 60544550 60544569 60544566 +
aagaaagaaaatgccatgtt

SEQ ID NO: 168990 - DNA, 20 bp, Artificial Sequence
  Synthetic oligonucleotide; TAG chr2 60544570 60544589 60544586 +
tggttttaatgatcaaattc

SEQ ID NO: 168991 - DNA, 20 bp, Artificial Sequence
  Synthetic oligonucleotide; GAG chr2 60544572 60544591 60544588 +
gttttaatgatcaaattcta

SEQ ID NO: 168992 - DNA, 20 bp, Artificial Sequence
  Synthetic oligonucleotide; AGG chr2 60544573 60544592 60544589 +
ttttaatgatcaaattctag

SEQ ID NO: 168993 - DNA, 20 bp, Artificial Sequence
  Synthetic oligonucleotide; GGG chr2 60544574 60544593 60544590 +
tttaatgatcaaattctaga

SEQ ID NO: 168994 - DNA, 20 bp, Artificial Sequence
  Synthetic oligonucleotide; GGG chr2 60544575 60544594 60544591 +
ttaatgatcaaattctagag

SEQ ID NO: 168995 - DNA, 20 bp, Artificial Sequence
  Synthetic oligonucleotide; GGG chr2 60544576 60544595 60544592 +
taatgatcaaattctagagg

SEQ ID NO: 168996 - DNA, 20 bp, Artificial Sequence
  Synthetic oligonucleotide; GAG chr2 60544578 60544597 60544594 +
atgatcaaattctagagggg

SEQ ID NO: 168997 - DNA, 20 bp, Artificial Sequence
  Synthetic oligonucleotide; GAG chr2 60544580 60544599 60544596 +
gatcaaattctagaggggga

SEQ ID NO: 168998 - DNA, 20 bp, Artificial Sequence
  Synthetic oligonucleotide; AGG chr2 60544581 60544600 60544597 +
atcaaattctagagggggag

SEQ ID NO: 168999 - DNA, 20 bp, Artificial Sequence
  Synthetic oligonucleotide; GAG chr2 60544583 60544602 60544599 +
caaattctagagggggagag

SEQ ID NO: 169000 - DNA, 20 bp, Artificial Sequence
  Synthetic oligonucleotide; TAG chr2 60544611 60544630 60544627 +
atatgacatttaatcccctc

SEQ ID NO: 169001 - DNA, 20 bp, Artificial Sequence
  Synthetic oligonucleotide; TGG chr2 60544629 60544648 60544645 +
tctagaccactgacctatta

SEQ ID NO: 169002 - DNA, 20 bp, Artificial Sequence
  Synthetic oligonucleotide; TGG chr2 60544642 60544661 60544658 +
cctattatggttcaactttg

SEQ ID NO: 169003 - DNA, 20 bp, Artificial Sequence
  Synthetic oligonucleotide; TAG chr2 60544651 60544670 60544667 +
gttcaactttgtggtcaaac

SEQ ID NO: 169004 - DNA, 20 bp, Artificial Sequence
  Synthetic oligonucleotide; AGG chr2 60544652 60544671 60544668 +
ttcaactttgtggtcaaact

SEQ ID NO: 169005 - DNA, 20 bp, Artificial Sequence
  Synthetic oligonucleotide; CGG chr2 60544656 60544675 60544672 +
actttgtggtcaaactaggt

SEQ ID NO: 169006 - DNA, 20 bp, Artificial Sequence
  Synthetic oligonucleotide; GAG chr2 60544658 60544677 60544674 +
tttgtggtcaaactaggtcg

SEQ ID NO: 169007 - DNA, 20 bp, Artificial Sequence
  Synthetic oligonucleotide; GAG chr2 60544660 60544679 60544676 +
tgtggtcaaactaggtcgga

SEQ ID NO: 169008 - DNA, 20 bp, Artificial Sequence
  Synthetic oligonucleotide; AAG chr2 60544665 60544684 60544681 +
tcaaactaggtcggagagac

SEQ ID NO: 169009 - DNA, 20 bp, Artificial Sequence
  Synthetic oligonucleotide; CAG chr2 60544671 60544690 60544687 +
taggtcggagagacaagttc

SEQ ID NO: 169010 - DNA, 20 bp, Artificial Sequence
  Synthetic oligonucleotide; CGG chr2 60544731 60544750 60544747 +
tgaacaaacctcttgccttt

SEQ ID NO: 169011 - DNA, 20 bp, Artificial Sequence
  Synthetic oligonucleotide; GGG chr2 60544732 60544751 60544748 +
gaacaaacctcttgcctttc

SEQ ID NO: 169012 - DNA, 20 bp, Artificial Sequence
  Synthetic oligonucleotide; GAG chr2 60544734 60544753 60544750 +
acaaacctcttgcctttcgg

SEQ ID NO: 169013 - DNA, 20 bp, Artificial Sequence
  Synthetic oligonucleotide; TGG chr2 60544738 60544757 60544754 +
acctcttgcctttcgggagc

SEQ ID NO: 169014 - DNA, 20 bp, Artificial Sequence
  Synthetic oligonucleotide; GGG chr2 60544739 60544758 60544755 +
cctcttgcctttcgggagct

SEQ ID NO: 169015 - DNA, 20 bp, Artificial Sequence
  Synthetic oligonucleotide; TGG chr2 60544742 60544761 60544758 +
cttgcctttcgggagctggg

SEQ ID NO: 169016 - DNA, 20 bp, Artificial Sequence
  Synthetic oligonucleotide; TAG chr2 60544745 60544764 60544761 +
gcctttcgggagctgggtgg

SEQ ID NO: 169017 - DNA, 20 bp, Artificial Sequence
  Synthetic oligonucleotide; AGG chr2 60544746 60544765 60544762 +
cctttcgggagctgggtggt

SEQ ID NO: 169018 - DNA, 20 bp, Artificial Sequence
  Synthetic oligonucleotide; TAG chr2 60544749 60544768 60544765 +
ttcgggagctgggtggtagg

SEQ ID NO: 169019 - DNA, 20 bp, Artificial Sequence
  Synthetic oligonucleotide; TGG chr2 60544753 60544772 60544769 +
ggagctgggtggtaggtaga

SEQ ID NO: 169020 - DNA, 20 bp, Artificial Sequence
  Synthetic oligonucleotide; AAG chr2 60544756 60544775 60544772 +
gctgggtggtaggtagatgg

SEQ ID NO: 169021 - DNA, 20 bp, Artificial Sequence
  Synthetic oligonucleotide; AAG chr2 60544760 60544779 60544776 +
ggtggtaggtagatggaaga

SEQ ID NO: 169022 - DNA, 20 bp, Artificial Sequence
  Synthetic oligonucleotide; CAG chr2 60544774 60544793 60544790 +
ggaagaaagcgatccaccaa

SEQ ID NO: 169023 - DNA, 20 bp, Artificial Sequence
  Synthetic oligonucleotide; AGG chr2 60544775 60544794 60544791 +
gaagaaagcgatccaccaac

SEQ ID NO: 169024 - DNA, 20 bp, Artificial Sequence
  Synthetic oligonucleotide; TGG chr2 60544780 60544799 60544796 +
aagcgatccaccaacaggca

SEQ ID NO: 169025 - DNA, 20 bp, Artificial Sequence
  Synthetic oligonucleotide; CAG chr2 60544797 60544816 60544813 +
gcatggcatgtctgtcatca

SEQ ID NO: 169026 - DNA, 20 bp, Artificial Sequence
  Synthetic oligonucleotide; AAG chr2 60544830 60544849 60544846 +
gacttttgtctaacatgctc

SEQ ID NO: 169027 - DNA, 20 bp, Artificial Sequence
  Synthetic oligonucleotide; GAG chr2 60544846 60544865 60544862 +
gctcaagcaaaaaatgtttt

SEQ ID NO: 169028 - DNA, 20 bp, Artificial Sequence
  Synthetic oligonucleotide; AGG chr2 60544847 60544866 60544863 +
ctcaagcaaaaaatgttttg

SEQ ID NO: 169029 - DNA, 20 bp, Artificial Sequence
  Synthetic oligonucleotide; GGG chr2 60544848 60544867 60544864 +
tcaagcaaaaaatgttttga

SEQ ID NO: 169030 - DNA, 20 bp, Artificial Sequence
  Synthetic oligonucleotide; TAG chr2 60544859 60544878 60544875 +
atgttttgagggtcactata

SEQ ID NO: 169031 - DNA, 20 bp, Artificial Sequence
  Synthetic oligonucleotide; TAG chr2 60544879 60544898 60544895 +
tagtgttactgtttatcact

SEQ ID NO: 169032 - DNA, 20 bp, Artificial Sequence
  Synthetic oligonucleotide; GAG chr2 60544881 60544900 60544897 +
gtgttactgtttatcactta

SEQ ID NO: 169033 - DNA, 20 bp, Artificial Sequence
  Synthetic oligonucleotide; AAG chr2 60544884 60544903 60544900 +
ttactgtttatcacttagag

SEQ ID NO: 169034 - DNA, 20 bp, Artificial Sequence
  Synthetic oligonucleotide; AGG chr2 60544885 60544904 60544901 +
tactgtttatcacttagaga

SEQ ID NO: 169035 - DNA, 20 bp, Artificial Sequence
  Synthetic oligonucleotide; GGG chr2 60544886 60544905 60544902 +
actgtttatcacttagagaa

SEQ ID NO: 169036 - DNA, 20 bp, Artificial Sequence
  Synthetic oligonucleotide; AAG chr2 60544894 60544913 60544910 +
tcacttagagaagggaattt

SEQ ID NO: 169037 - DNA, 20 bp, Artificial Sequence
  Synthetic oligonucleotide; TAG chr2 60544906 60544925 60544922 +
gggaatttaagtcccactgc

SEQ ID NO: 169038 - DNA, 20 bp, Artificial Sequence
  Synthetic oligonucleotide; GAG chr2 60544929 60544948 60544945 +
cctttaattccttttccctt

SEQ ID NO: 169039 - DNA, 20 bp, Artificial Sequence
  Synthetic oligonucleotide; GAG chr2 60544937 60544956 60544953 +
tccttttcccttgagctgcc

SEQ ID NO: 169040 - DNA, 20 bp, Artificial Sequence
  Synthetic oligonucleotide; TAG chr2 60544953 60544972 60544969 +
tgccgagaaacccacacacc

SEQ ID NO: 169041 - DNA, 20 bp, Artificial Sequence
  Synthetic oligonucleotide; AAG chr2 60544980 60544999 60544996 +
ctccctgctaaaattaacca

SEQ ID NO: 169042 - DNA, 20 bp, Artificial Sequence
  Synthetic oligonucleotide; AGG chr2 60544981 60545000 60544997 +
tccctgctaaaattaaccaa

SEQ ID NO: 169043 - DNA, 20 bp, Artificial Sequence
  Synthetic oligonucleotide; GAG chr2 60544983 60545002 60544999 +
cctgctaaaattaaccaaag

SEQ ID NO: 169044 - DNA, 20 bp, Artificial Sequence
  Synthetic oligonucleotide; AGG chr2 60544984 60545003 60545000 +
ctgctaaaattaaccaaagg

SEQ ID NO: 169045 - DNA, 20 bp, Artificial Sequence
  Synthetic oligonucleotide; GGG chr2 60544985 60545004 60545001 +
tgctaaaattaaccaaagga

SEQ ID NO: 169046 - DNA, 20 bp, Artificial Sequence
  Synthetic oligonucleotide; GAG chr2 60544987 60545006 60545003 +
ctaaaattaaccaaaggagg

SEQ ID NO: 169047 - DNA, 20 bp, Artificial Sequence
  Synthetic oligonucleotide; AGG chr2 60544988 60545007 60545004 +
taaaattaaccaaaggaggg

SEQ ID NO: 169048 - DNA, 20 bp, Artificial Sequence
  Synthetic oligonucleotide; GGG chr2 60544989 60545008 60545005 +
aaaattaaccaaaggaggga

SEQ ID NO: 169049 - DNA, 20 bp, Artificial Sequence
  Synthetic oligonucleotide; AAG chr2 60545019 60545038 60545035 +
atacgtgtgtgtatttttcc

SEQ ID NO: 169050 - DNA, 20 bp, Artificial Sequence
  Synthetic oligonucleotide; TAG chr2 60545042 60545061 60545058 +
aaaatttttacattgtgtta

SEQ ID NO: 169051 - DNA, 20 bp, Artificial Sequence
  Synthetic oligonucleotide; CAG chr2 60545045 60545064 60545061 +
atttttacattgtgttatag

SEQ ID NO: 169052 - DNA, 20 bp, Artificial Sequence
  Synthetic oligonucleotide; CAG chr2 60545051 60545070 60545067 +
acattgtgttatagcagaaa

SEQ ID NO: 169053 - DNA, 20 bp, Artificial Sequence
  Synthetic oligonucleotide; TGG chr2 60545054 60545073 60545070 +
ttgtgttatagcagaaacag

SEQ ID NO: 169054 - DNA, 20 bp, Artificial Sequence
  Synthetic oligonucleotide; GAG chr2 60545056 60545075 60545072 +
gtgttatagcagaaacagtg

SEQ ID NO: 169055 - DNA, 20 bp, Artificial Sequence
  Synthetic oligonucleotide; TGG chr2 60545061 60545080 60545077 +
atagcagaaacagtggagtc

SEQ ID NO: 169056 - DNA, 20 bp, Artificial Sequence
  Synthetic oligonucleotide; TGG chr2 60545066 60545085 60545082 +
agaaacagtggagtctggac

SEQ ID NO: 169057 - DNA, 20 bp, Artificial Sequence
  Synthetic oligonucleotide; AAG chr2 60545077 60545096 60545093 +
agtctggactggacatttgt

SEQ ID NO: 169058 - DNA, 20 bp, Artificial Sequence
  Synthetic oligonucleotide; AGG chr2 60545078 60545097 60545094 +
gtctggactggacatttgta

SEQ ID NO: 169059 - DNA, 20 bp, Artificial Sequence
  Synthetic oligonucleotide; GGG chr2 60545079 60545098 60545095 +
tctggactggacatttgtaa

SEQ ID NO: 169060 - DNA, 20 bp, Artificial Sequence
  Synthetic oligonucleotide; TGG chr2 60545089 60545108 60545105 +
acatttgtaagggtgacatg

SEQ ID NO: 169061 - DNA, 20 bp, Artificial Sequence
  Synthetic oligonucleotide; AAG chr2 60545115 60545134 60545131 +
tgtaaaccacaaacaaaatc

SEQ ID NO: 169062 - DNA, 20 bp, Artificial Sequence
  Synthetic oligonucleotide; CAG chr2 60545139 60545158 60545155 +
tacatctgtcaaaaccacat

SEQ ID NO: 169063 - DNA, 20 bp, Artificial Sequence
  Synthetic oligonucleotide; GAG chr2 60545141 60545160 60545157 +
catctgtcaaaaccacatca

SEQ ID NO: 169064 - DNA, 20 bp, Artificial Sequence
  Synthetic oligonucleotide; AAG chr2 60545146 60545165 60545162 +
gtcaaaaccacatcagagac

SEQ ID NO: 169065 - DNA, 20 bp, Artificial Sequence
  Synthetic oligonucleotide; GAG chr2 60545148 60545167 60545164 +
caaaaccacatcagagacaa

SEQ ID NO: 169066 - DNA, 20 bp, Artificial Sequence
  Synthetic oligonucleotide; GAG chr2 60545150 60545169 60545166 +
aaaccacatcagagacaaga

SEQ ID NO: 169067 - DNA, 20 bp, Artificial Sequence
  Synthetic oligonucleotide; GAG chr2 60545152 60545171 60545168 +
accacatcagagacaagaga

SEQ ID NO: 169068 - DNA, 20 bp, Artificial Sequence
  Synthetic oligonucleotide; CAG chr2 60545157 60545176 60545173 +
atcagagacaagagagagca

SEQ ID NO: 169069 - DNA, 20 bp, Artificial Sequence
  Synthetic oligonucleotide; GAG chr2 60545159 60545178 60545175 +
cagagacaagagagagcaca

SEQ ID NO: 169070 - DNA, 20 bp, Artificial Sequence
  Synthetic oligonucleotide; AAG chr2 60545162 60545181 60545178 +
agacaagagagagcacagag

SEQ ID NO: 169071 - DNA, 20 bp, Artificial Sequence
  Synthetic oligonucleotide; TAG chr2 60545176 60545195 60545192 +
acagagaagcatttatcatt

SEQ ID NO: 169072 - DNA, 20 bp, Artificial Sequence
  Synthetic oligonucleotide; GAG chr2 60545181 60545200 60545197 +
gaagcatttatcatttagct

SEQ ID NO: 169073 - DNA, 20 bp, Artificial Sequence
  Synthetic oligonucleotide; AGG chr2 60545182 60545201 60545198 +
aagcatttatcatttagctg

SEQ ID NO: 169074 - DNA, 20 bp, Artificial Sequence
  Synthetic oligonucleotide; GAG chr2 60545184 60545203 60545200 +
gcatttatcatttagctgag

SEQ ID NO: 169075 - DNA, 20 bp, Artificial Sequence
  Synthetic oligonucleotide; AGG chr2 60545185 60545204 60545201 +
catttatcatttagctgagg

SEQ ID NO: 169076 - DNA, 20 bp, Artificial Sequence
  Synthetic oligonucleotide; CAG chr2 60545188 60545207 60545204 +
ttatcatttagctgaggagg

SEQ ID NO: 169077 - DNA, 20 bp, Artificial Sequence
  Synthetic oligonucleotide; AGG chr2 60545189 60545208 60545205 +
tatcatttagctgaggaggc

SEQ ID NO: 169078 - DNA, 20 bp, Artificial Sequence
  Synthetic oligonucleotide; CAG chr2 60545195 60545214 60545211 +
ttagctgaggaggcaggctg

SEQ ID NO: 169079 - DNA, 20 bp, Artificial Sequence
  Synthetic oligonucleotide; AGG chr2 60545196 60545215 60545212 +
tagctgaggaggcaggctgc

SEQ ID NO: 169080 - DNA, 20 bp, Artificial Sequence
  Synthetic oligonucleotide; GGG chr2 60545197 60545216 60545213 +
agctgaggaggcaggctgca

SEQ ID NO: 169081 - DNA, 20 bp, Artificial Sequence
  Synthetic oligonucleotide; GAG chr2 60545199 60545218 60545215 +
ctgaggaggcaggctgcagg

SEQ ID NO: 169082 - DNA, 20 bp, Artificial Sequence
  Synthetic oligonucleotide; CAG chr2 60545202 60545221 60545218 +
aggaggcaggctgcagggag

SEQ ID NO: 169083 - DNA, 20 bp, Artificial Sequence
  Synthetic oligonucleotide; GAG chr2 60545258 60545277 60545274 +
aacatgcccttaaacttttc

SEQ ID NO: 169084 - DNA, 20 bp, Artificial Sequence
  Synthetic oligonucleotide; AAG chr2 60545262 60545281 60545278 +
tgcccttaaacttttcgagt

SEQ ID NO: 169085 - DNA, 20 bp, Artificial Sequence
  Synthetic oligonucleotide; CAG chr2 60545280 60545299 60545296 +
gtaagcatgtctgtgcgctt

SEQ ID NO: 169086 - DNA, 20 bp, Artificial Sequence
  Synthetic oligonucleotide; TGG chr2 60545301 60545320 60545317 +
agcaactgccctctctactc

SEQ ID NO: 169087 - DNA, 20 bp, Artificial Sequence
  Synthetic oligonucleotide; TGG chr2 60545306 60545325 60545322 +
ctgccctctctactctggcc

SEQ ID NO: 169088 - DNA, 20 bp, Artificial Sequence
  Synthetic oligonucleotide; CAG chr2 60545310 60545329 60545326 +
cctctctactctggcctggc

SEQ ID NO: 169089 - DNA, 20 bp, Artificial Sequence
  Synthetic oligonucleotide; TGG chr2 60545320 60545339 60545336 +
ctggcctggccagtcgaaaa

SEQ ID NO: 169090 - DNA, 20 bp, Artificial Sequence
  Synthetic oligonucleotide; AAG chr2 60545330 60545349 60545346 +
cagtcgaaaatggcatctta

SEQ ID NO: 169091 - DNA, 20 bp, Artificial Sequence
  Synthetic oligonucleotide; AAG chr2 60545335 60545354 60545351 +
gaaaatggcatcttaaagtc

SEQ ID NO: 169092 - DNA, 20 bp, Artificial Sequence
  Synthetic oligonucleotide; AGG chr2 60545336 60545355 60545352 +
aaaatggcatcttaaagtca

SEQ ID NO: 169093 - DNA, 20 bp, Artificial Sequence
  Synthetic oligonucleotide; TGG chr2 60545342 60545361 60545358 +
gcatcttaaagtcaaggtca

SEQ ID NO: 169094 - DNA, 20 bp, Artificial Sequence
  Synthetic oligonucleotide; CGG chr2 60545358 60545377 60545374 +
gtcatggtgtcatcccacca

SEQ ID NO: 169095 - DNA, 20 bp, Artificial Sequence
  Synthetic oligonucleotide; GGG chr2 60545359 60545378 60545375 +
tcatggtgtcatcccaccac

SEQ ID NO: 169096 - DNA, 20 bp, Artificial Sequence
  Synthetic oligonucleotide; GGG chr2 60545360 60545379 60545376 +
catggtgtcatcccaccacg

SEQ ID NO: 169097 - DNA, 20 bp, Artificial Sequence
  Synthetic oligonucleotide; CAG chr2 60545376 60545395 60545392 +
cacggggctgtgtttaatta

SEQ ID NO: 169098 - DNA, 20 bp, Artificial Sequence
  Synthetic oligonucleotide; CGG chr2 60545386 60545405 60545402 +
tgtttaattacagccccatc

SEQ ID NO: 169099 - DNA, 20 bp, Artificial Sequence
  Synthetic oligonucleotide; GGG chr2 60545387 60545406 60545403 +
gtttaattacagccccatcc

SEQ ID NO: 169100 - DNA, 20 bp, Artificial Sequence
  Synthetic oligonucleotide; CAG chr2 60545394 60545413 60545410 +
tacagccccatccgggctga

SEQ ID NO: 169101 - DNA, 20 bp, Artificial Sequence
  Synthetic oligonucleotide; TGG chr2 60545403 60545422 60545419 +
atccgggctgacagccaata

SEQ ID NO: 169102 - DNA, 20 bp, Artificial Sequence
  Synthetic oligonucleotide; AAG chr2 60545410 60545429 60545426 +
ctgacagccaatatggatcc

SEQ ID NO: 169103 - DNA, 20 bp, Artificial Sequence
  Synthetic oligonucleotide; AGG chr2 60545411 60545430 60545427 +
tgacagccaatatggatcca

SEQ ID NO: 169104 - DNA, 20 bp, Artificial Sequence
  Synthetic oligonucleotide; TAG chr2 60545415 60545434 60545431 +
agccaatatggatccaaggc

SEQ ID NO: 169105 - DNA, 20 bp, Artificial Sequence
  Synthetic oligonucleotide; AAG chr2 60545423 60545442 60545439 +
tggatccaaggctagccctg

SEQ ID NO: 169106 - DNA, 20 bp, Artificial Sequence
  Synthetic oligonucleotide; CAG chr2 60545428 60545447 60545444 +
ccaaggctagccctgaagct

SEQ ID NO: 169107 - DNA, 20 bp, Artificial Sequence
  Synthetic oligonucleotide; CAG chr2 60545463 60545482 60545479 +
accacctccaactaccctgc

SEQ ID NO: 169108 - DNA, 20 bp, Artificial Sequence
  Synthetic oligonucleotide; CAG chr2 60545478 60545497 60545494 +
cctgccagcccactctactt

SEQ ID NO: 169109 - DNA, 20 bp, Artificial Sequence
  Synthetic oligonucleotide; AGG chr2 60545479 60545498 60545495 +
ctgccagcccactctacttc

SEQ ID NO: 169110 - DNA, 20 bp, Artificial Sequence
  Synthetic oligonucleotide; GGG chr2 60545480 60545499 60545496 +
tgccagcccactctacttca

SEQ ID NO: 169111 - DNA, 20 bp, Artificial Sequence
  Synthetic oligonucleotide; AAG chr2 60545483 60545502 60545499 +
cagcccactctacttcaggg

SEQ ID NO: 169112 - DNA, 20 bp, Artificial Sequence
  Synthetic oligonucleotide; GAG chr2 60545490 60545509 60545506 +
ctctacttcagggaagcctt

SEQ ID NO: 169113 - DNA, 20 bp, Artificial Sequence
  Synthetic oligonucleotide; GAG chr2 60545496 60545515 60545512 +
ttcagggaagccttgagaac

SEQ ID NO: 169114 - DNA, 20 bp, Artificial Sequence
  Synthetic oligonucleotide; AAG chr2 60545509 60545528 60545525 +
tgagaacgagctgaacccct

SEQ ID NO: 169115 - DNA, 20 bp, Artificial Sequence
  Synthetic oligonucleotide; AGG chr2 60545510 60545529 60545526 +
gagaacgagctgaaccccta

SEQ ID NO: 169116 - DNA, 20 bp, Artificial Sequence
  Synthetic oligonucleotide; GAG chr2 60545512 60545531 60545528 +
gaacgagctgaacccctaag

SEQ ID NO: 169117 - DNA, 20 bp, Artificial Sequence
  Synthetic oligonucleotide; AGG chr2 60545513 60545532 60545529 +
aacgagctgaacccctaagg

SEQ ID NO: 169118 - DNA, 20 bp, Artificial Sequence
  Synthetic oligonucleotide; TGG chr2 60545518 60545537 60545534 +
gctgaacccctaaggaggcc

SEQ ID NO: 169119 - DNA, 20 bp, Artificial Sequence
  Synthetic oligonucleotide; CAG chr2 60545522 60545541 60545538 +
aacccctaaggaggcctggc

SEQ ID NO: 169120 - DNA, 20 bp, Artificial Sequence
  Synthetic oligonucleotide; GAG chr2 60545532 60545551 60545548 +
gaggcctggccagatgttct

SEQ ID NO: 169121 - DNA, 20 bp, Artificial Sequence
  Synthetic oligonucleotide; AAG chr2 60545541 60545560 60545557 +
ccagatgttctgagtcaaac

SEQ ID NO: 169122 - DNA, 20 bp, Artificial Sequence
  Synthetic oligonucleotide; TGG chr2 60545548 60545567 60545564 +
ttctgagtcaaacaagtcat

SEQ ID NO: 169123 - DNA, 20 bp, Artificial Sequence
  Synthetic oligonucleotide; TGG chr2 60545571 60545590 60545587 +
ctgaactgcaaatgcctata

SEQ ID NO: 169124 - DNA, 20 bp, Artificial Sequence
  Synthetic oligonucleotide; AAG chr2 60545598 60545617 60545614 +
tttgcctctgacacgtcacc

SEQ ID NO: 169125 - DNA, 20 bp, Artificial Sequence
  Synthetic oligonucleotide; AGG chr2 60545599 60545618 60545615 +
ttgcctctgacacgtcacca

SEQ ID NO: 169126 - DNA, 20 bp, Artificial Sequence
  Synthetic oligonucleotide; TGG chr2 60545603 60545622 60545619 +
ctctgacacgtcaccaaggc

SEQ ID NO: 169127 - DNA, 20 bp, Artificial Sequence
  Synthetic oligonucleotide; TGG chr2 60545609 60545628 60545625 +
cacgtcaccaaggctggaaa

SEQ ID NO: 169128 - DNA, 20 bp, Artificial Sequence
  Synthetic oligonucleotide; TGG chr2 60545616 60545635 60545632 +
ccaaggctggaaatggacaa

SEQ ID NO: 169129 - DNA, 20 bp, Artificial Sequence
  Synthetic oligonucleotide; AAG chr2 60545619 60545638 60545635 +
aggctggaaatggacaatgg

SEQ ID NO: 169130 - DNA, 20 bp, Artificial Sequence
  Synthetic oligonucleotide; TGG chr2 60545623 60545642 60545639 +
tggaaatggacaatggaagc

SEQ ID NO: 169131 - DNA, 20 bp, Artificial Sequence
  Synthetic oligonucleotide; TAG chr2 60545628 60545647 60545644 +
atggacaatggaagctggac

SEQ ID NO: 169132 - DNA, 20 bp, Artificial Sequence
  Synthetic oligonucleotide; AGG chr2 60545629 60545648 60545645 +
tggacaatggaagctggact

SEQ ID NO: 169133 - DNA, 20 bp, Artificial Sequence
  Synthetic oligonucleotide; TAG chr2 60545634 60545653 60545650 +
aatggaagctggactaggtg

SEQ ID NO: 169134 - DNA, 20 bp, Artificial Sequence
  Synthetic oligonucleotide; AAG chr2 60545639 60545658 60545655 +
aagctggactaggtgtagta

SEQ ID NO: 169135 - DNA, 20 bp, Artificial Sequence
  Synthetic oligonucleotide; GAG chr2 60545658 60545677 60545674 +
aaagctcaatacttcaaaat

SEQ ID NO: 169136 - DNA, 20 bp, Artificial Sequence
  Synthetic oligonucleotide; AAG chr2 60545661 60545680 60545677 +
gctcaatacttcaaaatgag

SEQ ID NO: 169137 - DNA, 20 bp, Artificial Sequence
  Synthetic oligonucleotide; AGG chr2 60545662 60545681 60545678 +
ctcaatacttcaaaatgaga

SEQ ID NO: 169138 - DNA, 20 bp, Artificial Sequence
  Synthetic oligonucleotide; TGG chr2 60545665 60545684 60545681 +
aatacttcaaaatgagaagg

SEQ ID NO: 169139 - DNA, 20 bp, Artificial Sequence
  Synthetic oligonucleotide; GGG chr2 60545666 60545685 60545682 +
atacttcaaaatgagaaggt

SEQ ID NO: 169140 - DNA, 20 bp, Artificial Sequence
  Synthetic oligonucleotide; GGG chr2 60545667 60545686 60545683 +
tacttcaaaatgagaaggtg

SEQ ID NO: 169141 - DNA, 20 bp, Artificial Sequence
  Synthetic oligonucleotide; TGG chr2 60545671 60545690 60545687 +
tcaaaatgagaaggtgggga

SEQ ID NO: 169142 - DNA, 20 bp, Artificial Sequence
  Synthetic oligonucleotide; GGG chr2 60545672 60545691 60545688 +
caaaatgagaaggtggggat

SEQ ID NO: 169143 - DNA, 20 bp, Artificial Sequence
  Synthetic oligonucleotide; GGG chr2 60545673 60545692 60545689 +
aaaatgagaaggtggggatg

SEQ ID NO: 169144 - DNA, 20 bp, Artificial Sequence
  Synthetic oligonucleotide; AAG chr2 60545676 60545695 60545692 +
atgagaaggtggggatgggg

SEQ ID NO: 169145 - DNA, 20 bp, Artificial Sequence
  Synthetic oligonucleotide; AAG chr2 60545681 60545700 60545697 +
aaggtggggatggggaagaa

SEQ ID NO: 169146 - DNA, 20 bp, Artificial Sequence
  Synthetic oligonucleotide; CAG chr2 60545698 60545717 60545714 +
gaaaagaaatccaaaatcga

SEQ ID NO: 169147 - DNA, 20 bp, Artificial Sequence
  Synthetic oligonucleotide; CAG chr2 60545704 60545723 60545720 +
aaatccaaaatcgacagatc

SEQ ID NO: 169148 - DNA, 20 bp, Artificial Sequence
  Synthetic oligonucleotide; GAG chr2 60545706 60545725 60545722 +
atccaaaatcgacagatcca

SEQ ID NO: 169149 - DNA, 20 bp, Artificial Sequence
  Synthetic oligonucleotide; GAG chr2 60545708 60545727 60545724 +
ccaaaatcgacagatccaga

SEQ ID NO: 169150 - DNA, 20 bp, Artificial Sequence
  Synthetic oligonucleotide; AAG chr2 60545711 60545730 60545727 +
aaatcgacagatccagagag

SEQ ID NO: 169151 - DNA, 20 bp, Artificial Sequence
  Synthetic oligonucleotide; AGG chr2 60545712 60545731 60545728 +
aatcgacagatccagagaga

SEQ ID NO: 169152 - DNA, 20 bp, Artificial Sequence
  Synthetic oligonucleotide; CAG chr2 60545752 60545771 60545768 +
tatcctgcctacatctgatt

SEQ ID NO: 169153 - DNA, 20 bp, Artificial Sequence
  Synthetic oligonucleotide; GAG chr2 60545756 60545775 60545772 +
ctgcctacatctgattcagt

SEQ ID NO: 169154 - DNA, 20 bp, Artificial Sequence
  Synthetic oligonucleotide; AGG chr2 60545757 60545776 60545773 +
tgcctacatctgattcagtg

SEQ ID NO: 169155 - DNA, 20 bp, Artificial Sequence
  Synthetic oligonucleotide; TGG chr2 60545760 60545779 60545776 +
ctacatctgattcagtgagg

SEQ ID NO: 169156 - DNA, 20 bp, Artificial Sequence
  Synthetic oligonucleotide; TGG chr2 60545786 60545805 60545802 +
atatttatttttctgtgttc

SEQ ID NO: 169157 - DNA, 20 bp, Artificial Sequence
  Synthetic oligonucleotide; AAG chr2 60545793 60545812 60545809 +
tttttctgtgttctggacgt

SEQ ID NO: 169158 - DNA, 20 bp, Artificial Sequence
  Synthetic oligonucleotide; CAG chr2 60545799 60545818 60545815 +
tgtgttctggacgtaagcaa

SEQ ID NO: 169159 - DNA, 20 bp, Artificial Sequence
  Synthetic oligonucleotide; CAG chr2 60545822 60545841 60545838 +
aaatgattattttaacatta

SEQ ID NO: 169160 - DNA, 20 bp, Artificial Sequence
  Synthetic oligonucleotide; AGG chr2 60545823 60545842 60545839 +
aatgattattttaacattac

SEQ ID NO: 169161 - DNA, 20 bp, Artificial Sequence
  Synthetic oligonucleotide; GGG chr2 60545824 60545843 60545840 +
atgattattttaacattaca

SEQ ID NO: 169162 - DNA, 20 bp, Artificial Sequence
  Synthetic oligonucleotide; TGG chr2 60545833 60545852 60545849 +
ttaacattacagggctgtca

SEQ ID NO: 169163 - DNA, 20 bp, Artificial Sequence
  Synthetic oligonucleotide; CAG chr2 60545837 60545856 60545853 +
cattacagggctgtcatgga

SEQ ID NO: 169164 - DNA, 20 bp, Artificial Sequence
  Synthetic oligonucleotide; TAG chr2 60545845 60545864 60545861 +
ggctgtcatggacagtcaca

SEQ ID NO: 169165 - DNA, 20 bp, Artificial Sequence
  Synthetic oligonucleotide; GAG chr2 60545847 60545866 60545863 +
ctgtcatggacagtcacata

SEQ ID NO: 169166 - DNA, 20 bp, Artificial Sequence
  Synthetic oligonucleotide; TAG chr2 60545853 60545872 60545869 +
tggacagtcacatagagtaa

SEQ ID NO: 169167 - DNA, 20 bp, Artificial Sequence
  Synthetic oligonucleotide; GAG chr2 60545855 60545874 60545871 +
gacagtcacatagagtaata

SEQ ID NO: 169168 - DNA, 20 bp, Artificial Sequence
  Synthetic oligonucleotide; AAG chr2 60545859 60545878 60545875 +
gtcacatagagtaatagaga

SEQ ID NO: 169169 - DNA, 20 bp, Artificial Sequence
  Synthetic oligonucleotide; TGG chr2 60545884 60545903 60545900 +
cttcacaactccttactgct

SEQ ID NO: 169170 - DNA, 20 bp, Artificial Sequence
  Synthetic oligonucleotide; CAG chr2 60545890 60545909 60545906 +
aactccttactgcttggcta

SEQ ID NO: 169171 - DNA, 20 bp, Artificial Sequence
  Synthetic oligonucleotide; AAG chr2 60545909 60545928 60545925 +
acagcacctctgaaaatgaa

SEQ ID NO: 169172 - DNA, 20 bp, Artificial Sequence
  Synthetic oligonucleotide; CAG chr2 60545924 60545943 60545940 +
atgaaaagaaaacatgcaaa

SEQ ID NO: 169173 - DNA, 20 bp, Artificial Sequence
  Synthetic oligonucleotide; TGG chr2 60545969 60545988 60545985 +
acctgctatgtgttcctgtt

SEQ ID NO: 169174 - DNA, 20 bp, Artificial Sequence
  Synthetic oligonucleotide; GGG chr2 60545970 60545989 60545986 +
cctgctatgtgttcctgttt

SEQ ID NO: 169175 - DNA, 20 bp, Artificial Sequence
  Synthetic oligonucleotide; GGG chr2 60545971 60545990 60545987 +
ctgctatgtgttcctgtttg

SEQ ID NO: 169176 - DNA, 20 bp, Artificial Sequence
  Synthetic oligonucleotide; TAG chr2 60545984 60546003 60546000 +
ctgtttggggcaaattcctc

SEQ ID NO: 169177 - DNA, 20 bp, Artificial Sequence
  Synthetic oligonucleotide; TGG chr2 60546015 60546034 60546031 +
gataaacaatcgtcatcctc

SEQ ID NO: 169178 - DNA, 20 bp, Artificial Sequence
  Synthetic oligonucleotide; TGG chr2 60546025 60546044 60546041 +
cgtcatcctctggcgtgacc

SEQ ID NO: 169179 - DNA, 20 bp, Artificial Sequence
  Synthetic oligonucleotide; CGG chr2 60546041 60546060 60546057 +
gacctggatgccaacctcca

SEQ ID NO: 169180 - DNA, 20 bp, Artificial Sequence
  Synthetic oligonucleotide; GGG chr2 60546042 60546061 60546058 +
acctggatgccaacctccac

SEQ ID NO: 169181 - DNA, 20 bp, Artificial Sequence
  Synthetic oligonucleotide; TGG chr2 60546047 60546066 60546063 +
gatgccaacctccacgggat

SEQ ID NO: 169182 - DNA, 20 bp, Artificial Sequence
  Synthetic oligonucleotide; TGG chr2 60546069 60546088 60546085 +
gatgcttttttcatctcgat

SEQ ID NO: 169183 - DNA, 20 bp, Artificial Sequence
  Synthetic oligonucleotide; AAG chr2 60546074 60546093 60546090 +
ttttttcatctcgattggtg

SEQ ID NO: 169184 - DNA, 20 bp, Artificial Sequence
  Synthetic oligonucleotide; AGG chr2 60546075 60546094 60546091 +
tttttcatctcgattggtga

SEQ ID NO: 169185 - DNA, 20 bp, Artificial Sequence
  Synthetic oligonucleotide; GGG chr2 60546076 60546095 60546092 +
ttttcatctcgattggtgaa

SEQ ID NO: 169186 - DNA, 20 bp, Artificial Sequence
  Synthetic oligonucleotide; GGG chr2 60546077 60546096 60546093 +
tttcatctcgattggtgaag

SEQ ID NO: 169187 - DNA, 20 bp, Artificial Sequence
  Synthetic oligonucleotide; AAG chr2 60546080 60546099 60546096 +
catctcgattggtgaagggg

SEQ ID NO: 169188 - DNA, 20 bp, Artificial Sequence
  Synthetic oligonucleotide; AGG chr2 60546081 60546100 60546097 +
atctcgattggtgaagggga

SEQ ID NO: 169189 - DNA, 20 bp, Artificial Sequence
  Synthetic oligonucleotide; TGG chr2 60546084 60546103 60546100 +
tcgattggtgaaggggaagg

SEQ ID NO: 169190 - DNA, 20 bp, Artificial Sequence
  Synthetic oligonucleotide; CAG chr2 60546095 60546114 60546111 +
aggggaaggtggcttatcca

SEQ ID NO: 169191 - DNA, 20 bp, Artificial Sequence
  Synthetic oligonucleotide; AAG chr2 60546106 60546125 60546122 +
gcttatccacagctttttct

SEQ ID NO: 169192 - DNA, 20 bp, Artificial Sequence
  Synthetic oligonucleotide; CAG chr2 60546109 60546128 60546125 +
tatccacagctttttctaag

SEQ ID NO: 169193 - DNA, 20 bp, Artificial Sequence
  Synthetic oligonucleotide; GAG chr2 60546111 60546130 60546127 +
tccacagctttttctaagca

SEQ ID NO: 169194 - DNA, 20 bp, Artificial Sequence
  Synthetic oligonucleotide; AGG chr2 60546112 60546131 60546128 +
ccacagctttttctaagcag

SEQ ID NO: 169195 - DNA, 20 bp, Artificial Sequence
  Synthetic oligonucleotide; AAG chr2 60546153 60546172 60546169 +
cgtttgtgctcgataaaaat

SEQ ID NO: 169196 - DNA, 20 bp, Artificial Sequence
  Synthetic oligonucleotide; TGG chr2 60546168 60546187 60546184 +
aaaataagaatgtcccccaa

SEQ ID NO: 169197 - DNA, 20 bp, Artificial Sequence
  Synthetic oligonucleotide; GGG chr2 60546169 60546188 60546185 +
aaataagaatgtcccccaat

SEQ ID NO: 169198 - DNA, 20 bp, Artificial Sequence
  Synthetic oligonucleotide; AAG chr2 60546172 60546191 60546188 +
taagaatgtcccccaatggg

SEQ ID NO: 169199 - DNA, 20 bp, Artificial Sequence
  Synthetic oligonucleotide; TGG chr2 60546181 60546200 60546197 +
cccccaatgggaagttcatc

SEQ ID NO: 169200 - DNA, 20 bp, Artificial Sequence
  Synthetic oligonucleotide; CAG chr2 60546193 60546212 60546209 +
agttcatctggcactgccca

SEQ ID NO: 169201 - DNA, 20 bp, Artificial Sequence
  Synthetic oligonucleotide; AGG chr2 60546194 60546213 60546210 +
gttcatctggcactgcccac

SEQ ID NO: 169202 - DNA, 20 bp, Artificial Sequence
  Synthetic oligonucleotide; GAG chr2 60546198 60546217 60546214 +
atctggcactgcccacaggt

SEQ ID NO: 169203 - DNA, 20 bp, Artificial Sequence
  Synthetic oligonucleotide; AGG chr2 60546199 60546218 60546215 +
tctggcactgcccacaggtg

SEQ ID NO: 169204 - DNA, 20 bp, Artificial Sequence
  Synthetic oligonucleotide; GAG chr2 60546201 60546220 60546217 +
tggcactgcccacaggtgag

SEQ ID NO: 169205 - DNA, 20 bp, Artificial Sequence
  Synthetic oligonucleotide; AGG chr2 60546202 60546221 60546218 +
ggcactgcccacaggtgagg

SEQ ID NO: 169206 - DNA, 20 bp, Artificial Sequence
  Synthetic oligonucleotide; TGG chr2 60546219 60546238 60546235 +
aggaggtcatgatccccttc

SEQ ID NO: 169207 - DNA, 20 bp, Artificial Sequence
  Synthetic oligonucleotide; GAG chr2 60546221 60546240 60546237 +
gaggtcatgatccccttctg

SEQ ID NO: 169208 - DNA, 20 bp, Artificial Sequence
  Synthetic oligonucleotide; CGG chr2 60546231 60546250 60546247 +
tccccttctggagctcccaa

SEQ ID NO: 169209 - DNA, 20 bp, Artificial Sequence
  Synthetic oligonucleotide; GGG chr2 60546232 60546251 60546248 +
ccccttctggagctcccaac

SEQ ID NO: 169210 - DNA, 20 bp, Artificial Sequence
  Synthetic oligonucleotide; TGG chr2 60546238 60546257 60546254 +
ctggagctcccaacgggccg

SEQ ID NO: 169211 - DNA, 20 bp, Artificial Sequence
  Synthetic oligonucleotide; TGG chr2 60546243 60546262 60546259 +
gctcccaacgggccgtggtc

SEQ ID NO: 169212 - DNA, 20 bp, Artificial Sequence
  Synthetic oligonucleotide; AAG chr2 60546258 60546277 60546274 +
tggtctggttcatcatctgt

SEQ ID NO: 169213 - DNA, 20 bp, Artificial Sequence
  Synthetic oligonucleotide; TGG chr2 60546263 60546282 60546279 +
tggttcatcatctgtaagaa

SEQ ID NO: 169214 - DNA, 20 bp, Artificial Sequence
  Synthetic oligonucleotide; AAG chr2 60546270 60546289 60546286 +
tcatctgtaagaatggcttc

SEQ ID NO: 169215 - DNA, 20 bp, Artificial Sequence
  Synthetic oligonucleotide; GAG chr2 60546272 60546291 60546288 +
atctgtaagaatggcttcaa

SEQ ID NO: 169216 - DNA, 20 bp, Artificial Sequence
  Synthetic oligonucleotide; AGG chr2 60546273 60546292 60546289 +
tctgtaagaatggcttcaag

SEQ ID NO: 169217 - DNA, 20 bp, Artificial Sequence
  Synthetic oligonucleotide; CGG chr2 60546278 60546297 60546294 +
aagaatggcttcaagaggct

SEQ ID NO: 169218 - DNA, 20 bp, Artificial Sequence
  Synthetic oligonucleotide; TGG chr2 60546284 60546303 60546300 +
ggcttcaagaggctcggctg

SEQ ID NO: 169219 - DNA, 20 bp, Artificial Sequence
  Synthetic oligonucleotide; TGG chr2 60546288 60546307 60546304 +
tcaagaggctcggctgtggt

SEQ ID NO: 169220 - DNA, 20 bp, Artificial Sequence
  Synthetic oligonucleotide; GAG chr2 60546290 60546309 60546306 +
aagaggctcggctgtggttg

SEQ ID NO: 169221 - DNA, 20 bp, Artificial Sequence
  Synthetic oligonucleotide; AAG chr2 60546299 60546318 60546315 +
ggctgtggttggagaaacaa

SEQ ID NO: 169222 - DNA, 20 bp, Artificial Sequence
  Synthetic oligonucleotide; TAG chr2 60546311 60546330 60546327 +
agaaacaaaagcacaattat

SEQ ID NO: 169223 - DNA, 20 bp, Artificial Sequence
  Synthetic oligonucleotide; GAG chr2 60546313 60546332 60546329 +
aaacaaaagcacaattatta

SEQ ID NO: 169224 - DNA, 20 bp, Artificial Sequence
  Synthetic oligonucleotide; CAG chr2 60546319 60546338 60546335 +
aagcacaattattagagtgc

SEQ ID NO: 169225 - DNA, 20 bp, Artificial Sequence
  Synthetic oligonucleotide; GAG chr2 60546321 60546340 60546337 +
gcacaattattagagtgcca

SEQ ID NO: 169226 - DNA, 20 bp, Artificial Sequence
  Synthetic oligonucleotide; GAG chr2 60546323 60546342 60546339 +
acaattattagagtgccaga

SEQ ID NO: 169227 - DNA, 20 bp, Artificial Sequence
  Synthetic oligonucleotide; AGG chr2 60546324 60546343 60546340 +
caattattagagtgccagag

SEQ ID NO: 169228 - DNA, 20 bp, Artificial Sequence
  Synthetic oligonucleotide; CAG chr2 60546328 60546347 60546344 +
tattagagtgccagagagga

SEQ ID NO: 169229 - DNA, 20 bp, Artificial Sequence
  Synthetic oligonucleotide; AAG chr2 60546332 60546351 60546348 +
agagtgccagagaggacaga

SEQ ID NO: 169230 - DNA, 20 bp, Artificial Sequence
  Synthetic oligonucleotide; AGG chr2 60546333 60546352 60546349 +
gagtgccagagaggacagaa

SEQ ID NO: 169231 - DNA, 20 bp, Artificial Sequence
  Synthetic oligonucleotide; GGG chr2 60546334 60546353 60546350 +
agtgccagagaggacagaaa

SEQ ID NO: 169232 - DNA, 20 bp, Artificial Sequence
  Synthetic oligonucleotide; GGG chr2 60546335 60546354 60546351 +
gtgccagagaggacagaaag

SEQ ID NO: 169233 - DNA, 20 bp, Artificial Sequence
  Synthetic oligonucleotide; GAG chr2 60546337 60546356 60546353 +
gccagagaggacagaaaggg

SEQ ID NO: 169234 - DNA, 20 bp, Artificial Sequence
  Synthetic oligonucleotide; AAG chr2 60546340 60546359 60546356 +
agagaggacagaaaggggag

SEQ ID NO: 169235 - DNA, 20 bp, Artificial Sequence
  Synthetic oligonucleotide; AAG chr2 60546380 60546399 60546396 +
ccatcccaccacatcatgta

SEQ ID NO: 169236 - DNA, 20 bp, Artificial Sequence
  Synthetic oligonucleotide; TAG chr2 60546389 60546408 60546405 +
cacatcatgtaaagtgtttc

SEQ ID NO: 169237 - DNA, 20 bp, Artificial Sequence
  Synthetic oligonucleotide; AGG chr2 60546390 60546409 60546406 +
acatcatgtaaagtgtttct

SEQ ID NO: 169238 - DNA, 20 bp, Artificial Sequence
  Synthetic oligonucleotide; CAG chr2 60546410 60546429 60546426 +
aggcttctctatataatacc

SEQ ID NO: 169239 - DNA, 20 bp, Artificial Sequence
  Synthetic oligonucleotide; GAG chr2 60546420 60546439 60546436 +
atataatacccagaaaatgt

SEQ ID NO: 169240 - DNA, 20 bp, Artificial Sequence
  Synthetic oligonucleotide; AAG chr2 60546431 60546450 60546447 +
agaaaatgtgagcatacaaa

SEQ ID NO: 169241 - DNA, 20 bp, Artificial Sequence
  Synthetic oligonucleotide; AAG chr2 60546437 60546456 60546453 +
tgtgagcatacaaaaagtac

SEQ ID NO: 169242 - DNA, 20 bp, Artificial Sequence
  Synthetic oligonucleotide; AGG chr2 60546438 60546457 60546454 +
gtgagcatacaaaaagtaca

SEQ ID NO: 169243 - DNA, 20 bp, Artificial Sequence
  Synthetic oligonucleotide; AAG chr2 60546446 60546465 60546462 +
acaaaaagtacaaggatgtg

SEQ ID NO: 169244 - DNA, 20 bp, Artificial Sequence
  Synthetic oligonucleotide; AGG chr2 60546447 60546466 60546463 +
caaaaagtacaaggatgtga

SEQ ID NO: 169245 - DNA, 20 bp, Artificial Sequence
  Synthetic oligonucleotide; CAG chr2 60546458 60546477 60546474 +
aggatgtgaaggttatcaac

SEQ ID NO: 169246 - DNA, 20 bp, Artificial Sequence
  Synthetic oligonucleotide; GAG chr2 60546460 60546479 60546476 +
gatgtgaaggttatcaacca

SEQ ID NO: 169247 - DNA, 20 bp, Artificial Sequence
  Synthetic oligonucleotide; GAG chr2 60546462 60546481 60546478 +
tgtgaaggttatcaaccaga

SEQ ID NO: 169248 - DNA, 20 bp, Artificial Sequence
  Synthetic oligonucleotide; GAG chr2 60546478 60546497 60546494 +
cagagagcaaatttgtcaat

SEQ ID NO: 169249 - DNA, 20 bp, Artificial Sequence
  Synthetic oligonucleotide; AGG chr2 60546479 60546498 60546495 +
agagagcaaatttgtcaatg

SEQ ID NO: 169250 - DNA, 20 bp, Artificial Sequence
  Synthetic oligonucleotide; AAG chr2 60546500 60546519 60546516 +
ggcaaatcatcacatatgta

SEQ ID NO: 169251 - DNA, 20 bp, Artificial Sequence
  Synthetic oligonucleotide; CAG chr2 60546507 60546526 60546523 +
catcacatatgtaaagaaaa

SEQ ID NO: 169252 - DNA, 20 bp, Artificial Sequence
  Synthetic oligonucleotide; CAG chr2 60546527 60546546 60546543 +
cagtcttccttgcataactc

SEQ ID NO: 169253 - DNA, 20 bp, Artificial Sequence
  Synthetic oligonucleotide; GAG chr2 60546529 60546548 60546545 +
gtcttccttgcataactcca

SEQ ID NO: 169254 - DNA, 20 bp, Artificial Sequence
  Synthetic oligonucleotide; CAG chr2 60546568 60546587 60546584 +
tatacccatgcacacaccca

SEQ ID NO: 169255 - DNA, 20 bp, Artificial Sequence
  Synthetic oligonucleotide; TGG chr2 60546584 60546603 60546600 +
cccacagcaacaaatgtgtc

SEQ ID NO: 169256 - DNA, 20 bp, Artificial Sequence
  Synthetic oligonucleotide; AAG chr2 60546592 60546611 60546608 +
aacaaatgtgtctggtttgt

SEQ ID NO: 169257 - DNA, 20 bp, Artificial Sequence
  Synthetic oligonucleotide; TAG chr2 60546597 60546616 60546613 +
atgtgtctggtttgtaagtt

SEQ ID NO: 169258 - DNA, 20 bp, Artificial Sequence
  Synthetic oligonucleotide; AAG chr2 60546601 60546620 60546617 +
gtctggtttgtaagtttaga

SEQ ID NO: 169259 - DNA, 20 bp, Artificial Sequence
  Synthetic oligonucleotide; TAG chr2 60546617 60546636 60546633 +
tagaaagaatgctacttaaa

SEQ ID NO: 169260 - DNA, 20 bp, Artificial Sequence
  Synthetic oligonucleotide; CAG chr2 60546626 60546645 60546642 +
tgctacttaaatagttaaca

SEQ ID NO: 169261 - DNA, 20 bp, Artificial Sequence
  Synthetic oligonucleotide; AGG chr2 60546627 60546646 60546643 +
gctacttaaatagttaacac

SEQ ID NO: 169262 - DNA, 20 bp, Artificial Sequence
  Synthetic oligonucleotide; GGG chr2 60546628 60546647 60546644 +
ctacttaaatagttaacaca

SEQ ID NO: 169263 - DNA, 20 bp, Artificial Sequence
  Synthetic oligonucleotide; AAG chr2 60546637 60546656 60546653 +
tagttaacacagggaacata

SEQ ID NO: 169264 - DNA, 20 bp, Artificial Sequence
  Synthetic oligonucleotide; AAG chr2 60546641 60546660 60546657 +
taacacagggaacataaaga

SEQ ID NO: 169265 - DNA, 20 bp, Artificial Sequence
  Synthetic oligonucleotide; AAG chr2 60546660 60546679 60546676 +
aaagcttaaataataactac

SEQ ID NO: 169266 - DNA, 20 bp, Artificial Sequence
  Synthetic oligonucleotide; TGG chr2 60546669 60546688 60546685 +
ataataactacaagaaaaac

SEQ ID NO: 169267 - DNA, 20 bp, Artificial Sequence
  Synthetic oligonucleotide; AAG chr2 60546682 60546701 60546698 +
gaaaaactggttaaaaaaaa

SEQ ID NO: 169268 - DNA, 20 bp, Artificial Sequence
  Synthetic oligonucleotide; TGG chr2 60546685 60546704 60546701 +
aaactggttaaaaaaaaaag

SEQ ID NO: 169269 - DNA, 20 bp, Artificial Sequence
  Synthetic oligonucleotide; TAG chr2 60546689 60546708 60546705 +
tggttaaaaaaaaaagtgga

SEQ ID NO: 169270 - DNA, 20 bp, Artificial Sequence
  Synthetic oligonucleotide; AAG chr2 60546724 60546743 60546740 +
tttcttttttcctatacacc

SEQ ID NO: 169271 - DNA, 20 bp, Artificial Sequence
  Synthetic oligonucleotide; AAG chr2 60546742 60546761 60546758 +
ccaagttgtccattgtgcca

SEQ ID NO: 169272 - DNA, 20 bp, Artificial Sequence
  Synthetic oligonucleotide; AAG chr2 60546750 60546769 60546766 +
tccattgtgccaaagaatga

SEQ ID NO: 169273 - DNA, 20 bp, Artificial Sequence
  Synthetic oligonucleotide; AGG chr2 60546751 60546770 60546767 +
ccattgtgccaaagaatgaa

SEQ ID NO: 169274 - DNA, 20 bp, Artificial Sequence
  Synthetic oligonucleotide; GAG chr2 60546753 60546772 60546769 +
attgtgccaaagaatgaaag

SEQ ID NO: 169275 - DNA, 20 bp, Artificial Sequence
  Synthetic oligonucleotide; GAG chr2 60546755 60546774 60546771 +
tgtgccaaagaatgaaagga

SEQ ID NO: 169276 - DNA, 20 bp, Artificial Sequence
  Synthetic oligonucleotide; AGG chr2 60546756 60546775 60546772 +
gtgccaaagaatgaaaggag

SEQ ID NO: 169277 - DNA, 20 bp, Artificial Sequence
  Synthetic oligonucleotide; AAG chr2 60546803 60546822 60546819 +
gtgtgaatgtatatactcct

SEQ ID NO: 169278 - DNA, 20 bp, Artificial Sequence
  Synthetic oligonucleotide; CAG chr2 60546810 60546829 60546826 +
tgtatatactcctaagtaaa

SEQ ID NO: 169279 - DNA, 20 bp, Artificial Sequence
  Synthetic oligonucleotide; TGG chr2 60546816 60546835 60546832 +
tactcctaagtaaacagaca

SEQ ID NO: 169280 - DNA, 20 bp, Artificial Sequence
  Synthetic oligonucleotide; TAG chr2 60546829 60546848 60546845 +
acagacatggcttcataaat

SEQ ID NO: 169281 - DNA, 20 bp, Artificial Sequence
  Synthetic oligonucleotide; AAG chr2 60546833 60546852 60546849 +
acatggcttcataaattaga

SEQ ID NO: 169282 - DNA, 20 bp, Artificial Sequence
  Synthetic oligonucleotide; AAG chr2 60546881 60546900 60546897 +
cacatttacactgctgtaat

SEQ ID NO: 169283 - DNA, 20 bp, Artificial Sequence
  Synthetic oligonucleotide; CGG chr2 60546909 60546928 60546925 +
gactgcatgcacctatgaaa

SEQ ID NO: 169284 - DNA, 20 bp, Artificial Sequence
  Synthetic oligonucleotide; CAG chr2 60546933 60546952 60546949 +
tctaaataataatcatgtcg

SEQ ID NO: 169285 - DNA, 20 bp, Artificial Sequence
  Synthetic oligonucleotide; CAG chr2 60546975 60546994 60546991 +
aacctttctgctctcactct

SEQ ID NO: 169286 - DNA, 20 bp, Artificial Sequence
  Synthetic oligonucleotide; CAG chr2 60546978 60546997 60546994 +
ctttctgctctcactctcag

SEQ ID NO: 169287 - DNA, 20 bp, Artificial Sequence
  Synthetic oligonucleotide; AAG chr2 60546994 60547013 60547010 +
tcagcagtgccacaaaatca

SEQ ID NO: 169288 - DNA, 20 bp, Artificial Sequence
  Synthetic oligonucleotide; CGG chr2 60547011 60547030 60547027 +
tcaaagaaataccaaatgca

SEQ ID NO: 169289 - DNA, 20 bp, Artificial Sequence
  Synthetic oligonucleotide; GGG chr2 60547012 60547031 60547028 +
caaagaaataccaaatgcac

SEQ ID NO: 169290 - DNA, 20 bp, Artificial Sequence
  Synthetic oligonucleotide; CAG chr2 60547015 60547034 60547031 +
agaaataccaaatgcacggg

SEQ ID NO: 169291 - DNA, 20 bp, Artificial Sequence
  Synthetic oligonucleotide; CAG chr2 60547025 60547044 60547041 +
aatgcacgggcagtatttct

SEQ ID NO: 169292 - DNA, 20 bp, Artificial Sequence
  Synthetic oligonucleotide; TAG chr2 60547034 60547053 60547050 +
gcagtatttctcagacacat

SEQ ID NO: 169293 - DNA, 20 bp, Artificial Sequence
  Synthetic oligonucleotide; TGG chr2 60547042 60547061 60547058 +
tctcagacacattagctaaa

SEQ ID NO: 169294 - DNA, 20 bp, Artificial Sequence
  Synthetic oligonucleotide; GGG chr2 60547043 60547062 60547059 +
ctcagacacattagctaaat

SEQ ID NO: 169295 - DNA, 20 bp, Artificial Sequence
  Synthetic oligonucleotide; GAG chr2 60547054 60547073 60547070 +
tagctaaatgggatactttt

SEQ ID NO: 169296 - DNA, 20 bp, Artificial Sequence
  Synthetic oligonucleotide; AAG chr2 60547062 60547081 60547078 +
tgggatacttttgagtactt

SEQ ID NO: 169297 - DNA, 20 bp, Artificial Sequence
  Synthetic oligonucleotide; AAG chr2 60547070 60547089 60547086 +
ttttgagtacttaagaaaat

SEQ ID NO: 169298 - DNA, 20 bp, Artificial Sequence
  Synthetic oligonucleotide; TAG chr2 60547078 60547097 60547094 +
acttaagaaaataagccaat

SEQ ID NO: 169299 - DNA, 20 bp, Artificial Sequence
  Synthetic oligonucleotide; GAG chr2 60547099 60547118 60547115 +
agtcattttttttttattct

SEQ ID NO: 169300 - DNA, 20 bp, Artificial Sequence
  Synthetic oligonucleotide; TGG chr2 60547105 60547124 60547121 +
tttttttttattctgagaaa

SEQ ID NO: 169301 - DNA, 20 bp, Artificial Sequence
  Synthetic oligonucleotide; TGG chr2 60547140 60547159 60547156 +
attctaaacatgtttgcact

SEQ ID NO: 169302 - DNA, 20 bp, Artificial Sequence
  Synthetic oligonucleotide; TGG chr2 60547143 60547162 60547159 +
ctaaacatgtttgcacttgg

SEQ ID NO: 169303 - DNA, 20 bp, Artificial Sequence
  Synthetic oligonucleotide; CAG chr2 60547164 60547183 60547180 +
ggcatctatgatataaaaat

SEQ ID NO: 169304 - DNA, 20 bp, Artificial Sequence
  Synthetic oligonucleotide; TGG chr2 60547169 60547188 60547185 +
ctatgatataaaaatcagaa

SEQ ID NO: 169305 - DNA, 20 bp, Artificial Sequence
  Synthetic oligonucleotide; AAG chr2 60547174 60547193 60547190 +
atataaaaatcagaatggtc

SEQ ID NO: 169306 - DNA, 20 bp, Artificial Sequence
  Synthetic oligonucleotide; CAG chr2 60547191 60547210 60547207 +
gtcaagcaaacaccacattt

SEQ ID NO: 169307 - DNA, 20 bp, Artificial Sequence
  Synthetic oligonucleotide; GAG chr2 60547193 60547212 60547209 +
caagcaaacaccacatttca

SEQ ID NO: 169308 - DNA, 20 bp, Artificial Sequence
  Synthetic oligonucleotide; AAG chr2 60547197 60547216 60547213 +
caaacaccacatttcagagc

SEQ ID NO: 169309 - DNA, 20 bp, Artificial Sequence
  Synthetic oligonucleotide; AGG chr2 60547198 60547217 60547214 +
aaacaccacatttcagagca

SEQ ID NO: 169310 - DNA, 20 bp, Artificial Sequence
  Synthetic oligonucleotide; GAG chr2 60547203 60547222 60547219 +
ccacatttcagagcaaggct

SEQ ID NO: 169311 - DNA, 20 bp, Artificial Sequence
  Synthetic oligonucleotide; AAG chr2 60547206 60547225 60547222 +
catttcagagcaaggctgag

SEQ ID NO: 169312 - DNA, 20 bp, Artificial Sequence
  Synthetic oligonucleotide; TAG chr2 60547218 60547237 60547234 +
aggctgagaagtcctttctt

SEQ ID NO: 169313 - DNA, 20 bp, Artificial Sequence
  Synthetic oligonucleotide; AAG chr2 60547249 60547268 60547265 +
tacttcgcctaatgttgtca

SEQ ID NO: 169314 - DNA, 20 bp, Artificial Sequence
  Synthetic oligonucleotide; TGG chr2 60547252 60547271 60547268 +
ttcgcctaatgttgtcaaag

SEQ ID NO: 169315 - DNA, 20 bp, Artificial Sequence
  Synthetic oligonucleotide; GAG chr2 60547270 60547289 60547286 +
agtggactaattttctgaat

SEQ ID NO: 169316 - DNA, 20 bp, Artificial Sequence
  Synthetic oligonucleotide; GAG chr2 60547292 60547311 60547308 +
gctccaaaatgcttcattat

SEQ ID NO: 169317 - DNA, 20 bp, Artificial Sequence
  Synthetic oligonucleotide; CAG chr2 60547318 60547337 60547334 +
atttctgcacacataatcac

SEQ ID NO: 169318 - DNA, 20 bp, Artificial Sequence
  Synthetic oligonucleotide; CGG chr2 60547321 60547340 60547337 +
tctgcacacataatcaccag

SEQ ID NO: 169319 - DNA, 20 bp, Artificial Sequence
  Synthetic oligonucleotide; TGG chr2 60547325 60547344 60547341 +
cacacataatcaccagcgga

SEQ ID NO: 169320 - DNA, 20 bp, Artificial Sequence
  Synthetic oligonucleotide; AAG chr2 60547334 60547353 60547350 +
tcaccagcggatggtataac

SEQ ID NO: 169321 - DNA, 20 bp, Artificial Sequence
  Synthetic oligonucleotide; AGG chr2 60547335 60547354 60547351 +
caccagcggatggtataaca

SEQ ID NO: 169322 - DNA, 20 bp, Artificial Sequence
  Synthetic oligonucleotide; TAG chr2 60547338 60547357 60547354 +
cagcggatggtataacaagg

SEQ ID NO: 169323 - DNA, 20 bp, Artificial Sequence
  Synthetic oligonucleotide; CAG chr2 60547394 60547413 60547410 +
aactttgtactaaaatactc

SEQ ID NO: 169324 - DNA, 20 bp, Artificial Sequence
  Synthetic oligonucleotide; CAG chr2 60547409 60547428 60547425 +
tactccagcatctactttac

SEQ ID NO: 169325 - DNA, 20 bp, Artificial Sequence
  Synthetic oligonucleotide; AAG chr2 60547427 60547446 60547443 +
accagcttctatcatttttt

SEQ ID NO: 169326 - DNA, 20 bp, Artificial Sequence
  Synthetic oligonucleotide; AAG chr2 60547436 60547455 60547452 +
tatcattttttaagcttcca

SEQ ID NO: 169327 - DNA, 20 bp, Artificial Sequence
  Synthetic oligonucleotide; AGG chr2 60547437 60547456 60547453 +
atcattttttaagcttccaa

SEQ ID NO: 169328 - DNA, 20 bp, Artificial Sequence
  Synthetic oligonucleotide; GGG chr2 60547438 60547457 60547454 +
tcattttttaagcttccaaa

SEQ ID NO: 169329 - DNA, 20 bp, Artificial Sequence
  Synthetic oligonucleotide; GGG chr2 60547439 60547458 60547455 +
cattttttaagcttccaaag

SEQ ID NO: 169330 - DNA, 20 bp, Artificial Sequence
  Synthetic oligonucleotide; AAG chr2 60547444 60547463 60547460 +
tttaagcttccaaaggggaa

SEQ ID NO: 169331 - DNA, 20 bp, Artificial Sequence
  Synthetic oligonucleotide; GAG chr2 60547446 60547465 60547462 +
taagcttccaaaggggaaaa

SEQ ID NO: 169332 - DNA, 20 bp, Artificial Sequence
  Synthetic oligonucleotide; GAG chr2 60547448 60547467 60547464 +
agcttccaaaggggaaaaga

SEQ ID NO: 169333 - DNA, 20 bp, Artificial Sequence
  Synthetic oligonucleotide; TGG chr2 60547452 60547471 60547468 +
tccaaaggggaaaagagagt

SEQ ID NO: 169334 - DNA, 20 bp, Artificial Sequence
  Synthetic oligonucleotide; AAG chr2 60547456 60547475 60547472 +
aaggggaaaagagagttggt

SEQ ID NO: 169335 - DNA, 20 bp, Artificial Sequence
  Synthetic oligonucleotide; CAG chr2 60547527 60547546 60547543 +
atcacaaaatacaaaacatc

SEQ ID NO: 169336 - DNA, 20 bp, Artificial Sequence
  Synthetic oligonucleotide; AGG chr2 60547528 60547547 60547544 +
tcacaaaatacaaaacatcc

SEQ ID NO: 169337 - DNA, 20 bp, Artificial Sequence
  Synthetic oligonucleotide; CAG chr2 60547538 60547557 60547554 +
caaaacatccaggatgctgc

SEQ ID NO: 169338 - DNA, 20 bp, Artificial Sequence
  Synthetic oligonucleotide; AAG chr2 60547553 60547572 60547569 +
gctgccagttaataaaactg

SEQ ID NO: 169339 - DNA, 20 bp, Artificial Sequence
  Synthetic oligonucleotide; CAG chr2 60547556 60547575 60547572 +
gccagttaataaaactgaag

SEQ ID NO: 169340 - DNA, 20 bp, Artificial Sequence
  Synthetic oligonucleotide; AAG chr2 60547568 60547587 60547584 +
aactgaagcagaaaatgtac

SEQ ID NO: 169341 - DNA, 20 bp, Artificial Sequence
  Synthetic oligonucleotide; CAG chr2 60547578 60547597 60547594 +
gaaaatgtacaagtcttaaa

SEQ ID NO: 169342 - DNA, 20 bp, Artificial Sequence
  Synthetic oligonucleotide; CAG chr2 60547586 60547605 60547602 +
acaagtcttaaacagttaat

SEQ ID NO: 169343 - DNA, 20 bp, Artificial Sequence
  Synthetic oligonucleotide; TAG chr2 60547601 60547620 60547617 +
ttaatcagtctgaccttctt

SEQ ID NO: 169344 - DNA, 20 bp, Artificial Sequence
  Synthetic oligonucleotide; AAG chr2 60547605 60547624 60547621 +
tcagtctgaccttctttagc

SEQ ID NO: 169345 - DNA, 20 bp, Artificial Sequence
  Synthetic oligonucleotide; AAG chr2 60547635 60547654 60547651 +
ttttacatttaatgaactta

SEQ ID NO: 169346 - DNA, 20 bp, Artificial Sequence
  Synthetic oligonucleotide; CAG chr2 60547641 60547660 60547657 +
atttaatgaacttaaagcca

SEQ ID NO: 169347 - DNA, 20 bp, Artificial Sequence
  Synthetic oligonucleotide; GAG chr2 60547643 60547662 60547659 +
ttaatgaacttaaagccaca

SEQ ID NO: 169348 - DNA, 20 bp, Artificial Sequence
  Synthetic oligonucleotide; TAG chr2 60547656 60547675 60547672 +
agccacagagaatcaaaaaa

SEQ ID NO: 169349 - DNA, 20 bp, Artificial Sequence
  Synthetic oligonucleotide; GAG chr2 60547669 60547688 60547685 +
caaaaaatagattttaattt

SEQ ID NO: 169350 - DNA, 20 bp, Artificial Sequence
  Synthetic oligonucleotide; TAG chr2 60547674 60547693 60547690 +
aatagattttaatttgagtg

SEQ ID NO: 169351 - DNA, 20 bp, Artificial Sequence
  Synthetic oligonucleotide; TGG chr2 60547682 60547701 60547698 +
ttaatttgagtgtagaatat

SEQ ID NO: 169352 - DNA, 20 bp, Artificial Sequence
  Synthetic oligonucleotide; CAG chr2 60547687 60547706 60547703 +
ttgagtgtagaatattggaa

SEQ ID NO: 169353 - DNA, 20 bp, Artificial Sequence
  Synthetic oligonucleotide; AAG chr2 60547699 60547718 60547715 +
tattggaacagattttgata

SEQ ID NO: 169354 - DNA, 20 bp, Artificial Sequence
  Synthetic oligonucleotide; CAG chr2 60547712 60547731 60547728 +
tttgataaagtgcaaaaatc

SEQ ID NO: 169355 - DNA, 20 bp, Artificial Sequence
  Synthetic oligonucleotide; CAG chr2 60547721 60547740 60547737 +
gtgcaaaaatccagtgaact

SEQ ID NO: 169356 - DNA, 20 bp, Artificial Sequence
  Synthetic oligonucleotide; AGG chr2 60547722 60547741 60547738 +
tgcaaaaatccagtgaactc

SEQ ID NO: 169357 - DNA, 20 bp, Artificial Sequence
  Synthetic oligonucleotide; CAG chr2 60547747 60547766 60547763 +
aaatttatttcaaccctacc

SEQ ID NO: 169358 - DNA, 20 bp, Artificial Sequence
  Synthetic oligonucleotide; AGG chr2 60547748 60547767 60547764 +
aatttatttcaaccctaccc

SEQ ID NO: 169359 - DNA, 20 bp, Artificial Sequence
  Synthetic oligonucleotide; GAG chr2 60547760 60547779 60547776 +
ccctacccaggctgaatatt

SEQ ID NO: 169360 - DNA, 20 bp, Artificial Sequence
  Synthetic oligonucleotide; AGG chr2 60547761 60547780 60547777 +
cctacccaggctgaatattg

SEQ ID NO: 169361 - DNA, 20 bp, Artificial Sequence
  Synthetic oligonucleotide; GGG chr2 60547762 60547781 60547778 +
ctacccaggctgaatattga

SEQ ID NO: 169362 - DNA, 20 bp, Artificial Sequence
  Synthetic oligonucleotide; GGG chr2 60547763 60547782 60547779 +
tacccaggctgaatattgag

SEQ ID NO: 169363 - DNA, 20 bp, Artificial Sequence
  Synthetic oligonucleotide; GGG chr2 60547764 60547783 60547780 +
acccaggctgaatattgagg

SEQ ID NO: 169364 - DNA, 20 bp, Artificial Sequence
  Synthetic oligonucleotide; AAG chr2 60547767 60547786 60547783 +
caggctgaatattgaggggg

SEQ ID NO: 169365 - DNA, 20 bp, Artificial Sequence
  Synthetic oligonucleotide; TGG chr2 60547773 60547792 60547789 +
gaatattgagggggaagatc

SEQ ID NO: 169366 - DNA, 20 bp, Artificial Sequence
  Synthetic oligonucleotide; GAG chr2 60547775 60547794 60547791 +
atattgagggggaagatctg

SEQ ID NO: 169367 - DNA, 20 bp, Artificial Sequence
  Synthetic oligonucleotide; CAG chr2 60547785 60547804 60547801 +
ggaagatctggagtaactcc

SEQ ID NO: 169368 - DNA, 20 bp, Artificial Sequence
  Synthetic oligonucleotide; TAG chr2 60547794 60547813 60547810 +
ggagtaactcccagatgtgc

SEQ ID NO: 169369 - DNA, 20 bp, Artificial Sequence
  Synthetic oligonucleotide; AGG chr2 60547795 60547814 60547811 +
gagtaactcccagatgtgct

SEQ ID NO: 169370 - DNA, 20 bp, Artificial Sequence
  Synthetic oligonucleotide; GAG chr2 60547810 60547829 60547826 +
gtgctaggtgaaataatatt

SEQ ID NO: 169371 - DNA, 20 bp, Artificial Sequence
  Synthetic oligonucleotide; GAG chr2 60547812 60547831 60547828 +
gctaggtgaaataatattga

SEQ ID NO: 169372 - DNA, 20 bp, Artificial Sequence
  Synthetic oligonucleotide; GAG chr2 60547814 60547833 60547830 +
taggtgaaataatattgaga

SEQ ID NO: 169373 - DNA, 20 bp, Artificial Sequence
  Synthetic oligonucleotide; TAG chr2 60547824 60547843 60547840 +
aatattgagagagccctgcc

SEQ ID NO: 169374 - DNA, 20 bp, Artificial Sequence
  Synthetic oligonucleotide; AAG chr2 60547841 60547860 60547857 +
gcctagctgcacctgtgctc

SEQ ID NO: 169375 - DNA, 20 bp, Artificial Sequence
  Synthetic oligonucleotide; TAG chr2 60547844 60547863 60547860 +
tagctgcacctgtgctcaag

SEQ ID NO: 169376 - DNA, 20 bp, Artificial Sequence
  Synthetic oligonucleotide; AGG chr2 60547845 60547864 60547861 +
agctgcacctgtgctcaagt

SEQ ID NO: 169377 - DNA, 20 bp, Artificial Sequence
  Synthetic oligonucleotide; TAG chr2 60547863 60547882 60547879 +
gtaggacatctcataatttc

SEQ ID NO: 169378 - DNA, 20 bp, Artificial Sequence
  Synthetic oligonucleotide; TGG chr2 60547870 60547889 60547886 +
atctcataatttctagcctc

SEQ ID NO: 169379 - DNA, 20 bp, Artificial Sequence
  Synthetic oligonucleotide; AAG chr2 60547893 60547912 60547909 +
tactcctcctaatttaacat

SEQ ID NO: 169380 - DNA, 20 bp, Artificial Sequence
  Synthetic oligonucleotide; AGG chr2 60547894 60547913 60547910 +
actcctcctaatttaacata

SEQ ID NO: 169381 - DNA, 20 bp, Artificial Sequence
  Synthetic oligonucleotide; CAG chr2 60547903 60547922 60547919 +
aatttaacataaggtcacca

SEQ ID NO: 169382 - DNA, 20 bp, Artificial Sequence
  Synthetic oligonucleotide; AGG chr2 60547904 60547923 60547920 +
atttaacataaggtcaccac

SEQ ID NO: 169383 - DNA, 20 bp, Artificial Sequence
  Synthetic oligonucleotide; AAG chr2 60547913 60547932 60547929 +
aaggtcaccacaggaatatg

SEQ ID NO: 169384 - DNA, 20 bp, Artificial Sequence
  Synthetic oligonucleotide; AGG chr2 60547914 60547933 60547930 +
aggtcaccacaggaatatga

SEQ ID NO: 169385 - DNA, 20 bp, Artificial Sequence
  Synthetic oligonucleotide; AAG chr2 60547934 60547953 60547950 +
aggttatattcctactaata

SEQ ID NO: 169386 - DNA, 20 bp, Artificial Sequence
  Synthetic oligonucleotide; CAG chr2 60547938 60547957 60547954 +
tatattcctactaataaaga

SEQ ID NO: 169387 - DNA, 20 bp, Artificial Sequence
  Synthetic oligonucleotide; AAG chr2 60547943 60547962 60547959 +
tcctactaataaagacagta

SEQ ID NO: 169388 - DNA, 20 bp, Artificial Sequence
  Synthetic oligonucleotide; AAG chr2 60547947 60547966 60547963 +
actaataaagacagtaaagt

SEQ ID NO: 169389 - DNA, 20 bp, Artificial Sequence
  Synthetic oligonucleotide; TGG chr2 60547976 60547995 60547992 +
tgtttctttgcccaacatac

SEQ ID NO: 169390 - DNA, 20 bp, Artificial Sequence
  Synthetic oligonucleotide; AAG chr2 60547983 60548002 60547999 +
ttgcccaacatactggccaa

SEQ ID NO: 169391 - DNA, 20 bp, Artificial Sequence
  Synthetic oligonucleotide; CAG chr2 60547993 60548012 60548009 +
tactggccaaaagataaata

SEQ ID NO: 169392 - DNA, 20 bp, Artificial Sequence
  Synthetic oligonucleotide; AAG chr2 60548022 60548041 60548038 +
tatgcatacttttcaaataa

SEQ ID NO: 169393 - DNA, 20 bp, Artificial Sequence
  Synthetic oligonucleotide; AAG chr2 60548025 60548044 60548041 +
gcatacttttcaaataaaag

SEQ ID NO: 169394 - DNA, 20 bp, Artificial Sequence
  Synthetic oligonucleotide; CAG chr2 60548033 60548052 60548049 +
ttcaaataaaagaagacaaa

SEQ ID NO: 169395 - DNA, 20 bp, Artificial Sequence
  Synthetic oligonucleotide; AAG chr2 60548036 60548055 60548052 +
aaataaaagaagacaaacag

SEQ ID NO: 169396 - DNA, 20 bp, Artificial Sequence
  Synthetic oligonucleotide; AAG chr2 60548096 60548115 60548112 +
catttgcttccattttgacc

SEQ ID NO: 169397 - DNA, 20 bp, Artificial Sequence
  Synthetic oligonucleotide; GAG chr2 60548100 60548119 60548116 +
tgcttccattttgaccaagt

SEQ ID NO: 169398 - DNA, 20 bp, Artificial Sequence
  Synthetic oligonucleotide; AGG chr2 60548101 60548120 60548117 +
gcttccattttgaccaagtg

SEQ ID NO: 169399 - DNA, 20 bp, Artificial Sequence
  Synthetic oligonucleotide; TAG chr2 60548106 60548125 60548122 +
cattttgaccaagtgaggaa

SEQ ID NO: 169400 - DNA, 20 bp, Artificial Sequence
  Synthetic oligonucleotide; AGG chr2 60548107 60548126 60548123 +
attttgaccaagtgaggaat

SEQ ID NO: 169401 - DNA, 20 bp, Artificial Sequence
  Synthetic oligonucleotide; GGG chr2 60548108 60548127 60548124 +
ttttgaccaagtgaggaata

SEQ ID NO: 169402 - DNA, 20 bp, Artificial Sequence
  Synthetic oligonucleotide; AAG chr2 60548145 60548164 60548161 +
atattcctgttgtctgaatt

SEQ ID NO: 169403 - DNA, 20 bp, Artificial Sequence
  Synthetic oligonucleotide; AGG chr2 60548146 60548165 60548162 +
tattcctgttgtctgaatta

SEQ ID NO: 169404 - DNA, 20 bp, Artificial Sequence
  Synthetic oligonucleotide; AAG chr2 60548154 60548173 60548170 +
ttgtctgaattaaggatttt

SEQ ID NO: 169405 - DNA, 20 bp, Artificial Sequence
  Synthetic oligonucleotide; TGG chr2 60548173 60548192 60548189 +
taagtacacattgataaatg

SEQ ID NO: 169406 - DNA, 20 bp, Artificial Sequence
  Synthetic oligonucleotide; TAG chr2 60548186 60548205 60548202 +
ataaatgtggcttttttgtt

SEQ ID NO: 169407 - DNA, 20 bp, Artificial Sequence
  Synthetic oligonucleotide; TAG chr2 60548192 60548211 60548208 +
gtggcttttttgtttagcat

SEQ ID NO: 169408 - DNA, 20 bp, Artificial Sequence
  Synthetic oligonucleotide; AAG chr2 60548199 60548218 60548215 +
ttttgtttagcattagctac

SEQ ID NO: 169409 - DNA, 20 bp, Artificial Sequence
  Synthetic oligonucleotide; GAG chr2 60548206 60548225 60548222 +
tagcattagctacaagttct

SEQ ID NO: 169410 - DNA, 20 bp, Artificial Sequence
  Synthetic oligonucleotide; AGG chr2 60548207 60548226 60548223 +
agcattagctacaagttctg

SEQ ID NO: 169411 - DNA, 20 bp, Artificial Sequence
  Synthetic oligonucleotide; CAG chr2 60548214 60548233 60548230 +
gctacaagttctgaggttta

SEQ ID NO: 169412 - DNA, 20 bp, Artificial Sequence
  Synthetic oligonucleotide; AAG chr2 60548221 60548240 60548237 +
gttctgaggtttacagactg

SEQ ID NO: 169413 - DNA, 20 bp, Artificial Sequence
  Synthetic oligonucleotide; AGG chr2 60548222 60548241 60548238 +
ttctgaggtttacagactga

SEQ ID NO: 169414 - DNA, 20 bp, Artificial Sequence
  Synthetic oligonucleotide; AAG chr2 60548225 60548244 60548241 +
tgaggtttacagactgaagg

SEQ ID NO: 169415 - DNA, 20 bp, Artificial Sequence
  Synthetic oligonucleotide; TAG chr2 60548231 60548250 60548247 +
ttacagactgaaggaagact

SEQ ID NO: 169416 - DNA, 20 bp, Artificial Sequence
  Synthetic oligonucleotide; AGG chr2 60548232 60548251 60548248 +
tacagactgaaggaagactt

SEQ ID NO: 169417 - DNA, 20 bp, Artificial Sequence
  Synthetic oligonucleotide; TAG chr2 60548256 60548275 60548272 +
aaatattttatcaaacttac

SEQ ID NO: 169418 - DNA, 20 bp, Artificial Sequence
  Synthetic oligonucleotide; TAG chr2 60548263 60548282 60548279 +
ttatcaaacttactagtaca

SEQ ID NO: 169419 - DNA, 20 bp, Artificial Sequence
  Synthetic oligonucleotide; AAG chr2 60548304 60548323 60548320 +
aattttttatttccaccgtt

SEQ ID NO: 169420 - DNA, 20 bp, Artificial Sequence
  Synthetic oligonucleotide; AAG chr2 60548333 60548352 60548349 +
ttttttttttttttgttccc

SEQ ID NO: 169421 - DNA, 20 bp, Artificial Sequence
  Synthetic oligonucleotide; AGG chr2 60548334 60548353 60548350 +
tttttttttttttgttccca

SEQ ID NO: 169422 - DNA, 20 bp, Artificial Sequence
  Synthetic oligonucleotide; AAG chr2 60548353 60548372 60548369 +
aaggtctgacacatttctaa

SEQ ID NO: 169423 - DNA, 20 bp, Artificial Sequence
  Synthetic oligonucleotide; TGG chr2 60548356 60548375 60548372 +
gtctgacacatttctaaaag

SEQ ID NO: 169424 - DNA, 20 bp, Artificial Sequence
  Synthetic oligonucleotide; GGG chr2 60548357 60548376 60548373 +
tctgacacatttctaaaagt

SEQ ID NO: 169425 - DNA, 20 bp, Artificial Sequence
  Synthetic oligonucleotide; TAG chr2 60548369 60548388 60548385 +
ctaaaagtgggaatattatt

SEQ ID NO: 169426 - DNA, 20 bp, Artificial Sequence
  Synthetic oligonucleotide; AGG chr2 60548370 60548389 60548386 +
taaaagtgggaatattattt

SEQ ID NO: 169427 - DNA, 20 bp, Artificial Sequence
  Synthetic oligonucleotide; AAG chr2 60548378 60548397 60548394 +
ggaatattatttaggtgcaa

SEQ ID NO: 169428 - DNA, 20 bp, Artificial Sequence
  Synthetic oligonucleotide; AGG chr2 60548379 60548398 60548395 +
gaatattatttaggtgcaaa

SEQ ID NO: 169429 - DNA, 20 bp, Artificial Sequence
  Synthetic oligonucleotide; TAG chr2 60548393 60548412 60548409 +
tgcaaaaggaaatattctcc

SEQ ID NO: 169430 - DNA, 20 bp, Artificial Sequence
  Synthetic oligonucleotide; AGG chr2 60548394 60548413 60548410 +
gcaaaaggaaatattctcct

SEQ ID NO: 169431 - DNA, 20 bp, Artificial Sequence
  Synthetic oligonucleotide; TAG chr2 60548404 60548423 60548420 +
atattctcctaggtatcaaa

SEQ ID NO: 169432 - DNA, 20 bp, Artificial Sequence
  Synthetic oligonucleotide; AAG chr2 60548410 60548429 60548426 +
tcctaggtatcaaatagtta

SEQ ID NO: 169433 - DNA, 20 bp, Artificial Sequence
  Synthetic oligonucleotide; AGG chr2 60548411 60548430 60548427 +
cctaggtatcaaatagttaa

SEQ ID NO: 169434 - DNA, 20 bp, Artificial Sequence
  Synthetic oligonucleotide; TGG chr2 60548419 60548438 60548435 +
tcaaatagttaaaggtaatg

SEQ ID NO: 169435 - DNA, 20 bp, Artificial Sequence
  Synthetic oligonucleotide; CAG chr2 60548429 60548448 60548445 +
aaaggtaatgtggttcaaaa

SEQ ID NO: 169436 - DNA, 20 bp, Artificial Sequence
  Synthetic oligonucleotide; TGG chr2 60548435 60548454 60548451 +
aatgtggttcaaaacagact

SEQ ID NO: 169437 - DNA, 20 bp, Artificial Sequence
  Synthetic oligonucleotide; AAG chr2 60548441 60548460 60548457 +
gttcaaaacagacttggtta

SEQ ID NO: 169438 - DNA, 20 bp, Artificial Sequence
  Synthetic oligonucleotide; TAG chr2 60548455 60548474 60548471 +
tggttaaagtcttctaaatg

SEQ ID NO: 169439 - DNA, 20 bp, Artificial Sequence
  Synthetic oligonucleotide; CGG chr2 60548484 60548503 60548500 +
aactgatttacaatcaaaac

SEQ ID NO: 169440 - DNA, 20 bp, Artificial Sequence
  Synthetic oligonucleotide; GGG chr2 60548485 60548504 60548501 +
actgatttacaatcaaaacc

SEQ ID NO: 169441 - DNA, 20 bp, Artificial Sequence
  Synthetic oligonucleotide; AAG chr2 60548493 60548512 60548509 +
acaatcaaaaccgggaaatg

SEQ ID NO: 169442 - DNA, 20 bp, Artificial Sequence
  Synthetic oligonucleotide; TGG chr2 60548496 60548515 60548512 +
atcaaaaccgggaaatgaag

SEQ ID NO: 169443 - DNA, 20 bp, Artificial Sequence
  Synthetic oligonucleotide; CAG chr2 60548504 60548523 60548520 +
cgggaaatgaagtggtaatt

SEQ ID NO: 169444 - DNA, 20 bp, Artificial Sequence
  Synthetic oligonucleotide; GAG chr2 60548506 60548525 60548522 +
ggaaatgaagtggtaattca

SEQ ID NO: 169445 - DNA, 20 bp, Artificial Sequence
  Synthetic oligonucleotide; AGG chr2 60548507 60548526 60548523 +
gaaatgaagtggtaattcag

SEQ ID NO: 169446 - DNA, 20 bp, Artificial Sequence
  Synthetic oligonucleotide; TAG chr2 60548549 60548568 60548565 +
atttcacctaattaatttta

SEQ ID NO: 169447 - DNA, 20 bp, Artificial Sequence
  Synthetic oligonucleotide; AGG chr2 60548550 60548569 60548566 +
tttcacctaattaattttat

SEQ ID NO: 169448 - DNA, 20 bp, Artificial Sequence
  Synthetic oligonucleotide; GAG chr2 60548552 60548571 60548568 +
tcacctaattaattttatag

SEQ ID NO: 169449 - DNA, 20 bp, Artificial Sequence
  Synthetic oligonucleotide; AGG chr2 60548553 60548572 60548569 +
cacctaattaattttatagg

SEQ ID NO: 169450 - DNA, 20 bp, Artificial Sequence
  Synthetic oligonucleotide; AAG chr2 60548558 60548577 60548574 +
aattaattttataggaggca

SEQ ID NO: 169451 - DNA, 20 bp, Artificial Sequence
  Synthetic oligonucleotide; AAG chr2 60548575 60548594 60548591 +
gcaaagttcttgaaaataac

SEQ ID NO: 169452 - DNA, 20 bp, Artificial Sequence
  Synthetic oligonucleotide; CAG chr2 60548591 60548610 60548607 +
taacaagatgatcaaatgta

SEQ ID NO: 169453 - DNA, 20 bp, Artificial Sequence
  Synthetic oligonucleotide; AAG chr2 60548654 60548673 60548670 +
gtaaattattgctaattaac

SEQ ID NO: 169454 - DNA, 20 bp, Artificial Sequence
  Synthetic oligonucleotide; CGG chr2 60548691 60548710 60548707 +
gtatgaaatacgtttaacat

SEQ ID NO: 169455 - DNA, 20 bp, Artificial Sequence
  Synthetic oligonucleotide; TGG chr2 60548711 60548730 60548727 +
cggtctccttgcaaaacatt

SEQ ID NO: 169456 - DNA, 20 bp, Artificial Sequence
  Synthetic oligonucleotide; TAG chr2 60548715 60548734 60548731 +
ctccttgcaaaacatttggc

SEQ ID NO: 169457 - DNA, 20 bp, Artificial Sequence
  Synthetic oligonucleotide; TGG chr2 60548718 60548737 60548734 +
cttgcaaaacatttggctag

SEQ ID NO: 169458 - DNA, 20 bp, Artificial Sequence
  Synthetic oligonucleotide; CAG chr2 60548725 60548744 60548741 +
aacatttggctagtggtgtt

SEQ ID NO: 169459 - DNA, 20 bp, Artificial Sequence
  Synthetic oligonucleotide; GAG chr2 60548727 60548746 60548743 +
catttggctagtggtgttca

SEQ ID NO: 169460 - DNA, 20 bp, Artificial Sequence
  Synthetic oligonucleotide; TGG chr2 60548758 60548777 60548774 +
aaacgtgtttttatcattgc

SEQ ID NO: 169461 - DNA, 20 bp, Artificial Sequence
  Synthetic oligonucleotide; CAG chr2 60548776 60548795 60548792 +
gctggtatattattaaaaat

SEQ ID NO: 169462 - DNA, 20 bp, Artificial Sequence
  Synthetic oligonucleotide; AAG chr2 60548782 60548801 60548798 +
atattattaaaaatcagaca

SEQ ID NO: 169463 - DNA, 20 bp, Artificial Sequence
  Synthetic oligonucleotide; TGG chr2 60548785 60548804 60548801 +
ttattaaaaatcagacaaag

SEQ ID NO: 169464 - DNA, 20 bp, Artificial Sequence
  Synthetic oligonucleotide; GGG chr2 60548786 60548805 60548802 +
tattaaaaatcagacaaagt

SEQ ID NO: 169465 - DNA, 20 bp, Artificial Sequence
  Synthetic oligonucleotide; AAG chr2 60548794 60548813 60548810 +
atcagacaaagtgggacaca

SEQ ID NO: 169466 - DNA, 20 bp, Artificial Sequence
  Synthetic oligonucleotide; TGG chr2 60548820 60548839 60548836 +
atatgaaaatacaattctca

SEQ ID NO: 169467 - DNA, 20 bp, Artificial Sequence
  Synthetic oligonucleotide; TAG chr2 60548825 60548844 60548841 +
aaaatacaattctcatggtg

SEQ ID NO: 169468 - DNA, 20 bp, Artificial Sequence
  Synthetic oligonucleotide; CAG chr2 60548856 60548875 60548872 +
tttgcattgacatcttttct

SEQ ID NO: 169469 - DNA, 20 bp, Artificial Sequence
  Synthetic oligonucleotide; TGG chr2 60548859 60548878 60548875 +
gcattgacatcttttctcag

SEQ ID NO: 169470 - DNA, 20 bp, Artificial Sequence
  Synthetic oligonucleotide; TGG chr2 60548880 60548899 60548896 +
ggcaatcaacatttcctttc

SEQ ID NO: 169471 - DNA, 20 bp, Artificial Sequence
  Synthetic oligonucleotide; GGG chr2 60548881 60548900 60548897 +
gcaatcaacatttcctttct

SEQ ID NO: 169472 - DNA, 20 bp, Artificial Sequence
  Synthetic oligonucleotide; CAG chr2 60548947 60548966 60548963 +
ctaaaaaccttcctaaccct

SEQ ID NO: 169473 - DNA, 20 bp, Artificial Sequence
  Synthetic oligonucleotide; AAG chr2 60549012 60549031 60549028 +
ccaacaataccaacatttct

SEQ ID NO: 169474 - DNA, 20 bp, Artificial Sequence
  Synthetic oligonucleotide; CGG chr2 60549018 60549037 60549034 +
ataccaacatttctaagctc

SEQ ID NO: 169475 - DNA, 20 bp, Artificial Sequence
  Synthetic oligonucleotide; CGG chr2 60549030 60549049 60549046 +
ctaagctccggcctaaactc

SEQ ID NO: 169476 - DNA, 20 bp, Artificial Sequence
  Synthetic oligonucleotide; AAG chr2 60549038 60549057 60549054 +
cggcctaaactccggctaca

SEQ ID NO: 169477 - DNA, 20 bp, Artificial Sequence
  Synthetic oligonucleotide; CAG chr2 60549041 60549060 60549057 +
cctaaactccggctacaaag

SEQ ID NO: 169478 - DNA, 20 bp, Artificial Sequence
  Synthetic oligonucleotide; AGG chr2 60549042 60549061 60549058 +
ctaaactccggctacaaagc

SEQ ID NO: 169479 - DNA, 20 bp, Artificial Sequence
  Synthetic oligonucleotide; GGG chr2 60549043 60549062 60549059 +
taaactccggctacaaagca

SEQ ID NO: 169480 - DNA, 20 bp, Artificial Sequence
  Synthetic oligonucleotide; GAG chr2 60549045 60549064 60549061 +
aactccggctacaaagcagg

SEQ ID NO: 169481 - DNA, 20 bp, Artificial Sequence
  Synthetic oligonucleotide; AAG chr2 60549058 60549077 60549074 +
aagcagggagtcctcgattg

SEQ ID NO: 169482 - DNA, 20 bp, Artificial Sequence
  Synthetic oligonucleotide; TGG chr2 60549061 60549080 60549077 +
cagggagtcctcgattgaag

SEQ ID NO: 169483 - DNA, 20 bp, Artificial Sequence
  Synthetic oligonucleotide; AAG chr2 60549064 60549083 60549080 +
ggagtcctcgattgaagtgg

SEQ ID NO: 169484 - DNA, 20 bp, Artificial Sequence
  Synthetic oligonucleotide; AGG chr2 60549065 60549084 60549081 +
gagtcctcgattgaagtgga

SEQ ID NO: 169485 - DNA, 20 bp, Artificial Sequence
  Synthetic oligonucleotide; GGG chr2 60549066 60549085 60549082 +
agtcctcgattgaagtggaa

SEQ ID NO: 169486 - DNA, 20 bp, Artificial Sequence
  Synthetic oligonucleotide; GAG chr2 60549068 60549087 60549084 +
tcctcgattgaagtggaagg

SEQ ID NO: 169487 - DNA, 20 bp, Artificial Sequence
  Synthetic oligonucleotide; TGG chr2 60549071 60549090 60549087 +
tcgattgaagtggaagggag

SEQ ID NO: 169488 - DNA, 20 bp, Artificial Sequence
  Synthetic oligonucleotide; GGG chr2 60549072 60549091 60549088 +
cgattgaagtggaagggagt

SEQ ID NO: 169489 - DNA, 20 bp, Artificial Sequence
  Synthetic oligonucleotide; TAG chr2 60549092 60549111 60549108 +
gggcaaataatcataataat

SEQ ID NO: 169490 - DNA, 20 bp, Artificial Sequence
  Synthetic oligonucleotide; GAG chr2 60549112 60549131 60549128 +
tagccgcgaattctctctac

SEQ ID NO: 169491 - DNA, 20 bp, Artificial Sequence
  Synthetic oligonucleotide; AGG chr2 60549113 60549132 60549129 +
agccgcgaattctctctacg

SEQ ID NO: 169492 - DNA, 20 bp, Artificial Sequence
  Synthetic oligonucleotide; GGG chr2 60549114 60549133 60549130 +
gccgcgaattctctctacga

SEQ ID NO: 169493 - DNA, 20 bp, Artificial Sequence
  Synthetic oligonucleotide; GGG chr2 60549115 60549134 60549131 +
ccgcgaattctctctacgag

SEQ ID NO: 169494 - DNA, 20 bp, Artificial Sequence
  Synthetic oligonucleotide; GAG chr2 60549117 60549136 60549133 +
gcgaattctctctacgaggg

SEQ ID NO: 169495 - DNA, 20 bp, Artificial Sequence
  Synthetic oligonucleotide; AGG chr2 60549118 60549137 60549134 +
cgaattctctctacgagggg

SEQ ID NO: 169496 - DNA, 20 bp, Artificial Sequence
  Synthetic oligonucleotide; AAG chr2 60549121 60549140 60549137 +
attctctctacgaggggagg

SEQ ID NO: 169497 - DNA, 20 bp, Artificial Sequence
  Synthetic oligonucleotide; TAG chr2 60549127 60549146 60549143 +
tctacgaggggaggaagaaa

SEQ ID NO: 169498 - DNA, 20 bp, Artificial Sequence
  Synthetic oligonucleotide; CAG chr2 60549155 60549174 60549171 +
aaaatgcttctacgttcaaa

SEQ ID NO: 169499 - DNA, 20 bp, Artificial Sequence
  Synthetic oligonucleotide; AAG chr2 60549159 60549178 60549175 +
tgcttctacgttcaaacagc

SEQ ID NO: 169500 - DNA, 20 bp, Artificial Sequence
  Synthetic oligonucleotide; CAG chr2 60549163 60549182 60549179 +
tctacgttcaaacagcaaga

SEQ ID NO: 169501 - DNA, 20 bp, Artificial Sequence
  Synthetic oligonucleotide; TGG chr2 60549168 60549187 60549184 +
gttcaaacagcaagacagcc

SEQ ID NO: 169502 - DNA, 20 bp, Artificial Sequence
  Synthetic oligonucleotide; CAG chr2 60549186 60549205 60549202 +
cctggaacgtctcaatgtct

SEQ ID NO: 169503 - DNA, 20 bp, Artificial Sequence
  Synthetic oligonucleotide; CAG chr2 60549192 60549211 60549208 +
acgtctcaatgtctcagtga

SEQ ID NO: 169504 - DNA, 20 bp, Artificial Sequence
  Synthetic oligonucleotide; GAG chr2 60549198 60549217 60549214 +
caatgtctcagtgacagact

SEQ ID NO: 169505 - DNA, 20 bp, Artificial Sequence
  Synthetic oligonucleotide; TAG chr2 60549219 60549238 60549235 +
agatctctttcctctctgtg

SEQ ID NO: 169506 - DNA, 20 bp, Artificial Sequence
  Synthetic oligonucleotide; AAG chr2 60549228 60549247 60549244 +
tcctctctgtgtagttgcaa

SEQ ID NO: 169507 - DNA, 20 bp, Artificial Sequence
  Synthetic oligonucleotide; AAG chr2 60549240 60549259 60549256 +
agttgcaaaagaataaattt

SEQ ID NO: 169508 - DNA, 20 bp, Artificial Sequence
  Synthetic oligonucleotide; AGG chr2 60549241 60549260 60549257 +
gttgcaaaagaataaattta

SEQ ID NO: 169509 - DNA, 20 bp, Artificial Sequence
  Synthetic oligonucleotide; GGG chr2 60549242 60549261 60549258 +
ttgcaaaagaataaatttaa

SEQ ID NO: 169510 - DNA, 20 bp, Artificial Sequence
  Synthetic oligonucleotide; TAG chr2 60549261 60549280 60549277 +
agggaaaaaaataatcctta

SEQ ID NO: 169511 - DNA, 20 bp, Artificial Sequence
  Synthetic oligonucleotide; AGG chr2 60549262 60549281 60549278 +
gggaaaaaaataatccttat

SEQ ID NO: 169512 - DNA, 20 bp, Artificial Sequence
  Synthetic oligonucleotide; TGG chr2 60549271 60549290 60549287 +
ataatccttataggaaatgt

SEQ ID NO: 169513 - DNA, 20 bp, Artificial Sequence
  Synthetic oligonucleotide; AAG chr2 60549275 60549294 60549291 +
tccttataggaaatgttggt

SEQ ID NO: 169514 - DNA, 20 bp, Artificial Sequence
  Synthetic oligonucleotide; AGG chr2 60549276 60549295 60549292 +
ccttataggaaatgttggta

SEQ ID NO: 169515 - DNA, 20 bp, Artificial Sequence
  Synthetic oligonucleotide; GAG chr2 60549278 60549297 60549294 +
ttataggaaatgttggtaag

SEQ ID NO: 169516 - DNA, 20 bp, Artificial Sequence
  Synthetic oligonucleotide; GAG chr2 60549282 60549301 60549298 +
aggaaatgttggtaaggagc

SEQ ID NO: 169517 - DNA, 20 bp, Artificial Sequence
  Synthetic oligonucleotide; GAG chr2 60549291 60549310 60549307 +
tggtaaggagcgagcaaaac

SEQ ID NO: 169518 - DNA, 20 bp, Artificial Sequence
  Synthetic oligonucleotide; GAG chr2 60549293 60549312 60549309 +
gtaaggagcgagcaaaacga

SEQ ID NO: 169519 - DNA, 20 bp, Artificial Sequence
  Synthetic oligonucleotide; CGG chr2 60549300 60549319 60549316 +
gcgagcaaaacgagagctgc

SEQ ID NO: 169520 - DNA, 20 bp, Artificial Sequence
  Synthetic oligonucleotide; GGG chr2 60549301 60549320 60549317 +
cgagcaaaacgagagctgcc

SEQ ID NO: 169521 - DNA, 20 bp, Artificial Sequence
  Synthetic oligonucleotide; GGG chr2 60549302 60549321 60549318 +
gagcaaaacgagagctgccg

SEQ ID NO: 169522 - DNA, 20 bp, Artificial Sequence
  Synthetic oligonucleotide; GAG chr2 60549304 60549323 60549320 +
gcaaaacgagagctgccggg

SEQ ID NO: 169523 - DNA, 20 bp, Artificial Sequence
  Synthetic oligonucleotide; CGG chr2 60549307 60549326 60549323 +
aaacgagagctgccggggag

SEQ ID NO: 169524 - DNA, 20 bp, Artificial Sequence
  Synthetic oligonucleotide; GAG chr2 60549309 60549328 60549325 +
acgagagctgccggggagcg

SEQ ID NO: 169525 - DNA, 20 bp, Artificial Sequence
  Synthetic oligonucleotide; AGG chr2 60549310 60549329 60549326 +
cgagagctgccggggagcgg

SEQ ID NO: 169526 - DNA, 20 bp, Artificial Sequence
  Synthetic oligonucleotide; GGG chr2 60549311 60549330 60549327 +
gagagctgccggggagcgga

SEQ ID NO: 169527 - DNA, 20 bp, Artificial Sequence
  Synthetic oligonucleotide; GGG chr2 60549312 60549331 60549328 +
agagctgccggggagcggag

SEQ ID NO: 169528 - DNA, 20 bp, Artificial Sequence
  Synthetic oligonucleotide; GGG chr2 60549313 60549332 60549329 +
gagctgccggggagcggagg

SEQ ID NO: 169529 - DNA, 20 bp, Artificial Sequence
  Synthetic oligonucleotide; GAG chr2 60549315 60549334 60549331 +
gctgccggggagcggagggg

SEQ ID NO: 169530 - DNA, 20 bp, Artificial Sequence
  Synthetic oligonucleotide; AGG chr2 60549316 60549335 60549332 +
ctgccggggagcggaggggg

SEQ ID NO: 169531 - DNA, 20 bp, Artificial Sequence
  Synthetic oligonucleotide; GGG chr2 60549317 60549336 60549333 +
tgccggggagcggaggggga

SEQ ID NO: 169532 - DNA, 20 bp, Artificial Sequence
  Synthetic oligonucleotide; GGG chr2 60549318 60549337 60549334 +
gccggggagcggagggggag

SEQ ID NO: 169533 - DNA, 20 bp, Artificial Sequence
  Synthetic oligonucleotide; GGG chr2 60549319 60549338 60549335 +
ccggggagcggagggggagg

SEQ ID NO: 169534 - DNA, 20 bp, Artificial Sequence
  Synthetic oligonucleotide; AAG chr2 60549323 60549342 60549339 +
ggagcggagggggaggggga

SEQ ID NO: 169535 - DNA, 20 bp, Artificial Sequence
  Synthetic oligonucleotide; AGG chr2 60549324 60549343 60549340 +
gagcggagggggagggggaa

SEQ ID NO: 169536 - DNA, 20 bp, Artificial Sequence
  Synthetic oligonucleotide; GGG chr2 60549325 60549344 60549341 +
agcggagggggagggggaaa

SEQ ID NO: 169537 - DNA, 20 bp, Artificial Sequence
  Synthetic oligonucleotide; GAG chr2 60549327 60549346 60549343 +
cggagggggagggggaaagg

SEQ ID NO: 169538 - DNA, 20 bp, Artificial Sequence
  Synthetic oligonucleotide; AAG chr2 60549340 60549359 60549356 +
ggaaagggagatgtgtcttc

SEQ ID NO: 169539 - DNA, 20 bp, Artificial Sequence
  Synthetic oligonucleotide; AAG chr2 60549353 60549372 60549369 +
tgtcttcaagtttgctttcc

SEQ ID NO: 169540 - DNA, 20 bp, Artificial Sequence
  Synthetic oligonucleotide; CAG chr2 60549378 60549397 60549394 +
cttctccttgattgtcttaa

SEQ ID NO: 169541 - DNA, 20 bp, Artificial Sequence
  Synthetic oligonucleotide; AGG chr2 60549379 60549398 60549395 +
ttctccttgattgtcttaac

SEQ ID NO: 169542 - DNA, 20 bp, Artificial Sequence
  Synthetic oligonucleotide; GGG chr2 60549380 60549399 60549396 +
tctccttgattgtcttaaca

SEQ ID NO: 169543 - DNA, 20 bp, Artificial Sequence
  Synthetic oligonucleotide; AAG chr2 60549385 60549404 60549401 +
ttgattgtcttaacagggta

SEQ ID NO: 169544 - DNA, 20 bp, Artificial Sequence
  Synthetic oligonucleotide; AAG chr2 60549388 60549407 60549404 +
attgtcttaacagggtaaag

SEQ ID NO: 169545 - DNA, 20 bp, Artificial Sequence
  Synthetic oligonucleotide; CGG chr2 60549395 60549414 60549411 +
taacagggtaaagaagcaaa

SEQ ID NO: 169546 - DNA, 20 bp, Artificial Sequence
  Synthetic oligonucleotide; GAG chr2 60549397 60549416 60549413 +
acagggtaaagaagcaaacg

SEQ ID NO: 169547 - DNA, 20 bp, Artificial Sequence
  Synthetic oligonucleotide; AGG chr2 60549398 60549417 60549414 +
cagggtaaagaagcaaacgg

SEQ ID NO: 169548 - DNA, 20 bp, Artificial Sequence
  Synthetic oligonucleotide; CAG chr2 60549409 60549428 60549425 +
agcaaacggaggctgaaatt

SEQ ID NO: 169549 - DNA, 20 bp, Artificial Sequence
  Synthetic oligonucleotide; GAG chr2 60549411 60549430 60549427 +
caaacggaggctgaaattca

SEQ ID NO: 169550 - DNA, 20 bp, Artificial Sequence
  Synthetic oligonucleotide; GAG chr2 60549413 60549432 60549429 +
aacggaggctgaaattcaga

SEQ ID NO: 169551 - DNA, 20 bp, Artificial Sequence
  Synthetic oligonucleotide; AGG chr2 60549414 60549433 60549430 +
acggaggctgaaattcagag

SEQ ID NO: 169552 - DNA, 20 bp, Artificial Sequence
  Synthetic oligonucleotide; AAG chr2 60549419 60549438 60549435 +
ggctgaaattcagagaggaa

SEQ ID NO: 169553 - DNA, 20 bp, Artificial Sequence
  Synthetic oligonucleotide; AAG chr2 60549424 60549443 60549440 +
aaattcagagaggaaaagca

SEQ ID NO: 169554 - DNA, 20 bp, Artificial Sequence
  Synthetic oligonucleotide; AAG chr2 60549433 60549452 60549449 +
gaggaaaagcaaagaaacaa

SEQ ID NO: 169555 - DNA, 20 bp, Artificial Sequence
  Synthetic oligonucleotide; AAG chr2 60549438 60549457 60549454 +
aaagcaaagaaacaaaagca

SEQ ID NO: 169556 - DNA, 20 bp, Artificial Sequence
  Synthetic oligonucleotide; CGG chr2 60549442 60549461 60549458 +
caaagaaacaaaagcaaagc

SEQ ID NO: 169557 - DNA, 20 bp, Artificial Sequence
  Synthetic oligonucleotide; GGG chr2 60549443 60549462 60549459 +
aaagaaacaaaagcaaagcc

SEQ ID NO: 169558 - DNA, 20 bp, Artificial Sequence
  Synthetic oligonucleotide; GGG chr2 60549444 60549463 60549460 +
aagaaacaaaagcaaagccg

SEQ ID NO: 169559 - DNA, 20 bp, Artificial Sequence
  Synthetic oligonucleotide; GGG chr2 60549445 60549464 60549461 +
agaaacaaaagcaaagccgg

SEQ ID NO: 169560 - DNA, 20 bp, Artificial Sequence
  Synthetic oligonucleotide; CAG chr2 60549451 60549470 60549467 +
aaaagcaaagccgggggcta

SEQ ID NO: 169561 - DNA, 20 bp, Artificial Sequence
  Synthetic oligonucleotide; AGG chr2 60549452 60549471 60549468 +
aaagcaaagccgggggctac

SEQ ID NO: 169562 - DNA, 20 bp, Artificial Sequence
  Synthetic oligonucleotide; CGG chr2 60549457 60549476 60549473 +
aaagccgggggctacaggcc

SEQ ID NO: 169563 - DNA, 20 bp, Artificial Sequence
  Synthetic oligonucleotide; GGG chr2 60549458 60549477 60549474 +
aagccgggggctacaggccc

SEQ ID NO: 169564 - DNA, 20 bp, Artificial Sequence
  Synthetic oligonucleotide; GGG chr2 60549459 60549478 60549475 +
agccgggggctacaggcccg

SEQ ID NO: 169565 - DNA, 20 bp, Artificial Sequence
  Synthetic oligonucleotide; CAG chr2 60549462 60549481 60549478 +
cgggggctacaggcccgggg

SEQ ID NO: 169566 - DNA, 20 bp, Artificial Sequence
  Synthetic oligonucleotide; AGG chr2 60549463 60549482 60549479 +
gggggctacaggcccggggc

SEQ ID NO: 169567 - DNA, 20 bp, Artificial Sequence
  Synthetic oligonucleotide; GGG chr2 60549464 60549483 60549480 +
ggggctacaggcccggggca

SEQ ID NO: 169568 - DNA, 20 bp, Artificial Sequence
  Synthetic oligonucleotide; GGG chr2 60549465 60549484 60549481 +
gggctacaggcccggggcag

SEQ ID NO: 169569 - DNA, 20 bp, Artificial Sequence
  Synthetic oligonucleotide; CGG chr2 60549471 60549490 60549487 +
caggcccggggcaggggccc

SEQ ID NO: 169570 - DNA, 20 bp, Artificial Sequence
  Synthetic oligonucleotide; AAG chr2 60549475 60549494 60549491 +
cccggggcaggggccccggc

SEQ ID NO: 169571 - DNA, 20 bp, Artificial Sequence
  Synthetic oligonucleotide; AGG chr2 60549476 60549495 60549492 +
ccggggcaggggccccggca

SEQ ID NO: 169572 - DNA, 20 bp, Artificial Sequence
  Synthetic oligonucleotide; GGG chr2 60549477 60549496 60549493 +
cggggcaggggccccggcaa

SEQ ID NO: 169573 - DNA, 20 bp, Artificial Sequence
  Synthetic oligonucleotide; TGG chr2 60549480 60549499 60549496 +
ggcaggggccccggcaaggg

SEQ ID NO: 169574 - DNA, 20 bp, Artificial Sequence
  Synthetic oligonucleotide; CAG chr2 60549489 60549508 60549505 +
cccggcaagggtggaccgtg

SEQ ID NO: 169575 - DNA, 20 bp, Artificial Sequence
  Synthetic oligonucleotide; AAG chr2 60549493 60549512 60549509 +
gcaagggtggaccgtgcaga

SEQ ID NO: 169576 - DNA, 20 bp, Artificial Sequence
  Synthetic oligonucleotide; AAG chr2 60549498 60549517 60549514 +
ggtggaccgtgcagaaagtg

SEQ ID NO: 169577 - DNA, 20 bp, Artificial Sequence
  Synthetic oligonucleotide; TGG chr2 60549502 60549521 60549518 +
gaccgtgcagaaagtgaagt

SEQ ID NO: 169578 - DNA, 20 bp, Artificial Sequence
  Synthetic oligonucleotide; GGG chr2 60549503 60549522 60549519 +
accgtgcagaaagtgaagtt

SEQ ID NO: 169579 - DNA, 20 bp, Artificial Sequence
  Synthetic oligonucleotide; CGG chr2 60549508 60549527 60549524 +
gcagaaagtgaagttgggcg

SEQ ID NO: 169580 - DNA, 20 bp, Artificial Sequence
  Synthetic oligonucleotide; GGG chr2 60549509 60549528 60549525 +
cagaaagtgaagttgggcgc

SEQ ID NO: 169581 - DNA, 20 bp, Artificial Sequence
  Synthetic oligonucleotide; GGG chr2 60549510 60549529 60549526 +
agaaagtgaagttgggcgcg

SEQ ID NO: 169582 - DNA, 20 bp, Artificial Sequence
  Synthetic oligonucleotide; GAG chr2 60549518 60549537 60549534 +
aagttgggcgcggggactct

SEQ ID NO: 169583 - DNA, 20 bp, Artificial Sequence
  Synthetic oligonucleotide; AGG chr2 60549519 60549538 60549535 +
agttgggcgcggggactctg

SEQ ID NO: 169584 - DNA, 20 bp, Artificial Sequence
  Synthetic oligonucleotide; AAG chr2 60549526 60549545 60549542 +
cgcggggactctgaggcaca

SEQ ID NO: 169585 - DNA, 20 bp, Artificial Sequence
  Synthetic oligonucleotide; GAG chr2 60549530 60549549 60549546 +
gggactctgaggcacaaagc

SEQ ID NO: 169586 - DNA, 20 bp, Artificial Sequence
  Synthetic oligonucleotide; CAG chr2 60549533 60549552 60549549 +
actctgaggcacaaagcgag

SEQ ID NO: 169587 - DNA, 20 bp, Artificial Sequence
  Synthetic oligonucleotide; TGG chr2 60549541 60549560 60549557 +
gcacaaagcgagcagcgtgc

SEQ ID NO: 169588 - DNA, 20 bp, Artificial Sequence
  Synthetic oligonucleotide; CAG chr2 60549547 60549566 60549563 +
agcgagcagcgtgctggctg

SEQ ID NO: 169589 - DNA, 20 bp, Artificial Sequence
  Synthetic oligonucleotide; AGG chr2 60549548 60549567 60549564 +
gcgagcagcgtgctggctgc

SEQ ID NO: 169590 - DNA, 20 bp, Artificial Sequence
  Synthetic oligonucleotide; CAG chr2 60549579 60549598 60549595 +
gcgcttgctgcgaacacgtg

SEQ ID NO: 169591 - DNA, 20 bp, Artificial Sequence
  Synthetic oligonucleotide; CAG chr2 60549582 60549601 60549598 +
cttgctgcgaacacgtgcag

SEQ ID NO: 169592 - DNA, 20 bp, Artificial Sequence
  Synthetic oligonucleotide; CGG chr2 60549585 60549604 60549601 +
gctgcgaacacgtgcagcag

SEQ ID NO: 169593 - DNA, 20 bp, Artificial Sequence
  Synthetic oligonucleotide; CGG chr2 60549591 60549610 60549607 +
aacacgtgcagcagcggccg

SEQ ID NO: 169594 - DNA, 20 bp, Artificial Sequence
  Synthetic oligonucleotide; GGG chr2 60549592 60549611 60549608 +
acacgtgcagcagcggccgc

SEQ ID NO: 169595 - DNA, 20 bp, Artificial Sequence
  Synthetic oligonucleotide; GGG chr2 60549593 60549612 60549609 +
cacgtgcagcagcggccgcg

SEQ ID NO: 169596 - DNA, 20 bp, Artificial Sequence
  Synthetic oligonucleotide; TGG chr2 60549599 60549618 60549615 +
cagcagcggccgcggggcct

SEQ ID NO: 169597 - DNA, 20 bp, Artificial Sequence
  Synthetic oligonucleotide; GGG chr2 60549600 60549619 60549616 +
agcagcggccgcggggcctt

SEQ ID NO: 169598 - DNA, 20 bp, Artificial Sequence
  Synthetic oligonucleotide; GGG chr2 60549601 60549620 60549617 +
gcagcggccgcggggccttg

SEQ ID NO: 169599 - DNA, 20 bp, Artificial Sequence
  Synthetic oligonucleotide; CGG chr2 60549606 60549625 60549622 +
ggccgcggggccttggggcc

SEQ ID NO: 169600 - DNA, 20 bp, Artificial Sequence
  Synthetic oligonucleotide; GGG chr2 60549607 60549626 60549623 +
gccgcggggccttggggccc

SEQ ID NO: 169601 - DNA, 20 bp, Artificial Sequence
  Synthetic oligonucleotide; GGG chr2 60549608 60549627 60549624 +
ccgcggggccttggggcccg

SEQ ID NO: 169602 - DNA, 20 bp, Artificial Sequence
  Synthetic oligonucleotide; GGG chr2 60549609 60549628 60549625 +
cgcggggccttggggcccgg

SEQ ID NO: 169603 - DNA, 20 bp, Artificial Sequence
  Synthetic oligonucleotide; CGG chr2 60549614 60549633 60549630 +
ggccttggggcccgggggcc

SEQ ID NO: 169604 - DNA, 20 bp, Artificial Sequence
  Synthetic oligonucleotide; GAG chr2 60549616 60549635 60549632 +
ccttggggcccgggggcccg

SEQ ID NO: 169605 - DNA, 20 bp, Artificial Sequence
  Synthetic oligonucleotide; CGG chr2 60549620 60549639 60549636 +
ggggcccgggggcccggaga

SEQ ID NO: 169606 - DNA, 20 bp, Artificial Sequence
  Synthetic oligonucleotide; GAG chr2 60549622 60549641 60549638 +
ggcccgggggcccggagacg

SEQ ID NO: 169607 - DNA, 20 bp, Artificial Sequence
  Synthetic oligonucleotide; AGG chr2 60549623 60549642 60549639 +
gcccgggggcccggagacgg

SEQ ID NO: 169608 - DNA, 20 bp, Artificial Sequence
  Synthetic oligonucleotide; GGG chr2 60549624 60549643 60549640 +
cccgggggcccggagacgga

SEQ ID NO: 169609 - DNA, 20 bp, Artificial Sequence
  Synthetic oligonucleotide; CAG chr2 60549627 60549646 60549643 +
gggggcccggagacggaggg

SEQ ID NO: 169610 - DNA, 20 bp, Artificial Sequence
  Synthetic oligonucleotide; CAG chr2 60549631 60549650 60549647 +
gcccggagacggagggcagc

SEQ ID NO: 169611 - DNA, 20 bp, Artificial Sequence
  Synthetic oligonucleotide; AGG chr2 60549632 60549651 60549648 +
cccggagacggagggcagcc

SEQ ID NO: 169612 - DNA, 20 bp, Artificial Sequence
  Synthetic oligonucleotide; GGG chr2 60549633 60549652 60549649 +
ccggagacggagggcagcca

SEQ ID NO: 169613 - DNA, 20 bp, Artificial Sequence
  Synthetic oligonucleotide; GGG chr2 60549634 60549653 60549650 +
cggagacggagggcagccag

SEQ ID NO: 169614 - DNA, 20 bp, Artificial Sequence
  Synthetic oligonucleotide; CAG chr2 60549663 60549682 60549679 +
ctgctgcctccatgcccgtc

SEQ ID NO: 169615 - DNA, 20 bp, Artificial Sequence
  Synthetic oligonucleotide; CGG chr2 60549668 60549687 60549684 +
gcctccatgcccgtccagct

SEQ ID NO: 169616 - DNA, 20 bp, Artificial Sequence
  Synthetic oligonucleotide; CAG chr2 60549672 60549691 60549688 +
ccatgcccgtccagctcggc

SEQ ID NO: 169617 - DNA, 20 bp, Artificial Sequence
  Synthetic oligonucleotide; CGG chr2 60549677 60549696 60549693 +
cccgtccagctcggccagct

SEQ ID NO: 169618 - DNA, 20 bp, Artificial Sequence
  Synthetic oligonucleotide; CGG chr2 60549683 60549702 60549699 +
cagctcggccagctcggccg

SEQ ID NO: 169619 - DNA, 20 bp, Artificial Sequence
  Synthetic oligonucleotide; GGG chr2 60549684 60549703 60549700 +
agctcggccagctcggccgc

SEQ ID NO: 169620 - DNA, 20 bp, Artificial Sequence
  Synthetic oligonucleotide; GGG chr2 60549685 60549704 60549701 +
gctcggccagctcggccgcg

SEQ ID NO: 169621 - DNA, 20 bp, Artificial Sequence
  Synthetic oligonucleotide; CGG chr2 60549691 60549710 60549707 +
ccagctcggccgcggggtga

SEQ ID NO: 169622 - DNA, 20 bp, Artificial Sequence
  Synthetic oligonucleotide; TGG chr2 60549699 60549718 60549715 +
gccgcggggtgacggttccc

SEQ ID NO: 169623 - DNA, 20 bp, Artificial Sequence
  Synthetic oligonucleotide; GGG chr2 60549700 60549719 60549716 +
ccgcggggtgacggttccct

SEQ ID NO: 169624 - DNA, 20 bp, Artificial Sequence
  Synthetic oligonucleotide; CAG chr2 60549708 60549727 60549724 +
tgacggttccctgggcctgc

SEQ ID NO: 169625 - DNA, 20 bp, Artificial Sequence
  Synthetic oligonucleotide; TGG chr2 60549712 60549731 60549728 +
ggttccctgggcctgccagt

SEQ ID NO: 169626 - DNA, 20 bp, Artificial Sequence
  Synthetic oligonucleotide; AAG chr2 60549720 60549739 60549736 +
gggcctgccagttggtgaaa

SEQ ID NO: 169627 - DNA, 20 bp, Artificial Sequence
  Synthetic oligonucleotide; AGG chr2 60549721 60549740 60549737 +
ggcctgccagttggtgaaaa

SEQ ID NO: 169628 - DNA, 20 bp, Artificial Sequence
  Synthetic oligonucleotide; AAG chr2 60549724 60549743 60549740 +
ctgccagttggtgaaaaagg

SEQ ID NO: 169629 - DNA, 20 bp, Artificial Sequence
  Synthetic oligonucleotide; GAG chr2 60549728 60549747 60549744 +
cagttggtgaaaaaggaagt

SEQ ID NO: 169630 - DNA, 20 bp, Artificial Sequence
  Synthetic oligonucleotide; AGG chr2 60549729 60549748 60549745 +
agttggtgaaaaaggaagtg

SEQ ID NO: 169631 - DNA, 20 bp, Artificial Sequence
  Synthetic oligonucleotide; TGG chr2 60549734 60549753 60549750 +
gtgaaaaaggaagtgaggtt

SEQ ID NO: 169632 - DNA, 20 bp, Artificial Sequence
  Synthetic oligonucleotide; CGG chr2 60549743 60549762 60549759 +
gaagtgaggtttggaaaacc

SEQ ID NO: 169633 - DNA, 20 bp, Artificial Sequence
  Synthetic oligonucleotide; TGG chr2 60549747 60549766 60549763 +
tgaggtttggaaaacccggc

SEQ ID NO: 169634 - DNA, 20 bp, Artificial Sequence
  Synthetic oligonucleotide; TGG chr2 60549756 60549775 60549772 +
gaaaacccggctggttaacc

SEQ ID NO: 169635 - DNA, 20 bp, Artificial Sequence
  Synthetic oligonucleotide; CAG chr2 60549761 60549780 60549777 +
cccggctggttaacctggtg

SEQ ID NO: 169636 - DNA, 20 bp, Artificial Sequence
  Synthetic oligonucleotide; CAG chr2 60549767 60549786 60549783 +
tggttaacctggtgcagtct

SEQ ID NO: 169637 - DNA, 20 bp, Artificial Sequence
  Synthetic oligonucleotide; AAG chr2 60549788 60549807 60549804 +
agtatctccgcacacacctc

SEQ ID NO: 169638 - DNA, 20 bp, Artificial Sequence
  Synthetic oligonucleotide; CGG chr2 60549793 60549812 60549809 +
ctccgcacacacctcaagcg

SEQ ID NO: 169639 - DNA, 20 bp, Artificial Sequence
  Synthetic oligonucleotide; GGG chr2 60549794 60549813 60549810 +
tccgcacacacctcaagcgc

SEQ ID NO: 169640 - DNA, 20 bp, Artificial Sequence
  Synthetic oligonucleotide; GAG chr2 60549801 60549820 60549817 +
acacctcaagcgcgggtcct

SEQ ID NO: 169641 - DNA, 20 bp, Artificial Sequence
  Synthetic oligonucleotide; AAG chr2 60549821 60549840 60549837 +
gagattcattctgtgtccac

SEQ ID NO: 169642 - DNA, 20 bp, Artificial Sequence
  Synthetic oligonucleotide; TGG chr2 60549840 60549859 60549856 +
caagcttacactttttactt

SEQ ID NO: 169643 - DNA, 20 bp, Artificial Sequence
  Synthetic oligonucleotide; GGG chr2 60549841 60549860 60549857 +
aagcttacactttttacttt

SEQ ID NO: 169644 - DNA, 20 bp, Artificial Sequence
  Synthetic oligonucleotide; GGG chr2 60549842 60549861 60549858 +
agcttacactttttactttg

SEQ ID NO: 169645 - DNA, 20 bp, Artificial Sequence
  Synthetic oligonucleotide; GGG chr2 60549843 60549862 60549859 +
gcttacactttttactttgg

SEQ ID NO: 169646 - DNA, 20 bp, Artificial Sequence
  Synthetic oligonucleotide; TGG chr2 60549876 60549895 60549892 +
atgcatttcccccgcaattc

SEQ ID NO: 169647 - DNA, 20 bp, Artificial Sequence
  Synthetic oligonucleotide; GGG chr2 60549877 60549896 60549893 +
tgcatttcccccgcaattct

SEQ ID NO: 169648 - DNA, 20 bp, Artificial Sequence
  Synthetic oligonucleotide; TGG chr2 60549883 60549902 60549899 +
tcccccgcaattctgggcac

SEQ ID NO: 169649 - DNA, 20 bp, Artificial Sequence
  Synthetic oligonucleotide; GGG chr2 60549884 60549903 60549900 +
cccccgcaattctgggcact

SEQ ID NO: 169650 - DNA, 20 bp, Artificial Sequence
  Synthetic oligonucleotide; CGG chr2 60549893 60549912 60549909 +
ttctgggcactgggtgtgcg

SEQ ID NO: 169651 - DNA, 20 bp, Artificial Sequence
  Synthetic oligonucleotide; CGG chr2 60549896 60549915 60549912 +
tgggcactgggtgtgcgcgg

SEQ ID NO: 169652 - DNA, 20 bp, Artificial Sequence
  Synthetic oligonucleotide; CGG chr2 60549899 60549918 60549915 +
gcactgggtgtgcgcggcgg

SEQ ID NO: 169653 - DNA, 20 bp, Artificial Sequence
  Synthetic oligonucleotide; CGG chr2 60549905 60549924 60549921 +
ggtgtgcgcggcggcggctg

SEQ ID NO: 169654 - DNA, 20 bp, Artificial Sequence
  Synthetic oligonucleotide; GAG chr2 60549977 60549996 60549993 +
attactattgttgtgattcc

SEQ ID NO: 169655 - DNA, 20 bp, Artificial Sequence
  Synthetic oligonucleotide; GAG chr2 60549984 60550003 60550000 +
ttgttgtgattccgagctcc

SEQ ID NO: 169656 - DNA, 20 bp, Artificial Sequence
  Synthetic oligonucleotide; AGG chr2 60549985 60550004 60550001 +
tgttgtgattccgagctccg

SEQ ID NO: 169657 - DNA, 20 bp, Artificial Sequence
  Synthetic oligonucleotide; GAG chr2 60549989 60550008 60550005 +
gtgattccgagctccgaggc

SEQ ID NO: 169658 - DNA, 20 bp, Artificial Sequence
  Synthetic oligonucleotide; GAG chr2 60549991 60550010 60550007 +
gattccgagctccgaggcga

SEQ ID NO: 169659 - DNA, 20 bp, Artificial Sequence
  Synthetic oligonucleotide; AGG chr2 60549992 60550011 60550008 +
attccgagctccgaggcgag

SEQ ID NO: 169660 - DNA, 20 bp, Artificial Sequence
  Synthetic oligonucleotide; GGG chr2 60549993 60550012 60550009 +
ttccgagctccgaggcgaga

SEQ ID NO: 169661 - DNA, 20 bp, Artificial Sequence
  Synthetic oligonucleotide; GGG chr2 60549994 60550013 60550010 +
tccgagctccgaggcgagag

SEQ ID NO: 169662 - DNA, 20 bp, Artificial Sequence
  Synthetic oligonucleotide; GGG chr2 60549995 60550014 60550011 +
ccgagctccgaggcgagagg

SEQ ID NO: 169663 - DNA, 20 bp, Artificial Sequence
  Synthetic oligonucleotide; GGG chr2 60549996 60550015 60550012 +
cgagctccgaggcgagaggg

SEQ ID NO: 169664 - DNA, 20 bp, Artificial Sequence
  Synthetic oligonucleotide; GGG chr2 60549997 60550016 60550013 +
gagctccgaggcgagagggg

SEQ ID NO: 169665 - DNA, 20 bp, Artificial Sequence
  Synthetic oligonucleotide; CGG chr2 60550003 60550022 60550019 +
cgaggcgagagggggggtgt

SEQ ID NO: 169666 - DNA, 20 bp, Artificial Sequence
  Synthetic oligonucleotide; GGG chr2 60550004 60550023 60550020 +
gaggcgagagggggggtgtc

SEQ ID NO: 169667 - DNA, 20 bp, Artificial Sequence
  Synthetic oligonucleotide; CAG chr2 60550010 60550029 60550026 +
agagggggggtgtcgggctg

SEQ ID NO: 169668 - DNA, 20 bp, Artificial Sequence
  Synthetic oligonucleotide; GAG chr2 60550012 60550031 60550028 +
agggggggtgtcgggctgca

SEQ ID NO: 169669 - DNA, 20 bp, Artificial Sequence
  Synthetic oligonucleotide; CAG chr2 60550020 60550039 60550036 +
tgtcgggctgcagagccgcc

SEQ ID NO: 169670 - DNA, 20 bp, Artificial Sequence
  Synthetic oligonucleotide; AAG chr2 60550024 60550043 60550040 +
gggctgcagagccgcccagc

SEQ ID NO: 169671 - DNA, 20 bp, Artificial Sequence
  Synthetic oligonucleotide; CAG chr2 60550028 60550047 60550044 +
tgcagagccgcccagcaagc

SEQ ID NO: 169672 - DNA, 20 bp, Artificial Sequence
  Synthetic oligonucleotide; GAG chr2 60550033 60550052 60550049 +
agccgcccagcaagccagcc

SEQ ID NO: 169673 - DNA, 20 bp, Artificial Sequence
  Synthetic oligonucleotide; AGG chr2 60550034 60550053 60550050 +
gccgcccagcaagccagccg

SEQ ID NO: 169674 - DNA, 20 bp, Artificial Sequence
  Synthetic oligonucleotide; GAG chr2 60550042 60550061 60550058 +
gcaagccagccgaggccacc

SEQ ID NO: 169675 - DNA, 20 bp, Artificial Sequence
  Synthetic oligonucleotide; AGG chr2 60550043 60550062 60550059 +
caagccagccgaggccaccg

SEQ ID NO: 169676 - DNA, 20 bp, Artificial Sequence
  Synthetic oligonucleotide; TGG chr2 60550059 60550078 60550075 +
accgaggtctgtgctttgca

SEQ ID NO: 169677 - DNA, 20 bp, Artificial Sequence
  Synthetic oligonucleotide; GGG chr2 60550060 60550079 60550076 +
ccgaggtctgtgctttgcat

SEQ ID NO: 169678 - DNA, 20 bp, Artificial Sequence
  Synthetic oligonucleotide; GGG chr2 60550061 60550080 60550077 +
cgaggtctgtgctttgcatg

SEQ ID NO: 169679 - DNA, 20 bp, Artificial Sequence
  Synthetic oligonucleotide; GGG chr2 60550062 60550081 60550078 +
gaggtctgtgctttgcatgg

SEQ ID NO: 169680 - DNA, 20 bp, Artificial Sequence
  Synthetic oligonucleotide; GAG chr2 60550066 60550085 60550082 +
tctgtgctttgcatgggggt

SEQ ID NO: 169681 - DNA, 20 bp, Artificial Sequence
  Synthetic oligonucleotide; AGG chr2 60550067 60550086 60550083 +
ctgtgctttgcatgggggtg

SEQ ID NO: 169682 - DNA, 20 bp, Artificial Sequence
  Synthetic oligonucleotide; GGG chr2 60550068 60550087 60550084 +
tgtgctttgcatgggggtga

SEQ ID NO: 169683 - DNA, 20 bp, Artificial Sequence
  Synthetic oligonucleotide; GGG chr2 60550069 60550088 60550085 +
gtgctttgcatgggggtgag

SEQ ID NO: 169684 - DNA, 20 bp, Artificial Sequence
  Synthetic oligonucleotide; GGG chr2 60550070 60550089 60550086 +
tgctttgcatgggggtgagg

SEQ ID NO: 169685 - DNA, 20 bp, Artificial Sequence
  Synthetic oligonucleotide; TGG chr2 60550073 60550092 60550089 +
tttgcatgggggtgaggggg

SEQ ID NO: 169686 - DNA, 20 bp, Artificial Sequence
  Synthetic oligonucleotide; AAG chr2 60550076 60550095 60550092 +
gcatgggggtgagggggtgg

SEQ ID NO: 169687 - DNA, 20 bp, Artificial Sequence
  Synthetic oligonucleotide; AAG chr2 60550079 60550098 60550095 +
tgggggtgagggggtggaag

SEQ ID NO: 169688 - DNA, 20 bp, Artificial Sequence
  Synthetic oligonucleotide; GAG chr2 60550083 60550102 60550099 +
ggtgagggggtggaagaagt

SEQ ID NO: 169689 - DNA, 20 bp, Artificial Sequence
  Synthetic oligonucleotide; AGG chr2 60550084 60550103 60550100 +
gtgagggggtggaagaagtg

SEQ ID NO: 169690 - DNA, 20 bp, Artificial Sequence
  Synthetic oligonucleotide; TGG chr2 60550088 60550107 60550104 +
gggggtggaagaagtgaggc

SEQ ID NO: 169691 - DNA, 20 bp, Artificial Sequence
  Synthetic oligonucleotide; GAG chr2 60550090 60550109 60550106 +
gggtggaagaagtgaggctg

SEQ ID NO: 169692 - DNA, 20 bp, Artificial Sequence
  Synthetic oligonucleotide; AAG chr2 60550096 60550115 60550112 +
aagaagtgaggctggagacc

SEQ ID NO: 169693 - DNA, 20 bp, Artificial Sequence
  Synthetic oligonucleotide; CGG chr2 60550124 60550143 60550140 +
acttgccatatccccctctt

SEQ ID NO: 169694 - DNA, 20 bp, Artificial Sequence
  Synthetic oligonucleotide; AAG chr2 60550137 60550156 60550153 +
ccctcttcggccatgccccg

SEQ ID NO: 169695 - DNA, 20 bp, Artificial Sequence
  Synthetic oligonucleotide; TAG chr2 60550143 60550162 60550159 +
tcggccatgccccgaagccc

SEQ ID NO: 169696 - DNA, 20 bp, Artificial Sequence
  Synthetic oligonucleotide; GAG chr2 60550145 60550164 60550161 +
ggccatgccccgaagcccta

SEQ ID NO: 169697 - DNA, 20 bp, Artificial Sequence
  Synthetic oligonucleotide; CGG chr2 60550158 60550177 60550174 +
agccctagagcgcgcactcc

SEQ ID NO: 169698 - DNA, 20 bp, Artificial Sequence
  Synthetic oligonucleotide; CGG chr2 60550181 60550200 60550197 +
ttcctccctaccaaaaatgc

SEQ ID NO: 169699 - DNA, 20 bp, Artificial Sequence
  Synthetic oligonucleotide; AAG chr2 60550190 60550209 60550206 +
accaaaaatgccggccccga

SEQ ID NO: 169700 - DNA, 20 bp, Artificial Sequence
  Synthetic oligonucleotide; AAG chr2 60550194 60550213 60550210 +
aaaatgccggccccgaaaga

SEQ ID NO: 169701 - DNA, 20 bp, Artificial Sequence
  Synthetic oligonucleotide; GAG chr2 60550217 60550236 60550233 +
cgaaaactgcaccgtgctcc

SEQ ID NO: 169702 - DNA, 20 bp, Artificial Sequence
  Synthetic oligonucleotide; CGG chr2 60550222 60550241 60550238 +
actgcaccgtgctccgagcc

SEQ ID NO: 169703 - DNA, 20 bp, Artificial Sequence
  Synthetic oligonucleotide; TGG chr2 60550232 60550251 60550248 +
gctccgagcccggcgcgcgc

SEQ ID NO: 169704 - DNA, 20 bp, Artificial Sequence
  Synthetic oligonucleotide; CAG chr2 60550238 60550257 60550254 +
agcccggcgcgcgctggtct

SEQ ID NO: 169705 - DNA, 20 bp, Artificial Sequence
  Synthetic oligonucleotide; CGG chr2 60550249 60550268 60550265 +
cgctggtctcagctcgcgca

SEQ ID NO: 169706 - DNA, 20 bp, Artificial Sequence
  Synthetic oligonucleotide; GGG chr2 60550250 60550269 60550266 +
gctggtctcagctcgcgcac

SEQ ID NO: 169707 - DNA, 20 bp, Artificial Sequence
  Synthetic oligonucleotide; GGG chr2 60550251 60550270 60550267 +
ctggtctcagctcgcgcacg

SEQ ID NO: 169708 - DNA, 20 bp, Artificial Sequence
  Synthetic oligonucleotide; GGG chr2 60550252 60550271 60550268 +
tggtctcagctcgcgcacgg

SEQ ID NO: 169709 - DNA, 20 bp, Artificial Sequence
  Synthetic oligonucleotide; CGG chr2 60550258 60550277 60550274 +
cagctcgcgcacgggggtgt

SEQ ID NO: 169710 - DNA, 20 bp, Artificial Sequence
  Synthetic oligonucleotide; CGG chr2 60550270 60550289 60550286 +
gggggtgtcggccgcgcgcc

SEQ ID NO: 169711 - DNA, 20 bp, Artificial Sequence
  Synthetic oligonucleotide; CGG chr2 60550284 60550303 60550300 +
cgcgcccggtcgcttctccg

SEQ ID NO: 169712 - DNA, 20 bp, Artificial Sequence
  Synthetic oligonucleotide; CGG chr2 60550290 60550309 60550306 +
cggtcgcttctccgcggccc

SEQ ID NO: 169713 - DNA, 20 bp, Artificial Sequence
  Synthetic oligonucleotide; CAG chr2 60550294 60550313 60550310 +
cgcttctccgcggccccggc

SEQ ID NO: 169714 - DNA, 20 bp, Artificial Sequence
  Synthetic oligonucleotide; AAG chr2 60550297 60550316 60550313 +
ttctccgcggccccggccag

SEQ ID NO: 169715 - DNA, 20 bp, Artificial Sequence
  Synthetic oligonucleotide; AAG chr2 60550308 60550327 60550324 +
cccggccagaagcattttta

SEQ ID NO: 169716 - DNA, 20 bp, Artificial Sequence
  Synthetic oligonucleotide; AAG chr2 60550319 60550338 60550335 +
gcatttttaaagtcaaaatg

SEQ ID NO: 169717 - DNA, 20 bp, Artificial Sequence
  Synthetic oligonucleotide; AAG chr2 60550326 60550345 60550342 +
taaagtcaaaatgaagaaca

SEQ ID NO: 169718 - DNA, 20 bp, Artificial Sequence
  Synthetic oligonucleotide; CGG chr2 60550334 60550353 60550350 +
aaatgaagaacaaagacata

SEQ ID NO: 169719 - DNA, 20 bp, Artificial Sequence
  Synthetic oligonucleotide; GGG chr2 60550335 60550354 60550351 +
aatgaagaacaaagacatac

SEQ ID NO: 169720 - DNA, 20 bp, Artificial Sequence
  Synthetic oligonucleotide; GGG chr2 60550336 60550355 60550352 +
atgaagaacaaagacatacg

SEQ ID NO: 169721 - DNA, 20 bp, Artificial Sequence
  Synthetic oligonucleotide; TGG chr2 60550342 60550361 60550358 +
aacaaagacatacggggtga

SEQ ID NO: 169722 - DNA, 20 bp, Artificial Sequence
  Synthetic oligonucleotide; GGG chr2 60550343 60550362 60550359 +
acaaagacatacggggtgat

SEQ ID NO: 169723 - DNA, 20 bp, Artificial Sequence
  Synthetic oligonucleotide; GGG chr2 60550344 60550363 60550360 +
caaagacatacggggtgatg

SEQ ID NO: 169724 - DNA, 20 bp, Artificial Sequence
  Synthetic oligonucleotide; GGG chr2 60550345 60550364 60550361 +
aaagacatacggggtgatgg

SEQ ID NO: 169725 - DNA, 20 bp, Artificial Sequence
  Synthetic oligonucleotide; GAG chr2 60550347 60550366 60550363 +
agacatacggggtgatgggg

SEQ ID NO: 169726 - DNA, 20 bp, Artificial Sequence
  Synthetic oligonucleotide; GAG chr2 60550349 60550368 60550365 +
acatacggggtgatggggga

SEQ ID NO: 169727 - DNA, 20 bp, Artificial Sequence
  Synthetic oligonucleotide; AAG chr2 60550353 60550372 60550369 +
acggggtgatgggggagaga

SEQ ID NO: 169728 - DNA, 20 bp, Artificial Sequence
  Synthetic oligonucleotide; AGG chr2 60550354 60550373 60550370 +
cggggtgatgggggagagaa

SEQ ID NO: 169729 - DNA, 20 bp, Artificial Sequence
  Synthetic oligonucleotide; GGG chr2 60550355 60550374 60550371 +
ggggtgatgggggagagaaa

SEQ ID NO: 169730 - DNA, 20 bp, Artificial Sequence
  Synthetic oligonucleotide; AAG chr2 60550400 60550419 60550416 +
cccccacccccaccctcgca

SEQ ID NO: 169731 - DNA, 20 bp, Artificial Sequence
  Synthetic oligonucleotide; CGG chr2 60550415 60550434 60550431 +
tcgcaaagctcgttcctccc

SEQ ID NO: 169732 - DNA, 20 bp, Artificial Sequence
  Synthetic oligonucleotide; GAG chr2 60550420 60550439 60550436 +
aagctcgttcctccccggac

SEQ ID NO: 169733 - DNA, 20 bp, Artificial Sequence
  Synthetic oligonucleotide; CGG chr2 60550429 60550448 60550445 +
cctccccggacgagaatcgc

SEQ ID NO: 169734 - DNA, 20 bp, Artificial Sequence
  Synthetic oligonucleotide; GGG chr2 60550430 60550449 60550446 +
ctccccggacgagaatcgcc

SEQ ID NO: 169735 - DNA, 20 bp, Artificial Sequence
  Synthetic oligonucleotide; CAG chr2 60550433 60550452 60550449 +
cccggacgagaatcgccggg

SEQ ID NO: 169736 - DNA, 20 bp, Artificial Sequence
  Synthetic oligonucleotide; AGG chr2 60550434 60550453 60550450 +
ccggacgagaatcgccgggc

SEQ ID NO: 169737 - DNA, 20 bp, Artificial Sequence
  Synthetic oligonucleotide; GAG chr2 60550436 60550455 60550452 +
ggacgagaatcgccgggcag

SEQ ID NO: 169738 - DNA, 20 bp, Artificial Sequence
  Synthetic oligonucleotide; AGG chr2 60550437 60550456 60550453 +
gacgagaatcgccgggcagg

SEQ ID NO: 169739 - DNA, 20 bp, Artificial Sequence
  Synthetic oligonucleotide; TGG chr2 60550440 60550459 60550456 +
gagaatcgccgggcaggagg

SEQ ID NO: 169740 - DNA, 20 bp, Artificial Sequence
  Synthetic oligonucleotide; GGG chr2 60550441 60550460 60550457 +
agaatcgccgggcaggaggt

SEQ ID NO: 169741 - DNA, 20 bp, Artificial Sequence
  Synthetic oligonucleotide; GGG chr2 60550442 60550461 60550458 +
gaatcgccgggcaggaggtg

SEQ ID NO: 169742 - DNA, 20 bp, Artificial Sequence
  Synthetic oligonucleotide; GGG chr2 60550443 60550462 60550459 +
aatcgccgggcaggaggtgg

SEQ ID NO: 169743 - DNA, 20 bp, Artificial Sequence
  Synthetic oligonucleotide; GAG chr2 60550445 60550464 60550461 +
tcgccgggcaggaggtgggg

SEQ ID NO: 169744 - DNA, 20 bp, Artificial Sequence
  Synthetic oligonucleotide; AGG chr2 60550446 60550465 60550462 +
cgccgggcaggaggtggggg

SEQ ID NO: 169745 - DNA, 20 bp, Artificial Sequence
  Synthetic oligonucleotide; TGG chr2 60550452 60550471 60550468 +
gcaggaggtgggggaggctc

SEQ ID NO: 169746 - DNA, 20 bp, Artificial Sequence
  Synthetic oligonucleotide; CAG chr2 60550457 60550476 60550473 +
aggtgggggaggctctggta

SEQ ID NO: 169747 - DNA, 20 bp, Artificial Sequence
  Synthetic oligonucleotide; AGG chr2 60550458 60550477 60550474 +
ggtgggggaggctctggtac

SEQ ID NO: 169748 - DNA, 20 bp, Artificial Sequence
  Synthetic oligonucleotide; AAG chr2 60550464 60550483 60550480 +
ggaggctctggtacaggttc

SEQ ID NO: 169749 - DNA, 20 bp, Artificial Sequence
  Synthetic oligonucleotide; GAG chr2 60550473 60550492 60550489 +
ggtacaggttcaagttcgct

SEQ ID NO: 169750 - DNA, 20 bp, Artificial Sequence
  Synthetic oligonucleotide; TAG chr2 60550500 60550519 60550516 +
cttgatcttgttctgcctcc

SEQ ID NO: 169751 - DNA, 20 bp, Artificial Sequence
  Synthetic oligonucleotide; TGG chr2 60550511 60550530 60550527 +
tctgcctcctagcgaccgaa

SEQ ID NO: 169752 - DNA, 20 bp, Artificial Sequence
  Synthetic oligonucleotide; CAG chr2 60550520 60550539 60550536 +
tagcgaccgaatggctcatt

SEQ ID NO: 169753 - DNA, 20 bp, Artificial Sequence
  Synthetic oligonucleotide; TAG chr2 60550529 60550548 60550545 +
aatggctcattcagcccaca

SEQ ID NO: 169754 - DNA, 20 bp, Artificial Sequence
  Synthetic oligonucleotide; CAG chr2 60550532 60550551 60550548 +
ggctcattcagcccacatag

SEQ ID NO: 169755 - DNA, 20 bp, Artificial Sequence
  Synthetic oligonucleotide; GAG chr2 60550534 60550553 60550550 +
ctcattcagcccacatagca

SEQ ID NO: 169756 - DNA, 20 bp, Artificial Sequence
  Synthetic oligonucleotide; AGG chr2 60550535 60550554 60550551 +
tcattcagcccacatagcag

SEQ ID NO: 169757 - DNA, 20 bp, Artificial Sequence
  Synthetic oligonucleotide; CGG chr2 60550538 60550557 60550554 +
ttcagcccacatagcagagg

SEQ ID NO: 169758 - DNA, 20 bp, Artificial Sequence
  Synthetic oligonucleotide; GGG chr2 60550539 60550558 60550555 +
tcagcccacatagcagaggc

SEQ ID NO: 169759 - DNA, 20 bp, Artificial Sequence
  Synthetic oligonucleotide; GGG chr2 60550540 60550559 60550556 +
cagcccacatagcagaggcg

SEQ ID NO: 169760 - DNA, 20 bp, Artificial Sequence
  Synthetic oligonucleotide; GGG chr2 60550541 60550560 60550557 +
agcccacatagcagaggcgg

SEQ ID NO: 169761 - DNA, 20 bp, Artificial Sequence
  Synthetic oligonucleotide; GGG chr2 60550542 60550561 60550558 +
gcccacatagcagaggcggg

SEQ ID NO: 169762 - DNA, 20 bp, Artificial Sequence
  Synthetic oligonucleotide; CGG chr2 60550545 60550564 60550561 +
cacatagcagaggcgggggg

SEQ ID NO: 169763 - DNA, 20 bp, Artificial Sequence
  Synthetic oligonucleotide; GGG chr2 60550546 60550565 60550562 +
acatagcagaggcggggggc

SEQ ID NO: 169764 - DNA, 20 bp, Artificial Sequence
  Synthetic oligonucleotide; GGG chr2 60550547 60550566 60550563 +
catagcagaggcggggggcg

SEQ ID NO: 169765 - DNA, 20 bp, Artificial Sequence
  Synthetic oligonucleotide; GGG chr2 60550548 60550567 60550564 +
atagcagaggcggggggcgg

SEQ ID NO: 169766 - DNA, 20 bp, Artificial Sequence
  Synthetic oligonucleotide; GGG chr2 60550549 60550568 60550565 +
tagcagaggcggggggcggg

SEQ ID NO: 169767 - DNA, 20 bp, Artificial Sequence
  Synthetic oligonucleotide; GGG chr2 60550550 60550569 60550566 +
agcagaggcggggggcgggg

SEQ ID NO: 169768 - DNA, 20 bp, Artificial Sequence
  Synthetic oligonucleotide; TGG chr2 60550553 60550572 60550569 +
agaggcggggggcggggggg

SEQ ID NO: 169769 - DNA, 20 bp, Artificial Sequence
  Synthetic oligonucleotide; GAG chr2 60550560 60550579 60550576 +
gggggcgggggggtggtact

SEQ ID NO: 169770 - DNA, 20 bp, Artificial Sequence
  Synthetic oligonucleotide; AGG chr2 60550561 60550580 60550577 +
ggggcgggggggtggtactg

SEQ ID NO: 169771 - DNA, 20 bp, Artificial Sequence
  Synthetic oligonucleotide; CGG chr2 60550566 60550585 60550582 +
gggggggtggtactgaggac

SEQ ID NO: 169772 - DNA, 20 bp, Artificial Sequence
  Synthetic oligonucleotide; GGG chr2 60550567 60550586 60550583 +
ggggggtggtactgaggacc

SEQ ID NO: 169773 - DNA, 20 bp, Artificial Sequence
  Synthetic oligonucleotide; TGG chr2 60550571 60550590 60550587 +
ggtggtactgaggaccggga

SEQ ID NO: 169774 - DNA, 20 bp, Artificial Sequence
  Synthetic oligonucleotide; GAG chr2 60550588 60550607 60550604 +
ggatggctcctgccccctct

SEQ ID NO: 169775 - DNA, 20 bp, Artificial Sequence
  Synthetic oligonucleotide; CAG chr2 60550595 60550614 60550611 +
tcctgccccctctgagcacc

SEQ ID NO: 169776 - DNA, 20 bp, Artificial Sequence
  Synthetic oligonucleotide; GAG chr2 60550603 60550622 60550619 +
cctctgagcacccagaaaat

SEQ ID NO: 169777 - DNA, 20 bp, Artificial Sequence
  Synthetic oligonucleotide; AGG chr2 60550604 60550623 60550620 +
ctctgagcacccagaaaatg

SEQ ID NO: 169778 - DNA, 20 bp, Artificial Sequence
  Synthetic oligonucleotide; CAG chr2 60550608 60550627 60550624 +
gagcacccagaaaatgagga

SEQ ID NO: 169779 - DNA, 20 bp, Artificial Sequence
  Synthetic oligonucleotide; AAG chr2 60550612 60550631 60550628 +
acccagaaaatgaggacaga

SEQ ID NO: 169780 - DNA, 20 bp, Artificial Sequence
  Synthetic oligonucleotide; AAG chr2 60550615 60550634 60550631 +
cagaaaatgaggacagaaag

SEQ ID NO: 169781 - DNA, 20 bp, Artificial Sequence
  Synthetic oligonucleotide; TGG chr2 60550618 60550637 60550634 +
aaaatgaggacagaaagaag

SEQ ID NO: 169782 - DNA, 20 bp, Artificial Sequence
  Synthetic oligonucleotide; TGG chr2 60550642 60550661 60550658 +
cccctcaccccctcccaaac

SEQ ID NO: 169783 - DNA, 20 bp, Artificial Sequence
  Synthetic oligonucleotide; CGG chr2 60550656 60550675 60550672 +
ccaaactggccctttaaccc

SEQ ID NO: 169784 - DNA, 20 bp, Artificial Sequence
  Synthetic oligonucleotide; GGG chr2 60550657 60550676 60550673 +
caaactggccctttaacccc

SEQ ID NO: 169785 - DNA, 20 bp, Artificial Sequence
  Synthetic oligonucleotide; CAG chr2 60550661 60550680 60550677 +
ctggccctttaaccccggga

SEQ ID NO: 169786 - DNA, 20 bp, Artificial Sequence
  Synthetic oligonucleotide; AGG chr2 60550662 60550681 60550678 +
tggccctttaaccccgggac

SEQ ID NO: 169787 - DNA, 20 bp, Artificial Sequence
  Synthetic oligonucleotide; GAG chr2 60550664 60550683 60550680 +
gccctttaaccccgggacag

SEQ ID NO: 169788 - DNA, 20 bp, Artificial Sequence
  Synthetic oligonucleotide; AGG chr2 60550665 60550684 60550681 +
ccctttaaccccgggacagg

SEQ ID NO: 169789 - DNA, 20 bp, Artificial Sequence
  Synthetic oligonucleotide; GAG chr2 60550667 60550686 60550683 +
ctttaaccccgggacaggag

SEQ ID NO: 169790 - DNA, 20 bp, Artificial Sequence
  Synthetic oligonucleotide; AGG chr2 60550668 60550687 60550684 +
tttaaccccgggacaggagg

SEQ ID NO: 169791 - DNA, 20 bp, Artificial Sequence
  Synthetic oligonucleotide; GGG chr2 60550669 60550688 60550685 +
ttaaccccgggacaggagga

SEQ ID NO: 169792 - DNA, 20 bp, Artificial Sequence
  Synthetic oligonucleotide; GGG chr2 60550670 60550689 60550686 +
taaccccgggacaggaggag

SEQ ID NO: 169793 - DNA, 20 bp, Artificial Sequence
  Synthetic oligonucleotide; GGG chr2 60550671 60550690 60550687 +
aaccccgggacaggaggagg

SEQ ID NO: 169794 - DNA, 20 bp, Artificial Sequence
  Synthetic oligonucleotide; CAG chr2 60550686 60550705 60550702 +
ggagggggtactaaccctcc

SEQ ID NO: 169795 - DNA, 20 bp, Artificial Sequence
  Synthetic oligonucleotide; TAG chr2 60550691 60550710 60550707 +
gggtactaaccctcccagcc

SEQ ID NO: 169796 - DNA, 20 bp, Artificial Sequence
  Synthetic oligonucleotide; GAG chr2 60550693 60550712 60550709 +
gtactaaccctcccagccta

SEQ ID NO: 169797 - DNA, 20 bp, Artificial Sequence
  Synthetic oligonucleotide; AAG chr2 60550702 60550721 60550718 +
ctcccagcctagagtgtccc

SEQ ID NO: 169798 - DNA, 20 bp, Artificial Sequence
  Synthetic oligonucleotide; TGG chr2 60550706 60550725 60550722 +
cagcctagagtgtcccaaga

SEQ ID NO: 169799 - DNA, 20 bp, Artificial Sequence
  Synthetic oligonucleotide; CAG chr2 60550712 60550731 60550728 +
agagtgtcccaagatggacc

SEQ ID NO: 169800 - DNA, 20 bp, Artificial Sequence
  Synthetic oligonucleotide; AGG chr2 60550713 60550732 60550729 +
gagtgtcccaagatggaccc

SEQ ID NO: 169801 - DNA, 20 bp, Artificial Sequence
  Synthetic oligonucleotide; GAG chr2 60550715 60550734 60550731 +
gtgtcccaagatggacccag

SEQ ID NO: 169802 - DNA, 20 bp, Artificial Sequence
  Synthetic oligonucleotide; AGG chr2 60550716 60550735 60550732 +
tgtcccaagatggacccagg

SEQ ID NO: 169803 - DNA, 20 bp, Artificial Sequence
  Synthetic oligonucleotide; GGG chr2 60550717 60550736 60550733 +
gtcccaagatggacccagga

SEQ ID NO: 169804 - DNA, 20 bp, Artificial Sequence
  Synthetic oligonucleotide; GAG chr2 60550719 60550738 60550735 +
cccaagatggacccaggagg

SEQ ID NO: 169805 - DNA, 20 bp, Artificial Sequence
  Synthetic oligonucleotide; GAG chr2 60550721 60550740 60550737 +
caagatggacccaggaggga

SEQ ID NO: 169806 - DNA, 20 bp, Artificial Sequence
  Synthetic oligonucleotide; AGG chr2 60550722 60550741 60550738 +
aagatggacccaggagggag

SEQ ID NO: 169807 - DNA, 20 bp, Artificial Sequence
  Synthetic oligonucleotide; GGG chr2 60550723 60550742 60550739 +
agatggacccaggagggaga

SEQ ID NO: 169808 - DNA, 20 bp, Artificial Sequence
  Synthetic oligonucleotide; GGG chr2 60550724 60550743 60550740 +
gatggacccaggagggagag

SEQ ID NO: 169809 - DNA, 20 bp, Artificial Sequence
  Synthetic oligonucleotide; GAG chr2 60550730 60550749 60550746 +
cccaggagggagaggggtac

SEQ ID NO: 169810 - DNA, 20 bp, Artificial Sequence
  Synthetic oligonucleotide; AGG chr2 60550731 60550750 60550747 +
ccaggagggagaggggtacg

SEQ ID NO: 169811 - DNA, 20 bp, Artificial Sequence
  Synthetic oligonucleotide; GGG chr2 60550732 60550751 60550748 +
caggagggagaggggtacga

SEQ ID NO: 169812 - DNA, 20 bp, Artificial Sequence
  Synthetic oligonucleotide; GAG chr2 60550734 60550753 60550750 +
ggagggagaggggtacgagg

SEQ ID NO: 169813 - DNA, 20 bp, Artificial Sequence
  Synthetic oligonucleotide; CAG chr2 60550737 60550756 60550753 +
gggagaggggtacgagggag

SEQ ID NO: 169814 - DNA, 20 bp, Artificial Sequence
  Synthetic oligonucleotide; TGG chr2 60550742 60550761 60550758 +
aggggtacgagggagcagcc

SEQ ID NO: 169815 - DNA, 20 bp, Artificial Sequence
  Synthetic oligonucleotide; CGG chr2 60550756 60550775 60550772 +
gcagcctggactgcgcgccc

SEQ ID NO: 169816 - DNA, 20 bp, Artificial Sequence
  Synthetic oligonucleotide; GAG chr2 60550769 60550788 60550785 +
cgcgccccggtctgtccttt

SEQ ID NO: 169817 - DNA, 20 bp, Artificial Sequence
  Synthetic oligonucleotide; AAG chr2 60550791 60550810 60550807 +
gcccccactgcatccttccg

SEQ ID NO: 169818 - DNA, 20 bp, Artificial Sequence
  Synthetic oligonucleotide; AAG chr2 60550794 60550813 60550810 +
cccactgcatccttccgaag

SEQ ID NO: 169819 - DNA, 20 bp, Artificial Sequence
  Synthetic oligonucleotide; AGG chr2 60550795 60550814 60550811 +
ccactgcatccttccgaaga

SEQ ID NO: 169820 - DNA, 20 bp, Artificial Sequence
  Synthetic oligonucleotide; GGG chr2 60550796 60550815 60550812 +
cactgcatccttccgaagaa

SEQ ID NO: 169821 - DNA, 20 bp, Artificial Sequence
  Synthetic oligonucleotide; GAG chr2 60550811 60550830 60550827 +
aagaagggcctgactttccc

SEQ ID NO: 169822 - DNA, 20 bp, Artificial Sequence
  Synthetic oligonucleotide; CGG chr2 60550842 60550861 60550858 +
acactgcccttccttcccgc

SEQ ID NO: 169823 - DNA, 20 bp, Artificial Sequence
  Synthetic oligonucleotide; TGG chr2 60550849 60550868 60550865 +
ccttccttcccgccggtacc

SEQ ID NO: 169824 - DNA, 20 bp, Artificial Sequence
  Synthetic oligonucleotide; CGG chr2 60550853 60550872 60550869 +
ccttcccgccggtacctggc

SEQ ID NO: 169825 - DNA, 20 bp, Artificial Sequence
  Synthetic oligonucleotide; GGG chr2 60550854 60550873 60550870 +
cttcccgccggtacctggcc

SEQ ID NO: 169826 - DNA, 20 bp, Artificial Sequence
  Synthetic oligonucleotide; CGG chr2 60550898 60550917 60550914 +
cgccgcgtctgatccgcatc

SEQ ID NO: 169827 - DNA, 20 bp, Artificial Sequence
  Synthetic oligonucleotide; CGG chr2 60550903 60550922 60550919 +
cgtctgatccgcatccggcg

SEQ ID NO: 169828 - DNA, 20 bp, Artificial Sequence
  Synthetic oligonucleotide; CGG chr2 60550907 60550926 60550923 +
tgatccgcatccggcgcggc

SEQ ID NO: 169829 - DNA, 20 bp, Artificial Sequence
  Synthetic oligonucleotide; GGG chr2 60550908 60550927 60550924 +
gatccgcatccggcgcggcc

SEQ ID NO: 169830 - DNA, 20 bp, Artificial Sequence
  Synthetic oligonucleotide; GGG chr2 60550909 60550928 60550925 +
atccgcatccggcgcggccg

SEQ ID NO: 169831 - DNA, 20 bp, Artificial Sequence
  Synthetic oligonucleotide; GGG chr2 60550910 60550929 60550926 +
tccgcatccggcgcggccgg

SEQ ID NO: 169832 - DNA, 20 bp, Artificial Sequence
  Synthetic oligonucleotide; GAG chr2 60550912 60550931 60550928 +
cgcatccggcgcggccgggg

SEQ ID NO: 169833 - DNA, 20 bp, Artificial Sequence
  Synthetic oligonucleotide; TGG chr2 60550916 60550935 60550932 +
tccggcgcggccgggggagt

SEQ ID NO: 169834 - DNA, 20 bp, Artificial Sequence
  Synthetic oligonucleotide; GGG chr2 60550917 60550936 60550933 +
ccggcgcggccgggggagtt

SEQ ID NO: 169835 - DNA, 20 bp, Artificial Sequence
  Synthetic oligonucleotide; GGG chr2 60550918 60550937 60550934 +
cggcgcggccgggggagttg

SEQ ID NO: 169836 - DNA, 20 bp, Artificial Sequence
  Synthetic oligonucleotide; GGG chr2 60550919 60550938 60550935 +
ggcgcggccgggggagttgg

SEQ ID NO: 169837 - DNA, 20 bp, Artificial Sequence
  Synthetic oligonucleotide; CGG chr2 60550922 60550941 60550938 +
gcggccgggggagttggggg

SEQ ID NO: 169838 - DNA, 20 bp, Artificial Sequence
  Synthetic oligonucleotide; GGG chr2 60550923 60550942 60550939 +
cggccgggggagttgggggc

SEQ ID NO: 169839 - DNA, 20 bp, Artificial Sequence
  Synthetic oligonucleotide; GGG chr2 60550924 60550943 60550940 +
ggccgggggagttgggggcg

SEQ ID NO: 169840 - DNA, 20 bp, Artificial Sequence
  Synthetic oligonucleotide; GGG chr2 60550925 60550944 60550941 +
gccgggggagttgggggcgg

SEQ ID NO: 169841 - DNA, 20 bp, Artificial Sequence
  Synthetic oligonucleotide; GAG chr2 60550927 60550946 60550943 +
cgggggagttgggggcgggg

SEQ ID NO: 169842 - DNA, 20 bp, Artificial Sequence
  Synthetic oligonucleotide; GAG chr2 60550929 60550948 60550945 +
ggggagttgggggcggggga

SEQ ID NO: 169843 - DNA, 20 bp, Artificial Sequence
  Synthetic oligonucleotide; CGG chr2 60550932 60550951 60550948 +
gagttgggggcgggggagag

SEQ ID NO: 169844 - DNA, 20 bp, Artificial Sequence
  Synthetic oligonucleotide; GAG chr2 60550936 60550955 60550952 +
tgggggcgggggagagcggc

SEQ ID NO: 169845 - DNA, 20 bp, Artificial Sequence
  Synthetic oligonucleotide; AGG chr2 60550937 60550956 60550953 +
gggggcgggggagagcggcg

SEQ ID NO: 169846 - DNA, 20 bp, Artificial Sequence
  Synthetic oligonucleotide; GGG chr2 60550938 60550957 60550954 +
ggggcgggggagagcggcga

SEQ ID NO: 169847 - DNA, 20 bp, Artificial Sequence
  Synthetic oligonucleotide; GAG chr2 60550940 60550959 60550956 +
ggcgggggagagcggcgagg

SEQ ID NO: 169848 - DNA, 20 bp, Artificial Sequence
  Synthetic oligonucleotide; AGG chr2 60550941 60550960 60550957 +
gcgggggagagcggcgaggg

SEQ ID NO: 169849 - DNA, 20 bp, Artificial Sequence
  Synthetic oligonucleotide; GGG chr2 60550942 60550961 60550958 +
cgggggagagcggcgaggga

SEQ ID NO: 169850 - DNA, 20 bp, Artificial Sequence
  Synthetic oligonucleotide; GAG chr2 60550949 60550968 60550965 +
gagcggcgagggagggatgc

SEQ ID NO: 169851 - DNA, 20 bp, Artificial Sequence
  Synthetic oligonucleotide; AGG chr2 60550950 60550969 60550966 +
agcggcgagggagggatgcg

SEQ ID NO: 169852 - DNA, 20 bp, Artificial Sequence
  Synthetic oligonucleotide; GGG chr2 60550951 60550970 60550967 +
gcggcgagggagggatgcga

SEQ ID NO: 169853 - DNA, 20 bp, Artificial Sequence
  Synthetic oligonucleotide; GGG chr2 60550952 60550971 60550968 +
cggcgagggagggatgcgag

SEQ ID NO: 169854 - DNA, 20 bp, Artificial Sequence
  Synthetic oligonucleotide; GGG chr2 60550953 60550972 60550969 +
ggcgagggagggatgcgagg

SEQ ID NO: 169855 - DNA, 20 bp, Artificial Sequence
  Synthetic oligonucleotide; TGG chr2 60550956 60550975 60550972 +
gagggagggatgcgaggggg

SEQ ID NO: 169856 - DNA, 20 bp, Artificial Sequence
  Synthetic oligonucleotide; GGG chr2 60550957 60550976 60550973 +
agggagggatgcgagggggt

SEQ ID NO: 169857 - DNA, 20 bp, Artificial Sequence
  Synthetic oligonucleotide; GGG chr2 60550958 60550977 60550974 +
gggagggatgcgagggggtg

SEQ ID NO: 169858 - DNA, 20 bp, Artificial Sequence
  Synthetic oligonucleotide; GAG chr2 60550960 60550979 60550976 +
gagggatgcgagggggtggg

SEQ ID NO: 169859 - DNA, 20 bp, Artificial Sequence
  Synthetic oligonucleotide; GAG chr2 60550962 60550981 60550978 +
gggatgcgagggggtgggga

SEQ ID NO: 169860 - DNA, 20 bp, Artificial Sequence
  Synthetic oligonucleotide; AGG chr2 60550963 60550982 60550979 +
ggatgcgagggggtggggag

SEQ ID NO: 169861 - DNA, 20 bp, Artificial Sequence
  Synthetic oligonucleotide; GGG chr2 60550964 60550983 60550980 +
gatgcgagggggtggggaga

SEQ ID NO: 169862 - DNA, 20 bp, Artificial Sequence
  Synthetic oligonucleotide; GAG chr2 60550966 60550985 60550982 +
tgcgagggggtggggagagg

SEQ ID NO: 169863 - DNA, 20 bp, Artificial Sequence
  Synthetic oligonucleotide; AGG chr2 60550967 60550986 60550983 +
gcgagggggtggggagaggg

SEQ ID NO: 169864 - DNA, 20 bp, Artificial Sequence
  Synthetic oligonucleotide; GGG chr2 60550968 60550987 60550984 +
cgagggggtggggagaggga

SEQ ID NO: 169865 - DNA, 20 bp, Artificial Sequence
  Synthetic oligonucleotide; CGG chr2 60550984 60551003 60551000 +
gggagggccgcgcaacgtgc

SEQ ID NO: 169866 - DNA, 20 bp, Artificial Sequence
  Synthetic oligonucleotide; GGG chr2 60550985 60551004 60551001 +
ggagggccgcgcaacgtgcc

SEQ ID NO: 169867 - DNA, 20 bp, Artificial Sequence
  Synthetic oligonucleotide; GGG chr2 60550986 60551005 60551002 +
gagggccgcgcaacgtgccg

SEQ ID NO: 169868 - DNA, 20 bp, Artificial Sequence
  Synthetic oligonucleotide; TGG chr2 60550989 60551008 60551005 +
ggccgcgcaacgtgccgggg

SEQ ID NO: 169869 - DNA, 20 bp, Artificial Sequence
  Synthetic oligonucleotide; GGG chr2 60550990 60551009 60551006 +
gccgcgcaacgtgccggggt

SEQ ID NO: 169870 - DNA, 20 bp, Artificial Sequence
  Synthetic oligonucleotide; GGG chr2 60550991 60551010 60551007 +
ccgcgcaacgtgccggggtg

SEQ ID NO: 169871 - DNA, 20 bp, Artificial Sequence
  Synthetic oligonucleotide; GGG chr2 60550992 60551011 60551008 +
cgcgcaacgtgccggggtgg

SEQ ID NO: 169872 - DNA, 20 bp, Artificial Sequence
  Synthetic oligonucleotide; GAG chr2 60550994 60551013 60551010 +
cgcaacgtgccggggtgggg

SEQ ID NO: 169873 - DNA, 20 bp, Artificial Sequence
  Synthetic oligonucleotide; AAG chr2 60551003 60551022 60551019 +
ccggggtgggggagcttccg

SEQ ID NO: 169874 - DNA, 20 bp, Artificial Sequence
  Synthetic oligonucleotide; AAG chr2 60551014 60551033 60551030 +
gagcttccgaagtgtgtgac

SEQ ID NO: 169875 - DNA, 20 bp, Artificial Sequence
  Synthetic oligonucleotide; CAG chr2 60551020 60551039 60551036 +
ccgaagtgtgtgacaagttc

SEQ ID NO: 169876 - DNA, 20 bp, Artificial Sequence
  Synthetic oligonucleotide; AGG chr2 60551021 60551040 60551037 +
cgaagtgtgtgacaagttcc

SEQ ID NO: 169877 - DNA, 20 bp, Artificial Sequence
  Synthetic oligonucleotide; GGG chr2 60551022 60551041 60551038 +
gaagtgtgtgacaagttcca

SEQ ID NO: 169878 - DNA, 20 bp, Artificial Sequence
  Synthetic oligonucleotide; CAG chr2 60551027 60551046 60551043 +
gtgtgacaagttccagggcc

SEQ ID NO: 169879 - DNA, 20 bp, Artificial Sequence
  Synthetic oligonucleotide; CAG chr2 60551084 60551103 60551100 +
accacccctttaaaaaaaca

SEQ ID NO: 169880 - DNA, 20 bp, Artificial Sequence
  Synthetic oligonucleotide; AAG chr2 60551091 60551110 60551107 +
ctttaaaaaaacacagaacc

SEQ ID NO: 169881 - DNA, 20 bp, Artificial Sequence
  Synthetic oligonucleotide; TAG chr2 60551096 60551115 60551112 +
aaaaaacacagaaccaagta

SEQ ID NO: 169882 - DNA, 20 bp, Artificial Sequence
  Synthetic oligonucleotide; AGG chr2 60551097 60551116 60551113 +
aaaaacacagaaccaagtat

SEQ ID NO: 169883 - DNA, 20 bp, Artificial Sequence
  Synthetic oligonucleotide; TGG chr2 60551100 60551119 60551116 +
aacacagaaccaagtatagg

SEQ ID NO: 169884 - DNA, 20 bp, Artificial Sequence
  Synthetic oligonucleotide; AAG chr2 60551129 60551148 60551145 +
aaaactgcatcaaaaattta

SEQ ID NO: 169885 - DNA, 20 bp, Artificial Sequence
  Synthetic oligonucleotide; AAG chr2 60551133 60551152 60551149 +
ctgcatcaaaaatttaaagt

SEQ ID NO: 169886 - DNA, 20 bp, Artificial Sequence
  Synthetic oligonucleotide; GAG chr2 60551147 60551166 60551163 +
taaagtaagaatcataaatt

SEQ ID NO: 169887 - DNA, 20 bp, Artificial Sequence
  Synthetic oligonucleotide; TAG chr2 60551150 60551169 60551166 +
agtaagaatcataaattgag

SEQ ID NO: 169888 - DNA, 20 bp, Artificial Sequence
  Synthetic oligonucleotide; AGG chr2 60551151 60551170 60551167 +
gtaagaatcataaattgagt

SEQ ID NO: 169889 - DNA, 20 bp, Artificial Sequence
  Synthetic oligonucleotide; GGG chr2 60551152 60551171 60551168 +
taagaatcataaattgagta

SEQ ID NO: 169890 - DNA, 20 bp, Artificial Sequence
  Synthetic oligonucleotide; GGG chr2 60551153 60551172 60551169 +
aagaatcataaattgagtag

SEQ ID NO: 169891 - DNA, 20 bp, Artificial Sequence
  Synthetic oligonucleotide; GGG chr2 60551154 60551173 60551170 +
agaatcataaattgagtagg

SEQ ID NO: 169892 - DNA, 20 bp, Artificial Sequence
  Synthetic oligonucleotide; GGG chr2 60551155 60551174 60551171 +
gaatcataaattgagtaggg

SEQ ID NO: 169893 - DNA, 20 bp, Artificial Sequence
  Synthetic oligonucleotide; GGG chr2 60551156 60551175 60551172 +
aatcataaattgagtagggg

SEQ ID NO: 169894 - DNA, 20 bp, Artificial Sequence
  Synthetic oligonucleotide; TGG chr2 60551163 60551182 60551179 +
aattgagtagggggggaatg

SEQ ID NO: 169895 - DNA, 20 bp, Artificial Sequence
  Synthetic oligonucleotide; GGG chr2 60551164 60551183 60551180 +
attgagtagggggggaatgt

SEQ ID NO: 169896 - DNA, 20 bp, Artificial Sequence
  Synthetic oligonucleotide; AAG chr2 60551205 60551224 60551221 +
ccttgctgccaaactttcct

SEQ ID NO: 169897 - DNA, 20 bp, Artificial Sequence
  Synthetic oligonucleotide; CAG chr2 60551227 60551246 60551243 +
gtgcccaccgcccgcctttc

SEQ ID NO: 169898 - DNA, 20 bp, Artificial Sequence
  Synthetic oligonucleotide; AGG chr2 60551228 60551247 60551244 +
tgcccaccgcccgcctttcc

SEQ ID NO: 169899 - DNA, 20 bp, Artificial Sequence
  Synthetic oligonucleotide; CAG chr2 60551233 60551252 60551249 +
accgcccgcctttccaggcg

SEQ ID NO: 169900 - DNA, 20 bp, Artificial Sequence
  Synthetic oligonucleotide; CAG chr2 60551237 60551256 60551253 +
cccgcctttccaggcgcagt

SEQ ID NO: 169901 - DNA, 20 bp, Artificial Sequence
  Synthetic oligonucleotide; CGG chr2 60551240 60551259 60551256 +
gcctttccaggcgcagtcag

SEQ ID NO: 169902 - DNA, 20 bp, Artificial Sequence
  Synthetic oligonucleotide; GGG chr2 60551241 60551260 60551257 +
cctttccaggcgcagtcagc

SEQ ID NO: 169903 - DNA, 20 bp, Artificial Sequence
  Synthetic oligonucleotide; GAG chr2 60551243 60551262 60551259 +
tttccaggcgcagtcagcgg

SEQ ID NO: 169904 - DNA, 20 bp, Artificial Sequence
  Synthetic oligonucleotide; CAG chr2 60551247 60551266 60551263 +
caggcgcagtcagcgggaga

SEQ ID NO: 169905 - DNA, 20 bp, Artificial Sequence
  Synthetic oligonucleotide; CAG chr2 60551260 60551279 60551276 +
cgggagacagccaccaccac

SEQ ID NO: 169906 - DNA, 20 bp, Artificial Sequence
  Synthetic oligonucleotide; CAG chr2 60551271 60551290 60551287 +
caccaccaccagctcttata

SEQ ID NO: 169907 - DNA, 20 bp, Artificial Sequence
  Synthetic oligonucleotide; AAG chr2 60551280 60551299 60551296 +
cagctcttatacagactcac

SEQ ID NO: 169908 - DNA, 20 bp, Artificial Sequence
  Synthetic oligonucleotide; CAG chr2 60551288 60551307 60551304 +
atacagactcacaagaacct

SEQ ID NO: 169909 - DNA, 20 bp, Artificial Sequence
  Synthetic oligonucleotide; AAG chr2 60551294 60551313 60551310 +
actcacaagaacctcagacc

SEQ ID NO: 169910 - DNA, 20 bp, Artificial Sequence
  Synthetic oligonucleotide; CAG chr2 60551298 60551317 60551314 +
acaagaacctcagaccaagc

SEQ ID NO: 169911 - DNA, 20 bp, Artificial Sequence
  Synthetic oligonucleotide; AGG chr2 60551299 60551318 60551315 +
caagaacctcagaccaagcc

SEQ ID NO: 169912 - DNA, 20 bp, Artificial Sequence
  Synthetic oligonucleotide; TGG chr2 60551304 60551323 60551320 +
acctcagaccaagccaggcc

SEQ ID NO: 169913 - DNA, 20 bp, Artificial Sequence
  Synthetic oligonucleotide; GGG chr2 60551305 60551324 60551321 +
cctcagaccaagccaggcct

SEQ ID NO: 169914 - DNA, 20 bp, Artificial Sequence
  Synthetic oligonucleotide; GGG chr2 60551306 60551325 60551322 +
ctcagaccaagccaggcctg

SEQ ID NO: 169915 - DNA, 20 bp, Artificial Sequence
  Synthetic oligonucleotide; AAG chr2 60551309 60551328 60551325 +
agaccaagccaggcctgggg

SEQ ID NO: 169916 - DNA, 20 bp, Artificial Sequence
  Synthetic oligonucleotide; GAG chr2 60551311 60551330 60551327 +
accaagccaggcctggggaa

SEQ ID NO: 169917 - DNA, 20 bp, Artificial Sequence
  Synthetic oligonucleotide; AGG chr2 60551312 60551331 60551328 +
ccaagccaggcctggggaag

SEQ ID NO: 169918 - DNA, 20 bp, Artificial Sequence
  Synthetic oligonucleotide; GGG chr2 60551313 60551332 60551329 +
caagccaggcctggggaaga

SEQ ID NO: 169919 - DNA, 20 bp, Artificial Sequence
  Synthetic oligonucleotide; AAG chr2 60551317 60551336 60551333 +
ccaggcctggggaagagggc

SEQ ID NO: 169920 - DNA, 20 bp, Artificial Sequence
  Synthetic oligonucleotide; AAG chr2 60551325 60551344 60551341 +
ggggaagagggcaagaccca

SEQ ID NO: 169921 - DNA, 20 bp, Artificial Sequence
  Synthetic oligonucleotide; AGG chr2 60551326 60551345 60551342 +
gggaagagggcaagacccaa

SEQ ID NO: 169922 - DNA, 20 bp, Artificial Sequence
  Synthetic oligonucleotide; GGG chr2 60551327 60551346 60551343 +
ggaagagggcaagacccaaa

SEQ ID NO: 169923 - DNA, 20 bp, Artificial Sequence
  Synthetic oligonucleotide; AAG chr2 60551332 60551351 60551348 +
agggcaagacccaaagggtg

SEQ ID NO: 169924 - DNA, 20 bp, Artificial Sequence
  Synthetic oligonucleotide; CGG chr2 60551339 60551358 60551355 +
gacccaaagggtgaagtgct

SEQ ID NO: 169925 - DNA, 20 bp, Artificial Sequence
  Synthetic oligonucleotide; GGG chr2 60551340 60551359 60551356 +
acccaaagggtgaagtgctc

SEQ ID NO: 169926 - DNA, 20 bp, Artificial Sequence
  Synthetic oligonucleotide; GGG chr2 60551341 60551360 60551357 +
cccaaagggtgaagtgctcg

SEQ ID NO: 169927 - DNA, 20 bp, Artificial Sequence
  Synthetic oligonucleotide; CAG chr2 60551347 60551366 60551363 +
gggtgaagtgctcggggtcc

SEQ ID NO: 169928 - DNA, 20 bp, Artificial Sequence
  Synthetic oligonucleotide; AGG chr2 60551348 60551367 60551364 +
ggtgaagtgctcggggtccc

SEQ ID NO: 169929 - DNA, 20 bp, Artificial Sequence
  Synthetic oligonucleotide; CAG chr2 60551354 60551373 60551370 +
gtgctcggggtcccaggatc

SEQ ID NO: 169930 - DNA, 20 bp, Artificial Sequence
  Synthetic oligonucleotide; CGG chr2 60551403 60551422 60551419 +
acttctcccctgcccttccc

SEQ ID NO: 169931 - DNA, 20 bp, Artificial Sequence
  Synthetic oligonucleotide; TGG chr2 60551419 60551438 60551435 +
tccccggcaaccccgccacc

SEQ ID NO: 169932 - DNA, 20 bp, Artificial Sequence
  Synthetic oligonucleotide; TAG chr2 60551424 60551443 60551440 +
ggcaaccccgccacctggcc

SEQ ID NO: 169933 - DNA, 20 bp, Artificial Sequence
  Synthetic oligonucleotide; CGG chr2 60551434 60551453 60551450 +
ccacctggcctagtcgtgct

SEQ ID NO: 169934 - DNA, 20 bp, Artificial Sequence
  Synthetic oligonucleotide; GGG chr2 60551435 60551454 60551451 +
cacctggcctagtcgtgctc

SEQ ID NO: 169935 - DNA, 20 bp, Artificial Sequence
  Synthetic oligonucleotide; GGG chr2 60551436 60551455 60551452 +
acctggcctagtcgtgctcg

SEQ ID NO: 169936 - DNA, 20 bp, Artificial Sequence
  Synthetic oligonucleotide; CAG chr2 60551441 60551460 60551457 +
gcctagtcgtgctcggggcg

SEQ ID NO: 169937 - DNA, 20 bp, Artificial Sequence
  Synthetic oligonucleotide; AGG chr2 60551442 60551461 60551458 +
cctagtcgtgctcggggcgc

SEQ ID NO: 169938 - DNA, 20 bp, Artificial Sequence
  Synthetic oligonucleotide; GGG chr2 60551443 60551462 60551459 +
ctagtcgtgctcggggcgca

SEQ ID NO: 169939 - DNA, 20 bp, Artificial Sequence
  Synthetic oligonucleotide; GGG chr2 60551444 60551463 60551460 +
tagtcgtgctcggggcgcag

SEQ ID NO: 169940 - DNA, 20 bp, Artificial Sequence
  Synthetic oligonucleotide; GGG chr2 60551445 60551464 60551461 +
agtcgtgctcggggcgcagg

SEQ ID NO: 169941 - DNA, 20 bp, Artificial Sequence
  Synthetic oligonucleotide; TGG chr2 60551450 60551469 60551466 +
tgctcggggcgcagggggac

SEQ ID NO: 169942 - DNA, 20 bp, Artificial Sequence
  Synthetic oligonucleotide; CAG chr2 60551457 60551476 60551473 +
ggcgcagggggactggtgac

SEQ ID NO: 169943 - DNA, 20 bp, Artificial Sequence
  Synthetic oligonucleotide; CGG chr2 60551462 60551481 60551478 +
agggggactggtgaccagac

SEQ ID NO: 169944 - DNA, 20 bp, Artificial Sequence
  Synthetic oligonucleotide; GGG chr2 60551463 60551482 60551479 +
gggggactggtgaccagacc

SEQ ID NO: 169945 - DNA, 20 bp, Artificial Sequence
  Synthetic oligonucleotide; CGG chr2 60551466 60551485 60551482 +
ggactggtgaccagaccggg

SEQ ID NO: 169946 - DNA, 20 bp, Artificial Sequence
  Synthetic oligonucleotide; GGG chr2 60551467 60551486 60551483 +
gactggtgaccagaccgggc

SEQ ID NO: 169947 - DNA, 20 bp, Artificial Sequence
  Synthetic oligonucleotide; GGG chr2 60551468 60551487 60551484 +
actggtgaccagaccgggcg

SEQ ID NO: 169948 - DNA, 20 bp, Artificial Sequence
  Synthetic oligonucleotide; TGG chr2 60551471 60551490 60551487 +
ggtgaccagaccgggcgggg

SEQ ID NO: 169949 - DNA, 20 bp, Artificial Sequence
  Synthetic oligonucleotide; GGG chr2 60551472 60551491 60551488 +
gtgaccagaccgggcggggt

SEQ ID NO: 169950 - DNA, 20 bp, Artificial Sequence
  Synthetic oligonucleotide; GGG chr2 60551473 60551492 60551489 +
tgaccagaccgggcggggtg

SEQ ID NO: 169951 - DNA, 20 bp, Artificial Sequence
  Synthetic oligonucleotide; GGG chr2 60551474 60551493 60551490 +
gaccagaccgggcggggtgg

SEQ ID NO: 169952 - DNA, 20 bp, Artificial Sequence
  Synthetic oligonucleotide; GGG chr2 60551475 60551494 60551491 +
accagaccgggcggggtggg

SEQ ID NO: 169953 - DNA, 20 bp, Artificial Sequence
  Synthetic oligonucleotide; TGG chr2 60551478 60551497 60551494 +
agaccgggcggggtgggggg

SEQ ID NO: 169954 - DNA, 20 bp, Artificial Sequence
  Synthetic oligonucleotide; GGG chr2 60551479 60551498 60551495 +
gaccgggcggggtggggggt

SEQ ID NO: 169955 - DNA, 20 bp, Artificial Sequence
  Synthetic oligonucleotide; CAG chr2 60551482 60551501 60551498 +
cgggcggggtggggggtggg

SEQ ID NO: 169956 - DNA, 20 bp, Artificial Sequence
  Synthetic oligonucleotide; AGG chr2 60551483 60551502 60551499 +
gggcggggtggggggtgggc

SEQ ID NO: 169957 - DNA, 20 bp, Artificial Sequence
  Synthetic oligonucleotide; GGG chr2 60551484 60551503 60551500 +
ggcggggtggggggtgggca

SEQ ID NO: 169958 - DNA, 20 bp, Artificial Sequence
  Synthetic oligonucleotide; AAG chr2 60551488 60551507 60551504 +
gggtggggggtgggcaggga

SEQ ID NO: 169959 - DNA, 20 bp, Artificial Sequence
  Synthetic oligonucleotide; TGG chr2 60551495 60551514 60551511 +
gggtgggcagggaaagcacg

SEQ ID NO: 169960 - DNA, 20 bp, Artificial Sequence
  Synthetic oligonucleotide; CGG chr2 60551509 60551528 60551525 +
agcacgtggtgacctcctcg

SEQ ID NO: 169961 - DNA, 20 bp, Artificial Sequence
  Synthetic oligonucleotide; GAG chr2 60551516 60551535 60551532 +
ggtgacctcctcgcggtccc

SEQ ID NO: 169962 - DNA, 20 bp, Artificial Sequence
  Synthetic oligonucleotide; TGG chr2 60551522 60551541 60551538 +
ctcctcgcggtcccgagctg

SEQ ID NO: 169963 - DNA, 20 bp, Artificial Sequence
  Synthetic oligonucleotide; AAG chr2 60551527 60551546 60551543 +
cgcggtcccgagctgtggac

SEQ ID NO: 169964 - DNA, 20 bp, Artificial Sequence
  Synthetic oligonucleotide; GAG chr2 60551529 60551548 60551545 +
cggtcccgagctgtggacaa

SEQ ID NO: 169965 - DNA, 20 bp, Artificial Sequence
  Synthetic oligonucleotide; GAG chr2 60551538 60551557 60551554 +
gctgtggacaagagacgtct

SEQ ID NO: 169966 - DNA, 20 bp, Artificial Sequence
  Synthetic oligonucleotide; AAG chr2 60551542 60551561 60551558 +
tggacaagagacgtctgaga

SEQ ID NO: 169967 - DNA, 20 bp, Artificial Sequence
  Synthetic oligonucleotide; CAG chr2 60551549 60551568 60551565 +
gagacgtctgagaaagtacc

SEQ ID NO: 169968 - DNA, 20 bp, Artificial Sequence
  Synthetic oligonucleotide; AGG chr2 60551550 60551569 60551566 +
agacgtctgagaaagtaccc

SEQ ID NO: 169969 - DNA, 20 bp, Artificial Sequence
  Synthetic oligonucleotide; GGG chr2 60551551 60551570 60551567 +
gacgtctgagaaagtaccca

SEQ ID NO: 169970 - DNA, 20 bp, Artificial Sequence
  Synthetic oligonucleotide; CGG chr2 60551554 60551573 60551570 +
gtctgagaaagtacccaggg

SEQ ID NO: 169971 - DNA, 20 bp, Artificial Sequence
  Synthetic oligonucleotide; GAG chr2 60551556 60551575 60551572 +
ctgagaaagtacccagggcg

SEQ ID NO: 169972 - DNA, 20 bp, Artificial Sequence
  Synthetic oligonucleotide; AGG chr2 60551557 60551576 60551573 +
tgagaaagtacccagggcgg

SEQ ID NO: 169973 - DNA, 20 bp, Artificial Sequence
  Synthetic oligonucleotide; GGG chr2 60551558 60551577 60551574 +
gagaaagtacccagggcgga

SEQ ID NO: 169974 - DNA, 20 bp, Artificial Sequence
  Synthetic oligonucleotide; GGG chr2 60551559 60551578 60551575 +
agaaagtacccagggcggag

SEQ ID NO: 169975 - DNA, 20 bp, Artificial Sequence
  Synthetic oligonucleotide; GAG chr2 60551561 60551580 60551577 +
aaagtacccagggcggaggg

SEQ ID NO: 169976 - DNA, 20 bp, Artificial Sequence
  Synthetic oligonucleotide; AGG chr2 60551562 60551581 60551578 +
aagtacccagggcggagggg

SEQ ID NO: 169977 - DNA, 20 bp, Artificial Sequence
  Synthetic oligonucleotide; GGG chr2 60551563 60551582 60551579 +
agtacccagggcggagggga

SEQ ID NO: 169978 - DNA, 20 bp, Artificial Sequence
  Synthetic oligonucleotide; GGG chr2 60551564 60551583 60551580 +
gtacccagggcggaggggag

SEQ ID NO: 169979 - DNA, 20 bp, Artificial Sequence
  Synthetic oligonucleotide; GAG chr2 60551566 60551585 60551582 +
acccagggcggaggggaggg

SEQ ID NO: 169980 - DNA, 20 bp, Artificial Sequence
  Synthetic oligonucleotide; AGG chr2 60551567 60551586 60551583 +
cccagggcggaggggagggg

SEQ ID NO: 169981 - DNA, 20 bp, Artificial Sequence
  Synthetic oligonucleotide; CAG chr2 60551572 60551591 60551588 +
ggcggaggggaggggaggcg

SEQ ID NO: 169982 - DNA, 20 bp, Artificial Sequence
  Synthetic oligonucleotide; CAG chr2 60551587 60551606 60551603 +
aggcgcagaacgcgctttta

SEQ ID NO: 169983 - DNA, 20 bp, Artificial Sequence
  Synthetic oligonucleotide; AAG chr2 60551618 60551637 60551634 +
caaaataaaaatgctttgca

SEQ ID NO: 169984 - DNA, 20 bp, Artificial Sequence
  Synthetic oligonucleotide; GAG chr2 60551623 60551642 60551639 +
taaaaatgctttgcaaagcc

SEQ ID NO: 169985 - DNA, 20 bp, Artificial Sequence
  Synthetic oligonucleotide; CAG chr2 60551633 60551652 60551649 +
ttgcaaagccgagtttcacc

SEQ ID NO: 169986 - DNA, 20 bp, Artificial Sequence
  Synthetic oligonucleotide; CAG chr2 60551645 60551664 60551661 +
gtttcacccagccgatttcg

SEQ ID NO: 169987 - DNA, 20 bp, Artificial Sequence
  Synthetic oligonucleotide; TGG chr2 60551650 60551669 60551666 +
acccagccgatttcgcagtc

SEQ ID NO: 169988 - DNA, 20 bp, Artificial Sequence
  Synthetic oligonucleotide; GGG chr2 60551651 60551670 60551667 +
cccagccgatttcgcagtct

SEQ ID NO: 169989 - DNA, 20 bp, Artificial Sequence
  Synthetic oligonucleotide; GAG chr2 60551653 60551672 60551669 +
cagccgatttcgcagtctgg

SEQ ID NO: 169990 - DNA, 20 bp, Artificial Sequence
  Synthetic oligonucleotide; AGG chr2 60551654 60551673 60551670 +
agccgatttcgcagtctggg

SEQ ID NO: 169991 - DNA, 20 bp, Artificial Sequence
  Synthetic oligonucleotide; GAG chr2 60551659 60551678 60551675 +
atttcgcagtctgggaggtc

SEQ ID NO: 169992 - DNA, 20 bp, Artificial Sequence
  Synthetic oligonucleotide; AAG chr2 60551662 60551681 60551678 +
tcgcagtctgggaggtcgag

SEQ ID NO: 169993 - DNA, 20 bp, Artificial Sequence
  Synthetic oligonucleotide; GAG chr2 60551664 60551683 60551680 +
gcagtctgggaggtcgagaa

SEQ ID NO: 169994 - DNA, 20 bp, Artificial Sequence
  Synthetic oligonucleotide; AGG chr2 60551665 60551684 60551681 +
cagtctgggaggtcgagaag

SEQ ID NO: 169995 - DNA, 20 bp, Artificial Sequence
  Synthetic oligonucleotide; CGG chr2 60551671 60551690 60551687 +
gggaggtcgagaagaggtct

SEQ ID NO: 169996 - DNA, 20 bp, Artificial Sequence
  Synthetic oligonucleotide; TGG chr2 60551682 60551701 60551698 +
aagaggtctcggcattgtgc

SEQ ID NO: 169997 - DNA, 20 bp, Artificial Sequence
  Synthetic oligonucleotide; GGG chr2 60551683 60551702 60551699 +
agaggtctcggcattgtgct

SEQ ID NO: 169998 - DNA, 20 bp, Artificial Sequence
  Synthetic oligonucleotide; GGG chr2 60551684 60551703 60551700 +
gaggtctcggcattgtgctg

SEQ ID NO: 169999 - DNA, 20 bp, Artificial Sequence
  Synthetic oligonucleotide; GGG chr2 60551685 60551704 60551701 +
aggtctcggcattgtgctgg

SEQ ID NO: 170000 - DNA, 20 bp, Artificial Sequence
  Synthetic oligonucleotide; CGG chr2 60551688 60551707 60551704 +
tctcggcattgtgctggggg

SEQ ID NO: 170001 - DNA, 20 bp, Artificial Sequence
  Synthetic oligonucleotide; CAG chr2 60551693 60551712 60551709 +
gcattgtgctgggggcggac

SEQ ID NO: 170002 - DNA, 20 bp, Artificial Sequence
  Synthetic oligonucleotide; AGG chr2 60551694 60551713 60551710 +
cattgtgctgggggcggacc

SEQ ID NO: 170003 - DNA, 20 bp, Artificial Sequence
  Synthetic oligonucleotide; CGG chr2 60551701 60551720 60551717 +
ctgggggcggaccaggacca

SEQ ID NO: 170004 - DNA, 20 bp, Artificial Sequence
  Synthetic oligonucleotide; GGG chr2 60551702 60551721 60551718 +
tgggggcggaccaggaccac

SEQ ID NO: 170005 - DNA, 20 bp, Artificial Sequence
  Synthetic oligonucleotide; CAG chr2 60551706 60551725 60551722 +
ggcggaccaggaccacgggc

SEQ ID NO: 170006 - DNA, 20 bp, Artificial Sequence
  Synthetic oligonucleotide; AGG chr2 60551707 60551726 60551723 +
gcggaccaggaccacgggcc

SEQ ID NO: 170007 - DNA, 20 bp, Artificial Sequence
  Synthetic oligonucleotide; TGG chr2 60551711 60551730 60551727 +
accaggaccacgggccaggc

SEQ ID NO: 170008 - DNA, 20 bp, Artificial Sequence
  Synthetic oligonucleotide; CGG chr2 60551716 60551735 60551732 +
gaccacgggccaggctggcg

SEQ ID NO: 170009 - DNA, 20 bp, Artificial Sequence
  Synthetic oligonucleotide; GAG chr2 60551718 60551737 60551734 +
ccacgggccaggctggcgcg

SEQ ID NO: 170010 - DNA, 20 bp, Artificial Sequence
  Synthetic oligonucleotide; TGG chr2 60551729 60551748 60551745 +
gctggcgcggagacactgcg

SEQ ID NO: 170011 - DNA, 20 bp, Artificial Sequence
  Synthetic oligonucleotide; TGG chr2 60551746 60551765 60551762 +
gcgtggcctgccgccgtgcc

SEQ ID NO: 170012 - DNA, 20 bp, Artificial Sequence
  Synthetic oligonucleotide; CGG chr2 60551749 60551768 60551765 +
tggcctgccgccgtgcctgg

SEQ ID NO: 170013 - DNA, 20 bp, Artificial Sequence
  Synthetic oligonucleotide; GGG chr2 60551750 60551769 60551766 +
ggcctgccgccgtgcctggc

SEQ ID NO: 170014 - DNA, 20 bp, Artificial Sequence
  Synthetic oligonucleotide; TGG chr2 60551753 60551772 60551769 +
ctgccgccgtgcctggcggg

SEQ ID NO: 170015 - DNA, 20 bp, Artificial Sequence
  Synthetic oligonucleotide; GGG chr2 60551754 60551773 60551770 +
tgccgccgtgcctggcgggt

SEQ ID NO: 170016 - DNA, 20 bp, Artificial Sequence
  Synthetic oligonucleotide; CGG chr2 60551760 60551779 60551776 +
cgtgcctggcgggtgggcgc

SEQ ID NO: 170017 - DNA, 20 bp, Artificial Sequence
  Synthetic oligonucleotide; GGG chr2 60551761 60551780 60551777 +
gtgcctggcgggtgggcgcc

SEQ ID NO: 170018 - DNA, 20 bp, Artificial Sequence
  Synthetic oligonucleotide; CGG chr2 60551767 60551786 60551783 +
ggcgggtgggcgccgggcgc

SEQ ID NO: 170019 - DNA, 20 bp, Artificial Sequence
  Synthetic oligonucleotide; GGG chr2 60551768 60551787 60551784 +
gcgggtgggcgccgggcgcc

SEQ ID NO: 170020 - DNA, 20 bp, Artificial Sequence
  Synthetic oligonucleotide; TGG chr2 60551771 60551790 60551787 +
ggtgggcgccgggcgccggg

SEQ ID NO: 170021 - DNA, 20 bp, Artificial Sequence
  Synthetic oligonucleotide; GGG chr2 60551772 60551791 60551788 +
gtgggcgccgggcgccgggt

SEQ ID NO: 170022 - DNA, 20 bp, Artificial Sequence
  Synthetic oligonucleotide; CGG chr2 60551780 60551799 60551796 +
cgggcgccgggtgggcgatc

SEQ ID NO: 170023 - DNA, 20 bp, Artificial Sequence
  Synthetic oligonucleotide; GGG chr2 60551781 60551800 60551797 +
gggcgccgggtgggcgatcc

SEQ ID NO: 170024 - DNA, 20 bp, Artificial Sequence
  Synthetic oligonucleotide; GGG chr2 60551782 60551801 60551798 +
ggcgccgggtgggcgatccg

SEQ ID NO: 170025 - DNA, 20 bp, Artificial Sequence
  Synthetic oligonucleotide; TGG chr2 60551786 60551805 60551802 +
ccgggtgggcgatccggggc

SEQ ID NO: 170026 - DNA, 20 bp, Artificial Sequence
  Synthetic oligonucleotide; GGG chr2 60551787 60551806 60551803 +
cgggtgggcgatccggggct

SEQ ID NO: 170027 - DNA, 20 bp, Artificial Sequence
  Synthetic oligonucleotide; TGG chr2 60551791 60551810 60551807 +
tgggcgatccggggctgggc

SEQ ID NO: 170028 - DNA, 20 bp, Artificial Sequence
  Synthetic oligonucleotide; GGG chr2 60551792 60551811 60551808 +
gggcgatccggggctgggct

SEQ ID NO: 170029 - DNA, 20 bp, Artificial Sequence
  Synthetic oligonucleotide; GGG chr2 60551793 60551812 60551809 +
ggcgatccggggctgggctg

SEQ ID NO: 170030 - DNA, 20 bp, Artificial Sequence
  Synthetic oligonucleotide; CGG chr2 60551798 60551817 60551814 +
tccggggctgggctggggcg

SEQ ID NO: 170031 - DNA, 20 bp, Artificial Sequence
  Synthetic oligonucleotide; GAG chr2 60551802 60551821 60551818 +
gggctgggctggggcgcggc

SEQ ID NO: 170032 - DNA, 20 bp, Artificial Sequence
  Synthetic oligonucleotide; AGG chr2 60551803 60551822 60551819 +
ggctgggctggggcgcggcg

SEQ ID NO: 170033 - DNA, 20 bp, Artificial Sequence
  Synthetic oligonucleotide; CGG chr2 60551807 60551826 60551823 +
gggctggggcgcggcgaggt

SEQ ID NO: 170034 - DNA, 20 bp, Artificial Sequence
  Synthetic oligonucleotide; GGG chr2 60551808 60551827 60551824 +
ggctggggcgcggcgaggtc

SEQ ID NO: 170035 - DNA, 20 bp, Artificial Sequence
  Synthetic oligonucleotide; AAG chr2 60551812 60551831 60551828 +
ggggcgcggcgaggtcgggc

SEQ ID NO: 170036 - DNA, 20 bp, Artificial Sequence
  Synthetic oligonucleotide; AGG chr2 60551813 60551832 60551829 +
gggcgcggcgaggtcgggca

SEQ ID NO: 170037 - DNA, 20 bp, Artificial Sequence
  Synthetic oligonucleotide; CGG chr2 60551818 60551837 60551834 +
cggcgaggtcgggcaaggcc

SEQ ID NO: 170038 - DNA, 20 bp, Artificial Sequence
  Synthetic oligonucleotide; GGG chr2 60551819 60551838 60551835 +
ggcgaggtcgggcaaggccc

SEQ ID NO: 170039 - DNA, 20 bp, Artificial Sequence
  Synthetic oligonucleotide; GAG chr2 60551823 60551842 60551839 +
aggtcgggcaaggcccgggc

SEQ ID NO: 170040 - DNA, 20 bp, Artificial Sequence
  Synthetic oligonucleotide; AGG chr2 60551824 60551843 60551840 +
ggtcgggcaaggcccgggcg

SEQ ID NO: 170041 - DNA, 20 bp, Artificial Sequence
  Synthetic oligonucleotide; CAG chr2 60551828 60551847 60551844 +
gggcaaggcccgggcgaggc

SEQ ID NO: 170042 - DNA, 20 bp, Artificial Sequence
  Synthetic oligonucleotide; AGG chr2 60551829 60551848 60551845 +
ggcaaggcccgggcgaggcc

SEQ ID NO: 170043 - DNA, 20 bp, Artificial Sequence
  Synthetic oligonucleotide; CGG chr2 60551851 60551870 60551867 +
gccgccgccgccgcctgctc

SEQ ID NO: 170044 - DNA, 20 bp, Artificial Sequence
  Synthetic oligonucleotide; GGG chr2 60551852 60551871 60551868 +
ccgccgccgccgcctgctcc

SEQ ID NO: 170045 - DNA, 20 bp, Artificial Sequence
  Synthetic oligonucleotide; GGG chr2 60551853 60551872 60551869 +
cgccgccgccgcctgctccg

SEQ ID NO: 170046 - DNA, 20 bp, Artificial Sequence
  Synthetic oligonucleotide; CGG chr2 60551871 60551890 60551887 +
cggggctgccgcgccgcgct

SEQ ID NO: 170047 - DNA, 20 bp, Artificial Sequence
  Synthetic oligonucleotide; TGG chr2 60551890 60551909 60551906 +
tcggtcctctgtctgtttgt

SEQ ID NO: 170048 - DNA, 20 bp, Artificial Sequence
  Synthetic oligonucleotide; CAG chr2 60551893 60551912 60551909 +
gtcctctgtctgtttgttgg

SEQ ID NO: 170049 - DNA, 20 bp, Artificial Sequence
  Synthetic oligonucleotide; AGG chr2 60551894 60551913 60551910 +
tcctctgtctgtttgttggc

SEQ ID NO: 170050 - DNA, 20 bp, Artificial Sequence
  Synthetic oligonucleotide; GAG chr2 60551896 60551915 60551912 +
ctctgtctgtttgttggcag

SEQ ID NO: 170051 - DNA, 20 bp, Artificial Sequence
  Synthetic oligonucleotide; AGG chr2 60551897 60551916 60551913 +
tctgtctgtttgttggcagg

SEQ ID NO: 170052 - DNA, 20 bp, Artificial Sequence
  Synthetic oligonucleotide; CGG chr2 60551912 60551931 60551928 +
gcaggaggctcccgcacacg

SEQ ID NO: 170053 - DNA, 20 bp, Artificial Sequence
  Synthetic oligonucleotide; CAG chr2 60551929 60551948 60551945 +
acgcggtgcttgtaaacatt

SEQ ID NO: 170054 - DNA, 20 bp, Artificial Sequence
  Synthetic oligonucleotide; GAG chr2 60551936 60551955 60551952 +
gcttgtaaacattcagacac

SEQ ID NO: 170055 - DNA, 20 bp, Artificial Sequence
  Synthetic oligonucleotide; TAG chr2 60551991 60552010 60552007 +
tttgaaaatcttccaaaaaa

SEQ ID NO: 170056 - DNA, 20 bp, Artificial Sequence
  Synthetic oligonucleotide; AAG chr2 60551995 60552014 60552011 +
aaaatcttccaaaaaatagt

SEQ ID NO: 170057 - DNA, 20 bp, Artificial Sequence
  Synthetic oligonucleotide; GAG chr2 60551997 60552016 60552013 +
aatcttccaaaaaatagtaa

SEQ ID NO: 170058 - DNA, 20 bp, Artificial Sequence
  Synthetic oligonucleotide; AGG chr2 60551998 60552017 60552014 +
atcttccaaaaaatagtaag

SEQ ID NO: 170059 - DNA, 20 bp, Artificial Sequence
  Synthetic oligonucleotide; GAG chr2 60552000 60552019 60552016 +
cttccaaaaaatagtaagag

SEQ ID NO: 170060 - DNA, 20 bp, Artificial Sequence
  Synthetic oligonucleotide; AGG chr2 60552001 60552020 60552017 +
ttccaaaaaatagtaagagg

SEQ ID NO: 170061 - DNA, 20 bp, Artificial Sequence
  Synthetic oligonucleotide; GGG chr2 60552002 60552021 60552018 +
tccaaaaaatagtaagagga

SEQ ID NO: 170062 - DNA, 20 bp, Artificial Sequence
  Synthetic oligonucleotide; GAG chr2 60552004 60552023 60552020 +
caaaaaatagtaagaggagg

SEQ ID NO: 170063 - DNA, 20 bp, Artificial Sequence
  Synthetic oligonucleotide; CGG chr2 60552031 60552050 60552047 +
tctctccctctccgtgccgt

SEQ ID NO: 170064 - DNA, 20 bp, Artificial Sequence
  Synthetic oligonucleotide; AAG chr2 60552040 60552059 60552056 +
ctccgtgccgtcggcgccct

SEQ ID NO: 170065 - DNA, 20 bp, Artificial Sequence
  Synthetic oligonucleotide; AAG chr2 60552053 60552072 60552069 +
gcgccctaagtttgcaactg

SEQ ID NO: 170066 - DNA, 20 bp, Artificial Sequence
  Synthetic oligonucleotide; AGG chr2 60552054 60552073 60552070 +
cgccctaagtttgcaactga

SEQ ID NO: 170067 - DNA, 20 bp, Artificial Sequence
  Synthetic oligonucleotide; GGG chr2 60552055 60552074 60552071 +
gccctaagtttgcaactgaa

SEQ ID NO: 170068 - DNA, 20 bp, Artificial Sequence
  Synthetic oligonucleotide; GGG chr2 60552056 60552075 60552072 +
ccctaagtttgcaactgaag

SEQ ID NO: 170069 - DNA, 20 bp, Artificial Sequence
  Synthetic oligonucleotide; TGG chr2 60552061 60552080 60552077 +
agtttgcaactgaaggggtt

SEQ ID NO: 170070 - DNA, 20 bp, Artificial Sequence
  Synthetic oligonucleotide; GGG chr2 60552062 60552081 60552078 +
gtttgcaactgaaggggttt

SEQ ID NO: 170071 - DNA, 20 bp, Artificial Sequence
  Synthetic oligonucleotide; GGG chr2 60552063 60552082 60552079 +
tttgcaactgaaggggtttg

SEQ ID NO: 170072 - DNA, 20 bp, Artificial Sequence
  Synthetic oligonucleotide; GGG chr2 60552064 60552083 60552080 +
ttgcaactgaaggggtttgg

SEQ ID NO: 170073 - DNA, 20 bp, Artificial Sequence
  Synthetic oligonucleotide; AAG chr2 60552067 60552086 60552083 +
caactgaaggggtttggggg

SEQ ID NO: 170074 - DNA, 20 bp, Artificial Sequence
  Synthetic oligonucleotide; GAG chr2 60552069 60552088 60552085 +
actgaaggggtttgggggaa

SEQ ID NO: 170075 - DNA, 20 bp, Artificial Sequence
  Synthetic oligonucleotide; AGG chr2 60552070 60552089 60552086 +
ctgaaggggtttgggggaag

SEQ ID NO: 170076 - DNA, 20 bp, Artificial Sequence
  Synthetic oligonucleotide; GGG chr2 60552071 60552090 60552087 +
tgaaggggtttgggggaaga

SEQ ID NO: 170077 - DNA, 20 bp, Artificial Sequence
  Synthetic oligonucleotide; TAG chr2 60552092 60552111 60552108 +
ggtgattgtaaatttttttc

SEQ ID NO: 170078 - DNA, 20 bp, Artificial Sequence
  Synthetic oligonucleotide; GAG chr2 60552097 60552116 60552113 +
ttgtaaatttttttctagat

SEQ ID NO: 170079 - DNA, 20 bp, Artificial Sequence
  Synthetic oligonucleotide; GAG chr2 60552099 60552118 60552115 +
gtaaatttttttctagatga

SEQ ID NO: 170080 - DNA, 20 bp, Artificial Sequence
  Synthetic oligonucleotide; GAG chr2 60552107 60552126 60552123 +
ttttctagatgagagattgt

SEQ ID NO: 170081 - DNA, 20 bp, Artificial Sequence
  Synthetic oligonucleotide; CAG chr2 60552117 60552136 60552133 +
gagagattgtgagatttttg

SEQ ID NO: 170082 - DNA, 20 bp, Artificial Sequence
  Synthetic oligonucleotide; AGG chr2 60552118 60552137 60552134 +
agagattgtgagatttttgc

SEQ ID NO: 170083 - DNA, 20 bp, Artificial Sequence
  Synthetic oligonucleotide; GGG chr2 60552119 60552138 60552135 +
gagattgtgagatttttgca

SEQ ID NO: 170084 - DNA, 20 bp, Artificial Sequence
  Synthetic oligonucleotide; GGG chr2 60552120 60552139 60552136 +
agattgtgagatttttgcag

SEQ ID NO: 170085 - DNA, 20 bp, Artificial Sequence
  Synthetic oligonucleotide; GGG chr2 60552121 60552140 60552137 +
gattgtgagatttttgcagg

SEQ ID NO: 170086 - DNA, 20 bp, Artificial Sequence
  Synthetic oligonucleotide; GGG chr2 60552122 60552141 60552138 +
attgtgagatttttgcaggg

SEQ ID NO: 170087 - DNA, 20 bp, Artificial Sequence
  Synthetic oligonucleotide; TGG chr2 60552126 60552145 60552142 +
tgagatttttgcaggggggc

SEQ ID NO: 170088 - DNA, 20 bp, Artificial Sequence
  Synthetic oligonucleotide; TGG chr2 60552129 60552148 60552145 +
gatttttgcaggggggctgg

SEQ ID NO: 170089 - DNA, 20 bp, Artificial Sequence
  Synthetic oligonucleotide; GGG chr2 60552130 60552149 60552146 +
atttttgcaggggggctggt

SEQ ID NO: 170090 - DNA, 20 bp, Artificial Sequence
  Synthetic oligonucleotide; GGG chr2 60552131 60552150 60552147 +
tttttgcaggggggctggtg

SEQ ID NO: 170091 - DNA, 20 bp, Artificial Sequence
  Synthetic oligonucleotide; GGG chr2 60552132 60552151 60552148 +
ttttgcaggggggctggtgg

SEQ ID NO: 170092 - DNA, 20 bp, Artificial Sequence
  Synthetic oligonucleotide; GAG chr2 60552134 60552153 60552150 +
ttgcaggggggctggtgggg

SEQ ID NO: 170093 - DNA, 20 bp, Artificial Sequence
  Synthetic oligonucleotide; AAG chr2 60552140 60552159 60552156 +
gggggctggtgggggagtca

SEQ ID NO: 170094 - DNA, 20 bp, Artificial Sequence
  Synthetic oligonucleotide; GAG chr2 60552142 60552161 60552158 +
gggctggtgggggagtcaaa

SEQ ID NO: 170095 - DNA, 20 bp, Artificial Sequence
  Synthetic oligonucleotide; AAG chr2 60552145 60552164 60552161 +
ctggtgggggagtcaaagag

SEQ ID NO: 170096 - DNA, 20 bp, Artificial Sequence
  Synthetic oligonucleotide; AGG chr2 60552146 60552165 60552162 +
tggtgggggagtcaaagaga

SEQ ID NO: 170097 - DNA, 20 bp, Artificial Sequence
  Synthetic oligonucleotide; CAG chr2 60552155 60552174 60552171 +
agtcaaagagaaggccgtca

SEQ ID NO: 170098 - DNA, 20 bp, Artificial Sequence
  Synthetic oligonucleotide; AAG chr2 60552160 60552179 60552176 +
aagagaaggccgtcacagaa

SEQ ID NO: 170099 - DNA, 20 bp, Artificial Sequence
  Synthetic oligonucleotide; AGG chr2 60552161 60552180 60552177 +
agagaaggccgtcacagaaa

SEQ ID NO: 170100 - DNA, 20 bp, Artificial Sequence
  Synthetic oligonucleotide; GGG chr2 60552162 60552181 60552178 +
gagaaggccgtcacagaaaa

SEQ ID NO: 170101 - DNA, 20 bp, Artificial Sequence
  Synthetic oligonucleotide; TGG chr2 60552166 60552185 60552182 +
aggccgtcacagaaaagggt

SEQ ID NO: 170102 - DNA, 20 bp, Artificial Sequence
  Synthetic oligonucleotide; CAG chr2 60552169 60552188 60552185 +
ccgtcacagaaaagggttgg

SEQ ID NO: 170103 - DNA, 20 bp, Artificial Sequence
  Synthetic oligonucleotide; GAG chr2 60552171 60552190 60552187 +
gtcacagaaaagggttggca

SEQ ID NO: 170104 - DNA, 20 bp, Artificial Sequence
  Synthetic oligonucleotide; TGG chr2 60552178 60552197 60552194 +
aaaagggttggcagagcgtt

SEQ ID NO: 170105 - DNA, 20 bp, Artificial Sequence
  Synthetic oligonucleotide; CGG chr2 60552184 60552203 60552200 +
gttggcagagcgtttggctt

SEQ ID NO: 170106 - DNA, 20 bp, Artificial Sequence
  Synthetic oligonucleotide; TGG chr2 60552189 60552208 60552205 +
cagagcgtttggcttcggtt

SEQ ID NO: 170107 - DNA, 20 bp, Artificial Sequence
  Synthetic oligonucleotide; GGG chr2 60552190 60552209 60552206 +
agagcgtttggcttcggttt

SEQ ID NO: 170108 - DNA, 20 bp, Artificial Sequence
  Synthetic oligonucleotide; GGG chr2 60552191 60552210 60552207 +
gagcgtttggcttcggtttg

SEQ ID NO: 170109 - DNA, 20 bp, Artificial Sequence
  Synthetic oligonucleotide; GGG chr2 60552192 60552211 60552208 +
agcgtttggcttcggtttgg

SEQ ID NO: 170110 - DNA, 20 bp, Artificial Sequence
  Synthetic oligonucleotide; AAG chr2 60552196 60552215 60552212 +
tttggcttcggtttgggggc

SEQ ID NO: 170111 - DNA, 20 bp, Artificial Sequence
  Synthetic oligonucleotide; CAG chr2 60552263 60552282 60552279 +
gtatttatttatttatgtgc

SEQ ID NO: 170112 - DNA, 20 bp, Artificial Sequence
  Synthetic oligonucleotide; GAG chr2 60552285 60552304 60552301 +
gtcttctccttgctgcctct

SEQ ID NO: 170113 - DNA, 20 bp, Artificial Sequence
  Synthetic oligonucleotide; AGG chr2 60552286 60552305 60552302 +
tcttctccttgctgcctctg

SEQ ID NO: 170114 - DNA, 20 bp, Artificial Sequence
  Synthetic oligonucleotide; CGG chr2 60552291 60552310 60552307 +
tccttgctgcctctgaggtt

SEQ ID NO: 170115 - DNA, 20 bp, Artificial Sequence
  Synthetic oligonucleotide; CGG chr2 60552295 60552314 60552311 +
tgctgcctctgaggttcggt

SEQ ID NO: 170116 - DNA, 20 bp, Artificial Sequence
  Synthetic oligonucleotide; GGG chr2 60552296 60552315 60552312 +
gctgcctctgaggttcggtc

SEQ ID NO: 170117 - DNA, 20 bp, Artificial Sequence
  Synthetic oligonucleotide; GAG chr2 60552298 60552317 60552314 +
tgcctctgaggttcggtcgg

SEQ ID NO: 170118 - DNA, 20 bp, Artificial Sequence
  Synthetic oligonucleotide; AGG chr2 60552299 60552318 60552315 +
gcctctgaggttcggtcggg

SEQ ID NO: 170119 - DNA, 20 bp, Artificial Sequence
  Synthetic oligonucleotide; GGG chr2 60552300 60552319 60552316 +
cctctgaggttcggtcggga

SEQ ID NO: 170120 - DNA, 20 bp, Artificial Sequence
  Synthetic oligonucleotide; GGG chr2 60552301 60552320 60552317 +
ctctgaggttcggtcgggag

SEQ ID NO: 170121 - DNA, 20 bp, Artificial Sequence
  Synthetic oligonucleotide; GAG chr2 60552303 60552322 60552319 +
ctgaggttcggtcgggaggg

SEQ ID NO: 170122 - DNA, 20 bp, Artificial Sequence
  Synthetic oligonucleotide; AGG chr2 60552304 60552323 60552320 +
tgaggttcggtcgggagggg

SEQ ID NO: 170123 - DNA, 20 bp, Artificial Sequence
  Synthetic oligonucleotide; GGG chr2 60552305 60552324 60552321 +
gaggttcggtcgggagggga

SEQ ID NO: 170124 - DNA, 20 bp, Artificial Sequence
  Synthetic oligonucleotide; CAG chr2 60552308 60552327 60552324 +
gttcggtcgggaggggaggg

SEQ ID NO: 170125 - DNA, 20 bp, Artificial Sequence
  Synthetic oligonucleotide; CGG chr2 60552311 60552330 60552327 +
cggtcgggaggggagggcag

SEQ ID NO: 170126 - DNA, 20 bp, Artificial Sequence
  Synthetic oligonucleotide; CAG chr2 60552319 60552338 60552335 +
aggggagggcagcggcaacc

SEQ ID NO: 170127 - DNA, 20 bp, Artificial Sequence
  Synthetic oligonucleotide; AGG chr2 60552320 60552339 60552336 +
ggggagggcagcggcaaccc

SEQ ID NO: 170128 - DNA, 20 bp, Artificial Sequence
  Synthetic oligonucleotide; GAG chr2 60552322 60552341 60552338 +
ggagggcagcggcaacccag

SEQ ID NO: 170129 - DNA, 20 bp, Artificial Sequence
  Synthetic oligonucleotide; AGG chr2 60552323 60552342 60552339 +
gagggcagcggcaacccagg

SEQ ID NO: 170130 - DNA, 20 bp, Artificial Sequence
  Synthetic oligonucleotide; CAG chr2 60552326 60552345 60552342 +
ggcagcggcaacccaggagg

SEQ ID NO: 170131 - DNA, 20 bp, Artificial Sequence
  Synthetic oligonucleotide; CAG chr2 60552329 60552348 60552345 +
agcggcaacccaggaggcag

SEQ ID NO: 170132 - DNA, 20 bp, Artificial Sequence
  Synthetic oligonucleotide; CGG chr2 60552334 60552353 60552350 +
caacccaggaggcagcagtc

SEQ ID NO: 170133 - DNA, 20 bp, Artificial Sequence
  Synthetic oligonucleotide; GGG chr2 60552335 60552354 60552351 +
aacccaggaggcagcagtcc

SEQ ID NO: 170134 - DNA, 20 bp, Artificial Sequence
  Synthetic oligonucleotide; CGG chr2 60552366 60552385 60552382 +
ctccctctcccgcgtgcccc

SEQ ID NO: 170135 - DNA, 20 bp, Artificial Sequence
  Synthetic oligonucleotide; CGG chr2 60552382 60552401 60552398 +
cccccggccgcctcctcccc

SEQ ID NO: 170136 - DNA, 20 bp, Artificial Sequence
  Synthetic oligonucleotide; TAG chr2 60552388 60552407 60552404 +
gccgcctcctcccccggccc

SEQ ID NO: 170137 - DNA, 20 bp, Artificial Sequence
  Synthetic oligonucleotide; CGG chr2 60552402 60552421 60552418 +
cggccctagctcctgccctt

SEQ ID NO: 170138 - DNA, 20 bp, Artificial Sequence
  Synthetic oligonucleotide; CGG chr2 60552405 60552424 60552421 +
ccctagctcctgcccttcgg

SEQ ID NO: 170139 - DNA, 20 bp, Artificial Sequence
  Synthetic oligonucleotide; CGG chr2 60552408 60552427 60552424 +
tagctcctgcccttcggcgg

SEQ ID NO: 170140 - DNA, 20 bp, Artificial Sequence
  Synthetic oligonucleotide; CGG chr2 60552411 60552430 60552427 +
ctcctgcccttcggcggcgg

SEQ ID NO: 170141 - DNA, 20 bp, Artificial Sequence
  Synthetic oligonucleotide; CGG chr2 60552414 60552433 60552430 +
ctgcccttcggcggcggcgg

SEQ ID NO: 170142 - DNA, 20 bp, Artificial Sequence
  Synthetic oligonucleotide; CGG chr2 60552417 60552436 60552433 +
cccttcggcggcggcggcgg

SEQ ID NO: 170143 - DNA, 20 bp, Artificial Sequence
  Synthetic oligonucleotide; CGG chr2 60552420 60552439 60552436 +
ttcggcggcggcggcggcgg

SEQ ID NO: 170144 - DNA, 20 bp, Artificial Sequence
  Synthetic oligonucleotide; CGG chr2 60552425 60552444 60552441 +
cggcggcggcggcggcggcg

SEQ ID NO: 170145 - DNA, 20 bp, Artificial Sequence
  Synthetic oligonucleotide; GGG chr2 60552426 60552445 60552442 +
ggcggcggcggcggcggcgc

SEQ ID NO: 170146 - DNA, 20 bp, Artificial Sequence
  Synthetic oligonucleotide; GAG chr2 60552428 60552447 60552444 +
cggcggcggcggcggcgcgg

SEQ ID NO: 170147 - DNA, 20 bp, Artificial Sequence
  Synthetic oligonucleotide; AGG chr2 60552429 60552448 60552445 +
ggcggcggcggcggcgcggg

SEQ ID NO: 170148 - DNA, 20 bp, Artificial Sequence
  Synthetic oligonucleotide; GGG chr2 60552430 60552449 60552446 +
gcggcggcggcggcgcggga

SEQ ID NO: 170149 - DNA, 20 bp, Artificial Sequence
  Synthetic oligonucleotide; AAG chr2 60552434 60552453 60552450 +
cggcggcggcgcgggagggc

SEQ ID NO: 170150 - DNA, 20 bp, Artificial Sequence
  Synthetic oligonucleotide; GAG chr2 60552440 60552459 60552456 +
cggcgcgggagggcaagcgc

SEQ ID NO: 170151 - DNA, 20 bp, Artificial Sequence
  Synthetic oligonucleotide; AGG chr2 60552441 60552460 60552457 +
ggcgcgggagggcaagcgcg

SEQ ID NO: 170152 - DNA, 20 bp, Artificial Sequence
  Synthetic oligonucleotide; GAG chr2 60552443 60552462 60552459 +
cgcgggagggcaagcgcgag

SEQ ID NO: 170153 - DNA, 20 bp, Artificial Sequence
  Synthetic oligonucleotide; CGG chr2 60552447 60552466 60552463 +
ggagggcaagcgcgaggagc

SEQ ID NO: 170154 - DNA, 20 bp, Artificial Sequence
  Synthetic oligonucleotide; AAG chr2 60552455 60552474 60552471 +
agcgcgaggagccggcacaa

SEQ ID NO: 170155 - DNA, 20 bp, Artificial Sequence
  Synthetic oligonucleotide; AGG chr2 60552456 60552475 60552472 +
gcgcgaggagccggcacaaa

SEQ ID NO: 170156 - DNA, 20 bp, Artificial Sequence
  Synthetic oligonucleotide; CAG chr2 60552459 60552478 60552475 +
cgaggagccggcacaaaagg

SEQ ID NO: 170157 - DNA, 20 bp, Artificial Sequence
  Synthetic oligonucleotide; CGG chr2 60552462 60552481 60552478 +
ggagccggcacaaaaggcag

SEQ ID NO: 170158 - DNA, 20 bp, Artificial Sequence
  Synthetic oligonucleotide; GGG chr2 60552463 60552482 60552479 +
gagccggcacaaaaggcagc

SEQ ID NO: 170159 - DNA, 20 bp, Artificial Sequence
  Synthetic oligonucleotide; TGG chr2 60552481 60552500 60552497 +
gcgggacaaacacccacctc

SEQ ID NO: 170160 - DNA, 20 bp, Artificial Sequence
  Synthetic oligonucleotide; CGG chr2 60552485 60552504 60552501 +
gacaaacacccacctctggc

SEQ ID NO: 170161 - DNA, 20 bp, Artificial Sequence
  Synthetic oligonucleotide; AAG chr2 60552493 60552512 60552509 +
cccacctctggccggaacaa

SEQ ID NO: 170162 - DNA, 20 bp, Artificial Sequence
  Synthetic oligonucleotide; AGG chr2 60552494 60552513 60552510 +
ccacctctggccggaacaaa

SEQ ID NO: 170163 - DNA, 20 bp, Artificial Sequence
  Synthetic oligonucleotide; CGG chr2 60552497 60552516 60552513 +
cctctggccggaacaaaagg

SEQ ID NO: 170164 - DNA, 20 bp, Artificial Sequence
  Synthetic oligonucleotide; CAG chr2 60552500 60552519 60552516 +
ctggccggaacaaaaggcgg

SEQ ID NO: 170165 - DNA, 20 bp, Artificial Sequence
  Synthetic oligonucleotide; CGG chr2 60552506 60552525 60552522 +
ggaacaaaaggcggcagtgc

SEQ ID NO: 170166 - DNA, 20 bp, Artificial Sequence
  Synthetic oligonucleotide; CGG chr2 60552528 60552547 60552544 +
gccgcgtctcccgtccttcc

SEQ ID NO: 170167 - DNA, 20 bp, Artificial Sequence
  Synthetic oligonucleotide; CGG chr2 60552536 60552555 60552552 +
tcccgtccttcccggtccca

SEQ ID NO: 170168 - DNA, 20 bp, Artificial Sequence
  Synthetic oligonucleotide; CGG chr2 60552554 60552573 60552570 +
cacggctctccccgtcgccg

SEQ ID NO: 170169 - DNA, 20 bp, Artificial Sequence
  Synthetic oligonucleotide; CGG chr2 60552574 60552593 60552590 +
cggcccctctcccgactccg

SEQ ID NO: 170170 - DNA, 20 bp, Artificial Sequence
  Synthetic oligonucleotide; CAG chr2 60552580 60552599 60552596 +
ctctcccgactccgcggact

SEQ ID NO: 170171 - DNA, 20 bp, Artificial Sequence
  Synthetic oligonucleotide; AGG chr2 60552581 60552600 60552597 +
tctcccgactccgcggactc

SEQ ID NO: 170172 - DNA, 20 bp, Artificial Sequence
  Synthetic oligonucleotide; GAG chr2 60552583 60552602 60552599 +
tcccgactccgcggactcag

SEQ ID NO: 170173 - DNA, 20 bp, Artificial Sequence
  Synthetic oligonucleotide; CGG chr2 60552589 60552608 60552605 +
ctccgcggactcaggagcgc

SEQ ID NO: 170174 - DNA, 20 bp, Artificial Sequence
  Synthetic oligonucleotide; GGG chr2 60552590 60552609 60552606 +
tccgcggactcaggagcgcc

SEQ ID NO: 170175 - DNA, 20 bp, Artificial Sequence
  Synthetic oligonucleotide; GGG chr2 60552591 60552610 60552607 +
ccgcggactcaggagcgccg

SEQ ID NO: 170176 - DNA, 20 bp, Artificial Sequence
  Synthetic oligonucleotide; GGG chr2 60552592 60552611 60552608 +
cgcggactcaggagcgccgg

SEQ ID NO: 170177 - DNA, 20 bp, Artificial Sequence
  Synthetic oligonucleotide; CAG chr2 60552605 60552624 60552621 +
gcgccgggggcccctttcca

SEQ ID NO: 170178 - DNA, 20 bp, Artificial Sequence
  Synthetic oligonucleotide; TGG chr2 60552627 60552646 60552643 +
gtgccactttctcactattg

SEQ ID NO: 170179 - DNA, 20 bp, Artificial Sequence
  Synthetic oligonucleotide; GGG chr2 60552628 60552647 60552644 +
tgccactttctcactattgt

SEQ ID NO: 170180 - DNA, 20 bp, Artificial Sequence
  Synthetic oligonucleotide; GGG chr2 60552629 60552648 60552645 +
gccactttctcactattgtg

SEQ ID NO: 170181 - DNA, 20 bp, Artificial Sequence
  Synthetic oligonucleotide; GAG chr2 60552666 60552685 60552682 +
cccgctgcacacttgaccgt

SEQ ID NO: 170182 - DNA, 20 bp, Artificial Sequence
  Synthetic oligonucleotide; TGG chr2 60552674 60552693 60552690 +
acacttgaccgtgagcgcgc

SEQ ID NO: 170183 - DNA, 20 bp, Artificial Sequence
  Synthetic oligonucleotide; AAG chr2 60552684 60552703 60552700 +
gtgagcgcgctggtgtccaa

SEQ ID NO: 170184 - DNA, 20 bp, Artificial Sequence
  Synthetic oligonucleotide; CAG chr2 60552688 60552707 60552704 +
gcgcgctggtgtccaaaagc

SEQ ID NO: 170185 - DNA, 20 bp, Artificial Sequence
  Synthetic oligonucleotide; CGG chr2 60552709 60552728 60552725 +
agtctcacctcttttctccc

SEQ ID NO: 170186 - DNA, 20 bp, Artificial Sequence
  Synthetic oligonucleotide; GGG chr2 60552710 60552729 60552726 +
gtctcacctcttttctcccc

SEQ ID NO: 170187 - DNA, 20 bp, Artificial Sequence
  Synthetic oligonucleotide; TAG chr2 60552723 60552742 60552739 +
tctccccgggaatcgttttt

SEQ ID NO: 170188 - DNA, 20 bp, Artificial Sequence
  Synthetic oligonucleotide; CGG chr2 60552764 60552783 60552780 +
cctacccccccattttctta

SEQ ID NO: 170189 - DNA, 20 bp, Artificial Sequence
  Synthetic oligonucleotide; GAG chr2 60552768 60552787 60552784 +
cccccccattttcttacggt

SEQ ID NO: 170190 - DNA, 20 bp, Artificial Sequence
  Synthetic oligonucleotide; TGG chr2 60552771 60552790 60552787 +
ccccattttcttacggtgag

SEQ ID NO: 170191 - DNA, 20 bp, Artificial Sequence
  Synthetic oligonucleotide; GGG chr2 60552772 60552791 60552788 +
cccattttcttacggtgagt

SEQ ID NO: 170192 - DNA, 20 bp, Artificial Sequence
  Synthetic oligonucleotide; AAG chr2 60552775 60552794 60552791 +
attttcttacggtgagtggg

SEQ ID NO: 170193 - DNA, 20 bp, Artificial Sequence
  Synthetic oligonucleotide; CAG chr2 60552796 60552815 60552812 +
agcaacctccctttccccac

SEQ ID NO: 170194 - DNA, 20 bp, Artificial Sequence
  Synthetic oligonucleotide; CAG chr2 60552809 60552828 60552825 +
tccccaccagctcccacccc

SEQ ID NO: 170195 - DNA, 20 bp, Artificial Sequence
  Synthetic oligonucleotide; AGG chr2 60552810 60552829 60552826 +
ccccaccagctcccaccccc

SEQ ID NO: 170196 - DNA, 20 bp, Artificial Sequence
  Synthetic oligonucleotide; GAG chr2 60552822 60552841 60552838 +
ccacccccaggtttgcatgt

SEQ ID NO: 170197 - DNA, 20 bp, Artificial Sequence
  Synthetic oligonucleotide; TAG chr2 60552838 60552857 60552854 +
atgtgagttgttcgcaacct

SEQ ID NO: 170198 - DNA, 20 bp, Artificial Sequence
  Synthetic oligonucleotide; TGG chr2 60552864 60552883 60552880 +
tgttcattattttgcaaaac

SEQ ID NO: 170199 - DNA, 20 bp, Artificial Sequence
  Synthetic oligonucleotide; CGG chr2 60552867 60552886 60552883 +
tcattattttgcaaaactgg

SEQ ID NO: 170200 - DNA, 20 bp, Artificial Sequence
  Synthetic oligonucleotide; GGG chr2 60552868 60552887 60552884 +
cattattttgcaaaactggc

SEQ ID NO: 170201 - DNA, 20 bp, Artificial Sequence
  Synthetic oligonucleotide; GGG chr2 60552869 60552888 60552885 +
attattttgcaaaactggcg

SEQ ID NO: 170202 - DNA, 20 bp, Artificial Sequence
  Synthetic oligonucleotide; CGG chr2 60552872 60552891 60552888 +
attttgcaaaactggcgggg

SEQ ID NO: 170203 - DNA, 20 bp, Artificial Sequence
  Synthetic oligonucleotide; GGG chr2 60552873 60552892 60552889 +
ttttgcaaaactggcggggc

SEQ ID NO: 170204 - DNA, 20 bp, Artificial Sequence
  Synthetic oligonucleotide; GGG chr2 60552874 60552893 60552890 +
tttgcaaaactggcggggcg

SEQ ID NO: 170205 - DNA, 20 bp, Artificial Sequence
  Synthetic oligonucleotide; GGG chr2 60552875 60552894 60552891 +
ttgcaaaactggcggggcgg

SEQ ID NO: 170206 - DNA, 20 bp, Artificial Sequence
  Synthetic oligonucleotide; GGG chr2 60552876 60552895 60552892 +
tgcaaaactggcggggcggg

SEQ ID NO: 170207 - DNA, 20 bp, Artificial Sequence
  Synthetic oligonucleotide; GGG chr2 60552877 60552896 60552893 +
gcaaaactggcggggcgggg

SEQ ID NO: 170208 - DNA, 20 bp, Artificial Sequence
  Synthetic oligonucleotide; GGG chr2 60552878 60552897 60552894 +
caaaactggcggggcggggg

SEQ ID NO: 170209 - DNA, 20 bp, Artificial Sequence
  Synthetic oligonucleotide; GAG chr2 60552880 60552899 60552896 +
aaactggcggggcggggggg

SEQ ID NO: 170210 - DNA, 20 bp, Artificial Sequence
  Synthetic oligonucleotide; TGG chr2 60552883 60552902 60552899 +
ctggcggggcggggggggag

SEQ ID NO: 170211 - DNA, 20 bp, Artificial Sequence
  Synthetic oligonucleotide; AAG chr2 60552908 60552927 60552924 +
tcattgcattccttttcgaa

SEQ ID NO: 170212 - DNA, 20 bp, Artificial Sequence
  Synthetic oligonucleotide; GAG chr2 60552910 60552929 60552926 +
attgcattccttttcgaaaa

SEQ ID NO: 170213 - DNA, 20 bp, Artificial Sequence
  Synthetic oligonucleotide; AAG chr2 60552918 60552937 60552934 +
ccttttcgaaaagagaaata

SEQ ID NO: 170214 - DNA, 20 bp, Artificial Sequence
  Synthetic oligonucleotide; CGG chr2 60552921 60552940 60552937 +
tttcgaaaagagaaataaag

SEQ ID NO: 170215 - DNA, 20 bp, Artificial Sequence
  Synthetic oligonucleotide; CGG chr2 60552924 60552943 60552940 +
cgaaaagagaaataaagcgg

SEQ ID NO: 170216 - DNA, 20 bp, Artificial Sequence
  Synthetic oligonucleotide; AAG chr2 60552928 60552947 60552944 +
aagagaaataaagcggcgga

SEQ ID NO: 170217 - DNA, 20 bp, Artificial Sequence
  Synthetic oligonucleotide; AGG chr2 60552929 60552948 60552945 +
agagaaataaagcggcggaa

SEQ ID NO: 170218 - DNA, 20 bp, Artificial Sequence
  Synthetic oligonucleotide; GAG chr2 60552931 60552950 60552947 +
agaaataaagcggcggaaag

SEQ ID NO: 170219 - DNA, 20 bp, Artificial Sequence
  Synthetic oligonucleotide; AGG chr2 60552932 60552951 60552948 +
gaaataaagcggcggaaagg

SEQ ID NO: 170220 - DNA, 20 bp, Artificial Sequence
  Synthetic oligonucleotide; AAG chr2 60552936 60552955 60552952 +
taaagcggcggaaaggagga

SEQ ID NO: 170221 - DNA, 20 bp, Artificial Sequence
  Synthetic oligonucleotide; GAG chr2 60552938 60552957 60552954 +
aagcggcggaaaggaggaaa

SEQ ID NO: 170222 - DNA, 20 bp, Artificial Sequence
  Synthetic oligonucleotide; AGG chr2 60552939 60552958 60552955 +
agcggcggaaaggaggaaag

SEQ ID NO: 170223 - DNA, 20 bp, Artificial Sequence
  Synthetic oligonucleotide; GAG chr2 60552941 60552960 60552957 +
cggcggaaaggaggaaagag

SEQ ID NO: 170224 - DNA, 20 bp, Artificial Sequence
  Synthetic oligonucleotide; AGG chr2 60552942 60552961 60552958 +
ggcggaaaggaggaaagagg

SEQ ID NO: 170225 - DNA, 20 bp, Artificial Sequence
  Synthetic oligonucleotide; GAG chr2 60552944 60552963 60552960 +
cggaaaggaggaaagaggag

SEQ ID NO: 170226 - DNA, 20 bp, Artificial Sequence
  Synthetic oligonucleotide; AAG chr2 60552977 60552996 60552993 +
gtaaaattaaataaaattaa

SEQ ID NO: 170227 - DNA, 20 bp, Artificial Sequence
  Synthetic oligonucleotide; AGG chr2 60552978 60552997 60552994 +
taaaattaaataaaattaaa

SEQ ID NO: 170228 - DNA, 20 bp, Artificial Sequence
  Synthetic oligonucleotide; AAG chr2 60552996 60553015 60553012 +
aaaggtgcgtgctgtctcaa

SEQ ID NO: 170229 - DNA, 20 bp, Artificial Sequence
  Synthetic oligonucleotide; CGG chr2 60553007 60553026 60553023 +
ctgtctcaaaagtgcataca

SEQ ID NO: 170230 - DNA, 20 bp, Artificial Sequence
  Synthetic oligonucleotide; TGG chr2 60553013 60553032 60553029 +
caaaagtgcatacacggcaa

SEQ ID NO: 170231 - DNA, 20 bp, Artificial Sequence
  Synthetic oligonucleotide; CAG chr2 60553019 60553038 60553035 +
tgcatacacggcaatggttc

SEQ ID NO: 170232 - DNA, 20 bp, Artificial Sequence
  Synthetic oligonucleotide; TGG chr2 60553023 60553042 60553039 +
tacacggcaatggttccaga

SEQ ID NO: 170233 - DNA, 20 bp, Artificial Sequence
  Synthetic oligonucleotide; GGG chr2 60553024 60553043 60553040 +
acacggcaatggttccagat

SEQ ID NO: 170234 - DNA, 20 bp, Artificial Sequence
  Synthetic oligonucleotide; GAG chr2 60553029 60553048 60553045 +
gcaatggttccagatgggat

SEQ ID NO: 170235 - DNA, 20 bp, Artificial Sequence
  Synthetic oligonucleotide; AGG chr2 60553030 60553049 60553046 +
caatggttccagatgggatg

SEQ ID NO: 170236 - DNA, 20 bp, Artificial Sequence
  Synthetic oligonucleotide; GGG chr2 60553031 60553050 60553047 +
aatggttccagatgggatga

SEQ ID NO: 170237 - DNA, 20 bp, Artificial Sequence
  Synthetic oligonucleotide; CGG chr2 60553068 60553087 60553084 +
atctcttttacctcgactct

SEQ ID NO: 170238 - DNA, 20 bp, Artificial Sequence
  Synthetic oligonucleotide; GAG chr2 60553070 60553089 60553086 +
ctcttttacctcgactctcg

SEQ ID NO: 170239 - DNA, 20 bp, Artificial Sequence
  Synthetic oligonucleotide; AGG chr2 60553071 60553090 60553087 +
tcttttacctcgactctcgg

SEQ ID NO: 170240 - DNA, 20 bp, Artificial Sequence
  Synthetic oligonucleotide; TAG chr2 60553137 60553156 60553153 +
ctccccctcgcttttgcttc

SEQ ID NO: 170241 - DNA, 20 bp, Artificial Sequence
  Synthetic oligonucleotide; TGG chr2 60553184 60553203 60553200 +
ataattattattactattat

SEQ ID NO: 170242 - DNA, 20 bp, Artificial Sequence
  Synthetic oligonucleotide; GGG chr2 60553185 60553204 60553201 +
taattattattactattatt

SEQ ID NO: 170243 - DNA, 20 bp, Artificial Sequence
  Synthetic oligonucleotide; GAG chr2 60553198 60553217 60553214 +
tattattgggttacttacgc

SEQ ID NO: 170244 - DNA, 20 bp, Artificial Sequence
  Synthetic oligonucleotide; AAG chr2 60553216 60553235 60553232 +
gcgagaattcccgtttgctt

SEQ ID NO: 170245 - DNA, 20 bp, Artificial Sequence
  Synthetic oligonucleotide; TGG chr2 60553222 60553241 60553238 +
attcccgtttgcttaagtgc

SEQ ID NO: 170246 - DNA, 20 bp, Artificial Sequence
  Synthetic oligonucleotide; GGG chr2 60553223 60553242 60553239 +
ttcccgtttgcttaagtgct

SEQ ID NO: 170247 - DNA, 20 bp, Artificial Sequence
  Synthetic oligonucleotide; GGG chr2 60553224 60553243 60553240 +
tcccgtttgcttaagtgctg

SEQ ID NO: 170248 - DNA, 20 bp, Artificial Sequence
  Synthetic oligonucleotide; CGG chr2 60553240 60553259 60553256 +
gctggggtttgccttgcttg

SEQ ID NO: 170249 - DNA, 20 bp, Artificial Sequence
  Synthetic oligonucleotide; GAG chr2 60553244 60553263 60553260 +
gggtttgccttgcttgcggc

SEQ ID NO: 170250 - DNA, 20 bp, Artificial Sequence
  Synthetic oligonucleotide; TGG chr2 60553250 60553269 60553266 +
gccttgcttgcggcgagaca

SEQ ID NO: 170251 - DNA, 20 bp, Artificial Sequence
  Synthetic oligonucleotide; TGG chr2 60553253 60553272 60553269 +
ttgcttgcggcgagacatgg

SEQ ID NO: 170252 - DNA, 20 bp, Artificial Sequence
  Synthetic oligonucleotide; GGG chr2 60553254 60553273 60553270 +
tgcttgcggcgagacatggt

SEQ ID NO: 170253 - DNA, 20 bp, Artificial Sequence
  Synthetic oligonucleotide; CGG chr2 60553260 60553279 60553276 +
cggcgagacatggtgggctg

SEQ ID NO: 170254 - DNA, 20 bp, Artificial Sequence
  Synthetic oligonucleotide; GGG chr2 60553261 60553280 60553277 +
ggcgagacatggtgggctgc

SEQ ID NO: 170255 - DNA, 20 bp, Artificial Sequence
  Synthetic oligonucleotide; GGG chr2 60553262 60553281 60553278 +
gcgagacatggtgggctgcg

SEQ ID NO: 170256 - DNA, 20 bp, Artificial Sequence
  Synthetic oligonucleotide; CGG chr2 60553265 60553284 60553281 +
agacatggtgggctgcgggg

SEQ ID NO: 170257 - DNA, 20 bp, Artificial Sequence
  Synthetic oligonucleotide; GGG chr2 60553266 60553285 60553282 +
gacatggtgggctgcggggc

SEQ ID NO: 170258 - DNA, 20 bp, Artificial Sequence
  Synthetic oligonucleotide; CGG chr2 60553269 60553288 60553285 +
atggtgggctgcggggcggg

SEQ ID NO: 170259 - DNA, 20 bp, Artificial Sequence
  Synthetic oligonucleotide; CGG chr2 60553272 60553291 60553288 +
gtgggctgcggggcgggcgg

SEQ ID NO: 170260 - DNA, 20 bp, Artificial Sequence
  Synthetic oligonucleotide; CGG chr2 60553275 60553294 60553291 +
ggctgcggggcgggcggcgg

SEQ ID NO: 170261 - DNA, 20 bp, Artificial Sequence
  Synthetic oligonucleotide; CGG chr2 60553278 60553297 60553294 +
tgcggggcgggcggcggcgg

SEQ ID NO: 170262 - DNA, 20 bp, Artificial Sequence
  Synthetic oligonucleotide; CGG chr2 60553281 60553300 60553297 +
ggggcgggcggcggcggcgg

SEQ ID NO: 170263 - DNA, 20 bp, Artificial Sequence
  Synthetic oligonucleotide; CGG chr2 60553284 60553303 60553300 +
gcgggcggcggcggcggcgg

SEQ ID NO: 170264 - DNA, 20 bp, Artificial Sequence
  Synthetic oligonucleotide; CGG chr2 60553287 60553306 60553303 +
ggcggcggcggcggcggcgg

SEQ ID NO: 170265 - DNA, 20 bp, Artificial Sequence
  Synthetic oligonucleotide; CGG chr2 60553290 60553309 60553306 +
ggcggcggcggcggcggcgg

SEQ ID NO: 170266 - DNA, 20 bp, Artificial Sequence
  Synthetic oligonucleotide; CGG chr2 60553293 60553312 60553309 +
ggcggcggcggcggcggcgg

SEQ ID NO: 170267 - DNA, 20 bp, Artificial Sequence
  Synthetic oligonucleotide; GGG chr2 60553294 60553313 60553310 +
gcggcggcggcggcggcggc

SEQ ID NO: 170268 - DNA, 20 bp, Artificial Sequence
  Synthetic oligonucleotide; CGG chr2 60553297 60553316 60553313 +
gcggcggcggcggcggcggg

SEQ ID NO: 170269 - DNA, 20 bp, Artificial Sequence
  Synthetic oligonucleotide; CGG chr2 60553304 60553323 60553320 +
cggcggcggcgggcggacga

SEQ ID NO: 170270 - DNA, 20 bp, Artificial Sequence
  Synthetic oligonucleotide; CGG chr2 60553309 60553328 60553325 +
gcggcgggcggacgacggct

SEQ ID NO: 170271 - DNA, 20 bp, Artificial Sequence
  Synthetic oligonucleotide; CGG chr2 60553319 60553338 60553335 +
gacgacggctcggttcacat

SEQ ID NO: 170272 - DNA, 20 bp, Artificial Sequence
  Synthetic oligonucleotide; GGG chr2 60553320 60553339 60553336 +
acgacggctcggttcacatc

SEQ ID NO: 170273 - DNA, 20 bp, Artificial Sequence
  Synthetic oligonucleotide; GAG chr2 60553322 60553341 60553338 +
gacggctcggttcacatcgg

SEQ ID NO: 170274 - DNA, 20 bp, Artificial Sequence
  Synthetic oligonucleotide; GAG chr2 60553324 60553343 60553340 +
cggctcggttcacatcggga

SEQ ID NO: 170275 - DNA, 20 bp, Artificial Sequence
  Synthetic oligonucleotide; CGG chr2 60553328 60553347 60553344 +
tcggttcacatcgggagagc

SEQ ID NO: 170276 - DNA, 20 bp, Artificial Sequence
  Synthetic oligonucleotide; GGG chr2 60553329 60553348 60553345 +
cggttcacatcgggagagcc

SEQ ID NO: 170277 - DNA, 20 bp, Artificial Sequence
  Synthetic oligonucleotide; TAG chr2 60553333 60553352 60553349 +
tcacatcgggagagccgggt

SEQ ID NO: 170278 - DNA, 20 bp, Artificial Sequence
  Synthetic oligonucleotide; AAG chr2 60553337 60553356 60553353 +
atcgggagagccgggttaga

SEQ ID NO: 170279 - DNA, 20 bp, Artificial Sequence
  Synthetic oligonucleotide; AAG chr2 60553340 60553359 60553356 +
gggagagccgggttagaaag

SEQ ID NO: 170280 - DNA, 20 bp, Artificial Sequence
  Synthetic oligonucleotide; AGG chr2 60553341 60553360 60553357 +
ggagagccgggttagaaaga

SEQ ID NO: 170281 - DNA, 20 bp, Artificial Sequence
  Synthetic oligonucleotide; GAG chr2 60553343 60553362 60553359 +
agagccgggttagaaagaag

SEQ ID NO: 170282 - DNA, 20 bp, Artificial Sequence
  Synthetic oligonucleotide; CAG chr2 60553350 60553369 60553366 +
ggttagaaagaaggagactc

SEQ ID NO: 170283 - DNA, 20 bp, Artificial Sequence
  Synthetic oligonucleotide; GAG chr2 60553352 60553371 60553368 +
ttagaaagaaggagactcca

SEQ ID NO: 170284 - DNA, 20 bp, Artificial Sequence
  Synthetic oligonucleotide; CAG chr2 60553368 60553387 60553384 +
tccagagaaaatatcttcat

SEQ ID NO: 170285 - DNA, 20 bp, Artificial Sequence
  Synthetic oligonucleotide; TAG chr2 60553395 60553414 60553411 +
ttttgacatccaaaataaat

SEQ ID NO: 170286 - DNA, 20 bp, Artificial Sequence
  Synthetic oligonucleotide; AAG chr2 60553408 60553427 60553424 +
aataaattagaaataataca

SEQ ID NO: 170287 - DNA, 20 bp, Artificial Sequence
  Synthetic oligonucleotide; TGG chr2 60553412 60553431 60553428 +
aattagaaataatacaaaga

SEQ ID NO: 170288 - DNA, 20 bp, Artificial Sequence
  Synthetic oligonucleotide; CAG chr2 60553417 60553436 60553433 +
gaaataatacaaagatggcg

SEQ ID NO: 170289 - DNA, 20 bp, Artificial Sequence
  Synthetic oligonucleotide; AGG chr2 60553418 60553437 60553434 +
aaataatacaaagatggcgc

SEQ ID NO: 170290 - DNA, 20 bp, Artificial Sequence
  Synthetic oligonucleotide; GGG chr2 60553419 60553438 60553435 +
aataatacaaagatggcgca

SEQ ID NO: 170291 - DNA, 20 bp, Artificial Sequence
  Synthetic oligonucleotide; AAG chr2 60553422 60553441 60553438 +
aatacaaagatggcgcaggg

SEQ ID NO: 170292 - DNA, 20 bp, Artificial Sequence
  Synthetic oligonucleotide; TGG chr2 60553433 60553452 60553449 +
ggcgcagggaagatgaattg

SEQ ID NO: 170293 - DNA, 20 bp, Artificial Sequence
  Synthetic oligonucleotide; GGG chr2 60553434 60553453 60553450 +
gcgcagggaagatgaattgt

SEQ ID NO: 170294 - DNA, 20 bp, Artificial Sequence
  Synthetic oligonucleotide; GAG chr2 60553436 60553455 60553452 +
gcagggaagatgaattgtgg

SEQ ID NO: 170295 - DNA, 20 bp, Artificial Sequence
  Synthetic oligonucleotide; GAG chr2 60553438 60553457 60553454 +
agggaagatgaattgtggga

SEQ ID NO: 170296 - DNA, 20 bp, Artificial Sequence
  Synthetic oligonucleotide; TGG chr2 60553447 60553466 60553463 +
gaattgtgggagagccgtca

SEQ ID NO: 170297 - DNA, 20 bp, Artificial Sequence
  Synthetic oligonucleotide; AAG chr2 60553459 60553478 60553475 +
agccgtcatggctttttttt

SEQ ID NO: 170298 - DNA, 20 bp, Artificial Sequence
  Synthetic oligonucleotide; AAG chr2 60553490 60553509 60553506 +
aaaaaaaaaaaaaaaaaaaa

SEQ ID NO: 170299 - DNA, 20 bp, Artificial Sequence
  Synthetic oligonucleotide; GAG chr2 60553492 60553511 60553508 +
aaaaaaaaaaaaaaaaaaaa

SEQ ID NO: 170300 - DNA, 20 bp, Artificial Sequence
  Synthetic oligonucleotide; AGG chr2 60553493 60553512 60553509 +
aaaaaaaaaaaaaaaaaaag

SEQ ID NO: 170301 - DNA, 20 bp, Artificial Sequence
  Synthetic oligonucleotide; GGG chr2 60553494 60553513 60553510 +
aaaaaaaaaaaaaaaaaaga

SEQ ID NO: 170302 - DNA, 20 bp, Artificial Sequence
  Synthetic oligonucleotide; GAG chr2 60553496 60553515 60553512 +
aaaaaaaaaaaaaaaagagg

SEQ ID NO: 170303 - DNA, 20 bp, Artificial Sequence
  Synthetic oligonucleotide; GAG chr2 60553498 60553517 60553514 +
aaaaaaaaaaaaaagaggga

SEQ ID NO: 170304 - DNA, 20 bp, Artificial Sequence
  Synthetic oligonucleotide; GAG chr2 60553500 60553519 60553516 +
aaaaaaaaaaaagagggaga

SEQ ID NO: 170305 - DNA, 20 bp, Artificial Sequence
  Synthetic oligonucleotide; GAG chr2 60553502 60553521 60553518 +
aaaaaaaaaagagggagaga

SEQ ID NO: 170306 - DNA, 20 bp, Artificial Sequence
  Synthetic oligonucleotide; GAG chr2 60553504 60553523 60553520 +
aaaaaaaagagggagagaga

SEQ ID NO: 170307 - DNA, 20 bp, Artificial Sequence
  Synthetic oligonucleotide; AAG chr2 60553507 60553526 60553523 +
aaaaagagggagagagagag

SEQ ID NO: 170308 - DNA, 20 bp, Artificial Sequence
  Synthetic oligonucleotide; GAG chr2 60553509 60553528 60553525 +
aaagagggagagagagagaa

SEQ ID NO: 170309 - DNA, 20 bp, Artificial Sequence
  Synthetic oligonucleotide; GAG chr2 60553511 60553530 60553527 +
agagggagagagagagaaga

SEQ ID NO: 170310 - DNA, 20 bp, Artificial Sequence
  Synthetic oligonucleotide; TAG chr2 60553515 60553534 60553531 +
ggagagagagagaagagaga

SEQ ID NO: 170311 - DNA, 20 bp, Artificial Sequence
  Synthetic oligonucleotide; GAG chr2 60553517 60553536 60553533 +
agagagagagaagagagata

SEQ ID NO: 170312 - DNA, 20 bp, Artificial Sequence
  Synthetic oligonucleotide; AGG chr2 60553518 60553537 60553534 +
gagagagagaagagagatag

SEQ ID NO: 170313 - DNA, 20 bp, Artificial Sequence
  Synthetic oligonucleotide; GGG chr2 60553519 60553538 60553535 +
agagagagaagagagataga

SEQ ID NO: 170314 - DNA, 20 bp, Artificial Sequence
  Synthetic oligonucleotide; GAG chr2 60553521 60553540 60553537 +
agagagaagagagatagagg

SEQ ID NO: 170315 - DNA, 20 bp, Artificial Sequence
  Synthetic oligonucleotide; GAG chr2 60553523 60553542 60553539 +
agagaagagagatagaggga

SEQ ID NO: 170316 - DNA, 20 bp, Artificial Sequence
  Synthetic oligonucleotide; GAG chr2 60553525 60553544 60553541 +
agaagagagatagagggaga

SEQ ID NO: 170317 - DNA, 20 bp, Artificial Sequence
  Synthetic oligonucleotide; GAG chr2 60553527 60553546 60553543 +
aagagagatagagggagaga

SEQ ID NO: 170318 - DNA, 20 bp, Artificial Sequence
  Synthetic oligonucleotide; GAG chr2 60553529 60553548 60553545 +
gagagatagagggagagaga

SEQ ID NO: 170319 - DNA, 20 bp, Artificial Sequence
  Synthetic oligonucleotide; GAG chr2 60553531 60553550 60553547 +
gagatagagggagagagaga

SEQ ID NO: 170320 - DNA, 20 bp, Artificial Sequence
  Synthetic oligonucleotide; GAG chr2 60553533 60553552 60553549 +
gatagagggagagagagaga

SEQ ID NO: 170321 - DNA, 20 bp, Artificial Sequence
  Synthetic oligonucleotide; GAG chr2 60553535 60553554 60553551 +
tagagggagagagagagaga

SEQ ID NO: 170322 - DNA, 20 bp, Artificial Sequence
  Synthetic oligonucleotide; TGG chr2 60553548 60553567 60553564 +
agagagagagatgaaaaaaa

SEQ ID NO: 170323 - DNA, 20 bp, Artificial Sequence
  Synthetic oligonucleotide; AAG chr2 60553554 60553573 60553570 +
agagatgaaaaaaatggcaa

SEQ ID NO: 170324 - DNA, 20 bp, Artificial Sequence
  Synthetic oligonucleotide; GAG chr2 60553564 60553583 60553580 +
aaaatggcaaaagcccccct

SEQ ID NO: 170325 - DNA, 20 bp, Artificial Sequence
  Synthetic oligonucleotide; AAG chr2 60553571 60553590 60553587 +
caaaagcccccctgagctgc

SEQ ID NO: 170326 - DNA, 20 bp, Artificial Sequence
  Synthetic oligonucleotide; AAG chr2 60553577 60553596 60553593 +
cccccctgagctgcaagttc

SEQ ID NO: 170327 - DNA, 20 bp, Artificial Sequence
  Synthetic oligonucleotide; CGG chr2 60553582 60553601 60553598 +
ctgagctgcaagttcaagtg

SEQ ID NO: 170328 - DNA, 20 bp, Artificial Sequence
  Synthetic oligonucleotide; CAG chr2 60553612 60553631 60553628 +
gtccctgcgaacttgaacgt

SEQ ID NO: 170329 - DNA, 20 bp, Artificial Sequence
  Synthetic oligonucleotide; AGG chr2 60553613 60553632 60553629 +
tccctgcgaacttgaacgtc

SEQ ID NO: 170330 - DNA, 20 bp, Artificial Sequence
  Synthetic oligonucleotide; GAG chr2 60553615 60553634 60553631 +
cctgcgaacttgaacgtcag

SEQ ID NO: 170331 - DNA, 20 bp, Artificial Sequence
  Synthetic oligonucleotide; TGG chr2 60553620 60553639 60553636 +
gaacttgaacgtcaggagtc

SEQ ID NO: 170332 - DNA, 20 bp, Artificial Sequence
  Synthetic oligonucleotide; TGG chr2 60553624 60553643 60553640 +
ttgaacgtcaggagtctgga

SEQ ID NO: 170333 - DNA, 20 bp, Artificial Sequence
  Synthetic oligonucleotide; CAG chr2 60553628 60553647 60553644 +
acgtcaggagtctggatgga

SEQ ID NO: 170334 - DNA, 20 bp, Artificial Sequence
  Synthetic oligonucleotide; GAG chr2 60553630 60553649 60553646 +
gtcaggagtctggatggaca

SEQ ID NO: 170335 - DNA, 20 bp, Artificial Sequence
  Synthetic oligonucleotide; TGG chr2 60553645 60553664 60553661 +
ggacagagacacacaaaaca

SEQ ID NO: 170336 - DNA, 20 bp, Artificial Sequence
  Synthetic oligonucleotide; GGG chr2 60553646 60553665 60553662 +
gacagagacacacaaaacat

SEQ ID NO: 170337 - DNA, 20 bp, Artificial Sequence
  Synthetic oligonucleotide; CAG chr2 60553649 60553668 60553665 +
agagacacacaaaacatggg

SEQ ID NO: 170338 - DNA, 20 bp, Artificial Sequence
  Synthetic oligonucleotide; AGG chr2 60553650 60553669 60553666 +
gagacacacaaaacatgggc

SEQ ID NO: 170339 - DNA, 20 bp, Artificial Sequence
  Synthetic oligonucleotide; GGG chr2 60553651 60553670 60553667 +
agacacacaaaacatgggca

SEQ ID NO: 170340 - DNA, 20 bp, Artificial Sequence
  Synthetic oligonucleotide; GAG chr2 60553655 60553674 60553671 +
acacaaaacatgggcagggc

SEQ ID NO: 170341 - DNA, 20 bp, Artificial Sequence
  Synthetic oligonucleotide; CAG chr2 60553658 60553677 60553674 +
caaaacatgggcagggcgag

SEQ ID NO: 170342 - DNA, 20 bp, Artificial Sequence
  Synthetic oligonucleotide; AGG chr2 60553659 60553678 60553675 +
aaaacatgggcagggcgagc

SEQ ID NO: 170343 - DNA, 20 bp, Artificial Sequence
  Synthetic oligonucleotide; GAG chr2 60553661 60553680 60553677 +
aacatgggcagggcgagcag

SEQ ID NO: 170344 - DNA, 20 bp, Artificial Sequence
  Synthetic oligonucleotide; GAG chr2 60553663 60553682 60553679 +
catgggcagggcgagcagga

SEQ ID NO: 170345 - DNA, 20 bp, Artificial Sequence
  Synthetic oligonucleotide; AAG chr2 60553666 60553685 60553682 +
gggcagggcgagcaggagag

SEQ ID NO: 170346 - DNA, 20 bp, Artificial Sequence
  Synthetic oligonucleotide; AGG chr2 60553667 60553686 60553683 +
ggcagggcgagcaggagaga

SEQ ID NO: 170347 - DNA, 20 bp, Artificial Sequence
  Synthetic oligonucleotide; GGG chr2 60553668 60553687 60553684 +
gcagggcgagcaggagagaa

SEQ ID NO: 170348 - DNA, 20 bp, Artificial Sequence
  Synthetic oligonucleotide; GGG chr2 60553669 60553688 60553685 +
cagggcgagcaggagagaag

SEQ ID NO: 170349 - DNA, 20 bp, Artificial Sequence
  Synthetic oligonucleotide; GAG chr2 60553671 60553690 60553687 +
gggcgagcaggagagaaggg

SEQ ID NO: 170350 - DNA, 20 bp, Artificial Sequence
  Synthetic oligonucleotide; AGG chr2 60553672 60553691 60553688 +
ggcgagcaggagagaagggg

SEQ ID NO: 170351 - DNA, 20 bp, Artificial Sequence
  Synthetic oligonucleotide; GAG chr2 60553674 60553693 60553690 +
cgagcaggagagaaggggag

SEQ ID NO: 170352 - DNA, 20 bp, Artificial Sequence
  Synthetic oligonucleotide; AGG chr2 60553675 60553694 60553691 +
gagcaggagagaaggggagg

SEQ ID NO: 170353 - DNA, 20 bp, Artificial Sequence
  Synthetic oligonucleotide; GGG chr2 60553676 60553695 60553692 +
agcaggagagaaggggagga

SEQ ID NO: 170354 - DNA, 20 bp, Artificial Sequence
  Synthetic oligonucleotide; AAG chr2 60553679 60553698 60553695 +
aggagagaaggggaggaggg

SEQ ID NO: 170355 - DNA, 20 bp, Artificial Sequence
  Synthetic oligonucleotide; AGG chr2 60553680 60553699 60553696 +
ggagagaaggggaggaggga

SEQ ID NO: 170356 - DNA, 20 bp, Artificial Sequence
  Synthetic oligonucleotide; GGG chr2 60553681 60553700 60553697 +
gagagaaggggaggagggaa

SEQ ID NO: 170357 - DNA, 20 bp, Artificial Sequence
  Synthetic oligonucleotide; GGG chr2 60553682 60553701 60553698 +
agagaaggggaggagggaag

SEQ ID NO: 170358 - DNA, 20 bp, Artificial Sequence
  Synthetic oligonucleotide; AAG chr2 60553685 60553704 60553701 +
gaaggggaggagggaagggg

SEQ ID NO: 170359 - DNA, 20 bp, Artificial Sequence
  Synthetic oligonucleotide; TGG chr2 60553698 60553717 60553714 +
gaaggggaagctcacaccaa

SEQ ID NO: 170360 - DNA, 20 bp, Artificial Sequence
  Synthetic oligonucleotide; CAG chr2 60553709 60553728 60553725 +
tcacaccaatggacacacat

SEQ ID NO: 170361 - DNA, 20 bp, Artificial Sequence
  Synthetic oligonucleotide; AGG chr2 60553710 60553729 60553726 +
cacaccaatggacacacatc

SEQ ID NO: 170362 - DNA, 20 bp, Artificial Sequence
  Synthetic oligonucleotide; GGG chr2 60553711 60553730 60553727 +
acaccaatggacacacatca

SEQ ID NO: 170363 - DNA, 20 bp, Artificial Sequence
  Synthetic oligonucleotide; GGG chr2 60553712 60553731 60553728 +
caccaatggacacacatcag

SEQ ID NO: 170364 - DNA, 20 bp, Artificial Sequence
  Synthetic oligonucleotide; TGG chr2 60553716 60553735 60553732 +
aatggacacacatcaggggc

SEQ ID NO: 170365 - DNA, 20 bp, Artificial Sequence
  Synthetic oligonucleotide; AAG chr2 60553727 60553746 60553743 +
atcaggggctggacatgaaa

SEQ ID NO: 170366 - DNA, 20 bp, Artificial Sequence
  Synthetic oligonucleotide; GAG chr2 60553729 60553748 60553745 +
caggggctggacatgaaaaa

SEQ ID NO: 170367 - DNA, 20 bp, Artificial Sequence
  Synthetic oligonucleotide; CAG chr2 60553734 60553753 60553750 +
gctggacatgaaaaagagac

SEQ ID NO: 170368 - DNA, 20 bp, Artificial Sequence
  Synthetic oligonucleotide; AGG chr2 60553735 60553754 60553751 +
ctggacatgaaaaagagacc

SEQ ID NO: 170369 - DNA, 20 bp, Artificial Sequence
  Synthetic oligonucleotide; AAG chr2 60553740 60553759 60553756 +
catgaaaaagagaccaggac

SEQ ID NO: 170370 - DNA, 20 bp, Artificial Sequence
  Synthetic oligonucleotide; TGG chr2 60553747 60553766 60553763 +
aagagaccaggacaagccaa

SEQ ID NO: 170371 - DNA, 20 bp, Artificial Sequence
  Synthetic oligonucleotide; CAG chr2 60553751 60553770 60553767 +
gaccaggacaagccaatggc

SEQ ID NO: 170372 - DNA, 20 bp, Artificial Sequence
  Synthetic oligonucleotide; CGG chr2 60553756 60553775 60553772 +
ggacaagccaatggccagtg

SEQ ID NO: 170373 - DNA, 20 bp, Artificial Sequence
  Synthetic oligonucleotide; GGG chr2 60553757 60553776 60553773 +
gacaagccaatggccagtgc

SEQ ID NO: 170374 - DNA, 20 bp, Artificial Sequence
  Synthetic oligonucleotide; GGG chr2 60553758 60553777 60553774 +
acaagccaatggccagtgcg

SEQ ID NO: 170375 - DNA, 20 bp, Artificial Sequence
  Synthetic oligonucleotide; GAG chr2 60553760 60553779 60553776 +
aagccaatggccagtgcggg

SEQ ID NO: 170376 - DNA, 20 bp, Artificial Sequence
  Synthetic oligonucleotide; AGG chr2 60553761 60553780 60553777 +
agccaatggccagtgcgggg

SEQ ID NO: 170377 - DNA, 20 bp, Artificial Sequence
  Synthetic oligonucleotide; GGG chr2 60553762 60553781 60553778 +
gccaatggccagtgcgggga

SEQ ID NO: 170378 - DNA, 20 bp, Artificial Sequence
  Synthetic oligonucleotide; GGG chr2 60553763 60553782 60553779 +
ccaatggccagtgcggggag

SEQ ID NO: 170379 - DNA, 20 bp, Artificial Sequence
  Synthetic oligonucleotide; GGG chr2 60553764 60553783 60553780 +
caatggccagtgcggggagg

SEQ ID NO: 170380 - DNA, 20 bp, Artificial Sequence
  Synthetic oligonucleotide; GAG chr2 60553766 60553785 60553782 +
atggccagtgcggggagggg

SEQ ID NO: 170381 - DNA, 20 bp, Artificial Sequence
  Synthetic oligonucleotide; AGG chr2 60553767 60553786 60553783 +
tggccagtgcggggaggggg

SEQ ID NO: 170382 - DNA, 20 bp, Artificial Sequence
  Synthetic oligonucleotide; CGG chr2 60553772 60553791 60553788 +
agtgcggggagggggaggtg

SEQ ID NO: 170383 - DNA, 20 bp, Artificial Sequence
  Synthetic oligonucleotide; GGG chr2 60553773 60553792 60553789 +
gtgcggggagggggaggtgc

SEQ ID NO: 170384 - DNA, 20 bp, Artificial Sequence
  Synthetic oligonucleotide; GGG chr2 60553774 60553793 60553790 +
tgcggggagggggaggtgcg

SEQ ID NO: 170385 - DNA, 20 bp, Artificial Sequence
  Synthetic oligonucleotide; CGG chr2 60553777 60553796 60553793 +
ggggagggggaggtgcgggg

SEQ ID NO: 170386 - DNA, 20 bp, Artificial Sequence
  Synthetic oligonucleotide; GGG chr2 60553778 60553797 60553794 +
gggagggggaggtgcggggc

SEQ ID NO: 170387 - DNA, 20 bp, Artificial Sequence
  Synthetic oligonucleotide; GGG chr2 60553779 60553798 60553795 +
ggagggggaggtgcggggcg

SEQ ID NO: 170388 - DNA, 20 bp, Artificial Sequence
  Synthetic oligonucleotide; GGG chr2 60553780 60553799 60553796 +
gagggggaggtgcggggcgg

SEQ ID NO: 170389 - DNA, 20 bp, Artificial Sequence
  Synthetic oligonucleotide; GGG chr2 60553781 60553800 60553797 +
agggggaggtgcggggcggg

SEQ ID NO: 170390 - DNA, 20 bp, Artificial Sequence
  Synthetic oligonucleotide; CGG chr2 60553789 60553808 60553805 +
gtgcggggcggggggctccg

SEQ ID NO: 170391 - DNA, 20 bp, Artificial Sequence
  Synthetic oligonucleotide; CAG chr2 60553796 60553815 60553812 +
gcggggggctccgcggacgc

SEQ ID NO: 170392 - DNA, 20 bp, Artificial Sequence
  Synthetic oligonucleotide; CGG chr2 60553802 60553821 60553818 +
ggctccgcggacgccagacg

SEQ ID NO: 170393 - DNA, 20 bp, Artificial Sequence
  Synthetic oligonucleotide; CGG chr2 60553809 60553828 60553825 +
cggacgccagacgcggcccc

SEQ ID NO: 170394 - DNA, 20 bp, Artificial Sequence
  Synthetic oligonucleotide; GGG chr2 60553810 60553829 60553826 +
ggacgccagacgcggccccc

SEQ ID NO: 170395 - DNA, 20 bp, Artificial Sequence
  Synthetic oligonucleotide; GGG chr2 60553811 60553830 60553827 +
gacgccagacgcggcccccg

SEQ ID NO: 170396 - DNA, 20 bp, Artificial Sequence
  Synthetic oligonucleotide; GGG chr2 60553812 60553831 60553828 +
acgccagacgcggcccccgg

SEQ ID NO: 170397 - DNA, 20 bp, Artificial Sequence
  Synthetic oligonucleotide; GAG chr2 60553814 60553833 60553830 +
gccagacgcggcccccgggg

SEQ ID NO: 170398 - DNA, 20 bp, Artificial Sequence
  Synthetic oligonucleotide; AGG chr2 60553815 60553834 60553831 +
ccagacgcggcccccggggg

SEQ ID NO: 170399 - DNA, 20 bp, Artificial Sequence
  Synthetic oligonucleotide; GGG chr2 60553816 60553835 60553832 +
cagacgcggcccccggggga

SEQ ID NO: 170400 - DNA, 20 bp, Artificial Sequence
  Synthetic oligonucleotide; GGG chr2 60553817 60553836 60553833 +
agacgcggcccccgggggag

SEQ ID NO: 170401 - DNA, 20 bp, Artificial Sequence
  Synthetic oligonucleotide; CGG chr2 60553820 60553839 60553836 +
cgcggcccccgggggagggg

SEQ ID NO: 170402 - DNA, 20 bp, Artificial Sequence
  Synthetic oligonucleotide; GGG chr2 60553821 60553840 60553837 +
gcggcccccgggggaggggc

SEQ ID NO: 170403 - DNA, 20 bp, Artificial Sequence
  Synthetic oligonucleotide; GAG chr2 60553826 60553845 60553842 +
ccccgggggaggggcgggcc

SEQ ID NO: 170404 - DNA, 20 bp, Artificial Sequence
  Synthetic oligonucleotide; AGG chr2 60553827 60553846 60553843 +
cccgggggaggggcgggccg

SEQ ID NO: 170405 - DNA, 20 bp, Artificial Sequence
  Synthetic oligonucleotide; GGG chr2 60553828 60553847 60553844 +
ccgggggaggggcgggccga

SEQ ID NO: 170406 - DNA, 20 bp, Artificial Sequence
  Synthetic oligonucleotide; GGG chr2 60553829 60553848 60553845 +
cgggggaggggcgggccgag

SEQ ID NO: 170407 - DNA, 20 bp, Artificial Sequence
  Synthetic oligonucleotide; GAG chr2 60553831 60553850 60553847 +
ggggaggggcgggccgaggg

SEQ ID NO: 170408 - DNA, 20 bp, Artificial Sequence
  Synthetic oligonucleotide; AGG chr2 60553832 60553851 60553848 +
gggaggggcgggccgagggg

SEQ ID NO: 170409 - DNA, 20 bp, Artificial Sequence
  Synthetic oligonucleotide; GGG chr2 60553833 60553852 60553849 +
ggaggggcgggccgagggga

SEQ ID NO: 170410 - DNA, 20 bp, Artificial Sequence
  Synthetic oligonucleotide; GGG chr2 60553834 60553853 60553850 +
gaggggcgggccgaggggag

SEQ ID NO: 170411 - DNA, 20 bp, Artificial Sequence
  Synthetic oligonucleotide; GGG chr2 60553835 60553854 60553851 +
aggggcgggccgaggggagg

SEQ ID NO: 170412 - DNA, 20 bp, Artificial Sequence
  Synthetic oligonucleotide; TGG chr2 60553841 60553860 60553857 +
gggccgaggggagggggcgc

SEQ ID NO: 170413 - DNA, 20 bp, Artificial Sequence
  Synthetic oligonucleotide; GGG chr2 60553842 60553861 60553858 +
ggccgaggggagggggcgct

SEQ ID NO: 170414 - DNA, 20 bp, Artificial Sequence
  Synthetic oligonucleotide; GGG chr2 60553843 60553862 60553859 +
gccgaggggagggggcgctg

SEQ ID NO: 170415 - DNA, 20 bp, Artificial Sequence
  Synthetic oligonucleotide; CGG chr2 60553849 60553868 60553865 +
gggagggggcgctggggccg

SEQ ID NO: 170416 - DNA, 20 bp, Artificial Sequence
  Synthetic oligonucleotide; GGG chr2 60553850 60553869 60553866 +
ggagggggcgctggggccgc

SEQ ID NO: 170417 - DNA, 20 bp, Artificial Sequence
  Synthetic oligonucleotide; CAG chr2 60553858 60553877 60553874 +
cgctggggccgcgggctcac

SEQ ID NO: 170418 - DNA, 20 bp, Artificial Sequence
  Synthetic oligonucleotide; TGG chr2 60553861 60553880 60553877 +
tggggccgcgggctcaccag

SEQ ID NO: 170419 - DNA, 20 bp, Artificial Sequence
  Synthetic oligonucleotide; CAG chr2 60553867 60553886 60553883 +
cgcgggctcaccagtggccg

SEQ ID NO: 170420 - DNA, 20 bp, Artificial Sequence
  Synthetic oligonucleotide; GAG chr2 60553871 60553890 60553887 +
ggctcaccagtggccgcagc

SEQ ID NO: 170421 - DNA, 20 bp, Artificial Sequence
  Synthetic oligonucleotide; CGG chr2 60553879 60553898 60553895 +
agtggccgcagcgagcgccg

SEQ ID NO: 170422 - DNA, 20 bp, Artificial Sequence
  Synthetic oligonucleotide; CGG chr2 60553882 60553901 60553898 +
ggccgcagcgagcgccgcgg

SEQ ID NO: 170423 - DNA, 20 bp, Artificial Sequence
  Synthetic oligonucleotide; TGG chr2 60553885 60553904 60553901 +
cgcagcgagcgccgcggcgg

SEQ ID NO: 170424 - DNA, 20 bp, Artificial Sequence
  Synthetic oligonucleotide; TGG chr2 60553890 60553909 60553906 +
cgagcgccgcggcggtggcg

SEQ ID NO: 170425 - DNA, 20 bp, Artificial Sequence
  Synthetic oligonucleotide; CGG chr2 60553894 60553913 60553910 +
cgccgcggcggtggcgtggc

SEQ ID NO: 170426 - DNA, 20 bp, Artificial Sequence
  Synthetic oligonucleotide; GGG chr2 60553895 60553914 60553911 +
gccgcggcggtggcgtggcc

SEQ ID NO: 170427 - DNA, 20 bp, Artificial Sequence
  Synthetic oligonucleotide; GAG chr2 60553897 60553916 60553913 +
cgcggcggtggcgtggccgg

SEQ ID NO: 170428 - DNA, 20 bp, Artificial Sequence
  Synthetic oligonucleotide; GAG chr2 60553899 60553918 60553915 +
cggcggtggcgtggccggga

SEQ ID NO: 170429 - DNA, 20 bp, Artificial Sequence
  Synthetic oligonucleotide; AAG chr2 60553902 60553921 60553918 +
cggtggcgtggccgggagag

SEQ ID NO: 170430 - DNA, 20 bp, Artificial Sequence
  Synthetic oligonucleotide; AAG chr2 60553906 60553925 60553922 +
ggcgtggccgggagagaaga

SEQ ID NO: 170431 - DNA, 20 bp, Artificial Sequence
  Synthetic oligonucleotide; AGG chr2 60553907 60553926 60553923 +
gcgtggccgggagagaagaa

SEQ ID NO: 170432 - DNA, 20 bp, Artificial Sequence
  Synthetic oligonucleotide; GGG chr2 60553908 60553927 60553924 +
cgtggccgggagagaagaaa

SEQ ID NO: 170433 - DNA, 20 bp, Artificial Sequence
  Synthetic oligonucleotide; GGG chr2 60553909 60553928 60553925 +
gtggccgggagagaagaaag

SEQ ID NO: 170434 - DNA, 20 bp, Artificial Sequence
  Synthetic oligonucleotide; TGG chr2 60553912 60553931 60553928 +
gccgggagagaagaaagggg

SEQ ID NO: 170435 - DNA, 20 bp, Artificial Sequence
  Synthetic oligonucleotide; CAG chr2 60553915 60553934 60553931 +
gggagagaagaaaggggtgg

SEQ ID NO: 170436 - DNA, 20 bp, Artificial Sequence
  Synthetic oligonucleotide; AGG chr2 60553916 60553935 60553932 +
ggagagaagaaaggggtggc

SEQ ID NO: 170437 - DNA, 20 bp, Artificial Sequence
  Synthetic oligonucleotide; GGG chr2 60553917 60553936 60553933 +
gagagaagaaaggggtggca

SEQ ID NO: 170438 - DNA, 20 bp, Artificial Sequence
  Synthetic oligonucleotide; GGG chr2 60553918 60553937 60553934 +
agagaagaaaggggtggcag

SEQ ID NO: 170439 - DNA, 20 bp, Artificial Sequence
  Synthetic oligonucleotide; TGG chr2 60553921 60553940 60553937 +
gaagaaaggggtggcagggg

SEQ ID NO: 170440 - DNA, 20 bp, Artificial Sequence
  Synthetic oligonucleotide; GGG chr2 60553922 60553941 60553938 +
aagaaaggggtggcaggggt

SEQ ID NO: 170441 - DNA, 20 bp, Artificial Sequence
  Synthetic oligonucleotide; GAG chr2 60553924 60553943 60553940 +
gaaaggggtggcaggggtgg

SEQ ID NO: 170442 - DNA, 20 bp, Artificial Sequence
  Synthetic oligonucleotide; AGG chr2 60553925 60553944 60553941 +
aaaggggtggcaggggtggg

SEQ ID NO: 170443 - DNA, 20 bp, Artificial Sequence
  Synthetic oligonucleotide; AAG chr2 60553929 60553948 60553945 +
gggtggcaggggtgggagga

SEQ ID NO: 170444 - DNA, 20 bp, Artificial Sequence
  Synthetic oligonucleotide; AGG chr2 60553930 60553949 60553946 +
ggtggcaggggtgggaggaa

SEQ ID NO: 170445 - DNA, 20 bp, Artificial Sequence
  Synthetic oligonucleotide; GGG chr2 60553931 60553950 60553947 +
gtggcaggggtgggaggaaa

SEQ ID NO: 170446 - DNA, 20 bp, Artificial Sequence
  Synthetic oligonucleotide; TGG chr2 60553934 60553953 60553950 +
gcaggggtgggaggaaaggg

SEQ ID NO: 170447 - DNA, 20 bp, Artificial Sequence
  Synthetic oligonucleotide; GGG chr2 60553935 60553954 60553951 +
caggggtgggaggaaagggt

SEQ ID NO: 170448 - DNA, 20 bp, Artificial Sequence
  Synthetic oligonucleotide; GGG chr2 60553936 60553955 60553952 +
aggggtgggaggaaagggtg

SEQ ID NO: 170449 - DNA, 20 bp, Artificial Sequence
  Synthetic oligonucleotide; GGG chr2 60553937 60553956 60553953 +
ggggtgggaggaaagggtgg

SEQ ID NO: 170450 - DNA, 20 bp, Artificial Sequence
  Synthetic oligonucleotide; GGG chr2 60553938 60553957 60553954 +
gggtgggaggaaagggtggg

SEQ ID NO: 170451 - DNA, 20 bp, Artificial Sequence
  Synthetic oligonucleotide; GGG chr2 60553939 60553958 60553955 +
ggtgggaggaaagggtgggg

SEQ ID NO: 170452 - DNA, 20 bp, Artificial Sequence
  Synthetic oligonucleotide; GAG chr2 60553941 60553960 60553957 +
tgggaggaaagggtgggggg

SEQ ID NO: 170453 - DNA, 20 bp, Artificial Sequence
  Synthetic oligonucleotide; AAG chr2 60553945 60553964 60553961 +
aggaaagggtgggggggagc

SEQ ID NO: 170454 - DNA, 20 bp, Artificial Sequence
  Synthetic oligonucleotide; CGG chr2 60553976 60553995 60553992 +
cctgctcccccccacacacg

SEQ ID NO: 170455 - DNA, 20 bp, Artificial Sequence
  Synthetic oligonucleotide; AAG chr2 60553991 60554010 60554007 +
acacgcggactctaaaatga

SEQ ID NO: 170456 - DNA, 20 bp, Artificial Sequence
  Synthetic oligonucleotide; AAG chr2 60554005 60554024 60554021 +
aaatgaaagattattcaaaa

SEQ ID NO: 170457 - DNA, 20 bp, Artificial Sequence
  Synthetic oligonucleotide; TAG chr2 60554015 60554034 60554031 +
ttattcaaaaaagaaaaaaa

SEQ ID NO: 170458 - DNA, 20 bp, Artificial Sequence
  Synthetic oligonucleotide; GAG chr2 60554017 60554036 60554033 +
attcaaaaaagaaaaaaata

SEQ ID NO: 170459 - DNA, 20 bp, Artificial Sequence
  Synthetic oligonucleotide; GAG chr2 60554021 60554040 60554037 +
aaaaaagaaaaaaatagagc

SEQ ID NO: 170460 - DNA, 20 bp, Artificial Sequence
  Synthetic oligonucleotide; GAG chr2 60554023 60554042 60554039 +
aaaagaaaaaaatagagcga

SEQ ID NO: 170461 - DNA, 20 bp, Artificial Sequence
  Synthetic oligonucleotide; CGG chr2 60554031 60554050 60554047 +
aaaatagagcgagagtgcac

SEQ ID NO: 170462 - DNA, 20 bp, Artificial Sequence
  Synthetic oligonucleotide; GGG chr2 60554032 60554051 60554048 +
aaatagagcgagagtgcacc

SEQ ID NO: 170463 - DNA, 20 bp, Artificial Sequence
  Synthetic oligonucleotide; GAG chr2 60554034 60554053 60554050 +
atagagcgagagtgcaccgg

SEQ ID NO: 170464 - DNA, 20 bp, Artificial Sequence
  Synthetic oligonucleotide; AGG chr2 60554035 60554054 60554051 +
tagagcgagagtgcaccggg

SEQ ID NO: 170465 - DNA, 20 bp, Artificial Sequence
  Synthetic oligonucleotide; CAG chr2 60554041 60554060 60554057 +
gagagtgcaccgggaggctg

SEQ ID NO: 170466 - DNA, 20 bp, Artificial Sequence
  Synthetic oligonucleotide; CGG chr2 60554047 60554066 60554063 +
gcaccgggaggctgcagccc

SEQ ID NO: 170467 - DNA, 20 bp, Artificial Sequence
  Synthetic oligonucleotide; GGG chr2 60554048 60554067 60554064 +
caccgggaggctgcagcccc

SEQ ID NO: 170468 - DNA, 20 bp, Artificial Sequence
  Synthetic oligonucleotide; TGG chr2 60554052 60554071 60554068 +
gggaggctgcagccccgggc

SEQ ID NO: 170469 - DNA, 20 bp, Artificial Sequence
  Synthetic oligonucleotide; GGG chr2 60554053 60554072 60554069 +
ggaggctgcagccccgggct

SEQ ID NO: 170470 - DNA, 20 bp, Artificial Sequence
  Synthetic oligonucleotide; GGG chr2 60554054 60554073 60554070 +
gaggctgcagccccgggctg

SEQ ID NO: 170471 - DNA, 20 bp, Artificial Sequence
  Synthetic oligonucleotide; AAG chr2 60554057 60554076 60554073 +
gctgcagccccgggctgggg

SEQ ID NO: 170472 - DNA, 20 bp, Artificial Sequence
  Synthetic oligonucleotide; CGG chr2 60554062 60554081 60554078 +
agccccgggctggggaagcg

SEQ ID NO: 170473 - DNA, 20 bp, Artificial Sequence
  Synthetic oligonucleotide; GGG chr2 60554063 60554082 60554079 +
gccccgggctggggaagcgc

SEQ ID NO: 170474 - DNA, 20 bp, Artificial Sequence
  Synthetic oligonucleotide; CGG chr2 60554066 60554085 60554082 +
ccgggctggggaagcgcggg

SEQ ID NO: 170475 - DNA, 20 bp, Artificial Sequence
  Synthetic oligonucleotide; GAG chr2 60554068 60554087 60554084 +
gggctggggaagcgcgggcg

SEQ ID NO: 170476 - DNA, 20 bp, Artificial Sequence
  Synthetic oligonucleotide; AGG chr2 60554069 60554088 60554085 +
ggctggggaagcgcgggcgg

SEQ ID NO: 170477 - DNA, 20 bp, Artificial Sequence
  Synthetic oligonucleotide; GGG chr2 60554070 60554089 60554086 +
gctggggaagcgcgggcgga

SEQ ID NO: 170478 - DNA, 20 bp, Artificial Sequence
  Synthetic oligonucleotide; AAG chr2 60554073 60554092 60554089 +
ggggaagcgcgggcggaggg

SEQ ID NO: 170479 - DNA, 20 bp, Artificial Sequence
  Synthetic oligonucleotide; CAG chr2 60554077 60554096 60554093 +
aagcgcgggcggagggaagc

SEQ ID NO: 170480 - DNA, 20 bp, Artificial Sequence
  Synthetic oligonucleotide; AGG chr2 60554078 60554097 60554094 +
agcgcgggcggagggaagcc

SEQ ID NO: 170481 - DNA, 20 bp, Artificial Sequence
  Synthetic oligonucleotide; TAG chr2 60554081 60554100 60554097 +
gcgggcggagggaagccagg

SEQ ID NO: 170482 - DNA, 20 bp, Artificial Sequence
  Synthetic oligonucleotide; GAG chr2 60554083 60554102 60554099 +
gggcggagggaagccaggta

SEQ ID NO: 170483 - DNA, 20 bp, Artificial Sequence
  Synthetic oligonucleotide; CGG chr2 60554093 60554112 60554109 +
aagccaggtagagttgctcc

SEQ ID NO: 170484 - DNA, 20 bp, Artificial Sequence
  Synthetic oligonucleotide; TGG chr2 60554160 60554179 60554176 +
ccgcgctcgctccccgcgtg

SEQ ID NO: 170485 - DNA, 20 bp, Artificial Sequence
  Synthetic oligonucleotide; CAG chr2 60554167 60554186 60554183 +
cgctccccgcgtgtggacgc

SEQ ID NO: 170486 - DNA, 20 bp, Artificial Sequence
  Synthetic oligonucleotide; AGG chr2 60554168 60554187 60554184 +
gctccccgcgtgtggacgcc

SEQ ID NO: 170487 - DNA, 20 bp, Artificial Sequence
  Synthetic oligonucleotide; GGG chr2 60554169 60554188 60554185 +
ctccccgcgtgtggacgcca

SEQ ID NO: 170488 - DNA, 20 bp, Artificial Sequence
  Synthetic oligonucleotide; GGG chr2 60554170 60554189 60554186 +
tccccgcgtgtggacgccag

SEQ ID NO: 170489 - DNA, 20 bp, Artificial Sequence
  Synthetic oligonucleotide; AAG chr2 60554176 60554195 60554192 +
cgtgtggacgccaggggccg

SEQ ID NO: 170490 - DNA, 20 bp, Artificial Sequence
  Synthetic oligonucleotide; AAG chr2 60554182 60554201 60554198 +
gacgccaggggccgaagtaa

SEQ ID NO: 170491 - DNA, 20 bp, Artificial Sequence
  Synthetic oligonucleotide; GAG chr2 60554189 60554208 60554205 +
ggggccgaagtaaaagcccc

SEQ ID NO: 170492 - DNA, 20 bp, Artificial Sequence
  Synthetic oligonucleotide; CGG chr2 60554196 60554215 60554212 +
aagtaaaagccccgagcccg

SEQ ID NO: 170493 - DNA, 20 bp, Artificial Sequence
  Synthetic oligonucleotide; CGG chr2 60554206 60554225 60554222 +
cccgagcccgcggctgcgct

SEQ ID NO: 170494 - DNA, 20 bp, Artificial Sequence
  Synthetic oligonucleotide; GGG chr2 60554207 60554226 60554223 +
ccgagcccgcggctgcgctc

SEQ ID NO: 170495 - DNA, 20 bp, Artificial Sequence
  Synthetic oligonucleotide; GAG chr2 60554221 60554240 60554237 +
gcgctcgggaaactttgccc

SEQ ID NO: 170496 - DNA, 20 bp, Artificial Sequence
  Synthetic oligonucleotide; AGG chr2 60554222 60554241 60554238 +
cgctcgggaaactttgcccg

SEQ ID NO: 170497 - DNA, 20 bp, Artificial Sequence
  Synthetic oligonucleotide; GAG chr2 60554224 60554243 60554240 +
ctcgggaaactttgcccgag

SEQ ID NO: 170498 - DNA, 20 bp, Artificial Sequence
  Synthetic oligonucleotide; GAG chr2 60554226 60554245 60554242 +
cgggaaactttgcccgagga

SEQ ID NO: 170499 - DNA, 20 bp, Artificial Sequence
  Synthetic oligonucleotide; AGG chr2 60554227 60554246 60554243 +
gggaaactttgcccgaggag

SEQ ID NO: 170500 - DNA, 20 bp, Artificial Sequence
  Synthetic oligonucleotide; CAG chr2 60554231 60554250 60554247 +
aactttgcccgaggagagga

SEQ ID NO: 170501 - DNA, 20 bp, Artificial Sequence
  Synthetic oligonucleotide; AAG chr2 60554236 60554255 60554252 +
tgcccgaggagaggacagca

SEQ ID NO: 170502 - DNA, 20 bp, Artificial Sequence
  Synthetic oligonucleotide; AAG chr2 60554251 60554270 60554267 +
cagcaaagaaaaatcacccg

SEQ ID NO: 170503 - DNA, 20 bp, Artificial Sequence
  Synthetic oligonucleotide; GAG chr2 60554256 60554275 60554272 +
aagaaaaatcacccgaagtt

SEQ ID NO: 170504 - DNA, 20 bp, Artificial Sequence
  Synthetic oligonucleotide; GAG chr2 60554258 60554277 60554274 +
gaaaaatcacccgaagttga

SEQ ID NO: 170505 - DNA, 20 bp, Artificial Sequence
  Synthetic oligonucleotide; GAG chr2 60554263 60554282 60554279 +
atcacccgaagttgagagct

SEQ ID NO: 170506 - DNA, 20 bp, Artificial Sequence
  Synthetic oligonucleotide; AAG chr2 60554271 60554290 60554287 +
aagttgagagctgagcctcc

SEQ ID NO: 170507 - DNA, 20 bp, Artificial Sequence
  Synthetic oligonucleotide; CAG chr2 60554277 60554296 60554293 +
agagctgagcctccaagtta

SEQ ID NO: 170508 - DNA, 20 bp, Artificial Sequence
  Synthetic oligonucleotide; CAG chr2 60554285 60554304 60554301 +
gcctccaagttacagctccg

SEQ ID NO: 170509 - DNA, 20 bp, Artificial Sequence
  Synthetic oligonucleotide; CGG chr2 60554288 60554307 60554304 +
tccaagttacagctccgcag

SEQ ID NO: 170510 - DNA, 20 bp, Artificial Sequence
  Synthetic oligonucleotide; GGG chr2 60554289 60554308 60554305 +
ccaagttacagctccgcagc

SEQ ID NO: 170511 - DNA, 20 bp, Artificial Sequence
  Synthetic oligonucleotide; GAG chr2 60554293 60554312 60554309 +
gttacagctccgcagcgggc

SEQ ID NO: 170512 - DNA, 20 bp, Artificial Sequence
  Synthetic oligonucleotide; AGG chr2 60554294 60554313 60554310 +
ttacagctccgcagcgggcg

SEQ ID NO: 170513 - DNA, 20 bp, Artificial Sequence
  Synthetic oligonucleotide; GGG chr2 60554295 60554314 60554311 +
tacagctccgcagcgggcga

SEQ ID NO: 170514 - DNA, 20 bp, Artificial Sequence
  Synthetic oligonucleotide; GGG chr2 60554296 60554315 60554312 +
acagctccgcagcgggcgag

SEQ ID NO: 170515 - DNA, 20 bp, Artificial Sequence
  Synthetic oligonucleotide; GAG chr2 60554298 60554317 60554314 +
agctccgcagcgggcgaggg

SEQ ID NO: 170516 - DNA, 20 bp, Artificial Sequence
  Synthetic oligonucleotide; AGG chr2 60554299 60554318 60554315 +
gctccgcagcgggcgagggg

SEQ ID NO: 170517 - DNA, 20 bp, Artificial Sequence
  Synthetic oligonucleotide; TGG chr2 60554302 60554321 60554318 +
ccgcagcgggcgaggggagg

SEQ ID NO: 170518 - DNA, 20 bp, Artificial Sequence
  Synthetic oligonucleotide; GGG chr2 60554303 60554322 60554319 +
cgcagcgggcgaggggaggt

SEQ ID NO: 170519 - DNA, 20 bp, Artificial Sequence
  Synthetic oligonucleotide; GAG chr2 60554305 60554324 60554321 +
cagcgggcgaggggaggtgg

SEQ ID NO: 170520 - DNA, 20 bp, Artificial Sequence
  Synthetic oligonucleotide; AGG chr2 60554306 60554325 60554322 +
agcgggcgaggggaggtggg

SEQ ID NO: 170521 - DNA, 20 bp, Artificial Sequence
  Synthetic oligonucleotide; GGG chr2 60554307 60554326 60554323 +
gcgggcgaggggaggtggga

SEQ ID NO: 170522 - DNA, 20 bp, Artificial Sequence
  Synthetic oligonucleotide; GAG chr2 60554309 60554328 60554325 +
gggcgaggggaggtgggagg

SEQ ID NO: 170523 - DNA, 20 bp, Artificial Sequence
  Synthetic oligonucleotide; CGG chr2 60554316 60554335 60554332 +
gggaggtgggagggagcgca

SEQ ID NO: 170524 - DNA, 20 bp, Artificial Sequence
  Synthetic oligonucleotide; CGG chr2 60554324 60554343 60554340 +
ggagggagcgcacggcaacg

SEQ ID NO: 170525 - DNA, 20 bp, Artificial Sequence
  Synthetic oligonucleotide; CAG chr2 60554331 60554350 60554347 +
gcgcacggcaacgcggaatc

SEQ ID NO: 170526 - DNA, 20 bp, Artificial Sequence
  Synthetic oligonucleotide; AAG chr2 60554337 60554356 60554353 +
ggcaacgcggaatccagcct

SEQ ID NO: 170527 - DNA, 20 bp, Artificial Sequence
  Synthetic oligonucleotide; TGG chr2 60554342 60554361 60554358 +
cgcggaatccagcctaagtt

SEQ ID NO: 170528 - DNA, 20 bp, Artificial Sequence
  Synthetic oligonucleotide; GAG chr2 60554344 60554363 60554360 +
cggaatccagcctaagtttg

SEQ ID NO: 170529 - DNA, 20 bp, Artificial Sequence
  Synthetic oligonucleotide; AGG chr2 60554345 60554364 60554361 +
ggaatccagcctaagtttgg

SEQ ID NO: 170530 - DNA, 20 bp, Artificial Sequence
  Synthetic oligonucleotide; GGG chr2 60554346 60554365 60554362 +
gaatccagcctaagtttgga

SEQ ID NO: 170531 - DNA, 20 bp, Artificial Sequence
  Synthetic oligonucleotide; CGG chr2 60554352 60554371 60554368 +
agcctaagtttggagggctg

SEQ ID NO: 170532 - DNA, 20 bp, Artificial Sequence
  Synthetic oligonucleotide; GGG chr2 60554353 60554372 60554369 +
gcctaagtttggagggctgc

SEQ ID NO: 170533 - DNA, 20 bp, Artificial Sequence
  Synthetic oligonucleotide; CGG chr2 60554358 60554377 60554374 +
agtttggagggctgcgggtc

SEQ ID NO: 170534 - DNA, 20 bp, Artificial Sequence
  Synthetic oligonucleotide; AAG chr2 60554361 60554380 60554377 +
ttggagggctgcgggtccgg

SEQ ID NO: 170535 - DNA, 20 bp, Artificial Sequence
  Synthetic oligonucleotide; AGG chr2 60554362 60554381 60554378 +
tggagggctgcgggtccgga

SEQ ID NO: 170536 - DNA, 20 bp, Artificial Sequence
  Synthetic oligonucleotide; GGG chr2 60554363 60554382 60554379 +
ggagggctgcgggtccggaa

SEQ ID NO: 170537 - DNA, 20 bp, Artificial Sequence
  Synthetic oligonucleotide; CAG chr2 60554366 60554385 60554382 +
gggctgcgggtccggaaggg

SEQ ID NO: 170538 - DNA, 20 bp, Artificial Sequence
  Synthetic oligonucleotide; AAG chr2 60554374 60554393 60554390 +
ggtccggaagggcagcgccc

SEQ ID NO: 170539 - DNA, 20 bp, Artificial Sequence
  Synthetic oligonucleotide; CAG chr2 60554381 60554400 60554397 +
aagggcagcgcccaagtctc

SEQ ID NO: 170540 - DNA, 20 bp, Artificial Sequence
  Synthetic oligonucleotide; AGG chr2 60554382 60554401 60554398 +
agggcagcgcccaagtctcc

SEQ ID NO: 170541 - DNA, 20 bp, Artificial Sequence
  Synthetic oligonucleotide; GAG chr2 60554384 60554403 60554400 +
ggcagcgcccaagtctccag

SEQ ID NO: 170542 - DNA, 20 bp, Artificial Sequence
  Synthetic oligonucleotide; CGG chr2 60554393 60554412 60554409 +
caagtctccaggagcccgcg

SEQ ID NO: 170543 - DNA, 20 bp, Artificial Sequence
  Synthetic oligonucleotide; TGG chr2 60554398 60554417 60554414 +
ctccaggagcccgcgcggcc

SEQ ID NO: 170544 - DNA, 20 bp, Artificial Sequence
  Synthetic oligonucleotide; AAG chr2 60554402 60554421 60554418 +
aggagcccgcgcggcctgga

SEQ ID NO: 170545 - DNA, 20 bp, Artificial Sequence
  Synthetic oligonucleotide; GAG chr2 60554404 60554423 60554420 +
gagcccgcgcggcctggaaa

SEQ ID NO: 170546 - DNA, 20 bp, Artificial Sequence
  Synthetic oligonucleotide; AGG chr2 60554405 60554424 60554421 +
agcccgcgcggcctggaaag

SEQ ID NO: 170547 - DNA, 20 bp, Artificial Sequence
  Synthetic oligonucleotide; GGG chr2 60554406 60554425 60554422 +
gcccgcgcggcctggaaaga

SEQ ID NO: 170548 - DNA, 20 bp, Artificial Sequence
  Synthetic oligonucleotide; GGG chr2 60554407 60554426 60554423 +
cccgcgcggcctggaaagag

SEQ ID NO: 170549 - DNA, 20 bp, Artificial Sequence
  Synthetic oligonucleotide; CGG chr2 60554412 60554431 60554428 +
gcggcctggaaagaggggac

SEQ ID NO: 170550 - DNA, 20 bp, Artificial Sequence
  Synthetic oligonucleotide; GGG chr2 60554413 60554432 60554429 +
cggcctggaaagaggggacc

SEQ ID NO: 170551 - DNA, 20 bp, Artificial Sequence
  Synthetic oligonucleotide; GGG chr2 60554414 60554433 60554430 +
ggcctggaaagaggggaccg

SEQ ID NO: 170552 - DNA, 20 bp, Artificial Sequence
  Synthetic oligonucleotide; GAG chr2 60554416 60554435 60554432 +
cctggaaagaggggaccggg

SEQ ID NO: 170553 - DNA, 20 bp, Artificial Sequence
  Synthetic oligonucleotide; GAG chr2 60554418 60554437 60554434 +
tggaaagaggggaccgggga

SEQ ID NO: 170554 - DNA, 20 bp, Artificial Sequence
  Synthetic oligonucleotide; AGG chr2 60554419 60554438 60554435 +
ggaaagaggggaccggggag

SEQ ID NO: 170555 - DNA, 20 bp, Artificial Sequence
  Synthetic oligonucleotide; CAG chr2 60554422 60554441 60554438 +
aagaggggaccggggagagg

SEQ ID NO: 170556 - DNA, 20 bp, Artificial Sequence
  Synthetic oligonucleotide; AGG chr2 60554423 60554442 60554439 +
agaggggaccggggagaggc

SEQ ID NO: 170557 - DNA, 20 bp, Artificial Sequence
  Synthetic oligonucleotide; CGG chr2 60554426 60554445 60554442 +
ggggaccggggagaggcagg

SEQ ID NO: 170558 - DNA, 20 bp, Artificial Sequence
  Synthetic oligonucleotide; CAG chr2 60554431 60554450 60554447 +
ccggggagaggcaggcggcg

SEQ ID NO: 170559 - DNA, 20 bp, Artificial Sequence
  Synthetic oligonucleotide; AGG chr2 60554432 60554451 60554448 +
cggggagaggcaggcggcgc

SEQ ID NO: 170560 - DNA, 20 bp, Artificial Sequence
  Synthetic oligonucleotide; CGG chr2 60554436 60554455 60554452 +
gagaggcaggcggcgcaggc

SEQ ID NO: 170561 - DNA, 20 bp, Artificial Sequence
  Synthetic oligonucleotide; GGG chr2 60554437 60554456 60554453 +
agaggcaggcggcgcaggcc

SEQ ID NO: 170562 - DNA, 20 bp, Artificial Sequence
  Synthetic oligonucleotide; GGG chr2 60554438 60554457 60554454 +
gaggcaggcggcgcaggccg

SEQ ID NO: 170563 - DNA, 20 bp, Artificial Sequence
  Synthetic oligonucleotide; GAG chr2 60554444 60554463 60554460 +
ggcggcgcaggccggggccc

SEQ ID NO: 170564 - DNA, 20 bp, Artificial Sequence
  Synthetic oligonucleotide; AGG chr2 60554445 60554464 60554461 +
gcggcgcaggccggggcccg

SEQ ID NO: 170565 - DNA, 20 bp, Artificial Sequence
  Synthetic oligonucleotide; GGG chr2 60554446 60554465 60554462 +
cggcgcaggccggggcccga

SEQ ID NO: 170566 - DNA, 20 bp, Artificial Sequence
  Synthetic oligonucleotide; AAG chr2 60554456 60554475 60554472 +
cggggcccgagggcgccccc

SEQ ID NO: 170567 - DNA, 20 bp, Artificial Sequence
  Synthetic oligonucleotide; AGG chr2 60554457 60554476 60554473 +
ggggcccgagggcgccccca

SEQ ID NO: 170568 - DNA, 20 bp, Artificial Sequence
  Synthetic oligonucleotide; GAG chr2 60554462 60554481 60554478 +
ccgagggcgcccccaaggcc

SEQ ID NO: 170569 - DNA, 20 bp, Artificial Sequence
  Synthetic oligonucleotide; CAG chr2 60554466 60554485 60554482 +
gggcgcccccaaggccgagc

SEQ ID NO: 170570 - DNA, 20 bp, Artificial Sequence
  Synthetic oligonucleotide; AGG chr2 60554467 60554486 60554483 +
ggcgcccccaaggccgagcc

SEQ ID NO: 170571 - DNA, 20 bp, Artificial Sequence
  Synthetic oligonucleotide; GGG chr2 60554468 60554487 60554484 +
gcgcccccaaggccgagcca

SEQ ID NO: 170572 - DNA, 20 bp, Artificial Sequence
  Synthetic oligonucleotide; CGG chr2 60554473 60554492 60554489 +
cccaaggccgagccagggac

SEQ ID NO: 170573 - DNA, 20 bp, Artificial Sequence
  Synthetic oligonucleotide; GGG chr2 60554474 60554493 60554490 +
ccaaggccgagccagggacc

SEQ ID NO: 170574 - DNA, 20 bp, Artificial Sequence
  Synthetic oligonucleotide; GAG chr2 60554482 60554501 60554498 +
gagccagggaccgggaatct

SEQ ID NO: 170575 - DNA, 20 bp, Artificial Sequence
  Synthetic oligonucleotide; AAG chr2 60554494 60554513 60554510 +
gggaatctgagcgccccgcc

SEQ ID NO: 170576 - DNA, 20 bp, Artificial Sequence
  Synthetic oligonucleotide; TGG chr2 60554501 60554520 60554517 +
tgagcgccccgccaagcgac

SEQ ID NO: 170577 - DNA, 20 bp, Artificial Sequence
  Synthetic oligonucleotide; GGG chr2 60554502 60554521 60554518 +
gagcgccccgccaagcgact

SEQ ID NO: 170578 - DNA, 20 bp, Artificial Sequence
  Synthetic oligonucleotide; AAG chr2 60554520 60554539 60554536 +
ctgggtctgaatgcaactga

SEQ ID NO: 170579 - DNA, 20 bp, Artificial Sequence
  Synthetic oligonucleotide; GAG chr2 60554527 60554546 60554543 +
tgaatgcaactgaaagcgcc

SEQ ID NO: 170580 - DNA, 20 bp, Artificial Sequence
  Synthetic oligonucleotide; CGG chr2 60554534 60554553 60554550 +
aactgaaagcgccgagtccc

SEQ ID NO: 170581 - DNA, 20 bp, Artificial Sequence
  Synthetic oligonucleotide; AAG chr2 60554542 60554561 60554558 +
gcgccgagtccccggctcct

SEQ ID NO: 170582 - DNA, 20 bp, Artificial Sequence
  Synthetic oligonucleotide; AGG chr2 60554543 60554562 60554559 +
cgccgagtccccggctccta

SEQ ID NO: 170583 - DNA, 20 bp, Artificial Sequence
  Synthetic oligonucleotide; GGG chr2 60554544 60554563 60554560 +
gccgagtccccggctcctaa

SEQ ID NO: 170584 - DNA, 20 bp, Artificial Sequence
  Synthetic oligonucleotide; CAG chr2 60554550 60554569 60554566 +
tccccggctcctaagggtcg

SEQ ID NO: 170585 - DNA, 20 bp, Artificial Sequence
  Synthetic oligonucleotide; AAG chr2 60554554 60554573 60554570 +
cggctcctaagggtcgcaga

SEQ ID NO: 170586 - DNA, 20 bp, Artificial Sequence
  Synthetic oligonucleotide; GAG chr2 60554556 60554575 60554572 +
gctcctaagggtcgcagaaa

SEQ ID NO: 170587 - DNA, 20 bp, Artificial Sequence
  Synthetic oligonucleotide; GAG chr2 60554558 60554577 60554574 +
tcctaagggtcgcagaaaga

SEQ ID NO: 170588 - DNA, 20 bp, Artificial Sequence
  Synthetic oligonucleotide; GAG chr2 60554564 60554583 60554580 +
gggtcgcagaaagagagccc

SEQ ID NO: 170589 - DNA, 20 bp, Artificial Sequence
  Synthetic oligonucleotide; AGG chr2 60554565 60554584 60554581 +
ggtcgcagaaagagagcccg

SEQ ID NO: 170590 - DNA, 20 bp, Artificial Sequence
  Synthetic oligonucleotide; AAG chr2 60554572 60554591 60554588 +
gaaagagagcccgaggaata

SEQ ID NO: 170591 - DNA, 20 bp, Artificial Sequence
  Synthetic oligonucleotide; GAG chr2 60554578 60554597 60554594 +
gagcccgaggaataaagaac

SEQ ID NO: 170592 - DNA, 20 bp, Artificial Sequence
  Synthetic oligonucleotide; AGG chr2 60554579 60554598 60554595 +
agcccgaggaataaagaacg

SEQ ID NO: 170593 - DNA, 20 bp, Artificial Sequence
  Synthetic oligonucleotide; GAG chr2 60554581 60554600 60554597 +
cccgaggaataaagaacgag

SEQ ID NO: 170594 - DNA, 20 bp, Artificial Sequence
  Synthetic oligonucleotide; CAG chr2 60554585 60554604 60554601 +
aggaataaagaacgaggagc

SEQ ID NO: 170595 - DNA, 20 bp, Artificial Sequence
  Synthetic oligonucleotide; GAG chr2 60554587 60554606 60554603 +
gaataaagaacgaggagcca

SEQ ID NO: 170596 - DNA, 20 bp, Artificial Sequence
  Synthetic oligonucleotide; TGG chr2 60554592 60554611 60554608 +
aagaacgaggagccagagtc

SEQ ID NO: 170597 - DNA, 20 bp, Artificial Sequence
  Synthetic oligonucleotide; CGG chr2 60554599 60554618 60554615 +
aggagccagagtctggcccc

SEQ ID NO: 170598 - DNA, 20 bp, Artificial Sequence
  Synthetic oligonucleotide; GAG chr2 60554601 60554620 60554617 +
gagccagagtctggcccccg

SEQ ID NO: 170599 - DNA, 20 bp, Artificial Sequence
  Synthetic oligonucleotide; AGG chr2 60554602 60554621 60554618 +
agccagagtctggcccccgg

SEQ ID NO: 170600 - DNA, 20 bp, Artificial Sequence
  Synthetic oligonucleotide; GGG chr2 60554603 60554622 60554619 +
gccagagtctggcccccgga

SEQ ID NO: 170601 - DNA, 20 bp, Artificial Sequence
  Synthetic oligonucleotide; GGG chr2 60554604 60554623 60554620 +
ccagagtctggcccccggag

SEQ ID NO: 170602 - DNA, 20 bp, Artificial Sequence
  Synthetic oligonucleotide; GAG chr2 60554606 60554625 60554622 +
agagtctggcccccggaggg

SEQ ID NO: 170603 - DNA, 20 bp, Artificial Sequence
  Synthetic oligonucleotide; CGG chr2 60554612 60554631 60554628 +
tggcccccggaggggagcgc

SEQ ID NO: 170604 - DNA, 20 bp, Artificial Sequence
  Synthetic oligonucleotide; GGG chr2 60554613 60554632 60554629 +
ggcccccggaggggagcgcc

SEQ ID NO: 170605 - DNA, 20 bp, Artificial Sequence
  Synthetic oligonucleotide; GGG chr2 60554614 60554633 60554630 +
gcccccggaggggagcgccg

SEQ ID NO: 170606 - DNA, 20 bp, Artificial Sequence
  Synthetic oligonucleotide; GGG chr2 60554615 60554634 60554631 +
cccccggaggggagcgccgg

SEQ ID NO: 170607 - DNA, 20 bp, Artificial Sequence
  Synthetic oligonucleotide; TGG chr2 60554620 60554639 60554636 +
ggaggggagcgccgggggcc

SEQ ID NO: 170608 - DNA, 20 bp, Artificial Sequence
  Synthetic oligonucleotide; GGG chr2 60554621 60554640 60554637 +
gaggggagcgccgggggcct

SEQ ID NO: 170609 - DNA, 20 bp, Artificial Sequence
  Synthetic oligonucleotide; AAG chr2 60554625 60554644 60554641 +
ggagcgccgggggcctgggc

SEQ ID NO: 170610 - DNA, 20 bp, Artificial Sequence
  Synthetic oligonucleotide; GAG chr2 60554627 60554646 60554643 +
agcgccgggggcctgggcaa

SEQ ID NO: 170611 - DNA, 20 bp, Artificial Sequence
  Synthetic oligonucleotide; GAG chr2 60554629 60554648 60554645 +
cgccgggggcctgggcaaga

SEQ ID NO: 170612 - DNA, 20 bp, Artificial Sequence
  Synthetic oligonucleotide; AGG chr2 60554630 60554649 60554646 +
gccgggggcctgggcaagag

SEQ ID NO: 170613 - DNA, 20 bp, Artificial Sequence
  Synthetic oligonucleotide; GAG chr2 60554637 60554656 60554653 +
gcctgggcaagagaggcacc

SEQ ID NO: 170614 - DNA, 20 bp, Artificial Sequence
  Synthetic oligonucleotide; AGG chr2 60554638 60554657 60554654 +
cctgggcaagagaggcaccg

SEQ ID NO: 170615 - DNA, 20 bp, Artificial Sequence
  Synthetic oligonucleotide; GAG chr2 60554654 60554673 60554670 +
accgaggcgtccacctctct

SEQ ID NO: 170616 - DNA, 20 bp, Artificial Sequence
  Synthetic oligonucleotide; GAG chr2 60554656 60554675 60554672 +
cgaggcgtccacctctctga

SEQ ID NO: 170617 - DNA, 20 bp, Artificial Sequence
  Synthetic oligonucleotide; AGG chr2 60554657 60554676 60554673 +
gaggcgtccacctctctgag

SEQ ID NO: 170618 - DNA, 20 bp, Artificial Sequence
  Synthetic oligonucleotide; GAG chr2 60554662 60554681 60554678 +
gtccacctctctgagaggcc

SEQ ID NO: 170619 - DNA, 20 bp, Artificial Sequence
  Synthetic oligonucleotide; AGG chr2 60554663 60554682 60554679 +
tccacctctctgagaggccg

SEQ ID NO: 170620 - DNA, 20 bp, Artificial Sequence
  Synthetic oligonucleotide; AAG chr2 60554669 60554688 60554685 +
tctctgagaggccgaggaca

SEQ ID NO: 170621 - DNA, 20 bp, Artificial Sequence
  Synthetic oligonucleotide; CGG chr2 60554674 60554693 60554690 +
gagaggccgaggacaaagcg

SEQ ID NO: 170622 - DNA, 20 bp, Artificial Sequence
  Synthetic oligonucleotide; GGG chr2 60554675 60554694 60554691 +
agaggccgaggacaaagcgc

SEQ ID NO: 170623 - DNA, 20 bp, Artificial Sequence
  Synthetic oligonucleotide; CAG chr2 60554678 60554697 60554694 +
ggccgaggacaaagcgcggg

SEQ ID NO: 170624 - DNA, 20 bp, Artificial Sequence
  Synthetic oligonucleotide; CGG chr2 60554684 60554703 60554700 +
ggacaaagcgcgggcagtcc

SEQ ID NO: 170625 - DNA, 20 bp, Artificial Sequence
  Synthetic oligonucleotide; GGG chr2 60554685 60554704 60554701 +
gacaaagcgcgggcagtccc

SEQ ID NO: 170626 - DNA, 20 bp, Artificial Sequence
  Synthetic oligonucleotide; GAG chr2 60554687 60554706 60554703 +
caaagcgcgggcagtcccgg

SEQ ID NO: 170627 - DNA, 20 bp, Artificial Sequence
  Synthetic oligonucleotide; CAG chr2 60554693 60554712 60554709 +
gcgggcagtcccgggagtcc

SEQ ID NO: 170628 - DNA, 20 bp, Artificial Sequence
  Synthetic oligonucleotide; TGG chr2 60554700 60554719 60554716 +
gtcccgggagtcccagtccc

SEQ ID NO: 170629 - DNA, 20 bp, Artificial Sequence
  Synthetic oligonucleotide; GGG chr2 60554701 60554720 60554717 +
tcccgggagtcccagtccct

SEQ ID NO: 170630 - DNA, 20 bp, Artificial Sequence
  Synthetic oligonucleotide; CGG chr2 60554714 60554733 60554730 +
agtccctgggaatgtgctca

SEQ ID NO: 170631 - DNA, 20 bp, Artificial Sequence
  Synthetic oligonucleotide; CGG chr2 60554722 60554741 60554738 +
ggaatgtgctcacggcgccg

SEQ ID NO: 170632 - DNA, 20 bp, Artificial Sequence
  Synthetic oligonucleotide; GGG chr2 60554723 60554742 60554739 +
gaatgtgctcacggcgccgc

SEQ ID NO: 170633 - DNA, 20 bp, Artificial Sequence
  Synthetic oligonucleotide; GAG chr2 60554725 60554744 60554741 +
atgtgctcacggcgccgcgg

SEQ ID NO: 170634 - DNA, 20 bp, Artificial Sequence
  Synthetic oligonucleotide; AGG chr2 60554726 60554745 60554742 +
tgtgctcacggcgccgcggg

SEQ ID NO: 170635 - DNA, 20 bp, Artificial Sequence
  Synthetic oligonucleotide; GAG chr2 60554734 60554753 60554750 +
cggcgccgcgggaggtcccc

SEQ ID NO: 170636 - DNA, 20 bp, Artificial Sequence
  Synthetic oligonucleotide; CGG chr2 60554738 60554757 60554754 +
gccgcgggaggtccccgagc

SEQ ID NO: 170637 - DNA, 20 bp, Artificial Sequence
  Synthetic oligonucleotide; GGG chr2 60554739 60554758 60554755 +
ccgcgggaggtccccgagcc

SEQ ID NO: 170638 - DNA, 20 bp, Artificial Sequence
  Synthetic oligonucleotide; TGG chr2 60554746 60554765 60554762 +
aggtccccgagccgggtccc

SEQ ID NO: 170639 - DNA, 20 bp, Artificial Sequence
  Synthetic oligonucleotide; GGG chr2 60554747 60554766 60554763 +
ggtccccgagccgggtccct

SEQ ID NO: 170640 - DNA, 20 bp, Artificial Sequence
  Synthetic oligonucleotide; GAG chr2 60554749 60554768 60554765 +
tccccgagccgggtccctgg

SEQ ID NO: 170641 - DNA, 20 bp, Artificial Sequence
  Synthetic oligonucleotide; AGG chr2 60554750 60554769 60554766 +
ccccgagccgggtccctggg

SEQ ID NO: 170642 - DNA, 20 bp, Artificial Sequence
  Synthetic oligonucleotide; GGG chr2 60554751 60554770 60554767 +
cccgagccgggtccctggga

SEQ ID NO: 170643 - DNA, 20 bp, Artificial Sequence
  Synthetic oligonucleotide; CAG chr2 60554772 60554791 60554788 +
ggacacaccccctcccactc

SEQ ID NO: 170644 - DNA, 20 bp, Artificial Sequence
  Synthetic oligonucleotide; GAG chr2 60554774 60554793 60554790 +
acacaccccctcccactcca

SEQ ID NO: 170645 - DNA, 20 bp, Artificial Sequence
  Synthetic oligonucleotide; AAG chr2 60554786 60554805 60554802 +
ccactccagagcaactgcaa

SEQ ID NO: 170646 - DNA, 20 bp, Artificial Sequence
  Synthetic oligonucleotide; CAG chr2 60554791 60554810 60554807 +
ccagagcaactgcaaaagca

SEQ ID NO: 170647 - DNA, 20 bp, Artificial Sequence
  Synthetic oligonucleotide; GAG chr2 60554793 60554812 60554809 +
agagcaactgcaaaagcaca

SEQ ID NO: 170648 - DNA, 20 bp, Artificial Sequence
  Synthetic oligonucleotide; AGG chr2 60554794 60554813 60554810 +
gagcaactgcaaaagcacag

SEQ ID NO: 170649 - DNA, 20 bp, Artificial Sequence
  Synthetic oligonucleotide; GGG chr2 60554795 60554814 60554811 +
agcaactgcaaaagcacaga

SEQ ID NO: 170650 - DNA, 20 bp, Artificial Sequence
  Synthetic oligonucleotide; TGG chr2 60554799 60554818 60554815 +
actgcaaaagcacagaggga

SEQ ID NO: 170651 - DNA, 20 bp, Artificial Sequence
  Synthetic oligonucleotide; GGG chr2 60554800 60554819 60554816 +
ctgcaaaagcacagagggat

SEQ ID NO: 170652 - DNA, 20 bp, Artificial Sequence
  Synthetic oligonucleotide; AAG chr2 60554803 60554822 60554819 +
caaaagcacagagggatggg

SEQ ID NO: 170653 - DNA, 20 bp, Artificial Sequence
  Synthetic oligonucleotide; CGG chr2 60554819 60554838 60554835 +
tgggaagaaaatgtttctta

SEQ ID NO: 170654 - DNA, 20 bp, Artificial Sequence
  Synthetic oligonucleotide; GGG chr2 60554820 60554839 60554836 +
gggaagaaaatgtttcttac

SEQ ID NO: 170655 - DNA, 20 bp, Artificial Sequence
  Synthetic oligonucleotide; CAG chr2 60554823 60554842 60554839 +
aagaaaatgtttcttacggg

SEQ ID NO: 170656 - DNA, 20 bp, Artificial Sequence
  Synthetic oligonucleotide; GAG chr2 60554825 60554844 60554841 +
gaaaatgtttcttacgggca

SEQ ID NO: 170657 - DNA, 20 bp, Artificial Sequence
  Synthetic oligonucleotide; CAG chr2 60554852 60554871 60554868 +
actgttcctgtgctgttacc

SEQ ID NO: 170658 - DNA, 20 bp, Artificial Sequence
  Synthetic oligonucleotide; AGG chr2 60554853 60554872 60554869 +
ctgttcctgtgctgttaccc

SEQ ID NO: 170659 - DNA, 20 bp, Artificial Sequence
  Synthetic oligonucleotide; GGG chr2 60554854 60554873 60554870 +
tgttcctgtgctgttaccca

SEQ ID NO: 170660 - DNA, 20 bp, Artificial Sequence
  Synthetic oligonucleotide; AAG chr2 60554858 60554877 60554874 +
cctgtgctgttacccaggga

SEQ ID NO: 170661 - DNA, 20 bp, Artificial Sequence
  Synthetic oligonucleotide; GAG chr2 60554860 60554879 60554876 +
tgtgctgttacccagggaaa

SEQ ID NO: 170662 - DNA, 20 bp, Artificial Sequence
  Synthetic oligonucleotide; TGG chr2 60554867 60554886 60554883 +
ttacccagggaaagagaaaa

SEQ ID NO: 170663 - DNA, 20 bp, Artificial Sequence
  Synthetic oligonucleotide; GGG chr2 60554868 60554887 60554884 +
tacccagggaaagagaaaat

SEQ ID NO: 170664 - DNA, 20 bp, Artificial Sequence
  Synthetic oligonucleotide; TGG chr2 60554873 60554892 60554889 +
agggaaagagaaaatgggaa

SEQ ID NO: 170665 - DNA, 20 bp, Artificial Sequence
  Synthetic oligonucleotide; GAG chr2 60554875 60554894 60554891 +
ggaaagagaaaatgggaatg

SEQ ID NO: 170666 - DNA, 20 bp, Artificial Sequence
  Synthetic oligonucleotide; GAG chr2 60554877 60554896 60554893 +
aaagagaaaatgggaatgga

SEQ ID NO: 170667 - DNA, 20 bp, Artificial Sequence
  Synthetic oligonucleotide; GAG chr2 60554879 60554898 60554895 +
agagaaaatgggaatggaga

SEQ ID NO: 170668 - DNA, 20 bp, Artificial Sequence
  Synthetic oligonucleotide; GAG chr2 60554881 60554900 60554897 +
agaaaatgggaatggagaga

SEQ ID NO: 170669 - DNA, 20 bp, Artificial Sequence
  Synthetic oligonucleotide; CAG chr2 60554887 60554906 60554903 +
tgggaatggagagagagcga

SEQ ID NO: 170670 - DNA, 20 bp, Artificial Sequence
  Synthetic oligonucleotide; AGG chr2 60554888 60554907 60554904 +
gggaatggagagagagcgac

SEQ ID NO: 170671 - DNA, 20 bp, Artificial Sequence
  Synthetic oligonucleotide; CAG chr2 60554895 60554914 60554911 +
gagagagagcgacaggctcg

SEQ ID NO: 170672 - DNA, 20 bp, Artificial Sequence
  Synthetic oligonucleotide; AGG chr2 60554896 60554915 60554912 +
agagagagcgacaggctcgc

SEQ ID NO: 170673 - DNA, 20 bp, Artificial Sequence
  Synthetic oligonucleotide; GAG chr2 60554898 60554917 60554914 +
agagagcgacaggctcgcag

SEQ ID NO: 170674 - DNA, 20 bp, Artificial Sequence
  Synthetic oligonucleotide; CAG chr2 60554901 60554920 60554917 +
gagcgacaggctcgcaggag

SEQ ID NO: 170675 - DNA, 20 bp, Artificial Sequence
  Synthetic oligonucleotide; CGG chr2 60554904 60554923 60554920 +
cgacaggctcgcaggagcag

SEQ ID NO: 170676 - DNA, 20 bp, Artificial Sequence
  Synthetic oligonucleotide; GGG chr2 60554905 60554924 60554921 +
gacaggctcgcaggagcagc

SEQ ID NO: 170677 - DNA, 20 bp, Artificial Sequence
  Synthetic oligonucleotide; GGG chr2 60554906 60554925 60554922 +
acaggctcgcaggagcagcg

SEQ ID NO: 170678 - DNA, 20 bp, Artificial Sequence
  Synthetic oligonucleotide; GAG chr2 60554908 60554927 60554924 +
aggctcgcaggagcagcggg

SEQ ID NO: 170679 - DNA, 20 bp, Artificial Sequence
  Synthetic oligonucleotide; CGG chr2 60554915 60554934 60554931 +
caggagcagcggggagacca

SEQ ID NO: 170680 - DNA, 20 bp, Artificial Sequence
  Synthetic oligonucleotide; TGG chr2 60554918 60554937 60554934 +
gagcagcggggagaccacgg

SEQ ID NO: 170681 - DNA, 20 bp, Artificial Sequence
  Synthetic oligonucleotide; GAG chr2 60554922 60554941 60554938 +
agcggggagaccacggtggt

SEQ ID NO: 170682 - DNA, 20 bp, Artificial Sequence
  Synthetic oligonucleotide; CGG chr2 60554935 60554954 60554951 +
cggtggtgagatgaccgcct

SEQ ID NO: 170683 - DNA, 20 bp, Artificial Sequence
  Synthetic oligonucleotide; GGG chr2 60554936 60554955 60554952 +
ggtggtgagatgaccgcctc

SEQ ID NO: 170684 - DNA, 20 bp, Artificial Sequence
  Synthetic oligonucleotide; CAG chr2 60554955 60554974 60554971 +
cgggtcaccgccgcgctccc

SEQ ID NO: 170685 - DNA, 20 bp, Artificial Sequence
  Synthetic oligonucleotide; AGG chr2 60554956 60554975 60554972 +
gggtcaccgccgcgctcccc

SEQ ID NO: 170686 - DNA, 20 bp, Artificial Sequence
  Synthetic oligonucleotide; CGG chr2 60554965 60554984 60554981 +
ccgcgctccccaggcgccgc

SEQ ID NO: 170687 - DNA, 20 bp, Artificial Sequence
  Synthetic oligonucleotide; AAG chr2 60554970 60554989 60554986 +
ctccccaggcgccgccggcc

SEQ ID NO: 170688 - DNA, 20 bp, Artificial Sequence
  Synthetic oligonucleotide; AGG chr2 60554971 60554990 60554987 +
tccccaggcgccgccggcca

SEQ ID NO: 170689 - DNA, 20 bp, Artificial Sequence
  Synthetic oligonucleotide; CAG chr2 60554982 60555001 60554998 +
cgccggccaaggcgcacacc

SEQ ID NO: 170690 - DNA, 20 bp, Artificial Sequence
  Synthetic oligonucleotide; AGG chr2 60554983 60555002 60554999 +
gccggccaaggcgcacaccc

SEQ ID NO: 170691 - DNA, 20 bp, Artificial Sequence
  Synthetic oligonucleotide; GAG chr2 60554985 60555004 60555001 +
cggccaaggcgcacacccag

SEQ ID NO: 170692 - DNA, 20 bp, Artificial Sequence
  Synthetic oligonucleotide; CAG chr2 60554989 60555008 60555005 +
caaggcgcacacccaggagc

SEQ ID NO: 170693 - DNA, 20 bp, Artificial Sequence
  Synthetic oligonucleotide; CAG chr2 60554992 60555011 60555008 +
ggcgcacacccaggagccag

SEQ ID NO: 170694 - DNA, 20 bp, Artificial Sequence
  Synthetic oligonucleotide; CAG chr2 60555013 60555032 60555029 +
agccccctctcgcctttctg

SEQ ID NO: 170695 - DNA, 20 bp, Artificial Sequence
  Synthetic oligonucleotide; TGG chr2 60555024 60555043 60555040 +
gcctttctgcagacgttccc

SEQ ID NO: 170696 - DNA, 20 bp, Artificial Sequence
  Synthetic oligonucleotide; TAG chr2 60555031 60555050 60555047 +
tgcagacgttccctggaaat

SEQ ID NO: 170697 - DNA, 20 bp, Artificial Sequence
  Synthetic oligonucleotide; AGG chr2 60555032 60555051 60555048 +
gcagacgttccctggaaatt

SEQ ID NO: 170698 - DNA, 20 bp, Artificial Sequence
  Synthetic oligonucleotide; GGG chr2 60555033 60555052 60555049 +
cagacgttccctggaaatta

SEQ ID NO: 170699 - DNA, 20 bp, Artificial Sequence
  Synthetic oligonucleotide; AAG chr2 60555036 60555055 60555052 +
acgttccctggaaattaggg

SEQ ID NO: 170700 - DNA, 20 bp, Artificial Sequence
  Synthetic oligonucleotide; TGG chr2 60555045 60555064 60555061 +
ggaaattagggaagacctgt

SEQ ID NO: 170701 - DNA, 20 bp, Artificial Sequence
  Synthetic oligonucleotide; AAG chr2 60555110 60555129 60555126 +
cgcgtgctgccgctgtcaaa

SEQ ID NO: 170702 - DNA, 20 bp, Artificial Sequence
  Synthetic oligonucleotide; CGG chr2 60555113 60555132 60555129 +
gtgctgccgctgtcaaaaag

SEQ ID NO: 170703 - DNA, 20 bp, Artificial Sequence
  Synthetic oligonucleotide; GGG chr2 60555114 60555133 60555130 +
tgctgccgctgtcaaaaagc

SEQ ID NO: 170704 - DNA, 20 bp, Artificial Sequence
  Synthetic oligonucleotide; TGG chr2 60555125 60555144 60555141 +
tcaaaaagcgggcttcactc

SEQ ID NO: 170705 - DNA, 20 bp, Artificial Sequence
  Synthetic oligonucleotide; TGG chr2 60555130 60555149 60555146 +
aagcgggcttcactctggcg

SEQ ID NO: 170706 - DNA, 20 bp, Artificial Sequence
  Synthetic oligonucleotide; GGG chr2 60555131 60555150 60555147 +
agcgggcttcactctggcgt

SEQ ID NO: 170707 - DNA, 20 bp, Artificial Sequence
  Synthetic oligonucleotide; CAG chr2 60555141 60555160 60555157 +
actctggcgtgggatacttt

SEQ ID NO: 170708 - DNA, 20 bp, Artificial Sequence
  Synthetic oligonucleotide; CAG chr2 60555160 60555179 60555176 +
tcagttttacgtaaaatgta

SEQ ID NO: 170709 - DNA, 20 bp, Artificial Sequence
  Synthetic oligonucleotide; CAG chr2 60555166 60555185 60555182 +
ttacgtaaaatgtacagcaa

SEQ ID NO: 170710 - DNA, 20 bp, Artificial Sequence
  Synthetic oligonucleotide; TGG chr2 60555182 60555201 60555198 +
gcaacagcaccccctgcgat

SEQ ID NO: 170711 - DNA, 20 bp, Artificial Sequence
  Synthetic oligonucleotide; AAG chr2 60555186 60555205 60555202 +
cagcaccccctgcgattgga

SEQ ID NO: 170712 - DNA, 20 bp, Artificial Sequence
  Synthetic oligonucleotide; CAG chr2 60555195 60555214 60555211 +
ctgcgattggaaagtttatt

SEQ ID NO: 170713 - DNA, 20 bp, Artificial Sequence
  Synthetic oligonucleotide; AAG chr2 60555211 60555230 60555227 +
tattcagaaacgtgcctgta

SEQ ID NO: 170714 - DNA, 20 bp, Artificial Sequence
  Synthetic oligonucleotide; TGG chr2 60555219 60555238 60555235 +
aacgtgcctgtaaagtcccc

SEQ ID NO: 170715 - DNA, 20 bp, Artificial Sequence
  Synthetic oligonucleotide; CAG chr2 60555236 60555255 60555252 +
ccctggcgcctcccgcctcc

SEQ ID NO: 170716 - DNA, 20 bp, Artificial Sequence
  Synthetic oligonucleotide; CAG chr2 60555252 60555271 60555268 +
ctcccagcctccctgcctgc

SEQ ID NO: 170717 - DNA, 20 bp, Artificial Sequence
  Synthetic oligonucleotide; CAG chr2 60555265 60555284 60555281 +
tgcctgccagcaccactctg

SEQ ID NO: 170718 - DNA, 20 bp, Artificial Sequence
  Synthetic oligonucleotide; CGG chr2 60555284 60555303 60555300 +
gcagccgccgccgccgccgc

SEQ ID NO: 170719 - DNA, 20 bp, Artificial Sequence
  Synthetic oligonucleotide; GGG chr2 60555285 60555304 60555301 +
cagccgccgccgccgccgcc

SEQ ID NO: 170720 - DNA, 20 bp, Artificial Sequence
  Synthetic oligonucleotide; GGG chr2 60555286 60555305 60555302 +
agccgccgccgccgccgccg

SEQ ID NO: 170721 - DNA, 20 bp, Artificial Sequence
  Synthetic oligonucleotide; GAG chr2 60555288 60555307 60555304 +
ccgccgccgccgccgccggg

SEQ ID NO: 170722 - DNA, 20 bp, Artificial Sequence
  Synthetic oligonucleotide; CAG chr2 60555295 60555314 60555311 +
cgccgccgccggggagatcg

SEQ ID NO: 170723 - DNA, 20 bp, Artificial Sequence
  Synthetic oligonucleotide; TGG chr2 60555312 60555331 60555328 +
tcgcagtccgattccaaatc

SEQ ID NO: 170724 - DNA, 20 bp, Artificial Sequence
  Synthetic oligonucleotide; AAG chr2 60555315 60555334 60555331 +
cagtccgattccaaatctgg

SEQ ID NO: 170725 - DNA, 20 bp, Artificial Sequence
  Synthetic oligonucleotide; AGG chr2 60555316 60555335 60555332 +
agtccgattccaaatctgga

SEQ ID NO: 170726 - DNA, 20 bp, Artificial Sequence
  Synthetic oligonucleotide; GAG chr2 60555318 60555337 60555334 +
tccgattccaaatctggaag

SEQ ID NO: 170727 - DNA, 20 bp, Artificial Sequence
  Synthetic oligonucleotide; TGG chr2 60555322 60555341 60555338 +
attccaaatctggaaggagt

SEQ ID NO: 170728 - DNA, 20 bp, Artificial Sequence
  Synthetic oligonucleotide; GGG chr2 60555323 60555342 60555339 +
ttccaaatctggaaggagtt

SEQ ID NO: 170729 - DNA, 20 bp, Artificial Sequence
  Synthetic oligonucleotide; GGG chr2 60555324 60555343 60555340 +
tccaaatctggaaggagttg

SEQ ID NO: 170730 - DNA, 20 bp, Artificial Sequence
  Synthetic oligonucleotide; GGG chr2 60555325 60555344 60555341 +
ccaaatctggaaggagttgg

SEQ ID NO: 170731 - DNA, 20 bp, Artificial Sequence
  Synthetic oligonucleotide; GGG chr2 60555326 60555345 60555342 +
caaatctggaaggagttggg

SEQ ID NO: 170732 - DNA, 20 bp, Artificial Sequence
  Synthetic oligonucleotide; GAG chr2 60555328 60555347 60555344 +
aatctggaaggagttggggg

SEQ ID NO: 170733 - DNA, 20 bp, Artificial Sequence
  Synthetic oligonucleotide; GAG chr2 60555330 60555349 60555346 +
tctggaaggagttgggggga

SEQ ID NO: 170734 - DNA, 20 bp, Artificial Sequence
  Synthetic oligonucleotide; AGG chr2 60555331 60555350 60555347 +
ctggaaggagttggggggag

SEQ ID NO: 170735 - DNA, 20 bp, Artificial Sequence
  Synthetic oligonucleotide; GAG chr2 60555333 60555352 60555349 +
ggaaggagttggggggagag

SEQ ID NO: 170736 - DNA, 20 bp, Artificial Sequence
  Synthetic oligonucleotide; TGG chr2 60555338 60555357 60555354 +
gagttggggggagaggagaa

SEQ ID NO: 170737 - DNA, 20 bp, Artificial Sequence
  Synthetic oligonucleotide; CAG chr2 60555344 60555363 60555360 +
gggggagaggagaatggact

SEQ ID NO: 170738 - DNA, 20 bp, Artificial Sequence
  Synthetic oligonucleotide; AGG chr2 60555345 60555364 60555361 +
ggggagaggagaatggactc

SEQ ID NO: 170739 - DNA, 20 bp, Artificial Sequence
  Synthetic oligonucleotide; AAG chr2 60555351 60555370 60555367 +
aggagaatggactcaggtcc

SEQ ID NO: 170740 - DNA, 20 bp, Artificial Sequence
  Synthetic oligonucleotide; AGG chr2 60555352 60555371 60555368 +
ggagaatggactcaggtcca

SEQ ID NO: 170741 - DNA, 20 bp, Artificial Sequence
  Synthetic oligonucleotide; GGG chr2 60555353 60555372 60555369 +
gagaatggactcaggtccaa

SEQ ID NO: 170742 - DNA, 20 bp, Artificial Sequence
  Synthetic oligonucleotide; GAG chr2 60555355 60555374 60555371 +
gaatggactcaggtccaagg

SEQ ID NO: 170743 - DNA, 20 bp, Artificial Sequence
  Synthetic oligonucleotide; AGG chr2 60555356 60555375 60555372 +
aatggactcaggtccaaggg

SEQ ID NO: 170744 - DNA, 20 bp, Artificial Sequence
  Synthetic oligonucleotide; CGG chr2 60555361 60555380 60555377 +
actcaggtccaagggaggtg

SEQ ID NO: 170745 - DNA, 20 bp, Artificial Sequence
  Synthetic oligonucleotide; GAG chr2 60555363 60555382 60555379 +
tcaggtccaagggaggtgcg

SEQ ID NO: 170746 - DNA, 20 bp, Artificial Sequence
  Synthetic oligonucleotide; AGG chr2 60555364 60555383 60555380 +
caggtccaagggaggtgcgg

SEQ ID NO: 170747 - DNA, 20 bp, Artificial Sequence
  Synthetic oligonucleotide; GGG chr2 60555365 60555384 60555381 +
aggtccaagggaggtgcgga

SEQ ID NO: 170748 - DNA, 20 bp, Artificial Sequence
  Synthetic oligonucleotide; CAG chr2 60555370 60555389 60555386 +
caagggaggtgcggagggtg

SEQ ID NO: 170749 - DNA, 20 bp, Artificial Sequence
  Synthetic oligonucleotide; AGG chr2 60555371 60555390 60555387 +
aagggaggtgcggagggtgc

SEQ ID NO: 170750 - DNA, 20 bp, Artificial Sequence
  Synthetic oligonucleotide; GGG chr2 60555372 60555391 60555388 +
agggaggtgcggagggtgca

SEQ ID NO: 170751 - DNA, 20 bp, Artificial Sequence
  Synthetic oligonucleotide; TGG chr2 60555375 60555394 60555391 +
gaggtgcggagggtgcaggg

SEQ ID NO: 170752 - DNA, 20 bp, Artificial Sequence
  Synthetic oligonucleotide; GAG chr2 60555377 60555396 60555393 +
ggtgcggagggtgcagggtg

SEQ ID NO: 170753 - DNA, 20 bp, Artificial Sequence
  Synthetic oligonucleotide; CGG chr2 60555381 60555400 60555397 +
cggagggtgcagggtggaga

SEQ ID NO: 170754 - DNA, 20 bp, Artificial Sequence
  Synthetic oligonucleotide; GGG chr2 60555382 60555401 60555398 +
ggagggtgcagggtggagac

SEQ ID NO: 170755 - DNA, 20 bp, Artificial Sequence
  Synthetic oligonucleotide; TGG chr2 60555391 60555410 60555407 +
agggtggagacgggtcgcca

SEQ ID NO: 170756 - DNA, 20 bp, Artificial Sequence
  Synthetic oligonucleotide; GAG chr2 60555399 60555418 60555415 +
gacgggtcgccatggcccgc

SEQ ID NO: 170757 - DNA, 20 bp, Artificial Sequence
  Synthetic oligonucleotide; GAG chr2 60555407 60555426 60555423 +
gccatggcccgcgagaccct

SEQ ID NO: 170758 - DNA, 20 bp, Artificial Sequence
  Synthetic oligonucleotide; CAG chr2 60555413 60555432 60555429 +
gcccgcgagaccctgagctg

SEQ ID NO: 170759 - DNA, 20 bp, Artificial Sequence
  Synthetic oligonucleotide; AGG chr2 60555414 60555433 60555430 +
cccgcgagaccctgagctgc

SEQ ID NO: 170760 - DNA, 20 bp, Artificial Sequence
  Synthetic oligonucleotide; TGG chr2 60555417 60555436 60555433 +
gcgagaccctgagctgcagg

SEQ ID NO: 170761 - DNA, 20 bp, Artificial Sequence
  Synthetic oligonucleotide; GAG chr2 60555428 60555447 60555444 +
agctgcaggtggatatgtgt

SEQ ID NO: 170762 - DNA, 20 bp, Artificial Sequence
  Synthetic oligonucleotide; CAG chr2 60555439 60555458 60555455 +
gatatgtgtgagtgtgtctg

SEQ ID NO: 170763 - DNA, 20 bp, Artificial Sequence
  Synthetic oligonucleotide; GAG chr2 60555441 60555460 60555457 +
tatgtgtgagtgtgtctgca

SEQ ID NO: 170764 - DNA, 20 bp, Artificial Sequence
  Synthetic oligonucleotide; GAG chr2 60555445 60555464 60555461 +
tgtgagtgtgtctgcagagc

SEQ ID NO: 170765 - DNA, 20 bp, Artificial Sequence
  Synthetic oligonucleotide; AGG chr2 60555446 60555465 60555462 +
gtgagtgtgtctgcagagcg

SEQ ID NO: 170766 - DNA, 20 bp, Artificial Sequence
  Synthetic oligonucleotide; GAG chr2 60555448 60555467 60555464 +
gagtgtgtctgcagagcgag

SEQ ID NO: 170767 - DNA, 20 bp, Artificial Sequence
  Synthetic oligonucleotide; CGG chr2 60555468 60555487 60555484 +
gagccctccttccctctcct

SEQ ID NO: 170768 - DNA, 20 bp, Artificial Sequence
  Synthetic oligonucleotide; GAG chr2 60555470 60555489 60555486 +
gccctccttccctctcctcg

SEQ ID NO: 170769 - DNA, 20 bp, Artificial Sequence
  Synthetic oligonucleotide; CGG chr2 60555473 60555492 60555489 +
ctccttccctctcctcggag

SEQ ID NO: 170770 - DNA, 20 bp, Artificial Sequence
  Synthetic oligonucleotide; CAG chr2 60555508 60555527 60555524 +
cgtcttctcatccccctctt

SEQ ID NO: 170771 - DNA, 20 bp, Artificial Sequence
  Synthetic oligonucleotide; AAG chr2 60555515 60555534 60555531 +
tcatccccctcttcagtcta

SEQ ID NO: 170772 - DNA, 20 bp, Artificial Sequence
  Synthetic oligonucleotide; AGG chr2 60555516 60555535 60555532 +
catccccctcttcagtctaa

SEQ ID NO: 170773 - DNA, 20 bp, Artificial Sequence
  Synthetic oligonucleotide; GGG chr2 60555517 60555536 60555533 +
atccccctcttcagtctaaa

SEQ ID NO: 170774 - DNA, 20 bp, Artificial Sequence
  Synthetic oligonucleotide; CGG chr2 60555545 60555564 60555561 +
cttccgtaaactcacccacc

SEQ ID NO: 170775 - DNA, 20 bp, Artificial Sequence
  Synthetic oligonucleotide; TGG chr2 60555548 60555567 60555564 +
ccgtaaactcacccacccgg

SEQ ID NO: 170776 - DNA, 20 bp, Artificial Sequence
  Synthetic oligonucleotide; GGG chr2 60555549 60555568 60555565 +
cgtaaactcacccacccggt

SEQ ID NO: 170777 - DNA, 20 bp, Artificial Sequence
  Synthetic oligonucleotide; GGG chr2 60555550 60555569 60555566 +
gtaaactcacccacccggtg

SEQ ID NO: 170778 - DNA, 20 bp, Artificial Sequence
  Synthetic oligonucleotide; GGG chr2 60555551 60555570 60555567 +
taaactcacccacccggtgg

SEQ ID NO: 170779 - DNA, 20 bp, Artificial Sequence
  Synthetic oligonucleotide; GGG chr2 60555552 60555571 60555568 +
aaactcacccacccggtggg

SEQ ID NO: 170780 - DNA, 20 bp, Artificial Sequence
  Synthetic oligonucleotide; GGG chr2 60555553 60555572 60555569 +
aactcacccacccggtgggg

SEQ ID NO: 170781 - DNA, 20 bp, Artificial Sequence
  Synthetic oligonucleotide; AAG chr2 60555568 60555587 60555584 +
tgggggggctttattgtttt

SEQ ID NO: 170782 - DNA, 20 bp, Artificial Sequence
  Synthetic oligonucleotide; GAG chr2 60555572 60555591 60555588 +
ggggctttattgttttaagc

SEQ ID NO: 170783 - DNA, 20 bp, Artificial Sequence
  Synthetic oligonucleotide; AGG chr2 60555573 60555592 60555589 +
gggctttattgttttaagcg

SEQ ID NO: 170784 - DNA, 20 bp, Artificial Sequence
  Synthetic oligonucleotide; GGG chr2 60555574 60555593 60555590 +
ggctttattgttttaagcga

SEQ ID NO: 170785 - DNA, 20 bp, Artificial Sequence
  Synthetic oligonucleotide; CGG chr2 60555580 60555599 60555596 +
attgttttaagcgagggccc

SEQ ID NO: 170786 - DNA, 20 bp, Artificial Sequence
  Synthetic oligonucleotide; GGG chr2 60555581 60555600 60555597 +
ttgttttaagcgagggcccc

SEQ ID NO: 170787 - DNA, 20 bp, Artificial Sequence
  Synthetic oligonucleotide; CAG chr2 60555607 60555626 60555623 +
gcacgcgctcacccatcccg

SEQ ID NO: 170788 - DNA, 20 bp, Artificial Sequence
  Synthetic oligonucleotide; CGG chr2 60555616 60555635 60555632 +
cacccatcccgcagccctgc

SEQ ID NO: 170789 - DNA, 20 bp, Artificial Sequence
  Synthetic oligonucleotide; AAG chr2 60555620 60555639 60555636 +
catcccgcagccctgccggc

SEQ ID NO: 170790 - DNA, 20 bp, Artificial Sequence
  Synthetic oligonucleotide; CGG chr2 60555623 60555642 60555639 +
cccgcagccctgccggcaag

SEQ ID NO: 170791 - DNA, 20 bp, Artificial Sequence
  Synthetic oligonucleotide; TAG chr2 60555647 60555666 60555663 +
tgtttattcctgtttcgtct

SEQ ID NO: 170792 - DNA, 20 bp, Artificial Sequence
  Synthetic oligonucleotide; AAG chr2 60555652 60555671 60555668 +
attcctgtttcgtcttagta

SEQ ID NO: 170793 - DNA, 20 bp, Artificial Sequence
  Synthetic oligonucleotide; AAG chr2 60555659 60555678 60555675 +
tttcgtcttagtaaagtttc

SEQ ID NO: 170794 - DNA, 20 bp, Artificial Sequence
  Synthetic oligonucleotide; TAG chr2 60555672 60555691 60555688 +
aagtttcaagtctactgtgt

SEQ ID NO: 170795 - DNA, 20 bp, Artificial Sequence
  Synthetic oligonucleotide; TGG chr2 60555683 60555702 60555699 +
ctactgtgttagaaaatgac

SEQ ID NO: 170796 - DNA, 20 bp, Artificial Sequence
  Synthetic oligonucleotide; TAG chr2 60555692 60555711 60555708 +
tagaaaatgactggcttgcc

SEQ ID NO: 170797 - DNA, 20 bp, Artificial Sequence
  Synthetic oligonucleotide; CGG chr2 60555697 60555716 60555713 +
aatgactggcttgcctagct

SEQ ID NO: 170798 - DNA, 20 bp, Artificial Sequence
  Synthetic oligonucleotide; CGG chr2 60555700 60555719 60555716 +
gactggcttgcctagctcgg

SEQ ID NO: 170799 - DNA, 20 bp, Artificial Sequence
  Synthetic oligonucleotide; GAG chr2 60555702 60555721 60555718 +
ctggcttgcctagctcggcg

SEQ ID NO: 170800 - DNA, 20 bp, Artificial Sequence
  Synthetic oligonucleotide; CGG chr2 60555708 60555727 60555724 +
tgcctagctcggcggagctt

SEQ ID NO: 170801 - DNA, 20 bp, Artificial Sequence
  Synthetic oligonucleotide; AAG chr2 60555719 60555738 60555735 +
gcggagcttcggacccctct

SEQ ID NO: 170802 - DNA, 20 bp, Artificial Sequence
  Synthetic oligonucleotide; AGG chr2 60555720 60555739 60555736 +
cggagcttcggacccctcta

SEQ ID NO: 170803 - DNA, 20 bp, Artificial Sequence
  Synthetic oligonucleotide; AAG chr2 60555723 60555742 60555739 +
agcttcggacccctctaagg

SEQ ID NO: 170804 - DNA, 20 bp, Artificial Sequence
  Synthetic oligonucleotide; AAG chr2 60555728 60555747 60555744 +
cggacccctctaaggaagaa

SEQ ID NO: 170805 - DNA, 20 bp, Artificial Sequence
  Synthetic oligonucleotide; AGG chr2 60555729 60555748 60555745 +
ggacccctctaaggaagaaa

SEQ ID NO: 170806 - DNA, 20 bp, Artificial Sequence
  Synthetic oligonucleotide; GAG chr2 60555731 60555750 60555747 +
acccctctaaggaagaaaag

SEQ ID NO: 170807 - DNA, 20 bp, Artificial Sequence
  Synthetic oligonucleotide; AGG chr2 60555732 60555751 60555748 +
cccctctaaggaagaaaagg

SEQ ID NO: 170808 - DNA, 20 bp, Artificial Sequence
  Synthetic oligonucleotide; GAG chr2 60555752 60555771 60555768 +
aggttttgatgctcaacatt

SEQ ID NO: 170809 - DNA, 20 bp, Artificial Sequence
  Synthetic oligonucleotide; GAG chr2 60555754 60555773 60555770 +
gttttgatgctcaacattga

SEQ ID NO: 170810 - DNA, 20 bp, Artificial Sequence
  Synthetic oligonucleotide; GAG chr2 60555756 60555775 60555772 +
tttgatgctcaacattgaga

SEQ ID NO: 170811 - DNA, 20 bp, Artificial Sequence
  Synthetic oligonucleotide; TGG chr2 60555762 60555781 60555778 +
gctcaacattgagagagatg

SEQ ID NO: 170812 - DNA, 20 bp, Artificial Sequence
  Synthetic oligonucleotide; GGG chr2 60555763 60555782 60555779 +
ctcaacattgagagagatgt

SEQ ID NO: 170813 - DNA, 20 bp, Artificial Sequence
  Synthetic oligonucleotide; TGG chr2 60555772 60555791 60555788 +
gagagagatgtgggctgtac

SEQ ID NO: 170814 - DNA, 20 bp, Artificial Sequence
  Synthetic oligonucleotide; GGG chr2 60555773 60555792 60555789 +
agagagatgtgggctgtact

SEQ ID NO: 170815 - DNA, 20 bp, Artificial Sequence
  Synthetic oligonucleotide; TGG chr2 60555788 60555807 60555804 +
gtactgggattgtgtcaatg

SEQ ID NO: 170816 - DNA, 20 bp, Artificial Sequence
  Synthetic oligonucleotide; CAG chr2 60555816 60555835 60555832 +
tgtttgttgttgtttccctc

SEQ ID NO: 170817 - DNA, 20 bp, Artificial Sequence
  Synthetic oligonucleotide; TGG chr2 60555823 60555842 60555839 +
tgttgtttccctccagtttg

SEQ ID NO: 170818 - DNA, 20 bp, Artificial Sequence
  Synthetic oligonucleotide; GGG chr2 60555824 60555843 60555840 +
gttgtttccctccagtttgt

SEQ ID NO: 170819 - DNA, 20 bp, Artificial Sequence
  Synthetic oligonucleotide; GAG chr2 60555826 60555845 60555842 +
tgtttccctccagtttgtgg

SEQ ID NO: 170820 - DNA, 20 bp, Artificial Sequence
  Synthetic oligonucleotide; AGG chr2 60555827 60555846 60555843 +
gtttccctccagtttgtggg

SEQ ID NO: 170821 - DNA, 20 bp, Artificial Sequence
  Synthetic oligonucleotide; GGG chr2 60555828 60555847 60555844 +
tttccctccagtttgtggga

SEQ ID NO: 170822 - DNA, 20 bp, Artificial Sequence
  Synthetic oligonucleotide; GAG chr2 60555830 60555849 60555846 +
tccctccagtttgtgggagg

SEQ ID NO: 170823 - DNA, 20 bp, Artificial Sequence
  Synthetic oligonucleotide; AAG chr2 60555849 60555868 60555865 +
ggagacctcaaattctgttt

SEQ ID NO: 170824 - DNA, 20 bp, Artificial Sequence
  Synthetic oligonucleotide; AAG chr2 60555852 60555871 60555868 +
gacctcaaattctgtttaag

SEQ ID NO: 170825 - DNA, 20 bp, Artificial Sequence
  Synthetic oligonucleotide; CGG chr2 60555855 60555874 60555871 +
ctcaaattctgtttaagaag

SEQ ID NO: 170826 - DNA, 20 bp, Artificial Sequence
  Synthetic oligonucleotide; GGG chr2 60555856 60555875 60555872 +
tcaaattctgtttaagaagc

SEQ ID NO: 170827 - DNA, 20 bp, Artificial Sequence
  Synthetic oligonucleotide; GAG chr2 60555858 60555877 60555874 +
aaattctgtttaagaagcgg

SEQ ID NO: 170828 - DNA, 20 bp, Artificial Sequence
  Synthetic oligonucleotide; AGG chr2 60555859 60555878 60555875 +
aattctgtttaagaagcggg

SEQ ID NO: 170829 - DNA, 20 bp, Artificial Sequence
  Synthetic oligonucleotide; TAG chr2 60555868 60555887 60555884 +
taagaagcgggaggattcac

SEQ ID NO: 170830 - DNA, 20 bp, Artificial Sequence
  Synthetic oligonucleotide; AAG chr2 60555871 60555890 60555887 +
gaagcgggaggattcactag

SEQ ID NO: 170831 - DNA, 20 bp, Artificial Sequence
  Synthetic oligonucleotide; AAG chr2 60555876 60555895 60555892 +
gggaggattcactagaagtt

SEQ ID NO: 170832 - DNA, 20 bp, Artificial Sequence
  Synthetic oligonucleotide; TAG chr2 60555884 60555903 60555900 +
tcactagaagttaagctctg

SEQ ID NO: 170833 - DNA, 20 bp, Artificial Sequence
  Synthetic oligonucleotide; GAG chr2 60555918 60555937 60555934 +
caccatttccccttttcact

SEQ ID NO: 170834 - DNA, 20 bp, Artificial Sequence
  Synthetic oligonucleotide; CAG chr2 60555926 60555945 60555942 +
ccccttttcactgagttctt

SEQ ID NO: 170835 - DNA, 20 bp, Artificial Sequence
  Synthetic oligonucleotide; GAG chr2 60555928 60555947 60555944 +
ccttttcactgagttcttca

SEQ ID NO: 170836 - DNA, 20 bp, Artificial Sequence
  Synthetic oligonucleotide; CAG chr2 60555931 60555950 60555947 +
tttcactgagttcttcagag

SEQ ID NO: 170837 - DNA, 20 bp, Artificial Sequence
  Synthetic oligonucleotide; AGG chr2 60555932 60555951 60555948 +
ttcactgagttcttcagagc

SEQ ID NO: 170838 - DNA, 20 bp, Artificial Sequence
  Synthetic oligonucleotide; CAG chr2 60555936 60555955 60555952 +
ctgagttcttcagagcaggt

SEQ ID NO: 170839 - DNA, 20 bp, Artificial Sequence
  Synthetic oligonucleotide; CAG chr2 60555955 60555974 60555971 +
tcagcatctctattccacca

SEQ ID NO: 170840 - DNA, 20 bp, Artificial Sequence
  Synthetic oligonucleotide; CAG chr2 60555980 60555999 60555996 +
tgctttttgtcttgttaaac

SEQ ID NO: 170841 - DNA, 20 bp, Artificial Sequence
  Synthetic oligonucleotide; TGG chr2 60555986 60556005 60556002 +
ttgtcttgttaaaccagcct

SEQ ID NO: 170842 - DNA, 20 bp, Artificial Sequence
  Synthetic oligonucleotide; GAG chr2 60555988 60556007 60556004 +
gtcttgttaaaccagccttg

SEQ ID NO: 170843 - DNA, 20 bp, Artificial Sequence
  Synthetic oligonucleotide; AAG chr2 60555998 60556017 60556014 +
accagccttggagtcaccaa

SEQ ID NO: 170844 - DNA, 20 bp, Artificial Sequence
  Synthetic oligonucleotide; TGG chr2 60556011 60556030 60556027 +
tcaccaaaagaatgtcttct

SEQ ID NO: 170845 - DNA, 20 bp, Artificial Sequence
  Synthetic oligonucleotide; GGG chr2 60556012 60556031 60556028 +
caccaaaagaatgtcttctt

SEQ ID NO: 170846 - DNA, 20 bp, Artificial Sequence
  Synthetic oligonucleotide; GGG chr2 60556013 60556032 60556029 +
accaaaagaatgtcttcttg

SEQ ID NO: 170847 - DNA, 20 bp, Artificial Sequence
  Synthetic oligonucleotide; GGG chr2 60556014 60556033 60556030 +
ccaaaagaatgtcttcttgg

SEQ ID NO: 170848 - DNA, 20 bp, Artificial Sequence
  Synthetic oligonucleotide; GGG chr2 60556015 60556034 60556031 +
caaaagaatgtcttcttggg

SEQ ID NO: 170849 - DNA, 20 bp, Artificial Sequence
  Synthetic oligonucleotide; TGG chr2 60556018 60556037 60556034 +
aagaatgtcttcttgggggg

SEQ ID NO: 170850 - DNA, 20 bp, Artificial Sequence
  Synthetic oligonucleotide; CGG chr2 60556021 60556040 60556037 +
aatgtcttcttggggggtgg

SEQ ID NO: 170851 - DNA, 20 bp, Artificial Sequence
  Synthetic oligonucleotide; GGG chr2 60556022 60556041 60556038 +
atgtcttcttggggggtggc

SEQ ID NO: 170852 - DNA, 20 bp, Artificial Sequence
  Synthetic oligonucleotide; GGG chr2 60556023 60556042 60556039 +
tgtcttcttggggggtggcg

SEQ ID NO: 170853 - DNA, 20 bp, Artificial Sequence
  Synthetic oligonucleotide; GGG chr2 60556024 60556043 60556040 +
gtcttcttggggggtggcgg

SEQ ID NO: 170854 - DNA, 20 bp, Artificial Sequence
  Synthetic oligonucleotide; GAG chr2 60556026 60556045 60556042 +
cttcttggggggtggcgggg

SEQ ID NO: 170855 - DNA, 20 bp, Artificial Sequence
  Synthetic oligonucleotide; AGG chr2 60556027 60556046 60556043 +
ttcttggggggtggcggggg

SEQ ID NO: 170856 - DNA, 20 bp, Artificial Sequence
  Synthetic oligonucleotide; TGG chr2 60556036 60556055 60556052 +
ggtggcgggggaggacgacg

SEQ ID NO: 170857 - DNA, 20 bp, Artificial Sequence
  Synthetic oligonucleotide; GGG chr2 60556037 60556056 60556053 +
gtggcgggggaggacgacgt

SEQ ID NO: 170858 - DNA, 20 bp, Artificial Sequence
  Synthetic oligonucleotide; GGG chr2 60556038 60556057 60556054 +
tggcgggggaggacgacgtg

SEQ ID NO: 170859 - DNA, 20 bp, Artificial Sequence
  Synthetic oligonucleotide; GGG chr2 60556039 60556058 60556055 +
ggcgggggaggacgacgtgg

SEQ ID NO: 170860 - DNA, 20 bp, Artificial Sequence
  Synthetic oligonucleotide; CGG chr2 60556043 60556062 60556059 +
ggggaggacgacgtggggga

SEQ ID NO: 170861 - DNA, 20 bp, Artificial Sequence
  Synthetic oligonucleotide; TGG chr2 60556047 60556066 60556063 +
aggacgacgtgggggacggt

SEQ ID NO: 170862 - DNA, 20 bp, Artificial Sequence
  Synthetic oligonucleotide; GAG chr2 60556049 60556068 60556065 +
gacgacgtgggggacggttg

SEQ ID NO: 170863 - DNA, 20 bp, Artificial Sequence
  Synthetic oligonucleotide; AGG chr2 60556050 60556069 60556066 +
acgacgtgggggacggttgg

SEQ ID NO: 170864 - DNA, 20 bp, Artificial Sequence
  Synthetic oligonucleotide; GGG chr2 60556051 60556070 60556067 +
cgacgtgggggacggttgga

SEQ ID NO: 170865 - DNA, 20 bp, Artificial Sequence
  Synthetic oligonucleotide; AAG chr2 60556054 60556073 60556070 +
cgtgggggacggttggaggg

SEQ ID NO: 170866 - DNA, 20 bp, Artificial Sequence
  Synthetic oligonucleotide; AGG chr2 60556055 60556074 60556071 +
gtgggggacggttggaggga

SEQ ID NO: 170867 - DNA, 20 bp, Artificial Sequence
  Synthetic oligonucleotide; AAG chr2 60556060 60556079 60556076 +
ggacggttggagggaaggtg

SEQ ID NO: 170868 - DNA, 20 bp, Artificial Sequence
  Synthetic oligonucleotide; GAG chr2 60556062 60556081 60556078 +
acggttggagggaaggtgaa

SEQ ID NO: 170869 - DNA, 20 bp, Artificial Sequence
  Synthetic oligonucleotide; GAG chr2 60556064 60556083 60556080 +
ggttggagggaaggtgaaga

SEQ ID NO: 170870 - DNA, 20 bp, Artificial Sequence
  Synthetic oligonucleotide; AGG chr2 60556065 60556084 60556081 +
gttggagggaaggtgaagag

SEQ ID NO: 170871 - DNA, 20 bp, Artificial Sequence
  Synthetic oligonucleotide; GGG chr2 60556066 60556085 60556082 +
ttggagggaaggtgaagaga

SEQ ID NO: 170872 - DNA, 20 bp, Artificial Sequence
  Synthetic oligonucleotide; AAG chr2 60556069 60556088 60556085 +
gagggaaggtgaagagaggg

SEQ ID NO: 170873 - DNA, 20 bp, Artificial Sequence
  Synthetic oligonucleotide; AAG chr2 60556072 60556091 60556088 +
ggaaggtgaagagagggaag

SEQ ID NO: 170874 - DNA, 20 bp, Artificial Sequence
  Synthetic oligonucleotide; AAG chr2 60556076 60556095 60556092 +
ggtgaagagagggaagaaga

SEQ ID NO: 170875 - DNA, 20 bp, Artificial Sequence
  Synthetic oligonucleotide; TGG chr2 60556085 60556104 60556101 +
agggaagaagaaagtgcaac

SEQ ID NO: 170876 - DNA, 20 bp, Artificial Sequence
  Synthetic oligonucleotide; GGG chr2 60556086 60556105 60556102 +
gggaagaagaaagtgcaact

SEQ ID NO: 170877 - DNA, 20 bp, Artificial Sequence
  Synthetic oligonucleotide; GAG chr2 60556088 60556107 60556104 +
gaagaagaaagtgcaactgg

SEQ ID NO: 170878 - DNA, 20 bp, Artificial Sequence
  Synthetic oligonucleotide; AGG chr2 60556089 60556108 60556105 +
aagaagaaagtgcaactggg

SEQ ID NO: 170879 - DNA, 20 bp, Artificial Sequence
  Synthetic oligonucleotide; AAG chr2 60556114 60556133 60556130 +
tttgaaaaataaataaataa

SEQ ID NO: 170880 - DNA, 20 bp, Artificial Sequence
  Synthetic oligonucleotide; AAG chr2 60556119 60556138 60556135 +
aaaataaataaataaaagaa

SEQ ID NO: 170881 - DNA, 20 bp, Artificial Sequence
  Synthetic oligonucleotide; CAG chr2 60556128 60556147 60556144 +
aaataaaagaaaagcccctt

SEQ ID NO: 170882 - DNA, 20 bp, Artificial Sequence
  Synthetic oligonucleotide; AGG chr2 60556129 60556148 60556145 +
aataaaagaaaagccccttc

SEQ ID NO: 170883 - DNA, 20 bp, Artificial Sequence
  Synthetic oligonucleotide; TAG chr2 60556138 60556157 60556154 +
aaagccccttcaggtaacaa

SEQ ID NO: 170884 - DNA, 20 bp, Artificial Sequence
  Synthetic oligonucleotide; GAG chr2 60556142 60556161 60556158 +
ccccttcaggtaacaatagt

SEQ ID NO: 170885 - DNA, 20 bp, Artificial Sequence
  Synthetic oligonucleotide; CAG chr2 60556146 60556165 60556162 +
ttcaggtaacaatagtgagc

SEQ ID NO: 170886 - DNA, 20 bp, Artificial Sequence
  Synthetic oligonucleotide; CAG chr2 60556156 60556175 60556172 +
aatagtgagccagattcttt

SEQ ID NO: 170887 - DNA, 20 bp, Artificial Sequence
  Synthetic oligonucleotide; AAG chr2 60556163 60556182 60556179 +
agccagattctttcagaacc

SEQ ID NO: 170888 - DNA, 20 bp, Artificial Sequence
  Synthetic oligonucleotide; CAG chr2 60556171 60556190 60556187 +
tctttcagaaccaagctttt

SEQ ID NO: 170889 - DNA, 20 bp, Artificial Sequence
  Synthetic oligonucleotide; AAG chr2 60556203 60556222 60556219 +
ttgttcccacccgtccataa

SEQ ID NO: 170890 - DNA, 20 bp, Artificial Sequence
  Synthetic oligonucleotide; TAG chr2 60556214 60556233 60556230 +
cgtccataaaagtccatcta

SEQ ID NO: 170891 - DNA, 20 bp, Artificial Sequence
  Synthetic oligonucleotide; GAG chr2 60556216 60556235 60556232 +
tccataaaagtccatctata

SEQ ID NO: 170892 - DNA, 20 bp, Artificial Sequence
  Synthetic oligonucleotide; AAG chr2 60556219 60556238 60556235 +
ataaaagtccatctatagag

SEQ ID NO: 170893 - DNA, 20 bp, Artificial Sequence
  Synthetic oligonucleotide; GAG chr2 60556232 60556251 60556248 +
tatagagaagatatataaat

SEQ ID NO: 170894 - DNA, 20 bp, Artificial Sequence
  Synthetic oligonucleotide; GAG chr2 60556236 60556255 60556252 +
gagaagatatataaatgagc

SEQ ID NO: 170895 - DNA, 20 bp, Artificial Sequence
  Synthetic oligonucleotide; GAG chr2 60556240 60556259 60556256 +
agatatataaatgagcgagt

SEQ ID NO: 170896 - DNA, 20 bp, Artificial Sequence
  Synthetic oligonucleotide; TGG chr2 60556248 60556267 60556264 +
aaatgagcgagtgagtgttg

SEQ ID NO: 170897 - DNA, 20 bp, Artificial Sequence
  Synthetic oligonucleotide; TGG chr2 60556282 60556301 60556298 +
tatgtatgatttatatataa

SEQ ID NO: 170898 - DNA, 20 bp, Artificial Sequence
  Synthetic oligonucleotide; AAG chr2 60556293 60556312 60556309 +
tatatataatggtgtgtata

SEQ ID NO: 170899 - DNA, 20 bp, Artificial Sequence
  Synthetic oligonucleotide; CGG chr2 60556301 60556320 60556317 +
atggtgtgtataaagctttt

SEQ ID NO: 170900 - DNA, 20 bp, Artificial Sequence
  Synthetic oligonucleotide; GGG chr2 60556302 60556321 60556318 +
tggtgtgtataaagcttttc

SEQ ID NO: 170901 - DNA, 20 bp, Artificial Sequence
  Synthetic oligonucleotide; GGG chr2 60556303 60556322 60556319 +
ggtgtgtataaagcttttcg

SEQ ID NO: 170902 - DNA, 20 bp, Artificial Sequence
  Synthetic oligonucleotide; TGG chr2 60556307 60556326 60556323 +
tgtataaagcttttcggggt

SEQ ID NO: 170903 - DNA, 20 bp, Artificial Sequence
  Synthetic oligonucleotide; TAG chr2 60556313 60556332 60556329 +
aagcttttcggggttggctg

SEQ ID NO: 170904 - DNA, 20 bp, Artificial Sequence
  Synthetic oligonucleotide; AAG chr2 60556322 60556341 60556338 +
ggggttggctgtagtgtaaa

SEQ ID NO: 170905 - DNA, 20 bp, Artificial Sequence
  Synthetic oligonucleotide; AAG chr2 60556346 60556365 60556362 +
aatgactttattacctctga

SEQ ID NO: 170906 - DNA, 20 bp, Artificial Sequence
  Synthetic oligonucleotide; AGG chr2 60556347 60556366 60556363 +
atgactttattacctctgaa

SEQ ID NO: 170907 - DNA, 20 bp, Artificial Sequence
  Synthetic oligonucleotide; TGG chr2 60556355 60556374 60556371 +
attacctctgaaaggttctg

SEQ ID NO: 170908 - DNA, 20 bp, Artificial Sequence
  Synthetic oligonucleotide; CAG chr2 60556369 60556388 60556385 +
gttctgtggttcacatttaa

SEQ ID NO: 170909 - DNA, 20 bp, Artificial Sequence
  Synthetic oligonucleotide; TGG chr2 60556417 60556436 60556433 +
aattgtgtgcgctctgacga

SEQ ID NO: 170910 - DNA, 20 bp, Artificial Sequence
  Synthetic oligonucleotide; CAG chr2 60556428 60556447 60556444 +
ctctgacgatggcaccctat

SEQ ID NO: 170911 - DNA, 20 bp, Artificial Sequence
  Synthetic oligonucleotide; AGG chr2 60556429 60556448 60556445 +
tctgacgatggcaccctatc

SEQ ID NO: 170912 - DNA, 20 bp, Artificial Sequence
  Synthetic oligonucleotide; GGG chr2 60556430 60556449 60556446 +
ctgacgatggcaccctatca

SEQ ID NO: 170913 - DNA, 20 bp, Artificial Sequence
  Synthetic oligonucleotide; TGG chr2 60556443 60556462 60556459 +
cctatcagggctgctatctg

SEQ ID NO: 170914 - DNA, 20 bp, Artificial Sequence
  Synthetic oligonucleotide; TGG chr2 60556464 60556483 60556480 +
ggctatttccaataaataac

SEQ ID NO: 170915 - DNA, 20 bp, Artificial Sequence
  Synthetic oligonucleotide; TAG chr2 60556503 60556522 60556519 +
ttcctttttaaaaaaaaaca

SEQ ID NO: 170916 - DNA, 20 bp, Artificial Sequence
  Synthetic oligonucleotide; AGG chr2 60556504 60556523 60556520 +
tcctttttaaaaaaaaacat

SEQ ID NO: 170917 - DNA, 20 bp, Artificial Sequence
  Synthetic oligonucleotide; AAG chr2 60556512 60556531 60556528 +
aaaaaaaaacataggaaatt

SEQ ID NO: 170918 - DNA, 20 bp, Artificial Sequence
  Synthetic oligonucleotide; TAG chr2 60556519 60556538 60556535 +
aacataggaaattaagcact

SEQ ID NO: 170919 - DNA, 20 bp, Artificial Sequence
  Synthetic oligonucleotide; AAG chr2 60556526 60556545 60556542 +
gaaattaagcacttagttac

SEQ ID NO: 170920 - DNA, 20 bp, Artificial Sequence
  Synthetic oligonucleotide; TAG chr2 60556529 60556548 60556545 +
attaagcacttagttacaag

SEQ ID NO: 170921 - DNA, 20 bp, Artificial Sequence
  Synthetic oligonucleotide; AGG chr2 60556530 60556549 60556546 +
ttaagcacttagttacaagt

SEQ ID NO: 170922 - DNA, 20 bp, Artificial Sequence
  Synthetic oligonucleotide; AAG chr2 60556540 60556559 60556543 -
tagcagacctacttgtaact

SEQ ID NO: 170923 - DNA, 20 bp, Artificial Sequence
  Synthetic oligonucleotide; AAG chr2 60556509 60556528 60556512 -
ttcctatgtttttttttaaa

SEQ ID NO: 170924 - DNA, 20 bp, Artificial Sequence
  Synthetic oligonucleotide; AGG chr2 60556508 60556527 60556511 -
tcctatgtttttttttaaaa

SEQ ID NO: 170925 - DNA, 20 bp, Artificial Sequence
  Synthetic oligonucleotide; CAG chr2 60556486 60556505 60556489 -
gaaaatcaataaaatgttgc

SEQ ID NO: 170926 - DNA, 20 bp, Artificial Sequence
  Synthetic oligonucleotide; TGG chr2 60556475 60556494 60556478 -
aaatgttgccagttatttat

SEQ ID NO: 170927 - DNA, 20 bp, Artificial Sequence
  Synthetic oligonucleotide; TAG chr2 60556469 60556488 60556472 -
tgccagttatttattggaaa

SEQ ID NO: 170928 - DNA, 20 bp, Artificial Sequence
  Synthetic oligonucleotide; CAG chr2 60556463 60556482 60556466 -
ttatttattggaaatagcca

SEQ ID NO: 170929 - DNA, 20 bp, Artificial Sequence
  Synthetic oligonucleotide; TAG chr2 60556459 60556478 60556462 -
ttattggaaatagccacaga

SEQ ID NO: 170930 - DNA, 20 bp, Artificial Sequence
  Synthetic oligonucleotide; CAG chr2 60556456 60556475 60556459 -
ttggaaatagccacagatag

SEQ ID NO: 170931 - DNA, 20 bp, Artificial Sequence
  Synthetic oligonucleotide; TAG chr2 60556447 60556466 60556450 -
gccacagatagcagccctga

SEQ ID NO: 170932 - DNA, 20 bp, Artificial Sequence
  Synthetic oligonucleotide; AGG chr2 60556446 60556465 60556449 -
ccacagatagcagccctgat

SEQ ID NO: 170933 - DNA, 20 bp, Artificial Sequence
  Synthetic oligonucleotide; GGG chr2 60556445 60556464 60556448 -
cacagatagcagccctgata

SEQ ID NO: 170934 - DNA, 20 bp, Artificial Sequence
  Synthetic oligonucleotide; CAG chr2 60556433 60556452 60556436 -
ccctgatagggtgccatcgt

SEQ ID NO: 170935 - DNA, 20 bp, Artificial Sequence
  Synthetic oligonucleotide; GAG chr2 60556431 60556450 60556434 -
ctgatagggtgccatcgtca

SEQ ID NO: 170936 - DNA, 20 bp, Artificial Sequence
  Synthetic oligonucleotide; CAG chr2 60556399 60556418 60556402 -
ttgtgtaatgaattgtaatt

SEQ ID NO: 170937 - DNA, 20 bp, Artificial Sequence
  Synthetic oligonucleotide; AAG chr2 60556396 60556415 60556399 -
tgtaatgaattgtaattcag

SEQ ID NO: 170938 - DNA, 20 bp, Artificial Sequence
  Synthetic oligonucleotide; CAG chr2 60556375 60556394 60556378 -
agactgttaaatgtgaacca

SEQ ID NO: 170939 - DNA, 20 bp, Artificial Sequence
  Synthetic oligonucleotide; CAG chr2 60556365 60556384 60556368 -
atgtgaaccacagaaccttt

SEQ ID NO: 170940 - DNA, 20 bp, Artificial Sequence
  Synthetic oligonucleotide; GAG chr2 60556363 60556382 60556366 -
gtgaaccacagaacctttca

SEQ ID NO: 170941 - DNA, 20 bp, Artificial Sequence
  Synthetic oligonucleotide; AGG chr2 60556362 60556381 60556365 -
tgaaccacagaacctttcag

SEQ ID NO: 170942 - DNA, 20 bp, Artificial Sequence
  Synthetic oligonucleotide; AAG chr2 60556354 60556373 60556357 -
agaacctttcagaggtaata

SEQ ID NO: 170943 - DNA, 20 bp, Artificial Sequence
  Synthetic oligonucleotide; CAG chr2 60556333 60556352 60556336 -
agtcattactttttacacta

SEQ ID NO: 170944 - DNA, 20 bp, Artificial Sequence
  Synthetic oligonucleotide; AAG chr2 60556319 60556338 60556322 -
acactacagccaaccccgaa

SEQ ID NO: 170945 - DNA, 20 bp, Artificial Sequence
  Synthetic oligonucleotide; TAG chr2 60556234 60556253 60556237 -
tcatttatatatcttctcta

SEQ ID NO: 170946 - DNA, 20 bp, Artificial Sequence
  Synthetic oligonucleotide; TGG chr2 60556230 60556249 60556233 -
ttatatatcttctctataga

SEQ ID NO: 170947 - DNA, 20 bp, Artificial Sequence
  Synthetic oligonucleotide; TGG chr2 60556220 60556239 60556223 -
tctctatagatggactttta

SEQ ID NO: 170948 - DNA, 20 bp, Artificial Sequence
  Synthetic oligonucleotide; CGG chr2 60556216 60556235 60556219 -
tatagatggacttttatgga

SEQ ID NO: 170949 - DNA, 20 bp, Artificial Sequence
  Synthetic oligonucleotide; GGG chr2 60556215 60556234 60556218 -
atagatggacttttatggac

SEQ ID NO: 170950 - DNA, 20 bp, Artificial Sequence
  Synthetic oligonucleotide; TGG chr2 60556212 60556231 60556215 -
gatggacttttatggacggg

SEQ ID NO: 170951 - DNA, 20 bp, Artificial Sequence
  Synthetic oligonucleotide; GGG chr2 60556211 60556230 60556214 -
atggacttttatggacgggt

SEQ ID NO: 170952 - DNA, 20 bp, Artificial Sequence
  Synthetic oligonucleotide; AAG chr2 60556189 60556208 60556192 -
gaacaatattcaaatctgaa

SEQ ID NO: 170953 - DNA, 20 bp, Artificial Sequence
  Synthetic oligonucleotide; TGG chr2 60556184 60556203 60556187 -
atattcaaatctgaaaagct

SEQ ID NO: 170954 - DNA, 20 bp, Artificial Sequence
  Synthetic oligonucleotide; AAG chr2 60556175 60556194 60556178 -
tctgaaaagcttggttctga

SEQ ID NO: 170955 - DNA, 20 bp, Artificial Sequence
  Synthetic oligonucleotide; TGG chr2 60556168 60556187 60556171 -
agcttggttctgaaagaatc

SEQ ID NO: 170956 - DNA, 20 bp, Artificial Sequence
  Synthetic oligonucleotide; AAG chr2 60556148 60556167 60556151 -
tggctcactattgttacctg

SEQ ID NO: 170957 - DNA, 20 bp, Artificial Sequence
  Synthetic oligonucleotide; AGG chr2 60556147 60556166 60556150 -
ggctcactattgttacctga

SEQ ID NO: 170958 - DNA, 20 bp, Artificial Sequence
  Synthetic oligonucleotide; GGG chr2 60556146 60556165 60556149 -
gctcactattgttacctgaa

SEQ ID NO: 170959 - DNA, 20 bp, Artificial Sequence
  Synthetic oligonucleotide; GGG chr2 60556145 60556164 60556148 -
ctcactattgttacctgaag

SEQ ID NO: 170960 - DNA, 20 bp, Artificial Sequence
  Synthetic oligonucleotide; AAG chr2 60556116 60556135 60556119 -
ttttatttatttatttttca

SEQ ID NO: 170961 - DNA, 20 bp, Artificial Sequence
  Synthetic oligonucleotide; AGG chr2 60556115 60556134 60556118 -
tttatttatttatttttcaa

SEQ ID NO: 170962 - DNA, 20 bp, Artificial Sequence
  Synthetic oligonucleotide; CAG chr2 60556107 60556126 60556110 -
tttatttttcaaaggcctcc

SEQ ID NO: 170963 - DNA, 20 bp, Artificial Sequence
  Synthetic oligonucleotide; AAG chr2 60556032 60556051 60556035 -
gtcctcccccgccacccccc

SEQ ID NO: 170964 - DNA, 20 bp, Artificial Sequence
  Synthetic oligonucleotide; AAG chr2 60556029 60556048 60556032 -
ctcccccgccaccccccaag

SEQ ID NO: 170965 - DNA, 20 bp, Artificial Sequence
  Synthetic oligonucleotide; TGG chr2 60556017 60556036 60556020 -
cccccaagaagacattcttt

SEQ ID NO: 170966 - DNA, 20 bp, Artificial Sequence
  Synthetic oligonucleotide; AAG chr2 60556007 60556026 60556010 -
gacattcttttggtgactcc

SEQ ID NO: 170967 - DNA, 20 bp, Artificial Sequence
  Synthetic oligonucleotide; AGG chr2 60556006 60556025 60556009 -
acattcttttggtgactcca

SEQ ID NO: 170968 - DNA, 20 bp, Artificial Sequence
  Synthetic oligonucleotide; TGG chr2 60556002 60556021 60556005 -
tcttttggtgactccaaggc

SEQ ID NO: 170969 - DNA, 20 bp, Artificial Sequence
  Synthetic oligonucleotide; AAG chr2 60555993 60556012 60555996 -
gactccaaggctggtttaac

SEQ ID NO: 170970 - DNA, 20 bp, Artificial Sequence
  Synthetic oligonucleotide; AAG chr2 60555985 60556004 60555988 -
ggctggtttaacaagacaaa

SEQ ID NO: 170971 - DNA, 20 bp, Artificial Sequence
  Synthetic oligonucleotide; CAG chr2 60555982 60556001 60555985 -
tggtttaacaagacaaaaag

SEQ ID NO: 170972 - DNA, 20 bp, Artificial Sequence
  Synthetic oligonucleotide; TGG chr2 60555975 60555994 60555978 -
acaagacaaaaagcagactg

SEQ ID NO: 170973 - DNA, 20 bp, Artificial Sequence
  Synthetic oligonucleotide; TGG chr2 60555972 60555991 60555975 -
agacaaaaagcagactgtgg

SEQ ID NO: 170974 - DNA, 20 bp, Artificial Sequence
  Synthetic oligonucleotide; TAG chr2 60555967 60555986 60555970 -
aaaagcagactgtggtggaa

SEQ ID NO: 170975 - DNA, 20 bp, Artificial Sequence
  Synthetic oligonucleotide; GAG chr2 60555965 60555984 60555968 -
aagcagactgtggtggaata

SEQ ID NO: 170976 - DNA, 20 bp, Artificial Sequence
  Synthetic oligonucleotide; AAG chr2 60555946 60555965 60555949 -
agagatgctgacctgctctg

SEQ ID NO: 170977 - DNA, 20 bp, Artificial Sequence
  Synthetic oligonucleotide; CAG chr2 60555939 60555958 60555942 -
ctgacctgctctgaagaact

SEQ ID NO: 170978 - DNA, 20 bp, Artificial Sequence
  Synthetic oligonucleotide; AAG chr2 60555932 60555951 60555935 -
gctctgaagaactcagtgaa

SEQ ID NO: 170979 - DNA, 20 bp, Artificial Sequence
  Synthetic oligonucleotide; AGG chr2 60555931 60555950 60555934 -
ctctgaagaactcagtgaaa

SEQ ID NO: 170980 - DNA, 20 bp, Artificial Sequence
  Synthetic oligonucleotide; GGG chr2 60555930 60555949 60555933 -
tctgaagaactcagtgaaaa

SEQ ID NO: 170981 - DNA, 20 bp, Artificial Sequence
  Synthetic oligonucleotide; GGG chr2 60555929 60555948 60555932 -
ctgaagaactcagtgaaaag

SEQ ID NO: 170982 - DNA, 20 bp, Artificial Sequence
  Synthetic oligonucleotide; TGG chr2 60555923 60555942 60555926 -
aactcagtgaaaaggggaaa

SEQ ID NO: 170983 - DNA, 20 bp, Artificial Sequence
  Synthetic oligonucleotide; AAG chr2 60555910 60555929 60555913 -
ggggaaatggtgtcacacac

SEQ ID NO: 170984 - DNA, 20 bp, Artificial Sequence
  Synthetic oligonucleotide; CAG chr2 60555904 60555923 60555907 -
atggtgtcacacacaagcta

SEQ ID NO: 170985 - DNA, 20 bp, Artificial Sequence
  Synthetic oligonucleotide; GAG chr2 60555902 60555921 60555905 -
ggtgtcacacacaagctaca

SEQ ID NO: 170986 - DNA, 20 bp, Artificial Sequence
  Synthetic oligonucleotide; TAG chr2 60555890 60555909 60555893 -
aagctacagagcttaacttc

SEQ ID NO: 170987 - DNA, 20 bp, Artificial Sequence
  Synthetic oligonucleotide; CAG chr2 60555866 60555885 60555869 -
gaatcctcccgcttcttaaa

SEQ ID NO: 170988 - DNA, 20 bp, Artificial Sequence
  Synthetic oligonucleotide; GAG chr2 60555858 60555877 60555861 -
ccgcttcttaaacagaattt

SEQ ID NO: 170989 - DNA, 20 bp, Artificial Sequence
  Synthetic oligonucleotide; AGG chr2 60555857 60555876 60555860 -
cgcttcttaaacagaatttg

SEQ ID NO: 170990 - DNA, 20 bp, Artificial Sequence
  Synthetic oligonucleotide; TGG chr2 60555838 60555857 60555841 -
gaggtctccctcccacaaac

SEQ ID NO: 170991 - DNA, 20 bp, Artificial Sequence
  Synthetic oligonucleotide; GAG chr2 60555836 60555855 60555839 -
ggtctccctcccacaaactg

SEQ ID NO: 170992 - DNA, 20 bp, Artificial Sequence
  Synthetic oligonucleotide; AGG chr2 60555835 60555854 60555838 -
gtctccctcccacaaactgg

SEQ ID NO: 170993 - DNA, 20 bp, Artificial Sequence
  Synthetic oligonucleotide; GGG chr2 60555834 60555853 60555837 -
tctccctcccacaaactgga

SEQ ID NO: 170994 - DNA, 20 bp, Artificial Sequence
  Synthetic oligonucleotide; CAG chr2 60555794 60555813 60555797 -
aaaccacattgacacaatcc

SEQ ID NO: 170995 - DNA, 20 bp, Artificial Sequence
  Synthetic oligonucleotide; CAG chr2 60555789 60555808 60555792 -
acattgacacaatcccagta

SEQ ID NO: 170996 - DNA, 20 bp, Artificial Sequence
  Synthetic oligonucleotide; GAG chr2 60555766 60555785 60555769 -
cccacatctctctcaatgtt

SEQ ID NO: 170997 - DNA, 20 bp, Artificial Sequence
  Synthetic oligonucleotide; TAG chr2 60555740 60555759 60555743 -
caaaacctccttttcttcct

SEQ ID NO: 170998 - DNA, 20 bp, Artificial Sequence
  Synthetic oligonucleotide; GAG chr2 60555738 60555757 60555741 -
aaacctccttttcttcctta

SEQ ID NO: 170999 - DNA, 20 bp, Artificial Sequence
  Synthetic oligonucleotide; AGG chr2 60555737 60555756 60555740 -
aacctccttttcttccttag

SEQ ID NO: 171000 - DNA, 20 bp, Artificial Sequence
  Synthetic oligonucleotide; GGG chr2 60555736 60555755 60555739 -
acctccttttcttccttaga

SEQ ID NO: 171001 - DNA, 20 bp, Artificial Sequence
  Synthetic oligonucleotide; GGG chr2 60555735 60555754 60555738 -
cctccttttcttccttagag

SEQ ID NO: 171002 - DNA, 20 bp, Artificial Sequence
  Synthetic oligonucleotide; AAG chr2 60555728 60555747 60555731 -
ttcttccttagaggggtccg

SEQ ID NO: 171003 - DNA, 20 bp, Artificial Sequence
  Synthetic oligonucleotide; GAG chr2 60555718 60555737 60555721 -
gaggggtccgaagctccgcc

SEQ ID NO: 171004 - DNA, 20 bp, Artificial Sequence
  Synthetic oligonucleotide; TAG chr2 60555714 60555733 60555717 -
ggtccgaagctccgccgagc

SEQ ID NO: 171005 - DNA, 20 bp, Artificial Sequence
  Synthetic oligonucleotide; AGG chr2 60555713 60555732 60555716 -
gtccgaagctccgccgagct

SEQ ID NO: 171006 - DNA, 20 bp, Artificial Sequence
  Synthetic oligonucleotide; AAG chr2 60555709 60555728 60555712 -
gaagctccgccgagctaggc

SEQ ID NO: 171007 - DNA, 20 bp, Artificial Sequence
  Synthetic oligonucleotide; CAG chr2 60555705 60555724 60555708 -
ctccgccgagctaggcaagc

SEQ ID NO: 171008 - DNA, 20 bp, Artificial Sequence
  Synthetic oligonucleotide; CAG chr2 60555689 60555708 60555692 -
aagccagtcattttctaaca

SEQ ID NO: 171009 - DNA, 20 bp, Artificial Sequence
  Synthetic oligonucleotide; TAG chr2 60555686 60555705 60555689 -
ccagtcattttctaacacag

SEQ ID NO: 171010 - DNA, 20 bp, Artificial Sequence
  Synthetic oligonucleotide; AAG chr2 60555668 60555687 60555671 -
agtagacttgaaactttact

SEQ ID NO: 171011 - DNA, 20 bp, Artificial Sequence
  Synthetic oligonucleotide; CAG chr2 60555659 60555678 60555662 -
gaaactttactaagacgaaa

SEQ ID NO: 171012 - DNA, 20 bp, Artificial Sequence
  Synthetic oligonucleotide; AGG chr2 60555658 60555677 60555661 -
aaactttactaagacgaaac

SEQ ID NO: 171013 - DNA, 20 bp, Artificial Sequence
  Synthetic oligonucleotide; CAG chr2 60555649 60555668 60555652 -
taagacgaaacaggaataaa

SEQ ID NO: 171014 - DNA, 20 bp, Artificial Sequence
  Synthetic oligonucleotide; CGG chr2 60555638 60555657 60555641 -
aggaataaacagccgcttgc

SEQ ID NO: 171015 - DNA, 20 bp, Artificial Sequence
  Synthetic oligonucleotide; CAG chr2 60555635 60555654 60555638 -
aataaacagccgcttgccgg

SEQ ID NO: 171016 - DNA, 20 bp, Artificial Sequence
  Synthetic oligonucleotide; AGG chr2 60555634 60555653 60555637 -
ataaacagccgcttgccggc

SEQ ID NO: 171017 - DNA, 20 bp, Artificial Sequence
  Synthetic oligonucleotide; GGG chr2 60555633 60555652 60555636 -
taaacagccgcttgccggca

SEQ ID NO: 171018 - DNA, 20 bp, Artificial Sequence
  Synthetic oligonucleotide; CGG chr2 60555627 60555646 60555630 -
gccgcttgccggcagggctg

SEQ ID NO: 171019 - DNA, 20 bp, Artificial Sequence
  Synthetic oligonucleotide; GGG chr2 60555626 60555645 60555629 -
ccgcttgccggcagggctgc

SEQ ID NO: 171020 - DNA, 20 bp, Artificial Sequence
  Synthetic oligonucleotide; TGG chr2 60555622 60555641 60555625 -
ttgccggcagggctgcggga

SEQ ID NO: 171021 - DNA, 20 bp, Artificial Sequence
  Synthetic oligonucleotide; GGG chr2 60555621 60555640 60555624 -
tgccggcagggctgcgggat

SEQ ID NO: 171022 - DNA, 20 bp, Artificial Sequence
  Synthetic oligonucleotide; GAG chr2 60555617 60555636 60555620 -
ggcagggctgcgggatgggt

SEQ ID NO: 171023 - DNA, 20 bp, Artificial Sequence
  Synthetic oligonucleotide; AAG chr2 60555607 60555626 60555610 -
cgggatgggtgagcgcgtgc

SEQ ID NO: 171024 - DNA, 20 bp, Artificial Sequence
  Synthetic oligonucleotide; CGG chr2 60555602 60555621 60555605 -
tgggtgagcgcgtgcaagcc

SEQ ID NO: 171025 - DNA, 20 bp, Artificial Sequence
  Synthetic oligonucleotide; GGG chr2 60555601 60555620 60555604 -
gggtgagcgcgtgcaagccc

SEQ ID NO: 171026 - DNA, 20 bp, Artificial Sequence
  Synthetic oligonucleotide; GGG chr2 60555600 60555619 60555603 -
ggtgagcgcgtgcaagcccg

SEQ ID NO: 171027 - DNA, 20 bp, Artificial Sequence
  Synthetic oligonucleotide; AAG chr2 60555579 60555598 60555582 -
ggccctcgcttaaaacaata

SEQ ID NO: 171028 - DNA, 20 bp, Artificial Sequence
  Synthetic oligonucleotide; CGG chr2 60555567 60555586 60555570 -
aaacaataaagcccccccac

SEQ ID NO: 171029 - DNA, 20 bp, Artificial Sequence
  Synthetic oligonucleotide; GGG chr2 60555566 60555585 60555569 -
aacaataaagcccccccacc

SEQ ID NO: 171030 - DNA, 20 bp, Artificial Sequence
  Synthetic oligonucleotide; TGG chr2 60555563 60555582 60555566 -
aataaagcccccccaccggg

SEQ ID NO: 171031 - DNA, 20 bp, Artificial Sequence
  Synthetic oligonucleotide; GGG chr2 60555562 60555581 60555565 -
ataaagcccccccaccgggt

SEQ ID NO: 171032 - DNA, 20 bp, Artificial Sequence
  Synthetic oligonucleotide; GAG chr2 60555558 60555577 60555561 -
agcccccccaccgggtgggt

SEQ ID NO: 171033 - DNA, 20 bp, Artificial Sequence
  Synthetic oligonucleotide; CGG chr2 60555551 60555570 60555554 -
ccaccgggtgggtgagttta

SEQ ID NO: 171034 - DNA, 20 bp, Artificial Sequence
  Synthetic oligonucleotide; AAG chr2 60555548 60555567 60555551 -
ccgggtgggtgagtttacgg

SEQ ID NO: 171035 - DNA, 20 bp, Artificial Sequence
  Synthetic oligonucleotide; TAG chr2 60555535 60555554 60555538 -
tttacggaagcgacaccctt

SEQ ID NO: 171036 - DNA, 20 bp, Artificial Sequence
  Synthetic oligonucleotide; AAG chr2 60555528 60555547 60555531 -
aagcgacaccctttagactg

SEQ ID NO: 171037 - DNA, 20 bp, Artificial Sequence
  Synthetic oligonucleotide; GAG chr2 60555526 60555545 60555529 -
gcgacaccctttagactgaa

SEQ ID NO: 171038 - DNA, 20 bp, Artificial Sequence
  Synthetic oligonucleotide; AGG chr2 60555525 60555544 60555528 -
cgacaccctttagactgaag

SEQ ID NO: 171039 - DNA, 20 bp, Artificial Sequence
  Synthetic oligonucleotide; GGG chr2 60555524 60555543 60555527 -
gacaccctttagactgaaga

SEQ ID NO: 171040 - DNA, 20 bp, Artificial Sequence
  Synthetic oligonucleotide; GGG chr2 60555523 60555542 60555526 -
acaccctttagactgaagag

SEQ ID NO: 171041 - DNA, 20 bp, Artificial Sequence
  Synthetic oligonucleotide; GGG chr2 60555522 60555541 60555525 -
caccctttagactgaagagg

SEQ ID NO: 171042 - DNA, 20 bp, Artificial Sequence
  Synthetic oligonucleotide; GAG chr2 60555517 60555536 60555520 -
tttagactgaagagggggat

SEQ ID NO: 171043 - DNA, 20 bp, Artificial Sequence
  Synthetic oligonucleotide; AAG chr2 60555514 60555533 60555517 -
agactgaagagggggatgag

SEQ ID NO: 171044 - DNA, 20 bp, Artificial Sequence
  Synthetic oligonucleotide; CGG chr2 60555510 60555529 60555513 -
tgaagagggggatgagaaga

SEQ ID NO: 171045 - DNA, 20 bp, Artificial Sequence
  Synthetic oligonucleotide; GGG chr2 60555509 60555528 60555512 -
gaagagggggatgagaagac

SEQ ID NO: 171046 - DNA, 20 bp, Artificial Sequence
  Synthetic oligonucleotide; GGG chr2 60555508 60555527 60555511 -
aagagggggatgagaagacg

SEQ ID NO: 171047 - DNA, 20 bp, Artificial Sequence
  Synthetic oligonucleotide; GGG chr2 60555507 60555526 60555510 -
agagggggatgagaagacgg

SEQ ID NO: 171048 - DNA, 20 bp, Artificial Sequence
  Synthetic oligonucleotide; TGG chr2 60555501 60555520 60555504 -
ggatgagaagacgggggttg

SEQ ID NO: 171049 - DNA, 20 bp, Artificial Sequence
  Synthetic oligonucleotide; GAG chr2 60555489 60555508 60555492 -
gggggttgtggaaccgctcc

SEQ ID NO: 171050 - DNA, 20 bp, Artificial Sequence
  Synthetic oligonucleotide; AGG chr2 60555488 60555507 60555491 -
ggggttgtggaaccgctccg

SEQ ID NO: 171051 - DNA, 20 bp, Artificial Sequence
  Synthetic oligonucleotide; GAG chr2 60555486 60555505 60555489 -
ggttgtggaaccgctccgag

SEQ ID NO: 171052 - DNA, 20 bp, Artificial Sequence
  Synthetic oligonucleotide; GAG chr2 60555484 60555503 60555487 -
ttgtggaaccgctccgagga

SEQ ID NO: 171053 - DNA, 20 bp, Artificial Sequence
  Synthetic oligonucleotide; AGG chr2 60555483 60555502 60555486 -
tgtggaaccgctccgaggag

SEQ ID NO: 171054 - DNA, 20 bp, Artificial Sequence
  Synthetic oligonucleotide; GGG chr2 60555482 60555501 60555485 -
gtggaaccgctccgaggaga

SEQ ID NO: 171055 - DNA, 20 bp, Artificial Sequence
  Synthetic oligonucleotide; AAG chr2 60555479 60555498 60555482 -
gaaccgctccgaggagaggg

SEQ ID NO: 171056 - DNA, 20 bp, Artificial Sequence
  Synthetic oligonucleotide; AGG chr2 60555478 60555497 60555481 -
aaccgctccgaggagaggga

SEQ ID NO: 171057 - DNA, 20 bp, Artificial Sequence
  Synthetic oligonucleotide; GAG chr2 60555476 60555495 60555479 -
ccgctccgaggagagggaag

SEQ ID NO: 171058 - DNA, 20 bp, Artificial Sequence
  Synthetic oligonucleotide; AGG chr2 60555475 60555494 60555478 -
cgctccgaggagagggaagg

SEQ ID NO: 171059 - DNA, 20 bp, Artificial Sequence
  Synthetic oligonucleotide; GGG chr2 60555474 60555493 60555477 -
gctccgaggagagggaagga

SEQ ID NO: 171060 - DNA, 20 bp, Artificial Sequence
  Synthetic oligonucleotide; CAG chr2 60555459 60555478 60555462 -
aaggagggctcctcgctctg

SEQ ID NO: 171061 - DNA, 20 bp, Artificial Sequence
  Synthetic oligonucleotide; CAG chr2 60555433 60555452 60555436 -
cactcacacatatccacctg

SEQ ID NO: 171062 - DNA, 20 bp, Artificial Sequence
  Synthetic oligonucleotide; CAG chr2 60555428 60555447 60555431 -
acacatatccacctgcagct

SEQ ID NO: 171063 - DNA, 20 bp, Artificial Sequence
  Synthetic oligonucleotide; AGG chr2 60555427 60555446 60555430 -
cacatatccacctgcagctc

SEQ ID NO: 171064 - DNA, 20 bp, Artificial Sequence
  Synthetic oligonucleotide; GGG chr2 60555426 60555445 60555429 -
acatatccacctgcagctca

SEQ ID NO: 171065 - DNA, 20 bp, Artificial Sequence
  Synthetic oligonucleotide; CGG chr2 60555418 60555437 60555421 -
acctgcagctcagggtctcg

SEQ ID NO: 171066 - DNA, 20 bp, Artificial Sequence
  Synthetic oligonucleotide; GGG chr2 60555417 60555436 60555420 -
cctgcagctcagggtctcgc

SEQ ID NO: 171067 - DNA, 20 bp, Artificial Sequence
  Synthetic oligonucleotide; TGG chr2 60555411 60555430 60555414 -
gctcagggtctcgcgggcca

SEQ ID NO: 171068 - DNA, 20 bp, Artificial Sequence
  Synthetic oligonucleotide; TGG chr2 60555372 60555391 60555375 -
tgcaccctccgcacctccct

SEQ ID NO: 171069 - DNA, 20 bp, Artificial Sequence
  Synthetic oligonucleotide; GAG chr2 60555365 60555384 60555368 -
tccgcacctcccttggacct

SEQ ID NO: 171070 - DNA, 20 bp, Artificial Sequence
  Synthetic oligonucleotide; CAG chr2 60555334 60555353 60555337 -
cctctccccccaactccttc

SEQ ID NO: 171071 - DNA, 20 bp, Artificial Sequence
  Synthetic oligonucleotide; TGG chr2 60555328 60555347 60555331 -
cccccaactccttccagatt

SEQ ID NO: 171072 - DNA, 20 bp, Artificial Sequence
  Synthetic oligonucleotide; CGG chr2 60555322 60555341 60555325 -
actccttccagatttggaat

SEQ ID NO: 171073 - DNA, 20 bp, Artificial Sequence
  Synthetic oligonucleotide; CGG chr2 60555306 60555325 60555309 -
gaatcggactgcgatctccc

SEQ ID NO: 171074 - DNA, 20 bp, Artificial Sequence
  Synthetic oligonucleotide; CGG chr2 60555303 60555322 60555306 -
tcggactgcgatctccccgg

SEQ ID NO: 171075 - DNA, 20 bp, Artificial Sequence
  Synthetic oligonucleotide; CGG chr2 60555300 60555319 60555303 -
gactgcgatctccccggcgg

SEQ ID NO: 171076 - DNA, 20 bp, Artificial Sequence
  Synthetic oligonucleotide; CGG chr2 60555297 60555316 60555300 -
tgcgatctccccggcggcgg

SEQ ID NO: 171077 - DNA, 20 bp, Artificial Sequence
  Synthetic oligonucleotide; CGG chr2 60555294 60555313 60555297 -
gatctccccggcggcggcgg

SEQ ID NO: 171078 - DNA, 20 bp, Artificial Sequence
  Synthetic oligonucleotide; CGG chr2 60555291 60555310 60555294 -
ctccccggcggcggcggcgg

SEQ ID NO: 171079 - DNA, 20 bp, Artificial Sequence
  Synthetic oligonucleotide; CAG chr2 60555285 60555304 60555288 -
ggcggcggcggcggcggctg

SEQ ID NO: 171080 - DNA, 20 bp, Artificial Sequence
  Synthetic oligonucleotide; GAG chr2 60555283 60555302 60555286 -
cggcggcggcggcggctgca

SEQ ID NO: 171081 - DNA, 20 bp, Artificial Sequence
  Synthetic oligonucleotide; TGG chr2 60555280 60555299 60555283 -
cggcggcggcggctgcagag

SEQ ID NO: 171082 - DNA, 20 bp, Artificial Sequence
  Synthetic oligonucleotide; TGG chr2 60555274 60555293 60555277 -
cggcggctgcagagtggtgc

SEQ ID NO: 171083 - DNA, 20 bp, Artificial Sequence
  Synthetic oligonucleotide; CAG chr2 60555271 60555290 60555274 -
cggctgcagagtggtgctgg

SEQ ID NO: 171084 - DNA, 20 bp, Artificial Sequence
  Synthetic oligonucleotide; AGG chr2 60555270 60555289 60555273 -
ggctgcagagtggtgctggc

SEQ ID NO: 171085 - DNA, 20 bp, Artificial Sequence
  Synthetic oligonucleotide; CAG chr2 60555267 60555286 60555270 -
tgcagagtggtgctggcagg

SEQ ID NO: 171086 - DNA, 20 bp, Artificial Sequence
  Synthetic oligonucleotide; AGG chr2 60555266 60555285 60555269 -
gcagagtggtgctggcaggc

SEQ ID NO: 171087 - DNA, 20 bp, Artificial Sequence
  Synthetic oligonucleotide; GGG chr2 60555265 60555284 60555268 -
cagagtggtgctggcaggca

SEQ ID NO: 171088 - DNA, 20 bp, Artificial Sequence
  Synthetic oligonucleotide; GAG chr2 60555263 60555282 60555266 -
gagtggtgctggcaggcagg

SEQ ID NO: 171089 - DNA, 20 bp, Artificial Sequence
  Synthetic oligonucleotide; AGG chr2 60555262 60555281 60555265 -
agtggtgctggcaggcaggg

SEQ ID NO: 171090 - DNA, 20 bp, Artificial Sequence
  Synthetic oligonucleotide; TGG chr2 60555258 60555277 60555261 -
gtgctggcaggcagggaggc

SEQ ID NO: 171091 - DNA, 20 bp, Artificial Sequence
  Synthetic oligonucleotide; GGG chr2 60555257 60555276 60555260 -
tgctggcaggcagggaggct

SEQ ID NO: 171092 - DNA, 20 bp, Artificial Sequence
  Synthetic oligonucleotide; GAG chr2 60555255 60555274 60555258 -
ctggcaggcagggaggctgg

SEQ ID NO: 171093 - DNA, 20 bp, Artificial Sequence
  Synthetic oligonucleotide; AGG chr2 60555254 60555273 60555257 -
tggcaggcagggaggctggg

SEQ ID NO: 171094 - DNA, 20 bp, Artificial Sequence
  Synthetic oligonucleotide; CGG chr2 60555251 60555270 60555254 -
caggcagggaggctgggagg

SEQ ID NO: 171095 - DNA, 20 bp, Artificial Sequence
  Synthetic oligonucleotide; GGG chr2 60555250 60555269 60555253 -
aggcagggaggctgggaggc

SEQ ID NO: 171096 - DNA, 20 bp, Artificial Sequence
  Synthetic oligonucleotide; GAG chr2 60555248 60555267 60555251 -
gcagggaggctgggaggcgg

SEQ ID NO: 171097 - DNA, 20 bp, Artificial Sequence
  Synthetic oligonucleotide; AGG chr2 60555247 60555266 60555250 -
cagggaggctgggaggcggg

SEQ ID NO: 171098 - DNA, 20 bp, Artificial Sequence
  Synthetic oligonucleotide; CAG chr2 60555241 60555260 60555244 -
ggctgggaggcgggaggcgc

SEQ ID NO: 171099 - DNA, 20 bp, Artificial Sequence
  Synthetic oligonucleotide; AGG chr2 60555240 60555259 60555243 -
gctgggaggcgggaggcgcc

SEQ ID NO: 171100 - DNA, 20 bp, Artificial Sequence
  Synthetic oligonucleotide; GGG chr2 60555239 60555258 60555242 -
ctgggaggcgggaggcgcca

SEQ ID NO: 171101 - DNA, 20 bp, Artificial Sequence
  Synthetic oligonucleotide; GGG chr2 60555238 60555257 60555241 -
tgggaggcgggaggcgccag

SEQ ID NO: 171102 - DNA, 20 bp, Artificial Sequence
  Synthetic oligonucleotide; CAG chr2 60555229 60555248 60555232 -
ggaggcgccaggggacttta

SEQ ID NO: 171103 - DNA, 20 bp, Artificial Sequence
  Synthetic oligonucleotide; AGG chr2 60555228 60555247 60555231 -
gaggcgccaggggactttac

SEQ ID NO: 171104 - DNA, 20 bp, Artificial Sequence
  Synthetic oligonucleotide; CAG chr2 60555198 60555217 60555201 -
ctgaataaactttccaatcg

SEQ ID NO: 171105 - DNA, 20 bp, Artificial Sequence
  Synthetic oligonucleotide; AGG chr2 60555197 60555216 60555200 -
tgaataaactttccaatcgc

SEQ ID NO: 171106 - DNA, 20 bp, Artificial Sequence
  Synthetic oligonucleotide; GGG chr2 60555196 60555215 60555199 -
gaataaactttccaatcgca

SEQ ID NO: 171107 - DNA, 20 bp, Artificial Sequence
  Synthetic oligonucleotide; GGG chr2 60555195 60555214 60555198 -
aataaactttccaatcgcag

SEQ ID NO: 171108 - DNA, 20 bp, Artificial Sequence
  Synthetic oligonucleotide; GGG chr2 60555194 60555213 60555197 -
ataaactttccaatcgcagg

SEQ ID NO: 171109 - DNA, 20 bp, Artificial Sequence
  Synthetic oligonucleotide; AAG chr2 60555160 60555179 60555163 -
tacattttacgtaaaactga

SEQ ID NO: 171110 - DNA, 20 bp, Artificial Sequence
  Synthetic oligonucleotide; CAG chr2 60555147 60555166 60555150 -
aaactgaaagtatcccacgc

SEQ ID NO: 171111 - DNA, 20 bp, Artificial Sequence
  Synthetic oligonucleotide; GAG chr2 60555145 60555164 60555148 -
actgaaagtatcccacgcca

SEQ ID NO: 171112 - DNA, 20 bp, Artificial Sequence
  Synthetic oligonucleotide; AAG chr2 60555140 60555159 60555143 -
aagtatcccacgccagagtg

SEQ ID NO: 171113 - DNA, 20 bp, Artificial Sequence
  Synthetic oligonucleotide; CAG chr2 60555125 60555144 60555128 -
gagtgaagcccgctttttga

SEQ ID NO: 171114 - DNA, 20 bp, Artificial Sequence
  Synthetic oligonucleotide; CGG chr2 60555122 60555141 60555125 -
tgaagcccgctttttgacag

SEQ ID NO: 171115 - DNA, 20 bp, Artificial Sequence
  Synthetic oligonucleotide; CAG chr2 60555119 60555138 60555122 -
agcccgctttttgacagcgg

SEQ ID NO: 171116 - DNA, 20 bp, Artificial Sequence
  Synthetic oligonucleotide; AAG chr2 60555087 60555106 60555090 -
gtgtgtgcgtgtgtgcatta

SEQ ID NO: 171117 - DNA, 20 bp, Artificial Sequence
  Synthetic oligonucleotide; GAG chr2 60555085 60555104 60555088 -
gtgtgcgtgtgtgcattaaa

SEQ ID NO: 171118 - DNA, 20 bp, Artificial Sequence
  Synthetic oligonucleotide; CAG chr2 60555081 60555100 60555084 -
gcgtgtgtgcattaaagaga

SEQ ID NO: 171119 - DNA, 20 bp, Artificial Sequence
  Synthetic oligonucleotide; AGG chr2 60555080 60555099 60555083 -
cgtgtgtgcattaaagagac

SEQ ID NO: 171120 - DNA, 20 bp, Artificial Sequence
  Synthetic oligonucleotide; GGG chr2 60555079 60555098 60555082 -
gtgtgtgcattaaagagaca

SEQ ID NO: 171121 - DNA, 20 bp, Artificial Sequence
  Synthetic oligonucleotide; CAG chr2 60555064 60555083 60555067 -
agacagggttttatttccaa

SEQ ID NO: 171122 - DNA, 20 bp, Artificial Sequence
  Synthetic oligonucleotide; AGG chr2 60555063 60555082 60555066 -
gacagggttttatttccaac

SEQ ID NO: 171123 - DNA, 20 bp, Artificial Sequence
  Synthetic oligonucleotide; CAG chr2 60555046 60555065 60555049 -
aacaggtcttccctaatttc

SEQ ID NO: 171124 - DNA, 20 bp, Artificial Sequence
  Synthetic oligonucleotide; AGG chr2 60555045 60555064 60555048 -
acaggtcttccctaatttcc

SEQ ID NO: 171125 - DNA, 20 bp, Artificial Sequence
  Synthetic oligonucleotide; GGG chr2 60555044 60555063 60555047 -
caggtcttccctaatttcca

SEQ ID NO: 171126 - DNA, 20 bp, Artificial Sequence
  Synthetic oligonucleotide; CAG chr2 60555033 60555052 60555036 -
taatttccagggaacgtctg

SEQ ID NO: 171127 - DNA, 20 bp, Artificial Sequence
  Synthetic oligonucleotide; AAG chr2 60555029 60555048 60555032 -
ttccagggaacgtctgcaga

SEQ ID NO: 171128 - DNA, 20 bp, Artificial Sequence
  Synthetic oligonucleotide; AGG chr2 60555028 60555047 60555031 -
tccagggaacgtctgcagaa

SEQ ID NO: 171129 - DNA, 20 bp, Artificial Sequence
  Synthetic oligonucleotide; GAG chr2 60555024 60555043 60555027 -
gggaacgtctgcagaaaggc

SEQ ID NO: 171130 - DNA, 20 bp, Artificial Sequence
  Synthetic oligonucleotide; GAG chr2 60555022 60555041 60555025 -
gaacgtctgcagaaaggcga

SEQ ID NO: 171131 - DNA, 20 bp, Artificial Sequence
  Synthetic oligonucleotide; AGG chr2 60555021 60555040 60555024 -
aacgtctgcagaaaggcgag

SEQ ID NO: 171132 - DNA, 20 bp, Artificial Sequence
  Synthetic oligonucleotide; GGG chr2 60555020 60555039 60555023 -
acgtctgcagaaaggcgaga

SEQ ID NO: 171133 - DNA, 20 bp, Artificial Sequence
  Synthetic oligonucleotide; GGG chr2 60555019 60555038 60555022 -
cgtctgcagaaaggcgagag

SEQ ID NO: 171134 - DNA, 20 bp, Artificial Sequence
  Synthetic oligonucleotide; GGG chr2 60555018 60555037 60555021 -
gtctgcagaaaggcgagagg

SEQ ID NO: 171135 - DNA, 20 bp, Artificial Sequence
  Synthetic oligonucleotide; TGG chr2 60555011 60555030 60555014 -
gaaaggcgagagggggctgc

SEQ ID NO: 171136 - DNA, 20 bp, Artificial Sequence
  Synthetic oligonucleotide; TGG chr2 60555004 60555023 60555007 -
gagagggggctgctggctcc

SEQ ID NO: 171137 - DNA, 20 bp, Artificial Sequence
  Synthetic oligonucleotide; GGG chr2 60555003 60555022 60555006 -
agagggggctgctggctcct

SEQ ID NO: 171138 - DNA, 20 bp, Artificial Sequence
  Synthetic oligonucleotide; TGG chr2 60554991 60555010 60554994 -
tggctcctgggtgtgcgcct

SEQ ID NO: 171139 - DNA, 20 bp, Artificial Sequence
  Synthetic oligonucleotide; CGG chr2 60554987 60555006 60554990 -
tcctgggtgtgcgccttggc

SEQ ID NO: 171140 - DNA, 20 bp, Artificial Sequence
  Synthetic oligonucleotide; CGG chr2 60554984 60555003 60554987 -
tgggtgtgcgccttggccgg

SEQ ID NO: 171141 - DNA, 20 bp, Artificial Sequence
  Synthetic oligonucleotide; TGG chr2 60554977 60554996 60554980 -
gcgccttggccggcggcgcc

SEQ ID NO: 171142 - DNA, 20 bp, Artificial Sequence
  Synthetic oligonucleotide; GGG chr2 60554976 60554995 60554979 -
cgccttggccggcggcgcct

SEQ ID NO: 171143 - DNA, 20 bp, Artificial Sequence
  Synthetic oligonucleotide; GGG chr2 60554975 60554994 60554978 -
gccttggccggcggcgcctg

SEQ ID NO: 171144 - DNA, 20 bp, Artificial Sequence
  Synthetic oligonucleotide; GAG chr2 60554973 60554992 60554976 -
cttggccggcggcgcctggg

SEQ ID NO: 171145 - DNA, 20 bp, Artificial Sequence
  Synthetic oligonucleotide; CGG chr2 60554968 60554987 60554971 -
ccggcggcgcctggggagcg

SEQ ID NO: 171146 - DNA, 20 bp, Artificial Sequence
  Synthetic oligonucleotide; CGG chr2 60554965 60554984 60554968 -
gcggcgcctggggagcgcgg

SEQ ID NO: 171147 - DNA, 20 bp, Artificial Sequence
  Synthetic oligonucleotide; GAG chr2 60554956 60554975 60554959 -
ggggagcgcggcggtgaccc

SEQ ID NO: 171148 - DNA, 20 bp, Artificial Sequence
  Synthetic oligonucleotide; AGG chr2 60554955 60554974 60554958 -
gggagcgcggcggtgacccg

SEQ ID NO: 171149 - DNA, 20 bp, Artificial Sequence
  Synthetic oligonucleotide; CGG chr2 60554952 60554971 60554955 -
agcgcggcggtgacccgagg

SEQ ID NO: 171150 - DNA, 20 bp, Artificial Sequence
  Synthetic oligonucleotide; TGG chr2 60554935 60554954 60554938 -
aggcggtcatctcaccaccg

SEQ ID NO: 171151 - DNA, 20 bp, Artificial Sequence
  Synthetic oligonucleotide; GAG chr2 60554914 60554933 60554917 -
ggtctccccgctgctcctgc

SEQ ID NO: 171152 - DNA, 20 bp, Artificial Sequence
  Synthetic oligonucleotide; TGG chr2 60554874 60554893 60554877 -
attcccattttctctttccc

SEQ ID NO: 171153 - DNA, 20 bp, Artificial Sequence
  Synthetic oligonucleotide; GGG chr2 60554873 60554892 60554876 -
ttcccattttctctttccct

SEQ ID NO: 171154 - DNA, 20 bp, Artificial Sequence
  Synthetic oligonucleotide; CAG chr2 60554867 60554886 60554870 -
ttttctctttccctgggtaa

SEQ ID NO: 171155 - DNA, 20 bp, Artificial Sequence
  Synthetic oligonucleotide; CAG chr2 60554862 60554881 60554865 -
tctttccctgggtaacagca

SEQ ID NO: 171156 - DNA, 20 bp, Artificial Sequence
  Synthetic oligonucleotide; AGG chr2 60554861 60554880 60554864 -
ctttccctgggtaacagcac

SEQ ID NO: 171157 - DNA, 20 bp, Artificial Sequence
  Synthetic oligonucleotide; CAG chr2 60554856 60554875 60554859 -
cctgggtaacagcacaggaa

SEQ ID NO: 171158 - DNA, 20 bp, Artificial Sequence
  Synthetic oligonucleotide; AAG chr2 60554838 60554857 60554841 -
aacagttgtgctctgcccgt

SEQ ID NO: 171159 - DNA, 20 bp, Artificial Sequence
  Synthetic oligonucleotide; CAG chr2 60554803 60554822 60554806 -
cccatccctctgtgcttttg

SEQ ID NO: 171160 - DNA, 20 bp, Artificial Sequence
  Synthetic oligonucleotide; TGG chr2 60554794 60554813 60554797 -
ctgtgcttttgcagttgctc

SEQ ID NO: 171161 - DNA, 20 bp, Artificial Sequence
  Synthetic oligonucleotide; GAG chr2 60554792 60554811 60554795 -
gtgcttttgcagttgctctg

SEQ ID NO: 171162 - DNA, 20 bp, Artificial Sequence
  Synthetic oligonucleotide; TGG chr2 60554789 60554808 60554792 -
cttttgcagttgctctggag

SEQ ID NO: 171163 - DNA, 20 bp, Artificial Sequence
  Synthetic oligonucleotide; GGG chr2 60554788 60554807 60554791 -
ttttgcagttgctctggagt

SEQ ID NO: 171164 - DNA, 20 bp, Artificial Sequence
  Synthetic oligonucleotide; GAG chr2 60554786 60554805 60554789 -
ttgcagttgctctggagtgg

SEQ ID NO: 171165 - DNA, 20 bp, Artificial Sequence
  Synthetic oligonucleotide; AGG chr2 60554785 60554804 60554788 -
tgcagttgctctggagtggg

SEQ ID NO: 171166 - DNA, 20 bp, Artificial Sequence
  Synthetic oligonucleotide; GGG chr2 60554784 60554803 60554787 -
gcagttgctctggagtggga

SEQ ID NO: 171167 - DNA, 20 bp, Artificial Sequence
  Synthetic oligonucleotide; GGG chr2 60554783 60554802 60554786 -
cagttgctctggagtgggag

SEQ ID NO: 171168 - DNA, 20 bp, Artificial Sequence
  Synthetic oligonucleotide; GGG chr2 60554782 60554801 60554785 -
agttgctctggagtgggagg

SEQ ID NO: 171169 - DNA, 20 bp, Artificial Sequence
  Synthetic oligonucleotide; CAG chr2 60554768 60554787 60554771 -
gggagggggtgtgtccctcc

SEQ ID NO: 171170 - DNA, 20 bp, Artificial Sequence
  Synthetic oligonucleotide; AGG chr2 60554767 60554786 60554770 -
ggagggggtgtgtccctccc

SEQ ID NO: 171171 - DNA, 20 bp, Artificial Sequence
  Synthetic oligonucleotide; GGG chr2 60554766 60554785 60554769 -
gagggggtgtgtccctccca

SEQ ID NO: 171172 - DNA, 20 bp, Artificial Sequence
  Synthetic oligonucleotide; CGG chr2 60554760 60554779 60554763 -
gtgtgtccctcccagggacc

SEQ ID NO: 171173 - DNA, 20 bp, Artificial Sequence
  Synthetic oligonucleotide; CGG chr2 60554755 60554774 60554758 -
tccctcccagggacccggct

SEQ ID NO: 171174 - DNA, 20 bp, Artificial Sequence
  Synthetic oligonucleotide; GGG chr2 60554754 60554773 60554757 -
ccctcccagggacccggctc

SEQ ID NO: 171175 - DNA, 20 bp, Artificial Sequence
  Synthetic oligonucleotide; GGG chr2 60554753 60554772 60554756 -
cctcccagggacccggctcg

SEQ ID NO: 171176 - DNA, 20 bp, Artificial Sequence
  Synthetic oligonucleotide; CGG chr2 60554742 60554761 60554745 -
cccggctcggggacctcccg

SEQ ID NO: 171177 - DNA, 20 bp, Artificial Sequence
  Synthetic oligonucleotide; GAG chr2 60554733 60554752 60554736 -
gggacctcccgcggcgccgt

SEQ ID NO: 171178 - DNA, 20 bp, Artificial Sequence
  Synthetic oligonucleotide; CAG chr2 60554722 60554741 60554725 -
cggcgccgtgagcacattcc

SEQ ID NO: 171179 - DNA, 20 bp, Artificial Sequence
  Synthetic oligonucleotide; AGG chr2 60554721 60554740 60554724 -
ggcgccgtgagcacattccc

SEQ ID NO: 171180 - DNA, 20 bp, Artificial Sequence
  Synthetic oligonucleotide; GGG chr2 60554720 60554739 60554723 -
gcgccgtgagcacattccca

SEQ ID NO: 171181 - DNA, 20 bp, Artificial Sequence
  Synthetic oligonucleotide; TGG chr2 60554715 60554734 60554718 -
gtgagcacattcccagggac

SEQ ID NO: 171182 - DNA, 20 bp, Artificial Sequence
  Synthetic oligonucleotide; GGG chr2 60554714 60554733 60554717 -
tgagcacattcccagggact

SEQ ID NO: 171183 - DNA, 20 bp, Artificial Sequence
  Synthetic oligonucleotide; CGG chr2 60554706 60554725 60554709 -
ttcccagggactgggactcc

SEQ ID NO: 171184 - DNA, 20 bp, Artificial Sequence
  Synthetic oligonucleotide; GGG chr2 60554705 60554724 60554708 -
tcccagggactgggactccc

SEQ ID NO: 171185 - DNA, 20 bp, Artificial Sequence
  Synthetic oligonucleotide; CGG chr2 60554683 60554702 60554686 -
gactgcccgcgctttgtcct

SEQ ID NO: 171186 - DNA, 20 bp, Artificial Sequence
  Synthetic oligonucleotide; CAG chr2 60554675 60554694 60554678 -
gcgctttgtcctcggcctct

SEQ ID NO: 171187 - DNA, 20 bp, Artificial Sequence
  Synthetic oligonucleotide; GAG chr2 60554673 60554692 60554676 -
gctttgtcctcggcctctca

SEQ ID NO: 171188 - DNA, 20 bp, Artificial Sequence
  Synthetic oligonucleotide; GAG chr2 60554671 60554690 60554674 -
tttgtcctcggcctctcaga

SEQ ID NO: 171189 - DNA, 20 bp, Artificial Sequence
  Synthetic oligonucleotide; AGG chr2 60554670 60554689 60554673 -
ttgtcctcggcctctcagag

SEQ ID NO: 171190 - DNA, 20 bp, Artificial Sequence
  Synthetic oligonucleotide; TGG chr2 60554667 60554686 60554670 -
tcctcggcctctcagagagg

SEQ ID NO: 171191 - DNA, 20 bp, Artificial Sequence
  Synthetic oligonucleotide; CGG chr2 60554658 60554677 60554661 -
tctcagagaggtggacgcct

SEQ ID NO: 171192 - DNA, 20 bp, Artificial Sequence
  Synthetic oligonucleotide; CAG chr2 60554642 60554661 60554645 -
gcctcggtgcctctcttgcc

SEQ ID NO: 171193 - DNA, 20 bp, Artificial Sequence
  Synthetic oligonucleotide; AGG chr2 60554641 60554660 60554644 -
cctcggtgcctctcttgccc

SEQ ID NO: 171194 - DNA, 20 bp, Artificial Sequence
  Synthetic oligonucleotide; CGG chr2 60554634 60554653 60554637 -
gcctctcttgcccaggcccc

SEQ ID NO: 171195 - DNA, 20 bp, Artificial Sequence
  Synthetic oligonucleotide; CGG chr2 60554621 60554640 60554624 -
aggcccccggcgctcccctc

SEQ ID NO: 171196 - DNA, 20 bp, Artificial Sequence
  Synthetic oligonucleotide; GGG chr2 60554620 60554639 60554623 -
ggcccccggcgctcccctcc

SEQ ID NO: 171197 - DNA, 20 bp, Artificial Sequence
  Synthetic oligonucleotide; GGG chr2 60554619 60554638 60554622 -
gcccccggcgctcccctccg

SEQ ID NO: 171198 - DNA, 20 bp, Artificial Sequence
  Synthetic oligonucleotide; GGG chr2 60554618 60554637 60554621 -
cccccggcgctcccctccgg

SEQ ID NO: 171199 - DNA, 20 bp, Artificial Sequence
  Synthetic oligonucleotide; CAG chr2 60554614 60554633 60554617 -
cggcgctcccctccgggggc

SEQ ID NO: 171200 - DNA, 20 bp, Artificial Sequence
  Synthetic oligonucleotide; TGG chr2 60554607 60554626 60554610 -
cccctccgggggccagactc

SEQ ID NO: 171201 - DNA, 20 bp, Artificial Sequence
  Synthetic oligonucleotide; CGG chr2 60554585 60554604 60554588 -
gctcctcgttctttattcct

SEQ ID NO: 171202 - DNA, 20 bp, Artificial Sequence
  Synthetic oligonucleotide; GGG chr2 60554584 60554603 60554587 -
ctcctcgttctttattcctc

SEQ ID NO: 171203 - DNA, 20 bp, Artificial Sequence
  Synthetic oligonucleotide; TAG chr2 60554563 60554582 60554566 -
ggctctctttctgcgaccct

SEQ ID NO: 171204 - DNA, 20 bp, Artificial Sequence
  Synthetic oligonucleotide; AGG chr2 60554562 60554581 60554565 -
gctctctttctgcgaccctt

SEQ ID NO: 171205 - DNA, 20 bp, Artificial Sequence
  Synthetic oligonucleotide; GAG chr2 60554560 60554579 60554563 -
tctctttctgcgacccttag

SEQ ID NO: 171206 - DNA, 20 bp, Artificial Sequence
  Synthetic oligonucleotide; CGG chr2 60554556 60554575 60554559 -
tttctgcgacccttaggagc

SEQ ID NO: 171207 - DNA, 20 bp, Artificial Sequence
  Synthetic oligonucleotide; GGG chr2 60554555 60554574 60554558 -
ttctgcgacccttaggagcc

SEQ ID NO: 171208 - DNA, 20 bp, Artificial Sequence
  Synthetic oligonucleotide; GGG chr2 60554554 60554573 60554557 -
tctgcgacccttaggagccg

SEQ ID NO: 171209 - DNA, 20 bp, Artificial Sequence
  Synthetic oligonucleotide; CGG chr2 60554548 60554567 60554551 -
acccttaggagccggggact

SEQ ID NO: 171210 - DNA, 20 bp, Artificial Sequence
  Synthetic oligonucleotide; CAG chr2 60554539 60554558 60554542 -
agccggggactcggcgcttt

SEQ ID NO: 171211 - DNA, 20 bp, Artificial Sequence
  Synthetic oligonucleotide; CAG chr2 60554529 60554548 60554532 -
tcggcgctttcagttgcatt

SEQ ID NO: 171212 - DNA, 20 bp, Artificial Sequence
  Synthetic oligonucleotide; CAG chr2 60554523 60554542 60554526 -
ctttcagttgcattcagacc

SEQ ID NO: 171213 - DNA, 20 bp, Artificial Sequence
  Synthetic oligonucleotide; TGG chr2 60554515 60554534 60554518 -
tgcattcagacccagtcgct

SEQ ID NO: 171214 - DNA, 20 bp, Artificial Sequence
  Synthetic oligonucleotide; CGG chr2 60554512 60554531 60554515 -
attcagacccagtcgcttgg

SEQ ID NO: 171215 - DNA, 20 bp, Artificial Sequence
  Synthetic oligonucleotide; GGG chr2 60554511 60554530 60554514 -
ttcagacccagtcgcttggc

SEQ ID NO: 171216 - DNA, 20 bp, Artificial Sequence
  Synthetic oligonucleotide; GGG chr2 60554510 60554529 60554513 -
tcagacccagtcgcttggcg

SEQ ID NO: 171217 - DNA, 20 bp, Artificial Sequence
  Synthetic oligonucleotide; CAG chr2 60554503 60554522 60554506 -
cagtcgcttggcggggcgct

SEQ ID NO: 171218 - DNA, 20 bp, Artificial Sequence
  Synthetic oligonucleotide; CGG chr2 60554495 60554514 60554498 -
tggcggggcgctcagattcc

SEQ ID NO: 171219 - DNA, 20 bp, Artificial Sequence
  Synthetic oligonucleotide; TGG chr2 60554488 60554507 60554491 -
gcgctcagattcccggtccc

SEQ ID NO: 171220 - DNA, 20 bp, Artificial Sequence
  Synthetic oligonucleotide; CGG chr2 60554483 60554502 60554486 -
cagattcccggtccctggct

SEQ ID NO: 171221 - DNA, 20 bp, Artificial Sequence
  Synthetic oligonucleotide; TGG chr2 60554477 60554496 60554480 -
cccggtccctggctcggcct

SEQ ID NO: 171222 - DNA, 20 bp, Artificial Sequence
  Synthetic oligonucleotide; GGG chr2 60554476 60554495 60554479 -
ccggtccctggctcggcctt

SEQ ID NO: 171223 - DNA, 20 bp, Artificial Sequence
  Synthetic oligonucleotide; GGG chr2 60554475 60554494 60554478 -
cggtccctggctcggccttg

SEQ ID NO: 171224 - DNA, 20 bp, Artificial Sequence
  Synthetic oligonucleotide; GGG chr2 60554474 60554493 60554477 -
ggtccctggctcggccttgg

SEQ ID NO: 171225 - DNA, 20 bp, Artificial Sequence
  Synthetic oligonucleotide; CGG chr2 60554465 60554484 60554468 -
ctcggccttgggggcgccct

SEQ ID NO: 171226 - DNA, 20 bp, Artificial Sequence
  Synthetic oligonucleotide; GGG chr2 60554464 60554483 60554467 -
tcggccttgggggcgccctc

SEQ ID NO: 171227 - DNA, 20 bp, Artificial Sequence
  Synthetic oligonucleotide; CGG chr2 60554458 60554477 60554461 -
ttgggggcgccctcgggccc

SEQ ID NO: 171228 - DNA, 20 bp, Artificial Sequence
  Synthetic oligonucleotide; CGG chr2 60554434 60554453 60554437 -
ctgcgccgcctgcctctccc

SEQ ID NO: 171229 - DNA, 20 bp, Artificial Sequence
  Synthetic oligonucleotide; CAG chr2 60554420 60554439 60554423 -
tctccccggtcccctctttc

SEQ ID NO: 171230 - DNA, 20 bp, Artificial Sequence
  Synthetic oligonucleotide; AGG chr2 60554419 60554438 60554422 -
ctccccggtcccctctttcc

SEQ ID NO: 171231 - DNA, 20 bp, Artificial Sequence
  Synthetic oligonucleotide; CGG chr2 60554411 60554430 60554414 -
tcccctctttccaggccgcg

SEQ ID NO: 171232 - DNA, 20 bp, Artificial Sequence
  Synthetic oligonucleotide; GGG chr2 60554410 60554429 60554413 -
cccctctttccaggccgcgc

SEQ ID NO: 171233 - DNA, 20 bp, Artificial Sequence
  Synthetic oligonucleotide; TGG chr2 60554403 60554422 60554406 -
ttccaggccgcgcgggctcc

SEQ ID NO: 171234 - DNA, 20 bp, Artificial Sequence
  Synthetic oligonucleotide; GAG chr2 60554401 60554420 60554404 -
ccaggccgcgcgggctcctg

SEQ ID NO: 171235 - DNA, 20 bp, Artificial Sequence
  Synthetic oligonucleotide; TGG chr2 60554395 60554414 60554398 -
cgcgcgggctcctggagact

SEQ ID NO: 171236 - DNA, 20 bp, Artificial Sequence
  Synthetic oligonucleotide; GGG chr2 60554394 60554413 60554397 -
gcgcgggctcctggagactt

SEQ ID NO: 171237 - DNA, 20 bp, Artificial Sequence
  Synthetic oligonucleotide; CGG chr2 60554380 60554399 60554383 -
agacttgggcgctgcccttc

SEQ ID NO: 171238 - DNA, 20 bp, Artificial Sequence
  Synthetic oligonucleotide; CAG chr2 60554372 60554391 60554375 -
gcgctgcccttccggacccg

SEQ ID NO: 171239 - DNA, 20 bp, Artificial Sequence
  Synthetic oligonucleotide; TAG chr2 60554358 60554377 60554361 -
gacccgcagccctccaaact

SEQ ID NO: 171240 - DNA, 20 bp, Artificial Sequence
  Synthetic oligonucleotide; AGG chr2 60554357 60554376 60554360 -
acccgcagccctccaaactt

SEQ ID NO: 171241 - DNA, 20 bp, Artificial Sequence
  Synthetic oligonucleotide; TGG chr2 60554353 60554372 60554356 -
gcagccctccaaacttaggc

SEQ ID NO: 171242 - DNA, 20 bp, Artificial Sequence
  Synthetic oligonucleotide; CGG chr2 60554305 60554324 60554308 -
ccacctcccctcgcccgctg

SEQ ID NO: 171243 - DNA, 20 bp, Artificial Sequence
  Synthetic oligonucleotide; GAG chr2 60554303 60554322 60554306 -
acctcccctcgcccgctgcg

SEQ ID NO: 171244 - DNA, 20 bp, Artificial Sequence
  Synthetic oligonucleotide; TGG chr2 60554292 60554311 60554295 -
cccgctgcggagctgtaact

SEQ ID NO: 171245 - DNA, 20 bp, Artificial Sequence
  Synthetic oligonucleotide; GAG chr2 60554290 60554309 60554293 -
cgctgcggagctgtaacttg

SEQ ID NO: 171246 - DNA, 20 bp, Artificial Sequence
  Synthetic oligonucleotide; AGG chr2 60554289 60554308 60554292 -
gctgcggagctgtaacttgg

SEQ ID NO: 171247 - DNA, 20 bp, Artificial Sequence
  Synthetic oligonucleotide; CAG chr2 60554284 60554303 60554287 -
ggagctgtaacttggaggct

SEQ ID NO: 171248 - DNA, 20 bp, Artificial Sequence
  Synthetic oligonucleotide; CGG chr2 60554271 60554290 60554274 -
ggaggctcagctctcaactt

SEQ ID NO: 171249 - DNA, 20 bp, Artificial Sequence
  Synthetic oligonucleotide; GGG chr2 60554270 60554289 60554273 -
gaggctcagctctcaacttc

SEQ ID NO: 171250 - DNA, 20 bp, Artificial Sequence
  Synthetic oligonucleotide; CGG chr2 60554242 60554261 60554245 -
tttctttgctgtcctctcct

SEQ ID NO: 171251 - DNA, 20 bp, Artificial Sequence
  Synthetic oligonucleotide; GGG chr2 60554241 60554260 60554244 -
ttctttgctgtcctctcctc

SEQ ID NO: 171252 - DNA, 20 bp, Artificial Sequence
  Synthetic oligonucleotide; AAG chr2 60554236 60554255 60554239 -
tgctgtcctctcctcgggca

SEQ ID NO: 171253 - DNA, 20 bp, Artificial Sequence
  Synthetic oligonucleotide; GAG chr2 60554227 60554246 60554230 -
ctcctcgggcaaagtttccc

SEQ ID NO: 171254 - DNA, 20 bp, Artificial Sequence
  Synthetic oligonucleotide; CAG chr2 60554222 60554241 60554225 -
cgggcaaagtttcccgagcg

SEQ ID NO: 171255 - DNA, 20 bp, Artificial Sequence
  Synthetic oligonucleotide; CGG chr2 60554216 60554235 60554219 -
aagtttcccgagcgcagccg

SEQ ID NO: 171256 - DNA, 20 bp, Artificial Sequence
  Synthetic oligonucleotide; GGG chr2 60554215 60554234 60554218 -
agtttcccgagcgcagccgc

SEQ ID NO: 171257 - DNA, 20 bp, Artificial Sequence
  Synthetic oligonucleotide; CGG chr2 60554210 60554229 60554213 -
cccgagcgcagccgcgggct

SEQ ID NO: 171258 - DNA, 20 bp, Artificial Sequence
  Synthetic oligonucleotide; GGG chr2 60554209 60554228 60554212 -
ccgagcgcagccgcgggctc

SEQ ID NO: 171259 - DNA, 20 bp, Artificial Sequence
  Synthetic oligonucleotide; GGG chr2 60554208 60554227 60554211 -
cgagcgcagccgcgggctcg

SEQ ID NO: 171260 - DNA, 20 bp, Artificial Sequence
  Synthetic oligonucleotide; CGG chr2 60554196 60554215 60554199 -
cgggctcggggcttttactt

SEQ ID NO: 171261 - DNA, 20 bp, Artificial Sequence
  Synthetic oligonucleotide; TGG chr2 60554189 60554208 60554192 -
ggggcttttacttcggcccc

SEQ ID NO: 171262 - DNA, 20 bp, Artificial Sequence
  Synthetic oligonucleotide; CGG chr2 60554176 60554195 60554179 -
cggcccctggcgtccacacg

SEQ ID NO: 171263 - DNA, 20 bp, Artificial Sequence
  Synthetic oligonucleotide; GGG chr2 60554175 60554194 60554178 -
ggcccctggcgtccacacgc

SEQ ID NO: 171264 - DNA, 20 bp, Artificial Sequence
  Synthetic oligonucleotide; GGG chr2 60554174 60554193 60554177 -
gcccctggcgtccacacgcg

SEQ ID NO: 171265 - DNA, 20 bp, Artificial Sequence
  Synthetic oligonucleotide; GAG chr2 60554172 60554191 60554175 -
ccctggcgtccacacgcggg

SEQ ID NO: 171266 - DNA, 20 bp, Artificial Sequence
  Synthetic oligonucleotide; GAG chr2 60554168 60554187 60554171 -
ggcgtccacacgcggggagc

SEQ ID NO: 171267 - DNA, 20 bp, Artificial Sequence
  Synthetic oligonucleotide; CGG chr2 60554163 60554182 60554166 -
ccacacgcggggagcgagcg

SEQ ID NO: 171268 - DNA, 20 bp, Artificial Sequence
  Synthetic oligonucleotide; CGG chr2 60554160 60554179 60554163 -
cacgcggggagcgagcgcgg

SEQ ID NO: 171269 - DNA, 20 bp, Artificial Sequence
  Synthetic oligonucleotide; CGG chr2 60554157 60554176 60554160 -
gcggggagcgagcgcggcgg

SEQ ID NO: 171270 - DNA, 20 bp, Artificial Sequence
  Synthetic oligonucleotide; CGG chr2 60554154 60554173 60554157 -
gggagcgagcgcggcggcgg

SEQ ID NO: 171271 - DNA, 20 bp, Artificial Sequence
  Synthetic oligonucleotide; GGG chr2 60554153 60554172 60554156 -
ggagcgagcgcggcggcggc

SEQ ID NO: 171272 - DNA, 20 bp, Artificial Sequence
  Synthetic oligonucleotide; GGG chr2 60554152 60554171 60554155 -
gagcgagcgcggcggcggcg

SEQ ID NO: 171273 - DNA, 20 bp, Artificial Sequence
  Synthetic oligonucleotide; GAG chr2 60554150 60554169 60554153 -
gcgagcgcggcggcggcggg

SEQ ID NO: 171274 - DNA, 20 bp, Artificial Sequence
  Synthetic oligonucleotide; AGG chr2 60554149 60554168 60554152 -
cgagcgcggcggcggcgggg

SEQ ID NO: 171275 - DNA, 20 bp, Artificial Sequence
  Synthetic oligonucleotide; GGG chr2 60554148 60554167 60554151 -
gagcgcggcggcggcgggga

SEQ ID NO: 171276 - DNA, 20 bp, Artificial Sequence
  Synthetic oligonucleotide; GGG chr2 60554147 60554166 60554150 -
agcgcggcggcggcggggag

SEQ ID NO: 171277 - DNA, 20 bp, Artificial Sequence
  Synthetic oligonucleotide; AAG chr2 60554144 60554163 60554147 -
gcggcggcggcggggagggg

SEQ ID NO: 171278 - DNA, 20 bp, Artificial Sequence
  Synthetic oligonucleotide; TGG chr2 60554141 60554160 60554144 -
gcggcggcggggaggggaag

SEQ ID NO: 171279 - DNA, 20 bp, Artificial Sequence
  Synthetic oligonucleotide; GGG chr2 60554140 60554159 60554143 -
cggcggcggggaggggaagt

SEQ ID NO: 171280 - DNA, 20 bp, Artificial Sequence
  Synthetic oligonucleotide; CGG chr2 60554129 60554148 60554132 -
aggggaagtgggtgtgcgta

SEQ ID NO: 171281 - DNA, 20 bp, Artificial Sequence
  Synthetic oligonucleotide; GAG chr2 60554127 60554146 60554130 -
gggaagtgggtgtgcgtacg

SEQ ID NO: 171282 - DNA, 20 bp, Artificial Sequence
  Synthetic oligonucleotide; AGG chr2 60554126 60554145 60554129 -
ggaagtgggtgtgcgtacgg

SEQ ID NO: 171283 - DNA, 20 bp, Artificial Sequence
  Synthetic oligonucleotide; GAG chr2 60554124 60554143 60554127 -
aagtgggtgtgcgtacggag

SEQ ID NO: 171284 - DNA, 20 bp, Artificial Sequence
  Synthetic oligonucleotide; AGG chr2 60554123 60554142 60554126 -
agtgggtgtgcgtacggagg

SEQ ID NO: 171285 - DNA, 20 bp, Artificial Sequence
  Synthetic oligonucleotide; GGG chr2 60554122 60554141 60554125 -
gtgggtgtgcgtacggagga

SEQ ID NO: 171286 - DNA, 20 bp, Artificial Sequence
  Synthetic oligonucleotide; CGG chr2 60554115 60554134 60554118 -
tgcgtacggaggagggtgtc

SEQ ID NO: 171287 - DNA, 20 bp, Artificial Sequence
  Synthetic oligonucleotide; GGG chr2 60554114 60554133 60554117 -
gcgtacggaggagggtgtcc

SEQ ID NO: 171288 - DNA, 20 bp, Artificial Sequence
  Synthetic oligonucleotide; GAG chr2 60554112 60554131 60554115 -
gtacggaggagggtgtccgg

SEQ ID NO: 171289 - DNA, 20 bp, Artificial Sequence
  Synthetic oligonucleotide; TGG chr2 60554099 60554118 60554102 -
tgtccgggagcaactctacc

SEQ ID NO: 171290 - DNA, 20 bp, Artificial Sequence
  Synthetic oligonucleotide; CAG chr2 60554074 60554093 60554077 -
tccctccgcccgcgcttccc

SEQ ID NO: 171291 - DNA, 20 bp, Artificial Sequence
  Synthetic oligonucleotide; CGG chr2 60554069 60554088 60554072 -
ccgcccgcgcttccccagcc

SEQ ID NO: 171292 - DNA, 20 bp, Artificial Sequence
  Synthetic oligonucleotide; GGG chr2 60554068 60554087 60554071 -
cgcccgcgcttccccagccc

SEQ ID NO: 171293 - DNA, 20 bp, Artificial Sequence
  Synthetic oligonucleotide; GGG chr2 60554067 60554086 60554070 -
gcccgcgcttccccagcccg

SEQ ID NO: 171294 - DNA, 20 bp, Artificial Sequence
  Synthetic oligonucleotide; CAG chr2 60554061 60554080 60554064 -
gcttccccagcccggggctg

SEQ ID NO: 171295 - DNA, 20 bp, Artificial Sequence
  Synthetic oligonucleotide; CGG chr2 60554053 60554072 60554056 -
agcccggggctgcagcctcc

SEQ ID NO: 171296 - DNA, 20 bp, Artificial Sequence
  Synthetic oligonucleotide; TAG chr2 60554005 60554024 60554008 -
ttttgaataatctttcattt

SEQ ID NO: 171297 - DNA, 20 bp, Artificial Sequence
  Synthetic oligonucleotide; GAG chr2 60554003 60554022 60554006 -
ttgaataatctttcatttta

SEQ ID NO: 171298 - DNA, 20 bp, Artificial Sequence
  Synthetic oligonucleotide; TGG chr2 60553990 60554009 60553993 -
cattttagagtccgcgtgtg

SEQ ID NO: 171299 - DNA, 20 bp, Artificial Sequence
  Synthetic oligonucleotide; GGG chr2 60553989 60554008 60553992 -
attttagagtccgcgtgtgt

SEQ ID NO: 171300 - DNA, 20 bp, Artificial Sequence
  Synthetic oligonucleotide; GGG chr2 60553988 60554007 60553991 -
ttttagagtccgcgtgtgtg

SEQ ID NO: 171301 - DNA, 20 bp, Artificial Sequence
  Synthetic oligonucleotide; GGG chr2 60553987 60554006 60553990 -
tttagagtccgcgtgtgtgg

SEQ ID NO: 171302 - DNA, 20 bp, Artificial Sequence
  Synthetic oligonucleotide; GGG chr2 60553986 60554005 60553989 -
ttagagtccgcgtgtgtggg

SEQ ID NO: 171303 - DNA, 20 bp, Artificial Sequence
  Synthetic oligonucleotide; GGG chr2 60553985 60554004 60553988 -
tagagtccgcgtgtgtgggg

SEQ ID NO: 171304 - DNA, 20 bp, Artificial Sequence
  Synthetic oligonucleotide; GAG chr2 60553983 60554002 60553986 -
gagtccgcgtgtgtgggggg

SEQ ID NO: 171305 - DNA, 20 bp, Artificial Sequence
  Synthetic oligonucleotide; CAG chr2 60553980 60553999 60553983 -
tccgcgtgtgtgggggggag

SEQ ID NO: 171306 - DNA, 20 bp, Artificial Sequence
  Synthetic oligonucleotide; AGG chr2 60553979 60553998 60553982 -
ccgcgtgtgtgggggggagc

SEQ ID NO: 171307 - DNA, 20 bp, Artificial Sequence
  Synthetic oligonucleotide; GGG chr2 60553978 60553997 60553981 -
cgcgtgtgtgggggggagca

SEQ ID NO: 171308 - DNA, 20 bp, Artificial Sequence
  Synthetic oligonucleotide; CGG chr2 60553916 60553935 60553919 -
gccacccctttcttctctcc

SEQ ID NO: 171309 - DNA, 20 bp, Artificial Sequence
  Synthetic oligonucleotide; CGG chr2 60553899 60553918 60553902 -
tcccggccacgccaccgccg

SEQ ID NO: 171310 - DNA, 20 bp, Artificial Sequence
  Synthetic oligonucleotide; CGG chr2 60553887 60553906 60553890 -
caccgccgcggcgctcgctg

SEQ ID NO: 171311 - DNA, 20 bp, Artificial Sequence
  Synthetic oligonucleotide; TGG chr2 60553880 60553899 60553883 -
gcggcgctcgctgcggccac

SEQ ID NO: 171312 - DNA, 20 bp, Artificial Sequence
  Synthetic oligonucleotide; GAG chr2 60553876 60553895 60553879 -
cgctcgctgcggccactggt

SEQ ID NO: 171313 - DNA, 20 bp, Artificial Sequence
  Synthetic oligonucleotide; CGG chr2 60553869 60553888 60553872 -
tgcggccactggtgagcccg

SEQ ID NO: 171314 - DNA, 20 bp, Artificial Sequence
  Synthetic oligonucleotide; CAG chr2 60553863 60553882 60553866 -
cactggtgagcccgcggccc

SEQ ID NO: 171315 - DNA, 20 bp, Artificial Sequence
  Synthetic oligonucleotide; CGG chr2 60553847 60553866 60553850 -
gccccagcgccccctcccct

SEQ ID NO: 171316 - DNA, 20 bp, Artificial Sequence
  Synthetic oligonucleotide; CGG chr2 60553831 60553850 60553834 -
ccctcggcccgcccctcccc

SEQ ID NO: 171317 - DNA, 20 bp, Artificial Sequence
  Synthetic oligonucleotide; GGG chr2 60553830 60553849 60553833 -
cctcggcccgcccctccccc

SEQ ID NO: 171318 - DNA, 20 bp, Artificial Sequence
  Synthetic oligonucleotide; GGG chr2 60553829 60553848 60553832 -
ctcggcccgcccctcccccg

SEQ ID NO: 171319 - DNA, 20 bp, Artificial Sequence
  Synthetic oligonucleotide; GGG chr2 60553828 60553847 60553831 -
tcggcccgcccctcccccgg

SEQ ID NO: 171320 - DNA, 20 bp, Artificial Sequence
  Synthetic oligonucleotide; TGG chr2 60553818 60553837 60553821 -
cctcccccgggggccgcgtc

SEQ ID NO: 171321 - DNA, 20 bp, Artificial Sequence
  Synthetic oligonucleotide; CGG chr2 60553809 60553828 60553812 -
ggggccgcgtctggcgtccg

SEQ ID NO: 171322 - DNA, 20 bp, Artificial Sequence
  Synthetic oligonucleotide; GAG chr2 60553807 60553826 60553810 -
ggccgcgtctggcgtccgcg

SEQ ID NO: 171323 - DNA, 20 bp, Artificial Sequence
  Synthetic oligonucleotide; TGG chr2 60553773 60553792 60553776 -
gcacctccccctccccgcac

SEQ ID NO: 171324 - DNA, 20 bp, Artificial Sequence
  Synthetic oligonucleotide; TGG chr2 60553766 60553785 60553769 -
cccctccccgcactggccat

SEQ ID NO: 171325 - DNA, 20 bp, Artificial Sequence
  Synthetic oligonucleotide; TGG chr2 60553756 60553775 60553759 -
cactggccattggcttgtcc

SEQ ID NO: 171326 - DNA, 20 bp, Artificial Sequence
  Synthetic oligonucleotide; CAG chr2 60553738 60553757 60553741 -
cctggtctctttttcatgtc

SEQ ID NO: 171327 - DNA, 20 bp, Artificial Sequence
  Synthetic oligonucleotide; TGG chr2 60553717 60553736 60553720 -
agcccctgatgtgtgtccat

SEQ ID NO: 171328 - DNA, 20 bp, Artificial Sequence
  Synthetic oligonucleotide; GAG chr2 60553711 60553730 60553714 -
tgatgtgtgtccattggtgt

SEQ ID NO: 171329 - DNA, 20 bp, Artificial Sequence
  Synthetic oligonucleotide; CAG chr2 60553642 60553661 60553645 -
tttgtgtgtctctgtccatc

SEQ ID NO: 171330 - DNA, 20 bp, Artificial Sequence
  Synthetic oligonucleotide; AAG chr2 60553626 60553645 60553629 -
catccagactcctgacgttc

SEQ ID NO: 171331 - DNA, 20 bp, Artificial Sequence
  Synthetic oligonucleotide; CAG chr2 60553619 60553638 60553622 -
actcctgacgttcaagttcg

SEQ ID NO: 171332 - DNA, 20 bp, Artificial Sequence
  Synthetic oligonucleotide; AGG chr2 60553618 60553637 60553621 -
ctcctgacgttcaagttcgc

SEQ ID NO: 171333 - DNA, 20 bp, Artificial Sequence
  Synthetic oligonucleotide; GGG chr2 60553617 60553636 60553620 -
tcctgacgttcaagttcgca

SEQ ID NO: 171334 - DNA, 20 bp, Artificial Sequence
  Synthetic oligonucleotide; CAG chr2 60553590 60553609 60553593 -
cacgtccgcacttgaacttg

SEQ ID NO: 171335 - DNA, 20 bp, Artificial Sequence
  Synthetic oligonucleotide; CAG chr2 60553585 60553604 60553588 -
ccgcacttgaacttgcagct

SEQ ID NO: 171336 - DNA, 20 bp, Artificial Sequence
  Synthetic oligonucleotide; AGG chr2 60553584 60553603 60553587 -
cgcacttgaacttgcagctc

SEQ ID NO: 171337 - DNA, 20 bp, Artificial Sequence
  Synthetic oligonucleotide; GGG chr2 60553583 60553602 60553586 -
gcacttgaacttgcagctca

SEQ ID NO: 171338 - DNA, 20 bp, Artificial Sequence
  Synthetic oligonucleotide; GGG chr2 60553582 60553601 60553585 -
cacttgaacttgcagctcag

SEQ ID NO: 171339 - DNA, 20 bp, Artificial Sequence
  Synthetic oligonucleotide; GGG chr2 60553581 60553600 60553584 -
acttgaacttgcagctcagg

SEQ ID NO: 171340 - DNA, 20 bp, Artificial Sequence
  Synthetic oligonucleotide; GGG chr2 60553580 60553599 60553583 -
cttgaacttgcagctcaggg

SEQ ID NO: 171341 - DNA, 20 bp, Artificial Sequence
  Synthetic oligonucleotide; AAG chr2 60553473 60553492 60553476 -
ttttttttttgcttaaaaaa

SEQ ID NO: 171342 - DNA, 20 bp, Artificial Sequence
  Synthetic oligonucleotide; CGG chr2 60553464 60553483 60553467 -
tgcttaaaaaaaagccatga

SEQ ID NO: 171343 - DNA, 20 bp, Artificial Sequence
  Synthetic oligonucleotide; TGG chr2 60553407 60553426 60553410 -
gtattatttctaatttattt

SEQ ID NO: 171344 - DNA, 20 bp, Artificial Sequence
  Synthetic oligonucleotide; AAG chr2 60553397 60553416 60553400 -
taatttattttggatgtcaa

SEQ ID NO: 171345 - DNA, 20 bp, Artificial Sequence
  Synthetic oligonucleotide; AGG chr2 60553396 60553415 60553399 -
aatttattttggatgtcaaa

SEQ ID NO: 171346 - DNA, 20 bp, Artificial Sequence
  Synthetic oligonucleotide; AAG chr2 60553385 60553404 60553388 -
gatgtcaaaaggcactgatg

SEQ ID NO: 171347 - DNA, 20 bp, Artificial Sequence
  Synthetic oligonucleotide; TGG chr2 60553372 60553391 60553375 -
actgatgaagatattttctc

SEQ ID NO: 171348 - DNA, 20 bp, Artificial Sequence
  Synthetic oligonucleotide; GAG chr2 60553370 60553389 60553373 -
tgatgaagatattttctctg

SEQ ID NO: 171349 - DNA, 20 bp, Artificial Sequence
  Synthetic oligonucleotide; CGG chr2 60553350 60553369 60553353 -
gagtctccttctttctaacc

SEQ ID NO: 171350 - DNA, 20 bp, Artificial Sequence
  Synthetic oligonucleotide; GAG chr2 60553330 60553349 60553333 -
cggctctcccgatgtgaacc

SEQ ID NO: 171351 - DNA, 20 bp, Artificial Sequence
  Synthetic oligonucleotide; CAG chr2 60553280 60553299 60553283 -
cgccgccgccgcccgccccg

SEQ ID NO: 171352 - DNA, 20 bp, Artificial Sequence
  Synthetic oligonucleotide; AAG chr2 60553259 60553278 60553262 -
agcccaccatgtctcgccgc

SEQ ID NO: 171353 - DNA, 20 bp, Artificial Sequence
  Synthetic oligonucleotide; AAG chr2 60553255 60553274 60553258 -
caccatgtctcgccgcaagc

SEQ ID NO: 171354 - DNA, 20 bp, Artificial Sequence
  Synthetic oligonucleotide; AGG chr2 60553254 60553273 60553257 -
accatgtctcgccgcaagca

SEQ ID NO: 171355 - DNA, 20 bp, Artificial Sequence
  Synthetic oligonucleotide; CAG chr2 60553244 60553263 60553247 -
gccgcaagcaaggcaaaccc

SEQ ID NO: 171356 - DNA, 20 bp, Artificial Sequence
  Synthetic oligonucleotide; AAG chr2 60553236 60553255 60553239 -
caaggcaaaccccagcactt

SEQ ID NO: 171357 - DNA, 20 bp, Artificial Sequence
  Synthetic oligonucleotide; CGG chr2 60553229 60553248 60553232 -
aaccccagcacttaagcaaa

SEQ ID NO: 171358 - DNA, 20 bp, Artificial Sequence
  Synthetic oligonucleotide; GGG chr2 60553228 60553247 60553231 -
accccagcacttaagcaaac

SEQ ID NO: 171359 - DNA, 20 bp, Artificial Sequence
  Synthetic oligonucleotide; AAG chr2 60553214 60553233 60553217 -
gcaaacgggaattctcgcgt

SEQ ID NO: 171360 - DNA, 20 bp, Artificial Sequence
  Synthetic oligonucleotide; TAG chr2 60553200 60553219 60553203 -
tcgcgtaagtaacccaataa

SEQ ID NO: 171361 - DNA, 20 bp, Artificial Sequence
  Synthetic oligonucleotide; GAG chr2 60553174 60553193 60553177 -
taataattattaataatcac

SEQ ID NO: 171362 - DNA, 20 bp, Artificial Sequence
  Synthetic oligonucleotide; GAG chr2 60553172 60553191 60553175 -
ataattattaataatcacga

SEQ ID NO: 171363 - DNA, 20 bp, Artificial Sequence
  Synthetic oligonucleotide; CAG chr2 60553165 60553184 60553168 -
ttaataatcacgagagcgcg

SEQ ID NO: 171364 - DNA, 20 bp, Artificial Sequence
  Synthetic oligonucleotide; AGG chr2 60553164 60553183 60553167 -
taataatcacgagagcgcgc

SEQ ID NO: 171365 - DNA, 20 bp, Artificial Sequence
  Synthetic oligonucleotide; TAG chr2 60553159 60553178 60553162 -
atcacgagagcgcgcaggac

SEQ ID NO: 171366 - DNA, 20 bp, Artificial Sequence
  Synthetic oligonucleotide; AAG chr2 60553156 60553175 60553159 -
acgagagcgcgcaggactag

SEQ ID NO: 171367 - DNA, 20 bp, Artificial Sequence
  Synthetic oligonucleotide; AAG chr2 60553150 60553169 60553153 -
gcgcgcaggactagaagcaa

SEQ ID NO: 171368 - DNA, 20 bp, Artificial Sequence
  Synthetic oligonucleotide; GAG chr2 60553146 60553165 60553149 -
gcaggactagaagcaaaagc

SEQ ID NO: 171369 - DNA, 20 bp, Artificial Sequence
  Synthetic oligonucleotide; AGG chr2 60553145 60553164 60553148 -
caggactagaagcaaaagcg

SEQ ID NO: 171370 - DNA, 20 bp, Artificial Sequence
  Synthetic oligonucleotide; GGG chr2 60553144 60553163 60553147 -
aggactagaagcaaaagcga

SEQ ID NO: 171371 - DNA, 20 bp, Artificial Sequence
  Synthetic oligonucleotide; GGG chr2 60553143 60553162 60553146 -
ggactagaagcaaaagcgag

SEQ ID NO: 171372 - DNA, 20 bp, Artificial Sequence
  Synthetic oligonucleotide; GGG chr2 60553142 60553161 60553145 -
gactagaagcaaaagcgagg

SEQ ID NO: 171373 - DNA, 20 bp, Artificial Sequence
  Synthetic oligonucleotide; GAG chr2 60553140 60553159 60553143 -
ctagaagcaaaagcgagggg

SEQ ID NO: 171374 - DNA, 20 bp, Artificial Sequence
  Synthetic oligonucleotide; GAG chr2 60553138 60553157 60553141 -
agaagcaaaagcgaggggga

SEQ ID NO: 171375 - DNA, 20 bp, Artificial Sequence
  Synthetic oligonucleotide; GAG chr2 60553136 60553155 60553139 -
aagcaaaagcgagggggaga

SEQ ID NO: 171376 - DNA, 20 bp, Artificial Sequence
  Synthetic oligonucleotide; AGG chr2 60553135 60553154 60553138 -
agcaaaagcgagggggagag

SEQ ID NO: 171377 - DNA, 20 bp, Artificial Sequence
  Synthetic oligonucleotide; GGG chr2 60553134 60553153 60553137 -
gcaaaagcgagggggagaga

SEQ ID NO: 171378 - DNA, 20 bp, Artificial Sequence
  Synthetic oligonucleotide; GGG chr2 60553133 60553152 60553136 -
caaaagcgagggggagagag

SEQ ID NO: 171379 - DNA, 20 bp, Artificial Sequence
  Synthetic oligonucleotide; GAG chr2 60553102 60553121 60553105 -
tgcatttttaaatttttcac

SEQ ID NO: 171380 - DNA, 20 bp, Artificial Sequence
  Synthetic oligonucleotide; GAG chr2 60553089 60553108 60553092 -
ttttcacgagaaaaacctcc

SEQ ID NO: 171381 - DNA, 20 bp, Artificial Sequence
  Synthetic oligonucleotide; GAG chr2 60553087 60553106 60553090 -
ttcacgagaaaaacctccga

SEQ ID NO: 171382 - DNA, 20 bp, Artificial Sequence
  Synthetic oligonucleotide; GAG chr2 60553082 60553101 60553085 -
gagaaaaacctccgagagtc

SEQ ID NO: 171383 - DNA, 20 bp, Artificial Sequence
  Synthetic oligonucleotide; AGG chr2 60553081 60553100 60553084 -
agaaaaacctccgagagtcg

SEQ ID NO: 171384 - DNA, 20 bp, Artificial Sequence
  Synthetic oligonucleotide; AAG chr2 60553075 60553094 60553078 -
acctccgagagtcgaggtaa

SEQ ID NO: 171385 - DNA, 20 bp, Artificial Sequence
  Synthetic oligonucleotide; GAG chr2 60553073 60553092 60553076 -
ctccgagagtcgaggtaaaa

SEQ ID NO: 171386 - DNA, 20 bp, Artificial Sequence
  Synthetic oligonucleotide; AAG chr2 60553067 60553086 60553070 -
gagtcgaggtaaaagagata

SEQ ID NO: 171387 - DNA, 20 bp, Artificial Sequence
  Synthetic oligonucleotide; AGG chr2 60553066 60553085 60553069 -
agtcgaggtaaaagagataa

SEQ ID NO: 171388 - DNA, 20 bp, Artificial Sequence
  Synthetic oligonucleotide; GGG chr2 60553065 60553084 60553068 -
gtcgaggtaaaagagataaa

SEQ ID NO: 171389 - DNA, 20 bp, Artificial Sequence
  Synthetic oligonucleotide; GGG chr2 60553064 60553083 60553067 -
tcgaggtaaaagagataaag

SEQ ID NO: 171390 - DNA, 20 bp, Artificial Sequence
  Synthetic oligonucleotide; GGG chr2 60553063 60553082 60553066 -
cgaggtaaaagagataaagg

SEQ ID NO: 171391 - DNA, 20 bp, Artificial Sequence
  Synthetic oligonucleotide; TGG chr2 60553041 60553060 60553044 -
gaaaaaaccctcatcccatc

SEQ ID NO: 171392 - DNA, 20 bp, Artificial Sequence
  Synthetic oligonucleotide; GAG chr2 60553014 60553033 60553017 -
attgccgtgtatgcactttt

SEQ ID NO: 171393 - DNA, 20 bp, Artificial Sequence
  Synthetic oligonucleotide; CAG chr2 60553010 60553029 60553013 -
ccgtgtatgcacttttgaga

SEQ ID NO: 171394 - DNA, 20 bp, Artificial Sequence
  Synthetic oligonucleotide; AAG chr2 60552922 60552941 60552925 -
gctttatttctcttttcgaa

SEQ ID NO: 171395 - DNA, 20 bp, Artificial Sequence
  Synthetic oligonucleotide; AGG chr2 60552921 60552940 60552924 -
ctttatttctcttttcgaaa

SEQ ID NO: 171396 - DNA, 20 bp, Artificial Sequence
  Synthetic oligonucleotide; CAG chr2 60552886 60552905 60552889 -
ccactccccccccgccccgc

SEQ ID NO: 171397 - DNA, 20 bp, Artificial Sequence
  Synthetic oligonucleotide; AAG chr2 60552859 60552878 60552862 -
gcaaaataatgaacaatgct

SEQ ID NO: 171398 - DNA, 20 bp, Artificial Sequence
  Synthetic oligonucleotide; AGG chr2 60552858 60552877 60552861 -
caaaataatgaacaatgcta

SEQ ID NO: 171399 - DNA, 20 bp, Artificial Sequence
  Synthetic oligonucleotide; TGG chr2 60552831 60552850 60552834 -
gaacaactcacatgcaaacc

SEQ ID NO: 171400 - DNA, 20 bp, Artificial Sequence
  Synthetic oligonucleotide; GGG chr2 60552830 60552849 60552833 -
aacaactcacatgcaaacct

SEQ ID NO: 171401 - DNA, 20 bp, Artificial Sequence
  Synthetic oligonucleotide; GGG chr2 60552829 60552848 60552832 -
acaactcacatgcaaacctg

SEQ ID NO: 171402 - DNA, 20 bp, Artificial Sequence
  Synthetic oligonucleotide; GGG chr2 60552828 60552847 60552831 -
caactcacatgcaaacctgg

SEQ ID NO: 171403 - DNA, 20 bp, Artificial Sequence
  Synthetic oligonucleotide; TGG chr2 60552825 60552844 60552828 -
ctcacatgcaaacctggggg

SEQ ID NO: 171404 - DNA, 20 bp, Artificial Sequence
  Synthetic oligonucleotide; GGG chr2 60552824 60552843 60552827 -
tcacatgcaaacctgggggt

SEQ ID NO: 171405 - DNA, 20 bp, Artificial Sequence
  Synthetic oligonucleotide; GAG chr2 60552822 60552841 60552825 -
acatgcaaacctgggggtgg

SEQ ID NO: 171406 - DNA, 20 bp, Artificial Sequence
  Synthetic oligonucleotide; TGG chr2 60552818 60552837 60552821 -
gcaaacctgggggtgggagc

SEQ ID NO: 171407 - DNA, 20 bp, Artificial Sequence
  Synthetic oligonucleotide; TGG chr2 60552815 60552834 60552818 -
aacctgggggtgggagctgg

SEQ ID NO: 171408 - DNA, 20 bp, Artificial Sequence
  Synthetic oligonucleotide; GGG chr2 60552814 60552833 60552817 -
acctgggggtgggagctggt

SEQ ID NO: 171409 - DNA, 20 bp, Artificial Sequence
  Synthetic oligonucleotide; GGG chr2 60552813 60552832 60552816 -
cctgggggtgggagctggtg

SEQ ID NO: 171410 - DNA, 20 bp, Artificial Sequence
  Synthetic oligonucleotide; AAG chr2 60552809 60552828 60552812 -
ggggtgggagctggtgggga

SEQ ID NO: 171411 - DNA, 20 bp, Artificial Sequence
  Synthetic oligonucleotide; AGG chr2 60552808 60552827 60552811 -
gggtgggagctggtggggaa

SEQ ID NO: 171412 - DNA, 20 bp, Artificial Sequence
  Synthetic oligonucleotide; GGG chr2 60552807 60552826 60552810 -
ggtgggagctggtggggaaa

SEQ ID NO: 171413 - DNA, 20 bp, Artificial Sequence
  Synthetic oligonucleotide; GAG chr2 60552805 60552824 60552808 -
tgggagctggtggggaaagg

SEQ ID NO: 171414 - DNA, 20 bp, Artificial Sequence
  Synthetic oligonucleotide; AGG chr2 60552804 60552823 60552807 -
gggagctggtggggaaaggg

SEQ ID NO: 171415 - DNA, 20 bp, Artificial Sequence
  Synthetic oligonucleotide; AAG chr2 60552783 60552802 60552786 -
ggttgcttcccactcaccgt

SEQ ID NO: 171416 - DNA, 20 bp, Artificial Sequence
  Synthetic oligonucleotide; TGG chr2 60552776 60552795 60552779 -
tcccactcaccgtaagaaaa

SEQ ID NO: 171417 - DNA, 20 bp, Artificial Sequence
  Synthetic oligonucleotide; GGG chr2 60552775 60552794 60552778 -
cccactcaccgtaagaaaat

SEQ ID NO: 171418 - DNA, 20 bp, Artificial Sequence
  Synthetic oligonucleotide; GGG chr2 60552774 60552793 60552777 -
ccactcaccgtaagaaaatg

SEQ ID NO: 171419 - DNA, 20 bp, Artificial Sequence
  Synthetic oligonucleotide; GGG chr2 60552773 60552792 60552776 -
cactcaccgtaagaaaatgg

SEQ ID NO: 171420 - DNA, 20 bp, Artificial Sequence
  Synthetic oligonucleotide; GGG chr2 60552772 60552791 60552775 -
actcaccgtaagaaaatggg

SEQ ID NO: 171421 - DNA, 20 bp, Artificial Sequence
  Synthetic oligonucleotide; GGG chr2 60552771 60552790 60552774 -
ctcaccgtaagaaaatgggg

SEQ ID NO: 171422 - DNA, 20 bp, Artificial Sequence
  Synthetic oligonucleotide; TAG chr2 60552768 60552787 60552771 -
accgtaagaaaatggggggg

SEQ ID NO: 171423 - DNA, 20 bp, Artificial Sequence
  Synthetic oligonucleotide; AGG chr2 60552767 60552786 60552770 -
ccgtaagaaaatgggggggt

SEQ ID NO: 171424 - DNA, 20 bp, Artificial Sequence
  Synthetic oligonucleotide; GGG chr2 60552766 60552785 60552769 -
cgtaagaaaatgggggggta

SEQ ID NO: 171425 - DNA, 20 bp, Artificial Sequence
  Synthetic oligonucleotide; GAG chr2 60552764 60552783 60552767 -
taagaaaatgggggggtagg

SEQ ID NO: 171426 - DNA, 20 bp, Artificial Sequence
  Synthetic oligonucleotide; AGG chr2 60552763 60552782 60552766 -
aagaaaatgggggggtaggg

SEQ ID NO: 171427 - DNA, 20 bp, Artificial Sequence
  Synthetic oligonucleotide; GGG chr2 60552762 60552781 60552765 -
agaaaatgggggggtaggga

SEQ ID NO: 171428 - DNA, 20 bp, Artificial Sequence
  Synthetic oligonucleotide; GAG chr2 60552760 60552779 60552763 -
aaaatgggggggtagggagg

SEQ ID NO: 171429 - DNA, 20 bp, Artificial Sequence
  Synthetic oligonucleotide; GAG chr2 60552756 60552775 60552759 -
tgggggggtagggagggagt

SEQ ID NO: 171430 - DNA, 20 bp, Artificial Sequence
  Synthetic oligonucleotide; AAG chr2 60552750 60552769 60552753 -
ggtagggagggagtgagtac

SEQ ID NO: 171431 - DNA, 20 bp, Artificial Sequence
  Synthetic oligonucleotide; CGG chr2 60552731 60552750 60552734 -
caagtctaaaaaacgattcc

SEQ ID NO: 171432 - DNA, 20 bp, Artificial Sequence
  Synthetic oligonucleotide; GGG chr2 60552730 60552749 60552733 -
aagtctaaaaaacgattccc

SEQ ID NO: 171433 - DNA, 20 bp, Artificial Sequence
  Synthetic oligonucleotide; GGG chr2 60552729 60552748 60552732 -
agtctaaaaaacgattcccg

SEQ ID NO: 171434 - DNA, 20 bp, Artificial Sequence
  Synthetic oligonucleotide; GAG chr2 60552727 60552746 60552730 -
tctaaaaaacgattcccggg

SEQ ID NO: 171435 - DNA, 20 bp, Artificial Sequence
  Synthetic oligonucleotide; AAG chr2 60552722 60552741 60552725 -
aaaacgattcccggggagaa

SEQ ID NO: 171436 - DNA, 20 bp, Artificial Sequence
  Synthetic oligonucleotide; GAG chr2 60552720 60552739 60552723 -
aacgattcccggggagaaaa

SEQ ID NO: 171437 - DNA, 20 bp, Artificial Sequence
  Synthetic oligonucleotide; AGG chr2 60552719 60552738 60552722 -
acgattcccggggagaaaag

SEQ ID NO: 171438 - DNA, 20 bp, Artificial Sequence
  Synthetic oligonucleotide; GAG chr2 60552715 60552734 60552718 -
ttcccggggagaaaagaggt

SEQ ID NO: 171439 - DNA, 20 bp, Artificial Sequence
  Synthetic oligonucleotide; TGG chr2 60552710 60552729 60552713 -
ggggagaaaagaggtgagac

SEQ ID NO: 171440 - DNA, 20 bp, Artificial Sequence
  Synthetic oligonucleotide; TGG chr2 60552703 60552722 60552706 -
aaagaggtgagactggcttt

SEQ ID NO: 171441 - DNA, 20 bp, Artificial Sequence
  Synthetic oligonucleotide; CAG chr2 60552696 60552715 60552699 -
tgagactggcttttggacac

SEQ ID NO: 171442 - DNA, 20 bp, Artificial Sequence
  Synthetic oligonucleotide; CGG chr2 60552685 60552704 60552688 -
tttggacaccagcgcgctca

SEQ ID NO: 171443 - DNA, 20 bp, Artificial Sequence
  Synthetic oligonucleotide; AAG chr2 60552680 60552699 60552683 -
acaccagcgcgctcacggtc

SEQ ID NO: 171444 - DNA, 20 bp, Artificial Sequence
  Synthetic oligonucleotide; CAG chr2 60552673 60552692 60552676 -
cgcgctcacggtcaagtgtg

SEQ ID NO: 171445 - DNA, 20 bp, Artificial Sequence
  Synthetic oligonucleotide; CGG chr2 60552670 60552689 60552673 -
gctcacggtcaagtgtgcag

SEQ ID NO: 171446 - DNA, 20 bp, Artificial Sequence
  Synthetic oligonucleotide; GGG chr2 60552669 60552688 60552672 -
ctcacggtcaagtgtgcagc

SEQ ID NO: 171447 - DNA, 20 bp, Artificial Sequence
  Synthetic oligonucleotide; GAG chr2 60552667 60552686 60552670 -
cacggtcaagtgtgcagcgg

SEQ ID NO: 171448 - DNA, 20 bp, Artificial Sequence
  Synthetic oligonucleotide; AGG chr2 60552666 60552685 60552669 -
acggtcaagtgtgcagcggg

SEQ ID NO: 171449 - DNA, 20 bp, Artificial Sequence
  Synthetic oligonucleotide; AAG chr2 60552662 60552681 60552665 -
tcaagtgtgcagcgggagga

SEQ ID NO: 171450 - DNA, 20 bp, Artificial Sequence
  Synthetic oligonucleotide; TAG chr2 60552659 60552678 60552662 -
agtgtgcagcgggaggaaag

SEQ ID NO: 171451 - DNA, 20 bp, Artificial Sequence
  Synthetic oligonucleotide; TAG chr2 60552644 60552663 60552647 -
gaaagtagtcatccccacaa

SEQ ID NO: 171452 - DNA, 20 bp, Artificial Sequence
  Synthetic oligonucleotide; GAG chr2 60552640 60552659 60552643 -
gtagtcatccccacaatagt

SEQ ID NO: 171453 - DNA, 20 bp, Artificial Sequence
  Synthetic oligonucleotide; AAG chr2 60552636 60552655 60552639 -
tcatccccacaatagtgaga

SEQ ID NO: 171454 - DNA, 20 bp, Artificial Sequence
  Synthetic oligonucleotide; TGG chr2 60552633 60552652 60552636 -
tccccacaatagtgagaaag

SEQ ID NO: 171455 - DNA, 20 bp, Artificial Sequence
  Synthetic oligonucleotide; TGG chr2 60552625 60552644 60552628 -
atagtgagaaagtggcactg

SEQ ID NO: 171456 - DNA, 20 bp, Artificial Sequence
  Synthetic oligonucleotide; AAG chr2 60552621 60552640 60552624 -
tgagaaagtggcactgtgga

SEQ ID NO: 171457 - DNA, 20 bp, Artificial Sequence
  Synthetic oligonucleotide; AGG chr2 60552620 60552639 60552623 -
gagaaagtggcactgtggaa

SEQ ID NO: 171458 - DNA, 20 bp, Artificial Sequence
  Synthetic oligonucleotide; GGG chr2 60552619 60552638 60552622 -
agaaagtggcactgtggaaa

SEQ ID NO: 171459 - DNA, 20 bp, Artificial Sequence
  Synthetic oligonucleotide; GGG chr2 60552618 60552637 60552621 -
gaaagtggcactgtggaaag

SEQ ID NO: 171460 - DNA, 20 bp, Artificial Sequence
  Synthetic oligonucleotide; CGG chr2 60552611 60552630 60552614 -
gcactgtggaaaggggcccc

SEQ ID NO: 171461 - DNA, 20 bp, Artificial Sequence
  Synthetic oligonucleotide; GAG chr2 60552601 60552620 60552604 -
aaggggcccccggcgctcct

SEQ ID NO: 171462 - DNA, 20 bp, Artificial Sequence
  Synthetic oligonucleotide; CGG chr2 60552594 60552613 60552597 -
ccccggcgctcctgagtccg

SEQ ID NO: 171463 - DNA, 20 bp, Artificial Sequence
  Synthetic oligonucleotide; GAG chr2 60552592 60552611 60552595 -
ccggcgctcctgagtccgcg

SEQ ID NO: 171464 - DNA, 20 bp, Artificial Sequence
  Synthetic oligonucleotide; CGG chr2 60552588 60552607 60552591 -
cgctcctgagtccgcggagt

SEQ ID NO: 171465 - DNA, 20 bp, Artificial Sequence
  Synthetic oligonucleotide; GGG chr2 60552587 60552606 60552590 -
gctcctgagtccgcggagtc

SEQ ID NO: 171466 - DNA, 20 bp, Artificial Sequence
  Synthetic oligonucleotide; GAG chr2 60552585 60552604 60552588 -
tcctgagtccgcggagtcgg

SEQ ID NO: 171467 - DNA, 20 bp, Artificial Sequence
  Synthetic oligonucleotide; GAG chr2 60552583 60552602 60552586 -
ctgagtccgcggagtcggga

SEQ ID NO: 171468 - DNA, 20 bp, Artificial Sequence
  Synthetic oligonucleotide; AGG chr2 60552582 60552601 60552585 -
tgagtccgcggagtcgggag

SEQ ID NO: 171469 - DNA, 20 bp, Artificial Sequence
  Synthetic oligonucleotide; GGG chr2 60552581 60552600 60552584 -
gagtccgcggagtcgggaga

SEQ ID NO: 171470 - DNA, 20 bp, Artificial Sequence
  Synthetic oligonucleotide; GGG chr2 60552580 60552599 60552583 -
agtccgcggagtcgggagag

SEQ ID NO: 171471 - DNA, 20 bp, Artificial Sequence
  Synthetic oligonucleotide; CGG chr2 60552574 60552593 60552577 -
cggagtcgggagaggggccg

SEQ ID NO: 171472 - DNA, 20 bp, Artificial Sequence
  Synthetic oligonucleotide; CGG chr2 60552568 60552587 60552571 -
cgggagaggggccgcggcga

SEQ ID NO: 171473 - DNA, 20 bp, Artificial Sequence
  Synthetic oligonucleotide; GGG chr2 60552567 60552586 60552570 -
gggagaggggccgcggcgac

SEQ ID NO: 171474 - DNA, 20 bp, Artificial Sequence
  Synthetic oligonucleotide; GGG chr2 60552566 60552585 60552569 -
ggagaggggccgcggcgacg

SEQ ID NO: 171475 - DNA, 20 bp, Artificial Sequence
  Synthetic oligonucleotide; GAG chr2 60552564 60552583 60552567 -
agaggggccgcggcgacggg

SEQ ID NO: 171476 - DNA, 20 bp, Artificial Sequence
  Synthetic oligonucleotide; GAG chr2 60552562 60552581 60552565 -
aggggccgcggcgacgggga

SEQ ID NO: 171477 - DNA, 20 bp, Artificial Sequence
  Synthetic oligonucleotide; TGG chr2 60552556 60552575 60552559 -
cgcggcgacggggagagccg

SEQ ID NO: 171478 - DNA, 20 bp, Artificial Sequence
  Synthetic oligonucleotide; GGG chr2 60552555 60552574 60552558 -
gcggcgacggggagagccgt

SEQ ID NO: 171479 - DNA, 20 bp, Artificial Sequence
  Synthetic oligonucleotide; CGG chr2 60552550 60552569 60552553 -
gacggggagagccgtgggac

SEQ ID NO: 171480 - DNA, 20 bp, Artificial Sequence
  Synthetic oligonucleotide; GGG chr2 60552549 60552568 60552552 -
acggggagagccgtgggacc

SEQ ID NO: 171481 - DNA, 20 bp, Artificial Sequence
  Synthetic oligonucleotide; AAG chr2 60552546 60552565 60552549 -
gggagagccgtgggaccggg

SEQ ID NO: 171482 - DNA, 20 bp, Artificial Sequence
  Synthetic oligonucleotide; AGG chr2 60552545 60552564 60552548 -
ggagagccgtgggaccggga

SEQ ID NO: 171483 - DNA, 20 bp, Artificial Sequence
  Synthetic oligonucleotide; CGG chr2 60552541 60552560 60552544 -
agccgtgggaccgggaagga

SEQ ID NO: 171484 - DNA, 20 bp, Artificial Sequence
  Synthetic oligonucleotide; GGG chr2 60552540 60552559 60552543 -
gccgtgggaccgggaaggac

SEQ ID NO: 171485 - DNA, 20 bp, Artificial Sequence
  Synthetic oligonucleotide; GAG chr2 60552538 60552557 60552541 -
cgtgggaccgggaaggacgg

SEQ ID NO: 171486 - DNA, 20 bp, Artificial Sequence
  Synthetic oligonucleotide; CGG chr2 60552532 60552551 60552535 -
accgggaaggacgggagacg

SEQ ID NO: 171487 - DNA, 20 bp, Artificial Sequence
  Synthetic oligonucleotide; CGG chr2 60552528 60552547 60552531 -
ggaaggacgggagacgcggc

SEQ ID NO: 171488 - DNA, 20 bp, Artificial Sequence
  Synthetic oligonucleotide; CGG chr2 60552507 60552526 60552510 -
ggcactgccgccttttgttc

SEQ ID NO: 171489 - DNA, 20 bp, Artificial Sequence
  Synthetic oligonucleotide; CAG chr2 60552503 60552522 60552506 -
ctgccgccttttgttccggc

SEQ ID NO: 171490 - DNA, 20 bp, Artificial Sequence
  Synthetic oligonucleotide; GAG chr2 60552501 60552520 60552504 -
gccgccttttgttccggcca

SEQ ID NO: 171491 - DNA, 20 bp, Artificial Sequence
  Synthetic oligonucleotide; AGG chr2 60552500 60552519 60552503 -
ccgccttttgttccggccag

SEQ ID NO: 171492 - DNA, 20 bp, Artificial Sequence
  Synthetic oligonucleotide; TGG chr2 60552497 60552516 60552500 -
ccttttgttccggccagagg

SEQ ID NO: 171493 - DNA, 20 bp, Artificial Sequence
  Synthetic oligonucleotide; GGG chr2 60552496 60552515 60552499 -
cttttgttccggccagaggt

SEQ ID NO: 171494 - DNA, 20 bp, Artificial Sequence
  Synthetic oligonucleotide; CGG chr2 60552469 60552488 60552472 -
tgtcccgctgccttttgtgc

SEQ ID NO: 171495 - DNA, 20 bp, Artificial Sequence
  Synthetic oligonucleotide; AAG chr2 60552422 60552441 60552425 -
cgccgccgccgccgccgccg

SEQ ID NO: 171496 - DNA, 20 bp, Artificial Sequence
  Synthetic oligonucleotide; AGG chr2 60552421 60552440 60552424 -
gccgccgccgccgccgccga

SEQ ID NO: 171497 - DNA, 20 bp, Artificial Sequence
  Synthetic oligonucleotide; GGG chr2 60552420 60552439 60552423 -
ccgccgccgccgccgccgaa

SEQ ID NO: 171498 - DNA, 20 bp, Artificial Sequence
  Synthetic oligonucleotide; CAG chr2 60552417 60552436 60552420 -
ccgccgccgccgccgaaggg

SEQ ID NO: 171499 - DNA, 20 bp, Artificial Sequence
  Synthetic oligonucleotide; AGG chr2 60552416 60552435 60552419 -
cgccgccgccgccgaagggc

SEQ ID NO: 171500 - DNA, 20 bp, Artificial Sequence
  Synthetic oligonucleotide; GAG chr2 60552414 60552433 60552417 -
ccgccgccgccgaagggcag

SEQ ID NO: 171501 - DNA, 20 bp, Artificial Sequence
  Synthetic oligonucleotide; TAG chr2 60552410 60552429 60552413 -
cgccgccgaagggcaggagc

SEQ ID NO: 171502 - DNA, 20 bp, Artificial Sequence
  Synthetic oligonucleotide; AGG chr2 60552409 60552428 60552412 -
gccgccgaagggcaggagct

SEQ ID NO: 171503 - DNA, 20 bp, Artificial Sequence
  Synthetic oligonucleotide; GGG chr2 60552408 60552427 60552411 -
ccgccgaagggcaggagcta

SEQ ID NO: 171504 - DNA, 20 bp, Artificial Sequence
  Synthetic oligonucleotide; CGG chr2 60552404 60552423 60552407 -
cgaagggcaggagctagggc

SEQ ID NO: 171505 - DNA, 20 bp, Artificial Sequence
  Synthetic oligonucleotide; GGG chr2 60552403 60552422 60552406 -
gaagggcaggagctagggcc

SEQ ID NO: 171506 - DNA, 20 bp, Artificial Sequence
  Synthetic oligonucleotide; GGG chr2 60552402 60552421 60552405 -
aagggcaggagctagggccg

SEQ ID NO: 171507 - DNA, 20 bp, Artificial Sequence
  Synthetic oligonucleotide; GGG chr2 60552401 60552420 60552404 -
agggcaggagctagggccgg

SEQ ID NO: 171508 - DNA, 20 bp, Artificial Sequence
  Synthetic oligonucleotide; GAG chr2 60552399 60552418 60552402 -
ggcaggagctagggccgggg

SEQ ID NO: 171509 - DNA, 20 bp, Artificial Sequence
  Synthetic oligonucleotide; AGG chr2 60552398 60552417 60552401 -
gcaggagctagggccggggg

SEQ ID NO: 171510 - DNA, 20 bp, Artificial Sequence
  Synthetic oligonucleotide; GAG chr2 60552396 60552415 60552399 -
aggagctagggccgggggag

SEQ ID NO: 171511 - DNA, 20 bp, Artificial Sequence
  Synthetic oligonucleotide; AGG chr2 60552395 60552414 60552398 -
ggagctagggccgggggagg

SEQ ID NO: 171512 - DNA, 20 bp, Artificial Sequence
  Synthetic oligonucleotide; CGG chr2 60552392 60552411 60552395 -
gctagggccgggggaggagg

SEQ ID NO: 171513 - DNA, 20 bp, Artificial Sequence
  Synthetic oligonucleotide; CGG chr2 60552388 60552407 60552391 -
gggccgggggaggaggcggc

SEQ ID NO: 171514 - DNA, 20 bp, Artificial Sequence
  Synthetic oligonucleotide; GGG chr2 60552387 60552406 60552390 -
ggccgggggaggaggcggcc

SEQ ID NO: 171515 - DNA, 20 bp, Artificial Sequence
  Synthetic oligonucleotide; GGG chr2 60552386 60552405 60552389 -
gccgggggaggaggcggccg

SEQ ID NO: 171516 - DNA, 20 bp, Artificial Sequence
  Synthetic oligonucleotide; GGG chr2 60552385 60552404 60552388 -
ccgggggaggaggcggccgg

SEQ ID NO: 171517 - DNA, 20 bp, Artificial Sequence
  Synthetic oligonucleotide; CGG chr2 60552378 60552397 60552381 -
aggaggcggccgggggcacg

SEQ ID NO: 171518 - DNA, 20 bp, Artificial Sequence
  Synthetic oligonucleotide; GGG chr2 60552377 60552396 60552380 -
ggaggcggccgggggcacgc

SEQ ID NO: 171519 - DNA, 20 bp, Artificial Sequence
  Synthetic oligonucleotide; GAG chr2 60552375 60552394 60552378 -
aggcggccgggggcacgcgg

SEQ ID NO: 171520 - DNA, 20 bp, Artificial Sequence
  Synthetic oligonucleotide; GAG chr2 60552373 60552392 60552376 -
gcggccgggggcacgcggga

SEQ ID NO: 171521 - DNA, 20 bp, Artificial Sequence
  Synthetic oligonucleotide; AGG chr2 60552372 60552391 60552375 -
cggccgggggcacgcgggag

SEQ ID NO: 171522 - DNA, 20 bp, Artificial Sequence
  Synthetic oligonucleotide; GGG chr2 60552371 60552390 60552374 -
ggccgggggcacgcgggaga

SEQ ID NO: 171523 - DNA, 20 bp, Artificial Sequence
  Synthetic oligonucleotide; GAG chr2 60552369 60552388 60552372 -
ccgggggcacgcgggagagg

SEQ ID NO: 171524 - DNA, 20 bp, Artificial Sequence
  Synthetic oligonucleotide; AGG chr2 60552368 60552387 60552371 -
cgggggcacgcgggagaggg

SEQ ID NO: 171525 - DNA, 20 bp, Artificial Sequence
  Synthetic oligonucleotide; GGG chr2 60552367 60552386 60552370 -
gggggcacgcgggagaggga

SEQ ID NO: 171526 - DNA, 20 bp, Artificial Sequence
  Synthetic oligonucleotide; GAG chr2 60552365 60552384 60552368 -
gggcacgcgggagagggagg

SEQ ID NO: 171527 - DNA, 20 bp, Artificial Sequence
  Synthetic oligonucleotide; AGG chr2 60552364 60552383 60552367 -
ggcacgcgggagagggaggg

SEQ ID NO: 171528 - DNA, 20 bp, Artificial Sequence
  Synthetic oligonucleotide; GGG chr2 60552363 60552382 60552366 -
gcacgcgggagagggaggga

SEQ ID NO: 171529 - DNA, 20 bp, Artificial Sequence
  Synthetic oligonucleotide; GAG chr2 60552361 60552380 60552364 -
acgcgggagagggagggagg

SEQ ID NO: 171530 - DNA, 20 bp, Artificial Sequence
  Synthetic oligonucleotide; CGG chr2 60552356 60552375 60552359 -
ggagagggagggagggagcc

SEQ ID NO: 171531 - DNA, 20 bp, Artificial Sequence
  Synthetic oligonucleotide; TGG chr2 60552341 60552360 60552344 -
gagcccggactgctgcctcc

SEQ ID NO: 171532 - DNA, 20 bp, Artificial Sequence
  Synthetic oligonucleotide; GGG chr2 60552340 60552359 60552343 -
agcccggactgctgcctcct

SEQ ID NO: 171533 - DNA, 20 bp, Artificial Sequence
  Synthetic oligonucleotide; CAG chr2 60552306 60552325 60552309 -
ctcccctcccgaccgaacct

SEQ ID NO: 171534 - DNA, 20 bp, Artificial Sequence
  Synthetic oligonucleotide; GAG chr2 60552304 60552323 60552307 -
cccctcccgaccgaacctca

SEQ ID NO: 171535 - DNA, 20 bp, Artificial Sequence
  Synthetic oligonucleotide; AGG chr2 60552303 60552322 60552306 -
ccctcccgaccgaacctcag

SEQ ID NO: 171536 - DNA, 20 bp, Artificial Sequence
  Synthetic oligonucleotide; CAG chr2 60552300 60552319 60552303 -
tcccgaccgaacctcagagg

SEQ ID NO: 171537 - DNA, 20 bp, Artificial Sequence
  Synthetic oligonucleotide; AAG chr2 60552296 60552315 60552299 -
gaccgaacctcagaggcagc

SEQ ID NO: 171538 - DNA, 20 bp, Artificial Sequence
  Synthetic oligonucleotide; AGG chr2 60552295 60552314 60552298 -
accgaacctcagaggcagca

SEQ ID NO: 171539 - DNA, 20 bp, Artificial Sequence
  Synthetic oligonucleotide; GAG chr2 60552293 60552312 60552296 -
cgaacctcagaggcagcaag

SEQ ID NO: 171540 - DNA, 20 bp, Artificial Sequence
  Synthetic oligonucleotide; AAG chr2 60552290 60552309 60552293 -
acctcagaggcagcaaggag

SEQ ID NO: 171541 - DNA, 20 bp, Artificial Sequence
  Synthetic oligonucleotide; TGG chr2 60552285 60552304 60552288 -
agaggcagcaaggagaagac

SEQ ID NO: 171542 - DNA, 20 bp, Artificial Sequence
  Synthetic oligonucleotide; AAG chr2 60552241 60552260 60552244 -
aaaaataaaataaataaaac

SEQ ID NO: 171543 - DNA, 20 bp, Artificial Sequence
  Synthetic oligonucleotide; AGG chr2 60552240 60552259 60552243 -
aaaataaaataaataaaaca

SEQ ID NO: 171544 - DNA, 20 bp, Artificial Sequence
  Synthetic oligonucleotide; AAG chr2 60552236 60552255 60552239 -
taaaataaataaaacaaggc

SEQ ID NO: 171545 - DNA, 20 bp, Artificial Sequence
  Synthetic oligonucleotide; GAG chr2 60552234 60552253 60552237 -
aaataaataaaacaaggcaa

SEQ ID NO: 171546 - DNA, 20 bp, Artificial Sequence
  Synthetic oligonucleotide; AAG chr2 60552204 60552223 60552207 -
aatttcttgcccccaaaccg

SEQ ID NO: 171547 - DNA, 20 bp, Artificial Sequence
  Synthetic oligonucleotide; CGG chr2 60552172 60552191 60552175 -
ctgccaacccttttctgtga

SEQ ID NO: 171548 - DNA, 20 bp, Artificial Sequence
  Synthetic oligonucleotide; CAG chr2 60552148 60552167 60552151 -
cttctctttgactcccccac

SEQ ID NO: 171549 - DNA, 20 bp, Artificial Sequence
  Synthetic oligonucleotide; TAG chr2 60552114 60552133 60552117 -
aaatctcacaatctctcatc

SEQ ID NO: 171550 - DNA, 20 bp, Artificial Sequence
  Synthetic oligonucleotide; CAG chr2 60552073 60552092 60552076 -
cctcttcccccaaacccctt

SEQ ID NO: 171551 - DNA, 20 bp, Artificial Sequence
  Synthetic oligonucleotide; TAG chr2 60552061 60552080 60552064 -
aaccccttcagttgcaaact

SEQ ID NO: 171552 - DNA, 20 bp, Artificial Sequence
  Synthetic oligonucleotide; AGG chr2 60552060 60552079 60552063 -
accccttcagttgcaaactt

SEQ ID NO: 171553 - DNA, 20 bp, Artificial Sequence
  Synthetic oligonucleotide; GGG chr2 60552059 60552078 60552062 -
ccccttcagttgcaaactta

SEQ ID NO: 171554 - DNA, 20 bp, Artificial Sequence
  Synthetic oligonucleotide; CGG chr2 60552050 60552069 60552053 -
ttgcaaacttagggcgccga

SEQ ID NO: 171555 - DNA, 20 bp, Artificial Sequence
  Synthetic oligonucleotide; CGG chr2 60552045 60552064 60552048 -
aacttagggcgccgacggca

SEQ ID NO: 171556 - DNA, 20 bp, Artificial Sequence
  Synthetic oligonucleotide; GAG chr2 60552043 60552062 60552046 -
cttagggcgccgacggcacg

SEQ ID NO: 171557 - DNA, 20 bp, Artificial Sequence
  Synthetic oligonucleotide; GAG chr2 60552041 60552060 60552044 -
tagggcgccgacggcacgga

SEQ ID NO: 171558 - DNA, 20 bp, Artificial Sequence
  Synthetic oligonucleotide; AGG chr2 60552040 60552059 60552043 -
agggcgccgacggcacggag

SEQ ID NO: 171559 - DNA, 20 bp, Artificial Sequence
  Synthetic oligonucleotide; GGG chr2 60552039 60552058 60552042 -
gggcgccgacggcacggaga

SEQ ID NO: 171560 - DNA, 20 bp, Artificial Sequence
  Synthetic oligonucleotide; GAG chr2 60552037 60552056 60552040 -
gcgccgacggcacggagagg

SEQ ID NO: 171561 - DNA, 20 bp, Artificial Sequence
  Synthetic oligonucleotide; GAG chr2 60552035 60552054 60552038 -
gccgacggcacggagaggga

SEQ ID NO: 171562 - DNA, 20 bp, Artificial Sequence
  Synthetic oligonucleotide; GAG chr2 60552033 60552052 60552036 -
cgacggcacggagagggaga

SEQ ID NO: 171563 - DNA, 20 bp, Artificial Sequence
  Synthetic oligonucleotide; AGG chr2 60552032 60552051 60552035 -
gacggcacggagagggagag

SEQ ID NO: 171564 - DNA, 20 bp, Artificial Sequence
  Synthetic oligonucleotide; TGG chr2 60552006 60552025 60552009 -
tccctcctcttactattttt

SEQ ID NO: 171565 - DNA, 20 bp, Artificial Sequence
  Synthetic oligonucleotide; AAG chr2 60552003 60552022 60552006 -
ctcctcttactattttttgg

SEQ ID NO: 171566 - DNA, 20 bp, Artificial Sequence
  Synthetic oligonucleotide; AAG chr2 60551989 60552008 60551992 -
ttttggaagattttcaaaaa

SEQ ID NO: 171567 - DNA, 20 bp, Artificial Sequence
  Synthetic oligonucleotide; TGG chr2 60551986 60552005 60551989 -
tggaagattttcaaaaaaag

SEQ ID NO: 171568 - DNA, 20 bp, Artificial Sequence
  Synthetic oligonucleotide; AAG chr2 60551983 60552002 60551986 -
aagattttcaaaaaaagtgg

SEQ ID NO: 171569 - DNA, 20 bp, Artificial Sequence
  Synthetic oligonucleotide; TGG chr2 60551980 60551999 60551983 -
attttcaaaaaaagtggaag

SEQ ID NO: 171570 - DNA, 20 bp, Artificial Sequence
  Synthetic oligonucleotide; TGG chr2 60551969 60551988 60551972 -
aagtggaagtggattttgat

SEQ ID NO: 171571 - DNA, 20 bp, Artificial Sequence
  Synthetic oligonucleotide; GGG chr2 60551968 60551987 60551971 -
agtggaagtggattttgatt

SEQ ID NO: 171572 - DNA, 20 bp, Artificial Sequence
  Synthetic oligonucleotide; AAG chr2 60551940 60551959 60551943 -
tctcgtgtctgaatgtttac

SEQ ID NO: 171573 - DNA, 20 bp, Artificial Sequence
  Synthetic oligonucleotide; CGG chr2 60551926 60551945 60551929 -
gtttacaagcaccgcgtgtg

SEQ ID NO: 171574 - DNA, 20 bp, Artificial Sequence
  Synthetic oligonucleotide; GGG chr2 60551925 60551944 60551928 -
tttacaagcaccgcgtgtgc

SEQ ID NO: 171575 - DNA, 20 bp, Artificial Sequence
  Synthetic oligonucleotide; GAG chr2 60551923 60551942 60551926 -
tacaagcaccgcgtgtgcgg

SEQ ID NO: 171576 - DNA, 20 bp, Artificial Sequence
  Synthetic oligonucleotide; CAG chr2 60551905 60551924 60551908 -
gggagcctcctgccaacaaa

SEQ ID NO: 171577 - DNA, 20 bp, Artificial Sequence
  Synthetic oligonucleotide; CAG chr2 60551901 60551920 60551904 -
gcctcctgccaacaaacaga

SEQ ID NO: 171578 - DNA, 20 bp, Artificial Sequence
  Synthetic oligonucleotide; GAG chr2 60551899 60551918 60551902 -
ctcctgccaacaaacagaca

SEQ ID NO: 171579 - DNA, 20 bp, Artificial Sequence
  Synthetic oligonucleotide; AGG chr2 60551898 60551917 60551901 -
tcctgccaacaaacagacag

SEQ ID NO: 171580 - DNA, 20 bp, Artificial Sequence
  Synthetic oligonucleotide; GAG chr2 60551892 60551911 60551895 -
caacaaacagacagaggacc

SEQ ID NO: 171581 - DNA, 20 bp, Artificial Sequence
  Synthetic oligonucleotide; CGG chr2 60551887 60551906 60551890 -
aacagacagaggaccgagcg

SEQ ID NO: 171582 - DNA, 20 bp, Artificial Sequence
  Synthetic oligonucleotide; CGG chr2 60551882 60551901 60551885 -
acagaggaccgagcgcggcg

SEQ ID NO: 171583 - DNA, 20 bp, Artificial Sequence
  Synthetic oligonucleotide; CAG chr2 60551879 60551898 60551882 -
gaggaccgagcgcggcgcgg

SEQ ID NO: 171584 - DNA, 20 bp, Artificial Sequence
  Synthetic oligonucleotide; CGG chr2 60551873 60551892 60551876 -
cgagcgcggcgcggcagccc

SEQ ID NO: 171585 - DNA, 20 bp, Artificial Sequence
  Synthetic oligonucleotide; GAG chr2 60551871 60551890 60551874 -
agcgcggcgcggcagccccg

SEQ ID NO: 171586 - DNA, 20 bp, Artificial Sequence
  Synthetic oligonucleotide; CAG chr2 60551868 60551887 60551871 -
gcggcgcggcagccccggag

SEQ ID NO: 171587 - DNA, 20 bp, Artificial Sequence
  Synthetic oligonucleotide; AGG chr2 60551867 60551886 60551870 -
cggcgcggcagccccggagc

SEQ ID NO: 171588 - DNA, 20 bp, Artificial Sequence
  Synthetic oligonucleotide; CGG chr2 60551864 60551883 60551867 -
cgcggcagccccggagcagg

SEQ ID NO: 171589 - DNA, 20 bp, Artificial Sequence
  Synthetic oligonucleotide; CGG chr2 60551861 60551880 60551864 -
ggcagccccggagcaggcgg

SEQ ID NO: 171590 - DNA, 20 bp, Artificial Sequence
  Synthetic oligonucleotide; CGG chr2 60551858 60551877 60551861 -
agccccggagcaggcggcgg

SEQ ID NO: 171591 - DNA, 20 bp, Artificial Sequence
  Synthetic oligonucleotide; CGG chr2 60551855 60551874 60551858 -
cccggagcaggcggcggcgg

SEQ ID NO: 171592 - DNA, 20 bp, Artificial Sequence
  Synthetic oligonucleotide; TGG chr2 60551850 60551869 60551853 -
agcaggcggcggcggcggcc

SEQ ID NO: 171593 - DNA, 20 bp, Artificial Sequence
  Synthetic oligonucleotide; CGG chr2 60551840 60551859 60551843 -
ggcggcggcctggcctcgcc

SEQ ID NO: 171594 - DNA, 20 bp, Artificial Sequence
  Synthetic oligonucleotide; GGG chr2 60551839 60551858 60551842 -
gcggcggcctggcctcgccc

SEQ ID NO: 171595 - DNA, 20 bp, Artificial Sequence
  Synthetic oligonucleotide; CAG chr2 60551813 60551832 60551816 -
tgcccgacctcgccgcgccc

SEQ ID NO: 171596 - DNA, 20 bp, Artificial Sequence
  Synthetic oligonucleotide; CAG chr2 60551808 60551827 60551811 -
gacctcgccgcgccccagcc

SEQ ID NO: 171597 - DNA, 20 bp, Artificial Sequence
  Synthetic oligonucleotide; CGG chr2 60551802 60551821 60551805 -
gccgcgccccagcccagccc

SEQ ID NO: 171598 - DNA, 20 bp, Artificial Sequence
  Synthetic oligonucleotide; CGG chr2 60551789 60551808 60551792 -
ccagccccggatcgcccacc

SEQ ID NO: 171599 - DNA, 20 bp, Artificial Sequence
  Synthetic oligonucleotide; CGG chr2 60551782 60551801 60551785 -
cggatcgcccacccggcgcc

SEQ ID NO: 171600 - DNA, 20 bp, Artificial Sequence
  Synthetic oligonucleotide; CAG chr2 60551768 60551787 60551771 -
ggcgcccggcgcccacccgc

SEQ ID NO: 171601 - DNA, 20 bp, Artificial Sequence
  Synthetic oligonucleotide; AGG chr2 60551767 60551786 60551770 -
gcgcccggcgcccacccgcc

SEQ ID NO: 171602 - DNA, 20 bp, Artificial Sequence
  Synthetic oligonucleotide; CGG chr2 60551762 60551781 60551765 -
cggcgcccacccgccaggca

SEQ ID NO: 171603 - DNA, 20 bp, Artificial Sequence
  Synthetic oligonucleotide; CGG chr2 60551759 60551778 60551762 -
cgcccacccgccaggcacgg

SEQ ID NO: 171604 - DNA, 20 bp, Artificial Sequence
  Synthetic oligonucleotide; CAG chr2 60551756 60551775 60551759 -
ccacccgccaggcacggcgg

SEQ ID NO: 171605 - DNA, 20 bp, Artificial Sequence
  Synthetic oligonucleotide; AGG chr2 60551755 60551774 60551758 -
cacccgccaggcacggcggc

SEQ ID NO: 171606 - DNA, 20 bp, Artificial Sequence
  Synthetic oligonucleotide; CAG chr2 60551747 60551766 60551750 -
aggcacggcggcaggccacg

SEQ ID NO: 171607 - DNA, 20 bp, Artificial Sequence
  Synthetic oligonucleotide; CAG chr2 60551733 60551752 60551736 -
gccacgcagtgtctccgcgc

SEQ ID NO: 171608 - DNA, 20 bp, Artificial Sequence
  Synthetic oligonucleotide; TGG chr2 60551728 60551747 60551731 -
gcagtgtctccgcgccagcc

SEQ ID NO: 171609 - DNA, 20 bp, Artificial Sequence
  Synthetic oligonucleotide; TGG chr2 60551721 60551740 60551724 -
ctccgcgccagcctggcccg

SEQ ID NO: 171610 - DNA, 20 bp, Artificial Sequence
  Synthetic oligonucleotide; TGG chr2 60551715 60551734 60551718 -
gccagcctggcccgtggtcc

SEQ ID NO: 171611 - DNA, 20 bp, Artificial Sequence
  Synthetic oligonucleotide; CAG chr2 60551704 60551723 60551707 -
ccgtggtcctggtccgcccc

SEQ ID NO: 171612 - DNA, 20 bp, Artificial Sequence
  Synthetic oligonucleotide; GAG chr2 60551692 60551711 60551695 -
tccgcccccagcacaatgcc

SEQ ID NO: 171613 - DNA, 20 bp, Artificial Sequence
  Synthetic oligonucleotide; CAG chr2 60551672 60551691 60551675 -
gagacctcttctcgacctcc

SEQ ID NO: 171614 - DNA, 20 bp, Artificial Sequence
  Synthetic oligonucleotide; CGG chr2 60551659 60551678 60551662 -
gacctcccagactgcgaaat

SEQ ID NO: 171615 - DNA, 20 bp, Artificial Sequence
  Synthetic oligonucleotide; TGG chr2 60551655 60551674 60551658 -
tcccagactgcgaaatcggc

SEQ ID NO: 171616 - DNA, 20 bp, Artificial Sequence
  Synthetic oligonucleotide; GGG chr2 60551654 60551673 60551657 -
cccagactgcgaaatcggct

SEQ ID NO: 171617 - DNA, 20 bp, Artificial Sequence
  Synthetic oligonucleotide; CGG chr2 60551644 60551663 60551647 -
gaaatcggctgggtgaaact

SEQ ID NO: 171618 - DNA, 20 bp, Artificial Sequence
  Synthetic oligonucleotide; AAG chr2 60551634 60551653 60551637 -
gggtgaaactcggctttgca

SEQ ID NO: 171619 - DNA, 20 bp, Artificial Sequence
  Synthetic oligonucleotide; CAG chr2 60551618 60551637 60551621 -
tgcaaagcatttttattttg

SEQ ID NO: 171620 - DNA, 20 bp, Artificial Sequence
  Synthetic oligonucleotide; AGG chr2 60551617 60551636 60551620 -
gcaaagcatttttattttgc

SEQ ID NO: 171621 - DNA, 20 bp, Artificial Sequence
  Synthetic oligonucleotide; GGG chr2 60551616 60551635 60551619 -
caaagcatttttattttgca

SEQ ID NO: 171622 - DNA, 20 bp, Artificial Sequence
  Synthetic oligonucleotide; AAG chr2 60551604 60551623 60551607 -
attttgcagggcaactgtaa

SEQ ID NO: 171623 - DNA, 20 bp, Artificial Sequence
  Synthetic oligonucleotide; TGG chr2 60551571 60551590 60551574 -
gcctcccctcccctccgccc

SEQ ID NO: 171624 - DNA, 20 bp, Artificial Sequence
  Synthetic oligonucleotide; GGG chr2 60551570 60551589 60551573 -
cctcccctcccctccgccct

SEQ ID NO: 171625 - DNA, 20 bp, Artificial Sequence
  Synthetic oligonucleotide; CAG chr2 60551559 60551578 60551562 -
ctccgccctgggtactttct

SEQ ID NO: 171626 - DNA, 20 bp, Artificial Sequence
  Synthetic oligonucleotide; CAG chr2 60551542 60551561 60551545 -
tctcagacgtctcttgtcca

SEQ ID NO: 171627 - DNA, 20 bp, Artificial Sequence
  Synthetic oligonucleotide; CGG chr2 60551537 60551556 60551540 -
gacgtctcttgtccacagct

SEQ ID NO: 171628 - DNA, 20 bp, Artificial Sequence
  Synthetic oligonucleotide; GGG chr2 60551536 60551555 60551539 -
acgtctcttgtccacagctc

SEQ ID NO: 171629 - DNA, 20 bp, Artificial Sequence
  Synthetic oligonucleotide; GAG chr2 60551528 60551547 60551531 -
tgtccacagctcgggaccgc

SEQ ID NO: 171630 - DNA, 20 bp, Artificial Sequence
  Synthetic oligonucleotide; AGG chr2 60551527 60551546 60551530 -
gtccacagctcgggaccgcg

SEQ ID NO: 171631 - DNA, 20 bp, Artificial Sequence
  Synthetic oligonucleotide; GAG chr2 60551525 60551544 60551528 -
ccacagctcgggaccgcgag

SEQ ID NO: 171632 - DNA, 20 bp, Artificial Sequence
  Synthetic oligonucleotide; AGG chr2 60551524 60551543 60551527 -
cacagctcgggaccgcgagg

SEQ ID NO: 171633 - DNA, 20 bp, Artificial Sequence
  Synthetic oligonucleotide; CGG chr2 60551484 60551503 60551487 -
tgcccaccccccaccccgcc

SEQ ID NO: 171634 - DNA, 20 bp, Artificial Sequence
  Synthetic oligonucleotide; TGG chr2 60551479 60551498 60551482 -
accccccaccccgcccggtc

SEQ ID NO: 171635 - DNA, 20 bp, Artificial Sequence
  Synthetic oligonucleotide; CAG chr2 60551472 60551491 60551475 -
accccgcccggtctggtcac

SEQ ID NO: 171636 - DNA, 20 bp, Artificial Sequence
  Synthetic oligonucleotide; GAG chr2 60551455 60551474 60551458 -
caccagtccccctgcgcccc

SEQ ID NO: 171637 - DNA, 20 bp, Artificial Sequence
  Synthetic oligonucleotide; TAG chr2 60551446 60551465 60551449 -
ccctgcgccccgagcacgac

SEQ ID NO: 171638 - DNA, 20 bp, Artificial Sequence
  Synthetic oligonucleotide; AGG chr2 60551445 60551464 60551448 -
cctgcgccccgagcacgact

SEQ ID NO: 171639 - DNA, 20 bp, Artificial Sequence
  Synthetic oligonucleotide; CAG chr2 60551441 60551460 60551444 -
cgccccgagcacgactaggc

SEQ ID NO: 171640 - DNA, 20 bp, Artificial Sequence
  Synthetic oligonucleotide; AGG chr2 60551440 60551459 60551443 -
gccccgagcacgactaggcc

SEQ ID NO: 171641 - DNA, 20 bp, Artificial Sequence
  Synthetic oligonucleotide; TGG chr2 60551437 60551456 60551440 -
ccgagcacgactaggccagg

SEQ ID NO: 171642 - DNA, 20 bp, Artificial Sequence
  Synthetic oligonucleotide; CGG chr2 60551434 60551453 60551437 -
agcacgactaggccaggtgg

SEQ ID NO: 171643 - DNA, 20 bp, Artificial Sequence
  Synthetic oligonucleotide; GGG chr2 60551433 60551452 60551436 -
gcacgactaggccaggtggc

SEQ ID NO: 171644 - DNA, 20 bp, Artificial Sequence
  Synthetic oligonucleotide; GGG chr2 60551432 60551451 60551435 -
cacgactaggccaggtggcg

SEQ ID NO: 171645 - DNA, 20 bp, Artificial Sequence
  Synthetic oligonucleotide; CGG chr2 60551425 60551444 60551428 -
aggccaggtggcggggttgc

SEQ ID NO: 171646 - DNA, 20 bp, Artificial Sequence
  Synthetic oligonucleotide; GGG chr2 60551424 60551443 60551427 -
ggccaggtggcggggttgcc

SEQ ID NO: 171647 - DNA, 20 bp, Artificial Sequence
  Synthetic oligonucleotide; GGG chr2 60551423 60551442 60551426 -
gccaggtggcggggttgccg

SEQ ID NO: 171648 - DNA, 20 bp, Artificial Sequence
  Synthetic oligonucleotide; AAG chr2 60551420 60551439 60551423 -
aggtggcggggttgccgggg

SEQ ID NO: 171649 - DNA, 20 bp, Artificial Sequence
  Synthetic oligonucleotide; AGG chr2 60551419 60551438 60551422 -
ggtggcggggttgccgggga

SEQ ID NO: 171650 - DNA, 20 bp, Artificial Sequence
  Synthetic oligonucleotide; GGG chr2 60551418 60551437 60551421 -
gtggcggggttgccggggaa

SEQ ID NO: 171651 - DNA, 20 bp, Artificial Sequence
  Synthetic oligonucleotide; CAG chr2 60551415 60551434 60551418 -
gcggggttgccggggaaggg

SEQ ID NO: 171652 - DNA, 20 bp, Artificial Sequence
  Synthetic oligonucleotide; AGG chr2 60551414 60551433 60551417 -
cggggttgccggggaagggc

SEQ ID NO: 171653 - DNA, 20 bp, Artificial Sequence
  Synthetic oligonucleotide; GGG chr2 60551413 60551432 60551416 -
ggggttgccggggaagggca

SEQ ID NO: 171654 - DNA, 20 bp, Artificial Sequence
  Synthetic oligonucleotide; GGG chr2 60551412 60551431 60551415 -
gggttgccggggaagggcag

SEQ ID NO: 171655 - DNA, 20 bp, Artificial Sequence
  Synthetic oligonucleotide; GAG chr2 60551410 60551429 60551413 -
gttgccggggaagggcaggg

SEQ ID NO: 171656 - DNA, 20 bp, Artificial Sequence
  Synthetic oligonucleotide; AAG chr2 60551407 60551426 60551410 -
gccggggaagggcaggggag

SEQ ID NO: 171657 - DNA, 20 bp, Artificial Sequence
  Synthetic oligonucleotide; GAG chr2 60551397 60551416 60551400 -
ggcaggggagaagtgtgttt

SEQ ID NO: 171658 - DNA, 20 bp, Artificial Sequence
  Synthetic oligonucleotide; AAG chr2 60551384 60551403 60551387 -
tgtgtttgagtgtgcatttt

SEQ ID NO: 171659 - DNA, 20 bp, Artificial Sequence
  Synthetic oligonucleotide; AGG chr2 60551383 60551402 60551386 -
gtgtttgagtgtgcatttta

SEQ ID NO: 171660 - DNA, 20 bp, Artificial Sequence
  Synthetic oligonucleotide; GGG chr2 60551382 60551401 60551385 -
tgtttgagtgtgcattttaa

SEQ ID NO: 171661 - DNA, 20 bp, Artificial Sequence
  Synthetic oligonucleotide; TGG chr2 60551376 60551395 60551379 -
agtgtgcattttaagggcgc

SEQ ID NO: 171662 - DNA, 20 bp, Artificial Sequence
  Synthetic oligonucleotide; TGG chr2 60551369 60551388 60551372 -
attttaagggcgctggatcc

SEQ ID NO: 171663 - DNA, 20 bp, Artificial Sequence
  Synthetic oligonucleotide; GGG chr2 60551368 60551387 60551371 -
ttttaagggcgctggatcct

SEQ ID NO: 171664 - DNA, 20 bp, Artificial Sequence
  Synthetic oligonucleotide; GAG chr2 60551360 60551379 60551363 -
gcgctggatcctgggacccc

SEQ ID NO: 171665 - DNA, 20 bp, Artificial Sequence
  Synthetic oligonucleotide; TGG chr2 60551345 60551364 60551348 -
accccgagcacttcaccctt

SEQ ID NO: 171666 - DNA, 20 bp, Artificial Sequence
  Synthetic oligonucleotide; GGG chr2 60551344 60551363 60551347 -
ccccgagcacttcacccttt

SEQ ID NO: 171667 - DNA, 20 bp, Artificial Sequence
  Synthetic oligonucleotide; CAG chr2 60551326 60551345 60551329 -
ttgggtcttgccctcttccc

SEQ ID NO: 171668 - DNA, 20 bp, Artificial Sequence
  Synthetic oligonucleotide; AGG chr2 60551325 60551344 60551328 -
tgggtcttgccctcttcccc

SEQ ID NO: 171669 - DNA, 20 bp, Artificial Sequence
  Synthetic oligonucleotide; TGG chr2 60551320 60551339 60551323 -
cttgccctcttccccaggcc

SEQ ID NO: 171670 - DNA, 20 bp, Artificial Sequence
  Synthetic oligonucleotide; TGG chr2 60551315 60551334 60551318 -
cctcttccccaggcctggct

SEQ ID NO: 171671 - DNA, 20 bp, Artificial Sequence
  Synthetic oligonucleotide; GAG chr2 60551309 60551328 60551312 -
ccccaggcctggcttggtct

SEQ ID NO: 171672 - DNA, 20 bp, Artificial Sequence
  Synthetic oligonucleotide; AGG chr2 60551308 60551327 60551311 -
cccaggcctggcttggtctg

SEQ ID NO: 171673 - DNA, 20 bp, Artificial Sequence
  Synthetic oligonucleotide; GAG chr2 60551298 60551317 60551301 -
gcttggtctgaggttcttgt

SEQ ID NO: 171674 - DNA, 20 bp, Artificial Sequence
  Synthetic oligonucleotide; AAG chr2 60551288 60551307 60551291 -
aggttcttgtgagtctgtat

SEQ ID NO: 171675 - DNA, 20 bp, Artificial Sequence
  Synthetic oligonucleotide; GAG chr2 60551286 60551305 60551289 -
gttcttgtgagtctgtataa

SEQ ID NO: 171676 - DNA, 20 bp, Artificial Sequence
  Synthetic oligonucleotide; TGG chr2 60551282 60551301 60551285 -
ttgtgagtctgtataagagc

SEQ ID NO: 171677 - DNA, 20 bp, Artificial Sequence
  Synthetic oligonucleotide; TGG chr2 60551279 60551298 60551282 -
tgagtctgtataagagctgg

SEQ ID NO: 171678 - DNA, 20 bp, Artificial Sequence
  Synthetic oligonucleotide; TGG chr2 60551276 60551295 60551279 -
gtctgtataagagctggtgg

SEQ ID NO: 171679 - DNA, 20 bp, Artificial Sequence
  Synthetic oligonucleotide; TGG chr2 60551273 60551292 60551276 -
tgtataagagctggtggtgg

SEQ ID NO: 171680 - DNA, 20 bp, Artificial Sequence
  Synthetic oligonucleotide; TGG chr2 60551249 60551268 60551252 -
tgtctcccgctgactgcgcc

SEQ ID NO: 171681 - DNA, 20 bp, Artificial Sequence
  Synthetic oligonucleotide; AAG chr2 60551245 60551264 60551248 -
tcccgctgactgcgcctgga

SEQ ID NO: 171682 - DNA, 20 bp, Artificial Sequence
  Synthetic oligonucleotide; AGG chr2 60551244 60551263 60551247 -
cccgctgactgcgcctggaa

SEQ ID NO: 171683 - DNA, 20 bp, Artificial Sequence
  Synthetic oligonucleotide; CGG chr2 60551241 60551260 60551244 -
gctgactgcgcctggaaagg

SEQ ID NO: 171684 - DNA, 20 bp, Artificial Sequence
  Synthetic oligonucleotide; GGG chr2 60551240 60551259 60551243 -
ctgactgcgcctggaaaggc

SEQ ID NO: 171685 - DNA, 20 bp, Artificial Sequence
  Synthetic oligonucleotide; CGG chr2 60551237 60551256 60551240 -
actgcgcctggaaaggcggg

SEQ ID NO: 171686 - DNA, 20 bp, Artificial Sequence
  Synthetic oligonucleotide; TGG chr2 60551234 60551253 60551237 -
gcgcctggaaaggcgggcgg

SEQ ID NO: 171687 - DNA, 20 bp, Artificial Sequence
  Synthetic oligonucleotide; GGG chr2 60551233 60551252 60551236 -
cgcctggaaaggcgggcggt

SEQ ID NO: 171688 - DNA, 20 bp, Artificial Sequence
  Synthetic oligonucleotide; TAG chr2 60551226 60551245 60551229 -
aaaggcgggcggtgggcact

SEQ ID NO: 171689 - DNA, 20 bp, Artificial Sequence
  Synthetic oligonucleotide; AGG chr2 60551225 60551244 60551228 -
aaggcgggcggtgggcactt

SEQ ID NO: 171690 - DNA, 20 bp, Artificial Sequence
  Synthetic oligonucleotide; AAG chr2 60551221 60551240 60551224 -
cgggcggtgggcacttagga

SEQ ID NO: 171691 - DNA, 20 bp, Artificial Sequence
  Synthetic oligonucleotide; TGG chr2 60551216 60551235 60551219 -
ggtgggcacttaggaaagtt

SEQ ID NO: 171692 - DNA, 20 bp, Artificial Sequence
  Synthetic oligonucleotide; CAG chr2 60551213 60551232 60551216 -
gggcacttaggaaagtttgg

SEQ ID NO: 171693 - DNA, 20 bp, Artificial Sequence
  Synthetic oligonucleotide; AAG chr2 60551209 60551228 60551212 -
acttaggaaagtttggcagc

SEQ ID NO: 171694 - DNA, 20 bp, Artificial Sequence
  Synthetic oligonucleotide; AGG chr2 60551208 60551227 60551211 -
cttaggaaagtttggcagca

SEQ ID NO: 171695 - DNA, 20 bp, Artificial Sequence
  Synthetic oligonucleotide; GGG chr2 60551207 60551226 60551210 -
ttaggaaagtttggcagcaa

SEQ ID NO: 171696 - DNA, 20 bp, Artificial Sequence
  Synthetic oligonucleotide; AAG chr2 60551203 60551222 60551206 -
gaaagtttggcagcaaggga

SEQ ID NO: 171697 - DNA, 20 bp, Artificial Sequence
  Synthetic oligonucleotide; AAG chr2 60551199 60551218 60551202 -
gtttggcagcaagggaaaga

SEQ ID NO: 171698 - DNA, 20 bp, Artificial Sequence
  Synthetic oligonucleotide; AGG chr2 60551198 60551217 60551201 -
tttggcagcaagggaaagaa

SEQ ID NO: 171699 - DNA, 20 bp, Artificial Sequence
  Synthetic oligonucleotide; GAG chr2 60551192 60551211 60551195 -
agcaagggaaagaaaggcgt

SEQ ID NO: 171700 - DNA, 20 bp, Artificial Sequence
  Synthetic oligonucleotide; AGG chr2 60551191 60551210 60551194 -
gcaagggaaagaaaggcgtg

SEQ ID NO: 171701 - DNA, 20 bp, Artificial Sequence
  Synthetic oligonucleotide; GGG chr2 60551190 60551209 60551193 -
caagggaaagaaaggcgtga

SEQ ID NO: 171702 - DNA, 20 bp, Artificial Sequence
  Synthetic oligonucleotide; CAG chr2 60551136 60551155 60551139 -
cttactttaaatttttgatg

SEQ ID NO: 171703 - DNA, 20 bp, Artificial Sequence
  Synthetic oligonucleotide; AAG chr2 60551128 60551147 60551131 -
aaatttttgatgcagtttta

SEQ ID NO: 171704 - DNA, 20 bp, Artificial Sequence
  Synthetic oligonucleotide; AGG chr2 60551127 60551146 60551130 -
aatttttgatgcagttttaa

SEQ ID NO: 171705 - DNA, 20 bp, Artificial Sequence
  Synthetic oligonucleotide; TGG chr2 60551112 60551131 60551115 -
tttaaaggaccacctatact

SEQ ID NO: 171706 - DNA, 20 bp, Artificial Sequence
  Synthetic oligonucleotide; AAG chr2 60551094 60551113 60551097 -
cttggttctgtgttttttta

SEQ ID NO: 171707 - DNA, 20 bp, Artificial Sequence
  Synthetic oligonucleotide; AGG chr2 60551093 60551112 60551096 -
ttggttctgtgtttttttaa

SEQ ID NO: 171708 - DNA, 20 bp, Artificial Sequence
  Synthetic oligonucleotide; GGG chr2 60551092 60551111 60551095 -
tggttctgtgtttttttaaa

SEQ ID NO: 171709 - DNA, 20 bp, Artificial Sequence
  Synthetic oligonucleotide; GGG chr2 60551091 60551110 60551094 -
ggttctgtgtttttttaaag

SEQ ID NO: 171710 - DNA, 20 bp, Artificial Sequence
  Synthetic oligonucleotide; TGG chr2 60551088 60551107 60551091 -
tctgtgtttttttaaagggg

SEQ ID NO: 171711 - DNA, 20 bp, Artificial Sequence
  Synthetic oligonucleotide; TGG chr2 60551085 60551104 60551088 -
gtgtttttttaaaggggtgg

SEQ ID NO: 171712 - DNA, 20 bp, Artificial Sequence
  Synthetic oligonucleotide; TGG chr2 60551082 60551101 60551085 -
tttttttaaaggggtggtgg

SEQ ID NO: 171713 - DNA, 20 bp, Artificial Sequence
  Synthetic oligonucleotide; GGG chr2 60551081 60551100 60551084 -
ttttttaaaggggtggtggt

SEQ ID NO: 171714 - DNA, 20 bp, Artificial Sequence
  Synthetic oligonucleotide; GGG chr2 60551080 60551099 60551083 -
tttttaaaggggtggtggtg

SEQ ID NO: 171715 - DNA, 20 bp, Artificial Sequence
  Synthetic oligonucleotide; GGG chr2 60551079 60551098 60551082 -
ttttaaaggggtggtggtgg

SEQ ID NO: 171716 - DNA, 20 bp, Artificial Sequence
  Synthetic oligonucleotide; GGG chr2 60551078 60551097 60551081 -
tttaaaggggtggtggtggg

SEQ ID NO: 171717 - DNA, 20 bp, Artificial Sequence
  Synthetic oligonucleotide; CAG chr2 60551069 60551088 60551072 -
gtggtggtggggggtgcgca

SEQ ID NO: 171718 - DNA, 20 bp, Artificial Sequence
  Synthetic oligonucleotide; AGG chr2 60551068 60551087 60551071 -
tggtggtggggggtgcgcac

SEQ ID NO: 171719 - DNA, 20 bp, Artificial Sequence
  Synthetic oligonucleotide; GGG chr2 60551067 60551086 60551070 -
ggtggtggggggtgcgcaca

SEQ ID NO: 171720 - DNA, 20 bp, Artificial Sequence
  Synthetic oligonucleotide; TGG chr2 60551049 60551068 60551052 -
cagggaatttaatttttcac

SEQ ID NO: 171721 - DNA, 20 bp, Artificial Sequence
  Synthetic oligonucleotide; GGG chr2 60551048 60551067 60551051 -
agggaatttaatttttcact

SEQ ID NO: 171722 - DNA, 20 bp, Artificial Sequence
  Synthetic oligonucleotide; TGG chr2 60551042 60551061 60551045 -
tttaatttttcactgggccc

SEQ ID NO: 171723 - DNA, 20 bp, Artificial Sequence
  Synthetic oligonucleotide; CGG chr2 60551023 60551042 60551026 -
ctggaacttgtcacacactt

SEQ ID NO: 171724 - DNA, 20 bp, Artificial Sequence
  Synthetic oligonucleotide; AAG chr2 60551020 60551039 60551023 -
gaacttgtcacacacttcgg

SEQ ID NO: 171725 - DNA, 20 bp, Artificial Sequence
  Synthetic oligonucleotide; CGG chr2 60551006 60551025 60551009 -
cttcggaagctcccccaccc

SEQ ID NO: 171726 - DNA, 20 bp, Artificial Sequence
  Synthetic oligonucleotide; CGG chr2 60550994 60551013 60550997 -
ccccaccccggcacgttgcg

SEQ ID NO: 171727 - DNA, 20 bp, Artificial Sequence
  Synthetic oligonucleotide; CGG chr2 60550929 60550948 60550932 -
tcccccgcccccaactcccc

SEQ ID NO: 171728 - DNA, 20 bp, Artificial Sequence
  Synthetic oligonucleotide; CGG chr2 60550920 60550939 60550923 -
cccaactcccccggccgcgc

SEQ ID NO: 171729 - DNA, 20 bp, Artificial Sequence
  Synthetic oligonucleotide; CGG chr2 60550914 60550933 60550917 -
tcccccggccgcgccggatg

SEQ ID NO: 171730 - DNA, 20 bp, Artificial Sequence
  Synthetic oligonucleotide; CAG chr2 60550909 60550928 60550912 -
cggccgcgccggatgcggat

SEQ ID NO: 171731 - DNA, 20 bp, Artificial Sequence
  Synthetic oligonucleotide; CGG chr2 60550903 60550922 60550906 -
cgccggatgcggatcagacg

SEQ ID NO: 171732 - DNA, 20 bp, Artificial Sequence
  Synthetic oligonucleotide; CGG chr2 60550896 60550915 60550899 -
tgcggatcagacgcggcgcg

SEQ ID NO: 171733 - DNA, 20 bp, Artificial Sequence
  Synthetic oligonucleotide; CGG chr2 60550893 60550912 60550896 -
ggatcagacgcggcgcgcgg

SEQ ID NO: 171734 - DNA, 20 bp, Artificial Sequence
  Synthetic oligonucleotide; AAG chr2 60550886 60550905 60550889 -
acgcggcgcgcggcggtgtg

SEQ ID NO: 171735 - DNA, 20 bp, Artificial Sequence
  Synthetic oligonucleotide; CAG chr2 60550880 60550899 60550883 -
cgcgcggcggtgtgaagtta

SEQ ID NO: 171736 - DNA, 20 bp, Artificial Sequence
  Synthetic oligonucleotide; CGG chr2 60550875 60550894 60550878 -
ggcggtgtgaagttacagcc

SEQ ID NO: 171737 - DNA, 20 bp, Artificial Sequence
  Synthetic oligonucleotide; CAG chr2 60550871 60550890 60550874 -
gtgtgaagttacagcccggc

SEQ ID NO: 171738 - DNA, 20 bp, Artificial Sequence
  Synthetic oligonucleotide; AGG chr2 60550870 60550889 60550873 -
tgtgaagttacagcccggcc

SEQ ID NO: 171739 - DNA, 20 bp, Artificial Sequence
  Synthetic oligonucleotide; CGG chr2 60550864 60550883 60550867 -
gttacagcccggccaggtac

SEQ ID NO: 171740 - DNA, 20 bp, Artificial Sequence
  Synthetic oligonucleotide; CGG chr2 60550861 60550880 60550864 -
acagcccggccaggtaccgg

SEQ ID NO: 171741 - DNA, 20 bp, Artificial Sequence
  Synthetic oligonucleotide; GGG chr2 60550860 60550879 60550863 -
cagcccggccaggtaccggc

SEQ ID NO: 171742 - DNA, 20 bp, Artificial Sequence
  Synthetic oligonucleotide; AAG chr2 60550857 60550876 60550860 -
cccggccaggtaccggcggg

SEQ ID NO: 171743 - DNA, 20 bp, Artificial Sequence
  Synthetic oligonucleotide; AGG chr2 60550856 60550875 60550859 -
ccggccaggtaccggcggga

SEQ ID NO: 171744 - DNA, 20 bp, Artificial Sequence
  Synthetic oligonucleotide; AAG chr2 60550853 60550872 60550856 -
gccaggtaccggcgggaagg

SEQ ID NO: 171745 - DNA, 20 bp, Artificial Sequence
  Synthetic oligonucleotide; AGG chr2 60550852 60550871 60550855 -
ccaggtaccggcgggaagga

SEQ ID NO: 171746 - DNA, 20 bp, Artificial Sequence
  Synthetic oligonucleotide; GGG chr2 60550851 60550870 60550854 -
caggtaccggcgggaaggaa

SEQ ID NO: 171747 - DNA, 20 bp, Artificial Sequence
  Synthetic oligonucleotide; CAG chr2 60550848 60550867 60550851 -
gtaccggcgggaaggaaggg

SEQ ID NO: 171748 - DNA, 20 bp, Artificial Sequence
  Synthetic oligonucleotide; CAG chr2 60550839 60550858 60550842 -
ggaaggaagggcagtgttcg

SEQ ID NO: 171749 - DNA, 20 bp, Artificial Sequence
  Synthetic oligonucleotide; AGG chr2 60550838 60550857 60550841 -
gaaggaagggcagtgttcgc

SEQ ID NO: 171750 - DNA, 20 bp, Artificial Sequence
  Synthetic oligonucleotide; CGG chr2 60550832 60550851 60550835 -
agggcagtgttcgcaggact

SEQ ID NO: 171751 - DNA, 20 bp, Artificial Sequence
  Synthetic oligonucleotide; GGG chr2 60550831 60550850 60550834 -
gggcagtgttcgcaggactc

SEQ ID NO: 171752 - DNA, 20 bp, Artificial Sequence
  Synthetic oligonucleotide; AAG chr2 60550827 60550846 60550830 -
agtgttcgcaggactcggga

SEQ ID NO: 171753 - DNA, 20 bp, Artificial Sequence
  Synthetic oligonucleotide; CAG chr2 60550823 60550842 60550826 -
ttcgcaggactcgggaaagt

SEQ ID NO: 171754 - DNA, 20 bp, Artificial Sequence
  Synthetic oligonucleotide; AGG chr2 60550822 60550841 60550825 -
tcgcaggactcgggaaagtc

SEQ ID NO: 171755 - DNA, 20 bp, Artificial Sequence
  Synthetic oligonucleotide; CGG chr2 60550811 60550830 60550814 -
gggaaagtcaggcccttctt

SEQ ID NO: 171756 - DNA, 20 bp, Artificial Sequence
  Synthetic oligonucleotide; AAG chr2 60550808 60550827 60550811 -
aaagtcaggcccttcttcgg

SEQ ID NO: 171757 - DNA, 20 bp, Artificial Sequence
  Synthetic oligonucleotide; AGG chr2 60550807 60550826 60550810 -
aagtcaggcccttcttcgga

SEQ ID NO: 171758 - DNA, 20 bp, Artificial Sequence
  Synthetic oligonucleotide; CAG chr2 60550801 60550820 60550804 -
ggcccttcttcggaaggatg

SEQ ID NO: 171759 - DNA, 20 bp, Artificial Sequence
  Synthetic oligonucleotide; TGG chr2 60550798 60550817 60550801 -
ccttcttcggaaggatgcag

SEQ ID NO: 171760 - DNA, 20 bp, Artificial Sequence
  Synthetic oligonucleotide; GGG chr2 60550797 60550816 60550800 -
cttcttcggaaggatgcagt

SEQ ID NO: 171761 - DNA, 20 bp, Artificial Sequence
  Synthetic oligonucleotide; GGG chr2 60550796 60550815 60550799 -
ttcttcggaaggatgcagtg

SEQ ID NO: 171762 - DNA, 20 bp, Artificial Sequence
  Synthetic oligonucleotide; GGG chr2 60550795 60550814 60550798 -
tcttcggaaggatgcagtgg

SEQ ID NO: 171763 - DNA, 20 bp, Artificial Sequence
  Synthetic oligonucleotide; AAG chr2 60550788 60550807 60550791 -
aaggatgcagtgggggctca

SEQ ID NO: 171764 - DNA, 20 bp, Artificial Sequence
  Synthetic oligonucleotide; AGG chr2 60550787 60550806 60550790 -
aggatgcagtgggggctcaa

SEQ ID NO: 171765 - DNA, 20 bp, Artificial Sequence
  Synthetic oligonucleotide; CAG chr2 60550783 60550802 60550786 -
tgcagtgggggctcaaagga

SEQ ID NO: 171766 - DNA, 20 bp, Artificial Sequence
  Synthetic oligonucleotide; CGG chr2 60550778 60550797 60550781 -
tgggggctcaaaggacagac

SEQ ID NO: 171767 - DNA, 20 bp, Artificial Sequence
  Synthetic oligonucleotide; GGG chr2 60550777 60550796 60550780 -
gggggctcaaaggacagacc

SEQ ID NO: 171768 - DNA, 20 bp, Artificial Sequence
  Synthetic oligonucleotide; GGG chr2 60550776 60550795 60550779 -
ggggctcaaaggacagaccg

SEQ ID NO: 171769 - DNA, 20 bp, Artificial Sequence
  Synthetic oligonucleotide; CAG chr2 60550769 60550788 60550772 -
aaaggacagaccggggcgcg

SEQ ID NO: 171770 - DNA, 20 bp, Artificial Sequence
  Synthetic oligonucleotide; CAG chr2 60550764 60550783 60550767 -
acagaccggggcgcgcagtc

SEQ ID NO: 171771 - DNA, 20 bp, Artificial Sequence
  Synthetic oligonucleotide; AGG chr2 60550763 60550782 60550766 -
cagaccggggcgcgcagtcc

SEQ ID NO: 171772 - DNA, 20 bp, Artificial Sequence
  Synthetic oligonucleotide; TGG chr2 60550734 60550753 60550737 -
cctcgtacccctctccctcc

SEQ ID NO: 171773 - DNA, 20 bp, Artificial Sequence
  Synthetic oligonucleotide; GGG chr2 60550733 60550752 60550736 -
ctcgtacccctctccctcct

SEQ ID NO: 171774 - DNA, 20 bp, Artificial Sequence
  Synthetic oligonucleotide; TGG chr2 60550723 60550742 60550726 -
tctccctcctgggtccatct

SEQ ID NO: 171775 - DNA, 20 bp, Artificial Sequence
  Synthetic oligonucleotide; GGG chr2 60550722 60550741 60550725 -
ctccctcctgggtccatctt

SEQ ID NO: 171776 - DNA, 20 bp, Artificial Sequence
  Synthetic oligonucleotide; TAG chr2 60550713 60550732 60550716 -
gggtccatcttgggacactc

SEQ ID NO: 171777 - DNA, 20 bp, Artificial Sequence
  Synthetic oligonucleotide; AGG chr2 60550712 60550731 60550715 -
ggtccatcttgggacactct

SEQ ID NO: 171778 - DNA, 20 bp, Artificial Sequence
  Synthetic oligonucleotide; TGG chr2 60550708 60550727 60550711 -
catcttgggacactctaggc

SEQ ID NO: 171779 - DNA, 20 bp, Artificial Sequence
  Synthetic oligonucleotide; GGG chr2 60550707 60550726 60550710 -
atcttgggacactctaggct

SEQ ID NO: 171780 - DNA, 20 bp, Artificial Sequence
  Synthetic oligonucleotide; GAG chr2 60550705 60550724 60550708 -
cttgggacactctaggctgg

SEQ ID NO: 171781 - DNA, 20 bp, Artificial Sequence
  Synthetic oligonucleotide; AGG chr2 60550704 60550723 60550707 -
ttgggacactctaggctggg

SEQ ID NO: 171782 - DNA, 20 bp, Artificial Sequence
  Synthetic oligonucleotide; GGG chr2 60550703 60550722 60550706 -
tgggacactctaggctggga

SEQ ID NO: 171783 - DNA, 20 bp, Artificial Sequence
  Synthetic oligonucleotide; TAG chr2 60550699 60550718 60550702 -
acactctaggctgggagggt

SEQ ID NO: 171784 - DNA, 20 bp, Artificial Sequence
  Synthetic oligonucleotide; CGG chr2 60550678 60550697 60550681 -
agtaccccctcctcctgtcc

SEQ ID NO: 171785 - DNA, 20 bp, Artificial Sequence
  Synthetic oligonucleotide; GGG chr2 60550677 60550696 60550680 -
gtaccccctcctcctgtccc

SEQ ID NO: 171786 - DNA, 20 bp, Artificial Sequence
  Synthetic oligonucleotide; GGG chr2 60550676 60550695 60550679 -
taccccctcctcctgtcccg

SEQ ID NO: 171787 - DNA, 20 bp, Artificial Sequence
  Synthetic oligonucleotide; AAG chr2 60550670 60550689 60550673 -
ctcctcctgtcccggggtta

SEQ ID NO: 171788 - DNA, 20 bp, Artificial Sequence
  Synthetic oligonucleotide; AGG chr2 60550669 60550688 60550672 -
tcctcctgtcccggggttaa

SEQ ID NO: 171789 - DNA, 20 bp, Artificial Sequence
  Synthetic oligonucleotide; GGG chr2 60550668 60550687 60550671 -
cctcctgtcccggggttaaa

SEQ ID NO: 171790 - DNA, 20 bp, Artificial Sequence
  Synthetic oligonucleotide; CAG chr2 60550664 60550683 60550667 -
ctgtcccggggttaaagggc

SEQ ID NO: 171791 - DNA, 20 bp, Artificial Sequence
  Synthetic oligonucleotide; TGG chr2 60550659 60550678 60550662 -
ccggggttaaagggccagtt

SEQ ID NO: 171792 - DNA, 20 bp, Artificial Sequence
  Synthetic oligonucleotide; GGG chr2 60550658 60550677 60550661 -
cggggttaaagggccagttt

SEQ ID NO: 171793 - DNA, 20 bp, Artificial Sequence
  Synthetic oligonucleotide; GAG chr2 60550656 60550675 60550659 -
gggttaaagggccagtttgg

SEQ ID NO: 171794 - DNA, 20 bp, Artificial Sequence
  Synthetic oligonucleotide; AGG chr2 60550655 60550674 60550658 -
ggttaaagggccagtttggg

SEQ ID NO: 171795 - DNA, 20 bp, Artificial Sequence
  Synthetic oligonucleotide; GGG chr2 60550654 60550673 60550657 -
gttaaagggccagtttggga

SEQ ID NO: 171796 - DNA, 20 bp, Artificial Sequence
  Synthetic oligonucleotide; GGG chr2 60550653 60550672 60550656 -
ttaaagggccagtttgggag

SEQ ID NO: 171797 - DNA, 20 bp, Artificial Sequence
  Synthetic oligonucleotide; GGG chr2 60550652 60550671 60550655 -
taaagggccagtttgggagg

SEQ ID NO: 171798 - DNA, 20 bp, Artificial Sequence
  Synthetic oligonucleotide; GAG chr2 60550648 60550667 60550651 -
gggccagtttgggagggggt

SEQ ID NO: 171799 - DNA, 20 bp, Artificial Sequence
  Synthetic oligonucleotide; AGG chr2 60550647 60550666 60550650 -
ggccagtttgggagggggtg

SEQ ID NO: 171800 - DNA, 20 bp, Artificial Sequence
  Synthetic oligonucleotide; GGG chr2 60550646 60550665 60550649 -
gccagtttgggagggggtga

SEQ ID NO: 171801 - DNA, 20 bp, Artificial Sequence
  Synthetic oligonucleotide; GGG chr2 60550645 60550664 60550648 -
ccagtttgggagggggtgag

SEQ ID NO: 171802 - DNA, 20 bp, Artificial Sequence
  Synthetic oligonucleotide; GGG chr2 60550644 60550663 60550647 -
cagtttgggagggggtgagg

SEQ ID NO: 171803 - DNA, 20 bp, Artificial Sequence
  Synthetic oligonucleotide; TGG chr2 60550617 60550636 60550620 -
ttctttctgtcctcattttc

SEQ ID NO: 171804 - DNA, 20 bp, Artificial Sequence
  Synthetic oligonucleotide; GGG chr2 60550616 60550635 60550619 -
tctttctgtcctcattttct

SEQ ID NO: 171805 - DNA, 20 bp, Artificial Sequence
  Synthetic oligonucleotide; CAG chr2 60550609 60550628 60550612 -
gtcctcattttctgggtgct

SEQ ID NO: 171806 - DNA, 20 bp, Artificial Sequence
  Synthetic oligonucleotide; GAG chr2 60550607 60550626 60550610 -
cctcattttctgggtgctca

SEQ ID NO: 171807 - DNA, 20 bp, Artificial Sequence
  Synthetic oligonucleotide; AGG chr2 60550606 60550625 60550609 -
ctcattttctgggtgctcag

SEQ ID NO: 171808 - DNA, 20 bp, Artificial Sequence
  Synthetic oligonucleotide; GGG chr2 60550605 60550624 60550608 -
tcattttctgggtgctcaga

SEQ ID NO: 171809 - DNA, 20 bp, Artificial Sequence
  Synthetic oligonucleotide; GGG chr2 60550604 60550623 60550607 -
cattttctgggtgctcagag

SEQ ID NO: 171810 - DNA, 20 bp, Artificial Sequence
  Synthetic oligonucleotide; GGG chr2 60550603 60550622 60550606 -
attttctgggtgctcagagg

SEQ ID NO: 171811 - DNA, 20 bp, Artificial Sequence
  Synthetic oligonucleotide; CAG chr2 60550600 60550619 60550603 -
ttctgggtgctcagaggggg

SEQ ID NO: 171812 - DNA, 20 bp, Artificial Sequence
  Synthetic oligonucleotide; AGG chr2 60550599 60550618 60550602 -
tctgggtgctcagagggggc

SEQ ID NO: 171813 - DNA, 20 bp, Artificial Sequence
  Synthetic oligonucleotide; GAG chr2 60550597 60550616 60550600 -
tgggtgctcagagggggcag

SEQ ID NO: 171814 - DNA, 20 bp, Artificial Sequence
  Synthetic oligonucleotide; CGG chr2 60550588 60550607 60550591 -
agagggggcaggagccatcc

SEQ ID NO: 171815 - DNA, 20 bp, Artificial Sequence
  Synthetic oligonucleotide; CAG chr2 60550581 60550600 60550584 -
gcaggagccatcccggtcct

SEQ ID NO: 171816 - DNA, 20 bp, Artificial Sequence
  Synthetic oligonucleotide; TGG chr2 60550547 60550566 60550550 -
cgccccccgcctctgctatg

SEQ ID NO: 171817 - DNA, 20 bp, Artificial Sequence
  Synthetic oligonucleotide; GGG chr2 60550546 60550565 60550549 -
gccccccgcctctgctatgt

SEQ ID NO: 171818 - DNA, 20 bp, Artificial Sequence
  Synthetic oligonucleotide; GAG chr2 60550537 60550556 60550540 -
ctctgctatgtgggctgaat

SEQ ID NO: 171819 - DNA, 20 bp, Artificial Sequence
  Synthetic oligonucleotide; CGG chr2 60550529 60550548 60550532 -
tgtgggctgaatgagccatt

SEQ ID NO: 171820 - DNA, 20 bp, Artificial Sequence
  Synthetic oligonucleotide; TAG chr2 60550522 60550541 60550525 -
tgaatgagccattcggtcgc

SEQ ID NO: 171821 - DNA, 20 bp, Artificial Sequence
  Synthetic oligonucleotide; AGG chr2 60550521 60550540 60550524 -
gaatgagccattcggtcgct

SEQ ID NO: 171822 - DNA, 20 bp, Artificial Sequence
  Synthetic oligonucleotide; GAG chr2 60550519 60550538 60550522 -
atgagccattcggtcgctag

SEQ ID NO: 171823 - DNA, 20 bp, Artificial Sequence
  Synthetic oligonucleotide; AGG chr2 60550518 60550537 60550521 -
tgagccattcggtcgctagg

SEQ ID NO: 171824 - DNA, 20 bp, Artificial Sequence
  Synthetic oligonucleotide; CAG chr2 60550515 60550534 60550518 -
gccattcggtcgctaggagg

SEQ ID NO: 171825 - DNA, 20 bp, Artificial Sequence
  Synthetic oligonucleotide; AAG chr2 60550509 60550528 60550512 -
cggtcgctaggaggcagaac

SEQ ID NO: 171826 - DNA, 20 bp, Artificial Sequence
  Synthetic oligonucleotide; AAG chr2 60550503 60550522 60550506 -
ctaggaggcagaacaagatc

SEQ ID NO: 171827 - DNA, 20 bp, Artificial Sequence
  Synthetic oligonucleotide; AAG chr2 60550499 60550518 60550502 -
gaggcagaacaagatcaaga

SEQ ID NO: 171828 - DNA, 20 bp, Artificial Sequence
  Synthetic oligonucleotide; CAG chr2 60550494 60550513 60550497 -
agaacaagatcaagaaagct

SEQ ID NO: 171829 - DNA, 20 bp, Artificial Sequence
  Synthetic oligonucleotide; CAG chr2 60550474 60550493 60550477 -
cagcgaacttgaacctgtac

SEQ ID NO: 171830 - DNA, 20 bp, Artificial Sequence
  Synthetic oligonucleotide; GAG chr2 60550472 60550491 60550475 -
gcgaacttgaacctgtacca

SEQ ID NO: 171831 - DNA, 20 bp, Artificial Sequence
  Synthetic oligonucleotide; CGG chr2 60550451 60550470 60550454 -
agcctcccccacctcctgcc

SEQ ID NO: 171832 - DNA, 20 bp, Artificial Sequence
  Synthetic oligonucleotide; CGG chr2 60550437 60550456 60550440 -
cctgcccggcgattctcgtc

SEQ ID NO: 171833 - DNA, 20 bp, Artificial Sequence
  Synthetic oligonucleotide; GGG chr2 60550436 60550455 60550439 -
ctgcccggcgattctcgtcc

SEQ ID NO: 171834 - DNA, 20 bp, Artificial Sequence
  Synthetic oligonucleotide; GGG chr2 60550435 60550454 60550438 -
tgcccggcgattctcgtccg

SEQ ID NO: 171835 - DNA, 20 bp, Artificial Sequence
  Synthetic oligonucleotide; GAG chr2 60550433 60550452 60550436 -
cccggcgattctcgtccggg

SEQ ID NO: 171836 - DNA, 20 bp, Artificial Sequence
  Synthetic oligonucleotide; AGG chr2 60550432 60550451 60550435 -
ccggcgattctcgtccgggg

SEQ ID NO: 171837 - DNA, 20 bp, Artificial Sequence
  Synthetic oligonucleotide; GAG chr2 60550426 60550445 60550429 -
attctcgtccggggaggaac

SEQ ID NO: 171838 - DNA, 20 bp, Artificial Sequence
  Synthetic oligonucleotide; GAG chr2 60550417 60550436 60550420 -
cggggaggaacgagctttgc

SEQ ID NO: 171839 - DNA, 20 bp, Artificial Sequence
  Synthetic oligonucleotide; AGG chr2 60550416 60550435 60550419 -
ggggaggaacgagctttgcg

SEQ ID NO: 171840 - DNA, 20 bp, Artificial Sequence
  Synthetic oligonucleotide; GGG chr2 60550415 60550434 60550418 -
gggaggaacgagctttgcga

SEQ ID NO: 171841 - DNA, 20 bp, Artificial Sequence
  Synthetic oligonucleotide; TGG chr2 60550412 60550431 60550415 -
aggaacgagctttgcgaggg

SEQ ID NO: 171842 - DNA, 20 bp, Artificial Sequence
  Synthetic oligonucleotide; GGG chr2 60550411 60550430 60550414 -
ggaacgagctttgcgagggt

SEQ ID NO: 171843 - DNA, 20 bp, Artificial Sequence
  Synthetic oligonucleotide; GGG chr2 60550410 60550429 60550413 -
gaacgagctttgcgagggtg

SEQ ID NO: 171844 - DNA, 20 bp, Artificial Sequence
  Synthetic oligonucleotide; GGG chr2 60550409 60550428 60550412 -
aacgagctttgcgagggtgg

SEQ ID NO: 171845 - DNA, 20 bp, Artificial Sequence
  Synthetic oligonucleotide; TGG chr2 60550406 60550425 60550409 -
gagctttgcgagggtggggg

SEQ ID NO: 171846 - DNA, 20 bp, Artificial Sequence
  Synthetic oligonucleotide; GGG chr2 60550405 60550424 60550408 -
agctttgcgagggtgggggt

SEQ ID NO: 171847 - DNA, 20 bp, Artificial Sequence
  Synthetic oligonucleotide; GGG chr2 60550404 60550423 60550407 -
gctttgcgagggtgggggtg

SEQ ID NO: 171848 - DNA, 20 bp, Artificial Sequence
  Synthetic oligonucleotide; GGG chr2 60550403 60550422 60550406 -
ctttgcgagggtgggggtgg

SEQ ID NO: 171849 - DNA, 20 bp, Artificial Sequence
  Synthetic oligonucleotide; GGG chr2 60550402 60550421 60550405 -
tttgcgagggtgggggtggg

SEQ ID NO: 171850 - DNA, 20 bp, Artificial Sequence
  Synthetic oligonucleotide; AAG chr2 60550398 60550417 60550401 -
cgagggtgggggtgggggga

SEQ ID NO: 171851 - DNA, 20 bp, Artificial Sequence
  Synthetic oligonucleotide; CGG chr2 60550393 60550412 60550396 -
gtgggggtggggggaaagaa

SEQ ID NO: 171852 - DNA, 20 bp, Artificial Sequence
  Synthetic oligonucleotide; TAG chr2 60550389 60550408 60550392 -
gggtggggggaaagaacggt

SEQ ID NO: 171853 - DNA, 20 bp, Artificial Sequence
  Synthetic oligonucleotide; AGG chr2 60550388 60550407 60550391 -
ggtggggggaaagaacggtt

SEQ ID NO: 171854 - DNA, 20 bp, Artificial Sequence
  Synthetic oligonucleotide; CAG chr2 60550385 60550404 60550388 -
ggggggaaagaacggttagg

SEQ ID NO: 171855 - DNA, 20 bp, Artificial Sequence
  Synthetic oligonucleotide; TGG chr2 60550316 60550335 60550319 -
tttgactttaaaaatgcttc

SEQ ID NO: 171856 - DNA, 20 bp, Artificial Sequence
  Synthetic oligonucleotide; CGG chr2 60550312 60550331 60550315 -
actttaaaaatgcttctggc

SEQ ID NO: 171857 - DNA, 20 bp, Artificial Sequence
  Synthetic oligonucleotide; GGG chr2 60550311 60550330 60550314 -
ctttaaaaatgcttctggcc

SEQ ID NO: 171858 - DNA, 20 bp, Artificial Sequence
  Synthetic oligonucleotide; GGG chr2 60550310 60550329 60550313 -
tttaaaaatgcttctggccg

SEQ ID NO: 171859 - DNA, 20 bp, Artificial Sequence
  Synthetic oligonucleotide; CGG chr2 60550304 60550323 60550307 -
aatgcttctggccggggccg

SEQ ID NO: 171860 - DNA, 20 bp, Artificial Sequence
  Synthetic oligonucleotide; GAG chr2 60550302 60550321 60550305 -
tgcttctggccggggccgcg

SEQ ID NO: 171861 - DNA, 20 bp, Artificial Sequence
  Synthetic oligonucleotide; AAG chr2 60550299 60550318 60550302 -
ttctggccggggccgcggag

SEQ ID NO: 171862 - DNA, 20 bp, Artificial Sequence
  Synthetic oligonucleotide; CGG chr2 60550292 60550311 60550295 -
cggggccgcggagaagcgac

SEQ ID NO: 171863 - DNA, 20 bp, Artificial Sequence
  Synthetic oligonucleotide; GGG chr2 60550291 60550310 60550294 -
ggggccgcggagaagcgacc

SEQ ID NO: 171864 - DNA, 20 bp, Artificial Sequence
  Synthetic oligonucleotide; CGG chr2 60550284 60550303 60550287 -
cggagaagcgaccgggcgcg

SEQ ID NO: 171865 - DNA, 20 bp, Artificial Sequence
  Synthetic oligonucleotide; GAG chr2 60550264 60550283 60550267 -
cggccgacacccccgtgcgc

SEQ ID NO: 171866 - DNA, 20 bp, Artificial Sequence
  Synthetic oligonucleotide; GAG chr2 60550259 60550278 60550262 -
gacacccccgtgcgcgagct

SEQ ID NO: 171867 - DNA, 20 bp, Artificial Sequence
  Synthetic oligonucleotide; CAG chr2 60550254 60550273 60550257 -
ccccgtgcgcgagctgagac

SEQ ID NO: 171868 - DNA, 20 bp, Artificial Sequence
  Synthetic oligonucleotide; CGG chr2 60550244 60550263 60550247 -
gagctgagaccagcgcgcgc

SEQ ID NO: 171869 - DNA, 20 bp, Artificial Sequence
  Synthetic oligonucleotide; GGG chr2 60550243 60550262 60550246 -
agctgagaccagcgcgcgcc

SEQ ID NO: 171870 - DNA, 20 bp, Artificial Sequence
  Synthetic oligonucleotide; CGG chr2 60550238 60550257 60550241 -
agaccagcgcgcgccgggct

SEQ ID NO: 171871 - DNA, 20 bp, Artificial Sequence
  Synthetic oligonucleotide; GAG chr2 60550236 60550255 60550239 -
accagcgcgcgccgggctcg

SEQ ID NO: 171872 - DNA, 20 bp, Artificial Sequence
  Synthetic oligonucleotide; CGG chr2 60550231 60550250 60550234 -
cgcgcgccgggctcggagca

SEQ ID NO: 171873 - DNA, 20 bp, Artificial Sequence
  Synthetic oligonucleotide; CAG chr2 60550226 60550245 60550229 -
gccgggctcggagcacggtg

SEQ ID NO: 171874 - DNA, 20 bp, Artificial Sequence
  Synthetic oligonucleotide; CGG chr2 60550209 60550228 60550212 -
gtgcagttttcgctttcttt

SEQ ID NO: 171875 - DNA, 20 bp, Artificial Sequence
  Synthetic oligonucleotide; GGG chr2 60550208 60550227 60550211 -
tgcagttttcgctttctttc

SEQ ID NO: 171876 - DNA, 20 bp, Artificial Sequence
  Synthetic oligonucleotide; GGG chr2 60550207 60550226 60550210 -
gcagttttcgctttctttcg

SEQ ID NO: 171877 - DNA, 20 bp, Artificial Sequence
  Synthetic oligonucleotide; CGG chr2 60550203 60550222 60550206 -
ttttcgctttctttcggggc

SEQ ID NO: 171878 - DNA, 20 bp, Artificial Sequence
  Synthetic oligonucleotide; TGG chr2 60550194 60550213 60550197 -
tctttcggggccggcatttt

SEQ ID NO: 171879 - DNA, 20 bp, Artificial Sequence
  Synthetic oligonucleotide; TAG chr2 60550191 60550210 60550194 -
ttcggggccggcatttttgg

SEQ ID NO: 171880 - DNA, 20 bp, Artificial Sequence
  Synthetic oligonucleotide; AGG chr2 60550190 60550209 60550193 -
tcggggccggcatttttggt

SEQ ID NO: 171881 - DNA, 20 bp, Artificial Sequence
  Synthetic oligonucleotide; GGG chr2 60550189 60550208 60550192 -
cggggccggcatttttggta

SEQ ID NO: 171882 - DNA, 20 bp, Artificial Sequence
  Synthetic oligonucleotide; GAG chr2 60550187 60550206 60550190 -
gggccggcatttttggtagg

SEQ ID NO: 171883 - DNA, 20 bp, Artificial Sequence
  Synthetic oligonucleotide; AGG chr2 60550186 60550205 60550189 -
ggccggcatttttggtaggg

SEQ ID NO: 171884 - DNA, 20 bp, Artificial Sequence
  Synthetic oligonucleotide; CGG chr2 60550180 60550199 60550183 -
catttttggtagggaggaac

SEQ ID NO: 171885 - DNA, 20 bp, Artificial Sequence
  Synthetic oligonucleotide; GGG chr2 60550179 60550198 60550182 -
atttttggtagggaggaacc

SEQ ID NO: 171886 - DNA, 20 bp, Artificial Sequence
  Synthetic oligonucleotide; GAG chr2 60550177 60550196 60550180 -
ttttggtagggaggaaccgg

SEQ ID NO: 171887 - DNA, 20 bp, Artificial Sequence
  Synthetic oligonucleotide; TAG chr2 60550165 60550184 60550168 -
ggaaccgggagtgcgcgctc

SEQ ID NO: 171888 - DNA, 20 bp, Artificial Sequence
  Synthetic oligonucleotide; AGG chr2 60550164 60550183 60550167 -
gaaccgggagtgcgcgctct

SEQ ID NO: 171889 - DNA, 20 bp, Artificial Sequence
  Synthetic oligonucleotide; GGG chr2 60550163 60550182 60550166 -
aaccgggagtgcgcgctcta

SEQ ID NO: 171890 - DNA, 20 bp, Artificial Sequence
  Synthetic oligonucleotide; CGG chr2 60550157 60550176 60550160 -
gagtgcgcgctctagggctt

SEQ ID NO: 171891 - DNA, 20 bp, Artificial Sequence
  Synthetic oligonucleotide; GGG chr2 60550156 60550175 60550159 -
agtgcgcgctctagggcttc

SEQ ID NO: 171892 - DNA, 20 bp, Artificial Sequence
  Synthetic oligonucleotide; GGG chr2 60550155 60550174 60550158 -
gtgcgcgctctagggcttcg

SEQ ID NO: 171893 - DNA, 20 bp, Artificial Sequence
  Synthetic oligonucleotide; TGG chr2 60550150 60550169 60550153 -
cgctctagggcttcggggca

SEQ ID NO: 171894 - DNA, 20 bp, Artificial Sequence
  Synthetic oligonucleotide; AAG chr2 60550144 60550163 60550147 -
agggcttcggggcatggccg

SEQ ID NO: 171895 - DNA, 20 bp, Artificial Sequence
  Synthetic oligonucleotide; GAG chr2 60550142 60550161 60550145 -
ggcttcggggcatggccgaa

SEQ ID NO: 171896 - DNA, 20 bp, Artificial Sequence
  Synthetic oligonucleotide; AGG chr2 60550141 60550160 60550144 -
gcttcggggcatggccgaag

SEQ ID NO: 171897 - DNA, 20 bp, Artificial Sequence
  Synthetic oligonucleotide; GGG chr2 60550140 60550159 60550143 -
cttcggggcatggccgaaga

SEQ ID NO: 171898 - DNA, 20 bp, Artificial Sequence
  Synthetic oligonucleotide; GGG chr2 60550139 60550158 60550142 -
ttcggggcatggccgaagag

SEQ ID NO: 171899 - DNA, 20 bp, Artificial Sequence
  Synthetic oligonucleotide; GGG chr2 60550138 60550157 60550141 -
tcggggcatggccgaagagg

SEQ ID NO: 171900 - DNA, 20 bp, Artificial Sequence
  Synthetic oligonucleotide; TGG chr2 60550132 60550151 60550135 -
catggccgaagagggggata

SEQ ID NO: 171901 - DNA, 20 bp, Artificial Sequence
  Synthetic oligonucleotide; AAG chr2 60550128 60550147 60550131 -
gccgaagagggggatatggc

SEQ ID NO: 171902 - DNA, 20 bp, Artificial Sequence
  Synthetic oligonucleotide; TGG chr2 60550117 60550136 60550120 -
ggatatggcaagtttgcact

SEQ ID NO: 171903 - DNA, 20 bp, Artificial Sequence
  Synthetic oligonucleotide; CAG chr2 60550110 60550129 60550113 -
gcaagtttgcacttggtctc

SEQ ID NO: 171904 - DNA, 20 bp, Artificial Sequence
  Synthetic oligonucleotide; AAG chr2 60550075 60550094 60550078 -
caccccctcacccccatgca

SEQ ID NO: 171905 - DNA, 20 bp, Artificial Sequence
  Synthetic oligonucleotide; CAG chr2 60550070 60550089 60550073 -
cctcacccccatgcaaagca

SEQ ID NO: 171906 - DNA, 20 bp, Artificial Sequence
  Synthetic oligonucleotide; CGG chr2 60550063 60550082 60550066 -
cccatgcaaagcacagacct

SEQ ID NO: 171907 - DNA, 20 bp, Artificial Sequence
  Synthetic oligonucleotide; TGG chr2 60550060 60550079 60550063 -
atgcaaagcacagacctcgg

SEQ ID NO: 171908 - DNA, 20 bp, Artificial Sequence
  Synthetic oligonucleotide; CGG chr2 60550054 60550073 60550057 -
agcacagacctcggtggcct

SEQ ID NO: 171909 - DNA, 20 bp, Artificial Sequence
  Synthetic oligonucleotide; TGG chr2 60550050 60550069 60550053 -
cagacctcggtggcctcggc

SEQ ID NO: 171910 - DNA, 20 bp, Artificial Sequence
  Synthetic oligonucleotide; TGG chr2 60550042 60550061 60550045 -
ggtggcctcggctggcttgc

SEQ ID NO: 171911 - DNA, 20 bp, Artificial Sequence
  Synthetic oligonucleotide; GGG chr2 60550041 60550060 60550044 -
gtggcctcggctggcttgct

SEQ ID NO: 171912 - DNA, 20 bp, Artificial Sequence
  Synthetic oligonucleotide; CGG chr2 60550038 60550057 60550041 -
gcctcggctggcttgctggg

SEQ ID NO: 171913 - DNA, 20 bp, Artificial Sequence
  Synthetic oligonucleotide; CAG chr2 60550030 60550049 60550033 -
tggcttgctgggcggctctg

SEQ ID NO: 171914 - DNA, 20 bp, Artificial Sequence
  Synthetic oligonucleotide; CGG chr2 60550005 60550024 60550008 -
cgacaccccccctctcgcct

SEQ ID NO: 171915 - DNA, 20 bp, Artificial Sequence
  Synthetic oligonucleotide; GAG chr2 60550003 60550022 60550006 -
acaccccccctctcgcctcg

SEQ ID NO: 171916 - DNA, 20 bp, Artificial Sequence
  Synthetic oligonucleotide; CGG chr2 60549998 60550017 60550001 -
ccccctctcgcctcggagct

SEQ ID NO: 171917 - DNA, 20 bp, Artificial Sequence
  Synthetic oligonucleotide; TAG chr2 60549984 60550003 60549987 -
ggagctcggaatcacaacaa

SEQ ID NO: 171918 - DNA, 20 bp, Artificial Sequence
  Synthetic oligonucleotide; TAG chr2 60549978 60549997 60549981 -
cggaatcacaacaatagtaa

SEQ ID NO: 171919 - DNA, 20 bp, Artificial Sequence
  Synthetic oligonucleotide; CGG chr2 60549958 60549977 60549961 -
tagttatcatcataatgatg

SEQ ID NO: 171920 - DNA, 20 bp, Artificial Sequence
  Synthetic oligonucleotide; GGG chr2 60549957 60549976 60549960 -
agttatcatcataatgatgc

SEQ ID NO: 171921 - DNA, 20 bp, Artificial Sequence
  Synthetic oligonucleotide; CAG chr2 60549954 60549973 60549957 -
tatcatcataatgatgcggg

SEQ ID NO: 171922 - DNA, 20 bp, Artificial Sequence
  Synthetic oligonucleotide; AGG chr2 60549953 60549972 60549956 -
atcatcataatgatgcgggc

SEQ ID NO: 171923 - DNA, 20 bp, Artificial Sequence
  Synthetic oligonucleotide; CAG chr2 60549950 60549969 60549953 -
atcataatgatgcgggcagg

SEQ ID NO: 171924 - DNA, 20 bp, Artificial Sequence
  Synthetic oligonucleotide; CAG chr2 60549925 60549944 60549928 -
tcattaataatgaataaccg

SEQ ID NO: 171925 - DNA, 20 bp, Artificial Sequence
  Synthetic oligonucleotide; CAG chr2 60549905 60549924 60549908 -
cagccgccgccgcgcacacc

SEQ ID NO: 171926 - DNA, 20 bp, Artificial Sequence
  Synthetic oligonucleotide; CAG chr2 60549898 60549917 60549901 -
cgccgcgcacacccagtgcc

SEQ ID NO: 171927 - DNA, 20 bp, Artificial Sequence
  Synthetic oligonucleotide; CGG chr2 60549890 60549909 60549893 -
acacccagtgcccagaattg

SEQ ID NO: 171928 - DNA, 20 bp, Artificial Sequence
  Synthetic oligonucleotide; GGG chr2 60549889 60549908 60549892 -
cacccagtgcccagaattgc

SEQ ID NO: 171929 - DNA, 20 bp, Artificial Sequence
  Synthetic oligonucleotide; GGG chr2 60549888 60549907 60549891 -
acccagtgcccagaattgcg

SEQ ID NO: 171930 - DNA, 20 bp, Artificial Sequence
  Synthetic oligonucleotide; GGG chr2 60549887 60549906 60549890 -
cccagtgcccagaattgcgg

SEQ ID NO: 171931 - DNA, 20 bp, Artificial Sequence
  Synthetic oligonucleotide; CAG chr2 60549873 60549892 60549876 -
ttgcgggggaaatgcatttg

SEQ ID NO: 171932 - DNA, 20 bp, Artificial Sequence
  Synthetic oligonucleotide; GAG chr2 60549871 60549890 60549874 -
gcgggggaaatgcatttgca

SEQ ID NO: 171933 - DNA, 20 bp, Artificial Sequence
  Synthetic oligonucleotide; AAG chr2 60549860 60549879 60549863 -
gcatttgcagagatccccca

SEQ ID NO: 171934 - DNA, 20 bp, Artificial Sequence
  Synthetic oligonucleotide; AAG chr2 60549853 60549872 60549856 -
cagagatcccccaaagtaaa

SEQ ID NO: 171935 - DNA, 20 bp, Artificial Sequence
  Synthetic oligonucleotide; AAG chr2 60549847 60549866 60549850 -
tcccccaaagtaaaaagtgt

SEQ ID NO: 171936 - DNA, 20 bp, Artificial Sequence
  Synthetic oligonucleotide; TGG chr2 60549840 60549859 60549843 -
aagtaaaaagtgtaagcttg

SEQ ID NO: 171937 - DNA, 20 bp, Artificial Sequence
  Synthetic oligonucleotide; CAG chr2 60549834 60549853 60549837 -
aaagtgtaagcttgtggaca

SEQ ID NO: 171938 - DNA, 20 bp, Artificial Sequence
  Synthetic oligonucleotide; CAG chr2 60549822 60549841 60549825 -
tgtggacacagaatgaatct

SEQ ID NO: 171939 - DNA, 20 bp, Artificial Sequence
  Synthetic oligonucleotide; AGG chr2 60549821 60549840 60549824 -
gtggacacagaatgaatctc

SEQ ID NO: 171940 - DNA, 20 bp, Artificial Sequence
  Synthetic oligonucleotide; GAG chr2 60549808 60549827 60549811 -
gaatctcaggacccgcgctt

SEQ ID NO: 171941 - DNA, 20 bp, Artificial Sequence
  Synthetic oligonucleotide; AGG chr2 60549807 60549826 60549810 -
aatctcaggacccgcgcttg

SEQ ID NO: 171942 - DNA, 20 bp, Artificial Sequence
  Synthetic oligonucleotide; CGG chr2 60549798 60549817 60549801 -
acccgcgcttgaggtgtgtg

SEQ ID NO: 171943 - DNA, 20 bp, Artificial Sequence
  Synthetic oligonucleotide; GAG chr2 60549796 60549815 60549799 -
ccgcgcttgaggtgtgtgcg

SEQ ID NO: 171944 - DNA, 20 bp, Artificial Sequence
  Synthetic oligonucleotide; GAG chr2 60549788 60549807 60549791 -
gaggtgtgtgcggagatact

SEQ ID NO: 171945 - DNA, 20 bp, Artificial Sequence
  Synthetic oligonucleotide; CAG chr2 60549778 60549797 60549781 -
cggagatactgagactgcac

SEQ ID NO: 171946 - DNA, 20 bp, Artificial Sequence
  Synthetic oligonucleotide; AGG chr2 60549777 60549796 60549780 -
ggagatactgagactgcacc

SEQ ID NO: 171947 - DNA, 20 bp, Artificial Sequence
  Synthetic oligonucleotide; CAG chr2 60549769 60549788 60549772 -
tgagactgcaccaggttaac

SEQ ID NO: 171948 - DNA, 20 bp, Artificial Sequence
  Synthetic oligonucleotide; CGG chr2 60549765 60549784 60549768 -
actgcaccaggttaaccagc

SEQ ID NO: 171949 - DNA, 20 bp, Artificial Sequence
  Synthetic oligonucleotide; GGG chr2 60549764 60549783 60549767 -
ctgcaccaggttaaccagcc

SEQ ID NO: 171950 - DNA, 20 bp, Artificial Sequence
  Synthetic oligonucleotide; TGG chr2 60549730 60549749 60549733 -
tcacttcctttttcaccaac

SEQ ID NO: 171951 - DNA, 20 bp, Artificial Sequence
  Synthetic oligonucleotide; CAG chr2 60549727 60549746 60549730 -
cttcctttttcaccaactgg

SEQ ID NO: 171952 - DNA, 20 bp, Artificial Sequence
  Synthetic oligonucleotide; AGG chr2 60549726 60549745 60549729 -
ttcctttttcaccaactggc

SEQ ID NO: 171953 - DNA, 20 bp, Artificial Sequence
  Synthetic oligonucleotide; CAG chr2 60549721 60549740 60549724 -
ttttcaccaactggcaggcc

SEQ ID NO: 171954 - DNA, 20 bp, Artificial Sequence
  Synthetic oligonucleotide; AGG chr2 60549720 60549739 60549723 -
tttcaccaactggcaggccc

SEQ ID NO: 171955 - DNA, 20 bp, Artificial Sequence
  Synthetic oligonucleotide; GGG chr2 60549719 60549738 60549722 -
ttcaccaactggcaggccca

SEQ ID NO: 171956 - DNA, 20 bp, Artificial Sequence
  Synthetic oligonucleotide; CGG chr2 60549703 60549722 60549706 -
cccagggaaccgtcaccccg

SEQ ID NO: 171957 - DNA, 20 bp, Artificial Sequence
  Synthetic oligonucleotide; GAG chr2 60549698 60549717 60549701 -
ggaaccgtcaccccgcggcc

SEQ ID NO: 171958 - DNA, 20 bp, Artificial Sequence
  Synthetic oligonucleotide; TGG chr2 60549694 60549713 60549697 -
ccgtcaccccgcggccgagc

SEQ ID NO: 171959 - DNA, 20 bp, Artificial Sequence
  Synthetic oligonucleotide; GAG chr2 60549689 60549708 60549692 -
accccgcggccgagctggcc

SEQ ID NO: 171960 - DNA, 20 bp, Artificial Sequence
  Synthetic oligonucleotide; TGG chr2 60549685 60549704 60549688 -
cgcggccgagctggccgagc

SEQ ID NO: 171961 - DNA, 20 bp, Artificial Sequence
  Synthetic oligonucleotide; CGG chr2 60549681 60549700 60549684 -
gccgagctggccgagctgga

SEQ ID NO: 171962 - DNA, 20 bp, Artificial Sequence
  Synthetic oligonucleotide; GGG chr2 60549680 60549699 60549683 -
ccgagctggccgagctggac

SEQ ID NO: 171963 - DNA, 20 bp, Artificial Sequence
  Synthetic oligonucleotide; TGG chr2 60549675 60549694 60549678 -
ctggccgagctggacgggca

SEQ ID NO: 171964 - DNA, 20 bp, Artificial Sequence
  Synthetic oligonucleotide; GAG chr2 60549673 60549692 60549676 -
ggccgagctggacgggcatg

SEQ ID NO: 171965 - DNA, 20 bp, Artificial Sequence
  Synthetic oligonucleotide; AGG chr2 60549672 60549691 60549675 -
gccgagctggacgggcatgg

SEQ ID NO: 171966 - DNA, 20 bp, Artificial Sequence
  Synthetic oligonucleotide; CAG chr2 60549669 60549688 60549672 -
gagctggacgggcatggagg

SEQ ID NO: 171967 - DNA, 20 bp, Artificial Sequence
  Synthetic oligonucleotide; CAG chr2 60549666 60549685 60549669 -
ctggacgggcatggaggcag

SEQ ID NO: 171968 - DNA, 20 bp, Artificial Sequence
  Synthetic oligonucleotide; CAG chr2 60549662 60549681 60549665 -
acgggcatggaggcagcagt

SEQ ID NO: 171969 - DNA, 20 bp, Artificial Sequence
  Synthetic oligonucleotide; AGG chr2 60549661 60549680 60549664 -
cgggcatggaggcagcagtc

SEQ ID NO: 171970 - DNA, 20 bp, Artificial Sequence
  Synthetic oligonucleotide; GGG chr2 60549660 60549679 60549663 -
gggcatggaggcagcagtca

SEQ ID NO: 171971 - DNA, 20 bp, Artificial Sequence
  Synthetic oligonucleotide; TGG chr2 60549653 60549672 60549656 -
gaggcagcagtcagggcccc

SEQ ID NO: 171972 - DNA, 20 bp, Artificial Sequence
  Synthetic oligonucleotide; CGG chr2 60549636 60549655 60549639 -
ccctggctgccctccgtctc

SEQ ID NO: 171973 - DNA, 20 bp, Artificial Sequence
  Synthetic oligonucleotide; GGG chr2 60549635 60549654 60549638 -
cctggctgccctccgtctcc

SEQ ID NO: 171974 - DNA, 20 bp, Artificial Sequence
  Synthetic oligonucleotide; CGG chr2 60549628 60549647 60549631 -
gccctccgtctccgggcccc

SEQ ID NO: 171975 - DNA, 20 bp, Artificial Sequence
  Synthetic oligonucleotide; GGG chr2 60549627 60549646 60549630 -
ccctccgtctccgggccccc

SEQ ID NO: 171976 - DNA, 20 bp, Artificial Sequence
  Synthetic oligonucleotide; AAG chr2 60549620 60549639 60549623 -
tctccgggcccccgggcccc

SEQ ID NO: 171977 - DNA, 20 bp, Artificial Sequence
  Synthetic oligonucleotide; AGG chr2 60549619 60549638 60549622 -
ctccgggcccccgggcccca

SEQ ID NO: 171978 - DNA, 20 bp, Artificial Sequence
  Synthetic oligonucleotide; CGG chr2 60549611 60549630 60549614 -
ccccgggccccaaggccccg

SEQ ID NO: 171979 - DNA, 20 bp, Artificial Sequence
  Synthetic oligonucleotide; CAG chr2 60549589 60549608 60549592 -
gccgctgctgcacgtgttcg

SEQ ID NO: 171980 - DNA, 20 bp, Artificial Sequence
  Synthetic oligonucleotide; AAG chr2 60549585 60549604 60549588 -
ctgctgcacgtgttcgcagc

SEQ ID NO: 171981 - DNA, 20 bp, Artificial Sequence
  Synthetic oligonucleotide; CGG chr2 60549580 60549599 60549583 -
gcacgtgttcgcagcaagcg

SEQ ID NO: 171982 - DNA, 20 bp, Artificial Sequence
  Synthetic oligonucleotide; CGG chr2 60549577 60549596 60549580 -
cgtgttcgcagcaagcgcgg

SEQ ID NO: 171983 - DNA, 20 bp, Artificial Sequence
  Synthetic oligonucleotide; GGG chr2 60549576 60549595 60549579 -
gtgttcgcagcaagcgcggc

SEQ ID NO: 171984 - DNA, 20 bp, Artificial Sequence
  Synthetic oligonucleotide; GAG chr2 60549574 60549593 60549577 -
gttcgcagcaagcgcggcgg

SEQ ID NO: 171985 - DNA, 20 bp, Artificial Sequence
  Synthetic oligonucleotide; CAG chr2 60549567 60549586 60549570 -
gcaagcgcggcgggagcctg

SEQ ID NO: 171986 - DNA, 20 bp, Artificial Sequence
  Synthetic oligonucleotide; CAG chr2 60549563 60549582 60549566 -
gcgcggcgggagcctgcagc

SEQ ID NO: 171987 - DNA, 20 bp, Artificial Sequence
  Synthetic oligonucleotide; CAG chr2 60549539 60549558 60549542 -
acgctgctcgctttgtgcct

SEQ ID NO: 171988 - DNA, 20 bp, Artificial Sequence
  Synthetic oligonucleotide; GAG chr2 60549537 60549556 60549540 -
gctgctcgctttgtgcctca

SEQ ID NO: 171989 - DNA, 20 bp, Artificial Sequence
  Synthetic oligonucleotide; CGG chr2 60549507 60549526 60549510 -
gcccaacttcactttctgca

SEQ ID NO: 171990 - DNA, 20 bp, Artificial Sequence
  Synthetic oligonucleotide; CGG chr2 60549493 60549512 60549496 -
tctgcacggtccacccttgc

SEQ ID NO: 171991 - DNA, 20 bp, Artificial Sequence
  Synthetic oligonucleotide; GGG chr2 60549492 60549511 60549495 -
ctgcacggtccacccttgcc

SEQ ID NO: 171992 - DNA, 20 bp, Artificial Sequence
  Synthetic oligonucleotide; GGG chr2 60549491 60549510 60549494 -
tgcacggtccacccttgccg

SEQ ID NO: 171993 - DNA, 20 bp, Artificial Sequence
  Synthetic oligonucleotide; CGG chr2 60549479 60549498 60549482 -
ccttgccggggcccctgccc

SEQ ID NO: 171994 - DNA, 20 bp, Artificial Sequence
  Synthetic oligonucleotide; GGG chr2 60549478 60549497 60549481 -
cttgccggggcccctgcccc

SEQ ID NO: 171995 - DNA, 20 bp, Artificial Sequence
  Synthetic oligonucleotide; TAG chr2 60549471 60549490 60549474 -
gggcccctgccccgggcctg

SEQ ID NO: 171996 - DNA, 20 bp, Artificial Sequence
  Synthetic oligonucleotide; CGG chr2 60549464 60549483 60549467 -
tgccccgggcctgtagcccc

SEQ ID NO: 171997 - DNA, 20 bp, Artificial Sequence
  Synthetic oligonucleotide; CAG chr2 60549424 60549443 60549427 -
tgcttttcctctctgaattt

SEQ ID NO: 171998 - DNA, 20 bp, Artificial Sequence
  Synthetic oligonucleotide; AAG chr2 60549396 60549415 60549399 -
gtttgcttctttaccctgtt

SEQ ID NO: 171999 - DNA, 20 bp, Artificial Sequence
  Synthetic oligonucleotide; AAG chr2 60549387 60549406 60549390 -
tttaccctgttaagacaatc

SEQ ID NO: 172000 - DNA, 20 bp, Artificial Sequence
  Synthetic oligonucleotide; AGG chr2 60549386 60549405 60549389 -
ttaccctgttaagacaatca

SEQ ID NO: 172001 - DNA, 20 bp, Artificial Sequence
  Synthetic oligonucleotide; GAG chr2 60549384 60549403 60549387 -
accctgttaagacaatcaag

SEQ ID NO: 172002 - DNA, 20 bp, Artificial Sequence
  Synthetic oligonucleotide; AAG chr2 60549381 60549400 60549384 -
ctgttaagacaatcaaggag

SEQ ID NO: 172003 - DNA, 20 bp, Artificial Sequence
  Synthetic oligonucleotide; AGG chr2 60549380 60549399 60549383 -
tgttaagacaatcaaggaga

SEQ ID NO: 172004 - DNA, 20 bp, Artificial Sequence
  Synthetic oligonucleotide; TGG chr2 60549374 60549393 60549377 -
gacaatcaaggagaaggact

SEQ ID NO: 172005 - DNA, 20 bp, Artificial Sequence
  Synthetic oligonucleotide; AAG chr2 60549370 60549389 60549373 -
atcaaggagaaggacttgga

SEQ ID NO: 172006 - DNA, 20 bp, Artificial Sequence
  Synthetic oligonucleotide; AAG chr2 60549359 60549378 60549362 -
ggacttggaaagcaaacttg

SEQ ID NO: 172007 - DNA, 20 bp, Artificial Sequence
  Synthetic oligonucleotide; CGG chr2 60549322 60549341 60549325 -
ccccctccccctccgctccc

SEQ ID NO: 172008 - DNA, 20 bp, Artificial Sequence
  Synthetic oligonucleotide; CAG chr2 60549319 60549338 60549322 -
cctccccctccgctccccgg

SEQ ID NO: 172009 - DNA, 20 bp, Artificial Sequence
  Synthetic oligonucleotide; AAG chr2 60549280 60549299 60549283 -
tccttaccaacatttcctat

SEQ ID NO: 172010 - DNA, 20 bp, Artificial Sequence
  Synthetic oligonucleotide; AGG chr2 60549279 60549298 60549282 -
ccttaccaacatttcctata

SEQ ID NO: 172011 - DNA, 20 bp, Artificial Sequence
  Synthetic oligonucleotide; CAG chr2 60549237 60549256 60549240 -
tttattcttttgcaactaca

SEQ ID NO: 172012 - DNA, 20 bp, Artificial Sequence
  Synthetic oligonucleotide; GAG chr2 60549235 60549254 60549238 -
tattcttttgcaactacaca

SEQ ID NO: 172013 - DNA, 20 bp, Artificial Sequence
  Synthetic oligonucleotide; GAG chr2 60549233 60549252 60549236 -
ttcttttgcaactacacaga

SEQ ID NO: 172014 - DNA, 20 bp, Artificial Sequence
  Synthetic oligonucleotide; AGG chr2 60549232 60549251 60549235 -
tcttttgcaactacacagag

SEQ ID NO: 172015 - DNA, 20 bp, Artificial Sequence
  Synthetic oligonucleotide; AAG chr2 60549228 60549247 60549231 -
ttgcaactacacagagagga

SEQ ID NO: 172016 - DNA, 20 bp, Artificial Sequence
  Synthetic oligonucleotide; GAG chr2 60549226 60549245 60549229 -
gcaactacacagagaggaaa

SEQ ID NO: 172017 - DNA, 20 bp, Artificial Sequence
  Synthetic oligonucleotide; CAG chr2 60549219 60549238 60549222 -
cacagagaggaaagagatct

SEQ ID NO: 172018 - DNA, 20 bp, Artificial Sequence
  Synthetic oligonucleotide; GAG chr2 60549207 60549226 60549210 -
agagatctcagtctgtcact

SEQ ID NO: 172019 - DNA, 20 bp, Artificial Sequence
  Synthetic oligonucleotide; GAG chr2 60549199 60549218 60549202 -
cagtctgtcactgagacatt

SEQ ID NO: 172020 - DNA, 20 bp, Artificial Sequence
  Synthetic oligonucleotide; CAG chr2 60549190 60549209 60549193 -
actgagacattgagacgttc

SEQ ID NO: 172021 - DNA, 20 bp, Artificial Sequence
  Synthetic oligonucleotide; AGG chr2 60549189 60549208 60549192 -
ctgagacattgagacgttcc

SEQ ID NO: 172022 - DNA, 20 bp, Artificial Sequence
  Synthetic oligonucleotide; TAG chr2 60549167 60549186 60549170 -
gctgtcttgctgtttgaacg

SEQ ID NO: 172023 - DNA, 20 bp, Artificial Sequence
  Synthetic oligonucleotide; AAG chr2 60549164 60549183 60549167 -
gtcttgctgtttgaacgtag

SEQ ID NO: 172024 - DNA, 20 bp, Artificial Sequence
  Synthetic oligonucleotide; TAG chr2 60549131 60549150 60549134 -
tctatttcttcctcccctcg

SEQ ID NO: 172025 - DNA, 20 bp, Artificial Sequence
  Synthetic oligonucleotide; GAG chr2 60549129 60549148 60549132 -
tatttcttcctcccctcgta

SEQ ID NO: 172026 - DNA, 20 bp, Artificial Sequence
  Synthetic oligonucleotide; GAG chr2 60549127 60549146 60549130 -
tttcttcctcccctcgtaga

SEQ ID NO: 172027 - DNA, 20 bp, Artificial Sequence
  Synthetic oligonucleotide; CGG chr2 60549118 60549137 60549121 -
cccctcgtagagagaattcg

SEQ ID NO: 172028 - DNA, 20 bp, Artificial Sequence
  Synthetic oligonucleotide; GAG chr2 60549073 60549092 60549076 -
cactcccttccacttcaatc

SEQ ID NO: 172029 - DNA, 20 bp, Artificial Sequence
  Synthetic oligonucleotide; AGG chr2 60549072 60549091 60549075 -
actcccttccacttcaatcg

SEQ ID NO: 172030 - DNA, 20 bp, Artificial Sequence
  Synthetic oligonucleotide; TAG chr2 60549056 60549075 60549059 -
atcgaggactccctgctttg

SEQ ID NO: 172031 - DNA, 20 bp, Artificial Sequence
  Synthetic oligonucleotide; CGG chr2 60549052 60549071 60549055 -
aggactccctgctttgtagc

SEQ ID NO: 172032 - DNA, 20 bp, Artificial Sequence
  Synthetic oligonucleotide; GAG chr2 60549050 60549069 60549053 -
gactccctgctttgtagccg

SEQ ID NO: 172033 - DNA, 20 bp, Artificial Sequence
  Synthetic oligonucleotide; TAG chr2 60549045 60549064 60549048 -
cctgctttgtagccggagtt

SEQ ID NO: 172034 - DNA, 20 bp, Artificial Sequence
  Synthetic oligonucleotide; AGG chr2 60549044 60549063 60549047 -
ctgctttgtagccggagttt

SEQ ID NO: 172035 - DNA, 20 bp, Artificial Sequence
  Synthetic oligonucleotide; CGG chr2 60549040 60549059 60549043 -
tttgtagccggagtttaggc

SEQ ID NO: 172036 - DNA, 20 bp, Artificial Sequence
  Synthetic oligonucleotide; GAG chr2 60549038 60549057 60549041 -
tgtagccggagtttaggccg

SEQ ID NO: 172037 - DNA, 20 bp, Artificial Sequence
  Synthetic oligonucleotide; TAG chr2 60549033 60549052 60549036 -
ccggagtttaggccggagct

SEQ ID NO: 172038 - DNA, 20 bp, Artificial Sequence
  Synthetic oligonucleotide; TGG chr2 60549024 60549043 60549027 -
aggccggagcttagaaatgt

SEQ ID NO: 172039 - DNA, 20 bp, Artificial Sequence
  Synthetic oligonucleotide; TGG chr2 60549015 60549034 60549018 -
cttagaaatgttggtattgt

SEQ ID NO: 172040 - DNA, 20 bp, Artificial Sequence
  Synthetic oligonucleotide; GGG chr2 60549014 60549033 60549017 -
ttagaaatgttggtattgtt

SEQ ID NO: 172041 - DNA, 20 bp, Artificial Sequence
  Synthetic oligonucleotide; GGG chr2 60549013 60549032 60549016 -
tagaaatgttggtattgttg

SEQ ID NO: 172042 - DNA, 20 bp, Artificial Sequence
  Synthetic oligonucleotide; AAG chr2 60549008 60549027 60549011 -
atgttggtattgttggggcg

SEQ ID NO: 172043 - DNA, 20 bp, Artificial Sequence
  Synthetic oligonucleotide; AGG chr2 60549007 60549026 60549010 -
tgttggtattgttggggcga

SEQ ID NO: 172044 - DNA, 20 bp, Artificial Sequence
  Synthetic oligonucleotide; GAG chr2 60549005 60549024 60549008 -
ttggtattgttggggcgaag

SEQ ID NO: 172045 - DNA, 20 bp, Artificial Sequence
  Synthetic oligonucleotide; AGG chr2 60549004 60549023 60549007 -
tggtattgttggggcgaagg

SEQ ID NO: 172046 - DNA, 20 bp, Artificial Sequence
  Synthetic oligonucleotide; TGG chr2 60549000 60549019 60549003 -
attgttggggcgaaggagga

SEQ ID NO: 172047 - DNA, 20 bp, Artificial Sequence
  Synthetic oligonucleotide; GAG chr2 60548998 60549017 60549001 -
tgttggggcgaaggaggatg

SEQ ID NO: 172048 - DNA, 20 bp, Artificial Sequence
  Synthetic oligonucleotide; GAG chr2 60548988 60549007 60548991 -
aaggaggatggagttgaatt

SEQ ID NO: 172049 - DNA, 20 bp, Artificial Sequence
  Synthetic oligonucleotide; AGG chr2 60548987 60549006 60548990 -
aggaggatggagttgaattg

SEQ ID NO: 172050 - DNA, 20 bp, Artificial Sequence
  Synthetic oligonucleotide; GGG chr2 60548986 60549005 60548989 -
ggaggatggagttgaattga

SEQ ID NO: 172051 - DNA, 20 bp, Artificial Sequence
  Synthetic oligonucleotide; GAG chr2 60548984 60549003 60548987 -
aggatggagttgaattgagg

SEQ ID NO: 172052 - DNA, 20 bp, Artificial Sequence
  Synthetic oligonucleotide; AGG chr2 60548983 60549002 60548986 -
ggatggagttgaattgaggg

SEQ ID NO: 172053 - DNA, 20 bp, Artificial Sequence
  Synthetic oligonucleotide; GGG chr2 60548982 60549001 60548985 -
gatggagttgaattgaggga

SEQ ID NO: 172054 - DNA, 20 bp, Artificial Sequence
  Synthetic oligonucleotide; GGG chr2 60548981 60549000 60548984 -
atggagttgaattgagggag

SEQ ID NO: 172055 - DNA, 20 bp, Artificial Sequence
  Synthetic oligonucleotide; GGG chr2 60548980 60548999 60548983 -
tggagttgaattgagggagg

SEQ ID NO: 172056 - DNA, 20 bp, Artificial Sequence
  Synthetic oligonucleotide; TGG chr2 60548973 60548992 60548976 -
gaattgagggagggggtaaa

SEQ ID NO: 172057 - DNA, 20 bp, Artificial Sequence
  Synthetic oligonucleotide; GAG chr2 60548968 60548987 60548971 -
gagggagggggtaaatggct

SEQ ID NO: 172058 - DNA, 20 bp, Artificial Sequence
  Synthetic oligonucleotide; AGG chr2 60548967 60548986 60548970 -
agggagggggtaaatggctg

SEQ ID NO: 172059 - DNA, 20 bp, Artificial Sequence
  Synthetic oligonucleotide; GGG chr2 60548966 60548985 60548969 -
gggagggggtaaatggctga

SEQ ID NO: 172060 - DNA, 20 bp, Artificial Sequence
  Synthetic oligonucleotide; TAG chr2 60548962 60548981 60548965 -
gggggtaaatggctgagggt

SEQ ID NO: 172061 - DNA, 20 bp, Artificial Sequence
  Synthetic oligonucleotide; AGG chr2 60548961 60548980 60548964 -
ggggtaaatggctgagggtt

SEQ ID NO: 172062 - DNA, 20 bp, Artificial Sequence
  Synthetic oligonucleotide; AAG chr2 60548958 60548977 60548961 -
gtaaatggctgagggttagg

SEQ ID NO: 172063 - DNA, 20 bp, Artificial Sequence
  Synthetic oligonucleotide; AGG chr2 60548957 60548976 60548960 -
taaatggctgagggttagga

SEQ ID NO: 172064 - DNA, 20 bp, Artificial Sequence
  Synthetic oligonucleotide; TAG chr2 60548950 60548969 60548953 -
ctgagggttaggaaggtttt

SEQ ID NO: 172065 - DNA, 20 bp, Artificial Sequence
  Synthetic oligonucleotide; AGG chr2 60548949 60548968 60548952 -
tgagggttaggaaggttttt

SEQ ID NO: 172066 - DNA, 20 bp, Artificial Sequence
  Synthetic oligonucleotide; GGG chr2 60548948 60548967 60548951 -
gagggttaggaaggttttta

SEQ ID NO: 172067 - DNA, 20 bp, Artificial Sequence
  Synthetic oligonucleotide; AAG chr2 60548944 60548963 60548947 -
gttaggaaggtttttaggga

SEQ ID NO: 172068 - DNA, 20 bp, Artificial Sequence
  Synthetic oligonucleotide; AGG chr2 60548943 60548962 60548946 -
ttaggaaggtttttagggaa

SEQ ID NO: 172069 - DNA, 20 bp, Artificial Sequence
  Synthetic oligonucleotide; GGG chr2 60548942 60548961 60548945 -
taggaaggtttttagggaaa

SEQ ID NO: 172070 - DNA, 20 bp, Artificial Sequence
  Synthetic oligonucleotide; GGG chr2 60548941 60548960 60548944 -
aggaaggtttttagggaaag

SEQ ID NO: 172071 - DNA, 20 bp, Artificial Sequence
  Synthetic oligonucleotide; CAG chr2 60548922 60548941 60548925 -
ggggaatttgcattaaaatg

SEQ ID NO: 172072 - DNA, 20 bp, Artificial Sequence
  Synthetic oligonucleotide; GAG chr2 60548920 60548939 60548923 -
ggaatttgcattaaaatgca

SEQ ID NO: 172073 - DNA, 20 bp, Artificial Sequence
  Synthetic oligonucleotide; CAG chr2 60548910 60548929 60548913 -
ttaaaatgcagagaaattat

SEQ ID NO: 172074 - DNA, 20 bp, Artificial Sequence
  Synthetic oligonucleotide; CAG chr2 60548902 60548921 60548905 -
cagagaaattatcagatgcc

SEQ ID NO: 172075 - DNA, 20 bp, Artificial Sequence
  Synthetic oligonucleotide; AAG chr2 60548898 60548917 60548901 -
gaaattatcagatgcccaga

SEQ ID NO: 172076 - DNA, 20 bp, Artificial Sequence
  Synthetic oligonucleotide; AGG chr2 60548897 60548916 60548900 -
aaattatcagatgcccagaa

SEQ ID NO: 172077 - DNA, 20 bp, Artificial Sequence
  Synthetic oligonucleotide; GAG chr2 60548877 60548896 60548880 -
aggaaatgttgattgccact

SEQ ID NO: 172078 - DNA, 20 bp, Artificial Sequence
  Synthetic oligonucleotide; AAG chr2 60548872 60548891 60548875 -
atgttgattgccactgagaa

SEQ ID NO: 172079 - DNA, 20 bp, Artificial Sequence
  Synthetic oligonucleotide; CAG chr2 60548855 60548874 60548858 -
gaaaagatgtcaatgcaaat

SEQ ID NO: 172080 - DNA, 20 bp, Artificial Sequence
  Synthetic oligonucleotide; TAG chr2 60548852 60548871 60548855 -
aagatgtcaatgcaaatcag

SEQ ID NO: 172081 - DNA, 20 bp, Artificial Sequence
  Synthetic oligonucleotide; GAG chr2 60548839 60548858 60548842 -
aaatcagtagactacaccat

SEQ ID NO: 172082 - DNA, 20 bp, Artificial Sequence
  Synthetic oligonucleotide; CAG chr2 60548780 60548799 60548783 -
tctgatttttaataatatac

SEQ ID NO: 172083 - DNA, 20 bp, Artificial Sequence
  Synthetic oligonucleotide; TGG chr2 60548758 60548777 60548761 -
gcaatgataaaaacacgttt

SEQ ID NO: 172084 - DNA, 20 bp, Artificial Sequence
  Synthetic oligonucleotide; TAG chr2 60548737 60548756 60548740 -
ggtatttctctgaacaccac

SEQ ID NO: 172085 - DNA, 20 bp, Artificial Sequence
  Synthetic oligonucleotide; AAG chr2 60548721 60548740 60548724 -
ccactagccaaatgttttgc

SEQ ID NO: 172086 - DNA, 20 bp, Artificial Sequence
  Synthetic oligonucleotide; AGG chr2 60548720 60548739 60548723 -
cactagccaaatgttttgca

SEQ ID NO: 172087 - DNA, 20 bp, Artificial Sequence
  Synthetic oligonucleotide; GAG chr2 60548718 60548737 60548721 -
ctagccaaatgttttgcaag

SEQ ID NO: 172088 - DNA, 20 bp, Artificial Sequence
  Synthetic oligonucleotide; TAG chr2 60548689 60548708 60548692 -
gttaaacgtatttcatacat

SEQ ID NO: 172089 - DNA, 20 bp, Artificial Sequence
  Synthetic oligonucleotide; TAG chr2 60548668 60548687 60548671 -
agaatataattcttgttaat

SEQ ID NO: 172090 - DNA, 20 bp, Artificial Sequence
  Synthetic oligonucleotide; AAG chr2 60548651 60548670 60548654 -
aattagcaataatttacgtt

SEQ ID NO: 172091 - DNA, 20 bp, Artificial Sequence
  Synthetic oligonucleotide; GAG chr2 60548649 60548668 60548652 -
ttagcaataatttacgttaa

SEQ ID NO: 172092 - DNA, 20 bp, Artificial Sequence
  Synthetic oligonucleotide; TAG chr2 60548644 60548663 60548647 -
aataatttacgttaagagca

SEQ ID NO: 172093 - DNA, 20 bp, Artificial Sequence
  Synthetic oligonucleotide; GAG chr2 60548633 60548652 60548636 -
ttaagagcatagaaaatgtt

SEQ ID NO: 172094 - DNA, 20 bp, Artificial Sequence
  Synthetic oligonucleotide; AGG chr2 60548632 60548651 60548635 -
taagagcatagaaaatgttg

SEQ ID NO: 172095 - DNA, 20 bp, Artificial Sequence
  Synthetic oligonucleotide; CAG chr2 60548626 60548645 60548629 -
catagaaaatgttgaggtta

SEQ ID NO: 172096 - DNA, 20 bp, Artificial Sequence
  Synthetic oligonucleotide; AGG chr2 60548625 60548644 60548628 -
atagaaaatgttgaggttac

SEQ ID NO: 172097 - DNA, 20 bp, Artificial Sequence
  Synthetic oligonucleotide; AAG chr2 60548586 60548605 60548589 -
ttgatcatcttgttattttc

SEQ ID NO: 172098 - DNA, 20 bp, Artificial Sequence
  Synthetic oligonucleotide; TAG chr2 60548559 60548578 60548562 -
ttgcctcctataaaattaat

SEQ ID NO: 172099 - DNA, 20 bp, Artificial Sequence
  Synthetic oligonucleotide; AGG chr2 60548558 60548577 60548561 -
tgcctcctataaaattaatt

SEQ ID NO: 172100 - DNA, 20 bp, Artificial Sequence
  Synthetic oligonucleotide; TGG chr2 60548548 60548567 60548551 -
aaaattaattaggtgaaatg

SEQ ID NO: 172101 - DNA, 20 bp, Artificial Sequence
  Synthetic oligonucleotide; GAG chr2 60548546 60548565 60548549 -
aattaattaggtgaaatgtg

SEQ ID NO: 172102 - DNA, 20 bp, Artificial Sequence
  Synthetic oligonucleotide; AGG chr2 60548545 60548564 60548548 -
attaattaggtgaaatgtgg

SEQ ID NO: 172103 - DNA, 20 bp, Artificial Sequence
  Synthetic oligonucleotide; CAG chr2 60548536 60548555 60548539 -
gtgaaatgtggaggtgtaat

SEQ ID NO: 172104 - DNA, 20 bp, Artificial Sequence
  Synthetic oligonucleotide; CGG chr2 60548506 60548525 60548509 -
tgaattaccacttcatttcc

SEQ ID NO: 172105 - DNA, 20 bp, Artificial Sequence
  Synthetic oligonucleotide; CAG chr2 60548489 60548508 60548492 -
tcccggttttgattgtaaat

SEQ ID NO: 172106 - DNA, 20 bp, Artificial Sequence
  Synthetic oligonucleotide; CAG chr2 60548484 60548503 60548487 -
gttttgattgtaaatcagtt

SEQ ID NO: 172107 - DNA, 20 bp, Artificial Sequence
  Synthetic oligonucleotide; TAG chr2 60548471 60548490 60548474 -
atcagttcagtcactacatt

SEQ ID NO: 172108 - DNA, 20 bp, Artificial Sequence
  Synthetic oligonucleotide; AAG chr2 60548468 60548487 60548471 -
agttcagtcactacatttag

SEQ ID NO: 172109 - DNA, 20 bp, Artificial Sequence
  Synthetic oligonucleotide; AAG chr2 60548456 60548475 60548459 -
acatttagaagactttaacc

SEQ ID NO: 172110 - DNA, 20 bp, Artificial Sequence
  Synthetic oligonucleotide; TAG chr2 60548415 60548434 60548418 -
acctttaactatttgatacc

SEQ ID NO: 172111 - DNA, 20 bp, Artificial Sequence
  Synthetic oligonucleotide; AGG chr2 60548414 60548433 60548417 -
cctttaactatttgatacct

SEQ ID NO: 172112 - DNA, 20 bp, Artificial Sequence
  Synthetic oligonucleotide; GAG chr2 60548412 60548431 60548415 -
tttaactatttgatacctag

SEQ ID NO: 172113 - DNA, 20 bp, Artificial Sequence
  Synthetic oligonucleotide; TAG chr2 60548372 60548391 60548375 -
ctaaataatattcccacttt

SEQ ID NO: 172114 - DNA, 20 bp, Artificial Sequence
  Synthetic oligonucleotide; CAG chr2 60548361 60548380 60548364 -
tcccacttttagaaatgtgt

SEQ ID NO: 172115 - DNA, 20 bp, Artificial Sequence
  Synthetic oligonucleotide; TGG chr2 60548354 60548373 60548357 -
tttagaaatgtgtcagacct

SEQ ID NO: 172116 - DNA, 20 bp, Artificial Sequence
  Synthetic oligonucleotide; GGG chr2 60548353 60548372 60548356 -
ttagaaatgtgtcagacctt

SEQ ID NO: 172117 - DNA, 20 bp, Artificial Sequence
  Synthetic oligonucleotide; AAG chr2 60548333 60548352 60548336 -
gggaacaaaaaaaaaaaaaa

SEQ ID NO: 172118 - DNA, 20 bp, Artificial Sequence
  Synthetic oligonucleotide; CGG chr2 60548322 60548341 60548325 -
aaaaaaaaaaagaatcttaa

SEQ ID NO: 172119 - DNA, 20 bp, Artificial Sequence
  Synthetic oligonucleotide; TGG chr2 60548319 60548338 60548322 -
aaaaaaaagaatcttaacgg

SEQ ID NO: 172120 - DNA, 20 bp, Artificial Sequence
  Synthetic oligonucleotide; AAG chr2 60548292 60548311 60548295 -
aaaaaatttttttttttgca

SEQ ID NO: 172121 - DNA, 20 bp, Artificial Sequence
  Synthetic oligonucleotide; AGG chr2 60548291 60548310 60548294 -
aaaaatttttttttttgcaa

SEQ ID NO: 172122 - DNA, 20 bp, Artificial Sequence
  Synthetic oligonucleotide; TAG chr2 60548278 60548297 60548281 -
tttgcaaaggttctatgtac

SEQ ID NO: 172123 - DNA, 20 bp, Artificial Sequence
  Synthetic oligonucleotide; AAG chr2 60548274 60548293 60548277 -
caaaggttctatgtactagt

SEQ ID NO: 172124 - DNA, 20 bp, Artificial Sequence
  Synthetic oligonucleotide; AAG chr2 60548252 60548271 60548255 -
gtttgataaaatattttcct

SEQ ID NO: 172125 - DNA, 20 bp, Artificial Sequence
  Synthetic oligonucleotide; CAG chr2 60548241 60548260 60548244 -
tattttcctaagtcttcctt

SEQ ID NO: 172126 - DNA, 20 bp, Artificial Sequence
  Synthetic oligonucleotide; CAG chr2 60548227 60548246 60548230 -
ttccttcagtctgtaaacct

SEQ ID NO: 172127 - DNA, 20 bp, Artificial Sequence
  Synthetic oligonucleotide; TAG chr2 60548218 60548237 60548221 -
tctgtaaacctcagaacttg

SEQ ID NO: 172128 - DNA, 20 bp, Artificial Sequence
  Synthetic oligonucleotide; AAG chr2 60548199 60548218 60548202 -
gtagctaatgctaaacaaaa

SEQ ID NO: 172129 - DNA, 20 bp, Artificial Sequence
  Synthetic oligonucleotide; CAG chr2 60548161 60548180 60548164 -
tgtacttaaaatccttaatt

SEQ ID NO: 172130 - DNA, 20 bp, Artificial Sequence
  Synthetic oligonucleotide; CAG chr2 60548154 60548173 60548157 -
aaaatccttaattcagacaa

SEQ ID NO: 172131 - DNA, 20 bp, Artificial Sequence
  Synthetic oligonucleotide; AGG chr2 60548153 60548172 60548156 -
aaatccttaattcagacaac

SEQ ID NO: 172132 - DNA, 20 bp, Artificial Sequence
  Synthetic oligonucleotide; GAG chr2 60548142 60548161 60548145 -
tcagacaacaggaatatttt

SEQ ID NO: 172133 - DNA, 20 bp, Artificial Sequence
  Synthetic oligonucleotide; GAG chr2 60548136 60548155 60548139 -
aacaggaatattttgagaat

SEQ ID NO: 172134 - DNA, 20 bp, Artificial Sequence
  Synthetic oligonucleotide; TGG chr2 60548117 60548136 60548120 -
tgagttccctattcctcact

SEQ ID NO: 172135 - DNA, 20 bp, Artificial Sequence
  Synthetic oligonucleotide; TGG chr2 60548108 60548127 60548111 -
tattcctcacttggtcaaaa

SEQ ID NO: 172136 - DNA, 20 bp, Artificial Sequence
  Synthetic oligonucleotide; AAG chr2 60548105 60548124 60548108 -
tcctcacttggtcaaaatgg

SEQ ID NO: 172137 - DNA, 20 bp, Artificial Sequence
  Synthetic oligonucleotide; AAG chr2 60548095 60548114 60548098 -
gtcaaaatggaagcaaatgt

SEQ ID NO: 172138 - DNA, 20 bp, Artificial Sequence
  Synthetic oligonucleotide; GAG chr2 60548093 60548112 60548096 -
caaaatggaagcaaatgtaa

SEQ ID NO: 172139 - DNA, 20 bp, Artificial Sequence
  Synthetic oligonucleotide; AAG chr2 60548090 60548109 60548093 -
aatggaagcaaatgtaagag

SEQ ID NO: 172140 - DNA, 20 bp, Artificial Sequence
  Synthetic oligonucleotide; AAG chr2 60548078 60548097 60548081 -
tgtaagagaagaatgacatt

SEQ ID NO: 172141 - DNA, 20 bp, Artificial Sequence
  Synthetic oligonucleotide; AGG chr2 60548077 60548096 60548080 -
gtaagagaagaatgacatta

SEQ ID NO: 172142 - DNA, 20 bp, Artificial Sequence
  Synthetic oligonucleotide; CAG chr2 60548067 60548086 60548070 -
aatgacattaaggcacaatg

SEQ ID NO: 172143 - DNA, 20 bp, Artificial Sequence
  Synthetic oligonucleotide; GAG chr2 60548065 60548084 60548068 -
tgacattaaggcacaatgca

SEQ ID NO: 172144 - DNA, 20 bp, Artificial Sequence
  Synthetic oligonucleotide; AGG chr2 60548064 60548083 60548067 -
gacattaaggcacaatgcag

SEQ ID NO: 172145 - DNA, 20 bp, Artificial Sequence
  Synthetic oligonucleotide; AAG chr2 60548033 60548052 60548036 -
tttgtcttcttttatttgaa

SEQ ID NO: 172146 - DNA, 20 bp, Artificial Sequence
  Synthetic oligonucleotide; TGG chr2 60548002 60548021 60548005 -
tgtattctgtatttatcttt

SEQ ID NO: 172147 - DNA, 20 bp, Artificial Sequence
  Synthetic oligonucleotide; CAG chr2 60547998 60548017 60548001 -
ttctgtatttatcttttggc

SEQ ID NO: 172148 - DNA, 20 bp, Artificial Sequence
  Synthetic oligonucleotide; TGG chr2 60547990 60548009 60547993 -
ttatcttttggccagtatgt

SEQ ID NO: 172149 - DNA, 20 bp, Artificial Sequence
  Synthetic oligonucleotide; GGG chr2 60547989 60548008 60547992 -
tatcttttggccagtatgtt

SEQ ID NO: 172150 - DNA, 20 bp, Artificial Sequence
  Synthetic oligonucleotide; AAG chr2 60547984 60548003 60547987 -
tttggccagtatgttgggca

SEQ ID NO: 172151 - DNA, 20 bp, Artificial Sequence
  Synthetic oligonucleotide; AAG chr2 60547975 60547994 60547978 -
tatgttgggcaaagaaacat

SEQ ID NO: 172152 - DNA, 20 bp, Artificial Sequence
  Synthetic oligonucleotide; TAG chr2 60547951 60547970 60547954 -
gcttactttactgtctttat

SEQ ID NO: 172153 - DNA, 20 bp, Artificial Sequence
  Synthetic oligonucleotide; TAG chr2 60547948 60547967 60547951 -
tactttactgtctttattag

SEQ ID NO: 172154 - DNA, 20 bp, Artificial Sequence
  Synthetic oligonucleotide; AGG chr2 60547947 60547966 60547950 -
actttactgtctttattagt

SEQ ID NO: 172155 - DNA, 20 bp, Artificial Sequence
  Synthetic oligonucleotide; TGG chr2 60547923 60547942 60547926 -
atataaccttcatattcctg

SEQ ID NO: 172156 - DNA, 20 bp, Artificial Sequence
  Synthetic oligonucleotide; TAG chr2 60547904 60547923 60547907 -
gtggtgaccttatgttaaat

SEQ ID NO: 172157 - DNA, 20 bp, Artificial Sequence
  Synthetic oligonucleotide; AGG chr2 60547903 60547922 60547906 -
tggtgaccttatgttaaatt

SEQ ID NO: 172158 - DNA, 20 bp, Artificial Sequence
  Synthetic oligonucleotide; GAG chr2 60547901 60547920 60547904 -
gtgaccttatgttaaattag

SEQ ID NO: 172159 - DNA, 20 bp, Artificial Sequence
  Synthetic oligonucleotide; AGG chr2 60547900 60547919 60547903 -
tgaccttatgttaaattagg

SEQ ID NO: 172160 - DNA, 20 bp, Artificial Sequence
  Synthetic oligonucleotide; GAG chr2 60547898 60547917 60547901 -
accttatgttaaattaggag

SEQ ID NO: 172161 - DNA, 20 bp, Artificial Sequence
  Synthetic oligonucleotide; CAG chr2 60547892 60547911 60547895 -
tgttaaattaggaggagtac

SEQ ID NO: 172162 - DNA, 20 bp, Artificial Sequence
  Synthetic oligonucleotide; GAG chr2 60547890 60547909 60547893 -
ttaaattaggaggagtacca

SEQ ID NO: 172163 - DNA, 20 bp, Artificial Sequence
  Synthetic oligonucleotide; AGG chr2 60547889 60547908 60547892 -
taaattaggaggagtaccag

SEQ ID NO: 172164 - DNA, 20 bp, Artificial Sequence
  Synthetic oligonucleotide; TAG chr2 60547885 60547904 60547888 -
ttaggaggagtaccagaggc

SEQ ID NO: 172165 - DNA, 20 bp, Artificial Sequence
  Synthetic oligonucleotide; GAG chr2 60547875 60547894 60547878 -
taccagaggctagaaattat

SEQ ID NO: 172166 - DNA, 20 bp, Artificial Sequence
  Synthetic oligonucleotide; GAG chr2 60547861 60547880 60547864 -
aattatgagatgtcctactt

SEQ ID NO: 172167 - DNA, 20 bp, Artificial Sequence
  Synthetic oligonucleotide; CAG chr2 60547856 60547875 60547859 -
tgagatgtcctacttgagca

SEQ ID NO: 172168 - DNA, 20 bp, Artificial Sequence
  Synthetic oligonucleotide; AGG chr2 60547855 60547874 60547858 -
gagatgtcctacttgagcac

SEQ ID NO: 172169 - DNA, 20 bp, Artificial Sequence
  Synthetic oligonucleotide; CAG chr2 60547850 60547869 60547853 -
gtcctacttgagcacaggtg

SEQ ID NO: 172170 - DNA, 20 bp, Artificial Sequence
  Synthetic oligonucleotide; TAG chr2 60547846 60547865 60547849 -
tacttgagcacaggtgcagc

SEQ ID NO: 172171 - DNA, 20 bp, Artificial Sequence
  Synthetic oligonucleotide; AGG chr2 60547845 60547864 60547848 -
acttgagcacaggtgcagct

SEQ ID NO: 172172 - DNA, 20 bp, Artificial Sequence
  Synthetic oligonucleotide; CAG chr2 60547842 60547861 60547845 -
tgagcacaggtgcagctagg

SEQ ID NO: 172173 - DNA, 20 bp, Artificial Sequence
  Synthetic oligonucleotide; AGG chr2 60547841 60547860 60547844 -
gagcacaggtgcagctaggc

SEQ ID NO: 172174 - DNA, 20 bp, Artificial Sequence
  Synthetic oligonucleotide; GGG chr2 60547840 60547859 60547843 -
agcacaggtgcagctaggca

SEQ ID NO: 172175 - DNA, 20 bp, Artificial Sequence
  Synthetic oligonucleotide; TAG chr2 60547816 60547835 60547819 -
tctctcaatattatttcacc

SEQ ID NO: 172176 - DNA, 20 bp, Artificial Sequence
  Synthetic oligonucleotide; TGG chr2 60547807 60547826 60547810 -
attatttcacctagcacatc

SEQ ID NO: 172177 - DNA, 20 bp, Artificial Sequence
  Synthetic oligonucleotide; GGG chr2 60547806 60547825 60547809 -
ttatttcacctagcacatct

SEQ ID NO: 172178 - DNA, 20 bp, Artificial Sequence
  Synthetic oligonucleotide; GAG chr2 60547804 60547823 60547807 -
atttcacctagcacatctgg

SEQ ID NO: 172179 - DNA, 20 bp, Artificial Sequence
  Synthetic oligonucleotide; CAG chr2 60547795 60547814 60547798 -
agcacatctgggagttactc

SEQ ID NO: 172180 - DNA, 20 bp, Artificial Sequence
  Synthetic oligonucleotide; CAG chr2 60547774 60547793 60547777 -
agatcttccccctcaatatt

SEQ ID NO: 172181 - DNA, 20 bp, Artificial Sequence
  Synthetic oligonucleotide; TGG chr2 60547769 60547788 60547772 -
ttccccctcaatattcagcc

SEQ ID NO: 172182 - DNA, 20 bp, Artificial Sequence
  Synthetic oligonucleotide; GGG chr2 60547768 60547787 60547771 -
tccccctcaatattcagcct

SEQ ID NO: 172183 - DNA, 20 bp, Artificial Sequence
  Synthetic oligonucleotide; TAG chr2 60547765 60547784 60547768 -
ccctcaatattcagcctggg

SEQ ID NO: 172184 - DNA, 20 bp, Artificial Sequence
  Synthetic oligonucleotide; AGG chr2 60547764 60547783 60547767 -
cctcaatattcagcctgggt

SEQ ID NO: 172185 - DNA, 20 bp, Artificial Sequence
  Synthetic oligonucleotide; GGG chr2 60547763 60547782 60547766 -
ctcaatattcagcctgggta

SEQ ID NO: 172186 - DNA, 20 bp, Artificial Sequence
  Synthetic oligonucleotide; GAG chr2 60547742 60547761 60547745 -
ggttgaaataaatttaacct

SEQ ID NO: 172187 - DNA, 20 bp, Artificial Sequence
  Synthetic oligonucleotide; TGG chr2 60547734 60547753 60547737 -
taaatttaacctgagttcac

SEQ ID NO: 172188 - DNA, 20 bp, Artificial Sequence
  Synthetic oligonucleotide; TGG chr2 60547661 60547680 60547664 -
atctattttttgattctctg

SEQ ID NO: 172189 - DNA, 20 bp, Artificial Sequence
  Synthetic oligonucleotide; AAG chr2 60547654 60547673 60547657 -
ttttgattctctgtggcttt

SEQ ID NO: 172190 - DNA, 20 bp, Artificial Sequence
  Synthetic oligonucleotide; TGG chr2 60547634 60547653 60547637 -
aagttcattaaatgtaaaat

SEQ ID NO: 172191 - DNA, 20 bp, Artificial Sequence
  Synthetic oligonucleotide; CAG chr2 60547631 60547650 60547634 -
ttcattaaatgtaaaattgg

SEQ ID NO: 172192 - DNA, 20 bp, Artificial Sequence
  Synthetic oligonucleotide; AAG chr2 60547621 60547640 60547624 -
gtaaaattggcagcttgcta

SEQ ID NO: 172193 - DNA, 20 bp, Artificial Sequence
  Synthetic oligonucleotide; AAG chr2 60547618 60547637 60547621 -
aaattggcagcttgctaaag

SEQ ID NO: 172194 - DNA, 20 bp, Artificial Sequence
  Synthetic oligonucleotide; AGG chr2 60547617 60547636 60547620 -
aattggcagcttgctaaaga

SEQ ID NO: 172195 - DNA, 20 bp, Artificial Sequence
  Synthetic oligonucleotide; CAG chr2 60547613 60547632 60547616 -
ggcagcttgctaaagaaggt

SEQ ID NO: 172196 - DNA, 20 bp, Artificial Sequence
  Synthetic oligonucleotide; AAG chr2 60547595 60547614 60547598 -
gtcagactgattaactgttt

SEQ ID NO: 172197 - DNA, 20 bp, Artificial Sequence
  Synthetic oligonucleotide; CAG chr2 60547573 60547592 60547576 -
gacttgtacattttctgctt

SEQ ID NO: 172198 - DNA, 20 bp, Artificial Sequence
  Synthetic oligonucleotide; TGG chr2 60547560 60547579 60547563 -
tctgcttcagttttattaac

SEQ ID NO: 172199 - DNA, 20 bp, Artificial Sequence
  Synthetic oligonucleotide; CAG chr2 60547557 60547576 60547560 -
gcttcagttttattaactgg

SEQ ID NO: 172200 - DNA, 20 bp, Artificial Sequence
  Synthetic oligonucleotide; TGG chr2 60547549 60547568 60547552 -
tttattaactggcagcatcc

SEQ ID NO: 172201 - DNA, 20 bp, Artificial Sequence
  Synthetic oligonucleotide; TAG chr2 60547510 60547529 60547513 -
gattttttttttttttttga

SEQ ID NO: 172202 - DNA, 20 bp, Artificial Sequence
  Synthetic oligonucleotide; GAG chr2 60547508 60547527 60547511 -
ttttttttttttttttgata

SEQ ID NO: 172203 - DNA, 20 bp, Artificial Sequence
  Synthetic oligonucleotide; AAG chr2 60547504 60547523 60547507 -
ttttttttttttgatagagc

SEQ ID NO: 172204 - DNA, 20 bp, Artificial Sequence
  Synthetic oligonucleotide; AAG chr2 60547498 60547517 60547501 -
ttttttgatagagcaagcat

SEQ ID NO: 172205 - DNA, 20 bp, Artificial Sequence
  Synthetic oligonucleotide; AAG chr2 60547488 60547507 60547491 -
gagcaagcataagatttcac

SEQ ID NO: 172206 - DNA, 20 bp, Artificial Sequence
  Synthetic oligonucleotide; CAG chr2 60547485 60547504 60547488 -
caagcataagatttcacaag

SEQ ID NO: 172207 - DNA, 20 bp, Artificial Sequence
  Synthetic oligonucleotide; GAG chr2 60547483 60547502 60547486 -
agcataagatttcacaagca

SEQ ID NO: 172208 - DNA, 20 bp, Artificial Sequence
  Synthetic oligonucleotide; TGG chr2 60547456 60547475 60547459 -
accaactctcttttcccctt

SEQ ID NO: 172209 - DNA, 20 bp, Artificial Sequence
  Synthetic oligonucleotide; AAG chr2 60547453 60547472 60547456 -
aactctcttttcccctttgg

SEQ ID NO: 172210 - DNA, 20 bp, Artificial Sequence
  Synthetic oligonucleotide; TAG chr2 60547438 60547457 60547441 -
tttggaagcttaaaaaatga

SEQ ID NO: 172211 - DNA, 20 bp, Artificial Sequence
  Synthetic oligonucleotide; AAG chr2 60547435 60547454 60547438 -
ggaagcttaaaaaatgatag

SEQ ID NO: 172212 - DNA, 20 bp, Artificial Sequence
  Synthetic oligonucleotide; TGG chr2 60547431 60547450 60547434 -
gcttaaaaaatgatagaagc

SEQ ID NO: 172213 - DNA, 20 bp, Artificial Sequence
  Synthetic oligonucleotide; AAG chr2 60547426 60547445 60547429 -
aaaaatgatagaagctggta

SEQ ID NO: 172214 - DNA, 20 bp, Artificial Sequence
  Synthetic oligonucleotide; TAG chr2 60547423 60547442 60547426 -
aatgatagaagctggtaaag

SEQ ID NO: 172215 - DNA, 20 bp, Artificial Sequence
  Synthetic oligonucleotide; TGG chr2 60547416 60547435 60547419 -
gaagctggtaaagtagatgc

SEQ ID NO: 172216 - DNA, 20 bp, Artificial Sequence
  Synthetic oligonucleotide; GAG chr2 60547414 60547433 60547417 -
agctggtaaagtagatgctg

SEQ ID NO: 172217 - DNA, 20 bp, Artificial Sequence
  Synthetic oligonucleotide; TAG chr2 60547406 60547425 60547409 -
aagtagatgctggagtattt

SEQ ID NO: 172218 - DNA, 20 bp, Artificial Sequence
  Synthetic oligonucleotide; AAG chr2 60547399 60547418 60547402 -
tgctggagtattttagtaca

SEQ ID NO: 172219 - DNA, 20 bp, Artificial Sequence
  Synthetic oligonucleotide; AAG chr2 60547386 60547405 60547389 -
tagtacaaagttaaaaaaaa

SEQ ID NO: 172220 - DNA, 20 bp, Artificial Sequence
  Synthetic oligonucleotide; CAG chr2 60547379 60547398 60547382 -
aagttaaaaaaaaaagcaaa

SEQ ID NO: 172221 - DNA, 20 bp, Artificial Sequence
  Synthetic oligonucleotide; AGG chr2 60547378 60547397 60547381 -
agttaaaaaaaaaagcaaac

SEQ ID NO: 172222 - DNA, 20 bp, Artificial Sequence
  Synthetic oligonucleotide; AAG chr2 60547374 60547393 60547377 -
aaaaaaaaaagcaaacagga

SEQ ID NO: 172223 - DNA, 20 bp, Artificial Sequence
  Synthetic oligonucleotide; AAG chr2 60547370 60547389 60547373 -
aaaaaagcaaacaggaaaga

SEQ ID NO: 172224 - DNA, 20 bp, Artificial Sequence
  Synthetic oligonucleotide; TGG chr2 60547340 60547359 60547343 -
taccttgttataccatccgc

SEQ ID NO: 172225 - DNA, 20 bp, Artificial Sequence
  Synthetic oligonucleotide; CAG chr2 60547325 60547344 60547328 -
tccgctggtgattatgtgtg

SEQ ID NO: 172226 - DNA, 20 bp, Artificial Sequence
  Synthetic oligonucleotide; TAG chr2 60547319 60547338 60547322 -
ggtgattatgtgtgcagaaa

SEQ ID NO: 172227 - DNA, 20 bp, Artificial Sequence
  Synthetic oligonucleotide; AAG chr2 60547306 60547325 60547309 -
gcagaaatagtctcataatg

SEQ ID NO: 172228 - DNA, 20 bp, Artificial Sequence
  Synthetic oligonucleotide; TGG chr2 60547298 60547317 60547301 -
agtctcataatgaagcattt

SEQ ID NO: 172229 - DNA, 20 bp, Artificial Sequence
  Synthetic oligonucleotide; GAG chr2 60547296 60547315 60547299 -
tctcataatgaagcattttg

SEQ ID NO: 172230 - DNA, 20 bp, Artificial Sequence
  Synthetic oligonucleotide; CAG chr2 60547287 60547306 60547290 -
gaagcattttggagctcatt

SEQ ID NO: 172231 - DNA, 20 bp, Artificial Sequence
  Synthetic oligonucleotide; TAG chr2 60547279 60547298 60547282 -
ttggagctcattcagaaaat

SEQ ID NO: 172232 - DNA, 20 bp, Artificial Sequence
  Synthetic oligonucleotide; TAG chr2 60547260 60547279 60547263 -
ttagtccactttgacaacat

SEQ ID NO: 172233 - DNA, 20 bp, Artificial Sequence
  Synthetic oligonucleotide; AGG chr2 60547259 60547278 60547262 -
tagtccactttgacaacatt

SEQ ID NO: 172234 - DNA, 20 bp, Artificial Sequence
  Synthetic oligonucleotide; AAG chr2 60547254 60547273 60547257 -
cactttgacaacattaggcg

SEQ ID NO: 172235 - DNA, 20 bp, Artificial Sequence
  Synthetic oligonucleotide; AAG chr2 60547245 60547264 60547248 -
aacattaggcgaagtatttc

SEQ ID NO: 172236 - DNA, 20 bp, Artificial Sequence
  Synthetic oligonucleotide; AAG chr2 60547238 60547257 60547241 -
ggcgaagtatttcaagtcta

SEQ ID NO: 172237 - DNA, 20 bp, Artificial Sequence
  Synthetic oligonucleotide; AAG chr2 60547234 60547253 60547237 -
aagtatttcaagtctaaaga

SEQ ID NO: 172238 - DNA, 20 bp, Artificial Sequence
  Synthetic oligonucleotide; AGG chr2 60547233 60547252 60547236 -
agtatttcaagtctaaagaa

SEQ ID NO: 172239 - DNA, 20 bp, Artificial Sequence
  Synthetic oligonucleotide; CAG chr2 60547224 60547243 60547227 -
agtctaaagaaaggacttct

SEQ ID NO: 172240 - DNA, 20 bp, Artificial Sequence
  Synthetic oligonucleotide; TGG chr2 60547206 60547225 60547209 -
ctcagccttgctctgaaatg

SEQ ID NO: 172241 - DNA, 20 bp, Artificial Sequence
  Synthetic oligonucleotide; TAG chr2 60547172 60547191 60547175 -
ccattctgatttttatatca

SEQ ID NO: 172242 - DNA, 20 bp, Artificial Sequence
  Synthetic oligonucleotide; AAG chr2 60547161 60547180 60547164 -
tttatatcatagatgccacc

SEQ ID NO: 172243 - DNA, 20 bp, Artificial Sequence
  Synthetic oligonucleotide; TAG chr2 60547146 60547165 60547149 -
ccaccaagtgcaaacatgtt

SEQ ID NO: 172244 - DNA, 20 bp, Artificial Sequence
  Synthetic oligonucleotide; TAG chr2 60547136 60547155 60547139 -
caaacatgtttagaatatta

SEQ ID NO: 172245 - DNA, 20 bp, Artificial Sequence
  Synthetic oligonucleotide; AGG chr2 60547135 60547154 60547138 -
aaacatgtttagaatattat

SEQ ID NO: 172246 - DNA, 20 bp, Artificial Sequence
  Synthetic oligonucleotide; CAG chr2 60547120 60547139 60547123 -
attataggcattccatttct

SEQ ID NO: 172247 - DNA, 20 bp, Artificial Sequence
  Synthetic oligonucleotide; TGG chr2 60547096 60547115 60547099 -
ataaaaaaaaaatgactaat

SEQ ID NO: 172248 - DNA, 20 bp, Artificial Sequence
  Synthetic oligonucleotide; AAG chr2 60547082 60547101 60547085 -
actaattggcttattttctt

SEQ ID NO: 172249 - DNA, 20 bp, Artificial Sequence
  Synthetic oligonucleotide; AAG chr2 60547072 60547091 60547075 -
ttattttcttaagtactcaa

SEQ ID NO: 172250 - DNA, 20 bp, Artificial Sequence
  Synthetic oligonucleotide; TAG chr2 60547060 60547079 60547063 -
gtactcaaaagtatcccatt

SEQ ID NO: 172251 - DNA, 20 bp, Artificial Sequence
  Synthetic oligonucleotide; GAG chr2 60547046 60547065 60547049 -
cccatttagctaatgtgtct

SEQ ID NO: 172252 - DNA, 20 bp, Artificial Sequence
  Synthetic oligonucleotide; TGG chr2 60547025 60547044 60547028 -
agaaatactgcccgtgcatt

SEQ ID NO: 172253 - DNA, 20 bp, Artificial Sequence
  Synthetic oligonucleotide; TGG chr2 60547006 60547025 60547009 -
ttggtatttctttgattttg

SEQ ID NO: 172254 - DNA, 20 bp, Artificial Sequence
  Synthetic oligonucleotide; GAG chr2 60546996 60547015 60546999 -
tttgattttgtggcactgct

SEQ ID NO: 172255 - DNA, 20 bp, Artificial Sequence
  Synthetic oligonucleotide; GAG chr2 60546994 60547013 60546997 -
tgattttgtggcactgctga

SEQ ID NO: 172256 - DNA, 20 bp, Artificial Sequence
  Synthetic oligonucleotide; GAG chr2 60546990 60547009 60546993 -
tttgtggcactgctgagagt

SEQ ID NO: 172257 - DNA, 20 bp, Artificial Sequence
  Synthetic oligonucleotide; GAG chr2 60546988 60547007 60546991 -
tgtggcactgctgagagtga

SEQ ID NO: 172258 - DNA, 20 bp, Artificial Sequence
  Synthetic oligonucleotide; CAG chr2 60546985 60547004 60546988 -
ggcactgctgagagtgagag

SEQ ID NO: 172259 - DNA, 20 bp, Artificial Sequence
  Synthetic oligonucleotide; AAG chr2 60546981 60547000 60546984 -
ctgctgagagtgagagcaga

SEQ ID NO: 172260 - DNA, 20 bp, Artificial Sequence
  Synthetic oligonucleotide; AGG chr2 60546980 60546999 60546983 -
tgctgagagtgagagcagaa

SEQ ID NO: 172261 - DNA, 20 bp, Artificial Sequence
  Synthetic oligonucleotide; TGG chr2 60546973 60546992 60546976 -
agtgagagcagaaaggtttt

SEQ ID NO: 172262 - DNA, 20 bp, Artificial Sequence
  Synthetic oligonucleotide; CAG chr2 60546970 60546989 60546973 -
gagagcagaaaggtttttgg

SEQ ID NO: 172263 - DNA, 20 bp, Artificial Sequence
  Synthetic oligonucleotide; TAG chr2 60546937 60546956 60546940 -
gctgcgacatgattattatt

SEQ ID NO: 172264 - DNA, 20 bp, Artificial Sequence
  Synthetic oligonucleotide; TAG chr2 60546924 60546943 60546927 -
tattatttagatccgtttca

SEQ ID NO: 172265 - DNA, 20 bp, Artificial Sequence
  Synthetic oligonucleotide; AGG chr2 60546923 60546942 60546926 -
attatttagatccgtttcat

SEQ ID NO: 172266 - DNA, 20 bp, Artificial Sequence
  Synthetic oligonucleotide; CAG chr2 60546914 60546933 60546917 -
atccgtttcataggtgcatg

SEQ ID NO: 172267 - DNA, 20 bp, Artificial Sequence
  Synthetic oligonucleotide; CAG chr2 60546897 60546916 60546900 -
atgcagtcgttttcttatta

SEQ ID NO: 172268 - DNA, 20 bp, Artificial Sequence
  Synthetic oligonucleotide; CAG chr2 60546894 60546913 60546897 -
cagtcgttttcttattacag

SEQ ID NO: 172269 - DNA, 20 bp, Artificial Sequence
  Synthetic oligonucleotide; TGG chr2 60546883 60546902 60546886 -
ttattacagcagtgtaaatg

SEQ ID NO: 172270 - DNA, 20 bp, Artificial Sequence
  Synthetic oligonucleotide; TAG chr2 60546862 60546881 60546865 -
ggcacatttttcatgtgaca

SEQ ID NO: 172271 - DNA, 20 bp, Artificial Sequence
  Synthetic oligonucleotide; TAG chr2 60546859 60546878 60546862 -
acatttttcatgtgacatag

SEQ ID NO: 172272 - DNA, 20 bp, Artificial Sequence
  Synthetic oligonucleotide; AAG chr2 60546842 60546861 60546845 -
tagtagctttctaatttatg

SEQ ID NO: 172273 - DNA, 20 bp, Artificial Sequence
  Synthetic oligonucleotide; TAG chr2 60546824 60546843 60546827 -
tgaagccatgtctgtttact

SEQ ID NO: 172274 - DNA, 20 bp, Artificial Sequence
  Synthetic oligonucleotide; AGG chr2 60546823 60546842 60546826 -
gaagccatgtctgtttactt

SEQ ID NO: 172275 - DNA, 20 bp, Artificial Sequence
  Synthetic oligonucleotide; GAG chr2 60546821 60546840 60546824 -
agccatgtctgtttacttag

SEQ ID NO: 172276 - DNA, 20 bp, Artificial Sequence
  Synthetic oligonucleotide; AAG chr2 60546800 60546819 60546803 -
agtatatacattcacacaca

SEQ ID NO: 172277 - DNA, 20 bp, Artificial Sequence
  Synthetic oligonucleotide; AGG chr2 60546799 60546818 60546802 -
gtatatacattcacacacaa

SEQ ID NO: 172278 - DNA, 20 bp, Artificial Sequence
  Synthetic oligonucleotide; GGG chr2 60546798 60546817 60546801 -
tatatacattcacacacaaa

SEQ ID NO: 172279 - DNA, 20 bp, Artificial Sequence
  Synthetic oligonucleotide; TGG chr2 60546762 60546781 60546765 -
tcacctctcctttcattctt

SEQ ID NO: 172280 - DNA, 20 bp, Artificial Sequence
  Synthetic oligonucleotide; TGG chr2 60546754 60546773 60546757 -
cctttcattctttggcacaa

SEQ ID NO: 172281 - DNA, 20 bp, Artificial Sequence
  Synthetic oligonucleotide; TGG chr2 60546745 60546764 60546748 -
ctttggcacaatggacaact

SEQ ID NO: 172282 - DNA, 20 bp, Artificial Sequence
  Synthetic oligonucleotide; TAG chr2 60546738 60546757 60546741 -
acaatggacaacttggtgta

SEQ ID NO: 172283 - DNA, 20 bp, Artificial Sequence
  Synthetic oligonucleotide; AGG chr2 60546737 60546756 60546740 -
caatggacaacttggtgtat

SEQ ID NO: 172284 - DNA, 20 bp, Artificial Sequence
  Synthetic oligonucleotide; AAG chr2 60546730 60546749 60546733 -
caacttggtgtataggaaaa

SEQ ID NO: 172285 - DNA, 20 bp, Artificial Sequence
  Synthetic oligonucleotide; TGG chr2 60546718 60546737 60546721 -
taggaaaaaagaaacaaatt

SEQ ID NO: 172286 - DNA, 20 bp, Artificial Sequence
  Synthetic oligonucleotide; CAG chr2 60546691 60546710 60546694 -
tatccacttttttttttaac

SEQ ID NO: 172287 - DNA, 20 bp, Artificial Sequence
  Synthetic oligonucleotide; TAG chr2 60546679 60546698 60546682 -
tttttaaccagtttttcttg

SEQ ID NO: 172288 - DNA, 20 bp, Artificial Sequence
  Synthetic oligonucleotide; AAG chr2 60546667 60546686 60546670 -
ttttcttgtagttattattt

SEQ ID NO: 172289 - DNA, 20 bp, Artificial Sequence
  Synthetic oligonucleotide; AAG chr2 60546634 60546653 60546637 -
gttccctgtgttaactattt

SEQ ID NO: 172290 - DNA, 20 bp, Artificial Sequence
  Synthetic oligonucleotide; TAG chr2 60546631 60546650 60546634 -
ccctgtgttaactatttaag

SEQ ID NO: 172291 - DNA, 20 bp, Artificial Sequence
  Synthetic oligonucleotide; CAG chr2 60546606 60546625 60546609 -
ttctttctaaacttacaaac

SEQ ID NO: 172292 - DNA, 20 bp, Artificial Sequence
  Synthetic oligonucleotide; TGG chr2 60546588 60546607 60546591 -
accagacacatttgttgctg

SEQ ID NO: 172293 - DNA, 20 bp, Artificial Sequence
  Synthetic oligonucleotide; GGG chr2 60546587 60546606 60546590 -
ccagacacatttgttgctgt

SEQ ID NO: 172294 - DNA, 20 bp, Artificial Sequence
  Synthetic oligonucleotide; TGG chr2 60546576 60546595 60546579 -
tgttgctgtgggtgtgtgca

SEQ ID NO: 172295 - DNA, 20 bp, Artificial Sequence
  Synthetic oligonucleotide; GGG chr2 60546575 60546594 60546578 -
gttgctgtgggtgtgtgcat

SEQ ID NO: 172296 - DNA, 20 bp, Artificial Sequence
  Synthetic oligonucleotide; TGG chr2 60546549 60546568 60546552 -
atgtgtgtgtgtgtgttctc

SEQ ID NO: 172297 - DNA, 20 bp, Artificial Sequence
  Synthetic oligonucleotide; GAG chr2 60546547 60546566 60546550 -
gtgtgtgtgtgtgttctctg

SEQ ID NO: 172298 - DNA, 20 bp, Artificial Sequence
  Synthetic oligonucleotide; AAG chr2 60546538 60546557 60546541 -
tgtgttctctggagttatgc

SEQ ID NO: 172299 - DNA, 20 bp, Artificial Sequence
  Synthetic oligonucleotide; AGG chr2 60546537 60546556 60546540 -
gtgttctctggagttatgca

SEQ ID NO: 172300 - DNA, 20 bp, Artificial Sequence
  Synthetic oligonucleotide; AAG chr2 60546534 60546553 60546537 -
ttctctggagttatgcaagg

SEQ ID NO: 172301 - DNA, 20 bp, Artificial Sequence
  Synthetic oligonucleotide; TGG chr2 60546480 60546499 60546483 -
tcattgacaaatttgctctc

SEQ ID NO: 172302 - DNA, 20 bp, Artificial Sequence
  Synthetic oligonucleotide; TGG chr2 60546432 60546451 60546435 -
ttttgtatgctcacattttc

SEQ ID NO: 172303 - DNA, 20 bp, Artificial Sequence
  Synthetic oligonucleotide; GGG chr2 60546431 60546450 60546434 -
tttgtatgctcacattttct

SEQ ID NO: 172304 - DNA, 20 bp, Artificial Sequence
  Synthetic oligonucleotide; TAG chr2 60546421 60546440 60546424 -
cacattttctgggtattata

SEQ ID NO: 172305 - DNA, 20 bp, Artificial Sequence
  Synthetic oligonucleotide; GAG chr2 60546419 60546438 60546422 -
cattttctgggtattatata

SEQ ID NO: 172306 - DNA, 20 bp, Artificial Sequence
  Synthetic oligonucleotide; AAG chr2 60546416 60546435 60546419 -
tttctgggtattatatagag

SEQ ID NO: 172307 - DNA, 20 bp, Artificial Sequence
  Synthetic oligonucleotide; TAG chr2 60546411 60546430 60546414 -
gggtattatatagagaagcc

SEQ ID NO: 172308 - DNA, 20 bp, Artificial Sequence
  Synthetic oligonucleotide; TGG chr2 60546391 60546410 60546394 -
tagaaacactttacatgatg

SEQ ID NO: 172309 - DNA, 20 bp, Artificial Sequence
  Synthetic oligonucleotide; TGG chr2 60546388 60546407 60546391 -
aaacactttacatgatgtgg

SEQ ID NO: 172310 - DNA, 20 bp, Artificial Sequence
  Synthetic oligonucleotide; GGG chr2 60546387 60546406 60546390 -
aacactttacatgatgtggt

SEQ ID NO: 172311 - DNA, 20 bp, Artificial Sequence
  Synthetic oligonucleotide; TGG chr2 60546383 60546402 60546386 -
ctttacatgatgtggtggga

SEQ ID NO: 172312 - DNA, 20 bp, Artificial Sequence
  Synthetic oligonucleotide; TGG chr2 60546378 60546397 60546381 -
catgatgtggtgggatggca

SEQ ID NO: 172313 - DNA, 20 bp, Artificial Sequence
  Synthetic oligonucleotide; GGG chr2 60546377 60546396 60546380 -
atgatgtggtgggatggcat

SEQ ID NO: 172314 - DNA, 20 bp, Artificial Sequence
  Synthetic oligonucleotide; GGG chr2 60546376 60546395 60546379 -
tgatgtggtgggatggcatg

SEQ ID NO: 172315 - DNA, 20 bp, Artificial Sequence
  Synthetic oligonucleotide; GAG chr2 60546371 60546390 60546374 -
tggtgggatggcatggggtt

SEQ ID NO: 172316 - DNA, 20 bp, Artificial Sequence
  Synthetic oligonucleotide; TGG chr2 60546341 60546360 60546344 -
tctcccctttctgtcctctc

SEQ ID NO: 172317 - DNA, 20 bp, Artificial Sequence
  Synthetic oligonucleotide; CAG chr2 60546304 60546323 60546307 -
tgcttttgtttctccaacca

SEQ ID NO: 172318 - DNA, 20 bp, Artificial Sequence
  Synthetic oligonucleotide; GAG chr2 60546299 60546318 60546302 -
ttgtttctccaaccacagcc

SEQ ID NO: 172319 - DNA, 20 bp, Artificial Sequence
  Synthetic oligonucleotide; AAG chr2 60546289 60546308 60546292 -
aaccacagccgagcctcttg

SEQ ID NO: 172320 - DNA, 20 bp, Artificial Sequence
  Synthetic oligonucleotide; CAG chr2 60546277 60546296 60546280 -
gcctcttgaagccattctta

SEQ ID NO: 172321 - DNA, 20 bp, Artificial Sequence
  Synthetic oligonucleotide; CAG chr2 60546265 60546284 60546268 -
cattcttacagatgatgaac

SEQ ID NO: 172322 - DNA, 20 bp, Artificial Sequence
  Synthetic oligonucleotide; CGG chr2 60546258 60546277 60546261 -
acagatgatgaaccagacca

SEQ ID NO: 172323 - DNA, 20 bp, Artificial Sequence
  Synthetic oligonucleotide; TGG chr2 60546250 60546269 60546253 -
tgaaccagaccacggcccgt

SEQ ID NO: 172324 - DNA, 20 bp, Artificial Sequence
  Synthetic oligonucleotide; GGG chr2 60546249 60546268 60546252 -
gaaccagaccacggcccgtt

SEQ ID NO: 172325 - DNA, 20 bp, Artificial Sequence
  Synthetic oligonucleotide; GAG chr2 60546247 60546266 60546250 -
accagaccacggcccgttgg

SEQ ID NO: 172326 - DNA, 20 bp, Artificial Sequence
  Synthetic oligonucleotide; CAG chr2 60546241 60546260 60546244 -
ccacggcccgttgggagctc

SEQ ID NO: 172327 - DNA, 20 bp, Artificial Sequence
  Synthetic oligonucleotide; AAG chr2 60546238 60546257 60546241 -
cggcccgttgggagctccag

SEQ ID NO: 172328 - DNA, 20 bp, Artificial Sequence
  Synthetic oligonucleotide; AGG chr2 60546237 60546256 60546240 -
ggcccgttgggagctccaga

SEQ ID NO: 172329 - DNA, 20 bp, Artificial Sequence
  Synthetic oligonucleotide; GGG chr2 60546236 60546255 60546239 -
gcccgttgggagctccagaa

SEQ ID NO: 172330 - DNA, 20 bp, Artificial Sequence
  Synthetic oligonucleotide; GGG chr2 60546235 60546254 60546238 -
cccgttgggagctccagaag

SEQ ID NO: 172331 - DNA, 20 bp, Artificial Sequence
  Synthetic oligonucleotide; TGG chr2 60546213 60546232 60546216 -
gatcatgacctcctcacctg

SEQ ID NO: 172332 - DNA, 20 bp, Artificial Sequence
  Synthetic oligonucleotide; GGG chr2 60546212 60546231 60546215 -
atcatgacctcctcacctgt

SEQ ID NO: 172333 - DNA, 20 bp, Artificial Sequence
  Synthetic oligonucleotide; CAG chr2 60546209 60546228 60546212 -
atgacctcctcacctgtggg

SEQ ID NO: 172334 - DNA, 20 bp, Artificial Sequence
  Synthetic oligonucleotide; CAG chr2 60546203 60546222 60546206 -
tcctcacctgtgggcagtgc

SEQ ID NO: 172335 - DNA, 20 bp, Artificial Sequence
  Synthetic oligonucleotide; TGG chr2 60546187 60546206 60546190 -
gtgccagatgaacttcccat

SEQ ID NO: 172336 - DNA, 20 bp, Artificial Sequence
  Synthetic oligonucleotide; GGG chr2 60546186 60546205 60546189 -
tgccagatgaacttcccatt

SEQ ID NO: 172337 - DNA, 20 bp, Artificial Sequence
  Synthetic oligonucleotide; GGG chr2 60546185 60546204 60546188 -
gccagatgaacttcccattg

SEQ ID NO: 172338 - DNA, 20 bp, Artificial Sequence
  Synthetic oligonucleotide; GGG chr2 60546184 60546203 60546187 -
ccagatgaacttcccattgg

SEQ ID NO: 172339 - DNA, 20 bp, Artificial Sequence
  Synthetic oligonucleotide; GAG chr2 60546164 60546183 60546167 -
gggacattcttatttttatc

SEQ ID NO: 172340 - DNA, 20 bp, Artificial Sequence
  Synthetic oligonucleotide; CGG chr2 60546155 60546174 60546158 -
ttatttttatcgagcacaaa

SEQ ID NO: 172341 - DNA, 20 bp, Artificial Sequence
  Synthetic oligonucleotide; TGG chr2 60546141 60546160 60546144 -
cacaaacggaaacaatgcaa

SEQ ID NO: 172342 - DNA, 20 bp, Artificial Sequence
  Synthetic oligonucleotide; CAG chr2 60546138 60546157 60546141 -
aaacggaaacaatgcaatgg

SEQ ID NO: 172343 - DNA, 20 bp, Artificial Sequence
  Synthetic oligonucleotide; TAG chr2 60546127 60546146 60546130 -
atgcaatggcagcctctgct

SEQ ID NO: 172344 - DNA, 20 bp, Artificial Sequence
  Synthetic oligonucleotide; AAG chr2 60546121 60546140 60546124 -
tggcagcctctgcttagaaa

SEQ ID NO: 172345 - DNA, 20 bp, Artificial Sequence
  Synthetic oligonucleotide; TGG chr2 60546115 60546134 60546118 -
cctctgcttagaaaaagctg

SEQ ID NO: 172346 - DNA, 20 bp, Artificial Sequence
  Synthetic oligonucleotide; AAG chr2 60546110 60546129 60546113 -
gcttagaaaaagctgtggat

SEQ ID NO: 172347 - DNA, 20 bp, Artificial Sequence
  Synthetic oligonucleotide; GAG chr2 60546086 60546105 60546089 -
caccttccccttcaccaatc

SEQ ID NO: 172348 - DNA, 20 bp, Artificial Sequence
  Synthetic oligonucleotide; AAG chr2 60546076 60546095 60546079 -
ttcaccaatcgagatgaaaa

SEQ ID NO: 172349 - DNA, 20 bp, Artificial Sequence
  Synthetic oligonucleotide; TGG chr2 60546061 60546080 60546064 -
gaaaaaagcatccaatcccg

SEQ ID NO: 172350 - DNA, 20 bp, Artificial Sequence
  Synthetic oligonucleotide; GAG chr2 60546059 60546078 60546062 -
aaaaagcatccaatcccgtg

SEQ ID NO: 172351 - DNA, 20 bp, Artificial Sequence
  Synthetic oligonucleotide; AGG chr2 60546058 60546077 60546061 -
aaaagcatccaatcccgtgg

SEQ ID NO: 172352 - DNA, 20 bp, Artificial Sequence
  Synthetic oligonucleotide; TGG chr2 60546054 60546073 60546057 -
gcatccaatcccgtggaggt

SEQ ID NO: 172353 - DNA, 20 bp, Artificial Sequence
  Synthetic oligonucleotide; CAG chr2 60546047 60546066 60546050 -
atcccgtggaggttggcatc

SEQ ID NO: 172354 - DNA, 20 bp, Artificial Sequence
  Synthetic oligonucleotide; AGG chr2 60546046 60546065 60546049 -
tcccgtggaggttggcatcc

SEQ ID NO: 172355 - DNA, 20 bp, Artificial Sequence
  Synthetic oligonucleotide; CAG chr2 60546037 60546056 60546040 -
ggttggcatccaggtcacgc

SEQ ID NO: 172356 - DNA, 20 bp, Artificial Sequence
  Synthetic oligonucleotide; GAG chr2 60546035 60546054 60546038 -
ttggcatccaggtcacgcca

SEQ ID NO: 172357 - DNA, 20 bp, Artificial Sequence
  Synthetic oligonucleotide; AGG chr2 60546034 60546053 60546037 -
tggcatccaggtcacgccag

SEQ ID NO: 172358 - DNA, 20 bp, Artificial Sequence
  Synthetic oligonucleotide; TAG chr2 60546006 60546025 60546009 -
gattgtttatcaacgtcatc

SEQ ID NO: 172359 - DNA, 20 bp, Artificial Sequence
  Synthetic oligonucleotide; GAG chr2 60546004 60546023 60546007 -
ttgtttatcaacgtcatcta

SEQ ID NO: 172360 - DNA, 20 bp, Artificial Sequence
  Synthetic oligonucleotide; AGG chr2 60546003 60546022 60546006 -
tgtttatcaacgtcatctag

SEQ ID NO: 172361 - DNA, 20 bp, Artificial Sequence
  Synthetic oligonucleotide; CAG chr2 60545987 60546006 60545990 -
ctagaggaatttgccccaaa

SEQ ID NO: 172362 - DNA, 20 bp, Artificial Sequence
  Synthetic oligonucleotide; AGG chr2 60545986 60546005 60545989 -
tagaggaatttgccccaaac

SEQ ID NO: 172363 - DNA, 20 bp, Artificial Sequence
  Synthetic oligonucleotide; TAG chr2 60545977 60545996 60545980 -
ttgccccaaacaggaacaca

SEQ ID NO: 172364 - DNA, 20 bp, Artificial Sequence
  Synthetic oligonucleotide; CAG chr2 60545974 60545993 60545977 -
ccccaaacaggaacacatag

SEQ ID NO: 172365 - DNA, 20 bp, Artificial Sequence
  Synthetic oligonucleotide; AGG chr2 60545973 60545992 60545976 -
cccaaacaggaacacatagc

SEQ ID NO: 172366 - DNA, 20 bp, Artificial Sequence
  Synthetic oligonucleotide; GAG chr2 60545965 60545984 60545968 -
ggaacacatagcaggtaaat

SEQ ID NO: 172367 - DNA, 20 bp, Artificial Sequence
  Synthetic oligonucleotide; AAG chr2 60545962 60545981 60545965 -
acacatagcaggtaaatgag

SEQ ID NO: 172368 - DNA, 20 bp, Artificial Sequence
  Synthetic oligonucleotide; AAG chr2 60545958 60545977 60545961 -
atagcaggtaaatgagaagc

SEQ ID NO: 172369 - DNA, 20 bp, Artificial Sequence
  Synthetic oligonucleotide; AGG chr2 60545957 60545976 60545960 -
tagcaggtaaatgagaagca

SEQ ID NO: 172370 - DNA, 20 bp, Artificial Sequence
  Synthetic oligonucleotide; GAG chr2 60545955 60545974 60545958 -
gcaggtaaatgagaagcaag

SEQ ID NO: 172371 - DNA, 20 bp, Artificial Sequence
  Synthetic oligonucleotide; AAG chr2 60545950 60545969 60545953 -
taaatgagaagcaaggagaa

SEQ ID NO: 172372 - DNA, 20 bp, Artificial Sequence
  Synthetic oligonucleotide; CAG chr2 60545921 60545940 60545924 -
gcatgttttcttttcatttt

SEQ ID NO: 172373 - DNA, 20 bp, Artificial Sequence
  Synthetic oligonucleotide; GAG chr2 60545919 60545938 60545922 -
atgttttcttttcattttca

SEQ ID NO: 172374 - DNA, 20 bp, Artificial Sequence
  Synthetic oligonucleotide; AGG chr2 60545918 60545937 60545921 -
tgttttcttttcattttcag

SEQ ID NO: 172375 - DNA, 20 bp, Artificial Sequence
  Synthetic oligonucleotide; TAG chr2 60545910 60545929 60545913 -
tttcattttcagaggtgctg

SEQ ID NO: 172376 - DNA, 20 bp, Artificial Sequence
  Synthetic oligonucleotide; AAG chr2 60545905 60545924 60545908 -
ttttcagaggtgctgtagcc

SEQ ID NO: 172377 - DNA, 20 bp, Artificial Sequence
  Synthetic oligonucleotide; CAG chr2 60545902 60545921 60545905 -
tcagaggtgctgtagccaag

SEQ ID NO: 172378 - DNA, 20 bp, Artificial Sequence
  Synthetic oligonucleotide; AAG chr2 60545898 60545917 60545901 -
aggtgctgtagccaagcagt

SEQ ID NO: 172379 - DNA, 20 bp, Artificial Sequence
  Synthetic oligonucleotide; AGG chr2 60545897 60545916 60545900 -
ggtgctgtagccaagcagta

SEQ ID NO: 172380 - DNA, 20 bp, Artificial Sequence
  Synthetic oligonucleotide; GAG chr2 60545895 60545914 60545898 -
tgctgtagccaagcagtaag

SEQ ID NO: 172381 - DNA, 20 bp, Artificial Sequence
  Synthetic oligonucleotide; AAG chr2 60545887 60545906 60545890 -
ccaagcagtaaggagttgtg

SEQ ID NO: 172382 - DNA, 20 bp, Artificial Sequence
  Synthetic oligonucleotide; CAG chr2 60545850 60545869 60545853 -
ctctatgtgactgtccatga

SEQ ID NO: 172383 - DNA, 20 bp, Artificial Sequence
  Synthetic oligonucleotide; CAG chr2 60545808 60545827 60545811 -
tcatttctgttgcttacgtc

SEQ ID NO: 172384 - DNA, 20 bp, Artificial Sequence
  Synthetic oligonucleotide; CAG chr2 60545801 60545820 60545804 -
tgttgcttacgtccagaaca

SEQ ID NO: 172385 - DNA, 20 bp, Artificial Sequence
  Synthetic oligonucleotide; CAG chr2 60545769 60545788 60545772 -
tattttccacctcactgaat

SEQ ID NO: 172386 - DNA, 20 bp, Artificial Sequence
  Synthetic oligonucleotide; TAG chr2 60545763 60545782 60545766 -
ccacctcactgaatcagatg

SEQ ID NO: 172387 - DNA, 20 bp, Artificial Sequence
  Synthetic oligonucleotide; AGG chr2 60545762 60545781 60545765 -
cacctcactgaatcagatgt

SEQ ID NO: 172388 - DNA, 20 bp, Artificial Sequence
  Synthetic oligonucleotide; CAG chr2 60545759 60545778 60545762 -
ctcactgaatcagatgtagg

SEQ ID NO: 172389 - DNA, 20 bp, Artificial Sequence
  Synthetic oligonucleotide; AGG chr2 60545758 60545777 60545761 -
tcactgaatcagatgtaggc

SEQ ID NO: 172390 - DNA, 20 bp, Artificial Sequence
  Synthetic oligonucleotide; TAG chr2 60545754 60545773 60545757 -
tgaatcagatgtaggcagga

SEQ ID NO: 172391 - DNA, 20 bp, Artificial Sequence
  Synthetic oligonucleotide; AGG chr2 60545753 60545772 60545756 -
gaatcagatgtaggcaggat

SEQ ID NO: 172392 - DNA, 20 bp, Artificial Sequence
  Synthetic oligonucleotide; CAG chr2 60545741 60545760 60545744 -
ggcaggataggtacacacat

SEQ ID NO: 172393 - DNA, 20 bp, Artificial Sequence
  Synthetic oligonucleotide; TGG chr2 60545726 60545745 60545729 -
cacatcagacaccttctctc

SEQ ID NO: 172394 - DNA, 20 bp, Artificial Sequence
  Synthetic oligonucleotide; TGG chr2 60545711 60545730 60545714 -
ctctctggatctgtcgattt

SEQ ID NO: 172395 - DNA, 20 bp, Artificial Sequence
  Synthetic oligonucleotide; AAG chr2 60545672 60545691 60545675 -
atccccaccttctcattttg

SEQ ID NO: 172396 - DNA, 20 bp, Artificial Sequence
  Synthetic oligonucleotide; GAG chr2 60545665 60545684 60545668 -
ccttctcattttgaagtatt

SEQ ID NO: 172397 - DNA, 20 bp, Artificial Sequence
  Synthetic oligonucleotide; TAG chr2 60545650 60545669 60545653 -
gtattgagctttactacacc

SEQ ID NO: 172398 - DNA, 20 bp, Artificial Sequence
  Synthetic oligonucleotide; CAG chr2 60545645 60545664 60545648 -
gagctttactacacctagtc

SEQ ID NO: 172399 - DNA, 20 bp, Artificial Sequence
  Synthetic oligonucleotide; CAG chr2 60545625 60545644 60545628 -
cagcttccattgtccatttc

SEQ ID NO: 172400 - DNA, 20 bp, Artificial Sequence
  Synthetic oligonucleotide; TGG chr2 60545619 60545638 60545622 -
ccattgtccatttccagcct

SEQ ID NO: 172401 - DNA, 20 bp, Artificial Sequence
  Synthetic oligonucleotide; CAG chr2 60545608 60545627 60545611 -
ttccagccttggtgacgtgt

SEQ ID NO: 172402 - DNA, 20 bp, Artificial Sequence
  Synthetic oligonucleotide; GAG chr2 60545606 60545625 60545609 -
ccagccttggtgacgtgtca

SEQ ID NO: 172403 - DNA, 20 bp, Artificial Sequence
  Synthetic oligonucleotide; AGG chr2 60545605 60545624 60545608 -
cagccttggtgacgtgtcag

SEQ ID NO: 172404 - DNA, 20 bp, Artificial Sequence
  Synthetic oligonucleotide; AAG chr2 60545600 60545619 60545603 -
ttggtgacgtgtcagaggca

SEQ ID NO: 172405 - DNA, 20 bp, Artificial Sequence
  Synthetic oligonucleotide; TGG chr2 60545597 60545616 60545600 -
gtgacgtgtcagaggcaaag

SEQ ID NO: 172406 - DNA, 20 bp, Artificial Sequence
  Synthetic oligonucleotide; TAG chr2 60545589 60545608 60545592 -
tcagaggcaaagtggccata

SEQ ID NO: 172407 - DNA, 20 bp, Artificial Sequence
  Synthetic oligonucleotide; AGG chr2 60545588 60545607 60545591 -
cagaggcaaagtggccatat

SEQ ID NO: 172408 - DNA, 20 bp, Artificial Sequence
  Synthetic oligonucleotide; CAG chr2 60545579 60545598 60545582 -
agtggccatataggcatttg

SEQ ID NO: 172409 - DNA, 20 bp, Artificial Sequence
  Synthetic oligonucleotide; CAG chr2 60545574 60545593 60545577 -
ccatataggcatttgcagtt

SEQ ID NO: 172410 - DNA, 20 bp, Artificial Sequence
  Synthetic oligonucleotide; CAG chr2 60545553 60545572 60545556 -
agccaatgacttgtttgact

SEQ ID NO: 172411 - DNA, 20 bp, Artificial Sequence
  Synthetic oligonucleotide; TGG chr2 60545544 60545563 60545547 -
cttgtttgactcagaacatc

SEQ ID NO: 172412 - DNA, 20 bp, Artificial Sequence
  Synthetic oligonucleotide; CAG chr2 60545540 60545559 60545543 -
tttgactcagaacatctggc

SEQ ID NO: 172413 - DNA, 20 bp, Artificial Sequence
  Synthetic oligonucleotide; AGG chr2 60545539 60545558 60545542 -
ttgactcagaacatctggcc

SEQ ID NO: 172414 - DNA, 20 bp, Artificial Sequence
  Synthetic oligonucleotide; TAG chr2 60545530 60545549 60545533 -
aacatctggccaggcctcct

SEQ ID NO: 172415 - DNA, 20 bp, Artificial Sequence
  Synthetic oligonucleotide; AGG chr2 60545529 60545548 60545532 -
acatctggccaggcctcctt

SEQ ID NO: 172416 - DNA, 20 bp, Artificial Sequence
  Synthetic oligonucleotide; GGG chr2 60545528 60545547 60545531 -
catctggccaggcctcctta

SEQ ID NO: 172417 - DNA, 20 bp, Artificial Sequence
  Synthetic oligonucleotide; GGG chr2 60545527 60545546 60545530 -
atctggccaggcctccttag

SEQ ID NO: 172418 - DNA, 20 bp, Artificial Sequence
  Synthetic oligonucleotide; CAG chr2 60545522 60545541 60545525 -
gccaggcctccttaggggtt

SEQ ID NO: 172419 - DNA, 20 bp, Artificial Sequence
  Synthetic oligonucleotide; AAG chr2 60545510 60545529 60545513 -
taggggttcagctcgttctc

SEQ ID NO: 172420 - DNA, 20 bp, Artificial Sequence
  Synthetic oligonucleotide; AGG chr2 60545509 60545528 60545512 -
aggggttcagctcgttctca

SEQ ID NO: 172421 - DNA, 20 bp, Artificial Sequence
  Synthetic oligonucleotide; AAG chr2 60545498 60545517 60545501 -
tcgttctcaaggcttccctg

SEQ ID NO: 172422 - DNA, 20 bp, Artificial Sequence
  Synthetic oligonucleotide; TAG chr2 60545495 60545514 60545498 -
ttctcaaggcttccctgaag

SEQ ID NO: 172423 - DNA, 20 bp, Artificial Sequence
  Synthetic oligonucleotide; GAG chr2 60545493 60545512 60545496 -
ctcaaggcttccctgaagta

SEQ ID NO: 172424 - DNA, 20 bp, Artificial Sequence
  Synthetic oligonucleotide; TGG chr2 60545490 60545509 60545493 -
aaggcttccctgaagtagag

SEQ ID NO: 172425 - DNA, 20 bp, Artificial Sequence
  Synthetic oligonucleotide; GGG chr2 60545489 60545508 60545492 -
aggcttccctgaagtagagt

SEQ ID NO: 172426 - DNA, 20 bp, Artificial Sequence
  Synthetic oligonucleotide; TGG chr2 60545485 60545504 60545488 -
ttccctgaagtagagtgggc

SEQ ID NO: 172427 - DNA, 20 bp, Artificial Sequence
  Synthetic oligonucleotide; CAG chr2 60545482 60545501 60545485 -
cctgaagtagagtgggctgg

SEQ ID NO: 172428 - DNA, 20 bp, Artificial Sequence
  Synthetic oligonucleotide; AGG chr2 60545481 60545500 60545484 -
ctgaagtagagtgggctggc

SEQ ID NO: 172429 - DNA, 20 bp, Artificial Sequence
  Synthetic oligonucleotide; GGG chr2 60545480 60545499 60545483 -
tgaagtagagtgggctggca

SEQ ID NO: 172430 - DNA, 20 bp, Artificial Sequence
  Synthetic oligonucleotide; TAG chr2 60545477 60545496 60545480 -
agtagagtgggctggcaggg

SEQ ID NO: 172431 - DNA, 20 bp, Artificial Sequence
  Synthetic oligonucleotide; TGG chr2 60545473 60545492 60545476 -
gagtgggctggcagggtagt

SEQ ID NO: 172432 - DNA, 20 bp, Artificial Sequence
  Synthetic oligonucleotide; GAG chr2 60545471 60545490 60545474 -
gtgggctggcagggtagttg

SEQ ID NO: 172433 - DNA, 20 bp, Artificial Sequence
  Synthetic oligonucleotide; AGG chr2 60545470 60545489 60545473 -
tgggctggcagggtagttgg

SEQ ID NO: 172434 - DNA, 20 bp, Artificial Sequence
  Synthetic oligonucleotide; TGG chr2 60545467 60545486 60545470 -
gctggcagggtagttggagg

SEQ ID NO: 172435 - DNA, 20 bp, Artificial Sequence
  Synthetic oligonucleotide; TGG chr2 60545464 60545483 60545467 -
ggcagggtagttggaggtgg

SEQ ID NO: 172436 - DNA, 20 bp, Artificial Sequence
  Synthetic oligonucleotide; AAG chr2 60545460 60545479 60545463 -
gggtagttggaggtggtgga

SEQ ID NO: 172437 - DNA, 20 bp, Artificial Sequence
  Synthetic oligonucleotide; GAG chr2 60545458 60545477 60545461 -
gtagttggaggtggtggaaa

SEQ ID NO: 172438 - DNA, 20 bp, Artificial Sequence
  Synthetic oligonucleotide; GAG chr2 60545449 60545468 60545452 -
ggtggtggaaagagttaact

SEQ ID NO: 172439 - DNA, 20 bp, Artificial Sequence
  Synthetic oligonucleotide; CAG chr2 60545443 60545462 60545446 -
ggaaagagttaactgagctt

SEQ ID NO: 172440 - DNA, 20 bp, Artificial Sequence
  Synthetic oligonucleotide; AGG chr2 60545442 60545461 60545445 -
gaaagagttaactgagcttc

SEQ ID NO: 172441 - DNA, 20 bp, Artificial Sequence
  Synthetic oligonucleotide; GGG chr2 60545441 60545460 60545444 -
aaagagttaactgagcttca

SEQ ID NO: 172442 - DNA, 20 bp, Artificial Sequence
  Synthetic oligonucleotide; TAG chr2 60545437 60545456 60545440 -
agttaactgagcttcagggc

SEQ ID NO: 172443 - DNA, 20 bp, Artificial Sequence
  Synthetic oligonucleotide; TGG chr2 60545431 60545450 60545434 -
ctgagcttcagggctagcct

SEQ ID NO: 172444 - DNA, 20 bp, Artificial Sequence
  Synthetic oligonucleotide; TGG chr2 60545420 60545439 60545423 -
ggctagccttggatccatat

SEQ ID NO: 172445 - DNA, 20 bp, Artificial Sequence
  Synthetic oligonucleotide; CAG chr2 60545413 60545432 60545416 -
cttggatccatattggctgt

SEQ ID NO: 172446 - DNA, 20 bp, Artificial Sequence
  Synthetic oligonucleotide; CGG chr2 60545408 60545427 60545411 -
atccatattggctgtcagcc

SEQ ID NO: 172447 - DNA, 20 bp, Artificial Sequence
  Synthetic oligonucleotide; TGG chr2 60545404 60545423 60545407 -
atattggctgtcagcccgga

SEQ ID NO: 172448 - DNA, 20 bp, Artificial Sequence
  Synthetic oligonucleotide; GGG chr2 60545403 60545422 60545406 -
tattggctgtcagcccggat

SEQ ID NO: 172449 - DNA, 20 bp, Artificial Sequence
  Synthetic oligonucleotide; GGG chr2 60545402 60545421 60545405 -
attggctgtcagcccggatg

SEQ ID NO: 172450 - DNA, 20 bp, Artificial Sequence
  Synthetic oligonucleotide; CAG chr2 60545386 60545405 60545389 -
gatggggctgtaattaaaca

SEQ ID NO: 172451 - DNA, 20 bp, Artificial Sequence
  Synthetic oligonucleotide; TGG chr2 60545378 60545397 60545381 -
tgtaattaaacacagccccg

SEQ ID NO: 172452 - DNA, 20 bp, Artificial Sequence
  Synthetic oligonucleotide; TGG chr2 60545375 60545394 60545378 -
aattaaacacagccccgtgg

SEQ ID NO: 172453 - DNA, 20 bp, Artificial Sequence
  Synthetic oligonucleotide; GGG chr2 60545374 60545393 60545377 -
attaaacacagccccgtggt

SEQ ID NO: 172454 - DNA, 20 bp, Artificial Sequence
  Synthetic oligonucleotide; AAG chr2 60545349 60545368 60545352 -
gacaccatgaccttgacttt

SEQ ID NO: 172455 - DNA, 20 bp, Artificial Sequence
  Synthetic oligonucleotide; TGG chr2 60545332 60545351 60545335 -
tttaagatgccattttcgac

SEQ ID NO: 172456 - DNA, 20 bp, Artificial Sequence
  Synthetic oligonucleotide; CAG chr2 60545328 60545347 60545331 -
agatgccattttcgactggc

SEQ ID NO: 172457 - DNA, 20 bp, Artificial Sequence
  Synthetic oligonucleotide; AGG chr2 60545327 60545346 60545330 -
gatgccattttcgactggcc

SEQ ID NO: 172458 - DNA, 20 bp, Artificial Sequence
  Synthetic oligonucleotide; CAG chr2 60545323 60545342 60545326 -
ccattttcgactggccaggc

SEQ ID NO: 172459 - DNA, 20 bp, Artificial Sequence
  Synthetic oligonucleotide; GAG chr2 60545321 60545340 60545324 -
attttcgactggccaggcca

SEQ ID NO: 172460 - DNA, 20 bp, Artificial Sequence
  Synthetic oligonucleotide; TAG chr2 60545318 60545337 60545321 -
ttcgactggccaggccagag

SEQ ID NO: 172461 - DNA, 20 bp, Artificial Sequence
  Synthetic oligonucleotide; GAG chr2 60545316 60545335 60545319 -
cgactggccaggccagagta

SEQ ID NO: 172462 - DNA, 20 bp, Artificial Sequence
  Synthetic oligonucleotide; GAG chr2 60545314 60545333 60545317 -
actggccaggccagagtaga

SEQ ID NO: 172463 - DNA, 20 bp, Artificial Sequence
  Synthetic oligonucleotide; AGG chr2 60545313 60545332 60545316 -
ctggccaggccagagtagag

SEQ ID NO: 172464 - DNA, 20 bp, Artificial Sequence
  Synthetic oligonucleotide; GGG chr2 60545312 60545331 60545315 -
tggccaggccagagtagaga

SEQ ID NO: 172465 - DNA, 20 bp, Artificial Sequence
  Synthetic oligonucleotide; CAG chr2 60545309 60545328 60545312 -
ccaggccagagtagagaggg

SEQ ID NO: 172466 - DNA, 20 bp, Artificial Sequence
  Synthetic oligonucleotide; AAG chr2 60545300 60545319 60545303 -
agtagagagggcagttgctg

SEQ ID NO: 172467 - DNA, 20 bp, Artificial Sequence
  Synthetic oligonucleotide; CAG chr2 60545293 60545312 60545296 -
agggcagttgctgaagcgca

SEQ ID NO: 172468 - DNA, 20 bp, Artificial Sequence
  Synthetic oligonucleotide; AAG chr2 60545275 60545294 60545278 -
cacagacatgcttactcgaa

SEQ ID NO: 172469 - DNA, 20 bp, Artificial Sequence
  Synthetic oligonucleotide; AAG chr2 60545269 60545288 60545272 -
catgcttactcgaaaagttt

SEQ ID NO: 172470 - DNA, 20 bp, Artificial Sequence
  Synthetic oligonucleotide; AGG chr2 60545268 60545287 60545271 -
atgcttactcgaaaagttta

SEQ ID NO: 172471 - DNA, 20 bp, Artificial Sequence
  Synthetic oligonucleotide; GGG chr2 60545267 60545286 60545270 -
tgcttactcgaaaagtttaa

SEQ ID NO: 172472 - DNA, 20 bp, Artificial Sequence
  Synthetic oligonucleotide; TGG chr2 60545259 60545278 60545262 -
cgaaaagtttaagggcatgt

SEQ ID NO: 172473 - DNA, 20 bp, Artificial Sequence
  Synthetic oligonucleotide; AAG chr2 60545247 60545266 60545250 -
gggcatgttggaaatttcaa

SEQ ID NO: 172474 - DNA, 20 bp, Artificial Sequence
  Synthetic oligonucleotide; AGG chr2 60545246 60545265 60545249 -
ggcatgttggaaatttcaaa

SEQ ID NO: 172475 - DNA, 20 bp, Artificial Sequence
  Synthetic oligonucleotide; TGG chr2 60545242 60545261 60545245 -
tgttggaaatttcaaaaggt

SEQ ID NO: 172476 - DNA, 20 bp, Artificial Sequence
  Synthetic oligonucleotide; CAG chr2 60545234 60545253 60545237 -
atttcaaaaggttggtttga

SEQ ID NO: 172477 - DNA, 20 bp, Artificial Sequence
  Synthetic oligonucleotide; AGG chr2 60545233 60545252 60545236 -
tttcaaaaggttggtttgac

SEQ ID NO: 172478 - DNA, 20 bp, Artificial Sequence
  Synthetic oligonucleotide; CGG chr2 60545228 60545247 60545231 -
aaaggttggtttgacaggaa

SEQ ID NO: 172479 - DNA, 20 bp, Artificial Sequence
  Synthetic oligonucleotide; CAG chr2 60545215 60545234 60545218 -
acaggaacggctgctccctg

SEQ ID NO: 172480 - DNA, 20 bp, Artificial Sequence
  Synthetic oligonucleotide; CAG chr2 60545202 60545221 60545205 -
ctccctgcagcctgcctcct

SEQ ID NO: 172481 - DNA, 20 bp, Artificial Sequence
  Synthetic oligonucleotide; TGG chr2 60545156 60545175 60545159 -
gctctctcttgtctctgatg

SEQ ID NO: 172482 - DNA, 20 bp, Artificial Sequence
  Synthetic oligonucleotide; CAG chr2 60545147 60545166 60545150 -
tgtctctgatgtggttttga

SEQ ID NO: 172483 - DNA, 20 bp, Artificial Sequence
  Synthetic oligonucleotide; TGG chr2 60545124 60545143 60545127 -
atgtatcttgattttgtttg

SEQ ID NO: 172484 - DNA, 20 bp, Artificial Sequence
  Synthetic oligonucleotide; CAG chr2 60545115 60545134 60545118 -
gattttgtttgtggtttaca

SEQ ID NO: 172485 - DNA, 20 bp, Artificial Sequence
  Synthetic oligonucleotide; CAG chr2 60545088 60545107 60545091 -
atgtcacccttacaaatgtc

SEQ ID NO: 172486 - DNA, 20 bp, Artificial Sequence
  Synthetic oligonucleotide; CAG chr2 60545083 60545102 60545086 -
acccttacaaatgtccagtc

SEQ ID NO: 172487 - DNA, 20 bp, Artificial Sequence
  Synthetic oligonucleotide; TGG chr2 60545040 60545059 60545043 -
acacaatgtaaaaattttct

SEQ ID NO: 172488 - DNA, 20 bp, Artificial Sequence
  Synthetic oligonucleotide; CAG chr2 60545015 60545034 60545018 -
aaatacacacacgtattcaa

SEQ ID NO: 172489 - DNA, 20 bp, Artificial Sequence
  Synthetic oligonucleotide; TGG chr2 60545000 60545019 60545003 -
ttcaacagccctccctcctt

SEQ ID NO: 172490 - DNA, 20 bp, Artificial Sequence
  Synthetic oligonucleotide; TAG chr2 60544990 60545009 60544993 -
ctccctcctttggttaattt

SEQ ID NO: 172491 - DNA, 20 bp, Artificial Sequence
  Synthetic oligonucleotide; CAG chr2 60544987 60545006 60544990 -
cctcctttggttaattttag

SEQ ID NO: 172492 - DNA, 20 bp, Artificial Sequence
  Synthetic oligonucleotide; AGG chr2 60544986 60545005 60544989 -
ctcctttggttaattttagc

SEQ ID NO: 172493 - DNA, 20 bp, Artificial Sequence
  Synthetic oligonucleotide; GGG chr2 60544985 60545004 60544988 -
tcctttggttaattttagca

SEQ ID NO: 172494 - DNA, 20 bp, Artificial Sequence
  Synthetic oligonucleotide; GAG chr2 60544983 60545002 60544986 -
ctttggttaattttagcagg

SEQ ID NO: 172495 - DNA, 20 bp, Artificial Sequence
  Synthetic oligonucleotide; AGG chr2 60544982 60545001 60544985 -
tttggttaattttagcaggg

SEQ ID NO: 172496 - DNA, 20 bp, Artificial Sequence
  Synthetic oligonucleotide; CAG chr2 60544979 60544998 60544982 -
ggttaattttagcagggagg

SEQ ID NO: 172497 - DNA, 20 bp, Artificial Sequence
  Synthetic oligonucleotide; TAG chr2 60544975 60544994 60544978 -
aattttagcagggaggcagc

SEQ ID NO: 172498 - DNA, 20 bp, Artificial Sequence
  Synthetic oligonucleotide; AGG chr2 60544974 60544993 60544977 -
attttagcagggaggcagct

SEQ ID NO: 172499 - DNA, 20 bp, Artificial Sequence
  Synthetic oligonucleotide; TGG chr2 60544967 60544986 60544970 -
cagggaggcagctaggtgtg

SEQ ID NO: 172500 - DNA, 20 bp, Artificial Sequence
  Synthetic oligonucleotide; GGG chr2 60544966 60544985 60544969 -
agggaggcagctaggtgtgt

SEQ ID NO: 172501 - DNA, 20 bp, Artificial Sequence
  Synthetic oligonucleotide; CGG chr2 60544958 60544977 60544961 -
agctaggtgtgtgggtttct

SEQ ID NO: 172502 - DNA, 20 bp, Artificial Sequence
  Synthetic oligonucleotide; CAG chr2 60544955 60544974 60544958 -
taggtgtgtgggtttctcgg

SEQ ID NO: 172503 - DNA, 20 bp, Artificial Sequence
  Synthetic oligonucleotide; AAG chr2 60544949 60544968 60544952 -
tgtgggtttctcggcagctc

SEQ ID NO: 172504 - DNA, 20 bp, Artificial Sequence
  Synthetic oligonucleotide; AGG chr2 60544948 60544967 60544951 -
gtgggtttctcggcagctca

SEQ ID NO: 172505 - DNA, 20 bp, Artificial Sequence
  Synthetic oligonucleotide; GGG chr2 60544947 60544966 60544950 -
tgggtttctcggcagctcaa

SEQ ID NO: 172506 - DNA, 20 bp, Artificial Sequence
  Synthetic oligonucleotide; AAG chr2 60544942 60544961 60544945 -
ttctcggcagctcaagggaa

SEQ ID NO: 172507 - DNA, 20 bp, Artificial Sequence
  Synthetic oligonucleotide; AGG chr2 60544941 60544960 60544944 -
tctcggcagctcaagggaaa

SEQ ID NO: 172508 - DNA, 20 bp, Artificial Sequence
  Synthetic oligonucleotide; AAG chr2 60544933 60544952 60544936 -
gctcaagggaaaaggaatta

SEQ ID NO: 172509 - DNA, 20 bp, Artificial Sequence
  Synthetic oligonucleotide; AGG chr2 60544932 60544951 60544935 -
ctcaagggaaaaggaattaa

SEQ ID NO: 172510 - DNA, 20 bp, Artificial Sequence
  Synthetic oligonucleotide; TAG chr2 60544928 60544947 60544931 -
agggaaaaggaattaaaggc

SEQ ID NO: 172511 - DNA, 20 bp, Artificial Sequence
  Synthetic oligonucleotide; CAG chr2 60544925 60544944 60544928 -
gaaaaggaattaaaggctag

SEQ ID NO: 172512 - DNA, 20 bp, Artificial Sequence
  Synthetic oligonucleotide; TGG chr2 60544922 60544941 60544925 -
aaggaattaaaggctagcag

SEQ ID NO: 172513 - DNA, 20 bp, Artificial Sequence
  Synthetic oligonucleotide; GGG chr2 60544921 60544940 60544924 -
aggaattaaaggctagcagt

SEQ ID NO: 172514 - DNA, 20 bp, Artificial Sequence
  Synthetic oligonucleotide; AAG chr2 60544900 60544919 60544903 -
ggacttaaattcccttctct

SEQ ID NO: 172515 - DNA, 20 bp, Artificial Sequence
  Synthetic oligonucleotide; CAG chr2 60544890 60544909 60544893 -
tcccttctctaagtgataaa

SEQ ID NO: 172516 - DNA, 20 bp, Artificial Sequence
  Synthetic oligonucleotide; TAG chr2 60544877 60544896 60544880 -
tgataaacagtaacactata

SEQ ID NO: 172517 - DNA, 20 bp, Artificial Sequence
  Synthetic oligonucleotide; GAG chr2 60544850 60544869 60544853 -
cctcaaaacattttttgctt

SEQ ID NO: 172518 - DNA, 20 bp, Artificial Sequence
  Synthetic oligonucleotide; TAG chr2 60544842 60544861 60544845 -
cattttttgcttgagcatgt

SEQ ID NO: 172519 - DNA, 20 bp, Artificial Sequence
  Synthetic oligonucleotide; AAG chr2 60544835 60544854 60544838 -
tgcttgagcatgttagacaa

SEQ ID NO: 172520 - DNA, 20 bp, Artificial Sequence
  Synthetic oligonucleotide; CAG chr2 60544826 60544845 60544829 -
atgttagacaaaagtcaatg

SEQ ID NO: 172521 - DNA, 20 bp, Artificial Sequence
  Synthetic oligonucleotide; CAG chr2 60544811 60544830 60544814 -
caatgcagattctgtgatga

SEQ ID NO: 172522 - DNA, 20 bp, Artificial Sequence
  Synthetic oligonucleotide; TGG chr2 60544793 60544812 60544796 -
gacagacatgccatgcctgt

SEQ ID NO: 172523 - DNA, 20 bp, Artificial Sequence
  Synthetic oligonucleotide; TGG chr2 60544790 60544809 60544793 -
agacatgccatgcctgttgg

SEQ ID NO: 172524 - DNA, 20 bp, Artificial Sequence
  Synthetic oligonucleotide; CAG chr2 60544760 60544779 60544763 -
tcttccatctacctaccacc

SEQ ID NO: 172525 - DNA, 20 bp, Artificial Sequence
  Synthetic oligonucleotide; AAG chr2 60544750 60544769 60544753 -
acctaccacccagctcccga

SEQ ID NO: 172526 - DNA, 20 bp, Artificial Sequence
  Synthetic oligonucleotide; AGG chr2 60544749 60544768 60544752 -
cctaccacccagctcccgaa

SEQ ID NO: 172527 - DNA, 20 bp, Artificial Sequence
  Synthetic oligonucleotide; AAG chr2 60544745 60544764 60544748 -
ccacccagctcccgaaaggc

SEQ ID NO: 172528 - DNA, 20 bp, Artificial Sequence
  Synthetic oligonucleotide; GAG chr2 60544743 60544762 60544746 -
acccagctcccgaaaggcaa

SEQ ID NO: 172529 - DNA, 20 bp, Artificial Sequence
  Synthetic oligonucleotide; AGG chr2 60544742 60544761 60544745 -
cccagctcccgaaaggcaag

SEQ ID NO: 172530 - DNA, 20 bp, Artificial Sequence
  Synthetic oligonucleotide; CAG chr2 60544733 60544752 60544736 -
cgaaaggcaagaggtttgtt

SEQ ID NO: 172531 - DNA, 20 bp, Artificial Sequence
  Synthetic oligonucleotide; TAG chr2 60544727 60544746 60544730 -
gcaagaggtttgttcagttt

SEQ ID NO: 172532 - DNA, 20 bp, Artificial Sequence
  Synthetic oligonucleotide; AGG chr2 60544726 60544745 60544729 -
caagaggtttgttcagtttt

SEQ ID NO: 172533 - DNA, 20 bp, Artificial Sequence
  Synthetic oligonucleotide; AAG chr2 60544722 60544741 60544725 -
aggtttgttcagttttagga

SEQ ID NO: 172534 - DNA, 20 bp, Artificial Sequence
  Synthetic oligonucleotide; AGG chr2 60544721 60544740 60544724 -
ggtttgttcagttttaggaa

SEQ ID NO: 172535 - DNA, 20 bp, Artificial Sequence
  Synthetic oligonucleotide; TAG chr2 60544718 60544737 60544721 -
ttgttcagttttaggaaagg

SEQ ID NO: 172536 - DNA, 20 bp, Artificial Sequence
  Synthetic oligonucleotide; TGG chr2 60544693 60544712 60544696 -
catatcatgaattgattcac

SEQ ID NO: 172537 - DNA, 20 bp, Artificial Sequence
  Synthetic oligonucleotide; TAG chr2 60544673 60544692 60544676 -
tggaacttgtctctccgacc

SEQ ID NO: 172538 - DNA, 20 bp, Artificial Sequence
  Synthetic oligonucleotide; AAG chr2 60544660 60544679 60544663 -
tccgacctagtttgaccaca

SEQ ID NO: 172539 - DNA, 20 bp, Artificial Sequence
  Synthetic oligonucleotide; TAG chr2 60544646 60544665 60544649 -
accacaaagttgaaccataa

SEQ ID NO: 172540 - DNA, 20 bp, Artificial Sequence
  Synthetic oligonucleotide; AGG chr2 60544645 60544664 60544648 -
ccacaaagttgaaccataat

SEQ ID NO: 172541 - DNA, 20 bp, Artificial Sequence
  Synthetic oligonucleotide; CAG chr2 60544641 60544660 60544644 -
aaagttgaaccataataggt

SEQ ID NO: 172542 - DNA, 20 bp, Artificial Sequence
  Synthetic oligonucleotide; TGG chr2 60544638 60544657 60544641 -
gttgaaccataataggtcag

SEQ ID NO: 172543 - DNA, 20 bp, Artificial Sequence
  Synthetic oligonucleotide; TAG chr2 60544633 60544652 60544636 -
accataataggtcagtggtc

SEQ ID NO: 172544 - DNA, 20 bp, Artificial Sequence
  Synthetic oligonucleotide; GAG chr2 60544631 60544650 60544634 -
cataataggtcagtggtcta

SEQ ID NO: 172545 - DNA, 20 bp, Artificial Sequence
  Synthetic oligonucleotide; AGG chr2 60544630 60544649 60544633 -
ataataggtcagtggtctag

SEQ ID NO: 172546 - DNA, 20 bp, Artificial Sequence
  Synthetic oligonucleotide; GGG chr2 60544629 60544648 60544632 -
taataggtcagtggtctaga

SEQ ID NO: 172547 - DNA, 20 bp, Artificial Sequence
  Synthetic oligonucleotide; GGG chr2 60544628 60544647 60544631 -
aataggtcagtggtctagag

SEQ ID NO: 172548 - DNA, 20 bp, Artificial Sequence
  Synthetic oligonucleotide; TAG chr2 60544592 60544611 60544595 -
ttatttctcctctccccctc

SEQ ID NO: 172549 - DNA, 20 bp, Artificial Sequence
  Synthetic oligonucleotide; TGG chr2 60544566 60544585 60544569 -
ttgatcattaaaaccaaaca

SEQ ID NO: 172550 - DNA, 20 bp, Artificial Sequence
  Synthetic oligonucleotide; TAG chr2 60544546 60544565 60544549 -
tggcattttctttctttttt

SEQ ID NO: 172551 - DNA, 20 bp, Artificial Sequence
  Synthetic oligonucleotide; TAG chr2 60544531 60544550 60544534 -
ttttttagtgctttctgtga

SEQ ID NO: 172552 - DNA, 20 bp, Artificial Sequence
  Synthetic oligonucleotide; CAG chr2 60544524 60544543 60544527 -
gtgctttctgtgatagcact

SEQ ID NO: 172553 - DNA, 20 bp, Artificial Sequence
  Synthetic oligonucleotide; TAG chr2 60544509 60544528 60544512 -
gcactcagatactttccctt

SEQ ID NO: 172554 - DNA, 20 bp, Artificial Sequence
  Synthetic oligonucleotide; TGG chr2 60544501 60544520 60544504 -
atactttccctttagtgaaa

SEQ ID NO: 172555 - DNA, 20 bp, Artificial Sequence
  Synthetic oligonucleotide; GGG chr2 60544500 60544519 60544503 -
tactttccctttagtgaaat

SEQ ID NO: 172556 - DNA, 20 bp, Artificial Sequence
  Synthetic oligonucleotide; TAG chr2 60544486 60544505 60544489 -
tgaaatgggaaatctgctgc

SEQ ID NO: 172557 - DNA, 20 bp, Artificial Sequence
  Synthetic oligonucleotide; AGG chr2 60544485 60544504 60544488 -
gaaatgggaaatctgctgct

SEQ ID NO: 172558 - DNA, 20 bp, Artificial Sequence
  Synthetic oligonucleotide; GGG chr2 60544484 60544503 60544487 -
aaatgggaaatctgctgcta

SEQ ID NO: 172559 - DNA, 20 bp, Artificial Sequence
  Synthetic oligonucleotide; AAG chr2 60544481 60544500 60544484 -
tgggaaatctgctgctaggg

SEQ ID NO: 172560 - DNA, 20 bp, Artificial Sequence
  Synthetic oligonucleotide; TGG chr2 60544469 60544488 60544472 -
tgctagggaagctgcatttg

SEQ ID NO: 172561 - DNA, 20 bp, Artificial Sequence
  Synthetic oligonucleotide; GAG chr2 60544467 60544486 60544470 -
ctagggaagctgcatttgtg

SEQ ID NO: 172562 - DNA, 20 bp, Artificial Sequence
  Synthetic oligonucleotide; TAG chr2 60544424 60544443 60544427 -
catttaccttatgtgacatg

SEQ ID NO: 172563 - DNA, 20 bp, Artificial Sequence
  Synthetic oligonucleotide; AGG chr2 60544423 60544442 60544426 -
atttaccttatgtgacatgt

SEQ ID NO: 172564 - DNA, 20 bp, Artificial Sequence
  Synthetic oligonucleotide; AAG chr2 60544418 60544437 60544421 -
ccttatgtgacatgtaggtg

SEQ ID NO: 172565 - DNA, 20 bp, Artificial Sequence
  Synthetic oligonucleotide; CAG chr2 60544395 60544414 60544398 -
attttatctcccctaccccc

SEQ ID NO: 172566 - DNA, 20 bp, Artificial Sequence
  Synthetic oligonucleotide; CAG chr2 60544392 60544411 60544395 -
ttatctcccctaccccccag

SEQ ID NO: 172567 - DNA, 20 bp, Artificial Sequence
  Synthetic oligonucleotide; AGG chr2 60544391 60544410 60544394 -
tatctcccctaccccccagc

SEQ ID NO: 172568 - DNA, 20 bp, Artificial Sequence
  Synthetic oligonucleotide; TGG chr2 60544385 60544404 60544388 -
ccctaccccccagcaggatg

SEQ ID NO: 172569 - DNA, 20 bp, Artificial Sequence
  Synthetic oligonucleotide; GGG chr2 60544384 60544403 60544387 -
cctaccccccagcaggatgt

SEQ ID NO: 172570 - DNA, 20 bp, Artificial Sequence
  Synthetic oligonucleotide; TGG chr2 60544351 60544370 60544354 -
tccatgtgttgtcttgtgac

SEQ ID NO: 172571 - DNA, 20 bp, Artificial Sequence
  Synthetic oligonucleotide; AAG chr2 60544348 60544367 60544351 -
atgtgttgtcttgtgactgg

SEQ ID NO: 172572 - DNA, 20 bp, Artificial Sequence
  Synthetic oligonucleotide; AGG chr2 60544347 60544366 60544350 -
tgtgttgtcttgtgactgga

SEQ ID NO: 172573 - DNA, 20 bp, Artificial Sequence
  Synthetic oligonucleotide; CAG chr2 60544336 60544355 60544339 -
gtgactggaaggaaaatgaa

SEQ ID NO: 172574 - DNA, 20 bp, Artificial Sequence
  Synthetic oligonucleotide; AAG chr2 60544333 60544352 60544336 -
actggaaggaaaatgaacag

SEQ ID NO: 172575 - DNA, 20 bp, Artificial Sequence
  Synthetic oligonucleotide; AAG chr2 60544327 60544346 60544330 -
aggaaaatgaacagaagtgt

SEQ ID NO: 172576 - DNA, 20 bp, Artificial Sequence
  Synthetic oligonucleotide; AGG chr2 60544326 60544345 60544329 -
ggaaaatgaacagaagtgta

SEQ ID NO: 172577 - DNA, 20 bp, Artificial Sequence
  Synthetic oligonucleotide; AAG chr2 60544312 60544331 60544315 -
agtgtaaggcatgattaatg

SEQ ID NO: 172578 - DNA, 20 bp, Artificial Sequence
  Synthetic oligonucleotide; AAG chr2 60544308 60544327 60544311 -
taaggcatgattaatgaagc

SEQ ID NO: 172579 - DNA, 20 bp, Artificial Sequence
  Synthetic oligonucleotide; GAG chr2 60544306 60544325 60544309 -
aggcatgattaatgaagcaa

SEQ ID NO: 172580 - DNA, 20 bp, Artificial Sequence
  Synthetic oligonucleotide; CAG chr2 60544303 60544322 60544306 -
catgattaatgaagcaagag

SEQ ID NO: 172581 - DNA, 20 bp, Artificial Sequence
  Synthetic oligonucleotide; AGG chr2 60544302 60544321 60544305 -
atgattaatgaagcaagagc

SEQ ID NO: 172582 - DNA, 20 bp, Artificial Sequence
  Synthetic oligonucleotide; CGG chr2 60544299 60544318 60544302 -
attaatgaagcaagagcagg

SEQ ID NO: 172583 - DNA, 20 bp, Artificial Sequence
  Synthetic oligonucleotide; AAG chr2 60544296 60544315 60544299 -
aatgaagcaagagcaggcgg

SEQ ID NO: 172584 - DNA, 20 bp, Artificial Sequence
  Synthetic oligonucleotide; AGG chr2 60544295 60544314 60544298 -
atgaagcaagagcaggcgga

SEQ ID NO: 172585 - DNA, 20 bp, Artificial Sequence
  Synthetic oligonucleotide; GGG chr2 60544294 60544313 60544297 -
tgaagcaagagcaggcggaa

SEQ ID NO: 172586 - DNA, 20 bp, Artificial Sequence
  Synthetic oligonucleotide; GGG chr2 60544293 60544312 60544296 -
gaagcaagagcaggcggaag

SEQ ID NO: 172587 - DNA, 20 bp, Artificial Sequence
  Synthetic oligonucleotide; CGG chr2 60544278 60544297 60544281 -
ggaaggggatttgtcgtctt

SEQ ID NO: 172588 - DNA, 20 bp, Artificial Sequence
  Synthetic oligonucleotide; GAG chr2 60544276 60544295 60544279 -
aaggggatttgtcgtcttcg

SEQ ID NO: 172589 - DNA, 20 bp, Artificial Sequence
  Synthetic oligonucleotide; AAG chr2 60544268 60544287 60544271 -
ttgtcgtcttcggagatcca

SEQ ID NO: 172590 - DNA, 20 bp, Artificial Sequence
  Synthetic oligonucleotide; TGG chr2 60544245 60544264 60544248 -
ccttgctaaatcaccaaata

SEQ ID NO: 172591 - DNA, 20 bp, Artificial Sequence
  Synthetic oligonucleotide; GAG chr2 60544243 60544262 60544246 -
ttgctaaatcaccaaatatg

SEQ ID NO: 172592 - DNA, 20 bp, Artificial Sequence
  Synthetic oligonucleotide; GAG chr2 60544204 60544223 60544207 -
taacatcgtatttacatatc

SEQ ID NO: 172593 - DNA, 20 bp, Artificial Sequence
  Synthetic oligonucleotide; AAG chr2 60544189 60544208 60544192 -
atatcgagctgctcgtttaa

SEQ ID NO: 172594 - DNA, 20 bp, Artificial Sequence
  Synthetic oligonucleotide; CAG chr2 60544178 60544197 60544181 -
ctcgtttaaaagacaaaaca

SEQ ID NO: 172595 - DNA, 20 bp, Artificial Sequence
  Synthetic oligonucleotide; AAG chr2 60544167 60544186 60544170 -
gacaaaacacagtgtctgtc

SEQ ID NO: 172596 - DNA, 20 bp, Artificial Sequence
  Synthetic oligonucleotide; AAG chr2 60544163 60544182 60544166 -
aaacacagtgtctgtcaagc

SEQ ID NO: 172597 - DNA, 20 bp, Artificial Sequence
  Synthetic oligonucleotide; GAG chr2 60544138 60544157 60544141 -
ttaaaaccacacttcttact

SEQ ID NO: 172598 - DNA, 20 bp, Artificial Sequence
  Synthetic oligonucleotide; AGG chr2 60544137 60544156 60544140 -
taaaaccacacttcttactg

SEQ ID NO: 172599 - DNA, 20 bp, Artificial Sequence
  Synthetic oligonucleotide; TAG chr2 60544127 60544146 60544130 -
cttcttactgaggtcccaaa

SEQ ID NO: 172600 - DNA, 20 bp, Artificial Sequence
  Synthetic oligonucleotide; AGG chr2 60544126 60544145 60544129 -
ttcttactgaggtcccaaat

SEQ ID NO: 172601 - DNA, 20 bp, Artificial Sequence
  Synthetic oligonucleotide; CAG chr2 60544118 60544137 60544121 -
gaggtcccaaataggttatt

SEQ ID NO: 172602 - DNA, 20 bp, Artificial Sequence
  Synthetic oligonucleotide; TAG chr2 60544112 60544131 60544115 -
ccaaataggttattcagtct

SEQ ID NO: 172603 - DNA, 20 bp, Artificial Sequence
  Synthetic oligonucleotide; CAG chr2 60544103 60544122 60544106 -
ttattcagtcttagattaac

SEQ ID NO: 172604 - DNA, 20 bp, Artificial Sequence
  Synthetic oligonucleotide; TAG chr2 60544075 60544094 60544078 -
aaattctgtgcctctgtatt

SEQ ID NO: 172605 - DNA, 20 bp, Artificial Sequence
  Synthetic oligonucleotide; GAG chr2 60544073 60544092 60544076 -
attctgtgcctctgtattta

SEQ ID NO: 172606 - DNA, 20 bp, Artificial Sequence
  Synthetic oligonucleotide; AGG chr2 60544072 60544091 60544075 -
ttctgtgcctctgtatttag

SEQ ID NO: 172607 - DNA, 20 bp, Artificial Sequence
  Synthetic oligonucleotide; GAG chr2 60544070 60544089 60544073 -
ctgtgcctctgtatttagag

SEQ ID NO: 172608 - DNA, 20 bp, Artificial Sequence
  Synthetic oligonucleotide; AGG chr2 60544069 60544088 60544072 -
tgtgcctctgtatttagagg

SEQ ID NO: 172609 - DNA, 20 bp, Artificial Sequence
  Synthetic oligonucleotide; TGG chr2 60544055 60544074 60544058 -
tagaggaggaatctaaatgc

SEQ ID NO: 172610 - DNA, 20 bp, Artificial Sequence
  Synthetic oligonucleotide; GGG chr2 60544054 60544073 60544057 -
agaggaggaatctaaatgct

SEQ ID NO: 172611 - DNA, 20 bp, Artificial Sequence
  Synthetic oligonucleotide; GGG chr2 60544053 60544072 60544056 -
gaggaggaatctaaatgctg

SEQ ID NO: 172612 - DNA, 20 bp, Artificial Sequence
  Synthetic oligonucleotide; GGG chr2 60544052 60544071 60544055 -
aggaggaatctaaatgctgg

SEQ ID NO: 172613 - DNA, 20 bp, Artificial Sequence
  Synthetic oligonucleotide; GGG chr2 60544051 60544070 60544054 -
ggaggaatctaaatgctggg

SEQ ID NO: 172614 - DNA, 20 bp, Artificial Sequence
  Synthetic oligonucleotide; AAG chr2 60544048 60544067 60544051 -
ggaatctaaatgctgggggg

SEQ ID NO: 172615 - DNA, 20 bp, Artificial Sequence
  Synthetic oligonucleotide; AGG chr2 60544047 60544066 60544050 -
gaatctaaatgctgggggga

SEQ ID NO: 172616 - DNA, 20 bp, Artificial Sequence
  Synthetic oligonucleotide; TAG chr2 60544035 60544054 60544038 -
tggggggaaggccttacata

SEQ ID NO: 172617 - DNA, 20 bp, Artificial Sequence
  Synthetic oligonucleotide; AAG chr2 60544030 60544049 60544033 -
ggaaggccttacatatagtt

SEQ ID NO: 172618 - DNA, 20 bp, Artificial Sequence
  Synthetic oligonucleotide; TAG chr2 60544014 60544033 60544017 -
agttaagacttttactgcta

SEQ ID NO: 172619 - DNA, 20 bp, Artificial Sequence
  Synthetic oligonucleotide; TAG chr2 60543998 60544017 60544001 -
gctatagttgtgaatctatg

SEQ ID NO: 172620 - DNA, 20 bp, Artificial Sequence
  Synthetic oligonucleotide; AGG chr2 60543997 60544016 60544000 -
ctatagttgtgaatctatgt

SEQ ID NO: 172621 - DNA, 20 bp, Artificial Sequence
  Synthetic oligonucleotide; GGG chr2 60543996 60544015 60543999 -
tatagttgtgaatctatgta

SEQ ID NO: 172622 - DNA, 20 bp, Artificial Sequence
  Synthetic oligonucleotide; AAG chr2 60543989 60544008 60543992 -
gtgaatctatgtagggaaat

SEQ ID NO: 172623 - DNA, 20 bp, Artificial Sequence
  Synthetic oligonucleotide; GAG chr2 60543987 60544006 60543990 -
gaatctatgtagggaaataa

SEQ ID NO: 172624 - DNA, 20 bp, Artificial Sequence
  Synthetic oligonucleotide; TGG chr2 60543966 60543985 60543969 -
agatatttgcttgaactccc

SEQ ID NO: 172625 - DNA, 20 bp, Artificial Sequence
  Synthetic oligonucleotide; AAG chr2 60543956 60543975 60543959 -
ttgaactccctggttgtcta

SEQ ID NO: 172626 - DNA, 20 bp, Artificial Sequence
  Synthetic oligonucleotide; AGG chr2 60543955 60543974 60543958 -
tgaactccctggttgtctaa

SEQ ID NO: 172627 - DNA, 20 bp, Artificial Sequence
  Synthetic oligonucleotide; AAG chr2 60543933 60543952 60543936 -
gttctgttattattttttta

SEQ ID NO: 172628 - DNA, 20 bp, Artificial Sequence
  Synthetic oligonucleotide; AAG chr2 60543927 60543946 60543930 -
ttattatttttttaaagaac

SEQ ID NO: 172629 - DNA, 20 bp, Artificial Sequence
  Synthetic oligonucleotide; TAG chr2 60543919 60543938 60543922 -
tttttaaagaacaagtataa

SEQ ID NO: 172630 - DNA, 20 bp, Artificial Sequence
  Synthetic oligonucleotide; CAG chr2 60543916 60543935 60543919 -
ttaaagaacaagtataatag

SEQ ID NO: 172631 - DNA, 20 bp, Artificial Sequence
  Synthetic oligonucleotide; GAG chr2 60543914 60543933 60543917 -
aaagaacaagtataatagca

SEQ ID NO: 172632 - DNA, 20 bp, Artificial Sequence
  Synthetic oligonucleotide; TAG chr2 60543909 60543928 60543912 -
acaagtataatagcagagcc

SEQ ID NO: 172633 - DNA, 20 bp, Artificial Sequence
  Synthetic oligonucleotide; GAG chr2 60543907 60543926 60543910 -
aagtataatagcagagccta

SEQ ID NO: 172634 - DNA, 20 bp, Artificial Sequence
  Synthetic oligonucleotide; AAG chr2 60543904 60543923 60543907 -
tataatagcagagcctagag

SEQ ID NO: 172635 - DNA, 20 bp, Artificial Sequence
  Synthetic oligonucleotide; AAG chr2 60543891 60543910 60543894 -
cctagagaagccaaaaccaa

SEQ ID NO: 172636 - DNA, 20 bp, Artificial Sequence
  Synthetic oligonucleotide; TAG chr2 60543868 60543887 60543871 -
caaatttaaaatatatttta

SEQ ID NO: 172637 - DNA, 20 bp, Artificial Sequence
  Synthetic oligonucleotide; GAG chr2 60543842 60543861 60543845 -
taataatcaatcatttaact

SEQ ID NO: 172638 - DNA, 20 bp, Artificial Sequence
  Synthetic oligonucleotide; AAG chr2 60543834 60543853 60543837 -
aatcatttaactgagacgaa

SEQ ID NO: 172639 - DNA, 20 bp, Artificial Sequence
  Synthetic oligonucleotide; AAG chr2 60543825 60543844 60543828 -
actgagacgaaaagctctct

SEQ ID NO: 172640 - DNA, 20 bp, Artificial Sequence
  Synthetic oligonucleotide; AAG chr2 60543816 60543835 60543819 -
aaaagctctctaagatgtct

SEQ ID NO: 172641 - DNA, 20 bp, Artificial Sequence
  Synthetic oligonucleotide; TGG chr2 60543805 60543824 60543808 -
aagatgtctaagatattcaa

SEQ ID NO: 172642 - DNA, 20 bp, Artificial Sequence
  Synthetic oligonucleotide; GGG chr2 60543804 60543823 60543807 -
agatgtctaagatattcaat

SEQ ID NO: 172643 - DNA, 20 bp, Artificial Sequence
  Synthetic oligonucleotide; AAG chr2 60543793 60543812 60543796 -
atattcaatgggcgcacaac

SEQ ID NO: 172644 - DNA, 20 bp, Artificial Sequence
  Synthetic oligonucleotide; CAG chr2 60543780 60543799 60543783 -
gcacaacaagtgctgtgacc

SEQ ID NO: 172645 - DNA, 20 bp, Artificial Sequence
  Synthetic oligonucleotide; AGG chr2 60543779 60543798 60543782 -
cacaacaagtgctgtgaccc

SEQ ID NO: 172646 - DNA, 20 bp, Artificial Sequence
  Synthetic oligonucleotide; GAG chr2 60543775 60543794 60543778 -
acaagtgctgtgacccaggt

SEQ ID NO: 172647 - DNA, 20 bp, Artificial Sequence
  Synthetic oligonucleotide; AGG chr2 60543774 60543793 60543777 -
caagtgctgtgacccaggtg

SEQ ID NO: 172648 - DNA, 20 bp, Artificial Sequence
  Synthetic oligonucleotide; AAG chr2 60543744 60543763 60543747 -
ttcgtgcatgaataattaca

SEQ ID NO: 172649 - DNA, 20 bp, Artificial Sequence
  Synthetic oligonucleotide; TGG chr2 60543700 60543719 60543703 -
ttaatcacctgttcccaccc

SEQ ID NO: 172650 - DNA, 20 bp, Artificial Sequence
  Synthetic oligonucleotide; TGG chr2 60543694 60543713 60543697 -
acctgttcccaccctggaac

SEQ ID NO: 172651 - DNA, 20 bp, Artificial Sequence
  Synthetic oligonucleotide; TAG chr2 60543680 60543699 60543683 -
tggaactggctgaacataaa

SEQ ID NO: 172652 - DNA, 20 bp, Artificial Sequence
  Synthetic oligonucleotide; TGG chr2 60543675 60543694 60543678 -
ctggctgaacataaatagtg

SEQ ID NO: 172653 - DNA, 20 bp, Artificial Sequence
  Synthetic oligonucleotide; AAG chr2 60543662 60543681 60543665 -
aatagtgtggtcacatctca

SEQ ID NO: 172654 - DNA, 20 bp, Artificial Sequence
  Synthetic oligonucleotide; GAG chr2 60543658 60543677 60543661 -
gtgtggtcacatctcaaagt

SEQ ID NO: 172655 - DNA, 20 bp, Artificial Sequence
  Synthetic oligonucleotide; CAG chr2 60543651 60543670 60543654 -
cacatctcaaagtgagatgt

SEQ ID NO: 172656 - DNA, 20 bp, Artificial Sequence
  Synthetic oligonucleotide; TAG chr2 60543644 60543663 60543647 -
caaagtgagatgtcagtaac

SEQ ID NO: 172657 - DNA, 20 bp, Artificial Sequence
  Synthetic oligonucleotide; CAG chr2 60543619 60543638 60543622 -
tcacgacttctcataattca

SEQ ID NO: 172658 - DNA, 20 bp, Artificial Sequence
  Synthetic oligonucleotide; AAG chr2 60543607 60543626 60543610 -
ataattcacagtaatgaatt

SEQ ID NO: 172659 - DNA, 20 bp, Artificial Sequence
  Synthetic oligonucleotide; GAG chr2 60543605 60543624 60543608 -
aattcacagtaatgaattaa

SEQ ID NO: 172660 - DNA, 20 bp, Artificial Sequence
  Synthetic oligonucleotide; TGG chr2 60543595 60543614 60543598 -
aatgaattaagagtttccta

SEQ ID NO: 172661 - DNA, 20 bp, Artificial Sequence
  Synthetic oligonucleotide; AAG chr2 60543590 60543609 60543593 -
attaagagtttcctatggtg

SEQ ID NO: 172662 - DNA, 20 bp, Artificial Sequence
  Synthetic oligonucleotide; TGG chr2 60543551 60543570 60543554 -
gcacataaattccgacgctc

SEQ ID NO: 172663 - DNA, 20 bp, Artificial Sequence
  Synthetic oligonucleotide; CAG chr2 60543544 60543563 60543547 -
aattccgacgctctggccct

SEQ ID NO: 172664 - DNA, 20 bp, Artificial Sequence
  Synthetic oligonucleotide; AGG chr2 60543543 60543562 60543546 -
attccgacgctctggccctc

SEQ ID NO: 172665 - DNA, 20 bp, Artificial Sequence
  Synthetic oligonucleotide; AAG chr2 60543532 60543551 60543535 -
ctggccctcaggtgcccctg

SEQ ID NO: 172666 - DNA, 20 bp, Artificial Sequence
  Synthetic oligonucleotide; AAG chr2 60543527 60543546 60543530 -
cctcaggtgcccctgaagcg

SEQ ID NO: 172667 - DNA, 20 bp, Artificial Sequence
  Synthetic oligonucleotide; TGG chr2 60543521 60543540 60543524 -
gtgcccctgaagcgaagttc

SEQ ID NO: 172668 - DNA, 20 bp, Artificial Sequence
  Synthetic oligonucleotide; AAG chr2 60543518 60543537 60543521 -
cccctgaagcgaagttctgg

SEQ ID NO: 172669 - DNA, 20 bp, Artificial Sequence
  Synthetic oligonucleotide; CGG chr2 60543514 60543533 60543517 -
tgaagcgaagttctggaaga

SEQ ID NO: 172670 - DNA, 20 bp, Artificial Sequence
  Synthetic oligonucleotide; CAG chr2 60543496 60543515 60543499 -
gacggctgtgtgtgtacccc

SEQ ID NO: 172671 - DNA, 20 bp, Artificial Sequence
  Synthetic oligonucleotide; AAG chr2 60543481 60543500 60543484 -
acccccagcccatttctcta

SEQ ID NO: 172672 - DNA, 20 bp, Artificial Sequence
  Synthetic oligonucleotide; AAG chr2 60543461 60543480 60543464 -
aagcacgtctgcacaattcc

SEQ ID NO: 172673 - DNA, 20 bp, Artificial Sequence
  Synthetic oligonucleotide; GAG chr2 60543438 60543457 60543441 -
tctgcttttctttttatgat

SEQ ID NO: 172674 - DNA, 20 bp, Artificial Sequence
  Synthetic oligonucleotide; AGG chr2 60543437 60543456 60543440 -
ctgcttttctttttatgatg

SEQ ID NO: 172675 - DNA, 20 bp, Artificial Sequence
  Synthetic oligonucleotide; AAG chr2 60543434 60543453 60543437 -
cttttctttttatgatgagg

SEQ ID NO: 172676 - DNA, 20 bp, Artificial Sequence
  Synthetic oligonucleotide; AGG chr2 60543433 60543452 60543436 -
ttttctttttatgatgagga

SEQ ID NO: 172677 - DNA, 20 bp, Artificial Sequence
  Synthetic oligonucleotide; CAG chr2 60543421 60543440 60543424 -
gatgaggaaggaaacaataa

SEQ ID NO: 172678 - DNA, 20 bp, Artificial Sequence
  Synthetic oligonucleotide; CAG chr2 60543410 60543429 60543413 -
aaacaataacagtaatcatt

SEQ ID NO: 172679 - DNA, 20 bp, Artificial Sequence
  Synthetic oligonucleotide; TAG chr2 60543407 60543426 60543410 -
caataacagtaatcattcag

SEQ ID NO: 172680 - DNA, 20 bp, Artificial Sequence
  Synthetic oligonucleotide; AAG chr2 60543383 60543402 60543386 -
tatttgaattgtgtcacaaa

SEQ ID NO: 172681 - DNA, 20 bp, Artificial Sequence
  Synthetic oligonucleotide; AAG chr2 60543379 60543398 60543382 -
tgaattgtgtcacaaaaaga

SEQ ID NO: 172682 - DNA, 20 bp, Artificial Sequence
  Synthetic oligonucleotide; AGG chr2 60543378 60543397 60543381 -
gaattgtgtcacaaaaagaa

SEQ ID NO: 172683 - DNA, 20 bp, Artificial Sequence
  Synthetic oligonucleotide; GAG chr2 60543376 60543395 60543379 -
attgtgtcacaaaaagaaag

SEQ ID NO: 172684 - DNA, 20 bp, Artificial Sequence
  Synthetic oligonucleotide; AAG chr2 60543373 60543392 60543376 -
gtgtcacaaaaagaaaggag

SEQ ID NO: 172685 - DNA, 20 bp, Artificial Sequence
  Synthetic oligonucleotide; AAG chr2 60543356 60543375 60543359 -
gagaagcaatgccttgtatt

SEQ ID NO: 172686 - DNA, 20 bp, Artificial Sequence
  Synthetic oligonucleotide; AGG chr2 60543355 60543374 60543358 -
agaagcaatgccttgtatta

SEQ ID NO: 172687 - DNA, 20 bp, Artificial Sequence
  Synthetic oligonucleotide; AAG chr2 60543351 60543370 60543354 -
gcaatgccttgtattaagga

SEQ ID NO: 172688 - DNA, 20 bp, Artificial Sequence
  Synthetic oligonucleotide; GAG chr2 60543349 60543368 60543352 -
aatgccttgtattaaggaaa

SEQ ID NO: 172689 - DNA, 20 bp, Artificial Sequence
  Synthetic oligonucleotide; TAG chr2 60543329 60543348 60543332 -
gagatatattgatgaatctc

SEQ ID NO: 172690 - DNA, 20 bp, Artificial Sequence
  Synthetic oligonucleotide; AAG chr2 60543326 60543345 60543329 -
atatattgatgaatctctag

SEQ ID NO: 172691 - DNA, 20 bp, Artificial Sequence
  Synthetic oligonucleotide; TGG chr2 60543315 60543334 60543318 -
aatctctagaagaatgtgtt

SEQ ID NO: 172692 - DNA, 20 bp, Artificial Sequence
  Synthetic oligonucleotide; AAG chr2 60543301 60543320 60543304 -
tgtgtttggcaaccacataa

SEQ ID NO: 172693 - DNA, 20 bp, Artificial Sequence
  Synthetic oligonucleotide; AGG chr2 60543300 60543319 60543303 -
gtgtttggcaaccacataaa

SEQ ID NO: 172694 - DNA, 20 bp, Artificial Sequence
  Synthetic oligonucleotide; TAG chr2 60543297 60543316 60543300 -
tttggcaaccacataaaagg

SEQ ID NO: 172695 - DNA, 20 bp, Artificial Sequence
  Synthetic oligonucleotide; AAG chr2 60543288 60543307 60543291 -
cacataaaaggtagtcattt

SEQ ID NO: 172696 - DNA, 20 bp, Artificial Sequence
  Synthetic oligonucleotide; TGG chr2 60543280 60543299 60543283 -
aggtagtcatttaagcgtgc

SEQ ID NO: 172697 - DNA, 20 bp, Artificial Sequence
  Synthetic oligonucleotide; GGG chr2 60543279 60543298 60543282 -
ggtagtcatttaagcgtgct

SEQ ID NO: 172698 - DNA, 20 bp, Artificial Sequence
  Synthetic oligonucleotide; TAG chr2 60543276 60543295 60543279 -
agtcatttaagcgtgctggg

SEQ ID NO: 172699 - DNA, 20 bp, Artificial Sequence
  Synthetic oligonucleotide; AGG chr2 60543275 60543294 60543278 -
gtcatttaagcgtgctgggt

SEQ ID NO: 172700 - DNA, 20 bp, Artificial Sequence
  Synthetic oligonucleotide; AAG chr2 60543271 60543290 60543274 -
tttaagcgtgctgggtagga

SEQ ID NO: 172701 - DNA, 20 bp, Artificial Sequence
  Synthetic oligonucleotide; AGG chr2 60543270 60543289 60543273 -
ttaagcgtgctgggtaggaa

SEQ ID NO: 172702 - DNA, 20 bp, Artificial Sequence
  Synthetic oligonucleotide; AAG chr2 60543259 60543278 60543262 -
gggtaggaaaggctttatta

SEQ ID NO: 172703 - DNA, 20 bp, Artificial Sequence
  Synthetic oligonucleotide; AAG chr2 60543250 60543269 60543253 -
aggctttattaaagtgatgt

SEQ ID NO: 172704 - DNA, 20 bp, Artificial Sequence
  Synthetic oligonucleotide; TGG chr2 60543246 60543265 60543249 -
tttattaaagtgatgtaagt

SEQ ID NO: 172705 - DNA, 20 bp, Artificial Sequence
  Synthetic oligonucleotide; GAG chr2 60543239 60543258 60543242 -
aagtgatgtaagttggattt

SEQ ID NO: 172706 - DNA, 20 bp, Artificial Sequence
  Synthetic oligonucleotide; GAG chr2 60543228 60543247 60543231 -
gttggatttgagttcactgt

SEQ ID NO: 172707 - DNA, 20 bp, Artificial Sequence
  Synthetic oligonucleotide; TAG chr2 60543211 60543230 60543214 -
tgtgagcctgtactatttta

SEQ ID NO: 172708 - DNA, 20 bp, Artificial Sequence
  Synthetic oligonucleotide; AGG chr2 60543210 60543229 60543213 -
gtgagcctgtactattttat

SEQ ID NO: 172709 - DNA, 20 bp, Artificial Sequence
  Synthetic oligonucleotide; CAG chr2 60543207 60543226 60543210 -
agcctgtactattttatagg

SEQ ID NO: 172710 - DNA, 20 bp, Artificial Sequence
  Synthetic oligonucleotide; AGG chr2 60543206 60543225 60543209 -
gcctgtactattttataggc

SEQ ID NO: 172711 - DNA, 20 bp, Artificial Sequence
  Synthetic oligonucleotide; AAG chr2 60543203 60543222 60543206 -
tgtactattttataggcagg

SEQ ID NO: 172712 - DNA, 20 bp, Artificial Sequence
  Synthetic oligonucleotide; AAG chr2 60543199 60543218 60543202 -
ctattttataggcaggaagc

SEQ ID NO: 172713 - DNA, 20 bp, Artificial Sequence
  Synthetic oligonucleotide; CAG chr2 60543189 60543208 60543192 -
ggcaggaagcaagaataaaa

SEQ ID NO: 172714 - DNA, 20 bp, Artificial Sequence
  Synthetic oligonucleotide; CAG chr2 60543183 60543202 60543186 -
aagcaagaataaaacagtga

SEQ ID NO: 172715 - DNA, 20 bp, Artificial Sequence
  Synthetic oligonucleotide; AAG chr2 60543169 60543188 60543172 -
cagtgacagatcttcttcct

SEQ ID NO: 172716 - DNA, 20 bp, Artificial Sequence
  Synthetic oligonucleotide; AAG chr2 60543159 60543178 60543162 -
tcttcttcctaagataaata

SEQ ID NO: 172717 - DNA, 20 bp, Artificial Sequence
  Synthetic oligonucleotide; TAG chr2 60543154 60543173 60543157 -
ttcctaagataaataaagct

SEQ ID NO: 172718 - DNA, 20 bp, Artificial Sequence
  Synthetic oligonucleotide; CGG chr2 60543147 60543166 60543150 -
gataaataaagcttagaatt

SEQ ID NO: 172719 - DNA, 20 bp, Artificial Sequence
  Synthetic oligonucleotide; GGG chr2 60543146 60543165 60543149 -
ataaataaagcttagaattc

SEQ ID NO: 172720 - DNA, 20 bp, Artificial Sequence
  Synthetic oligonucleotide; CAG chr2 60543138 60543157 60543141 -
agcttagaattcgggacttt

SEQ ID NO: 172721 - DNA, 20 bp, Artificial Sequence
  Synthetic oligonucleotide; TAG chr2 60543134 60543153 60543137 -
tagaattcgggactttcaga

SEQ ID NO: 172722 - DNA, 20 bp, Artificial Sequence
  Synthetic oligonucleotide; AGG chr2 60543133 60543152 60543136 -
agaattcgggactttcagat

SEQ ID NO: 172723 - DNA, 20 bp, Artificial Sequence
  Synthetic oligonucleotide; GAG chr2 60543131 60543150 60543134 -
aattcgggactttcagatag

SEQ ID NO: 172724 - DNA, 20 bp, Artificial Sequence
  Synthetic oligonucleotide; AAG chr2 60543125 60543144 60543128 -
ggactttcagataggagaat

SEQ ID NO: 172725 - DNA, 20 bp, Artificial Sequence
  Synthetic oligonucleotide; AGG chr2 60543124 60543143 60543127 -
gactttcagataggagaata

SEQ ID NO: 172726 - DNA, 20 bp, Artificial Sequence
  Synthetic oligonucleotide; CAG chr2 60543121 60543140 60543124 -
tttcagataggagaataagg

SEQ ID NO: 172727 - DNA, 20 bp, Artificial Sequence
  Synthetic oligonucleotide; GAG chr2 60543119 60543138 60543122 -
tcagataggagaataaggca

SEQ ID NO: 172728 - DNA, 20 bp, Artificial Sequence
  Synthetic oligonucleotide; GAG chr2 60543103 60543122 60543106 -
ggcagagttctttaaatctt

SEQ ID NO: 172729 - DNA, 20 bp, Artificial Sequence
  Synthetic oligonucleotide; TGG chr2 60543095 60543114 60543098 -
tctttaaatcttgagtaaaa

SEQ ID NO: 172730 - DNA, 20 bp, Artificial Sequence
  Synthetic oligonucleotide; CAG chr2 60543073 60543092 60543076 -
gtatgcattttcactgtact

SEQ ID NO: 172731 - DNA, 20 bp, Artificial Sequence
  Synthetic oligonucleotide; AGG chr2 60543072 60543091 60543075 -
tatgcattttcactgtactc

SEQ ID NO: 172732 - DNA, 20 bp, Artificial Sequence
  Synthetic oligonucleotide; AAG chr2 60543062 60543081 60543065 -
cactgtactcaggcctctcc

SEQ ID NO: 172733 - DNA, 20 bp, Artificial Sequence
  Synthetic oligonucleotide; GAG chr2 60543057 60543076 60543060 -
tactcaggcctctccaagct

SEQ ID NO: 172734 - DNA, 20 bp, Artificial Sequence
  Synthetic oligonucleotide; TAG chr2 60543031 60543050 60543034 -
tttttttttttttttttttt

SEQ ID NO: 172735 - DNA, 20 bp, Artificial Sequence
  Synthetic oligonucleotide; CAG chr2 60543027 60543046 60543030 -
tttttttttttttttttaga

SEQ ID NO: 172736 - DNA, 20 bp, Artificial Sequence
  Synthetic oligonucleotide; GAG chr2 60543025 60543044 60543028 -
tttttttttttttttagaca

SEQ ID NO: 172737 - DNA, 20 bp, Artificial Sequence
  Synthetic oligonucleotide; CAG chr2 60543006 60543025 60543009 -
agagttttgctcttgttgcc

SEQ ID NO: 172738 - DNA, 20 bp, Artificial Sequence
  Synthetic oligonucleotide; AGG chr2 60543005 60543024 60543008 -
gagttttgctcttgttgccc

SEQ ID NO: 172739 - DNA, 20 bp, Artificial Sequence
  Synthetic oligonucleotide; TGG chr2 60543001 60543020 60543004 -
tttgctcttgttgcccaggc

SEQ ID NO: 172740 - DNA, 20 bp, Artificial Sequence
  Synthetic oligonucleotide; GAG chr2 60542999 60543018 60543002 -
tgctcttgttgcccaggctg

SEQ ID NO: 172741 - DNA, 20 bp, Artificial Sequence
  Synthetic oligonucleotide; CAG chr2 60542994 60543013 60542997 -
ttgttgcccaggctggagtg

SEQ ID NO: 172742 - DNA, 20 bp, Artificial Sequence
  Synthetic oligonucleotide; TGG chr2 60542991 60543010 60542994 -
ttgcccaggctggagtgcag

SEQ ID NO: 172743 - DNA, 20 bp, Artificial Sequence
  Synthetic oligonucleotide; TGG chr2 60542980 60542999 60542983 -
ggagtgcagtggcatgattt

SEQ ID NO: 172744 - DNA, 20 bp, Artificial Sequence
  Synthetic oligonucleotide; TAG chr2 60542956 60542975 60542959 -
tcactgcaacctctgcctcc

SEQ ID NO: 172745 - DNA, 20 bp, Artificial Sequence
  Synthetic oligonucleotide; AGG chr2 60542955 60542974 60542958 -
cactgcaacctctgcctcct

SEQ ID NO: 172746 - DNA, 20 bp, Artificial Sequence
  Synthetic oligonucleotide; AAG chr2 60542949 60542968 60542952 -
aacctctgcctcctaggttc

SEQ ID NO: 172747 - DNA, 20 bp, Artificial Sequence
  Synthetic oligonucleotide; CAG chr2 60542932 60542951 60542935 -
ttcaagcgattctcctgcct

SEQ ID NO: 172748 - DNA, 20 bp, Artificial Sequence
  Synthetic oligonucleotide; AAG chr2 60542923 60542942 60542926 -
ttctcctgcctcagcctccc

SEQ ID NO: 172749 - DNA, 20 bp, Artificial Sequence
  Synthetic oligonucleotide; TAG chr2 60542920 60542939 60542923 -
tcctgcctcagcctcccaag

SEQ ID NO: 172750 - DNA, 20 bp, Artificial Sequence
  Synthetic oligonucleotide; TGG chr2 60542916 60542935 60542919 -
gcctcagcctcccaagtagc

SEQ ID NO: 172751 - DNA, 20 bp, Artificial Sequence
  Synthetic oligonucleotide; GGG chr2 60542915 60542934 60542918 -
cctcagcctcccaagtagct

SEQ ID NO: 172752 - DNA, 20 bp, Artificial Sequence
  Synthetic oligonucleotide; CAG chr2 60542908 60542927 60542911 -
ctcccaagtagctgggatta

SEQ ID NO: 172753 - DNA, 20 bp, Artificial Sequence
  Synthetic oligonucleotide; AGG chr2 60542907 60542926 60542910 -
tcccaagtagctgggattac

SEQ ID NO: 172754 - DNA, 20 bp, Artificial Sequence
  Synthetic oligonucleotide; CAG chr2 60542888 60542907 60542891 -
caggcgtgtgccactacgcc

SEQ ID NO: 172755 - DNA, 20 bp, Artificial Sequence
  Synthetic oligonucleotide; TAG chr2 60542884 60542903 60542887 -
cgtgtgccactacgcccagc

SEQ ID NO: 172756 - DNA, 20 bp, Artificial Sequence
  Synthetic oligonucleotide; CAG chr2 60542868 60542887 60542871 -
cagctagttttttgtatttt

SEQ ID NO: 172757 - DNA, 20 bp, Artificial Sequence
  Synthetic oligonucleotide; TAG chr2 60542865 60542884 60542868 -
ctagttttttgtattttcag

SEQ ID NO: 172758 - DNA, 20 bp, Artificial Sequence
  Synthetic oligonucleotide; GAG chr2 60542863 60542882 60542866 -
agttttttgtattttcagta

SEQ ID NO: 172759 - DNA, 20 bp, Artificial Sequence
  Synthetic oligonucleotide; AGG chr2 60542862 60542881 60542865 -
gttttttgtattttcagtag

SEQ ID NO: 172760 - DNA, 20 bp, Artificial Sequence
  Synthetic oligonucleotide; CAG chr2 60542859 60542878 60542862 -
ttttgtattttcagtagagg

SEQ ID NO: 172761 - DNA, 20 bp, Artificial Sequence
  Synthetic oligonucleotide; AGG chr2 60542858 60542877 60542861 -
tttgtattttcagtagaggc

SEQ ID NO: 172762 - DNA, 20 bp, Artificial Sequence
  Synthetic oligonucleotide; GGG chr2 60542857 60542876 60542860 -
ttgtattttcagtagaggca

SEQ ID NO: 172763 - DNA, 20 bp, Artificial Sequence
  Synthetic oligonucleotide; TGG chr2 60542843 60542862 60542846 -
gaggcagggtttcaccatgt

SEQ ID NO: 172764 - DNA, 20 bp, Artificial Sequence
  Synthetic oligonucleotide; CAG chr2 60542839 60542858 60542842 -
cagggtttcaccatgttggc

SEQ ID NO: 172765 - DNA, 20 bp, Artificial Sequence
  Synthetic oligonucleotide; AGG chr2 60542838 60542857 60542841 -
agggtttcaccatgttggcc

SEQ ID NO: 172766 - DNA, 20 bp, Artificial Sequence
  Synthetic oligonucleotide; TGG chr2 60542834 60542853 60542837 -
tttcaccatgttggccaggc

SEQ ID NO: 172767 - DNA, 20 bp, Artificial Sequence
  Synthetic oligonucleotide; CAG chr2 60542814 60542833 60542817 -
tggtcttgaactcctgacct

SEQ ID NO: 172768 - DNA, 20 bp, Artificial Sequence
  Synthetic oligonucleotide; AGG chr2 60542813 60542832 60542816 -
ggtcttgaactcctgacctc

SEQ ID NO: 172769 - DNA, 20 bp, Artificial Sequence
  Synthetic oligonucleotide; TGG chr2 60542801 60542820 60542804 -
ctgacctcaggtgatccacc

SEQ ID NO: 172770 - DNA, 20 bp, Artificial Sequence
  Synthetic oligonucleotide; TGG chr2 60542796 60542815 60542799 -
ctcaggtgatccacctggct

SEQ ID NO: 172771 - DNA, 20 bp, Artificial Sequence
  Synthetic oligonucleotide; AAG chr2 60542786 60542805 60542789 -
ccacctggcttggcctccca

SEQ ID NO: 172772 - DNA, 20 bp, Artificial Sequence
  Synthetic oligonucleotide; TGG chr2 60542780 60542799 60542783 -
ggcttggcctcccaaagtgc

SEQ ID NO: 172773 - DNA, 20 bp, Artificial Sequence
  Synthetic oligonucleotide; GGG chr2 60542779 60542798 60542782 -
gcttggcctcccaaagtgct

SEQ ID NO: 172774 - DNA, 20 bp, Artificial Sequence
  Synthetic oligonucleotide; CAG chr2 60542772 60542791 60542775 -
ctcccaaagtgctgggatta

SEQ ID NO: 172775 - DNA, 20 bp, Artificial Sequence
  Synthetic oligonucleotide; AGG chr2 60542771 60542790 60542774 -
tcccaaagtgctgggattac

SEQ ID NO: 172776 - DNA, 20 bp, Artificial Sequence
  Synthetic oligonucleotide; GAG chr2 60542765 60542784 60542768 -
agtgctgggattacaggctt

SEQ ID NO: 172777 - DNA, 20 bp, Artificial Sequence
  Synthetic oligonucleotide; TGG chr2 60542752 60542771 60542755 -
caggcttgagcgaccgcacc

SEQ ID NO: 172778 - DNA, 20 bp, Artificial Sequence
  Synthetic oligonucleotide; GAG chr2 60542741 60542760 60542744 -
gaccgcacctggcccaaact

SEQ ID NO: 172779 - DNA, 20 bp, Artificial Sequence
  Synthetic oligonucleotide; TAG chr2 60542731 60542750 60542734 -
ggcccaaactgagtattttt

SEQ ID NO: 172780 - DNA, 20 bp, Artificial Sequence
  Synthetic oligonucleotide; GAG chr2 60542729 60542748 60542732 -
cccaaactgagtatttttta

SEQ ID NO: 172781 - DNA, 20 bp, Artificial Sequence
  Synthetic oligonucleotide; AGG chr2 60542728 60542747 60542731 -
ccaaactgagtattttttag

SEQ ID NO: 172782 - DNA, 20 bp, Artificial Sequence
  Synthetic oligonucleotide; TGG chr2 60542713 60542732 60542716 -
tttagaggattctttttacc

SEQ ID NO: 172783 - DNA, 20 bp, Artificial Sequence
  Synthetic oligonucleotide; TAG chr2 60542706 60542725 60542709 -
gattctttttacctggtgaa

SEQ ID NO: 172784 - DNA, 20 bp, Artificial Sequence
  Synthetic oligonucleotide; TGG chr2 60542702 60542721 60542705 -
ctttttacctggtgaataga

SEQ ID NO: 172785 - DNA, 20 bp, Artificial Sequence
  Synthetic oligonucleotide; GGG chr2 60542701 60542720 60542704 -
tttttacctggtgaatagat

SEQ ID NO: 172786 - DNA, 20 bp, Artificial Sequence
  Synthetic oligonucleotide; GAG chr2 60542664 60542683 60542667 -
cttcatccacgtacacatat

SEQ ID NO: 172787 - DNA, 20 bp, Artificial Sequence
  Synthetic oligonucleotide; TAG chr2 60542652 60542671 60542655 -
acacatatgagctgtacaca

SEQ ID NO: 172788 - DNA, 20 bp, Artificial Sequence
  Synthetic oligonucleotide; CAG chr2 60542641 60542660 60542644 -
ctgtacacatagatgttaat

SEQ ID NO: 172789 - DNA, 20 bp, Artificial Sequence
  Synthetic oligonucleotide; AGG chr2 60542640 60542659 60542643 -
tgtacacatagatgttaatc

SEQ ID NO: 172790 - DNA, 20 bp, Artificial Sequence
  Synthetic oligonucleotide; GAG chr2 60542583 60542602 60542586 -
ttgtgtgattgtgatccatt

SEQ ID NO: 172791 - DNA, 20 bp, Artificial Sequence
  Synthetic oligonucleotide; AAG chr2 60542573 60542592 60542576 -
gtgatccattgagatcattg

SEQ ID NO: 172792 - DNA, 20 bp, Artificial Sequence
  Synthetic oligonucleotide; TAG chr2 60542570 60542589 60542573 -
atccattgagatcattgaag

SEQ ID NO: 172793 - DNA, 20 bp, Artificial Sequence
  Synthetic oligonucleotide; TAG chr2 60542559 60542578 60542562 -
tcattgaagtagtattaatt

SEQ ID NO: 172794 - DNA, 20 bp, Artificial Sequence
  Synthetic oligonucleotide; TGG chr2 60542555 60542574 60542558 -
tgaagtagtattaatttagc

SEQ ID NO: 172795 - DNA, 20 bp, Artificial Sequence
  Synthetic oligonucleotide; GGG chr2 60542554 60542573 60542557 -
gaagtagtattaatttagct

SEQ ID NO: 172796 - DNA, 20 bp, Artificial Sequence
  Synthetic oligonucleotide; TAG chr2 60542548 60542567 60542551 -
gtattaatttagctgggaat

SEQ ID NO: 172797 - DNA, 20 bp, Artificial Sequence
  Synthetic oligonucleotide; CAG chr2 60542545 60542564 60542548 -
ttaatttagctgggaattag

SEQ ID NO: 172798 - DNA, 20 bp, Artificial Sequence
  Synthetic oligonucleotide; TGG chr2 60542531 60542550 60542534 -
aattagcagcttatgttgtg

SEQ ID NO: 172799 - DNA, 20 bp, Artificial Sequence
  Synthetic oligonucleotide; GGG chr2 60542530 60542549 60542533 -
attagcagcttatgttgtgt

SEQ ID NO: 172800 - DNA, 20 bp, Artificial Sequence
  Synthetic oligonucleotide; CAG chr2 60542525 60542544 60542528 -
cagcttatgttgtgtgggcc

SEQ ID NO: 172801 - DNA, 20 bp, Artificial Sequence
  Synthetic oligonucleotide; CAG chr2 60542491 60542510 60542494 -
gtgtgtcaaatatccaccct

SEQ ID NO: 172802 - DNA, 20 bp, Artificial Sequence
  Synthetic oligonucleotide; CAG chr2 60542484 60542503 60542487 -
aaatatccaccctcagatat

SEQ ID NO: 172803 - DNA, 20 bp, Artificial Sequence
  Synthetic oligonucleotide; CAG chr2 60542481 60542500 60542484 -
tatccaccctcagatatcag

SEQ ID NO: 172804 - DNA, 20 bp, Artificial Sequence
  Synthetic oligonucleotide; CAG chr2 60542467 60542486 60542470 -
tatcagcagcctttgacttg

SEQ ID NO: 172805 - DNA, 20 bp, Artificial Sequence
  Synthetic oligonucleotide; CAG chr2 60542463 60542482 60542466 -
agcagcctttgacttgcagt

SEQ ID NO: 172806 - DNA, 20 bp, Artificial Sequence
  Synthetic oligonucleotide; GAG chr2 60542461 60542480 60542464 -
cagcctttgacttgcagtca

SEQ ID NO: 172807 - DNA, 20 bp, Artificial Sequence
  Synthetic oligonucleotide; TAG chr2 60542451 60542470 60542454 -
cttgcagtcagagctttcaa

SEQ ID NO: 172808 - DNA, 20 bp, Artificial Sequence
  Synthetic oligonucleotide; AGG chr2 60542450 60542469 60542453 -
ttgcagtcagagctttcaat

SEQ ID NO: 172809 - DNA, 20 bp, Artificial Sequence
  Synthetic oligonucleotide; GGG chr2 60542449 60542468 60542452 -
tgcagtcagagctttcaata

SEQ ID NO: 172810 - DNA, 20 bp, Artificial Sequence
  Synthetic oligonucleotide; GGG chr2 60542448 60542467 60542451 -
gcagtcagagctttcaatag

SEQ ID NO: 172811 - DNA, 20 bp, Artificial Sequence
  Synthetic oligonucleotide; TAG chr2 60542417 60542436 60542420 -
tgttttgttttctttttttt

SEQ ID NO: 172812 - DNA, 20 bp, Artificial Sequence
  Synthetic oligonucleotide; TGG chr2 60542399 60542418 60542402 -
tttagtctcatattttatga

SEQ ID NO: 172813 - DNA, 20 bp, Artificial Sequence
  Synthetic oligonucleotide; GGG chr2 60542398 60542417 60542401 -
ttagtctcatattttatgat

SEQ ID NO: 172814 - DNA, 20 bp, Artificial Sequence
  Synthetic oligonucleotide; GGG chr2 60542397 60542416 60542400 -
tagtctcatattttatgatg

SEQ ID NO: 172815 - DNA, 20 bp, Artificial Sequence
  Synthetic oligonucleotide; GGG chr2 60542396 60542415 60542399 -
agtctcatattttatgatgg

SEQ ID NO: 172816 - DNA, 20 bp, Artificial Sequence
  Synthetic oligonucleotide; GGG chr2 60542395 60542414 60542398 -
gtctcatattttatgatggg

SEQ ID NO: 172817 - DNA, 20 bp, Artificial Sequence
  Synthetic oligonucleotide; TGG chr2 60542383 60542402 60542386 -
atgatggggggaaatattca

SEQ ID NO: 172818 - DNA, 20 bp, Artificial Sequence
  Synthetic oligonucleotide; AAG chr2 60542380 60542399 60542383 -
atggggggaaatattcatgg

SEQ ID NO: 172819 - DNA, 20 bp, Artificial Sequence
  Synthetic oligonucleotide; TAG chr2 60542347 60542366 60542350 -
gtgaaactgctgttccctta

SEQ ID NO: 172820 - DNA, 20 bp, Artificial Sequence
  Synthetic oligonucleotide; AAG chr2 60542342 60542361 60542345 -
actgctgttcccttatagaa

SEQ ID NO: 172821 - DNA, 20 bp, Artificial Sequence
  Synthetic oligonucleotide; CAG chr2 60542316 60542335 60542319 -
caaacattatcccatcatgt

SEQ ID NO: 172822 - DNA, 20 bp, Artificial Sequence
  Synthetic oligonucleotide; GAG chr2 60542309 60542328 60542312 -
tatcccatcatgtcagattt

SEQ ID NO: 172823 - DNA, 20 bp, Artificial Sequence
  Synthetic oligonucleotide; AGG chr2 60542308 60542327 60542311 -
atcccatcatgtcagatttg

SEQ ID NO: 172824 - DNA, 20 bp, Artificial Sequence
  Synthetic oligonucleotide; TGG chr2 60542302 60542321 60542305 -
tcatgtcagatttgaggttt

SEQ ID NO: 172825 - DNA, 20 bp, Artificial Sequence
  Synthetic oligonucleotide; TAG chr2 60542288 60542307 60542291 -
aggttttggcttattgcaca

SEQ ID NO: 172826 - DNA, 20 bp, Artificial Sequence
  Synthetic oligonucleotide; AGG chr2 60542287 60542306 60542290 -
ggttttggcttattgcacat

SEQ ID NO: 172827 - DNA, 20 bp, Artificial Sequence
  Synthetic oligonucleotide; TAG chr2 60542273 60542292 60542276 -
gcacataggaatctttaaat

SEQ ID NO: 172828 - DNA, 20 bp, Artificial Sequence
  Synthetic oligonucleotide; AGG chr2 60542272 60542291 60542275 -
cacataggaatctttaaatt

SEQ ID NO: 172829 - DNA, 20 bp, Artificial Sequence
  Synthetic oligonucleotide; TGG chr2 60542267 60542286 60542270 -
aggaatctttaaattaggtt

SEQ ID NO: 172830 - DNA, 20 bp, Artificial Sequence
  Synthetic oligonucleotide; GGG chr2 60542266 60542285 60542269 -
ggaatctttaaattaggttt

SEQ ID NO: 172831 - DNA, 20 bp, Artificial Sequence
  Synthetic oligonucleotide; AAG chr2 60542255 60542274 60542258 -
attaggtttgggctgtcata

SEQ ID NO: 172832 - DNA, 20 bp, Artificial Sequence
  Synthetic oligonucleotide; TAG chr2 60542251 60542270 60542254 -
ggtttgggctgtcataaagt

SEQ ID NO: 172833 - DNA, 20 bp, Artificial Sequence
  Synthetic oligonucleotide; GAG chr2 60542242 60542261 60542245 -
tgtcataaagttagcttttt

SEQ ID NO: 172834 - DNA, 20 bp, Artificial Sequence
  Synthetic oligonucleotide; GAG chr2 60542240 60542259 60542243 -
tcataaagttagctttttga

SEQ ID NO: 172835 - DNA, 20 bp, Artificial Sequence
  Synthetic oligonucleotide; TAG chr2 60542235 60542254 60542238 -
aagttagctttttgagagac

SEQ ID NO: 172836 - DNA, 20 bp, Artificial Sequence
  Synthetic oligonucleotide; GAG chr2 60542233 60542252 60542236 -
gttagctttttgagagacta

SEQ ID NO: 172837 - DNA, 20 bp, Artificial Sequence
  Synthetic oligonucleotide; AAG chr2 60542218 60542237 60542221 -
gactagagaaaaaatatgac

SEQ ID NO: 172838 - DNA, 20 bp, Artificial Sequence
  Synthetic oligonucleotide; TAG chr2 60542203 60542222 60542206 -
atgacaagtcctataaaatg

SEQ ID NO: 172839 - DNA, 20 bp, Artificial Sequence
  Synthetic oligonucleotide; AAG chr2 60542198 60542217 60542201 -
aagtcctataaaatgtagta

SEQ ID NO: 172840 - DNA, 20 bp, Artificial Sequence
  Synthetic oligonucleotide; TAG chr2 60542147 60542166 60542150 -
tctctttaaaatcatgaaca

SEQ ID NO: 172841 - DNA, 20 bp, Artificial Sequence
  Synthetic oligonucleotide; CAG chr2 60542134 60542153 60542137 -
atgaacatagacatttatat

SEQ ID NO: 172842 - DNA, 20 bp, Artificial Sequence
  Synthetic oligonucleotide; AGG chr2 60542133 60542152 60542136 -
tgaacatagacatttatatc

SEQ ID NO: 172843 - DNA, 20 bp, Artificial Sequence
  Synthetic oligonucleotide; GGG chr2 60542132 60542151 60542135 -
gaacatagacatttatatca

SEQ ID NO: 172844 - DNA, 20 bp, Artificial Sequence
  Synthetic oligonucleotide; TAG chr2 60542111 60542130 60542114 -
ggtatttaaaattatttgcc

SEQ ID NO: 172845 - DNA, 20 bp, Artificial Sequence
  Synthetic oligonucleotide; CAG chr2 60542107 60542126 60542110 -
tttaaaattatttgcctaga

SEQ ID NO: 172846 - DNA, 20 bp, Artificial Sequence
  Synthetic oligonucleotide; TAG chr2 60542102 60542121 60542105 -
aattatttgcctagacagta

SEQ ID NO: 172847 - DNA, 20 bp, Artificial Sequence
  Synthetic oligonucleotide; TGG chr2 60542098 60542117 60542101 -
atttgcctagacagtatagc

SEQ ID NO: 172848 - DNA, 20 bp, Artificial Sequence
  Synthetic oligonucleotide; TAG chr2 60542091 60542110 60542094 -
tagacagtatagctggtatt

SEQ ID NO: 172849 - DNA, 20 bp, Artificial Sequence
  Synthetic oligonucleotide; CAG chr2 60542076 60542095 60542079 -
gtatttagataatgatatat

SEQ ID NO: 172850 - DNA, 20 bp, Artificial Sequence
  Synthetic oligonucleotide; CAG chr2 60542072 60542091 60542075 -
ttagataatgatatatcaga

SEQ ID NO: 172851 - DNA, 20 bp, Artificial Sequence
  Synthetic oligonucleotide; AAG chr2 60542061 60542080 60542064 -
tatatcagacagatactcta

SEQ ID NO: 172852 - DNA, 20 bp, Artificial Sequence
  Synthetic oligonucleotide; AAG chr2 60542058 60542077 60542061 -
atcagacagatactctaaag

SEQ ID NO: 172853 - DNA, 20 bp, Artificial Sequence
  Synthetic oligonucleotide; AGG chr2 60542057 60542076 60542060 -
tcagacagatactctaaaga

SEQ ID NO: 172854 - DNA, 20 bp, Artificial Sequence
  Synthetic oligonucleotide; GGG chr2 60542056 60542075 60542059 -
cagacagatactctaaagaa

SEQ ID NO: 172855 - DNA, 20 bp, Artificial Sequence
  Synthetic oligonucleotide; GAG chr2 60542054 60542073 60542057 -
gacagatactctaaagaagg

SEQ ID NO: 172856 - DNA, 20 bp, Artificial Sequence
  Synthetic oligonucleotide; TAG chr2 60542048 60542067 60542051 -
tactctaaagaagggagata

SEQ ID NO: 172857 - DNA, 20 bp, Artificial Sequence
  Synthetic oligonucleotide; TGG chr2 60542035 60542054 60542038 -
ggagatatagtaattcaaaa

SEQ ID NO: 172858 - DNA, 20 bp, Artificial Sequence
  Synthetic oligonucleotide; TAG chr2 60542024 60542043 60542027 -
aattcaaaatggaaatacat

SEQ ID NO: 172859 - DNA, 20 bp, Artificial Sequence
  Synthetic oligonucleotide; AAG chr2 60542010 60542029 60542013 -
atacattagcatgctcttaa

SEQ ID NO: 172860 - DNA, 20 bp, Artificial Sequence
  Synthetic oligonucleotide; CAG chr2 60541984 60542003 60541987 -
atcaaatacaatatgctttt

SEQ ID NO: 172861 - DNA, 20 bp, Artificial Sequence
  Synthetic oligonucleotide; TAG chr2 60541977 60541996 60541980 -
acaatatgcttttcagaatt

SEQ ID NO: 172862 - DNA, 20 bp, Artificial Sequence
  Synthetic oligonucleotide; TAG chr2 60541929 60541948 60541932 -
tatccattctgattctctcc

SEQ ID NO: 172863 - DNA, 20 bp, Artificial Sequence
  Synthetic oligonucleotide; CAG chr2 60541924 60541943 60541927 -
attctgattctctcctagct

SEQ ID NO: 172864 - DNA, 20 bp, Artificial Sequence
  Synthetic oligonucleotide; TGG chr2 60541914 60541933 60541917 -
tctcctagctcagactgaac

SEQ ID NO: 172865 - DNA, 20 bp, Artificial Sequence
  Synthetic oligonucleotide; GAG chr2 60541912 60541931 60541915 -
tcctagctcagactgaactg

SEQ ID NO: 172866 - DNA, 20 bp, Artificial Sequence
  Synthetic oligonucleotide; AGG chr2 60541911 60541930 60541914 -
cctagctcagactgaactgg

SEQ ID NO: 172867 - DNA, 20 bp, Artificial Sequence
  Synthetic oligonucleotide; TGG chr2 60541890 60541909 60541893 -
ggatgtatttgtgtacctta

SEQ ID NO: 172868 - DNA, 20 bp, Artificial Sequence
  Synthetic oligonucleotide; GAG chr2 60541874 60541893 60541877 -
cttatggtgtaattgtaaat

SEQ ID NO: 172869 - DNA, 20 bp, Artificial Sequence
  Synthetic oligonucleotide; TAG chr2 60541860 60541879 60541863 -
gtaaatgagactataaatta

SEQ ID NO: 172870 - DNA, 20 bp, Artificial Sequence
  Synthetic oligonucleotide; AAG chr2 60541785 60541804 60541788 -
ataaaaacgactgacttctg

SEQ ID NO: 172871 - DNA, 20 bp, Artificial Sequence
  Synthetic oligonucleotide; CAG chr2 60541774 60541793 60541777 -
tgacttctgaagtgaatttt

SEQ ID NO: 172872 - DNA, 20 bp, Artificial Sequence
  Synthetic oligonucleotide; TGG chr2 60541769 60541788 60541772 -
tctgaagtgaattttcagca

SEQ ID NO: 172873 - DNA, 20 bp, Artificial Sequence
  Synthetic oligonucleotide; CAG chr2 60541766 60541785 60541769 -
gaagtgaattttcagcatgg

SEQ ID NO: 172874 - DNA, 20 bp, Artificial Sequence
  Synthetic oligonucleotide; TGG chr2 60541723 60541742 60541726 -
taccacaaaaaacaatatac

SEQ ID NO: 172875 - DNA, 20 bp, Artificial Sequence
  Synthetic oligonucleotide; CAG chr2 60541694 60541713 60541697 -
ttttacttaccttcaaaatc

SEQ ID NO: 172876 - DNA, 20 bp, Artificial Sequence
  Synthetic oligonucleotide; GAG chr2 60541692 60541711 60541695 -
ttacttaccttcaaaatcca

SEQ ID NO: 172877 - DNA, 20 bp, Artificial Sequence
  Synthetic oligonucleotide; GAG chr2 60541690 60541709 60541693 -
acttaccttcaaaatccaga

SEQ ID NO: 172878 - DNA, 20 bp, Artificial Sequence
  Synthetic oligonucleotide; TAG chr2 60541687 60541706 60541690 -
taccttcaaaatccagagag

SEQ ID NO: 172879 - DNA, 20 bp, Artificial Sequence
  Synthetic oligonucleotide; GAG chr2 60541685 60541704 60541688 -
ccttcaaaatccagagagta

SEQ ID NO: 172880 - DNA, 20 bp, Artificial Sequence
  Synthetic oligonucleotide; AAG chr2 60541666 60541685 60541669 -
agagaatattgttttctaat

SEQ ID NO: 172881 - DNA, 20 bp, Artificial Sequence
  Synthetic oligonucleotide; TAG chr2 60541659 60541678 60541662 -
attgttttctaataagtacc

SEQ ID NO: 172882 - DNA, 20 bp, Artificial Sequence
  Synthetic oligonucleotide; AGG chr2 60541658 60541677 60541661 -
ttgttttctaataagtacct

SEQ ID NO: 172883 - DNA, 20 bp, Artificial Sequence
  Synthetic oligonucleotide; TAG chr2 60541648 60541667 60541651 -
ataagtacctaggattttca

SEQ ID NO: 172884 - DNA, 20 bp, Artificial Sequence
  Synthetic oligonucleotide; AGG chr2 60541647 60541666 60541650 -
taagtacctaggattttcat

SEQ ID NO: 172885 - DNA, 20 bp, Artificial Sequence
  Synthetic oligonucleotide; GGG chr2 60541646 60541665 60541649 -
aagtacctaggattttcata

SEQ ID NO: 172886 - DNA, 20 bp, Artificial Sequence
  Synthetic oligonucleotide; GAG chr2 60541644 60541663 60541647 -
gtacctaggattttcatagg

SEQ ID NO: 172887 - DNA, 20 bp, Artificial Sequence
  Synthetic oligonucleotide; GAG chr2 60541630 60541649 60541633 -
catagggagcctatgtttgt

SEQ ID NO: 172888 - DNA, 20 bp, Artificial Sequence
  Synthetic oligonucleotide; AGG chr2 60541629 60541648 60541632 -
atagggagcctatgtttgtg

SEQ ID NO: 172889 - DNA, 20 bp, Artificial Sequence
  Synthetic oligonucleotide; AAG chr2 60541616 60541635 60541619 -
gtttgtgaggccactatcca

SEQ ID NO: 172890 - DNA, 20 bp, Artificial Sequence
  Synthetic oligonucleotide; TGG chr2 60541596 60541615 60541599 -
aagactaatgttcatgaaac

SEQ ID NO: 172891 - DNA, 20 bp, Artificial Sequence
  Synthetic oligonucleotide; GGG chr2 60541595 60541614 60541598 -
agactaatgttcatgaaact

SEQ ID NO: 172892 - DNA, 20 bp, Artificial Sequence
  Synthetic oligonucleotide; GAG chr2 60541593 60541612 60541596 -
actaatgttcatgaaactgg

SEQ ID NO: 172893 - DNA, 20 bp, Artificial Sequence
  Synthetic oligonucleotide; AAG chr2 60541580 60541599 60541583 -
aaactgggagtcctatatac

SEQ ID NO: 172894 - DNA, 20 bp, Artificial Sequence
  Synthetic oligonucleotide; AAG chr2 60541563 60541582 60541566 -
tacaagctgtatttgtaaat

SEQ ID NO: 172895 - DNA, 20 bp, Artificial Sequence
  Synthetic oligonucleotide; CAG chr2 60541559 60541578 60541562 -
agctgtatttgtaaataaga

SEQ ID NO: 172896 - DNA, 20 bp, Artificial Sequence
  Synthetic oligonucleotide; GAG chr2 60541557 60541576 60541560 -
ctgtatttgtaaataagaca

SEQ ID NO: 172897 - DNA, 20 bp, Artificial Sequence
  Synthetic oligonucleotide; AAG chr2 60541553 60541572 60541556 -
atttgtaaataagacagaga

SEQ ID NO: 172898 - DNA, 20 bp, Artificial Sequence
  Synthetic oligonucleotide; AGG chr2 60541552 60541571 60541555 -
tttgtaaataagacagagaa

SEQ ID NO: 172899 - DNA, 20 bp, Artificial Sequence
  Synthetic oligonucleotide; TGG chr2 60541541 60541560 60541544 -
gacagagaaaggttgtgaac

SEQ ID NO: 172900 - DNA, 20 bp, Artificial Sequence
  Synthetic oligonucleotide; CAG chr2 60541538 60541557 60541541 -
agagaaaggttgtgaactgg

SEQ ID NO: 172901 - DNA, 20 bp, Artificial Sequence
  Synthetic oligonucleotide; TGG chr2 60541533 60541552 60541536 -
aaggttgtgaactggcagct

SEQ ID NO: 172902 - DNA, 20 bp, Artificial Sequence
  Synthetic oligonucleotide; AAG chr2 60541519 60541538 60541522 -
gcagcttggatgttttgtca

SEQ ID NO: 172903 - DNA, 20 bp, Artificial Sequence
  Synthetic oligonucleotide; CAG chr2 60541508 60541527 60541511 -
gttttgtcaaagtacaatgt

SEQ ID NO: 172904 - DNA, 20 bp, Artificial Sequence
  Synthetic oligonucleotide; GAG chr2 60541506 60541525 60541509 -
tttgtcaaagtacaatgtca

SEQ ID NO: 172905 - DNA, 20 bp, Artificial Sequence
  Synthetic oligonucleotide; AAG chr2 60541492 60541511 60541495 -
atgtcagagaaactctttct

SEQ ID NO: 172906 - DNA, 20 bp, Artificial Sequence
  Synthetic oligonucleotide; TAG chr2 60541477 60541496 60541480 -
tttctaagacaaattgtaaa

SEQ ID NO: 172907 - DNA, 20 bp, Artificial Sequence
  Synthetic oligonucleotide; CAG chr2 60541466 60541485 60541469 -
aattgtaaatagaactgtca

SEQ ID NO: 172908 - DNA, 20 bp, Artificial Sequence
  Synthetic oligonucleotide; GAG chr2 60541450 60541469 60541453 -
gtcacagtgattgcatgatt

SEQ ID NO: 172909 - DNA, 20 bp, Artificial Sequence
  Synthetic oligonucleotide; CAG chr2 60541444 60541463 60541447 -
gtgattgcatgattgagccg

SEQ ID NO: 172910 - DNA, 20 bp, Artificial Sequence
  Synthetic oligonucleotide; AAG chr2 60541441 60541460 60541444 -
attgcatgattgagccgcag

SEQ ID NO: 172911 - DNA, 20 bp, Artificial Sequence
  Synthetic oligonucleotide; TGG chr2 60541424 60541443 60541427 -
cagaagtgtcctacaattgt

SEQ ID NO: 172912 - DNA, 20 bp, Artificial Sequence
  Synthetic oligonucleotide; CAG chr2 60541415 60541434 60541418 -
cctacaattgttggcattgt

SEQ ID NO: 172913 - DNA, 20 bp, Artificial Sequence
  Synthetic oligonucleotide; AGG chr2 60541414 60541433 60541417 -
ctacaattgttggcattgtc

SEQ ID NO: 172914 - DNA, 20 bp, Artificial Sequence
  Synthetic oligonucleotide; AAG chr2 60541403 60541422 60541406 -
ggcattgtcaggacttttga

SEQ ID NO: 172915 - DNA, 20 bp, Artificial Sequence
  Synthetic oligonucleotide; CAG chr2 60541388 60541407 60541391 -
tttgaaagcttaattaaaca

SEQ ID NO: 172916 - DNA, 20 bp, Artificial Sequence
  Synthetic oligonucleotide; TGG chr2 60541385 60541404 60541388 -
gaaagcttaattaaacacag

SEQ ID NO: 172917 - DNA, 20 bp, Artificial Sequence
  Synthetic oligonucleotide; TGG chr2 60541376 60541395 60541379 -
attaaacacagtggcccgca

SEQ ID NO: 172918 - DNA, 20 bp, Artificial Sequence
  Synthetic oligonucleotide; AAG chr2 60541359 60541378 60541362 -
gcatggctgctaaacttact

SEQ ID NO: 172919 - DNA, 20 bp, Artificial Sequence
  Synthetic oligonucleotide; AGG chr2 60541358 60541377 60541361 -
catggctgctaaacttacta

SEQ ID NO: 172920 - DNA, 20 bp, Artificial Sequence
  Synthetic oligonucleotide; AAG chr2 60541354 60541373 60541357 -
gctgctaaacttactaagga

SEQ ID NO: 172921 - DNA, 20 bp, Artificial Sequence
  Synthetic oligonucleotide; AAG chr2 60541347 60541366 60541350 -
aacttactaaggaaagccaa

SEQ ID NO: 172922 - DNA, 20 bp, Artificial Sequence
  Synthetic oligonucleotide; AGG chr2 60541346 60541365 60541349 -
acttactaaggaaagccaaa

SEQ ID NO: 172923 - DNA, 20 bp, Artificial Sequence
  Synthetic oligonucleotide; TAG chr2 60541320 60541339 60541323 -
aaaaaaatatatctaaaatg

SEQ ID NO: 172924 - DNA, 20 bp, Artificial Sequence
  Synthetic oligonucleotide; AAG chr2 60541317 60541336 60541320 -
aaaatatatctaaaatgtag

SEQ ID NO: 172925 - DNA, 20 bp, Artificial Sequence
  Synthetic oligonucleotide; AAG chr2 60541308 60541327 60541311 -
ctaaaatgtagaagatccta

SEQ ID NO: 172926 - DNA, 20 bp, Artificial Sequence
  Synthetic oligonucleotide; CAG chr2 60541291 60541310 60541294 -
ctaaagatcccaaacttctt

SEQ ID NO: 172927 - DNA, 20 bp, Artificial Sequence
  Synthetic oligonucleotide; TGG chr2 60541276 60541295 60541279 -
ttcttcagacattacccttg

SEQ ID NO: 172928 - DNA, 20 bp, Artificial Sequence
  Synthetic oligonucleotide; CAG chr2 60541268 60541287 60541271 -
acattacccttgtggtgaca

SEQ ID NO: 172929 - DNA, 20 bp, Artificial Sequence
  Synthetic oligonucleotide; AAG chr2 60541263 60541282 60541266 -
acccttgtggtgacacagaa

SEQ ID NO: 172930 - DNA, 20 bp, Artificial Sequence
  Synthetic oligonucleotide; TAG chr2 60541242 60541261 60541245 -
agatgcattgtgcattttcc

SEQ ID NO: 172931 - DNA, 20 bp, Artificial Sequence
  Synthetic oligonucleotide; GAG chr2 60541216 60541235 60541219 -
tcttttataaataatgtttt

SEQ ID NO: 172932 - DNA, 20 bp, Artificial Sequence
  Synthetic oligonucleotide; TAG chr2 60541211 60541230 60541214 -
tataaataatgttttgagaa

SEQ ID NO: 172933 - DNA, 20 bp, Artificial Sequence
  Synthetic oligonucleotide; AGG chr2 60541210 60541229 60541213 -
ataaataatgttttgagaat

SEQ ID NO: 172934 - DNA, 20 bp, Artificial Sequence
  Synthetic oligonucleotide; AAG chr2 60541194 60541213 60541197 -
gaataggtccacgtgatatg

SEQ ID NO: 172935 - DNA, 20 bp, Artificial Sequence
  Synthetic oligonucleotide; TGG chr2 60541173 60541192 60541176 -
agatcatcctgtgtgtgatg

SEQ ID NO: 172936 - DNA, 20 bp, Artificial Sequence
  Synthetic oligonucleotide; GAG chr2 60541171 60541190 60541174 -
atcatcctgtgtgtgatgtg

SEQ ID NO: 172937 - DNA, 20 bp, Artificial Sequence
  Synthetic oligonucleotide; TAG chr2 60541161 60541180 60541164 -
gtgtgatgtggagattgtgt

SEQ ID NO: 172938 - DNA, 20 bp, Artificial Sequence
  Synthetic oligonucleotide; CAG chr2 60541137 60541156 60541140 -
ttttctgtctcctgctgtta

SEQ ID NO: 172939 - DNA, 20 bp, Artificial Sequence
  Synthetic oligonucleotide; CAG chr2 60541133 60541152 60541136 -
ctgtctcctgctgttacaga

SEQ ID NO: 172940 - DNA, 20 bp, Artificial Sequence
  Synthetic oligonucleotide; TGG chr2 60541118 60541137 60541121 -
acagacagttaatgtaaaaa

SEQ ID NO: 172941 - DNA, 20 bp, Artificial Sequence
  Synthetic oligonucleotide; TGG chr2 60541107 60541126 60541110 -
atgtaaaaatggccttttat

SEQ ID NO: 172942 - DNA, 20 bp, Artificial Sequence
  Synthetic oligonucleotide; AAG chr2 60541081 60541100 60541084 -
cacaaatatgtattcacttc

SEQ ID NO: 172943 - DNA, 20 bp, Artificial Sequence
  Synthetic oligonucleotide; CAG chr2 60541076 60541095 60541079 -
atatgtattcacttcaagaa

SEQ ID NO: 172944 - DNA, 20 bp, Artificial Sequence
  Synthetic oligonucleotide; AGG chr2 60541075 60541094 60541078 -
tatgtattcacttcaagaac

SEQ ID NO: 172945 - DNA, 20 bp, Artificial Sequence
  Synthetic oligonucleotide; GAG chr2 60541073 60541092 60541076 -
tgtattcacttcaagaacag

SEQ ID NO: 172946 - DNA, 20 bp, Artificial Sequence
  Synthetic oligonucleotide; CAG chr2 60541070 60541089 60541073 -
attcacttcaagaacaggag

SEQ ID NO: 172947 - DNA, 20 bp, Artificial Sequence
  Synthetic oligonucleotide; GAG chr2 60541068 60541087 60541071 -
tcacttcaagaacaggagca

SEQ ID NO: 172948 - DNA, 20 bp, Artificial Sequence
  Synthetic oligonucleotide; AGG chr2 60541067 60541086 60541070 -
cacttcaagaacaggagcag

SEQ ID NO: 172949 - DNA, 20 bp, Artificial Sequence
  Synthetic oligonucleotide; GGG chr2 60541066 60541085 60541069 -
acttcaagaacaggagcaga

SEQ ID NO: 172950 - DNA, 20 bp, Artificial Sequence
  Synthetic oligonucleotide; GGG chr2 60541065 60541084 60541068 -
cttcaagaacaggagcagag

SEQ ID NO: 172951 - DNA, 20 bp, Artificial Sequence
  Synthetic oligonucleotide; GGG chr2 60541064 60541083 60541067 -
ttcaagaacaggagcagagg

SEQ ID NO: 172952 - DNA, 20 bp, Artificial Sequence
  Synthetic oligonucleotide; AAG chr2 60541058 60541077 60541061 -
aacaggagcagagggggaca

SEQ ID NO: 172953 - DNA, 20 bp, Artificial Sequence
  Synthetic oligonucleotide; AAG chr2 60541023 60541042 60541026 -
tctctgtgtttattctgtga

SEQ ID NO: 172954 - DNA, 20 bp, Artificial Sequence
  Synthetic oligonucleotide; CAG chr2 60540943 60540962 60540946 -
cacacacacacacacaaaac

SEQ ID NO: 172955 - DNA, 20 bp, Artificial Sequence
  Synthetic oligonucleotide; AAG chr2 60540899 60540918 60540902 -
cccattccttgttgtgttgc

SEQ ID NO: 172956 - DNA, 20 bp, Artificial Sequence
  Synthetic oligonucleotide; AAG chr2 60540880 60540899 60540883 -
caagttgtgcctttactata

SEQ ID NO: 172957 - DNA, 20 bp, Artificial Sequence
  Synthetic oligonucleotide; AGG chr2 60540879 60540898 60540882 -
aagttgtgcctttactataa

SEQ ID NO: 172958 - DNA, 20 bp, Artificial Sequence
  Synthetic oligonucleotide; TAG chr2 60540846 60540865 60540849 -
tgttttgcacacctttctct

SEQ ID NO: 172959 - DNA, 20 bp, Artificial Sequence
  Synthetic oligonucleotide; TGG chr2 60540837 60540856 60540840 -
cacctttctcttagtgaatg

SEQ ID NO: 172960 - DNA, 20 bp, Artificial Sequence
  Synthetic oligonucleotide; TGG chr2 60540824 60540843 60540827 -
gtgaatgtggcatataattg

SEQ ID NO: 172961 - DNA, 20 bp, Artificial Sequence
  Synthetic oligonucleotide; GAG chr2 60540822 60540841 60540825 -
gaatgtggcatataattgtg

SEQ ID NO: 172962 - DNA, 20 bp, Artificial Sequence
  Synthetic oligonucleotide; TGG chr2 60540812 60540831 60540815 -
tataattgtggagctgcaca

SEQ ID NO: 172963 - DNA, 20 bp, Artificial Sequence
  Synthetic oligonucleotide; GGG chr2 60540811 60540830 60540814 -
ataattgtggagctgcacat

SEQ ID NO: 172964 - DNA, 20 bp, Artificial Sequence
  Synthetic oligonucleotide; TGG chr2 60540807 60540826 60540810 -
ttgtggagctgcacatgggc

SEQ ID NO: 172965 - DNA, 20 bp, Artificial Sequence
  Synthetic oligonucleotide; TGG chr2 60540794 60540813 60540797 -
catgggctggaaaatgcaac

SEQ ID NO: 172966 - DNA, 20 bp, Artificial Sequence
  Synthetic oligonucleotide; GGG chr2 60540793 60540812 60540796 -
atgggctggaaaatgcaact

SEQ ID NO: 172967 - DNA, 20 bp, Artificial Sequence
  Synthetic oligonucleotide; TAG chr2 60540788 60540807 60540791 -
ctggaaaatgcaactgggtg

SEQ ID NO: 172968 - DNA, 20 bp, Artificial Sequence
  Synthetic oligonucleotide; CAG chr2 60540778 60540797 60540781 -
caactgggtgtagaaacgtg

SEQ ID NO: 172969 - DNA, 20 bp, Artificial Sequence
  Synthetic oligonucleotide; AGG chr2 60540777 60540796 60540780 -
aactgggtgtagaaacgtgc

SEQ ID NO: 172970 - DNA, 20 bp, Artificial Sequence
  Synthetic oligonucleotide; CAG chr2 60540774 60540793 60540777 -
tgggtgtagaaacgtgcagg

SEQ ID NO: 172971 - DNA, 20 bp, Artificial Sequence
  Synthetic oligonucleotide; AGG chr2 60540773 60540792 60540776 -
gggtgtagaaacgtgcaggc

SEQ ID NO: 172972 - DNA, 20 bp, Artificial Sequence
  Synthetic oligonucleotide; GGG chr2 60540772 60540791 60540775 -
ggtgtagaaacgtgcaggca

SEQ ID NO: 172973 - DNA, 20 bp, Artificial Sequence
  Synthetic oligonucleotide; CAG chr2 60540768 60540787 60540771 -
tagaaacgtgcaggcagggt

SEQ ID NO: 172974 - DNA, 20 bp, Artificial Sequence
  Synthetic oligonucleotide; AGG chr2 60540767 60540786 60540770 -
agaaacgtgcaggcagggtc

SEQ ID NO: 172975 - DNA, 20 bp, Artificial Sequence
  Synthetic oligonucleotide; CAG chr2 60540763 60540782 60540766 -
acgtgcaggcagggtcagga

SEQ ID NO: 172976 - DNA, 20 bp, Artificial Sequence
  Synthetic oligonucleotide; AGG chr2 60540762 60540781 60540765 -
cgtgcaggcagggtcaggac

SEQ ID NO: 172977 - DNA, 20 bp, Artificial Sequence
  Synthetic oligonucleotide; CAG chr2 60540752 60540771 60540755 -
gggtcaggacaggcaacctt

SEQ ID NO: 172978 - DNA, 20 bp, Artificial Sequence
  Synthetic oligonucleotide; CAG chr2 60540747 60540766 60540750 -
aggacaggcaaccttcagct

SEQ ID NO: 172979 - DNA, 20 bp, Artificial Sequence
  Synthetic oligonucleotide; AGG chr2 60540746 60540765 60540749 -
ggacaggcaaccttcagctc

SEQ ID NO: 172980 - DNA, 20 bp, Artificial Sequence
  Synthetic oligonucleotide; GGG chr2 60540745 60540764 60540748 -
gacaggcaaccttcagctca

SEQ ID NO: 172981 - DNA, 20 bp, Artificial Sequence
  Synthetic oligonucleotide; GAG chr2 60540743 60540762 60540746 -
caggcaaccttcagctcagg

SEQ ID NO: 172982 - DNA, 20 bp, Artificial Sequence
  Synthetic oligonucleotide; AGG chr2 60540742 60540761 60540745 -
aggcaaccttcagctcaggg

SEQ ID NO: 172983 - DNA, 20 bp, Artificial Sequence
  Synthetic oligonucleotide; GAG chr2 60540740 60540759 60540743 -
gcaaccttcagctcagggag

SEQ ID NO: 172984 - DNA, 20 bp, Artificial Sequence
  Synthetic oligonucleotide; AGG chr2 60540739 60540758 60540742 -
caaccttcagctcagggagg

SEQ ID NO: 172985 - DNA, 20 bp, Artificial Sequence
  Synthetic oligonucleotide; GAG chr2 60540735 60540754 60540738 -
cttcagctcagggaggaggc

SEQ ID NO: 172986 - DNA, 20 bp, Artificial Sequence
  Synthetic oligonucleotide; TGG chr2 60540731 60540750 60540734 -
agctcagggaggaggcgagt

SEQ ID NO: 172987 - DNA, 20 bp, Artificial Sequence
  Synthetic oligonucleotide; TGG chr2 60540717 60540736 60540720 -
gcgagttggatgcttattaa

SEQ ID NO: 172988 - DNA, 20 bp, Artificial Sequence
  Synthetic oligonucleotide; TAG chr2 60540707 60540726 60540710 -
tgcttattaatggcatcttt

SEQ ID NO: 172989 - DNA, 20 bp, Artificial Sequence
  Synthetic oligonucleotide; GAG chr2 60540705 60540724 60540708 -
cttattaatggcatctttta

SEQ ID NO: 172990 - DNA, 20 bp, Artificial Sequence
  Synthetic oligonucleotide; TGG chr2 60540699 60540718 60540702 -
aatggcatcttttagagtcc

SEQ ID NO: 172991 - DNA, 20 bp, Artificial Sequence
  Synthetic oligonucleotide; CAG chr2 60540675 60540694 60540678 -
aaatcattaatttcacactg

SEQ ID NO: 172992 - DNA, 20 bp, Artificial Sequence
  Synthetic oligonucleotide; TAG chr2 60540664 60540683 60540667 -
ttcacactgcagcttccatg

SEQ ID NO: 172993 - DNA, 20 bp, Artificial Sequence
  Synthetic oligonucleotide; TGG chr2 60540659 60540678 60540662 -
actgcagcttccatgtagtt

SEQ ID NO: 172994 - DNA, 20 bp, Artificial Sequence
  Synthetic oligonucleotide; TGG chr2 60540650 60540669 60540653 -
tccatgtagtttggctaatg

SEQ ID NO: 172995 - DNA, 20 bp, Artificial Sequence
  Synthetic oligonucleotide; GGG chr2 60540649 60540668 60540652 -
ccatgtagtttggctaatgt

SEQ ID NO: 172996 - DNA, 20 bp, Artificial Sequence
  Synthetic oligonucleotide; GAG chr2 60540647 60540666 60540650 -
atgtagtttggctaatgtgg

SEQ ID NO: 172997 - DNA, 20 bp, Artificial Sequence
  Synthetic oligonucleotide; TGG chr2 60540636 60540655 60540639 -
ctaatgtgggagtactaaat

SEQ ID NO: 172998 - DNA, 20 bp, Artificial Sequence
  Synthetic oligonucleotide; GGG chr2 60540635 60540654 60540638 -
taatgtgggagtactaaatt

SEQ ID NO: 172999 - DNA, 20 bp, Artificial Sequence
  Synthetic oligonucleotide; GGG chr2 60540634 60540653 60540637 -
aatgtgggagtactaaattg

SEQ ID NO: 173000 - DNA, 20 bp, Artificial Sequence
  Synthetic oligonucleotide; TAG chr2 60540609 60540628 60540612 -
cataaaaaacatgcaaatcc

SEQ ID NO: 173001 - DNA, 20 bp, Artificial Sequence
  Synthetic oligonucleotide; AGG chr2 60540608 60540627 60540611 -
ataaaaaacatgcaaatcct

SEQ ID NO: 173002 - DNA, 20 bp, Artificial Sequence
  Synthetic oligonucleotide; GGG chr2 60540607 60540626 60540610 -
taaaaaacatgcaaatccta

SEQ ID NO: 173003 - DNA, 20 bp, Artificial Sequence
  Synthetic oligonucleotide; TAG chr2 60540594 60540613 60540597 -
aatcctagggaaacattttt

SEQ ID NO: 173004 - DNA, 20 bp, Artificial Sequence
  Synthetic oligonucleotide; AAG chr2 60540558 60540577 60540561 -
ctcaatgaaaatgtttaata

SEQ ID NO: 173005 - DNA, 20 bp, Artificial Sequence
  Synthetic oligonucleotide; AGG chr2 60540557 60540576 60540560 -
tcaatgaaaatgtttaataa

SEQ ID NO: 173006 - DNA, 20 bp, Artificial Sequence
  Synthetic oligonucleotide; GAG chr2 60540555 60540574 60540558 -
aatgaaaatgtttaataaag

SEQ ID NO: 173007 - DNA, 20 bp, Artificial Sequence
  Synthetic oligonucleotide; TAG chr2 60540550 60540569 60540553 -
aaatgtttaataaaggagaa

SEQ ID NO: 173008 - DNA, 20 bp, Artificial Sequence
  Synthetic oligonucleotide; AGG chr2 60540549 60540568 60540552 -
aatgtttaataaaggagaat

SEQ ID NO: 173009 - DNA, 20 bp, Artificial Sequence
  Synthetic oligonucleotide; TGG chr2 60540542 60540561 60540545 -
aataaaggagaataggtgaa

SEQ ID NO: 173010 - DNA, 20 bp, Artificial Sequence
  Synthetic oligonucleotide; TGG chr2 60540539 60540558 60540542 -
aaaggagaataggtgaatgg

SEQ ID NO: 173011 - DNA, 20 bp, Artificial Sequence
  Synthetic oligonucleotide; TGG chr2 60540526 60540545 60540529 -
tgaatggtggctttgcgtgc

SEQ ID NO: 173012 - DNA, 20 bp, Artificial Sequence
  Synthetic oligonucleotide; CAG chr2 60540522 60540541 60540525 -
tggtggctttgcgtgctggt

SEQ ID NO: 173013 - DNA, 20 bp, Artificial Sequence
  Synthetic oligonucleotide; AAG chr2 60540518 60540537 60540521 -
ggctttgcgtgctggtcagt

SEQ ID NO: 173014 - DNA, 20 bp, Artificial Sequence
  Synthetic oligonucleotide; AAG chr2 60540514 60540533 60540517 -
ttgcgtgctggtcagtaaga

SEQ ID NO: 173015 - DNA, 20 bp, Artificial Sequence
  Synthetic oligonucleotide; AGG chr2 60540513 60540532 60540516 -
tgcgtgctggtcagtaagaa

SEQ ID NO: 173016 - DNA, 20 bp, Artificial Sequence
  Synthetic oligonucleotide; TGG chr2 60540500 60540519 60540503 -
gtaagaaaggaaacaaattt

SEQ ID NO: 173017 - DNA, 20 bp, Artificial Sequence
  Synthetic oligonucleotide; TGG chr2 60540489 60540508 60540492 -
aacaaattttggctttcctt

SEQ ID NO: 173018 - DNA, 20 bp, Artificial Sequence
  Synthetic oligonucleotide; GGG chr2 60540488 60540507 60540491 -
acaaattttggctttccttt

SEQ ID NO: 173019 - DNA, 20 bp, Artificial Sequence
  Synthetic oligonucleotide; GGG chr2 60540487 60540506 60540490 -
caaattttggctttcctttg

SEQ ID NO: 173020 - DNA, 20 bp, Artificial Sequence
  Synthetic oligonucleotide; GGG chr2 60540486 60540505 60540489 -
aaattttggctttcctttgg

SEQ ID NO: 173021 - DNA, 20 bp, Artificial Sequence
  Synthetic oligonucleotide; GGG chr2 60540485 60540504 60540488 -
aattttggctttcctttggg

SEQ ID NO: 173022 - DNA, 20 bp, Artificial Sequence
  Synthetic oligonucleotide; AAG chr2 60540464 60540483 60540467 -
ggaaatattaaatttaaccg

SEQ ID NO: 173023 - DNA, 20 bp, Artificial Sequence
  Synthetic oligonucleotide; TAG chr2 60540461 60540480 60540464 -
aatattaaatttaaccgaag

SEQ ID NO: 173024 - DNA, 20 bp, Artificial Sequence
  Synthetic oligonucleotide; AAG chr2 60540457 60540476 60540460 -
ttaaatttaaccgaagtaga

SEQ ID NO: 173025 - DNA, 20 bp, Artificial Sequence
  Synthetic oligonucleotide; CAG chr2 60540452 60540471 60540455 -
tttaaccgaagtagaaagca

SEQ ID NO: 173026 - DNA, 20 bp, Artificial Sequence
  Synthetic oligonucleotide; TAG chr2 60540448 60540467 60540451 -
accgaagtagaaagcacagc

SEQ ID NO: 173027 - DNA, 20 bp, Artificial Sequence
  Synthetic oligonucleotide; AGG chr2 60540447 60540466 60540450 -
ccgaagtagaaagcacagct

SEQ ID NO: 173028 - DNA, 20 bp, Artificial Sequence
  Synthetic oligonucleotide; GGG chr2 60540446 60540465 60540449 -
cgaagtagaaagcacagcta

SEQ ID NO: 173029 - DNA, 20 bp, Artificial Sequence
  Synthetic oligonucleotide; GAG chr2 60540444 60540463 60540447 -
aagtagaaagcacagctagg

SEQ ID NO: 173030 - DNA, 20 bp, Artificial Sequence
  Synthetic oligonucleotide; AAG chr2 60540434 60540453 60540437 -
cacagctagggagatgcacc

SEQ ID NO: 173031 - DNA, 20 bp, Artificial Sequence
  Synthetic oligonucleotide; TGG chr2 60540421 60540440 60540424 -
atgcaccaagattgcgtcac

SEQ ID NO: 173032 - DNA, 20 bp, Artificial Sequence
  Synthetic oligonucleotide; TGG chr2 60540399 60540418 60540402 -
gatgttaatttaatctactt

SEQ ID NO: 173033 - DNA, 20 bp, Artificial Sequence
  Synthetic oligonucleotide; TGG chr2 60540395 60540414 60540398 -
ttaatttaatctactttggt

SEQ ID NO: 173034 - DNA, 20 bp, Artificial Sequence
  Synthetic oligonucleotide; AAG chr2 60540368 60540387 60540371 -
ttcacaccctttattgcaca

SEQ ID NO: 173035 - DNA, 20 bp, Artificial Sequence
  Synthetic oligonucleotide; AAG chr2 60540365 60540384 60540368 -
acaccctttattgcacaaag

SEQ ID NO: 173036 - DNA, 20 bp, Artificial Sequence
  Synthetic oligonucleotide; AAG chr2 60540341 60540360 60540344 -
catttgacaaaatttacccc

SEQ ID NO: 173037 - DNA, 20 bp, Artificial Sequence
  Synthetic oligonucleotide; AAG chr2 60540335 60540354 60540338 -
acaaaatttaccccaagccc

SEQ ID NO: 173038 - DNA, 20 bp, Artificial Sequence
  Synthetic oligonucleotide; CAG chr2 60540318 60540337 60540321 -
cccaagtctgtttttacata

SEQ ID NO: 173039 - DNA, 20 bp, Artificial Sequence
  Synthetic oligonucleotide; TAG chr2 60540315 60540334 60540318 -
aagtctgtttttacatacag

SEQ ID NO: 173040 - DNA, 20 bp, Artificial Sequence
  Synthetic oligonucleotide; CAG chr2 60540309 60540328 60540312 -
gtttttacatacagtagtac

SEQ ID NO: 173041 - DNA, 20 bp, Artificial Sequence
  Synthetic oligonucleotide; AAG chr2 60540292 60540311 60540295 -
taccagctttgtgcaataaa

SEQ ID NO: 173042 - DNA, 20 bp, Artificial Sequence
  Synthetic oligonucleotide; TAG chr2 60540285 60540304 60540288 -
tttgtgcaataaaaagcact

SEQ ID NO: 173043 - DNA, 20 bp, Artificial Sequence
  Synthetic oligonucleotide; AAG chr2 60540278 60540297 60540281 -
aataaaaagcacttagcatc

SEQ ID NO: 173044 - DNA, 20 bp, Artificial Sequence
  Synthetic oligonucleotide; TGG chr2 60540274 60540293 60540277 -
aaaagcacttagcatcaagc

SEQ ID NO: 173045 - DNA, 20 bp, Artificial Sequence
  Synthetic oligonucleotide; CAG chr2 60540268 60540287 60540271 -
acttagcatcaagctggacc

SEQ ID NO: 173046 - DNA, 20 bp, Artificial Sequence
  Synthetic oligonucleotide; TGG chr2 60540263 60540282 60540266 -
gcatcaagctggacccagcc

SEQ ID NO: 173047 - DNA, 20 bp, Artificial Sequence
  Synthetic oligonucleotide; TAG chr2 60540244 60540263 60540247 -
ctggcaccttgccacttttt

SEQ ID NO: 173048 - DNA, 20 bp, Artificial Sequence
  Synthetic oligonucleotide; GAG chr2 60540238 60540257 60540241 -
ccttgccacttttttagcat

SEQ ID NO: 173049 - DNA, 20 bp, Artificial Sequence
  Synthetic oligonucleotide; AAG chr2 60540224 60540243 60540227 -
tagcatgagatttaatcacc

SEQ ID NO: 173050 - DNA, 20 bp, Artificial Sequence
  Synthetic oligonucleotide; TAG chr2 60540215 60540234 60540218 -
atttaatcaccaagcatctt

SEQ ID NO: 173051 - DNA, 20 bp, Artificial Sequence
  Synthetic oligonucleotide; CAG chr2 60540196 60540215 60540199 -
ttagtacctttctgcttgtt

SEQ ID NO: 173052 - DNA, 20 bp, Artificial Sequence
  Synthetic oligonucleotide; TGG chr2 60540185 60540204 60540188 -
ctgcttgttcagatttcatt

SEQ ID NO: 173053 - DNA, 20 bp, Artificial Sequence
  Synthetic oligonucleotide; GGG chr2 60540184 60540203 60540187 -
tgcttgttcagatttcattt

SEQ ID NO: 173054 - DNA, 20 bp, Artificial Sequence
  Synthetic oligonucleotide; TGG chr2 60540178 60540197 60540181 -
ttcagatttcatttgggtca

SEQ ID NO: 173055 - DNA, 20 bp, Artificial Sequence
  Synthetic oligonucleotide; CAG chr2 60540169 60540188 60540172 -
catttgggtcatggctatgt

SEQ ID NO: 173056 - DNA, 20 bp, Artificial Sequence
  Synthetic oligonucleotide; CAG chr2 60540166 60540185 60540169 -
ttgggtcatggctatgtcag

SEQ ID NO: 173057 - DNA, 20 bp, Artificial Sequence
  Synthetic oligonucleotide; AAG chr2 60540151 60540170 60540154 -
gtcagcagtgttgttatttc

SEQ ID NO: 173058 - DNA, 20 bp, Artificial Sequence
  Synthetic oligonucleotide; AGG chr2 60540150 60540169 60540153 -
tcagcagtgttgttatttca

SEQ ID NO: 173059 - DNA, 20 bp, Artificial Sequence
  Synthetic oligonucleotide; AAG chr2 60540137 60540156 60540140 -
tatttcaaggattaaaaaaa

SEQ ID NO: 173060 - DNA, 20 bp, Artificial Sequence
  Synthetic oligonucleotide; TAG chr2 60540125 60540144 60540128 -
taaaaaaaaagattctaact

SEQ ID NO: 173061 - DNA, 20 bp, Artificial Sequence
  Synthetic oligonucleotide; GAG chr2 60540123 60540142 60540126 -
aaaaaaaagattctaactta

SEQ ID NO: 173062 - DNA, 20 bp, Artificial Sequence
  Synthetic oligonucleotide; AAG chr2 60540095 60540114 60540098 -
ttttaacattatttcaaatc

SEQ ID NO: 173063 - DNA, 20 bp, Artificial Sequence
  Synthetic oligonucleotide; CAG chr2 60540092 60540111 60540095 -
taacattatttcaaatcaag

SEQ ID NO: 173064 - DNA, 20 bp, Artificial Sequence
  Synthetic oligonucleotide; AGG chr2 60540091 60540110 60540094 -
aacattatttcaaatcaagc

SEQ ID NO: 173065 - DNA, 20 bp, Artificial Sequence
  Synthetic oligonucleotide; TGG chr2 60540067 60540086 60540070 -
ttttatgttatgtatcaatt

SEQ ID NO: 173066 - DNA, 20 bp, Artificial Sequence
  Synthetic oligonucleotide; AAG chr2 60540052 60540071 60540055 -
caatttggatgacattaatg

SEQ ID NO: 173067 - DNA, 20 bp, Artificial Sequence
  Synthetic oligonucleotide; CAG chr2 60540034 60540053 60540037 -
tgaagttcataaaatatgtt

SEQ ID NO: 173068 - DNA, 20 bp, Artificial Sequence
  Synthetic oligonucleotide; TGG chr2 60540017 60540036 60540020 -
gttcagactatataatttaa

SEQ ID NO: 173069 - DNA, 20 bp, Artificial Sequence
  Synthetic oligonucleotide; TAG chr2 60539982 60540001 60539985 -
atttttatttgtaatacaaa

SEQ ID NO: 173070 - DNA, 20 bp, Artificial Sequence
  Synthetic oligonucleotide; AGG chr2 60539981 60540000 60539984 -
tttttatttgtaatacaaat

SEQ ID NO: 173071 - DNA, 20 bp, Artificial Sequence
  Synthetic oligonucleotide; TGG chr2 60539951 60539970 60539954 -
ctgttgtctccctccctcct

SEQ ID NO: 173072 - DNA, 20 bp, Artificial Sequence
  Synthetic oligonucleotide; TAG chr2 60539933 60539952 60539936 -
cttggttcttttctcctacc

SEQ ID NO: 173073 - DNA, 20 bp, Artificial Sequence
  Synthetic oligonucleotide; AGG chr2 60539932 60539951 60539935 -
ttggttcttttctcctacct

SEQ ID NO: 173074 - DNA, 20 bp, Artificial Sequence
  Synthetic oligonucleotide; TGG chr2 60539925 60539944 60539928 -
ttttctcctacctaggtaaa

SEQ ID NO: 173075 - DNA, 20 bp, Artificial Sequence
  Synthetic oligonucleotide; GGG chr2 60539924 60539943 60539927 -
tttctcctacctaggtaaat

SEQ ID NO: 173076 - DNA, 20 bp, Artificial Sequence
  Synthetic oligonucleotide; CAG chr2 60539911 60539930 60539914 -
ggtaaatgggcatccttaaa

SEQ ID NO: 173077 - DNA, 20 bp, Artificial Sequence
  Synthetic oligonucleotide; CAG chr2 60539891 60539910 60539894 -
cagcttctcccctttacgac

SEQ ID NO: 173078 - DNA, 20 bp, Artificial Sequence
  Synthetic oligonucleotide; AGG chr2 60539890 60539909 60539893 -
agcttctcccctttacgacc

SEQ ID NO: 173079 - DNA, 20 bp, Artificial Sequence
  Synthetic oligonucleotide; GGG chr2 60539889 60539908 60539892 -
gcttctcccctttacgacca

SEQ ID NO: 173080 - DNA, 20 bp, Artificial Sequence
  Synthetic oligonucleotide; TAG chr2 60539884 60539903 60539887 -
tcccctttacgaccagggta

SEQ ID NO: 173081 - DNA, 20 bp, Artificial Sequence
  Synthetic oligonucleotide; GAG chr2 60539882 60539901 60539885 -
ccctttacgaccagggtata

SEQ ID NO: 173082 - DNA, 20 bp, Artificial Sequence
  Synthetic oligonucleotide; TGG chr2 60539876 60539895 60539879 -
acgaccagggtatagagcac

SEQ ID NO: 173083 - DNA, 20 bp, Artificial Sequence
  Synthetic oligonucleotide; CAG chr2 60539866 60539885 60539869 -
tatagagcactggccaatat

SEQ ID NO: 173084 - DNA, 20 bp, Artificial Sequence
  Synthetic oligonucleotide; TAG chr2 60539837 60539856 60539840 -
tacctttgtaatttgccacg

SEQ ID NO: 173085 - DNA, 20 bp, Artificial Sequence
  Synthetic oligonucleotide; GAG chr2 60539808 60539827 60539811 -
caacatgacctaattaattt

SEQ ID NO: 173086 - DNA, 20 bp, Artificial Sequence
  Synthetic oligonucleotide; TGG chr2 60539784 60539803 60539787 -
acgaaccatattattgctac

SEQ ID NO: 173087 - DNA, 20 bp, Artificial Sequence
  Synthetic oligonucleotide; GAG chr2 60539782 60539801 60539785 -
gaaccatattattgctactg

SEQ ID NO: 173088 - DNA, 20 bp, Artificial Sequence
  Synthetic oligonucleotide; CAG chr2 60539753 60539772 60539756 -
tctgtcacaaacttaatttc

SEQ ID NO: 173089 - DNA, 20 bp, Artificial Sequence
  Synthetic oligonucleotide; AGG chr2 60539752 60539771 60539755 -
ctgtcacaaacttaatttcc

SEQ ID NO: 173090 - DNA, 20 bp, Artificial Sequence
  Synthetic oligonucleotide; AAG chr2 60539731 60539750 60539734 -
ggaaatgtaacctgacaaat

SEQ ID NO: 173091 - DNA, 20 bp, Artificial Sequence
  Synthetic oligonucleotide; TAG chr2 60539721 60539740 60539724 -
cctgacaaataagaattctt

SEQ ID NO: 173092 - DNA, 20 bp, Artificial Sequence
  Synthetic oligonucleotide; TAG chr2 60539701 60539720 60539704 -
tagctctctacatgtgctcc

SEQ ID NO: 173093 - DNA, 20 bp, Artificial Sequence
  Synthetic oligonucleotide; GAG chr2 60539699 60539718 60539702 -
gctctctacatgtgctccta

SEQ ID NO: 173094 - DNA, 20 bp, Artificial Sequence
  Synthetic oligonucleotide; AAG chr2 60539692 60539711 60539695 -
acatgtgctcctagagacca

SEQ ID NO: 173095 - DNA, 20 bp, Artificial Sequence
  Synthetic oligonucleotide; AGG chr2 60539691 60539710 60539694 -
catgtgctcctagagaccaa

SEQ ID NO: 173096 - DNA, 20 bp, Artificial Sequence
  Synthetic oligonucleotide; CAG chr2 60539688 60539707 60539691 -
gtgctcctagagaccaaagg

SEQ ID NO: 173097 - DNA, 20 bp, Artificial Sequence
  Synthetic oligonucleotide; AAG chr2 60539662 60539681 60539665 -
taaaataataataattttaa

SEQ ID NO: 173098 - DNA, 20 bp, Artificial Sequence
  Synthetic oligonucleotide; CAG chr2 60539656 60539675 60539659 -
aataataattttaaaagtgc

SEQ ID NO: 173099 - DNA, 20 bp, Artificial Sequence
  Synthetic oligonucleotide; AAG chr2 60539645 60539664 60539648 -
taaaagtgccagcattatta

SEQ ID NO: 173100 - DNA, 20 bp, Artificial Sequence
  Synthetic oligonucleotide; CAG chr2 60539641 60539660 60539644 -
agtgccagcattattaaagc

SEQ ID NO: 173101 - DNA, 20 bp, Artificial Sequence
  Synthetic oligonucleotide; AAG chr2 60539613 60539632 60539616 -
ttgatgccaaactcaatttg

SEQ ID NO: 173102 - DNA, 20 bp, Artificial Sequence
  Synthetic oligonucleotide; CAG chr2 60539609 60539628 60539612 -
tgccaaactcaatttgaagc

SEQ ID NO: 173103 - DNA, 20 bp, Artificial Sequence
  Synthetic oligonucleotide; CAG chr2 60539599 60539618 60539602 -
aatttgaagccagtaaacat

SEQ ID NO: 173104 - DNA, 20 bp, Artificial Sequence
  Synthetic oligonucleotide; CAG chr2 60539582 60539601 60539585 -
catcagactgtatttctaat

SEQ ID NO: 173105 - DNA, 20 bp, Artificial Sequence
  Synthetic oligonucleotide; TGG chr2 60539554 60539573 60539557 -
aaatgtaacttattccatat

SEQ ID NO: 173106 - DNA, 20 bp, Artificial Sequence
  Synthetic oligonucleotide; GGG chr2 60539553 60539572 60539556 -
aatgtaacttattccatatt

SEQ ID NO: 173107 - DNA, 20 bp, Artificial Sequence
  Synthetic oligonucleotide; TGG chr2 60539545 60539564 60539548 -
ttattccatattgggttcat

SEQ ID NO: 173108 - DNA, 20 bp, Artificial Sequence
  Synthetic oligonucleotide; TGG chr2 60539520 60539539 60539523 -
tttgtctccctgctttttac

SEQ ID NO: 173109 - DNA, 20 bp, Artificial Sequence
  Synthetic oligonucleotide; CAG chr2 60539516 60539535 60539519 -
tctccctgctttttactggc

SEQ ID NO: 173110 - DNA, 20 bp, Artificial Sequence
  Synthetic oligonucleotide; CAG chr2 60539483 60539502 60539486 -
tatgcatttttaaaacattt

SEQ ID NO: 173111 - DNA, 20 bp, Artificial Sequence
  Synthetic oligonucleotide; AAG chr2 60539478 60539497 60539481 -
atttttaaaacatttcagca

SEQ ID NO: 173112 - DNA, 20 bp, Artificial Sequence
  Synthetic oligonucleotide; AGG chr2 60539477 60539496 60539480 -
tttttaaaacatttcagcaa

SEQ ID NO: 173113 - DNA, 20 bp, Artificial Sequence
  Synthetic oligonucleotide; TAG chr2 60539461 60539480 60539464 -
gcaaaggcttttgctgttct

SEQ ID NO: 173114 - DNA, 20 bp, Artificial Sequence
  Synthetic oligonucleotide; CAG chr2 60539458 60539477 60539461 -
aaggcttttgctgttcttag

SEQ ID NO: 173115 - DNA, 20 bp, Artificial Sequence
  Synthetic oligonucleotide; AGG chr2 60539457 60539476 60539460 -
aggcttttgctgttcttagc

SEQ ID NO: 173116 - DNA, 20 bp, Artificial Sequence
  Synthetic oligonucleotide; GGG chr2 60539456 60539475 60539459 -
ggcttttgctgttcttagca

SEQ ID NO: 173117 - DNA, 20 bp, Artificial Sequence
  Synthetic oligonucleotide; TAG chr2 60539452 60539471 60539455 -
tttgctgttcttagcagggt

SEQ ID NO: 173118 - DNA, 20 bp, Artificial Sequence
  Synthetic oligonucleotide; TGG chr2 60539444 60539463 60539447 -
tcttagcagggttagtaact

SEQ ID NO: 173119 - DNA, 20 bp, Artificial Sequence
  Synthetic oligonucleotide; GGG chr2 60539443 60539462 60539446 -
cttagcagggttagtaactt

SEQ ID NO: 173120 - DNA, 20 bp, Artificial Sequence
  Synthetic oligonucleotide; GGG chr2 60539442 60539461 60539445 -
ttagcagggttagtaacttg

SEQ ID NO: 173121 - DNA, 20 bp, Artificial Sequence
  Synthetic oligonucleotide; GAG chr2 60539430 60539449 60539433 -
gtaacttggggtctatttct

SEQ ID NO: 173122 - DNA, 20 bp, Artificial Sequence
  Synthetic oligonucleotide; TGG chr2 60539408 60539427 60539411 -
gctcattcgtcattctgcaa

SEQ ID NO: 173123 - DNA, 20 bp, Artificial Sequence
  Synthetic oligonucleotide; GAG chr2 60539401 60539420 60539404 -
cgtcattctgcaatggcatt

SEQ ID NO: 173124 - DNA, 20 bp, Artificial Sequence
  Synthetic oligonucleotide; TAG chr2 60539397 60539416 60539400 -
attctgcaatggcattgagt

SEQ ID NO: 173125 - DNA, 20 bp, Artificial Sequence
  Synthetic oligonucleotide; AGG chr2 60539396 60539415 60539399 -
ttctgcaatggcattgagtt

SEQ ID NO: 173126 - DNA, 20 bp, Artificial Sequence
  Synthetic oligonucleotide; TGG chr2 60539392 60539411 60539395 -
gcaatggcattgagttaggt

SEQ ID NO: 173127 - DNA, 20 bp, Artificial Sequence
  Synthetic oligonucleotide; AAG chr2 60539388 60539407 60539391 -
tggcattgagttaggttggc

SEQ ID NO: 173128 - DNA, 20 bp, Artificial Sequence
  Synthetic oligonucleotide; AGG chr2 60539387 60539406 60539390 -
ggcattgagttaggttggca

SEQ ID NO: 173129 - DNA, 20 bp, Artificial Sequence
  Synthetic oligonucleotide; GGG chr2 60539386 60539405 60539389 -
gcattgagttaggttggcaa

SEQ ID NO: 173130 - DNA, 20 bp, Artificial Sequence
  Synthetic oligonucleotide; AAG chr2 60539383 60539402 60539386 -
ttgagttaggttggcaaggg

SEQ ID NO: 173131 - DNA, 20 bp, Artificial Sequence
  Synthetic oligonucleotide; AGG chr2 60539382 60539401 60539385 -
tgagttaggttggcaaggga

SEQ ID NO: 173132 - DNA, 20 bp, Artificial Sequence
  Synthetic oligonucleotide; GAG chr2 60539375 60539394 60539378 -
ggttggcaagggaaggattt

SEQ ID NO: 173133 - DNA, 20 bp, Artificial Sequence
  Synthetic oligonucleotide; AGG chr2 60539374 60539393 60539377 -
gttggcaagggaaggatttg

SEQ ID NO: 173134 - DNA, 20 bp, Artificial Sequence
  Synthetic oligonucleotide; TGG chr2 60539369 60539388 60539372 -
caagggaaggatttgaggca

SEQ ID NO: 173135 - DNA, 20 bp, Artificial Sequence
  Synthetic oligonucleotide; GGG chr2 60539368 60539387 60539371 -
aagggaaggatttgaggcat

SEQ ID NO: 173136 - DNA, 20 bp, Artificial Sequence
  Synthetic oligonucleotide; GGG chr2 60539367 60539386 60539370 -
agggaaggatttgaggcatg

SEQ ID NO: 173137 - DNA, 20 bp, Artificial Sequence
  Synthetic oligonucleotide; GGG chr2 60539366 60539385 60539369 -
gggaaggatttgaggcatgg

SEQ ID NO: 173138 - DNA, 20 bp, Artificial Sequence
  Synthetic oligonucleotide; GGG chr2 60539365 60539384 60539368 -
ggaaggatttgaggcatggg

SEQ ID NO: 173139 - DNA, 20 bp, Artificial Sequence
  Synthetic oligonucleotide; TGG chr2 60539362 60539381 60539365 -
aggatttgaggcatgggggg

SEQ ID NO: 173140 - DNA, 20 bp, Artificial Sequence
  Synthetic oligonucleotide; GAG chr2 60539358 60539377 60539361 -
tttgaggcatggggggtggt

SEQ ID NO: 173141 - DNA, 20 bp, Artificial Sequence
  Synthetic oligonucleotide; AGG chr2 60539357 60539376 60539360 -
ttgaggcatggggggtggtg

SEQ ID NO: 173142 - DNA, 20 bp, Artificial Sequence
  Synthetic oligonucleotide; CAG chr2 60539341 60539360 60539344 -
ggtgaggtcacttctgatcc

SEQ ID NO: 173143 - DNA, 20 bp, Artificial Sequence
  Synthetic oligonucleotide; CAG chr2 60539338 60539357 60539341 -
gaggtcacttctgatcccag

SEQ ID NO: 173144 - DNA, 20 bp, Artificial Sequence
  Synthetic oligonucleotide; AGG chr2 60539337 60539356 60539340 -
aggtcacttctgatcccagc

SEQ ID NO: 173145 - DNA, 20 bp, Artificial Sequence
  Synthetic oligonucleotide; GGG chr2 60539336 60539355 60539339 -
ggtcacttctgatcccagca

SEQ ID NO: 173146 - DNA, 20 bp, Artificial Sequence
  Synthetic oligonucleotide; TAG chr2 60539331 60539350 60539334 -
cttctgatcccagcagggaa

SEQ ID NO: 173147 - DNA, 20 bp, Artificial Sequence
  Synthetic oligonucleotide; AGG chr2 60539330 60539349 60539333 -
ttctgatcccagcagggaat

SEQ ID NO: 173148 - DNA, 20 bp, Artificial Sequence
  Synthetic oligonucleotide; GAG chr2 60539326 60539345 60539329 -
gatcccagcagggaataggt

SEQ ID NO: 173149 - DNA, 20 bp, Artificial Sequence
  Synthetic oligonucleotide; TAG chr2 60539305 60539324 60539308 -
agcttcatttgcctttacaa

SEQ ID NO: 173150 - DNA, 20 bp, Artificial Sequence
  Synthetic oligonucleotide; AGG chr2 60539304 60539323 60539307 -
gcttcatttgcctttacaat

SEQ ID NO: 173151 - DNA, 20 bp, Artificial Sequence
  Synthetic oligonucleotide; CAG chr2 60539297 60539316 60539300 -
ttgcctttacaataggcgca

SEQ ID NO: 173152 - DNA, 20 bp, Artificial Sequence
  Synthetic oligonucleotide; TGG chr2 60539283 60539302 60539286 -
ggcgcacagttactgcacct

SEQ ID NO: 173153 - DNA, 20 bp, Artificial Sequence
  Synthetic oligonucleotide; GAG chr2 60539281 60539300 60539284 -
cgcacagttactgcaccttg

SEQ ID NO: 173154 - DNA, 20 bp, Artificial Sequence
  Synthetic oligonucleotide; AGG chr2 60539280 60539299 60539283 -
gcacagttactgcaccttgg

SEQ ID NO: 173155 - DNA, 20 bp, Artificial Sequence
  Synthetic oligonucleotide; GAG chr2 60539278 60539297 60539281 -
acagttactgcaccttggag

SEQ ID NO: 173156 - DNA, 20 bp, Artificial Sequence
  Synthetic oligonucleotide; CAG chr2 60539271 60539290 60539274 -
ctgcaccttggaggagctct

SEQ ID NO: 173157 - DNA, 20 bp, Artificial Sequence
  Synthetic oligonucleotide; AGG chr2 60539270 60539289 60539273 -
tgcaccttggaggagctctc

SEQ ID NO: 173158 - DNA, 20 bp, Artificial Sequence
  Synthetic oligonucleotide; CAG chr2 60539260 60539279 60539263 -
aggagctctcaggtgccgct

SEQ ID NO: 173159 - DNA, 20 bp, Artificial Sequence
  Synthetic oligonucleotide; TGG chr2 60539256 60539275 60539259 -
gctctcaggtgccgctcaga

SEQ ID NO: 173160 - DNA, 20 bp, Artificial Sequence
  Synthetic oligonucleotide; GGG chr2 60539255 60539274 60539258 -
ctctcaggtgccgctcagat

SEQ ID NO: 173161 - DNA, 20 bp, Artificial Sequence
  Synthetic oligonucleotide; CAG chr2 60539234 60539253 60539237 -
ggcgcatgtaaatgccctgt

SEQ ID NO: 173162 - DNA, 20 bp, Artificial Sequence
  Synthetic oligonucleotide; CGG chr2 60539228 60539247 60539231 -
tgtaaatgccctgtcagatg

SEQ ID NO: 173163 - DNA, 20 bp, Artificial Sequence
  Synthetic oligonucleotide; GAG chr2 60539226 60539245 60539229 -
taaatgccctgtcagatgcg

SEQ ID NO: 173164 - DNA, 20 bp, Artificial Sequence
  Synthetic oligonucleotide; TGG chr2 60539222 60539241 60539225 -
tgccctgtcagatgcggagc

SEQ ID NO: 173165 - DNA, 20 bp, Artificial Sequence
  Synthetic oligonucleotide; AAG chr2 60539184 60539203 60539187 -
tccaccaccacaccataata

SEQ ID NO: 173166 - DNA, 20 bp, Artificial Sequence
  Synthetic oligonucleotide; CAG chr2 60539174 60539193 60539177 -
caccataataaagctgtaca

SEQ ID NO: 173167 - DNA, 20 bp, Artificial Sequence
  Synthetic oligonucleotide; AAG chr2 60539170 60539189 60539173 -
ataataaagctgtacacagc

SEQ ID NO: 173168 - DNA, 20 bp, Artificial Sequence
  Synthetic oligonucleotide; CAG chr2 60539158 60539177 60539161 -
tacacagcaagcttaatatg

SEQ ID NO: 173169 - DNA, 20 bp, Artificial Sequence
  Synthetic oligonucleotide; TAG chr2 60539154 60539173 60539157 -
cagcaagcttaatatgcagc

SEQ ID NO: 173170 - DNA, 20 bp, Artificial Sequence
  Synthetic oligonucleotide; TGG chr2 60539149 60539168 60539152 -
agcttaatatgcagctagtc

SEQ ID NO: 173171 - DNA, 20 bp, Artificial Sequence
  Synthetic oligonucleotide; GGG chr2 60539148 60539167 60539151 -
gcttaatatgcagctagtct

SEQ ID NO: 173172 - DNA, 20 bp, Artificial Sequence
  Synthetic oligonucleotide; GGG chr2 60539147 60539166 60539150 -
cttaatatgcagctagtctg

SEQ ID NO: 173173 - DNA, 20 bp, Artificial Sequence
  Synthetic oligonucleotide; TAG chr2 60539131 60539150 60539134 -
tctggggaattgtataaact

SEQ ID NO: 173174 - DNA, 20 bp, Artificial Sequence
  Synthetic oligonucleotide; TAG chr2 60539127 60539146 60539130 -
gggaattgtataaacttaga

SEQ ID NO: 173175 - DNA, 20 bp, Artificial Sequence
  Synthetic oligonucleotide; CAG chr2 60539122 60539141 60539125 -
ttgtataaacttagatagcc

SEQ ID NO: 173176 - DNA, 20 bp, Artificial Sequence
  Synthetic oligonucleotide; AAG chr2 60539114 60539133 60539117 -
acttagatagcccagtgtga

SEQ ID NO: 173177 - DNA, 20 bp, Artificial Sequence
  Synthetic oligonucleotide; CAG chr2 60539110 60539129 60539113 -
agatagcccagtgtgaaaga

SEQ ID NO: 173178 - DNA, 20 bp, Artificial Sequence
  Synthetic oligonucleotide; TGG chr2 60539104 60539123 60539107 -
cccagtgtgaaagacagcaa

SEQ ID NO: 173179 - DNA, 20 bp, Artificial Sequence
  Synthetic oligonucleotide; CAG chr2 60539082 60539101 60539085 -
gaaaaatgctcgatatgcca

SEQ ID NO: 173180 - DNA, 20 bp, Artificial Sequence
  Synthetic oligonucleotide; TAG chr2 60539052 60539071 60539055 -
tcttgttctcctttgatcta

SEQ ID NO: 173181 - DNA, 20 bp, Artificial Sequence
  Synthetic oligonucleotide; TGG chr2 60539019 60539038 60539022 -
acatcatccttttcttctct

SEQ ID NO: 173182 - DNA, 20 bp, Artificial Sequence
  Synthetic oligonucleotide; GAG chr2 60539017 60539036 60539020 -
atcatccttttcttctcttg

SEQ ID NO: 173183 - DNA, 20 bp, Artificial Sequence
  Synthetic oligonucleotide; CAG chr2 60538978 60538997 60538981 -
gccacctcccaattcaccac

SEQ ID NO: 173184 - DNA, 20 bp, Artificial Sequence
  Synthetic oligonucleotide; TGG chr2 60538958 60538977 60538961 -
cagaatttttttgcatgtgc

SEQ ID NO: 173185 - DNA, 20 bp, Artificial Sequence
  Synthetic oligonucleotide; TGG chr2 60538953 60538972 60538956 -
tttttttgcatgtgctggta

SEQ ID NO: 173186 - DNA, 20 bp, Artificial Sequence
  Synthetic oligonucleotide; GAG chr2 60538951 60538970 60538954 -
tttttgcatgtgctggtatg

SEQ ID NO: 173187 - DNA, 20 bp, Artificial Sequence
  Synthetic oligonucleotide; TGG chr2 60538924 60538943 60538927 -
gcaacataatttgtttcata

SEQ ID NO: 173188 - DNA, 20 bp, Artificial Sequence
  Synthetic oligonucleotide; CAG chr2 60538914 60538933 60538917 -
ttgtttcatatggttaatta

SEQ ID NO: 173189 - DNA, 20 bp, Artificial Sequence
  Synthetic oligonucleotide; AGG chr2 60538913 60538932 60538916 -
tgtttcatatggttaattac

SEQ ID NO: 173190 - DNA, 20 bp, Artificial Sequence
  Synthetic oligonucleotide; TAG chr2 60538886 60538905 60538889 -
tgaatatttaaaattttaaa

SEQ ID NO: 173191 - DNA, 20 bp, Artificial Sequence
  Synthetic oligonucleotide; CAG chr2 60538880 60538899 60538883 -
tttaaaattttaaatagcca

SEQ ID NO: 173192 - DNA, 20 bp, Artificial Sequence
  Synthetic oligonucleotide; CAG chr2 60538874 60538893 60538877 -
attttaaatagccacagttc

SEQ ID NO: 173193 - DNA, 20 bp, Artificial Sequence
  Synthetic oligonucleotide; AAG chr2 60538858 60538877 60538861 -
gttccagcttttcccgttaa

SEQ ID NO: 173194 - DNA, 20 bp, Artificial Sequence
  Synthetic oligonucleotide; AAG chr2 60538840 60538859 60538843 -
aaaagtatgtgatttgaaca

SEQ ID NO: 173195 - DNA, 20 bp, Artificial Sequence
  Synthetic oligonucleotide; AGG chr2 60538839 60538858 60538842 -
aaagtatgtgatttgaacaa

SEQ ID NO: 173196 - DNA, 20 bp, Artificial Sequence
  Synthetic oligonucleotide; GGG chr2 60538838 60538857 60538841 -
aagtatgtgatttgaacaaa

SEQ ID NO: 173197 - DNA, 20 bp, Artificial Sequence
  Synthetic oligonucleotide; GAG chr2 60538836 60538855 60538839 -
gtatgtgatttgaacaaagg

SEQ ID NO: 173198 - DNA, 20 bp, Artificial Sequence
  Synthetic oligonucleotide; CAG chr2 60538831 60538850 60538834 -
tgatttgaacaaagggagta

SEQ ID NO: 173199 - DNA, 20 bp, Artificial Sequence
  Synthetic oligonucleotide; TGG chr2 60538816 60538835 60538819 -
gagtacagtgtaaatatttg

SEQ ID NO: 173200 - DNA, 20 bp, Artificial Sequence
  Synthetic oligonucleotide; CAG chr2 60538742 60538761 60538745 -
cacacacacacacacacaca

SEQ ID NO: 173201 - DNA, 20 bp, Artificial Sequence
  Synthetic oligonucleotide; GAG chr2 60538740 60538759 60538743 -
cacacacacacacacacaca

SEQ ID NO: 173202 - DNA, 20 bp, Artificial Sequence
  Synthetic oligonucleotide; GAG chr2 60538738 60538757 60538741 -
cacacacacacacacacaga

SEQ ID NO: 173203 - DNA, 20 bp, Artificial Sequence
  Synthetic oligonucleotide; GAG chr2 60538736 60538755 60538739 -
cacacacacacacacagaga

SEQ ID NO: 173204 - DNA, 20 bp, Artificial Sequence
  Synthetic oligonucleotide; GAG chr2 60538734 60538753 60538737 -
cacacacacacacagagaga

SEQ ID NO: 173205 - DNA, 20 bp, Artificial Sequence
  Synthetic oligonucleotide; GAG chr2 60538732 60538751 60538735 -
cacacacacacagagagaga

SEQ ID NO: 173206 - DNA, 20 bp, Artificial Sequence
  Synthetic oligonucleotide; GAG chr2 60538730 60538749 60538733 -
cacacacacagagagagaga

SEQ ID NO: 173207 - DNA, 20 bp, Artificial Sequence
  Synthetic oligonucleotide; GAG chr2 60538728 60538747 60538731 -
cacacacagagagagagaga

SEQ ID NO: 173208 - DNA, 20 bp, Artificial Sequence
  Synthetic oligonucleotide; GAG chr2 60538726 60538745 60538729 -
cacacagagagagagagaga

SEQ ID NO: 173209 - DNA, 20 bp, Artificial Sequence
  Synthetic oligonucleotide; GAG chr2 60538724 60538743 60538727 -
cacagagagagagagagaga

SEQ ID NO: 173210 - DNA, 20 bp, Artificial Sequence
  Synthetic oligonucleotide; CAG chr2 60538716 60538735 60538719 -
gagagagagagagagacatt

SEQ ID NO: 173211 - DNA, 20 bp, Artificial Sequence
  Synthetic oligonucleotide; TAG chr2 60538705 60538724 60538708 -
agagacattcagtttaaatc

SEQ ID NO: 173212 - DNA, 20 bp, Artificial Sequence
  Synthetic oligonucleotide; AAG chr2 60538692 60538711 60538695 -
ttaaatctagtactgatcta

SEQ ID NO: 173213 - DNA, 20 bp, Artificial Sequence
  Synthetic oligonucleotide; AGG chr2 60538691 60538710 60538694 -
taaatctagtactgatctaa

SEQ ID NO: 173214 - DNA, 20 bp, Artificial Sequence
  Synthetic oligonucleotide; TGG chr2 60538642 60538661 60538645 -
tttaaaaaacaactttcaac

SEQ ID NO: 173215 - DNA, 20 bp, Artificial Sequence
  Synthetic oligonucleotide; GAG chr2 60538606 60538625 60538609 -
tatttcaccattatattttt

SEQ ID NO: 173216 - DNA, 20 bp, Artificial Sequence
  Synthetic oligonucleotide; GAG chr2 60538591 60538610 60538594 -
tttttgagtccacattgctt

SEQ ID NO: 173217 - DNA, 20 bp, Artificial Sequence
  Synthetic oligonucleotide; AGG chr2 60538590 60538609 60538593 -
ttttgagtccacattgcttg

SEQ ID NO: 173218 - DNA, 20 bp, Artificial Sequence
  Synthetic oligonucleotide; AAG chr2 60538582 60538601 60538585 -
ccacattgcttgaggtttta

SEQ ID NO: 173219 - DNA, 20 bp, Artificial Sequence
  Synthetic oligonucleotide; AAG chr2 60538579 60538598 60538582 -
cattgcttgaggttttaaag

SEQ ID NO: 173220 - DNA, 20 bp, Artificial Sequence
  Synthetic oligonucleotide; CAG chr2 60538553 60538572 60538556 -
tttataatgtgttcctttaa

SEQ ID NO: 173221 - DNA, 20 bp, Artificial Sequence
  Synthetic oligonucleotide; CAG chr2 60538544 60538563 60538547 -
tgttcctttaacagaatcaa

SEQ ID NO: 173222 - DNA, 20 bp, Artificial Sequence
  Synthetic oligonucleotide; CAG chr2 60538537 60538556 60538540 -
ttaacagaatcaacagctgt

SEQ ID NO: 173223 - DNA, 20 bp, Artificial Sequence
  Synthetic oligonucleotide; AAG chr2 60538534 60538553 60538537 -
acagaatcaacagctgtcag

SEQ ID NO: 173224 - DNA, 20 bp, Artificial Sequence
  Synthetic oligonucleotide; CAG chr2 60538531 60538550 60538534 -
gaatcaacagctgtcagaag

SEQ ID NO: 173225 - DNA, 20 bp, Artificial Sequence
  Synthetic oligonucleotide; TGG chr2 60538525 60538544 60538528 -
acagctgtcagaagcagttg

SEQ ID NO: 173226 - DNA, 20 bp, Artificial Sequence
  Synthetic oligonucleotide; TAG chr2 60538522 60538541 60538525 -
gctgtcagaagcagttgtgg

SEQ ID NO: 173227 - DNA, 20 bp, Artificial Sequence
  Synthetic oligonucleotide; AAG chr2 60538503 60538522 60538506 -
gtagatccacaaaacgtata

SEQ ID NO: 173228 - DNA, 20 bp, Artificial Sequence
  Synthetic oligonucleotide; TGG chr2 60538470 60538489 60538473 -
gtttcctgaaacaaaacact

SEQ ID NO: 173229 - DNA, 20 bp, Artificial Sequence
  Synthetic oligonucleotide; AAG chr2 60538461 60538480 60538464 -
aacaaaacacttggaaaaat

SEQ ID NO: 173230 - DNA, 20 bp, Artificial Sequence
  Synthetic oligonucleotide; AAG chr2 60538453 60538472 60538456 -
acttggaaaaataagctgct

SEQ ID NO: 173231 - DNA, 20 bp, Artificial Sequence
  Synthetic oligonucleotide; TGG chr2 60538447 60538466 60538450 -
aaaaataagctgctaagaac

SEQ ID NO: 173232 - DNA, 20 bp, Artificial Sequence
  Synthetic oligonucleotide; TAG chr2 60538439 60538458 60538442 -
gctgctaagaactggcgaat

SEQ ID NO: 173233 - DNA, 20 bp, Artificial Sequence
  Synthetic oligonucleotide; AAG chr2 60538436 60538455 60538439 -
gctaagaactggcgaattag

SEQ ID NO: 173234 - DNA, 20 bp, Artificial Sequence
  Synthetic oligonucleotide; CAG chr2 60538429 60538448 60538432 -
actggcgaattagaagtttg

SEQ ID NO: 173235 - DNA, 20 bp, Artificial Sequence
  Synthetic oligonucleotide; CAG chr2 60538425 60538444 60538428 -
gcgaattagaagtttgcaga

SEQ ID NO: 173236 - DNA, 20 bp, Artificial Sequence
  Synthetic oligonucleotide; AGG chr2 60538424 60538443 60538427 -
cgaattagaagtttgcagac

SEQ ID NO: 173237 - DNA, 20 bp, Artificial Sequence
  Synthetic oligonucleotide; GGG chr2 60538423 60538442 60538426 -
gaattagaagtttgcagaca

SEQ ID NO: 173238 - DNA, 20 bp, Artificial Sequence
  Synthetic oligonucleotide; AAG chr2 60538415 60538434 60538418 -
agtttgcagacagggaactg

SEQ ID NO: 173239 - DNA, 20 bp, Artificial Sequence
  Synthetic oligonucleotide; TGG chr2 60538402 60538421 60538405 -
ggaactgaagtgtcatctct

SEQ ID NO: 173240 - DNA, 20 bp, Artificial Sequence
  Synthetic oligonucleotide; TGG chr2 60538392 60538411 60538395 -
tgtcatctcttggttcaccc

SEQ ID NO: 173241 - DNA, 20 bp, Artificial Sequence
  Synthetic oligonucleotide; GAG chr2 60538390 60538409 60538393 -
tcatctcttggttcaccctg

SEQ ID NO: 173242 - DNA, 20 bp, Artificial Sequence
  Synthetic oligonucleotide; GAG chr2 60538379 60538398 60538382 -
ttcaccctggagactgatgt

SEQ ID NO: 173243 - DNA, 20 bp, Artificial Sequence
  Synthetic oligonucleotide; TGG chr2 60538376 60538395 60538379 -
accctggagactgatgtgag

SEQ ID NO: 173244 - DNA, 20 bp, Artificial Sequence
  Synthetic oligonucleotide; TGG chr2 60538356 60538375 60538359 -
tggatctgatgcaatgctgc

SEQ ID NO: 173245 - DNA, 20 bp, Artificial Sequence
  Synthetic oligonucleotide; AAG chr2 60538353 60538372 60538356 -
atctgatgcaatgctgctgg

SEQ ID NO: 173246 - DNA, 20 bp, Artificial Sequence
  Synthetic oligonucleotide; CAG chr2 60538339 60538358 60538342 -
tgctggaagatttacctgca

SEQ ID NO: 173247 - DNA, 20 bp, Artificial Sequence
  Synthetic oligonucleotide; AGG chr2 60538338 60538357 60538341 -
gctggaagatttacctgcac

SEQ ID NO: 173248 - DNA, 20 bp, Artificial Sequence
  Synthetic oligonucleotide; AAG chr2 60538325 60538344 60538328 -
cctgcacaggttgctcctct

SEQ ID NO: 173249 - DNA, 20 bp, Artificial Sequence
  Synthetic oligonucleotide; AGG chr2 60538324 60538343 60538327 -
ctgcacaggttgctcctcta

SEQ ID NO: 173250 - DNA, 20 bp, Artificial Sequence
  Synthetic oligonucleotide; CAG chr2 60538314 60538333 60538317 -
tgctcctctaaggcaacgcg

SEQ ID NO: 173251 - DNA, 20 bp, Artificial Sequence
  Synthetic oligonucleotide; CAG chr2 60538291 60538310 60538294 -
tgcacgattgacgtatgcac

SEQ ID NO: 173252 - DNA, 20 bp, Artificial Sequence
  Synthetic oligonucleotide; GAG chr2 60538289 60538308 60538292 -
cacgattgacgtatgcacca

SEQ ID NO: 173253 - DNA, 20 bp, Artificial Sequence
  Synthetic oligonucleotide; TAG chr2 60538285 60538304 60538288 -
attgacgtatgcaccagagc

SEQ ID NO: 173254 - DNA, 20 bp, Artificial Sequence
  Synthetic oligonucleotide; AGG chr2 60538284 60538303 60538287 -
ttgacgtatgcaccagagct

SEQ ID NO: 173255 - DNA, 20 bp, Artificial Sequence
  Synthetic oligonucleotide; TGG chr2 60538280 60538299 60538283 -
cgtatgcaccagagctaggc

SEQ ID NO: 173256 - DNA, 20 bp, Artificial Sequence
  Synthetic oligonucleotide; GGG chr2 60538279 60538298 60538282 -
gtatgcaccagagctaggct

SEQ ID NO: 173257 - DNA, 20 bp, Artificial Sequence
  Synthetic oligonucleotide; CAG chr2 60538273 60538292 60538276 -
accagagctaggctgggcct

SEQ ID NO: 173258 - DNA, 20 bp, Artificial Sequence
  Synthetic oligonucleotide; TAG chr2 60538238 60538257 60538241 -
tttgccctttttgatctctt

SEQ ID NO: 173259 - DNA, 20 bp, Artificial Sequence
  Synthetic oligonucleotide; TAG chr2 60538234 60538253 60538237 -
ccctttttgatctctttaga

SEQ ID NO: 173260 - DNA, 20 bp, Artificial Sequence
  Synthetic oligonucleotide; AAG chr2 60538221 60538240 60538224 -
ctttagatagataaaatacc

SEQ ID NO: 173261 - DNA, 20 bp, Artificial Sequence
  Synthetic oligonucleotide; CAG chr2 60538214 60538233 60538217 -
tagataaaataccaagttct

SEQ ID NO: 173262 - DNA, 20 bp, Artificial Sequence
  Synthetic oligonucleotide; GAG chr2 60538212 60538231 60538215 -
gataaaataccaagttctca

SEQ ID NO: 173263 - DNA, 20 bp, Artificial Sequence
  Synthetic oligonucleotide; AAG chr2 60538182 60538201 60538185 -
caacaaattatatataccta

SEQ ID NO: 173264 - DNA, 20 bp, Artificial Sequence
  Synthetic oligonucleotide; AGG chr2 60538181 60538200 60538184 -
aacaaattatatatacctaa

SEQ ID NO: 173265 - DNA, 20 bp, Artificial Sequence
  Synthetic oligonucleotide; GAG chr2 60538177 60538196 60538180 -
aattatatatacctaaaggt

SEQ ID NO: 173266 - DNA, 20 bp, Artificial Sequence
  Synthetic oligonucleotide; CAG chr2 60538169 60538188 60538172 -
atacctaaaggtgagatgat

SEQ ID NO: 173267 - DNA, 20 bp, Artificial Sequence
  Synthetic oligonucleotide; AGG chr2 60538168 60538187 60538171 -
tacctaaaggtgagatgatc

SEQ ID NO: 173268 - DNA, 20 bp, Artificial Sequence
  Synthetic oligonucleotide; AAG chr2 60538149 60538168 60538152 -
caggtttaaacttcctgtaa

SEQ ID NO: 173269 - DNA, 20 bp, Artificial Sequence
  Synthetic oligonucleotide; GAG chr2 60538147 60538166 60538150 -
ggtttaaacttcctgtaaaa

SEQ ID NO: 173270 - DNA, 20 bp, Artificial Sequence
  Synthetic oligonucleotide; AGG chr2 60538146 60538165 60538149 -
gtttaaacttcctgtaaaag

SEQ ID NO: 173271 - DNA, 20 bp, Artificial Sequence
  Synthetic oligonucleotide; GAG chr2 60538142 60538161 60538145 -
aaacttcctgtaaaagaggc

SEQ ID NO: 173272 - DNA, 20 bp, Artificial Sequence
  Synthetic oligonucleotide; AAG chr2 60538139 60538158 60538142 -
cttcctgtaaaagaggcgag

SEQ ID NO: 173273 - DNA, 20 bp, Artificial Sequence
  Synthetic oligonucleotide; AGG chr2 60538138 60538157 60538141 -
ttcctgtaaaagaggcgaga

SEQ ID NO: 173274 - DNA, 20 bp, Artificial Sequence
  Synthetic oligonucleotide; CAG chr2 60538116 60538135 60538119 -
gcgccttgcacacccttttc

SEQ ID NO: 173275 - DNA, 20 bp, Artificial Sequence
  Synthetic oligonucleotide; TAG chr2 60538112 60538131 60538115 -
cttgcacacccttttccaga

SEQ ID NO: 173276 - DNA, 20 bp, Artificial Sequence
  Synthetic oligonucleotide; AGG chr2 60538111 60538130 60538114 -
ttgcacacccttttccagat

SEQ ID NO: 173277 - DNA, 20 bp, Artificial Sequence
  Synthetic oligonucleotide; GGG chr2 60538110 60538129 60538113 -
tgcacacccttttccagata

SEQ ID NO: 173278 - DNA, 20 bp, Artificial Sequence
  Synthetic oligonucleotide; TGG chr2 60538106 60538125 60538109 -
cacccttttccagatagggc

SEQ ID NO: 173279 - DNA, 20 bp, Artificial Sequence
  Synthetic oligonucleotide; CAG chr2 60538103 60538122 60538106 -
ccttttccagatagggctgg

SEQ ID NO: 173280 - DNA, 20 bp, Artificial Sequence
  Synthetic oligonucleotide; CAG chr2 60538091 60538110 60538094 -
agggctggcagcatgttatt

SEQ ID NO: 173281 - DNA, 20 bp, Artificial Sequence
  Synthetic oligonucleotide; CAG chr2 60538080 60538099 60538083 -
catgttattcagaactgaat

SEQ ID NO: 173282 - DNA, 20 bp, Artificial Sequence
  Synthetic oligonucleotide; CAG chr2 60538070 60538089 60538073 -
agaactgaatcagtctctgc

SEQ ID NO: 173283 - DNA, 20 bp, Artificial Sequence
  Synthetic oligonucleotide; GAG chr2 60538068 60538087 60538071 -
aactgaatcagtctctgcca

SEQ ID NO: 173284 - DNA, 20 bp, Artificial Sequence
  Synthetic oligonucleotide; CAG chr2 60538059 60538078 60538062 -
agtctctgccagagaattcc

SEQ ID NO: 173285 - DNA, 20 bp, Artificial Sequence
  Synthetic oligonucleotide; TGG chr2 60538056 60538075 60538059 -
ctctgccagagaattcccag

SEQ ID NO: 173286 - DNA, 20 bp, Artificial Sequence
  Synthetic oligonucleotide; GGG chr2 60538055 60538074 60538058 -
tctgccagagaattcccagt

SEQ ID NO: 173287 - DNA, 20 bp, Artificial Sequence
  Synthetic oligonucleotide; TGG chr2 60538048 60538067 60538051 -
gagaattcccagtgggaacc

SEQ ID NO: 173288 - DNA, 20 bp, Artificial Sequence
  Synthetic oligonucleotide; GAG chr2 60538046 60538065 60538049 -
gaattcccagtgggaacctg

SEQ ID NO: 173289 - DNA, 20 bp, Artificial Sequence
  Synthetic oligonucleotide; CAG chr2 60538043 60538062 60538046 -
ttcccagtgggaacctggag

SEQ ID NO: 173290 - DNA, 20 bp, Artificial Sequence
  Synthetic oligonucleotide; AGG chr2 60538042 60538061 60538045 -
tcccagtgggaacctggagc

SEQ ID NO: 173291 - DNA, 20 bp, Artificial Sequence
  Synthetic oligonucleotide; AAG chr2 60538029 60538048 60538032 -
ctggagcaggtatgttgatg

SEQ ID NO: 173292 - DNA, 20 bp, Artificial Sequence
  Synthetic oligonucleotide; AGG chr2 60538028 60538047 60538031 -
tggagcaggtatgttgatga

SEQ ID NO: 173293 - DNA, 20 bp, Artificial Sequence
  Synthetic oligonucleotide; GGG chr2 60538027 60538046 60538030 -
ggagcaggtatgttgatgaa

SEQ ID NO: 173294 - DNA, 20 bp, Artificial Sequence
  Synthetic oligonucleotide; GGG chr2 60538026 60538045 60538029 -
gagcaggtatgttgatgaag

SEQ ID NO: 173295 - DNA, 20 bp, Artificial Sequence
  Synthetic oligonucleotide; TGG chr2 60538018 60538037 60538021 -
atgttgatgaaggggatacc

SEQ ID NO: 173296 - DNA, 20 bp, Artificial Sequence
  Synthetic oligonucleotide; GGG chr2 60538017 60538036 60538020 -
tgttgatgaaggggatacct

SEQ ID NO: 173297 - DNA, 20 bp, Artificial Sequence
  Synthetic oligonucleotide; GGG chr2 60538016 60538035 60538019 -
gttgatgaaggggatacctg

SEQ ID NO: 173298 - DNA, 20 bp, Artificial Sequence
  Synthetic oligonucleotide; TGG chr2 60538008 60538027 60538011 -
aggggatacctggggacctt

SEQ ID NO: 173299 - DNA, 20 bp, Artificial Sequence
  Synthetic oligonucleotide; GAG chr2 60537994 60538013 60537997 -
gacctttggtcactcacaat

SEQ ID NO: 173300 - DNA, 20 bp, Artificial Sequence
  Synthetic oligonucleotide; TAG chr2 60537966 60537985 60537969 -
gtttgtattctcactgttgt

SEQ ID NO: 173301 - DNA, 20 bp, Artificial Sequence
  Synthetic oligonucleotide; TAG chr2 60537927 60537946 60537930 -
ttgcacctacaatttgattt

SEQ ID NO: 173302 - DNA, 20 bp, Artificial Sequence
  Synthetic oligonucleotide; TAG chr2 60537921 60537940 60537924 -
ctacaatttgattttagttt

SEQ ID NO: 173303 - DNA, 20 bp, Artificial Sequence
  Synthetic oligonucleotide; TAG chr2 60537917 60537936 60537920 -
aatttgattttagttttaga

SEQ ID NO: 173304 - DNA, 20 bp, Artificial Sequence
  Synthetic oligonucleotide; GAG chr2 60537915 60537934 60537918 -
tttgattttagttttagata

SEQ ID NO: 173305 - DNA, 20 bp, Artificial Sequence
  Synthetic oligonucleotide; AGG chr2 60537914 60537933 60537917 -
ttgattttagttttagatag

SEQ ID NO: 173306 - DNA, 20 bp, Artificial Sequence
  Synthetic oligonucleotide; AAG chr2 60537878 60537897 60537881 -
taaaaactcccattaaaata

SEQ ID NO: 173307 - DNA, 20 bp, Artificial Sequence
  Synthetic oligonucleotide; TGG chr2 60537873 60537892 60537876 -
actcccattaaaataaagaa

SEQ ID NO: 173308 - DNA, 20 bp, Artificial Sequence
  Synthetic oligonucleotide; AAG chr2 60537852 60537871 60537855 -
ggaattattgtgaaacctgc

SEQ ID NO: 173309 - DNA, 20 bp, Artificial Sequence
  Synthetic oligonucleotide; AGG chr2 60537851 60537870 60537854 -
gaattattgtgaaacctgca

SEQ ID NO: 173310 - DNA, 20 bp, Artificial Sequence
  Synthetic oligonucleotide; GGG chr2 60537850 60537869 60537853 -
aattattgtgaaacctgcaa

SEQ ID NO: 173311 - DNA, 20 bp, Artificial Sequence
  Synthetic oligonucleotide; AAG chr2 60537837 60537856 60537840 -
cctgcaagggtgccttcaaa

SEQ ID NO: 173312 - DNA, 20 bp, Artificial Sequence
  Synthetic oligonucleotide; CAG chr2 60537829 60537848 60537832 -
ggtgccttcaaaaagaaaac

SEQ ID NO: 173313 - DNA, 20 bp, Artificial Sequence
  Synthetic oligonucleotide; AAG chr2 60537769 60537788 60537772 -
ttgaactttctaaaaaacac

SEQ ID NO: 173314 - DNA, 20 bp, Artificial Sequence
  Synthetic oligonucleotide; AGG chr2 60537768 60537787 60537771 -
tgaactttctaaaaaacaca

SEQ ID NO: 173315 - DNA, 20 bp, Artificial Sequence
  Synthetic oligonucleotide; AAG chr2 60537765 60537784 60537768 -
actttctaaaaaacacaagg

SEQ ID NO: 173316 - DNA, 20 bp, Artificial Sequence
  Synthetic oligonucleotide; AAG chr2 60537753 60537772 60537756 -
acacaaggaagctttttgct

SEQ ID NO: 173317 - DNA, 20 bp, Artificial Sequence
  Synthetic oligonucleotide; CAG chr2 60537747 60537766 60537750 -
ggaagctttttgctaagcat

SEQ ID NO: 173318 - DNA, 20 bp, Artificial Sequence
  Synthetic oligonucleotide; AGG chr2 60537746 60537765 60537749 -
gaagctttttgctaagcatc

SEQ ID NO: 173319 - DNA, 20 bp, Artificial Sequence
  Synthetic oligonucleotide; GGG chr2 60537745 60537764 60537748 -
aagctttttgctaagcatca

SEQ ID NO: 173320 - DNA, 20 bp, Artificial Sequence
  Synthetic oligonucleotide; CAG chr2 60537723 60537742 60537726 -
gcatttaaatttatattcat

SEQ ID NO: 173321 - DNA, 20 bp, Artificial Sequence
  Synthetic oligonucleotide; AAG chr2 60537686 60537705 60537689 -
aatatgtaatgatgcataaa

SEQ ID NO: 173322 - DNA, 20 bp, Artificial Sequence
  Synthetic oligonucleotide; AGG chr2 60537685 60537704 60537688 -
atatgtaatgatgcataaaa

SEQ ID NO: 173323 - DNA, 20 bp, Artificial Sequence
  Synthetic oligonucleotide; AAG chr2 60537678 60537697 60537681 -
atgatgcataaaaaggctgc

SEQ ID NO: 173324 - DNA, 20 bp, Artificial Sequence
  Synthetic oligonucleotide; AGG chr2 60537677 60537696 60537680 -
tgatgcataaaaaggctgca

SEQ ID NO: 173325 - DNA, 20 bp, Artificial Sequence
  Synthetic oligonucleotide; TAG chr2 60537654 60537673 60537657 -
aaatcacatctgttaatttt

SEQ ID NO: 173326 - DNA, 20 bp, Artificial Sequence
  Synthetic oligonucleotide; AGG chr2 60537653 60537672 60537656 -
aatcacatctgttaattttt

SEQ ID NO: 173327 - DNA, 20 bp, Artificial Sequence
  Synthetic oligonucleotide; GGG chr2 60537652 60537671 60537655 -
atcacatctgttaattttta

SEQ ID NO: 173328 - DNA, 20 bp, Artificial Sequence
  Synthetic oligonucleotide; AAG chr2 60537644 60537663 60537647 -
tgttaatttttagggaaata

SEQ ID NO: 173329 - DNA, 20 bp, Artificial Sequence
  Synthetic oligonucleotide; TAG chr2 60537639 60537658 60537642 -
atttttagggaaataaagtg

SEQ ID NO: 173330 - DNA, 20 bp, Artificial Sequence
  Synthetic oligonucleotide; TGG chr2 60537634 60537653 60537637 -
tagggaaataaagtgtagct

SEQ ID NO: 173331 - DNA, 20 bp, Artificial Sequence
  Synthetic oligonucleotide; TGG chr2 60537621 60537640 60537624 -
tgtagcttggattcttatgt

SEQ ID NO: 173332 - DNA, 20 bp, Artificial Sequence
  Synthetic oligonucleotide; GAG chr2 60537619 60537638 60537622 -
tagcttggattcttatgttg

SEQ ID NO: 173333 - DNA, 20 bp, Artificial Sequence
  Synthetic oligonucleotide; AAG chr2 60537612 60537631 60537615 -
gattcttatgttggagcaca

SEQ ID NO: 173334 - DNA, 20 bp, Artificial Sequence
  Synthetic oligonucleotide; AAG chr2 60537598 60537617 60537601 -
agcacaaagcactatgtgcc

SEQ ID NO: 173335 - DNA, 20 bp, Artificial Sequence
  Synthetic oligonucleotide; TAG chr2 60537572 60537591 60537575 -
gttcctgtacattttaaata

SEQ ID NO: 173336 - DNA, 20 bp, Artificial Sequence
  Synthetic oligonucleotide; GAG chr2 60537570 60537589 60537573 -
tcctgtacattttaaatata

SEQ ID NO: 173337 - DNA, 20 bp, Artificial Sequence
  Synthetic oligonucleotide; TGG chr2 60537557 60537576 60537560 -
aaatatagagttttaatatt

SEQ ID NO: 173338 - DNA, 20 bp, Artificial Sequence
  Synthetic oligonucleotide; AAG chr2 60537510 60537529 60537513 -
aaaacaaacctcaaaaaact

SEQ ID NO: 173339 - DNA, 20 bp, Artificial Sequence
  Synthetic oligonucleotide; GAG chr2 60537508 60537527 60537511 -
aacaaacctcaaaaaactaa

SEQ ID NO: 173340 - DNA, 20 bp, Artificial Sequence
  Synthetic oligonucleotide; AAG chr2 60537494 60537513 60537497 -
aactaagagaaccaaacctg

SEQ ID NO: 173341 - DNA, 20 bp, Artificial Sequence
  Synthetic oligonucleotide; AAG chr2 60537472 60537491 60537475 -
gtattctccttcaccaactc

SEQ ID NO: 173342 - DNA, 20 bp, Artificial Sequence
  Synthetic oligonucleotide; AGG chr2 60537471 60537490 60537474 -
tattctccttcaccaactca

SEQ ID NO: 173343 - DNA, 20 bp, Artificial Sequence
  Synthetic oligonucleotide; TAG chr2 60537438 60537457 60537441 -
ttttatgatttatttacatt

SEQ ID NO: 173344 - DNA, 20 bp, Artificial Sequence
  Synthetic oligonucleotide; AGG chr2 60537437 60537456 60537440 -
tttatgatttatttacattt

SEQ ID NO: 173345 - DNA, 20 bp, Artificial Sequence
  Synthetic oligonucleotide; GGG chr2 60537436 60537455 60537439 -
ttatgatttatttacattta

SEQ ID NO: 173346 - DNA, 20 bp, Artificial Sequence
  Synthetic oligonucleotide; GGG chr2 60537435 60537454 60537438 -
tatgatttatttacatttag

SEQ ID NO: 173347 - DNA, 20 bp, Artificial Sequence
  Synthetic oligonucleotide; GGG chr2 60537434 60537453 60537437 -
atgatttatttacatttagg

SEQ ID NO: 173348 - DNA, 20 bp, Artificial Sequence
  Synthetic oligonucleotide; GGG chr2 60537433 60537452 60537436 -
tgatttatttacatttaggg

SEQ ID NO: 173349 - DNA, 20 bp, Artificial Sequence
  Synthetic oligonucleotide; CAG chr2 60537423 60537442 60537426 -
acatttaggggggaacccct

SEQ ID NO: 173350 - DNA, 20 bp, Artificial Sequence
  Synthetic oligonucleotide; CAG chr2 60537376 60537395 60537379 -
ctcccctgccccgatccttt

SEQ ID NO: 173351 - DNA, 20 bp, Artificial Sequence
  Synthetic oligonucleotide; CAG chr2 60537369 60537388 60537372 -
gccccgatcctttcagtttc

SEQ ID NO: 173352 - DNA, 20 bp, Artificial Sequence
  Synthetic oligonucleotide; GAG chr2 60537325 60537344 60537328 -
tgttaaatcttaaatctcgt

SEQ ID NO: 173353 - DNA, 20 bp, Artificial Sequence
  Synthetic oligonucleotide; TGG chr2 60537260 60537279 60537263 -
ttacatttaaaactgaacat

SEQ ID NO: 173354 - DNA, 20 bp, Artificial Sequence
  Synthetic oligonucleotide; AAG chr2 60537251 60537270 60537254 -
aaactgaacattggctactg

SEQ ID NO: 173355 - DNA, 20 bp, Artificial Sequence
  Synthetic oligonucleotide; AAG chr2 60537239 60537258 60537242 -
ggctactgaagaatgattta

SEQ ID NO: 173356 - DNA, 20 bp, Artificial Sequence
  Synthetic oligonucleotide; AGG chr2 60537238 60537257 60537241 -
gctactgaagaatgatttaa

SEQ ID NO: 173357 - DNA, 20 bp, Artificial Sequence
  Synthetic oligonucleotide; AAG chr2 60537178 60537197 60537181 -
tgttatgtttttgttatgtt

SEQ ID NO: 173358 - DNA, 20 bp, Artificial Sequence
  Synthetic oligonucleotide; AGG chr2 60537177 60537196 60537180 -
gttatgtttttgttatgtta

SEQ ID NO: 173359 - DNA, 20 bp, Artificial Sequence
  Synthetic oligonucleotide; GAG chr2 60537175 60537194 60537178 -
tatgtttttgttatgttaag

SEQ ID NO: 173360 - DNA, 20 bp, Artificial Sequence
  Synthetic oligonucleotide; AAG chr2 60537160 60537179 60537163 -
ttaaggagaaaaaaatcaat

SEQ ID NO: 173361 - DNA, 20 bp, Artificial Sequence
  Synthetic oligonucleotide; AGG chr2 60537159 60537178 60537162 -
taaggagaaaaaaatcaata

SEQ ID NO: 173362 - DNA, 20 bp, Artificial Sequence
  Synthetic oligonucleotide; AAG chr2 60537138 60537157 60537141 -
ggaaaaatttaattctgata

SEQ ID NO: 173363 - DNA, 20 bp, Artificial Sequence
  Synthetic oligonucleotide; TGG chr2 60537128 60537147 60537131 -
aattctgataaagatactct

SEQ ID NO: 173364 - DNA, 20 bp, Artificial Sequence
  Synthetic oligonucleotide; GAG chr2 60537085 60537104 60537088 -
tccttttaactaaaacattt

SEQ ID NO: 173365 - DNA, 20 bp, Artificial Sequence
  Synthetic oligonucleotide; CAG chr2 60537082 60537101 60537085 -
ttttaactaaaacatttgag

SEQ ID NO: 173366 - DNA, 20 bp, Artificial Sequence
  Synthetic oligonucleotide; AAG chr2 60537074 60537093 60537077 -
aaaacatttgagcagcttca

SEQ ID NO: 173367 - DNA, 20 bp, Artificial Sequence
  Synthetic oligonucleotide; TGG chr2 60537050 60537069 60537053 -
ctatgtatttcttctgatct

SEQ ID NO: 173368 - DNA, 20 bp, Artificial Sequence
  Synthetic oligonucleotide; GAG chr2 60537048 60537067 60537051 -
atgtatttcttctgatcttg

SEQ ID NO: 173369 - DNA, 20 bp, Artificial Sequence
  Synthetic oligonucleotide; TGG chr2 60537036 60537055 60537039 -
tgatcttggagctgtgtgac

SEQ ID NO: 173370 - DNA, 20 bp, Artificial Sequence
  Synthetic oligonucleotide; TAG chr2 60537033 60537052 60537036 -
tcttggagctgtgtgactgg

SEQ ID NO: 173371 - DNA, 20 bp, Artificial Sequence
  Synthetic oligonucleotide; AAG chr2 60537029 60537048 60537032 -
ggagctgtgtgactggtagc

SEQ ID NO: 173372 - DNA, 20 bp, Artificial Sequence
  Synthetic oligonucleotide; AAG chr2 60537025 60537044 60537028 -
ctgtgtgactggtagcaaga

SEQ ID NO: 173373 - DNA, 20 bp, Artificial Sequence
  Synthetic oligonucleotide; AAG chr2 60536999 60537018 60537002 -
aaaaatcttattctacatac

SEQ ID NO: 173374 - DNA, 20 bp, Artificial Sequence
  Synthetic oligonucleotide; TGG chr2 60536996 60537015 60536999 -
aatcttattctacatacaag

SEQ ID NO: 173375 - DNA, 20 bp, Artificial Sequence
  Synthetic oligonucleotide; AAG chr2 60536983 60537002 60536986 -
atacaagtggattgcttaac

SEQ ID NO: 173376 - DNA, 20 bp, Artificial Sequence
  Synthetic oligonucleotide; CAG chr2 60536979 60536998 60536982 -
aagtggattgcttaacaagt

SEQ ID NO: 173377 - DNA, 20 bp, Artificial Sequence
  Synthetic oligonucleotide; CAG chr2 60536974 60536993 60536977 -
gattgcttaacaagtcagca

SEQ ID NO: 173378 - DNA, 20 bp, Artificial Sequence
  Synthetic oligonucleotide; TAG chr2 60536951 60536970 60536954 -
acacgtacttgtttgtacaa

SEQ ID NO: 173379 - DNA, 20 bp, Artificial Sequence
  Synthetic oligonucleotide; GAG chr2 60536949 60536968 60536952 -
acgtacttgtttgtacaata

SEQ ID NO: 173380 - DNA, 20 bp, Artificial Sequence
  Synthetic oligonucleotide; CAG chr2 60536920 60536939 60536923 -
attcctgtataaaaataatt

SEQ ID NO: 173381 - DNA, 20 bp, Artificial Sequence
  Synthetic oligonucleotide; CAG chr2 60536910 60536929 60536913 -
aaaaataattcagctgctga

SEQ ID NO: 173382 - DNA, 20 bp, Artificial Sequence
  Synthetic oligonucleotide; CAG chr2 60536907 60536926 60536910 -
aataattcagctgctgacag

SEQ ID NO: 173383 - DNA, 20 bp, Artificial Sequence
  Synthetic oligonucleotide; AGG chr2 60536906 60536925 60536909 -
ataattcagctgctgacagc

SEQ ID NO: 173384 - DNA, 20 bp, Artificial Sequence
  Synthetic oligonucleotide; TGG chr2 60536894 60536913 60536897 -
ctgacagcaggcattgttgt

SEQ ID NO: 173385 - DNA, 20 bp, Artificial Sequence
  Synthetic oligonucleotide; CAG chr2 60536870 60536889 60536873 -
cctgtcttttgtgcttgtcc

SEQ ID NO: 173386 - DNA, 20 bp, Artificial Sequence
  Synthetic oligonucleotide; TGG chr2 60536864 60536883 60536867 -
ttttgtgcttgtcccagctc

SEQ ID NO: 173387 - DNA, 20 bp, Artificial Sequence
  Synthetic oligonucleotide; GGG chr2 60536863 60536882 60536866 -
tttgtgcttgtcccagctct

SEQ ID NO: 173388 - DNA, 20 bp, Artificial Sequence
  Synthetic oligonucleotide; TGG chr2 60536838 60536857 60536841 -
cccctcccctcctatctgct

SEQ ID NO: 173389 - DNA, 20 bp, Artificial Sequence
  Synthetic oligonucleotide; GGG chr2 60536837 60536856 60536840 -
ccctcccctcctatctgctt

SEQ ID NO: 173390 - DNA, 20 bp, Artificial Sequence
  Synthetic oligonucleotide; GGG chr2 60536836 60536855 60536839 -
cctcccctcctatctgcttg

SEQ ID NO: 173391 - DNA, 20 bp, Artificial Sequence
  Synthetic oligonucleotide; CAG chr2 60536833 60536852 60536836 -
cccctcctatctgcttgggg

SEQ ID NO: 173392 - DNA, 20 bp, Artificial Sequence
  Synthetic oligonucleotide; CAG chr2 60536807 60536826 60536810 -
gctgcctgcacactgctgac

SEQ ID NO: 173393 - DNA, 20 bp, Artificial Sequence
  Synthetic oligonucleotide; AAG chr2 60536804 60536823 60536807 -
gcctgcacactgctgaccag

SEQ ID NO: 173394 - DNA, 20 bp, Artificial Sequence
  Synthetic oligonucleotide; AAG chr2 60536785 60536804 60536788 -
gaagttaattgctatatatt

SEQ ID NO: 173395 - DNA, 20 bp, Artificial Sequence
  Synthetic oligonucleotide; TAG chr2 60536778 60536797 60536781 -
attgctatatattaagtata

SEQ ID NO: 173396 - DNA, 20 bp, Artificial Sequence
  Synthetic oligonucleotide; AGG chr2 60536777 60536796 60536780 -
ttgctatatattaagtatat

SEQ ID NO: 173397 - DNA, 20 bp, Artificial Sequence
  Synthetic oligonucleotide; AAG chr2 60536763 60536782 60536766 -
gtatataggtattgtattta

SEQ ID NO: 173398 - DNA, 20 bp, Artificial Sequence
  Synthetic oligonucleotide; GAG chr2 60536761 60536780 60536764 -
atataggtattgtatttaaa

SEQ ID NO: 173399 - DNA, 20 bp, Artificial Sequence
  Synthetic oligonucleotide; AGG chr2 60536760 60536779 60536763 -
tataggtattgtatttaaag

SEQ ID NO: 173400 - DNA, 20 bp, Artificial Sequence
  Synthetic oligonucleotide; AAG chr2 60536749 60536768 60536752 -
tatttaaagaggaatatctc

SEQ ID NO: 173401 - DNA, 20 bp, Artificial Sequence
  Synthetic oligonucleotide; AGG chr2 60536748 60536767 60536751 -
atttaaagaggaatatctca

SEQ ID NO: 173402 - DNA, 20 bp, Artificial Sequence
  Synthetic oligonucleotide; CGG chr2 60536706 60536725 60536709 -
tttactttctgatgtgattg

SEQ ID NO: 173403 - DNA, 20 bp, Artificial Sequence
  Synthetic oligonucleotide; CAG chr2 60536697 60536716 60536700 -
tgatgtgattgcggtgttgc

SEQ ID NO: 173404 - DNA, 20 bp, Artificial Sequence
  Synthetic oligonucleotide; CAG chr2 60536694 60536713 60536697 -
tgtgattgcggtgttgccag

SEQ ID NO: 173405 - DNA, 20 bp, Artificial Sequence
  Synthetic oligonucleotide; AGG chr2 60536693 60536712 60536696 -
gtgattgcggtgttgccagc

SEQ ID NO: 173406 - DNA, 20 bp, Artificial Sequence
  Synthetic oligonucleotide; GGG chr2 60536692 60536711 60536695 -
tgattgcggtgttgccagca

SEQ ID NO: 173407 - DNA, 20 bp, Artificial Sequence
  Synthetic oligonucleotide; GGG chr2 60536691 60536710 60536694 -
gattgcggtgttgccagcag

SEQ ID NO: 173408 - DNA, 20 bp, Artificial Sequence
  Synthetic oligonucleotide; GGG chr2 60536690 60536709 60536693 -
attgcggtgttgccagcagg

SEQ ID NO: 173409 - DNA, 20 bp, Artificial Sequence
  Synthetic oligonucleotide; GGG chr2 60536689 60536708 60536692 -
ttgcggtgttgccagcaggg

SEQ ID NO: 173410 - DNA, 20 bp, Artificial Sequence
  Synthetic oligonucleotide; TGG chr2 60536686 60536705 60536689 -
cggtgttgccagcagggggg

SEQ ID NO: 173411 - DNA, 20 bp, Artificial Sequence
  Synthetic oligonucleotide; CAG chr2 60536683 60536702 60536686 -
tgttgccagcaggggggtgg

SEQ ID NO: 173412 - DNA, 20 bp, Artificial Sequence
  Synthetic oligonucleotide; AGG chr2 60536682 60536701 60536685 -
gttgccagcaggggggtggc

SEQ ID NO: 173413 - DNA, 20 bp, Artificial Sequence
  Synthetic oligonucleotide; TAG chr2 60536667 60536686 60536670 -
gtggcaggcaaacgctctaa

SEQ ID NO: 173414 - DNA, 20 bp, Artificial Sequence
  Synthetic oligonucleotide; AGG chr2 60536666 60536685 60536669 -
tggcaggcaaacgctctaat

SEQ ID NO: 173415 - DNA, 20 bp, Artificial Sequence
  Synthetic oligonucleotide; GGG chr2 60536665 60536684 60536668 -
ggcaggcaaacgctctaata

SEQ ID NO: 173416 - DNA, 20 bp, Artificial Sequence
  Synthetic oligonucleotide; AAG chr2 60536651 60536670 60536654 -
ctaatagggaaaatcacttg

SEQ ID NO: 173417 - DNA, 20 bp, Artificial Sequence
  Synthetic oligonucleotide; AGG chr2 60536650 60536669 60536653 -
taatagggaaaatcacttga

SEQ ID NO: 173418 - DNA, 20 bp, Artificial Sequence
  Synthetic oligonucleotide; CAG chr2 60536647 60536666 60536650 -
tagggaaaatcacttgaagg

SEQ ID NO: 173419 - DNA, 20 bp, Artificial Sequence
  Synthetic oligonucleotide; TAG chr2 60536643 60536662 60536646 -
gaaaatcacttgaaggcagt

SEQ ID NO: 173420 - DNA, 20 bp, Artificial Sequence
  Synthetic oligonucleotide; AGG chr2 60536642 60536661 60536645 -
aaaatcacttgaaggcagtt

SEQ ID NO: 173421 - DNA, 20 bp, Artificial Sequence
  Synthetic oligonucleotide; GGG chr2 60536641 60536660 60536644 -
aaatcacttgaaggcagtta

SEQ ID NO: 173422 - DNA, 20 bp, Artificial Sequence
  Synthetic oligonucleotide; GGG chr2 60536640 60536659 60536643 -
aatcacttgaaggcagttag

SEQ ID NO: 173423 - DNA, 20 bp, Artificial Sequence
  Synthetic oligonucleotide; TGG chr2 60536632 60536651 60536635 -
gaaggcagttaggggaaatt

SEQ ID NO: 173424 - DNA, 20 bp, Artificial Sequence
  Synthetic oligonucleotide; AAG chr2 60536624 60536643 60536627 -
ttaggggaaatttggccttc

SEQ ID NO: 173425 - DNA, 20 bp, Artificial Sequence
  Synthetic oligonucleotide; TAG chr2 60536607 60536626 60536610 -
ttcaagtcccatttgctctg

SEQ ID NO: 173426 - DNA, 20 bp, Artificial Sequence
  Synthetic oligonucleotide; TAG chr2 60536602 60536621 60536605 -
gtcccatttgctctgtagtg

SEQ ID NO: 173427 - DNA, 20 bp, Artificial Sequence
  Synthetic oligonucleotide; TGG chr2 60536596 60536615 60536599 -
tttgctctgtagtgtagcat

SEQ ID NO: 173428 - DNA, 20 bp, Artificial Sequence
  Synthetic oligonucleotide; TAG chr2 60536514 60536533 60536517 -
ctcattgaactctactcatg

SEQ ID NO: 173429 - DNA, 20 bp, Artificial Sequence
  Synthetic oligonucleotide; GAG chr2 60536512 60536531 60536515 -
cattgaactctactcatgta

SEQ ID NO: 173430 - DNA, 20 bp, Artificial Sequence
  Synthetic oligonucleotide; TAG chr2 60536503 60536522 60536506 -
ctactcatgtagagtaacat

SEQ ID NO: 173431 - DNA, 20 bp, Artificial Sequence
  Synthetic oligonucleotide; CGG chr2 60536493 60536512 60536496 -
agagtaacattagtgtcaaa

SEQ ID NO: 173432 - DNA, 20 bp, Artificial Sequence
  Synthetic oligonucleotide; TGG chr2 60536487 60536506 60536490 -
acattagtgtcaaacggaat

SEQ ID NO: 173433 - DNA, 20 bp, Artificial Sequence
  Synthetic oligonucleotide; CAG chr2 60536483 60536502 60536486 -
tagtgtcaaacggaattggt

SEQ ID NO: 173434 - DNA, 20 bp, Artificial Sequence
  Synthetic oligonucleotide; AGG chr2 60536482 60536501 60536485 -
agtgtcaaacggaattggtc

SEQ ID NO: 173435 - DNA, 20 bp, Artificial Sequence
  Synthetic oligonucleotide; TGG chr2 60536475 60536494 60536478 -
aacggaattggtcaggactg

SEQ ID NO: 173436 - DNA, 20 bp, Artificial Sequence
  Synthetic oligonucleotide; TGG chr2 60536467 60536486 60536470 -
tggtcaggactgtggacctg

SEQ ID NO: 173437 - DNA, 20 bp, Artificial Sequence
  Synthetic oligonucleotide; CAG chr2 60536458 60536477 60536461 -
ctgtggacctgtggctcata

SEQ ID NO: 173438 - DNA, 20 bp, Artificial Sequence
  Synthetic oligonucleotide; TGG chr2 60536454 60536473 60536457 -
ggacctgtggctcatacaga

SEQ ID NO: 173439 - DNA, 20 bp, Artificial Sequence
  Synthetic oligonucleotide; TGG chr2 60536448 60536467 60536451 -
gtggctcatacagatggttg

SEQ ID NO: 173440 - DNA, 20 bp, Artificial Sequence
  Synthetic oligonucleotide; TGG chr2 60536442 60536461 60536445 -
catacagatggttgtggatg

SEQ ID NO: 173441 - DNA, 20 bp, Artificial Sequence
  Synthetic oligonucleotide; GGG chr2 60536441 60536460 60536444 -
atacagatggttgtggatgt

SEQ ID NO: 173442 - DNA, 20 bp, Artificial Sequence
  Synthetic oligonucleotide; CAG chr2 60536431 60536450 60536434 -
ttgtggatgtgggttccatg

SEQ ID NO: 173443 - DNA, 20 bp, Artificial Sequence
  Synthetic oligonucleotide; TGG chr2 60536392 60536411 60536395 -
ttctaataaatgttaaaatg

SEQ ID NO: 173444 - DNA, 20 bp, Artificial Sequence
  Synthetic oligonucleotide; GAG chr2 60536380 60536399 60536383 -
ttaaaatgtggcacatttct

SEQ ID NO: 173445 - DNA, 20 bp, Artificial Sequence
  Synthetic oligonucleotide; CAG chr2 60536377 60536396 60536380 -
aaatgtggcacatttctgag

SEQ ID NO: 173446 - DNA, 20 bp, Artificial Sequence
  Synthetic oligonucleotide; AGG chr2 60536376 60536395 60536379 -
aatgtggcacatttctgagc

SEQ ID NO: 173447 - DNA, 20 bp, Artificial Sequence
  Synthetic oligonucleotide; GGG chr2 60536375 60536394 60536378 -
atgtggcacatttctgagca

SEQ ID NO: 173448 - DNA, 20 bp, Artificial Sequence
  Synthetic oligonucleotide; AAG chr2 60536369 60536388 60536372 -
cacatttctgagcagggccc

SEQ ID NO: 173449 - DNA, 20 bp, Artificial Sequence
  Synthetic oligonucleotide; AGG chr2 60536368 60536387 60536371 -
acatttctgagcagggccca

SEQ ID NO: 173450 - DNA, 20 bp, Artificial Sequence
  Synthetic oligonucleotide; AAG chr2 60536363 60536382 60536366 -
tctgagcagggcccaaggat

SEQ ID NO: 173451 - DNA, 20 bp, Artificial Sequence
  Synthetic oligonucleotide; GAG chr2 60536361 60536380 60536364 -
tgagcagggcccaaggataa

SEQ ID NO: 173452 - DNA, 20 bp, Artificial Sequence
  Synthetic oligonucleotide; GAG chr2 60536359 60536378 60536362 -
agcagggcccaaggataaga

SEQ ID NO: 173453 - DNA, 20 bp, Artificial Sequence
  Synthetic oligonucleotide; AAG chr2 60536354 60536373 60536357 -
ggcccaaggataagagagtt

SEQ ID NO: 173454 - DNA, 20 bp, Artificial Sequence
  Synthetic oligonucleotide; CAG chr2 60536347 60536366 60536350 -
ggataagagagttaagaaat

SEQ ID NO: 173455 - DNA, 20 bp, Artificial Sequence
  Synthetic oligonucleotide; AGG chr2 60536346 60536365 60536349 -
gataagagagttaagaaatc

SEQ ID NO: 173456 - DNA, 20 bp, Artificial Sequence
  Synthetic oligonucleotide; GGG chr2 60536345 60536364 60536348 -
ataagagagttaagaaatca

SEQ ID NO: 173457 - DNA, 20 bp, Artificial Sequence
  Synthetic oligonucleotide; GGG chr2 60536344 60536363 60536347 -
taagagagttaagaaatcag

SEQ ID NO: 173458 - DNA, 20 bp, Artificial Sequence
  Synthetic oligonucleotide; GGG chr2 60536343 60536362 60536346 -
aagagagttaagaaatcagg

SEQ ID NO: 173459 - DNA, 20 bp, Artificial Sequence
  Synthetic oligonucleotide; TAG chr2 60536340 60536359 60536343 -
agagttaagaaatcaggggg

SEQ ID NO: 173460 - DNA, 20 bp, Artificial Sequence
  Synthetic oligonucleotide; GAG chr2 60536332 60536351 60536335 -
gaaatcagggggtagtacct

SEQ ID NO: 173461 - DNA, 20 bp, Artificial Sequence
  Synthetic oligonucleotide; CGG chr2 60536282 60536301 60536285 -
cttgataacatccacatttc

SEQ ID NO: 173462 - DNA, 20 bp, Artificial Sequence
  Synthetic oligonucleotide; AAG chr2 60536278 60536297 60536281 -
ataacatccacatttccggt

SEQ ID NO: 173463 - DNA, 20 bp, Artificial Sequence
  Synthetic oligonucleotide; TAG chr2 60536267 60536286 60536270 -
atttccggtaagatcaactc

SEQ ID NO: 173464 - DNA, 20 bp, Artificial Sequence
  Synthetic oligonucleotide; AGG chr2 60536266 60536285 60536269 -
tttccggtaagatcaactct

SEQ ID NO: 173465 - DNA, 20 bp, Artificial Sequence
  Synthetic oligonucleotide; GAG chr2 60536264 60536283 60536267 -
tccggtaagatcaactctag

SEQ ID NO: 173466 - DNA, 20 bp, Artificial Sequence
  Synthetic oligonucleotide; AAG chr2 60536260 60536279 60536263 -
gtaagatcaactctaggaga

SEQ ID NO: 173467 - DNA, 20 bp, Artificial Sequence
  Synthetic oligonucleotide; GAG chr2 60536254 60536273 60536257 -
tcaactctaggagaaagtct

SEQ ID NO: 173468 - DNA, 20 bp, Artificial Sequence
  Synthetic oligonucleotide; AGG chr2 60536253 60536272 60536256 -
caactctaggagaaagtctg

SEQ ID NO: 173469 - DNA, 20 bp, Artificial Sequence
  Synthetic oligonucleotide; TGG chr2 60536249 60536268 60536252 -
tctaggagaaagtctgaggc

SEQ ID NO: 173470 - DNA, 20 bp, Artificial Sequence
  Synthetic oligonucleotide; GGG chr2 60536248 60536267 60536251 -
ctaggagaaagtctgaggct

SEQ ID NO: 173471 - DNA, 20 bp, Artificial Sequence
  Synthetic oligonucleotide; GGG chr2 60536247 60536266 60536250 -
taggagaaagtctgaggctg

SEQ ID NO: 173472 - DNA, 20 bp, Artificial Sequence
  Synthetic oligonucleotide; GGG chr2 60536246 60536265 60536249 -
aggagaaagtctgaggctgg

SEQ ID NO: 173473 - DNA, 20 bp, Artificial Sequence
  Synthetic oligonucleotide; GAG chr2 60536244 60536263 60536247 -
gagaaagtctgaggctgggg

SEQ ID NO: 173474 - DNA, 20 bp, Artificial Sequence
  Synthetic oligonucleotide; GAG chr2 60536242 60536261 60536245 -
gaaagtctgaggctggggga

SEQ ID NO: 173475 - DNA, 20 bp, Artificial Sequence
  Synthetic oligonucleotide; GAG chr2 60536240 60536259 60536243 -
aagtctgaggctgggggaga

SEQ ID NO: 173476 - DNA, 20 bp, Artificial Sequence
  Synthetic oligonucleotide; AGG chr2 60536239 60536258 60536242 -
agtctgaggctgggggagag

SEQ ID NO: 173477 - DNA, 20 bp, Artificial Sequence
  Synthetic oligonucleotide; GGG chr2 60536238 60536257 60536241 -
gtctgaggctgggggagaga

SEQ ID NO: 173478 - DNA, 20 bp, Artificial Sequence
  Synthetic oligonucleotide; GGG chr2 60536237 60536256 60536240 -
tctgaggctgggggagagag

SEQ ID NO: 173479 - DNA, 20 bp, Artificial Sequence
  Synthetic oligonucleotide; GGG chr2 60536236 60536255 60536239 -
ctgaggctgggggagagagg

SEQ ID NO: 173480 - DNA, 20 bp, Artificial Sequence
  Synthetic oligonucleotide; GAG chr2 60536234 60536253 60536237 -
gaggctgggggagagagggg

SEQ ID NO: 173481 - DNA, 20 bp, Artificial Sequence
  Synthetic oligonucleotide; AAG chr2 60536231 60536250 60536234 -
gctgggggagagagggggag

SEQ ID NO: 173482 - DNA, 20 bp, Artificial Sequence
  Synthetic oligonucleotide; AGG chr2 60536230 60536249 60536233 -
ctgggggagagagggggaga

SEQ ID NO: 173483 - DNA, 20 bp, Artificial Sequence
  Synthetic oligonucleotide; GGG chr2 60536229 60536248 60536232 -
tgggggagagagggggagaa

SEQ ID NO: 173484 - DNA, 20 bp, Artificial Sequence
  Synthetic oligonucleotide; CGG chr2 60536224 60536243 60536227 -
gagagagggggagaagggtg

SEQ ID NO: 173485 - DNA, 20 bp, Artificial Sequence
  Synthetic oligonucleotide; GAG chr2 60536222 60536241 60536225 -
gagagggggagaagggtgcg

SEQ ID NO: 173486 - DNA, 20 bp, Artificial Sequence
  Synthetic oligonucleotide; GAG chr2 60536220 60536239 60536223 -
gagggggagaagggtgcgga

SEQ ID NO: 173487 - DNA, 20 bp, Artificial Sequence
  Synthetic oligonucleotide; GAG chr2 60536218 60536237 60536221 -
gggggagaagggtgcggaga

SEQ ID NO: 173488 - DNA, 20 bp, Artificial Sequence
  Synthetic oligonucleotide; AGG chr2 60536217 60536236 60536220 -
ggggagaagggtgcggagag

SEQ ID NO: 173489 - DNA, 20 bp, Artificial Sequence
  Synthetic oligonucleotide; TGG chr2 60536210 60536229 60536213 -
agggtgcggagagaggttct

SEQ ID NO: 173490 - DNA, 20 bp, Artificial Sequence
  Synthetic oligonucleotide; TAG chr2 60536195 60536214 60536198 -
gttcttggaatattcttcga

SEQ ID NO: 173491 - DNA, 20 bp, Artificial Sequence
  Synthetic oligonucleotide; CAG chr2 60536192 60536211 60536195 -
cttggaatattcttcgatag

SEQ ID NO: 173492 - DNA, 20 bp, Artificial Sequence
  Synthetic oligonucleotide; CAG chr2 60536172 60536191 60536175 -
cagttcaaatgaaatcccca

SEQ ID NO: 173493 - DNA, 20 bp, Artificial Sequence
  Synthetic oligonucleotide; CAG chr2 60536169 60536188 60536172 -
ttcaaatgaaatccccacag

SEQ ID NO: 173494 - DNA, 20 bp, Artificial Sequence
  Synthetic oligonucleotide; GAG chr2 60536167 60536186 60536170 -
caaatgaaatccccacagca

SEQ ID NO: 173495 - DNA, 20 bp, Artificial Sequence
  Synthetic oligonucleotide; GAG chr2 60536165 60536184 60536168 -
aatgaaatccccacagcaga

SEQ ID NO: 173496 - DNA, 20 bp, Artificial Sequence
  Synthetic oligonucleotide; TGG chr2 60536158 60536177 60536161 -
tccccacagcagagagcttt

SEQ ID NO: 173497 - DNA, 20 bp, Artificial Sequence
  Synthetic oligonucleotide; GGG chr2 60536157 60536176 60536160 -
ccccacagcagagagctttt

SEQ ID NO: 173498 - DNA, 20 bp, Artificial Sequence
  Synthetic oligonucleotide; TAG chr2 60536152 60536171 60536155 -
cagcagagagcttttgggtc

SEQ ID NO: 173499 - DNA, 20 bp, Artificial Sequence
  Synthetic oligonucleotide; CAG chr2 60536149 60536168 60536152 -
cagagagcttttgggtctag

SEQ ID NO: 173500 - DNA, 20 bp, Artificial Sequence
  Synthetic oligonucleotide; TGG chr2 60536146 60536165 60536149 -
agagcttttgggtctagcag

SEQ ID NO: 173501 - DNA, 20 bp, Artificial Sequence
  Synthetic oligonucleotide; GAG chr2 60536144 60536163 60536147 -
agcttttgggtctagcagtg

SEQ ID NO: 173502 - DNA, 20 bp, Artificial Sequence
  Synthetic oligonucleotide; CGG chr2 60536141 60536160 60536144 -
ttttgggtctagcagtggag

SEQ ID NO: 173503 - DNA, 20 bp, Artificial Sequence
  Synthetic oligonucleotide; AAG chr2 60536137 60536156 60536140 -
gggtctagcagtggagcggt

SEQ ID NO: 173504 - DNA, 20 bp, Artificial Sequence
  Synthetic oligonucleotide; TGG chr2 60536133 60536152 60536136 -
ctagcagtggagcggtaagc

SEQ ID NO: 173505 - DNA, 20 bp, Artificial Sequence
  Synthetic oligonucleotide; GGG chr2 60536132 60536151 60536135 -
tagcagtggagcggtaagct

SEQ ID NO: 173506 - DNA, 20 bp, Artificial Sequence
  Synthetic oligonucleotide; TGG chr2 60536124 60536143 60536127 -
gagcggtaagctgggacacg

SEQ ID NO: 173507 - DNA, 20 bp, Artificial Sequence
  Synthetic oligonucleotide; AAG chr2 60536114 60536133 60536117 -
ctgggacacgtggcctttcg

SEQ ID NO: 173508 - DNA, 20 bp, Artificial Sequence
  Synthetic oligonucleotide; CAG chr2 60536101 60536120 60536104 -
cctttcgaagctgttattct

SEQ ID NO: 173509 - DNA, 20 bp, Artificial Sequence
  Synthetic oligonucleotide; CAG chr2 60536084 60536103 60536087 -
tctcagtctgacttgcacac

SEQ ID NO: 173510 - DNA, 20 bp, Artificial Sequence
  Synthetic oligonucleotide; GAG chr2 60536079 60536098 60536082 -
gtctgacttgcacaccagct

SEQ ID NO: 173511 - DNA, 20 bp, Artificial Sequence
  Synthetic oligonucleotide; TAG chr2 60536075 60536094 60536078 -
gacttgcacaccagctgaga

SEQ ID NO: 173512 - DNA, 20 bp, Artificial Sequence
  Synthetic oligonucleotide; AGG chr2 60536074 60536093 60536077 -
acttgcacaccagctgagat

SEQ ID NO: 173513 - DNA, 20 bp, Artificial Sequence
  Synthetic oligonucleotide; TGG chr2 60536043 60536062 60536046 -
tatactttcttgctttcacc

SEQ ID NO: 173514 - DNA, 20 bp, Artificial Sequence
  Synthetic oligonucleotide; GGG chr2 60536042 60536061 60536045 -
atactttcttgctttcacct

SEQ ID NO: 173515 - DNA, 20 bp, Artificial Sequence
  Synthetic oligonucleotide; TGG chr2 60536038 60536057 60536041 -
tttcttgctttcacctgggt

SEQ ID NO: 173516 - DNA, 20 bp, Artificial Sequence
  Synthetic oligonucleotide; GAG chr2 60536036 60536055 60536039 -
tcttgctttcacctgggttg

SEQ ID NO: 173517 - DNA, 20 bp, Artificial Sequence
  Synthetic oligonucleotide; GAG chr2 60536034 60536053 60536037 -
ttgctttcacctgggttgga

SEQ ID NO: 173518 - DNA, 20 bp, Artificial Sequence
  Synthetic oligonucleotide; AGG chr2 60536033 60536052 60536036 -
tgctttcacctgggttggag

SEQ ID NO: 173519 - DNA, 20 bp, Artificial Sequence
  Synthetic oligonucleotide; TGG chr2 60536029 60536048 60536032 -
ttcacctgggttggagaggt

SEQ ID NO: 173520 - DNA, 20 bp, Artificial Sequence
  Synthetic oligonucleotide; GGG chr2 60536028 60536047 60536031 -
tcacctgggttggagaggtt

SEQ ID NO: 173521 - DNA, 20 bp, Artificial Sequence
  Synthetic oligonucleotide; GGG chr2 60536027 60536046 60536030 -
cacctgggttggagaggttg

SEQ ID NO: 173522 - DNA, 20 bp, Artificial Sequence
  Synthetic oligonucleotide; TGG chr2 60536023 60536042 60536026 -
tgggttggagaggttggggt

SEQ ID NO: 173523 - DNA, 20 bp, Artificial Sequence
  Synthetic oligonucleotide; GGG chr2 60536022 60536041 60536025 -
gggttggagaggttggggtt

SEQ ID NO: 173524 - DNA, 20 bp, Artificial Sequence
  Synthetic oligonucleotide; GAG chr2 60536020 60536039 60536023 -
gttggagaggttggggttgg

SEQ ID NO: 173525 - DNA, 20 bp, Artificial Sequence
  Synthetic oligonucleotide; AGG chr2 60536019 60536038 60536022 -
ttggagaggttggggttggg

SEQ ID NO: 173526 - DNA, 20 bp, Artificial Sequence
  Synthetic oligonucleotide; AAG chr2 60536016 60536035 60536019 -
gagaggttggggttgggagg

SEQ ID NO: 173527 - DNA, 20 bp, Artificial Sequence
  Synthetic oligonucleotide; GAG chr2 60536014 60536033 60536017 -
gaggttggggttgggaggaa

SEQ ID NO: 173528 - DNA, 20 bp, Artificial Sequence
  Synthetic oligonucleotide; AGG chr2 60536013 60536032 60536016 -
aggttggggttgggaggaag

SEQ ID NO: 173529 - DNA, 20 bp, Artificial Sequence
  Synthetic oligonucleotide; GAG chr2 60536011 60536030 60536014 -
gttggggttgggaggaagag

SEQ ID NO: 173530 - DNA, 20 bp, Artificial Sequence
  Synthetic oligonucleotide; AGG chr2 60536010 60536029 60536013 -
ttggggttgggaggaagagg

SEQ ID NO: 173531 - DNA, 20 bp, Artificial Sequence
  Synthetic oligonucleotide; GAG chr2 60536008 60536027 60536011 -
ggggttgggaggaagaggag

SEQ ID NO: 173532 - DNA, 20 bp, Artificial Sequence
  Synthetic oligonucleotide; TGG chr2 60536000 60536019 60536003 -
gaggaagaggaggagttcat

SEQ ID NO: 173533 - DNA, 20 bp, Artificial Sequence
  Synthetic oligonucleotide; GGG chr2 60535999 60536018 60536002 -
aggaagaggaggagttcatt

SEQ ID NO: 173534 - DNA, 20 bp, Artificial Sequence
  Synthetic oligonucleotide; TAG chr2 60535985 60536004 60535988 -
ttcattgggaattctgtcac

SEQ ID NO: 173535 - DNA, 20 bp, Artificial Sequence
  Synthetic oligonucleotide; CAG chr2 60535968 60535987 60535971 -
cactagaattttttaaatgt

SEQ ID NO: 173536 - DNA, 20 bp, Artificial Sequence
  Synthetic oligonucleotide; AGG chr2 60535967 60535986 60535970 -
actagaattttttaaatgtc

SEQ ID NO: 173537 - DNA, 20 bp, Artificial Sequence
  Synthetic oligonucleotide; GAG chr2 60535965 60535984 60535968 -
tagaattttttaaatgtcag

SEQ ID NO: 173538 - DNA, 20 bp, Artificial Sequence
  Synthetic oligonucleotide; AGG chr2 60535964 60535983 60535967 -
agaattttttaaatgtcagg

SEQ ID NO: 173539 - DNA, 20 bp, Artificial Sequence
  Synthetic oligonucleotide; TAG chr2 60535960 60535979 60535963 -
ttttttaaatgtcaggaggt

SEQ ID NO: 173540 - DNA, 20 bp, Artificial Sequence
  Synthetic oligonucleotide; AAG chr2 60535956 60535975 60535959 -
ttaaatgtcaggaggttagc

SEQ ID NO: 173541 - DNA, 20 bp, Artificial Sequence
  Synthetic oligonucleotide; AGG chr2 60535955 60535974 60535958 -
taaatgtcaggaggttagca

SEQ ID NO: 173542 - DNA, 20 bp, Artificial Sequence
  Synthetic oligonucleotide; GAG chr2 60535949 60535968 60535952 -
tcaggaggttagcaaggtgt

SEQ ID NO: 173543 - DNA, 20 bp, Artificial Sequence
  Synthetic oligonucleotide; TAG chr2 60535945 60535964 60535948 -
gaggttagcaaggtgtgagt

SEQ ID NO: 173544 - DNA, 20 bp, Artificial Sequence
  Synthetic oligonucleotide; AAG chr2 60535937 60535956 60535940 -
caaggtgtgagttagcattc

SEQ ID NO: 173545 - DNA, 20 bp, Artificial Sequence
  Synthetic oligonucleotide; AAG chr2 60535932 60535951 60535935 -
tgtgagttagcattcaagca

SEQ ID NO: 173546 - DNA, 20 bp, Artificial Sequence
  Synthetic oligonucleotide; AGG chr2 60535931 60535950 60535934 -
gtgagttagcattcaagcaa

SEQ ID NO: 173547 - DNA, 20 bp, Artificial Sequence
  Synthetic oligonucleotide; CAG chr2 60535919 60535938 60535922 -
tcaagcaaaggattcttctc

SEQ ID NO: 173548 - DNA, 20 bp, Artificial Sequence
  Synthetic oligonucleotide; TAG chr2 60535914 60535933 60535917 -
caaaggattcttctccagac

SEQ ID NO: 173549 - DNA, 20 bp, Artificial Sequence
  Synthetic oligonucleotide; TGG chr2 60535907 60535926 60535910 -
ttcttctccagactagtaat

SEQ ID NO: 173550 - DNA, 20 bp, Artificial Sequence
  Synthetic oligonucleotide; AAG chr2 60535903 60535922 60535906 -
tctccagactagtaattgga

SEQ ID NO: 173551 - DNA, 20 bp, Artificial Sequence
  Synthetic oligonucleotide; CAG chr2 60535890 60535909 60535893 -
aattggaaagcctgcaaatc

SEQ ID NO: 173552 - DNA, 20 bp, Artificial Sequence
  Synthetic oligonucleotide; AGG chr2 60535889 60535908 60535892 -
attggaaagcctgcaaatcc

SEQ ID NO: 173553 - DNA, 20 bp, Artificial Sequence
  Synthetic oligonucleotide; TGG chr2 60535863 60535882 60535866 -
ccacgatactctctaataac

SEQ ID NO: 173554 - DNA, 20 bp, Artificial Sequence
  Synthetic oligonucleotide; GGG chr2 60535862 60535881 60535865 -
cacgatactctctaataact

SEQ ID NO: 173555 - DNA, 20 bp, Artificial Sequence
  Synthetic oligonucleotide; GGG chr2 60535861 60535880 60535864 -
acgatactctctaataactg

SEQ ID NO: 173556 - DNA, 20 bp, Artificial Sequence
  Synthetic oligonucleotide; TGG chr2 60535858 60535877 60535861 -
atactctctaataactgggg

SEQ ID NO: 173557 - DNA, 20 bp, Artificial Sequence
  Synthetic oligonucleotide; GGG chr2 60535857 60535876 60535860 -
tactctctaataactggggt

SEQ ID NO: 173558 - DNA, 20 bp, Artificial Sequence
  Synthetic oligonucleotide; TGG chr2 60535853 60535872 60535856 -
ctctaataactggggtggga

SEQ ID NO: 173559 - DNA, 20 bp, Artificial Sequence
  Synthetic oligonucleotide; TGG chr2 60535850 60535869 60535853 -
taataactggggtgggatgg

SEQ ID NO: 173560 - DNA, 20 bp, Artificial Sequence
  Synthetic oligonucleotide; TGG chr2 60535847 60535866 60535850 -
taactggggtgggatggtgg

SEQ ID NO: 173561 - DNA, 20 bp, Artificial Sequence
  Synthetic oligonucleotide; TGG chr2 60535844 60535863 60535847 -
ctggggtgggatggtggtgg

SEQ ID NO: 173562 - DNA, 20 bp, Artificial Sequence
  Synthetic oligonucleotide; GGG chr2 60535843 60535862 60535846 -
tggggtgggatggtggtggt

SEQ ID NO: 173563 - DNA, 20 bp, Artificial Sequence
  Synthetic oligonucleotide; TGG chr2 60535840 60535859 60535843 -
ggtgggatggtggtggtggg

SEQ ID NO: 173564 - DNA, 20 bp, Artificial Sequence
  Synthetic oligonucleotide; CAG chr2 60535816 60535835 60535819 -
caccacaactttctgaatgt

SEQ ID NO: 173565 - DNA, 20 bp, Artificial Sequence
  Synthetic oligonucleotide; TGG chr2 60535787 60535806 60535790 -
tctgcatgacccgttcacca

SEQ ID NO: 173566 - DNA, 20 bp, Artificial Sequence
  Synthetic oligonucleotide; CGG chr2 60535776 60535795 60535779 -
cgttcaccatggattaaatg

SEQ ID NO: 173567 - DNA, 20 bp, Artificial Sequence
  Synthetic oligonucleotide; TGG chr2 60535772 60535791 60535775 -
caccatggattaaatgcggc

SEQ ID NO: 173568 - DNA, 20 bp, Artificial Sequence
  Synthetic oligonucleotide; TGG chr2 60535762 60535781 60535765 -
taaatgcggctggtgccgaa

SEQ ID NO: 173569 - DNA, 20 bp, Artificial Sequence
  Synthetic oligonucleotide; GAG chr2 60535760 60535779 60535763 -
aatgcggctggtgccgaatg

SEQ ID NO: 173570 - DNA, 20 bp, Artificial Sequence
  Synthetic oligonucleotide; AGG chr2 60535759 60535778 60535762 -
atgcggctggtgccgaatgg

SEQ ID NO: 173571 - DNA, 20 bp, Artificial Sequence
  Synthetic oligonucleotide; CAG chr2 60535752 60535771 60535755 -
tggtgccgaatggaggaaat

SEQ ID NO: 173572 - DNA, 20 bp, Artificial Sequence
  Synthetic oligonucleotide; AAG chr2 60535748 60535767 60535751 -
gccgaatggaggaaatcaga

SEQ ID NO: 173573 - DNA, 20 bp, Artificial Sequence
  Synthetic oligonucleotide; AGG chr2 60535747 60535766 60535750 -
ccgaatggaggaaatcagaa

SEQ ID NO: 173574 - DNA, 20 bp, Artificial Sequence
  Synthetic oligonucleotide; AAG chr2 60535736 60535755 60535739 -
aaatcagaaaggcaaatctc

SEQ ID NO: 173575 - DNA, 20 bp, Artificial Sequence
  Synthetic oligonucleotide; CAG chr2 60535730 60535749 60535733 -
gaaaggcaaatctcaagcaa

SEQ ID NO: 173576 - DNA, 20 bp, Artificial Sequence
  Synthetic oligonucleotide; AGG chr2 60535729 60535748 60535732 -
aaaggcaaatctcaagcaac

SEQ ID NO: 173577 - DNA, 20 bp, Artificial Sequence
  Synthetic oligonucleotide; CAG chr2 60535714 60535733 60535717 -
gcaacaggatttgcactcct

SEQ ID NO: 173578 - DNA, 20 bp, Artificial Sequence
  Synthetic oligonucleotide; AAG chr2 60535711 60535730 60535714 -
acaggatttgcactcctcag

SEQ ID NO: 173579 - DNA, 20 bp, Artificial Sequence
  Synthetic oligonucleotide; CAG chr2 60535703 60535722 60535706 -
tgcactcctcagaagtaaac

SEQ ID NO: 173580 - DNA, 20 bp, Artificial Sequence
  Synthetic oligonucleotide; TGG chr2 60535662 60535681 60535665 -
ctgtgcttctcctttcttgc

SEQ ID NO: 173581 - DNA, 20 bp, Artificial Sequence
  Synthetic oligonucleotide; TGG chr2 60535651 60535670 60535654 -
ctttcttgctggtttccctt

SEQ ID NO: 173582 - DNA, 20 bp, Artificial Sequence
  Synthetic oligonucleotide; AAG chr2 60535648 60535667 60535651 -
tcttgctggtttccctttgg

SEQ ID NO: 173583 - DNA, 20 bp, Artificial Sequence
  Synthetic oligonucleotide; CAG chr2 60535645 60535664 60535648 -
tgctggtttccctttggaag

SEQ ID NO: 173584 - DNA, 20 bp, Artificial Sequence
  Synthetic oligonucleotide; AAG chr2 60535617 60535636 60535620 -
tctaaaattaatgccactcc

SEQ ID NO: 173585 - DNA, 20 bp, Artificial Sequence
  Synthetic oligonucleotide; AAG chr2 60535605 60535624 60535608 -
gccactccaagccaatgaaa

SEQ ID NO: 173586 - DNA, 20 bp, Artificial Sequence
  Synthetic oligonucleotide; CAG chr2 60535588 60535607 60535591 -
aaaaagctgtttttatacca

SEQ ID NO: 173587 - DNA, 20 bp, Artificial Sequence
  Synthetic oligonucleotide; TGG chr2 60535585 60535604 60535588 -
aagctgtttttataccacag

SEQ ID NO: 173588 - DNA, 20 bp, Artificial Sequence
  Synthetic oligonucleotide; CAG chr2 60535573 60535592 60535576 -
taccacagtggatgtttaca

SEQ ID NO: 173589 - DNA, 20 bp, Artificial Sequence
  Synthetic oligonucleotide; AGG chr2 60535572 60535591 60535575 -
accacagtggatgtttacac

SEQ ID NO: 173590 - DNA, 20 bp, Artificial Sequence
  Synthetic oligonucleotide; GAG chr2 60535570 60535589 60535573 -
cacagtggatgtttacacag

SEQ ID NO: 173591 - DNA, 20 bp, Artificial Sequence
  Synthetic oligonucleotide; GAG chr2 60535568 60535587 60535571 -
cagtggatgtttacacagga

SEQ ID NO: 173592 - DNA, 20 bp, Artificial Sequence
  Synthetic oligonucleotide; GAG chr2 60535558 60535577 60535561 -
ttacacaggagagacaactt

SEQ ID NO: 173593 - DNA, 20 bp, Artificial Sequence
  Synthetic oligonucleotide; AGG chr2 60535557 60535576 60535560 -
tacacaggagagacaacttg

SEQ ID NO: 173594 - DNA, 20 bp, Artificial Sequence
  Synthetic oligonucleotide; GGG chr2 60535556 60535575 60535559 -
acacaggagagacaacttga

SEQ ID NO: 173595 - DNA, 20 bp, Artificial Sequence
  Synthetic oligonucleotide; GGG chr2 60535555 60535574 60535558 -
cacaggagagacaacttgag

SEQ ID NO: 173596 - DNA, 20 bp, Artificial Sequence
  Synthetic oligonucleotide; GGG chr2 60535554 60535573 60535557 -
acaggagagacaacttgagg

SEQ ID NO: 173597 - DNA, 20 bp, Artificial Sequence
  Synthetic oligonucleotide; AAG chr2 60535549 60535568 60535552 -
agagacaacttgagggggaa

SEQ ID NO: 173598 - DNA, 20 bp, Artificial Sequence
  Synthetic oligonucleotide; AGG chr2 60535548 60535567 60535551 -
gagacaacttgagggggaaa

SEQ ID NO: 173599 - DNA, 20 bp, Artificial Sequence
  Synthetic oligonucleotide; TGG chr2 60535540 60535559 60535543 -
ttgagggggaaaaggctttt

SEQ ID NO: 173600 - DNA, 20 bp, Artificial Sequence
  Synthetic oligonucleotide; AAG chr2 60535537 60535556 60535540 -
agggggaaaaggctttttgg

SEQ ID NO: 173601 - DNA, 20 bp, Artificial Sequence
  Synthetic oligonucleotide; AGG chr2 60535536 60535555 60535539 -
gggggaaaaggctttttgga

SEQ ID NO: 173602 - DNA, 20 bp, Artificial Sequence
  Synthetic oligonucleotide; GGG chr2 60535535 60535554 60535538 -
ggggaaaaggctttttggaa

SEQ ID NO: 173603 - DNA, 20 bp, Artificial Sequence
  Synthetic oligonucleotide; TGG chr2 60535532 60535551 60535535 -
gaaaaggctttttggaaggg

SEQ ID NO: 173604 - DNA, 20 bp, Artificial Sequence
  Synthetic oligonucleotide; GAG chr2 60535530 60535549 60535533 -
aaaggctttttggaagggtg

SEQ ID NO: 173605 - DNA, 20 bp, Artificial Sequence
  Synthetic oligonucleotide; AGG chr2 60535529 60535548 60535532 -
aaggctttttggaagggtgg

SEQ ID NO: 173606 - DNA, 20 bp, Artificial Sequence
  Synthetic oligonucleotide; GGG chr2 60535528 60535547 60535531 -
aggctttttggaagggtgga

SEQ ID NO: 173607 - DNA, 20 bp, Artificial Sequence
  Synthetic oligonucleotide; TGG chr2 60535504 60535523 60535507 -
ctcgtgttaatctgttctgt

SEQ ID NO: 173608 - DNA, 20 bp, Artificial Sequence
  Synthetic oligonucleotide; GAG chr2 60535502 60535521 60535505 -
cgtgttaatctgttctgttg

SEQ ID NO: 173609 - DNA, 20 bp, Artificial Sequence
  Synthetic oligonucleotide; AGG chr2 60535501 60535520 60535504 -
gtgttaatctgttctgttgg

SEQ ID NO: 173610 - DNA, 20 bp, Artificial Sequence
  Synthetic oligonucleotide; CAG chr2 60535492 60535511 60535495 -
tgttctgttggaggactatg

SEQ ID NO: 173611 - DNA, 20 bp, Artificial Sequence
  Synthetic oligonucleotide; GAG chr2 60535479 60535498 60535482 -
gactatgcagtattgcctat

SEQ ID NO: 173612 - DNA, 20 bp, Artificial Sequence
  Synthetic oligonucleotide; TGG chr2 60535470 60535489 60535473 -
gtattgcctatgagcgactc

SEQ ID NO: 173613 - DNA, 20 bp, Artificial Sequence
  Synthetic oligonucleotide; GGG chr2 60535469 60535488 60535472 -
tattgcctatgagcgactct

SEQ ID NO: 173614 - DNA, 20 bp, Artificial Sequence
  Synthetic oligonucleotide; TAG chr2 60535442 60535461 60535445 -
ttttgataaattaccatgtt

SEQ ID NO: 173615 - DNA, 20 bp, Artificial Sequence
  Synthetic oligonucleotide; GAG chr2 60535440 60535459 60535443 -
ttgataaattaccatgttta

SEQ ID NO: 173616 - DNA, 20 bp, Artificial Sequence
  Synthetic oligonucleotide; TAG chr2 60535436 60535455 60535439 -
taaattaccatgtttagaga

SEQ ID NO: 173617 - DNA, 20 bp, Artificial Sequence
  Synthetic oligonucleotide; AGG chr2 60535435 60535454 60535438 -
aaattaccatgtttagagat

SEQ ID NO: 173618 - DNA, 20 bp, Artificial Sequence
  Synthetic oligonucleotide; TGG chr2 60535430 60535449 60535433 -
accatgtttagagataggtt

SEQ ID NO: 173619 - DNA, 20 bp, Artificial Sequence
  Synthetic oligonucleotide; AAG chr2 60535422 60535441 60535425 -
tagagataggtttggctctt

SEQ ID NO: 173620 - DNA, 20 bp, Artificial Sequence
  Synthetic oligonucleotide; AGG chr2 60535421 60535440 60535424 -
agagataggtttggctctta

SEQ ID NO: 173621 - DNA, 20 bp, Artificial Sequence
  Synthetic oligonucleotide; GGG chr2 60535420 60535439 60535423 -
gagataggtttggctcttaa

SEQ ID NO: 173622 - DNA, 20 bp, Artificial Sequence
  Synthetic oligonucleotide; TAG chr2 60535415 60535434 60535418 -
aggtttggctcttaagggct

SEQ ID NO: 173623 - DNA, 20 bp, Artificial Sequence
  Synthetic oligonucleotide; AAG chr2 60535401 60535420 60535404 -
agggcttagttttatgaaca

SEQ ID NO: 173624 - DNA, 20 bp, Artificial Sequence
  Synthetic oligonucleotide; CAG chr2 60535382 60535401 60535385 -
aaagtccgtgacgatgtttg

SEQ ID NO: 173625 - DNA, 20 bp, Artificial Sequence
  Synthetic oligonucleotide; TAG chr2 60535364 60535383 60535367 -
tgcagcctctgtttgtatct

SEQ ID NO: 173626 - DNA, 20 bp, Artificial Sequence
  Synthetic oligonucleotide; TGG chr2 60535355 60535374 60535358 -
tgtttgtatcttagcccctt

SEQ ID NO: 173627 - DNA, 20 bp, Artificial Sequence
  Synthetic oligonucleotide; TAG chr2 60535346 60535365 60535349 -
cttagcccctttggcttgac

SEQ ID NO: 173628 - DNA, 20 bp, Artificial Sequence
  Synthetic oligonucleotide; AAG chr2 60535343 60535362 60535346 -
agcccctttggcttgactag

SEQ ID NO: 173629 - DNA, 20 bp, Artificial Sequence
  Synthetic oligonucleotide; TAG chr2 60535331 60535350 60535334 -
ttgactagaagctctatgtt

SEQ ID NO: 173630 - DNA, 20 bp, Artificial Sequence
  Synthetic oligonucleotide; AAG chr2 60535325 60535344 60535328 -
agaagctctatgtttagttt

SEQ ID NO: 173631 - DNA, 20 bp, Artificial Sequence
  Synthetic oligonucleotide; CAG chr2 60535320 60535339 60535323 -
ctctatgtttagtttaagct

SEQ ID NO: 173632 - DNA, 20 bp, Artificial Sequence
  Synthetic oligonucleotide; TGG chr2 60535315 60535334 60535318 -
tgtttagtttaagctcagtc

SEQ ID NO: 173633 - DNA, 20 bp, Artificial Sequence
  Synthetic oligonucleotide; AAG chr2 60535312 60535331 60535315 -
ttagtttaagctcagtctgg

SEQ ID NO: 173634 - DNA, 20 bp, Artificial Sequence
  Synthetic oligonucleotide; GAG chr2 60535283 60535302 60535286 -
caattttgcattaaaaaaat

SEQ ID NO: 173635 - DNA, 20 bp, Artificial Sequence
  Synthetic oligonucleotide; AGG chr2 60535282 60535301 60535285 -
aattttgcattaaaaaaatg

SEQ ID NO: 173636 - DNA, 20 bp, Artificial Sequence
  Synthetic oligonucleotide; TAG chr2 60535273 60535292 60535276 -
ttaaaaaaatgaggaaatca

SEQ ID NO: 173637 - DNA, 20 bp, Artificial Sequence
  Synthetic oligonucleotide; AGG chr2 60535272 60535291 60535275 -
taaaaaaatgaggaaatcat

SEQ ID NO: 173638 - DNA, 20 bp, Artificial Sequence
  Synthetic oligonucleotide; AAG chr2 60535269 60535288 60535272 -
aaaaatgaggaaatcatagg

SEQ ID NO: 173639 - DNA, 20 bp, Artificial Sequence
  Synthetic oligonucleotide; TGG chr2 60535249 60535268 60535252 -
aagaaaaaccctttgctttt

SEQ ID NO: 173640 - DNA, 20 bp, Artificial Sequence
  Synthetic oligonucleotide; AAG chr2 60535222 60535241 60535225 -
atcttactgataatttgcta

SEQ ID NO: 173641 - DNA, 20 bp, Artificial Sequence
  Synthetic oligonucleotide; AAG chr2 60535205 60535224 60535208 -
ctaaagctcatttgaatttt

SEQ ID NO: 173642 - DNA, 20 bp, Artificial Sequence
  Synthetic oligonucleotide; AAG chr2 60535185 60535204 60535188 -
aagcacttctttaatcttca

SEQ ID NO: 173643 - DNA, 20 bp, Artificial Sequence
  Synthetic oligonucleotide; AGG chr2 60535184 60535203 60535187 -
agcacttctttaatcttcaa

SEQ ID NO: 173644 - DNA, 20 bp, Artificial Sequence
  Synthetic oligonucleotide; TGG chr2 60535158 60535177 60535161 -
aattgctttatgaatatgca

SEQ ID NO: 173645 - DNA, 20 bp, Artificial Sequence
  Synthetic oligonucleotide; TGG chr2 60535153 60535172 60535156 -
ctttatgaatatgcatggtg

SEQ ID NO: 173646 - DNA, 20 bp, Artificial Sequence
  Synthetic oligonucleotide; GGG chr2 60535152 60535171 60535155 -
tttatgaatatgcatggtgt

SEQ ID NO: 173647 - DNA, 20 bp, Artificial Sequence
  Synthetic oligonucleotide; CAG chr2 60535149 60535168 60535152 -
atgaatatgcatggtgtggg

SEQ ID NO: 173648 - DNA, 20 bp, Artificial Sequence
  Synthetic oligonucleotide; CAG chr2 60535142 60535161 60535145 -
tgcatggtgtgggcagactt

SEQ ID NO: 173649 - DNA, 20 bp, Artificial Sequence
  Synthetic oligonucleotide; TAG chr2 60535130 60535149 60535133 -
gcagacttcagttcattacc

SEQ ID NO: 173650 - DNA, 20 bp, Artificial Sequence
  Synthetic oligonucleotide; TAG chr2 60535107 60535126 60535110 -
ttgtaaattctaatgaccat

SEQ ID NO: 173651 - DNA, 20 bp, Artificial Sequence
  Synthetic oligonucleotide; AGG chr2 60535106 60535125 60535109 -
tgtaaattctaatgaccatt

SEQ ID NO: 173652 - DNA, 20 bp, Artificial Sequence
  Synthetic oligonucleotide; CAG chr2 60535097 60535116 60535100 -
taatgaccattaggtccttc

SEQ ID NO: 173653 - DNA, 20 bp, Artificial Sequence
  Synthetic oligonucleotide; TGG chr2 60535066 60535085 60535069 -
aattgttttgcatttttgat

SEQ ID NO: 173654 - DNA, 20 bp, Artificial Sequence
  Synthetic oligonucleotide; CGG chr2 60535045 60535064 60535048 -
ggcctattaacatgtacatt

SEQ ID NO: 173655 - DNA, 20 bp, Artificial Sequence
  Synthetic oligonucleotide; CAG chr2 60535035 60535054 60535038 -
catgtacattcggtgcacat

SEQ ID NO: 173656 - DNA, 20 bp, Artificial Sequence
  Synthetic oligonucleotide; AGG chr2 60535034 60535053 60535037 -
atgtacattcggtgcacatc

SEQ ID NO: 173657 - DNA, 20 bp, Artificial Sequence
  Synthetic oligonucleotide; TGG chr2 60535030 60535049 60535033 -
acattcggtgcacatcaggc

SEQ ID NO: 173658 - DNA, 20 bp, Artificial Sequence
  Synthetic oligonucleotide; CAG chr2 60535022 60535041 60535025 -
tgcacatcaggctggcctgt

SEQ ID NO: 173659 - DNA, 20 bp, Artificial Sequence
  Synthetic oligonucleotide; AAG chr2 60535012 60535031 60535015 -
gctggcctgtcagcctgctg

SEQ ID NO: 173660 - DNA, 20 bp, Artificial Sequence
  Synthetic oligonucleotide; AGG chr2 60535011 60535030 60535014 -
ctggcctgtcagcctgctga

SEQ ID NO: 173661 - DNA, 20 bp, Artificial Sequence
  Synthetic oligonucleotide; GAG chr2 60535009 60535028 60535012 -
ggcctgtcagcctgctgaag

SEQ ID NO: 173662 - DNA, 20 bp, Artificial Sequence
  Synthetic oligonucleotide; AAG chr2 60535000 60535019 60535003 -
gcctgctgaaggagaaaaaa

SEQ ID NO: 173663 - DNA, 20 bp, Artificial Sequence
  Synthetic oligonucleotide; AGG chr2 60534999 60535018 60535002 -
cctgctgaaggagaaaaaaa

SEQ ID NO: 173664 - DNA, 20 bp, Artificial Sequence
  Synthetic oligonucleotide; TAG chr2 60534983 60535002 60534986 -
aaaaaggtgaaaattgttta

SEQ ID NO: 173665 - DNA, 20 bp, Artificial Sequence
  Synthetic oligonucleotide; AAG chr2 60534976 60534995 60534979 -
tgaaaattgtttatagcacc

SEQ ID NO: 173666 - DNA, 20 bp, Artificial Sequence
  Synthetic oligonucleotide; TAG chr2 60534968 60534987 60534971 -
gtttatagcaccaagattct

SEQ ID NO: 173667 - DNA, 20 bp, Artificial Sequence
  Synthetic oligonucleotide; AAG chr2 60534927 60534946 60534930 -
ttgatgatgtaaaaaaatta

SEQ ID NO: 173668 - DNA, 20 bp, Artificial Sequence
  Synthetic oligonucleotide; CAG chr2 60534924 60534943 60534927 -
atgatgtaaaaaaattaaag

SEQ ID NO: 173669 - DNA, 20 bp, Artificial Sequence
  Synthetic oligonucleotide; AAG chr2 60534907 60534926 60534910 -
aagcagtgttttttcttctc

SEQ ID NO: 173670 - DNA, 20 bp, Artificial Sequence
  Synthetic oligonucleotide; AAG chr2 60534899 60534918 60534902 -
ttttttcttctcaagattaa

SEQ ID NO: 173671 - DNA, 20 bp, Artificial Sequence
  Synthetic oligonucleotide; AAG chr2 60534890 60534909 60534893 -
ctcaagattaaaagttcacc

SEQ ID NO: 173672 - DNA, 20 bp, Artificial Sequence
  Synthetic oligonucleotide; GAG chr2 60534888 60534907 60534891 -
caagattaaaagttcaccaa

SEQ ID NO: 173673 - DNA, 20 bp, Artificial Sequence
  Synthetic oligonucleotide; AAG chr2 60534824 60534843 60534827 -
attaatgtaatttgcatatg

SEQ ID NO: 173674 - DNA, 20 bp, Artificial Sequence
  Synthetic oligonucleotide; TAG chr2 60534786 60534805 60534789 -
tttgatcatgttttgtgtat

SEQ ID NO: 173675 - DNA, 20 bp, Artificial Sequence
  Synthetic oligonucleotide; CAG chr2 60534777 60534796 60534780 -
gttttgtgtattagctgcct

SEQ ID NO: 173676 - DNA, 20 bp, Artificial Sequence
  Synthetic oligonucleotide; TGG chr2 60534774 60534793 60534777 -
ttgtgtattagctgcctcag

SEQ ID NO: 173677 - DNA, 20 bp, Artificial Sequence
  Synthetic oligonucleotide; CAG chr2 60534761 60534780 60534764 -
gcctcagtggctctcctcct

SEQ ID NO: 173678 - DNA, 20 bp, Artificial Sequence
  Synthetic oligonucleotide; CAG chr2 60534752 60534771 60534755 -
gctctcctcctcagatgccc

SEQ ID NO: 173679 - DNA, 20 bp, Artificial Sequence
  Synthetic oligonucleotide; TAG chr2 60534749 60534768 60534752 -
ctcctcctcagatgccccag

SEQ ID NO: 173680 - DNA, 20 bp, Artificial Sequence
  Synthetic oligonucleotide; AAG chr2 60534745 60534764 60534748 -
tcctcagatgccccagtaga

SEQ ID NO: 173681 - DNA, 20 bp, Artificial Sequence
  Synthetic oligonucleotide; AGG chr2 60534744 60534763 60534747 -
cctcagatgccccagtagaa

SEQ ID NO: 173682 - DNA, 20 bp, Artificial Sequence
  Synthetic oligonucleotide; GAG chr2 60534742 60534761 60534745 -
tcagatgccccagtagaaag

SEQ ID NO: 173683 - DNA, 20 bp, Artificial Sequence
  Synthetic oligonucleotide; AAG chr2 60534717 60534736 60534720 -
aaatgatgcatcttcttgcc

SEQ ID NO: 173684 - DNA, 20 bp, Artificial Sequence
  Synthetic oligonucleotide; TAG chr2 60534707 60534726 60534710 -
tcttcttgccaagtttcctt

SEQ ID NO: 173685 - DNA, 20 bp, Artificial Sequence
  Synthetic oligonucleotide; GAG chr2 60534698 60534717 60534701 -
caagtttcctttagtgaatt

SEQ ID NO: 173686 - DNA, 20 bp, Artificial Sequence
  Synthetic oligonucleotide; AGG chr2 60534697 60534716 60534700 -
aagtttcctttagtgaattg

SEQ ID NO: 173687 - DNA, 20 bp, Artificial Sequence
  Synthetic oligonucleotide; TAG chr2 60534691 60534710 60534694 -
cctttagtgaattgaggaat

SEQ ID NO: 173688 - DNA, 20 bp, Artificial Sequence
  Synthetic oligonucleotide; AAG chr2 60534688 60534707 60534691 -
ttagtgaattgaggaattag

SEQ ID NO: 173689 - DNA, 20 bp, Artificial Sequence
  Synthetic oligonucleotide; GAG chr2 60534676 60534695 60534679 -
ggaattagaagtctaacctt

SEQ ID NO: 173690 - DNA, 20 bp, Artificial Sequence
  Synthetic oligonucleotide; AAG chr2 60534637 60534656 60534640 -
atccgttttcttttaacgtt

SEQ ID NO: 173691 - DNA, 20 bp, Artificial Sequence
  Synthetic oligonucleotide; CAG chr2 60534632 60534651 60534635 -
ttttcttttaacgttaagta

SEQ ID NO: 173692 - DNA, 20 bp, Artificial Sequence
  Synthetic oligonucleotide; TGG chr2 60534616 60534635 60534619 -
agtacagtttgtgaacgtgt

SEQ ID NO: 173693 - DNA, 20 bp, Artificial Sequence
  Synthetic oligonucleotide; TGG chr2 60534612 60534631 60534615 -
cagtttgtgaacgtgttggc

SEQ ID NO: 173694 - DNA, 20 bp, Artificial Sequence
  Synthetic oligonucleotide; TGG chr2 60534595 60534614 60534598 -
ggctggaaatcgttctcatt

SEQ ID NO: 173695 - DNA, 20 bp, Artificial Sequence
  Synthetic oligonucleotide; GGG chr2 60534594 60534613 60534597 -
gctggaaatcgttctcattt

SEQ ID NO: 173696 - DNA, 20 bp, Artificial Sequence
  Synthetic oligonucleotide; GGG chr2 60534593 60534612 60534596 -
ctggaaatcgttctcatttg

SEQ ID NO: 173697 - DNA, 20 bp, Artificial Sequence
  Synthetic oligonucleotide; GAG chr2 60534591 60534610 60534594 -
ggaaatcgttctcatttggg

SEQ ID NO: 173698 - DNA, 20 bp, Artificial Sequence
  Synthetic oligonucleotide; AAG chr2 60534588 60534607 60534591 -
aatcgttctcatttggggag

SEQ ID NO: 173699 - DNA, 20 bp, Artificial Sequence
  Synthetic oligonucleotide; AAG chr2 60534573 60534592 60534576 -
gggagaagactgtaaaattt

SEQ ID NO: 173700 - DNA, 20 bp, Artificial Sequence
  Synthetic oligonucleotide; GAG chr2 60534561 60534580 60534564 -
taaaatttaagtatatgatt

SEQ ID NO: 173701 - DNA, 20 bp, Artificial Sequence
  Synthetic oligonucleotide; AGG chr2 60534560 60534579 60534563 -
aaaatttaagtatatgattg

SEQ ID NO: 173702 - DNA, 20 bp, Artificial Sequence
  Synthetic oligonucleotide; CAG chr2 60534551 60534570 60534554 -
gtatatgattgaggcacttc

SEQ ID NO: 173703 - DNA, 20 bp, Artificial Sequence
  Synthetic oligonucleotide; TAG chr2 60534543 60534562 60534546 -
ttgaggcacttccagataca

SEQ ID NO: 173704 - DNA, 20 bp, Artificial Sequence
  Synthetic oligonucleotide; GAG chr2 60534541 60534560 60534544 -
gaggcacttccagatacata

SEQ ID NO: 173705 - DNA, 20 bp, Artificial Sequence
  Synthetic oligonucleotide; CAG chr2 60534500 60534519 60534503 -
tctgttccccacgaacattg

SEQ ID NO: 173706 - DNA, 20 bp, Artificial Sequence
  Synthetic oligonucleotide; AGG chr2 60534499 60534518 60534502 -
ctgttccccacgaacattgc

SEQ ID NO: 173707 - DNA, 20 bp, Artificial Sequence
  Synthetic oligonucleotide; GGG chr2 60534498 60534517 60534501 -
tgttccccacgaacattgca

SEQ ID NO: 173708 - DNA, 20 bp, Artificial Sequence
  Synthetic oligonucleotide; CAG chr2 60534495 60534514 60534498 -
tccccacgaacattgcaggg

SEQ ID NO: 173709 - DNA, 20 bp, Artificial Sequence
  Synthetic oligonucleotide; TAG chr2 60534483 60534502 60534486 -
ttgcagggcagttttattgt

SEQ ID NO: 173710 - DNA, 20 bp, Artificial Sequence
  Synthetic oligonucleotide; CAG chr2 60534480 60534499 60534483 -
cagggcagttttattgttag

SEQ ID NO: 173711 - DNA, 20 bp, Artificial Sequence
  Synthetic oligonucleotide; TGG chr2 60534472 60534491 60534475 -
ttttattgttagcagtttga

SEQ ID NO: 173712 - DNA, 20 bp, Artificial Sequence
  Synthetic oligonucleotide; CAG chr2 60534469 60534488 60534472 -
tattgttagcagtttgatgg

SEQ ID NO: 173713 - DNA, 20 bp, Artificial Sequence
  Synthetic oligonucleotide; AGG chr2 60534468 60534487 60534471 -
attgttagcagtttgatggc

SEQ ID NO: 173714 - DNA, 20 bp, Artificial Sequence
  Synthetic oligonucleotide; AAG chr2 60534465 60534484 60534468 -
gttagcagtttgatggcagg

SEQ ID NO: 173715 - DNA, 20 bp, Artificial Sequence
  Synthetic oligonucleotide; TGG chr2 60534459 60534478 60534462 -
agtttgatggcaggaagcct

SEQ ID NO: 173716 - DNA, 20 bp, Artificial Sequence
  Synthetic oligonucleotide; TAG chr2 60534450 60534469 60534453 -
gcaggaagccttggctatta

SEQ ID NO: 173717 - DNA, 20 bp, Artificial Sequence
  Synthetic oligonucleotide; AAG chr2 60534441 60534460 60534444 -
cttggctattatagtgtatt

SEQ ID NO: 173718 - DNA, 20 bp, Artificial Sequence
  Synthetic oligonucleotide; CAG chr2 60534434 60534453 60534437 -
attatagtgtattaagacat

SEQ ID NO: 173719 - DNA, 20 bp, Artificial Sequence
  Synthetic oligonucleotide; AGG chr2 60534433 60534452 60534436 -
ttatagtgtattaagacatc

SEQ ID NO: 173720 - DNA, 20 bp, Artificial Sequence
  Synthetic oligonucleotide; TGG chr2 60534421 60534440 60534424 -
aagacatcaggttcctcctt

SEQ ID NO: 173721 - DNA, 20 bp, Artificial Sequence
  Synthetic oligonucleotide; GAG chr2 60534419 60534438 60534422 -
gacatcaggttcctcctttg

SEQ ID NO: 173722 - DNA, 20 bp, Artificial Sequence
  Synthetic oligonucleotide; AGG chr2 60534418 60534437 60534421 -
acatcaggttcctcctttgg

SEQ ID NO: 173723 - DNA, 20 bp, Artificial Sequence
  Synthetic oligonucleotide; GAG chr2 60534416 60534435 60534419 -
atcaggttcctcctttggag

SEQ ID NO: 173724 - DNA, 20 bp, Artificial Sequence
  Synthetic oligonucleotide; AGG chr2 60534415 60534434 60534418 -
tcaggttcctcctttggagg

SEQ ID NO: 173725 - DNA, 20 bp, Artificial Sequence
  Synthetic oligonucleotide; GGG chr2 60534414 60534433 60534417 -
caggttcctcctttggagga

SEQ ID NO: 173726 - DNA, 20 bp, Artificial Sequence
  Synthetic oligonucleotide; AAG chr2 60534411 60534430 60534414 -
gttcctcctttggaggaggg

SEQ ID NO: 173727 - DNA, 20 bp, Artificial Sequence
  Synthetic oligonucleotide; AGG chr2 60534410 60534429 60534413 -
ttcctcctttggaggaggga

SEQ ID NO: 173728 - DNA, 20 bp, Artificial Sequence
  Synthetic oligonucleotide; CAG chr2 60534404 60534423 60534407 -
ctttggaggagggaaggcta

SEQ ID NO: 173729 - DNA, 20 bp, Artificial Sequence
  Synthetic oligonucleotide; TAG chr2 60534375 60534394 60534378 -
aaacctttctaacaatgctt

SEQ ID NO: 173730 - DNA, 20 bp, Artificial Sequence
  Synthetic oligonucleotide; AGG chr2 60534374 60534393 60534377 -
aacctttctaacaatgcttt

SEQ ID NO: 173731 - DNA, 20 bp, Artificial Sequence
  Synthetic oligonucleotide; TAG chr2 60534362 60534381 60534365 -
aatgctttaggtttcttctt

SEQ ID NO: 173732 - DNA, 20 bp, Artificial Sequence
  Synthetic oligonucleotide; TAG chr2 60534358 60534377 60534361 -
ctttaggtttcttctttaga

SEQ ID NO: 173733 - DNA, 20 bp, Artificial Sequence
  Synthetic oligonucleotide; TGG chr2 60534354 60534373 60534357 -
aggtttcttctttagataga

SEQ ID NO: 173734 - DNA, 20 bp, Artificial Sequence
  Synthetic oligonucleotide; TGG chr2 60534350 60534369 60534353 -
ttcttctttagatagatggc

SEQ ID NO: 173735 - DNA, 20 bp, Artificial Sequence
  Synthetic oligonucleotide; AAG chr2 60534341 60534360 60534344 -
agatagatggctggcaccta

SEQ ID NO: 173736 - DNA, 20 bp, Artificial Sequence
  Synthetic oligonucleotide; AGG chr2 60534340 60534359 60534343 -
gatagatggctggcacctaa

SEQ ID NO: 173737 - DNA, 20 bp, Artificial Sequence
  Synthetic oligonucleotide; TGG chr2 60534334 60534353 60534337 -
tggctggcacctaaaggact

SEQ ID NO: 173738 - DNA, 20 bp, Artificial Sequence
  Synthetic oligonucleotide; GGG chr2 60534333 60534352 60534336 -
ggctggcacctaaaggactt

SEQ ID NO: 173739 - DNA, 20 bp, Artificial Sequence
  Synthetic oligonucleotide; TGG chr2 60534328 60534347 60534331 -
gcacctaaaggacttgggcc

SEQ ID NO: 173740 - DNA, 20 bp, Artificial Sequence
  Synthetic oligonucleotide; GGG chr2 60534327 60534346 60534330 -
cacctaaaggacttgggcct

SEQ ID NO: 173741 - DNA, 20 bp, Artificial Sequence
  Synthetic oligonucleotide; TGG chr2 60534322 60534341 60534325 -
aaaggacttgggcctgggtt

SEQ ID NO: 173742 - DNA, 20 bp, Artificial Sequence
  Synthetic oligonucleotide; TAG chr2 60534302 60534321 60534305 -
tggctgactcttttatcttt

SEQ ID NO: 173743 - DNA, 20 bp, Artificial Sequence
  Synthetic oligonucleotide; AAG chr2 60534296 60534315 60534299 -
actcttttatcttttagatc

SEQ ID NO: 173744 - DNA, 20 bp, Artificial Sequence
  Synthetic oligonucleotide; AAG chr2 60534292 60534311 60534295 -
ttttatcttttagatcaagt

SEQ ID NO: 173745 - DNA, 20 bp, Artificial Sequence
  Synthetic oligonucleotide; CAG chr2 60534279 60534298 60534282 -
atcaagtaagttttctcatt

SEQ ID NO: 173746 - DNA, 20 bp, Artificial Sequence
  Synthetic oligonucleotide; GAG chr2 60534266 60534285 60534269 -
tctcattcagctgctgctct

SEQ ID NO: 173747 - DNA, 20 bp, Artificial Sequence
  Synthetic oligonucleotide; AAG chr2 60534236 60534255 60534239 -
gtgtcctcccctcatcacca

SEQ ID NO: 173748 - DNA, 20 bp, Artificial Sequence
  Synthetic oligonucleotide; TGG chr2 60534226 60534245 60534229 -
ctcatcaccaaagtatatcc

SEQ ID NO: 173749 - DNA, 20 bp, Artificial Sequence
  Synthetic oligonucleotide; CAG chr2 60534219 60534238 60534222 -
ccaaagtatatcctggtctc

SEQ ID NO: 173750 - DNA, 20 bp, Artificial Sequence
  Synthetic oligonucleotide; AGG chr2 60534218 60534237 60534221 -
caaagtatatcctggtctcc

SEQ ID NO: 173751 - DNA, 20 bp, Artificial Sequence
  Synthetic oligonucleotide; TGG chr2 60534210 60534229 60534213 -
atcctggtctccaggctccc

SEQ ID NO: 173752 - DNA, 20 bp, Artificial Sequence
  Synthetic oligonucleotide; GGG chr2 60534209 60534228 60534212 -
tcctggtctccaggctccct

SEQ ID NO: 173753 - DNA, 20 bp, Artificial Sequence
  Synthetic oligonucleotide; CAG chr2 60534202 60534221 60534205 -
ctccaggctccctgggctcc

SEQ ID NO: 173754 - DNA, 20 bp, Artificial Sequence
  Synthetic oligonucleotide; AAG chr2 60534189 60534208 60534192 -
gggctcccagtgtctccctc

SEQ ID NO: 173755 - DNA, 20 bp, Artificial Sequence
  Synthetic oligonucleotide; AGG chr2 60534188 60534207 60534191 -
ggctcccagtgtctccctca

SEQ ID NO: 173756 - DNA, 20 bp, Artificial Sequence
  Synthetic oligonucleotide; GAG chr2 60534180 60534199 60534183 -
gtgtctccctcaaggtacac

SEQ ID NO: 173757 - DNA, 20 bp, Artificial Sequence
  Synthetic oligonucleotide; TGG chr2 60534172 60534191 60534175 -
ctcaaggtacacgagtgccc

SEQ ID NO: 173758 - DNA, 20 bp, Artificial Sequence
  Synthetic oligonucleotide; TGG chr2 60534169 60534188 60534172 -
aaggtacacgagtgccctgg

SEQ ID NO: 173759 - DNA, 20 bp, Artificial Sequence
  Synthetic oligonucleotide; AAG chr2 60534159 60534178 60534162 -
agtgccctggtggtgaaaac

SEQ ID NO: 173760 - DNA, 20 bp, Artificial Sequence
  Synthetic oligonucleotide; AGG chr2 60534158 60534177 60534161 -
gtgccctggtggtgaaaaca

SEQ ID NO: 173761 - DNA, 20 bp, Artificial Sequence
  Synthetic oligonucleotide; CGG chr2 60534145 60534164 60534148 -
gaaaacaaggtgctaactaa

SEQ ID NO: 173762 - DNA, 20 bp, Artificial Sequence
  Synthetic oligonucleotide; GAG chr2 60534130 60534149 60534133 -
actaacggtttccgattttt

SEQ ID NO: 173763 - DNA, 20 bp, Artificial Sequence
  Synthetic oligonucleotide; GAG chr2 60534128 60534147 60534131 -
taacggtttccgatttttga

SEQ ID NO: 173764 - DNA, 20 bp, Artificial Sequence
  Synthetic oligonucleotide; TGG chr2 60534115 60534134 60534118 -
tttttgagagcctgtgattt

SEQ ID NO: 173765 - DNA, 20 bp, Artificial Sequence
  Synthetic oligonucleotide; TGG chr2 60534061 60534080 60534064 -
gtattattgatgttcatctt

SEQ ID NO: 173766 - DNA, 20 bp, Artificial Sequence
  Synthetic oligonucleotide; GAG chr2 60534053 60534072 60534056 -
gatgttcatctttggtttat

SEQ ID NO: 173767 - DNA, 20 bp, Artificial Sequence
  Synthetic oligonucleotide; TGG chr2 60534042 60534061 60534045 -
ttggtttatgagtttatcac

SEQ ID NO: 173768 - DNA, 20 bp, Artificial Sequence
  Synthetic oligonucleotide; AAG chr2 60534034 60534053 60534037 -
tgagtttatcactggttaac

SEQ ID NO: 173769 - DNA, 20 bp, Artificial Sequence
  Synthetic oligonucleotide; CAG chr2 60534031 60534050 60534034 -
gtttatcactggttaacaag

SEQ ID NO: 173770 - DNA, 20 bp, Artificial Sequence
  Synthetic oligonucleotide; CAG chr2 60534025 60534044 60534028 -
cactggttaacaagcagaat

SEQ ID NO: 173771 - DNA, 20 bp, Artificial Sequence
  Synthetic oligonucleotide; CAG chr2 60534020 60534039 60534023 -
gttaacaagcagaatcagaa

SEQ ID NO: 173772 - DNA, 20 bp, Artificial Sequence
  Synthetic oligonucleotide; AAG chr2 60533980 60533999 60533983 -
ttaaaacgaatgtttaatga

SEQ ID NO: 173773 - DNA, 20 bp, Artificial Sequence
  Synthetic oligonucleotide; TGG chr2 60533963 60533982 60533966 -
tgaaagaaaataaattgtga

SEQ ID NO: 173774 - DNA, 20 bp, Artificial Sequence
  Synthetic oligonucleotide; CAG chr2 60533952 60533971 60533955 -
aaattgtgatggaaaatgaa

SEQ ID NO: 173775 - DNA, 20 bp, Artificial Sequence
  Synthetic oligonucleotide; AAG chr2 60533944 60533963 60533947 -
atggaaaatgaacagtgtgt

SEQ ID NO: 173776 - DNA, 20 bp, Artificial Sequence
  Synthetic oligonucleotide; GAG chr2 60533916 60533935 60533919 -
taactataattttaacctcc

SEQ ID NO: 173777 - DNA, 20 bp, Artificial Sequence
  Synthetic oligonucleotide; AGG chr2 60533915 60533934 60533918 -
aactataattttaacctccg

SEQ ID NO: 173778 - DNA, 20 bp, Artificial Sequence
  Synthetic oligonucleotide; GGG chr2 60533914 60533933 60533917 -
actataattttaacctccga

SEQ ID NO: 173779 - DNA, 20 bp, Artificial Sequence
  Synthetic oligonucleotide; TAG chr2 60533908 60533927 60533911 -
attttaacctccgagggacc

SEQ ID NO: 173780 - DNA, 20 bp, Artificial Sequence
  Synthetic oligonucleotide; AAG chr2 60533868 60533887 60533871 -
ttccatccataccatgctaa

SEQ ID NO: 173781 - DNA, 20 bp, Artificial Sequence
  Synthetic oligonucleotide; CAG chr2 60533858 60533877 60533861 -
accatgctaaaagcatgctt

SEQ ID NO: 173782 - DNA, 20 bp, Artificial Sequence
  Synthetic oligonucleotide; AAG chr2 60533851 60533870 60533854 -
taaaagcatgcttcagttta

SEQ ID NO: 173783 - DNA, 20 bp, Artificial Sequence
  Synthetic oligonucleotide; CAG chr2 60533837 60533856 60533840 -
agtttaaagttgttaatatt

SEQ ID NO: 173784 - DNA, 20 bp, Artificial Sequence
  Synthetic oligonucleotide; TGG chr2 60533833 60533852 60533836 -
taaagttgttaatattcagc

SEQ ID NO: 173785 - DNA, 20 bp, Artificial Sequence
  Synthetic oligonucleotide; GGG chr2 60533832 60533851 60533835 -
aaagttgttaatattcagct

SEQ ID NO: 173786 - DNA, 20 bp, Artificial Sequence
  Synthetic oligonucleotide; CAG chr2 60533826 60533845 60533829 -
gttaatattcagctgggaaa

SEQ ID NO: 173787 - DNA, 20 bp, Artificial Sequence
  Synthetic oligonucleotide; CAG chr2 60533819 60533838 60533822 -
ttcagctgggaaacagtatc

SEQ ID NO: 173788 - DNA, 20 bp, Artificial Sequence
  Synthetic oligonucleotide; AAG chr2 60533799 60533818 60533802 -
cagaacacaaataaattatt

SEQ ID NO: 173789 - DNA, 20 bp, Artificial Sequence
  Synthetic oligonucleotide; TAG chr2 60533783 60533802 60533786 -
tattaagtgcatgaactttt

SEQ ID NO: 173790 - DNA, 20 bp, Artificial Sequence
  Synthetic oligonucleotide; AGG chr2 60533782 60533801 60533785 -
attaagtgcatgaacttttt

SEQ ID NO: 173791 - DNA, 20 bp, Artificial Sequence
  Synthetic oligonucleotide; CAG chr2 60533779 60533798 60533782 -
aagtgcatgaactttttagg

SEQ ID NO: 173792 - DNA, 20 bp, Artificial Sequence
  Synthetic oligonucleotide; AAG chr2 60533775 60533794 60533778 -
gcatgaactttttaggcagt

SEQ ID NO: 173793 - DNA, 20 bp, Artificial Sequence
  Synthetic oligonucleotide; TGG chr2 60533763 60533782 60533766 -
taggcagtaagatgaactga

SEQ ID NO: 173794 - DNA, 20 bp, Artificial Sequence
  Synthetic oligonucleotide; GGG chr2 60533762 60533781 60533765 -
aggcagtaagatgaactgat

SEQ ID NO: 173795 - DNA, 20 bp, Artificial Sequence
  Synthetic oligonucleotide; GGG chr2 60533761 60533780 60533764 -
ggcagtaagatgaactgatg

SEQ ID NO: 173796 - DNA, 20 bp, Artificial Sequence
  Synthetic oligonucleotide; GAG chr2 60533749 60533768 60533752 -
aactgatggggtccatctgt

SEQ ID NO: 173797 - DNA, 20 bp, Artificial Sequence
  Synthetic oligonucleotide; CAG chr2 60533743 60533762 60533746 -
tggggtccatctgtgagatc

SEQ ID NO: 173798 - DNA, 20 bp, Artificial Sequence
  Synthetic oligonucleotide; AGG chr2 60533742 60533761 60533745 -
ggggtccatctgtgagatcc

SEQ ID NO: 173799 - DNA, 20 bp, Artificial Sequence
  Synthetic oligonucleotide; GGG chr2 60533741 60533760 60533744 -
gggtccatctgtgagatcca

SEQ ID NO: 173800 - DNA, 20 bp, Artificial Sequence
  Synthetic oligonucleotide; GGG chr2 60533740 60533759 60533743 -
ggtccatctgtgagatccag

SEQ ID NO: 173801 - DNA, 20 bp, Artificial Sequence
  Synthetic oligonucleotide; GAG chr2 60533718 60533737 60533721 -
gctttttatttgtgtgtgtc

SEQ ID NO: 173802 - DNA, 20 bp, Artificial Sequence
  Synthetic oligonucleotide; CAG chr2 60533692 60533711 60533695 -
ttctgccctctccgacttca

SEQ ID NO: 173803 - DNA, 20 bp, Artificial Sequence
  Synthetic oligonucleotide; TGG chr2 60533685 60533704 60533688 -
ctctccgacttcacagcctt

SEQ ID NO: 173804 - DNA, 20 bp, Artificial Sequence
  Synthetic oligonucleotide; CGG chr2 60533678 60533697 60533681 -
acttcacagcctttggtctc

SEQ ID NO: 173805 - DNA, 20 bp, Artificial Sequence
  Synthetic oligonucleotide; AAG chr2 60533614 60533633 60533617 -
cttgatgtaattgctttact

SEQ ID NO: 173806 - DNA, 20 bp, Artificial Sequence
  Synthetic oligonucleotide; TGG chr2 60533595 60533614 60533598 -
taagatatgatgaaatctaa

SEQ ID NO: 173807 - DNA, 20 bp, Artificial Sequence
  Synthetic oligonucleotide; TGG chr2 60533573 60533592 60533576 -
gataatttgctatttgaaaa

SEQ ID NO: 173808 - DNA, 20 bp, Artificial Sequence
  Synthetic oligonucleotide; TGG chr2 60533545 60533564 60533548 -
aaaaatcttcatactttatg

SEQ ID NO: 173809 - DNA, 20 bp, Artificial Sequence
  Synthetic oligonucleotide; GGG chr2 60533544 60533563 60533547 -
aaaatcttcatactttatgt

SEQ ID NO: 173810 - DNA, 20 bp, Artificial Sequence
  Synthetic oligonucleotide; GGG chr2 60533543 60533562 60533546 -
aaatcttcatactttatgtg

SEQ ID NO: 173811 - DNA, 20 bp, Artificial Sequence
  Synthetic oligonucleotide; GAG chr2 60533538 60533557 60533541 -
ttcatactttatgtggggct

SEQ ID NO: 173812 - DNA, 20 bp, Artificial Sequence
  Synthetic oligonucleotide; TGG chr2 60533535 60533554 60533538 -
atactttatgtggggctgag

SEQ ID NO: 173813 - DNA, 20 bp, Artificial Sequence
  Synthetic oligonucleotide; GGG chr2 60533534 60533553 60533537 -
tactttatgtggggctgagt

SEQ ID NO: 173814 - DNA, 20 bp, Artificial Sequence
  Synthetic oligonucleotide; CAG chr2 60533531 60533550 60533534 -
tttatgtggggctgagtggg

SEQ ID NO: 173815 - DNA, 20 bp, Artificial Sequence
  Synthetic oligonucleotide; TGG chr2 60533528 60533547 60533531 -
atgtggggctgagtgggcag

SEQ ID NO: 173816 - DNA, 20 bp, Artificial Sequence
  Synthetic oligonucleotide; GAG chr2 60533526 60533545 60533529 -
gtggggctgagtgggcagtg

SEQ ID NO: 173817 - DNA, 20 bp, Artificial Sequence
  Synthetic oligonucleotide; AAG chr2 60533522 60533541 60533525 -
ggctgagtgggcagtggaga

SEQ ID NO: 173818 - DNA, 20 bp, Artificial Sequence
  Synthetic oligonucleotide; AGG chr2 60533521 60533540 60533524 -
gctgagtgggcagtggagaa

SEQ ID NO: 173819 - DNA, 20 bp, Artificial Sequence
  Synthetic oligonucleotide; GGG chr2 60533520 60533539 60533523 -
ctgagtgggcagtggagaaa

SEQ ID NO: 173820 - DNA, 20 bp, Artificial Sequence
  Synthetic oligonucleotide; GGG chr2 60533519 60533538 60533522 -
tgagtgggcagtggagaaag

SEQ ID NO: 173821 - DNA, 20 bp, Artificial Sequence
  Synthetic oligonucleotide; CAG chr2 60533512 60533531 60533515 -
gcagtggagaaaggggtatt

SEQ ID NO: 173822 - DNA, 20 bp, Artificial Sequence
  Synthetic oligonucleotide; CGG chr2 60533503 60533522 60533506 -
aaaggggtattcagctgacc

SEQ ID NO: 173823 - DNA, 20 bp, Artificial Sequence
  Synthetic oligonucleotide; AAG chr2 60533495 60533514 60533498 -
attcagctgacccggtattt

SEQ ID NO: 173824 - DNA, 20 bp, Artificial Sequence
  Synthetic oligonucleotide; AAG chr2 60533482 60533501 60533485 -
ggtatttaagaaaacaaaac

SEQ ID NO: 173825 - DNA, 20 bp, Artificial Sequence
  Synthetic oligonucleotide; CAG chr2 60533454 60533473 60533457 -
ctaacttatgcatgctgctt

SEQ ID NO: 173826 - DNA, 20 bp, Artificial Sequence
  Synthetic oligonucleotide; TGG chr2 60533445 60533464 60533448 -
gcatgctgcttcagtcgcgt

SEQ ID NO: 173827 - DNA, 20 bp, Artificial Sequence
  Synthetic oligonucleotide; TGG chr2 60533439 60533458 60533442 -
tgcttcagtcgcgttggctg

SEQ ID NO: 173828 - DNA, 20 bp, Artificial Sequence
  Synthetic oligonucleotide; TAG chr2 60533435 60533454 60533438 -
tcagtcgcgttggctgtgga

SEQ ID NO: 173829 - DNA, 20 bp, Artificial Sequence
  Synthetic oligonucleotide; AGG chr2 60533434 60533453 60533437 -
cagtcgcgttggctgtggat

SEQ ID NO: 173830 - DNA, 20 bp, Artificial Sequence
  Synthetic oligonucleotide; AAG chr2 60533431 60533450 60533434 -
tcgcgttggctgtggatagg

SEQ ID NO: 173831 - DNA, 20 bp, Artificial Sequence
  Synthetic oligonucleotide; AGG chr2 60533430 60533449 60533433 -
cgcgttggctgtggatagga

SEQ ID NO: 173832 - DNA, 20 bp, Artificial Sequence
  Synthetic oligonucleotide; TGG chr2 60533414 60533433 60533417 -
aggaaggtctttgtgacata

SEQ ID NO: 173833 - DNA, 20 bp, Artificial Sequence
  Synthetic oligonucleotide; AAG chr2 60533411 60533430 60533414 -
aaggtctttgtgacatatgg

SEQ ID NO: 173834 - DNA, 20 bp, Artificial Sequence
  Synthetic oligonucleotide; CAG chr2 60533407 60533426 60533410 -
tctttgtgacatatggaagc

SEQ ID NO: 173835 - DNA, 20 bp, Artificial Sequence
  Synthetic oligonucleotide; AAG chr2 60533320 60533339 60533323 -
ctctctcccccaaactttac

SEQ ID NO: 173836 - DNA, 20 bp, Artificial Sequence
  Synthetic oligonucleotide; AAG chr2 60533316 60533335 60533319 -
ctcccccaaactttacaaga

SEQ ID NO: 173837 - DNA, 20 bp, Artificial Sequence
  Synthetic oligonucleotide; AGG chr2 60533315 60533334 60533318 -
tcccccaaactttacaagaa

SEQ ID NO: 173838 - DNA, 20 bp, Artificial Sequence
  Synthetic oligonucleotide; GGG chr2 60533314 60533333 60533317 -
cccccaaactttacaagaaa

SEQ ID NO: 173839 - DNA, 20 bp, Artificial Sequence
  Synthetic oligonucleotide; AAG chr2 60533303 60533322 60533306 -
tacaagaaagggatcctaac

SEQ ID NO: 173840 - DNA, 20 bp, Artificial Sequence
  Synthetic oligonucleotide; AGG chr2 60533302 60533321 60533305 -
acaagaaagggatcctaaca

SEQ ID NO: 173841 - DNA, 20 bp, Artificial Sequence
  Synthetic oligonucleotide; AAG chr2 60533295 60533314 60533298 -
agggatcctaacaaggtaaa

SEQ ID NO: 173842 - DNA, 20 bp, Artificial Sequence
  Synthetic oligonucleotide; TAG chr2 60533283 60533302 60533286 -
aaggtaaaaagtaaacaatt

SEQ ID NO: 173843 - DNA, 20 bp, Artificial Sequence
  Synthetic oligonucleotide; AAG chr2 60533273 60533292 60533276 -
gtaaacaatttagtcatcac

SEQ ID NO: 173844 - DNA, 20 bp, Artificial Sequence
  Synthetic oligonucleotide; CAG chr2 60533260 60533279 60533263 -
tcatcacaagccttattatt

SEQ ID NO: 173845 - DNA, 20 bp, Artificial Sequence
  Synthetic oligonucleotide; CAG chr2 60533251 60533270 60533254 -
gccttattattcagtctatc

SEQ ID NO: 173846 - DNA, 20 bp, Artificial Sequence
  Synthetic oligonucleotide; AGG chr2 60533250 60533269 60533253 -
ccttattattcagtctatcc

SEQ ID NO: 173847 - DNA, 20 bp, Artificial Sequence
  Synthetic oligonucleotide; GAG chr2 60533248 60533267 60533251 -
ttattattcagtctatccag

SEQ ID NO: 173848 - DNA, 20 bp, Artificial Sequence
  Synthetic oligonucleotide; CGG chr2 60533234 60533253 60533237 -
atccaggagttttgccatgt

SEQ ID NO: 173849 - DNA, 20 bp, Artificial Sequence
  Synthetic oligonucleotide; CAG chr2 60533218 60533237 60533221 -
atgtcggtttatttaacttc

SEQ ID NO: 173850 - DNA, 20 bp, Artificial Sequence
  Synthetic oligonucleotide; AGG chr2 60533217 60533236 60533220 -
tgtcggtttatttaacttcc

SEQ ID NO: 173851 - DNA, 20 bp, Artificial Sequence
  Synthetic oligonucleotide; CAG chr2 60533198 60533217 60533201 -
caggaatgtaaacactgaca

SEQ ID NO: 173852 - DNA, 20 bp, Artificial Sequence
  Synthetic oligonucleotide; TAG chr2 60533192 60533211 60533195 -
tgtaaacactgacacagccc

SEQ ID NO: 173853 - DNA, 20 bp, Artificial Sequence
  Synthetic oligonucleotide; AAG chr2 60533189 60533208 60533192 -
aaacactgacacagccctag

SEQ ID NO: 173854 - DNA, 20 bp, Artificial Sequence
  Synthetic oligonucleotide; CAG chr2 60533186 60533205 60533189 -
cactgacacagccctagaag

SEQ ID NO: 173855 - DNA, 20 bp, Artificial Sequence
  Synthetic oligonucleotide; AAG chr2 60533182 60533201 60533185 -
gacacagccctagaagcagc

SEQ ID NO: 173856 - DNA, 20 bp, Artificial Sequence
  Synthetic oligonucleotide; AAG chr2 60533178 60533197 60533181 -
cagccctagaagcagcaaga

SEQ ID NO: 173857 - DNA, 20 bp, Artificial Sequence
  Synthetic oligonucleotide; CAG chr2 60533171 60533190 60533174 -
agaagcagcaagaaagatta

SEQ ID NO: 173858 - DNA, 20 bp, Artificial Sequence
  Synthetic oligonucleotide; TAG chr2 60533165 60533184 60533168 -
agcaagaaagattacagtat

SEQ ID NO: 173859 - DNA, 20 bp, Artificial Sequence
  Synthetic oligonucleotide; GAG chr2 60533163 60533182 60533166 -
caagaaagattacagtatta

SEQ ID NO: 173860 - DNA, 20 bp, Artificial Sequence
  Synthetic oligonucleotide; GAG chr2 60533150 60533169 60533153 -
agtattagagttaaaaacgt

SEQ ID NO: 173861 - DNA, 20 bp, Artificial Sequence
  Synthetic oligonucleotide; TGG chr2 60533145 60533164 60533148 -
tagagttaaaaacgtgagca

SEQ ID NO: 173862 - DNA, 20 bp, Artificial Sequence
  Synthetic oligonucleotide; GAG chr2 60533143 60533162 60533146 -
gagttaaaaacgtgagcatg

SEQ ID NO: 173863 - DNA, 20 bp, Artificial Sequence
  Synthetic oligonucleotide; AGG chr2 60533142 60533161 60533145 -
agttaaaaacgtgagcatgg

SEQ ID NO: 173864 - DNA, 20 bp, Artificial Sequence
  Synthetic oligonucleotide; GAG chr2 60533140 60533159 60533143 -
ttaaaaacgtgagcatggag

SEQ ID NO: 173865 - DNA, 20 bp, Artificial Sequence
  Synthetic oligonucleotide; TGG chr2 60533091 60533110 60533094 -
cactttacattgaaacataa

SEQ ID NO: 173866 - DNA, 20 bp, Artificial Sequence
  Synthetic oligonucleotide; AAG chr2 60533087 60533106 60533090 -
ttacattgaaacataatggt

SEQ ID NO: 173867 - DNA, 20 bp, Artificial Sequence
  Synthetic oligonucleotide; AAG chr2 60533080 60533099 60533083 -
gaaacataatggtaagtcaa

SEQ ID NO: 173868 - DNA, 20 bp, Artificial Sequence
  Synthetic oligonucleotide; TGG chr2 60533073 60533092 60533076 -
aatggtaagtcaaaagtgac

SEQ ID NO: 173869 - DNA, 20 bp, Artificial Sequence
  Synthetic oligonucleotide; TGG chr2 60533055 60533074 60533058 -
actggaaacttctgcttata

SEQ ID NO: 173870 - DNA, 20 bp, Artificial Sequence
  Synthetic oligonucleotide; GAG chr2 60533053 60533072 60533056 -
tggaaacttctgcttatatg

SEQ ID NO: 173871 - DNA, 20 bp, Artificial Sequence
  Synthetic oligonucleotide; TAG chr2 60533033 60533052 60533036 -
gagtacaaatttcattctaa

SEQ ID NO: 173872 - DNA, 20 bp, Artificial Sequence
  Synthetic oligonucleotide; TGG chr2 60533028 60533047 60533031 -
caaatttcattctaatagat

SEQ ID NO: 173873 - DNA, 20 bp, Artificial Sequence
  Synthetic oligonucleotide; TAG chr2 60533018 60533037 60533021 -
tctaatagattggcataatc

SEQ ID NO: 173874 - DNA, 20 bp, Artificial Sequence
  Synthetic oligonucleotide; CAG chr2 60533009 60533028 60533012 -
ttggcataatctagtgtacc

SEQ ID NO: 173875 - DNA, 20 bp, Artificial Sequence
  Synthetic oligonucleotide; AGG chr2 60533008 60533027 60533011 -
tggcataatctagtgtaccc

SEQ ID NO: 173876 - DNA, 20 bp, Artificial Sequence
  Synthetic oligonucleotide; GGG chr2 60533007 60533026 60533010 -
ggcataatctagtgtaccca

SEQ ID NO: 173877 - DNA, 20 bp, Artificial Sequence
  Synthetic oligonucleotide; TAG chr2 60533004 60533023 60533007 -
ataatctagtgtacccaggg

SEQ ID NO: 173878 - DNA, 20 bp, Artificial Sequence
  Synthetic oligonucleotide; TGG chr2 60532989 60533008 60532992 -
cagggtagattgttatataa

SEQ ID NO: 173879 - DNA, 20 bp, Artificial Sequence
  Synthetic oligonucleotide; GAG chr2 60532987 60533006 60532990 -
gggtagattgttatataatg

SEQ ID NO: 173880 - DNA, 20 bp, Artificial Sequence
  Synthetic oligonucleotide; AAG chr2 60532968 60532987 60532971 -
ggagaaactgtataaatgtc

SEQ ID NO: 173881 - DNA, 20 bp, Artificial Sequence
  Synthetic oligonucleotide; CAG chr2 60532949 60532968 60532952 -
caagtacacaaataattcta

SEQ ID NO: 173882 - DNA, 20 bp, Artificial Sequence
  Synthetic oligonucleotide; AGG chr2 60532948 60532967 60532951 -
aagtacacaaataattctac

SEQ ID NO: 173883 - DNA, 20 bp, Artificial Sequence
  Synthetic oligonucleotide; AAG chr2 60532945 60532964 60532948 -
tacacaaataattctacagg

SEQ ID NO: 173884 - DNA, 20 bp, Artificial Sequence
  Synthetic oligonucleotide; AAG chr2 60532934 60532953 60532937 -
ttctacaggaagtaaataaa

SEQ ID NO: 173885 - DNA, 20 bp, Artificial Sequence
  Synthetic oligonucleotide; TAG chr2 60532928 60532947 60532931 -
aggaagtaaataaaaagtat

SEQ ID NO: 173886 - DNA, 20 bp, Artificial Sequence
  Synthetic oligonucleotide; AAG chr2 60532917 60532936 60532920 -
aaaaagtattagaatttctt

SEQ ID NO: 173887 - DNA, 20 bp, Artificial Sequence
  Synthetic oligonucleotide; TGG chr2 60532900 60532919 60532903 -
cttaagtcaccattaaattt

SEQ ID NO: 173888 - DNA, 20 bp, Artificial Sequence
  Synthetic oligonucleotide; TGG chr2 60532897 60532916 60532900 -
aagtcaccattaaattttgg

SEQ ID NO: 173889 - DNA, 20 bp, Artificial Sequence
  Synthetic oligonucleotide; TGG chr2 60532894 60532913 60532897 -
tcaccattaaattttggtgg

SEQ ID NO: 173890 - DNA, 20 bp, Artificial Sequence
  Synthetic oligonucleotide; GGG chr2 60532893 60532912 60532896 -
caccattaaattttggtggt

SEQ ID NO: 173891 - DNA, 20 bp, Artificial Sequence
  Synthetic oligonucleotide; TAG chr2 60532880 60532899 60532883 -
tggtggtgggacaatctcat

SEQ ID NO: 173892 - DNA, 20 bp, Artificial Sequence
  Synthetic oligonucleotide; TGG chr2 60532861 60532880 60532864 -
ttagctccttcaaaatcatg

SEQ ID NO: 173893 - DNA, 20 bp, Artificial Sequence
  Synthetic oligonucleotide; AAG chr2 60532850 60532869 60532853 -
aaaatcatgtggctttgcat

SEQ ID NO: 173894 - DNA, 20 bp, Artificial Sequence
  Synthetic oligonucleotide; CAG chr2 60532828 60532847 60532831 -
gtcttttgaaaatgtatttt

SEQ ID NO: 173895 - DNA, 20 bp, Artificial Sequence
  Synthetic oligonucleotide; AGG chr2 60532827 60532846 60532830 -
tcttttgaaaatgtattttc

SEQ ID NO: 173896 - DNA, 20 bp, Artificial Sequence
  Synthetic oligonucleotide; GGG chr2 60532826 60532845 60532829 -
cttttgaaaatgtattttca

SEQ ID NO: 173897 - DNA, 20 bp, Artificial Sequence
  Synthetic oligonucleotide; CAG chr2 60532817 60532836 60532820 -
atgtattttcagggaattta

SEQ ID NO: 173898 - DNA, 20 bp, Artificial Sequence
  Synthetic oligonucleotide; TGG chr2 60532813 60532832 60532816 -
attttcagggaatttacaga

SEQ ID NO: 173899 - DNA, 20 bp, Artificial Sequence
  Synthetic oligonucleotide; CAG chr2 60532787 60532806 60532790 -
aacattgttttaatccaaac

SEQ ID NO: 173900 - DNA, 20 bp, Artificial Sequence
  Synthetic oligonucleotide; AAG chr2 60532740 60532759 60532743 -
aaaaattgtactgtttttcg

SEQ ID NO: 173901 - DNA, 20 bp, Artificial Sequence
  Synthetic oligonucleotide; AAG chr2 60532731 60532750 60532734 -
actgtttttcgaagtactta

SEQ ID NO: 173902 - DNA, 20 bp, Artificial Sequence
  Synthetic oligonucleotide; AGG chr2 60532730 60532749 60532733 -
ctgtttttcgaagtacttaa

SEQ ID NO: 173903 - DNA, 20 bp, Artificial Sequence
  Synthetic oligonucleotide; GGG chr2 60532729 60532748 60532732 -
tgtttttcgaagtacttaaa

SEQ ID NO: 173904 - DNA, 20 bp, Artificial Sequence
  Synthetic oligonucleotide; GAG chr2 60532727 60532746 60532730 -
tttttcgaagtacttaaagg

SEQ ID NO: 173905 - DNA, 20 bp, Artificial Sequence
  Synthetic oligonucleotide; TGG chr2 60532724 60532743 60532727 -
ttcgaagtacttaaagggag

SEQ ID NO: 173906 - DNA, 20 bp, Artificial Sequence
  Synthetic oligonucleotide; GAG chr2 60532722 60532741 60532725 -
cgaagtacttaaagggagtg

SEQ ID NO: 173907 - DNA, 20 bp, Artificial Sequence
  Synthetic oligonucleotide; AGG chr2 60532721 60532740 60532724 -
gaagtacttaaagggagtgg

SEQ ID NO: 173908 - DNA, 20 bp, Artificial Sequence
  Synthetic oligonucleotide; GGG chr2 60532720 60532739 60532723 -
aagtacttaaagggagtgga

SEQ ID NO: 173909 - DNA, 20 bp, Artificial Sequence
  Synthetic oligonucleotide; GGG chr2 60532719 60532738 60532722 -
agtacttaaagggagtggag

SEQ ID NO: 173910 - DNA, 20 bp, Artificial Sequence
  Synthetic oligonucleotide; TAG chr2 60532716 60532735 60532719 -
acttaaagggagtggagggg

SEQ ID NO: 173911 - DNA, 20 bp, Artificial Sequence
  Synthetic oligonucleotide; AAG chr2 60532712 60532731 60532715 -
aaagggagtggaggggtaga

SEQ ID NO: 173912 - DNA, 20 bp, Artificial Sequence
  Synthetic oligonucleotide; AAG chr2 60532704 60532723 60532707 -
tggaggggtagaaagcatat

SEQ ID NO: 173913 - DNA, 20 bp, Artificial Sequence
  Synthetic oligonucleotide; TGG chr2 60532685 60532704 60532688 -
taagtgaatccatctcactg

SEQ ID NO: 173914 - DNA, 20 bp, Artificial Sequence
  Synthetic oligonucleotide; AAG chr2 60532669 60532688 60532672 -
actgtggcaaactgtttttc

SEQ ID NO: 173915 - DNA, 20 bp, Artificial Sequence
  Synthetic oligonucleotide; AAG chr2 60532664 60532683 60532667 -
ggcaaactgtttttcaagta

SEQ ID NO: 173916 - DNA, 20 bp, Artificial Sequence
  Synthetic oligonucleotide; CAG chr2 60532625 60532644 60532628 -
cacatgatctgaaatttgat

SEQ ID NO: 173917 - DNA, 20 bp, Artificial Sequence
  Synthetic oligonucleotide; AAG chr2 60532604 60532623 60532607 -
agcaaacatatccttatgcc

SEQ ID NO: 173918 - DNA, 20 bp, Artificial Sequence
  Synthetic oligonucleotide; AGG chr2 60532603 60532622 60532606 -
gcaaacatatccttatgcca

SEQ ID NO: 173919 - DNA, 20 bp, Artificial Sequence
  Synthetic oligonucleotide; AAG chr2 60532551 60532570 60532554 -
tttttcgccattcacatacc

SEQ ID NO: 173920 - DNA, 20 bp, Artificial Sequence
  Synthetic oligonucleotide; AGG chr2 60532550 60532569 60532553 -
ttttcgccattcacatacca

SEQ ID NO: 173921 - DNA, 20 bp, Artificial Sequence
  Synthetic oligonucleotide; CAG chr2 60532537 60532556 60532540 -
cataccaaggttctgtaaat

SEQ ID NO: 173922 - DNA, 20 bp, Artificial Sequence
  Synthetic oligonucleotide; CAG chr2 60532529 60532548 60532532 -
ggttctgtaaatcagtaaac

SEQ ID NO: 173923 - DNA, 20 bp, Artificial Sequence
  Synthetic oligonucleotide; AGG chr2 60532528 60532547 60532531 -
gttctgtaaatcagtaaacc

SEQ ID NO: 173924 - DNA, 20 bp, Artificial Sequence
  Synthetic oligonucleotide; CAG chr2 60532525 60532544 60532528 -
ctgtaaatcagtaaaccagg

SEQ ID NO: 173925 - DNA, 20 bp, Artificial Sequence
  Synthetic oligonucleotide; GAG chr2 60532523 60532542 60532526 -
gtaaatcagtaaaccaggca

SEQ ID NO: 173926 - DNA, 20 bp, Artificial Sequence
  Synthetic oligonucleotide; GAG chr2 60532521 60532540 60532524 -
aaatcagtaaaccaggcaga

SEQ ID NO: 173927 - DNA, 20 bp, Artificial Sequence
  Synthetic oligonucleotide; AAG chr2 60532508 60532527 60532511 -
aggcagagagtaactattgt

SEQ ID NO: 173928 - DNA, 20 bp, Artificial Sequence
  Synthetic oligonucleotide; AGG chr2 60532507 60532526 60532510 -
ggcagagagtaactattgta

SEQ ID NO: 173929 - DNA, 20 bp, Artificial Sequence
  Synthetic oligonucleotide; GGG chr2 60532506 60532525 60532509 -
gcagagagtaactattgtaa

SEQ ID NO: 173930 - DNA, 20 bp, Artificial Sequence
  Synthetic oligonucleotide; GGG chr2 60532505 60532524 60532508 -
cagagagtaactattgtaag

SEQ ID NO: 173931 - DNA, 20 bp, Artificial Sequence
  Synthetic oligonucleotide; GGG chr2 60532504 60532523 60532507 -
agagagtaactattgtaagg

SEQ ID NO: 173932 - DNA, 20 bp, Artificial Sequence
  Synthetic oligonucleotide; CAG chr2 60532483 60532502 60532486 -
ggaaaccaaatcataatacc

SEQ ID NO: 173933 - DNA, 20 bp, Artificial Sequence
  Synthetic oligonucleotide; GAG chr2 60532481 60532500 60532484 -
aaaccaaatcataataccca

SEQ ID NO: 173934 - DNA, 20 bp, Artificial Sequence
  Synthetic oligonucleotide; TGG chr2 60532478 60532497 60532481 -
ccaaatcataatacccagag

SEQ ID NO: 173935 - DNA, 20 bp, Artificial Sequence
  Synthetic oligonucleotide; CAG chr2 60532473 60532492 60532476 -
tcataatacccagagtggcc

SEQ ID NO: 173936 - DNA, 20 bp, Artificial Sequence
  Synthetic oligonucleotide; AAG chr2 60532470 60532489 60532473 -
taatacccagagtggcccag

SEQ ID NO: 173937 - DNA, 20 bp, Artificial Sequence
  Synthetic oligonucleotide; AAG chr2 60532456 60532475 60532459 -
gcccagaagctgtctttctg

SEQ ID NO: 173938 - DNA, 20 bp, Artificial Sequence
  Synthetic oligonucleotide; AAG chr2 60532426 60532445 60532429 -
aacgccaccaccaccaaaaa

SEQ ID NO: 173939 - DNA, 20 bp, Artificial Sequence
  Synthetic oligonucleotide; AAG chr2 60532401 60532420 60532404 -
aaacaaaaaaacaaaaaaca

SEQ ID NO: 173940 - DNA, 20 bp, Artificial Sequence
  Synthetic oligonucleotide; TGG chr2 60532369 60532388 60532372 -
acaaaacctttttaaaaaac

SEQ ID NO: 173941 - DNA, 20 bp, Artificial Sequence
  Synthetic oligonucleotide; CAG chr2 60532360 60532379 60532363 -
ttttaaaaaactggaaatga

SEQ ID NO: 173942 - DNA, 20 bp, Artificial Sequence
  Synthetic oligonucleotide; TAG chr2 60532355 60532374 60532358 -
aaaaactggaaatgacagaa

SEQ ID NO: 173943 - DNA, 20 bp, Artificial Sequence
  Synthetic oligonucleotide; AAG chr2 60532346 60532365 60532349 -
aaatgacagaatagttttaa

SEQ ID NO: 173944 - DNA, 20 bp, Artificial Sequence
  Synthetic oligonucleotide; AGG chr2 60532345 60532364 60532348 -
aatgacagaatagttttaaa

SEQ ID NO: 173945 - DNA, 20 bp, Artificial Sequence
  Synthetic oligonucleotide; AAG chr2 60532316 60532335 60532319 -
aaaaaaacccaaaaaccaaa

SEQ ID NO: 173946 - DNA, 20 bp, Artificial Sequence
  Synthetic oligonucleotide; TAG chr2 60532273 60532292 60532276 -
tcaaaacttcaaactattaa

SEQ ID NO: 173947 - DNA, 20 bp, Artificial Sequence
  Synthetic oligonucleotide; CAG chr2 60532265 60532284 60532268 -
tcaaactattaatagaccac

SEQ ID NO: 173948 - DNA, 20 bp, Artificial Sequence
  Synthetic oligonucleotide; GAG chr2 60532261 60532280 60532264 -
actattaatagaccaccagt

SEQ ID NO: 173949 - DNA, 20 bp, Artificial Sequence
  Synthetic oligonucleotide; TAG chr2 60532257 60532276 60532260 -
ttaatagaccaccagtgaga

SEQ ID NO: 173950 - DNA, 20 bp, Artificial Sequence
  Synthetic oligonucleotide; GAG chr2 60532226 60532245 60532229 -
tgtgccttgaaatgcaaaat

SEQ ID NO: 173951 - DNA, 20 bp, Artificial Sequence
  Synthetic oligonucleotide; AGG chr2 60532225 60532244 60532228 -
gtgccttgaaatgcaaaatg

SEQ ID NO: 173952 - DNA, 20 bp, Artificial Sequence
  Synthetic oligonucleotide; GGG chr2 60532224 60532243 60532227 -
tgccttgaaatgcaaaatga

SEQ ID NO: 173953 - DNA, 20 bp, Artificial Sequence
  Synthetic oligonucleotide; TAG chr2 60532214 60532233 60532217 -
tgcaaaatgagggaaataat

SEQ ID NO: 173954 - DNA, 20 bp, Artificial Sequence
  Synthetic oligonucleotide; CAG chr2 60532211 60532230 60532214 -
aaaatgagggaaataattag

SEQ ID NO: 173955 - DNA, 20 bp, Artificial Sequence
  Synthetic oligonucleotide; GAG chr2 60532209 60532228 60532212 -
aatgagggaaataattagca

SEQ ID NO: 173956 - DNA, 20 bp, Artificial Sequence
  Synthetic oligonucleotide; AGG chr2 60532208 60532227 60532211 -
atgagggaaataattagcag

SEQ ID NO: 173957 - DNA, 20 bp, Artificial Sequence
  Synthetic oligonucleotide; AAG chr2 60532185 60532204 60532188 -
aacaaaattctcaaaatttg

SEQ ID NO: 173958 - DNA, 20 bp, Artificial Sequence
  Synthetic oligonucleotide; TGG chr2 60532167 60532186 60532170 -
tgaagaacttctgtgattac

SEQ ID NO: 173959 - DNA, 20 bp, Artificial Sequence
  Synthetic oligonucleotide; GGG chr2 60532166 60532185 60532169 -
gaagaacttctgtgattact

SEQ ID NO: 173960 - DNA, 20 bp, Artificial Sequence
  Synthetic oligonucleotide; GGG chr2 60532165 60532184 60532168 -
aagaacttctgtgattactg

SEQ ID NO: 173961 - DNA, 20 bp, Artificial Sequence
  Synthetic oligonucleotide; GGG chr2 60532164 60532183 60532167 -
agaacttctgtgattactgg

SEQ ID NO: 173962 - DNA, 20 bp, Artificial Sequence
  Synthetic oligonucleotide; CAG chr2 60532159 60532178 60532162 -
ttctgtgattactgggggta

SEQ ID NO: 173963 - DNA, 20 bp, Artificial Sequence
  Synthetic oligonucleotide; AAG chr2 60532152 60532171 60532155 -
attactgggggtacagtgaa

SEQ ID NO: 173964 - DNA, 20 bp, Artificial Sequence
  Synthetic oligonucleotide; TAG chr2 60532121 60532140 60532124 -
aatttcttcctgatcttaat

SEQ ID NO: 173965 - DNA, 20 bp, Artificial Sequence
  Synthetic oligonucleotide; CGG chr2 60532107 60532126 60532110 -
cttaattagattcgattgtg

SEQ ID NO: 173966 - DNA, 20 bp, Artificial Sequence
  Synthetic oligonucleotide; TGG chr2 60532104 60532123 60532107 -
aattagattcgattgtgcgg

SEQ ID NO: 173967 - DNA, 20 bp, Artificial Sequence
  Synthetic oligonucleotide; GGG chr2 60532103 60532122 60532106 -
attagattcgattgtgcggt

SEQ ID NO: 173968 - DNA, 20 bp, Artificial Sequence
  Synthetic oligonucleotide; TGG chr2 60532095 60532114 60532098 -
cgattgtgcggtgggtgtgt

SEQ ID NO: 173969 - DNA, 20 bp, Artificial Sequence
  Synthetic oligonucleotide; TGG chr2 60532089 60532108 60532092 -
tgcggtgggtgtgttggatt

SEQ ID NO: 173970 - DNA, 20 bp, Artificial Sequence
  Synthetic oligonucleotide; GGG chr2 60532088 60532107 60532091 -
gcggtgggtgtgttggattt

SEQ ID NO: 173971 - DNA, 20 bp, Artificial Sequence
  Synthetic oligonucleotide; GGG chr2 60532087 60532106 60532090 -
cggtgggtgtgttggatttg

SEQ ID NO: 173972 - DNA, 20 bp, Artificial Sequence
  Synthetic oligonucleotide; GGG chr2 60532086 60532105 60532089 -
ggtgggtgtgttggatttgg

SEQ ID NO: 173973 - DNA, 20 bp, Artificial Sequence
  Synthetic oligonucleotide; GGG chr2 60532085 60532104 60532088 -
gtgggtgtgttggatttggg

SEQ ID NO: 173974 - DNA, 20 bp, Artificial Sequence
  Synthetic oligonucleotide; GAG chr2 60532083 60532102 60532086 -
gggtgtgttggatttggggg

SEQ ID NO: 173975 - DNA, 20 bp, Artificial Sequence
  Synthetic oligonucleotide; AGG chr2 60532082 60532101 60532085 -
ggtgtgttggatttgggggg

SEQ ID NO: 173976 - DNA, 20 bp, Artificial Sequence
  Synthetic oligonucleotide; GGG chr2 60532081 60532100 60532084 -
gtgtgttggatttgggggga

SEQ ID NO: 173977 - DNA, 20 bp, Artificial Sequence
  Synthetic oligonucleotide; GGG chr2 60532080 60532099 60532083 -
tgtgttggatttggggggag

SEQ ID NO: 173978 - DNA, 20 bp, Artificial Sequence
  Synthetic oligonucleotide; CAG chr2 60532077 60532096 60532080 -
gttggatttggggggagggg

SEQ ID NO: 173979 - DNA, 20 bp, Artificial Sequence
  Synthetic oligonucleotide; GAG chr2 60532075 60532094 60532078 -
tggatttggggggaggggca

SEQ ID NO: 173980 - DNA, 20 bp, Artificial Sequence
  Synthetic oligonucleotide; AGG chr2 60532074 60532093 60532077 -
ggatttggggggaggggcag

SEQ ID NO: 173981 - DNA, 20 bp, Artificial Sequence
  Synthetic oligonucleotide; CAG chr2 60532071 60532090 60532074 -
tttggggggaggggcagagg

SEQ ID NO: 173982 - DNA, 20 bp, Artificial Sequence
  Synthetic oligonucleotide; AGG chr2 60532070 60532089 60532073 -
ttggggggaggggcagaggc

SEQ ID NO: 173983 - DNA, 20 bp, Artificial Sequence
  Synthetic oligonucleotide; GGG chr2 60532069 60532088 60532072 -
tggggggaggggcagaggca

SEQ ID NO: 173984 - DNA, 20 bp, Artificial Sequence
  Synthetic oligonucleotide; GAG chr2 60532067 60532086 60532070 -
gggggaggggcagaggcagg

SEQ ID NO: 173985 - DNA, 20 bp, Artificial Sequence
  Synthetic oligonucleotide; TGG chr2 60532061 60532080 60532064 -
ggggcagaggcagggagtgc

SEQ ID NO: 173986 - DNA, 20 bp, Artificial Sequence
  Synthetic oligonucleotide; GGG chr2 60532060 60532079 60532063 -
gggcagaggcagggagtgct

SEQ ID NO: 173987 - DNA, 20 bp, Artificial Sequence
  Synthetic oligonucleotide; GGG chr2 60532059 60532078 60532062 -
ggcagaggcagggagtgctg

SEQ ID NO: 173988 - DNA, 20 bp, Artificial Sequence
  Synthetic oligonucleotide; GAG chr2 60532055 60532074 60532058 -
gaggcagggagtgctggggt

SEQ ID NO: 173989 - DNA, 20 bp, Artificial Sequence
  Synthetic oligonucleotide; AGG chr2 60532054 60532073 60532057 -
aggcagggagtgctggggtg

SEQ ID NO: 173990 - DNA, 20 bp, Artificial Sequence
  Synthetic oligonucleotide; GAG chr2 60532048 60532067 60532051 -
ggagtgctggggtgaggcgt

SEQ ID NO: 173991 - DNA, 20 bp, Artificial Sequence
  Synthetic oligonucleotide; AGG chr2 60532047 60532066 60532050 -
gagtgctggggtgaggcgtg

SEQ ID NO: 173992 - DNA, 20 bp, Artificial Sequence
  Synthetic oligonucleotide; GAG chr2 60532042 60532061 60532045 -
ctggggtgaggcgtgaggct

SEQ ID NO: 173993 - DNA, 20 bp, Artificial Sequence
  Synthetic oligonucleotide; TGG chr2 60532034 60532053 60532037 -
aggcgtgaggctgagtgttg

SEQ ID NO: 173994 - DNA, 20 bp, Artificial Sequence
  Synthetic oligonucleotide; GAG chr2 60532032 60532051 60532035 -
gcgtgaggctgagtgttgtg

SEQ ID NO: 173995 - DNA, 20 bp, Artificial Sequence
  Synthetic oligonucleotide; CAG chr2 60532028 60532047 60532031 -
gaggctgagtgttgtggaga

SEQ ID NO: 173996 - DNA, 20 bp, Artificial Sequence
  Synthetic oligonucleotide; AGG chr2 60532027 60532046 60532030 -
aggctgagtgttgtggagac

SEQ ID NO: 173997 - DNA, 20 bp, Artificial Sequence
  Synthetic oligonucleotide; TAG chr2 60532023 60532042 60532026 -
tgagtgttgtggagacaggt

SEQ ID NO: 173998 - DNA, 20 bp, Artificial Sequence
  Synthetic oligonucleotide; CAG chr2 60532020 60532039 60532023 -
gtgttgtggagacaggttag

SEQ ID NO: 173999 - DNA, 20 bp, Artificial Sequence
  Synthetic oligonucleotide; AGG chr2 60532019 60532038 60532022 -
tgttgtggagacaggttagc

SEQ ID NO: 174000 - DNA, 20 bp, Artificial Sequence
  Synthetic oligonucleotide; GGG chr2 60532018 60532037 60532021 -
gttgtggagacaggttagca

SEQ ID NO: 174001 - DNA, 20 bp, Artificial Sequence
  Synthetic oligonucleotide; GGG chr2 60532017 60532036 60532020 -
ttgtggagacaggttagcag

SEQ ID NO: 174002 - DNA, 20 bp, Artificial Sequence
  Synthetic oligonucleotide; CGG chr2 60532012 60532031 60532015 -
gagacaggttagcaggggcc

SEQ ID NO: 174003 - DNA, 20 bp, Artificial Sequence
  Synthetic oligonucleotide; CGG chr2 60532009 60532028 60532012 -
acaggttagcaggggcccgg

SEQ ID NO: 174004 - DNA, 20 bp, Artificial Sequence
  Synthetic oligonucleotide; TGG chr2 60532004 60532023 60532007 -
ttagcaggggcccggcggtg

SEQ ID NO: 174005 - DNA, 20 bp, Artificial Sequence
  Synthetic oligonucleotide; CAG chr2 60532001 60532020 60532004 -
gcaggggcccggcggtgtgg

SEQ ID NO: 174006 - DNA, 20 bp, Artificial Sequence
  Synthetic oligonucleotide; AGG chr2 60532000 60532019 60532003 -
caggggcccggcggtgtggc

SEQ ID NO: 174007 - DNA, 20 bp, Artificial Sequence
  Synthetic oligonucleotide; AAG chr2 60531993 60532012 60531996 -
ccggcggtgtggcaggaaca

SEQ ID NO: 174008 - DNA, 20 bp, Artificial Sequence
  Synthetic oligonucleotide; AGG chr2 60531992 60532011 60531995 -
cggcggtgtggcaggaacaa

SEQ ID NO: 174009 - DNA, 20 bp, Artificial Sequence
  Synthetic oligonucleotide; CAG chr2 60531989 60532008 60531992 -
cggtgtggcaggaacaaagg

SEQ ID NO: 174010 - DNA, 20 bp, Artificial Sequence
  Synthetic oligonucleotide; TGG chr2 60531976 60531995 60531979 -
acaaaggcagcttccaacgc

SEQ ID NO: 174011 - DNA, 20 bp, Artificial Sequence
  Synthetic oligonucleotide; CAG chr2 60531971 60531990 60531974 -
ggcagcttccaacgctggtg

SEQ ID NO: 174012 - DNA, 20 bp, Artificial Sequence
  Synthetic oligonucleotide; AGG chr2 60531970 60531989 60531973 -
gcagcttccaacgctggtgc

SEQ ID NO: 174013 - DNA, 20 bp, Artificial Sequence
  Synthetic oligonucleotide; GAG chr2 60531962 60531981 60531965 -
caacgctggtgcaggattcc

SEQ ID NO: 174014 - DNA, 20 bp, Artificial Sequence
  Synthetic oligonucleotide; CAG chr2 60531951 60531970 60531954 -
caggattccgagccttaacc

SEQ ID NO: 174015 - DNA, 20 bp, Artificial Sequence
  Synthetic oligonucleotide; TGG chr2 60531941 60531960 60531944 -
agccttaacccagatgctca

SEQ ID NO: 174016 - DNA, 20 bp, Artificial Sequence
  Synthetic oligonucleotide; TAG chr2 60531933 60531952 60531936 -
cccagatgctcatggtgccc

SEQ ID NO: 174017 - DNA, 20 bp, Artificial Sequence
  Synthetic oligonucleotide; GAG chr2 60531926 60531945 60531929 -
gctcatggtgccctagtctt

SEQ ID NO: 174018 - DNA, 20 bp, Artificial Sequence
  Synthetic oligonucleotide; TAG chr2 60531914 60531933 60531917 -
ctagtcttgagttcttcatt

SEQ ID NO: 174019 - DNA, 20 bp, Artificial Sequence
  Synthetic oligonucleotide; AGG chr2 60531913 60531932 60531916 -
tagtcttgagttcttcattt

SEQ ID NO: 174020 - DNA, 20 bp, Artificial Sequence
  Synthetic oligonucleotide; TGG chr2 60531910 60531929 60531913 -
tcttgagttcttcatttagg

SEQ ID NO: 174021 - DNA, 20 bp, Artificial Sequence
  Synthetic oligonucleotide; GGG chr2 60531909 60531928 60531912 -
cttgagttcttcatttaggt

SEQ ID NO: 174022 - DNA, 20 bp, Artificial Sequence
  Synthetic oligonucleotide; TGG chr2 60531894 60531913 60531897 -
taggtgggcttatttcccac

SEQ ID NO: 174023 - DNA, 20 bp, Artificial Sequence
  Synthetic oligonucleotide; GGG chr2 60531893 60531912 60531896 -
aggtgggcttatttcccact

SEQ ID NO: 174024 - DNA, 20 bp, Artificial Sequence
  Synthetic oligonucleotide; TGG chr2 60531888 60531907 60531891 -
ggcttatttcccactgggtc

SEQ ID NO: 174025 - DNA, 20 bp, Artificial Sequence
  Synthetic oligonucleotide; GGG chr2 60531887 60531906 60531890 -
gcttatttcccactgggtct

SEQ ID NO: 174026 - DNA, 20 bp, Artificial Sequence
  Synthetic oligonucleotide; GGG chr2 60531886 60531905 60531889 -
cttatttcccactgggtctg

SEQ ID NO: 174027 - DNA, 20 bp, Artificial Sequence
  Synthetic oligonucleotide; GGG chr2 60531885 60531904 60531888 -
ttatttcccactgggtctgg

SEQ ID NO: 174028 - DNA, 20 bp, Artificial Sequence
  Synthetic oligonucleotide; GAG chr2 60531866 60531885 60531869 -
ggggatttcatttgtccttt

SEQ ID NO: 174029 - DNA, 20 bp, Artificial Sequence
  Synthetic oligonucleotide; AGG chr2 60531865 60531884 60531868 -
gggatttcatttgtcctttg

SEQ ID NO: 174030 - DNA, 20 bp, Artificial Sequence
  Synthetic oligonucleotide; GGG chr2 60531864 60531883 60531867 -
ggatttcatttgtcctttga

SEQ ID NO: 174031 - DNA, 20 bp, Artificial Sequence
  Synthetic oligonucleotide; GGG chr2 60531863 60531882 60531866 -
gatttcatttgtcctttgag

SEQ ID NO: 174032 - DNA, 20 bp, Artificial Sequence
  Synthetic oligonucleotide; CAG chr2 60531860 60531879 60531863 -
ttcatttgtcctttgagggg

SEQ ID NO: 174033 - DNA, 20 bp, Artificial Sequence
  Synthetic oligonucleotide; AGG chr2 60531859 60531878 60531862 -
tcatttgtcctttgaggggc

SEQ ID NO: 174034 - DNA, 20 bp, Artificial Sequence
  Synthetic oligonucleotide; GGG chr2 60531858 60531877 60531861 -
catttgtcctttgaggggca

SEQ ID NO: 174035 - DNA, 20 bp, Artificial Sequence
  Synthetic oligonucleotide; TGG chr2 60531855 60531874 60531858 -
ttgtcctttgaggggcaggg

SEQ ID NO: 174036 - DNA, 20 bp, Artificial Sequence
  Synthetic oligonucleotide; CAG chr2 60531845 60531864 60531848 -
aggggcagggtggacactga

SEQ ID NO: 174037 - DNA, 20 bp, Artificial Sequence
  Synthetic oligonucleotide; CAG chr2 60531840 60531859 60531843 -
cagggtggacactgacagaa

SEQ ID NO: 174038 - DNA, 20 bp, Artificial Sequence
  Synthetic oligonucleotide; CGG chr2 60531834 60531853 60531837 -
ggacactgacagaacagctg

SEQ ID NO: 174039 - DNA, 20 bp, Artificial Sequence
  Synthetic oligonucleotide; CGG chr2 60531830 60531849 60531833 -
actgacagaacagctgcggc

SEQ ID NO: 174040 - DNA, 20 bp, Artificial Sequence
  Synthetic oligonucleotide; CAG chr2 60531827 60531846 60531830 -
gacagaacagctgcggccgg

SEQ ID NO: 174041 - DNA, 20 bp, Artificial Sequence
  Synthetic oligonucleotide; GAG chr2 60531825 60531844 60531828 -
cagaacagctgcggccggca

SEQ ID NO: 174042 - DNA, 20 bp, Artificial Sequence
  Synthetic oligonucleotide; GAG chr2 60531823 60531842 60531826 -
gaacagctgcggccggcaga

SEQ ID NO: 174043 - DNA, 20 bp, Artificial Sequence
  Synthetic oligonucleotide; AGG chr2 60531822 60531841 60531825 -
aacagctgcggccggcagag

SEQ ID NO: 174044 - DNA, 20 bp, Artificial Sequence
  Synthetic oligonucleotide; GGG chr2 60531821 60531840 60531824 -
acagctgcggccggcagaga

SEQ ID NO: 174045 - DNA, 20 bp, Artificial Sequence
  Synthetic oligonucleotide; TGG chr2 60531818 60531837 60531821 -
gctgcggccggcagagaggg

SEQ ID NO: 174046 - DNA, 20 bp, Artificial Sequence
  Synthetic oligonucleotide; TAG chr2 60531814 60531833 60531817 -
cggccggcagagagggtggt

SEQ ID NO: 174047 - DNA, 20 bp, Artificial Sequence
  Synthetic oligonucleotide; AGG chr2 60531813 60531832 60531816 -
ggccggcagagagggtggtt

SEQ ID NO: 174048 - DNA, 20 bp, Artificial Sequence
  Synthetic oligonucleotide; AAG chr2 60531810 60531829 60531813 -
cggcagagagggtggttagg

SEQ ID NO: 174049 - DNA, 20 bp, Artificial Sequence
  Synthetic oligonucleotide; GAG chr2 60531808 60531827 60531811 -
gcagagagggtggttaggaa

SEQ ID NO: 174050 - DNA, 20 bp, Artificial Sequence
  Synthetic oligonucleotide; AGG chr2 60531807 60531826 60531810 -
cagagagggtggttaggaag

SEQ ID NO: 174051 - DNA, 20 bp, Artificial Sequence
  Synthetic oligonucleotide; GGG chr2 60531806 60531825 60531809 -
agagagggtggttaggaaga

SEQ ID NO: 174052 - DNA, 20 bp, Artificial Sequence
  Synthetic oligonucleotide; AAG chr2 60531803 60531822 60531806 -
gagggtggttaggaagaggg

SEQ ID NO: 174053 - DNA, 20 bp, Artificial Sequence
  Synthetic oligonucleotide; CAG chr2 60531800 60531819 60531803 -
ggtggttaggaagagggaag

SEQ ID NO: 174054 - DNA, 20 bp, Artificial Sequence
  Synthetic oligonucleotide; TGG chr2 60531793 60531812 60531796 -
aggaagagggaagcagcctg

SEQ ID NO: 174055 - DNA, 20 bp, Artificial Sequence
  Synthetic oligonucleotide; GGG chr2 60531792 60531811 60531795 -
ggaagagggaagcagcctgt

SEQ ID NO: 174056 - DNA, 20 bp, Artificial Sequence
  Synthetic oligonucleotide; TGG chr2 60531773 60531792 60531776 -
tgggtaacttcccgaccaca

SEQ ID NO: 174057 - DNA, 20 bp, Artificial Sequence
  Synthetic oligonucleotide; AAG chr2 60531769 60531788 60531772 -
taacttcccgaccacatgga

SEQ ID NO: 174058 - DNA, 20 bp, Artificial Sequence
  Synthetic oligonucleotide; AGG chr2 60531768 60531787 60531771 -
aacttcccgaccacatggaa

SEQ ID NO: 174059 - DNA, 20 bp, Artificial Sequence
  Synthetic oligonucleotide; AAG chr2 60531759 60531778 60531762 -
accacatggaaaggctgaat

SEQ ID NO: 174060 - DNA, 20 bp, Artificial Sequence
  Synthetic oligonucleotide; TGG chr2 60531750 60531769 60531753 -
aaaggctgaataagacgtta

SEQ ID NO: 174061 - DNA, 20 bp, Artificial Sequence
  Synthetic oligonucleotide; TGG chr2 60531738 60531757 60531741 -
agacgttatggaccctgcct

SEQ ID NO: 174062 - DNA, 20 bp, Artificial Sequence
  Synthetic oligonucleotide; GGG chr2 60531737 60531756 60531740 -
gacgttatggaccctgcctt

SEQ ID NO: 174063 - DNA, 20 bp, Artificial Sequence
  Synthetic oligonucleotide; TGG chr2 60531731 60531750 60531734 -
atggaccctgccttgggtac

SEQ ID NO: 174064 - DNA, 20 bp, Artificial Sequence
  Synthetic oligonucleotide; GGG chr2 60531730 60531749 60531733 -
tggaccctgccttgggtact

SEQ ID NO: 174065 - DNA, 20 bp, Artificial Sequence
  Synthetic oligonucleotide; GGG chr2 60531729 60531748 60531732 -
ggaccctgccttgggtactg

SEQ ID NO: 174066 - DNA, 20 bp, Artificial Sequence
  Synthetic oligonucleotide; CAG chr2 60531725 60531744 60531728 -
cctgccttgggtactggggt

SEQ ID NO: 174067 - DNA, 20 bp, Artificial Sequence
  Synthetic oligonucleotide; TGG chr2 60531715 60531734 60531718 -
gtactggggtcagcgtctcc

SEQ ID NO: 174068 - DNA, 20 bp, Artificial Sequence
  Synthetic oligonucleotide; TGG chr2 60531712 60531731 60531715 -
ctggggtcagcgtctcctgg

SEQ ID NO: 174069 - DNA, 20 bp, Artificial Sequence
  Synthetic oligonucleotide; CAG chr2 60531701 60531720 60531704 -
gtctcctggtggtgtctgca

SEQ ID NO: 174070 - DNA, 20 bp, Artificial Sequence
  Synthetic oligonucleotide; AGG chr2 60531700 60531719 60531703 -
tctcctggtggtgtctgcac

SEQ ID NO: 174071 - DNA, 20 bp, Artificial Sequence
  Synthetic oligonucleotide; GGG chr2 60531699 60531718 60531702 -
ctcctggtggtgtctgcaca

SEQ ID NO: 174072 - DNA, 20 bp, Artificial Sequence
  Synthetic oligonucleotide; CAG chr2 60531685 60531704 60531688 -
tgcacagggccccccaatgc

SEQ ID NO: 174073 - DNA, 20 bp, Artificial Sequence
  Synthetic oligonucleotide; AGG chr2 60531684 60531703 60531687 -
gcacagggccccccaatgcc

SEQ ID NO: 174074 - DNA, 20 bp, Artificial Sequence
  Synthetic oligonucleotide; GGG chr2 60531683 60531702 60531686 -
cacagggccccccaatgcca

SEQ ID NO: 174075 - DNA, 20 bp, Artificial Sequence
  Synthetic oligonucleotide; GAG chr2 60531660 60531679 60531663 -
cactgccaaaacacgctctt

SEQ ID NO: 174076 - DNA, 20 bp, Artificial Sequence
  Synthetic oligonucleotide; TGG chr2 60531652 60531671 60531655 -
aaacacgctcttgagtttaa

SEQ ID NO: 174077 - DNA, 20 bp, Artificial Sequence
  Synthetic oligonucleotide; TAG chr2 60531649 60531668 60531652 -
cacgctcttgagtttaatgg

SEQ ID NO: 174078 - DNA, 20 bp, Artificial Sequence
  Synthetic oligonucleotide; TGG chr2 60531646 60531665 60531649 -
gctcttgagtttaatggtag

SEQ ID NO: 174079 - DNA, 20 bp, Artificial Sequence
  Synthetic oligonucleotide; TGG chr2 60531642 60531661 60531645 -
ttgagtttaatggtagtggt

SEQ ID NO: 174080 - DNA, 20 bp, Artificial Sequence
  Synthetic oligonucleotide; GAG chr2 60531636 60531655 60531639 -
ttaatggtagtggttggtct

SEQ ID NO: 174081 - DNA, 20 bp, Artificial Sequence
  Synthetic oligonucleotide; AAG chr2 60531625 60531644 60531628 -
ggttggtctgagtcctgcca

SEQ ID NO: 174082 - DNA, 20 bp, Artificial Sequence
  Synthetic oligonucleotide; TGG chr2 60531618 60531637 60531621 -
ctgagtcctgccaaagtgta

SEQ ID NO: 174083 - DNA, 20 bp, Artificial Sequence
  Synthetic oligonucleotide; GAG chr2 60531616 60531635 60531619 -
gagtcctgccaaagtgtatg

SEQ ID NO: 174084 - DNA, 20 bp, Artificial Sequence
  Synthetic oligonucleotide; AAG chr2 60531612 60531631 60531615 -
cctgccaaagtgtatggagc

SEQ ID NO: 174085 - DNA, 20 bp, Artificial Sequence
  Synthetic oligonucleotide; TGG chr2 60531603 60531622 60531606 -
gtgtatggagcaagtttcat

SEQ ID NO: 174086 - DNA, 20 bp, Artificial Sequence
  Synthetic oligonucleotide; TGG chr2 60531599 60531618 60531602 -
atggagcaagtttcattggc

SEQ ID NO: 174087 - DNA, 20 bp, Artificial Sequence
  Synthetic oligonucleotide; AAG chr2 60531571 60531590 60531574 -
ccccttgcatgaaataataa

SEQ ID NO: 174088 - DNA, 20 bp, Artificial Sequence
  Synthetic oligonucleotide; TGG chr2 60531565 60531584 60531568 -
gcatgaaataataaaagccc

SEQ ID NO: 174089 - DNA, 20 bp, Artificial Sequence
  Synthetic oligonucleotide; AAG chr2 60531560 60531579 60531563 -
aaataataaaagccctggcc

SEQ ID NO: 174090 - DNA, 20 bp, Artificial Sequence
  Synthetic oligonucleotide; AGG chr2 60531559 60531578 60531562 -
aataataaaagccctggcca

SEQ ID NO: 174091 - DNA, 20 bp, Artificial Sequence
  Synthetic oligonucleotide; TGG chr2 60531497 60531516 60531500 -
tgtattttattaatattttt

SEQ ID NO: 174092 - DNA, 20 bp, Artificial Sequence
  Synthetic oligonucleotide; GAG chr2 60531495 60531514 60531498 -
tattttattaatattttttg

SEQ ID NO: 174093 - DNA, 20 bp, Artificial Sequence
  Synthetic oligonucleotide; AGG chr2 60531494 60531513 60531497 -
attttattaatattttttgg

SEQ ID NO: 174094 - DNA, 20 bp, Artificial Sequence
  Synthetic oligonucleotide; GGG chr2 60531493 60531512 60531496 -
ttttattaatattttttgga

SEQ ID NO: 174095 - DNA, 20 bp, Artificial Sequence
  Synthetic oligonucleotide; TAG chr2 60531466 60531485 60531469 -
tgctctcatttgaccatttg

SEQ ID NO: 174096 - DNA, 20 bp, Artificial Sequence
  Synthetic oligonucleotide; TGG chr2 60531441 60531460 60531444 -
ataattaatgcattccgtac

SEQ ID NO: 174097 - DNA, 20 bp, Artificial Sequence
  Synthetic oligonucleotide; AAG chr2 60531431 60531450 60531434 -
cattccgtactggttgtaaa

SEQ ID NO: 174098 - DNA, 20 bp, Artificial Sequence
  Synthetic oligonucleotide; AAG chr2 60531409 60531428 60531412 -
gtgtgcttgcatttaattgc

SEQ ID NO: 174099 - DNA, 20 bp, Artificial Sequence
  Synthetic oligonucleotide; CAG chr2 60531405 60531424 60531408 -
gcttgcatttaattgcaagt

SEQ ID NO: 174100 - DNA, 20 bp, Artificial Sequence
  Synthetic oligonucleotide; AGG chr2 60531404 60531423 60531407 -
cttgcatttaattgcaagtc

SEQ ID NO: 174101 - DNA, 20 bp, Artificial Sequence
  Synthetic oligonucleotide; GGG chr2 60531403 60531422 60531406 -
ttgcatttaattgcaagtca

SEQ ID NO: 174102 - DNA, 20 bp, Artificial Sequence
  Synthetic oligonucleotide; TGG chr2 60531392 60531411 60531395 -
tgcaagtcagggtaaattaa

SEQ ID NO: 174103 - DNA, 20 bp, Artificial Sequence
  Synthetic oligonucleotide; CAG chr2 60531352 60531371 60531355 -
actcacttaaaatattcttg

SEQ ID NO: 174104 - DNA, 20 bp, Artificial Sequence
  Synthetic oligonucleotide; AAG chr2 60531343 60531362 60531346 -
aaatattcttgcagaacgca

SEQ ID NO: 174105 - DNA, 20 bp, Artificial Sequence
  Synthetic oligonucleotide; AGG chr2 60531342 60531361 60531345 -
aatattcttgcagaacgcaa

SEQ ID NO: 174106 - DNA, 20 bp, Artificial Sequence
  Synthetic oligonucleotide; GAG chr2 60531340 60531359 60531343 -
tattcttgcagaacgcaaag

SEQ ID NO: 174107 - DNA, 20 bp, Artificial Sequence
  Synthetic oligonucleotide; AGG chr2 60531339 60531358 60531342 -
attcttgcagaacgcaaagg

SEQ ID NO: 174108 - DNA, 20 bp, Artificial Sequence
  Synthetic oligonucleotide; GGG chr2 60531338 60531357 60531341 -
ttcttgcagaacgcaaagga

SEQ ID NO: 174109 - DNA, 20 bp, Artificial Sequence
  Synthetic oligonucleotide; GGG chr2 60531337 60531356 60531340 -
tcttgcagaacgcaaaggag

SEQ ID NO: 174110 - DNA, 20 bp, Artificial Sequence
  Synthetic oligonucleotide; GGG chr2 60531336 60531355 60531339 -
cttgcagaacgcaaaggagg

SEQ ID NO: 174111 - DNA, 20 bp, Artificial Sequence
  Synthetic oligonucleotide; CAG chr2 60531333 60531352 60531336 -
gcagaacgcaaaggaggggg

SEQ ID NO: 174112 - DNA, 20 bp, Artificial Sequence
  Synthetic oligonucleotide; CAG chr2 60531327 60531346 60531330 -
cgcaaaggagggggcagtcc

SEQ ID NO: 174113 - DNA, 20 bp, Artificial Sequence
  Synthetic oligonucleotide; TGG chr2 60531308 60531327 60531311 -
ccagtatttaatttattttc

SEQ ID NO: 174114 - DNA, 20 bp, Artificial Sequence
  Synthetic oligonucleotide; TAG chr2 60531303 60531322 60531306 -
atttaatttattttctggtt

SEQ ID NO: 174115 - DNA, 20 bp, Artificial Sequence
  Synthetic oligonucleotide; TAG chr2 60531297 60531316 60531300 -
tttattttctggtttagtgt

SEQ ID NO: 174116 - DNA, 20 bp, Artificial Sequence
  Synthetic oligonucleotide; GAG chr2 60531291 60531310 60531294 -
ttctggtttagtgttagtgt

SEQ ID NO: 174117 - DNA, 20 bp, Artificial Sequence
  Synthetic oligonucleotide; GAG chr2 60531289 60531308 60531292 -
ctggtttagtgttagtgtga

SEQ ID NO: 174118 - DNA, 20 bp, Artificial Sequence
  Synthetic oligonucleotide; AGG chr2 60531288 60531307 60531291 -
tggtttagtgttagtgtgag

SEQ ID NO: 174119 - DNA, 20 bp, Artificial Sequence
  Synthetic oligonucleotide; GGG chr2 60531287 60531306 60531290 -
ggtttagtgttagtgtgaga

SEQ ID NO: 174120 - DNA, 20 bp, Artificial Sequence
  Synthetic oligonucleotide; AAG chr2 60531279 60531298 60531282 -
gttagtgtgagagggtcgaa

SEQ ID NO: 174121 - DNA, 20 bp, Artificial Sequence
  Synthetic oligonucleotide; TGG chr2 60531270 60531289 60531273 -
agagggtcgaaaagattctg

SEQ ID NO: 174122 - DNA, 20 bp, Artificial Sequence
  Synthetic oligonucleotide; GGG chr2 60531269 60531288 60531272 -
gagggtcgaaaagattctgt

SEQ ID NO: 174123 - DNA, 20 bp, Artificial Sequence
  Synthetic oligonucleotide; CGG chr2 60531261 60531280 60531264 -
aaaagattctgtgggtccaa

SEQ ID NO: 174124 - DNA, 20 bp, Artificial Sequence
  Synthetic oligonucleotide; GGG chr2 60531260 60531279 60531263 -
aaagattctgtgggtccaac

SEQ ID NO: 174125 - DNA, 20 bp, Artificial Sequence
  Synthetic oligonucleotide; CAG chr2 60531240 60531259 60531243 -
gggatttgtgtctgtgtgtg

SEQ ID NO: 174126 - DNA, 20 bp, Artificial Sequence
  Synthetic oligonucleotide; AGG chr2 60531239 60531258 60531242 -
ggatttgtgtctgtgtgtgc

SEQ ID NO: 174127 - DNA, 20 bp, Artificial Sequence
  Synthetic oligonucleotide; CGG chr2 60531231 60531250 60531234 -
gtctgtgtgtgcaggaccgt

SEQ ID NO: 174128 - DNA, 20 bp, Artificial Sequence
  Synthetic oligonucleotide; GGG chr2 60531230 60531249 60531233 -
tctgtgtgtgcaggaccgtc

SEQ ID NO: 174129 - DNA, 20 bp, Artificial Sequence
  Synthetic oligonucleotide; CAG chr2 60531222 60531241 60531225 -
tgcaggaccgtcgggcaaca

SEQ ID NO: 174130 - DNA, 20 bp, Artificial Sequence
  Synthetic oligonucleotide; GAG chr2 60531220 60531239 60531223 -
caggaccgtcgggcaacaca

SEQ ID NO: 174131 - DNA, 20 bp, Artificial Sequence
  Synthetic oligonucleotide; AGG chr2 60531219 60531238 60531222 -
aggaccgtcgggcaacacag

SEQ ID NO: 174132 - DNA, 20 bp, Artificial Sequence
  Synthetic oligonucleotide; GGG chr2 60531218 60531237 60531221 -
ggaccgtcgggcaacacaga

SEQ ID NO: 174133 - DNA, 20 bp, Artificial Sequence
  Synthetic oligonucleotide; GAG chr2 60531216 60531235 60531219 -
accgtcgggcaacacagagg

SEQ ID NO: 174134 - DNA, 20 bp, Artificial Sequence
  Synthetic oligonucleotide; AGG chr2 60531215 60531234 60531218 -
ccgtcgggcaacacagaggg

SEQ ID NO: 174135 - DNA, 20 bp, Artificial Sequence
  Synthetic oligonucleotide; GAG chr2 60531213 60531232 60531216 -
gtcgggcaacacagagggag

SEQ ID NO: 174136 - DNA, 20 bp, Artificial Sequence
  Synthetic oligonucleotide; TGG chr2 60531203 60531222 60531206 -
acagagggaggagaaaaacc

SEQ ID NO: 174137 - DNA, 20 bp, Artificial Sequence
  Synthetic oligonucleotide; CGG chr2 60531198 60531217 60531201 -
gggaggagaaaaacctggac

SEQ ID NO: 174138 - DNA, 20 bp, Artificial Sequence
  Synthetic oligonucleotide; GAG chr2 60531196 60531215 60531199 -
gaggagaaaaacctggaccg

SEQ ID NO: 174139 - DNA, 20 bp, Artificial Sequence
  Synthetic oligonucleotide; TAG chr2 60531193 60531212 60531196 -
gagaaaaacctggaccggag

SEQ ID NO: 174140 - DNA, 20 bp, Artificial Sequence
  Synthetic oligonucleotide; AGG chr2 60531192 60531211 60531195 -
agaaaaacctggaccggagt

SEQ ID NO: 174141 - DNA, 20 bp, Artificial Sequence
  Synthetic oligonucleotide; GGG chr2 60531191 60531210 60531194 -
gaaaaacctggaccggagta

SEQ ID NO: 174142 - DNA, 20 bp, Artificial Sequence
  Synthetic oligonucleotide; TAG chr2 60531188 60531207 60531191 -
aaacctggaccggagtaggg

SEQ ID NO: 174143 - DNA, 20 bp, Artificial Sequence
  Synthetic oligonucleotide; CAG chr2 60531184 60531203 60531187 -
ctggaccggagtagggtagc

SEQ ID NO: 174144 - DNA, 20 bp, Artificial Sequence
  Synthetic oligonucleotide; AGG chr2 60531183 60531202 60531186 -
tggaccggagtagggtagcc

SEQ ID NO: 174145 - DNA, 20 bp, Artificial Sequence
  Synthetic oligonucleotide; GAG chr2 60531181 60531200 60531184 -
gaccggagtagggtagccag

SEQ ID NO: 174146 - DNA, 20 bp, Artificial Sequence
  Synthetic oligonucleotide; GAG chr2 60531151 60531170 60531154 -
tttttttttctctaatttct

SEQ ID NO: 174147 - DNA, 20 bp, Artificial Sequence
  Synthetic oligonucleotide; AGG chr2 60531150 60531169 60531153 -
ttttttttctctaatttctg

SEQ ID NO: 174148 - DNA, 20 bp, Artificial Sequence
  Synthetic oligonucleotide; CAG chr2 60531143 60531162 60531146 -
tctctaatttctgaggttgc

SEQ ID NO: 174149 - DNA, 20 bp, Artificial Sequence
  Synthetic oligonucleotide; AGG chr2 60531142 60531161 60531145 -
ctctaatttctgaggttgcc

SEQ ID NO: 174150 - DNA, 20 bp, Artificial Sequence
  Synthetic oligonucleotide; GAG chr2 60531140 60531159 60531143 -
ctaatttctgaggttgccag

SEQ ID NO: 174151 - DNA, 20 bp, Artificial Sequence
  Synthetic oligonucleotide; AGG chr2 60531139 60531158 60531142 -
taatttctgaggttgccagg

SEQ ID NO: 174152 - DNA, 20 bp, Artificial Sequence
  Synthetic oligonucleotide; GGG chr2 60531138 60531157 60531141 -
aatttctgaggttgccagga

SEQ ID NO: 174153 - DNA, 20 bp, Artificial Sequence
  Synthetic oligonucleotide; GGG chr2 60531137 60531156 60531140 -
atttctgaggttgccaggag

SEQ ID NO: 174154 - DNA, 20 bp, Artificial Sequence
  Synthetic oligonucleotide; AAG chr2 60531131 60531150 60531134 -
gaggttgccaggaggggctt

SEQ ID NO: 174155 - DNA, 20 bp, Artificial Sequence
  Synthetic oligonucleotide; AAG chr2 60531126 60531145 60531129 -
tgccaggaggggcttaagca

SEQ ID NO: 174156 - DNA, 20 bp, Artificial Sequence
  Synthetic oligonucleotide; TGG chr2 60531123 60531142 60531126 -
caggaggggcttaagcaaag

SEQ ID NO: 174157 - DNA, 20 bp, Artificial Sequence
  Synthetic oligonucleotide; AAG chr2 60531118 60531137 60531121 -
ggggcttaagcaaagtggtc

SEQ ID NO: 174158 - DNA, 20 bp, Artificial Sequence
  Synthetic oligonucleotide; CGG chr2 60531104 60531123 60531107 -
gtggtcaagtccatctgctc

SEQ ID NO: 174159 - DNA, 20 bp, Artificial Sequence
  Synthetic oligonucleotide; GAG chr2 60531102 60531121 60531105 -
ggtcaagtccatctgctccg

SEQ ID NO: 174160 - DNA, 20 bp, Artificial Sequence
  Synthetic oligonucleotide; AAG chr2 60531099 60531118 60531102 -
caagtccatctgctccggag

SEQ ID NO: 174161 - DNA, 20 bp, Artificial Sequence
  Synthetic oligonucleotide; AGG chr2 60531098 60531117 60531101 -
aagtccatctgctccggaga

SEQ ID NO: 174162 - DNA, 20 bp, Artificial Sequence
  Synthetic oligonucleotide; TGG chr2 60531095 60531114 60531098 -
tccatctgctccggagaagg

SEQ ID NO: 174163 - DNA, 20 bp, Artificial Sequence
  Synthetic oligonucleotide; AAG chr2 60531090 60531109 60531093 -
ctgctccggagaaggtggta

SEQ ID NO: 174164 - DNA, 20 bp, Artificial Sequence
  Synthetic oligonucleotide; AAG chr2 60531085 60531104 60531088 -
ccggagaaggtggtaaagaa

SEQ ID NO: 174165 - DNA, 20 bp, Artificial Sequence
  Synthetic oligonucleotide; GAG chr2 60531083 60531102 60531086 -
ggagaaggtggtaaagaaaa

SEQ ID NO: 174166 - DNA, 20 bp, Artificial Sequence
  Synthetic oligonucleotide; AGG chr2 60531082 60531101 60531085 -
gagaaggtggtaaagaaaag

SEQ ID NO: 174167 - DNA, 20 bp, Artificial Sequence
  Synthetic oligonucleotide; TAG chr2 60531078 60531097 60531081 -
aggtggtaaagaaaagaggt

SEQ ID NO: 174168 - DNA, 20 bp, Artificial Sequence
  Synthetic oligonucleotide; TGG chr2 60531075 60531094 60531078 -
tggtaaagaaaagaggttag

SEQ ID NO: 174169 - DNA, 20 bp, Artificial Sequence
  Synthetic oligonucleotide; AAG chr2 60531071 60531090 60531074 -
aaagaaaagaggttagtggc

SEQ ID NO: 174170 - DNA, 20 bp, Artificial Sequence
  Synthetic oligonucleotide; GAG chr2 60531069 60531088 60531072 -
agaaaagaggttagtggcaa

SEQ ID NO: 174171 - DNA, 20 bp, Artificial Sequence
  Synthetic oligonucleotide; AGG chr2 60531068 60531087 60531071 -
gaaaagaggttagtggcaag

SEQ ID NO: 174172 - DNA, 20 bp, Artificial Sequence
  Synthetic oligonucleotide; GGG chr2 60531067 60531086 60531070 -
aaaagaggttagtggcaaga

SEQ ID NO: 174173 - DNA, 20 bp, Artificial Sequence
  Synthetic oligonucleotide; AAG chr2 60531064 60531083 60531067 -
agaggttagtggcaagaggg

SEQ ID NO: 174174 - DNA, 20 bp, Artificial Sequence
  Synthetic oligonucleotide; AGG chr2 60531063 60531082 60531066 -
gaggttagtggcaagaggga

SEQ ID NO: 174175 - DNA, 20 bp, Artificial Sequence
  Synthetic oligonucleotide; GAG chr2 60531061 60531080 60531064 -
ggttagtggcaagagggaag

SEQ ID NO: 174176 - DNA, 20 bp, Artificial Sequence
  Synthetic oligonucleotide; AAG chr2 60531054 60531073 60531057 -
ggcaagagggaaggagcaca

SEQ ID NO: 174177 - DNA, 20 bp, Artificial Sequence
  Synthetic oligonucleotide; AGG chr2 60531053 60531072 60531056 -
gcaagagggaaggagcacaa

SEQ ID NO: 174178 - DNA, 20 bp, Artificial Sequence
  Synthetic oligonucleotide; GGG chr2 60531052 60531071 60531055 -
caagagggaaggagcacaaa

SEQ ID NO: 174179 - DNA, 20 bp, Artificial Sequence
  Synthetic oligonucleotide; TGG chr2 60531037 60531056 60531040 -
acaaagggaaaattgtacat

SEQ ID NO: 174180 - DNA, 20 bp, Artificial Sequence
  Synthetic oligonucleotide; GGG chr2 60531036 60531055 60531039 -
caaagggaaaattgtacatt

SEQ ID NO: 174181 - DNA, 20 bp, Artificial Sequence
  Synthetic oligonucleotide; GAG chr2 60531034 60531053 60531037 -
aagggaaaattgtacattgg

SEQ ID NO: 174182 - DNA, 20 bp, Artificial Sequence
  Synthetic oligonucleotide; TGG chr2 60531019 60531038 60531022 -
attgggagcgttactctccc

SEQ ID NO: 174183 - DNA, 20 bp, Artificial Sequence
  Synthetic oligonucleotide; TGG chr2 60531013 60531032 60531016 -
agcgttactctccctggcca

SEQ ID NO: 174184 - DNA, 20 bp, Artificial Sequence
  Synthetic oligonucleotide; TAG chr2 60531008 60531027 60531011 -
tactctccctggccatggtg

SEQ ID NO: 174185 - DNA, 20 bp, Artificial Sequence
  Synthetic oligonucleotide; CAG chr2 60531004 60531023 60531007 -
ctccctggccatggtgtagc

SEQ ID NO: 174186 - DNA, 20 bp, Artificial Sequence
  Synthetic oligonucleotide; TGG chr2 60530999 60531018 60531002 -
tggccatggtgtagccagac

SEQ ID NO: 174187 - DNA, 20 bp, Artificial Sequence
  Synthetic oligonucleotide; TAG chr2 60530994 60531013 60530997 -
atggtgtagccagactggtt

SEQ ID NO: 174188 - DNA, 20 bp, Artificial Sequence
  Synthetic oligonucleotide; CAG chr2 60530991 60531010 60530994 -
gtgtagccagactggtttag

SEQ ID NO: 174189 - DNA, 20 bp, Artificial Sequence
  Synthetic oligonucleotide; CAG chr2 60530987 60531006 60530990 -
agccagactggtttagcaga

SEQ ID NO: 174190 - DNA, 20 bp, Artificial Sequence
  Synthetic oligonucleotide; TAG chr2 60530979 60530998 60530982 -
tggtttagcagacagaatga

SEQ ID NO: 174191 - DNA, 20 bp, Artificial Sequence
  Synthetic oligonucleotide; CAG chr2 60530966 60530985 60530969 -
agaatgatagattgttttgt

SEQ ID NO: 174192 - DNA, 20 bp, Artificial Sequence
  Synthetic oligonucleotide; AGG chr2 60530965 60530984 60530968 -
gaatgatagattgttttgtc

SEQ ID NO: 174193 - DNA, 20 bp, Artificial Sequence
  Synthetic oligonucleotide; GGG chr2 60530964 60530983 60530967 -
aatgatagattgttttgtca

SEQ ID NO: 174194 - DNA, 20 bp, Artificial Sequence
  Synthetic oligonucleotide; GGG chr2 60530963 60530982 60530966 -
atgatagattgttttgtcag

SEQ ID NO: 174195 - DNA, 20 bp, Artificial Sequence
  Synthetic oligonucleotide; CAG chr2 60530957 60530976 60530960 -
gattgttttgtcaggggtcc

SEQ ID NO: 174196 - DNA, 20 bp, Artificial Sequence
  Synthetic oligonucleotide; AGG chr2 60530956 60530975 60530959 -
attgttttgtcaggggtccc

SEQ ID NO: 174197 - DNA, 20 bp, Artificial Sequence
  Synthetic oligonucleotide; GGG chr2 60530955 60530974 60530958 -
ttgttttgtcaggggtccca

SEQ ID NO: 174198 - DNA, 20 bp, Artificial Sequence
  Synthetic oligonucleotide; AAG chr2 60530937 60530956 60530940 -
cagggtgcgccctgaacttg

SEQ ID NO: 174199 - DNA, 20 bp, Artificial Sequence
  Synthetic oligonucleotide; TAG chr2 60530916 60530935 60530919 -
agcactttgtttatcttgaa

SEQ ID NO: 174200 - DNA, 20 bp, Artificial Sequence
  Synthetic oligonucleotide; AAG chr2 60530912 60530931 60530915 -
ctttgtttatcttgaataga

SEQ ID NO: 174201 - DNA, 20 bp, Artificial Sequence
  Synthetic oligonucleotide; AGG chr2 60530911 60530930 60530914 -
tttgtttatcttgaatagaa

SEQ ID NO: 174202 - DNA, 20 bp, Artificial Sequence
  Synthetic oligonucleotide; GGG chr2 60530910 60530929 60530913 -
ttgtttatcttgaatagaaa

SEQ ID NO: 174203 - DNA, 20 bp, Artificial Sequence
  Synthetic oligonucleotide; AAG chr2 60530905 60530924 60530908 -
tatcttgaatagaaagggaa

SEQ ID NO: 174204 - DNA, 20 bp, Artificial Sequence
  Synthetic oligonucleotide; CAG chr2 60530900 60530919 60530903 -
tgaatagaaagggaaaagcg

SEQ ID NO: 174205 - DNA, 20 bp, Artificial Sequence
  Synthetic oligonucleotide; TAG chr2 60530883 60530902 60530886 -
gcgcagacataatcgatgtc

SEQ ID NO: 174206 - DNA, 20 bp, Artificial Sequence
  Synthetic oligonucleotide; TAG chr2 60530876 60530895 60530879 -
cataatcgatgtctagtttt

SEQ ID NO: 174207 - DNA, 20 bp, Artificial Sequence
  Synthetic oligonucleotide; AGG chr2 60530875 60530894 60530878 -
ataatcgatgtctagttttt

SEQ ID NO: 174208 - DNA, 20 bp, Artificial Sequence
  Synthetic oligonucleotide; GAG chr2 60530873 60530892 60530876 -
aatcgatgtctagtttttag

SEQ ID NO: 174209 - DNA, 20 bp, Artificial Sequence
  Synthetic oligonucleotide; AAG chr2 60530865 60530884 60530868 -
tctagtttttaggagctcga

SEQ ID NO: 174210 - DNA, 20 bp, Artificial Sequence
  Synthetic oligonucleotide; GAG chr2 60530863 60530882 60530866 -
tagtttttaggagctcgaaa

SEQ ID NO: 174211 - DNA, 20 bp, Artificial Sequence
  Synthetic oligonucleotide; AGG chr2 60530862 60530881 60530865 -
agtttttaggagctcgaaag

SEQ ID NO: 174212 - DNA, 20 bp, Artificial Sequence
  Synthetic oligonucleotide; TAG chr2 60530859 60530878 60530862 -
ttttaggagctcgaaagagg

SEQ ID NO: 174213 - DNA, 20 bp, Artificial Sequence
  Synthetic oligonucleotide; AGG chr2 60530858 60530877 60530861 -
tttaggagctcgaaagaggt

SEQ ID NO: 174214 - DNA, 20 bp, Artificial Sequence
  Synthetic oligonucleotide; GAG chr2 60530856 60530875 60530859 -
taggagctcgaaagaggtag

SEQ ID NO: 174215 - DNA, 20 bp, Artificial Sequence
  Synthetic oligonucleotide; CAG chr2 60530851 60530870 60530854 -
gctcgaaagaggtaggagaa

SEQ ID NO: 174216 - DNA, 20 bp, Artificial Sequence
  Synthetic oligonucleotide; GAG chr2 60530849 60530868 60530852 -
tcgaaagaggtaggagaaca

SEQ ID NO: 174217 - DNA, 20 bp, Artificial Sequence
  Synthetic oligonucleotide; AAG chr2 60530846 60530865 60530849 -
aaagaggtaggagaacagag

SEQ ID NO: 174218 - DNA, 20 bp, Artificial Sequence
  Synthetic oligonucleotide; CAG chr2 60530840 60530859 60530843 -
gtaggagaacagagaagact

SEQ ID NO: 174219 - DNA, 20 bp, Artificial Sequence
  Synthetic oligonucleotide; AGG chr2 60530839 60530858 60530842 -
taggagaacagagaagactc

SEQ ID NO: 174220 - DNA, 20 bp, Artificial Sequence
  Synthetic oligonucleotide; GAG chr2 60530837 60530856 60530840 -
ggagaacagagaagactcag

SEQ ID NO: 174221 - DNA, 20 bp, Artificial Sequence
  Synthetic oligonucleotide; AGG chr2 60530836 60530855 60530839 -
gagaacagagaagactcagg

SEQ ID NO: 174222 - DNA, 20 bp, Artificial Sequence
  Synthetic oligonucleotide; GGG chr2 60530835 60530854 60530838 -
agaacagagaagactcagga

SEQ ID NO: 174223 - DNA, 20 bp, Artificial Sequence
  Synthetic oligonucleotide; GGG chr2 60530834 60530853 60530837 -
gaacagagaagactcaggag

SEQ ID NO: 174224 - DNA, 20 bp, Artificial Sequence
  Synthetic oligonucleotide; TAG chr2 60530831 60530850 60530834 -
cagagaagactcaggagggg

SEQ ID NO: 174225 - DNA, 20 bp, Artificial Sequence
  Synthetic oligonucleotide; TGG chr2 60530828 60530847 60530831 -
agaagactcaggaggggtag

SEQ ID NO: 174226 - DNA, 20 bp, Artificial Sequence
  Synthetic oligonucleotide; GGG chr2 60530827 60530846 60530830 -
gaagactcaggaggggtagt

SEQ ID NO: 174227 - DNA, 20 bp, Artificial Sequence
  Synthetic oligonucleotide; GAG chr2 60530825 60530844 60530828 -
agactcaggaggggtagtgg

SEQ ID NO: 174228 - DNA, 20 bp, Artificial Sequence
  Synthetic oligonucleotide; AGG chr2 60530824 60530843 60530827 -
gactcaggaggggtagtggg

SEQ ID NO: 174229 - DNA, 20 bp, Artificial Sequence
  Synthetic oligonucleotide; TGG chr2 60530821 60530840 60530824 -
tcaggaggggtagtgggagg

SEQ ID NO: 174230 - DNA, 20 bp, Artificial Sequence
  Synthetic oligonucleotide; GGG chr2 60530820 60530839 60530823 -
caggaggggtagtgggaggt

SEQ ID NO: 174231 - DNA, 20 bp, Artificial Sequence
  Synthetic oligonucleotide; GGG chr2 60530819 60530838 60530822 -
aggaggggtagtgggaggtg

SEQ ID NO: 174232 - DNA, 20 bp, Artificial Sequence
  Synthetic oligonucleotide; GGG chr2 60530818 60530837 60530821 -
ggaggggtagtgggaggtgg

SEQ ID NO: 174233 - DNA, 20 bp, Artificial Sequence
  Synthetic oligonucleotide; GAG chr2 60530816 60530835 60530819 -
aggggtagtgggaggtgggg

SEQ ID NO: 174234 - DNA, 20 bp, Artificial Sequence
  Synthetic oligonucleotide; AGG chr2 60530815 60530834 60530818 -
ggggtagtgggaggtggggg

SEQ ID NO: 174235 - DNA, 20 bp, Artificial Sequence
  Synthetic oligonucleotide; CAG chr2 60530810 60530829 60530813 -
agtgggaggtgggggaggtg

SEQ ID NO: 174236 - DNA, 20 bp, Artificial Sequence
  Synthetic oligonucleotide; AGG chr2 60530809 60530828 60530812 -
gtgggaggtgggggaggtgc

SEQ ID NO: 174237 - DNA, 20 bp, Artificial Sequence
  Synthetic oligonucleotide; TGG chr2 60530803 60530822 60530806 -
ggtgggggaggtgcaggccc

SEQ ID NO: 174238 - DNA, 20 bp, Artificial Sequence
  Synthetic oligonucleotide; TGG chr2 60530797 60530816 60530800 -
ggaggtgcaggccctggttg

SEQ ID NO: 174239 - DNA, 20 bp, Artificial Sequence
  Synthetic oligonucleotide; CAG chr2 60530783 60530802 60530786 -
tggttgtggttgtccattaa

SEQ ID NO: 174240 - DNA, 20 bp, Artificial Sequence
  Synthetic oligonucleotide; TGG chr2 60530773 60530792 60530776 -
tgtccattaacagatgaact

SEQ ID NO: 174241 - DNA, 20 bp, Artificial Sequence
  Synthetic oligonucleotide; GAG chr2 60530768 60530787 60530771 -
attaacagatgaacttggcc

SEQ ID NO: 174242 - DNA, 20 bp, Artificial Sequence
  Synthetic oligonucleotide; AGG chr2 60530767 60530786 60530770 -
ttaacagatgaacttggccg

SEQ ID NO: 174243 - DNA, 20 bp, Artificial Sequence
  Synthetic oligonucleotide; GGG chr2 60530766 60530785 60530769 -
taacagatgaacttggccga

SEQ ID NO: 174244 - DNA, 20 bp, Artificial Sequence
  Synthetic oligonucleotide; CAG chr2 60530762 60530781 60530765 -
agatgaacttggccgagggc

SEQ ID NO: 174245 - DNA, 20 bp, Artificial Sequence
  Synthetic oligonucleotide; AGG chr2 60530761 60530780 60530764 -
gatgaacttggccgagggcc

SEQ ID NO: 174246 - DNA, 20 bp, Artificial Sequence
  Synthetic oligonucleotide; TAG chr2 60530755 60530774 60530758 -
cttggccgagggccaggctt

SEQ ID NO: 174247 - DNA, 20 bp, Artificial Sequence
  Synthetic oligonucleotide; GAG chr2 60530750 60530769 60530753 -
ccgagggccaggctttagat

SEQ ID NO: 174248 - DNA, 20 bp, Artificial Sequence
  Synthetic oligonucleotide; GAG chr2 60530748 60530767 60530751 -
gagggccaggctttagatga

SEQ ID NO: 174249 - DNA, 20 bp, Artificial Sequence
  Synthetic oligonucleotide; CAG chr2 60530740 60530759 60530743 -
ggctttagatgagagcgtgt

SEQ ID NO: 174250 - DNA, 20 bp, Artificial Sequence
  Synthetic oligonucleotide; AGG chr2 60530739 60530758 60530742 -
gctttagatgagagcgtgtc

SEQ ID NO: 174251 - DNA, 20 bp, Artificial Sequence
  Synthetic oligonucleotide; GGG chr2 60530738 60530757 60530741 -
ctttagatgagagcgtgtca

SEQ ID NO: 174252 - DNA, 20 bp, Artificial Sequence
  Synthetic oligonucleotide; CAG chr2 60530732 60530751 60530735 -
atgagagcgtgtcagggccc

SEQ ID NO: 174253 - DNA, 20 bp, Artificial Sequence
  Synthetic oligonucleotide; CAG chr2 60530727 60530746 60530730 -
agcgtgtcagggccccagtg

SEQ ID NO: 174254 - DNA, 20 bp, Artificial Sequence
  Synthetic oligonucleotide; AAG chr2 60530722 60530741 60530725 -
gtcagggccccagtgcagcc

SEQ ID NO: 174255 - DNA, 20 bp, Artificial Sequence
  Synthetic oligonucleotide; CAG chr2 60530713 60530732 60530716 -
ccagtgcagccaagcctttt

SEQ ID NO: 174256 - DNA, 20 bp, Artificial Sequence
  Synthetic oligonucleotide; TGG chr2 60530644 60530663 60530647 -
actgtacatcaaatgctccc

SEQ ID NO: 174257 - DNA, 20 bp, Artificial Sequence
  Synthetic oligonucleotide; TGG chr2 60530636 60530655 60530639 -
tcaaatgctccctggtcttt

SEQ ID NO: 174258 - DNA, 20 bp, Artificial Sequence
  Synthetic oligonucleotide; AAG chr2 60530630 60530649 60530633 -
gctccctggtcttttggcta

SEQ ID NO: 174259 - DNA, 20 bp, Artificial Sequence
  Synthetic oligonucleotide; AGG chr2 60530629 60530648 60530632 -
ctccctggtcttttggctaa

SEQ ID NO: 174260 - DNA, 20 bp, Artificial Sequence
  Synthetic oligonucleotide; AAG chr2 60530601 60530620 60530604 -
aaataaaaaataaaaaaaaa

SEQ ID NO: 174261 - DNA, 20 bp, Artificial Sequence
  Synthetic oligonucleotide; GAG chr2 60530599 60530618 60530602 -
ataaaaaataaaaaaaaaaa

SEQ ID NO: 174262 - DNA, 20 bp, Artificial Sequence
  Synthetic oligonucleotide; CAG chr2 60530591 60530610 60530594 -
taaaaaaaaaaagagacgca

SEQ ID NO: 174263 - DNA, 20 bp, Artificial Sequence
  Synthetic oligonucleotide; CAG chr2 60530564 60530583 60530567 -
attttttccctcctctgaac

SEQ ID NO: 174264 - DNA, 20 bp, Artificial Sequence
  Synthetic oligonucleotide; GAG chr2 60530559 60530578 60530562 -
ttccctcctctgaaccagtt

SEQ ID NO: 174265 - DNA, 20 bp, Artificial Sequence
  Synthetic oligonucleotide; AGG chr2 60530558 60530577 60530561 -
tccctcctctgaaccagttg

SEQ ID NO: 174266 - DNA, 20 bp, Artificial Sequence
  Synthetic oligonucleotide; CAG chr2 60530554 60530573 60530557 -
tcctctgaaccagttgaggc

SEQ ID NO: 174267 - DNA, 20 bp, Artificial Sequence
  Synthetic oligonucleotide; TGG chr2 60530546 60530565 60530549 -
accagttgaggccagtcttt

SEQ ID NO: 174268 - DNA, 20 bp, Artificial Sequence
  Synthetic oligonucleotide; CGG chr2 60530534 60530553 60530537 -
cagtcttttggctacatatg

SEQ ID NO: 174269 - DNA, 20 bp, Artificial Sequence
  Synthetic oligonucleotide; GGG chr2 60530533 60530552 60530536 -
agtcttttggctacatatgc

SEQ ID NO: 174270 - DNA, 20 bp, Artificial Sequence
  Synthetic oligonucleotide; TGG chr2 60530515 60530534 60530518 -
gcgggttctatcatctttcc

SEQ ID NO: 174271 - DNA, 20 bp, Artificial Sequence
  Synthetic oligonucleotide; TGG chr2 60530504 60530523 60530507 -
catctttcctggcttgccgt

SEQ ID NO: 174272 - DNA, 20 bp, Artificial Sequence
  Synthetic oligonucleotide; GGG chr2 60530503 60530522 60530506 -
atctttcctggcttgccgtt

SEQ ID NO: 174273 - DNA, 20 bp, Artificial Sequence
  Synthetic oligonucleotide; AAG chr2 60530495 60530514 60530498 -
tggcttgccgttgggaaaaa

SEQ ID NO: 174274 - DNA, 20 bp, Artificial Sequence
  Synthetic oligonucleotide; CAG chr2 60530480 60530499 60530483 -
aaaaaaagttgtgataacgc

SEQ ID NO: 174275 - DNA, 20 bp, Artificial Sequence
  Synthetic oligonucleotide; GAG chr2 60530471 60530490 60530474 -
tgtgataacgccagtaaccc

SEQ ID NO: 174276 - DNA, 20 bp, Artificial Sequence
  Synthetic oligonucleotide; AGG chr2 60530470 60530489 60530473 -
gtgataacgccagtaacccg

SEQ ID NO: 174277 - DNA, 20 bp, Artificial Sequence
  Synthetic oligonucleotide; GGG chr2 60530469 60530488 60530472 -
tgataacgccagtaacccga

SEQ ID NO: 174278 - DNA, 20 bp, Artificial Sequence
  Synthetic oligonucleotide; CAG chr2 60530465 60530484 60530468 -
aacgccagtaacccgagggc

SEQ ID NO: 174279 - DNA, 20 bp, Artificial Sequence
  Synthetic oligonucleotide; TGG chr2 60530461 60530480 60530464 -
ccagtaacccgagggccaga

SEQ ID NO: 174280 - DNA, 20 bp, Artificial Sequence
  Synthetic oligonucleotide; GGG chr2 60530460 60530479 60530463 -
cagtaacccgagggccagat

SEQ ID NO: 174281 - DNA, 20 bp, Artificial Sequence
  Synthetic oligonucleotide; AAG chr2 60530457 60530476 60530460 -
taacccgagggccagatggg

SEQ ID NO: 174282 - DNA, 20 bp, Artificial Sequence
  Synthetic oligonucleotide; AGG chr2 60530456 60530475 60530459 -
aacccgagggccagatggga

SEQ ID NO: 174283 - DNA, 20 bp, Artificial Sequence
  Synthetic oligonucleotide; GGG chr2 60530455 60530474 60530458 -
acccgagggccagatgggaa

SEQ ID NO: 174284 - DNA, 20 bp, Artificial Sequence
  Synthetic oligonucleotide; TGG chr2 60530450 60530469 60530453 -
agggccagatgggaagggtt

SEQ ID NO: 174285 - DNA, 20 bp, Artificial Sequence
  Synthetic oligonucleotide; CAG chr2 60530440 60530459 60530443 -
gggaagggtttggttgtgtt

SEQ ID NO: 174286 - DNA, 20 bp, Artificial Sequence
  Synthetic oligonucleotide; AGG chr2 60530439 60530458 60530442 -
ggaagggtttggttgtgttc

SEQ ID NO: 174287 - DNA, 20 bp, Artificial Sequence
  Synthetic oligonucleotide; CAG chr2 60530432 60530451 60530435 -
tttggttgtgttcaggcgac

SEQ ID NO: 174288 - DNA, 20 bp, Artificial Sequence
  Synthetic oligonucleotide; AGG chr2 60530431 60530450 60530434 -
ttggttgtgttcaggcgacc

SEQ ID NO: 174289 - DNA, 20 bp, Artificial Sequence
  Synthetic oligonucleotide; GAG chr2 60530425 60530444 60530428 -
gtgttcaggcgaccaggtgt

SEQ ID NO: 174290 - DNA, 20 bp, Artificial Sequence
  Synthetic oligonucleotide; GAG chr2 60530423 60530442 60530426 -
gttcaggcgaccaggtgtga

SEQ ID NO: 174291 - DNA, 20 bp, Artificial Sequence
  Synthetic oligonucleotide; TGG chr2 60530416 60530435 60530419 -
cgaccaggtgtgagagctcg

SEQ ID NO: 174292 - DNA, 20 bp, Artificial Sequence
  Synthetic oligonucleotide; CAG chr2 60530411 60530430 60530414 -
aggtgtgagagctcgtggtg

SEQ ID NO: 174293 - DNA, 20 bp, Artificial Sequence
  Synthetic oligonucleotide; TGG chr2 60530408 60530427 60530411 -
tgtgagagctcgtggtgcag

SEQ ID NO: 174294 - DNA, 20 bp, Artificial Sequence
  Synthetic oligonucleotide; GGG chr2 60530407 60530426 60530410 -
gtgagagctcgtggtgcagt

SEQ ID NO: 174295 - DNA, 20 bp, Artificial Sequence
  Synthetic oligonucleotide; GGG chr2 60530406 60530425 60530409 -
tgagagctcgtggtgcagtg

SEQ ID NO: 174296 - DNA, 20 bp, Artificial Sequence
  Synthetic oligonucleotide; TGG chr2 60530403 60530422 60530406 -
gagctcgtggtgcagtgggg

SEQ ID NO: 174297 - DNA, 20 bp, Artificial Sequence
  Synthetic oligonucleotide; GGG chr2 60530402 60530421 60530405 -
agctcgtggtgcagtggggt

SEQ ID NO: 174298 - DNA, 20 bp, Artificial Sequence
  Synthetic oligonucleotide; GGG chr2 60530401 60530420 60530404 -
gctcgtggtgcagtggggtg

SEQ ID NO: 174299 - DNA, 20 bp, Artificial Sequence
  Synthetic oligonucleotide; TGG chr2 60530396 60530415 60530399 -
tggtgcagtggggtggggcg

SEQ ID NO: 174300 - DNA, 20 bp, Artificial Sequence
  Synthetic oligonucleotide; CGG chr2 60530392 60530411 60530395 -
gcagtggggtggggcgtggc

SEQ ID NO: 174301 - DNA, 20 bp, Artificial Sequence
  Synthetic oligonucleotide; CAG chr2 60530375 60530394 60530378 -
ggccggcgtgcctgcgtgtg

SEQ ID NO: 174302 - DNA, 20 bp, Artificial Sequence
  Synthetic oligonucleotide; AGG chr2 60530374 60530393 60530377 -
gccggcgtgcctgcgtgtgc

SEQ ID NO: 174303 - DNA, 20 bp, Artificial Sequence
  Synthetic oligonucleotide; AAG chr2 60530370 60530389 60530373 -
gcgtgcctgcgtgtgcaggt

SEQ ID NO: 174304 - DNA, 20 bp, Artificial Sequence
  Synthetic oligonucleotide; CAG chr2 60530363 60530382 60530366 -
tgcgtgtgcaggtaagaaat

SEQ ID NO: 174305 - DNA, 20 bp, Artificial Sequence
  Synthetic oligonucleotide; TGG chr2 60530360 60530379 60530363 -
gtgtgcaggtaagaaatcag

SEQ ID NO: 174306 - DNA, 20 bp, Artificial Sequence
  Synthetic oligonucleotide; TGG chr2 60530330 60530349 60530333 -
tttttttttttttttttaaa

SEQ ID NO: 174307 - DNA, 20 bp, Artificial Sequence
  Synthetic oligonucleotide; AAG chr2 60530324 60530343 60530327 -
tttttttttttaaatggctg

SEQ ID NO: 174308 - DNA, 20 bp, Artificial Sequence
  Synthetic oligonucleotide; TGG chr2 60530311 60530330 60530314 -
atggctgaagtttaacttgt

SEQ ID NO: 174309 - DNA, 20 bp, Artificial Sequence
  Synthetic oligonucleotide; AAG chr2 60530308 60530327 60530311 -
gctgaagtttaacttgttgg

SEQ ID NO: 174310 - DNA, 20 bp, Artificial Sequence
  Synthetic oligonucleotide; AGG chr2 60530307 60530326 60530310 -
ctgaagtttaacttgttgga

SEQ ID NO: 174311 - DNA, 20 bp, Artificial Sequence
  Synthetic oligonucleotide; GGG chr2 60530306 60530325 60530309 -
tgaagtttaacttgttggaa

SEQ ID NO: 174312 - DNA, 20 bp, Artificial Sequence
  Synthetic oligonucleotide; AAG chr2 60530293 60530312 60530296 -
gttggaagggcctgtgaatt

SEQ ID NO: 174313 - DNA, 20 bp, Artificial Sequence
  Synthetic oligonucleotide; CGG chr2 60530286 60530305 60530289 -
gggcctgtgaattaagctgt

SEQ ID NO: 174314 - DNA, 20 bp, Artificial Sequence
  Synthetic oligonucleotide; TGG chr2 60530283 60530302 60530286 -
cctgtgaattaagctgtcgg

SEQ ID NO: 174315 - DNA, 20 bp, Artificial Sequence
  Synthetic oligonucleotide; GAG chr2 60530278 60530297 60530281 -
gaattaagctgtcggtggct

SEQ ID NO: 174316 - DNA, 20 bp, Artificial Sequence
  Synthetic oligonucleotide; AAG chr2 60530262 60530281 60530265 -
ggctgagaacgataatatgc

SEQ ID NO: 174317 - DNA, 20 bp, Artificial Sequence
  Synthetic oligonucleotide; AGG chr2 60530261 60530280 60530264 -
gctgagaacgataatatgca

SEQ ID NO: 174318 - DNA, 20 bp, Artificial Sequence
  Synthetic oligonucleotide; AAG chr2 60530258 60530277 60530261 -
gagaacgataatatgcaagg

SEQ ID NO: 174319 - DNA, 20 bp, Artificial Sequence
  Synthetic oligonucleotide; AGG chr2 60530257 60530276 60530260 -
agaacgataatatgcaagga

SEQ ID NO: 174320 - DNA, 20 bp, Artificial Sequence
  Synthetic oligonucleotide; AAG chr2 60530251 60530270 60530254 -
ataatatgcaaggaaggctc

SEQ ID NO: 174321 - DNA, 20 bp, Artificial Sequence
  Synthetic oligonucleotide; AGG chr2 60530250 60530269 60530253 -
taatatgcaaggaaggctca

SEQ ID NO: 174322 - DNA, 20 bp, Artificial Sequence
  Synthetic oligonucleotide; AAG chr2 60530247 60530266 60530250 -
tatgcaaggaaggctcaagg

SEQ ID NO: 174323 - DNA, 20 bp, Artificial Sequence
  Synthetic oligonucleotide; AGG chr2 60530246 60530265 60530249 -
atgcaaggaaggctcaagga

SEQ ID NO: 174324 - DNA, 20 bp, Artificial Sequence
  Synthetic oligonucleotide; AAG chr2 60530240 60530259 60530243 -
ggaaggctcaaggaaggctc

SEQ ID NO: 174325 - DNA, 20 bp, Artificial Sequence
  Synthetic oligonucleotide; AAG chr2 60530236 60530255 60530239 -
ggctcaaggaaggctcaaga

SEQ ID NO: 174326 - DNA, 20 bp, Artificial Sequence
  Synthetic oligonucleotide; AGG chr2 60530235 60530254 60530238 -
gctcaaggaaggctcaagaa

SEQ ID NO: 174327 - DNA, 20 bp, Artificial Sequence
  Synthetic oligonucleotide; CAG chr2 60530231 60530250 60530234 -
aaggaaggctcaagaaaggc

SEQ ID NO: 174328 - DNA, 20 bp, Artificial Sequence
  Synthetic oligonucleotide; AGG chr2 60530230 60530249 60530233 -
aggaaggctcaagaaaggcc

SEQ ID NO: 174329 - DNA, 20 bp, Artificial Sequence
  Synthetic oligonucleotide; GGG chr2 60530229 60530248 60530232 -
ggaaggctcaagaaaggcca

SEQ ID NO: 174330 - DNA, 20 bp, Artificial Sequence
  Synthetic oligonucleotide; GGG chr2 60530228 60530247 60530231 -
gaaggctcaagaaaggccag

SEQ ID NO: 174331 - DNA, 20 bp, Artificial Sequence
  Synthetic oligonucleotide; TGG chr2 60530225 60530244 60530228 -
ggctcaagaaaggccagggg

SEQ ID NO: 174332 - DNA, 20 bp, Artificial Sequence
  Synthetic oligonucleotide; GGG chr2 60530224 60530243 60530227 -
gctcaagaaaggccaggggt

SEQ ID NO: 174333 - DNA, 20 bp, Artificial Sequence
  Synthetic oligonucleotide; GGG chr2 60530223 60530242 60530226 -
ctcaagaaaggccaggggtg

SEQ ID NO: 174334 - DNA, 20 bp, Artificial Sequence
  Synthetic oligonucleotide; AAG chr2 60530218 60530237 60530221 -
gaaaggccaggggtggggaa

SEQ ID NO: 174335 - DNA, 20 bp, Artificial Sequence
  Synthetic oligonucleotide; AGG chr2 60530217 60530236 60530220 -
aaaggccaggggtggggaaa

SEQ ID NO: 174336 - DNA, 20 bp, Artificial Sequence
  Synthetic oligonucleotide; TAG chr2 60530205 60530224 60530208 -
tggggaaaaggtgctcttgt

SEQ ID NO: 174337 - DNA, 20 bp, Artificial Sequence
  Synthetic oligonucleotide; GAG chr2 60530203 60530222 60530206 -
gggaaaaggtgctcttgtta

SEQ ID NO: 174338 - DNA, 20 bp, Artificial Sequence
  Synthetic oligonucleotide; AGG chr2 60530202 60530221 60530205 -
ggaaaaggtgctcttgttag

SEQ ID NO: 174339 - DNA, 20 bp, Artificial Sequence
  Synthetic oligonucleotide; CAG chr2 60530197 60530216 60530200 -
aggtgctcttgttagaggcg

SEQ ID NO: 174340 - DNA, 20 bp, Artificial Sequence
  Synthetic oligonucleotide; TGG chr2 60530187 60530206 60530190 -
gttagaggcgcagcctttcc

SEQ ID NO: 174341 - DNA, 20 bp, Artificial Sequence
  Synthetic oligonucleotide; GGG chr2 60530186 60530205 60530189 -
ttagaggcgcagcctttcct

SEQ ID NO: 174342 - DNA, 20 bp, Artificial Sequence
  Synthetic oligonucleotide; CAG chr2 60530183 60530202 60530186 -
gaggcgcagcctttcctggg

SEQ ID NO: 174343 - DNA, 20 bp, Artificial Sequence
  Synthetic oligonucleotide; AGG chr2 60530182 60530201 60530185 -
aggcgcagcctttcctgggc

SEQ ID NO: 174344 - DNA, 20 bp, Artificial Sequence
  Synthetic oligonucleotide; CAG chr2 60530176 60530195 60530179 -
agcctttcctgggcaggacc

SEQ ID NO: 174345 - DNA, 20 bp, Artificial Sequence
  Synthetic oligonucleotide; AGG chr2 60530175 60530194 60530178 -
gcctttcctgggcaggaccc

SEQ ID NO: 174346 - DNA, 20 bp, Artificial Sequence
  Synthetic oligonucleotide; TGG chr2 60530167 60530186 60530170 -
tgggcaggacccaggaccga

SEQ ID NO: 174347 - DNA, 20 bp, Artificial Sequence
  Synthetic oligonucleotide; TGG chr2 60530150 60530169 60530153 -
cgatggcaaacccatgtgtt

SEQ ID NO: 174348 - DNA, 20 bp, Artificial Sequence
  Synthetic oligonucleotide; GGG chr2 60530149 60530168 60530152 -
gatggcaaacccatgtgttt

SEQ ID NO: 174349 - DNA, 20 bp, Artificial Sequence
  Synthetic oligonucleotide; TGG chr2 60530116 60530135 60530119 -
tctcgattttcttatcttct

SEQ ID NO: 174350 - DNA, 20 bp, Artificial Sequence
  Synthetic oligonucleotide; TAG chr2 60530096 60530115 60530099 -
tggcctcttcctgtgttttt

SEQ ID NO: 174351 - DNA, 20 bp, Artificial Sequence
  Synthetic oligonucleotide; TGG chr2 60530059 60530078 60530062 -
atgcattcatatatgaatgt

SEQ ID NO: 174352 - DNA, 20 bp, Artificial Sequence
  Synthetic oligonucleotide; AAG chr2 60530055 60530074 60530058 -
attcatatatgaatgttggc

SEQ ID NO: 174353 - DNA, 20 bp, Artificial Sequence
  Synthetic oligonucleotide; CAG chr2 60530052 60530071 60530055 -
catatatgaatgttggcaag

SEQ ID NO: 174354 - DNA, 20 bp, Artificial Sequence
  Synthetic oligonucleotide; AGG chr2 60530051 60530070 60530054 -
atatatgaatgttggcaagc

SEQ ID NO: 174355 - DNA, 20 bp, Artificial Sequence
  Synthetic oligonucleotide; GAG chr2 60530049 60530068 60530052 -
atatgaatgttggcaagcag

SEQ ID NO: 174356 - DNA, 20 bp, Artificial Sequence
  Synthetic oligonucleotide; TAG chr2 60530017 60530036 60530020 -
caataacttcctgacatttt

SEQ ID NO: 174357 - DNA, 20 bp, Artificial Sequence
  Synthetic oligonucleotide; CAG chr2 60530001 60530020 60530004 -
tttttagctcttttaatgtg

SEQ ID NO: 174358 - DNA, 20 bp, Artificial Sequence
  Synthetic oligonucleotide; AAG chr2 60529980 60529999 60529983 -
agtctttgccctcctgccac

SEQ ID NO: 174359 - DNA, 20 bp, Artificial Sequence
  Synthetic oligonucleotide; TGG chr2 60529977 60529996 60529980 -
ctttgccctcctgccacaag

SEQ ID NO: 174360 - DNA, 20 bp, Artificial Sequence
  Synthetic oligonucleotide; AAG chr2 60529972 60529991 60529975 -
ccctcctgccacaagtggcg

SEQ ID NO: 174361 - DNA, 20 bp, Artificial Sequence
  Synthetic oligonucleotide; TGG chr2 60529945 60529964 60529948 -
tgaatttccctgttactaac

SEQ ID NO: 174362 - DNA, 20 bp, Artificial Sequence
  Synthetic oligonucleotide; CAG chr2 60529942 60529961 60529945 -
atttccctgttactaactgg

SEQ ID NO: 174363 - DNA, 20 bp, Artificial Sequence
  Synthetic oligonucleotide; AGG chr2 60529941 60529960 60529944 -
tttccctgttactaactggc

SEQ ID NO: 174364 - DNA, 20 bp, Artificial Sequence
  Synthetic oligonucleotide; GAG chr2 60529939 60529958 60529942 -
tccctgttactaactggcag

SEQ ID NO: 174365 - DNA, 20 bp, Artificial Sequence
  Synthetic oligonucleotide; AGG chr2 60529938 60529957 60529941 -
ccctgttactaactggcagg

SEQ ID NO: 174366 - DNA, 20 bp, Artificial Sequence
  Synthetic oligonucleotide; TAG chr2 60529928 60529947 60529931 -
aactggcaggaggcatgttc

SEQ ID NO: 174367 - DNA, 20 bp, Artificial Sequence
  Synthetic oligonucleotide; CAG chr2 60529918 60529937 60529921 -
aggcatgttctagttcccac

SEQ ID NO: 174368 - DNA, 20 bp, Artificial Sequence
  Synthetic oligonucleotide; GAG chr2 60529916 60529935 60529919 -
gcatgttctagttcccacca

SEQ ID NO: 174369 - DNA, 20 bp, Artificial Sequence
  Synthetic oligonucleotide; AGG chr2 60529915 60529934 60529918 -
catgttctagttcccaccag

SEQ ID NO: 174370 - DNA, 20 bp, Artificial Sequence
  Synthetic oligonucleotide; GAG chr2 60529913 60529932 60529916 -
tgttctagttcccaccagag

SEQ ID NO: 174371 - DNA, 20 bp, Artificial Sequence
  Synthetic oligonucleotide; TGG chr2 60529906 60529925 60529909 -
gttcccaccagaggagctgc

SEQ ID NO: 174372 - DNA, 20 bp, Artificial Sequence
  Synthetic oligonucleotide; GGG chr2 60529905 60529924 60529908 -
ttcccaccagaggagctgct

SEQ ID NO: 174373 - DNA, 20 bp, Artificial Sequence
  Synthetic oligonucleotide; GGG chr2 60529904 60529923 60529907 -
tcccaccagaggagctgctg

SEQ ID NO: 174374 - DNA, 20 bp, Artificial Sequence
  Synthetic oligonucleotide; AAG chr2 60529898 60529917 60529901 -
cagaggagctgctggggcta

SEQ ID NO: 174375 - DNA, 20 bp, Artificial Sequence
  Synthetic oligonucleotide; TGG chr2 60529894 60529913 60529897 -
ggagctgctggggctaaagc

SEQ ID NO: 174376 - DNA, 20 bp, Artificial Sequence
  Synthetic oligonucleotide; GGG chr2 60529893 60529912 60529896 -
gagctgctggggctaaagct

SEQ ID NO: 174377 - DNA, 20 bp, Artificial Sequence
  Synthetic oligonucleotide; TAG chr2 60529886 60529905 60529889 -
tggggctaaagctgggttca

SEQ ID NO: 174378 - DNA, 20 bp, Artificial Sequence
  Synthetic oligonucleotide; TAG chr2 60529874 60529893 60529877 -
tgggttcatagaatcccacc

SEQ ID NO: 174379 - DNA, 20 bp, Artificial Sequence
  Synthetic oligonucleotide; AGG chr2 60529873 60529892 60529876 -
gggttcatagaatcccacct

SEQ ID NO: 174380 - DNA, 20 bp, Artificial Sequence
  Synthetic oligonucleotide; GGG chr2 60529872 60529891 60529875 -
ggttcatagaatcccaccta

SEQ ID NO: 174381 - DNA, 20 bp, Artificial Sequence
  Synthetic oligonucleotide; GGG chr2 60529871 60529890 60529874 -
gttcatagaatcccacctag

SEQ ID NO: 174382 - DNA, 20 bp, Artificial Sequence
  Synthetic oligonucleotide; CAG chr2 60529864 60529883 60529867 -
gaatcccacctaggggacac

SEQ ID NO: 174383 - DNA, 20 bp, Artificial Sequence
  Synthetic oligonucleotide; AGG chr2 60529863 60529882 60529866 -
aatcccacctaggggacacc

SEQ ID NO: 174384 - DNA, 20 bp, Artificial Sequence
  Synthetic oligonucleotide; GGG chr2 60529862 60529881 60529865 -
atcccacctaggggacacca

SEQ ID NO: 174385 - DNA, 20 bp, Artificial Sequence
  Synthetic oligonucleotide; AAG chr2 60529854 60529873 60529857 -
taggggacaccagggctttc

SEQ ID NO: 174386 - DNA, 20 bp, Artificial Sequence
  Synthetic oligonucleotide; TGG chr2 60529851 60529870 60529854 -
gggacaccagggctttcaag

SEQ ID NO: 174387 - DNA, 20 bp, Artificial Sequence
  Synthetic oligonucleotide; TGG chr2 60529846 60529865 60529849 -
accagggctttcaagtggtt

SEQ ID NO: 174388 - DNA, 20 bp, Artificial Sequence
  Synthetic oligonucleotide; GGG chr2 60529845 60529864 60529848 -
ccagggctttcaagtggttt

SEQ ID NO: 174389 - DNA, 20 bp, Artificial Sequence
  Synthetic oligonucleotide; GGG chr2 60529844 60529863 60529847 -
cagggctttcaagtggtttg

SEQ ID NO: 174390 - DNA, 20 bp, Artificial Sequence
  Synthetic oligonucleotide; TAG chr2 60529794 60529813 60529797 -
aaaaaatatttttcccatca

SEQ ID NO: 174391 - DNA, 20 bp, Artificial Sequence
  Synthetic oligonucleotide; AAG chr2 60529784 60529803 60529787 -
tttcccatcatagacttgaa

SEQ ID NO: 174392 - DNA, 20 bp, Artificial Sequence
  Synthetic oligonucleotide; AGG chr2 60529783 60529802 60529786 -
ttcccatcatagacttgaaa

SEQ ID NO: 174393 - DNA, 20 bp, Artificial Sequence
  Synthetic oligonucleotide; TGG chr2 60529729 60529748 60529732 -
aaaatcacatttacttcccc

SEQ ID NO: 174394 - DNA, 20 bp, Artificial Sequence
  Synthetic oligonucleotide; TAG chr2 60529725 60529744 60529728 -
tcacatttacttcccctggc

SEQ ID NO: 174395 - DNA, 20 bp, Artificial Sequence
  Synthetic oligonucleotide; AGG chr2 60529724 60529743 60529727 -
cacatttacttcccctggct

SEQ ID NO: 174396 - DNA, 20 bp, Artificial Sequence
  Synthetic oligonucleotide; AAG chr2 60529715 60529734 60529718 -
ttcccctggctaggcctcat

SEQ ID NO: 174397 - DNA, 20 bp, Artificial Sequence
  Synthetic oligonucleotide; AGG chr2 60529714 60529733 60529717 -
tcccctggctaggcctcata

SEQ ID NO: 174398 - DNA, 20 bp, Artificial Sequence
  Synthetic oligonucleotide; GGG chr2 60529713 60529732 60529716 -
cccctggctaggcctcataa

SEQ ID NO: 174399 - DNA, 20 bp, Artificial Sequence
  Synthetic oligonucleotide; GAG chr2 60529711 60529730 60529714 -
cctggctaggcctcataagg

SEQ ID NO: 174400 - DNA, 20 bp, Artificial Sequence
  Synthetic oligonucleotide; AGG chr2 60529710 60529729 60529713 -
ctggctaggcctcataaggg

SEQ ID NO: 174401 - DNA, 20 bp, Artificial Sequence
  Synthetic oligonucleotide; CAG chr2 60529707 60529726 60529710 -
gctaggcctcataagggagg

SEQ ID NO: 174402 - DNA, 20 bp, Artificial Sequence
  Synthetic oligonucleotide; AGG chr2 60529706 60529725 60529709 -
ctaggcctcataagggaggc

SEQ ID NO: 174403 - DNA, 20 bp, Artificial Sequence
  Synthetic oligonucleotide; TAG chr2 60529686 60529705 60529689 -
aggatttccttctccttttc

SEQ ID NO: 174404 - DNA, 20 bp, Artificial Sequence
  Synthetic oligonucleotide; TAG chr2 60529683 60529702 60529686 -
atttccttctccttttctag

SEQ ID NO: 174405 - DNA, 20 bp, Artificial Sequence
  Synthetic oligonucleotide; TGG chr2 60529669 60529688 60529672 -
ttctagtagcaaataaaaac

SEQ ID NO: 174406 - DNA, 20 bp, Artificial Sequence
  Synthetic oligonucleotide; GGG chr2 60529668 60529687 60529671 -
tctagtagcaaataaaaact

SEQ ID NO: 174407 - DNA, 20 bp, Artificial Sequence
  Synthetic oligonucleotide; TGG chr2 60529659 60529678 60529662 -
aaataaaaactgggaaaatt

SEQ ID NO: 174408 - DNA, 20 bp, Artificial Sequence
  Synthetic oligonucleotide; GGG chr2 60529658 60529677 60529661 -
aataaaaactgggaaaattt

SEQ ID NO: 174409 - DNA, 20 bp, Artificial Sequence
  Synthetic oligonucleotide; GGG chr2 60529657 60529676 60529660 -
ataaaaactgggaaaatttg

SEQ ID NO: 174410 - DNA, 20 bp, Artificial Sequence
  Synthetic oligonucleotide; GGG chr2 60529656 60529675 60529659 -
taaaaactgggaaaatttgg

SEQ ID NO: 174411 - DNA, 20 bp, Artificial Sequence
  Synthetic oligonucleotide; TGG chr2 60529649 60529668 60529652 -
tgggaaaatttgggggcctc

SEQ ID NO: 174412 - DNA, 20 bp, Artificial Sequence
  Synthetic oligonucleotide; GGG chr2 60529648 60529667 60529651 -
gggaaaatttgggggcctct

SEQ ID NO: 174413 - DNA, 20 bp, Artificial Sequence
  Synthetic oligonucleotide; TGG chr2 60529636 60529655 60529639 -
gggcctctgggtttatccca

SEQ ID NO: 174414 - DNA, 20 bp, Artificial Sequence
  Synthetic oligonucleotide; CAG chr2 60529604 60529623 60529607 -
cccgctcccgcccgccaact

SEQ ID NO: 174415 - DNA, 20 bp, Artificial Sequence
  Synthetic oligonucleotide; AAG chr2 60529599 60529618 60529602 -
tcccgcccgccaactcagcc

SEQ ID NO: 174416 - DNA, 20 bp, Artificial Sequence
  Synthetic oligonucleotide; TAG chr2 60529592 60529611 60529595 -
cgccaactcagccaagccct

SEQ ID NO: 174417 - DNA, 20 bp, Artificial Sequence
  Synthetic oligonucleotide; GAG chr2 60529590 60529609 60529593 -
ccaactcagccaagccctta

SEQ ID NO: 174418 - DNA, 20 bp, Artificial Sequence
  Synthetic oligonucleotide; AGG chr2 60529589 60529608 60529592 -
caactcagccaagcccttag

SEQ ID NO: 174419 - DNA, 20 bp, Artificial Sequence
  Synthetic oligonucleotide; CAG chr2 60529586 60529605 60529589 -
ctcagccaagcccttagagg

SEQ ID NO: 174420 - DNA, 20 bp, Artificial Sequence
  Synthetic oligonucleotide; TAG chr2 60529569 60529588 60529572 -
aggcagtcttctctcccacc

SEQ ID NO: 174421 - DNA, 20 bp, Artificial Sequence
  Synthetic oligonucleotide; GAG chr2 60529551 60529570 60529554 -
cctagatgtctttgtaacct

SEQ ID NO: 174422 - DNA, 20 bp, Artificial Sequence
  Synthetic oligonucleotide; TGG chr2 60529547 60529566 60529550 -
gatgtctttgtaacctgagc

SEQ ID NO: 174423 - DNA, 20 bp, Artificial Sequence
  Synthetic oligonucleotide; AAG chr2 60529543 60529562 60529546 -
tctttgtaacctgagctggt

SEQ ID NO: 174424 - DNA, 20 bp, Artificial Sequence
  Synthetic oligonucleotide; AAG chr2 60529539 60529558 60529542 -
tgtaacctgagctggtaaga

SEQ ID NO: 174425 - DNA, 20 bp, Artificial Sequence
  Synthetic oligonucleotide; AGG chr2 60529538 60529557 60529541 -
gtaacctgagctggtaagaa

SEQ ID NO: 174426 - DNA, 20 bp, Artificial Sequence
  Synthetic oligonucleotide; GGG chr2 60529537 60529556 60529540 -
taacctgagctggtaagaaa

SEQ ID NO: 174427 - DNA, 20 bp, Artificial Sequence
  Synthetic oligonucleotide; GAG chr2 60529535 60529554 60529538 -
acctgagctggtaagaaagg

SEQ ID NO: 174428 - DNA, 20 bp, Artificial Sequence
  Synthetic oligonucleotide; AGG chr2 60529534 60529553 60529537 -
cctgagctggtaagaaaggg

SEQ ID NO: 174429 - DNA, 20 bp, Artificial Sequence
  Synthetic oligonucleotide; GAG chr2 60529532 60529551 60529535 -
tgagctggtaagaaagggag

SEQ ID NO: 174430 - DNA, 20 bp, Artificial Sequence
  Synthetic oligonucleotide; AGG chr2 60529531 60529550 60529534 -
gagctggtaagaaagggagg

SEQ ID NO: 174431 - DNA, 20 bp, Artificial Sequence
  Synthetic oligonucleotide; GGG chr2 60529530 60529549 60529533 -
agctggtaagaaagggagga

SEQ ID NO: 174432 - DNA, 20 bp, Artificial Sequence
  Synthetic oligonucleotide; CAG chr2 60529526 60529545 60529529 -
ggtaagaaagggaggaggga

SEQ ID NO: 174433 - DNA, 20 bp, Artificial Sequence
  Synthetic oligonucleotide; AAG chr2 60529522 60529541 60529525 -
agaaagggaggagggacaga

SEQ ID NO: 174434 - DNA, 20 bp, Artificial Sequence
  Synthetic oligonucleotide; GAG chr2 60529520 60529539 60529523 -
aaagggaggagggacagaaa

SEQ ID NO: 174435 - DNA, 20 bp, Artificial Sequence
  Synthetic oligonucleotide; AGG chr2 60529519 60529538 60529522 -
aagggaggagggacagaaag

SEQ ID NO: 174436 - DNA, 20 bp, Artificial Sequence
  Synthetic oligonucleotide; GGG chr2 60529518 60529537 60529521 -
agggaggagggacagaaaga

SEQ ID NO: 174437 - DNA, 20 bp, Artificial Sequence
  Synthetic oligonucleotide; GGG chr2 60529517 60529536 60529520 -
gggaggagggacagaaagag

SEQ ID NO: 174438 - DNA, 20 bp, Artificial Sequence
  Synthetic oligonucleotide; TGG chr2 60529447 60529466 60529450 -
tttgattacacgaaataaaa

SEQ ID NO: 174439 - DNA, 20 bp, Artificial Sequence
  Synthetic oligonucleotide; TAG chr2 60529442 60529461 60529445 -
ttacacgaaataaaatggtt

SEQ ID NO: 174440 - DNA, 20 bp, Artificial Sequence
  Synthetic oligonucleotide; AGG chr2 60529441 60529460 60529444 -
tacacgaaataaaatggttt

SEQ ID NO: 174441 - DNA, 20 bp, Artificial Sequence
  Synthetic oligonucleotide; GAG chr2 60529436 60529455 60529439 -
gaaataaaatggtttaggct

SEQ ID NO: 174442 - DNA, 20 bp, Artificial Sequence
  Synthetic oligonucleotide; AGG chr2 60529435 60529454 60529438 -
aaataaaatggtttaggctg

SEQ ID NO: 174443 - DNA, 20 bp, Artificial Sequence
  Synthetic oligonucleotide; GGG chr2 60529434 60529453 60529437 -
aataaaatggtttaggctga

SEQ ID NO: 174444 - DNA, 20 bp, Artificial Sequence
  Synthetic oligonucleotide; AAG chr2 60529429 60529448 60529432 -
aatggtttaggctgagggta

SEQ ID NO: 174445 - DNA, 20 bp, Artificial Sequence
  Synthetic oligonucleotide; AAG chr2 60529426 60529445 60529429 -
ggtttaggctgagggtaaag

SEQ ID NO: 174446 - DNA, 20 bp, Artificial Sequence
  Synthetic oligonucleotide; TAG chr2 60529411 60529430 60529414 -
taaagaagtaataccatttc

SEQ ID NO: 174447 - DNA, 20 bp, Artificial Sequence
  Synthetic oligonucleotide; TGG chr2 60529397 60529416 60529400 -
catttctagttgtgcaacct

SEQ ID NO: 174448 - DNA, 20 bp, Artificial Sequence
  Synthetic oligonucleotide; GGG chr2 60529396 60529415 60529399 -
atttctagttgtgcaacctt

SEQ ID NO: 174449 - DNA, 20 bp, Artificial Sequence
  Synthetic oligonucleotide; CAG chr2 60529393 60529412 60529396 -
tctagttgtgcaaccttggg

SEQ ID NO: 174450 - DNA, 20 bp, Artificial Sequence
  Synthetic oligonucleotide; AAG chr2 60529378 60529397 60529381 -
ttgggcagatttcattccct

SEQ ID NO: 174451 - DNA, 20 bp, Artificial Sequence
  Synthetic oligonucleotide; AAG chr2 60529354 60529373 60529357 -
ctccgcttcctcaatctgta

SEQ ID NO: 174452 - DNA, 20 bp, Artificial Sequence
  Synthetic oligonucleotide; TGG chr2 60529351 60529370 60529354 -
cgcttcctcaatctgtaaag

SEQ ID NO: 174453 - DNA, 20 bp, Artificial Sequence
  Synthetic oligonucleotide; GGG chr2 60529350 60529369 60529353 -
gcttcctcaatctgtaaagt

SEQ ID NO: 174454 - DNA, 20 bp, Artificial Sequence
  Synthetic oligonucleotide; GGG chr2 60529349 60529368 60529352 -
cttcctcaatctgtaaagtg

SEQ ID NO: 174455 - DNA, 20 bp, Artificial Sequence
  Synthetic oligonucleotide; GAG chr2 60529347 60529366 60529350 -
tcctcaatctgtaaagtggg

SEQ ID NO: 174456 - DNA, 20 bp, Artificial Sequence
  Synthetic oligonucleotide; CGG chr2 60529339 60529358 60529342 -
ctgtaaagtggggagaatca

SEQ ID NO: 174457 - DNA, 20 bp, Artificial Sequence
  Synthetic oligonucleotide; GGG chr2 60529338 60529357 60529341 -
tgtaaagtggggagaatcac

SEQ ID NO: 174458 - DNA, 20 bp, Artificial Sequence
  Synthetic oligonucleotide; GGG chr2 60529337 60529356 60529340 -
gtaaagtggggagaatcacg

SEQ ID NO: 174459 - DNA, 20 bp, Artificial Sequence
  Synthetic oligonucleotide; TAG chr2 60529325 60529344 60529328 -
gaatcacggggcttgcctca

SEQ ID NO: 174460 - DNA, 20 bp, Artificial Sequence
  Synthetic oligonucleotide; AGG chr2 60529324 60529343 60529327 -
aatcacggggcttgcctcat

SEQ ID NO: 174461 - DNA, 20 bp, Artificial Sequence
  Synthetic oligonucleotide; GGG chr2 60529323 60529342 60529326 -
atcacggggcttgcctcata

SEQ ID NO: 174462 - DNA, 20 bp, Artificial Sequence
  Synthetic oligonucleotide; GAG chr2 60529315 60529334 60529318 -
gcttgcctcatagggccttt

SEQ ID NO: 174463 - DNA, 20 bp, Artificial Sequence
  Synthetic oligonucleotide; GAG chr2 60529304 60529323 60529307 -
agggcctttgagcatcctat

SEQ ID NO: 174464 - DNA, 20 bp, Artificial Sequence
  Synthetic oligonucleotide; GAG chr2 60529302 60529321 60529305 -
ggcctttgagcatcctatga

SEQ ID NO: 174465 - DNA, 20 bp, Artificial Sequence
  Synthetic oligonucleotide; TGG chr2 60529295 60529314 60529298 -
gagcatcctatgagagcatg

SEQ ID NO: 174466 - DNA, 20 bp, Artificial Sequence
  Synthetic oligonucleotide; GGG chr2 60529294 60529313 60529297 -
agcatcctatgagagcatgt

SEQ ID NO: 174467 - DNA, 20 bp, Artificial Sequence
  Synthetic oligonucleotide; GGG chr2 60529293 60529312 60529296 -
gcatcctatgagagcatgtg

SEQ ID NO: 174468 - DNA, 20 bp, Artificial Sequence
  Synthetic oligonucleotide; GGG chr2 60529292 60529311 60529295 -
catcctatgagagcatgtgg

SEQ ID NO: 174469 - DNA, 20 bp, Artificial Sequence
  Synthetic oligonucleotide; TGG chr2 60529286 60529305 60529289 -
atgagagcatgtgggggcgc

SEQ ID NO: 174470 - DNA, 20 bp, Artificial Sequence
  Synthetic oligonucleotide; GGG chr2 60529285 60529304 60529288 -
tgagagcatgtgggggcgct

SEQ ID NO: 174471 - DNA, 20 bp, Artificial Sequence
  Synthetic oligonucleotide; CAG chr2 60529280 60529299 60529283 -
gcatgtgggggcgctgggct

SEQ ID NO: 174472 - DNA, 20 bp, Artificial Sequence
  Synthetic oligonucleotide; TGG chr2 60529274 60529293 60529277 -
gggggcgctgggctcagtgc

SEQ ID NO: 174473 - DNA, 20 bp, Artificial Sequence
  Synthetic oligonucleotide; GGG chr2 60529273 60529292 60529276 -
ggggcgctgggctcagtgct

SEQ ID NO: 174474 - DNA, 20 bp, Artificial Sequence
  Synthetic oligonucleotide; TGG chr2 60529266 60529285 60529269 -
tgggctcagtgctgggcaca

SEQ ID NO: 174475 - DNA, 20 bp, Artificial Sequence
  Synthetic oligonucleotide; AAG chr2 60529248 60529267 60529251 -
catggtaaaacatgtcacaa

SEQ ID NO: 174476 - DNA, 20 bp, Artificial Sequence
  Synthetic oligonucleotide; CGG chr2 60529232 60529251 60529235 -
acaaaagctcattactatta

SEQ ID NO: 174477 - DNA, 20 bp, Artificial Sequence
  Synthetic oligonucleotide; TGG chr2 60529219 60529238 60529222 -
actattacggttatgactca

SEQ ID NO: 174478 - DNA, 20 bp, Artificial Sequence
  Synthetic oligonucleotide; TGG chr2 60529214 60529233 60529217 -
tacggttatgactcatggct

SEQ ID NO: 174479 - DNA, 20 bp, Artificial Sequence
  Synthetic oligonucleotide; TGG chr2 60529198 60529217 60529201 -
ggcttggaactgtgtgctcc

SEQ ID NO: 174480 - DNA, 20 bp, Artificial Sequence
  Synthetic oligonucleotide; GGG chr2 60529197 60529216 60529200 -
gcttggaactgtgtgctcct

SEQ ID NO: 174481 - DNA, 20 bp, Artificial Sequence
  Synthetic oligonucleotide; GGG chr2 60529196 60529215 60529199 -
cttggaactgtgtgctcctg

SEQ ID NO: 174482 - DNA, 20 bp, Artificial Sequence
  Synthetic oligonucleotide; AAG chr2 60529188 60529207 60529191 -
tgtgtgctcctggggtctca

SEQ ID NO: 174483 - DNA, 20 bp, Artificial Sequence
  Synthetic oligonucleotide; TAG chr2 60529185 60529204 60529188 -
gtgctcctggggtctcaaag

SEQ ID NO: 174484 - DNA, 20 bp, Artificial Sequence
  Synthetic oligonucleotide; TGG chr2 60529171 60529190 60529174 -
tcaaagtagttcccccatta

SEQ ID NO: 174485 - DNA, 20 bp, Artificial Sequence
  Synthetic oligonucleotide; GGG chr2 60529170 60529189 60529173 -
caaagtagttcccccattat

SEQ ID NO: 174486 - DNA, 20 bp, Artificial Sequence
  Synthetic oligonucleotide; GGG chr2 60529169 60529188 60529172 -
aaagtagttcccccattatg

SEQ ID NO: 174487 - DNA, 20 bp, Artificial Sequence
  Synthetic oligonucleotide; GAG chr2 60529165 60529184 60529168 -
tagttcccccattatggggt

SEQ ID NO: 174488 - DNA, 20 bp, Artificial Sequence
  Synthetic oligonucleotide; CAG chr2 60529162 60529181 60529165 -
ttcccccattatggggtgag

SEQ ID NO: 174489 - DNA, 20 bp, Artificial Sequence
  Synthetic oligonucleotide; AGG chr2 60529161 60529180 60529164 -
tcccccattatggggtgagc

SEQ ID NO: 174490 - DNA, 20 bp, Artificial Sequence
  Synthetic oligonucleotide; TGG chr2 60529157 60529176 60529160 -
ccattatggggtgagcaggt

SEQ ID NO: 174491 - DNA, 20 bp, Artificial Sequence
  Synthetic oligonucleotide; GGG chr2 60529156 60529175 60529159 -
cattatggggtgagcaggtt

SEQ ID NO: 174492 - DNA, 20 bp, Artificial Sequence
  Synthetic oligonucleotide; GAG chr2 60529151 60529170 60529154 -
tggggtgagcaggttgggat

SEQ ID NO: 174493 - DNA, 20 bp, Artificial Sequence
  Synthetic oligonucleotide; GAG chr2 60529149 60529168 60529152 -
gggtgagcaggttgggatga

SEQ ID NO: 174494 - DNA, 20 bp, Artificial Sequence
  Synthetic oligonucleotide; AAG chr2 60529146 60529165 60529149 -
tgagcaggttgggatgagag

SEQ ID NO: 174495 - DNA, 20 bp, Artificial Sequence
  Synthetic oligonucleotide; GAG chr2 60529144 60529163 60529147 -
agcaggttgggatgagagaa

SEQ ID NO: 174496 - DNA, 20 bp, Artificial Sequence
  Synthetic oligonucleotide; CAG chr2 60529141 60529160 60529144 -
aggttgggatgagagaagag

SEQ ID NO: 174497 - DNA, 20 bp, Artificial Sequence
  Synthetic oligonucleotide; AGG chr2 60529140 60529159 60529143 -
ggttgggatgagagaagagc

SEQ ID NO: 174498 - DNA, 20 bp, Artificial Sequence
  Synthetic oligonucleotide; GGG chr2 60529139 60529158 60529142 -
gttgggatgagagaagagca

SEQ ID NO: 174499 - DNA, 20 bp, Artificial Sequence
  Synthetic oligonucleotide; CAG chr2 60529136 60529155 60529139 -
gggatgagagaagagcaggg

SEQ ID NO: 174500 - DNA, 20 bp, Artificial Sequence
  Synthetic oligonucleotide; AGG chr2 60529135 60529154 60529138 -
ggatgagagaagagcagggc

SEQ ID NO: 174501 - DNA, 20 bp, Artificial Sequence
  Synthetic oligonucleotide; TGG chr2 60529132 60529151 60529135 -
tgagagaagagcagggcagg

SEQ ID NO: 174502 - DNA, 20 bp, Artificial Sequence
  Synthetic oligonucleotide; GGG chr2 60529131 60529150 60529134 -
gagagaagagcagggcaggt

SEQ ID NO: 174503 - DNA, 20 bp, Artificial Sequence
  Synthetic oligonucleotide; GGG chr2 60529130 60529149 60529133 -
agagaagagcagggcaggtg

SEQ ID NO: 174504 - DNA, 20 bp, Artificial Sequence
  Synthetic oligonucleotide; GGG chr2 60529129 60529148 60529132 -
gagaagagcagggcaggtgg

SEQ ID NO: 174505 - DNA, 20 bp, Artificial Sequence
  Synthetic oligonucleotide; AAG chr2 60529122 60529141 60529125 -
gcagggcaggtgggggtcta

SEQ ID NO: 174506 - DNA, 20 bp, Artificial Sequence
  Synthetic oligonucleotide; GAG chr2 60529120 60529139 60529123 -
agggcaggtgggggtctaaa

SEQ ID NO: 174507 - DNA, 20 bp, Artificial Sequence
  Synthetic oligonucleotide; CAG chr2 60529115 60529134 60529118 -
aggtgggggtctaaagagct

SEQ ID NO: 174508 - DNA, 20 bp, Artificial Sequence
  Synthetic oligonucleotide; AGG chr2 60529114 60529133 60529117 -
ggtgggggtctaaagagctc

SEQ ID NO: 174509 - DNA, 20 bp, Artificial Sequence
  Synthetic oligonucleotide; GGG chr2 60529113 60529132 60529116 -
gtgggggtctaaagagctca

SEQ ID NO: 174510 - DNA, 20 bp, Artificial Sequence
  Synthetic oligonucleotide; TGG chr2 60529096 60529115 60529099 -
tcagggtctcattatgtttc

SEQ ID NO: 174511 - DNA, 20 bp, Artificial Sequence
  Synthetic oligonucleotide; TGG chr2 60529093 60529112 60529096 -
gggtctcattatgtttctgg

SEQ ID NO: 174512 - DNA, 20 bp, Artificial Sequence
  Synthetic oligonucleotide; CAG chr2 60529090 60529109 60529093 -
tctcattatgtttctggtgg

SEQ ID NO: 174513 - DNA, 20 bp, Artificial Sequence
  Synthetic oligonucleotide; TGG chr2 60529079 60529098 60529082 -
ttctggtggcagctccctcg

SEQ ID NO: 174514 - DNA, 20 bp, Artificial Sequence
  Synthetic oligonucleotide; GGG chr2 60529078 60529097 60529081 -
tctggtggcagctccctcgt

SEQ ID NO: 174515 - DNA, 20 bp, Artificial Sequence
  Synthetic oligonucleotide; TGG chr2 60529075 60529094 60529078 -
ggtggcagctccctcgtggg

SEQ ID NO: 174516 - DNA, 20 bp, Artificial Sequence
  Synthetic oligonucleotide; GGG chr2 60529074 60529093 60529077 -
gtggcagctccctcgtgggt

SEQ ID NO: 174517 - DNA, 20 bp, Artificial Sequence
  Synthetic oligonucleotide; GAG chr2 60529072 60529091 60529075 -
ggcagctccctcgtgggtgg

SEQ ID NO: 174518 - DNA, 20 bp, Artificial Sequence
  Synthetic oligonucleotide; TAG chr2 60529056 60529075 60529059 -
gtgggagtcccctctcccca

SEQ ID NO: 174519 - DNA, 20 bp, Artificial Sequence
  Synthetic oligonucleotide; GAG chr2 60529037 60529056 60529040 -
atagacgtgtgttgccttac

SEQ ID NO: 174520 - DNA, 20 bp, Artificial Sequence
  Synthetic oligonucleotide; GAG chr2 60529035 60529054 60529038 -
agacgtgtgttgccttacga

SEQ ID NO: 174521 - DNA, 20 bp, Artificial Sequence
  Synthetic oligonucleotide; AGG chr2 60529034 60529053 60529037 -
gacgtgtgttgccttacgag

SEQ ID NO: 174522 - DNA, 20 bp, Artificial Sequence
  Synthetic oligonucleotide; TGG chr2 60529019 60529038 60529022 -
acgagaggcttgtgcctgcc

SEQ ID NO: 174523 - DNA, 20 bp, Artificial Sequence
  Synthetic oligonucleotide; GGG chr2 60529018 60529037 60529021 -
cgagaggcttgtgcctgcct

SEQ ID NO: 174524 - DNA, 20 bp, Artificial Sequence
  Synthetic oligonucleotide; CAG chr2 60529006 60529025 60529009 -
gcctgcctgggtgtgtgaca

SEQ ID NO: 174525 - DNA, 20 bp, Artificial Sequence
  Synthetic oligonucleotide; TGG chr2 60528997 60529016 60529000 -
ggtgtgtgacacagttactc

SEQ ID NO: 174526 - DNA, 20 bp, Artificial Sequence
  Synthetic oligonucleotide; GGG chr2 60528996 60529015 60528999 -
gtgtgtgacacagttactct

SEQ ID NO: 174527 - DNA, 20 bp, Artificial Sequence
  Synthetic oligonucleotide; CAG chr2 60528991 60529010 60528994 -
tgacacagttactctgggtt

SEQ ID NO: 174528 - DNA, 20 bp, Artificial Sequence
  Synthetic oligonucleotide; TAG chr2 60528972 60528991 60528975 -
tcagatttctatgttactgc

SEQ ID NO: 174529 - DNA, 20 bp, Artificial Sequence
  Synthetic oligonucleotide; TGG chr2 60528968 60528987 60528971 -
atttctatgttactgctagc

SEQ ID NO: 174530 - DNA, 20 bp, Artificial Sequence
  Synthetic oligonucleotide; TGG chr2 60528964 60528983 60528967 -
ctatgttactgctagctggt

SEQ ID NO: 174531 - DNA, 20 bp, Artificial Sequence
  Synthetic oligonucleotide; GGG chr2 60528963 60528982 60528966 -
tatgttactgctagctggtt

SEQ ID NO: 174532 - DNA, 20 bp, Artificial Sequence
  Synthetic oligonucleotide; GAG chr2 60528961 60528980 60528964 -
tgttactgctagctggttgg

SEQ ID NO: 174533 - DNA, 20 bp, Artificial Sequence
  Synthetic oligonucleotide; GAG chr2 60528959 60528978 60528962 -
ttactgctagctggttggga

SEQ ID NO: 174534 - DNA, 20 bp, Artificial Sequence
  Synthetic oligonucleotide; GAG chr2 60528953 60528972 60528956 -
ctagctggttgggagagtct

SEQ ID NO: 174535 - DNA, 20 bp, Artificial Sequence
  Synthetic oligonucleotide; AGG chr2 60528952 60528971 60528955 -
tagctggttgggagagtctg

SEQ ID NO: 174536 - DNA, 20 bp, Artificial Sequence
  Synthetic oligonucleotide; GGG chr2 60528951 60528970 60528954 -
agctggttgggagagtctga

SEQ ID NO: 174537 - DNA, 20 bp, Artificial Sequence
  Synthetic oligonucleotide; TGG chr2 60528925 60528944 60528928 -
catttcacctctctgtgaaa

SEQ ID NO: 174538 - DNA, 20 bp, Artificial Sequence
  Synthetic oligonucleotide; GAG chr2 60528923 60528942 60528926 -
tttcacctctctgtgaaatg

SEQ ID NO: 174539 - DNA, 20 bp, Artificial Sequence
  Synthetic oligonucleotide; AAG chr2 60528913 60528932 60528916 -
ctgtgaaatggagataactc

SEQ ID NO: 174540 - DNA, 20 bp, Artificial Sequence
  Synthetic oligonucleotide; AGG chr2 60528912 60528931 60528915 -
tgtgaaatggagataactca

SEQ ID NO: 174541 - DNA, 20 bp, Artificial Sequence
  Synthetic oligonucleotide; TAG chr2 60528897 60528916 60528900 -
actcaaggtcccttacctca

SEQ ID NO: 174542 - DNA, 20 bp, Artificial Sequence
  Synthetic oligonucleotide; GAG chr2 60528895 60528914 60528898 -
tcaaggtcccttacctcata

SEQ ID NO: 174543 - DNA, 20 bp, Artificial Sequence
  Synthetic oligonucleotide; GAG chr2 60528885 60528904 60528888 -
ttacctcatagagtccatgt

SEQ ID NO: 174544 - DNA, 20 bp, Artificial Sequence
  Synthetic oligonucleotide; AAG chr2 60528882 60528901 60528885 -
cctcatagagtccatgtgag

SEQ ID NO: 174545 - DNA, 20 bp, Artificial Sequence
  Synthetic oligonucleotide; GAG chr2 60528874 60528893 60528877 -
agtccatgtgagaagtaaat

SEQ ID NO: 174546 - DNA, 20 bp, Artificial Sequence
  Synthetic oligonucleotide; AGG chr2 60528873 60528892 60528876 -
gtccatgtgagaagtaaatg

SEQ ID NO: 174547 - DNA, 20 bp, Artificial Sequence
  Synthetic oligonucleotide; GGG chr2 60528872 60528891 60528875 -
tccatgtgagaagtaaatga

SEQ ID NO: 174548 - DNA, 20 bp, Artificial Sequence
  Synthetic oligonucleotide; AAG chr2 60528868 60528887 60528871 -
tgtgagaagtaaatgaggga

SEQ ID NO: 174549 - DNA, 20 bp, Artificial Sequence
  Synthetic oligonucleotide; CAG chr2 60528863 60528882 60528866 -
gaagtaaatgagggaaagca

SEQ ID NO: 174550 - DNA, 20 bp, Artificial Sequence
  Synthetic oligonucleotide; CGG chr2 60528847 60528866 60528850 -
agcacagacattactcgctc

SEQ ID NO: 174551 - DNA, 20 bp, Artificial Sequence
  Synthetic oligonucleotide; GGG chr2 60528846 60528865 60528849 -
gcacagacattactcgctcc

SEQ ID NO: 174552 - DNA, 20 bp, Artificial Sequence
  Synthetic oligonucleotide; GGG chr2 60528845 60528864 60528848 -
cacagacattactcgctccg

SEQ ID NO: 174553 - DNA, 20 bp, Artificial Sequence
  Synthetic oligonucleotide; GGG chr2 60528844 60528863 60528847 -
acagacattactcgctccgg

SEQ ID NO: 174554 - DNA, 20 bp, Artificial Sequence
  Synthetic oligonucleotide; CAG chr2 60528832 60528851 60528835 -
cgctccgggggctgcacctc

SEQ ID NO: 174555 - DNA, 20 bp, Artificial Sequence
  Synthetic oligonucleotide; CGG chr2 60528768 60528787 60528771 -
attccatcccacaacaacct

SEQ ID NO: 174556 - DNA, 20 bp, Artificial Sequence
  Synthetic oligonucleotide; AAG chr2 60528764 60528783 60528767 -
catcccacaacaacctcgga

SEQ ID NO: 174557 - DNA, 20 bp, Artificial Sequence
  Synthetic oligonucleotide; AGG chr2 60528763 60528782 60528766 -
atcccacaacaacctcggaa

SEQ ID NO: 174558 - DNA, 20 bp, Artificial Sequence
  Synthetic oligonucleotide; TAG chr2 60528748 60528767 60528751 -
cggaaaggaaacactcccat

SEQ ID NO: 174559 - DNA, 20 bp, Artificial Sequence
  Synthetic oligonucleotide; TGG chr2 60528738 60528757 60528741 -
acactcccattagcctcatt

SEQ ID NO: 174560 - DNA, 20 bp, Artificial Sequence
  Synthetic oligonucleotide; TAG chr2 60528735 60528754 60528738 -
ctcccattagcctcatttgg

SEQ ID NO: 174561 - DNA, 20 bp, Artificial Sequence
  Synthetic oligonucleotide; GAG chr2 60528733 60528752 60528736 -
cccattagcctcatttggta

SEQ ID NO: 174562 - DNA, 20 bp, Artificial Sequence
  Synthetic oligonucleotide; AGG chr2 60528732 60528751 60528735 -
ccattagcctcatttggtag

SEQ ID NO: 174563 - DNA, 20 bp, Artificial Sequence
  Synthetic oligonucleotide; GAG chr2 60528730 60528749 60528733 -
attagcctcatttggtagag

SEQ ID NO: 174564 - DNA, 20 bp, Artificial Sequence
  Synthetic oligonucleotide; AGG chr2 60528729 60528748 60528732 -
ttagcctcatttggtagagg

SEQ ID NO: 174565 - DNA, 20 bp, Artificial Sequence
  Synthetic oligonucleotide; TGG chr2 60528722 60528741 60528725 -
catttggtagaggaggaaat

SEQ ID NO: 174566 - DNA, 20 bp, Artificial Sequence
  Synthetic oligonucleotide; GGG chr2 60528721 60528740 60528724 -
atttggtagaggaggaaatt

SEQ ID NO: 174567 - DNA, 20 bp, Artificial Sequence
  Synthetic oligonucleotide; GGG chr2 60528720 60528739 60528723 -
tttggtagaggaggaaattg

SEQ ID NO: 174568 - DNA, 20 bp, Artificial Sequence
  Synthetic oligonucleotide; AAG chr2 60528711 60528730 60528714 -
ggaggaaattggggttcatc

SEQ ID NO: 174569 - DNA, 20 bp, Artificial Sequence
  Synthetic oligonucleotide; AGG chr2 60528710 60528729 60528713 -
gaggaaattggggttcatca

SEQ ID NO: 174570 - DNA, 20 bp, Artificial Sequence
  Synthetic oligonucleotide; GGG chr2 60528709 60528728 60528712 -
aggaaattggggttcatcaa

SEQ ID NO: 174571 - DNA, 20 bp, Artificial Sequence
  Synthetic oligonucleotide; GAG chr2 60528691 60528710 60528694 -
aagggttaaatgacttccct

SEQ ID NO: 174572 - DNA, 20 bp, Artificial Sequence
  Synthetic oligonucleotide; AGG chr2 60528690 60528709 60528693 -
agggttaaatgacttccctg

SEQ ID NO: 174573 - DNA, 20 bp, Artificial Sequence
  Synthetic oligonucleotide; GGG chr2 60528689 60528708 60528692 -
gggttaaatgacttccctga

SEQ ID NO: 174574 - DNA, 20 bp, Artificial Sequence
  Synthetic oligonucleotide; CAG chr2 60528682 60528701 60528685 -
atgacttccctgagggtcca

SEQ ID NO: 174575 - DNA, 20 bp, Artificial Sequence
  Synthetic oligonucleotide; TGG chr2 60528666 60528685 60528669 -
tccacagttgttcaatcctt

SEQ ID NO: 174576 - DNA, 20 bp, Artificial Sequence
  Synthetic oligonucleotide; CGG chr2 60528659 60528678 60528662 -
ttgttcaatcctttggcctg

SEQ ID NO: 174577 - DNA, 20 bp, Artificial Sequence
  Synthetic oligonucleotide; CAG chr2 60528634 60528653 60528637 -
gccaccctctgctacctctt

SEQ ID NO: 174578 - DNA, 20 bp, Artificial Sequence
  Synthetic oligonucleotide; CAG chr2 60528623 60528642 60528626 -
ctacctcttcagtacgtttg

SEQ ID NO: 174579 - DNA, 20 bp, Artificial Sequence
  Synthetic oligonucleotide; CAG chr2 60528613 60528632 60528616 -
agtacgtttgcagctttctt

SEQ ID NO: 174580 - DNA, 20 bp, Artificial Sequence
  Synthetic oligonucleotide; CGG chr2 60528610 60528629 60528613 -
acgtttgcagctttcttcag

SEQ ID NO: 174581 - DNA, 20 bp, Artificial Sequence
  Synthetic oligonucleotide; CAG chr2 60528604 60528623 60528607 -
gcagctttcttcagcggtgc

SEQ ID NO: 174582 - DNA, 20 bp, Artificial Sequence
  Synthetic oligonucleotide; AGG chr2 60528603 60528622 60528606 -
cagctttcttcagcggtgcc

SEQ ID NO: 174583 - DNA, 20 bp, Artificial Sequence
  Synthetic oligonucleotide; TGG chr2 60528593 60528612 60528596 -
cagcggtgccaggcaacaac

SEQ ID NO: 174584 - DNA, 20 bp, Artificial Sequence
  Synthetic oligonucleotide; GGG chr2 60528592 60528611 60528595 -
agcggtgccaggcaacaact

SEQ ID NO: 174585 - DNA, 20 bp, Artificial Sequence
  Synthetic oligonucleotide; CAG chr2 60528589 60528608 60528592 -
ggtgccaggcaacaactggg

SEQ ID NO: 174586 - DNA, 20 bp, Artificial Sequence
  Synthetic oligonucleotide; AGG chr2 60528588 60528607 60528591 -
gtgccaggcaacaactgggc

SEQ ID NO: 174587 - DNA, 20 bp, Artificial Sequence
  Synthetic oligonucleotide; AAG chr2 60528585 60528604 60528588 -
ccaggcaacaactgggcagg

SEQ ID NO: 174588 - DNA, 20 bp, Artificial Sequence
  Synthetic oligonucleotide; TGG chr2 60528579 60528598 60528582 -
aacaactgggcaggaagctc

SEQ ID NO: 174589 - DNA, 20 bp, Artificial Sequence
  Synthetic oligonucleotide; TGG chr2 60528573 60528592 60528576 -
tgggcaggaagctctggtgc

SEQ ID NO: 174590 - DNA, 20 bp, Artificial Sequence
  Synthetic oligonucleotide; CAG chr2 60528569 60528588 60528572 -
caggaagctctggtgctgga

SEQ ID NO: 174591 - DNA, 20 bp, Artificial Sequence
  Synthetic oligonucleotide; TGG chr2 60528554 60528573 60528557 -
ctggacagttgtccctccca

SEQ ID NO: 174592 - DNA, 20 bp, Artificial Sequence
  Synthetic oligonucleotide; GGG chr2 60528553 60528572 60528556 -
tggacagttgtccctcccat

SEQ ID NO: 174593 - DNA, 20 bp, Artificial Sequence
  Synthetic oligonucleotide; TGG chr2 60528545 60528564 60528548 -
tgtccctcccatgggttctg

SEQ ID NO: 174594 - DNA, 20 bp, Artificial Sequence
  Synthetic oligonucleotide; AAG chr2 60528540 60528559 60528543 -
ctcccatgggttctgtggtc

SEQ ID NO: 174595 - DNA, 20 bp, Artificial Sequence
  Synthetic oligonucleotide; TGG chr2 60528524 60528543 60528527 -
ggtcaagtttttcaatcttc

SEQ ID NO: 174596 - DNA, 20 bp, Artificial Sequence
  Synthetic oligonucleotide; GGG chr2 60528523 60528542 60528526 -
gtcaagtttttcaatcttct

SEQ ID NO: 174597 - DNA, 20 bp, Artificial Sequence
  Synthetic oligonucleotide; AAG chr2 60528519 60528538 60528522 -
agtttttcaatcttctggga

SEQ ID NO: 174598 - DNA, 20 bp, Artificial Sequence
  Synthetic oligonucleotide; GAG chr2 60528517 60528536 60528520 -
tttttcaatcttctgggaaa

SEQ ID NO: 174599 - DNA, 20 bp, Artificial Sequence
  Synthetic oligonucleotide; AAG chr2 60528514 60528533 60528517 -
ttcaatcttctgggaaagag

SEQ ID NO: 174600 - DNA, 20 bp, Artificial Sequence
  Synthetic oligonucleotide; CAG chr2 60528499 60528518 60528502 -
aagagaagaatgttcccctc

SEQ ID NO: 174601 - DNA, 20 bp, Artificial Sequence
  Synthetic oligonucleotide; TGG chr2 60528493 60528512 60528496 -
agaatgttcccctccagttc

SEQ ID NO: 174602 - DNA, 20 bp, Artificial Sequence
  Synthetic oligonucleotide; GGG chr2 60528492 60528511 60528495 -
gaatgttcccctccagttct

SEQ ID NO: 174603 - DNA, 20 bp, Artificial Sequence
  Synthetic oligonucleotide; AAG chr2 60528482 60528501 60528485 -
ctccagttctgggcatattg

SEQ ID NO: 174604 - DNA, 20 bp, Artificial Sequence
  Synthetic oligonucleotide; AGG chr2 60528481 60528500 60528484 -
tccagttctgggcatattga

SEQ ID NO: 174605 - DNA, 20 bp, Artificial Sequence
  Synthetic oligonucleotide; GAG chr2 60528479 60528498 60528482 -
cagttctgggcatattgaag

SEQ ID NO: 174606 - DNA, 20 bp, Artificial Sequence
  Synthetic oligonucleotide; CGG chr2 60528474 60528493 60528477 -
ctgggcatattgaaggagca

SEQ ID NO: 174607 - DNA, 20 bp, Artificial Sequence
  Synthetic oligonucleotide; GAG chr2 60528472 60528491 60528475 -
gggcatattgaaggagcacg

SEQ ID NO: 174608 - DNA, 20 bp, Artificial Sequence
  Synthetic oligonucleotide; TGG chr2 60528465 60528484 60528468 -
ttgaaggagcacggagctgt

SEQ ID NO: 174609 - DNA, 20 bp, Artificial Sequence
  Synthetic oligonucleotide; GGG chr2 60528464 60528483 60528467 -
tgaaggagcacggagctgtt

SEQ ID NO: 174610 - DNA, 20 bp, Artificial Sequence
  Synthetic oligonucleotide; AAG chr2 60528459 60528478 60528462 -
gagcacggagctgttgggaa

SEQ ID NO: 174611 - DNA, 20 bp, Artificial Sequence
  Synthetic oligonucleotide; AAG chr2 60528447 60528466 60528450 -
gttgggaaaagttgcaatgt

SEQ ID NO: 174612 - DNA, 20 bp, Artificial Sequence
  Synthetic oligonucleotide; AGG chr2 60528446 60528465 60528449 -
ttgggaaaagttgcaatgta

SEQ ID NO: 174613 - DNA, 20 bp, Artificial Sequence
  Synthetic oligonucleotide; AAG chr2 60528430 60528449 60528433 -
tgtaaggaatcctgctttgc

SEQ ID NO: 174614 - DNA, 20 bp, Artificial Sequence
  Synthetic oligonucleotide; TAG chr2 60528427 60528446 60528430 -
aaggaatcctgctttgcaag

SEQ ID NO: 174615 - DNA, 20 bp, Artificial Sequence
  Synthetic oligonucleotide; CAG chr2 60528407 60528426 60528410 -
tagtcatttccccatctgtc

SEQ ID NO: 174616 - DNA, 20 bp, Artificial Sequence
  Synthetic oligonucleotide; GAG chr2 60528401 60528420 60528404 -
tttccccatctgtccagaat

SEQ ID NO: 174617 - DNA, 20 bp, Artificial Sequence
  Synthetic oligonucleotide; AAG chr2 60528389 60528408 60528392 -
tccagaatgagcctgaaatc

SEQ ID NO: 174618 - DNA, 20 bp, Artificial Sequence
  Synthetic oligonucleotide; GAG chr2 60528385 60528404 60528388 -
gaatgagcctgaaatcaagt

SEQ ID NO: 174619 - DNA, 20 bp, Artificial Sequence
  Synthetic oligonucleotide; AGG chr2 60528384 60528403 60528387 -
aatgagcctgaaatcaagtg

SEQ ID NO: 174620 - DNA, 20 bp, Artificial Sequence
  Synthetic oligonucleotide; GGG chr2 60528383 60528402 60528386 -
atgagcctgaaatcaagtga

SEQ ID NO: 174621 - DNA, 20 bp, Artificial Sequence
  Synthetic oligonucleotide; GAG chr2 60528376 60528395 60528379 -
tgaaatcaagtgagggtcct

SEQ ID NO: 174622 - DNA, 20 bp, Artificial Sequence
  Synthetic oligonucleotide; CAG chr2 60528370 60528389 60528373 -
caagtgagggtcctgagaaa

SEQ ID NO: 174623 - DNA, 20 bp, Artificial Sequence
  Synthetic oligonucleotide; GAG chr2 60528368 60528387 60528371 -
agtgagggtcctgagaaaca

SEQ ID NO: 174624 - DNA, 20 bp, Artificial Sequence
  Synthetic oligonucleotide; AGG chr2 60528367 60528386 60528370 -
gtgagggtcctgagaaacag

SEQ ID NO: 174625 - DNA, 20 bp, Artificial Sequence
  Synthetic oligonucleotide; GGG chr2 60528366 60528385 60528369 -
tgagggtcctgagaaacaga

SEQ ID NO: 174626 - DNA, 20 bp, Artificial Sequence
  Synthetic oligonucleotide; GAG chr2 60528364 60528383 60528367 -
agggtcctgagaaacagagg

SEQ ID NO: 174627 - DNA, 20 bp, Artificial Sequence
  Synthetic oligonucleotide; AGG chr2 60528363 60528382 60528366 -
gggtcctgagaaacagaggg

SEQ ID NO: 174628 - DNA, 20 bp, Artificial Sequence
  Synthetic oligonucleotide; GAG chr2 60528361 60528380 60528364 -
gtcctgagaaacagagggag

SEQ ID NO: 174629 - DNA, 20 bp, Artificial Sequence
  Synthetic oligonucleotide; AGG chr2 60528360 60528379 60528363 -
tcctgagaaacagagggagg

SEQ ID NO: 174630 - DNA, 20 bp, Artificial Sequence
  Synthetic oligonucleotide; TGG chr2 60528341 60528360 60528344 -
gaggttttactgtttgtgtg

SEQ ID NO: 174631 - DNA, 20 bp, Artificial Sequence
  Synthetic oligonucleotide; TGG chr2 60528336 60528355 60528339 -
tttactgtttgtgtgtggct

SEQ ID NO: 174632 - DNA, 20 bp, Artificial Sequence
  Synthetic oligonucleotide; CAG chr2 60528332 60528351 60528335 -
ctgtttgtgtgtggcttggt

SEQ ID NO: 174633 - DNA, 20 bp, Artificial Sequence
  Synthetic oligonucleotide; AGG chr2 60528331 60528350 60528334 -
tgtttgtgtgtggcttggtc

SEQ ID NO: 174634 - DNA, 20 bp, Artificial Sequence
  Synthetic oligonucleotide; GAG chr2 60528329 60528348 60528332 -
tttgtgtgtggcttggtcag

SEQ ID NO: 174635 - DNA, 20 bp, Artificial Sequence
  Synthetic oligonucleotide; CAG chr2 60528322 60528341 60528325 -
gtggcttggtcaggagactg

SEQ ID NO: 174636 - DNA, 20 bp, Artificial Sequence
  Synthetic oligonucleotide; TGG chr2 60528319 60528338 60528322 -
gcttggtcaggagactgcag

SEQ ID NO: 174637 - DNA, 20 bp, Artificial Sequence
  Synthetic oligonucleotide; GGG chr2 60528318 60528337 60528321 -
cttggtcaggagactgcagt

SEQ ID NO: 174638 - DNA, 20 bp, Artificial Sequence
  Synthetic oligonucleotide; GAG chr2 60528309 60528328 60528312 -
gagactgcagtgggctgaat

SEQ ID NO: 174639 - DNA, 20 bp, Artificial Sequence
  Synthetic oligonucleotide; AAG chr2 60528301 60528320 60528304 -
agtgggctgaatgagaaact

SEQ ID NO: 174640 - DNA, 20 bp, Artificial Sequence
  Synthetic oligonucleotide; CGG chr2 60528296 60528315 60528299 -
gctgaatgagaaactaagct

SEQ ID NO: 174641 - DNA, 20 bp, Artificial Sequence
  Synthetic oligonucleotide; AAG chr2 60528287 60528306 60528290 -
gaaactaagctcggactttt

SEQ ID NO: 174642 - DNA, 20 bp, Artificial Sequence
  Synthetic oligonucleotide; AAG chr2 60528284 60528303 60528287 -
actaagctcggacttttaag

SEQ ID NO: 174643 - DNA, 20 bp, Artificial Sequence
  Synthetic oligonucleotide; TGG chr2 60528281 60528300 60528284 -
aagctcggacttttaagaag

SEQ ID NO: 174644 - DNA, 20 bp, Artificial Sequence
  Synthetic oligonucleotide; GAG chr2 60528277 60528296 60528280 -
tcggacttttaagaagtggt

SEQ ID NO: 174645 - DNA, 20 bp, Artificial Sequence
  Synthetic oligonucleotide; AGG chr2 60528276 60528295 60528279 -
cggacttttaagaagtggtg

SEQ ID NO: 174646 - DNA, 20 bp, Artificial Sequence
  Synthetic oligonucleotide; TGG chr2 60528271 60528290 60528274 -
ttttaagaagtggtgaggct

SEQ ID NO: 174647 - DNA, 20 bp, Artificial Sequence
  Synthetic oligonucleotide; CAG chr2 60528264 60528283 60528267 -
aagtggtgaggcttggcctg

SEQ ID NO: 174648 - DNA, 20 bp, Artificial Sequence
  Synthetic oligonucleotide; CAG chr2 60528261 60528280 60528264 -
tggtgaggcttggcctgcag

SEQ ID NO: 174649 - DNA, 20 bp, Artificial Sequence
  Synthetic oligonucleotide; TGG chr2 60528240 60528259 60528243 -
agttctgtgtgttgtctctg

SEQ ID NO: 174650 - DNA, 20 bp, Artificial Sequence
  Synthetic oligonucleotide; CGG chr2 60528226 60528245 60528229 -
tctctgtggcatttacttct

SEQ ID NO: 174651 - DNA, 20 bp, Artificial Sequence
  Synthetic oligonucleotide; AAG chr2 60528211 60528230 60528214 -
cttctcggatcgtaccttca

SEQ ID NO: 174652 - DNA, 20 bp, Artificial Sequence
  Synthetic oligonucleotide; AGG chr2 60528210 60528229 60528213 -
ttctcggatcgtaccttcaa

SEQ ID NO: 174653 - DNA, 20 bp, Artificial Sequence
  Synthetic oligonucleotide; TGG chr2 60528206 60528225 60528209 -
cggatcgtaccttcaaaggc

SEQ ID NO: 174654 - DNA, 20 bp, Artificial Sequence
  Synthetic oligonucleotide; GGG chr2 60528205 60528224 60528208 -
ggatcgtaccttcaaaggct

SEQ ID NO: 174655 - DNA, 20 bp, Artificial Sequence
  Synthetic oligonucleotide; GGG chr2 60528204 60528223 60528207 -
gatcgtaccttcaaaggctg

SEQ ID NO: 174656 - DNA, 20 bp, Artificial Sequence
  Synthetic oligonucleotide; GAG chr2 60528202 60528221 60528205 -
tcgtaccttcaaaggctggg

SEQ ID NO: 174657 - DNA, 20 bp, Artificial Sequence
  Synthetic oligonucleotide; CAG chr2 60528196 60528215 60528199 -
cttcaaaggctggggagaat

SEQ ID NO: 174658 - DNA, 20 bp, Artificial Sequence
  Synthetic oligonucleotide; CAG chr2 60528186 60528205 60528189 -
tggggagaatcagaattata

SEQ ID NO: 174659 - DNA, 20 bp, Artificial Sequence
  Synthetic oligonucleotide; AGG chr2 60528185 60528204 60528188 -
ggggagaatcagaattatac

SEQ ID NO: 174660 - DNA, 20 bp, Artificial Sequence
  Synthetic oligonucleotide; GGG chr2 60528184 60528203 60528187 -
gggagaatcagaattataca

SEQ ID NO: 174661 - DNA, 20 bp, Artificial Sequence
  Synthetic oligonucleotide; GAG chr2 60528182 60528201 60528185 -
gagaatcagaattatacagg

SEQ ID NO: 174662 - DNA, 20 bp, Artificial Sequence
  Synthetic oligonucleotide; AGG chr2 60528181 60528200 60528184 -
agaatcagaattatacaggg

SEQ ID NO: 174663 - DNA, 20 bp, Artificial Sequence
  Synthetic oligonucleotide; GGG chr2 60528180 60528199 60528183 -
gaatcagaattatacaggga

SEQ ID NO: 174664 - DNA, 20 bp, Artificial Sequence
  Synthetic oligonucleotide; GAG chr2 60528178 60528197 60528181 -
atcagaattatacagggagg

SEQ ID NO: 174665 - DNA, 20 bp, Artificial Sequence
  Synthetic oligonucleotide; GAG chr2 60528176 60528195 60528179 -
cagaattatacagggaggga

SEQ ID NO: 174666 - DNA, 20 bp, Artificial Sequence
  Synthetic oligonucleotide; GAG chr2 60528170 60528189 60528173 -
tatacagggagggagagact

SEQ ID NO: 174667 - DNA, 20 bp, Artificial Sequence
  Synthetic oligonucleotide; GAG chr2 60528164 60528183 60528167 -
gggagggagagactgagtgt

SEQ ID NO: 174668 - DNA, 20 bp, Artificial Sequence
  Synthetic oligonucleotide; GAG chr2 60528160 60528179 60528163 -
gggagagactgagtgtgagt

SEQ ID NO: 174669 - DNA, 20 bp, Artificial Sequence
  Synthetic oligonucleotide; TGG chr2 60528151 60528170 60528154 -
tgagtgtgagtgagtgtgcg

SEQ ID NO: 174670 - DNA, 20 bp, Artificial Sequence
  Synthetic oligonucleotide; CAG chr2 60528148 60528167 60528151 -
gtgtgagtgagtgtgcgtgg

SEQ ID NO: 174671 - DNA, 20 bp, Artificial Sequence
  Synthetic oligonucleotide; TGG chr2 60528145 60528164 60528148 -
tgagtgagtgtgcgtggcag

SEQ ID NO: 174672 - DNA, 20 bp, Artificial Sequence
  Synthetic oligonucleotide; TAG chr2 60528135 60528154 60528138 -
tgcgtggcagtggtgtttct

SEQ ID NO: 174673 - DNA, 20 bp, Artificial Sequence
  Synthetic oligonucleotide; AGG chr2 60528134 60528153 60528137 -
gcgtggcagtggtgtttctt

SEQ ID NO: 174674 - DNA, 20 bp, Artificial Sequence
  Synthetic oligonucleotide; TGG chr2 60528127 60528146 60528130 -
agtggtgtttcttaggacga

SEQ ID NO: 174675 - DNA, 20 bp, Artificial Sequence
  Synthetic oligonucleotide; GGG chr2 60528126 60528145 60528129 -
gtggtgtttcttaggacgat

SEQ ID NO: 174676 - DNA, 20 bp, Artificial Sequence
  Synthetic oligonucleotide; TGG chr2 60528120 60528139 60528123 -
tttcttaggacgatgggttc

SEQ ID NO: 174677 - DNA, 20 bp, Artificial Sequence
  Synthetic oligonucleotide; GGG chr2 60528119 60528138 60528122 -
ttcttaggacgatgggttct

SEQ ID NO: 174678 - DNA, 20 bp, Artificial Sequence
  Synthetic oligonucleotide; GGG chr2 60528118 60528137 60528121 -
tcttaggacgatgggttctg

SEQ ID NO: 174679 - DNA, 20 bp, Artificial Sequence
  Synthetic oligonucleotide; GGG chr2 60528117 60528136 60528120 -
cttaggacgatgggttctgg

SEQ ID NO: 174680 - DNA, 20 bp, Artificial Sequence
  Synthetic oligonucleotide; GGG chr2 60528116 60528135 60528119 -
ttaggacgatgggttctggg

SEQ ID NO: 174681 - DNA, 20 bp, Artificial Sequence
  Synthetic oligonucleotide; GAG chr2 60528099 60528118 60528102 -
ggggggtcataatctgcttc

SEQ ID NO: 174682 - DNA, 20 bp, Artificial Sequence
  Synthetic oligonucleotide; AGG chr2 60528098 60528117 60528101 -
gggggtcataatctgcttcg

SEQ ID NO: 174683 - DNA, 20 bp, Artificial Sequence
  Synthetic oligonucleotide; GAG chr2 60528096 60528115 60528099 -
gggtcataatctgcttcgag

SEQ ID NO: 174684 - DNA, 20 bp, Artificial Sequence
  Synthetic oligonucleotide; AGG chr2 60528095 60528114 60528098 -
ggtcataatctgcttcgagg

SEQ ID NO: 174685 - DNA, 20 bp, Artificial Sequence
  Synthetic oligonucleotide; TGG chr2 60528082 60528101 60528085 -
ttcgaggaggttttcatttc

SEQ ID NO: 174686 - DNA, 20 bp, Artificial Sequence
  Synthetic oligonucleotide; AAG chr2 60528073 60528092 60528076 -
gttttcatttctggctgaac

SEQ ID NO: 174687 - DNA, 20 bp, Artificial Sequence
  Synthetic oligonucleotide; AGG chr2 60528072 60528091 60528075 -
ttttcatttctggctgaaca

SEQ ID NO: 174688 - DNA, 20 bp, Artificial Sequence
  Synthetic oligonucleotide; TGG chr2 60528066 60528085 60528069 -
tttctggctgaacaaggctg

SEQ ID NO: 174689 - DNA, 20 bp, Artificial Sequence
  Synthetic oligonucleotide; AAG chr2 60528062 60528081 60528065 -
tggctgaacaaggctgtggt

SEQ ID NO: 174690 - DNA, 20 bp, Artificial Sequence
  Synthetic oligonucleotide; AGG chr2 60528061 60528080 60528064 -
ggctgaacaaggctgtggta

SEQ ID NO: 174691 - DNA, 20 bp, Artificial Sequence
  Synthetic oligonucleotide; AAG chr2 60528057 60528076 60528060 -
gaacaaggctgtggtaaggc

SEQ ID NO: 174692 - DNA, 20 bp, Artificial Sequence
  Synthetic oligonucleotide; CGG chr2 60528052 60528071 60528055 -
aggctgtggtaaggcaagtc

SEQ ID NO: 174693 - DNA, 20 bp, Artificial Sequence
  Synthetic oligonucleotide; AAG chr2 60528049 60528068 60528052 -
ctgtggtaaggcaagtccgg

SEQ ID NO: 174694 - DNA, 20 bp, Artificial Sequence
  Synthetic oligonucleotide; AGG chr2 60528048 60528067 60528051 -
tgtggtaaggcaagtccgga

SEQ ID NO: 174695 - DNA, 20 bp, Artificial Sequence
  Synthetic oligonucleotide; TGG chr2 60528040 60528059 60528043 -
ggcaagtccggaaggcatgc

SEQ ID NO: 174696 - DNA, 20 bp, Artificial Sequence
  Synthetic oligonucleotide; GAG chr2 60528031 60528050 60528034 -
ggaaggcatgctggaaactt

SEQ ID NO: 174697 - DNA, 20 bp, Artificial Sequence
  Synthetic oligonucleotide; AGG chr2 60528030 60528049 60528033 -
gaaggcatgctggaaacttg

SEQ ID NO: 174698 - DNA, 20 bp, Artificial Sequence
  Synthetic oligonucleotide; GGG chr2 60528029 60528048 60528032 -
aaggcatgctggaaacttga

SEQ ID NO: 174699 - DNA, 20 bp, Artificial Sequence
  Synthetic oligonucleotide; AAG chr2 60528026 60528045 60528029 -
gcatgctggaaacttgaggg

SEQ ID NO: 174700 - DNA, 20 bp, Artificial Sequence
  Synthetic oligonucleotide; TGG chr2 60528016 60528035 60528019 -
aacttgagggaagttttgaa

SEQ ID NO: 174701 - DNA, 20 bp, Artificial Sequence
  Synthetic oligonucleotide; CAG chr2 60528007 60528026 60528010 -
gaagttttgaatggaaactg

SEQ ID NO: 174702 - DNA, 20 bp, Artificial Sequence
  Synthetic oligonucleotide; CAG chr2 60528000 60528019 60528003 -
tgaatggaaactgcagtcaa

SEQ ID NO: 174703 - DNA, 20 bp, Artificial Sequence
  Synthetic oligonucleotide; TGG chr2 60527979 60527998 60527982 -
agctccatatgatccgcatg

SEQ ID NO: 174704 - DNA, 20 bp, Artificial Sequence
  Synthetic oligonucleotide; CAG chr2 60527970 60527989 60527973 -
tgatccgcatgtggcttccc

SEQ ID NO: 174705 - DNA, 20 bp, Artificial Sequence
  Synthetic oligonucleotide; GAG chr2 60527968 60527987 60527971 -
atccgcatgtggcttcccca

SEQ ID NO: 174706 - DNA, 20 bp, Artificial Sequence
  Synthetic oligonucleotide; AGG chr2 60527967 60527986 60527970 -
tccgcatgtggcttccccag

SEQ ID NO: 174707 - DNA, 20 bp, Artificial Sequence
  Synthetic oligonucleotide; AAG chr2 60527963 60527982 60527966 -
catgtggcttccccagaggc

SEQ ID NO: 174708 - DNA, 20 bp, Artificial Sequence
  Synthetic oligonucleotide; CAG chr2 60527956 60527975 60527959 -
cttccccagaggcaagtttt

SEQ ID NO: 174709 - DNA, 20 bp, Artificial Sequence
  Synthetic oligonucleotide; TGG chr2 60527948 60527967 60527951 -
gaggcaagttttcagctgcg

SEQ ID NO: 174710 - DNA, 20 bp, Artificial Sequence
  Synthetic oligonucleotide; TGG chr2 60527945 60527964 60527948 -
gcaagttttcagctgcgtgg

SEQ ID NO: 174711 - DNA, 20 bp, Artificial Sequence
  Synthetic oligonucleotide; CAG chr2 60527935 60527954 60527938 -
agctgcgtggtggcctctcc

SEQ ID NO: 174712 - DNA, 20 bp, Artificial Sequence
  Synthetic oligonucleotide; CAG chr2 60527924 60527943 60527927 -
ggcctctcccagtcactcca

SEQ ID NO: 174713 - DNA, 20 bp, Artificial Sequence
  Synthetic oligonucleotide; AGG chr2 60527923 60527942 60527926 -
gcctctcccagtcactccac

SEQ ID NO: 174714 - DNA, 20 bp, Artificial Sequence
  Synthetic oligonucleotide; AAG chr2 60527893 60527912 60527896 -
gacgctattaatatttgctg

SEQ ID NO: 174715 - DNA, 20 bp, Artificial Sequence
  Synthetic oligonucleotide; AAG chr2 60527889 60527908 60527892 -
ctattaatatttgctgaagc

SEQ ID NO: 174716 - DNA, 20 bp, Artificial Sequence
  Synthetic oligonucleotide; GAG chr2 60527882 60527901 60527885 -
tatttgctgaagcaagacct

SEQ ID NO: 174717 - DNA, 20 bp, Artificial Sequence
  Synthetic oligonucleotide; AGG chr2 60527881 60527900 60527884 -
atttgctgaagcaagacctg

SEQ ID NO: 174718 - DNA, 20 bp, Artificial Sequence
  Synthetic oligonucleotide; CAG chr2 60527871 60527890 60527874 -
gcaagacctgaggttcgttg

SEQ ID NO: 174719 - DNA, 20 bp, Artificial Sequence
  Synthetic oligonucleotide; TGG chr2 60527867 60527886 60527870 -
gacctgaggttcgttgcaga

SEQ ID NO: 174720 - DNA, 20 bp, Artificial Sequence
  Synthetic oligonucleotide; TGG chr2 60527802 60527821 60527805 -
tattctccatcctttcaaat

SEQ ID NO: 174721 - DNA, 20 bp, Artificial Sequence
  Synthetic oligonucleotide; CAG chr2 60527798 60527817 60527801 -
ctccatcctttcaaattggc

SEQ ID NO: 174722 - DNA, 20 bp, Artificial Sequence
  Synthetic oligonucleotide; AGG chr2 60527797 60527816 60527800 -
tccatcctttcaaattggcc

SEQ ID NO: 174723 - DNA, 20 bp, Artificial Sequence
  Synthetic oligonucleotide; TAG chr2 60527788 60527807 60527791 -
tcaaattggccaggctaaca

SEQ ID NO: 174724 - DNA, 20 bp, Artificial Sequence
  Synthetic oligonucleotide; GAG chr2 60527776 60527795 60527779 -
ggctaacatagacctccact

SEQ ID NO: 174725 - DNA, 20 bp, Artificial Sequence
  Synthetic oligonucleotide; GAG chr2 60527774 60527793 60527777 -
ctaacatagacctccactga

SEQ ID NO: 174726 - DNA, 20 bp, Artificial Sequence
  Synthetic oligonucleotide; CAG chr2 60527766 60527785 60527769 -
gacctccactgagagaattt

SEQ ID NO: 174727 - DNA, 20 bp, Artificial Sequence
  Synthetic oligonucleotide; TGG chr2 60527756 60527775 60527759 -
gagagaatttcagaatcatt

SEQ ID NO: 174728 - DNA, 20 bp, Artificial Sequence
  Synthetic oligonucleotide; TAG chr2 60527753 60527772 60527756 -
agaatttcagaatcatttgg

SEQ ID NO: 174729 - DNA, 20 bp, Artificial Sequence
  Synthetic oligonucleotide; GAG chr2 60527748 60527767 60527751 -
ttcagaatcatttggtagtt

SEQ ID NO: 174730 - DNA, 20 bp, Artificial Sequence
  Synthetic oligonucleotide; AAG chr2 60527745 60527764 60527748 -
agaatcatttggtagttgag

SEQ ID NO: 174731 - DNA, 20 bp, Artificial Sequence
  Synthetic oligonucleotide; CGG chr2 60527729 60527748 60527732 -
tgagaagcgcctacttcatg

SEQ ID NO: 174732 - DNA, 20 bp, Artificial Sequence
  Synthetic oligonucleotide; GAG chr2 60527727 60527746 60527730 -
agaagcgcctacttcatgcg

SEQ ID NO: 174733 - DNA, 20 bp, Artificial Sequence
  Synthetic oligonucleotide; AGG chr2 60527726 60527745 60527729 -
gaagcgcctacttcatgcgg

SEQ ID NO: 174734 - DNA, 20 bp, Artificial Sequence
  Synthetic oligonucleotide; TGG chr2 60527718 60527737 60527721 -
tacttcatgcggaggccccg

SEQ ID NO: 174735 - DNA, 20 bp, Artificial Sequence
  Synthetic oligonucleotide; GGG chr2 60527717 60527736 60527720 -
acttcatgcggaggccccgt

SEQ ID NO: 174736 - DNA, 20 bp, Artificial Sequence
  Synthetic oligonucleotide; GAG chr2 60527715 60527734 60527718 -
ttcatgcggaggccccgtgg

SEQ ID NO: 174737 - DNA, 20 bp, Artificial Sequence
  Synthetic oligonucleotide; AGG chr2 60527714 60527733 60527717 -
tcatgcggaggccccgtggg

SEQ ID NO: 174738 - DNA, 20 bp, Artificial Sequence
  Synthetic oligonucleotide; GAG chr2 60527712 60527731 60527715 -
atgcggaggccccgtgggag

SEQ ID NO: 174739 - DNA, 20 bp, Artificial Sequence
  Synthetic oligonucleotide; TGG chr2 60527709 60527728 60527712 -
cggaggccccgtgggaggag

SEQ ID NO: 174740 - DNA, 20 bp, Artificial Sequence
  Synthetic oligonucleotide; AAG chr2 60527706 60527725 60527709 -
aggccccgtgggaggagtgg

SEQ ID NO: 174741 - DNA, 20 bp, Artificial Sequence
  Synthetic oligonucleotide; GAG chr2 60527704 60527723 60527707 -
gccccgtgggaggagtggaa

SEQ ID NO: 174742 - DNA, 20 bp, Artificial Sequence
  Synthetic oligonucleotide; TGG chr2 60527700 60527719 60527703 -
cgtgggaggagtggaagagt

SEQ ID NO: 174743 - DNA, 20 bp, Artificial Sequence
  Synthetic oligonucleotide; CAG chr2 60527694 60527713 60527697 -
aggagtggaagagttggcct

SEQ ID NO: 174744 - DNA, 20 bp, Artificial Sequence
  Synthetic oligonucleotide; TGG chr2 60527688 60527707 60527691 -
ggaagagttggcctcagcac

SEQ ID NO: 174745 - DNA, 20 bp, Artificial Sequence
  Synthetic oligonucleotide; GAG chr2 60527684 60527703 60527687 -
gagttggcctcagcactggc

SEQ ID NO: 174746 - DNA, 20 bp, Artificial Sequence
  Synthetic oligonucleotide; CGG chr2 60527678 60527697 60527681 -
gcctcagcactggcgagtat

SEQ ID NO: 174747 - DNA, 20 bp, Artificial Sequence
  Synthetic oligonucleotide; TGG chr2 60527674 60527693 60527677 -
cagcactggcgagtatcgga

SEQ ID NO: 174748 - DNA, 20 bp, Artificial Sequence
  Synthetic oligonucleotide; GGG chr2 60527673 60527692 60527676 -
agcactggcgagtatcggat

SEQ ID NO: 174749 - DNA, 20 bp, Artificial Sequence
  Synthetic oligonucleotide; GAG chr2 60527671 60527690 60527674 -
cactggcgagtatcggatgg

SEQ ID NO: 174750 - DNA, 20 bp, Artificial Sequence
  Synthetic oligonucleotide; TGG chr2 60527657 60527676 60527660 -
ggatgggagctctgctcact

SEQ ID NO: 174751 - DNA, 20 bp, Artificial Sequence
  Synthetic oligonucleotide; AAG chr2 60527653 60527672 60527656 -
gggagctctgctcacttggt

SEQ ID NO: 174752 - DNA, 20 bp, Artificial Sequence
  Synthetic oligonucleotide; TAG chr2 60527641 60527660 60527644 -
cacttggtaagtccttctgc

SEQ ID NO: 174753 - DNA, 20 bp, Artificial Sequence
  Synthetic oligonucleotide; AAG chr2 60527634 60527653 60527637 -
taagtccttctgctagaacc

SEQ ID NO: 174754 - DNA, 20 bp, Artificial Sequence
  Synthetic oligonucleotide; AGG chr2 60527633 60527652 60527636 -
aagtccttctgctagaacca

SEQ ID NO: 174755 - DNA, 20 bp, Artificial Sequence
  Synthetic oligonucleotide; GGG chr2 60527632 60527651 60527635 -
agtccttctgctagaaccaa

SEQ ID NO: 174756 - DNA, 20 bp, Artificial Sequence
  Synthetic oligonucleotide; GAG chr2 60527630 60527649 60527633 -
tccttctgctagaaccaagg

SEQ ID NO: 174757 - DNA, 20 bp, Artificial Sequence
  Synthetic oligonucleotide; AGG chr2 60527629 60527648 60527632 -
ccttctgctagaaccaaggg

SEQ ID NO: 174758 - DNA, 20 bp, Artificial Sequence
  Synthetic oligonucleotide; CAG chr2 60527621 60527640 60527624 -
tagaaccaagggaggctgtt

SEQ ID NO: 174759 - DNA, 20 bp, Artificial Sequence
  Synthetic oligonucleotide; AAG chr2 60527608 60527627 60527611 -
ggctgttcagatccatcaca

SEQ ID NO: 174760 - DNA, 20 bp, Artificial Sequence
  Synthetic oligonucleotide; AAG chr2 60527605 60527624 60527608 -
tgttcagatccatcacaaag

SEQ ID NO: 174761 - DNA, 20 bp, Artificial Sequence
  Synthetic oligonucleotide; CGG chr2 60527598 60527617 60527601 -
atccatcacaaagaagttgt

SEQ ID NO: 174762 - DNA, 20 bp, Artificial Sequence
  Synthetic oligonucleotide; CAG chr2 60527588 60527607 60527591 -
aagaagttgtcggtcacatc

SEQ ID NO: 174763 - DNA, 20 bp, Artificial Sequence
  Synthetic oligonucleotide; AGG chr2 60527587 60527606 60527590 -
agaagttgtcggtcacatcc

SEQ ID NO: 174764 - DNA, 20 bp, Artificial Sequence
  Synthetic oligonucleotide; GAG chr2 60527575 60527594 60527578 -
tcacatccaggttgtcttct

SEQ ID NO: 174765 - DNA, 20 bp, Artificial Sequence
  Synthetic oligonucleotide; GAG chr2 60527569 60527588 60527572 -
ccaggttgtcttctgagttt

SEQ ID NO: 174766 - DNA, 20 bp, Artificial Sequence
  Synthetic oligonucleotide; AGG chr2 60527568 60527587 60527571 -
caggttgtcttctgagtttg

SEQ ID NO: 174767 - DNA, 20 bp, Artificial Sequence
  Synthetic oligonucleotide; TGG chr2 60527565 60527584 60527568 -
gttgtcttctgagtttgagg

SEQ ID NO: 174768 - DNA, 20 bp, Artificial Sequence
  Synthetic oligonucleotide; GGG chr2 60527564 60527583 60527567 -
ttgtcttctgagtttgaggt

SEQ ID NO: 174769 - DNA, 20 bp, Artificial Sequence
  Synthetic oligonucleotide; TGG chr2 60527560 60527579 60527563 -
cttctgagtttgaggtggga

SEQ ID NO: 174770 - DNA, 20 bp, Artificial Sequence
  Synthetic oligonucleotide; GAG chr2 60527558 60527577 60527561 -
tctgagtttgaggtgggatg

SEQ ID NO: 174771 - DNA, 20 bp, Artificial Sequence
  Synthetic oligonucleotide; AGG chr2 60527557 60527576 60527560 -
ctgagtttgaggtgggatgg

SEQ ID NO: 174772 - DNA, 20 bp, Artificial Sequence
  Synthetic oligonucleotide; TGG chr2 60527554 60527573 60527557 -
agtttgaggtgggatggagg

SEQ ID NO: 174773 - DNA, 20 bp, Artificial Sequence
  Synthetic oligonucleotide; GAG chr2 60527546 60527565 60527549 -
gtgggatggaggtggctgct

SEQ ID NO: 174774 - DNA, 20 bp, Artificial Sequence
  Synthetic oligonucleotide; TGG chr2 60527535 60527554 60527538 -
gtggctgctgagaatccatg

SEQ ID NO: 174775 - DNA, 20 bp, Artificial Sequence
  Synthetic oligonucleotide; GGG chr2 60527534 60527553 60527537 -
tggctgctgagaatccatgt

SEQ ID NO: 174776 - DNA, 20 bp, Artificial Sequence
  Synthetic oligonucleotide; AAG chr2 60527529 60527548 60527532 -
gctgagaatccatgtgggtc

SEQ ID NO: 174777 - DNA, 20 bp, Artificial Sequence
  Synthetic oligonucleotide; GAG chr2 60527527 60527546 60527530 -
tgagaatccatgtgggtcaa

SEQ ID NO: 174778 - DNA, 20 bp, Artificial Sequence
  Synthetic oligonucleotide; AAG chr2 60527519 60527538 60527522 -
catgtgggtcaagagctcca

SEQ ID NO: 174779 - DNA, 20 bp, Artificial Sequence
  Synthetic oligonucleotide; CGG chr2 60527490 60527509 60527493 -
ttttacttcgcactctgtcc

SEQ ID NO: 174780 - DNA, 20 bp, Artificial Sequence
  Synthetic oligonucleotide; GGG chr2 60527489 60527508 60527492 -
tttacttcgcactctgtccc

SEQ ID NO: 174781 - DNA, 20 bp, Artificial Sequence
  Synthetic oligonucleotide; GGG chr2 60527488 60527507 60527491 -
ttacttcgcactctgtcccg

SEQ ID NO: 174782 - DNA, 20 bp, Artificial Sequence
  Synthetic oligonucleotide; TGG chr2 60527483 60527502 60527486 -
tcgcactctgtcccggggca

SEQ ID NO: 174783 - DNA, 20 bp, Artificial Sequence
  Synthetic oligonucleotide; TGG chr2 60527470 60527489 60527473 -
cggggcatggacgtcctcaa

SEQ ID NO: 174784 - DNA, 20 bp, Artificial Sequence
  Synthetic oligonucleotide; GAG chr2 60527468 60527487 60527471 -
gggcatggacgtcctcaatg

SEQ ID NO: 174785 - DNA, 20 bp, Artificial Sequence
  Synthetic oligonucleotide; AGG chr2 60527467 60527486 60527470 -
ggcatggacgtcctcaatgg

SEQ ID NO: 174786 - DNA, 20 bp, Artificial Sequence
  Synthetic oligonucleotide; AAG chr2 60527458 60527477 60527461 -
gtcctcaatggaggtcatgc

SEQ ID NO: 174787 - DNA, 20 bp, Artificial Sequence
  Synthetic oligonucleotide; TGG chr2 60527432 60527451 60527435 -
ttccccctcaccccttctct

SEQ ID NO: 174788 - DNA, 20 bp, Artificial Sequence
  Synthetic oligonucleotide; TGG chr2 60527403 60527422 60527406 -
tcattgtctctacataccct

SEQ ID NO: 174789 - DNA, 20 bp, Artificial Sequence
  Synthetic oligonucleotide; GGG chr2 60527402 60527421 60527405 -
cattgtctctacataccctt

SEQ ID NO: 174790 - DNA, 20 bp, Artificial Sequence
  Synthetic oligonucleotide; AAG chr2 60527397 60527416 60527400 -
tctctacatacccttgggtc

SEQ ID NO: 174791 - DNA, 20 bp, Artificial Sequence
  Synthetic oligonucleotide; GAG chr2 60527395 60527414 60527398 -
tctacatacccttgggtcaa

SEQ ID NO: 174792 - DNA, 20 bp, Artificial Sequence
  Synthetic oligonucleotide; TAG chr2 60527390 60527409 60527393 -
atacccttgggtcaagagtg

SEQ ID NO: 174793 - DNA, 20 bp, Artificial Sequence
  Synthetic oligonucleotide; TGG chr2 60527387 60527406 60527390 -
cccttgggtcaagagtgtag

SEQ ID NO: 174794 - DNA, 20 bp, Artificial Sequence
  Synthetic oligonucleotide; TGG chr2 60527368 60527387 60527371 -
gtggttctcccttgtcaccc

SEQ ID NO: 174795 - DNA, 20 bp, Artificial Sequence
  Synthetic oligonucleotide; AAG chr2 60527365 60527384 60527368 -
gttctcccttgtcaccctgg

SEQ ID NO: 174796 - DNA, 20 bp, Artificial Sequence
  Synthetic oligonucleotide; GAG chr2 60527363 60527382 60527366 -
tctcccttgtcaccctggaa

SEQ ID NO: 174797 - DNA, 20 bp, Artificial Sequence
  Synthetic oligonucleotide; AAG chr2 60527360 60527379 60527363 -
cccttgtcaccctggaagag

SEQ ID NO: 174798 - DNA, 20 bp, Artificial Sequence
  Synthetic oligonucleotide; TAG chr2 60527353 60527372 60527356 -
caccctggaagagaagctct

SEQ ID NO: 174799 - DNA, 20 bp, Artificial Sequence
  Synthetic oligonucleotide; TGG chr2 60527340 60527359 60527343 -
aagctcttagttttatttgc

SEQ ID NO: 174800 - DNA, 20 bp, Artificial Sequence
  Synthetic oligonucleotide; GGG chr2 60527339 60527358 60527342 -
agctcttagttttatttgct

SEQ ID NO: 174801 - DNA, 20 bp, Artificial Sequence
  Synthetic oligonucleotide; TAG chr2 60527331 60527350 60527334 -
gttttatttgctgggtctcc

SEQ ID NO: 174802 - DNA, 20 bp, Artificial Sequence
  Synthetic oligonucleotide; AAG chr2 60527316 60527335 60527319 -
tctcctagactgaaatgata

SEQ ID NO: 174803 - DNA, 20 bp, Artificial Sequence
  Synthetic oligonucleotide; AAG chr2 60527301 60527320 60527304 -
tgataaagctgaaatgataa

SEQ ID NO: 174804 - DNA, 20 bp, Artificial Sequence
  Synthetic oligonucleotide; AGG chr2 60527300 60527319 60527303 -
gataaagctgaaatgataaa

SEQ ID NO: 174805 - DNA, 20 bp, Artificial Sequence
  Synthetic oligonucleotide; TGG chr2 60527290 60527309 60527293 -
aaatgataaaaggcgtatca

SEQ ID NO: 174806 - DNA, 20 bp, Artificial Sequence
  Synthetic oligonucleotide; TAG chr2 60527284 60527303 60527287 -
taaaaggcgtatcatggctt

SEQ ID NO: 174807 - DNA, 20 bp, Artificial Sequence
  Synthetic oligonucleotide; TAG chr2 60527250 60527269 60527253 -
tttccctcgctcgcaccccc

SEQ ID NO: 174808 - DNA, 20 bp, Artificial Sequence
  Synthetic oligonucleotide; CAG chr2 60527223 60527242 60527226 -
ccttctcttcccttgaaaat

SEQ ID NO: 174809 - DNA, 20 bp, Artificial Sequence
  Synthetic oligonucleotide; CAG chr2 60527213 60527232 60527216 -
ccttgaaaatcagtgaaaat

SEQ ID NO: 174810 - DNA, 20 bp, Artificial Sequence
  Synthetic oligonucleotide; AGG chr2 60527212 60527231 60527215 -
cttgaaaatcagtgaaaatc

SEQ ID NO: 174811 - DNA, 20 bp, Artificial Sequence
  Synthetic oligonucleotide; TGG chr2 60527194 60527213 60527197 -
tcaggccacatctctgatga

SEQ ID NO: 174812 - DNA, 20 bp, Artificial Sequence
  Synthetic oligonucleotide; TAG chr2 60527153 60527172 60527156 -
ttttctgtttctgccttcgt

SEQ ID NO: 174813 - DNA, 20 bp, Artificial Sequence
  Synthetic oligonucleotide; AGG chr2 60527152 60527171 60527155 -
tttctgtttctgccttcgtt

SEQ ID NO: 174814 - DNA, 20 bp, Artificial Sequence
  Synthetic oligonucleotide; AAG chr2 60527148 60527167 60527151 -
tgtttctgccttcgttaggt

SEQ ID NO: 174815 - DNA, 20 bp, Artificial Sequence
  Synthetic oligonucleotide; AAG chr2 60527128 60527147 60527131 -
aagcacaaatttgatgtccc

SEQ ID NO: 174816 - DNA, 20 bp, Artificial Sequence
  Synthetic oligonucleotide; GAG chr2 60527126 60527145 60527129 -
gcacaaatttgatgtcccaa

SEQ ID NO: 174817 - DNA, 20 bp, Artificial Sequence
  Synthetic oligonucleotide; AGG chr2 60527125 60527144 60527128 -
cacaaatttgatgtcccaag

SEQ ID NO: 174818 - DNA, 20 bp, Artificial Sequence
  Synthetic oligonucleotide; CAG chr2 60527122 60527141 60527125 -
aaatttgatgtcccaagagg

SEQ ID NO: 174819 - DNA, 20 bp, Artificial Sequence
  Synthetic oligonucleotide; AGG chr2 60527121 60527140 60527124 -
aatttgatgtcccaagaggc

SEQ ID NO: 174820 - DNA, 20 bp, Artificial Sequence
  Synthetic oligonucleotide; CGG chr2 60527117 60527136 60527120 -
tgatgtcccaagaggcaggc

SEQ ID NO: 174821 - DNA, 20 bp, Artificial Sequence
  Synthetic oligonucleotide; CAG chr2 60527106 60527125 60527109 -
gaggcaggccggtgaccctt

SEQ ID NO: 174822 - DNA, 20 bp, Artificial Sequence
  Synthetic oligonucleotide; AGG chr2 60527105 60527124 60527108 -
aggcaggccggtgacccttc

SEQ ID NO: 174823 - DNA, 20 bp, Artificial Sequence
  Synthetic oligonucleotide; AAG chr2 60527100 60527119 60527103 -
ggccggtgacccttcaggcc

SEQ ID NO: 174824 - DNA, 20 bp, Artificial Sequence
  Synthetic oligonucleotide; TGG chr2 60527093 60527112 60527096 -
gacccttcaggccaagtgcc

SEQ ID NO: 174825 - DNA, 20 bp, Artificial Sequence
  Synthetic oligonucleotide; TGG chr2 60527087 60527106 60527090 -
tcaggccaagtgcctggatg

SEQ ID NO: 174826 - DNA, 20 bp, Artificial Sequence
  Synthetic oligonucleotide; AAG chr2 60527082 60527101 60527085 -
ccaagtgcctggatgtggca

SEQ ID NO: 174827 - DNA, 20 bp, Artificial Sequence
  Synthetic oligonucleotide; TGG chr2 60527062 60527081 60527065 -
aagctacaataaatatcgaa

SEQ ID NO: 174828 - DNA, 20 bp, Artificial Sequence
  Synthetic oligonucleotide; GAG chr2 60527058 60527077 60527061 -
tacaataaatatcgaatggt

SEQ ID NO: 174829 - DNA, 20 bp, Artificial Sequence
  Synthetic oligonucleotide; GAG chr2 60527056 60527075 60527059 -
caataaatatcgaatggtga

SEQ ID NO: 174830 - DNA, 20 bp, Artificial Sequence
  Synthetic oligonucleotide; TGG chr2 60527050 60527069 60527053 -
atatcgaatggtgagagcaa

SEQ ID NO: 174831 - DNA, 20 bp, Artificial Sequence
  Synthetic oligonucleotide; TAG chr2 60527042 60527061 60527045 -
tggtgagagcaatggaaatt

SEQ ID NO: 174832 - DNA, 20 bp, Artificial Sequence
  Synthetic oligonucleotide; AAG chr2 60527037 60527056 60527040 -
agagcaatggaaatttagca

SEQ ID NO: 174833 - DNA, 20 bp, Artificial Sequence
  Synthetic oligonucleotide; CGG chr2 60527027 60527046 60527030 -
aaatttagcaaagccataac

SEQ ID NO: 174834 - DNA, 20 bp, Artificial Sequence
  Synthetic oligonucleotide; GGG chr2 60527026 60527045 60527029 -
aatttagcaaagccataacc

SEQ ID NO: 174835 - DNA, 20 bp, Artificial Sequence
  Synthetic oligonucleotide; GGG chr2 60527025 60527044 60527028 -
atttagcaaagccataaccg

SEQ ID NO: 174836 - DNA, 20 bp, Artificial Sequence
  Synthetic oligonucleotide; GAG chr2 60527023 60527042 60527026 -
ttagcaaagccataaccggg

SEQ ID NO: 174837 - DNA, 20 bp, Artificial Sequence
  Synthetic oligonucleotide; CAG chr2 60527016 60527035 60527019 -
agccataaccggggagacct

SEQ ID NO: 174838 - DNA, 20 bp, Artificial Sequence
  Synthetic oligonucleotide; GAG chr2 60527014 60527033 60527017 -
ccataaccggggagacctca

SEQ ID NO: 174839 - DNA, 20 bp, Artificial Sequence
  Synthetic oligonucleotide; AGG chr2 60527013 60527032 60527016 -
cataaccggggagacctcag

SEQ ID NO: 174840 - DNA, 20 bp, Artificial Sequence
  Synthetic oligonucleotide; GGG chr2 60527012 60527031 60527015 -
ataaccggggagacctcaga

SEQ ID NO: 174841 - DNA, 20 bp, Artificial Sequence
  Synthetic oligonucleotide; GGG chr2 60527011 60527030 60527014 -
taaccggggagacctcagag

SEQ ID NO: 174842 - DNA, 20 bp, Artificial Sequence
  Synthetic oligonucleotide; CAG chr2 60527008 60527027 60527011 -
ccggggagacctcagagggg

SEQ ID NO: 174843 - DNA, 20 bp, Artificial Sequence
  Synthetic oligonucleotide; TGG chr2 60527005 60527024 60527008 -
gggagacctcagaggggcag

SEQ ID NO: 174844 - DNA, 20 bp, Artificial Sequence
  Synthetic oligonucleotide; TGG chr2 60527000 60527019 60527003 -
acctcagaggggcagtggac

SEQ ID NO: 174845 - DNA, 20 bp, Artificial Sequence
  Synthetic oligonucleotide; AAG chr2 60526995 60527014 60526998 -
agaggggcagtggactggtt

SEQ ID NO: 174846 - DNA, 20 bp, Artificial Sequence
  Synthetic oligonucleotide; GAG chr2 60526993 60527012 60526996 -
aggggcagtggactggttaa

SEQ ID NO: 174847 - DNA, 20 bp, Artificial Sequence
  Synthetic oligonucleotide; AGG chr2 60526992 60527011 60526995 -
ggggcagtggactggttaag

SEQ ID NO: 174848 - DNA, 20 bp, Artificial Sequence
  Synthetic oligonucleotide; TGG chr2 60526985 60527004 60526988 -
tggactggttaagaggctgt

SEQ ID NO: 174849 - DNA, 20 bp, Artificial Sequence
  Synthetic oligonucleotide; GAG chr2 60526980 60526999 60526983 -
tggttaagaggctgttggat

SEQ ID NO: 174850 - DNA, 20 bp, Artificial Sequence
  Synthetic oligonucleotide; CGG chr2 60526976 60526995 60526979 -
taagaggctgttggatgagc

SEQ ID NO: 174851 - DNA, 20 bp, Artificial Sequence
  Synthetic oligonucleotide; GGG chr2 60526975 60526994 60526978 -
aagaggctgttggatgagcc

SEQ ID NO: 174852 - DNA, 20 bp, Artificial Sequence
  Synthetic oligonucleotide; TAG chr2 60526972 60526991 60526975 -
aggctgttggatgagccggg

SEQ ID NO: 174853 - DNA, 20 bp, Artificial Sequence
  Synthetic oligonucleotide; TAG chr2 60526917 60526936 60526920 -
taaaaatcaatgctgttgac

SEQ ID NO: 174854 - DNA, 20 bp, Artificial Sequence
  Synthetic oligonucleotide; TGG chr2 60526895 60526914 60526898 -
gtgataatttacaacgttcc

SEQ ID NO: 174855 - DNA, 20 bp, Artificial Sequence
  Synthetic oligonucleotide; AAG chr2 60526888 60526907 60526891 -
tttacaacgttcctggtgct

SEQ ID NO: 174856 - DNA, 20 bp, Artificial Sequence
  Synthetic oligonucleotide; TAG chr2 60526885 60526904 60526888 -
acaacgttcctggtgctaag

SEQ ID NO: 174857 - DNA, 20 bp, Artificial Sequence
  Synthetic oligonucleotide; AAG chr2 60526872 60526891 60526875 -
tgctaagtagttccccgctt

SEQ ID NO: 174858 - DNA, 20 bp, Artificial Sequence
  Synthetic oligonucleotide; TGG chr2 60526862 60526881 60526865 -
ttccccgcttaagaatgcgt

SEQ ID NO: 174859 - DNA, 20 bp, Artificial Sequence
  Synthetic oligonucleotide; TGG chr2 60526858 60526877 60526861 -
ccgcttaagaatgcgttggc

SEQ ID NO: 174860 - DNA, 20 bp, Artificial Sequence
  Synthetic oligonucleotide; GGG chr2 60526857 60526876 60526860 -
cgcttaagaatgcgttggct

SEQ ID NO: 174861 - DNA, 20 bp, Artificial Sequence
  Synthetic oligonucleotide; CAG chr2 60526854 60526873 60526857 -
ttaagaatgcgttggctggg

SEQ ID NO: 174862 - DNA, 20 bp, Artificial Sequence
  Synthetic oligonucleotide; GAG chr2 60526852 60526871 60526855 -
aagaatgcgttggctgggca

SEQ ID NO: 174863 - DNA, 20 bp, Artificial Sequence
  Synthetic oligonucleotide; TAG chr2 60526847 60526866 60526850 -
tgcgttggctgggcagagat

SEQ ID NO: 174864 - DNA, 20 bp, Artificial Sequence
  Synthetic oligonucleotide; CAG chr2 60526842 60526861 60526845 -
tggctgggcagagattagcg

SEQ ID NO: 174865 - DNA, 20 bp, Artificial Sequence
  Synthetic oligonucleotide; AGG chr2 60526841 60526860 60526844 -
ggctgggcagagattagcgc

SEQ ID NO: 174866 - DNA, 20 bp, Artificial Sequence
  Synthetic oligonucleotide; GGG chr2 60526840 60526859 60526843 -
gctgggcagagattagcgca

SEQ ID NO: 174867 - DNA, 20 bp, Artificial Sequence
  Synthetic oligonucleotide; GAG chr2 60526838 60526857 60526841 -
tgggcagagattagcgcagg

SEQ ID NO: 174868 - DNA, 20 bp, Artificial Sequence
  Synthetic oligonucleotide; CAG chr2 60526815 60526834 60526818 -
ttgtgtgtgtcacaatgaat

SEQ ID NO: 174869 - DNA, 20 bp, Artificial Sequence
  Synthetic oligonucleotide; TAG chr2 60526804 60526823 60526807 -
acaatgaatcagacgcatta

SEQ ID NO: 174870 - DNA, 20 bp, Artificial Sequence
  Synthetic oligonucleotide; AGG chr2 60526803 60526822 60526806 -
caatgaatcagacgcattat

SEQ ID NO: 174871 - DNA, 20 bp, Artificial Sequence
  Synthetic oligonucleotide; CAG chr2 60526799 60526818 60526802 -
gaatcagacgcattataggt

SEQ ID NO: 174872 - DNA, 20 bp, Artificial Sequence
  Synthetic oligonucleotide; CAG chr2 60526766 60526785 60526769 -
gtttcatcatgacttttaca

SEQ ID NO: 174873 - DNA, 20 bp, Artificial Sequence
  Synthetic oligonucleotide; TGG chr2 60526748 60526767 60526751 -
cacagttgtcatgtaattta

SEQ ID NO: 174874 - DNA, 20 bp, Artificial Sequence
  Synthetic oligonucleotide; TAG chr2 60526687 60526706 60526690 -
tctttaacaccctcctgaca

SEQ ID NO: 174875 - DNA, 20 bp, Artificial Sequence
  Synthetic oligonucleotide; AAG chr2 60526670 60526689 60526673 -
acatagacacactgcacttg

SEQ ID NO: 174876 - DNA, 20 bp, Artificial Sequence
  Synthetic oligonucleotide; AGG chr2 60526669 60526688 60526672 -
catagacacactgcacttga

SEQ ID NO: 174877 - DNA, 20 bp, Artificial Sequence
  Synthetic oligonucleotide; TGG chr2 60526664 60526683 60526667 -
acacactgcacttgaaggct

SEQ ID NO: 174878 - DNA, 20 bp, Artificial Sequence
  Synthetic oligonucleotide; GAG chr2 60526645 60526664 60526648 -
ttggtattgtttcataatcc

SEQ ID NO: 174879 - DNA, 20 bp, Artificial Sequence
  Synthetic oligonucleotide; GAG chr2 60526643 60526662 60526646 -
ggtattgtttcataatccga

SEQ ID NO: 174880 - DNA, 20 bp, Artificial Sequence
  Synthetic oligonucleotide; AGG chr2 60526642 60526661 60526645 -
gtattgtttcataatccgag

SEQ ID NO: 174881 - DNA, 20 bp, Artificial Sequence
  Synthetic oligonucleotide; GAG chr2 60526640 60526659 60526643 -
attgtttcataatccgagag

SEQ ID NO: 174882 - DNA, 20 bp, Artificial Sequence
  Synthetic oligonucleotide; AGG chr2 60526639 60526658 60526642 -
ttgtttcataatccgagagg

SEQ ID NO: 174883 - DNA, 20 bp, Artificial Sequence
  Synthetic oligonucleotide; TGG chr2 60526608 60526627 60526611 -
ccatcaaattacactatctt

SEQ ID NO: 174884 - DNA, 20 bp, Artificial Sequence
  Synthetic oligonucleotide; GGG chr2 60526607 60526626 60526610 -
catcaaattacactatcttt

SEQ ID NO: 174885 - DNA, 20 bp, Artificial Sequence
  Synthetic oligonucleotide; CAG chr2 60526587 60526606 60526590 -
gggctaatctaaatgcgctg

SEQ ID NO: 174886 - DNA, 20 bp, Artificial Sequence
  Synthetic oligonucleotide; CAG chr2 60526576 60526595 60526579 -
aatgcgctgcagattaaaat

SEQ ID NO: 174887 - DNA, 20 bp, Artificial Sequence
  Synthetic oligonucleotide; GAG chr2 60526574 60526593 60526577 -
tgcgctgcagattaaaatca

SEQ ID NO: 174888 - DNA, 20 bp, Artificial Sequence
  Synthetic oligonucleotide; AAG chr2 60526545 60526564 60526548 -
tgtccctgatgcaaattatt

SEQ ID NO: 174889 - DNA, 20 bp, Artificial Sequence
  Synthetic oligonucleotide; CGG chr2 60526495 60526514 60526498 -
cccgacacatttttattttg

SEQ ID NO: 174890 - DNA, 20 bp, Artificial Sequence
  Synthetic oligonucleotide; GAG chr2 60526484 60526503 60526487 -
tttattttgcggaccctttt

SEQ ID NO: 174891 - DNA, 20 bp, Artificial Sequence
  Synthetic oligonucleotide; CAG chr2 60526464 60526483 60526467 -
gagcactgctgtctgcgatg

SEQ ID NO: 174892 - DNA, 20 bp, Artificial Sequence
  Synthetic oligonucleotide; GAG chr2 60526462 60526481 60526465 -
gcactgctgtctgcgatgca

SEQ ID NO: 174893 - DNA, 20 bp, Artificial Sequence
  Synthetic oligonucleotide; AGG chr2 60526461 60526480 60526464 -
cactgctgtctgcgatgcag

SEQ ID NO: 174894 - DNA, 20 bp, Artificial Sequence
  Synthetic oligonucleotide; GGG chr2 60526460 60526479 60526463 -
actgctgtctgcgatgcaga

SEQ ID NO: 174895 - DNA, 20 bp, Artificial Sequence
  Synthetic oligonucleotide; GGG chr2 60526459 60526478 60526462 -
ctgctgtctgcgatgcagag

SEQ ID NO: 174896 - DNA, 20 bp, Artificial Sequence
  Synthetic oligonucleotide; GGG chr2 60526458 60526477 60526461 -
tgctgtctgcgatgcagagg

SEQ ID NO: 174897 - DNA, 20 bp, Artificial Sequence
  Synthetic oligonucleotide; TGG chr2 60526455 60526474 60526458 -
tgtctgcgatgcagaggggg

SEQ ID NO: 174898 - DNA, 20 bp, Artificial Sequence
  Synthetic oligonucleotide; GGG chr2 60526454 60526473 60526457 -
gtctgcgatgcagagggggt

SEQ ID NO: 174899 - DNA, 20 bp, Artificial Sequence
  Synthetic oligonucleotide; GGG chr2 60526453 60526472 60526456 -
tctgcgatgcagagggggtg

SEQ ID NO: 174900 - DNA, 20 bp, Artificial Sequence
  Synthetic oligonucleotide; GGG chr2 60526452 60526471 60526455 -
ctgcgatgcagagggggtgg

SEQ ID NO: 174901 - DNA, 20 bp, Artificial Sequence
  Synthetic oligonucleotide; GGG chr2 60526451 60526470 60526454 -
tgcgatgcagagggggtggg

SEQ ID NO: 174902 - DNA, 20 bp, Artificial Sequence
  Synthetic oligonucleotide; GAG chr2 60526449 60526468 60526452 -
cgatgcagagggggtggggg

SEQ ID NO: 174903 - DNA, 20 bp, Artificial Sequence
  Synthetic oligonucleotide; TAG chr2 60526441 60526460 60526444 -
agggggtggggggagatgca

SEQ ID NO: 174904 - DNA, 20 bp, Artificial Sequence
  Synthetic oligonucleotide; AGG chr2 60526440 60526459 60526443 -
gggggtggggggagatgcat

SEQ ID NO: 174905 - DNA, 20 bp, Artificial Sequence
  Synthetic oligonucleotide; GAG chr2 60526438 60526457 60526441 -
gggtggggggagatgcatag

SEQ ID NO: 174906 - DNA, 20 bp, Artificial Sequence
  Synthetic oligonucleotide; CAG chr2 60526427 60526446 60526430 -
gatgcataggagacaatctg

SEQ ID NO: 174907 - DNA, 20 bp, Artificial Sequence
  Synthetic oligonucleotide; TGG chr2 60526402 60526421 60526405 -
attaatgtacacttcccaaa

SEQ ID NO: 174908 - DNA, 20 bp, Artificial Sequence
  Synthetic oligonucleotide; AAG chr2 60526397 60526416 60526400 -
tgtacacttcccaaatggta

SEQ ID NO: 174909 - DNA, 20 bp, Artificial Sequence
  Synthetic oligonucleotide; AGG chr2 60526396 60526415 60526399 -
gtacacttcccaaatggtaa

SEQ ID NO: 174910 - DNA, 20 bp, Artificial Sequence
  Synthetic oligonucleotide; TAG chr2 60526352 60526371 60526355 -
tgtcttatttatttattgat

SEQ ID NO: 174911 - DNA, 20 bp, Artificial Sequence
  Synthetic oligonucleotide; TAG chr2 60526344 60526363 60526347 -
ttatttattgattagatgta

SEQ ID NO: 174912 - DNA, 20 bp, Artificial Sequence
  Synthetic oligonucleotide; GAG chr2 60526342 60526361 60526345 -
atttattgattagatgtata

SEQ ID NO: 174913 - DNA, 20 bp, Artificial Sequence
  Synthetic oligonucleotide; TGG chr2 60526335 60526354 60526338 -
gattagatgtatagagactt

SEQ ID NO: 174914 - DNA, 20 bp, Artificial Sequence
  Synthetic oligonucleotide; TGG chr2 60526330 60526349 60526333 -
gatgtatagagactttggcg

SEQ ID NO: 174915 - DNA, 20 bp, Artificial Sequence
  Synthetic oligonucleotide; GGG chr2 60526329 60526348 60526332 -
atgtatagagactttggcgt

SEQ ID NO: 174916 - DNA, 20 bp, Artificial Sequence
  Synthetic oligonucleotide; AAG chr2 60526317 60526336 60526320 -
tttggcgtgggcacaatctg

SEQ ID NO: 174917 - DNA, 20 bp, Artificial Sequence
  Synthetic oligonucleotide; AAG chr2 60526300 60526319 60526303 -
ctgaagttgaaatcctttta

SEQ ID NO: 174918 - DNA, 20 bp, Artificial Sequence
  Synthetic oligonucleotide; TGG chr2 60526274 60526293 60526277 -
aaaactatttaaaaatcttt

SEQ ID NO: 174919 - DNA, 20 bp, Artificial Sequence
  Synthetic oligonucleotide; GGG chr2 60526273 60526292 60526276 -
aaactatttaaaaatctttt

SEQ ID NO: 174920 - DNA, 20 bp, Artificial Sequence
  Synthetic oligonucleotide; GGG chr2 60526272 60526291 60526275 -
aactatttaaaaatcttttg

SEQ ID NO: 174921 - DNA, 20 bp, Artificial Sequence
  Synthetic oligonucleotide; AAG chr2 60526269 60526288 60526272 -
tatttaaaaatcttttgggg

SEQ ID NO: 174922 - DNA, 20 bp, Artificial Sequence
  Synthetic oligonucleotide; AAG chr2 60526265 60526284 60526268 -
taaaaatcttttggggaaga

SEQ ID NO: 174923 - DNA, 20 bp, Artificial Sequence
  Synthetic oligonucleotide; GAG chr2 60526263 60526282 60526266 -
aaaatcttttggggaagaaa

SEQ ID NO: 174924 - DNA, 20 bp, Artificial Sequence
  Synthetic oligonucleotide; TAG chr2 60526253 60526272 60526256 -
ggggaagaaagagcaaaata

SEQ ID NO: 174925 - DNA, 20 bp, Artificial Sequence
  Synthetic oligonucleotide; TAG chr2 60526242 60526261 60526245 -
agcaaaatatagccaaccaa

SEQ ID NO: 174926 - DNA, 20 bp, Artificial Sequence
  Synthetic oligonucleotide; TAG chr2 60526231 60526250 60526234 -
gccaaccaatagctttctgc

SEQ ID NO: 174927 - DNA, 20 bp, Artificial Sequence
  Synthetic oligonucleotide; TGG chr2 60526209 60526228 60526212 -
gaacacatcatcccaaaata

SEQ ID NO: 174928 - DNA, 20 bp, Artificial Sequence
  Synthetic oligonucleotide; GGG chr2 60526208 60526227 60526211 -
aacacatcatcccaaaatat

SEQ ID NO: 174929 - DNA, 20 bp, Artificial Sequence
  Synthetic oligonucleotide; CAG chr2 60526183 60526202 60526186 -
tctgaatttgatcaaatcac

SEQ ID NO: 174930 - DNA, 20 bp, Artificial Sequence
  Synthetic oligonucleotide; TAG chr2 60526160 60526179 60526163 -
tttctgaatttgatcaaatc

SEQ ID NO: 174931 - DNA, 20 bp, Artificial Sequence
  Synthetic oligonucleotide; CAG chr2 60526151 60526170 60526154 -
ttgatcaaatctagattttg

SEQ ID NO: 174932 - DNA, 20 bp, Artificial Sequence
  Synthetic oligonucleotide; AAG chr2 60526148 60526167 60526151 -
atcaaatctagattttgcag

SEQ ID NO: 174933 - DNA, 20 bp, Artificial Sequence
  Synthetic oligonucleotide; CAG chr2 60526143 60526162 60526146 -
atctagattttgcagaagtt

SEQ ID NO: 174934 - DNA, 20 bp, Artificial Sequence
  Synthetic oligonucleotide; AGG chr2 60526142 60526161 60526145 -
tctagattttgcagaagttc

SEQ ID NO: 174935 - DNA, 20 bp, Artificial Sequence
  Synthetic oligonucleotide; GGG chr2 60526141 60526160 60526144 -
ctagattttgcagaagttca

SEQ ID NO: 174936 - DNA, 20 bp, Artificial Sequence
  Synthetic oligonucleotide; GAG chr2 60526137 60526156 60526140 -
attttgcagaagttcagggt

SEQ ID NO: 174937 - DNA, 20 bp, Artificial Sequence
  Synthetic oligonucleotide; GAG chr2 60526135 60526154 60526138 -
tttgcagaagttcagggtga

SEQ ID NO: 174938 - DNA, 20 bp, Artificial Sequence
  Synthetic oligonucleotide; TAG chr2 60526111 60526130 60526114 -
aaccatgcctgttttatatc

SEQ ID NO: 174939 - DNA, 20 bp, Artificial Sequence
  Synthetic oligonucleotide; AAG chr2 60526107 60526126 60526110 -
atgcctgttttatatctaga

SEQ ID NO: 174940 - DNA, 20 bp, Artificial Sequence
  Synthetic oligonucleotide; TAG chr2 60526090 60526109 60526093 -
agaaagtgaaatcattgtta

SEQ ID NO: 174941 - DNA, 20 bp, Artificial Sequence
  Synthetic oligonucleotide; TGG chr2 60526074 60526093 60526077 -
gttatagaaaaaacctactg

SEQ ID NO: 174942 - DNA, 20 bp, Artificial Sequence
  Synthetic oligonucleotide; TAG chr2 60526070 60526089 60526073 -
tagaaaaaacctactgtggt

SEQ ID NO: 174943 - DNA, 20 bp, Artificial Sequence
  Synthetic oligonucleotide; CAG chr2 60526044 60526063 60526047 -
aaaaccacattcttttttcc

SEQ ID NO: 174944 - DNA, 20 bp, Artificial Sequence
  Synthetic oligonucleotide; CAG chr2 60526022 60526041 60526025 -
gccctgctgccatcctctac

SEQ ID NO: 174945 - DNA, 20 bp, Artificial Sequence
  Synthetic oligonucleotide; CAG chr2 60526012 60526031 60526015 -
catcctctaccagaaaataa

SEQ ID NO: 174946 - DNA, 20 bp, Artificial Sequence
  Synthetic oligonucleotide; TAG chr2 60525999 60526018 60526002 -
aaaataacagtatctgcctg

SEQ ID NO: 174947 - DNA, 20 bp, Artificial Sequence
  Synthetic oligonucleotide; AAG chr2 60525992 60526011 60525995 -
cagtatctgcctgtagtatg

SEQ ID NO: 174948 - DNA, 20 bp, Artificial Sequence
  Synthetic oligonucleotide; GAG chr2 60525978 60525997 60525981 -
agtatgaagaccttccaatt

SEQ ID NO: 174949 - DNA, 20 bp, Artificial Sequence
  Synthetic oligonucleotide; GAG chr2 60525976 60525995 60525979 -
tatgaagaccttccaattga

SEQ ID NO: 174950 - DNA, 20 bp, Artificial Sequence
  Synthetic oligonucleotide; AAG chr2 60525935 60525954 60525938 -
ttgattaccaaacacgaatg

SEQ ID NO: 174951 - DNA, 20 bp, Artificial Sequence
  Synthetic oligonucleotide; AGG chr2 60525934 60525953 60525937 -
tgattaccaaacacgaatga

SEQ ID NO: 174952 - DNA, 20 bp, Artificial Sequence
  Synthetic oligonucleotide; AAG chr2 60525931 60525950 60525934 -
ttaccaaacacgaatgaagg

SEQ ID NO: 174953 - DNA, 20 bp, Artificial Sequence
  Synthetic oligonucleotide; AAG chr2 60525928 60525947 60525931 -
ccaaacacgaatgaaggaag

SEQ ID NO: 174954 - DNA, 20 bp, Artificial Sequence
  Synthetic oligonucleotide; TAG chr2 60525912 60525931 60525915 -
gaagaagataacataaaaat

SEQ ID NO: 174955 - DNA, 20 bp, Artificial Sequence
  Synthetic oligonucleotide; AAG chr2 60525907 60525926 60525910 -
agataacataaaaattagta

SEQ ID NO: 174956 - DNA, 20 bp, Artificial Sequence
  Synthetic oligonucleotide; AGG chr2 60525906 60525925 60525909 -
gataacataaaaattagtaa

SEQ ID NO: 174957 - DNA, 20 bp, Artificial Sequence
  Synthetic oligonucleotide; AAG chr2 60525897 60525916 60525900 -
aaaattagtaaaggccttcc

SEQ ID NO: 174958 - DNA, 20 bp, Artificial Sequence
  Synthetic oligonucleotide; TAG chr2 60525894 60525913 60525897 -
attagtaaaggccttccaag

SEQ ID NO: 174959 - DNA, 20 bp, Artificial Sequence
  Synthetic oligonucleotide; AAG chr2 60525873 60525892 60525876 -
agacatttacccttctgtga

SEQ ID NO: 174960 - DNA, 20 bp, Artificial Sequence
  Synthetic oligonucleotide; TGG chr2 60525867 60525886 60525870 -
ttacccttctgtgaaagcca

SEQ ID NO: 174961 - DNA, 20 bp, Artificial Sequence
  Synthetic oligonucleotide; GAG chr2 60525865 60525884 60525868 -
acccttctgtgaaagccatg

SEQ ID NO: 174962 - DNA, 20 bp, Artificial Sequence
  Synthetic oligonucleotide; AAG chr2 60525854 60525873 60525857 -
aaagccatggagaaattacc

SEQ ID NO: 174963 - DNA, 20 bp, Artificial Sequence
  Synthetic oligonucleotide; TGG chr2 60525849 60525868 60525852 -
catggagaaattaccaagac

SEQ ID NO: 174964 - DNA, 20 bp, Artificial Sequence
  Synthetic oligonucleotide; TGG chr2 60525844 60525863 60525847 -
agaaattaccaagactggtt

SEQ ID NO: 174965 - DNA, 20 bp, Artificial Sequence
  Synthetic oligonucleotide; GGG chr2 60525843 60525862 60525846 -
gaaattaccaagactggttt

SEQ ID NO: 174966 - DNA, 20 bp, Artificial Sequence
  Synthetic oligonucleotide; GGG chr2 60525842 60525861 60525845 -
aaattaccaagactggtttg

SEQ ID NO: 174967 - DNA, 20 bp, Artificial Sequence
  Synthetic oligonucleotide; GGG chr2 60525841 60525860 60525844 -
aattaccaagactggtttgg

SEQ ID NO: 174968 - DNA, 20 bp, Artificial Sequence
  Synthetic oligonucleotide; GGG chr2 60525840 60525859 60525843 -
attaccaagactggtttggg

SEQ ID NO: 174969 - DNA, 20 bp, Artificial Sequence
  Synthetic oligonucleotide; GAG chr2 60525838 60525857 60525841 -
taccaagactggtttggggg

SEQ ID NO: 174970 - DNA, 20 bp, Artificial Sequence
  Synthetic oligonucleotide; AGG chr2 60525837 60525856 60525840 -
accaagactggtttgggggg

SEQ ID NO: 174971 - DNA, 20 bp, Artificial Sequence
  Synthetic oligonucleotide; GGG chr2 60525836 60525855 60525839 -
ccaagactggtttgggggga

SEQ ID NO: 174972 - DNA, 20 bp, Artificial Sequence
  Synthetic oligonucleotide; AAG chr2 60525828 60525847 60525831 -
ggtttggggggagggcattt

SEQ ID NO: 174973 - DNA, 20 bp, Artificial Sequence
  Synthetic oligonucleotide; AGG chr2 60525827 60525846 60525830 -
gtttggggggagggcattta

SEQ ID NO: 174974 - DNA, 20 bp, Artificial Sequence
  Synthetic oligonucleotide; TGG chr2 60525819 60525838 60525822 -
ggagggcatttaaggtcttt

SEQ ID NO: 174975 - DNA, 20 bp, Artificial Sequence
  Synthetic oligonucleotide; GGG chr2 60525818 60525837 60525821 -
gagggcatttaaggtctttt

SEQ ID NO: 174976 - DNA, 20 bp, Artificial Sequence
  Synthetic oligonucleotide; CAG chr2 60525810 60525829 60525813 -
ttaaggtcttttgggcatta

SEQ ID NO: 174977 - DNA, 20 bp, Artificial Sequence
  Synthetic oligonucleotide; CAG chr2 60525801 60525820 60525804 -
tttgggcattacagattttc

SEQ ID NO: 174978 - DNA, 20 bp, Artificial Sequence
  Synthetic oligonucleotide; TAG chr2 60525781 60525800 60525784 -
cagaaccaaactttgacttt

SEQ ID NO: 174979 - DNA, 20 bp, Artificial Sequence
  Synthetic oligonucleotide; CAG chr2 60525772 60525791 60525775 -
actttgacttttagtgttaa

SEQ ID NO: 174980 - DNA, 20 bp, Artificial Sequence
  Synthetic oligonucleotide; GAG chr2 60525770 60525789 60525773 -
tttgacttttagtgttaaca

SEQ ID NO: 174981 - DNA, 20 bp, Artificial Sequence
  Synthetic oligonucleotide; GAG chr2 60525768 60525787 60525771 -
tgacttttagtgttaacaga

SEQ ID NO: 174982 - DNA, 20 bp, Artificial Sequence
  Synthetic oligonucleotide; CAG chr2 60525749 60525768 60525752 -
agagacactgatctgaaaac

SEQ ID NO: 174983 - DNA, 20 bp, Artificial Sequence
  Synthetic oligonucleotide; AGG chr2 60525748 60525767 60525751 -
gagacactgatctgaaaacc

SEQ ID NO: 174984 - DNA, 20 bp, Artificial Sequence
  Synthetic oligonucleotide; TGG chr2 60525740 60525759 60525743 -
gatctgaaaaccaggacacc

SEQ ID NO: 174985 - DNA, 20 bp, Artificial Sequence
  Synthetic oligonucleotide; GGG chr2 60525739 60525758 60525742 -
atctgaaaaccaggacacct

SEQ ID NO: 174986 - DNA, 20 bp, Artificial Sequence
  Synthetic oligonucleotide; GAG chr2 60525710 60525729 60525713 -
cccttattgtatcatgctgt

SEQ ID NO: 174987 - DNA, 20 bp, Artificial Sequence
  Synthetic oligonucleotide; TGG chr2 60525703 60525722 60525706 -
tgtatcatgctgtgagattt

SEQ ID NO: 174988 - DNA, 20 bp, Artificial Sequence
  Synthetic oligonucleotide; GGG chr2 60525702 60525721 60525705 -
gtatcatgctgtgagatttt

SEQ ID NO: 174989 - DNA, 20 bp, Artificial Sequence
  Synthetic oligonucleotide; TAG chr2 60525685 60525704 60525688 -
tttgggctcccttcacctgt

SEQ ID NO: 174990 - DNA, 20 bp, Artificial Sequence
  Synthetic oligonucleotide; AAG chr2 60525661 60525680 60525664 -
atttgtttccttgtcttgta

SEQ ID NO: 174991 - DNA, 20 bp, Artificial Sequence
  Synthetic oligonucleotide; TAG chr2 60525658 60525677 60525661 -
tgtttccttgtcttgtaaag

SEQ ID NO: 174992 - DNA, 20 bp, Artificial Sequence
  Synthetic oligonucleotide; AGG chr2 60525657 60525676 60525660 -
gtttccttgtcttgtaaagt

SEQ ID NO: 174993 - DNA, 20 bp, Artificial Sequence
  Synthetic oligonucleotide; TAG chr2 60525649 60525668 60525652 -
gtcttgtaaagtaggtaaaa

SEQ ID NO: 174994 - DNA, 20 bp, Artificial Sequence
  Synthetic oligonucleotide; TAG chr2 60525645 60525664 60525648 -
tgtaaagtaggtaaaataga

SEQ ID NO: 174995 - DNA, 20 bp, Artificial Sequence
  Synthetic oligonucleotide; TGG chr2 60525640 60525659 60525643 -
agtaggtaaaatagatagtt

SEQ ID NO: 174996 - DNA, 20 bp, Artificial Sequence
  Synthetic oligonucleotide; TGG chr2 60525635 60525654 60525638 -
gtaaaatagatagtttggac

SEQ ID NO: 174997 - DNA, 20 bp, Artificial Sequence
  Synthetic oligonucleotide; GGG chr2 60525634 60525653 60525637 -
taaaatagatagtttggact

SEQ ID NO: 174998 - DNA, 20 bp, Artificial Sequence
  Synthetic oligonucleotide; TGG chr2 60525631 60525650 60525634 -
aatagatagtttggactggg

SEQ ID NO: 174999 - DNA, 20 bp, Artificial Sequence
  Synthetic oligonucleotide; GGG chr2 60525630 60525649 60525633 -
atagatagtttggactgggt

SEQ ID NO: 175000 - DNA, 20 bp, Artificial Sequence
  Synthetic oligonucleotide; AAG chr2 60525622 60525641 60525625 -
tttggactgggtgggtctct

SEQ ID NO: 175001 - DNA, 20 bp, Artificial Sequence
  Synthetic oligonucleotide; TAG chr2 60525605 60525624 60525608 -
tctaagtccccatgatgttc

SEQ ID NO: 175002 - DNA, 20 bp, Artificial Sequence
  Synthetic oligonucleotide; TAG chr2 60525600 60525619 60525603 -
gtccccatgatgttctagca

SEQ ID NO: 175003 - DNA, 20 bp, Artificial Sequence
  Synthetic oligonucleotide; CAG chr2 60525581 60525600 60525584 -
atagtatgaacaccactgac

SEQ ID NO: 175004 - DNA, 20 bp, Artificial Sequence
  Synthetic oligonucleotide; TGG chr2 60525559 60525578 60525562 -
gttttctccctgctattttt

SEQ ID NO: 175005 - DNA, 20 bp, Artificial Sequence
  Synthetic oligonucleotide; TAG chr2 60525552 60525571 60525555 -
ccctgctattttttggaatc

SEQ ID NO: 175006 - DNA, 20 bp, Artificial Sequence
  Synthetic oligonucleotide; TGG chr2 60525541 60525560 60525544 -
tttggaatctagttgctgaa

SEQ ID NO: 175007 - DNA, 20 bp, Artificial Sequence
  Synthetic oligonucleotide; GGG chr2 60525540 60525559 60525543 -
ttggaatctagttgctgaat

SEQ ID NO: 175008 - DNA, 20 bp, Artificial Sequence
  Synthetic oligonucleotide; GGG chr2 60525539 60525558 60525542 -
tggaatctagttgctgaatg

SEQ ID NO: 175009 - DNA, 20 bp, Artificial Sequence
  Synthetic oligonucleotide; AAG chr2 60525526 60525545 60525529 -
ctgaatggggctcacctgca

SEQ ID NO: 175010 - DNA, 20 bp, Artificial Sequence
  Synthetic oligonucleotide; CAG chr2 60525522 60525541 60525525 -
atggggctcacctgcaaaga

SEQ ID NO: 175011 - DNA, 20 bp, Artificial Sequence
  Synthetic oligonucleotide; CAG chr2 60525519 60525538 60525522 -
gggctcacctgcaaagacag

SEQ ID NO: 175012 - DNA, 20 bp, Artificial Sequence
  Synthetic oligonucleotide; AAG chr2 60525491 60525510 60525494 -
tattttcttgatttgcctca

SEQ ID NO: 175013 - DNA, 20 bp, Artificial Sequence
  Synthetic oligonucleotide; TGG chr2 60525487 60525506 60525490 -
ttcttgatttgcctcaaaga

SEQ ID NO: 175014 - DNA, 20 bp, Artificial Sequence
  Synthetic oligonucleotide; AAG chr2 60525484 60525503 60525487 -
ttgatttgcctcaaagatgg

SEQ ID NO: 175015 - DNA, 20 bp, Artificial Sequence
  Synthetic oligonucleotide; TGG chr2 60525478 60525497 60525481 -
tgcctcaaagatggaagcta

SEQ ID NO: 175016 - DNA, 20 bp, Artificial Sequence
  Synthetic oligonucleotide; TGG chr2 60525475 60525494 60525478 -
ctcaaagatggaagctatgg

SEQ ID NO: 175017 - DNA, 20 bp, Artificial Sequence
  Synthetic oligonucleotide; GAG chr2 60525473 60525492 60525476 -
caaagatggaagctatggtg

SEQ ID NO: 175018 - DNA, 20 bp, Artificial Sequence
  Synthetic oligonucleotide; AAG chr2 60525467 60525486 60525470 -
tggaagctatggtggagatt

SEQ ID NO: 175019 - DNA, 20 bp, Artificial Sequence
  Synthetic oligonucleotide; AGG chr2 60525466 60525485 60525469 -
ggaagctatggtggagatta

SEQ ID NO: 175020 - DNA, 20 bp, Artificial Sequence
  Synthetic oligonucleotide; TGG chr2 60525461 60525480 60525464 -
ctatggtggagattaaggct

SEQ ID NO: 175021 - DNA, 20 bp, Artificial Sequence
  Synthetic oligonucleotide; CAG chr2 60525442 60525461 60525445 -
ttggattcgtgattccccaa

SEQ ID NO: 175022 - DNA, 20 bp, Artificial Sequence
  Synthetic oligonucleotide; AAG chr2 60525438 60525457 60525441 -
attcgtgattccccaacaga

SEQ ID NO: 175023 - DNA, 20 bp, Artificial Sequence
  Synthetic oligonucleotide; AAG chr2 60525431 60525450 60525434 -
attccccaacagaaagctta

SEQ ID NO: 175024 - DNA, 20 bp, Artificial Sequence
  Synthetic oligonucleotide; AGG chr2 60525430 60525449 60525433 -
ttccccaacagaaagcttaa

SEQ ID NO: 175025 - DNA, 20 bp, Artificial Sequence
  Synthetic oligonucleotide; TGG chr2 60525412 60525431 60525415 -
aaaggcatctttcaaattgc

SEQ ID NO: 175026 - DNA, 20 bp, Artificial Sequence
  Synthetic oligonucleotide; AAG chr2 60525409 60525428 60525412 -
ggcatctttcaaattgctgg

SEQ ID NO: 175027 - DNA, 20 bp, Artificial Sequence
  Synthetic oligonucleotide; AAG chr2 60525398 60525417 60525401 -
aattgctggaagcaaaattg

SEQ ID NO: 175028 - DNA, 20 bp, Artificial Sequence
  Synthetic oligonucleotide; CAG chr2 60525393 60525412 60525396 -
ctggaagcaaaattgaagtg

SEQ ID NO: 175029 - DNA, 20 bp, Artificial Sequence
  Synthetic oligonucleotide; TGG chr2 60525385 60525404 60525388 -
aaaattgaagtgcagtataa

SEQ ID NO: 175030 - DNA, 20 bp, Artificial Sequence
  Synthetic oligonucleotide; TGG chr2 60525380 60525399 60525383 -
tgaagtgcagtataatggaa

SEQ ID NO: 175031 - DNA, 20 bp, Artificial Sequence
  Synthetic oligonucleotide; CAG chr2 60525367 60525386 60525370 -
aatggaatggtgataattca

SEQ ID NO: 175032 - DNA, 20 bp, Artificial Sequence
  Synthetic oligonucleotide; AAG chr2 60525364 60525383 60525367 -
ggaatggtgataattcacag

SEQ ID NO: 175033 - DNA, 20 bp, Artificial Sequence
  Synthetic oligonucleotide; CAG chr2 60525357 60525376 60525360 -
tgataattcacagaagtttc

SEQ ID NO: 175034 - DNA, 20 bp, Artificial Sequence
  Synthetic oligonucleotide; AAG chr2 60525348 60525367 60525351 -
acagaagtttccagccttat

SEQ ID NO: 175035 - DNA, 20 bp, Artificial Sequence
  Synthetic oligonucleotide; AAG chr2 60525321 60525340 60525324 -
ctccatcttttaattgttgc

SEQ ID NO: 175036 - DNA, 20 bp, Artificial Sequence
  Synthetic oligonucleotide; AAG chr2 60525296 60525315 60525299 -
gttttttttgaaaaactcca

SEQ ID NO: 175037 - DNA, 20 bp, Artificial Sequence
  Synthetic oligonucleotide; AAG chr2 60525272 60525291 60525275 -
atgtaatgtgtattttctcc

SEQ ID NO: 175038 - DNA, 20 bp, Artificial Sequence
  Synthetic oligonucleotide; TGG chr2 60525259 60525278 60525262 -
tttctccaagtttgcttttt

SEQ ID NO: 175039 - DNA, 20 bp, Artificial Sequence
  Synthetic oligonucleotide; GGG chr2 60525258 60525277 60525261 -
ttctccaagtttgctttttt

SEQ ID NO: 175040 - DNA, 20 bp, Artificial Sequence
  Synthetic oligonucleotide; TAG chr2 60525235 60525254 60525238 -
caaatgtaactacatcaaaa

SEQ ID NO: 175041 - DNA, 20 bp, Artificial Sequence
  Synthetic oligonucleotide; AAG chr2 60525232 60525251 60525235 -
atgtaactacatcaaaatag

SEQ ID NO: 175042 - DNA, 20 bp, Artificial Sequence
  Synthetic oligonucleotide; AAG chr2 60525216 60525235 60525219 -
atagaagtacgtttttgaaa

SEQ ID NO: 175043 - DNA, 20 bp, Artificial Sequence
  Synthetic oligonucleotide; TAG chr2 60525210 60525229 60525213 -
gtacgtttttgaaaaagaaa

SEQ ID NO: 175044 - DNA, 20 bp, Artificial Sequence
  Synthetic oligonucleotide; CAG chr2 60525192 60525211 60525195 -
aatagttgaattcaaacaac

SEQ ID NO: 175045 - DNA, 20 bp, Artificial Sequence
  Synthetic oligonucleotide; AGG chr2 60525191 60525210 60525194 -
atagttgaattcaaacaacc

SEQ ID NO: 175046 - DNA, 20 bp, Artificial Sequence
  Synthetic oligonucleotide; CAG chr2 60525159 60525178 60525162 -
ttcaattaactgactgaatt

SEQ ID NO: 175047 - DNA, 20 bp, Artificial Sequence
  Synthetic oligonucleotide; AAG chr2 60525129 60525148 60525132 -
ttcctccttcctcctcccaa

SEQ ID NO: 175048 - DNA, 20 bp, Artificial Sequence
  Synthetic oligonucleotide; TGG chr2 60525125 60525144 60525128 -
tccttcctcctcccaaaagc

SEQ ID NO: 175049 - DNA, 20 bp, Artificial Sequence
  Synthetic oligonucleotide; TGG chr2 60525112 60525131 60525115 -
caaaagctggtttctctgta

SEQ ID NO: 175050 - DNA, 20 bp, Artificial Sequence
  Synthetic oligonucleotide; TAG chr2 60525106 60525125 60525109 -
ctggtttctctgtatggaca

SEQ ID NO: 175051 - DNA, 20 bp, Artificial Sequence
  Synthetic oligonucleotide; GAG chr2 60525091 60525110 60525094 -
ggacatagcctacatatgct

SEQ ID NO: 175052 - DNA, 20 bp, Artificial Sequence
  Synthetic oligonucleotide; TGG chr2 60525084 60525103 60525087 -
gcctacatatgctgagtccc

SEQ ID NO: 175053 - DNA, 20 bp, Artificial Sequence
  Synthetic oligonucleotide; GAG chr2 60525082 60525101 60525085 -
ctacatatgctgagtccctg

SEQ ID NO: 175054 - DNA, 20 bp, Artificial Sequence
  Synthetic oligonucleotide; TAG chr2 60525078 60525097 60525081 -
atatgctgagtccctggagt

SEQ ID NO: 175055 - DNA, 20 bp, Artificial Sequence
  Synthetic oligonucleotide; AGG chr2 60525077 60525096 60525080 -
tatgctgagtccctggagtt

SEQ ID NO: 175056 - DNA, 20 bp, Artificial Sequence
  Synthetic oligonucleotide; AAG chr2 60525059 60525078 60525062 -
ttaggaatttttgcttgtta

SEQ ID NO: 175057 - DNA, 20 bp, Artificial Sequence
  Synthetic oligonucleotide; AGG chr2 60525058 60525077 60525061 -
taggaatttttgcttgttaa

SEQ ID NO: 175058 - DNA, 20 bp, Artificial Sequence
  Synthetic oligonucleotide; TAG chr2 60525037 60525056 60525040 -
ggcatccgatgcaacatgtt

SEQ ID NO: 175059 - DNA, 20 bp, Artificial Sequence
  Synthetic oligonucleotide; AAG chr2 60525034 60525053 60525037 -
atccgatgcaacatgtttag

SEQ ID NO: 175060 - DNA, 20 bp, Artificial Sequence
  Synthetic oligonucleotide; TAG chr2 60525017 60525036 60525020 -
tagaagaactctccctctgt

SEQ ID NO: 175061 - DNA, 20 bp, Artificial Sequence
  Synthetic oligonucleotide; AAG chr2 60525009 60525028 60525012 -
ctctccctctgttagtgttg

SEQ ID NO: 175062 - DNA, 20 bp, Artificial Sequence
  Synthetic oligonucleotide; CAG chr2 60525005 60525024 60525008 -
ccctctgttagtgttgaaga

SEQ ID NO: 175063 - DNA, 20 bp, Artificial Sequence
  Synthetic oligonucleotide; GAG chr2 60524994 60525013 60524997 -
tgttgaagacagcataaatt

SEQ ID NO: 175064 - DNA, 20 bp, Artificial Sequence
  Synthetic oligonucleotide; AGG chr2 60524993 60525012 60524996 -
gttgaagacagcataaattg

SEQ ID NO: 175065 - DNA, 20 bp, Artificial Sequence
  Synthetic oligonucleotide; GGG chr2 60524992 60525011 60524995 -
ttgaagacagcataaattga

SEQ ID NO: 175066 - DNA, 20 bp, Artificial Sequence
  Synthetic oligonucleotide; TAG chr2 60524963 60524982 60524966 -
ttctttttttattcatcatg

SEQ ID NO: 175067 - DNA, 20 bp, Artificial Sequence
  Synthetic oligonucleotide; AGG chr2 60524962 60524981 60524965 -
tctttttttattcatcatgt

SEQ ID NO: 175068 - DNA, 20 bp, Artificial Sequence
  Synthetic oligonucleotide; AAG chr2 60524956 60524975 60524959 -
tttattcatcatgtaggtaa

SEQ ID NO: 175069 - DNA, 20 bp, Artificial Sequence
  Synthetic oligonucleotide; TGG chr2 60524949 60524968 60524952 -
atcatgtaggtaaaagcata

SEQ ID NO: 175070 - DNA, 20 bp, Artificial Sequence
  Synthetic oligonucleotide; TGG chr2 60524939 60524958 60524942 -
taaaagcatatggcctgttc

SEQ ID NO: 175071 - DNA, 20 bp, Artificial Sequence
  Synthetic oligonucleotide; GGG chr2 60524938 60524957 60524941 -
aaaagcatatggcctgttct

SEQ ID NO: 175072 - DNA, 20 bp, Artificial Sequence
  Synthetic oligonucleotide; TGG chr2 60524903 60524922 60524906 -
tgcaatccattttttaaact

SEQ ID NO: 175073 - DNA, 20 bp, Artificial Sequence
  Synthetic oligonucleotide; TGG chr2 60524890 60524909 60524893 -
ttaaacttggtgtttaccat

SEQ ID NO: 175074 - DNA, 20 bp, Artificial Sequence
  Synthetic oligonucleotide; TAG chr2 60524883 60524902 60524886 -
tggtgtttaccattggcttt

SEQ ID NO: 175075 - DNA, 20 bp, Artificial Sequence
  Synthetic oligonucleotide; CGG chr2 60524878 60524897 60524881 -
tttaccattggcttttagca

SEQ ID NO: 175076 - DNA, 20 bp, Artificial Sequence
  Synthetic oligonucleotide; CAG chr2 60524852 60524871 60524855 -
tttctgttttccacactgtc

SEQ ID NO: 175077 - DNA, 20 bp, Artificial Sequence
  Synthetic oligonucleotide; TGG chr2 60524832 60524851 60524835 -
cagcaaataccatttatatg

SEQ ID NO: 175078 - DNA, 20 bp, Artificial Sequence
  Synthetic oligonucleotide; GAG chr2 60524821 60524840 60524824 -
atttatatgtggcattgaat

SEQ ID NO: 175079 - DNA, 20 bp, Artificial Sequence
  Synthetic oligonucleotide; CAG chr2 60524804 60524823 60524807 -
aatgagatatgaaatgtttt

SEQ ID NO: 175080 - DNA, 20 bp, Artificial Sequence
  Synthetic oligonucleotide; AAG chr2 60524801 60524820 60524804 -
gagatatgaaatgttttcag

SEQ ID NO: 175081 - DNA, 20 bp, Artificial Sequence
  Synthetic oligonucleotide; AAG chr2 60524788 60524807 60524791 -
ttttcagaagcatgctgaaa

SEQ ID NO: 175082 - DNA, 20 bp, Artificial Sequence
  Synthetic oligonucleotide; AGG chr2 60524787 60524806 60524790 -
tttcagaagcatgctgaaaa

SEQ ID NO: 175083 - DNA, 20 bp, Artificial Sequence
  Synthetic oligonucleotide; GGG chr2 60524786 60524805 60524789 -
ttcagaagcatgctgaaaaa

SEQ ID NO: 175084 - DNA, 20 bp, Artificial Sequence
  Synthetic oligonucleotide; AAG chr2 60524777 60524796 60524780 -
atgctgaaaaagggcattca

SEQ ID NO: 175085 - DNA, 20 bp, Artificial Sequence
  Synthetic oligonucleotide; TGG chr2 60524766 60524785 60524769 -
gggcattcaaagttatcctt

SEQ ID NO: 175086 - DNA, 20 bp, Artificial Sequence
  Synthetic oligonucleotide; CAG chr2 60524722 60524741 60524725 -
cttttattatcccatgtgct

SEQ ID NO: 175087 - DNA, 20 bp, Artificial Sequence
  Synthetic oligonucleotide; GAG chr2 60524720 60524739 60524723 -
tttattatcccatgtgctca

SEQ ID NO: 175088 - DNA, 20 bp, Artificial Sequence
  Synthetic oligonucleotide; AAG chr2 60524716 60524735 60524719 -
ttatcccatgtgctcagagt

SEQ ID NO: 175089 - DNA, 20 bp, Artificial Sequence
  Synthetic oligonucleotide; AGG chr2 60524715 60524734 60524718 -
tatcccatgtgctcagagta

SEQ ID NO: 175090 - DNA, 20 bp, Artificial Sequence
  Synthetic oligonucleotide; GGG chr2 60524714 60524733 60524717 -
atcccatgtgctcagagtaa

SEQ ID NO: 175091 - DNA, 20 bp, Artificial Sequence
  Synthetic oligonucleotide; GGG chr2 60524713 60524732 60524716 -
tcccatgtgctcagagtaag

SEQ ID NO: 175092 - DNA, 20 bp, Artificial Sequence
  Synthetic oligonucleotide; CAG chr2 60524701 60524720 60524704 -
agagtaaggggcaaatgaat

SEQ ID NO: 175093 - DNA, 20 bp, Artificial Sequence
  Synthetic oligonucleotide; TAG chr2 60524677 60524696 60524680 -
tgtgaaatatgtgttccttg

SEQ ID NO: 175094 - DNA, 20 bp, Artificial Sequence
  Synthetic oligonucleotide; AGG chr2 60524676 60524695 60524679 -
gtgaaatatgtgttccttgt

SEQ ID NO: 175095 - DNA, 20 bp, Artificial Sequence
  Synthetic oligonucleotide; CAG chr2 60524670 60524689 60524673 -
tatgtgttccttgtaggaca

SEQ ID NO: 175096 - DNA, 20 bp, Artificial Sequence
  Synthetic oligonucleotide; AGG chr2 60524669 60524688 60524672 -
atgtgttccttgtaggacac

SEQ ID NO: 175097 - DNA, 20 bp, Artificial Sequence
  Synthetic oligonucleotide; GAG chr2 60524659 60524678 60524662 -
tgtaggacacaggcactctt

SEQ ID NO: 175098 - DNA, 20 bp, Artificial Sequence
  Synthetic oligonucleotide; TAG chr2 60524651 60524670 60524654 -
acaggcactcttgagatcta

SEQ ID NO: 175099 - DNA, 20 bp, Artificial Sequence
  Synthetic oligonucleotide; AAG chr2 60524638 60524657 60524641 -
agatctatagcttcaataaa

SEQ ID NO: 175100 - DNA, 20 bp, Artificial Sequence
  Synthetic oligonucleotide; AGG chr2 60524637 60524656 60524640 -
gatctatagcttcaataaaa

SEQ ID NO: 175101 - DNA, 20 bp, Artificial Sequence
  Synthetic oligonucleotide; TGG chr2 60524594 60524613 60524597 -
ctctttaatttataatgttt

SEQ ID NO: 175102 - DNA, 20 bp, Artificial Sequence
  Synthetic oligonucleotide; GGG chr2 60524593 60524612 60524596 -
tctttaatttataatgtttt

SEQ ID NO: 175103 - DNA, 20 bp, Artificial Sequence
  Synthetic oligonucleotide; GGG chr2 60524592 60524611 60524595 -
ctttaatttataatgttttg

SEQ ID NO: 175104 - DNA, 20 bp, Artificial Sequence
  Synthetic oligonucleotide; TAG chr2 60524581 60524600 60524584 -
aatgttttggggatttttaa

SEQ ID NO: 175105 - DNA, 20 bp, Artificial Sequence
  Synthetic oligonucleotide; AGG chr2 60524580 60524599 60524583 -
atgttttggggatttttaat

SEQ ID NO: 175106 - DNA, 20 bp, Artificial Sequence
  Synthetic oligonucleotide; AAG chr2 60524567 60524586 60524570 -
ttttaataggcatgctctgt

SEQ ID NO: 175107 - DNA, 20 bp, Artificial Sequence
  Synthetic oligonucleotide; AGG chr2 60524566 60524585 60524569 -
tttaataggcatgctctgta

SEQ ID NO: 175108 - DNA, 20 bp, Artificial Sequence
  Synthetic oligonucleotide; GGG chr2 60524565 60524584 60524568 -
ttaataggcatgctctgtaa

SEQ ID NO: 175109 - DNA, 20 bp, Artificial Sequence
  Synthetic oligonucleotide; TGG chr2 60524559 60524578 60524562 -
ggcatgctctgtaagggcac

SEQ ID NO: 175110 - DNA, 20 bp, Artificial Sequence
  Synthetic oligonucleotide; CAG chr2 60524552 60524571 60524555 -
tctgtaagggcactggtaat

SEQ ID NO: 175111 - DNA, 20 bp, Artificial Sequence
  Synthetic oligonucleotide; TGG chr2 60524518 60524537 60524521 -
tttgcatgctcttctatctc

SEQ ID NO: 175112 - DNA, 20 bp, Artificial Sequence
  Synthetic oligonucleotide; AAG chr2 60524491 60524510 60524494 -
aaaataaaatcttaaaaaac

SEQ ID NO: 175113 - DNA, 20 bp, Artificial Sequence
  Synthetic oligonucleotide; AAG chr2 60524484 60524503 60524487 -
aatcttaaaaaacaagaaaa

SEQ ID NO: 175114 - DNA, 20 bp, Artificial Sequence
  Synthetic oligonucleotide; AAG chr2 60524459 60524478 60524462 -
aaaaaaacaaaaacaaaaac

SEQ ID NO: 175115 - DNA, 20 bp, Artificial Sequence
  Synthetic oligonucleotide; AGG chr2 60524458 60524477 60524461 -
aaaaaacaaaaacaaaaaca

SEQ ID NO: 175116 - DNA, 20 bp, Artificial Sequence
  Synthetic oligonucleotide; AAG chr2 60524449 60524468 60524452 -
aaacaaaaacaaggaacata

SEQ ID NO: 175117 - DNA, 20 bp, Artificial Sequence
  Synthetic oligonucleotide; TAG chr2 60524444 60524463 60524447 -
aaaacaaggaacataaagtt

SEQ ID NO: 175118 - DNA, 20 bp, Artificial Sequence
  Synthetic oligonucleotide; AAG chr2 60524425 60524444 60524428 -
ttagccctaacccaacccaa

SEQ ID NO: 175119 - DNA, 20 bp, Artificial Sequence
  Synthetic oligonucleotide; CAG chr2 60524415 60524434 60524418 -
cccaacccaaaagcaaataa

SEQ ID NO: 175120 - DNA, 20 bp, Artificial Sequence
  Synthetic oligonucleotide; AGG chr2 60524414 60524433 60524417 -
ccaacccaaaagcaaataac

SEQ ID NO: 175121 - DNA, 20 bp, Artificial Sequence
  Synthetic oligonucleotide; TGG chr2 60524402 60524421 60524405 -
caaataacaggccgaatgaa

SEQ ID NO: 175122 - DNA, 20 bp, Artificial Sequence
  Synthetic oligonucleotide; CAG chr2 60524399 60524418 60524402 -
ataacaggccgaatgaatgg

SEQ ID NO: 175123 - DNA, 20 bp, Artificial Sequence
  Synthetic oligonucleotide; CAG chr2 60524391 60524410 60524394 -
ccgaatgaatggcagccccc

SEQ ID NO: 175124 - DNA, 20 bp, Artificial Sequence
  Synthetic oligonucleotide; GAG chr2 60524389 60524408 60524392 -
gaatgaatggcagcccccca

SEQ ID NO: 175125 - DNA, 20 bp, Artificial Sequence
  Synthetic oligonucleotide; AGG chr2 60524388 60524407 60524391 -
aatgaatggcagccccccag

SEQ ID NO: 175126 - DNA, 20 bp, Artificial Sequence
  Synthetic oligonucleotide; AAG chr2 60524351 60524370 60524354 -
tccattattacctgaaataa

SEQ ID NO: 175127 - DNA, 20 bp, Artificial Sequence
  Synthetic oligonucleotide; CAG chr2 60524331 60524350 60524334 -
aagcatgataacattcatgc

SEQ ID NO: 175128 - DNA, 20 bp, Artificial Sequence
  Synthetic oligonucleotide; GAG chr2 60524329 60524348 60524332 -
gcatgataacattcatgcca

SEQ ID NO: 175129 - DNA, 20 bp, Artificial Sequence
  Synthetic oligonucleotide; TAG chr2 60524325 60524344 60524328 -
gataacattcatgccagaga

SEQ ID NO: 175130 - DNA, 20 bp, Artificial Sequence
  Synthetic oligonucleotide; AGG chr2 60524324 60524343 60524327 -
ataacattcatgccagagat

SEQ ID NO: 175131 - DNA, 20 bp, Artificial Sequence
  Synthetic oligonucleotide; CAG chr2 60524304 60524323 60524307 -
aggtgacaaaattatgtatt

SEQ ID NO: 175132 - DNA, 20 bp, Artificial Sequence
  Synthetic oligonucleotide; AAG chr2 60524296 60524315 60524299 -
aaattatgtattcagacatg

SEQ ID NO: 175133 - DNA, 20 bp, Artificial Sequence
  Synthetic oligonucleotide; TAG chr2 60524291 60524310 60524294 -
atgtattcagacatgaagtt

SEQ ID NO: 175134 - DNA, 20 bp, Artificial Sequence
  Synthetic oligonucleotide; AGG chr2 60524290 60524309 60524293 -
tgtattcagacatgaagttt

SEQ ID NO: 175135 - DNA, 20 bp, Artificial Sequence
  Synthetic oligonucleotide; TAG chr2 60524281 60524300 60524284 -
acatgaagtttaggatttca

SEQ ID NO: 175136 - DNA, 20 bp, Artificial Sequence
  Synthetic oligonucleotide; CAG chr2 60524228 60524247 60524231 -
attgtgttgtgcaaatgtat

SEQ ID NO: 175137 - DNA, 20 bp, Artificial Sequence
  Synthetic oligonucleotide; TAG chr2 60524203 60524222 60524206 -
gttgtattgttaatgcatga

SEQ ID NO: 175138 - DNA, 20 bp, Artificial Sequence
  Synthetic oligonucleotide; AGG chr2 60524202 60524221 60524205 -
ttgtattgttaatgcatgat

SEQ ID NO: 175139 - DNA, 20 bp, Artificial Sequence
  Synthetic oligonucleotide; AAG chr2 60524199 60524218 60524202 -
tattgttaatgcatgatagg

SEQ ID NO: 175140 - DNA, 20 bp, Artificial Sequence
  Synthetic oligonucleotide; TAG chr2 60524189 60524208 60524192 -
gcatgataggaagctgccgc

SEQ ID NO: 175141 - DNA, 20 bp, Artificial Sequence
  Synthetic oligonucleotide; AGG chr2 60524188 60524207 60524191 -
catgataggaagctgccgct

SEQ ID NO: 175142 - DNA, 20 bp, Artificial Sequence
  Synthetic oligonucleotide; CAG chr2 60524184 60524203 60524187 -
ataggaagctgccgctagga

SEQ ID NO: 175143 - DNA, 20 bp, Artificial Sequence
  Synthetic oligonucleotide; TGG chr2 60524178 60524197 60524181 -
agctgccgctaggacagtct

SEQ ID NO: 175144 - DNA, 20 bp, Artificial Sequence
  Synthetic oligonucleotide; CGG chr2 60524165 60524184 60524168 -
acagtcttggctcactaatg

SEQ ID NO: 175145 - DNA, 20 bp, Artificial Sequence
  Synthetic oligonucleotide; CAG chr2 60524161 60524180 60524164 -
tcttggctcactaatgcggt

SEQ ID NO: 175146 - DNA, 20 bp, Artificial Sequence
  Synthetic oligonucleotide; TAG chr2 60524138 60524157 60524141 -
ctgtgtcacaatgtgatata

SEQ ID NO: 175147 - DNA, 20 bp, Artificial Sequence
  Synthetic oligonucleotide; TGG chr2 60524122 60524141 60524125 -
tatatagattatatttacca

SEQ ID NO: 175148 - DNA, 20 bp, Artificial Sequence
  Synthetic oligonucleotide; TGG chr2 60524101 60524120 60524104 -
ggcatattttgtttgcgaaa

SEQ ID NO: 175149 - DNA, 20 bp, Artificial Sequence
  Synthetic oligonucleotide; GGG chr2 60524100 60524119 60524103 -
gcatattttgtttgcgaaat

SEQ ID NO: 175150 - DNA, 20 bp, Artificial Sequence
  Synthetic oligonucleotide; GAG chr2 60524098 60524117 60524101 -
atattttgtttgcgaaatgg

SEQ ID NO: 175151 - DNA, 20 bp, Artificial Sequence
  Synthetic oligonucleotide; CGG chr2 60524095 60524114 60524098 -
ttttgtttgcgaaatgggag

SEQ ID NO: 175152 - DNA, 20 bp, Artificial Sequence
  Synthetic oligonucleotide; AAG chr2 60524082 60524101 60524085 -
atgggagcggatgataaatg

SEQ ID NO: 175153 - DNA, 20 bp, Artificial Sequence
  Synthetic oligonucleotide; CAG chr2 60524071 60524090 60524074 -
tgataaatgaagataccctc

SEQ ID NO: 175154 - DNA, 20 bp, Artificial Sequence
  Synthetic oligonucleotide; TAG chr2 60524059 60524078 60524062 -
ataccctccagttttcacac

SEQ ID NO: 175155 - DNA, 20 bp, Artificial Sequence
  Synthetic oligonucleotide; TGG chr2 60524050 60524069 60524053 -
agttttcacactagttcctg

SEQ ID NO: 175156 - DNA, 20 bp, Artificial Sequence
  Synthetic oligonucleotide; CGG chr2 60524045 60524064 60524048 -
tcacactagttcctgtggtc

SEQ ID NO: 175157 - DNA, 20 bp, Artificial Sequence
  Synthetic oligonucleotide; GAG chr2 60524043 60524062 60524046 -
acactagttcctgtggtccg

SEQ ID NO: 175158 - DNA, 20 bp, Artificial Sequence
  Synthetic oligonucleotide; AAG chr2 60524026 60524045 60524029 -
ccggagtctctcaaacaata

SEQ ID NO: 175159 - DNA, 20 bp, Artificial Sequence
  Synthetic oligonucleotide; TGG chr2 60524011 60524030 60524014 -
caataaagcacccctgataa

SEQ ID NO: 175160 - DNA, 20 bp, Artificial Sequence
  Synthetic oligonucleotide; GAG chr2 60524009 60524028 60524012 -
ataaagcacccctgataatg

SEQ ID NO: 175161 - DNA, 20 bp, Artificial Sequence
  Synthetic oligonucleotide; GAG chr2 60524007 60524026 60524010 -
aaagcacccctgataatgga

SEQ ID NO: 175162 - DNA, 20 bp, Artificial Sequence
  Synthetic oligonucleotide; AGG chr2 60524006 60524025 60524009 -
aagcacccctgataatggag

SEQ ID NO: 175163 - DNA, 20 bp, Artificial Sequence
  Synthetic oligonucleotide; TGG chr2 60523997 60524016 60524000 -
tgataatggagaggtattta

SEQ ID NO: 175164 - DNA, 20 bp, Artificial Sequence
  Synthetic oligonucleotide; GGG chr2 60523996 60524015 60523999 -
gataatggagaggtatttat

SEQ ID NO: 175165 - DNA, 20 bp, Artificial Sequence
  Synthetic oligonucleotide; AAG chr2 60523977 60523996 60523980 -
tgggaacataattgacttca

SEQ ID NO: 175166 - DNA, 20 bp, Artificial Sequence
  Synthetic oligonucleotide; TAG chr2 60523971 60523990 60523974 -
cataattgacttcaaagttt

SEQ ID NO: 175167 - DNA, 20 bp, Artificial Sequence
  Synthetic oligonucleotide; TGG chr2 60523963 60523982 60523966 -
acttcaaagttttagatctc

SEQ ID NO: 175168 - DNA, 20 bp, Artificial Sequence
  Synthetic oligonucleotide; AAG chr2 60523957 60523976 60523960 -
aagttttagatctctggctg

SEQ ID NO: 175169 - DNA, 20 bp, Artificial Sequence
  Synthetic oligonucleotide; AAG chr2 60523951 60523970 60523954 -
tagatctctggctgaagttt

SEQ ID NO: 175170 - DNA, 20 bp, Artificial Sequence
  Synthetic oligonucleotide; TGG chr2 60523947 60523966 60523950 -
tctctggctgaagtttaaga

SEQ ID NO: 175171 - DNA, 20 bp, Artificial Sequence
  Synthetic oligonucleotide; GGG chr2 60523946 60523965 60523949 -
ctctggctgaagtttaagat

SEQ ID NO: 175172 - DNA, 20 bp, Artificial Sequence
  Synthetic oligonucleotide; TAG chr2 60523942 60523961 60523945 -
ggctgaagtttaagatggga

SEQ ID NO: 175173 - DNA, 20 bp, Artificial Sequence
  Synthetic oligonucleotide; AAG chr2 60523914 60523933 60523917 -
tacattaatgtctgtgctta

SEQ ID NO: 175174 - DNA, 20 bp, Artificial Sequence
  Synthetic oligonucleotide; TGG chr2 60523903 60523922 60523906 -
ctgtgcttaaagctcctatt

SEQ ID NO: 175175 - DNA, 20 bp, Artificial Sequence
  Synthetic oligonucleotide; TAG chr2 60523885 60523904 60523888 -
tttggcttaaataaattatt

SEQ ID NO: 175176 - DNA, 20 bp, Artificial Sequence
  Synthetic oligonucleotide; AGG chr2 60523884 60523903 60523887 -
ttggcttaaataaattattt

SEQ ID NO: 175177 - DNA, 20 bp, Artificial Sequence
  Synthetic oligonucleotide; GGG chr2 60523883 60523902 60523886 -
tggcttaaataaattattta

SEQ ID NO: 175178 - DNA, 20 bp, Artificial Sequence
  Synthetic oligonucleotide; TGG chr2 60523864 60523883 60523867 -
agggtttactgcttaaacct

SEQ ID NO: 175179 - DNA, 20 bp, Artificial Sequence
  Synthetic oligonucleotide; TGG chr2 60523845 60523864 60523848 -
ttggtcaattcttgaacgtt

SEQ ID NO: 175180 - DNA, 20 bp, Artificial Sequence
  Synthetic oligonucleotide; GGG chr2 60523844 60523863 60523847 -
tggtcaattcttgaacgttt

SEQ ID NO: 175181 - DNA, 20 bp, Artificial Sequence
  Synthetic oligonucleotide; TAG chr2 60523840 60523859 60523843 -
caattcttgaacgtttgggc

SEQ ID NO: 175182 - DNA, 20 bp, Artificial Sequence
  Synthetic oligonucleotide; AAG chr2 60523835 60523854 60523838 -
cttgaacgtttgggctagtt

SEQ ID NO: 175183 - DNA, 20 bp, Artificial Sequence
  Synthetic oligonucleotide; CAG chr2 60523824 60523843 60523827 -
gggctagttaagtaattttc

SEQ ID NO: 175184 - DNA, 20 bp, Artificial Sequence
  Synthetic oligonucleotide; TGG chr2 60523806 60523825 60523809 -
tccagtgactttctgtgcct

SEQ ID NO: 175185 - DNA, 20 bp, Artificial Sequence
  Synthetic oligonucleotide; GAG chr2 60523785 60523804 60523788 -
ggtgattcatttacttgatt

SEQ ID NO: 175186 - DNA, 20 bp, Artificial Sequence
  Synthetic oligonucleotide; AAG chr2 60523745 60523764 60523748 -
gatttctaaatgtatttctc

SEQ ID NO: 175187 - DNA, 20 bp, Artificial Sequence
  Synthetic oligonucleotide; TGG chr2 60523735 60523754 60523738 -
tgtatttctcaagttttgcc

SEQ ID NO: 175188 - DNA, 20 bp, Artificial Sequence
  Synthetic oligonucleotide; TGG chr2 60523712 60523731 60523715 -
caatgaatgattttgcttac

SEQ ID NO: 175189 - DNA, 20 bp, Artificial Sequence
  Synthetic oligonucleotide; GAG chr2 60523710 60523729 60523713 -
atgaatgattttgcttactg

SEQ ID NO: 175190 - DNA, 20 bp, Artificial Sequence
  Synthetic oligonucleotide; TGG chr2 60523700 60523719 60523703 -
ttgcttactggagtcttgtg

SEQ ID NO: 175191 - DNA, 20 bp, Artificial Sequence
  Synthetic oligonucleotide; AAG chr2 60523686 60523705 60523689 -
cttgtgtggtacacctataa

SEQ ID NO: 175192 - DNA, 20 bp, Artificial Sequence
  Synthetic oligonucleotide; AGG chr2 60523685 60523704 60523688 -
ttgtgtggtacacctataaa

SEQ ID NO: 175193 - DNA, 20 bp, Artificial Sequence
  Synthetic oligonucleotide; AAG chr2 60523624 60523643 60523627 -
cacatcaacactgtcatcat

SEQ ID NO: 175194 - DNA, 20 bp, Artificial Sequence
  Synthetic oligonucleotide; AAG chr2 60523618 60523637 60523621 -
aacactgtcatcataagata

SEQ ID NO: 175195 - DNA, 20 bp, Artificial Sequence
  Synthetic oligonucleotide; TAG chr2 60523530 60523549 60523533 -
tgcatgtatgaatatatata

SEQ ID NO: 175196 - DNA, 20 bp, Artificial Sequence
  Synthetic oligonucleotide; TAG chr2 60523508 60523527 60523511 -
gttgtgtgcctgtgtgtgtg

SEQ ID NO: 175197 - DNA, 20 bp, Artificial Sequence
  Synthetic oligonucleotide; AAG chr2 60523504 60523523 60523507 -
tgtgcctgtgtgtgtgtaga

SEQ ID NO: 175198 - DNA, 20 bp, Artificial Sequence
  Synthetic oligonucleotide; AGG chr2 60523503 60523522 60523506 -
gtgcctgtgtgtgtgtagaa

SEQ ID NO: 175199 - DNA, 20 bp, Artificial Sequence
  Synthetic oligonucleotide; GGG chr2 60523502 60523521 60523505 -
tgcctgtgtgtgtgtagaaa

SEQ ID NO: 175200 - DNA, 20 bp, Artificial Sequence
  Synthetic oligonucleotide; GAG chr2 60523500 60523519 60523503 -
cctgtgtgtgtgtagaaagg

SEQ ID NO: 175201 - DNA, 20 bp, Artificial Sequence
  Synthetic oligonucleotide; GAG chr2 60523498 60523517 60523501 -
tgtgtgtgtgtagaaaggga

SEQ ID NO: 175202 - DNA, 20 bp, Artificial Sequence
  Synthetic oligonucleotide; GAG chr2 60523496 60523515 60523499 -
tgtgtgtgtagaaagggaga

SEQ ID NO: 175203 - DNA, 20 bp, Artificial Sequence
  Synthetic oligonucleotide; GAG chr2 60523494 60523513 60523497 -
tgtgtgtagaaagggagaga

SEQ ID NO: 175204 - DNA, 20 bp, Artificial Sequence
  Synthetic oligonucleotide; GAG chr2 60523492 60523511 60523495 -
tgtgtagaaagggagagaga

SEQ ID NO: 175205 - DNA, 20 bp, Artificial Sequence
  Synthetic oligonucleotide; TAG chr2 60523487 60523506 60523490 -
agaaagggagagagagagaa

SEQ ID NO: 175206 - DNA, 20 bp, Artificial Sequence
  Synthetic oligonucleotide; AGG chr2 60523486 60523505 60523489 -
gaaagggagagagagagaat

SEQ ID NO: 175207 - DNA, 20 bp, Artificial Sequence
  Synthetic oligonucleotide; AAG chr2 60523482 60523501 60523485 -
gggagagagagagaatagga

SEQ ID NO: 175208 - DNA, 20 bp, Artificial Sequence
  Synthetic oligonucleotide; TAG chr2 60523475 60523494 60523478 -
agagagaataggaaagtctt

SEQ ID NO: 175209 - DNA, 20 bp, Artificial Sequence
  Synthetic oligonucleotide; TAG chr2 60523444 60523463 60523447 -
atgattccatcaaatcaata

SEQ ID NO: 175210 - DNA, 20 bp, Artificial Sequence
  Synthetic oligonucleotide; AAG chr2 60523441 60523460 60523444 -
attccatcaaatcaatatag

SEQ ID NO: 175211 - DNA, 20 bp, Artificial Sequence
  Synthetic oligonucleotide; AAG chr2 60523431 60523450 60523434 -
atcaatatagaagtttttga

SEQ ID NO: 175212 - DNA, 20 bp, Artificial Sequence
  Synthetic oligonucleotide; TAG chr2 60523419 60523438 60523422 -
gtttttgaaagctatccatg

SEQ ID NO: 175213 - DNA, 20 bp, Artificial Sequence
  Synthetic oligonucleotide; AAG chr2 60523389 60523408 60523392 -
ttttcatcaaaatctgactt

SEQ ID NO: 175214 - DNA, 20 bp, Artificial Sequence
  Synthetic oligonucleotide; AAG chr2 60523359 60523378 60523362 -
tctccatactatttatctga

SEQ ID NO: 175215 - DNA, 20 bp, Artificial Sequence
  Synthetic oligonucleotide; TAG chr2 60523343 60523362 60523346 -
ctgaaagtctgttgttcaca

SEQ ID NO: 175216 - DNA, 20 bp, Artificial Sequence
  Synthetic oligonucleotide; TGG chr2 60523337 60523356 60523340 -
gtctgttgttcacatagcgc

SEQ ID NO: 175217 - DNA, 20 bp, Artificial Sequence
  Synthetic oligonucleotide; GAG chr2 60523331 60523350 60523334 -
tgttcacatagcgctggatt

SEQ ID NO: 175218 - DNA, 20 bp, Artificial Sequence
  Synthetic oligonucleotide; AGG chr2 60523330 60523349 60523333 -
gttcacatagcgctggattg

SEQ ID NO: 175219 - DNA, 20 bp, Artificial Sequence
  Synthetic oligonucleotide; TAG chr2 60523323 60523342 60523326 -
tagcgctggattgaggatca

SEQ ID NO: 175220 - DNA, 20 bp, Artificial Sequence
  Synthetic oligonucleotide; TGG chr2 60523320 60523339 60523323 -
cgctggattgaggatcatag

SEQ ID NO: 175221 - DNA, 20 bp, Artificial Sequence
  Synthetic oligonucleotide; TAG chr2 60523311 60523330 60523314 -
gaggatcatagtggcaaatt

SEQ ID NO: 175222 - DNA, 20 bp, Artificial Sequence
  Synthetic oligonucleotide; AGG chr2 60523310 60523329 60523313 -
aggatcatagtggcaaattt

SEQ ID NO: 175223 - DNA, 20 bp, Artificial Sequence
  Synthetic oligonucleotide; GAG chr2 60523308 60523327 60523311 -
gatcatagtggcaaatttag

SEQ ID NO: 175224 - DNA, 20 bp, Artificial Sequence
  Synthetic oligonucleotide; CAG chr2 60523302 60523321 60523305 -
agtggcaaatttaggagcaa

SEQ ID NO: 175225 - DNA, 20 bp, Artificial Sequence
  Synthetic oligonucleotide; AAG chr2 60523295 60523314 60523298 -
aatttaggagcaacagtccc

SEQ ID NO: 175226 - DNA, 20 bp, Artificial Sequence
  Synthetic oligonucleotide; CAG chr2 60523292 60523311 60523295 -
ttaggagcaacagtcccaag

SEQ ID NO: 175227 - DNA, 20 bp, Artificial Sequence
  Synthetic oligonucleotide; AGG chr2 60523291 60523310 60523294 -
taggagcaacagtcccaagc

SEQ ID NO: 175228 - DNA, 20 bp, Artificial Sequence
  Synthetic oligonucleotide; TGG chr2 60523283 60523302 60523286 -
acagtcccaagcaggaatcc

SEQ ID NO: 175229 - DNA, 20 bp, Artificial Sequence
  Synthetic oligonucleotide; TGG chr2 60523279 60523298 60523282 -
tcccaagcaggaatcctgga

SEQ ID NO: 175230 - DNA, 20 bp, Artificial Sequence
  Synthetic oligonucleotide; CAG chr2 60523276 60523295 60523279 -
caagcaggaatcctggatgg

SEQ ID NO: 175231 - DNA, 20 bp, Artificial Sequence
  Synthetic oligonucleotide; AGG chr2 60523275 60523294 60523278 -
aagcaggaatcctggatggc

SEQ ID NO: 175232 - DNA, 20 bp, Artificial Sequence
  Synthetic oligonucleotide; GAG chr2 60523252 60523271 60523255 -
ctgtcctttgtgcctcccct

SEQ ID NO: 175233 - DNA, 20 bp, Artificial Sequence
  Synthetic oligonucleotide; GAG chr2 60523247 60523266 60523250 -
ctttgtgcctcccctgagtt

SEQ ID NO: 175234 - DNA, 20 bp, Artificial Sequence
  Synthetic oligonucleotide; AAG chr2 60523244 60523263 60523247 -
tgtgcctcccctgagttgag

SEQ ID NO: 175235 - DNA, 20 bp, Artificial Sequence
  Synthetic oligonucleotide; TGG chr2 60523239 60523258 60523242 -
ctcccctgagttgagaagac

SEQ ID NO: 175236 - DNA, 20 bp, Artificial Sequence
  Synthetic oligonucleotide; TAG chr2 60523221 60523240 60523224 -
actggtgtttattctttctc

SEQ ID NO: 175237 - DNA, 20 bp, Artificial Sequence
  Synthetic oligonucleotide; AGG chr2 60523220 60523239 60523223 -
ctggtgtttattctttctct

SEQ ID NO: 175238 - DNA, 20 bp, Artificial Sequence
  Synthetic oligonucleotide; CGG chr2 60523181 60523200 60523184 -
cttgaaatctcccttcttta

SEQ ID NO: 175239 - DNA, 20 bp, Artificial Sequence
  Synthetic oligonucleotide; GAG chr2 60523169 60523188 60523172 -
cttctttacggttctgccat

SEQ ID NO: 175240 - DNA, 20 bp, Artificial Sequence
  Synthetic oligonucleotide; TGG chr2 60523138 60523157 60523141 -
ctgtgacctgcctctgcatc

SEQ ID NO: 175241 - DNA, 20 bp, Artificial Sequence
  Synthetic oligonucleotide; TGG chr2 60523130 60523149 60523133 -
tgcctctgcatctggttaaa

SEQ ID NO: 175242 - DNA, 20 bp, Artificial Sequence
  Synthetic oligonucleotide; CAG chr2 60523123 60523142 60523126 -
gcatctggttaaatggactt

SEQ ID NO: 175243 - DNA, 20 bp, Artificial Sequence
  Synthetic oligonucleotide; CAG chr2 60523109 60523128 60523112 -
ggacttcagtaatctgtaca

SEQ ID NO: 175244 - DNA, 20 bp, Artificial Sequence
  Synthetic oligonucleotide; AAG chr2 60523079 60523098 60523082 -
ttacttattttatatcctga

SEQ ID NO: 175245 - DNA, 20 bp, Artificial Sequence
  Synthetic oligonucleotide; AAG chr2 60523071 60523090 60523074 -
tttatatcctgaaagatatt

SEQ ID NO: 175246 - DNA, 20 bp, Artificial Sequence
  Synthetic oligonucleotide; AAG chr2 60523062 60523081 60523065 -
tgaaagatattaagtccaac

SEQ ID NO: 175247 - DNA, 20 bp, Artificial Sequence
  Synthetic oligonucleotide; CAG chr2 60523049 60523068 60523052 -
gtccaacaagcttttaccca

SEQ ID NO: 175248 - DNA, 20 bp, Artificial Sequence
  Synthetic oligonucleotide; GAG chr2 60523047 60523066 60523050 -
ccaacaagcttttacccaca

SEQ ID NO: 175249 - DNA, 20 bp, Artificial Sequence
  Synthetic oligonucleotide; CAG chr2 60523040 60523059 60523043 -
gcttttacccacagagtcta

SEQ ID NO: 175250 - DNA, 20 bp, Artificial Sequence
  Synthetic oligonucleotide; GAG chr2 60523038 60523057 60523041 -
ttttacccacagagtctaca

SEQ ID NO: 175251 - DNA, 20 bp, Artificial Sequence
  Synthetic oligonucleotide; CGG chr2 60523031 60523050 60523034 -
cacagagtctacagagaaaa

SEQ ID NO: 175252 - DNA, 20 bp, Artificial Sequence
  Synthetic oligonucleotide; CAG chr2 60523027 60523046 60523030 -
gagtctacagagaaaacggc

SEQ ID NO: 175253 - DNA, 20 bp, Artificial Sequence
  Synthetic oligonucleotide; AGG chr2 60523026 60523045 60523029 -
agtctacagagaaaacggcc

SEQ ID NO: 175254 - DNA, 20 bp, Artificial Sequence
  Synthetic oligonucleotide; TGG chr2 60522994 60523013 60522997 -
tttcaatctctgtgtctctc

SEQ ID NO: 175255 - DNA, 20 bp, Artificial Sequence
  Synthetic oligonucleotide; GAG chr2 60522992 60523011 60522995 -
tcaatctctgtgtctctctg

SEQ ID NO: 175256 - DNA, 20 bp, Artificial Sequence
  Synthetic oligonucleotide; TAG chr2 60522986 60523005 60522989 -
tctgtgtctctctggagcac

SEQ ID NO: 175257 - DNA, 20 bp, Artificial Sequence
  Synthetic oligonucleotide; CAG chr2 60522980 60522999 60522983 -
tctctctggagcactagttc

SEQ ID NO: 175258 - DNA, 20 bp, Artificial Sequence
  Synthetic oligonucleotide; GAG chr2 60522978 60522997 60522981 -
tctctggagcactagttcca

SEQ ID NO: 175259 - DNA, 20 bp, Artificial Sequence
  Synthetic oligonucleotide; AGG chr2 60522977 60522996 60522980 -
ctctggagcactagttccag

SEQ ID NO: 175260 - DNA, 20 bp, Artificial Sequence
  Synthetic oligonucleotide; TAG chr2 60522966 60522985 60522969 -
tagttccagaggctgatcaa

SEQ ID NO: 175261 - DNA, 20 bp, Artificial Sequence
  Synthetic oligonucleotide; AGG chr2 60522965 60522984 60522968 -
agttccagaggctgatcaat

SEQ ID NO: 175262 - DNA, 20 bp, Artificial Sequence
  Synthetic oligonucleotide; TAG chr2 60522954 60522973 60522957 -
ctgatcaataggttttattg

SEQ ID NO: 175263 - DNA, 20 bp, Artificial Sequence
  Synthetic oligonucleotide; AAG chr2 60522935 60522954 60522938 -
gtagacctcactgtctctaa

SEQ ID NO: 175264 - DNA, 20 bp, Artificial Sequence
  Synthetic oligonucleotide; TAG chr2 60522906 60522925 60522909 -
gaccttatcctgtctaaaaa

SEQ ID NO: 175265 - DNA, 20 bp, Artificial Sequence
  Synthetic oligonucleotide; CAG chr2 60522887 60522906 60522890 -
atagtatttgctcttgcctg

SEQ ID NO: 175266 - DNA, 20 bp, Artificial Sequence
  Synthetic oligonucleotide; TGG chr2 60522860 60522879 60522863 -
ttgacctgtgaaaacccatt

SEQ ID NO: 175267 - DNA, 20 bp, Artificial Sequence
  Synthetic oligonucleotide; TAG chr2 60522840 60522859 60522843 -
tggaacataactgacatatc

SEQ ID NO: 175268 - DNA, 20 bp, Artificial Sequence
  Synthetic oligonucleotide; CAG chr2 60522836 60522855 60522839 -
acataactgacatatctagt

SEQ ID NO: 175269 - DNA, 20 bp, Artificial Sequence
  Synthetic oligonucleotide; AAG chr2 60522823 60522842 60522826 -
atctagtcagctgtatatcc

SEQ ID NO: 175270 - DNA, 20 bp, Artificial Sequence
  Synthetic oligonucleotide; CAG chr2 60522795 60522814 60522798 -
ctctgtgaatgaattctgtg

SEQ ID NO: 175271 - DNA, 20 bp, Artificial Sequence
  Synthetic oligonucleotide; CAG chr2 60522785 60522804 60522788 -
gaattctgtgcagaaccgtc

SEQ ID NO: 175272 - DNA, 20 bp, Artificial Sequence
  Synthetic oligonucleotide; AGG chr2 60522784 60522803 60522787 -
aattctgtgcagaaccgtcc

SEQ ID NO: 175273 - DNA, 20 bp, Artificial Sequence
  Synthetic oligonucleotide; GAG chr2 60522782 60522801 60522785 -
ttctgtgcagaaccgtccag

SEQ ID NO: 175274 - DNA, 20 bp, Artificial Sequence
  Synthetic oligonucleotide; AAG chr2 60522766 60522785 60522769 -
ccaggagaacactttcttcc

SEQ ID NO: 175275 - DNA, 20 bp, Artificial Sequence
  Synthetic oligonucleotide; CAG chr2 60522751 60522770 60522754 -
cttccaagacaaatgaattc

SEQ ID NO: 175276 - DNA, 20 bp, Artificial Sequence
  Synthetic oligonucleotide; TGG chr2 60522738 60522757 60522741 -
tgaattccagttctgaacac

SEQ ID NO: 175277 - DNA, 20 bp, Artificial Sequence
  Synthetic oligonucleotide; GGG chr2 60522737 60522756 60522740 -
gaattccagttctgaacact

SEQ ID NO: 175278 - DNA, 20 bp, Artificial Sequence
  Synthetic oligonucleotide; GAG chr2 60522735 60522754 60522738 -
attccagttctgaacactgg

SEQ ID NO: 175279 - DNA, 20 bp, Artificial Sequence
  Synthetic oligonucleotide; CGG chr2 60522719 60522738 60522722 -
ctgggagtgcacctgcttgt

SEQ ID NO: 175280 - DNA, 20 bp, Artificial Sequence
  Synthetic oligonucleotide; TGG chr2 60522713 60522732 60522716 -
gtgcacctgcttgtcggatg

SEQ ID NO: 175281 - DNA, 20 bp, Artificial Sequence
  Synthetic oligonucleotide; TGG chr2 60522707 60522726 60522710 -
ctgcttgtcggatgtggtga

SEQ ID NO: 175282 - DNA, 20 bp, Artificial Sequence
  Synthetic oligonucleotide; GGG chr2 60522706 60522725 60522709 -
tgcttgtcggatgtggtgat

SEQ ID NO: 175283 - DNA, 20 bp, Artificial Sequence
  Synthetic oligonucleotide; TGG chr2 60522698 60522717 60522701 -
ggatgtggtgatgggccaca

SEQ ID NO: 175284 - DNA, 20 bp, Artificial Sequence
  Synthetic oligonucleotide; TGG chr2 60522695 60522714 60522698 -
tgtggtgatgggccacatgg

SEQ ID NO: 175285 - DNA, 20 bp, Artificial Sequence
  Synthetic oligonucleotide; GGG chr2 60522694 60522713 60522697 -
gtggtgatgggccacatggt

SEQ ID NO: 175286 - DNA, 20 bp, Artificial Sequence
  Synthetic oligonucleotide; GGG chr2 60522693 60522712 60522696 -
tggtgatgggccacatggtg

SEQ ID NO: 175287 - DNA, 20 bp, Artificial Sequence
  Synthetic oligonucleotide; GAG chr2 60522691 60522710 60522694 -
gtgatgggccacatggtggg

SEQ ID NO: 175288 - DNA, 20 bp, Artificial Sequence
  Synthetic oligonucleotide; GAG chr2 60522687 60522706 60522690 -
tgggccacatggtggggagt

SEQ ID NO: 175289 - DNA, 20 bp, Artificial Sequence
  Synthetic oligonucleotide; AGG chr2 60522686 60522705 60522689 -
gggccacatggtggggagtg

SEQ ID NO: 175290 - DNA, 20 bp, Artificial Sequence
  Synthetic oligonucleotide; GGG chr2 60522685 60522704 60522688 -
ggccacatggtggggagtga

SEQ ID NO: 175291 - DNA, 20 bp, Artificial Sequence
  Synthetic oligonucleotide; GAG chr2 60522683 60522702 60522686 -
ccacatggtggggagtgagg

SEQ ID NO: 175292 - DNA, 20 bp, Artificial Sequence
  Synthetic oligonucleotide; CAG chr2 60522677 60522696 60522680 -
ggtggggagtgagggagact

SEQ ID NO: 175293 - DNA, 20 bp, Artificial Sequence
  Synthetic oligonucleotide; AGG chr2 60522676 60522695 60522679 -
gtggggagtgagggagactc

SEQ ID NO: 175294 - DNA, 20 bp, Artificial Sequence
  Synthetic oligonucleotide; GGG chr2 60522675 60522694 60522678 -
tggggagtgagggagactca

SEQ ID NO: 175295 - DNA, 20 bp, Artificial Sequence
  Synthetic oligonucleotide; TGG chr2 60522668 60522687 60522671 -
tgagggagactcagggcctg

SEQ ID NO: 175296 - DNA, 20 bp, Artificial Sequence
  Synthetic oligonucleotide; GGG chr2 60522667 60522686 60522670 -
gagggagactcagggcctgt

SEQ ID NO: 175297 - DNA, 20 bp, Artificial Sequence
  Synthetic oligonucleotide; GGG chr2 60522666 60522685 60522669 -
agggagactcagggcctgtg

SEQ ID NO: 175298 - DNA, 20 bp, Artificial Sequence
  Synthetic oligonucleotide; CAG chr2 60522663 60522682 60522666 -
gagactcagggcctgtgggg

SEQ ID NO: 175299 - DNA, 20 bp, Artificial Sequence
  Synthetic oligonucleotide; TGG chr2 60522654 60522673 60522657 -
ggcctgtggggcagtcgatg

SEQ ID NO: 175300 - DNA, 20 bp, Artificial Sequence
  Synthetic oligonucleotide; GGG chr2 60522653 60522672 60522656 -
gcctgtggggcagtcgatgt

SEQ ID NO: 175301 - DNA, 20 bp, Artificial Sequence
  Synthetic oligonucleotide; GAG chr2 60522651 60522670 60522654 -
ctgtggggcagtcgatgtgg

SEQ ID NO: 175302 - DNA, 20 bp, Artificial Sequence
  Synthetic oligonucleotide; AGG chr2 60522650 60522669 60522653 -
tgtggggcagtcgatgtggg

SEQ ID NO: 175303 - DNA, 20 bp, Artificial Sequence
  Synthetic oligonucleotide; CAG chr2 60522640 60522659 60522643 -
tcgatgtgggaggactgtca

SEQ ID NO: 175304 - DNA, 20 bp, Artificial Sequence
  Synthetic oligonucleotide; GAG chr2 60522638 60522657 60522641 -
gatgtgggaggactgtcaca

SEQ ID NO: 175305 - DNA, 20 bp, Artificial Sequence
  Synthetic oligonucleotide; CAG chr2 60522630 60522649 60522633 -
aggactgtcacagagactct

SEQ ID NO: 175306 - DNA, 20 bp, Artificial Sequence
  Synthetic oligonucleotide; GAG chr2 60522628 60522647 60522631 -
gactgtcacagagactctca

SEQ ID NO: 175307 - DNA, 20 bp, Artificial Sequence
  Synthetic oligonucleotide; AGG chr2 60522627 60522646 60522630 -
actgtcacagagactctcag

SEQ ID NO: 175308 - DNA, 20 bp, Artificial Sequence
  Synthetic oligonucleotide; GGG chr2 60522626 60522645 60522629 -
ctgtcacagagactctcaga

SEQ ID NO: 175309 - DNA, 20 bp, Artificial Sequence
  Synthetic oligonucleotide; CAG chr2 60522617 60522636 60522620 -
agactctcagagggtgcatt

SEQ ID NO: 175310 - DNA, 20 bp, Artificial Sequence
  Synthetic oligonucleotide; CAG chr2 60522607 60522626 60522610 -
agggtgcattcagccctgaa

SEQ ID NO: 175311 - DNA, 20 bp, Artificial Sequence
  Synthetic oligonucleotide; AGG chr2 60522606 60522625 60522609 -
gggtgcattcagccctgaac

SEQ ID NO: 175312 - DNA, 20 bp, Artificial Sequence
  Synthetic oligonucleotide; GGG chr2 60522605 60522624 60522608 -
ggtgcattcagccctgaaca

SEQ ID NO: 175313 - DNA, 20 bp, Artificial Sequence
  Synthetic oligonucleotide; AAG chr2 60522600 60522619 60522603 -
attcagccctgaacagggca

SEQ ID NO: 175314 - DNA, 20 bp, Artificial Sequence
  Synthetic oligonucleotide; AGG chr2 60522599 60522618 60522602 -
ttcagccctgaacagggcaa

SEQ ID NO: 175315 - DNA, 20 bp, Artificial Sequence
  Synthetic oligonucleotide; AAG chr2 60522591 60522610 60522594 -
tgaacagggcaaaggactgc

SEQ ID NO: 175316 - DNA, 20 bp, Artificial Sequence
  Synthetic oligonucleotide; AGG chr2 60522590 60522609 60522593 -
gaacagggcaaaggactgca

SEQ ID NO: 175317 - DNA, 20 bp, Artificial Sequence
  Synthetic oligonucleotide; GGG chr2 60522589 60522608 60522592 -
aacagggcaaaggactgcaa

SEQ ID NO: 175318 - DNA, 20 bp, Artificial Sequence
  Synthetic oligonucleotide; GGG chr2 60522588 60522607 60522591 -
acagggcaaaggactgcaag

SEQ ID NO: 175319 - DNA, 20 bp, Artificial Sequence
  Synthetic oligonucleotide; CAG chr2 60522585 60522604 60522588 -
gggcaaaggactgcaagggg

SEQ ID NO: 175320 - DNA, 20 bp, Artificial Sequence
  Synthetic oligonucleotide; AGG chr2 60522584 60522603 60522587 -
ggcaaaggactgcaaggggc

SEQ ID NO: 175321 - DNA, 20 bp, Artificial Sequence
  Synthetic oligonucleotide; GAG chr2 60522582 60522601 60522585 -
caaaggactgcaaggggcag

SEQ ID NO: 175322 - DNA, 20 bp, Artificial Sequence
  Synthetic oligonucleotide; TGG chr2 60522577 60522596 60522580 -
gactgcaaggggcaggagct

SEQ ID NO: 175323 - DNA, 20 bp, Artificial Sequence
  Synthetic oligonucleotide; GGG chr2 60522576 60522595 60522579 -
actgcaaggggcaggagctt

SEQ ID NO: 175324 - DNA, 20 bp, Artificial Sequence
  Synthetic oligonucleotide; AAG chr2 60522564 60522583 60522567 -
aggagcttgggctgacatgc

SEQ ID NO: 175325 - DNA, 20 bp, Artificial Sequence
  Synthetic oligonucleotide; AGG chr2 60522563 60522582 60522566 -
ggagcttgggctgacatgca

SEQ ID NO: 175326 - DNA, 20 bp, Artificial Sequence
  Synthetic oligonucleotide; TGG chr2 60522560 60522579 60522563 -
gcttgggctgacatgcaagg

SEQ ID NO: 175327 - DNA, 20 bp, Artificial Sequence
  Synthetic oligonucleotide; AAG chr2 60522549 60522568 60522552 -
catgcaaggtggctttacac

SEQ ID NO: 175328 - DNA, 20 bp, Artificial Sequence
  Synthetic oligonucleotide; AGG chr2 60522548 60522567 60522551 -
atgcaaggtggctttacaca

SEQ ID NO: 175329 - DNA, 20 bp, Artificial Sequence
  Synthetic oligonucleotide; TAG chr2 60522538 60522557 60522541 -
gctttacacaaggccctttt

SEQ ID NO: 175330 - DNA, 20 bp, Artificial Sequence
  Synthetic oligonucleotide; GAG chr2 60522536 60522555 60522539 -
tttacacaaggcccttttta

SEQ ID NO: 175331 - DNA, 20 bp, Artificial Sequence
  Synthetic oligonucleotide; GAG chr2 60522534 60522553 60522537 -
tacacaaggccctttttaga

SEQ ID NO: 175332 - DNA, 20 bp, Artificial Sequence
  Synthetic oligonucleotide; AAG chr2 60522519 60522538 60522522 -
ttagagagtgtgattctctg

SEQ ID NO: 175333 - DNA, 20 bp, Artificial Sequence
  Synthetic oligonucleotide; TGG chr2 60522509 60522528 60522512 -
tgattctctgaagcttttct

SEQ ID NO: 175334 - DNA, 20 bp, Artificial Sequence
  Synthetic oligonucleotide; CAG chr2 60522506 60522525 60522509 -
ttctctgaagcttttcttgg

SEQ ID NO: 175335 - DNA, 20 bp, Artificial Sequence
  Synthetic oligonucleotide; CAG chr2 60522500 60522519 60522503 -
gaagcttttcttggcagctt

SEQ ID NO: 175336 - DNA, 20 bp, Artificial Sequence
  Synthetic oligonucleotide; TGG chr2 60522484 60522503 60522487 -
gcttcagtcttgaacctcac

SEQ ID NO: 175337 - DNA, 20 bp, Artificial Sequence
  Synthetic oligonucleotide; AAG chr2 60522481 60522500 60522484 -
tcagtcttgaacctcactgg

SEQ ID NO: 175338 - DNA, 20 bp, Artificial Sequence
  Synthetic oligonucleotide; AGG chr2 60522480 60522499 60522483 -
cagtcttgaacctcactgga

SEQ ID NO: 175339 - DNA, 20 bp, Artificial Sequence
  Synthetic oligonucleotide; GGG chr2 60522479 60522498 60522482 -
agtcttgaacctcactggaa

SEQ ID NO: 175340 - DNA, 20 bp, Artificial Sequence
  Synthetic oligonucleotide; CAG chr2 60522458 60522477 60522461 -
ggatcctccaaaacatgacc

SEQ ID NO: 175341 - DNA, 20 bp, Artificial Sequence
  Synthetic oligonucleotide; TGG chr2 60522454 60522473 60522457 -
cctccaaaacatgacccaga

SEQ ID NO: 175342 - DNA, 20 bp, Artificial Sequence
  Synthetic oligonucleotide; AAG chr2 60522450 60522469 60522453 -
caaaacatgacccagatgga

SEQ ID NO: 175343 - DNA, 20 bp, Artificial Sequence
  Synthetic oligonucleotide; AAG chr2 60522447 60522466 60522450 -
aacatgacccagatggaaag

SEQ ID NO: 175344 - DNA, 20 bp, Artificial Sequence
  Synthetic oligonucleotide; GAG chr2 60522437 60522456 60522440 -
agatggaaagaagtatttct

SEQ ID NO: 175345 - DNA, 20 bp, Artificial Sequence
  Synthetic oligonucleotide; TGG chr2 60522414 60522433 60522417 -
tttaaaataactcccctatt

SEQ ID NO: 175346 - DNA, 20 bp, Artificial Sequence
  Synthetic oligonucleotide; CGG chr2 60522406 60522425 60522409 -
aactcccctatttggtaata

SEQ ID NO: 175347 - DNA, 20 bp, Artificial Sequence
  Synthetic oligonucleotide; GGG chr2 60522405 60522424 60522408 -
actcccctatttggtaatac

SEQ ID NO: 175348 - DNA, 20 bp, Artificial Sequence
  Synthetic oligonucleotide; TAG chr2 60522377 60522396 60522380 -
atttgtgactttattatttt

SEQ ID NO: 175349 - DNA, 20 bp, Artificial Sequence
  Synthetic oligonucleotide; AGG chr2 60522376 60522395 60522379 -
tttgtgactttattattttt

SEQ ID NO: 175350 - DNA, 20 bp, Artificial Sequence
  Synthetic oligonucleotide; TGG chr2 60522365 60522384 60522368 -
attatttttaggtgtgataa

SEQ ID NO: 175351 - DNA, 20 bp, Artificial Sequence
  Synthetic oligonucleotide; CAG chr2 60522357 60522376 60522360 -
taggtgtgataatggttttg

SEQ ID NO: 175352 - DNA, 20 bp, Artificial Sequence
  Synthetic oligonucleotide; AAG chr2 60522344 60522363 60522347 -
ggttttgcagttgtatttaa

SEQ ID NO: 175353 - DNA, 20 bp, Artificial Sequence
  Synthetic oligonucleotide; GAG chr2 60522332 60522351 60522335 -
gtatttaaaagaaaaaaaac

SEQ ID NO: 175354 - DNA, 20 bp, Artificial Sequence
  Synthetic oligonucleotide; CAG chr2 60522306 60522325 60522309 -
ctatgtttaaaaaatacata

SEQ ID NO: 175355 - DNA, 20 bp, Artificial Sequence
  Synthetic oligonucleotide; GAG chr2 60522304 60522323 60522307 -
atgtttaaaaaatacataca

SEQ ID NO: 175356 - DNA, 20 bp, Artificial Sequence
  Synthetic oligonucleotide; AGG chr2 60522303 60522322 60522306 -
tgtttaaaaaatacatacag

SEQ ID NO: 175357 - DNA, 20 bp, Artificial Sequence
  Synthetic oligonucleotide; TGG chr2 60522273 60522292 60522276 -
tgatgaaatgatatgacgtc

SEQ ID NO: 175358 - DNA, 20 bp, Artificial Sequence
  Synthetic oligonucleotide; GGG chr2 60522272 60522291 60522275 -
gatgaaatgatatgacgtct

SEQ ID NO: 175359 - DNA, 20 bp, Artificial Sequence
  Synthetic oligonucleotide; TGG chr2 60522250 60522269 60522253 -
gatcaacttaaataataaaa

SEQ ID NO: 175360 - DNA, 20 bp, Artificial Sequence
  Synthetic oligonucleotide; GGG chr2 60522249 60522268 60522252 -
atcaacttaaataataaaat

SEQ ID NO: 175361 - DNA, 20 bp, Artificial Sequence
  Synthetic oligonucleotide; TAG chr2 60522245 60522264 60522248 -
acttaaataataaaatgggc

SEQ ID NO: 175362 - DNA, 20 bp, Artificial Sequence
  Synthetic oligonucleotide; AGG chr2 60522244 60522263 60522247 -
cttaaataataaaatgggct

SEQ ID NO: 175363 - DNA, 20 bp, Artificial Sequence
  Synthetic oligonucleotide; GGG chr2 60522243 60522262 60522246 -
ttaaataataaaatgggcta

SEQ ID NO: 175364 - DNA, 20 bp, Artificial Sequence
  Synthetic oligonucleotide; GAG chr2 60522241 60522260 60522244 -
aaataataaaatgggctagg

SEQ ID NO: 175365 - DNA, 20 bp, Artificial Sequence
  Synthetic oligonucleotide; AGG chr2 60522240 60522259 60522243 -
aataataaaatgggctaggg

SEQ ID NO: 175366 - DNA, 20 bp, Artificial Sequence
  Synthetic oligonucleotide; TAG chr2 60522234 60522253 60522237 -
aaaatgggctagggaggcga

SEQ ID NO: 175367 - DNA, 20 bp, Artificial Sequence
  Synthetic oligonucleotide; AGG chr2 60522233 60522252 60522236 -
aaatgggctagggaggcgat

SEQ ID NO: 175368 - DNA, 20 bp, Artificial Sequence
  Synthetic oligonucleotide; GGG chr2 60522232 60522251 60522235 -
aatgggctagggaggcgata

SEQ ID NO: 175369 - DNA, 20 bp, Artificial Sequence
  Synthetic oligonucleotide; CAG chr2 60522226 60522245 60522229 -
ctagggaggcgatagggtta

SEQ ID NO: 175370 - DNA, 20 bp, Artificial Sequence
  Synthetic oligonucleotide; AAG chr2 60522223 60522242 60522226 -
gggaggcgatagggttacag

SEQ ID NO: 175371 - DNA, 20 bp, Artificial Sequence
  Synthetic oligonucleotide; AAG chr2 60522218 60522237 60522221 -
gcgatagggttacagaagac

SEQ ID NO: 175372 - DNA, 20 bp, Artificial Sequence
  Synthetic oligonucleotide; GAG chr2 60522206 60522225 60522209 -
cagaagacaagaatgactgt

SEQ ID NO: 175373 - DNA, 20 bp, Artificial Sequence
  Synthetic oligonucleotide; TGG chr2 60522200 60522219 60522203 -
acaagaatgactgtgagctg

SEQ ID NO: 175374 - DNA, 20 bp, Artificial Sequence
  Synthetic oligonucleotide; TGG chr2 60522197 60522216 60522200 -
agaatgactgtgagctgtgg

SEQ ID NO: 175375 - DNA, 20 bp, Artificial Sequence
  Synthetic oligonucleotide; TGG chr2 60522193 60522212 60522196 -
tgactgtgagctgtggtggt

SEQ ID NO: 175376 - DNA, 20 bp, Artificial Sequence
  Synthetic oligonucleotide; GAG chr2 60522191 60522210 60522194 -
actgtgagctgtggtggttg

SEQ ID NO: 175377 - DNA, 20 bp, Artificial Sequence
  Synthetic oligonucleotide; TGG chr2 60522187 60522206 60522190 -
tgagctgtggtggttggagc

SEQ ID NO: 175378 - DNA, 20 bp, Artificial Sequence
  Synthetic oligonucleotide; AAG chr2 60522184 60522203 60522187 -
gctgtggtggttggagctgg

SEQ ID NO: 175379 - DNA, 20 bp, Artificial Sequence
  Synthetic oligonucleotide; TGG chr2 60522178 60522197 60522181 -
gtggttggagctggaagatg

SEQ ID NO: 175380 - DNA, 20 bp, Artificial Sequence
  Synthetic oligonucleotide; TGG chr2 60522172 60522191 60522175 -
ggagctggaagatgtggact

SEQ ID NO: 175381 - DNA, 20 bp, Artificial Sequence
  Synthetic oligonucleotide; GGG chr2 60522171 60522190 60522174 -
gagctggaagatgtggactt

SEQ ID NO: 175382 - DNA, 20 bp, Artificial Sequence
  Synthetic oligonucleotide; GGG chr2 60522170 60522189 60522173 -
agctggaagatgtggacttg

SEQ ID NO: 175383 - DNA, 20 bp, Artificial Sequence
  Synthetic oligonucleotide; TAG chr2 60522138 60522157 60522141 -
taacattctctctacttttg

SEQ ID NO: 175384 - DNA, 20 bp, Artificial Sequence
  Synthetic oligonucleotide; GAG chr2 60522130 60522149 60522133 -
tctctacttttgtagtattt

SEQ ID NO: 175385 - DNA, 20 bp, Artificial Sequence
  Synthetic oligonucleotide; CAG chr2 60522120 60522139 60522123 -
tgtagtatttgagatttttc

SEQ ID NO: 175386 - DNA, 20 bp, Artificial Sequence
  Synthetic oligonucleotide; AAG chr2 60522111 60522130 60522114 -
tgagatttttccagaaaata

SEQ ID NO: 175387 - DNA, 20 bp, Artificial Sequence
  Synthetic oligonucleotide; AGG chr2 60522110 60522129 60522113 -
gagatttttccagaaaataa

SEQ ID NO: 175388 - DNA, 20 bp, Artificial Sequence
  Synthetic oligonucleotide; TGG chr2 60522096 60522115 60522099 -
aaataaaggtattgcctgac

SEQ ID NO: 175389 - DNA, 20 bp, Artificial Sequence
  Synthetic oligonucleotide; TGG chr2 60522093 60522112 60522096 -
taaaggtattgcctgactgg

SEQ ID NO: 175390 - DNA, 20 bp, Artificial Sequence
  Synthetic oligonucleotide; GAG chr2 60522091 60522110 60522094 -
aaggtattgcctgactggtg

SEQ ID NO: 175391 - DNA, 20 bp, Artificial Sequence
  Synthetic oligonucleotide; GAG chr2 60522089 60522108 60522092 -
ggtattgcctgactggtgga

SEQ ID NO: 175392 - DNA, 20 bp, Artificial Sequence
  Synthetic oligonucleotide; CAG chr2 60522086 60522105 60522089 -
attgcctgactggtggagag

SEQ ID NO: 175393 - DNA, 20 bp, Artificial Sequence
  Synthetic oligonucleotide; TGG chr2 60522081 60522100 60522084 -
ctgactggtggagagcagta

SEQ ID NO: 175394 - DNA, 20 bp, Artificial Sequence
  Synthetic oligonucleotide; TAG chr2 60522071 60522090 60522074 -
gagagcagtatggccttgtt

SEQ ID NO: 175395 - DNA, 20 bp, Artificial Sequence
  Synthetic oligonucleotide; CGG chr2 60522067 60522086 60522070 -
gcagtatggccttgtttagt

SEQ ID NO: 175396 - DNA, 20 bp, Artificial Sequence
  Synthetic oligonucleotide; AAG chr2 60522049 60522068 60522052 -
gtcggtgttgtttcttcacc

SEQ ID NO: 175397 - DNA, 20 bp, Artificial Sequence
  Synthetic oligonucleotide; AGG chr2 60522048 60522067 60522051 -
tcggtgttgtttcttcacca

SEQ ID NO: 175398 - DNA, 20 bp, Artificial Sequence
  Synthetic oligonucleotide; GGG chr2 60522047 60522066 60522050 -
cggtgttgtttcttcaccaa

SEQ ID NO: 175399 - DNA, 20 bp, Artificial Sequence
  Synthetic oligonucleotide; TGG chr2 60522042 60522061 60522045 -
ttgtttcttcaccaagggtt

SEQ ID NO: 175400 - DNA, 20 bp, Artificial Sequence
  Synthetic oligonucleotide; CAG chr2 60522037 60522056 60522040 -
tcttcaccaagggtttggct

SEQ ID NO: 175401 - DNA, 20 bp, Artificial Sequence
  Synthetic oligonucleotide; GAG chr2 60522035 60522054 60522038 -
ttcaccaagggtttggctca

SEQ ID NO: 175402 - DNA, 20 bp, Artificial Sequence
  Synthetic oligonucleotide; AGG chr2 60522034 60522053 60522037 -
tcaccaagggtttggctcag

SEQ ID NO: 175403 - DNA, 20 bp, Artificial Sequence
  Synthetic oligonucleotide; TAG chr2 60522031 60522050 60522034 -
ccaagggtttggctcagagg

SEQ ID NO: 175404 - DNA, 20 bp, Artificial Sequence
  Synthetic oligonucleotide; AAG chr2 60522027 60522046 60522030 -
gggtttggctcagaggtagc

SEQ ID NO: 175405 - DNA, 20 bp, Artificial Sequence
  Synthetic oligonucleotide; AGG chr2 60522026 60522045 60522029 -
ggtttggctcagaggtagca

SEQ ID NO: 175406 - DNA, 20 bp, Artificial Sequence
  Synthetic oligonucleotide; GGG chr2 60522025 60522044 60522028 -
gtttggctcagaggtagcaa

SEQ ID NO: 175407 - DNA, 20 bp, Artificial Sequence
  Synthetic oligonucleotide; GGG chr2 60522024 60522043 60522027 -
tttggctcagaggtagcaag

SEQ ID NO: 175408 - DNA, 20 bp, Artificial Sequence
  Synthetic oligonucleotide; AAG chr2 60522019 60522038 60522022 -
ctcagaggtagcaaggggac

SEQ ID NO: 175409 - DNA, 20 bp, Artificial Sequence
  Synthetic oligonucleotide; TGG chr2 60522009 60522028 60522012 -
gcaaggggacaagtgtccta

SEQ ID NO: 175410 - DNA, 20 bp, Artificial Sequence
  Synthetic oligonucleotide; GGG chr2 60522008 60522027 60522011 -
caaggggacaagtgtcctat

SEQ ID NO: 175411 - DNA, 20 bp, Artificial Sequence
  Synthetic oligonucleotide; AAG chr2 60522004 60522023 60522007 -
gggacaagtgtcctatgggc

SEQ ID NO: 175412 - DNA, 20 bp, Artificial Sequence
  Synthetic oligonucleotide; AAG chr2 60522000 60522019 60522003 -
caagtgtcctatgggcaaga

SEQ ID NO: 175413 - DNA, 20 bp, Artificial Sequence
  Synthetic oligonucleotide; GAG chr2 60521990 60522009 60521993 -
atgggcaagaaagtacctgt

SEQ ID NO: 175414 - DNA, 20 bp, Artificial Sequence
  Synthetic oligonucleotide; AAG chr2 60521984 60522003 60521987 -
aagaaagtacctgtgagctc

SEQ ID NO: 175415 - DNA, 20 bp, Artificial Sequence
  Synthetic oligonucleotide; TGG chr2 60521972 60521991 60521975 -
gtgagctcaagtcttgtatc

SEQ ID NO: 175416 - DNA, 20 bp, Artificial Sequence
  Synthetic oligonucleotide; GGG chr2 60521971 60521990 60521974 -
tgagctcaagtcttgtatct

SEQ ID NO: 175417 - DNA, 20 bp, Artificial Sequence
  Synthetic oligonucleotide; AAG chr2 60521968 60521987 60521971 -
gctcaagtcttgtatctggg

SEQ ID NO: 175418 - DNA, 20 bp, Artificial Sequence
  Synthetic oligonucleotide; AAG chr2 60521956 60521975 60521959 -
tatctgggaagttcattgtg

SEQ ID NO: 175419 - DNA, 20 bp, Artificial Sequence
  Synthetic oligonucleotide; AGG chr2 60521955 60521974 60521958 -
atctgggaagttcattgtga

SEQ ID NO: 175420 - DNA, 20 bp, Artificial Sequence
  Synthetic oligonucleotide; GGG chr2 60521954 60521973 60521957 -
tctgggaagttcattgtgaa

SEQ ID NO: 175421 - DNA, 20 bp, Artificial Sequence
  Synthetic oligonucleotide; GGG chr2 60521953 60521972 60521956 -
ctgggaagttcattgtgaag

SEQ ID NO: 175422 - DNA, 20 bp, Artificial Sequence
  Synthetic oligonucleotide; AAG chr2 60521944 60521963 60521947 -
tcattgtgaaggggtcattt

SEQ ID NO: 175423 - DNA, 20 bp, Artificial Sequence
  Synthetic oligonucleotide; AGG chr2 60521943 60521962 60521946 -
cattgtgaaggggtcattta

SEQ ID NO: 175424 - DNA, 20 bp, Artificial Sequence
  Synthetic oligonucleotide; GGG chr2 60521942 60521961 60521945 -
attgtgaaggggtcatttaa

SEQ ID NO: 175425 - DNA, 20 bp, Artificial Sequence
  Synthetic oligonucleotide; TGG chr2 60521910 60521929 60521913 -
tgcactgtcccccattctcc

SEQ ID NO: 175426 - DNA, 20 bp, Artificial Sequence
  Synthetic oligonucleotide; AAG chr2 60521907 60521926 60521910 -
actgtcccccattctcctgg

SEQ ID NO: 175427 - DNA, 20 bp, Artificial Sequence
  Synthetic oligonucleotide; CAG chr2 60521902 60521921 60521905 -
cccccattctcctggaagaa

SEQ ID NO: 175428 - DNA, 20 bp, Artificial Sequence
  Synthetic oligonucleotide; GAG chr2 60521900 60521919 60521903 -
cccattctcctggaagaaca

SEQ ID NO: 175429 - DNA, 20 bp, Artificial Sequence
  Synthetic oligonucleotide; CAG chr2 60521882 60521901 60521885 -
cagagatcccttgtcttttt

SEQ ID NO: 175430 - DNA, 20 bp, Artificial Sequence
  Synthetic oligonucleotide; GAG chr2 60521874 60521893 60521877 -
ccttgtctttttcagtgcat

SEQ ID NO: 175431 - DNA, 20 bp, Artificial Sequence
  Synthetic oligonucleotide; AGG chr2 60521873 60521892 60521876 -
cttgtctttttcagtgcatg

SEQ ID NO: 175432 - DNA, 20 bp, Artificial Sequence
  Synthetic oligonucleotide; CAG chr2 60521870 60521889 60521873 -
gtctttttcagtgcatgagg

SEQ ID NO: 175433 - DNA, 20 bp, Artificial Sequence
  Synthetic oligonucleotide; GAG chr2 60521868 60521887 60521871 -
ctttttcagtgcatgaggca

SEQ ID NO: 175434 - DNA, 20 bp, Artificial Sequence
  Synthetic oligonucleotide; CAG chr2 60521864 60521883 60521867 -
ttcagtgcatgaggcagagt

SEQ ID NO: 175435 - DNA, 20 bp, Artificial Sequence
  Synthetic oligonucleotide; TGG chr2 60521858 60521877 60521861 -
gcatgaggcagagtcagatg

SEQ ID NO: 175436 - DNA, 20 bp, Artificial Sequence
  Synthetic oligonucleotide; GAG chr2 60521846 60521865 60521849 -
gtcagatgtggcgtttgctt

SEQ ID NO: 175437 - DNA, 20 bp, Artificial Sequence
  Synthetic oligonucleotide; CAG chr2 60521840 60521859 60521843 -
tgtggcgtttgcttgagttt

SEQ ID NO: 175438 - DNA, 20 bp, Artificial Sequence
  Synthetic oligonucleotide; CAG chr2 60521835 60521854 60521838 -
cgtttgcttgagtttcagca

SEQ ID NO: 175439 - DNA, 20 bp, Artificial Sequence
  Synthetic oligonucleotide; AGG chr2 60521834 60521853 60521837 -
gtttgcttgagtttcagcac

SEQ ID NO: 175440 - DNA, 20 bp, Artificial Sequence
  Synthetic oligonucleotide; TGG chr2 60521816 60521835 60521819 -
acaggtgcctctgtgcctcg

SEQ ID NO: 175441 - DNA, 20 bp, Artificial Sequence
  Synthetic oligonucleotide; GAG chr2 60521812 60521831 60521815 -
gtgcctctgtgcctcgtggt

SEQ ID NO: 175442 - DNA, 20 bp, Artificial Sequence
  Synthetic oligonucleotide; AGG chr2 60521811 60521830 60521814 -
tgcctctgtgcctcgtggtg

SEQ ID NO: 175443 - DNA, 20 bp, Artificial Sequence
  Synthetic oligonucleotide; GGG chr2 60521810 60521829 60521813 -
gcctctgtgcctcgtggtga

SEQ ID NO: 175444 - DNA, 20 bp, Artificial Sequence
  Synthetic oligonucleotide; CAG chr2 60521806 60521825 60521809 -
ctgtgcctcgtggtgagggt

SEQ ID NO: 175445 - DNA, 20 bp, Artificial Sequence
  Synthetic oligonucleotide; AGG chr2 60521805 60521824 60521808 -
tgtgcctcgtggtgagggtc

SEQ ID NO: 175446 - DNA, 20 bp, Artificial Sequence
  Synthetic oligonucleotide; AAG chr2 60521802 60521821 60521805 -
gcctcgtggtgagggtcagg

SEQ ID NO: 175447 - DNA, 20 bp, Artificial Sequence
  Synthetic oligonucleotide; AAG chr2 60521799 60521818 60521802 -
tcgtggtgagggtcaggaag

SEQ ID NO: 175448 - DNA, 20 bp, Artificial Sequence
  Synthetic oligonucleotide; CAG chr2 60521796 60521815 60521799 -
tggtgagggtcaggaagaag

SEQ ID NO: 175449 - DNA, 20 bp, Artificial Sequence
  Synthetic oligonucleotide; TGG chr2 60521792 60521811 60521795 -
gagggtcaggaagaagcagc

SEQ ID NO: 175450 - DNA, 20 bp, Artificial Sequence
  Synthetic oligonucleotide; GGG chr2 60521791 60521810 60521794 -
agggtcaggaagaagcagct

SEQ ID NO: 175451 - DNA, 20 bp, Artificial Sequence
  Synthetic oligonucleotide; TGG chr2 60521777 60521796 60521780 -
gcagctgggacgtgctcacg

SEQ ID NO: 175452 - DNA, 20 bp, Artificial Sequence
  Synthetic oligonucleotide; TGG chr2 60521773 60521792 60521776 -
ctgggacgtgctcacgtggc

SEQ ID NO: 175453 - DNA, 20 bp, Artificial Sequence
  Synthetic oligonucleotide; TAG chr2 60521770 60521789 60521773 -
ggacgtgctcacgtggctgg

SEQ ID NO: 175454 - DNA, 20 bp, Artificial Sequence
  Synthetic oligonucleotide; AAG chr2 60521760 60521779 60521763 -
acgtggctggtagtgttatg

SEQ ID NO: 175455 - DNA, 20 bp, Artificial Sequence
  Synthetic oligonucleotide; AAG chr2 60521755 60521774 60521758 -
gctggtagtgttatgaagac

SEQ ID NO: 175456 - DNA, 20 bp, Artificial Sequence
  Synthetic oligonucleotide; AGG chr2 60521754 60521773 60521757 -
ctggtagtgttatgaagaca

SEQ ID NO: 175457 - DNA, 20 bp, Artificial Sequence
  Synthetic oligonucleotide; TGG chr2 60521748 60521767 60521751 -
gtgttatgaagacaaggctt

SEQ ID NO: 175458 - DNA, 20 bp, Artificial Sequence
  Synthetic oligonucleotide; GGG chr2 60521747 60521766 60521750 -
tgttatgaagacaaggcttt

SEQ ID NO: 175459 - DNA, 20 bp, Artificial Sequence
  Synthetic oligonucleotide; TGG chr2 60521735 60521754 60521738 -
aaggctttgggacctttctt

SEQ ID NO: 175460 - DNA, 20 bp, Artificial Sequence
  Synthetic oligonucleotide; GAG chr2 60521726 60521745 60521729 -
ggacctttctttggccattt

SEQ ID NO: 175461 - DNA, 20 bp, Artificial Sequence
  Synthetic oligonucleotide; TGG chr2 60521720 60521739 60521723 -
ttctttggccatttgagccc

SEQ ID NO: 175462 - DNA, 20 bp, Artificial Sequence
  Synthetic oligonucleotide; TAG chr2 60521713 60521732 60521716 -
gccatttgagccctggctat

SEQ ID NO: 175463 - DNA, 20 bp, Artificial Sequence
  Synthetic oligonucleotide; GAG chr2 60521711 60521730 60521714 -
catttgagccctggctatta

SEQ ID NO: 175464 - DNA, 20 bp, Artificial Sequence
  Synthetic oligonucleotide; AAG chr2 60521707 60521726 60521710 -
tgagccctggctattagaga

SEQ ID NO: 175465 - DNA, 20 bp, Artificial Sequence
  Synthetic oligonucleotide; GAG chr2 60521693 60521712 60521696 -
tagagaaagatgatttgcct

SEQ ID NO: 175466 - DNA, 20 bp, Artificial Sequence
  Synthetic oligonucleotide; GAG chr2 60521691 60521710 60521694 -
gagaaagatgatttgcctga

SEQ ID NO: 175467 - DNA, 20 bp, Artificial Sequence
  Synthetic oligonucleotide; AGG chr2 60521690 60521709 60521693 -
agaaagatgatttgcctgag

SEQ ID NO: 175468 - DNA, 20 bp, Artificial Sequence
  Synthetic oligonucleotide; GAG chr2 60521688 60521707 60521691 -
aaagatgatttgcctgagag

SEQ ID NO: 175469 - DNA, 20 bp, Artificial Sequence
  Synthetic oligonucleotide; CAG chr2 60521671 60521690 60521674 -
gaggagattgaccacactct

SEQ ID NO: 175470 - DNA, 20 bp, Artificial Sequence
  Synthetic oligonucleotide; AAG chr2 60521667 60521686 60521670 -
agattgaccacactctcaga

SEQ ID NO: 175471 - DNA, 20 bp, Artificial Sequence
  Synthetic oligonucleotide; AAG chr2 60521664 60521683 60521667 -
ttgaccacactctcagaaag

SEQ ID NO: 175472 - DNA, 20 bp, Artificial Sequence
  Synthetic oligonucleotide; AGG chr2 60521663 60521682 60521666 -
tgaccacactctcagaaaga

SEQ ID NO: 175473 - DNA, 20 bp, Artificial Sequence
  Synthetic oligonucleotide; GGG chr2 60521662 60521681 60521665 -
gaccacactctcagaaagaa

SEQ ID NO: 175474 - DNA, 20 bp, Artificial Sequence
  Synthetic oligonucleotide; GGG chr2 60521661 60521680 60521664 -
accacactctcagaaagaag

SEQ ID NO: 175475 - DNA, 20 bp, Artificial Sequence
  Synthetic oligonucleotide; AAG chr2 60521655 60521674 60521658 -
ctctcagaaagaaggggaca

SEQ ID NO: 175476 - DNA, 20 bp, Artificial Sequence
  Synthetic oligonucleotide; AAG chr2 60521644 60521663 60521647 -
aaggggacaaagaacacgtc

SEQ ID NO: 175477 - DNA, 20 bp, Artificial Sequence
  Synthetic oligonucleotide; AGG chr2 60521643 60521662 60521646 -
aggggacaaagaacacgtca

SEQ ID NO: 175478 - DNA, 20 bp, Artificial Sequence
  Synthetic oligonucleotide; GGG chr2 60521642 60521661 60521645 -
ggggacaaagaacacgtcaa

SEQ ID NO: 175479 - DNA, 20 bp, Artificial Sequence
  Synthetic oligonucleotide; AAG chr2 60521637 60521656 60521640 -
caaagaacacgtcaagggtt

SEQ ID NO: 175480 - DNA, 20 bp, Artificial Sequence
  Synthetic oligonucleotide; CAG chr2 60521634 60521653 60521637 -
agaacacgtcaagggttaag

SEQ ID NO: 175481 - DNA, 20 bp, Artificial Sequence
  Synthetic oligonucleotide; AAG chr2 60521621 60521640 60521624 -
ggttaagcagccttcccttt

SEQ ID NO: 175482 - DNA, 20 bp, Artificial Sequence
  Synthetic oligonucleotide; AGG chr2 60521620 60521639 60521623 -
gttaagcagccttcccttta

SEQ ID NO: 175483 - DNA, 20 bp, Artificial Sequence
  Synthetic oligonucleotide; GGG chr2 60521619 60521638 60521622 -
ttaagcagccttccctttaa

SEQ ID NO: 175484 - DNA, 20 bp, Artificial Sequence
  Synthetic oligonucleotide; GAG chr2 60521617 60521636 60521620 -
aagcagccttccctttaagg

SEQ ID NO: 175485 - DNA, 20 bp, Artificial Sequence
  Synthetic oligonucleotide; AGG chr2 60521616 60521635 60521619 -
agcagccttccctttaaggg

SEQ ID NO: 175486 - DNA, 20 bp, Artificial Sequence
  Synthetic oligonucleotide; TGG chr2 60521611 60521630 60521614 -
ccttccctttaagggaggac

SEQ ID NO: 175487 - DNA, 20 bp, Artificial Sequence
  Synthetic oligonucleotide; GGG chr2 60521610 60521629 60521613 -
cttccctttaagggaggact

SEQ ID NO: 175488 - DNA, 20 bp, Artificial Sequence
  Synthetic oligonucleotide; GGG chr2 60521609 60521628 60521612 -
ttccctttaagggaggactg

SEQ ID NO: 175489 - DNA, 20 bp, Artificial Sequence
  Synthetic oligonucleotide; AAG chr2 60521603 60521622 60521606 -
ttaagggaggactggggcac

SEQ ID NO: 175490 - DNA, 20 bp, Artificial Sequence
  Synthetic oligonucleotide; TGG chr2 60521599 60521618 60521602 -
gggaggactggggcacaaga

SEQ ID NO: 175491 - DNA, 20 bp, Artificial Sequence
  Synthetic oligonucleotide; AAG chr2 60521596 60521615 60521599 -
aggactggggcacaagatgg

SEQ ID NO: 175492 - DNA, 20 bp, Artificial Sequence
  Synthetic oligonucleotide; AAG chr2 60521589 60521608 60521592 -
gggcacaagatggaagatga

SEQ ID NO: 175493 - DNA, 20 bp, Artificial Sequence
  Synthetic oligonucleotide; AGG chr2 60521588 60521607 60521591 -
ggcacaagatggaagatgaa

SEQ ID NO: 175494 - DNA, 20 bp, Artificial Sequence
  Synthetic oligonucleotide; GGG chr2 60521587 60521606 60521590 -
gcacaagatggaagatgaaa

SEQ ID NO: 175495 - DNA, 20 bp, Artificial Sequence
  Synthetic oligonucleotide; GAG chr2 60521585 60521604 60521588 -
acaagatggaagatgaaagg

SEQ ID NO: 175496 - DNA, 20 bp, Artificial Sequence
  Synthetic oligonucleotide; CAG chr2 60521582 60521601 60521585 -
agatggaagatgaaagggag

SEQ ID NO: 175497 - DNA, 20 bp, Artificial Sequence
  Synthetic oligonucleotide; GAG chr2 60521580 60521599 60521583 -
atggaagatgaaagggagca

SEQ ID NO: 175498 - DNA, 20 bp, Artificial Sequence
  Synthetic oligonucleotide; TGG chr2 60521577 60521596 60521580 -
gaagatgaaagggagcagag

SEQ ID NO: 175499 - DNA, 20 bp, Artificial Sequence
  Synthetic oligonucleotide; CAG chr2 60521568 60521587 60521571 -
agggagcagagtggcaattg

SEQ ID NO: 175500 - DNA, 20 bp, Artificial Sequence
  Synthetic oligonucleotide; GAG chr2 60521566 60521585 60521569 -
ggagcagagtggcaattgca

SEQ ID NO: 175501 - DNA, 20 bp, Artificial Sequence
  Synthetic oligonucleotide; TGG chr2 60521562 60521581 60521565 -
cagagtggcaattgcagagc

SEQ ID NO: 175502 - DNA, 20 bp, Artificial Sequence
  Synthetic oligonucleotide; AAG chr2 60521558 60521577 60521561 -
gtggcaattgcagagctgga

SEQ ID NO: 175503 - DNA, 20 bp, Artificial Sequence
  Synthetic oligonucleotide; AGG chr2 60521557 60521576 60521560 -
tggcaattgcagagctggaa

SEQ ID NO: 175504 - DNA, 20 bp, Artificial Sequence
  Synthetic oligonucleotide; GGG chr2 60521556 60521575 60521559 -
ggcaattgcagagctggaaa

SEQ ID NO: 175505 - DNA, 20 bp, Artificial Sequence
  Synthetic oligonucleotide; GGG chr2 60521555 60521574 60521558 -
gcaattgcagagctggaaag

SEQ ID NO: 175506 - DNA, 20 bp, Artificial Sequence
  Synthetic oligonucleotide; TAG chr2 60521539 60521558 60521542 -
aaaggggaattttgttcttc

SEQ ID NO: 175507 - DNA, 20 bp, Artificial Sequence
  Synthetic oligonucleotide; TAG chr2 60521535 60521554 60521538 -
gggaattttgttcttctaga

SEQ ID NO: 175508 - DNA, 20 bp, Artificial Sequence
  Synthetic oligonucleotide; AAG chr2 60521529 60521548 60521532 -
tttgttcttctagatagcaa

SEQ ID NO: 175509 - DNA, 20 bp, Artificial Sequence
  Synthetic oligonucleotide; CAG chr2 60521525 60521544 60521528 -
ttcttctagatagcaaaagc

SEQ ID NO: 175510 - DNA, 20 bp, Artificial Sequence
  Synthetic oligonucleotide; AGG chr2 60521524 60521543 60521527 -
tcttctagatagcaaaagcc

SEQ ID NO: 175511 - DNA, 20 bp, Artificial Sequence
  Synthetic oligonucleotide; AAG chr2 60521501 60521520 60521504 -
actgtcgctgtgtgacttga

SEQ ID NO: 175512 - DNA, 20 bp, Artificial Sequence
  Synthetic oligonucleotide; TAG chr2 60521497 60521516 60521500 -
tcgctgtgtgacttgaaagc

SEQ ID NO: 175513 - DNA, 20 bp, Artificial Sequence
  Synthetic oligonucleotide; AGG chr2 60521496 60521515 60521499 -
cgctgtgtgacttgaaagct

SEQ ID NO: 175514 - DNA, 20 bp, Artificial Sequence
  Synthetic oligonucleotide; TGG chr2 60521489 60521508 60521492 -
tgacttgaaagctaggtcac

SEQ ID NO: 175515 - DNA, 20 bp, Artificial Sequence
  Synthetic oligonucleotide; TGG chr2 60521486 60521505 60521489 -
cttgaaagctaggtcactgg

SEQ ID NO: 175516 - DNA, 20 bp, Artificial Sequence
  Synthetic oligonucleotide; GGG chr2 60521485 60521504 60521488 -
ttgaaagctaggtcactggt

SEQ ID NO: 175517 - DNA, 20 bp, Artificial Sequence
  Synthetic oligonucleotide; CAG chr2 60521475 60521494 60521478 -
ggtcactggtgggcttcgtg

SEQ ID NO: 175518 - DNA, 20 bp, Artificial Sequence
  Synthetic oligonucleotide; CAG chr2 60521465 60521484 60521468 -
gggcttcgtgcagcccgtca

SEQ ID NO: 175519 - DNA, 20 bp, Artificial Sequence
  Synthetic oligonucleotide; AGG chr2 60521464 60521483 60521467 -
ggcttcgtgcagcccgtcac

SEQ ID NO: 175520 - DNA, 20 bp, Artificial Sequence
  Synthetic oligonucleotide; GGG chr2 60521463 60521482 60521466 -
gcttcgtgcagcccgtcaca

SEQ ID NO: 175521 - DNA, 20 bp, Artificial Sequence
  Synthetic oligonucleotide; GGG chr2 60521462 60521481 60521465 -
cttcgtgcagcccgtcacag

SEQ ID NO: 175522 - DNA, 20 bp, Artificial Sequence
  Synthetic oligonucleotide; GAG chr2 60521460 60521479 60521463 -
tcgtgcagcccgtcacaggg

SEQ ID NO: 175523 - DNA, 20 bp, Artificial Sequence
  Synthetic oligonucleotide; TGG chr2 60521454 60521473 60521457 -
agcccgtcacaggggagcca

SEQ ID NO: 175524 - DNA, 20 bp, Artificial Sequence
  Synthetic oligonucleotide; TGG chr2 60521451 60521470 60521454 -
ccgtcacaggggagccatgg

SEQ ID NO: 175525 - DNA, 20 bp, Artificial Sequence
  Synthetic oligonucleotide; GGG chr2 60521450 60521469 60521453 -
cgtcacaggggagccatggt

SEQ ID NO: 175526 - DNA, 20 bp, Artificial Sequence
  Synthetic oligonucleotide; TGG chr2 60521422 60521441 60521425 -
tctctgccgtatctgctgcc

SEQ ID NO: 175527 - DNA, 20 bp, Artificial Sequence
  Synthetic oligonucleotide; AAG chr2 60521419 60521438 60521422 -
ctgccgtatctgctgcctgg

SEQ ID NO: 175528 - DNA, 20 bp, Artificial Sequence
  Synthetic oligonucleotide; GAG chr2 60521414 60521433 60521417 -
gtatctgctgcctggaagct

SEQ ID NO: 175529 - DNA, 20 bp, Artificial Sequence
  Synthetic oligonucleotide; TGG chr2 60521409 60521428 60521412 -
tgctgcctggaagctgagac

SEQ ID NO: 175530 - DNA, 20 bp, Artificial Sequence
  Synthetic oligonucleotide; CAG chr2 60521384 60521403 60521387 -
taaccacatcacaccattcc

SEQ ID NO: 175531 - DNA, 20 bp, Artificial Sequence
  Synthetic oligonucleotide; CAG chr2 60521378 60521397 60521381 -
catcacaccattcccagacc

SEQ ID NO: 175532 - DNA, 20 bp, Artificial Sequence
  Synthetic oligonucleotide; AGG chr2 60521377 60521396 60521380 -
atcacaccattcccagaccc

SEQ ID NO: 175533 - DNA, 20 bp, Artificial Sequence
  Synthetic oligonucleotide; CAG chr2 60521372 60521391 60521375 -
accattcccagacccaggcc

SEQ ID NO: 175534 - DNA, 20 bp, Artificial Sequence
  Synthetic oligonucleotide; AGG chr2 60521371 60521390 60521374 -
ccattcccagacccaggccc

SEQ ID NO: 175535 - DNA, 20 bp, Artificial Sequence
  Synthetic oligonucleotide; CAG chr2 60521366 60521385 60521369 -
cccagacccaggcccaggcc

SEQ ID NO: 175536 - DNA, 20 bp, Artificial Sequence
  Synthetic oligonucleotide; AGG chr2 60521365 60521384 60521368 -
ccagacccaggcccaggccc

SEQ ID NO: 175537 - DNA, 20 bp, Artificial Sequence
  Synthetic oligonucleotide; CGG chr2 60521360 60521379 60521363 -
cccaggcccaggcccaggcc

SEQ ID NO: 175538 - DNA, 20 bp, Artificial Sequence
  Synthetic oligonucleotide; GGG chr2 60521359 60521378 60521362 -
ccaggcccaggcccaggccc

SEQ ID NO: 175539 - DNA, 20 bp, Artificial Sequence
  Synthetic oligonucleotide; TGG chr2 60521350 60521369 60521353 -
ggcccaggcccgggtccctc

SEQ ID NO: 175540 - DNA, 20 bp, Artificial Sequence
  Synthetic oligonucleotide; CAG chr2 60521314 60521333 60521317 -
ccgctctctctcgcttcaca

SEQ ID NO: 175541 - DNA, 20 bp, Artificial Sequence
  Synthetic oligonucleotide; GAG chr2 60521312 60521331 60521315 -
gctctctctcgcttcacaca

SEQ ID NO: 175542 - DNA, 20 bp, Artificial Sequence
  Synthetic oligonucleotide; AGG chr2 60521311 60521330 60521314 -
ctctctctcgcttcacacag

SEQ ID NO: 175543 - DNA, 20 bp, Artificial Sequence
  Synthetic oligonucleotide; TAG chr2 60521301 60521320 60521304 -
cttcacacagaggctattat

SEQ ID NO: 175544 - DNA, 20 bp, Artificial Sequence
  Synthetic oligonucleotide; AAG chr2 60521297 60521316 60521300 -
acacagaggctattattagc

SEQ ID NO: 175545 - DNA, 20 bp, Artificial Sequence
  Synthetic oligonucleotide; CAG chr2 60521287 60521306 60521290 -
tattattagcaagtgtcact

SEQ ID NO: 175546 - DNA, 20 bp, Artificial Sequence
  Synthetic oligonucleotide; GAG chr2 60521278 60521297 60521281 -
caagtgtcactcagttatct

SEQ ID NO: 175547 - DNA, 20 bp, Artificial Sequence
  Synthetic oligonucleotide; GAG chr2 60521276 60521295 60521279 -
agtgtcactcagttatctga

SEQ ID NO: 175548 - DNA, 20 bp, Artificial Sequence
  Synthetic oligonucleotide; TGG chr2 60521273 60521292 60521276 -
gtcactcagttatctgagag

SEQ ID NO: 175549 - DNA, 20 bp, Artificial Sequence
  Synthetic oligonucleotide; TAG chr2 60521264 60521283 60521267 -
ttatctgagagtggcgcttt

SEQ ID NO: 175550 - DNA, 20 bp, Artificial Sequence
  Synthetic oligonucleotide; AAG chr2 60521252 60521271 60521255 -
ggcgcttttagctgccatct

SEQ ID NO: 175551 - DNA, 20 bp, Artificial Sequence
  Synthetic oligonucleotide; TGG chr2 60521238 60521257 60521241 -
ccatctaagtgcctgatact

SEQ ID NO: 175552 - DNA, 20 bp, Artificial Sequence
  Synthetic oligonucleotide; GGG chr2 60521237 60521256 60521240 -
catctaagtgcctgatactt

SEQ ID NO: 175553 - DNA, 20 bp, Artificial Sequence
  Synthetic oligonucleotide; CAG chr2 60521230 60521249 60521233 -
gtgcctgatacttgggttta

SEQ ID NO: 175554 - DNA, 20 bp, Artificial Sequence
  Synthetic oligonucleotide; CAG chr2 60521227 60521246 60521230 -
cctgatacttgggtttacag

SEQ ID NO: 175555 - DNA, 20 bp, Artificial Sequence
  Synthetic oligonucleotide; TAG chr2 60521210 60521229 60521213 -
cagcagattaaattaaattt

SEQ ID NO: 175556 - DNA, 20 bp, Artificial Sequence
  Synthetic oligonucleotide; AGG chr2 60521209 60521228 60521212 -
agcagattaaattaaatttt

SEQ ID NO: 175557 - DNA, 20 bp, Artificial Sequence
  Synthetic oligonucleotide; TGG chr2 60521205 60521224 60521208 -
gattaaattaaattttaggc

SEQ ID NO: 175558 - DNA, 20 bp, Artificial Sequence
  Synthetic oligonucleotide; TGG chr2 60521200 60521219 60521203 -
aattaaattttaggctggtt

SEQ ID NO: 175559 - DNA, 20 bp, Artificial Sequence
  Synthetic oligonucleotide; TGG chr2 60521191 60521210 60521194 -
ttaggctggtttggcttcac

SEQ ID NO: 175560 - DNA, 20 bp, Artificial Sequence
  Synthetic oligonucleotide; CAG chr2 60521188 60521207 60521191 -
ggctggtttggcttcactgg

SEQ ID NO: 175561 - DNA, 20 bp, Artificial Sequence
  Synthetic oligonucleotide; TAG chr2 60521185 60521204 60521188 -
tggtttggcttcactggcag

SEQ ID NO: 175562 - DNA, 20 bp, Artificial Sequence
  Synthetic oligonucleotide; TGG chr2 60521178 60521197 60521181 -
gcttcactggcagtagacaa

SEQ ID NO: 175563 - DNA, 20 bp, Artificial Sequence
  Synthetic oligonucleotide; AAG chr2 60521175 60521194 60521178 -
tcactggcagtagacaatgg

SEQ ID NO: 175564 - DNA, 20 bp, Artificial Sequence
  Synthetic oligonucleotide; AGG chr2 60521174 60521193 60521177 -
cactggcagtagacaatgga

SEQ ID NO: 175565 - DNA, 20 bp, Artificial Sequence
  Synthetic oligonucleotide; CAG chr2 60521171 60521190 60521174 -
tggcagtagacaatggaagg

SEQ ID NO: 175566 - DNA, 20 bp, Artificial Sequence
  Synthetic oligonucleotide; TAG chr2 60521162 60521181 60521165 -
acaatggaaggcagctgttg

SEQ ID NO: 175567 - DNA, 20 bp, Artificial Sequence
  Synthetic oligonucleotide; TGG chr2 60521149 60521168 60521152 -
gctgttgtagaaatgtaacc

SEQ ID NO: 175568 - DNA, 20 bp, Artificial Sequence
  Synthetic oligonucleotide; AAG chr2 60521139 60521158 60521142 -
aaatgtaacctggcaccctc

SEQ ID NO: 175569 - DNA, 20 bp, Artificial Sequence
  Synthetic oligonucleotide; AGG chr2 60521138 60521157 60521141 -
aatgtaacctggcaccctca

SEQ ID NO: 175570 - DNA, 20 bp, Artificial Sequence
  Synthetic oligonucleotide; GAG chr2 60521127 60521146 60521130 -
gcaccctcaaggatttgtgt

SEQ ID NO: 175571 - DNA, 20 bp, Artificial Sequence
  Synthetic oligonucleotide; GAG chr2 60521103 60521122 60521106 -
gtgtgtgtgtgtgtgtgtgt

SEQ ID NO: 175572 - DNA, 20 bp, Artificial Sequence
  Synthetic oligonucleotide; TAG chr2 60521060 60521079 60521063 -
tgtgtgtgtgtgctgaccac

SEQ ID NO: 175573 - DNA, 20 bp, Artificial Sequence
  Synthetic oligonucleotide; AGG chr2 60521059 60521078 60521062 -
gtgtgtgtgtgctgaccact

SEQ ID NO: 175574 - DNA, 20 bp, Artificial Sequence
  Synthetic oligonucleotide; AAG chr2 60521012 60521031 60521015 -
ccatttcatccctttccaaa

SEQ ID NO: 175575 - DNA, 20 bp, Artificial Sequence
  Synthetic oligonucleotide; TAG chr2 60521005 60521024 60521008 -
atccctttccaaaaagtgtt

SEQ ID NO: 175576 - DNA, 20 bp, Artificial Sequence
  Synthetic oligonucleotide; TAG chr2 60520997 60521016 60521000 -
ccaaaaagtgtttagacaaa

SEQ ID NO: 175577 - DNA, 20 bp, Artificial Sequence
  Synthetic oligonucleotide; CAG chr2 60520989 60521008 60520992 -
tgtttagacaaatagtttcc

SEQ ID NO: 175578 - DNA, 20 bp, Artificial Sequence
  Synthetic oligonucleotide; TGG chr2 60520983 60521002 60520986 -
gacaaatagtttcccagact

SEQ ID NO: 175579 - DNA, 20 bp, Artificial Sequence
  Synthetic oligonucleotide; TGG chr2 60520969 60520988 60520972 -
cagacttggttttatcatgc

SEQ ID NO: 175580 - DNA, 20 bp, Artificial Sequence
  Synthetic oligonucleotide; GGG chr2 60520968 60520987 60520971 -
agacttggttttatcatgct

SEQ ID NO: 175581 - DNA, 20 bp, Artificial Sequence
  Synthetic oligonucleotide; AAG chr2 60520959 60520978 60520962 -
tttatcatgctgggttgaca

SEQ ID NO: 175582 - DNA, 20 bp, Artificial Sequence
  Synthetic oligonucleotide; AGG chr2 60520958 60520977 60520961 -
ttatcatgctgggttgacaa

SEQ ID NO: 175583 - DNA, 20 bp, Artificial Sequence
  Synthetic oligonucleotide; CAG chr2 60520948 60520967 60520951 -
gggttgacaaaggttgtgta

SEQ ID NO: 175584 - DNA, 20 bp, Artificial Sequence
  Synthetic oligonucleotide; GAG chr2 60520946 60520965 60520949 -
gttgacaaaggttgtgtaca

SEQ ID NO: 175585 - DNA, 20 bp, Artificial Sequence
  Synthetic oligonucleotide; TGG chr2 60520942 60520961 60520945 -
acaaaggttgtgtacagagc

SEQ ID NO: 175586 - DNA, 20 bp, Artificial Sequence
  Synthetic oligonucleotide; TGG chr2 60520914 60520933 60520917 -
ttttttcttctttctactgt

SEQ ID NO: 175587 - DNA, 20 bp, Artificial Sequence
  Synthetic oligonucleotide; AAG chr2 60520887 60520906 60520890 -
tcaatatctttttttctgca

SEQ ID NO: 175588 - DNA, 20 bp, Artificial Sequence
  Synthetic oligonucleotide; AAG chr2 60520884 60520903 60520887 -
atatctttttttctgcaaag

SEQ ID NO: 175589 - DNA, 20 bp, Artificial Sequence
  Synthetic oligonucleotide; AGG chr2 60520883 60520902 60520886 -
tatctttttttctgcaaaga

SEQ ID NO: 175590 - DNA, 20 bp, Artificial Sequence
  Synthetic oligonucleotide; GGG chr2 60520882 60520901 60520885 -
atctttttttctgcaaagaa

SEQ ID NO: 175591 - DNA, 20 bp, Artificial Sequence
  Synthetic oligonucleotide; GGG chr2 60520881 60520900 60520884 -
tctttttttctgcaaagaag

SEQ ID NO: 175592 - DNA, 20 bp, Artificial Sequence
  Synthetic oligonucleotide; AAG chr2 60520876 60520895 60520879 -
ttttctgcaaagaaggggct

SEQ ID NO: 175593 - DNA, 20 bp, Artificial Sequence
  Synthetic oligonucleotide; CGG chr2 60520858 60520877 60520861 -
ctaagcttgcacgaaaacac

SEQ ID NO: 175594 - DNA, 20 bp, Artificial Sequence
  Synthetic oligonucleotide; TGG chr2 60520855 60520874 60520858 -
agcttgcacgaaaacaccgg

SEQ ID NO: 175595 - DNA, 20 bp, Artificial Sequence
  Synthetic oligonucleotide; GGG chr2 60520854 60520873 60520857 -
gcttgcacgaaaacaccggt

SEQ ID NO: 175596 - DNA, 20 bp, Artificial Sequence
  Synthetic oligonucleotide; TGG chr2 60520844 60520863 60520847 -
aaacaccggtgggaacccac

SEQ ID NO: 175597 - DNA, 20 bp, Artificial Sequence
  Synthetic oligonucleotide; GAG chr2 60520842 60520861 60520845 -
acaccggtgggaacccactg

SEQ ID NO: 175598 - DNA, 20 bp, Artificial Sequence
  Synthetic oligonucleotide; AAG chr2 60520839 60520858 60520842 -
ccggtgggaacccactggag

SEQ ID NO: 175599 - DNA, 20 bp, Artificial Sequence
  Synthetic oligonucleotide; AGG chr2 60520838 60520857 60520841 -
cggtgggaacccactggaga

SEQ ID NO: 175600 - DNA, 20 bp, Artificial Sequence
  Synthetic oligonucleotide; GGG chr2 60520837 60520856 60520840 -
ggtgggaacccactggagaa

SEQ ID NO: 175601 - DNA, 20 bp, Artificial Sequence
  Synthetic oligonucleotide; TGG chr2 60520832 60520851 60520835 -
gaacccactggagaagggca

SEQ ID NO: 175602 - DNA, 20 bp, Artificial Sequence
  Synthetic oligonucleotide; GGG chr2 60520831 60520850 60520834 -
aacccactggagaagggcat

SEQ ID NO: 175603 - DNA, 20 bp, Artificial Sequence
  Synthetic oligonucleotide; TGG chr2 60520828 60520847 60520831 -
ccactggagaagggcatggg

SEQ ID NO: 175604 - DNA, 20 bp, Artificial Sequence
  Synthetic oligonucleotide; TGG chr2 60520821 60520840 60520824 -
agaagggcatgggtggtttt

SEQ ID NO: 175605 - DNA, 20 bp, Artificial Sequence
  Synthetic oligonucleotide; CGG chr2 60520816 60520835 60520819 -
ggcatgggtggtttttggtt

SEQ ID NO: 175606 - DNA, 20 bp, Artificial Sequence
  Synthetic oligonucleotide; TGG chr2 60520812 60520831 60520815 -
tgggtggtttttggttcggt

SEQ ID NO: 175607 - DNA, 20 bp, Artificial Sequence
  Synthetic oligonucleotide; TGG chr2 60520809 60520828 60520812 -
gtggtttttggttcggttgg

SEQ ID NO: 175608 - DNA, 20 bp, Artificial Sequence
  Synthetic oligonucleotide; TGG chr2 60520797 60520816 60520800 -
tcggttggtggctgatctga

SEQ ID NO: 175609 - DNA, 20 bp, Artificial Sequence
  Synthetic oligonucleotide; GGG chr2 60520796 60520815 60520799 -
cggttggtggctgatctgat

SEQ ID NO: 175610 - DNA, 20 bp, Artificial Sequence
  Synthetic oligonucleotide; TGG chr2 60520793 60520812 60520796 -
ttggtggctgatctgatggg

SEQ ID NO: 175611 - DNA, 20 bp, Artificial Sequence
  Synthetic oligonucleotide; TAG chr2 60520788 60520807 60520791 -
ggctgatctgatgggtggta

SEQ ID NO: 175612 - DNA, 20 bp, Artificial Sequence
  Synthetic oligonucleotide; AGG chr2 60520787 60520806 60520790 -
gctgatctgatgggtggtat

SEQ ID NO: 175613 - DNA, 20 bp, Artificial Sequence
  Synthetic oligonucleotide; CAG chr2 60520784 60520803 60520787 -
gatctgatgggtggtatagg

SEQ ID NO: 175614 - DNA, 20 bp, Artificial Sequence
  Synthetic oligonucleotide; TGG chr2 60520775 60520794 60520778 -
ggtggtataggcagaatgtc

SEQ ID NO: 175615 - DNA, 20 bp, Artificial Sequence
  Synthetic oligonucleotide; CAG chr2 60520763 60520782 60520766 -
agaatgtctggctgcccctt

SEQ ID NO: 175616 - DNA, 20 bp, Artificial Sequence
  Synthetic oligonucleotide; TAG chr2 60520753 60520772 60520756 -
gctgccccttcagattcctg

SEQ ID NO: 175617 - DNA, 20 bp, Artificial Sequence
  Synthetic oligonucleotide; TAG chr2 60520744 60520763 60520747 -
tcagattcctgtagattccg

SEQ ID NO: 175618 - DNA, 20 bp, Artificial Sequence
  Synthetic oligonucleotide; AGG chr2 60520743 60520762 60520746 -
cagattcctgtagattccgt

SEQ ID NO: 175619 - DNA, 20 bp, Artificial Sequence
  Synthetic oligonucleotide; TGG chr2 60520731 60520750 60520734 -
gattccgtaggcgaccaaca

SEQ ID NO: 175620 - DNA, 20 bp, Artificial Sequence
  Synthetic oligonucleotide; GGG chr2 60520730 60520749 60520733 -
attccgtaggcgaccaacat

SEQ ID NO: 175621 - DNA, 20 bp, Artificial Sequence
  Synthetic oligonucleotide; GGG chr2 60520729 60520748 60520732 -
ttccgtaggcgaccaacatg

SEQ ID NO: 175622 - DNA, 20 bp, Artificial Sequence
  Synthetic oligonucleotide; TGG chr2 60520726 60520745 60520729 -
cgtaggcgaccaacatgggg

SEQ ID NO: 175623 - DNA, 20 bp, Artificial Sequence
  Synthetic oligonucleotide; GGG chr2 60520725 60520744 60520728 -
gtaggcgaccaacatggggt

SEQ ID NO: 175624 - DNA, 20 bp, Artificial Sequence
  Synthetic oligonucleotide; GGG chr2 60520724 60520743 60520727 -
taggcgaccaacatggggtg

SEQ ID NO: 175625 - DNA, 20 bp, Artificial Sequence
  Synthetic oligonucleotide; GGG chr2 60520723 60520742 60520726 -
aggcgaccaacatggggtgg

SEQ ID NO: 175626 - DNA, 20 bp, Artificial Sequence
  Synthetic oligonucleotide; TGG chr2 60520720 60520739 60520723 -
cgaccaacatggggtggggg

SEQ ID NO: 175627 - DNA, 20 bp, Artificial Sequence
  Synthetic oligonucleotide; GGG chr2 60520719 60520738 60520722 -
gaccaacatggggtgggggt

SEQ ID NO: 175628 - DNA, 20 bp, Artificial Sequence
  Synthetic oligonucleotide; GGG chr2 60520718 60520737 60520721 -
accaacatggggtgggggtg

SEQ ID NO: 175629 - DNA, 20 bp, Artificial Sequence
  Synthetic oligonucleotide; GGG chr2 60520717 60520736 60520720 -
ccaacatggggtgggggtgg

SEQ ID NO: 175630 - DNA, 20 bp, Artificial Sequence
  Synthetic oligonucleotide; TGG chr2 60520675 60520694 60520678 -
gcaaatatcttcactctcct

SEQ ID NO: 175631 - DNA, 20 bp, Artificial Sequence
  Synthetic oligonucleotide; TGG chr2 60520664 60520683 60520667 -
cactctccttggtgcttctg

SEQ ID NO: 175632 - DNA, 20 bp, Artificial Sequence
  Synthetic oligonucleotide; TAG chr2 60520646 60520665 60520649 -
tgtggttgtgcctatgaatt

SEQ ID NO: 175633 - DNA, 20 bp, Artificial Sequence
  Synthetic oligonucleotide; AGG chr2 60520645 60520664 60520648 -
gtggttgtgcctatgaattt

SEQ ID NO: 175634 - DNA, 20 bp, Artificial Sequence
  Synthetic oligonucleotide; TAG chr2 60520629 60520648 60520632 -
atttaggaccttatgcctca

SEQ ID NO: 175635 - DNA, 20 bp, Artificial Sequence
  Synthetic oligonucleotide; GAG chr2 60520622 60520641 60520625 -
accttatgcctcatagtgtt

SEQ ID NO: 175636 - DNA, 20 bp, Artificial Sequence
  Synthetic oligonucleotide; CAG chr2 60520618 60520637 60520621 -
tatgcctcatagtgttgagt

SEQ ID NO: 175637 - DNA, 20 bp, Artificial Sequence
  Synthetic oligonucleotide; GAG chr2 60520616 60520635 60520619 -
tgcctcatagtgttgagtca

SEQ ID NO: 175638 - DNA, 20 bp, Artificial Sequence
  Synthetic oligonucleotide; CAG chr2 60520608 60520627 60520611 -
agtgttgagtcagagcaaaa

SEQ ID NO: 175639 - DNA, 20 bp, Artificial Sequence
  Synthetic oligonucleotide; AAG chr2 60520596 60520615 60520599 -
gagcaaaacagtttacatca

SEQ ID NO: 175640 - DNA, 20 bp, Artificial Sequence
  Synthetic oligonucleotide; AGG chr2 60520595 60520614 60520598 -
agcaaaacagtttacatcaa

SEQ ID NO: 175641 - DNA, 20 bp, Artificial Sequence
  Synthetic oligonucleotide; CAG chr2 60520573 60520592 60520576 -
gccacttatttaattttcct

SEQ ID NO: 175642 - DNA, 20 bp, Artificial Sequence
  Synthetic oligonucleotide; GAG chr2 60520560 60520579 60520563 -
ttttcctcagaaaactctgt

SEQ ID NO: 175643 - DNA, 20 bp, Artificial Sequence
  Synthetic oligonucleotide; AGG chr2 60520559 60520578 60520562 -
tttcctcagaaaactctgtg

SEQ ID NO: 175644 - DNA, 20 bp, Artificial Sequence
  Synthetic oligonucleotide; CGG chr2 60520535 60520554 60520538 -
taatttctccttcttataaa

SEQ ID NO: 175645 - DNA, 20 bp, Artificial Sequence
  Synthetic oligonucleotide; AAG chr2 60520493 60520512 60520496 -
atgtgtacattatcccaccg

SEQ ID NO: 175646 - DNA, 20 bp, Artificial Sequence
  Synthetic oligonucleotide; AGG chr2 60520492 60520511 60520495 -
tgtgtacattatcccaccga

SEQ ID NO: 175647 - DNA, 20 bp, Artificial Sequence
  Synthetic oligonucleotide; GGG chr2 60520491 60520510 60520494 -
gtgtacattatcccaccgaa

SEQ ID NO: 175648 - DNA, 20 bp, Artificial Sequence
  Synthetic oligonucleotide; TAG chr2 60520465 60520484 60520468 -
tgctctttacttttataatc

SEQ ID NO: 175649 - DNA, 20 bp, Artificial Sequence
  Synthetic oligonucleotide; TGG chr2 60520449 60520468 60520452 -
aatctagattttaaaaaatt

SEQ ID NO: 175650 - DNA, 20 bp, Artificial Sequence
  Synthetic oligonucleotide; TGG chr2 60520446 60520465 60520449 -
ctagattttaaaaaatttgg

SEQ ID NO: 175651 - DNA, 20 bp, Artificial Sequence
  Synthetic oligonucleotide; CAG chr2 60520433 60520452 60520436 -
aatttggtggcacttgattt

SEQ ID NO: 175652 - DNA, 20 bp, Artificial Sequence
  Synthetic oligonucleotide; AGG chr2 60520432 60520451 60520435 -
atttggtggcacttgatttc

SEQ ID NO: 175653 - DNA, 20 bp, Artificial Sequence
  Synthetic oligonucleotide; CAG chr2 60520425 60520444 60520428 -
ggcacttgatttcaggtcct

SEQ ID NO: 175654 - DNA, 20 bp, Artificial Sequence
  Synthetic oligonucleotide; CAG chr2 60520418 60520437 60520421 -
gatttcaggtcctcagactc

SEQ ID NO: 175655 - DNA, 20 bp, Artificial Sequence
  Synthetic oligonucleotide; TAG chr2 60520398 60520417 60520401 -
cagaatttatactcactgat

SEQ ID NO: 175656 - DNA, 20 bp, Artificial Sequence
  Synthetic oligonucleotide; CAG chr2 60520374 60520393 60520377 -
aatgcattatgcaaataatt

SEQ ID NO: 175657 - DNA, 20 bp, Artificial Sequence
  Synthetic oligonucleotide; AAG chr2 60520317 60520336 60520320 -
acctcatgtcttgaaaaaaa

SEQ ID NO: 175658 - DNA, 20 bp, Artificial Sequence
  Synthetic oligonucleotide; CAG chr2 60520283 60520302 60520286 -
ctcaaaataaacaaaacctg

SEQ ID NO: 175659 - DNA, 20 bp, Artificial Sequence
  Synthetic oligonucleotide; AAG chr2 60520280 60520299 60520283 -
aaaataaacaaaacctgcag

SEQ ID NO: 175660 - DNA, 20 bp, Artificial Sequence
  Synthetic oligonucleotide; GAG chr2 60520278 60520297 60520281 -
aataaacaaaacctgcagaa

SEQ ID NO: 175661 - DNA, 20 bp, Artificial Sequence
  Synthetic oligonucleotide; AAG chr2 60520267 60520286 60520270 -
cctgcagaagagtttattgt

SEQ ID NO: 175662 - DNA, 20 bp, Artificial Sequence
  Synthetic oligonucleotide; AGG chr2 60520266 60520285 60520269 -
ctgcagaagagtttattgta

SEQ ID NO: 175663 - DNA, 20 bp, Artificial Sequence
  Synthetic oligonucleotide; GGG chr2 60520265 60520284 60520268 -
tgcagaagagtttattgtaa

SEQ ID NO: 175664 - DNA, 20 bp, Artificial Sequence
  Synthetic oligonucleotide; AAG chr2 60520253 60520272 60520256 -
tattgtaagggtgaaaatta

SEQ ID NO: 175665 - DNA, 20 bp, Artificial Sequence
  Synthetic oligonucleotide; GAG chr2 60520251 60520270 60520254 -
ttgtaagggtgaaaattaaa

SEQ ID NO: 175666 - DNA, 20 bp, Artificial Sequence
  Synthetic oligonucleotide; AGG chr2 60520250 60520269 60520253 -
tgtaagggtgaaaattaaag

SEQ ID NO: 175667 - DNA, 20 bp, Artificial Sequence
  Synthetic oligonucleotide; TGG chr2 60520235 60520254 60520238 -
taaagaggaacccatttgcc

SEQ ID NO: 175668 - DNA, 20 bp, Artificial Sequence
  Synthetic oligonucleotide; GGG chr2 60520234 60520253 60520237 -
aaagaggaacccatttgcct

SEQ ID NO: 175669 - DNA, 20 bp, Artificial Sequence
  Synthetic oligonucleotide; GAG chr2 60520224 60520243 60520227 -
ccatttgcctgggaactttt

SEQ ID NO: 175670 - DNA, 20 bp, Artificial Sequence
  Synthetic oligonucleotide; AGG chr2 60520223 60520242 60520226 -
catttgcctgggaacttttg

SEQ ID NO: 175671 - DNA, 20 bp, Artificial Sequence
  Synthetic oligonucleotide; AAG chr2 60520145 60520164 60520148 -
atcaatataccttgccacgc

SEQ ID NO: 175672 - DNA, 20 bp, Artificial Sequence
  Synthetic oligonucleotide; AGG chr2 60520144 60520163 60520147 -
tcaatataccttgccacgca

SEQ ID NO: 175673 - DNA, 20 bp, Artificial Sequence
  Synthetic oligonucleotide; TGG chr2 60520125 60520144 60520128 -
aaggtatattctattatctt

SEQ ID NO: 175674 - DNA, 20 bp, Artificial Sequence
  Synthetic oligonucleotide; CAG chr2 60520101 60520120 60520104 -
tttctgaatttttcaatttt

SEQ ID NO: 175675 - DNA, 20 bp, Artificial Sequence
  Synthetic oligonucleotide; AAG chr2 60520095 60520114 60520098 -
aatttttcaattttcagaaa

SEQ ID NO: 175676 - DNA, 20 bp, Artificial Sequence
  Synthetic oligonucleotide; AAG chr2 60520092 60520111 60520095 -
ttttcaattttcagaaaaag

SEQ ID NO: 175677 - DNA, 20 bp, Artificial Sequence
  Synthetic oligonucleotide; CAG chr2 60520049 60520068 60520052 -
cacatttgtgcataaataca

SEQ ID NO: 175678 - DNA, 20 bp, Artificial Sequence
  Synthetic oligonucleotide; AGG chr2 60520048 60520067 60520051 -
acatttgtgcataaatacac

SEQ ID NO: 175679 - DNA, 20 bp, Artificial Sequence
  Synthetic oligonucleotide; TAG chr2 60520031 60520050 60520034 -
cacaggcataaatgaaaatt

SEQ ID NO: 175680 - DNA, 20 bp, Artificial Sequence
  Synthetic oligonucleotide; AGG chr2 60520030 60520049 60520033 -
acaggcataaatgaaaattt

SEQ ID NO: 175681 - DNA, 20 bp, Artificial Sequence
  Synthetic oligonucleotide; AAG chr2 60520015 60520034 60520018 -
aatttaggccgaattatttg

SEQ ID NO: 175682 - DNA, 20 bp, Artificial Sequence
  Synthetic oligonucleotide; GAG chr2 60520013 60520032 60520016 -
tttaggccgaattatttgaa

SEQ ID NO: 175683 - DNA, 20 bp, Artificial Sequence
  Synthetic oligonucleotide; AGG chr2 60520012 60520031 60520015 -
ttaggccgaattatttgaag

SEQ ID NO: 175684 - DNA, 20 bp, Artificial Sequence
  Synthetic oligonucleotide; CAG chr2 60519992 60520011 60519995 -
aggatacaataattgcttgc

SEQ ID NO: 175685 - DNA, 20 bp, Artificial Sequence
  Synthetic oligonucleotide; CAG chr2 60519972 60519991 60519975 -
cagtgacatgattctcctgc

SEQ ID NO: 175686 - DNA, 20 bp, Artificial Sequence
  Synthetic oligonucleotide; GAG chr2 60519970 60519989 60519973 -
gtgacatgattctcctgcca

SEQ ID NO: 175687 - DNA, 20 bp, Artificial Sequence
  Synthetic oligonucleotide; GAG chr2 60519968 60519987 60519971 -
gacatgattctcctgccaga

SEQ ID NO: 175688 - DNA, 20 bp, Artificial Sequence
  Synthetic oligonucleotide; GAG chr2 60519966 60519985 60519969 -
catgattctcctgccagaga

SEQ ID NO: 175689 - DNA, 20 bp, Artificial Sequence
  Synthetic oligonucleotide; AGG chr2 60519965 60519984 60519968 -
atgattctcctgccagagag

SEQ ID NO: 175690 - DNA, 20 bp, Artificial Sequence
  Synthetic oligonucleotide; GGG chr2 60519964 60519983 60519967 -
tgattctcctgccagagaga

SEQ ID NO: 175691 - DNA, 20 bp, Artificial Sequence
  Synthetic oligonucleotide; GGG chr2 60519963 60519982 60519966 -
gattctcctgccagagagag

SEQ ID NO: 175692 - DNA, 20 bp, Artificial Sequence
  Synthetic oligonucleotide; GAG chr2 60519961 60519980 60519964 -
ttctcctgccagagagaggg

SEQ ID NO: 175693 - DNA, 20 bp, Artificial Sequence
  Synthetic oligonucleotide; TAG chr2 60519952 60519971 60519955 -
cagagagaggggagaataac

SEQ ID NO: 175694 - DNA, 20 bp, Artificial Sequence
  Synthetic oligonucleotide; AGG chr2 60519951 60519970 60519954 -
agagagaggggagaataact

SEQ ID NO: 175695 - DNA, 20 bp, Artificial Sequence
  Synthetic oligonucleotide; AAG chr2 60519929 60519948 60519932 -
gtgcaaacttttaacactcc

SEQ ID NO: 175696 - DNA, 20 bp, Artificial Sequence
  Synthetic oligonucleotide; TAG chr2 60519924 60519943 60519927 -
aacttttaacactccaagtc

SEQ ID NO: 175697 - DNA, 20 bp, Artificial Sequence
  Synthetic oligonucleotide; GAG chr2 60519922 60519941 60519925 -
cttttaacactccaagtcta

SEQ ID NO: 175698 - DNA, 20 bp, Artificial Sequence
  Synthetic oligonucleotide; GAG chr2 60519920 60519939 60519923 -
tttaacactccaagtctaga

SEQ ID NO: 175699 - DNA, 20 bp, Artificial Sequence
  Synthetic oligonucleotide; AAG chr2 60519909 60519928 60519912 -
aagtctagagagaattatcc

SEQ ID NO: 175700 - DNA, 20 bp, Artificial Sequence
  Synthetic oligonucleotide; TAG chr2 60519904 60519923 60519907 -
tagagagaattatccaagca

SEQ ID NO: 175701 - DNA, 20 bp, Artificial Sequence
  Synthetic oligonucleotide; GAG chr2 60519889 60519908 60519892 -
aagcatagccatgaattcct

SEQ ID NO: 175702 - DNA, 20 bp, Artificial Sequence
  Synthetic oligonucleotide; TGG chr2 60519883 60519902 60519886 -
agccatgaattcctgagtta

SEQ ID NO: 175703 - DNA, 20 bp, Artificial Sequence
  Synthetic oligonucleotide; TGG chr2 60519878 60519897 60519881 -
tgaattcctgagttatggat

SEQ ID NO: 175704 - DNA, 20 bp, Artificial Sequence
  Synthetic oligonucleotide; GAG chr2 60519834 60519853 60519837 -
acgatctctttgtcttcact

SEQ ID NO: 175705 - DNA, 20 bp, Artificial Sequence
  Synthetic oligonucleotide; TGG chr2 60519818 60519837 60519821 -
cactgagttttctttgtcat

SEQ ID NO: 175706 - DNA, 20 bp, Artificial Sequence
  Synthetic oligonucleotide; GAG chr2 60519816 60519835 60519819 -
ctgagttttctttgtcattg

SEQ ID NO: 175707 - DNA, 20 bp, Artificial Sequence
  Synthetic oligonucleotide; TAG chr2 60519808 60519827 60519811 -
tctttgtcattggagtaatt

SEQ ID NO: 175708 - DNA, 20 bp, Artificial Sequence
  Synthetic oligonucleotide; AGG chr2 60519807 60519826 60519810 -
ctttgtcattggagtaattt

SEQ ID NO: 175709 - DNA, 20 bp, Artificial Sequence
  Synthetic oligonucleotide; GAG chr2 60519805 60519824 60519808 -
ttgtcattggagtaatttag

SEQ ID NO: 175710 - DNA, 20 bp, Artificial Sequence
  Synthetic oligonucleotide; CAG chr2 60519798 60519817 60519801 -
tggagtaatttaggagaata

SEQ ID NO: 175711 - DNA, 20 bp, Artificial Sequence
  Synthetic oligonucleotide; AGG chr2 60519797 60519816 60519800 -
ggagtaatttaggagaatac

SEQ ID NO: 175712 - DNA, 20 bp, Artificial Sequence
  Synthetic oligonucleotide; TGG chr2 60519787 60519806 60519790 -
aggagaatacaggatgtgac

SEQ ID NO: 175713 - DNA, 20 bp, Artificial Sequence
  Synthetic oligonucleotide; GGG chr2 60519786 60519805 60519789 -
ggagaatacaggatgtgact

SEQ ID NO: 175714 - DNA, 20 bp, Artificial Sequence
  Synthetic oligonucleotide; GAG chr2 60519784 60519803 60519787 -
agaatacaggatgtgactgg

SEQ ID NO: 175715 - DNA, 20 bp, Artificial Sequence
  Synthetic oligonucleotide; AAG chr2 60519769 60519788 60519772 -
actgggagccctttctgaat

SEQ ID NO: 175716 - DNA, 20 bp, Artificial Sequence
  Synthetic oligonucleotide; CAG chr2 60519764 60519783 60519767 -
gagccctttctgaataagca

SEQ ID NO: 175717 - DNA, 20 bp, Artificial Sequence
  Synthetic oligonucleotide; CAG chr2 60519735 60519754 60519738 -
gcccacgtgaattcctaaac

SEQ ID NO: 175718 - DNA, 20 bp, Artificial Sequence
  Synthetic oligonucleotide; TGG chr2 60519732 60519751 60519735 -
cacgtgaattcctaaaccag

SEQ ID NO: 175719 - DNA, 20 bp, Artificial Sequence
  Synthetic oligonucleotide; CAG chr2 60519725 60519744 60519728 -
attcctaaaccagtggctcc

SEQ ID NO: 175720 - DNA, 20 bp, Artificial Sequence
  Synthetic oligonucleotide; CAG chr2 60519712 60519731 60519715 -
tggctcccagctgcatgtgt

SEQ ID NO: 175721 - DNA, 20 bp, Artificial Sequence
  Synthetic oligonucleotide; CAG chr2 60519707 60519726 60519710 -
cccagctgcatgtgtcagaa

SEQ ID NO: 175722 - DNA, 20 bp, Artificial Sequence
  Synthetic oligonucleotide; TGG chr2 60519701 60519720 60519704 -
tgcatgtgtcagaacagaac

SEQ ID NO: 175723 - DNA, 20 bp, Artificial Sequence
  Synthetic oligonucleotide; CAG chr2 60519695 60519714 60519698 -
tgtcagaacagaactggcct

SEQ ID NO: 175724 - DNA, 20 bp, Artificial Sequence
  Synthetic oligonucleotide; AAG chr2 60519684 60519703 60519687 -
aactggcctcagaaatctac

SEQ ID NO: 175725 - DNA, 20 bp, Artificial Sequence
  Synthetic oligonucleotide; CAG chr2 60519677 60519696 60519680 -
ctcagaaatctacaagattc

SEQ ID NO: 175726 - DNA, 20 bp, Artificial Sequence
  Synthetic oligonucleotide; TGG chr2 60519674 60519693 60519677 -
agaaatctacaagattccag

SEQ ID NO: 175727 - DNA, 20 bp, Artificial Sequence
  Synthetic oligonucleotide; CAG chr2 60519668 60519687 60519671 -
ctacaagattccagtggttc

SEQ ID NO: 175728 - DNA, 20 bp, Artificial Sequence
  Synthetic oligonucleotide; CAG chr2 60519653 60519672 60519656 -
ggttccagcctcactttctc

SEQ ID NO: 175729 - DNA, 20 bp, Artificial Sequence
  Synthetic oligonucleotide; TGG chr2 60519650 60519669 60519653 -
tccagcctcactttctccag

SEQ ID NO: 175730 - DNA, 20 bp, Artificial Sequence
  Synthetic oligonucleotide; AAG chr2 60519628 60519647 60519631 -
gtcaacttactgctgttgca

SEQ ID NO: 175731 - DNA, 20 bp, Artificial Sequence
  Synthetic oligonucleotide; CAG chr2 60519620 60519639 60519623 -
actgctgttgcaaagcacgt

SEQ ID NO: 175732 - DNA, 20 bp, Artificial Sequence
  Synthetic oligonucleotide; CAG chr2 60519613 60519632 60519616 -
ttgcaaagcacgtcagattt

SEQ ID NO: 175733 - DNA, 20 bp, Artificial Sequence
  Synthetic oligonucleotide; AGG chr2 60519612 60519631 60519615 -
tgcaaagcacgtcagatttc

SEQ ID NO: 175734 - DNA, 20 bp, Artificial Sequence
  Synthetic oligonucleotide; GAG chr2 60519610 60519629 60519613 -
caaagcacgtcagatttcag

SEQ ID NO: 175735 - DNA, 20 bp, Artificial Sequence
  Synthetic oligonucleotide; AAG chr2 60519594 60519613 60519597 -
tcaggagcgatttctcttgt

SEQ ID NO: 175736 - DNA, 20 bp, Artificial Sequence
  Synthetic oligonucleotide; AGG chr2 60519593 60519612 60519596 -
caggagcgatttctcttgta

SEQ ID NO: 175737 - DNA, 20 bp, Artificial Sequence
  Synthetic oligonucleotide; AAG chr2 60519589 60519608 60519592 -
agcgatttctcttgtaagga

SEQ ID NO: 175738 - DNA, 20 bp, Artificial Sequence
  Synthetic oligonucleotide; AAG chr2 60519586 60519605 60519589 -
gatttctcttgtaaggaaag

SEQ ID NO: 175739 - DNA, 20 bp, Artificial Sequence
  Synthetic oligonucleotide; AGG chr2 60519585 60519604 60519588 -
atttctcttgtaaggaaaga

SEQ ID NO: 175740 - DNA, 20 bp, Artificial Sequence
  Synthetic oligonucleotide; CAG chr2 60519582 60519601 60519585 -
tctcttgtaaggaaagaagg

SEQ ID NO: 175741 - DNA, 20 bp, Artificial Sequence
  Synthetic oligonucleotide; AGG chr2 60519581 60519600 60519584 -
ctcttgtaaggaaagaaggc

SEQ ID NO: 175742 - DNA, 20 bp, Artificial Sequence
  Synthetic oligonucleotide; CAG chr2 60519578 60519597 60519581 -
ttgtaaggaaagaaggcagg

SEQ ID NO: 175743 - DNA, 20 bp, Artificial Sequence
  Synthetic oligonucleotide; AGG chr2 60519577 60519596 60519580 -
tgtaaggaaagaaggcaggc

SEQ ID NO: 175744 - DNA, 20 bp, Artificial Sequence
  Synthetic oligonucleotide; CAG chr2 60519574 60519593 60519577 -
aaggaaagaaggcaggcagg

SEQ ID NO: 175745 - DNA, 20 bp, Artificial Sequence
  Synthetic oligonucleotide; AGG chr2 60519573 60519592 60519576 -
aggaaagaaggcaggcaggc

SEQ ID NO: 175746 - DNA, 20 bp, Artificial Sequence
  Synthetic oligonucleotide; CAG chr2 60519570 60519589 60519573 -
aaagaaggcaggcaggcagg

SEQ ID NO: 175747 - DNA, 20 bp, Artificial Sequence
  Synthetic oligonucleotide; AGG chr2 60519569 60519588 60519572 -
aagaaggcaggcaggcaggc

SEQ ID NO: 175748 - DNA, 20 bp, Artificial Sequence
  Synthetic oligonucleotide; CAG chr2 60519566 60519585 60519569 -
aaggcaggcaggcaggcagg

SEQ ID NO: 175749 - DNA, 20 bp, Artificial Sequence
  Synthetic oligonucleotide; AGG chr2 60519565 60519584 60519568 -
aggcaggcaggcaggcaggc

SEQ ID NO: 175750 - DNA, 20 bp, Artificial Sequence
  Synthetic oligonucleotide; CAG chr2 60519562 60519581 60519565 -
caggcaggcaggcaggcagg

SEQ ID NO: 175751 - DNA, 20 bp, Artificial Sequence
  Synthetic oligonucleotide; AGG chr2 60519561 60519580 60519564 -
aggcaggcaggcaggcaggc

SEQ ID NO: 175752 - DNA, 20 bp, Artificial Sequence
  Synthetic oligonucleotide; CAG chr2 60519558 60519577 60519561 -
caggcaggcaggcaggcagg

SEQ ID NO: 175753 - DNA, 20 bp, Artificial Sequence
  Synthetic oligonucleotide; AGG chr2 60519557 60519576 60519560 -
aggcaggcaggcaggcaggc

SEQ ID NO: 175754 - DNA, 20 bp, Artificial Sequence
  Synthetic oligonucleotide; CAG chr2 60519554 60519573 60519557 -
caggcaggcaggcaggcagg

SEQ ID NO: 175755 - DNA, 20 bp, Artificial Sequence
  Synthetic oligonucleotide; AGG chr2 60519553 60519572 60519556 -
aggcaggcaggcaggcaggc

SEQ ID NO: 175756 - DNA, 20 bp, Artificial Sequence
  Synthetic oligonucleotide; CAG chr2 60519550 60519569 60519553 -
caggcaggcaggcaggcagg

SEQ ID NO: 175757 - DNA, 20 bp, Artificial Sequence
  Synthetic oligonucleotide; AGG chr2 60519549 60519568 60519552 -
aggcaggcaggcaggcaggc

SEQ ID NO: 175758 - DNA, 20 bp, Artificial Sequence
  Synthetic oligonucleotide; CAG chr2 60519546 60519565 60519549 -
caggcaggcaggcaggcagg

SEQ ID NO: 175759 - DNA, 20 bp, Artificial Sequence
  Synthetic oligonucleotide; AGG chr2 60519545 60519564 60519548 -
aggcaggcaggcaggcaggc

SEQ ID NO: 175760 - DNA, 20 bp, Artificial Sequence
  Synthetic oligonucleotide; AAG chr2 60519541 60519560 60519544 -
aggcaggcaggcaggcaggc

SEQ ID NO: 175761 - DNA, 20 bp, Artificial Sequence
  Synthetic oligonucleotide; GAG chr2 60519537 60519556 60519540 -
aggcaggcaggcaggcaagt

SEQ ID NO: 175762 - DNA, 20 bp, Artificial Sequence
  Synthetic oligonucleotide; AGG chr2 60519536 60519555 60519539 -
ggcaggcaggcaggcaagtg

SEQ ID NO: 175763 - DNA, 20 bp, Artificial Sequence
  Synthetic oligonucleotide; CAG chr2 60519516 60519535 60519519 -
aggaccttattttttctctg

SEQ ID NO: 175764 - DNA, 20 bp, Artificial Sequence
  Synthetic oligonucleotide; GAG chr2 60519510 60519529 60519513 -
ttattttttctctgcagcat

SEQ ID NO: 175765 - DNA, 20 bp, Artificial Sequence
  Synthetic oligonucleotide; CAG chr2 60519505 60519524 60519508 -
ttttctctgcagcatgagtg

SEQ ID NO: 175766 - DNA, 20 bp, Artificial Sequence
  Synthetic oligonucleotide; CAG chr2 60519462 60519481 60519465 -
tccacacccatctctcctta

SEQ ID NO: 175767 - DNA, 20 bp, Artificial Sequence
  Synthetic oligonucleotide; AGG chr2 60519461 60519480 60519464 -
ccacacccatctctccttac

SEQ ID NO: 175768 - DNA, 20 bp, Artificial Sequence
  Synthetic oligonucleotide; TAG chr2 60519455 60519474 60519458 -
ccatctctccttacaggtta

SEQ ID NO: 175769 - DNA, 20 bp, Artificial Sequence
  Synthetic oligonucleotide; TGG chr2 60519443 60519462 60519446 -
acaggttatagacacatttt

SEQ ID NO: 175770 - DNA, 20 bp, Artificial Sequence
  Synthetic oligonucleotide; AAG chr2 60519431 60519450 60519434 -
cacatttttggcactgcata

SEQ ID NO: 175771 - DNA, 20 bp, Artificial Sequence
  Synthetic oligonucleotide; AAG chr2 60519427 60519446 60519430 -
tttttggcactgcataaagt

SEQ ID NO: 175772 - DNA, 20 bp, Artificial Sequence
  Synthetic oligonucleotide; AAG chr2 60519382 60519401 60519385 -
ttaactttcacatcattaaa

SEQ ID NO: 175773 - DNA, 20 bp, Artificial Sequence
  Synthetic oligonucleotide; CAG chr2 60519363 60519382 60519366 -
aaagctgatgtactgacttt

SEQ ID NO: 175774 - DNA, 20 bp, Artificial Sequence
  Synthetic oligonucleotide; TGG chr2 60519355 60519374 60519358 -
tgtactgactttcagctgcc

SEQ ID NO: 175775 - DNA, 20 bp, Artificial Sequence
  Synthetic oligonucleotide; GAG chr2 60519353 60519372 60519356 -
tactgactttcagctgcctg

SEQ ID NO: 175776 - DNA, 20 bp, Artificial Sequence
  Synthetic oligonucleotide; TAG chr2 60519349 60519368 60519352 -
gactttcagctgcctggaga

SEQ ID NO: 175777 - DNA, 20 bp, Artificial Sequence
  Synthetic oligonucleotide; CAG chr2 60519344 60519363 60519347 -
tcagctgcctggagatagtt

SEQ ID NO: 175778 - DNA, 20 bp, Artificial Sequence
  Synthetic oligonucleotide; AGG chr2 60519343 60519362 60519346 -
cagctgcctggagatagttc

SEQ ID NO: 175779 - DNA, 20 bp, Artificial Sequence
  Synthetic oligonucleotide; GGG chr2 60519342 60519361 60519345 -
agctgcctggagatagttca

SEQ ID NO: 175780 - DNA, 20 bp, Artificial Sequence
  Synthetic oligonucleotide; CAG chr2 60519337 60519356 60519340 -
cctggagatagttcagggcc

SEQ ID NO: 175781 - DNA, 20 bp, Artificial Sequence
  Synthetic oligonucleotide; CAG chr2 60519327 60519346 60519330 -
gttcagggcccagcacctga

SEQ ID NO: 175782 - DNA, 20 bp, Artificial Sequence
  Synthetic oligonucleotide; AGG chr2 60519326 60519345 60519329 -
ttcagggcccagcacctgac

SEQ ID NO: 175783 - DNA, 20 bp, Artificial Sequence
  Synthetic oligonucleotide; TGG chr2 60519292 60519311 60519295 -
gtgttttatgtctctcaata

SEQ ID NO: 175784 - DNA, 20 bp, Artificial Sequence
  Synthetic oligonucleotide; GAG chr2 60519290 60519309 60519293 -
gttttatgtctctcaatatg

SEQ ID NO: 175785 - DNA, 20 bp, Artificial Sequence
  Synthetic oligonucleotide; AGG chr2 60519289 60519308 60519292 -
ttttatgtctctcaatatgg

SEQ ID NO: 175786 - DNA, 20 bp, Artificial Sequence
  Synthetic oligonucleotide; TAG chr2 60519283 60519302 60519286 -
gtctctcaatatggaggtta

SEQ ID NO: 175787 - DNA, 20 bp, Artificial Sequence
  Synthetic oligonucleotide; AAG chr2 60519273 60519292 60519276 -
atggaggttatagaatcaaa

SEQ ID NO: 175788 - DNA, 20 bp, Artificial Sequence
  Synthetic oligonucleotide; AAG chr2 60519254 60519273 60519257 -
aaagaccgcaaaatgcctta

SEQ ID NO: 175789 - DNA, 20 bp, Artificial Sequence
  Synthetic oligonucleotide; AGG chr2 60519253 60519272 60519256 -
aagaccgcaaaatgccttaa

SEQ ID NO: 175790 - DNA, 20 bp, Artificial Sequence
  Synthetic oligonucleotide; TAG chr2 60519238 60519257 60519241 -
cttaaaggtgttgataccca

SEQ ID NO: 175791 - DNA, 20 bp, Artificial Sequence
  Synthetic oligonucleotide; CAG chr2 60519234 60519253 60519237 -
aaggtgttgatacccataga

SEQ ID NO: 175792 - DNA, 20 bp, Artificial Sequence
  Synthetic oligonucleotide; GAG chr2 60519232 60519251 60519235 -
ggtgttgatacccatagaca

SEQ ID NO: 175793 - DNA, 20 bp, Artificial Sequence
  Synthetic oligonucleotide; TAG chr2 60519223 60519242 60519226 -
acccatagacagagcatgca

SEQ ID NO: 175794 - DNA, 20 bp, Artificial Sequence
  Synthetic oligonucleotide; CAG chr2 60519216 60519235 60519219 -
gacagagcatgcatagtcct

SEQ ID NO: 175795 - DNA, 20 bp, Artificial Sequence
  Synthetic oligonucleotide; AGG chr2 60519215 60519234 60519218 -
acagagcatgcatagtcctc

SEQ ID NO: 175796 - DNA, 20 bp, Artificial Sequence
  Synthetic oligonucleotide; TAG chr2 60519171 60519190 60519174 -
cacacctatttctttttttg

SEQ ID NO: 175797 - DNA, 20 bp, Artificial Sequence
  Synthetic oligonucleotide; AAG chr2 60519155 60519174 60519158 -
tttgtagcgcctgtatttga

SEQ ID NO: 175798 - DNA, 20 bp, Artificial Sequence
  Synthetic oligonucleotide; AGG chr2 60519154 60519173 60519157 -
ttgtagcgcctgtatttgaa

SEQ ID NO: 175799 - DNA, 20 bp, Artificial Sequence
  Synthetic oligonucleotide; GGG chr2 60519153 60519172 60519156 -
tgtagcgcctgtatttgaaa

SEQ ID NO: 175800 - DNA, 20 bp, Artificial Sequence
  Synthetic oligonucleotide; GGG chr2 60519152 60519171 60519155 -
gtagcgcctgtatttgaaag

SEQ ID NO: 175801 - DNA, 20 bp, Artificial Sequence
  Synthetic oligonucleotide; TGG chr2 60519145 60519164 60519148 -
ctgtatttgaaaggggttcc

SEQ ID NO: 175802 - DNA, 20 bp, Artificial Sequence
  Synthetic oligonucleotide; TGG chr2 60519136 60519155 60519139 -
aaaggggttcctggtgtact

SEQ ID NO: 175803 - DNA, 20 bp, Artificial Sequence
  Synthetic oligonucleotide; GGG chr2 60519135 60519154 60519138 -
aaggggttcctggtgtactt

SEQ ID NO: 175804 - DNA, 20 bp, Artificial Sequence
  Synthetic oligonucleotide; GAG chr2 60519133 60519152 60519136 -
ggggttcctggtgtacttgg

SEQ ID NO: 175805 - DNA, 20 bp, Artificial Sequence
  Synthetic oligonucleotide; AAG chr2 60519128 60519147 60519131 -
tcctggtgtacttgggagaa

SEQ ID NO: 175806 - DNA, 20 bp, Artificial Sequence
  Synthetic oligonucleotide; AAG chr2 60519125 60519144 60519128 -
tggtgtacttgggagaaaag

SEQ ID NO: 175807 - DNA, 20 bp, Artificial Sequence
  Synthetic oligonucleotide; TGG chr2 60519117 60519136 60519120 -
ttgggagaaaagaagcttct

SEQ ID NO: 175808 - DNA, 20 bp, Artificial Sequence
  Synthetic oligonucleotide; TGG chr2 60519112 60519131 60519115 -
agaaaagaagcttcttggtt

SEQ ID NO: 175809 - DNA, 20 bp, Artificial Sequence
  Synthetic oligonucleotide; TAG chr2 60519109 60519128 60519112 -
aaagaagcttcttggtttgg

SEQ ID NO: 175810 - DNA, 20 bp, Artificial Sequence
  Synthetic oligonucleotide; CAG chr2 60519099 60519118 60519102 -
cttggtttggtagtacctac

SEQ ID NO: 175811 - DNA, 20 bp, Artificial Sequence
  Synthetic oligonucleotide; GAG chr2 60519097 60519116 60519100 -
tggtttggtagtacctacca

SEQ ID NO: 175812 - DNA, 20 bp, Artificial Sequence
  Synthetic oligonucleotide; TGG chr2 60519078 60519097 60519081 -
agagactccctgtttcctgc

SEQ ID NO: 175813 - DNA, 20 bp, Artificial Sequence
  Synthetic oligonucleotide; CAG chr2 60519072 60519091 60519075 -
tccctgtttcctgctggtat

SEQ ID NO: 175814 - DNA, 20 bp, Artificial Sequence
  Synthetic oligonucleotide; AGG chr2 60519071 60519090 60519074 -
ccctgtttcctgctggtatc

SEQ ID NO: 175815 - DNA, 20 bp, Artificial Sequence
  Synthetic oligonucleotide; AAG chr2 60519035 60519054 60519038 -
acttctgtccattttctctc

SEQ ID NO: 175816 - DNA, 20 bp, Artificial Sequence
  Synthetic oligonucleotide; GAG chr2 60519033 60519052 60519036 -
ttctgtccattttctctcaa

SEQ ID NO: 175817 - DNA, 20 bp, Artificial Sequence
  Synthetic oligonucleotide; GAG chr2 60519028 60519047 60519031 -
tccattttctctcaagagtt

SEQ ID NO: 175818 - DNA, 20 bp, Artificial Sequence
  Synthetic oligonucleotide; GAG chr2 60519026 60519045 60519029 -
cattttctctcaagagttga

SEQ ID NO: 175819 - DNA, 20 bp, Artificial Sequence
  Synthetic oligonucleotide; AAG chr2 60519002 60519021 60519005 -
tgtgtgccatcgctctttaa

SEQ ID NO: 175820 - DNA, 20 bp, Artificial Sequence
  Synthetic oligonucleotide; AAG chr2 60518999 60519018 60519002 -
gtgccatcgctctttaaaag

SEQ ID NO: 175821 - DNA, 20 bp, Artificial Sequence
  Synthetic oligonucleotide; AGG chr2 60518998 60519017 60519001 -
tgccatcgctctttaaaaga

SEQ ID NO: 175822 - DNA, 20 bp, Artificial Sequence
  Synthetic oligonucleotide; TGG chr2 60518979 60518998 60518982 -
aaggaactctccttttgctg

SEQ ID NO: 175823 - DNA, 20 bp, Artificial Sequence
  Synthetic oligonucleotide; TAG chr2 60518972 60518991 60518975 -
tctccttttgctgtggattg

SEQ ID NO: 175824 - DNA, 20 bp, Artificial Sequence
  Synthetic oligonucleotide; AGG chr2 60518971 60518990 60518974 -
ctccttttgctgtggattgt

SEQ ID NO: 175825 - DNA, 20 bp, Artificial Sequence
  Synthetic oligonucleotide; GGG chr2 60518970 60518989 60518973 -
tccttttgctgtggattgta

SEQ ID NO: 175826 - DNA, 20 bp, Artificial Sequence
  Synthetic oligonucleotide; GAG chr2 60518968 60518987 60518971 -
cttttgctgtggattgtagg

SEQ ID NO: 175827 - DNA, 20 bp, Artificial Sequence
  Synthetic oligonucleotide; CAG chr2 60518965 60518984 60518968 -
ttgctgtggattgtagggag

SEQ ID NO: 175828 - DNA, 20 bp, Artificial Sequence
  Synthetic oligonucleotide; TGG chr2 60518959 60518978 60518962 -
tggattgtagggagcagatt

SEQ ID NO: 175829 - DNA, 20 bp, Artificial Sequence
  Synthetic oligonucleotide; TGG chr2 60518947 60518966 60518950 -
agcagatttggtgcttactg

SEQ ID NO: 175830 - DNA, 20 bp, Artificial Sequence
  Synthetic oligonucleotide; CAG chr2 60518941 60518960 60518944 -
tttggtgcttactgtggctt

SEQ ID NO: 175831 - DNA, 20 bp, Artificial Sequence
  Synthetic oligonucleotide; AGG chr2 60518940 60518959 60518943 -
ttggtgcttactgtggcttc

SEQ ID NO: 175832 - DNA, 20 bp, Artificial Sequence
  Synthetic oligonucleotide; CAG chr2 60518922 60518941 60518925 -
tcaggacccaccttgaatga

SEQ ID NO: 175833 - DNA, 20 bp, Artificial Sequence
  Synthetic oligonucleotide; CAG chr2 60518914 60518933 60518917 -
caccttgaatgacagaatgt

SEQ ID NO: 175834 - DNA, 20 bp, Artificial Sequence
  Synthetic oligonucleotide; AAG chr2 60518907 60518926 60518910 -
aatgacagaatgtcagtaac

SEQ ID NO: 175835 - DNA, 20 bp, Artificial Sequence
  Synthetic oligonucleotide; CAG chr2 60518904 60518923 60518907 -
gacagaatgtcagtaacaag

SEQ ID NO: 175836 - DNA, 20 bp, Artificial Sequence
  Synthetic oligonucleotide; CAG chr2 60518898 60518917 60518901 -
atgtcagtaacaagcagccc

SEQ ID NO: 175837 - DNA, 20 bp, Artificial Sequence
  Synthetic oligonucleotide; AGG chr2 60518897 60518916 60518900 -
tgtcagtaacaagcagcccc

SEQ ID NO: 175838 - DNA, 20 bp, Artificial Sequence
  Synthetic oligonucleotide; CGG chr2 60518889 60518908 60518892 -
acaagcagccccaggaaata

SEQ ID NO: 175839 - DNA, 20 bp, Artificial Sequence
  Synthetic oligonucleotide; TGG chr2 60518885 60518904 60518888 -
gcagccccaggaaatacggc

SEQ ID NO: 175840 - DNA, 20 bp, Artificial Sequence
  Synthetic oligonucleotide; TGG chr2 60518882 60518901 60518885 -
gccccaggaaatacggctgg

SEQ ID NO: 175841 - DNA, 20 bp, Artificial Sequence
  Synthetic oligonucleotide; GAG chr2 60518849 60518868 60518852 -
cctcttgatctttgcccatc

SEQ ID NO: 175842 - DNA, 20 bp, Artificial Sequence
  Synthetic oligonucleotide; TGG chr2 60518836 60518855 60518839 -
gcccatcgagcaacaccatg

SEQ ID NO: 175843 - DNA, 20 bp, Artificial Sequence
  Synthetic oligonucleotide; TGG chr2 60518832 60518851 60518835 -
atcgagcaacaccatgtgga

SEQ ID NO: 175844 - DNA, 20 bp, Artificial Sequence
  Synthetic oligonucleotide; CAG chr2 60518821 60518840 60518824 -
ccatgtggatggtgtccatc

SEQ ID NO: 175845 - DNA, 20 bp, Artificial Sequence
  Synthetic oligonucleotide; CAG chr2 60518801 60518820 60518804 -
cagcttgacctgaacttgaa

SEQ ID NO: 175846 - DNA, 20 bp, Artificial Sequence
  Synthetic oligonucleotide; GAG chr2 60518790 60518809 60518793 -
gaacttgaacagtaattgat

SEQ ID NO: 175847 - DNA, 20 bp, Artificial Sequence
  Synthetic oligonucleotide; CGG chr2 60518770 60518789 60518773 -
gagtccttaaaatccacgcc

SEQ ID NO: 175848 - DNA, 20 bp, Artificial Sequence
  Synthetic oligonucleotide; CAG chr2 60518763 60518782 60518766 -
taaaatccacgcccggcccc

SEQ ID NO: 175849 - DNA, 20 bp, Artificial Sequence
  Synthetic oligonucleotide; AGG chr2 60518762 60518781 60518765 -
aaaatccacgcccggccccc

SEQ ID NO: 175850 - DNA, 20 bp, Artificial Sequence
  Synthetic oligonucleotide; TGG chr2 60518752 60518771 60518755 -
cccggcccccaggaatgcct

SEQ ID NO: 175851 - DNA, 20 bp, Artificial Sequence
  Synthetic oligonucleotide; GGG chr2 60518751 60518770 60518754 -
ccggcccccaggaatgcctt

SEQ ID NO: 175852 - DNA, 20 bp, Artificial Sequence
  Synthetic oligonucleotide; GGG chr2 60518750 60518769 60518753 -
cggcccccaggaatgccttg

SEQ ID NO: 175853 - DNA, 20 bp, Artificial Sequence
  Synthetic oligonucleotide; TGG chr2 60518724 60518743 60518727 -
cccatcccacgttctgattc

SEQ ID NO: 175854 - DNA, 20 bp, Artificial Sequence
  Synthetic oligonucleotide; TGG chr2 60518720 60518739 60518723 -
tcccacgttctgattctgga

SEQ ID NO: 175855 - DNA, 20 bp, Artificial Sequence
  Synthetic oligonucleotide; AAG chr2 60518711 60518730 60518714 -
ctgattctggatggactttt

SEQ ID NO: 175856 - DNA, 20 bp, Artificial Sequence
  Synthetic oligonucleotide; GAG chr2 60518694 60518713 60518697 -
tttaagtgaactctgatgat

SEQ ID NO: 175857 - DNA, 20 bp, Artificial Sequence
  Synthetic oligonucleotide; TAG chr2 60518691 60518710 60518694 -
aagtgaactctgatgatgag

SEQ ID NO: 175858 - DNA, 20 bp, Artificial Sequence
  Synthetic oligonucleotide; AGG chr2 60518690 60518709 60518693 -
agtgaactctgatgatgagt

SEQ ID NO: 175859 - DNA, 20 bp, Artificial Sequence
  Synthetic oligonucleotide; TGG chr2 60518657 60518676 60518660 -
tctttctcaacgttctctgc

SEQ ID NO: 175860 - DNA, 20 bp, Artificial Sequence
  Synthetic oligonucleotide; GGG chr2 60518656 60518675 60518659 -
ctttctcaacgttctctgct

SEQ ID NO: 175861 - DNA, 20 bp, Artificial Sequence
  Synthetic oligonucleotide; TGG chr2 60518626 60518645 60518629 -
gtcacctcccatgccctctc

SEQ ID NO: 175862 - DNA, 20 bp, Artificial Sequence
  Synthetic oligonucleotide; TGG chr2 60518619 60518638 60518622 -
cccatgccctctctggtgtg

SEQ ID NO: 175863 - DNA, 20 bp, Artificial Sequence
  Synthetic oligonucleotide; CAG chr2 60518609 60518628 60518612 -
ctctggtgtgtggtgattct

SEQ ID NO: 175864 - DNA, 20 bp, Artificial Sequence
  Synthetic oligonucleotide; TAG chr2 60518603 60518622 60518606 -
tgtgtggtgattctcagatc

SEQ ID NO: 175865 - DNA, 20 bp, Artificial Sequence
  Synthetic oligonucleotide; GAG chr2 60518601 60518620 60518604 -
tgtggtgattctcagatcta

SEQ ID NO: 175866 - DNA, 20 bp, Artificial Sequence
  Synthetic oligonucleotide; TGG chr2 60518561 60518580 60518564 -
tccccccatgcctttgcgtg

SEQ ID NO: 175867 - DNA, 20 bp, Artificial Sequence
  Synthetic oligonucleotide; GGG chr2 60518560 60518579 60518563 -
ccccccatgcctttgcgtgt

SEQ ID NO: 175868 - DNA, 20 bp, Artificial Sequence
  Synthetic oligonucleotide; AAG chr2 60518557 60518576 60518560 -
cccatgcctttgcgtgtggg

SEQ ID NO: 175869 - DNA, 20 bp, Artificial Sequence
  Synthetic oligonucleotide; TGG chr2 60518510 60518529 60518513 -
tcccatgtgccatttttacc

SEQ ID NO: 175870 - DNA, 20 bp, Artificial Sequence
  Synthetic oligonucleotide; CAG chr2 60518473 60518492 60518476 -
tctttattcatatttaaatg

SEQ ID NO: 175871 - DNA, 20 bp, Artificial Sequence
  Synthetic oligonucleotide; AGG chr2 60518472 60518491 60518475 -
ctttattcatatttaaatgc

SEQ ID NO: 175872 - DNA, 20 bp, Artificial Sequence
  Synthetic oligonucleotide; GAG chr2 60518468 60518487 60518471 -
attcatatttaaatgcaggt

SEQ ID NO: 175873 - DNA, 20 bp, Artificial Sequence
  Synthetic oligonucleotide; TGG chr2 60518464 60518483 60518467 -
atatttaaatgcaggtgagt

SEQ ID NO: 175874 - DNA, 20 bp, Artificial Sequence
  Synthetic oligonucleotide; CAG chr2 60518449 60518468 60518452 -
tgagttggaatgtcatctta

SEQ ID NO: 175875 - DNA, 20 bp, Artificial Sequence
  Synthetic oligonucleotide; AGG chr2 60518448 60518467 60518451 -
gagttggaatgtcatcttac

SEQ ID NO: 175876 - DNA, 20 bp, Artificial Sequence
  Synthetic oligonucleotide; CAG chr2 60518421 60518440 60518424 -
atcctgaatctgctctatcg

SEQ ID NO: 175877 - DNA, 20 bp, Artificial Sequence
  Synthetic oligonucleotide; TAG chr2 60518394 60518413 60518397 -
tttaaaactaaattaaatgt

SEQ ID NO: 175878 - DNA, 20 bp, Artificial Sequence
  Synthetic oligonucleotide; AAG chr2 60518387 60518406 60518390 -
ctaaattaaatgttagtact

SEQ ID NO: 175879 - DNA, 20 bp, Artificial Sequence
  Synthetic oligonucleotide; TAG chr2 60518384 60518403 60518387 -
aattaaatgttagtactaag

SEQ ID NO: 175880 - DNA, 20 bp, Artificial Sequence
  Synthetic oligonucleotide; TAG chr2 60518381 60518400 60518384 -
taaatgttagtactaagtag

SEQ ID NO: 175881 - DNA, 20 bp, Artificial Sequence
  Synthetic oligonucleotide; GAG chr2 60518367 60518386 60518370 -
aagtagtagccaaattctct

SEQ ID NO: 175882 - DNA, 20 bp, Artificial Sequence
  Synthetic oligonucleotide; CAG chr2 60518352 60518371 60518355 -
tctctgagtctgcttcatga

SEQ ID NO: 175883 - DNA, 20 bp, Artificial Sequence
  Synthetic oligonucleotide; AGG chr2 60518351 60518370 60518354 -
ctctgagtctgcttcatgac

SEQ ID NO: 175884 - DNA, 20 bp, Artificial Sequence
  Synthetic oligonucleotide; TGG chr2 60518337 60518356 60518340 -
catgacaggctgtaacacac

SEQ ID NO: 175885 - DNA, 20 bp, Artificial Sequence
  Synthetic oligonucleotide; TGG chr2 60518332 60518351 60518335 -
caggctgtaacacactggta

SEQ ID NO: 175886 - DNA, 20 bp, Artificial Sequence
  Synthetic oligonucleotide; CGG chr2 60518327 60518346 60518330 -
tgtaacacactggtatggaa

SEQ ID NO: 175887 - DNA, 20 bp, Artificial Sequence
  Synthetic oligonucleotide; TAG chr2 60518324 60518343 60518327 -
aacacactggtatggaacgg

SEQ ID NO: 175888 - DNA, 20 bp, Artificial Sequence
  Synthetic oligonucleotide; AGG chr2 60518323 60518342 60518326 -
acacactggtatggaacggt

SEQ ID NO: 175889 - DNA, 20 bp, Artificial Sequence
  Synthetic oligonucleotide; GAG chr2 60518277 60518296 60518280 -
tatgatgttttatgtattat

SEQ ID NO: 175890 - DNA, 20 bp, Artificial Sequence
  Synthetic oligonucleotide; GAG chr2 60518275 60518294 60518278 -
tgatgttttatgtattatga

SEQ ID NO: 175891 - DNA, 20 bp, Artificial Sequence
  Synthetic oligonucleotide; CAG chr2 60518270 60518289 60518273 -
ttttatgtattatgagagct

SEQ ID NO: 175892 - DNA, 20 bp, Artificial Sequence
  Synthetic oligonucleotide; CAG chr2 60518267 60518286 60518270 -
tatgtattatgagagctcag

SEQ ID NO: 175893 - DNA, 20 bp, Artificial Sequence
  Synthetic oligonucleotide; CAG chr2 60518257 60518276 60518260 -
gagagctcagcagatgttga

SEQ ID NO: 175894 - DNA, 20 bp, Artificial Sequence
  Synthetic oligonucleotide; GAG chr2 60518255 60518274 60518258 -
gagctcagcagatgttgaca

SEQ ID NO: 175895 - DNA, 20 bp, Artificial Sequence
  Synthetic oligonucleotide; AGG chr2 60518254 60518273 60518257 -
agctcagcagatgttgacag

SEQ ID NO: 175896 - DNA, 20 bp, Artificial Sequence
  Synthetic oligonucleotide; GGG chr2 60518253 60518272 60518256 -
gctcagcagatgttgacaga

SEQ ID NO: 175897 - DNA, 20 bp, Artificial Sequence
  Synthetic oligonucleotide; GAG chr2 60518247 60518266 60518250 -
cagatgttgacagagggaat

SEQ ID NO: 175898 - DNA, 20 bp, Artificial Sequence
  Synthetic oligonucleotide; AAG chr2 60518242 60518261 60518245 -
gttgacagagggaatgagac

SEQ ID NO: 175899 - DNA, 20 bp, Artificial Sequence
  Synthetic oligonucleotide; TAG chr2 60518232 60518251 60518235 -
ggaatgagacaagatgattt

SEQ ID NO: 175900 - DNA, 20 bp, Artificial Sequence
  Synthetic oligonucleotide; AGG chr2 60518231 60518250 60518234 -
gaatgagacaagatgatttt

SEQ ID NO: 175901 - DNA, 20 bp, Artificial Sequence
  Synthetic oligonucleotide; TAG chr2 60518226 60518245 60518229 -
agacaagatgattttaggtc

SEQ ID NO: 175902 - DNA, 20 bp, Artificial Sequence
  Synthetic oligonucleotide; AGG chr2 60518225 60518244 60518228 -
gacaagatgattttaggtct

SEQ ID NO: 175903 - DNA, 20 bp, Artificial Sequence
  Synthetic oligonucleotide; TAG chr2 60518217 60518236 60518220 -
gattttaggtctaggtttga

SEQ ID NO: 175904 - DNA, 20 bp, Artificial Sequence
  Synthetic oligonucleotide; TGG chr2 60518205 60518224 60518208 -
aggtttgatagataaaaaac

SEQ ID NO: 175905 - DNA, 20 bp, Artificial Sequence
  Synthetic oligonucleotide; GGG chr2 60518204 60518223 60518207 -
ggtttgatagataaaaaact

SEQ ID NO: 175906 - DNA, 20 bp, Artificial Sequence
  Synthetic oligonucleotide; AAG chr2 60518178 60518197 60518181 -
aattttatattttctttgaa

SEQ ID NO: 175907 - DNA, 20 bp, Artificial Sequence
  Synthetic oligonucleotide; TAG chr2 60518174 60518193 60518177 -
ttatattttctttgaaaaga

SEQ ID NO: 175908 - DNA, 20 bp, Artificial Sequence
  Synthetic oligonucleotide; CAG chr2 60518163 60518182 60518166 -
ttgaaaagatagctaaatct

SEQ ID NO: 175909 - DNA, 20 bp, Artificial Sequence
  Synthetic oligonucleotide; AAG chr2 60518138 60518157 60518141 -
attattttattttatttatt

SEQ ID NO: 175910 - DNA, 20 bp, Artificial Sequence
  Synthetic oligonucleotide; TAG chr2 60518128 60518147 60518131 -
tttatttattaagctttttg

SEQ ID NO: 175911 - DNA, 20 bp, Artificial Sequence
  Synthetic oligonucleotide; GAG chr2 60518126 60518145 60518129 -
tatttattaagctttttgta

SEQ ID NO: 175912 - DNA, 20 bp, Artificial Sequence
  Synthetic oligonucleotide; CAG chr2 60518122 60518141 60518125 -
tattaagctttttgtagaga

SEQ ID NO: 175913 - DNA, 20 bp, Artificial Sequence
  Synthetic oligonucleotide; AGG chr2 60518121 60518140 60518124 -
attaagctttttgtagagac

SEQ ID NO: 175914 - DNA, 20 bp, Artificial Sequence
  Synthetic oligonucleotide; GGG chr2 60518120 60518139 60518123 -
ttaagctttttgtagagaca

SEQ ID NO: 175915 - DNA, 20 bp, Artificial Sequence
  Synthetic oligonucleotide; CAG chr2 60518102 60518121 60518105 -
cagggttttgctatgttgcc

SEQ ID NO: 175916 - DNA, 20 bp, Artificial Sequence
  Synthetic oligonucleotide; AGG chr2 60518101 60518120 60518104 -
agggttttgctatgttgccc

SEQ ID NO: 175917 - DNA, 20 bp, Artificial Sequence
  Synthetic oligonucleotide; TGG chr2 60518097 60518116 60518100 -
ttttgctatgttgcccaggc

SEQ ID NO: 175918 - DNA, 20 bp, Artificial Sequence
  Synthetic oligonucleotide; TAG chr2 60518083 60518102 60518086 -
ccaggctggtcttgaactcc

SEQ ID NO: 175919 - DNA, 20 bp, Artificial Sequence
  Synthetic oligonucleotide; AAG chr2 60518076 60518095 60518079 -
ggtcttgaactcctagcttc

SEQ ID NO: 175920 - DNA, 20 bp, Artificial Sequence
  Synthetic oligonucleotide; TGG chr2 60518059 60518078 60518062 -
ttcaagcaatcttccctctg

SEQ ID NO: 175921 - DNA, 20 bp, Artificial Sequence
  Synthetic oligonucleotide; GAG chr2 60518042 60518061 60518045 -
ctgtggccttccaaatttct

SEQ ID NO: 175922 - DNA, 20 bp, Artificial Sequence
  Synthetic oligonucleotide; TAG chr2 60518035 60518054 60518038 -
cttccaaatttctgagatta

SEQ ID NO: 175923 - DNA, 20 bp, Artificial Sequence
  Synthetic oligonucleotide; AGG chr2 60518034 60518053 60518037 -
ttccaaatttctgagattat

SEQ ID NO: 175924 - DNA, 20 bp, Artificial Sequence
  Synthetic oligonucleotide; AAG chr2 60518028 60518047 60518031 -
atttctgagattataggcat

SEQ ID NO: 175925 - DNA, 20 bp, Artificial Sequence
  Synthetic oligonucleotide; TGG chr2 60518015 60518034 60518018 -
taggcataagcaaatgcctc

SEQ ID NO: 175926 - DNA, 20 bp, Artificial Sequence
  Synthetic oligonucleotide; AAG chr2 60518007 60518026 60518010 -
agcaaatgcctctggccttc

SEQ ID NO: 175927 - DNA, 20 bp, Artificial Sequence
  Synthetic oligonucleotide; AAG chr2 60517993 60518012 60517996 -
gccttcaagtaattaattta

SEQ ID NO: 175928 - DNA, 20 bp, Artificial Sequence
  Synthetic oligonucleotide; TGG chr2 60517958 60517977 60517961 -
tttctctcctcccctaaaat

SEQ ID NO: 175929 - DNA, 20 bp, Artificial Sequence
  Synthetic oligonucleotide; GGG chr2 60517957 60517976 60517960 -
ttctctcctcccctaaaatt

SEQ ID NO: 175930 - DNA, 20 bp, Artificial Sequence
  Synthetic oligonucleotide; TAG chr2 60517951 60517970 60517954 -
cctcccctaaaattgggttt

SEQ ID NO: 175931 - DNA, 20 bp, Artificial Sequence
  Synthetic oligonucleotide; GAG chr2 60517949 60517968 60517952 -
tcccctaaaattgggtttta

SEQ ID NO: 175932 - DNA, 20 bp, Artificial Sequence
  Synthetic oligonucleotide; AAG chr2 60517945 60517964 60517948 -
ctaaaattgggttttagagt

SEQ ID NO: 175933 - DNA, 20 bp, Artificial Sequence
  Synthetic oligonucleotide; AGG chr2 60517944 60517963 60517947 -
taaaattgggttttagagta

SEQ ID NO: 175934 - DNA, 20 bp, Artificial Sequence
  Synthetic oligonucleotide; TAG chr2 60517929 60517948 60517932 -
gagtaaggttcttgttcctc

SEQ ID NO: 175935 - DNA, 20 bp, Artificial Sequence
  Synthetic oligonucleotide; AAG chr2 60517921 60517940 60517924 -
ttcttgttcctctagtcgac

SEQ ID NO: 175936 - DNA, 20 bp, Artificial Sequence
  Synthetic oligonucleotide; GAG chr2 60517919 60517938 60517922 -
cttgttcctctagtcgacaa

SEQ ID NO: 175937 - DNA, 20 bp, Artificial Sequence
  Synthetic oligonucleotide; GAG chr2 60517911 60517930 60517914 -
tctagtcgacaagagtttct

SEQ ID NO: 175938 - DNA, 20 bp, Artificial Sequence
  Synthetic oligonucleotide; AGG chr2 60517910 60517929 60517913 -
ctagtcgacaagagtttctg

SEQ ID NO: 175939 - DNA, 20 bp, Artificial Sequence
  Synthetic oligonucleotide; TAG chr2 60517902 60517921 60517905 -
caagagtttctgaggaatca

SEQ ID NO: 175940 - DNA, 20 bp, Artificial Sequence
  Synthetic oligonucleotide; AAG chr2 60517899 60517918 60517902 -
gagtttctgaggaatcatag

SEQ ID NO: 175941 - DNA, 20 bp, Artificial Sequence
  Synthetic oligonucleotide; AAG chr2 60517895 60517914 60517898 -
ttctgaggaatcatagaaga

SEQ ID NO: 175942 - DNA, 20 bp, Artificial Sequence
  Synthetic oligonucleotide; CAG chr2 60517890 60517909 60517893 -
aggaatcatagaagaaagca

SEQ ID NO: 175943 - DNA, 20 bp, Artificial Sequence
  Synthetic oligonucleotide; GAG chr2 60517881 60517900 60517884 -
agaagaaagcacagctcttt

SEQ ID NO: 175944 - DNA, 20 bp, Artificial Sequence
  Synthetic oligonucleotide; TAG chr2 60517876 60517895 60517879 -
aaagcacagctctttgagca

SEQ ID NO: 175945 - DNA, 20 bp, Artificial Sequence
  Synthetic oligonucleotide; TAG chr2 60517872 60517891 60517875 -
cacagctctttgagcataga

SEQ ID NO: 175946 - DNA, 20 bp, Artificial Sequence
  Synthetic oligonucleotide; TGG chr2 60517860 60517879 60517863 -
agcatagatagtttccttcg

SEQ ID NO: 175947 - DNA, 20 bp, Artificial Sequence
  Synthetic oligonucleotide; AAG chr2 60517856 60517875 60517859 -
tagatagtttccttcgtgga

SEQ ID NO: 175948 - DNA, 20 bp, Artificial Sequence
  Synthetic oligonucleotide; AAG chr2 60517850 60517869 60517853 -
gtttccttcgtggaaagcca

SEQ ID NO: 175949 - DNA, 20 bp, Artificial Sequence
  Synthetic oligonucleotide; GAG chr2 60517835 60517854 60517838 -
agccaaagtgaatacttatt

SEQ ID NO: 175950 - DNA, 20 bp, Artificial Sequence
  Synthetic oligonucleotide; TAG chr2 60517821 60517840 60517824 -
cttattgagcatcttctatg

SEQ ID NO: 175951 - DNA, 20 bp, Artificial Sequence
  Synthetic oligonucleotide; TAG chr2 60517815 60517834 60517818 -
gagcatcttctatgtagaca

SEQ ID NO: 175952 - DNA, 20 bp, Artificial Sequence
  Synthetic oligonucleotide; AAG chr2 60517805 60517824 60517808 -
tatgtagacatagacttgtg

SEQ ID NO: 175953 - DNA, 20 bp, Artificial Sequence
  Synthetic oligonucleotide; CAG chr2 60517777 60517796 60517780 -
tcattaaccctgtcatttta

SEQ ID NO: 175954 - DNA, 20 bp, Artificial Sequence
  Synthetic oligonucleotide; GAG chr2 60517772 60517791 60517775 -
aaccctgtcattttacagat

SEQ ID NO: 175955 - DNA, 20 bp, Artificial Sequence
  Synthetic oligonucleotide; AAG chr2 60517768 60517787 60517771 -
ctgtcattttacagatgaga

SEQ ID NO: 175956 - DNA, 20 bp, Artificial Sequence
  Synthetic oligonucleotide; AGG chr2 60517767 60517786 60517770 -
tgtcattttacagatgagaa

SEQ ID NO: 175957 - DNA, 20 bp, Artificial Sequence
  Synthetic oligonucleotide; GAG chr2 60517762 60517781 60517765 -
ttttacagatgagaaaggtt

SEQ ID NO: 175958 - DNA, 20 bp, Artificial Sequence
  Synthetic oligonucleotide; AGG chr2 60517761 60517780 60517764 -
tttacagatgagaaaggttg

SEQ ID NO: 175959 - DNA, 20 bp, Artificial Sequence
  Synthetic oligonucleotide; AAG chr2 60517756 60517775 60517759 -
agatgagaaaggttgaggct

SEQ ID NO: 175960 - DNA, 20 bp, Artificial Sequence
  Synthetic oligonucleotide; GAG chr2 60517754 60517773 60517757 -
atgagaaaggttgaggctaa

SEQ ID NO: 175961 - DNA, 20 bp, Artificial Sequence
  Synthetic oligonucleotide; AGG chr2 60517753 60517772 60517756 -
tgagaaaggttgaggctaag

SEQ ID NO: 175962 - DNA, 20 bp, Artificial Sequence
  Synthetic oligonucleotide; GGG chr2 60517752 60517771 60517755 -
gagaaaggttgaggctaaga

SEQ ID NO: 175963 - DNA, 20 bp, Artificial Sequence
  Synthetic oligonucleotide; GGG chr2 60517751 60517770 60517754 -
agaaaggttgaggctaagag

SEQ ID NO: 175964 - DNA, 20 bp, Artificial Sequence
  Synthetic oligonucleotide; GAG chr2 60517749 60517768 60517752 -
aaaggttgaggctaagaggg

SEQ ID NO: 175965 - DNA, 20 bp, Artificial Sequence
  Synthetic oligonucleotide; GAG chr2 60517745 60517764 60517748 -
gttgaggctaagaggggagt

SEQ ID NO: 175966 - DNA, 20 bp, Artificial Sequence
  Synthetic oligonucleotide; CAG chr2 60517739 60517758 60517742 -
gctaagaggggagtgagtgc

SEQ ID NO: 175967 - DNA, 20 bp, Artificial Sequence
  Synthetic oligonucleotide; GAG chr2 60517737 60517756 60517740 -
taagaggggagtgagtgcca

SEQ ID NO: 175968 - DNA, 20 bp, Artificial Sequence
  Synthetic oligonucleotide; TAG chr2 60517725 60517744 60517728 -
gagtgccagagtctacttgc

SEQ ID NO: 175969 - DNA, 20 bp, Artificial Sequence
  Synthetic oligonucleotide; AGG chr2 60517724 60517743 60517727 -
agtgccagagtctacttgct

SEQ ID NO: 175970 - DNA, 20 bp, Artificial Sequence
  Synthetic oligonucleotide; CAG chr2 60517721 60517740 60517724 -
gccagagtctacttgctagg

SEQ ID NO: 175971 - DNA, 20 bp, Artificial Sequence
  Synthetic oligonucleotide; TGG chr2 60517718 60517737 60517721 -
agagtctacttgctaggcag

SEQ ID NO: 175972 - DNA, 20 bp, Artificial Sequence
  Synthetic oligonucleotide; TAG chr2 60517715 60517734 60517718 -
gtctacttgctaggcagtgg

SEQ ID NO: 175973 - DNA, 20 bp, Artificial Sequence
  Synthetic oligonucleotide; TGG chr2 60517709 60517728 60517712 -
ttgctaggcagtggtagact

SEQ ID NO: 175974 - DNA, 20 bp, Artificial Sequence
  Synthetic oligonucleotide; CAG chr2 60517704 60517723 60517707 -
aggcagtggtagacttggcc

SEQ ID NO: 175975 - DNA, 20 bp, Artificial Sequence
  Synthetic oligonucleotide; GAG chr2 60517702 60517721 60517705 -
gcagtggtagacttggccca

SEQ ID NO: 175976 - DNA, 20 bp, Artificial Sequence
  Synthetic oligonucleotide; TGG chr2 60517697 60517716 60517700 -
ggtagacttggcccagagcc

SEQ ID NO: 175977 - DNA, 20 bp, Artificial Sequence
  Synthetic oligonucleotide; GGG chr2 60517696 60517715 60517699 -
gtagacttggcccagagcct

SEQ ID NO: 175978 - DNA, 20 bp, Artificial Sequence
  Synthetic oligonucleotide; GGG chr2 60517695 60517714 60517698 -
tagacttggcccagagcctg

SEQ ID NO: 175979 - DNA, 20 bp, Artificial Sequence
  Synthetic oligonucleotide; TGG chr2 60517675 60517694 60517678 -
gggcttcccactttcattcc

SEQ ID NO: 175980 - DNA, 20 bp, Artificial Sequence
  Synthetic oligonucleotide; TGG chr2 60517652 60517671 60517655 -
ctgactgtaccaatcgcaca

SEQ ID NO: 175981 - DNA, 20 bp, Artificial Sequence
  Synthetic oligonucleotide; TGG chr2 60517641 60517660 60517644 -
aatcgcacatggcctctcca

SEQ ID NO: 175982 - DNA, 20 bp, Artificial Sequence
  Synthetic oligonucleotide; CAG chr2 60517637 60517656 60517640 -
gcacatggcctctccatggc

SEQ ID NO: 175983 - DNA, 20 bp, Artificial Sequence
  Synthetic oligonucleotide; CAG chr2 60517634 60517653 60517637 -
catggcctctccatggccag

SEQ ID NO: 175984 - DNA, 20 bp, Artificial Sequence
  Synthetic oligonucleotide; AGG chr2 60517633 60517652 60517636 -
atggcctctccatggccagc

SEQ ID NO: 175985 - DNA, 20 bp, Artificial Sequence
  Synthetic oligonucleotide; GAG chr2 60517631 60517650 60517634 -
ggcctctccatggccagcag

SEQ ID NO: 175986 - DNA, 20 bp, Artificial Sequence
  Synthetic oligonucleotide; CAG chr2 60517627 60517646 60517630 -
tctccatggccagcaggagc

SEQ ID NO: 175987 - DNA, 20 bp, Artificial Sequence
  Synthetic oligonucleotide; GAG chr2 60517625 60517644 60517628 -
tccatggccagcaggagcca

SEQ ID NO: 175988 - DNA, 20 bp, Artificial Sequence
  Synthetic oligonucleotide; AGG chr2 60517624 60517643 60517627 -
ccatggccagcaggagccag

SEQ ID NO: 175989 - DNA, 20 bp, Artificial Sequence
  Synthetic oligonucleotide; TGG chr2 60517621 60517640 60517624 -
tggccagcaggagccagagg

SEQ ID NO: 175990 - DNA, 20 bp, Artificial Sequence
  Synthetic oligonucleotide; CAG chr2 60517603 60517622 60517606 -
ggtggcccgcatgtgctttg

SEQ ID NO: 175991 - DNA, 20 bp, Artificial Sequence
  Synthetic oligonucleotide; GAG chr2 60517601 60517620 60517604 -
tggcccgcatgtgctttgca

SEQ ID NO: 175992 - DNA, 20 bp, Artificial Sequence
  Synthetic oligonucleotide; AGG chr2 60517600 60517619 60517603 -
ggcccgcatgtgctttgcag

SEQ ID NO: 175993 - DNA, 20 bp, Artificial Sequence
  Synthetic oligonucleotide; CGG chr2 60517576 60517595 60517579 -
acttgcacccacgcttttat

SEQ ID NO: 175994 - DNA, 20 bp, Artificial Sequence
  Synthetic oligonucleotide; TGG chr2 60517570 60517589 60517573 -
acccacgcttttatcggtga

SEQ ID NO: 175995 - DNA, 20 bp, Artificial Sequence
  Synthetic oligonucleotide; TGG chr2 60517566 60517585 60517569 -
acgcttttatcggtgatggc

SEQ ID NO: 175996 - DNA, 20 bp, Artificial Sequence
  Synthetic oligonucleotide; TGG chr2 60517548 60517567 60517551 -
gctggaatgcttttcttaac

SEQ ID NO: 175997 - DNA, 20 bp, Artificial Sequence
  Synthetic oligonucleotide; GAG chr2 60517546 60517565 60517549 -
tggaatgcttttcttaactg

SEQ ID NO: 175998 - DNA, 20 bp, Artificial Sequence
  Synthetic oligonucleotide; AAG chr2 60517535 60517554 60517538 -
tcttaactggagctttgttg

SEQ ID NO: 175999 - DNA, 20 bp, Artificial Sequence
  Synthetic oligonucleotide; GAG chr2 60517533 60517552 60517536 -
ttaactggagctttgttgaa

SEQ ID NO: 176000 - DNA, 20 bp, Artificial Sequence
  Synthetic oligonucleotide; TGG chr2 60517528 60517547 60517531 -
tggagctttgttgaagagcc

SEQ ID NO: 176001 - DNA, 20 bp, Artificial Sequence
  Synthetic oligonucleotide; TGG chr2 60517517 60517536 60517520 -
tgaagagcctggtgcttttg

SEQ ID NO: 176002 - DNA, 20 bp, Artificial Sequence
  Synthetic oligonucleotide; CAG chr2 60517514 60517533 60517517 -
agagcctggtgcttttgtgg

SEQ ID NO: 176003 - DNA, 20 bp, Artificial Sequence
  Synthetic oligonucleotide; TGG chr2 60517503 60517522 60517506 -
cttttgtggcagtgctaacc

SEQ ID NO: 176004 - DNA, 20 bp, Artificial Sequence
  Synthetic oligonucleotide; GGG chr2 60517502 60517521 60517505 -
ttttgtggcagtgctaacct

SEQ ID NO: 176005 - DNA, 20 bp, Artificial Sequence
  Synthetic oligonucleotide; GGG chr2 60517501 60517520 60517504 -
tttgtggcagtgctaacctg

SEQ ID NO: 176006 - DNA, 20 bp, Artificial Sequence
  Synthetic oligonucleotide; GAG chr2 60517499 60517518 60517502 -
tgtggcagtgctaacctggg

SEQ ID NO: 176007 - DNA, 20 bp, Artificial Sequence
  Synthetic oligonucleotide; TGG chr2 60517492 60517511 60517495 -
gtgctaacctggggagccca

SEQ ID NO: 176008 - DNA, 20 bp, Artificial Sequence
  Synthetic oligonucleotide; AAG chr2 60517481 60517500 60517484 -
gggagcccatggtaaaaccc

SEQ ID NO: 176009 - DNA, 20 bp, Artificial Sequence
  Synthetic oligonucleotide; CAG chr2 60517444 60517463 60517447 -
cccaatcacctgtgctgttg

SEQ ID NO: 176010 - DNA, 20 bp, Artificial Sequence
  Synthetic oligonucleotide; GAG chr2 60517442 60517461 60517445 -
caatcacctgtgctgttgca

SEQ ID NO: 176011 - DNA, 20 bp, Artificial Sequence
  Synthetic oligonucleotide; TGG chr2 60517437 60517456 60517440 -
acctgtgctgttgcagagaa

SEQ ID NO: 176012 - DNA, 20 bp, Artificial Sequence
  Synthetic oligonucleotide; CGG chr2 60517380 60517399 60517383 -
ctgttttctctgcccttttt

SEQ ID NO: 176013 - DNA, 20 bp, Artificial Sequence
  Synthetic oligonucleotide; GGG chr2 60517379 60517398 60517382 -
tgttttctctgccctttttc

SEQ ID NO: 176014 - DNA, 20 bp, Artificial Sequence
  Synthetic oligonucleotide; GGG chr2 60517378 60517397 60517381 -
gttttctctgccctttttcg

SEQ ID NO: 176015 - DNA, 20 bp, Artificial Sequence
  Synthetic oligonucleotide; TGG chr2 60517374 60517393 60517377 -
tctctgccctttttcggggc

SEQ ID NO: 176016 - DNA, 20 bp, Artificial Sequence
  Synthetic oligonucleotide; TAG chr2 60517350 60517369 60517353 -
cttcctaccacctttcctgc

SEQ ID NO: 176017 - DNA, 20 bp, Artificial Sequence
  Synthetic oligonucleotide; AGG chr2 60517349 60517368 60517352 -
ttcctaccacctttcctgct

SEQ ID NO: 176018 - DNA, 20 bp, Artificial Sequence
  Synthetic oligonucleotide; GGG chr2 60517348 60517367 60517351 -
tcctaccacctttcctgcta

SEQ ID NO: 176019 - DNA, 20 bp, Artificial Sequence
  Synthetic oligonucleotide; AAG chr2 60517339 60517358 60517342 -
ctttcctgctagggctccca

SEQ ID NO: 176020 - DNA, 20 bp, Artificial Sequence
  Synthetic oligonucleotide; TGG chr2 60517334 60517353 60517337 -
ctgctagggctcccaaagtg

SEQ ID NO: 176021 - DNA, 20 bp, Artificial Sequence
  Synthetic oligonucleotide; TGG chr2 60517325 60517344 60517328 -
ctcccaaagtgtggcccttc

SEQ ID NO: 176022 - DNA, 20 bp, Artificial Sequence
  Synthetic oligonucleotide; GGG chr2 60517324 60517343 60517327 -
tcccaaagtgtggcccttct

SEQ ID NO: 176023 - DNA, 20 bp, Artificial Sequence
  Synthetic oligonucleotide; GGG chr2 60517323 60517342 60517326 -
cccaaagtgtggcccttctg

SEQ ID NO: 176024 - DNA, 20 bp, Artificial Sequence
  Synthetic oligonucleotide; TGG chr2 60517314 60517333 60517317 -
tggcccttctggggtttaca

SEQ ID NO: 176025 - DNA, 20 bp, Artificial Sequence
  Synthetic oligonucleotide; CAG chr2 60517305 60517324 60517308 -
tggggtttacatggtgtgcc

SEQ ID NO: 176026 - DNA, 20 bp, Artificial Sequence
  Synthetic oligonucleotide; AGG chr2 60517304 60517323 60517307 -
ggggtttacatggtgtgccc

SEQ ID NO: 176027 - DNA, 20 bp, Artificial Sequence
  Synthetic oligonucleotide; GGG chr2 60517303 60517322 60517306 -
gggtttacatggtgtgccca

SEQ ID NO: 176028 - DNA, 20 bp, Artificial Sequence
  Synthetic oligonucleotide; TAG chr2 60517298 60517317 60517301 -
tacatggtgtgcccagggaa

SEQ ID NO: 176029 - DNA, 20 bp, Artificial Sequence
  Synthetic oligonucleotide; TGG chr2 60517293 60517312 60517296 -
ggtgtgcccagggaatagct

SEQ ID NO: 176030 - DNA, 20 bp, Artificial Sequence
  Synthetic oligonucleotide; CAG chr2 60517280 60517299 60517283 -
aatagcttggcttttttatt

SEQ ID NO: 176031 - DNA, 20 bp, Artificial Sequence
  Synthetic oligonucleotide; TGG chr2 60517272 60517291 60517275 -
ggcttttttattcagataac

SEQ ID NO: 176032 - DNA, 20 bp, Artificial Sequence
  Synthetic oligonucleotide; GAG chr2 60517270 60517289 60517273 -
cttttttattcagataactg

SEQ ID NO: 176033 - DNA, 20 bp, Artificial Sequence
  Synthetic oligonucleotide; TGG chr2 60517263 60517282 60517266 -
attcagataactggagataa

SEQ ID NO: 176034 - DNA, 20 bp, Artificial Sequence
  Synthetic oligonucleotide; GAG chr2 60517261 60517280 60517264 -
tcagataactggagataatg

SEQ ID NO: 176035 - DNA, 20 bp, Artificial Sequence
  Synthetic oligonucleotide; TAG chr2 60517258 60517277 60517261 -
gataactggagataatggag

SEQ ID NO: 176036 - DNA, 20 bp, Artificial Sequence
  Synthetic oligonucleotide; TGG chr2 60517254 60517273 60517257 -
actggagataatggagtaga

SEQ ID NO: 176037 - DNA, 20 bp, Artificial Sequence
  Synthetic oligonucleotide; GAG chr2 60517252 60517271 60517255 -
tggagataatggagtagatg

SEQ ID NO: 176038 - DNA, 20 bp, Artificial Sequence
  Synthetic oligonucleotide; TGG chr2 60517248 60517267 60517251 -
gataatggagtagatggagt

SEQ ID NO: 176039 - DNA, 20 bp, Artificial Sequence
  Synthetic oligonucleotide; GGG chr2 60517247 60517266 60517250 -
ataatggagtagatggagtt

SEQ ID NO: 176040 - DNA, 20 bp, Artificial Sequence
  Synthetic oligonucleotide; GGG chr2 60517246 60517265 60517249 -
taatggagtagatggagttg

SEQ ID NO: 176041 - DNA, 20 bp, Artificial Sequence
  Synthetic oligonucleotide; TGG chr2 60517243 60517262 60517246 -
tggagtagatggagttgggg

SEQ ID NO: 176042 - DNA, 20 bp, Artificial Sequence
  Synthetic oligonucleotide; AAG chr2 60517238 60517257 60517241 -
tagatggagttggggtggtg

SEQ ID NO: 176043 - DNA, 20 bp, Artificial Sequence
  Synthetic oligonucleotide; AGG chr2 60517237 60517256 60517240 -
agatggagttggggtggtga

SEQ ID NO: 176044 - DNA, 20 bp, Artificial Sequence
  Synthetic oligonucleotide; CAG chr2 60517220 60517239 60517223 -
tgaaggaacgtgtaccctct

SEQ ID NO: 176045 - DNA, 20 bp, Artificial Sequence
  Synthetic oligonucleotide; AGG chr2 60517219 60517238 60517222 -
gaaggaacgtgtaccctctc

SEQ ID NO: 176046 - DNA, 20 bp, Artificial Sequence
  Synthetic oligonucleotide; GGG chr2 60517218 60517237 60517221 -
aaggaacgtgtaccctctca

SEQ ID NO: 176047 - DNA, 20 bp, Artificial Sequence
  Synthetic oligonucleotide; GGG chr2 60517217 60517236 60517220 -
aggaacgtgtaccctctcag

SEQ ID NO: 176048 - DNA, 20 bp, Artificial Sequence
  Synthetic oligonucleotide; CAG chr2 60517214 60517233 60517217 -
aacgtgtaccctctcagggg

SEQ ID NO: 176049 - DNA, 20 bp, Artificial Sequence
  Synthetic oligonucleotide; TGG chr2 60517210 60517229 60517213 -
tgtaccctctcaggggcaga

SEQ ID NO: 176050 - DNA, 20 bp, Artificial Sequence
  Synthetic oligonucleotide; CAG chr2 60517202 60517221 60517205 -
ctcaggggcagatggccctc

SEQ ID NO: 176051 - DNA, 20 bp, Artificial Sequence
  Synthetic oligonucleotide; TGG chr2 60517196 60517215 60517199 -
ggcagatggccctccagaat

SEQ ID NO: 176052 - DNA, 20 bp, Artificial Sequence
  Synthetic oligonucleotide; CAG chr2 60517192 60517211 60517195 -
gatggccctccagaattggc

SEQ ID NO: 176053 - DNA, 20 bp, Artificial Sequence
  Synthetic oligonucleotide; TAG chr2 60517167 60517186 60517170 -
caacctcttcctcaccaccc

SEQ ID NO: 176054 - DNA, 20 bp, Artificial Sequence
  Synthetic oligonucleotide; AAG chr2 60517153 60517172 60517156 -
ccaccctagttctattttta

SEQ ID NO: 176055 - DNA, 20 bp, Artificial Sequence
  Synthetic oligonucleotide; CAG chr2 60517136 60517155 60517139 -
ttaaagacacctctcaatcg

SEQ ID NO: 176056 - DNA, 20 bp, Artificial Sequence
  Synthetic oligonucleotide; AGG chr2 60517135 60517154 60517138 -
taaagacacctctcaatcgc

SEQ ID NO: 176057 - DNA, 20 bp, Artificial Sequence
  Synthetic oligonucleotide; CAG chr2 60517067 60517086 60517070 -
aacccatttcctcttcattc

SEQ ID NO: 176058 - DNA, 20 bp, Artificial Sequence
  Synthetic oligonucleotide; GAG chr2 60517065 60517084 60517068 -
cccatttcctcttcattcca

SEQ ID NO: 176059 - DNA, 20 bp, Artificial Sequence
  Synthetic oligonucleotide; AAG chr2 60517056 60517075 60517059 -
tcttcattccagagacgaca

SEQ ID NO: 176060 - DNA, 20 bp, Artificial Sequence
  Synthetic oligonucleotide; CAG chr2 60517042 60517061 60517045 -
acgacaaagtatctcatcac

SEQ ID NO: 176061 - DNA, 20 bp, Artificial Sequence
  Synthetic oligonucleotide; TGG chr2 60517036 60517055 60517039 -
aagtatctcatcaccagctt

SEQ ID NO: 176062 - DNA, 20 bp, Artificial Sequence
  Synthetic oligonucleotide; GGG chr2 60517035 60517054 60517038 -
agtatctcatcaccagcttt

SEQ ID NO: 176063 - DNA, 20 bp, Artificial Sequence
  Synthetic oligonucleotide; TGG chr2 60516947 60516966 60516950 -
ctttcctgaacctgaactca

SEQ ID NO: 176064 - DNA, 20 bp, Artificial Sequence
  Synthetic oligonucleotide; TAG chr2 60516901 60516920 60516904 -
attgtttctatgcctctctt

SEQ ID NO: 176065 - DNA, 20 bp, Artificial Sequence
  Synthetic oligonucleotide; TGG chr2 60516891 60516910 60516894 -
tgcctctctttagaatctgc

SEQ ID NO: 176066 - DNA, 20 bp, Artificial Sequence
  Synthetic oligonucleotide; CAG chr2 60516883 60516902 60516886 -
tttagaatctgctggttttc

SEQ ID NO: 176067 - DNA, 20 bp, Artificial Sequence
  Synthetic oligonucleotide; TAG chr2 60516863 60516882 60516866 -
cagctcttttactcaaacat

SEQ ID NO: 176068 - DNA, 20 bp, Artificial Sequence
  Synthetic oligonucleotide; CAG chr2 60516849 60516868 60516852 -
aaacattagtctgataacta

SEQ ID NO: 176069 - DNA, 20 bp, Artificial Sequence
  Synthetic oligonucleotide; GAG chr2 60516847 60516866 60516850 -
acattagtctgataactaca

SEQ ID NO: 176070 - DNA, 20 bp, Artificial Sequence
  Synthetic oligonucleotide; TGG chr2 60516839 60516858 60516842 -
ctgataactacagagtccaa

SEQ ID NO: 176071 - DNA, 20 bp, Artificial Sequence
  Synthetic oligonucleotide; AAG chr2 60516835 60516854 60516838 -
taactacagagtccaatggc

SEQ ID NO: 176072 - DNA, 20 bp, Artificial Sequence
  Synthetic oligonucleotide; TAG chr2 60516826 60516845 60516829 -
agtccaatggcaagatatct

SEQ ID NO: 176073 - DNA, 20 bp, Artificial Sequence
  Synthetic oligonucleotide; TAG chr2 60516807 60516826 60516810 -
ttagtgttttccacattctt

SEQ ID NO: 176074 - DNA, 20 bp, Artificial Sequence
  Synthetic oligonucleotide; CAG chr2 60516761 60516780 60516764 -
ctgcttgcttttttaaaaac

SEQ ID NO: 176075 - DNA, 20 bp, Artificial Sequence
  Synthetic oligonucleotide; CAG chr2 60516736 60516755 60516739 -
cttcattgatgactcatgct

SEQ ID NO: 176076 - DNA, 20 bp, Artificial Sequence
  Synthetic oligonucleotide; TGG chr2 60516731 60516750 60516734 -
ttgatgactcatgctcagct

SEQ ID NO: 176077 - DNA, 20 bp, Artificial Sequence
  Synthetic oligonucleotide; TAG chr2 60516721 60516740 60516724 -
atgctcagcttggtgtccac

SEQ ID NO: 176078 - DNA, 20 bp, Artificial Sequence
  Synthetic oligonucleotide; AGG chr2 60516720 60516739 60516723 -
tgctcagcttggtgtccact

SEQ ID NO: 176079 - DNA, 20 bp, Artificial Sequence
  Synthetic oligonucleotide; TAG chr2 60516712 60516731 60516715 -
ttggtgtccactaggaatgc

SEQ ID NO: 176080 - DNA, 20 bp, Artificial Sequence
  Synthetic oligonucleotide; CAG chr2 60516701 60516720 60516704 -
taggaatgctagatctttgt

SEQ ID NO: 176081 - DNA, 20 bp, Artificial Sequence
  Synthetic oligonucleotide; GAG chr2 60516690 60516709 60516693 -
gatctttgtcagccatcttt

SEQ ID NO: 176082 - DNA, 20 bp, Artificial Sequence
  Synthetic oligonucleotide; AGG chr2 60516689 60516708 60516692 -
atctttgtcagccatctttg

SEQ ID NO: 176083 - DNA, 20 bp, Artificial Sequence
  Synthetic oligonucleotide; GGG chr2 60516688 60516707 60516691 -
tctttgtcagccatctttga

SEQ ID NO: 176084 - DNA, 20 bp, Artificial Sequence
  Synthetic oligonucleotide; CAG chr2 60516685 60516704 60516688 -
ttgtcagccatctttgaggg

SEQ ID NO: 176085 - DNA, 20 bp, Artificial Sequence
  Synthetic oligonucleotide; CAG chr2 60516667 60516686 60516670 -
ggcagttaaactttcactcc

SEQ ID NO: 176086 - DNA, 20 bp, Artificial Sequence
  Synthetic oligonucleotide; CAG chr2 60516636 60516655 60516639 -
atgccacatttctcccatcc

SEQ ID NO: 176087 - DNA, 20 bp, Artificial Sequence
  Synthetic oligonucleotide; AGG chr2 60516635 60516654 60516638 -
tgccacatttctcccatccc

SEQ ID NO: 176088 - DNA, 20 bp, Artificial Sequence
  Synthetic oligonucleotide; GAG chr2 60516606 60516625 60516609 -
tctctgtccttgtccatatt

SEQ ID NO: 176089 - DNA, 20 bp, Artificial Sequence
  Synthetic oligonucleotide; TAG chr2 60516601 60516620 60516604 -
gtccttgtccatattgagct

SEQ ID NO: 176090 - DNA, 20 bp, Artificial Sequence
  Synthetic oligonucleotide; GAG chr2 60516581 60516600 60516584 -
tagctctccactcctgacac

SEQ ID NO: 176091 - DNA, 20 bp, Artificial Sequence
  Synthetic oligonucleotide; CGG chr2 60516553 60516572 60516556 -
tgacttcctctccacttccc

SEQ ID NO: 176092 - DNA, 20 bp, Artificial Sequence
  Synthetic oligonucleotide; CGG chr2 60516546 60516565 60516549 -
ctctccacttccccggatga

SEQ ID NO: 176093 - DNA, 20 bp, Artificial Sequence
  Synthetic oligonucleotide; GAG chr2 60516542 60516561 60516545 -
ccacttccccggatgacggt

SEQ ID NO: 176094 - DNA, 20 bp, Artificial Sequence
  Synthetic oligonucleotide; AAG chr2 60516522 60516541 60516525 -
gagttacgatcttgtctcct

SEQ ID NO: 176095 - DNA, 20 bp, Artificial Sequence
  Synthetic oligonucleotide; AGG chr2 60516521 60516540 60516524 -
agttacgatcttgtctccta

SEQ ID NO: 176096 - DNA, 20 bp, Artificial Sequence
  Synthetic oligonucleotide; TGG chr2 60516504 60516523 60516507 -
ctaaggtgccccctccctct

SEQ ID NO: 176097 - DNA, 20 bp, Artificial Sequence
  Synthetic oligonucleotide; CAG chr2 60516492 60516511 60516495 -
ctccctcttggctcctctcc

SEQ ID NO: 176098 - DNA, 20 bp, Artificial Sequence
  Synthetic oligonucleotide; TGG chr2 60516478 60516497 60516481 -
ctctcccagtgacgacttca

SEQ ID NO: 176099 - DNA, 20 bp, Artificial Sequence
  Synthetic oligonucleotide; GAG chr2 60516476 60516495 60516479 -
ctcccagtgacgacttcatg

SEQ ID NO: 176100 - DNA, 20 bp, Artificial Sequence
  Synthetic oligonucleotide; AGG chr2 60516475 60516494 60516478 -
tcccagtgacgacttcatgg

SEQ ID NO: 176101 - DNA, 20 bp, Artificial Sequence
  Synthetic oligonucleotide; GAG chr2 60516470 60516489 60516473 -
gtgacgacttcatggaggct

SEQ ID NO: 176102 - DNA, 20 bp, Artificial Sequence
  Synthetic oligonucleotide; TAG chr2 60516462 60516481 60516465 -
ttcatggaggctgagaaata

SEQ ID NO: 176103 - DNA, 20 bp, Artificial Sequence
  Synthetic oligonucleotide; GAG chr2 60516458 60516477 60516461 -
tggaggctgagaaatatagt

SEQ ID NO: 176104 - DNA, 20 bp, Artificial Sequence
  Synthetic oligonucleotide; TGG chr2 60516455 60516474 60516458 -
aggctgagaaatatagtgag

SEQ ID NO: 176105 - DNA, 20 bp, Artificial Sequence
  Synthetic oligonucleotide; CGG chr2 60516429 60516448 60516432 -
ttcttgcctcacttactgct

SEQ ID NO: 176106 - DNA, 20 bp, Artificial Sequence
  Synthetic oligonucleotide; AAG chr2 60516425 60516444 60516428 -
tgcctcacttactgctcggt

SEQ ID NO: 176107 - DNA, 20 bp, Artificial Sequence
  Synthetic oligonucleotide; TAG chr2 60516421 60516440 60516424 -
tcacttactgctcggtaagt

SEQ ID NO: 176108 - DNA, 20 bp, Artificial Sequence
  Synthetic oligonucleotide; CAG chr2 60516416 60516435 60516419 -
tactgctcggtaagttagct

SEQ ID NO: 176109 - DNA, 20 bp, Artificial Sequence
  Synthetic oligonucleotide; AGG chr2 60516415 60516434 60516418 -
actgctcggtaagttagctc

SEQ ID NO: 176110 - DNA, 20 bp, Artificial Sequence
  Synthetic oligonucleotide; GGG chr2 60516414 60516433 60516417 -
ctgctcggtaagttagctca

SEQ ID NO: 176111 - DNA, 20 bp, Artificial Sequence
  Synthetic oligonucleotide; GGG chr2 60516413 60516432 60516416 -
tgctcggtaagttagctcag

SEQ ID NO: 176112 - DNA, 20 bp, Artificial Sequence
  Synthetic oligonucleotide; GGG chr2 60516412 60516431 60516415 -
gctcggtaagttagctcagg

SEQ ID NO: 176113 - DNA, 20 bp, Artificial Sequence
  Synthetic oligonucleotide; GAG chr2 60516410 60516429 60516413 -
tcggtaagttagctcagggg

SEQ ID NO: 176114 - DNA, 20 bp, Artificial Sequence
  Synthetic oligonucleotide; GAG chr2 60516408 60516427 60516411 -
ggtaagttagctcaggggga

SEQ ID NO: 176115 - DNA, 20 bp, Artificial Sequence
  Synthetic oligonucleotide; TGG chr2 60516380 60516399 60516383 -
cataactttgcactgacatc

SEQ ID NO: 176116 - DNA, 20 bp, Artificial Sequence
  Synthetic oligonucleotide; GAG chr2 60516378 60516397 60516381 -
taactttgcactgacatctg

SEQ ID NO: 176117 - DNA, 20 bp, Artificial Sequence
  Synthetic oligonucleotide; AAG chr2 60516371 60516390 60516374 -
gcactgacatctggagaaca

SEQ ID NO: 176118 - DNA, 20 bp, Artificial Sequence
  Synthetic oligonucleotide; AGG chr2 60516370 60516389 60516373 -
cactgacatctggagaacaa

SEQ ID NO: 176119 - DNA, 20 bp, Artificial Sequence
  Synthetic oligonucleotide; TGG chr2 60516364 60516383 60516367 -
catctggagaacaaaggttt

SEQ ID NO: 176120 - DNA, 20 bp, Artificial Sequence
  Synthetic oligonucleotide; AAG chr2 60516361 60516380 60516364 -
ctggagaacaaaggttttgg

SEQ ID NO: 176121 - DNA, 20 bp, Artificial Sequence
  Synthetic oligonucleotide; GAG chr2 60516359 60516378 60516362 -
ggagaacaaaggttttggaa

SEQ ID NO: 176122 - DNA, 20 bp, Artificial Sequence
  Synthetic oligonucleotide; CGG chr2 60516356 60516375 60516359 -
gaacaaaggttttggaagag

SEQ ID NO: 176123 - DNA, 20 bp, Artificial Sequence
  Synthetic oligonucleotide; GAG chr2 60516354 60516373 60516357 -
acaaaggttttggaagagcg

SEQ ID NO: 176124 - DNA, 20 bp, Artificial Sequence
  Synthetic oligonucleotide; CAG chr2 60516349 60516368 60516352 -
ggttttggaagagcggagcc

SEQ ID NO: 176125 - DNA, 20 bp, Artificial Sequence
  Synthetic oligonucleotide; GAG chr2 60516337 60516356 60516340 -
gcggagcccagattccctgt

SEQ ID NO: 176126 - DNA, 20 bp, Artificial Sequence
  Synthetic oligonucleotide; CAG chr2 60516333 60516352 60516336 -
agcccagattccctgtgagc

SEQ ID NO: 176127 - DNA, 20 bp, Artificial Sequence
  Synthetic oligonucleotide; CAG chr2 60516330 60516349 60516333 -
ccagattccctgtgagccag

SEQ ID NO: 176128 - DNA, 20 bp, Artificial Sequence
  Synthetic oligonucleotide; GAG chr2 60516328 60516347 60516331 -
agattccctgtgagccagca

SEQ ID NO: 176129 - DNA, 20 bp, Artificial Sequence
  Synthetic oligonucleotide; AAG chr2 60516323 60516342 60516326 -
ccctgtgagccagcagagcc

SEQ ID NO: 176130 - DNA, 20 bp, Artificial Sequence
  Synthetic oligonucleotide; GAG chr2 60516312 60516331 60516315 -
agcagagccaagtctttttt

SEQ ID NO: 176131 - DNA, 20 bp, Artificial Sequence
  Synthetic oligonucleotide; CAG chr2 60516305 60516324 60516308 -
ccaagtcttttttgagtttc

SEQ ID NO: 176132 - DNA, 20 bp, Artificial Sequence
  Synthetic oligonucleotide; TAG chr2 60516282 60516301 60516285 -
caaaacctgtgttttaataa

SEQ ID NO: 176133 - DNA, 20 bp, Artificial Sequence
  Synthetic oligonucleotide; AGG chr2 60516281 60516300 60516284 -
aaaacctgtgttttaataat

SEQ ID NO: 176134 - DNA, 20 bp, Artificial Sequence
  Synthetic oligonucleotide; GAG chr2 60516279 60516298 60516282 -
aacctgtgttttaataatag

SEQ ID NO: 176135 - DNA, 20 bp, Artificial Sequence
  Synthetic oligonucleotide; TGG chr2 60516276 60516295 60516279 -
ctgtgttttaataataggag

SEQ ID NO: 176136 - DNA, 20 bp, Artificial Sequence
  Synthetic oligonucleotide; GGG chr2 60516275 60516294 60516278 -
tgtgttttaataataggagt

SEQ ID NO: 176137 - DNA, 20 bp, Artificial Sequence
  Synthetic oligonucleotide; TAG chr2 60516259 60516278 60516262 -
gagtgggtcattgtgtttaa

SEQ ID NO: 176138 - DNA, 20 bp, Artificial Sequence
  Synthetic oligonucleotide; AAG chr2 60516243 60516262 60516246 -
ttaatagtacaacaaaacct

SEQ ID NO: 176139 - DNA, 20 bp, Artificial Sequence
  Synthetic oligonucleotide; AAG chr2 60516230 60516249 60516233 -
aaaacctaagtgcacataat

SEQ ID NO: 176140 - DNA, 20 bp, Artificial Sequence
  Synthetic oligonucleotide; TGG chr2 60516209 60516228 60516212 -
agcacatcttttctgtgtgc

SEQ ID NO: 176141 - DNA, 20 bp, Artificial Sequence
  Synthetic oligonucleotide; GGG chr2 60516208 60516227 60516211 -
gcacatcttttctgtgtgct

SEQ ID NO: 176142 - DNA, 20 bp, Artificial Sequence
  Synthetic oligonucleotide; GGG chr2 60516207 60516226 60516210 -
cacatcttttctgtgtgctg

SEQ ID NO: 176143 - DNA, 20 bp, Artificial Sequence
  Synthetic oligonucleotide; GAG chr2 60516203 60516222 60516206 -
tcttttctgtgtgctggggt

SEQ ID NO: 176144 - DNA, 20 bp, Artificial Sequence
  Synthetic oligonucleotide; AGG chr2 60516202 60516221 60516205 -
cttttctgtgtgctggggtg

SEQ ID NO: 176145 - DNA, 20 bp, Artificial Sequence
  Synthetic oligonucleotide; GAG chr2 60516200 60516219 60516203 -
tttctgtgtgctggggtgag

SEQ ID NO: 176146 - DNA, 20 bp, Artificial Sequence
  Synthetic oligonucleotide; GAG chr2 60516198 60516217 60516201 -
tctgtgtgctggggtgagga

SEQ ID NO: 176147 - DNA, 20 bp, Artificial Sequence
  Synthetic oligonucleotide; AGG chr2 60516197 60516216 60516200 -
ctgtgtgctggggtgaggag

SEQ ID NO: 176148 - DNA, 20 bp, Artificial Sequence
  Synthetic oligonucleotide; CAG chr2 60516191 60516210 60516194 -
gctggggtgaggagaggtga

SEQ ID NO: 176149 - DNA, 20 bp, Artificial Sequence
  Synthetic oligonucleotide; GAG chr2 60516187 60516206 60516190 -
gggtgaggagaggtgacagt

SEQ ID NO: 176150 - DNA, 20 bp, Artificial Sequence
  Synthetic oligonucleotide; TAG chr2 60516180 60516199 60516183 -
gagaggtgacagtgagtgtg

SEQ ID NO: 176151 - DNA, 20 bp, Artificial Sequence
  Synthetic oligonucleotide; AGG chr2 60516179 60516198 60516182 -
agaggtgacagtgagtgtgt

SEQ ID NO: 176152 - DNA, 20 bp, Artificial Sequence
  Synthetic oligonucleotide; AAG chr2 60516166 60516185 60516169 -
agtgtgtaggatgatatgaa

SEQ ID NO: 176153 - DNA, 20 bp, Artificial Sequence
  Synthetic oligonucleotide; CAG chr2 60516158 60516177 60516161 -
ggatgatatgaaaagcatta

SEQ ID NO: 176154 - DNA, 20 bp, Artificial Sequence
  Synthetic oligonucleotide; TGG chr2 60516152 60516171 60516155 -
tatgaaaagcattacagaca

SEQ ID NO: 176155 - DNA, 20 bp, Artificial Sequence
  Synthetic oligonucleotide; GGG chr2 60516151 60516170 60516154 -
atgaaaagcattacagacat

SEQ ID NO: 176156 - DNA, 20 bp, Artificial Sequence
  Synthetic oligonucleotide; AAG chr2 60516147 60516166 60516150 -
aaagcattacagacatggga

SEQ ID NO: 176157 - DNA, 20 bp, Artificial Sequence
  Synthetic oligonucleotide; TAG chr2 60516139 60516158 60516142 -
acagacatgggaaagcatct

SEQ ID NO: 176158 - DNA, 20 bp, Artificial Sequence
  Synthetic oligonucleotide; GAG chr2 60516137 60516156 60516140 -
agacatgggaaagcatctta

SEQ ID NO: 176159 - DNA, 20 bp, Artificial Sequence
  Synthetic oligonucleotide; AAG chr2 60516128 60516147 60516131 -
aaagcatcttagagcaccca

SEQ ID NO: 176160 - DNA, 20 bp, Artificial Sequence
  Synthetic oligonucleotide; TGG chr2 60516124 60516143 60516127 -
catcttagagcacccaaagc

SEQ ID NO: 176161 - DNA, 20 bp, Artificial Sequence
  Synthetic oligonucleotide; GAG chr2 60516118 60516137 60516121 -
agagcacccaaagctggcat

SEQ ID NO: 176162 - DNA, 20 bp, Artificial Sequence
  Synthetic oligonucleotide; CAG chr2 60516109 60516128 60516112 -
aaagctggcatgagtcatca

SEQ ID NO: 176163 - DNA, 20 bp, Artificial Sequence
  Synthetic oligonucleotide; AGG chr2 60516108 60516127 60516111 -
aagctggcatgagtcatcac

SEQ ID NO: 176164 - DNA, 20 bp, Artificial Sequence
  Synthetic oligonucleotide; TGG chr2 60516101 60516120 60516104 -
catgagtcatcacaggctta

SEQ ID NO: 176165 - DNA, 20 bp, Artificial Sequence
  Synthetic oligonucleotide; AAG chr2 60516094 60516113 60516097 -
catcacaggcttatggccac

SEQ ID NO: 176166 - DNA, 20 bp, Artificial Sequence
  Synthetic oligonucleotide; AGG chr2 60516093 60516112 60516096 -
atcacaggcttatggccaca

SEQ ID NO: 176167 - DNA, 20 bp, Artificial Sequence
  Synthetic oligonucleotide; TAG chr2 60516089 60516108 60516092 -
caggcttatggccacaaggc

SEQ ID NO: 176168 - DNA, 20 bp, Artificial Sequence
  Synthetic oligonucleotide; CAG chr2 60516054 60516073 60516057 -
tgcttccctttttcataacc

SEQ ID NO: 176169 - DNA, 20 bp, Artificial Sequence
  Synthetic oligonucleotide; AAG chr2 60516044 60516063 60516047 -
tttcataacccagttcaatg

SEQ ID NO: 176170 - DNA, 20 bp, Artificial Sequence
  Synthetic oligonucleotide; AAG chr2 60516032 60516051 60516035 -
gttcaatgaagacataattg

SEQ ID NO: 176171 - DNA, 20 bp, Artificial Sequence
  Synthetic oligonucleotide; TGG chr2 60516029 60516048 60516032 -
caatgaagacataattgaag

SEQ ID NO: 176172 - DNA, 20 bp, Artificial Sequence
  Synthetic oligonucleotide; GAG chr2 60516025 60516044 60516028 -
gaagacataattgaagtggt

SEQ ID NO: 176173 - DNA, 20 bp, Artificial Sequence
  Synthetic oligonucleotide; AAG chr2 60516022 60516041 60516025 -
gacataattgaagtggtgag

SEQ ID NO: 176174 - DNA, 20 bp, Artificial Sequence
  Synthetic oligonucleotide; GAG chr2 60516020 60516039 60516023 -
cataattgaagtggtgagaa

SEQ ID NO: 176175 - DNA, 20 bp, Artificial Sequence
  Synthetic oligonucleotide; AGG chr2 60516019 60516038 60516022 -
ataattgaagtggtgagaag

SEQ ID NO: 176176 - DNA, 20 bp, Artificial Sequence
  Synthetic oligonucleotide; GGG chr2 60516018 60516037 60516021 -
taattgaagtggtgagaaga

SEQ ID NO: 176177 - DNA, 20 bp, Artificial Sequence
  Synthetic oligonucleotide; GGG chr2 60516017 60516036 60516020 -
aattgaagtggtgagaagag

SEQ ID NO: 176178 - DNA, 20 bp, Artificial Sequence
  Synthetic oligonucleotide; CAG chr2 60516003 60516022 60516006 -
gaagaggggccaccgccctt

SEQ ID NO: 176179 - DNA, 20 bp, Artificial Sequence
  Synthetic oligonucleotide; CAG chr2 60515996 60516015 60515999 -
ggccaccgcccttcagactc

SEQ ID NO: 176180 - DNA, 20 bp, Artificial Sequence
  Synthetic oligonucleotide; AGG chr2 60515995 60516014 60515998 -
gccaccgcccttcagactcc

SEQ ID NO: 176181 - DNA, 20 bp, Artificial Sequence
  Synthetic oligonucleotide; GGG chr2 60515994 60516013 60515997 -
ccaccgcccttcagactcca

SEQ ID NO: 176182 - DNA, 20 bp, Artificial Sequence
  Synthetic oligonucleotide; CAG chr2 60515980 60515999 60515983 -
actccagggtatttgtattc

SEQ ID NO: 176183 - DNA, 20 bp, Artificial Sequence
  Synthetic oligonucleotide; AGG chr2 60515979 60515998 60515982 -
ctccagggtatttgtattcc

SEQ ID NO: 176184 - DNA, 20 bp, Artificial Sequence
  Synthetic oligonucleotide; TGG chr2 60515967 60515986 60515970 -
tgtattccaggacccctccg

SEQ ID NO: 176185 - DNA, 20 bp, Artificial Sequence
  Synthetic oligonucleotide; GGG chr2 60515966 60515985 60515969 -
gtattccaggacccctccgt

SEQ ID NO: 176186 - DNA, 20 bp, Artificial Sequence
  Synthetic oligonucleotide; TGG chr2 60515960 60515979 60515963 -
caggacccctccgtgggtgt

SEQ ID NO: 176187 - DNA, 20 bp, Artificial Sequence
  Synthetic oligonucleotide; CAG chr2 60515955 60515974 60515958 -
cccctccgtgggtgttggcc

SEQ ID NO: 176188 - DNA, 20 bp, Artificial Sequence
  Synthetic oligonucleotide; CGG chr2 60515952 60515971 60515955 -
ctccgtgggtgttggcccag

SEQ ID NO: 176189 - DNA, 20 bp, Artificial Sequence
  Synthetic oligonucleotide; CAG chr2 60515945 60515964 60515948 -
ggtgttggcccagcggtgcc

SEQ ID NO: 176190 - DNA, 20 bp, Artificial Sequence
  Synthetic oligonucleotide; GAG chr2 60515943 60515962 60515946 -
tgttggcccagcggtgccca

SEQ ID NO: 176191 - DNA, 20 bp, Artificial Sequence
  Synthetic oligonucleotide; TGG chr2 60515927 60515946 60515930 -
cccagagaatattcccttat

SEQ ID NO: 176192 - DNA, 20 bp, Artificial Sequence
  Synthetic oligonucleotide; CAG chr2 60515891 60515910 60515894 -
tgacttgttcacttcctgtt

SEQ ID NO: 176193 - DNA, 20 bp, Artificial Sequence
  Synthetic oligonucleotide; CAG chr2 60515886 60515905 60515889 -
tgttcacttcctgttcagcg

SEQ ID NO: 176194 - DNA, 20 bp, Artificial Sequence
  Synthetic oligonucleotide; TGG chr2 60515881 60515900 60515884 -
acttcctgttcagcgcagcc

SEQ ID NO: 176195 - DNA, 20 bp, Artificial Sequence
  Synthetic oligonucleotide; TGG chr2 60515878 60515897 60515881 -
tcctgttcagcgcagcctgg

SEQ ID NO: 176196 - DNA, 20 bp, Artificial Sequence
  Synthetic oligonucleotide; CGG chr2 60515870 60515889 60515873 -
agcgcagcctggtggtgact

SEQ ID NO: 176197 - DNA, 20 bp, Artificial Sequence
  Synthetic oligonucleotide; CAG chr2 60515858 60515877 60515861 -
tggtgactcggtaatcccca

SEQ ID NO: 176198 - DNA, 20 bp, Artificial Sequence
  Synthetic oligonucleotide; AAG chr2 60515854 60515873 60515857 -
gactcggtaatccccacagt

SEQ ID NO: 176199 - DNA, 20 bp, Artificial Sequence
  Synthetic oligonucleotide; CAG chr2 60515845 60515864 60515848 -
atccccacagtaagacctca

SEQ ID NO: 176200 - DNA, 20 bp, Artificial Sequence
  Synthetic oligonucleotide; TGG chr2 60515842 60515861 60515845 -
cccacagtaagacctcacag

SEQ ID NO: 176201 - DNA, 20 bp, Artificial Sequence
  Synthetic oligonucleotide; GGG chr2 60515841 60515860 60515844 -
ccacagtaagacctcacagt

SEQ ID NO: 176202 - DNA, 20 bp, Artificial Sequence
  Synthetic oligonucleotide; GAG chr2 60515836 60515855 60515839 -
gtaagacctcacagtgggtt

SEQ ID NO: 176203 - DNA, 20 bp, Artificial Sequence
  Synthetic oligonucleotide; TGG chr2 60515833 60515852 60515836 -
agacctcacagtgggttgag

SEQ ID NO: 176204 - DNA, 20 bp, Artificial Sequence
  Synthetic oligonucleotide; TGG chr2 60515828 60515847 60515831 -
tcacagtgggttgagtggcc

SEQ ID NO: 176205 - DNA, 20 bp, Artificial Sequence
  Synthetic oligonucleotide; GGG chr2 60515827 60515846 60515830 -
cacagtgggttgagtggcct

SEQ ID NO: 176206 - DNA, 20 bp, Artificial Sequence
  Synthetic oligonucleotide; GAG chr2 60515825 60515844 60515828 -
cagtgggttgagtggcctgg

SEQ ID NO: 176207 - DNA, 20 bp, Artificial Sequence
  Synthetic oligonucleotide; AAG chr2 60515819 60515838 60515822 -
gttgagtggcctgggagctc

SEQ ID NO: 176208 - DNA, 20 bp, Artificial Sequence
  Synthetic oligonucleotide; CAG chr2 60515815 60515834 60515818 -
agtggcctgggagctcaagt

SEQ ID NO: 176209 - DNA, 20 bp, Artificial Sequence
  Synthetic oligonucleotide; AGG chr2 60515814 60515833 60515817 -
gtggcctgggagctcaagtc

SEQ ID NO: 176210 - DNA, 20 bp, Artificial Sequence
  Synthetic oligonucleotide; GGG chr2 60515813 60515832 60515816 -
tggcctgggagctcaagtca

SEQ ID NO: 176211 - DNA, 20 bp, Artificial Sequence
  Synthetic oligonucleotide; GGG chr2 60515812 60515831 60515815 -
ggcctgggagctcaagtcag

SEQ ID NO: 176212 - DNA, 20 bp, Artificial Sequence
  Synthetic oligonucleotide; CAG chr2 60515809 60515828 60515812 -
ctgggagctcaagtcagggg

SEQ ID NO: 176213 - DNA, 20 bp, Artificial Sequence
  Synthetic oligonucleotide; TGG chr2 60515803 60515822 60515806 -
gctcaagtcaggggcagaaa

SEQ ID NO: 176214 - DNA, 20 bp, Artificial Sequence
  Synthetic oligonucleotide; GGG chr2 60515802 60515821 60515805 -
ctcaagtcaggggcagaaat

SEQ ID NO: 176215 - DNA, 20 bp, Artificial Sequence
  Synthetic oligonucleotide; GGG chr2 60515801 60515820 60515804 -
tcaagtcaggggcagaaatg

SEQ ID NO: 176216 - DNA, 20 bp, Artificial Sequence
  Synthetic oligonucleotide; AAG chr2 60515798 60515817 60515801 -
agtcaggggcagaaatgggg

SEQ ID NO: 176217 - DNA, 20 bp, Artificial Sequence
  Synthetic oligonucleotide; TGG chr2 60515794 60515813 60515797 -
aggggcagaaatggggaagc

SEQ ID NO: 176218 - DNA, 20 bp, Artificial Sequence
  Synthetic oligonucleotide; AAG chr2 60515790 60515809 60515793 -
gcagaaatggggaagctgga

SEQ ID NO: 176219 - DNA, 20 bp, Artificial Sequence
  Synthetic oligonucleotide; TGG chr2 60515786 60515805 60515789 -
aaatggggaagctggaaagt

SEQ ID NO: 176220 - DNA, 20 bp, Artificial Sequence
  Synthetic oligonucleotide; GGG chr2 60515785 60515804 60515788 -
aatggggaagctggaaagtt

SEQ ID NO: 176221 - DNA, 20 bp, Artificial Sequence
  Synthetic oligonucleotide; AAG chr2 60515777 60515796 60515780 -
agctggaaagttgggtgatc

SEQ ID NO: 176222 - DNA, 20 bp, Artificial Sequence
  Synthetic oligonucleotide; GAG chr2 60515775 60515794 60515778 -
ctggaaagttgggtgatcaa

SEQ ID NO: 176223 - DNA, 20 bp, Artificial Sequence
  Synthetic oligonucleotide; TGG chr2 60515767 60515786 60515770 -
ttgggtgatcaagagtcatt

SEQ ID NO: 176224 - DNA, 20 bp, Artificial Sequence
  Synthetic oligonucleotide; AAG chr2 60515764 60515783 60515767 -
ggtgatcaagagtcatttgg

SEQ ID NO: 176225 - DNA, 20 bp, Artificial Sequence
  Synthetic oligonucleotide; CAG chr2 60515746 60515765 60515749 -
ggaagcccccatgtctgtgt

SEQ ID NO: 176226 - DNA, 20 bp, Artificial Sequence
  Synthetic oligonucleotide; AAG chr2 60515694 60515713 60515697 -
accactttctccctgcctga

SEQ ID NO: 176227 - DNA, 20 bp, Artificial Sequence
  Synthetic oligonucleotide; TGG chr2 60515688 60515707 60515691 -
ttctccctgcctgaaagcac

SEQ ID NO: 176228 - DNA, 20 bp, Artificial Sequence
  Synthetic oligonucleotide; GGG chr2 60515687 60515706 60515690 -
tctccctgcctgaaagcact

SEQ ID NO: 176229 - DNA, 20 bp, Artificial Sequence
  Synthetic oligonucleotide; CAG chr2 60515676 60515695 60515679 -
gaaagcactgggctgtgttt

SEQ ID NO: 176230 - DNA, 20 bp, Artificial Sequence
  Synthetic oligonucleotide; GAG chr2 60515674 60515693 60515677 -
aagcactgggctgtgtttca

SEQ ID NO: 176231 - DNA, 20 bp, Artificial Sequence
  Synthetic oligonucleotide; GAG chr2 60515672 60515691 60515675 -
gcactgggctgtgtttcaga

SEQ ID NO: 176232 - DNA, 20 bp, Artificial Sequence
  Synthetic oligonucleotide; AGG chr2 60515671 60515690 60515674 -
cactgggctgtgtttcagag

SEQ ID NO: 176233 - DNA, 20 bp, Artificial Sequence
  Synthetic oligonucleotide; TAG chr2 60515668 60515687 60515671 -
tgggctgtgtttcagagagg

SEQ ID NO: 176234 - DNA, 20 bp, Artificial Sequence
  Synthetic oligonucleotide; TGG chr2 60515664 60515683 60515667 -
ctgtgtttcagagaggtagc

SEQ ID NO: 176235 - DNA, 20 bp, Artificial Sequence
  Synthetic oligonucleotide; GGG chr2 60515663 60515682 60515666 -
tgtgtttcagagaggtagct

SEQ ID NO: 176236 - DNA, 20 bp, Artificial Sequence
  Synthetic oligonucleotide; CAG chr2 60515655 60515674 60515658 -
agagaggtagctgggtccca

SEQ ID NO: 176237 - DNA, 20 bp, Artificial Sequence
  Synthetic oligonucleotide; TGG chr2 60515645 60515664 60515648 -
ctgggtcccacagatattta

SEQ ID NO: 176238 - DNA, 20 bp, Artificial Sequence
  Synthetic oligonucleotide; GAG chr2 60515643 60515662 60515646 -
gggtcccacagatatttatg

SEQ ID NO: 176239 - DNA, 20 bp, Artificial Sequence
  Synthetic oligonucleotide; AGG chr2 60515642 60515661 60515645 -
ggtcccacagatatttatgg

SEQ ID NO: 176240 - DNA, 20 bp, Artificial Sequence
  Synthetic oligonucleotide; GGG chr2 60515641 60515660 60515644 -
gtcccacagatatttatgga

SEQ ID NO: 176241 - DNA, 20 bp, Artificial Sequence
  Synthetic oligonucleotide; TAG chr2 60515618 60515637 60515621 -
cttgtttctgtatctccttc

SEQ ID NO: 176242 - DNA, 20 bp, Artificial Sequence
  Synthetic oligonucleotide; TGG chr2 60515615 60515634 60515618 -
gtttctgtatctccttctag

SEQ ID NO: 176243 - DNA, 20 bp, Artificial Sequence
  Synthetic oligonucleotide; GGG chr2 60515614 60515633 60515617 -
tttctgtatctccttctagt

SEQ ID NO: 176244 - DNA, 20 bp, Artificial Sequence
  Synthetic oligonucleotide; TGG chr2 60515610 60515629 60515613 -
tgtatctccttctagtgggc

SEQ ID NO: 176245 - DNA, 20 bp, Artificial Sequence
  Synthetic oligonucleotide; CAG chr2 60515600 60515619 60515603 -
tctagtgggctggacctccc

SEQ ID NO: 176246 - DNA, 20 bp, Artificial Sequence
  Synthetic oligonucleotide; AGG chr2 60515599 60515618 60515602 -
ctagtgggctggacctcccc

SEQ ID NO: 176247 - DNA, 20 bp, Artificial Sequence
  Synthetic oligonucleotide; TAG chr2 60515587 60515606 60515590 -
acctccccaggccatttttc

SEQ ID NO: 176248 - DNA, 20 bp, Artificial Sequence
  Synthetic oligonucleotide; AGG chr2 60515586 60515605 60515589 -
cctccccaggccatttttct

SEQ ID NO: 176249 - DNA, 20 bp, Artificial Sequence
  Synthetic oligonucleotide; TAG chr2 60515579 60515598 60515582 -
aggccatttttctaggtaac

SEQ ID NO: 176250 - DNA, 20 bp, Artificial Sequence
  Synthetic oligonucleotide; AGG chr2 60515578 60515597 60515581 -
ggccatttttctaggtaact

SEQ ID NO: 176251 - DNA, 20 bp, Artificial Sequence
  Synthetic oligonucleotide; AAG chr2 60515575 60515594 60515578 -
catttttctaggtaactagg

SEQ ID NO: 176252 - DNA, 20 bp, Artificial Sequence
  Synthetic oligonucleotide; AGG chr2 60515574 60515593 60515577 -
atttttctaggtaactagga

SEQ ID NO: 176253 - DNA, 20 bp, Artificial Sequence
  Synthetic oligonucleotide; CAG chr2 60515560 60515579 60515563 -
ctaggaaggcctgactctgt

SEQ ID NO: 176254 - DNA, 20 bp, Artificial Sequence
  Synthetic oligonucleotide; TGG chr2 60515552 60515571 60515555 -
gcctgactctgtcagcaact

SEQ ID NO: 176255 - DNA, 20 bp, Artificial Sequence
  Synthetic oligonucleotide; TGG chr2 60515542 60515561 60515545 -
gtcagcaacttggctttctt

SEQ ID NO: 176256 - DNA, 20 bp, Artificial Sequence
  Synthetic oligonucleotide; GAG chr2 60515540 60515559 60515543 -
cagcaacttggctttctttg

SEQ ID NO: 176257 - DNA, 20 bp, Artificial Sequence
  Synthetic oligonucleotide; AGG chr2 60515539 60515558 60515542 -
agcaacttggctttctttgg

SEQ ID NO: 176258 - DNA, 20 bp, Artificial Sequence
  Synthetic oligonucleotide; GAG chr2 60515537 60515556 60515540 -
caacttggctttctttggag

SEQ ID NO: 176259 - DNA, 20 bp, Artificial Sequence
  Synthetic oligonucleotide; AGG chr2 60515536 60515555 60515539 -
aacttggctttctttggagg

SEQ ID NO: 176260 - DNA, 20 bp, Artificial Sequence
  Synthetic oligonucleotide; TGG chr2 60515525 60515544 60515528 -
ctttggaggaggtgtcactc

SEQ ID NO: 176261 - DNA, 20 bp, Artificial Sequence
  Synthetic oligonucleotide; GGG chr2 60515524 60515543 60515527 -
tttggaggaggtgtcactct

SEQ ID NO: 176262 - DNA, 20 bp, Artificial Sequence
  Synthetic oligonucleotide; TAG chr2 60515519 60515538 60515522 -
aggaggtgtcactctgggat

SEQ ID NO: 176263 - DNA, 20 bp, Artificial Sequence
  Synthetic oligonucleotide; AAG chr2 60515512 60515531 60515515 -
gtcactctgggattagttaa

SEQ ID NO: 176264 - DNA, 20 bp, Artificial Sequence
  Synthetic oligonucleotide; AGG chr2 60515511 60515530 60515514 -
tcactctgggattagttaaa

SEQ ID NO: 176265 - DNA, 20 bp, Artificial Sequence
  Synthetic oligonucleotide; GGG chr2 60515510 60515529 60515513 -
cactctgggattagttaaaa

SEQ ID NO: 176266 - DNA, 20 bp, Artificial Sequence
  Synthetic oligonucleotide; GGG chr2 60515509 60515528 60515512 -
actctgggattagttaaaag

SEQ ID NO: 176267 - DNA, 20 bp, Artificial Sequence
  Synthetic oligonucleotide; CAG chr2 60515504 60515523 60515507 -
gggattagttaaaaggggat

SEQ ID NO: 176268 - DNA, 20 bp, Artificial Sequence
  Synthetic oligonucleotide; TGG chr2 60515501 60515520 60515504 -
attagttaaaaggggatcag

SEQ ID NO: 176269 - DNA, 20 bp, Artificial Sequence
  Synthetic oligonucleotide; TGG chr2 60515489 60515508 60515492 -
gggatcagtggtattcacat

SEQ ID NO: 176270 - DNA, 20 bp, Artificial Sequence
  Synthetic oligonucleotide; TGG chr2 60515482 60515501 60515485 -
gtggtattcacattggctcg

SEQ ID NO: 176271 - DNA, 20 bp, Artificial Sequence
  Synthetic oligonucleotide; GGG chr2 60515481 60515500 60515484 -
tggtattcacattggctcgt

SEQ ID NO: 176272 - DNA, 20 bp, Artificial Sequence
  Synthetic oligonucleotide; TGG chr2 60515447 60515466 60515450 -
ctcctcaaattataaccttt

SEQ ID NO: 176273 - DNA, 20 bp, Artificial Sequence
  Synthetic oligonucleotide; GAG chr2 60515445 60515464 60515448 -
cctcaaattataaccttttg

SEQ ID NO: 176274 - DNA, 20 bp, Artificial Sequence
  Synthetic oligonucleotide; AGG chr2 60515444 60515463 60515447 -
ctcaaattataaccttttgg

SEQ ID NO: 176275 - DNA, 20 bp, Artificial Sequence
  Synthetic oligonucleotide; GGG chr2 60515443 60515462 60515446 -
tcaaattataaccttttgga

SEQ ID NO: 176276 - DNA, 20 bp, Artificial Sequence
  Synthetic oligonucleotide; CAG chr2 60515440 60515459 60515443 -
aattataaccttttggaggg

SEQ ID NO: 176277 - DNA, 20 bp, Artificial Sequence
  Synthetic oligonucleotide; AGG chr2 60515439 60515458 60515442 -
attataaccttttggagggc

SEQ ID NO: 176278 - DNA, 20 bp, Artificial Sequence
  Synthetic oligonucleotide; GAG chr2 60515437 60515456 60515440 -
tataaccttttggagggcag

SEQ ID NO: 176279 - DNA, 20 bp, Artificial Sequence
  Synthetic oligonucleotide; TGG chr2 60515409 60515428 60515412 -
ttttattttttgtgccttct

SEQ ID NO: 176280 - DNA, 20 bp, Artificial Sequence
  Synthetic oligonucleotide; TGG chr2 60515391 60515410 60515394 -
cttggtgcctaacataatgc

SEQ ID NO: 176281 - DNA, 20 bp, Artificial Sequence
  Synthetic oligonucleotide; TAG chr2 60515380 60515399 60515383 -
acataatgctggttcatatg

SEQ ID NO: 176282 - DNA, 20 bp, Artificial Sequence
  Synthetic oligonucleotide; CAG chr2 60515340 60515359 60515343 -
gctcacgctgcttgattgaa

SEQ ID NO: 176283 - DNA, 20 bp, Artificial Sequence
  Synthetic oligonucleotide; GAG chr2 60515338 60515357 60515341 -
tcacgctgcttgattgaaca

SEQ ID NO: 176284 - DNA, 20 bp, Artificial Sequence
  Synthetic oligonucleotide; AAG chr2 60515334 60515353 60515337 -
gctgcttgattgaacagaga

SEQ ID NO: 176285 - DNA, 20 bp, Artificial Sequence
  Synthetic oligonucleotide; CGG chr2 60515329 60515348 60515332 -
ttgattgaacagagaaagac

SEQ ID NO: 176286 - DNA, 20 bp, Artificial Sequence
  Synthetic oligonucleotide; GGG chr2 60515328 60515347 60515331 -
tgattgaacagagaaagacc

SEQ ID NO: 176287 - DNA, 20 bp, Artificial Sequence
  Synthetic oligonucleotide; TGG chr2 60515318 60515337 60515321 -
gagaaagaccgggctttgaa

SEQ ID NO: 176288 - DNA, 20 bp, Artificial Sequence
  Synthetic oligonucleotide; CAG chr2 60515310 60515329 60515313 -
ccgggctttgaatggatccc

SEQ ID NO: 176289 - DNA, 20 bp, Artificial Sequence
  Synthetic oligonucleotide; CAG chr2 60515298 60515317 60515301 -
tggatccccagctccctgtc

SEQ ID NO: 176290 - DNA, 20 bp, Artificial Sequence
  Synthetic oligonucleotide; AGG chr2 60515297 60515316 60515300 -
ggatccccagctccctgtcc

SEQ ID NO: 176291 - DNA, 20 bp, Artificial Sequence
  Synthetic oligonucleotide; GGG chr2 60515296 60515315 60515299 -
gatccccagctccctgtcca

SEQ ID NO: 176292 - DNA, 20 bp, Artificial Sequence
  Synthetic oligonucleotide; AAG chr2 60515293 60515312 60515296 -
ccccagctccctgtccaggg

SEQ ID NO: 176293 - DNA, 20 bp, Artificial Sequence
  Synthetic oligonucleotide; AGG chr2 60515292 60515311 60515295 -
cccagctccctgtccaggga

SEQ ID NO: 176294 - DNA, 20 bp, Artificial Sequence
  Synthetic oligonucleotide; GAG chr2 60515286 60515305 60515289 -
tccctgtccagggaaggtgt

SEQ ID NO: 176295 - DNA, 20 bp, Artificial Sequence
  Synthetic oligonucleotide; AGG chr2 60515285 60515304 60515288 -
ccctgtccagggaaggtgtg

SEQ ID NO: 176296 - DNA, 20 bp, Artificial Sequence
  Synthetic oligonucleotide; TGG chr2 60515281 60515300 60515284 -
gtccagggaaggtgtgaggc

SEQ ID NO: 176297 - DNA, 20 bp, Artificial Sequence
  Synthetic oligonucleotide; GGG chr2 60515280 60515299 60515283 -
tccagggaaggtgtgaggct

SEQ ID NO: 176298 - DNA, 20 bp, Artificial Sequence
  Synthetic oligonucleotide; AAG chr2 60515276 60515295 60515279 -
gggaaggtgtgaggctgggc

SEQ ID NO: 176299 - DNA, 20 bp, Artificial Sequence
  Synthetic oligonucleotide; TGG chr2 60515253 60515272 60515256 -
tttatttcccccttcctccc

SEQ ID NO: 176300 - DNA, 20 bp, Artificial Sequence
  Synthetic oligonucleotide; GGG chr2 60515252 60515271 60515255 -
ttatttcccccttcctccct

SEQ ID NO: 176301 - DNA, 20 bp, Artificial Sequence
  Synthetic oligonucleotide; GGG chr2 60515251 60515270 60515254 -
tatttcccccttcctccctg

SEQ ID NO: 176302 - DNA, 20 bp, Artificial Sequence
  Synthetic oligonucleotide; GAG chr2 60515249 60515268 60515252 -
tttcccccttcctccctggg

SEQ ID NO: 176303 - DNA, 20 bp, Artificial Sequence
  Synthetic oligonucleotide; AAG chr2 60515245 60515264 60515248 -
ccccttcctccctggggaga

SEQ ID NO: 176304 - DNA, 20 bp, Artificial Sequence
  Synthetic oligonucleotide; AAG chr2 60515237 60515256 60515240 -
tccctggggagaaagtgaaa

SEQ ID NO: 176305 - DNA, 20 bp, Artificial Sequence
  Synthetic oligonucleotide; AAG chr2 60515231 60515250 60515234 -
gggagaaagtgaaaaagtga

SEQ ID NO: 176306 - DNA, 20 bp, Artificial Sequence
  Synthetic oligonucleotide; TGG chr2 60515225 60515244 60515228 -
aagtgaaaaagtgaaagtgc

SEQ ID NO: 176307 - DNA, 20 bp, Artificial Sequence
  Synthetic oligonucleotide; GGG chr2 60515224 60515243 60515227 -
agtgaaaaagtgaaagtgct

SEQ ID NO: 176308 - DNA, 20 bp, Artificial Sequence
  Synthetic oligonucleotide; GGG chr2 60515223 60515242 60515226 -
gtgaaaaagtgaaagtgctg

SEQ ID NO: 176309 - DNA, 20 bp, Artificial Sequence
  Synthetic oligonucleotide; TGG chr2 60515219 60515238 60515222 -
aaaagtgaaagtgctggggt

SEQ ID NO: 176310 - DNA, 20 bp, Artificial Sequence
  Synthetic oligonucleotide; GGG chr2 60515218 60515237 60515221 -
aaagtgaaagtgctggggtt

SEQ ID NO: 176311 - DNA, 20 bp, Artificial Sequence
  Synthetic oligonucleotide; TAG chr2 60515214 60515233 60515217 -
tgaaagtgctggggttggga

SEQ ID NO: 176312 - DNA, 20 bp, Artificial Sequence
  Synthetic oligonucleotide; TGG chr2 60515210 60515229 60515213 -
agtgctggggttgggatagc

SEQ ID NO: 176313 - DNA, 20 bp, Artificial Sequence
  Synthetic oligonucleotide; TGG chr2 60515207 60515226 60515210 -
gctggggttgggatagctgg

SEQ ID NO: 176314 - DNA, 20 bp, Artificial Sequence
  Synthetic oligonucleotide; TGG chr2 60515196 60515215 60515199 -
gatagctggtggtgtctttg

SEQ ID NO: 176315 - DNA, 20 bp, Artificial Sequence
  Synthetic oligonucleotide; TGG chr2 60515182 60515201 60515185 -
tctttgtggctttcacccca

SEQ ID NO: 176316 - DNA, 20 bp, Artificial Sequence
  Synthetic oligonucleotide; AAG chr2 60515177 60515196 60515180 -
gtggctttcaccccatggtc

SEQ ID NO: 176317 - DNA, 20 bp, Artificial Sequence
  Synthetic oligonucleotide; CAG chr2 60515174 60515193 60515177 -
gctttcaccccatggtcaag

SEQ ID NO: 176318 - DNA, 20 bp, Artificial Sequence
  Synthetic oligonucleotide; CAG chr2 60515158 60515177 60515161 -
caagcagtgaactctgcttg

SEQ ID NO: 176319 - DNA, 20 bp, Artificial Sequence
  Synthetic oligonucleotide; TGG chr2 60515138 60515157 60515141 -
cagattctgtctcgctcacc

SEQ ID NO: 176320 - DNA, 20 bp, Artificial Sequence
  Synthetic oligonucleotide; AAG chr2 60515135 60515154 60515138 -
attctgtctcgctcacctgg

SEQ ID NO: 176321 - DNA, 20 bp, Artificial Sequence
  Synthetic oligonucleotide; CAG chr2 60515131 60515150 60515134 -
tgtctcgctcacctggaagc

SEQ ID NO: 176322 - DNA, 20 bp, Artificial Sequence
  Synthetic oligonucleotide; TGG chr2 60515125 60515144 60515128 -
gctcacctggaagccagtgt

SEQ ID NO: 176323 - DNA, 20 bp, Artificial Sequence
  Synthetic oligonucleotide; GGG chr2 60515124 60515143 60515127 -
ctcacctggaagccagtgtt

SEQ ID NO: 176324 - DNA, 20 bp, Artificial Sequence
  Synthetic oligonucleotide; GGG chr2 60515123 60515142 60515126 -
tcacctggaagccagtgttg

SEQ ID NO: 176325 - DNA, 20 bp, Artificial Sequence
  Synthetic oligonucleotide; AAG chr2 60515120 60515139 60515123 -
cctggaagccagtgttgggg

SEQ ID NO: 176326 - DNA, 20 bp, Artificial Sequence
  Synthetic oligonucleotide; AGG chr2 60515119 60515138 60515122 -
ctggaagccagtgttgggga

SEQ ID NO: 176327 - DNA, 20 bp, Artificial Sequence
  Synthetic oligonucleotide; GAG chr2 60515117 60515136 60515120 -
ggaagccagtgttggggaag

SEQ ID NO: 176328 - DNA, 20 bp, Artificial Sequence
  Synthetic oligonucleotide; TGG chr2 60515110 60515129 60515113 -
agtgttggggaaggagcacg

SEQ ID NO: 176329 - DNA, 20 bp, Artificial Sequence
  Synthetic oligonucleotide; GGG chr2 60515109 60515128 60515112 -
gtgttggggaaggagcacgt

SEQ ID NO: 176330 - DNA, 20 bp, Artificial Sequence
  Synthetic oligonucleotide; GGG chr2 60515108 60515127 60515111 -
tgttggggaaggagcacgtg

SEQ ID NO: 176331 - DNA, 20 bp, Artificial Sequence
  Synthetic oligonucleotide; GGG chr2 60515107 60515126 60515110 -
gttggggaaggagcacgtgg

SEQ ID NO: 176332 - DNA, 20 bp, Artificial Sequence
  Synthetic oligonucleotide; GAG chr2 60515105 60515124 60515108 -
tggggaaggagcacgtgggg

SEQ ID NO: 176333 - DNA, 20 bp, Artificial Sequence
  Synthetic oligonucleotide; AGG chr2 60515104 60515123 60515107 -
ggggaaggagcacgtggggg

SEQ ID NO: 176334 - DNA, 20 bp, Artificial Sequence
  Synthetic oligonucleotide; TAG chr2 60515096 60515115 60515099 -
agcacgtgggggaggatcct

SEQ ID NO: 176335 - DNA, 20 bp, Artificial Sequence
  Synthetic oligonucleotide; AGG chr2 60515095 60515114 60515098 -
gcacgtgggggaggatcctt

SEQ ID NO: 176336 - DNA, 20 bp, Artificial Sequence
  Synthetic oligonucleotide; TGG chr2 60515090 60515109 60515093 -
tgggggaggatccttaggtc

SEQ ID NO: 176337 - DNA, 20 bp, Artificial Sequence
  Synthetic oligonucleotide; GGG chr2 60515089 60515108 60515092 -
gggggaggatccttaggtct

SEQ ID NO: 176338 - DNA, 20 bp, Artificial Sequence
  Synthetic oligonucleotide; TGG chr2 60515078 60515097 60515081 -
cttaggtctgggcaacactt

SEQ ID NO: 176339 - DNA, 20 bp, Artificial Sequence
  Synthetic oligonucleotide; GAG chr2 60515076 60515095 60515079 -
taggtctgggcaacactttg

SEQ ID NO: 176340 - DNA, 20 bp, Artificial Sequence
  Synthetic oligonucleotide; TAG chr2 60515072 60515091 60515075 -
tctgggcaacactttggagt

SEQ ID NO: 176341 - DNA, 20 bp, Artificial Sequence
  Synthetic oligonucleotide; AGG chr2 60515071 60515090 60515074 -
ctgggcaacactttggagtt

SEQ ID NO: 176342 - DNA, 20 bp, Artificial Sequence
  Synthetic oligonucleotide; GGG chr2 60515070 60515089 60515073 -
tgggcaacactttggagtta

SEQ ID NO: 176343 - DNA, 20 bp, Artificial Sequence
  Synthetic oligonucleotide; GGG chr2 60515069 60515088 60515072 -
gggcaacactttggagttag

SEQ ID NO: 176344 - DNA, 20 bp, Artificial Sequence
  Synthetic oligonucleotide; GGG chr2 60515068 60515087 60515071 -
ggcaacactttggagttagg

SEQ ID NO: 176345 - DNA, 20 bp, Artificial Sequence
  Synthetic oligonucleotide; TGG chr2 60515060 60515079 60515063 -
tttggagttagggggtcccc

SEQ ID NO: 176346 - DNA, 20 bp, Artificial Sequence
  Synthetic oligonucleotide; GAG chr2 60515058 60515077 60515061 -
tggagttagggggtcccctg

SEQ ID NO: 176347 - DNA, 20 bp, Artificial Sequence
  Synthetic oligonucleotide; AGG chr2 60515057 60515076 60515060 -
ggagttagggggtcccctgg

SEQ ID NO: 176348 - DNA, 20 bp, Artificial Sequence
  Synthetic oligonucleotide; TGG chr2 60515052 60515071 60515055 -
tagggggtcccctggaggtg

SEQ ID NO: 176349 - DNA, 20 bp, Artificial Sequence
  Synthetic oligonucleotide; GGG chr2 60515051 60515070 60515054 -
agggggtcccctggaggtgt

SEQ ID NO: 176350 - DNA, 20 bp, Artificial Sequence
  Synthetic oligonucleotide; AAG chr2 60515048 60515067 60515051 -
gggtcccctggaggtgtggg

SEQ ID NO: 176351 - DNA, 20 bp, Artificial Sequence
  Synthetic oligonucleotide; TGG chr2 60515044 60515063 60515047 -
cccctggaggtgtgggaagc

SEQ ID NO: 176352 - DNA, 20 bp, Artificial Sequence
  Synthetic oligonucleotide; TAG chr2 60515041 60515060 60515044 -
ctggaggtgtgggaagctgg

SEQ ID NO: 176353 - DNA, 20 bp, Artificial Sequence
  Synthetic oligonucleotide; TGG chr2 60515038 60515057 60515041 -
gaggtgtgggaagctggtag

SEQ ID NO: 176354 - DNA, 20 bp, Artificial Sequence
  Synthetic oligonucleotide; TGG chr2 60515030 60515049 60515033 -
ggaagctggtagtggcattc

SEQ ID NO: 176355 - DNA, 20 bp, Artificial Sequence
  Synthetic oligonucleotide; AAG chr2 60515023 60515042 60515026 -
ggtagtggcattctggaaac

SEQ ID NO: 176356 - DNA, 20 bp, Artificial Sequence
  Synthetic oligonucleotide; TAG chr2 60515019 60515038 60515022 -
gtggcattctggaaacaagc

SEQ ID NO: 176357 - DNA, 20 bp, Artificial Sequence
  Synthetic oligonucleotide; GAG chr2 60515017 60515036 60515020 -
ggcattctggaaacaagcta

SEQ ID NO: 176358 - DNA, 20 bp, Artificial Sequence
  Synthetic oligonucleotide; CAG chr2 60515004 60515023 60515007 -
caagctagagcctgtctcac

SEQ ID NO: 176359 - DNA, 20 bp, Artificial Sequence
  Synthetic oligonucleotide; GAG chr2 60515002 60515021 60515005 -
agctagagcctgtctcacca

SEQ ID NO: 176360 - DNA, 20 bp, Artificial Sequence
  Synthetic oligonucleotide; AGG chr2 60515001 60515020 60515004 -
gctagagcctgtctcaccag

SEQ ID NO: 176361 - DNA, 20 bp, Artificial Sequence
  Synthetic oligonucleotide; GGG chr2 60515000 60515019 60515003 -
ctagagcctgtctcaccaga

SEQ ID NO: 176362 - DNA, 20 bp, Artificial Sequence
  Synthetic oligonucleotide; GAG chr2 60514998 60515017 60515001 -
agagcctgtctcaccagagg

SEQ ID NO: 176363 - DNA, 20 bp, Artificial Sequence
  Synthetic oligonucleotide; CGG chr2 60514993 60515012 60514996 -
ctgtctcaccagagggagaa

SEQ ID NO: 176364 - DNA, 20 bp, Artificial Sequence
  Synthetic oligonucleotide; GAG chr2 60514988 60515007 60514991 -
tcaccagagggagaacggct

SEQ ID NO: 176365 - DNA, 20 bp, Artificial Sequence
  Synthetic oligonucleotide; CGG chr2 60514983 60515002 60514986 -
agagggagaacggctgagtt

SEQ ID NO: 176366 - DNA, 20 bp, Artificial Sequence
  Synthetic oligonucleotide; AAG chr2 60514980 60514999 60514983 -
gggagaacggctgagttcgg

SEQ ID NO: 176367 - DNA, 20 bp, Artificial Sequence
  Synthetic oligonucleotide; AGG chr2 60514979 60514998 60514982 -
ggagaacggctgagttcgga

SEQ ID NO: 176368 - DNA, 20 bp, Artificial Sequence
  Synthetic oligonucleotide; GGG chr2 60514978 60514997 60514981 -
gagaacggctgagttcggaa

SEQ ID NO: 176369 - DNA, 20 bp, Artificial Sequence
  Synthetic oligonucleotide; TGG chr2 60514973 60514992 60514976 -
cggctgagttcggaagggac

SEQ ID NO: 176370 - DNA, 20 bp, Artificial Sequence
  Synthetic oligonucleotide; GGG chr2 60514972 60514991 60514975 -
ggctgagttcggaagggact

SEQ ID NO: 176371 - DNA, 20 bp, Artificial Sequence
  Synthetic oligonucleotide; GGG chr2 60514971 60514990 60514974 -
gctgagttcggaagggactg

SEQ ID NO: 176372 - DNA, 20 bp, Artificial Sequence
  Synthetic oligonucleotide; TGG chr2 60514956 60514975 60514959 -
gactggggcctgctttcctt

SEQ ID NO: 176373 - DNA, 20 bp, Artificial Sequence
  Synthetic oligonucleotide; GGG chr2 60514955 60514974 60514958 -
actggggcctgctttccttt

SEQ ID NO: 176374 - DNA, 20 bp, Artificial Sequence
  Synthetic oligonucleotide; TGG chr2 60514952 60514971 60514955 -
ggggcctgctttcctttggg

SEQ ID NO: 176375 - DNA, 20 bp, Artificial Sequence
  Synthetic oligonucleotide; TGG chr2 60514942 60514961 60514945 -
ttcctttgggtggctttgac

SEQ ID NO: 176376 - DNA, 20 bp, Artificial Sequence
  Synthetic oligonucleotide; TGG chr2 60514935 60514954 60514938 -
gggtggctttgactggctct

SEQ ID NO: 176377 - DNA, 20 bp, Artificial Sequence
  Synthetic oligonucleotide; GAG chr2 60514930 60514949 60514933 -
gctttgactggctcttggat

SEQ ID NO: 176378 - DNA, 20 bp, Artificial Sequence
  Synthetic oligonucleotide; AAG chr2 60514922 60514941 60514925 -
tggctcttggatgagtttaa

SEQ ID NO: 176379 - DNA, 20 bp, Artificial Sequence
  Synthetic oligonucleotide; AGG chr2 60514921 60514940 60514924 -
ggctcttggatgagtttaaa

SEQ ID NO: 176380 - DNA, 20 bp, Artificial Sequence
  Synthetic oligonucleotide; TAG chr2 60514861 60514880 60514864 -
tttttttcttttttctgttt

SEQ ID NO: 176381 - DNA, 20 bp, Artificial Sequence
  Synthetic oligonucleotide; AAG chr2 60514845 60514864 60514848 -
gttttagtgtatgtgtatgc

SEQ ID NO: 176382 - DNA, 20 bp, Artificial Sequence
  Synthetic oligonucleotide; GAG chr2 60514829 60514848 60514832 -
atgcaagacctttgatattt

SEQ ID NO: 176383 - DNA, 20 bp, Artificial Sequence
  Synthetic oligonucleotide; TAG chr2 60514826 60514845 60514829 -
caagacctttgatatttgag

SEQ ID NO: 176384 - DNA, 20 bp, Artificial Sequence
  Synthetic oligonucleotide; AGG chr2 60514825 60514844 60514828 -
aagacctttgatatttgagt

SEQ ID NO: 176385 - DNA, 20 bp, Artificial Sequence
  Synthetic oligonucleotide; GGG chr2 60514824 60514843 60514827 -
agacctttgatatttgagta

SEQ ID NO: 176386 - DNA, 20 bp, Artificial Sequence
  Synthetic oligonucleotide; TGG chr2 60514804 60514823 60514807 -
gggaaatcctctcttatcaa

SEQ ID NO: 176387 - DNA, 20 bp, Artificial Sequence
  Synthetic oligonucleotide; CAG chr2 60514795 60514814 60514798 -
tctcttatcaatggaattca

SEQ ID NO: 176388 - DNA, 20 bp, Artificial Sequence
  Synthetic oligonucleotide; TGG chr2 60514785 60514804 60514788 -
atggaattcacagcctctta

SEQ ID NO: 176389 - DNA, 20 bp, Artificial Sequence
  Synthetic oligonucleotide; AAG chr2 60514757 60514776 60514760 -
taccctttcattgtgttgta

SEQ ID NO: 176390 - DNA, 20 bp, Artificial Sequence
  Synthetic oligonucleotide; CAG chr2 60514753 60514772 60514756 -
ctttcattgtgttgtaaaga

SEQ ID NO: 176391 - DNA, 20 bp, Artificial Sequence
  Synthetic oligonucleotide; CAG chr2 60514749 60514768 60514752 -
cattgtgttgtaaagacagt

SEQ ID NO: 176392 - DNA, 20 bp, Artificial Sequence
  Synthetic oligonucleotide; TAG chr2 60514740 60514759 60514743 -
gtaaagacagtcagaccaac

SEQ ID NO: 176393 - DNA, 20 bp, Artificial Sequence
  Synthetic oligonucleotide; AAG chr2 60514707 60514726 60514710 -
acaactctgatttttttcct

SEQ ID NO: 176394 - DNA, 20 bp, Artificial Sequence
  Synthetic oligonucleotide; GAG chr2 60514668 60514687 60514671 -
tttaattttttttttttttt

SEQ ID NO: 176395 - DNA, 20 bp, Artificial Sequence
  Synthetic oligonucleotide; TGG chr2 60514664 60514683 60514667 -
atttttttttttttttgaga

SEQ ID NO: 176396 - DNA, 20 bp, Artificial Sequence
  Synthetic oligonucleotide; GAG chr2 60514662 60514681 60514665 -
ttttttttttttttgagatg

SEQ ID NO: 176397 - DNA, 20 bp, Artificial Sequence
  Synthetic oligonucleotide; CAG chr2 60514644 60514663 60514647 -
tggagtctcgctctgtcgcc

SEQ ID NO: 176398 - DNA, 20 bp, Artificial Sequence
  Synthetic oligonucleotide; AGG chr2 60514643 60514662 60514646 -
ggagtctcgctctgtcgccc

SEQ ID NO: 176399 - DNA, 20 bp, Artificial Sequence
  Synthetic oligonucleotide; TGG chr2 60514639 60514658 60514642 -
tctcgctctgtcgcccaggc

SEQ ID NO: 176400 - DNA, 20 bp, Artificial Sequence
  Synthetic oligonucleotide; GAG chr2 60514637 60514656 60514640 -
tcgctctgtcgcccaggctg

SEQ ID NO: 176401 - DNA, 20 bp, Artificial Sequence
  Synthetic oligonucleotide; CAG chr2 60514632 60514651 60514635 -
ctgtcgcccaggctggagtg

SEQ ID NO: 176402 - DNA, 20 bp, Artificial Sequence
  Synthetic oligonucleotide; CGG chr2 60514618 60514637 60514621 -
ggagtgcagtgctacgatct

SEQ ID NO: 176403 - DNA, 20 bp, Artificial Sequence
  Synthetic oligonucleotide; CAG chr2 60514608 60514627 60514611 -
gctacgatctcggctcattg

SEQ ID NO: 176404 - DNA, 20 bp, Artificial Sequence
  Synthetic oligonucleotide; CAG chr2 60514594 60514613 60514597 -
tcattgcagcctccgcctcc

SEQ ID NO: 176405 - DNA, 20 bp, Artificial Sequence
  Synthetic oligonucleotide; AGG chr2 60514593 60514612 60514596 -
cattgcagcctccgcctccc

SEQ ID NO: 176406 - DNA, 20 bp, Artificial Sequence
  Synthetic oligonucleotide; AAG chr2 60514587 60514606 60514590 -
agcctccgcctcccaggttc

SEQ ID NO: 176407 - DNA, 20 bp, Artificial Sequence
  Synthetic oligonucleotide; CAG chr2 60514570 60514589 60514573 -
ttcaagtgattctcctgcct

SEQ ID NO: 176408 - DNA, 20 bp, Artificial Sequence
  Synthetic oligonucleotide; AAG chr2 60514561 60514580 60514564 -
ttctcctgcctcagcctccc

SEQ ID NO: 176409 - DNA, 20 bp, Artificial Sequence
  Synthetic oligonucleotide; TAG chr2 60514558 60514577 60514561 -
tcctgcctcagcctcccaag

SEQ ID NO: 176410 - DNA, 20 bp, Artificial Sequence
  Synthetic oligonucleotide; TGG chr2 60514554 60514573 60514557 -
gcctcagcctcccaagtagc

SEQ ID NO: 176411 - DNA, 20 bp, Artificial Sequence
  Synthetic oligonucleotide; GGG chr2 60514553 60514572 60514556 -
cctcagcctcccaagtagct

SEQ ID NO: 176412 - DNA, 20 bp, Artificial Sequence
  Synthetic oligonucleotide; TAG chr2 60514546 60514565 60514549 -
ctcccaagtagctgggatta

SEQ ID NO: 176413 - DNA, 20 bp, Artificial Sequence
  Synthetic oligonucleotide; AGG chr2 60514545 60514564 60514548 -
tcccaagtagctgggattat

SEQ ID NO: 176414 - DNA, 20 bp, Artificial Sequence
  Synthetic oligonucleotide; TGG chr2 60514526 60514545 60514529 -
taggtgcatgccatcacacc

SEQ ID NO: 176415 - DNA, 20 bp, Artificial Sequence
  Synthetic oligonucleotide; AAG chr2 60514496 60514515 60514499 -
tttttttttttttttttttt

SEQ ID NO: 176416 - DNA, 20 bp, Artificial Sequence
  Synthetic oligonucleotide; TAG chr2 60514493 60514512 60514496 -
tttttttttttttttttaag

SEQ ID NO: 176417 - DNA, 20 bp, Artificial Sequence
  Synthetic oligonucleotide; GAG chr2 60514491 60514510 60514494 -
tttttttttttttttaagta

SEQ ID NO: 176418 - DNA, 20 bp, Artificial Sequence
  Synthetic oligonucleotide; TGG chr2 60514487 60514506 60514490 -
tttttttttttaagtagaga

SEQ ID NO: 176419 - DNA, 20 bp, Artificial Sequence
  Synthetic oligonucleotide; GGG chr2 60514486 60514505 60514489 -
ttttttttttaagtagagat

SEQ ID NO: 176420 - DNA, 20 bp, Artificial Sequence
  Synthetic oligonucleotide; GGG chr2 60514485 60514504 60514488 -
tttttttttaagtagagatg

SEQ ID NO: 176421 - DNA, 20 bp, Artificial Sequence
  Synthetic oligonucleotide; TGG chr2 60514471 60514490 60514474 -
gagatggggtttcaccatgt

SEQ ID NO: 176422 - DNA, 20 bp, Artificial Sequence
  Synthetic oligonucleotide; TAG chr2 60514467 60514486 60514470 -
tggggtttcaccatgttggc

SEQ ID NO: 176423 - DNA, 20 bp, Artificial Sequence
  Synthetic oligonucleotide; AGG chr2 60514466 60514485 60514469 -
ggggtttcaccatgttggct

SEQ ID NO: 176424 - DNA, 20 bp, Artificial Sequence
  Synthetic oligonucleotide; TGG chr2 60514462 60514481 60514465 -
tttcaccatgttggctaggc

SEQ ID NO: 176425 - DNA, 20 bp, Artificial Sequence
  Synthetic oligonucleotide; CAG chr2 60514442 60514461 60514445 -
tggtcttgaactcctgacct

SEQ ID NO: 176426 - DNA, 20 bp, Artificial Sequence
  Synthetic oligonucleotide; AGG chr2 60514441 60514460 60514444 -
ggtcttgaactcctgacctc

SEQ ID NO: 176427 - DNA, 20 bp, Artificial Sequence
  Synthetic oligonucleotide; CGG chr2 60514424 60514443 60514427 -
ctcaggtgacccacacgcct

SEQ ID NO: 176428 - DNA, 20 bp, Artificial Sequence
  Synthetic oligonucleotide; GAG chr2 60514407 60514426 60514410 -
cctcggcctcccaaaatgct

SEQ ID NO: 176429 - DNA, 20 bp, Artificial Sequence
  Synthetic oligonucleotide; CAG chr2 60514400 60514419 60514403 -
ctcccaaaatgctgagatta

SEQ ID NO: 176430 - DNA, 20 bp, Artificial Sequence
  Synthetic oligonucleotide; AGG chr2 60514399 60514418 60514402 -
tcccaaaatgctgagattac

SEQ ID NO: 176431 - DNA, 20 bp, Artificial Sequence
  Synthetic oligonucleotide; GAG chr2 60514393 60514412 60514396 -
aatgctgagattacaggtgt

SEQ ID NO: 176432 - DNA, 20 bp, Artificial Sequence
  Synthetic oligonucleotide; TGG chr2 60514380 60514399 60514383 -
caggtgtgagccaccgcacc

SEQ ID NO: 176433 - DNA, 20 bp, Artificial Sequence
  Synthetic oligonucleotide; CAG chr2 60514360 60514379 60514363 -
tggctatttaattctatttt

SEQ ID NO: 176434 - DNA, 20 bp, Artificial Sequence
  Synthetic oligonucleotide; TGG chr2 60514356 60514375 60514359 -
tatttaattctattttcaga

SEQ ID NO: 176435 - DNA, 20 bp, Artificial Sequence
  Synthetic oligonucleotide; AAG chr2 60514343 60514362 60514346 -
tttcagatggcttgttctcc

SEQ ID NO: 176436 - DNA, 20 bp, Artificial Sequence
  Synthetic oligonucleotide; TGG chr2 60514337 60514356 60514340 -
atggcttgttctccaagtct

SEQ ID NO: 176437 - DNA, 20 bp, Artificial Sequence
  Synthetic oligonucleotide; GGG chr2 60514336 60514355 60514339 -
tggcttgttctccaagtctt

SEQ ID NO: 176438 - DNA, 20 bp, Artificial Sequence
  Synthetic oligonucleotide; CAG chr2 60514327 60514346 60514330 -
ctccaagtcttgggactgcc

SEQ ID NO: 176439 - DNA, 20 bp, Artificial Sequence
  Synthetic oligonucleotide; TGG chr2 60514321 60514340 60514324 -
gtcttgggactgcccagaaa

SEQ ID NO: 176440 - DNA, 20 bp, Artificial Sequence
  Synthetic oligonucleotide; GGG chr2 60514320 60514339 60514323 -
tcttgggactgcccagaaat

SEQ ID NO: 176441 - DNA, 20 bp, Artificial Sequence
  Synthetic oligonucleotide; TGG chr2 60514312 60514331 60514315 -
ctgcccagaaatgggttgcc

SEQ ID NO: 176442 - DNA, 20 bp, Artificial Sequence
  Synthetic oligonucleotide; TAG chr2 60514309 60514328 60514312 -
cccagaaatgggttgcctgg

SEQ ID NO: 176443 - DNA, 20 bp, Artificial Sequence
  Synthetic oligonucleotide; AGG chr2 60514308 60514327 60514311 -
ccagaaatgggttgcctggt

SEQ ID NO: 176444 - DNA, 20 bp, Artificial Sequence
  Synthetic oligonucleotide; GGG chr2 60514307 60514326 60514310 -
cagaaatgggttgcctggta

SEQ ID NO: 176445 - DNA, 20 bp, Artificial Sequence
  Synthetic oligonucleotide; TGG chr2 60514300 60514319 60514303 -
gggttgcctggtagggctca

SEQ ID NO: 176446 - DNA, 20 bp, Artificial Sequence
  Synthetic oligonucleotide; CAG chr2 60514295 60514314 60514298 -
gcctggtagggctcatggct

SEQ ID NO: 176447 - DNA, 20 bp, Artificial Sequence
  Synthetic oligonucleotide; CAG chr2 60514278 60514297 60514281 -
gctcagcactgcgatcccac

SEQ ID NO: 176448 - DNA, 20 bp, Artificial Sequence
  Synthetic oligonucleotide; TGG chr2 60514275 60514294 60514278 -
cagcactgcgatcccaccag

SEQ ID NO: 176449 - DNA, 20 bp, Artificial Sequence
  Synthetic oligonucleotide; CGG chr2 60514271 60514290 60514274 -
actgcgatcccaccagtggc

SEQ ID NO: 176450 - DNA, 20 bp, Artificial Sequence
  Synthetic oligonucleotide; GGG chr2 60514270 60514289 60514273 -
ctgcgatcccaccagtggcc

SEQ ID NO: 176451 - DNA, 20 bp, Artificial Sequence
  Synthetic oligonucleotide; GGG chr2 60514269 60514288 60514272 -
tgcgatcccaccagtggccg

SEQ ID NO: 176452 - DNA, 20 bp, Artificial Sequence
  Synthetic oligonucleotide; TAG chr2 60514259 60514278 60514262 -
ccagtggccggggtgttcct

SEQ ID NO: 176453 - DNA, 20 bp, Artificial Sequence
  Synthetic oligonucleotide; TAG chr2 60514251 60514270 60514254 -
cggggtgttccttagccttc

SEQ ID NO: 176454 - DNA, 20 bp, Artificial Sequence
  Synthetic oligonucleotide; CAG chr2 60514246 60514265 60514249 -
tgttccttagccttctagtt

SEQ ID NO: 176455 - DNA, 20 bp, Artificial Sequence
  Synthetic oligonucleotide; TGG chr2 60514240 60514259 60514243 -
ttagccttctagttcagttg

SEQ ID NO: 176456 - DNA, 20 bp, Artificial Sequence
  Synthetic oligonucleotide; TGG chr2 60514231 60514250 60514234 -
tagttcagttgtggcccttc

SEQ ID NO: 176457 - DNA, 20 bp, Artificial Sequence
  Synthetic oligonucleotide; GGG chr2 60514230 60514249 60514233 -
agttcagttgtggcccttct

SEQ ID NO: 176458 - DNA, 20 bp, Artificial Sequence
  Synthetic oligonucleotide; CAG chr2 60514214 60514233 60514217 -
ttctgggcttcctttgctac

SEQ ID NO: 176459 - DNA, 20 bp, Artificial Sequence
  Synthetic oligonucleotide; TGG chr2 60514200 60514219 60514203 -
tgctaccagtttccaccaca

SEQ ID NO: 176460 - DNA, 20 bp, Artificial Sequence
  Synthetic oligonucleotide; TGG chr2 60514196 60514215 60514199 -
accagtttccaccacatggc

SEQ ID NO: 176461 - DNA, 20 bp, Artificial Sequence
  Synthetic oligonucleotide; GAG chr2 60514194 60514213 60514197 -
cagtttccaccacatggctg

SEQ ID NO: 176462 - DNA, 20 bp, Artificial Sequence
  Synthetic oligonucleotide; AGG chr2 60514193 60514212 60514196 -
agtttccaccacatggctgg

SEQ ID NO: 176463 - DNA, 20 bp, Artificial Sequence
  Synthetic oligonucleotide; TAG chr2 60514190 60514209 60514193 -
ttccaccacatggctggagg

SEQ ID NO: 176464 - DNA, 20 bp, Artificial Sequence
  Synthetic oligonucleotide; CAG chr2 60514185 60514204 60514188 -
ccacatggctggaggtagcc

SEQ ID NO: 176465 - DNA, 20 bp, Artificial Sequence
  Synthetic oligonucleotide; TGG chr2 60514180 60514199 60514183 -
tggctggaggtagcccagcc

SEQ ID NO: 176466 - DNA, 20 bp, Artificial Sequence
  Synthetic oligonucleotide; AAG chr2 60514177 60514196 60514180 -
ctggaggtagcccagcctgg

SEQ ID NO: 176467 - DNA, 20 bp, Artificial Sequence
  Synthetic oligonucleotide; CAG chr2 60514169 60514188 60514172 -
agcccagcctggaagcctct

SEQ ID NO: 176468 - DNA, 20 bp, Artificial Sequence
  Synthetic oligonucleotide; GAG chr2 60514167 60514186 60514170 -
cccagcctggaagcctctca

SEQ ID NO: 176469 - DNA, 20 bp, Artificial Sequence
  Synthetic oligonucleotide; CAG chr2 60514161 60514180 60514164 -
ctggaagcctctcagagctc

SEQ ID NO: 176470 - DNA, 20 bp, Artificial Sequence
  Synthetic oligonucleotide; TGG chr2 60514156 60514175 60514159 -
agcctctcagagctccagcc

SEQ ID NO: 176471 - DNA, 20 bp, Artificial Sequence
  Synthetic oligonucleotide; AAG chr2 60514153 60514172 60514156 -
ctctcagagctccagcctgg

SEQ ID NO: 176472 - DNA, 20 bp, Artificial Sequence
  Synthetic oligonucleotide; CAG chr2 60514145 60514164 60514148 -
gctccagcctggaagcctct

SEQ ID NO: 176473 - DNA, 20 bp, Artificial Sequence
  Synthetic oligonucleotide; GAG chr2 60514143 60514162 60514146 -
tccagcctggaagcctctca

SEQ ID NO: 176474 - DNA, 20 bp, Artificial Sequence
  Synthetic oligonucleotide; GAG chr2 60514141 60514160 60514144 -
cagcctggaagcctctcaga

SEQ ID NO: 176475 - DNA, 20 bp, Artificial Sequence
  Synthetic oligonucleotide; TGG chr2 60514134 60514153 60514137 -
gaagcctctcagagagtgct

SEQ ID NO: 176476 - DNA, 20 bp, Artificial Sequence
  Synthetic oligonucleotide; GAG chr2 60514132 60514151 60514135 -
agcctctcagagagtgcttg

SEQ ID NO: 176477 - DNA, 20 bp, Artificial Sequence
  Synthetic oligonucleotide; TAG chr2 60514123 60514142 60514126 -
gagagtgcttggagcactgc

SEQ ID NO: 176478 - DNA, 20 bp, Artificial Sequence
  Synthetic oligonucleotide; CAG chr2 60514107 60514126 60514110 -
ctgctagctgcacgtgctct

SEQ ID NO: 176479 - DNA, 20 bp, Artificial Sequence
  Synthetic oligonucleotide; AGG chr2 60514106 60514125 60514109 -
tgctagctgcacgtgctctc

SEQ ID NO: 176480 - DNA, 20 bp, Artificial Sequence
  Synthetic oligonucleotide; AAG chr2 60514102 60514121 60514105 -
agctgcacgtgctctcagga

SEQ ID NO: 176481 - DNA, 20 bp, Artificial Sequence
  Synthetic oligonucleotide; AAG chr2 60514094 60514113 60514097 -
gtgctctcaggaaagtccac

SEQ ID NO: 176482 - DNA, 20 bp, Artificial Sequence
  Synthetic oligonucleotide; AGG chr2 60514093 60514112 60514096 -
tgctctcaggaaagtccaca

SEQ ID NO: 176483 - DNA, 20 bp, Artificial Sequence
  Synthetic oligonucleotide; GAG chr2 60514091 60514110 60514094 -
ctctcaggaaagtccacaag

SEQ ID NO: 176484 - DNA, 20 bp, Artificial Sequence
  Synthetic oligonucleotide; TGG chr2 60514087 60514106 60514090 -
caggaaagtccacaaggaga

SEQ ID NO: 176485 - DNA, 20 bp, Artificial Sequence
  Synthetic oligonucleotide; TGG chr2 60514083 60514102 60514086 -
aaagtccacaaggagatggc

SEQ ID NO: 176486 - DNA, 20 bp, Artificial Sequence
  Synthetic oligonucleotide; TGG chr2 60514078 60514097 60514081 -
ccacaaggagatggctggtg

SEQ ID NO: 176487 - DNA, 20 bp, Artificial Sequence
  Synthetic oligonucleotide; CAG chr2 60514073 60514092 60514076 -
aggagatggctggtgtggct

SEQ ID NO: 176488 - DNA, 20 bp, Artificial Sequence
  Synthetic oligonucleotide; GAG chr2 60514071 60514090 60514074 -
gagatggctggtgtggctca

SEQ ID NO: 176489 - DNA, 20 bp, Artificial Sequence
  Synthetic oligonucleotide; CAG chr2 60514052 60514071 60514055 -
agagtccttgtgtgctgcct

SEQ ID NO: 176490 - DNA, 20 bp, Artificial Sequence
  Synthetic oligonucleotide; CAG chr2 60514042 60514061 60514045 -
tgtgctgcctcagcccatgc

SEQ ID NO: 176491 - DNA, 20 bp, Artificial Sequence
  Synthetic oligonucleotide; AGG chr2 60514041 60514060 60514044 -
gtgctgcctcagcccatgcc

SEQ ID NO: 176492 - DNA, 20 bp, Artificial Sequence
  Synthetic oligonucleotide; TGG chr2 60514031 60514050 60514034 -
agcccatgccaggccacctg

SEQ ID NO: 176493 - DNA, 20 bp, Artificial Sequence
  Synthetic oligonucleotide; AAG chr2 60514016 60514035 60514019 -
acctgtggctgtctgccctc

SEQ ID NO: 176494 - DNA, 20 bp, Artificial Sequence
  Synthetic oligonucleotide; GAG chr2 60514000 60514019 60514003 -
cctcaagtctgtccttctct

SEQ ID NO: 176495 - DNA, 20 bp, Artificial Sequence
  Synthetic oligonucleotide; AGG chr2 60513999 60514018 60514002 -
ctcaagtctgtccttctctg

SEQ ID NO: 176496 - DNA, 20 bp, Artificial Sequence
  Synthetic oligonucleotide; TAG chr2 60513993 60514012 60513996 -
tctgtccttctctgaggatt

SEQ ID NO: 176497 - DNA, 20 bp, Artificial Sequence
  Synthetic oligonucleotide; AGG chr2 60513992 60514011 60513995 -
ctgtccttctctgaggattt

SEQ ID NO: 176498 - DNA, 20 bp, Artificial Sequence
  Synthetic oligonucleotide; TAG chr2 60513979 60513998 60513982 -
aggatttaggactgtgaacc

SEQ ID NO: 176499 - DNA, 20 bp, Artificial Sequence
  Synthetic oligonucleotide; GAG chr2 60513977 60513996 60513980 -
gatttaggactgtgaaccta

SEQ ID NO: 176500 - DNA, 20 bp, Artificial Sequence
  Synthetic oligonucleotide; AAG chr2 60513968 60513987 60513971 -
ctgtgaacctagagaattca

SEQ ID NO: 176501 - DNA, 20 bp, Artificial Sequence
  Synthetic oligonucleotide; TAG chr2 60513965 60513984 60513968 -
tgaacctagagaattcaaag

SEQ ID NO: 176502 - DNA, 20 bp, Artificial Sequence
  Synthetic oligonucleotide; TGG chr2 60513962 60513981 60513965 -
acctagagaattcaaagtag

SEQ ID NO: 176503 - DNA, 20 bp, Artificial Sequence
  Synthetic oligonucleotide; TAG chr2 60513956 60513975 60513959 -
agaattcaaagtagtggaac

SEQ ID NO: 176504 - DNA, 20 bp, Artificial Sequence
  Synthetic oligonucleotide; CAG chr2 60513949 60513968 60513952 -
aaagtagtggaactagaatc

SEQ ID NO: 176505 - DNA, 20 bp, Artificial Sequence
  Synthetic oligonucleotide; AGG chr2 60513948 60513967 60513951 -
aagtagtggaactagaatcc

SEQ ID NO: 176506 - DNA, 20 bp, Artificial Sequence
  Synthetic oligonucleotide; CAG chr2 60513932 60513951 60513935 -
atccaggtctcgactcaatc

SEQ ID NO: 176507 - DNA, 20 bp, Artificial Sequence
  Synthetic oligonucleotide; AGG chr2 60513931 60513950 60513934 -
tccaggtctcgactcaatcc

SEQ ID NO: 176508 - DNA, 20 bp, Artificial Sequence
  Synthetic oligonucleotide; GGG chr2 60513930 60513949 60513933 -
ccaggtctcgactcaatcca

SEQ ID NO: 176509 - DNA, 20 bp, Artificial Sequence
  Synthetic oligonucleotide; GAG chr2 60513928 60513947 60513931 -
aggtctcgactcaatccagg

SEQ ID NO: 176510 - DNA, 20 bp, Artificial Sequence
  Synthetic oligonucleotide; AAG chr2 60513912 60513931 60513915 -
cagggagttttgctcaccac

SEQ ID NO: 176511 - DNA, 20 bp, Artificial Sequence
  Synthetic oligonucleotide; CAG chr2 60513908 60513927 60513911 -
gagttttgctcaccacaagc

SEQ ID NO: 176512 - DNA, 20 bp, Artificial Sequence
  Synthetic oligonucleotide; AGG chr2 60513907 60513926 60513910 -
agttttgctcaccacaagcc

SEQ ID NO: 176513 - DNA, 20 bp, Artificial Sequence
  Synthetic oligonucleotide; CAG chr2 60513902 60513921 60513905 -
tgctcaccacaagccaggaa

SEQ ID NO: 176514 - DNA, 20 bp, Artificial Sequence
  Synthetic oligonucleotide; TGG chr2 60513889 60513908 60513892 -
ccaggaacagcttctcttca

SEQ ID NO: 176515 - DNA, 20 bp, Artificial Sequence
  Synthetic oligonucleotide; GAG chr2 60513887 60513906 60513890 -
aggaacagcttctcttcatg

SEQ ID NO: 176516 - DNA, 20 bp, Artificial Sequence
  Synthetic oligonucleotide; AGG chr2 60513886 60513905 60513889 -
ggaacagcttctcttcatgg

SEQ ID NO: 176517 - DNA, 20 bp, Artificial Sequence
  Synthetic oligonucleotide; TGG chr2 60513875 60513894 60513878 -
tcttcatggaggtgcctgtc

SEQ ID NO: 176518 - DNA, 20 bp, Artificial Sequence
  Synthetic oligonucleotide; AAG chr2 60513872 60513891 60513875 -
tcatggaggtgcctgtctgg

SEQ ID NO: 176519 - DNA, 20 bp, Artificial Sequence
  Synthetic oligonucleotide; AGG chr2 60513871 60513890 60513874 -
catggaggtgcctgtctgga

SEQ ID NO: 176520 - DNA, 20 bp, Artificial Sequence
  Synthetic oligonucleotide; CAG chr2 60513868 60513887 60513871 -
ggaggtgcctgtctggaagg

SEQ ID NO: 176521 - DNA, 20 bp, Artificial Sequence
  Synthetic oligonucleotide; GAG chr2 60513866 60513885 60513869 -
aggtgcctgtctggaaggca

SEQ ID NO: 176522 - DNA, 20 bp, Artificial Sequence
  Synthetic oligonucleotide; TGG chr2 60513857 60513876 60513860 -
tctggaaggcagagaatctc

SEQ ID NO: 176523 - DNA, 20 bp, Artificial Sequence
  Synthetic oligonucleotide; GAG chr2 60513848 60513867 60513851 -
cagagaatctctggcttgtt

SEQ ID NO: 176524 - DNA, 20 bp, Artificial Sequence
  Synthetic oligonucleotide; AAG chr2 60513845 60513864 60513848 -
agaatctctggcttgttgag

SEQ ID NO: 176525 - DNA, 20 bp, Artificial Sequence
  Synthetic oligonucleotide; GAG chr2 60513843 60513862 60513846 -
aatctctggcttgttgagaa

SEQ ID NO: 176526 - DNA, 20 bp, Artificial Sequence
  Synthetic oligonucleotide; GAG chr2 60513841 60513860 60513844 -
tctctggcttgttgagaaga

SEQ ID NO: 176527 - DNA, 20 bp, Artificial Sequence
  Synthetic oligonucleotide; GAG chr2 60513839 60513858 60513842 -
tctggcttgttgagaagaga

SEQ ID NO: 176528 - DNA, 20 bp, Artificial Sequence
  Synthetic oligonucleotide; CAG chr2 60513827 60513846 60513830 -
agaagagagagtctgccctt

SEQ ID NO: 176529 - DNA, 20 bp, Artificial Sequence
  Synthetic oligonucleotide; AAG chr2 60513819 60513838 60513822 -
gagtctgcccttcagactgc

SEQ ID NO: 176530 - DNA, 20 bp, Artificial Sequence
  Synthetic oligonucleotide; AGG chr2 60513818 60513837 60513821 -
agtctgcccttcagactgca

SEQ ID NO: 176531 - DNA, 20 bp, Artificial Sequence
  Synthetic oligonucleotide; TAG chr2 60513804 60513823 60513807 -
actgcaaggtgttcactgca

SEQ ID NO: 176532 - DNA, 20 bp, Artificial Sequence
  Synthetic oligonucleotide; AGG chr2 60513803 60513822 60513806 -
ctgcaaggtgttcactgcat

SEQ ID NO: 176533 - DNA, 20 bp, Artificial Sequence
  Synthetic oligonucleotide; TAG chr2 60513792 60513811 60513795 -
tcactgcataggacccttcg

SEQ ID NO: 176534 - DNA, 20 bp, Artificial Sequence
  Synthetic oligonucleotide; AGG chr2 60513791 60513810 60513794 -
cactgcataggacccttcgt

SEQ ID NO: 176535 - DNA, 20 bp, Artificial Sequence
  Synthetic oligonucleotide; CAG chr2 60513780 60513799 60513783 -
acccttcgtaggtgctgacc

SEQ ID NO: 176536 - DNA, 20 bp, Artificial Sequence
  Synthetic oligonucleotide; CAG chr2 60513770 60513789 60513773 -
ggtgctgacccagctgtgcc

SEQ ID NO: 176537 - DNA, 20 bp, Artificial Sequence
  Synthetic oligonucleotide; TAG chr2 60513764 60513783 60513767 -
gacccagctgtgcccagtgc

SEQ ID NO: 176538 - DNA, 20 bp, Artificial Sequence
  Synthetic oligonucleotide; GAG chr2 60513762 60513781 60513765 -
cccagctgtgcccagtgcta

SEQ ID NO: 176539 - DNA, 20 bp, Artificial Sequence
  Synthetic oligonucleotide; TAG chr2 60513758 60513777 60513761 -
gctgtgcccagtgctagagc

SEQ ID NO: 176540 - DNA, 20 bp, Artificial Sequence
  Synthetic oligonucleotide; AGG chr2 60513757 60513776 60513760 -
ctgtgcccagtgctagagct

SEQ ID NO: 176541 - DNA, 20 bp, Artificial Sequence
  Synthetic oligonucleotide; CAG chr2 60513751 60513770 60513754 -
ccagtgctagagctaggact

SEQ ID NO: 176542 - DNA, 20 bp, Artificial Sequence
  Synthetic oligonucleotide; CAG chr2 60513737 60513756 60513740 -
aggactcagttctattttcc

SEQ ID NO: 176543 - DNA, 20 bp, Artificial Sequence
  Synthetic oligonucleotide; GAG chr2 60513735 60513754 60513738 -
gactcagttctattttccca

SEQ ID NO: 176544 - DNA, 20 bp, Artificial Sequence
  Synthetic oligonucleotide; GAG chr2 60513733 60513752 60513736 -
ctcagttctattttcccaga

SEQ ID NO: 176545 - DNA, 20 bp, Artificial Sequence
  Synthetic oligonucleotide; TGG chr2 60513730 60513749 60513733 -
agttctattttcccagagag

SEQ ID NO: 176546 - DNA, 20 bp, Artificial Sequence
  Synthetic oligonucleotide; TGG chr2 60513722 60513741 60513725 -
tttcccagagagtggtgtga

SEQ ID NO: 176547 - DNA, 20 bp, Artificial Sequence
  Synthetic oligonucleotide; GGG chr2 60513721 60513740 60513724 -
ttcccagagagtggtgtgat

SEQ ID NO: 176548 - DNA, 20 bp, Artificial Sequence
  Synthetic oligonucleotide; GAG chr2 60513719 60513738 60513722 -
cccagagagtggtgtgatgg

SEQ ID NO: 176549 - DNA, 20 bp, Artificial Sequence
  Synthetic oligonucleotide; AGG chr2 60513718 60513737 60513721 -
ccagagagtggtgtgatggg

SEQ ID NO: 176550 - DNA, 20 bp, Artificial Sequence
  Synthetic oligonucleotide; CAG chr2 60513696 60513715 60513699 -
gctatttctttttctttttt

SEQ ID NO: 176551 - DNA, 20 bp, Artificial Sequence
  Synthetic oligonucleotide; CAG chr2 60513686 60513705 60513689 -
tttcttttttcagtcctgat

SEQ ID NO: 176552 - DNA, 20 bp, Artificial Sequence
  Synthetic oligonucleotide; AGG chr2 60513685 60513704 60513688 -
ttcttttttcagtcctgatc

SEQ ID NO: 176553 - DNA, 20 bp, Artificial Sequence
  Synthetic oligonucleotide; GGG chr2 60513684 60513703 60513687 -
tcttttttcagtcctgatca

SEQ ID NO: 176554 - DNA, 20 bp, Artificial Sequence
  Synthetic oligonucleotide; GAG chr2 60513679 60513698 60513682 -
tttcagtcctgatcagggat

SEQ ID NO: 176555 - DNA, 20 bp, Artificial Sequence
  Synthetic oligonucleotide; TGG chr2 60513666 60513685 60513669 -
cagggatgagtccgtgctgt

SEQ ID NO: 176556 - DNA, 20 bp, Artificial Sequence
  Synthetic oligonucleotide; GGG chr2 60513665 60513684 60513668 -
agggatgagtccgtgctgtt

SEQ ID NO: 176557 - DNA, 20 bp, Artificial Sequence
  Synthetic oligonucleotide; TAG chr2 60513647 60513666 60513650 -
ttgggtttattcatttactt

SEQ ID NO: 176558 - DNA, 20 bp, Artificial Sequence
  Synthetic oligonucleotide; GAG chr2 60513639 60513658 60513642 -
attcatttactttagcgtgt

SEQ ID NO: 176559 - DNA, 20 bp, Artificial Sequence
  Synthetic oligonucleotide; TGG chr2 60513636 60513655 60513639 -
catttactttagcgtgtgag

SEQ ID NO: 176560 - DNA, 20 bp, Artificial Sequence
  Synthetic oligonucleotide; GGG chr2 60513635 60513654 60513638 -
atttactttagcgtgtgagt

SEQ ID NO: 176561 - DNA, 20 bp, Artificial Sequence
  Synthetic oligonucleotide; GGG chr2 60513634 60513653 60513637 -
tttactttagcgtgtgagtg

SEQ ID NO: 176562 - DNA, 20 bp, Artificial Sequence
  Synthetic oligonucleotide; GAG chr2 60513632 60513651 60513635 -
tactttagcgtgtgagtggg

SEQ ID NO: 176563 - DNA, 20 bp, Artificial Sequence
  Synthetic oligonucleotide; TGG chr2 60513628 60513647 60513631 -
ttagcgtgtgagtggggaga

SEQ ID NO: 176564 - DNA, 20 bp, Artificial Sequence
  Synthetic oligonucleotide; TAG chr2 60513623 60513642 60513626 -
gtgtgagtggggagatggat

SEQ ID NO: 176565 - DNA, 20 bp, Artificial Sequence
  Synthetic oligonucleotide; AGG chr2 60513622 60513641 60513625 -
tgtgagtggggagatggatt

SEQ ID NO: 176566 - DNA, 20 bp, Artificial Sequence
  Synthetic oligonucleotide; CAG chr2 60513619 60513638 60513622 -
gagtggggagatggattagg

SEQ ID NO: 176567 - DNA, 20 bp, Artificial Sequence
  Synthetic oligonucleotide; CAG chr2 60513616 60513635 60513619 -
tggggagatggattaggcag

SEQ ID NO: 176568 - DNA, 20 bp, Artificial Sequence
  Synthetic oligonucleotide; AGG chr2 60513615 60513634 60513618 -
ggggagatggattaggcagc

SEQ ID NO: 176569 - DNA, 20 bp, Artificial Sequence
  Synthetic oligonucleotide; TGG chr2 60513608 60513627 60513611 -
tggattaggcagcaggccct

SEQ ID NO: 176570 - DNA, 20 bp, Artificial Sequence
  Synthetic oligonucleotide; AAG chr2 60513605 60513624 60513608 -
attaggcagcaggcccttgg

SEQ ID NO: 176571 - DNA, 20 bp, Artificial Sequence
  Synthetic oligonucleotide; AGG chr2 60513604 60513623 60513607 -
ttaggcagcaggcccttgga

SEQ ID NO: 176572 - DNA, 20 bp, Artificial Sequence
  Synthetic oligonucleotide; GGG chr2 60513603 60513622 60513606 -
taggcagcaggcccttggaa

SEQ ID NO: 176573 - DNA, 20 bp, Artificial Sequence
  Synthetic oligonucleotide; TGG chr2 60513600 60513619 60513603 -
gcagcaggcccttggaaggg

SEQ ID NO: 176574 - DNA, 20 bp, Artificial Sequence
  Synthetic oligonucleotide; GGG chr2 60513599 60513618 60513602 -
cagcaggcccttggaagggt

SEQ ID NO: 176575 - DNA, 20 bp, Artificial Sequence
  Synthetic oligonucleotide; AAG chr2 60513596 60513615 60513599 -
caggcccttggaagggtggg

SEQ ID NO: 176576 - DNA, 20 bp, Artificial Sequence
  Synthetic oligonucleotide; CAG chr2 60513590 60513609 60513593 -
cttggaagggtgggaagatt

SEQ ID NO: 176577 - DNA, 20 bp, Artificial Sequence
  Synthetic oligonucleotide; AAG chr2 60513587 60513606 60513590 -
ggaagggtgggaagattcag

SEQ ID NO: 176578 - DNA, 20 bp, Artificial Sequence
  Synthetic oligonucleotide; GAG chr2 60513585 60513604 60513588 -
aagggtgggaagattcagaa

SEQ ID NO: 176579 - DNA, 20 bp, Artificial Sequence
  Synthetic oligonucleotide; GAG chr2 60513583 60513602 60513586 -
gggtgggaagattcagaaga

SEQ ID NO: 176580 - DNA, 20 bp, Artificial Sequence
  Synthetic oligonucleotide; GAG chr2 60513581 60513600 60513584 -
gtgggaagattcagaagaga

SEQ ID NO: 176581 - DNA, 20 bp, Artificial Sequence
  Synthetic oligonucleotide; AGG chr2 60513580 60513599 60513583 -
tgggaagattcagaagagag

SEQ ID NO: 176582 - DNA, 20 bp, Artificial Sequence
  Synthetic oligonucleotide; GGG chr2 60513579 60513598 60513582 -
gggaagattcagaagagaga

SEQ ID NO: 176583 - DNA, 20 bp, Artificial Sequence
  Synthetic oligonucleotide; CAG chr2 60513576 60513595 60513579 -
aagattcagaagagagaggg

SEQ ID NO: 176584 - DNA, 20 bp, Artificial Sequence
  Synthetic oligonucleotide; AGG chr2 60513575 60513594 60513578 -
agattcagaagagagagggc

SEQ ID NO: 176585 - DNA, 20 bp, Artificial Sequence
  Synthetic oligonucleotide; TGG chr2 60513570 60513589 60513573 -
cagaagagagagggcaggac

SEQ ID NO: 176586 - DNA, 20 bp, Artificial Sequence
  Synthetic oligonucleotide; GGG chr2 60513569 60513588 60513572 -
agaagagagagggcaggact

SEQ ID NO: 176587 - DNA, 20 bp, Artificial Sequence
  Synthetic oligonucleotide; AAG chr2 60513566 60513585 60513569 -
agagagagggcaggactggg

SEQ ID NO: 176588 - DNA, 20 bp, Artificial Sequence
  Synthetic oligonucleotide; CAG chr2 60513560 60513579 60513563 -
agggcaggactgggaagatc

SEQ ID NO: 176589 - DNA, 20 bp, Artificial Sequence
  Synthetic oligonucleotide; CAG chr2 60513556 60513575 60513559 -
caggactgggaagatccaga

SEQ ID NO: 176590 - DNA, 20 bp, Artificial Sequence
  Synthetic oligonucleotide; AGG chr2 60513555 60513574 60513558 -
aggactgggaagatccagac

SEQ ID NO: 176591 - DNA, 20 bp, Artificial Sequence
  Synthetic oligonucleotide; AAG chr2 60513547 60513566 60513550 -
gaagatccagacaggacatg

SEQ ID NO: 176592 - DNA, 20 bp, Artificial Sequence
  Synthetic oligonucleotide; AAG chr2 60513532 60513551 60513535 -
acatgaagatttgctccaca

SEQ ID NO: 176593 - DNA, 20 bp, Artificial Sequence
  Synthetic oligonucleotide; GAG chr2 60513530 60513549 60513533 -
atgaagatttgctccacaaa

SEQ ID NO: 176594 - DNA, 20 bp, Artificial Sequence
  Synthetic oligonucleotide; GAG chr2 60513528 60513547 60513531 -
gaagatttgctccacaaaga

SEQ ID NO: 176595 - DNA, 20 bp, Artificial Sequence
  Synthetic oligonucleotide; AAG chr2 60513525 60513544 60513528 -
gatttgctccacaaagagag

SEQ ID NO: 176596 - DNA, 20 bp, Artificial Sequence
  Synthetic oligonucleotide; CAG chr2 60513522 60513541 60513525 -
ttgctccacaaagagagaag

SEQ ID NO: 176597 - DNA, 20 bp, Artificial Sequence
  Synthetic oligonucleotide; CAG chr2 60513519 60513538 60513522 -
ctccacaaagagagaagcag

SEQ ID NO: 176598 - DNA, 20 bp, Artificial Sequence
  Synthetic oligonucleotide; AGG chr2 60513518 60513537 60513521 -
tccacaaagagagaagcagc

SEQ ID NO: 176599 - DNA, 20 bp, Artificial Sequence
  Synthetic oligonucleotide; GAG chr2 60513516 60513535 60513519 -
cacaaagagagaagcagcag

SEQ ID NO: 176600 - DNA, 20 bp, Artificial Sequence
  Synthetic oligonucleotide; TGG chr2 60513510 60513529 60513513 -
gagagaagcagcaggagttc

SEQ ID NO: 176601 - DNA, 20 bp, Artificial Sequence
  Synthetic oligonucleotide; TAG chr2 60513506 60513525 60513509 -
gaagcagcaggagttctggc

SEQ ID NO: 176602 - DNA, 20 bp, Artificial Sequence
  Synthetic oligonucleotide; GAG chr2 60513504 60513523 60513507 -
agcagcaggagttctggcta

SEQ ID NO: 176603 - DNA, 20 bp, Artificial Sequence
  Synthetic oligonucleotide; AGG chr2 60513503 60513522 60513506 -
gcagcaggagttctggctag

SEQ ID NO: 176604 - DNA, 20 bp, Artificial Sequence
  Synthetic oligonucleotide; AAG chr2 60513476 60513495 60513479 -
cccaacacccacacctgcca

SEQ ID NO: 176605 - DNA, 20 bp, Artificial Sequence
  Synthetic oligonucleotide; AGG chr2 60513475 60513494 60513478 -
ccaacacccacacctgccaa

SEQ ID NO: 176606 - DNA, 20 bp, Artificial Sequence
  Synthetic oligonucleotide; GGG chr2 60513474 60513493 60513477 -
caacacccacacctgccaaa

SEQ ID NO: 176607 - DNA, 20 bp, Artificial Sequence
  Synthetic oligonucleotide; GGG chr2 60513473 60513492 60513476 -
aacacccacacctgccaaag

SEQ ID NO: 176608 - DNA, 20 bp, Artificial Sequence
  Synthetic oligonucleotide; TGG chr2 60513464 60513483 60513467 -
acctgccaaaggggttccca

SEQ ID NO: 176609 - DNA, 20 bp, Artificial Sequence
  Synthetic oligonucleotide; GGG chr2 60513463 60513482 60513466 -
cctgccaaaggggttcccat

SEQ ID NO: 176610 - DNA, 20 bp, Artificial Sequence
  Synthetic oligonucleotide; GGG chr2 60513462 60513481 60513465 -
ctgccaaaggggttcccatg

SEQ ID NO: 176611 - DNA, 20 bp, Artificial Sequence
  Synthetic oligonucleotide; TGG chr2 60513459 60513478 60513462 -
ccaaaggggttcccatgggg

SEQ ID NO: 176612 - DNA, 20 bp, Artificial Sequence
  Synthetic oligonucleotide; TGG chr2 60513455 60513474 60513458 -
aggggttcccatggggtggc

SEQ ID NO: 176613 - DNA, 20 bp, Artificial Sequence
  Synthetic oligonucleotide; GAG chr2 60513449 60513468 60513452 -
tcccatggggtggctggctt

SEQ ID NO: 176614 - DNA, 20 bp, Artificial Sequence
  Synthetic oligonucleotide; AGG chr2 60513448 60513467 60513451 -
cccatggggtggctggcttg

SEQ ID NO: 176615 - DNA, 20 bp, Artificial Sequence
  Synthetic oligonucleotide; GGG chr2 60513447 60513466 60513450 -
ccatggggtggctggcttga

SEQ ID NO: 176616 - DNA, 20 bp, Artificial Sequence
  Synthetic oligonucleotide; GGG chr2 60513446 60513465 60513449 -
catggggtggctggcttgag

SEQ ID NO: 176617 - DNA, 20 bp, Artificial Sequence
  Synthetic oligonucleotide; TGG chr2 60513440 60513459 60513443 -
gtggctggcttgaggggatc

SEQ ID NO: 176618 - DNA, 20 bp, Artificial Sequence
  Synthetic oligonucleotide; GGG chr2 60513439 60513458 60513442 -
tggctggcttgaggggatct

SEQ ID NO: 176619 - DNA, 20 bp, Artificial Sequence
  Synthetic oligonucleotide; TGG chr2 60513433 60513452 60513436 -
gcttgaggggatctgggcgc

SEQ ID NO: 176620 - DNA, 20 bp, Artificial Sequence
  Synthetic oligonucleotide; TGG chr2 60513421 60513440 60513424 -
ctgggcgctggtttctgctg

SEQ ID NO: 176621 - DNA, 20 bp, Artificial Sequence
  Synthetic oligonucleotide; CAG chr2 60513417 60513436 60513420 -
gcgctggtttctgctgtgga

SEQ ID NO: 176622 - DNA, 20 bp, Artificial Sequence
  Synthetic oligonucleotide; AAG chr2 60513410 60513429 60513413 -
tttctgctgtggacagcctc

SEQ ID NO: 176623 - DNA, 20 bp, Artificial Sequence
  Synthetic oligonucleotide; TGG chr2 60513407 60513426 60513410 -
ctgctgtggacagcctcaag

SEQ ID NO: 176624 - DNA, 20 bp, Artificial Sequence
  Synthetic oligonucleotide; GGG chr2 60513406 60513425 60513409 -
tgctgtggacagcctcaagt

SEQ ID NO: 176625 - DNA, 20 bp, Artificial Sequence
  Synthetic oligonucleotide; GGG chr2 60513405 60513424 60513408 -
gctgtggacagcctcaagtg

SEQ ID NO: 176626 - DNA, 20 bp, Artificial Sequence
  Synthetic oligonucleotide; TGG chr2 60513400 60513419 60513403 -
ggacagcctcaagtggggcg

SEQ ID NO: 176627 - DNA, 20 bp, Artificial Sequence
  Synthetic oligonucleotide; GAG chr2 60513398 60513417 60513401 -
acagcctcaagtggggcgtg

SEQ ID NO: 176628 - DNA, 20 bp, Artificial Sequence
  Synthetic oligonucleotide; AGG chr2 60513397 60513416 60513400 -
cagcctcaagtggggcgtgg

SEQ ID NO: 176629 - DNA, 20 bp, Artificial Sequence
  Synthetic oligonucleotide; CAG chr2 60513394 60513413 60513397 -
cctcaagtggggcgtggagg

SEQ ID NO: 176630 - DNA, 20 bp, Artificial Sequence
  Synthetic oligonucleotide; CAG chr2 60513385 60513404 60513388 -
gggcgtggaggcagcatctc

SEQ ID NO: 176631 - DNA, 20 bp, Artificial Sequence
  Synthetic oligonucleotide; AAG chr2 60513382 60513401 60513385 -
cgtggaggcagcatctccag

SEQ ID NO: 176632 - DNA, 20 bp, Artificial Sequence
  Synthetic oligonucleotide; CGG chr2 60513375 60513394 60513378 -
gcagcatctccagaagcacc

SEQ ID NO: 176633 - DNA, 20 bp, Artificial Sequence
  Synthetic oligonucleotide; CAG chr2 60513372 60513391 60513375 -
gcatctccagaagcacccgg

SEQ ID NO: 176634 - DNA, 20 bp, Artificial Sequence
  Synthetic oligonucleotide; TGG chr2 60513368 60513387 60513371 -
ctccagaagcacccggcaga

SEQ ID NO: 176635 - DNA, 20 bp, Artificial Sequence
  Synthetic oligonucleotide; GAG chr2 60513360 60513379 60513363 -
gcacccggcagatggctcct

SEQ ID NO: 176636 - DNA, 20 bp, Artificial Sequence
  Synthetic oligonucleotide; AGG chr2 60513359 60513378 60513362 -
cacccggcagatggctcctg

SEQ ID NO: 176637 - DNA, 20 bp, Artificial Sequence
  Synthetic oligonucleotide; GGG chr2 60513358 60513377 60513361 -
acccggcagatggctcctga

SEQ ID NO: 176638 - DNA, 20 bp, Artificial Sequence
  Synthetic oligonucleotide; GAG chr2 60513356 60513375 60513359 -
ccggcagatggctcctgagg

SEQ ID NO: 176639 - DNA, 20 bp, Artificial Sequence
  Synthetic oligonucleotide; CAG chr2 60513353 60513372 60513356 -
gcagatggctcctgagggag

SEQ ID NO: 176640 - DNA, 20 bp, Artificial Sequence
  Synthetic oligonucleotide; AGG chr2 60513352 60513371 60513355 -
cagatggctcctgagggagc

SEQ ID NO: 176641 - DNA, 20 bp, Artificial Sequence
  Synthetic oligonucleotide; GGG chr2 60513351 60513370 60513354 -
agatggctcctgagggagca

SEQ ID NO: 176642 - DNA, 20 bp, Artificial Sequence
  Synthetic oligonucleotide; TAG chr2 60513340 60513359 60513343 -
gagggagcagggactccttc

SEQ ID NO: 176643 - DNA, 20 bp, Artificial Sequence
  Synthetic oligonucleotide; TGG chr2 60513328 60513347 60513331 -
actccttctagtgccactcc

SEQ ID NO: 176644 - DNA, 20 bp, Artificial Sequence
  Synthetic oligonucleotide; GGG chr2 60513327 60513346 60513330 -
ctccttctagtgccactcct

SEQ ID NO: 176645 - DNA, 20 bp, Artificial Sequence
  Synthetic oligonucleotide; TAG chr2 60513291 60513310 60513294 -
tcccctccttgtctcatatt

SEQ ID NO: 176646 - DNA, 20 bp, Artificial Sequence
  Synthetic oligonucleotide; TGG chr2 60513283 60513302 60513286 -
ttgtctcatatttagcatct

SEQ ID NO: 176647 - DNA, 20 bp, Artificial Sequence
  Synthetic oligonucleotide; GAG chr2 60513281 60513300 60513284 -
gtctcatatttagcatcttg

SEQ ID NO: 176648 - DNA, 20 bp, Artificial Sequence
  Synthetic oligonucleotide; CAG chr2 60513272 60513291 60513275 -
ttagcatcttggagccgtgt

SEQ ID NO: 176649 - DNA, 20 bp, Artificial Sequence
  Synthetic oligonucleotide; CAG chr2 60513266 60513285 60513269 -
tcttggagccgtgtcagctg

SEQ ID NO: 176650 - DNA, 20 bp, Artificial Sequence
  Synthetic oligonucleotide; GAG chr2 60513264 60513283 60513267 -
ttggagccgtgtcagctgca

SEQ ID NO: 176651 - DNA, 20 bp, Artificial Sequence
  Synthetic oligonucleotide; TGG chr2 60513259 60513278 60513262 -
gccgtgtcagctgcagagac

SEQ ID NO: 176652 - DNA, 20 bp, Artificial Sequence
  Synthetic oligonucleotide; GAG chr2 60513257 60513276 60513260 -
cgtgtcagctgcagagactg

SEQ ID NO: 176653 - DNA, 20 bp, Artificial Sequence
  Synthetic oligonucleotide; CGG chr2 60513252 60513271 60513255 -
cagctgcagagactggagtc

SEQ ID NO: 176654 - DNA, 20 bp, Artificial Sequence
  Synthetic oligonucleotide; GGG chr2 60513251 60513270 60513254 -
agctgcagagactggagtcc

SEQ ID NO: 176655 - DNA, 20 bp, Artificial Sequence
  Synthetic oligonucleotide; GGG chr2 60513250 60513269 60513253 -
gctgcagagactggagtccg

SEQ ID NO: 176656 - DNA, 20 bp, Artificial Sequence
  Synthetic oligonucleotide; TGG chr2 60513242 60513261 60513245 -
gactggagtccggggcatga

SEQ ID NO: 176657 - DNA, 20 bp, Artificial Sequence
  Synthetic oligonucleotide; GGG chr2 60513241 60513260 60513244 -
actggagtccggggcatgat

SEQ ID NO: 176658 - DNA, 20 bp, Artificial Sequence
  Synthetic oligonucleotide; GGG chr2 60513240 60513259 60513243 -
ctggagtccggggcatgatg

SEQ ID NO: 176659 - DNA, 20 bp, Artificial Sequence
  Synthetic oligonucleotide; TAG chr2 60513223 60513242 60513226 -
atggggatgtacctgaaacc

SEQ ID NO: 176660 - DNA, 20 bp, Artificial Sequence
  Synthetic oligonucleotide; GAG chr2 60513219 60513238 60513222 -
ggatgtacctgaaacctagt

SEQ ID NO: 176661 - DNA, 20 bp, Artificial Sequence
  Synthetic oligonucleotide; GAG chr2 60513217 60513236 60513220 -
atgtacctgaaacctagtga

SEQ ID NO: 176662 - DNA, 20 bp, Artificial Sequence
  Synthetic oligonucleotide; TGG chr2 60513202 60513221 60513205 -
agtgagagtcatcctgactc

SEQ ID NO: 176663 - DNA, 20 bp, Artificial Sequence
  Synthetic oligonucleotide; GGG chr2 60513201 60513220 60513204 -
gtgagagtcatcctgactct

SEQ ID NO: 176664 - DNA, 20 bp, Artificial Sequence
  Synthetic oligonucleotide; GGG chr2 60513200 60513219 60513203 -
tgagagtcatcctgactctg

SEQ ID NO: 176665 - DNA, 20 bp, Artificial Sequence
  Synthetic oligonucleotide; AAG chr2 60513197 60513216 60513200 -
gagtcatcctgactctgggg

SEQ ID NO: 176666 - DNA, 20 bp, Artificial Sequence
  Synthetic oligonucleotide; GAG chr2 60513195 60513214 60513198 -
gtcatcctgactctggggaa

SEQ ID NO: 176667 - DNA, 20 bp, Artificial Sequence
  Synthetic oligonucleotide; AAG chr2 60513185 60513204 60513188 -
ctctggggaagagccgctca

SEQ ID NO: 176668 - DNA, 20 bp, Artificial Sequence
  Synthetic oligonucleotide; GAG chr2 60513180 60513199 60513183 -
gggaagagccgctcaaagat

SEQ ID NO: 176669 - DNA, 20 bp, Artificial Sequence
  Synthetic oligonucleotide; AAG chr2 60513176 60513195 60513179 -
agagccgctcaaagatgaga

SEQ ID NO: 176670 - DNA, 20 bp, Artificial Sequence
  Synthetic oligonucleotide; AAG chr2 60513170 60513189 60513173 -
gctcaaagatgagaaagata

SEQ ID NO: 176671 - DNA, 20 bp, Artificial Sequence
  Synthetic oligonucleotide; CAG chr2 60513143 60513162 60513146 -
ttgccacccccaacccctca

SEQ ID NO: 176672 - DNA, 20 bp, Artificial Sequence
  Synthetic oligonucleotide; AGG chr2 60513142 60513161 60513145 -
tgccacccccaacccctcac

SEQ ID NO: 176673 - DNA, 20 bp, Artificial Sequence
  Synthetic oligonucleotide; TAG chr2 60513138 60513157 60513141 -
acccccaacccctcacaggc

SEQ ID NO: 176674 - DNA, 20 bp, Artificial Sequence
  Synthetic oligonucleotide; TGG chr2 60513127 60513146 60513130 -
ctcacaggctagactatcca

SEQ ID NO: 176675 - DNA, 20 bp, Artificial Sequence
  Synthetic oligonucleotide; CAG chr2 60513120 60513139 60513123 -
gctagactatccatggattt

SEQ ID NO: 176676 - DNA, 20 bp, Artificial Sequence
  Synthetic oligonucleotide; TGG chr2 60513117 60513136 60513120 -
agactatccatggatttcag

SEQ ID NO: 176677 - DNA, 20 bp, Artificial Sequence
  Synthetic oligonucleotide; GGG chr2 60513116 60513135 60513119 -
gactatccatggatttcagt

SEQ ID NO: 176678 - DNA, 20 bp, Artificial Sequence
  Synthetic oligonucleotide; GGG chr2 60513115 60513134 60513118 -
actatccatggatttcagtg

SEQ ID NO: 176679 - DNA, 20 bp, Artificial Sequence
  Synthetic oligonucleotide; TGG chr2 60513112 60513131 60513115 -
atccatggatttcagtgggg

SEQ ID NO: 176680 - DNA, 20 bp, Artificial Sequence
  Synthetic oligonucleotide; GAG chr2 60513108 60513127 60513111 -
atggatttcagtggggtggt

SEQ ID NO: 176681 - DNA, 20 bp, Artificial Sequence
  Synthetic oligonucleotide; TGG chr2 60513076 60513095 60513079 -
tccctgaacctctcctcaaa

SEQ ID NO: 176682 - DNA, 20 bp, Artificial Sequence
  Synthetic oligonucleotide; TGG chr2 60513064 60513083 60513067 -
tcctcaaatggtgactgttc

SEQ ID NO: 176683 - DNA, 20 bp, Artificial Sequence
  Synthetic oligonucleotide; GGG chr2 60513063 60513082 60513066 -
cctcaaatggtgactgttct

SEQ ID NO: 176684 - DNA, 20 bp, Artificial Sequence
  Synthetic oligonucleotide; GGG chr2 60513062 60513081 60513065 -
ctcaaatggtgactgttctg

SEQ ID NO: 176685 - DNA, 20 bp, Artificial Sequence
  Synthetic oligonucleotide; GGG chr2 60513061 60513080 60513064 -
tcaaatggtgactgttctgg

SEQ ID NO: 176686 - DNA, 20 bp, Artificial Sequence
  Synthetic oligonucleotide; CAG chr2 60513040 60513059 60513043 -
ggtcctttctctgcctttct

SEQ ID NO: 176687 - DNA, 20 bp, Artificial Sequence
  Synthetic oligonucleotide; AGG chr2 60513039 60513058 60513042 -
gtcctttctctgcctttctc

SEQ ID NO: 176688 - DNA, 20 bp, Artificial Sequence
  Synthetic oligonucleotide; GGG chr2 60513038 60513057 60513041 -
tcctttctctgcctttctca

SEQ ID NO: 176689 - DNA, 20 bp, Artificial Sequence
  Synthetic oligonucleotide; GGG chr2 60513037 60513056 60513040 -
cctttctctgcctttctcag

SEQ ID NO: 176690 - DNA, 20 bp, Artificial Sequence
  Synthetic oligonucleotide; GGG chr2 60513036 60513055 60513039 -
ctttctctgcctttctcagg

SEQ ID NO: 176691 - DNA, 20 bp, Artificial Sequence
  Synthetic oligonucleotide; CAG chr2 60513029 60513048 60513032 -
tgcctttctcagggggtaac

SEQ ID NO: 176692 - DNA, 20 bp, Artificial Sequence
  Synthetic oligonucleotide; GAG chr2 60513027 60513046 60513030 -
cctttctcagggggtaacca

SEQ ID NO: 176693 - DNA, 20 bp, Artificial Sequence
  Synthetic oligonucleotide; AGG chr2 60513026 60513045 60513029 -
ctttctcagggggtaaccag

SEQ ID NO: 176694 - DNA, 20 bp, Artificial Sequence
  Synthetic oligonucleotide; TGG chr2 60513023 60513042 60513026 -
tctcagggggtaaccagagg

SEQ ID NO: 176695 - DNA, 20 bp, Artificial Sequence
  Synthetic oligonucleotide; TGG chr2 60513020 60513039 60513023 -
cagggggtaaccagaggtgg

SEQ ID NO: 176696 - DNA, 20 bp, Artificial Sequence
  Synthetic oligonucleotide; TGG chr2 60513015 60513034 60513018 -
ggtaaccagaggtggtggtg

SEQ ID NO: 176697 - DNA, 20 bp, Artificial Sequence
  Synthetic oligonucleotide; CAG chr2 60512997 60513016 60513000 -
tgtggtccactgtgactcgt

SEQ ID NO: 176698 - DNA, 20 bp, Artificial Sequence
  Synthetic oligonucleotide; GAG chr2 60512970 60512989 60512973 -
tgctctgtgtgttcattttt

SEQ ID NO: 176699 - DNA, 20 bp, Artificial Sequence
  Synthetic oligonucleotide; GAG chr2 60512952 60512971 60512955 -
ttgagaaaatgttaatctct

SEQ ID NO: 176700 - DNA, 20 bp, Artificial Sequence
  Synthetic oligonucleotide; AAG chr2 60512943 60512962 60512946 -
tgttaatctctgagacgtct

SEQ ID NO: 176701 - DNA, 20 bp, Artificial Sequence
  Synthetic oligonucleotide; GAG chr2 60512941 60512960 60512944 -
ttaatctctgagacgtctaa

SEQ ID NO: 176702 - DNA, 20 bp, Artificial Sequence
  Synthetic oligonucleotide; AGG chr2 60512940 60512959 60512943 -
taatctctgagacgtctaag

SEQ ID NO: 176703 - DNA, 20 bp, Artificial Sequence
  Synthetic oligonucleotide; TGG chr2 60512907 60512926 60512910 -
ttctctgtgtctcctccaaa

SEQ ID NO: 176704 - DNA, 20 bp, Artificial Sequence
  Synthetic oligonucleotide; TGG chr2 60512896 60512915 60512899 -
tcctccaaatggatgccatg

SEQ ID NO: 176705 - DNA, 20 bp, Artificial Sequence
  Synthetic oligonucleotide; GGG chr2 60512895 60512914 60512898 -
cctccaaatggatgccatgt

SEQ ID NO: 176706 - DNA, 20 bp, Artificial Sequence
  Synthetic oligonucleotide; TGG chr2 60512892 60512911 60512895 -
ccaaatggatgccatgtggg

SEQ ID NO: 176707 - DNA, 20 bp, Artificial Sequence
  Synthetic oligonucleotide; GGG chr2 60512891 60512910 60512894 -
caaatggatgccatgtgggt

SEQ ID NO: 176708 - DNA, 20 bp, Artificial Sequence
  Synthetic oligonucleotide; AAG chr2 60512886 60512905 60512889 -
ggatgccatgtgggtgggca

SEQ ID NO: 176709 - DNA, 20 bp, Artificial Sequence
  Synthetic oligonucleotide; TGG chr2 60512883 60512902 60512886 -
tgccatgtgggtgggcaaag

SEQ ID NO: 176710 - DNA, 20 bp, Artificial Sequence
  Synthetic oligonucleotide; TGG chr2 60512879 60512898 60512882 -
atgtgggtgggcaaagtggt

SEQ ID NO: 176711 - DNA, 20 bp, Artificial Sequence
  Synthetic oligonucleotide; GGG chr2 60512878 60512897 60512881 -
tgtgggtgggcaaagtggtt

SEQ ID NO: 176712 - DNA, 20 bp, Artificial Sequence
  Synthetic oligonucleotide; TAG chr2 60512860 60512879 60512863 -
ttgggtttattcatttactt

SEQ ID NO: 176713 - DNA, 20 bp, Artificial Sequence
  Synthetic oligonucleotide; AGG chr2 60512859 60512878 60512862 -
tgggtttattcatttacttt

SEQ ID NO: 176714 - DNA, 20 bp, Artificial Sequence
  Synthetic oligonucleotide; TAG chr2 60512847 60512866 60512850 -
tttactttaggtgtgtattg

SEQ ID NO: 176715 - DNA, 20 bp, Artificial Sequence
  Synthetic oligonucleotide; CAG chr2 60512815 60512834 60512818 -
cttgttctcctatccgtcat

SEQ ID NO: 176716 - DNA, 20 bp, Artificial Sequence
  Synthetic oligonucleotide; GAG chr2 60512813 60512832 60512816 -
tgttctcctatccgtcatca

SEQ ID NO: 176717 - DNA, 20 bp, Artificial Sequence
  Synthetic oligonucleotide; AGG chr2 60512812 60512831 60512815 -
gttctcctatccgtcatcag

SEQ ID NO: 176718 - DNA, 20 bp, Artificial Sequence
  Synthetic oligonucleotide; GAG chr2 60512797 60512816 60512800 -
atcagaggtgactcatactt

SEQ ID NO: 176719 - DNA, 20 bp, Artificial Sequence
  Synthetic oligonucleotide; AAG chr2 60512787 60512806 60512790 -
actcatacttgagacactaa

SEQ ID NO: 176720 - DNA, 20 bp, Artificial Sequence
  Synthetic oligonucleotide; GAG chr2 60512785 60512804 60512788 -
tcatacttgagacactaaaa

SEQ ID NO: 176721 - DNA, 20 bp, Artificial Sequence
  Synthetic oligonucleotide; AAG chr2 60512766 60512785 60512769 -
agagaataaactgtcttcat

SEQ ID NO: 176722 - DNA, 20 bp, Artificial Sequence
  Synthetic oligonucleotide; AGG chr2 60512765 60512784 60512768 -
gagaataaactgtcttcata

SEQ ID NO: 176723 - DNA, 20 bp, Artificial Sequence
  Synthetic oligonucleotide; CAG chr2 60512749 60512768 60512752 -
cataaggctgtgaacgtcgc

SEQ ID NO: 176724 - DNA, 20 bp, Artificial Sequence
  Synthetic oligonucleotide; AAG chr2 60512730 60512749 60512733 -
ccagattatgaaccaacttc

SEQ ID NO: 176725 - DNA, 20 bp, Artificial Sequence
  Synthetic oligonucleotide; TAG chr2 60512722 60512741 60512725 -
tgaaccaacttcaagtaacg

SEQ ID NO: 176726 - DNA, 20 bp, Artificial Sequence
  Synthetic oligonucleotide; AGG chr2 60512721 60512740 60512724 -
gaaccaacttcaagtaacgt

SEQ ID NO: 176727 - DNA, 20 bp, Artificial Sequence
  Synthetic oligonucleotide; GGG chr2 60512720 60512739 60512723 -
aaccaacttcaagtaacgta

SEQ ID NO: 176728 - DNA, 20 bp, Artificial Sequence
  Synthetic oligonucleotide; TAG chr2 60512680 60512699 60512683 -
ttattgaaaccatctccaat

SEQ ID NO: 176729 - DNA, 20 bp, Artificial Sequence
  Synthetic oligonucleotide; TGG chr2 60512667 60512686 60512670 -
ctccaattagatatgcaaaa

SEQ ID NO: 176730 - DNA, 20 bp, Artificial Sequence
  Synthetic oligonucleotide; GAG chr2 60512665 60512684 60512668 -
ccaattagatatgcaaaatg

SEQ ID NO: 176731 - DNA, 20 bp, Artificial Sequence
  Synthetic oligonucleotide; TGG chr2 60512658 60512677 60512661 -
gatatgcaaaatggagttgc

SEQ ID NO: 176732 - DNA, 20 bp, Artificial Sequence
  Synthetic oligonucleotide; GGG chr2 60512657 60512676 60512660 -
atatgcaaaatggagttgct

SEQ ID NO: 176733 - DNA, 20 bp, Artificial Sequence
  Synthetic oligonucleotide; GGG chr2 60512656 60512675 60512659 -
tatgcaaaatggagttgctg

SEQ ID NO: 176734 - DNA, 20 bp, Artificial Sequence
  Synthetic oligonucleotide; GGG chr2 60512655 60512674 60512658 -
atgcaaaatggagttgctgg

SEQ ID NO: 176735 - DNA, 20 bp, Artificial Sequence
  Synthetic oligonucleotide; CAG chr2 60512649 60512668 60512652 -
aatggagttgctgggggctt

SEQ ID NO: 176736 - DNA, 20 bp, Artificial Sequence
  Synthetic oligonucleotide; TAG chr2 60512639 60512658 60512642 -
ctgggggcttcagttttctt

SEQ ID NO: 176737 - DNA, 20 bp, Artificial Sequence
  Synthetic oligonucleotide; TAG chr2 60512625 60512644 60512628 -
tttctttagaccaaataatt

SEQ ID NO: 176738 - DNA, 20 bp, Artificial Sequence
  Synthetic oligonucleotide; GAG chr2 60512623 60512642 60512626 -
tctttagaccaaataattta

SEQ ID NO: 176739 - DNA, 20 bp, Artificial Sequence
  Synthetic oligonucleotide; GAG chr2 60512618 60512637 60512621 -
agaccaaataatttagagct

SEQ ID NO: 176740 - DNA, 20 bp, Artificial Sequence
  Synthetic oligonucleotide; GAG chr2 60512616 60512635 60512619 -
accaaataatttagagctga

SEQ ID NO: 176741 - DNA, 20 bp, Artificial Sequence
  Synthetic oligonucleotide; AGG chr2 60512615 60512634 60512618 -
ccaaataatttagagctgag

SEQ ID NO: 176742 - DNA, 20 bp, Artificial Sequence
  Synthetic oligonucleotide; GAG chr2 60512613 60512632 60512616 -
aaataatttagagctgagag

SEQ ID NO: 176743 - DNA, 20 bp, Artificial Sequence
  Synthetic oligonucleotide; GAG chr2 60512611 60512630 60512614 -
ataatttagagctgagagga

SEQ ID NO: 176744 - DNA, 20 bp, Artificial Sequence
  Synthetic oligonucleotide; AGG chr2 60512610 60512629 60512613 -
taatttagagctgagaggag

SEQ ID NO: 176745 - DNA, 20 bp, Artificial Sequence
  Synthetic oligonucleotide; CAG chr2 60512607 60512626 60512610 -
tttagagctgagaggagagg

SEQ ID NO: 176746 - DNA, 20 bp, Artificial Sequence
  Synthetic oligonucleotide; TAG chr2 60512596 60512615 60512599 -
gaggagaggcagataccatc

SEQ ID NO: 176747 - DNA, 20 bp, Artificial Sequence
  Synthetic oligonucleotide; TAG chr2 60512576 60512595 60512579 -
tagtctcactttttacaatt

SEQ ID NO: 176748 - DNA, 20 bp, Artificial Sequence
  Synthetic oligonucleotide; TGG chr2 60512570 60512589 60512573 -
cactttttacaatttagcat

SEQ ID NO: 176749 - DNA, 20 bp, Artificial Sequence
  Synthetic oligonucleotide; GAG chr2 60512560 60512579 60512563 -
aatttagcattggatttgtt

SEQ ID NO: 176750 - DNA, 20 bp, Artificial Sequence
  Synthetic oligonucleotide; CAG chr2 60512544 60512563 60512547 -
tgttgagcatgtactctctg

SEQ ID NO: 176751 - DNA, 20 bp, Artificial Sequence
  Synthetic oligonucleotide; GAG chr2 60512542 60512561 60512545 -
ttgagcatgtactctctgca

SEQ ID NO: 176752 - DNA, 20 bp, Artificial Sequence
  Synthetic oligonucleotide; TAG chr2 60512531 60512550 60512534 -
ctctctgcagagcattgtga

SEQ ID NO: 176753 - DNA, 20 bp, Artificial Sequence
  Synthetic oligonucleotide; AGG chr2 60512530 60512549 60512533 -
tctctgcagagcattgtgat

SEQ ID NO: 176754 - DNA, 20 bp, Artificial Sequence
  Synthetic oligonucleotide; TGG chr2 60512524 60512543 60512527 -
cagagcattgtgataggttc

SEQ ID NO: 176755 - DNA, 20 bp, Artificial Sequence
  Synthetic oligonucleotide; GGG chr2 60512523 60512542 60512526 -
agagcattgtgataggttct

SEQ ID NO: 176756 - DNA, 20 bp, Artificial Sequence
  Synthetic oligonucleotide; TGG chr2 60512519 60512538 60512522 -
cattgtgataggttctgggt

SEQ ID NO: 176757 - DNA, 20 bp, Artificial Sequence
  Synthetic oligonucleotide; GGG chr2 60512518 60512537 60512521 -
attgtgataggttctgggtt

SEQ ID NO: 176758 - DNA, 20 bp, Artificial Sequence
  Synthetic oligonucleotide; GAG chr2 60512516 60512535 60512519 -
tgtgataggttctgggttgg

SEQ ID NO: 176759 - DNA, 20 bp, Artificial Sequence
  Synthetic oligonucleotide; AGG chr2 60512515 60512534 60512518 -
gtgataggttctgggttggg

SEQ ID NO: 176760 - DNA, 20 bp, Artificial Sequence
  Synthetic oligonucleotide; GGG chr2 60512514 60512533 60512517 -
tgataggttctgggttggga

SEQ ID NO: 176761 - DNA, 20 bp, Artificial Sequence
  Synthetic oligonucleotide; GGG chr2 60512513 60512532 60512516 -
gataggttctgggttgggag

SEQ ID NO: 176762 - DNA, 20 bp, Artificial Sequence
  Synthetic oligonucleotide; GAG chr2 60512511 60512530 60512514 -
taggttctgggttgggaggg

SEQ ID NO: 176763 - DNA, 20 bp, Artificial Sequence
  Synthetic oligonucleotide; CGG chr2 60512507 60512526 60512510 -
ttctgggttgggaggggagc

SEQ ID NO: 176764 - DNA, 20 bp, Artificial Sequence
  Synthetic oligonucleotide; GGG chr2 60512506 60512525 60512509 -
tctgggttgggaggggagcc

SEQ ID NO: 176765 - DNA, 20 bp, Artificial Sequence
  Synthetic oligonucleotide; AAG chr2 60512503 60512522 60512506 -
gggttgggaggggagccggg

SEQ ID NO: 176766 - DNA, 20 bp, Artificial Sequence
  Synthetic oligonucleotide; AGG chr2 60512502 60512521 60512505 -
ggttgggaggggagccggga

SEQ ID NO: 176767 - DNA, 20 bp, Artificial Sequence
  Synthetic oligonucleotide; AAG chr2 60512498 60512517 60512501 -
gggaggggagccgggaaggc

SEQ ID NO: 176768 - DNA, 20 bp, Artificial Sequence
  Synthetic oligonucleotide; AAG chr2 60512483 60512502 60512486 -
aaggcaagcatcctctctca

SEQ ID NO: 176769 - DNA, 20 bp, Artificial Sequence
  Synthetic oligonucleotide; GAG chr2 60512465 60512484 60512468 -
caaagctgcctttctcattt

SEQ ID NO: 176770 - DNA, 20 bp, Artificial Sequence
  Synthetic oligonucleotide; GAG chr2 60512463 60512482 60512466 -
aagctgcctttctcatttga

SEQ ID NO: 176771 - DNA, 20 bp, Artificial Sequence
  Synthetic oligonucleotide; AGG chr2 60512462 60512481 60512465 -
agctgcctttctcatttgag

SEQ ID NO: 176772 - DNA, 20 bp, Artificial Sequence
  Synthetic oligonucleotide; GAG chr2 60512458 60512477 60512461 -
gcctttctcatttgagaggc

SEQ ID NO: 176773 - DNA, 20 bp, Artificial Sequence
  Synthetic oligonucleotide; TGG chr2 60512449 60512468 60512452 -
atttgagaggcgagtgtgtg

SEQ ID NO: 176774 - DNA, 20 bp, Artificial Sequence
  Synthetic oligonucleotide; CAG chr2 60512444 60512463 60512447 -
agaggcgagtgtgtgtggca

SEQ ID NO: 176775 - DNA, 20 bp, Artificial Sequence
  Synthetic oligonucleotide; AGG chr2 60512443 60512462 60512446 -
gaggcgagtgtgtgtggcac

SEQ ID NO: 176776 - DNA, 20 bp, Artificial Sequence
  Synthetic oligonucleotide; GGG chr2 60512442 60512461 60512445 -
aggcgagtgtgtgtggcaca

SEQ ID NO: 176777 - DNA, 20 bp, Artificial Sequence
  Synthetic oligonucleotide; GGG chr2 60512441 60512460 60512444 -
ggcgagtgtgtgtggcacag

SEQ ID NO: 176778 - DNA, 20 bp, Artificial Sequence
  Synthetic oligonucleotide; CAG chr2 60512438 60512457 60512441 -
gagtgtgtgtggcacagggg

SEQ ID NO: 176779 - DNA, 20 bp, Artificial Sequence
  Synthetic oligonucleotide; AGG chr2 60512437 60512456 60512440 -
agtgtgtgtggcacaggggc

SEQ ID NO: 176780 - DNA, 20 bp, Artificial Sequence
  Synthetic oligonucleotide; TAG chr2 60512434 60512453 60512437 -
gtgtgtggcacaggggcagg

SEQ ID NO: 176781 - DNA, 20 bp, Artificial Sequence
  Synthetic oligonucleotide; AAG chr2 60512431 60512450 60512434 -
tgtggcacaggggcaggtag

SEQ ID NO: 176782 - DNA, 20 bp, Artificial Sequence
  Synthetic oligonucleotide; AGG chr2 60512430 60512449 60512433 -
gtggcacaggggcaggtaga

SEQ ID NO: 176783 - DNA, 20 bp, Artificial Sequence
  Synthetic oligonucleotide; GAG chr2 60512428 60512447 60512431 -
ggcacaggggcaggtagaag

SEQ ID NO: 176784 - DNA, 20 bp, Artificial Sequence
  Synthetic oligonucleotide; CAG chr2 60512424 60512443 60512427 -
caggggcaggtagaaggaga

SEQ ID NO: 176785 - DNA, 20 bp, Artificial Sequence
  Synthetic oligonucleotide; GAG chr2 60512408 60512427 60512411 -
gagacagatcctttatacct

SEQ ID NO: 176786 - DNA, 20 bp, Artificial Sequence
  Synthetic oligonucleotide; GAG chr2 60512406 60512425 60512409 -
gacagatcctttatacctga

SEQ ID NO: 176787 - DNA, 20 bp, Artificial Sequence
  Synthetic oligonucleotide; AAG chr2 60512402 60512421 60512405 -
gatcctttatacctgagagc

SEQ ID NO: 176788 - DNA, 20 bp, Artificial Sequence
  Synthetic oligonucleotide; CAG chr2 60512394 60512413 60512397 -
atacctgagagcaagatgtg

SEQ ID NO: 176789 - DNA, 20 bp, Artificial Sequence
  Synthetic oligonucleotide; CAG chr2 60512390 60512409 60512393 -
ctgagagcaagatgtgcagc

SEQ ID NO: 176790 - DNA, 20 bp, Artificial Sequence
  Synthetic oligonucleotide; AGG chr2 60512389 60512408 60512392 -
tgagagcaagatgtgcagcc

SEQ ID NO: 176791 - DNA, 20 bp, Artificial Sequence
  Synthetic oligonucleotide; AAG chr2 60512385 60512404 60512388 -
agcaagatgtgcagccagga

SEQ ID NO: 176792 - DNA, 20 bp, Artificial Sequence
  Synthetic oligonucleotide; AAG chr2 60512379 60512398 60512382 -
atgtgcagccaggaaagctc

SEQ ID NO: 176793 - DNA, 20 bp, Artificial Sequence
  Synthetic oligonucleotide; AGG chr2 60512378 60512397 60512381 -
tgtgcagccaggaaagctca

SEQ ID NO: 176794 - DNA, 20 bp, Artificial Sequence
  Synthetic oligonucleotide; CAG chr2 60512372 60512391 60512375 -
gccaggaaagctcaaggaca

SEQ ID NO: 176795 - DNA, 20 bp, Artificial Sequence
  Synthetic oligonucleotide; AGG chr2 60512371 60512390 60512374 -
ccaggaaagctcaaggacac

SEQ ID NO: 176796 - DNA, 20 bp, Artificial Sequence
  Synthetic oligonucleotide; AAG chr2 60512366 60512385 60512369 -
aaagctcaaggacacaggcc

SEQ ID NO: 176797 - DNA, 20 bp, Artificial Sequence
  Synthetic oligonucleotide; AGG chr2 60512365 60512384 60512368 -
aagctcaaggacacaggcca

SEQ ID NO: 176798 - DNA, 20 bp, Artificial Sequence
  Synthetic oligonucleotide; GGG chr2 60512364 60512383 60512367 -
agctcaaggacacaggccaa

SEQ ID NO: 176799 - DNA, 20 bp, Artificial Sequence
  Synthetic oligonucleotide; GAG chr2 60512362 60512381 60512365 -
ctcaaggacacaggccaagg

SEQ ID NO: 176800 - DNA, 20 bp, Artificial Sequence
  Synthetic oligonucleotide; AGG chr2 60512361 60512380 60512364 -
tcaaggacacaggccaaggg

SEQ ID NO: 176801 - DNA, 20 bp, Artificial Sequence
  Synthetic oligonucleotide; AAG chr2 60512356 60512375 60512359 -
gacacaggccaagggaggtg

SEQ ID NO: 176802 - DNA, 20 bp, Artificial Sequence
  Synthetic oligonucleotide; CAG chr2 60512344 60512363 60512347 -
gggaggtgaagtgacttgcc

SEQ ID NO: 176803 - DNA, 20 bp, Artificial Sequence
  Synthetic oligonucleotide; AGG chr2 60512343 60512362 60512346 -
ggaggtgaagtgacttgccc

SEQ ID NO: 176804 - DNA, 20 bp, Artificial Sequence
  Synthetic oligonucleotide; CAG chr2 60512335 60512354 60512338 -
agtgacttgcccaggccacc

SEQ ID NO: 176805 - DNA, 20 bp, Artificial Sequence
  Synthetic oligonucleotide; TAG chr2 60512327 60512346 60512330 -
gcccaggccacccagttacc

SEQ ID NO: 176806 - DNA, 20 bp, Artificial Sequence
  Synthetic oligonucleotide; CAG chr2 60512322 60512341 60512325 -
ggccacccagttacctagca

SEQ ID NO: 176807 - DNA, 20 bp, Artificial Sequence
  Synthetic oligonucleotide; CAG chr2 60512317 60512336 60512320 -
cccagttacctagcacagct

SEQ ID NO: 176808 - DNA, 20 bp, Artificial Sequence
  Synthetic oligonucleotide; AAG chr2 60512310 60512329 60512313 -
acctagcacagctcagccac

SEQ ID NO: 176809 - DNA, 20 bp, Artificial Sequence
  Synthetic oligonucleotide; GAG chr2 60512290 60512309 60512293 -
aagcccaaatgaatgattct

SEQ ID NO: 176810 - DNA, 20 bp, Artificial Sequence
  Synthetic oligonucleotide; CAG chr2 60512279 60512298 60512282 -
aatgattctgagttccacat

SEQ ID NO: 176811 - DNA, 20 bp, Artificial Sequence
  Synthetic oligonucleotide; CGG chr2 60512271 60512290 60512274 -
tgagttccacatcagcgcat

SEQ ID NO: 176812 - DNA, 20 bp, Artificial Sequence
  Synthetic oligonucleotide; GGG chr2 60512270 60512289 60512273 -
gagttccacatcagcgcatc

SEQ ID NO: 176813 - DNA, 20 bp, Artificial Sequence
  Synthetic oligonucleotide; CAG chr2 60512267 60512286 60512270 -
ttccacatcagcgcatcggg

SEQ ID NO: 176814 - DNA, 20 bp, Artificial Sequence
  Synthetic oligonucleotide; GAG chr2 60512257 60512276 60512260 -
gcgcatcgggcagccaccat

SEQ ID NO: 176815 - DNA, 20 bp, Artificial Sequence
  Synthetic oligonucleotide; CAG chr2 60512254 60512273 60512257 -
catcgggcagccaccatgag

SEQ ID NO: 176816 - DNA, 20 bp, Artificial Sequence
  Synthetic oligonucleotide; CAG chr2 60512246 60512265 60512249 -
agccaccatgagcagttcca

SEQ ID NO: 176817 - DNA, 20 bp, Artificial Sequence
  Synthetic oligonucleotide; CAG chr2 60512240 60512259 60512243 -
catgagcagttccacagtga

SEQ ID NO: 176818 - DNA, 20 bp, Artificial Sequence
  Synthetic oligonucleotide; AGG chr2 60512239 60512258 60512242 -
atgagcagttccacagtgac

SEQ ID NO: 176819 - DNA, 20 bp, Artificial Sequence
  Synthetic oligonucleotide; TGG chr2 60512236 60512255 60512239 -
agcagttccacagtgacagg

SEQ ID NO: 176820 - DNA, 20 bp, Artificial Sequence
  Synthetic oligonucleotide; GGG chr2 60512235 60512254 60512238 -
gcagttccacagtgacaggt

SEQ ID NO: 176821 - DNA, 20 bp, Artificial Sequence
  Synthetic oligonucleotide; GGG chr2 60512234 60512253 60512237 -
cagttccacagtgacaggtg

SEQ ID NO: 176822 - DNA, 20 bp, Artificial Sequence
  Synthetic oligonucleotide; TAG chr2 60512228 60512247 60512231 -
cacagtgacaggtggggctc

SEQ ID NO: 176823 - DNA, 20 bp, Artificial Sequence
  Synthetic oligonucleotide; AGG chr2 60512227 60512246 60512230 -
acagtgacaggtggggctct

SEQ ID NO: 176824 - DNA, 20 bp, Artificial Sequence
  Synthetic oligonucleotide; TGG chr2 60512224 60512243 60512227 -
gtgacaggtggggctctagg

SEQ ID NO: 176825 - DNA, 20 bp, Artificial Sequence
  Synthetic oligonucleotide; GAG chr2 60512204 60512223 60512207 -
tggcttcctttaaaacatct

SEQ ID NO: 176826 - DNA, 20 bp, Artificial Sequence
  Synthetic oligonucleotide; AGG chr2 60512203 60512222 60512206 -
ggcttcctttaaaacatctg

SEQ ID NO: 176827 - DNA, 20 bp, Artificial Sequence
  Synthetic oligonucleotide; AAG chr2 60512199 60512218 60512202 -
tcctttaaaacatctgagga

SEQ ID NO: 176828 - DNA, 20 bp, Artificial Sequence
  Synthetic oligonucleotide; CAG chr2 60512196 60512215 60512199 -
tttaaaacatctgaggaaag

SEQ ID NO: 176829 - DNA, 20 bp, Artificial Sequence
  Synthetic oligonucleotide; AGG chr2 60512195 60512214 60512198 -
ttaaaacatctgaggaaagc

SEQ ID NO: 176830 - DNA, 20 bp, Artificial Sequence
  Synthetic oligonucleotide; CAG chr2 60512172 60512191 60512175 -
cttcctctctgactgctctc

SEQ ID NO: 176831 - DNA, 20 bp, Artificial Sequence
  Synthetic oligonucleotide; AGG chr2 60512171 60512190 60512174 -
ttcctctctgactgctctcc

SEQ ID NO: 176832 - DNA, 20 bp, Artificial Sequence
  Synthetic oligonucleotide; GGG chr2 60512170 60512189 60512173 -
tcctctctgactgctctcca

SEQ ID NO: 176833 - DNA, 20 bp, Artificial Sequence
  Synthetic oligonucleotide; GGG chr2 60512169 60512188 60512172 -
cctctctgactgctctccag

SEQ ID NO: 176834 - DNA, 20 bp, Artificial Sequence
  Synthetic oligonucleotide; TGG chr2 60512166 60512185 60512169 -
ctctgactgctctccagggg

SEQ ID NO: 176835 - DNA, 20 bp, Artificial Sequence
  Synthetic oligonucleotide; GAG chr2 60512162 60512181 60512165 -
gactgctctccaggggtggt

SEQ ID NO: 176836 - DNA, 20 bp, Artificial Sequence
  Synthetic oligonucleotide; CAG chr2 60512157 60512176 60512160 -
ctctccaggggtggtgagca

SEQ ID NO: 176837 - DNA, 20 bp, Artificial Sequence
  Synthetic oligonucleotide; AGG chr2 60512156 60512175 60512159 -
tctccaggggtggtgagcac

SEQ ID NO: 176838 - DNA, 20 bp, Artificial Sequence
  Synthetic oligonucleotide; GGG chr2 60512155 60512174 60512158 -
ctccaggggtggtgagcaca

SEQ ID NO: 176839 - DNA, 20 bp, Artificial Sequence
  Synthetic oligonucleotide; GGG chr2 60512154 60512173 60512157 -
tccaggggtggtgagcacag

SEQ ID NO: 176840 - DNA, 20 bp, Artificial Sequence
  Synthetic oligonucleotide; CAG chr2 60512143 60512162 60512146 -
tgagcacaggggttcatctg

SEQ ID NO: 176841 - DNA, 20 bp, Artificial Sequence
  Synthetic oligonucleotide; CAG chr2 60512135 60512154 60512138 -
ggggttcatctgcagctccc

SEQ ID NO: 176842 - DNA, 20 bp, Artificial Sequence
  Synthetic oligonucleotide; CAG chr2 60512129 60512148 60512132 -
catctgcagctccccagctc

SEQ ID NO: 176843 - DNA, 20 bp, Artificial Sequence
  Synthetic oligonucleotide; TAG chr2 60512119 60512138 60512122 -
tccccagctccagtgctcct

SEQ ID NO: 176844 - DNA, 20 bp, Artificial Sequence
  Synthetic oligonucleotide; AAG chr2 60512110 60512129 60512113 -
ccagtgctccttagccttcc

SEQ ID NO: 176845 - DNA, 20 bp, Artificial Sequence
  Synthetic oligonucleotide; AAG chr2 60512096 60512115 60512099 -
ccttccaagttgtttgaatt

SEQ ID NO: 176846 - DNA, 20 bp, Artificial Sequence
  Synthetic oligonucleotide; AAG chr2 60512089 60512108 60512092 -
agttgtttgaattaagttgc

SEQ ID NO: 176847 - DNA, 20 bp, Artificial Sequence
  Synthetic oligonucleotide; CAG chr2 60512084 60512103 60512087 -
tttgaattaagttgcaagcc

SEQ ID NO: 176848 - DNA, 20 bp, Artificial Sequence
  Synthetic oligonucleotide; AGG chr2 60512083 60512102 60512086 -
ttgaattaagttgcaagccc

SEQ ID NO: 176849 - DNA, 20 bp, Artificial Sequence
  Synthetic oligonucleotide; TGG chr2 60512080 60512099 60512083 -
aattaagttgcaagcccagg

SEQ ID NO: 176850 - DNA, 20 bp, Artificial Sequence
  Synthetic oligonucleotide; TGG chr2 60512059 60512078 60512062 -
ggctgcacacatattcattt

SEQ ID NO: 176851 - DNA, 20 bp, Artificial Sequence
  Synthetic oligonucleotide; GAG chr2 60512057 60512076 60512060 -
ctgcacacatattcattttg

SEQ ID NO: 176852 - DNA, 20 bp, Artificial Sequence
  Synthetic oligonucleotide; TGG chr2 60512032 60512051 60512035 -
actgtgacacttgtatttcc

SEQ ID NO: 176853 - DNA, 20 bp, Artificial Sequence
  Synthetic oligonucleotide; GGG chr2 60512031 60512050 60512034 -
ctgtgacacttgtatttcct

SEQ ID NO: 176854 - DNA, 20 bp, Artificial Sequence
  Synthetic oligonucleotide; AAG chr2 60512028 60512047 60512031 -
tgacacttgtatttcctggg

SEQ ID NO: 176855 - DNA, 20 bp, Artificial Sequence
  Synthetic oligonucleotide; TGG chr2 60512011 60512030 60512014 -
gggaagcgttactatgtctt

SEQ ID NO: 176856 - DNA, 20 bp, Artificial Sequence
  Synthetic oligonucleotide; GAG chr2 60512006 60512025 60512009 -
gcgttactatgtctttggcc

SEQ ID NO: 176857 - DNA, 20 bp, Artificial Sequence
  Synthetic oligonucleotide; AAG chr2 60512002 60512021 60512005 -
tactatgtctttggccgagc

SEQ ID NO: 176858 - DNA, 20 bp, Artificial Sequence
  Synthetic oligonucleotide; GAG chr2 60511988 60512007 60511991 -
ccgagcaagtattacgccat

SEQ ID NO: 176859 - DNA, 20 bp, Artificial Sequence
  Synthetic oligonucleotide; TGG chr2 60511984 60512003 60511987 -
gcaagtattacgccatgagc

SEQ ID NO: 176860 - DNA, 20 bp, Artificial Sequence
  Synthetic oligonucleotide; TGG chr2 60511947 60511966 60511950 -
cctttgaacacctacattgc

SEQ ID NO: 176861 - DNA, 20 bp, Artificial Sequence
  Synthetic oligonucleotide; GGG chr2 60511946 60511965 60511949 -
ctttgaacacctacattgct

SEQ ID NO: 176862 - DNA, 20 bp, Artificial Sequence
  Synthetic oligonucleotide; GAG chr2 60511944 60511963 60511947 -
ttgaacacctacattgctgg

SEQ ID NO: 176863 - DNA, 20 bp, Artificial Sequence
  Synthetic oligonucleotide; AGG chr2 60511943 60511962 60511946 -
tgaacacctacattgctggg

SEQ ID NO: 176864 - DNA, 20 bp, Artificial Sequence
  Synthetic oligonucleotide; TAG chr2 60511934 60511953 60511937 -
acattgctgggaggatacct

SEQ ID NO: 176865 - DNA, 20 bp, Artificial Sequence
  Synthetic oligonucleotide; GAG chr2 60511930 60511949 60511933 -
tgctgggaggataccttagt

SEQ ID NO: 176866 - DNA, 20 bp, Artificial Sequence
  Synthetic oligonucleotide; GAG chr2 60511928 60511947 60511931 -
ctgggaggataccttagtga

SEQ ID NO: 176867 - DNA, 20 bp, Artificial Sequence
  Synthetic oligonucleotide; TGG chr2 60511921 60511940 60511924 -
gataccttagtgagagtgcc

SEQ ID NO: 176868 - DNA, 20 bp, Artificial Sequence
  Synthetic oligonucleotide; GGG chr2 60511920 60511939 60511923 -
ataccttagtgagagtgcct

SEQ ID NO: 176869 - DNA, 20 bp, Artificial Sequence
  Synthetic oligonucleotide; TGG chr2 60511913 60511932 60511916 -
agtgagagtgcctgggccac

SEQ ID NO: 176870 - DNA, 20 bp, Artificial Sequence
  Synthetic oligonucleotide; GGG chr2 60511912 60511931 60511915 -
gtgagagtgcctgggccact

SEQ ID NO: 176871 - DNA, 20 bp, Artificial Sequence
  Synthetic oligonucleotide; TAG chr2 60511907 60511926 60511910 -
agtgcctgggccactgggcg

SEQ ID NO: 176872 - DNA, 20 bp, Artificial Sequence
  Synthetic oligonucleotide; CAG chr2 60511904 60511923 60511907 -
gcctgggccactgggcgtag

SEQ ID NO: 176873 - DNA, 20 bp, Artificial Sequence
  Synthetic oligonucleotide; GAG chr2 60511902 60511921 60511905 -
ctgggccactgggcgtagca

SEQ ID NO: 176874 - DNA, 20 bp, Artificial Sequence
  Synthetic oligonucleotide; AGG chr2 60511901 60511920 60511904 -
tgggccactgggcgtagcag

SEQ ID NO: 176875 - DNA, 20 bp, Artificial Sequence
  Synthetic oligonucleotide; AAG chr2 60511898 60511917 60511901 -
gccactgggcgtagcagagg

SEQ ID NO: 176876 - DNA, 20 bp, Artificial Sequence
  Synthetic oligonucleotide; AAG chr2 60511867 60511886 60511870 -
cattttactgatttatttga

SEQ ID NO: 176877 - DNA, 20 bp, Artificial Sequence
  Synthetic oligonucleotide; AAG chr2 60511860 60511879 60511863 -
ctgatttatttgaaagaaaa

SEQ ID NO: 176878 - DNA, 20 bp, Artificial Sequence
  Synthetic oligonucleotide; TAG chr2 60511835 60511854 60511838 -
ccctccaacccttgccttca

SEQ ID NO: 176879 - DNA, 20 bp, Artificial Sequence
  Synthetic oligonucleotide; CAG chr2 60511829 60511848 60511832 -
aacccttgccttcatagaaa

SEQ ID NO: 176880 - DNA, 20 bp, Artificial Sequence
  Synthetic oligonucleotide; GAG chr2 60511827 60511846 60511830 -
cccttgccttcatagaaaca

SEQ ID NO: 176881 - DNA, 20 bp, Artificial Sequence
  Synthetic oligonucleotide; AAG chr2 60511818 60511837 60511821 -
tcatagaaacagagtgttga

SEQ ID NO: 176882 - DNA, 20 bp, Artificial Sequence
  Synthetic oligonucleotide; TGG chr2 60511813 60511832 60511816 -
gaaacagagtgttgaaagct

SEQ ID NO: 176883 - DNA, 20 bp, Artificial Sequence
  Synthetic oligonucleotide; GAG chr2 60511811 60511830 60511814 -
aacagagtgttgaaagcttg

SEQ ID NO: 176884 - DNA, 20 bp, Artificial Sequence
  Synthetic oligonucleotide; AAG chr2 60511808 60511827 60511811 -
agagtgttgaaagcttggag

SEQ ID NO: 176885 - DNA, 20 bp, Artificial Sequence
  Synthetic oligonucleotide; TAG chr2 60511783 60511802 60511786 -
ttaatgactcccctgcccct

SEQ ID NO: 176886 - DNA, 20 bp, Artificial Sequence
  Synthetic oligonucleotide; TAG chr2 60511767 60511786 60511770 -
cccttagtgtcttacatgac

SEQ ID NO: 176887 - DNA, 20 bp, Artificial Sequence
  Synthetic oligonucleotide; TGG chr2 60511716 60511735 60511719 -
ttatttcaacttattttctg

SEQ ID NO: 176888 - DNA, 20 bp, Artificial Sequence
  Synthetic oligonucleotide; TGG chr2 60511711 60511730 60511714 -
tcaacttattttctgtggct

SEQ ID NO: 176889 - DNA, 20 bp, Artificial Sequence
  Synthetic oligonucleotide; GAG chr2 60511694 60511713 60511697 -
gcttggaaaatacgttgact

SEQ ID NO: 176890 - DNA, 20 bp, Artificial Sequence
  Synthetic oligonucleotide; TGG chr2 60511671 60511690 60511674 -
tgatgattgttttcatgaaa

SEQ ID NO: 176891 - DNA, 20 bp, Artificial Sequence
  Synthetic oligonucleotide; AAG chr2 60511657 60511676 60511660 -
atgaaatggtgcaacatgta

SEQ ID NO: 176892 - DNA, 20 bp, Artificial Sequence
  Synthetic oligonucleotide; TGG chr2 60511651 60511670 60511654 -
tggtgcaacatgtaaagcaa

SEQ ID NO: 176893 - DNA, 20 bp, Artificial Sequence
  Synthetic oligonucleotide; TAG chr2 60511638 60511657 60511641 -
aaagcaatggttgtcattaa

SEQ ID NO: 176894 - DNA, 20 bp, Artificial Sequence
  Synthetic oligonucleotide; CAG chr2 60511633 60511652 60511636 -
aatggttgtcattaatagtg

SEQ ID NO: 176895 - DNA, 20 bp, Artificial Sequence
  Synthetic oligonucleotide; TAG chr2 60511625 60511644 60511628 -
tcattaatagtgcagttatg

SEQ ID NO: 176896 - DNA, 20 bp, Artificial Sequence
  Synthetic oligonucleotide; GAG chr2 60511623 60511642 60511626 -
attaatagtgcagttatgta

SEQ ID NO: 176897 - DNA, 20 bp, Artificial Sequence
  Synthetic oligonucleotide; TAG chr2 60511618 60511637 60511621 -
tagtgcagttatgtagagtg

SEQ ID NO: 176898 - DNA, 20 bp, Artificial Sequence
  Synthetic oligonucleotide; GAG chr2 60511609 60511628 60511612 -
tatgtagagtgtagctcttt

SEQ ID NO: 176899 - DNA, 20 bp, Artificial Sequence
  Synthetic oligonucleotide; CAG chr2 60511602 60511621 60511605 -
agtgtagctctttgagtctt

SEQ ID NO: 176900 - DNA, 20 bp, Artificial Sequence
  Synthetic oligonucleotide; CAG chr2 60511591 60511610 60511594 -
ttgagtcttcagttttgaat

SEQ ID NO: 176901 - DNA, 20 bp, Artificial Sequence
  Synthetic oligonucleotide; TAG chr2 60511586 60511605 60511589 -
tcttcagttttgaatcagat

SEQ ID NO: 176902 - DNA, 20 bp, Artificial Sequence
  Synthetic oligonucleotide; TAG chr2 60511565 60511584 60511568 -
agcgctctgttaacttaaaa

SEQ ID NO: 176903 - DNA, 20 bp, Artificial Sequence
  Synthetic oligonucleotide; AAG chr2 60511554 60511573 60511557 -
aacttaaaatagccccaaaa

SEQ ID NO: 176904 - DNA, 20 bp, Artificial Sequence
  Synthetic oligonucleotide; AAG chr2 60511551 60511570 60511554 -
ttaaaatagccccaaaaaag

SEQ ID NO: 176905 - DNA, 20 bp, Artificial Sequence
  Synthetic oligonucleotide; AAG chr2 60511548 60511567 60511551 -
aaatagccccaaaaaagaag

SEQ ID NO: 176906 - DNA, 20 bp, Artificial Sequence
  Synthetic oligonucleotide; AGG chr2 60511547 60511566 60511550 -
aatagccccaaaaaagaaga

SEQ ID NO: 176907 - DNA, 20 bp, Artificial Sequence
  Synthetic oligonucleotide; AAG chr2 60511537 60511556 60511540 -
aaaaagaagaaggaaaaaaa

SEQ ID NO: 176908 - DNA, 20 bp, Artificial Sequence
  Synthetic oligonucleotide; CAG chr2 60511528 60511547 60511531 -
aaggaaaaaaaaagaactgt

SEQ ID NO: 176909 - DNA, 20 bp, Artificial Sequence
  Synthetic oligonucleotide; CAG chr2 60511521 60511540 60511524 -
aaaaaagaactgtcagaaat

SEQ ID NO: 176910 - DNA, 20 bp, Artificial Sequence
  Synthetic oligonucleotide; GAG chr2 60511519 60511538 60511522 -
aaaagaactgtcagaaatca

SEQ ID NO: 176911 - DNA, 20 bp, Artificial Sequence
  Synthetic oligonucleotide; AGG chr2 60511518 60511537 60511521 -
aaagaactgtcagaaatcag

SEQ ID NO: 176912 - DNA, 20 bp, Artificial Sequence
  Synthetic oligonucleotide; GGG chr2 60511517 60511536 60511520 -
aagaactgtcagaaatcaga

SEQ ID NO: 176913 - DNA, 20 bp, Artificial Sequence
  Synthetic oligonucleotide; TAG chr2 60511508 60511527 60511511 -
cagaaatcagagggaaatat

SEQ ID NO: 176914 - DNA, 20 bp, Artificial Sequence
  Synthetic oligonucleotide; TGG chr2 60511493 60511512 60511496 -
aatattagcattatgaaaca

SEQ ID NO: 176915 - DNA, 20 bp, Artificial Sequence
  Synthetic oligonucleotide; AAG chr2 60511486 60511505 60511489 -
gcattatgaaacatggtaac

SEQ ID NO: 176916 - DNA, 20 bp, Artificial Sequence
  Synthetic oligonucleotide; TGG chr2 60511483 60511502 60511486 -
ttatgaaacatggtaacaag

SEQ ID NO: 176917 - DNA, 20 bp, Artificial Sequence
  Synthetic oligonucleotide; TAG chr2 60511476 60511495 60511479 -
acatggtaacaagtggccat

SEQ ID NO: 176918 - DNA, 20 bp, Artificial Sequence
  Synthetic oligonucleotide; TAG chr2 60511454 60511473 60511457 -
gcactttatgtctgcatgaa

SEQ ID NO: 176919 - DNA, 20 bp, Artificial Sequence
  Synthetic oligonucleotide; AAG chr2 60511444 60511463 60511447 -
tctgcatgaatagcatcttt

SEQ ID NO: 176920 - DNA, 20 bp, Artificial Sequence
  Synthetic oligonucleotide; TGG chr2 60511433 60511452 60511436 -
agcatctttaagtgttttat

SEQ ID NO: 176921 - DNA, 20 bp, Artificial Sequence
  Synthetic oligonucleotide; CGG chr2 60511427 60511446 60511430 -
tttaagtgttttattggtaa

SEQ ID NO: 176922 - DNA, 20 bp, Artificial Sequence
  Synthetic oligonucleotide; AAG chr2 60511422 60511441 60511425 -
gtgttttattggtaacggaa

SEQ ID NO: 176923 - DNA, 20 bp, Artificial Sequence
  Synthetic oligonucleotide; GAG chr2 60511420 60511439 60511423 -
gttttattggtaacggaaaa

SEQ ID NO: 176924 - DNA, 20 bp, Artificial Sequence
  Synthetic oligonucleotide; TGG chr2 60511417 60511436 60511420 -
ttattggtaacggaaaagag

SEQ ID NO: 176925 - DNA, 20 bp, Artificial Sequence
  Synthetic oligonucleotide; GAG chr2 60511415 60511434 60511418 -
attggtaacggaaaagagtg

SEQ ID NO: 176926 - DNA, 20 bp, Artificial Sequence
  Synthetic oligonucleotide; TAG chr2 60511407 60511426 60511410 -
cggaaaagagtggagtcaca

SEQ ID NO: 176927 - DNA, 20 bp, Artificial Sequence
  Synthetic oligonucleotide; TGG chr2 60511384 60511403 60511387 -
aatgacattacttcccaaat

SEQ ID NO: 176928 - DNA, 20 bp, Artificial Sequence
  Synthetic oligonucleotide; GAG chr2 60511380 60511399 60511383 -
acattacttcccaaattggc

SEQ ID NO: 176929 - DNA, 20 bp, Artificial Sequence
  Synthetic oligonucleotide; CAG chr2 60511366 60511385 60511369 -
attggcgagttcttttaatt

SEQ ID NO: 176930 - DNA, 20 bp, Artificial Sequence
  Synthetic oligonucleotide; TGG chr2 60511341 60511360 60511344 -
ttctccttgttattgcctac

SEQ ID NO: 176931 - DNA, 20 bp, Artificial Sequence
  Synthetic oligonucleotide; GGG chr2 60511340 60511359 60511343 -
tctccttgttattgcctact

SEQ ID NO: 176932 - DNA, 20 bp, Artificial Sequence
  Synthetic oligonucleotide; GGG chr2 60511339 60511358 60511342 -
ctccttgttattgcctactg

SEQ ID NO: 176933 - DNA, 20 bp, Artificial Sequence
  Synthetic oligonucleotide; GAG chr2 60511337 60511356 60511340 -
ccttgttattgcctactggg

SEQ ID NO: 176934 - DNA, 20 bp, Artificial Sequence
  Synthetic oligonucleotide; TAG chr2 60511307 60511326 60511310 -
tcacctgtcaaattgtatgc

SEQ ID NO: 176935 - DNA, 20 bp, Artificial Sequence
  Synthetic oligonucleotide; AGG chr2 60511306 60511325 60511309 -
cacctgtcaaattgtatgct

SEQ ID NO: 176936 - DNA, 20 bp, Artificial Sequence
  Synthetic oligonucleotide; GGG chr2 60511305 60511324 60511308 -
acctgtcaaattgtatgcta

SEQ ID NO: 176937 - DNA, 20 bp, Artificial Sequence
  Synthetic oligonucleotide; TGG chr2 60511302 60511321 60511305 -
tgtcaaattgtatgctaggg

SEQ ID NO: 176938 - DNA, 20 bp, Artificial Sequence
  Synthetic oligonucleotide; GGG chr2 60511301 60511320 60511304 -
gtcaaattgtatgctagggt

SEQ ID NO: 176939 - DNA, 20 bp, Artificial Sequence
  Synthetic oligonucleotide; AAG chr2 60511297 60511316 60511300 -
aattgtatgctagggtggga

SEQ ID NO: 176940 - DNA, 20 bp, Artificial Sequence
  Synthetic oligonucleotide; AGG chr2 60511296 60511315 60511299 -
attgtatgctagggtgggaa

SEQ ID NO: 176941 - DNA, 20 bp, Artificial Sequence
  Synthetic oligonucleotide; GGG chr2 60511295 60511314 60511298 -
ttgtatgctagggtgggaaa

SEQ ID NO: 176942 - DNA, 20 bp, Artificial Sequence
  Synthetic oligonucleotide; TAG chr2 60511287 60511306 60511290 -
tagggtgggaaagggtattt

SEQ ID NO: 176943 - DNA, 20 bp, Artificial Sequence
  Synthetic oligonucleotide; TGG chr2 60511278 60511297 60511281 -
aaagggtattttagcttttc

SEQ ID NO: 176944 - DNA, 20 bp, Artificial Sequence
  Synthetic oligonucleotide; CGG chr2 60511267 60511286 60511270 -
tagcttttctggctgcatcc

SEQ ID NO: 176945 - DNA, 20 bp, Artificial Sequence
  Synthetic oligonucleotide; GGG chr2 60511266 60511285 60511269 -
agcttttctggctgcatccc

SEQ ID NO: 176946 - DNA, 20 bp, Artificial Sequence
  Synthetic oligonucleotide; CAG chr2 60511259 60511278 60511262 -
ctggctgcatcccgggctct

SEQ ID NO: 176947 - DNA, 20 bp, Artificial Sequence
  Synthetic oligonucleotide; AGG chr2 60511258 60511277 60511261 -
tggctgcatcccgggctctc

SEQ ID NO: 176948 - DNA, 20 bp, Artificial Sequence
  Synthetic oligonucleotide; TAG chr2 60511255 60511274 60511258 -
ctgcatcccgggctctcagg

SEQ ID NO: 176949 - DNA, 20 bp, Artificial Sequence
  Synthetic oligonucleotide; AAG chr2 60511252 60511271 60511255 -
catcccgggctctcaggtag

SEQ ID NO: 176950 - DNA, 20 bp, Artificial Sequence
  Synthetic oligonucleotide; AGG chr2 60511251 60511270 60511254 -
atcccgggctctcaggtaga

SEQ ID NO: 176951 - DNA, 20 bp, Artificial Sequence
  Synthetic oligonucleotide; GGG chr2 60511250 60511269 60511253 -
tcccgggctctcaggtagaa

SEQ ID NO: 176952 - DNA, 20 bp, Artificial Sequence
  Synthetic oligonucleotide; TGG chr2 60511231 60511250 60511234 -
agggatttgtccctttgcca

SEQ ID NO: 176953 - DNA, 20 bp, Artificial Sequence
  Synthetic oligonucleotide; CAG chr2 60511206 60511225 60511209 -
tccttctctcctgccctccc

SEQ ID NO: 176954 - DNA, 20 bp, Artificial Sequence
  Synthetic oligonucleotide; CAG chr2 60511194 60511213 60511197 -
gccctccccagtgcccctgc

SEQ ID NO: 176955 - DNA, 20 bp, Artificial Sequence
  Synthetic oligonucleotide; AGG chr2 60511193 60511212 60511196 -
ccctccccagtgcccctgcc

SEQ ID NO: 176956 - DNA, 20 bp, Artificial Sequence
  Synthetic oligonucleotide; GAG chr2 60511191 60511210 60511194 -
ctccccagtgcccctgccag

SEQ ID NO: 176957 - DNA, 20 bp, Artificial Sequence
  Synthetic oligonucleotide; AGG chr2 60511190 60511209 60511193 -
tccccagtgcccctgccagg

SEQ ID NO: 176958 - DNA, 20 bp, Artificial Sequence
  Synthetic oligonucleotide; GAG chr2 60511188 60511207 60511191 -
cccagtgcccctgccaggag

SEQ ID NO: 176959 - DNA, 20 bp, Artificial Sequence
  Synthetic oligonucleotide; AGG chr2 60511187 60511206 60511190 -
ccagtgcccctgccaggagg

SEQ ID NO: 176960 - DNA, 20 bp, Artificial Sequence
  Synthetic oligonucleotide; GGG chr2 60511186 60511205 60511189 -
cagtgcccctgccaggagga

SEQ ID NO: 176961 - DNA, 20 bp, Artificial Sequence
  Synthetic oligonucleotide; GAG chr2 60511184 60511203 60511187 -
gtgcccctgccaggaggagg

SEQ ID NO: 176962 - DNA, 20 bp, Artificial Sequence
  Synthetic oligonucleotide; AAG chr2 60511174 60511193 60511177 -
caggaggagggagaatctga

SEQ ID NO: 176963 - DNA, 20 bp, Artificial Sequence
  Synthetic oligonucleotide; AAG chr2 60511170 60511189 60511173 -
aggagggagaatctgaaagc

SEQ ID NO: 176964 - DNA, 20 bp, Artificial Sequence
  Synthetic oligonucleotide; TGG chr2 60511165 60511184 60511168 -
ggagaatctgaaagcaagaa

SEQ ID NO: 176965 - DNA, 20 bp, Artificial Sequence
  Synthetic oligonucleotide; GAG chr2 60511163 60511182 60511166 -
agaatctgaaagcaagaatg

SEQ ID NO: 176966 - DNA, 20 bp, Artificial Sequence
  Synthetic oligonucleotide; AGG chr2 60511162 60511181 60511165 -
gaatctgaaagcaagaatgg

SEQ ID NO: 176967 - DNA, 20 bp, Artificial Sequence
  Synthetic oligonucleotide; GGG chr2 60511161 60511180 60511164 -
aatctgaaagcaagaatgga

SEQ ID NO: 176968 - DNA, 20 bp, Artificial Sequence
  Synthetic oligonucleotide; GAG chr2 60511159 60511178 60511162 -
tctgaaagcaagaatggagg

SEQ ID NO: 176969 - DNA, 20 bp, Artificial Sequence
  Synthetic oligonucleotide; GAG chr2 60511157 60511176 60511160 -
tgaaagcaagaatggaggga

SEQ ID NO: 176970 - DNA, 20 bp, Artificial Sequence
  Synthetic oligonucleotide; TGG chr2 60511146 60511165 60511149 -
atggagggagagtaatgccg

SEQ ID NO: 176971 - DNA, 20 bp, Artificial Sequence
  Synthetic oligonucleotide; GAG chr2 60511144 60511163 60511147 -
ggagggagagtaatgccgtg

SEQ ID NO: 176972 - DNA, 20 bp, Artificial Sequence
  Synthetic oligonucleotide; AGG chr2 60511143 60511162 60511146 -
gagggagagtaatgccgtgg

SEQ ID NO: 176973 - DNA, 20 bp, Artificial Sequence
  Synthetic oligonucleotide; CAG chr2 60511140 60511159 60511143 -
ggagagtaatgccgtggagg

SEQ ID NO: 176974 - DNA, 20 bp, Artificial Sequence
  Synthetic oligonucleotide; TGG chr2 60511136 60511155 60511139 -
agtaatgccgtggaggcagc

SEQ ID NO: 176975 - DNA, 20 bp, Artificial Sequence
  Synthetic oligonucleotide; GGG chr2 60511135 60511154 60511138 -
gtaatgccgtggaggcagct

SEQ ID NO: 176976 - DNA, 20 bp, Artificial Sequence
  Synthetic oligonucleotide; TGG chr2 60511123 60511142 60511126 -
aggcagctgggatttgtgcc

SEQ ID NO: 176977 - DNA, 20 bp, Artificial Sequence
  Synthetic oligonucleotide; CAG chr2 60511119 60511138 60511122 -
agctgggatttgtgcctggc

SEQ ID NO: 176978 - DNA, 20 bp, Artificial Sequence
  Synthetic oligonucleotide; CAG chr2 60511106 60511125 60511109 -
gcctggccagtgcccctgca

SEQ ID NO: 176979 - DNA, 20 bp, Artificial Sequence
  Synthetic oligonucleotide; TGG chr2 60511100 60511119 60511103 -
ccagtgcccctgcacagtat

SEQ ID NO: 176980 - DNA, 20 bp, Artificial Sequence
  Synthetic oligonucleotide; GAG chr2 60511093 60511112 60511096 -
ccctgcacagtattggatat

SEQ ID NO: 176981 - DNA, 20 bp, Artificial Sequence
  Synthetic oligonucleotide; TGG chr2 60511088 60511107 60511091 -
cacagtattggatatgagta

SEQ ID NO: 176982 - DNA, 20 bp, Artificial Sequence
  Synthetic oligonucleotide; GGG chr2 60511087 60511106 60511090 -
acagtattggatatgagtat

SEQ ID NO: 176983 - DNA, 20 bp, Artificial Sequence
  Synthetic oligonucleotide; CAG chr2 60511079 60511098 60511082 -
ggatatgagtatgggcatct

SEQ ID NO: 176984 - DNA, 20 bp, Artificial Sequence
  Synthetic oligonucleotide; TGG chr2 60511070 60511089 60511073 -
tatgggcatctcagtgtgcc

SEQ ID NO: 176985 - DNA, 20 bp, Artificial Sequence
  Synthetic oligonucleotide; CAG chr2 60511062 60511081 60511065 -
tctcagtgtgcctggaaacg

SEQ ID NO: 176986 - DNA, 20 bp, Artificial Sequence
  Synthetic oligonucleotide; TGG chr2 60511058 60511077 60511061 -
agtgtgcctggaaacgcagt

SEQ ID NO: 176987 - DNA, 20 bp, Artificial Sequence
  Synthetic oligonucleotide; CAG chr2 60511050 60511069 60511053 -
tggaaacgcagttggctgca

SEQ ID NO: 176988 - DNA, 20 bp, Artificial Sequence
  Synthetic oligonucleotide; CAG chr2 60511044 60511063 60511047 -
cgcagttggctgcacagccc

SEQ ID NO: 176989 - DNA, 20 bp, Artificial Sequence
  Synthetic oligonucleotide; TGG chr2 60511041 60511060 60511044 -
agttggctgcacagccccag

SEQ ID NO: 176990 - DNA, 20 bp, Artificial Sequence
  Synthetic oligonucleotide; GGG chr2 60511040 60511059 60511043 -
gttggctgcacagccccagt

SEQ ID NO: 176991 - DNA, 20 bp, Artificial Sequence
  Synthetic oligonucleotide; AAG chr2 60511037 60511056 60511040 -
ggctgcacagccccagtggg

SEQ ID NO: 176992 - DNA, 20 bp, Artificial Sequence
  Synthetic oligonucleotide; GAG chr2 60511028 60511047 60511031 -
gccccagtgggaagaactct

SEQ ID NO: 176993 - DNA, 20 bp, Artificial Sequence
  Synthetic oligonucleotide; AGG chr2 60511027 60511046 60511030 -
ccccagtgggaagaactctg

SEQ ID NO: 176994 - DNA, 20 bp, Artificial Sequence
  Synthetic oligonucleotide; TGG chr2 60511018 60511037 60511021 -
gaagaactctgaggaactgc

SEQ ID NO: 176995 - DNA, 20 bp, Artificial Sequence
  Synthetic oligonucleotide; TGG chr2 60511015 60511034 60511018 -
gaactctgaggaactgctgg

SEQ ID NO: 176996 - DNA, 20 bp, Artificial Sequence
  Synthetic oligonucleotide; TGG chr2 60511011 60511030 60511014 -
tctgaggaactgctggtggt

SEQ ID NO: 176997 - DNA, 20 bp, Artificial Sequence
  Synthetic oligonucleotide; CAG chr2 60511000 60511019 60511003 -
gctggtggttggctcttccc

SEQ ID NO: 176998 - DNA, 20 bp, Artificial Sequence
  Synthetic oligonucleotide; AGG chr2 60510999 60511018 60511002 -
ctggtggttggctcttcccc

SEQ ID NO: 176999 - DNA, 20 bp, Artificial Sequence
  Synthetic oligonucleotide; CAG chr2 60510992 60511011 60510995 -
ttggctcttccccaggctct

SEQ ID NO: 177000 - DNA, 20 bp, Artificial Sequence
  Synthetic oligonucleotide; TAG chr2 60510979 60510998 60510982 -
aggctctcagcccctctttc

SEQ ID NO: 177001 - DNA, 20 bp, Artificial Sequence
  Synthetic oligonucleotide; GAG chr2 60510977 60510996 60510980 -
gctctcagcccctctttcta

SEQ ID NO: 177002 - DNA, 20 bp, Artificial Sequence
  Synthetic oligonucleotide; AGG chr2 60510976 60510995 60510979 -
ctctcagcccctctttctag

SEQ ID NO: 177003 - DNA, 20 bp, Artificial Sequence
  Synthetic oligonucleotide; AAG chr2 60510965 60510984 60510968 -
tctttctagaggctccacct

SEQ ID NO: 177004 - DNA, 20 bp, Artificial Sequence
  Synthetic oligonucleotide; TAG chr2 60510959 60510978 60510962 -
tagaggctccacctaagcct

SEQ ID NO: 177005 - DNA, 20 bp, Artificial Sequence
  Synthetic oligonucleotide; AGG chr2 60510958 60510977 60510961 -
agaggctccacctaagcctt

SEQ ID NO: 177006 - DNA, 20 bp, Artificial Sequence
  Synthetic oligonucleotide; AAG chr2 60510954 60510973 60510957 -
gctccacctaagccttagga

SEQ ID NO: 177007 - DNA, 20 bp, Artificial Sequence
  Synthetic oligonucleotide; TGG chr2 60510942 60510961 60510945 -
ccttaggaaagactttcgtt

SEQ ID NO: 177008 - DNA, 20 bp, Artificial Sequence
  Synthetic oligonucleotide; TGG chr2 60510932 60510951 60510935 -
gactttcgtttggttttaac

SEQ ID NO: 177009 - DNA, 20 bp, Artificial Sequence
  Synthetic oligonucleotide; AAG chr2 60510921 60510940 60510924 -
ggttttaactggctcctgtc

SEQ ID NO: 177010 - DNA, 20 bp, Artificial Sequence
  Synthetic oligonucleotide; AGG chr2 60510920 60510939 60510923 -
gttttaactggctcctgtca

SEQ ID NO: 177011 - DNA, 20 bp, Artificial Sequence
  Synthetic oligonucleotide; GGG chr2 60510919 60510938 60510922 -
ttttaactggctcctgtcaa

SEQ ID NO: 177012 - DNA, 20 bp, Artificial Sequence
  Synthetic oligonucleotide; CAG chr2 60510905 60510924 60510908 -
tgtcaagggttcccccaaac

SEQ ID NO: 177013 - DNA, 20 bp, Artificial Sequence
  Synthetic oligonucleotide; AAG chr2 60510872 60510891 60510875 -
ccatttacattataatgcaa

SEQ ID NO: 177014 - DNA, 20 bp, Artificial Sequence
  Synthetic oligonucleotide; TGG chr2 60510859 60510878 60510862 -
aatgcaaaagctcttccctg

SEQ ID NO: 177015 - DNA, 20 bp, Artificial Sequence
  Synthetic oligonucleotide; GGG chr2 60510858 60510877 60510861 -
atgcaaaagctcttccctgt

SEQ ID NO: 177016 - DNA, 20 bp, Artificial Sequence
  Synthetic oligonucleotide; CAG chr2 60510852 60510871 60510855 -
aagctcttccctgtgggtct

SEQ ID NO: 177017 - DNA, 20 bp, Artificial Sequence
  Synthetic oligonucleotide; AGG chr2 60510851 60510870 60510854 -
agctcttccctgtgggtctc

SEQ ID NO: 177018 - DNA, 20 bp, Artificial Sequence
  Synthetic oligonucleotide; GGG chr2 60510850 60510869 60510853 -
gctcttccctgtgggtctca

SEQ ID NO: 177019 - DNA, 20 bp, Artificial Sequence
  Synthetic oligonucleotide; TGG chr2 60510843 60510862 60510846 -
cctgtgggtctcagggcctg

SEQ ID NO: 177020 - DNA, 20 bp, Artificial Sequence
  Synthetic oligonucleotide; GGG chr2 60510842 60510861 60510845 -
ctgtgggtctcagggcctgt

SEQ ID NO: 177021 - DNA, 20 bp, Artificial Sequence
  Synthetic oligonucleotide; GGG chr2 60510841 60510860 60510844 -
tgtgggtctcagggcctgtg

SEQ ID NO: 177022 - DNA, 20 bp, Artificial Sequence
  Synthetic oligonucleotide; TGG chr2 60510834 60510853 60510837 -
ctcagggcctgtggggaaaa

SEQ ID NO: 177023 - DNA, 20 bp, Artificial Sequence
  Synthetic oligonucleotide; TGG chr2 60510827 60510846 60510830 -
cctgtggggaaaatggaatc

SEQ ID NO: 177024 - DNA, 20 bp, Artificial Sequence
  Synthetic oligonucleotide; AAG chr2 60510815 60510834 60510818 -
atggaatctggctcaaaccc

SEQ ID NO: 177025 - DNA, 20 bp, Artificial Sequence
  Synthetic oligonucleotide; AAG chr2 60510807 60510826 60510810 -
tggctcaaacccaagatcca

SEQ ID NO: 177026 - DNA, 20 bp, Artificial Sequence
  Synthetic oligonucleotide; AAG chr2 60510801 60510820 60510804 -
aaacccaagatccaaagcta

SEQ ID NO: 177027 - DNA, 20 bp, Artificial Sequence
  Synthetic oligonucleotide; CAG chr2 60510792 60510811 60510795 -
atccaaagctaaagtgcccc

SEQ ID NO: 177028 - DNA, 20 bp, Artificial Sequence
  Synthetic oligonucleotide; AGG chr2 60510791 60510810 60510794 -
tccaaagctaaagtgccccc

SEQ ID NO: 177029 - DNA, 20 bp, Artificial Sequence
  Synthetic oligonucleotide; TGG chr2 60510787 60510806 60510790 -
aagctaaagtgcccccaggt

SEQ ID NO: 177030 - DNA, 20 bp, Artificial Sequence
  Synthetic oligonucleotide; GGG chr2 60510786 60510805 60510789 -
agctaaagtgcccccaggtt

SEQ ID NO: 177031 - DNA, 20 bp, Artificial Sequence
  Synthetic oligonucleotide; CAG chr2 60510775 60510794 60510778 -
ccccaggttgggctgcctga

SEQ ID NO: 177032 - DNA, 20 bp, Artificial Sequence
  Synthetic oligonucleotide; TAG chr2 60510767 60510786 60510770 -
tgggctgcctgacagtttta

SEQ ID NO: 177033 - DNA, 20 bp, Artificial Sequence
  Synthetic oligonucleotide; TGG chr2 60510761 60510780 60510764 -
gcctgacagttttatagata

SEQ ID NO: 177034 - DNA, 20 bp, Artificial Sequence
  Synthetic oligonucleotide; GAG chr2 60510754 60510773 60510757 -
agttttatagatatggcatt

SEQ ID NO: 177035 - DNA, 20 bp, Artificial Sequence
  Synthetic oligonucleotide; TGG chr2 60510751 60510770 60510754 -
tttatagatatggcattgag

SEQ ID NO: 177036 - DNA, 20 bp, Artificial Sequence
  Synthetic oligonucleotide; TGG chr2 60510743 60510762 60510746 -
tatggcattgagtggcctcc

SEQ ID NO: 177037 - DNA, 20 bp, Artificial Sequence
  Synthetic oligonucleotide; CAG chr2 60510740 60510759 60510743 -
ggcattgagtggcctcctgg

SEQ ID NO: 177038 - DNA, 20 bp, Artificial Sequence
  Synthetic oligonucleotide; TGG chr2 60510735 60510754 60510738 -
tgagtggcctcctggcagtt

SEQ ID NO: 177039 - DNA, 20 bp, Artificial Sequence
  Synthetic oligonucleotide; AAG chr2 60510725 60510744 60510728 -
cctggcagtttggaattgtg

SEQ ID NO: 177040 - DNA, 20 bp, Artificial Sequence
  Synthetic oligonucleotide; AGG chr2 60510724 60510743 60510727 -
ctggcagtttggaattgtga

SEQ ID NO: 177041 - DNA, 20 bp, Artificial Sequence
  Synthetic oligonucleotide; TGG chr2 60510674 60510693 60510677 -
tttgaacacctgccacatgc

SEQ ID NO: 177042 - DNA, 20 bp, Artificial Sequence
  Synthetic oligonucleotide; GGG chr2 60510673 60510692 60510676 -
ttgaacacctgccacatgct

SEQ ID NO: 177043 - DNA, 20 bp, Artificial Sequence
  Synthetic oligonucleotide; CGG chr2 60510668 60510687 60510671 -
cacctgccacatgctgggaa

SEQ ID NO: 177044 - DNA, 20 bp, Artificial Sequence
  Synthetic oligonucleotide; TGG chr2 60510661 60510680 60510664 -
cacatgctgggaacggttct

SEQ ID NO: 177045 - DNA, 20 bp, Artificial Sequence
  Synthetic oligonucleotide; TGG chr2 60510655 60510674 60510658 -
ctgggaacggttcttggtgt

SEQ ID NO: 177046 - DNA, 20 bp, Artificial Sequence
  Synthetic oligonucleotide; GGG chr2 60510654 60510673 60510657 -
tgggaacggttcttggtgtt

SEQ ID NO: 177047 - DNA, 20 bp, Artificial Sequence
  Synthetic oligonucleotide; TAG chr2 60510649 60510668 60510652 -
acggttcttggtgttgggca

SEQ ID NO: 177048 - DNA, 20 bp, Artificial Sequence
  Synthetic oligonucleotide; AAG chr2 60510645 60510664 60510648 -
ttcttggtgttgggcataga

SEQ ID NO: 177049 - DNA, 20 bp, Artificial Sequence
  Synthetic oligonucleotide; TGG chr2 60510620 60510639 60510623 -
ttaaaaactccctgctcttg

SEQ ID NO: 177050 - DNA, 20 bp, Artificial Sequence
  Synthetic oligonucleotide; TAG chr2 60510606 60510625 60510609 -
ctcttgtggcaccccctttc

SEQ ID NO: 177051 - DNA, 20 bp, Artificial Sequence
  Synthetic oligonucleotide; TGG chr2 60510602 60510621 60510605 -
tgtggcaccccctttctagc

SEQ ID NO: 177052 - DNA, 20 bp, Artificial Sequence
  Synthetic oligonucleotide; GGG chr2 60510601 60510620 60510604 -
gtggcaccccctttctagct

SEQ ID NO: 177053 - DNA, 20 bp, Artificial Sequence
  Synthetic oligonucleotide; GGG chr2 60510600 60510619 60510603 -
tggcaccccctttctagctg

SEQ ID NO: 177054 - DNA, 20 bp, Artificial Sequence
  Synthetic oligonucleotide; GAG chr2 60510598 60510617 60510601 -
gcaccccctttctagctggg

SEQ ID NO: 177055 - DNA, 20 bp, Artificial Sequence
  Synthetic oligonucleotide; GAG chr2 60510596 60510615 60510599 -
accccctttctagctgggga

SEQ ID NO: 177056 - DNA, 20 bp, Artificial Sequence
  Synthetic oligonucleotide; CAG chr2 60510592 60510611 60510595 -
cctttctagctggggagaga

SEQ ID NO: 177057 - DNA, 20 bp, Artificial Sequence
  Synthetic oligonucleotide; AAG chr2 60510589 60510608 60510592 -
ttctagctggggagagacag

SEQ ID NO: 177058 - DNA, 20 bp, Artificial Sequence
  Synthetic oligonucleotide; TAG chr2 60510560 60510579 60510563 -
caataaatatgtgaattata

SEQ ID NO: 177059 - DNA, 20 bp, Artificial Sequence
  Synthetic oligonucleotide; TGG chr2 60510555 60510574 60510558 -
aatatgtgaattatatagta

SEQ ID NO: 177060 - DNA, 20 bp, Artificial Sequence
  Synthetic oligonucleotide; AAG chr2 60510551 60510570 60510554 -
tgtgaattatatagtatggc

SEQ ID NO: 177061 - DNA, 20 bp, Artificial Sequence
  Synthetic oligonucleotide; GAG chr2 60510549 60510568 60510552 -
tgaattatatagtatggcaa

SEQ ID NO: 177062 - DNA, 20 bp, Artificial Sequence
  Synthetic oligonucleotide; AAG chr2 60510546 60510565 60510549 -
attatatagtatggcaagag

SEQ ID NO: 177063 - DNA, 20 bp, Artificial Sequence
  Synthetic oligonucleotide; AAG chr2 60510521 60510540 60510524 -
caaactgcctgcacgaaaat

SEQ ID NO: 177064 - DNA, 20 bp, Artificial Sequence
  Synthetic oligonucleotide; AGG chr2 60510520 60510539 60510523 -
aaactgcctgcacgaaaata

SEQ ID NO: 177065 - DNA, 20 bp, Artificial Sequence
  Synthetic oligonucleotide; TGG chr2 60510517 60510536 60510520 -
ctgcctgcacgaaaataagg

SEQ ID NO: 177066 - DNA, 20 bp, Artificial Sequence
  Synthetic oligonucleotide; GGG chr2 60510516 60510535 60510519 -
tgcctgcacgaaaataaggt

SEQ ID NO: 177067 - DNA, 20 bp, Artificial Sequence
  Synthetic oligonucleotide; GGG chr2 60510515 60510534 60510518 -
gcctgcacgaaaataaggtg

SEQ ID NO: 177068 - DNA, 20 bp, Artificial Sequence
  Synthetic oligonucleotide; AAG chr2 60510512 60510531 60510515 -
tgcacgaaaataaggtgggg

SEQ ID NO: 177069 - DNA, 20 bp, Artificial Sequence
  Synthetic oligonucleotide; GAG chr2 60510510 60510529 60510513 -
cacgaaaataaggtggggaa

SEQ ID NO: 177070 - DNA, 20 bp, Artificial Sequence
  Synthetic oligonucleotide; AGG chr2 60510509 60510528 60510512 -
acgaaaataaggtggggaag

SEQ ID NO: 177071 - DNA, 20 bp, Artificial Sequence
  Synthetic oligonucleotide; GGG chr2 60510508 60510527 60510511 -
cgaaaataaggtggggaaga

SEQ ID NO: 177072 - DNA, 20 bp, Artificial Sequence
  Synthetic oligonucleotide; GGG chr2 60510507 60510526 60510510 -
gaaaataaggtggggaagag

SEQ ID NO: 177073 - DNA, 20 bp, Artificial Sequence
  Synthetic oligonucleotide; AAG chr2 60510503 60510522 60510506 -
ataaggtggggaagaggggt

SEQ ID NO: 177074 - DNA, 20 bp, Artificial Sequence
  Synthetic oligonucleotide; AGG chr2 60510502 60510521 60510505 -
taaggtggggaagaggggta

SEQ ID NO: 177075 - DNA, 20 bp, Artificial Sequence
  Synthetic oligonucleotide; GGG chr2 60510501 60510520 60510504 -
aaggtggggaagaggggtaa

SEQ ID NO: 177076 - DNA, 20 bp, Artificial Sequence
  Synthetic oligonucleotide; GGG chr2 60510500 60510519 60510503 -
aggtggggaagaggggtaag

SEQ ID NO: 177077 - DNA, 20 bp, Artificial Sequence
  Synthetic oligonucleotide; TGG chr2 60510493 60510512 60510496 -
gaagaggggtaaggggtgca

SEQ ID NO: 177078 - DNA, 20 bp, Artificial Sequence
  Synthetic oligonucleotide; CAG chr2 60510486 60510505 60510489 -
ggtaaggggtgcatggtgac

SEQ ID NO: 177079 - DNA, 20 bp, Artificial Sequence
  Synthetic oligonucleotide; AGG chr2 60510485 60510504 60510488 -
gtaaggggtgcatggtgacc

SEQ ID NO: 177080 - DNA, 20 bp, Artificial Sequence
  Synthetic oligonucleotide; TAG chr2 60510474 60510493 60510477 -
atggtgaccaggcttttaaa

SEQ ID NO: 177081 - DNA, 20 bp, Artificial Sequence
  Synthetic oligonucleotide; AGG chr2 60510473 60510492 60510476 -
tggtgaccaggcttttaaat

SEQ ID NO: 177082 - DNA, 20 bp, Artificial Sequence
  Synthetic oligonucleotide; TAG chr2 60510465 60510484 60510468 -
aggcttttaaataggataat

SEQ ID NO: 177083 - DNA, 20 bp, Artificial Sequence
  Synthetic oligonucleotide; AGG chr2 60510464 60510483 60510467 -
ggcttttaaataggataatt

SEQ ID NO: 177084 - DNA, 20 bp, Artificial Sequence
  Synthetic oligonucleotide; GGG chr2 60510463 60510482 60510466 -
gcttttaaataggataatta

SEQ ID NO: 177085 - DNA, 20 bp, Artificial Sequence
  Synthetic oligonucleotide; AAG chr2 60510460 60510479 60510463 -
tttaaataggataattaggg

SEQ ID NO: 177086 - DNA, 20 bp, Artificial Sequence
  Synthetic oligonucleotide; AGG chr2 60510459 60510478 60510462 -
ttaaataggataattaggga

SEQ ID NO: 177087 - DNA, 20 bp, Artificial Sequence
  Synthetic oligonucleotide; GAG chr2 60510450 60510469 60510453 -
ataattagggaaggcccaat

SEQ ID NO: 177088 - DNA, 20 bp, Artificial Sequence
  Synthetic oligonucleotide; AAG chr2 60510447 60510466 60510450 -
attagggaaggcccaatgag

SEQ ID NO: 177089 - DNA, 20 bp, Artificial Sequence
  Synthetic oligonucleotide; AAG chr2 60510442 60510461 60510445 -
ggaaggcccaatgagaagca

SEQ ID NO: 177090 - DNA, 20 bp, Artificial Sequence
  Synthetic oligonucleotide; AGG chr2 60510441 60510460 60510444 -
gaaggcccaatgagaagcaa

SEQ ID NO: 177091 - DNA, 20 bp, Artificial Sequence
  Synthetic oligonucleotide; AAG chr2 60510433 60510452 60510436 -
aatgagaagcaaaggctcca

SEQ ID NO: 177092 - DNA, 20 bp, Artificial Sequence
  Synthetic oligonucleotide; GAG chr2 60510431 60510450 60510434 -
tgagaagcaaaggctccaaa

SEQ ID NO: 177093 - DNA, 20 bp, Artificial Sequence
  Synthetic oligonucleotide; AGG chr2 60510430 60510449 60510433 -
gagaagcaaaggctccaaag

SEQ ID NO: 177094 - DNA, 20 bp, Artificial Sequence
  Synthetic oligonucleotide; GAG chr2 60510426 60510445 60510429 -
agcaaaggctccaaagaggt

SEQ ID NO: 177095 - DNA, 20 bp, Artificial Sequence
  Synthetic oligonucleotide; AGG chr2 60510425 60510444 60510428 -
gcaaaggctccaaagaggtg

SEQ ID NO: 177096 - DNA, 20 bp, Artificial Sequence
  Synthetic oligonucleotide; AAG chr2 60510422 60510441 60510425 -
aaggctccaaagaggtgagg

SEQ ID NO: 177097 - DNA, 20 bp, Artificial Sequence
  Synthetic oligonucleotide; TGG chr2 60510418 60510437 60510421 -
ctccaaagaggtgaggaagt

SEQ ID NO: 177098 - DNA, 20 bp, Artificial Sequence
  Synthetic oligonucleotide; GAG chr2 60510411 60510430 60510414 -
gaggtgaggaagttggccat

SEQ ID NO: 177099 - DNA, 20 bp, Artificial Sequence
  Synthetic oligonucleotide; GAG chr2 60510402 60510421 60510405 -
aagttggccatgagaatttt

SEQ ID NO: 177100 - DNA, 20 bp, Artificial Sequence
  Synthetic oligonucleotide; AAG chr2 60510399 60510418 60510402 -
ttggccatgagaattttgag

SEQ ID NO: 177101 - DNA, 20 bp, Artificial Sequence
  Synthetic oligonucleotide; TGG chr2 60510395 60510414 60510398 -
ccatgagaattttgagaaga

SEQ ID NO: 177102 - DNA, 20 bp, Artificial Sequence
  Synthetic oligonucleotide; CAG chr2 60510389 60510408 60510392 -
gaattttgagaagatggttc

SEQ ID NO: 177103 - DNA, 20 bp, Artificial Sequence
  Synthetic oligonucleotide; AGG chr2 60510388 60510407 60510391 -
aattttgagaagatggttcc

SEQ ID NO: 177104 - DNA, 20 bp, Artificial Sequence
  Synthetic oligonucleotide; AAG chr2 60510385 60510404 60510388 -
tttgagaagatggttccagg

SEQ ID NO: 177105 - DNA, 20 bp, Artificial Sequence
  Synthetic oligonucleotide; GAG chr2 60510383 60510402 60510386 -
tgagaagatggttccaggaa

SEQ ID NO: 177106 - DNA, 20 bp, Artificial Sequence
  Synthetic oligonucleotide; TAG chr2 60510376 60510395 60510379 -
atggttccaggaagagtgtg

SEQ ID NO: 177107 - DNA, 20 bp, Artificial Sequence
  Synthetic oligonucleotide; GAG chr2 60510374 60510393 60510377 -
ggttccaggaagagtgtgta

SEQ ID NO: 177108 - DNA, 20 bp, Artificial Sequence
  Synthetic oligonucleotide; GAG chr2 60510372 60510391 60510375 -
ttccaggaagagtgtgtaga

SEQ ID NO: 177109 - DNA, 20 bp, Artificial Sequence
  Synthetic oligonucleotide; CAG chr2 60510369 60510388 60510372 -
caggaagagtgtgtagagag

SEQ ID NO: 177110 - DNA, 20 bp, Artificial Sequence
  Synthetic oligonucleotide; GAG chr2 60510367 60510386 60510370 -
ggaagagtgtgtagagagca

SEQ ID NO: 177111 - DNA, 20 bp, Artificial Sequence
  Synthetic oligonucleotide; TGG chr2 60510345 60510364 60510348 -
gaccttgtgtgtaatacgcc

SEQ ID NO: 177112 - DNA, 20 bp, Artificial Sequence
  Synthetic oligonucleotide; TGG chr2 60510338 60510357 60510341 -
tgtgtaatacgcctggctac

SEQ ID NO: 177113 - DNA, 20 bp, Artificial Sequence
  Synthetic oligonucleotide; GAG chr2 60510336 60510355 60510339 -
tgtaatacgcctggctactg

SEQ ID NO: 177114 - DNA, 20 bp, Artificial Sequence
  Synthetic oligonucleotide; AGG chr2 60510335 60510354 60510338 -
gtaatacgcctggctactgg

SEQ ID NO: 177115 - DNA, 20 bp, Artificial Sequence
  Synthetic oligonucleotide; GAG chr2 60510333 60510352 60510336 -
aatacgcctggctactggag

SEQ ID NO: 177116 - DNA, 20 bp, Artificial Sequence
  Synthetic oligonucleotide; AGG chr2 60510332 60510351 60510335 -
atacgcctggctactggagg

SEQ ID NO: 177117 - DNA, 20 bp, Artificial Sequence
  Synthetic oligonucleotide; GAG chr2 60510330 60510349 60510333 -
acgcctggctactggaggag

SEQ ID NO: 177118 - DNA, 20 bp, Artificial Sequence
  Synthetic oligonucleotide; AAG chr2 60510326 60510345 60510329 -
ctggctactggaggaggagc

SEQ ID NO: 177119 - DNA, 20 bp, Artificial Sequence
  Synthetic oligonucleotide; AGG chr2 60510325 60510344 60510328 -
tggctactggaggaggagca

SEQ ID NO: 177120 - DNA, 20 bp, Artificial Sequence
  Synthetic oligonucleotide; GGG chr2 60510324 60510343 60510327 -
ggctactggaggaggagcaa

SEQ ID NO: 177121 - DNA, 20 bp, Artificial Sequence
  Synthetic oligonucleotide; GGG chr2 60510323 60510342 60510326 -
gctactggaggaggagcaag

SEQ ID NO: 177122 - DNA, 20 bp, Artificial Sequence
  Synthetic oligonucleotide; GAG chr2 60510316 60510335 60510319 -
gaggaggagcaaggggccct

SEQ ID NO: 177123 - DNA, 20 bp, Artificial Sequence
  Synthetic oligonucleotide; AGG chr2 60510315 60510334 60510318 -
aggaggagcaaggggccctg

SEQ ID NO: 177124 - DNA, 20 bp, Artificial Sequence
  Synthetic oligonucleotide; CAG chr2 60510311 60510330 60510314 -
ggagcaaggggccctgaggt

SEQ ID NO: 177125 - DNA, 20 bp, Artificial Sequence
  Synthetic oligonucleotide; GAG chr2 60510309 60510328 60510312 -
agcaaggggccctgaggtca

SEQ ID NO: 177126 - DNA, 20 bp, Artificial Sequence
  Synthetic oligonucleotide; TGG chr2 60510306 60510325 60510309 -
aaggggccctgaggtcagag

SEQ ID NO: 177127 - DNA, 20 bp, Artificial Sequence
  Synthetic oligonucleotide; AAG chr2 60510302 60510321 60510305 -
ggccctgaggtcagagtgga

SEQ ID NO: 177128 - DNA, 20 bp, Artificial Sequence
  Synthetic oligonucleotide; GAG chr2 60510300 60510319 60510303 -
ccctgaggtcagagtggaaa

SEQ ID NO: 177129 - DNA, 20 bp, Artificial Sequence
  Synthetic oligonucleotide; CAG chr2 60510295 60510314 60510298 -
aggtcagagtggaaagagtg

SEQ ID NO: 177130 - DNA, 20 bp, Artificial Sequence
  Synthetic oligonucleotide; AGG chr2 60510294 60510313 60510297 -
ggtcagagtggaaagagtgc

SEQ ID NO: 177131 - DNA, 20 bp, Artificial Sequence
  Synthetic oligonucleotide; GAG chr2 60510292 60510311 60510295 -
tcagagtggaaagagtgcag

SEQ ID NO: 177132 - DNA, 20 bp, Artificial Sequence
  Synthetic oligonucleotide; AGG chr2 60510291 60510310 60510294 -
cagagtggaaagagtgcagg

SEQ ID NO: 177133 - DNA, 20 bp, Artificial Sequence
  Synthetic oligonucleotide; GAG chr2 60510289 60510308 60510292 -
gagtggaaagagtgcaggag

SEQ ID NO: 177134 - DNA, 20 bp, Artificial Sequence
  Synthetic oligonucleotide; AGG chr2 60510288 60510307 60510291 -
agtggaaagagtgcaggagg

SEQ ID NO: 177135 - DNA, 20 bp, Artificial Sequence
  Synthetic oligonucleotide; GAG chr2 60510286 60510305 60510289 -
tggaaagagtgcaggaggag

SEQ ID NO: 177136 - DNA, 20 bp, Artificial Sequence
  Synthetic oligonucleotide; AGG chr2 60510285 60510304 60510288 -
ggaaagagtgcaggaggagg

SEQ ID NO: 177137 - DNA, 20 bp, Artificial Sequence
  Synthetic oligonucleotide; GAG chr2 60510283 60510302 60510286 -
aaagagtgcaggaggaggag

SEQ ID NO: 177138 - DNA, 20 bp, Artificial Sequence
  Synthetic oligonucleotide; GAG chr2 60510281 60510300 60510284 -
agagtgcaggaggaggagga

SEQ ID NO: 177139 - DNA, 20 bp, Artificial Sequence
  Synthetic oligonucleotide; AGG chr2 60510280 60510299 60510283 -
gagtgcaggaggaggaggag

SEQ ID NO: 177140 - DNA, 20 bp, Artificial Sequence
  Synthetic oligonucleotide; GAG chr2 60510278 60510297 60510281 -
gtgcaggaggaggaggagag

SEQ ID NO: 177141 - DNA, 20 bp, Artificial Sequence
  Synthetic oligonucleotide; CAG chr2 60510273 60510292 60510276 -
ggaggaggaggagaggagac

SEQ ID NO: 177142 - DNA, 20 bp, Artificial Sequence
  Synthetic oligonucleotide; TGG chr2 60510269 60510288 60510272 -
gaggaggagaggagaccagc

SEQ ID NO: 177143 - DNA, 20 bp, Artificial Sequence
  Synthetic oligonucleotide; AAG chr2 60510259 60510278 60510262 -
ggagaccagctggctccttg

SEQ ID NO: 177144 - DNA, 20 bp, Artificial Sequence
  Synthetic oligonucleotide; AGG chr2 60510258 60510277 60510261 -
gagaccagctggctccttga

SEQ ID NO: 177145 - DNA, 20 bp, Artificial Sequence
  Synthetic oligonucleotide; TAG chr2 60510252 60510271 60510255 -
agctggctccttgaaggacg

SEQ ID NO: 177146 - DNA, 20 bp, Artificial Sequence
  Synthetic oligonucleotide; GAG chr2 60510250 60510269 60510253 -
ctggctccttgaaggacgta

SEQ ID NO: 177147 - DNA, 20 bp, Artificial Sequence
  Synthetic oligonucleotide; CAG chr2 60510247 60510266 60510250 -
gctccttgaaggacgtagag

SEQ ID NO: 177148 - DNA, 20 bp, Artificial Sequence
  Synthetic oligonucleotide; AGG chr2 60510246 60510265 60510249 -
ctccttgaaggacgtagagc

SEQ ID NO: 177149 - DNA, 20 bp, Artificial Sequence
  Synthetic oligonucleotide; GGG chr2 60510245 60510264 60510248 -
tccttgaaggacgtagagca

SEQ ID NO: 177150 - DNA, 20 bp, Artificial Sequence
  Synthetic oligonucleotide; TGG chr2 60510237 60510256 60510240 -
ggacgtagagcagggatttt

SEQ ID NO: 177151 - DNA, 20 bp, Artificial Sequence
  Synthetic oligonucleotide; AAG chr2 60510224 60510243 60510227 -
ggatttttggctctgactcc

SEQ ID NO: 177152 - DNA, 20 bp, Artificial Sequence
  Synthetic oligonucleotide; AGG chr2 60510223 60510242 60510226 -
gatttttggctctgactcca

SEQ ID NO: 177153 - DNA, 20 bp, Artificial Sequence
  Synthetic oligonucleotide; GGG chr2 60510222 60510241 60510225 -
atttttggctctgactccaa

SEQ ID NO: 177154 - DNA, 20 bp, Artificial Sequence
  Synthetic oligonucleotide; GAG chr2 60510220 60510239 60510223 -
ttttggctctgactccaagg

SEQ ID NO: 177155 - DNA, 20 bp, Artificial Sequence
  Synthetic oligonucleotide; TGG chr2 60510216 60510235 60510219 -
ggctctgactccaagggaga

SEQ ID NO: 177156 - DNA, 20 bp, Artificial Sequence
  Synthetic oligonucleotide; AAG chr2 60510213 60510232 60510216 -
tctgactccaagggagatgg

SEQ ID NO: 177157 - DNA, 20 bp, Artificial Sequence
  Synthetic oligonucleotide; TGG chr2 60510206 60510225 60510209 -
ccaagggagatggaagccac

SEQ ID NO: 177158 - DNA, 20 bp, Artificial Sequence
  Synthetic oligonucleotide; GAG chr2 60510204 60510223 60510207 -
aagggagatggaagccactg

SEQ ID NO: 177159 - DNA, 20 bp, Artificial Sequence
  Synthetic oligonucleotide; AGG chr2 60510203 60510222 60510206 -
agggagatggaagccactgg

SEQ ID NO: 177160 - DNA, 20 bp, Artificial Sequence
  Synthetic oligonucleotide; GAG chr2 60510201 60510220 60510204 -
ggagatggaagccactggag

SEQ ID NO: 177161 - DNA, 20 bp, Artificial Sequence
  Synthetic oligonucleotide; CAG chr2 60510175 60510194 60510178 -
tgtcatatgacttgcgcttc

SEQ ID NO: 177162 - DNA, 20 bp, Artificial Sequence
  Synthetic oligonucleotide; GAG chr2 60510173 60510192 60510176 -
tcatatgacttgcgcttcca

SEQ ID NO: 177163 - DNA, 20 bp, Artificial Sequence
  Synthetic oligonucleotide; GAG chr2 60510171 60510190 60510174 -
atatgacttgcgcttccaga

SEQ ID NO: 177164 - DNA, 20 bp, Artificial Sequence
  Synthetic oligonucleotide; TGG chr2 60510163 60510182 60510166 -
tgcgcttccagagagtctct

SEQ ID NO: 177165 - DNA, 20 bp, Artificial Sequence
  Synthetic oligonucleotide; GGG chr2 60510162 60510181 60510165 -
gcgcttccagagagtctctt

SEQ ID NO: 177166 - DNA, 20 bp, Artificial Sequence
  Synthetic oligonucleotide; GAG chr2 60510150 60510169 60510153 -
agtctcttgggccgcatttt

SEQ ID NO: 177167 - DNA, 20 bp, Artificial Sequence
  Synthetic oligonucleotide; AAG chr2 60510143 60510162 60510146 -
tgggccgcattttgagactc

SEQ ID NO: 177168 - DNA, 20 bp, Artificial Sequence
  Synthetic oligonucleotide; TGG chr2 60510138 60510157 60510141 -
cgcattttgagactcaagca

SEQ ID NO: 177169 - DNA, 20 bp, Artificial Sequence
  Synthetic oligonucleotide; GGG chr2 60510137 60510156 60510140 -
gcattttgagactcaagcat

SEQ ID NO: 177170 - DNA, 20 bp, Artificial Sequence
  Synthetic oligonucleotide; AAG chr2 60510133 60510152 60510136 -
tttgagactcaagcatggga

SEQ ID NO: 177171 - DNA, 20 bp, Artificial Sequence
  Synthetic oligonucleotide; GAG chr2 60510129 60510148 60510132 -
agactcaagcatgggaaagt

SEQ ID NO: 177172 - DNA, 20 bp, Artificial Sequence
  Synthetic oligonucleotide; AGG chr2 60510128 60510147 60510131 -
gactcaagcatgggaaagtg

SEQ ID NO: 177173 - DNA, 20 bp, Artificial Sequence
  Synthetic oligonucleotide; CAG chr2 60510125 60510144 60510128 -
tcaagcatgggaaagtgagg

SEQ ID NO: 177174 - DNA, 20 bp, Artificial Sequence
  Synthetic oligonucleotide; AAG chr2 60510122 60510141 60510125 -
agcatgggaaagtgaggcag

SEQ ID NO: 177175 - DNA, 20 bp, Artificial Sequence
  Synthetic oligonucleotide; CAG chr2 60510119 60510138 60510122 -
atgggaaagtgaggcagaag

SEQ ID NO: 177176 - DNA, 20 bp, Artificial Sequence
  Synthetic oligonucleotide; CAG chr2 60510115 60510134 60510118 -
gaaagtgaggcagaagcagt

SEQ ID NO: 177177 - DNA, 20 bp, Artificial Sequence
  Synthetic oligonucleotide; AAG chr2 60510112 60510131 60510115 -
agtgaggcagaagcagtcag

SEQ ID NO: 177178 - DNA, 20 bp, Artificial Sequence
  Synthetic oligonucleotide; AGG chr2 60510111 60510130 60510114 -
gtgaggcagaagcagtcaga

SEQ ID NO: 177179 - DNA, 20 bp, Artificial Sequence
  Synthetic oligonucleotide; TAG chr2 60510101 60510120 60510104 -
agcagtcagaaggcaaattt

SEQ ID NO: 177180 - DNA, 20 bp, Artificial Sequence
  Synthetic oligonucleotide; AGG chr2 60510100 60510119 60510103 -
gcagtcagaaggcaaatttt

SEQ ID NO: 177181 - DNA, 20 bp, Artificial Sequence
  Synthetic oligonucleotide; AAG chr2 60510096 60510115 60510099 -
tcagaaggcaaattttaggc

SEQ ID NO: 177182 - DNA, 20 bp, Artificial Sequence
  Synthetic oligonucleotide; TGG chr2 60510090 60510109 60510093 -
ggcaaattttaggcaagtga

SEQ ID NO: 177183 - DNA, 20 bp, Artificial Sequence
  Synthetic oligonucleotide; TGG chr2 60510087 60510106 60510090 -
aaattttaggcaagtgatgg

SEQ ID NO: 177184 - DNA, 20 bp, Artificial Sequence
  Synthetic oligonucleotide; TGG chr2 60510082 60510101 60510085 -
ttaggcaagtgatggtggcg

SEQ ID NO: 177185 - DNA, 20 bp, Artificial Sequence
  Synthetic oligonucleotide; CAG chr2 60510077 60510096 60510080 -
caagtgatggtggcgtggac

SEQ ID NO: 177186 - DNA, 20 bp, Artificial Sequence
  Synthetic oligonucleotide; AGG chr2 60510076 60510095 60510079 -
aagtgatggtggcgtggacc

SEQ ID NO: 177187 - DNA, 20 bp, Artificial Sequence
  Synthetic oligonucleotide; GGG chr2 60510075 60510094 60510078 -
agtgatggtggcgtggacca

SEQ ID NO: 177188 - DNA, 20 bp, Artificial Sequence
  Synthetic oligonucleotide; TGG chr2 60510072 60510091 60510075 -
gatggtggcgtggaccaggg

SEQ ID NO: 177189 - DNA, 20 bp, Artificial Sequence
  Synthetic oligonucleotide; TGG chr2 60510069 60510088 60510072 -
ggtggcgtggaccagggtgg

SEQ ID NO: 177190 - DNA, 20 bp, Artificial Sequence
  Synthetic oligonucleotide; GGG chr2 60510068 60510087 60510071 -
gtggcgtggaccagggtggt

SEQ ID NO: 177191 - DNA, 20 bp, Artificial Sequence
  Synthetic oligonucleotide; GGG chr2 60510067 60510086 60510070 -
tggcgtggaccagggtggtg

SEQ ID NO: 177192 - DNA, 20 bp, Artificial Sequence
  Synthetic oligonucleotide; GAG chr2 60510060 60510079 60510063 -
gaccagggtggtggggacgt

SEQ ID NO: 177193 - DNA, 20 bp, Artificial Sequence
  Synthetic oligonucleotide; AAG chr2 60510057 60510076 60510060 -
cagggtggtggggacgtgag

SEQ ID NO: 177194 - DNA, 20 bp, Artificial Sequence
  Synthetic oligonucleotide; AGG chr2 60510056 60510075 60510059 -
agggtggtggggacgtgaga

SEQ ID NO: 177195 - DNA, 20 bp, Artificial Sequence
  Synthetic oligonucleotide; GGG chr2 60510055 60510074 60510058 -
gggtggtggggacgtgagaa

SEQ ID NO: 177196 - DNA, 20 bp, Artificial Sequence
  Synthetic oligonucleotide; GGG chr2 60510054 60510073 60510057 -
ggtggtggggacgtgagaag

SEQ ID NO: 177197 - DNA, 20 bp, Artificial Sequence
  Synthetic oligonucleotide; TGG chr2 60510050 60510069 60510053 -
gtggggacgtgagaaggggc

SEQ ID NO: 177198 - DNA, 20 bp, Artificial Sequence
  Synthetic oligonucleotide; TGG chr2 60510043 60510062 60510046 -
cgtgagaaggggctggattc

SEQ ID NO: 177199 - DNA, 20 bp, Artificial Sequence
  Synthetic oligonucleotide; AAG chr2 60510030 60510049 60510033 -
tggattctggacatacttcg

SEQ ID NO: 177200 - DNA, 20 bp, Artificial Sequence
  Synthetic oligonucleotide; AGG chr2 60510029 60510048 60510032 -
ggattctggacatacttcga

SEQ ID NO: 177201 - DNA, 20 bp, Artificial Sequence
  Synthetic oligonucleotide; GGG chr2 60510028 60510047 60510031 -
gattctggacatacttcgaa

SEQ ID NO: 177202 - DNA, 20 bp, Artificial Sequence
  Synthetic oligonucleotide; CGG chr2 60510020 60510039 60510023 -
acatacttcgaagggaaaac

SEQ ID NO: 177203 - DNA, 20 bp, Artificial Sequence
  Synthetic oligonucleotide; CAG chr2 60510017 60510036 60510020 -
tacttcgaagggaaaaccgg

SEQ ID NO: 177204 - DNA, 20 bp, Artificial Sequence
  Synthetic oligonucleotide; AGG chr2 60510016 60510035 60510019 -
acttcgaagggaaaaccggc

SEQ ID NO: 177205 - DNA, 20 bp, Artificial Sequence
  Synthetic oligonucleotide; TGG chr2 60510003 60510022 60510006 -
aaccggcaggatttgctgac

SEQ ID NO: 177206 - DNA, 20 bp, Artificial Sequence
  Synthetic oligonucleotide; TGG chr2 60510000 60510019 60510003 -
cggcaggatttgctgactgg

SEQ ID NO: 177207 - DNA, 20 bp, Artificial Sequence
  Synthetic oligonucleotide; GGG chr2 60509999 60510018 60510002 -
ggcaggatttgctgactggt

SEQ ID NO: 177208 - DNA, 20 bp, Artificial Sequence
  Synthetic oligonucleotide; TGG chr2 60509995 60510014 60509998 -
ggatttgctgactggtggga

SEQ ID NO: 177209 - DNA, 20 bp, Artificial Sequence
  Synthetic oligonucleotide; GGG chr2 60509994 60510013 60509997 -
gatttgctgactggtgggat

SEQ ID NO: 177210 - DNA, 20 bp, Artificial Sequence
  Synthetic oligonucleotide; AAG chr2 60509983 60510002 60509986 -
tggtgggatgggttgtatga

SEQ ID NO: 177211 - DNA, 20 bp, Artificial Sequence
  Synthetic oligonucleotide; AGG chr2 60509982 60510001 60509985 -
ggtgggatgggttgtatgaa

SEQ ID NO: 177212 - DNA, 20 bp, Artificial Sequence
  Synthetic oligonucleotide; AAG chr2 60509979 60509998 60509982 -
gggatgggttgtatgaaagg

SEQ ID NO: 177213 - DNA, 20 bp, Artificial Sequence
  Synthetic oligonucleotide; AGG chr2 60509978 60509997 60509981 -
ggatgggttgtatgaaagga

SEQ ID NO: 177214 - DNA, 20 bp, Artificial Sequence
  Synthetic oligonucleotide; GGG chr2 60509977 60509996 60509980 -
gatgggttgtatgaaaggaa

SEQ ID NO: 177215 - DNA, 20 bp, Artificial Sequence
  Synthetic oligonucleotide; GAG chr2 60509975 60509994 60509978 -
tgggttgtatgaaaggaagg

SEQ ID NO: 177216 - DNA, 20 bp, Artificial Sequence
  Synthetic oligonucleotide; AGG chr2 60509974 60509993 60509977 -
gggttgtatgaaaggaaggg

SEQ ID NO: 177217 - DNA, 20 bp, Artificial Sequence
  Synthetic oligonucleotide; GAG chr2 60509972 60509991 60509975 -
gttgtatgaaaggaagggag

SEQ ID NO: 177218 - DNA, 20 bp, Artificial Sequence
  Synthetic oligonucleotide; AAG chr2 60509967 60509986 60509970 -
atgaaaggaagggaggagtc

SEQ ID NO: 177219 - DNA, 20 bp, Artificial Sequence
  Synthetic oligonucleotide; TGG chr2 60509963 60509982 60509966 -
aaggaagggaggagtcaaga

SEQ ID NO: 177220 - DNA, 20 bp, Artificial Sequence
  Synthetic oligonucleotide; TGG chr2 60509947 60509966 60509950 -
aagatggaccccaaaatgtg

SEQ ID NO: 177221 - DNA, 20 bp, Artificial Sequence
  Synthetic oligonucleotide; CGG chr2 60509942 60509961 60509945 -
ggaccccaaaatgtgtggct

SEQ ID NO: 177222 - DNA, 20 bp, Artificial Sequence
  Synthetic oligonucleotide; TGG chr2 60509935 60509954 60509938 -
aaaatgtgtggctcggtgac

SEQ ID NO: 177223 - DNA, 20 bp, Artificial Sequence
  Synthetic oligonucleotide; GGG chr2 60509934 60509953 60509937 -
aaatgtgtggctcggtgact

SEQ ID NO: 177224 - DNA, 20 bp, Artificial Sequence
  Synthetic oligonucleotide; GAG chr2 60509932 60509951 60509935 -
atgtgtggctcggtgactgg

SEQ ID NO: 177225 - DNA, 20 bp, Artificial Sequence
  Synthetic oligonucleotide; TAG chr2 60509927 60509946 60509930 -
tggctcggtgactgggagaa

SEQ ID NO: 177226 - DNA, 20 bp, Artificial Sequence
  Synthetic oligonucleotide; TGG chr2 60509911 60509930 60509914 -
agaatagaattgctgtttat

SEQ ID NO: 177227 - DNA, 20 bp, Artificial Sequence
  Synthetic oligonucleotide; GGG chr2 60509910 60509929 60509913 -
gaatagaattgctgtttatt

SEQ ID NO: 177228 - DNA, 20 bp, Artificial Sequence
  Synthetic oligonucleotide; TGG chr2 60509906 60509925 60509909 -
agaattgctgtttattggga

SEQ ID NO: 177229 - DNA, 20 bp, Artificial Sequence
  Synthetic oligonucleotide; GGG chr2 60509905 60509924 60509908 -
gaattgctgtttattgggat

SEQ ID NO: 177230 - DNA, 20 bp, Artificial Sequence
  Synthetic oligonucleotide; CAG chr2 60509901 60509920 60509904 -
tgctgtttattgggatgggc

SEQ ID NO: 177231 - DNA, 20 bp, Artificial Sequence
  Synthetic oligonucleotide; AAG chr2 60509897 60509916 60509900 -
gtttattgggatgggccaga

SEQ ID NO: 177232 - DNA, 20 bp, Artificial Sequence
  Synthetic oligonucleotide; AGG chr2 60509896 60509915 60509899 -
tttattgggatgggccagaa

SEQ ID NO: 177233 - DNA, 20 bp, Artificial Sequence
  Synthetic oligonucleotide; TGG chr2 60509890 60509909 60509893 -
gggatgggccagaaaggctg

SEQ ID NO: 177234 - DNA, 20 bp, Artificial Sequence
  Synthetic oligonucleotide; GAG chr2 60509888 60509907 60509891 -
gatgggccagaaaggctgtg

SEQ ID NO: 177235 - DNA, 20 bp, Artificial Sequence
  Synthetic oligonucleotide; AGG chr2 60509887 60509906 60509890 -
atgggccagaaaggctgtgg

SEQ ID NO: 177236 - DNA, 20 bp, Artificial Sequence
  Synthetic oligonucleotide; CAG chr2 60509880 60509899 60509883 -
agaaaggctgtggaggtgct

SEQ ID NO: 177237 - DNA, 20 bp, Artificial Sequence
  Synthetic oligonucleotide; GAG chr2 60509878 60509897 60509881 -
aaaggctgtggaggtgctca

SEQ ID NO: 177238 - DNA, 20 bp, Artificial Sequence
  Synthetic oligonucleotide; AGG chr2 60509877 60509896 60509880 -
aaggctgtggaggtgctcag

SEQ ID NO: 177239 - DNA, 20 bp, Artificial Sequence
  Synthetic oligonucleotide; TGG chr2 60509873 60509892 60509876 -
ctgtggaggtgctcagagga

SEQ ID NO: 177240 - DNA, 20 bp, Artificial Sequence
  Synthetic oligonucleotide; GGG chr2 60509872 60509891 60509875 -
tgtggaggtgctcagaggat

SEQ ID NO: 177241 - DNA, 20 bp, Artificial Sequence
  Synthetic oligonucleotide; TGG chr2 60509863 60509882 60509866 -
gctcagaggatgggtgtgtc

SEQ ID NO: 177242 - DNA, 20 bp, Artificial Sequence
  Synthetic oligonucleotide; GGG chr2 60509862 60509881 60509865 -
ctcagaggatgggtgtgtct

SEQ ID NO: 177243 - DNA, 20 bp, Artificial Sequence
  Synthetic oligonucleotide; GGG chr2 60509861 60509880 60509864 -
tcagaggatgggtgtgtctg

SEQ ID NO: 177244 - DNA, 20 bp, Artificial Sequence
  Synthetic oligonucleotide; CAG chr2 60509844 60509863 60509847 -
ctggggctccttcaccactt

SEQ ID NO: 177245 - DNA, 20 bp, Artificial Sequence
  Synthetic oligonucleotide; AGG chr2 60509843 60509862 60509846 -
tggggctccttcaccacttc

SEQ ID NO: 177246 - DNA, 20 bp, Artificial Sequence
  Synthetic oligonucleotide; CAG chr2 60509836 60509855 60509839 -
ccttcaccacttcaggactt

SEQ ID NO: 177247 - DNA, 20 bp, Artificial Sequence
  Synthetic oligonucleotide; TGG chr2 60509833 60509852 60509836 -
tcaccacttcaggacttcag

SEQ ID NO: 177248 - DNA, 20 bp, Artificial Sequence
  Synthetic oligonucleotide; TAG chr2 60509826 60509845 60509829 -
ttcaggacttcagtggatgc

SEQ ID NO: 177249 - DNA, 20 bp, Artificial Sequence
  Synthetic oligonucleotide; CAG chr2 60509809 60509828 60509812 -
tgctagactactgccctgtt

SEQ ID NO: 177250 - DNA, 20 bp, Artificial Sequence
  Synthetic oligonucleotide; AGG chr2 60509808 60509827 60509811 -
gctagactactgccctgttc

SEQ ID NO: 177251 - DNA, 20 bp, Artificial Sequence
  Synthetic oligonucleotide; AAG chr2 60509805 60509824 60509808 -
agactactgccctgttcagg

SEQ ID NO: 177252 - DNA, 20 bp, Artificial Sequence
  Synthetic oligonucleotide; GAG chr2 60509797 60509816 60509800 -
gccctgttcaggaagatcgt

SEQ ID NO: 177253 - DNA, 20 bp, Artificial Sequence
  Synthetic oligonucleotide; AGG chr2 60509796 60509815 60509799 -
ccctgttcaggaagatcgtg

SEQ ID NO: 177254 - DNA, 20 bp, Artificial Sequence
  Synthetic oligonucleotide; GGG chr2 60509795 60509814 60509798 -
cctgttcaggaagatcgtga

SEQ ID NO: 177255 - DNA, 20 bp, Artificial Sequence
  Synthetic oligonucleotide; GGG chr2 60509794 60509813 60509797 -
ctgttcaggaagatcgtgag

SEQ ID NO: 177256 - DNA, 20 bp, Artificial Sequence
  Synthetic oligonucleotide; AAG chr2 60509790 60509809 60509793 -
tcaggaagatcgtgagggga

SEQ ID NO: 177257 - DNA, 20 bp, Artificial Sequence
  Synthetic oligonucleotide; GAG chr2 60509788 60509807 60509791 -
aggaagatcgtgaggggaaa

SEQ ID NO: 177258 - DNA, 20 bp, Artificial Sequence
  Synthetic oligonucleotide; GAG chr2 60509786 60509805 60509789 -
gaagatcgtgaggggaaaga

SEQ ID NO: 177259 - DNA, 20 bp, Artificial Sequence
  Synthetic oligonucleotide; TAG chr2 60509783 60509802 60509786 -
gatcgtgaggggaaagagag

SEQ ID NO: 177260 - DNA, 20 bp, Artificial Sequence
  Synthetic oligonucleotide; TGG chr2 60509769 60509788 60509772 -
agagagtagccccccgattg

SEQ ID NO: 177261 - DNA, 20 bp, Artificial Sequence
  Synthetic oligonucleotide; CGG chr2 60509761 60509780 60509764 -
gccccccgattgtggctgtt

SEQ ID NO: 177262 - DNA, 20 bp, Artificial Sequence
  Synthetic oligonucleotide; GAG chr2 60509759 60509778 60509762 -
cccccgattgtggctgttcg

SEQ ID NO: 177263 - DNA, 20 bp, Artificial Sequence
  Synthetic oligonucleotide; GAG chr2 60509757 60509776 60509760 -
cccgattgtggctgttcgga

SEQ ID NO: 177264 - DNA, 20 bp, Artificial Sequence
  Synthetic oligonucleotide; CAG chr2 60509751 60509770 60509754 -
tgtggctgttcggagagccc

SEQ ID NO: 177265 - DNA, 20 bp, Artificial Sequence
  Synthetic oligonucleotide; TAG chr2 60509737 60509756 60509740 -
gagccccagttgactgccta

SEQ ID NO: 177266 - DNA, 20 bp, Artificial Sequence
  Synthetic oligonucleotide; GAG chr2 60509732 60509751 60509735 -
ccagttgactgcctatagct

SEQ ID NO: 177267 - DNA, 20 bp, Artificial Sequence
  Synthetic oligonucleotide; AAG chr2 60509722 60509741 60509725 -
gcctatagctgagatgattt

SEQ ID NO: 177268 - DNA, 20 bp, Artificial Sequence
  Synthetic oligonucleotide; GAG chr2 60509717 60509736 60509720 -
tagctgagatgatttaagtc

SEQ ID NO: 177269 - DNA, 20 bp, Artificial Sequence
  Synthetic oligonucleotide; TGG chr2 60509709 60509728 60509712 -
atgatttaagtcgagttctt

SEQ ID NO: 177270 - DNA, 20 bp, Artificial Sequence
  Synthetic oligonucleotide; GGG chr2 60509708 60509727 60509711 -
tgatttaagtcgagttcttt

SEQ ID NO: 177271 - DNA, 20 bp, Artificial Sequence
  Synthetic oligonucleotide; GGG chr2 60509707 60509726 60509710 -
gatttaagtcgagttctttg

SEQ ID NO: 177272 - DNA, 20 bp, Artificial Sequence
  Synthetic oligonucleotide; GAG chr2 60509705 60509724 60509708 -
tttaagtcgagttctttggg

SEQ ID NO: 177273 - DNA, 20 bp, Artificial Sequence
  Synthetic oligonucleotide; AGG chr2 60509704 60509723 60509707 -
ttaagtcgagttctttgggg

SEQ ID NO: 177274 - DNA, 20 bp, Artificial Sequence
  Synthetic oligonucleotide; GGG chr2 60509703 60509722 60509706 -
taagtcgagttctttgggga

SEQ ID NO: 177275 - DNA, 20 bp, Artificial Sequence
  Synthetic oligonucleotide; CAG chr2 60509699 60509718 60509702 -
tcgagttctttggggagggc

SEQ ID NO: 177276 - DNA, 20 bp, Artificial Sequence
  Synthetic oligonucleotide; AGG chr2 60509698 60509717 60509701 -
cgagttctttggggagggcc

SEQ ID NO: 177277 - DNA, 20 bp, Artificial Sequence
  Synthetic oligonucleotide; TAG chr2 60509642 60509661 60509645 -
tttccttctctgttgttctt

SEQ ID NO: 177278 - DNA, 20 bp, Artificial Sequence
  Synthetic oligonucleotide; AAG chr2 60509633 60509652 60509636 -
ctgttgttctttagctacca

SEQ ID NO: 177279 - DNA, 20 bp, Artificial Sequence
  Synthetic oligonucleotide; CAG chr2 60509611 60509630 60509614 -
gacaacttgatcttttgatc

SEQ ID NO: 177280 - DNA, 20 bp, Artificial Sequence
  Synthetic oligonucleotide; AAG chr2 60509607 60509626 60509610 -
acttgatcttttgatccaga

SEQ ID NO: 177281 - DNA, 20 bp, Artificial Sequence
  Synthetic oligonucleotide; CAG chr2 60509561 60509580 60509564 -
tttcccttcgtttgttttct

SEQ ID NO: 177282 - DNA, 20 bp, Artificial Sequence
  Synthetic oligonucleotide; AGG chr2 60509560 60509579 60509563 -
ttcccttcgtttgttttctc

SEQ ID NO: 177283 - DNA, 20 bp, Artificial Sequence
  Synthetic oligonucleotide; CAG chr2 60509554 60509573 60509557 -
tcgtttgttttctcaggtct

SEQ ID NO: 177284 - DNA, 20 bp, Artificial Sequence
  Synthetic oligonucleotide; AGG chr2 60509553 60509572 60509556 -
cgtttgttttctcaggtctc

SEQ ID NO: 177285 - DNA, 20 bp, Artificial Sequence
  Synthetic oligonucleotide; TAG chr2 60509550 60509569 60509553 -
ttgttttctcaggtctcagg

SEQ ID NO: 177286 - DNA, 20 bp, Artificial Sequence
  Synthetic oligonucleotide; GAG chr2 60509541 60509560 60509544 -
caggtctcaggtagaccatc

SEQ ID NO: 177287 - DNA, 20 bp, Artificial Sequence
  Synthetic oligonucleotide; TGG chr2 60509527 60509546 60509530 -
accatcgagctgctgttaat

SEQ ID NO: 177288 - DNA, 20 bp, Artificial Sequence
  Synthetic oligonucleotide; TAG chr2 60509517 60509536 60509520 -
tgctgttaattggtgatatt

SEQ ID NO: 177289 - DNA, 20 bp, Artificial Sequence
  Synthetic oligonucleotide; AGG chr2 60509516 60509535 60509519 -
gctgttaattggtgatattt

SEQ ID NO: 177290 - DNA, 20 bp, Artificial Sequence
  Synthetic oligonucleotide; TGG chr2 60509511 60509530 60509514 -
taattggtgatatttaggaa

SEQ ID NO: 177291 - DNA, 20 bp, Artificial Sequence
  Synthetic oligonucleotide; GGG chr2 60509510 60509529 60509513 -
aattggtgatatttaggaat

SEQ ID NO: 177292 - DNA, 20 bp, Artificial Sequence
  Synthetic oligonucleotide; TGG chr2 60509506 60509525 60509509 -
ggtgatatttaggaatgggt

SEQ ID NO: 177293 - DNA, 20 bp, Artificial Sequence
  Synthetic oligonucleotide; AAG chr2 60509503 60509522 60509506 -
gatatttaggaatgggttgg

SEQ ID NO: 177294 - DNA, 20 bp, Artificial Sequence
  Synthetic oligonucleotide; TGG chr2 60509487 60509506 60509490 -
ttggaagctgcatcttttcc

SEQ ID NO: 177295 - DNA, 20 bp, Artificial Sequence
  Synthetic oligonucleotide; CAG chr2 60509478 60509497 60509481 -
gcatcttttcctggacttct

SEQ ID NO: 177296 - DNA, 20 bp, Artificial Sequence
  Synthetic oligonucleotide; AGG chr2 60509477 60509496 60509480 -
catcttttcctggacttctc

SEQ ID NO: 177297 - DNA, 20 bp, Artificial Sequence
  Synthetic oligonucleotide; CAG chr2 60509444 60509463 60509447 -
ccacgtgtcttgtgcttcca

SEQ ID NO: 177298 - DNA, 20 bp, Artificial Sequence
  Synthetic oligonucleotide; GAG chr2 60509430 60509449 60509433 -
cttccacagaaccgttttct

SEQ ID NO: 177299 - DNA, 20 bp, Artificial Sequence
  Synthetic oligonucleotide; TGG chr2 60509418 60509437 60509421 -
cgttttctgagacgtccgtg

SEQ ID NO: 177300 - DNA, 20 bp, Artificial Sequence
  Synthetic oligonucleotide; CAG chr2 60509403 60509422 60509406 -
ccgtgtggctctgctgtgct

SEQ ID NO: 177301 - DNA, 20 bp, Artificial Sequence
  Synthetic oligonucleotide; AGG chr2 60509402 60509421 60509405 -
cgtgtggctctgctgtgctc

SEQ ID NO: 177302 - DNA, 20 bp, Artificial Sequence
  Synthetic oligonucleotide; CGG chr2 60509395 60509414 60509398 -
ctctgctgtgctcaggtcca

SEQ ID NO: 177303 - DNA, 20 bp, Artificial Sequence
  Synthetic oligonucleotide; TAG chr2 60509391 60509410 60509394 -
gctgtgctcaggtccacggt

SEQ ID NO: 177304 - DNA, 20 bp, Artificial Sequence
  Synthetic oligonucleotide; TGG chr2 60509384 60509403 60509387 -
tcaggtccacggttagcccc

SEQ ID NO: 177305 - DNA, 20 bp, Artificial Sequence
  Synthetic oligonucleotide; TGG chr2 60509379 60509398 60509382 -
tccacggttagcccctggct

SEQ ID NO: 177306 - DNA, 20 bp, Artificial Sequence
  Synthetic oligonucleotide; CGG chr2 60509367 60509386 60509370 -
ccctggcttggaatttcttc

SEQ ID NO: 177307 - DNA, 20 bp, Artificial Sequence
  Synthetic oligonucleotide; CAG chr2 60509342 60509361 60509345 -
atccgttgtcctcttttcca

SEQ ID NO: 177308 - DNA, 20 bp, Artificial Sequence
  Synthetic oligonucleotide; AGG chr2 60509341 60509360 60509344 -
tccgttgtcctcttttccac

SEQ ID NO: 177309 - DNA, 20 bp, Artificial Sequence
  Synthetic oligonucleotide; TGG chr2 60509313 60509332 60509316 -
ctcctccctttccccatttc

SEQ ID NO: 177310 - DNA, 20 bp, Artificial Sequence
  Synthetic oligonucleotide; AAG chr2 60509309 60509328 60509312 -
tccctttccccatttctgga

SEQ ID NO: 177311 - DNA, 20 bp, Artificial Sequence
  Synthetic oligonucleotide; AAG chr2 60509306 60509325 60509309 -
ctttccccatttctggaaag

SEQ ID NO: 177312 - DNA, 20 bp, Artificial Sequence
  Synthetic oligonucleotide; TGG chr2 60509303 60509322 60509306 -
tccccatttctggaaagaag

SEQ ID NO: 177313 - DNA, 20 bp, Artificial Sequence
  Synthetic oligonucleotide; GGG chr2 60509302 60509321 60509305 -
ccccatttctggaaagaagt

SEQ ID NO: 177314 - DNA, 20 bp, Artificial Sequence
  Synthetic oligonucleotide; TGG chr2 60509298 60509317 60509301 -
atttctggaaagaagtgggc

SEQ ID NO: 177315 - DNA, 20 bp, Artificial Sequence
  Synthetic oligonucleotide; TAG chr2 60509291 60509310 60509294 -
gaaagaagtgggctggcaca

SEQ ID NO: 177316 - DNA, 20 bp, Artificial Sequence
  Synthetic oligonucleotide; GAG chr2 60509289 60509308 60509292 -
aagaagtgggctggcacata

SEQ ID NO: 177317 - DNA, 20 bp, Artificial Sequence
  Synthetic oligonucleotide; AAG chr2 60509273 60509292 60509276 -
catagagcctttttccttga

SEQ ID NO: 177318 - DNA, 20 bp, Artificial Sequence
  Synthetic oligonucleotide; AGG chr2 60509272 60509291 60509275 -
atagagcctttttccttgaa

SEQ ID NO: 177319 - DNA, 20 bp, Artificial Sequence
  Synthetic oligonucleotide; GAG chr2 60509270 60509289 60509273 -
agagcctttttccttgaaag

SEQ ID NO: 177320 - DNA, 20 bp, Artificial Sequence
  Synthetic oligonucleotide; GAG chr2 60509268 60509287 60509271 -
agcctttttccttgaaagga

SEQ ID NO: 177321 - DNA, 20 bp, Artificial Sequence
  Synthetic oligonucleotide; CAG chr2 60509263 60509282 60509266 -
ttttccttgaaaggagagtg

SEQ ID NO: 177322 - DNA, 20 bp, Artificial Sequence
  Synthetic oligonucleotide; GAG chr2 60509261 60509280 60509264 -
ttccttgaaaggagagtgca

SEQ ID NO: 177323 - DNA, 20 bp, Artificial Sequence
  Synthetic oligonucleotide; TGG chr2 60509250 60509269 60509253 -
gagagtgcagagccctctaa

SEQ ID NO: 177324 - DNA, 20 bp, Artificial Sequence
  Synthetic oligonucleotide; AAG chr2 60509245 60509264 60509248 -
tgcagagccctctaatggaa

SEQ ID NO: 177325 - DNA, 20 bp, Artificial Sequence
  Synthetic oligonucleotide; TGG chr2 60509230 60509249 60509233 -
tggaaaagtaaaaaaattct

SEQ ID NO: 177326 - DNA, 20 bp, Artificial Sequence
  Synthetic oligonucleotide; AAG chr2 60509211 60509230 60509214 -
ttggaatcctcataacatcc

SEQ ID NO: 177327 - DNA, 20 bp, Artificial Sequence
  Synthetic oligonucleotide; CAG chr2 60509207 60509226 60509210 -
aatcctcataacatccaagc

SEQ ID NO: 177328 - DNA, 20 bp, Artificial Sequence
  Synthetic oligonucleotide; AAG chr2 60509201 60509220 60509204 -
cataacatccaagccagcca

SEQ ID NO: 177329 - DNA, 20 bp, Artificial Sequence
  Synthetic oligonucleotide; GAG chr2 60509196 60509215 60509199 -
catccaagccagccaaagct

SEQ ID NO: 177330 - DNA, 20 bp, Artificial Sequence
  Synthetic oligonucleotide; AAG chr2 60509190 60509209 60509193 -
agccagccaaagctgagacc

SEQ ID NO: 177331 - DNA, 20 bp, Artificial Sequence
  Synthetic oligonucleotide; TGG chr2 60509179 60509198 60509182 -
gctgagaccaagtaaattat

SEQ ID NO: 177332 - DNA, 20 bp, Artificial Sequence
  Synthetic oligonucleotide; GGG chr2 60509178 60509197 60509181 -
ctgagaccaagtaaattatt

SEQ ID NO: 177333 - DNA, 20 bp, Artificial Sequence
  Synthetic oligonucleotide; GGG chr2 60509177 60509196 60509180 -
tgagaccaagtaaattattg

SEQ ID NO: 177334 - DNA, 20 bp, Artificial Sequence
  Synthetic oligonucleotide; GGG chr2 60509176 60509195 60509179 -
gagaccaagtaaattattgg

SEQ ID NO: 177335 - DNA, 20 bp, Artificial Sequence
  Synthetic oligonucleotide; GGG chr2 60509175 60509194 60509178 -
agaccaagtaaattattggg

SEQ ID NO: 177336 - DNA, 20 bp, Artificial Sequence
  Synthetic oligonucleotide; AAG chr2 60509164 60509183 60509167 -
attattggggggtaatttgc

SEQ ID NO: 177337 - DNA, 20 bp, Artificial Sequence
  Synthetic oligonucleotide; AGG chr2 60509163 60509182 60509166 -
ttattggggggtaatttgca

SEQ ID NO: 177338 - DNA, 20 bp, Artificial Sequence
  Synthetic oligonucleotide; GGG chr2 60509162 60509181 60509165 -
tattggggggtaatttgcaa

SEQ ID NO: 177339 - DNA, 20 bp, Artificial Sequence
  Synthetic oligonucleotide; CAG chr2 60509128 60509147 60509131 -
caaattgctttcttgtttct

SEQ ID NO: 177340 - DNA, 20 bp, Artificial Sequence
  Synthetic oligonucleotide; TAG chr2 60509115 60509134 60509118 -
tgtttctcagcttgaatctt

SEQ ID NO: 177341 - DNA, 20 bp, Artificial Sequence
  Synthetic oligonucleotide; CAG chr2 60509110 60509129 60509113 -
ctcagcttgaatctttagac

SEQ ID NO: 177342 - DNA, 20 bp, Artificial Sequence
  Synthetic oligonucleotide; AAG chr2 60509107 60509126 60509110 -
agcttgaatctttagaccag

SEQ ID NO: 177343 - DNA, 20 bp, Artificial Sequence
  Synthetic oligonucleotide; CGG chr2 60509094 60509113 60509097 -
agaccagaagcctgtgattt

SEQ ID NO: 177344 - DNA, 20 bp, Artificial Sequence
  Synthetic oligonucleotide; GAG chr2 60509092 60509111 60509095 -
accagaagcctgtgatttcg

SEQ ID NO: 177345 - DNA, 20 bp, Artificial Sequence
  Synthetic oligonucleotide; GAG chr2 60509083 60509102 60509086 -
ctgtgatttcggagtctgat

SEQ ID NO: 177346 - DNA, 20 bp, Artificial Sequence
  Synthetic oligonucleotide; AAG chr2 60509076 60509095 60509079 -
ttcggagtctgatgagaaat

SEQ ID NO: 177347 - DNA, 20 bp, Artificial Sequence
  Synthetic oligonucleotide; GAG chr2 60509074 60509093 60509077 -
cggagtctgatgagaaataa

SEQ ID NO: 177348 - DNA, 20 bp, Artificial Sequence
  Synthetic oligonucleotide; CAG chr2 60509070 60509089 60509073 -
gtctgatgagaaataagagt

SEQ ID NO: 177349 - DNA, 20 bp, Artificial Sequence
  Synthetic oligonucleotide; GAG chr2 60509056 60509075 60509059 -
aagagtcagtgtttctgtct

SEQ ID NO: 177350 - DNA, 20 bp, Artificial Sequence
  Synthetic oligonucleotide; TGG chr2 60509042 60509061 60509045 -
ctgtctgagccacttttctt

SEQ ID NO: 177351 - DNA, 20 bp, Artificial Sequence
  Synthetic oligonucleotide; GAG chr2 60509040 60509059 60509043 -
gtctgagccacttttctttg

SEQ ID NO: 177352 - DNA, 20 bp, Artificial Sequence
  Synthetic oligonucleotide; AGG chr2 60509039 60509058 60509042 -
tctgagccacttttctttgg

SEQ ID NO: 177353 - DNA, 20 bp, Artificial Sequence
  Synthetic oligonucleotide; GAG chr2 60509037 60509056 60509040 -
tgagccacttttctttggag

SEQ ID NO: 177354 - DNA, 20 bp, Artificial Sequence
  Synthetic oligonucleotide; AGG chr2 60509036 60509055 60509039 -
gagccacttttctttggagg

SEQ ID NO: 177355 - DNA, 20 bp, Artificial Sequence
  Synthetic oligonucleotide; TAG chr2 60509028 60509047 60509031 -
tttctttggaggaggtcctc

SEQ ID NO: 177356 - DNA, 20 bp, Artificial Sequence
  Synthetic oligonucleotide; AGG chr2 60509027 60509046 60509030 -
ttctttggaggaggtcctct

SEQ ID NO: 177357 - DNA, 20 bp, Artificial Sequence
  Synthetic oligonucleotide; TAG chr2 60509021 60509040 60509024 -
ggaggaggtcctctaggctt

SEQ ID NO: 177358 - DNA, 20 bp, Artificial Sequence
  Synthetic oligonucleotide; CAG chr2 60509012 60509031 60509015 -
cctctaggctttagcaatca

SEQ ID NO: 177359 - DNA, 20 bp, Artificial Sequence
  Synthetic oligonucleotide; AAG chr2 60509009 60509028 60509012 -
ctaggctttagcaatcacag

SEQ ID NO: 177360 - DNA, 20 bp, Artificial Sequence
  Synthetic oligonucleotide; CAG chr2 60509003 60509022 60509006 -
tttagcaatcacagaagaac

SEQ ID NO: 177361 - DNA, 20 bp, Artificial Sequence
  Synthetic oligonucleotide; CAG chr2 60508997 60509016 60509000 -
aatcacagaagaaccagtga

SEQ ID NO: 177362 - DNA, 20 bp, Artificial Sequence
  Synthetic oligonucleotide; AGG chr2 60508996 60509015 60508999 -
atcacagaagaaccagtgac

SEQ ID NO: 177363 - DNA, 20 bp, Artificial Sequence
  Synthetic oligonucleotide; TAG chr2 60508983 60509002 60508986 -
cagtgacaggttccttgtca

SEQ ID NO: 177364 - DNA, 20 bp, Artificial Sequence
  Synthetic oligonucleotide; AGG chr2 60508982 60509001 60508985 -
agtgacaggttccttgtcat

SEQ ID NO: 177365 - DNA, 20 bp, Artificial Sequence
  Synthetic oligonucleotide; GAG chr2 60508980 60508999 60508983 -
tgacaggttccttgtcatag

SEQ ID NO: 177366 - DNA, 20 bp, Artificial Sequence
  Synthetic oligonucleotide; GAG chr2 60508978 60508997 60508981 -
acaggttccttgtcatagga

SEQ ID NO: 177367 - DNA, 20 bp, Artificial Sequence
  Synthetic oligonucleotide; TGG chr2 60508970 60508989 60508973 -
cttgtcataggagagctcct

SEQ ID NO: 177368 - DNA, 20 bp, Artificial Sequence
  Synthetic oligonucleotide; CAG chr2 60508963 60508982 60508966 -
taggagagctccttggtcct

SEQ ID NO: 177369 - DNA, 20 bp, Artificial Sequence
  Synthetic oligonucleotide; AGG chr2 60508962 60508981 60508965 -
aggagagctccttggtcctc

SEQ ID NO: 177370 - DNA, 20 bp, Artificial Sequence
  Synthetic oligonucleotide; AAG chr2 60508953 60508972 60508956 -
ccttggtcctcaggattcaa

SEQ ID NO: 177371 - DNA, 20 bp, Artificial Sequence
  Synthetic oligonucleotide; AAG chr2 60508943 60508962 60508946 -
caggattcaaaagacacctt

SEQ ID NO: 177372 - DNA, 20 bp, Artificial Sequence
  Synthetic oligonucleotide; TAG chr2 60508940 60508959 60508943 -
gattcaaaagacaccttaag

SEQ ID NO: 177373 - DNA, 20 bp, Artificial Sequence
  Synthetic oligonucleotide; CAG chr2 60508937 60508956 60508940 -
tcaaaagacaccttaagtag

SEQ ID NO: 177374 - DNA, 20 bp, Artificial Sequence
  Synthetic oligonucleotide; TGG chr2 60508934 60508953 60508937 -
aaagacaccttaagtagcag

SEQ ID NO: 177375 - DNA, 20 bp, Artificial Sequence
  Synthetic oligonucleotide; GGG chr2 60508933 60508952 60508936 -
aagacaccttaagtagcagt

SEQ ID NO: 177376 - DNA, 20 bp, Artificial Sequence
  Synthetic oligonucleotide; TAG chr2 60508930 60508949 60508933 -
acaccttaagtagcagtggg

SEQ ID NO: 177377 - DNA, 20 bp, Artificial Sequence
  Synthetic oligonucleotide; AGG chr2 60508929 60508948 60508932 -
caccttaagtagcagtgggt

SEQ ID NO: 177378 - DNA, 20 bp, Artificial Sequence
  Synthetic oligonucleotide; GGG chr2 60508928 60508947 60508931 -
accttaagtagcagtgggta

SEQ ID NO: 177379 - DNA, 20 bp, Artificial Sequence
  Synthetic oligonucleotide; AAG chr2 60508922 60508941 60508925 -
agtagcagtgggtagggcgt

SEQ ID NO: 177380 - DNA, 20 bp, Artificial Sequence
  Synthetic oligonucleotide; AAG chr2 60508906 60508925 60508909 -
gcgtaagtttaacatccctc

SEQ ID NO: 177381 - DNA, 20 bp, Artificial Sequence
  Synthetic oligonucleotide; AGG chr2 60508905 60508924 60508908 -
cgtaagtttaacatccctca

SEQ ID NO: 177382 - DNA, 20 bp, Artificial Sequence
  Synthetic oligonucleotide; TAG chr2 60508902 60508921 60508905 -
aagtttaacatccctcaagg

SEQ ID NO: 177383 - DNA, 20 bp, Artificial Sequence
  Synthetic oligonucleotide; AGG chr2 60508901 60508920 60508904 -
agtttaacatccctcaaggt

SEQ ID NO: 177384 - DNA, 20 bp, Artificial Sequence
  Synthetic oligonucleotide; TAG chr2 60508895 60508914 60508898 -
acatccctcaaggtaggcct

SEQ ID NO: 177385 - DNA, 20 bp, Artificial Sequence
  Synthetic oligonucleotide; AGG chr2 60508894 60508913 60508897 -
catccctcaaggtaggcctt

SEQ ID NO: 177386 - DNA, 20 bp, Artificial Sequence
  Synthetic oligonucleotide; TGG chr2 60508872 60508891 60508875 -
gtttccctctgtcccctcta

SEQ ID NO: 177387 - DNA, 20 bp, Artificial Sequence
  Synthetic oligonucleotide; TGG chr2 60508866 60508885 60508869 -
ctctgtcccctctatggtgc

SEQ ID NO: 177388 - DNA, 20 bp, Artificial Sequence
  Synthetic oligonucleotide; TAG chr2 60508851 60508870 60508854 -
ggtgctggctttgccacatg

SEQ ID NO: 177389 - DNA, 20 bp, Artificial Sequence
  Synthetic oligonucleotide; TGG chr2 60508836 60508855 60508839 -
acatgtagaacaaactcttc

SEQ ID NO: 177390 - DNA, 20 bp, Artificial Sequence
  Synthetic oligonucleotide; TAG chr2 60508828 60508847 60508831 -
aacaaactcttctggaatca

SEQ ID NO: 177391 - DNA, 20 bp, Artificial Sequence
  Synthetic oligonucleotide; AGG chr2 60508827 60508846 60508830 -
acaaactcttctggaatcat

SEQ ID NO: 177392 - DNA, 20 bp, Artificial Sequence
  Synthetic oligonucleotide; AAG chr2 60508818 60508837 60508821 -
tctggaatcataggtaaccc

SEQ ID NO: 177393 - DNA, 20 bp, Artificial Sequence
  Synthetic oligonucleotide; AGG chr2 60508817 60508836 60508820 -
ctggaatcataggtaaccca

SEQ ID NO: 177394 - DNA, 20 bp, Artificial Sequence
  Synthetic oligonucleotide; GGG chr2 60508816 60508835 60508819 -
tggaatcataggtaacccaa

SEQ ID NO: 177395 - DNA, 20 bp, Artificial Sequence
  Synthetic oligonucleotide; GGG chr2 60508815 60508834 60508818 -
ggaatcataggtaacccaag

SEQ ID NO: 177396 - DNA, 20 bp, Artificial Sequence
  Synthetic oligonucleotide; GGG chr2 60508814 60508833 60508817 -
gaatcataggtaacccaagg

SEQ ID NO: 177397 - DNA, 20 bp, Artificial Sequence
  Synthetic oligonucleotide; GAG chr2 60508812 60508831 60508815 -
atcataggtaacccaagggg

SEQ ID NO: 177398 - DNA, 20 bp, Artificial Sequence
  Synthetic oligonucleotide; CAG chr2 60508807 60508826 60508810 -
aggtaacccaagggggagct

SEQ ID NO: 177399 - DNA, 20 bp, Artificial Sequence
  Synthetic oligonucleotide; GAG chr2 60508805 60508824 60508808 -
gtaacccaagggggagctca

SEQ ID NO: 177400 - DNA, 20 bp, Artificial Sequence
  Synthetic oligonucleotide; AAG chr2 60508802 60508821 60508805 -
acccaagggggagctcagag

SEQ ID NO: 177401 - DNA, 20 bp, Artificial Sequence
  Synthetic oligonucleotide; GAG chr2 60508800 60508819 60508803 -
ccaagggggagctcagagaa

SEQ ID NO: 177402 - DNA, 20 bp, Artificial Sequence
  Synthetic oligonucleotide; CAG chr2 60508795 60508814 60508798 -
ggggagctcagagaagagtc

SEQ ID NO: 177403 - DNA, 20 bp, Artificial Sequence
  Synthetic oligonucleotide; AGG chr2 60508794 60508813 60508797 -
gggagctcagagaagagtcc

SEQ ID NO: 177404 - DNA, 20 bp, Artificial Sequence
  Synthetic oligonucleotide; CAG chr2 60508787 60508806 60508790 -
cagagaagagtccaggctgc

SEQ ID NO: 177405 - DNA, 20 bp, Artificial Sequence
  Synthetic oligonucleotide; AAG chr2 60508780 60508799 60508783 -
gagtccaggctgccagtgca

SEQ ID NO: 177406 - DNA, 20 bp, Artificial Sequence
  Synthetic oligonucleotide; AGG chr2 60508779 60508798 60508782 -
agtccaggctgccagtgcaa

SEQ ID NO: 177407 - DNA, 20 bp, Artificial Sequence
  Synthetic oligonucleotide; CAG chr2 60508774 60508793 60508777 -
aggctgccagtgcaaaggtc

SEQ ID NO: 177408 - DNA, 20 bp, Artificial Sequence
  Synthetic oligonucleotide; AAG chr2 60508761 60508780 60508764 -
aaaggtccagccctgtcgcc

SEQ ID NO: 177409 - DNA, 20 bp, Artificial Sequence
  Synthetic oligonucleotide; AGG chr2 60508760 60508779 60508763 -
aaggtccagccctgtcgcca

SEQ ID NO: 177410 - DNA, 20 bp, Artificial Sequence
  Synthetic oligonucleotide; GAG chr2 60508758 60508777 60508761 -
ggtccagccctgtcgccaag

SEQ ID NO: 177411 - DNA, 20 bp, Artificial Sequence
  Synthetic oligonucleotide; CAG chr2 60508750 60508769 60508753 -
cctgtcgccaaggagaccct

SEQ ID NO: 177412 - DNA, 20 bp, Artificial Sequence
  Synthetic oligonucleotide; AGG chr2 60508749 60508768 60508752 -
ctgtcgccaaggagaccctc

SEQ ID NO: 177413 - DNA, 20 bp, Artificial Sequence
  Synthetic oligonucleotide; GGG chr2 60508748 60508767 60508751 -
tgtcgccaaggagaccctca

SEQ ID NO: 177414 - DNA, 20 bp, Artificial Sequence
  Synthetic oligonucleotide; CAG chr2 60508738 60508757 60508741 -
gagaccctcagggaaatgca

SEQ ID NO: 177415 - DNA, 20 bp, Artificial Sequence
  Synthetic oligonucleotide; AGG chr2 60508737 60508756 60508740 -
agaccctcagggaaatgcac

SEQ ID NO: 177416 - DNA, 20 bp, Artificial Sequence
  Synthetic oligonucleotide; CAG chr2 60508730 60508749 60508733 -
cagggaaatgcacaggcctc

SEQ ID NO: 177417 - DNA, 20 bp, Artificial Sequence
  Synthetic oligonucleotide; CGG chr2 60508718 60508737 60508721 -
caggcctccagctattccca

SEQ ID NO: 177418 - DNA, 20 bp, Artificial Sequence
  Synthetic oligonucleotide; TAG chr2 60508709 60508728 60508712 -
agctattcccacggcccctg

SEQ ID NO: 177419 - DNA, 20 bp, Artificial Sequence
  Synthetic oligonucleotide; GAG chr2 60508704 60508723 60508707 -
ttcccacggcccctgtagct

SEQ ID NO: 177420 - DNA, 20 bp, Artificial Sequence
  Synthetic oligonucleotide; CAG chr2 60508698 60508717 60508701 -
cggcccctgtagctgagcgc

SEQ ID NO: 177421 - DNA, 20 bp, Artificial Sequence
  Synthetic oligonucleotide; TGG chr2 60508687 60508706 60508690 -
gctgagcgccagcttcttcc

SEQ ID NO: 177422 - DNA, 20 bp, Artificial Sequence
  Synthetic oligonucleotide; GGG chr2 60508686 60508705 60508689 -
ctgagcgccagcttcttcct

SEQ ID NO: 177423 - DNA, 20 bp, Artificial Sequence
  Synthetic oligonucleotide; AAG chr2 60508681 60508700 60508684 -
cgccagcttcttcctgggcc

SEQ ID NO: 177424 - DNA, 20 bp, Artificial Sequence
  Synthetic oligonucleotide; GAG chr2 60508676 60508695 60508679 -
gcttcttcctgggccaagct

SEQ ID NO: 177425 - DNA, 20 bp, Artificial Sequence
  Synthetic oligonucleotide; AGG chr2 60508675 60508694 60508678 -
cttcttcctgggccaagctg

SEQ ID NO: 177426 - DNA, 20 bp, Artificial Sequence
  Synthetic oligonucleotide; TAG chr2 60508647 60508666 60508650 -
tcctgccgtgtccattctcc

SEQ ID NO: 177427 - DNA, 20 bp, Artificial Sequence
  Synthetic oligonucleotide; TGG chr2 60508631 60508650 60508634 -
ctcctagcaacgcttctctt

SEQ ID NO: 177428 - DNA, 20 bp, Artificial Sequence
  Synthetic oligonucleotide; CAG chr2 60508627 60508646 60508630 -
tagcaacgcttctctttggc

SEQ ID NO: 177429 - DNA, 20 bp, Artificial Sequence
  Synthetic oligonucleotide; TAG chr2 60508617 60508636 60508620 -
tctctttggccagtttgcca

SEQ ID NO: 177430 - DNA, 20 bp, Artificial Sequence
  Synthetic oligonucleotide; GAG chr2 60508609 60508628 60508612 -
gccagtttgccatagtacct

SEQ ID NO: 177431 - DNA, 20 bp, Artificial Sequence
  Synthetic oligonucleotide; AGG chr2 60508608 60508627 60508611 -
ccagtttgccatagtacctg

SEQ ID NO: 177432 - DNA, 20 bp, Artificial Sequence
  Synthetic oligonucleotide; AAG chr2 60508604 60508623 60508607 -
tttgccatagtacctgaggt

SEQ ID NO: 177433 - DNA, 20 bp, Artificial Sequence
  Synthetic oligonucleotide; CGG chr2 60508568 60508587 60508571 -
ctgccaaatgctttacatcc

SEQ ID NO: 177434 - DNA, 20 bp, Artificial Sequence
  Synthetic oligonucleotide; GAG chr2 60508566 60508585 60508569 -
gccaaatgctttacatcccg

SEQ ID NO: 177435 - DNA, 20 bp, Artificial Sequence
  Synthetic oligonucleotide; AGG chr2 60508565 60508584 60508568 -
ccaaatgctttacatcccgg

SEQ ID NO: 177436 - DNA, 20 bp, Artificial Sequence
  Synthetic oligonucleotide; AAG chr2 60508561 60508580 60508564 -
atgctttacatcccggagga

SEQ ID NO: 177437 - DNA, 20 bp, Artificial Sequence
  Synthetic oligonucleotide; AAG chr2 60508556 60508575 60508559 -
ttacatcccggaggaaagca

SEQ ID NO: 177438 - DNA, 20 bp, Artificial Sequence
  Synthetic oligonucleotide; CAG chr2 60508546 60508565 60508549 -
gaggaaagcaaagtcctctt

SEQ ID NO: 177439 - DNA, 20 bp, Artificial Sequence
  Synthetic oligonucleotide; CAG chr2 60508541 60508560 60508544 -
aagcaaagtcctcttcagaa

SEQ ID NO: 177440 - DNA, 20 bp, Artificial Sequence
  Synthetic oligonucleotide; AGG chr2 60508540 60508559 60508543 -
agcaaagtcctcttcagaac

SEQ ID NO: 177441 - DNA, 20 bp, Artificial Sequence
  Synthetic oligonucleotide; AAG chr2 60508535 60508554 60508538 -
agtcctcttcagaacaggaa

SEQ ID NO: 177442 - DNA, 20 bp, Artificial Sequence
  Synthetic oligonucleotide; CAG chr2 60508530 60508549 60508533 -
tcttcagaacaggaaaagtc

SEQ ID NO: 177443 - DNA, 20 bp, Artificial Sequence
  Synthetic oligonucleotide; CAG chr2 60508525 60508544 60508528 -
agaacaggaaaagtccagtg

SEQ ID NO: 177444 - DNA, 20 bp, Artificial Sequence
  Synthetic oligonucleotide; CAG chr2 60508504 60508523 60508507 -
agttccacactgtgctattc

SEQ ID NO: 177445 - DNA, 20 bp, Artificial Sequence
  Synthetic oligonucleotide; CAG chr2 60508494 60508513 60508497 -
tgtgctattccagaacctcc

SEQ ID NO: 177446 - DNA, 20 bp, Artificial Sequence
  Synthetic oligonucleotide; TAG chr2 60508473 60508492 60508476 -
agttgcattcctttgccaac

SEQ ID NO: 177447 - DNA, 20 bp, Artificial Sequence
  Synthetic oligonucleotide; AGG chr2 60508472 60508491 60508475 -
gttgcattcctttgccaact

SEQ ID NO: 177448 - DNA, 20 bp, Artificial Sequence
  Synthetic oligonucleotide; TAG chr2 60508461 60508480 60508464 -
ttgccaactaggtaatgtgc

SEQ ID NO: 177449 - DNA, 20 bp, Artificial Sequence
  Synthetic oligonucleotide; AGG chr2 60508460 60508479 60508463 -
tgccaactaggtaatgtgct

SEQ ID NO: 177450 - DNA, 20 bp, Artificial Sequence
  Synthetic oligonucleotide; GGG chr2 60508459 60508478 60508462 -
gccaactaggtaatgtgcta

SEQ ID NO: 177451 - DNA, 20 bp, Artificial Sequence
  Synthetic oligonucleotide; CAG chr2 60508444 60508463 60508447 -
tgctagggatatttgtctcg

SEQ ID NO: 177452 - DNA, 20 bp, Artificial Sequence
  Synthetic oligonucleotide; TGG chr2 60508437 60508456 60508440 -
gatatttgtctcgcagcaac

SEQ ID NO: 177453 - DNA, 20 bp, Artificial Sequence
  Synthetic oligonucleotide; TGG chr2 60508422 60508441 60508425 -
gcaactggcaaccccctgtt

SEQ ID NO: 177454 - DNA, 20 bp, Artificial Sequence
  Synthetic oligonucleotide; GGG chr2 60508421 60508440 60508424 -
caactggcaaccccctgttt

SEQ ID NO: 177455 - DNA, 20 bp, Artificial Sequence
  Synthetic oligonucleotide; AAG chr2 60508415 60508434 60508418 -
gcaaccccctgtttgggtaa

SEQ ID NO: 177456 - DNA, 20 bp, Artificial Sequence
  Synthetic oligonucleotide; CAG chr2 60508411 60508430 60508414 -
ccccctgtttgggtaaaagt

SEQ ID NO: 177457 - DNA, 20 bp, Artificial Sequence
  Synthetic oligonucleotide; CAG chr2 60508405 60508424 60508408 -
gtttgggtaaaagtcagact

SEQ ID NO: 177458 - DNA, 20 bp, Artificial Sequence
  Synthetic oligonucleotide; AGG chr2 60508404 60508423 60508407 -
tttgggtaaaagtcagactc

SEQ ID NO: 177459 - DNA, 20 bp, Artificial Sequence
  Synthetic oligonucleotide; GGG chr2 60508403 60508422 60508406 -
ttgggtaaaagtcagactca

SEQ ID NO: 177460 - DNA, 20 bp, Artificial Sequence
  Synthetic oligonucleotide; CGG chr2 60508397 60508416 60508400 -
aaaagtcagactcagggacc

SEQ ID NO: 177461 - DNA, 20 bp, Artificial Sequence
  Synthetic oligonucleotide; CAG chr2 60508391 60508410 60508394 -
cagactcagggacccggctg

SEQ ID NO: 177462 - DNA, 20 bp, Artificial Sequence
  Synthetic oligonucleotide; TGG chr2 60508376 60508395 60508379 -
ggctgcagtgcttgctcctg

SEQ ID NO: 177463 - DNA, 20 bp, Artificial Sequence
  Synthetic oligonucleotide; CAG chr2 60508367 60508386 60508370 -
gcttgctcctgtggcccctg

SEQ ID NO: 177464 - DNA, 20 bp, Artificial Sequence
  Synthetic oligonucleotide; AGG chr2 60508366 60508385 60508369 -
cttgctcctgtggcccctgc

SEQ ID NO: 177465 - DNA, 20 bp, Artificial Sequence
  Synthetic oligonucleotide; GGG chr2 60508365 60508384 60508368 -
ttgctcctgtggcccctgca

SEQ ID NO: 177466 - DNA, 20 bp, Artificial Sequence
  Synthetic oligonucleotide; GAG chr2 60508363 60508382 60508366 -
gctcctgtggcccctgcagg

SEQ ID NO: 177467 - DNA, 20 bp, Artificial Sequence
  Synthetic oligonucleotide; TGG chr2 60508358 60508377 60508361 -
tgtggcccctgcagggagtg

SEQ ID NO: 177468 - DNA, 20 bp, Artificial Sequence
  Synthetic oligonucleotide; TGG chr2 60508353 60508372 60508356 -
cccctgcagggagtgtggcc

SEQ ID NO: 177469 - DNA, 20 bp, Artificial Sequence
  Synthetic oligonucleotide; GGG chr2 60508352 60508371 60508355 -
ccctgcagggagtgtggcct

SEQ ID NO: 177470 - DNA, 20 bp, Artificial Sequence
  Synthetic oligonucleotide; GGG chr2 60508351 60508370 60508354 -
cctgcagggagtgtggcctg

SEQ ID NO: 177471 - DNA, 20 bp, Artificial Sequence
  Synthetic oligonucleotide; CAG chr2 60508332 60508351 60508335 -
ggggtgtaattctgcacacc

SEQ ID NO: 177472 - DNA, 20 bp, Artificial Sequence
  Synthetic oligonucleotide; AGG chr2 60508331 60508350 60508334 -
gggtgtaattctgcacaccc

SEQ ID NO: 177473 - DNA, 20 bp, Artificial Sequence
  Synthetic oligonucleotide; AAG chr2 60508328 60508347 60508331 -
tgtaattctgcacacccagg

SEQ ID NO: 177474 - DNA, 20 bp, Artificial Sequence
  Synthetic oligonucleotide; CAG chr2 60508302 60508321 60508305 -
ctctgtctcctctttcacat

SEQ ID NO: 177475 - DNA, 20 bp, Artificial Sequence
  Synthetic oligonucleotide; AGG chr2 60508301 60508320 60508304 -
tctgtctcctctttcacatc

SEQ ID NO: 177476 - DNA, 20 bp, Artificial Sequence
  Synthetic oligonucleotide; AAG chr2 60508278 60508297 60508281 -
ccttccctgtgtcctgaacc

SEQ ID NO: 177477 - DNA, 20 bp, Artificial Sequence
  Synthetic oligonucleotide; TGG chr2 60508273 60508292 60508276 -
cctgtgtcctgaaccaagtg

SEQ ID NO: 177478 - DNA, 20 bp, Artificial Sequence
  Synthetic oligonucleotide; GAG chr2 60508268 60508287 60508271 -
gtcctgaaccaagtgtggat

SEQ ID NO: 177479 - DNA, 20 bp, Artificial Sequence
  Synthetic oligonucleotide; GAG chr2 60508262 60508281 60508265 -
aaccaagtgtggatgagttt

SEQ ID NO: 177480 - DNA, 20 bp, Artificial Sequence
  Synthetic oligonucleotide; TAG chr2 60508251 60508270 60508254 -
gatgagtttgagcttcctcc

SEQ ID NO: 177481 - DNA, 20 bp, Artificial Sequence
  Synthetic oligonucleotide; TGG chr2 60508212 60508231 60508215 -
ttgttgttgttgttgttgtt

SEQ ID NO: 177482 - DNA, 20 bp, Artificial Sequence
  Synthetic oligonucleotide; GGG chr2 60508211 60508230 60508214 -
tgttgttgttgttgttgttt

SEQ ID NO: 177483 - DNA, 20 bp, Artificial Sequence
  Synthetic oligonucleotide; GGG chr2 60508210 60508229 60508213 -
gttgttgttgttgttgtttg

SEQ ID NO: 177484 - DNA, 20 bp, Artificial Sequence
  Synthetic oligonucleotide; GGG chr2 60508209 60508228 60508212 -
ttgttgttgttgttgtttgg

SEQ ID NO: 177485 - DNA, 20 bp, Artificial Sequence
  Synthetic oligonucleotide; TGG chr2 60508206 60508225 60508209 -
ttgttgttgttgtttggggg

SEQ ID NO: 177486 - DNA, 20 bp, Artificial Sequence
  Synthetic oligonucleotide; GGG chr2 60508205 60508224 60508208 -
tgttgttgttgtttgggggt

SEQ ID NO: 177487 - DNA, 20 bp, Artificial Sequence
  Synthetic oligonucleotide; GGG chr2 60508204 60508223 60508207 -
gttgttgttgtttgggggtg

SEQ ID NO: 177488 - DNA, 20 bp, Artificial Sequence
  Synthetic oligonucleotide; GGG chr2 60508203 60508222 60508206 -
ttgttgttgtttgggggtgg

SEQ ID NO: 177489 - DNA, 20 bp, Artificial Sequence
  Synthetic oligonucleotide; TAG chr2 60508200 60508219 60508203 -
ttgttgtttgggggtggggg

SEQ ID NO: 177490 - DNA, 20 bp, Artificial Sequence
  Synthetic oligonucleotide; CAG chr2 60508196 60508215 60508199 -
tgtttgggggtgggggtaga

SEQ ID NO: 177491 - DNA, 20 bp, Artificial Sequence
  Synthetic oligonucleotide; TGG chr2 60508190 60508209 60508193 -
ggggtgggggtagacagtgc

SEQ ID NO: 177492 - DNA, 20 bp, Artificial Sequence
  Synthetic oligonucleotide; GGG chr2 60508189 60508208 60508192 -
gggtgggggtagacagtgct

SEQ ID NO: 177493 - DNA, 20 bp, Artificial Sequence
  Synthetic oligonucleotide; CAG chr2 60508181 60508200 60508184 -
gtagacagtgctgggcctgt

SEQ ID NO: 177494 - DNA, 20 bp, Artificial Sequence
  Synthetic oligonucleotide; TAG chr2 60508173 60508192 60508176 -
tgctgggcctgtcagaattt

SEQ ID NO: 177495 - DNA, 20 bp, Artificial Sequence
  Synthetic oligonucleotide; AGG chr2 60508172 60508191 60508175 -
gctgggcctgtcagaatttt

SEQ ID NO: 177496 - DNA, 20 bp, Artificial Sequence
  Synthetic oligonucleotide; TGG chr2 60508168 60508187 60508171 -
ggcctgtcagaattttaggt

SEQ ID NO: 177497 - DNA, 20 bp, Artificial Sequence
  Synthetic oligonucleotide; GAG chr2 60508159 60508178 60508162 -
gaattttaggttggttcttt

SEQ ID NO: 177498 - DNA, 20 bp, Artificial Sequence
  Synthetic oligonucleotide; TAG chr2 60508143 60508162 60508146 -
ctttgagatgaataactact

SEQ ID NO: 177499 - DNA, 20 bp, Artificial Sequence
  Synthetic oligonucleotide; AAG chr2 60508113 60508132 60508116 -
tcaactacttttgtttgtga

SEQ ID NO: 177500 - DNA, 20 bp, Artificial Sequence
  Synthetic oligonucleotide; AAG chr2 60508109 60508128 60508112 -
ctacttttgtttgtgaaaga

SEQ ID NO: 177501 - DNA, 20 bp, Artificial Sequence
  Synthetic oligonucleotide; AGG chr2 60508108 60508127 60508111 -
tacttttgtttgtgaaagaa

SEQ ID NO: 177502 - DNA, 20 bp, Artificial Sequence
  Synthetic oligonucleotide; GGG chr2 60508107 60508126 60508110 -
acttttgtttgtgaaagaaa

SEQ ID NO: 177503 - DNA, 20 bp, Artificial Sequence
  Synthetic oligonucleotide; CAG chr2 60508104 60508123 60508107 -
tttgtttgtgaaagaaaggg

SEQ ID NO: 177504 - DNA, 20 bp, Artificial Sequence
  Synthetic oligonucleotide; AAG chr2 60508100 60508119 60508103 -
tttgtgaaagaaagggcagt

SEQ ID NO: 177505 - DNA, 20 bp, Artificial Sequence
  Synthetic oligonucleotide; GAG chr2 60508086 60508105 60508089 -
ggcagtaagcaccatgacat

SEQ ID NO: 177506 - DNA, 20 bp, Artificial Sequence
  Synthetic oligonucleotide; GAG chr2 60508084 60508103 60508087 -
cagtaagcaccatgacatga

SEQ ID NO: 177507 - DNA, 20 bp, Artificial Sequence
  Synthetic oligonucleotide; CAG chr2 60508076 60508095 60508079 -
accatgacatgagagaattt

SEQ ID NO: 177508 - DNA, 20 bp, Artificial Sequence
  Synthetic oligonucleotide; AGG chr2 60508075 60508094 60508078 -
ccatgacatgagagaatttc

SEQ ID NO: 177509 - DNA, 20 bp, Artificial Sequence
  Synthetic oligonucleotide; CAG chr2 60508032 60508051 60508035 -
gtgtttgcatctgtcgtgct

SEQ ID NO: 177510 - DNA, 20 bp, Artificial Sequence
  Synthetic oligonucleotide; TAG chr2 60508028 60508047 60508031 -
ttgcatctgtcgtgctcagt

SEQ ID NO: 177511 - DNA, 20 bp, Artificial Sequence
  Synthetic oligonucleotide; AGG chr2 60508027 60508046 60508030 -
tgcatctgtcgtgctcagtt

SEQ ID NO: 177512 - DNA, 20 bp, Artificial Sequence
  Synthetic oligonucleotide; GGG chr2 60508026 60508045 60508029 -
gcatctgtcgtgctcagtta

SEQ ID NO: 177513 - DNA, 20 bp, Artificial Sequence
  Synthetic oligonucleotide; TAG chr2 60508006 60508025 60508009 -
gggcattatccgtaacccca

SEQ ID NO: 177514 - DNA, 20 bp, Artificial Sequence
  Synthetic oligonucleotide; AGG chr2 60508005 60508024 60508008 -
ggcattatccgtaaccccat

SEQ ID NO: 177515 - DNA, 20 bp, Artificial Sequence
  Synthetic oligonucleotide; AAG chr2 60507991 60508010 60507994 -
ccccataggaaccaacaccg

SEQ ID NO: 177516 - DNA, 20 bp, Artificial Sequence
  Synthetic oligonucleotide; AAG chr2 60507974 60507993 60507977 -
ccgaagaccatatgatttta

SEQ ID NO: 177517 - DNA, 20 bp, Artificial Sequence
  Synthetic oligonucleotide; TAG chr2 60507968 60507987 60507971 -
accatatgattttaaagctt

SEQ ID NO: 177518 - DNA, 20 bp, Artificial Sequence
  Synthetic oligonucleotide; TAG chr2 60507913 60507932 60507916 -
ttttttttgttcttttgctt

SEQ ID NO: 177519 - DNA, 20 bp, Artificial Sequence
  Synthetic oligonucleotide; TAG chr2 60507891 60507910 60507894 -
gaaactgtaataataatcca

SEQ ID NO: 177520 - DNA, 20 bp, Artificial Sequence
  Synthetic oligonucleotide; TAG chr2 60507877 60507896 60507880 -
aatccatagtaattatccca

SEQ ID NO: 177521 - DNA, 20 bp, Artificial Sequence
  Synthetic oligonucleotide; CAG chr2 60507857 60507876 60507860 -
tagtatgctgtcctttgtta

SEQ ID NO: 177522 - DNA, 20 bp, Artificial Sequence
  Synthetic oligonucleotide; AGG chr2 60507856 60507875 60507859 -
agtatgctgtcctttgttac

SEQ ID NO: 177523 - DNA, 20 bp, Artificial Sequence
  Synthetic oligonucleotide; GAG chr2 60507854 60507873 60507857 -
tatgctgtcctttgttacag

SEQ ID NO: 177524 - DNA, 20 bp, Artificial Sequence
  Synthetic oligonucleotide; TGG chr2 60507848 60507867 60507851 -
gtcctttgttacaggagcat

SEQ ID NO: 177525 - DNA, 20 bp, Artificial Sequence
  Synthetic oligonucleotide; AAG chr2 60507836 60507855 60507839 -
aggagcattggattactgtg

SEQ ID NO: 177526 - DNA, 20 bp, Artificial Sequence
  Synthetic oligonucleotide; CAG chr2 60507819 60507838 60507822 -
gtgaagacgtgtcctgtata

SEQ ID NO: 177527 - DNA, 20 bp, Artificial Sequence
  Synthetic oligonucleotide; CAG chr2 60507810 60507829 60507813 -
tgtcctgtatacagtttcaa

SEQ ID NO: 177528 - DNA, 20 bp, Artificial Sequence
  Synthetic oligonucleotide; TGG chr2 60507735 60507754 60507738 -
gctttctgtcttgtgctgtt

SEQ ID NO: 177529 - DNA, 20 bp, Artificial Sequence
  Synthetic oligonucleotide; AAG chr2 60507732 60507751 60507735 -
ttctgtcttgtgctgtttgg

SEQ ID NO: 177530 - DNA, 20 bp, Artificial Sequence
  Synthetic oligonucleotide; TAG chr2 60507701 60507720 60507704 -
cacatttctgccatatgtct

SEQ ID NO: 177531 - DNA, 20 bp, Artificial Sequence
  Synthetic oligonucleotide; AAG chr2 60507696 60507715 60507699 -
ttctgccatatgtcttagaa

SEQ ID NO: 177532 - DNA, 20 bp, Artificial Sequence
  Synthetic oligonucleotide; TGG chr2 60507692 60507711 60507695 -
gccatatgtcttagaaaagc

SEQ ID NO: 177533 - DNA, 20 bp, Artificial Sequence
  Synthetic oligonucleotide; GGG chr2 60507691 60507710 60507694 -
ccatatgtcttagaaaagct

SEQ ID NO: 177534 - DNA, 20 bp, Artificial Sequence
  Synthetic oligonucleotide; GGG chr2 60507690 60507709 60507693 -
catatgtcttagaaaagctg

SEQ ID NO: 177535 - DNA, 20 bp, Artificial Sequence
  Synthetic oligonucleotide; TAG chr2 60507684 60507703 60507687 -
tcttagaaaagctggggact

SEQ ID NO: 177536 - DNA, 20 bp, Artificial Sequence
  Synthetic oligonucleotide; AAG chr2 60507681 60507700 60507684 -
tagaaaagctggggacttag

SEQ ID NO: 177537 - DNA, 20 bp, Artificial Sequence
  Synthetic oligonucleotide; CAG chr2 60507678 60507697 60507681 -
aaaagctggggacttagaag

SEQ ID NO: 177538 - DNA, 20 bp, Artificial Sequence
  Synthetic oligonucleotide; TAG chr2 60507675 60507694 60507678 -
agctggggacttagaagcag

SEQ ID NO: 177539 - DNA, 20 bp, Artificial Sequence
  Synthetic oligonucleotide; TAG chr2 60507666 60507685 60507669 -
cttagaagcagtagccgact

SEQ ID NO: 177540 - DNA, 20 bp, Artificial Sequence
  Synthetic oligonucleotide; AGG chr2 60507665 60507684 60507668 -
ttagaagcagtagccgactt

SEQ ID NO: 177541 - DNA, 20 bp, Artificial Sequence
  Synthetic oligonucleotide; CAG chr2 60507661 60507680 60507664 -
aagcagtagccgacttagga

SEQ ID NO: 177542 - DNA, 20 bp, Artificial Sequence
  Synthetic oligonucleotide; AAG chr2 60507657 60507676 60507660 -
agtagccgacttaggacagc

SEQ ID NO: 177543 - DNA, 20 bp, Artificial Sequence
  Synthetic oligonucleotide; CAG chr2 60507652 60507671 60507655 -
ccgacttaggacagcaagct

SEQ ID NO: 177544 - DNA, 20 bp, Artificial Sequence
  Synthetic oligonucleotide; CAG chr2 60507647 60507666 60507650 -
ttaggacagcaagctcagct

SEQ ID NO: 177545 - DNA, 20 bp, Artificial Sequence
  Synthetic oligonucleotide; AGG chr2 60507646 60507665 60507649 -
taggacagcaagctcagctc

SEQ ID NO: 177546 - DNA, 20 bp, Artificial Sequence
  Synthetic oligonucleotide; CGG chr2 60507641 60507660 60507644 -
cagcaagctcagctcaggtg

SEQ ID NO: 177547 - DNA, 20 bp, Artificial Sequence
  Synthetic oligonucleotide; GAG chr2 60507639 60507658 60507642 -
gcaagctcagctcaggtgcg

SEQ ID NO: 177548 - DNA, 20 bp, Artificial Sequence
  Synthetic oligonucleotide; AGG chr2 60507638 60507657 60507641 -
caagctcagctcaggtgcgg

SEQ ID NO: 177549 - DNA, 20 bp, Artificial Sequence
  Synthetic oligonucleotide; CAG chr2 60507635 60507654 60507638 -
gctcagctcaggtgcggagg

SEQ ID NO: 177550 - DNA, 20 bp, Artificial Sequence
  Synthetic oligonucleotide; AAG chr2 60507624 60507643 60507627 -
gtgcggaggcagccctgtgt

SEQ ID NO: 177551 - DNA, 20 bp, Artificial Sequence
  Synthetic oligonucleotide; GAG chr2 60507622 60507641 60507625 -
gcggaggcagccctgtgtaa

SEQ ID NO: 177552 - DNA, 20 bp, Artificial Sequence
  Synthetic oligonucleotide; CAG chr2 60507608 60507627 60507611 -
gtgtaagagactctgttatg

SEQ ID NO: 177553 - DNA, 20 bp, Artificial Sequence
  Synthetic oligonucleotide; GAG chr2 60507604 60507623 60507607 -
aagagactctgttatgcagt

SEQ ID NO: 177554 - DNA, 20 bp, Artificial Sequence
  Synthetic oligonucleotide; CAG chr2 60507592 60507611 60507595 -
tatgcagtgagctgttgaaa

SEQ ID NO: 177555 - DNA, 20 bp, Artificial Sequence
  Synthetic oligonucleotide; TGG chr2 60507582 60507601 60507585 -
gctgttgaaacagctgcatg

SEQ ID NO: 177556 - DNA, 20 bp, Artificial Sequence
  Synthetic oligonucleotide; CAG chr2 60507576 60507595 60507579 -
gaaacagctgcatgtggaaa

SEQ ID NO: 177557 - DNA, 20 bp, Artificial Sequence
  Synthetic oligonucleotide; GAG chr2 60507545 60507564 60507548 -
cttgcctgtcctcatttctt

SEQ ID NO: 177558 - DNA, 20 bp, Artificial Sequence
  Synthetic oligonucleotide; GAG chr2 60507543 60507562 60507546 -
tgcctgtcctcatttcttga

SEQ ID NO: 177559 - DNA, 20 bp, Artificial Sequence
  Synthetic oligonucleotide; AAG chr2 60507516 60507535 60507519 -
caaaacatctgaaaatgtaa

SEQ ID NO: 177560 - DNA, 20 bp, Artificial Sequence
  Synthetic oligonucleotide; AAG chr2 60507505 60507524 60507508 -
aaaatgtaaaagcacttcac

SEQ ID NO: 177561 - DNA, 20 bp, Artificial Sequence
  Synthetic oligonucleotide; AGG chr2 60507504 60507523 60507507 -
aaatgtaaaagcacttcaca

SEQ ID NO: 177562 - DNA, 20 bp, Artificial Sequence
  Synthetic oligonucleotide; TGG chr2 60507489 60507508 60507492 -
tcacaaggttttaacttttc

SEQ ID NO: 177563 - DNA, 20 bp, Artificial Sequence
  Synthetic oligonucleotide; CGG chr2 60507480 60507499 60507483 -
tttaacttttctggcttgaa

SEQ ID NO: 177564 - DNA, 20 bp, Artificial Sequence
  Synthetic oligonucleotide; AAG chr2 60507477 60507496 60507480 -
aacttttctggcttgaacgg

SEQ ID NO: 177565 - DNA, 20 bp, Artificial Sequence
  Synthetic oligonucleotide; CAG chr2 60507474 60507493 60507477 -
ttttctggcttgaacggaag

SEQ ID NO: 177566 - DNA, 20 bp, Artificial Sequence
  Synthetic oligonucleotide; AAG chr2 60507467 60507486 60507470 -
gcttgaacggaagcagcttc

SEQ ID NO: 177567 - DNA, 20 bp, Artificial Sequence
  Synthetic oligonucleotide; AAG chr2 60507459 60507478 60507462 -
ggaagcagcttcaagtcaac

SEQ ID NO: 177568 - DNA, 20 bp, Artificial Sequence
  Synthetic oligonucleotide; GAG chr2 60507457 60507476 60507460 -
aagcagcttcaagtcaacaa

SEQ ID NO: 177569 - DNA, 20 bp, Artificial Sequence
  Synthetic oligonucleotide; TAG chr2 60507449 60507468 60507452 -
tcaagtcaacaagagcacaa

SEQ ID NO: 177570 - DNA, 20 bp, Artificial Sequence
  Synthetic oligonucleotide; TAG chr2 60507440 60507459 60507443 -
caagagcacaatagtctttg

SEQ ID NO: 177571 - DNA, 20 bp, Artificial Sequence
  Synthetic oligonucleotide; AGG chr2 60507439 60507458 60507442 -
aagagcacaatagtctttgt

SEQ ID NO: 177572 - DNA, 20 bp, Artificial Sequence
  Synthetic oligonucleotide; TGG chr2 60507433 60507452 60507436 -
acaatagtctttgtaggttt

SEQ ID NO: 177573 - DNA, 20 bp, Artificial Sequence
  Synthetic oligonucleotide; CAG chr2 60507427 60507446 60507430 -
gtctttgtaggttttggaca

SEQ ID NO: 177574 - DNA, 20 bp, Artificial Sequence
  Synthetic oligonucleotide; TAG chr2 60507419 60507438 60507422 -
aggttttggacacagttttc

SEQ ID NO: 177575 - DNA, 20 bp, Artificial Sequence
  Synthetic oligonucleotide; AAG chr2 60507410 60507429 60507413 -
acacagttttctagcttttc

SEQ ID NO: 177576 - DNA, 20 bp, Artificial Sequence
  Synthetic oligonucleotide; AAG chr2 60507406 60507425 60507409 -
agttttctagcttttcaaga

SEQ ID NO: 177577 - DNA, 20 bp, Artificial Sequence
  Synthetic oligonucleotide; AGG chr2 60507405 60507424 60507408 -
gttttctagcttttcaagaa

SEQ ID NO: 177578 - DNA, 20 bp, Artificial Sequence
  Synthetic oligonucleotide; AAG chr2 60507401 60507420 60507404 -
tctagcttttcaagaaaggc

SEQ ID NO: 177579 - DNA, 20 bp, Artificial Sequence
  Synthetic oligonucleotide; AGG chr2 60507400 60507419 60507403 -
ctagcttttcaagaaaggca

SEQ ID NO: 177580 - DNA, 20 bp, Artificial Sequence
  Synthetic oligonucleotide; GGG chr2 60507399 60507418 60507402 -
tagcttttcaagaaaggcaa

SEQ ID NO: 177581 - DNA, 20 bp, Artificial Sequence
  Synthetic oligonucleotide; CAG chr2 60507182 60507201 60507185 -
ttgtcttgctttgcattctg

SEQ ID NO: 177582 - DNA, 20 bp, Artificial Sequence
  Synthetic oligonucleotide; GAG chr2 60507180 60507199 60507183 -
gtcttgctttgcattctgca

SEQ ID NO: 177583 - DNA, 20 bp, Artificial Sequence
  Synthetic oligonucleotide; TAG chr2 60507176 60507195 60507179 -
tgctttgcattctgcagagc

SEQ ID NO: 177584 - DNA, 20 bp, Artificial Sequence
  Synthetic oligonucleotide; AAG chr2 60507173 60507192 60507176 -
tttgcattctgcagagctag

SEQ ID NO: 177585 - DNA, 20 bp, Artificial Sequence
  Synthetic oligonucleotide; GAG chr2 60507171 60507190 60507174 -
tgcattctgcagagctagaa

SEQ ID NO: 177586 - DNA, 20 bp, Artificial Sequence
  Synthetic oligonucleotide; TGG chr2 60507157 60507176 60507160 -
ctagaagagcatttaatcct

SEQ ID NO: 177587 - DNA, 20 bp, Artificial Sequence
  Synthetic oligonucleotide; TGG chr2 60507142 60507161 60507145 -
atccttggccctctgtctgt

SEQ ID NO: 177588 - DNA, 20 bp, Artificial Sequence
  Synthetic oligonucleotide; GGG chr2 60507141 60507160 60507144 -
tccttggccctctgtctgtt

SEQ ID NO: 177589 - DNA, 20 bp, Artificial Sequence
  Synthetic oligonucleotide; TAG chr2 60507121 60507140 60507124 -
gggatattatgtttttttaa

SEQ ID NO: 177590 - DNA, 20 bp, Artificial Sequence
  Synthetic oligonucleotide; AAG chr2 60507103 60507122 60507106 -
aatagtgcttgtttatgact

SEQ ID NO: 177591 - DNA, 20 bp, Artificial Sequence
  Synthetic oligonucleotide; AGG chr2 60507102 60507121 60507105 -
atagtgcttgtttatgacta

SEQ ID NO: 177592 - DNA, 20 bp, Artificial Sequence
  Synthetic oligonucleotide; AAG chr2 60507096 60507115 60507099 -
cttgtttatgactaaggtca

SEQ ID NO: 177593 - DNA, 20 bp, Artificial Sequence
  Synthetic oligonucleotide; CAG chr2 60507092 60507111 60507095 -
tttatgactaaggtcaaaga

SEQ ID NO: 177594 - DNA, 20 bp, Artificial Sequence
  Synthetic oligonucleotide; CAG chr2 60507084 60507103 60507087 -
taaggtcaaagacagtattt

SEQ ID NO: 177595 - DNA, 20 bp, Artificial Sequence
  Synthetic oligonucleotide; TAG chr2 60507072 60507091 60507075 -
cagtatttcagaacaaaaat

SEQ ID NO: 177596 - DNA, 20 bp, Artificial Sequence
  Synthetic oligonucleotide; GAG chr2 60507070 60507089 60507073 -
gtatttcagaacaaaaatta

SEQ ID NO: 177597 - DNA, 20 bp, Artificial Sequence
  Synthetic oligonucleotide; TAG chr2 60507066 60507085 60507069 -
ttcagaacaaaaattagagt

SEQ ID NO: 177598 - DNA, 20 bp, Artificial Sequence
  Synthetic oligonucleotide; GAG chr2 60507054 60507073 60507057 -
attagagttagttcataatt

SEQ ID NO: 177599 - DNA, 20 bp, Artificial Sequence
  Synthetic oligonucleotide; TAG chr2 60507023 60507042 60507026 -
tacgttactgtttattttta

SEQ ID NO: 177600 - DNA, 20 bp, Artificial Sequence
  Synthetic oligonucleotide; CAG chr2 60507000 60507019 60507003 -
tttgctaatttatttttaaa

SEQ ID NO: 177601 - DNA, 20 bp, Artificial Sequence
  Synthetic oligonucleotide; CAG chr2 60506995 60507014 60506998 -
taatttatttttaaacagct

SEQ ID NO: 177602 - DNA, 20 bp, Artificial Sequence
  Synthetic oligonucleotide; TAG chr2 60506975 60506994 60506978 -
cagttacgccaacatgttta

SEQ ID NO: 177603 - DNA, 20 bp, Artificial Sequence
  Synthetic oligonucleotide; CAG chr2 60506950 60506969 60506953 -
ctgttcatcacatgccttac

SEQ ID NO: 177604 - DNA, 20 bp, Artificial Sequence
  Synthetic oligonucleotide; CAG chr2 60506946 60506965 60506949 -
tcatcacatgccttaccagt

SEQ ID NO: 177605 - DNA, 20 bp, Artificial Sequence
  Synthetic oligonucleotide; AGG chr2 60506945 60506964 60506948 -
catcacatgccttaccagtc

SEQ ID NO: 177606 - DNA, 20 bp, Artificial Sequence
  Synthetic oligonucleotide; GGG chr2 60506944 60506963 60506947 -
atcacatgccttaccagtca

SEQ ID NO: 177607 - DNA, 20 bp, Artificial Sequence
  Synthetic oligonucleotide; AAG chr2 60506935 60506954 60506938 -
cttaccagtcagggtgttaa

SEQ ID NO: 177608 - DNA, 20 bp, Artificial Sequence
  Synthetic oligonucleotide; AGG chr2 60506934 60506953 60506937 -
ttaccagtcagggtgttaaa

SEQ ID NO: 177609 - DNA, 20 bp, Artificial Sequence
  Synthetic oligonucleotide; TAG chr2 60506917 60506936 60506920 -
aaaaggcacatgcttttcaa

SEQ ID NO: 177610 - DNA, 20 bp, Artificial Sequence
  Synthetic oligonucleotide; TGG chr2 60506912 60506931 60506915 -
gcacatgcttttcaatagtt

SEQ ID NO: 177611 - DNA, 20 bp, Artificial Sequence
  Synthetic oligonucleotide; AAG chr2 60506904 60506923 60506907 -
ttttcaatagtttggatccc

SEQ ID NO: 177612 - DNA, 20 bp, Artificial Sequence
  Synthetic oligonucleotide; TAG chr2 60506895 60506914 60506898 -
gtttggatcccaagttaaat

SEQ ID NO: 177613 - DNA, 20 bp, Artificial Sequence
  Synthetic oligonucleotide; CAG chr2 60506882 60506901 60506885 -
gttaaattagataatgccat

SEQ ID NO: 177614 - DNA, 20 bp, Artificial Sequence
  Synthetic oligonucleotide; AGG chr2 60506881 60506900 60506884 -
ttaaattagataatgccatc

SEQ ID NO: 177615 - DNA, 20 bp, Artificial Sequence
  Synthetic oligonucleotide; TAG chr2 60506878 60506897 60506881 -
aattagataatgccatcagg

SEQ ID NO: 177616 - DNA, 20 bp, Artificial Sequence
  Synthetic oligonucleotide; TAG chr2 60506849 60506868 60506852 -
aattacattaattgaatgtt

SEQ ID NO: 177617 - DNA, 20 bp, Artificial Sequence
  Synthetic oligonucleotide; AGG chr2 60506848 60506867 60506851 -
attacattaattgaatgttt

SEQ ID NO: 177618 - DNA, 20 bp, Artificial Sequence
  Synthetic oligonucleotide; CGG chr2 60506845 60506864 60506848 -
acattaattgaatgtttagg

SEQ ID NO: 177619 - DNA, 20 bp, Artificial Sequence
  Synthetic oligonucleotide; AAG chr2 60506841 60506860 60506844 -
taattgaatgtttaggcgga

SEQ ID NO: 177620 - DNA, 20 bp, Artificial Sequence
  Synthetic oligonucleotide; AGG chr2 60506840 60506859 60506843 -
aattgaatgtttaggcggaa

SEQ ID NO: 177621 - DNA, 20 bp, Artificial Sequence
  Synthetic oligonucleotide; TAG chr2 60506837 60506856 60506840 -
tgaatgtttaggcggaaagg

SEQ ID NO: 177622 - DNA, 20 bp, Artificial Sequence
  Synthetic oligonucleotide; CAG chr2 60506829 60506848 60506832 -
taggcggaaaggtagttttg

SEQ ID NO: 177623 - DNA, 20 bp, Artificial Sequence
  Synthetic oligonucleotide; GAG chr2 60506827 60506846 60506830 -
ggcggaaaggtagttttgca

SEQ ID NO: 177624 - DNA, 20 bp, Artificial Sequence
  Synthetic oligonucleotide; AGG chr2 60506826 60506845 60506829 -
gcggaaaggtagttttgcag

SEQ ID NO: 177625 - DNA, 20 bp, Artificial Sequence
  Synthetic oligonucleotide; AAG chr2 60506802 60506821 60506805 -
tataatgaaatcacatttat

SEQ ID NO: 177626 - DNA, 20 bp, Artificial Sequence
  Synthetic oligonucleotide; CAG chr2 60506782 60506801 60506785 -
aagtacccatgtataaatct

SEQ ID NO: 177627 - DNA, 20 bp, Artificial Sequence
  Synthetic oligonucleotide; TAG chr2 60506774 60506793 60506777 -
atgtataaatctcagcatta

SEQ ID NO: 177628 - DNA, 20 bp, Artificial Sequence
  Synthetic oligonucleotide; GAG chr2 60506762 60506781 60506765 -
cagcattatagacattattt

SEQ ID NO: 177629 - DNA, 20 bp, Artificial Sequence
  Synthetic oligonucleotide; AGG chr2 60506761 60506780 60506764 -
agcattatagacattatttg

SEQ ID NO: 177630 - DNA, 20 bp, Artificial Sequence
  Synthetic oligonucleotide; CAG chr2 60506751 60506770 60506754 -
acattatttgaggttgctga

SEQ ID NO: 177631 - DNA, 20 bp, Artificial Sequence
  Synthetic oligonucleotide; TGG chr2 60506743 60506762 60506746 -
tgaggttgctgacagaaaaa

SEQ ID NO: 177632 - DNA, 20 bp, Artificial Sequence
  Synthetic oligonucleotide; CAG chr2 60506732 60506751 60506735 -
acagaaaaatggatatatat

SEQ ID NO: 177633 - DNA, 20 bp, Artificial Sequence
  Synthetic oligonucleotide; AGG chr2 60506731 60506750 60506734 -
cagaaaaatggatatatatc

SEQ ID NO: 177634 - DNA, 20 bp, Artificial Sequence
  Synthetic oligonucleotide; TAG chr2 60506724 60506743 60506727 -
atggatatatatcaggcgtt

SEQ ID NO: 177635 - DNA, 20 bp, Artificial Sequence
  Synthetic oligonucleotide; AGG chr2 60506723 60506742 60506726 -
tggatatatatcaggcgttt

SEQ ID NO: 177636 - DNA, 20 bp, Artificial Sequence
  Synthetic oligonucleotide; GAG chr2 60506721 60506740 60506724 -
gatatatatcaggcgtttag

SEQ ID NO: 177637 - DNA, 20 bp, Artificial Sequence
  Synthetic oligonucleotide; AGG chr2 60506720 60506739 60506723 -
atatatatcaggcgtttagg

SEQ ID NO: 177638 - DNA, 20 bp, Artificial Sequence
  Synthetic oligonucleotide; CGG chr2 60506710 60506729 60506713 -
ggcgtttaggaggaaacatg

SEQ ID NO: 177639 - DNA, 20 bp, Artificial Sequence
  Synthetic oligonucleotide; GGG chr2 60506709 60506728 60506712 -
gcgtttaggaggaaacatgc

SEQ ID NO: 177640 - DNA, 20 bp, Artificial Sequence
  Synthetic oligonucleotide; GGG chr2 60506708 60506727 60506711 -
cgtttaggaggaaacatgcg

SEQ ID NO: 177641 - DNA, 20 bp, Artificial Sequence
  Synthetic oligonucleotide; GGG chr2 60506707 60506726 60506710 -
gtttaggaggaaacatgcgg

SEQ ID NO: 177642 - DNA, 20 bp, Artificial Sequence
  Synthetic oligonucleotide; GGG chr2 60506706 60506725 60506709 -
tttaggaggaaacatgcggg

SEQ ID NO: 177643 - DNA, 20 bp, Artificial Sequence
  Synthetic oligonucleotide; CAG chr2 60506696 60506715 60506699 -
aacatgcggggggctgtcat

SEQ ID NO: 177644 - DNA, 20 bp, Artificial Sequence
  Synthetic oligonucleotide; TGG chr2 60506693 60506712 60506696 -
atgcggggggctgtcatcag

SEQ ID NO: 177645 - DNA, 20 bp, Artificial Sequence
  Synthetic oligonucleotide; TAG chr2 60506670 60506689 60506673 -
taaatgctgccttcgccatt

SEQ ID NO: 177646 - DNA, 20 bp, Artificial Sequence
  Synthetic oligonucleotide; AGG chr2 60506669 60506688 60506672 -
aaatgctgccttcgccattt

SEQ ID NO: 177647 - DNA, 20 bp, Artificial Sequence
  Synthetic oligonucleotide; GAG chr2 60506667 60506686 60506670 -
atgctgccttcgccatttag

SEQ ID NO: 177648 - DNA, 20 bp, Artificial Sequence
  Synthetic oligonucleotide; TGG chr2 60506659 60506678 60506662 -
ttcgccatttaggagactgc

SEQ ID NO: 177649 - DNA, 20 bp, Artificial Sequence
  Synthetic oligonucleotide; GGG chr2 60506658 60506677 60506661 -
tcgccatttaggagactgct

SEQ ID NO: 177650 - DNA, 20 bp, Artificial Sequence
  Synthetic oligonucleotide; CGG chr2 60506653 60506672 60506656 -
atttaggagactgctgggca

SEQ ID NO: 177651 - DNA, 20 bp, Artificial Sequence
  Synthetic oligonucleotide; TAG chr2 60506641 60506660 60506644 -
gctgggcacggtcgttttct

SEQ ID NO: 177652 - DNA, 20 bp, Artificial Sequence
  Synthetic oligonucleotide; GAG chr2 60506637 60506656 60506640 -
ggcacggtcgttttcttagt

SEQ ID NO: 177653 - DNA, 20 bp, Artificial Sequence
  Synthetic oligonucleotide; TAG chr2 60506621 60506640 60506624 -
tagtgagctgcctttatcat

SEQ ID NO: 177654 - DNA, 20 bp, Artificial Sequence
  Synthetic oligonucleotide; AAG chr2 60506612 60506631 60506615 -
gcctttatcattagccctct

SEQ ID NO: 177655 - DNA, 20 bp, Artificial Sequence
  Synthetic oligonucleotide; CAG chr2 60506609 60506628 60506612 -
tttatcattagccctctaag

SEQ ID NO: 177656 - DNA, 20 bp, Artificial Sequence
  Synthetic oligonucleotide; AAG chr2 60506597 60506616 60506600 -
cctctaagcagccatgcaca

SEQ ID NO: 177657 - DNA, 20 bp, Artificial Sequence
  Synthetic oligonucleotide; AGG chr2 60506596 60506615 60506599 -
ctctaagcagccatgcacaa

SEQ ID NO: 177658 - DNA, 20 bp, Artificial Sequence
  Synthetic oligonucleotide; TGG chr2 60506589 60506608 60506592 -
cagccatgcacaaaggcacg

SEQ ID NO: 177659 - DNA, 20 bp, Artificial Sequence
  Synthetic oligonucleotide; GGG chr2 60506588 60506607 60506591 -
agccatgcacaaaggcacgt

SEQ ID NO: 177660 - DNA, 20 bp, Artificial Sequence
  Synthetic oligonucleotide; TAG chr2 60506571 60506590 60506574 -
cgtgggtgctgtgttttgta

SEQ ID NO: 177661 - DNA, 20 bp, Artificial Sequence
  Synthetic oligonucleotide; CAG chr2 60506567 60506586 60506570 -
ggtgctgtgttttgtatagc

SEQ ID NO: 177662 - DNA, 20 bp, Artificial Sequence
  Synthetic oligonucleotide; AGG chr2 60506566 60506585 60506569 -
gtgctgtgttttgtatagcc

SEQ ID NO: 177663 - DNA, 20 bp, Artificial Sequence
  Synthetic oligonucleotide; GGG chr2 60506565 60506584 60506568 -
tgctgtgttttgtatagcca

SEQ ID NO: 177664 - DNA, 20 bp, Artificial Sequence
  Synthetic oligonucleotide; TGG chr2 60506556 60506575 60506559 -
ttgtatagccagggctttcc

SEQ ID NO: 177665 - DNA, 20 bp, Artificial Sequence
  Synthetic oligonucleotide; CAG chr2 60506550 60506569 60506553 -
agccagggctttcctggact

SEQ ID NO: 177666 - DNA, 20 bp, Artificial Sequence
  Synthetic oligonucleotide; CAG chr2 60506542 60506561 60506545 -
ctttcctggactcagcatgc

SEQ ID NO: 177667 - DNA, 20 bp, Artificial Sequence
  Synthetic oligonucleotide; TGG chr2 60506538 60506557 60506541 -
cctggactcagcatgccagc

SEQ ID NO: 177668 - DNA, 20 bp, Artificial Sequence
  Synthetic oligonucleotide; GGG chr2 60506537 60506556 60506540 -
ctggactcagcatgccagct

SEQ ID NO: 177669 - DNA, 20 bp, Artificial Sequence
  Synthetic oligonucleotide; GGG chr2 60506536 60506555 60506539 -
tggactcagcatgccagctg

SEQ ID NO: 177670 - DNA, 20 bp, Artificial Sequence
  Synthetic oligonucleotide; CGG chr2 60506532 60506551 60506535 -
ctcagcatgccagctggggc

SEQ ID NO: 177671 - DNA, 20 bp, Artificial Sequence
  Synthetic oligonucleotide; GAG chr2 60506523 60506542 60506526 -
ccagctggggccggctcact

SEQ ID NO: 177672 - DNA, 20 bp, Artificial Sequence
  Synthetic oligonucleotide; AGG chr2 60506522 60506541 60506525 -
cagctggggccggctcactg

SEQ ID NO: 177673 - DNA, 20 bp, Artificial Sequence
  Synthetic oligonucleotide; TGG chr2 60506518 60506537 60506521 -
tggggccggctcactgaggc

SEQ ID NO: 177674 - DNA, 20 bp, Artificial Sequence
  Synthetic oligonucleotide; GAG chr2 60506509 60506528 60506512 -
ctcactgaggctggaaaaat

SEQ ID NO: 177675 - DNA, 20 bp, Artificial Sequence
  Synthetic oligonucleotide; CAG chr2 60506503 60506522 60506506 -
gaggctggaaaaatgagata

SEQ ID NO: 177676 - DNA, 20 bp, Artificial Sequence
  Synthetic oligonucleotide; TAG chr2 60506498 60506517 60506501 -
tggaaaaatgagatacagtc

SEQ ID NO: 177677 - DNA, 20 bp, Artificial Sequence
  Synthetic oligonucleotide; GAG chr2 60506494 60506513 60506497 -
aaaatgagatacagtctagt

SEQ ID NO: 177678 - DNA, 20 bp, Artificial Sequence
  Synthetic oligonucleotide; AGG chr2 60506493 60506512 60506496 -
aaatgagatacagtctagtg

SEQ ID NO: 177679 - DNA, 20 bp, Artificial Sequence
  Synthetic oligonucleotide; TGG chr2 60506478 60506497 60506481 -
tagtgaggtctttgtcacct

SEQ ID NO: 177680 - DNA, 20 bp, Artificial Sequence
  Synthetic oligonucleotide; GAG chr2 60506476 60506495 60506479 -
gtgaggtctttgtcaccttg

SEQ ID NO: 177681 - DNA, 20 bp, Artificial Sequence
  Synthetic oligonucleotide; AGG chr2 60506475 60506494 60506478 -
tgaggtctttgtcaccttgg

SEQ ID NO: 177682 - DNA, 20 bp, Artificial Sequence
  Synthetic oligonucleotide; GGG chr2 60506474 60506493 60506477 -
gaggtctttgtcaccttgga

SEQ ID NO: 177683 - DNA, 20 bp, Artificial Sequence
  Synthetic oligonucleotide; GAG chr2 60506468 60506487 60506471 -
tttgtcaccttggagggtct

SEQ ID NO: 177684 - DNA, 20 bp, Artificial Sequence
  Synthetic oligonucleotide; AGG chr2 60506467 60506486 60506470 -
ttgtcaccttggagggtctg

SEQ ID NO: 177685 - DNA, 20 bp, Artificial Sequence
  Synthetic oligonucleotide; TGG chr2 60506462 60506481 60506465 -
accttggagggtctgaggac

SEQ ID NO: 177686 - DNA, 20 bp, Artificial Sequence
  Synthetic oligonucleotide; CGG chr2 60506453 60506472 60506456 -
ggtctgaggactggtgcgct

SEQ ID NO: 177687 - DNA, 20 bp, Artificial Sequence
  Synthetic oligonucleotide; GGG chr2 60506452 60506471 60506455 -
gtctgaggactggtgcgctc

SEQ ID NO: 177688 - DNA, 20 bp, Artificial Sequence
  Synthetic oligonucleotide; TGG chr2 60506439 60506458 60506442 -
tgcgctcgggttgacccatg

SEQ ID NO: 177689 - DNA, 20 bp, Artificial Sequence
  Synthetic oligonucleotide; GAG chr2 60506430 60506449 60506433 -
gttgacccatgtggcgtcct

SEQ ID NO: 177690 - DNA, 20 bp, Artificial Sequence
  Synthetic oligonucleotide; CAG chr2 60506426 60506445 60506429 -
acccatgtggcgtcctgagc

SEQ ID NO: 177691 - DNA, 20 bp, Artificial Sequence
  Synthetic oligonucleotide; TGG chr2 60506415 60506434 60506418 -
gtcctgagccagctctgtcc

SEQ ID NO: 177692 - DNA, 20 bp, Artificial Sequence
  Synthetic oligonucleotide; GAG chr2 60506408 60506427 60506411 -
gccagctctgtcctggatct

SEQ ID NO: 177693 - DNA, 20 bp, Artificial Sequence
  Synthetic oligonucleotide; AGG chr2 60506407 60506426 60506410 -
ccagctctgtcctggatctg

SEQ ID NO: 177694 - DNA, 20 bp, Artificial Sequence
  Synthetic oligonucleotide; AAG chr2 60506393 60506412 60506396 -
gatctgaggaacactgtctg

SEQ ID NO: 177695 - DNA, 20 bp, Artificial Sequence
  Synthetic oligonucleotide; CAG chr2 60506385 60506404 60506388 -
gaacactgtctgaagttttc

SEQ ID NO: 177696 - DNA, 20 bp, Artificial Sequence
  Synthetic oligonucleotide; AGG chr2 60506384 60506403 60506387 -
aacactgtctgaagttttcc

SEQ ID NO: 177697 - DNA, 20 bp, Artificial Sequence
  Synthetic oligonucleotide; GGG chr2 60506383 60506402 60506386 -
acactgtctgaagttttcca

SEQ ID NO: 177698 - DNA, 20 bp, Artificial Sequence
  Synthetic oligonucleotide; GGG chr2 60506382 60506401 60506385 -
cactgtctgaagttttccag

SEQ ID NO: 177699 - DNA, 20 bp, Artificial Sequence
  Synthetic oligonucleotide; CAG chr2 60506374 60506393 60506377 -
gaagttttccaggggtttga

SEQ ID NO: 177700 - DNA, 20 bp, Artificial Sequence
  Synthetic oligonucleotide; CAG chr2 60506369 60506388 60506372 -
tttccaggggtttgacagac

SEQ ID NO: 177701 - DNA, 20 bp, Artificial Sequence
  Synthetic oligonucleotide; TGG chr2 60506364 60506383 60506367 -
aggggtttgacagaccagaa

SEQ ID NO: 177702 - DNA, 20 bp, Artificial Sequence
  Synthetic oligonucleotide; GGG chr2 60506363 60506382 60506366 -
ggggtttgacagaccagaat

SEQ ID NO: 177703 - DNA, 20 bp, Artificial Sequence
  Synthetic oligonucleotide; GGG chr2 60506362 60506381 60506365 -
gggtttgacagaccagaatg

SEQ ID NO: 177704 - DNA, 20 bp, Artificial Sequence
  Synthetic oligonucleotide; GGG chr2 60506361 60506380 60506364 -
ggtttgacagaccagaatgg

SEQ ID NO: 177705 - DNA, 20 bp, Artificial Sequence
  Synthetic oligonucleotide; TGG chr2 60506354 60506373 60506357 -
cagaccagaatgggggccgc

SEQ ID NO: 177706 - DNA, 20 bp, Artificial Sequence
  Synthetic oligonucleotide; CAG chr2 60506351 60506370 60506354 -
accagaatgggggccgctgg

SEQ ID NO: 177707 - DNA, 20 bp, Artificial Sequence
  Synthetic oligonucleotide; AGG chr2 60506350 60506369 60506353 -
ccagaatgggggccgctggc

SEQ ID NO: 177708 - DNA, 20 bp, Artificial Sequence
  Synthetic oligonucleotide; GGG chr2 60506349 60506368 60506352 -
cagaatgggggccgctggca

SEQ ID NO: 177709 - DNA, 20 bp, Artificial Sequence
  Synthetic oligonucleotide; TGG chr2 60506344 60506363 60506347 -
tgggggccgctggcagggcc

SEQ ID NO: 177710 - DNA, 20 bp, Artificial Sequence
  Synthetic oligonucleotide; TGG chr2 60506341 60506360 60506344 -
gggccgctggcagggcctgg

SEQ ID NO: 177711 - DNA, 20 bp, Artificial Sequence
  Synthetic oligonucleotide; TAG chr2 60506335 60506354 60506338 -
ctggcagggcctggtggcat

SEQ ID NO: 177712 - DNA, 20 bp, Artificial Sequence
  Synthetic oligonucleotide; TGG chr2 60506329 60506348 60506332 -
gggcctggtggcattagatg

SEQ ID NO: 177713 - DNA, 20 bp, Artificial Sequence
  Synthetic oligonucleotide; AAG chr2 60506325 60506344 60506328 -
ctggtggcattagatgtggc

SEQ ID NO: 177714 - DNA, 20 bp, Artificial Sequence
  Synthetic oligonucleotide; CAG chr2 60506321 60506340 60506324 -
tggcattagatgtggcaagt

SEQ ID NO: 177715 - DNA, 20 bp, Artificial Sequence
  Synthetic oligonucleotide; CAG chr2 60506314 60506333 60506317 -
agatgtggcaagtcagacca

SEQ ID NO: 177716 - DNA, 20 bp, Artificial Sequence
  Synthetic oligonucleotide; TGG chr2 60506310 60506329 60506313 -
gtggcaagtcagaccacagc

SEQ ID NO: 177717 - DNA, 20 bp, Artificial Sequence
  Synthetic oligonucleotide; AAG chr2 60506301 60506320 60506304 -
cagaccacagctggcctgtg

SEQ ID NO: 177718 - DNA, 20 bp, Artificial Sequence
  Synthetic oligonucleotide; AGG chr2 60506300 60506319 60506303 -
agaccacagctggcctgtga

SEQ ID NO: 177719 - DNA, 20 bp, Artificial Sequence
  Synthetic oligonucleotide; CAG chr2 60506280 60506299 60506283 -
aggtgactcttcctctgatg

SEQ ID NO: 177720 - DNA, 20 bp, Artificial Sequence
  Synthetic oligonucleotide; GAG chr2 60506278 60506297 60506281 -
gtgactcttcctctgatgca

SEQ ID NO: 177721 - DNA, 20 bp, Artificial Sequence
  Synthetic oligonucleotide; GAG chr2 60506276 60506295 60506279 -
gactcttcctctgatgcaga

SEQ ID NO: 177722 - DNA, 20 bp, Artificial Sequence
  Synthetic oligonucleotide; GAG chr2 60506265 60506284 60506268 -
tgatgcagagagaattaaat

SEQ ID NO: 177723 - DNA, 20 bp, Artificial Sequence
  Synthetic oligonucleotide; AGG chr2 60506264 60506283 60506267 -
gatgcagagagaattaaatg

SEQ ID NO: 177724 - DNA, 20 bp, Artificial Sequence
  Synthetic oligonucleotide; GAG chr2 60506262 60506281 60506265 -
tgcagagagaattaaatgag

SEQ ID NO: 177725 - DNA, 20 bp, Artificial Sequence
  Synthetic oligonucleotide; AGG chr2 60506261 60506280 60506264 -
gcagagagaattaaatgagg

SEQ ID NO: 177726 - DNA, 20 bp, Artificial Sequence
  Synthetic oligonucleotide; CAG chr2 60506257 60506276 60506260 -
agagaattaaatgaggaggc

SEQ ID NO: 177727 - DNA, 20 bp, Artificial Sequence
  Synthetic oligonucleotide; GAG chr2 60506255 60506274 60506258 -
agaattaaatgaggaggcca

SEQ ID NO: 177728 - DNA, 20 bp, Artificial Sequence
  Synthetic oligonucleotide; TAG chr2 60506249 60506268 60506252 -
aaatgaggaggccagagccc

SEQ ID NO: 177729 - DNA, 20 bp, Artificial Sequence
  Synthetic oligonucleotide; CAG chr2 60506223 60506242 60506226 -
ctgcctcccctccatgccct

SEQ ID NO: 177730 - DNA, 20 bp, Artificial Sequence
  Synthetic oligonucleotide; GAG chr2 60506221 60506240 60506224 -
gcctcccctccatgccctca

SEQ ID NO: 177731 - DNA, 20 bp, Artificial Sequence
  Synthetic oligonucleotide; AAG chr2 60506217 60506236 60506220 -
cccctccatgccctcagaga

SEQ ID NO: 177732 - DNA, 20 bp, Artificial Sequence
  Synthetic oligonucleotide; TGG chr2 60506214 60506233 60506217 -
ctccatgccctcagagaaag

SEQ ID NO: 177733 - DNA, 20 bp, Artificial Sequence
  Synthetic oligonucleotide; GGG chr2 60506213 60506232 60506216 -
tccatgccctcagagaaagt

SEQ ID NO: 177734 - DNA, 20 bp, Artificial Sequence
  Synthetic oligonucleotide; GAG chr2 60506211 60506230 60506214 -
catgccctcagagaaagtgg

SEQ ID NO: 177735 - DNA, 20 bp, Artificial Sequence
  Synthetic oligonucleotide; TGG chr2 60506205 60506224 60506208 -
ctcagagaaagtgggagtgc

SEQ ID NO: 177736 - DNA, 20 bp, Artificial Sequence
  Synthetic oligonucleotide; TGG chr2 60506198 60506217 60506201 -
aaagtgggagtgctggcatt

SEQ ID NO: 177737 - DNA, 20 bp, Artificial Sequence
  Synthetic oligonucleotide; CAG chr2 60506191 60506210 60506194 -
gagtgctggcatttggctaa

SEQ ID NO: 177738 - DNA, 20 bp, Artificial Sequence
  Synthetic oligonucleotide; AGG chr2 60506190 60506209 60506193 -
agtgctggcatttggctaac

SEQ ID NO: 177739 - DNA, 20 bp, Artificial Sequence
  Synthetic oligonucleotide; CAG chr2 60506186 60506205 60506189 -
ctggcatttggctaacagga

SEQ ID NO: 177740 - DNA, 20 bp, Artificial Sequence
  Synthetic oligonucleotide; AGG chr2 60506185 60506204 60506188 -
tggcatttggctaacaggac

SEQ ID NO: 177741 - DNA, 20 bp, Artificial Sequence
  Synthetic oligonucleotide; TGG chr2 60506176 60506195 60506179 -
gctaacaggacaggctattt

SEQ ID NO: 177742 - DNA, 20 bp, Artificial Sequence
  Synthetic oligonucleotide; GGG chr2 60506175 60506194 60506178 -
ctaacaggacaggctatttt

SEQ ID NO: 177743 - DNA, 20 bp, Artificial Sequence
  Synthetic oligonucleotide; CAG chr2 60506170 60506189 60506173 -
aggacaggctattttgggcc

SEQ ID NO: 177744 - DNA, 20 bp, Artificial Sequence
  Synthetic oligonucleotide; AGG chr2 60506169 60506188 60506172 -
ggacaggctattttgggccc

SEQ ID NO: 177745 - DNA, 20 bp, Artificial Sequence
  Synthetic oligonucleotide; TGG chr2 60506137 60506156 60506140 -
tgacctctctgtgatttcta

SEQ ID NO: 177746 - DNA, 20 bp, Artificial Sequence
  Synthetic oligonucleotide; TGG chr2 60506134 60506153 60506137 -
cctctctgtgatttctatgg

SEQ ID NO: 177747 - DNA, 20 bp, Artificial Sequence
  Synthetic oligonucleotide; GGG chr2 60506133 60506152 60506136 -
ctctctgtgatttctatggt

SEQ ID NO: 177748 - DNA, 20 bp, Artificial Sequence
  Synthetic oligonucleotide; AAG chr2 60506125 60506144 60506128 -
gatttctatggtgggtgtca

SEQ ID NO: 177749 - DNA, 20 bp, Artificial Sequence
  Synthetic oligonucleotide; AGG chr2 60506124 60506143 60506127 -
atttctatggtgggtgtcaa

SEQ ID NO: 177750 - DNA, 20 bp, Artificial Sequence
  Synthetic oligonucleotide; TGG chr2 60506120 60506139 60506123 -
ctatggtgggtgtcaaagga

SEQ ID NO: 177751 - DNA, 20 bp, Artificial Sequence
  Synthetic oligonucleotide; TGG chr2 60506116 60506135 60506119 -
ggtgggtgtcaaaggatggc

SEQ ID NO: 177752 - DNA, 20 bp, Artificial Sequence
  Synthetic oligonucleotide; GGG chr2 60506115 60506134 60506118 -
gtgggtgtcaaaggatggct

SEQ ID NO: 177753 - DNA, 20 bp, Artificial Sequence
  Synthetic oligonucleotide; AAG chr2 60506111 60506130 60506114 -
gtgtcaaaggatggctggga

SEQ ID NO: 177754 - DNA, 20 bp, Artificial Sequence
  Synthetic oligonucleotide; AGG chr2 60506110 60506129 60506113 -
tgtcaaaggatggctgggaa

SEQ ID NO: 177755 - DNA, 20 bp, Artificial Sequence
  Synthetic oligonucleotide; GGG chr2 60506109 60506128 60506112 -
gtcaaaggatggctgggaaa

SEQ ID NO: 177756 - DNA, 20 bp, Artificial Sequence
  Synthetic oligonucleotide; GGG chr2 60506108 60506127 60506111 -
tcaaaggatggctgggaaag

SEQ ID NO: 177757 - DNA, 20 bp, Artificial Sequence
  Synthetic oligonucleotide; TAG chr2 60506100 60506119 60506103 -
tggctgggaaaggggatttt

SEQ ID NO: 177758 - DNA, 20 bp, Artificial Sequence
  Synthetic oligonucleotide; AGG chr2 60506099 60506118 60506102 -
ggctgggaaaggggattttt

SEQ ID NO: 177759 - DNA, 20 bp, Artificial Sequence
  Synthetic oligonucleotide; GAG chr2 60506074 60506093 60506077 -
tgctaacatcccttgcctat

SEQ ID NO: 177760 - DNA, 20 bp, Artificial Sequence
  Synthetic oligonucleotide; TGG chr2 60506046 60506065 60506049 -
cactatcttctcgcaccatc

SEQ ID NO: 177761 - DNA, 20 bp, Artificial Sequence
  Synthetic oligonucleotide; CGG chr2 60506036 60506055 60506039 -
tcgcaccatctggtttcacc

SEQ ID NO: 177762 - DNA, 20 bp, Artificial Sequence
  Synthetic oligonucleotide; GGG chr2 60506035 60506054 60506038 -
cgcaccatctggtttcaccc

SEQ ID NO: 177763 - DNA, 20 bp, Artificial Sequence
  Synthetic oligonucleotide; AAG chr2 60506027 60506046 60506030 -
ctggtttcacccgggctgca

SEQ ID NO: 177764 - DNA, 20 bp, Artificial Sequence
  Synthetic oligonucleotide; TAG chr2 60506022 60506041 60506025 -
ttcacccgggctgcaaagcc

SEQ ID NO: 177765 - DNA, 20 bp, Artificial Sequence
  Synthetic oligonucleotide; TGG chr2 60506017 60506036 60506020 -
ccgggctgcaaagcctagtg

SEQ ID NO: 177766 - DNA, 20 bp, Artificial Sequence
  Synthetic oligonucleotide; AAG chr2 60505998 60506017 60506001 -
gtggtgtcccataccctgca

SEQ ID NO: 177767 - DNA, 20 bp, Artificial Sequence
  Synthetic oligonucleotide; TGG chr2 60505988 60506007 60505991 -
ataccctgcaaagccctatt

SEQ ID NO: 177768 - DNA, 20 bp, Artificial Sequence
  Synthetic oligonucleotide; GGG chr2 60505987 60506006 60505990 -
taccctgcaaagccctattt

SEQ ID NO: 177769 - DNA, 20 bp, Artificial Sequence
  Synthetic oligonucleotide; CAG chr2 60505953 60505972 60505956 -
atgccaccatgccatctcca

SEQ ID NO: 177770 - DNA, 20 bp, Artificial Sequence
  Synthetic oligonucleotide; TGG chr2 60505946 60505965 60505949 -
catgccatctccacagcatc

SEQ ID NO: 177771 - DNA, 20 bp, Artificial Sequence
  Synthetic oligonucleotide; CAG chr2 60505943 60505962 60505946 -
gccatctccacagcatctgg

SEQ ID NO: 177772 - DNA, 20 bp, Artificial Sequence
  Synthetic oligonucleotide; CAG chr2 60505934 60505953 60505937 -
acagcatctggcagacgaac

SEQ ID NO: 177773 - DNA, 20 bp, Artificial Sequence
  Synthetic oligonucleotide; AGG chr2 60505933 60505952 60505936 -
cagcatctggcagacgaacc

SEQ ID NO: 177774 - DNA, 20 bp, Artificial Sequence
  Synthetic oligonucleotide; TGG chr2 60505930 60505949 60505933 -
catctggcagacgaaccagg

SEQ ID NO: 177775 - DNA, 20 bp, Artificial Sequence
  Synthetic oligonucleotide; GGG chr2 60505929 60505948 60505932 -
atctggcagacgaaccaggt

SEQ ID NO: 177776 - DNA, 20 bp, Artificial Sequence
  Synthetic oligonucleotide; GGG chr2 60505928 60505947 60505931 -
tctggcagacgaaccaggtg

SEQ ID NO: 177777 - DNA, 20 bp, Artificial Sequence
  Synthetic oligonucleotide; TGG chr2 60505912 60505931 60505915 -
ggtggggctgctattgcttc

SEQ ID NO: 177778 - DNA, 20 bp, Artificial Sequence
  Synthetic oligonucleotide; GGG chr2 60505911 60505930 60505914 -
gtggggctgctattgcttct

SEQ ID NO: 177779 - DNA, 20 bp, Artificial Sequence
  Synthetic oligonucleotide; CGG chr2 60505902 60505921 60505905 -
ctattgcttctgggtattta

SEQ ID NO: 177780 - DNA, 20 bp, Artificial Sequence
  Synthetic oligonucleotide; GGG chr2 60505901 60505920 60505904 -
tattgcttctgggtatttac

SEQ ID NO: 177781 - DNA, 20 bp, Artificial Sequence
  Synthetic oligonucleotide; CAG chr2 60505895 60505914 60505898 -
ttctgggtatttacgggatg

SEQ ID NO: 177782 - DNA, 20 bp, Artificial Sequence
  Synthetic oligonucleotide; TGG chr2 60505870 60505889 60505873 -
ttttctgcccaccgttgttt

SEQ ID NO: 177783 - DNA, 20 bp, Artificial Sequence
  Synthetic oligonucleotide; GGG chr2 60505869 60505888 60505872 -
tttctgcccaccgttgtttt

SEQ ID NO: 177784 - DNA, 20 bp, Artificial Sequence
  Synthetic oligonucleotide; GAG chr2 60505867 60505886 60505870 -
tctgcccaccgttgttttgg

SEQ ID NO: 177785 - DNA, 20 bp, Artificial Sequence
  Synthetic oligonucleotide; AGG chr2 60505866 60505885 60505869 -
ctgcccaccgttgttttggg

SEQ ID NO: 177786 - DNA, 20 bp, Artificial Sequence
  Synthetic oligonucleotide; GGG chr2 60505865 60505884 60505868 -
tgcccaccgttgttttggga

SEQ ID NO: 177787 - DNA, 20 bp, Artificial Sequence
  Synthetic oligonucleotide; CAG chr2 60505848 60505867 60505851 -
ggagggatttccccctccct

SEQ ID NO: 177788 - DNA, 20 bp, Artificial Sequence
  Synthetic oligonucleotide; AGG chr2 60505847 60505866 60505850 -
gagggatttccccctccctc

SEQ ID NO: 177789 - DNA, 20 bp, Artificial Sequence
  Synthetic oligonucleotide; TAG chr2 60505844 60505863 60505847 -
ggatttccccctccctcagg

SEQ ID NO: 177790 - DNA, 20 bp, Artificial Sequence
  Synthetic oligonucleotide; GAG chr2 60505842 60505861 60505845 -
atttccccctccctcaggta

SEQ ID NO: 177791 - DNA, 20 bp, Artificial Sequence
  Synthetic oligonucleotide; CAG chr2 60505832 60505851 60505835 -
ccctcaggtagagttgttct

SEQ ID NO: 177792 - DNA, 20 bp, Artificial Sequence
  Synthetic oligonucleotide; GAG chr2 60505830 60505849 60505833 -
ctcaggtagagttgttctca

SEQ ID NO: 177793 - DNA, 20 bp, Artificial Sequence
  Synthetic oligonucleotide; TGG chr2 60505816 60505835 60505819 -
ttctcagagatatctgtaat

SEQ ID NO: 177794 - DNA, 20 bp, Artificial Sequence
  Synthetic oligonucleotide; AAG chr2 60505801 60505820 60505804 -
gtaattggcccttcccattt

SEQ ID NO: 177795 - DNA, 20 bp, Artificial Sequence
  Synthetic oligonucleotide; GAG chr2 60505799 60505818 60505802 -
aattggcccttcccatttaa

SEQ ID NO: 177796 - DNA, 20 bp, Artificial Sequence
  Synthetic oligonucleotide; CAG chr2 60505795 60505814 60505798 -
ggcccttcccatttaagagt

SEQ ID NO: 177797 - DNA, 20 bp, Artificial Sequence
  Synthetic oligonucleotide; TAG chr2 60505767 60505786 60505770 -
aatgatttattctaaaatga

SEQ ID NO: 177798 - DNA, 20 bp, Artificial Sequence
  Synthetic oligonucleotide; CAG chr2 60505761 60505780 60505764 -
ttattctaaaatgatagacc

SEQ ID NO: 177799 - DNA, 20 bp, Artificial Sequence
  Synthetic oligonucleotide; AGG chr2 60505760 60505779 60505763 -
tattctaaaatgatagaccc

SEQ ID NO: 177800 - DNA, 20 bp, Artificial Sequence
  Synthetic oligonucleotide; TAG chr2 60505757 60505776 60505760 -
tctaaaatgatagacccagg

SEQ ID NO: 177801 - DNA, 20 bp, Artificial Sequence
  Synthetic oligonucleotide; GAG chr2 60505755 60505774 60505758 -
taaaatgatagacccaggta

SEQ ID NO: 177802 - DNA, 20 bp, Artificial Sequence
  Synthetic oligonucleotide; GAG chr2 60505753 60505772 60505756 -
aaatgatagacccaggtaga

SEQ ID NO: 177803 - DNA, 20 bp, Artificial Sequence
  Synthetic oligonucleotide; AGG chr2 60505752 60505771 60505755 -
aatgatagacccaggtagag

SEQ ID NO: 177804 - DNA, 20 bp, Artificial Sequence
  Synthetic oligonucleotide; CAG chr2 60505732 60505751 60505735 -
aggttacccaccctccgtca

SEQ ID NO: 177805 - DNA, 20 bp, Artificial Sequence
  Synthetic oligonucleotide; GAG chr2 60505730 60505749 60505733 -
gttacccaccctccgtcaca

SEQ ID NO: 177806 - DNA, 20 bp, Artificial Sequence
  Synthetic oligonucleotide; TGG chr2 60505727 60505746 60505730 -
acccaccctccgtcacagag

SEQ ID NO: 177807 - DNA, 20 bp, Artificial Sequence
  Synthetic oligonucleotide; CAG chr2 60505723 60505742 60505726 -
accctccgtcacagagtggc

SEQ ID NO: 177808 - DNA, 20 bp, Artificial Sequence
  Synthetic oligonucleotide; CGG chr2 60505704 60505723 60505707 -
ccagctgtgtcccctgcttc

SEQ ID NO: 177809 - DNA, 20 bp, Artificial Sequence
  Synthetic oligonucleotide; GGG chr2 60505703 60505722 60505706 -
cagctgtgtcccctgcttcc

SEQ ID NO: 177810 - DNA, 20 bp, Artificial Sequence
  Synthetic oligonucleotide; GAG chr2 60505701 60505720 60505704 -
gctgtgtcccctgcttccgg

SEQ ID NO: 177811 - DNA, 20 bp, Artificial Sequence
  Synthetic oligonucleotide; AGG chr2 60505700 60505719 60505703 -
ctgtgtcccctgcttccggg

SEQ ID NO: 177812 - DNA, 20 bp, Artificial Sequence
  Synthetic oligonucleotide; TGG chr2 60505697 60505716 60505700 -
tgtcccctgcttccgggagg

SEQ ID NO: 177813 - DNA, 20 bp, Artificial Sequence
  Synthetic oligonucleotide; GGG chr2 60505696 60505715 60505699 -
gtcccctgcttccgggaggt

SEQ ID NO: 177814 - DNA, 20 bp, Artificial Sequence
  Synthetic oligonucleotide; TGG chr2 60505685 60505704 60505688 -
ccgggaggtgggaatgcatg

SEQ ID NO: 177815 - DNA, 20 bp, Artificial Sequence
  Synthetic oligonucleotide; GAG chr2 60505683 60505702 60505686 -
gggaggtgggaatgcatgtg

SEQ ID NO: 177816 - DNA, 20 bp, Artificial Sequence
  Synthetic oligonucleotide; AGG chr2 60505682 60505701 60505685 -
ggaggtgggaatgcatgtgg

SEQ ID NO: 177817 - DNA, 20 bp, Artificial Sequence
  Synthetic oligonucleotide; GGG chr2 60505681 60505700 60505684 -
gaggtgggaatgcatgtgga

SEQ ID NO: 177818 - DNA, 20 bp, Artificial Sequence
  Synthetic oligonucleotide; GGG chr2 60505680 60505699 60505683 -
aggtgggaatgcatgtggag

SEQ ID NO: 177819 - DNA, 20 bp, Artificial Sequence
  Synthetic oligonucleotide; TGG chr2 60505652 60505671 60505655 -
atttcctaactctcttgctc

SEQ ID NO: 177820 - DNA, 20 bp, Artificial Sequence
  Synthetic oligonucleotide; CAG chr2 60505649 60505668 60505652 -
tcctaactctcttgctctgg

SEQ ID NO: 177821 - DNA, 20 bp, Artificial Sequence
  Synthetic oligonucleotide; AAG chr2 60505642 60505661 60505645 -
tctcttgctctggcagcctg

SEQ ID NO: 177822 - DNA, 20 bp, Artificial Sequence
  Synthetic oligonucleotide; GAG chr2 60505640 60505659 60505643 -
tcttgctctggcagcctgaa

SEQ ID NO: 177823 - DNA, 20 bp, Artificial Sequence
  Synthetic oligonucleotide; CAG chr2 60505618 60505637 60505621 -
gctgtctgtgccctgaacaa

SEQ ID NO: 177824 - DNA, 20 bp, Artificial Sequence
  Synthetic oligonucleotide; TAG chr2 60505613 60505632 60505616 -
ctgtgccctgaacaacagct

SEQ ID NO: 177825 - DNA, 20 bp, Artificial Sequence
  Synthetic oligonucleotide; AGG chr2 60505612 60505631 60505615 -
tgtgccctgaacaacagctt

SEQ ID NO: 177826 - DNA, 20 bp, Artificial Sequence
  Synthetic oligonucleotide; GGG chr2 60505611 60505630 60505614 -
gtgccctgaacaacagctta

SEQ ID NO: 177827 - DNA, 20 bp, Artificial Sequence
  Synthetic oligonucleotide; GAG chr2 60505609 60505628 60505612 -
gccctgaacaacagcttagg

SEQ ID NO: 177828 - DNA, 20 bp, Artificial Sequence
  Synthetic oligonucleotide; TGG chr2 60505605 60505624 60505608 -
tgaacaacagcttagggagc

SEQ ID NO: 177829 - DNA, 20 bp, Artificial Sequence
  Synthetic oligonucleotide; GAG chr2 60505603 60505622 60505606 -
aacaacagcttagggagctg

SEQ ID NO: 177830 - DNA, 20 bp, Artificial Sequence
  Synthetic oligonucleotide; AGG chr2 60505602 60505621 60505605 -
acaacagcttagggagctgg

SEQ ID NO: 177831 - DNA, 20 bp, Artificial Sequence
  Synthetic oligonucleotide; AAG chr2 60505598 60505617 60505601 -
cagcttagggagctggagga

SEQ ID NO: 177832 - DNA, 20 bp, Artificial Sequence
  Synthetic oligonucleotide; GAG chr2 60505596 60505615 60505599 -
gcttagggagctggaggaaa

SEQ ID NO: 177833 - DNA, 20 bp, Artificial Sequence
  Synthetic oligonucleotide; AAG chr2 60505593 60505612 60505596 -
tagggagctggaggaaagag

SEQ ID NO: 177834 - DNA, 20 bp, Artificial Sequence
  Synthetic oligonucleotide; AGG chr2 60505592 60505611 60505595 -
agggagctggaggaaagaga

SEQ ID NO: 177835 - DNA, 20 bp, Artificial Sequence
  Synthetic oligonucleotide; GAG chr2 60505590 60505609 60505593 -
ggagctggaggaaagagaag

SEQ ID NO: 177836 - DNA, 20 bp, Artificial Sequence
  Synthetic oligonucleotide; AGG chr2 60505589 60505608 60505592 -
gagctggaggaaagagaagg

SEQ ID NO: 177837 - DNA, 20 bp, Artificial Sequence
  Synthetic oligonucleotide; GAG chr2 60505577 60505596 60505580 -
agagaaggaggtatgcattt

SEQ ID NO: 177838 - DNA, 20 bp, Artificial Sequence
  Synthetic oligonucleotide; AGG chr2 60505576 60505595 60505579 -
gagaaggaggtatgcatttg

SEQ ID NO: 177839 - DNA, 20 bp, Artificial Sequence
  Synthetic oligonucleotide; GGG chr2 60505575 60505594 60505578 -
agaaggaggtatgcatttga

SEQ ID NO: 177840 - DNA, 20 bp, Artificial Sequence
  Synthetic oligonucleotide; GAG chr2 60505573 60505592 60505576 -
aaggaggtatgcatttgagg

SEQ ID NO: 177841 - DNA, 20 bp, Artificial Sequence
  Synthetic oligonucleotide; GAG chr2 60505571 60505590 60505574 -
ggaggtatgcatttgaggga

SEQ ID NO: 177842 - DNA, 20 bp, Artificial Sequence
  Synthetic oligonucleotide; GAG chr2 60505569 60505588 60505572 -
aggtatgcatttgagggaga

SEQ ID NO: 177843 - DNA, 20 bp, Artificial Sequence
  Synthetic oligonucleotide; AGG chr2 60505568 60505587 60505571 -
ggtatgcatttgagggagag

SEQ ID NO: 177844 - DNA, 20 bp, Artificial Sequence
  Synthetic oligonucleotide; TGG chr2 60505560 60505579 60505563 -
tttgagggagagaggcccac

SEQ ID NO: 177845 - DNA, 20 bp, Artificial Sequence
  Synthetic oligonucleotide; GGG chr2 60505559 60505578 60505562 -
ttgagggagagaggcccact

SEQ ID NO: 177846 - DNA, 20 bp, Artificial Sequence
  Synthetic oligonucleotide; TGG chr2 60505555 60505574 60505558 -
gggagagaggcccactgggt

SEQ ID NO: 177847 - DNA, 20 bp, Artificial Sequence
  Synthetic oligonucleotide; AAG chr2 60505550 60505569 60505553 -
agaggcccactgggttggac

SEQ ID NO: 177848 - DNA, 20 bp, Artificial Sequence
  Synthetic oligonucleotide; AAG chr2 60505547 60505566 60505550 -
ggcccactgggttggacaag

SEQ ID NO: 177849 - DNA, 20 bp, Artificial Sequence
  Synthetic oligonucleotide; AGG chr2 60505546 60505565 60505549 -
gcccactgggttggacaaga

SEQ ID NO: 177850 - DNA, 20 bp, Artificial Sequence
  Synthetic oligonucleotide; AAG chr2 60505540 60505559 60505543 -
tgggttggacaagaaggtaa

SEQ ID NO: 177851 - DNA, 20 bp, Artificial Sequence
  Synthetic oligonucleotide; GAG chr2 60505538 60505557 60505541 -
ggttggacaagaaggtaaaa

SEQ ID NO: 177852 - DNA, 20 bp, Artificial Sequence
  Synthetic oligonucleotide; AGG chr2 60505537 60505556 60505540 -
gttggacaagaaggtaaaag

SEQ ID NO: 177853 - DNA, 20 bp, Artificial Sequence
  Synthetic oligonucleotide; GGG chr2 60505536 60505555 60505539 -
ttggacaagaaggtaaaaga

SEQ ID NO: 177854 - DNA, 20 bp, Artificial Sequence
  Synthetic oligonucleotide; TGG chr2 60505532 60505551 60505535 -
acaagaaggtaaaagagggc

SEQ ID NO: 177855 - DNA, 20 bp, Artificial Sequence
  Synthetic oligonucleotide; TGG chr2 60505527 60505546 60505530 -
aaggtaaaagagggctggtt

SEQ ID NO: 177856 - DNA, 20 bp, Artificial Sequence
  Synthetic oligonucleotide; AAG chr2 60505519 60505538 60505522 -
agagggctggtttggcccct

SEQ ID NO: 177857 - DNA, 20 bp, Artificial Sequence
  Synthetic oligonucleotide; AGG chr2 60505518 60505537 60505521 -
gagggctggtttggccccta

SEQ ID NO: 177858 - DNA, 20 bp, Artificial Sequence
  Synthetic oligonucleotide; GGG chr2 60505517 60505536 60505520 -
agggctggtttggcccctaa

SEQ ID NO: 177859 - DNA, 20 bp, Artificial Sequence
  Synthetic oligonucleotide; AAG chr2 60505514 60505533 60505517 -
gctggtttggcccctaaggg

SEQ ID NO: 177860 - DNA, 20 bp, Artificial Sequence
  Synthetic oligonucleotide; AGG chr2 60505513 60505532 60505516 -
ctggtttggcccctaaggga

SEQ ID NO: 177861 - DNA, 20 bp, Artificial Sequence
  Synthetic oligonucleotide; CAG chr2 60505509 60505528 60505512 -
tttggcccctaagggaagga

SEQ ID NO: 177862 - DNA, 20 bp, Artificial Sequence
  Synthetic oligonucleotide; AGG chr2 60505508 60505527 60505511 -
ttggcccctaagggaaggac

SEQ ID NO: 177863 - DNA, 20 bp, Artificial Sequence
  Synthetic oligonucleotide; AAG chr2 60505504 60505523 60505507 -
cccctaagggaaggacagga

SEQ ID NO: 177864 - DNA, 20 bp, Artificial Sequence
  Synthetic oligonucleotide; TGG chr2 60505482 60505501 60505485 -
gcacccgcttgttccctgtg

SEQ ID NO: 177865 - DNA, 20 bp, Artificial Sequence
  Synthetic oligonucleotide; CAG chr2 60505476 60505495 60505479 -
gcttgttccctgtgtggatg

SEQ ID NO: 177866 - DNA, 20 bp, Artificial Sequence
  Synthetic oligonucleotide; CAG chr2 60505465 60505484 60505468 -
gtgtggatgcagtgtttgtc

SEQ ID NO: 177867 - DNA, 20 bp, Artificial Sequence
  Synthetic oligonucleotide; AAG chr2 60505459 60505478 60505462 -
atgcagtgtttgtccagctg

SEQ ID NO: 177868 - DNA, 20 bp, Artificial Sequence
  Synthetic oligonucleotide; AGG chr2 60505458 60505477 60505461 -
tgcagtgtttgtccagctga

SEQ ID NO: 177869 - DNA, 20 bp, Artificial Sequence
  Synthetic oligonucleotide; CAG chr2 60505455 60505474 60505458 -
agtgtttgtccagctgaagg

SEQ ID NO: 177870 - DNA, 20 bp, Artificial Sequence
  Synthetic oligonucleotide; CGG chr2 60505445 60505464 60505448 -
cagctgaaggcagcctcact

SEQ ID NO: 177871 - DNA, 20 bp, Artificial Sequence
  Synthetic oligonucleotide; GAG chr2 60505429 60505448 60505432 -
cactcggctgactacctgat

SEQ ID NO: 177872 - DNA, 20 bp, Artificial Sequence
  Synthetic oligonucleotide; AAG chr2 60505415 60505434 60505418 -
cctgatgagtgattttcccc

SEQ ID NO: 177873 - DNA, 20 bp, Artificial Sequence
  Synthetic oligonucleotide; CAG chr2 60505408 60505427 60505411 -
agtgattttccccaagctga

SEQ ID NO: 177874 - DNA, 20 bp, Artificial Sequence
  Synthetic oligonucleotide; AAG chr2 60505382 60505401 60505385 -
ctccaacacatttcacctac

SEQ ID NO: 177875 - DNA, 20 bp, Artificial Sequence
  Synthetic oligonucleotide; AAG chr2 60505371 60505390 60505374 -
ttcacctacaagtcctgaca

SEQ ID NO: 177876 - DNA, 20 bp, Artificial Sequence
  Synthetic oligonucleotide; TGG chr2 60505368 60505387 60505371 -
acctacaagtcctgacaaag

SEQ ID NO: 177877 - DNA, 20 bp, Artificial Sequence
  Synthetic oligonucleotide; TGG chr2 60505355 60505374 60505358 -
gacaaagtggtgtgttcttt

SEQ ID NO: 177878 - DNA, 20 bp, Artificial Sequence
  Synthetic oligonucleotide; GGG chr2 60505354 60505373 60505357 -
acaaagtggtgtgttctttt

SEQ ID NO: 177879 - DNA, 20 bp, Artificial Sequence
  Synthetic oligonucleotide; GGG chr2 60505353 60505372 60505356 -
caaagtggtgtgttcttttg

SEQ ID NO: 177880 - DNA, 20 bp, Artificial Sequence
  Synthetic oligonucleotide; CAG chr2 60505338 60505357 60505341 -
ttttggggctgttattactg

SEQ ID NO: 177881 - DNA, 20 bp, Artificial Sequence
  Synthetic oligonucleotide; CAG chr2 60505335 60505354 60505338 -
tggggctgttattactgcag

SEQ ID NO: 177882 - DNA, 20 bp, Artificial Sequence
  Synthetic oligonucleotide; AGG chr2 60505334 60505353 60505337 -
ggggctgttattactgcagc

SEQ ID NO: 177883 - DNA, 20 bp, Artificial Sequence
  Synthetic oligonucleotide; TGG chr2 60505327 60505346 60505330 -
ttattactgcagcaggcatt

SEQ ID NO: 177884 - DNA, 20 bp, Artificial Sequence
  Synthetic oligonucleotide; TGG chr2 60505317 60505336 60505320 -
agcaggcatttggaacaatc

SEQ ID NO: 177885 - DNA, 20 bp, Artificial Sequence
  Synthetic oligonucleotide; AAG chr2 60505314 60505333 60505317 -
aggcatttggaacaatctgg

SEQ ID NO: 177886 - DNA, 20 bp, Artificial Sequence
  Synthetic oligonucleotide; TGG chr2 60505309 60505328 60505312 -
tttggaacaatctggaagaa

SEQ ID NO: 177887 - DNA, 20 bp, Artificial Sequence
  Synthetic oligonucleotide; GGG chr2 60505308 60505327 60505311 -
ttggaacaatctggaagaat

SEQ ID NO: 177888 - DNA, 20 bp, Artificial Sequence
  Synthetic oligonucleotide; GGG chr2 60505307 60505326 60505310 -
tggaacaatctggaagaatg

SEQ ID NO: 177889 - DNA, 20 bp, Artificial Sequence
  Synthetic oligonucleotide; AAG chr2 60505299 60505318 60505302 -
tctggaagaatggggtgcca

SEQ ID NO: 177890 - DNA, 20 bp, Artificial Sequence
  Synthetic oligonucleotide; AGG chr2 60505298 60505317 60505301 -
ctggaagaatggggtgccaa

SEQ ID NO: 177891 - DNA, 20 bp, Artificial Sequence
  Synthetic oligonucleotide; AAG chr2 60505286 60505305 60505289 -
ggtgccaaaggacacccttg

SEQ ID NO: 177892 - DNA, 20 bp, Artificial Sequence
  Synthetic oligonucleotide; GAG chr2 60505275 60505294 60505278 -
acacccttgaagccgtttct

SEQ ID NO: 177893 - DNA, 20 bp, Artificial Sequence
  Synthetic oligonucleotide; TAG chr2 60505242 60505261 60505245 -
ttcttttctctccgatcctc

SEQ ID NO: 177894 - DNA, 20 bp, Artificial Sequence
  Synthetic oligonucleotide; TGG chr2 60505233 60505252 60505236 -
ctccgatcctctagcttttt

SEQ ID NO: 177895 - DNA, 20 bp, Artificial Sequence
  Synthetic oligonucleotide; TGG chr2 60505218 60505237 60505221 -
ttttttggcttatgaaaaat

SEQ ID NO: 177896 - DNA, 20 bp, Artificial Sequence
  Synthetic oligonucleotide; GGG chr2 60505217 60505236 60505220 -
tttttggcttatgaaaaatt

SEQ ID NO: 177897 - DNA, 20 bp, Artificial Sequence
  Synthetic oligonucleotide; TAG chr2 60505184 60505203 60505187 -
tcgaatgtccattgtgctgt

SEQ ID NO: 177898 - DNA, 20 bp, Artificial Sequence
  Synthetic oligonucleotide; GAG chr2 60505177 60505196 60505180 -
tccattgtgctgttagtaat

SEQ ID NO: 177899 - DNA, 20 bp, Artificial Sequence
  Synthetic oligonucleotide; AGG chr2 60505176 60505195 60505179 -
ccattgtgctgttagtaatg

SEQ ID NO: 177900 - DNA, 20 bp, Artificial Sequence
  Synthetic oligonucleotide; CGG chr2 60505170 60505189 60505173 -
tgctgttagtaatgaggata

SEQ ID NO: 177901 - DNA, 20 bp, Artificial Sequence
  Synthetic oligonucleotide; GAG chr2 60505146 60505165 60505149 -
taaaatcacatttttttttt

SEQ ID NO: 177902 - DNA, 20 bp, Artificial Sequence
  Synthetic oligonucleotide; AAG chr2 60505142 60505161 60505145 -
atcacattttttttttgagt

SEQ ID NO: 177903 - DNA, 20 bp, Artificial Sequence
  Synthetic oligonucleotide; GAG chr2 60505133 60505152 60505136 -
tttttttgagtaagcccttt

SEQ ID NO: 177904 - DNA, 20 bp, Artificial Sequence
  Synthetic oligonucleotide; AGG chr2 60505132 60505151 60505135 -
ttttttgagtaagccctttg

SEQ ID NO: 177905 - DNA, 20 bp, Artificial Sequence
  Synthetic oligonucleotide; GAG chr2 60505130 60505149 60505133 -
ttttgagtaagccctttgag

SEQ ID NO: 177906 - DNA, 20 bp, Artificial Sequence
  Synthetic oligonucleotide; GAG chr2 60505115 60505134 60505118 -
ttgaggagtattgtcaaatt

SEQ ID NO: 177907 - DNA, 20 bp, Artificial Sequence
  Synthetic oligonucleotide; GAG chr2 60505101 60505120 60505104 -
caaattgagactcacctcat

SEQ ID NO: 177908 - DNA, 20 bp, Artificial Sequence
  Synthetic oligonucleotide; AAG chr2 60505088 60505107 60505091 -
acctcatgagtaaccctgtg

SEQ ID NO: 177909 - DNA, 20 bp, Artificial Sequence
  Synthetic oligonucleotide; GAG chr2 60505086 60505105 60505089 -
ctcatgagtaaccctgtgaa

SEQ ID NO: 177910 - DNA, 20 bp, Artificial Sequence
  Synthetic oligonucleotide; AGG chr2 60505085 60505104 60505088 -
tcatgagtaaccctgtgaag

SEQ ID NO: 177911 - DNA, 20 bp, Artificial Sequence
  Synthetic oligonucleotide; CAG chr2 60505082 60505101 60505085 -
tgagtaaccctgtgaagagg

SEQ ID NO: 177912 - DNA, 20 bp, Artificial Sequence
  Synthetic oligonucleotide; AGG chr2 60505081 60505100 60505084 -
gagtaaccctgtgaagaggc

SEQ ID NO: 177913 - DNA, 20 bp, Artificial Sequence
  Synthetic oligonucleotide; GAG chr2 60505079 60505098 60505082 -
gtaaccctgtgaagaggcag

SEQ ID NO: 177914 - DNA, 20 bp, Artificial Sequence
  Synthetic oligonucleotide; AAG chr2 60505075 60505094 60505078 -
ccctgtgaagaggcaggaga

SEQ ID NO: 177915 - DNA, 20 bp, Artificial Sequence
  Synthetic oligonucleotide; AGG chr2 60505074 60505093 60505077 -
cctgtgaagaggcaggagaa

SEQ ID NO: 177916 - DNA, 20 bp, Artificial Sequence
  Synthetic oligonucleotide; GGG chr2 60505073 60505092 60505076 -
ctgtgaagaggcaggagaaa

SEQ ID NO: 177917 - DNA, 20 bp, Artificial Sequence
  Synthetic oligonucleotide; TAG chr2 60505070 60505089 60505073 -
tgaagaggcaggagaaaggg

SEQ ID NO: 177918 - DNA, 20 bp, Artificial Sequence
  Synthetic oligonucleotide; AAG chr2 60505064 60505083 60505067 -
ggcaggagaaagggtagttg

SEQ ID NO: 177919 - DNA, 20 bp, Artificial Sequence
  Synthetic oligonucleotide; TAG chr2 60505059 60505078 60505062 -
gagaaagggtagttgaagct

SEQ ID NO: 177920 - DNA, 20 bp, Artificial Sequence
  Synthetic oligonucleotide; GAG chr2 60505057 60505076 60505060 -
gaaagggtagttgaagctta

SEQ ID NO: 177921 - DNA, 20 bp, Artificial Sequence
  Synthetic oligonucleotide; GAG chr2 60505055 60505074 60505058 -
aagggtagttgaagcttaga

SEQ ID NO: 177922 - DNA, 20 bp, Artificial Sequence
  Synthetic oligonucleotide; AGG chr2 60505054 60505073 60505057 -
agggtagttgaagcttagag

SEQ ID NO: 177923 - DNA, 20 bp, Artificial Sequence
  Synthetic oligonucleotide; TGG chr2 60505046 60505065 60505049 -
tgaagcttagagaggttaaa

SEQ ID NO: 177924 - DNA, 20 bp, Artificial Sequence
  Synthetic oligonucleotide; CAG chr2 60505043 60505062 60505046 -
agcttagagaggttaaatgg

SEQ ID NO: 177925 - DNA, 20 bp, Artificial Sequence
  Synthetic oligonucleotide; AGG chr2 60505042 60505061 60505045 -
gcttagagaggttaaatggc

SEQ ID NO: 177926 - DNA, 20 bp, Artificial Sequence
  Synthetic oligonucleotide; TGG chr2 60505037 60505056 60505040 -
gagaggttaaatggcaggtc

SEQ ID NO: 177927 - DNA, 20 bp, Artificial Sequence
  Synthetic oligonucleotide; CAG chr2 60505027 60505046 60505030 -
atggcaggtctggtctcatg

SEQ ID NO: 177928 - DNA, 20 bp, Artificial Sequence
  Synthetic oligonucleotide; CAG chr2 60505021 60505040 60505024 -
ggtctggtctcatgcagccg

SEQ ID NO: 177929 - DNA, 20 bp, Artificial Sequence
  Synthetic oligonucleotide; AGG chr2 60505020 60505039 60505023 -
gtctggtctcatgcagccgc

SEQ ID NO: 177930 - DNA, 20 bp, Artificial Sequence
  Synthetic oligonucleotide; GGG chr2 60505019 60505038 60505022 -
tctggtctcatgcagccgca

SEQ ID NO: 177931 - DNA, 20 bp, Artificial Sequence
  Synthetic oligonucleotide; GGG chr2 60505018 60505037 60505021 -
ctggtctcatgcagccgcag

SEQ ID NO: 177932 - DNA, 20 bp, Artificial Sequence
  Synthetic oligonucleotide; TAG chr2 60505015 60505034 60505018 -
gtctcatgcagccgcagggg

SEQ ID NO: 177933 - DNA, 20 bp, Artificial Sequence
  Synthetic oligonucleotide; TAG chr2 60505010 60505029 60505013 -
atgcagccgcaggggtagac

SEQ ID NO: 177934 - DNA, 20 bp, Artificial Sequence
  Synthetic oligonucleotide; AGG chr2 60505009 60505028 60505012 -
tgcagccgcaggggtagact

SEQ ID NO: 177935 - DNA, 20 bp, Artificial Sequence
  Synthetic oligonucleotide; GGG chr2 60505008 60505027 60505011 -
gcagccgcaggggtagacta

SEQ ID NO: 177936 - DNA, 20 bp, Artificial Sequence
  Synthetic oligonucleotide; CAG chr2 60504996 60505015 60504999 -
gtagactagggattctgatc

SEQ ID NO: 177937 - DNA, 20 bp, Artificial Sequence
  Synthetic oligonucleotide; TGG chr2 60504978 60504997 60504981 -
tccagaactccttatacttc

SEQ ID NO: 177938 - DNA, 20 bp, Artificial Sequence
  Synthetic oligonucleotide; GGG chr2 60504977 60504996 60504980 -
ccagaactccttatacttct

SEQ ID NO: 177939 - DNA, 20 bp, Artificial Sequence
  Synthetic oligonucleotide; CAG chr2 60504957 60504976 60504960 -
gggtccaccccacgcttcca

SEQ ID NO: 177940 - DNA, 20 bp, Artificial Sequence
  Synthetic oligonucleotide; CAG chr2 60504946 60504965 60504949 -
acgcttccacagcctgcaca

SEQ ID NO: 177941 - DNA, 20 bp, Artificial Sequence
  Synthetic oligonucleotide; AGG chr2 60504945 60504964 60504948 -
cgcttccacagcctgcacac

SEQ ID NO: 177942 - DNA, 20 bp, Artificial Sequence
  Synthetic oligonucleotide; GGG chr2 60504944 60504963 60504947 -
gcttccacagcctgcacaca

SEQ ID NO: 177943 - DNA, 20 bp, Artificial Sequence
  Synthetic oligonucleotide; TAG chr2 60504941 60504960 60504944 -
tccacagcctgcacacaggg

SEQ ID NO: 177944 - DNA, 20 bp, Artificial Sequence
  Synthetic oligonucleotide; AGG chr2 60504940 60504959 60504943 -
ccacagcctgcacacagggt

SEQ ID NO: 177945 - DNA, 20 bp, Artificial Sequence
  Synthetic oligonucleotide; GGG chr2 60504939 60504958 60504942 -
cacagcctgcacacagggta

SEQ ID NO: 177946 - DNA, 20 bp, Artificial Sequence
  Synthetic oligonucleotide; AAG chr2 60504936 60504955 60504939 -
agcctgcacacagggtaggg

SEQ ID NO: 177947 - DNA, 20 bp, Artificial Sequence
  Synthetic oligonucleotide; TGG chr2 60504930 60504949 60504933 -
cacacagggtagggaagttg

SEQ ID NO: 177948 - DNA, 20 bp, Artificial Sequence
  Synthetic oligonucleotide; CAG chr2 60504923 60504942 60504926 -
ggtagggaagttgtggcttg

SEQ ID NO: 177949 - DNA, 20 bp, Artificial Sequence
  Synthetic oligonucleotide; AAG chr2 60504920 60504939 60504923 -
agggaagttgtggcttgcag

SEQ ID NO: 177950 - DNA, 20 bp, Artificial Sequence
  Synthetic oligonucleotide; AGG chr2 60504919 60504938 60504922 -
gggaagttgtggcttgcaga

SEQ ID NO: 177951 - DNA, 20 bp, Artificial Sequence
  Synthetic oligonucleotide; TGG chr2 60504907 60504926 60504910 -
cttgcagaaggctgtttttt

SEQ ID NO: 177952 - DNA, 20 bp, Artificial Sequence
  Synthetic oligonucleotide; GGG chr2 60504906 60504925 60504909 -
ttgcagaaggctgttttttt

SEQ ID NO: 177953 - DNA, 20 bp, Artificial Sequence
  Synthetic oligonucleotide; GGG chr2 60504905 60504924 60504908 -
tgcagaaggctgtttttttg

SEQ ID NO: 177954 - DNA, 20 bp, Artificial Sequence
  Synthetic oligonucleotide; GGG chr2 60504904 60504923 60504907 -
gcagaaggctgtttttttgg

SEQ ID NO: 177955 - DNA, 20 bp, Artificial Sequence
  Synthetic oligonucleotide; GGG chr2 60504903 60504922 60504906 -
cagaaggctgtttttttggg

SEQ ID NO: 177956 - DNA, 20 bp, Artificial Sequence
  Synthetic oligonucleotide; TAG chr2 60504886 60504905 60504889 -
ggggggacgctctgttttaa

SEQ ID NO: 177957 - DNA, 20 bp, Artificial Sequence
  Synthetic oligonucleotide; TGG chr2 60504881 60504900 60504884 -
gacgctctgttttaatagtt

SEQ ID NO: 177958 - DNA, 20 bp, Artificial Sequence
  Synthetic oligonucleotide; GAG chr2 60504879 60504898 60504882 -
cgctctgttttaatagtttg

SEQ ID NO: 177959 - DNA, 20 bp, Artificial Sequence
  Synthetic oligonucleotide; AAG chr2 60504875 60504894 60504878 -
ctgttttaatagtttggagc

SEQ ID NO: 177960 - DNA, 20 bp, Artificial Sequence
  Synthetic oligonucleotide; AGG chr2 60504874 60504893 60504877 -
tgttttaatagtttggagca

SEQ ID NO: 177961 - DNA, 20 bp, Artificial Sequence
  Synthetic oligonucleotide; AAG chr2 60504871 60504890 60504874 -
tttaatagtttggagcaagg

SEQ ID NO: 177962 - DNA, 20 bp, Artificial Sequence
  Synthetic oligonucleotide; TAG chr2 60504867 60504886 60504870 -
atagtttggagcaaggaagc

SEQ ID NO: 177963 - DNA, 20 bp, Artificial Sequence
  Synthetic oligonucleotide; TGG chr2 60504864 60504883 60504867 -
gtttggagcaaggaagctag

SEQ ID NO: 177964 - DNA, 20 bp, Artificial Sequence
  Synthetic oligonucleotide; TGG chr2 60504861 60504880 60504864 -
tggagcaaggaagctagtgg

SEQ ID NO: 177965 - DNA, 20 bp, Artificial Sequence
  Synthetic oligonucleotide; GGG chr2 60504860 60504879 60504863 -
ggagcaaggaagctagtggt

SEQ ID NO: 177966 - DNA, 20 bp, Artificial Sequence
  Synthetic oligonucleotide; TGG chr2 60504850 60504869 60504853 -
agctagtggtgggcgctcac

SEQ ID NO: 177967 - DNA, 20 bp, Artificial Sequence
  Synthetic oligonucleotide; TAG chr2 60504847 60504866 60504850 -
tagtggtgggcgctcactgg

SEQ ID NO: 177968 - DNA, 20 bp, Artificial Sequence
  Synthetic oligonucleotide; AGG chr2 60504846 60504865 60504849 -
agtggtgggcgctcactggt

SEQ ID NO: 177969 - DNA, 20 bp, Artificial Sequence
  Synthetic oligonucleotide; GGG chr2 60504845 60504864 60504848 -
gtggtgggcgctcactggta

SEQ ID NO: 177970 - DNA, 20 bp, Artificial Sequence
  Synthetic oligonucleotide; GGG chr2 60504844 60504863 60504847 -
tggtgggcgctcactggtag

SEQ ID NO: 177971 - DNA, 20 bp, Artificial Sequence
  Synthetic oligonucleotide; GAG chr2 60504842 60504861 60504845 -
gtgggcgctcactggtaggg

SEQ ID NO: 177972 - DNA, 20 bp, Artificial Sequence
  Synthetic oligonucleotide; AGG chr2 60504841 60504860 60504844 -
tgggcgctcactggtagggg

SEQ ID NO: 177973 - DNA, 20 bp, Artificial Sequence
  Synthetic oligonucleotide; TAG chr2 60504831 60504850 60504834 -
ctggtaggggaggcatgtga

SEQ ID NO: 177974 - DNA, 20 bp, Artificial Sequence
  Synthetic oligonucleotide; AGG chr2 60504830 60504849 60504833 -
tggtaggggaggcatgtgat

SEQ ID NO: 177975 - DNA, 20 bp, Artificial Sequence
  Synthetic oligonucleotide; CAG chr2 60504824 60504843 60504827 -
gggaggcatgtgataggaat

SEQ ID NO: 177976 - DNA, 20 bp, Artificial Sequence
  Synthetic oligonucleotide; AAG chr2 60504810 60504829 60504813 -
aggaatcagtttgatctttt

SEQ ID NO: 177977 - DNA, 20 bp, Artificial Sequence
  Synthetic oligonucleotide; CAG chr2 60504801 60504820 60504804 -
tttgatcttttaagcatttt

SEQ ID NO: 177978 - DNA, 20 bp, Artificial Sequence
  Synthetic oligonucleotide; AGG chr2 60504800 60504819 60504803 -
ttgatcttttaagcattttc

SEQ ID NO: 177979 - DNA, 20 bp, Artificial Sequence
  Synthetic oligonucleotide; GGG chr2 60504799 60504818 60504802 -
tgatcttttaagcattttca

SEQ ID NO: 177980 - DNA, 20 bp, Artificial Sequence
  Synthetic oligonucleotide; CAG chr2 60504795 60504814 60504798 -
cttttaagcattttcaggga

SEQ ID NO: 177981 - DNA, 20 bp, Artificial Sequence
  Synthetic oligonucleotide; AAG chr2 60504756 60504775 60504759 -
ccacctctctatataatttc

SEQ ID NO: 177982 - DNA, 20 bp, Artificial Sequence
  Synthetic oligonucleotide; TGG chr2 60504746 60504765 60504749 -
atataatttcaagacttgat

SEQ ID NO: 177983 - DNA, 20 bp, Artificial Sequence
  Synthetic oligonucleotide; AAG chr2 60504733 60504752 60504736 -
acttgattggcattgtccct

SEQ ID NO: 177984 - DNA, 20 bp, Artificial Sequence
  Synthetic oligonucleotide; CAG chr2 60504727 60504746 60504730 -
ttggcattgtccctaagcac

SEQ ID NO: 177985 - DNA, 20 bp, Artificial Sequence
  Synthetic oligonucleotide; TAG chr2 60504724 60504743 60504727 -
gcattgtccctaagcaccag

SEQ ID NO: 177986 - DNA, 20 bp, Artificial Sequence
  Synthetic oligonucleotide; AAG chr2 60504720 60504739 60504723 -
tgtccctaagcaccagtaga

SEQ ID NO: 177987 - DNA, 20 bp, Artificial Sequence
  Synthetic oligonucleotide; AAG chr2 60504713 60504732 60504716 -
aagcaccagtagaaagcttg

SEQ ID NO: 177988 - DNA, 20 bp, Artificial Sequence
  Synthetic oligonucleotide; AAG chr2 60504710 60504729 60504713 -
caccagtagaaagcttgaag

SEQ ID NO: 177989 - DNA, 20 bp, Artificial Sequence
  Synthetic oligonucleotide; CAG chr2 60504702 60504721 60504705 -
gaaagcttgaagaagcttct

SEQ ID NO: 177990 - DNA, 20 bp, Artificial Sequence
  Synthetic oligonucleotide; CAG chr2 60504690 60504709 60504693 -
aagcttctcagtaaatacat

SEQ ID NO: 177991 - DNA, 20 bp, Artificial Sequence
  Synthetic oligonucleotide; CAG chr2 60504678 60504697 60504681 -
aaatacatcagctgtatttc

SEQ ID NO: 177992 - DNA, 20 bp, Artificial Sequence
  Synthetic oligonucleotide; AGG chr2 60504677 60504696 60504680 -
aatacatcagctgtatttcc

SEQ ID NO: 177993 - DNA, 20 bp, Artificial Sequence
  Synthetic oligonucleotide; GAG chr2 60504673 60504692 60504676 -
catcagctgtatttccaggt

SEQ ID NO: 177994 - DNA, 20 bp, Artificial Sequence
  Synthetic oligonucleotide; CAG chr2 60504670 60504689 60504673 -
cagctgtatttccaggtgag

SEQ ID NO: 177995 - DNA, 20 bp, Artificial Sequence
  Synthetic oligonucleotide; GAG chr2 60504651 60504670 60504654 -
gcagtacctgctgaaatgct

SEQ ID NO: 177996 - DNA, 20 bp, Artificial Sequence
  Synthetic oligonucleotide; GAG chr2 60504649 60504668 60504652 -
agtacctgctgaaatgctga

SEQ ID NO: 177997 - DNA, 20 bp, Artificial Sequence
  Synthetic oligonucleotide; TAG chr2 60504635 60504654 60504638 -
tgctgagagaacgttctgac

SEQ ID NO: 177998 - DNA, 20 bp, Artificial Sequence
  Synthetic oligonucleotide; AGG chr2 60504634 60504653 60504637 -
gctgagagaacgttctgact

SEQ ID NO: 177999 - DNA, 20 bp, Artificial Sequence
  Synthetic oligonucleotide; GAG chr2 60504632 60504651 60504635 -
tgagagaacgttctgactag

SEQ ID NO: 178000 - DNA, 20 bp, Artificial Sequence
  Synthetic oligonucleotide; AGG chr2 60504631 60504650 60504634 -
gagagaacgttctgactagg

SEQ ID NO: 178001 - DNA, 20 bp, Artificial Sequence
  Synthetic oligonucleotide; GGG chr2 60504630 60504649 60504633 -
agagaacgttctgactagga

SEQ ID NO: 178002 - DNA, 20 bp, Artificial Sequence
  Synthetic oligonucleotide; TGG chr2 60504625 60504644 60504628 -
acgttctgactaggagggct

SEQ ID NO: 178003 - DNA, 20 bp, Artificial Sequence
  Synthetic oligonucleotide; GGG chr2 60504624 60504643 60504627 -
cgttctgactaggagggctt

SEQ ID NO: 178004 - DNA, 20 bp, Artificial Sequence
  Synthetic oligonucleotide; GGG chr2 60504623 60504642 60504626 -
gttctgactaggagggcttg

SEQ ID NO: 178005 - DNA, 20 bp, Artificial Sequence
  Synthetic oligonucleotide; GGG chr2 60504622 60504641 60504625 -
ttctgactaggagggcttgg

SEQ ID NO: 178006 - DNA, 20 bp, Artificial Sequence
  Synthetic oligonucleotide; GAG chr2 60504620 60504639 60504623 -
ctgactaggagggcttgggg

SEQ ID NO: 178007 - DNA, 20 bp, Artificial Sequence
  Synthetic oligonucleotide; CAG chr2 60504616 60504635 60504619 -
ctaggagggcttgggggaga

SEQ ID NO: 178008 - DNA, 20 bp, Artificial Sequence
  Synthetic oligonucleotide; GAG chr2 60504614 60504633 60504617 -
aggagggcttgggggagaca

SEQ ID NO: 178009 - DNA, 20 bp, Artificial Sequence
  Synthetic oligonucleotide; CAG chr2 60504610 60504629 60504613 -
gggcttgggggagacagaga

SEQ ID NO: 178010 - DNA, 20 bp, Artificial Sequence
  Synthetic oligonucleotide; GAG chr2 60504608 60504627 60504611 -
gcttgggggagacagagaca

SEQ ID NO: 178011 - DNA, 20 bp, Artificial Sequence
  Synthetic oligonucleotide; TGG chr2 60504604 60504623 60504607 -
gggggagacagagacagagt

SEQ ID NO: 178012 - DNA, 20 bp, Artificial Sequence
  Synthetic oligonucleotide; CAG chr2 60504595 60504614 60504598 -
agagacagagttggctgttt

SEQ ID NO: 178013 - DNA, 20 bp, Artificial Sequence
  Synthetic oligonucleotide; CAG chr2 60504592 60504611 60504595 -
gacagagttggctgtttcag

SEQ ID NO: 178014 - DNA, 20 bp, Artificial Sequence
  Synthetic oligonucleotide; TGG chr2 60504562 60504581 60504565 -
ctgctatttgctttttgcct

SEQ ID NO: 178015 - DNA, 20 bp, Artificial Sequence
  Synthetic oligonucleotide; GAG chr2 60504560 60504579 60504563 -
gctatttgctttttgccttg

SEQ ID NO: 178016 - DNA, 20 bp, Artificial Sequence
  Synthetic oligonucleotide; TGG chr2 60504546 60504565 60504549 -
gccttggagattattttttc

SEQ ID NO: 178017 - DNA, 20 bp, Artificial Sequence
  Synthetic oligonucleotide; GGG chr2 60504545 60504564 60504548 -
ccttggagattattttttct

SEQ ID NO: 178018 - DNA, 20 bp, Artificial Sequence
  Synthetic oligonucleotide; GAG chr2 60504530 60504549 60504533 -
tttctgggtgtcccgatgct

SEQ ID NO: 178019 - DNA, 20 bp, Artificial Sequence
  Synthetic oligonucleotide; AAG chr2 60504517 60504536 60504520 -
cgatgctgagctcccacttc

SEQ ID NO: 178020 - DNA, 20 bp, Artificial Sequence
  Synthetic oligonucleotide; AAG chr2 60504514 60504533 60504517 -
tgctgagctcccacttcaag

SEQ ID NO: 178021 - DNA, 20 bp, Artificial Sequence
  Synthetic oligonucleotide; TGG chr2 60504506 60504525 60504509 -
tcccacttcaagaagaacat

SEQ ID NO: 178022 - DNA, 20 bp, Artificial Sequence
  Synthetic oligonucleotide; CAG chr2 60504488 60504507 60504491 -
attggtataaatttacaaac

SEQ ID NO: 178023 - DNA, 20 bp, Artificial Sequence
  Synthetic oligonucleotide; AAG chr2 60504485 60504504 60504488 -
ggtataaatttacaaaccag

SEQ ID NO: 178024 - DNA, 20 bp, Artificial Sequence
  Synthetic oligonucleotide; TAG chr2 60504482 60504501 60504485 -
ataaatttacaaaccagaag

SEQ ID NO: 178025 - DNA, 20 bp, Artificial Sequence
  Synthetic oligonucleotide; CAG chr2 60504478 60504497 60504481 -
atttacaaaccagaagtagt

SEQ ID NO: 178026 - DNA, 20 bp, Artificial Sequence
  Synthetic oligonucleotide; GAG chr2 60504476 60504495 60504479 -
ttacaaaccagaagtagtca

SEQ ID NO: 178027 - DNA, 20 bp, Artificial Sequence
  Synthetic oligonucleotide; AGG chr2 60504475 60504494 60504478 -
tacaaaccagaagtagtcag

SEQ ID NO: 178028 - DNA, 20 bp, Artificial Sequence
  Synthetic oligonucleotide; TGG chr2 60504443 60504462 60504446 -
ttgttctgttattccttctt

SEQ ID NO: 178029 - DNA, 20 bp, Artificial Sequence
  Synthetic oligonucleotide; GGG chr2 60504442 60504461 60504445 -
tgttctgttattccttcttt

SEQ ID NO: 178030 - DNA, 20 bp, Artificial Sequence
  Synthetic oligonucleotide; GAG chr2 60504440 60504459 60504443 -
ttctgttattccttctttgg

SEQ ID NO: 178031 - DNA, 20 bp, Artificial Sequence
  Synthetic oligonucleotide; GAG chr2 60504438 60504457 60504441 -
ctgttattccttctttggga

SEQ ID NO: 178032 - DNA, 20 bp, Artificial Sequence
  Synthetic oligonucleotide; CAG chr2 60504435 60504454 60504438 -
ttattccttctttgggagag

SEQ ID NO: 178033 - DNA, 20 bp, Artificial Sequence
  Synthetic oligonucleotide; AGG chr2 60504434 60504453 60504437 -
tattccttctttgggagagc

SEQ ID NO: 178034 - DNA, 20 bp, Artificial Sequence
  Synthetic oligonucleotide; TGG chr2 60504430 60504449 60504433 -
ccttctttgggagagcaggc

SEQ ID NO: 178035 - DNA, 20 bp, Artificial Sequence
  Synthetic oligonucleotide; CAG chr2 60504426 60504445 60504429 -
ctttgggagagcaggctggc

SEQ ID NO: 178036 - DNA, 20 bp, Artificial Sequence
  Synthetic oligonucleotide; AGG chr2 60504425 60504444 60504428 -
tttgggagagcaggctggcc

SEQ ID NO: 178037 - DNA, 20 bp, Artificial Sequence
  Synthetic oligonucleotide; GAG chr2 60504423 60504442 60504426 -
tgggagagcaggctggccag

SEQ ID NO: 178038 - DNA, 20 bp, Artificial Sequence
  Synthetic oligonucleotide; AGG chr2 60504422 60504441 60504425 -
gggagagcaggctggccagg

SEQ ID NO: 178039 - DNA, 20 bp, Artificial Sequence
  Synthetic oligonucleotide; AAG chr2 60504419 60504438 60504422 -
agagcaggctggccaggagg

SEQ ID NO: 178040 - DNA, 20 bp, Artificial Sequence
  Synthetic oligonucleotide; AGG chr2 60504418 60504437 60504421 -
gagcaggctggccaggagga

SEQ ID NO: 178041 - DNA, 20 bp, Artificial Sequence
  Synthetic oligonucleotide; AAG chr2 60504412 60504431 60504415 -
gctggccaggaggaaggttc

SEQ ID NO: 178042 - DNA, 20 bp, Artificial Sequence
  Synthetic oligonucleotide; TAG chr2 60504397 60504416 60504400 -
ggttcaagtgtgtcatatcc

SEQ ID NO: 178043 - DNA, 20 bp, Artificial Sequence
  Synthetic oligonucleotide; CAG chr2 60504390 60504409 60504393 -
gtgtgtcatatcctagcatt

SEQ ID NO: 178044 - DNA, 20 bp, Artificial Sequence
  Synthetic oligonucleotide; TAG chr2 60504386 60504405 60504389 -
gtcatatcctagcattcaga

SEQ ID NO: 178045 - DNA, 20 bp, Artificial Sequence
  Synthetic oligonucleotide; AGG chr2 60504385 60504404 60504388 -
tcatatcctagcattcagat

SEQ ID NO: 178046 - DNA, 20 bp, Artificial Sequence
  Synthetic oligonucleotide; TGG chr2 60504382 60504401 60504385 -
tatcctagcattcagatagg

SEQ ID NO: 178047 - DNA, 20 bp, Artificial Sequence
  Synthetic oligonucleotide; CAG chr2 60504364 60504383 60504367 -
ggtggcctcctctgcctttt

SEQ ID NO: 178048 - DNA, 20 bp, Artificial Sequence
  Synthetic oligonucleotide; TGG chr2 60504361 60504380 60504364 -
ggcctcctctgccttttcag

SEQ ID NO: 178049 - DNA, 20 bp, Artificial Sequence
  Synthetic oligonucleotide; GGG chr2 60504360 60504379 60504363 -
gcctcctctgccttttcagt

SEQ ID NO: 178050 - DNA, 20 bp, Artificial Sequence
  Synthetic oligonucleotide; TGG chr2 60504357 60504376 60504360 -
tcctctgccttttcagtggg

SEQ ID NO: 178051 - DNA, 20 bp, Artificial Sequence
  Synthetic oligonucleotide; TGG chr2 60504353 60504372 60504356 -
ctgccttttcagtgggtggc

SEQ ID NO: 178052 - DNA, 20 bp, Artificial Sequence
  Synthetic oligonucleotide; GGG chr2 60504352 60504371 60504355 -
tgccttttcagtgggtggct

SEQ ID NO: 178053 - DNA, 20 bp, Artificial Sequence
  Synthetic oligonucleotide; TGG chr2 60504348 60504367 60504351 -
ttttcagtgggtggctgggc

SEQ ID NO: 178054 - DNA, 20 bp, Artificial Sequence
  Synthetic oligonucleotide; GGG chr2 60504347 60504366 60504350 -
tttcagtgggtggctgggct

SEQ ID NO: 178055 - DNA, 20 bp, Artificial Sequence
  Synthetic oligonucleotide; CAG chr2 60504334 60504353 60504337 -
ctgggctgggtgaaatcttg

SEQ ID NO: 178056 - DNA, 20 bp, Artificial Sequence
  Synthetic oligonucleotide; AAG chr2 60504326 60504345 60504329 -
ggtgaaatcttgcagtgact

SEQ ID NO: 178057 - DNA, 20 bp, Artificial Sequence
  Synthetic oligonucleotide; AAG chr2 60504322 60504341 60504325 -
aaatcttgcagtgactaaga

SEQ ID NO: 178058 - DNA, 20 bp, Artificial Sequence
  Synthetic oligonucleotide; AGG chr2 60504321 60504340 60504324 -
aatcttgcagtgactaagaa

SEQ ID NO: 178059 - DNA, 20 bp, Artificial Sequence
  Synthetic oligonucleotide; AAG chr2 60504318 60504337 60504321 -
cttgcagtgactaagaaagg

SEQ ID NO: 178060 - DNA, 20 bp, Artificial Sequence
  Synthetic oligonucleotide; AGG chr2 60504317 60504336 60504320 -
ttgcagtgactaagaaagga

SEQ ID NO: 178061 - DNA, 20 bp, Artificial Sequence
  Synthetic oligonucleotide; GGG chr2 60504316 60504335 60504319 -
tgcagtgactaagaaaggaa

SEQ ID NO: 178062 - DNA, 20 bp, Artificial Sequence
  Synthetic oligonucleotide; TGG chr2 60504313 60504332 60504316 -
agtgactaagaaaggaaggg

SEQ ID NO: 178063 - DNA, 20 bp, Artificial Sequence
  Synthetic oligonucleotide; CAG chr2 60504307 60504326 60504310 -
taagaaaggaagggtggacc

SEQ ID NO: 178064 - DNA, 20 bp, Artificial Sequence
  Synthetic oligonucleotide; AGG chr2 60504306 60504325 60504309 -
aagaaaggaagggtggaccc

SEQ ID NO: 178065 - DNA, 20 bp, Artificial Sequence
  Synthetic oligonucleotide; CAG chr2 60504303 60504322 60504306 -
aaaggaagggtggacccagg

SEQ ID NO: 178066 - DNA, 20 bp, Artificial Sequence
  Synthetic oligonucleotide; CAG chr2 60504297 60504316 60504300 -
agggtggacccaggcagacc

SEQ ID NO: 178067 - DNA, 20 bp, Artificial Sequence
  Synthetic oligonucleotide; AAG chr2 60504294 60504313 60504297 -
gtggacccaggcagacccag

SEQ ID NO: 178068 - DNA, 20 bp, Artificial Sequence
  Synthetic oligonucleotide; AGG chr2 60504293 60504312 60504296 -
tggacccaggcagacccaga

SEQ ID NO: 178069 - DNA, 20 bp, Artificial Sequence
  Synthetic oligonucleotide; CGG chr2 60504256 60504275 60504259 -
cattgatcctgcatgcgtgc

SEQ ID NO: 178070 - DNA, 20 bp, Artificial Sequence
  Synthetic oligonucleotide; TAG chr2 60504253 60504272 60504256 -
tgatcctgcatgcgtgccgg

SEQ ID NO: 178071 - DNA, 20 bp, Artificial Sequence
  Synthetic oligonucleotide; AGG chr2 60504252 60504271 60504255 -
gatcctgcatgcgtgccggt

SEQ ID NO: 178072 - DNA, 20 bp, Artificial Sequence
  Synthetic oligonucleotide; CAG chr2 60504249 60504268 60504252 -
cctgcatgcgtgccggtagg

SEQ ID NO: 178073 - DNA, 20 bp, Artificial Sequence
  Synthetic oligonucleotide; CAG chr2 60504246 60504265 60504249 -
gcatgcgtgccggtaggcag

SEQ ID NO: 178074 - DNA, 20 bp, Artificial Sequence
  Synthetic oligonucleotide; TGG chr2 60504240 60504259 60504243 -
gtgccggtaggcagcagttc

SEQ ID NO: 178075 - DNA, 20 bp, Artificial Sequence
  Synthetic oligonucleotide; TGG chr2 60504231 60504250 60504234 -
ggcagcagttctggaattgc

SEQ ID NO: 178076 - DNA, 20 bp, Artificial Sequence
  Synthetic oligonucleotide; GGG chr2 60504230 60504249 60504233 -
gcagcagttctggaattgct

SEQ ID NO: 178077 - DNA, 20 bp, Artificial Sequence
  Synthetic oligonucleotide; GGG chr2 60504229 60504248 60504232 -
cagcagttctggaattgctg

SEQ ID NO: 178078 - DNA, 20 bp, Artificial Sequence
  Synthetic oligonucleotide; CAG chr2 60504220 60504239 60504223 -
tggaattgctggggaaacca

SEQ ID NO: 178079 - DNA, 20 bp, Artificial Sequence
  Synthetic oligonucleotide; CAG chr2 60504215 60504234 60504218 -
ttgctggggaaaccacagtg

SEQ ID NO: 178080 - DNA, 20 bp, Artificial Sequence
  Synthetic oligonucleotide; GAG chr2 60504209 60504228 60504212 -
gggaaaccacagtgcagcat

SEQ ID NO: 178081 - DNA, 20 bp, Artificial Sequence
  Synthetic oligonucleotide; TGG chr2 60504203 60504222 60504206 -
ccacagtgcagcatgagccc

SEQ ID NO: 178082 - DNA, 20 bp, Artificial Sequence
  Synthetic oligonucleotide; GGG chr2 60504202 60504221 60504205 -
cacagtgcagcatgagccct

SEQ ID NO: 178083 - DNA, 20 bp, Artificial Sequence
  Synthetic oligonucleotide; GGG chr2 60504201 60504220 60504204 -
acagtgcagcatgagccctg

SEQ ID NO: 178084 - DNA, 20 bp, Artificial Sequence
  Synthetic oligonucleotide; CGG chr2 60504182 60504201 60504185 -
ggggcctgctctcttgtgcc

SEQ ID NO: 178085 - DNA, 20 bp, Artificial Sequence
  Synthetic oligonucleotide; GAG chr2 60504177 60504196 60504180 -
ctgctctcttgtgcccggct

SEQ ID NO: 178086 - DNA, 20 bp, Artificial Sequence
  Synthetic oligonucleotide; TGG chr2 60504159 60504178 60504162 -
ctgagcatctctgttctgtt

SEQ ID NO: 178087 - DNA, 20 bp, Artificial Sequence
  Synthetic oligonucleotide; GGG chr2 60504158 60504177 60504161 -
tgagcatctctgttctgttt

SEQ ID NO: 178088 - DNA, 20 bp, Artificial Sequence
  Synthetic oligonucleotide; GGG chr2 60504157 60504176 60504160 -
gagcatctctgttctgtttg

SEQ ID NO: 178089 - DNA, 20 bp, Artificial Sequence
  Synthetic oligonucleotide; GAG chr2 60504155 60504174 60504158 -
gcatctctgttctgtttggg

SEQ ID NO: 178090 - DNA, 20 bp, Artificial Sequence
  Synthetic oligonucleotide; CAG chr2 60504146 60504165 60504149 -
ttctgtttggggagtcctgc

SEQ ID NO: 178091 - DNA, 20 bp, Artificial Sequence
  Synthetic oligonucleotide; AGG chr2 60504145 60504164 60504148 -
tctgtttggggagtcctgcc

SEQ ID NO: 178092 - DNA, 20 bp, Artificial Sequence
  Synthetic oligonucleotide; AAG chr2 60504141 60504160 60504144 -
tttggggagtcctgccaggc

SEQ ID NO: 178093 - DNA, 20 bp, Artificial Sequence
  Synthetic oligonucleotide; GAG chr2 60504135 60504154 60504138 -
gagtcctgccaggcaagtgt

SEQ ID NO: 178094 - DNA, 20 bp, Artificial Sequence
  Synthetic oligonucleotide; AAG chr2 60504129 60504148 60504132 -
tgccaggcaagtgtgagtca

SEQ ID NO: 178095 - DNA, 20 bp, Artificial Sequence
  Synthetic oligonucleotide; GAG chr2 60504127 60504146 60504130 -
ccaggcaagtgtgagtcaaa

SEQ ID NO: 178096 - DNA, 20 bp, Artificial Sequence
  Synthetic oligonucleotide; AGG chr2 60504126 60504145 60504129 -
caggcaagtgtgagtcaaag

SEQ ID NO: 178097 - DNA, 20 bp, Artificial Sequence
  Synthetic oligonucleotide; GAG chr2 60504124 60504143 60504127 -
ggcaagtgtgagtcaaagag

SEQ ID NO: 178098 - DNA, 20 bp, Artificial Sequence
  Synthetic oligonucleotide; CAG chr2 60504119 60504138 60504122 -
gtgtgagtcaaagaggagac

SEQ ID NO: 178099 - DNA, 20 bp, Artificial Sequence
  Synthetic oligonucleotide; AGG chr2 60504118 60504137 60504121 -
tgtgagtcaaagaggagacc

SEQ ID NO: 178100 - DNA, 20 bp, Artificial Sequence
  Synthetic oligonucleotide; GGG chr2 60504117 60504136 60504120 -
gtgagtcaaagaggagacca

SEQ ID NO: 178101 - DNA, 20 bp, Artificial Sequence
  Synthetic oligonucleotide; TGG chr2 60504104 60504123 60504107 -
gagaccagggccctatgtca

SEQ ID NO: 178102 - DNA, 20 bp, Artificial Sequence
  Synthetic oligonucleotide; GGG chr2 60504103 60504122 60504106 -
agaccagggccctatgtcat

SEQ ID NO: 178103 - DNA, 20 bp, Artificial Sequence
  Synthetic oligonucleotide; GGG chr2 60504102 60504121 60504105 -
gaccagggccctatgtcatg

SEQ ID NO: 178104 - DNA, 20 bp, Artificial Sequence
  Synthetic oligonucleotide; GGG chr2 60504101 60504120 60504104 -
accagggccctatgtcatgg

SEQ ID NO: 178105 - DNA, 20 bp, Artificial Sequence
  Synthetic oligonucleotide; CAG chr2 60504098 60504117 60504101 -
agggccctatgtcatggggg

SEQ ID NO: 178106 - DNA, 20 bp, Artificial Sequence
  Synthetic oligonucleotide; CGG chr2 60504092 60504111 60504095 -
ctatgtcatgggggcagtgt

SEQ ID NO: 178107 - DNA, 20 bp, Artificial Sequence
  Synthetic oligonucleotide; GAG chr2 60504087 60504106 60504090 -
tcatgggggcagtgtcggct

SEQ ID NO: 178108 - DNA, 20 bp, Artificial Sequence
  Synthetic oligonucleotide; TGG chr2 60504084 60504103 60504087 -
tgggggcagtgtcggctgag

SEQ ID NO: 178109 - DNA, 20 bp, Artificial Sequence
  Synthetic oligonucleotide; CAG chr2 60504074 60504093 60504077 -
gtcggctgagtggtactctt

SEQ ID NO: 178110 - DNA, 20 bp, Artificial Sequence
  Synthetic oligonucleotide; GAG chr2 60504072 60504091 60504075 -
cggctgagtggtactcttca

SEQ ID NO: 178111 - DNA, 20 bp, Artificial Sequence
  Synthetic oligonucleotide; CAG chr2 60504065 60504084 60504068 -
gtggtactcttcagagttct

SEQ ID NO: 178112 - DNA, 20 bp, Artificial Sequence
  Synthetic oligonucleotide; AAG chr2 60504049 60504068 60504052 -
ttctcagaatgtgccgctcg

SEQ ID NO: 178113 - DNA, 20 bp, Artificial Sequence
  Synthetic oligonucleotide; TAG chr2 60504041 60504060 60504044 -
atgtgccgctcgaagccatg

SEQ ID NO: 178114 - DNA, 20 bp, Artificial Sequence
  Synthetic oligonucleotide; AGG chr2 60504040 60504059 60504043 -
tgtgccgctcgaagccatgt

SEQ ID NO: 178115 - DNA, 20 bp, Artificial Sequence
  Synthetic oligonucleotide; CAG chr2 60504033 60504052 60504036 -
ctcgaagccatgtaggcttc

SEQ ID NO: 178116 - DNA, 20 bp, Artificial Sequence
  Synthetic oligonucleotide; CAG chr2 60504030 60504049 60504033 -
gaagccatgtaggcttccag

SEQ ID NO: 178117 - DNA, 20 bp, Artificial Sequence
  Synthetic oligonucleotide; AGG chr2 60504029 60504048 60504032 -
aagccatgtaggcttccagc

SEQ ID NO: 178118 - DNA, 20 bp, Artificial Sequence
  Synthetic oligonucleotide; TAG chr2 60504022 60504041 60504025 -
gtaggcttccagcaggcttc

SEQ ID NO: 178119 - DNA, 20 bp, Artificial Sequence
  Synthetic oligonucleotide; CAG chr2 60504019 60504038 60504022 -
ggcttccagcaggcttctag

SEQ ID NO: 178120 - DNA, 20 bp, Artificial Sequence
  Synthetic oligonucleotide; TGG chr2 60504015 60504034 60504018 -
tccagcaggcttctagcaga

SEQ ID NO: 178121 - DNA, 20 bp, Artificial Sequence
  Synthetic oligonucleotide; GGG chr2 60504014 60504033 60504017 -
ccagcaggcttctagcagat

SEQ ID NO: 178122 - DNA, 20 bp, Artificial Sequence
  Synthetic oligonucleotide; GGG chr2 60504013 60504032 60504016 -
cagcaggcttctagcagatg

SEQ ID NO: 178123 - DNA, 20 bp, Artificial Sequence
  Synthetic oligonucleotide; TGG chr2 60504007 60504026 60504010 -
gcttctagcagatggggttt

SEQ ID NO: 178124 - DNA, 20 bp, Artificial Sequence
  Synthetic oligonucleotide; TGG chr2 60504003 60504022 60504006 -
ctagcagatggggttttggc

SEQ ID NO: 178125 - DNA, 20 bp, Artificial Sequence
  Synthetic oligonucleotide; GGG chr2 60504002 60504021 60504005 -
tagcagatggggttttggct

SEQ ID NO: 178126 - DNA, 20 bp, Artificial Sequence
  Synthetic oligonucleotide; TGG chr2 60503998 60504017 60504001 -
agatggggttttggctgggt

SEQ ID NO: 178127 - DNA, 20 bp, Artificial Sequence
  Synthetic oligonucleotide; GGG chr2 60503997 60504016 60504000 -
gatggggttttggctgggtt

SEQ ID NO: 178128 - DNA, 20 bp, Artificial Sequence
  Synthetic oligonucleotide; CAG chr2 60503984 60504003 60503987 -
ctgggttgggccttaatact

SEQ ID NO: 178129 - DNA, 20 bp, Artificial Sequence
  Synthetic oligonucleotide; TAG chr2 60503919 60503938 60503922 -
ttcttgctttcttttttttc

SEQ ID NO: 178130 - DNA, 20 bp, Artificial Sequence
  Synthetic oligonucleotide; AAG chr2 60503908 60503927 60503911 -
ttttttttctagaatcaacg

SEQ ID NO: 178131 - DNA, 20 bp, Artificial Sequence
  Synthetic oligonucleotide; CAG chr2 60503905 60503924 60503908 -
tttttctagaatcaacgaag

SEQ ID NO: 178132 - DNA, 20 bp, Artificial Sequence
  Synthetic oligonucleotide; CAG chr2 60503887 60503906 60503890 -
agcagccaataaccaatttt

SEQ ID NO: 178133 - DNA, 20 bp, Artificial Sequence
  Synthetic oligonucleotide; AGG chr2 60503886 60503905 60503889 -
gcagccaataaccaattttc

SEQ ID NO: 178134 - DNA, 20 bp, Artificial Sequence
  Synthetic oligonucleotide; GAG chr2 60503884 60503903 60503887 -
agccaataaccaattttcag

SEQ ID NO: 178135 - DNA, 20 bp, Artificial Sequence
  Synthetic oligonucleotide; AGG chr2 60503883 60503902 60503886 -
gccaataaccaattttcagg

SEQ ID NO: 178136 - DNA, 20 bp, Artificial Sequence
  Synthetic oligonucleotide; TAG chr2 60503878 60503897 60503881 -
taaccaattttcaggaggtt

SEQ ID NO: 178137 - DNA, 20 bp, Artificial Sequence
  Synthetic oligonucleotide; AAG chr2 60503829 60503848 60503832 -
aaaattttattaaaataata

SEQ ID NO: 178138 - DNA, 20 bp, Artificial Sequence
  Synthetic oligonucleotide; AAG chr2 60503817 60503836 60503820 -
aaataataaagctctgacaa

SEQ ID NO: 178139 - DNA, 20 bp, Artificial Sequence
  Synthetic oligonucleotide; CAG chr2 60503811 60503830 60503814 -
taaagctctgacaaaagatc

SEQ ID NO: 178140 - DNA, 20 bp, Artificial Sequence
  Synthetic oligonucleotide; CAG chr2 60503794 60503813 60503797 -
atccagaatattgtcccttg

SEQ ID NO: 178141 - DNA, 20 bp, Artificial Sequence
  Synthetic oligonucleotide; TGG chr2 60503791 60503810 60503794 -
cagaatattgtcccttgcag

SEQ ID NO: 178142 - DNA, 20 bp, Artificial Sequence
  Synthetic oligonucleotide; GGG chr2 60503790 60503809 60503793 -
agaatattgtcccttgcagt

SEQ ID NO: 178143 - DNA, 20 bp, Artificial Sequence
  Synthetic oligonucleotide; TAG chr2 60503784 60503803 60503787 -
ttgtcccttgcagtgggctt

SEQ ID NO: 178144 - DNA, 20 bp, Artificial Sequence
  Synthetic oligonucleotide; AGG chr2 60503783 60503802 60503786 -
tgtcccttgcagtgggcttt

SEQ ID NO: 178145 - DNA, 20 bp, Artificial Sequence
  Synthetic oligonucleotide; GGG chr2 60503782 60503801 60503785 -
gtcccttgcagtgggcttta

SEQ ID NO: 178146 - DNA, 20 bp, Artificial Sequence
  Synthetic oligonucleotide; TGG chr2 60503771 60503790 60503774 -
tgggctttagggttgcatct

SEQ ID NO: 178147 - DNA, 20 bp, Artificial Sequence
  Synthetic oligonucleotide; TAG chr2 60503755 60503774 60503758 -
atcttggctcctaaatcttc

SEQ ID NO: 178148 - DNA, 20 bp, Artificial Sequence
  Synthetic oligonucleotide; AGG chr2 60503754 60503773 60503757 -
tcttggctcctaaatcttct

SEQ ID NO: 178149 - DNA, 20 bp, Artificial Sequence
  Synthetic oligonucleotide; CGG chr2 60503751 60503770 60503754 -
tggctcctaaatcttctagg

SEQ ID NO: 178150 - DNA, 20 bp, Artificial Sequence
  Synthetic oligonucleotide; GGG chr2 60503750 60503769 60503753 -
ggctcctaaatcttctaggc

SEQ ID NO: 178151 - DNA, 20 bp, Artificial Sequence
  Synthetic oligonucleotide; TAG chr2 60503741 60503760 60503744 -
atcttctaggcgggttaaat

SEQ ID NO: 178152 - DNA, 20 bp, Artificial Sequence
  Synthetic oligonucleotide; TGG chr2 60503714 60503733 60503717 -
cacaaaatgtcacatttccc

SEQ ID NO: 178153 - DNA, 20 bp, Artificial Sequence
  Synthetic oligonucleotide; CAG chr2 60503711 60503730 60503714 -
aaaatgtcacatttccctgg

SEQ ID NO: 178154 - DNA, 20 bp, Artificial Sequence
  Synthetic oligonucleotide; TAG chr2 60503705 60503724 60503708 -
tcacatttccctggcagcta

SEQ ID NO: 178155 - DNA, 20 bp, Artificial Sequence
  Synthetic oligonucleotide; AGG chr2 60503704 60503723 60503707 -
cacatttccctggcagctat

SEQ ID NO: 178156 - DNA, 20 bp, Artificial Sequence
  Synthetic oligonucleotide; CAG chr2 60503697 60503716 60503700 -
ccctggcagctataggtttc

SEQ ID NO: 178157 - DNA, 20 bp, Artificial Sequence
  Synthetic oligonucleotide; AGG chr2 60503696 60503715 60503699 -
cctggcagctataggtttcc

SEQ ID NO: 178158 - DNA, 20 bp, Artificial Sequence
  Synthetic oligonucleotide; GAG chr2 60503694 60503713 60503697 -
tggcagctataggtttccag

SEQ ID NO: 178159 - DNA, 20 bp, Artificial Sequence
  Synthetic oligonucleotide; AGG chr2 60503693 60503712 60503696 -
ggcagctataggtttccagg

SEQ ID NO: 178160 - DNA, 20 bp, Artificial Sequence
  Synthetic oligonucleotide; GGG chr2 60503692 60503711 60503695 -
gcagctataggtttccagga

SEQ ID NO: 178161 - DNA, 20 bp, Artificial Sequence
  Synthetic oligonucleotide; AAG chr2 60503684 60503703 60503687 -
aggtttccaggagggtgaac

SEQ ID NO: 178162 - DNA, 20 bp, Artificial Sequence
  Synthetic oligonucleotide; AGG chr2 60503683 60503702 60503686 -
ggtttccaggagggtgaaca

SEQ ID NO: 178163 - DNA, 20 bp, Artificial Sequence
  Synthetic oligonucleotide; GGG chr2 60503682 60503701 60503685 -
gtttccaggagggtgaacaa

SEQ ID NO: 178164 - DNA, 20 bp, Artificial Sequence
  Synthetic oligonucleotide; TGG chr2 60503674 60503693 60503677 -
gagggtgaacaagggccatc

SEQ ID NO: 178165 - DNA, 20 bp, Artificial Sequence
  Synthetic oligonucleotide; GGG chr2 60503673 60503692 60503676 -
agggtgaacaagggccatct

SEQ ID NO: 178166 - DNA, 20 bp, Artificial Sequence
  Synthetic oligonucleotide; GAG chr2 60503662 60503681 60503665 -
gggccatctgggtgtttgct

SEQ ID NO: 178167 - DNA, 20 bp, Artificial Sequence
  Synthetic oligonucleotide; AGG chr2 60503661 60503680 60503664 -
ggccatctgggtgtttgctg

SEQ ID NO: 178168 - DNA, 20 bp, Artificial Sequence
  Synthetic oligonucleotide; GGG chr2 60503660 60503679 60503663 -
gccatctgggtgtttgctga

SEQ ID NO: 178169 - DNA, 20 bp, Artificial Sequence
  Synthetic oligonucleotide; CAG chr2 60503652 60503671 60503655 -
ggtgtttgctgagggcttct

SEQ ID NO: 178170 - DNA, 20 bp, Artificial Sequence
  Synthetic oligonucleotide; TGG chr2 60503646 60503665 60503649 -
tgctgagggcttctcagtcc

SEQ ID NO: 178171 - DNA, 20 bp, Artificial Sequence
  Synthetic oligonucleotide; GGG chr2 60503645 60503664 60503648 -
gctgagggcttctcagtcct

SEQ ID NO: 178172 - DNA, 20 bp, Artificial Sequence
  Synthetic oligonucleotide; TAG chr2 60503642 60503661 60503645 -
gagggcttctcagtcctggg

SEQ ID NO: 178173 - DNA, 20 bp, Artificial Sequence
  Synthetic oligonucleotide; AGG chr2 60503641 60503660 60503644 -
agggcttctcagtcctgggt

SEQ ID NO: 178174 - DNA, 20 bp, Artificial Sequence
  Synthetic oligonucleotide; TGG chr2 60503632 60503651 60503635 -
cagtcctgggtaggaactgc

SEQ ID NO: 178175 - DNA, 20 bp, Artificial Sequence
  Synthetic oligonucleotide; GGG chr2 60503631 60503650 60503634 -
agtcctgggtaggaactgct

SEQ ID NO: 178176 - DNA, 20 bp, Artificial Sequence
  Synthetic oligonucleotide; TGG chr2 60503626 60503645 60503629 -
tgggtaggaactgctgggtg

SEQ ID NO: 178177 - DNA, 20 bp, Artificial Sequence
  Synthetic oligonucleotide; AAG chr2 60503615 60503634 60503618 -
tgctgggtgtggaaaccacc

SEQ ID NO: 178178 - DNA, 20 bp, Artificial Sequence
  Synthetic oligonucleotide; AGG chr2 60503614 60503633 60503617 -
gctgggtgtggaaaccacca

SEQ ID NO: 178179 - DNA, 20 bp, Artificial Sequence
  Synthetic oligonucleotide; AAG chr2 60503605 60503624 60503608 -
ggaaaccaccaaggctttgt

SEQ ID NO: 178180 - DNA, 20 bp, Artificial Sequence
  Synthetic oligonucleotide; AAG chr2 60503597 60503616 60503600 -
ccaaggctttgtaagcctga

SEQ ID NO: 178181 - DNA, 20 bp, Artificial Sequence
  Synthetic oligonucleotide; GAG chr2 60503595 60503614 60503598 -
aaggctttgtaagcctgaaa

SEQ ID NO: 178182 - DNA, 20 bp, Artificial Sequence
  Synthetic oligonucleotide; TGG chr2 60503588 60503607 60503591 -
tgtaagcctgaaagagccac

SEQ ID NO: 178183 - DNA, 20 bp, Artificial Sequence
  Synthetic oligonucleotide; TGG chr2 60503582 60503601 60503585 -
cctgaaagagccactggtat

SEQ ID NO: 178184 - DNA, 20 bp, Artificial Sequence
  Synthetic oligonucleotide; GGG chr2 60503581 60503600 60503584 -
ctgaaagagccactggtatt

SEQ ID NO: 178185 - DNA, 20 bp, Artificial Sequence
  Synthetic oligonucleotide; GAG chr2 60503579 60503598 60503582 -
gaaagagccactggtattgg

SEQ ID NO: 178186 - DNA, 20 bp, Artificial Sequence
  Synthetic oligonucleotide; TGG chr2 60503574 60503593 60503577 -
agccactggtattgggagct

SEQ ID NO: 178187 - DNA, 20 bp, Artificial Sequence
  Synthetic oligonucleotide; CAG chr2 60503563 60503582 60503566 -
ttgggagcttggtctgcact

SEQ ID NO: 178188 - DNA, 20 bp, Artificial Sequence
  Synthetic oligonucleotide; GAG chr2 60503556 60503575 60503559 -
cttggtctgcactcagacct

SEQ ID NO: 178189 - DNA, 20 bp, Artificial Sequence
  Synthetic oligonucleotide; CAG chr2 60503535 60503554 60503538 -
agcgccacacattattttcc

SEQ ID NO: 178190 - DNA, 20 bp, Artificial Sequence
  Synthetic oligonucleotide; TGG chr2 60503529 60503548 60503532 -
acacattattttcccagatt

SEQ ID NO: 178191 - DNA, 20 bp, Artificial Sequence
  Synthetic oligonucleotide; GGG chr2 60503528 60503547 60503531 -
cacattattttcccagattt

SEQ ID NO: 178192 - DNA, 20 bp, Artificial Sequence
  Synthetic oligonucleotide; TGG chr2 60503517 60503536 60503520 -
cccagatttgggcaatctaa

SEQ ID NO: 178193 - DNA, 20 bp, Artificial Sequence
  Synthetic oligonucleotide; TAG chr2 60503513 60503532 60503516 -
gatttgggcaatctaatgga

SEQ ID NO: 178194 - DNA, 20 bp, Artificial Sequence
  Synthetic oligonucleotide; AGG chr2 60503512 60503531 60503515 -
atttgggcaatctaatggat

SEQ ID NO: 178195 - DNA, 20 bp, Artificial Sequence
  Synthetic oligonucleotide; GAG chr2 60503510 60503529 60503513 -
ttgggcaatctaatggatag

SEQ ID NO: 178196 - DNA, 20 bp, Artificial Sequence
  Synthetic oligonucleotide; AGG chr2 60503509 60503528 60503512 -
tgggcaatctaatggatagg

SEQ ID NO: 178197 - DNA, 20 bp, Artificial Sequence
  Synthetic oligonucleotide; GGG chr2 60503508 60503527 60503511 -
gggcaatctaatggatagga

SEQ ID NO: 178198 - DNA, 20 bp, Artificial Sequence
  Synthetic oligonucleotide; GAG chr2 60503506 60503525 60503509 -
gcaatctaatggataggagg

SEQ ID NO: 178199 - DNA, 20 bp, Artificial Sequence
  Synthetic oligonucleotide; AGG chr2 60503505 60503524 60503508 -
caatctaatggataggaggg

SEQ ID NO: 178200 - DNA, 20 bp, Artificial Sequence
  Synthetic oligonucleotide; GGG chr2 60503504 60503523 60503507 -
aatctaatggataggaggga

SEQ ID NO: 178201 - DNA, 20 bp, Artificial Sequence
  Synthetic oligonucleotide; TAG chr2 60503483 60503502 60503486 -
ggttatgccccatctgtgaa

SEQ ID NO: 178202 - DNA, 20 bp, Artificial Sequence
  Synthetic oligonucleotide; AGG chr2 60503482 60503501 60503485 -
gttatgccccatctgtgaat

SEQ ID NO: 178203 - DNA, 20 bp, Artificial Sequence
  Synthetic oligonucleotide; TGG chr2 60503479 60503498 60503482 -
atgccccatctgtgaatagg

SEQ ID NO: 178204 - DNA, 20 bp, Artificial Sequence
  Synthetic oligonucleotide; GAG chr2 60503477 60503496 60503480 -
gccccatctgtgaataggtg

SEQ ID NO: 178205 - DNA, 20 bp, Artificial Sequence
  Synthetic oligonucleotide; AGG chr2 60503476 60503495 60503479 -
ccccatctgtgaataggtgg

SEQ ID NO: 178206 - DNA, 20 bp, Artificial Sequence
  Synthetic oligonucleotide; GAG chr2 60503474 60503493 60503477 -
ccatctgtgaataggtggag

SEQ ID NO: 178207 - DNA, 20 bp, Artificial Sequence
  Synthetic oligonucleotide; GAG chr2 60503472 60503491 60503475 -
atctgtgaataggtggagga

SEQ ID NO: 178208 - DNA, 20 bp, Artificial Sequence
  Synthetic oligonucleotide; AGG chr2 60503471 60503490 60503474 -
tctgtgaataggtggaggag

SEQ ID NO: 178209 - DNA, 20 bp, Artificial Sequence
  Synthetic oligonucleotide; GGG chr2 60503470 60503489 60503473 -
ctgtgaataggtggaggaga

SEQ ID NO: 178210 - DNA, 20 bp, Artificial Sequence
  Synthetic oligonucleotide; CAG chr2 60503465 60503484 60503468 -
aataggtggaggagagggtc

SEQ ID NO: 178211 - DNA, 20 bp, Artificial Sequence
  Synthetic oligonucleotide; GAG chr2 60503463 60503482 60503466 -
taggtggaggagagggtcca

SEQ ID NO: 178212 - DNA, 20 bp, Artificial Sequence
  Synthetic oligonucleotide; CAG chr2 60503450 60503469 60503453 -
gggtccagagaaaattgttg

SEQ ID NO: 178213 - DNA, 20 bp, Artificial Sequence
  Synthetic oligonucleotide; CAG chr2 60503443 60503462 60503446 -
gagaaaattgttgcagtgct

SEQ ID NO: 178214 - DNA, 20 bp, Artificial Sequence
  Synthetic oligonucleotide; GAG chr2 60503441 60503460 60503444 -
gaaaattgttgcagtgctca

SEQ ID NO: 178215 - DNA, 20 bp, Artificial Sequence
  Synthetic oligonucleotide; AGG chr2 60503440 60503459 60503443 -
aaaattgttgcagtgctcag

SEQ ID NO: 178216 - DNA, 20 bp, Artificial Sequence
  Synthetic oligonucleotide; AAG chr2 60503437 60503456 60503440 -
attgttgcagtgctcagagg

SEQ ID NO: 178217 - DNA, 20 bp, Artificial Sequence
  Synthetic oligonucleotide; TAG chr2 60503431 60503450 60503434 -
gcagtgctcagaggaagcaa

SEQ ID NO: 178218 - DNA, 20 bp, Artificial Sequence
  Synthetic oligonucleotide; CAG chr2 60503416 60503435 60503419 -
agcaatagcctactgtcttc

SEQ ID NO: 178219 - DNA, 20 bp, Artificial Sequence
  Synthetic oligonucleotide; AGG chr2 60503415 60503434 60503418 -
gcaatagcctactgtcttcc

SEQ ID NO: 178220 - DNA, 20 bp, Artificial Sequence
  Synthetic oligonucleotide; GGG chr2 60503414 60503433 60503417 -
caatagcctactgtcttcca

SEQ ID NO: 178221 - DNA, 20 bp, Artificial Sequence
  Synthetic oligonucleotide; TGG chr2 60503404 60503423 60503407 -
ctgtcttccagggacatgtc

SEQ ID NO: 178222 - DNA, 20 bp, Artificial Sequence
  Synthetic oligonucleotide; TGG chr2 60503397 60503416 60503400 -
ccagggacatgtctggctcc

SEQ ID NO: 178223 - DNA, 20 bp, Artificial Sequence
  Synthetic oligonucleotide; CAG chr2 60503384 60503403 60503387 -
tggctcctggaatgcctgtc

SEQ ID NO: 178224 - DNA, 20 bp, Artificial Sequence
  Synthetic oligonucleotide; AGG chr2 60503383 60503402 60503386 -
ggctcctggaatgcctgtcc

SEQ ID NO: 178225 - DNA, 20 bp, Artificial Sequence
  Synthetic oligonucleotide; CGG chr2 60503377 60503396 60503380 -
tggaatgcctgtccaggctg

SEQ ID NO: 178226 - DNA, 20 bp, Artificial Sequence
  Synthetic oligonucleotide; TGG chr2 60503374 60503393 60503377 -
aatgcctgtccaggctgcgg

SEQ ID NO: 178227 - DNA, 20 bp, Artificial Sequence
  Synthetic oligonucleotide; GGG chr2 60503373 60503392 60503376 -
atgcctgtccaggctgcggt

SEQ ID NO: 178228 - DNA, 20 bp, Artificial Sequence
  Synthetic oligonucleotide; TGG chr2 60503370 60503389 60503373 -
cctgtccaggctgcggtggg

SEQ ID NO: 178229 - DNA, 20 bp, Artificial Sequence
  Synthetic oligonucleotide; TGG chr2 60503365 60503384 60503368 -
ccaggctgcggtgggtggca

SEQ ID NO: 178230 - DNA, 20 bp, Artificial Sequence
  Synthetic oligonucleotide; GGG chr2 60503364 60503383 60503367 -
caggctgcggtgggtggcat

SEQ ID NO: 178231 - DNA, 20 bp, Artificial Sequence
  Synthetic oligonucleotide; AAG chr2 60503360 60503379 60503363 -
ctgcggtgggtggcatgggt

SEQ ID NO: 178232 - DNA, 20 bp, Artificial Sequence
  Synthetic oligonucleotide; AGG chr2 60503359 60503378 60503362 -
tgcggtgggtggcatgggta

SEQ ID NO: 178233 - DNA, 20 bp, Artificial Sequence
  Synthetic oligonucleotide; GGG chr2 60503358 60503377 60503361 -
gcggtgggtggcatgggtaa

SEQ ID NO: 178234 - DNA, 20 bp, Artificial Sequence
  Synthetic oligonucleotide; AAG chr2 60503344 60503363 60503347 -
gggtaagggtttttaataaa

SEQ ID NO: 178235 - DNA, 20 bp, Artificial Sequence
  Synthetic oligonucleotide; TGG chr2 60503331 60503350 60503334 -
taataaaaagtcacaatgcc

SEQ ID NO: 178236 - DNA, 20 bp, Artificial Sequence
  Synthetic oligonucleotide; GAG chr2 60503329 60503348 60503332 -
ataaaaagtcacaatgcctg

SEQ ID NO: 178237 - DNA, 20 bp, Artificial Sequence
  Synthetic oligonucleotide; AAG chr2 60503326 60503345 60503329 -
aaaagtcacaatgcctggag

SEQ ID NO: 178238 - DNA, 20 bp, Artificial Sequence
  Synthetic oligonucleotide; GAG chr2 60503322 60503341 60503325 -
gtcacaatgcctggagaagt

SEQ ID NO: 178239 - DNA, 20 bp, Artificial Sequence
  Synthetic oligonucleotide; AGG chr2 60503321 60503340 60503324 -
tcacaatgcctggagaagtg

SEQ ID NO: 178240 - DNA, 20 bp, Artificial Sequence
  Synthetic oligonucleotide; CAG chr2 60503311 60503330 60503314 -
tggagaagtgaggctccttg

SEQ ID NO: 178241 - DNA, 20 bp, Artificial Sequence
  Synthetic oligonucleotide; TGG chr2 60503289 60503308 60503292 -
gccacctgccttttctgtct

SEQ ID NO: 178242 - DNA, 20 bp, Artificial Sequence
  Synthetic oligonucleotide; GGG chr2 60503288 60503307 60503291 -
ccacctgccttttctgtctt

SEQ ID NO: 178243 - DNA, 20 bp, Artificial Sequence
  Synthetic oligonucleotide; TGG chr2 60503280 60503299 60503283 -
cttttctgtcttgggtctcc

SEQ ID NO: 178244 - DNA, 20 bp, Artificial Sequence
  Synthetic oligonucleotide; TGG chr2 60503276 60503295 60503279 -
tctgtcttgggtctcctggt

SEQ ID NO: 178245 - DNA, 20 bp, Artificial Sequence
  Synthetic oligonucleotide; TGG chr2 60503264 60503283 60503267 -
ctcctggttggaccccattc

SEQ ID NO: 178246 - DNA, 20 bp, Artificial Sequence
  Synthetic oligonucleotide; TGG chr2 60503252 60503271 60503255 -
ccccattctggctttccacc

SEQ ID NO: 178247 - DNA, 20 bp, Artificial Sequence
  Synthetic oligonucleotide; CAG chr2 60503248 60503267 60503251 -
attctggctttccacctggt

SEQ ID NO: 178248 - DNA, 20 bp, Artificial Sequence
  Synthetic oligonucleotide; GAG chr2 60503246 60503265 60503249 -
tctggctttccacctggtca

SEQ ID NO: 178249 - DNA, 20 bp, Artificial Sequence
  Synthetic oligonucleotide; GAG chr2 60503237 60503256 60503240 -
ccacctggtcagagcctcct

SEQ ID NO: 178250 - DNA, 20 bp, Artificial Sequence
  Synthetic oligonucleotide; AGG chr2 60503236 60503255 60503239 -
cacctggtcagagcctcctg

SEQ ID NO: 178251 - DNA, 20 bp, Artificial Sequence
  Synthetic oligonucleotide; CAG chr2 60503230 60503249 60503233 -
gtcagagcctcctgaggctg

SEQ ID NO: 178252 - DNA, 20 bp, Artificial Sequence
  Synthetic oligonucleotide; TGG chr2 60503225 60503244 60503228 -
agcctcctgaggctgcagaa

SEQ ID NO: 178253 - DNA, 20 bp, Artificial Sequence
  Synthetic oligonucleotide; GGG chr2 60503224 60503243 60503227 -
gcctcctgaggctgcagaat

SEQ ID NO: 178254 - DNA, 20 bp, Artificial Sequence
  Synthetic oligonucleotide; GGG chr2 60503223 60503242 60503226 -
cctcctgaggctgcagaatg

SEQ ID NO: 178255 - DNA, 20 bp, Artificial Sequence
  Synthetic oligonucleotide; AAG chr2 60503209 60503228 60503212 -
agaatggggctaacatgatc

SEQ ID NO: 178256 - DNA, 20 bp, Artificial Sequence
  Synthetic oligonucleotide; AGG chr2 60503208 60503227 60503211 -
gaatggggctaacatgatca

SEQ ID NO: 178257 - DNA, 20 bp, Artificial Sequence
  Synthetic oligonucleotide; GGG chr2 60503207 60503226 60503210 -
aatggggctaacatgatcaa

SEQ ID NO: 178258 - DNA, 20 bp, Artificial Sequence
  Synthetic oligonucleotide; TGG chr2 60503199 60503218 60503202 -
taacatgatcaagggtgatg

SEQ ID NO: 178259 - DNA, 20 bp, Artificial Sequence
  Synthetic oligonucleotide; TGG chr2 60503185 60503204 60503188 -
gtgatgtggcttctccatct

SEQ ID NO: 178260 - DNA, 20 bp, Artificial Sequence
  Synthetic oligonucleotide; GGG chr2 60503184 60503203 60503187 -
tgatgtggcttctccatctt

SEQ ID NO: 178261 - DNA, 20 bp, Artificial Sequence
  Synthetic oligonucleotide; TAG chr2 60503179 60503198 60503182 -
tggcttctccatcttgggac

SEQ ID NO: 178262 - DNA, 20 bp, Artificial Sequence
  Synthetic oligonucleotide; AGG chr2 60503178 60503197 60503181 -
ggcttctccatcttgggact

SEQ ID NO: 178263 - DNA, 20 bp, Artificial Sequence
  Synthetic oligonucleotide; GAG chr2 60503176 60503195 60503179 -
cttctccatcttgggactag

SEQ ID NO: 178264 - DNA, 20 bp, Artificial Sequence
  Synthetic oligonucleotide; CAG chr2 60503169 60503188 60503172 -
atcttgggactaggagtgac

SEQ ID NO: 178265 - DNA, 20 bp, Artificial Sequence
  Synthetic oligonucleotide; AGG chr2 60503168 60503187 60503171 -
tcttgggactaggagtgacc

SEQ ID NO: 178266 - DNA, 20 bp, Artificial Sequence
  Synthetic oligonucleotide; TAG chr2 60503163 60503182 60503166 -
ggactaggagtgaccaggtt

SEQ ID NO: 178267 - DNA, 20 bp, Artificial Sequence
  Synthetic oligonucleotide; GAG chr2 60503161 60503180 60503164 -
actaggagtgaccaggttta

SEQ ID NO: 178268 - DNA, 20 bp, Artificial Sequence
  Synthetic oligonucleotide; AAG chr2 60503158 60503177 60503161 -
aggagtgaccaggtttagag

SEQ ID NO: 178269 - DNA, 20 bp, Artificial Sequence
  Synthetic oligonucleotide; AGG chr2 60503157 60503176 60503160 -
ggagtgaccaggtttagaga

SEQ ID NO: 178270 - DNA, 20 bp, Artificial Sequence
  Synthetic oligonucleotide; TGG chr2 60503154 60503173 60503157 -
gtgaccaggtttagagaagg

SEQ ID NO: 178271 - DNA, 20 bp, Artificial Sequence
  Synthetic oligonucleotide; CAG chr2 60503130 60503149 60503133 -
ctcattcctgctcccattgc

SEQ ID NO: 178272 - DNA, 20 bp, Artificial Sequence
  Synthetic oligonucleotide; AGG chr2 60503129 60503148 60503132 -
tcattcctgctcccattgcc

SEQ ID NO: 178273 - DNA, 20 bp, Artificial Sequence
  Synthetic oligonucleotide; CAG chr2 60503119 60503138 60503122 -
tcccattgccaggacaaatg

SEQ ID NO: 178274 - DNA, 20 bp, Artificial Sequence
  Synthetic oligonucleotide; GAG chr2 60503117 60503136 60503120 -
ccattgccaggacaaatgca

SEQ ID NO: 178275 - DNA, 20 bp, Artificial Sequence
  Synthetic oligonucleotide; TGG chr2 60503114 60503133 60503117 -
ttgccaggacaaatgcagag

SEQ ID NO: 178276 - DNA, 20 bp, Artificial Sequence
  Synthetic oligonucleotide; TGG chr2 60503108 60503127 60503111 -
ggacaaatgcagagtggatc

SEQ ID NO: 178277 - DNA, 20 bp, Artificial Sequence
  Synthetic oligonucleotide; GGG chr2 60503107 60503126 60503110 -
gacaaatgcagagtggatct

SEQ ID NO: 178278 - DNA, 20 bp, Artificial Sequence
  Synthetic oligonucleotide; CAG chr2 60503089 60503108 60503092 -
ctgggtctgtcccttccaca

SEQ ID NO: 178279 - DNA, 20 bp, Artificial Sequence
  Synthetic oligonucleotide; AAG chr2 60503054 60503073 60503057 -
caacacattccgtgtgtatt

SEQ ID NO: 178280 - DNA, 20 bp, Artificial Sequence
  Synthetic oligonucleotide; CAG chr2 60503047 60503066 60503050 -
ttccgtgtgtattaagatga

SEQ ID NO: 178281 - DNA, 20 bp, Artificial Sequence
  Synthetic oligonucleotide; TGG chr2 60503038 60503057 60503041 -
tattaagatgacagacacgt

SEQ ID NO: 178282 - DNA, 20 bp, Artificial Sequence
  Synthetic oligonucleotide; AAG chr2 60503026 60503045 60503029 -
agacacgttggttttgctcc

SEQ ID NO: 178283 - DNA, 20 bp, Artificial Sequence
  Synthetic oligonucleotide; CAG chr2 60503022 60503041 60503025 -
acgttggttttgctccaagc

SEQ ID NO: 178284 - DNA, 20 bp, Artificial Sequence
  Synthetic oligonucleotide; TAG chr2 60503019 60503038 60503022 -
ttggttttgctccaagccag

SEQ ID NO: 178285 - DNA, 20 bp, Artificial Sequence
  Synthetic oligonucleotide; TAG chr2 60503007 60503026 60503010 -
caagccagtagccatccccc

SEQ ID NO: 178286 - DNA, 20 bp, Artificial Sequence
  Synthetic oligonucleotide; CAG chr2 60503003 60503022 60503006 -
ccagtagccatccccctaga

SEQ ID NO: 178287 - DNA, 20 bp, Artificial Sequence
  Synthetic oligonucleotide; CAG chr2 60502998 60503017 60503001 -
agccatccccctagacagcc

SEQ ID NO: 178288 - DNA, 20 bp, Artificial Sequence
  Synthetic oligonucleotide; AGG chr2 60502997 60503016 60503000 -
gccatccccctagacagccc

SEQ ID NO: 178289 - DNA, 20 bp, Artificial Sequence
  Synthetic oligonucleotide; AAG chr2 60502988 60503007 60502991 -
ctagacagcccaggccttaa

SEQ ID NO: 178290 - DNA, 20 bp, Artificial Sequence
  Synthetic oligonucleotide; AAG chr2 60502983 60503002 60502986 -
cagcccaggccttaaaagac

SEQ ID NO: 178291 - DNA, 20 bp, Artificial Sequence
  Synthetic oligonucleotide; AGG chr2 60502982 60503001 60502985 -
agcccaggccttaaaagaca

SEQ ID NO: 178292 - DNA, 20 bp, Artificial Sequence
  Synthetic oligonucleotide; GAG chr2 60502980 60502999 60502983 -
cccaggccttaaaagacaag

SEQ ID NO: 178293 - DNA, 20 bp, Artificial Sequence
  Synthetic oligonucleotide; AGG chr2 60502979 60502998 60502982 -
ccaggccttaaaagacaagg

SEQ ID NO: 178294 - DNA, 20 bp, Artificial Sequence
  Synthetic oligonucleotide; TGG chr2 60502972 60502991 60502975 -
ttaaaagacaaggaggtgtt

SEQ ID NO: 178295 - DNA, 20 bp, Artificial Sequence
  Synthetic oligonucleotide; AAG chr2 60502967 60502986 60502970 -
agacaaggaggtgtttggac

SEQ ID NO: 178296 - DNA, 20 bp, Artificial Sequence
  Synthetic oligonucleotide; GAG chr2 60502965 60502984 60502968 -
acaaggaggtgtttggacaa

SEQ ID NO: 178297 - DNA, 20 bp, Artificial Sequence
  Synthetic oligonucleotide; AAG chr2 60502961 60502980 60502964 -
ggaggtgtttggacaagagc

SEQ ID NO: 178298 - DNA, 20 bp, Artificial Sequence
  Synthetic oligonucleotide; AAG chr2 60502957 60502976 60502960 -
gtgtttggacaagagcaaga

SEQ ID NO: 178299 - DNA, 20 bp, Artificial Sequence
  Synthetic oligonucleotide; AAG chr2 60502954 60502973 60502957 -
tttggacaagagcaagaaag

SEQ ID NO: 178300 - DNA, 20 bp, Artificial Sequence
  Synthetic oligonucleotide; TGG chr2 60502949 60502968 60502952 -
acaagagcaagaaagaagtc

SEQ ID NO: 178301 - DNA, 20 bp, Artificial Sequence
  Synthetic oligonucleotide; TGG chr2 60502936 60502955 60502939 -
agaagtctggctgtgtcttc

SEQ ID NO: 178302 - DNA, 20 bp, Artificial Sequence
  Synthetic oligonucleotide; GGG chr2 60502935 60502954 60502938 -
gaagtctggctgtgtcttct

SEQ ID NO: 178303 - DNA, 20 bp, Artificial Sequence
  Synthetic oligonucleotide; GAG chr2 60502933 60502952 60502936 -
agtctggctgtgtcttctgg

SEQ ID NO: 178304 - DNA, 20 bp, Artificial Sequence
  Synthetic oligonucleotide; CAG chr2 60502927 60502946 60502930 -
gctgtgtcttctgggagccc

SEQ ID NO: 178305 - DNA, 20 bp, Artificial Sequence
  Synthetic oligonucleotide; CAG chr2 60502923 60502942 60502926 -
tgtcttctgggagccccaga

SEQ ID NO: 178306 - DNA, 20 bp, Artificial Sequence
  Synthetic oligonucleotide; CAG chr2 60502918 60502937 60502921 -
tctgggagccccagacagac

SEQ ID NO: 178307 - DNA, 20 bp, Artificial Sequence
  Synthetic oligonucleotide; TGG chr2 60502902 60502921 60502905 -
agaccagtgttctttctcac

SEQ ID NO: 178308 - DNA, 20 bp, Artificial Sequence
  Synthetic oligonucleotide; CAG chr2 60502886 60502905 60502889 -
tcactggttcactccttccc

SEQ ID NO: 178309 - DNA, 20 bp, Artificial Sequence
  Synthetic oligonucleotide; GAG chr2 60502867 60502886 60502870 -
ccagctcattttacccactc

SEQ ID NO: 178310 - DNA, 20 bp, Artificial Sequence
  Synthetic oligonucleotide; TAG chr2 60502852 60502871 60502855 -
cactcgagacttgattctct

SEQ ID NO: 178311 - DNA, 20 bp, Artificial Sequence
  Synthetic oligonucleotide; GAG chr2 60502850 60502869 60502853 -
ctcgagacttgattctctta

SEQ ID NO: 178312 - DNA, 20 bp, Artificial Sequence
  Synthetic oligonucleotide; AAG chr2 60502844 60502863 60502847 -
acttgattctcttagagatt

SEQ ID NO: 178313 - DNA, 20 bp, Artificial Sequence
  Synthetic oligonucleotide; TGG chr2 60502832 60502851 60502835 -
tagagattaagtacctcccc

SEQ ID NO: 178314 - DNA, 20 bp, Artificial Sequence
  Synthetic oligonucleotide; TAG chr2 60502824 60502843 60502827 -
aagtacctcccctggtcaca

SEQ ID NO: 178315 - DNA, 20 bp, Artificial Sequence
  Synthetic oligonucleotide; TGG chr2 60502817 60502836 60502820 -
tcccctggtcacatagtttc

SEQ ID NO: 178316 - DNA, 20 bp, Artificial Sequence
  Synthetic oligonucleotide; GGG chr2 60502816 60502835 60502819 -
cccctggtcacatagtttct

SEQ ID NO: 178317 - DNA, 20 bp, Artificial Sequence
  Synthetic oligonucleotide; CAG chr2 60502810 60502829 60502813 -
gtcacatagtttctgggtga

SEQ ID NO: 178318 - DNA, 20 bp, Artificial Sequence
  Synthetic oligonucleotide; AGG chr2 60502809 60502828 60502812 -
tcacatagtttctgggtgac

SEQ ID NO: 178319 - DNA, 20 bp, Artificial Sequence
  Synthetic oligonucleotide; TAG chr2 60502804 60502823 60502807 -
tagtttctgggtgacaggac

SEQ ID NO: 178320 - DNA, 20 bp, Artificial Sequence
  Synthetic oligonucleotide; GAG chr2 60502776 60502795 60502779 -
atttcttttgatcaccaatt

SEQ ID NO: 178321 - DNA, 20 bp, Artificial Sequence
  Synthetic oligonucleotide; CAG chr2 60502742 60502761 60502745 -
ctctactgtgctaccatgat

SEQ ID NO: 178322 - DNA, 20 bp, Artificial Sequence
  Synthetic oligonucleotide; GAG chr2 60502740 60502759 60502743 -
ctactgtgctaccatgatca

SEQ ID NO: 178323 - DNA, 20 bp, Artificial Sequence
  Synthetic oligonucleotide; AGG chr2 60502739 60502758 60502742 -
tactgtgctaccatgatcag

SEQ ID NO: 178324 - DNA, 20 bp, Artificial Sequence
  Synthetic oligonucleotide; CAG chr2 60502704 60502723 60502707 -
tctctgatgatgattgaaaa

SEQ ID NO: 178325 - DNA, 20 bp, Artificial Sequence
  Synthetic oligonucleotide; AAG chr2 60502686 60502705 60502689 -
aacagttttattaacatatc

SEQ ID NO: 178326 - DNA, 20 bp, Artificial Sequence
  Synthetic oligonucleotide; AAG chr2 60502669 60502688 60502672 -
atcaagaacattacaacaca

SEQ ID NO: 178327 - DNA, 20 bp, Artificial Sequence
  Synthetic oligonucleotide; GAG chr2 60502667 60502686 60502670 -
caagaacattacaacacaaa

SEQ ID NO: 178328 - DNA, 20 bp, Artificial Sequence
  Synthetic oligonucleotide; TGG chr2 60502660 60502679 60502663 -
attacaacacaaagagtttc

SEQ ID NO: 178329 - DNA, 20 bp, Artificial Sequence
  Synthetic oligonucleotide; TGG chr2 60502637 60502656 60502640 -
tttaaaaaatctcttttcac

SEQ ID NO: 178330 - DNA, 20 bp, Artificial Sequence
  Synthetic oligonucleotide; TAG chr2 60502608 60502627 60502611 -
ttaaattcatattttaatat

SEQ ID NO: 178331 - DNA, 20 bp, Artificial Sequence
  Synthetic oligonucleotide; AAG chr2 60502604 60502623 60502607 -
attcatattttaatattaga

SEQ ID NO: 178332 - DNA, 20 bp, Artificial Sequence
  Synthetic oligonucleotide; TGG chr2 60502599 60502618 60502602 -
tattttaatattagaaagca

SEQ ID NO: 178333 - DNA, 20 bp, Artificial Sequence
  Synthetic oligonucleotide; GGG chr2 60502598 60502617 60502601 -
attttaatattagaaagcat

SEQ ID NO: 178334 - DNA, 20 bp, Artificial Sequence
  Synthetic oligonucleotide; TGG chr2 60502593 60502612 60502596 -
aatattagaaagcatgggat

SEQ ID NO: 178335 - DNA, 20 bp, Artificial Sequence
  Synthetic oligonucleotide; GGG chr2 60502592 60502611 60502595 -
atattagaaagcatgggatt

SEQ ID NO: 178336 - DNA, 20 bp, Artificial Sequence
  Synthetic oligonucleotide; TGG chr2 60502574 60502593 60502577 -
ttgggtgtgaacactgcttt

SEQ ID NO: 178337 - DNA, 20 bp, Artificial Sequence
  Synthetic oligonucleotide; TGG chr2 60502567 60502586 60502570 -
tgaacactgcttttggatgt

SEQ ID NO: 178338 - DNA, 20 bp, Artificial Sequence
  Synthetic oligonucleotide; GAG chr2 60502565 60502584 60502568 -
aacactgcttttggatgttg

SEQ ID NO: 178339 - DNA, 20 bp, Artificial Sequence
  Synthetic oligonucleotide; AGG chr2 60502564 60502583 60502567 -
acactgcttttggatgttgg

SEQ ID NO: 178340 - DNA, 20 bp, Artificial Sequence
  Synthetic oligonucleotide; AAG chr2 60502561 60502580 60502564 -
ctgcttttggatgttggagg

SEQ ID NO: 178341 - DNA, 20 bp, Artificial Sequence
  Synthetic oligonucleotide; AAG chr2 60502556 60502575 60502559 -
tttggatgttggaggaagat

SEQ ID NO: 178342 - DNA, 20 bp, Artificial Sequence
  Synthetic oligonucleotide; GAG chr2 60502554 60502573 60502557 -
tggatgttggaggaagataa

SEQ ID NO: 178343 - DNA, 20 bp, Artificial Sequence
  Synthetic oligonucleotide; AAG chr2 60502551 60502570 60502554 -
atgttggaggaagataagag

SEQ ID NO: 178344 - DNA, 20 bp, Artificial Sequence
  Synthetic oligonucleotide; AGG chr2 60502550 60502569 60502553 -
tgttggaggaagataagaga

SEQ ID NO: 178345 - DNA, 20 bp, Artificial Sequence
  Synthetic oligonucleotide; AAG chr2 60502547 60502566 60502550 -
tggaggaagataagagaagg

SEQ ID NO: 178346 - DNA, 20 bp, Artificial Sequence
  Synthetic oligonucleotide; TGG chr2 60502543 60502562 60502546 -
ggaagataagagaaggaagc

SEQ ID NO: 178347 - DNA, 20 bp, Artificial Sequence
  Synthetic oligonucleotide; TAG chr2 60502531 60502550 60502534 -
aaggaagctggctctttctt

SEQ ID NO: 178348 - DNA, 20 bp, Artificial Sequence
  Synthetic oligonucleotide; AGG chr2 60502530 60502549 60502533 -
aggaagctggctctttcttt

SEQ ID NO: 178349 - DNA, 20 bp, Artificial Sequence
  Synthetic oligonucleotide; GAG chr2 60502528 60502547 60502531 -
gaagctggctctttctttag

SEQ ID NO: 178350 - DNA, 20 bp, Artificial Sequence
  Synthetic oligonucleotide; GAG chr2 60502517 60502536 60502520 -
tttctttaggagcaatacct

SEQ ID NO: 178351 - DNA, 20 bp, Artificial Sequence
  Synthetic oligonucleotide; CAG chr2 60502510 60502529 60502513 -
aggagcaatacctgagatcc

SEQ ID NO: 178352 - DNA, 20 bp, Artificial Sequence
  Synthetic oligonucleotide; AAG chr2 60502494 60502513 60502497 -
atcccagaattgtatgtaca

SEQ ID NO: 178353 - DNA, 20 bp, Artificial Sequence
  Synthetic oligonucleotide; TGG chr2 60502484 60502503 60502487 -
tgtatgtacaaagtgtgtga

SEQ ID NO: 178354 - DNA, 20 bp, Artificial Sequence
  Synthetic oligonucleotide; CAG chr2 60502481 60502500 60502484 -
atgtacaaagtgtgtgatgg

SEQ ID NO: 178355 - DNA, 20 bp, Artificial Sequence
  Synthetic oligonucleotide; GAG chr2 60502479 60502498 60502482 -
gtacaaagtgtgtgatggca

SEQ ID NO: 178356 - DNA, 20 bp, Artificial Sequence
  Synthetic oligonucleotide; TAG chr2 60502463 60502482 60502466 -
ggcagagctcaaatctgtgc

SEQ ID NO: 178357 - DNA, 20 bp, Artificial Sequence
  Synthetic oligonucleotide; GAG chr2 60502459 60502478 60502462 -
gagctcaaatctgtgctagc

SEQ ID NO: 178358 - DNA, 20 bp, Artificial Sequence
  Synthetic oligonucleotide; AAG chr2 60502426 60502445 60502429 -
ctactcttctgaatctgatg

SEQ ID NO: 178359 - DNA, 20 bp, Artificial Sequence
  Synthetic oligonucleotide; AAG chr2 60502423 60502442 60502426 -
ctcttctgaatctgatgaag

SEQ ID NO: 178360 - DNA, 20 bp, Artificial Sequence
  Synthetic oligonucleotide; CAG chr2 60502406 60502425 60502409 -
aagaagttattctgtctgtg

SEQ ID NO: 178361 - DNA, 20 bp, Artificial Sequence
  Synthetic oligonucleotide; TAG chr2 60502397 60502416 60502400 -
ttctgtctgtgcagttttat

SEQ ID NO: 178362 - DNA, 20 bp, Artificial Sequence
  Synthetic oligonucleotide; AGG chr2 60502396 60502415 60502399 -
tctgtctgtgcagttttatt

SEQ ID NO: 178363 - DNA, 20 bp, Artificial Sequence
  Synthetic oligonucleotide; GAG chr2 60502391 60502410 60502394 -
ctgtgcagttttattaggct

SEQ ID NO: 178364 - DNA, 20 bp, Artificial Sequence
  Synthetic oligonucleotide; TGG chr2 60502377 60502396 60502380 -
taggctgagactttttccga

SEQ ID NO: 178365 - DNA, 20 bp, Artificial Sequence
  Synthetic oligonucleotide; CAG chr2 60502354 60502373 60502357 -
tttatttttccgtttgctca

SEQ ID NO: 178366 - DNA, 20 bp, Artificial Sequence
  Synthetic oligonucleotide; TAG chr2 60502347 60502366 60502350 -
ttccgtttgctcacagaatg

SEQ ID NO: 178367 - DNA, 20 bp, Artificial Sequence
  Synthetic oligonucleotide; GAG chr2 60502345 60502364 60502348 -
ccgtttgctcacagaatgta

SEQ ID NO: 178368 - DNA, 20 bp, Artificial Sequence
  Synthetic oligonucleotide; AGG chr2 60502344 60502363 60502347 -
cgtttgctcacagaatgtag

SEQ ID NO: 178369 - DNA, 20 bp, Artificial Sequence
  Synthetic oligonucleotide; GAG chr2 60502342 60502361 60502345 -
tttgctcacagaatgtagag

SEQ ID NO: 178370 - DNA, 20 bp, Artificial Sequence
  Synthetic oligonucleotide; GAG chr2 60502340 60502359 60502343 -
tgctcacagaatgtagagga

SEQ ID NO: 178371 - DNA, 20 bp, Artificial Sequence
  Synthetic oligonucleotide; CAG chr2 60502336 60502355 60502339 -
cacagaatgtagaggagagc

SEQ ID NO: 178372 - DNA, 20 bp, Artificial Sequence
  Synthetic oligonucleotide; AGG chr2 60502335 60502354 60502338 -
acagaatgtagaggagagcc

SEQ ID NO: 178373 - DNA, 20 bp, Artificial Sequence
  Synthetic oligonucleotide; GAG chr2 60502333 60502352 60502336 -
agaatgtagaggagagccag

SEQ ID NO: 178374 - DNA, 20 bp, Artificial Sequence
  Synthetic oligonucleotide; AGG chr2 60502332 60502351 60502335 -
gaatgtagaggagagccagg

SEQ ID NO: 178375 - DNA, 20 bp, Artificial Sequence
  Synthetic oligonucleotide; GGG chr2 60502331 60502350 60502334 -
aatgtagaggagagccagga

SEQ ID NO: 178376 - DNA, 20 bp, Artificial Sequence
  Synthetic oligonucleotide; GAG chr2 60502329 60502348 60502332 -
tgtagaggagagccaggagg

SEQ ID NO: 178377 - DNA, 20 bp, Artificial Sequence
  Synthetic oligonucleotide; TGG chr2 60502290 60502309 60502293 -
gtttacctactccctgactt

SEQ ID NO: 178378 - DNA, 20 bp, Artificial Sequence
  Synthetic oligonucleotide; GAG chr2 60502288 60502307 60502291 -
ttacctactccctgactttg

SEQ ID NO: 178379 - DNA, 20 bp, Artificial Sequence
  Synthetic oligonucleotide; CAG chr2 60502283 60502302 60502286 -
tactccctgactttggagct

SEQ ID NO: 178380 - DNA, 20 bp, Artificial Sequence
  Synthetic oligonucleotide; CAG chr2 60502251 60502270 60502254 -
tatccatcattttgtttcac

SEQ ID NO: 178381 - DNA, 20 bp, Artificial Sequence
  Synthetic oligonucleotide; AAG chr2 60502240 60502259 60502243 -
ttgtttcaccagcttttaca

SEQ ID NO: 178382 - DNA, 20 bp, Artificial Sequence
  Synthetic oligonucleotide; CAG chr2 60502237 60502256 60502240 -
tttcaccagcttttacaaag

SEQ ID NO: 178383 - DNA, 20 bp, Artificial Sequence
  Synthetic oligonucleotide; AGG chr2 60502236 60502255 60502239 -
ttcaccagcttttacaaagc

SEQ ID NO: 178384 - DNA, 20 bp, Artificial Sequence
  Synthetic oligonucleotide; AAG chr2 60502221 60502240 60502224 -
aaagcaggatcataaactgt

SEQ ID NO: 178385 - DNA, 20 bp, Artificial Sequence
  Synthetic oligonucleotide; TGG chr2 60502212 60502231 60502215 -
tcataaactgtaagctcatt

SEQ ID NO: 178386 - DNA, 20 bp, Artificial Sequence
  Synthetic oligonucleotide; GAG chr2 60502210 60502229 60502213 -
ataaactgtaagctcatttg

SEQ ID NO: 178387 - DNA, 20 bp, Artificial Sequence
  Synthetic oligonucleotide; AGG chr2 60502209 60502228 60502212 -
taaactgtaagctcatttgg

SEQ ID NO: 178388 - DNA, 20 bp, Artificial Sequence
  Synthetic oligonucleotide; GGG chr2 60502208 60502227 60502211 -
aaactgtaagctcatttgga

SEQ ID NO: 178389 - DNA, 20 bp, Artificial Sequence
  Synthetic oligonucleotide; AAG chr2 60502179 60502198 60502182 -
tctctgattgttgctttgat

SEQ ID NO: 178390 - DNA, 20 bp, Artificial Sequence
  Synthetic oligonucleotide; TAG chr2 60502147 60502166 60502150 -
aaatattcatatcattctga

SEQ ID NO: 178391 - DNA, 20 bp, Artificial Sequence
  Synthetic oligonucleotide; GAG chr2 60502140 60502159 60502143 -
catatcattctgatagtctt

SEQ ID NO: 178392 - DNA, 20 bp, Artificial Sequence
  Synthetic oligonucleotide; CAG chr2 60502110 60502129 60502113 -
gttacaacatgcaaacctct

SEQ ID NO: 178393 - DNA, 20 bp, Artificial Sequence
  Synthetic oligonucleotide; CAG chr2 60502102 60502121 60502105 -
atgcaaacctctcagttttc

SEQ ID NO: 178394 - DNA, 20 bp, Artificial Sequence
  Synthetic oligonucleotide; AGG chr2 60502101 60502120 60502104 -
tgcaaacctctcagttttcc

SEQ ID NO: 178395 - DNA, 20 bp, Artificial Sequence
  Synthetic oligonucleotide; TGG chr2 60502093 60502112 60502096 -
tctcagttttccaggacttc

SEQ ID NO: 178396 - DNA, 20 bp, Artificial Sequence
  Synthetic oligonucleotide; TGG chr2 60502090 60502109 60502093 -
cagttttccaggacttctgg

SEQ ID NO: 178397 - DNA, 20 bp, Artificial Sequence
  Synthetic oligonucleotide; CAG chr2 60502085 60502104 60502088 -
ttccaggacttctggtggta

SEQ ID NO: 178398 - DNA, 20 bp, Artificial Sequence
  Synthetic oligonucleotide; TGG chr2 60502074 60502093 60502077 -
ctggtggtacagcttctctg

SEQ ID NO: 178399 - DNA, 20 bp, Artificial Sequence
  Synthetic oligonucleotide; GAG chr2 60502072 60502091 60502075 -
ggtggtacagcttctctgtg

SEQ ID NO: 178400 - DNA, 20 bp, Artificial Sequence
  Synthetic oligonucleotide; GAG chr2 60502068 60502087 60502071 -
gtacagcttctctgtggagt

SEQ ID NO: 178401 - DNA, 20 bp, Artificial Sequence
  Synthetic oligonucleotide; AGG chr2 60502067 60502086 60502070 -
tacagcttctctgtggagtg

SEQ ID NO: 178402 - DNA, 20 bp, Artificial Sequence
  Synthetic oligonucleotide; TGG chr2 60502056 60502075 60502059 -
tgtggagtgaggcatatttt

SEQ ID NO: 178403 - DNA, 20 bp, Artificial Sequence
  Synthetic oligonucleotide; TGG chr2 60502051 60502070 60502054 -
agtgaggcatatttttggtc

SEQ ID NO: 178404 - DNA, 20 bp, Artificial Sequence
  Synthetic oligonucleotide; AAG chr2 60502035 60502054 60502038 -
ggtctggcctttcctccctg

SEQ ID NO: 178405 - DNA, 20 bp, Artificial Sequence
  Synthetic oligonucleotide; TAG chr2 60502026 60502045 60502029 -
tttcctccctgaagctctgt

SEQ ID NO: 178406 - DNA, 20 bp, Artificial Sequence
  Synthetic oligonucleotide; GAG chr2 60502020 60502039 60502023 -
ccctgaagctctgttagcct

SEQ ID NO: 178407 - DNA, 20 bp, Artificial Sequence
  Synthetic oligonucleotide; TAG chr2 60502009 60502028 60502012 -
tgttagcctgagatttcacc

SEQ ID NO: 178408 - DNA, 20 bp, Artificial Sequence
  Synthetic oligonucleotide; AAG chr2 60501998 60502017 60502001 -
gatttcacctagtgcaacac

SEQ ID NO: 178409 - DNA, 20 bp, Artificial Sequence
  Synthetic oligonucleotide; TAG chr2 60501990 60502009 60501993 -
ctagtgcaacacaagttgtg

SEQ ID NO: 178410 - DNA, 20 bp, Artificial Sequence
  Synthetic oligonucleotide; AAG chr2 60501986 60502005 60501989 -
tgcaacacaagttgtgtaga

SEQ ID NO: 178411 - DNA, 20 bp, Artificial Sequence
  Synthetic oligonucleotide; TAG chr2 60501952 60501971 60501955 -
tactttattccataattcac

SEQ ID NO: 178412 - DNA, 20 bp, Artificial Sequence
  Synthetic oligonucleotide; TAG chr2 60501940 60501959 60501943 -
taattcactagtaaaataat

SEQ ID NO: 178413 - DNA, 20 bp, Artificial Sequence
  Synthetic oligonucleotide; AAG chr2 60501932 60501951 60501935 -
tagtaaaataattagaataa

SEQ ID NO: 178414 - DNA, 20 bp, Artificial Sequence
  Synthetic oligonucleotide; AGG chr2 60501931 60501950 60501934 -
agtaaaataattagaataaa

SEQ ID NO: 178415 - DNA, 20 bp, Artificial Sequence
  Synthetic oligonucleotide; TGG chr2 60501922 60501941 60501925 -
attagaataaaaggctgttt

SEQ ID NO: 178416 - DNA, 20 bp, Artificial Sequence
  Synthetic oligonucleotide; TAG chr2 60501915 60501934 60501918 -
taaaaggctgttttggaatg

SEQ ID NO: 178417 - DNA, 20 bp, Artificial Sequence
  Synthetic oligonucleotide; GAG chr2 60501913 60501932 60501916 -
aaaggctgttttggaatgta

SEQ ID NO: 178418 - DNA, 20 bp, Artificial Sequence
  Synthetic oligonucleotide; GAG chr2 60501911 60501930 60501914 -
aggctgttttggaatgtaga

SEQ ID NO: 178419 - DNA, 20 bp, Artificial Sequence
  Synthetic oligonucleotide; AGG chr2 60501910 60501929 60501913 -
ggctgttttggaatgtagag

SEQ ID NO: 178420 - DNA, 20 bp, Artificial Sequence
  Synthetic oligonucleotide; CAG chr2 60501907 60501926 60501910 -
tgttttggaatgtagagagg

SEQ ID NO: 178421 - DNA, 20 bp, Artificial Sequence
  Synthetic oligonucleotide; GAG chr2 60501905 60501924 60501908 -
ttttggaatgtagagaggca

SEQ ID NO: 178422 - DNA, 20 bp, Artificial Sequence
  Synthetic oligonucleotide; AGG chr2 60501904 60501923 60501907 -
tttggaatgtagagaggcag

SEQ ID NO: 178423 - DNA, 20 bp, Artificial Sequence
  Synthetic oligonucleotide; GGG chr2 60501903 60501922 60501906 -
ttggaatgtagagaggcaga

SEQ ID NO: 178424 - DNA, 20 bp, Artificial Sequence
  Synthetic oligonucleotide; GGG chr2 60501902 60501921 60501905 -
tggaatgtagagaggcagag

SEQ ID NO: 178425 - DNA, 20 bp, Artificial Sequence
  Synthetic oligonucleotide; CAG chr2 60501885 60501904 60501888 -
gaggggctgatataacttct

SEQ ID NO: 178426 - DNA, 20 bp, Artificial Sequence
  Synthetic oligonucleotide; GAG chr2 60501844 60501863 60501847 -
cccgtcttaaatttttatgt

SEQ ID NO: 178427 - DNA, 20 bp, Artificial Sequence
  Synthetic oligonucleotide; GAG chr2 60501839 60501858 60501842 -
cttaaatttttatgtgagat

SEQ ID NO: 178428 - DNA, 20 bp, Artificial Sequence
  Synthetic oligonucleotide; AAG chr2 60501821 60501840 60501824 -
atgagcacactgctgtaatt

SEQ ID NO: 178429 - DNA, 20 bp, Artificial Sequence
  Synthetic oligonucleotide; AAG chr2 60501817 60501836 60501820 -
gcacactgctgtaattaaga

SEQ ID NO: 178430 - DNA, 20 bp, Artificial Sequence
  Synthetic oligonucleotide; CAG chr2 60501814 60501833 60501817 -
cactgctgtaattaagaaag

SEQ ID NO: 178431 - DNA, 20 bp, Artificial Sequence
  Synthetic oligonucleotide; AAG chr2 60501808 60501827 60501811 -
tgtaattaagaaagcagtgt

SEQ ID NO: 178432 - DNA, 20 bp, Artificial Sequence
  Synthetic oligonucleotide; AGG chr2 60501807 60501826 60501810 -
gtaattaagaaagcagtgta

SEQ ID NO: 178433 - DNA, 20 bp, Artificial Sequence
  Synthetic oligonucleotide; TGG chr2 60501803 60501822 60501806 -
ttaagaaagcagtgtaaggc

SEQ ID NO: 178434 - DNA, 20 bp, Artificial Sequence
  Synthetic oligonucleotide; GGG chr2 60501802 60501821 60501805 -
taagaaagcagtgtaaggct

SEQ ID NO: 178435 - DNA, 20 bp, Artificial Sequence
  Synthetic oligonucleotide; CAG chr2 60501797 60501816 60501800 -
aagcagtgtaaggctgggcg

SEQ ID NO: 178436 - DNA, 20 bp, Artificial Sequence
  Synthetic oligonucleotide; TGG chr2 60501794 60501813 60501797 -
cagtgtaaggctgggcgcag

SEQ ID NO: 178437 - DNA, 20 bp, Artificial Sequence
  Synthetic oligonucleotide; CAG chr2 60501775 60501794 60501778 -
gtggctcacgtctgtaattc

SEQ ID NO: 178438 - DNA, 20 bp, Artificial Sequence
  Synthetic oligonucleotide; TGG chr2 60501767 60501786 60501770 -
cgtctgtaattccagcactt

SEQ ID NO: 178439 - DNA, 20 bp, Artificial Sequence
  Synthetic oligonucleotide; GGG chr2 60501766 60501785 60501769 -
gtctgtaattccagcacttt

SEQ ID NO: 178440 - DNA, 20 bp, Artificial Sequence
  Synthetic oligonucleotide; GAG chr2 60501764 60501783 60501767 -
ctgtaattccagcactttgg

SEQ ID NO: 178441 - DNA, 20 bp, Artificial Sequence
  Synthetic oligonucleotide; AGG chr2 60501763 60501782 60501766 -
tgtaattccagcactttggg

SEQ ID NO: 178442 - DNA, 20 bp, Artificial Sequence
  Synthetic oligonucleotide; GAG chr2 60501758 60501777 60501761 -
ttccagcactttgggaggcc

SEQ ID NO: 178443 - DNA, 20 bp, Artificial Sequence
  Synthetic oligonucleotide; AGG chr2 60501757 60501776 60501760 -
tccagcactttgggaggccg

SEQ ID NO: 178444 - DNA, 20 bp, Artificial Sequence
  Synthetic oligonucleotide; TGG chr2 60501754 60501773 60501757 -
agcactttgggaggccgagg

SEQ ID NO: 178445 - DNA, 20 bp, Artificial Sequence
  Synthetic oligonucleotide; GGG chr2 60501753 60501772 60501756 -
gcactttgggaggccgaggt

SEQ ID NO: 178446 - DNA, 20 bp, Artificial Sequence
  Synthetic oligonucleotide; TAG chr2 60501750 60501769 60501753 -
ctttgggaggccgaggtggg

SEQ ID NO: 178447 - DNA, 20 bp, Artificial Sequence
  Synthetic oligonucleotide; GAG chr2 60501740 60501759 60501743 -
ccgaggtgggtagatcacct

SEQ ID NO: 178448 - DNA, 20 bp, Artificial Sequence
  Synthetic oligonucleotide; AGG chr2 60501739 60501758 60501742 -
cgaggtgggtagatcacctg

SEQ ID NO: 178449 - DNA, 20 bp, Artificial Sequence
  Synthetic oligonucleotide; AAG chr2 60501734 60501753 60501737 -
tgggtagatcacctgaggtc

SEQ ID NO: 178450 - DNA, 20 bp, Artificial Sequence
  Synthetic oligonucleotide; GAG chr2 60501732 60501751 60501735 -
ggtagatcacctgaggtcaa

SEQ ID NO: 178451 - DNA, 20 bp, Artificial Sequence
  Synthetic oligonucleotide; GAG chr2 60501726 60501745 60501729 -
tcacctgaggtcaagagttt

SEQ ID NO: 178452 - DNA, 20 bp, Artificial Sequence
  Synthetic oligonucleotide; CAG chr2 60501721 60501740 60501724 -
tgaggtcaagagtttgagac

SEQ ID NO: 178453 - DNA, 20 bp, Artificial Sequence
  Synthetic oligonucleotide; TGG chr2 60501707 60501726 60501710 -
tgagaccagcctgaccaaca

SEQ ID NO: 178454 - DNA, 20 bp, Artificial Sequence
  Synthetic oligonucleotide; GAG chr2 60501705 60501724 60501708 -
agaccagcctgaccaacatg

SEQ ID NO: 178455 - DNA, 20 bp, Artificial Sequence
  Synthetic oligonucleotide; TAG chr2 60501673 60501692 60501676 -
ctctattaaaaatataaact

SEQ ID NO: 178456 - DNA, 20 bp, Artificial Sequence
  Synthetic oligonucleotide; CAG chr2 60501669 60501688 60501672 -
attaaaaatataaacttagc

SEQ ID NO: 178457 - DNA, 20 bp, Artificial Sequence
  Synthetic oligonucleotide; AGG chr2 60501668 60501687 60501671 -
ttaaaaatataaacttagcc

SEQ ID NO: 178458 - DNA, 20 bp, Artificial Sequence
  Synthetic oligonucleotide; TGG chr2 60501663 60501682 60501666 -
aatataaacttagccaggca

SEQ ID NO: 178459 - DNA, 20 bp, Artificial Sequence
  Synthetic oligonucleotide; CAG chr2 60501641 60501660 60501644 -
gtcgcacatgcctgtaatcc

SEQ ID NO: 178460 - DNA, 20 bp, Artificial Sequence
  Synthetic oligonucleotide; CAG chr2 60501633 60501652 60501636 -
tgcctgtaatcccagctact

SEQ ID NO: 178461 - DNA, 20 bp, Artificial Sequence
  Synthetic oligonucleotide; AGG chr2 60501632 60501651 60501635 -
gcctgtaatcccagctactc

SEQ ID NO: 178462 - DNA, 20 bp, Artificial Sequence
  Synthetic oligonucleotide; GAG chr2 60501630 60501649 60501633 -
ctgtaatcccagctactcag

SEQ ID NO: 178463 - DNA, 20 bp, Artificial Sequence
  Synthetic oligonucleotide; AGG chr2 60501629 60501648 60501632 -
tgtaatcccagctactcagg

SEQ ID NO: 178464 - DNA, 20 bp, Artificial Sequence
  Synthetic oligonucleotide; GAG chr2 60501624 60501643 60501627 -
tcccagctactcaggaggct

SEQ ID NO: 178465 - DNA, 20 bp, Artificial Sequence
  Synthetic oligonucleotide; AGG chr2 60501623 60501642 60501626 -
cccagctactcaggaggctg

SEQ ID NO: 178466 - DNA, 20 bp, Artificial Sequence
  Synthetic oligonucleotide; GGG chr2 60501622 60501641 60501625 -
ccagctactcaggaggctga

SEQ ID NO: 178467 - DNA, 20 bp, Artificial Sequence
  Synthetic oligonucleotide; GAG chr2 60501620 60501639 60501623 -
agctactcaggaggctgagg

SEQ ID NO: 178468 - DNA, 20 bp, Artificial Sequence
  Synthetic oligonucleotide; AGG chr2 60501619 60501638 60501622 -
gctactcaggaggctgaggg

SEQ ID NO: 178469 - DNA, 20 bp, Artificial Sequence
  Synthetic oligonucleotide; GAG chr2 60501617 60501636 60501620 -
tactcaggaggctgagggag

SEQ ID NO: 178470 - DNA, 20 bp, Artificial Sequence
  Synthetic oligonucleotide; CAG chr2 60501601 60501620 60501604 -
ggaggagaattgcttgaacc

SEQ ID NO: 178471 - DNA, 20 bp, Artificial Sequence
  Synthetic oligonucleotide; AGG chr2 60501600 60501619 60501603 -
gaggagaattgcttgaaccc

SEQ ID NO: 178472 - DNA, 20 bp, Artificial Sequence
  Synthetic oligonucleotide; GAG chr2 60501598 60501617 60501601 -
ggagaattgcttgaacccag

SEQ ID NO: 178473 - DNA, 20 bp, Artificial Sequence
  Synthetic oligonucleotide; AGG chr2 60501597 60501616 60501600 -
gagaattgcttgaacccagg

SEQ ID NO: 178474 - DNA, 20 bp, Artificial Sequence
  Synthetic oligonucleotide; CAG chr2 60501594 60501613 60501597 -
aattgcttgaacccaggagg

SEQ ID NO: 178475 - DNA, 20 bp, Artificial Sequence
  Synthetic oligonucleotide; GAG chr2 60501592 60501611 60501595 -
ttgcttgaacccaggaggca

SEQ ID NO: 178476 - DNA, 20 bp, Artificial Sequence
  Synthetic oligonucleotide; AGG chr2 60501591 60501610 60501594 -
tgcttgaacccaggaggcag

SEQ ID NO: 178477 - DNA, 20 bp, Artificial Sequence
  Synthetic oligonucleotide; TGG chr2 60501588 60501607 60501591 -
ttgaacccaggaggcagagg

SEQ ID NO: 178478 - DNA, 20 bp, Artificial Sequence
  Synthetic oligonucleotide; GAG chr2 60501584 60501603 60501587 -
acccaggaggcagaggtggt

SEQ ID NO: 178479 - DNA, 20 bp, Artificial Sequence
  Synthetic oligonucleotide; GAG chr2 60501579 60501598 60501582 -
ggaggcagaggtggtgagcc

SEQ ID NO: 178480 - DNA, 20 bp, Artificial Sequence
  Synthetic oligonucleotide; CAG chr2 60501559 60501578 60501562 -
gagatcacaccattgcaccc

SEQ ID NO: 178481 - DNA, 20 bp, Artificial Sequence
  Synthetic oligonucleotide; TGG chr2 60501554 60501573 60501557 -
cacaccattgcaccccagcc

SEQ ID NO: 178482 - DNA, 20 bp, Artificial Sequence
  Synthetic oligonucleotide; GGG chr2 60501553 60501572 60501556 -
acaccattgcaccccagcct

SEQ ID NO: 178483 - DNA, 20 bp, Artificial Sequence
  Synthetic oligonucleotide; AAG chr2 60501546 60501565 60501549 -
tgcaccccagcctgggcaac

SEQ ID NO: 178484 - DNA, 20 bp, Artificial Sequence
  Synthetic oligonucleotide; GAG chr2 60501544 60501563 60501547 -
caccccagcctgggcaacaa

SEQ ID NO: 178485 - DNA, 20 bp, Artificial Sequence
  Synthetic oligonucleotide; AAG chr2 60501508 60501527 60501511 -
caaaaaaaaaaaaaaaaaaa

SEQ ID NO: 178486 - DNA, 20 bp, Artificial Sequence
  Synthetic oligonucleotide; AAG chr2 60501504 60501523 60501507 -
aaaaaaaaaaaaaaaaaaga

SEQ ID NO: 178487 - DNA, 20 bp, Artificial Sequence
  Synthetic oligonucleotide; CGG chr2 60501501 60501520 60501504 -
aaaaaaaaaaaaaaagaaag

SEQ ID NO: 178488 - DNA, 20 bp, Artificial Sequence
  Synthetic oligonucleotide; CAG chr2 60501495 60501514 60501498 -
aaaaaaaaagaaagcggtgt

SEQ ID NO: 178489 - DNA, 20 bp, Artificial Sequence
  Synthetic oligonucleotide; AAG chr2 60501483 60501502 60501486 -
agcggtgtcagtacttgcaa

SEQ ID NO: 178490 - DNA, 20 bp, Artificial Sequence
  Synthetic oligonucleotide; AGG chr2 60501482 60501501 60501485 -
gcggtgtcagtacttgcaaa

SEQ ID NO: 178491 - DNA, 20 bp, Artificial Sequence
  Synthetic oligonucleotide; CAG chr2 60501461 60501480 60501464 -
ggcctttccctcttgccact

SEQ ID NO: 178492 - DNA, 20 bp, Artificial Sequence
  Synthetic oligonucleotide; AGG chr2 60501460 60501479 60501463 -
gcctttccctcttgccactc

SEQ ID NO: 178493 - DNA, 20 bp, Artificial Sequence
  Synthetic oligonucleotide; GGG chr2 60501459 60501478 60501462 -
cctttccctcttgccactca

SEQ ID NO: 178494 - DNA, 20 bp, Artificial Sequence
  Synthetic oligonucleotide; AAG chr2 60501456 60501475 60501459 -
ttccctcttgccactcaggg

SEQ ID NO: 178495 - DNA, 20 bp, Artificial Sequence
  Synthetic oligonucleotide; AAG chr2 60501446 60501465 60501449 -
ccactcagggaagcacccga

SEQ ID NO: 178496 - DNA, 20 bp, Artificial Sequence
  Synthetic oligonucleotide; GAG chr2 60501444 60501463 60501447 -
actcagggaagcacccgaaa

SEQ ID NO: 178497 - DNA, 20 bp, Artificial Sequence
  Synthetic oligonucleotide; CAG chr2 60501430 60501449 60501433 -
ccgaaagagaacttacaaac

SEQ ID NO: 178498 - DNA, 20 bp, Artificial Sequence
  Synthetic oligonucleotide; AGG chr2 60501429 60501448 60501432 -
cgaaagagaacttacaaacc

SEQ ID NO: 178499 - DNA, 20 bp, Artificial Sequence
  Synthetic oligonucleotide; AAG chr2 60501424 60501443 60501427 -
gagaacttacaaaccaggta

SEQ ID NO: 178500 - DNA, 20 bp, Artificial Sequence
  Synthetic oligonucleotide; TGG chr2 60501417 60501436 60501420 -
tacaaaccaggtaaagtatt

SEQ ID NO: 178501 - DNA, 20 bp, Artificial Sequence
  Synthetic oligonucleotide; AAG chr2 60501414 60501433 60501417 -
aaaccaggtaaagtatttgg

SEQ ID NO: 178502 - DNA, 20 bp, Artificial Sequence
  Synthetic oligonucleotide; AAG chr2 60501395 60501414 60501398 -
gaagtgattaatcatattac

SEQ ID NO: 178503 - DNA, 20 bp, Artificial Sequence
  Synthetic oligonucleotide; GAG chr2 60501393 60501412 60501396 -
agtgattaatcatattacaa

SEQ ID NO: 178504 - DNA, 20 bp, Artificial Sequence
  Synthetic oligonucleotide; AAG chr2 60501372 60501391 60501375 -
agtgttcttcatttccccca

SEQ ID NO: 178505 - DNA, 20 bp, Artificial Sequence
  Synthetic oligonucleotide; AGG chr2 60501371 60501390 60501374 -
gtgttcttcatttcccccaa

SEQ ID NO: 178506 - DNA, 20 bp, Artificial Sequence
  Synthetic oligonucleotide; TGG chr2 60501364 60501383 60501367 -
tcatttcccccaaaggacca

SEQ ID NO: 178507 - DNA, 20 bp, Artificial Sequence
  Synthetic oligonucleotide; TAG chr2 60501333 60501352 60501336 -
gacacttacctgtgctctta

SEQ ID NO: 178508 - DNA, 20 bp, Artificial Sequence
  Synthetic oligonucleotide; AAG chr2 60501324 60501343 60501327 -
ctgtgctcttatagatatta

SEQ ID NO: 178509 - DNA, 20 bp, Artificial Sequence
  Synthetic oligonucleotide; CAG chr2 60501320 60501339 60501323 -
gctcttatagatattaaaga

SEQ ID NO: 178510 - DNA, 20 bp, Artificial Sequence
  Synthetic oligonucleotide; GAG chr2 60501318 60501337 60501321 -
tcttatagatattaaagaca

SEQ ID NO: 178511 - DNA, 20 bp, Artificial Sequence
  Synthetic oligonucleotide; TGG chr2 60501311 60501330 60501314 -
gatattaaagacagagccac

SEQ ID NO: 178512 - DNA, 20 bp, Artificial Sequence
  Synthetic oligonucleotide; GAG chr2 60501303 60501322 60501306 -
agacagagccactggactgt

SEQ ID NO: 178513 - DNA, 20 bp, Artificial Sequence
  Synthetic oligonucleotide; GAG chr2 60501294 60501313 60501297 -
cactggactgtgagctcctt

SEQ ID NO: 178514 - DNA, 20 bp, Artificial Sequence
  Synthetic oligonucleotide; AGG chr2 60501293 60501312 60501296 -
actggactgtgagctccttg

SEQ ID NO: 178515 - DNA, 20 bp, Artificial Sequence
  Synthetic oligonucleotide; GGG chr2 60501292 60501311 60501295 -
ctggactgtgagctccttga

SEQ ID NO: 178516 - DNA, 20 bp, Artificial Sequence
  Synthetic oligonucleotide; CAG chr2 60501289 60501308 60501292 -
gactgtgagctccttgaggg

SEQ ID NO: 178517 - DNA, 20 bp, Artificial Sequence
  Synthetic oligonucleotide; AGG chr2 60501288 60501307 60501291 -
actgtgagctccttgagggc

SEQ ID NO: 178518 - DNA, 20 bp, Artificial Sequence
  Synthetic oligonucleotide; GGG chr2 60501287 60501306 60501290 -
ctgtgagctccttgagggca

SEQ ID NO: 178519 - DNA, 20 bp, Artificial Sequence
  Synthetic oligonucleotide; GAG chr2 60501281 60501300 60501284 -
gctccttgagggcagggaat

SEQ ID NO: 178520 - DNA, 20 bp, Artificial Sequence
  Synthetic oligonucleotide; AGG chr2 60501280 60501299 60501283 -
ctccttgagggcagggaatg

SEQ ID NO: 178521 - DNA, 20 bp, Artificial Sequence
  Synthetic oligonucleotide; TGG chr2 60501260 60501279 60501263 -
aggctcattccattttgttc

SEQ ID NO: 178522 - DNA, 20 bp, Artificial Sequence
  Synthetic oligonucleotide; AAG chr2 60501256 60501275 60501259 -
tcattccattttgttctggc

SEQ ID NO: 178523 - DNA, 20 bp, Artificial Sequence
  Synthetic oligonucleotide; TAG chr2 60501253 60501272 60501256 -
ttccattttgttctggcaag

SEQ ID NO: 178524 - DNA, 20 bp, Artificial Sequence
  Synthetic oligonucleotide; CAG chr2 60501245 60501264 60501248 -
tgttctggcaagtagcacta

SEQ ID NO: 178525 - DNA, 20 bp, Artificial Sequence
  Synthetic oligonucleotide; AGG chr2 60501244 60501263 60501247 -
gttctggcaagtagcactac

SEQ ID NO: 178526 - DNA, 20 bp, Artificial Sequence
  Synthetic oligonucleotide; TGG chr2 60501239 60501258 60501242 -
ggcaagtagcactacaggtt

SEQ ID NO: 178527 - DNA, 20 bp, Artificial Sequence
  Synthetic oligonucleotide; TGG chr2 60501220 60501239 60501223 -
ttggaccaaatgaattaaat

SEQ ID NO: 178528 - DNA, 20 bp, Artificial Sequence
  Synthetic oligonucleotide; AAG chr2 60501203 60501222 60501206 -
aattggctgccattgaatca

SEQ ID NO: 178529 - DNA, 20 bp, Artificial Sequence
  Synthetic oligonucleotide; CAG chr2 60501200 60501219 60501203 -
tggctgccattgaatcaaag

SEQ ID NO: 178530 - DNA, 20 bp, Artificial Sequence
  Synthetic oligonucleotide; AAG chr2 60501193 60501212 60501196 -
cattgaatcaaagcagaatg

SEQ ID NO: 178531 - DNA, 20 bp, Artificial Sequence
  Synthetic oligonucleotide; AGG chr2 60501192 60501211 60501195 -
attgaatcaaagcagaatga

SEQ ID NO: 178532 - DNA, 20 bp, Artificial Sequence
  Synthetic oligonucleotide; TAG chr2 60501189 60501208 60501192 -
gaatcaaagcagaatgaagg

SEQ ID NO: 178533 - DNA, 20 bp, Artificial Sequence
  Synthetic oligonucleotide; AAG chr2 60501162 60501181 60501165 -
tctgaaacaataatataaat

SEQ ID NO: 178534 - DNA, 20 bp, Artificial Sequence
  Synthetic oligonucleotide; TGG chr2 60501151 60501170 60501154 -
aatataaataagtgcaaaat

SEQ ID NO: 178535 - DNA, 20 bp, Artificial Sequence
  Synthetic oligonucleotide; CAG chr2 60501129 60501148 60501132 -
gatgtttaccaacaactttc

SEQ ID NO: 178536 - DNA, 20 bp, Artificial Sequence
  Synthetic oligonucleotide; CAG chr2 60501123 60501142 60501126 -
taccaacaactttccagaaa

SEQ ID NO: 178537 - DNA, 20 bp, Artificial Sequence
  Synthetic oligonucleotide; AGG chr2 60501122 60501141 60501125 -
accaacaactttccagaaac

SEQ ID NO: 178538 - DNA, 20 bp, Artificial Sequence
  Synthetic oligonucleotide; CAG chr2 60501111 60501130 60501114 -
tccagaaacaggtcttgttt

SEQ ID NO: 178539 - DNA, 20 bp, Artificial Sequence
  Synthetic oligonucleotide; AAG chr2 60501108 60501127 60501111 -
agaaacaggtcttgtttcag

SEQ ID NO: 178540 - DNA, 20 bp, Artificial Sequence
  Synthetic oligonucleotide; AAG chr2 60501097 60501116 60501100 -
ttgtttcagaagatgtgcca

SEQ ID NO: 178541 - DNA, 20 bp, Artificial Sequence
  Synthetic oligonucleotide; TGG chr2 60501084 60501103 60501087 -
tgtgccaaagatgtctcatg

SEQ ID NO: 178542 - DNA, 20 bp, Artificial Sequence
  Synthetic oligonucleotide; GGG chr2 60501083 60501102 60501086 -
gtgccaaagatgtctcatgt

SEQ ID NO: 178543 - DNA, 20 bp, Artificial Sequence
  Synthetic oligonucleotide; CAG chr2 60501080 60501099 60501083 -
ccaaagatgtctcatgtggg

SEQ ID NO: 178544 - DNA, 20 bp, Artificial Sequence
  Synthetic oligonucleotide; AGG chr2 60501079 60501098 60501082 -
caaagatgtctcatgtgggc

SEQ ID NO: 178545 - DNA, 20 bp, Artificial Sequence
  Synthetic oligonucleotide; GGG chr2 60501078 60501097 60501081 -
aaagatgtctcatgtgggca

SEQ ID NO: 178546 - DNA, 20 bp, Artificial Sequence
  Synthetic oligonucleotide; TGG chr2 60501069 60501088 60501072 -
tcatgtgggcagggctcctg

SEQ ID NO: 178547 - DNA, 20 bp, Artificial Sequence
  Synthetic oligonucleotide; GAG chr2 60501067 60501086 60501070 -
atgtgggcagggctcctgtg

SEQ ID NO: 178548 - DNA, 20 bp, Artificial Sequence
  Synthetic oligonucleotide; GAG chr2 60501052 60501071 60501055 -
ctgtggagacctctgttgct

SEQ ID NO: 178549 - DNA, 20 bp, Artificial Sequence
  Synthetic oligonucleotide; GAG chr2 60501048 60501067 60501051 -
ggagacctctgttgctgagt

SEQ ID NO: 178550 - DNA, 20 bp, Artificial Sequence
  Synthetic oligonucleotide; GAG chr2 60501037 60501056 60501040 -
ttgctgagtgagtcaaccat

SEQ ID NO: 178551 - DNA, 20 bp, Artificial Sequence
  Synthetic oligonucleotide; AGG chr2 60501036 60501055 60501039 -
tgctgagtgagtcaaccatg

SEQ ID NO: 178552 - DNA, 20 bp, Artificial Sequence
  Synthetic oligonucleotide; CGG chr2 60501032 60501051 60501035 -
gagtgagtcaaccatgaggt

SEQ ID NO: 178553 - DNA, 20 bp, Artificial Sequence
  Synthetic oligonucleotide; GAG chr2 60501027 60501046 60501030 -
agtcaaccatgaggtcggct

SEQ ID NO: 178554 - DNA, 20 bp, Artificial Sequence
  Synthetic oligonucleotide; CAG chr2 60501024 60501043 60501027 -
caaccatgaggtcggctgag

SEQ ID NO: 178555 - DNA, 20 bp, Artificial Sequence
  Synthetic oligonucleotide; CAG chr2 60501019 60501038 60501022 -
atgaggtcggctgagcagtt

SEQ ID NO: 178556 - DNA, 20 bp, Artificial Sequence
  Synthetic oligonucleotide; AGG chr2 60501018 60501037 60501021 -
tgaggtcggctgagcagttc

SEQ ID NO: 178557 - DNA, 20 bp, Artificial Sequence
  Synthetic oligonucleotide; GGG chr2 60501017 60501036 60501020 -
gaggtcggctgagcagttca

SEQ ID NO: 178558 - DNA, 20 bp, Artificial Sequence
  Synthetic oligonucleotide; CAG chr2 60501001 60501020 60501004 -
ttcagggttctcccatttta

SEQ ID NO: 178559 - DNA, 20 bp, Artificial Sequence
  Synthetic oligonucleotide; GAG chr2 60500999 60501018 60501002 -
cagggttctcccattttaca

SEQ ID NO: 178560 - DNA, 20 bp, Artificial Sequence
  Synthetic oligonucleotide; AGG chr2 60500998 60501017 60501001 -
agggttctcccattttacag

SEQ ID NO: 178561 - DNA, 20 bp, Artificial Sequence
  Synthetic oligonucleotide; GAG chr2 60500996 60501015 60500999 -
ggttctcccattttacagag

SEQ ID NO: 178562 - DNA, 20 bp, Artificial Sequence
  Synthetic oligonucleotide; AGG chr2 60500995 60501014 60500998 -
gttctcccattttacagagg

SEQ ID NO: 178563 - DNA, 20 bp, Artificial Sequence
  Synthetic oligonucleotide; CAG chr2 60500989 60501008 60500992 -
ccattttacagaggaggatg

SEQ ID NO: 178564 - DNA, 20 bp, Artificial Sequence
  Synthetic oligonucleotide; CAG chr2 60500981 60501000 60500984 -
cagaggaggatgcagcgacc

SEQ ID NO: 178565 - DNA, 20 bp, Artificial Sequence
  Synthetic oligonucleotide; AAG chr2 60500968 60500987 60500971 -
agcgacccagaaatgcttgc

SEQ ID NO: 178566 - DNA, 20 bp, Artificial Sequence
  Synthetic oligonucleotide; CAG chr2 60500959 60500978 60500962 -
gaaatgcttgcaagcccacc

SEQ ID NO: 178567 - DNA, 20 bp, Artificial Sequence
  Synthetic oligonucleotide; TAG chr2 60500955 60500974 60500958 -
tgcttgcaagcccacccagc

SEQ ID NO: 178568 - DNA, 20 bp, Artificial Sequence
  Synthetic oligonucleotide; AGG chr2 60500954 60500973 60500957 -
gcttgcaagcccacccagct

SEQ ID NO: 178569 - DNA, 20 bp, Artificial Sequence
  Synthetic oligonucleotide; CAG chr2 60500942 60500961 60500945 -
acccagctaggcttgcttca

SEQ ID NO: 178570 - DNA, 20 bp, Artificial Sequence
  Synthetic oligonucleotide; TAG chr2 60500926 60500945 60500929 -
ttcacagacactcttttaac

SEQ ID NO: 178571 - DNA, 20 bp, Artificial Sequence
  Synthetic oligonucleotide; CAG chr2 60500917 60500936 60500920 -
actcttttaactagttccat

SEQ ID NO: 178572 - DNA, 20 bp, Artificial Sequence
  Synthetic oligonucleotide; CAG chr2 60500908 60500927 60500911 -
actagttccatcagcaaccc

SEQ ID NO: 178573 - DNA, 20 bp, Artificial Sequence
  Synthetic oligonucleotide; AGG chr2 60500907 60500926 60500910 -
ctagttccatcagcaacccc

SEQ ID NO: 178574 - DNA, 20 bp, Artificial Sequence
  Synthetic oligonucleotide; TGG chr2 60500903 60500922 60500906 -
ttccatcagcaaccccaggt

SEQ ID NO: 178575 - DNA, 20 bp, Artificial Sequence
  Synthetic oligonucleotide; CAG chr2 60500872 60500891 60500875 -
tgtcatcatacacattttac

SEQ ID NO: 178576 - DNA, 20 bp, Artificial Sequence
  Synthetic oligonucleotide; AAG chr2 60500867 60500886 60500870 -
tcatacacattttaccagtg

SEQ ID NO: 178577 - DNA, 20 bp, Artificial Sequence
  Synthetic oligonucleotide; GAG chr2 60500859 60500878 60500862 -
attttaccagtgaagaaact

SEQ ID NO: 178578 - DNA, 20 bp, Artificial Sequence
  Synthetic oligonucleotide; AGG chr2 60500858 60500877 60500861 -
ttttaccagtgaagaaactg

SEQ ID NO: 178579 - DNA, 20 bp, Artificial Sequence
  Synthetic oligonucleotide; TGG chr2 60500853 60500872 60500856 -
ccagtgaagaaactgaggct

SEQ ID NO: 178580 - DNA, 20 bp, Artificial Sequence
  Synthetic oligonucleotide; GAG chr2 60500851 60500870 60500854 -
agtgaagaaactgaggcttg

SEQ ID NO: 178581 - DNA, 20 bp, Artificial Sequence
  Synthetic oligonucleotide; GAG chr2 60500849 60500868 60500852 -
tgaagaaactgaggcttgga

SEQ ID NO: 178582 - DNA, 20 bp, Artificial Sequence
  Synthetic oligonucleotide; AGG chr2 60500848 60500867 60500851 -
gaagaaactgaggcttggag

SEQ ID NO: 178583 - DNA, 20 bp, Artificial Sequence
  Synthetic oligonucleotide; AAG chr2 60500842 60500861 60500845 -
actgaggcttggagaggtta

SEQ ID NO: 178584 - DNA, 20 bp, Artificial Sequence
  Synthetic oligonucleotide; GAG chr2 60500840 60500859 60500843 -
tgaggcttggagaggttaaa

SEQ ID NO: 178585 - DNA, 20 bp, Artificial Sequence
  Synthetic oligonucleotide; CAG chr2 60500830 60500849 60500833 -
agaggttaaagagctgctcc

SEQ ID NO: 178586 - DNA, 20 bp, Artificial Sequence
  Synthetic oligonucleotide; CAG chr2 60500822 60500841 60500825 -
aagagctgctcccagacaca

SEQ ID NO: 178587 - DNA, 20 bp, Artificial Sequence
  Synthetic oligonucleotide; CAG chr2 60500818 60500837 60500821 -
gctgctcccagacacacagc

SEQ ID NO: 178588 - DNA, 20 bp, Artificial Sequence
  Synthetic oligonucleotide; AGG chr2 60500817 60500836 60500820 -
ctgctcccagacacacagcc

SEQ ID NO: 178589 - DNA, 20 bp, Artificial Sequence
  Synthetic oligonucleotide; TGG chr2 60500810 60500829 60500813 -
cagacacacagccaggaaat

SEQ ID NO: 178590 - DNA, 20 bp, Artificial Sequence
  Synthetic oligonucleotide; TGG chr2 60500807 60500826 60500810 -
acacacagccaggaaattgg

SEQ ID NO: 178591 - DNA, 20 bp, Artificial Sequence
  Synthetic oligonucleotide; TAG chr2 60500804 60500823 60500807 -
cacagccaggaaattggtgg

SEQ ID NO: 178592 - DNA, 20 bp, Artificial Sequence
  Synthetic oligonucleotide; AAG chr2 60500798 60500817 60500801 -
caggaaattggtggtagatg

SEQ ID NO: 178593 - DNA, 20 bp, Artificial Sequence
  Synthetic oligonucleotide; AGG chr2 60500797 60500816 60500800 -
aggaaattggtggtagatga

SEQ ID NO: 178594 - DNA, 20 bp, Artificial Sequence
  Synthetic oligonucleotide; CAG chr2 60500791 60500810 60500794 -
ttggtggtagatgaaggatc

SEQ ID NO: 178595 - DNA, 20 bp, Artificial Sequence
  Synthetic oligonucleotide; TGG chr2 60500773 60500792 60500776 -
tccagctcatctgtctaact

SEQ ID NO: 178596 - DNA, 20 bp, Artificial Sequence
  Synthetic oligonucleotide; GGG chr2 60500772 60500791 60500775 -
ccagctcatctgtctaactt

SEQ ID NO: 178597 - DNA, 20 bp, Artificial Sequence
  Synthetic oligonucleotide; GAG chr2 60500770 60500789 60500773 -
agctcatctgtctaacttgg

SEQ ID NO: 178598 - DNA, 20 bp, Artificial Sequence
  Synthetic oligonucleotide; GAG chr2 60500764 60500783 60500767 -
tctgtctaacttgggagcct

SEQ ID NO: 178599 - DNA, 20 bp, Artificial Sequence
  Synthetic oligonucleotide; AAG chr2 60500740 60500759 60500743 -
gttcatcttacctatccacc

SEQ ID NO: 178600 - DNA, 20 bp, Artificial Sequence
  Synthetic oligonucleotide; AGG chr2 60500739 60500758 60500742 -
ttcatcttacctatccacca

SEQ ID NO: 178601 - DNA, 20 bp, Artificial Sequence
  Synthetic oligonucleotide; AAG chr2 60500732 60500751 60500735 -
tacctatccaccaaggcttg

SEQ ID NO: 178602 - DNA, 20 bp, Artificial Sequence
  Synthetic oligonucleotide; GAG chr2 60500728 60500747 60500731 -
tatccaccaaggcttgaagt

SEQ ID NO: 178603 - DNA, 20 bp, Artificial Sequence
  Synthetic oligonucleotide; AGG chr2 60500727 60500746 60500730 -
atccaccaaggcttgaagtg

SEQ ID NO: 178604 - DNA, 20 bp, Artificial Sequence
  Synthetic oligonucleotide; GAG chr2 60500712 60500731 60500715 -
aagtgaggtgccccgactgt

SEQ ID NO: 178605 - DNA, 20 bp, Artificial Sequence
  Synthetic oligonucleotide; CAG chr2 60500706 60500725 60500709 -
ggtgccccgactgtgagttc

SEQ ID NO: 178606 - DNA, 20 bp, Artificial Sequence
  Synthetic oligonucleotide; AGG chr2 60500705 60500724 60500708 -
gtgccccgactgtgagttcc

SEQ ID NO: 178607 - DNA, 20 bp, Artificial Sequence
  Synthetic oligonucleotide; CAG chr2 60500691 60500710 60500694 -
agttccaggtttgatgccta

SEQ ID NO: 178608 - DNA, 20 bp, Artificial Sequence
  Synthetic oligonucleotide; CAG chr2 60500683 60500702 60500686 -
gtttgatgcctacagcccat

SEQ ID NO: 178609 - DNA, 20 bp, Artificial Sequence
  Synthetic oligonucleotide; TGG chr2 60500654 60500673 60500657 -
accttgtcttataccttaac

SEQ ID NO: 178610 - DNA, 20 bp, Artificial Sequence
  Synthetic oligonucleotide; TGG chr2 60500651 60500670 60500654 -
ttgtcttataccttaactgg

SEQ ID NO: 178611 - DNA, 20 bp, Artificial Sequence
  Synthetic oligonucleotide; GAG chr2 60500649 60500668 60500652 -
gtcttataccttaactggtg

SEQ ID NO: 178612 - DNA, 20 bp, Artificial Sequence
  Synthetic oligonucleotide; AGG chr2 60500648 60500667 60500651 -
tcttataccttaactggtgg

SEQ ID NO: 178613 - DNA, 20 bp, Artificial Sequence
  Synthetic oligonucleotide; GGG chr2 60500647 60500666 60500650 -
cttataccttaactggtgga

SEQ ID NO: 178614 - DNA, 20 bp, Artificial Sequence
  Synthetic oligonucleotide; TAG chr2 60500631 60500650 60500634 -
tggagggtgctgtctctgtg

SEQ ID NO: 178615 - DNA, 20 bp, Artificial Sequence
  Synthetic oligonucleotide; CAG chr2 60500628 60500647 60500631 -
agggtgctgtctctgtgtag

SEQ ID NO: 178616 - DNA, 20 bp, Artificial Sequence
  Synthetic oligonucleotide; CAG chr2 60500621 60500640 60500624 -
tgtctctgtgtagcagccac

SEQ ID NO: 178617 - DNA, 20 bp, Artificial Sequence
  Synthetic oligonucleotide; TAG chr2 60500616 60500635 60500619 -
ctgtgtagcagccaccagcc

SEQ ID NO: 178618 - DNA, 20 bp, Artificial Sequence
  Synthetic oligonucleotide; GAG chr2 60500597 60500616 60500600 -
ctagctctgaaccctgtcct

SEQ ID NO: 178619 - DNA, 20 bp, Artificial Sequence
  Synthetic oligonucleotide; AGG chr2 60500596 60500615 60500599 -
tagctctgaaccctgtcctg

SEQ ID NO: 178620 - DNA, 20 bp, Artificial Sequence
  Synthetic oligonucleotide; GAG chr2 60500594 60500613 60500597 -
gctctgaaccctgtcctgag

SEQ ID NO: 178621 - DNA, 20 bp, Artificial Sequence
  Synthetic oligonucleotide; TGG chr2 60500590 60500609 60500593 -
tgaaccctgtcctgaggagt

SEQ ID NO: 178622 - DNA, 20 bp, Artificial Sequence
  Synthetic oligonucleotide; GGG chr2 60500589 60500608 60500592 -
gaaccctgtcctgaggagtt

SEQ ID NO: 178623 - DNA, 20 bp, Artificial Sequence
  Synthetic oligonucleotide; AAG chr2 60500586 60500605 60500589 -
ccctgtcctgaggagttggg

SEQ ID NO: 178624 - DNA, 20 bp, Artificial Sequence
  Synthetic oligonucleotide; TGG chr2 60500581 60500600 60500584 -
tcctgaggagttgggaagtg

SEQ ID NO: 178625 - DNA, 20 bp, Artificial Sequence
  Synthetic oligonucleotide; GGG chr2 60500580 60500599 60500583 -
cctgaggagttgggaagtgt

SEQ ID NO: 178626 - DNA, 20 bp, Artificial Sequence
  Synthetic oligonucleotide; GGG chr2 60500579 60500598 60500582 -
ctgaggagttgggaagtgtg

SEQ ID NO: 178627 - DNA, 20 bp, Artificial Sequence
  Synthetic oligonucleotide; TGG chr2 60500572 60500591 60500575 -
gttgggaagtgtggggtgtc

SEQ ID NO: 178628 - DNA, 20 bp, Artificial Sequence
  Synthetic oligonucleotide; TAG chr2 60500550 60500569 60500553 -
gtttattccatcaatacacg

SEQ ID NO: 178629 - DNA, 20 bp, Artificial Sequence
  Synthetic oligonucleotide; CAG chr2 60500519 60500538 60500522 -
attcttctgccattttttct

SEQ ID NO: 178630 - DNA, 20 bp, Artificial Sequence
  Synthetic oligonucleotide; AGG chr2 60500518 60500537 60500521 -
ttcttctgccattttttctc

SEQ ID NO: 178631 - DNA, 20 bp, Artificial Sequence
  Synthetic oligonucleotide; GGG chr2 60500517 60500536 60500520 -
tcttctgccattttttctca

SEQ ID NO: 178632 - DNA, 20 bp, Artificial Sequence
  Synthetic oligonucleotide; GGG chr2 60500516 60500535 60500519 -
cttctgccattttttctcag

SEQ ID NO: 178633 - DNA, 20 bp, Artificial Sequence
  Synthetic oligonucleotide; TGG chr2 60500498 60500517 60500501 -
aggggctctccttccttccc

SEQ ID NO: 178634 - DNA, 20 bp, Artificial Sequence
  Synthetic oligonucleotide; TGG chr2 60500491 60500510 60500494 -
ctccttccttccctggctct

SEQ ID NO: 178635 - DNA, 20 bp, Artificial Sequence
  Synthetic oligonucleotide; GGG chr2 60500490 60500509 60500493 -
tccttccttccctggctctt

SEQ ID NO: 178636 - DNA, 20 bp, Artificial Sequence
  Synthetic oligonucleotide; TAG chr2 60500487 60500506 60500490 -
ttccttccctggctcttggg

SEQ ID NO: 178637 - DNA, 20 bp, Artificial Sequence
  Synthetic oligonucleotide; AGG chr2 60500486 60500505 60500489 -
tccttccctggctcttgggt

SEQ ID NO: 178638 - DNA, 20 bp, Artificial Sequence
  Synthetic oligonucleotide; AAG chr2 60500467 60500486 60500470 -
taggctgcctgctctgatgt

SEQ ID NO: 178639 - DNA, 20 bp, Artificial Sequence
  Synthetic oligonucleotide; TGG chr2 60500457 60500476 60500460 -
gctctgatgtaagttcctgc

SEQ ID NO: 178640 - DNA, 20 bp, Artificial Sequence
  Synthetic oligonucleotide; GGG chr2 60500456 60500475 60500459 -
ctctgatgtaagttcctgct

SEQ ID NO: 178641 - DNA, 20 bp, Artificial Sequence
  Synthetic oligonucleotide; TGG chr2 60500443 60500462 60500446 -
tcctgctgggatgattgctc

SEQ ID NO: 178642 - DNA, 20 bp, Artificial Sequence
  Synthetic oligonucleotide; CAG chr2 60500439 60500458 60500442 -
gctgggatgattgctctggc

SEQ ID NO: 178643 - DNA, 20 bp, Artificial Sequence
  Synthetic oligonucleotide; AGG chr2 60500438 60500457 60500441 -
ctgggatgattgctctggcc

SEQ ID NO: 178644 - DNA, 20 bp, Artificial Sequence
  Synthetic oligonucleotide; CAG chr2 60500431 60500450 60500434 -
gattgctctggccaggcccc

SEQ ID NO: 178645 - DNA, 20 bp, Artificial Sequence
  Synthetic oligonucleotide; AAG chr2 60500408 60500427 60500411 -
ctgctccctgcccttctctg

SEQ ID NO: 178646 - DNA, 20 bp, Artificial Sequence
  Synthetic oligonucleotide; AGG chr2 60500407 60500426 60500410 -
tgctccctgcccttctctga

SEQ ID NO: 178647 - DNA, 20 bp, Artificial Sequence
  Synthetic oligonucleotide; CAG chr2 60500395 60500414 60500398 -
ttctctgaaggcacatctgt

SEQ ID NO: 178648 - DNA, 20 bp, Artificial Sequence
  Synthetic oligonucleotide; CAG chr2 60500388 60500407 60500391 -
aaggcacatctgtcagccca

SEQ ID NO: 178649 - DNA, 20 bp, Artificial Sequence
  Synthetic oligonucleotide; GAG chr2 60500386 60500405 60500389 -
ggcacatctgtcagcccaca

SEQ ID NO: 178650 - DNA, 20 bp, Artificial Sequence
  Synthetic oligonucleotide; AGG chr2 60500385 60500404 60500388 -
gcacatctgtcagcccacag

SEQ ID NO: 178651 - DNA, 20 bp, Artificial Sequence
  Synthetic oligonucleotide; CGG chr2 60500380 60500399 60500383 -
tctgtcagcccacagaggca

SEQ ID NO: 178652 - DNA, 20 bp, Artificial Sequence
  Synthetic oligonucleotide; TGG chr2 60500373 60500392 60500376 -
gcccacagaggcacggttaa

SEQ ID NO: 178653 - DNA, 20 bp, Artificial Sequence
  Synthetic oligonucleotide; TGG chr2 60500370 60500389 60500373 -
cacagaggcacggttaatgg

SEQ ID NO: 178654 - DNA, 20 bp, Artificial Sequence
  Synthetic oligonucleotide; CGG chr2 60500367 60500386 60500370 -
agaggcacggttaatggtgg

SEQ ID NO: 178655 - DNA, 20 bp, Artificial Sequence
  Synthetic oligonucleotide; GGG chr2 60500366 60500385 60500369 -
gaggcacggttaatggtggc

SEQ ID NO: 178656 - DNA, 20 bp, Artificial Sequence
  Synthetic oligonucleotide; GGG chr2 60500365 60500384 60500368 -
aggcacggttaatggtggcg

SEQ ID NO: 178657 - DNA, 20 bp, Artificial Sequence
  Synthetic oligonucleotide; AAG chr2 60500362 60500381 60500365 -
cacggttaatggtggcgggg

SEQ ID NO: 178658 - DNA, 20 bp, Artificial Sequence
  Synthetic oligonucleotide; CAG chr2 60500359 60500378 60500362 -
ggttaatggtggcggggaag

SEQ ID NO: 178659 - DNA, 20 bp, Artificial Sequence
  Synthetic oligonucleotide; GAG chr2 60500357 60500376 60500360 -
ttaatggtggcggggaagca

SEQ ID NO: 178660 - DNA, 20 bp, Artificial Sequence
  Synthetic oligonucleotide; AGG chr2 60500356 60500375 60500359 -
taatggtggcggggaagcag

SEQ ID NO: 178661 - DNA, 20 bp, Artificial Sequence
  Synthetic oligonucleotide; CAG chr2 60500353 60500372 60500356 -
tggtggcggggaagcagagg

SEQ ID NO: 178662 - DNA, 20 bp, Artificial Sequence
  Synthetic oligonucleotide; TGG chr2 60500343 60500362 60500346 -
gaagcagaggcagtgcataa

SEQ ID NO: 178663 - DNA, 20 bp, Artificial Sequence
  Synthetic oligonucleotide; GGG chr2 60500342 60500361 60500345 -
aagcagaggcagtgcataat

SEQ ID NO: 178664 - DNA, 20 bp, Artificial Sequence
  Synthetic oligonucleotide; GGG chr2 60500341 60500360 60500344 -
agcagaggcagtgcataatg

SEQ ID NO: 178665 - DNA, 20 bp, Artificial Sequence
  Synthetic oligonucleotide; GGG chr2 60500340 60500359 60500343 -
gcagaggcagtgcataatgg

SEQ ID NO: 178666 - DNA, 20 bp, Artificial Sequence
  Synthetic oligonucleotide; TGG chr2 60500334 60500353 60500337 -
gcagtgcataatgggggaac

SEQ ID NO: 178667 - DNA, 20 bp, Artificial Sequence
  Synthetic oligonucleotide; CGG chr2 60500328 60500347 60500331 -
cataatgggggaactggccc

SEQ ID NO: 178668 - DNA, 20 bp, Artificial Sequence
  Synthetic oligonucleotide; GGG chr2 60500327 60500346 60500330 -
ataatgggggaactggcccc

SEQ ID NO: 178669 - DNA, 20 bp, Artificial Sequence
  Synthetic oligonucleotide; TGG chr2 60500278 60500297 60500281 -
ccccctgtcccctccccgcc

SEQ ID NO: 178670 - DNA, 20 bp, Artificial Sequence
  Synthetic oligonucleotide; GGG chr2 60500277 60500296 60500280 -
cccctgtcccctccccgcct

SEQ ID NO: 178671 - DNA, 20 bp, Artificial Sequence
  Synthetic oligonucleotide; AAG chr2 60500250 60500269 60500253 -
acttgtccactttcactctc

SEQ ID NO: 178672 - DNA, 20 bp, Artificial Sequence
  Synthetic oligonucleotide; CAG chr2 60500230 60500249 60500233 -
aagaccaccgctctcacaca

SEQ ID NO: 178673 - DNA, 20 bp, Artificial Sequence
  Synthetic oligonucleotide; AGG chr2 60500229 60500248 60500232 -
agaccaccgctctcacacac

SEQ ID NO: 178674 - DNA, 20 bp, Artificial Sequence
  Synthetic oligonucleotide; CAG chr2 60500210 60500229 60500213 -
caggtcctgtgctgccccca

SEQ ID NO: 178675 - DNA, 20 bp, Artificial Sequence
  Synthetic oligonucleotide; CAG chr2 60500202 60500221 60500205 -
gtgctgcccccacagctttg

SEQ ID NO: 178676 - DNA, 20 bp, Artificial Sequence
  Synthetic oligonucleotide; AGG chr2 60500201 60500220 60500204 -
tgctgcccccacagctttgc

SEQ ID NO: 178677 - DNA, 20 bp, Artificial Sequence
  Synthetic oligonucleotide; TGG chr2 60500194 60500213 60500197 -
cccacagctttgcaggctgc

SEQ ID NO: 178678 - DNA, 20 bp, Artificial Sequence
  Synthetic oligonucleotide; CAG chr2 60500182 60500201 60500185 -
caggctgctggttttccatc

SEQ ID NO: 178679 - DNA, 20 bp, Artificial Sequence
  Synthetic oligonucleotide; AGG chr2 60500181 60500200 60500184 -
aggctgctggttttccatcc

SEQ ID NO: 178680 - DNA, 20 bp, Artificial Sequence
  Synthetic oligonucleotide; GGG chr2 60500180 60500199 60500183 -
ggctgctggttttccatcca

SEQ ID NO: 178681 - DNA, 20 bp, Artificial Sequence
  Synthetic oligonucleotide; CAG chr2 60500175 60500194 60500178 -
ctggttttccatccagggca

SEQ ID NO: 178682 - DNA, 20 bp, Artificial Sequence
  Synthetic oligonucleotide; CAG chr2 60500169 60500188 60500172 -
ttccatccagggcacagccg

SEQ ID NO: 178683 - DNA, 20 bp, Artificial Sequence
  Synthetic oligonucleotide; AGG chr2 60500168 60500187 60500171 -
tccatccagggcacagccgc

SEQ ID NO: 178684 - DNA, 20 bp, Artificial Sequence
  Synthetic oligonucleotide; TGG chr2 60500161 60500180 60500164 -
agggcacagccgcaggcctc

SEQ ID NO: 178685 - DNA, 20 bp, Artificial Sequence
  Synthetic oligonucleotide; GGG chr2 60500160 60500179 60500163 -
gggcacagccgcaggcctct

SEQ ID NO: 178686 - DNA, 20 bp, Artificial Sequence
  Synthetic oligonucleotide; TAG chr2 60500152 60500171 60500155 -
ccgcaggcctctgggcaccc

SEQ ID NO: 178687 - DNA, 20 bp, Artificial Sequence
  Synthetic oligonucleotide; CAG chr2 60500145 60500164 60500148 -
cctctgggcaccctagccct

SEQ ID NO: 178688 - DNA, 20 bp, Artificial Sequence
  Synthetic oligonucleotide; CAG chr2 60500138 60500157 60500141 -
gcaccctagccctcagtgcc

SEQ ID NO: 178689 - DNA, 20 bp, Artificial Sequence
  Synthetic oligonucleotide; AGG chr2 60500137 60500156 60500140 -
caccctagccctcagtgccc

SEQ ID NO: 178690 - DNA, 20 bp, Artificial Sequence
  Synthetic oligonucleotide; GGG chr2 60500136 60500155 60500139 -
accctagccctcagtgccca

SEQ ID NO: 178691 - DNA, 20 bp, Artificial Sequence
  Synthetic oligonucleotide; AAG chr2 60500131 60500150 60500134 -
agccctcagtgcccagggca

SEQ ID NO: 178692 - DNA, 20 bp, Artificial Sequence
  Synthetic oligonucleotide; TGG chr2 60500109 60500128 60500112 -
gccctgacatgcaatctcac

SEQ ID NO: 178693 - DNA, 20 bp, Artificial Sequence
  Synthetic oligonucleotide; CAG chr2 60500106 60500125 60500109 -
ctgacatgcaatctcactgg

SEQ ID NO: 178694 - DNA, 20 bp, Artificial Sequence
  Synthetic oligonucleotide; AGG chr2 60500105 60500124 60500108 -
tgacatgcaatctcactggc

SEQ ID NO: 178695 - DNA, 20 bp, Artificial Sequence
  Synthetic oligonucleotide; CAG chr2 60500102 60500121 60500105 -
catgcaatctcactggcagg

SEQ ID NO: 178696 - DNA, 20 bp, Artificial Sequence
  Synthetic oligonucleotide; CAG chr2 60500096 60500115 60500099 -
atctcactggcaggcagcct

SEQ ID NO: 178697 - DNA, 20 bp, Artificial Sequence
  Synthetic oligonucleotide; AGG chr2 60500095 60500114 60500098 -
tctcactggcaggcagcctc

SEQ ID NO: 178698 - DNA, 20 bp, Artificial Sequence
  Synthetic oligonucleotide; CAG chr2 60500092 60500111 60500095 -
cactggcaggcagcctcagg

SEQ ID NO: 178699 - DNA, 20 bp, Artificial Sequence
  Synthetic oligonucleotide; AGG chr2 60500091 60500110 60500094 -
actggcaggcagcctcaggc

SEQ ID NO: 178700 - DNA, 20 bp, Artificial Sequence
  Synthetic oligonucleotide; TGG chr2 60500086 60500105 60500089 -
caggcagcctcaggcaggcc

SEQ ID NO: 178701 - DNA, 20 bp, Artificial Sequence
  Synthetic oligonucleotide; GGG chr2 60500085 60500104 60500088 -
aggcagcctcaggcaggcct

SEQ ID NO: 178702 - DNA, 20 bp, Artificial Sequence
  Synthetic oligonucleotide; CAG chr2 60500082 60500101 60500085 -
cagcctcaggcaggcctggg

SEQ ID NO: 178703 - DNA, 20 bp, Artificial Sequence
  Synthetic oligonucleotide; GAG chr2 60500080 60500099 60500083 -
gcctcaggcaggcctgggca

SEQ ID NO: 178704 - DNA, 20 bp, Artificial Sequence
  Synthetic oligonucleotide; AGG chr2 60500079 60500098 60500082 -
cctcaggcaggcctgggcag

SEQ ID NO: 178705 - DNA, 20 bp, Artificial Sequence
  Synthetic oligonucleotide; AAG chr2 60500071 60500090 60500074 -
aggcctgggcagaggaccga

SEQ ID NO: 178706 - DNA, 20 bp, Artificial Sequence
  Synthetic oligonucleotide; AGG chr2 60500070 60500089 60500073 -
ggcctgggcagaggaccgaa

SEQ ID NO: 178707 - DNA, 20 bp, Artificial Sequence
  Synthetic oligonucleotide; GAG chr2 60500068 60500087 60500071 -
cctgggcagaggaccgaaag

SEQ ID NO: 178708 - DNA, 20 bp, Artificial Sequence
  Synthetic oligonucleotide; AGG chr2 60500067 60500086 60500070 -
ctgggcagaggaccgaaagg

SEQ ID NO: 178709 - DNA, 20 bp, Artificial Sequence
  Synthetic oligonucleotide; GAG chr2 60500065 60500084 60500068 -
gggcagaggaccgaaaggag

SEQ ID NO: 178710 - DNA, 20 bp, Artificial Sequence
  Synthetic oligonucleotide; GAG chr2 60500063 60500082 60500066 -
gcagaggaccgaaaggagga

SEQ ID NO: 178711 - DNA, 20 bp, Artificial Sequence
  Synthetic oligonucleotide; AGG chr2 60500062 60500081 60500065 -
cagaggaccgaaaggaggag

SEQ ID NO: 178712 - DNA, 20 bp, Artificial Sequence
  Synthetic oligonucleotide; GAG chr2 60500060 60500079 60500063 -
gaggaccgaaaggaggagag

SEQ ID NO: 178713 - DNA, 20 bp, Artificial Sequence
  Synthetic oligonucleotide; AGG chr2 60500059 60500078 60500062 -
aggaccgaaaggaggagagg

SEQ ID NO: 178714 - DNA, 20 bp, Artificial Sequence
  Synthetic oligonucleotide; GGG chr2 60500058 60500077 60500061 -
ggaccgaaaggaggagagga

SEQ ID NO: 178715 - DNA, 20 bp, Artificial Sequence
  Synthetic oligonucleotide; GAG chr2 60500056 60500075 60500059 -
accgaaaggaggagaggagg

SEQ ID NO: 178716 - DNA, 20 bp, Artificial Sequence
  Synthetic oligonucleotide; AGG chr2 60500055 60500074 60500058 -
ccgaaaggaggagaggaggg

SEQ ID NO: 178717 - DNA, 20 bp, Artificial Sequence
  Synthetic oligonucleotide; GGG chr2 60500054 60500073 60500057 -
cgaaaggaggagaggaggga

SEQ ID NO: 178718 - DNA, 20 bp, Artificial Sequence
  Synthetic oligonucleotide; GAG chr2 60500052 60500071 60500055 -
aaaggaggagaggagggagg

SEQ ID NO: 178719 - DNA, 20 bp, Artificial Sequence
  Synthetic oligonucleotide; CAG chr2 60500046 60500065 60500049 -
ggagaggagggagggagcta

SEQ ID NO: 178720 - DNA, 20 bp, Artificial Sequence
  Synthetic oligonucleotide; TAG chr2 60500043 60500062 60500046 -
gaggagggagggagctacag

SEQ ID NO: 178721 - DNA, 20 bp, Artificial Sequence
  Synthetic oligonucleotide; GAG chr2 60500041 60500060 60500044 -
ggagggagggagctacagta

SEQ ID NO: 178722 - DNA, 20 bp, Artificial Sequence
  Synthetic oligonucleotide; CAG chr2 60500038 60500057 60500041 -
gggagggagctacagtagag

SEQ ID NO: 178723 - DNA, 20 bp, Artificial Sequence
  Synthetic oligonucleotide; CAG chr2 60500034 60500053 60500037 -
gggagctacagtagagcaga

SEQ ID NO: 178724 - DNA, 20 bp, Artificial Sequence
  Synthetic oligonucleotide; AGG chr2 60500033 60500052 60500036 -
ggagctacagtagagcagac

SEQ ID NO: 178725 - DNA, 20 bp, Artificial Sequence
  Synthetic oligonucleotide; GAG chr2 60500031 60500050 60500034 -
agctacagtagagcagacag

SEQ ID NO: 178726 - DNA, 20 bp, Artificial Sequence
  Synthetic oligonucleotide; CAG chr2 60500020 60500039 60500023 -
agcagacaggagacaaacac

SEQ ID NO: 178727 - DNA, 20 bp, Artificial Sequence
  Synthetic oligonucleotide; AAG chr2 60500015 60500034 60500018 -
acaggagacaaacaccagct

SEQ ID NO: 178728 - DNA, 20 bp, Artificial Sequence
  Synthetic oligonucleotide; GAG chr2 60500013 60500032 60500016 -
aggagacaaacaccagctaa

SEQ ID NO: 178729 - DNA, 20 bp, Artificial Sequence
  Synthetic oligonucleotide; CAG chr2 60500006 60500025 60500009 -
aaacaccagctaagagtaaa

SEQ ID NO: 178730 - DNA, 20 bp, Artificial Sequence
  Synthetic oligonucleotide; TGG chr2 60500001 60500020 60500004 -
ccagctaagagtaaacagcc

SEQ ID NO: 178731 - DNA, 20 bp, Artificial Sequence
  Synthetic oligonucleotide; CAG chr2 60499998 60500017 60500001 -
gctaagagtaaacagcctgg

SEQ ID NO: 178732 - DNA, 20 bp, Artificial Sequence
  Synthetic oligonucleotide; TGG chr2 60499995 60500014 60499998 -
aagagtaaacagcctggcag

SEQ ID NO: 178733 - DNA, 20 bp, Artificial Sequence
  Synthetic oligonucleotide; GGG chr2 60499994 60500013 60499997 -
agagtaaacagcctggcagt

SEQ ID NO: 178734 - DNA, 20 bp, Artificial Sequence
  Synthetic oligonucleotide; GGG chr2 60499993 60500012 60499996 -
gagtaaacagcctggcagtg

SEQ ID NO: 178735 - DNA, 20 bp, Artificial Sequence
  Synthetic oligonucleotide; GAG chr2 60499989 60500008 60499992 -
aaacagcctggcagtggggt

SEQ ID NO: 178736 - DNA, 20 bp, Artificial Sequence
  Synthetic oligonucleotide; TGG chr2 60499982 60500001 60499985 -
ctggcagtggggtgagtgcc

SEQ ID NO: 178737 - DNA, 20 bp, Artificial Sequence
  Synthetic oligonucleotide; TGG chr2 60499978 60499997 60499981 -
cagtggggtgagtgcctggc

SEQ ID NO: 178738 - DNA, 20 bp, Artificial Sequence
  Synthetic oligonucleotide; GAG chr2 60499976 60499995 60499979 -
gtggggtgagtgcctggctg

SEQ ID NO: 178739 - DNA, 20 bp, Artificial Sequence
  Synthetic oligonucleotide; AGG chr2 60499975 60499994 60499978 -
tggggtgagtgcctggctgg

SEQ ID NO: 178740 - DNA, 20 bp, Artificial Sequence
  Synthetic oligonucleotide; GGG chr2 60499974 60499993 60499977 -
ggggtgagtgcctggctgga

SEQ ID NO: 178741 - DNA, 20 bp, Artificial Sequence
  Synthetic oligonucleotide; GGG chr2 60499973 60499992 60499976 -
gggtgagtgcctggctggag

SEQ ID NO: 178742 - DNA, 20 bp, Artificial Sequence
  Synthetic oligonucleotide; TGG chr2 60499964 60499983 60499967 -
cctggctggaggggctcacc

SEQ ID NO: 178743 - DNA, 20 bp, Artificial Sequence
  Synthetic oligonucleotide; GGG chr2 60499963 60499982 60499966 -
ctggctggaggggctcacct

SEQ ID NO: 178744 - DNA, 20 bp, Artificial Sequence
  Synthetic oligonucleotide; TGG chr2 60499959 60499978 60499962 -
ctggaggggctcacctgggc

SEQ ID NO: 178745 - DNA, 20 bp, Artificial Sequence
  Synthetic oligonucleotide; TGG chr2 60499950 60499969 60499953 -
ctcacctgggctggcctgcc

SEQ ID NO: 178746 - DNA, 20 bp, Artificial Sequence
  Synthetic oligonucleotide; GGG chr2 60499949 60499968 60499952 -
tcacctgggctggcctgcct

SEQ ID NO: 178747 - DNA, 20 bp, Artificial Sequence
  Synthetic oligonucleotide; GAG chr2 60499947 60499966 60499950 -
acctgggctggcctgcctgg

SEQ ID NO: 178748 - DNA, 20 bp, Artificial Sequence
  Synthetic oligonucleotide; AGG chr2 60499946 60499965 60499949 -
cctgggctggcctgcctggg

SEQ ID NO: 178749 - DNA, 20 bp, Artificial Sequence
  Synthetic oligonucleotide; GAG chr2 60499944 60499963 60499947 -
tgggctggcctgcctgggag

SEQ ID NO: 178750 - DNA, 20 bp, Artificial Sequence
  Synthetic oligonucleotide; CAG chr2 60499940 60499959 60499943 -
ctggcctgcctgggaggagc

SEQ ID NO: 178751 - DNA, 20 bp, Artificial Sequence
  Synthetic oligonucleotide; AGG chr2 60499939 60499958 60499942 -
tggcctgcctgggaggagcc

SEQ ID NO: 178752 - DNA, 20 bp, Artificial Sequence
  Synthetic oligonucleotide; CGG chr2 60499935 60499954 60499938 -
ctgcctgggaggagccaggt

SEQ ID NO: 178753 - DNA, 20 bp, Artificial Sequence
  Synthetic oligonucleotide; TGG chr2 60499932 60499951 60499935 -
cctgggaggagccaggtcgg

SEQ ID NO: 178754 - DNA, 20 bp, Artificial Sequence
  Synthetic oligonucleotide; TAG chr2 60499912 60499931 60499915 -
tggctgctctctccgaatct

SEQ ID NO: 178755 - DNA, 20 bp, Artificial Sequence
  Synthetic oligonucleotide; GAG chr2 60499901 60499920 60499904 -
tccgaatcttagtcctgctt

SEQ ID NO: 178756 - DNA, 20 bp, Artificial Sequence
  Synthetic oligonucleotide; AGG chr2 60499900 60499919 60499903 -
ccgaatcttagtcctgcttg

SEQ ID NO: 178757 - DNA, 20 bp, Artificial Sequence
  Synthetic oligonucleotide; TAG chr2 60499895 60499914 60499898 -
tcttagtcctgcttgaggtc

SEQ ID NO: 178758 - DNA, 20 bp, Artificial Sequence
  Synthetic oligonucleotide; CAG chr2 60499892 60499911 60499895 -
tagtcctgcttgaggtctag

SEQ ID NO: 178759 - DNA, 20 bp, Artificial Sequence
  Synthetic oligonucleotide; CGG chr2 60499885 60499904 60499888 -
gcttgaggtctagcagcttc

SEQ ID NO: 178760 - DNA, 20 bp, Artificial Sequence
  Synthetic oligonucleotide; GAG chr2 60499883 60499902 60499886 -
ttgaggtctagcagcttccg

SEQ ID NO: 178761 - DNA, 20 bp, Artificial Sequence
  Synthetic oligonucleotide; TGG chr2 60499873 60499892 60499876 -
gcagcttccggagctgcaca

SEQ ID NO: 178762 - DNA, 20 bp, Artificial Sequence
  Synthetic oligonucleotide; GGG chr2 60499872 60499891 60499875 -
cagcttccggagctgcacat

SEQ ID NO: 178763 - DNA, 20 bp, Artificial Sequence
  Synthetic oligonucleotide; GGG chr2 60499871 60499890 60499874 -
agcttccggagctgcacatg

SEQ ID NO: 178764 - DNA, 20 bp, Artificial Sequence
  Synthetic oligonucleotide; GAG chr2 60499865 60499884 60499868 -
cggagctgcacatggggctt

SEQ ID NO: 178765 - DNA, 20 bp, Artificial Sequence
  Synthetic oligonucleotide; AGG chr2 60499864 60499883 60499867 -
ggagctgcacatggggcttg

SEQ ID NO: 178766 - DNA, 20 bp, Artificial Sequence
  Synthetic oligonucleotide; TGG chr2 60499859 60499878 60499862 -
tgcacatggggcttgaggtc

SEQ ID NO: 178767 - DNA, 20 bp, Artificial Sequence
  Synthetic oligonucleotide; TGG chr2 60499850 60499869 60499853 -
ggcttgaggtctggtgctta

SEQ ID NO: 178768 - DNA, 20 bp, Artificial Sequence
  Synthetic oligonucleotide; TAG chr2 60499845 60499864 60499848 -
gaggtctggtgcttatggat

SEQ ID NO: 178769 - DNA, 20 bp, Artificial Sequence
  Synthetic oligonucleotide; AGG chr2 60499844 60499863 60499847 -
aggtctggtgcttatggatt

SEQ ID NO: 178770 - DNA, 20 bp, Artificial Sequence
  Synthetic oligonucleotide; GAG chr2 60499842 60499861 60499845 -
gtctggtgcttatggattag

SEQ ID NO: 178771 - DNA, 20 bp, Artificial Sequence
  Synthetic oligonucleotide; AGG chr2 60499841 60499860 60499844 -
tctggtgcttatggattagg

SEQ ID NO: 178772 - DNA, 20 bp, Artificial Sequence
  Synthetic oligonucleotide; AAG chr2 60499838 60499857 60499841 -
ggtgcttatggattaggagg

SEQ ID NO: 178773 - DNA, 20 bp, Artificial Sequence
  Synthetic oligonucleotide; GAG chr2 60499836 60499855 60499839 -
tgcttatggattaggaggaa

SEQ ID NO: 178774 - DNA, 20 bp, Artificial Sequence
  Synthetic oligonucleotide; AAG chr2 60499833 60499852 60499836 -
ttatggattaggaggaagag

SEQ ID NO: 178775 - DNA, 20 bp, Artificial Sequence
  Synthetic oligonucleotide; CAG chr2 60499829 60499848 60499832 -
ggattaggaggaagagaaga

SEQ ID NO: 178776 - DNA, 20 bp, Artificial Sequence
  Synthetic oligonucleotide; TGG chr2 60499825 60499844 60499828 -
taggaggaagagaagacaga

SEQ ID NO: 178777 - DNA, 20 bp, Artificial Sequence
  Synthetic oligonucleotide; CAG chr2 60499822 60499841 60499825 -
gaggaagagaagacagatgg

SEQ ID NO: 178778 - DNA, 20 bp, Artificial Sequence
  Synthetic oligonucleotide; GAG chr2 60499820 60499839 60499823 -
ggaagagaagacagatggca

SEQ ID NO: 178779 - DNA, 20 bp, Artificial Sequence
  Synthetic oligonucleotide; CAG chr2 60499814 60499833 60499817 -
gaagacagatggcagagtac

SEQ ID NO: 178780 - DNA, 20 bp, Artificial Sequence
  Synthetic oligonucleotide; AGG chr2 60499813 60499832 60499816 -
aagacagatggcagagtacc

SEQ ID NO: 178781 - DNA, 20 bp, Artificial Sequence
  Synthetic oligonucleotide; CAG chr2 60499810 60499829 60499813 -
acagatggcagagtaccagg

SEQ ID NO: 178782 - DNA, 20 bp, Artificial Sequence
  Synthetic oligonucleotide; TAG chr2 60499805 60499824 60499808 -
tggcagagtaccaggcagct

SEQ ID NO: 178783 - DNA, 20 bp, Artificial Sequence
  Synthetic oligonucleotide; AGG chr2 60499804 60499823 60499807 -
ggcagagtaccaggcagctt

SEQ ID NO: 178784 - DNA, 20 bp, Artificial Sequence
  Synthetic oligonucleotide; TGG chr2 60499778 60499797 60499781 -
atgtctccttccacatgctg

SEQ ID NO: 178785 - DNA, 20 bp, Artificial Sequence
  Synthetic oligonucleotide; CAG chr2 60499773 60499792 60499776 -
tccttccacatgctgtggcc

SEQ ID NO: 178786 - DNA, 20 bp, Artificial Sequence
  Synthetic oligonucleotide; AGG chr2 60499772 60499791 60499775 -
ccttccacatgctgtggccc

SEQ ID NO: 178787 - DNA, 20 bp, Artificial Sequence
  Synthetic oligonucleotide; CAG chr2 60499762 60499781 60499765 -
gctgtggcccaggtgctgcc

SEQ ID NO: 178788 - DNA, 20 bp, Artificial Sequence
  Synthetic oligonucleotide; GAG chr2 60499760 60499779 60499763 -
tgtggcccaggtgctgccca

SEQ ID NO: 178789 - DNA, 20 bp, Artificial Sequence
  Synthetic oligonucleotide; CAG chr2 60499749 60499768 60499752 -
tgctgcccagagctgtttca

SEQ ID NO: 178790 - DNA, 20 bp, Artificial Sequence
  Synthetic oligonucleotide; CAG chr2 60499746 60499765 60499749 -
tgcccagagctgtttcacag

SEQ ID NO: 178791 - DNA, 20 bp, Artificial Sequence
  Synthetic oligonucleotide; AAG chr2 60499732 60499751 60499735 -
tcacagcagcctctccactc

SEQ ID NO: 178792 - DNA, 20 bp, Artificial Sequence
  Synthetic oligonucleotide; AGG chr2 60499731 60499750 60499734 -
cacagcagcctctccactca

SEQ ID NO: 178793 - DNA, 20 bp, Artificial Sequence
  Synthetic oligonucleotide; GAG chr2 60499726 60499745 60499729 -
cagcctctccactcaaggtt

SEQ ID NO: 178794 - DNA, 20 bp, Artificial Sequence
  Synthetic oligonucleotide; CGG chr2 60499723 60499742 60499726 -
cctctccactcaaggttgag

SEQ ID NO: 178795 - DNA, 20 bp, Artificial Sequence
  Synthetic oligonucleotide; CAG chr2 60499713 60499732 60499716 -
caaggttgagcggtttcctt

SEQ ID NO: 178796 - DNA, 20 bp, Artificial Sequence
  Synthetic oligonucleotide; TGG chr2 60499695 60499714 60499698 -
ttcagtgctgtccacccctt

SEQ ID NO: 178797 - DNA, 20 bp, Artificial Sequence
  Synthetic oligonucleotide; CGG chr2 60499690 60499709 60499693 -
tgctgtccacccctttggtc

SEQ ID NO: 178798 - DNA, 20 bp, Artificial Sequence
  Synthetic oligonucleotide; GGG chr2 60499689 60499708 60499692 -
gctgtccacccctttggtcc

SEQ ID NO: 178799 - DNA, 20 bp, Artificial Sequence
  Synthetic oligonucleotide; GGG chr2 60499688 60499707 60499691 -
ctgtccacccctttggtccg

SEQ ID NO: 178800 - DNA, 20 bp, Artificial Sequence
  Synthetic oligonucleotide; GAG chr2 60499686 60499705 60499689 -
gtccacccctttggtccggg

SEQ ID NO: 178801 - DNA, 20 bp, Artificial Sequence
  Synthetic oligonucleotide; TGG chr2 60499672 60499691 60499675 -
tccggggagcttcatgttcc

SEQ ID NO: 178802 - DNA, 20 bp, Artificial Sequence
  Synthetic oligonucleotide; GGG chr2 60499671 60499690 60499674 -
ccggggagcttcatgttcct

SEQ ID NO: 178803 - DNA, 20 bp, Artificial Sequence
  Synthetic oligonucleotide; TGG chr2 60499651 60499670 60499654 -
gggcctcactgacacctgca

SEQ ID NO: 178804 - DNA, 20 bp, Artificial Sequence
  Synthetic oligonucleotide; GGG chr2 60499650 60499669 60499653 -
ggcctcactgacacctgcat

SEQ ID NO: 178805 - DNA, 20 bp, Artificial Sequence
  Synthetic oligonucleotide; GGG chr2 60499649 60499668 60499652 -
gcctcactgacacctgcatg

SEQ ID NO: 178806 - DNA, 20 bp, Artificial Sequence
  Synthetic oligonucleotide; TGG chr2 60499645 60499664 60499648 -
cactgacacctgcatggggt

SEQ ID NO: 178807 - DNA, 20 bp, Artificial Sequence
  Synthetic oligonucleotide; TGG chr2 60499642 60499661 60499645 -
tgacacctgcatggggttgg

SEQ ID NO: 178808 - DNA, 20 bp, Artificial Sequence
  Synthetic oligonucleotide; GGG chr2 60499641 60499660 60499644 -
gacacctgcatggggttggt

SEQ ID NO: 178809 - DNA, 20 bp, Artificial Sequence
  Synthetic oligonucleotide; GGG chr2 60499640 60499659 60499643 -
acacctgcatggggttggtg

SEQ ID NO: 178810 - DNA, 20 bp, Artificial Sequence
  Synthetic oligonucleotide; GAG chr2 60499638 60499657 60499641 -
acctgcatggggttggtggg

SEQ ID NO: 178811 - DNA, 20 bp, Artificial Sequence
  Synthetic oligonucleotide; AGG chr2 60499637 60499656 60499640 -
cctgcatggggttggtgggg

SEQ ID NO: 178812 - DNA, 20 bp, Artificial Sequence
  Synthetic oligonucleotide; GAG chr2 60499631 60499650 60499634 -
tggggttggtggggaggtat

SEQ ID NO: 178813 - DNA, 20 bp, Artificial Sequence
  Synthetic oligonucleotide; AGG chr2 60499630 60499649 60499633 -
ggggttggtggggaggtatg

SEQ ID NO: 178814 - DNA, 20 bp, Artificial Sequence
  Synthetic oligonucleotide; GGG chr2 60499629 60499648 60499632 -
gggttggtggggaggtatga

SEQ ID NO: 178815 - DNA, 20 bp, Artificial Sequence
  Synthetic oligonucleotide; GGG chr2 60499628 60499647 60499631 -
ggttggtggggaggtatgag

SEQ ID NO: 178816 - DNA, 20 bp, Artificial Sequence
  Synthetic oligonucleotide; TGG chr2 60499624 60499643 60499627 -
ggtggggaggtatgaggggt

SEQ ID NO: 178817 - DNA, 20 bp, Artificial Sequence
  Synthetic oligonucleotide; GAG chr2 60499622 60499641 60499625 -
tggggaggtatgaggggttg

SEQ ID NO: 178818 - DNA, 20 bp, Artificial Sequence
  Synthetic oligonucleotide; AGG chr2 60499621 60499640 60499624 -
ggggaggtatgaggggttgg

SEQ ID NO: 178819 - DNA, 20 bp, Artificial Sequence
  Synthetic oligonucleotide; GGG chr2 60499620 60499639 60499623 -
gggaggtatgaggggttgga

SEQ ID NO: 178820 - DNA, 20 bp, Artificial Sequence
  Synthetic oligonucleotide; GGG chr2 60499619 60499638 60499622 -
ggaggtatgaggggttggag

SEQ ID NO: 178821 - DNA, 20 bp, Artificial Sequence
  Synthetic oligonucleotide; TAG chr2 60499607 60499626 60499610 -
ggttggaggggtctttttgc

SEQ ID NO: 178822 - DNA, 20 bp, Artificial Sequence
  Synthetic oligonucleotide; TGG chr2 60499601 60499620 60499604 -
aggggtctttttgctagccc

SEQ ID NO: 178823 - DNA, 20 bp, Artificial Sequence
  Synthetic oligonucleotide; TGG chr2 60499594 60499613 60499597 -
tttttgctagccctggcccg

SEQ ID NO: 178824 - DNA, 20 bp, Artificial Sequence
  Synthetic oligonucleotide; GAG chr2 60499578 60499597 60499581 -
cccgtggcaaacactgtctt

SEQ ID NO: 178825 - DNA, 20 bp, Artificial Sequence
  Synthetic oligonucleotide; AAG chr2 60499574 60499593 60499577 -
tggcaaacactgtcttgaga

SEQ ID NO: 178826 - DNA, 20 bp, Artificial Sequence
  Synthetic oligonucleotide; TGG chr2 60499571 60499590 60499574 -
caaacactgtcttgagaaag

SEQ ID NO: 178827 - DNA, 20 bp, Artificial Sequence
  Synthetic oligonucleotide; GGG chr2 60499570 60499589 60499573 -
aaacactgtcttgagaaagt

SEQ ID NO: 178828 - DNA, 20 bp, Artificial Sequence
  Synthetic oligonucleotide; AAG chr2 60499561 60499580 60499564 -
cttgagaaagtgggacgttg

SEQ ID NO: 178829 - DNA, 20 bp, Artificial Sequence
  Synthetic oligonucleotide; AGG chr2 60499560 60499579 60499563 -
ttgagaaagtgggacgttga

SEQ ID NO: 178830 - DNA, 20 bp, Artificial Sequence
  Synthetic oligonucleotide; GAG chr2 60499558 60499577 60499561 -
gagaaagtgggacgttgaag

SEQ ID NO: 178831 - DNA, 20 bp, Artificial Sequence
  Synthetic oligonucleotide; TGG chr2 60499553 60499572 60499556 -
agtgggacgttgaaggagct

SEQ ID NO: 178832 - DNA, 20 bp, Artificial Sequence
  Synthetic oligonucleotide; AAG chr2 60499544 60499563 60499547 -
ttgaaggagcttggactcta

SEQ ID NO: 178833 - DNA, 20 bp, Artificial Sequence
  Synthetic oligonucleotide; CAG chr2 60499540 60499559 60499543 -
aggagcttggactctaaagt

SEQ ID NO: 178834 - DNA, 20 bp, Artificial Sequence
  Synthetic oligonucleotide; GAG chr2 60499529 60499548 60499532 -
ctctaaagtcagctacacat

SEQ ID NO: 178835 - DNA, 20 bp, Artificial Sequence
  Synthetic oligonucleotide; TGG chr2 60499513 60499532 60499516 -
acatgagtcttttcacctgc

SEQ ID NO: 178836 - DNA, 20 bp, Artificial Sequence
  Synthetic oligonucleotide; TAG chr2 60499509 60499528 60499512 -
gagtcttttcacctgctggc

SEQ ID NO: 178837 - DNA, 20 bp, Artificial Sequence
  Synthetic oligonucleotide; AGG chr2 60499508 60499527 60499511 -
agtcttttcacctgctggct

SEQ ID NO: 178838 - DNA, 20 bp, Artificial Sequence
  Synthetic oligonucleotide; TGG chr2 60499505 60499524 60499508 -
cttttcacctgctggctagg

SEQ ID NO: 178839 - DNA, 20 bp, Artificial Sequence
  Synthetic oligonucleotide; CGG chr2 60499499 60499518 60499502 -
acctgctggctaggtggccc

SEQ ID NO: 178840 - DNA, 20 bp, Artificial Sequence
  Synthetic oligonucleotide; AAG chr2 60499494 60499513 60499497 -
ctggctaggtggccccggac

SEQ ID NO: 178841 - DNA, 20 bp, Artificial Sequence
  Synthetic oligonucleotide; CAG chr2 60499486 60499505 60499489 -
gtggccccggacaagtcaat

SEQ ID NO: 178842 - DNA, 20 bp, Artificial Sequence
  Synthetic oligonucleotide; TGG chr2 60499478 60499497 60499481 -
ggacaagtcaatcagcctat

SEQ ID NO: 178843 - DNA, 20 bp, Artificial Sequence
  Synthetic oligonucleotide; GGG chr2 60499477 60499496 60499480 -
gacaagtcaatcagcctatt

SEQ ID NO: 178844 - DNA, 20 bp, Artificial Sequence
  Synthetic oligonucleotide; CAG chr2 60499471 60499490 60499474 -
tcaatcagcctattgggcct

SEQ ID NO: 178845 - DNA, 20 bp, Artificial Sequence
  Synthetic oligonucleotide; AGG chr2 60499470 60499489 60499473 -
caatcagcctattgggcctc

SEQ ID NO: 178846 - DNA, 20 bp, Artificial Sequence
  Synthetic oligonucleotide; TGG chr2 60499451 60499470 60499454 -
caggctctttatctataaaa

SEQ ID NO: 178847 - DNA, 20 bp, Artificial Sequence
  Synthetic oligonucleotide; GGG chr2 60499450 60499469 60499453 -
aggctctttatctataaaat

SEQ ID NO: 178848 - DNA, 20 bp, Artificial Sequence
  Synthetic oligonucleotide; GGG chr2 60499449 60499468 60499452 -
ggctctttatctataaaatg

SEQ ID NO: 178849 - DNA, 20 bp, Artificial Sequence
  Synthetic oligonucleotide; TGG chr2 60499426 60499445 60499429 -
ctaatttccttttttgcccc

SEQ ID NO: 178850 - DNA, 20 bp, Artificial Sequence
  Synthetic oligonucleotide; GGG chr2 60499425 60499444 60499428 -
taatttccttttttgcccct

SEQ ID NO: 178851 - DNA, 20 bp, Artificial Sequence
  Synthetic oligonucleotide; AAG chr2 60499422 60499441 60499425 -
tttccttttttgcccctggg

SEQ ID NO: 178852 - DNA, 20 bp, Artificial Sequence
  Synthetic oligonucleotide; TAG chr2 60499409 60499428 60499412 -
ccctgggaagaaatatcact

SEQ ID NO: 178853 - DNA, 20 bp, Artificial Sequence
  Synthetic oligonucleotide; GAG chr2 60499407 60499426 60499410 -
ctgggaagaaatatcactta

SEQ ID NO: 178854 - DNA, 20 bp, Artificial Sequence
  Synthetic oligonucleotide; AGG chr2 60499406 60499425 60499409 -
tgggaagaaatatcacttag

SEQ ID NO: 178855 - DNA, 20 bp, Artificial Sequence
  Synthetic oligonucleotide; GAG chr2 60499404 60499423 60499407 -
ggaagaaatatcacttagag

SEQ ID NO: 178856 - DNA, 20 bp, Artificial Sequence
  Synthetic oligonucleotide; CAG chr2 60499398 60499417 60499401 -
aatatcacttagaggagtta

SEQ ID NO: 178857 - DNA, 20 bp, Artificial Sequence
  Synthetic oligonucleotide; CAG chr2 60499379 60499398 60499382 -
acagaatgtgcaacctttcc

SEQ ID NO: 178858 - DNA, 20 bp, Artificial Sequence
  Synthetic oligonucleotide; AGG chr2 60499378 60499397 60499381 -
cagaatgtgcaacctttccc

SEQ ID NO: 178859 - DNA, 20 bp, Artificial Sequence
  Synthetic oligonucleotide; GAG chr2 60499376 60499395 60499379 -
gaatgtgcaacctttcccag

SEQ ID NO: 178860 - DNA, 20 bp, Artificial Sequence
  Synthetic oligonucleotide; AAG chr2 60499362 60499381 60499365 -
tcccaggagtattgctcctg

SEQ ID NO: 178861 - DNA, 20 bp, Artificial Sequence
  Synthetic oligonucleotide; AGG chr2 60499361 60499380 60499364 -
cccaggagtattgctcctga

SEQ ID NO: 178862 - DNA, 20 bp, Artificial Sequence
  Synthetic oligonucleotide; AAG chr2 60499355 60499374 60499358 -
agtattgctcctgaaggaat

SEQ ID NO: 178863 - DNA, 20 bp, Artificial Sequence
  Synthetic oligonucleotide; AGG chr2 60499354 60499373 60499357 -
gtattgctcctgaaggaata

SEQ ID NO: 178864 - DNA, 20 bp, Artificial Sequence
  Synthetic oligonucleotide; TGG chr2 60499346 60499365 60499349 -
cctgaaggaataaggcacga

SEQ ID NO: 178865 - DNA, 20 bp, Artificial Sequence
  Synthetic oligonucleotide; GGG chr2 60499345 60499364 60499348 -
ctgaaggaataaggcacgat

SEQ ID NO: 178866 - DNA, 20 bp, Artificial Sequence
  Synthetic oligonucleotide; CAG chr2 60499333 60499352 60499336 -
ggcacgatgggctttgactt

SEQ ID NO: 178867 - DNA, 20 bp, Artificial Sequence
  Synthetic oligonucleotide; CAG chr2 60499326 60499345 60499329 -
tgggctttgacttcagcctc

SEQ ID NO: 178868 - DNA, 20 bp, Artificial Sequence
  Synthetic oligonucleotide; TGG chr2 60499318 60499337 60499321 -
gacttcagcctccagcactg

SEQ ID NO: 178869 - DNA, 20 bp, Artificial Sequence
  Synthetic oligonucleotide; CAG chr2 60499313 60499332 60499316 -
cagcctccagcactgtggcc

SEQ ID NO: 178870 - DNA, 20 bp, Artificial Sequence
  Synthetic oligonucleotide; AAG chr2 60499310 60499329 60499313 -
cctccagcactgtggcccag

SEQ ID NO: 178871 - DNA, 20 bp, Artificial Sequence
  Synthetic oligonucleotide; AGG chr2 60499309 60499328 60499312 -
ctccagcactgtggcccaga

SEQ ID NO: 178872 - DNA, 20 bp, Artificial Sequence
  Synthetic oligonucleotide; GGG chr2 60499308 60499327 60499311 -
tccagcactgtggcccagaa

SEQ ID NO: 178873 - DNA, 20 bp, Artificial Sequence
  Synthetic oligonucleotide; TGG chr2 60499303 60499322 60499306 -
cactgtggcccagaagggta

SEQ ID NO: 178874 - DNA, 20 bp, Artificial Sequence
  Synthetic oligonucleotide; TGG chr2 60499299 60499318 60499302 -
gtggcccagaagggtatggc

SEQ ID NO: 178875 - DNA, 20 bp, Artificial Sequence
  Synthetic oligonucleotide; GGG chr2 60499298 60499317 60499301 -
tggcccagaagggtatggct

SEQ ID NO: 178876 - DNA, 20 bp, Artificial Sequence
  Synthetic oligonucleotide; CAG chr2 60499295 60499314 60499298 -
cccagaagggtatggctggg

SEQ ID NO: 178877 - DNA, 20 bp, Artificial Sequence
  Synthetic oligonucleotide; AGG chr2 60499294 60499313 60499297 -
ccagaagggtatggctgggc

SEQ ID NO: 178878 - DNA, 20 bp, Artificial Sequence
  Synthetic oligonucleotide; GGG chr2 60499293 60499312 60499296 -
cagaagggtatggctgggca

SEQ ID NO: 178879 - DNA, 20 bp, Artificial Sequence
  Synthetic oligonucleotide; GGG chr2 60499292 60499311 60499295 -
agaagggtatggctgggcag

SEQ ID NO: 178880 - DNA, 20 bp, Artificial Sequence
  Synthetic oligonucleotide; CAG chr2 60499276 60499295 60499279 -
gcaggggcgtcacacccctg

SEQ ID NO: 178881 - DNA, 20 bp, Artificial Sequence
  Synthetic oligonucleotide; TGG chr2 60499268 60499287 60499271 -
gtcacacccctgcagctctg

SEQ ID NO: 178882 - DNA, 20 bp, Artificial Sequence
  Synthetic oligonucleotide; GGG chr2 60499267 60499286 60499270 -
tcacacccctgcagctctgt

SEQ ID NO: 178883 - DNA, 20 bp, Artificial Sequence
  Synthetic oligonucleotide; GAG chr2 60499265 60499284 60499268 -
acacccctgcagctctgtgg

SEQ ID NO: 178884 - DNA, 20 bp, Artificial Sequence
  Synthetic oligonucleotide; CGG chr2 60499259 60499278 60499262 -
ctgcagctctgtgggagtga

SEQ ID NO: 178885 - DNA, 20 bp, Artificial Sequence
  Synthetic oligonucleotide; AAG chr2 60499256 60499275 60499259 -
cagctctgtgggagtgacgg

SEQ ID NO: 178886 - DNA, 20 bp, Artificial Sequence
  Synthetic oligonucleotide; AGG chr2 60499255 60499274 60499258 -
agctctgtgggagtgacgga

SEQ ID NO: 178887 - DNA, 20 bp, Artificial Sequence
  Synthetic oligonucleotide; GGG chr2 60499254 60499273 60499257 -
gctctgtgggagtgacggaa

SEQ ID NO: 178888 - DNA, 20 bp, Artificial Sequence
  Synthetic oligonucleotide; TGG chr2 60499229 60499248 60499232 -
ctatccactcgccttgcaca

SEQ ID NO: 178889 - DNA, 20 bp, Artificial Sequence
  Synthetic oligonucleotide; CAG chr2 60499212 60499231 60499215 -
acatggctgtcttgctctac

SEQ ID NO: 178890 - DNA, 20 bp, Artificial Sequence
  Synthetic oligonucleotide; AGG chr2 60499211 60499230 60499214 -
catggctgtcttgctctacc

SEQ ID NO: 178891 - DNA, 20 bp, Artificial Sequence
  Synthetic oligonucleotide; TAG chr2 60499205 60499224 60499208 -
tgtcttgctctaccaggcct

SEQ ID NO: 178892 - DNA, 20 bp, Artificial Sequence
  Synthetic oligonucleotide; AGG chr2 60499204 60499223 60499207 -
gtcttgctctaccaggcctt

SEQ ID NO: 178893 - DNA, 20 bp, Artificial Sequence
  Synthetic oligonucleotide; TGG chr2 60499196 60499215 60499199 -
ctaccaggccttaggttctg

SEQ ID NO: 178894 - DNA, 20 bp, Artificial Sequence
  Synthetic oligonucleotide; CAG chr2 60499192 60499211 60499195 -
caggccttaggttctgtggc

SEQ ID NO: 178895 - DNA, 20 bp, Artificial Sequence
  Synthetic oligonucleotide; CAG chr2 60499178 60499197 60499181 -
tgtggccagatactgttctc

SEQ ID NO: 178896 - DNA, 20 bp, Artificial Sequence
  Synthetic oligonucleotide; TGG chr2 60499170 60499189 60499173 -
gatactgttctccagctctt

SEQ ID NO: 178897 - DNA, 20 bp, Artificial Sequence
  Synthetic oligonucleotide; TGG chr2 60499165 60499184 60499168 -
tgttctccagctctttggct

SEQ ID NO: 178898 - DNA, 20 bp, Artificial Sequence
  Synthetic oligonucleotide; GGG chr2 60499164 60499183 60499167 -
gttctccagctctttggctt

SEQ ID NO: 178899 - DNA, 20 bp, Artificial Sequence
  Synthetic oligonucleotide; GAG chr2 60499157 60499176 60499160 -
agctctttggcttgggcccc

SEQ ID NO: 178900 - DNA, 20 bp, Artificial Sequence
  Synthetic oligonucleotide; CAG chr2 60499152 60499171 60499155 -
tttggcttgggccccgagac

SEQ ID NO: 178901 - DNA, 20 bp, Artificial Sequence
  Synthetic oligonucleotide; GAG chr2 60499150 60499169 60499153 -
tggcttgggccccgagacca

SEQ ID NO: 178902 - DNA, 20 bp, Artificial Sequence
  Synthetic oligonucleotide; AAG chr2 60499147 60499166 60499150 -
cttgggccccgagaccagag

SEQ ID NO: 178903 - DNA, 20 bp, Artificial Sequence
  Synthetic oligonucleotide; TGG chr2 60499140 60499159 60499143 -
cccgagaccagagaagataa

SEQ ID NO: 178904 - DNA, 20 bp, Artificial Sequence
  Synthetic oligonucleotide; CAG chr2 60499137 60499156 60499140 -
gagaccagagaagataatgg

SEQ ID NO: 178905 - DNA, 20 bp, Artificial Sequence
  Synthetic oligonucleotide; CAG chr2 60499132 60499151 60499135 -
cagagaagataatggcagcc

SEQ ID NO: 178906 - DNA, 20 bp, Artificial Sequence
  Synthetic oligonucleotide; TGG chr2 60499117 60499136 60499120 -
cagcccagaaacctgaatac

SEQ ID NO: 178907 - DNA, 20 bp, Artificial Sequence
  Synthetic oligonucleotide; GGG chr2 60499116 60499135 60499119 -
agcccagaaacctgaatact

SEQ ID NO: 178908 - DNA, 20 bp, Artificial Sequence
  Synthetic oligonucleotide; GGG chr2 60499115 60499134 60499118 -
gcccagaaacctgaatactg

SEQ ID NO: 178909 - DNA, 20 bp, Artificial Sequence
  Synthetic oligonucleotide; TAG chr2 60499103 60499122 60499106 -
gaatactggggaacacattg

SEQ ID NO: 178910 - DNA, 20 bp, Artificial Sequence
  Synthetic oligonucleotide; AGG chr2 60499102 60499121 60499105 -
aatactggggaacacattgt

SEQ ID NO: 178911 - DNA, 20 bp, Artificial Sequence
  Synthetic oligonucleotide; GGG chr2 60499101 60499120 60499104 -
atactggggaacacattgta

SEQ ID NO: 178912 - DNA, 20 bp, Artificial Sequence
  Synthetic oligonucleotide; CAG chr2 60499090 60499109 60499093 -
cacattgtagggtgatctcc

SEQ ID NO: 178913 - DNA, 20 bp, Artificial Sequence
  Synthetic oligonucleotide; AAG chr2 60499085 60499104 60499088 -
tgtagggtgatctcccagaa

SEQ ID NO: 178914 - DNA, 20 bp, Artificial Sequence
  Synthetic oligonucleotide; CAG chr2 60499081 60499100 60499084 -
gggtgatctcccagaaaagc

SEQ ID NO: 178915 - DNA, 20 bp, Artificial Sequence
  Synthetic oligonucleotide; GAG chr2 60499077 60499096 60499080 -
gatctcccagaaaagccagc

SEQ ID NO: 178916 - DNA, 20 bp, Artificial Sequence
  Synthetic oligonucleotide; TGG chr2 60499071 60499090 60499074 -
ccagaaaagccagcgagaaa

SEQ ID NO: 178917 - DNA, 20 bp, Artificial Sequence
  Synthetic oligonucleotide; TAG chr2 60499064 60499083 60499067 -
agccagcgagaaatggactg

SEQ ID NO: 178918 - DNA, 20 bp, Artificial Sequence
  Synthetic oligonucleotide; TAG chr2 60499058 60499077 60499061 -
cgagaaatggactgtagctg

SEQ ID NO: 178919 - DNA, 20 bp, Artificial Sequence
  Synthetic oligonucleotide; TGG chr2 60499043 60499062 60499046 -
agctgtagcattcttccctt

SEQ ID NO: 178920 - DNA, 20 bp, Artificial Sequence
  Synthetic oligonucleotide; TGG chr2 60499031 60499050 60499034 -
cttccctttggatgcctgtg

SEQ ID NO: 178921 - DNA, 20 bp, Artificial Sequence
  Synthetic oligonucleotide; GGG chr2 60499030 60499049 60499033 -
ttccctttggatgcctgtgt

SEQ ID NO: 178922 - DNA, 20 bp, Artificial Sequence
  Synthetic oligonucleotide; GGG chr2 60499029 60499048 60499032 -
tccctttggatgcctgtgtg

SEQ ID NO: 178923 - DNA, 20 bp, Artificial Sequence
  Synthetic oligonucleotide; CAG chr2 60499025 60499044 60499028 -
tttggatgcctgtgtgggga

SEQ ID NO: 178924 - DNA, 20 bp, Artificial Sequence
  Synthetic oligonucleotide; CAG chr2 60499019 60499038 60499022 -
tgcctgtgtggggacagaat

SEQ ID NO: 178925 - DNA, 20 bp, Artificial Sequence
  Synthetic oligonucleotide; TGG chr2 60499016 60499035 60499019 -
ctgtgtggggacagaatcag

SEQ ID NO: 178926 - DNA, 20 bp, Artificial Sequence
  Synthetic oligonucleotide; TGG chr2 60499011 60499030 60499014 -
tggggacagaatcagtggaa

SEQ ID NO: 178927 - DNA, 20 bp, Artificial Sequence
  Synthetic oligonucleotide; AAG chr2 60499002 60499021 60499005 -
aatcagtggaatggaaaatg

SEQ ID NO: 178928 - DNA, 20 bp, Artificial Sequence
  Synthetic oligonucleotide; AAG chr2 60498999 60499018 60499002 -
cagtggaatggaaaatgaag

SEQ ID NO: 178929 - DNA, 20 bp, Artificial Sequence
  Synthetic oligonucleotide; TGG chr2 60498990 60499009 60498993 -
ggaaaatgaagaagaaacac

SEQ ID NO: 178930 - DNA, 20 bp, Artificial Sequence
  Synthetic oligonucleotide; TAG chr2 60498928 60498947 60498931 -
ccacctgcttcctgttctat

SEQ ID NO: 178931 - DNA, 20 bp, Artificial Sequence
  Synthetic oligonucleotide; TAG chr2 60498918 60498937 60498921 -
cctgttctattagacaaacg

SEQ ID NO: 178932 - DNA, 20 bp, Artificial Sequence
  Synthetic oligonucleotide; TGG chr2 60498911 60498930 60498914 -
tattagacaaacgtagtttc

SEQ ID NO: 178933 - DNA, 20 bp, Artificial Sequence
  Synthetic oligonucleotide; GAG chr2 60498906 60498925 60498909 -
gacaaacgtagtttctggat

SEQ ID NO: 178934 - DNA, 20 bp, Artificial Sequence
  Synthetic oligonucleotide; TGG chr2 60498902 60498921 60498905 -
aacgtagtttctggatgagt

SEQ ID NO: 178935 - DNA, 20 bp, Artificial Sequence
  Synthetic oligonucleotide; CAG chr2 60498898 60498917 60498901 -
tagtttctggatgagttgga

SEQ ID NO: 178936 - DNA, 20 bp, Artificial Sequence
  Synthetic oligonucleotide; GAG chr2 60498889 60498908 60498892 -
gatgagttggacagtcatct

SEQ ID NO: 178937 - DNA, 20 bp, Artificial Sequence
  Synthetic oligonucleotide; AAG chr2 60498879 60498898 60498882 -
acagtcatctgagtttgatc

SEQ ID NO: 178938 - DNA, 20 bp, Artificial Sequence
  Synthetic oligonucleotide; CAG chr2 60498871 60498890 60498874 -
ctgagtttgatcaagattta

SEQ ID NO: 178939 - DNA, 20 bp, Artificial Sequence
  Synthetic oligonucleotide; AGG chr2 60498870 60498889 60498873 -
tgagtttgatcaagatttac

SEQ ID NO: 178940 - DNA, 20 bp, Artificial Sequence
  Synthetic oligonucleotide; AAG chr2 60498849 60498868 60498852 -
ggtaattcaaatgtatgtat

SEQ ID NO: 178941 - DNA, 20 bp, Artificial Sequence
  Synthetic oligonucleotide; AGG chr2 60498848 60498867 60498851 -
gtaattcaaatgtatgtata

SEQ ID NO: 178942 - DNA, 20 bp, Artificial Sequence
  Synthetic oligonucleotide; TAG chr2 60498834 60498853 60498837 -
tgtataaggtacatacatat

SEQ ID NO: 178943 - DNA, 20 bp, Artificial Sequence
  Synthetic oligonucleotide; CAG chr2 60498822 60498841 60498825 -
atacatattagtacatccat

SEQ ID NO: 178944 - DNA, 20 bp, Artificial Sequence
  Synthetic oligonucleotide; GAG chr2 60498820 60498839 60498823 -
acatattagtacatccatca

SEQ ID NO: 178945 - DNA, 20 bp, Artificial Sequence
  Synthetic oligonucleotide; GAG chr2 60498818 60498837 60498821 -
atattagtacatccatcaga

SEQ ID NO: 178946 - DNA, 20 bp, Artificial Sequence
  Synthetic oligonucleotide; AGG chr2 60498817 60498836 60498820 -
tattagtacatccatcagag

SEQ ID NO: 178947 - DNA, 20 bp, Artificial Sequence
  Synthetic oligonucleotide; AAG chr2 60498807 60498826 60498810 -
tccatcagagaggcttcctt

SEQ ID NO: 178948 - DNA, 20 bp, Artificial Sequence
  Synthetic oligonucleotide; AAG chr2 60498800 60498819 60498803 -
gagaggcttccttaagccac

SEQ ID NO: 178949 - DNA, 20 bp, Artificial Sequence
  Synthetic oligonucleotide; TAG chr2 60498793 60498812 60498796 -
ttccttaagccacaagtctc

SEQ ID NO: 178950 - DNA, 20 bp, Artificial Sequence
  Synthetic oligonucleotide; CAG chr2 60498785 60498804 60498788 -
gccacaagtctctagctcct

SEQ ID NO: 178951 - DNA, 20 bp, Artificial Sequence
  Synthetic oligonucleotide; GAG chr2 60498783 60498802 60498786 -
cacaagtctctagctcctca

SEQ ID NO: 178952 - DNA, 20 bp, Artificial Sequence
  Synthetic oligonucleotide; TGG chr2 60498777 60498796 60498780 -
tctctagctcctcagagaac

SEQ ID NO: 178953 - DNA, 20 bp, Artificial Sequence
  Synthetic oligonucleotide; CAG chr2 60498774 60498793 60498777 -
ctagctcctcagagaactgg

SEQ ID NO: 178954 - DNA, 20 bp, Artificial Sequence
  Synthetic oligonucleotide; TGG chr2 60498769 60498788 60498772 -
tcctcagagaactggcagtc

SEQ ID NO: 178955 - DNA, 20 bp, Artificial Sequence
  Synthetic oligonucleotide; TGG chr2 60498765 60498784 60498768 -
cagagaactggcagtctggc

SEQ ID NO: 178956 - DNA, 20 bp, Artificial Sequence
  Synthetic oligonucleotide; GGG chr2 60498764 60498783 60498767 -
agagaactggcagtctggct

SEQ ID NO: 178957 - DNA, 20 bp, Artificial Sequence
  Synthetic oligonucleotide; TGG chr2 60498749 60498768 60498752 -
tggctgggtctgtacgaact

SEQ ID NO: 178958 - DNA, 20 bp, Artificial Sequence
  Synthetic oligonucleotide; TAG chr2 60498741 60498760 60498744 -
tctgtacgaacttggaccta

SEQ ID NO: 178959 - DNA, 20 bp, Artificial Sequence
  Synthetic oligonucleotide; TGG chr2 60498728 60498747 60498731 -
ggacctatagatgacctcac

SEQ ID NO: 178960 - DNA, 20 bp, Artificial Sequence
  Synthetic oligonucleotide; GAG chr2 60498671 60498690 60498674 -
tctctttactgatcttatgt

SEQ ID NO: 178961 - DNA, 20 bp, Artificial Sequence
  Synthetic oligonucleotide; TAG chr2 60498668 60498687 60498671 -
ctttactgatcttatgtgag

SEQ ID NO: 178962 - DNA, 20 bp, Artificial Sequence
  Synthetic oligonucleotide; AGG chr2 60498667 60498686 60498670 -
tttactgatcttatgtgagt

SEQ ID NO: 178963 - DNA, 20 bp, Artificial Sequence
  Synthetic oligonucleotide; TAG chr2 60498664 60498683 60498667 -
actgatcttatgtgagtagg

SEQ ID NO: 178964 - DNA, 20 bp, Artificial Sequence
  Synthetic oligonucleotide; GAG chr2 60498662 60498681 60498665 -
tgatcttatgtgagtaggta

SEQ ID NO: 178965 - DNA, 20 bp, Artificial Sequence
  Synthetic oligonucleotide; AGG chr2 60498661 60498680 60498664 -
gatcttatgtgagtaggtag

SEQ ID NO: 178966 - DNA, 20 bp, Artificial Sequence
  Synthetic oligonucleotide; GGG chr2 60498660 60498679 60498663 -
atcttatgtgagtaggtaga

SEQ ID NO: 178967 - DNA, 20 bp, Artificial Sequence
  Synthetic oligonucleotide; GGG chr2 60498659 60498678 60498662 -
tcttatgtgagtaggtagag

SEQ ID NO: 178968 - DNA, 20 bp, Artificial Sequence
  Synthetic oligonucleotide; CAG chr2 60498655 60498674 60498658 -
atgtgagtaggtagaggggt

SEQ ID NO: 178969 - DNA, 20 bp, Artificial Sequence
  Synthetic oligonucleotide; CAG chr2 60498640 60498659 60498643 -
ggggtcagatcacctctgct

SEQ ID NO: 178970 - DNA, 20 bp, Artificial Sequence
  Synthetic oligonucleotide; CAG chr2 60498630 60498649 60498633 -
cacctctgctcagctctgcc

SEQ ID NO: 178971 - DNA, 20 bp, Artificial Sequence
  Synthetic oligonucleotide; AAG chr2 60498621 60498640 60498624 -
tcagctctgcccagcacact

SEQ ID NO: 178972 - DNA, 20 bp, Artificial Sequence
  Synthetic oligonucleotide; CAG chr2 60498586 60498605 60498589 -
taaaatttgaaaaacaaatg

SEQ ID NO: 178973 - DNA, 20 bp, Artificial Sequence
  Synthetic oligonucleotide; AGG chr2 60498585 60498604 60498588 -
aaaatttgaaaaacaaatgc

SEQ ID NO: 178974 - DNA, 20 bp, Artificial Sequence
  Synthetic oligonucleotide; CAG chr2 60498579 60498598 60498582 -
tgaaaaacaaatgcaggtgc

SEQ ID NO: 178975 - DNA, 20 bp, Artificial Sequence
  Synthetic oligonucleotide; GAG chr2 60498577 60498596 60498580 -
aaaaacaaatgcaggtgcca

SEQ ID NO: 178976 - DNA, 20 bp, Artificial Sequence
  Synthetic oligonucleotide; AGG chr2 60498576 60498595 60498579 -
aaaacaaatgcaggtgccag

SEQ ID NO: 178977 - DNA, 20 bp, Artificial Sequence
  Synthetic oligonucleotide; TGG chr2 60498573 60498592 60498576 -
acaaatgcaggtgccagagg

SEQ ID NO: 178978 - DNA, 20 bp, Artificial Sequence
  Synthetic oligonucleotide; CAG chr2 60498553 60498572 60498556 -
tggctaaataatgaatgtcc

SEQ ID NO: 178979 - DNA, 20 bp, Artificial Sequence
  Synthetic oligonucleotide; AGG chr2 60498552 60498571 60498555 -
ggctaaataatgaatgtccc

SEQ ID NO: 178980 - DNA, 20 bp, Artificial Sequence
  Synthetic oligonucleotide; TAG chr2 60498542 60498561 60498545 -
tgaatgtcccaggccaattc

SEQ ID NO: 178981 - DNA, 20 bp, Artificial Sequence
  Synthetic oligonucleotide; AGG chr2 60498541 60498560 60498544 -
gaatgtcccaggccaattct

SEQ ID NO: 178982 - DNA, 20 bp, Artificial Sequence
  Synthetic oligonucleotide; AAG chr2 60498538 60498557 60498541 -
tgtcccaggccaattctagg

SEQ ID NO: 178983 - DNA, 20 bp, Artificial Sequence
  Synthetic oligonucleotide; AGG chr2 60498537 60498556 60498540 -
gtcccaggccaattctagga

SEQ ID NO: 178984 - DNA, 20 bp, Artificial Sequence
  Synthetic oligonucleotide; GGG chr2 60498536 60498555 60498539 -
tcccaggccaattctaggaa

SEQ ID NO: 178985 - DNA, 20 bp, Artificial Sequence
  Synthetic oligonucleotide; AAG chr2 60498533 60498552 60498536 -
caggccaattctaggaaggg

SEQ ID NO: 178986 - DNA, 20 bp, Artificial Sequence
  Synthetic oligonucleotide; TGG chr2 60498530 60498549 60498533 -
gccaattctaggaagggaag

SEQ ID NO: 178987 - DNA, 20 bp, Artificial Sequence
  Synthetic oligonucleotide; GGG chr2 60498529 60498548 60498532 -
ccaattctaggaagggaagt

SEQ ID NO: 178988 - DNA, 20 bp, Artificial Sequence
  Synthetic oligonucleotide; TGG chr2 60498524 60498543 60498527 -
tctaggaagggaagtgggta

SEQ ID NO: 178989 - DNA, 20 bp, Artificial Sequence
  Synthetic oligonucleotide; GGG chr2 60498523 60498542 60498526 -
ctaggaagggaagtgggtat

SEQ ID NO: 178990 - DNA, 20 bp, Artificial Sequence
  Synthetic oligonucleotide; GGG chr2 60498522 60498541 60498525 -
taggaagggaagtgggtatg

SEQ ID NO: 178991 - DNA, 20 bp, Artificial Sequence
  Synthetic oligonucleotide; CAG chr2 60498519 60498538 60498522 -
gaagggaagtgggtatgggg

SEQ ID NO: 178992 - DNA, 20 bp, Artificial Sequence
  Synthetic oligonucleotide; TGG chr2 60498503 60498522 60498506 -
ggggcagcccattgccttcc

SEQ ID NO: 178993 - DNA, 20 bp, Artificial Sequence
  Synthetic oligonucleotide; CAG chr2 60498497 60498516 60498500 -
gcccattgccttcctggtac

SEQ ID NO: 178994 - DNA, 20 bp, Artificial Sequence
  Synthetic oligonucleotide; AGG chr2 60498496 60498515 60498499 -
cccattgccttcctggtacc

SEQ ID NO: 178995 - DNA, 20 bp, Artificial Sequence
  Synthetic oligonucleotide; TGG chr2 60498480 60498499 60498483 -
taccaggatgatgcaatgct

SEQ ID NO: 178996 - DNA, 20 bp, Artificial Sequence
  Synthetic oligonucleotide; GAG chr2 60498478 60498497 60498481 -
ccaggatgatgcaatgcttg

SEQ ID NO: 178997 - DNA, 20 bp, Artificial Sequence
  Synthetic oligonucleotide; AGG chr2 60498477 60498496 60498480 -
caggatgatgcaatgcttgg

SEQ ID NO: 178998 - DNA, 20 bp, Artificial Sequence
  Synthetic oligonucleotide; GAG chr2 60498470 60498489 60498473 -
atgcaatgcttggaggctgt

SEQ ID NO: 178999 - DNA, 20 bp, Artificial Sequence
  Synthetic oligonucleotide; CAG chr2 60498454 60498473 60498457 -
ctgtgagctccccaccttct

SEQ ID NO: 179000 - DNA, 20 bp, Artificial Sequence
  Synthetic oligonucleotide; AGG chr2 60498453 60498472 60498456 -
tgtgagctccccaccttctc

SEQ ID NO: 179001 - DNA, 20 bp, Artificial Sequence
  Synthetic oligonucleotide; GGG chr2 60498452 60498471 60498455 -
gtgagctccccaccttctca

SEQ ID NO: 179002 - DNA, 20 bp, Artificial Sequence
  Synthetic oligonucleotide; TGG chr2 60498432 60498451 60498435 -
gggcacaccctgtgatcttg

SEQ ID NO: 179003 - DNA, 20 bp, Artificial Sequence
  Synthetic oligonucleotide; GGG chr2 60498431 60498450 60498434 -
ggcacaccctgtgatcttgt

SEQ ID NO: 179004 - DNA, 20 bp, Artificial Sequence
  Synthetic oligonucleotide; CAG chr2 60498417 60498436 60498420 -
tcttgtgggacccctctgtc

SEQ ID NO: 179005 - DNA, 20 bp, Artificial Sequence
  Synthetic oligonucleotide; CAG chr2 60498412 60498431 60498415 -
tgggacccctctgtccagcc

SEQ ID NO: 179006 - DNA, 20 bp, Artificial Sequence
  Synthetic oligonucleotide; TGG chr2 60498407 60498426 60498410 -
cccctctgtccagcccagcc

SEQ ID NO: 179007 - DNA, 20 bp, Artificial Sequence
  Synthetic oligonucleotide; GGG chr2 60498406 60498425 60498409 -
ccctctgtccagcccagcct

SEQ ID NO: 179008 - DNA, 20 bp, Artificial Sequence
  Synthetic oligonucleotide; TGG chr2 60498386 60498405 60498389 -
gggtgtgcatcttgtgtgct

SEQ ID NO: 179009 - DNA, 20 bp, Artificial Sequence
  Synthetic oligonucleotide; CGG chr2 60498382 60498401 60498385 -
gtgcatcttgtgtgcttggt

SEQ ID NO: 179010 - DNA, 20 bp, Artificial Sequence
  Synthetic oligonucleotide; TAG chr2 60498373 60498392 60498376 -
gtgtgcttggtcggcactga

SEQ ID NO: 179011 - DNA, 20 bp, Artificial Sequence
  Synthetic oligonucleotide; AGG chr2 60498372 60498391 60498375 -
tgtgcttggtcggcactgat

SEQ ID NO: 179012 - DNA, 20 bp, Artificial Sequence
  Synthetic oligonucleotide; GGG chr2 60498371 60498390 60498374 -
gtgcttggtcggcactgata

SEQ ID NO: 179013 - DNA, 20 bp, Artificial Sequence
  Synthetic oligonucleotide; GGG chr2 60498370 60498389 60498373 -
tgcttggtcggcactgatag

SEQ ID NO: 179014 - DNA, 20 bp, Artificial Sequence
  Synthetic oligonucleotide; CGG chr2 60498364 60498383 60498367 -
gtcggcactgataggggtcg

SEQ ID NO: 179015 - DNA, 20 bp, Artificial Sequence
  Synthetic oligonucleotide; TAG chr2 60498361 60498380 60498364 -
ggcactgataggggtcgcgg

SEQ ID NO: 179016 - DNA, 20 bp, Artificial Sequence
  Synthetic oligonucleotide; AGG chr2 60498360 60498379 60498363 -
gcactgataggggtcgcggt

SEQ ID NO: 179017 - DNA, 20 bp, Artificial Sequence
  Synthetic oligonucleotide; GGG chr2 60498359 60498378 60498362 -
cactgataggggtcgcggta

SEQ ID NO: 179018 - DNA, 20 bp, Artificial Sequence
  Synthetic oligonucleotide; GAG chr2 60498357 60498376 60498360 -
ctgataggggtcgcggtagg

SEQ ID NO: 179019 - DNA, 20 bp, Artificial Sequence
  Synthetic oligonucleotide; CGG chr2 60498350 60498369 60498353 -
gggtcgcggtagggagttgt

SEQ ID NO: 179020 - DNA, 20 bp, Artificial Sequence
  Synthetic oligonucleotide; GAG chr2 60498325 60498344 60498328 -
cacactgctgcatgtcctgt

SEQ ID NO: 179021 - DNA, 20 bp, Artificial Sequence
  Synthetic oligonucleotide; CGG chr2 60498322 60498341 60498325 -
actgctgcatgtcctgtgag

SEQ ID NO: 179022 - DNA, 20 bp, Artificial Sequence
  Synthetic oligonucleotide; AAG chr2 60498314 60498333 60498317 -
atgtcctgtgagcggtcccc

SEQ ID NO: 179023 - DNA, 20 bp, Artificial Sequence
  Synthetic oligonucleotide; AGG chr2 60498313 60498332 60498316 -
tgtcctgtgagcggtcccca

SEQ ID NO: 179024 - DNA, 20 bp, Artificial Sequence
  Synthetic oligonucleotide; CAG chr2 60498303 60498322 60498306 -
gcggtccccaaggctgtgcc

SEQ ID NO: 179025 - DNA, 20 bp, Artificial Sequence
  Synthetic oligonucleotide; CAG chr2 60498296 60498315 60498299 -
ccaaggctgtgcccagcctt

SEQ ID NO: 179026 - DNA, 20 bp, Artificial Sequence
  Synthetic oligonucleotide; CAG chr2 60498289 60498308 60498292 -
tgtgcccagccttcagtgtc

SEQ ID NO: 179027 - DNA, 20 bp, Artificial Sequence
  Synthetic oligonucleotide; AGG chr2 60498288 60498307 60498291 -
gtgcccagccttcagtgtcc

SEQ ID NO: 179028 - DNA, 20 bp, Artificial Sequence
  Synthetic oligonucleotide; GGG chr2 60498287 60498306 60498290 -
tgcccagccttcagtgtcca

SEQ ID NO: 179029 - DNA, 20 bp, Artificial Sequence
  Synthetic oligonucleotide; CAG chr2 60498274 60498293 60498277 -
gtgtccagggcctcttctga

SEQ ID NO: 179030 - DNA, 20 bp, Artificial Sequence
  Synthetic oligonucleotide; AGG chr2 60498273 60498292 60498276 -
tgtccagggcctcttctgac

SEQ ID NO: 179031 - DNA, 20 bp, Artificial Sequence
  Synthetic oligonucleotide; TGG chr2 60498264 60498283 60498267 -
cctcttctgacaggccctgc

SEQ ID NO: 179032 - DNA, 20 bp, Artificial Sequence
  Synthetic oligonucleotide; TGG chr2 60498251 60498270 60498254 -
gccctgctggttatcactgt

SEQ ID NO: 179033 - DNA, 20 bp, Artificial Sequence
  Synthetic oligonucleotide; CAG chr2 60498220 60498239 60498223 -
ccacgcaccacttctgtgcc

SEQ ID NO: 179034 - DNA, 20 bp, Artificial Sequence
  Synthetic oligonucleotide; AGG chr2 60498219 60498238 60498222 -
cacgcaccacttctgtgccc

SEQ ID NO: 179035 - DNA, 20 bp, Artificial Sequence
  Synthetic oligonucleotide; GGG chr2 60498218 60498237 60498221 -
acgcaccacttctgtgccca

SEQ ID NO: 179036 - DNA, 20 bp, Artificial Sequence
  Synthetic oligonucleotide; TGG chr2 60498211 60498230 60498214 -
acttctgtgcccagggctgc

SEQ ID NO: 179037 - DNA, 20 bp, Artificial Sequence
  Synthetic oligonucleotide; GGG chr2 60498210 60498229 60498213 -
cttctgtgcccagggctgct

SEQ ID NO: 179038 - DNA, 20 bp, Artificial Sequence
  Synthetic oligonucleotide; AAG chr2 60498200 60498219 60498203 -
cagggctgctgggtcacctt

SEQ ID NO: 179039 - DNA, 20 bp, Artificial Sequence
  Synthetic oligonucleotide; AGG chr2 60498199 60498218 60498202 -
agggctgctgggtcacctta

SEQ ID NO: 179040 - DNA, 20 bp, Artificial Sequence
  Synthetic oligonucleotide; GAG chr2 60498197 60498216 60498200 -
ggctgctgggtcaccttaag

SEQ ID NO: 179041 - DNA, 20 bp, Artificial Sequence
  Synthetic oligonucleotide; TAG chr2 60498177 60498196 60498180 -
gagccacacacccgtctaca

SEQ ID NO: 179042 - DNA, 20 bp, Artificial Sequence
  Synthetic oligonucleotide; GAG chr2 60498175 60498194 60498178 -
gccacacacccgtctacata

SEQ ID NO: 179043 - DNA, 20 bp, Artificial Sequence
  Synthetic oligonucleotide; AGG chr2 60498174 60498193 60498177 -
ccacacacccgtctacatag

SEQ ID NO: 179044 - DNA, 20 bp, Artificial Sequence
  Synthetic oligonucleotide; TGG chr2 60498160 60498179 60498163 -
acatagaggcccttcctgct

SEQ ID NO: 179045 - DNA, 20 bp, Artificial Sequence
  Synthetic oligonucleotide; GGG chr2 60498159 60498178 60498162 -
catagaggcccttcctgctt

SEQ ID NO: 179046 - DNA, 20 bp, Artificial Sequence
  Synthetic oligonucleotide; GGG chr2 60498158 60498177 60498161 -
atagaggcccttcctgcttg

SEQ ID NO: 179047 - DNA, 20 bp, Artificial Sequence
  Synthetic oligonucleotide; CAG chr2 60498148 60498167 60498151 -
ttcctgcttggggtctgacc

SEQ ID NO: 179048 - DNA, 20 bp, Artificial Sequence
  Synthetic oligonucleotide; CAG chr2 60498119 60498138 60498122 -
cctccacacctccattctcc

SEQ ID NO: 179049 - DNA, 20 bp, Artificial Sequence
  Synthetic oligonucleotide; CAG chr2 60498101 60498120 60498104 -
cccagacttttgactcaccc

SEQ ID NO: 179050 - DNA, 20 bp, Artificial Sequence
  Synthetic oligonucleotide; AAG chr2 60498091 60498110 60498094 -
tgactcaccccagccctgct

SEQ ID NO: 179051 - DNA, 20 bp, Artificial Sequence
  Synthetic oligonucleotide; GAG chr2 60498089 60498108 60498092 -
actcaccccagccctgctaa

SEQ ID NO: 179052 - DNA, 20 bp, Artificial Sequence
  Synthetic oligonucleotide; AAG chr2 60498071 60498090 60498074 -
aagagtgatgtcctccccca

SEQ ID NO: 179053 - DNA, 20 bp, Artificial Sequence
  Synthetic oligonucleotide; GAG chr2 60498069 60498088 60498072 -
gagtgatgtcctcccccaaa

SEQ ID NO: 179054 - DNA, 20 bp, Artificial Sequence
  Synthetic oligonucleotide; AAG chr2 60498066 60498085 60498069 -
tgatgtcctcccccaaagag

SEQ ID NO: 179055 - DNA, 20 bp, Artificial Sequence
  Synthetic oligonucleotide; GAG chr2 60498051 60498070 60498054 -
aagagaagacccctgctctt

SEQ ID NO: 179056 - DNA, 20 bp, Artificial Sequence
  Synthetic oligonucleotide; AGG chr2 60498050 60498069 60498053 -
agagaagacccctgctcttg

SEQ ID NO: 179057 - DNA, 20 bp, Artificial Sequence
  Synthetic oligonucleotide; GGG chr2 60498049 60498068 60498052 -
gagaagacccctgctcttga

SEQ ID NO: 179058 - DNA, 20 bp, Artificial Sequence
  Synthetic oligonucleotide; CAG chr2 60498041 60498060 60498044 -
ccctgctcttgagggtctgc

SEQ ID NO: 179059 - DNA, 20 bp, Artificial Sequence
  Synthetic oligonucleotide; AGG chr2 60498040 60498059 60498043 -
cctgctcttgagggtctgcc

SEQ ID NO: 179060 - DNA, 20 bp, Artificial Sequence
  Synthetic oligonucleotide; TGG chr2 60498037 60498056 60498040 -
gctcttgagggtctgccagg

SEQ ID NO: 179061 - DNA, 20 bp, Artificial Sequence
  Synthetic oligonucleotide; GGG chr2 60498036 60498055 60498039 -
ctcttgagggtctgccaggt

SEQ ID NO: 179062 - DNA, 20 bp, Artificial Sequence
  Synthetic oligonucleotide; TGG chr2 60498012 60498031 60498015 -
ccctcatctccccacctcca

SEQ ID NO: 179063 - DNA, 20 bp, Artificial Sequence
  Synthetic oligonucleotide; GGG chr2 60498011 60498030 60498014 -
cctcatctccccacctccat

SEQ ID NO: 179064 - DNA, 20 bp, Artificial Sequence
  Synthetic oligonucleotide; TGG chr2 60498003 60498022 60498006 -
ccccacctccatgggcctct

SEQ ID NO: 179065 - DNA, 20 bp, Artificial Sequence
  Synthetic oligonucleotide; TAG chr2 60497990 60498009 60497993 -
ggcctcttggattttgtgca

SEQ ID NO: 179066 - DNA, 20 bp, Artificial Sequence
  Synthetic oligonucleotide; TGG chr2 60497961 60497980 60497964 -
ctgcaacaccctgaccttta

SEQ ID NO: 179067 - DNA, 20 bp, Artificial Sequence
  Synthetic oligonucleotide; GGG chr2 60497960 60497979 60497963 -
tgcaacaccctgacctttat

SEQ ID NO: 179068 - DNA, 20 bp, Artificial Sequence
  Synthetic oligonucleotide; GGG chr2 60497959 60497978 60497962 -
gcaacaccctgacctttatg

SEQ ID NO: 179069 - DNA, 20 bp, Artificial Sequence
  Synthetic oligonucleotide; CGG chr2 60497949 60497968 60497952 -
gacctttatggggtcatcct

SEQ ID NO: 179070 - DNA, 20 bp, Artificial Sequence
  Synthetic oligonucleotide; AAG chr2 60497940 60497959 60497943 -
ggggtcatcctcggccaatg

SEQ ID NO: 179071 - DNA, 20 bp, Artificial Sequence
  Synthetic oligonucleotide; CGG chr2 60497937 60497956 60497940 -
gtcatcctcggccaatgaag

SEQ ID NO: 179072 - DNA, 20 bp, Artificial Sequence
  Synthetic oligonucleotide; TGG chr2 60497934 60497953 60497937 -
atcctcggccaatgaagcgg

SEQ ID NO: 179073 - DNA, 20 bp, Artificial Sequence
  Synthetic oligonucleotide; GGG chr2 60497933 60497952 60497936 -
tcctcggccaatgaagcggt

SEQ ID NO: 179074 - DNA, 20 bp, Artificial Sequence
  Synthetic oligonucleotide; CAG chr2 60497928 60497947 60497931 -
ggccaatgaagcggtgggtc

SEQ ID NO: 179075 - DNA, 20 bp, Artificial Sequence
  Synthetic oligonucleotide; AGG chr2 60497927 60497946 60497930 -
gccaatgaagcggtgggtcc

SEQ ID NO: 179076 - DNA, 20 bp, Artificial Sequence
  Synthetic oligonucleotide; TGG chr2 60497907 60497926 60497910 -
aggctcccccttctatcacc

SEQ ID NO: 179077 - DNA, 20 bp, Artificial Sequence
  Synthetic oligonucleotide; CAG chr2 60497889 60497908 60497892 -
cctggctcacttccatcctg

SEQ ID NO: 179078 - DNA, 20 bp, Artificial Sequence
  Synthetic oligonucleotide; GAG chr2 60497887 60497906 60497890 -
tggctcacttccatcctgca

SEQ ID NO: 179079 - DNA, 20 bp, Artificial Sequence
  Synthetic oligonucleotide; AGG chr2 60497886 60497905 60497889 -
ggctcacttccatcctgcag

SEQ ID NO: 179080 - DNA, 20 bp, Artificial Sequence
  Synthetic oligonucleotide; AAG chr2 60497883 60497902 60497886 -
tcacttccatcctgcagagg

SEQ ID NO: 179081 - DNA, 20 bp, Artificial Sequence
  Synthetic oligonucleotide; TGG chr2 60497878 60497897 60497881 -
tccatcctgcagaggaagct

SEQ ID NO: 179082 - DNA, 20 bp, Artificial Sequence
  Synthetic oligonucleotide; TAG chr2 60497868 60497887 60497871 -
agaggaagcttggtttcatt

SEQ ID NO: 179083 - DNA, 20 bp, Artificial Sequence
  Synthetic oligonucleotide; AGG chr2 60497867 60497886 60497870 -
gaggaagcttggtttcattt

SEQ ID NO: 179084 - DNA, 20 bp, Artificial Sequence
  Synthetic oligonucleotide; CAG chr2 60497856 60497875 60497859 -
gtttcatttaggacaatgtg

SEQ ID NO: 179085 - DNA, 20 bp, Artificial Sequence
  Synthetic oligonucleotide; AGG chr2 60497855 60497874 60497858 -
tttcatttaggacaatgtgc

SEQ ID NO: 179086 - DNA, 20 bp, Artificial Sequence
  Synthetic oligonucleotide; TGG chr2 60497830 60497849 60497833 -
ccttttgatcatttctctac

SEQ ID NO: 179087 - DNA, 20 bp, Artificial Sequence
  Synthetic oligonucleotide; CAG chr2 60497822 60497841 60497825 -
tcatttctctactggatcat

SEQ ID NO: 179088 - DNA, 20 bp, Artificial Sequence
  Synthetic oligonucleotide; AAG chr2 60497817 60497836 60497820 -
tctctactggatcatcagca

SEQ ID NO: 179089 - DNA, 20 bp, Artificial Sequence
  Synthetic oligonucleotide; AGG chr2 60497816 60497835 60497819 -
ctctactggatcatcagcaa

SEQ ID NO: 179090 - DNA, 20 bp, Artificial Sequence
  Synthetic oligonucleotide; GGG chr2 60497815 60497834 60497818 -
tctactggatcatcagcaaa

SEQ ID NO: 179091 - DNA, 20 bp, Artificial Sequence
  Synthetic oligonucleotide; GAG chr2 60497813 60497832 60497816 -
tactggatcatcagcaaagg

SEQ ID NO: 179092 - DNA, 20 bp, Artificial Sequence
  Synthetic oligonucleotide; GAG chr2 60497806 60497825 60497809 -
tcatcagcaaagggagaaat

SEQ ID NO: 179093 - DNA, 20 bp, Artificial Sequence
  Synthetic oligonucleotide; AAG chr2 60497799 60497818 60497802 -
caaagggagaaatgagacaa

SEQ ID NO: 179094 - DNA, 20 bp, Artificial Sequence
  Synthetic oligonucleotide; GAG chr2 60497797 60497816 60497800 -
aagggagaaatgagacaaaa

SEQ ID NO: 179095 - DNA, 20 bp, Artificial Sequence
  Synthetic oligonucleotide; AGG chr2 60497796 60497815 60497799 -
agggagaaatgagacaaaag

SEQ ID NO: 179096 - DNA, 20 bp, Artificial Sequence
  Synthetic oligonucleotide; GAG chr2 60497788 60497807 60497791 -
atgagacaaaagaggccact

SEQ ID NO: 179097 - DNA, 20 bp, Artificial Sequence
  Synthetic oligonucleotide; TGG chr2 60497780 60497799 60497783 -
aaagaggccactgagtcctt

SEQ ID NO: 179098 - DNA, 20 bp, Artificial Sequence
  Synthetic oligonucleotide; GGG chr2 60497779 60497798 60497782 -
aagaggccactgagtccttt

SEQ ID NO: 179099 - DNA, 20 bp, Artificial Sequence
  Synthetic oligonucleotide; GGG chr2 60497778 60497797 60497781 -
agaggccactgagtcctttg

SEQ ID NO: 179100 - DNA, 20 bp, Artificial Sequence
  Synthetic oligonucleotide; GGG chr2 60497777 60497796 60497780 -
gaggccactgagtcctttgg

SEQ ID NO: 179101 - DNA, 20 bp, Artificial Sequence
  Synthetic oligonucleotide; TAG chr2 60497761 60497780 60497764 -
ttgggggaaatatgtgccta

SEQ ID NO: 179102 - DNA, 20 bp, Artificial Sequence
  Synthetic oligonucleotide; AAG chr2 60497757 60497776 60497760 -
gggaaatatgtgcctatagt

SEQ ID NO: 179103 - DNA, 20 bp, Artificial Sequence
  Synthetic oligonucleotide; AGG chr2 60497756 60497775 60497759 -
ggaaatatgtgcctatagta

SEQ ID NO: 179104 - DNA, 20 bp, Artificial Sequence
  Synthetic oligonucleotide; TAG chr2 60497750 60497769 60497753 -
atgtgcctatagtaaggtga

SEQ ID NO: 179105 - DNA, 20 bp, Artificial Sequence
  Synthetic oligonucleotide; CAG chr2 60497745 60497764 60497748 -
cctatagtaaggtgatagtt

SEQ ID NO: 179106 - DNA, 20 bp, Artificial Sequence
  Synthetic oligonucleotide; GAG chr2 60497743 60497762 60497746 -
tatagtaaggtgatagttca

SEQ ID NO: 179107 - DNA, 20 bp, Artificial Sequence
  Synthetic oligonucleotide; AAG chr2 60497739 60497758 60497742 -
gtaaggtgatagttcagaga

SEQ ID NO: 179108 - DNA, 20 bp, Artificial Sequence
  Synthetic oligonucleotide; GAG chr2 60497737 60497756 60497740 -
aaggtgatagttcagagaaa

SEQ ID NO: 179109 - DNA, 20 bp, Artificial Sequence
  Synthetic oligonucleotide; AAG chr2 60497734 60497753 60497737 -
gtgatagttcagagaaagag

SEQ ID NO: 179110 - DNA, 20 bp, Artificial Sequence
  Synthetic oligonucleotide; GAG chr2 60497732 60497751 60497735 -
gatagttcagagaaagagaa

SEQ ID NO: 179111 - DNA, 20 bp, Artificial Sequence
  Synthetic oligonucleotide; TAG chr2 60497729 60497748 60497732 -
agttcagagaaagagaagag

SEQ ID NO: 179112 - DNA, 20 bp, Artificial Sequence
  Synthetic oligonucleotide; AGG chr2 60497728 60497747 60497731 -
gttcagagaaagagaagagt

SEQ ID NO: 179113 - DNA, 20 bp, Artificial Sequence
  Synthetic oligonucleotide; GAG chr2 60497726 60497745 60497729 -
tcagagaaagagaagagtag

SEQ ID NO: 179114 - DNA, 20 bp, Artificial Sequence
  Synthetic oligonucleotide; AGG chr2 60497725 60497744 60497728 -
cagagaaagagaagagtagg

SEQ ID NO: 179115 - DNA, 20 bp, Artificial Sequence
  Synthetic oligonucleotide; TGG chr2 60497721 60497740 60497724 -
gaaagagaagagtaggaggc

SEQ ID NO: 179116 - DNA, 20 bp, Artificial Sequence
  Synthetic oligonucleotide; AAG chr2 60497713 60497732 60497716 -
agagtaggaggctggacctg

SEQ ID NO: 179117 - DNA, 20 bp, Artificial Sequence
  Synthetic oligonucleotide; AGG chr2 60497712 60497731 60497715 -
gagtaggaggctggacctga

SEQ ID NO: 179118 - DNA, 20 bp, Artificial Sequence
  Synthetic oligonucleotide; AAG chr2 60497698 60497717 60497701 -
acctgaaggccttccaaaaa

SEQ ID NO: 179119 - DNA, 20 bp, Artificial Sequence
  Synthetic oligonucleotide; AAG chr2 60497693 60497712 60497696 -
aaggccttccaaaaaaagta

SEQ ID NO: 179120 - DNA, 20 bp, Artificial Sequence
  Synthetic oligonucleotide; AGG chr2 60497692 60497711 60497695 -
aggccttccaaaaaaagtaa

SEQ ID NO: 179121 - DNA, 20 bp, Artificial Sequence
  Synthetic oligonucleotide; TGG chr2 60497675 60497694 60497678 -
taaaggatgttaaattgctc

SEQ ID NO: 179122 - DNA, 20 bp, Artificial Sequence
  Synthetic oligonucleotide; AAG chr2 60497672 60497691 60497675 -
aggatgttaaattgctctgg

SEQ ID NO: 179123 - DNA, 20 bp, Artificial Sequence
  Synthetic oligonucleotide; AGG chr2 60497671 60497690 60497674 -
ggatgttaaattgctctgga

SEQ ID NO: 179124 - DNA, 20 bp, Artificial Sequence
  Synthetic oligonucleotide; AAG chr2 60497664 60497683 60497667 -
aaattgctctggaaggtgca

SEQ ID NO: 179125 - DNA, 20 bp, Artificial Sequence
  Synthetic oligonucleotide; CAG chr2 60497654 60497673 60497657 -
ggaaggtgcaaagtgccatc

SEQ ID NO: 179126 - DNA, 20 bp, Artificial Sequence
  Synthetic oligonucleotide; TGG chr2 60497651 60497670 60497654 -
aggtgcaaagtgccatccag

SEQ ID NO: 179127 - DNA, 20 bp, Artificial Sequence
  Synthetic oligonucleotide; AAG chr2 60497648 60497667 60497651 -
tgcaaagtgccatccagtgg

SEQ ID NO: 179128 - DNA, 20 bp, Artificial Sequence
  Synthetic oligonucleotide; TGG chr2 60497618 60497637 60497621 -
tattattatcatcatcataa

SEQ ID NO: 179129 - DNA, 20 bp, Artificial Sequence
  Synthetic oligonucleotide; TAG chr2 60497597 60497616 60497600 -
ggtcattatcatcaccatta

SEQ ID NO: 179130 - DNA, 20 bp, Artificial Sequence
  Synthetic oligonucleotide; AGG chr2 60497596 60497615 60497599 -
gtcattatcatcaccattat

SEQ ID NO: 179131 - DNA, 20 bp, Artificial Sequence
  Synthetic oligonucleotide; TGG chr2 60497590 60497609 60497593 -
atcatcaccattataggata

SEQ ID NO: 179132 - DNA, 20 bp, Artificial Sequence
  Synthetic oligonucleotide; TAG chr2 60497579 60497598 60497582 -
tataggatatggcactgacg

SEQ ID NO: 179133 - DNA, 20 bp, Artificial Sequence
  Synthetic oligonucleotide; AGG chr2 60497578 60497597 60497581 -
ataggatatggcactgacgt

SEQ ID NO: 179134 - DNA, 20 bp, Artificial Sequence
  Synthetic oligonucleotide; TAG chr2 60497575 60497594 60497578 -
ggatatggcactgacgtagg

SEQ ID NO: 179135 - DNA, 20 bp, Artificial Sequence
  Synthetic oligonucleotide; TGG chr2 60497568 60497587 60497571 -
gcactgacgtaggtagtgac

SEQ ID NO: 179136 - DNA, 20 bp, Artificial Sequence
  Synthetic oligonucleotide; AAG chr2 60497564 60497583 60497567 -
tgacgtaggtagtgactggt

SEQ ID NO: 179137 - DNA, 20 bp, Artificial Sequence
  Synthetic oligonucleotide; GAG chr2 60497562 60497581 60497565 -
acgtaggtagtgactggtaa

SEQ ID NO: 179138 - DNA, 20 bp, Artificial Sequence
  Synthetic oligonucleotide; GAG chr2 60497553 60497572 60497556 -
gtgactggtaagagccgatt

SEQ ID NO: 179139 - DNA, 20 bp, Artificial Sequence
  Synthetic oligonucleotide; TAG chr2 60497546 60497565 60497549 -
gtaagagccgattgagtttc

SEQ ID NO: 179140 - DNA, 20 bp, Artificial Sequence
  Synthetic oligonucleotide; TAG chr2 60497529 60497548 60497532 -
ttctagctgattcctgatgt

SEQ ID NO: 179141 - DNA, 20 bp, Artificial Sequence
  Synthetic oligonucleotide; AGG chr2 60497528 60497547 60497531 -
tctagctgattcctgatgtt

SEQ ID NO: 179142 - DNA, 20 bp, Artificial Sequence
  Synthetic oligonucleotide; GGG chr2 60497527 60497546 60497530 -
ctagctgattcctgatgtta

SEQ ID NO: 179143 - DNA, 20 bp, Artificial Sequence
  Synthetic oligonucleotide; GGG chr2 60497526 60497545 60497529 -
tagctgattcctgatgttag

SEQ ID NO: 179144 - DNA, 20 bp, Artificial Sequence
  Synthetic oligonucleotide; TGG chr2 60497506 60497525 60497509 -
gggccatgaatctgtctacc

SEQ ID NO: 179145 - DNA, 20 bp, Artificial Sequence
  Synthetic oligonucleotide; CAG chr2 60497486 60497505 60497489 -
tggaatgttctaattcaatt

SEQ ID NO: 179146 - DNA, 20 bp, Artificial Sequence
  Synthetic oligonucleotide; AGG chr2 60497485 60497504 60497488 -
ggaatgttctaattcaattc

SEQ ID NO: 179147 - DNA, 20 bp, Artificial Sequence
  Synthetic oligonucleotide; GAG chr2 60497483 60497502 60497486 -
aatgttctaattcaattcag

SEQ ID NO: 179148 - DNA, 20 bp, Artificial Sequence
  Synthetic oligonucleotide; CGG chr2 60497480 60497499 60497483 -
gttctaattcaattcaggag

SEQ ID NO: 179149 - DNA, 20 bp, Artificial Sequence
  Synthetic oligonucleotide; CAG chr2 60497477 60497496 60497480 -
ctaattcaattcaggagcgg

SEQ ID NO: 179150 - DNA, 20 bp, Artificial Sequence
  Synthetic oligonucleotide; AAG chr2 60497471 60497490 60497474 -
caattcaggagcggcagttt

SEQ ID NO: 179151 - DNA, 20 bp, Artificial Sequence
  Synthetic oligonucleotide; TAG chr2 60497466 60497485 60497469 -
caggagcggcagtttaagtc

SEQ ID NO: 179152 - DNA, 20 bp, Artificial Sequence
  Synthetic oligonucleotide; AAG chr2 60497457 60497476 60497460 -
cagtttaagtctagacttca

SEQ ID NO: 179153 - DNA, 20 bp, Artificial Sequence
  Synthetic oligonucleotide; TGG chr2 60497438 60497457 60497441 -
aaagcactctcatatatcct

SEQ ID NO: 179154 - DNA, 20 bp, Artificial Sequence
  Synthetic oligonucleotide; GAG chr2 60497424 60497443 60497427 -
tatccttggcctgctaacct

SEQ ID NO: 179155 - DNA, 20 bp, Artificial Sequence
  Synthetic oligonucleotide; AGG chr2 60497423 60497442 60497426 -
atccttggcctgctaacctg

SEQ ID NO: 179156 - DNA, 20 bp, Artificial Sequence
  Synthetic oligonucleotide; GGG chr2 60497422 60497441 60497425 -
tccttggcctgctaacctga

SEQ ID NO: 179157 - DNA, 20 bp, Artificial Sequence
  Synthetic oligonucleotide; TAG chr2 60497418 60497437 60497421 -
tggcctgctaacctgagggc

SEQ ID NO: 179158 - DNA, 20 bp, Artificial Sequence
  Synthetic oligonucleotide; TAG chr2 60497411 60497430 60497414 -
ctaacctgagggctagtttc

SEQ ID NO: 179159 - DNA, 20 bp, Artificial Sequence
  Synthetic oligonucleotide; AGG chr2 60497410 60497429 60497413 -
taacctgagggctagtttct

SEQ ID NO: 179160 - DNA, 20 bp, Artificial Sequence
  Synthetic oligonucleotide; GGG chr2 60497409 60497428 60497412 -
aacctgagggctagtttcta

SEQ ID NO: 179161 - DNA, 20 bp, Artificial Sequence
  Synthetic oligonucleotide; AAG chr2 60497393 60497412 60497396 -
tctagggattgattaactta

SEQ ID NO: 179162 - DNA, 20 bp, Artificial Sequence
  Synthetic oligonucleotide; CAG chr2 60497389 60497408 60497392 -
gggattgattaacttaaaga

SEQ ID NO: 179163 - DNA, 20 bp, Artificial Sequence
  Synthetic oligonucleotide; TAG chr2 60497367 60497386 60497370 -
gttcatatatgcttgaatac

SEQ ID NO: 179164 - DNA, 20 bp, Artificial Sequence
  Synthetic oligonucleotide; CAG chr2 60497330 60497349 60497333 -
aaaaatctgacttgatcaaa

SEQ ID NO: 179165 - DNA, 20 bp, Artificial Sequence
  Synthetic oligonucleotide; GAG chr2 60497328 60497347 60497331 -
aaatctgacttgatcaaaca

SEQ ID NO: 179166 - DNA, 20 bp, Artificial Sequence
  Synthetic oligonucleotide; CAG chr2 60497325 60497344 60497328 -
tctgacttgatcaaacagag

SEQ ID NO: 179167 - DNA, 20 bp, Artificial Sequence
  Synthetic oligonucleotide; AAG chr2 60497319 60497338 60497322 -
ttgatcaaacagagcagtta

SEQ ID NO: 179168 - DNA, 20 bp, Artificial Sequence
  Synthetic oligonucleotide; AGG chr2 60497318 60497337 60497321 -
tgatcaaacagagcagttaa

SEQ ID NO: 179169 - DNA, 20 bp, Artificial Sequence
  Synthetic oligonucleotide; AAG chr2 60497297 60497316 60497300 -
ggcgatgcttcgttttacaa

SEQ ID NO: 179170 - DNA, 20 bp, Artificial Sequence
  Synthetic oligonucleotide; AAG chr2 60497274 60497293 60497277 -
attttcccccctctttacaa

SEQ ID NO: 179171 - DNA, 20 bp, Artificial Sequence
  Synthetic oligonucleotide; AGG chr2 60497273 60497292 60497276 -
ttttcccccctctttacaaa

SEQ ID NO: 179172 - DNA, 20 bp, Artificial Sequence
  Synthetic oligonucleotide; CAG chr2 60497265 60497284 60497268 -
cctctttacaaaaggatgca

SEQ ID NO: 179173 - DNA, 20 bp, Artificial Sequence
  Synthetic oligonucleotide; TGG chr2 60497262 60497281 60497265 -
ctttacaaaaggatgcacag

SEQ ID NO: 179174 - DNA, 20 bp, Artificial Sequence
  Synthetic oligonucleotide; TGG chr2 60497247 60497266 60497250 -
cacagtggtattcctttcaa

SEQ ID NO: 179175 - DNA, 20 bp, Artificial Sequence
  Synthetic oligonucleotide; TAG chr2 60497234 60497253 60497237 -
ctttcaatggaatgtttctc

SEQ ID NO: 179176 - DNA, 20 bp, Artificial Sequence
  Synthetic oligonucleotide; AAG chr2 60497225 60497244 60497228 -
gaatgtttctctagctcatt

SEQ ID NO: 179177 - DNA, 20 bp, Artificial Sequence
  Synthetic oligonucleotide; CAG chr2 60497216 60497235 60497219 -
tctagctcattaagtgttta

SEQ ID NO: 179178 - DNA, 20 bp, Artificial Sequence
  Synthetic oligonucleotide; AGG chr2 60497215 60497234 60497218 -
ctagctcattaagtgtttac

SEQ ID NO: 179179 - DNA, 20 bp, Artificial Sequence
  Synthetic oligonucleotide; TAG chr2 60497208 60497227 60497211 -
attaagtgtttacaggtcat

SEQ ID NO: 179180 - DNA, 20 bp, Artificial Sequence
  Synthetic oligonucleotide; TGG chr2 60497197 60497216 60497200 -
acaggtcattagctactgca

SEQ ID NO: 179181 - DNA, 20 bp, Artificial Sequence
  Synthetic oligonucleotide; AAG chr2 60497194 60497213 60497197 -
ggtcattagctactgcatgg

SEQ ID NO: 179182 - DNA, 20 bp, Artificial Sequence
  Synthetic oligonucleotide; AGG chr2 60497193 60497212 60497196 -
gtcattagctactgcatgga

SEQ ID NO: 179183 - DNA, 20 bp, Artificial Sequence
  Synthetic oligonucleotide; TAG chr2 60497183 60497202 60497186 -
actgcatggaaggactttgc

SEQ ID NO: 179184 - DNA, 20 bp, Artificial Sequence
  Synthetic oligonucleotide; GAG chr2 60497181 60497200 60497184 -
tgcatggaaggactttgcta

SEQ ID NO: 179185 - DNA, 20 bp, Artificial Sequence
  Synthetic oligonucleotide; AAG chr2 60497176 60497195 60497179 -
ggaaggactttgctagagaa

SEQ ID NO: 179186 - DNA, 20 bp, Artificial Sequence
  Synthetic oligonucleotide; AGG chr2 60497175 60497194 60497178 -
gaaggactttgctagagaaa

SEQ ID NO: 179187 - DNA, 20 bp, Artificial Sequence
  Synthetic oligonucleotide; AAG chr2 60497172 60497191 60497175 -
ggactttgctagagaaaagg

SEQ ID NO: 179188 - DNA, 20 bp, Artificial Sequence
  Synthetic oligonucleotide; AGG chr2 60497171 60497190 60497174 -
gactttgctagagaaaagga

SEQ ID NO: 179189 - DNA, 20 bp, Artificial Sequence
  Synthetic oligonucleotide; AAG chr2 60497164 60497183 60497167 -
ctagagaaaaggaaggctgc

SEQ ID NO: 179190 - DNA, 20 bp, Artificial Sequence
  Synthetic oligonucleotide; AGG chr2 60497163 60497182 60497166 -
tagagaaaaggaaggctgca

SEQ ID NO: 179191 - DNA, 20 bp, Artificial Sequence
  Synthetic oligonucleotide; TAG chr2 60497157 60497176 60497160 -
aaaggaaggctgcaaggaaa

SEQ ID NO: 179192 - DNA, 20 bp, Artificial Sequence
  Synthetic oligonucleotide; TAG chr2 60497151 60497170 60497154 -
aggctgcaaggaaatagctc

SEQ ID NO: 179193 - DNA, 20 bp, Artificial Sequence
  Synthetic oligonucleotide; TAG chr2 60497145 60497164 60497148 -
caaggaaatagctctagctc

SEQ ID NO: 179194 - DNA, 20 bp, Artificial Sequence
  Synthetic oligonucleotide; TAG chr2 60497139 60497158 60497142 -
aatagctctagctctagctc

SEQ ID NO: 179195 - DNA, 20 bp, Artificial Sequence
  Synthetic oligonucleotide; TAG chr2 60497134 60497153 60497137 -
ctctagctctagctctagct

SEQ ID NO: 179196 - DNA, 20 bp, Artificial Sequence
  Synthetic oligonucleotide; AGG chr2 60497133 60497152 60497136 -
tctagctctagctctagctt

SEQ ID NO: 179197 - DNA, 20 bp, Artificial Sequence
  Synthetic oligonucleotide; GGG chr2 60497132 60497151 60497135 -
ctagctctagctctagctta

SEQ ID NO: 179198 - DNA, 20 bp, Artificial Sequence
  Synthetic oligonucleotide; GGG chr2 60497131 60497150 60497134 -
tagctctagctctagcttag

SEQ ID NO: 179199 - DNA, 20 bp, Artificial Sequence
  Synthetic oligonucleotide; TAG chr2 60497124 60497143 60497127 -
agctctagcttaggggatgc

SEQ ID NO: 179200 - DNA, 20 bp, Artificial Sequence
  Synthetic oligonucleotide; AAG chr2 60497118 60497137 60497121 -
agcttaggggatgctagcta

SEQ ID NO: 179201 - DNA, 20 bp, Artificial Sequence
  Synthetic oligonucleotide; AGG chr2 60497117 60497136 60497120 -
gcttaggggatgctagctaa

SEQ ID NO: 179202 - DNA, 20 bp, Artificial Sequence
  Synthetic oligonucleotide; GGG chr2 60497116 60497135 60497119 -
cttaggggatgctagctaaa

SEQ ID NO: 179203 - DNA, 20 bp, Artificial Sequence
  Synthetic oligonucleotide; TAG chr2 60497110 60497129 60497113 -
ggatgctagctaaagggaat

SEQ ID NO: 179204 - DNA, 20 bp, Artificial Sequence
  Synthetic oligonucleotide; TGG chr2 60497104 60497123 60497107 -
tagctaaagggaattagaat

SEQ ID NO: 179205 - DNA, 20 bp, Artificial Sequence
  Synthetic oligonucleotide; TGG chr2 60497100 60497119 60497103 -
taaagggaattagaattggt

SEQ ID NO: 179206 - DNA, 20 bp, Artificial Sequence
  Synthetic oligonucleotide; CAG chr2 60497093 60497112 60497096 -
aattagaattggttggccaa

SEQ ID NO: 179207 - DNA, 20 bp, Artificial Sequence
  Synthetic oligonucleotide; AGG chr2 60497092 60497111 60497095 -
attagaattggttggccaac

SEQ ID NO: 179208 - DNA, 20 bp, Artificial Sequence
  Synthetic oligonucleotide; CGG chr2 60497083 60497102 60497086 -
ggttggccaacaggtgtctg

SEQ ID NO: 179209 - DNA, 20 bp, Artificial Sequence
  Synthetic oligonucleotide; TGG chr2 60497057 60497076 60497060 -
actccctgtccactcaacac

SEQ ID NO: 179210 - DNA, 20 bp, Artificial Sequence
  Synthetic oligonucleotide; GGG chr2 60497056 60497075 60497059 -
ctccctgtccactcaacact

SEQ ID NO: 179211 - DNA, 20 bp, Artificial Sequence
  Synthetic oligonucleotide; GGG chr2 60497055 60497074 60497058 -
tccctgtccactcaacactg

SEQ ID NO: 179212 - DNA, 20 bp, Artificial Sequence
  Synthetic oligonucleotide; GGG chr2 60497054 60497073 60497057 -
ccctgtccactcaacactgg

SEQ ID NO: 179213 - DNA, 20 bp, Artificial Sequence
  Synthetic oligonucleotide; GAG chr2 60497052 60497071 60497055 -
ctgtccactcaacactgggg

SEQ ID NO: 179214 - DNA, 20 bp, Artificial Sequence
  Synthetic oligonucleotide; AGG chr2 60497051 60497070 60497054 -
tgtccactcaacactggggg

SEQ ID NO: 179215 - DNA, 20 bp, Artificial Sequence
  Synthetic oligonucleotide; GAG chr2 60497049 60497068 60497052 -
tccactcaacactgggggag

SEQ ID NO: 179216 - DNA, 20 bp, Artificial Sequence
  Synthetic oligonucleotide; TAG chr2 60497046 60497065 60497049 -
actcaacactgggggaggag

SEQ ID NO: 179217 - DNA, 20 bp, Artificial Sequence
  Synthetic oligonucleotide; GAG chr2 60497044 60497063 60497047 -
tcaacactgggggaggagta

SEQ ID NO: 179218 - DNA, 20 bp, Artificial Sequence
  Synthetic oligonucleotide; GAG chr2 60497022 60497041 60497025 -
gatcttgcttccttccatgt

SEQ ID NO: 179219 - DNA, 20 bp, Artificial Sequence
  Synthetic oligonucleotide; GAG chr2 60497020 60497039 60497023 -
tcttgcttccttccatgtga

SEQ ID NO: 179220 - DNA, 20 bp, Artificial Sequence
  Synthetic oligonucleotide; TAG chr2 60497013 60497032 60497016 -
tccttccatgtgagagctta

SEQ ID NO: 179221 - DNA, 20 bp, Artificial Sequence
  Synthetic oligonucleotide; TGG chr2 60497004 60497023 60497007 -
gtgagagcttatagtccctt

SEQ ID NO: 179222 - DNA, 20 bp, Artificial Sequence
  Synthetic oligonucleotide; CAG chr2 60496997 60497016 60497000 -
cttatagtccctttggaatc

SEQ ID NO: 179223 - DNA, 20 bp, Artificial Sequence
  Synthetic oligonucleotide; AAG chr2 60496984 60497003 60496987 -
tggaatccagatttatcgtg

SEQ ID NO: 179224 - DNA, 20 bp, Artificial Sequence
  Synthetic oligonucleotide; AAG chr2 60496973 60496992 60496976 -
tttatcgtgaagtaatcgtg

SEQ ID NO: 179225 - DNA, 20 bp, Artificial Sequence
  Synthetic oligonucleotide; CAG chr2 60496969 60496988 60496972 -
tcgtgaagtaatcgtgaaga

SEQ ID NO: 179226 - DNA, 20 bp, Artificial Sequence
  Synthetic oligonucleotide; AAG chr2 60496961 60496980 60496964 -
taatcgtgaagacagaaatt

SEQ ID NO: 179227 - DNA, 20 bp, Artificial Sequence
  Synthetic oligonucleotide; TGG chr2 60496921 60496940 60496924 -
tcatctcttatgactgtcca

SEQ ID NO: 179228 - DNA, 20 bp, Artificial Sequence
  Synthetic oligonucleotide; GGG chr2 60496920 60496939 60496923 -
catctcttatgactgtccat

SEQ ID NO: 179229 - DNA, 20 bp, Artificial Sequence
  Synthetic oligonucleotide; GGG chr2 60496919 60496938 60496922 -
atctcttatgactgtccatg

SEQ ID NO: 179230 - DNA, 20 bp, Artificial Sequence
  Synthetic oligonucleotide; TGG chr2 60496913 60496932 60496916 -
tatgactgtccatggggaaa

SEQ ID NO: 179231 - DNA, 20 bp, Artificial Sequence
  Synthetic oligonucleotide; GGG chr2 60496912 60496931 60496915 -
atgactgtccatggggaaat

SEQ ID NO: 179232 - DNA, 20 bp, Artificial Sequence
  Synthetic oligonucleotide; CAG chr2 60496891 60496910 60496894 -
ggtcctgctttacaaaaatt

SEQ ID NO: 179233 - DNA, 20 bp, Artificial Sequence
  Synthetic oligonucleotide; CAG chr2 60496872 60496891 60496875 -
tcagtttgcatgctgctttt

SEQ ID NO: 179234 - DNA, 20 bp, Artificial Sequence
  Synthetic oligonucleotide; AGG chr2 60496871 60496890 60496874 -
cagtttgcatgctgcttttc

SEQ ID NO: 179235 - DNA, 20 bp, Artificial Sequence
  Synthetic oligonucleotide; CAG chr2 60496851 60496870 60496854 -
aggcctatgactgtgacatc

SEQ ID NO: 179236 - DNA, 20 bp, Artificial Sequence
  Synthetic oligonucleotide; GAG chr2 60496847 60496866 60496850 -
ctatgactgtgacatccagt

SEQ ID NO: 179237 - DNA, 20 bp, Artificial Sequence
  Synthetic oligonucleotide; AGG chr2 60496846 60496865 60496849 -
tatgactgtgacatccagtg

SEQ ID NO: 179238 - DNA, 20 bp, Artificial Sequence
  Synthetic oligonucleotide; GGG chr2 60496845 60496864 60496848 -
atgactgtgacatccagtga

SEQ ID NO: 179239 - DNA, 20 bp, Artificial Sequence
  Synthetic oligonucleotide; GAG chr2 60496843 60496862 60496846 -
gactgtgacatccagtgagg

SEQ ID NO: 179240 - DNA, 20 bp, Artificial Sequence
  Synthetic oligonucleotide; GAG chr2 60496836 60496855 60496839 -
acatccagtgagggagattt

SEQ ID NO: 179241 - DNA, 20 bp, Artificial Sequence
  Synthetic oligonucleotide; AGG chr2 60496835 60496854 60496838 -
catccagtgagggagatttg

SEQ ID NO: 179242 - DNA, 20 bp, Artificial Sequence
  Synthetic oligonucleotide; AAG chr2 60496832 60496851 60496835 -
ccagtgagggagatttgagg

SEQ ID NO: 179243 - DNA, 20 bp, Artificial Sequence
  Synthetic oligonucleotide; AGG chr2 60496831 60496850 60496834 -
cagtgagggagatttgagga

SEQ ID NO: 179244 - DNA, 20 bp, Artificial Sequence
  Synthetic oligonucleotide; GGG chr2 60496830 60496849 60496833 -
agtgagggagatttgaggaa

SEQ ID NO: 179245 - DNA, 20 bp, Artificial Sequence
  Synthetic oligonucleotide; GGG chr2 60496829 60496848 60496832 -
gtgagggagatttgaggaag

SEQ ID NO: 179246 - DNA, 20 bp, Artificial Sequence
  Synthetic oligonucleotide; AAG chr2 60496819 60496838 60496822 -
tttgaggaaggggttgatgt

SEQ ID NO: 179247 - DNA, 20 bp, Artificial Sequence
  Synthetic oligonucleotide; TGG chr2 60496808 60496827 60496811 -
ggttgatgtaagactcctct

SEQ ID NO: 179248 - DNA, 20 bp, Artificial Sequence
  Synthetic oligonucleotide; GGG chr2 60496807 60496826 60496810 -
gttgatgtaagactcctctt

SEQ ID NO: 179249 - DNA, 20 bp, Artificial Sequence
  Synthetic oligonucleotide; GAG chr2 60496805 60496824 60496808 -
tgatgtaagactcctcttgg

SEQ ID NO: 179250 - DNA, 20 bp, Artificial Sequence
  Synthetic oligonucleotide; TAG chr2 60496800 60496819 60496803 -
taagactcctcttgggagca

SEQ ID NO: 179251 - DNA, 20 bp, Artificial Sequence
  Synthetic oligonucleotide; GAG chr2 60496796 60496815 60496799 -
actcctcttgggagcatagt

SEQ ID NO: 179252 - DNA, 20 bp, Artificial Sequence
  Synthetic oligonucleotide; GAG chr2 60496794 60496813 60496797 -
tcctcttgggagcatagtga

SEQ ID NO: 179253 - DNA, 20 bp, Artificial Sequence
  Synthetic oligonucleotide; GAG chr2 60496792 60496811 60496795 -
ctcttgggagcatagtgaga

SEQ ID NO: 179254 - DNA, 20 bp, Artificial Sequence
  Synthetic oligonucleotide; GAG chr2 60496790 60496809 60496793 -
cttgggagcatagtgagaga

SEQ ID NO: 179255 - DNA, 20 bp, Artificial Sequence
  Synthetic oligonucleotide; GAG chr2 60496788 60496807 60496791 -
tgggagcatagtgagagaga

SEQ ID NO: 179256 - DNA, 20 bp, Artificial Sequence
  Synthetic oligonucleotide; GAG chr2 60496786 60496805 60496789 -
ggagcatagtgagagagaga

SEQ ID NO: 179257 - DNA, 20 bp, Artificial Sequence
  Synthetic oligonucleotide; GAG chr2 60496784 60496803 60496787 -
agcatagtgagagagagaga

SEQ ID NO: 179258 - DNA, 20 bp, Artificial Sequence
  Synthetic oligonucleotide; GAG chr2 60496782 60496801 60496785 -
catagtgagagagagagaga

SEQ ID NO: 179259 - DNA, 20 bp, Artificial Sequence
  Synthetic oligonucleotide; GAG chr2 60496780 60496799 60496783 -
tagtgagagagagagagaga

SEQ ID NO: 179260 - DNA, 20 bp, Artificial Sequence
  Synthetic oligonucleotide; GAG chr2 60496778 60496797 60496781 -
gtgagagagagagagagaga

SEQ ID NO: 179261 - DNA, 20 bp, Artificial Sequence
  Synthetic oligonucleotide; CAG chr2 60496769 60496788 60496772 -
agagagagagagagcactca

SEQ ID NO: 179262 - DNA, 20 bp, Artificial Sequence
  Synthetic oligonucleotide; TGG chr2 60496766 60496785 60496769 -
gagagagagagcactcacag

SEQ ID NO: 179263 - DNA, 20 bp, Artificial Sequence
  Synthetic oligonucleotide; TAG chr2 60496759 60496778 60496762 -
agagcactcacagtggaacc

SEQ ID NO: 179264 - DNA, 20 bp, Artificial Sequence
  Synthetic oligonucleotide; GAG chr2 60496757 60496776 60496760 -
agcactcacagtggaaccta

SEQ ID NO: 179265 - DNA, 20 bp, Artificial Sequence
  Synthetic oligonucleotide; TGG chr2 60496754 60496773 60496757 -
actcacagtggaacctagag

SEQ ID NO: 179266 - DNA, 20 bp, Artificial Sequence
  Synthetic oligonucleotide; GGG chr2 60496753 60496772 60496756 -
ctcacagtggaacctagagt

SEQ ID NO: 179267 - DNA, 20 bp, Artificial Sequence
  Synthetic oligonucleotide; AAG chr2 60496749 60496768 60496752 -
cagtggaacctagagtggga

SEQ ID NO: 179268 - DNA, 20 bp, Artificial Sequence
  Synthetic oligonucleotide; AGG chr2 60496748 60496767 60496751 -
agtggaacctagagtgggaa

SEQ ID NO: 179269 - DNA, 20 bp, Artificial Sequence
  Synthetic oligonucleotide; TGG chr2 60496740 60496759 60496743 -
ctagagtgggaaaggctacc

SEQ ID NO: 179270 - DNA, 20 bp, Artificial Sequence
  Synthetic oligonucleotide; TGG chr2 60496737 60496756 60496740 -
gagtgggaaaggctacctgg

SEQ ID NO: 179271 - DNA, 20 bp, Artificial Sequence
  Synthetic oligonucleotide; TGG chr2 60496728 60496747 60496731 -
aggctacctggtggctgtcc

SEQ ID NO: 179272 - DNA, 20 bp, Artificial Sequence
  Synthetic oligonucleotide; AAG chr2 60496720 60496739 60496723 -
tggtggctgtcctggcatgt

SEQ ID NO: 179273 - DNA, 20 bp, Artificial Sequence
  Synthetic oligonucleotide; AAG chr2 60496716 60496735 60496719 -
ggctgtcctggcatgtaagt

SEQ ID NO: 179274 - DNA, 20 bp, Artificial Sequence
  Synthetic oligonucleotide; TGG chr2 60496707 60496726 60496710 -
ggcatgtaagtaagtctgtg

SEQ ID NO: 179275 - DNA, 20 bp, Artificial Sequence
  Synthetic oligonucleotide; CAG chr2 60496703 60496722 60496706 -
tgtaagtaagtctgtgtggt

SEQ ID NO: 179276 - DNA, 20 bp, Artificial Sequence
  Synthetic oligonucleotide; AGG chr2 60496702 60496721 60496705 -
gtaagtaagtctgtgtggtc

SEQ ID NO: 179277 - DNA, 20 bp, Artificial Sequence
  Synthetic oligonucleotide; GGG chr2 60496701 60496720 60496704 -
taagtaagtctgtgtggtca

SEQ ID NO: 179278 - DNA, 20 bp, Artificial Sequence
  Synthetic oligonucleotide; TGG chr2 60496683 60496702 60496686 -
cagggcttgcattccataaa

SEQ ID NO: 179279 - DNA, 20 bp, Artificial Sequence
  Synthetic oligonucleotide; CAG chr2 60496678 60496697 60496681 -
cttgcattccataaatggcc

SEQ ID NO: 179280 - DNA, 20 bp, Artificial Sequence
  Synthetic oligonucleotide; AGG chr2 60496677 60496696 60496680 -
ttgcattccataaatggccc

SEQ ID NO: 179281 - DNA, 20 bp, Artificial Sequence
  Synthetic oligonucleotide; TGG chr2 60496667 60496686 60496670 -
taaatggcccaggcccctgc

SEQ ID NO: 179282 - DNA, 20 bp, Artificial Sequence
  Synthetic oligonucleotide; TGG chr2 60496660 60496679 60496663 -
cccaggcccctgctggctgc

SEQ ID NO: 179283 - DNA, 20 bp, Artificial Sequence
  Synthetic oligonucleotide; GGG chr2 60496659 60496678 60496662 -
ccaggcccctgctggctgct

SEQ ID NO: 179284 - DNA, 20 bp, Artificial Sequence
  Synthetic oligonucleotide; GAG chr2 60496657 60496676 60496660 -
aggcccctgctggctgctgg

SEQ ID NO: 179285 - DNA, 20 bp, Artificial Sequence
  Synthetic oligonucleotide; GAG chr2 60496655 60496674 60496658 -
gcccctgctggctgctggga

SEQ ID NO: 179286 - DNA, 20 bp, Artificial Sequence
  Synthetic oligonucleotide; AAG chr2 60496651 60496670 60496654 -
ctgctggctgctgggagaga

SEQ ID NO: 179287 - DNA, 20 bp, Artificial Sequence
  Synthetic oligonucleotide; CGG chr2 60496647 60496666 60496650 -
tggctgctgggagagaaagt

SEQ ID NO: 179288 - DNA, 20 bp, Artificial Sequence
  Synthetic oligonucleotide; GAG chr2 60496643 60496662 60496646 -
tgctgggagagaaagtcggt

SEQ ID NO: 179289 - DNA, 20 bp, Artificial Sequence
  Synthetic oligonucleotide; AGG chr2 60496642 60496661 60496645 -
gctgggagagaaagtcggtg

SEQ ID NO: 179290 - DNA, 20 bp, Artificial Sequence
  Synthetic oligonucleotide; GAG chr2 60496640 60496659 60496643 -
tgggagagaaagtcggtgag

SEQ ID NO: 179291 - DNA, 20 bp, Artificial Sequence
  Synthetic oligonucleotide; GAG chr2 60496638 60496657 60496641 -
ggagagaaagtcggtgagga

SEQ ID NO: 179292 - DNA, 20 bp, Artificial Sequence
  Synthetic oligonucleotide; GAG chr2 60496636 60496655 60496639 -
agagaaagtcggtgaggaga

SEQ ID NO: 179293 - DNA, 20 bp, Artificial Sequence
  Synthetic oligonucleotide; AGG chr2 60496635 60496654 60496638 -
gagaaagtcggtgaggagag

SEQ ID NO: 179294 - DNA, 20 bp, Artificial Sequence
  Synthetic oligonucleotide; GGG chr2 60496634 60496653 60496637 -
agaaagtcggtgaggagaga

SEQ ID NO: 179295 - DNA, 20 bp, Artificial Sequence
  Synthetic oligonucleotide; AAG chr2 60496625 60496644 60496628 -
gtgaggagagagggttgtac

SEQ ID NO: 179296 - DNA, 20 bp, Artificial Sequence
  Synthetic oligonucleotide; AGG chr2 60496624 60496643 60496627 -
tgaggagagagggttgtaca

SEQ ID NO: 179297 - DNA, 20 bp, Artificial Sequence
  Synthetic oligonucleotide; CAG chr2 60496621 60496640 60496624 -
ggagagagggttgtacaagg

SEQ ID NO: 179298 - DNA, 20 bp, Artificial Sequence
  Synthetic oligonucleotide; AGG chr2 60496620 60496639 60496623 -
gagagagggttgtacaaggc

SEQ ID NO: 179299 - DNA, 20 bp, Artificial Sequence
  Synthetic oligonucleotide; GAG chr2 60496618 60496637 60496621 -
gagagggttgtacaaggcag

SEQ ID NO: 179300 - DNA, 20 bp, Artificial Sequence
  Synthetic oligonucleotide; GAG chr2 60496616 60496635 60496619 -
gagggttgtacaaggcagga

SEQ ID NO: 179301 - DNA, 20 bp, Artificial Sequence
  Synthetic oligonucleotide; CAG chr2 60496603 60496622 60496606 -
ggcaggagagatgtactcac

SEQ ID NO: 179302 - DNA, 20 bp, Artificial Sequence
  Synthetic oligonucleotide; AGG chr2 60496602 60496621 60496605 -
gcaggagagatgtactcacc

SEQ ID NO: 179303 - DNA, 20 bp, Artificial Sequence
  Synthetic oligonucleotide; CAG chr2 60496593 60496612 60496596 -
atgtactcaccaggctcttc

SEQ ID NO: 179304 - DNA, 20 bp, Artificial Sequence
  Synthetic oligonucleotide; AAG chr2 60496590 60496609 60496593 -
tactcaccaggctcttccag

SEQ ID NO: 179305 - DNA, 20 bp, Artificial Sequence
  Synthetic oligonucleotide; AGG chr2 60496589 60496608 60496592 -
actcaccaggctcttccaga

SEQ ID NO: 179306 - DNA, 20 bp, Artificial Sequence
  Synthetic oligonucleotide; GGG chr2 60496588 60496607 60496591 -
ctcaccaggctcttccagaa

SEQ ID NO: 179307 - DNA, 20 bp, Artificial Sequence
  Synthetic oligonucleotide; GGG chr2 60496587 60496606 60496590 -
tcaccaggctcttccagaag

SEQ ID NO: 179308 - DNA, 20 bp, Artificial Sequence
  Synthetic oligonucleotide; CAG chr2 60496554 60496573 60496557 -
aaatccttgccttgaacctg

SEQ ID NO: 179309 - DNA, 20 bp, Artificial Sequence
  Synthetic oligonucleotide; AAG chr2 60496549 60496568 60496552 -
cttgccttgaacctgcagca

SEQ ID NO: 179310 - DNA, 20 bp, Artificial Sequence
  Synthetic oligonucleotide; TGG chr2 60496546 60496565 60496549 -
gccttgaacctgcagcaaag

SEQ ID NO: 179311 - DNA, 20 bp, Artificial Sequence
  Synthetic oligonucleotide; AAG chr2 60496543 60496562 60496546 -
ttgaacctgcagcaaagtgg

SEQ ID NO: 179312 - DNA, 20 bp, Artificial Sequence
  Synthetic oligonucleotide; TAG chr2 60496539 60496558 60496542 -
acctgcagcaaagtggaaga

SEQ ID NO: 179313 - DNA, 20 bp, Artificial Sequence
  Synthetic oligonucleotide; AGG chr2 60496538 60496557 60496541 -
cctgcagcaaagtggaagat

SEQ ID NO: 179314 - DNA, 20 bp, Artificial Sequence
  Synthetic oligonucleotide; CAG chr2 60496503 60496522 60496506 -
ctcttccctctttcctgctt

SEQ ID NO: 179315 - DNA, 20 bp, Artificial Sequence
  Synthetic oligonucleotide; AGG chr2 60496502 60496521 60496505 -
tcttccctctttcctgcttc

SEQ ID NO: 179316 - DNA, 20 bp, Artificial Sequence
  Synthetic oligonucleotide; CAG chr2 60496470 60496489 60496473 -
actcacttttgctgtgtgtc

SEQ ID NO: 179317 - DNA, 20 bp, Artificial Sequence
  Synthetic oligonucleotide; GAG chr2 60496468 60496487 60496471 -
tcacttttgctgtgtgtcca

SEQ ID NO: 179318 - DNA, 20 bp, Artificial Sequence
  Synthetic oligonucleotide; CAG chr2 60496460 60496479 60496463 -
gctgtgtgtccagagctgac

SEQ ID NO: 179319 - DNA, 20 bp, Artificial Sequence
  Synthetic oligonucleotide; GAG chr2 60496458 60496477 60496461 -
tgtgtgtccagagctgacca

SEQ ID NO: 179320 - DNA, 20 bp, Artificial Sequence
  Synthetic oligonucleotide; AGG chr2 60496457 60496476 60496460 -
gtgtgtccagagctgaccag

SEQ ID NO: 179321 - DNA, 20 bp, Artificial Sequence
  Synthetic oligonucleotide; TGG chr2 60496450 60496469 60496453 -
cagagctgaccagaggacaa

SEQ ID NO: 179322 - DNA, 20 bp, Artificial Sequence
  Synthetic oligonucleotide; CAG chr2 60496447 60496466 60496450 -
agctgaccagaggacaatgg

SEQ ID NO: 179323 - DNA, 20 bp, Artificial Sequence
  Synthetic oligonucleotide; CAG chr2 60496435 60496454 60496438 -
gacaatggcagacttattgt

SEQ ID NO: 179324 - DNA, 20 bp, Artificial Sequence
  Synthetic oligonucleotide; TGG chr2 60496430 60496449 60496433 -
tggcagacttattgtcagac

SEQ ID NO: 179325 - DNA, 20 bp, Artificial Sequence
  Synthetic oligonucleotide; CAG chr2 60496427 60496446 60496430 -
cagacttattgtcagactgg

SEQ ID NO: 179326 - DNA, 20 bp, Artificial Sequence
  Synthetic oligonucleotide; CAG chr2 60496421 60496440 60496424 -
tattgtcagactggcagcac

SEQ ID NO: 179327 - DNA, 20 bp, Artificial Sequence
  Synthetic oligonucleotide; TAG chr2 60496416 60496435 60496419 -
tcagactggcagcaccagcc

SEQ ID NO: 179328 - DNA, 20 bp, Artificial Sequence
  Synthetic oligonucleotide; TGG chr2 60496398 60496417 60496401 -
cctagtgctctgtctctgcc

SEQ ID NO: 179329 - DNA, 20 bp, Artificial Sequence
  Synthetic oligonucleotide; GGG chr2 60496397 60496416 60496400 -
ctagtgctctgtctctgcct

SEQ ID NO: 179330 - DNA, 20 bp, Artificial Sequence
  Synthetic oligonucleotide; TGG chr2 60496391 60496410 60496394 -
ctctgtctctgcctgggaaa

SEQ ID NO: 179331 - DNA, 20 bp, Artificial Sequence
  Synthetic oligonucleotide; AAG chr2 60496381 60496400 60496384 -
gcctgggaaatggtttcaca

SEQ ID NO: 179332 - DNA, 20 bp, Artificial Sequence
  Synthetic oligonucleotide; CAG chr2 60496375 60496394 60496378 -
gaaatggtttcacaaagctc

SEQ ID NO: 179333 - DNA, 20 bp, Artificial Sequence
  Synthetic oligonucleotide; TGG chr2 60496364 60496383 60496367 -
acaaagctccagttctgccc

SEQ ID NO: 179334 - DNA, 20 bp, Artificial Sequence
  Synthetic oligonucleotide; TAG chr2 60496349 60496368 60496352 -
tgccctggacacttgcctca

SEQ ID NO: 179335 - DNA, 20 bp, Artificial Sequence
  Synthetic oligonucleotide; AGG chr2 60496348 60496367 60496351 -
gccctggacacttgcctcat

SEQ ID NO: 179336 - DNA, 20 bp, Artificial Sequence
  Synthetic oligonucleotide; GGG chr2 60496347 60496366 60496350 -
ccctggacacttgcctcata

SEQ ID NO: 179337 - DNA, 20 bp, Artificial Sequence
  Synthetic oligonucleotide; CAG chr2 60496328 60496347 60496331 -
agggctatccctttgcccct

SEQ ID NO: 179338 - DNA, 20 bp, Artificial Sequence
  Synthetic oligonucleotide; TGG chr2 60496316 60496335 60496319 -
ttgcccctcagtaacaccac

SEQ ID NO: 179339 - DNA, 20 bp, Artificial Sequence
  Synthetic oligonucleotide; GGG chr2 60496315 60496334 60496318 -
tgcccctcagtaacaccact

SEQ ID NO: 179340 - DNA, 20 bp, Artificial Sequence
  Synthetic oligonucleotide; TGG chr2 60496311 60496330 60496314 -
cctcagtaacaccactggga

SEQ ID NO: 179341 - DNA, 20 bp, Artificial Sequence
  Synthetic oligonucleotide; TGG chr2 60496282 60496301 60496285 -
cccaccctgtcccccatctg

SEQ ID NO: 179342 - DNA, 20 bp, Artificial Sequence
  Synthetic oligonucleotide; TAG chr2 60496279 60496298 60496282 -
accctgtcccccatctgtgg

SEQ ID NO: 179343 - DNA, 20 bp, Artificial Sequence
  Synthetic oligonucleotide; TGG chr2 60496262 60496281 60496265 -
tggtagcctgtgttgcctcg

SEQ ID NO: 179344 - DNA, 20 bp, Artificial Sequence
  Synthetic oligonucleotide; GGG chr2 60496261 60496280 60496264 -
ggtagcctgtgttgcctcgt

SEQ ID NO: 179345 - DNA, 20 bp, Artificial Sequence
  Synthetic oligonucleotide; AAG chr2 60496256 60496275 60496259 -
cctgtgttgcctcgtgggac

SEQ ID NO: 179346 - DNA, 20 bp, Artificial Sequence
  Synthetic oligonucleotide; AGG chr2 60496255 60496274 60496258 -
ctgtgttgcctcgtgggaca

SEQ ID NO: 179347 - DNA, 20 bp, Artificial Sequence
  Synthetic oligonucleotide; TGG chr2 60496234 60496253 60496237 -
ggcattctgtaaacgtgtat

SEQ ID NO: 179348 - DNA, 20 bp, Artificial Sequence
  Synthetic oligonucleotide; AAG chr2 60496218 60496237 60496221 -
gtattggacttccattgctt

SEQ ID NO: 179349 - DNA, 20 bp, Artificial Sequence
  Synthetic oligonucleotide; CAG chr2 60496192 60496211 60496195 -
tgatttgtttttccgacttc

SEQ ID NO: 179350 - DNA, 20 bp, Artificial Sequence
  Synthetic oligonucleotide; CGG chr2 60496181 60496200 60496184 -
tccgacttccagaactttcc

SEQ ID NO: 179351 - DNA, 20 bp, Artificial Sequence
  Synthetic oligonucleotide; TGG chr2 60496175 60496194 60496178 -
ttccagaactttcccggttc

SEQ ID NO: 179352 - DNA, 20 bp, Artificial Sequence
  Synthetic oligonucleotide; TGG chr2 60496167 60496186 60496170 -
ctttcccggttctggttttc

SEQ ID NO: 179353 - DNA, 20 bp, Artificial Sequence
  Synthetic oligonucleotide; GGG chr2 60496166 60496185 60496169 -
tttcccggttctggttttct

SEQ ID NO: 179354 - DNA, 20 bp, Artificial Sequence
  Synthetic oligonucleotide; CAG chr2 60496121 60496140 60496124 -
tccgtaatccatttcctgca

SEQ ID NO: 179355 - DNA, 20 bp, Artificial Sequence
  Synthetic oligonucleotide; AGG chr2 60496120 60496139 60496123 -
ccgtaatccatttcctgcac

SEQ ID NO: 179356 - DNA, 20 bp, Artificial Sequence
  Synthetic oligonucleotide; CGG chr2 60496091 60496110 60496094 -
gctttcaatcatctcccctc

SEQ ID NO: 179357 - DNA, 20 bp, Artificial Sequence
  Synthetic oligonucleotide; AAG chr2 60496080 60496099 60496083 -
tctcccctccggttatccta

SEQ ID NO: 179358 - DNA, 20 bp, Artificial Sequence
  Synthetic oligonucleotide; GAG chr2 60496048 60496067 60496051 -
tcaattgacttttcacatat

SEQ ID NO: 179359 - DNA, 20 bp, Artificial Sequence
  Synthetic oligonucleotide; AGG chr2 60496047 60496066 60496050 -
caattgacttttcacatatg

SEQ ID NO: 179360 - DNA, 20 bp, Artificial Sequence
  Synthetic oligonucleotide; GGG chr2 60496046 60496065 60496049 -
aattgacttttcacatatga

SEQ ID NO: 179361 - DNA, 20 bp, Artificial Sequence
  Synthetic oligonucleotide; TGG chr2 60496036 60496055 60496039 -
tcacatatgagggtgacctc

SEQ ID NO: 179362 - DNA, 20 bp, Artificial Sequence
  Synthetic oligonucleotide; TGG chr2 60496021 60496040 60496024 -
acctctggatcccttctctt

SEQ ID NO: 179363 - DNA, 20 bp, Artificial Sequence
  Synthetic oligonucleotide; CAG chr2 60496000 60496019 60496003 -
ggtttgtttgttctcttttc

SEQ ID NO: 179364 - DNA, 20 bp, Artificial Sequence
  Synthetic oligonucleotide; GAG chr2 60495998 60496017 60496001 -
tttgtttgttctcttttcca

SEQ ID NO: 179365 - DNA, 20 bp, Artificial Sequence
  Synthetic oligonucleotide; CAG chr2 60495992 60496011 60495995 -
tgttctcttttccagagctg

SEQ ID NO: 179366 - DNA, 20 bp, Artificial Sequence
  Synthetic oligonucleotide; TAG chr2 60495980 60495999 60495983 -
cagagctgcagtatgtttct

SEQ ID NO: 179367 - DNA, 20 bp, Artificial Sequence
  Synthetic oligonucleotide; AGG chr2 60495979 60495998 60495982 -
agagctgcagtatgtttctt

SEQ ID NO: 179368 - DNA, 20 bp, Artificial Sequence
  Synthetic oligonucleotide; TAG chr2 60495964 60495983 60495967 -
ttcttaggtgttttaaaaaa

SEQ ID NO: 179369 - DNA, 20 bp, Artificial Sequence
  Synthetic oligonucleotide; AAG chr2 60495959 60495978 60495962 -
aggtgttttaaaaaatagct

SEQ ID NO: 179370 - DNA, 20 bp, Artificial Sequence
  Synthetic oligonucleotide; TAG chr2 60495954 60495973 60495957 -
ttttaaaaaatagctaagaa

SEQ ID NO: 179371 - DNA, 20 bp, Artificial Sequence
  Synthetic oligonucleotide; TAG chr2 60495932 60495951 60495935 -
gtgaaaacacccttgtaatt

SEQ ID NO: 179372 - DNA, 20 bp, Artificial Sequence
  Synthetic oligonucleotide; GAG chr2 60495930 60495949 60495933 -
gaaaacacccttgtaattta

SEQ ID NO: 179373 - DNA, 20 bp, Artificial Sequence
  Synthetic oligonucleotide; CAG chr2 60495922 60495941 60495925 -
ccttgtaatttagagactct

SEQ ID NO: 179374 - DNA, 20 bp, Artificial Sequence
  Synthetic oligonucleotide; CAG chr2 60495911 60495930 60495914 -
agagactctcagaaaaatga

SEQ ID NO: 179375 - DNA, 20 bp, Artificial Sequence
  Synthetic oligonucleotide; TAG chr2 60495901 60495920 60495904 -
agaaaaatgacagcaccatt

SEQ ID NO: 179376 - DNA, 20 bp, Artificial Sequence
  Synthetic oligonucleotide; GAG chr2 60495899 60495918 60495902 -
aaaaatgacagcaccattta

SEQ ID NO: 179377 - DNA, 20 bp, Artificial Sequence
  Synthetic oligonucleotide; TGG chr2 60495894 60495913 60495897 -
tgacagcaccatttagagcc

SEQ ID NO: 179378 - DNA, 20 bp, Artificial Sequence
  Synthetic oligonucleotide; CAG chr2 60495886 60495905 60495889 -
ccatttagagcctggaatta

SEQ ID NO: 179379 - DNA, 20 bp, Artificial Sequence
  Synthetic oligonucleotide; CAG chr2 60495856 60495875 60495859 -
tcactgtgccttctctgccc

SEQ ID NO: 179380 - DNA, 20 bp, Artificial Sequence
  Synthetic oligonucleotide; AGG chr2 60495855 60495874 60495858 -
cactgtgccttctctgcccc

SEQ ID NO: 179381 - DNA, 20 bp, Artificial Sequence
  Synthetic oligonucleotide; TGG chr2 60495846 60495865 60495849 -
ttctctgccccaggctccca

SEQ ID NO: 179382 - DNA, 20 bp, Artificial Sequence
  Synthetic oligonucleotide; TGG chr2 60495843 60495862 60495846 -
tctgccccaggctcccatgg

SEQ ID NO: 179383 - DNA, 20 bp, Artificial Sequence
  Synthetic oligonucleotide; AAG chr2 60495839 60495858 60495842 -
ccccaggctcccatggtggc

SEQ ID NO: 179384 - DNA, 20 bp, Artificial Sequence
  Synthetic oligonucleotide; AGG chr2 60495838 60495857 60495841 -
cccaggctcccatggtggca

SEQ ID NO: 179385 - DNA, 20 bp, Artificial Sequence
  Synthetic oligonucleotide; GGG chr2 60495837 60495856 60495840 -
ccaggctcccatggtggcaa

SEQ ID NO: 179386 - DNA, 20 bp, Artificial Sequence
  Synthetic oligonucleotide; TGG chr2 60495830 60495849 60495833 -
cccatggtggcaagggtttt

SEQ ID NO: 179387 - DNA, 20 bp, Artificial Sequence
  Synthetic oligonucleotide; TGG chr2 60495826 60495845 60495829 -
tggtggcaagggtttttggt

SEQ ID NO: 179388 - DNA, 20 bp, Artificial Sequence
  Synthetic oligonucleotide; GGG chr2 60495825 60495844 60495828 -
ggtggcaagggtttttggtt

SEQ ID NO: 179389 - DNA, 20 bp, Artificial Sequence
  Synthetic oligonucleotide; GGG chr2 60495824 60495843 60495827 -
gtggcaagggtttttggttg

SEQ ID NO: 179390 - DNA, 20 bp, Artificial Sequence
  Synthetic oligonucleotide; GGG chr2 60495823 60495842 60495826 -
tggcaagggtttttggttgg

SEQ ID NO: 179391 - DNA, 20 bp, Artificial Sequence
  Synthetic oligonucleotide; AAG chr2 60495820 60495839 60495823 -
caagggtttttggttggggg

SEQ ID NO: 179392 - DNA, 20 bp, Artificial Sequence
  Synthetic oligonucleotide; AGG chr2 60495819 60495838 60495822 -
aagggtttttggttggggga

SEQ ID NO: 179393 - DNA, 20 bp, Artificial Sequence
  Synthetic oligonucleotide; GGG chr2 60495818 60495837 60495821 -
agggtttttggttgggggaa

SEQ ID NO: 179394 - DNA, 20 bp, Artificial Sequence
  Synthetic oligonucleotide; GGG chr2 60495817 60495836 60495820 -
gggtttttggttgggggaag

SEQ ID NO: 179395 - DNA, 20 bp, Artificial Sequence
  Synthetic oligonucleotide; GAG chr2 60495795 60495814 60495798 -
gtattgaattgcctgtcttt

SEQ ID NO: 179396 - DNA, 20 bp, Artificial Sequence
  Synthetic oligonucleotide; CAG chr2 60495792 60495811 60495795 -
ttgaattgcctgtctttgag

SEQ ID NO: 179397 - DNA, 20 bp, Artificial Sequence
  Synthetic oligonucleotide; AGG chr2 60495791 60495810 60495794 -
tgaattgcctgtctttgagc

SEQ ID NO: 179398 - DNA, 20 bp, Artificial Sequence
  Synthetic oligonucleotide; AAG chr2 60495786 60495805 60495789 -
tgcctgtctttgagcaggaa

SEQ ID NO: 179399 - DNA, 20 bp, Artificial Sequence
  Synthetic oligonucleotide; CAG chr2 60495778 60495797 60495781 -
tttgagcaggaaaagaatta

SEQ ID NO: 179400 - DNA, 20 bp, Artificial Sequence
  Synthetic oligonucleotide; CAG chr2 60495770 60495789 60495773 -
ggaaaagaattacagttttc

SEQ ID NO: 179401 - DNA, 20 bp, Artificial Sequence
  Synthetic oligonucleotide; AGG chr2 60495769 60495788 60495772 -
gaaaagaattacagttttcc

SEQ ID NO: 179402 - DNA, 20 bp, Artificial Sequence
  Synthetic oligonucleotide; GAG chr2 60495741 60495760 60495744 -
tttgtgtgtatgtgctgatt

SEQ ID NO: 179403 - DNA, 20 bp, Artificial Sequence
  Synthetic oligonucleotide; AGG chr2 60495740 60495759 60495743 -
ttgtgtgtatgtgctgattg

SEQ ID NO: 179404 - DNA, 20 bp, Artificial Sequence
  Synthetic oligonucleotide; GGG chr2 60495739 60495758 60495742 -
tgtgtgtatgtgctgattga

SEQ ID NO: 179405 - DNA, 20 bp, Artificial Sequence
  Synthetic oligonucleotide; GAG chr2 60495730 60495749 60495733 -
gtgctgattgagggcccatt

SEQ ID NO: 179406 - DNA, 20 bp, Artificial Sequence
  Synthetic oligonucleotide; TAG chr2 60495713 60495732 60495716 -
attgagaatattttgacttt

SEQ ID NO: 179407 - DNA, 20 bp, Artificial Sequence
  Synthetic oligonucleotide; AGG chr2 60495712 60495731 60495715 -
ttgagaatattttgactttt

SEQ ID NO: 179408 - DNA, 20 bp, Artificial Sequence
  Synthetic oligonucleotide; GGG chr2 60495711 60495730 60495714 -
tgagaatattttgactttta

SEQ ID NO: 179409 - DNA, 20 bp, Artificial Sequence
  Synthetic oligonucleotide; AAG chr2 60495708 60495727 60495711 -
gaatattttgacttttaggg

SEQ ID NO: 179410 - DNA, 20 bp, Artificial Sequence
  Synthetic oligonucleotide; CAG chr2 60495687 60495706 60495690 -
agctccaaactctcaaacca

SEQ ID NO: 179411 - DNA, 20 bp, Artificial Sequence
  Synthetic oligonucleotide; AGG chr2 60495686 60495705 60495689 -
gctccaaactctcaaaccac

SEQ ID NO: 179412 - DNA, 20 bp, Artificial Sequence
  Synthetic oligonucleotide; GGG chr2 60495685 60495704 60495688 -
ctccaaactctcaaaccaca

SEQ ID NO: 179413 - DNA, 20 bp, Artificial Sequence
  Synthetic oligonucleotide; AAG chr2 60495643 60495662 60495646 -
tctgttatgacgttatatgt

SEQ ID NO: 179414 - DNA, 20 bp, Artificial Sequence
  Synthetic oligonucleotide; CAG chr2 60495632 60495651 60495635 -
gttatatgtaagcatcacaa

SEQ ID NO: 179415 - DNA, 20 bp, Artificial Sequence
  Synthetic oligonucleotide; AGG chr2 60495631 60495650 60495634 -
ttatatgtaagcatcacaac

SEQ ID NO: 179416 - DNA, 20 bp, Artificial Sequence
  Synthetic oligonucleotide; CAG chr2 60495628 60495647 60495631 -
tatgtaagcatcacaacagg

SEQ ID NO: 179417 - DNA, 20 bp, Artificial Sequence
  Synthetic oligonucleotide; GAG chr2 60495626 60495645 60495629 -
tgtaagcatcacaacaggca

SEQ ID NO: 179418 - DNA, 20 bp, Artificial Sequence
  Synthetic oligonucleotide; TGG chr2 60495605 60495624 60495608 -
agaatgtctgcaccccaccc

SEQ ID NO: 179419 - DNA, 20 bp, Artificial Sequence
  Synthetic oligonucleotide; CAG chr2 60495598 60495617 60495601 -
ctgcaccccaccctggaaaa

SEQ ID NO: 179420 - DNA, 20 bp, Artificial Sequence
  Synthetic oligonucleotide; TGG chr2 60495580 60495599 60495583 -
aacagcctgactgtgcccca

SEQ ID NO: 179421 - DNA, 20 bp, Artificial Sequence
  Synthetic oligonucleotide; GGG chr2 60495579 60495598 60495582 -
acagcctgactgtgccccat

SEQ ID NO: 179422 - DNA, 20 bp, Artificial Sequence
  Synthetic oligonucleotide; CAG chr2 60495571 60495590 60495574 -
actgtgccccatgggcaaac

SEQ ID NO: 179423 - DNA, 20 bp, Artificial Sequence
  Synthetic oligonucleotide; TAG chr2 60495566 60495585 60495569 -
gccccatgggcaaaccagac

SEQ ID NO: 179424 - DNA, 20 bp, Artificial Sequence
  Synthetic oligonucleotide; TAG chr2 60495559 60495578 60495562 -
gggcaaaccagactagttta

SEQ ID NO: 179425 - DNA, 20 bp, Artificial Sequence
  Synthetic oligonucleotide; AGG chr2 60495558 60495577 60495561 -
ggcaaaccagactagtttat

SEQ ID NO: 179426 - DNA, 20 bp, Artificial Sequence
  Synthetic oligonucleotide; GGG chr2 60495557 60495576 60495560 -
gcaaaccagactagtttata

SEQ ID NO: 179427 - DNA, 20 bp, Artificial Sequence
  Synthetic oligonucleotide; GGG chr2 60495556 60495575 60495559 -
caaaccagactagtttatag

SEQ ID NO: 179428 - DNA, 20 bp, Artificial Sequence
  Synthetic oligonucleotide; GGG chr2 60495555 60495574 60495558 -
aaaccagactagtttatagg

SEQ ID NO: 179429 - DNA, 20 bp, Artificial Sequence
  Synthetic oligonucleotide; GAG chr2 60495543 60495562 60495546 -
tttatagggggttctactct

SEQ ID NO: 179430 - DNA, 20 bp, Artificial Sequence
  Synthetic oligonucleotide; AGG chr2 60495542 60495561 60495545 -
ttatagggggttctactctg

SEQ ID NO: 179431 - DNA, 20 bp, Artificial Sequence
  Synthetic oligonucleotide; TGG chr2 60495533 60495552 60495536 -
gttctactctgaggtactga

SEQ ID NO: 179432 - DNA, 20 bp, Artificial Sequence
  Synthetic oligonucleotide; TGG chr2 60495526 60495545 60495529 -
tctgaggtactgatggacct

SEQ ID NO: 179433 - DNA, 20 bp, Artificial Sequence
  Synthetic oligonucleotide; GGG chr2 60495525 60495544 60495528 -
ctgaggtactgatggacctt

SEQ ID NO: 179434 - DNA, 20 bp, Artificial Sequence
  Synthetic oligonucleotide; AAG chr2 60495507 60495526 60495510 -
ttgggtgctattcctgtgat

SEQ ID NO: 179435 - DNA, 20 bp, Artificial Sequence
  Synthetic oligonucleotide; AGG chr2 60495506 60495525 60495509 -
tgggtgctattcctgtgata

SEQ ID NO: 179436 - DNA, 20 bp, Artificial Sequence
  Synthetic oligonucleotide; AAG chr2 60495503 60495522 60495506 -
gtgctattcctgtgataagg

SEQ ID NO: 179437 - DNA, 20 bp, Artificial Sequence
  Synthetic oligonucleotide; AGG chr2 60495502 60495521 60495505 -
tgctattcctgtgataagga

SEQ ID NO: 179438 - DNA, 20 bp, Artificial Sequence
  Synthetic oligonucleotide; CAG chr2 60495499 60495518 60495502 -
tattcctgtgataaggaagg

SEQ ID NO: 179439 - DNA, 20 bp, Artificial Sequence
  Synthetic oligonucleotide; TAG chr2 60495495 60495514 60495498 -
cctgtgataaggaaggcagc

SEQ ID NO: 179440 - DNA, 20 bp, Artificial Sequence
  Synthetic oligonucleotide; CAG chr2 60495491 60495510 60495494 -
tgataaggaaggcagctaga

SEQ ID NO: 179441 - DNA, 20 bp, Artificial Sequence
  Synthetic oligonucleotide; AGG chr2 60495490 60495509 60495493 -
gataaggaaggcagctagac

SEQ ID NO: 179442 - DNA, 20 bp, Artificial Sequence
  Synthetic oligonucleotide; TGG chr2 60495484 60495503 60495487 -
gaaggcagctagacaggact

SEQ ID NO: 179443 - DNA, 20 bp, Artificial Sequence
  Synthetic oligonucleotide; GGG chr2 60495483 60495502 60495486 -
aaggcagctagacaggactt

SEQ ID NO: 179444 - DNA, 20 bp, Artificial Sequence
  Synthetic oligonucleotide; GAG chr2 60495481 60495500 60495484 -
ggcagctagacaggacttgg

SEQ ID NO: 179445 - DNA, 20 bp, Artificial Sequence
  Synthetic oligonucleotide; TAG chr2 60495471 60495490 60495474 -
caggacttgggagttatctg

SEQ ID NO: 179446 - DNA, 20 bp, Artificial Sequence
  Synthetic oligonucleotide; GAG chr2 60495467 60495486 60495470 -
acttgggagttatctgtagt

SEQ ID NO: 179447 - DNA, 20 bp, Artificial Sequence
  Synthetic oligonucleotide; TGG chr2 60495463 60495482 60495466 -
gggagttatctgtagtgaga

SEQ ID NO: 179448 - DNA, 20 bp, Artificial Sequence
  Synthetic oligonucleotide; AAG chr2 60495455 60495474 60495458 -
tctgtagtgagatggctgaa

SEQ ID NO: 179449 - DNA, 20 bp, Artificial Sequence
  Synthetic oligonucleotide; CAG chr2 60495447 60495466 60495450 -
gagatggctgaaaagcgata

SEQ ID NO: 179450 - DNA, 20 bp, Artificial Sequence
  Synthetic oligonucleotide; AGG chr2 60495446 60495465 60495449 -
agatggctgaaaagcgatac

SEQ ID NO: 179451 - DNA, 20 bp, Artificial Sequence
  Synthetic oligonucleotide; GGG chr2 60495445 60495464 60495448 -
gatggctgaaaagcgataca

SEQ ID NO: 179452 - DNA, 20 bp, Artificial Sequence
  Synthetic oligonucleotide; TGG chr2 60495441 60495460 60495444 -
gctgaaaagcgatacagggc

SEQ ID NO: 179453 - DNA, 20 bp, Artificial Sequence
  Synthetic oligonucleotide; CAG chr2 60495428 60495447 60495431 -
acagggctggctctatgccc

SEQ ID NO: 179454 - DNA, 20 bp, Artificial Sequence
  Synthetic oligonucleotide; AGG chr2 60495427 60495446 60495430 -
cagggctggctctatgcccc

SEQ ID NO: 179455 - DNA, 20 bp, Artificial Sequence
  Synthetic oligonucleotide; AAG chr2 60495417 60495436 60495420 -
tctatgccccaggtgtgcat

SEQ ID NO: 179456 - DNA, 20 bp, Artificial Sequence
  Synthetic oligonucleotide; AAG chr2 60495413 60495432 60495416 -
tgccccaggtgtgcataagt

SEQ ID NO: 179457 - DNA, 20 bp, Artificial Sequence
  Synthetic oligonucleotide; GAG chr2 60495411 60495430 60495414 -
ccccaggtgtgcataagtaa

SEQ ID NO: 179458 - DNA, 20 bp, Artificial Sequence
  Synthetic oligonucleotide; CAG chr2 60495408 60495427 60495411 -
caggtgtgcataagtaagag

SEQ ID NO: 179459 - DNA, 20 bp, Artificial Sequence
  Synthetic oligonucleotide; TAG chr2 60495404 60495423 60495407 -
tgtgcataagtaagagcaga

SEQ ID NO: 179460 - DNA, 20 bp, Artificial Sequence
  Synthetic oligonucleotide; CAG chr2 60495394 60495413 60495397 -
taagagcagatagctgattc

SEQ ID NO: 179461 - DNA, 20 bp, Artificial Sequence
  Synthetic oligonucleotide; AAG chr2 60495387 60495406 60495390 -
agatagctgattccagtgca

SEQ ID NO: 179462 - DNA, 20 bp, Artificial Sequence
  Synthetic oligonucleotide; CAG chr2 60495378 60495397 60495381 -
attccagtgcaaagtccata

SEQ ID NO: 179463 - DNA, 20 bp, Artificial Sequence
  Synthetic oligonucleotide; AGG chr2 60495377 60495396 60495380 -
ttccagtgcaaagtccatac

SEQ ID NO: 179464 - DNA, 20 bp, Artificial Sequence
  Synthetic oligonucleotide; TAG chr2 60495366 60495385 60495369 -
agtccatacaggtaataaca

SEQ ID NO: 179465 - DNA, 20 bp, Artificial Sequence
  Synthetic oligonucleotide; AGG chr2 60495365 60495384 60495368 -
gtccatacaggtaataacat

SEQ ID NO: 179466 - DNA, 20 bp, Artificial Sequence
  Synthetic oligonucleotide; CAG chr2 60495361 60495380 60495364 -
atacaggtaataacataggc

SEQ ID NO: 179467 - DNA, 20 bp, Artificial Sequence
  Synthetic oligonucleotide; AAG chr2 60495356 60495375 60495359 -
ggtaataacataggccagaa

SEQ ID NO: 179468 - DNA, 20 bp, Artificial Sequence
  Synthetic oligonucleotide; GAG chr2 60495354 60495373 60495357 -
taataacataggccagaaaa

SEQ ID NO: 179469 - DNA, 20 bp, Artificial Sequence
  Synthetic oligonucleotide; TGG chr2 60495348 60495367 60495351 -
cataggccagaaaagagata

SEQ ID NO: 179470 - DNA, 20 bp, Artificial Sequence
  Synthetic oligonucleotide; TAG chr2 60495335 60495354 60495338 -
agagatatggcatctactct

SEQ ID NO: 179471 - DNA, 20 bp, Artificial Sequence
  Synthetic oligonucleotide; CAG chr2 60495321 60495340 60495324 -
tactcttagacataacacac

SEQ ID NO: 179472 - DNA, 20 bp, Artificial Sequence
  Synthetic oligonucleotide; AGG chr2 60495320 60495339 60495323 -
actcttagacataacacacc

SEQ ID NO: 179473 - DNA, 20 bp, Artificial Sequence
  Synthetic oligonucleotide; GGG chr2 60495319 60495338 60495322 -
ctcttagacataacacacca

SEQ ID NO: 179474 - DNA, 20 bp, Artificial Sequence
  Synthetic oligonucleotide; AAG chr2 60495302 60495321 60495305 -
ccagggtcaatacaactttg

SEQ ID NO: 179475 - DNA, 20 bp, Artificial Sequence
  Synthetic oligonucleotide; TAG chr2 60495298 60495317 60495301 -
ggtcaatacaactttgaagc

SEQ ID NO: 179476 - DNA, 20 bp, Artificial Sequence
  Synthetic oligonucleotide; TAG chr2 60495293 60495312 60495296 -
atacaactttgaagctagtc

SEQ ID NO: 179477 - DNA, 20 bp, Artificial Sequence
  Synthetic oligonucleotide; AAG chr2 60495287 60495306 60495290 -
ctttgaagctagtctagtgc

SEQ ID NO: 179478 - DNA, 20 bp, Artificial Sequence
  Synthetic oligonucleotide; CAG chr2 60495280 60495299 60495283 -
gctagtctagtgcaagctaa

SEQ ID NO: 179479 - DNA, 20 bp, Artificial Sequence
  Synthetic oligonucleotide; CAG chr2 60495265 60495284 60495268 -
gctaacagttgcttttatca

SEQ ID NO: 179480 - DNA, 20 bp, Artificial Sequence
  Synthetic oligonucleotide; AGG chr2 60495264 60495283 60495267 -
ctaacagttgcttttatcac

SEQ ID NO: 179481 - DNA, 20 bp, Artificial Sequence
  Synthetic oligonucleotide; CAG chr2 60495258 60495277 60495261 -
gttgcttttatcacaggctc

SEQ ID NO: 179482 - DNA, 20 bp, Artificial Sequence
  Synthetic oligonucleotide; AGG chr2 60495257 60495276 60495260 -
ttgcttttatcacaggctcc

SEQ ID NO: 179483 - DNA, 20 bp, Artificial Sequence
  Synthetic oligonucleotide; AAG chr2 60495254 60495273 60495257 -
cttttatcacaggctccagg

SEQ ID NO: 179484 - DNA, 20 bp, Artificial Sequence
  Synthetic oligonucleotide; AGG chr2 60495253 60495272 60495256 -
ttttatcacaggctccagga

SEQ ID NO: 179485 - DNA, 20 bp, Artificial Sequence
  Synthetic oligonucleotide; GGG chr2 60495252 60495271 60495255 -
tttatcacaggctccaggaa

SEQ ID NO: 179486 - DNA, 20 bp, Artificial Sequence
  Synthetic oligonucleotide; TGG chr2 60495247 60495266 60495250 -
cacaggctccaggaagggtt

SEQ ID NO: 179487 - DNA, 20 bp, Artificial Sequence
  Synthetic oligonucleotide; TAG chr2 60495236 60495255 60495239 -
ggaagggtttggcctctgat

SEQ ID NO: 179488 - DNA, 20 bp, Artificial Sequence
  Synthetic oligonucleotide; AGG chr2 60495235 60495254 60495238 -
gaagggtttggcctctgatt

SEQ ID NO: 179489 - DNA, 20 bp, Artificial Sequence
  Synthetic oligonucleotide; GGG chr2 60495234 60495253 60495237 -
aagggtttggcctctgatta

SEQ ID NO: 179490 - DNA, 20 bp, Artificial Sequence
  Synthetic oligonucleotide; TGG chr2 60495231 60495250 60495234 -
ggtttggcctctgattaggg

SEQ ID NO: 179491 - DNA, 20 bp, Artificial Sequence
  Synthetic oligonucleotide; GGG chr2 60495230 60495249 60495233 -
gtttggcctctgattagggt

SEQ ID NO: 179492 - DNA, 20 bp, Artificial Sequence
  Synthetic oligonucleotide; GGG chr2 60495229 60495248 60495232 -
tttggcctctgattagggtg

SEQ ID NO: 179493 - DNA, 20 bp, Artificial Sequence
  Synthetic oligonucleotide; GGG chr2 60495228 60495247 60495231 -
ttggcctctgattagggtgg

SEQ ID NO: 179494 - DNA, 20 bp, Artificial Sequence
  Synthetic oligonucleotide; TGG chr2 60495223 60495242 60495226 -
ctctgattagggtgggggcg

SEQ ID NO: 179495 - DNA, 20 bp, Artificial Sequence
  Synthetic oligonucleotide; GGG chr2 60495222 60495241 60495225 -
tctgattagggtgggggcgt

SEQ ID NO: 179496 - DNA, 20 bp, Artificial Sequence
  Synthetic oligonucleotide; TGG chr2 60495219 60495238 60495222 -
gattagggtgggggcgtggg

SEQ ID NO: 179497 - DNA, 20 bp, Artificial Sequence
  Synthetic oligonucleotide; GGG chr2 60495218 60495237 60495221 -
attagggtgggggcgtgggt

SEQ ID NO: 179498 - DNA, 20 bp, Artificial Sequence
  Synthetic oligonucleotide; GGG chr2 60495217 60495236 60495220 -
ttagggtgggggcgtgggtg

SEQ ID NO: 179499 - DNA, 20 bp, Artificial Sequence
  Synthetic oligonucleotide; TAG chr2 60495214 60495233 60495217 -
gggtgggggcgtgggtgggg

SEQ ID NO: 179500 - DNA, 20 bp, Artificial Sequence
  Synthetic oligonucleotide; AAG chr2 60495211 60495230 60495214 -
tgggggcgtgggtggggtag

SEQ ID NO: 179501 - DNA, 20 bp, Artificial Sequence
  Synthetic oligonucleotide; GAG chr2 60495209 60495228 60495212 -
ggggcgtgggtggggtagaa

SEQ ID NO: 179502 - DNA, 20 bp, Artificial Sequence
  Synthetic oligonucleotide; AGG chr2 60495208 60495227 60495211 -
gggcgtgggtggggtagaag

SEQ ID NO: 179503 - DNA, 20 bp, Artificial Sequence
  Synthetic oligonucleotide; TGG chr2 60495203 60495222 60495206 -
tgggtggggtagaagaggac

SEQ ID NO: 179504 - DNA, 20 bp, Artificial Sequence
  Synthetic oligonucleotide; CAG chr2 60495200 60495219 60495203 -
gtggggtagaagaggactgg

SEQ ID NO: 179505 - DNA, 20 bp, Artificial Sequence
  Synthetic oligonucleotide; CGG chr2 60495187 60495206 60495190 -
ggactggcagacctctccat

SEQ ID NO: 179506 - DNA, 20 bp, Artificial Sequence
  Synthetic oligonucleotide; TGG chr2 60495184 60495203 60495187 -
ctggcagacctctccatcgg

SEQ ID NO: 179507 - DNA, 20 bp, Artificial Sequence
  Synthetic oligonucleotide; CAG chr2 60495172 60495191 60495175 -
tccatcggtggccgtttgcc

SEQ ID NO: 179508 - DNA, 20 bp, Artificial Sequence
  Synthetic oligonucleotide; AGG chr2 60495171 60495190 60495174 -
ccatcggtggccgtttgccc

SEQ ID NO: 179509 - DNA, 20 bp, Artificial Sequence
  Synthetic oligonucleotide; GGG chr2 60495170 60495189 60495173 -
catcggtggccgtttgccca

SEQ ID NO: 179510 - DNA, 20 bp, Artificial Sequence
  Synthetic oligonucleotide; GGG chr2 60495169 60495188 60495172 -
atcggtggccgtttgcccag

SEQ ID NO: 179511 - DNA, 20 bp, Artificial Sequence
  Synthetic oligonucleotide; GGG chr2 60495168 60495187 60495171 -
tcggtggccgtttgcccagg

SEQ ID NO: 179512 - DNA, 20 bp, Artificial Sequence
  Synthetic oligonucleotide; GGG chr2 60495167 60495186 60495170 -
cggtggccgtttgcccaggg

SEQ ID NO: 179513 - DNA, 20 bp, Artificial Sequence
  Synthetic oligonucleotide; CGG chr2 60495157 60495176 60495160 -
ttgcccaggggggcctcttt

SEQ ID NO: 179514 - DNA, 20 bp, Artificial Sequence
  Synthetic oligonucleotide; AAG chr2 60495154 60495173 60495157 -
cccaggggggcctctttcgg

SEQ ID NO: 179515 - DNA, 20 bp, Artificial Sequence
  Synthetic oligonucleotide; AGG chr2 60495153 60495172 60495156 -
ccaggggggcctctttcgga

SEQ ID NO: 179516 - DNA, 20 bp, Artificial Sequence
  Synthetic oligonucleotide; TGG chr2 60495144 60495163 60495147 -
cctctttcggaaggctctct

SEQ ID NO: 179517 - DNA, 20 bp, Artificial Sequence
  Synthetic oligonucleotide; TGG chr2 60495138 60495157 60495141 -
tcggaaggctctcttggtga

SEQ ID NO: 179518 - DNA, 20 bp, Artificial Sequence
  Synthetic oligonucleotide; GAG chr2 60495136 60495155 60495139 -
ggaaggctctcttggtgatg

SEQ ID NO: 179519 - DNA, 20 bp, Artificial Sequence
  Synthetic oligonucleotide; TGG chr2 60495130 60495149 60495133 -
ctctcttggtgatggagaat

SEQ ID NO: 179520 - DNA, 20 bp, Artificial Sequence
  Synthetic oligonucleotide; TGG chr2 60495113 60495132 60495116 -
aattggattttatttctcaa

SEQ ID NO: 179521 - DNA, 20 bp, Artificial Sequence
  Synthetic oligonucleotide; GGG chr2 60495112 60495131 60495115 -
attggattttatttctcaat

SEQ ID NO: 179522 - DNA, 20 bp, Artificial Sequence
  Synthetic oligonucleotide; TGG chr2 60495081 60495100 60495084 -
aatttgtatgccatgccgtg

SEQ ID NO: 179523 - DNA, 20 bp, Artificial Sequence
  Synthetic oligonucleotide; AAG chr2 60495063 60495082 60495066 -
tgtggactcccaaaattgta

SEQ ID NO: 179524 - DNA, 20 bp, Artificial Sequence
  Synthetic oligonucleotide; AGG chr2 60495062 60495081 60495065 -
gtggactcccaaaattgtaa

SEQ ID NO: 179525 - DNA, 20 bp, Artificial Sequence
  Synthetic oligonucleotide; GAG chr2 60495060 60495079 60495063 -
ggactcccaaaattgtaaag

SEQ ID NO: 179526 - DNA, 20 bp, Artificial Sequence
  Synthetic oligonucleotide; AGG chr2 60495059 60495078 60495062 -
gactcccaaaattgtaaagg

SEQ ID NO: 179527 - DNA, 20 bp, Artificial Sequence
  Synthetic oligonucleotide; AAG chr2 60495054 60495073 60495057 -
ccaaaattgtaaaggaggtg

SEQ ID NO: 179528 - DNA, 20 bp, Artificial Sequence
  Synthetic oligonucleotide; CGG chr2 60495000 60495019 60495003 -
attgtccatttttcatctgt

SEQ ID NO: 179529 - DNA, 20 bp, Artificial Sequence
  Synthetic oligonucleotide; GGG chr2 60494999 60495018 60495002 -
ttgtccatttttcatctgtc

SEQ ID NO: 179530 - DNA, 20 bp, Artificial Sequence
  Synthetic oligonucleotide; TAG chr2 60494974 60494993 60494977 -
gtccacccatccatcacata

SEQ ID NO: 179531 - DNA, 20 bp, Artificial Sequence
  Synthetic oligonucleotide; AGG chr2 60494973 60494992 60494976 -
tccacccatccatcacatat

SEQ ID NO: 179532 - DNA, 20 bp, Artificial Sequence
  Synthetic oligonucleotide; CAG chr2 60494963 60494982 60494966 -
catcacatataggcacctat

SEQ ID NO: 179533 - DNA, 20 bp, Artificial Sequence
  Synthetic oligonucleotide; AGG chr2 60494962 60494981 60494965 -
atcacatataggcacctatc

SEQ ID NO: 179534 - DNA, 20 bp, Artificial Sequence
  Synthetic oligonucleotide; CAG chr2 60494956 60494975 60494959 -
tataggcacctatcaggtac

SEQ ID NO: 179535 - DNA, 20 bp, Artificial Sequence
  Synthetic oligonucleotide; TAG chr2 60494944 60494963 60494947 -
tcaggtaccagctactgtgt

SEQ ID NO: 179536 - DNA, 20 bp, Artificial Sequence
  Synthetic oligonucleotide; AGG chr2 60494943 60494962 60494946 -
caggtaccagctactgtgtt

SEQ ID NO: 179537 - DNA, 20 bp, Artificial Sequence
  Synthetic oligonucleotide; TAG chr2 60494853 60494872 60494856 -
ccttttcttctgacccaaac

SEQ ID NO: 179538 - DNA, 20 bp, Artificial Sequence
  Synthetic oligonucleotide; AGG chr2 60494852 60494871 60494855 -
cttttcttctgacccaaact

SEQ ID NO: 179539 - DNA, 20 bp, Artificial Sequence
  Synthetic oligonucleotide; TGG chr2 60494846 60494865 60494849 -
ttctgacccaaactaggaat

SEQ ID NO: 179540 - DNA, 20 bp, Artificial Sequence
  Synthetic oligonucleotide; GGG chr2 60494845 60494864 60494848 -
tctgacccaaactaggaatt

SEQ ID NO: 179541 - DNA, 20 bp, Artificial Sequence
  Synthetic oligonucleotide; GGG chr2 60494844 60494863 60494847 -
ctgacccaaactaggaattg

SEQ ID NO: 179542 - DNA, 20 bp, Artificial Sequence
  Synthetic oligonucleotide; AAG chr2 60494840 60494859 60494843 -
cccaaactaggaattgggga

SEQ ID NO: 179543 - DNA, 20 bp, Artificial Sequence
  Synthetic oligonucleotide; AGG chr2 60494839 60494858 60494842 -
ccaaactaggaattggggaa

SEQ ID NO: 179544 - DNA, 20 bp, Artificial Sequence
  Synthetic oligonucleotide; GGG chr2 60494838 60494857 60494841 -
caaactaggaattggggaaa

SEQ ID NO: 179545 - DNA, 20 bp, Artificial Sequence
  Synthetic oligonucleotide; GAG chr2 60494814 60494833 60494817 -
ctgataactttgtttctgct

SEQ ID NO: 179546 - DNA, 20 bp, Artificial Sequence
  Synthetic oligonucleotide; AGG chr2 60494813 60494832 60494816 -
tgataactttgtttctgctg

SEQ ID NO: 179547 - DNA, 20 bp, Artificial Sequence
  Synthetic oligonucleotide; CAG chr2 60494794 60494813 60494797 -
gaggtgtaactaataaatac

SEQ ID NO: 179548 - DNA, 20 bp, Artificial Sequence
  Synthetic oligonucleotide; AGG chr2 60494793 60494812 60494796 -
aggtgtaactaataaatacc

SEQ ID NO: 179549 - DNA, 20 bp, Artificial Sequence
  Synthetic oligonucleotide; GAG chr2 60494791 60494810 60494794 -
gtgtaactaataaataccag

SEQ ID NO: 179550 - DNA, 20 bp, Artificial Sequence
  Synthetic oligonucleotide; AGG chr2 60494790 60494809 60494793 -
tgtaactaataaataccagg

SEQ ID NO: 179551 - DNA, 20 bp, Artificial Sequence
  Synthetic oligonucleotide; CAG chr2 60494787 60494806 60494790 -
aactaataaataccaggagg

SEQ ID NO: 179552 - DNA, 20 bp, Artificial Sequence
  Synthetic oligonucleotide; TAG chr2 60494779 60494798 60494782 -
aataccaggaggcagcattt

SEQ ID NO: 179553 - DNA, 20 bp, Artificial Sequence
  Synthetic oligonucleotide; AAG chr2 60494771 60494790 60494774 -
gaggcagcattttagttcac

SEQ ID NO: 179554 - DNA, 20 bp, Artificial Sequence
  Synthetic oligonucleotide; CGG chr2 60494766 60494785 60494769 -
agcattttagttcacaagct

SEQ ID NO: 179555 - DNA, 20 bp, Artificial Sequence
  Synthetic oligonucleotide; GAG chr2 60494764 60494783 60494767 -
cattttagttcacaagctcg

SEQ ID NO: 179556 - DNA, 20 bp, Artificial Sequence
  Synthetic oligonucleotide; TAG chr2 60494747 60494766 60494750 -
tcggagcacttactctgctc

SEQ ID NO: 179557 - DNA, 20 bp, Artificial Sequence
  Synthetic oligonucleotide; AGG chr2 60494746 60494765 60494749 -
cggagcacttactctgctct

SEQ ID NO: 179558 - DNA, 20 bp, Artificial Sequence
  Synthetic oligonucleotide; AAG chr2 60494698 60494717 60494701 -
attttcatacaaaccctatg

SEQ ID NO: 179559 - DNA, 20 bp, Artificial Sequence
  Synthetic oligonucleotide; CGG chr2 60494669 60494688 60494672 -
ctattattattcctatttta

SEQ ID NO: 179560 - DNA, 20 bp, Artificial Sequence
  Synthetic oligonucleotide; GAG chr2 60494664 60494683 60494667 -
attattcctattttacggat

SEQ ID NO: 179561 - DNA, 20 bp, Artificial Sequence
  Synthetic oligonucleotide; CAG chr2 60494645 60494664 60494648 -
tgagtccatattttaaattc

SEQ ID NO: 179562 - DNA, 20 bp, Artificial Sequence
  Synthetic oligonucleotide; AAG chr2 60494639 60494658 60494642 -
catattttaaattccagctg

SEQ ID NO: 179563 - DNA, 20 bp, Artificial Sequence
  Synthetic oligonucleotide; AAG chr2 60494635 60494654 60494638 -
ttttaaattccagctgaaga

SEQ ID NO: 179564 - DNA, 20 bp, Artificial Sequence
  Synthetic oligonucleotide; TGG chr2 60494626 60494645 60494629 -
ccagctgaagaaagaacatt

SEQ ID NO: 179565 - DNA, 20 bp, Artificial Sequence
  Synthetic oligonucleotide; TAG chr2 60494612 60494631 60494615 -
aacatttggtgataaatcat

SEQ ID NO: 179566 - DNA, 20 bp, Artificial Sequence
  Synthetic oligonucleotide; AGG chr2 60494611 60494630 60494614 -
acatttggtgataaatcatt

SEQ ID NO: 179567 - DNA, 20 bp, Artificial Sequence
  Synthetic oligonucleotide; GAG chr2 60494605 60494624 60494608 -
ggtgataaatcattaggaat

SEQ ID NO: 179568 - DNA, 20 bp, Artificial Sequence
  Synthetic oligonucleotide; TAG chr2 60494601 60494620 60494604 -
ataaatcattaggaatgagc

SEQ ID NO: 179569 - DNA, 20 bp, Artificial Sequence
  Synthetic oligonucleotide; AGG chr2 60494600 60494619 60494603 -
taaatcattaggaatgagct

SEQ ID NO: 179570 - DNA, 20 bp, Artificial Sequence
  Synthetic oligonucleotide; GAG chr2 60494598 60494617 60494601 -
aatcattaggaatgagctag

SEQ ID NO: 179571 - DNA, 20 bp, Artificial Sequence
  Synthetic oligonucleotide; CAG chr2 60494582 60494601 60494585 -
ctaggagttatttgtcatca

SEQ ID NO: 179572 - DNA, 20 bp, Artificial Sequence
  Synthetic oligonucleotide; CAG chr2 60494576 60494595 60494579 -
gttatttgtcatcacagaac

SEQ ID NO: 179573 - DNA, 20 bp, Artificial Sequence
  Synthetic oligonucleotide; AAG chr2 60494560 60494579 60494563 -
gaaccagtctgtattgcccc

SEQ ID NO: 179574 - DNA, 20 bp, Artificial Sequence
  Synthetic oligonucleotide; TGG chr2 60494555 60494574 60494558 -
agtctgtattgccccaagtc

SEQ ID NO: 179575 - DNA, 20 bp, Artificial Sequence
  Synthetic oligonucleotide; TGG chr2 60494542 60494561 60494545 -
ccaagtctggctttgccaat

SEQ ID NO: 179576 - DNA, 20 bp, Artificial Sequence
  Synthetic oligonucleotide; GAG chr2 60494540 60494559 60494543 -
aagtctggctttgccaattg

SEQ ID NO: 179577 - DNA, 20 bp, Artificial Sequence
  Synthetic oligonucleotide; TAG chr2 60494535 60494554 60494538 -
tggctttgccaattggagat

SEQ ID NO: 179578 - DNA, 20 bp, Artificial Sequence
  Synthetic oligonucleotide; AGG chr2 60494534 60494553 60494537 -
ggctttgccaattggagatt

SEQ ID NO: 179579 - DNA, 20 bp, Artificial Sequence
  Synthetic oligonucleotide; GGG chr2 60494533 60494552 60494536 -
gctttgccaattggagatta

SEQ ID NO: 179580 - DNA, 20 bp, Artificial Sequence
  Synthetic oligonucleotide; GAG chr2 60494531 60494550 60494534 -
tttgccaattggagattagg

SEQ ID NO: 179581 - DNA, 20 bp, Artificial Sequence
  Synthetic oligonucleotide; TGG chr2 60494527 60494546 60494530 -
ccaattggagattagggaga

SEQ ID NO: 179582 - DNA, 20 bp, Artificial Sequence
  Synthetic oligonucleotide; GAG chr2 60494485 60494504 60494488 -
ctttgatatctcatctcact

SEQ ID NO: 179583 - DNA, 20 bp, Artificial Sequence
  Synthetic oligonucleotide; TGG chr2 60494479 60494498 60494482 -
tatctcatctcactgagctc

SEQ ID NO: 179584 - DNA, 20 bp, Artificial Sequence
  Synthetic oligonucleotide; GGG chr2 60494478 60494497 60494481 -
atctcatctcactgagctct

SEQ ID NO: 179585 - DNA, 20 bp, Artificial Sequence
  Synthetic oligonucleotide; TGG chr2 60494441 60494460 60494444 -
ctctccccatactcccatct

SEQ ID NO: 179586 - DNA, 20 bp, Artificial Sequence
  Synthetic oligonucleotide; AAG chr2 60494426 60494445 60494429 -
catcttggcaaaaattgcat

SEQ ID NO: 179587 - DNA, 20 bp, Artificial Sequence
  Synthetic oligonucleotide; AAG chr2 60494417 60494436 60494420 -
aaaaattgcataagatttat

SEQ ID NO: 179588 - DNA, 20 bp, Artificial Sequence
  Synthetic oligonucleotide; TAG chr2 60494410 60494429 60494413 -
gcataagatttataagacat

SEQ ID NO: 179589 - DNA, 20 bp, Artificial Sequence
  Synthetic oligonucleotide; AGG chr2 60494409 60494428 60494412 -
cataagatttataagacatt

SEQ ID NO: 179590 - DNA, 20 bp, Artificial Sequence
  Synthetic oligonucleotide; GGG chr2 60494408 60494427 60494411 -
ataagatttataagacatta

SEQ ID NO: 179591 - DNA, 20 bp, Artificial Sequence
  Synthetic oligonucleotide; TGG chr2 60494402 60494421 60494405 -
tttataagacattagggtat

SEQ ID NO: 179592 - DNA, 20 bp, Artificial Sequence
  Synthetic oligonucleotide; GAG chr2 60494400 60494419 60494403 -
tataagacattagggtattg

SEQ ID NO: 179593 - DNA, 20 bp, Artificial Sequence
  Synthetic oligonucleotide; CAG chr2 60494371 60494390 60494374 -
tattacaacctccttgttta

SEQ ID NO: 179594 - DNA, 20 bp, Artificial Sequence
  Synthetic oligonucleotide; GAG chr2 60494369 60494388 60494372 -
ttacaacctccttgtttaca

SEQ ID NO: 179595 - DNA, 20 bp, Artificial Sequence
  Synthetic oligonucleotide; AGG chr2 60494368 60494387 60494371 -
tacaacctccttgtttacag

SEQ ID NO: 179596 - DNA, 20 bp, Artificial Sequence
  Synthetic oligonucleotide; GGG chr2 60494367 60494386 60494370 -
acaacctccttgtttacaga

SEQ ID NO: 179597 - DNA, 20 bp, Artificial Sequence
  Synthetic oligonucleotide; GGG chr2 60494366 60494385 60494369 -
caacctccttgtttacagag

SEQ ID NO: 179598 - DNA, 20 bp, Artificial Sequence
  Synthetic oligonucleotide; CAG chr2 60494358 60494377 60494361 -
ttgtttacagaggggcaacc

SEQ ID NO: 179599 - DNA, 20 bp, Artificial Sequence
  Synthetic oligonucleotide; AGG chr2 60494357 60494376 60494360 -
tgtttacagaggggcaaccc

SEQ ID NO: 179600 - DNA, 20 bp, Artificial Sequence
  Synthetic oligonucleotide; CAG chr2 60494352 60494371 60494355 -
acagaggggcaacccaggtc

SEQ ID NO: 179601 - DNA, 20 bp, Artificial Sequence
  Synthetic oligonucleotide; GAG chr2 60494350 60494369 60494353 -
agaggggcaacccaggtcca

SEQ ID NO: 179602 - DNA, 20 bp, Artificial Sequence
  Synthetic oligonucleotide; TGG chr2 60494347 60494366 60494350 -
ggggcaacccaggtccagag

SEQ ID NO: 179603 - DNA, 20 bp, Artificial Sequence
  Synthetic oligonucleotide; GGG chr2 60494346 60494365 60494349 -
gggcaacccaggtccagagt

SEQ ID NO: 179604 - DNA, 20 bp, Artificial Sequence
  Synthetic oligonucleotide; GGG chr2 60494345 60494364 60494348 -
ggcaacccaggtccagagtg

SEQ ID NO: 179605 - DNA, 20 bp, Artificial Sequence
  Synthetic oligonucleotide; GAG chr2 60494343 60494362 60494346 -
caacccaggtccagagtggg

SEQ ID NO: 179606 - DNA, 20 bp, Artificial Sequence
  Synthetic oligonucleotide; AGG chr2 60494342 60494361 60494345 -
aacccaggtccagagtgggg

SEQ ID NO: 179607 - DNA, 20 bp, Artificial Sequence
  Synthetic oligonucleotide; CAG chr2 60494335 60494354 60494338 -
gtccagagtggggaggtgac

SEQ ID NO: 179608 - DNA, 20 bp, Artificial Sequence
  Synthetic oligonucleotide; AGG chr2 60494334 60494353 60494337 -
tccagagtggggaggtgacc

SEQ ID NO: 179609 - DNA, 20 bp, Artificial Sequence
  Synthetic oligonucleotide; TGG chr2 60494328 60494347 60494331 -
gtggggaggtgaccaggcca

SEQ ID NO: 179610 - DNA, 20 bp, Artificial Sequence
  Synthetic oligonucleotide; CAG chr2 60494317 60494336 60494320 -
accaggccatggtcactgcc

SEQ ID NO: 179611 - DNA, 20 bp, Artificial Sequence
  Synthetic oligonucleotide; TAG chr2 60494312 60494331 60494315 -
gccatggtcactgcccagtt

SEQ ID NO: 179612 - DNA, 20 bp, Artificial Sequence
  Synthetic oligonucleotide; GAG chr2 60494310 60494329 60494313 -
catggtcactgcccagttta

SEQ ID NO: 179613 - DNA, 20 bp, Artificial Sequence
  Synthetic oligonucleotide; AGG chr2 60494309 60494328 60494312 -
atggtcactgcccagtttag

SEQ ID NO: 179614 - DNA, 20 bp, Artificial Sequence
  Synthetic oligonucleotide; CAG chr2 60494299 60494318 60494302 -
cccagtttagaggccatgca

SEQ ID NO: 179615 - DNA, 20 bp, Artificial Sequence
  Synthetic oligonucleotide; GAG chr2 60494294 60494313 60494297 -
tttagaggccatgcacagat

SEQ ID NO: 179616 - DNA, 20 bp, Artificial Sequence
  Synthetic oligonucleotide; AAG chr2 60494291 60494310 60494294 -
agaggccatgcacagatgag

SEQ ID NO: 179617 - DNA, 20 bp, Artificial Sequence
  Synthetic oligonucleotide; CAG chr2 60494279 60494298 60494282 -
cagatgagaagccaaactcc

SEQ ID NO: 179618 - DNA, 20 bp, Artificial Sequence
  Synthetic oligonucleotide; CAG chr2 60494272 60494291 60494275 -
gaagccaaactcccagctcc

SEQ ID NO: 179619 - DNA, 20 bp, Artificial Sequence
  Synthetic oligonucleotide; TGG chr2 60494245 60494264 60494248 -
cgtcttcccactctcccatg

SEQ ID NO: 179620 - DNA, 20 bp, Artificial Sequence
  Synthetic oligonucleotide; CAG chr2 60494237 60494256 60494240 -
cactctcccatgtggcctgt

SEQ ID NO: 179621 - DNA, 20 bp, Artificial Sequence
  Synthetic oligonucleotide; TAG chr2 60494211 60494230 60494214 -
caccctctctcactcttgct

SEQ ID NO: 179622 - DNA, 20 bp, Artificial Sequence
  Synthetic oligonucleotide; TAG chr2 60494202 60494221 60494205 -
tcactcttgcttagcctgtg

SEQ ID NO: 179623 - DNA, 20 bp, Artificial Sequence
  Synthetic oligonucleotide; AAG chr2 60494196 60494215 60494199 -
ttgcttagcctgtgtagctc

SEQ ID NO: 179624 - DNA, 20 bp, Artificial Sequence
  Synthetic oligonucleotide; AGG chr2 60494195 60494214 60494198 -
tgcttagcctgtgtagctca

SEQ ID NO: 179625 - DNA, 20 bp, Artificial Sequence
  Synthetic oligonucleotide; TAG chr2 60494177 60494196 60494180 -
caaggatgtatttattgccc

SEQ ID NO: 179626 - DNA, 20 bp, Artificial Sequence
  Synthetic oligonucleotide; AGG chr2 60494176 60494195 60494179 -
aaggatgtatttattgccct

SEQ ID NO: 179627 - DNA, 20 bp, Artificial Sequence
  Synthetic oligonucleotide; AAG chr2 60494170 60494189 60494173 -
gtatttattgccctaggcgt

SEQ ID NO: 179628 - DNA, 20 bp, Artificial Sequence
  Synthetic oligonucleotide; CAG chr2 60494159 60494178 60494162 -
cctaggcgtaagaatgtgct

SEQ ID NO: 179629 - DNA, 20 bp, Artificial Sequence
  Synthetic oligonucleotide; AGG chr2 60494158 60494177 60494161 -
ctaggcgtaagaatgtgctc

SEQ ID NO: 179630 - DNA, 20 bp, Artificial Sequence
  Synthetic oligonucleotide; AAG chr2 60494149 60494168 60494152 -
agaatgtgctcaggtttctt

SEQ ID NO: 179631 - DNA, 20 bp, Artificial Sequence
  Synthetic oligonucleotide; TAG chr2 60494141 60494160 60494144 -
ctcaggtttcttaagtaatg

SEQ ID NO: 179632 - DNA, 20 bp, Artificial Sequence
  Synthetic oligonucleotide; AGG chr2 60494140 60494159 60494143 -
tcaggtttcttaagtaatgt

SEQ ID NO: 179633 - DNA, 20 bp, Artificial Sequence
  Synthetic oligonucleotide; TGG chr2 60494124 60494143 60494127 -
atgtaggtgtgcctcaccca

SEQ ID NO: 179634 - DNA, 20 bp, Artificial Sequence
  Synthetic oligonucleotide; GGG chr2 60494123 60494142 60494126 -
tgtaggtgtgcctcacccat

SEQ ID NO: 179635 - DNA, 20 bp, Artificial Sequence
  Synthetic oligonucleotide; GGG chr2 60494122 60494141 60494125 -
gtaggtgtgcctcacccatg

SEQ ID NO: 179636 - DNA, 20 bp, Artificial Sequence
  Synthetic oligonucleotide; CAG chr2 60494095 60494114 60494098 -
actttctctctgtttattgc

SEQ ID NO: 179637 - DNA, 20 bp, Artificial Sequence
  Synthetic oligonucleotide; TAG chr2 60494092 60494111 60494095 -
ttctctctgtttattgccag

SEQ ID NO: 179638 - DNA, 20 bp, Artificial Sequence
  Synthetic oligonucleotide; TGG chr2 60494089 60494108 60494092 -
tctctgtttattgccagtag

SEQ ID NO: 179639 - DNA, 20 bp, Artificial Sequence
  Synthetic oligonucleotide; CAG chr2 60494068 60494087 60494071 -
ggtctctgttctgttttctt

SEQ ID NO: 179640 - DNA, 20 bp, Artificial Sequence
  Synthetic oligonucleotide; AAG chr2 60494041 60494060 60494044 -
tcccccttgcattgttgtct

SEQ ID NO: 179641 - DNA, 20 bp, Artificial Sequence
  Synthetic oligonucleotide; TGG chr2 60494037 60494056 60494040 -
ccttgcattgttgtctaaga

SEQ ID NO: 179642 - DNA, 20 bp, Artificial Sequence
  Synthetic oligonucleotide; CAG chr2 60493983 60494002 60493986 -
tccccgtaccttcctttaat

SEQ ID NO: 179643 - DNA, 20 bp, Artificial Sequence
  Synthetic oligonucleotide; GAG chr2 60493965 60493984 60493968 -
atcagcttccgccactgcct

SEQ ID NO: 179644 - DNA, 20 bp, Artificial Sequence
  Synthetic oligonucleotide; AGG chr2 60493964 60493983 60493967 -
tcagcttccgccactgcctg

SEQ ID NO: 179645 - DNA, 20 bp, Artificial Sequence
  Synthetic oligonucleotide; CAG chr2 60493956 60493975 60493959 -
cgccactgcctgaggccact

SEQ ID NO: 179646 - DNA, 20 bp, Artificial Sequence
  Synthetic oligonucleotide; TGG chr2 60493950 60493969 60493953 -
tgcctgaggccactcagctc

SEQ ID NO: 179647 - DNA, 20 bp, Artificial Sequence
  Synthetic oligonucleotide; TGG chr2 60493941 60493960 60493944 -
ccactcagctctggtcccac

SEQ ID NO: 179648 - DNA, 20 bp, Artificial Sequence
  Synthetic oligonucleotide; GAG chr2 60493939 60493958 60493942 -
actcagctctggtcccactg

SEQ ID NO: 179649 - DNA, 20 bp, Artificial Sequence
  Synthetic oligonucleotide; AGG chr2 60493938 60493957 60493941 -
ctcagctctggtcccactgg

SEQ ID NO: 179650 - DNA, 20 bp, Artificial Sequence
  Synthetic oligonucleotide; CAG chr2 60493923 60493942 60493926 -
actggaggccctgtctcccc

SEQ ID NO: 179651 - DNA, 20 bp, Artificial Sequence
  Synthetic oligonucleotide; AGG chr2 60493922 60493941 60493925 -
ctggaggccctgtctccccc

SEQ ID NO: 179652 - DNA, 20 bp, Artificial Sequence
  Synthetic oligonucleotide; GGG chr2 60493921 60493940 60493924 -
tggaggccctgtctccccca

SEQ ID NO: 179653 - DNA, 20 bp, Artificial Sequence
  Synthetic oligonucleotide; GGG chr2 60493920 60493939 60493923 -
ggaggccctgtctcccccag

SEQ ID NO: 179654 - DNA, 20 bp, Artificial Sequence
  Synthetic oligonucleotide; CAG chr2 60493886 60493905 60493889 -
cctgttcacctctgatcccc

SEQ ID NO: 179655 - DNA, 20 bp, Artificial Sequence
  Synthetic oligonucleotide; TGG chr2 60493875 60493894 60493878 -
ctgatcccccagccctgcca

SEQ ID NO: 179656 - DNA, 20 bp, Artificial Sequence
  Synthetic oligonucleotide; AAG chr2 60493870 60493889 60493873 -
cccccagccctgccatggcc

SEQ ID NO: 179657 - DNA, 20 bp, Artificial Sequence
  Synthetic oligonucleotide; GAG chr2 60493862 60493881 60493865 -
cctgccatggccaagctgat

SEQ ID NO: 179658 - DNA, 20 bp, Artificial Sequence
  Synthetic oligonucleotide; AGG chr2 60493861 60493880 60493864 -
ctgccatggccaagctgatg

SEQ ID NO: 179659 - DNA, 20 bp, Artificial Sequence
  Synthetic oligonucleotide; TGG chr2 60493857 60493876 60493860 -
catggccaagctgatgagga

SEQ ID NO: 179660 - DNA, 20 bp, Artificial Sequence
  Synthetic oligonucleotide; GGG chr2 60493856 60493875 60493859 -
atggccaagctgatgaggat

SEQ ID NO: 179661 - DNA, 20 bp, Artificial Sequence
  Synthetic oligonucleotide; GGG chr2 60493855 60493874 60493858 -
tggccaagctgatgaggatg

SEQ ID NO: 179662 - DNA, 20 bp, Artificial Sequence
  Synthetic oligonucleotide; GGG chr2 60493854 60493873 60493857 -
ggccaagctgatgaggatgg

SEQ ID NO: 179663 - DNA, 20 bp, Artificial Sequence
  Synthetic oligonucleotide; GAG chr2 60493852 60493871 60493855 -
ccaagctgatgaggatgggg

SEQ ID NO: 179664 - DNA, 20 bp, Artificial Sequence
  Synthetic oligonucleotide; AGG chr2 60493851 60493870 60493854 -
caagctgatgaggatggggg

SEQ ID NO: 179665 - DNA, 20 bp, Artificial Sequence
  Synthetic oligonucleotide; GGG chr2 60493850 60493869 60493853 -
aagctgatgaggatggggga

SEQ ID NO: 179666 - DNA, 20 bp, Artificial Sequence
  Synthetic oligonucleotide; GGG chr2 60493849 60493868 60493852 -
agctgatgaggatgggggag

SEQ ID NO: 179667 - DNA, 20 bp, Artificial Sequence
  Synthetic oligonucleotide; GGG chr2 60493848 60493867 60493851 -
gctgatgaggatgggggagg

SEQ ID NO: 179668 - DNA, 20 bp, Artificial Sequence
  Synthetic oligonucleotide; GAG chr2 60493846 60493865 60493849 -
tgatgaggatgggggagggg

SEQ ID NO: 179669 - DNA, 20 bp, Artificial Sequence
  Synthetic oligonucleotide; AGG chr2 60493845 60493864 60493848 -
gatgaggatgggggaggggg

SEQ ID NO: 179670 - DNA, 20 bp, Artificial Sequence
  Synthetic oligonucleotide; CAG chr2 60493842 60493861 60493845 -
gaggatgggggagggggagg

SEQ ID NO: 179671 - DNA, 20 bp, Artificial Sequence
  Synthetic oligonucleotide; AGG chr2 60493841 60493860 60493844 -
aggatgggggagggggaggc

SEQ ID NO: 179672 - DNA, 20 bp, Artificial Sequence
  Synthetic oligonucleotide; GGG chr2 60493840 60493859 60493843 -
ggatgggggagggggaggca

SEQ ID NO: 179673 - DNA, 20 bp, Artificial Sequence
  Synthetic oligonucleotide; GGG chr2 60493839 60493858 60493842 -
gatgggggagggggaggcag

SEQ ID NO: 179674 - DNA, 20 bp, Artificial Sequence
  Synthetic oligonucleotide; GGG chr2 60493838 60493857 60493841 -
atgggggagggggaggcagg

SEQ ID NO: 179675 - DNA, 20 bp, Artificial Sequence
  Synthetic oligonucleotide; AAG chr2 60493815 60493834 60493818 -
aatcttaatttcctgcactg

SEQ ID NO: 179676 - DNA, 20 bp, Artificial Sequence
  Synthetic oligonucleotide; CAG chr2 60493800 60493819 60493803 -
cactgaagctttgctgtcca

SEQ ID NO: 179677 - DNA, 20 bp, Artificial Sequence
  Synthetic oligonucleotide; TGG chr2 60493794 60493813 60493797 -
agctttgctgtccacagcac

SEQ ID NO: 179678 - DNA, 20 bp, Artificial Sequence
  Synthetic oligonucleotide; GGG chr2 60493793 60493812 60493796 -
gctttgctgtccacagcact

SEQ ID NO: 179679 - DNA, 20 bp, Artificial Sequence
  Synthetic oligonucleotide; CAG chr2 60493790 60493809 60493793 -
ttgctgtccacagcactggg

SEQ ID NO: 179680 - DNA, 20 bp, Artificial Sequence
  Synthetic oligonucleotide; CAG chr2 60493787 60493806 60493790 -
ctgtccacagcactgggcag

SEQ ID NO: 179681 - DNA, 20 bp, Artificial Sequence
  Synthetic oligonucleotide; TGG chr2 60493775 60493794 60493778 -
ctgggcagcagctgcctccc

SEQ ID NO: 179682 - DNA, 20 bp, Artificial Sequence
  Synthetic oligonucleotide; GAG chr2 60493773 60493792 60493776 -
gggcagcagctgcctccctg

SEQ ID NO: 179683 - DNA, 20 bp, Artificial Sequence
  Synthetic oligonucleotide; GAG chr2 60493762 60493781 60493765 -
gcctccctggagtgttgtgt

SEQ ID NO: 179684 - DNA, 20 bp, Artificial Sequence
  Synthetic oligonucleotide; AAG chr2 60493736 60493755 60493739 -
ttgatgctgtctttcttccc

SEQ ID NO: 179685 - DNA, 20 bp, Artificial Sequence
  Synthetic oligonucleotide; AGG chr2 60493735 60493754 60493738 -
tgatgctgtctttcttccca

SEQ ID NO: 179686 - DNA, 20 bp, Artificial Sequence
  Synthetic oligonucleotide; TGG chr2 60493728 60493747 60493731 -
gtctttcttcccaaggcctt

SEQ ID NO: 179687 - DNA, 20 bp, Artificial Sequence
  Synthetic oligonucleotide; AAG chr2 60493724 60493743 60493727 -
ttcttcccaaggcctttggc

SEQ ID NO: 179688 - DNA, 20 bp, Artificial Sequence
  Synthetic oligonucleotide; AGG chr2 60493723 60493742 60493726 -
tcttcccaaggcctttggca

SEQ ID NO: 179689 - DNA, 20 bp, Artificial Sequence
  Synthetic oligonucleotide; TAG chr2 60493720 60493739 60493723 -
tcccaaggcctttggcaagg

SEQ ID NO: 179690 - DNA, 20 bp, Artificial Sequence
  Synthetic oligonucleotide; AAG chr2 60493717 60493736 60493720 -
caaggcctttggcaaggtag

SEQ ID NO: 179691 - DNA, 20 bp, Artificial Sequence
  Synthetic oligonucleotide; TGG chr2 60493686 60493705 60493689 -
ttgactctccatgctgctaa

SEQ ID NO: 179692 - DNA, 20 bp, Artificial Sequence
  Synthetic oligonucleotide; GGG chr2 60493685 60493704 60493688 -
tgactctccatgctgctaat

SEQ ID NO: 179693 - DNA, 20 bp, Artificial Sequence
  Synthetic oligonucleotide; GGG chr2 60493684 60493703 60493687 -
gactctccatgctgctaatg

SEQ ID NO: 179694 - DNA, 20 bp, Artificial Sequence
  Synthetic oligonucleotide; GGG chr2 60493683 60493702 60493686 -
actctccatgctgctaatgg

SEQ ID NO: 179695 - DNA, 20 bp, Artificial Sequence
  Synthetic oligonucleotide; GAG chr2 60493681 60493700 60493684 -
tctccatgctgctaatgggg

SEQ ID NO: 179696 - DNA, 20 bp, Artificial Sequence
  Synthetic oligonucleotide; AGG chr2 60493680 60493699 60493683 -
ctccatgctgctaatggggg

SEQ ID NO: 179697 - DNA, 20 bp, Artificial Sequence
  Synthetic oligonucleotide; AAG chr2 60493671 60493690 60493674 -
gctaatgggggaggtcaact

SEQ ID NO: 179698 - DNA, 20 bp, Artificial Sequence
  Synthetic oligonucleotide; GAG chr2 60493659 60493678 60493662 -
ggtcaactaagtccatttct

SEQ ID NO: 179699 - DNA, 20 bp, Artificial Sequence
  Synthetic oligonucleotide; TAG chr2 60493655 60493674 60493658 -
aactaagtccatttctgagc

SEQ ID NO: 179700 - DNA, 20 bp, Artificial Sequence
  Synthetic oligonucleotide; TGG chr2 60493652 60493671 60493655 -
taagtccatttctgagctag

SEQ ID NO: 179701 - DNA, 20 bp, Artificial Sequence
  Synthetic oligonucleotide; GGG chr2 60493651 60493670 60493654 -
aagtccatttctgagctagt

SEQ ID NO: 179702 - DNA, 20 bp, Artificial Sequence
  Synthetic oligonucleotide; GGG chr2 60493650 60493669 60493653 -
agtccatttctgagctagtg

SEQ ID NO: 179703 - DNA, 20 bp, Artificial Sequence
  Synthetic oligonucleotide; GGG chr2 60493649 60493668 60493652 -
gtccatttctgagctagtgg

SEQ ID NO: 179704 - DNA, 20 bp, Artificial Sequence
  Synthetic oligonucleotide; TAG chr2 60493642 60493661 60493645 -
tctgagctagtgggggctct

SEQ ID NO: 179705 - DNA, 20 bp, Artificial Sequence
  Synthetic oligonucleotide; AGG chr2 60493641 60493660 60493644 -
ctgagctagtgggggctctt

SEQ ID NO: 179706 - DNA, 20 bp, Artificial Sequence
  Synthetic oligonucleotide; AAG chr2 60493620 60493639 60493623 -
ggactccgaacaccacactt

SEQ ID NO: 179707 - DNA, 20 bp, Artificial Sequence
  Synthetic oligonucleotide; CAG chr2 60493605 60493624 60493608 -
cacttaagttatctctgacc

SEQ ID NO: 179708 - DNA, 20 bp, Artificial Sequence
  Synthetic oligonucleotide; GAG chr2 60493603 60493622 60493606 -
cttaagttatctctgaccca

SEQ ID NO: 179709 - DNA, 20 bp, Artificial Sequence
  Synthetic oligonucleotide; TGG chr2 60493589 60493608 60493592 -
gacccagagtccaatttatt

SEQ ID NO: 179710 - DNA, 20 bp, Artificial Sequence
  Synthetic oligonucleotide; AAG chr2 60493561 60493580 60493564 -
ttcaaatgaatgcccatttt

SEQ ID NO: 179711 - DNA, 20 bp, Artificial Sequence
  Synthetic oligonucleotide; TGG chr2 60493551 60493570 60493554 -
tgcccattttaagaatgttt

SEQ ID NO: 179712 - DNA, 20 bp, Artificial Sequence
  Synthetic oligonucleotide; GGG chr2 60493550 60493569 60493553 -
gcccattttaagaatgtttt

SEQ ID NO: 179713 - DNA, 20 bp, Artificial Sequence
  Synthetic oligonucleotide; GGG chr2 60493549 60493568 60493552 -
cccattttaagaatgttttg

SEQ ID NO: 179714 - DNA, 20 bp, Artificial Sequence
  Synthetic oligonucleotide; TAG chr2 60493527 60493546 60493530 -
gtctcttcccatcatttcct

SEQ ID NO: 179715 - DNA, 20 bp, Artificial Sequence
  Synthetic oligonucleotide; TAG chr2 60493522 60493541 60493525 -
ttcccatcatttccttagtg

SEQ ID NO: 179716 - DNA, 20 bp, Artificial Sequence
  Synthetic oligonucleotide; TGG chr2 60493519 60493538 60493522 -
ccatcatttccttagtgtag

SEQ ID NO: 179717 - DNA, 20 bp, Artificial Sequence
  Synthetic oligonucleotide; GAG chr2 60493517 60493536 60493520 -
atcatttccttagtgtagtg

SEQ ID NO: 179718 - DNA, 20 bp, Artificial Sequence
  Synthetic oligonucleotide; GAG chr2 60493515 60493534 60493518 -
catttccttagtgtagtgga

SEQ ID NO: 179719 - DNA, 20 bp, Artificial Sequence
  Synthetic oligonucleotide; AGG chr2 60493514 60493533 60493517 -
atttccttagtgtagtggag

SEQ ID NO: 179720 - DNA, 20 bp, Artificial Sequence
  Synthetic oligonucleotide; CGG chr2 60493503 60493522 60493506 -
gtagtggagaggtttctatt

SEQ ID NO: 179721 - DNA, 20 bp, Artificial Sequence
  Synthetic oligonucleotide; TAG chr2 60493498 60493517 60493501 -
ggagaggtttctattcggaa

SEQ ID NO: 179722 - DNA, 20 bp, Artificial Sequence
  Synthetic oligonucleotide; AGG chr2 60493497 60493516 60493500 -
gagaggtttctattcggaat

SEQ ID NO: 179723 - DNA, 20 bp, Artificial Sequence
  Synthetic oligonucleotide; TGG chr2 60493486 60493505 60493489 -
attcggaataggatgacatt

SEQ ID NO: 179724 - DNA, 20 bp, Artificial Sequence
  Synthetic oligonucleotide; TAG chr2 60493483 60493502 60493486 -
cggaataggatgacatttgg

SEQ ID NO: 179725 - DNA, 20 bp, Artificial Sequence
  Synthetic oligonucleotide; GAG chr2 60493478 60493497 60493481 -
taggatgacatttggtagct

SEQ ID NO: 179726 - DNA, 20 bp, Artificial Sequence
  Synthetic oligonucleotide; CAG chr2 60493470 60493489 60493473 -
catttggtagctgagccaaa

SEQ ID NO: 179727 - DNA, 20 bp, Artificial Sequence
  Synthetic oligonucleotide; TAG chr2 60493466 60493485 60493469 -
tggtagctgagccaaacaga

SEQ ID NO: 179728 - DNA, 20 bp, Artificial Sequence
  Synthetic oligonucleotide; TGG chr2 60493462 60493481 60493465 -
agctgagccaaacagatagc

SEQ ID NO: 179729 - DNA, 20 bp, Artificial Sequence
  Synthetic oligonucleotide; GGG chr2 60493461 60493480 60493464 -
gctgagccaaacagatagct

SEQ ID NO: 179730 - DNA, 20 bp, Artificial Sequence
  Synthetic oligonucleotide; TAG chr2 60493455 60493474 60493458 -
ccaaacagatagctgggata

SEQ ID NO: 179731 - DNA, 20 bp, Artificial Sequence
  Synthetic oligonucleotide; AGG chr2 60493454 60493473 60493457 -
caaacagatagctgggatat

SEQ ID NO: 179732 - DNA, 20 bp, Artificial Sequence
  Synthetic oligonucleotide; GGG chr2 60493453 60493472 60493456 -
aaacagatagctgggatata

SEQ ID NO: 179733 - DNA, 20 bp, Artificial Sequence
  Synthetic oligonucleotide; TGG chr2 60493448 60493467 60493451 -
gatagctgggatatagggtt

SEQ ID NO: 179734 - DNA, 20 bp, Artificial Sequence
  Synthetic oligonucleotide; GAG chr2 60493446 60493465 60493449 -
tagctgggatatagggtttg

SEQ ID NO: 179735 - DNA, 20 bp, Artificial Sequence
  Synthetic oligonucleotide; CAG chr2 60493433 60493452 60493436 -
gggtttggagttgaactctc

SEQ ID NO: 179736 - DNA, 20 bp, Artificial Sequence
  Synthetic oligonucleotide; AGG chr2 60493432 60493451 60493435 -
ggtttggagttgaactctcc

SEQ ID NO: 179737 - DNA, 20 bp, Artificial Sequence
  Synthetic oligonucleotide; GGG chr2 60493431 60493450 60493434 -
gtttggagttgaactctcca

SEQ ID NO: 179738 - DNA, 20 bp, Artificial Sequence
  Synthetic oligonucleotide; TGG chr2 60493426 60493445 60493429 -
gagttgaactctccagggaa

SEQ ID NO: 179739 - DNA, 20 bp, Artificial Sequence
  Synthetic oligonucleotide; GGG chr2 60493425 60493444 60493428 -
agttgaactctccagggaat

SEQ ID NO: 179740 - DNA, 20 bp, Artificial Sequence
  Synthetic oligonucleotide; GGG chr2 60493424 60493443 60493427 -
gttgaactctccagggaatg

SEQ ID NO: 179741 - DNA, 20 bp, Artificial Sequence
  Synthetic oligonucleotide; TGG chr2 60493421 60493440 60493424 -
gaactctccagggaatgggg

SEQ ID NO: 179742 - DNA, 20 bp, Artificial Sequence
  Synthetic oligonucleotide; GGG chr2 60493420 60493439 60493423 -
aactctccagggaatggggt

SEQ ID NO: 179743 - DNA, 20 bp, Artificial Sequence
  Synthetic oligonucleotide; GAG chr2 60493418 60493437 60493421 -
ctctccagggaatggggtgg

SEQ ID NO: 179744 - DNA, 20 bp, Artificial Sequence
  Synthetic oligonucleotide; AGG chr2 60493417 60493436 60493420 -
tctccagggaatggggtggg

SEQ ID NO: 179745 - DNA, 20 bp, Artificial Sequence
  Synthetic oligonucleotide; GGG chr2 60493416 60493435 60493419 -
ctccagggaatggggtggga

SEQ ID NO: 179746 - DNA, 20 bp, Artificial Sequence
  Synthetic oligonucleotide; GGG chr2 60493415 60493434 60493418 -
tccagggaatggggtgggag

SEQ ID NO: 179747 - DNA, 20 bp, Artificial Sequence
  Synthetic oligonucleotide; GGG chr2 60493414 60493433 60493417 -
ccagggaatggggtgggagg

SEQ ID NO: 179748 - DNA, 20 bp, Artificial Sequence
  Synthetic oligonucleotide; GGG chr2 60493413 60493432 60493416 -
cagggaatggggtgggaggg

SEQ ID NO: 179749 - DNA, 20 bp, Artificial Sequence
  Synthetic oligonucleotide; CAG chr2 60493410 60493429 60493413 -
ggaatggggtgggagggggg

SEQ ID NO: 179750 - DNA, 20 bp, Artificial Sequence
  Synthetic oligonucleotide; TGG chr2 60493405 60493424 60493408 -
ggggtgggaggggggcagcc

SEQ ID NO: 179751 - DNA, 20 bp, Artificial Sequence
  Synthetic oligonucleotide; GAG chr2 60493403 60493422 60493406 -
ggtgggaggggggcagcctg

SEQ ID NO: 179752 - DNA, 20 bp, Artificial Sequence
  Synthetic oligonucleotide; AGG chr2 60493402 60493421 60493405 -
gtgggaggggggcagcctgg

SEQ ID NO: 179753 - DNA, 20 bp, Artificial Sequence
  Synthetic oligonucleotide; GAG chr2 60493389 60493408 60493392 -
agcctggaggatgacaaaat

SEQ ID NO: 179754 - DNA, 20 bp, Artificial Sequence
  Synthetic oligonucleotide; AGG chr2 60493388 60493407 60493391 -
gcctggaggatgacaaaatg

SEQ ID NO: 179755 - DNA, 20 bp, Artificial Sequence
  Synthetic oligonucleotide; GGG chr2 60493387 60493406 60493390 -
cctggaggatgacaaaatga

SEQ ID NO: 179756 - DNA, 20 bp, Artificial Sequence
  Synthetic oligonucleotide; TGG chr2 60493379 60493398 60493382 -
atgacaaaatgagggctccc

SEQ ID NO: 179757 - DNA, 20 bp, Artificial Sequence
  Synthetic oligonucleotide; TAG chr2 60493337 60493356 60493340 -
tctgtgttctcgaaatgcct

SEQ ID NO: 179758 - DNA, 20 bp, Artificial Sequence
  Synthetic oligonucleotide; AAG chr2 60493324 60493343 60493327 -
aatgccttagatgtttacct

SEQ ID NO: 179759 - DNA, 20 bp, Artificial Sequence
  Synthetic oligonucleotide; GAG chr2 60493322 60493341 60493325 -
tgccttagatgtttacctaa

SEQ ID NO: 179760 - DNA, 20 bp, Artificial Sequence
  Synthetic oligonucleotide; TAG chr2 60493314 60493333 60493317 -
atgtttacctaagagaaatg

SEQ ID NO: 179761 - DNA, 20 bp, Artificial Sequence
  Synthetic oligonucleotide; CAG chr2 60493284 60493303 60493287 -
ttcctataaacacatctaca

SEQ ID NO: 179762 - DNA, 20 bp, Artificial Sequence
  Synthetic oligonucleotide; TAG chr2 60493272 60493291 60493275 -
catctacacagtgtccattg

SEQ ID NO: 179763 - DNA, 20 bp, Artificial Sequence
  Synthetic oligonucleotide; TAG chr2 60493260 60493279 60493263 -
gtccattgtagcactgttca

SEQ ID NO: 179764 - DNA, 20 bp, Artificial Sequence
  Synthetic oligonucleotide; TGG chr2 60493257 60493276 60493260 -
cattgtagcactgttcatag

SEQ ID NO: 179765 - DNA, 20 bp, Artificial Sequence
  Synthetic oligonucleotide; AAG chr2 60493249 60493268 60493252 -
cactgttcatagtggtcaaa

SEQ ID NO: 179766 - DNA, 20 bp, Artificial Sequence
  Synthetic oligonucleotide; TGG chr2 60493246 60493265 60493249 -
tgttcatagtggtcaaaaag

SEQ ID NO: 179767 - DNA, 20 bp, Artificial Sequence
  Synthetic oligonucleotide; TGG chr2 60493231 60493250 60493234 -
aaaagtggtcacaacccaca

SEQ ID NO: 179768 - DNA, 20 bp, Artificial Sequence
  Synthetic oligonucleotide; TAG chr2 60493221 60493240 60493224 -
acaacccacatggcaaccaa

SEQ ID NO: 179769 - DNA, 20 bp, Artificial Sequence
  Synthetic oligonucleotide; AGG chr2 60493220 60493239 60493223 -
caacccacatggcaaccaat

SEQ ID NO: 179770 - DNA, 20 bp, Artificial Sequence
  Synthetic oligonucleotide; TGG chr2 60493212 60493231 60493215 -
atggcaaccaataggttgaa

SEQ ID NO: 179771 - DNA, 20 bp, Artificial Sequence
  Synthetic oligonucleotide; TGG chr2 60493197 60493216 60493200 -
ttgaatggataaacgcccta

SEQ ID NO: 179772 - DNA, 20 bp, Artificial Sequence
  Synthetic oligonucleotide; TGG chr2 60493194 60493213 60493197 -
aatggataaacgccctatgg

SEQ ID NO: 179773 - DNA, 20 bp, Artificial Sequence
  Synthetic oligonucleotide; CAG chr2 60493179 60493198 60493182 -
tatggtggaatacaactcaa

SEQ ID NO: 179774 - DNA, 20 bp, Artificial Sequence
  Synthetic oligonucleotide; TAG chr2 60493176 60493195 60493179 -
ggtggaatacaactcaacag

SEQ ID NO: 179775 - DNA, 20 bp, Artificial Sequence
  Synthetic oligonucleotide; AAG chr2 60493173 60493192 60493176 -
ggaatacaactcaacagtag

SEQ ID NO: 179776 - DNA, 20 bp, Artificial Sequence
  Synthetic oligonucleotide; AAG chr2 60493165 60493184 60493168 -
actcaacagtagaagaatga

SEQ ID NO: 179777 - DNA, 20 bp, Artificial Sequence
  Synthetic oligonucleotide; GAG chr2 60493163 60493182 60493166 -
tcaacagtagaagaatgaaa

SEQ ID NO: 179778 - DNA, 20 bp, Artificial Sequence
  Synthetic oligonucleotide; TGG chr2 60493143 60493162 60493146 -
gagtaacacactccacacca

SEQ ID NO: 179779 - DNA, 20 bp, Artificial Sequence
  Synthetic oligonucleotide; CAG chr2 60493132 60493151 60493135 -
tccacaccatggatgaatcc

SEQ ID NO: 179780 - DNA, 20 bp, Artificial Sequence
  Synthetic oligonucleotide; TGG chr2 60493114 60493133 60493117 -
cccagaatcattctgctctg

SEQ ID NO: 179781 - DNA, 20 bp, Artificial Sequence
  Synthetic oligonucleotide; AAG chr2 60493111 60493130 60493114 -
agaatcattctgctctgtgg

SEQ ID NO: 179782 - DNA, 20 bp, Artificial Sequence
  Synthetic oligonucleotide; AAG chr2 60493095 60493114 60493098 -
gtggaagaaattaaacacaa

SEQ ID NO: 179783 - DNA, 20 bp, Artificial Sequence
  Synthetic oligonucleotide; GAG chr2 60493078 60493097 60493081 -
caaaagacgatatcctgtat

SEQ ID NO: 179784 - DNA, 20 bp, Artificial Sequence
  Synthetic oligonucleotide; TAG chr2 60493057 60493076 60493060 -
agtccatttgtaacaaattc

SEQ ID NO: 179785 - DNA, 20 bp, Artificial Sequence
  Synthetic oligonucleotide; TGG chr2 60493040 60493059 60493043 -
ttctagaattctcaacactg

SEQ ID NO: 179786 - DNA, 20 bp, Artificial Sequence
  Synthetic oligonucleotide; TGG chr2 60493037 60493056 60493040 -
tagaattctcaacactgtgg

SEQ ID NO: 179787 - DNA, 20 bp, Artificial Sequence
  Synthetic oligonucleotide; TAG chr2 60493034 60493053 60493037 -
aattctcaacactgtggtgg

SEQ ID NO: 179788 - DNA, 20 bp, Artificial Sequence
  Synthetic oligonucleotide; AGG chr2 60493033 60493052 60493036 -
attctcaacactgtggtggt

SEQ ID NO: 179789 - DNA, 20 bp, Artificial Sequence
  Synthetic oligonucleotide; TGG chr2 60493030 60493049 60493033 -
ctcaacactgtggtggtagg

SEQ ID NO: 179790 - DNA, 20 bp, Artificial Sequence
  Synthetic oligonucleotide; GGG chr2 60493029 60493048 60493032 -
tcaacactgtggtggtaggt

SEQ ID NO: 179791 - DNA, 20 bp, Artificial Sequence
  Synthetic oligonucleotide; GGG chr2 60493028 60493047 60493031 -
caacactgtggtggtaggtg

SEQ ID NO: 179792 - DNA, 20 bp, Artificial Sequence
  Synthetic oligonucleotide; GGG chr2 60493027 60493046 60493030 -
aacactgtggtggtaggtgg

SEQ ID NO: 179793 - DNA, 20 bp, Artificial Sequence
  Synthetic oligonucleotide; CAG chr2 60493022 60493041 60493025 -
tgtggtggtaggtgggggtt

SEQ ID NO: 179794 - DNA, 20 bp, Artificial Sequence
  Synthetic oligonucleotide; TGG chr2 60493019 60493038 60493022 -
ggtggtaggtgggggttcag

SEQ ID NO: 179795 - DNA, 20 bp, Artificial Sequence
  Synthetic oligonucleotide; TAG chr2 60493015 60493034 60493018 -
gtaggtgggggttcagtggt

SEQ ID NO: 179796 - DNA, 20 bp, Artificial Sequence
  Synthetic oligonucleotide; AAG chr2 60493012 60493031 60493015 -
ggtgggggttcagtggttag

SEQ ID NO: 179797 - DNA, 20 bp, Artificial Sequence
  Synthetic oligonucleotide; AGG chr2 60493011 60493030 60493014 -
gtgggggttcagtggttaga

SEQ ID NO: 179798 - DNA, 20 bp, Artificial Sequence
  Synthetic oligonucleotide; AAG chr2 60493008 60493027 60493011 -
ggggttcagtggttagaagg

SEQ ID NO: 179799 - DNA, 20 bp, Artificial Sequence
  Synthetic oligonucleotide; AGG chr2 60493007 60493026 60493010 -
gggttcagtggttagaagga

SEQ ID NO: 179800 - DNA, 20 bp, Artificial Sequence
  Synthetic oligonucleotide; GGG chr2 60493006 60493025 60493009 -
ggttcagtggttagaaggaa

SEQ ID NO: 179801 - DNA, 20 bp, Artificial Sequence
  Synthetic oligonucleotide; GGG chr2 60493005 60493024 60493008 -
gttcagtggttagaaggaag

SEQ ID NO: 179802 - DNA, 20 bp, Artificial Sequence
  Synthetic oligonucleotide; CAG chr2 60493001 60493020 60493004 -
agtggttagaaggaaggggt

SEQ ID NO: 179803 - DNA, 20 bp, Artificial Sequence
  Synthetic oligonucleotide; GAG chr2 60492999 60493018 60493002 -
tggttagaaggaaggggtca

SEQ ID NO: 179804 - DNA, 20 bp, Artificial Sequence
  Synthetic oligonucleotide; AGG chr2 60492998 60493017 60493001 -
ggttagaaggaaggggtcag

SEQ ID NO: 179805 - DNA, 20 bp, Artificial Sequence
  Synthetic oligonucleotide; GGG chr2 60492997 60493016 60493000 -
gttagaaggaaggggtcaga

SEQ ID NO: 179806 - DNA, 20 bp, Artificial Sequence
  Synthetic oligonucleotide; TAG chr2 60492993 60493012 60492996 -
gaaggaaggggtcagagggt

SEQ ID NO: 179807 - DNA, 20 bp, Artificial Sequence
  Synthetic oligonucleotide; AGG chr2 60492992 60493011 60492995 -
aaggaaggggtcagagggtt

SEQ ID NO: 179808 - DNA, 20 bp, Artificial Sequence
  Synthetic oligonucleotide; GGG chr2 60492991 60493010 60492994 -
aggaaggggtcagagggtta

SEQ ID NO: 179809 - DNA, 20 bp, Artificial Sequence
  Synthetic oligonucleotide; AAG chr2 60492988 60493007 60492991 -
aaggggtcagagggttaggg

SEQ ID NO: 179810 - DNA, 20 bp, Artificial Sequence
  Synthetic oligonucleotide; AGG chr2 60492987 60493006 60492990 -
aggggtcagagggttaggga

SEQ ID NO: 179811 - DNA, 20 bp, Artificial Sequence
  Synthetic oligonucleotide; GGG chr2 60492986 60493005 60492989 -
ggggtcagagggttagggaa

SEQ ID NO: 179812 - DNA, 20 bp, Artificial Sequence
  Synthetic oligonucleotide; GGG chr2 60492985 60493004 60492988 -
gggtcagagggttagggaag

SEQ ID NO: 179813 - DNA, 20 bp, Artificial Sequence
  Synthetic oligonucleotide; CAG chr2 60492977 60492996 60492980 -
gggttagggaaggggattga

SEQ ID NO: 179814 - DNA, 20 bp, Artificial Sequence
  Synthetic oligonucleotide; AAG chr2 60492972 60492991 60492975 -
agggaaggggattgacagca

SEQ ID NO: 179815 - DNA, 20 bp, Artificial Sequence
  Synthetic oligonucleotide; AGG chr2 60492971 60492990 60492974 -
gggaaggggattgacagcaa

SEQ ID NO: 179816 - DNA, 20 bp, Artificial Sequence
  Synthetic oligonucleotide; GGG chr2 60492970 60492989 60492973 -
ggaaggggattgacagcaaa

SEQ ID NO: 179817 - DNA, 20 bp, Artificial Sequence
  Synthetic oligonucleotide; GGG chr2 60492969 60492988 60492972 -
gaaggggattgacagcaaag

SEQ ID NO: 179818 - DNA, 20 bp, Artificial Sequence
  Synthetic oligonucleotide; GAG chr2 60492963 60492982 60492966 -
gattgacagcaaaggggcat

SEQ ID NO: 179819 - DNA, 20 bp, Artificial Sequence
  Synthetic oligonucleotide; AGG chr2 60492962 60492981 60492965 -
attgacagcaaaggggcatg

SEQ ID NO: 179820 - DNA, 20 bp, Artificial Sequence
  Synthetic oligonucleotide; GGG chr2 60492961 60492980 60492964 -
ttgacagcaaaggggcatga

SEQ ID NO: 179821 - DNA, 20 bp, Artificial Sequence
  Synthetic oligonucleotide; GGG chr2 60492960 60492979 60492963 -
tgacagcaaaggggcatgag

SEQ ID NO: 179822 - DNA, 20 bp, Artificial Sequence
  Synthetic oligonucleotide; GGG chr2 60492959 60492978 60492962 -
gacagcaaaggggcatgagg

SEQ ID NO: 179823 - DNA, 20 bp, Artificial Sequence
  Synthetic oligonucleotide; TAG chr2 60492951 60492970 60492954 -
aggggcatgagggggctttc

SEQ ID NO: 179824 - DNA, 20 bp, Artificial Sequence
  Synthetic oligonucleotide; TGG chr2 60492946 60492965 60492949 -
catgagggggctttctagac

SEQ ID NO: 179825 - DNA, 20 bp, Artificial Sequence
  Synthetic oligonucleotide; TGG chr2 60492943 60492962 60492946 -
gagggggctttctagactgg

SEQ ID NO: 179826 - DNA, 20 bp, Artificial Sequence
  Synthetic oligonucleotide; TGG chr2 60492919 60492938 60492922 -
cgtgttctgtatcttgattt

SEQ ID NO: 179827 - DNA, 20 bp, Artificial Sequence
  Synthetic oligonucleotide; TGG chr2 60492916 60492935 60492919 -
gttctgtatcttgattttgg

SEQ ID NO: 179828 - DNA, 20 bp, Artificial Sequence
  Synthetic oligonucleotide; GAG chr2 60492914 60492933 60492917 -
tctgtatcttgattttggtg

SEQ ID NO: 179829 - DNA, 20 bp, Artificial Sequence
  Synthetic oligonucleotide; AGG chr2 60492913 60492932 60492916 -
ctgtatcttgattttggtgg

SEQ ID NO: 179830 - DNA, 20 bp, Artificial Sequence
  Synthetic oligonucleotide; CAG chr2 60492905 60492924 60492908 -
tgattttggtggaggccaca

SEQ ID NO: 179831 - DNA, 20 bp, Artificial Sequence
  Synthetic oligonucleotide; TGG chr2 60492891 60492910 60492894 -
gccacacagctgtatacaac

SEQ ID NO: 179832 - DNA, 20 bp, Artificial Sequence
  Synthetic oligonucleotide; AAG chr2 60492838 60492857 60492841 -
aatgacttttgttgtatgta

SEQ ID NO: 179833 - DNA, 20 bp, Artificial Sequence
  Synthetic oligonucleotide; AAG chr2 60492823 60492842 60492826 -
atgtaaagtataccttaata

SEQ ID NO: 179834 - DNA, 20 bp, Artificial Sequence
  Synthetic oligonucleotide; AAG chr2 60492817 60492836 60492820 -
agtataccttaataaagcta

SEQ ID NO: 179835 - DNA, 20 bp, Artificial Sequence
  Synthetic oligonucleotide; TGG chr2 60492789 60492808 60492792 -
caaaacaaaacacccaccac

SEQ ID NO: 179836 - DNA, 20 bp, Artificial Sequence
  Synthetic oligonucleotide; GAG chr2 60492787 60492806 60492790 -
aaacaaaacacccaccactg

SEQ ID NO: 179837 - DNA, 20 bp, Artificial Sequence
  Synthetic oligonucleotide; TGG chr2 60492784 60492803 60492787 -
caaaacacccaccactggag

SEQ ID NO: 179838 - DNA, 20 bp, Artificial Sequence
  Synthetic oligonucleotide; AAG chr2 60492777 60492796 60492780 -
cccaccactggagtggaacc

SEQ ID NO: 179839 - DNA, 20 bp, Artificial Sequence
  Synthetic oligonucleotide; TGG chr2 60492751 60492770 60492754 -
gtctgtaacctttaactgtt

SEQ ID NO: 179840 - DNA, 20 bp, Artificial Sequence
  Synthetic oligonucleotide; GGG chr2 60492750 60492769 60492753 -
tctgtaacctttaactgttt

SEQ ID NO: 179841 - DNA, 20 bp, Artificial Sequence
  Synthetic oligonucleotide; AAG chr2 60492740 60492759 60492743 -
ttaactgtttgggtctcctc

SEQ ID NO: 179842 - DNA, 20 bp, Artificial Sequence
  Synthetic oligonucleotide; TAG chr2 60492733 60492752 60492736 -
tttgggtctcctcaagactc

SEQ ID NO: 179843 - DNA, 20 bp, Artificial Sequence
  Synthetic oligonucleotide; CAG chr2 60492722 60492741 60492725 -
tcaagactctagccgtcttt

SEQ ID NO: 179844 - DNA, 20 bp, Artificial Sequence
  Synthetic oligonucleotide; AGG chr2 60492721 60492740 60492724 -
caagactctagccgtctttc

SEQ ID NO: 179845 - DNA, 20 bp, Artificial Sequence
  Synthetic oligonucleotide; GGG chr2 60492720 60492739 60492723 -
aagactctagccgtctttca

SEQ ID NO: 179846 - DNA, 20 bp, Artificial Sequence
  Synthetic oligonucleotide; TAG chr2 60492717 60492736 60492720 -
actctagccgtctttcaggg

SEQ ID NO: 179847 - DNA, 20 bp, Artificial Sequence
  Synthetic oligonucleotide; AAG chr2 60492709 60492728 60492712 -
cgtctttcagggtagcacca

SEQ ID NO: 179848 - DNA, 20 bp, Artificial Sequence
  Synthetic oligonucleotide; CAG chr2 60492699 60492718 60492702 -
ggtagcaccaaagtacattt

SEQ ID NO: 179849 - DNA, 20 bp, Artificial Sequence
  Synthetic oligonucleotide; AGG chr2 60492698 60492717 60492701 -
gtagcaccaaagtacatttc

SEQ ID NO: 179850 - DNA, 20 bp, Artificial Sequence
  Synthetic oligonucleotide; GGG chr2 60492697 60492716 60492700 -
tagcaccaaagtacatttca

SEQ ID NO: 179851 - DNA, 20 bp, Artificial Sequence
  Synthetic oligonucleotide; GAG chr2 60492690 60492709 60492693 -
aaagtacatttcagggaaat

SEQ ID NO: 179852 - DNA, 20 bp, Artificial Sequence
  Synthetic oligonucleotide; GAG chr2 60492670 60492689 60492673 -
gagaatgccctttgtattct

SEQ ID NO: 179853 - DNA, 20 bp, Artificial Sequence
  Synthetic oligonucleotide; TAG chr2 60492661 60492680 60492664 -
ctttgtattctgagatttta

SEQ ID NO: 179854 - DNA, 20 bp, Artificial Sequence
  Synthetic oligonucleotide; AAG chr2 60492658 60492677 60492661 -
tgtattctgagattttatag

SEQ ID NO: 179855 - DNA, 20 bp, Artificial Sequence
  Synthetic oligonucleotide; TGG chr2 60492654 60492673 60492657 -
ttctgagattttatagaagt

SEQ ID NO: 179856 - DNA, 20 bp, Artificial Sequence
  Synthetic oligonucleotide; CAG chr2 60492645 60492664 60492648 -
tttatagaagttggtaatga

SEQ ID NO: 179857 - DNA, 20 bp, Artificial Sequence
  Synthetic oligonucleotide; GAG chr2 60492643 60492662 60492646 -
tatagaagttggtaatgaca

SEQ ID NO: 179858 - DNA, 20 bp, Artificial Sequence
  Synthetic oligonucleotide; GAG chr2 60492641 60492660 60492644 -
tagaagttggtaatgacaga

SEQ ID NO: 179859 - DNA, 20 bp, Artificial Sequence
  Synthetic oligonucleotide; GAG chr2 60492639 60492658 60492642 -
gaagttggtaatgacagaga

SEQ ID NO: 179860 - DNA, 20 bp, Artificial Sequence
  Synthetic oligonucleotide; GAG chr2 60492637 60492656 60492640 -
agttggtaatgacagagaga

SEQ ID NO: 179861 - DNA, 20 bp, Artificial Sequence
  Synthetic oligonucleotide; GAG chr2 60492635 60492654 60492638 -
ttggtaatgacagagagaga

SEQ ID NO: 179862 - DNA, 20 bp, Artificial Sequence
  Synthetic oligonucleotide; GAG chr2 60492633 60492652 60492636 -
ggtaatgacagagagagaga

SEQ ID NO: 179863 - DNA, 20 bp, Artificial Sequence
  Synthetic oligonucleotide; GAG chr2 60492631 60492650 60492634 -
taatgacagagagagagaga

SEQ ID NO: 179864 - DNA, 20 bp, Artificial Sequence
  Synthetic oligonucleotide; GAG chr2 60492629 60492648 60492632 -
atgacagagagagagagaga

SEQ ID NO: 179865 - DNA, 20 bp, Artificial Sequence
  Synthetic oligonucleotide; GAG chr2 60492627 60492646 60492630 -
gacagagagagagagagaga

SEQ ID NO: 179866 - DNA, 20 bp, Artificial Sequence
  Synthetic oligonucleotide; GAG chr2 60492625 60492644 60492628 -
cagagagagagagagagaga

SEQ ID NO: 179867 - DNA, 20 bp, Artificial Sequence
  Synthetic oligonucleotide; GAG chr2 60492623 60492642 60492626 -
gagagagagagagagagaga

SEQ ID NO: 179868 - DNA, 20 bp, Artificial Sequence
  Synthetic oligonucleotide; GAG chr2 60492621 60492640 60492624 -
gagagagagagagagagaga

SEQ ID NO: 179869 - DNA, 20 bp, Artificial Sequence
  Synthetic oligonucleotide; GAG chr2 60492619 60492638 60492622 -
gagagagagagagagagaga

SEQ ID NO: 179870 - DNA, 20 bp, Artificial Sequence
  Synthetic oligonucleotide; AGG chr2 60492618 60492637 60492621 -
agagagagagagagagagag

SEQ ID NO: 179871 - DNA, 20 bp, Artificial Sequence
  Synthetic oligonucleotide; GGG chr2 60492617 60492636 60492620 -
gagagagagagagagagaga

SEQ ID NO: 179872 - DNA, 20 bp, Artificial Sequence
  Synthetic oligonucleotide; GAG chr2 60492615 60492634 60492618 -
gagagagagagagagagagg

SEQ ID NO: 179873 - DNA, 20 bp, Artificial Sequence
  Synthetic oligonucleotide; AGG chr2 60492614 60492633 60492617 -
agagagagagagagagaggg

SEQ ID NO: 179874 - DNA, 20 bp, Artificial Sequence
  Synthetic oligonucleotide; GAG chr2 60492605 60492624 60492608 -
gagagagagggaggcccact

SEQ ID NO: 179875 - DNA, 20 bp, Artificial Sequence
  Synthetic oligonucleotide; TGG chr2 60492601 60492620 60492604 -
gagagggaggcccactgaga

SEQ ID NO: 179876 - DNA, 20 bp, Artificial Sequence
  Synthetic oligonucleotide; GGG chr2 60492600 60492619 60492603 -
agagggaggcccactgagat

SEQ ID NO: 179877 - DNA, 20 bp, Artificial Sequence
  Synthetic oligonucleotide; GGG chr2 60492599 60492618 60492602 -
gagggaggcccactgagatg

SEQ ID NO: 179878 - DNA, 20 bp, Artificial Sequence
  Synthetic oligonucleotide; AAG chr2 60492585 60492604 60492588 -
gagatggggttatccaccat

SEQ ID NO: 179879 - DNA, 20 bp, Artificial Sequence
  Synthetic oligonucleotide; CAG chr2 60492582 60492601 60492585 -
atggggttatccaccataag

SEQ ID NO: 179880 - DNA, 20 bp, Artificial Sequence
  Synthetic oligonucleotide; GAG chr2 60492580 60492599 60492583 -
ggggttatccaccataagca

SEQ ID NO: 179881 - DNA, 20 bp, Artificial Sequence
  Synthetic oligonucleotide; TGG chr2 60492573 60492592 60492576 -
tccaccataagcagagcatt

SEQ ID NO: 179882 - DNA, 20 bp, Artificial Sequence
  Synthetic oligonucleotide; GGG chr2 60492572 60492591 60492575 -
ccaccataagcagagcattt

SEQ ID NO: 179883 - DNA, 20 bp, Artificial Sequence
  Synthetic oligonucleotide; GAG chr2 60492566 60492585 60492569 -
taagcagagcatttgggtct

SEQ ID NO: 179884 - DNA, 20 bp, Artificial Sequence
  Synthetic oligonucleotide; AAG chr2 60492563 60492582 60492566 -
gcagagcatttgggtctgag

SEQ ID NO: 179885 - DNA, 20 bp, Artificial Sequence
  Synthetic oligonucleotide; GAG chr2 60492555 60492574 60492558 -
tttgggtctgagaagcgcat

SEQ ID NO: 179886 - DNA, 20 bp, Artificial Sequence
  Synthetic oligonucleotide; TGG chr2 60492549 60492568 60492552 -
tctgagaagcgcatgagtac

SEQ ID NO: 179887 - DNA, 20 bp, Artificial Sequence
  Synthetic oligonucleotide; GAG chr2 60492545 60492564 60492548 -
agaagcgcatgagtactggt

SEQ ID NO: 179888 - DNA, 20 bp, Artificial Sequence
  Synthetic oligonucleotide; GAG chr2 60492537 60492556 60492540 -
atgagtactggtgagtatgt

SEQ ID NO: 179889 - DNA, 20 bp, Artificial Sequence
  Synthetic oligonucleotide; AGG chr2 60492536 60492555 60492539 -
tgagtactggtgagtatgtg

SEQ ID NO: 179890 - DNA, 20 bp, Artificial Sequence
  Synthetic oligonucleotide; AAG chr2 60492533 60492552 60492536 -
gtactggtgagtatgtgagg

SEQ ID NO: 179891 - DNA, 20 bp, Artificial Sequence
  Synthetic oligonucleotide; AGG chr2 60492532 60492551 60492535 -
tactggtgagtatgtgagga

SEQ ID NO: 179892 - DNA, 20 bp, Artificial Sequence
  Synthetic oligonucleotide; GAG chr2 60492530 60492549 60492533 -
ctggtgagtatgtgaggaag

SEQ ID NO: 179893 - DNA, 20 bp, Artificial Sequence
  Synthetic oligonucleotide; GAG chr2 60492528 60492547 60492531 -
ggtgagtatgtgaggaagga

SEQ ID NO: 179894 - DNA, 20 bp, Artificial Sequence
  Synthetic oligonucleotide; GAG chr2 60492526 60492545 60492529 -
tgagtatgtgaggaaggaga

SEQ ID NO: 179895 - DNA, 20 bp, Artificial Sequence
  Synthetic oligonucleotide; AAG chr2 60492522 60492541 60492525 -
tatgtgaggaaggagagagc

SEQ ID NO: 179896 - DNA, 20 bp, Artificial Sequence
  Synthetic oligonucleotide; AGG chr2 60492521 60492540 60492524 -
atgtgaggaaggagagagca

SEQ ID NO: 179897 - DNA, 20 bp, Artificial Sequence
  Synthetic oligonucleotide; GGG chr2 60492520 60492539 60492523 -
tgtgaggaaggagagagcaa

SEQ ID NO: 179898 - DNA, 20 bp, Artificial Sequence
  Synthetic oligonucleotide; GGG chr2 60492519 60492538 60492522 -
gtgaggaaggagagagcaag

SEQ ID NO: 179899 - DNA, 20 bp, Artificial Sequence
  Synthetic oligonucleotide; GAG chr2 60492517 60492536 60492520 -
gaggaaggagagagcaaggg

SEQ ID NO: 179900 - DNA, 20 bp, Artificial Sequence
  Synthetic oligonucleotide; AGG chr2 60492516 60492535 60492519 -
aggaaggagagagcaagggg

SEQ ID NO: 179901 - DNA, 20 bp, Artificial Sequence
  Synthetic oligonucleotide; TAG chr2 60492500 60492519 60492503 -
ggggaggaaatctgttttcc

SEQ ID NO: 179902 - DNA, 20 bp, Artificial Sequence
  Synthetic oligonucleotide; CAG chr2 60492492 60492511 60492495 -
aatctgttttcctagaattc

SEQ ID NO: 179903 - DNA, 20 bp, Artificial Sequence
  Synthetic oligonucleotide; CAG chr2 60492489 60492508 60492492 -
ctgttttcctagaattccag

SEQ ID NO: 179904 - DNA, 20 bp, Artificial Sequence
  Synthetic oligonucleotide; AGG chr2 60492488 60492507 60492491 -
tgttttcctagaattccagc

SEQ ID NO: 179905 - DNA, 20 bp, Artificial Sequence
  Synthetic oligonucleotide; AAG chr2 60492478 60492497 60492481 -
gaattccagcaggcttcaaa

SEQ ID NO: 179906 - DNA, 20 bp, Artificial Sequence
  Synthetic oligonucleotide; AAG chr2 60492471 60492490 60492474 -
agcaggcttcaaaaagtaaa

SEQ ID NO: 179907 - DNA, 20 bp, Artificial Sequence
  Synthetic oligonucleotide; AGG chr2 60492470 60492489 60492473 -
gcaggcttcaaaaagtaaaa

SEQ ID NO: 179908 - DNA, 20 bp, Artificial Sequence
  Synthetic oligonucleotide; GGG chr2 60492469 60492488 60492472 -
caggcttcaaaaagtaaaaa

SEQ ID NO: 179909 - DNA, 20 bp, Artificial Sequence
  Synthetic oligonucleotide; GGG chr2 60492468 60492487 60492471 -
aggcttcaaaaagtaaaaag

SEQ ID NO: 179910 - DNA, 20 bp, Artificial Sequence
  Synthetic oligonucleotide; GAG chr2 60492466 60492485 60492469 -
gcttcaaaaagtaaaaaggg

SEQ ID NO: 179911 - DNA, 20 bp, Artificial Sequence
  Synthetic oligonucleotide; AGG chr2 60492465 60492484 60492468 -
cttcaaaaagtaaaaagggg

SEQ ID NO: 179912 - DNA, 20 bp, Artificial Sequence
  Synthetic oligonucleotide; GGG chr2 60492464 60492483 60492467 -
ttcaaaaagtaaaaagggga

SEQ ID NO: 179913 - DNA, 20 bp, Artificial Sequence
  Synthetic oligonucleotide; GAG chr2 60492462 60492481 60492465 -
caaaaagtaaaaaggggagg

SEQ ID NO: 179914 - DNA, 20 bp, Artificial Sequence
  Synthetic oligonucleotide; AAG chr2 60492450 60492469 60492453 -
aggggagggagtacccaact

SEQ ID NO: 179915 - DNA, 20 bp, Artificial Sequence
  Synthetic oligonucleotide; TAG chr2 60492434 60492453 60492437 -
aactaagtttttttcttccc

SEQ ID NO: 179916 - DNA, 20 bp, Artificial Sequence
  Synthetic oligonucleotide; TAG chr2 60492410 60492429 60492413 -
aatacatttattctaaacat

SEQ ID NO: 179917 - DNA, 20 bp, Artificial Sequence
  Synthetic oligonucleotide; TAG chr2 60492401 60492420 60492404 -
attctaaacattagcccaat

SEQ ID NO: 179918 - DNA, 20 bp, Artificial Sequence
  Synthetic oligonucleotide; GAG chr2 60492367 60492386 60492370 -
ttgtttgtttgtttgttttt

SEQ ID NO: 179919 - DNA, 20 bp, Artificial Sequence
  Synthetic oligonucleotide; CAG chr2 60492363 60492382 60492366 -
ttgtttgtttgtttttgaga

SEQ ID NO: 179920 - DNA, 20 bp, Artificial Sequence
  Synthetic oligonucleotide; AGG chr2 60492362 60492381 60492365 -
tgtttgtttgtttttgagac

SEQ ID NO: 179921 - DNA, 20 bp, Artificial Sequence
  Synthetic oligonucleotide; GGG chr2 60492361 60492380 60492364 -
gtttgtttgtttttgagaca

SEQ ID NO: 179922 - DNA, 20 bp, Artificial Sequence
  Synthetic oligonucleotide; TAG chr2 60492343 60492362 60492346 -
cagggtctcgctgtgttgcc

SEQ ID NO: 179923 - DNA, 20 bp, Artificial Sequence
  Synthetic oligonucleotide; AGG chr2 60492342 60492361 60492345 -
agggtctcgctgtgttgcct

SEQ ID NO: 179924 - DNA, 20 bp, Artificial Sequence
  Synthetic oligonucleotide; TAG chr2 60492338 60492357 60492341 -
tctcgctgtgttgcctaggc

SEQ ID NO: 179925 - DNA, 20 bp, Artificial Sequence
  Synthetic oligonucleotide; GAG chr2 60492336 60492355 60492339 -
tcgctgtgttgcctaggcta

SEQ ID NO: 179926 - DNA, 20 bp, Artificial Sequence
  Synthetic oligonucleotide; TAG chr2 60492331 60492350 60492334 -
gtgttgcctaggctagagtg

SEQ ID NO: 179927 - DNA, 20 bp, Artificial Sequence
  Synthetic oligonucleotide; TGG chr2 60492328 60492347 60492331 -
ttgcctaggctagagtgtag

SEQ ID NO: 179928 - DNA, 20 bp, Artificial Sequence
  Synthetic oligonucleotide; TAG chr2 60492317 60492336 60492320 -
agagtgtagtggcatgttca

SEQ ID NO: 179929 - DNA, 20 bp, Artificial Sequence
  Synthetic oligonucleotide; CAG chr2 60492307 60492326 60492310 -
ggcatgttcatagctcactg

SEQ ID NO: 179930 - DNA, 20 bp, Artificial Sequence
  Synthetic oligonucleotide; TAG chr2 60492293 60492312 60492296 -
tcactgcagccttgatctcc

SEQ ID NO: 179931 - DNA, 20 bp, Artificial Sequence
  Synthetic oligonucleotide; AGG chr2 60492292 60492311 60492295 -
cactgcagccttgatctcct

SEQ ID NO: 179932 - DNA, 20 bp, Artificial Sequence
  Synthetic oligonucleotide; AAG chr2 60492286 60492305 60492289 -
agccttgatctcctaggctc

SEQ ID NO: 179933 - DNA, 20 bp, Artificial Sequence
  Synthetic oligonucleotide; CAG chr2 60492269 60492288 60492272 -
ctcaagccatcctgtcacct

SEQ ID NO: 179934 - DNA, 20 bp, Artificial Sequence
  Synthetic oligonucleotide; GAG chr2 60492260 60492279 60492263 -
tcctgtcacctcagcctcct

SEQ ID NO: 179935 - DNA, 20 bp, Artificial Sequence
  Synthetic oligonucleotide; TAG chr2 60492257 60492276 60492260 -
tgtcacctcagcctcctgag

SEQ ID NO: 179936 - DNA, 20 bp, Artificial Sequence
  Synthetic oligonucleotide; TGG chr2 60492253 60492272 60492256 -
acctcagcctcctgagtagc

SEQ ID NO: 179937 - DNA, 20 bp, Artificial Sequence
  Synthetic oligonucleotide; GGG chr2 60492252 60492271 60492255 -
cctcagcctcctgagtagct

SEQ ID NO: 179938 - DNA, 20 bp, Artificial Sequence
  Synthetic oligonucleotide; CAG chr2 60492245 60492264 60492248 -
ctcctgagtagctgggacga

SEQ ID NO: 179939 - DNA, 20 bp, Artificial Sequence
  Synthetic oligonucleotide; AGG chr2 60492244 60492263 60492247 -
tcctgagtagctgggacgac

SEQ ID NO: 179940 - DNA, 20 bp, Artificial Sequence
  Synthetic oligonucleotide; TGG chr2 60492225 60492244 60492228 -
caggtgcatgccaccatgcc

SEQ ID NO: 179941 - DNA, 20 bp, Artificial Sequence
  Synthetic oligonucleotide; TAG chr2 60492213 60492232 60492216 -
accatgcctggctaattttg

SEQ ID NO: 179942 - DNA, 20 bp, Artificial Sequence
  Synthetic oligonucleotide; GAG chr2 60492211 60492230 60492214 -
catgcctggctaattttgta

SEQ ID NO: 179943 - DNA, 20 bp, Artificial Sequence
  Synthetic oligonucleotide; TGG chr2 60492207 60492226 60492210 -
cctggctaattttgtagaga

SEQ ID NO: 179944 - DNA, 20 bp, Artificial Sequence
  Synthetic oligonucleotide; GAG chr2 60492205 60492224 60492208 -
tggctaattttgtagagatg

SEQ ID NO: 179945 - DNA, 20 bp, Artificial Sequence
  Synthetic oligonucleotide; CAG chr2 60492187 60492206 60492190 -
tggagtttctccctgttgcc

SEQ ID NO: 179946 - DNA, 20 bp, Artificial Sequence
  Synthetic oligonucleotide; AGG chr2 60492186 60492205 60492189 -
ggagtttctccctgttgccc

SEQ ID NO: 179947 - DNA, 20 bp, Artificial Sequence
  Synthetic oligonucleotide; TGG chr2 60492182 60492201 60492185 -
tttctccctgttgcccaggc

SEQ ID NO: 179948 - DNA, 20 bp, Artificial Sequence
  Synthetic oligonucleotide; TGG chr2 60492168 60492187 60492171 -
ccaggctggtcttgaactcc

SEQ ID NO: 179949 - DNA, 20 bp, Artificial Sequence
  Synthetic oligonucleotide; GGG chr2 60492167 60492186 60492170 -
caggctggtcttgaactcct

SEQ ID NO: 179950 - DNA, 20 bp, Artificial Sequence
  Synthetic oligonucleotide; CAG chr2 60492161 60492180 60492164 -
ggtcttgaactcctgggctc

SEQ ID NO: 179951 - DNA, 20 bp, Artificial Sequence
  Synthetic oligonucleotide; AAG chr2 60492134 60492153 60492137 -
cctcctgccttgacctccca

SEQ ID NO: 179952 - DNA, 20 bp, Artificial Sequence
  Synthetic oligonucleotide; TGG chr2 60492128 60492147 60492131 -
gccttgacctcccaaagtgc

SEQ ID NO: 179953 - DNA, 20 bp, Artificial Sequence
  Synthetic oligonucleotide; GGG chr2 60492127 60492146 60492130 -
ccttgacctcccaaagtgct

SEQ ID NO: 179954 - DNA, 20 bp, Artificial Sequence
  Synthetic oligonucleotide; CAG chr2 60492120 60492139 60492123 -
ctcccaaagtgctgggatta

SEQ ID NO: 179955 - DNA, 20 bp, Artificial Sequence
  Synthetic oligonucleotide; AGG chr2 60492119 60492138 60492122 -
tcccaaagtgctgggattac

SEQ ID NO: 179956 - DNA, 20 bp, Artificial Sequence
  Synthetic oligonucleotide; GAG chr2 60492115 60492134 60492118 -
aaagtgctgggattacaggc

SEQ ID NO: 179957 - DNA, 20 bp, Artificial Sequence
  Synthetic oligonucleotide; GAG chr2 60492113 60492132 60492116 -
agtgctgggattacaggcga

SEQ ID NO: 179958 - DNA, 20 bp, Artificial Sequence
  Synthetic oligonucleotide; CAG chr2 60492089 60492108 60492092 -
cactgtgcctgtcaccaact

SEQ ID NO: 179959 - DNA, 20 bp, Artificial Sequence
  Synthetic oligonucleotide; CAG chr2 60492076 60492095 60492079 -
accaactcagtcttattcat

SEQ ID NO: 179960 - DNA, 20 bp, Artificial Sequence
  Synthetic oligonucleotide; AAG chr2 60492059 60492078 60492062 -
catcagtatgtcttctcctt

SEQ ID NO: 179961 - DNA, 20 bp, Artificial Sequence
  Synthetic oligonucleotide; CGG chr2 60492056 60492075 60492059 -
cagtatgtcttctccttaag

SEQ ID NO: 179962 - DNA, 20 bp, Artificial Sequence
  Synthetic oligonucleotide; GAG chr2 60492054 60492073 60492057 -
gtatgtcttctccttaagcg

SEQ ID NO: 179963 - DNA, 20 bp, Artificial Sequence
  Synthetic oligonucleotide; TAG chr2 60492039 60492058 60492042 -
aagcggagatgctaacaatg

SEQ ID NO: 179964 - DNA, 20 bp, Artificial Sequence
  Synthetic oligonucleotide; AAG chr2 60492012 60492031 60492015 -
tcctgtgctgaattcctgta

SEQ ID NO: 179965 - DNA, 20 bp, Artificial Sequence
  Synthetic oligonucleotide; GAG chr2 60492008 60492027 60492011 -
gtgctgaattcctgtaaagt

SEQ ID NO: 179966 - DNA, 20 bp, Artificial Sequence
  Synthetic oligonucleotide; AGG chr2 60492007 60492026 60492010 -
tgctgaattcctgtaaagtg

SEQ ID NO: 179967 - DNA, 20 bp, Artificial Sequence
  Synthetic oligonucleotide; GGG chr2 60492006 60492025 60492009 -
gctgaattcctgtaaagtga

SEQ ID NO: 179968 - DNA, 20 bp, Artificial Sequence
  Synthetic oligonucleotide; CAG chr2 60491972 60491991 60491975 -
cctacatccatcttcctctc

SEQ ID NO: 179969 - DNA, 20 bp, Artificial Sequence
  Synthetic oligonucleotide; AAG chr2 60491952 60491971 60491955 -
cagattccctctcaatttcc

SEQ ID NO: 179970 - DNA, 20 bp, Artificial Sequence
  Synthetic oligonucleotide; AGG chr2 60491951 60491970 60491954 -
agattccctctcaatttcca

SEQ ID NO: 179971 - DNA, 20 bp, Artificial Sequence
  Synthetic oligonucleotide; TAG chr2 60491944 60491963 60491947 -
ctctcaatttccaaggtatt

SEQ ID NO: 179972 - DNA, 20 bp, Artificial Sequence
  Synthetic oligonucleotide; TGG chr2 60491911 60491930 60491914 -
atatctgaacttcatttatt

SEQ ID NO: 179973 - DNA, 20 bp, Artificial Sequence
  Synthetic oligonucleotide; CAG chr2 60491908 60491927 60491911 -
tctgaacttcatttatttgg

SEQ ID NO: 179974 - DNA, 20 bp, Artificial Sequence
  Synthetic oligonucleotide; TGG chr2 60491898 60491917 60491901 -
atttatttggcagatttgtg

SEQ ID NO: 179975 - DNA, 20 bp, Artificial Sequence
  Synthetic oligonucleotide; TGG chr2 60491874 60491893 60491877 -
ctgccttttctgaacctatt

SEQ ID NO: 179976 - DNA, 20 bp, Artificial Sequence
  Synthetic oligonucleotide; GGG chr2 60491873 60491892 60491876 -
tgccttttctgaacctattt

SEQ ID NO: 179977 - DNA, 20 bp, Artificial Sequence
  Synthetic oligonucleotide; AAG chr2 60491866 60491885 60491869 -
tctgaacctatttgggtgct

SEQ ID NO: 179978 - DNA, 20 bp, Artificial Sequence
  Synthetic oligonucleotide; AGG chr2 60491865 60491884 60491868 -
ctgaacctatttgggtgcta

SEQ ID NO: 179979 - DNA, 20 bp, Artificial Sequence
  Synthetic oligonucleotide; TGG chr2 60491856 60491875 60491859 -
tttgggtgctaaggactgta

SEQ ID NO: 179980 - DNA, 20 bp, Artificial Sequence
  Synthetic oligonucleotide; TGG chr2 60491850 60491869 60491853 -
tgctaaggactgtatggatt

SEQ ID NO: 179981 - DNA, 20 bp, Artificial Sequence
  Synthetic oligonucleotide; GGG chr2 60491849 60491868 60491852 -
gctaaggactgtatggattt

SEQ ID NO: 179982 - DNA, 20 bp, Artificial Sequence
  Synthetic oligonucleotide; TGG chr2 60491837 60491856 60491840 -
atggatttgggttcttaaca

SEQ ID NO: 179983 - DNA, 20 bp, Artificial Sequence
  Synthetic oligonucleotide; TAG chr2 60491816 60491835 60491819 -
ggaaaacgtctgtgcctgcg

SEQ ID NO: 179984 - DNA, 20 bp, Artificial Sequence
  Synthetic oligonucleotide; TGG chr2 60491810 60491829 60491813 -
cgtctgtgcctgcgtagtgt

SEQ ID NO: 179985 - DNA, 20 bp, Artificial Sequence
  Synthetic oligonucleotide; GGG chr2 60491809 60491828 60491812 -
gtctgtgcctgcgtagtgtt

SEQ ID NO: 179986 - DNA, 20 bp, Artificial Sequence
  Synthetic oligonucleotide; TGG chr2 60491799 60491818 60491802 -
gcgtagtgttgggtcctacc

SEQ ID NO: 179987 - DNA, 20 bp, Artificial Sequence
  Synthetic oligonucleotide; TGG chr2 60491791 60491810 60491794 -
ttgggtcctacctggccact

SEQ ID NO: 179988 - DNA, 20 bp, Artificial Sequence
  Synthetic oligonucleotide; CGG chr2 60491779 60491798 60491782 -
tggccacttggctctcaaca

SEQ ID NO: 179989 - DNA, 20 bp, Artificial Sequence
  Synthetic oligonucleotide; GAG chr2 60491777 60491796 60491780 -
gccacttggctctcaacacg

SEQ ID NO: 179990 - DNA, 20 bp, Artificial Sequence
  Synthetic oligonucleotide; TAG chr2 60491764 60491783 60491767 -
caacacggagtgatgatgcc

SEQ ID NO: 179991 - DNA, 20 bp, Artificial Sequence
  Synthetic oligonucleotide; AGG chr2 60491763 60491782 60491766 -
aacacggagtgatgatgcct

SEQ ID NO: 179992 - DNA, 20 bp, Artificial Sequence
  Synthetic oligonucleotide; GGG chr2 60491762 60491781 60491765 -
acacggagtgatgatgccta

SEQ ID NO: 179993 - DNA, 20 bp, Artificial Sequence
  Synthetic oligonucleotide; TGG chr2 60491749 60491768 60491752 -
atgcctagggtgttttgacg

SEQ ID NO: 179994 - DNA, 20 bp, Artificial Sequence
  Synthetic oligonucleotide; GGG chr2 60491748 60491767 60491751 -
tgcctagggtgttttgacgt

SEQ ID NO: 179995 - DNA, 20 bp, Artificial Sequence
  Synthetic oligonucleotide; CAG chr2 60491745 60491764 60491748 -
ctagggtgttttgacgtggg

SEQ ID NO: 179996 - DNA, 20 bp, Artificial Sequence
  Synthetic oligonucleotide; CAG chr2 60491741 60491760 60491744 -
ggtgttttgacgtgggcagt

SEQ ID NO: 179997 - DNA, 20 bp, Artificial Sequence
  Synthetic oligonucleotide; CAG chr2 60491736 60491755 60491739 -
tttgacgtgggcagtcagcc

SEQ ID NO: 179998 - DNA, 20 bp, Artificial Sequence
  Synthetic oligonucleotide; TGG chr2 60491731 60491750 60491734 -
cgtgggcagtcagcccagcc

SEQ ID NO: 179999 - DNA, 20 bp, Artificial Sequence
  Synthetic oligonucleotide; GAG chr2 60491729 60491748 60491732 -
tgggcagtcagcccagcctg

SEQ ID NO: 180000 - DNA, 20 bp, Artificial Sequence
  Synthetic oligonucleotide; GAG chr2 60491722 60491741 60491725 -
tcagcccagcctggagaact

SEQ ID NO: 180001 - DNA, 20 bp, Artificial Sequence
  Synthetic oligonucleotide; AGG chr2 60491721 60491740 60491724 -
cagcccagcctggagaactg

SEQ ID NO: 180002 - DNA, 20 bp, Artificial Sequence
  Synthetic oligonucleotide; GGG chr2 60491720 60491739 60491723 -
agcccagcctggagaactga

SEQ ID NO: 180003 - DNA, 20 bp, Artificial Sequence
  Synthetic oligonucleotide; GGG chr2 60491719 60491738 60491722 -
gcccagcctggagaactgag

SEQ ID NO: 180004 - DNA, 20 bp, Artificial Sequence
  Synthetic oligonucleotide; GAG chr2 60491717 60491736 60491720 -
ccagcctggagaactgaggg

SEQ ID NO: 180005 - DNA, 20 bp, Artificial Sequence
  Synthetic oligonucleotide; TGG chr2 60491676 60491695 60491679 -
ttttttcttttttctttttt

SEQ ID NO: 180006 - DNA, 20 bp, Artificial Sequence
  Synthetic oligonucleotide; GAG chr2 60491672 60491691 60491675 -
ttcttttttctttttttggt

SEQ ID NO: 180007 - DNA, 20 bp, Artificial Sequence
  Synthetic oligonucleotide; CGG chr2 60491668 60491687 60491671 -
tttttctttttttggtgaga

SEQ ID NO: 180008 - DNA, 20 bp, Artificial Sequence
  Synthetic oligonucleotide; GAG chr2 60491666 60491685 60491669 -
tttctttttttggtgagacg

SEQ ID NO: 180009 - DNA, 20 bp, Artificial Sequence
  Synthetic oligonucleotide; CGG chr2 60491647 60491666 60491650 -
ggagatttactcttgttgcc

SEQ ID NO: 180010 - DNA, 20 bp, Artificial Sequence
  Synthetic oligonucleotide; GGG chr2 60491646 60491665 60491649 -
gagatttactcttgttgccc

SEQ ID NO: 180011 - DNA, 20 bp, Artificial Sequence
  Synthetic oligonucleotide; TGG chr2 60491642 60491661 60491645 -
tttactcttgttgcccgggc

SEQ ID NO: 180012 - DNA, 20 bp, Artificial Sequence
  Synthetic oligonucleotide; TGG chr2 60491632 60491651 60491635 -
ttgcccgggctggaatgcaa

SEQ ID NO: 180013 - DNA, 20 bp, Artificial Sequence
  Synthetic oligonucleotide; CGG chr2 60491621 60491640 60491624 -
ggaatgcaatggcgcgatct

SEQ ID NO: 180014 - DNA, 20 bp, Artificial Sequence
  Synthetic oligonucleotide; CAG chr2 60491597 60491616 60491600 -
tcactgcatcttctgcctcc

SEQ ID NO: 180015 - DNA, 20 bp, Artificial Sequence
  Synthetic oligonucleotide; AGG chr2 60491596 60491615 60491599 -
cactgcatcttctgcctccc

SEQ ID NO: 180016 - DNA, 20 bp, Artificial Sequence
  Synthetic oligonucleotide; AAG chr2 60491590 60491609 60491593 -
atcttctgcctcccaggttc

SEQ ID NO: 180017 - DNA, 20 bp, Artificial Sequence
  Synthetic oligonucleotide; CAG chr2 60491574 60491593 60491577 -
gttcaagcgatctcctgcct

SEQ ID NO: 180018 - DNA, 20 bp, Artificial Sequence
  Synthetic oligonucleotide; GAG chr2 60491565 60491584 60491568 -
atctcctgcctcagcctccc

SEQ ID NO: 180019 - DNA, 20 bp, Artificial Sequence
  Synthetic oligonucleotide; TAG chr2 60491562 60491581 60491565 -
tcctgcctcagcctcccgag

SEQ ID NO: 180020 - DNA, 20 bp, Artificial Sequence
  Synthetic oligonucleotide; GAG chr2 60491557 60491576 60491560 -
cctcagcctcccgagtagct

SEQ ID NO: 180021 - DNA, 20 bp, Artificial Sequence
  Synthetic oligonucleotide; CAG chr2 60491550 60491569 60491553 -
ctcccgagtagctgagatta

SEQ ID NO: 180022 - DNA, 20 bp, Artificial Sequence
  Synthetic oligonucleotide; AGG chr2 60491549 60491568 60491552 -
tcccgagtagctgagattac

SEQ ID NO: 180023 - DNA, 20 bp, Artificial Sequence
  Synthetic oligonucleotide; CGG chr2 60491530 60491549 60491533 -
caggcatgtattaccatgcc

SEQ ID NO: 180024 - DNA, 20 bp, Artificial Sequence
  Synthetic oligonucleotide; TAG chr2 60491512 60491531 60491515 -
cccggctaattttgtatttt

SEQ ID NO: 180025 - DNA, 20 bp, Artificial Sequence
  Synthetic oligonucleotide; TAG chr2 60491509 60491528 60491512 -
ggctaattttgtatttttag

SEQ ID NO: 180026 - DNA, 20 bp, Artificial Sequence
  Synthetic oligonucleotide; GAG chr2 60491507 60491526 60491510 -
ctaattttgtatttttagta

SEQ ID NO: 180027 - DNA, 20 bp, Artificial Sequence
  Synthetic oligonucleotide; CGG chr2 60491503 60491522 60491506 -
ttttgtatttttagtagaga

SEQ ID NO: 180028 - DNA, 20 bp, Artificial Sequence
  Synthetic oligonucleotide; GGG chr2 60491502 60491521 60491505 -
tttgtatttttagtagagac

SEQ ID NO: 180029 - DNA, 20 bp, Artificial Sequence
  Synthetic oligonucleotide; GGG chr2 60491501 60491520 60491504 -
ttgtatttttagtagagacg

SEQ ID NO: 180030 - DNA, 20 bp, Artificial Sequence
  Synthetic oligonucleotide; CAG chr2 60491458 60491477 60491461 -
tgatcttgaactcctgacct

SEQ ID NO: 180031 - DNA, 20 bp, Artificial Sequence
  Synthetic oligonucleotide; AGG chr2 60491457 60491476 60491460 -
gatcttgaactcctgacctc

SEQ ID NO: 180032 - DNA, 20 bp, Artificial Sequence
  Synthetic oligonucleotide; CGG chr2 60491440 60491459 60491443 -
ctcaggtgatcctcctgccc

SEQ ID NO: 180033 - DNA, 20 bp, Artificial Sequence
  Synthetic oligonucleotide; AAG chr2 60491430 60491449 60491433 -
cctcctgccccggcctccca

SEQ ID NO: 180034 - DNA, 20 bp, Artificial Sequence
  Synthetic oligonucleotide; TGG chr2 60491424 60491443 60491427 -
gccccggcctcccaaagtgc

SEQ ID NO: 180035 - DNA, 20 bp, Artificial Sequence
  Synthetic oligonucleotide; GGG chr2 60491423 60491442 60491426 -
ccccggcctcccaaagtgct

SEQ ID NO: 180036 - DNA, 20 bp, Artificial Sequence
  Synthetic oligonucleotide; CAG chr2 60491416 60491435 60491419 -
ctcccaaagtgctgggatta

SEQ ID NO: 180037 - DNA, 20 bp, Artificial Sequence
  Synthetic oligonucleotide; AGG chr2 60491415 60491434 60491418 -
tcccaaagtgctgggattac

SEQ ID NO: 180038 - DNA, 20 bp, Artificial Sequence
  Synthetic oligonucleotide; GAG chr2 60491409 60491428 60491412 -
agtgctgggattacaggtgt

SEQ ID NO: 180039 - DNA, 20 bp, Artificial Sequence
  Synthetic oligonucleotide; CAG chr2 60491403 60491422 60491406 -
gggattacaggtgtgagcca

SEQ ID NO: 180040 - DNA, 20 bp, Artificial Sequence
  Synthetic oligonucleotide; TGG chr2 60491396 60491415 60491399 -
caggtgtgagccacagcgcc

SEQ ID NO: 180041 - DNA, 20 bp, Artificial Sequence
  Synthetic oligonucleotide; CGG chr2 60491392 60491411 60491395 -
tgtgagccacagcgcctggc

SEQ ID NO: 180042 - DNA, 20 bp, Artificial Sequence
  Synthetic oligonucleotide; GGG chr2 60491391 60491410 60491394 -
gtgagccacagcgcctggcc

SEQ ID NO: 180043 - DNA, 20 bp, Artificial Sequence
  Synthetic oligonucleotide; GAG chr2 60491389 60491408 60491392 -
gagccacagcgcctggccgg

SEQ ID NO: 180044 - DNA, 20 bp, Artificial Sequence
  Synthetic oligonucleotide; TAG chr2 60491374 60491393 60491377 -
gccgggagcatttcaaatga

SEQ ID NO: 180045 - DNA, 20 bp, Artificial Sequence
  Synthetic oligonucleotide; TAG chr2 60491370 60491389 60491373 -
ggagcatttcaaatgatagt

SEQ ID NO: 180046 - DNA, 20 bp, Artificial Sequence
  Synthetic oligonucleotide; AGG chr2 60491369 60491388 60491372 -
gagcatttcaaatgatagtt

SEQ ID NO: 180047 - DNA, 20 bp, Artificial Sequence
  Synthetic oligonucleotide; TAG chr2 60491345 60491364 60491348 -
cttccttttactgtacttaa

SEQ ID NO: 180048 - DNA, 20 bp, Artificial Sequence
  Synthetic oligonucleotide; AAG chr2 60491339 60491358 60491342 -
tttactgtacttaatagctg

SEQ ID NO: 180049 - DNA, 20 bp, Artificial Sequence
  Synthetic oligonucleotide; AGG chr2 60491338 60491357 60491341 -
ttactgtacttaatagctga

SEQ ID NO: 180050 - DNA, 20 bp, Artificial Sequence
  Synthetic oligonucleotide; GGG chr2 60491337 60491356 60491340 -
tactgtacttaatagctgaa

SEQ ID NO: 180051 - DNA, 20 bp, Artificial Sequence
  Synthetic oligonucleotide; GGG chr2 60491336 60491355 60491339 -
actgtacttaatagctgaag

SEQ ID NO: 180052 - DNA, 20 bp, Artificial Sequence
  Synthetic oligonucleotide; GGG chr2 60491335 60491354 60491338 -
ctgtacttaatagctgaagg

SEQ ID NO: 180053 - DNA, 20 bp, Artificial Sequence
  Synthetic oligonucleotide; AAG chr2 60491328 60491347 60491331 -
taatagctgaagggggccaa

SEQ ID NO: 180054 - DNA, 20 bp, Artificial Sequence
  Synthetic oligonucleotide; TGG chr2 60491305 60491324 60491308 -
tgtccatgtttgctgccctc

SEQ ID NO: 180055 - DNA, 20 bp, Artificial Sequence
  Synthetic oligonucleotide; GAG chr2 60491293 60491312 60491296 -
ctgccctctggcatcaaaat

SEQ ID NO: 180056 - DNA, 20 bp, Artificial Sequence
  Synthetic oligonucleotide; AGG chr2 60491292 60491311 60491295 -
tgccctctggcatcaaaatg

SEQ ID NO: 180057 - DNA, 20 bp, Artificial Sequence
  Synthetic oligonucleotide; TAG chr2 60491282 60491301 60491285 -
catcaaaatgaggtcctttt

SEQ ID NO: 180058 - DNA, 20 bp, Artificial Sequence
  Synthetic oligonucleotide; TAG chr2 60491279 60491298 60491282 -
caaaatgaggtcctttttag

SEQ ID NO: 180059 - DNA, 20 bp, Artificial Sequence
  Synthetic oligonucleotide; CAG chr2 60491262 60491281 60491265 -
tagtagtgctgcatttaaaa

SEQ ID NO: 180060 - DNA, 20 bp, Artificial Sequence
  Synthetic oligonucleotide; AAG chr2 60491255 60491274 60491258 -
gctgcatttaaaacagcatt

SEQ ID NO: 180061 - DNA, 20 bp, Artificial Sequence
  Synthetic oligonucleotide; TAG chr2 60491242 60491261 60491245 -
cagcattaagaatacgtttt

SEQ ID NO: 180062 - DNA, 20 bp, Artificial Sequence
  Synthetic oligonucleotide; TAG chr2 60491235 60491254 60491238 -
aagaatacgtttttagaact

SEQ ID NO: 180063 - DNA, 20 bp, Artificial Sequence
  Synthetic oligonucleotide; GAG chr2 60491221 60491240 60491224 -
agaacttagctttttgcatt

SEQ ID NO: 180064 - DNA, 20 bp, Artificial Sequence
  Synthetic oligonucleotide; AGG chr2 60491220 60491239 60491223 -
gaacttagctttttgcattg

SEQ ID NO: 180065 - DNA, 20 bp, Artificial Sequence
  Synthetic oligonucleotide; CAG chr2 60491212 60491231 60491215 -
ctttttgcattgaggatgcg

SEQ ID NO: 180066 - DNA, 20 bp, Artificial Sequence
  Synthetic oligonucleotide; AGG chr2 60491211 60491230 60491214 -
tttttgcattgaggatgcgc

SEQ ID NO: 180067 - DNA, 20 bp, Artificial Sequence
  Synthetic oligonucleotide; TGG chr2 60491208 60491227 60491211 -
ttgcattgaggatgcgcagg

SEQ ID NO: 180068 - DNA, 20 bp, Artificial Sequence
  Synthetic oligonucleotide; GAG chr2 60491203 60491222 60491206 -
ttgaggatgcgcaggtggct

SEQ ID NO: 180069 - DNA, 20 bp, Artificial Sequence
  Synthetic oligonucleotide; CAG chr2 60491187 60491206 60491190 -
ggctgagactaacttctttg

SEQ ID NO: 180070 - DNA, 20 bp, Artificial Sequence
  Synthetic oligonucleotide; TGG chr2 60491177 60491196 60491180 -
aacttctttgcagatgacca

SEQ ID NO: 180071 - DNA, 20 bp, Artificial Sequence
  Synthetic oligonucleotide; AAG chr2 60491170 60491189 60491173 -
ttgcagatgaccatggttga

SEQ ID NO: 180072 - DNA, 20 bp, Artificial Sequence
  Synthetic oligonucleotide; CAG chr2 60491166 60491185 60491169 -
agatgaccatggttgaaagt

SEQ ID NO: 180073 - DNA, 20 bp, Artificial Sequence
  Synthetic oligonucleotide; TAG chr2 60491160 60491179 60491163 -
ccatggttgaaagtcagcta

SEQ ID NO: 180074 - DNA, 20 bp, Artificial Sequence
  Synthetic oligonucleotide; GAG chr2 60491158 60491177 60491161 -
atggttgaaagtcagctata

SEQ ID NO: 180075 - DNA, 20 bp, Artificial Sequence
  Synthetic oligonucleotide; TAG chr2 60491142 60491161 60491145 -
tatagagttgcacaaccacg

SEQ ID NO: 180076 - DNA, 20 bp, Artificial Sequence
  Synthetic oligonucleotide; TGG chr2 60491138 60491157 60491141 -
gagttgcacaaccacgtagt

SEQ ID NO: 180077 - DNA, 20 bp, Artificial Sequence
  Synthetic oligonucleotide; GGG chr2 60491137 60491156 60491140 -
agttgcacaaccacgtagtt

SEQ ID NO: 180078 - DNA, 20 bp, Artificial Sequence
  Synthetic oligonucleotide; TAG chr2 60491125 60491144 60491128 -
acgtagttgggcttcacata

SEQ ID NO: 180079 - DNA, 20 bp, Artificial Sequence
  Synthetic oligonucleotide; AAG chr2 60491122 60491141 60491125 -
tagttgggcttcacatatag

SEQ ID NO: 180080 - DNA, 20 bp, Artificial Sequence
  Synthetic oligonucleotide; TGG chr2 60491105 60491124 60491108 -
tagaagatgttgtcattttt

SEQ ID NO: 180081 - DNA, 20 bp, Artificial Sequence
  Synthetic oligonucleotide; CAG chr2 60491093 60491112 60491096 -
tcattttttggtaactctgt

SEQ ID NO: 180082 - DNA, 20 bp, Artificial Sequence
  Synthetic oligonucleotide; TGG chr2 60491078 60491097 60491081 -
tctgtcagactttaccaacc

SEQ ID NO: 180083 - DNA, 20 bp, Artificial Sequence
  Synthetic oligonucleotide; CAG chr2 60491071 60491090 60491074 -
gactttaccaacctggcgca

SEQ ID NO: 180084 - DNA, 20 bp, Artificial Sequence
  Synthetic oligonucleotide; TGG chr2 60491066 60491085 60491069 -
taccaacctggcgcacagtc

SEQ ID NO: 180085 - DNA, 20 bp, Artificial Sequence
  Synthetic oligonucleotide; TGG chr2 60491062 60491081 60491065 -
aacctggcgcacagtctggt

SEQ ID NO: 180086 - DNA, 20 bp, Artificial Sequence
  Synthetic oligonucleotide; CAG chr2 60491032 60491051 60491035 -
acttcacatttgctcttctc

SEQ ID NO: 180087 - DNA, 20 bp, Artificial Sequence
  Synthetic oligonucleotide; AGG chr2 60491031 60491050 60491034 -
cttcacatttgctcttctcc

SEQ ID NO: 180088 - DNA, 20 bp, Artificial Sequence
  Synthetic oligonucleotide; GGG chr2 60491030 60491049 60491033 -
ttcacatttgctcttctcca

SEQ ID NO: 180089 - DNA, 20 bp, Artificial Sequence
  Synthetic oligonucleotide; TGG chr2 60491025 60491044 60491028 -
atttgctcttctccagggtg

SEQ ID NO: 180090 - DNA, 20 bp, Artificial Sequence
  Synthetic oligonucleotide; GGG chr2 60491024 60491043 60491027 -
tttgctcttctccagggtgt

SEQ ID NO: 180091 - DNA, 20 bp, Artificial Sequence
  Synthetic oligonucleotide; GGG chr2 60491023 60491042 60491026 -
ttgctcttctccagggtgtg

SEQ ID NO: 180092 - DNA, 20 bp, Artificial Sequence
  Synthetic oligonucleotide; TGG chr2 60491020 60491039 60491023 -
ctcttctccagggtgtgggg

SEQ ID NO: 180093 - DNA, 20 bp, Artificial Sequence
  Synthetic oligonucleotide; AAG chr2 60491010 60491029 60491013 -
gggtgtggggtggctgttta

SEQ ID NO: 180094 - DNA, 20 bp, Artificial Sequence
  Synthetic oligonucleotide; GAG chr2 60491008 60491027 60491011 -
gtgtggggtggctgtttaaa

SEQ ID NO: 180095 - DNA, 20 bp, Artificial Sequence
  Synthetic oligonucleotide; AGG chr2 60491007 60491026 60491010 -
tgtggggtggctgtttaaag

SEQ ID NO: 180096 - DNA, 20 bp, Artificial Sequence
  Synthetic oligonucleotide; GGG chr2 60491006 60491025 60491009 -
gtggggtggctgtttaaaga

SEQ ID NO: 180097 - DNA, 20 bp, Artificial Sequence
  Synthetic oligonucleotide; TGG chr2 60491003 60491022 60491006 -
gggtggctgtttaaagaggg

SEQ ID NO: 180098 - DNA, 20 bp, Artificial Sequence
  Synthetic oligonucleotide; TAG chr2 60490979 60490998 60490982 -
tattcatgctaatctttgtg

SEQ ID NO: 180099 - DNA, 20 bp, Artificial Sequence
  Synthetic oligonucleotide; AAG chr2 60490935 60490954 60490938 -
gcttttttttttttatctga

SEQ ID NO: 180100 - DNA, 20 bp, Artificial Sequence
  Synthetic oligonucleotide; AAG chr2 60490929 60490948 60490932 -
ttttttttatctgaaagttc

SEQ ID NO: 180101 - DNA, 20 bp, Artificial Sequence
  Synthetic oligonucleotide; TAG chr2 60490926 60490945 60490929 -
tttttatctgaaagttcaag

SEQ ID NO: 180102 - DNA, 20 bp, Artificial Sequence
  Synthetic oligonucleotide; CAG chr2 60490919 60490938 60490922 -
ctgaaagttcaagtagatat

SEQ ID NO: 180103 - DNA, 20 bp, Artificial Sequence
  Synthetic oligonucleotide; AAG chr2 60490916 60490935 60490919 -
aaagttcaagtagatatcag

SEQ ID NO: 180104 - DNA, 20 bp, Artificial Sequence
  Synthetic oligonucleotide; AGG chr2 60490915 60490934 60490918 -
aagttcaagtagatatcaga

SEQ ID NO: 180105 - DNA, 20 bp, Artificial Sequence
  Synthetic oligonucleotide; GGG chr2 60490914 60490933 60490917 -
agttcaagtagatatcagaa

SEQ ID NO: 180106 - DNA, 20 bp, Artificial Sequence
  Synthetic oligonucleotide; TGG chr2 60490902 60490921 60490905 -
tatcagaagggaaatgtttg

SEQ ID NO: 180107 - DNA, 20 bp, Artificial Sequence
  Synthetic oligonucleotide; GGG chr2 60490901 60490920 60490904 -
atcagaagggaaatgtttgt

SEQ ID NO: 180108 - DNA, 20 bp, Artificial Sequence
  Synthetic oligonucleotide; AAG chr2 60490894 60490913 60490897 -
gggaaatgtttgtgggtgct

SEQ ID NO: 180109 - DNA, 20 bp, Artificial Sequence
  Synthetic oligonucleotide; AAG chr2 60490891 60490910 60490894 -
aaatgtttgtgggtgctaag

SEQ ID NO: 180110 - DNA, 20 bp, Artificial Sequence
  Synthetic oligonucleotide; AGG chr2 60490890 60490909 60490893 -
aatgtttgtgggtgctaaga

SEQ ID NO: 180111 - DNA, 20 bp, Artificial Sequence
  Synthetic oligonucleotide; CAG chr2 60490868 60490887 60490871 -
gttaaaattaccattttgaa

SEQ ID NO: 180112 - DNA, 20 bp, Artificial Sequence
  Synthetic oligonucleotide; TGG chr2 60490855 60490874 60490858 -
ttttgaacagaaatgatatt

SEQ ID NO: 180113 - DNA, 20 bp, Artificial Sequence
  Synthetic oligonucleotide; TAG chr2 60490835 60490854 60490838 -
tggaaaaataacttcccttt

SEQ ID NO: 180114 - DNA, 20 bp, Artificial Sequence
  Synthetic oligonucleotide; AGG chr2 60490834 60490853 60490837 -
ggaaaaataacttccctttt

SEQ ID NO: 180115 - DNA, 20 bp, Artificial Sequence
  Synthetic oligonucleotide; AAG chr2 60490831 60490850 60490834 -
aaaataacttcccttttagg

SEQ ID NO: 180116 - DNA, 20 bp, Artificial Sequence
  Synthetic oligonucleotide; AGG chr2 60490830 60490849 60490833 -
aaataacttcccttttagga

SEQ ID NO: 180117 - DNA, 20 bp, Artificial Sequence
  Synthetic oligonucleotide; CAG chr2 60490822 60490841 60490825 -
tcccttttaggaaggtaaat

SEQ ID NO: 180118 - DNA, 20 bp, Artificial Sequence
  Synthetic oligonucleotide; TAG chr2 60490792 60490811 60490795 -
tatgctatttgttgaattcc

SEQ ID NO: 180119 - DNA, 20 bp, Artificial Sequence
  Synthetic oligonucleotide; TGG chr2 60490759 60490778 60490762 -
tatcatgtcacatgctgtgc

SEQ ID NO: 180120 - DNA, 20 bp, Artificial Sequence
  Synthetic oligonucleotide; TAG chr2 60490741 60490760 60490744 -
gctggtactttcaaatataa

SEQ ID NO: 180121 - DNA, 20 bp, Artificial Sequence
  Synthetic oligonucleotide; AAG chr2 60490738 60490757 60490741 -
ggtactttcaaatataatag

SEQ ID NO: 180122 - DNA, 20 bp, Artificial Sequence
  Synthetic oligonucleotide; AAG chr2 60490734 60490753 60490737 -
ctttcaaatataatagaagc

SEQ ID NO: 180123 - DNA, 20 bp, Artificial Sequence
  Synthetic oligonucleotide; TAG chr2 60490731 60490750 60490734 -
tcaaatataatagaagcaag

SEQ ID NO: 180124 - DNA, 20 bp, Artificial Sequence
  Synthetic oligonucleotide; AGG chr2 60490730 60490749 60490733 -
caaatataatagaagcaagt

SEQ ID NO: 180125 - DNA, 20 bp, Artificial Sequence
  Synthetic oligonucleotide; GAG chr2 60490728 60490747 60490731 -
aatataatagaagcaagtag

SEQ ID NO: 180126 - DNA, 20 bp, Artificial Sequence
  Synthetic oligonucleotide; AAG chr2 60490724 60490743 60490727 -
taatagaagcaagtaggaga

SEQ ID NO: 180127 - DNA, 20 bp, Artificial Sequence
  Synthetic oligonucleotide; GAG chr2 60490722 60490741 60490725 -
atagaagcaagtaggagaaa

SEQ ID NO: 180128 - DNA, 20 bp, Artificial Sequence
  Synthetic oligonucleotide; AAG chr2 60490708 60490727 60490711 -
gagaaagagtccctgtattg

SEQ ID NO: 180129 - DNA, 20 bp, Artificial Sequence
  Synthetic oligonucleotide; TGG chr2 60490697 60490716 60490700 -
cctgtattgaagaaactcat

SEQ ID NO: 180130 - DNA, 20 bp, Artificial Sequence
  Synthetic oligonucleotide; GGG chr2 60490696 60490715 60490699 -
ctgtattgaagaaactcatt

SEQ ID NO: 180131 - DNA, 20 bp, Artificial Sequence
  Synthetic oligonucleotide; TAG chr2 60490677 60490696 60490680 -
tgggaacacatgaaattaat

SEQ ID NO: 180132 - DNA, 20 bp, Artificial Sequence
  Synthetic oligonucleotide; GAG chr2 60490675 60490694 60490678 -
ggaacacatgaaattaatta

SEQ ID NO: 180133 - DNA, 20 bp, Artificial Sequence
  Synthetic oligonucleotide; AGG chr2 60490674 60490693 60490677 -
gaacacatgaaattaattag

SEQ ID NO: 180134 - DNA, 20 bp, Artificial Sequence
  Synthetic oligonucleotide; TAG chr2 60490669 60490688 60490672 -
catgaaattaattagaggca

SEQ ID NO: 180135 - DNA, 20 bp, Artificial Sequence
  Synthetic oligonucleotide; GAG chr2 60490667 60490686 60490670 -
tgaaattaattagaggcata

SEQ ID NO: 180136 - DNA, 20 bp, Artificial Sequence
  Synthetic oligonucleotide; AGG chr2 60490666 60490685 60490669 -
gaaattaattagaggcatag

SEQ ID NO: 180137 - DNA, 20 bp, Artificial Sequence
  Synthetic oligonucleotide; GGG chr2 60490665 60490684 60490668 -
aaattaattagaggcataga

SEQ ID NO: 180138 - DNA, 20 bp, Artificial Sequence
  Synthetic oligonucleotide; CAG chr2 60490657 60490676 60490660 -
tagaggcatagagggttaac

SEQ ID NO: 180139 - DNA, 20 bp, Artificial Sequence
  Synthetic oligonucleotide; AAG chr2 60490648 60490667 60490651 -
agagggttaaccagcaatgt

SEQ ID NO: 180140 - DNA, 20 bp, Artificial Sequence
  Synthetic oligonucleotide; AGG chr2 60490647 60490666 60490650 -
gagggttaaccagcaatgta

SEQ ID NO: 180141 - DNA, 20 bp, Artificial Sequence
  Synthetic oligonucleotide; TAG chr2 60490642 60490661 60490645 -
ttaaccagcaatgtaaggcc

SEQ ID NO: 180142 - DNA, 20 bp, Artificial Sequence
  Synthetic oligonucleotide; GAG chr2 60490635 60490654 60490638 -
gcaatgtaaggcctagatat

SEQ ID NO: 180143 - DNA, 20 bp, Artificial Sequence
  Synthetic oligonucleotide; CAG chr2 60490631 60490650 60490634 -
tgtaaggcctagatatgagt

SEQ ID NO: 180144 - DNA, 20 bp, Artificial Sequence
  Synthetic oligonucleotide; AGG chr2 60490630 60490649 60490633 -
gtaaggcctagatatgagtc

SEQ ID NO: 180145 - DNA, 20 bp, Artificial Sequence
  Synthetic oligonucleotide; GGG chr2 60490629 60490648 60490632 -
taaggcctagatatgagtca

SEQ ID NO: 180146 - DNA, 20 bp, Artificial Sequence
  Synthetic oligonucleotide; GAG chr2 60490627 60490646 60490630 -
aggcctagatatgagtcagg

SEQ ID NO: 180147 - DNA, 20 bp, Artificial Sequence
  Synthetic oligonucleotide; TGG chr2 60490624 60490643 60490627 -
cctagatatgagtcagggag

SEQ ID NO: 180148 - DNA, 20 bp, Artificial Sequence
  Synthetic oligonucleotide; TGG chr2 60490617 60490636 60490620 -
atgagtcagggagtggtgca

SEQ ID NO: 180149 - DNA, 20 bp, Artificial Sequence
  Synthetic oligonucleotide; GGG chr2 60490616 60490635 60490619 -
tgagtcagggagtggtgcat

SEQ ID NO: 180150 - DNA, 20 bp, Artificial Sequence
  Synthetic oligonucleotide; GAG chr2 60490611 60490630 60490614 -
cagggagtggtgcatgggat

SEQ ID NO: 180151 - DNA, 20 bp, Artificial Sequence
  Synthetic oligonucleotide; GAG chr2 60490600 60490619 60490603 -
gcatgggatgagtgttctat

SEQ ID NO: 180152 - DNA, 20 bp, Artificial Sequence
  Synthetic oligonucleotide; AGG chr2 60490599 60490618 60490602 -
catgggatgagtgttctatg

SEQ ID NO: 180153 - DNA, 20 bp, Artificial Sequence
  Synthetic oligonucleotide; TGG chr2 60490595 60490614 60490598 -
ggatgagtgttctatgaggt

SEQ ID NO: 180154 - DNA, 20 bp, Artificial Sequence
  Synthetic oligonucleotide; GAG chr2 60490593 60490612 60490596 -
atgagtgttctatgaggttg

SEQ ID NO: 180155 - DNA, 20 bp, Artificial Sequence
  Synthetic oligonucleotide; AAG chr2 60490590 60490609 60490593 -
agtgttctatgaggttggag

SEQ ID NO: 180156 - DNA, 20 bp, Artificial Sequence
  Synthetic oligonucleotide; AGG chr2 60490589 60490608 60490592 -
gtgttctatgaggttggaga

SEQ ID NO: 180157 - DNA, 20 bp, Artificial Sequence
  Synthetic oligonucleotide; GAG chr2 60490584 60490603 60490587 -
ctatgaggttggagaaggat

SEQ ID NO: 180158 - DNA, 20 bp, Artificial Sequence
  Synthetic oligonucleotide; AAG chr2 60490565 60490584 60490568 -
tgagattgattcttcttgct

SEQ ID NO: 180159 - DNA, 20 bp, Artificial Sequence
  Synthetic oligonucleotide; AGG chr2 60490564 60490583 60490567 -
gagattgattcttcttgcta

SEQ ID NO: 180160 - DNA, 20 bp, Artificial Sequence
  Synthetic oligonucleotide; TAG chr2 60490557 60490576 60490560 -
attcttcttgctaaggtgac

SEQ ID NO: 180161 - DNA, 20 bp, Artificial Sequence
  Synthetic oligonucleotide; AGG chr2 60490556 60490575 60490559 -
ttcttcttgctaaggtgact

SEQ ID NO: 180162 - DNA, 20 bp, Artificial Sequence
  Synthetic oligonucleotide; TAG chr2 60490553 60490572 60490556 -
ttcttgctaaggtgactagg

SEQ ID NO: 180163 - DNA, 20 bp, Artificial Sequence
  Synthetic oligonucleotide; GAG chr2 60490541 60490560 60490544 -
tgactaggtagaccttcatt

SEQ ID NO: 180164 - DNA, 20 bp, Artificial Sequence
  Synthetic oligonucleotide; AGG chr2 60490540 60490559 60490543 -
gactaggtagaccttcattg

SEQ ID NO: 180165 - DNA, 20 bp, Artificial Sequence
  Synthetic oligonucleotide; AAG chr2 60490532 60490551 60490535 -
agaccttcattgaggccttg

SEQ ID NO: 180166 - DNA, 20 bp, Artificial Sequence
  Synthetic oligonucleotide; GAG chr2 60490526 60490545 60490529 -
tcattgaggccttgaagtat

SEQ ID NO: 180167 - DNA, 20 bp, Artificial Sequence
  Synthetic oligonucleotide; CAG chr2 60490523 60490542 60490526 -
ttgaggccttgaagtatgag

SEQ ID NO: 180168 - DNA, 20 bp, Artificial Sequence
  Synthetic oligonucleotide; AGG chr2 60490522 60490541 60490525 -
tgaggccttgaagtatgagc

SEQ ID NO: 180169 - DNA, 20 bp, Artificial Sequence
  Synthetic oligonucleotide; CAG chr2 60490515 60490534 60490518 -
ttgaagtatgagcaggattc

SEQ ID NO: 180170 - DNA, 20 bp, Artificial Sequence
  Synthetic oligonucleotide; AGG chr2 60490514 60490533 60490517 -
tgaagtatgagcaggattcc

SEQ ID NO: 180171 - DNA, 20 bp, Artificial Sequence
  Synthetic oligonucleotide; GAG chr2 60490512 60490531 60490515 -
aagtatgagcaggattccag

SEQ ID NO: 180172 - DNA, 20 bp, Artificial Sequence
  Synthetic oligonucleotide; AGG chr2 60490511 60490530 60490514 -
agtatgagcaggattccagg

SEQ ID NO: 180173 - DNA, 20 bp, Artificial Sequence
  Synthetic oligonucleotide; AAG chr2 60490507 60490526 60490510 -
tgagcaggattccaggaggt

SEQ ID NO: 180174 - DNA, 20 bp, Artificial Sequence
  Synthetic oligonucleotide; GAG chr2 60490505 60490524 60490508 -
agcaggattccaggaggtaa

SEQ ID NO: 180175 - DNA, 20 bp, Artificial Sequence
  Synthetic oligonucleotide; AAG chr2 60490502 60490521 60490505 -
aggattccaggaggtaagag

SEQ ID NO: 180176 - DNA, 20 bp, Artificial Sequence
  Synthetic oligonucleotide; AAG chr2 60490499 60490518 60490502 -
attccaggaggtaagagaag

SEQ ID NO: 180177 - DNA, 20 bp, Artificial Sequence
  Synthetic oligonucleotide; AAG chr2 60490496 60490515 60490499 -
ccaggaggtaagagaagaag

SEQ ID NO: 180178 - DNA, 20 bp, Artificial Sequence
  Synthetic oligonucleotide; AAG chr2 60490491 60490510 60490494 -
aggtaagagaagaagaagaa

SEQ ID NO: 180179 - DNA, 20 bp, Artificial Sequence
  Synthetic oligonucleotide; CAG chr2 60490487 60490506 60490490 -
aagagaagaagaagaaaagc

SEQ ID NO: 180180 - DNA, 20 bp, Artificial Sequence
  Synthetic oligonucleotide; AGG chr2 60490486 60490505 60490489 -
agagaagaagaagaaaagcc

SEQ ID NO: 180181 - DNA, 20 bp, Artificial Sequence
  Synthetic oligonucleotide; AAG chr2 60490483 60490502 60490486 -
gaagaagaagaaaagccagg

SEQ ID NO: 180182 - DNA, 20 bp, Artificial Sequence
  Synthetic oligonucleotide; AGG chr2 60490482 60490501 60490485 -
aagaagaagaaaagccagga

SEQ ID NO: 180183 - DNA, 20 bp, Artificial Sequence
  Synthetic oligonucleotide; GAG chr2 60490475 60490494 60490478 -
agaaaagccaggaaggaaat

SEQ ID NO: 180184 - DNA, 20 bp, Artificial Sequence
  Synthetic oligonucleotide; CGG chr2 60490470 60490489 60490473 -
agccaggaaggaaatgagaa

SEQ ID NO: 180185 - DNA, 20 bp, Artificial Sequence
  Synthetic oligonucleotide; AAG chr2 60490467 60490486 60490470 -
caggaaggaaatgagaacgg

SEQ ID NO: 180186 - DNA, 20 bp, Artificial Sequence
  Synthetic oligonucleotide; AGG chr2 60490466 60490485 60490469 -
aggaaggaaatgagaacgga

SEQ ID NO: 180187 - DNA, 20 bp, Artificial Sequence
  Synthetic oligonucleotide; GGG chr2 60490465 60490484 60490468 -
ggaaggaaatgagaacggaa

SEQ ID NO: 180188 - DNA, 20 bp, Artificial Sequence
  Synthetic oligonucleotide; TGG chr2 60490453 60490472 60490456 -
gaacggaagggatttttact

SEQ ID NO: 180189 - DNA, 20 bp, Artificial Sequence
  Synthetic oligonucleotide; GGG chr2 60490452 60490471 60490455 -
aacggaagggatttttactt

SEQ ID NO: 180190 - DNA, 20 bp, Artificial Sequence
  Synthetic oligonucleotide; CAG chr2 60490449 60490468 60490452 -
ggaagggatttttacttggg

SEQ ID NO: 180191 - DNA, 20 bp, Artificial Sequence
  Synthetic oligonucleotide; TGG chr2 60490432 60490451 60490435 -
gggcagaatattttccttga

SEQ ID NO: 180192 - DNA, 20 bp, Artificial Sequence
  Synthetic oligonucleotide; GGG chr2 60490431 60490450 60490434 -
ggcagaatattttccttgat

SEQ ID NO: 180193 - DNA, 20 bp, Artificial Sequence
  Synthetic oligonucleotide; CGG chr2 60490426 60490445 60490429 -
aatattttccttgatgggta

SEQ ID NO: 180194 - DNA, 20 bp, Artificial Sequence
  Synthetic oligonucleotide; GGG chr2 60490425 60490444 60490428 -
atattttccttgatgggtac

SEQ ID NO: 180195 - DNA, 20 bp, Artificial Sequence
  Synthetic oligonucleotide; GGG chr2 60490424 60490443 60490427 -
tattttccttgatgggtacg

SEQ ID NO: 180196 - DNA, 20 bp, Artificial Sequence
  Synthetic oligonucleotide; AAG chr2 60490417 60490436 60490420 -
cttgatgggtacggggaact

SEQ ID NO: 180197 - DNA, 20 bp, Artificial Sequence
  Synthetic oligonucleotide; TGG chr2 60490412 60490431 60490415 -
tgggtacggggaactaagac

SEQ ID NO: 180198 - DNA, 20 bp, Artificial Sequence
  Synthetic oligonucleotide; TAG chr2 60490407 60490426 60490410 -
acggggaactaagactggaa

SEQ ID NO: 180199 - DNA, 20 bp, Artificial Sequence
  Synthetic oligonucleotide; TGG chr2 60490399 60490418 60490402 -
ctaagactggaatagaaaat

SEQ ID NO: 180200 - DNA, 20 bp, Artificial Sequence
  Synthetic oligonucleotide; GAG chr2 60490397 60490416 60490400 -
aagactggaatagaaaattg

SEQ ID NO: 180201 - DNA, 20 bp, Artificial Sequence
  Synthetic oligonucleotide; TGG chr2 60490393 60490412 60490396 -
ctggaatagaaaattggagt

SEQ ID NO: 180202 - DNA, 20 bp, Artificial Sequence
  Synthetic oligonucleotide; TGG chr2 60490386 60490405 60490389 -
agaaaattggagttggattg

SEQ ID NO: 180203 - DNA, 20 bp, Artificial Sequence
  Synthetic oligonucleotide; GAG chr2 60490384 60490403 60490387 -
aaaattggagttggattgtg

SEQ ID NO: 180204 - DNA, 20 bp, Artificial Sequence
  Synthetic oligonucleotide; TGG chr2 60490378 60490397 60490381 -
ggagttggattgtggagctc

SEQ ID NO: 180205 - DNA, 20 bp, Artificial Sequence
  Synthetic oligonucleotide; TGG chr2 60490370 60490389 60490373 -
attgtggagctctggaatga

SEQ ID NO: 180206 - DNA, 20 bp, Artificial Sequence
  Synthetic oligonucleotide; AAG chr2 60490364 60490383 60490367 -
gagctctggaatgatggctt

SEQ ID NO: 180207 - DNA, 20 bp, Artificial Sequence
  Synthetic oligonucleotide; AGG chr2 60490363 60490382 60490366 -
agctctggaatgatggctta

SEQ ID NO: 180208 - DNA, 20 bp, Artificial Sequence
  Synthetic oligonucleotide; GAG chr2 60490361 60490380 60490364 -
ctctggaatgatggcttaag

SEQ ID NO: 180209 - DNA, 20 bp, Artificial Sequence
  Synthetic oligonucleotide; TGG chr2 60490357 60490376 60490360 -
ggaatgatggcttaaggagt

SEQ ID NO: 180210 - DNA, 20 bp, Artificial Sequence
  Synthetic oligonucleotide; TAG chr2 60490343 60490362 60490346 -
aggagttggaccatatccta

SEQ ID NO: 180211 - DNA, 20 bp, Artificial Sequence
  Synthetic oligonucleotide; CAG chr2 60490336 60490355 60490339 -
ggaccatatcctatagatca

SEQ ID NO: 180212 - DNA, 20 bp, Artificial Sequence
  Synthetic oligonucleotide; GAG chr2 60490334 60490353 60490337 -
accatatcctatagatcaca

SEQ ID NO: 180213 - DNA, 20 bp, Artificial Sequence
  Synthetic oligonucleotide; AGG chr2 60490333 60490352 60490336 -
ccatatcctatagatcacag

SEQ ID NO: 180214 - DNA, 20 bp, Artificial Sequence
  Synthetic oligonucleotide; GGG chr2 60490332 60490351 60490335 -
catatcctatagatcacaga

SEQ ID NO: 180215 - DNA, 20 bp, Artificial Sequence
  Synthetic oligonucleotide; CAG chr2 60490311 60490330 60490314 -
ggctgctgaaatactctgat

SEQ ID NO: 180216 - DNA, 20 bp, Artificial Sequence
  Synthetic oligonucleotide; AAG chr2 60490308 60490327 60490311 -
tgctgaaatactctgatcag

SEQ ID NO: 180217 - DNA, 20 bp, Artificial Sequence
  Synthetic oligonucleotide; AAG chr2 60490302 60490321 60490305 -
aatactctgatcagaagaca

SEQ ID NO: 180218 - DNA, 20 bp, Artificial Sequence
  Synthetic oligonucleotide; AGG chr2 60490301 60490320 60490304 -
atactctgatcagaagacaa

SEQ ID NO: 180219 - DNA, 20 bp, Artificial Sequence
  Synthetic oligonucleotide; CAG chr2 60490298 60490317 60490301 -
ctctgatcagaagacaaagg

SEQ ID NO: 180220 - DNA, 20 bp, Artificial Sequence
  Synthetic oligonucleotide; TAG chr2 60490290 60490309 60490293 -
agaagacaaaggcagcatgc

SEQ ID NO: 180221 - DNA, 20 bp, Artificial Sequence
  Synthetic oligonucleotide; AGG chr2 60490289 60490308 60490292 -
gaagacaaaggcagcatgct

SEQ ID NO: 180222 - DNA, 20 bp, Artificial Sequence
  Synthetic oligonucleotide; GGG chr2 60490288 60490307 60490291 -
aagacaaaggcagcatgcta

SEQ ID NO: 180223 - DNA, 20 bp, Artificial Sequence
  Synthetic oligonucleotide; GGG chr2 60490287 60490306 60490290 -
agacaaaggcagcatgctag

SEQ ID NO: 180224 - DNA, 20 bp, Artificial Sequence
  Synthetic oligonucleotide; AAG chr2 60490279 60490298 60490282 -
gcagcatgctaggggatgtt

SEQ ID NO: 180225 - DNA, 20 bp, Artificial Sequence
  Synthetic oligonucleotide; GAG chr2 60490275 60490294 60490278 -
catgctaggggatgttaagt

SEQ ID NO: 180226 - DNA, 20 bp, Artificial Sequence
  Synthetic oligonucleotide; AGG chr2 60490274 60490293 60490277 -
atgctaggggatgttaagtg

SEQ ID NO: 180227 - DNA, 20 bp, Artificial Sequence
  Synthetic oligonucleotide; AAG chr2 60490263 60490282 60490266 -
tgttaagtgaggactctgca

SEQ ID NO: 180228 - DNA, 20 bp, Artificial Sequence
  Synthetic oligonucleotide; AGG chr2 60490262 60490281 60490265 -
gttaagtgaggactctgcaa

SEQ ID NO: 180229 - DNA, 20 bp, Artificial Sequence
  Synthetic oligonucleotide; GGG chr2 60490261 60490280 60490264 -
ttaagtgaggactctgcaaa

SEQ ID NO: 180230 - DNA, 20 bp, Artificial Sequence
  Synthetic oligonucleotide; GGG chr2 60490260 60490279 60490263 -
taagtgaggactctgcaaag

SEQ ID NO: 180231 - DNA, 20 bp, Artificial Sequence
  Synthetic oligonucleotide; GGG chr2 60490259 60490278 60490262 -
aagtgaggactctgcaaagg

SEQ ID NO: 180232 - DNA, 20 bp, Artificial Sequence
  Synthetic oligonucleotide; TGG chr2 60490256 60490275 60490259 -
tgaggactctgcaaaggggg

SEQ ID NO: 180233 - DNA, 20 bp, Artificial Sequence
  Synthetic oligonucleotide; GAG chr2 60490251 60490270 60490254 -
actctgcaaagggggtggat

SEQ ID NO: 180234 - DNA, 20 bp, Artificial Sequence
  Synthetic oligonucleotide; GAG chr2 60490216 60490235 60490219 -
tctgttatacccttcatgcc

SEQ ID NO: 180235 - DNA, 20 bp, Artificial Sequence
  Synthetic oligonucleotide; TAG chr2 60490188 60490207 60490191 -
ccctgttgacttatatgttc

SEQ ID NO: 180236 - DNA, 20 bp, Artificial Sequence
  Synthetic oligonucleotide; GAG chr2 60490186 60490205 60490189 -
ctgttgacttatatgttcta

SEQ ID NO: 180237 - DNA, 20 bp, Artificial Sequence
  Synthetic oligonucleotide; AGG chr2 60490185 60490204 60490188 -
tgttgacttatatgttctag

SEQ ID NO: 180238 - DNA, 20 bp, Artificial Sequence
  Synthetic oligonucleotide; TGG chr2 60490181 60490200 60490184 -
gacttatatgttctagagga

SEQ ID NO: 180239 - DNA, 20 bp, Artificial Sequence
  Synthetic oligonucleotide; GAG chr2 60490179 60490198 60490182 -
cttatatgttctagaggatg

SEQ ID NO: 180240 - DNA, 20 bp, Artificial Sequence
  Synthetic oligonucleotide; TGG chr2 60490175 60490194 60490178 -
tatgttctagaggatggagt

SEQ ID NO: 180241 - DNA, 20 bp, Artificial Sequence
  Synthetic oligonucleotide; TAG chr2 60490165 60490184 60490168 -
aggatggagttggttgaccg

SEQ ID NO: 180242 - DNA, 20 bp, Artificial Sequence
  Synthetic oligonucleotide; AGG chr2 60490164 60490183 60490167 -
ggatggagttggttgaccgt

SEQ ID NO: 180243 - DNA, 20 bp, Artificial Sequence
  Synthetic oligonucleotide; GGG chr2 60490163 60490182 60490166 -
gatggagttggttgaccgta

SEQ ID NO: 180244 - DNA, 20 bp, Artificial Sequence
  Synthetic oligonucleotide; TAG chr2 60490149 60490168 60490152 -
accgtagggtttcctttcac

SEQ ID NO: 180245 - DNA, 20 bp, Artificial Sequence
  Synthetic oligonucleotide; CAG chr2 60490146 60490165 60490149 -
gtagggtttcctttcactag

SEQ ID NO: 180246 - DNA, 20 bp, Artificial Sequence
  Synthetic oligonucleotide; TGG chr2 60490141 60490160 60490144 -
gtttcctttcactagcagaa
